(19) United States
(12) Patent Application Publication
(10) Pub. No.: US 2025/0236857 A1
(43) Pub. Date: Jul. 24, 2025

(54) ENGINEERED CHIMERIC ISCB POLYPEPTIDES AND USES THEREOF

(71) Applicants: THE BROAD INSTITUTE, INC., Cambridge, MA (US); MASSACHUSETTS INSTITUTE OF TECHNOLOGY, Cambridge, MA (US)

(72) Inventors: Feng Zhang, Cambridge, MA (US); Han Altae-Tran, Cambridge, MA (US); Soumya Kannan, Cambridge, MA (US)

(21) Appl. No.: 18/956,654

(22) Filed: Nov. 22, 2024

Related U.S. Application Data
(63) Continuation of application No. PCT/US2023/067370, filed on May 23, 2023.
(60) Provisional application No. 63/344,896, filed on May 23, 2022.
(60) Provisional application No. 63/349,313, filed on Jun. 6, 2022.

(51) Int. Cl. C12N 9/22; C12N 9/78; C12N 15/11; C12N 15/90

(52) U.S. Cl. CPC C12N 9/226; C12N 9/78; C12N 15/11; C12N 15/907; C12Y 305/04004; C07K 2319/00; C12N 2310/20

(57) ABSTRACT

Chimeric, engineered DNA-targeting IscB systems, methods and compositions including novel chimeric IscB polypeptides and reprogrammable targeting nucleic acid components and methods and application of use are provided.

### CROSS-REFERENCE TO RELATED APPLICATIONS

[0001] This application is a continuation of International Application No. PCT/US2023/067370 filed May 23, 2023, which claims the benefit of U.S. Provisional Application No. 63/344,896, filed May 23, 2022 and U.S. Provisional Application No. 63/349,313, filed Jun. 6, 2022. The entire contents of the above-identified applications are hereby fully incorporated herein by reference.

### STATEMENT REGARDING FEDERALLY SPONSORED RESEARCH

[0002] This invention was made with government support under Grant Nos. HL141201 and HG009761 awarded by The National Institutes of Health. The government has certain rights in the invention.

### REFERENCE TO AN ELECTRONIC SEQUENCE LISTING

[0003] The contents of the electronic sequence listing (“BROD-5590US_ST26_Revised.xml”; Size is 39,082,799 bytes and it was created on Apr. 11, 2025) is herein incorporated by reference in its entirety.

### TECHNICAL FIELD

[0004] The subject matter disclosed herein is generally directed to systems, methods and compositions used for targeted gene modification and nucleic acid editing utilizing systems comprising engineered IscB compositions. In particular, compositions comprising chimeric IscB polypeptides with increased specificity or activity relative to unmodified IscB polypeptides are provided.

### BACKGROUND

[0005] IscB compositions comprising IscB polypeptides and an ωRNA molecule that can be engineered to direct sequence specific binding of the IscB polypeptide to a target polynucleotide. Further improvement of the systems, including increased specificity and activity would be additional desirable tools in genome engineering and biotechnology that would further advance the art.

[0006] Citation or identification of any document in this application is not an admission that such a document is available as prior art to the present invention.

### SUMMARY

[0007] In one aspect, as described herein, an engineered IscB composition comprising: a) an IscB polypeptide comprising one or more insertions of a heterologous polypeptide, and optionally one or more modified amino acids, that increases specificity or activity of the chimeric IscB polypeptide relative to wildtype; and b) an ωRNA molecule comprising a scaffold and a reprogrammable spacer sequence, the ωRNA molecule capable of forming a complex with the IscB polypeptide and directing sequence-specific binding of the IscB polypeptide to a target polynucleotide.

[0008] In an example embodiment, the insertion is a Rec domain, or functional fragment thereof. In an example embodiment, the Rec domain is from a Type II Cas polypeptide. In an example embodiment, the Rec domain is a Rec domain from a Type II-D Cas polypeptide. In an example embodiment, the Rec domain is a Rec domain from a Cas9. In an example embodiment, the Cas9 is derived from Francisella novicida (FnoCas9), Neisseria meningitidis (NmeCas9), Staphylococcus aureus (SaCas9), Streptococcus pyogenes (SpCas9), Streptococcus thermophilus (StCas9), Acidothermus cellulolyticus (AceCas9), Campylobacter jejuni (CjeCas9) or a combination thereof. In an example embodiment, the Rec domain is inserted between amino acids 153-160 of Rd8_117 polypeptide from Table 1, or an analogous position of another IscB polypeptide.

[0009] In an example embodiment, the ωRNA comprises a deletion that reduces steric interference with the inserted Rec domain. In an example embodiment, the deletion is in the PK-loop of the ωRNA. In an example embodiment, the deletion comprises 1 to 30 nucleotides of SEQ ID NO: (reference ωRNA) or an analogous position in another ωRNA.

[0010] In an example embodiment, the insertion is a protein capable of binding to RNA, DNA, or both. In an example embodiment, the insertion is a nuclease, or a functional fragment thereof. In an example embodiment, the insertion is an endonuclease, exonuclease, or functional fragment thereof. In an example embodiment, the endonuclease is a Ribonuclease (RNase), deoxyribonuclease (DNase), or fragment thereof. In an example embodiment, the insertion is hybrid binding domain (HBD). In an example embodiment, the insertion is a RuvC domain or portion thereof. In an example embodiment, the RuvC domain comprises a Cas9 RuvC domain/region, subdomain/subregion, or portion thereof.

[0011] In an example embodiment, the insertion is a TAM interacting (TI) or PAM interacting (PI) domain, or functional fragment thereof. In an example embodiment, the domain is an NGG PI or TI domain, or functional fragment thereof. In an example embodiment, TAM determining region comprises one or more amino acid substitutions. In an example embodiment, the insertion is in the WED/adaptor stabilizer region, the Tudor domain, Tudor Lance domain, or a combination thereof. In an example embodiment, the insertion preserves RNA interaction with the TAM determining region. In an example embodiment, the TI domain, PI domain, or functional fragment thereof is inserted between amino acids 365-499 of Rd8_117 from Table 1, or an analogous position of another IscB polypeptide. In an example embodiment, the TI domain, PI domain, or functional fragment thereof is from a Type II Cas polypeptide. In an example embodiment, the TI domain or functional fragment thereof is from an IscB polypeptide.

[0012] In an example embodiment, the insertion replaces amino acids 365-499, 369-499, 462-486 (Lance), 450-486 (Tudor), or 376-383, 436-448, and 462-486 (Lance_TIL) of the TI domain of IscB polypeptide Rd8_117 from Table 1, or an analogous position of another IscB polypeptide. In an example embodiment, the TAM of the wild-type IscB polypeptide is retained or wherein the TAM is modified. In an example embodiment, the insertion comprises one or more amino acid positions from 380-735 from SEQ ID NO: 2365 one or more amino acid positions 556-609 from cA2 ProCas9-2, one or more amino acid positions 356-420 from IscB_Rd8_149, one or more amino acid positions 386-464 from IscB_Rd4_7, one or more amino acid positions 856-924 from Cas9_971, one or more amino acid positions 569-751 from Cas9_1079_3, one or more amino acid positions from ChlorIscB, one or more amino acid positions 488-512 from SEQ ID NO: 2367, one or more amino acid positions 739-765 from SEQ ID NO: 2365, one or more amino acid positions 407-431 from IscB_Rd8_127, one or more amino acid positions 404-430 from CRISPR IscB 00644, one or more amino acid positions 376-482 from IscB_large_28, one or more amino acid positions 356-488 from IscB_Rd8_149, one or more amino acid positions 376_482 from IscB_Rd8_75, one or more amino acid positions 374-495 from IscB_Rd8_151, one or more amino acid positions 376-477 from IscB_Rd8_23, one or more amino acid positions 376-477 from IscB_Rd8_24, one or more amino acid positions 376-486 from IscB_Rd8_118, one or more amino acid positions 374-495 from IscB_Rd8_151, and/or one or more amino acid positions 376-486 amino acids from IscB_Rd8_118.

[0013] In an example embodiment, one or more nucleotides in a pseudoknot nexus of the ωRNA is modified and/or inserted. In an example embodiment, one or more nucleotides in a nexus stem of the ωRNA that base pair to the one or more nucleotides in the pseudoknot nexus is modified and/or inserted. In an example embodiment, a base pair comprising a nucleotide in the pseudoknot nexus and a nucleotide in the nexus stem is substituted with a complementary base pair. In an example embodiment, one or more nucleotides in a pseudoknot region of the ωRNA are modified and/or inserted and wherein the nexus stem retains base pairing. In an example embodiment, one or more nucleotides in a pseudoknot region of the ωRNA are modified and/or inserted and wherein the pseudoknot retains its structure relative to a wild-type IscB. In an example embodiment, the pseudoknot region of the ωRNA retains its structure by no less than 50%, no less than 55%, no less than 60%, no less than 65%, no less than 70%, no less than 75%, no less than 80%, no less than 85%, no less than 90%, no less than 95% relative to a wild-type IscB. In an example embodiment, the pseudoknot comprises a peptide nucleic acid (PNA).

[0014] In an example embodiment, the 3′-end of the ωRNA is truncated. In an example embodiment, the 3′-end of the ωRNA is truncated by 1, 2, 3, 4, 5, 6, 7, 8, 9, 10, 11, 12, 13, 14, 15, 16, 17, 18, 19, 20, 21, 22, 23, 24, or 25 nucleotides. In an example embodiment, a RNA supplied in trans is bound to a 3′-end of the ωRNA. In an example embodiment, one or more amino acids in contact with a nucleotide are substituted or removed. In an example embodiment, one or more amino acids in contact with the ωRNA are substituted or removed. In an example embodiment, one or more amino acids on the surface of the engineered IscB are substituted or removed.

[0015] In an example embodiment, the one or more amino acids on the surface of the engineered IscB are substituted to have a different charge. In an example embodiment, the one or more amino acids on the surface of the engineered IscB are removed or substituted to increase or decrease the overall charge of the protein surface. In an example embodiment, the surface charge of the engineered IscB is more neutral relative to the wildtype.

[0016] In an example embodiment, the IscB further comprises a nucleotide deaminase. In an example embodiment, the insertion is a nucleotide deaminase. In an example embodiment, the nucleotide deaminase is an adenosine deaminase or cytidine deaminase. In an example embodiment, the nucleotide deaminase is inserted in the middle of the IscB or fused at the N terminus or C-terminus of the IscB polypeptide. In an example embodiment, the cytosine deaminase is apolipoprotein B mRNA-editing enzyme, catalytic polypeptide (APOBEC), an activation-induced deaminase (AID), a cytidine deaminase 1 (CDA1), or cytosine deaminase acting on RNA (CDAR). In an example embodiment, the adenosine deaminase is ADAR or TadA. In an example embodiment, the adenosine deaminase is an ADAR and the reprogrammable spacer sequence of the ωRNA molecule comprises one or more mismatches to the target polynucleotide. In an example embodiment, the C-terminus is engineered for base-editing. In an example embodiment, the insertion is a transposase. In an example embodiment, the transposase is a TnpA.

[0017] In an example embodiment, the engineered IscB further comprises a functional domain. In an example embodiment, the functional domain comprises a base editing system or fragment thereof. In an example embodiment, the functional domain comprises a prime editing system or fragment thereof. In an example embodiment, the functional domain comprises an epigenetic editing system or fragment thereof. In an example embodiment, the functional domain is inserted at a junction. In an aspect, described herein, is a method of modifying a target polynucleotide comprising contacting a cell with a composition of any of the preceding claims.

[0018] These and other aspects, objects, features, and advantages of the example embodiments will become apparent to those having ordinary skill in the art upon consideration of the following detailed description of example embodiments.

### BRIEF DESCRIPTION OF THE DRAWINGS

[0019] An understanding of the features and advantages of the present invention will be obtained by reference to the following detailed description that sets forth illustrative embodiments, in which the principles of the invention may be utilized, and the accompanying drawings of which:

[0020] FIG. 1A-1B—(1A) Ribbon diagram of CjeCas9 domains, including REC helical bundle involved in RNA stem binding; (1B) Diagram of IscB domains, including REC helical bundle involved in RNA stem binding.

[0021] FIG. 2A-2B—(2A) Ribbon diagram showing early REC-domains have IscB-L-compatible join locations; (2B) sequence diagramming junctions for insertion of REC domains, with insertions within positions 153-160 on Rd8_117 IscB.

[0022] FIG. 3—Ribbon diagram showing insertion of example II-D Cas9 REC3 domain into IscB.

[0023] FIG. 4A-4C—(4A) Includes ribbon diagram showing example PK-loop of ωRNA clashes with many REC domains, designed insertion location shown; (4B) ribbon diagram depicting REC-like ωRNA region; (4C) highlighted REC-like ωRNA region in ribbon diagram with approach to remove clashing region and rejoin with linker.

[0024] FIG. 5A-5B—(5A) Ribbon diagram including small region of CjeCas9 REC fragment inserted into Rd8_117 shows classh-free folding; (5B) Alphafold2 models show clash-free folding for Rd8_117 IscB+CjeCas9 REC fragment.

[0025] FIG. 6—Alphafold2 model showing new RNA/DNA hybrid recognizing groove in example IscB polypeptide.

[0026] FIG. 7—Ribbon diagram of RNaseH insertion in same region of example IscB shows fit, but that may need some rearrangement; this region of IscB can also permit other domain insertions.

[0027] FIG. 8—FnCas9 guide RNA circularly reroutes ωRNAs.

[0028] FIG. 9—Example IscB ribbon diagram showing 2 TAM determining regions, with WED/adaptor stabilizer region and Rud domain region highlighted.

[0029] FIG. 10—Example IscB ribbon diagram with strong polar and hydrophobic interactions suggesting reduction in TAM length could present challenge.

[0030] FIG. 11—Ribbon diagram of IscB polypeptide indicated large structural diversity exists in both the WED/adaptor stabilizer domain and the tudor core+divergent extensions.

[0031] FIG. 12—Ribbon diagram for example IscB polypeptide Rd8_117 that has 3 key contacts with TAM-proximal DNA.

[0032] FIG. 13A-13F—Example IscB polypeptide engineering approaches (13A) full TI domain exchange with an NGG TAM/PAM; (13B) RNA interaction-preserving insertions with large IscBs which can include insertion at one linker, two linkers, and/or the tudor lance region which can correspond to Rd8_117 amino acid positions 376-383, 446-448, and 462-486; (13C) exchange of Tudor Lance region with NGG TAM/PAMs; (13D) exchange of Tudor region with NGG TAM/PAMs; (13E) depicts more comprehensive insertions with domains of IscB polypeptide Rd8_149; (13F) depicts more comprehensive insertions with domains of IscB polypeptide Diverse_7.

[0033] FIG. 14—Depicts IscB polypeptide Rd8_117 C-terminal helix interacting with nucleotide strand.

[0034] FIG. 15—Depiction of pseudoknot (PK) region of ωRNA as a transRNA off-switch.

[0035] FIG. 16—Depiction of terminal hairpin region of ωRNA as a transRNA on-switch.

[0036] FIG. 17—Includes gel showing chimeric IscBs with Cas9 REC domains are functional in vitro.

[0037] FIG. 18—Includes gel of chimeric IscBs with Cas9 REC domains to extend enforced guide:target duplex are functional in vitro; REC domain insertions in Rd8_117 IscB.

[0038] FIG. 19—Charts chimeric IscBs with Cas9 REC domains mediate indel formation in human cells (Rd8_117) % indels for protein/REC insertion for guide 1 and guide 2.

[0039] FIG. 20A-20B—(20A) REC insertions destabilize TAM-distal guide mismatches for example guide mismatches; (20B) results of guides with varying mismatches.

[0040] FIG. 21—1261 REC graft in example IscB polypeptide accesses more target sites and improves indel activity in general at varying loci.

[0041] FIG. 22A-22F—(22A) Weblogo shows no changes in TAM of example Rd8_117 IscB polypeptide with insertion of full TI domain; (22B) weblogo shows no changes in TAM of example Rd8_117 IscB polypeptide with partial domain insertion; (22C) weblogo shows no changes in TAM of example Rd8_117 IscB polypeptide with Tudor domain insertion; (22D) weblogo shows no changes in TAM of example Rd8_117 IscB polypeptide with Lance domain insertion; (22E) weblogo shows some Lance TIL domain insertions retain same TAM in example Rd8_117 IscB polypeptide; (22F) weblogo shows insertion of Lance_TIL domain can lead to alterations in TAM of example Rd8_117 IscB polypeptide.

[0042] FIG. 23—Weblogo of altered TAMs in comparison to TAM from wild-type Rd_117 IscB polypeptide.

[0043] FIG. 24A-24D—ωRNA engineering in example Rd8_117 IscB polypeptide. (24A) Rd8_117 can tolerate up to 21 nucleotides truncated from the 3′ end of the ωRNA; (24B-C) Insertions in nexus pseudoknot are minimally functional; (24D) Insertions in nexus pseudoknot can be rescued by compensating insertions in nexus stem.

[0044] FIG. 25—Sequence map for Rd8_117_REC_SpCas9_RuvC_loop insertion.

[0045] FIG. 26—Sequence map for Rd8_66_SpyCas9_Hyb_Stab_ins1.

[0046] FIG. 27—Sequence map for Rd8_117_2089_REC_ins1.

[0047] FIG. 28—Sequence map for Rd8_117_Ace_REC_ins1.

[0048] FIG. 29—Sequence map for Rd8_117_Cas9_665_REC_ins1.

[0049] FIG. 30—Sequence map for Rd8_117_Cas9_971_1_REC_ins1.

[0050] FIG. 31—Sequence map for Rd8_117_Cas9_971_2_REC_ins1.

[0051] FIG. 32—Sequence map for Rd8_117_Cas9_1079_1_REC_ins1.

[0052] FIG. 33—Sequence map for Rd8_117_Cas9_1079_2_REC_ins1.

[0053] FIG. 34—Sequence map for Rd8_117_Cas9_1079_3_REC_ins1.

[0054] FIG. 35—Sequence map for Rd8_117_Cas9_1079_4_REC_ins1.prot.

[0055] FIG. 36—Sequence map for Rd8_117_Cas9_1261_REC_ins1.

[0056] FIG. 37—Sequence map for Rd8_117_Cdi_REC_ins1.

[0057] FIG. 38—Sequence map for Rd8_117_Cje_REC_ins1.

[0058] FIG. 39—Sequence map for Rd8_117_Fno_REC_ins1.prot.

[0059] FIG. 40—Sequence map for Rd8_117_Fno_REC_ins2.

[0060] FIG. 41—Sequence map for Rd8_117_Fno_REC_ins3.

[0061] FIG. 42—Sequence map for Rd8_117_Fno_REC_ins3.

[0062] FIG. 43—Sequence map for Rd8_117_Nmel_HNH_swap1.

[0063] FIG. 44—Sequence map for Rd8_117_Nmel_REC_ins1.

[0064] FIG. 45—Sequence map for Rd8_117_Nmel_RuvCIII_ins1.

[0065] FIG. 46—Sequence map for Rd8_117_Rd8_66_REC_ins1.

[0066] FIG. 47—Sequence map for Rd8_117_Sau_REC_ins1.

[0067] FIG. 48—Sequence map for Rd8_117_Spy_REC_ins1.

[0068] FIG. 49—Sequence map for Rd8_117_SpyCas9_Hyb_Stab_ins1.

[0069] FIG. 50—Sequence map for Rd8_117_Sth_HNH_swap1.

[0070] FIG. 51—Sequence map for Rd8_117_Sth_REC_ins1.

[0071] FIG. 52—Sequence map for full TI exchange Rd8_117_REC_665_TI.

[0072] FIG. 53—Sequence map for full TI exchange Rd8_117_REC_1079_1_TI.

[0073] FIG. 54—Sequence map for full TI exchange Rd8_117_REC_1079_2_TI.

[0074] FIG. 55—Sequence map for full TI exchange Rd8_117_REC_1079_3_TI.

[0075] FIG. 56—Sequence map for full TI exchange Rd8_117_REC_2089_TI.

[0076] FIG. 57—Sequence map for full TI exchange Rd8_117_REC_cA2_TI.

[0077] FIG. 58—Sequence map for full TI exchange Rd8_117_REC_Diverse_7_TI.

[0078] FIG. 59—Sequence map for full TI exchange Rd8_117_REC_Rd8_149_TI.

[0079] FIG. 60—Sequence map for partial TI insertion Rd8_117_REC_644_2_tudor_ext.

[0080] FIG. 61—Sequence map for partial TI insertion Rd8_117_REC_644_2 tudor_lance.

[0081] FIG. 62—Sequence map for partial TI insertion Rd8_117_REC_644_2_tudor.

[0082] FIG. 63—Sequence map for partial TI insertion Rd8_117_REC_2089_tudor_lance.

[0083] FIG. 64—Sequence map for partial TI insertion Rd8_117_REC_2089_tudor.

[0084] FIG. 65—Sequence map for partial TI insertion Rd8_117_REC_cA2_tudor_lance.

[0085] FIG. 66—Sequence map for partial TI insertion Rd8_117_REC_cA2_tudor_swap.

[0086] FIG. 67—Sequence map for partial TI insertion Rd8_117_REC_Cas9_665_tudor_lance.

[0087] FIG. 68—Sequence map for partial TI insertion Rd8_117_REC_Cas9_665_tudor.

[0088] FIG. 69—Sequence map for partial TI insertion Rd8_117_REC_Cas9_971_tudor.

[0089] FIG. 70—Sequence map for partial TI insertion Rd8_117_REC_Cas9_1079_1_tudor_lance.

[0090] FIG. 71—Sequence map for partial TI insertion Rd8_117_REC_Cas9_1079_1_tudor.

[0091] FIG. 72—Sequence map for partial TI insertion. Rd8_117_REC_Cas9_1079_2_tudor_lance.

[0092] FIG. 73—Sequence map for partial TI insertion Rd8_117_REC_Cas9_1079_2_tudor.

[0093] FIG. 74—Sequence map for partial TI insertion Rd8_117_REC_Cas9_1079_3_tudor_lance.

[0094] FIG. 75—Sequence map for partial TI insertion Rd8_117_REC_Cas9_1079_3_tudor.

[0095] FIG. 76—Sequence map for partial TI insertion Rd8_117_REC_Cas9_1261_tudor_lance.

[0096] FIG. 77—Sequence map for partial TI insertion Rd8_117_REC_Cas9_1261_tudor_lance.

[0097] FIG. 78—Sequence map for partial TI insertion Rd8_117_REC_Cas9_1261_tudor.

[0098] FIG. 79—Sequence map for partial TI insertion Rd8_117_REC_ChlorIscB_tudor_lance.

[0099] FIG. 80—Sequence map for partial TI insertion Rd8_117_REC_ChlorIscB_tudor.

[0100] FIG. 81—Sequence map for partial TI insertion Rd8_117_REC_Diverse_7_NTS.

[0101] FIG. 82—Sequence map for partial TI insertion Rd8_117_REC_Diverse_7_REC.

[0102] FIG. 83—Sequence map for partial TI insertion Rd8_117_REC_Diverse_7_TI_L_tudor_lance.

[0103] FIG. 84—Sequence map for partial TI insertion Rd8_117_REC_Diverse_7_TI_L.

[0104] FIG. 85—Sequence map for partial TI insertion Rd8_117_REC_Diverse_7_TI_L1.

[0105] FIG. 86—Sequence map for partial TI insertion Rd8_117_REC_Diverse_7_TI_L2.

[0106] FIG. 87—Sequence map for partial TI insertion Rd8_117_REC_Diverse_7_TI_restore_WED.

[0107] FIG. 88—Sequence map for partial TI insertion Rd8_117_REC_Rd8_127_tudor_lance.

[0108] FIG. 89—Sequence map for partial TI insertion Rd8_117_REC_Rd8_149_NTS_1.

[0109] FIG. 90—Sequence map for partial TI insertion Rd8_117_REC_Rd8_149_NTS_2.

[0110] FIG. 91—Sequence map for partial TI insertion Rd8_117_REC_Rd8_149_TI_L.

[0111] FIG. 92—Sequence map for partial TI insertion Rd8_117_REC_Rd8_149_TI_restore_WED.

[0112] FIG. 93—Sequence map for partial TI insertion Rd8_117_REC_Rd8_149 tudor_nontudor.

[0113] FIG. 94—Sequence map for partial TI insertion Rd8_117_REC_Rd8_149_WED_ins.

[0114] FIG. 95—Sequence map for partial TI insertion Rd8_117_REC_Rd8_149_WED_swap.

[0115] FIG. 96A-96E—Biochemical characterization of IscB polypeptides: 96A) gel of biochemical measurements with varying RNA:protein molar ratio from 4 to 0.25 for Rd8_66, Rd8_117, and Rd8_117+1079_1 REC insertions; 96B) activity of IscBs Rd8_66, Rd8_117, and Rd8_117_1079_1 REC insertion by temperature varying between 22 C and 67 C; 96C) RNA modification can modulate activity at different temperatures; 96D) cleavage kinetics measured for Rd8_66, Rd8_117, and Rd8_117+1079_1 REC insertions at times varying between 0 and 120 minutes; 96E) characterization of divalent metal ion on cleavage activity of Rd8_66, Rd8_117, and Rd8_117+1079_1 REC insertions.

[0116] FIG. 97—Rd8_117 with REC insert can be functionally delivered by eVLPs to HEK293 cells.

[0117] FIG. 98A-98C—98A) Example target base numbering for Adenine base editing with example ωRNA guide sequence; 98B) example Rd8_117 IscB polypeptide is compatible with ABE8 adenine base editing, as measured by editing at several target loci; 98C) example chimeric Rd8_117 IscB polypeptide with 1079_1 REC insert shows improved ABE8 adenine base editing activity as measured by editing at several target loci.

[0118] FIG. 99A-99B—99A) Rd8_66 and Rd8_117 demonstrate detectable binding of DNA via PAM-SCANR; 99B) Rd8_66 indel formation based on variations in structure of the ωRNA at VEGFA1 loci.

[0119] FIG. 100—Indel rates measurement across guides with a 3′ 20 bp truncation with Rd8_66.

[0120] FIG. 101—Schematic of chimeric ωRNA engineered for trans on-switch and trans off-switch.

[0121] FIG. 102A-102D—102A) Rd8_117 cleavage activity measured with ωRNA 3′ truncations; 102B) schematic of ωRNA truncations for 102A; 102C) Rd8_117 cleavage activity measured with ωRNA 5′ truncations; 102D) schematic of ωRNA truncations for 102C.

[0122] FIG. 103A-103B—103A) Results of Rd8_117 nexus loop reprogramming; 103B) nexus loop sequence modifications.

[0123] FIG. 104A-104B—104A) Depiction of nexus pseudoknot insertion variants relative to WT ωRNA; 104B) cleavage activity of ωRNA variants.

[0124] FIG. 105—Depictions of ωRNA folding with 21 bp 3′ truncation and relative to full ωRNA with Gibbs free energy measurements.

[0125] FIG. 106A-106D—106A) Addition of the last 35 base pairs of Rd8_117 ωRNA can restore activity to the Rd8_117 35 bp 3′ truncated ωRNA; 106B-C) 35 bp transRNA is active with multiple guides using example IscB Rd8_117 protein ((106B) and Rd8_117+1079 REC insertion (106C) m=14 bp that span distance from −35 from 3′ to −21 from 3′ end of ωRNA; 106D).Rd8_117 guide scaffold structure with truncations indicated.

[0126] FIG. 107A-107B—Trans-on RNA restores activity in mammalian cells, WT is the unmodified Rd8_117 IscB; 1079 is Rd8_117 IscB with Cas 9 1079_1 REC insertion; full transRNA=last 35 bp of Rd8_117 ωRNA scaffold; +G is addition of G after U6 and before the transRNA sequence; mini transRNA=14 bp that space distance from 35 from 3′ to −21 from 3′. Condit for 107A) DYNCHI and 107B) HPRT1. Conditions not containing ‘notation ‘full’ contain a 3′ end 35 bp truncation of the Rd8_117 ωRNA.

[0127] FIG. 108—Multiple allosterically distinct mechanism are improved from natural mutations in IscB.

[0128] FIG. 109—Hydrophobic repacking of RuvC improves IscB activity by 2×.

[0129] FIG. 110—Extending the DNA/RNA duplex channel via amino acid modifications in IscB improves activity 2×.

[0130] FIG. 111—Creating a new non-targeting strand channel by amino acid mutations of IscB polypeptide improves 1.7-1.9×.

[0131] FIG. 112—Altering unwinding activity via pinpoint mutations improves IscB activity 2×.

[0132] FIG. 113—Improvement from enhancing existing DNA/RNA channel with mutations to IscB polypeptide.

[0133] FIG. 114—Non-specific DNA binding mutations improve IscB activity by 2×.

[0134] FIG. 115—New IscB mutants can be made by combining mutations, including those identifies in FIGS. 108-114 affecting different mechanism.

[0135] FIG. 116A-116B—Alignment of REC-flanking regions in IscBs and Cas9s. Alignment of (116A)N-terminal and (116B)C-terminal flanking regions of REC domains and REC-like inserts in IscBs and Cas9s. Residues are colored by BLOSUM45 similarity and residues with notable conservation in II-D Cas9 REC domains are marked with red triangles. Gray shaded regions denote REC domain regions.

[0136] FIG. 117A-117F—Structure and evolution-guided engineering of OrufIscB. (117A) Schematic of IVTT REC insertion screen. Each chimeric OrufIscB was incubated with a library of 100 guides targeting human genomic sites and a synthetic target library containing each possible single mismatch in the target and TAM and progressive mismatches on the TAM-distal end of the target in addition to the perfectly matched target. Cleaved targets were deep sequenced and cleavage was quantified based on read count. (117B) Median read count normalized to perfectly matched targets for TAM-distal mismatch targets. Only REC insertions with decreased cleavage at 5, 6 and 7 TAM-distal mismatch targets are displayed. (117C) Genome editing by wild-type OrufIscB and with the addition of the NbaCas9-1 REC domain. Bars represent mean of n=4 replicates with error bars +/−standard deviation. (117D) Genome editing by aa mutants on top of enOrufIscB-v1 with two guides. Points represent mean of n=4 replicates at each guide with error bars +/−standard deviation. (117E) AlphaFold2 structure of wild-type OrufIscB overlayed on ωRNA and target DNA from the cryo-EM structure of OgeuIscB (PDB: 7UTN)262. Residues with selected mutations are highlighted in red. (117F) Comparison of genome editing by WT OrufIscB, enOrufIscB-v1, and all possible single, double and triple combinations of E137K, E409R and I533K variants with 12 guides. Bars represent mean of n=4 replicates with error bars +/−standard deviation.

[0137] FIG. 118—Comparison of genome editing by top candidate REC insert-containing OrufIscB variants. Genome editing by 54 REC insert-containing OrufIscB variants across 6 target sites in the human genome. Blue bar represents WT OrufIscB and red bar represents selected NbaCas9-1 REC domain-containing OrufIscB. Red line denotes indel efficiency of WT OrufIscB. Bars represent n=1 replicate.

[0138] FIG. 119A-119B—Guide length preference of OrufIscB. Genome editing at 4 sites in the human genome using ωRNA guides from 12 nts to 28 nts with (A) OrufIscB and (B) enOrufIscB-v1. Bars represent mean of n=3 replicates with error bars +/−standard deviation.

[0139] FIG. 120A-120C—Base editing and transcriptional repression with enOrufIscB-v2. (120A) Schematic of rAAV genome design for enOrufIscB-v2 fusion platform packaging. (120B) Adenine base editing at 10 sites in the human genome with enOrufIscB-v2 using ABE8e in HEK293FT cells. (120C) Transcriptional repression of three genes in the human genome by OMEGAoff and CRISPRoff-v2.1 in HEK293FT cells. Fold expression is calculated relative to a non-targeting guide control.

[0140] The figures herein are for illustrative purposes only and are not necessarily drawn to scale.

### DETAILED DESCRIPTION OF THE EXAMPLE EMBODIMENTS

### General Definitions

[0141] Unless defined otherwise, technical and scientific terms used herein have the same meaning as commonly understood by one of ordinary skill in the art to which this disclosure pertains. Definitions of common terms and techniques in molecular biology may be found in Molecular Cloning: A Laboratory Manual, 2^{nd} edition (1989) (Sambrook, Fritsch, and Maniatis); Molecular Cloning: A Laboratory Manual, 4^{th} edition (2012) (Green and Sambrook); Current Protocols in Molecular Biology (1987) (F. M. Ausubel et al. eds.); the series Methods in Enzymology (Academic Press, Inc.): PCR 2: A Practical Approach (1995) (M. J. MacPherson, B. D. Hames, and G. R. Taylor eds.): Antibodies, A Laboratory Manual (1988) (Harlow and Lane, eds.): Antibodies A Laboratory Manual, 2^{nd} edition 2013 (E. A. Greenfield ed.); Animal Cell Culture (1987) (R. I. Freshney, ed.); Benjamin Lewin, Genes IX, published by Jones and Bartlet, 2008 (ISBN 0763752223); Kendrew et al. (eds.), The Encyclopedia of Molecular Biology, published by Blackwell Science Ltd., 1994 (ISBN 0632021829); Robert A. Meyers (ed.), Molecular Biology and Biotechnology: a Comprehensive Desk Reference, published by VCH Publishers, Inc., 1995 (ISBN 9780471185710); Singleton et al., Dictionary of Microbiology and Molecular Biology 2nd ed., J. Wiley & Sons (New York, N.Y. 1994), March, Advanced Organic Chemistry Reactions, Mechanisms and Structure 4th ed., John Wiley & Sons (New York, N.Y. 1992); and Marten H. Hofker and Jan van Deursen, Transgenic Mouse Methods and Protocols, 2^{nd} edition (2011).

[0142] As used herein, the singular forms “a”, “an”, and “the” include both singular and plural referents unless the context clearly dictates otherwise.

[0143] The term “optional” or “optionally” means that the subsequent described event, circumstance or substituent may or may not occur, and that the description includes instances where the event or circumstance occurs and instances where it does not.

[0144] The recitation of numerical ranges by endpoints includes all numbers and fractions subsumed within the respective ranges, as well as the recited endpoints.

[0145] The terms “about” or “approximately” as used herein when referring to a measurable value such as a parameter, an amount, a temporal duration, and the like, are meant to encompass variations of and from the specified value, such as variations of +/−10% or less, +/−5% or less, +/−1% or less, and +/−0.1% or less of and from the specified value, insofar such variations are appropriate to perform in the disclosed invention. It is to be understood that the value to which the modifier “about” or “approximately” refers is itself also specifically, and preferably, disclosed.

[0146] As used herein, a “biological sample” may contain whole cells and/or live cells and/or cell debris. The biological sample may contain (or be derived from) a “bodily fluid”. The present invention encompasses embodiments wherein the bodily fluid is selected from amniotic fluid, aqueous humour, vitreous humour, bile, blood serum, breast milk, cerebrospinal fluid, cerumen (earwax), chyle, chyme, endolymph, perilymph, exudates, feces, female ejaculate, gastric acid, gastric juice, lymph, mucus (including nasal drainage and phlegm), pericardial fluid, peritoneal fluid, pleural fluid, pus, rheum, saliva, sebum (skin oil), semen, sputum, synovial fluid, sweat, tears, urine, vaginal secretion, vomit and mixtures of one or more thereof. Biological samples include cell cultures, bodily fluids, cell cultures from bodily fluids. Bodily fluids may be obtained from a mammal organism, for example by puncture, or other collecting or sampling procedures.

[0147] The terms “subject,” “individual,” and “patient” are used interchangeably herein to refer to a vertebrate, preferably a mammal, more preferably a human. Mammals include, but are not limited to, murines, simians, humans, farm animals, sport animals, and pets. Tissues, cells and their progeny of a biological entity obtained in vivo or cultured in vitro are also encompassed.

[0148] Various embodiments are described hereinafter. It should be noted that the specific embodiments are not intended as an exhaustive description or as a limitation to the broader aspects discussed herein. One aspect described in conjunction with a particular embodiment is not necessarily limited to that embodiment and can be practiced with any other embodiment(s). Reference throughout this specification to “one embodiment”, “an embodiment,” “an example embodiment,” means that a particular feature, structure or characteristic described in connection with the embodiment is included in at least one embodiment of the present invention. Thus, appearances of the phrases “in one embodiment,” “in an embodiment,” or “an example embodiment” in various places throughout this specification are not necessarily all referring to the same embodiment but may. Furthermore, the particular features, structures or characteristics may be combined in any suitable manner, as would be apparent to a person skilled in the art from this disclosure, in one or more embodiments. Furthermore, while some embodiments described herein include some but not other features included in other embodiments, combinations of features of different embodiments are meant to be within the scope of the invention. For example, in the appended claims, any of the claimed embodiments can be used in any combination.

[0149] The term “functional fragment thereof” should be interpreted as meaning any fragment having a desired function. For example, if a whole protein modulates enzymatic activity, then a functional fragment is a fragment capable of modulating enzymatic activity. In another example, if a whole protein breaks bonds in a molecule, then the functional fragment is a fragment capable of breaking bonds in a molecule. The exact quantitative function of the functional fragment may be different from the function of the whole-size molecule. In some instances, the function of the functional fragment may be increased compared to the whole-size molecule. The use of fragments instead of whole-sized molecules can be advantageous because of the smaller size of the fragments.

[0150] Reference is made to International Patent Application PCT/US2021/056361 entitled Reprogrammable IscB Polypeptides and Uses Thereof, filed Oct. 22, 2021, U.S. Provisional Application No. 63/105,191, filed Oct. 23, 2020, entitled “Reprogrammable IscB Polypeptide Nucleases and Use Thereof”, U.S. Provisional No. 63/105,177, filed Oct. 23, 2020, entitled “Nucleic Acid-Guided Nucleases and Use Thereof,” U.S. Provisional Application No. 63/156,857, filed Mar. 4, 2021, entitled “Reprogrammable IscB Polypeptide Nucleases and Use Thereof”, U.S. Provisional Application No. 63/195,659, filed Jun. 1, 2021, entitled “Reprogrammable IscB Polypeptide Nucleases and Use Thereof”, and U.S. Provisional Application No. 63/235,583, filed Aug. 20, 2021, entitled “Reprogrammable IscB Polypeptide Nucleases and Use Thereof.”

[0151] All publications, published patent documents, and patent applications cited herein are hereby incorporated by reference to the same extent as though each individual publication, published patent document, or patent application was specifically and individually indicated as being incorporated by reference.

### Overview

[0152] IscB systems are RNA-guided re-programmable nucleases. Altae-Tran and Kannan et al., Science 374, 57-65 (2021). An IscB system comprises a IscB polypeptide and a nucleic acid component capable of forming a complex with the IscB polypeptide and directing the complex to a target polynucleotide. The IscB polypeptides are relatively small, typically ˜400 amino acids, with a relatively large nucleic acid component, termed an ωRNA which comprises a guide sequence and a scaffold that interacts with the IscB polypeptide at several locations along the IscB polypeptide. Embodiments disclosed herein are directed to chimeric IscB systems that comprise one or more modifications that modify the IscB polypeptide, the ωRNA, or both. The modifications to the IscB comprise the incorporation of domains and other elements either from different IscB orthologs or from non-IscB proteins that increase the specificity or activity of the IscB polypeptide relative to wild type. Modifications to the ωRNA include additions, truncations, or insertions of heterologous polynucleotide sequences into the scaffold portion of the ωRNA that reduce steric interference, enhance base pairing for increased specificity or activity, or provide elements that may be used to switch on or off IscB activity.

### ISCB Polypeptides

[0153] Unmodified IscB polypeptides may comprise a N-terminal PLMP domain, a RuvC endonuclease, and a HNH domain. The RuvC domain may be a split RuvC domain comprising RuvC-I, RuvC-II, and RuvC-III subdomains. A bridge helix domain may be inserted between two of the RuvC domains. In one example embodiment, the bridge helix domain is inserted between the RuvC-I and RuvC-II subdomains. Unlike Cas9, IscB polypeptides do not contain a Rec domain. IscB proteins may also further comprise a conserved C-terminal domain. See, Schuler and Hu et al., “Structural basis for RNA-guided DNA cleavage by IscB-ωRNA and mechanistic comparison with Cas9,” Science 10.1126/science.abg7220 (2022), incorporated herein by reference in its entirety.

[0154] In example embodiments, the unmodified IscB polypeptides are between 180 and 800 amino acids in size, between 200 and 790 amino acids in size, between 200 and 780 amino acids in size, between 200 and 770 amino acids in size, between 200 and 760 amino acids in size, between 200 and 750 amino acids in size, between 200 and 740 amino acids in size, between 200 and 730 amino acids in size, between 200 and 720 amino acids in size, between 200 and 720 amino acids in size, between 200 and 710 amino acids in size, between 200 and 700 amino acids in size, between 200 and 690 amino acids in size, between 200 and 680 amino acids in size, between 200 and 670 amino acids in size, between 200 and 660 amino acids in size, between 200 and 650 amino acids in size, between 200 and 640 amino acids in size, between 200 and 630 amino acids in size, between 200 and 620 amino acids in size, between 200 and 610 amino acids in size, between 200 and 600 amino acids in size, between 200 and 590 amino acids in size, between 200 and 580 amino acids in size, between 200 and 570 amino acids in size, between 200 and 560 amino acid, between 200 between 550 amino acids, between 200 and 540 amino acids, between 200 and 530 amino acids, between 200 and 520 amino acids, between 200 and 510 amino acids, between 200 and 500 amino acids, between 200 and 490 amino acids, between 200 and 480 amino acids, between 200 and 470 amino acids, between 200 and 460 amino acids, between 200 and 450 amino acids, between 200 and 440 amino acids, between 200 and 430 amino acids, between 200 and 420 amino acids, between 200 and 410 amino acids, between 200 and 400 amino acids, between 300 and 400 amino acids. between 300 and 500 amino acids, between 300 and 600 amino acids, between 400 and 500 amino acids, or between 500-600 amino acids. In one example embodiment, the polypeptide may range in size from 400-500 amino acids, 400-490 amino acids, 400-480 amino acids, 400-470 amino acids, 400-460 amino acids, 400-450 amino acids, 400-440 amino acids, 400-430 amino acids. Size variation may be dependent, in part, on the particular domain architecture of the IscB or its homolog.

TABLE 1
Example IscB system

| | |
|---|---|
| SEQ ID 25276 | MRYVYVLDVDGKPLMPTCRFGKVRRMLKSGQAKAVDT |
| (IscB RD8 | LPFTIQLTYKPRTRILQPVTLGQDPGRTNIGMAAVRF |
| 117) | DGKELGRFHCITRNKEIPKLMADRMAARKASRRGERL |
| | ARKRLARKLHTTAKHLNGRILPGCSEPIAVKDIINTE |
| | SRFNNRLRPEGWLTPTATQLLRTHINLFRKLSGILPV |
| | TDVAVELNKFAFMQLDNPEMKKREIDFCHGPLCGTGG |
| | LEAAVKEQQDGKCLLCGKESIGHYHHIVPRSRRGSNT |
| | IANIAGLCPKCHELVHKDADTAESLTEMKTGLMKKYG |
| | GTSVLNQIIPKLVETLADLFPGHFHVTNGWNTKEFRE |
| | KHHLEKDHDVDAYCIACSHLKPEETLVETEPFEILQF |
| | RKHNRAIIHHQTERTYKLDGVTVAKNRKKRMEQKTDS |
| | LEDWYVDMAKEHGKTQADAMRSRLTVIKSTRYYNTPG |
| | RMMPGTVFLYEGKRYVMTGQITNGKYYRAYGQEKRNF |
| | PAVKVRILTKNTGLVFVA* |
| SEQ ID 25277 | GTCAATAACCCATGACTGAAGTCATGGGCTTGCAGAT |
| (ωRNA) | GCAGGTCCTGATGGAAGAAAGGGTTACTGAGCAGAGC |
| | AGTGACATGTCATTCGCCGCGGGGTGATTCCAAGCTC |
| | CGCGCTCCGGCTAGACATGCCCATGCTATGGAAACTT |
| | TAACGGTATGTGCGGTTTTCCGCTCATACCGGCTTAC |
| | AACAAATAAGGAGTTATTAG |

[0155] Table 1 comprises an example unmodified IscB (SEQ ID 25276) also referred to as RD8_117, and an example ωRNA (SEQ ID 25277). In example embodiments, RD8_117 is utilized as a reference IscB polypeptide to which modifications are made. Modifications of IscB polypeptides can be made by aligning domains and sequences to the reference IscB polypeptide.

[0156] An unmodified IscB polypeptide may be selected from SEQ ID NOs: 1, 3, 5, 7, 9, 11, 13, 15, 17, 19, 21, 23, 25, 27, 29, 31, 33, 35, 37, 39, 41, 43, 45, 47, 49, 51, 53, 55, 57, 59, 61, 63, 65, 67, 69, 71, 73, 75, 77, 79, 81, 83, 85, 87, 89, 91, 93, 95, 97, 99, 101, 103, 105, 107, 109, 111, 113, 115, 117, 119, 121, 123, 125, 127, 129, 131, 133, 135, 137, 139, 141, 143, 145, 147, 149, 151, 153, 155, 157, 159, 161, 163, 165, 167, 169, 171, 173, 175, 177, 179, 181, 183, 185, 187, 189, 191, 193, 195, 197, 199, 201, 203, 205, 207, 209, 211, 213, 215, 217, 219, 221, 223, 225, 227, 229, 231, 233, 235, 237, 239, 241, 243, 245, 247, 249, 251, 253, 255, 257, 259, 261, 263, 265, 267, 269, 271, 273, 275, 277, 279, 281, 283, 285, 287, 289, 291, 293, 295, 297, 299, 301, 303, 305, 307, 309, 311, 313, 315, 317, 319, 321, 323, 325, 327, 329, 331, 333, 335, 337, 339, 341, 343, 345, 347, 349, 351, 353, 355, 357, 359, 361, 363, 365, 367, 369, 371, 373, 375, 377, 379, 381, 383, 385, 387, 389, 391, 393, 395, 397, 399, 401, 403, 405, 407, 409, 411, 413, 415, 417, 419, 421, 423, 425, 427, 429, 431, 433, 435, 437, 439, 441, 443, 445, 447, 449, 451, 453, 455, 457, 459, 461, 463, 465, 467, 469, 471, 473, 475, 477, 479, 481, 483, 485, 487, 489, 491, 493, 495, 497, 499, 501, 503, 505, 507, 509, 511, 513, 515, 517, 519, 521, 523, 525, 527, 529, 531, 533, 535, 537, 539, 541, 543, 545, 547, 549, 551, 553, 555, 557, 559, 561, 563, 565, 567, 569, 571, 573, 575, 577, 579, 581, 583, 585, 587, 589, 591, 593, 595, 597, 599, 601, 603, 605, 607, 609, 611, 613, 615, 617, 619, 621, 623, 625, 627, 629, 631, 633, 635, 637, 639, 641, 643, 645, 647, 649, 651, 653, 655, 657, 659, 661, 663, 665, 667, 669, 671, 673, 675, 677, 679, 681, 683, 685, 687, 689, 691, 693, 695, 697, 699, 701, 703, 705, 707, 709, 711, 713, 715, 717, 719, 721, 723, 725, 727, 729, 731, 733, 735, 737, 739, 741, 743, 745, 747, 749, 751, 753, 755, 757, 759, 761, 763, 765, 767, 769, 771, 773, 775, 777, 779, 781, 783, 785, 787, 789, 791, 793, 795, 797, 799, 801, 803, 805, 807, 809, 811, 813, 815, 817, 819, 821, 823, 825, 827, 829, 831, 833, 835, 837, 839, 841, 843, 845, 847, 849, 851, 853, 855, 857, 859, 861, 863, 865, 867, 869, 871, 873, 875, 877, 879, 881, 883, 885, 887, 889, 891, 893, 895, 897, 899, 901, 903, 905, 907, 909, 911, 913, 915, 917, 919, 921, 923, 925, 927, 929, 931, 933, 935, 937, 939, 941, 943, 945, 947, 949, 951, 953, 955, 957, 959, 961, 963, 965, 967, 969, 971, 973, 975, 977, 979, 981, 983, 985, 987, 989, 991, 993, 995, 997, 999, 1001, 1003, 1005, 1007, 1009, 1011, 1013, 1015, 1017, 1019, 1021, 1023, 1025, 1027, 1029, 1031, 1033, 1035, 1037, 1039, 1041, 1043, 1045, 1047, 1049, 1051, 1053, 1055, 1057, 1059, 1061, 1063, 1065, 1067, 1069, 1071, 1073, 1075, 1077, 1079, 1081, 1083, 1085, 1087, 1089, 1091, 1093, 1095, 1097, 1099, 1101, 1103, 1105, 1107, 1109, 1111, 1113, 1115, 1117, 1119, 1121, 1123, 1125, 1127, 1129, 1131, 1133, 1135, 1137, 1139, 1141, 1143, 1145, 1147, 1149, 1151, 1153, 1155, 1157, 1159, 1161, 1163, 1165, 1167, 1169, 1171, 1173, 1175, 1177, 1179, 1181, 1183, 1185, 1187, 1189, 1191, 1193, 1195, 1197, 1199, 1201, 1203, 1205, 1207, 1209, 1211, 1213, 1215, 1217, 1219, 1221, 1223, 1225, 1227, 1229, 1231, 1233, 1235, 1237, 1239, 1241, 1243, 1245, 1247, 1249, 1251, 1253, 1255, 1257, 1259, 1261, 1263, 1265, 1267, 1269, 1271, 1273, 1275, 1277, 1279, 1281, 1283, 1285, 1287, 1289, 1291, 1293, 1295, 1297, 1299, 1301, 1303, 1305, 1307, 1309, 1311, 1313, 1315, 1317, 1319, 1321, 1323, 1325, 1327, 1329, 1331, 1333, 1335, 1337, 1339, 1341, 1343, 1345, 1347, 1349, 1351, 1353, 1355, 1357, 1359, 1361, 1363, 1365, 1367, 1369, 1371, 1373, 1375, 1377, 1379, 1381, 1383, 1385, 1387, 1389, 1391, 1393, 1395, 1397, 1399, 1401, 1403, 1405, 1407, 1409, 1411, 1413, 1415, 1417, 1419, 1421, 1423, 1425, 1427, 1429, 1431, 1433, 1435, 1437, 1439, 1441, 1443, 1445, 1447, 1449, 1451, 1453, 1455, 1457, 1459, 1461, 1463, 1465, 1467, 1469, 1471, 1473, 1475, 1477, 1479, 1481, 1483, 1485, 1487, 1489, 1491, 1493, 1495, 1497, 1499, 1501, 1503, 1505, 1507, 1509, 1511, 1513, 1515, 1517, 1519, 1521, 1523, 1525, 1527, 1529, 1531, 1533, 1535, 1537, 1539, 1541, 1543, 1545, 1547, 1549, 1551, 1553, 1555, 1557, 1559, 1561, 1563, 1565, 1567, 1569, 1571, 1573, 1575, 1577, 1579, 1581, 1583, 1585, 1587, 1589, 1591, 1593, 1595, 1597, 1599, 1601, 1603, 1605, 1607, 1609, 1611, 1613, 1615, 1617, 1619, 1621, 1623, 1625, 1627, 1629, 1631, 1633, 1635, 1637, 1639, 1641, 1643, 1645, 1647, 1649, 1651, 1653, 1655, 1657, 1659, 1661, 1663, 1665, 1667, 1669, 1671, 1673, 1675, 1677, 1679, 1681, 1683, 1685, 1687, 1689, 1691, 1693, 1695, 1697, 1699, 1701, 1703, 1705, 1707, 1709, 1711, 1713, 1715, 1717, 1719, 1721, 1723, 1725, 1727, 1729, 1731, 1733, 1735, 1737, 1739, 1741, 1743, 1745, 1747, 1749, 1751, 1753, 1755, 1757, 1759, 1761, 1763, 1765, 1767, 1769, 1771, 1773, 1775, 1777, 1779, 1781, 1783, 1785, 1787, 1789, 1791, 1793, 1794, 1796, 1798, 1800, 1802, 1804, 1806, 1808, 1810, 1812, 1814, 1816, 1818, 1820, 1822, 1824, 1826, 1828, 1830, 1832, 1834, 1836, 1838, 1840, 1842, 1844, 1846, 1848, 1850, 1852, 1854, 1856, 1858, 1860, 1862, 1864, 1866, 1868, 1870, 1872, 1874, 1876, 1878, 1880, 1882, 1884, 1886, 1888, 1890, 1892, 1894, 1896, 1898, 1900, 1902, 1904, 1906, 1908, 1910, 1912, 1914, 1916, 1918, 1920, 1922, 1924, 1926, 1928, 1930, 1932, 1934, 1936, 1938, 1940, 1942, 1944, 1946, 1948, 1950, 1952, 1954, 1956, 1958, 1960, 1962, 1964, 1966, 1968, 1970, 1972, 1974, 1976, 1978, 1980, 1982, 1984, 1986, 1988, 1990, 1992, 1994, 1996, 1998, 2000.

[0157] The IscB polypeptide family of proteins include a larger IscB protein, also referred to as IscB or large IscB, and two smaller IscB proteins, also referred to as IsrB and IshB and detailed further herein. IscB is ˜400 amino acids (aa) long and contains a RuvC endonuclease domain split by the insertion of a bridge helix (BH) and an HNH endonuclease domain, an architecture that is shared with Cas9. In one example embodiment, IscB proteins may comprise a N-terminal PLMP domain, a RuvC endonuclease, and a HNH domain. The RuvC domain may be a split RuvC domain comprising RuvC-I, RuvC-II, and RuvC-III subdomains. A bridge helix domain may be inserted between two of the RuvC domains. In one example embodiment, the bridge helix domain is inserted between the RuvC-I and RuvC-II subdomains. Unlike Cas9, unmodified IscB polypeptides do not contain a Rec domain. IscB proteins may also further comprise a conserved C-terminal domain.

[0158] The IscB polypeptide may comprise an inactive RuvC domain, an inactive HNH domain, or both. In an embodiment, the unmodified IscB polypeptide comprises an inactive RuvC domain. In one embodiment, the IscB polypeptide comprising an inactive RuvC domain is a nickase. In one embodiment, the unmodified IscB polypeptide has a sequence identity of at least 80%, at least 85%, at least 90%, or at least 95% with a wildtype IscB polypeptide, in an embodiment, an IscB sequence selected from SEQ ID NOs: 24525-25062.

[0159] The unmodified IscB polypeptide may comprise an inactive HNH domain; in one embodiment the IscB polypeptide comprising an inactive HNH domain is a nickase. In one embodiment, the IscB nuclease has a sequence identity of at least 80%, at least 85%, at least 90%, or at least 95% with a wildtype IscB polypeptide, in an embodiment an IscB sequence selected from SEQ ID NOS: 2605-23711.

[0160] In an embodiment, the IscB polypeptide comprises an inactive RuvC domain and an inactive HNH domain; in one embodiment the unmodified IscB polypeptide comprises an inactive RuvC domain and an inactive HNH domain and is catalytically inactive. In one embodiment, the IscB polypeptide has a sequence identity of at least 80%, at least 85%, at least 90%, or at least 95% with a wildtype IscB polypeptide, in particular embodiment the IscB sequence is selected from SEQ ID NOs. 25063-25118.

[0161] In an embodiment, the IscB protein is an IsrB (Insertion sequence RuvC-like OrfB), named to emphasize their distinct domain architecture, replacing the previous designation, IscB1 (Kapitonov, V. et al. (2015), J. Bacteriol. 198, 797-807). IsrB polypeptides are shorter, ˜350 aa IscB homologs that are also encoded in IS200/605 superfamily transposons. These proteins contain a PLMP domain and split RuvC but lack the HNH domain.

[0162] The unmodified IscB type protein may be an IshB polypeptide (Insertion sequence HNH-like OrfB). IshB are a family of ˜180 aa proteins that only contained the PLMP domain and HNH domain but no RuvC domain,

[0163] In one example embodiment, an IscB polypeptide comprises, moving from the N- to C-terminus, a PLMP domain, a RuvC-I subdomain, a bridge helix, a RuvC-II subdomain, a HNH domain, a RuvC-III subdomain, and a C terminal domain. The following sections provide an overview of an example IscB domain architecture.

### RuvC Domain

[0164] The IscB polypeptides comprise a RuvC domain, which may comprise multiple subdomains, e.g., RuvC-I, RuvC-II and RuvC-III. The subdomains may be separated by interval sequences on the amino acid sequence of the protein.

[0165] Examples of RuvC domains include any polypeptides having a structural similarity and/or sequence similarity to a RuvC domain described in the art. For example, the RuvC domain may share a structural similarity and/or sequence similarity to a RuvC of Cas9. In some examples, the RuvC domain may have an amino acid sequence that share at least 50%, at least 55%, at least 60%, at least 5%, at least 70%, at least 75%, at least 80%, at least 85%, at least 90%, at least 95%, at least 99%, or 100% sequence identity with RuvC domains.

[0166] In some examples, the RuvC domain comprise RuvC-I polypeptide, RuvC-II polypeptide, and RuvC-III polypeptide. Examples of the RuvC-I domain also include any polypeptides having a structural similarity and/or sequence similarity to a RuvC-I domain described in the art. For example, the RuvC-I domain may share a structural similarity and/or sequence similarity to a RuvC-I of Cas9. In some examples, the RuvC domain may have an amino acid sequence that share at least 50%, at least 55%, at least 60%, at least 5%, at least 70%, at least 75%, at least 80%, at least 85%, at least 90%, at least 95%, at least 99%, or 100% sequence identity with RuvC-I domain. The RuvC-II domain also include any polypeptides a structural similarity and/or sequence similarity to a RuvC-II domain described in the art. For example, the RuvC-II domain may share a structural similarity and/or sequence similarity to a RuvC-II of Cas9. In some examples, the RuvC domain may have an amino acid sequence that share at least 50%, at least 55%, at least 60%, at least 5%, at least 70%, at least 75%, at least 80%, at least 85%, at least 90%, at least 95%, at least 99%, or 100% sequence identity with RuvC-II domains. The RuvC-III domain also include any polypeptides a structural similarity and/or sequence similarity to a RuvC-III domain described in the art. For example, the RuvC-III domains may share a structural similarity and/or sequence similarity to a RuvC-III of Cas9. In some examples, the RuvC domain may have an amino acid sequence that share at least 50%, at least 55%, at least 60%, at least 5%, at least 70%, at least 75%, at least 80%, at least 85%, at least 90%, at least 95%, at least 99%, or 100% sequence identity with RuvC-III domains.

[0167] For example, and as described in the art (e.g., Crystal structure of Cas9 in complex with guide RNA and target DNA, Nishimasu et al. Cell, 2014) the RuvC domain of Cas9 consists of a six-stranded mixed β-sheet (β1, β2, β5, β11, β14 and β17) flanked by α-helices (α33, α34 and α39-α45) and two additional two-stranded antiparallel β-sheets (β3/β4 and β15/β16). It has been described that the RuvC domain of Cas9 shares structural similarity with the retroviral integrase superfamily members characterized by an RNase H fold, such as Escherichia coli RuvC (PDB code 1HJR, 14% identity, root-mean-square deviation (rmsd) of 3.6 Å for 126 equivalent Cα atoms) and Thermus thermophilus RuvC (PDB code 4LD0, 12% identity, rmsd of 3.4 Å for 131 equivalent Cα atoms). E. coli RuvC is a 3-layer alpha-beta sandwich containing a 5-stranded beta-sheet sandwiched between 5 alpha-helices. RuvC nucleases have four catalytic residues (e.g., Asp7, Glu70, His143 and Asp146 in T. thermophilus RuvC), and cleave Holliday junctions (or structurally analogous cruciform junctions) through a two-metal mechanism. Asp10 (Ala), Glu762, His983 and Asp986 of the Cas9 RuvC domain are located at positions similar to those of the catalytic residues of T. thermophilus RuvC.

[0168] In an example embodiment, split Ruv-C domain of the IscB proteins may have an HNH domain located between the Ruv-C II and Ruv-C III subdomains as described in more detail below. For example, the IscB protein domain architecture is comprised of the PLMP (P) domain, RuvC-I-II-III domains, a bridge domain (B), an HNH domain and a 3′ terminal carboxyl (C) domain spanning 494 amino acids. The bridge domain is located between the RuvC-I and RuvC-II domains and the HNH domain is located between the RuvC-II and RuvC-III domains. A portion thereof may be any smaller (e.g., any 1% of to 95% of the whole) unit (i.e., portion) of a RuvC domain. The portion thereof may be capable of preforming a function of the domain, wherein the function may be the same, increased, or decreased compared to the whole RuvC domain.

### HNH Domain

[0169] HNH domain comprise two antiparallel β strands connected with a variable length loop, an alpha helix, with a metal binding site between the two. The HNH conserved sites are conserved across the HNH superfamily, with HNH conservation throughout bacteria. In Cas9 proteins, for example, the HNH domain comprises a two-stranded antiparallel β-sheet (β12 and β13) flanked by four α-helices (α35-α38). It shares structural similarity with the HNH endonucleases characterized by a ββα-metal fold, such as phage T4 endonuclease VII (Endo VII) (PDB code 2QNC, 20% identity, rmsd of 2.7 Å for 61 equivalent Cα atoms) and Vibrio vulnificus nuclease (PDB code 1OUP, 8% identity, rmsd of 2.7 Å for 77 equivalent Cα atoms). HNH nucleases have three catalytic residues (e.g., Asp40, His41, and Asn62 in Endo VII), and cleave nucleic acid substrates through a single-metal mechanism. In the structure of the Endo VII N62D mutant in complex with a Holliday junction, a Mg2+ ion is coordinated by Asp40, Asp62, and the oxygen atoms of the scissile phosphate group of the substrate, while His41 acts as a general base to activate a water molecule for catalysis. Asp839, His840, and Asn863 of the Cas9 HNH domain correspond to Asp40, His41, and Asn62 of Endo VII, respectively, consistent with the observation that His840 is critical for the cleavage of the complementary DNA strand. The N863A mutant functions as a nickase, indicating that Asn863 participates in catalysis. The Cas9 HNH domain may cleave the complementary strand of the target DNA through a single-metal mechanism, as observed for other HNH superfamily nucleases. Although the Cas9 HNH domain shares a ββα-metal fold with other HNH endonucleases, their overall structures are distinct, consistent with the differences in their substrate specificities. Accordingly, IscB polypeptides of the present invention may comprises similar HNH domains in terms of sequence and/or function and may likewise comprise mutations analogous to those described above for Cas9 which convert the IscB polypeptide to a nickase. In an exemplary embodiment, a mutation to catalytic RuvC-II residue corresponding to E157A in corresponding to the sequence numbering of AwaIscB in an IscB polypeptide can be performed to abolish or significantly reduce the nucleolytic activity on the non-target DNA strand.

### PLMP Domain

[0170] The IscB polypeptides comprise a conserved N-terminal domain, which is referred to herein as a PLMP domain or an X domain. In embodiments, the N-terminal X domain may have one or more conserved residues and/or motifs as identified in FIG. 3 and FIG. 10; see also FIG. 4-3 for PLMP motif alignment. In one embodiment, the PLMP domain comprises a conserved PLMP (SEQ ID NO:2372) amino acid motif. The PLMP motif can be located at or near the N terminus of the IscB polypeptide, including, for example at amino acids 12-15 of AwaIscB, or amino acids corresponding to A. warmingii IscB.

[0171] In some examples, the PLMP domain may be no more than 10, no more than 20, no more than 30, no more than 40, no more than 50, no more than 60, no more than 70, no more than 80, no more than 90, or no more than 100 amino acids in length. For example, the PLMP domain may be no more than 70 amino acids in length, such as comprising 2 3, 4, 5, 6, 7, 8, 9, 10, 11, 12, 13, 14, 15, 16, 17, 18, 19, 20, 21, 22, 23, 24, 25, 26, 27, 28, 29, 30, 31, 32, 33, 34, 35, 36, 37, 38, 39, 40, 41, 42, 43, 44, 45, 46, 47, 48, 49, 50, 51, 52, 53, 54, 55, 56, 57, 58, 59, 60, 61, 62, 63, 64, 65, 66, 67, 68, 69, or 70 amino acids in length. PLMP domains may be found upstream of the RuvC-I domain and/or Bridge Helix, where present, of an IscB polypeptide. In one embodiment, the PLMP domain is located within 150, 140, 130, 120, 110, 100, 90, 80, 70, 60, 50, 40, 30, 20 or 10 amino acids upstream of the RuvC-1 domain.

[0172] In an aspect, truncation of the N-terminus domain of an IscB polypeptide, including. More than 4, 5, 6, 7, 8, 9, 10, 11, 12, 13, 14 or 15 amino acids, up to 70 amino acids of the N terminus, i.e. truncation of the PLMP domain, abolishes activity of the IscB polypeptide. In an aspect, more than 4 amino acids PLMP domain may reduce or abolish IscB activity. C-terminal domain

[0173] The C-terminal domain (also referred to herein as a Y domain) may comprise one or more conserved residues or motifs. The C-terminal domain may be no more than 10, no more than 20, no more than 30, no more than 40, no more than 50, no more than 60, no more than 70, no more than 80, no more than 90, or no more than 100 amino acids in length. For example, the Y domain may be no more than 70 amino acids in length, such as comprising 2 3, 4, 5, 6, 7, 8, 9, 10, 11, 12, 13, 14, 15, 16, 17, 18, 19, 20, 21, 22, 23, 24, 25, 26, 27, 28, 29, 30, 31, 32, 33, 34, 35, 36, 37, 38, 39, 40, 41, 42, 43, 44, 45, 46, 47, 48, 49, 50, 51, 52, 53, 54, 55, 56, 57, 58, 59, 60, 61, 62, 63, 64, 65, 66, 67, 68, 69, or 70 amino acids in length.

[0174] In an aspect, the IscB polypeptide, comprises a C-terminal domain that is structurally homologous to a tudor domain. See, e.g. Ren et al., Cell Res. (2014) 24:1146-1149. Tudor domains typically comprise a barrel-shaped beta strand fold and range in size around 50 and 60 amino acids. See, e.g. Kawale, A. A. & Burmann, B. M. Inherent backbone dynamics fine-tune the functional plasticity of Tudor domains. Structure (2021), incorporated herein by reference; see, in particular, FIG. 1 showing exemplary tudor domain structure.

[0175] In an aspect, the IscB polypeptide, comprises a Tudor Lance (TL) region that are large secondary structure extensions from the tudor domain, see FIGS. 18-20. The TL region may bind to DNA via positive charge contacts. The Lance region of the TL region is oriented in a manner such that extension of the region may result in larger contacts with the DNA major groove near the TAM region of the DNA. The TL region is diverse but typically comprises large hydrophobic amino acids and possesses an overall charge. In general, the TL region may comprise one or more alpha helices and/or one or more beta sheets. The TL region may be ˜25 to 50 amino acids long. In example embodiments, the TL regions is 20, 21, 22, 23, 24, 25, 26, 27, 28, 29, 30, 31, 32, 33, 34, 35, 36, 37, 38, 39, 40, 41, 42, 43, 44, 45, 46, 47, 48, 49, 50, 51, 52, 53, 54, 55, 56, 57, 58, 59, 60, 61, 62, 63, 64, 65, 67, 68, 69, 70, 80, or 90 amino acids long. In an embodiment, the Lance region of the TL region is oriented in a manner such that extension of the region may result in larger contacts with the DNA major groove near the TAM region of the DNA.

### Bridge Helix

[0176] The nucleic-acid guided nuclease comprises a bridge helix (BH) domain. The bridge helix domain refers to a helix and arginine rich polypeptide. The bridge helix domain may be located next to anyone of the amino acid domains in the nucleic-acid guided nuclease. In one embodiment, the bridge helix domain is next to a RuvC domain, e.g., next to RuvC-I, RuvC-II, or RuvC-III subdomain. In one example, the bridge helix domain is between a RuvC-1 and RuvC2 subdomains.

[0177] The bridge helix domain may be from 10 to 100, from 20 to 60, from 30 to 50, e.g., 35, 36, 37, 38, 39, 40, 41, 42, 43, 44, 45, 46 or 47, 48, 49, or 50 amino acids in length. Examples of bridge helix includes the polypeptide of amino acids 60-93 of the sequence of S. pyogenes Cas9. Examples of the BH domain also include any polypeptides a structural similarity and/or sequence similarity to a BH domain described in the art. For example, the BH domain may share a structural similarity and/or sequence similarity to a BH domain of Cas9.

### Chimeric ISCB Polypeptides

[0178] Chimeric IscB polypeptides as referenced herein, start with an IscB polypeptide, such as any of those described above, and modify the IscB polypeptide to include one or more heterologous polypeptide sequences to derive a chimeric IscB polypeptide. As used herein “heterologous” refers to polypeptide sequences that are not native to the unmodified IscB and originate from a source other than the IscB polypeptide being modified. The polypeptide sequences may comprise a functional domain, or functional fragment thereof. Heterologous polypeptide sequences may be added directly to a N-terminus or a C-terminus of the IscB polypeptide being modified, inserted within the IscB polypeptide being modified, or a combination thereof. An insertion of a heterologous sequence may occur between existing amino acids anywhere on the IscB polypeptide. An example location may be a junction, for example a loop region or structure, in between domains. A loop region may form between larger domains comprising alpha helices, beta sheets, or both. A loop region may also form between individual alpha helices or beta sheets. A junction may further comprise a conserved loop region or region with high homology among IscB orthologs. In an example embodiment, one or more insertions of a heterologous polypeptide occurs at a junction.

[0179] In addition to insertions of heterologous polypeptide sequences that do not replace or remove any the existing polypeptide sequence of the IscB polypeptide being modified, substitution where the heterologous polypeptide sequence replaces a portion of the existing polypeptide sequence of the IscB polypeptide being modified are also envisions. In addition to substitutions, some chimeric polypeptides may also require deletion of an existing polypeptide sequences of the IscB being modified. For example, a deletion may be required to remove steric hindrance or other constraints imposed by introduction of the heterologous polypeptide sequence into the IscB polypeptide being modified.

[0180] In one example embodiment, the heterologous polypeptide fragment may be from a homolog or ortholog of IscB. The terms “ortholog” and “homolog” are well known in the art. By means of further guidance, a “homolog” refers to two genes that share a common ancestral gene. Homologous proteins may but need not be structurally related or are only partially structurally related. An “ortholog” are two genes that share common ancestral gene but occur in different species. Orthologous proteins may but need not be structurally related or are only partially structurally related. In one example embodiment, the heterologous polypeptide sequence may comprise a RuvC domain, a HNH domain, a PLMP domain, a TAM interacting (TI) domain, or a RuvC domain from an ortholog or homolog of the IscB polypeptide being modified.

[0181] One or more domains from example IscB polypeptides are utilized herein for insertion including, IscB_Rd4_7, IscB_Rd8_149, ChlorIscB, Iscb_Rd8_127, CRISPR IscB 00644, IscB_large_28, IscB_Rd8_75, IscB_Rd8_151, IscB_Rd8_23, IscB_Rd8_24, and IscB_Rd8_118. Further example IscB polypeptides for use in the chimeric IscB polypeptides are further described herein.

[0182] In one example embodiment, the heterologous polypeptide fragment may be from a CRISPR-Cas system. The heterologous polypeptide sequence or domain may be derived from a a Type 1, a Type II, a Type III, a Type IV, a Type V, or a Type VI CRISPR-Cas system. The heterologous polypeptide sequence may comprise a Rec domain, a RuvC domain, a HNH domain, or a PAM interacting (PI) domain. One or more domains from example CRISPR-Cas polypeptides are utilized herein for insertion including ProCas9-2, Cas9_665, Cas9_1261, and Cas9_1079. Further example polypeptides for use in the chimeric IscB polypeptides are further described herein.

### Modified Rec Domains

[0183] In an example embodiment, a Rec domain, or functional fragment thereof is inserted into an IscB polypeptide. The Rec domain may comprise multiple subdomains, e.g., Rec1, Rec2 and Rec3. The subdomains may be separated by interval sequences on the amino acid sequence of the protein.

[0184] Examples of Rec domains include any polypeptides having a structural similarity and/or sequence similarity to a Rec domain described in the art. For example, the Rec domain may share a structural similarity and/or sequence similarity to a Rec domain of a Type II Cas polypeptide. In another example, the Rec domain may share a structural similarity and/or sequence similarity to a Rec domain of Cas9. In example embodiments, the Rec domain may share a structural similarity and/or sequence similarity to Francisella novicida (FnoCas9), Neisseria meningitidis (NmeCas9), Staphylococcus aureus (SaCas9), Streptococcus pyogenes (SpCas9), Streptococcus thermophilus (StCas9), Acidothermus cellulolyticus (AceCas9), Campylobacter jejuni (CjeCas9) or a combination thereof. In some examples, the Rec domain may have an amino acid sequence that share at least 50%, at least 55%, at least 60%, at least 5%, at least 70%, at least 75%, at least 80%, at least 85%, at least 90%, at least 95%, at least 99%, or 100% sequence identity with Rec domains. Example sequences of insertions of rec domains in Rd8_117 reference IscB polypeptide from Table 1 may comprise a sequence from FIGS. 27-42, 46-48, 51.

[0185] The crystal structure information (described in International Patent Publication No. Publication of WO 2015089364 A1, 61/980,012 filed Apr. 15, 2014; and Nishimasu et al, “Crystal Structure of Cas9 in Complex with Guide RNA and Target DNA,” Cell 156(5):935-949, DOI: dx.doi.org/10.1016/j.cell.2014.02.001 (2014), each and all of which are incorporated herein by reference) provides structural information to truncate and create modular or multi-part CRISPR enzymes which may be incorporated into inducible composition. In particular, structural information is provided for S. pyogenes Cas9 (SpCas9), and this may be extrapolated to other Cas9 orthologs or IscB proteins (as well as homologs and orthologs thereof) or other nucleic acid-guided nucleases. In one embodiment, the conformational variations in the crystal structures of the CRISPR-Cas9 system or of components of the CRISPR-Cas9 provide important and critical information about the flexibility or movement of protein structure regions relative to nucleotide (RNA or DNA) structure regions that may be important for the function of other IscB polypeptide and related systems. The structural information provided for Cas9 (e.g., S. pyogenes Cas9) may be used to further engineer and optimize use in IscB polypeptides as well as interrogate structure-function relationships of related Cas systems.

[0186] In some examples, the Rec domain comprise Rec1 polypeptide, Rec2 polypeptide, and/or Rec3 polypeptide. Examples of the Rec1 domain also include any polypeptides having a structural similarity and/or sequence similarity to a Rec domain described in the art. For example, the Rec1 domain may share a structural similarity and/or sequence similarity to a Rec of Cas9. In some examples, the Rec domain may have an amino acid sequence that share at least 50%, at least 55%, at least 60%, at least 65%, at least 70%, at least 75%, at least 80%, at least 85%, at least 90%, at least 95%, at least 99%, or 100% sequence identity with Rec domain. The Rec2 domain also include any polypeptides of structural similarity and/or sequence similarity to a Rec2 domain described in the art. For example, the Rec2 domain may share a structural similarity and/or sequence similarity to a Rec2 of Cas9. In some examples, the Rec domain may have an amino acid sequence that share at least 50%, at least 55%, at least 60%, at least 65%, at least 70%, at least 75%, at least 80%, at least 85%, at least 90%, at least 95%, at least 99%, or 100% sequence identity with Rec2 domains. The Rec3 domain also include any polypeptides of structural similarity and/or sequence similarity to a Rec3 domain described in the art. For example, the Rec3 domains may share a structural similarity and/or sequence similarity to a Rec3 of Cas9. In some examples, the Rec domain may have an amino acid sequence that share at least 50%, at least 55%, at least 60%, at least 65%, at least 70%, at least 75%, at least 80%, at least 85%, at least 90%, at least 95%, at least 99%, or 100% sequence identity with Rec3 domains.

[0187] For example, and as described in the art (e.g., Crystal structure of Cas9 in complex with guide RNA and target DNA, Nishimasu et al. Cell, 2014) the Rec domain of Cas9 consists of three regions, a long a helix referred to as the bridge helix, the REC1 domain, and the REC2 domain. REC1 adopts an elongated, α-helical structure comprising 25 α helices (α2-α5 and α12-α32) and two β sheets (β6 and β10 and β7-β9), whereas REC2 adopts a six-helix bundle structure (α6-α11).

[0188] In an example embodiment, the Rec domain is inserted at a junction in the IscB polypeptide or analogous position of another IscB polypeptide. In an example embodiment, the Rec domain is inserted between amino acids 153-160 of RD8_117 polypeptide of Table 1, or an analogous position of another IscB polypeptide.

### Nucleotide Binding Proteins

[0189] The IscB polypeptide may include a nucleotide binding domain, which may comprise a protein or fragment thereof, to enhance or extend the functionality of the IscB polypeptide. A nucleotide binding domain may enhance functionality by stabilizing one or more domains of the IscB polypeptide, for example the polynucleotide components of the IscB. The functionality of the IscB polypeptide may be extended by the nucleotide binding domain by adding additional nuclease activity or additional substrate binding.

[0190] In an example embodiment, a nucleotide binding domain is inserted into the IscB polypeptide. The nucleotide binding domain may be capable of binding to RNA, DNA, or both. In general, such a system may comprise a nuclease (e.g., an endonuclease and/or exonuclease), a hybrid binding domain, or a RuvC domain associated (e.g., fused) with a IscB polypeptide, e.g., IscB protein. In an example embodiment, the nucleotide binding domain is inserted at a junction in the IscB polypeptide or analogous position of another IscB polypeptide. In an example embodiment, the nucleotide binding domain is inserted between amino acids 153-160 of amino acids 153-160 of RD8_117 polypeptide of Table 1, or an analogous position of another IscB polypeptide.

### Endo/Exonucleases

[0191] In an example embodiment, an endonuclease, or fragment thereof, is inserted into the IscB polypeptide. Endonucleases, or restriction endonucleases, bind and cleave internal strands of nucleic acids. Endonucleases may bind RNA and DNA. Endonucleases are classified into different types according to their structure, recognition site, cleavage site, cofactor(s), and activator(s). These Endonuclease types are I, II, III, and IV which further include subclasses. Depending on the endonuclease, one or more subunits and one or more holoenzymes may be required to form the restriction, methylase, and specificity domain. An endonuclease may be selected for stabilizing the IscB polypeptide, targeting a substrate, or conferring an additional function. These domains may be associated (e.g. fused) on one or more IscB polypeptides.

[0192] Endonucleases requires the presence of Mg²⁺ for nuclease activity and S-adenosyl methionine for methylase stimulation or activity. In general, the recognition sites are 4, 5, 6, 7, or 8 bases long as well as palindromic. In an example embodiment, the endonuclease is a Type II endonuclease. Type II endonucleases are, in general, homodimers around 25 and 35 kDa per monomer. The homodimers typically form a 3D “U” shaped dimeric holoenzyme wherein the recognition domains form the sides and bridging domains at the bottom. Type II share a common core comprising five β-sheets flanked on each side by an α-helix. Some endonucleases are capable of binding to and hydrolyzing ssDNA or ssRNA.

[0193] Fragments of the endonuclease may be fused to IscB polypeptides. In example embodiments, the recognition domain is fused to an IscB polypeptides. This may comprise various spacers and constructs. Various endonucleases and fusion sites are known in the art and may be utilized herein. See Williams, Raymond J. “Restriction endonuclease.” Molecular biotechnology 23.3 (2003): 225-243. In an example embodiment, an endonuclease or fragment thereof is associated (e.g., fused) with a junction in an IscB polypeptide or analogous position of another IscB polypeptide. In an example embodiment, the endonuclease, or fragment thereof, is inserted between around amino acids 153-160 amino acids 153-160 of RD8_117 polypeptide of Table 1, or an analogous position of another IscB polypeptide.

[0194] In an examine embodiment, an exonuclease, or fragment thereof, is inserted into the IscB polypeptide. Exonucleases bind and cleave the 3′ or 5′ ends of nucleic acids. Exonucleases may bind to RNA and DNA. Exonucleases are classified into different types according to their function. These types are I, II, III, IV, V, VII, and Lambda.

### RNase/DNase

[0195] In an example embodiment, an RNase, or fragment thereof, is inserted into the IscB polypeptide. A ribonuclease (RNase) is a polypeptide that binds to and hydrolyzes RNA substrates. Natural RNases can be found in both bacterial and eukaryotic enzymes and are well known in the art. RNases are typically characterized by the substrates they bind and ribonucleolytic activity. The RNase, or fragment thereof, may comprise a RNA binding domain.

[0196] The IscB polypeptide may include am RNase, or fragment thereof, to enhance or extend the functionality of the IscB polypeptide. An RNase may enhance functionality by stabilizing one or more domains of the IscB polypeptide, for example the polynucleotide components of the IscB. The functionality of the IscB polypeptide may be extended by an RNase by adding additional nuclease activity or additional substrate binding. An RNase may be associated (e.g., fused) with an IscB polypeptide. This association may be at a junction (further described herein). An RNase may be associated at a junction at or near the surface or the IscB polypeptide or a junction wherein the association does not result in steric clashes between the IscB polypeptide and the RNase.

[0197] In an example embodiment, the RNase is an endoribonuclease or exoribonuclease. In an example embodiment, the endoribonuclease comprises RNase A, RNase H, RNase H, RNase III, RNase L, RNase P, RNase PhyM, RNase T1, RNase T2, RNase US, RNase V, RNase E, or RNase G. In an example embodiment, the exoribonuclease comprises exoribonuclease I, exoribonuclease II, RNase PH, RNase R, RNase D, RNase T.

[0198] In an example embodiment, an RNase or fragment thereof is associated (e.g., fused) with a junction in an IscB polypeptide or analogous position of another IscB polypeptide. In an example embodiment, an RNase, or fragment thereof, is inserted between around amino acids 153-160 of amino acids 153-160 of RD8_117 polypeptide of Table 1, or an analogous position of another IscB polypeptide. Example RNase fusions that may be applied to IscB polypeptides by one skilled in the art can be found in Table 1 of Gotte, G.; Menegazzi, M. Biological Activities of Secretory RNases: Focus on Their Oligomerization to Design Antitumor Drugs. Frontiers in Immunology, 2019, 10 incorporated herein by reference.

[0199] In an example embodiment, a DNase, or fragment thereof, is inserted into the IscB polypeptide. A deoxyribonuclease (DNase) is a polypeptide that binds to and hydrolyzes DNA substrates and are well known in the art. The DNase, or fragment thereof, may comprise a DNA binding domain. In general, DNases are categorized into two families by their biochemical and biological properties: DNase I, which comprises of DNase 1L1, DNase 1L2, and DNase 1L3, and DNase II, which comprises DNase II a, DNase II R and L-DNase II. DNase I require Mg²⁺ and Ca²⁺ for catalytic activity while DNase II does not. In an example embodiment, the DNase is an endodeoxyribonuclease or an exodeoxyribonuclease.

[0200] In an example embodiment, the DNase is inserted at a junction in the IscB polypeptide or analogous position of another IscB polypeptide. In an example embodiment, the DNase, or fragment thereof, is inserted between amino acids around 153-160 of amino acids 153-160 of RD8_117 polypeptide of Table 1 or an analogous position of another IscB polypeptide. See Lauková, L.; Konečná, B.; Janovičová, L'.; Vlková, B.; Celec, P. Deoxyribonucleases and Their Applications in Biomedicine. Biomolecules, 2020, 10, 1036.

### Hybrid Binding Domain

[0201] In an example embodiment, a hybrid binding domain (HBD), or functional fragment thereof, is inserted into the IscB polypeptide. The HBD confers binding to RNA/DNA hybrids as well as binding to dsRNA and dsDNA. The HBD may comprise a domain at an amino terminal (N-terminal) of a RNase I. The HBD domain of RNase I is composed of a three-stranded antiparallel β sheet and two short helices. In general, HBD has two separate regions that independently bind to RNA and DNA. A protein loop in the HBD recognizes the RNA strand and forms hydrogen bonds with the 2′-OH groups while polar residues in the HBD interact with the phosphate groups and aromatic residues are selective for deoxyriboses. See Nowotny, Marcin et al. “Specific recognition of RNA/DNA hybrid and enhancement of human RNase H1 activity by HBD.” The EMBO journal vol. 27, 7 (2008): 1172-81. doi:10.1038/emboj.2008.44 and Wang, K.; Wang, H.; Li, C.; Yin, Z.; Xiao, R.; Li, Q.; Xiang, Y.; Wang, W.; Huang, J.; Chen, L.; Fang, P.; Liang, K. Genomic Profiling of Native R Loops with a DNA-RNA Hybrid Recognition Sensor. Science Advances, 2021, 7.

[0202] The IscB polypeptide may include an HBD, or fragment thereof, to enhance or extend the functionality of the IscB polypeptide. An HBD may enhance functionality by stabilizing one or more domains of the IscB polypeptide, for example the polynucleotide components of the IscB. The functionality of the IscB polypeptide may be extended by an HBD by adding additional nuclease activity or additional substrate binding. An HBD may be associated (e.g., fused) with an IscB polypeptide. This association may be at a junction (further described herein). An HBD may be associated at a junction at or near the surface or the IscB polypeptide or a junction wherein the association does not result in steric clashes between the IscB polypeptide and the HBD. In an example embodiment, the HDB is inserted at a junction in the IscB polypeptide or analogous position of another IscB polypeptide. In an example embodiment, the HBD is inserted between amino acids around 153-160 of amino acids 153-160 of RD8_117 polypeptide of Table 1, or an analogous position of another IscB polypeptide.

### RuvC Domains

[0203] In an example embodiment, a RuvC domain, or fragment thereof, is inserted into the IscB polypeptide. The RuvC domain may comprise multiple subdomains, e.g., RuvC-I, RuvC-II and RuvC-III. The subdomains may be separated by interval sequences on the amino acid sequence of the protein.

[0204] The IscB polypeptide may include a RuvC domain, or fragment thereof, to enhance or extend the functionality of the IscB polypeptide. A RuvC domain may enhance functionality by stabilizing one or more domains of the IscB polypeptide, for example the polynucleotide components of the IscB. The functionality of the IscB polypeptide may be extended by an RuvC domain by adding additional nuclease activity or additional substrate binding. An RuvC domain may be associated (e.g. fused) with an IscB polypeptide. This association may be at a junction (further described herein). A RuvC domain may be associated at a junction at or near the surface or the IscB polypeptide or a junction wherein the association does not result in steric clashes between the IscB polypeptide and the RuvC domain.

[0205] Examples of the RuvC domain also include any polypeptides a structural similarity and/or sequence similarity to a RuvC domain described in the art. For example, the RuvC domain may share a structural similarity and/or sequence similarity to a RuvC of Cas9.

[0206] In some examples, the RuvC domain comprise RuvC-I polypeptide, RuvC-II polypeptide, and RuvC-III polypeptide. Examples of the RuvC-I domain also include any polypeptides a structural similarity and/or sequence similarity to a RuvC-I domain described in the art. For example, the RuvC-I domain may share a structural similarity and/or sequence similarity to a RuvC-I of Cas9. The RuvC-II domain also include any polypeptides a structural similarity and/or sequence similarity to a RuvC-II domain described in the art. For example, the RuvC-II domain may share a structural similarity and/or sequence similarity to a RuvC-II of Cas9. The RuvC-III domain also include any polypeptides a structural similarity and/or sequence similarity to a RuvC-III domain described in the art. For example, the RuvC-III domains may share a structural similarity and/or sequence similarity to a RuvC-III of Cas9.

[0207] For example, and as described in the art (e.g. Crystal structure of Cas9 in complex with guide RNA and target DNA, Nishimasu et al. Cell, 2014) the RuvC domain of Cas9 consists of a six-stranded mixed β-sheet (β1, β2, β5, β11, β14 and β17) flanked by α-helices (α33, α34 and α39-α45) and two additional two-stranded antiparallel β-sheets (03/04 and β15/β16). It has been described that the RuvC domain of Cas9 shares structural similarity with the retroviral integrase superfamily members characterized by an RNase H fold, such as Escherichia coli RuvC (PDB code 1HJR, 14% identity, root-mean-square deviation (rmsd) of 3.6 Å for 126 equivalent Cα atoms) and Thermus thermophilus RuvC (PDB code 4LD0, 12% identity, rmsd of 3.4 Å for 131 equivalent Cα atoms). RuvC nucleases have four catalytic residues (e.g., Asp7, Glu70, His143 and Asp146 in T. thermophilus RuvC), and cleave Holliday junctions through a two-metal mechanism. Asp10 (Ala), Glu762, His983 and Asp986 of the Cas9 RuvC domain are located at positions similar to those of the catalytic residues of T. thermophilus RuvC. There are key structural discrepancies between the Cas9 RuvC domain and the RuvC nucleases, which explain their functional differences. Unlike the Cas9 RuvC domain, the RuvC nucleases form dimers and recognize Holliday junctions. In addition to the conserved RNase H fold, the Cas9 RuvC domain has other structural elements involved in interactions with the guide:target heteroduplex (an end-capping loop between α42 and α43) and the PI domain/stem loop 3 (β-hairpin formed by β3 and β4).

[0208] In one embodiment, the nucleic acid-guided nuclease comprises at least one nuclease domain. In an embodiment, the nucleic acid-guided nuclease protein comprises at least two nuclease domains. In an embodiment, the one or more nuclease domains are only active upon presence of a cofactor. In an embodiment, the cofactor is Magnesium (Mg). In embodiments where more than one nuclease domain is present and the substrate is a double-strand polynucleotide, the nuclease domains each cleave a different strand of the double-strand polynucleotide. In an embodiment, the nuclease domain is a RuvC domain. In an example embodiment the RuvC domain lacks nuclease activity.

[0209] In an example embodiment, the RuvC is inserted at a junction in the IscB polypeptide or analogous position of another IscB polypeptide. In an example embodiment, the RuvC domain, or fragment thereof, is inserted between amino acids around 153-160 of amino acids 153-160 of RD8_117 polypeptide of Table 1, or an analogous position of another IscB polypeptide.

### TAM/PAM Interaction Domain Modifications

[0210] The IscB polypeptides may comprise modifications to, or insertions of, a TAM interacting (TI) domain from another IscB or Omega system, a WED/adaptor stabilizer domain from another IscB or Omega system, or a PAM Interacting (PI) domain from a CRISPR-Cas system. In one embodiment, insertion preserves RNA interaction with the TAM determining region, or improves RNA interaction with the TAM determining region. The TI domain insertion or WED/adaptor stabilizer insertion can be from another IscB polypeptide and allows for the TAM to be modified relative to the wild-type IscB polypeptide.

[0211] The IscB systems disclosed may recognize a target adjacent motif (TAM) in order to recognize and bind a target sequence on a target polynucleotide. In one embodiment, the IscB polypeptide and related compositions do not contain a TAM requirement or may be engineered to comprise a TI domain or functional fragment thereof. The precise sequence and length requirements for the TAM will differ depending on the IscB polypeptide used, and/or the TI domain insertion. In an example embodiment, TAM determining region comprises one or more amino acid substitutions.

[0212] In some examples, TAMs are typically 2-5 base pair sequences adjacent the protospacer (that is, the target sequence). In one example embodiment, the TAM is 3′ adjacent to the target polynucleotide. In another example embodiment, the TAM is 5′ adjacent to the target sequence of the target polynucleotide. In one embodiment, the cleavage site is distant from the Target Adjacent Motif (TAM), e.g., the cleavage occurs after the nth nucleotide on the non-target strand and after the nucleotide on the targeted strand. In one embodiment, the cleavage site occurs after an identified nucleotide (counted from the TAM) on the non-target strand and after the further identified nucleotide (counted from the TAM) on the targeted strand.

[0213] The WED/adaptor stabilizer region, is also referred to the wedge (WED) domain, see FIG. 9. WED domains are typically identified as oligonucleotide binding domains and may aid in recognition and/or stability of RNA scaffolds, and have intermolecular interactions with the RNA scaffold structure. The WED domain may be adjacent to or in proximity to a TAM interacting domain in an unmodified IscB polypeptide. In an embodiment, the WED domain may have structural similarity to the WED domain of Cas9, which comprises a fold with a twisted five-stranded beta sheet flanked by four alpha helices and is responsible for the recognition of the distorted repeat: anti-repeat duplex. See, Morlot et al., J Biol. Chem. 280, 15984-91, (2005). The WED domain of an unmodified IscB polypeptide may comprise one or more antiparallel β sheet or β strands flanked by one or more alpha helices.

[0214] In an example embodiment, the TI domain, WED domain, PI domain, or functional fragment thereof is inserted between amino acids 365-499 of IscB polypeptide Rd8_117 from Table 1, or an analogous position of another IscB polypeptide. In an example embodiment, the TI domain, WED domain, PI domain, or functional fragment thereof is from a Type II Cas polypeptide. In an example embodiment, the TI domain or functional fragment thereof is from an IscB polypeptide. In an example embodiment, the TAM of the wild-type IscB polypeptide is retained or wherein the TAM is modified. In an example embodiment, the insertion replaces amino acids 365-499, 369-499, 462-486 (Lance), 450-486 (Tudor), or 376-383, 436-448, and 462-486 (Lance_TIL) of the TI domain of Rd8_117 of Table 1, or an analogous position of another IscB polypeptide.

[0215] In an example embodiment, the insertion comprises 380-735 from SEQ ID NO: 2365, one or more amino acid positions 556-609 from cA2 ProCas9-2, one or more amino acid positions 356-420 from IscB_Rd8_149, one or more amino acid positions 386-464 from IscB_Rd4_7, one or more amino acid positions 856-924 from Cas9_971, one or more amino acid positions 569-751 from Cas9_1079_3, one or more amino acid positions from ChlorIscB, one or more amino acid positions 488-512 from SEQ ID NO: 2367, one or more amino acid positions 739-765 from SEQ ID NO 2365, one or more amino acid positions 407-431 from IscB_Rd8_127, one or more amino acid positions 404-430 from CRISPR IscB 00644, one or more amino acid positions 376-482 from IscB_large_28, one or more amino acid positions 356-488 from IscB_Rd8_149, one or more amino acid positions 376_482 from IscB_Rd8_75, one or more amino acid positions 374-495 from IscB_Rd8_151, one or more amino acid positions 376-477 from IscB_Rd8_23, one or more amino acid positions 376-477 from IscB_Rd8_24, one or more amino acid positions 376-486 from IscB_Rd8_118, one or more amino acid positions 374-495 from IscB_Rd8_151, and/or one or more amino acid positions 376-486 amino acids from IscB_Rd8_118, In an example embodiment, any one or more of the TI, Tudor, or Tudor Lance domain insertions are performed on an analogous position in the WED domain with an analogues domain. Example sequences of insertions or substitutions in Rd8_117 reference IscB polypeptide from Table 1 may comprise a sequence from any one of FIGS. 52 to 95.

[0216] In one example embodiment, the IscB polypeptides lack or substantially lack a PAM interacting (PI) domain. In an embodiment, the IscB polypeptides may be engineered to comprise a PI domain or a functional fragment of a PI domain. In an embodiment, the IscB polypeptides may achieve a target specificity by a non-protein domain. In an embodiment, targeting specificity is obtained by a central hairpin structure in a guide molecule.

[0217] Examples of PAM sequences for the IscB polypeptides herein include NGG and NAC. For example, the IscB polypeptide may recognize PAM sequence NAC. In an example embodiment, wherein the domain is an NGG PI or TI domain, or functional fragment thereof.

[0218] The PAM interaction domain or PI domain as referred to herein is reported to be responsible for determining PAM specificity of IscB polypeptides. By means of example, the PI domain is contained in the NUC lobe and forms an elongated structure comprising seven α-helices, a three-stranded antiparallel β-sheet, a five-stranded antiparallel β-sheet, and a two-stranded antiparallel β-sheet.

[0219] In some cases, where the IscB polypeptide do have a PAM requirement, the precise sequence and length requirements for the PAM will differ depending on the IscB polypeptide used. In some examples, PAMs are typically 2-5 base pair sequences adjacent the protospacer (that is, the target sequence). Examples of the natural PAM sequences for different nucleic acid-guided nucleases orthologs have been identified and the skilled person will be able to identify further PAM sequences for use in the engineered IscB polypeptides.

[0220] Further, associating a PAM Interacting (PI) domain (e.g., attaching or fusing) to a nucleic acid-guided nuclease may allow programing of PAM specificity, improve target site recognition fidelity, and increase the versatility of the IscB, genome engineering platform. IscB polypeptide may be engineered to alter their PAM specificity, for example as described in Kleinstiver B P et al. Engineered CRISPR-Cas9 nucleases with altered PAM specificities. Nature. 2015 Jul. 23; 523(7561):481-5. doi: 10.1038/nature14592. The skilled person will understand that other IscB proteins may be modified analogously.

### C-Terminus Modifications

[0221] The C-Terminal domain of the IscB polypeptide may be modified to enhance or extend functionality of the IscB polypeptide. The C-Terminal domain may be enhanced or extended by removing, substituting, or adding one or more amino acids or functional domains to the C-Terminal domain. These modifications (e.g., removing, substituting, or adding) may enhance the IscB polypeptide by, for example, stabilizing the IscB polypeptide or increasing the specificity of target binding. These modifications may also extend the functionality of the IscB polypeptide by, for example, the addition of non-native enzymatic function or promoting on-off switching as further described herein.

[0222] The C-terminal domain may comprise one or more conserved residues or motifs. The C-terminal domain may be no more than 10, no more than 20, no more than 30, no more than 40, no more than 50, no more than 60, no more than 70, no more than 80, no more than 90, or no more than 100 amino acids in length. For example, the C-terminal domain may be no more than 70 amino acids in length, such as comprising 2 3, 4, 5, 6, 7, 8, 9, 10, 11, 12, 13, 14, 15, 16, 17, 18, 19, 20, 21, 22, 23, 24, 25, 26, 27, 28, 29, 30, 31, 32, 33, 34, 35, 36, 37, 38, 39, 40, 41, 42, 43, 44, 45, 46, 47, 48, 49, 50, 51, 52, 53, 54, 55, 56, 57, 58, 59, 60, 61, 62, 63, 64, 65, 66, 67, 68, 69, or 70 amino acids in length.

[0223] In an aspect, the IscB polypeptide, comprises a C-terminal domain that is structurally homologous to a tudor domain. See, e.g. Ren et al., Cell Res. (2014) 24:1146-1149. Tudor domains typically comprise a barrel-shaped beta strand fold and range in size around 50 and 60 amino acids. See, e.g. Kawale, A. A. & Burmann, B. M. Inherent backbone dynamics fine-tune the functional plasticity of Tudor domains. Structure (2021), incorporated herein by reference; see, in particular, FIG. 1 showing exemplary tudor domain structure.

[0224] The C-terminus of the present invention may be engineered to comprise additional functionality. Any one or more amino acids of the C-terminus may be substituted to fuse a functional domain to the C-terminus. The one or more amino acids may comprise amino acids that interact with non-target nucleic acid, amino acids that do not interact with non-target nucleic acid, or both.

[0225] In an example embodiment, a C-terminus is engineered for nucleotide editing. In an example a nucleotide deaminase is fused at the C-terminus of the IscB polypeptide. In an example embodiment, the C-terminus is engineered to comprise a transposase. In an example embodiment, the C-terminus is engineered to comprise a base editing system. In an example embodiment, the C-terminus is engineered for a prime editing system. Further examples and descriptions are further described elsewhere herein.

### Additional Modifications

[0226] In an example embodiment, one or more amino acids on the surface of the engineered IscB are substituted or removed. Additional modifications may comprise substituting or removing one or more amino acids (i.e., modified amino acids) on the surface of the IscB polypeptide. In an example embodiment, the one or more amino acids on the surface of the engineered IscB are substituted to have a different charge. The one or more charged amino acids on the surface of the IscB polypeptide may be substituted to increase or decrease the surface charge of the IscB polypeptide. The one or more amino acids substituted or removed may carry a charge (e.g., Arginine, Histidine, Lysine, Aspartic Acid, Glutamic Acid). In an example embodiment, the one or more amino acids on the surface of the engineered IscB are removed or substituted to increase or decrease the overall charge of the protein surface. For example, one or more positively charged amino acids (e.g., Arg, His, Lys) are substituted with a negatively charged amino acid (e.g., Asp, Glu). In an example embodiment, wherein the surface charge of the engineered IscB is more neutral relative to the wildtype. For example, one or more positively charged amino acids and one or more negatively charged amino acids are substituted with a neutral charge amino acid.

[0227] The IscB polypeptides may comprise one or more amino acid mutations. The present disclosure provides a mutated IscB polypeptide, having one or more mutations resulting in improved activity, e.g., improved IscB enzymes for use in effecting modifications to target loci when complexed to ωRNAs, relative to an unmodified or wild-type IscB. The present disclosure provides a mutated chimeric IscB polypeptide, having one or more mutations resulting in improved activity, e.g., improved chimeric IscB enzymes for use in effecting modifications to target loci when complexed to ωRNAs, relative to chimeric IscB without the one or more amino acid modifications. It is to be understood that mutated polypeptides as described herein below may be used in any of the methods according to the present disclosure as described herein elsewhere and with chimeric IscB polypeptides described herein. Any of the methods, products, compositions and uses as described herein elsewhere are equally applicable with the mutated IscB polypeptides as further detailed below. Mutations may be varied in the precise amino acid substitution utilized as described elsewhere herein and can be varied at similar positions to achieve similar effects.

[0228] In one example embodiment, the one or more amino acid mutations increase activity by 1-fold, 1.5-fold, 2.0-fold or more relative to an unmodified (e.g. unmutated or wild-type) IscB polypeptide. In an example embodiment, the IscB polypeptide is mutated at amino acid position H271, Q60, W425, A288, E308, P405, E409, D413, G416, L291, N66, 185, L470, T561, E576, E137, M500, E501, T358, S352, V490, G489, T484, 1533, N566, T481, T536, and/or Y538 corresponding to the amino acid positions in of IscB Rd8_117 Cas9 1079_1 protein (SEQ ID NO: 25278). In an example embodiment, the IscB polypeptide is mutated at an amino acid position identified in Table 3. In an example embodiment, the IscB polypeptide is mutated by extending the DNA/RNA duplex channel and may comprise one or more mutations correspond to E308R, P405R, E409R, D413K, G416K and/or L291R of scB Rd8_117 Cas9 10791 protein (SEQ ID NO: 25278). In an example embodiment, the IscB polypeptide is mutated by hydrophobic repacking of RuvC and may comprise one or more mutations corresponding to H271I, Q60I, W425R and A288V of IscB Rd8_117 Cas9 1070. In an example embodiment, the IscB polypeptide is mutated by creating a new or modified non-target strand channel and may comprise one or more mutations correspond to I85R, L470R and/or N66H of IscB Rd8_117 Cas9 1079_1 protein (SEQ ID NO: 25278). In an example embodiment, the IscB polypeptide is mutated by altering unwinding activity and may comprise one or more mutations correspond to T561R and/or E576R of IscB Rd8_117 Cas9 1079_1 protein. In an example embodiment, the IscB polypeptide is mutated by enhancing the DNA/RNA channel and may comprise one or more mutations correspond to E137K, T358R, S352H, M500K and/or E501K of IscB Rd8_117 Cas9 1079_1 protein of IscB Rd8_117 Cas9 1079_1 protein (SEQ ID NO: 25278). In an example embodiment, the IscB polypeptide is mutated to alter non-specific DNA binding, and may comprise one or more mutations that correspond to V490K, G489K, T484K, I533K, N566R, T481R, T536R, and/or Y538R of IscB Rd8_117 Cas9 10791 protein (SEQ ID NO: 25278). Further example mutations are detailed at Table 3 of the working examples.

[0229] In an example embodiment, the IscB polypeptide mutations comprise Q60, W425, and A288 corresponding to IscB Rd8_117 Cas9 1079_1 protein (SEQ ID NO: 25278). In one embodiment, the IscB polypeptide mutations comprise Q60I, W425R and A288V corresponding to IscB Rd8_117 Cas9 1079_1 protein (SEQ ID NO: 25278). In an example embodiment, the IscB polypeptide mutations comprise W425, and A288 corresponding to IscB Rd8_117 Cas9 10791 protein (SEQ ID NO: 25278). In one embodiment, the IscB polypeptide mutations comprise Q60I and A288V corresponding to IscB Rd8_117 Cas9 1079_1 protein (SEQ ID NO: 25278). In an example embodiment, the IscB polypeptide mutations comprise Q60 and W425 corresponding to IscB Rd8_117 Cas9 1079_1 protein (SEQ ID NO: 25278). In one embodiment, the mutations comprise Q60I and W425R corresponding to IscB Rd8_117 Cas9 1079_1 protein (SEQ ID NO: 25278).

[0230] In an example embodiment, the IscB polypeptide mutations comprise P405, E409. E308, and L291 corresponding to IscB Rd8_117 Cas9 10791 protein (SEQ ID NO: 25278). In one embodiment, the IscB polypeptide mutations comprise P405R, E409R, E308R, and L291R corresponding to IscB Rd8_117 Cas9 1079_1 protein (SEQ ID NO: 25278). In an example embodiment, the IscB polypeptide mutations comprise E409, E308, and L291 corresponding to IscB Rd8_117 Cas9 10791 protein (SEQ ID NO: 25278). In one embodiment, the mutations comprise E409R, E308R, and L291R corresponding to IscB Rd8_117 Cas9 10791 protein (SEQ ID NO: 25278). In an example embodiment, the mutations comprise P405, E308, and L291 corresponding to IscB Rd8_117 Cas9 1079_1 protein (SEQ ID NO: 25278). In one embodiment, the IscB polypeptide mutations comprise P405R, E308R, and L291R corresponding to IscB Rd8_117 Cas9 1079_1 protein (SEQ ID NO: 25278). In an example embodiment, the IscB polypeptide mutations comprise P405, E409. and L291 corresponding to IscB Rd8_117 Cas9 10791 protein (SEQ ID NO: 25278). In one embodiment, the IscB polypeptide mutations comprise P405R, E409R, and L291R corresponding to IscB Rd8_117 Cas9 1079_1 protein (SEQ ID NO: 25278). In an example embodiment, the IscB polypeptide mutations comprise P405, E409. E308, and L291 corresponding to IscB Rd8_117 Cas9 1079_1 protein (SEQ ID NO: 25278). In an example embodiment, the IscB polypeptide mutations comprise P405, E409, and E308 corresponding to IscB Rd8_117 Cas9 1079_1 protein (SEQ ID NO: 25278). In one embodiment, the mutations comprise P405R, E409R, and E308R corresponding to IscB Rd8_117 Cas9 1079_1 protein (SEQ ID NO: 25278).

[0231] In an example embodiment, the IscB polypeptide mutations comprise 185, E576, E137, 1533, E409, and A88 corresponding to IscB Rd8_117 Cas9 1079_1 protein (SEQ ID NO: 25278). In one embodiment, the IscB polypeptide mutations comprise I85R, E576R, E137K, I533K, E409R, and A88V corresponding to IscB Rd8_117 Cas9 1079_1 protein (SEQ ID NO: 25278). In an example embodiment, the mutations comprise E576, E137, 1533, E409, and A88 corresponding to IscB Rd8_117 Cas9 1079_1 protein (SEQ ID NO: 25278). In one embodiment, the IscB polypeptide mutations comprise E576R, E137K, 1533K, E409R, and A88V corresponding to IscB Rd8_117 Cas9 1079_1 protein (SEQ ID NO: 25278). In an example embodiment, the IscB polypeptide mutations comprise 185, E137, 1533, E409, and A88 corresponding to IscB Rd8_117 Cas9 1079_1 protein (SEQ ID NO: 25278). In one embodiment, the IscB polypeptide mutations comprise I85R, E137K, 1533K, E409R, and A88V corresponding to IscB Rd8_117 Cas9 1079_1 protein (SEQ ID NO: 25278). In an example embodiment, the IscB polypeptide mutations comprise 185, E576, 1533, E409, and A88 corresponding to IscB Rd8_117 Cas9 1079_1 protein (SEQ ID NO: 25278). In one embodiment, the IscB polypeptide mutations comprise I85R, E576R, 1533K, E409R, and A88V corresponding to IscB Rd8_117 Cas9 1079_1 protein (SEQ ID NO: 25278). In an example embodiment, the IscB polypeptide mutations comprise 185, E576, E137, E409, and A88 corresponding to IscB Rd8_117 Cas9 1079_1 protein (SEQ ID NO: 25278). In one embodiment, the IscB polypeptide mutations comprise I85R, E576R, E137K, E409R, and A88V corresponding to IscB Rd8_117 Cas9 1079_1 protein (SEQ ID NO: 25278). In an example embodiment, the IscB polypeptide mutations comprise 185, E576, E137, 1533, and A88 corresponding to IscB Rd8_117 Cas9 1079_1 protein (SEQ ID NO: 25278). In one embodiment, the IscB polypeptide mutations comprise I85R, E576R, E137K, 1533K, and A88V corresponding to IscB Rd8_117 Cas9 1079_1 protein (SEQ ID NO: 25278). In an example embodiment, the IscB polypeptide mutations comprise 185, E576, E137, 1533, and E409 corresponding to IscB Rd8_117 Cas9 1079_1 protein (SEQ ID NO: 25278). In one embodiment, the IscB polypeptide mutations comprise I85R, E576R, E137K, 1533K, and E409R corresponding to IscB Rd8_117 Cas9 1079_1 protein (SEQ ID NO: 25278).

[0232] In an example embodiment, the IscB polypeptide mutations comprise E409 and E576 corresponding to IscB Rd8_117 Cas9 1079_1 protein (SEQ ID NO: 25278). In one embodiment, the mutations comprise E409R and E576R corresponding to IscB Rd8_117 Cas9 1079_1 protein (SEQ ID NO: 25278). In an example embodiment, the IscB polypeptide mutations comprise E409 and A288 corresponding to IscB Rd8_117 Cas9 1079_1 protein (SEQ ID NO: 25278). In one embodiment, the IscB polypeptide mutations comprise E409R and A288V corresponding to IscB Rd8_117 Cas9 1079_1 protein (SEQ ID NO: 25278). In an example embodiment, the IscB polypeptide mutations comprise E409 and 1533 corresponding to IscB Rd8_117 Cas9 1079_1 protein (SEQ ID NO: 25278). In one embodiment, the IscB polypeptide mutations comprise E409R and I533K corresponding to IscB Rd8_117 Cas9 1079_1 protein (SEQ ID NO: 25278). In an example embodiment, the IscB polypeptide mutations comprise E409 and 185 corresponding to IscB Rd8_117 Cas9 1079_1 protein (SEQ ID NO: 25278). In one embodiment, the IscB polypeptide mutations comprise E409R and I85R corresponding to IscB Rd8_117 Cas9 1079_1 protein (SEQ ID NO: 25278). In an example embodiment, the mutations comprise E409 and E137 corresponding to IscB Rd8_117 Cas9 1079_1 protein (SEQ ID NO: 25278). In one embodiment, the IscB polypeptide mutations comprise E409R and E137K corresponding to IscB Rd8_117 Cas9 1079_1 protein (SEQ ID NO: 25278). In an example embodiment, the IscB polypeptide mutations comprise P405 and E576 corresponding to IscB Rd8_117 Cas9 1079_1 protein (SEQ ID NO: 25278). In one embodiment, the IscB polypeptide mutations comprise P405R and E576R corresponding to IscB Rd8_117 Cas9 1079_1 protein (SEQ ID NO: 25278). In an example embodiment, the IscB polypeptide mutations comprise T561 and E576 corresponding to IscB Rd8_117 Cas9 1079_1 protein (SEQ ID NO: 25278). In one embodiment, the IscB polypeptide mutations comprise T561R and E576R corresponding to IscB Rd8_117 Cas9 1079_1 protein (SEQ ID NO: 25278). In an example embodiment, the IscB polypeptide mutations comprise E137 and S352. In one embodiment, the IscB polypeptide mutations comprise E137K and S352H corresponding to IscB Rd8_117 Cas9 1079_1 protein (SEQ ID NO: 25278). Further description of the combination mutations is provided in the working examples at Table 4.

[0233] The term “corresponding amino acid” or “residue which corresponds to” refers to a particular amino acid or analogue thereof in an IscB homolog or ortholog that is identical, functionally or otherwise equivalent to an amino acid in a reference IscB protein. Such equivalency may be based on structural domain or subdomains of the IscB protein and may be according to alignments as described elsewhere herein. Accordingly, as used herein, referral to an “amino acid position corresponding to amino acid position [X]” of a specified IscB protein represents referral to a collection of equivalent positions in other recognized IscB and structural homologues and families. In one example embodiment, mutations are referenced to residues which correspond to the unmodified IscB polypeptide of Table 1. In one example embodiment, mutations are referenced to residues which correspond to the Rd8_117 1079_1 polypeptide of SEQ ID NO: 25278.

[0234] Further modifications may comprise inserting a functional domain, further described herein, in the WED/adaptor stabilizer region, the Tudor or Tudor Lance domain, or combination thereof.

### Example Chimeric IscB Systems

[0235] Chimeric IscB systems may be designed using the guidance provided herein using an unmodified IscB system, such as provided in Table 1 to identify suitable positions (e.g., junctions, loops) for substitutions or insertions described herein. Positions for insertions are detailed herein including for the Rd8_117 system of Table 1 and may also be used to align to other IscB polypeptides and ωRNAs to identify analogous positions, junctions, and/or loops for example. Example insertions or substitutions of domains or portions thereof are provided in sequence maps of FIGS. 25-95, detailing insertion locations and size of insertions and domain replacements.

[0236] An example chimeric IscB polypeptide comprises the Rd8_117 IscB polypeptide with a REC domain insertion from Cas9 1079_1, which may also be referred to as Rd8_117_1079_1. See, FIG. 32. In an embodiment, the Rd8_117 with REC insertion from Cas9 1079_1 comprises the sequence:

(SEQ ID NO: 25278)
MRYVYVLDVDGKPLMPTCRFGKVRRMLKSGQAKAVDTLPFTIQLTYKPRT
RILQPVTLGQDPGRTNIGMAAVREDGKELGRFHCITRNKEIPKLMADRMA
ARKASRRGERLARKRLARKLHTTAKHLNGRILPGCSEPIAVKDIINTESR
FNNRILTKCKVCGKNTPLRRNVRELLLENIVRFLPLESELKETLKRTILE
GQQGNINKLFRKLKFNQKDWPGKNLTDIAKNKLPGRLPFCKEHFAENEKF
TTIEKSTFRLTPTATOLLRTHINLFRKLSGILPVTDVAVELNKFAFMQLD
NPEMKKREIDFCHGPLCGTGGLEAAVKEQQDGKCLLCGKESIGHYHHIVP
RSRRGSNTIANIAGLCPKCHELVHKDADTAESLTEMKTGLMKKYGGTSVL
NQIIPKLVETLADLFPGHFHVTNGWNTKEFREKHHLEKDHDVDAYCIACS
HLKPEETLVETEPFEILQFRKHNRAIIHHQTERTYKLDGVTVAKNRKKRM
EQKTDSLEDWYVDMAKEHGKTQADAMRSRLTVIKSTRYYNTPGRMMPGTV
FLYEGKRYVMTGQITNGKYYRAYGQEKRNFPAVKVRILTKNTGLVFVA.

### ωRNA Molecules and Modifications

[0237] The systems herein may further comprise one or more ωRNA molecules, which are referred to herein interchangeably as ωRNA. The ωRNA complex can comprise a guide sequence and a scaffold that interacts with the IscB polypeptide. An ωRNA molecule may form a complex with IscB polypeptide nuclease or IscB polypeptide and direct the complex to bind with a target sequence. In certain example embodiments, the ωRNA molecule is a single molecule comprising a scaffold sequence and a spacer sequence. In certain example embodiments, the spacer is 5′ of the scaffold sequence. In certain example embodiments, the ωRNA molecule may further comprise a conserved nucleic acid sequence between the scaffold and spacer portions.

[0238] In certain example embodiments, the ωRNA scaffold comprises a spacer sequence and a conserved nucleotide sequence. The ωRNA scaffold typically comprises conserved regions, with the scaffold comprising 30, 31, 32, 33, 34, 35, 36, 37, 38, 39 40, 41, 42, 43, 44, 45, 46, 47 48, 49, 50, 51, 52, 53, 54, 55, 56, 57, 58, 59, 60, 61, 62, 63, 64, 65, 66, 67, 68, 69, 70, 71, 72, 73, 74, 75, 76, 77, 78, 79, 80, 81, 82, 83, 84, 85, 86, 87, 88, 89, 90, 91, 92, 93, 94, 95, 96, 97, 98, 99, 100, 105, 115, 125, 135, 145, 155, 165, 175, 185, 195, 205, 215, 225, 235, 245, 255, 265, 275, 285, 295, 305, 315, 325, 335, 345, or 355 or more nt. In an aspect, the ωRNA scaffold comprises one conserved nucleotide sequence. In embodiments, the conserved nucleotide sequence is on or near a 5′ end of the scaffold. In embodiments, the scaffold may comprise a short 3-4 base pair nexus, a conserved nexus hairpin and a large multi-stem loop region that may consist of two interconnected multi-stem loops. In an aspect, an IscrB associated scaffold may comprise a spacer, which can be re-programmed to direct site-specific binding to a target sequence of a target polynucleotide. The spacer may also be referred to herein as part of the ωRNA scaffold or as gRNA and may comprise an engineered heterologous sequence. In an embodiment the scaffold may comprise a sequence from Table 1.

[0239] In an embodiment, the spacer length of the ωRNA is from 10 to 150 nt. In an embodiment, the spacer length of the ωRNA is at least 15 nucleotides. In an embodiment, the spacer length is from 15 to 17 nt, e.g., 15, 16, or 17 nt, from 17 to 20 nt, e.g., 17, 18, 19, or 20 nt, from 20 to 24 nt, e.g., 20, 21, 22, 23, or 24 nt, from 23 to 25 nt, e.g., 23, 24, or 25 nt, from 24 to 27 nt, e.g., 24, 25, 26, or 27 nt, from 27 to 30 nt, e.g., 27, 28, 29, or 30 nt, from 30 to 35 nt, e.g., 30, 31, 32, 33, 34, or 35 nt, or 35 nt or longer. In certain example embodiment, the spacer sequence is 15, 16, 17, 18, 19, 20, 21, 22, 23, 24, 25, 26, 27, 28, 29, 30, 31, 32, 33, 34, 35, 36, 37, 38, 39 40, 41, 42, 43, 44, 45, 46, 47 48, 49, 50, 51, 52, 53, 54, 55, 56, 57, 58, 59, 60, 61, 62, 63, 64, 65, 66, 67, 68, 69, 70, 71, 72, 73, 74, 75, 76, 77, 78, 79, 80, 81, 82, 83, 84, 85, 86, 87, 88, 89, 90, 91, 92, 93, 94, 95, 96, 97, 98, 99, 100, 101, 102, 103, 104, 105, 106, 107, 108, 109, 110, 111, 112, 113, 114, 115, 116, 117, 118, 119, 120, 121, 122, 123, 124,125, 126, 127, 128, 129, 130, 131, 132, 133, 134, 135, 136, 17, 138, 19, 140, 141, 142, 143, 144, 145, 146, 147, 148, 149 or 150 nt.

[0240] In an embodiment, the ωRNA spacer length is from 15 to 50 nt. In an embodiment, the spacer length of the ωRNA is at least 15 nucleotides. In an embodiment, the spacer length is from 15 to 50 nt, e.g., 15, 16, or 17 nt, from 17 to 20 nt, e.g., 17, 18, 19, or 20 nt, from 20 to 24 nt, e.g., 20, 21, 22, 23, or 24 nt, from 23 to 25 nt, e.g., 23, 24, or 25 nt, from 24 to 27 nt, e.g., 24, 25, 26, or 27 nt, from 27 to 30 nt, e.g., 27, 28, 29, or 30 nt, from 30 to 35 nt, e.g., 30, 31, 32, 33, 34, or 35 nt, or 35 nt, from 34 to 40 nt, e.g., 34, 35, 36, 37, 38, 39, 40, from 35 to 39, from 36 to 38 nt long, about 37 nt, or longer.

[0241] In one embodiment, the sequence of the ωRNA molecule is selected to reduce the degree of secondary structure within the ωRNA molecule or may be further engineered to reduce degree of secondary structure within one or more regions of the ωRNA molecule. In one embodiment, about or less than about 75%, 50%, 40%, 30%, 25%, 20%, 15%, 10%, 5%, 1%, or fewer of the nucleotides of the nucleic acid-targeting ωRNA participate in self-complementary base pairing when optimally folded. Optimal folding may be determined by any suitable polynucleotide folding algorithm. Some programs are based on calculating the minimal Gibbs free energy. An example of one such algorithm is mFold, as described by Zuker and Stiegler (Nucleic Acids Res. 9 (1981), 133-148). Another example of a folding algorithm is the online webserver RNAfold, developed at Institute for Theoretical Chemistry at the University of Vienna, using the centroid structure prediction algorithm (see e.g., A. R. Gruber et al., 2008, Cell 106(1): 23-24; and PA Carr and GM Church, 2009, Nature Biotechnology 27(12): 1151-62).

[0242] In an example embodiment, the ωRNA molecule is from the same as the IscB polypeptide. In an example embodiment, the IscB polypeptide is Rd8_117 from Table 1 and the ωRNA molecule is from Rd8_117 of Table 1. In an example embodiment, the ωRNA molecule is optimized for Rd8_117 and comprises the sequence: GTCAATAACCCATGACTGAAGTCATGGGCTTGCAGATGCAGGTCCTGATGGAAG AAAGGGTTACTGAGCAGAGCAGTGACATGTCATTCGCCGCGGGGTGATTCCAAG CTCCGCGCTCCGGCTAGACATGCCCATGCTATGGAAACTTTAACGGTATGTGCGG TTTTCCGCTCATACCGGCTT (SEQ ID NO: 25279). In an embodiment, mutations to the ωRNA molecule for the IscB Rd8_117 polypeptide are made relative to SEQ ID NO: 25279, or to ωRNA from Table 1 (SEQ ID NO: 25277).

[0243] In certain example embodiments, the ωRNA molecule may have a sequence identity of at least 80%, at least 85%, at least 90%, 91%, 92%, 93%, 94%, or at least 95%, 96%, 97%, 98% 99% with a sequence selected from SEQ ID NOs: 2, 4, 6, 8, 10, 12, 14, 16, 18, 20, 22, 24, 26, 28, 30, 32, 34, 36, 38, 40, 42, 44, 46, 48, 50, 52, 54, 56, 58, 60, 62, 64, 66, 68, 70, 72, 74, 76, 78, 80, 82, 84, 86, 88, 90, 92, 94, 96, 98, 100, 102, 104, 106, 108, 110, 112, 114, 116, 118, 120, 122, 124, 126, 128, 130, 132, 134, 136, 138, 140, 142, 144, 146, 148, 150, 152, 154, 156, 158, 160, 162, 164, 166, 168, 170, 172, 174, 176, 178, 180, 182, 184, 186, 188, 190, 192, 194, 196, 198, 200, 202, 204, 206, 208, 210, 212, 214, 216, 218, 220, 222, 224, 226, 228, 230, 232, 234, 236, 238, 240, 242, 244, 246, 248, 250, 252, 254, 256, 258, 260, 262, 264, 266, 268, 270, 272, 274, 276, 278, 280, 282, 284, 286, 288, 290, 292, 294, 296, 298, 300, 302, 304, 306, 308, 310, 312, 314, 316, 318, 320, 322, 324, 326, 328, 330, 332, 334, 336, 338, 340, 342, 344, 346, 348, 350, 352, 354, 356, 358, 360, 362, 364, 366, 368, 370, 372, 374, 376, 378, 380, 382, 384, 386, 388, 390, 392, 394, 396, 398, 400, 402, 404, 406, 408, 410, 412, 414, 416, 418, 420, 422, 424, 426, 428, 430, 432, 434, 436, 438, 440, 442, 444, 446, 448, 450, 452, 454, 456, 458, 460, 462, 464, 466, 468, 470, 472, 474, 476, 478, 480, 482, 484, 486, 488, 490, 492, 494, 496, 498, 500, 502, 504, 506, 508, 510, 512, 514, 516, 518, 520, 522, 524, 526, 528, 530, 532, 534, 536, 538, 540, 542, 544, 546, 548, 550, 552, 554, 556, 558, 560, 562, 564, 566, 568, 570, 572, 574, 576, 578, 580, 582, 584, 586, 588, 590, 592, 594, 596, 598, 600, 602, 604, 606, 608, 610, 612, 614, 616, 618, 620, 622, 624, 626, 628, 630, 632, 634, 636, 638, 640, 642, 644, 646, 648, 650, 652, 654, 656, 658, 660, 662, 664, 666, 668, 670, 672, 674, 676, 678, 680, 682, 684, 686, 688, 690, 692, 694, 696, 698, 700, 702, 704, 706, 708, 710, 712, 714, 716, 718, 720, 722, 724, 726, 728, 730, 732, 734, 736, 738, 740, 742, 744, 746, 748, 750, 752, 754, 756, 758, 760, 762, 764, 766, 768, 770, 772, 774, 776, 778, 780, 782, 784, 786, 788, 790, 792, 794, 796, 798, 800, 802, 804, 806, 808, 810, 812, 814, 816, 818, 820, 822, 824, 826, 828, 830, 832, 834, 836, 838, 840, 842, 844, 846, 848, 850, 852, 854, 856, 858, 860, 862, 864, 866, 868, 870, 872, 874, 876, 878, 880, 882, 884, 886, 888, 890, 892, 894, 896, 898, 900, 902, 904, 906, 908, 910, 912, 914, 916, 918, 920, 922, 924, 926, 928, 930, 932, 934, 936, 938, 940, 942, 944, 946, 948, 950, 952, 954, 956, 958, 960, 962, 964, 966, 968, 970, 972, 974, 976, 978, 980, 982, 984, 986, 988, 990, 992, 994, 996, 998, 1000, 1002, 1004, 1006, 1008, 1010, 1012, 1014, 1016, 1018, 1020, 1022, 1024, 1026, 1028, 1030, 1032, 1034, 1036, 1038, 1040, 1042, 1044, 1046, 1048, 1050, 1052, 1054, 1056, 1058, 1060, 1062, 1064, 1066, 1068, 1070, 1072, 1074, 1076, 1078, 1080, 1082, 1084, 1086, 1088, 1090, 1092, 1094, 1096, 1098, 1100, 1102, 1104, 1106, 1108, 1110, 1112, 1114, 1116, 1118, 1120, 1122, 1124, 1126, 1128, 1130, 1132, 1134, 1136, 1138, 1140, 1142, 1144, 1146, 1148, 1150, 1152, 1154, 1156, 1158, 1160, 1162, 1164, 1166, 1168, 1170, 1172, 1174, 1176, 1178, 1180, 1182, 1184, 1186, 1188, 1190, 1192, 1194, 1196, 1198, 1200, 1202, 1204, 1206, 1208, 1210, 1212, 1214, 1216, 1218, 1220, 1222, 1224, 1226, 1228, 1230, 1232, 1234, 1236, 1238, 1240, 1242, 1244, 1246, 1248, 1250, 1252, 1254, 1256, 1258, 1260, 1262, 1264, 1266, 1268, 1270, 1272, 1274, 1276, 1278, 1280, 1282, 1284, 1286, 1288, 1290, 1292, 1294, 1296, 1298, 1300, 1302, 1304, 1306, 1308, 1310, 1312, 1314, 1316, 1318, 1320, 1322, 1324, 1326, 1328, 1330, 1332, 1334, 1336, 1338, 1340, 1342, 1344, 1346, 1348, 1350, 1352, 1354, 1356, 1358, 1360, 1362, 1364, 1366, 1368, 1370, 1372, 1374, 1376, 1378, 1380, 1382, 1384, 1386, 1388, 1390, 1392, 1394, 1396, 1398, 1400, 1402, 1404, 1406, 1408, 1410, 1412, 1414, 1416, 1418, 1420, 1422, 1424, 1426, 1428, 1430, 1432, 1434, 1436, 1438, 1440, 1442, 1444, 1446, 1448, 1450, 1452, 1454, 1456, 1458, 1460, 1462, 1464, 1466, 1468, 1470, 1472, 1474, 1476, 1478, 1480, 1482, 1484, 1486, 1488, 1490, 1492, 1494, 1496, 1498, 1500, 1502, 1504, 1506, 1508, 1510, 1512, 1514, 1516, 1518, 1520, 1522, 1524, 1526, 1528, 1530, 1532, 1534, 1536, 1538, 1540, 1542, 1544, 1546, 1548, 1550, 1552, 1554, 1556, 1558, 1560, 1562, 1564, 1566, 1568, 1570, 1572, 1574, 1576, 1578, 1580, 1582, 1584, 1586, 1588, 1590, 1592, 1594, 1596, 1598, 1600, 1602, 1604, 1606, 1608, 1610, 1612, 1614, 1616, 1618, 1620, 1622, 1624, 1626, 1628, 1630, 1632, 1634, 1636, 1638, 1640, 1642, 1644, 1646, 1648, 1650, 1652, 1654, 1656, 1658, 1660, 1662, 1664, 1666, 1668, 1670, 1672, 1674, 1676, 1678, 1680, 1682, 1684, 1686, 1688, 1690, 1692, 1694, 1696, 1698, 1700, 1702, 1704, 1706, 1708, 1710, 1712, 1714, 1716, 1718, 1720, 1722, 1724, 1726, 1728, 1730, 1732, 1734, 1736, 1738, 1740, 1742, 1744, 1746, 1748, 1750, 1752, 1754, 1756, 1758, 1760, 1762, 1764, 1766, 1768, 1770, 1772, 1774, 1776, 1778, 1780, 1782, 1784, 1786, 1788, 1790, 1792, 1795, 1797, 1799, 1801, 1803, 1805, 1807, 1809, 1811, 1813, 1815, 1817, 1819, 1821, 1823, 1825, 1827, 1829, 1831, 1833, 1835, 1837, 1839, 1841, 1843, 1845, 1847, 1849, 1851, 1853, 1855, 1857, 1859, 1861, 1863, 1865, 1867, 1869, 1871, 1873, 1875, 1877, 1879, 1881, 1883, 1885, 1887, 1889, 1891, 1893, 1895, 1897, 1899, 1901, 1903, 1905, 1907, 1909, 1911, 1913, 1915, 1917, 1919, 1921, 1923, 1925, 1927, 1929, 1931, 1933, 1935, 1937, 1939, 1941, 1943, 1945, 1947, 1949, 1951, 1953, 1955, 1957, 1959, 1961, 1963, 1965, 1967, 1969, 1971, 1973, 1975, 1977, 1979, 1981, 1983, 1985, 1987, 1989, 1991, 1993, 1995, 1997, 1999, 2001.

[0244] In an example embodiment, the ωRNA is engineered to reduce steric interactions between the ωRNA and inserted domain, for example, the PK-loop of ωRNA and an inserted REC domain. In an example embodiment, one or more amino acids are modified or inserted thereby reducing the interaction between an inserted domain and the ωRNA. In an example embodiment, one or more nucleotides in a loop, described herein, of the ωRNA is modified and/or inserted. In an example embodiment, about or less than about 75%, 50%, 40%, 30%, 25%, 20%, 15%, 10%, 5%, 1%, or fewer of the nucleotides of the ωRNA is modified. In an example embodiment, a pair of nucleotides are inserted into the ωRNA. In an example embodiment, at least 20, at least 15, at least 10, at least 5, at least 1 amino acid is inserted into the ωRNA. In an example embodiment, no more than 20, no more than 15, no more than 10, no more 5, no more than 1 amino acid is inserted into the ωRNA.

[0245] Modifications to the ωRNA can occur at various locations along the molecule. In an example embodiment, truncations from the 3′ end of the ωRNA molecule of about 5, 10, 15, 20, 25 or 30 nucleotides can be truncated from the 3′ end relative to a WT ωRNA. One or more insertions in the nexus pseudoknot can comprise one or more insertions in the nexus stem, which may be upstream or downstream of the insertion in the nexus pseudoknot. Further modifications, including to the pseduoknot and engineering the terminal region as a transRNA on-switch and PK region as a transRNA off-switch are detailed further herein.

[0246] As used herein, a heterologous ωRNA molecule is an ωRNA molecule that is not derived from the same species as the IscB polypeptide nuclease, or comprises a portion of the molecule, e.g., spacer, that is not derived from the same species as the IscB polypeptide, e.g. IscB protein. For example, a heterologous ωRNA molecule of a IscB polypeptide nuclease derived from species A comprises a polynucleotide derived from a species different from species A, or an artificial polynucleotide.

[0247] In an example embodiment, the ωRNA comprises a peptide nucleic acid (PNA). A PNA may be a synthetic mimic of DNA or RNA. A PNA may comprise a a pseudo-peptide polymer backbone in place of the deoxyribose or ribose phosphate backbone. PNAs are well known in the art. See Pellestor, F., Paulasova, P. The peptide nucleic acids (PNAs), powerful tools for molecular genetics and cytogenetics. Eur J Hum Genet 12, 694-700 (2004) and Abhishek Singhal, Valentina Bagnacani, Roberto Corradini, and Peter E. Nielsen ACS Chemical Biology 2014 9 (11), 2612-2620. In an example embodiment, a single strand or both strands of the ωRNA comprises a PNA. In an example embodiment, a portion of one or both strands comprise a PNA. In an example embodiment, no more than 75%, no more than 50%, no more than 40%, no more than 30%, no more than 25%, no more than 20%, no more than 15%, no more than 10%, or no more than 5%, of the one or both strands of the ωRNA comprise a PNA. In an example embodiment, no less than 75% of one or both strands of the ωRNA comprise a PNA.

[0248] In a particular embodiment, the ωRNA comprises a guide sequence linked to a conserved nucleotide sequence, wherein the conserved nucleotide sequence may comprise one or more stem loops or optimized secondary structures. In an embodiment, the conserved nucleotide sequence has a minimum length of 16 nts and a single stem loop. In further embodiments the conserved nucleotide sequence has a length longer than 16 nts, preferably more than 17 nts, and has more than one stem loops or optimized secondary structures. In one embodiment, the guide sequence may be linked to all or part of the natural conserved nucleotide sequence. In one embodiment, certain aspects of the guide architecture can be modified, for example by addition, subtraction, or substitution of features, whereas certain other aspects of guide architecture are maintained. Preferred locations for engineered guide modifications, including but not limited to insertions, deletions, and substitutions include guide termini and regions of the guide that are exposed when complexed with IscB polypeptide nuclease and/or target, for example the tetraloop and/or loop2.

[0249] In one embodiment, a loop in the guide RNA is provided. This may be a stem loop or a tetra loop. The loop is preferably GAAA, but it is not limited to this sequence or indeed to being only 4 bp in length. Indeed, preferred loop forming sequences for use in hairpin structures are four nucleotides in length, and most preferably have the sequence GAAA. However, longer or shorter loop sequences may be used, as may alternative sequences. The sequences preferably include a nucleotide triplet (for example, AAA), and an additional nucleotide (for example C or G). Examples of loop forming sequences include CAAA and AAAG.

[0250] In one embodiment, the ωRNA forms a stem-loop with a separate non-covalently linked sequence, which can be DNA or RNA. In an embodiment, the sequences forming the guide are first synthesized using the standard phosphoramidite synthetic protocol (Herdewijn, P., ed., Methods in Molecular Biology Col 288, Oligonucleotide Synthesis: Methods and Applications, Humana Press, New Jersey (2012)). In one embodiment, these sequences can be functionalized to contain an appropriate functional group for ligation using the standard protocol known in the art (Hermanson, G. T., Bioconjugate Techniques, Academic Press (2013)). Examples of functional groups include, but are not limited to, hydroxyl, amine, carboxylic acid, carboxylic acid halide, carboxylic acid active ester, aldehyde, carbonyl, chlorocarbonyl, imidazolylcarbonyl, hydrozide, semicarbazide, thio semicarbazide, thiol, maleimide, haloalkyl, sufonyl, ally, propargyl, diene, alkyne, and azide. Once this sequence is functionalized, a covalent chemical bond or linkage can be formed between this sequence and the conserved nucleotide sequence. Examples of chemical bonds include, but are not limited to, those based on carbamates, ethers, esters, amides, imines, amidines, aminotrizines, hydrozone, disulfides, thioethers, thioesters, phosphorothioates, phosphorodithioates, sulfonamides, sulfonates, sulfones, sulfoxides, ureas, thioureas, hydrazide, oxime, triazole, photolabile linkages, C—C bond forming groups such as Diels-Alder cyclo-addition pairs or ring-closing metathesis pairs, and Michael reaction pairs.

[0251] In one embodiment, these stem-loop forming sequences can be chemically synthesized. In one embodiment, the chemical synthesis uses automated, solid-phase oligonucleotide synthesis machines with 2′-acetoxyethyl orthoester (2′-ACE) (Scaringe et al., J. Am. Chem. Soc. (1998) 120: 11820-11821; Scaringe, Methods Enzymol. (2000) 317: 3-18) or 2′-thionocarbamate (2′-TC) chemistry (Dellinger et al., J. Am. Chem. Soc. (2011) 133: 11540-11546; Hendel et al., Nat. Biotechnol. (2015) 33:985-989).

[0252] The repeat:anti repeat duplex will be apparent from the secondary structure of the ωRNA. It may be typically a first complimentary stretch after (in 5′ to 3′ direction) the poly U tract and before the tetraloop; and a second complimentary stretch after (in 5′ to 3′ direction) the tetraloop and before the poly A tract. The first complimentary stretch (the “repeat”) is complimentary to the second complimentary stretch (the “anti-repeat”). As such, they Watson-Crick base pair to form a duplex of dsRNA when folded back on one another. As such, the anti-repeat sequence is the complimentary sequence of the repeat and in terms to A-U or C-G base pairing, but also in terms of the fact that the anti-repeat is in the reverse orientation due to the tetraloop.

[0253] In an embodiment of the invention, modification of guide architecture comprises replacing bases in stem-loop 2. For example, in one embodiment, “actt” (“acuu” in RNA) and “aagt” (“aagu” in RNA) bases in stem-loop 2 are replaced with “cgcc” and “gcgg”. In one embodiment, “actt” and “aagt” bases in stem-loop 2 are replaced with complimentary GC-rich regions of 4 nucleotides. In one embodiment, the complimentary GC-rich regions of 4 nucleotides are “cgcc” and “gcgg” (both in 5′ to 3′ direction). In one embodiment, the complimentary GC-rich regions of 4 nucleotides are “gcgg” and “cgcc” (both in 5′ to 3′ direction). Other combination of C and G in the complimentary GC-rich regions of 4 nucleotides will be apparent including CCCC and GGGG.

[0254] In one aspect, the stem-loop 2, e.g., “ACTTgtttAAGT” (SEQ ID NO: 1) can be replaced by any “XXXXgtttYYYY” (SEQ ID NO: 2), e.g., where XXXX and YYYY represent any complementary sets of nucleotides that together will base pair to each other to create a stem.

[0255] As used herein, the term “spacer” may also be referred to as a “guide sequence.” In one embodiment, the degree of complementarity of the guide sequence to a given target sequence, when optimally aligned using a suitable alignment algorithm, is about or more than 50%, 60%, 75%, 80%, 85%, 90%, 95%, 97.5%, 99%, or more. In certain example embodiments, the ωRNA molecule comprises a guide sequence that may be designed to have at least one mismatch with the target sequence, such that an RNA duplex formed between the sequence and the target sequence. Accordingly, the degree of complementarity is less than 99%. For instance, where the guide sequence consists of 24 nucleotides, the degree of complementarity is more particularly about 96% or less. In one embodiment, the guide sequence is designed to have a stretch of two or more adjacent mismatching nucleotides, such that the degree of complementarity over the entire sequence is further reduced. For instance, where the guide sequence consists of 24 nucleotides, the degree of complementarity is more particularly about 96% or less, more particularly, about 92% or less, more particularly about 88% or less, more particularly about 84% or less, more particularly about 80% or less, more particularly about 76% or less, more particularly about 72% or less, depending on whether the stretch of two or more mismatching nucleotides encompasses 2, 3, 4, 5, 6 or 7 nucleotides, etc. In one embodiment, aside from the stretch of one or more mismatching nucleotides, the degree of complementarity, when optimally aligned using a suitable alignment algorithm, is about or more than about 50%, 60%, 75%, 80%, 85%, 90%, 95%, 97.5%, 99%, or more. Optimal alignment may be determined with the use of any suitable algorithm for aligning sequences, non-limiting example of which include the Smith-Waterman algorithm, the Needleman-Wunsch algorithm, algorithms based on the Burrows-Wheeler Transform (e.g., the Burrows Wheeler Aligner), ClustalW, Clustal X, BLAT, Novoalign (Novocraft Technologies; available at novocraft.com), ELAND (Illumina, San Diego, CA), SOAP (available at soap.genomics.org.cn), and Maq (available at maq.sourceforge.net). The ability of a sequence (within a nucleic acid-targeting guide sequence) to direct sequence-specific binding of a nucleic acid−targeting complex to a target nucleic acid sequence may be assessed by any suitable assay. For example, the components of a ωRNA system sufficient to form a nucleic acid-targeting complex, including the guide sequence to be tested, may be provided to a host cell having the corresponding target nucleic acid sequence, such as by transfection with vectors encoding the components of the nucleic acid-targeting complex, followed by an assessment of preferential targeting (e.g., cleavage) within the target nucleic acid sequence, such as by Surveyor assay as described herein. Similarly, cleavage of a target nucleic acid sequence (or a sequence in the vicinity thereof) may be evaluated in a test tube by providing the target nucleic acid sequence, components of a nucleic acid-targeting complex, including the sequence to be tested and a control sequence different from the test guide sequence, and comparing binding or rate of cleavage at or in the vicinity of the target sequence between the test and control guide sequence reactions. Other assays are possible, and will occur to those skilled in the art. A guide sequence, and hence a nucleic acid-targeting ωRNA may be selected to target any target nucleic acid sequence.

[0256] A ωRNA sequence, and hence a nucleic acid-targeting guide, may be selected to target any target nucleic acid sequence. The target sequence may be DNA. The target sequence may be any RNA sequence. In one embodiment, the target sequence may be a sequence within a RNA molecule selected from the group consisting of messenger RNA (mRNA), pre-mRNA, ribosomal RNA (rRNA), transfer RNA (tRNA), micro-RNA (miRNA), small interfering RNA (siRNA), small nuclear RNA (snRNA), small nucleolar RNA (snoRNA), double stranded RNA (dsRNA), non-coding RNA (ncRNA), long non-coding RNA (lncRNA), and small cytoplasmatic RNA (scRNA). In some preferred embodiments, the target sequence may be a sequence within a RNA molecule selected from the group consisting of mRNA, pre-mRNA, and rRNA. In some preferred embodiments, the target sequence may be a sequence within an RNA molecule selected from the group consisting of ncRNA, and lncRNA. In some more preferred embodiments, the target sequence may be a sequence within an mRNA molecule or a pre-mRNA molecule.

[0257] In one embodiment, the ωRNA molecule forms a stem-loop with a separate non-covalently linked sequence, which can be DNA or RNA. In one embodiment, the sequences forming the ωRNA are first synthesized using the standard phosphoramidite synthetic protocol (Herdewijn, P., ed., Methods in Molecular Biology Col 288, Oligonucleotide Synthesis: Methods and Applications, Humana Press, New Jersey (2012)). In one embodiment, these sequences can be functionalized to contain an appropriate functional group for ligation using the standard protocol known in the art (Hermanson, G. T., Bioconjugate Techniques, Academic Press (2013)). Examples of functional groups include, but are not limited to, hydroxyl, amine, carboxylic acid, carboxylic acid halide, carboxylic acid active ester, aldehyde, carbonyl, chlorocarbonyl, imidazolylcarbonyl, hydrozide, semicarbazide, thio semicarbazide, thiol, maleimide, haloalkyl, sufonyl, ally, propargyl, diene, alkyne, and azide. Once this sequence is functionalized, a covalent chemical bond or linkage can be formed between this sequence and the conserved nucleotide sequence. Examples of chemical bonds include, but are not limited to, those based on carbamates, ethers, esters, amides, imines, amidines, aminotrizines, hydrozone, disulfides, thioethers, thioesters, phosphorothioates, phosphorodithioates, sulfonamides, sulfonates, sulfones, sulfoxides, ureas, thioureas, hydrazide, oxime, triazole, photolabile linkages, C—C bond forming groups such as Diels-Alder cyclo-addition pairs or ring-closing metathesis pairs, and Michael reaction pairs.

[0258] In one embodiment, these stem-loop forming sequences can be chemically synthesized. In one embodiment, the chemical synthesis uses automated, solid-phase oligonucleotide synthesis machines with 2′-acetoxyethyl orthoester (2′-ACE) (Scaringe et al., J. Am. Chem. Soc. (1998) 120: 11820-11821; Scaringe, Methods Enzymol. (2000) 317: 3-18) or 2′-thionocarbamate (2′-TC) chemistry (Dellinger et al., J. Am. Chem. Soc. (2011) 133: 11540-11546; Hendel et al., Nat. Biotechnol. (2015) 33:985-989).

### Pseudoknot Modifications

[0259] The ωRNA may comprise one or more pseudoknot structures. A pseudoknot may be located between the loop of one hairpin in the multi-stem loop region and the region directly downstream of the nexus. This pseudoknot is termed the nexus pseudoknot hairpin (FIGS. 4, 15). It is has been demonstrated mutating the pseudoknot sequence while maintaining base pairing had no effect on cleavage activity. However, scrambling the sequence in the pseudoknot and disrupting the pseudoknot structure disrupted the cleavage of a chimeric IscB system. These results suggested that the pseudoknot structure, but not necessarily sequence, was important for ncRNA function. The nexus pseudoknot was present in all major iscB-associated ωRNAs. Another conserved pseudoknot is located between the guide adapter and a hairpin loop in the multi-stem loop region. In some instances a third pseudoknot is formed by a third hairpin in the multi-stem loop region. See Altae-Tran, H.; Kannan, S.; Demircioglu, F. E.; Oshiro, R.; Nety, S. P.; McKay, L. J.; Dlakid, M.; Inskeep, W. P.; Makarova, K. S.; Macrae, R. K.; Koonin, E. V.; Zhang, F. The Widespread IS200/IS605 Transposon Family Encodes Diverse Programmable RNA-Guided Endonucleases. Science, 2021, 374, 57-65.

[0260] The ωRNA may additionally comprise a hairpin that encompasses a Shine-Dalgarno (SD) sequence located approximately 10 bp upstream of the CDS start codon, implying that the ωRNA might be involved in the regulation of the translation of IscB.

[0261] In an example embodiment, the pseudoknot comprises a peptide nucleic acid (PNA). In an example embodiment, the 3′-end of the ωRNA is truncated. In an example embodiment, the 3′-end of the ωRNA is truncated by 1, 2, 3, 4, 5, 6, 7, 8, 9, 10, 11, 12, 13, 14, 15, 16, 17, 18, 19, 20, 21, 22, 23, 24, or 25 nucleotides.

### Engineered On-Off Switching

[0262] In an example embodiment, the ωRNA is engineered to comprise an on-off switch. An on-off switch is a mechanism wherein, for example, a molecule is introduced to the IscB such that the IscB gains or loses activity, the activity can comprise any function described herein. For example, an engineered IscB may be engineered to be modify a substrate however, the IscB cannot modify the substrate until an “On” molecule is introduced. Thus, the IscB is off in absence of the “On” molecule. Therefore, an ωRNA comprises an on-off switch if, for example, another molecule must bind to the ωRNA to confer or prohibit activity. For example, ωRNA on-off engineering can be conferred by modifying (e.g. substituting) mismatched nucleotides in a ωRNA hairpin thus controlling nuclease activity.

[0263] In an example embodiment, one or more nucleotides in a pseudoknot nexus of the ωRNA is modified and/or inserted. The one or more nucleotides modified or inserted may confer the ωRNA with an on-off switch. The one or more nucleotides modified or inserted may or may not base pair with a corresponding nucleotide but may maintain the structure of the ωRNA. In an example embodiment, one or more nucleotides in a nexus stem of the ωRNA that base pair to the one or more nucleotides in the pseudoknot nexus is modified and/or inserted. In an example embodiment, a base pair comprising a nucleotide in the pseudoknot nexus and a nucleotide in the nexus stem is substituted with a complementary base pair. In an example embodiment, one or more nucleotides in a pseudoknot region of the ωRNA are modified and/or inserted and wherein the nexus stem retains base pairing. In an example embodiment, one or more nucleotides in a pseudoknot region of the ωRNA are modified and/or inserted and wherein the pseudoknot retains its structure relative to a wild-type IscB. In an example embodiment, the pseudoknot region of the ωRNA retains its structure by no less than 50%, no less than 55%, no less than 60%, no less than 65%, no less than 70%, no less than 75%, no less than 80%, no less than 85%, no less than 90%, no less than 95% relative to a wild-type IscB

[0264] An on-off switch may also be conferred to the IscB polypeptide by truncating the 3′-end of the ωRNA and then re-introducing the truncated 3′-end in trans, e.g., transRNA. The trans 3′-end may supplied independently of the ωRNA. In an example embodiment, the 3′-end of the ωRNA is truncated. In an example embodiment, the 3′-end of the ωRNA is truncated by at least 1, 2, 3, 4, 5, 6, 7, 8, 9, 10, 11, 12, 13, 14, 15, 16, 17, 18, 19, 20, 21, 22, 23, 24, or 25 nucleotides. In an example embodiment, the ωRNA is truncated by no more 5, 10, 15, 20, or 25 nucleotides. In example embodiments, any one or more positions from around 151-167 of the ωRNA of Rd8_117 from Table 1, or an analogous position thereof, is truncated and supplied in trans as the transRNA.

[0265] In an example, if positions 151-167 is truncated then a similar sequence as 168-184 is supplied in trans thereby activating nuclease activity. In an example embodiment, an RNA supplied in trans is bound to a 3′-end of the ωRNA. In an example embodiment, the trans RNA is native to the target location, or molecule targeted by the engineered IscB location. In an example embodiment, the transRNA is reprogrammed to target other sequences. In an example embodiment, the transRNA can be increased or decreased. In an example embodiment, the transRNA is increased or decreased by at least 1, 2, 3, 4, 5, 6, 7, 8, 9, 10, 11, 12, 13, 14, 15, 16, 17, 18, 19, or 20 nucleotides. In an example embodiment, the transRNA is increased or decreased by no more than 5, 10, 15, 20, or 25 nucleotides. Such a transRNA on-switch can enable cell-type specific or temporally controlled editing for added layers of specificity.

[0266] In an example embodiment, a complimentary nucleotide sequence is introduced to the IscB polypeptide. For example, a sequence complimentary to an accessible region of the ωRNA is introduced to the IscB polypeptide. The complimentary sequence may bind to the accessible region of the ωRNA resulting in disrupted nuclease activity. In an example embodiment, at least 1, 2, 3, 4, 5, 6, 7, 8, 9, 10, 11, 12, 13, 14, or 15 nucleotides are targeted by the complimentary sequence. In an example embodiment, no more than 15, 14, 13, 12, 11, 10, or 5 nucleotides are targeted by the complementary sequence. In an example embodiment, an accessible region of the ωRNA is a hairpin external to the polypeptide. In an example embodiment, an accessible region of the ωRNA is the nexus pseudoknot. In an example embodiment, the accessible region is positions around and between 100-107 or 139-150 of Rd8_117 ωRNA from Table 1 or an analogous position thereof.

### Other ωRNA Modifications

### Chemical Modifications

[0267] In an embodiment, the ωRNA molecule comprises non-naturally occurring nucleic acids and/or non-naturally occurring nucleotides and/or nucleotide analogs, and/or chemically modifications. Preferably, these non-naturally occurring nucleic acids and non-naturally occurring nucleotides are located outside the ωRNA sequence. Non-naturally occurring nucleic acids can include, for example, mixtures of naturally and non-naturally occurring nucleotides. Non-naturally occurring nucleotides and/or nucleotide analogs may be modified at the ribose, phosphate, and/or base moiety. In an embodiment of the invention, a ωRNA nucleic acid comprises ribonucleotides and non-ribonucleotides. In one such embodiment, a ωRNA comprises one or more ribonucleotides and one or more deoxyribonucleotides. In an embodiment of the invention, the ωRNA comprises one or more non-naturally occurring nucleotide or nucleotide analog such as a nucleotide with phosphorothioate linkage, a locked nucleic acid (LNA) nucleotide comprising a methylene bridge between the 2′ and 4′ carbons of the ribose ring, or bridged nucleic acids (BNA). Other examples of modified nucleotides include 2′-O-methyl analogs, 2′-deoxy analogs, or 2′-fluoro analogs. Further examples of modified bases include, but are not limited to, 2-aminopurine, 5-bromo-uridine, pseudouridine, inosine, 7-methylguanosine. Examples of ωRNA chemical modifications include, without limitation, incorporation of 2′-O-methyl (M), 2′-O-methyl 3′phosphorothioate (MS), S-constrained ethyl(cEt), or 2′-O-methyl 3′thioPACE (MSP) at one or more terminal nucleotides. Such chemically modified ωRNA can comprise increased stability and increased activity as compared to unmodified ωRNA, though on-target vs. off-target specificity is not predictable. (See, Hendel, 2015, Nat Biotechnol. 33(9):985-9, doi: 10.1038/nbt.3290, published online 29 Jun. 2015 Ragdarm et al., 0215, PNAS, E7110-E7111; Allerson et al., J. Med. Chem. 2005, 48:901-904; Bramsen et al., Front. Genet., 2012, 3:154; Deng et al., PNAS, 2015, 112:11870-11875; Sharma et al., MedChemComm., 2014, 5:1454-1471; Hendel et al., Nat. Biotechnol. (2015) 33(9): 985-989; Li et al., Nature Biomedical Engineering, 2017, 1, 0066 DOI:10.1038/s41551-017-0066). In one embodiment, the 5′ and/or 3′ end of a ωRNA is modified by a variety of functional moieties including fluorescent dyes, polyethylene glycol, cholesterol, proteins, or detection tags. (See Kelly et al., 2016, J. Biotech. 233:74-83). In an embodiment, a ωRNA comprises ribonucleotides in a region that binds to a target sequence and one or more deoxyribonucleotides and/or nucleotide analogs in a region that binds to the IscB polypeptide nuclease. In an embodiment, deoxyribonucleotides and/or nucleotide analogs are incorporated in engineered ωRNA structures. In one embodiment, 3-5 nucleotides at either the 3′ or the 5′ end of a ωRNA is chemically modified. In one embodiment, only minor modifications are introduced in the seed region, such as 2′-F modifications. In one embodiment, 2′-F modification is introduced at the 3′ end of a ωRNA. In an embodiment, three to five nucleotides at the 5′ and/or the 3′ end of the ωRNA are chemically modified with 2′-O-methyl (M), 2′-O-methyl 3′ phosphorothioate (MS), S-constrained ethyl(cEt), or 2′-O-methyl 3′ thioPACE (MSP). Such modification can enhance genome editing efficiency (see Hendel et al., Nat. Biotechnol. (2015) 33(9): 985-989). In an embodiment, all of the phosphodiester bonds of a ωRNA are substituted with phosphorothioates (PS) for enhancing levels of gene disruption. In an embodiment, more than five nucleotides at the 5′ and/or the 3′ end of the ωRNA are chemically modified with 2′-O-Me, 2′-F or S-constrained ethyl(cEt). Such chemically modified ωRNA can mediate enhanced levels of gene disruption (see Ragdarm et al., 0215, PNAS, E7110-E7111). In an embodiment of the invention, a ωRNA is modified to comprise a chemical moiety at its 3′ and/or 5′ end. Such moieties include, but are not limited to amine, azide, alkyne, thio, dibenzocyclooctyne (DBCO), or Rhodamine. In certain embodiment, the chemical moiety is conjugated to the ωRNA by a linker, such as an alkyl chain. In an embodiment, the chemical moiety of the modified ωRNA can be used to attach the ωRNA to another molecule, such as DNA, RNA, protein, or nanoparticles. Such chemically modified ωRNA can be used to identify or enrich cells generically edited by a IscB polypeptide nuclease and related systems (see Lee et al., eLife, 2017, 6:e25312, DOI:10.7554).

[0268] In a particular embodiment, the conserved nucleotide sequence may be modified to comprise one or more protein-binding RNA aptamers. In a particular embodiment, one or more aptamers may be included such as part of optimized secondary structure. Such aptamers may be capable of binding a bacteriophage coat protein as detailed further herein.

[0269] In embodiments, the IscB polypeptide utilizes the ωRNA scaffold comprising a polynucleotide sequence that facilitates the interaction with the IscB protein, allowing for sequence specific binding and/or targeting of the guide sequence with the target polynucleotide. Chemical synthesis of the ωRNA scaffold is contemplated, using covalent linkage using various bioconjugation reactions, loops, bridges, and non-nucleotide links via modifications of sugar, internucleotide phosphodiester bonds, purine and pyrimidine residues. Sletten et al., Angew. Chem. Int. Ed. (2009) 48:6974-6998; Manoharan, M. Curr. Opin. Chem. Biol. (2004) 8: 570-9; Behlke et al., Oligonucleotides (2008) 18: 305-19; Watts, et al., Drug. Discov. Today (2008) 13: 842-55; Shukla, et al., ChemMedChem (2010) 5: 328-49; chemical synthesis using automated, solid-phase oligonucleotide synthesis machines with 2′-acetoxyethyl orthoester (2′-ACE) (Scaringe et al., J. Am. Chem. Soc. (1998) 120: 11820-11821; Scaringe, Methods Enzymol. (2000) 317: 3-18) or 2′-thionocarbamate (2′-TC) chemistry (Dellinger et al., J. Am. Chem. Soc. (2011) 133: 11540-11546; Hendel et al., Nat. Biotechnol. (2015) 33:985-989).

[0270] In certain example embodiments, the scaffold and spacer may be designed as two separate molecules that can hybridize or covalently joined into a single molecule. Covalent linkage can be via a linker (e.g., a non-nucleotide loop) that comprises a moiety such as spacers, attachments, bioconjugates, chromophores, reporter groups, dye labeled RNAs, and non-naturally occurring nucleotide analogues. More specifically, suitable spacers for purposes of this invention include, but are not limited to, polyethers (e.g., polyethylene glycols, polyalcohols, polypropylene glycol or mixtures of ethylene and propylene glycols), polyamines group (e.g., spennine, spermidine and polymeric derivatives thereof), polyesters (e.g., poly(ethyl acrylate)), polyphosphodiesters, alkylenes, and combinations thereof. Suitable attachments include any moiety that can be added to the linker to add additional properties to the linker, such as but not limited to, fluorescent labels. Suitable bioconjugates include, but are not limited to, peptides, glycosides, lipids, cholesterol, phospholipids, diacyl glycerols and dialkyl glycerols, fatty acids, hydrocarbons, enzyme substrates, steroids, biotin, digoxigenin, carbohydrates, polysaccharides. Suitable chromophores, reporter groups, and dye-labeled RNAs include, but are not limited to, fluorescent dyes such as fluorescein and rhodamine, chemiluminescent, electrochemiluminescent, and bioluminescent marker compounds. The design of example linkers conjugating two RNA components are also described in WO 2004/015075.

[0271] The linker (e.g., a non-nucleotide loop) can be of any length. In one embodiment, the linker has a length equivalent to about 0-16 nucleotides. In one embodiment, the linker has a length equivalent to about 0-8 nucleotides. In one embodiment, the linker has a length equivalent to about 0-4 nucleotides. In one embodiment, the linker has a length equivalent to about 2 nucleotides. Example linker design is also described in International Patent Publication No. WO 2011/008730.

### Escorted ωRNA Molecules

[0272] In one embodiment, the compositions or complexes have a ωRNA molecule with a functional structure designed to improve ωRNA molecule structure, architecture, stability, genetic expression, or any combination thereof. Such a structure can include an aptamer.

[0273] Aptamers are biomolecules that can be designed or selected to bind tightly to other ligands, for example using a technique called systematic evolution of ligands by exponential enrichment (SELEX; Tuerk C, Gold L: “Systematic evolution of ligands by exponential enrichment: RNA ligands to bacteriophage T4 DNA polymerase.” Science 1990, 249:505-510). Nucleic acid aptamers can for example be selected from pools of random-sequence oligonucleotides, with high binding affinities and specificities for a wide range of biomedically relevant targets, suggesting a wide range of therapeutic utilities for aptamers (Keefe, Anthony D., Supriya Pai, and Andrew Ellington. “Aptamers as therapeutics.” Nature Reviews Drug Discovery 9.7 (2010): 537-550). These characteristics also suggest a wide range of uses for aptamers as drug delivery vehicles (Levy-Nissenbaum, Etgar, et al. “Nanotechnology and aptamers: applications in drug delivery.” Trends in biotechnology 26.8 (2008): 442-449; and Hicke B J, Stephens AW. “Escort aptamers: a delivery service for diagnosis and therapy.” J Clin Invest 2000, 106:923-928.). Aptamers may also be constructed that function as molecular switches, responding to a que by changing properties, such as RNA aptamers that bind fluorophores to mimic the activity of green fluorescent protein (Paige, Jeremy S., Karen Y. Wu, and Samie R. Jaffrey. “RNA mimics of green fluorescent protein.” Science 333.6042 (2011): 642-646). It has also been suggested that aptamers may be used as components of targeted siRNA therapeutic delivery systems, for example targeting cell surface proteins (Zhou, Jiehua, and John J. Rossi. “Aptamer-targeted cell-specific RNA interference.” Silence 1.1 (2010): 4).

[0274] Accordingly, in one embodiment, the ωRNA molecule is modified, e.g., by one or more aptamer(s) designed to improve ωRNA molecule delivery, including delivery across the cellular membrane, to intracellular compartments, or into the nucleus. Such a structure can include, either in addition to the one or more aptamer(s) or without such one or more aptamer(s), moiety(ies) so as to render the ωRNA molecule deliverable, inducible or responsive to a selected effector. The invention accordingly comprehends a ωRNA molecule that responds to normal or pathological physiological conditions, including without limitation pH, hypoxia, 02 concentration, temperature, protein concentration, enzymatic concentration, lipid structure, light exposure, mechanical disruption (e.g., ultrasound waves), magnetic fields, electric fields, or electromagnetic radiation.

[0275] Light responsiveness of an inducible system may be achieved via the activation and binding of cryptochrome-2 and CIB1. Blue light stimulation induces an activating conformational change in cryptochrome-2, resulting in recruitment of its binding partner CIB1. This binding is fast and reversible, achieving saturation in <15 sec following pulsed stimulation and returning to baseline <15 min after the end of stimulation. These rapid binding kinetics result in a system temporally bound only by the speed of transcription/translation and transcript/protein degradation, rather than uptake and clearance of inducing agents. Crytochrome-2 activation is also highly sensitive, allowing for the use of low light intensity stimulation and mitigating the risks of phototoxicity. Further, in a context such as the intact mammalian brain, variable light intensity may be used to control the size of a stimulated region, allowing for greater precision than vector delivery alone may offer.

[0276] Energy sources such as electromagnetic radiation, sound energy or thermal energy may induce the guide. Advantageously, the electromagnetic radiation is a component of visible light. In a preferred embodiment, the light is a blue light with a wavelength of about 450 to about 495 nm. In an especially preferred embodiment, the wavelength is about 488 nm. In another preferred embodiment, the light stimulation is via pulses. The light power may range from about 0-9 mW/cm2. In a preferred embodiment, a stimulation paradigm of as low as 0.25 sec every 15 sec should result in maximal activation.

[0277] The chemical or energy sensitive ωRNA may undergo a conformational change upon induction by the binding of a chemical source or by the energy allowing it act as a ωRNA and have the IscB polypeptide nuclease system or complex function. The invention can involve applying the chemical source or energy so as to have the ωRNA function and the IscB polypeptide nuclease system or complex function; and optionally further determining that the expression of the genomic locus is altered.

[0278] There are several different designs of this chemical inducible system: 1. ABI-PYL based system inducible by Abscisic Acid (ABA) (see, e.g., stke.sciencemag.org/cgi/content/abstract/sigtrans; 4/164/rs2), 2. FKBP-FRB based system inducible by rapamycin (or related chemicals based on rapamycin) (see, e.g., www.nature.com/nmeth/journal/v2/n6/full/nmeth763.html), 3. GID1-GAI based system inducible by Gibberellin (GA) (see, e.g., www.nature.com/nchembio/journal/v8/n5/full/nchembio.922.html).

[0279] A chemical inducible system can be an estrogen receptor (ER) based system inducible by 4-hydroxytamoxifen (40HT) (see, e.g., www.pnas.org/content/104/3/1027.abstract). A mutated ligand-binding domain of the estrogen receptor called ERT2 translocates into the nucleus of cells upon binding of 4-hydroxytamoxifen. In further embodiments of the invention any naturally occurring or engineered derivative of any nuclear receptor, thyroid hormone receptor, retinoic acid receptor, estrogen receptor, estrogen-related receptor, glucocorticoid receptor, progesterone receptor, androgen receptor may be used in inducible systems analogous to the ER based inducible system.

[0280] Another inducible system is based on the design using Transient receptor potential (TRP) ion channel-based system inducible by energy, heat or radio-wave (see, e.g., www.sciencemag.org/content/336/6081/604). These TRP family proteins respond to different stimuli, including light and heat. When this protein is activated by light or heat, the ion channel will open and allow the entering of ions such as calcium into the plasma membrane. This influx of ions will bind to intracellular ion interacting partners linked to a polypeptide including the ωRNA and the other components of the IscB polypeptide nuclease/ωRNA molecule complex or system, and the binding will induce the change of sub-cellular localization of the polypeptide, leading to the entire polypeptide entering the nucleus of cells. Once inside the nucleus, the ωRNA protein and the other components of the IscB polypeptide nuclease/ωRNA molecule complex will be active and modulating target gene expression in cells.

[0281] While light activation may be an advantageous embodiment, sometimes it may be disadvantageous especially for in vivo applications in which the light may not penetrate the skin or other organs. In this instance, other methods of energy activation are contemplated, in particular, electric field energy and/or ultrasound which have a similar effect.

[0282] Electric field energy is preferably administered substantially as described in the art, using one or more electric pulses of from about 1 Volt/cm to about 10 kVolts/cm under in vivo conditions. Instead of or in addition to the pulses, the electric field may be delivered in a continuous manner. The electric pulse may be applied for between 1 μs and 500 milliseconds, preferably between 1 μs and 100 milliseconds. The electric field may be applied continuously or in a pulsed manner for 5 about minutes.

[0283] As used herein, ‘electric field energy’ is the electrical energy to which a cell is exposed. Preferably the electric field has a strength of from about 1 Volt/cm to about 10 kVolts/cm or more under in vivo conditions (see WO97/49450).

[0284] As used herein, the term “electric field” includes one or more pulses at variable capacitance and voltage and including exponential and/or square wave and/or modulated wave and/or modulated square wave forms. References to electric fields and electricity should be taken to include reference the presence of an electric potential difference in the environment of a cell. Such an environment may be set up by way of static electricity, alternating current (AC), direct current (DC), etc., as known in the art. The electric field may be uniform, non-uniform or otherwise, and may vary in strength and/or direction in a time dependent manner.

[0285] Single or multiple applications of electric field, as well as single or multiple applications of ultrasound are also possible, in any order and in any combination. The ultrasound and/or the electric field may be delivered as single or multiple continuous applications, or as pulses (pulsatile delivery).

[0286] Electroporation has been used in both in vitro and in vivo procedures to introduce foreign material into living cells. With in vitro applications, a sample of live cells is first mixed with the agent of interest and placed between electrodes such as parallel plates. Then, the electrodes apply an electrical field to the cell/implant mixture. Examples of systems that perform in vitro electroporation include the Electro Cell Manipulator ECM600 product, and the Electro Square Porator T820, both made by the BTX Division of Genetronics, Inc (see U.S. Pat. No. 5,869,326).

[0287] The known electroporation techniques (both in vitro and in vivo) function by applying a brief high voltage pulse to electrodes positioned around the treatment region. The electric field generated between the electrodes causes the cell membranes to temporarily become porous, whereupon molecules of the agent of interest enter the cells. In known electroporation applications, this electric field comprises a single square wave pulse on the order of 1000 V/cm, of about 100.mu.s duration. Such a pulse may be generated, for example, in known applications of the Electro Square Porator T820.

[0288] Preferably, the electric field has a strength of from about 1 V/cm to about 10 kV/cm under in vitro conditions. Thus, the electric field may have a strength of 1 V/cm, 2 V/cm, 3 V/cm, 4 V/cm, 5 V/cm, 6 V/cm, 7 V/cm, 8 V/cm, 9 V/cm, 10 V/cm, 20 V/cm, 50 V/cm, 100 V/cm, 200 V/cm, 300 V/cm, 400 V/cm, 500 V/cm, 600 V/cm, 700 V/cm, 800 V/cm, 900 V/cm, 1 kV/cm, 2 kV/cm, 5 kV/cm, 10 kV/cm, 20 kV/cm, 50 kV/cm or more. More preferably from about 0.5 kV/cm to about 4.0 kV/cm under in vitro conditions. Preferably the electric field has a strength of from about 1 V/cm to about 10 kV/cm under in vivo conditions. However, the electric field strengths may be lowered where the number of pulses delivered to the target site are increased. Thus, pulsatile delivery of electric fields at lower field strengths is envisaged.

[0289] Preferably, the application of the electric field is in the form of multiple pulses such as double pulses of the same strength and capacitance or sequential pulses of varying strength and/or capacitance. As used herein, the term “pulse” includes one or more electric pulses at variable capacitance and voltage and including exponential and/or square wave and/or modulated wave/square wave forms.

[0290] Preferably, the electric pulse is delivered as a waveform selected from an exponential wave form, a square wave form, a modulated wave form and a modulated square wave form.

[0291] A preferred embodiment employs direct current at low voltage. Thus, Applicants disclose the use of an electric field which is applied to the cell, tissue, or tissue mass at a field strength of between 1V/cm and 20V/cm, for a period of 100 milliseconds or more, preferably 15 minutes or more.

[0292] Ultrasound is advantageously administered at a power level of from about 0.05 W/cm2 to about 100 W/cm2. Diagnostic or therapeutic ultrasound may be used, or combinations thereof.

[0293] As used herein, the term “ultrasound” refers to a form of energy which consists of mechanical vibrations the frequencies of which are so high they are above the range of human hearing. Lower frequency limit of the ultrasonic spectrum may generally be taken as about 20 kHz. Most diagnostic applications of ultrasound employ frequencies in the range 1 and 15 MHz'(From Ultrasonics in Clinical Diagnosis, P. N. T. Wells, ed., 2nd. Edition, Publ. Churchill Livingstone [Edinburgh, London & NY, 1977]).

[0294] Ultrasound has been used in both diagnostic and therapeutic applications. When used as a diagnostic tool (“diagnostic ultrasound”), ultrasound is typically used in an energy density range of up to about 100 mW/cm2 (FDA recommendation), although energy densities of up to 750 mW/cm2 have been used. In physiotherapy, ultrasound is typically used as an energy source in a range up to about 3 to 4 W/cm2 (WHO recommendation). In other therapeutic applications, higher intensities of ultrasound may be employed, for example, HIFU at 100 W/cm up to 1 kW/cm2 (or even higher) for short periods of time. The term “ultrasound” as used in this specification is intended to encompass diagnostic, therapeutic, and focused ultrasound.

[0295] Focused ultrasound (FUS) allows thermal energy to be delivered without an invasive probe (see Morocz et al 1998 Journal of Magnetic Resonance Imaging Vol. 8, No. 1, pp. 136-142. Another form of focused ultrasound is high intensity focused ultrasound (HIFU) which is reviewed by Moussatov et al in Ultrasonics (1998) Vol. 36, No. 8, pp. 893-900 and TranHuuHue et al in Acustica (1997) Vol. 83, No. 6, pp. 1103-1106.

[0296] Preferably, a combination of diagnostic ultrasound and a therapeutic ultrasound is employed. This combination is not intended to be limiting, however, and the skilled reader will appreciate that any variety of combinations of ultrasound may be used. Additionally, the energy density, frequency of ultrasound, and period of exposure may be varied.

[0297] Preferably, the exposure to an ultrasound energy source is at a power density of from about 0.05 to about 100 Wcm−2. Even more preferably, the exposure to an ultrasound energy source is at a power density of from about 1 to about 15 Wcm−2.

[0298] Preferably, the exposure to an ultrasound energy source is at a frequency of from about 0.015 to about 10.0 MHz. More preferably the exposure to an ultrasound energy source is at a frequency of from about 0.02 to about 5.0 MHz or about 6.0 MHz. Most preferably, the ultrasound is applied at a frequency of 3 MHz.

[0299] Preferably the exposure is for periods of from about 10 milliseconds to about 60 minutes. Preferably the exposure is for periods of from about 1 second to about 5 minutes. More preferably, the ultrasound is applied for about 2 minutes. Depending on the particular target cell to be disrupted, however, the exposure may be for a longer duration, for example, for 15 minutes.

[0300] Advantageously, the target tissue is exposed to an ultrasound energy source at an acoustic power density of from about 0.05 Wcm−2 to about 10 Wcm−2 with a frequency ranging from about 0.015 to about 10 MHz (see WO 98/52609). However, alternatives are also possible, for example, exposure to an ultrasound energy source at an acoustic power density of above 100 Wcm−2, but for reduced periods of time, for example, 1000 Wcm−2 for periods in the millisecond range or less.

[0301] Preferably, the application of the ultrasound is in the form of multiple pulses; thus, both continuous wave and pulsed wave (pulsatile delivery of ultrasound) may be employed in any combination. For example, continuous wave ultrasound may be applied, followed by pulsed wave ultrasound, or vice versa. This may be repeated any number of times, in any order and combination. The pulsed wave ultrasound may be applied against a background of continuous wave ultrasound, and any number of pulses may be used in any number of groups.

[0302] Preferably, the ultrasound may comprise pulsed wave ultrasound. In a highly preferred embodiment, the ultrasound is applied at a power density of 0.7 Wcm−2 or 1.25 Wcm−2 as a continuous wave. Higher power densities may be employed if pulsed wave ultrasound is used.

[0303] Use of ultrasound is advantageous as, like light, it may be focused accurately on a target. Moreover, ultrasound is advantageous as it may be focused more deeply into tissues unlike light. It is therefore better suited to whole-tissue penetration (such as but not limited to a lobe of the liver) or whole organ (such as but not limited to the entire liver or an entire muscle, such as the heart) therapy. Another important advantage is that ultrasound is a non-invasive stimulus which is used in a wide variety of diagnostic and therapeutic applications. By way of example, ultrasound is well known in medical imaging techniques and, additionally, in orthopedic therapy. Furthermore, instruments suitable for the application of ultrasound to a subject vertebrate are widely available and their use is well known in the art.

[0304] In one embodiment, the ωRNA molecule is modified by a secondary structure to increase the specificity of the IscB polypeptide nuclease and related system and the secondary structure can protect against exonuclease activity and allow for 5′ additions to the ωRNA sequence also referred to herein as a protected ωRNA molecule.

[0305] In one aspect, the invention provides for hybridizing a “protector RNA” to a sequence of the ωRNA molecule, wherein the “protector RNA” is an RNA strand complementary to the 3′ end of the ωRNA molecule to thereby generate a partially double-stranded ωRNA. In an embodiment of the invention, protecting mismatched bases (i.e., the bases of the ωRNA molecule which do not form part of the ωRNA sequence) with a perfectly complementary protector sequence decreases the likelihood of target DNA binding to the mismatched base pairs at the 3′ end. In one embodiment of the invention, additional sequences comprising an extended length may also be present within the ωRNA molecule such that the ωRNA comprises a protector sequence within the ωRNA molecule. This “protector sequence” ensures that the ωRNA molecule comprises a “protected sequence” in addition to an “exposed sequence” (comprising the part of the ωRNA sequence hybridizing to the target sequence). In one embodiment, the ωRNA molecule is modified by the presence of the protector ωRNA to comprise a secondary structure such as a hairpin. Advantageously there are three or four to thirty or more, e.g., about 10 or more, contiguous base pairs having complementarity to the protected sequence, the ωRNA sequence or both. It is advantageous that the protected portion does not impede thermodynamics of the IscB polypeptide nuclease and related system interacting with its target. By providing such an extension including a partially double stranded ωRNA molecule, the ωRNA molecule is considered protected and results in improved specific binding of the IscB polypeptide nuclease/o RNA molecule complex, while maintaining specific activity.

[0306] In one embodiment, use is made of a truncated ωRNA (tru-ωRNA), i.e., a ωRNA molecule which comprises a ωRNA sequence which is truncated in length with respect to the canonical ωRNA sequence length. As described by Nowak et al. (Nucleic Acids Res (2016) 44 (20): 9555-9564), such guides may allow catalytically active IscB polypeptide nuclease to bind its target without cleaving the target DNA. In one embodiment, a truncated ωRNA is used which allows the binding of the target but retains only nickase activity of the IscB polypeptide nuclease.

[0307] In one embodiment, conjugation of triantennary N-acetyl galactosamine (GalNAc) to oligonucleotide components may be used to improve delivery, for example delivery to select cell types, for example hepatocytes (see International Patent Publication No. WO 2014/118272 incorporated herein by reference; Nair, J K et al., 2014, Journal of the American Chemical Society 136 (49), 16958-16961). This is considered to be a sugar-based particle and further details on other particle delivery systems and/or formulations are provided herein. GalNAc can therefore be considered to be a particle in the sense of the other particles described herein, such that general uses and other considerations, for instance delivery of said particles, apply to GalNAc particles as well. A solution-phase conjugation strategy may for example be used to attach triantennary GalNAc clusters (mol. wt. ˜2000) activated as PFP (pentafluorophenyl) esters onto 5′-hexylamino modified oligonucleotides (5′-HA ASOs, mol. wt. ˜8000 Da; Østergaard et al., Bioconjugate Chem., 2015, 26 (8), pp 1451-1455). Similarly, poly(acrylate) polymers have been described for in vivo nucleic acid delivery (see WO2013158141 incorporated herein by reference). In further alternative embodiments, pre-mixing IscB polypeptide nuclease nanoparticles (or protein complexes) with naturally occurring serum proteins may be used in order to improve delivery (Akinc A et al, 2010, Molecular Therapy vol. 18 no. 7, 1357-1364).

[0308] Screening techniques are available to identify delivery enhancers, for example by screening chemical libraries (Gilleron J. et al., 2015, Nucl. Acids Res. 43 (16): 7984-8001). Approaches have also been described for assessing the efficiency of delivery vehicles, such as lipid nanoparticles, which may be employed to identify effective delivery vehicles for components (see Sahay G. et al., 2013, Nature Biotechnology 31, 653-658).

### HDR Donor Templates

[0309] Screening techniques are available to identify delivery enhancers, for example by screening chemical libraries (Gilleron J. et al., 2015, Nucl. Acids Res. 43 (16): 7984-8001). Approaches have also been described for assessing the efficiency of delivery vehicles, such as lipid nanoparticles, which may be employed to identify effective delivery vehicles for components (see Sahay G. et al., 2013, Nature Biotechnology 31, 653-658).

[0310] In one embodiment, the compositions and systems herein may further comprise one or more nucleic acid templates. In some cases, the nucleic acid template may comprise one or more polynucleotides. In certain cases, the nucleic acid template may comprise coding sequences for one or more polynucleotides. The nucleic acid template may be a DNA template.

[0311] The donor polynucleotide may be used for editing the target polynucleotide. In some cases, the donor polynucleotide comprises one or more mutations to be introduced into the target polynucleotide. Examples of such mutations include substitutions, deletions, insertions, or a combination thereof. The mutations may cause a shift in an open reading frame on the target polynucleotide. In some cases, the donor polynucleotide alters a stop codon in the target polynucleotide. For example, the donor polynucleotide may correct a premature stop codon. The correction may be achieved by deleting the stop codon or introduces one or more mutations to the stop codon. In other example embodiments, the donor polynucleotide addresses loss of function mutations, deletions, or translocations that may occur, for example, in certain disease contexts by inserting or restoring a functional copy of a gene, or functional fragment thereof, or a functional regulatory sequence or functional fragment of a regulatory sequence. A functional fragment refers to less than the entire copy of a gene by providing sufficient nucleotide sequence to restore the functionality of a wild type gene or non-coding regulatory sequence (e.g., sequences encoding long non-coding RNA). In certain example embodiments, the systems disclosed herein may be used to replace a single allele of a defective gene or defective fragment thereof. In another example embodiment, the systems disclosed herein may be used to replace both alleles of a defective gene or defective gene fragment. A “defective gene” or “defective gene fragment” is a gene or portion of a gene that when expressed fails to generate a functioning protein or non-coding RNA with functionality of the corresponding wild-type gene. In certain example embodiments, these defective genes may be associated with one or more disease phenotypes. In certain example embodiments, the defective gene or gene fragment is not replaced but the systems described herein are used to insert donor polynucleotides that encode gene or gene fragments that compensate for or override defective gene expression such that cell phenotypes associated with defective gene expression are eliminated or changed to a different or desired cellular phenotype.

[0312] In an embodiment of the invention, the donor polynucleotide may include, but not be limited to, genes or gene fragments, encoding proteins or RNA transcripts to be expressed, regulatory elements, repair templates, and the like. According to the invention, the donor polynucleotides may comprise left end and right end sequence elements that function with transposition components that mediate insertion.

[0313] In certain cases, the donor polynucleotide manipulates a splicing site on the target polynucleotide. In some examples, the donor polynucleotide disrupts a splicing site. The disruption may be achieved by inserting the polynucleotide to a splicing site and/or introducing one or more mutations to the splicing site. In certain examples, the donor polynucleotide may restore a splicing site. For example, the polynucleotide may comprise a splicing site sequence.

[0314] The donor polynucleotide to be inserted may has a size from 10 base pair or nucleotides to 50 kb in length, e.g., from 50 to 40k, from 100 and 30 k, from 100 to 10000, from 100 to 300, from 200 to 400, from 300 to 500, from 400 to 600, from 500 to 700, from 600 to 800, from 700 to 900, from 800 to 1000, from 900 to from 1100, from 1000 to 1200, from 1100 to 1300, from 1200 to 1400, from 1300 to 1500, from 1400 to 1600, from 1500 to 1700, from 600 to 1800, from 1700 to 1900, from 1800 to 2000 base pairs (bp) or nucleotides in length.

### Functional Domain Modifications

[0315] The chimeric IscB systems described above may be further functionalized via their association with one or more functional domains. The chimeric IscB systems may be further modified such that they function a nickases, as detailed herein, or rendered catalytically inactive by mutating one or more residues in the catalytic site of the nuclease. These catalytically inactive or nickase forms of the chimeric IscB may then be paired with other functional domains to extend the functionality of these IscB chimeric systems. Example functional domains include nucleotide deaminase, reverse transcriptase, non-LTR retrotransposon (and protein encoded), polymerase, diversity generating element (and protein encoded). The functional domains may be covalently linked to the chimeric IscB or otherwise configured so as to be able to associate with the chimeric IscB in solution or in a cell.

### Base Editors

[0316] The chimeric IscB systems disclosed herein may be further modified to include nucleotide deaminase (e.g., an adenosine deaminase or cytidine deaminase) associated (e.g., fused) with the chimeric IscB system, (e.g., IscB protein.). In certain examples, the nucleotide deaminase is a mutated form of an adenosine deaminase The mutated form of the adenosine deaminase may have both adenosine deaminase and cytidine deaminase activities.

[0317] In some examples, the present disclosure provides an engineered, non-naturally occurring composition comprising: the nucleic acid-guided nuclease that is catalytically inactive, a nucleotide deaminase associated with or otherwise capable of forming a complex with the IscB protein, and a single ωRNA molecule or single guide RNA molecule capable of forming a complex with the IscB protein and directing site-specific binding at a target sequence.

[0318] In one aspect, the present disclosure provides an engineered adenosine deaminase. The engineered adenosine deaminase may comprise one or more mutations herein. In one embodiment, the engineered adenosine deaminase has cytidine deaminase activity. In certain examples, the engineered adenosine deaminase has both cytidine deaminase activity and adenosine deaminase. In some cases, the modifications by base editors herein may be used for targeting post-translational signaling or catalysis. In one embodiment, compositions herein comprise nucleotide sequence comprising encoding sequences for one or more components of a base editing system. A base-editing system may comprise a deaminase (e.g., an adenosine deaminase or cytidine deaminase) fused with a chimeric IscB system or a variant thereof. In some cases, the target polynucleotide is edited at one or more bases to introduce a G→A or C→T mutation.

[0319] In some cases, the adenosine deaminase is double-stranded RNA-specific adenosine deaminase (ADAR). Examples of ADARs include those described Yiannis A Savva et al., The ADAR protein family, Genome Biol. 2012; 13(12): 252, which is incorporated by reference in its entirety. In some examples, the ADAR may be hADAR1. In certain examples, the ADAR may be hADAR2. The sequence of hADAR2 may be that described under Accession No. AF525422.1.

[0320] In some cases, the deaminase may be a deaminase domain, e.g., a deaminase domain of ADAR (“ADAR-D”). In one example, the deaminase may be the deaminase domain of hADAR2 (“hADAR2-D), e.g., as described in Phelps K J et al., Recognition of duplex RNA by the deaminase domain of the RNA editing enzyme ADAR2. Nucleic Acids Res. 2015 January; 43(2):1123-32, which is incorporated by reference herein in its entirety. In a particular example, the hADAR2-D has a sequence comprising amino acid 299-701 of hADAR2-D, e.g., amino acid 299-701 of the sequence under Accession No. AF525422.1.

[0321] In certain examples, the system comprises a mutated form of an adenosine deaminase fused with a dead chimeric IscB system (e.g., a IscB polypeptide nickase). The mutated form of the adenosine deaminase may have both adenosine deaminase and cytidine deaminase activities. In one embodiment, the adenosine deaminase may comprise one or more of the mutations: E488Q based on amino acid sequence positions of hADAR2-D, and mutations in a homologous ADAR protein corresponding to the above. In one embodiment, the adenosine deaminase may comprise one or more of the mutations: E488Q, V351G, based on amino acid sequence positions of hADAR2-D, and mutations in a homologous ADAR protein corresponding to the above. In one embodiment, the adenosine deaminase may comprise one or more of the mutations: E488Q, V351G, S486A, based on amino acid sequence positions of hADAR2-D, and mutations in a homologous ADAR protein corresponding to the above. In one embodiment, the adenosine deaminase may comprise one or more of the mutations: E488Q, V351G, S486A, T375S, based on amino acid sequence positions of hADAR2-D, and mutations in a homologous ADAR protein corresponding to the above. In one embodiment, the adenosine deaminase may comprise one or more of the mutations: E488Q, V351G, S486A, T375S, S370C, based on amino acid sequence positions of hADAR2-D, and mutations in a homologous ADAR protein corresponding to the above. In one embodiment, the adenosine deaminase may comprise one or more of the mutations: E488Q, V351G, S486A, T375S, S370C, P462A, based on amino acid sequence positions of hADAR2-D, and mutations in a homologous ADAR protein corresponding to the above. In one embodiment, the adenosine deaminase may comprise one or more of the mutations: E488Q, V351G, S486A, T375S, S370C, P462A, N597I, based on amino acid sequence positions of hADAR2-D, and mutations in a homologous ADAR protein corresponding to the above. In one embodiment, the adenosine deaminase may comprise one or more of the mutations: E488Q, V351G, S486A, T375S, S370C, P462A, N597I, L332I, based on amino acid sequence positions of hADAR2-D, and mutations in a homologous ADAR protein corresponding to the above. In one embodiment, the adenosine deaminase may comprise one or more of the mutations: E488Q, V351G, S486A, T375S, S370C, P462A, N597I, L332I, I398V, based on amino acid sequence positions of hADAR2-D, and mutations in a homologous ADAR protein corresponding to the above. In one embodiment, the adenosine deaminase may comprise one or more of the mutations: E488Q, V351G, S486A, T375S, S370C, P462A, N597I, L332I, I398V, K350I, based on amino acid sequence positions of hADAR2-D, and mutations in a homologous ADAR protein corresponding to the above. In one embodiment, the adenosine deaminase may comprise one or more of the mutations: E488Q, V351G, S486A, T375S, S370C, P462A, N597I, L332I, I398V, K350I, M383L, based on amino acid sequence positions of hADAR2-D, and mutations in a homologous ADAR protein corresponding to the above. In one embodiment, the adenosine deaminase may comprise one or more of the mutations: E488Q, V351G, S486A, T375S, S370C, P462A, N597I, L332I, I398V, K350I, M383L, D619G, based on amino acid sequence positions of hADAR2-D, and mutations in a homologous ADAR protein corresponding to the above. In one embodiment, the adenosine deaminase may comprise one or more of the mutations: E488Q, V351G, S486A, T375S, S370C, P462A, N597I, L332I, I398V, K350I, M383L, D619G, S582T, based on amino acid sequence positions of hADAR2-D, and mutations in a homologous ADAR protein corresponding to the above. In one embodiment, the adenosine deaminase may comprise one or more of the mutations: E488Q, V351G, S486A, T375S, S370C, P462A, N597I, L332I, I398V, K350I, M383L, D619G, S582T, V440I based on amino acid sequence positions of hADAR2-D, and mutations in a homologous ADAR protein corresponding to the above. In one embodiment, the adenosine deaminase may comprise one or more of the mutations: E488Q, V351G, S486A, T375S, S370C, P462A, N597I, L332I, I398V, K350I, M383L, D619G, S582T, V440I, S495N based on amino acid sequence positions of hADAR2-D, and mutations in a homologous ADAR protein corresponding to the above. In one embodiment, the adenosine deaminase may comprise one or more of the mutations: E488Q, V351G, S486A, T375S, S370C, P462A, N597I, L332I, I398V, K350I, M383L, D619G, S582T, V440I, S495N, K418E based on amino acid sequence positions of hADAR2-D, and mutations in a homologous ADAR protein corresponding to the above. In one embodiment, the adenosine deaminase may comprise one or more of the mutations: E488Q, V351G, S486A, T375S, S370C, P462A, N597I, L332I, I398V, K350I, M383L, D619G, S582T, V440I, S495N, K418E, S661T based on amino acid sequence positions of hADAR2-D, and mutations in a homologous ADAR protein corresponding to the above. In some examples, provided herein includes a mutated adenosine deaminase e.g., an adenosine deaminase comprising one or more mutations of E488Q, V351G, S486A, T375S, S370C, P462A, N597I, L332I, I398V, K350I, M383L, D619G, S582T, V440I, S495N, K418E, S661T, fused with a dead chimeric IscB system or IscB polypeptide nickase. In some examples, provided herein includes a mutated adenosine deaminase e.g., an adenosine deaminase comprising E488Q, V351G, S486A, T375S, S370C, P462A, N597I, L332I, I398V, K350I, M383L, D619G, S582T, V440I, S495N, K418E, and S661T, fused with a dead chimeric IscB system or IscB polypeptide nickase. In some examples, provided herein includes a mutated adenosine deaminase e.g., an adenosine deaminase comprising E488Q, V351G, S486A, T375S, S370C, P462A, N597I, L332I, I398V, K350I, M383L, D619G, S582T, V440I, S495N, K418E, S661T, and S375N fused with a dead chimeric IscB system or IscB polypeptide nickase.

[0322] In one embodiment, the adenosine deaminase may be a tRNA-specific adenosine deaminase or a variant thereof. In one embodiment, the adenosine deaminase may comprise one or more of the mutations: W23L, W23R, R26G, H36L, N37S, P48S, P48T, P48A, I49V, R51L, N72D, L84F, S97C, A106V, D108N, H123Y, G125A, A142N, S146C, D147Y, R152H, R152P, E155V, I156F, K157N, K161T, based on amino acid sequence positions of E. coli TadA, and mutations in a homologous deaminase protein corresponding to the above. In one embodiment, the adenosine deaminase may comprise one or more of the mutations: D108N based on amino acid sequence positions of E. coli TadA, and mutations in a homologous deaminase protein corresponding to the above. In one embodiment, the adenosine deaminase may comprise one or more of the mutations: A106V, D108N, based on amino acid sequence positions of E. coli TadA, and mutations in a homologous deaminase protein corresponding to the above. In one embodiment, the adenosine deaminase may comprise one or more of the mutations: A106V, D108N, D147Y, E155V, based on amino acid sequence positions of E. coli TadA, and mutations in a homologous deaminase protein corresponding to the above. In one embodiment, the adenosine deaminase may comprise one or more of the mutations: A106V, D108N, based on amino acid sequence positions of E. coli TadA, and mutations in a homologous deaminase protein corresponding to the above. In one embodiment, the adenosine deaminase may comprise one or more of the mutations: A106V, D108N, D147Y, E155V, L84F, H123Y, I156F, based on amino acid sequence positions of E. coli TadA, and mutations in a homologous deaminase protein corresponding to the above. In one embodiment, the adenosine deaminase may comprise one or more of the mutations: A106V, D108N, D147Y, E155V, L84F, H123Y, I156F, A142N, based on amino acid sequence positions of E. coli TadA, and mutations in a homologous deaminase protein corresponding to the above. In one embodiment, the adenosine deaminase may comprise one or more of the mutations: A106V, D108N, D147Y, E155V, L84F, H123Y, I156F, H36L, R51L, S146C, K157N, based on amino acid sequence positions of E. coli TadA, and mutations in a homologous deaminase protein corresponding to the above. In one embodiment, the adenosine deaminase may comprise one or more of the mutations: A106V, D108N, D147Y, E155V, L84F, H123Y, I156F, H36L, R51L, S146C, K157N, P48S, based on amino acid sequence positions of E. coli TadA, and mutations in a homologous deaminase protein corresponding to the above. In one embodiment, the adenosine deaminase may comprise one or more of the mutations: A106V, D108N, D147Y, E155V, L84F, H123Y, I156F, H36L, R51L, S146C, K157N, P48S, A142N, based on amino acid sequence positions of E. coli TadA, and mutations in a homologous deaminase protein corresponding to the above. In one embodiment, the adenosine deaminase may comprise one or more of the mutations: A106V, D108N, D147Y, E155V, L84F, H123Y, I156F, H36L, R51L, S146C, K157N, P48S, W23R, P48A, based on amino acid sequence positions of E. coli TadA, and mutations in a homologous deaminase protein corresponding to the above. In one embodiment, the adenosine deaminase may comprise one or more of the mutations: A106V, D108N, D147Y, E155V, L84F, H123Y, I156F, H36L, R51L, S146C, K157N, P48S, W23R, P48A, A142N, based on amino acid sequence positions of E. coli TadA, and mutations in a homologous deaminase protein corresponding to the above. In one embodiment, the adenosine deaminase may comprise one or more of the mutations: A106V, D108N, D147Y, E155V, L84F, H123Y, I156F, H36L, R51L, S146C, K157N, P48S, W23R, P48A, R152P, based on amino acid sequence positions of E. coli TadA, and mutations in a homologous deaminase protein corresponding to the above. In one embodiment, the adenosine deaminase may comprise one or more of the mutations: A106V, D108N, D147Y, E155V, L84F, H123Y, I156F, H36L, R51L, S146C, K157N, P48S, W23R, P48A, R152P, A142N, based on amino acid sequence positions of E. coli TadA, and mutations in a homologous deaminase protein corresponding to the above.

[0323] In some examples, the base editing systems may comprise an intein-mediated trans-splicing system that enables in vivo delivery of a base editor, e.g., a split-intein cytidine base editors (CBE) or adenine base editor (ABE) engineered to trans-splice. Examples of such base editing systems include those described in Colin K. W. Lim et al., Treatment of a Mouse Model of ALS by In Vivo Base Editing, Mol Ther. 2020 Jan. 14. pii: S1525-0016(20)30011-3. doi: 10.1016/j.ymthe.2020.01.005; and Jonathan M. Levy et al., Cytosine and adenine base editing of the brain, liver, retina, heart and skeletal muscle of mice via adeno-associated viruses, Nature Biomedical Engineering volume 4, pages 97-110(2020), which are incorporated by reference herein in their entireties.

[0324] Examples of base editing systems include those described in International Patent Publication Nos. WO 2019/071048 (e.g. paragraphs [0933]-[0938]), WO 2019/084063 (e.g., paragraphs [0173]-[0186], [0323]-[0475], [0893]-[1094]), WO 2019/126716 (e.g., paragraphs [0290]-[0425], [1077]-[1084]), WO 2019/126709 (e.g., paragraphs [0294]-[0453]), WO 2019/126762 (e.g., paragraphs [0309]-[0438]), WO 2019/126774 (e.g., paragraphs [0511]-[0670]), Cox DBT, et al., RNA editing with CRISPR-Cas13, Science. 2017 Nov. 24; 358(6366):1019-1027; Abudayyeh 00, et al., A cytosine deaminase for programmable single-base RNA editing, Science 26 Jul. 2019: Vol. 365, Issue 6451, pp. 382-386; Gaudelli N M et al., Programmable base editing of A•T to G•C in genomic DNA without DNA cleavage, Nature volume 551, pages 464-471 (23 Nov. 2017); Komor A C, et al., Programmable editing of a target base in genomic DNA without double-stranded DNA cleavage. Nature. 2016 May 19; 533(7603):420-4; Jordan L. Doman et al., Evaluation and minimization of Cas9-independent off-target DNA editing by cytosine base editors, Nat Biotechnol (2020). doi.org/10.1038/s41587-020-0414-6; and Richter M F et al., Phage-assisted evolution of an adenine base editor with improved Cas domain compatibility and activity, Nat Biotechnol (2020). doi.org/10.1038/s41587-020-0453-z, Gaudelli et al., Directed evolution of adenine base editors with increased activity and therapeutic application, Nature Biotech. 38, 892-900 (2020), which are incorporated by reference herein in their entireties and can be used to adapt to the chimeric IscB system.

### Prime Editors

[0325] In one embodiment, the present disclosure provides compositions and systems may comprise a chimeric IscB system or a catalytically inactive form, one or more ωRNA or guide molecules, and a reverse transcriptase. The systems may be used to insert a donor polynucleotide to a target polynucleotide. In some examples, the composition or system comprises a catalytically inactive chimeric IscB system, a reverse transcriptase associated with or otherwise capable of forming a complex with the chimeric IscB systems, and a ωRNA or guide molecule capable of forming a complex with the chimeric IscB systems and directing site-specific binding of the complex to a target sequence of a target polynucleotide, the ωRNA or guide molecule further comprising a donor sequence for insertion into the target polynucleotide.

[0326] In some cases, the catalytically inactive chimeric IscB systems may be a nickase, e.g., a DNA nickase. In some cases, the chimeric IscB system has one or more mutations. In some examples, the chimeric IscB system comprises mutations corresponding to the mutations in the RuvC or HNH nuclease.

[0327] The chimeric IscB systems may be associated with a reverse transcriptase. As used in this context “associated” means covalently linked, e.g. via a linker, or otherwise capable of complexing with the reverse transcriptase. A reverse transcriptase domain may be a reverse transcriptase or a fragment thereof.

[0328] In some examples, the compositions and systems may comprise the chimeric IscB system disclosed herein; a reverse transcriptase (RT) polypeptide connected to or otherwise capable of forming a complex with the chimeric IscB system; and a ωRNA or guide molecule capable of forming a complex with the chimeric IscB system and comprising: a ωRNA or guide sequence capable of directing site-specific binding of the chimeric IscB system complex to a target sequence of a target polynucleotide; a 3′ binding site region capable of binding to a cleaved upstream strand of the target polynucleotide; and a RT template sequence encoding an extended sequence, wherein the extended sequence comprises a variant region and a 3′ homologous sequence capable of hybridization to the downstream cleaved strand of the target polynucleotide.

[0329] A reverse transcriptase domain may be a reverse transcriptase or a fragment thereof. A wide variety of reverse transcriptases (RT) may be used in alternative embodiments of the present invention, including prokaryotic and eukaryotic RT, provided that the RT functions within the host to generate a donor polynucleotide sequence from the RNA template. If desired, the nucleotide sequence of a native RT may be modified, for example using known codon optimization techniques, so that expression within the desired host is optimized. A reverse transcriptase (RT) is an enzyme used to generate complementary DNA (cDNA) from an RNA template, a process termed reverse transcription. Reverse transcriptases are used by retroviruses to replicate their genomes, by retrotransposon mobile genetic elements to proliferate within the host genome, by eukaryotic cells to extend the telomeres at the ends of their linear chromosomes, and by some non-retroviruses such as the hepatitis B virus, a member of the Hepadnaviridae, which are dsDNA-RT viruses. Retroviral RT has three sequential biochemical activities: RNA-dependent DNA polymerase activity, ribonuclease H, and DNA-dependent DNA polymerase activity. Collectively, these activities enable the enzyme to convert single-stranded RNA into double-stranded cDNA. In an embodiment, the RT domain of a reverse transcriptase is used in the present invention. The domain may include only the RNA-dependent DNA polymerase activity. In one embodiment, the RT domain is non-mutagenic, i.e., does not cause mutation in the donor polynucleotide (e.g., during the reverse transcriptase process). In example embodiments, the RT domain may be non-retron RT, e.g., a viral RT or a human endogenous RTs. In some examples, the RT domain may be retron RT or DGRs RT. In some examples, the RT may be less mutagenic than a counterpart wildtype RT. In one embodiment, the RT herein is not mutagenic. In one embodiment, the reverse transcriptase is Human immunodeficiency virus (HIV) RT, Avian myoblastosis virus (AMV) RT, Moloney murine leukemia virus (M-MLV) RT a group II intron RT, a group II intron-like RT, or a chimeric RT. In an embodiment, the RT comprises modified forms of these RTs, such as, engineered variants of Avian myoblastosis virus (AMV) RT, Moloney murine leukemia virus (M-MLV) RT, or Human immunodeficiency virus (HIV) RT (see, e.g., Anzalone, et al., Search-and-replace genome editing without double-strand breaks or donor DNA, Nature. 2019 December; 576(7785):149-157).

[0330] The reverse transcriptase may be fused to the C-terminus of a chimeric IscB system. Alternatively or additionally, the reverse transcriptase may be fused to the N-terminus of a chimeric IscB system. The fusion may be via a linker and/or an adaptor protein. In some examples, the reverse transcriptase may be an M-MLV reverse transcriptase or variant thereof. The M-MLV reverse transcriptase variant may comprise one or more mutations. For the examples, the M-MLV reverse transcriptase may comprise D200N, L603W, and T330P. In another example, the M-MLV reverse transcriptase may comprise D200N, L603W, T330P, T306K, and W313F. In a particular example, the fusion of chimeric IscB systems and reverse transcriptase is chimeric IscB system (with a mutation corresponding to H840A of SpCas9) fused with M-MLV reverse transcriptase (D200N+L603W+T330P+T306K+W313F).

[0331] In one embodiment, the chimeric IscB systems herein may target DNA using a ωRNA or guide RNA containing a binding sequence that hybridizes to the target sequence on the DNA. The ωRNA or guide RNA may further comprise an editing sequence that contains new genetic information that replaces target DNA nucleotides. The small sizes of the chimeric IscB systems herein may allow easier packaging and delivery of the prime editing system, e.g., with a viral vector, e.g., AAV or lentiviral vector.

[0332] A single-strand break (a nick) may be generated on the target DNA by the chimeric IscB systems at the target site to expose a 3′-hydroxyl group, thus priming the reverse transcription of an edit-encoding extension on the ωRNA or guide directly into the target site. These steps may result in a branched intermediate with two redundant single-stranded DNA flaps: a 5′ flap that contains the unedited DNA sequence, and a 3′ flap that contains the edited sequence copied from the ωRNA. The 5′ flaps may be removed by a structure-specific endonuclease, e.g., FEN122, which excises 5′ flaps generated during lagging-strand DNA synthesis and long-patch base excision repair. The non-edited DNA strand may be nicked to induce bias DNA repair to preferentially replace the non-edited strand. Examples of prime editing systems and methods include those described in Anzalone A V et al., Search-and-replace genome editing without double-strand breaks or donor DNA, Nature. 2019 Oct. 21. doi: 10.1038/s41586-019-1711-4, which is incorporated by reference herein in its entirety.

[0333] The chimeric IscB system (e.g., the nickase form) may be used to prime-edit a single nucleotide on a target DNA. Alternatively or additionally, the chimeric IscB systems may be used to prime-edit at least 2, at least 3, at least 4, at least 5, at least 6, at least 7, at least 8, at least 10, at least 11, at least 12, at least 13, at least 14, at least 15, at least 16, at least 17, at least 18, at least 19, at least 20, at least 21, at least 22, at least 23, at least 24, at least 25, at least 26, at least 27, at least 28, at least 29, at least 30, at least 40, at least 50, at least 60, at least 70, at least 80, at least 90, at least 100, at least 200, at least 300, at least 400, at least 500, at least 600, at least 700, at least 800, at least 900, or at least 1000 nucleotides on a target DNA.

[0334] Examples of prime editing systems and methods that may be adapted for use with the chimeric IscBs described herein include those described in Anzalone x., “Search-and-replace genome editing without double-strand breaks or donor DNA”, Nature. 576, 149-157 (2019); Chen et al. “Enhanced prime editing systems by manipulating cellular determinants of editing outcomes” Cell 184(22):5635-5652.e29 (2021); WO 2020/191233; WO 2020/191234; WO 2020/191239; WO 2020/191241; WO 2020/191242; WO 2020/191243; WO 2020/191245; WO 2020/191246; WO 2020/191248; WO 2020/191249; WO 2021/082328 4, which is incorporated by reference herein in its entirety. In such cases, the system comprises a chimeric IscB system with nickase activity, a reverse transcriptase domain, and a DNA polymerase, and a ωRNA or guide molecule comprising a binding sequence capable of hybridizing to the target polynucleotide and an editing sequence. The generated region may be further extended on a DNA template as described herein. The latter may allow generation of a target-independent sequence, compatible with a generic donor sequence.

[0335] The chimeric IscB system is capable of generating a first cleavage of in the target sequence and a second cleavage outside the target sequence on the target polynucleotide. In some variations, a second chimeric IscB system-mediated cleavage in vicinity to the target site may be made, which may enable more efficient invasion of the extended DNA.

[0336] In one example embodiment, multiple chimeric IscB prime editing systems may be used in combination to facilitate larger insertions and deletions. In one embodiment, the compositions and systems of the chimeric IscB system herein comprise: a reverse transcriptase (RT) polypeptide connected to or otherwise capable of forming a complex with the chimeric IscB system; a first ωRNA or guide molecule capable of forming a first chimeric IscB system-Reverse transcriptase complex with the chimeric IscB system and comprising: a ωRNA or guide sequence capable of directing site-specific binding of the first chimeric IscB system-Reverse transcriptase complex to a first target sequence of a target polynucleotide; a first binding site region capable of binding to a cleaved or nicked strand of the target polynucleotide; and a RT template sequence encoding a first extended sequence; a second ωRNA or guide molecule capable of forming a second chimeric IscB system-Reverse transcriptase complex with the chimeric IscB system and comprising: a ωRNA or guide sequence capable of directing site specific binding of the second chimeric IscB system-Reverse transcriptase complex to a second target sequence of the target polynucleotide; a second binding site region capable of binding to a cleaved or nicked strand of the target polynucleotide; and a RT template sequence encoding a second extended sequence.

[0337] In some cases, the compositions and systems may further comprise: a donor template; a third ωRNA or guide sequence capable of forming a chimeric IscB system-Reverse transcriptase complex-ωRNA or guide with the chimeric IscB system and comprising: a ωRNA or guide sequence capable of directing site-specific binding to a target sequence on the donor template; a third binding region capable of binding to a cleaved or nicked strand of the donor template; and a RT template encoding a third extended region complementary to the first extended region generated on the target polynucleotide; and a fourth ωRNA or guide sequence capable of forming a chimeric IscB system-Reverse transcriptase complex with the IscB polypeptide or chimeric IscB system and comprising: a ωRNA or guide sequence capable of directing site-specific binding to a second target sequence on the donor template; a fourth binding region capable of binding to a cleaved or nicked strand of the donor template; and a RT template encoding a fourth extended region complementary to the second extended region generated on the target polynucleotide.

[0338] The use of two chimeric IscB systems (which may also be referred to as double-flap prime editing or twinPE) may be used to insert, delete, or replace larger sequences. Examples of CRISPR-Cas based prime editing systems that may be adapted for use with the chimeric IscBs described herein are disclosed in WO 2021/138469; Anzalone et al. “Programmable deletion, replacement, integration and inversion of large DNA sequences with twin prime editing” Nature Biotechnology 40(5):731-740 (2021); WO 20221/226558; WO 2021/226558, which are incorporated herein in their entirety by reference.

[0339] In another embodiment, the chimerc IscB prime editing compositions and systems may further comprise a site-specific recombinase. The recombinase is connected to or otherwise capable of forming a complex with the chimeric IscB prime editing system. In an embodiment, the complex is capable of inserting a recombination site in the DNA loci of interest by extension of RT templates that encode for the recombination site on the 3′ extension of the ωRNA or guide sequences by the reverse transcriptase. In an embodiment, a donor template comprising a compatible recombination site is provided that can recombine unidirectionally with the inserted recombination site when a recombinase specific for the recombination site is also provided. In an embodiment, the donor template is a plasmid comprising the complementary recombination site and any sequence for insertion at the DNA loci of interest. In an embodiment, the recombinase is connected to or capable of forming a complex with the chimeric IscB systems, such that all of the enzymatic proteins are brought into contact at the loci of interest. In an embodiment, the recombinase is codon optimized for eukaryotic cells (described further herein). In an embodiment, the recombinase includes a NLS (described further herein). In an embodiment, the recombinase is provided as a separate protein. The separate recombinase may form a dimer and bind to the donor template recombination site. The recombinase may be targeted to the loci of interest as a result of the insertion of the compatible recombination site that is also recognized by the recombinase. Thus, the recombinase may recognize the recombination site inserted at the DNA loci of interest and the recombination site on the donor and be targeted to the DNA loci of interest without any additional modifications to the recombinase.

[0340] In an embodiment, a second IscB complex connected to a recombinase is targeted to the DNA loci of interest. In an embodiment, the second TnpB complex comprises a dead IscB protein (dIscB, described further herein), such that the recombinase is targeted to the DNA loci of interest, but the target sequence is not further cleaved. In an embodiment, the dIscB targets a sequence generated only after the insertion of the recombination site. In an embodiment, the recombinase recognizes and binds to the donor template recombination site and the inserted recombination site. In an embodiment, the recombinase forms a dimer with a recombinase provided as a separate protein.

[0341] As used herein, the term “Recombinase” refers to an enzyme that catalyzes recombination between two or more recombination sites (e.g., an acceptor and donor site). Recombinases useful in the present invention catalyze recombination at specific recombination sites which are specific polynucleotide sequences that are recognized by a particular recombinase. “Uni-directional recombinases” or “integrases” refer to recombinase enzymes whose recognition sites are destroyed after the recombination has taken place. The term “integrase” refers to a type of recombinase. In other words, the sequence recognized by the recombinase is changed into one that is not recognized by the recombinase upon recombination. As a result, once a sequence is subjected to recombination by the uni-directional recombinase, the continued presence of the recombinase cannot reverse the previous recombination event.

[0342] “Recombination sites” are specific polynucleotide sequences that are recognized by the recombinase enzymes described herein. Typically, two different sites are involved (in regards to recombination termed “complementary sites”), one present in the target nucleic acid (e.g., a chromosome or episome of a eukaryote) and another on the nucleic acid that is to be integrated at the target recombination site. The terms “attB” and “attP,” which refer to attachment (or recombination) sites originally from a bacterial target (attachment site of bacteria) and a phage donor (attachment site of phage), respectively, are used herein although recombination sites for particular enzymes may have different names. The two attachment sites can share as little sequence identity as a few base pairs. The recombination sites typically include left and right arms separated by a core or spacer region. Thus, an attB recombination site consists of BOB′, where B and B′ are the left and right arms, respectively, and O is the core region. Similarly, attP is POP′, where P and P′ are the arms and O is again the core region. Upon recombination between the attB and attP sites, and concomitant integration of a nucleic acid at the target, the recombination sites that flank the integrated DNA are referred to as “attL” and “aatR.” The attL and attR sites, using the terminology above, thus consist of BOP′ and POB′, respectively. In some representations herein, the “O” is omitted and attB and attP, for example, are designated as BB′ and PP′, respectively.

[0343] Example CRISPR-Cas prime editing/recombinase compositions and systems that may be adapted for use with the chimeric IscBs disclosed herein are described in WO 2021/138469, Anzalone 2021; WO 2021/226558; Yarnall et al. “Drag-and-drop genome insertion of large sequences without double-strand DNA cleavage using CRISPR-directed integrases” 41, 500-512 (2023); and WO 2022/087235.

### Transposition Systems

[0344] In another aspect, the chimeric IscB systems disclosed herein may further comprise a transposase and optionally a donor template. The chimeric IscB may be catalytically inactive. The chimeric IscB maybe further linked to, or otherwise capable of associating with, a transposase (or one or more components thereof). The chimeric IscB may then direct the transposase to a desired transposition site where the transposase facilitate insertion of a donor polynucleotide e.g. from the provided donor template into the desired transposition site.

[0345] The term “transposase” as used herein refers to an enzyme, which is a component of a functional nucleic acid-protein complex capable of transposition and which mediates transposition. The transposase may comprise a single protein or comprise multiple protein sub-units. A transposase may be an enzyme capable of forming a functional complex with a transposon end or transposon end sequences. The term “transposase” may also refer in certain embodiments to integrases. The expression “transposition reaction” used herein refers to a reaction wherein a transposase inserts a donor polynucleotide sequence in or adjacent to an insertion site on a target polynucleotide. The insertion site may contain a sequence or secondary structure recognized by the transposase and/or an insertion motif sequence where the transposase cuts or creates staggered breaks in the target polynucleotide into which the donor polynucleotide sequence may be inserted. Exemplary components in a transposition reaction include a transposon, comprising the donor polynucleotide sequence to be inserted, and a transposase or an integrase enzyme. The term “transposon end sequence” as used herein refers to the nucleotide sequences at the distal ends of a transposon. The transposon end sequences may be responsible for identifying the donor polynucleotide for transposition. The transposon end sequences may be the DNA sequences the transpose enzyme uses in order to form transpososome complex and to perform a transposition reaction.

[0346] Embodiments disclosed herein provide an engineered or non-natural guided excision-transposition system. The engineered or non-natural guided excision-transposition system may comprise one or more components of a ωRNA-chimeric IscB system and one or more components of a Class II transposon. The components of the ωRNA-IscB or guide-chimeric IscB system can direct the Class II transposon component(s) to retrotransposon to a target nucleic acid sequence and direct its transposition into a recipient polynucleotide.

[0347] For example, the engineered or non-natural guided excision-transposition systems that can include (a) a first chimeric IscB system; (b) a first Class II transposon polypeptide coupled to or otherwise capable of complexing with the first chimeric IscB system; (c) a first guide molecule capable of forming a first ωRNA-IscB or guide-chimeric IscB system with the first chimeric IscB system and directing site-specific binding to a first target sequence of a first target polynucleotide; (d) a second chimeric IscB system; (e) a second Class II transposon polypeptide coupled to or otherwise capable of complexing with the second chimeric IscB system; (f) a second guide molecule capable of forming a second ωRNA-IscB complex with the first IscB protein and directing site-specific binding to a second target sequence of the first target polynucleotide; and (g) a Class II transposon polynucleotide comprising the first target polynucleotide and is capable of forming a complex with the first and second chimeric IscB system, the first and second guide molecules, and the first and second Class II transposon polypeptides.

[0348] In one embodiment, the engineered or non-natural guided excision-transposition system can include (h) a third guide molecule capable of complexing with the first chimeric IscB system and directing site-specific binding to a first target sequence of a second target polynucleotide, wherein the third guide molecule is optionally coupled to the first chimeric IscB system; (i) optionally, a first ωRNA or guide molecule polynucleotide that encodes the third ωRNA or guide molecule; (j) a fourth ωRNA or guide molecule capable of complexing with the second chimeric IscB system and directing site-specific binding to a second target sequence of the second target polynucleotide, wherein the fourth guide molecule is optionally coupled to the second chimeric IscB system; and (k) optionally, a second ωRNA or guide molecule polynucleotide that encodes the fourth ωRNA or guide molecule.

[0349] In one embodiment, the first and the second Class II transposon polypeptides are capable of excising the first target polynucleotide from the Class II transposon polynucleotide. In one embodiment, the first and the second Class II transposon polypeptides are capable of transposing the first target polynucleotide in the second target polynucleotide. In one embodiment, the first target polynucleotide does not include one or more Class II transposon long terminal repeats.

[0350] The engineered or non-natural guided excision-transposition systems described herein can be based on a Class II transposon or Class II transposon system. The engineered or non-natural guided excision-transposition system may include a first target polynucleotide, also referred to as a donor polynucleotide or transposon and a second target polynucleotide, which is also referred to herein as a recipient polynucleotide. As used herein, “transposon” (also referred to as transposable element) refers to a polynucleotide sequence that is capable of moving form location in a genome to another. There are several classes of transposons. Transposons include retrotransposons (Class I transposons) and DNA transposons (Class II transposons). In some cases, retrotransposons require the transcription of the polynucleotide that is moved (or transposed) in order to transpose the polynucleotide to a new genome or polynucleotide. DNA transposons are those that do not require reverse transcription of the polynucleotide that is moved (or transposed) in order to transpose the polynucleotide to a new genome or polynucleotide.

[0351] Any suitable transposon system can be used. Suitable transposon and systems thereof can include, but are not limited, to Sleeping Beauty transposon system (Tc1/mariner superfamily) (see e.g. Ivics et al. 1997. Cell. 91(4): 501-510), piggyBac (piggyBac superfamily) (see e.g. Li et al. 2013 110 (25): E2279-E2287 and Yusa et al. 2011. PNAS. 108(4): 1531-1536), Tol2 (superfamily hAT), Frog Prince (Tc1/mariner superfamily) (see e.g., Miskey et al. 2003 Nucleic Acid Res. 31(23):6873-6881) and variants thereof.

[0352] In one embodiment, the first and/or second Class II transposon polypeptide is a DD[E/D]transposon or transposon polypeptide. In one embodiment, the first and/or the second Class II transposon polynucleotide is a Tc1/mariner, PiggyBac, Frog Prince, Tn3, Tn5, hAT, CACTA, P, Mutator, PIF/Harbinger, Transib, or a Merlin/IS1016 transposon polynucleotide. In one embodiment, the first and/or second Class II transposon polypeptide is a Tc1/mariner, PiggyBac, Frog Prince, Tn3, Tn5, hAT, CACTA, P, Mutator, PIF/Harbinger, Transib, or a Merlin/IS1016 transposon polypeptide.

[0353] Suitable Class II transposon systems and components that can be utilized can also be and are not limited to those described in e.g., and without limitation, Han et al., 2013. BMC Genomics. 14:71, doi: 10.1186/1471-2164-14-71, Lopez and Garcia-Perez. 2010. Curr. Genomics. 11(2):115-128; Wessler. 2006. PNAS. 103(47): 176000-17601; Gao et al., 2017. Marine Genomics. 34:67-77; Bradic et al. 2014. Mobile DNA. 5(12) doi:10.1186/1759-8753-5-12; Li et al., 2013. PNAS. 110(25)E2279-E2287; Kebriaei et al. 2017. Trends in Genetics. 33(11): 852-870); Miskey et al. 2003. Nucleic Acid res. 31(23):6873-6881; Nicolas et al. 2015. Microbiol Spectr. 3(4) doi: 10.1128/microbiolspec.MDNA3-0060-2014); W. S. Reznikoff. 1993. Annu Rev. Microbiol. 47:945-963; Rubin et al. 2001. Genetics. 158(3): 949-957; Wicker et al. 2003. Plant Physiol. 132(1): 52-63; Majumdar and Rio. 2015. Microbiol. Spectr. 3(2) doi: 10.1128/microbiolspec.MDNA3-0004-2014; D. Lisch. 2002. Trends in Plant Sci. 7(11): 498-504; Sinzelle et al. 2007. PNAS. 105(12): 4715-4720; Han et al. 2014; Genome Biol. Evol. 6(7):1748-1757; Grzebelus et al. 2006; Mol. Genet. Genomics. 275(5):450-459; Zhang et al. 2004. Genetics. 166(2):971-986; Chen and Li. 2008. Gene. 408(1-2):51-63; and C. Feschotte. 2004. Mol. Biol. Evol. 21(9):1769-1780.

### T7 Transposases

[0354] In some embodiments, the system comprises one or more Tn7 or Tn7-like transposases. In a particular embodiment, the Tn7-like transposase may be a Tn5053 transposase. For example, the Tn5053 transposases include those described in Minakhina S et al., Tn5053 family transposons are res site hunters sensing plasmidal res sites occupied by cognate resolvases. Mol Microbiol. 1999 September; 33(5):1059-68; and FIG. 4 and related texts in Partridge S R et al., Mobile Genetic Elements Associated with Antimicrobial Resistance, Clin Microbiol Rev. 2018 Aug. 1; 31 (4), both of which are incorporated by reference herein in their entirety. In some cases, the one or more Tn5053 transposases may comprise one or more of TniA, TniB, and TniQ. TniA is also known as TnsB. TniB is also known as TnsC. TniQ is also known as TnsD. Accordingly, in certain embodiments these Tn5053 transposase subunits may be referred to as TnsB, TnsC, and TnsD, respectively. In certain cases, the one or more transposases may comprise TnsB, TnsC, and TnsD. In one example, a chimeric IscB system comprises TniA, TniB, TniQ, Cas12k, tracrRNA, and guide RNA(s). In another example, a chimeric IscB system comprises TnsB, TnsC, TnsD, Cas12k, tracrRNA, and guide RNA(s).

[0355] In some examples, the one or more transposases may comprise: (a) TnsA, TnsB, TnsC, and TniQ, (b) TnsA, TnsB, and TnsC, (c) TnsB and TnsC, (d) TnsB, TnsC, and TniQ, (e) TnsA, TnsB, and TniQ, (f) TnsE, or (g) any combination thereof. In some cases, the TnsE does not bind to DNA. In some cases, transposase protein may comprise one or more transposases, e.g., one or more transposase subunits of a Tn7 transposase or Tn7-like transposase, e.g., one or more of TnsA, TnsB, TnsC, and TniQ. In some examples, the one or more transposases comprise TnsB, TnsC, and TniQ.

[0356] In some embodiments, three transposon-encoded proteins form the core transposition machinery of Tn7: a heteromeric transposase (TnsA and TnsB) and a regulator protein (TnsC). In addition to the core TnsABC transposition proteins, Tn7 elements encode dedicated target site-selection proteins, TnsD and TnsE. In conjunction with TnsABC, the sequence-specific DNA-binding protein TnsD directs transposition into a conserved site referred to as the “Tn7 attachment site,” attTn7. TnsD is a member of a large family of proteins that also includes TniQ, a protein found in other types of bacterial transposons. TniQ has been shown to target transposition into resolution sites of plasmids. As used herein, a TniQ transposase may be a TnsD transposase. Examples of Tn7 or Tn7-like transposases include TnsA, TnsB, TnsC, TniQ, TnsD, and TnsE. In some embodiments, the system comprises TnsA, TnsB, TnsC, and/or TniQ. Two or more of the components in the system may be comprised in a single protein (e.g., fusion protein). For example, TnsA and TnsB may be comprised in a single protein.

[0357] As used herein, a right end sequence element or a left end sequence element are made in reference to an example Tn7 transposon. The general structure of the left end (LE) and right end (RE) sequence elements of canonical Tn7 is established. Tn7 ends comprise a series of 22-bp TnsB-binding sites. Flanking the most distal TnsB-binding sites is an 8-bp terminal sequence ending with 5′-TGT-3′/3′-ACA-5′. The right end of Tn7 contains four overlapping TnsB-binding sites in the ˜90-bp right end element. The left end contains three TnsB-binding sites dispersed in the ˜150-bp left end of the element. The number and distribution of TnsB-binding sites can vary among Tn7-like elements. End sequences of Tn7-related elements can be determined by identifying the directly repeated 5-bp target site duplication, the terminal 8-bp sequence, and 22-bp TnsB-binding sites (Peters J E et al., 2017). Example Tn7 elements, including right end sequence element and left end sequence element include those described in Parks A R, Plasmid, 2009 January; 61(1):1-14.

### Tn5 Transposases

[0358] In certain embodiments, the one or more transposases are one or more Tn5 transposases. In some examples, the transposases may comprise TnpA. The transposase may be a Y1 transposase of the IS200/IS605 family, encoded by the insertion sequence (IS) IS608 from Helicobacter pylori, e.g., TnpAIS608. Examples of the transposases include those described in Barabas, O., Ronning, D. R., Guynet, C., Hickman, A. B., TonHoang, B., Chandler, M. and Dyda, F. (2008) Mechanism of IS200/IS605 family DNA transposases: activation and transposon-directed target site selection. Cell, 132, 208-220. In certain example embodiments, the transposase is a single stranded DNA transposase. In certain example embodiments, the single stranded DNA transposase is TnpA or a functional fragment thereof. The chimeric IscB-transposase systems may be coded on the same strand or be part of a larger operon. In certain embodiments, the chimeric IscB may confer target specificity, allowing the TnpA to move a polynucleotide cargo from other target sites in a sequence specific matter. In certain example embodiments, the transposase are derived from Flavobactreium granuli strain DSM-19729, Salinivirga cyanobacteriivorans strain L21-Spi-D4, Flavobactrium aciduliphilum strain DSM 25663, Flavobacterium glacii strain DSM 19728, Niabella soli DSM 19437, Salnivirga cyanobactriivorans strain L21-Spi-D4, Alkaliflexus imshenetskii DSM 150055 strain Z-7010, or Alkalitala saponilacus.

[0359] In certain embodiments, the transposase is a single-stranded DNA transposase. The single stranded DNA transposase may be TnpA, a functional fragment thereof, or a variant thereof. In certain embodiments, the transposase is a Himar1 transposase, a fragment thereof, or a variant thereof. In one example, the system comprises a chimeric IscB associated with Himar1.

[0360] In certain embodiments, the transposases may be one or more Vibrio cholerae Tn6677 transposases. In one example, the system may comprise components of variant Type I-F CRISPR-Cas system or polynucleotide(s) encoding thereof. The transposon may include a terminal operon comprising the tnsA, tnsB, and tnsC genes. The transposon may further comprise a tniQ gene. The tniQ gene may be encoded within the cas rather than tns operon. In certain embodiments, the TnsE may be absent in the transposon.

### Mu Transposases

[0361] The transposases may be one of the Mu family transposon systems, e.g., transposon of bacteriophage Mu, a bacterial class III transposon of Escherichia coli. In some cases, this transposon exhibits high transposition frequency. The Mu bacteriophage with its approximately 37 kb genome is relatively large compared to other transposons. The Mu transposon may have left end and right end transposase (e.g., MuA) recognition sequences (designated “L” and “R”, respectively) that flank the Mu transposable cassette, the region of the transposon that is ultimately integrated into the target site. In some examples, these ends are not inverted repeat sequences. The Mu transposable cassette, when necessary, may include a transpositional enhancer sequence (also referred to herein as the internal activating sequence, or “IAS”) located approximately 950 base pairs inward from the left end recognition sequence.

[0362] In some examples, a Mu transposon may have a 22 bp symmetrical consensus sequence, located near both ends, for recognition by a Mu transposase (MuA). Random transposition of a Mu transposon into a target gene occur through (1) binding of transposase (e.g., MuA) monomers to the Mu transposon recognition sites to form transposome assemblies, (2) tetramerization of the bound transposase (e.g., MuA) monomers to bridge the ends of the Mu transposon and engage the Mu transposon cleavage sites, (3) subsequent self-cleavage of the Mu transposon at the cleavage sites, and (4) accurate occurrence of a 5 bp staggered cut in a host DNA sequence into which the Mu transposon is subsequently incorporated.

[0363] The transposases may be Mu transposase family. Examples of transposases in the Mu family includes MuA, MuB, and MuC.

[0364] In some examples, MuA may be a about 75-kDa multidomain protein (about 663 amino acids) and can be divided into structurally and functionally defined major domains (I, II, III) and subdomains (Iα, Iβ, Iγ; IIα, IIβ; IIIα, IIIβ). The N-terminal subdomain Iα promotes transpososome assembly via an initial binding to a specific transpositional enhancer sequence. The specific DNA binding to transposon ends, crucial for the transpososome assembly, is mediated through amino acid residues located in subdomains Iβ and Iγ. Subdomain IIα contains the critical DDE-motif of acidic residues (D269, D336 and E392), which is involved in the metal ion coordination during the catalysis. Subdomains IIβ and IIIα participate in nonspecific DNA binding, and they appear important during structural transitions. Subdomain IIIα also displays a cryptic endonuclease activity, which is required for the removal of the attached host DNA following the integration of infecting Mu. The C-terminal subdomain 111β is responsible for the interaction with the phage-encoded MuB protein, important in targeting transposition into distal target sites. This subdomain is also important in interacting with the host-encoded C1pX protein, a factor which remodels the transpososome for disassemble.

[0365] In some examples, MuA may catalyze the steps of transposition: (i) initial cleavages at the transposon-host boundaries (donor cleavage) and (ii) covalent integration of the transposon into the target DNA (strand transfer). These steps may proceed via sequential structural transitions within a nucleoprotein complex, a transpososome, the core of which contains four MuA molecules and two synapsed transposon ends. In vivo, the critical MuA-catalyzed reaction steps may also involve the phage-encoded MuB targeting protein, host-encoded DNA architectural proteins (HU and IF), certain DNA cofactors (MuA binding sites and transpositional enhancer sequence), as well as stringent DNA topology. The reaction steps mimicking Mu transposition into external target DNA can be reconstituted in vitro using MuA transposase, 50 bp Mu R-end DNA segments, and target DNA as the only macromolecular components.

[0366] In some examples, MuA and variants include those disclosed by EBI accession No. UNIPROT:Q58ZD8 which has 36% identity to wild type MuA protein; Naigamwalla et al., 1998, (Journal of Molecular Biology 282:265-274) (mutations in domain IIIa of the Mu transposase protein); Rasila et al., 2012, (Plos One, 7(5):E37922) (functional mapping of MuA transposase family protein structures with scanning mutagenesis); WO 2010/099296 (hyperactive piggyback transposases).

[0367] In some examples, MuB may be an ATP-dependent DNA binding protein, which is required for efficient transposition in vivo. Bacteriophage Mu transposition may be influenced by the ATP-utilizing protein MuB. In vitro, the MuA transposase may direct insertions into targets that are bound by MuB. In some cases, there is no particular sequence specificity to MuB binding. However, its distribution on DNA may not be random: MuB binding to target molecules that already contain Mu sequences is specifically destabilized through an ATP-dependent mechanism (19). In some examples, MuB also stimulates the DNA-breakage and DNA-joining activities of MuA (Adzuma and Mizuuchi (1988) Cell 53:257-266; Baker et al. (1991) Cell 65:1003-1013; Maxwell et al. (1987) Proc. Natl. Acad. Sci. USA 84:699-703; Surette and Chaconas (1991) J. Biol Chem. 266:17306-17313; Surette et al. (1991) J. Biol. Chem. 266:3118-3124; and Wu and Chaconas (1992) J. Biol. Chem. 267:9552-9558; and Wu and Chaconas, (1994) J. Biol. Chem. 269:28829-28833).

### IscB Retrotransposon Systems

[0368] The systems and compositions herein may comprise a chimeric IscB system, one or more ωRNAs or guide RNAs, and one or more components of a retrotransposon, e.g., a non-LTR retrotransposon. The one or more components of a retrotransposon include a retrotransposon protein and retrotransposon RNA. The systems and compositions may be used to insert a donor polynucleotide to a target polynucleotide. The systems and compositions may further comprise a donor polynucleotide.

[0369] In some examples, the present disclosure provides an engineered, non-naturally occurring composition comprising: a chimeric IscB system, a non-LTR retrotransposon protein associated with or otherwise capable of forming a complex with the chimeric IscB systems; a single ωRNA or guide capable of forming a complex with the chimeric IscB systems and directing site-specific binding to a target sequence of a target polynucleotide. The composition may further comprise a donor construct comprising a donor polynucleotide for insertion to the target polynucleotide and located between two binding elements capable of forming a complex with the non-LTR retrotransposon protein. In some cases, the chimeric IscB system is engineered to have nickase activity.

[0370] In some examples, the chimeric IscB system is fused to the N-terminus of the non-LTR retrotransposon protein. In some examples, the chimeric IscB system is fused to the C-terminus of the non-LTR retrotransposon protein.

[0371] The guides may direct the fusion protein to a target sequence 5′ of the targeted insertion site, and wherein the chimeric IscB system generates a double-strand break at the targeted insertion site. The guides may direct the fusion protein to a target sequence 3′ of the targeted insertion site, and wherein the chimeric IscB system generates a double-strand break at the targeted insertion site.

[0372] The donor polynucleotide may further comprise a polymerase processing element to facilitate 3′ end processing of the donor polynucleotide sequence. The polymerase may be a DNA polymerase, e.g., DNA polymerase I. In some examples, the polymerase may be an RNA polymerase.

[0373] In some examples, the donor polynucleotide further comprises a homology region to the target sequence on the 5′ end of the donor construct, the 3′ end of the donor construct, or both. In some examples, the homology region is from 1 to 50, from 5 to 30, from 8 to 25, e.g., 1, 2, 3, 4, 5, 6, 7, 8, 9, 10, 11, 12, 13, 14, 15, 16, 17, 18, 19, 20, 21, 22, 23, 24, 25, 26, 27, 28, 29, 30, 31, 32, 33, 34, 35, 36, 37, 38, 39, 40, 41, 42, 43, 44, 45, 46, 47, 48, 49, or 50 base pairs in length.

[0374] Native or wild-type non-LTR retrotransposons encode the protein machinery necessary for their self-mobilization. The non-LTR retrotransposon element comprises a DNA element integrated into a host genome. This DNA element may encode one or two open reading frames (ORFs). For example, the R2 element of Bombyx mori encodes a single ORF containing reverse transcriptase (RT) activity and a restriction enzyme-like (REL) domain. L1 elements encode two ORFs, ORF1 and ORF2. ORF1 contains a leucine zipper domain involved in protein-protein interactions and a C-terminal nucleic acid binding domain. ORF2 has a N-terminal apurinic/apyrimidinic endonuclease (APE), a central RT domain, and a C-terminal cysteine histidine rich domain. An example replicative cycle of a non-LTR retrotransposon may comprise transcription of the full-length retrotransposon element to generate an mRNA active element (retrotransposon RNA). The active element mRNA is translated to generate the encoded retrotransposon proteins or polypeptides. A ribonucleoprotein complex comprising the active element and retrotransposon protein, or polypeptide, is formed and this RNP facilitates integration of the active element into the genome. The RNA-transposase complex nicks the genome. The 3′ end of the nicked DNA serves as a primer to allow the reverse transcription of the transposon RNA into cDNA. Fourth, the transposase proteins integrate the cDNA into the genome.

[0375] Elements of these systems may be engineered to work within the context of the invention. For example, a non-LTR retrotransposon polypeptide may be fused to a site-specific nuclease. The binding elements that allow a non-LTR retrotransposon polypeptide to bind to the native retrotransposon DNA element, may be engineered into a donor construct to facilitate entry of a donor polynucleotide sequence into a target polypeptide.

[0376] In the present invention the protein component of the non-LTR retrotransposon may be connected to or otherwise engineered to form a complex with a site-specific nuclease. The retrotransposon RNA may be engineered to encode a donor polynucleotide sequence. Thus, in certain example embodiments, the chimeric IscB system, via formation of a chimeric IscB system complex with a guide sequence, directs the retrotransposon complex (e.g., the retrotransposon polypeptide(s) and retrotransposon RNA to a target sequence in a target polynucleotide, where the retrotransposon RNP complex facilitates integration of the donor polynucleotide sequence into the target polynucleotide. Accordingly, the one or more non-LTR retrotransposon components may comprise retrotransposon polypeptides, or function domains thereof, that facilitate binding of the retrotransposon RNA, reverse transcription of the retrotransposon RNA into cDNA, and/or integration of the donor polynucleotide into the target polynucleotide, as well as retrotransposon RNA elements modified to encode the donor polynucleotide sequence.

[0377] Examples of non-LTR retrotransposons include CRE, R2, R4, L1, RTE, Tad, R1, LOA, I, Jockey, CR1. In one example, the non-LTR retrotransposon is R2. In another example, the non-LTR retrotransposon is L1. Examples of non-LTR retrotransposons may include those described in Christensen S M et al., RNA from the 5′ end of the R2 retrotransposon controls R2 protein binding to and cleavage of its DNA target site, Proc Natl Acad Sci USA. 2006 Nov. 21; 103(47):17602-7; Eickbush T H et al, Integration, Regulation, and Long-Term Stability of R2 Retrotransposons, Microbiol Spectr. 2015 April; 3(2):MDNA3-0011-2014. doi: 10.1128/microbiolspec.MDNA3-0011-2014; Han J S, Non-long terminal repeat (non-LTR) retrotransposons: mechanisms, recent developments, and unanswered questions, Mob DNA. 2010 May 12; 1(1):15. doi: 10.1186/1759-8753-1-15; Malik H S et al., The age and evolution of non-LTR retrotransposable elements, Mol Biol Evol. 1999 June; 16(6):793-805, which are incorporated by reference herein in their entireties.

[0378] Examples of the non-LTR retrotransposon polypeptides also include R2 from Clonorchis sinensis, or Zonotrichia albicollis.

[0379] A non-LTR retrotransposon may comprise multiple retrotransposon polypeptides or polynucleotides encoding same. In one embodiment, the retrotransposon polypeptides may form a complex. For example, a non-LTR retrotransposon is a dimer, e.g., comprising two retrotransposon polypeptides forming a dimer. The dimer subunits may be connected or form a tandem fusion. A chimeric IscB system may be associate with (e.g., connected to) one or more subunits of such complex. In some examples, the non-LTR retrotransposon is a dimer of two retrotransposon polypeptides; one of the retrotransposon polypeptides comprises nuclease or nickase activity and is connected with a chimeric IscB system.

[0380] The retrotransposon polypeptides may comprise one or more modifications to, for example, enhance specificity or efficiency of donor polynucleotide recognition, target-primed template recognition (TPTR). The retrotransposon polypeptides may also comprise one or more truncations or excisions to remove domains or regions of wild-type protein to arrive at a minimal polypeptide that retain donor polynucleotide recognition and TPTR. In some example embodiments, the native endonuclease activity may be mutated to eliminate endonuclease activity.

[0381] In certain example embodiments, the modifications or truncations of the non-LTR retrotransposon peptide may be in a zinc finger region, a Myb region, a basic region, a reverse transcriptase domain, a cysteine-histidine rich motif, or an endonuclease domain.

[0382] A non-LTR retrotransposon may comprise polynucleotide encoding one or more retrotransposon RNA molecules. The polynucleotide may comprise one or more regulatory elements. The regulatory elements may be promoters. The regulatory elements and promoters on the polynucleotides include those described throughout this application. For example, the polynucleotide may comprise a pol2 promoter, a pol3 promoter, or a T7 promoter.

[0383] In some cases, the polynucleotide encodes a retrotransposon RNA with at least a portion of its sequence complementary to a target sequence. For example, the 3′ end of the retrotransposon RNA may be complementary to a target sequence. The RNA may be complementary to a portion of a nicked target sequence. In one embodiment, a retrotransposon RNA may comprise one or more donor polynucleotides. In certain cases, a retrotransposon RNA may encode one or more donor polynucleotides.

[0384] A retrotransposon RNA may be capable of binding to a retrotransposon polypeptide. Such retrotransposon RNA may comprise one or more elements for binding to the retrotransposon polypeptide. Examples of binding elements include hairpin structures, pseudoknots (e.g., a nucleic acid secondary structure containing at least two stem-loop structures in which half of one stem is intercalated between the two halves of another stem), stem loops, and bulges (e.g., unpaired stretches of nucleotides located within one strand of a nucleic acid duplex). In certain examples, the retrotransposon RNA comprises one or more hairpin structures. In some examples, the retrotransposon RNA comprises one or more pseudoknots. In certain examples, a retrotransposon RNA comprises a sequence encoding a donor polynucleotide and one or more binding elements for forming a complex with the retrotransposon polypeptide. The binding elements may be located on the 5′ end or the 3′ end.

[0385] In one embodiment, a retrotransposon RNA comprises a region capable of hybridizing with an overhang of a target polynucleotide at the target site. The overhang may be a stretch of single-stranded DNA. The overhang may function as a primer for reverse transcription of at least a portion of the retrotransposon RNA to a cDNA. In some cases, a region of the cDNA may be capable of hybridizing a second overhang of the target polynucleotide. The second overhang may function as a primer for the synthesis of a second strand to generate a double-stranded cDNA. The cDNA may comprise a donor polynucleotide sequence. The two overhangs may be from different strands of the target polynucleotide.

[0386] Example CRISPR-Cas, or other programmable nuclease, systems that may be adapted for use with the chimeric IscB systems disclosed herein are disclosed in WO 2021/102042; WO 2022/17380; and Wilkinson et al. “Structure of the R2 non-LTR retrotransposon initiating a target-primed reverse transcription” Science. 380(6642), 301-308 (2023), which are incorporated herein by reference in their entirety.

### IscB Diversity Generating Retroelement System

[0387] In an embodiment, the chimer IscB systems disclosed herein may further comprise one or more diversity generating retroelement(s) (e.g., DGR described in US20100041033A1). In one embodiment, the DGR may insert a donor polynucleotide with its homing mechanism. For example, the DGR may be associated with a catalytically inactive IscB protein (e.g., a dead IscB), and integrate the single-strand DNA using a homing mechanism. In some examples, the DGR may be less mutagenic than a counterpart wild type DGR. In some examples, the DGR is not error-prone. In one embodiment, the DGR herein is not mutagenic. The non-mutagenic DGR may be a mutant of a wild type DGR. As used herein, the term “DGR” encompasses both diversity generating retroelement polynucleotides and proteins encoded by diversity generating retroelement polynucleotides. In some examples, DGR may be proteins encoded by diversity generating retroelement polynucleotides having reverse transcriptase activity. In some examples, DGR may be proteins encoded by diversity generating retroelement polynucleotides having reverse transcriptase activity and integrase activity. In some cases, the template or donor polynucleotide may be encoded by a diversity generating retroelement polynucleotide. In certain cases, the template may be a polynucleotide different from the diversity generating retroelement polynucleotide, e.g., provided as a separate construct or molecule.

[0388] In one embodiment, the DGR herein may also include a Group II intron (and any proteins and polynucleotides encoded), which are mobile ribozymes that self-splice from precursor RNAs to yield excised intron lariat RNAs, which then invade new genomic DNA sites by reverse splicing. Examples of Group II intron include those described in Lambowitz A M et al., Group II Introns: Mobile Ribozymes that Invade DNA, Cold Spring Harb Perspect Biol. 2011 August; 3(8): α003616.

[0389] In one embodiment, the diversity-generating retroelements (DGRs) are genetic elements that can produce targeted, massive variations in the genomes that carry these elements. In one embodiment, the DGR systems rely on error-prone reverse transcriptases to produce mutagenized cDNA (containing A-to-N mutations) from a template region (TR), to replace a segment called a variable region (VR) that is similar to the TR region—this process is called mutagenic retrohoming (see, e.g., Sharifi and Ye, MyDGR: a server for identification and characterization of diversity-generating retroelements. Nucleic Acids Res. 2019 Jul. 2; 47 (W1): W289-W294). DGRs may include a unique family of retroelements that generate sequence diversity of DNA. They exist widely in bacteria, archaea, phage and plasmid, and benefit their hosts by introducing variations and accelerating the evolution of target proteins (see, e.g., Yan et al., Discovery and characterization of the evolution, variation and functions of diversity-generating retroelements using thousands of genomes and metagenomes. BMC Genomics. 2019; 20: 595). The first DGR was discovered in a Bordetella phage, BPP-1. Bordetella causes the respiratory infection in humans and many other mammals, controlled by the BvgAS signal transduction system. The surface of Bordetella is highly variable owing to the dynamic gene expression in the infectious cycle. The invasion of BPP-1 to Bordetella relies on the phage tail fiber protein Mtd. With the process of mutagenic reverse transcription and cDNA integration, DGR may introduce multiple nucleotide substitutions to Mtd gene and generates different receptor-binding molecules, thus making BPP-1 the ability to invade Bordetellae with diverse cell surfaces.

[0390] The systems may be used to generate an ssDNA donor using a retron- or DGR RT, which is then integrated by homologous recombination upon target cleavage or nicking using a IscB nuclease. In one embodiment, the systems may comprise DGRs and/or Group-II intron reverse transcriptases. The homing mechanism of DGRs or Group-II introns may be used in modifying a target polynucleotide. The DGRs or Group-II introns reverse transcriptase may be guided to a target polynucleotide by tethering to a nuclease-dead IscB nuclease, TALE, or ZF protein. In another embodiment, a non-retron/DGR reverse transcriptase (e.g. a viral RT) may be used for generating cDNA off of a self-priming RNA. In one embodiment, a ssDNA may be generated by an RT, but integrate it using a dead chimeric IscB system, creating an accessible R-loop instead of nicking/cleaving.

### IscB Helitron Systems

[0391] The systems and compositions herein may comprise an chimeric IscB system, one or more ωRNAs or guide RNAs, and one or more components of a helitron. The systems and compositions may be used to insert a donor polynucleotide to a target polynucleotide. The systems and compositions may further comprise a donor polynucleotide.

[0392] The term “helitron”, as used herein, refers to a polynucleotide (or nucleic acid segment), recognized as a transposon that captures and mobilizes gene fragments in eukaryotes. The term “helitron” as used herein refers to transposase that comprises an endonuclease domain and a C-terminal helicase domain. Helitrons are rolling-circle RNA transposons. In one embodiment, the helitron encodes a 1400 to about 2000 amino acid, or about 1800 amino acid multidomain transposase. In embodiments, the helitron comprises a hairpin near the 3′end to function as a transposition terminator. In embodiments, the transposon comprises a RepHel motif comprising a replication initiator (Rep) and a DNA helicase (hel) domain. See, Thomas J. & Pritham E. J. Helitrons, the eukaryotic rolling-circle transposable elements. Microbiol. Spectr. 3, 893-926 (2015). In embodiments, the helitron comprises a Rep nuclease domain and C-terminal helicase domain and inserts between an AT dinucleotide in single strand DNA. In an aspect, the C-terminal helicase unwinds the DNA in a 5′ to 3′ direction. The HUH nuclease domain may comprise one or two active site tyrosine residues, in embodiments, is a 2 Tyrosine (Y2) HUH endonuclease domain. Helitrons can encompass helentron, proto-helentron and helitron2 type proteins, structures of which can be as described in Thomas et al., 2015 at FIGS. 1 and 3, incorporated specifically by reference. Particular organisms in which the helitron or helentrons have been found can include those in Table 1 of Thomas J. & Pritham E. J. Helitrons, the eukaryotic rolling-circle transposable elements. Microbiol. Spectr. 3, 893-926 (2015), incorporated herein by reference. Similarly, helitrons can be identified based at least in part on the Rep motif, and conserved residues in the helitrons, and according to the alignment sequence of FIG. 2 of Thomas J. & Pritham E. J. Helitrons, the eukaryotic rolling-circle transposable elements. Microbiol. Spectr. 3, 893-926 (2015), specifically incorporated herein by reference.

[0393] The expression “helitron reaction” used herein refers to a reaction wherein a transposase inserts a donor polynucleotide sequence in or adjacent to an insertion site on a target polynucleotide. The insertion site may contain a sequence or secondary structure recognized by the helitron and/or an insertion motif sequence in the target polynucleotide into which the donor polynucleotide sequence may be inserted.

[0394] As described in Grabundzija 2018, the helitron terminal sequences contains a distinct ˜150 base pairs (bp) long sequence with an absolutely conserved dinucleotide at the end of left terminal sequence (LTS), and a tetranucleotide at the end of right terminal sequence (RTS) which is preceded by a palindromic sequence that can form a hairpin structure. Grabundzija et al., Nat. Commun. 2018; 9: 1278; doi:10.1035/s41467-018-03688-w.

[0395] The helitron end sequences may be responsible for identifying the donor polynucleotide for transposition. The helitron end sequences may be the DNA sequences used to perform a transposition reaction, the end sequences may be referred to herein as right terminal sequences and left terminal sequence. The donor polynucleotide can be configured to comprise a first and second helitron recognition sequence that are at least 80%, 85%, 90%, 95% 96%, 97%, 98%, 99% or 100% complementary to a left terminal sequence and/or a right terminal sequence of a polynucleotide encoding the helitron polypeptide.

[0396] In an aspect, the palindromic sequence may be located upstream of the right terminal sequence, for example, about 5, 10, 15, 20, 25, 30, 35 nucleotides upstream of the right terminal sequence end, or about 10 to 15 nucleotides upstream of the right terminal sequence end, about 10 to 12 nucleotides or about 11 nucleotides upstream of the right terminal sequence end. Ivana Grabundzija, Nat Commun. 2016; 7:10716, doi:10.1038/ncomms10716, incorporated herein by reference.

[0397] Exemplary helitrons can be identified using software, for example (EAHelitron) that has been used to identify Helitrons in a wide range of plant genomes. See, Hu, K., Xu, K., Wen, J. et al. Helitron distribution in Brassicaceae and whole Genome Helitron density as a character for distinguishing plant species. BMC Bioinformatics 20, 354 (2019). doi: 10.1186/s12859-019-2945-8, incorporated herein by reference.

[0398] The helitron may be derived from a eukaryote. In an aspect, the helitron is derived from a mammalian genome, in an aspect, vespertilionid bats, e.g., Helibat. In embodiments, the helitron is derived from derived from a Helibat1 transposon. In embodiments, the helitron is Helraiser, the full DNA sequence of the consensus transposon, including left terminal and right terminal sequences as well as hairpin identified is provided in Grabundzija, 2016 at Supplementary FIG. 1, specifically incorporated herein by reference. In an aspect, the helitron is flanked by left and right terminal sequences of the transposon. In an aspect, the left terminal sequence and right terminal sequence terminates with the conserved 5′-TC/CTAG-3′ motif. In an embodiment, the helitron may comprise a palindromic sequence that is about 10 to about 35, or about 5-25 bp or about 19-bp-long palindromic sequence with the potential to form a hairpin structure.

[0399] Elements of these systems may be engineered to work within the context of the invention. For example, a helitron polypeptide may be fused to a polypeptide capable of generating an R-loop. Fusion may be by any appropriate linker, in an exemplary embodiment, XTEN16. The binding elements that allow a helitron polypeptide to bind, for example, the use of sequences complementary to the right terminal sequence and the left terminal sequence of the helitron may be engineered into a donor construct to facilitate entry of a donor polynucleotide sequence into a target polynucleotide.

[0400] In certain example embodiments, the Isc polypeptide, via formation of complex with a ωRNA sequence, directs the helitron polypeptide to a target sequence in a target polynucleotide, where the helitron facilitates integration of a donor polynucleotide sequence into the target polynucleotide.

[0401] The helitron polypeptides may also comprise one or more truncations or excisions to remove domains or regions of wild-type protein to arrive at a minimal polypeptide, alter functionality according to the system in which the helitron is used, or mutated to enhance or diminish particular activities associated with the helitron, i.e., nuclease activity or helicase activity.

### IscB Recombinase/Integrase Systems

[0402] The systems and compositions herein may comprise a chimeric IscB system, and one or more components of a recombinase or integrase. In an aspect, the chimeric IscB system is naturally catalytically inactive and utilized with one or more nucleic acid components to provide site-specific targeting, and the one or more components of the recombinase to introduce a modification. In an aspect, the chimeric IscB system may be catalytically inactivated via mutation of one or more residues of a catalytic domain or via truncation and utilized with one or more RNA components to provide site-specific targeting, and the one or more components of the recombinase introduce a modification. In one embodiment, a naturally inactive IscB is provided with a recombinase, e.g., an integrase, and optionally a reverse transcriptase.

[0403] A recombinase generally is an enzyme that mediates recombination, e.g., breaking and rejoining, of nucleic acids at specific points. DNA site-specific recombinases include serine integrases, which are phage-encoded site-specific recombinases that promote conservative recombination reactions between DNA substrates located on the phage (phage attachment site, attP) and bacterial attachment site, attB. In one embodiment, the recombinase is a serine integrase that drives a highly directions site-specific recombination.

[0404] In preferred embodiments, the recombinase mediates unidirectional site-specific recombination. In one embodiment, the recombinase is a serine recombinase (SR) also referred to as a serine integrase, encoded, for example, by IS607 family, Tn4451, and bacteriophage phiC31. See, generally, Smith M C, Thorpe H M: Diversity in the serine recombinases. Mol Microbiol. 2002, 44: 299-307. 10.1046/j.1365-2958.2002.02891.x; Li et al., (2018) J. Mol. Biol. 430:21, 4401-4418.

[0405] In an embodiment, the recombinase is a tyrosine recombinase (YR) encoded by IS91, Helitron, IS200/IS605, Crypton or DIRS-retrotransposon families. See, generally, Goodwin T J, Butler M I, Poulter T: Cryptons: a group of tyrosine-recombinase-encoding DNA transposons from pathogenic fungi. Microbiology. 2003, 149: 3099-3109. Doi:10.1099/mic.0.26529-0; Cappello J, Handelsman K, Lodish H F: Sequence of Dictyostelium DIRS-1: an apparent retrotransposon with inverted terminal repeats and an internal circle junction sequence. Cell. 1985, 43: 105-115. 10.1016/0092-8674(85)90016-9.

[0406] In an aspect, the recombinase provides site-specific integration of a template that can be provided with the composition, e.g., a donor oligonucleotide. Without being bound by theory, the recombinase allows for integration independent of payload size and can coordinate strand exchange and re-ligation across multiple cell types, allowing integration of long stretches of polynucleotides. In an exemplary embodiment, the serine recombinase is PhiC31 and the target is DNA. In an aspect, the phiC31 allows for integration of a target site comprising an attP or pseudoattP recognition site. See, e.g., systembio.com/wp-content/uploads/phiC31_productsheet-1.pdf. In an embodiment utilizing phiC231, a donor oligonucleotide would be provided with an attB at sequence that facilitates attachment at the attP site of the target genome. Similar approaches of designing donor oligonucleotides with sequences complementary to attachment sites for a recombinase can be designed for use with the present invention. See, e.g. Li et al., (2018) J. Mol. Biol. 430:21, 4401-4418.

[0407] In preferred embodiments, the integrase mediates gene integration at diverse loci by directing insertion with an IscB nickase fused to both a reverse transcriptase and an integrase. In one embodiment, the integrase is a serine integrase, encoded, for example, BxbINT. See, generally, Ioannidi et al., “Drag-and-drop genome insertion without DNA cleavage with CRISPR-directed integrases”; doi:10.1101/2021.11.01.466786m incorporated herein by reference in its entirety. In Ioannidi, Gootenberg, Abudayyeh, and colleagues show integration using a CRISPR-Cas9 nickase fused to a reverse transcriptase and serine integrase termed Programmable Addition via Site-specific Targeting Elements (PASTE) with delivery via a single dose of plasmids with functionality in non-dividing and primary cells, utilizing a guide RNA comprising an AttB landing site, termed attachment site-containing guide RNA were used to insert sequences, including diverse cargo sequences that can be inserted across different loci, varying in size up to about 36 kb. Additional uses of the PASTE system included gene tagging, gene replacement, gene delivery, and protein production and secretion, approaches that are contemplated for use with the IscB nickase and integrase approach. In an aspect, the ωRNA may comprise an AttB landing site. In an aspect, the recombinase provides site-specific integration of a template that can be provided with the composition, e.g., a donor oligonucleotide.

[0408] Additional large serine integrases can be used with the IscB nickase, for example as identified and described in Durrant et al., Large-scale discovery of recombinases for integrating DNA into the human genome, doi:10.1101/2021.11.05.467528, incorporated herein by reference. Other integrases include BceINT, SscINT, SacINT. See, Ioannidi, 2021 at and FIG. 6d, and FIG. 10a.

[0409] Without being bound by theory, the recombinase allows for integration independent of payload size and can coordinate strand exchange and re-ligation across multiple cell types, allowing integration of long stretches of polynucleotides. In an exemplary embodiment, the integrase is BxbINT and the target is DNA. In an aspect, the BxbINT allows for integration of a target site comprising an attP or pseudoattP recognition site. In an embodiment utilizing BxbINT, a donor oligonucleotide would be provided with an attB at sequence that facilitates attachment at the attP site of the target genome. Similar approaches of designing donor oligonucleotides with sequences complementary to attachment sites for an integrase can be designed for use with the present invention, for example a circular double-strand DNA template containing the AttP attachment site, or delivery of large cargo via an adenovirus or other viral vector, as described elsewhere herein. See, e.g., Ioannidi et al., 2021 at FIGS. 1a, 1b and 5b.

### IscB Topoisomerase Systems

[0410] The one or more functional domains may be one or more topoisomerase domains. In one embodiment, an engineered system for modifying a target polynucleotide comprising: an chimeric IscB system; a topoisomerase domain; and a nucleic acid template comprising or encoding a donor polynucleotide to be inserted to a target sequence of the target polynucleotide. In some examples, two or more of: the chimeric IscB system; topoisomerase domain; and nucleic acid template may form a complex. In some examples, two or more of: the chimeric IscB system; topoisomerase domain, may be comprised in a fusion protein.

[0411] Topoisomerases are a class of enzymes that modify the topological state of DNA via the breakage and rejoining of nucleic acid strands. In some cases, a topoisomerase may be a DNA topoisomerase, which is an enzyme that controls and alters the topologic states of DNA during transcription, and catalyzes the transient breaking and rejoining of a single strand of DNA which allows the strands to pass through one another, thus altering the topology of DNA.

[0412] In one embodiment, the topoisomerase domain is capable of ligating the donor polynucleotide with the target polynucleotide. The ligation may be achieved by sticky end or blunt end ligation. In an example, the donor polynucleotide may comprise an overhang comprising a sequence complementary to a region of the target polynucleotide. Examples of ligating the donor polynucleotide with the target polynucleotide include those of TOPO cloning, e.g., those described in “The Technology Behind TOPO Cloning,” at www.thermofisher.com/us/en/home/life-science/cloning/topo/topo-resources/the-technology-behind-topo-cloning.html.

[0413] In one embodiment, the topoisomerase domain may be associated with the donor polynucleotide. For example, the topoisomerase domain is covalently linked to the donor polynucleotide.

[0414] In one embodiment, a topoisomerase domain may be provided together with, e.g., associated (e.g., fused) with a chimeric IscB system (e.g., a chimeric IscB system or a variant thereof such as a dead IscB or a IscB nickase). Alternatively or additionally, the topoisomerase domain may be on a molecule different from the chimeric IscB system. In some cases, the topoisomerase domain may be associated with a donor polynucleotide. For example, the topoisomerase domain may be pre-loaded covalently with a donor DNA molecule. Such design may allow for efficient ligation of only a specific cargo. The topoisomerase domain may ligate the donor polynucleotide (e.g., a DNA molecule) to a target site on a target polynucleotide (e.g., a free double-stranded DNA end). In one embodiment, the donor polynucleotide may have an overhang that comprises a sequence complementary to a region of the target polynucleotide. For example, the overhang may invade into the target polynucleotide at a cut site generated by the chimeric IscB system.

[0415] Examples of topoisomerases include type I, including type IA and type IB topoisomerases, which cleave a single strand of a double-stranded nucleic acid molecule, and type II topoisomerases (e.g., gyrases), which cleave both strands of a double-stranded nucleic acid molecule.

[0416] Type IA and IB topoisomerases cleave one strand of a double-stranded nucleic acid molecule. In some examples, the cleavage of a double-stranded nucleic acid molecule by type IA topoisomerases generates a 5′ phosphate and a 3′ hydroxyl at the cleavage site, with the type IA topoisomerase covalently binding to the 5′ terminus of a cleaved strand. Cleavage of a double-stranded nucleic acid molecule by type IB topoisomerases may generate a 3′ phosphate and a 5′ hydroxyl at the cleavage site, with the type IB topoisomerase covalently binding to the 3′ terminus of a cleaved strand.

[0417] Examples of Type IA topoisomerases include E. coli topoisomerase I, E. coli topoisomerase III, eukaryotic topoisomerase II, archeal reverse gyrase, yeast topoisomerase III, Drosophila topoisomerase III, human topoisomerase III, Streptococcus pneumoniae topoisomerase III, and the like, including other type IA topoisomerases. A DNA-protein adduct is formed with the enzyme covalently binding to the 5′-thymidine residue, with cleavage occurring between the two thymidine residues.

[0418] Examples of Type IB topoisomerases include the nuclear type I topoisomerases present in all eukaryotic cells and those encoded by Vaccinia and other cellular poxviruses. The eukaryotic type IB topoisomerases are exemplified by those expressed in yeast, Drosophila and mammalian cells, including human cells. Viral type IB topoisomerases are exemplified by those produced by the vertebrate poxviruses (Vaccinia, Shope fibroma virus, ORF virus, fowlpox virus, and molluscum contagiosum virus), and the insect poxvirus (Amsacta moorei entomopoxvirus).

[0419] Examples of Type II topoisomerases include, bacterial gyrase, bacterial DNA topoisomerase IV, eukaryotic DNA topoisomerase II, and T-even phage encoded DNA topoisomerases. Type II topoisomerases may have both cleaving and ligating activities. Substrate double-stranded nucleic acid molecules of type II topoisomerase can be prepared such that the type II topoisomerase can form a covalent linkage to one strand at a cleavage site. For example, calf thymus type II topoisomerase can cleave a substrate ds nucleic acid molecule containing a 5′ recessed topoisomerase recognition site positioned three nucleotides from the 5′ end, resulting in dissociation of the three nucleic acid molecule 5′ to the cleavage site and covalent binding of the topoisomerase to the 5′ terminus of the ds nucleic acid molecule. Furthermore, upon contacting such a type II topoisomerase-charged ds nucleic acid molecule with a second nucleic acid molecule containing a 3′ hydroxyl group, the type II topoisomerase can ligate the sequences together, and then is released from the recombinant nucleic acid molecule.

[0420] In some examples, the topoisomerase is DNA topoisomerase I, e.g., a Vaccinia virus topoisomerase I. The topoisomerase may be pre-loaded with a donor polynucleotide. The Vaccinia virus topoisomerase may need a target comprising a 5′ —OH group.

### IscB Phosphatase System

[0421] The systems herein may further comprise a phosphatase domain. A phosphatase is an enzyme capable of removing a phosphate group from a molecule e.g., a nucleic acid such as DNA. Examples of phosphatases include calf intestinal phosphatase, shrimp alkaline phosphatase, Antarctic phosphatase, and APEX alkaline phosphatase.

[0422] In some examples, the 5′ —OH group of in the target polynucleotide may be generated by a phosphatase. A topoisomerase compatible with a 5′ phosphate target may be used to generate stable loaded intermediates. In some cases, a chimeric IscB system that leaves a 5′ OH after cleaving the target polynucleotide may be used. In some cases, the phosphatase domain may be associated with (e.g., fused to) the IscB protein. The phosphatase domain may be capable of generating a —OH group at a 5′ end of the target polynucleotide. The phosphatase may be delivered separated from other components in the system, e.g., as a separate protein, on a separate vector from other components.

### IscB Polymerase System

[0423] The systems herein may further comprise a polymerase domain. A polymerase refers to an enzyme that synthesizes chains of nucleic acids. The polymerase may be a DNA polymerase or an RNA polymerase.

[0424] In one embodiment, the systems comprise an engineered system for modifying a target polynucleotide comprising: a chimeric IscB system; a DNA polymerase domain; and a DNA template comprising a donor polynucleotide to be inserted to a target sequence of the target polynucleotide. In some examples, two or more of: the IscB protein; DNA polymerase domain; and DNA template may form a complex. In some examples, two or more of: the IscB protein; DNA polymerase domain; are comprised in a fusion protein. For example, the chimeric IscB system and DNA polymerase domain may be comprised in a fusion protein.

[0425] In one embodiment, the systems may comprise a chimeric IscB system (or variant thereof such as a dIscB polypeptide or chimeric IscB system) and a DNA polymerase (e.g., phi29, T4, T7 DNA polymerase). The systems may further comprise a single-stranded DNA or double-stranded DNA template. The DNA template may comprise i) a first sequence homologous to a target site of the IscB protein on the target polynucleotide, and/or ii) a second sequence homologous to another region of the target polynucleotide. In one embodiment, the template may be a synthetic single-stranded or PCR-generated DNA molecule, (optionally end-protected by modified nucleotides), or a viral genome (e.g., AAV). In another embodiment, the template is generated using a reverse transcriptase. When the system is delivered into a cell, an endogenous DNA polymerase in the cell may be used. Alternatively or additionally, an exogenous DNA polymerase may be expressed in the cell.

[0426] The DNA template may be end-protected by one or more modified nucleotides, or comprises a portion of a viral genome. In some embodiment, the DNA template comprises LNA or other modifications (e.g., at the 3′ end). The presence of LNA and/or the modifications may lead to more efficient annealing with the 3′ flap generated by chimeric IscB system cleavage.

[0427] Examples of DNA polymerase include Taq, Tne (exo−), Tma (exo−), Pfu (exo−), Pwo (exo−), Thermoanaerobacter thermohydrosulfuricus DNA polymerase, Thermococcus litoralis DNA polymerase I, E. coli DNA polymerase I, Taq DNA polymerase I, Tth DNA polymerase I, Bacillus stearothermophilus (Bst) DNA polymerase I, E. coli DNA polymerase III, bacteriophage T5 DNA polymerase, bacteriophage M2 DNA polymerase, bacteriophage T4 DNA polymerase, bacteriophage T7 DNA polymerase, bacteriophage phi29 DNA polymerase, bacteriophage PRD1 DNA polymerase, bacteriophage phi15 DNA polymerase, bacteriophage phi21DNA polymerase, bacteriophage PZE DNA polymerase, bacteriophage PZA DNA polymerase, bacteriophage Nf DNA polymerase, bacteriophage M2Y DNA polymerase, bacteriophage B103 DNA polymerase, bacteriophage SF5 DNA polymerase, bacteriophage GA-1 DNA polymerase, bacteriophage Cp-5 DNA polymerase, bacteriophage Cp-7 DNA polymerase, bacteriophage PR4 DNA polymerase, bacteriophage PR5 DNA polymerase, bacteriophage PR722 DNA polymerase and bacteriophage L17 DNA polymerase.

### IscB Reverse Transcriptase Systems

[0428] The one or more functional domains may comprise alone, or in additional to additional functional domains, one or more reverse transcriptase domains. In one embodiment, the systems comprise an engineered system for modifying a target polynucleotide comprising: a chimeric IscB system or a variant thereof (e.g., dIscB); a reverse transcriptase (RT) domain; a RNA template comprising or encoding a donor polynucleotide to be inserted to a target sequence of the target polynucleotide; and an ωRNA or guide RNA molecule (i.e., a naturally single guide RNA molecule comprising a scaffold for reprogramming).

[0429] The reverse transcriptase may generate single-strand DNA based on the RNA template. The single-strand DNA may be generated by a non-retron, retron, or diversity generating retroelement (DGR). In some examples, the single-strand DNA may be generated from a self-priming RNA template. A self-priming RNA template may be used to generate a DNA without the need of a separate primer.

[0430] A reverse transcriptase domain may be a reverse transcriptase or a fragment thereof. A wide variety of reverse transcriptases (RT) may be used in alternative embodiments of the present invention, including prokaryotic and eukaryotic RT, provided that the RT functions within the host to generate a donor polynucleotide sequence from the RNA template. If desired, the nucleotide sequence of a native RT may be modified, for example using known codon optimization techniques, so that expression within the desired host is optimized. A reverse transcriptase (RT) is an enzyme used to generate complementary DNA (cDNA) from an RNA template, a process termed reverse transcription. Reverse transcriptases are used by retroviruses to replicate their genomes, by retrotransposon mobile genetic elements to proliferate within the host genome, by eukaryotic cells to extend the telomeres at the ends of their linear chromosomes, and by some non-retroviruses such as the hepatitis B virus, a member of the Hepadnaviridae, which are dsDNA-RT viruses. Retroviral RT has three sequential biochemical activities: RNA-dependent DNA polymerase activity, ribonuclease H, and DNA-dependent DNA polymerase activity. Collectively, these activities enable the enzyme to convert single-stranded RNA into double-stranded cDNA. In an embodiment, the RT domain of a reverse transcriptase is used in the present invention. The domain may include only the RNA-dependent DNA polymerase activity. In some examples, the RT domain is non-mutagenic, i.e., does not cause mutation in the donor polynucleotide (e.g., during the reverse transcriptase process). In some examples, the RT domain may be non-retron RT, e.g., a viral RT or a human endogenous RT. In some examples, the RT domain may be retron RT or DGRs RT. In some examples, the RT may be less mutagenic than a counterpart wildtype RT. In one embodiment, the RT herein is not mutagenic.

### Retrons

[0431] In an embodiment, a donor template for homologous recombination is generated by use of a self-priming RNA template for reverse transcription. A non-limiting example of a self-priming reverse transcription system is the retron system. By the term “retron” it is meant a genetic element which encodes components enabling the synthesis of branched RNA-linked single stranded DNA (msDNA) and a reverse transcriptase. Retrons which encode msDNA are known in the art, for example, but not limited to U.S. Pat. Nos. 6,017,737; 5,849,563; 5,780,269; 5,436,141; 5,405,775; 5,320,958; CA 2,075,515; all of which are herein incorporated by reference.

[0432] In an embodiment, the reverse transcriptase domain is a retron RT domain. In an embodiment, the RNA template encodes a retron RNA template that is recognized and reverse transcribed by the retron reverse transcriptase domain. Conserved across many bacterial species, retrons are highly efficient reverse transcription systems of relatively unknown function. The retron system consists of the retron RT protein, as well as the msr and msd transcripts, which function as the primer and template sequences, respectively. All components of the retron system are expressed from a single open reading frame as a single transcript including the msr-msd and encoding the retron RT protein (Lampson, et al., 2005, Retrons, msDNA, and the bacterial genome. Cytogenet Genome Res 110:491-499). The msr element ORF of a retron provides for the RNA portion of the msDNA molecule, while the msd element ORF provides for the DNA portion of the msDNA molecule. The primary transcript from the msr-msd region is thought to serve as both a template and a primer to produce the msDNA. Synthesis of msDNA is primed from an internal rG residue of the RNA transcript using its 2′-OH group. Modification of msd, or msr may also be made to permit insertion of a RNA template encoding a donor polynucleotide within the msd without altering the functioning of or the production of msDNA. The RNA template encoding a donor polynucleotide sequence may be any length but is preferably less than about 5 kb nucleotides, or also less than about 2 kb, or also less than 500 bases, provided that an msDNA product is produced.

### IscB Ligase Systems

[0433] In general, the systems comprise a chimeric IscB system and a ligase associated with the IscB protein. The chimeric IscB system, may be recruited to the target sequence by an ωRNA, or guide RNA, and generate a break on the target sequence. The ωRNA or guide RNA may further comprise a template sequence with desired mutations or other sequence elements. The template sequence may be ligated to the target sequence to introduce the mutations or other sequence elements to the nucleic acid molecule. The chimeric IscB system, may be a nickase that generates a single-strand break on nucleic acid molecule, and the ligase may be a single-strand DNA ligase. In one embodiment, the systems comprise a pair of chimeric IscB system complexes, with two distinct ωRNA (or guide) sequences. Each chimeric IscB system complex can target one strand of a double-stranded polynucleotide, and work together to effectively modify the sequence of the double-stranded polynucleotides.

[0434] In some examples, the chimeric IscB system is associated with a ligase or functional fragment thereof. The ligase may ligate a single-strand break (a nick) generated by the chimeric IscB system. In certain cases, the ligase may ligate a double-strand break generated by the chimeric IscB system. In certain examples, the chimeric IscB system is associated with a reverse transcriptase or functional fragment thereof.

[0435] The present invention further provides systems and methods of modifying a nucleic acid sequence using a pair of distinct chimeric IscB system-ligase-ωRNA or guide RNA complexes, said systems and methods comprising: (a) an engineered chimeric IscB system connected to or complexed with a ligase; (b) two distinct ωRNA or guide RNA sequences complexed with such chimeric IscB system-ligase protein complex to form a first and a second distinct IscB-ligase ωRNA complexes; (c) the first IscB-ligase-ωRNA or guide RNA complex binding to one strand of a target double-stranded polynucleotide sequence, and the second chimeric IscB system-ligase-ωRNA or guide RNA complex binding to another strand of the target double-stranded polynucleotide sequence; (d) upon binding of the said complexes to the locus of interest the effector protein induces the modification of the sequences associated with or at the target locus of interest, whereby the two chimeric IscB system-ligase-ωRNA or guide RNA complexes work together on different strands of the double-stranded target sequence and modify the sequence.

[0436] One of the advantages of using such a “pair” of chimeric IscB system-ligase-ωRNA or guide RNA complexes includes high efficiency in modifying the sequence associated with or at the locus of interest of target double-stranded polynucleotides.

[0437] In one embodiment, the chimeric IscB system can be a nickase. In a preferred embodiment, a ligase is linked to the chimeric IscB system. The ligase can ligate the donor sequence to the target sequence. The ligase can be a single-strand DNA ligase or a double-strand DNA ligase. The ligase can be fused to the carboxyl-terminus of a chimeric IscB system, or to the amino-terminus of a chimeric IscB system.

[0438] As used herein the term “ligase” refers to an enzyme, which catalyzes the joining of breaks (e.g., double-stranded breaks or single-stranded breaks (“nicks”) between adjacent bases of nucleic acids. For example, a ligase may be an enzyme capable of forming intra- or inter-molecular covalent bonds between a 5′ phosphate group and a 3′ hydroxyl group. The term “ligate” refers to the reaction of covalently joining adjacent oligonucleotides through formation of an internucleotide linkage.

[0439] DNA ligases fall into two general categories: ATP-dependent DNA ligases (EC 6.5.1.1), and NAD (+) dependent DNA ligases (EC 6.5.1.2). NAD (+) dependent DNA ligases are found only in bacteria (and some viruses) while ATP-dependent DNA ligases are ubiquitous. The ATP-dependent DNA ligases can be divided into four classes: DNA ligase I, II, III, and IV. DNA ligase I links Okazaki fragments to form a continuous strand of DNA; DNA ligase II is an alternatively spliced form of DNA ligase III, found only in non-dividing cells; DNA ligase III is involved in base excision repair; and DNA ligase IV is involved in the repair of DNA double-strand breaks by non-homologous end joining (NHEJ). Amongst all ligases, there are two types of prokaryotic and one type of eukaryotic ligases that are particularly well suited for facilitating the blunt-ended, double-stranded DNA ligation: Prokaryotic DNA ligases (T3 and T4) and Eukaryotic DNA ligase (Ligase 1).

[0440] In some cases, the ligase is specific for double-stranded nucleic acids (e.g., dsDNA, dsRNA, RNA/DNA duplex). An example of a ligase specific for double-stranded DNA and DNA/RNA hybrids is T4 DNA ligase. In some cases, the ligase is specific for single-stranded nucleic acids (e.g., ssDNA, ssRNA). An example of such ligase is CircLigase II. In some cases, the ligase is specific for RNA/DNA duplexes. In some cases, the ligase is able to work on single-stranded, double-stranded, and/or RNA/DNA nucleic acids in any combination.

[0441] In some cases, the ligase may be a pan-ligase, which is a single ligase with the ability to ligate both DNA and RNA targets. The ligase may be specific for a target (e.g., DNA-specific or RNA-specific). In some cases, the ligase may be a dual ligase system that include DNA-specific, RNA-specific, and/or pan-ligases, in any combination.

[0442] Examples of ligases that can be used with the disclosure include T4 DNA Ligase, T3 DNA Ligase, T7 DNA Ligase, E. coli DNA Ligase, HiFi Taq DNA Ligase, 9° N™ DNA Ligase, Taq DNA Ligase, SplintR® Ligase (also known as. PBCV-1 DNA Ligase or Chlorella virus DNA Ligase), Thermostable 5′ AppDNA/RNA Ligase, T4 RNA Ligase, T4 RNA Ligase 2, T4 RNA Ligase 2 Truncated, T4 RNA Ligase 2 Truncated K227Q, T4 RNA Ligase 2, Truncated KQ, RtcB Ligase (joins single stranded RNA with a 3″-phosphate or 2′,3′-cyclic phosphate to another RNA), CircLigase II, CircLigase ssDNA Ligase, CircLigase RNA Ligase, or Ampligase® Thermostable DNA Ligas, NAD-dependent ligases including Taq DNA ligase, Thermus filiformis DNA ligase, Escherichia coli DNA ligase, Tth DNA ligase, Thermus scotoductus DNA ligase (I and II), thermostable ligase, Ampligase thermostable DNA ligase, VanC-type ligase, 9° N DNA Ligase, Tsp DNA ligase, and novel ligases discovered by bioprospecting; ATP-dependent ligases including T4 RNA ligase, T4 DNA ligase, T3 DNA ligase, T7 DNA ligase, Pfu DNA ligase, DNA ligase I, DNA ligase III, DNA ligase IV, and novel ligases discovered by bioprospecting, and wild-type, mutant isoforms, and genetically engineered variants thereof.

[0443] In one embodiment, the examples of the ligases include those used in sequencing by synthesis or sequencing by ligation reactions.

### Iscb Epigenetic Editors

[0444] In one embodiments, the chimeric IscB systems described herein may further comprise an epigenetic modification domain such that binding of the chimeric IscB at target sequence on genomic DNA (e.g., chromatin) results in one or more epigenetic modifications by the epigenetic modification domain that increases or decreases expression of the one or more polypeptides. As used herein, “linked to or otherwise capable of associating with” refers to a fusion protein or a recruitment domain or an adaptor protein, such as an aptamer (e.g., MS2) or an epitope tag. The recruitment domain or an adaptor protein can be linked to an epigenetic modification domain or the DNA binding domain (e.g., an adaptor for an aptamer). The epigenetic modification domain can be linked to an antibody specific for an epitope tag fused to the chimeric IscB. An aptamer can be linked to a guide sequence.

[0445] In example embodiments, the DNA binding domain is a programmable DNA binding protein linked to or otherwise capable of associating with an epigenetic modification domain. In example embodiments, the DNA binding domain is a nuclease-deficient RNA-guided DNA endonuclease enzyme or a nuclease-deficient endonuclease enzyme. In example embodiments, a CRISPR system having an inactivated nuclease activity (e.g., dCas) is used as the DNA binding domain.

[0446] In example embodiments, the epigenetic modification domain is a functional domain and includes, but is not limited to a histone methyltransferase (HMT) domain, histone demethylase domain, histone acetyltransferase (HAT) domain, histone deacetylation (HDAC) domain, DNA methyltransferase domain, DNA demethylation domain, histone phosphorylation domain (e.g., serine and threonine, or tyrosine), histone ubiquitylation domain, histone sumoylation domain, histone ADP ribosylation domain, histone proline isomerization domain, histone biotinylation domain, histone citrullination domain (see, e.g., Epigenetics, Second Edition, 2015, Edited by C. David Allis; Marie-Laure Caparros; Thomas Jenuwein; Danny Reinberg; Associate Editor Monika Lachlan; Dawson M A, Kouzarides T. Cancer epigenetics: from mechanism to therapy. Cell. 2012; 150(1):12-27; Syding L A, Nickl P, Kasparek P, Sedlacek R. CRISPR/Cas9 Epigenome Editing Potential for Rare Imprinting Diseases: A Review. Cells. 2020; 9(4):993; and Zhang Y. Transcriptional regulation by histone ubiquitination and deubiquitination. Genes Dev. 2003; 17(22):2733-2740). Example epigenetic modification domains can be obtained from, but are not limited to chromatin modifying enzymes, such as, DNA methyltransferases (e.g., DNMT1, DNMT3a and DNMT3b), TET1, TET2, thymine-DNA glycosylase (TDG), GCN5-related N-acetyltransferases family (GNAT), MYST family proteins (e.g., MOZ and MORF), and CBP/p300 family proteins (e.g., CBP, p300), Class I HDACs (e.g., HDAC 1-3 and HDAC8), Class II HDACs (e.g., HDAC 4-7 and HDAC 9-10), Class III HDACs (e.g., sirtuins), HDAC11, SET domain containing methyltransferases (e.g., SET7/9 (KMT7, NCBI Entrez Gene: 80854), KMT5A (SET8), MMSET, EZH2, and MLL family members), DOT1L, LSD1, Jumonji demethylases (e.g., KDM5A (JARID1A), KDM5C (JARID1C), and KDM6A (UTX)), kinases (e.g., Haspin, VRK1, PKCα, PKCβ, PIM1, IKKα, Rsk2, PKB/Akt, Aurora B, MSK1/2, JNK1, MLTKα, PRK1, Chk1, Dlk/ZIP, PKCδ, MST1, AMPK, JAK2, Abl, BMK1, CaMK, S6K1, SIK1), Ubp8, ubiquitin C-terminal hydrolases (UCH), the ubiquitin-specific processing proteases (UBP), and poly(ADP-ribose) polymerase 1 (PARP-1). See, also, US Patent U.S. Ser. No. 11/001,829B2 for additional domains. In example embodiments, the epigenetic modification domain is a catalytically active IscB polypeptide described herein.

[0447] In example embodiments, histone acetylation is targeted to a target sequence using a chimeric IscB polypeptide (see, e.g., Hilton I B, et al. Epigenome editing by a CRISPR-Cas9-based acetyltransferase activates genes from promoters and enhancers. Nat Biotechnol. 2015). In example embodiments, histone deacetylation is targeted to a target sequence (see, e.g., Cong et al., 2012; and Konermann S, et al. Optical control of mammalian endogenous transcription and epigenetic states. Nature. 2013; 500:472-476). In example embodiments, histone methylation is targeted to a target sequence (see, e.g., Snowden A W, Gregory P D, Case C C, Pabo C O. Gene-specific targeting of H3K9 methylation is sufficient for initiating repression in vivo. Curr Biol. 2002; 12:2159-2166; and Cano-Rodriguez D, Gjaltema R A, Jilderda L J, et al. Writing of H3K4Me3 overcomes epigenetic silencing in a sustained but context-dependent manner. Nat Commun. 2016; 7:12284). In example embodiments, histone demethylation is targeted to a target sequence (see, e.g., Kearns N A, Pham H, Tabak B, et al. Functional annotation of native enhancers with a Cas9-histone demethylase fusion. Nat Methods. 2015; 12(5):401-403). In example embodiments, histone phosphorylation is targeted to a target sequence (see, e.g., Li J, Mahata B, Escobar M, et al. Programmable human histone phosphorylation and gene activation using a CRISPR/Cas9-based chromatin kinase. Nat Commun. 2021; 12(1):896). In example embodiments, DNA methylation is targeted to a target sequence (see, e.g., Rivenbark A G, et al. Epigenetic reprogramming of cancer cells via targeted DNA methylation. Epigenetics. 2012; 7:350-360; Siddique A N, et al. Targeted methylation and gene silencing of VEGF-A in human cells by using a designed Dnmt3a-Dnmt3L single-chain fusion protein with increased DNA methylation activity. J Mol Biol. 2013; 425:479-491; Bernstein D L, Le Lay J E, Ruano E G, Kaestner K H. TALE-mediated epigenetic suppression of CDKN2A increases replication in human fibroblasts. J Clin Invest. 2015; 125:1998-2006; Liu X S, Wu H, Ji X, et al. Editing DNA Methylation in the Mammalian Genome. Cell. 2016; 167(1):233-247.e17; Stepper P, Kungulovski G, Jurkowska R Z, et al. Efficient targeted DNA methylation with chimeric dCas9-Dnmt3a-Dnmt3L methyltransferase. Nucleic Acids Res. 2017; 45(4):1703-1713; and Pflueger C., Tan D., Swain T., Nguyen T., Pflueger J., Nefzger C., Polo J. M., Ford E., Lister R. A modular dCas9-SunTag DNMT3A epigenome editing system overcomes pervasive off-target activity of direct fusion dCas9-DNMT3A constructs. Genome Res. 2018; 28:1193-1206). In example embodiments, DNA demethylation is targeted to a target sequence using a CRISPR system (see, e.g., TET1, see Xu et al, Cell Discov. 2016 May 3; 2: 16009; Choudhury et al, Oncotarget. 2016 Jul. 19; 7(29):46545-46556; and Kang J G, Park J S, Ko J H, Kim Y S. Regulation of gene expression by altered promoter methylation using a CRISPR/Cas9-mediated epigenetic editing system. Sci Rep. 2019; 9(1):11960). In example embodiments, DNA demethylation is targeted to a target sequence (see, e.g., TDG, see, Gregory D J, Zhang Y, Kobzik L, Fedulov A V. Specific transcriptional enhancement of inducible nitric oxide synthase by targeted promoter demethylation. Epigenetics. 2013; 8:1205-1212).

[0448] Example epigenetic modification domains can be obtained from, but are not limited to transcription activators, such as, VP64 (see, e.g., Ji Q, et al. Engineered zinc-finger transcription factors activate OCT4 (POU5F1), SOX2, KLF4, c-MYC (MYC) and miR302/367. Nucleic Acids Res. 2014; 42:6158-6167; Perez-Pinera P, et al. Synergistic and tunable human gene activation by combinations of synthetic transcription factors. Nat Methods. 2013; 10:239-242; Farzadfard F, Perli S D, Lu T K. Tunable and multifunctional eukaryotic transcription factors based on CRISPR/Cas. ACS Synth Biol. 2013; 2:604-613; Black J B, Adler A F, Wang H G, et al. Targeted Epigenetic Remodeling of Endogenous Loci by CRISPR/Cas9-Based Transcriptional Activators Directly Converts Fibroblasts to Neuronal Cells. Cell Stem Cell. 2016; 19(3):406-414; and Maeder M L, Linder S J, Cascio V M, Fu Y, Ho Q H, Joung J K. CRISPR RNA-guided activation of endogenous human genes. Nat Methods. 2013; 10(10):977-979), p65 (see, e.g., Liu P Q, et al. Regulation of an endogenous locus using a panel of designed zinc finger proteins targeted to accessible chromatin regions. Activation of vascular endothelial growth factor A. J Biol Chem. 2001; 276:11323-11334; and Konermann S, et al. Genome-scale transcriptional activation by an engineered CRISPR-Cas9 complex. Nature. 2015; 517:583-588), HSF1, and RTA (see, e.g., Chavez A, et al. Highly efficient Cas9-mediated transcriptional programming. Nat Methods. 2015; 12:326-328). Example epigenetic modification domains can be obtained from, but are not limited to transcription repressors, such as, KRAB (see, e.g., Beerli R R, Segal D J, Dreier B, Barbas C F., 3rd Toward controlling gene expression at will: specific regulation of the erbB-2/HER-2 promoter by using polydactyl zinc finger proteins constructed from modular building blocks. Proc Natl Acad Sci USA. 1998; 95:14628-14633; Cong L, Zhou R, Kuo Y C, Cunniff M, Zhang F. Comprehensive interrogation of natural TALE DNA-binding modules and transcriptional repressor domains. Nat Commun. 2012; 3:968; Gilbert L A, et al. CRISPR-mediated modular RNA-guided regulation of transcription in eukaryotes. Cell. 2013; 154:442-451; and Yeo N C, Chavez A, Lance-Byrne A, et al. An enhanced CRISPR repressor for targeted mammalian gene regulation. Nat Methods. 2018; 15(8):611-616).

[0449] In example embodiments, the epigenetic modification domain linked to a DNA binding domain recruits an epigenetic modification protein to a target sequence. In example embodiments, a transcriptional activator recruits an epigenetic modification protein to a target sequence. For example, VP64 can recruit DNA demethylation, increased H3K27ac and H3K4me. In example embodiments, a transcriptional repressor protein recruits an epigenetic modification protein to a target sequence. For example, KRAB can recruit increased H3K9me3 (see, e.g., Thakore P I, D'Ippolito A M, Song L, et al. Highly specific epigenome editing by CRISPR-Cas9 repressors for silencing of distal regulatory elements. Nat Methods. 2015; 12(12):1143-1149). In an example embodiment, methyl-binding proteins linked to a DNA binding domain, such as MBD1, MBD2, MBD3, and MeCP2 recruits an epigenetic modification protein to a target sequence. In an example embodiment, Mi2/NuRD, Sin3A, or Co-REST recruit HDACs to a target sequence.

[0450] In example embodiments, the epigenetic modification domain can be a eukaryotic or prokaryotic (e.g., bacteria or Archaea) protein. In example embodiments, the eukaryotic protein can be a mammalian, insect, plant, or yeast protein and is not limited to human proteins (e.g., a yeast, insect, plant chromatin modifying protein, such as yeast HATs, HDACs, methyltransferases, etc.

[0451] In one aspect of the invention, is provided a fusion protein (epigenetic modification polypeptide) comprising from N-terminus to C-terminus, an epigenetic modification domain, an XTEN linker, and a nuclease-deficient RNA-guided DNA endonuclease enzyme or a nuclease-deficient endonuclease enzyme.

[0452] In aspects, the epigenetic modification polypeptide further comprises a transcriptional activator. In aspects, the transcriptional activator is VP64, p65, RTA, or a combination of two or more thereof. In another aspect, the epigenetic modification polypeptide further comprises one or more nuclear localization sequences. In embodiments, the epigenetic modification polypeptide comprises the nuclease-deficient RNA-guided DNA endonuclease enzyme. In embodiments, the fusion protein comprises the nuclease-deficient DNA endonuclease enzyme.

[0453] In some embodiments, the functional domains associated with the adaptor protein or the CRISPR enzyme is a transcriptional activation domain comprising VP64, p65, MyoD1, HSF1, RTA or SET7/9. Other references herein to activation (or activator) domains in respect of those associated with the adaptor protein(s) include any known transcriptional activation domain and specifically VP64, p65, MyoD1, HSF1, RTA or SET7/9 (see, e.g., US Patent, U.S. Ser. No. 11/001,829B2).

[0454] In certain embodiments, the present invention provides a fusion protein comprising from N-terminus to C-terminus, an RNA-binding sequence, an XTEN linker, and a transcriptional activator. In aspects, the transcriptional activator is VP64, p65, RTA, or a combination of two or more thereof. In aspects, the fusion protein further comprises a demethylation domain, a nuclease-deficient RNA-guided DNA endonuclease enzyme or a nuclease-deficient endonuclease enzyme, a nuclear localization sequence, or a combination of two or more thereof. In embodiments, the fusion protein comprises the nuclease-deficient RNA-guided DNA endonuclease enzyme. In embodiments, the fusion protein comprises the nuclease-deficient DNA endonuclease enzyme.

[0455] Example epigenome modification systems that can be adapted for use with the chimeric IscB systems disclosed herein include US 2020/0003761; WO 2018/053035 (“Targeted DNA Demethylation and Methylation”, Jackson Laboratory); WO 2018/148667 (“Reprogramming Cell Aging”, Memorial Sloan Kettering Cancer Center); WO 2022/140577 (“Compositions and Methods for Epigenetic Editing”, Chroma Medicine); WO 2017/090724 (“DNA Methylation Editing Kit and DNA Methylation Editing Method”, Gunma University NUC); WO 2019/0136229 (“Compositions and Methods of Improving Specificity in Genomic Engineering Using RNA-guided Nucleases”, Duke University); WO 2014/059255 (Transcription Activator-like Effector (TALE) —Lysine-specific Demthylase 1 (LSD1) Fusion Proteins”, General Hospital Corp.); WO 2014/152432 (“Increasing Specificity for RNA-guided Genome Editing”, General Hospital Corp.).

### Polynucleotides Encoding Iscb Systems and Vectors

[0456] The systems herein may comprise one or more polynucleotides. The polynucleotide(s) may comprise coding sequences of components of the systems herein, e.g., chimeric IscB polypeptide(s), ωRNA(s), functional domain(s), donor polynucleotide(s), and/or other components in the systems. The present disclosure further provides vectors or vector systems comprising one or more polynucleotides herein. The vectors or vector systems include those described in the delivery sections herein.

[0457] The terms “polynucleotide”, “nucleotide”, “nucleotide sequence”, “nucleic acid” and “oligonucleotide” are used interchangeably. They refer to a polymeric form of nucleotides of any length, either deoxyribonucleotides or ribonucleotides, or analogs thereof. Polynucleotides may have any three-dimensional structure, and may perform any function, known or unknown. The following are non-limiting examples of polynucleotides: coding or non-coding regions of a gene or gene fragment, loci (locus) defined from linkage analysis, exons, introns, messenger RNA (mRNA), transfer RNA, ribosomal RNA, short interfering RNA (siRNA), short-hairpin RNA (shRNA), micro-RNA (miRNA), ribozymes, cDNA, recombinant polynucleotides, branched polynucleotides, plasmids, vectors, isolated DNA of any sequence, isolated RNA of any sequence, nucleic acid probes, and primers. The term also encompasses nucleic-acid-like structures with synthetic backbones, see, e.g., Eckstein, 1991; Baserga et al., 1992; Milligan, 1993; WO 97/03211; WO 96/39154; Mata, 1997; Strauss-Soukup, 1997; and Samstag, 1996. A polynucleotide may comprise one or more modified nucleotides, such as methylated nucleotides and nucleotide analogs. If present, modifications to the nucleotide structure may be imparted before or after assembly of the polymer. The sequence of nucleotides may be interrupted by non-nucleotide components. A polynucleotide may be further modified after polymerization, such as by conjugation with a labeling component. As used herein the term “wild type” is a term of the art understood by skilled persons and means the typical form of an organism, strain, gene or characteristic as it occurs in nature as distinguished from mutant or variant forms. A “wild type” can be a base line. As used herein the term “variant” should be taken to mean the exhibition of qualities that have a pattern that deviates from what occurs in nature. The terms “non-naturally occurring” or “engineered” are used interchangeably and indicate the involvement of the hand of man. The terms, when referring to nucleic acid molecules or polypeptides mean that the nucleic acid molecule or the polypeptide is at least substantially free from at least one other component with which they are naturally associated in nature and as found in nature. “Complementarity” refers to the ability of a nucleic acid to form hydrogen bond(s) with another nucleic acid sequence by either traditional Watson-Crick base pairing or other non-traditional types. A percent complementarity indicates the percentage of residues in a nucleic acid molecule which can form hydrogen bonds (e.g., Watson-Crick base pairing) with a second nucleic acid sequence (e.g., 5, 6, 7, 8, 9, 10 out of 10 being 50%, 60%, 70%, 80%, 90%, and 100% complementary). “Perfectly complementary” means that all the contiguous residues of a nucleic acid sequence will hydrogen bond with the same number of contiguous residues in a second nucleic acid sequence. “Substantially complementary” as used herein refers to a degree of complementarity that is at least 60%, 65%, 70%, 75%, 80%, 85%, 90%, 95%, 97%, 98%, 99%, or 100% over a region of 8, 9, 10, 11, 12, 13, 14, 15, 16, 17, 18, 19, 20, 21, 22, 23, 24, 25, 30, 35, 40, 45, 50, or more nucleotides, or refers to two nucleic acids that hybridize under stringent conditions. As used herein, “stringent conditions” for hybridization refer to conditions under which a nucleic acid having complementarity to a target sequence predominantly hybridizes with the target sequence, and substantially does not hybridize to non-target sequences. Stringent conditions are generally sequence-dependent and vary depending on a number of factors. In general, the longer the sequence, the higher the temperature at which the sequence specifically hybridizes to its target sequence. Non-limiting examples of stringent conditions are described in detail in Tijssen (1993), Laboratory Techniques In Biochemistry And Molecular Biology-Hybridization With Nucleic Acid Probes Part I, Second Chapter “Overview of principles of hybridization and the strategy of nucleic acid probe assay”, Elsevier, N.Y. Where reference is made to a polynucleotide sequence, then complementary or partially complementary sequences are also envisaged. These are preferably capable of hybridizing to the reference sequence under highly stringent conditions. “Hybridization” refers to a reaction in which one or more polynucleotides react to form a complex that is stabilized via hydrogen bonding between the bases of the nucleotide residues. The hydrogen bonding may occur by Watson Crick base pairing, Hoogstein binding, or in any other sequence specific manner. The complex may comprise two strands forming a duplex structure, three or more strands forming a multi stranded complex, a single self-hybridizing strand, or any combination of these. A hybridization reaction may constitute a step in a more extensive process, such as the initiation of PCR, or the cleavage of a polynucleotide by an enzyme. A sequence capable of hybridizing with a given sequence is referred to as the “complement” of the given sequence. As used herein, the term “genomic locus” or “locus” (plural loci) is the specific location of a gene or DNA sequence on a chromosome. A “gene” refers to stretches of DNA or RNA that encode a polypeptide or an RNA chain that has functional role to play in an organism and hence is the molecular unit of heredity in living organisms. For the purpose of this invention, it may be considered that genes include regions which regulate the production of the gene product, whether or not such regulatory sequences are adjacent to coding and/or transcribed sequences. Accordingly, a gene includes, but is not necessarily limited to, promoter sequences, terminators, translational regulatory sequences such as ribosome binding sites and internal ribosome entry sites, enhancers, silencers, insulators, boundary elements, replication origins, matrix attachment sites and locus control regions. As used herein, “expression of a genomic locus” or “gene expression” is the process by which information from a gene is used in the synthesis of a functional gene product. The products of gene expression are often proteins, but in non-protein coding genes such as rRNA genes or tRNA genes, the product is functional RNA. The process of gene expression is used by all known life—eukaryotes (including multicellular organisms), prokaryotes (bacteria and archaea) and viruses to generate functional products to survive. As used herein “expression” of a gene or nucleic acid encompasses not only cellular gene expression, but also the transcription and translation of nucleic acid(s) in cloning systems and in any other context. As used herein, “expression” also refers to the process by which a polynucleotide is transcribed from a DNA template (such as into and mRNA or other RNA transcript) and/or the process by which a transcribed mRNA is subsequently translated into peptides, polypeptides, or proteins. Transcripts and encoded polypeptides may be collectively referred to as “gene product.” If the polynucleotide is derived from genomic DNA, expression may include splicing of the mRNA in a eukaryotic cell. The terms “polypeptide”, “peptide” and “protein” are used interchangeably herein to refer to polymers of amino acids of any length. The polymer may be linear or branched, it may comprise modified amino acids, and it may be interrupted by non amino acids. The terms also encompass an amino acid polymer that has been modified; for example, disulfide bond formation, glycosylation, lipidation, acetylation, phosphorylation, or any other manipulation, such as conjugation with a labeling component. As used herein the term “amino acid” includes natural and/or unnatural or synthetic amino acids, including glycine and both the D or L optical isomers, and amino acid analogs and peptidomimetics. As used herein, the term “domain” or “protein domain” refers to a part of a protein sequence that may exist and function independently of the rest of the protein chain. As described in aspects of the invention, sequence identity is related to sequence homology. Homology comparisons may be conducted by eye, or more usually, with the aid of readily available sequence comparison programs. These commercially available computer programs may calculate percent (%) homology between two or more sequences and may also calculate the sequence identity shared by two or more amino acid or nucleic acid sequences.

[0458] In an embodiment, the polynucleotide sequence is recombinant DNA. In further embodiments, the polynucleotide sequence further comprises additional sequences as described elsewhere herein. In an embodiment, the nucleic acid sequence is synthesized in vitro.

[0459] The present disclosure provides polynucleotide molecules that encode one or more components of the system or chimeric IscB system as referred to in any embodiment herein. In an embodiment, the polynucleotide molecules may comprise further regulatory sequences. By means of guidance and not limitation, the polynucleotide sequence can be part of an expression plasmid, a minicircle, a lentiviral vector, a retroviral vector, an adenoviral or adeno-associated viral vector, a piggyback vector, or a tol2 vector. In an embodiment, the polynucleotide sequence may be a bicistronic expression construct. In further embodiments, the isolated polynucleotide sequence may be incorporated in a cellular genome. In yet further embodiments, the isolated polynucleotide sequence may be part of a cellular genome. In further embodiments, the isolated polynucleotide sequence may be comprised in an artificial chromosome. In an embodiment, the 5′ and/or 3′ end of the isolated polynucleotide sequence may be modified to improve the stability of the sequence of actively avoid degradation. In an embodiment, the isolated polynucleotide sequence may be comprised in a bacteriophage. In other embodiments, the isolated polynucleotide sequence may be contained in agrobacterium species. In an embodiment, the isolated polynucleotide sequence is lyophilized.

[0460] Aspects of the invention relate to polynucleotide molecules that encode one or more components of one or more systems as described in any of the embodiments herein, wherein at least one or more regions of the polynucleotide molecule may be codon optimized for expression in an eukaryotic cells. In an embodiment, the polynucleotide molecules that encode one or more components of one or more systems as described in any of the embodiments herein are optimized for expression in a mammalian cell or a plant cell.

[0461] An example of a codon optimized sequence is in this instance a sequence optimized for expression in a eukaryote, e.g., humans (i.e., being optimized for expression in humans), or for another eukaryote, animal or mammal as herein discussed. In one embodiment, an enzyme coding sequence encoding a DNA/RNA-targeting chimeric IscB system is codon optimized for expression in particular cells, such as eukaryotic cells. The eukaryotic cells may be those of or derived from a particular organism, such as a plant or a mammal, including but not limited to human, or non-human eukaryote or animal or mammal as herein discussed, e.g., mouse, rat, rabbit, dog, livestock, or non-human mammal or primate. In one embodiment, processes for modifying the germ line genetic identity of human beings and/or processes for modifying the genetic identity of animals which are likely to cause them suffering without any substantial medical benefit to man or animal, and also animals resulting from such processes, may be excluded. In general, codon optimization refers to a process of modifying a nucleic acid sequence for enhanced expression in the host cells of interest by replacing at least one codon (e.g., about or more than about 1, 2, 3, 4, 5, 10, 15, 20, 25, 50, or more codons) of the native sequence with codons that are more frequently or most frequently used in the genes of that host cell while maintaining the native amino acid sequence. Various species exhibit particular bias for certain codons of a particular amino acid. Codon bias (differences in codon usage between organisms) often correlates with the efficiency of translation of messenger RNA (mRNA), which is in turn believed to be dependent on, among other things, the properties of the codons being translated and the availability of particular transfer RNA (tRNA) molecules. The predominance of selected tRNAs in a cell is generally a reflection of the codons used most frequently in peptide synthesis. Accordingly, genes can be tailored for optimal gene expression in a given organism based on codon optimization. Codon usage tables are readily available, for example, at the “Codon Usage Database” available atwww.kazusa.orjp/codon/and these tables can be adapted in a number of ways. See Nakamura, Y., et al. “Codon usage tabulated from the international DNA sequence databases: status for the year 2000” Nucl. Acids Res. 28:292 (2000). Computer algorithms for codon optimizing a particular sequence for expression in a particular host cell are also available, such as Gene Forge (Aptagen; Jacobus, PA), are also available. In one embodiment, one or more codons (e.g., 1, 2, 3, 4, 5, 10, 15, 20, 25, 50, or more, or all codons) in a sequence encoding a chimeric IscB system corresponds to the most frequently used codon for a particular amino acid.

### Delivery

[0462] The present disclosure also provides delivery systems for introducing components of the systems and compositions herein to cells, tissues, organs, or organisms. A delivery system may comprise one or more delivery vehicles and/or cargos. Exemplary delivery systems and methods include those described in paragraphs [00117] to [00278] of Feng Zhang et al., (WO2016106236A1), and pages 1241-1251 and Table 1 of Lino C A et al., Delivering CRISPR: a review of the challenges and approaches, DRUG DELIVERY, 2018, VOL. 25, NO. 1, 1234-1257, which are incorporated by reference herein in their entireties and can be adapted for use with the IscB proteins disclosed herein.

[0463] In one embodiment, the delivery systems may be used to introduce the components of the systems and compositions to plant cells. For example, the components may be delivered to plant using electroporation, microinjection, aerosol beam injection of plant cell protoplasts, biolistic methods, DNA particle bombardment, and/or Agrobacterium-mediated transformation. Examples of methods and delivery systems for plants include those described in Fu et al., Transgenic Res. 2000 February; 9(1):11-9; Klein R M, et al., Biotechnology. 1992; 24:384-6; Casas A M et al., Proc Natl Acad Sci USA. 1993 Dec. 1; 90(23): 11212-11216; and U.S. Pat. No. 5,563,055, Davey M R et al., Plant Mol Biol. 1989 September; 13(3):273-85, which are incorporated by reference herein in their entireties.

[0464] The example delivery compositions, systems, and methods described herein related to composition or chimeric IscB systems also apply to functional domains and other components (e.g., other proteins and polynucleotides related to the chimeric IscB systems, such as reverse transcriptase, nucleotide deaminase, retrotransposon, donor polynucleotide, etc.).

### Cargos

[0465] The delivery systems may comprise one or more cargos. The cargos may comprise one or more components of the systems and compositions herein. A cargo may comprise one or more of the following: i) a plasmid encoding one or more proteins components in the compositions and systems such as the chimeric IscB; ii) a plasmid encoding one or more ωRNAs, iii) mRNA of one or more one or more proteins components in the compositions and systems such as the chimeric IscB; iv) one or more guide RNAs; v) one or more proteins components in the compositions and systems such as the chimeric IscB polypeptide; vi) any combination thereof.

[0466] In some examples, a cargo may comprise a plasmid encoding one or more proteins components in the compositions and systems such as the chimeric IscB systems disclosed herein. In some cases, the plasmid may also encode a recombination template (e.g., for HDR). In one embodiment, a cargo may comprise mRNA encoding one or more protein components and one or more ωRNA or guide RNAs.

[0467] In some examples, a cargo may comprise one or more protein components and one or more ωRNA or guide RNAs, e.g., in the form of ribonucleoprotein complexes (RNP). The ribonucleoprotein complexes may be delivered by methods and systems herein. In some cases, the ribonucleoprotein may be delivered by way of a polypeptide-based shuttle agent. In one example, the ribonucleoprotein may be delivered using synthetic peptides comprising an endosome leakage domain (ELD) operably linked to a cell penetrating domain (CPD), to a histidine-rich domain and a CPD, e.g., as describe in WO2016161516. RNP may also be used for delivering the compositions and systems to plant cells, e.g., as described in Wu J W, et al., Nat Biotechnol. 2015 November; 33(11):1162-4.

### Physical Delivery

[0468] In one embodiment, the cargos may be introduced to cells by physical delivery methods. Examples of physical methods include microinjection, electroporation, and hydrodynamic delivery. Both nucleic acid and proteins may be delivered using such methods. For example, one or more protein components may be prepared in vitro, isolated, (refolded, purified if needed), and introduced to cells.

### Microinjection

[0469] Microinjection of the cargo directly to cells can achieve high efficiency, e.g., above 90% or about 100%. In one embodiment, microinjection may be performed using a microscope and a needle (e.g., with 0.5-5.0 m in diameter) to pierce a cell membrane and deliver the cargo directly to a target site within the cell. Microinjection may be used for in vitro and ex vivo delivery.

[0470] Plasmids comprising coding sequences for one or more protein components and/or ωRNAs, mRNAs, and/or guide RNAs, may be microinjected. In some cases, microinjection may be used i) to deliver DNA directly to a cell nucleus, and/or ii) to deliver mRNA (e.g., in vitro transcribed) to a cell nucleus or cytoplasm. In certain examples, microinjection may be used to delivery ωRNA directly to the nucleus and mRNA to the cytoplasm, e.g., facilitating translation and shuttling of one or more protein components to the nucleus.

[0471] Microinjection may be used to generate genetically modified animals. For example, gene editing cargos may be injected into zygotes to allow for efficient germline modification. Such approach can yield normal embryos and full-term mouse pups harboring the desired modification(s). Microinjection can also be used to provide transiently up- or down-regulate a specific gene within the genome of a cell, e.g., using chimeric IscB system.

### Electroporation

[0472] In one embodiment, the cargos and/or delivery vehicles may be delivered by electroporation. Electroporation may use pulsed high-voltage electrical currents to transiently open nanometer-sized pores within the cellular membrane of cells suspended in buffer, allowing for components with hydrodynamic diameters of tens of nanometers to flow into the cell. In some cases, electroporation may be used on various cell types and efficiently transfer cargo into cells. Electroporation may be used for in vitro and ex vivo delivery.

[0473] Electroporation may also be used to deliver the cargo to into the nuclei of mammalian cells by applying specific voltage and reagents, e.g., by nucleofection. Such approaches include those described in Wu Y, et al. (2015). Cell Res 25:67-79; Ye L, et al. (2014). Proc Natl Acad Sci USA 111:9591-6; Choi P S, Meyerson M. (2014). Nat Commun 5:3728; Wang J, Quake S R. (2014). Proc Natl Acad Sci 111:13157-62. Electroporation may also be used to deliver the cargo in vivo, e.g., with methods described in Zuckermann M, et al. (2015). Nat Commun 6:7391.

### Hydrodynamic Delivery

[0474] Hydrodynamic delivery may also be used for delivering the cargos, e.g., for in vivo delivery. In some examples, hydrodynamic delivery may be performed by rapidly pushing a large volume (8-10% body weight) solution containing the gene editing cargo into the bloodstream of a subject (e.g., an animal or human), e.g., for mice, via the tail vein. As blood is incompressible, the large bolus of liquid may result in an increase in hydrodynamic pressure that temporarily enhances permeability into endothelial and parenchymal cells, allowing for cargo not normally capable of crossing a cellular membrane to pass into cells. This approach may be used for delivering naked DNA plasmids and proteins. The delivered cargos may be enriched in liver, kidney, lung, muscle, and/or heart.

### Transfection

[0475] The cargos, e.g., nucleic acids, may be introduced to cells by transfection methods for introducing nucleic acids into cells. Examples of transfection methods include calcium phosphate-mediated transfection, cationic transfection, liposome transfection, dendrimer transfection, heat shock transfection, magnetofection, lipofection, impalefection, optical transfection, proprietary agent-enhanced uptake of nucleic acid.

### Delivery Vehicles

[0476] The delivery systems may comprise one or more delivery vehicles. The delivery vehicles may deliver the cargo into cells, tissues, organs, or organisms (e.g., animals or plants). The cargos may be packaged, carried, or otherwise associated with the delivery vehicles. The delivery vehicles may be selected based on the types of cargo to be delivered, and/or the delivery is in vitro and/or in vivo. Examples of delivery vehicles include vectors, viruses, non-viral vehicles, and other delivery reagents described herein.

[0477] The delivery vehicles in accordance with the present invention may have a greatest dimension (e.g., diameter) of less than 100 microns (μm). In one embodiment, the delivery vehicles have a greatest dimension of less than 10 μm. In one embodiment, the delivery vehicles may have a greatest dimension of less than 2000 nanometers (nm). In one embodiment, the delivery vehicles may have a greatest dimension of less than 1000 nanometers (nm). In one embodiment, the delivery vehicles may have a greatest dimension (e.g., diameter) of less than 900 nm, less than 800 nm, less than 700 nm, less than 600 nm, less than 500 nm, less than 400 nm, less than 300 nm, less than 200 nm, less than 150 nm, or less than 100 nm, less than 50 nm. In one embodiment, the delivery vehicles may have a greatest dimension ranging between 25 nm and 200 nm.

[0478] In one embodiment, the delivery vehicles may be or comprise particles. For example, the delivery vehicle may be or comprise nanoparticles (e.g., particles with a greatest dimension (e.g., diameter) no greater than 1000 nm. The particles may be provided in different forms, e.g., as solid particles (e.g., metal such as silver, gold, iron, titanium), non-metal, lipid-based solids, polymers), suspensions of particles, or combinations thereof. Metal, dielectric, and semiconductor particles may be prepared, as well as hybrid structures (e.g., core-shell particles). Nanoparticles may also be used to deliver the compositions and systems to plant cells, e.g., as described in International Patent Publication No. WO 2008042156, US Publication Application No. US 20130185823, and International Patent Publication No WO 2015/089419.

[0479] In an example embodiment, the delivery vehicles may be or comprise an endogenous LTR retroelement polypeptide or retrotransposons and retroviruses. The endogenous LTR retroelement polypeptide may be an endogenous Gag (Group specific antigen) polypeptide or Gag homolog. A Gag forms a virus-like particle that preferentially binds and facilitates vesicular secretion of its own messenger RNA. In an example embodiment, the Gag homolog is an LTR retrotransposon-derived protein PEG10. See Segel, M.; Lash, B.; Song, J.; Ladha, A.; Liu, C. C.; Jin, X.; Mekhedov, S. L.; Macrae, R. K.; Koonin, E. V.; Zhang, F. Mammalian Retrovirus-like Protein PEG10 Packages Its Own MRNA and Can Be Pseudotyped for MRNA Delivery. Science, 2021, 373, 882-889.

### Vectors

[0480] The systems, compositions, and/or delivery systems may comprise one or more vectors. The present disclosure also includes vector systems. A vector system may comprise one or more vectors. In one embodiment, a vector refers to a nucleic acid molecule capable of transporting another nucleic acid to which it has been linked. Vectors include nucleic acid molecules that are single-stranded, double-stranded, or partially double-stranded; nucleic acid molecules that comprise one or more free ends, no free ends (e.g., circular); nucleic acid molecules that comprise DNA, RNA, or both; and other varieties of polynucleotides known in the art. A vector may be a plasmid, e.g., a circular double stranded DNA loop into which additional DNA segments can be inserted, such as by standard molecular cloning techniques. Certain vectors may be capable of autonomous replication in a host cell into which they are introduced (e.g., bacterial vectors having a bacterial origin of replication and episomal mammalian vectors). Some vectors (e.g., non-episomal mammalian vectors) are integrated into the genome of a host cell upon introduction into the host cell, and thereby are replicated along with the host genome. In certain examples, vectors may be expression vectors, e.g., capable of directing the expression of genes to which they are operatively-linked. In some cases, the expression vectors may be for expression in eukaryotic cells. Common expression vectors of utility in recombinant DNA techniques are often in the form of plasmids.

[0481] Examples of vectors include pGEX, pMAL, pRIT5, E. coli expression vectors (e.g., pTrc, pET 11d, yeast expression vectors (e.g., pYepSec1, pMFa, pJRY88, pYES2, and picZ, Baculovirus vectors (e.g., for expression in insect cells such as SF9 cells) (e.g., pAc series and the pVL series), mammalian expression vectors (e.g., pCDM8 and pMT2PC.

[0482] A vector may comprise i) one or more protein components encoding sequence(s), and/or ii) a single, or at least 2, at least 3, at least 4, at least 5, at least 6, at least 7, at least 8, at least 9, at least 10, at least 12, at least 14, at least 16, at least 32, at least 48, at least 50 guide RNA(s) encoding sequences. In a single vector there can be a promoter for each RNA coding sequence. Alternatively or additionally, in a single vector, there may be a promoter controlling (e.g., driving transcription and/or expression) multiple RNA encoding sequences.

[0483] Furthermore, that compositions or systems may be delivered via a vector, e.g., a separate vector or the same vector that is encoding the complex. When provided by a separate vector, the RNA that targets chimeric IscB system expression can be administered sequentially or simultaneously. When administered sequentially, the RNA that targets chimeric IscB system expression is to be delivered after the RNA that is intended for e.g., gene editing or gene engineering. This period may be a period of minutes (e.g., 5 minutes, 10 minutes, 20 minutes, 30 minutes, 45 minutes, 60 minutes). This period may be a period of hours (e.g., 2 hours, 4 hours, 6 hours, 8 hours, 12 hours, 24 hours). This period may be a period of days (e.g., 2 days, 3 days, 4 days, 7 days). This period may be a period of weeks (e.g., 2 weeks, 3 weeks, 4 weeks). This period may be a period of months (e.g., 2 months, 4 months, 8 months, 12 months). This period may be a period of years (2 years, 3 years, 4 years). In this fashion, the chimeric IscB system associates with a first ωRNA molecule capable of hybridizing to a first target, such as a genomic locus or loci of interest and undertakes the function(s) desired of the system (e.g., gene engineering); and subsequently the chimeric IscB systems may then associate with the second ωRNA molecule capable of hybridizing to the sequence comprising at least part of the chimeric IscB systems. Where the guide RNA targets the sequences encoding expression of the chimeric IscB systems, the enzyme becomes impeded, and the system becomes self-inactivating. In the same manner, RNA that targets chimeric IscB system nuclease expression applied via, for example liposome, lipofection, particles, micro-vesicles as explained herein, may be administered sequentially or simultaneously. Similarly, self-inactivation may be used for inactivation of one or more guide RNA used to target one or more targets.

### Regulatory Elements

[0484] A vector may comprise one or more regulatory elements. The regulatory element(s) may be operably linked to coding sequences of chimeric IscB systems, accessory proteins, ωRNA scaffold and/or guide RNA or combination thereof. The term “operably linked” is intended to mean that the nucleotide sequence of interest is linked to the regulatory element(s) in a manner that allows for expression of the nucleotide sequence (e.g. in an in vitro transcription/translation system or in a host cell when the vector is introduced into the host cell). In certain examples, a vector may comprise: a first regulatory element operably linked to a nucleotide sequence encoding a chimeric IscB system, and a second regulatory element operably linked to a nucleotide sequence encoding a ωRNA or guide RNA.

[0485] Examples of regulatory elements include promoters, enhancers, internal ribosomal entry sites (IRES), and other expression control elements (e.g., transcription termination signals, such as polyadenylation signals and poly-U sequences). Such regulatory elements are described, for example, in Goeddel, GENE EXPRESSION TECHNOLOGY: METHODS IN ENZYMOLOGY 185, Academic Press, San Diego, Calif. (1990). Regulatory elements include those that direct constitutive expression of a nucleotide sequence in many types of host cell and those that direct expression of the nucleotide sequence only in certain host cells (e.g., tissue-specific regulatory sequences). A tissue-specific promoter may direct expression primarily in a desired tissue of interest, such as muscle, neuron, bone, skin, blood, specific organs (e.g., liver, pancreas), or particular cell types (e.g., lymphocytes). Regulatory elements may also direct expression in a temporal-dependent manner, such as in a cell-cycle dependent or developmental stage-dependent manner, which may or may not also be tissue or cell-type specific.

[0486] Examples of promoters include one or more pol III promoter (e.g., 1, 2, 3, 4, 5, or more pol III promoters), one or more pol II promoters (e.g., 1, 2, 3, 4, 5, or more pol II promoters), one or more pol I promoters (e.g., 1, 2, 3, 4, 5, or more pol I promoters), or combinations thereof. Examples of pol III promoters include, but are not limited to, U6 and H1 promoters. Examples of pol II promoters include, but are not limited to, the retroviral Rous sarcoma virus (RSV) LTR promoter (optionally with the RSV enhancer), the cytomegalovirus (CMV) promoter (optionally with the CMV enhancer), the SV40 promoter, the dihydrofolate reductase promoter, the β-actin promoter, the phosphoglycerol kinase (PGK) promoter, and the EF 1α promoter.

### Viral Vectors

[0487] The cargos may be delivered by viruses. In one embodiment, viral vectors are used. A viral vector may comprise virally-derived DNA or RNA sequences for packaging into a virus (e.g., retroviruses, replication defective retroviruses, adenoviruses, replication defective adenoviruses, and adeno-associated viruses). Viral vectors also include polynucleotides carried by a virus for transfection into a host cell. Viruses and viral vectors may be used for in vitro, ex vivo, and/or in vivo deliveries.

### Adeno Associated Virus (AAV)

[0488] The systems and compositions herein may be delivered by adeno associated virus (AAV). AAV vectors may be used for such delivery. AAV, of the Dependovirus genus and Parvoviridae family, is a single stranded DNA virus. In one embodiment, AAV may provide a persistent source of the provided DNA, as AAV delivered genomic material can exist indefinitely in cells, e.g., either as exogenous DNA or, with some modification, be directly integrated into the host DNA. In one embodiment, AAV do not cause or relate with any diseases in humans. The virus itself is able to efficiently infect cells while provoking little to no innate or adaptive immune response or associated toxicity.

[0489] Examples of AAV that can be used herein include AAV-1, AAV-2, AAV-3, AAV-4, AAV-5, AAV-6, AAV-8, and AAV-9. The type of AAV may be selected with regard to the cells to be targeted; e.g., one can select AAV serotypes 1, 2, 5 or a hybrid capsid AAV1, AAV2, AAV5 or any combination thereof for targeting brain or neuronal cells; and one can select AAV4 for targeting cardiac tissue. AAV8 is useful for delivery to the liver. AAV-2-based vectors were originally proposed for CFTR delivery to CF airways, other serotypes such as AAV-1, AAV-5, AAV-6, and AAV-9 exhibit improved gene transfer efficiency in a variety of models of the lung epithelium. Examples of cell types targeted by AAV are described in Grimm, D. et al, J. Virol. 82: 5887-5911 (2008)), and shown in Table 5 as follows:

TABLE 5
Examples of cell types targeted by AAV.

| Cell Line | AAV-1 | AAV-2 | AAV-3 | AAV-4 | AAV-5 | AAV-6 | AAV-8 | AAV-9 |
|---|---|---|---|---|---|---|---|---|
| Huh-7 | 13 | 100 | 2.5 | 0.0 | 0.1 | 10 | 0.7 | 0.0 |
| HEK293 | 25 | 100 | 2.5 | 0.1 | 0.1 | 5 | 0.7 | 0.1 |
| HeLa | 3 | 100 | 2.0 | 0.1 | 6.7 | 1 | 0.2 | 0.1 |
| HepG2 | 3 | 100 | 16.7 | 0.3 | 1.7 | 5 | 0.3 | ND |
| Hep1A | 20 | 100 | 0.2 | 1.0 | 0.1 | 1 | 0.2 | 0.0 |
| 911 | 17 | 100 | 11 | 0.2 | 0.1 | 17 | 0.1 | ND |
| CHO | 100 | 100 | 14 | 1.4 | 333 | 50 | 10 | 1.0 |
| COS | 33 | 100 | 33 | 3.3 | 5.0 | 14 | 2.0 | 0.5 |
| MeWo | 10 | 100 | 20 | 0.3 | 6.7 | 10 | 1.0 | 0.2 |
| NIH3T3 | 10 | 100 | 2.9 | 2.9 | 0.3 | 10 | 0.3 | ND |
| A549 | 14 | 100 | 20 | ND | 0.5 | 10 | 0.5 | 0.1 |
| HT1180 | 20 | 100 | 10 | 0.1 | 0.3 | 33 | 0.5 | 0.1 |
| Monocytes | 1111 | 100 | ND | ND | 125 | 1429 | ND | ND |
| Immature | 2500 | 100 | ND | ND | 222 | 2857 | ND | ND |
| DC | | | | | | | | |
| Mature DC | 2222 | 100 | ND | ND | 333 | 3333 | ND | ND |

[0490] The AAV particles may be created in HEK 293 T cells. Once particles with specific tropism have been created, they are used to infect the target cell line much in the same way that native viral particles do. This may allow for persistent presence of the components in the infected cell type, and what makes this version of delivery particularly suited to cases where long-term expression is desirable. Examples of doses and formulations for AAV that can be used include those describe in U.S. Pat. Nos. 8,454,972 and 8,404,658.

[0491] Various strategies may be used for delivery the systems and compositions herein with AAVs. In some examples, coding sequences of chimeric IscB system and ωRNA may be packaged directly onto one DNA plasmid vector and delivered via one AAV particle. In some examples, AAVs may be used to deliver ωRNAs into cells that have been previously engineered to express chimeric IscB systems. In some examples, coding sequences of chimeric IscB systems and ωRNA may be made into two separate AAV particles, which are used for co-transfection of target cells. In some examples, markers, tags, and other sequences may be packaged in the same AAV particles as coding sequences of chimeric IscB systems and/or ωRNAs.

### Lentiviruses

[0492] The systems and compositions herein may be delivered by lentiviruses. Lentiviral vectors may be used for such delivery. Lentiviruses are complex retroviruses that have the ability to infect and express their genes in both mitotic and post-mitotic cells.

[0493] Examples of lentiviruses include human immunodeficiency virus (HIV), which may use its envelope glycoproteins of other viruses to target a broad range of cell types; minimal non-primate lentiviral vectors based on the equine infectious anemia virus (EIAV), which may be used for ocular therapies. In an embodiment, self-inactivating lentiviral vectors with an siRNA targeting a common exon shared by HIV tat/rev, a nucleolar-localizing TAR decoy, and an anti-CCR5-specific hammerhead ribozyme (see, e.g., DiGiusto et al. (2010) Sci Transl Med 2:36ra43) may be used/and or adapted to the nucleic acid-targeting system herein.

[0494] Lentiviruses may be pseudo-typed with other viral proteins, such as the G protein of vesicular stomatitis virus. In doing so, the cellular tropism of the lentiviruses can be altered to be as broad or narrow as desired. In some cases, to improve safety, second- and third-generation lentiviral systems may split essential genes across three plasmids, which may reduce the likelihood of accidental reconstitution of viable viral particles within cells.

[0495] In some examples, leveraging the integration ability, lentiviruses may be used to create libraries of cells comprising various genetic modifications, e.g., for screening and/or studying genes and signaling pathways.

### Adenoviruses

[0496] The systems and compositions herein may be delivered by adenoviruses. Adenoviral vectors may be used for such delivery. Adenoviruses include nonenveloped viruses with an icosahedral nucleocapsid containing a double stranded DNA genome. Adenoviruses may infect dividing and non-dividing cells. In one embodiment, adenoviruses do not integrate into the genome of host cells, which may be used for limiting off-target effects of systems in gene editing applications.

### Viral Vehicles for Delivery to Plants

[0497] The systems and compositions may be delivered to plant cells using viral vehicles. In one embodiment, the compositions and systems may be introduced in the plant cells using a plant viral vector (e.g., as described in Scholthof et al. 1996, Annu Rev Phytopathol. 1996; 34:299-323). Such viral vector may be a vector from a DNA virus, e.g., geminivirus (e.g., cabbage leaf curl virus, bean yellow dwarf virus, wheat dwarf virus, tomato leaf curl virus, maize streak virus, tobacco leaf curl virus, or tomato golden mosaic virus) or nanovirus (e.g., Faba bean necrotic yellow virus). The viral vector may be a vector from an RNA virus, e.g., tobravirus (e.g., tobacco rattle virus, tobacco mosaic virus), potexvirus (e.g., potato virus X), or hordeivirus (e.g., barley stripe mosaic virus). The replicating genomes of plant viruses may be non-integrative vectors.

### Non-Viral Vehicles

[0498] The delivery vehicles may comprise non-viral vehicles. In general, methods and vehicles capable of delivering nucleic acids and/or proteins may be used for delivering the systems compositions herein. Examples of non-viral vehicles include lipid nanoparticles, cell-penetrating peptides (CPPs), DNA nanoclews, gold nanoparticles, streptolysin O, multifunctional envelope-type nanodevices (MENDs), lipid-coated mesoporous silica particles, and other inorganic nanoparticles.

### Lipid Particles

[0499] The delivery vehicles may comprise lipid particles, e.g., lipid nanoparticles (LNPs) and liposomes.

### Lipid Nanoparticles (LNPs)

[0500] LNPs may encapsulate nucleic acids within cationic lipid particles (e.g., liposomes), and may be delivered to cells with relative ease. In some examples, lipid nanoparticles do not contain any viral components, which helps minimize safety and immunogenicity concerns. Lipid particles may be used for in vitro, ex vivo, and in vivo deliveries. Lipid particles may be used for various scales of cell populations.

[0501] In some examples. LNPs may be used for delivering DNA molecules (e.g., those comprising coding sequences of chimeric IscB system and/or ωRNA) and/or RNA molecules (e.g., mRNA of chimeric IscB systems, ωRNA or gRNAs). In certain cases, LNPs may be use for delivering RNP complexes of chimeric IscB system/ωRNA.

[0502] Components in LNPs may comprise cationic lipids 1,2-dilineoyl-3-dimethylammonium-propane (DLinDAP), 1,2-dilinoleyloxy-3-N,N-dimethylaminopropane (DLinDMA), 1,2-dilinoleyloxyketo-N,N-dimethyl-3-aminopropane (DLinK-DMA), 1,2-dilinoleyl-4-(2-dimethylaminoethyl)-[1,3]-dioxolane (DLinKC2-DMA), (3-o-[2″-(methoxypolyethyleneglycol 2000) succinoyl]-1,2-dimyristoyl-sn-glycol (PEG-S-DMG), R-3-[(ro-methoxy-poly(ethylene glycol)2000) carbamoyl]-1,2-dimyristyloxlpropyl-3-amine (PEG-C-DOMG, and any combination thereof. Preparation of LNPs and encapsulation may be adapted from Rosin et al, Molecular Therapy, vol. 19, no. 12, pages 1286-2200, December 2011).

### Liposomes

[0503] In one embodiment, a lipid particle may be liposome. Liposomes are spherical vesicle structures composed of a uni- or multi-lamellar lipid bilayer surrounding internal aqueous compartments and a relatively impermeable outer lipophilic phospholipid bilayer. In one embodiment, liposomes are biocompatible, nontoxic, can deliver both hydrophilic and lipophilic drug molecules, protect their cargo from degradation by plasma enzymes, and transport their load across biological membranes and the blood brain barrier (BBB).

[0504] Liposomes can be made from several different types of lipids, e.g., phospholipids. A liposome may comprise natural phospholipids and lipids such as 1,2-distearoryl-sn-glycero-3-phosphatidyl choline (DSPC), sphingomyelin, egg phosphatidylcholines, monosialoganglioside, or any combination thereof.

[0505] Several other additives may be added to liposomes in order to modify their structure and properties. For instance, liposomes may further comprise cholesterol, sphingomyelin, and/or 1,2-dioleoyl-sn-glycero-3-phosphoethanolamine (DOPE), e.g., to increase stability and/or to prevent the leakage of the liposomal inner cargo.

### Stable Nucleic-Acid-Lipid Particles (SNALPs)

[0506] In one embodiment, the lipid particles may be stable nucleic acid lipid particles (SNALPs). SNALPs may comprise an ionizable lipid (DLinDMA) (e.g., cationic at low pH), a neutral helper lipid, cholesterol, a diffusible polyethylene glycol (PEG)-lipid, or any combination thereof. In some examples, SNALPs may comprise synthetic cholesterol, dipalmitoylphosphatidylcholine, 3-N-[(w-methoxy polyethylene glycol)2000)carbamoyl]-1,2-dimyrestyloxypropylamine, and cationic 1,2-dilinoleyloxy-3-N,Ndimethylaminopropane. In some examples, SNALPs may comprise synthetic cholesterol, 1,2-distearoyl-sn-glycero-3-phosphocholine, PEG-cDMA, and 1,2-dilinoleyloxy-3-(N; N-dimethyl)aminopropane (DLinDMA).

### Other Lipids

[0507] The lipid particles may also comprise one or more other types of lipids, e.g., cationic lipids, such as amino lipid 2,2-dilinoleyl-4-dimethylaminoethyl-[1,3]-dioxolane (DLin-KC2-DMA), DLin-KC2-DMA4, C12-200 and colipids disteroylphosphatidyl choline, cholesterol, and PEG-DMG.

### Lipoplexes/Polyplexes

[0508] In one embodiment, the delivery vehicles comprise lipoplexes and/or polyplexes. Lipoplexes may bind to negatively charged cell membrane and induce endocytosis into the cells. Examples of lipoplexes may be complexes comprising lipid(s) and non-lipid components. Examples of lipoplexes and polyplexes include FuGENE-6 reagent, a non-liposomal solution containing lipids and other components, zwitterionic amino lipids (ZALs), Ca2 [symbol] (e.g., forming DNA/Ca²⁺ micro-complexes), polyethenimine (PEI) (e.g., branched PEI), and poly(L-lysine) (PLL).

### Cell Penetrating Peptides

[0509] In one embodiment, the delivery vehicles comprise cell penetrating peptides (CPPs). CPPs are short peptides that facilitate cellular uptake of various molecular cargo (e.g., from nanosized particles to small chemical molecules and large fragments of DNA).

[0510] CPPs may be of different sizes, amino acid sequences, and charges. In some examples, CPPs can translocate the plasma membrane and facilitate the delivery of various molecular cargoes to the cytoplasm or an organelle. CPPs may be introduced into cells via different mechanisms, e.g., direct penetration in the membrane, endocytosis-mediated entry, and translocation through the formation of a transitory structure.

[0511] CPPs may have an amino acid composition that either contains a high relative abundance of positively charged amino acids such as lysine or arginine or has sequences that contain an alternating pattern of polar/charged amino acids and non-polar, hydrophobic amino acids. These two types of structures are referred to as polycationic or amphipathic, respectively. A third class of CPPs are the hydrophobic peptides, containing only apolar residues, with low net charge or have hydrophobic amino acid groups that are crucial for cellular uptake. Another type of CPPs is the trans-activating transcriptional activator (Tat) from Human Immunodeficiency Virus 1 (HIV-1). Examples of CPPs include to Penetratin, Tat (48-60), Transportan, and (R-AhX-R4) (Ahx refers to aminohexanoyl), Kaposi fibroblast growth factor (FGF) signal peptide sequence, integrin β3 signal peptide sequence, polyarginine peptide Args sequence, Guanine rich-molecular transporters, and sweet arrow peptide. Examples of CPPs and related applications also include those described in U.S. Pat. No. 8,372,951.

[0512] CPPs can be used for in vitro and ex vivo work quite readily, and extensive optimization for each cargo and cell type is usually required. In some examples, CPPs may be covalently attached to the chimeric IscB system directly, which is then complexed with the ωRNA and delivered to cells. In some examples, separate delivery of CPP-IscB and CPP-ωRNA to multiple cells may be performed. CPP may also be used to delivery RNPs.

[0513] CPPs may be used to deliver the compositions and systems to plants. In some examples, CPPs may be used to deliver the components to plant protoplasts, which are then regenerated to plant cells and further to plants.

### DNA Nanoclews

[0514] In one embodiment, the delivery vehicles comprise DNA nanoclews. A DNA nanoclew refers to a sphere-like structure of DNA (e.g., with a shape of a ball of yarn). The nanoclew may be synthesized by rolling circle amplification with palindromic sequences that aide in the self-assembly of the structure. The sphere may then be loaded with a payload. An example of DNA nanoclew is described in Sun W et al, J Am Chem Soc. 2014 Oct. 22; 136(42):14722-5; and Sun W et al, Angew Chem Int Ed Engl. 2015 Oct. 5; 54(41):12029-33. DNA nanoclew may have a palindromic sequence to be partially complementary to the guide RNA within the chimeric IscB system: ωRNA ribonucleoprotein complex. A DNA nanoclew may be coated, e.g., coated with PEI to induce endosomal escape.

### Gold Nanoparticles

[0515] In one embodiment, the delivery vehicles comprise gold nanoparticles (also referred to AuNPs or colloidal gold). Gold nanoparticles may form complex with cargos, e.g., chimeric IscB system: ωRNA RNP. Gold nanoparticles may be coated, e.g., coated in a silicate and an endosomal disruptive polymer, PAsp(DET). Examples of gold nanoparticles include AuraSense Therapeutics' Spherical Nucleic Acid (SNA™) constructs, and those described in Mout R, et al. (2017). ACS Nano 11:2452-8; Lee K, et al. (2017). Nat Biomed Eng 1:889-901. iTOP

[0516] In one embodiment, the delivery vehicles comprise iTOP. iTOP refers to a combination of small molecules drives the highly efficient intracellular delivery of native proteins, independent of any transduction peptide. iTOP may be used for induced transduction by osmocytosis and propanebetaine, using NaCl-mediated hyperosmolality together with a transduction compound (propanebetaine) to trigger macropinocytotic uptake into cells of extracellular macromolecules. Examples of iTOP methods and reagents include those described in D′Astolfo D S, Pagliero R J, Pras A, et al. (2015). Cell 161:674-690.

### Polymer-Based Particles

[0517] In one embodiment, the delivery vehicles may comprise polymer-based particles (e.g., nanoparticles). In one embodiment, the polymer-based particles may mimic a viral mechanism of membrane fusion. The polymer-based particles may be a synthetic copy of Influenza virus machinery and form transfection complexes with various types of nucleic acids ((siRNA, miRNA, plasmid DNA or shRNA, mRNA) that cells take up via the endocytosis pathway, a process that involves the formation of an acidic compartment. The low pH in late endosomes acts as a chemical switch that renders the particle surface hydrophobic and facilitates membrane crossing. Once in the cytosol, the particle releases its payload for cellular action. This Active Endosome Escape technology is safe and maximizes transfection efficiency as it is using a natural uptake pathway. In one embodiment, the polymer-based particles may comprise alkylated and carboxyalkylated branched polyethyleneimine. In some examples, the polymer-based particles are VIROMER, e.g., VIROMER RNAi, VIROMER RED, VIROMER mRNA. Example methods of delivering the systems and compositions herein include those described in Bawage S S et al., Synthetic mRNA expressed Casl3a mitigates RNA virus infections, www.biorxiv.org/content/10.1101/370460v1.full doi: doi.org/10.1101/370460, Viromer® RED, a powerful tool for transfection of keratinocytes. doi: 10.13140/RG.2.2.16993.61281, Viromer® Transfection—Factbook 2018: technology, product overview, users' data., doi:10.13140/RG.2.2.23912.16642.

### Streptolysin O (SLO)

[0518] The delivery vehicles may be streptolysin O (SLO). SLO is a toxin produced by Group A streptococci that works by creating pores in mammalian cell membranes. SLO may act in a reversible manner, which allows for the delivery of proteins (e.g., up to 100 kDa) to the cytosol of cells without compromising overall viability. Examples of SLO include those described in Sierig G, et al. (2003). Infect Immun 71:446-55; Walev I, et al. (2001). Proc Natl Acad Sci USA 98:3185-90; Teng K W, et al. (2017). Elife 6:e25460.

### Multifunctional Envelope-Type Nanodevice (MEND)

[0519] The delivery vehicles may comprise multifunctional envelope-type nanodevice (MENDs). MENDs may comprise condensed plasmid DNA, a PLL core, and a lipid film shell. A MEND may further comprise cell-penetrating peptide (e.g., stearyl octaarginine). The cell penetrating peptide may be in the lipid shell. The lipid envelope may be modified with one or more functional components, e.g., one or more of: polyethylene glycol (e.g., to increase vascular circulation time), ligands for targeting of specific tissues/cells, additional cell-penetrating peptides (e.g., for greater cellular delivery), lipids to enhance endosomal escape, and nuclear delivery tags. In some examples, the MEND may be a tetra-lamellar MEND (T-MEND), which may target the cellular nucleus and mitochondria. In certain examples, a MEND may be a PEG-peptide-DOPE-conjugated MEND (PPD-MEND), which may target bladder cancer cells. Examples of MENDs include those described in Kogure K, et al. (2004). J Control Release 98:317-23; Nakamura T, et al. (2012). Acc Chem Res 45:1113-21.

### Lipid-Coated Mesoporous Silica Particles

[0520] The delivery vehicles may comprise lipid-coated mesoporous silica particles. Lipid-coated mesoporous silica particles may comprise a mesoporous silica nanoparticle core and a lipid membrane shell. The silica core may have a large internal surface area, leading to high cargo loading capacities. In one embodiment, pore sizes, pore chemistry, and overall particle sizes may be modified for loading different types of cargos. The lipid coating of the particle may also be modified to maximize cargo loading, increase circulation times, and provide precise targeting and cargo release. Examples of lipid-coated mesoporous silica particles include those described in Du X, et al. (2014). Biomaterials 35:5580-90; Durfee P N, et al. (2016). ACS Nano 10:8325-45.

### Inorganic Nanoparticles

[0521] The delivery vehicles may comprise inorganic nanoparticles. Examples of inorganic nanoparticles include carbon nanotubes (CNTs) (e.g., as described in Bates K and Kostarelos K. (2013). Adv Drug Deliv Rev 65:2023-33.), bare mesoporous silica nanoparticles (MSNPs) (e.g., as described in Luo G F, et al. (2014). Sci Rep 4:6064), and dense silica nanoparticles (SiNPs) (as described in Luo D and Saltzman W M. (2000). Nat Biotechnol 18:893-5).

### Exosomes

[0522] The delivery vehicles may comprise exosomes. Exosomes include membrane bound extracellular vesicles, which can be used to contain and delivery various types of biomolecules, such as proteins, carbohydrates, lipids, and nucleic acids, and complexes thereof (e.g., RNPs). Examples of exosomes include those described in Schroeder A, et al., J Intern Med. 2010 January; 267(1):9-21; El-Andaloussi S, et al., Nat Protoc. 2012 December; 7(12):2112-26; Uno Y, et al., Hum Gene Ther. 2011 June; 22(6):711-9; Zou W, et al., Hum Gene Ther. 2011 April; 22(4):465-75.

[0523] In some examples, the exosome may form a complex (e.g., by binding directly or indirectly) to one or more components of the cargo. In certain examples, a molecule of an exosome may be fused with first adapter protein and a component of the cargo may be fused with a second adapter protein. The first and the second adapter protein may specifically bind each other, thus associating the cargo with the exosome. Examples of such exosomes include those described in Ye Y, et al., Biomater Sci. 2020 Apr. 28. doi: 10.1039/d0bm00427h.

### Retrovirus Like Delivery Systems

[0524] The delivery vehicle may comprise a retro-virus like protein, such as PEG10, which is capable of incorporating a cargo into a virus-like particle. As such systems can be re-programmed to package specific cargos, polynucleotides encoding components of the IscB systems disclosed herein may be further modified with a recognition sequence that leads to selective packaging of the IscB components into such retro-virus like VLPs. Said VLPs may be further modified with fusogenic proteins that impart tissue or cell specificity. Example systems are disclosed in Segal et al. Mammalian retrovirus-like protein PEG10 packages its own mRNA and can be pseudo-typed for mRNA delivery. 373 Science, 882-889 (2021), which is incorporated herein by reference. Engineered VLPs, including DNA-free virus-like particles have been developed that can address cargo packaging, release and localization issues and may be engineered for specific cellular tropism, including particles engineered and optimized for delivery of base editors and ribonucleoproteins. See, e.g. Baskota et al., Cell. 2022 Jan. 20; 185(2):250-265.e16; doi: 10.1016/j.cell.2021.12.021, incorporated herein by reference (development of retroviral-based engineered VLP platform for packaging and delivering base editors and Cas9 nuclease, with potential advantages of both viral and nonviral delivery strategies).

### Genetically Modified Cells and Organisms

[0525] The present disclosure further provides cells comprising one or more components of the chimeric IscB compositions and systems disclosed herein. Also provided include cells modified by the systems and methods herein, and cell cultures, tissues, organs, organism comprising such cells or progeny thereof. In one embodiment, the present disclosure provides a method of modifying a cell or organism. The cell may be a prokaryotic cell or a eukaryotic cell. The cell may be a mammalian cell. The mammalian cell many be a non-human primate, bovine, porcine, rodent or mouse cell. The cell may be a non-mammalian eukaryotic cell such as poultry, fish or shrimp. The cell may be a therapeutic T cell or antibody-producing B-cell. The cell may also be a plant cell. The plant cell may be of a crop plant such as cassava, corn, sorghum, wheat, or rice. The plant cell may also be of an algae, tree or vegetable. The modification introduced to the cell by the present invention may be such that the cell and progeny of the cell are altered for improved production of biologic products such as an antibody, starch, alcohol or other desired cellular output. The modification introduced to the cell by the present invention may be such that the cell and progeny of the cell include an alteration that changes the biologic product produced.

[0526] In one embodiment, one or more polynucleotide molecules, vectors, or vector systems driving expression of one or more elements of the compositions, systems, or delivery systems comprising one or more elements of the nucleic acid-targeting system are introduced into a host cell such that expression of the elements of the nucleic acid-targeting system direct formation of a nucleic acid-targeting complex at one or more target sites. In an embodiment of the invention the host cell may be a eukaryotic cell, a prokaryotic cell, or a plant cell.

[0527] In one embodiment, the host cell is a cell of a cell line. Cell lines are available from a variety of sources known to those with skill in the art (see, e.g., the American Type Culture Collection (ATCC) (Manassas, Va.)). In one embodiment, a cell transfected with one or more vectors described herein is used to establish a new cell line comprising one or more vector-derived sequences. In one embodiment, a cell transiently transfected with the components of a system as described herein (such as by transient transfection of one or more vectors, or transfection with RNA), and modified through the activity of a complex, is used to establish a new cell line comprising cells containing the modification but lacking any other exogenous sequence. In one embodiment, cells transiently or non-transiently transfected with one or more vectors described herein, or cell lines derived from such cells are used in assessing one or more test compounds.

[0528] Further intended are isolated human cells or tissues, plants or non-human animals comprising one or more of the polynucleotide molecules, vectors, vector systems, or cells described in any of the embodiments herein. In an aspect, host cells and cell lines modified by or comprising the compositions, systems or modified enzymes of present invention are provided, including (isolated) stem cells, and progeny thereof.

[0529] In an embodiment, the plants or non-human animals comprise at least one of the system components, polynucleotide molecules, vectors, vector systems, or cells described in any of the embodiments herein at least one tissue type of the plant or non-human animal. In an embodiment, non-human animals comprise at least one of the system components, polynucleotide molecules, vectors, vector systems, or cells described in any of the embodiments herein in at least one tissue type. In an embodiment, the presence of the system components is transient, in that they are degraded over time. In an embodiment, expression of the components of the systems and compositions described in any of the embodiments comprised in polynucleotide molecules, vectors, vector systems, or cells is limited to certain tissue types or regions in the plant or non-human animal. In an embodiment, the expression of the components of the systems and compositions described in any of the embodiments comprised in polynucleotide molecules, vectors, vector systems, or cells is dependent of a physiological cue. In an embodiment, expression of the components of the systems and compositions described in any of the embodiments comprised in polynucleotide molecules, vectors, vector systems, or cells may be triggered by an exogenous molecule. In an embodiment, expression of the components of the systems and compositions described in any of the embodiments comprised in polynucleotide molecules, vectors, vector systems, or cells is dependent on the expression of a non-cas molecule in the plant or non-human animal.

### Applications and Uses in General

[0530] The systems, the vector systems, the vectors and the compositions described herein may be used in various nucleic acids-targeting applications, altering or modifying synthesis of a gene product, such as a protein, nucleic acids cleavage, nucleic acids editing, nucleic acid splicing; trafficking of target nucleic acids, tracing of target nucleic acids, isolation of target nucleic acids, visualization of target nucleic acids, etc.

[0531] Aspects of the invention thus also encompass methods and uses of the compositions and systems described herein in genome engineering, e.g., for altering or manipulating the expression of one or more genes or the one or more gene products, in prokaryotic or eukaryotic cells, in vitro, in vivo or ex vivo. In some examples, the target polynucleotides are target sequences within genomic DNA, including nuclear genomic DNA, mitochondrial DNA, or chloroplast DNA.

[0532] Typically, in the context of a nucleic acid-targeting system, formation of a nucleic acid-targeting complex (comprising a ωRNA or guide RNA hybridized to a target sequence and complexed with one or more nucleic acid-targeting effector proteins) results in cleavage of one or both DNA or RNA strands in or near (e.g., within 1, 2, 3, 4, 5, 6, 7, 8, 9, 10, 20, 50, or more base pairs from) the target sequence. As used herein the term “sequence(s) associated with a target locus of interest” refers to sequences near the vicinity of the target sequence (e.g., within 1, 2, 3, 4, 5, 6, 7, 8, 9, 10, 20, 50, or more base pairs from the target sequence, wherein the target sequence is comprised within a target locus of interest).

[0533] In one embodiment, the present disclosure provides a method of targeting a polynucleotide, comprising contacting a sample (such as cell, population of cells, tissue, organ, or an organism) that comprises a target polynucleotide with the composition, systems, polynucleotide(s), or vector(s). The contacting may result in modification of a gene product or modification of the amount or expression of a gene product. In some examples, the target sequence of the polynucleotide is a disease-associated target sequence.

[0534] In one embodiment, the present disclosure provides a method of modifying target polynucleotides comprising delivering the composition, the one or more polynucleotides of 2, or one or more vectors to a cell or population of cells comprising the target polynucleotides, wherein the complex directs the reverse transcriptase to the target sequence and the reverse transcriptase facilitates insertion of the donor sequence from the ωRNA into the target polynucleotide.

[0535] Examples of target polynucleotides include a sequence associated with a signaling biochemical pathway, e.g., a signaling biochemical pathway-associated gene or polynucleotide. Examples of target polynucleotides include a disease associated gene or polynucleotide. A “disease-associated” gene or polynucleotide refers to any gene or polynucleotide which is yielding transcription or translation products at an abnormal level or in an abnormal form in cells derived from a disease-affected tissues compared with tissues or cells of a non-disease control. It may be a gene that becomes expressed at an abnormally high level; it may be a gene that becomes expressed at an abnormally low level, where the altered expression correlates with the occurrence and/or progression of the disease. A disease-associated gene also refers to a gene possessing mutation(s) or genetic variation that is directly responsible or is in linkage disequilibrium with a gene(s) that is responsible for the etiology of a disease. The transcribed or translated products may be known or unknown and may be at a normal or abnormal level.

[0536] The target polynucleotide of a complex can be any polynucleotide endogenous or exogenous to the eukaryotic cell. For example, the target polynucleotide can be a polynucleotide residing in the nucleus of the eukaryotic cell. The target polynucleotide can be a sequence coding a gene product (e.g., a protein) or a non-coding sequence (e.g., a regulatory polynucleotide or a junk DNA). Without wishing to be bound by theory, it is believed that the target sequence should be associated with a TAM (target adjacent motif); that is, a short sequence recognized by the complex. The precise sequence and length requirements for the TAM differ depending on the chimeric IscB polypeptide used, but TAMs are typically 2-5 base pair sequences adjacent the protospacer (that is, the target sequence) A skilled person will be able to identify further TAM sequences for use with a given chimeric IscB polypeptide. As discussed in further detail above, engineering of the TAM Interacting domain may allow programing of TAM specificity, improve target site recognition fidelity, and increase the versatility of the chimeric IscB system, genome engineering platform. Chimeric IscB systems may be engineered to alter their TAM specificity.

[0537] In an embodiment the IscB TAM is ATNA where N is any nucleotide. In an embodiment, the IscB TAM is ATGA, ATAA, ATAAA, or ATN. In one embodiment, the IscB is derived from Ignatius tetrasporus and the TAM is NNG.

[0538] Examples of target polynucleotides include a sequence associated with a signaling biochemical pathway, e.g., a signaling biochemical pathway-associated gene or polynucleotide. Examples of target polynucleotides include a disease associated gene or polynucleotide. A “disease-associated” gene or polynucleotide refers to any gene or polynucleotide which is yielding transcription or translation products at an abnormal level or in an abnormal form in cells derived from a disease-affected tissues compared with tissues or cells of a non-disease control. It may be a gene that becomes expressed at an abnormally high level; it may be a gene that becomes expressed at an abnormally low level, where the altered expression correlates with the occurrence and/or progression of the disease. A disease-associated gene also refers to a gene possessing mutation(s) or genetic variation that is directly responsible or is in linkage disequilibrium with a gene(s) that is responsible for the etiology of a disease. The transcribed or translated products may be known or unknown and may be at a normal or abnormal level.

[0539] Aspects of the invention relate to a method of targeting a polynucleotide, comprising contacting a sample that comprises the polynucleotide with a chimeric IscB composition, or vector encoding a chimeric IscB system or a delivery composition comprising the chimeric IscB system, as described in any embodiment herein. In an embodiment, a target polynucleotide is contacted with at least two different chimeric IscB systems. The two different chimeric IscB systems may have different target polynucleotide specificities, or degrees of specificity. In an embodiment, the two different chimeric IscB systems have a different TAM specificity.

[0540] Also envisaged are methods of targeting a polynucleotide, comprising contacting a sample that comprises the polynucleotide with the composition, vectors, polynucleotides, and delivery systems disclosed herein, wherein contacting results in modification of a gene product or modification of the amount or expression of a gene product. In an embodiment, the expression of the targeted gene product is increased by the method. In an embodiment, the expression of the targeted gene product is increased by at least 10%, at least 15%, at least 20%, at least 25%, at least 30%, at least 35%, at least 40%, at least 45%, at least 50%, at least 55%, at least 60%, at least 65%, at least 70%, at least 75%, at least 80%, at least 85%, p at least 90%, at least 95%, 100%. In an embodiment, the expression of the targeted gene product is increased at least 1.5-fold, at least 2-fold, at least 2.5-fold, at least 3-fold, at least 3.5-fold, at least 3.5-fold, at least 4-fold, at least 4.5-fold, at least 5-fold, at least 10-fold, at least 10-fold, at least 15-fold, at least 20-fold, at least 25-fold, at least 50-fold, at least 100-fold. In an embodiment, the expression of the targeted gene product is reduced by at least 10%, by at least 15%, by at least 20%, by at least 25%, by at least 30%, by at least 35%, by at least 40%, by at least 45%, by at least 50%, by at least 55%, by at least 60%, by at least 65%, by at least 70%, by at least 75%, by at least 80%, by at least 85%, by at least 90%, by at least 95%, by at least 100%. In an embodiment, the expression of the targeted gene product is reduced at least 1.5-fold, at least 2-fold, at least 2.5-fold, at least 3-fold, at least 3.5-fold, at least 3.5-fold, at least 4-fold, at least 4.5-fold, at least 5-fold, at least 10-fold, at least 10-fold, at least 15-fold, at least 20-fold, at least 25-fold, at least 50-fold, at least 100-fold. In alternative embodiments, the expression of the targeted gene product is reduced by the method. In further embodiments, expression of the targeted gene may be completely eliminated, or may be considered eliminated as remnant expression levels of the targeted gene fall below the detection limit of methods known in the art that are used to quantify, detect, or monitor expression levels of genes.

[0541] In one embodiment, one or more polynucleotide molecules, vectors, or vector systems driving expression of one or more elements comprising one or more elements of the chimeric IscB system are introduced into a host cell such that expression of the elements of the chimeric IscB system direct formation of a nucleic acid-targeting complex at one or more target sites. In an embodiment of the invention the host cell may be a eukaryotic cell, a prokaryotic cell, or a plant cell.

[0542] In one embodiment, the host cell is a cell of a cell line. Cell lines are available from a variety of sources known to those with skill in the art (see, e.g., the American Type Culture Collection (ATCC) (Manassas, Va.)). In one embodiment, a cell transfected with one or more vectors described herein is used to establish a new cell line comprising one or more vector-derived sequences. In one embodiment, a cell transiently transfected with the components of a composition or system as described herein (such as by transient transfection of one or more vectors, or transfection with RNA), and modified through the activity of a complex, is used to establish a new cell line comprising cells containing the modification but lacking any other exogenous sequence. In one embodiment, cells transiently or non-transiently transfected with one or more vectors described herein, or cell lines derived from such cells are used in assessing one or more test compounds.

[0543] Further intended are isolated human cells or tissues, plants or non-human animals comprising one or more of the polynucleotide molecules, vectors, vector systems, or cells described in any of the embodiments herein. In an aspect, host cells and cell lines modified by or comprising the compositions, systems or modified enzymes of present invention are provided, including (isolated) stem cells, and progeny thereof.

[0544] In an embodiment, the plants or non-human animals comprise at least one of the compositions, polynucleotide molecules, vectors, vector systems, delivery systems or cells described in any of the embodiments herein at least one tissue type of the plant or non-human animal. In certain embodiment, non-human animals comprise at least one of the compositions, polynucleotide molecules, vectors, vector systems, delivery systems, or cells described in any of the embodiments herein in at least one tissue type. In an embodiment, the presence of the compositions is transient, in that they are degraded over time. In an embodiment, expression of the compositions described in any of the embodiments comprised in polynucleotide molecules, vectors, vector systems, or cells is limited to certain tissue types or regions in the plant or non-human animal. In an embodiment, the expression of the compositions described in any of the embodiments comprised in polynucleotide molecules, vectors, vector systems, or cells is dependent of a physiological cue. In an embodiment, expression of the compositions described in any of the embodiments comprised in polynucleotide molecules, vectors, vector systems, or cells may be triggered by an exogenous molecule. In an embodiment, expression of the compositions described in any of the embodiments comprised in polynucleotide molecules, vectors, vector systems, or cells is dependent on the expression of a non-Cas molecule in the plant or non-human animal.

[0545] In one aspect, the invention provides methods for using one or more elements of a nucleic acid-targeting system. The nucleic acid-targeting complex of the invention provides an effective means for modifying a target DNA or RNA (single or double stranded, linear or super-coiled). The nucleic acid-targeting complex of the invention has a wide variety of utility including modifying (e.g., deleting, inserting, translocating, inactivating, activating) a target DNA or RNA in a multiplicity of cell types. As such, the nucleic acid-targeting complex of the invention has a broad spectrum of applications in, e.g., gene therapy, drug screening, disease diagnosis, and prognosis. An exemplary nucleic acid-targeting complex comprises a DNA or RNA-targeting effector protein complexed with a ωRNA or guide RNA hybridized to a target sequence within the target locus of interest.

[0546] In one embodiment, this invention provides a method of cleaving a target polynucleotide. The method may comprise modifying a target polynucleotide using a nucleic acid-targeting complex that binds to the target polynucleotide and effect cleavage of said target polynucleotide. In an embodiment, the nucleic acid-targeting complex of the invention, when introduced into a cell, may create a break (e.g., a single or a double strand break) in the polynucleotide sequence. For example, the method can be used to cleave a disease polynucleotide in a cell. For example, an exogenous template comprising a sequence to be integrated flanked by an upstream sequence and a downstream sequence may be introduced into a cell. The upstream and downstream sequences share sequence similarity with either side of the site of integration in the polynucleotide. The exogenous template comprises a sequence to be integrated (e.g., a mutated RNA). The sequence for integration may be a sequence endogenous or exogenous to the cell. Examples of a sequence to be integrated include polynucleotide encoding a protein or a non-coding RNA (e.g., a microRNA). Thus, the sequence for integration may be operably linked to an appropriate control sequence or sequences. Alternatively, the sequence to be integrated may provide a regulatory function. The upstream and downstream sequences in the recombination template are selected to promote recombination between the RNA sequence of interest and the recombination. The upstream sequence is a polynucleotide sequence that shares sequence similarity with the sequence upstream of the targeted site for integration. Similarly, the downstream sequence is a polynucleotide sequence that shares sequence similarity with the polynucleotide sequence downstream of the targeted site of integration. The upstream and downstream sequences in the recombination template can have 75%, 80%, 85%, 90%, 95%, or 100% sequence identity with the targeted sequence. Preferably, the upstream and downstream sequences in the recombination template have about 95%, 96%, 97%, 98%, 99%, or 100% sequence identity with the targeted sequence. In some methods, the upstream and downstream sequences in the recombination template have about 99% or 100% sequence identity with the targeted sequence. An upstream or downstream sequence may comprise from about 20 bp to about 2500 bp, for example, about 50, 100, 200, 300, 400, 500, 600, 700, 800, 900, 1000, 1100, 1200, 1300, 1400, 1500, 1600, 1700, 1800, 1900, 2000, 2100, 2200, 2300, 2400, or 2500 bp. In some methods, the exemplary upstream or downstream sequence have about 200 bp to about 2000 bp, about 600 bp to about 1000 bp, or more particularly about 700 bp to about 1000 bp. In some methods, the recombination template may further comprise a marker. Such a marker may make it easy to screen for targeted integrations. Examples of suitable markers include restriction sites, fluorescent proteins, or selectable markers. The recombination template of the invention can be constructed using recombinant techniques (see, for example, Sambrook et al., 2001 and Ausubel et al., 1996). In a method for modifying a target sequence by integrating an recombination template, a break (e.g., double or single stranded break in double or single stranded DNA or RNA) is introduced into the DNA or RNA sequence by the nucleic acid-targeting complex, the break is repaired via homologous recombination with an recombination template such that the template is integrated into the target. The presence of a double-stranded break facilitates integration of the template. In other embodiments, this invention provides a method of modifying expression of a RNA in a eukaryotic cell. The method comprises increasing or decreasing expression of a target polynucleotide by using a nucleic acid-targeting complex that binds to the DNA or RNA (e.g., mRNA or pre-mRNA). In some methods, a target can be inactivated to affect the modification of the expression in a cell. For example, upon the binding of a nucleic acid-targeting complex to a target sequence in a cell, the target is inactivated such that the sequence is not translated, the coded protein is not produced, or the sequence does not function as the wild-type sequence does. For example, a protein or microRNA coding sequence may be inactivated such that the protein or microRNA or pre-microRNA transcript is not produced. The target of a nucleic acid-targeting complex can be any polynucleotide endogenous or exogenous to the eukaryotic cell. For example, the target polynucleotide can be a polynucleotide residing in the nucleus of the eukaryotic cell. The target polynucleotide can be a sequence coding a gene product (e.g., a protein) or a non-coding sequence (e.g., ncRNA, lncRNA, tRNA, or rRNA). Examples of target RNA include a sequence associated with a signaling biochemical pathway, e.g., a signaling biochemical pathway-associated polynucleotide. Examples of target polynucleotide include a disease associated polynucleotide. A “disease-associated” polynucleotide refers to any polynucleotide which is yielding translation products at an abnormal level or in an abnormal form in cells derived from a disease-affected tissues compared with tissues or cells of a non-disease control. It may be a gene that becomes expressed at an abnormally high level; it may be a gene that becomes expressed at an abnormally low level, where the altered expression correlates with the occurrence and/or progression of the disease. A disease-associated polynucleotide also refers to a gene possessing mutation(s) or genetic variation that is directly responsible or is in linkage disequilibrium with a gene(s) that is responsible for the etiology of a disease. The translated products may be known or unknown and may be at a normal or abnormal level. The target RNA of a nucleic acid-targeting complex can be any polynucleotide endogenous or exogenous to the eukaryotic cell. For example, the target RNA can be a RNA residing in the nucleus of the eukaryotic cell. The target polynucleotide can be a sequence coding a gene product (e.g., a protein) or a non-coding sequence (e.g., ncRNA, lncRNA, tRNA, or rRNA).

[0547] In one embodiment, the method may comprise allowing a composition to bind to the target DNA or RNA to effect cleavage of said target DNA or RNA thereby modifying the target DNA or RNA, wherein the nucleic acid-targeting complex comprises a nucleic acid-targeting effector protein complexed with a guide RNA hybridized to a target sequence within said target DNA or RNA. In one aspect, the invention provides a method of modifying expression of DNA or RNA in a eukaryotic cell. In one embodiment, the method comprises allowing a nucleic acid-targeting complex to bind to the DNA or RNA such that said binding results in increased or decreased expression of said DNA or RNA; wherein the nucleic acid-targeting complex comprises a nucleic acid-targeting effector protein complexed with a ωRNA or guide RNA. Similar considerations and conditions apply as above for methods of modifying a target DNA or RNA. In fact, these sampling, culturing and re-introduction options apply across the aspects of the present invention. In one aspect, the invention provides for methods of modifying a target DNA or RNA in a eukaryotic cell, which may be in vivo, ex vivo or in vitro. In one embodiment, the method comprises sampling a cell or population of cells from a human or non-human animal and modifying the cell or cells. Culturing may occur at any stage ex vivo. The cell or cells may even be re-introduced into the non-human animal or plant. For re-introduced cells it is particularly preferred that the cells are stem cells. The compositions as described in any embodiment herein may be used to detect nucleic acid identifiers. Nucleic acid identifiers are non-coding nucleic acids that may be used to identify a particular article. Example nucleic acid identifiers, such as DNA watermarks, are described in Heider and Barnekow. “DNA watermarks: A proof of concept” BMC Molecular Biology 9:40 (2008). The nucleic acid identifiers may also be a nucleic acid barcode. A nucleic acid-based barcode is a short sequence of nucleotides (for example, DNA, RNA, or combinations thereof) that is used as an identifier for an associated molecule, such as a target molecule and/or target nucleic acid. A nucleic acid barcode can have a length of at least, for example, 4, 5, 6, 7, 8, 9, 10, 11, 12, 13, 14, 15, 16, 17, 18, 19, 20, 21, 22, 23, 24, 25, 26, 27, 28, 29, 30, 35, 40, 45, 50, 60, 70, 80, 90, or 100 nucleotides, and can be in single- or double-stranded form. One or more nucleic acid barcodes can be attached, or “tagged,” to a target molecule and/or target nucleic acid. This attachment can be direct (for example, covalent or non-covalent binding of the barcode to the target molecule) or indirect (for example, via an additional molecule, for example, a specific binding agent, such as an antibody (or other protein) or a barcode receiving adaptor (or other nucleic acid molecule). Target molecule and/or target nucleic acids can be labeled with multiple nucleic acid barcodes in combinatorial fashion, such as a nucleic acid barcode concatemer. Typically, a nucleic acid barcode is used to identify target molecules and/or target nucleic acids as being from a particular compartment (for example a discrete volume), having a particular physical property (for example, affinity, length, sequence, etc.), or having been subject to certain treatment conditions. Target molecule and/or target nucleic acid can be associated with multiple nucleic acid barcodes to provide information about all of these features (and more). Methods of generating nucleic acid-barcodes are disclosed, for example, in International Patent Application Publication No. WO/2014/047561.

[0548] In an embodiment, compositions induce a double strand break for the purpose of inducing HDR-mediated correction. In a further embodiment, two or more guide RNAs complexing with chimeric IscB system or an ortholog or homolog thereof, may be used to induce multiplexed breaks for purpose of inducing HDR-mediated correction.

[0549] A recombination template nucleic acid, as that term is used herein, refers to a nucleic acid sequence which can be used in conjunction with compositions discloser herein to alter the structure of a target position. In an embodiment, the target nucleic acid is modified to have some or all of the sequence of the recombination template nucleic acid, typically at or near cleavage site(s). In an embodiment, the recombination template nucleic acid is single stranded. In an alternate embodiment, the recombination template nucleic acid is double stranded. In an embodiment, the recombination template nucleic acid is DNA, e.g., double stranded DNA. In an alternate embodiment, the recombination template nucleic acid is single stranded DNA.

[0550] In one embodiment, a recombination template is provided to serve as a template in homologous recombination, such as within or near a target sequence nicked or cleaved by a nucleic acid-targeting effector protein as a part of a nucleic acid-targeting complex.

[0551] A recombination template may be a component of another vector as described herein, contained in a separate vector, or provided as a separate polynucleotide. A recombination template polynucleotide may be of any suitable length, such as about or more than about 10, 15, 20, 25, 50, 75, 100, 150, 200, 500, 1000, or more nucleotides in length. In one embodiment, the recombination template polynucleotide is complementary to a portion of a polynucleotide comprising the target sequence. When optimally aligned, a recombination template polynucleotide might overlap with one or more nucleotides of a target sequences (e.g., about or more than about 1, 5, 10, 15, 20, 25, 30, 35, 40, 45, 50, 60, 70, 80, 90, 100 or more nucleotides). In one embodiment, when a recombination template sequence and a polynucleotide comprising a target sequence are optimally aligned, the nearest nucleotide of the recombination template polynucleotide is within about 1, 5, 10, 15, 20, 25, 50, 75, 100, 200, 300, 400, 500, 1000, 5000, 10000, or more nucleotides from the target sequence.

[0552] In an embodiment, the recombination template nucleic acid alters the structure of the target position by participating in homologous recombination. In an embodiment, the recombination template nucleic acid alters the sequence of the target position. In an embodiment, the recombination template nucleic acid results in the incorporation of a modified, or non-naturally occurring base into the target nucleic acid.

[0553] The recombination template sequence may undergo a breakage mediated or catalyzed recombination with the target sequence. In an embodiment, the recombination template nucleic acid may include sequence that corresponds to a site on the target sequence that is cleaved by an chimeric IscB system mediated cleavage event. In an embodiment, the recombination template nucleic acid may include sequence that corresponds to both, a first site on the target sequence that is cleaved in a first chimeric IscB system mediated event and a second site on the target sequence that is cleaved in a second chimeric IscB system mediated event.

[0554] In an embodiment, the recombination template nucleic acid can include sequence which results in an alteration in the coding sequence of a translated sequence, e.g., one which results in the substitution of one amino acid for another in a protein product, e.g., transforming a mutant allele into a wild type allele, transforming a wild type allele into a mutant allele, and/or introducing a stop codon, insertion of an amino acid residue, deletion of an amino acid residue, or a nonsense mutation. In an embodiment, the recombination template nucleic acid can include sequence which results in an alteration in a non-coding sequence, e.g., an alteration in an exon or in a 5′ or 3′ non-translated or non-transcribed region. Such alterations include an alteration in a control element, e.g., a promoter, enhancer, and an alteration in a cis-acting or trans-acting control element.

[0555] A recombination template nucleic acid having homology with a target position in a target gene may be used to alter the structure of a target sequence. The recombination template sequence may be used to alter an unwanted structure, e.g., an unwanted or mutant nucleotide. The recombination template nucleic acid may include sequence which, when integrated, results in: decreasing the activity of a positive control element; increasing the activity of a positive control element; decreasing the activity of a negative control element; increasing the activity of a negative control element; decreasing the expression of a gene; increasing the expression of a gene; increasing resistance to a disorder or disease; increasing resistance to viral entry; correcting a mutation or altering an unwanted amino acid residue conferring, increasing, abolishing or decreasing a biological property of a gene product, e.g., increasing the enzymatic activity of an enzyme, or increasing the ability of a gene product to interact with another molecule.

[0556] The recombination template nucleic acid may include sequence which results in: a change in sequence of 1, 2, 3, 4, 5, 6, 7, 8, 9, 10, 11, 12 or more nucleotides of the target sequence. In an embodiment, the recombination template nucleic acid may be 20+/−10, 30+/−10, 40+/−10, 50+/−10, 60+/−10, 70+/−10, 80+/−10, 90+/−10, 100+/−10, 110+/−10, 120+/−10, 130+/−10, 140+/−10, 150+/−10, 160+/−10, 170+/−10, 180+/−10, 190+/−10, 200+/−10, 210+/−10, of 220+/−10 nucleotides in length. In an embodiment, the t recombination template nucleic acid may be 30+/−20, 40+/−20, 50+/−20, 60+/−20, 70+/−20, 80+/−20, 90+/−20, 100+/−20, 110+/−20, 120+/−20, 130+/−20, 140+/−20, 150+/−20, 160+/−20, 170+/−20, 180+/−20, 190+/−20, 200+/−20, 210+/−20, of 220+/−20 nucleotides in length. In an embodiment, the recombination template nucleic acid is 10 to 1,000, 20 to 900, 30 to 800, 40 to 700, 50 to 600, 50 to 500, 50 to 400, 50 to 300, 50 to 200, or 50 to 100 nucleotides in length.

[0557] A recombination template nucleic acid comprises the following components: [5′ homology arm]-[replacement sequence]-[3′ homology arm]. The homology arms provide for recombination into the chromosome, thus replacing the undesired element, e.g., a mutation or signature, with the replacement sequence. In an embodiment, the homology arms flank the most distal cleavage sites. In an embodiment, the 3′ end of the 5′ homology arm is the position next to the 5′ end of the replacement sequence. In an embodiment, the 5′ homology arm can extend at least 10, 20, 30, 40, 50, 100, 200, 300, 400, 500, 600, 700, 800, 900, 1000, 1500, or 2000 nucleotides 5′ from the 5′ end of the replacement sequence. In an embodiment, the 5′ end of the 3′ homology arm is the position next to the 3′ end of the replacement sequence. In an embodiment, the 3′ homology arm can extend at least 10, 20, 30, 40, 50, 100, 200, 300, 400, 500, 600, 700, 800, 900, 1000, 1500, or 2000 nucleotides 3′ from the 3′ end of the replacement sequence.

[0558] In an embodiment, one or both homology arms may be shortened to avoid including certain sequence repeat elements. For example, a 5′ homology arm may be shortened to avoid a sequence repeat element. In other embodiments, a 3′ homology arm may be shortened to avoid a sequence repeat element. In one embodiment, both the 5′ and the 3′ homology arms may be shortened to avoid including certain sequence repeat elements.

[0559] In an embodiment, a recombination template nucleic acids for correcting a mutation may designed for use as a single-stranded oligonucleotide. When using a single-stranded oligonucleotide, 5′ and 3′ homology arms may range up to about 200 base pairs (bp) in length, e.g., at least 25, 50, 75, 100, 125, 150, 175, or 200 bp in length.

[0560] Mutating key residues in both DNA cleavage domains of the chimeric IscB system, results in the generation of a catalytically inactive chimeric IscB system. A catalytically inactive chimeric IscB system complexes with a guide RNA and localizes to the DNA sequence specified by that guide RNA's targeting domain, however, it does not cleave the target DNA. Fusion of the inactive chimeric IscB systems to an effector domain, e.g., a transcription repression domain, enables recruitment of the effector to any DNA site specified by the guide RNA. In an embodiment, chimeric IscB systems may be fused to a transcriptional repression domain and recruited to the promoter region of a gene. Especially for gene repression, it is contemplated herein that blocking the binding site of an endogenous transcription factor would aid in downregulating gene expression. In another embodiment, an inactive chimeric IscB systems can be fused to a chromatin modifying protein. Altering chromatin status can result in decreased expression of the target gene.

[0561] In an embodiment, a guide RNA molecule can be targeted to a known transcription response elements (e.g., promoters, enhancers, etc.), a known upstream activating sequences, and/or sequences of unknown or known function that are suspected of being able to control expression of the target DNA.

[0562] In some methods, a target polynucleotide can be inactivated to affect the modification of the expression in a cell. For example, upon the binding of a composition to a target sequence in a cell, the target polynucleotide is inactivated such that the sequence is not transcribed, the coded protein is not produced, or the sequence does not function as the wild-type sequence does. For example, a protein or microRNA coding sequence may be inactivated such that the protein is not produced.

### Non-Homologous End-Joining

[0563] In an embodiment, nuclease-induced non-homologous end-joining (NHEJ) can be used to target gene-specific knockouts. Nuclease-induced NHEJ can also be used to remove (e.g., delete) sequence in a gene of interest. Generally, NHEJ repairs a double-strand break in the DNA by joining together the two ends; however, generally, the original sequence is restored only if two compatible ends, exactly as they were formed by the double-strand break, are perfectly ligated. The DNA ends of the double-strand break are frequently the subject of enzymatic processing, resulting in the addition or removal of nucleotides, at one or both strands, prior to rejoining of the ends. This results in the presence of insertion and/or deletion (indel) mutations in the DNA sequence at the site of the NHEJ repair. Two-thirds of these mutations typically alter the reading frame and, therefore, produce a non-functional protein. Additionally, mutations that maintain the reading frame, but which insert or delete a significant amount of sequence, can destroy functionality of the protein. This is locus dependent as mutations in critical functional domains are likely less tolerable than mutations in non-critical regions of the protein. The indel mutations generated by NHEJ are unpredictable in nature; however, at a given break site certain indel sequences are favored and are over-represented in the population, likely due to small regions of microhomology. The lengths of deletions can vary widely; most commonly in the 1-50 bp range, but they can easily be greater than 50 bp, e.g., they can easily reach greater than about 100-200 bp. Insertions tend to be shorter and often include short duplications of the sequence immediately surrounding the break site. However, it is possible to obtain large insertions, and in these cases, the inserted sequence has often been traced to other regions of the genome or to plasmid DNA present in the cells.

[0564] Because NHEJ is a mutagenic process, it may also be used to delete small sequence motifs as long as the generation of a specific final sequence is not required. If a double-strand break is targeted near to a short target sequence, the deletion mutations caused by the NHEJ repair often span, and therefore remove, the unwanted nucleotides. For the deletion of larger DNA segments, introducing two double-strand breaks, one on each side of the sequence, can result in NHEJ between the ends with removal of the entire intervening sequence. Both of these approaches can be used to delete specific DNA sequences; however, the error-prone nature of NHEJ may still produce indel mutations at the site of repair.

[0565] Both double-strand cleaving chimeric IscB system, or an ortholog or homolog thereof, and single strand, or nickase, chimeric IscB system, or an ortholog or homolog thereof, molecules can be used in the methods and compositions described herein to generate NHEJ-mediated indels. NHEJ-mediated indels targeted to the gene, e.g., a coding region, e.g., an early coding region of a gene of interest can be used to knockout (i.e., eliminate expression of) a gene of interest. For example, early coding region of a gene of interest includes sequence immediately following a transcription start site, within a first exon of the coding sequence, or within 500 bp of the transcription start site (e.g., less than 500, 450, 400, 350, 300, 250, 200, 150, 100 or 50 bp).

[0566] In an embodiment, in which a guide RNA and chimeric IscB system, or an ortholog or homolog thereof, generate a double strand break for the purpose of inducing NHEJ-mediated indels, a guide RNA may be configured to position one double-strand break in close proximity to a nucleotide of the target position. In an embodiment, the cleavage site may be between 0-500 bp away from the target position (e.g., less than 500, 400, 300, 200, 100, 50, 40, 30, 25, 20, 15, 10, 9, 8, 7, 6, 5, 4, 3, 2 or 1 bp from the target position).

[0567] In an embodiment, in which two guide RNAs complexing with chimeric IscB system, or an ortholog or homolog thereof, e.g., IscB polypeptide nickases induce two single strand breaks for the purpose of inducing NHEJ-mediated indels, two guide RNAs may be configured to position two single-strand breaks to provide for NHEJ repair a nucleotide of the target position.

[0568] In some examples, the systems herein may introduce one or more indels via NHEJ pathway and insert sequence from a combination template via HDR.

### EXEMPLARY APPLICATIONS

[0569] The invention provides a non-naturally occurring or engineered composition, or one or more polynucleotides encoding components of said composition, or vector or delivery systems comprising one or more polynucleotides encoding components of said composition for use in a modifying a target cell in vivo, ex vivo or in vitro and, may be conducted in a manner alters the cell such that once modified the progeny or cell line of the chimeric IscB system modified cell retains the altered phenotype. The modified cells and progeny may be part of a multi-cellular organism such as a plant or animal with ex vivo or in vivo application of composition to desired cell types. The methods herein include a therapeutic method of treatment. The therapeutic method of treatment may comprise gene or genome editing, or gene therapy.

[0570] In one embodiment, one or more vectors described herein are used to produce a non-human transgenic animal or transgenic plant. In one embodiment, the transgenic animal is a mammal, such as a mouse, rat, or rabbit. Methods for producing transgenic animals and plants are known in the art, and generally begin with a method of cell transfection, such as described herein.

### Use of Orthogonal Catalytically Inactive Chimeric IscB Systems

[0571] In one embodiment, the IscB polypeptide nickase, is used in combination with an orthogonal catalytically inactive IscB polypeptide, or chimeric IscB system nuclease to increase efficiency of said nickase (e.g., as described in Chen et al. 2017, Nature Communications 8:14958; doi:10.1038/ncomms14958). More particularly, the orthogonal catalytically inactive chimeric IscB system is characterized by a different TAM recognition site than the IscB nickase used in the AD-functionalized composition and the corresponding guide sequence is selected to bind to a target sequence proximal to that of the nickase of the functionalized chimeric IscB systems. The orthogonal catalytically inactive chimeric IscB systems as used in the context of the present invention does not form part of the functionalized composition but merely functions to increase the efficiency of said nickase and is used in combination with a standard ωRNA as described in the art for said chimeric IscB systems. In one embodiment, said orthogonal catalytically inactive chimeric IscB system is a dead chimeric IscB system, i.e., comprising one or more mutations which abolishes the nuclease activity of said chimeric IscB system. In one embodiment, the catalytically inactive orthogonal chimeric IscB system is provided with two or more ωRNAs or guide RNAs which are capable of hybridizing to target sequences which are proximal to the target sequence of the nickase. In one embodiment, at least two ωRNAs are used to target said catalytically inactive chimeric IscB systems, of which at least one ωRNA or guide RNAs is capable of hybridizing to a target sequence 5″ of the target sequence of the nickase and at least one ωRNA is capable of hybridizing to a target sequence 3′ of the target sequence of the nickase of the functionalized composition, whereby said one or more target sequences may be on the same or the opposite DNA strand as the target sequence of the chimeric IscB system nickase. In one embodiment, the guide sequences for the one or more ωRNA s of the orthogonal catalytically inactive chimeric IscB systems are selected such that the target sequences are proximal to that of the ωRNA for the targeting of the functionalized composition, e.g., for the targeting of the nickase. In one embodiment, the one or more target sequences of the orthogonal catalytically inactive chimeric IscB systems are each separated from the target sequence of the nickase by more than 5 but less than 450 base pairs. Optimal distances between the target sequences of the guides for use with the orthogonal catalytically inactive chimeric IscB systems and the target sequence of the functionalized composition can be determined by the skilled person. In one embodiment, the catalytically inactive orthogonal chimeric IscB system has been modified to alter its TAM specificity as described elsewhere herein. In one embodiment, the chimeric IscB system nickase is a nickase which, by itself has limited activity in human cells, but which, in combination with an inactive orthogonal chimeric IscB system and one or more corresponding proximal guides ensures the required nickase activity.

### Detection Methods Such as FISH

[0572] In one aspect, the invention provides an engineered, non-naturally occurring composition comprising a catalytically inactivate chimeric IscB system described herein and use this system in detection methods such as fluorescence in situ hybridization (FISH). A dead chimeric IscB system which lacks the ability to produce DNA double-strand breaks may be fused with a marker, such as fluorescent protein, such as the enhanced green fluorescent protein (eEGFP) and co-expressed with small guide RNAs to target pericentric, centric and teleomeric repeats in vivo. The dead IscB polypeptide or chimeric IscB systems can be used to visualize both repetitive sequences and individual genes in the human genome. Such new applications of labelled dead chimeric IscB system may be important in imaging cells and studying the functional nuclear architecture, especially in cases with a small nucleus volume or complex 3-D structures. (Chen B, Gilbert L A, Cimini B A, Schnitzbauer J, Zhang W, Li G W, Park J, Blackburn E H, Weissman J S, Qi L S, Huang B. 2013. Dynamic imaging of genomic loci in living human cells by an optimized CRISPR/Cas system. Cell 155(7):1479-91. doi: 10.1016/j.cell.2013.12.001.)

### Patient-Specific Screening Methods

[0573] A nucleic acid-targeting system that targets DNA, e.g., trinucleotide repeats can be used to screen patients or patent samples for the presence of such repeats. The repeats can be the target of the RNA of the nucleic acid-targeting system, and if there is binding thereto by the nucleic acid-targeting system, that binding can be detected, to thereby indicate that such a repeat is present. Thus, a nucleic acid-targeting system can be used to screen patients or patient samples for the presence of the repeat. The patient can then be administered suitable compound(s) to address the condition; or can be administered a nucleic acid-targeting system to bind to and cause insertion, deletion or mutation and alleviate the condition.

### Models of Genetic and Epigenetic Conditions

[0574] A method of the invention may be used to create a plant, an animal or cell that may be used to model and/or study genetic or epigenetic conditions of interest, such as a through a model of mutations of interest or a disease model. As used herein, “disease” refers to a disease, disorder, or indication in a subject. For example, a method of the invention may be used to create an animal or cell that comprises a modification in one or more nucleic acid sequences associated with a disease, or a plant, animal or cell in which the expression of one or more nucleic acid sequences associated with a disease are altered. Such a nucleic acid sequence may encode a disease associated protein sequence or may be a disease associated control sequence. Accordingly, it is understood that in embodiments of the invention, a plant, subject, patient, organism or cell can be a non-human subject, patient, organism or cell. Thus, the invention provides a plant, animal or cell, produced by the present methods, or a progeny thereof. The progeny may be a clone of the produced plant or animal or may result from sexual reproduction by crossing with other individuals of the same species to introgress further desirable traits into their offspring. The cell may be in vivo or ex vivo in the cases of multicellular organisms, particularly animals or plants. In the instance where the cell is in cultured, a cell line may be established if appropriate culturing conditions are met and preferably if the cell is suitably adapted for this purpose (for instance a stem cell). Bacterial cell lines produced by the invention are also envisaged. Hence, cell lines are also envisaged.

[0575] In some methods, the disease model can be used to study the effects of mutations on the animal or cell and development and/or progression of the disease using measures commonly used in the study of the disease. Alternatively, such a disease model is useful for studying the effect of a pharmaceutically active compound on the disease.

[0576] In some methods, the disease model can be used to assess the efficacy of a potential gene therapy strategy. That is, a disease-associated gene or polynucleotide can be modified such that the disease development and/or progression is inhibited or reduced. In particular, the method comprises modifying a disease-associated gene or polynucleotide such that an altered protein is produced and, as a result, the animal or cell has an altered response. Accordingly, in some methods, a genetically modified animal may be compared with an animal predisposed to development of the disease such that the effect of the gene therapy event may be assessed.

[0577] In another embodiment, this invention provides a method of developing a biologically active agent that modulates a cell signaling event associated with a disease gene. The method comprises contacting a test compound with a cell comprising one or more vectors that drive expression of one or more of a chimeric IscB system, and a conserved nucleotide sequence linked to a guide sequence; and detecting a change in a readout that is indicative of a reduction or an augmentation of a cell signaling event associated with, e.g., a mutation in a disease gene contained in the cell.

[0578] A cell model or animal model can be constructed in combination with the method of the invention for screening a cellular function change. Such a model may be used to study the effects of a genome sequence modified by the complex of the invention on a cellular function of interest. For example, a cellular function model may be used to study the effect of a modified genome sequence on intracellular signaling or extracellular signaling. Alternatively, a cellular function model may be used to study the effects of a modified genome sequence on sensory perception. In some such models, one or more genome sequences associated with a signaling biochemical pathway in the model are modified.

[0579] Several disease models have been specifically investigated. These include de novo autism risk genes CHD8, KATNAL2, and SCN2A; and the syndromic autism (Angelman Syndrome) gene UBE3A. These genes and resulting autism models are of course preferred but serve to show the broad applicability of the invention across genes and corresponding models. An altered expression of one or more genome sequences associated with a signaling biochemical pathway can be determined by assaying for a difference in the mRNA levels of the corresponding genes between the test model cell and a control cell, when they are contacted with a candidate agent. Alternatively, the differential expression of the sequences associated with a signaling biochemical pathway is determined by detecting a difference in the level of the encoded polypeptide or gene product.

[0580] To assay for an agent-induced alteration in the level of mRNA transcripts or corresponding polynucleotides, nucleic acid contained in a sample is first extracted according to standard methods in the art. For instance, mRNA can be isolated using various lytic enzymes or chemical solutions according to the procedures set forth in Sambrook et al. (1989) or extracted by nucleic-acid-binding resins following the accompanying instructions provided by the manufacturers. The mRNA contained in the extracted nucleic acid sample is then detected by amplification procedures or conventional hybridization assays (e.g., Northern blot analysis) according to methods widely known in the art or based on the methods exemplified herein.

[0581] For purpose of this invention, amplification means any method employing a primer and a polymerase capable of replicating a target sequence with reasonable fidelity. Amplification may be carried out by natural or recombinant DNA polymerases such as TaqGold™, T7 DNA polymerase, Klenow fragment of E. coli DNA polymerase, and reverse transcriptase. A preferred amplification method is PCR. In particular, the isolated RNA can be subjected to a reverse transcription assay that is coupled with a quantitative polymerase chain reaction (RT-PCR) in order to quantify the expression level of a sequence associated with a signaling biochemical pathway.

[0582] Detection of the gene expression level can be conducted in real time in an amplification assay. In one aspect, the amplified products can be directly visualized with fluorescent DNA-binding agents including but not limited to DNA intercalators and DNA groove binders. Because the amount of the intercalators incorporated into the double-stranded DNA molecules is typically proportional to the amount of the amplified DNA products, one can conveniently determine the amount of the amplified products by quantifying the fluorescence of the intercalated dye using conventional optical systems in the art. DNA-binding dye suitable for this application include SYBR green, SYBR blue, DAPI, propidium iodine, Hoeste, SYBR gold, ethidium bromide, acridines, proflavine, acridine orange, acriflavine, fluorcoumanin, ellipticine, daunomycin, chloroquine, distamycin D, chromomycin, homidium, mithramycin, ruthenium polypyridyls, anthramycin, and the like.

[0583] In another aspect, other fluorescent labels such as sequence specific probes can be employed in the amplification reaction to facilitate the detection and quantification of the amplified products. Probe-based quantitative amplification relies on the sequence-specific detection of a desired amplified product. It utilizes fluorescent, target-specific probes (e.g., TaqMan® probes) resulting in increased specificity and sensitivity. Methods for performing probe-based quantitative amplification are well established in the art and are taught in U.S. Pat. No. 5,210,015.

[0584] In yet another aspect, conventional hybridization assays using hybridization probes that share sequence homology with sequences associated with a signaling biochemical pathway can be performed. Typically, probes are allowed to form stable complexes with the sequences associated with a signaling biochemical pathway contained within the biological sample derived from the test subject in a hybridization reaction. It will be appreciated by one of skill in the art that where antisense is used as the probe nucleic acid, the target polynucleotides provided in the sample are chosen to be complementary to sequences of the antisense nucleic acids. Conversely, where the nucleotide probe is a sense nucleic acid, the target polynucleotide is selected to be complementary to sequences of the sense nucleic acid.

[0585] Hybridization can be performed under conditions of various stringency. Suitable hybridization conditions for the practice of the present invention are such that the recognition interaction between the probe and sequences associated with a signaling biochemical pathway is both sufficiently specific and sufficiently stable. Conditions that increase the stringency of a hybridization reaction are widely known and published in the art. See, for example, (Sambrook, et al., (1989); Nonradioactive In Situ Hybridization Application Manual, Boehringer Mannheim, second edition). The hybridization assay can be formed using probes immobilized on any solid support, including but are not limited to nitrocellulose, glass, silicon, and a variety of gene arrays. A preferred hybridization assay is conducted on high-density gene chips as described in U.S. Pat. No. 5,445,934.

[0586] For a convenient detection of the probe-target complexes formed during the hybridization assay, the nucleotide probes are conjugated to a detectable label. Detectable labels suitable for use in the present invention include any composition detectable by photochemical, biochemical, spectroscopic, immunochemical, electrical, optical or chemical means. A wide variety of appropriate detectable labels are known in the art, which include fluorescent or chemiluminescent labels, radioactive isotope labels, enzymatic or other ligands. In preferred embodiments, one will likely desire to employ a fluorescent label or an enzyme tag, such as digoxigenin, β-galactosidase, urease, alkaline phosphatase or peroxidase, avidin/biotin complex.

[0587] The detection methods used to detect or quantify the hybridization intensity will typically depend upon the label selected above. For example, radiolabels may be detected using photographic film or a phosphoimager. Fluorescent markers may be detected and quantified using a photodetector to detect emitted light. Enzymatic labels are typically detected by providing the enzyme with a substrate and measuring the reaction product produced by the action of the enzyme on the substrate; and finally colorimetric labels are detected by simply visualizing the colored label.

[0588] An agent-induced change in expression of sequences associated with a signaling biochemical pathway can also be determined by examining the corresponding gene products. Determining the protein level typically involves a) contacting the protein contained in a biological sample with an agent that specifically bind to a protein associated with a signaling biochemical pathway; and (b) identifying any agent:protein complex so formed. In one aspect of this embodiment, the agent that specifically binds a protein associated with a signaling biochemical pathway is an antibody, preferably a monoclonal antibody.

[0589] The reaction is performed by contacting the agent with a sample of the proteins associated with a signaling biochemical pathway derived from the test samples under conditions that will allow a complex to form between the agent and the proteins associated with a signaling biochemical pathway. The formation of the complex can be detected directly or indirectly according to standard procedures in the art. In the direct detection method, the agents are supplied with a detectable label and unreacted agents may be removed from the complex; the amount of remaining label thereby indicating the amount of complex formed. For such method, it is preferable to select labels that remain attached to the agents even during stringent washing conditions. It is preferable that the label does not interfere with the binding reaction. In the alternative, an indirect detection procedure may use an agent that contains a label introduced either chemically or enzymatically. A desirable label generally does not interfere with binding or the stability of the resulting agent:polypeptide complex. However, the label is typically designed to be accessible to an antibody for an effective binding and, hence generating a detectable signal.

[0590] A wide variety of labels suitable for detecting protein levels are known in the art. Non-limiting examples include radioisotopes, enzymes, colloidal metals, fluorescent compounds, bioluminescent compounds, and chemiluminescent compounds.

[0591] The amount of agent:polypeptide complexes formed during the binding reaction can be quantified by standard quantitative assays. As illustrated above, the formation of agent:polypeptide complex can be measured directly by the amount of label remained at the site of binding. In an alternative, the protein associated with a signaling biochemical pathway is tested for its ability to compete with a labeled analog for binding sites on the specific agent. In this competitive assay, the amount of label captured is inversely proportional to the amount of protein sequences associated with a signaling biochemical pathway present in a test sample.

[0592] A number of techniques for protein analysis based on the general principles outlined above are available in the art. They include but are not limited to radioimmunoassay, ELISA (enzyme linked immunoradiometric assays), “sandwich” immunoassays, immunoradiometric assays, in situ immunoassays (using e.g., colloidal gold, enzyme or radioisotope labels), western blot analysis, immunoprecipitation assays, immunofluorescent assays, and SDS-PAGE.

[0593] Antibodies that specifically recognize or bind to proteins associated with a signaling biochemical pathway are preferable for conducting the aforementioned protein analyses. Where desired, antibodies that recognize a specific type of post-translational modifications (e.g., signaling biochemical pathway inducible modifications) can be used. Post-translational modifications include but are not limited to glycosylation, lipidation, acetylation, and phosphorylation. These antibodies may be purchased from commercial vendors. For example, anti-phosphotyrosine antibodies that specifically recognize tyrosine-phosphorylated proteins are available from a number of vendors including Invitrogen and Perkin Elmer. Anti-phosphotyrosine antibodies are particularly useful in detecting proteins that are differentially phosphorylated on their tyrosine residues in response to an ER stress. Such proteins include but are not limited to eukaryotic translation initiation factor 2 alpha (eIF-2α). Alternatively, these antibodies can be generated using conventional polyclonal or monoclonal antibody technologies by immunizing a host animal or an antibody-producing cell with a target protein that exhibits the desired post-translational modification.

### Genome Wide Knock-Out Screening

[0594] The IscB polypeptide nuclease and systems described herein can be used to perform efficient and cost effective functional genomic screens. Such screens can utilize IscB polypeptide nuclease-based genome wide libraries. Such screens and libraries can provide for determining the function of genes, cellular pathways genes are involved in, and how any alteration in gene expression can result in a particular biological process. An advantage of the present invention is that the composition avoids off-target binding and its resulting side effects. This is achieved using systems arranged to have a high degree of sequence specificity for the target DNA. In preferred embodiments of the invention, the chimeric IscB system complexes are IscB polypeptide nuclease complexes.

[0595] In embodiments of the invention, a genome wide library may comprise a plurality of IscB polypeptide nuclease guide RNAs, as described herein, comprising guide sequences that are capable of targeting a plurality of target sequences in a plurality of genomic loci in a population of eukaryotic cells. The population of cells may be a population of embryonic stem (ES) cells. The target sequence in the genomic locus may be a non-coding sequence. The non-coding sequence may be an intron, regulatory sequence, splice site, 3′ UTR, 5′ UTR, or polyadenylation signal. Gene function of one or more gene products may be altered by said targeting. The targeting may result in a knockout of gene function. The targeting of a gene product may comprise more than one guide RNA. A gene product may be targeted by 2, 3, 4, 5, 6, 7, 8, 9, or 10 guide RNAs, preferably 3 to 4 per gene. Off-target modifications may be minimized by exploiting the staggered double strand breaks generated by IscB polypeptide nuclease complexes or by utilizing methods analogous to those used in composition (See, e.g., DNA targeting specificity of RNA-guided Cas nucleases. Hsu, P., Scott, D., Weinstein, J., Ran, FA., Konermann, S., Agarwala, V., Li, Y., Fine, E., Wu, X., Shalem, O., Cradick, T J., Marraffini, LA., Bao, G., & Zhang, F. Nat Biotechnol doi:10.1038/nbt.2647 (2013)), incorporated herein by reference. The targeting may be of about 100 or more sequences. The targeting may be of about 1000 or more sequences. The targeting may be of about 20,000 or more sequences. The targeting may be of the entire genome. The targeting may be of a panel of target sequences focused on a relevant or desirable pathway. The pathway may be an immune pathway. The pathway may be a cell division pathway.

[0596] One aspect of the invention comprehends a genome wide library that may comprise a plurality of ωRNAs or guide RNAs that may comprise guide sequences that are capable of targeting a plurality of target sequences in a plurality of genomic loci, wherein said targeting results in a knockout of gene function. This library may potentially comprise ωguide RNAs that target each and every gene in the genome of an organism.

[0597] In one embodiment of the invention, the organism or subject is a eukaryote (including mammal including human) or a non-human eukaryote or a non-human animal or a non-human mammal. In one embodiment, the organism or subject is a non-human animal, and may be an arthropod, for example, an insect, or may be a nematode. In some methods of the invention the organism or subject is a plant. In some methods of the invention, the organism or subject is a mammal or a non-human mammal. A non-human mammal may be for example a rodent (preferably a mouse or a rat), an ungulate, or a primate. In some methods of the invention the organism or subject is algae, including microalgae, or is a fungus.

[0598] The knockout of gene function may comprise introducing into each cell in the population of cells a vector system of one or more vectors comprising an engineered, non-naturally occurring composition herein. The guide sequence may target a unique gene in each cell, wherein the chimeric IscB system is operably linked to a regulatory element, wherein when transcribed, the ωRNAs or guide RNA comprising the guide sequence directs sequence-specific binding of the IscB polypeptide nuclease to a target sequence in the genomic loci of the unique gene, inducing cleavage of the genomic loci by the chimeric IscB systems, and confirming different knockout mutations in a plurality of unique genes in each cell of the population of cells thereby generating a gene knockout cell library. The invention comprehends that the population of cells is a population of eukaryotic cells, and in a preferred embodiment, the population of cells is a population of embryonic stem (ES) cells.

[0599] The one or more vectors may be plasmid vectors. The vector may be a single vector comprising a chimeric IscB system, a ωRNA, and optionally, a selection marker into target cells. Not being bound by a theory, the ability to simultaneously deliver a chimeric IscB system and ωRNA through a single vector enables application to any cell type of interest, without the need to first generate cell lines that express the chimeric IscB systems. The regulatory element may be an inducible promoter. The inducible promoter may be a doxycycline inducible promoter. In some methods of the invention the expression of the guide sequence is under the control of the T7 promoter and is driven by the expression of T7 polymerase. The confirming of different knockout mutations may be by whole exome sequencing. The knockout mutation may be achieved in 100 or more unique genes. The knockout mutation may be achieved in 1000 or more unique genes. The knockout mutation may be achieved in 20,000 or more unique genes. The knockout mutation may be achieved in the entire genome. The knockout of gene function may be achieved in a plurality of unique genes which function in a particular physiological pathway or condition. The pathway or condition may be an immune pathway or condition. The pathway or condition may be a cell division pathway or condition.

[0600] Useful in the practice of the instant invention utilizing chimeric IscB system complexes are methods used in compositions and reference is made to: Genome-Scale CRISPR-Cas Knockout Screening in Human Cells. Shalem, O., Sanjana, N E., Hartenian, E., Shi, X., Scott, DA., Mikkelson, T., Heckl, D., Ebert, BL., Root, D E., Doench, J G., Zhang, F. Science December 12. (2013). [Epub ahead of print]; Published in final edited form as: Science. 2014 Jan. 3; 343(6166): 84-87. Shalem et al. involves a new way to interrogate gene function on a genome-wide scale. Their studies showed that delivery of a genome-scale CRISPR-Cas knockout (GeCKO) library targeted 18,080 genes with 64,751 unique guide sequences enabled both negative and positive selection screening in human cells. First, the authors showed use of the GeCKO library to identify genes essential for cell viability in cancer and pluripotent stem cells. Next, in a melanoma model, the authors screened for genes whose loss is involved in resistance to vemurafenib, a therapeutic that inhibits mutant protein kinase BRAF. Their studies showed that the highest-ranking candidates included previously validated genes NF1 and MED12 as well as novel hitsNF2, CUL3, TADA2B, and TADA1. The authors observed a high level of consistency between independent guide RNAs targeting the same gene and a high rate of hit confirmation, and thus demonstrated the promise of genome-scale screening with IscB polypeptide nuclease.

[0601] Reference is also made to US patent publication number US20140357530; and PCT Patent Publication WO2014093701, hereby incorporated herein by reference. Reference is also made to NIH Press Release of Oct. 22, 2015 entitled, “Researchers identify potential alternative to CRISPR-Cas genome editing tools: New Cas enzymes shed light on evolution of CRISPR-Cas systems, which is incorporated by reference.

### Functional Alteration and Screening

[0602] In another aspect, the present invention provides for a method of functional evaluation and screening of genes. The use of the compositions to precisely deliver functional domains, to activate or repress genes or to alter epigenetic state by precisely altering the methylation site on a specific locus of interest, can be with one or more ωRNAs or guide RNAs applied to a single cell or population of cells or with a library applied to genome in a pool of cells ex vivo or in vivo comprising the administration or expression of a library comprising a plurality of ωRNA s (comprising guide molecules) and wherein the screening further comprises use of a chimeric IscB systems, wherein the complex comprising the chimeric IscB system is modified to comprise a heterologous functional domain. In an aspect the invention provides a method for screening a genome comprising the administration to a host or expression in a host in vivo of a library. In an aspect the invention provides a method as herein discussed further comprising an activator administered to the host or expressed in the host. In an aspect the invention provides a method as herein discussed wherein the activator is attached to a chimeric IscB system. In an aspect the invention provides a method as herein discussed wherein the activator is attached to the N terminus or the C terminus of the chimeric IscB systems. In an aspect the invention provides a method as herein discussed wherein the activator is attached to a ωRNA loop. In an aspect the invention provides a method as herein discussed further comprising a repressor administered to the host or expressed in the host. In an aspect the invention provides a method as herein discussed, wherein the screening comprises affecting and detecting gene activation, gene inhibition, or cleavage in the locus.

[0603] It is also preferred to target endogenous (regulatory) control elements (such as enhancers and silencers) e.g. in addition to a promoter or promoter-proximal elements. Thus, the invention can also be used to target endogenous control elements (including enhancers and silencers) in addition to targeting of the promoter. These control elements can be located upstream and downstream of the transcriptional start site (TSS), starting from 200 bp from the TSS to 100 kb away. Targeting of known control elements can be used to activate or repress the gene of interest. In some cases, a single control element can influence the transcription of multiple target genes. Targeting of a single control element could therefore be used to control the transcription of multiple genes simultaneously.

[0604] Targeting of putative control elements on the other hand (e.g., by tiling the region of the putative control element as well as 200 bp up to 100 kB around the element) can be used as a means to verify such elements (by measuring the transcription of the gene of interest) or to detect novel control elements (e.g., by tiling 100 kb upstream and downstream of the TSS of the gene of interest). In addition, targeting of putative control elements can be useful in the context of understanding genetic causes of disease. Many mutations and common SNP variants associated with disease phenotypes are located outside coding regions. Targeting of such regions with either the activation or repression systems described herein can be followed by readout of transcription of either a) a set of putative targets (e.g., a set of genes located in closest proximity to the control element) or b) whole-transcriptome readout by e.g., RNAseq or microarray. This would allow for the identification of likely candidate genes involved in the disease phenotype. Such candidate genes could be useful as novel drug targets.

[0605] Histone acetyltransferase (HAT) inhibitors are mentioned herein. However, an alternative In one embodiment is for the one or more functional domains to comprise an acetyltransferase, preferably a histone acetyltransferase. These are useful in the field of epigenomics, for example in methods of interrogating the epigenome. Methods of interrogating the epigenome may include, for example, targeting epigenomic sequences. Targeting epigenomic sequences may include the guide being directed to an epigenomic target sequence. Epigenomic target sequence may include, in one embodiment, include a promoter, silencer or an enhancer sequence.

### Saturating Mutagenesis

[0606] The compositions herein can be used to perform saturating or deep scanning mutagenesis of genomic loci in conjunction with a cellular phenotype—for instance, for determining critical minimal features and discrete vulnerabilities of functional elements required for gene expression, drug resistance, and reversal of disease. By saturating or deep scanning mutagenesis is meant that every or essentially every DNA base is cut within the genomic loci. A library of Cas1 effector protein guide RNAs may be introduced into a population of cells. The library may be introduced, such that each cell receives a single ωRNA. In the case where the library is introduced by transduction of a viral vector, as described herein, a low multiplicity of infection (MOI) is used. The library may include ωRNAs targeting every sequence upstream of a TAM sequence in a genomic locus. The library may include at least 100 non-overlapping genomic sequences upstream of a TAM sequence for every 1000 base pairs within the genomic locus. The library may include ωRNAs targeting sequences upstream of at least one different TAM sequence. The composition may include more than one chimeric IscB system. Any chimeric IscB systems as described herein, including orthologues or engineered chimeric IscB systems that recognize different TAM sequences may be used. The frequency of off target sites for a ωRNA may be less than 500. Off target scores may be generated to select ωRNAs with the lowest off target sites. Any phenotype determined to be associated with cutting at a ωRNA target site may be confirmed by using ωRNAs targeting the same site in a single experiment. Validation of a target site may also be performed by using a modified chimeric IscB system, as described herein, and two ωRNAs targeting the genomic site of interest. Not being bound by a theory, a target site is a true hit if the change in phenotype is observed in validation experiments.

[0607] The genomic loci may include at least one continuous genomic region. The at least one continuous genomic region may comprise up to the entire genome. The at least one continuous genomic region may comprise a functional element of the genome. The functional element may be within a non-coding region, coding gene, intronic region, promoter, or enhancer. The at least one continuous genomic region may comprise at least 1 kb, preferably at least 50 kb of genomic DNA. The at least one continuous genomic region may comprise a transcription factor binding site. The at least one continuous genomic region may comprise a region of DNase I hypersensitivity. The at least one continuous genomic region may comprise a transcription enhancer or repressor element. The at least one continuous genomic region may comprise a site enriched for an epigenetic signature. The at least one continuous genomic DNA region may comprise an epigenetic insulator. The at least one continuous genomic region may comprise two or more continuous genomic regions that physically interact. Genomic regions that interact may be determined by ‘4C technology’. 4C technology allows the screening of the entire genome in an unbiased manner for DNA segments that physically interact with a DNA fragment of choice, as is described in Zhao et al. ((2006) Nat Genet 38, 1341-7) and in U.S. Pat. No. 8,642,295, both incorporated herein by reference in its entirety. The epigenetic signature may be histone acetylation, histone methylation, histone ubiquitination, histone phosphorylation, DNA methylation, or a lack thereof.

[0608] The compositions for saturating or deep scanning mutagenesis can be used in a population of cells. The compositions can be used in eukaryotic cells, including but not limited to mammalian and plant cells. The population of cells may be prokaryotic cells. The population of eukaryotic cells may be a population of embryonic stem (ES) cells, neuronal cells, epithelial cells, immune cells, endocrine cells, muscle cells, erythrocytes, lymphocytes, plant cells, or yeast cells.

[0609] In one aspect, the present invention provides for a method of screening for functional elements associated with a change in a phenotype. The library may be introduced into a population of cells that are adapted to contain a chimeric IscB system. The cells may be sorted into at least two groups based on the phenotype. The phenotype may be expression of a gene, cell growth, or cell viability. The relative representation of the ωRNAs or guide RNAs present in each group are determined, whereby genomic sites associated with the change in phenotype are determined by the representation of ωRNAs or guide RNAs present in each group. The change in phenotype may be a change in expression of a gene of interest. The gene of interest may be upregulated, downregulated, or knocked out. The cells may be sorted into a high expression group and a low expression group. The population of cells may include a reporter construct that is used to determine the phenotype. The reporter construct may include a detectable marker. Cells may be sorted by use of the detectable marker.

[0610] In another aspect, the present invention provides for a method of screening for genomic sites associated with resistance to a chemical compound. The chemical compound may be a drug or pesticide. The library may be introduced into a population of cells that are adapted to contain a chimeric IscB system, wherein each cell of the population contains no more than one ωRNA or guide RNA; the population of cells are treated with the chemical compound; and the representation of ωRNA or guide RNAs are determined after treatment with the chemical compound at a later time point as compared to an early time point, whereby genomic sites associated with resistance to the chemical compound are determined by enrichment of ωRNAs. Representation of ωRNAs may be determined by deep sequencing methods.

[0611] Useful in the practice of the instant invention utilizing compositions are methods used in compositions and reference is made to the article entitled BCL11A enhancer dissection by Cas-mediated in situ saturating mutagenesis. Canver, M. C., Smith, E. C., Sher, F., Pinello, L., Sanjana, N. E., Shalem, O., Chen, D. D., Schupp, P. G., Vinjamur, D. S., Garcia, S. P., Luc, S., Kurita, R., Nakamura, Y., Fujiwara, Y., Maeda, T., Yuan, G., Zhang, F., Orkin, S. H., & Bauer, D. E. DOI:10.1038/nature15521, published online Sep. 16, 2015, the article is herein incorporated by reference and discussed briefly below:

[0612] Canver et al. involves novel pooled guide RNA libraries to perform in situ saturating mutagenesis of the human and mouse BCL11A erythroid enhancers previously identified as an enhancer associated with fetal hemoglobin (HbF) level and whose mouse ortholog is necessary for erythroid BCL11A expression. This approach revealed critical minimal features and discrete vulnerabilities of these enhancers. Through editing of primary human progenitors and mouse transgenesis, the authors validated the BCL11A erythroid enhancer as a target for HbF reinduction. The authors generated a detailed enhancer map that informs therapeutic genome editing.

### Modification of a Cell or Organism

[0613] The present disclosure further provides cells comprising one or more components of the systems herein, e.g., the chimeric IscB system(s) and/or ωRNA(s). Also provided include cells modified by the systems and methods herein, and cell cultures, tissues, organs, organism comprising such cells or progeny thereof. The invention In one embodiment comprehends a method of modifying a cell or organism. The cell may be a prokaryotic cell or a eukaryotic cell. The cell may be a mammalian cell. The mammalian cell many be a non-human primate, bovine, porcine, rodent or mouse cell. The cell may be a non-mammalian eukaryotic cell such as poultry, fish or shrimp. The cell may also be a plant cell. The plant cell may be of a crop plant such as cassava, corn, sorghum, wheat, or rice. The plant cell may also be of an algae, tree or vegetable. The modification introduced to the cell by the present invention may be such that the cell and progeny of the cell are altered for improved production of biologic products such as an antibody, starch, alcohol or other desired cellular output. The modification introduced to the cell by the present invention may be such that the cell and progeny of the cell include an alteration that changes the biologic product produced.

### Therapeutic Uses and Methods of Treatment

[0614] Also provided herein are methods of diagnosing, prognosing, treating, and/or preventing a disease, state, or condition in or of a subject. Generally, the methods of diagnosing, prognosing, treating, and/or preventing a disease, state, or condition in or of a subject can include modifying a polynucleotide in a subject or cell thereof using a composition, system, or component thereof described herein and/or include detecting a diseased or healthy polynucleotide in a subject or cell thereof using a composition, system, or component thereof described herein. In one embodiment, the method of treatment or prevention can include using a composition, system, or component thereof to modify a polynucleotide of an infectious organism (e.g., bacterial or virus) within a subject or cell thereof. In one embodiment, the method of treatment or prevention can include using a composition, system, or component thereof to modify a polynucleotide of an infectious organism or symbiotic organism within a subject. The composition, system, and components thereof can be used to develop models of diseases, states, or conditions. The composition, system, and components thereof can be used to detect a disease state or correction thereof, such as by a method of treatment or prevention described herein. The composition, system, and components thereof can be used to screen and select cells that can be used, for example, as treatments or preventions described herein. The composition, system, and components thereof can be used to develop biologically active agents that can be used to modify one or more biologic functions or activities in a subject or a cell thereof.

[0615] In general, the method can include delivering a composition, system, and/or component thereof to a subject or cell thereof, or to an infectious or symbiotic organism by a suitable delivery technique and/or composition. Once administered the components can operate as described elsewhere herein to elicit a nucleic acid modification event. In some aspects, the nucleic acid modification event can occur at the genomic, epigenomic, and/or transcriptomic level. DNA and/or RNA cleavage, gene activation, and/or gene deactivation can occur. Additional features, uses, and advantages are described in greater detail below. On the basis of this concept, several variations are appropriate to elicit a genomic locus event, including DNA cleavage, gene activation, or gene deactivation. Using the provided compositions, the person skilled in the art can advantageously and specifically target single or multiple loci with the same or different functional domains to elicit one or more genomic locus events. In addition to treating and/or preventing a disease in a subject, the compositions may be applied in a wide variety of methods for screening in libraries in cells and functional modeling in vivo (e.g., gene activation of lincRNA and identification of function; gain-of-function modeling; loss-of-function modeling; the use the compositions of the invention to establish cell lines and transgenic animals for optimization and screening purposes).

[0616] The composition, system, and components thereof described elsewhere herein can be used to treat and/or prevent a disease, such as a genetic and/or epigenetic disease, in a subject. The composition, system, and components thereof described elsewhere herein can be used to treat and/or prevent genetic infectious diseases in a subject, such as bacterial infections, viral infections, fungal infections, parasite infections, and combinations thereof. The composition, system, and components thereof described elsewhere herein can be used to modify the composition or profile of a microbiome in a subject, which can in turn modify the health status of the subject. The composition, system, described herein can be used to modify cells ex vivo, which can then be administered to the subject whereby the modified cells can treat or prevent a disease or symptom thereof. This is also referred to in some contexts as adoptive therapy. The composition, system, described herein can be used to treat mitochondrial diseases, where the mitochondrial disease etiology involves a mutation in the mitochondrial DNA.

[0617] Also provided is a method of treating a subject, e.g., a subject in need thereof, comprising inducing gene editing by transforming the subject with the polynucleotide encoding one or more components of the composition, system, or complex or any of polynucleotides or vectors described herein and administering them to the subject. A suitable repair template may also be provided, for example delivered by a vector comprising said repair template. The repair template may be a recombination template herein. Also provided is a method of treating a subject, e.g., a subject in need thereof, comprising inducing transcriptional activation or repression of multiple target gene loci by transforming the subject with the polynucleotides or vectors described herein, wherein said polynucleotide or vector encodes or comprises one or more components of composition, system, complex or component thereof comprising multiple chimeric IscB systems. Where any treatment is occurring ex vivo, for example in a cell culture, then it will be appreciated that the term ‘subject’ may be replaced by the phrase “cell or cell culture.”

[0618] Also provided is a method of treating a subject, e.g., a subject in need thereof, comprising inducing gene editing by transforming the subject with the chimeric IscB system(s), advantageously encoding and expressing in vivo the remaining portions of the composition, system, (e.g., RNA, guides). A suitable repair template may also be provided, for example delivered by a vector comprising said repair template. Also provided is a method of treating a subject, e.g., a subject in need thereof, comprising inducing transcriptional activation or repression by transforming the subject with the chimeric IscB system(s) advantageously encoding and expressing in vivo the remaining portions of the composition, system, (e.g., RNA, guides); advantageously. In one embodiment, the chimeric IscB system is a catalytically inactive chimeric IscB system and includes one or more associated functional domains. Where any treatment is occurring ex vivo, for example in a cell culture, then it will be appreciated that the term ‘subject’ may be replaced by the phrase “cell or cell culture.”

[0619] One or more components of the composition and system described herein can be included in a composition, such as a pharmaceutical composition, and administered to a host individually or collectively. Alternatively, these components may be provided in a single composition for administration to a host. Administration to a host may be performed via viral vectors known to the skilled person or described herein for delivery to a host (e.g., lentiviral vector, adenoviral vector, AAV vector). As explained herein, use of different selection markers (e.g., for lentiviral ωRNA selection) and concentration of ωRNA (e.g. dependent on whether multiple ωRNAs are used) may be advantageous for eliciting an improved effect.

[0620] Thus, also described herein are methods of inducing one or more polynucleotide modifications in a eukaryotic or prokaryotic cell or component thereof (e.g., a mitochondria) of a subject, infectious organism, and/or organism of the microbiome of the subject. The modification can include the introduction, deletion, or substitution of one or more nucleotides at a target sequence of a polynucleotide of one or more cell(s). The modification can occur in vitro, ex vivo, in situ, or in vivo.

[0621] In one embodiment, the method of treating or inhibiting a condition or a disease caused by one or more mutations in a genomic locus in a eukaryotic organism or a non-human organism can include manipulation of a target sequence within a coding, non-coding or regulatory element of said genomic locus in a target sequence in a subject or a non-human subject in need thereof comprising modifying the subject or a non-human subject by manipulation of the target sequence and wherein the condition or disease is susceptible to treatment or inhibition by manipulation of the target sequence including providing treatment comprising delivering a composition comprising the particle delivery system or the delivery system or the virus particle of any one of the above embodiment or the cell of any one of the above embodiment.

[0622] Also provided herein is the use of the particle delivery system or the delivery system or the virus particle of any one of the above embodiments or the cell of any one of the above embodiment in ex vivo or in vivo gene or genome editing; or for use in in vitro, ex vivo or in vivo gene therapy. Also provided herein are particle delivery systems, non-viral delivery systems, and/or the virus particle of any one of the above embodiments or the cell of any one of the above embodiments used in the manufacture of a medicament for in vitro, ex vivo or in vivo gene or genome editing or for use in in vitro, ex vivo or in vivo gene therapy or for use in a method of modifying an organism or a non-human organism by manipulation of a target sequence in a genomic locus associated with a disease or in a method of treating or inhibiting a condition or disease caused by one or more mutations in a genomic locus in a eukaryotic organism or a non-human organism.

[0623] In one embodiment, polynucleotide modification can include the introduction, deletion, or substitution of 1-75 nucleotides at each target sequence of said polynucleotide of said cell(s). The modification can include the introduction, deletion, or substitution of at least 1, 5, 10, 11, 12, 13, 14, 15, 16, 17, 18, 19, 20, 21, 22, 23, 24, 25, 26, 27, 28, 29, 30, 35, 40, 45, 50, or 75 nucleotides at each target sequence. The modification can include the introduction, deletion, or substitution of at least 5, 10, 11, 12, 13, 14, 15, 16, 17, 18, 19, 20, 21, 22, 23, 24, 25, 26, 27, 28, 29, 30, 35, 40, 45, 50, or 75 nucleotides at each target sequence of said cell(s). The modification can include the introduction, deletion, or substitution of at least 10, 11, 12, 13, 14, 15, 16, 17, 18, 19, 20, 21, 22, 23, 24, 25, 26, 27, 28, 29, 30, 35, 40, 45, 50, or 75 nucleotides at each target sequence of said cell(s). The modification can include the introduction, deletion, or substitution of at least 20, 21, 22, 23, 24, 25, 26, 27, 28, 29, 30, 35, 40, 45, 50, or 75 nucleotides at each target sequence of said cell(s). The modification can include the introduction, deletion, or substitution of at least 40, 45, 50, 75, 100, 200, 300, 400 or 500 nucleotides at each target sequence of said cell(s). The modification can include the introduction, deletion, or substitution of at least 500, 600, 700, 800, 900, 1000, 1100, 1200, 1300, 1400, 1500, 1600, 1700, 1800, 1900, 2000, 2100, 2200, 2300, 2400, 2500, 2600, 2700, 2800, 2900, 3000, 3100, 3200, 3300, 3400, 3500, 3600, 3700, 3800, 3900, 4000, 4100, 4200, 4300, 4400, 4500, 4600, 4700, 4800, 4900, 5000, 5100, 5200, 5300, 5400, 5500, 5600, 5700, 5800, 5900, 6000, 6100, 6200, 6300, 6400, 6500, 6600, 6700, 6800, 6900, 7000, 7100, 7200, 7300, 7400, 7500, 7600, 7700, 7800, 7900, 8000, 8100, 8200, 8300, 8400, 8500, 8600, 8700, 8800, 8900, 9000, 9100, 9200, 9300, 9400, 9500, 9600, 9700, 9800, or 9900 to 10000 nucleotides at each target sequence of said cell(s).

[0624] In one embodiment, the modifications can include the introduction, deletion, or substitution of nucleotides at each target sequence of said cell(s) via nucleic acid components (e.g., guide(s) RNA(s) or ωRNA(s)), such as those mediated by a composition, system, or a component thereof described elsewhere herein. In one embodiment, the modifications can include the introduction, deletion, or substitution of nucleotides at a target or random sequence of said cell(s) via a composition, system, or technique.

[0625] In one embodiment, the composition, system, or component thereof can promote Non-Homologous End-Joining (NHEJ). In one embodiment, modification of a polynucleotide by a composition, system, or a component thereof, such as a diseased polynucleotide, can include NHEJ. In one embodiment, promotion of this repair pathway by the composition, system, or a component thereof can be used to target gene or polynucleotide specific knock-outs and/or knock-ins. In one embodiment, promotion of this repair pathway by the composition, system, or a component thereof can be used to generate NHEJ-mediated indels. Nuclease-induced NHEJ can also be used to remove (e.g., delete) sequence in a gene of interest. Generally, NHEJ repairs a double-strand break in the DNA by joining together the two ends; however, generally, the original sequence is restored only if two compatible ends, exactly as they were formed by the double-strand break, are perfectly ligated. The DNA ends of the double-strand break are frequently the subject of enzymatic processing, resulting in the addition or removal of nucleotides, at one or both strands, prior to rejoining of the ends. This results in the presence of insertion and/or deletion (indel) mutations in the DNA sequence at the site of the NHEJ repair. The indel can range in size from 1-50 or more base pairs. In one embodiment the indel can be 1, 2, 3, 4, 5, 6, 7, 8, 9, 10, 11, 12, 13, 14, 15, 16, 17, 18, 19, 20, 21, 22, 23, 24, 25, 26, 27, 28, 29, 30, 31, 32, 33, 34, 35, 36, 37, 38, 39, 40, 41, 42, 43, 44, 45, 46, 47, 48, 49, 50, 51, 52, 53, 54, 55, 56, 57, 58, 59, 60, 61, 62, 63, 64, 65, 66, 67, 68, 69, 70, 71, 72, 73, 74, 75, 76, 77, 78, 79, 80, 81, 82, 83, 84, 85, 86, 87, 88, 89, 90, 91, 92, 93, 94, 95, 96, 97, 98, 99, 100, 101, 102, 103, 104, 105, 106, 107, 108, 109, 110, 111, 112, 113, 114, 115, 116, 117, 118, 119, 120, 121, 122, 123, 124, 125, 126, 127, 128, 129, 130, 131, 132, 133, 134, 135, 136, 137, 138, 139, 140, 141, 142, 143, 144, 145, 146, 147, 148, 149, 150, 151, 152, 153, 154, 155, 156, 157, 158, 159, 160, 161, 162, 163, 164, 165, 166, 167, 168, 169, 170, 171, 172, 173, 174, 175, 176, 177, 178, 179, 180, 181, 182, 183, 184, 185, 186, 187, 188, 189, 190, 191, 192, 193, 194, 195, 196, 197, 198, 199, 200, 201, 202, 203, 204, 205, 206, 207, 208, 209, 210, 211, 212, 213, 214, 215, 216, 217, 218, 219, 220, 221, 222, 223, 224, 225, 226, 227, 228, 229, 230, 231, 232, 233, 234, 235, 236, 237, 238, 239, 240, 241, 242, 243, 244, 245, 246, 247, 248, 249, 250, 251, 252, 253, 254, 255, 256, 257, 258, 259, 260, 261, 262, 263, 264, 265, 266, 267, 268, 269, 270, 271, 272, 273, 274, 275, 276, 277, 278, 279, 280, 281, 282, 283, 284, 285, 286, 287, 288, 289, 290, 291, 292, 293, 294, 295, 296, 297, 298, 299, 300, 301, 302, 303, 304, 305, 306, 307, 308, 309, 310, 311, 312, 313, 314, 315, 316, 317, 318, 319, 320, 321, 322, 323, 324, 325, 326, 327, 328, 329, 330, 331, 332, 333, 334, 335, 336, 337, 338, 339, 340, 341, 342, 343, 344, 345, 346, 347, 348, 349, 350, 351, 352, 353, 354, 355, 356, 357, 358, 359, 360, 361, 362, 363, 364, 365, 366, 367, 368, 369, 370, 371, 372, 373, 374, 375, 376, 377, 378, 379, 380, 381, 382, 383, 384, 385, 386, 387, 388, 389, 390, 391, 392, 393, 394, 395, 396, 397, 398, 399, 400, 401, 402, 403, 404, 405, 406, 407, 408, 409, 410, 411, 412, 413, 414, 415, 416, 417, 418, 419, 420, 421, 422, 423, 424, 425, 426, 427, 428, 429, 430, 431, 432, 433, 434, 435, 436, 437, 438, 439, 440, 441, 442, 443, 444, 445, 446, 447, 448, 449, 450, 451, 452, 453, 454, 455, 456, 457, 458, 459, 460, 461, 462, 463, 464, 465, 466, 467, 468, 469, 470, 471, 472, 473, 474, 475, 476, 477, 478, 479, 480, 481, 482, 483, 484, 485, 486, 487, 488, 489, 490, 491, 492, 493, 494, 495, 496, 497, 498, 499, or 500 base pairs or more. If a double-strand break is targeted near to a short target sequence, the deletion mutations caused by the NHEJ repair often span, and therefore remove, the unwanted nucleotides. For the deletion of larger DNA segments, introducing two double-strand breaks, one on each side of the sequence, can result in NHEJ between the ends with removal of the entire intervening sequence. Both of these approaches can be used to delete specific DNA sequences.

[0626] In one embodiment, composition, system, mediated NHEJ can be used in the method to delete small sequence motifs. In one embodiment, composition, system, mediated NHEJ can be used in the method to generate NHEJ-mediate indels that can be targeted to the gene, e.g., a coding region, e.g., an early coding region of a gene of interest can be used to knockout (i.e., eliminate expression of) a gene of interest. For example, early coding region of a gene of interest includes sequence immediately following a transcription start site, within a first exon of the coding sequence, or within 500 bp of the transcription start site (e.g., less than 500, 450, 400, 350, 300, 250, 200, 150, 100 or 50 bp). In an embodiment, in which a ωRNA or guide RNA and chimeric IscB system generate a double strand break for the purpose of inducing NHEJ-mediated indels, a ωRNA or guide RNA may be configured to position one double-strand break in close proximity to a nucleotide of the target position. In an embodiment, the cleavage site may be between 0-500 bp away from the target position (e.g., less than 500, 400, 300, 200, 100, 50, 40, 30, 25, 20, 15, 10, 9, 8, 7, 6, 5, 4, 3, 2 or 1 bp from the target position). In an embodiment, in which two ωRNA or guide RNAs complexing with one or more nickases induce two single strand breaks for the purpose of inducing NHEJ-mediated indels, two guide RNAs may be configured to position two single-strand breaks to provide for NHEJ repair a nucleotide of the target position.

[0627] For minimization of toxicity and off-target effect, it may be important to control the concentration of chimeric IscB system mRNA and guide RNA delivered. Optimal concentrations of chimeric IscB system mRNA and guide RNA can be determined by testing different concentrations in a cellular or non-human eukaryote animal model and using deep sequencing the analyze the extent of modification at potential off-target genomic loci. Alternatively, to minimize the level of toxicity and off-target effect, nickase mRNA (for example S. pyogenes Cas9 with the D10A mutation) can be delivered with a pair of guide RNAs targeting a site of interest. Guide sequences and strategies to minimize toxicity and off-target effects can be as in International Patent Publication No. WO 2014/093622 (PCT/US2013/074667); or, via mutation. Others are as described elsewhere herein.

[0628] Typically, in the context of an endogenous chimeric IscB system, formation of a chimeric IscB system or complex (comprising a guide sequence hybridized to a target sequence and complexed with one or more chimeric IscB systems) results in cleavage, nicking, and/or another modification of one or both strands in or near (e.g. within 1, 2, 3, 4, 5, 6, 7, 8, 9, 10, 20, 50, or more base pairs from) the target sequence.

[0629] In one embodiment, a method of modifying a target polynucleotide in a cell to treat or prevent a disease can include allowing a composition, system, or component thereof to bind to the target polynucleotide, e.g., to effect cleavage, nicking, or other modification as the composition, system, is capable of said target polynucleotide, thereby modifying the target polynucleotide, wherein the composition, system, or component thereof, complex with a guide sequence, and hybridize said guide sequence to a target sequence within the target polynucleotide, wherein said guide sequence is optionally linked to a ωRNA scaffold sequence. In some of these embodiments, the composition, system, or component thereof can be or include a chimeric IscB system complexed with a guide sequence. In one embodiment, modification can include cleaving or nicking one or two strands at the location of the target sequence by one or more components of the composition, system, or component thereof.

[0630] The cleavage, nicking, or other modification capable of being performed by the composition, system, can modify transcription of a target polynucleotide. In one embodiment, modification of transcription can include decreasing transcription of a target polynucleotide. In one embodiment, modification can include increasing transcription of a target polynucleotide. In one embodiment, the method includes repairing said cleaved target polynucleotide by homologous recombination with a recombination template polynucleotide, wherein said repair results in a modification such as, but not limited to, an insertion, deletion, or substitution of one or more nucleotides of said target polynucleotide. In one embodiment, said modification results in one or more amino acid changes in a protein expressed from a gene comprising the target sequence. In one embodiment, the modification imparted by the composition, system, or component thereof provides a transcript and/or protein that can correct a disease or a symptom thereof, including but not limited to, any of those described in greater detail elsewhere herein.

[0631] In one embodiment, the method of treating or preventing a disease can include delivering one or more vectors or vector systems to a cell, such as a eukaryotic or prokaryotic cell, wherein one or more vectors or vector systems include the composition, system, or component thereof. In one embodiment, the vector(s) or vector system(s) can be a viral vector or vector system, such as an AAV or lentiviral vector system, which are described in greater detail elsewhere herein. In one embodiment, the method of treating or preventing a disease can include delivering one or more viral particles, such as an AAV or lentiviral particle, containing the composition, system, or component thereof. In one embodiment, the viral particle has a tissue specific tropism. In one embodiment, the viral particle has a liver, muscle, eye, heart, pancreas, kidney, neuron, epithelial cell, endothelial cell, astrocyte, glial cell, immune cell, or red blood cell specific tropism.

[0632] It will be understood that the composition and system, according to the invention as described herein, such as the composition and system, for use in the methods according to the invention as described herein, may be suitably used for any type of application known for composition, system, preferably in eukaryotes. In certain aspects, the application is therapeutic, preferably therapeutic in a eukaryote organism, such as including but not limited to animals (including human), plants, algae, fungi (including yeasts), etc. Alternatively, or in addition, in certain aspects, the application may involve accomplishing or inducing one or more particular traits or characteristics, such as genotypic and/or phenotypic traits or characteristics, as also described elsewhere herein.

### Treating Diseases of the Circulatory System

[0633] In one embodiment, the composition, system, and/or component thereof described herein can be used to treat and/or prevent a circulatory system disease. Exemplary disease is provided, for example, in Table 6. In one embodiment the plasma exosomes of Wahlgren et al. (Nucleic Acids Research, 2012, Vol. 40, No. 17 e130) can be used to deliver the composition, system, and/or component thereof described herein to the blood. In one embodiment, the circulatory system disease can be treated by using a lentivirus to deliver the composition, system, described herein to modify hematopoietic stem cells (HSCs) in vivo or ex vivo (see e.g. Drakopoulou, “Review Article, The Ongoing Challenge of Hematopoietic Stem Cell-Based Gene Therapy for β-Thalassemia,” Stem Cells International, Volume 2011, Article ID 987980, 10 pages, doi:10.4061/2011/987980, which can be adapted for use with the composition, system, herein in view of the description herein). In one embodiment, the circulatory system disorder can be treated by correcting HSCs as to the disease using a composition, system, herein or a component thereof, wherein the composition, system, optionally includes a suitable HDR repair template (see e.g. Cavazzana, “Outcomes of Gene Therapy for β-Thalassemia Major via Transplantation of Autologous Hematopoietic Stem Cells Transduced Ex Vivo with a Lentiviral PA-T87Q-Globin Vector.”; Cavazzana-Calvo, “Transfusion independence and HMGA2 activation after gene therapy of human β-thalassaemia”, Nature 467, 318-322 (16 Sep. 2010) doi:10.1038/nature09328; Nienhuis, “Development of Gene Therapy for Thalassemia, Cold Spring Harbor Perspectives in Medicine, doi: 10.1101/cshperspect.a011833 (2012), LentiGlobin BB305, a lentiviral vector containing an engineered β-globin gene (PA-T87Q); and Xie et al., “Seamless gene correction of β-thalassaemia mutations in patient-specific iPSCs using CRISPR/Cas9 and piggyback” Genome Research gr.173427.114 (2014) www.genome.org/cgi/doi/10.1101/gr.173427.114 (Cold Spring Harbor Laboratory Press; [1599] Watts, “Hematopoietic Stem Cell Expansion and Gene Therapy” Cytotherapy 13(10):1164-1171. doi:10.3109/14653249.2011.620748 (2011), which can be adapted for use with the composition, system, herein in view of the description herein). In one embodiment, iPSCs can be modified using a composition, system, described herein to correct a disease polynucleotide associated with a circulatory disease. In this regard, the teachings of Xu et al. (Sci Rep. 2015 Jul. 9; 5:12065. doi: 10.1038/srep12065) and Song et al. (Stem Cells Dev. 2015 May 1; 24(9):1053-65. doi: 10.1089/scd.2014.0347. Epub 2015 Feb. 5) with respect to modifying iPSCs can be adapted for use in view of the description herein with the composition, system, described herein.

[0634] The term “Hematopoietic Stem Cell” or “HSC” refers broadly those cells considered to be an HSC, e.g., blood cells that give rise to all the other blood cells and are derived from mesoderm; located in the red bone marrow, which is contained in the core of most bones. HSCs of the invention include cells having a phenotype of hematopoietic stem cells, identified by small size, lack of lineage (lin) markers, and markers that belong to the cluster of differentiation series, like: CD34, CD38, CD90, CD133, CD105, CD45, and also c-kit,—the receptor for stem cell factor. Hematopoietic stem cells are negative for the markers that are used for detection of lineage commitment, and are, thus, called Lin-; and, during their purification by FACS, a number of up to 14 different mature blood-lineage markers, e.g., CD13 & CD33 for myeloid, CD71 for erythroid, CD19 for B cells, CD61 for megakaryocytic, etc. for humans; and, B220 (murine CD45) for B cells, Mac-1 (CD11b/CD18) for monocytes, Gr-1 for Granulocytes, Ter119 for erythroid cells, I17Ra, CD3, CD4, CD5, CD8 for T cells, etc. Mouse HSC markers: CD34lo/−, SCA-1+, Thy1.1+/lo, CD38+, C-kit+, lin−, and Human HSC markers: CD34+, CD59+, Thy1/CD90+, CD38lo/−, C-kit/CD117+, and lin−. HSCs are identified by markers. Hence in embodiments discussed herein, the HSCs can be CD34+ cells. HSCs can also be hematopoietic stem cells that are CD34−/CD38−. Stem cells that may lack c-kit on the cell surface that are considered in the art as HSCs are within the ambit of the invention, as well as CD133+ cells likewise considered HSCs in the art.

[0635] In one embodiment, the treatment or prevention for treating a circulatory system or blood disease can include modifying a human cord blood cell with any modification described herein. In one embodiment, the treatment or prevention for treating a circulatory system or blood disease can include modifying a granulocyte colony-stimulating factor-mobilized peripheral blood cell (mPB) with any modification described herein. In one embodiment, the human cord blood cell or mPB can be CD34+. In one embodiment, the cord blood cell(s) or mPB cell(s) modified can be autologous. In one embodiment, the cord blood cell(s) or mPB cell(s) can be allogenic. In addition to the modification of the disease gene(s), allogenic cells can be further modified using the composition, system, described herein to reduce the immunogenicity of the cells when delivered to the recipient. Such techniques are described elsewhere herein and e.g., Cartier, “MINI-SYMPOSIUM: X-Linked Adrenoleukodystrophypa, Hematopoietic Stem Cell Transplantation and Hematopoietic Stem Cell Gene Therapy in X-Linked Adrenoleukodystrophy,” Brain Pathology 20 (2010) 857-862, which can be adapted for use with the composition, system, herein. The modified cord blood cell(s) or mPB cell(s) can be optionally expanded in vitro. The modified cord blood cell(s) or mPB cell(s) can be derived to a subject in need thereof using any suitable delivery technique.

[0636] The compositions may be engineered to target genetic locus or loci in HSCs. In one embodiment, the chimeric IscB system(s) can be codon-optimized for a eukaryotic cell and especially a mammalian cell, e.g., a human cell, for instance, HSC, or iPSC and ωRNA targeting a locus or loci in HSC, such as circulatory disease, can be prepared. These may be delivered via particles. The particles may be formed by the chimeric IscB system and the ωRNA being admixed. The ωRNA and chimeric IscB system mixture can be, for example, admixed with a mixture comprising or consisting essentially of or consisting of surfactant, phospholipid, biodegradable polymer, lipoprotein and alcohol, whereby particles containing the ωRNA and chimeric IscB systems may be formed. The invention comprehends so making particles and particles from such a method as well as uses thereof. Particles suitable delivery of the composition in the context of blood or circulatory system or HSC delivery to the blood or circulatory system are described in greater detail elsewhere herein.

[0637] In one embodiment, after ex vivo modification the HSCs or iPCS can be expanded prior to administration to the subject. Expansion of HSCs can be via any suitable method such as that described by, Lee, “Improved ex vivo expansion of adult hematopoietic stem cells by overcoming CUL4-mediated degradation of HOXB4.” Blood. 2013 May 16; 121(20):4082-9. doi: 10.1182/blood-2012-09-455204. Epub 2013 Mar. 21.

[0638] In one embodiment, the HSCs or iPSCs modified can be autologous. In one embodiment, the HSCs or iPSCs can be allogenic. In addition to the modification of the disease gene(s), allogenic cells can be further modified using the composition, system, described herein to reduce the immunogenicity of the cells when delivered to the recipient. Such techniques are described elsewhere herein and e.g., Cartier, “MINI-SYMPOSIUM: X-Linked Adrenoleukodystrophypa, Hematopoietic Stem Cell Transplantation and Hematopoietic Stem Cell Gene Therapy in X-Linked Adrenoleukodystrophy,” Brain Pathology 20 (2010) 857-862, which can be adapted for use with the composition, system, herein.

### Treating Neurological Diseases

[0639] In one embodiment, the compositions, systems, described herein can be used to treat diseases of the brain and CNS. Delivery options for the brain include encapsulation of chimeric IscB system and guide RNA in the form of either DNA or RNA into liposomes and conjugating to molecular Trojan horses for trans-blood brain barrier (BBB) delivery. Molecular Trojan horses have been shown to be effective for delivery of B-gal expression vectors into the brain of non-human primates. The same approach can be used to delivery vectors containing chimeric IscB system and guide RNA. For instance, Xia C F and Boado R J, Pardridge W M (“Antibody-mediated targeting of siRNA via the human insulin receptor using avidin-biotin technology.” Mol Pharm. 2009 May-June; 6(3):747-51. doi: 10.1021/mp800194) describes how delivery of short interfering RNA (siRNA) to cells in culture, and in vivo, is possible with combined use of a receptor-specific monoclonal antibody (mAb) and avidin-biotin technology. The authors also report that because the bond between the targeting mAb and the siRNA is stable with avidin-biotin technology, and RNAi effects at distant sites such as brain are observed in vivo following an intravenous administration of the targeted siRNA, the teachings of which can be adapted for use with the compositions, systems, herein. In other embodiments, an artificial virus can be generated for CNS and/or brain delivery. See e.g., Zhang et al. (Mol Ther. 2003 January; 7(1):11-8.)), the teachings of which can be adapted for use with the compositions, systems, herein.

### Treating Hearing Diseases

[0640] In one embodiment the composition and system described herein can be used to treat a hearing disease or hearing loss in one or both ears. Deafness is often caused by lost or damaged hair cells that cannot relay signals to auditory neurons. In such cases, cochlear implants may be used to respond to sound and transmit electrical signals to the nerve cells. But these neurons often degenerate and retract from the cochlea as fewer growth factors are released by impaired hair cells.

[0641] In one embodiment, the composition, system, or modified cells can be delivered to one or both ears for treating or preventing hearing disease or loss by any suitable method or technique. Suitable methods and techniques include, but are not limited to, those set forth in US Patent Publication No. 20120328580 describes injection of a pharmaceutical composition into the ear (e.g., auricular administration), such as into the luminae of the cochlea (e.g., the Scala media, Sc vestibulae, and Sc tympani), e.g., using a syringe, e.g., a single-dose syringe. For example, one or more of the compounds described herein can be administered by intratympanic injection (e.g., into the middle ear), and/or injections into the outer, middle, and/or inner ear; administration in situ, via a catheter or pump (see e.g. McKenna et al., (U.S. Patent Publication No. 2006/0030837) and Jacobsen et al., (U.S. Pat. No. 7,206,639); administration in combination with a mechanical device such as a cochlear implant or a hearing aid, which is worn in the outer ear (see e.g. U.S. Patent Publication No. 2007/0093878, which provides an exemplary cochlear implant suitable for delivery of the compositions, systems, described herein to the ear). Such methods are routinely used in the art, for example, for the administration of steroids and antibiotics into human ears. Injection can be, for example, through the round window of the ear or through the cochlear capsule. Other inner ear administration methods are known in the art (see, e.g., Salt and Plontke, Drug Discovery Today, 10:1299-1306, 2005). In one embodiment, a catheter or pump can be positioned, e.g., in the ear (e.g., the outer, middle, and/or inner ear) of a patient during a surgical procedure. In one embodiment, a catheter or pump can be positioned, e.g., in the ear (e.g., the outer, middle, and/or inner ear) of a patient without the need for a surgical procedure.

[0642] In general, the cell therapy methods described in US Patent Publication No. 20120328580 can be used to promote complete or partial differentiation of a cell to or towards a mature cell type of the inner ear (e.g., a hair cell) in vitro. Cells resulting from such methods can then be transplanted or implanted into a patient in need of such treatment. The cell culture methods required to practice these methods, including methods for identifying and selecting suitable cell types, methods for promoting complete or partial differentiation of selected cells, methods for identifying complete or partially differentiated cell types, and methods for implanting complete or partially differentiated cells are described below.

[0643] Cells suitable for use in the present invention include, but are not limited to, cells that are capable of differentiating completely or partially into a mature cell of the inner ear, e.g., a hair cell (e.g., an inner and/or outer hair cell), when contacted, e.g., in vitro, with one or more of the compounds described herein. Exemplary cells that are capable of differentiating into a hair cell include, but are not limited to stem cells (e.g., inner ear stem cells, adult stem cells, bone marrow derived stem cells, embryonic stem cells, mesenchymal stem cells, skin stem cells, iPS cells, and fat derived stem cells), progenitor cells (e.g., inner ear progenitor cells), support cells (e.g., Deiters' cells, pillar cells, inner phalangeal cells, tectal cells and Hensen's cells), and/or germ cells. The use of stem cells for the replacement of inner ear sensory cells is described in Li et al., (U.S. Patent Publication No. 2005/0287127) and Li et al., (U.S. patent application Ser. No. 11/953,797). The use of bone marrow derived stem cells for the replacement of inner ear sensory cells is described in Edge et al., PCT/US2007/084654. iPS cells are described, e.g., at Takahashi et al., Cell, Volume 131, Issue 5, Pages 861-872 (2007); Takahashi and Yamanaka, Cell 126, 663-76 (2006); Okita et al., Nature 448, 260-262 (2007); Yu, J. et al., Science 318(5858):1917-1920 (2007); Nakagawa et al., Nat. Biotechnol. 26:101-106 (2008); and Zaehres and Scholer, Cell 131(5):834-835 (2007). Such suitable cells can be identified by analyzing (e.g., qualitatively or quantitatively) the presence of one or more tissue specific genes. For example, gene expression can be detected by detecting the protein product of one or more tissue-specific genes. Protein detection techniques involve staining proteins (e.g., using cell extracts or whole cells) using antibodies against the appropriate antigen. In this case, the appropriate antigen is the protein product of the tissue-specific gene expression. Although, in principle, a first antibody (i.e., the antibody that binds the antigen) can be labeled, it is more common (and improves the visualization) to use a second antibody directed against the first (e.g., an anti-IgG). This second antibody is conjugated either with fluorochromes, or appropriate enzymes for colorimetric reactions, or gold beads (for electron microscopy), or with the biotin-avidin system, so that the location of the primary antibody, and thus the antigen, can be recognized.

[0644] The composition and system may be delivered to the ear by direct application of pharmaceutical composition to the outer ear, with compositions modified from US Patent Publication No. 20110142917. In one embodiment the pharmaceutical composition is applied to the ear canal. Delivery to the ear may also be referred to as aural or otic delivery.

[0645] In one embodiment, the compositions, systems, or components thereof and/or vectors or vector systems can be delivered to ear via a transfection to the inner ear through the intact round window by a novel proteidic delivery technology which may be applied to the nucleic acid-targeting system of the present invention (see, e.g., Qi et al., Gene Therapy (2013), 1-9). About 40 μl of 10 mM RNA may be contemplated as the dosage for administration to the ear.

[0646] According to Rejali et al. (Hear Res. 2007 June; 228(1-2):180-7), cochlear implant function can be improved by good preservation of the spiral ganglion neurons, which are the target of electrical stimulation by the implant and brain derived neurotrophic factor (BDNF) has previously been shown to enhance spiral ganglion survival in experimentally deafened ears. Rejali et al. tested a modified design of the cochlear implant electrode that includes a coating of fibroblast cells transduced by a viral vector with a BDNF gene insert. To accomplish this type of ex vivo gene transfer, Rejali et al. transduced guinea pig fibroblasts with an adenovirus with a BDNF gene cassette insert and determined that these cells secreted BDNF and then attached BDNF-secreting cells to the cochlear implant electrode via an agarose gel, and implanted the electrode in the scala tympani. Rejali et al. determined that the BDNF expressing electrodes were able to preserve significantly more spiral ganglion neurons in the basal turns of the cochlea after 48 days of implantation when compared to control electrodes and demonstrated the feasibility of combining cochlear implant therapy with ex vivo gene transfer for enhancing spiral ganglion neuron survival. Such a system may be applied to the nucleic acid-targeting system of the present invention for delivery to the ear.

[0647] In one embodiment, the system set forth in Mukherjea et al. (Antioxidants & Redox Signaling, Volume 13, Number 5, 2010) can be adapted for transtympanic administration of the composition, system, or component thereof to the ear. In one embodiment, a dosage of about 2 mg to about 4 mg of chimeric IscB systems for administration to a human.

[0648] In one embodiment, the system set forth in [Jung et al. (Molecular Therapy, vol. 21 no. 4, 834-841 April 2013) can be adapted for vestibular epithelial delivery of the composition, system, or component thereof to the ear. In one embodiment, a dosage of about 1 to about 30 mg of chimeric IscB system for administration to a human.

### Treating Diseases in Non-Dividing Cells

[0649] In one embodiment, the gene or transcript to be corrected is in a non-dividing cell. Exemplary non-dividing cells are muscle cells or neurons. Non-dividing (especially non-dividing, fully differentiated) cell types present issues for gene targeting or genome engineering, for example because homologous recombination (HR) is generally suppressed in the G1 cell-cycle phase. However, while studying the mechanisms by which cells control normal DNA repair systems, Durocher discovered a previously unknown switch that keeps HR “off” in non-dividing cells and devised a strategy to toggle this switch back on. Orthwein et al. (Daniel Durocher's lab at the Mount Sinai Hospital in Ottawa, Canada) recently reported (Nature 16142, published online 9 Dec. 2015) have shown that the suppression of HR can be lifted and gene targeting successfully concluded in both kidney (293T) and osteosarcoma (U20S) cells. Tumor suppressors, BRCA1, PALB2 and BRAC2 are known to promote DNA DSB repair by HR. They found that formation of a complex of BRCA1 with PALB2-BRAC2 is governed by a ubiquitin site on PALB2, such that action on the site by an E3 ubiquitin ligase. This E3 ubiquitin ligase is composed of KEAP1 (a PALB2-interacting protein) in complex with cullin-3 (CUL3)-RBX1. PALB2 ubiquitylation suppresses its interaction with BRCA1 and is counteracted by the deubiquitylase USP11, which is itself under cell cycle control. Restoration of the BRCA1-PALB2 interaction combined with the activation of DNA-end resection is sufficient to induce homologous recombination in G1, as measured by a number of methods including a chimeric IscB system-based gene-targeting assay directed at USP11 or KEAP1 (expressed from a pX459 vector). However, when the BRCA1-PALB2 interaction was restored in resection-competent G1 cells using either KEAP1 depletion or expression of the PALB2-KR mutant, a robust increase in gene-targeting events was detected. These teachings can be adapted for and/or applied to the compositions, systems, described herein.

[0650] Thus, reactivation of HR in cells, especially non-dividing, fully differentiated cell types is preferred, In one embodiment. In one embodiment, promotion of the BRCA1-PALB2 interaction is preferred In one embodiment. In one embodiment, the target ell is a non-dividing cell. In one embodiment, the target cell is a neuron or muscle cell. In one embodiment, the target cell is targeted in vivo. In one embodiment, the cell is in G1 and HR is suppressed. In one embodiment, use of KEAP1 depletion, for example inhibition of expression of KEAP1 activity, is preferred. KEAP1 depletion may be achieved through siRNA, for example as shown in Orthwein et al. Alternatively, expression of the PALB2-KR mutant (lacking all eight Lys residues in the BRCA1-interaction domain is preferred, either in combination with KEAP1 depletion or alone. PALB2-KR interacts with BRCA1 irrespective of cell cycle position. Thus, promotion or restoration of the BRCA1-PALB2 interaction, especially in G1 cells, is preferred In one embodiment, especially where the target cells are non-dividing, or where removal and return (ex vivo gene targeting) is problematic, for example neuron or muscle cells. KEAP1 siRNA is available from ThermoFischer. In one embodiment, a BRCA1-PALB2 complex may be delivered to the G1 cell. In one embodiment, PALB2 deubiquitylation may be promoted for example by increased expression of the deubiquitylase USP11, so it is envisaged that a construct may be provided to promote or up-regulate expression or activity of the deubiquitylase USP11.

### Treating Diseases of the Eye

[0651] In one embodiment, the disease to be treated is a disease that affects the eyes. Thus, In one embodiment, the composition, system, or component thereof described herein is delivered to one or both eyes.

[0652] The composition, system, can be used to correct ocular defects that arise from several genetic mutations further described in Genetic Diseases of the Eye, Second Edition, edited by Elias I. Traboulsi, Oxford University Press, 2012.

[0653] In one embodiment, the condition to be treated or targeted is an eye disorder. In one embodiment, the eye disorder may include glaucoma. In one embodiment, the eye disorder includes a retinal degenerative disease. In one embodiment, the retinal degenerative disease is selected from Stargardt disease, Bardet-Biedl Syndrome, Best disease, Blue Cone Monochromacy, Choroidermia, Cone-rod dystrophy, Congenital Stationary Night Blindness, Enhanced S-Cone Syndrome, Juvenile X-Linked Retinoschisis, Leber Congenital Amaurosis, Malattia Leventinesse, Norrie Disease or X-linked Familial Exudative Vitreoretinopathy, Pattern Dystrophy, Sorsby Dystrophy, Usher Syndrome, Retinitis Pigmentosa, Achromatopsia or Macular dystrophies or degeneration, Retinitis Pigmentosa, Achromatopsia, and age related macular degeneration. In one embodiment, the retinal degenerative disease is Leber Congenital Amaurosis (LCA) or Retinitis Pigmentosa. Other exemplary eye diseases are described in greater detail elsewhere herein.

[0654] In one embodiment, the composition, system, is delivered to the eye, optionally via intravitreal injection or subretinal injection. Intraocular injections may be performed with the aid of an operating microscope. For subretinal and intravitreal injections, eyes may be prolapsed by gentle digital pressure and fundi visualized using a contact lens system consisting of a drop of a coupling medium solution on the cornea covered with a glass microscope slide coverslip. For subretinal injections, the tip of a 10-mm 34-gauge needle, mounted on a 5 μl Hamilton syringe may be advanced under direct visualization through the superior equatorial sclera tangentially towards the posterior pole until the aperture of the needle was visible in the subretinal space. Then, 2 μl of vector suspension may be injected to produce a superior bullous retinal detachment, thus confirming subretinal vector administration. This approach creates a self-sealing sclerotomy allowing the vector suspension to be retained in the subretinal space until it is absorbed by the RPE, usually within 48 h of the procedure. This procedure may be repeated in the inferior hemisphere to produce an inferior retinal detachment. This technique results in the exposure of approximately 70% of neurosensory retina and RPE to the vector suspension. For intravitreal injections, the needle tip may be advanced through the sclera 1 mm posterior to the corneoscleral limbus and 2 μl of vector suspension injected into the vitreous cavity. For intracameral injections, the needle tip may be advanced through a corneoscleral limbal paracentesis, directed towards the central cornea, and 2 μl of vector suspension may be injected. For intracameral injections, the needle tip may be advanced through a corneoscleral limbal paracentesis, directed towards the central cornea, and 2 μl of vector suspension may be injected. These vectors may be injected at titers of either 1.0-1.4×10 m¹⁰ or 1.0-1.4×10⁹ transducing units (TU)/ml.

[0655] In one embodiment, for administration to the eye, lentiviral vectors. In one embodiment, the lentiviral vector is an equine infectious anemia virus (EIAV) vector. Exemplary EIAV vectors for eye delivery are described in Balagaan, J Gene Med 2006; 8: 275-285, Published online 21 Nov. 2005 in Wiley InterScience (www.interscience.wiley.com). DOI: 10.1002/jgm.845; Binley et al., HUMAN GENE THERAPY 23:980-991 (September 2012), which can be adapted for use with the composition, system, described herein. In one embodiment, the dosage can be 1.1×10⁵ transducing units per eye (TU/eye) in a total volume of 100 μl.

[0656] Other viral vectors can also be used for delivery to the eye, such as AAV vectors, such as those described in Campochiaro et al., Human Gene Therapy 17:167-176 (February 2006), Millington-Ward et al. (Molecular Therapy, vol. 19 no. 4, 642-649 April 2011; Dalkara et al. (Sci Transl Med 5, 189ra76 (2013)), which can be adapted for use with the composition, system, described herein. In one embodiment, the dose can range from about 10⁶ to 10^{9.5} particle units. In the context of the Millington-Ward AAV vectors, a dose of about 2×10¹¹ to about 6×10¹³ virus particles can be administered. In the context of Dalkara vectors, a dose of about 1×10¹⁵ to about 1×10¹⁶ vg/ml administered to a human.

[0657] In one embodiment, the sd-rxRNA® system of RXi Pharmaceuticals may be used/and or adapted for delivering composition, system, to the eye. In this system, a single intravitreal administration of 3 g of sd-rxRNA results in sequence-specific reduction of PPIB mRNA levels for 14 days. The sd-rxRNA® system may be applied to the nucleic acid-targeting system of the present invention, contemplating a dose of about 3 to 20 mg of composition administered to a human.

[0658] In other embodiments, the methods of US Patent Publication No. 20130183282, which is directed to methods of cleaving a target sequence from the human rhodopsin gene, may also be modified to the nucleic acid-targeting system of the present invention.

[0659] In other embodiments, the methods of US Patent Publication No. 20130202678 for treating retinopathies and sight-threatening ophthalmologic disorders relating to delivering of the Puf-A gene (which is expressed in retinal ganglion and pigmented cells of eye tissues and displays a unique anti-apoptotic activity) to the sub-retinal or intravitreal space in the eye may be used or adapted. In particular, desirable targets are zgc:193933, prdm1a, spata2, tex10, rbb4, ddx3, zp2.2, Blimp-1 and HtrA2, all of which may be targeted by the composition, system, of the present invention.

[0660] Wu (Cell Stem Cell, 13:659-62, 2013) designed a guide RNA that led Cas9 to a single base pair mutation that causes cataracts in mice, where it induced DNA cleavage. Then using either the other wild-type allele or oligos given to the zygotes repair mechanisms corrected the sequence of the broken allele and corrected the cataract-causing genetic defect in mutant mouse. This approach can be adapted to and/or applied to the compositions, systems, described herein.

[0661] US Patent Publication No. 20120159653, describes use of zinc finger nucleases to genetically modify cells, animals and proteins associated with macular degeneration (MD), the teachings of which can be applied to and/or adapted for the compositions, systems, described herein.

[0662] One aspect of US Patent Publication No. 20120159653 relates to editing of any chromosomal sequences that encode proteins associated with MD which may be applied to the nucleic acid-targeting system of the present invention.

### Treating Muscle Diseases and Cardiovascular Diseases

[0663] In one embodiment, the composition, system can be used to treat and/or prevent a muscle disease and associated circulatory or cardiovascular disease or disorder. The present invention also contemplates delivering the composition, system, described herein, e.g., IscB polypeptide or chimeric IscB systems, to the heart. For the heart, a myocardium tropic adeno-associated virus (AAVM) is preferred, in particular AAVM41 which showed preferential gene transfer in the heart (see, e.g., Lin-Yanga et al., PNAS, Mar. 10, 2009, vol. 106, no. 10). Administration may be systemic or local. A dosage of about 1-10×10¹⁴ vector genomes are contemplated for systemic administration. See also, e.g., Eulalio et al. (2012) Nature 492: 376 and Somasuntharam et al. (2013) Biomaterials 34: 7790, the teachings of which can be adapted for and/or applied to the compositions, systems, described herein.

[0664] For example, US Patent Publication No. 20110023139, the teachings of which can be adapted for and/or applied to the compositions, systems, described herein describes use of zinc finger nucleases to genetically modify cells, animals and proteins associated with cardiovascular disease. Cardiovascular diseases generally include high blood pressure, heart attacks, heart failure, and stroke and TIA. Any chromosomal sequence involved in cardiovascular disease, or the protein encoded by any chromosomal sequence involved in cardiovascular disease, may be utilized in the methods described in this disclosure. The cardiovascular-related proteins are typically selected based on an experimental association of the cardiovascular-related protein to the development of cardiovascular disease. For example, the production rate or circulating concentration of a cardiovascular-related protein may be elevated or depressed in a population having a cardiovascular disorder relative to a population lacking the cardiovascular disorder. Differences in protein levels may be assessed using proteomic techniques including but not limited to Western blot, immunohistochemical staining, enzyme linked immunosorbent assay (ELISA), and mass spectrometry. Alternatively, the cardiovascular-related proteins may be identified by obtaining gene expression profiles of the genes encoding the proteins using genomic techniques including but not limited to DNA microarray analysis, serial analysis of gene expression (SAGE), and quantitative real-time polymerase chain reaction (Q-PCR).

[0665] The compositions, systems, herein can be used for treating diseases of the muscular system. The present invention also contemplates delivering the composition, system, described herein, effector protein systems, to muscle(s).

[0666] In one embodiment, the muscle disease to be treated is a muscle dystrophy such as DMD. In one embodiment, the composition, system, such as a system capable of RNA modification, described herein can be used to achieve exon skipping to achieve correction of the diseased gene. As used herein, the term “exon skipping” refers to the modification of pre-mRNA splicing by the targeting of splice donor and/or acceptor sites within a pre-mRNA with one or more complementary antisense oligonucleotide(s) (AONs). By blocking access of a spliceosome to one or more splice donor or acceptor site, an AON may prevent a splicing reaction thereby causing the deletion of one or more exons from a fully-processed mRNA. Exon skipping may be achieved in the nucleus during the maturation process of pre-mRNAs. In some examples, exon skipping may include the masking of key sequences involved in the splicing of targeted exons by using a composition, system, described herein capable of RNA modification. In one embodiment, exon skipping can be achieved in dystrophin mRNA. In one embodiment, the composition, system, can induce exon skipping at exon 1, 2, 3, 4, 5, 6, 7, 8, 10, 11, 12, 13, 14, 15, 16, 17, 18, 19, 20, 21, 22, 23, 24, 25, 26, 27, 28, 29, 30, 31, 32, 33, 34, 45, 36, 37, 38, 39, 40, 41, 42, 43, 44, 45, 46, 47, 48, 49, 50, 51, 52, 53, 54, 55, 56, 57, 58, 59, 60, 61, 62, 63, 64, 65, 66, 67, 68, 69, 70, 71, 72, 73, 74, 75, 76, 77, 78, 79, or any combination thereof of the dystrophin mRNA. In one embodiment, the composition, system, can induce exon skipping at exon 43, 44, 50, 51, 52, 55, or any combination thereof of the dystrophin mRNA. Mutations in these exons, can also be corrected using non-exon skipping polynucleotide modification methods.

[0667] In one embodiment, for treatment of a muscle disease, the method of Bortolanza et al. Molecular Therapy vol. 19 no. 11, 2055-264 November 2011) may be applied to an AAV expressing chimeric IscB systems and injected into humans at a dosage of about 2×10¹⁵ or 2×10¹⁶ vg of vector. The teachings of Bortolanza et al., can be adapted for and/or applied to the compositions, systems, described herein.

[0668] In one embodiment, the method of Dumonceaux et al. (Molecular Therapy vol. 18 no. 5, 881-887 May 2010) may be applied to an AAV expressing chimeric IscB systems and injected into humans, for example, at a dosage of about 10¹⁴ to about 10¹⁵ vg of vector. The teachings of Dumonceaux described herein can be adapted for and/or applied to the compositions, systems, described herein.

[0669] In one embodiment, the method of Kinouchi et al. (Gene Therapy (2008) 15, 1126-1130) may be applied to compositions described herein and injected into a human, for example, at a dosage of about 500 to 1000 ml of a 40 μM solution into the muscle.

[0670] In one embodiment, the method of Hagstrom et al. (Molecular Therapy Vol. 10, No. 2, August 2004) can be adapted for and/or applied to the compositions, systems, herein and injected at a dose of about 15 to about 50 mg into the great saphenous vein of a human.

[0671] In one embodiment, the method comprises treating a sickle cell related disease, e.g., sickle cell trait, sickle cell disease such as sickle cell anemia, β-thalassaemia. For example, the method and system may be used to modify the genome of the sickle cell, e.g., by correcting one or more mutations of the β-globin gene. In the case of β-thalassaemia, sickle cell anemia can be corrected by modifying HSCs with the systems. The system allows the specific editing of the cell's genome by cutting its DNA and then letting it repair itself. The chimeric IscB system is inserted and directed by a RNA guide to the mutated point and then it cuts the DNA at that point. Simultaneously, a healthy version of the sequence is inserted. This sequence is used by the cell's own repair system to fix the induced cut. In this way, the chimeric IscB system allows the correction of the mutation in the previously obtained stem cells. The methods and systems may be used to correct HSCs as to sickle cell anemia using a systems that targets and corrects the mutation (e.g., with a suitable HDR template that delivers a coding sequence for β-globin, advantageously non-sickling β-globin); specifically, the guide RNA can target mutation that give rise to sickle cell anemia, and the HDR can provide coding for proper expression of β-globin. An ωRNA or guide RNA that targets the mutation-and-chimeric IscB system containing particle is contacted with HSCs carrying the mutation. The particle also can contain a suitable HDR template to correct the mutation for proper expression of β-globin; or the HSC can be contacted with a second particle or a vector that contains or delivers the HDR template. The so contacted cells can be administered; and optionally treated/expanded; cf. Cartier. The HDR template can provide for the HSC to express an engineered β-globin gene (e.g., PA-T87Q), or β-globin.

### Treating Diseases of the Liver and Kidney

[0672] In one embodiment, the composition, system, or component thereof described herein can be used to treat a disease of the kidney or liver. Thus, in one embodiment, delivery of the composition or component thereof described herein is to the liver or kidney.

[0673] Delivery strategies to induce cellular uptake of the therapeutic nucleic acid include physical force or vector systems such as viral-, lipid- or complex-based delivery, or nanocarriers. From the initial applications with less possible clinical relevance, when nucleic acids were addressed to renal cells with hydrodynamic high-pressure injection systemically, a wide range of gene therapeutic viral and non-viral carriers have been applied already to target posttranscriptional events in different animal kidney disease models in vivo (Csaba Revesz and Peter Hamar (2011). Delivery Methods to Target RNAs in the Kidney, Gene Therapy Applications, Prof Chunsheng Kang (Ed.), ISBN: 978-953-307-541-9, InTech, Available from: www.intechopen.com/books/gene-therapy-applications/delivery-methods-to-target-rnas-inthe-kidney). Delivery methods to the kidney may include those in Yuan et al. (Am J Physiol Renal Physiol 295: F605-F617, 2008). The method of Yuang et al. may be applied to the composition of the present invention contemplating a 1-2 g subcutaneous injection of chimeric IscB system conjugated with cholesterol to a human for delivery to the kidneys. In one embodiment, the method of Molitoris et al. (J Am Soc Nephrol 20: 1754-1764, 2009) can be adapted to the composition and a cumulative dose of 12-20 mg/kg to a human can be used for delivery to the proximal tubule cells of the kidneys. In one embodiment, the methods of Thompson et al. (Nucleic Acid Therapeutics, Volume 22, Number 4, 2012) can be adapted to the compositions and a dose of up to 25 mg/kg can be delivered via i.v. administration. In one embodiment, the method of Shimizu et al. (J Am Soc Nephrol 21: 622-633, 2010) can be adapted to the compositions and a dose of about of 10-20 mol compositions complexed with nanocarriers in about 1-2 liters of a physiologic fluid for i.p. administration can be used.

[0674] Other various delivery vehicles can be used to deliver the composition, system to the kidney such as viral, hydrodynamic, lipid, polymer nanoparticles, aptamers and various combinations thereof (see e.g. Larson et al., Surgery, (August 2007), Vol. 142, No. 2, pp. (262-269); Hamar et al., Proc Natl Acad Sci, (October 2004), Vol. 101, No. 41, pp. (14883-14888); Zheng et al., Am J Pathol, (October 2008), Vol. 173, No. 4, pp. (973-980); Feng et al., Transplantation, (May 2009), Vol. 87, No. 9, pp. (1283-1289); Q. Zhang et al., PloS ONE, (July 2010), Vol. 5, No. 7, e11709, pp. (1-13); Kushibikia et al., J Controlled Release, (July 2005), Vol. 105, No. 3, pp. (318-331); Wang et al., Gene Therapy, (July 2006), Vol. 13, No. 14, pp. (1097-1103); Kobayashi et al., Journal of Pharmacology and Experimental Therapeutics, (February 2004), Vol. 308, No. 2, pp. (688-693); Wolfrum et al., Nature Biotechnology, (September 2007), Vol. 25, No. 10, pp. (1149-1157); Molitoris et al., J Am Soc Nephrol, (August 2009), Vol. 20, No. 8 pp. (1754-1764); Mikhaylova et al., Cancer Gene Therapy, (March 2011), Vol. 16, No. 3, pp. (217-226); Y. Zhang et al., J Am Soc Nephrol, (April 2006), Vol. 17, No. 4, pp. (1090-1101); Singhal et al., Cancer Res, (May 2009), Vol. 69, No. 10, pp. (4244-4251); Malek et al., Toxicology and Applied Pharmacology, (April 2009), Vol. 236, No. 1, pp. (97-108); Shimizu et al., J Am Soc Nephrology, (April 2010), Vol. 21, No. 4, pp. (622-633); Jiang et al., Molecular Pharmaceutics, (May-June 2009), Vol. 6, No. 3, pp. (727-737); Cao et al, J Controlled Release, (June 2010), Vol. 144, No. 2, pp. (203-212); Ninichuk et al., Am J Pathol, (March 2008), Vol. 172, No. 3, pp. (628-637); Purschke et al., Proc Natl Acad Sci, (March 2006), Vol. 103, No. 13, pp. (5173-5178).

[0675] In one embodiment, delivery is to liver cells. In one embodiment, the liver cell is a hepatocyte. Delivery of the composition and system herein may be via viral vectors, especially AAV (and in particular AAV2/6) vectors. These can be administered by intravenous injection. A preferred target for the liver, whether in vitro or in vivo, is the albumin gene. This is a so-called ‘safe harbor” as albumin is expressed at very high levels and so some reduction in the production of albumin following successful gene editing is tolerated. It is also preferred as the high levels of expression seen from the albumin promoter/enhancer allows for useful levels of correct or transgene production (from the inserted recombination template) to be achieved even if only a small fraction of hepatocytes are edited. See sites identified by Wechsler et al. (reported at the 57th Annual Meeting and Exposition of the American Society of Hematology—abstract available online at ash.confex.com/ash/2015/webprogram/Paper86495.html and presented on 6th December 2015) which can be adapted for use with the compositions, systems, herein.

[0676] Exemplary liver and kidney diseases that can be treated and/or prevented are described elsewhere herein.

### Treating Epithelial and Lung Diseases

[0677] In one embodiment, the disease treated or prevented by the composition and system described herein can be a lung or epithelial disease. The compositions and systems described herein can be used for treating epithelial and/or lung diseases. The present invention also contemplates delivering the composition, system, described herein, to one or both lungs.

[0678] In one embodiment, as viral vector can be used to deliver the composition, system, or component thereof to the lungs. In one embodiment, the AAV is an AAV-1, AAV-2, AAV-5, AAV-6, and/or AAV-9 for delivery to the lungs (see, e.g., Li et al., Molecular Therapy, vol. 17 no. 12, 2067-277 December 2009). In one embodiment, the MOI can vary from 1×10³ to 4×10⁵ vector genomes/cell. In one embodiment, the delivery vector can be an RSV vector as in Zamora et al. (Am J Respir Crit Care Med Vol 183. pp 531-538, 2011. The method of Zamora et al. may be applied to the nucleic acid-targeting system of the present invention and an aerosolized composition, for example with a dosage of 0.6 mg/kg, may be contemplated for the present invention.

[0679] Subjects treated for a lung disease may for example receive pharmaceutically effective amount of aerosolized AAV vector system per lung endobronchially delivered while spontaneously breathing. As such, aerosolized delivery is preferred for AAV delivery in general. An adenovirus or an AAV particle may be used for delivery. Suitable gene constructs, each operably linked to one or more regulatory sequences, may be cloned into the delivery vector. In this instance, the following constructs are provided as examples: Cbh or EF1a promoter for Cas, U6 or H1 promoter for guide RNA): A preferred arrangement is to use a CFTRdelta508 targeting guide, a repair template for deltaF508 mutation and a codon optimized composition, with optionally one or more nuclear localization signal or sequence(s) (NLS(s)), e.g., two (2) NLSs.

### Treating Diseases of the Skin

[0680] The compositions and systems described herein can be used for the treatment of skin diseases. The present invention also contemplates delivering the composition and system, described herein, to the skin.

[0681] In one embodiment, delivery to the skin (intradermal delivery) of the composition, system, or component thereof can be via one or more microneedles or microneedle containing device. For example, In one embodiment the device and methods of Hickerson et al. (Molecular Therapy—Nucleic Acids (2013) 2, e129) can be used and/or adapted to deliver the composition, system, described herein, for example, at a dosage of up to 300 μl of 0.1 mg/ml compositions to the skin.

[0682] In one embodiment, the methods and techniques of Leachman et al. (Molecular Therapy, vol. 18 no. 2, 442-446 February 2010) can be used and/or adapted for delivery of a compositions described herein to the skin.

[0683] In one embodiment, the methods and techniques of Zheng et al. (PNAS, Jul. 24, 2012, vol. 109, no. 30, 11975-11980) can be used and/or adapted for nanoparticle delivery of a compositions described herein to the skin. In one embodiment, as dosage of about 25 nM applied in a single application can achieve gene knockdown in the skin.

### Treating Cancer

[0684] The compositions, systems, described herein can be used for the treatment of cancer. The present invention also contemplates delivering the composition, system, described herein, to a cancer cell. Also, as is described elsewhere herein the compositions, systems, can be used to modify an immune cell, such as a CAR or CAR T cell, which can then in turn be used to treat and/or prevent cancer. This is also described in International Patent Publication No. WO 2015/161276, the disclosure of which is hereby incorporated by reference and described herein below.

[0685] Target genes suitable for the treatment or prophylaxis of cancer can include those set forth in Tables 7 and 8. In one embodiment, target genes for cancer treatment and prevention can also include those described in International Patent Publication No. WO 2015/048577 the disclosure of which is hereby incorporated by reference and can be adapted for and/or applied to the composition, system, described herein.

### Adoptive Cell Therapy

[0686] The compositions, systems, and components thereof described herein can be used to modify cells for an adoptive cell therapy. In an aspect of the invention, methods and compositions which involve editing a target nucleic acid sequence, or modulating expression of a target nucleic acid sequence, and applications thereof in connection with cancer immunotherapy are comprehended by adapting the composition, system, of the present invention. In some examples, the compositions, systems, and methods may be used to modify a stem cell (e.g., induced pluripotent cell) to derive modified natural killer cells, gamma delta T cells, and alpha beta T cells, which can be used for the adoptive cell therapy. In certain examples, the compositions, systems, and methods may be used to modify modified natural killer cells, gamma delta T cells, and alpha beta T cells.

[0687] As used herein, “ACT”, “adoptive cell therapy” and “adoptive cell transfer” may be used interchangeably. In an embodiment, Adoptive cell therapy (ACT) can refer to the transfer of cells to a patient with the goal of transferring the functionality and characteristics into the new host by engraftment of the cells (see, e.g., Mettananda et al., Editing an α-globin enhancer in primary human hematopoietic stem cells as a treatment for β-thalassemia, Nat Commun. 2017 Sep. 4; 8(1):424). As used herein, the term “engraft” or “engraftment” refers to the process of cell incorporation into a tissue of interest in vivo through contact with existing cells of the tissue. Adoptive cell therapy (ACT) can refer to the transfer of cells, most commonly immune-derived cells, back into the same patient or into a new recipient host with the goal of transferring the immunologic functionality and characteristics into the new host. If possible, use of autologous cells helps the recipient by minimizing GVHD issues. The adoptive transfer of autologous tumor infiltrating lymphocytes (TIL) (Zacharakis et al., (2018) Nat Med. 2018 June; 24(6):724-730; Besser et al., (2010) Clin. Cancer Res 16 (9) 2646-55; Dudley et al., (2002) Science 298 (5594): 850-4; and Dudley et al., (2005) Journal of Clinical Oncology 23 (10): 2346-57.) or genetically re-directed peripheral blood mononuclear cells (Johnson et al., (2009) Blood 114 (3): 535-46; and Morgan et al., (2006) Science 314(5796) 126-9) has been used to successfully treat patients with advanced solid tumors, including melanoma, metastatic breast cancer and colorectal carcinoma, as well as patients with CD19-expressing hematologic malignancies (Kalos et al., (2011) Science Translational Medicine 3 (95): 95ra73). In an embodiment, allogenic cells immune cells are transferred (see, e.g., Ren et al., (2017) Clin Cancer Res 23 (9) 2255-2266). As described further herein, allogenic cells can be edited to reduce alloreactivity and prevent graft-versus-host disease. Thus, use of allogenic cells allows for cells to be obtained from healthy donors and prepared for use in patients as opposed to preparing autologous cells from a patient after diagnosis.

[0688] Aspects of the invention involve the adoptive transfer of immune system cells, such as T cells, specific for selected antigens, such as tumor associated antigens or tumor specific neoantigens (see, e.g., Maus et al., 2014, Adoptive Immunotherapy for Cancer or Viruses, Annual Review of Immunology, Vol. 32: 189-225; Rosenberg and Restifo, 2015, Adoptive cell transfer as personalized immunotherapy for human cancer, Science Vol. 348 no. 6230 pp. 62-68; Restifo et al., 2015, Adoptive immunotherapy for cancer: harnessing the T cell response. Nat. Rev. Immunol. 12(4): 269-281; and Jenson and Riddell, 2014, Design and implementation of adoptive therapy with chimeric antigen receptor-modified T cells. Immunol Rev. 257(1): 127-144; and Rajasagi et al., 2014, Systematic identification of personal tumor-specific neoantigens in chronic lymphocytic leukemia. Blood. 2014 Jul. 17; 124(3):453-62).

[0689] In an embodiment, an antigen (such as a tumor antigen) to be targeted in adoptive cell therapy (such as particularly CAR or TCR T-cell therapy) of a disease (such as particularly of tumor or cancer) may be selected from a group consisting of: MR1 (see, e.g., Crowther, et al., 2020, Genome-wide CRISPR-Cas9 screening reveals ubiquitous T cell cancer targeting via the monomorphic MHC class I-related protein MR1, Nature Immunology vol. 21, pages 178-185), B cell maturation antigen (BCMA) (see, e.g., Friedman et al., Effective Targeting of Multiple BCMA-Expressing Hematological Malignancies by Anti-BCMA CAR T Cells, Hum Gene Ther. 2018 Mar. 8; Berdeja J G, et al. Durable clinical responses in heavily pretreated patients with relapsed/refractory multiple myeloma: updated results from a multicenter study of bb2121 anti-Bcma CAR T cell therapy. Blood. 2017; 130:740; and Mouhieddine and Ghobrial, Immunotherapy in Multiple Myeloma: The Era of CAR T Cell Therapy, Hematologist, May-June 2018, Volume 15, issue 3); PSA (prostate-specific antigen); prostate-specific membrane antigen (PSMA); PSCA (Prostate stem cell antigen); Tyrosine-protein kinase transmembrane receptor ROR1; fibroblast activation protein (FAP); Tumor-associated glycoprotein 72 (TAG72); Carcinoembryonic antigen (CEA); Epithelial cell adhesion molecule (EPCAM); Mesothelin; Human Epidermal growth factor Receptor 2 (ERBB2 (Her2/neu)); Prostase; Prostatic acid phosphatase (PAP); elongation factor 2 mutant (ELF2M); Insulin-like growth factor 1 receptor (IGF-1R); gplOO; BCR-ABL (breakpoint cluster region-Abelson); tyrosinase; New York esophageal squamous cell carcinoma 1 (NY-ESO-1); x-light chain, LAGE (L antigen); MAGE (melanoma antigen); Melanoma-associated antigen 1 (MAGE-A1); MAGE A3; MAGE A6; legumain; Human papillomavirus (HPV) E6; HPV E7; prostein; survivin; PCTA1 (Galectin 8); Melan-A/MART-1; Ras mutant; TRP-1 (tyrosinase related protein 1, or gp75); Tyrosinase-related Protein 2 (TRP2); TRP-2/INT2 (TRP-2/intron 2); RAGE (renal antigen); receptor for advanced glycation end products 1 (RAGE1); Renal ubiquitous 1, 2 (RU1, RU2); intestinal carboxyl esterase (iCE); Heat shock protein 70-2 (HSP70-2) mutant; thyroid stimulating hormone receptor (TSHR); CD123; CD171; CD19; CD20; CD22; CD26; CD30; CD33; CD44v7/8 (cluster of differentiation 44, exons 7/8); CD53; CD92; CD100; CD148; CD150; CD200; CD261; CD262; CD362; CS-1 (CD2 subset 1, CRACC, SLAMF7, CD319, and 19A24); C-type lectin-like molecule-1 (CLL-1); ganglioside GD3 (aNeu5Ac(2-8)aNeu5Ac(2-3)bDGalp(1-4)bDGlcp(1-1)Cer); Tn antigen (Tn Ag); Fms-Like Tyrosine Kinase 3 (FLT3); CD38; CD138; CD44v6; B7H3 (CD276); KIT (CD117); Interleukin-13 receptor subunit alpha-2 (IL-13Ra2); Interleukin 11 receptor alpha (IL-11Ra); prostate stem cell antigen (PSCA); Protease Serine 21 (PRSS21); vascular endothelial growth factor receptor 2 (VEGFR2); Lewis(Y) antigen; CD24; Platelet-derived growth factor receptor beta (PDGFR-beta); stage-specific embryonic antigen-4 (SSEA-4); Mucin 1, cell surface associated (MUC1); mucin 16 (MUC16); epidermal growth factor receptor (EGFR); epidermal growth factor receptor variant III (EGFRvIII); neural cell adhesion molecule (NCAM); carbonic anhydrase IX (CAIX); Proteasome (Prosome, Macropain) Subunit, Beta Type, 9 (LMP2); ephrin type-A receptor 2 (EphA2); Ephrin B2; Fucosyl GM1; sialyl Lewis adhesion molecule (sLe); ganglioside GM3 (aNeu5Ac(2-3)bDGalp(1-4)bDGlcp(1-1)Cer); TGS5; high molecular weight-melanoma-associated antigen (HMWMAA); o-acetyl-GD2 ganglioside (OAcGD2); Folate receptor alpha; Folate receptor beta; tumor endothelial marker 1 (TEM1/CD248); tumor endothelial marker 7-related (TEM7R); claudin 6 (CLDN6); G protein-coupled receptor class C group 5, member D (GPRC5D); chromosome X open reading frame 61 (CXORF61); CD97; CD179a; anaplastic lymphoma kinase (ALK); Polysialic acid; placenta-specific 1 (PLAC1); hexasaccharide portion of globoH glycoceramide (GloboH); mammary gland differentiation antigen (NY-BR-1); uroplakin 2 (UPK2); Hepatitis A virus cellular receptor 1 (HAVCR1); adrenoceptor beta 3 (ADRB3); pannexin 3 (PANX3); G protein-coupled receptor 20 (GPR20); lymphocyte antigen 6 complex, locus K 9 (LY6K); Olfactory receptor 51E2 (OR51E2); TCR Gamma Alternate Reading Frame Protein (TARP); Wilms tumor protein (WT1); ETS translocation-variant gene 6, located on chromosome 12p (ETV6-AML); sperm protein 17 (SPA17); X Antigen Family, Member 1A (XAGE1); angiopoietin-binding cell surface receptor 2 (Tie 2); CT (cancer/testis (antigen)); melanoma cancer testis antigen-1 (MAD-CT-1); melanoma cancer testis antigen-2 (MAD-CT-2); Fos-related antigen 1; p53; p53 mutant; human Telomerase reverse transcriptase (hTERT); sarcoma translocation breakpoints; melanoma inhibitor of apoptosis (ML-IAP); ERG (transmembrane protease, serine 2 (TMPRSS2) ETS fusion gene); N-Acetyl glucosaminyl-transferase V (NA17); paired box protein Pax-3 (PAX3); Androgen receptor; Cyclin B1; Cyclin D1; v-myc avian myelocytomatosis viral oncogene neuroblastoma derived homolog (MYCN); Ras Homolog Family Member C (RhoC); Cytochrome P450 1B1 (CYP1B1); CCCTC-Binding Factor (Zinc Finger Protein)-Like (BORIS); Squamous Cell Carcinoma Antigen Recognized By T Cells-1 or 3 (SART1, SART3); Paired box protein Pax-5 (PAX5); proacrosin binding protein sp32 (OY-TES1); lymphocyte-specific protein tyrosine kinase (LCK); A kinase anchor protein 4 (AKAP-4); synovial sarcoma, X breakpoint-1, -2, -3 or -4 (SSX1, SSX2, SSX3, SSX4); CD79a; CD79b; CD72; Leukocyte-associated immunoglobulin-like receptor 1 (LAIR1); Fc fragment of IgA receptor (FCAR); Leukocyte immunoglobulin-like receptor subfamily A member 2 (LILRA2); CD300 molecule-like family member f (CD300LF); C-type lectin domain family 12 member A (CLECI2A); bone marrow stromal cell antigen 2 (BST2); EGF-like module-containing mucin-like hormone receptor-like 2 (EMR2); lymphocyte antigen 75 (LY75); Glypican-3 (GPC3); Fc receptor-like 5 (FCRL5); mouse double minute 2 homolog (MDM2); livin; alphafetoprotein (AFP); transmembrane activator and CAML Interactor (TACI); B-cell activating factor receptor (BAFF-R); V-Ki-ras2 Kirsten rat sarcoma viral oncogene homolog (KRAS); immunoglobulin lambda-like polypeptide 1 (IGLL1); 707-AP (707 alanine proline); ART-4 (adenocarcinoma antigen recognized by T4 cells); BAGE (B antigen; b-catenin/m, b-catenin/mutated); CAMEL (CTL-recognized antigen on melanoma); CAP1 (carcinoembryonic antigen peptide 1); CASP-8 (caspase-8); CDC27m (cell-division cycle 27 mutated); CDK4/m (cycline-dependent kinase 4 mutated); Cyp-B (cyclophilin B); DAM (differentiation antigen melanoma); EGP-2 (epithelial glycoprotein 2); EGP-40 (epithelial glycoprotein 40); Erbb2, 3, 4 (erythroblastic leukemia viral oncogene homolog-2, -3, 4); FBP (folate binding protein); fAchR (Fetal acetylcholine receptor); G250 (glycoprotein 250); GAGE (G antigen); GnT-V (N-acetylglucosaminyltransferase V); HAGE (helicose antigen); ULA-A (human leukocyte antigen-A); HST2 (human signet ring tumor 2); KIAA0205; KDR (kinase insert domain receptor); LDLR/FUT (low density lipid receptor/GDP L-fucose: b-D-galactosidase 2-a-L fucosyltransferase); L1CAM (Li cell adhesion molecule); MC1R (melanocortin 1 receptor); Myosin/m (myosin mutated); MUM-1, -2, -3 (melanoma ubiquitous mutated 1, 2, 3); NA88-A (NA cDNA clone of patient M88); KG2D (Natural killer group 2, member D) ligands; oncofetal antigen (h5T4); p190 minor bcr-ab1 (protein of 190KD bcr-ab1); Pm1/RARa (promyelocytic leukemia/retinoic acid receptor a); PRAME (preferentially expressed antigen of melanoma); SAGE (sarcoma antigen); TEL/AML1 (translocation Ets-family leukemia/acute myeloid leukemia 1); TPI/m (triosephosphate isomerase mutated); CD70; and any combination thereof.

[0690] In an embodiment, an antigen to be targeted in adoptive cell therapy (such as particularly CAR or TCR T-cell therapy) of a disease (such as particularly of tumor or cancer) is a tumor-specific antigen (TSA).

[0691] In an embodiment, an antigen to be targeted in adoptive cell therapy (such as particularly CAR or TCR T-cell therapy) of a disease (such as particularly of tumor or cancer) is a neoantigen.

[0692] In an embodiment, an antigen to be targeted in adoptive cell therapy (such as particularly CAR or TCR T-cell therapy) of a disease (such as particularly of tumor or cancer) is a tumor-associated antigen (TAA).

[0693] In an embodiment, an antigen to be targeted in adoptive cell therapy (such as particularly CAR or TCR T-cell therapy) of a disease (such as particularly of tumor or cancer) is a universal tumor antigen. In certain preferred embodiments, the universal tumor antigen is selected from the group consisting of: a human telomerase reverse transcriptase (hTERT), survivin, mouse double minute 2 homolog (MDM2), cytochrome P450 1B 1 (CYP1B), HER2/neu, Wilms' tumor gene 1 (WT1), livin, alphafetoprotein (AFP), carcinoembryonic antigen (CEA), mucin 16 (MUC16), MUC1, prostate-specific membrane antigen (PSMA), p53, cyclin (Dl), and any combinations thereof.

[0694] In an embodiment, an antigen (such as a tumor antigen) to be targeted in adoptive cell therapy (such as particularly CAR or TCR T-cell therapy) of a disease (such as particularly of tumor or cancer) may be selected from a group consisting of: CD19, BCMA, CD70, CLL-1, MAGE A3, MAGE A6, HPV E6, HPV E7, WT1, CD22, CD171, ROR1, MUC16, and SSX2. In certain preferred embodiments, the antigen may be CD19. For example, CD19 may be targeted in hematologic malignancies, such as in lymphomas, more particularly in B-cell lymphomas, such as without limitation in diffuse large B-cell lymphoma, primary mediastinal b-cell lymphoma, transformed follicular lymphoma, marginal zone lymphoma, mantle cell lymphoma, acute lymphoblastic leukemia including adult and pediatric ALL, non-Hodgkin lymphoma, indolent non-Hodgkin lymphoma, or chronic lymphocytic leukemia. For example, BCMA may be targeted in multiple myeloma or plasma cell leukemia (see, e.g., 2018 American Association for Cancer Research (AACR) Annual meeting Poster: Allogeneic Chimeric Antigen Receptor T Cells Targeting B Cell Maturation Antigen). For example, CLL1 may be targeted in acute myeloid leukemia. For example, MAGE A3, MAGE A6, SSX2, and/or KRAS may be targeted in solid tumors. For example, HPV E6 and/or HPV E7 may be targeted in cervical cancer or head and neck cancer. For example, WT1 may be targeted in acute myeloid leukemia (AML), myelodysplastic syndromes (MDS), chronic myeloid leukemia (CML), non-small cell lung cancer, breast, pancreatic, ovarian or colorectal cancers, or mesothelioma. For example, CD22 may be targeted in B cell malignancies, including non-Hodgkin lymphoma, diffuse large B-cell lymphoma, or acute lymphoblastic leukemia. For example, CD171 may be targeted in neuroblastoma, glioblastoma, or lung, pancreatic, or ovarian cancers. For example, ROR1 may be targeted in ROR1+ malignancies, including non-small cell lung cancer, triple negative breast cancer, pancreatic cancer, prostate cancer, ALL, chronic lymphocytic leukemia, or mantle cell lymphoma. For example, MUC16 may be targeted in MUC16ecto+ epithelial ovarian, fallopian tube or primary peritoneal cancer. For example, CD70 may be targeted in both hematologic malignancies as well as in solid cancers such as renal cell carcinoma (RCC), gliomas (e.g., GBM), and head and neck cancers (HNSCC). CD70 is expressed in both hematologic malignancies as well as in solid cancers, while its expression in normal tissues is restricted to a subset of lymphoid cell types (see, e.g., 2018 American Association for Cancer Research (AACR) Annual meeting Poster: Allogeneic CRISPR Engineered Anti-CD70 CAR-T Cells Demonstrate Potent Preclinical Activity Against Both Solid and Hematological Cancer Cells).

[0695] Various strategies may for example be employed to genetically modify T cells by altering the specificity of the T cell receptor (TCR) for example by introducing new TCR a and R chains with selected peptide specificity (see U.S. Pat. No. 8,697,854; PCT Patent Publications: WO2003020763, WO2004033685, WO2004044004, WO2005114215, WO2006000830, WO2008038002, WO2008039818, WO2004074322, WO2005113595, WO2006125962, WO2013166321, WO2013039889, WO2014018863, WO2014083173; U.S. Pat. No. 8,088,379).

[0696] As an alternative to, or addition to, TCR modifications, chimeric antigen receptors (CARs) may be used in order to generate immuno-responsive cells, such as T cells, specific for selected targets, such as malignant cells, with a wide variety of receptor chimera constructs having been described (see U.S. Pat. Nos. 5,843,728; 5,851,828; 5,912,170; 6,004,811; 6,284,240; 6,392,013; 6,410,014; 6,753,162; 8,211,422; and, PCT Publication WO 9215322).

[0697] In general, CARs are comprised of an extracellular domain, a transmembrane domain, and an intracellular domain, wherein the extracellular domain comprises an antigen-binding domain that is specific for a predetermined target. While the antigen-binding domain of a CAR is often an antibody or antibody fragment (e.g., a single chain variable fragment, scFv), the binding domain is not particularly limited so long as it results in specific recognition of a target. For example, In one embodiment, the antigen-binding domain may comprise a receptor, such that the CAR is capable of binding to the ligand of the receptor. Alternatively, the antigen-binding domain may comprise a ligand, such that the CAR is capable of binding the endogenous receptor of that ligand.

[0698] The antigen-binding domain of a CAR is generally separated from the transmembrane domain by a hinge or spacer. The spacer is also not particularly limited, and it is designed to provide the CAR with flexibility. For example, a spacer domain may comprise a portion of a human Fc domain, including a portion of the CH3 domain, or the hinge region of any immunoglobulin, such as IgA, IgD, IgE, IgG, or IgM, or variants thereof. Furthermore, the hinge region may be modified so as to prevent off-target binding by FcRs or other potential interfering objects. For example, the hinge may comprise an IgG4 Fc domain with or without a S228P, L235E, and/or N297Q mutation (according to Kabat numbering) in order to decrease binding to FcRs. Additional spacers/hinges include, but are not limited to, CD4, CD8, and CD28 hinge regions.

[0699] The transmembrane domain of a CAR may be derived either from a natural or from a synthetic source. Where the source is natural, the domain may be derived from any membrane bound or transmembrane protein. Transmembrane regions of particular use in this disclosure may be derived from CD8, CD28, CD3, CD45, CD4, CD5, CDS, CD9, CD 16, CD22, CD33, CD37, CD64, CD80, CD86, CD 134, CD137, CD 154, TCR. Alternatively, the transmembrane domain may be synthetic, in which case it will comprise predominantly hydrophobic residues such as leucine and valine. Preferably a triplet of phenylalanine, tryptophan and valine will be found at each end of a synthetic transmembrane domain. Optionally, a short oligo- or polypeptide linker, preferably between 2 and 10 amino acids in length may form the linkage between the transmembrane domain and the cytoplasmic signaling domain of the CAR. A glycine-serine doublet provides a particularly suitable linker.

[0700] Alternative CAR constructs may be characterized as belonging to successive generations. First-generation CARs typically consist of a single-chain variable fragment of an antibody specific for an antigen, for example comprising a VL linked to a VH of a specific antibody, linked by a flexible linker, for example by a CD8α hinge domain and a CD8α transmembrane domain, to the transmembrane and intracellular signaling domains of either CD3ζ or FcRγ (scFv-CD3ζ or scFv-FcRγ; see U.S. Pat. Nos. 7,741,465; 5,912,172; 5,906,936). Second-generation CARs incorporate the intracellular domains of one or more costimulatory molecules, such as CD28, OX40 (CD134), or 4-1BB (CD137) within the endodomain (for example scFv-CD28/OX40/4-1BB-CD3ζ; see U.S. Pat. Nos. 8,911,993; 8,916,381; 8,975,071; 9,101,584; 9,102,760; 9,102,761). Third-generation CARs include a combination of costimulatory endodomains, such a CD3ζ-chain, CD97, GDI 1a-CD18, CD2, ICOS, CD27, CD154, CDS, OX40, 4-1BB, CD2, CD7, LIGHT, LFA-1, NKG2C, B7-H3, CD30, CD40, PD-1, or CD28 signaling domains (for example scFv-CD28-4-1BB-CD3ζ or scFv-CD28-OX40-CD3ζ; see U.S. Pat. Nos. 8,906,682; 8,399,645; 5,686,281; PCT Publication No. WO 2014/134165; PCT Publication No. WO 2012/079000). In an embodiment, the primary signaling domain comprises a functional signaling domain of a protein selected from the group consisting of CD3 zeta, CD3 gamma, CD3 delta, CD3 epsilon, common FcR gamma (FCERIG), FcR beta (Fc Epsilon Rib), CD79a, CD79b, Fe gamma RIIa, DAP10, and DAP12. In certain preferred embodiments, the primary signaling domain comprises a functional signaling domain of CD3ζ or FcRγ. In an embodiment, the one or more costimulatory signaling domains comprise a functional signaling domain of a protein selected, each independently, from the group consisting of: CD27, CD28, 4-1BB (CD137), OX40, CD30, CD40, PD-1, ICOS, lymphocyte function-associated antigen-1 (LFA-1), CD2, CD7, LIGHT, NKG2C, B7-H3, a ligand that specifically binds with CD83, CDS, ICAM-1, GITR, BAFFR, HVEM (LIGHTR), SLAMF7, NKp80 (KLRF1), CD160, CD19, CD4, CD8 alpha, CD8 beta, IL2R beta, IL2R gamma, IL7R alpha, ITGA4, VLA1, CD49a, ITGA4, IA4, CD49D, ITGA6, VLA-6, CD49f, ITGAD, CD11 d, ITGAE, CD103, ITGAL, CD11a, LFA-1, ITGAM, CD11b, ITGAX, CD11c, ITGB1, CD29, ITGB2, CD18, ITGB7, TNFR2, TRANCE/RANKL, DNAM1 (CD226), SLAMF4 (CD244, 2B4), CD84, CD96 (Tactile), CEACAMI, CRTAM, Ly9 (CD229), CD160 (BY55), PSGL1, CD100 (SEMA4D), CD69, SLAMF6 (NTB-A, Ly108), SLAM (SLAMF1, CD150, IPO-3), BLAME (SLAMF8), SELPLG (CD162), LTBR, LAT, GADS, SLP-76, PAG/Cbp, NKp44, NKp30, NKp46, and NKG2D. In an embodiment, the one or more costimulatory signaling domains comprise a functional signaling domain of a protein selected, each independently, from the group consisting of: 4-1BB, CD27, and CD28. In an embodiment, a chimeric antigen receptor may have the design as described in U.S. Pat. No. 7,446,190, comprising an intracellular domain of CD3ζ chain (such as amino acid residues 52-163 of the human CD3 zeta chain, as shown in SEQ ID NO: 14 of U.S. Pat. No. 7,446,190), a signaling region from CD28 and an antigen-binding element (or portion or domain; such as scFv). The CD28 portion, when between the zeta chain portion and the antigen-binding element, may suitably include the transmembrane and signaling domains of CD28 (such as amino acid residues 114-220 of SEQ ID NO: 10, full sequence shown in SEQ ID NO: 6 of U.S. Pat. No. 7,446,190; these can include the following portion of CD28 as set forth in Genbank identifier NM_006139. Alternatively, when the zeta sequence lies between the CD28 sequence and the antigen-binding element, intracellular domain of CD28 can be used alone (such as amino sequence set forth in SEQ ID NO: 9 of U.S. Pat. No. 7,446,190). Hence, an embodiment employs a CAR comprising (a) a zeta chain portion comprising the intracellular domain of human CD3ζ chain, (b) a costimulatory signaling region, and (c) an antigen-binding element (or portion or domain), wherein the costimulatory signaling region comprises the amino acid sequence encoded by SEQ ID NO: 6 of U.S. Pat. No. 7,446,190.

[0701] Alternatively, co-stimulation may be orchestrated by expressing CARs in antigen-specific T cells, chosen so as to be activated and expanded following engagement of their native αβTCR, for example by antigen on professional antigen-presenting cells, with attendant co-stimulation. In addition, additional engineered receptors may be provided on the immuno-responsive cells, for example to improve targeting of a T-cell attack and/or minimize side effects.

[0702] By means of an example and without limitation, Kochenderfer et al., (2009) J Immunother. 32 (7): 689-702 described anti-CD19 chimeric antigen receptors (CAR). FMC63-28Z CAR contained a single chain variable region moiety (scFv) recognizing CD19 derived from the FMC63 mouse hybridoma (described in Nicholson et al., (1997) Molecular Immunology 34: 1157-1165), a portion of the human CD28 molecule, and the intracellular component of the human TCR-ζ molecule. FMC63-CD828BBZ CAR contained the FMC63 scFv, the hinge and transmembrane regions of the CD8 molecule, the cytoplasmic portions of CD28 and 4-1BB, and the cytoplasmic component of the TCR-ζ molecule. The exact sequence of the CD28 molecule included in the FMC63-28Z CAR corresponded to Genbank identifier NM_006139; the sequence included all amino acids starting with the amino acid sequence IEVMYPPPY (SEQ ID NO: 2058) and continuing all the way to the carboxy-terminus of the protein. To encode the anti-CD19 scFv component of the vector, the authors designed a DNA sequence which was based on a portion of a previously published CAR (Cooper et al., (2003) Blood 101: 1637-1644). This sequence encoded the following components in frame from the 5′ end to the 3′ end: an XhoI site, the human granulocyte-macrophage colony-stimulating factor (GM-CSF) receptor α-chain signal sequence, the FMC63 light chain variable region (as in Nicholson et al., supra), a linker peptide (as in Cooper et al., supra), the FMC63 heavy chain variable region (as in Nicholson et al., supra), and a NotI site. A plasmid encoding this sequence was digested with XhoI and NotI. To form the MSGV-FMC63-28Z retroviral vector, the XhoI and NotI-digested fragment encoding the FMC63 scFv was ligated into a second XhoI and NotI-digested fragment that encoded the MSGV retroviral backbone (as in Hughes et al., (2005) Human Gene Therapy 16: 457-472) as well as part of the extracellular portion of human CD28, the entire transmembrane and cytoplasmic portion of human CD28, and the cytoplasmic portion of the human TCR-ζ molecule (as in Maher et al., 2002) Nature Biotechnology 20: 70-75). The FMC63-28Z CAR is included in the KTE-C19 (axicabtagene ciloleucel) anti-CD19 CAR-T therapy product in development by Kite Pharma, Inc. for the treatment of inter alia patients with relapsed/refractory aggressive B-cell non-Hodgkin lymphoma (NHL). Accordingly, in an embodiment, cells intended for adoptive cell therapies, more particularly immuno-responsive cells such as T cells, may express the FMC63-28Z CAR as described by Kochenderfer et al. (supra). Hence, in an embodiment, cells intended for adoptive cell therapies, more particularly immuno-responsive cells such as T cells, may comprise a CAR comprising an extracellular antigen-binding element (or portion or domain; such as scFv) that specifically binds to an antigen, an intracellular signaling domain comprising an intracellular domain of a CD3ζ chain, and a costimulatory signaling region comprising a signaling domain of CD28. Preferably, the CD28 amino acid sequence is as set forth in Genbank identifier NM_006139 (sequence version 1, 2 or 3) starting with the amino acid sequence IEVMYPPPY and continuing all the way to the carboxy terminus of the protein. Preferably, the antigen is CD19, more preferably the antigen-binding element is an anti-CD19 scFv, even more preferably the anti-CD19 scFv as described by Kochenderfer et al. (supra).

[0703] Additional anti-CD19 CARs are further described in International Patent Publication No. WO 2015/187528. More particularly Example 1 and Table 1 of WO2015187528, incorporated by reference herein, demonstrate the generation of anti-CD19 CARs based on a fully human anti-CD19 monoclonal antibody (47G4, as described in US20100104509) and murine anti-CD19 monoclonal antibody (as described in Nicholson et al. and explained above). Various combinations of a signal sequence (human CD8-alpha or GM-CSF receptor), extracellular and transmembrane regions (human CD8-alpha) and intracellular T-cell signaling domains (CD28-CD3ζ; 4-1BB-CD3ζ; CD27-CD3ζ; CD28-CD27-CD3ζ, 4-1BB-CD27-CD3ζ; CD27-4-1BB-CD3ζ; CD28-CD27-FcεRI gamma chain; or CD28-FcεRI gamma chain) were disclosed. Hence, in an embodiment, cells intended for adoptive cell therapies, more particularly immuno-responsive cells such as T cells, may comprise a CAR comprising an extracellular antigen-binding element that specifically binds to an antigen, an extracellular and transmembrane region as set forth in Table 1 of WO2015187528 and an intracellular T-cell signaling domain as set forth in Table 1 of No. WO 2015/187528. Preferably, the antigen is CD19, more preferably the antigen-binding element is an anti-CD19 scFv, even more preferably the mouse or human anti-CD19 scFv as described in Example 1 of. WO 2015/187528. In an embodiment, the CAR comprises, consists essentially of or consists of an amino acid sequence of SEQ ID NO: 1, SEQ ID NO: 2, SEQ ID NO: 3, SEQ ID NO: 4, SEQ ID NO: 5, SEQ ID NO: 6, SEQ ID NO: 7, SEQ ID NO: 8, SEQ ID NO: 9, SEQ ID NO: 10, SEQ ID NO: 11, SEQ ID NO: 12, or SEQ ID NO: 13 as set forth in Table 1 of WO2015187528.

[0704] By means of an example and without limitation, chimeric antigen receptor that recognizes the CD70 antigen is described in WO2012058460A2 (see also, Park et al., CD70 as a target for chimeric antigen receptor T cells in head and neck squamous cell carcinoma, Oral Oncol. 2018 March; 78:145-150; and Jin et al., CD70, a novel target of CAR T-cell therapy for gliomas, Neuro Oncol. 2018 Jan. 10; 20(1):55-65). CD70 is expressed by diffuse large B-cell and follicular lymphoma and also by the malignant cells of Hodgkins lymphoma, Waldenstrom's macroglobulinemia and multiple myeloma, and by HTLV-1- and EBV-associated malignancies. (Agathanggelou et al. Am.J.Pathol. 1995; 147: 1152-1160; Hunter et al., Blood 2004; 104:4881. 26; Lens et al., J Immunol. 2005; 174:6212-6219; Baba et al., J Virol. 2008; 82:3843-3852.) In addition, CD70 is expressed by non-hematological malignancies such as renal cell carcinoma and glioblastoma. (Junker et al., J Urol. 2005; 173:2150-2153; Chahlavi et al., Cancer Res 2005; 65:5428-5438) Physiologically, CD70 expression is transient and restricted to a subset of highly activated T, B, and dendritic cells.

[0705] By means of an example and without limitation, chimeric antigen receptor that recognizes BCMA has been described (see, e.g., US20160046724A1; WO2016014789A2; WO2017211900A1; WO2015158671A1; US20180085444A1; WO2018028647A1; US20170283504A1; and WO2013154760A1).

[0706] In an embodiment, the immune cell may, in addition to a CAR or exogenous TCR as described herein, further comprise a chimeric inhibitory receptor (inhibitory CAR) that specifically binds to a second target antigen and is capable of inducing an inhibitory or immunosuppressive or repressive signal to the cell upon recognition of the second target antigen. In an embodiment, the chimeric inhibitory receptor comprises an extracellular antigen-binding element (or portion or domain) configured to specifically bind to a target antigen, a transmembrane domain, and an intracellular immunosuppressive or repressive signaling domain. In an embodiment, the second target antigen is an antigen that is not expressed on the surface of a cancer cell or infected cell or the expression of which is downregulated on a cancer cell or an infected cell. In an embodiment, the second target antigen is an MHC-class I molecule. In an embodiment, the intracellular signaling domain comprises a functional signaling portion of an immune checkpoint molecule, such as for example PD-1 or CTLA4. Advantageously, the inclusion of such inhibitory CAR reduces the chance of the engineered immune cells attacking non-target (e.g., non-cancer) tissues.

[0707] Alternatively, T-cells expressing CARs may be further modified to reduce or eliminate expression of endogenous TCRs in order to reduce off-target effects. Reduction or elimination of endogenous TCRs can reduce off-target effects and increase the effectiveness of the T cells (U.S. Pat. No. 9,181,527). T cells stably lacking expression of a functional TCR may be produced using a variety of approaches. T cells internalize, sort, and degrade the entire T cell receptor as a complex, with a half-life of about 10 hours in resting T cells and 3 hours in stimulated T cells (von Essen, M. et al. 2004. J. Immunol. 173:384-393). Proper functioning of the TCR complex requires the proper stoichiometric ratio of the proteins that compose the TCR complex. TCR function also requires two functioning TCR zeta proteins with ITAM motifs. The activation of the TCR upon engagement of its MHC-peptide ligand requires the engagement of several TCRs on the same T cell, which all must signal properly. Thus, if a TCR complex is destabilized with proteins that do not associate properly or cannot signal optimally, the T cell will not become activated sufficiently to begin a cellular response.

[0708] Accordingly, in one embodiment, TCR expression may eliminated using RNA interference (e.g., shRNA, siRNA, miRNA, etc.), chimeric IscB systems, or other methods that target the nucleic acids encoding specific TCRs (e.g., TCR-α and TCR-β) and/or CD3 chains in primary T cells. By blocking expression of one or more of these proteins, the T cell will no longer produce one or more of the key components of the TCR complex, thereby destabilizing the TCR complex and preventing cell surface expression of a functional TCR.

[0709] In some instances, CAR may also comprise a switch mechanism for controlling expression and/or activation of the CAR. For example, a CAR may comprise an extracellular, transmembrane, and intracellular domain, in which the extracellular domain comprises a target-specific binding element that comprises a label, binding domain, or tag that is specific for a molecule other than the target antigen that is expressed on or by a target cell. In such embodiments, the specificity of the CAR is provided by a second construct that comprises a target antigen binding domain (e.g., an scFv or a bispecific antibody that is specific for both the target antigen and the label or tag on the CAR) and a domain that is recognized by or binds to the label, binding domain, or tag on the CAR. See, e.g., WO 2013/044225, WO 2016/000304, WO 2015/057834, WO 2015/057852, WO 2016/070061, U.S. Pat. No. 9,233,125, US 2016/0129109. In this way, a T-cell that expresses the CAR can be administered to a subject, but the CAR cannot bind its target antigen until the second composition comprising an antigen-specific binding domain is administered.

[0710] Alternative switch mechanisms include CARs that require multimerization in order to activate their signaling function (see, e.g., US Patent Publication Nos. US 2015/0368342, US 2016/0175359, US 2015/0368360) and/or an exogenous signal, such as a small molecule drug (US 2016/0166613, Yung et al., Science, 2015), in order to elicit a T-cell response. Some CARs may also comprise a “suicide switch” to induce cell death of the CAR T-cells following treatment (Buddee et al., PLoS One, 2013) or to downregulate expression of the CAR following binding to the target antigen (International Patent Publication No. WO 2016/011210).

[0711] Alternative techniques may be used to transform target immuno-responsive cells, such as protoplast fusion, lipofection, transfection or electroporation. A wide variety of vectors may be used, such as retroviral vectors, lentiviral vectors, adenoviral vectors, adeno-associated viral vectors, plasmids or transposons, such as a Sleeping Beauty transposon (see U.S. Pat. Nos. 6,489,458; 7,148,203; 7,160,682; 7,985,739; 8,227,432), may be used to introduce CARs, for example using 2nd generation antigen-specific CARs signaling through CD3ζ and either CD28 or CD137. Viral vectors may for example include vectors based on HIV, SV40, EBV, HSV or BPV.

[0712] Cells that are targeted for transformation may for example include T cells, Natural Killer (NK) cells, cytotoxic T lymphocytes (CTL), regulatory T cells, human embryonic stem cells, tumor-infiltrating lymphocytes (TIL) or a pluripotent stem cell from which lymphoid cells may be differentiated. T cells expressing a desired CAR may for example be selected through co-culture with γ-irradiated activating and propagating cells (AaPC), which co-express the cancer antigen and co-stimulatory molecules. The engineered CAR T-cells may be expanded, for example by co-culture on AaPC in presence of soluble factors, such as IL-2 and IL-21. This expansion may for example be carried out so as to provide memory CAR+ T cells (which may for example be assayed by non-enzymatic digital array and/or multi-panel flow cytometry). In this way, CAR T cells may be provided that have specific cytotoxic activity against antigen-bearing tumors (optionally in conjunction with production of desired chemokines such as interferon-γ). CAR T cells of this kind may for example be used in animal models, for example to treat tumor xenografts.

[0713] In an embodiment, ACT includes co-transferring CD4+ Th1 cells and CD8+ CTLs to induce a synergistic antitumor response (see, e.g., Li et al., Adoptive cell therapy with CD4+ T helper 1 cells and CD8+ cytotoxic T cells enhances complete rejection of an established tumor, leading to generation of endogenous memory responses to non-targeted tumor epitopes. Clin Transl Immunology. 2017 October; 6(10): e160).

[0714] In an embodiment, Th17 cells are transferred to a subject in need thereof. Th17 cells have been reported to directly eradicate melanoma tumors in mice to a greater extent than Th1 cells (Muranski P, et al., Tumor-specific Th17-polarized cells eradicate large established melanoma. Blood. 2008 Jul. 15; 112(2):362-73; and Martin-Orozco N, et al., T helper 17 cells promote cytotoxic T cell activation in tumor immunity. Immunity. 2009 Nov. 20; 31(5):787-98). Those studies involved an adoptive T cell transfer (ACT) therapy approach, which takes advantage of CD4+ T cells that express a TCR recognizing tyrosinase tumor antigen. Exploitation of the TCR leads to rapid expansion of Th17 populations to large numbers ex vivo for reinfusion into the autologous tumor-bearing hosts.

[0715] In an embodiment, ACT may include autologous iPSC-based vaccines, such as irradiated iPSCs in autologous anti-tumor vaccines (see e.g., Kooreman, Nigel G. et al., Autologous iPSC-Based Vaccines Elicit Anti-tumor Responses In Vivo, Cell Stem Cell 22, 1-13, 2018, doi.org/10.1016/j.stem.2018.01.016).

[0716] Unlike T-cell receptors (TCRs) that are MHC restricted, CARs can potentially bind any cell surface-expressed antigen and can thus be more universally used to treat patients (see Irving et al., Engineering Chimeric Antigen Receptor T-Cells for Racing in Solid Tumors: Don't Forget the Fuel, Front. Immunol., 3 Apr. 2017, doi.org/10.3389/fimmu.2017.00267). In an embodiment, in the absence of endogenous T-cell infiltrate (e.g., due to aberrant antigen processing and presentation), which precludes the use of TIL therapy and immune checkpoint blockade, the transfer of CAR T-cells may be used to treat patients (see, e.g., Hinrichs C S, Rosenberg S A. Exploiting the curative potential of adoptive T-cell therapy for cancer. Immunol Rev (2014) 257(1):56-71. doi:10.1111/imr.12132).

[0717] Approaches such as the foregoing may be adapted to provide methods of treating and/or increasing survival of a subject having a disease, such as a neoplasia, for example by administering an effective amount of an immuno-responsive cell comprising an antigen recognizing receptor that binds a selected antigen, wherein the binding activates the immuno-responsive cell, thereby treating or preventing the disease (such as a neoplasia, a pathogen infection, an autoimmune disorder, or an allogeneic transplant reaction).

[0718] In an embodiment, the treatment can be administered after lymphodepleting pretreatment in the form of chemotherapy (typically a combination of cyclophosphamide and fludarabine) or radiation therapy. Initial studies in ACT had short lived responses and the transferred cells did not persist in vivo for very long (Houot et al., T-cell-based immunotherapy: adoptive cell transfer and checkpoint inhibition. Cancer Immunol Res (2015) 3(10):1115-22; and Kamta et al., Advancing Cancer Therapy with Present and Emerging Immuno-Oncology Approaches. Front. Oncol. (2017) 7:64). Immune suppressor cells like Tregs and MDSCs may attenuate the activity of transferred cells by outcompeting them for the necessary cytokines. Not being bound by a theory lymphodepleting pretreatment may eliminate the suppressor cells allowing the TILs to persist.

[0719] In one embodiment, the treatment can be administrated into patients undergoing an immunosuppressive treatment (e.g., glucocorticoid treatment). The cells, or population of cells, may be made resistant to at least one immunosuppressive agent due to the inactivation of a gene encoding a receptor for such immunosuppressive agent. In an embodiment, the immunosuppressive treatment provides for the selection and expansion of the immuno-responsive T cells within the patient.

[0720] In an embodiment, the treatment can be administered before primary treatment (e.g., surgery or radiation therapy) to shrink a tumor before the primary treatment. In another embodiment, the treatment can be administered after primary treatment to remove any remaining cancer cells.

[0721] In an embodiment, immuno-metabolic barriers can be targeted therapeutically prior to and/or during ACT to enhance responses to ACT or CAR T-cell therapy and to support endogenous immunity (see, e.g., Irving et al., Engineering Chimeric Antigen Receptor T-Cells for Racing in Solid Tumors: Don't Forget the Fuel, Front. Immunol., 3 Apr. 2017, doi.org/10.3389/fimmu.2017.00267).

[0722] The administration of cells or population of cells, such as immune system cells or cell populations, such as more particularly immuno-responsive cells or cell populations, as disclosed herein may be carried out in any convenient manner, including by aerosol inhalation, injection, ingestion, transfusion, implantation or transplantation. The cells or population of cells may be administered to a patient subcutaneously, intradermally, intratumorally, intranodally, intramedullary, intramuscularly, intrathecally, by intravenous or intralymphatic injection, or intraperitoneally. In one embodiment, the disclosed CARs may be delivered or administered into a cavity formed by the resection of tumor tissue (i.e. intracavity delivery) or directly into a tumor prior to resection (i.e. intratumoral delivery). In one embodiment, the cell compositions of the present invention are preferably administered by intravenous injection.

[0723] The administration of the cells or population of cells can consist of the administration of 104-109 cells per kg body weight, preferably 105 to 106 cells/kg body weight including all integer values of cell numbers within those ranges. Dosing in CAR T cell therapies may for example involve administration of from 106 to 109 cells/kg, with or without a course of lymphodepletion, for example with cyclophosphamide. The cells or population of cells can be administrated in one or more doses. In another embodiment, the effective amount of cells are administrated as a single dose. In another embodiment, the effective amount of cells are administrated as more than one dose over a period time. Timing of administration is within the judgment of managing physician and depends on the clinical condition of the patient. The cells or population of cells may be obtained from any source, such as a blood bank or a donor. While individual needs vary, determination of optimal ranges of effective amounts of a given cell type for a particular disease or conditions are within the skill of one in the art. An effective amount means an amount which provides a therapeutic or prophylactic benefit. The dosage administrated will be dependent upon the age, health and weight of the recipient, kind of concurrent treatment, if any, frequency of treatment and the nature of the effect desired.

[0724] In another embodiment, the effective amount of cells or composition comprising those cells are administrated parenterally. The administration can be an intravenous administration. The administration can be directly done by injection within a tumor.

[0725] To guard against possible adverse reactions, engineered immuno-responsive cells may be equipped with a transgenic safety switch, in the form of a transgene that renders the cells vulnerable to exposure to a specific signal. For example, the herpes simplex viral thymidine kinase (TK) gene may be used in this way, for example by introduction into allogeneic T lymphocytes used as donor lymphocyte infusions following stem cell transplantation (Greco, et al., Improving the safety of cell therapy with the TK-suicide gene. Front. Pharmacol. 2015; 6: 95). In such cells, administration of a nucleoside prodrug such as ganciclovir or acyclovir causes cell death. Alternative safety switch constructs include inducible caspase 9, for example triggered by administration of a small-molecule dimerizer that brings together two nonfunctional icasp9 molecules to form the active enzyme. A wide variety of alternative approaches to implementing cellular proliferation controls have been described (see U.S. Patent Publication No. 20130071414; International Patent Publication WO 2011/146862; International Patent Publication WO 2014/011987; International Patent Publication WO 2013/040371; Zhou et al. BLOOD, 2014, 123/25:3895-3905; Di Stasi et al., The New England Journal of Medicine 2011; 365:1673-1683; Sadelain M, The New England Journal of Medicine 2011; 365:1735-173; Ramos et al., Stem Cells 28(6):1107-15 (2010)).

[0726] In a further refinement of adoptive therapies, genome editing may be used to tailor immuno-responsive cells to alternative implementations, for example providing edited CAR T cells (see Poirot et al., 2015, Multiplex genome edited T-cell manufacturing platform for “off-the-shelf” adoptive T-cell immunotherapies, Cancer Res 75 (18): 3853; Ren et al., 2017, Multiplex genome editing to generate universal CAR T cells resistant to PD1 inhibition, Clin Cancer Res. 2017 May 1; 23(9):2255-2266. doi: 10.1158/1078-0432.CCR-16-1300. Epub 2016 Nov. 4; Qasim et al., 2017, Molecular remission of infant B-ALL after infusion of universal TALEN gene-edited CAR T cells, Sci Transl Med. 2017 Jan. 25; 9 (374); Legut, et al., 2018, CRISPR-mediated TCR replacement generates superior anticancer transgenic T cells. Blood, 131(3), 311-322; and Georgiadis et al., Long Terminal Repeat CRISPR-CAR-Coupled “Universal” T Cells Mediate Potent Anti-leukemic Effects, Molecular Therapy, In Press, Corrected Proof, Available online 6 Mar. 2018). Cells may be edited using any CRISPR system and method of use thereof as described herein. The composition and systems may be delivered to an immune cell by any method described herein. In preferred embodiments, cells are edited ex vivo and transferred to a subject in need thereof. Immuno-responsive cells, CAR T cells or any cells used for adoptive cell transfer may be edited. Editing may be performed for example to insert or knock-in an exogenous gene, such as an exogenous gene encoding a CAR or a TCR, at a preselected locus in a cell (e.g. TRAC locus); to eliminate potential alloreactive T-cell receptors (TCR) or to prevent inappropriate pairing between endogenous and exogenous TCR chains, such as to knock-out or knock-down expression of an endogenous TCR in a cell; to disrupt the target of a chemotherapeutic agent in a cell; to block an immune checkpoint, such as to knock-out or knock-down expression of an immune checkpoint protein or receptor in a cell; to knock-out or knock-down expression of other gene or genes in a cell, the reduced expression or lack of expression of which can enhance the efficacy of adoptive therapies using the cell; to knock-out or knock-down expression of an endogenous gene in a cell, said endogenous gene encoding an antigen targeted by an exogenous CAR or TCR; to knock-out or knock-down expression of one or more MHC constituent proteins in a cell; to activate a T cell; to modulate cells such that the cells are resistant to exhaustion or dysfunction; and/or increase the differentiation and/or proliferation of functionally exhausted or dysfunctional CD8+ T-cells (see International Patent Publication Nos. WO 2013/176915, WO 2014/059173, WO 2014/172606, WO 2014/184744, and WO 2014/191128).

[0727] In an embodiment, editing may result in inactivation of a gene. By inactivating a gene, it is intended that the gene of interest is not expressed in a functional protein form. In a particular embodiment, the system specifically catalyzes cleavage in one targeted gene thereby inactivating said targeted gene. The nucleic acid strand breaks caused are commonly repaired through the distinct mechanisms of homologous recombination or non-homologous end joining (NHEJ). However, NHEJ is an imperfect repair process that often results in changes to the DNA sequence at the site of the cleavage. Repair via non-homologous end joining (NHEJ) often results in small insertions or deletions (Indel) and can be used for the creation of specific gene knockouts. Cells in which a cleavage induced mutagenesis event has occurred can be identified and/or selected by well-known methods in the art. In an embodiment, homology directed repair (HDR) is used to concurrently inactivate a gene (e.g., TRAC) and insert an endogenous TCR or CAR into the inactivated locus.

[0728] Hence, in an embodiment, editing of cells, particularly cells intended for adoptive cell therapies, more particularly immuno-responsive cells such as T cells, may be performed to insert or knock-in an exogenous gene, such as an exogenous gene encoding a CAR or a TCR, at a preselected locus in a cell. Conventionally, nucleic acid molecules encoding CARs or TCRs are transfected or transduced to cells using randomly integrating vectors, which, depending on the site of integration, may lead to clonal expansion, oncogenic transformation, variegated transgene expression and/or transcriptional silencing of the transgene. Directing of transgene(s) to a specific locus in a cell can minimize or avoid such risks and advantageously provide for uniform expression of the transgene(s) by the cells. Without limitation, suitable ‘safe harbor’ loci for directed transgene integration include CCR5 or AAVS1. Homology-directed repair (HDR) strategies are known and described elsewhere in this specification allowing to insert transgenes into desired loci (e.g., TRAC locus).

[0729] Further suitable loci for insertion of transgenes, in particular CAR or exogenous TCR transgenes, include without limitation loci comprising genes coding for constituents of endogenous T-cell receptor, such as T-cell receptor alpha locus (TRA) or T-cell receptor beta locus (TRB), for example T-cell receptor alpha constant (TRAC) locus, T-cell receptor beta constant 1 (TRBC1) locus or T-cell receptor beta constant 2 (TRBC1) locus. Advantageously, insertion of a transgene into such locus can simultaneously achieve expression of the transgene, potentially controlled by the endogenous promoter, and knock-out expression of the endogenous TCR. This approach has been exemplified in Eyquem et al., (2017) Nature 543: 113-117, wherein the authors used CRISPR/Cas9 gene editing to knock-in a DNA molecule encoding a CD19-specific CAR into the TRAC locus downstream of the endogenous promoter; the CAR-T cells obtained by CRISPR were significantly superior in terms of reduced tonic CAR signaling and exhaustion.

[0730] T cell receptors (TCR) are cell surface receptors that participate in the activation of T cells in response to the presentation of antigen. The TCR is generally made from two chains, α and β, which assemble to form a heterodimer and associates with the CD3-transducing subunits to form the T cell receptor complex present on the cell surface. Each α and β chain of the TCR consists of an immunoglobulin-like N-terminal variable (V) and constant (C) region, a hydrophobic transmembrane domain, and a short cytoplasmic region. As for immunoglobulin molecules, the variable region of the α and β chains are generated by V(D)J recombination, creating a large diversity of antigen specificities within the population of T cells. However, in contrast to immunoglobulins that recognize intact antigen, T cells are activated by processed peptide fragments in association with an MHC molecule, introducing an extra dimension to antigen recognition by T cells, known as MHC restriction. Recognition of MHC disparities between the donor and recipient through the T cell receptor leads to T cell proliferation and the potential development of graft versus host disease (GVHD). The inactivation of TCRα or TCRβ can result in the elimination of the TCR from the surface of T cells preventing recognition of alloantigen and thus GVHD. However, TCR disruption generally results in the elimination of the CD3 signaling component and alters the means of further T cell expansion.

[0731] Hence, in an embodiment, editing of cells, particularly cells intended for adoptive cell therapies, more particularly immuno-responsive cells such as T cells, may be performed to knock-out or knock-down expression of an endogenous TCR in a cell. For example, NHEJ-based or HDR-based gene editing approaches can be employed to disrupt the endogenous TCR alpha and/or beta chain genes. For example, gene editing system or systems, such as IscB system or systems, can be designed to target a sequence found within the TCR beta chain conserved between the beta 1 and beta 2 constant region genes (TRBC1 and TRBC2) and/or to target the constant region of the TCR alpha chain (TRAC) gene.

[0732] Allogeneic cells are rapidly rejected by the host immune system. It has been demonstrated that, allogeneic leukocytes present in non-irradiated blood products will persist for no more than 5 to 6 days (Boni, Muranski et al. 2008 Blood 1; 112(12):4746-54). Thus, to prevent rejection of allogeneic cells, the host's immune system usually has to be suppressed to some extent. However, in the case of adoptive cell transfer the use of immunosuppressive drugs also have a detrimental effect on the introduced therapeutic T cells. Therefore, to effectively use an adoptive immunotherapy approach in these conditions, the introduced cells would need to be resistant to the immunosuppressive treatment. Thus, in a particular embodiment, the present invention further comprises a step of modifying T cells to make them resistant to an immunosuppressive agent, preferably by inactivating at least one gene encoding a target for an immunosuppressive agent. An immunosuppressive agent is an agent that suppresses immune function by one of several mechanisms of action. An immunosuppressive agent can be, but is not limited to a calcineurin inhibitor, a target of rapamycin, an interleukin-2 receptor α-chain blocker, an inhibitor of inosine monophosphate dehydrogenase, an inhibitor of dihydrofolic acid reductase, a corticosteroid or an immunosuppressive antimetabolite. The present invention allows conferring immunosuppressive resistance to T cells for immunotherapy by inactivating the target of the immunosuppressive agent in T cells. As non-limiting examples, targets for an immunosuppressive agent can be a receptor for an immunosuppressive agent such as: CD52, glucocorticoid receptor (GR), a FKBP family gene member and a cyclophilin family gene member.

[0733] In an embodiment, editing of cells, particularly cells intended for adoptive cell therapies, more particularly immuno-responsive cells such as T cells, may be performed to block an immune checkpoint, such as to knock-out or knock-down expression of an immune checkpoint protein or receptor in a cell. Immune checkpoints are inhibitory pathways that slow down or stop immune reactions and prevent excessive tissue damage from uncontrolled activity of immune cells. In an embodiment, the immune checkpoint targeted is the programmed death-1 (PD-1 or CD279) gene (PDCD1). In other embodiments, the immune checkpoint targeted is cytotoxic T-lymphocyte-associated antigen (CTLA-4). In additional embodiments, the immune checkpoint targeted is another member of the CD28 and CTLA4 Ig superfamily such as BTLA, LAG3, ICOS, PDL1 or KIR. In further additional embodiments, the immune checkpoint targeted is a member of the TNFR superfamily such as CD40, OX40, CD137, GITR, CD27 or TIM-3.

[0734] Additional immune checkpoints include Src homology 2 domain-containing protein tyrosine phosphatase 1 (SHP-1) (Watson H A, et al., SHP-1: the next checkpoint target for cancer immunotherapy? Biochem Soc Trans. 2016 Apr. 15; 44(2):356-62). SHP-1 is a widely expressed inhibitory protein tyrosine phosphatase (PTP). In T-cells, it is a negative regulator of antigen-dependent activation and proliferation. It is a cytosolic protein, and therefore not amenable to antibody-mediated therapies, but its role in activation and proliferation makes it an attractive target for genetic manipulation in adoptive transfer strategies, such as chimeric antigen receptor (CAR) T cells. Immune checkpoints may also include T cell immunoreceptor with Ig and ITIM domains (TIGIT/Vstm3/WUCAM/VSIG9) and VISTA (Le Mercier I, et al., (2015) Beyond CTLA-4 and PD-1, the generation Z of negative checkpoint regulators. Front. Immunol. 6:418).

[0735] International Patent Publication No. WO 2014/172606 relates to the use of MT1 and/or MT2 inhibitors to increase proliferation and/or activity of exhausted CD8+ T-cells and to decrease CD8+ T-cell exhaustion (e.g., decrease functionally exhausted or unresponsive CD8+ immune cells). In an embodiment, metallothioneins are targeted by gene editing in adoptively transferred T cells.

[0736] In an embodiment, targets of gene editing may be at least one targeted locus involved in the expression of an immune checkpoint protein. Such targets may include, but are not limited to CTLA4, PPP2CA, PPP2CB, PTPN6, PTPN22, PDCD1, ICOS (CD278), PDL1, KIR, LAG3, HAVCR2, BTLA, CD160, TIGIT, CD96, CRTAM, LAIR1, SIGLEC7, SIGLEC9, CD244 (2B4), TNFRSF10B, TNFRSF10A, CASP8, CASP10, CASP3, CASP6, CASP7, FADD, FAS, TGFBRII, TGFRBRI, SMAD2, SMAD3, SMAD4, SMAD10, SKI, SKIL, TGIF1, IL10RA, IL10RB, HMOX2, IL6R, IL6ST, EIF2AK4, CSK, PAG1, SIT1, FOXP3, PRDM1, BATF, VISTA, GUCY1A2, GUCY1A3, GUCY1B2, GUCY1B3, MT1, MT2, CD40, OX40, CD137, GITR, CD27, SUP-1, TIM-3, CEACAM-1, CEACAM-3, or CEACAM-5. In preferred embodiments, the gene locus involved in the expression of PD-1 or CTLA-4 genes is targeted. In other preferred embodiments, combinations of genes are targeted, such as but not limited to PD-1 and TIGIT.

[0737] By means of an example and without limitation, International Patent Publication No. WO 2016/196388 concerns an engineered T cell comprising (a) a genetically engineered antigen receptor that specifically binds to an antigen, which receptor may be a CAR; and (b) a disrupted gene encoding a PD-L1, an agent for disruption of a gene encoding a PD-L1, and/or disruption of a gene encoding PD-L1, wherein the disruption of the gene may be mediated by a gene editing nuclease, a zinc finger nuclease (ZFN), CRISPR/Cas9 and/or TALEN. WO2015142675 relates to immune effector cells comprising a CAR in combination with an agent (such as the composition or system herein) that increases the efficacy of the immune effector cells in the treatment of cancer, wherein the agent may inhibit an immune inhibitory molecule, such as PD1, PD-L1, CTLA-4, TIM-3, LAG-3, VISTA, BTLA, TIGIT, LAIR1, CD160, 2B4, TGFR beta, CEACAM-1, CEACAM-3, or CEACAM-5. Ren et al., (2017) Clin Cancer Res 23 (9) 2255-2266 performed lentiviral delivery of CAR and electro-transfer of Cas9 mRNA and gRNAs targeting endogenous TCR, 0-2 microglobulin (B2M) and PD1 simultaneously, to generate gene-disrupted allogeneic CAR T cells deficient of TCR, HLA class I molecule and PD1.

[0738] In an embodiment, cells may be engineered to express a CAR, wherein expression and/or function of methylcytosine dioxygenase genes (TET1, TET2 and/or TET3) in the cells has been reduced or eliminated, (such as the composition or system herein) (for example, as described in WO201704916).

[0739] In an embodiment, editing of cells, particularly cells intended for adoptive cell therapies, more particularly immuno-responsive cells such as T cells, may be performed to knock-out or knock-down expression of an endogenous gene in a cell, said endogenous gene encoding an antigen targeted by an exogenous CAR or TCR, thereby reducing the likelihood of targeting of the engineered cells. In an embodiment, the targeted antigen may be one or more antigen selected from the group consisting of CD38, CD138, CS-1, CD33, CD26, CD30, CD53, CD92, CD100, CD148, CD150, CD200, CD261, CD262, CD362, human telomerase reverse transcriptase (hTERT), survivin, mouse double minute 2 homolog (MDM2), cytochrome P450 1B1 (CYP1B), HER2/neu, Wilms' tumor gene 1 (WT1), livin, alphafetoprotein (AFP), carcinoembryonic antigen (CEA), mucin 16 (MUC16), MUC1, prostate-specific membrane antigen (PSMA), p53, cyclin (D1), B cell maturation antigen (BCMA), transmembrane activator and CAML Interactor (TACI), and B-cell activating factor receptor (BAFF-R) (for example, as described in International Patent Publication Nos. WO 2016/011210 and WO 2017/011804).

[0740] In an embodiment, editing of cells, particularly cells intended for adoptive cell therapies, more particularly immuno-responsive cells such as T cells, may be performed to knock-out or knock-down expression of one or more MHC constituent proteins, such as one or more HLA proteins and/or beta-2 microglobulin (B2M), in a cell, whereby rejection of non-autologous (e.g., allogeneic) cells by the recipient's immune system can be reduced or avoided. In preferred embodiments, one or more HLA class I proteins, such as HLA-A, B and/or C, and/or B2M may be knocked-out or knocked-down. Preferably, B2M may be knocked-out or knocked-down. By means of an example, Ren et al., (2017) Clin Cancer Res 23 (9) 2255-2266 performed lentiviral delivery of CAR and electro-transfer of Cas mRNA and gRNAs targeting endogenous TCR, J-2 microglobulin (B2M) and PD1 simultaneously, to generate gene-disrupted allogeneic CAR T cells deficient of TCR, HLA class I molecule and PD1.

[0741] In other embodiments, at least two genes are edited. Pairs of genes may include, but are not limited to PD1 and TCRα, PD1 and TCRβ, CTLA-4 and TCRα, CTLA-4 and TCRβ, LAG3 and TCRα, LAG3 and TCRβ, Tim3 and TCRα, Tim3 and TCRβ, BTLA and TCRα, BTLA and TCRβ, BY55 and TCRα, BY55 and TCRβ, TIGIT and TCRα, TIGIT and TCRβ, B7H5 and TCRα, B7H5 and TCRβ, LAIR1 and TCRα, LAIR1 and TCRβ, SIGLEC10 and TCRα, SIGLEC10 and TCRβ, 2B4 and TCRα, 2B4 and TCRβ, B2M and TCRα, B2M and TCRβ.

[0742] In an embodiment, a cell may be multiplied edited (multiplex genome editing) as taught herein to (1) knock-out or knock-down expression of an endogenous TCR (for example, TRBC1, TRBC2 and/or TRAC), (2) knock-out or knock-down expression of an immune checkpoint protein or receptor (for example PD1, PD-L1 and/or CTLA4); and (3) knock-out or knock-down expression of one or more MHC constituent proteins (for example, HLA-A, B and/or C, and/or B2M, preferably B2M).

[0743] Whether prior to or after genetic modification of the T cells, the T cells can be activated and expanded generally using methods as described, for example, in U.S. Pat. Nos. 6,352,694; 6,534,055; 6,905,680; 5,858,358; 6,887,466; 6,905,681; 7,144,575; 7,232,566; 7,175,843; 5,883,223; 6,905,874; 6,797,514; 6,867,041; and 7,572,631. T cells can be expanded in vitro or in vivo.

[0744] Immune cells may be obtained using any method known in the art. In one embodiment, allogenic T cells may be obtained from healthy subjects. In one embodiment T cells that have infiltrated a tumor are isolated. T cells may be removed during surgery. T cells may be isolated after removal of tumor tissue by biopsy. T cells may be isolated by any means known in the art. In one embodiment, T cells are obtained by apheresis. In one embodiment, the method may comprise obtaining a bulk population of T cells from a tumor sample by any suitable method known in the art. For example, a bulk population of T cells can be obtained from a tumor sample by dissociating the tumor sample into a cell suspension from which specific cell populations can be selected. Suitable methods of obtaining a bulk population of T cells may include, but are not limited to, any one or more of mechanically dissociating (e.g., mincing) the tumor, enzymatically dissociating (e.g., digesting) the tumor, and aspiration (e.g., as with a needle).

[0745] The bulk population of T cells obtained from a tumor sample may comprise any suitable type of T cell. Preferably, the bulk population of T cells obtained from a tumor sample comprises tumor infiltrating lymphocytes (TTLs).

[0746] The tumor sample may be obtained from any mammal. Unless stated otherwise, as used herein, the term “mammal” refers to any mammal including, but not limited to, mammals of the order Logomorpha, such as rabbits; the order Carnivora, including Felines (cats) and Canines (dogs); the order Artiodactyla, including Bovines (cows) and Swines (pigs); or of the order Perssodactyla, including Equines (horses). The mammals may be non-human primates, e.g., of the order Primates, Ceboids, or Simoids (monkeys) or of the order Anthropoids (humans and apes). In one embodiment, the mammal may be a mammal of the order Rodentia, such as mice and hamsters. Preferably, the mammal is a non-human primate or a human. An especially preferred mammal is the human.

[0747] T cells can be obtained from a number of sources, including peripheral blood mononuclear cells (PBMC), bone marrow, lymph node tissue, spleen tissue, and tumors. In an embodiment of the present invention, T cells can be obtained from a unit of blood collected from a subject using any number of techniques known to the skilled artisan, such as Ficoll separation. In one preferred embodiment, cells from the circulating blood of an individual are obtained by apheresis or leukapheresis. The apheresis product typically contains lymphocytes, including T cells, monocytes, granulocytes, B cells, other nucleated white blood cells, red blood cells, and platelets. In one embodiment, the cells collected by apheresis may be washed to remove the plasma fraction and to place the cells in an appropriate buffer or media for subsequent processing steps. In one embodiment of the invention, the cells are washed with phosphate buffered saline (PBS). In an alternative embodiment, the wash solution lacks calcium and may lack magnesium or may lack many if not all divalent cations. Initial activation steps in the absence of calcium lead to magnified activation. As those of ordinary skill in the art would readily appreciate a washing step may be accomplished by methods known to those in the art, such as by using a semi-automated “flow-through” centrifuge (for example, the Cobe 2991 cell processor) according to the manufacturer's instructions. After washing, the cells may be resuspended in a variety of biocompatible buffers, such as, for example, Ca-free, Mg-free PBS. Alternatively, the undesirable components of the apheresis sample may be removed, and the cells directly resuspended in culture media.

[0748] In another embodiment, T cells are isolated from peripheral blood lymphocytes by lysing the red blood cells and depleting the monocytes, for example, by centrifugation through a PERCOLL™ gradient. A specific subpopulation of T cells, such as CD28+, CD4+, CDC, CD45RA+, and CD45RO+ T cells, can be further isolated by positive or negative selection techniques. For example, in one preferred embodiment, T cells are isolated by incubation with anti-CD3/anti-CD28 (i.e., 3×28)-conjugated beads, such as DYNABEADS® M-450 CD3/CD28 T, or XCYTE DYNABEADS™ for a time period sufficient for positive selection of the desired T cells. In one embodiment, the time period is about 30 minutes. In a further embodiment, the time period ranges from 30 minutes to 36 hours or longer and all integer values there between. In a further embodiment, the time period is at least 1, 2, 3, 4, 5, or 6 hours. In yet another preferred embodiment, the time period is 10 to 24 hours. In one preferred embodiment, the incubation time period is 24 hours. For isolation of T cells from patients with leukemia, use of longer incubation times, such as 24 hours, can increase cell yield. Longer incubation times may be used to isolate T cells in any situation where there are few T cells as compared to other cell types, such in isolating tumor infiltrating lymphocytes (TIL) from tumor tissue or from immunocompromised individuals. Further, use of longer incubation times can increase the efficiency of capture of CD8+ T cells.

[0749] Enrichment of a T cell population by negative selection can be accomplished with a combination of antibodies directed to surface markers unique to the negatively selected cells. A preferred method is cell sorting and/or selection via negative magnetic immunoadherence or flow cytometry that uses a cocktail of monoclonal antibodies directed to cell surface markers present on the cells negatively selected. For example, to enrich for CD4+ cells by negative selection, a monoclonal antibody cocktail typically includes antibodies to CD14, CD20, CD11b, CD16, HLA-DR, and CD8.

[0750] Further, monocyte populations (e.g., CD14+ cells) may be depleted from blood preparations by a variety of methodologies, including anti-CD14 coated beads or columns, or utilization of the phagocytotic activity of these cells to facilitate removal. Accordingly, in one embodiment, the invention uses paramagnetic particles of a size sufficient to be engulfed by phagocytotic monocytes. In an embodiment, the paramagnetic particles are commercially available beads, for example, those produced by Life Technologies under the trade name Dynabeads™. In one embodiment, other non-specific cells are removed by coating the paramagnetic particles with “irrelevant” proteins (e.g., serum proteins or antibodies). Irrelevant proteins and antibodies include those proteins and antibodies or fragments thereof that do not specifically target the T cells to be isolated. In an embodiment, the irrelevant beads include beads coated with sheep anti-mouse antibodies, goat anti-mouse antibodies, and human serum albumin.

[0751] In brief, such depletion of monocytes is performed by preincubating T cells isolated from whole blood, apheresed peripheral blood, or tumors with one or more varieties of irrelevant or non-antibody coupled paramagnetic particles at any amount that allows for removal of monocytes (approximately a 20:1 bead:cell ratio) for about 30 minutes to 2 hours at 22 to 37 degrees C., followed by magnetic removal of cells which have attached to or engulfed the paramagnetic particles. Such separation can be performed using standard methods available in the art. For example, any magnetic separation methodology may be used including a variety of which are commercially available, (e.g., DYNAL® Magnetic Particle Concentrator (DYNAL MPC®)). Assurance of requisite depletion can be monitored by a variety of methodologies known to those of ordinary skill in the art, including flow cytometric analysis of CD14 positive cells, before and after depletion.

[0752] For isolation of a desired population of cells by positive or negative selection, the concentration of cells and surface (e.g., particles such as beads) can be varied. In an embodiment, it may be desirable to significantly decrease the volume in which beads and cells are mixed together (i.e., increase the concentration of cells), to ensure maximum contact of cells and beads. For example, in one embodiment, a concentration of 2 billion cells/ml is used. In one embodiment, a concentration of 1 billion cells/ml is used. In a further embodiment, greater than 100 million cells/ml is used. In a further embodiment, a concentration of cells of 10, 15, 20, 25, 30, 35, 40, 45, or 50 million cells/ml is used. In yet another embodiment, a concentration of cells from 75, 80, 85, 90, 95, or 100 million cells/ml is used. In further embodiments, concentrations of 125 or 150 million cells/ml can be used. Using high concentrations can result in increased cell yield, cell activation, and cell expansion. Further, use of high cell concentrations allows more efficient capture of cells that may weakly express target antigens of interest, such as CD28-negative T cells, or from samples where there are many tumor cells present (i.e., leukemic blood, tumor tissue, etc). Such populations of cells may have therapeutic value and would be desirable to obtain. For example, using high concentration of cells allows more efficient selection of CD8+ T cells that normally have weaker CD28 expression.

[0753] In a related embodiment, it may be desirable to use lower concentrations of cells. By significantly diluting the mixture of T cells and surface (e.g., particles such as beads), interactions between the particles and cells are minimized. This selects for cells that express high amounts of desired antigens to be bound to the particles. For example, CD4+ T cells express higher levels of CD28 and are more efficiently captured than CD8+ T cells in dilute concentrations. In one embodiment, the concentration of cells used is 5× 106/ml. In other embodiments, the concentration used can be from about 1×105/ml to 1×106/ml, and any integer value in between.

[0754] T cells can also be frozen. Wishing not to be bound by theory, the freeze and subsequent thaw step provides a more uniform product by removing granulocytes and to some extent monocytes in the cell population. After a washing step to remove plasma and platelets, the cells may be suspended in a freezing solution. While many freezing solutions and parameters are known in the art and will be useful in this context, one method involves using PBS containing 20% DMSO and 8% human serum albumin, or other suitable cell freezing media, the cells then are frozen to −80° C. at a rate of 1° per minute and stored in the vapor phase of a liquid nitrogen storage tank. Other methods of controlled freezing may be used as well as uncontrolled freezing immediately at −20° C. or in liquid nitrogen.

[0755] T cells for use in the present invention may also be antigen-specific T cells. For example, tumor-specific T cells can be used. In an embodiment, antigen-specific T cells can be isolated from a patient of interest, such as a patient afflicted with a cancer or an infectious disease. In one embodiment, neoepitopes are determined for a subject, and T cells specific to these antigens are isolated. Antigen-specific cells for use in expansion may also be generated in vitro using any number of methods known in the art, for example, as described in U.S. Patent Publication No. US 20040224402 entitled, Generation and Isolation of Antigen-Specific T Cells, or in U.S. Pat. No. 6,040,177. Antigen-specific cells for use in the present invention may also be generated using any number of methods known in the art, for example, as described in Current Protocols in Immunology, or Current Protocols in Cell Biology, both published by John Wiley & Sons, Inc., Boston, Mass.

[0756] In a related embodiment, it may be desirable to sort or otherwise positively select (e.g., via magnetic selection) the antigen specific cells prior to or following one or two rounds of expansion. Sorting or positively selecting antigen-specific cells can be carried out using peptide-MHC tetramers (Altman, et al., Science. 1996 Oct. 4; 274(5284):94-6). In another embodiment, the adaptable tetramer technology approach is used (Andersen et al., 2012 Nat Protoc. 7:891-902). Tetramers are limited by the need to utilize predicted binding peptides based on prior hypotheses, and the restriction to specific HLAs. Peptide-MHC tetramers can be generated using techniques known in the art and can be made with any MHC molecule of interest and any antigen of interest as described herein. Specific epitopes to be used in this context can be identified using numerous assays known in the art. For example, the ability of a polypeptide to bind to MHC class I may be evaluated indirectly by monitoring the ability to promote incorporation of 1251 labeled 02-microglobulin (β2m) into MHC class I/β2m/peptide heterotrimeric complexes (see Parker et al., J. Immunol. 152:163, 1994).

[0757] In one embodiment cells are directly labeled with an epitope-specific reagent for isolation by flow cytometry followed by characterization of phenotype and TCRs. In one embodiment, T cells are isolated by contacting with T cell specific antibodies. Sorting of antigen-specific T cells, or generally any cells of the present invention, can be carried out using any of a variety of commercially available cell sorters, including, but not limited to, MoFlo sorter (DakoCytomation, Fort Collins, Colo.), FACSAria™, FACSArray™, FACSVantage™ BD™ LSR II, and FACSCalibur™ (BD Biosciences, San Jose, Calif.).

[0758] In a preferred embodiment, the method comprises selecting cells that also express CD3. The method may comprise specifically selecting the cells in any suitable manner. Preferably, the selecting is carried out using flow cytometry. The flow cytometry may be carried out using any suitable method known in the art. The flow cytometry may employ any suitable antibodies and stains. Preferably, the antibody is chosen such that it specifically recognizes and binds to the particular biomarker being selected. For example, the specific selection of CD3, CD8, TIM-3, LAG-3, 4-1BB, or PD-1 may be carried out using anti-CD3, anti-CD8, anti-TIM-3, anti-LAG-3, anti-4-1BB, or anti-PD-1 antibodies, respectively. The antibody or antibodies may be conjugated to a bead (e.g., a magnetic bead) or to a fluorochrome. Preferably, the flow cytometry is fluorescence-activated cell sorting (FACS). TCRs expressed on T cells can be selected based on reactivity to autologous tumors. Additionally, T cells that are reactive to tumors can be selected for based on markers using the methods described in patent publication Nos. WO2014133567 and WO2014133568, herein incorporated by reference in their entirety. Additionally, activated T cells can be selected for based on surface expression of CD107a.

[0759] In one embodiment of the invention, the method further comprises expanding the numbers of T cells in the enriched cell population. Such methods are described in U.S. Pat. No. 8,637,307 and is herein incorporated by reference in its entirety. The numbers of T cells may be increased at least about 3-fold (or 4-, 5-, 6-, 7-, 8-, or 9-fold), more preferably at least about 10-fold (or 20-, 30-, 40-, 50-, 60-, 70-, 80-, or 90-fold), more preferably at least about 100-fold, more preferably at least about 1,000 fold, or most preferably at least about 100,000-fold. The numbers of T cells may be expanded using any suitable method known in the art. Exemplary methods of expanding the numbers of cells are described in patent publication No. WO 2003/057171, U.S. Pat. No. 8,034,334, and U.S. Patent Publication No. 2012/0244133, each of which is incorporated herein by reference.

[0760] In one embodiment, ex vivo T cell expansion can be performed by isolation of T cells and subsequent stimulation or activation followed by further expansion. In one embodiment of the invention, the T cells may be stimulated or activated by a single agent. In another embodiment, T cells are stimulated or activated with two agents, one that induces a primary signal and a second that is a co-stimulatory signal. Ligands useful for stimulating a single signal or stimulating a primary signal and an accessory molecule that stimulates a second signal may be used in soluble form. Ligands may be attached to the surface of a cell, to an Engineered Multivalent Signaling Platform (EMSP), or immobilized on a surface. In a preferred embodiment both primary and secondary agents are co-immobilized on a surface, for example a bead or a cell. In one embodiment, the molecule providing the primary activation signal may be a CD3 ligand, and the co-stimulatory molecule may be a CD28 ligand or 4-1BB ligand.

[0761] In an embodiment, T cells comprising a CAR or an exogenous TCR, may be manufactured as described in International Patent Publication No. WO 2015/120096, by a method comprising enriching a population of lymphocytes obtained from a donor subject; stimulating the population of lymphocytes with one or more T-cell stimulating agents to produce a population of activated T cells, wherein the stimulation is performed in a closed system using serum-free culture medium; transducing the population of activated T cells with a viral vector comprising a nucleic acid molecule which encodes the CAR or TCR, using a single cycle transduction to produce a population of transduced T cells, wherein the transduction is performed in a closed system using serum-free culture medium; and expanding the population of transduced T cells for a predetermined time to produce a population of engineered T cells, wherein the expansion is performed in a closed system using serum-free culture medium. In an embodiment, T cells comprising a CAR or an exogenous TCR, may be manufactured as described in WO 2015/120096, by a method comprising: obtaining a population of lymphocytes; stimulating the population of lymphocytes with one or more stimulating agents to produce a population of activated T cells, wherein the stimulation is performed in a closed system using serum-free culture medium; transducing the population of activated T cells with a viral vector comprising a nucleic acid molecule which encodes the CAR or TCR, using at least one cycle transduction to produce a population of transduced T cells, wherein the transduction is performed in a closed system using serum-free culture medium; and expanding the population of transduced T cells to produce a population of engineered T cells, wherein the expansion is performed in a closed system using serum-free culture medium. The predetermined time for expanding the population of transduced T cells may be 3 days. The time from enriching the population of lymphocytes to producing the engineered T cells may be 6 days. The closed system may be a closed bag system. Further provided is population of T cells comprising a CAR or an exogenous TCR obtainable or obtained by said method, and a pharmaceutical composition comprising such cells.

[0762] In an embodiment, T cell maturation or differentiation in vitro may be delayed or inhibited by the method as described in International Patent Publication No. WO 2017/070395, comprising contacting one or more T cells from a subject in need of a T cell therapy with an AKT inhibitor (such as, e.g., one or a combination of two or more AKT inhibitors disclosed in claim 8 of WO2017070395) and at least one of exogenous Interleukin-7 (IL-7) and exogenous Interleukin-15 (IL-15), wherein the resulting T cells exhibit delayed maturation or differentiation, and/or wherein the resulting T cells exhibit improved T cell function (such as, e.g., increased T cell proliferation; increased cytokine production; and/or increased cytolytic activity) relative to a T cell function of a T cell cultured in the absence of an AKT inhibitor.

[0763] In an embodiment, a patient in need of a T cell therapy may be conditioned by a method as described in International Patent Publication No. WO 2016/191756 comprising administering to the patient a dose of cyclophosphamide between 200 mg/m2/day and 2000 mg/m2/day and a dose of fludarabine between 20 mg/m2/day and 900 mg/m²/day.

### Diseases

Genetic Diseases and Diseases with a Genetic and/or Epigenetic Aspect

[0764] The compositions, systems, or components thereof can be used to treat and/or prevent a genetic disease or a disease with a genetic and/or epigenetic aspect. The genes and conditions exemplified herein are not exhaustive. In one embodiment, a method of treating and/or preventing a genetic disease can include administering a composition, system, and/or one or more components thereof to a subject, where the composition, system, and/or one or more components thereof is capable of modifying one or more copies of one or more genes associated with the genetic disease or a disease with a genetic and/or epigenetic aspect in one or more cells of the subject. In one embodiment, modifying one or more copies of one or more genes associated with a genetic disease or a disease with a genetic and/or epigenetic aspect in the subject can eliminate a genetic disease or a symptom thereof in the subject. In one embodiment, modifying one or more copies of one or more genes associated with a genetic disease or a disease with a genetic and/or epigenetic aspect in the subject can decrease the severity of a genetic disease or a symptom thereof in the subject. In one embodiment, the compositions, systems, or components thereof can modify one or more genes or polynucleotides associated with one or more diseases, including genetic diseases and/or those having a genetic aspect and/or epigenetic aspect, including but not limited to, any one or more set forth in Table 6. It will be appreciated that those diseases and associated genes listed herein are non-exhaustive and non-limiting. Further some genes play roles in the development of multiple diseases.

TABLE 6
Exemplary Genetic and Other Diseases and Associated Genes

| | Primary | | |
|---|---|---|---|
| | Tissues or | Additional | |
| | System | Tissues/Systems | |
| Disease Name | Affected | Affected | Genes |
| Achondroplasia | Bone and | | fibroblast growth factor receptor 3 |
| | Muscle | | (FGFR3) |
| Achromatopsia | eye | | CNGA3, CNGB3, GNAT2, PDE6C, |
| | | | PDE6H, ACHM2, ACHM3, |
| Acute Renal Injury | kidney | | NFkappaB, AATF, p85alpha, FAS, |
| | | | Apoptosis cascade elements (e.g. |
| | | | FASR, Caspase 2, 3, 4, 6, 7, 8, 9, 10, |
| | | | AKT, TNF alpha, IGF1, IGF1R, |
| | | | RIPK1), p53 |
| Age Related Macular | eye | | Abcr; CCL2; CC2; CP |
| Degeneration | | | (ceruloplasmin); Timp3; cathepsinD; |
| | | | VLDLR, CCR2 |
| AIDS | Immune System | | KIR3DL1, NKAT3, NKB1, AMB11, |
| | | | KIR3DS1, IFNG, CXCL12, SDF1 |
| Albinism (including | Skin, hair, eyes, | | TYR, OCA2, TYRP1, and SLC45A2, |
| oculocutaneous albinism (types | | | SLC24A5 and C10orf11 |
| 1-7) and ocular albinism) | | | |
| Alkaptonuria | Metabolism of | Tissues/organs | HGD |
| | amino acids | where | |
| | | homogentisic acid | |
| | | accumulates, | |
| | | particularly | |
| | | cartilage (joints), | |
| | | heart valves, | |
| | | kidneys | |
| alpha-1 antitrypsin deficiency | Lung | Liver, skin, | SERPINA1, those set forth in |
| (AATD or A1AD) | | vascular system, | WO2017165862, PiZ allele |
| | | kidneys, GI | |
| ALS | CNS | | SOD1; ALS2; ALS3; ALS5; |
| | | | ALS7; STEX; FUS; TARDBP; VEGF |
| | | | (VEGF-a; |
| | | | VEGF-b; VEGF-c); DPP6; NEFH, |
| | | | PTGS1, SLC1A2, TNFRSF10B, |
| | | | PRPH, HSP90AA1, CRIA2, IFNG, |
| | | | AMPA2 S100B, FGF2, AOX1, CS, |
| | | | TXN, RAPHJ1, MAP3K5, NBEAL1, |
| | | | GPX1, ICA1L, RAC1, MAPT, |
| | | | ITPR2, ALS2CR4, GLS, ALS2CR8, |
| | | | CNTFR, ALS2CR11, FOLH1, |
| | | | FAM117B, P4HB, CNTF, SQSTM1, |
| | | | STRADB, NAIP, NLR, YWHAQ, |
| | | | SLC33A1, TRAK2, SCA1, NIF3L1, |
| | | | NIF3, PARD3B, COX8A, CDK15, |
| | | | HECW1, HECT, C2, WW 15, NOS1, |
| | | | MET, SOD2, HSPB1, NEFL, CTSB, |
| | | | ANG, HSPA8, RNase A, VAPB, |
| | | | VAMP, SNCA, alpha HGF, CAT, |
| | | | ACTB, NEFM, TH, BCL2, FAS, |
| | | | CASP3, CLU, SMN1, G6PD, BAX, |
| | | | HSF1, RNF19A, JUN, ALS2CR12, |
| | | | HSPA5, MAPK14, APEX1, |
| | | | TXNRD1, NOS2, TIMP1, CASP9, |
| | | | XIAP, GLG1, EPO, VEGFA, ELN, |
| | | | GDNF, NFE2L2, SLC6A3, HSPA4, |
| | | | APOE, PSMB8, DCTN2, TIMP3, |
| | | | KIFAP3, SLC1A1, SMN2, CCNC, |
| | | | STUB1, ALS2, PRDX6, SYP, |
| | | | CABIN1, CASP1, GART, CDK5, |
| | | | ATXN3, RTN4, C1QB, VEGFC, |
| | | | HTT, PARK7, XDH, GFAP, MAP2, |
| | | | CYCS, FCGR3B, CCS, UBL5, |
| | | | MMP9m SLC18A3, TRPM7, |
| | | | HSPB2, AKT1, DEERL1, CCL2, |
| | | | NGRN, GSR, TPPP3, APAF1, |
| | | | BTBD10, GLUD1, CXCR4, S:C1A3, |
| | | | FLT1, PON1, AR, LIF, ERBB3, |
| | | | :GA:S1, CD44, TP53, TLR3, GRIA1, |
| | | | GAPDH, AMPA, GRIK1, DES, |
| | | | CHAT, FLT4, CHMP2B, BAG1, |
| | | | CHRNA4, GSS, BAK1, KDR, |
| | | | GSTP1, OGG1, IL6 |
| Alzheimer's Disease | Brain | | E1; CHIP; UCH; UBB; Tau; LRP; |
| | | | PICALM; CLU; PS1; |
| | | | SORL1; CR1; VLDLR; UBA1; |
| | | | UBA3; CHIP28; AQP1; UCHL1; |
| | | | UCHL3; APP, AAA, CVAP, AD1, |
| | | | APOE, AD2, DCP1, ACE1, MPO, |
| | | | PACIP1, PAXIP1L, PTIP, A2M, |
| | | | BLMH, BMH, PSEN1, AD3, |
| | | | ALAS2, ABCA1, BIN1, BDNF, |
| | | | BTNL8, C1ORF49, CDH4, |
| | | | CHRNB2, CKLFSF2, CLEC4E, |
| | | | CR1L, CSF3R, CST3, CYP2C, |
| | | | DAPK1, ESR1, FCAR, FCGR3B, |
| | | | FFA2, FGA, GAB2, GALP, |
| | | | GAPDHS, GMPB, HP, HTR7, IDE, |
| | | | IF127, IFI6, IFIT2, IL1RN, IL-1RA, |
| | | | IL8RA, IL8RB, JAG1, KCNJ15, |
| | | | LRP6, MAPT, MARK4, |
| | | | MPHOSPH1, MTHFR, NBN, |
| | | | NCSTN, NIACR2, NMNAT3, NTM, |
| | | | ORM1, P2RY13, PBEF1, PCK1, |
| | | | PICALM, PLAU, PLXNC1, PRNP, |
| | | | PSEN1, PSEN2, PTPRA, RALGPS2, |
| | | | RGSL2, SELENBP1, SLC25A37, |
| | | | SORL1, Mitoferrin-1, TF, TFAM, |
| | | | TNF, TNFRSF10C, UBE1C |
| Amyloidosis | | | APOA1, APP, AAA, CVAP, AD1, |
| | | | GSN, FGA, LYZ, TTR, PALB |
| Amyloid neuropathy | | | TTR, PALB |
| Anemia | Blood | | CDAN1, CDA1, RPS19, DBA, |
| | | | PKLR, PK1, NT5C3, UMPH1, PSN1, |
| | | | RHAG, RH50A, NRAMP2, SPTB, |
| | | | ALAS2, ANH1, ASB, ABCB7, |
| | | | ABC7, ASAT |
| Angelman Syndrome | Nervous system, | | UBE3A |
| | brain | | |
| Attention Deficit Hyperactivity | Brain | | PTCHD1 |
| Disorder (ADHD) | | | |
| Autoimmune | Immune system | | TNFRSF6, APT1, FAS, CD95, |
| lymphoproliferative syndrome | | | ALPS1A |
| Autism, Autism spectrum | Brain | | PTCHD1; Mecp2; BZRAP1; |
| disorders (ASDs), including | | | MDGA2; Sema5A; Neurexin 1; |
| Asperger's and a general | | | GLO1, RTT, PPMX, MRX16, RX79, |
| diagnostic category called | | | NLGN3, NLGN4, KIAA1260, |
| Pervasive Developmental | | | AUTSX2, FMR1, FMR2; FXR1; |
| Disorders (PDDs) | | | FXR2; MGLUR5, ATP10C, CDH10, |
| | | | GRM6, MGLUR6, CDH9, CNTN4, |
| | | | NLGN2, CNTNAP2, SEMA5A, |
| | | | DHCR7, NLGN4X, NLGN4Y, DPP6, |
| | | | NLGN5, EN2, NRCAM, MDGA2, |
| | | | NRXN1, FMR2, AFF2, FOXP2, |
| | | | OR4M2, OXTR, FXR1, FXR2, PAH, |
| | | | GABRA1, PTEN, GABRA5, |
| | | | PTPRZ1, GABRB3, GABRG1, |
| | | | HIRIP3, SEZ6L2, HOXA1, |
| | | | SHANK3, IL6, SHBZRAP1, |
| | | | LAMB1, SLC6A4, SERT, MAPK3, |
| | | | TAS2R1, MAZ, TSC1, MDGA2, |
| | | | TSC2, MECP2, UBE3A, WNT2, see |
| | | | also 20110023145 |
| autosomal dominant polycystic | kidney | liver | PKD1, PKD2 |
| kidney disease (ADPKD) - | | | |
| (includes diseases such as von | | | |
| Hippel-Lindau disease and | | | |
| tubreous sclerosis complex | | | |
| disease) | | | |
| Autosomal Recessive Polycystic | kidney | liver | PKDH1 |
| Kidney Disease (ARPKD) | | | |
| Ataxia-Telangiectasia (a.k.a | Nervous system, | various | ATM |
| Louis Bar syndrome) | immune system | | |
| B-Cell Non-Hodgkin | | | BCL7A, BCL7 |
| Lymphoma | | | |
| Bardet-Biedl syndrome | Eye, | Liver, ear, | ARL6, BBS1, BBS2, BBS4, BBS5, |
| | musculoskeletal | gastrointestinal | BBS7, BBS9, BBS10, BBS12, |
| | system, kidney, | system, brain | CEP290, INPP5E, LZTFL1, MKKS, |
| | reproductive | | MKS1, SDCCAG8, TRIM32, TTC8 |
| | organs | | |
| Bare Lymphocyte Syndrome | blood | | TAPBP, TPSN, TAP2, ABCB3, |
| | | | PSF2, RING11, MHC2TA, C2TA, |
| | | | RFX5, RFXAP, RFX5 |
| Bartter's Syndrome (types I, II, | kidney | | SLC12A1 (type I), KCNJ1 (type II), |
| III, IVA and B, and V) | | | CLCNKB (type III), BSND (type IV |
| | | | A), or both the CLCNKA CLCNKB |
| | | | genes (type IV B), CASR (type V). |
| Becker muscular dystrophy | Muscle | | DMD, BMD, MYF6 |
| Best Disease (Vitelliform | eye | | VMD2 |
| Macular Dystrophy type 2) | | | |
| Bleeding Disorders | blood | | TBXA2R, P2RX1, P2X1 |
| Blue Cone Monochromacy | eye | | OPN1LW, OPN1MW, and LCR |
| Breast Cancer | Breast tissue | | BRCA1, BRCA2, COX-2 |
| Bruton's Disease (aka X-linked | Immune system, | | BTK |
| Agammglobulinemia) | specifically B | | |
| | cells | | |
| Cancers (e.g., lymphoma, | Various | | FAS, BID, CTLA4, PDCD1, CBLB, |
| chronic lymphocytic leukemia | | | PTPN6, TRAC, TRBC, those |
| (CLL), B cell acute lymphocytic | | | described in WO2015048577 |
| leukemia (B-ALL), acute | | | |
| lymphoblastic leukemia, acute | | | |
| myeloid leukemia, non- | | | |
| Hodgkin's lymphoma (NHL), | | | |
| diffuse large cell lymphoma | | | |
| (DLCL), multiple myeloma, | | | |
| renal cell carcinoma (RCC), | | | |
| neuroblastoma, colorectal | | | |
| cancer, breast cancer, ovarian | | | |
| cancer, melanoma, sarcoma, | | | |
| prostate cancer, lung cancer, | | | |
| esophageal cancer, | | | |
| hepatocellular carcinoma, | | | |
| pancreatic cancer, astrocytoma, | | | |
| mesothelioma, head and neck | | | |
| cancer, and medulloblastoma | | | |
| Cardiovascular Diseases | heart | Vascular system | IL1B, XDH, TP53, PTGS, MB, IL4, |
| | | | ANGPT1, ABCGu8, CTSK, PTGIR, |
| | | | KCNJ11, INS, CRP, PDGFRB, |
| | | | CCNA2, PDGFB, KCNJ5, KCNN3, |
| | | | CAPN10, ADRA2B, ABCG5, |
| | | | PRDX2, CPAN5, PARP14, MEX3C, |
| | | | ACE, RNF, IL6, TNF, STN, |
| | | | SERPINE1, ALB, AD1POQ, APOB, |
| | | | APOE, LEP, MTHFR, APOA1, |
| | | | EDN1, NPPB, NOS3, PPARG, |
| | | | PLAT, PTGS2, CETP, AGTR1, |
| | | | HMGCR, IGF1, SELE, REN, |
| | | | PPARA, PON1, KNG1, CCL2, LPL, |
| | | | VWF, F2, ICAM1, TGFB, NPPA, |
| | | | IL10, EPO, SOD1, VCAM1, IFNG, |
| | | | LPA, MPO, ESR1, MAPK, HP, F3, |
| | | | CST3, COG2, MMP9, SERPINC1, |
| | | | F8, HMOX1, APOC3, IL8, PROL1, |
| | | | CBS, NOS2, TLR4, SELP, ABCA1, |
| | | | AGT, LDLR, GPT, VEGFA, NR3C2, |
| | | | IL18, NOS1, NR3C1, FGB, HGF, |
| | | | IL1A, AKT1, LIPC, HSPD1, |
| | | | MAPK14, SPP1, ITGB3, CAT, |
| | | | UTS2, THBD, F10, CP, |
| | | | TNFRSF11B, EGFR, MMP2, PLG, |
| | | | NPY, RHOD, MAPK8, MYC, FN1, |
| | | | CMA1, PLAU, GNB3, ADRB2, |
| | | | SOD2, F5, VDR, ALOX5, HLA- |
| | | | DRB1, PARP1, CD40LG, PON2, |
| | | | AGER, IRS1, PTGS1, ECE1, F7, |
| | | | IRMN, EPHX2, IGFBP1, MAPK10, |
| | | | FAS, ABCB1, JUN, IGFBP3, CD14, |
| | | | PDE5A, AGTR2, CD40, LCAT, |
| | | | CCR5, MMP1, TIMP1, ADM, |
| | | | DYT10, STAT3, MMP3, ELN, |
| | | | USF1, CFH, HSPA4, MMP12, MME, |
| | | | F2R, SELL, CTSB, ANXA5, |
| | | | ADRB1, CYBA, FGA, GGT1, LIPG, |
| | | | HIF1A, CXCR4, PROC, SCARB1, |
| | | | CD79A, PLTP, ADD1, FGG, SAA1, |
| | | | KCNH2, DPP4, NPR1, VTN, |
| | | | KIAA0101, FOS, TLR2, PPIG, |
| | | | IL1R1, AR, CYP1A1, SERPINA1, |
| | | | MTR, RBP4, APOA4, CDKN2A, |
| | | | FGF2, EDNRB, ITGA2, VLA-2, |
| | | | CABIN1, SHBG, HMGB1, |
| | | | HSP90B2P, CYP3A4, GJA1, CAV1, |
| | | | ESR2, LTA, GDF15, BDNF, |
| | | | CYP2D6, NGF, SP1, TGIF1, SRC, |
| | | | EGF, PIK3CG, HLA-A, KCNQ1, |
| | | | CNR1, FBN1, CHKA, BEST1, |
| | | | CTNNB1, IL2, CD36, PRKAB1, |
| | | | TPO, ALDH7A1, CX3CR1, TH, F9, |
| | | | CH1, TF, HFE, IL17A, PTEN, |
| | | | GSTM1, DMD, GATA4, F13A1, |
| | | | TTR, FABP4, PON3, APOC1, INSR, |
| | | | TNFRSF1B, HTR2A, CSF3, |
| | | | CYP2C9, TXN, CYP11B2, PTH, |
| | | | CSF2, KDR, PLA2G2A, THBS1, |
| | | | GCG, RHOA, ALDH2, TCF7L2, |
| | | | NFE2L2, NOTCH1, UGT1A1, |
| | | | IFNA1, PPARD, SIRT1, GNHR1, |
| | | | PAPPA, ARR3, NPPC, AHSP, |
| | | | PTK2, IL13, MTOR, ITGB2, GSTT1, |
| | | | IL6ST, CPB2, CYP1A2, HNF4A, |
| | | | SLC64A, PLA2G6, TNFSF11, |
| | | | SLC8A1, F2RL1, AKR1A1, |
| | | | ALDH9A1, BGLAP, MTTP, MTRR, |
| | | | SULT1A3, RAGE, C4B, P2RY12, |
| | | | RNLS, CREB1, POMC, RAC1, |
| | | | LMNA, CD59, SCM5A, CYP1B1, |
| | | | MIF, MMP13, TIMP2, CYP19A1, |
| | | | CUP21A2, PTPN22, MYH14, MBL2, |
| | | | SELPLG, AOC3, CTSL1, PCNA, |
| | | | IGF2, ITGB1, CAST, CXCL12, |
| | | | IGHE, KCNE1, TFRC, COL1A1, |
| | | | COL1A2, IL2RB, PLA2G10, |
| | | | ANGPT2, PROCR, NOX4, HAMP, |
| | | | PTPN11, SLCA1, IL2RA, CCL5, |
| | | | IRF1, CF:AR, CA:CA, EIF4E, |
| | | | GSTP1, JAK2, CYP3A5, HSPG2, |
| | | | CCL3, MYD88, VIP, SOAT1, |
| | | | ADRBK1, NR4A2, MMP8, NPR2, |
| | | | GCH1, EPRS, PPARGC1A, F12, |
| | | | PECAM1, CCL4, CERPINA34, |
| | | | CASR, FABP2, TTF2, PROS1, |
| | | | CTF1, SGCB, YME1L1, CAMP, |
| | | | ZC3H12A, AKR1B1, MMP7, AHR, |
| | | | CSF1, HDAC9, CTGF, KCNMA1, |
| | | | UGT1A, PRKCA, COMT, S100B, |
| | | | EGR1, PRL, IL15, DRD4, CAMK2G, |
| | | | SLC22A2, CCL11, PGF, THPO, |
| | | | GP6, TACR1, NTS, HNF1A, SST, |
| | | | KCDN1, LOC646627, TBXAS1, |
| | | | CUP2J2, TBXA2R, ADH1C, |
| | | | ALOX12, AHSG, BHMT, GJA4, |
| | | | SLC25A4, ACLY, ALOX5AP, |
| | | | NUMA1, CYP27B1, CYSLTR2, |
| | | | SOD3, LTC4S, UCN, GHRL, |
| | | | APOC2, CLEC4A, KBTBD10, TNC, |
| | | | TYMS, SHC1, LRP1, SOCS3, |
| | | | ADH1B, KLK3, HSD11B1, |
| | | | VKORC1, SERPINB2, TNS1, |
| | | | RNF19A, EPOR, ITGAM, PITX2, |
| | | | MAPK7, FCGR3A, LEEPR, ENG, |
| | | | GPX1, GOT2, HRH1, NR1I2, CRH, |
| | | | HTR1A, VDAC1, HPSE, SFTPD, |
| | | | TAP2, RMF123, PTK2Bm NTRK2, |
| | | | IL6R, ACHE, GLP1R, GHR, GSR, |
| | | | NQO1, NR5A1, GJB2, SLC9A1, |
| | | | MAOA, PCSK9, FCGR2A, |
| | | | SERPINF1, EDN3, UCP2, TFAP2A, |
| | | | C4BPA, SERPINF2, TYMP, ALPP, |
| | | | CXCR2, SLC3A3, ABCG2, ADA, |
| | | | JAK3, HSPA1A, FASN, FGF1, F11, |
| | | | ATP7A, CR1, GFPA, ROCK1, |
| | | | MECP2, MYLK, BCHE, LIPE, |
| | | | ADORA1, WRN, CXCR3, CD81, |
| | | | SMAD7, LAMC2, MAP3K5, CHGA, |
| | | | IAPP, RHO, ENPP1, PTHLH, NRG1, |
| | | | VEGFC, ENPEP, CEBPB, NAGLU,. |
| | | | F2RL3, CX3CL1, BDKRB1, |
| | | | ADAMTS13, ELANE, ENPP2, |
| | | | CISH, GAST, MYOC, ATP1A2, |
| | | | NF1, GJB1, MEF2A, VCL, BMPR2, |
| | | | TUBB, CDC42, KRT18, HSF1, |
| | | | MYB, PRKAA2, ROCK2, TFP1, |
| | | | PRKG1, BMP2, CTNND1, CTH, |
| | | | CTSS, VAV2, NPY2R, IGFBP2, |
| | | | CD28, GSTA1, PPIA, APOH, |
| | | | S100A8, IL11, ALOX15, FBLN1, |
| | | | NR1H3, SCD, GIP, CHGB, PRKCB, |
| | | | SRD5A1, HSD11B2, CALCRL, |
| | | | GALNT2, ANGPTL4, KCNN4, |
| | | | PIK3C2A, HBEGF, CYP7A1, HLA- |
| | | | DRB5, BNIP3, GCKR, S100A12, |
| | | | PAD14, HSPA14, CXCR1, H19, |
| | | | KRTAP19-3, IDDM2, RAC2, YRY1, |
| | | | CLOCK, NGFR, DBH, CHRNA4, |
| | | | CACNA1C, PRKAG2, CHAT, |
| | | | PTGDS, NR1H2, TEK, VEGFB, |
| | | | MEF2C, MAPKAPK2, TNFRSF11A, |
| | | | HSPA9, CYSLTR1, MAT1A, |
| | | | OPRL1, IMPA1, CLCN2, DLD, |
| | | | PSMA6, PSMB8, CHI3L1, |
| | | | ALDH1B1, PARP2, STAR, LBP, |
| | | | ABCC6, RGS2, EFNB2, GJB6, |
| | | | APOA2, AMPD1, DYSF, |
| | | | FDFT1, EMD2, CCR6, GJB3, |
| | | | IL1RL1, ENTPD1, BBS4, CELSR2, |
| | | | F11R, RAPGEF3, HYAL1, ZNF259, |
| | | | ATOX1, ATF6, KHK, SAT1, GGH, |
| | | | TIMP4, SLC4A4, PDE2A, PDE3B, |
| | | | FADS1, FADS2, TMSB4X, TXNIP, |
| | | | LIMS1, RHOB, LY96, FOXO1, |
| | | | PNPLA2, TRH, GJC1, S:C17A5, |
| | | | FTO, GJD2, PRSC1, CASP12, |
| | | | GPBAR1, PXK, IL33, TRIB1, PBX4, |
| | | | NUPR1, 15-SEP, CILP2, TERC, |
| | | | GGT2, MTCO1, UOX, AVP |
| Cataract | eye | | CRYAA, CRYA1, CRYBB2, |
| | | | CRYB2, PITX3, BFSP2, CP49, |
| | | | CP47, CRYAA, CRYA1, PAX6, |
| | | | AN2, MGDA, CRYBA1, CRYB1, |
| | | | CRYGC, CRYG3, CCL, LIM2, |
| | | | MP19, CRYGD, CRYG4, BFSP2, |
| | | | CP49, CP47, HSF4, CTM, HSF4, |
| | | | CTM, MIP, AQP0, CRYAB, |
| | | | CRYA2, CTPP2, CRYBB1, CRYGD, |
| | | | CRYG4, CRYBB2, CRYB2, |
| | | | CRYGC, CRYG3, CCL, CRYAA, |
| | | | CRYA1, GJA8, CX50, CAE1, GJA3, |
| | | | CX46, CZP3, CAE3, CCM1, CAM, |
| | | | KRIT1 |
| CDKL-5 Deficiencies or | Brain, CNS | | CDKL5 |
| Mediated Diseases | | | |
| Charcot-Marie-Tooth (CMT) | Nervous system | Muscles | PMP22 (CMT1A and E), MPZ |
| disease (Types 1, 2, 3, 4,) | | (dystrophy) | (CMT1B), LITAF (CMT1C), EGR2 |
| | | | (CMT1D), NEFL (CMT1F), GJB1 |
| | | | (CMT1X), MFN2 (CMT2A), KIF1B |
| | | | (CMT2A2B), RAB7A (CMT2B), |
| | | | TRPV4 (CMT2C), GARS (CMT2D), |
| | | | NEFL (CMT2E), GAPD1 (CMT2K), |
| | | | HSPB8 (CMT2L), DYNC1H1, |
| | | | CMT20), LRSAM1 (CMT2P), |
| | | | IGHMBP2 (CMT2S), MORC2 |
| | | | (CMT2Z), GDAP1 (CMT4A), |
| | | | MTMR2 or SBF2/MTMR13 |
| | | | (CMT4B), SH3TC2 (CMT4C), |
| | | | NDRG1 (CMT4D), PRX (CMT4F), |
| | | | FIG4 (CMT4J), NT-3 |
| Chédiak-Higashi Syndrome | Immune system | Skin, hair, eyes, | LYST |
| | | neurons | |
| Choroidermia | | | CHM, REP1, |
| Chorioretinal atrophy | eye | | PRDM13, RGR, TEAD1 |
| Chronic Granulomatous Disease | Immune system | | CYBA, CYBB, NCF1, NCF2, NCF4 |
| Chronic Mucocutaneous | Immune system | | AIRE, CARD9, CLEC7A IL12B, |
| Candidiasis | | | IL12B1, IL1F, IL17RA, IL17RC, |
| | | | RORC, STAT1, STAT3, TRAF31P2 |
| Cirrhosis | liver | | KRT18, KRT8, CIRH1A, NAIC, |
| | | | TEX292, KIAA1988 |
| Colon cancer (Familial | Gastrointestinal | | FAP: APC HNPCC: MSH2, |
| adenomatous polyposis (FAP) | | | MLH1, PMS2, SH6, PMS1 |
| and hereditary nonpolyposis | | | |
| colon cancer (HNPCC)) | | | |
| Combined Immunodeficiency | Immune System | | IL2RG, SCIDX1, SCIDX, IMD4); |
| | | | HIV-1 (CCL5, SCYA5, D17S136E, |
| | | | TCP228 |
| Cone(-rod) dystrophy | eye | | AIPL1, CRX, GUA1A, GUCY2D, |
| | | | PITPM3, PROM1, PRPH2, RIMS1, |
| | | | SEMA4A, ABCA4, ADAM9, ATF6, |
| | | | C21ORF2, C8ORF37, CACNA2D4, |
| | | | CDHR1, CERKL, CNGA3, CNGB3, |
| | | | CNNM4, CNAT2, IFT81, KCNV2, |
| | | | PDE6C, PDE6H, POC1B, RAX2, |
| | | | RDH5, RPGRIP1, TTLL5, RetCG1, |
| | | | GUCY2E |
| Congenital Stationary Night | eye | | CABP4, CACNA1F, CACNA2D4, |
| Blindness | | | GNAT1, CPR179, GRK1, GRM6, |
| | | | LRIT3, NYX, PDE6B, RDH5, RHO, |
| | | | RLBP1, RPE65, SAG, SLC24A1, |
| | | | TRPM1, |
| Congenital Fructose Intolerance | Metabolism | | ALDOB |
| Cori's Disease (Glycogen | Various- | | AGL |
| Storage Disease Type III) | wherever | | |
| | glycogen | | |
| | accumulates, | | |
| | particularly | | |
| | liver, heart, | | |
| | skeletal muscle | | |
| Corneal clouding and dystrophy | eye | | APOA1, TGFBI, CSD2, CDGG1, |
| | | | CSD, BIGH3, CDG2, TACSTD2, |
| | | | TROP2, MIS1, VSX1, RINX, PPCD, |
| | | | PPD, KTCN, COL8A2, FECD, |
| | | | PPCD2, PIP5K3, CFD |
| Cornea plana congenital | | | KERA, CNA2 |
| Cri du chat Syndrome, also | | | Deletions involving only band 5p15.2 |
| known as 5p syndrome and cat | | | to the entire short arm of chromosome |
| cry syndrome | | | 5, e.g. CTNND2, TERT, |
| Cystic Fibrosis (CF) | Lungs and | Pancreas, liver, | CTFR, ABCC7, CF, MRP7, |
| | respiratory | digestive system, | SCNN1A, those described in |
| | system | reproductive | WO2015157070 |
| | | system, exocrine, | |
| | | glands, | |
| Diabetic nephropathy | kidney | | Gremlin, 12/15- lipoxygenase, |
| | | | TIM44, |
| Dent Disease (Types 1 and 2) | Kidney | | Type 1: CLCN5, Type 2: ORCL |
| Dentatorubro-Pallidoluysian | CNS, brain, | | Atrophin-1 and Atn1 |
| Atrophy (DRPLA) (aka Haw | muscle | | |
| River and Naito-Oyanagi | | | |
| Disease) | | | |
| Down Syndrome | various | | Chromosome 21 trisomy |
| Drug Addiction | Brain | | Prkce; Drd2; Drd4; ABAT; |
| | | | GRIA2; Grm5; Grin1; Htr1b; Grin2a; |
| | | | Drd3; Pdyn; Gria1 |
| Duane syndrome (Types 1, 2, | eye | | CHN1, indels on chromosomes 4 and |
| and 3, including subgroups A, B | | | 8 |
| and C). Other names for this | | | |
| condition include: Duane's | | | |
| Retraction Syndrome (or DR | | | |
| syndrome), Eye Retraction | | | |
| Syndrome, Retraction | | | |
| Syndrome, Congenital retraction | | | |
| syndrome and Stilling-Turk- | | | |
| Duane Syndrome | | | |
| Duchenne muscular dystrophy | muscle | Cardiovascular, | DMD, BMD, dystrophin gene, intron |
| (DMD) | | respiratory | flanking exon 51 of DMD gene, exon |
| | | | 51 mutations in DMD gene, see also |
| | | | WO2013163628 and US Pat. Pub. |
| | | | 20130145487 |
| Edward's Syndrome | | | Complete or partial trisomy of |
| (Trisomy 18) | | | chromosome 18 |
| Ehlers-Danlos Syndrome (Types | Various | | COL5A1, COL5A2, COL1A1, |
| I-VI) | depending on | | COL3A1, TNXB, PLOD1, COL1A2, |
| | type: including | | FKBP14 and ADAMTS2 |
| | musculoskeletal, | | |
| | eye, vasculature, | | |
| | immune, and | | |
| | skin | | |
| Emery-Dreifuss muscular | muscle | | LMNA, LMN1, EMD2, FPLD, |
| dystrophy | | | CMD1A, HGPS, LGMD1B, LMNA, |
| | | | LMN1, EMD2, FPLD, CMD1A |
| Enhanced S-Cone Syndrome | eye | | NR2E3, NRL |
| Fabry's Disease | Various - | | GLA |
| | including skin, | | |
| | eyes, and | | |
| | gastrointestinal | | |
| | system, kidney, | | |
| | heart, brain, | | |
| | nervous system | | |
| Facioscapulohumeral muscular | muscles | | FSHMD1A, FSHD1A, FRG1, |
| dystrophy | | | |
| Factor H and Factor H-like 1 | blood | | HF1, CFH, HUS |
| Factor V Leiden thrombophilia | blood | | Factor V (F5) |
| and Factor V deficiency | | | |
| Factor V and Factor VII | blood | | MCFD2 |
| deficiency | | | |
| Factor VII deficiency | blood | | F7 |
| Factor X deficiency | blood | | F10 |
| Factor XI deficiency | blood | | F11 |
| Factor XII deficiency | blood | | F12, HAF |
| Factor XIIIA deficiency | blood | | F13A1, F13A |
| Factor XIIIB deficiency | blood | | F13B |
| Familial Hypercholestereolemia | Cardiovascular | | APOB, LDLR, PCSK9 |
| | system | | |
| Familial Mediterranean Fever | Various- | Heart, kidney, | MEFV |
| (FMF) also called recurrent | organs/tissues | brain/CNS, | |
| polyserositis or familial | with serous or | reproductive | |
| paroxysmal polyserositis | synovial | organs | |
| | membranes, | | |
| | skin, joints | | |
| Fanconi Anemia | Various - blood | | FANCA, FACA, FA1, FA, FAA, |
| | (anemia), | | FAAP95, FAAP90, FLJ34064, |
| | immune system, | | FANCC, FANCG, RAD51, BRCA1, |
| | cognitive, | | BRCA2, BRIP1, BACH1, FANCJ, |
| | kidneys, eyes, | | FANCB, FANCD1, FANCD2, |
| | musculoskeletal | | FANCD, FAD, FANCE, FACE, |
| | | | FANCF, FANCI, ERCC4, FANCL, |
| | | | FANCM, PALB2, RAD51C, SLX4, |
| | | | UBE2T, FANCB, XRCC9, PHF9, |
| | | | KIAA1596 |
| Fanconi Syndrome Types I | kidneys | | FRTS1, GATM |
| (Childhood onset) and II (Adult | | | |
| Onset) | | | |
| Fragile X syndrome and related | brain | | FMR1, FMR2; FXR1; FXR2; |
| disorders | | | mGLUR5 |
| Fragile XE Mental Retardation | Brain, nervous | | FMR1 |
| (aka Martin Bell syndrome) | system | | |
| Friedreich Ataxia (FRDA) | Brain, nervous | heart | FXN/X25 |
| | system | | |
| Fuchs endothelial corneal | Eye | | TCF4; COL8A2 |
| dystrophy | | | |
| Galactosemia | Carbohydrate | Various-where | GALT, GALK1, and GALE |
| | metabolism | galactose | |
| | disorder | accumulates - | |
| | | liver, brain, eyes | |
| Gastrointestinal Epithelial | | | CISH |
| Cancer, GI cancer | | | |
| Gaucher Disease (Types 1, 2, | Fat metabolism | Various-liver, | GBA |
| and 3, as well as other unusual | disorder | spleen, blood, | |
| forms that may not fit into these | | CNS, skeletal | |
| types) | | system | |
| Griscelli syndrome | | | |
| Glaucoma | eye | | MYOC, TIGR, GLC1A, JOAG, |
| | | | GPOA, OPTN, GLC1E, FIP2, HYPL, |
| | | | NRP, CYP1B1, GLC3A, OPA1, |
| | | | NTG, NPG, CYP1B1, GLC3A, those |
| | | | described in WO2015153780 |
| Glomerulo sclerosis | kidney | | CC chemokine ligand 2 |
| Glycogen Storage Diseases | Metabolism | | SLC2A2, GLUT2, G6PC, G6PT, |
| Types I-VI -See also Cori's | Diseases | | G6PT1, GAA, LAMP2, LAMPB, |
| Disease, Pompe's Disease, | | | AGL, GDE, GBE1, GYS2, PYGL, |
| McArdle's disease, Hers | | | PFKM, see also Cori's Disease, |
| Disease, and Von Gierke's | | | Pompe's Disease, McArdle's disease, |
| disease | | | Hers Disease, and Von Gierke's |
| | | | disease |
| RBC Glycolytic enzyme | blood | | any mutations in a gene for an |
| deficiency | | | enzyme in the glycolysis pathway |
| | | | including mutations in genes for |
| | | | hexokinases I and II, glucokinase, |
| | | | phosphoglucose isomerase, |
| | | | phosphofructokinase, aldolase Bm |
| | | | triosephosphate isomerease, |
| | | | glyceraldehydee-3-phosphate |
| | | | dehydrogenase, |
| | | | phosphoglycerokinase, |
| | | | phosphoglycerate mutase, enolase I, |
| | | | pyruvate kinase |
| Hartnup's disease | Malabsorption | Various- brain, | SLC6A19 |
| | disease | gastrointestinal, | |
| | | skin, | |
| Hearing Loss | ear | | NOX3, Hes5, BDNF, |
| Hemochromatosis (HH) | Iron absorption | Various-wherever | HFE and H63D |
| | regulation | iron accumulates, | |
| | disease | liver, heart, | |
| | | pancreas, joints, | |
| | | pituitary gland | |
| Hemophagocytic | blood | | PRF1, HPLH2, UNC13D, MUNC13- |
| lymphohistiocytosis disorders | | | 4, HPLH3, HLH3, FHL3 |
| Hemorrhagic disorders | blood | | PI, ATT, F5 |
| Hers disease (Glycogen storage | liver | muscle | PYGL |
| disease Type VI) | | | |
| Hereditary angioedema (HAE) | | | kalikrein B1 |
| Hereditary Hemorrhagic | Skin and | | ACVRL1, ENG and SMAD4 |
| Telangiectasia (Osler-Weber- | mucous | | |
| Rendu Syndrome) | membranes | | |
| Hereditary Spherocytosis | blood | | NK1, EPB42, SLC4A1, SPTA1, and |
| | | | SPTB |
| Hereditary Persistence of Fetal | blood | | HBG1, HBG2, BCL11A, promoter |
| Hemoglobin | | | region of HBG 1 and/or 2 (in the |
| | | | CCAAT box) |
| Hemophilia (hemophilia A | blood | | A: FVIII, F8C, HEMA |
| (Classic) a B (aka Christmas | | | B: FVIX, HEMB |
| disease) and C) | | | C: F9, F11 |
| Hepatic adenoma | liver | | TCF1, HNF1A, MODY3 |
| Hepatic failure, early onset, and | liver | | SCOD1, SCO1 |
| neurologic disorder | | | |
| Hepatic lipase deficiency | liver | | LIPC |
| Hepatoblastoma, cancer and | liver | | CTNNB1, PDGFRL, PDGRL, |
| carcinomas | | | PRLTS, AXIN1, AXIN, CTNNB1, |
| | | | TP53, P53, LFS1, IGF2R, MPRI, |
| | | | MET, CASP8, MCH5 |
| Hermansky-Pudlak syndrome | Skin, eyes, | | HPS1, HPS3, HPS4, HPS5, HPS6, |
| | blood, lung, | | HPS7, DTNBP1, BLOC1, BLOC1S2, |
| | kidneys, | | BLOC3 |
| | intestine | | |
| HIV susceptibility or infection | Immune system | | IL10, CSIF, CMKBR2, CCR2, |
| | | | CMKBR5, CCCKR5 (CCR5), those |
| | | | in WO2015148670A1 |
| Holoprosencephaly (HPE) | brain | | ACVRL1, ENG, SMAD4 |
| (Alobar, Semilobar, and Lobar) | | | |
| Homocystinuria | Metabolic | Various- | CBS, MTHFR, MTR, MTRR, and |
| | disease | connective tissue, | MMADHC |
| | | muscles, CNS, | |
| | | cardiovascular | |
| | | system | |
| HPV | | | HPV16 and HPV18 E6/E7 |
| HSV1, HSV2, and related | eye | | HSV1 genes (immediate early and |
| keratitis | | | late HSV-1 genes (UL1, 1.5, 5, 6, 8, |
| | | | 9, 12, 15, 16, 18, 19, 22, 23, 26, 26.5, |
| | | | 27, 28, 29, 30, 31, 32, 33, 34, 35, 36, |
| | | | 37, 38, 42, 48, 49.5, 50, 52, 54, S6, |
| | | | RL2, RS1, those described in |
| | | | WO2015153789, WO2015153791 |
| Hunter's Syndrome (aka | Lysosomal | Various- liver, | IDS |
| Mucopolysaccharidosis type II) | storage disease | spleen, eye, joint, | |
| | | heart, brain, | |
| | | skeletal | |
| Huntington's disease (HD) and | Brain, nervous | | HD, HTT, IT15, PRNP, PRIP, JPH3, |
| HD-like disorders | system | | JP3, HDL2, TBP, SCA17, PRKCE; |
| | | | IGF1; EP300; RCOR1; PRKCZ; |
| | | | HDAC4; and TGM2, and those |
| | | | described in WO2013130824, |
| | | | WO2015089354 |
| Hurler's Syndrome (aka | Lysosomal | Various- liver, | IDUA, α-L-iduronidase |
| mucopolysaccharidosis type I H, | storage disease | spleen, eye, joint, | |
| MPS IH) | | heart, brain, | |
| | | skeletal | |
| Hurler-Scheie syndrome (aka | Lysosomal | Various- liver, | IDUA, α-L-iduronidase |
| mucopolysaccharidosis type I H- | storage disease | spleen, eye, joint, | |
| S, MPS I H-S) | | heart, brain, | |
| | | skeletal | |
| hyaluronidase deficiency (aka | Soft and | | HYAL1 |
| MPS IX) | connective | | |
| | tissues | | |
| Hyper IgM syndrome | Immune system | | CD40L |
| Hyper- tension caused renal | kidney | | Mineral corticoid receptor |
| damage | | | |
| Immunodeficiencies | Immune System | | CD3E, CD3G, AICDA, AID, |
| | | | HIGM2, TNFRSF5, CD40, UNG, |
| | | | DGU, HIGM4, TNFSF5, CD40LG, |
| | | | HIGMI, IGM, FOXP3, IPEX, AIID, |
| | | | XPID, PIDX, TNFRSF14B, TACI |
| Inborn errors of metabolism: | Metabolism | Various organs | See also: Carbohydrate metabolism |
| including urea cycle disorders, | diseases, liver | and cells | disorders (e.g. galactosemia), Amino |
| organic acidemias), fatty acid | | | acid Metabolism disorders (e.g. |
| oxidation defects, amino | | | phenylketonuria), Fatty acid |
| acidopathies, carbohydrate | | | metabolism (e.g. MCAD deficiency), |
| disorders, mitochondrial | | | Urea Cycle disorders (e.g. |
| disorders | | | Citrullinemia), Organic acidemias |
| | | | (e.g. Maple Syrup Urine disease), |
| | | | Mitochondrial disorders (e.g. |
| | | | MELAS), peroxisomal disorders (e.g. |
| | | | Zellweger syndrome) |
| Inflammation | Various | | IL-10; IL-1 (IL-Ia; IL-1b); IL-13; IL- |
| | | | 17 (IL-17a (CTLA8); IL- |
| | | | 17b; IL-17c; IL-17d; IL-17f); II-23; |
| | | | Cx3cr1; ptpn22; TNFa; |
| | | | NOD2/CARD15 for IBD; IL-6; IL-12 |
| | | | (IL-12a; IL-12b); |
| | | | CTLA4; Cx3cl1 |
| Inflammatory Bowel Diseases | Gastrointestinal | Joints, skin | NOD2, IRGM, LRRK2, ATG5, |
| (e.g. Ulcerative Colitis and | | | ATG16L1, IRGM, GATM, ECM1, |
| Chron's Disease) | | | CDH1, LAMB1, HNF4A, GNA12, |
| | | | IL10, CARD9/15. CCR6, IL2RA, |
| | | | MST1, TNFSF15, REL, STAT3, |
| | | | IL23R, IL12B, FUT2 |
| Interstitial renal fibrosis | kidney | | TGF-β type II receptor |
| Job's Syndrome (aka Hyper IgE | Immune System | | STAT3, DOCK8 |
| Syndrome) | | | |
| Juvenile Retinoschisis | eye | | RS1, XLRS1 |
| Kabuki Syndrome 1 | | | MLL4, KMT2D |
| Kennedy Disease (aka | Muscles, brain, | | SBMA/SMAX1/AR |
| Spinobulbar Muscular Atrophy) | nervous system | | |
| Klinefelter syndrome | Various- | | Extra X chromosome in males |
| | particularly | | |
| | those involved | | |
| | in development | | |
| | of male | | |
| | characteristics | | |
| Lafora Disease | Brain, CNS | | EMP2A and EMP2B |
| Leber Congenital Amaurosis | eye | | CRB1, RP12, CORD2, CRD, CRX, |
| | | | IMPDH1, OTX2, AIPL1, CABP4, |
| | | | CCT2, CEP290, CLUAP1, CRB1, |
| | | | CRX, DTHD1, GDF6, GUCY2D, |
| | | | IFT140, IQCB1, KCNJ13, LCA5, |
| | | | LRAT, NMNAT1, PRPH2, RD3, |
| | | | RDH12, RPE65, RP20, RPGRIP1, |
| | | | SPATA7, TULP1, LCA1, LCA4, |
| | | | GUC2D, CORD6, LCA3, |
| Lesch-Nyhan Syndrome | Metabolism | Various - joints, | HPRT1 |
| | disease | cognitive, brain, | |
| | | nervous system | |
| Leukocyte deficiencies and | blood | | ITGB2, CD18, LCAMB, LAD, |
| disorders | | | EIF2B1, EIF2BA, EIF2B2, EIF2B3, |
| | | | EIF2B5, LVWM, CACH, CLE, |
| | | | EIF2B4 |
| Leukemia | Blood | | TAL1, TCL5, SCL, TAL2, FLT3, |
| | | | NBS1, NBS, ZNFN1A1, IK1, LYF1, |
| | | | HOXD4, HOX4B, BCR, CML, PHL, |
| | | | ALL, ARNT, KRAS2, RASK2, |
| | | | GMPS, AF10, ARHGEF12, LARG, |
| | | | KIAA0382, CALM, CLTH, CEBPA, |
| | | | CEBP, CHIC2, BTL, FLT3, KIT, |
| | | | PBT, LPP, NPM1, NUP214, D9S46E, |
| | | | CAN, CAIN, RUNX1, CBFA2, |
| | | | AML1, WHSC1L1, NSD3, FLT3, |
| | | | AF1Q, NPM1, NUMA1, ZNF145, |
| | | | PLZF, PML, MYL, STAT5B, AF10, |
| | | | CALM, CLTH, ARL11, ARLTS1, |
| | | | P2RX7, P2X7, BCR, CML, PHL, |
| | | | ALL, GRAF, NF1, VRNF, WSS, |
| | | | NFNS, PTPN11, PTP2C, SHP2, NS1, |
| | | | BCL2, CCND1, PRAD1, BCL1, |
| | | | TCRA, GATA1, GF1, ERYF1, |
| | | | NFE1, ABL1, NQO1, DIA4, |
| | | | NMOR1, NUP214, D9S46E, CAN, |
| | | | CAIN |
| Limb-girdle muscular dystrophy | muscle | | LGMD |
| diseases | | | |
| Lowe syndrome | brain, eyes, | | OCRL |
| | kidneys | | |
| Lupus glomerulo- nephritis | kidney | | MAPK1 |
| Machado- | Brain, CNS, | | ATX3 |
| Joseph's Disease (also known as | muscle | | |
| Spinocerebellar ataxia Type 3) | | | |
| Macular degeneration | eye | | ABC4, CBC1, CHM1, APOE, |
| | | | C1QTNF5, C2, C3, CCL2, CCR2, |
| | | | CD36, CFB, CFH, CFHR1, CFHR3, |
| | | | CNGB3, CP, CRP, CST3, CTSD, |
| | | | CX3CR1, ELOVL4, ERCC6, |
| | | | FBLN5, FBLN6, FSCN2, HMCN1, |
| | | | HTRA1, IL6, IL8, PLEKHA1, |
| | | | PROM1, PRPH2, RPGR, |
| | | | SERPING1, TCOF1, TIMP3, TLR3 |
| Macular Dystrophy | eye | | BEST1, C1QTNF5, CTNNA1, |
| | | | EFEMP1, ELOVL4, FSCN2, |
| | | | GUCA1B, HMCN1, IMPG1, OTX2, |
| | | | PRDM13, PROM1, PRPH2, RP1L1, |
| | | | TIMP3, ABCA4, CFH, DRAM2, |
| | | | IMG1, MFSD8, ADMD, STGD2, |
| | | | STGD3, RDS, RP7, PRPH, AVMD, |
| | | | AOFMD, VMD2 |
| Malattia Leventinesse | eye | | EFEMP1, FBLN3 |
| Maple Syrup Urine Disease | Metabolism | | BCKDHA, BCKDHB, and DBT |
| | disease | | |
| Marfan syndrome | Connective | Musculoskeletal | FBN1 |
| | tissue | | |
| Maroteaux-Lamy Syndrome | Musculoskeletal | Liver, spleen | ARSB |
| (aka MPS VI) | system, nervous | | |
| | system | | |
| McArdle's Disease (Glycogen | Glycogen | muscle | PYGM |
| Storage Disease Type V) | storage disease | | |
| Medullary cystic kidney disease | kidney | | UMOD, HNFJ, FJHN, MCKD2, |
| | | | ADMCKD2 |
| Metachromatic leukodystrophy | Lysosomal | Nervous system | ARSA |
| | storage disease | | |
| Methylmalonic acidemia | Metabolism | | MMAA, MMAB, MUT, MMACHC, |
| (MMA) | disease | | MMADHC, LMBRD1 |
| Morquio Syndrome (aka MPS | Connective | heart | GALNS |
| IV A and B) | tissue, skin, | | |
| | bone, eyes | | |
| Mucopolysaccharidosis diseases | Lysosomal | | See also Hurler/Scheie syndrome, |
| (Types I H/S, I H, II, III A B and | storage disease - | | Hurler disease, Sanfillipo syndrome, |
| C, I S, IVA and B, IX, VII, and | affects various | | Scheie syndrome, Morquio syndrome, |
| VI) | organs/tissues | | hyaluronidase deficiency, Sly |
| | | | syndrome, and Maroteaux-Lamy |
| | | | syndrome |
| Muscular Atrophy | muscle | | VAPB, VAPC, ALS8, SMN1, SMA1, |
| | | | SMA2, SMA3, SMA4, BSCL2, |
| | | | SPG17, GARS, SMAD1, CMT2D, |
| | | | HEXB, IGHMBP2, SMUBP2, |
| | | | CATF1, SMARD1 |
| Muscular dystrophy | muscle | | FKRP, MDC1C, LGMD2I, LAMA2, |
| | | | LAMM, LARGE, KIAA0609, |
| | | | MDC1D, FCMD, TTID, MYOT, |
| | | | CAPN3, CANP3, DYSF, LGMD2B, |
| | | | SGCG, LGMD2C, DMDA1, SCG3, |
| | | | SGCA, ADL, DAG2, LGMD2D, |
| | | | DMDA2, SGCB, LGMD2E, SGCD, |
| | | | SGD, LGMD2F, CMD1L, TCAP, |
| | | | LGMD2G, CMD1N, TRIM32, |
| | | | HT2A, LGMD2H, FKRP, MDC1C, |
| | | | LGMD2I, TTN, CMD1G, TMD, |
| | | | LGMD2J, POMT1, CAV3, |
| | | | LGMD1C, SEPN1, SELN, RSMD1, |
| | | | PLEC1, PLTN, EBS1 |
| Myotonic dystrophy (Type 1 and | Muscles | Eyes, heart, | CNBP (Type 2) and DMPK (Type 1) |
| Type 2) | | endocrine | |
| Neoplasia | | | PTEN; ATM; ATR; EGFR; ERBB2; |
| | | | ERBB3; ERBB4; |
| | | | Notch1; Notch2; Notch3; Notch4; |
| | | | AKT; AKT2; AKT3; HIF; |
| | | | HIF1a; HIF3a; Met; HRG; Bcl2; |
| | | | PPAR alpha; PPAR |
| | | | gamma; WT1 (Wilms Tumor); FGF |
| | | | Receptor Family |
| | | | members (5 members: 1, 2, 3, 4, 5); |
| | | | CDKN2a; APC; RB |
| | | | (retinoblastoma); MEN1; VHL; |
| | | | BRCA1; BRCA2; AR |
| | | | (Androgen Receptor); TSG101; IGF; |
| | | | IGF Receptor; Igf1 (4 |
| | | | variants); Igf2 (3 variants); Igf 1 |
| | | | Receptor; Igf 2 Receptor; |
| | | | Bax; Bcl2; caspases family (9 |
| | | | members: |
| | | | 1, 2, 3, 4, 6, 7, 8, 9, 12); Kras; Apc |
| Neurofibromatosis (NF) (NF1, | brain, spinal | | NF1, NF2 |
| formerly Recklinghausen's NF, | cord, nerves, | | |
| and NF2) | and skin | | |
| Niemann-Pick Lipidosis (Types | Lysosomal | Various- where | Types A and B: SMPD1; Type C: |
| A, B, and C) | Storage Disease | sphingomyelin | NPC1 or NPC2 |
| | | accumulates, | |
| | | particularly | |
| | | spleen, liver, | |
| | | blood, CNS | |
| Noonan Syndrome | Various - | | PTPN11, SOS1, RAF1 and KRAS |
| | musculoskeletal, | | |
| | heart, eyes, | | |
| | reproductive | | |
| | organs, blood | | |
| Norrie Disease or X-linked | eye | | NDP |
| Familial Exudative | | | |
| Vitreoretinopathy | | | |
| North Carolina Macular | eye | | MCDR1 |
| Dystrophy | | | |
| Osteogenesis imperfecta (OI) | bones, | | COL1A1, COL1A2, CRTAP, P3H |
| (Types I, II, III, IV, V, VI, VII) | musculoskeletal | | |
| Osteopetrosis | bones | | LRP5, BMND1, LRP7, LR3, OPPG, |
| | | | VBCH2, CLCN7, CLC7, OPTA2, |
| | | | OSTM1, GL, TCIRG1, TIRC7, |
| | | | OC116, OPTB1 |
| Patau's Syndrome | Brain, heart, | | Additional copy of chromosome 13 |
| (Trisomy 13) | skeletal system | | |
| Parkinson's disease (PD) | Brain, nervous | | SNCA (PARK1), UCHL1 (PARK 5), |
| | system | | and LRRK2 (PARK8), (PARK3), |
| | | | PARK2, PARK4, PARK7 (PARK7), |
| | | | PINK1 (PARK6); x-Synuclein, DJ-1, |
| | | | Parkin, NR4A2, NURR1, NOT, |
| | | | TINUR, SNCAIP, TBP, SCA17, |
| | | | NCAP, PRKN, PDJ, DBH, NDUFV2 |
| Pattern Dystrophy of the RPE | eye | | RDS/peripherin |
| Phenylketonuria (PKU) | Metabolism | Various due to | PAH, PKU1, QDPR, DHPR, PTS |
| | disorder | build-up of | |
| | | phenylalanine, | |
| | | phenyl ketones in | |
| | | tissues and CNS | |
| Polycystic kidney and hepatic | Kidney, liver | | FCYT, PKHD1, ARPKD, PKD1, |
| disease | | | PKD2, PKD4, PKDTS, PRKCSH, |
| | | | G19P1, PCLD, SEC63 |
| Pompe's Disease | Glycogen | Various - heart, | GAA |
| | storage disease | liver, spleen | |
| Porphyria (actually refers to a | Various- | | ALAD, ALAS2, CPOX, FECH, |
| group of different diseases all | wherever heme | | HMBS, PPOX, UROD, or UROS |
| having a specific heme | precursors | | |
| production process abnormality) | accumulate | | |
| posterior polymorphous corneal | eyes | | TCF4; COL8A2 |
| dystrophy | | | |
| Primary Hyperoxaluria (e.g. type | Various - eyes, | | LDHA (lactate dehydrogenase A) and |
| 1) | heart, kidneys, | | hydroxyacid oxidase 1 (HAO1) |
| | skeletal system | | |
| Primary Open Angle Glaucoma | eyes | | MYOC |
| (POAG) | | | |
| Primary sclerosing cholangitis | Liver, | | TCF4; COL8A2 |
| | gallbladder | | |
| Progeria (also called | All | | LMNA |
| Hutchinson-Gilford progeria | | | |
| syndrome) | | | |
| Prader-Willi Syndrome | Musculoskeletal | | Deletion of region of short arm of |
| | system, brain, | | chromosome 15, including UBE3A |
| | reproductive | | |
| | and endocrine | | |
| | system | | |
| Prostate Cancer | prostate | | HOXB13, MSMB, GPRC6A, TP53 |
| Pyruvate Dehydrogenase | Brain, nervous | | PDHA1 |
| Deficiency | system | | |
| Kidney/Renal carcinoma | kidney | | RLIP76, VEGF |
| Rett Syndrome | Brain | | MECP2, RTT, PPMX, MRX16, |
| | | | MRX79, CDKL5, STK9, MECP2, |
| | | | RTT, PPMX, MRX16, MRX79, x- |
| | | | Synuclein, DJ-1 |
| Retinitis pigmentosa (RP) | eye | | AD1POR1, ABCA4, AGBL5, |
| | | | ARHGEF18, ARL2BP, ARL3, |
| | | | ARL6, BEST1, BBS1, BBS2, |
| | | | C2ORF71, C8ORF37, CA4, CERKL, |
| | | | CLRN1, CNGA1, CMGB1, CRB1, |
| | | | CRX, CYP4V2, DHDDS, DHX38, |
| | | | EMC1, EYS, FAM161A, FSCN2, |
| | | | GPR125, GUCA1B, HK1, HPRPF3, |
| | | | HGSNAT, IDH3B, IMPDH1, |
| | | | IMPG2, IFT140, IFT172, KLHL7, |
| | | | KIAA1549, KIZ, LRAT, MAK, |
| | | | MERTK, MVK, NEK2, NUROD1, |
| | | | NR2E3, NRL, OFD1, PDE6A, |
| | | | PDE6B, PDE6G, POMGNT1, PRCD, |
| | | | PROM1, PRPF3, PRPF4, PRPF6, |
| | | | PRPF8, PRPF31, PRPH2, RPB3, |
| | | | RDH12, REEP6, RP39, RGR, RHO, |
| | | | RLBP1, ROM1, RP1, RP1L1, RPY, |
| | | | RP2, RP9, RPE65, RPGR, SAMD11, |
| | | | SAG, SEMA4A, SLC7A14, |
| | | | SNRNP200, SPP2, SPATA7, |
| | | | TRNT1, TOPORS, TTC8, TULP1, |
| | | | USH2A, ZFN408, ZNF513, see also |
| | | | 20120204282 |
| Scheie syndrome (also known as | Various- liver, | | IDUA, α-L-iduronidase |
| mucopolysaccharidosis type I | spleen, eye, | | |
| S(MPS I-S)) | joint, heart, | | |
| | brain, skeletal | | |
| Schizophrenia | Brain | | Neuregulin1 (Nrg1); Erb4 (receptor |
| | | | for Neuregulin); |
| | | | Complexin1 (Cplx1); Tph1 |
| | | | Tryptophan hydroxylase; Tph2 |
| | | | Tryptophan hydroxylase 2; Neurexin |
| | | | 1; GSK3; GSK3a; |
| | | | GSK3b; 5-HTT (Slc6a4); COMT; |
| | | | DRD (Drd1a); SLC6A3; DAOA; |
| | | | DTNBP1; Dao (Dao1); TCF4; |
| | | | COL8A2 |
| Secretase Related Disorders | Various | | APH-1 (alpha and beta); PSEN1; |
| | | | NCSTN; PEN-2; Nos1, Parp1, Nat1, |
| | | | Nat2, CTSB, APP, APH1B, PSEN2, |
| | | | PSENEN, BACE1, ITM2B, CTSD, |
| | | | NOTCH1, TNF, INS, DYT10, |
| | | | ADAM17, APOE, ACE, STN, TP53, |
| | | | IL6, NGFR, IL1B, ACHE, CTNNB1, |
| | | | IGF1, IFNG, NRG1, CASP3, |
| | | | MAPK1, CDH1, APBB1, HMGCR, |
| | | | CREB1, PTGS2, HES1, CAT, |
| | | | TGFB1, ENO2, ERBB4, TRAPPC10, |
| | | | MAOB, NGF, MMP12, JAG1, |
| | | | CD40LG, PPARG, FGF2, LRP1, |
| | | | NOTCH4, MAPK8, PREP, |
| | | | NOTCH3, PRNP, CTSG, EGF, REN, |
| | | | CD44, SELP, GHR, ADCYAP1, |
| | | | INSR, GFAP, MMP3, MAPK10, |
| | | | SP1, MYC, CTSE, PPARA, JUN, |
| | | | TIMP1, IL5, IL1A, MMP9, HTR4, |
| | | | HSPG2, KRAS, CYCS, SMG1, |
| | | | IL1R1, PROK1, MAPK3, NTRK1, |
| | | | IL13, MME, TKT, CXCR2, CHRM1, |
| | | | ATXN1, PAWR, NOTCJ2, M6PR, |
| | | | CYP46A1, CSNK1D, MAPK14, |
| | | | PRG2, PRKCA, L1 CAM, CD40, |
| | | | NR1I2, JAG2, CTNND1, CMA1, |
| | | | SORT1, DLK1, THEM4, JUP, CD46, |
| | | | CCL11, CAV3, RNASE3, HSPA8, |
| | | | CASP9, CYP3A4, CCR3, TFAP2A, |
| | | | SCP2, CDK4, JOF1A, TCF7L2, |
| | | | B3GALTL, MDM2, RELA, CASP7, |
| | | | IDE, FANP4, CASK, ADCYAP1R1, |
| | | | ATF4, PDGFA, C21ORF33, SCG5, |
| | | | RMF123, NKFB1, ERBB2, CAV1, |
| | | | MMP7, TGFA, RXRA, STX1A, |
| | | | PSMC4, P2RY2, TNFRSF21, DLG1, |
| | | | NUMBL, SPN, PLSCR1, UBQLN2, |
| | | | UBQLN1, PCSK7, SPON1, SILV, |
| | | | QPCT, HESS, GCC1 |
| Selective IgA Deficiency | Immune system | | Type 1: MSH5; Type 2: TNFRSF13B |
| Severe Combined | Immune system | | JAK3, JAKL, DCLRE1C, ARTEMIS, |
| Immunodeficiency (SCID) and | | | SCIDA, RAG1, RAG2, ADA, |
| SCID-X1, and ADA-SCID | | | PTPRC, CD45, LCA, IL7R, CD3D, |
| | | | T3D, IL2RG, SCIDX1, SCIDX, |
| | | | IMD4, those identified in US Pat. |
| | | | App. Pub. 20110225664, |
| | | | 20110091441, 20100229252, |
| | | | 20090271881 and 20090222937; |
| Sickle cell disease | blood | | HBB, BCL11A, BCL11Ae, cis- |
| | | | regulatory elements of the B-globin |
| | | | locus, HBG 1/2 promoter, HBG distal |
| | | | CCAAT box region between -92 and -130 |
| | | | of the HBG Transcription Start |
| | | | Site, those described in |
| | | | WO2015148863, WO 2013/126794, |
| | | | US Pat. Pub. 20110182867 |
| Sly Syndrome (aka MPS VII) | | | GUSB |
| Spinocerebellar Ataxias (SCA | | | ATXN1, ATXN2, ATX3 |
| types 1, 2, 3, 6, 7, 8, 12 and 17) | | | |
| Sorsby Fundus Dystrophy | eye | | TIMP3 |
| Stargardt disease | eye | | ABCR, ELOVL4, ABCA4, PROM1 |
| Tay-Sachs Disease | Lysosomal | Various - CNS, | HEX-A |
| | Storage disease | brain, eye | |
| Thalassemia (Alpha, Beta, | blood | | HBA1, HBA2 (Alpha), HBB (Beta), |
| Delta) | | | HBB and HBD (delta), LCRB, |
| | | | BCL11A, BCL11Ae, cis-regulatory |
| | | | elements of the B-globin locus, HBG |
| | | | 1/2 promoter, those described in |
| | | | WO2015148860, US Pat. Pub. |
| | | | 20110182867, 2015/148860 |
| Thymic Aplasia (DiGeorge | Immune system, | | deletion of 30 to 40 genes in the |
| Syndrome; 22q11.2 deletion | thymus | | middle of chromosome 22 at |
| syndrome) | | | a location known as 22q11.2, |
| | | | including TBX1, DGCR8 |
| Transthyretin amyloidosis | liver | | TTR (transthyretin) |
| (ATTR) | | | |
| trimethylaminuria | Metabolism | | FMO3 |
| | disease | | |
| Trinucleotide Repeat Disorders | Various | | HTT; SBMA/SMAX1/AR; |
| (generally) | | | FXN/X25 ATX3; |
| | | | ATXN1; ATXN2; |
| | | | DMPK; Atrophin-1 and Atn1 |
| | | | (DRPLA Dx); CBP (Creb-BP - global |
| | | | instability); VLDLR; Atxn7; Atxn10; |
| | | | FEN1, TNRC6A, PABPN1, JPH3, |
| | | | MED15, ATXN1, ATXN3, TBP, |
| | | | CACNA1A, ATXN80S, PPP2R2B, |
| | | | ATXN7, TNRC6B, TNRC6C, |
| | | | CELF3, MAB21L1, MSH2, |
| | | | TMEM185A, SIX5, CNPY3, RAXE, |
| | | | GNB2, RPL14, ATXN8, ISR, TTR, |
| | | | EP400, GIGYF2, OGG1, STC1, |
| | | | CNDP1, C10ORF2, MAML3, DKC1, |
| | | | PAXIP1, CASK, MAPT, SP1, POLG, |
| | | | AFF2, THBS1, TP53, ESR1, |
| | | | CGGBP1, ABT1, KLK3, PRNP, |
| | | | JUN, KCNN3, BAX, FRAXA, |
| | | | KBTBD10, MBNL1, RAD51, |
| | | | NCOA3, ERDA1, TSC1, COMP, |
| | | | GGLC, RRAD, MSH3, DRD2, |
| | | | CD44, CTCF, CCND1, CLSPN, |
| | | | MEF2A, PTPRU, GAPDH, TRIM22, |
| | | | WT1, AHR, GPX1, TPMT, NDP, |
| | | | ARX, TYR, EGR1, UNG, NUMBL, |
| | | | FABP2, EN2, CRYGC, SRP14, |
| | | | CRYGB, PDCD1, HOXA1, |
| | | | ATXN2L, PMS2, GLA, CBL, FTH1, |
| | | | IL12RB2, OTX2, HOXA5, POLG2, |
| | | | DLX2, AHRR, MANF, RMEM158, |
| | | | see also 20110016540 |
| Turner's Syndrome (XO) | Various - | | Monosomy X |
| | reproductive | | |
| | organs, and sex | | |
| | characteristics, | | |
| | vasculature | | |
| Tuberous Sclerosis | CNS, heart, | | TSC1, TSC2 |
| | kidneys | | |
| Usher syndrome (Types I, II, and | Ears, eyes | | ABHD12, CDH23, CIB2, CLRN1, |
| III) | | | DFNB31, GPR98, HARS, MYO7A, |
| | | | PCDH15, USH1C, USH1G, USH2A, |
| | | | USH11A, those described in |
| | | | WO2015134812A1 |
| Velocardiofacial syndrome (aka | Various - | | Many genes are deleted, COM, |
| 22q11.2 deletion syndrome, | skeletal, heart, | | TBX1, and other are associated with |
| DiGeorge syndrome, | kidney, immune | | symptoms |
| conotruncal anomaly face | system, brain | | |
| syndrome (CTAF), autosomal | | | |
| dominant Opitz G/BB syndrome | | | |
| or Cayler cardiofacial syndrome) | | | |
| Von Gierke's Disease (Glycogen | Glycogen | Various - liver, | G6PC and SLC37A4 |
| Storage Disease type I) | Storage disease | kidney | |
| Von Hippel-Lindau Syndrome | Various - cell | CNS, Kidney, | VHL |
| | growth | Eye, visceral | |
| | regulation | organs | |
| | disorder | | |
| Von Willebrand Disease (Types | blood | | VWF |
| I, II and III) | | | |
| Wilson Disease | Various - | Liver, brains, | ATP7B |
| | Copper Storage | eyes, other tissues | |
| | Disease | where copper | |
| | | builds up | |
| Wiskott-Aldrich Syndrome | Immune System | | WAS |
| Xeroderma Pigmentosum | Skin | Nervous system | POLH |
| XXX Syndrome | Endocrine, brain | | X chromosome trisomy |

[0765] In one embodiment, the compositions, systems, or components thereof can be used treat or prevent a disease in a subject by modifying one or more genes associated with one or more cellular functions, such as any one or more of those in Table 7. In one embodiment, the disease is a genetic disease or disorder. In some of embodiments, the composition, system, or component thereof can modify one or more genes or polynucleotides associated with one or more genetic diseases such as any set forth in Table 7.

TABLE 7
Exemplary Genes controlling Cellular Functions

| CELLULAR FUNCTION | GENES |
|---|---|
| PI3K/AKT Signaling | PRKCE; ITGAM; ITGA5; IRAK1; PRKAA2; EIF2AK2; PTEN; EIF4E; |
| | PRKCZ; GRK6; MAPK1; TSC1; PLK1; AKT2; IKBKB; PIK3CA; CDK8; |
| | CDKN1B; NFKB2; BCL2; PIK3CB; PPP2R1A; MAPK8; BCL2L1; MAPK3; |
| | TSC2; |
| | ITGA1; KRAS; EIF4EBP1; RELA; PRKCD; NOS3; |
| | PRKAA1; MAPK9; CDK2; PPP2CA; PIM1; ITGB7; |
| | YWHAZ; ILK; TP53; RAF1; IKBKG; RELB; DYRK1A; |
| | CDKN1A; ITGB1; MAP2K2; JAK1; AKT1; JAK2; PIK3R1; |
| | CHUK; PDPK1; PPP2R5C; CTNNB1; MAP2K1; NFKB1; |
| | PAK3; ITGB3; CCND1; GSK3A; FRAP1; SFN; ITGA2; |
| | TTK; CSNK1A1; BRAF; GSK3B; AKT3; FOXO1; SGK; |
| | HSP90AA1; RPS6KB1 |
| ERK/MAPK Signaling | PRKCE; ITGAM; ITGA5; HSPB1; IRAK1; PRKAA2; |
| | EIF2AK2; RAC1; RAP1A; TLN1; EIF4E; ELK1; GRK6; |
| | MAPK1; RAC2; PLK1; AKT2; PIK3CA; CDK8; CREB1; |
| | PRKCI; PTK2; FOS; RPS6KA4; PIK3CB; PPP2R1A; |
| | PIK3C3; MAPK8; MAPK3; ITGA1; ETS1; KRAS; MYCN; |
| | EIF4EBP1; PPARG; PRKCD; PRKAA1; MAPK9; SRC; |
| | CDK2; PPP2CA; PIM1; PIK3C2A; ITGB7; YWHAZ; |
| | PPP1CC; KSR1; PXN; RAF1; FYN; DYRK1A; ITGB1; |
| | MAP2K2; PAK4; PIK3R1; STAT3; PPP2R5C; MAP2K1; |
| | PAK3; ITGB3; ESR1; ITGA2; MYC; TTK; CSNK1A1; |
| | CRKL; BRAF; ATF4; PRKCA; SRF; STAT1; SGK |
| Glucocorticoid Receptor | RAC1; TAF4B; EP300; SMAD2; TRAF6; PCAF; ELK1; |
| Signaling | MAPK1; SMAD3; AKT2; IKBKB; NCOR2; UBE2I; |
| | PIK3CA; CREB1; FOS; HSPA5; NFKB2; BCL2; |
| | MAP3K14; STAT5B; PIK3CB; PIK3C3; MAPK8; BCL2L1; |
| | MAPK3; TSC22D3; MAPK10; NRIP1; KRAS; MAPK13; |
| | RELA; STAT5A; MAPK9; NOS2A; PBX1; NR3C1; |
| | PIK3C2A; CDKN1C; TRAF2; SERPINE1; NCOA3; |
| | MAPK14; TNF; RAF1; IKBKG; MAP3K7; CREBBP; |
| | CDKN1A; MAP2K2; JAK1; IL8; NCOA2; AKT1; JAK2; |
| | PIK3R1; CHUK; STAT3; MAP2K1; NFKB1; TGFBR1; |
| | ESR1; SMAD4; CEBPB; JUN; AR; AKT3; CCL2; MMP1; |
| | STAT1; IL6; HSP90AA1 |
| Axonal Guidance | PRKCE; ITGAM; ROCK1; ITGA5; CXCR4; ADAM12; |
| Signaling | IGF1; RAC1; RAP1A; EIF4E; PRKCZ; NRP1; NTRK2; |
| | ARHGEF7; SMO; ROCK2; MAPK1; PGF; RAC2; |
| | PTPN11; GNAS; AKT2; PIK3CA; ERBB2; PRKCI; PTK2; |
| | CFL1; GNAQ; PIK3CB; CXCL12; PIK3C3; WNT11; |
| | PRKD1; GNB2L1; ABL1; MAPK3; ITGA1; KRAS; RHOA; |
| | PRKCD; PIK3C2A; ITGB7; GLI2; PXN; VASP; RAF1; |
| | FYN; ITGB1; MAP2K2; PAK4; ADAM17; AKT1; PIK3R1; |
| | GLI1; WNT5A; ADAM10; MAP2K1; PAK3; ITGB3; |
| | CDC42; VEGFA; ITGA2; EPHA8; CRKL; RND1; GSK3B; |
| | AKT3; PRKCA |
| Ephrin Receptor Signaling | PRKCE; ITGAM; ROCK1; ITGA5; CXCR4; IRAK1; |
| Actin Cytoskeleton | PRKAA2; EIF2AK2; RAC1; RAP1A; GRK6; ROCK2; |
| Signaling | MAPK1; PGF; RAC2; PTPN11; GNAS; PLK1; AKT2; |
| | DOK1; CDK8; CREB1; PTK2; CFL1; GNAQ; MAP3K14; |
| | CXCL12; MAPK8; GNB2L1; ABL1; MAPK3; ITGA1; |
| | KRAS; RHOA; PRKCD; PRKAA1; MAPK9; SRC; CDK2; |
| | PIM1; ITGB7; PXN; RAF1; FYN; DYRK1A; ITGB1; |
| | MAP2K2; PAK4; AKT1; JAK2; STAT3; ADAM10; |
| | MAP2K1; PAK3; ITGB3; CDC42; VEGFA; ITGA2; |
| | EPHA8; TTK; CSNK1A1; CRKL; BRAF; PTPN13; ATF4; |
| | AKT3; SGK |
| | ACTN4; PRKCE; ITGAM; ROCK1; ITGA5; IRAK1; |
| | PRKAA2; EIF2AK2; RAC1; INS; ARHGEF7; GRK6; |
| | ROCK2; MAPK1; RAC2; PLK1; AKT2; PIK3CA; CDK8; |
| | PTK2; CFL1; PIK3CB; MYH9; DIAPH1; PIK3C3; MAPK8; |
| | F2R; MAPK3; SLC9A1; ITGA1; KRAS; RHOA; PRKCD; |
| | PRKAA1; MAPK9; CDK2; PIM1; PIK3C2A; ITGB7; |
| | PPP1CC; PXN; VIL2; RAF1; GSN; DYRK1A; ITGB1; |
| | MAP2K2; PAK4; PIP5K1A; PIK3R1; MAP2K1; PAK3; |
| | ITGB3; CDC42; APC; ITGA2; TTK; CSNK1A1; CRKL; |
| | BRAF; VAV3; SGK |
| Huntington's Disease | PRKCE; IGF1; EP300; RCOR1; PRKCZ; HDAC4; TGM2; |
| Signaling | MAPK1; CAPNS1; AKT2; EGFR; NCOR2; SP1; CAPN2; |
| | PIK3CA; HDAC5; CREB1; PRKCI; HSPA5; REST; |
| | GNAQ; PIK3CB; PIK3C3; MAPK8; IGF1R; PRKD1; |
| | GNB2L1; BCL2L1; CAPN1; MAPK3; CASP8; HDAC2; |
| | HDAC7A; PRKCD; HDAC11; MAPK9; HDAC9; PIK3C2A; |
| | HDAC3; TP53; CASP9; CREBBP; AKT1; PIK3R1; |
| | PDPK1; CASP1; APAF1; FRAP1; CASP2; JUN; BAX; |
| | ATF4; AKT3; PRKCA; CLTC; SGK; HDAC6; CASP3 |
| Apoptosis Signaling | PRKCE; ROCK1; BID; IRAK1; PRKAA2; EIF2AK2; BAK1; |
| | BIRC4; GRK6; MAPK1; CAPNS1; PLK1; AKT2; IKBKB; |
| | CAPN2; CDK8; FAS; NFKB2; BCL2; MAP3K14; MAPK8; |
| | BCL2L1; CAPN1; MAPK3; CASP8; KRAS; RELA; |
| | PRKCD; PRKAA1; MAPK9; CDK2; PIM1; TP53; TNF; |
| | RAF1; IKBKG; RELB; CASP9; DYRK1A; MAP2K2; |
| | CHUK; APAF1; MAP2K1; NFKB1; PAK3; LMNA; CASP2; |
| | BIRC2; TTK; CSNK1A1; BRAF; BAX; PRKCA; SGK; |
| | CASP3; BIRC3; PARP1 |
| B Cell Receptor | RAC1; PTEN; LYN; ELK1; MAPK1; RAC2; PTPN11; |
| Signaling | AKT2; IKBKB; PIK3CA; CREB1; SYK; NFKB2; CAMK2A; |
| | MAP3K14; PIK3CB; PIK3C3; MAPK8; BCL2L1; ABL1; |
| | MAPK3; ETS1; KRAS; MAPK13; RELA; PTPN6; MAPK9; |
| | EGR1; PIK3C2A; BTK; MAPK14; RAF1; IKBKG; RELB; |
| | MAP3K7; MAP2K2; AKT1; PIK3R1; CHUK; MAP2K1; |
| | NFKB1; CDC42; GSK3A; FRAP1; BCL6; BCL10; JUN; |
| | GSK3B; ATF4; AKT3; VAV3; RPS6KB1 |
| Leukocyte Extravasation | ACTN4; CD44; PRKCE; ITGAM; ROCK1; CXCR4; CYBA; |
| Signaling | RAC1; RAP1A; PRKCZ; ROCK2; RAC2; PTPN11; |
| | MMP14; PIK3CA; PRKCI; PTK2; PIK3CB; CXCL12; |
| | PIK3C3; MAPK8; PRKD1; ABL1; MAPK10; CYBB; |
| | MAPK13; RHOA; PRKCD; MAPK9; SRC; PIK3C2A; BTK; |
| | MAPK14; NOX1; PXN; VIL2; VASP; ITGB1; MAP2K2; |
| | CTNND1; PIK3R1; CTNNB1; CLDN1; CDC42; F11R; ITK; |
| | CRKL; VAV3; CTTN; PRKCA; MMP1; MMP9 |
| Integrin Signaling | ACTN4; ITGAM; ROCK1; ITGA5; RAC1; PTEN; RAP1A; |
| | TLN1; ARHGEF7; MAPK1; RAC2; CAPNS1; AKT2; |
| | CAPN2; PIK3CA; PTK2; PIK3CB; PIK3C3; MAPK8; |
| | CAV1; CAPN1; ABL1; MAPK3; ITGA1; KRAS; RHOA; |
| | SRC; PIK3C2A; ITGB7; PPP1CC; ILK; PXN; VASP; |
| | RAF1; FYN; ITGB1; MAP2K2; PAK4; AKT1; PIK3R1; |
| | TNK2; MAP2K1; PAK3; ITGB3; CDC42; RND3; ITGA2; |
| | CRKL; BRAF; GSK3B; AKT3 |
| Acute Phase Response | IRAK1; SOD2; MYD88; TRAF6; ELK1; MAPK1; PTPN11; |
| Signaling | AKT2; IKBKB; PIK3CA; FOS; NFKB2; MAP3K14; |
| | PIK3CB; MAPK8; RIPK1; MAPK3; IL6ST; KRAS; |
| | MAPK13; IL6R; RELA; SOCS1; MAPK9; FTL; NR3C1; |
| | TRAF2; SERPINE1; MAPK14; TNF; RAF1; PDK1; |
| | IKBKG; RELB; MAP3K7; MAP2K2; AKT1; JAK2; PIK3R1; |
| | CHUK; STAT3; MAP2K1; NFKB1; FRAP1; CEBPB; JUN; |
| | AKT3; IL1R1; IL6 |
| PTEN Signaling | ITGAM; ITGA5; RAC1; PTEN; PRKCZ; BCL2L11; |
| | MAPK1; RAC2; AKT2; EGFR; IKBKB; CBL; PIK3CA; |
| | CDKN1B; PTK2; NFKB2; BCL2; PIK3CB; BCL2L1; |
| | MAPK3; ITGA1; KRAS; ITGB7; ILK; PDGFRB; INSR; |
| | RAF1; IKBKG; CASP9; CDKN1A; ITGB1; MAP2K2; |
| | AKT1; PIK3R1; CHUK; PDGFRA; PDPK1; MAP2K1; |
| | NFKB1; ITGB3; CDC42; CCND1; GSK3A; ITGA2; |
| | GSK3B; AKT3; FOXO1; CASP3; RPS6KB1 |
| p53 Signaling | PTEN; EP300; BBC3; PCAF; FASN; BRCA1; GADD45A; |
| Aryl Hydrocarbon | BIRC5; AKT2; PIK3CA; CHEK1; TP53INP1; BCL2; |
| Receptor Signaling | PIK3CB; PIK3C3; MAPK8; THBS1; ATR; BCL2L1; E2F1; |
| | PMAIP1; CHEK2; TNFRSF10B; TP73; RB1; HDAC9; |
| | CDK2; PIK3C2A; MAPK14; TP53; LRDD; CDKN1A; |
| | HIPK2; AKT1; PIK3R1; RRM2B; APAF1; CTNNB1; |
| | SIRT1; CCND1; PRKDC; ATM; SFN; CDKN2A; JUN; |
| | SNAI2; GSK3B; BAX; AKT3 |
| | HSPB1; EP300; FASN; TGM2; RXRA; MAPK1; NQO1; |
| | NCOR2; SP1; ARNT; CDKN1B; FOS; CHEK1; |
| | SMARCA4; NFKB2; MAPK8; ALDH1A1; ATR; E2F1; |
| | MAPK3; NRIP1; CHEK2; RELA; TP73; GSTP1; RB1; |
| | SRC; CDK2; AHR; NFE2L2; NCOA3; TP53; TNF; |
| | CDKN1A; NCOA2; APAF1; NFKB1; CCND1; ATM; ESR1; |
| | CDKN2A; MYC; JUN; ESR2; BAX; IL6; CYP1B1; |
| | HSP90AA1 |
| Xenobiotic Metabolism | PRKCE; EP300; PRKCZ; RXRA; MAPK1; NQO1; |
| Signaling | NCOR2; PIK3CA; ARNT; PRKCI; NFKB2; CAMK2A; |
| | PIK3CB; PPP2R1A; PIK3C3; MAPK8; PRKD1; |
| | ALDH1A1; MAPK3; NRIP1; KRAS; MAPK13; PRKCD; |
| | GSTP1; MAPK9; NOS2A; ABCB1; AHR; PPP2CA; FTL; |
| | NFE2L2; PIK3C2A; PPARGC1A; MAPK14; TNF; RAF1; |
| | CREBBP; MAP2K2; PIK3R1; PPP2R5C; MAP2K1; |
| | NFKB1; KEAP1; PRKCA; EIF2AK3; IL6; CYP1B1; |
| | HSP90AA1 |
| SAPK/JNK Signaling | PRKCE; IRAK1; PRKAA2; EIF2AK2; RAC1; ELK1; |
| | GRK6; MAPK1; GADD45A; RAC2; PLK1; AKT2; PIK3CA; |
| | FADD; CDK8; PIK3CB; PIK3C3; MAPK8; RIPK1; |
| | GNB2L1; IRS1; MAPK3; MAPK10; DAXX; KRAS; |
| | PRKCD; PRKAA1; MAPK9; CDK2; PIM1; PIK3C2A; |
| | TRAF2; TP53; LCK; MAP3K7; DYRK1A; MAP2K2; |
| | PIK3R1; MAP2K1; PAK3; CDC42; JUN; TTK; CSNK1A1; |
| | CRKL; BRAF; SGK |
| PPAr/RXR Signaling | PRKAA2; EP300; INS; SMAD2; TRAF6; PPARA; FASN; |
| | RXRA; MAPK1; SMAD3; GNAS; IKBKB; NCOR2; |
| | ABCA1; GNAQ; NFKB2; MAP3K14; STAT5B; MAPK8; |
| | IRS1; MAPK3; KRAS; RELA; PRKAA1; PPARGC1A; |
| | NCOA3; MAPK14; INSR; RAF1; IKBKG; RELB; MAP3K7; |
| | CREBBP; MAP2K2; JAK2; CHUK; MAP2K1; NFKB1; |
| | TGFBR1; SMAD4; JUN; IL1R1; PRKCA; IL6; HSP90AA1; |
| | ADIPOQ |
| NF-KB Signaling | IRAK1; EIF2AK2; EP300; INS; MYD88; PRKCZ; TRAF6; |
| | TBK1; AKT2; EGFR; IKBKB; PIK3CA; BTRC; NFKB2; |
| | MAP3K14; PIK3CB; PIK3C3; MAPK8; RIPK1; HDAC2; |
| | KRAS; RELA; PIK3C2A; TRAF2; TLR4; PDGFRB; TNF; |
| | INSR; LCK; IKBKG; RELB; MAP3K7; CREBBP; AKT1; |
| | PIK3R1; CHUK; PDGFRA; NFKB1; TLR2; BCL10; |
| | GSK3B; AKT3; TNFAIP3; IL1R1 |
| Neuregulin Signaling | ERBB4; PRKCE; ITGAM; ITGA5; PTEN; PRKCZ; ELK1; |
| Wnt & Beta catenin | MAPK1; PTPN11; AKT2; EGFR; ERBB2; PRKCI; |
| Signaling | CDKN1B; STAT5B; PRKD1; MAPK3; ITGA1; KRAS; |
| | PRKCD; STAT5A; SRC; ITGB7; RAF1; ITGB1; MAP2K2; |
| | ADAM17; AKT1; PIK3R1; PDPK1; MAP2K1; ITGB3; |
| | EREG; FRAP1; PSEN1; ITGA2; MYC; NRG1; CRKL; |
| | AKT3; PRKCA; HSP90AA1; RPS6KB1 |
| | CD44; EP300; LRP6; DVL3; CSNK1E; GJA1; SMO; |
| | AKT2; PIN1; CDH1; BTRC; GNAQ; MARK2; PPP2R1A; |
| | WNT11; SRC; DKK1; PPP2CA; SOX6; SFRP2; ILK; |
| | LEF1; SOX9; TP53; MAP3K7; CREBBP; TCF7L2; AKT1; |
| | PPP2R5C; WNT5A; LRP5; CTNNB1; TGFBR1; CCND1; |
| | GSK3A; DVL1; APC; CDKN2A; MYC; CSNK1A1; GSK3B; |
| | AKT3; SOX2 |
| Insulin Receptor | PTEN; INS; EIF4E; PTPN1; PRKCZ; MAPK1; TSC1; |
| Signaling | PTPN11; AKT2; CBL; PIK3CA; PRKCI; PIK3CB; PIK3C3; |
| | MAPK8; IRS1; MAPK3; TSC2; KRAS; EIF4EBP1; |
| | SLC2A4; PIK3C2A; PPP1CC; INSR; RAF1; FYN; |
| | MAP2K2; JAK1; AKT1; JAK2; PIK3R1; PDPK1; MAP2K1; |
| | GSK3A; FRAP1; CRKL; GSK3B; AKT3; FOXO1; SGK; |
| | RPS6KB1 |
| IL-6 Signaling | HSPB1; TRAF6; MAPKAPK2; ELK1; MAPK1; PTPN11; |
| | IKBKB; FOS; NFKB2; MAP3K14; MAPK8; MAPK3; |
| | MAPK10; IL6ST; KRAS; MAPK13; IL6R; RELA; SOCS1; |
| | MAPK9; ABCB1; TRAF2; MAPK14; TNF; RAF1; IKBKG; |
| | RELB; MAP3K7; MAP2K2; IL8; JAK2; CHUK; STAT3; |
| | MAP2K1; NFKB1; CEBPB; JUN; IL1R1; SRF; IL6 |
| Hepatic Cholestasis | PRKCE; IRAK1; INS; MYD88; PRKCZ; TRAF6; PPARA; |
| | RXRA; IKBKB; PRKCI; NFKB2; MAP3K14; MAPK8; |
| | PRKD1; MAPK10; RELA; PRKCD; MAPK9; ABCB1; |
| | TRAF2; TLR4; TNF; INSR; IKBKG; RELB; MAP3K7; IL8; |
| | CHUK; NR1H2; TJP2; NFKB1; ESR1; SREBF1; FGFR4; |
| | JUN; IL1R1; PRKCA; IL6 |
| IGF-1 Signaling | IGF1; PRKCZ; ELK1; MAPK1; PTPN11; NEDD4; AKT2; |
| | PIK3CA; PRKCI; PTK2; FOS; PIK3CB; PIK3C3; MAPK8; |
| | IGF1R; IRS1; MAPK3; IGFBP7; KRAS; PIK3C2A; |
| | YWHAZ; PXN; RAF1; CASP9; MAP2K2; AKT1; PIK3R1; |
| | PDPK1; MAP2K1; IGFBP2; SFN; JUN; CYR61; AKT3; |
| | FOXO1; SRF; CTGF; RPS6KB1 |
| NRF2-mediated Oxidative | PRKCE; EP300; SOD2; PRKCZ; MAPK1; SQSTM1; |
| Stress Response | NQO1; PIK3CA; PRKCI; FOS; PIK3CB; PIK3C3; MAPK8; |
| | PRKD1; MAPK3; KRAS; PRKCD; GSTP1; MAPK9; FTL; |
| | NFE2L2; PIK3C2A; MAPK14; RAF1; MAP3K7; CREBBP; |
| | MAP2K2; AKT1; PIK3R1; MAP2K1; PPIB; JUN; KEAP1; |
| | GSK3B; ATF4; PRKCA; EIF2AK3; HSP90AA1 |
| Hepatic Fibrosis/Hepatic | EDN1; IGF1; KDR; FLT1; SMAD2; FGFR1; MET; PGF; |
| Stellate Cell Activation | SMAD3; EGFR; FAS; CSF1; NFKB2; BCL2; MYH9; |
| | IGF1R; IL6R; RELA; TLR4; PDGFRB; TNF; RELB; IL8; |
| | PDGFRA; NFKB1; TGFBR1; SMAD4; VEGFA; BAX; |
| | IL1R1; CCL2; HGF; MMP1; STAT1; IL6; CTGF; MMP9 |
| PPAR Signaling | EP300; INS; TRAF6; PPARA; RXRA; MAPK1; IKBKB; |
| | NCOR2; FOS; NFKB2; MAP3K14; STAT5B; MAPK3; |
| | NRIP1; KRAS; PPARG; RELA; STAT5A; TRAF2; |
| | PPARGC1A; PDGFRB; TNF; INSR; RAF1; IKBKG; |
| | RELB; MAP3K7; CREBBP; MAP2K2; CHUK; PDGFRA; |
| | MAP2K1; NFKB1; JUN; IL1R1; HSP90AA1 |
| Fc Epsilon RI Signaling | PRKCE; RAC1; PRKCZ; LYN; MAPK1; RAC2; PTPN11; |
| | AKT2; PIK3CA; SYK; PRKCI; PIK3CB; PIK3C3; MAPK8; |
| | PRKD1; MAPK3; MAPK10; KRAS; MAPK13; PRKCD; |
| | MAPK9; PIK3C2A; BTK; MAPK14; TNF; RAF1; FYN; |
| | MAP2K2; AKT1; PIK3R1; PDPK1; MAP2K1; AKT3; |
| | VAV3; PRKCA |
| G-Protein Coupled | PRKCE; RAP1A; RGS16; MAPK1; GNAS; AKT2; IKBKB; |
| Receptor Signaling | PIK3CA; CREB1; GNAQ; NFKB2; CAMK2A; PIK3CB; |
| | PIK3C3; MAPK3; KRAS; RELA; SRC; PIK3C2A; RAF1; |
| | IKBKG; RELB; FYN; MAP2K2; AKT1; PIK3R1; CHUK; |
| | PDPK1; STAT3; MAP2K1; NFKB1; BRAF; ATF4; AKT3; |
| | PRKCA |
| Inositol Phosphate | PRKCE; IRAK1; PRKAA2; EIF2AK2; PTEN; GRK6; |
| Metabolism | MAPK1; PLK1; AKT2; PIK3CA; CDK8; PIK3CB; PIK3C3; |
| | MAPK8; MAPK3; PRKCD; PRKAA1; MAPK9; CDK2; |
| | PIM1; PIK3C2A; DYRK1A; MAP2K2; PIP5K1A; PIK3R1; |
| | MAP2K1; PAK3; ATM; TTK; CSNK1A1; BRAF; SGK |
| PDGF Signaling | EIF2AK2; ELK1; ABL2; MAPK1; PIK3CA; FOS; PIK3CB; |
| | PIK3C3; MAPK8; CAV1; ABL1; MAPK3; KRAS; SRC; |
| | PIK3C2A; PDGFRB; RAF1; MAP2K2; JAK1; JAK2; |
| | PIK3R1; PDGFRA; STAT3; SPHK1; MAP2K1; MYC; |
| | JUN; CRKL; PRKCA; SRF; STAT1; SPHK2 |
| VEGF Signaling | ACTN4; ROCK1; KDR; FLT1; ROCK2; MAPK1; PGF; |
| | AKT2; PIK3CA; ARNT; PTK2; BCL2; PIK3CB; PIK3C3; |
| | BCL2L1; MAPK3; KRAS; HIF1A; NOS3; PIK3C2A; PXN; |
| | RAF1; MAP2K2; ELAVL1; AKT1; PIK3R1; MAP2K1; SFN; |
| | VEGFA; AKT3; FOXO1; PRKCA |
| Natural Killer | PRKCE; RAC1; PRKCZ; MAPK1; RAC2; PTPN11; |
| Cell Signaling | KIR2DL3; AKT2; PIK3CA; SYK; PRKCI; PIK3CB; |
| | PIK3C3; PRKD1; MAPK3; KRAS; PRKCD; PTPN6; |
| | PIK3C2A; LCK; RAF1; FYN; MAP2K2; PAK4; AKT1; |
| | PIK3R1; MAP2K1; PAK3; AKT3; VAV3; PRKCA |
| Cell Cycle: G1/S | HDAC4; SMAD3; SUV39H1; HDAC5; CDKN1B; BTRC; |
| Checkpoint Regulation | ATR; ABL1; E2F1; HDAC2; HDAC7A; RB1; HDAC11; |
| | HDAC9; CDK2; E2F2; HDAC3; TP53; CDKN1A; CCND1; |
| | E2F4; ATM; RBL2; SMAD4; CDKN2A; MYC; NRG1; |
| | GSK3B; RBL1; HDAC6 |
| T Cell Receptor | RAC1; ELK1; MAPK1; IKBKB; CBL; PIK3CA; FOS; |
| Signaling | NFKB2; PIK3CB; PIK3C3; MAPK8; MAPK3; KRAS; |
| | RELA; PIK3C2A; BTK; LCK; RAF1; IKBKG; RELB; FYN; |
| | MAP2K2; PIK3R1; CHUK; MAP2K1; NFKB1; ITK; BCL10; |
| | JUN; VAV3 |
| Death Receptor | CRADD; HSPB1; BID; BIRC4; TBK1; IKBKB; FADD; |
| Signaling | FAS; NFKB2; BCL2; MAP3K14; MAPK8; RIPK1; CASP8; |
| | DAXX; TNFRSF10B; RELA; TRAF2; TNF; IKBKG; RELB; |
| | CASP9; CHUK; APAF1; NFKB1; CASP2; BIRC2; CASP3; |
| | BIRC3 |
| FGF Signaling | RAC1; FGFR1; MET; MAPKAPK2; MAPK1; PTPN11; |
| | AKT2; PIK3CA; CREB1; PIK3CB; PIK3C3; MAPK8; |
| | MAPK3; MAPK13; PTPN6; PIK3C2A; MAPK14; RAF1; |
| | AKT1; PIK3R1; STAT3; MAP2K1; FGFR4; CRKL; ATF4; |
| | AKT3; PRKCA; HGF |
| GM-CSF Signaling | LYN; ELK1; MAPK1; PTPN11; AKT2; PIK3CA; CAMK2A; |
| | STAT5B; PIK3CB; PIK3C3; GNB2L1; BCL2L1; MAPK3; |
| | ETS1; KRAS; RUNX1; PIM1; PIK3C2A; RAF1; MAP2K2; |
| | AKT1; JAK2; PIK3R1; STAT3; MAP2K1; CCND1; AKT3; |
| | STAT1 |
| Amyotrophic Lateral | BID; IGF1; RAC1; BIRC4; PGF; CAPNS1; CAPN2; |
| Sclerosis Signaling | PIK3CA; BCL2; PIK3CB; PIK3C3; BCL2L1; CAPN1; |
| | PIK3C2A; TP53; CASP9; PIK3R1; RAB5A; CASP1; |
| | APAF1; VEGFA; BIRC2; BAX; AKT3; CASP3; BIRC3 |
| JAK/Stat Signaling | PTPN1; MAPK1; PTPN11; AKT2; PIK3CA; STAT5B; |
| | PIK3CB; PIK3C3; MAPK3; KRAS; SOCS1; STAT5A; |
| | PTPN6; PIK3C2A; RAF1; CDKN1A; MAP2K2; JAK1; |
| | AKT1; JAK2; PIK3R1; STAT3; MAP2K1; FRAP1; AKT3; |
| | STAT1 |
| Nicotinate and | PRKCE; IRAK1; PRKAA2; EIF2AK2; GRK6; MAPK1; |
| Nicotinamide | PLK1; AKT2; CDK8; MAPK8; MAPK3; PRKCD; PRKAA1; |
| Metabolism | PBEF1; MAPK9; CDK2; PIM1; DYRK1A; MAP2K2; |
| | MAP2K1; PAK3; NT5E; TTK; CSNK1A1; BRAF; SGK |
| Chemokine Signaling | CXCR4; ROCK2; MAPK1; PTK2; FOS; CFL1; GNAQ; |
| | CAMK2A; CXCL12; MAPK8; MAPK3; KRAS; MAPK13; |
| | RHOA; CCR3; SRC; PPP1CC; MAPK14; NOX1; RAF1; |
| | MAP2K2; MAP2K1; JUN; CCL2; PRKCA |
| IL-2 Signaling | ELK1; MAPK1; PTPN11; AKT2; PIK3CA; SYK; FOS; |
| | STAT5B; PIK3CB; PIK3C3; MAPK8; MAPK3; KRAS; |
| | SOCS1; STAT5A; PIK3C2A; LCK; RAF1; MAP2K2; |
| | JAK1; AKT1; PIK3R1; MAP2K1; JUN; AKT3 |
| Synaptic Long Term | PRKCE; IGF1; PRKCZ; PRDX6; LYN; MAPK1; GNAS; |
| Depression | PRKCI; GNAQ; PPP2R1A; IGF1R; PRKD1; MAPK3; |
| | KRAS; GRN; PRKCD; NOS3; NOS2A; PPP2CA; |
| | YWHAZ; RAF1; MAP2K2; PPP2R5C; MAP2K1; PRKCA |
| Estrogen Receptor | TAF4B; EP300; CARM1; PCAF; MAPK1; NCOR2; |
| Signaling | SMARCA4; MAPK3; NRIP1; KRAS; SRC; NR3C1; |
| | HDAC3; PPARGC1A; RBM9; NCOA3; RAF1; CREBBP; |
| | MAP2K2; NCOA2; MAP2K1; PRKDC; ESR1; ESR2 |
| Protein | TRAF6; SMURF1; BIRC4; BRCA1; UCHL1; NEDD4; |
| Ubiquitination | CBL; UBE2I; BTRC; HSPA5; USP7; USP10; FBXW7; |
| Pathway | USP9X; STUB1; USP22; B2M; BIRC2; PARK2; USP8; |
| | USP1; VHL; HSP90AA1; BIRC3 |
| IL-10 Signaling | TRAF6; CCR1; ELK1; IKBKB; SP1; FOS; NFKB2; |
| | MAP3K14; MAPK8; MAPK13; RELA; MAPK14; TNF; |
| | IKBKG; RELB; MAP3K7; JAK1; CHUK; STAT3; NFKB1; |
| | JUN; IL1R1; IL6 |
| VDR/RXR Activation | PRKCE; EP300; PRKCZ; RXRA; GADD45A; HES1; |
| | NCOR2; SP1; PRKCI; CDKN1B; PRKD1; PRKCD; |
| | RUNX2; KLF4; YY1; NCOA3; CDKN1A; NCOA2; SPP1; |
| | LRP5; CEBPB; FOXO1; PRKCA |
| TGF-beta | EP300; SMAD2; SMURF1; MAPK1; SMAD3; SMAD1; |
| Signaling | FOS; MAPK8; MAPK3; KRAS; MAPK9; RUNX2; |
| | SERPINE1; RAF1; MAP3K7; CREBBP; MAP2K2; |
| | MAP2K1; TGFBR1; SMAD4; JUN; SMAD5 |
| Toll-like Receptor | IRAK1; EIF2AK2; MYD88; TRAF6; PPARA; ELK1; |
| Signaling | IKBKB; FOS; NFKB2; MAP3K14; MAPK8; MAPK13; |
| | RELA; TLR4; MAPK14; IKBKG; RELB; MAP3K7; CHUK; |
| | NFKB1; TLR2; JUN |
| p38 MAPK Signaling | HSPB1; IRAK1; TRAF6; MAPKAPK2; ELK1; FADD; FAS; |
| | CREB1; DDIT3; RPS6KA4; DAXX; MAPK13; TRAF2; |
| | MAPK14; TNF; MAP3K7; TGFBR1; MYC; ATF4; IL1R1; |
| | SRF; STAT1 |
| Neurotrophin/TRK | NTRK2; MAPK1; PTPN11; PIK3CA; CREB1; FOS; |
| Signaling | PIK3CB; PIK3C3; MAPK8; MAPK3; KRAS; PIK3C2A; |
| | RAF1; MAP2K2; AKT1; PIK3R1; PDPK1; MAP2K1; |
| | CDC42; JUN; ATF4 |
| FXR/RXR Activation | INS; PPARA; FASN; RXRA; AKT2; SDC1; MAPK8; |
| | APOB; MAPK10; PPARG; MTTP; MAPK9; PPARGC1A; |
| | TNF; CREBBP; AKT1; SREBF1; FGFR4; AKT3; FOXO1 |
| Synaptic Long Term | PRKCE; RAP1A; EP300; PRKCZ; MAPK1; CREB1; |
| Potentiation | PRKCI; GNAQ; CAMK2A; PRKD1; MAPK3; KRAS; |
| | PRKCD; PPP1CC; RAF1; CREBBP; MAP2K2; MAP2K1; |
| | ATF4; PRKCA |
| Calcium Signaling | RAP1A; EP300; HDAC4; MAPK1; HDAC5; CREB1; |
| | CAMK2A; MYH9; MAPK3; HDAC2; HDAC7A; HDAC11; |
| | HDAC9; HDAC3; CREBBP; CALR; CAMKK2; ATF4; |
| | HDAC6 |
| EGF Signaling | ELK1; MAPK1; EGFR; PIK3CA; FOS; PIK3CB; PIK3C3; |
| | MAPK8; MAPK3; PIK3C2A; RAF1; JAK1; PIK3R1; |
| | STAT3; MAP2K1; JUN; PRKCA; SRF; STAT1 |
| Hypoxia Signaling in the | EDN1; PTEN; EP300; NQO1; UBE2I; CREB1; ARNT; |
| Cardiovascular System | HIF1A; SLC2A4; NOS3; TP53; LDHA; AKT1; ATM; |
| | VEGFA; JUN; ATF4; VHL; HSP90AA1 |
| LPS/IL-1 Mediated | IRAK1; MYD88; TRAF6; PPARA; RXRA; ABCA1; |
| Inhibition | MAPK8; ALDH1A1; GSTP1; MAPK9; ABCB1; TRAF2; |
| of RXR Function | TLR4; TNF; MAP3K7; NR1H2; SREBF1; JUN; IL1R1 |
| LXR/RXR Activation | FASN; RXRA; NCOR2; ABCA1; NFKB2; IRF3; RELA; |
| | NOS2A; TLR4; TNF; RELB; LDLR; NR1H2; NFKB1; |
| | SREBF1; IL1R1; CCL2; IL6; MMP9 |
| Amyloid Processing | PRKCE; CSNK1E; MAPK1; CAPNS1; AKT2; CAPN2; |
| | CAPN1; MAPK3; MAPK13; MAPT; MAPK14; AKT1; |
| | PSEN1; CSNK1A1; GSK3B; AKT3; APP |
| IL-4 Signaling | AKT2; PIK3CA; PIK3CB; PIK3C3; IRS1; KRAS; SOCS1; |
| | PTPN6; NR3C1; PIK3C2A; JAK1; AKT1; JAK2; PIK3R1; |
| | FRAP1; AKT3; RPS6KB1 |
| Cell Cycle: G2/M DNA | EP300; PCAF; BRCA1; GADD45A; PLK1; BTRC; |
| Damage Checkpoint | CHEK1; ATR; CHEK2; YWHAZ; TP53; CDKN1A; |
| Regulation | PRKDC; ATM; SFN; CDKN2A |
| Nitric Oxide Signaling in the | KDR; FLT1; PGF; AKT2; PIK3CA; PIK3CB; PIK3C3; |
| Cardiovascular System | CAV1; PRKCD; NOS3; PIK3C2A; AKT1; PIK3R1; |
| | VEGFA; AKT3; HSP90AA1 |
| Purine Metabolism | NME2; SMARCA4; MYH9; RRM2; ADAR; EIF2AK4; |
| | PKM2; ENTPD1; RAD51; RRM2B; TJP2; RAD51C; |
| | NT5E; POLD1; NME1 |
| cAMP-mediated Signaling | RAP1A; MAPK1; GNAS; CREB1; CAMK2A; MAPK3; |
| | SRC; RAF1; MAP2K2; STAT3; MAP2K1; BRAF; ATF4 |
| Mitochondrial Dysfunction | SOD2; MAPK8; CASP8; MAPK10; MAPK9; CASP9; |
| Notch Signaling | PARK7; PSEN1; PARK2; APP; CASP3 |
| | HES1; JAG1; NUMB; NOTCH4; ADAM17; NOTCH2; |
| | PSEN1; NOTCH3; NOTCH1; DLL4 |
| Endoplasmic Reticulum | HSPA5; MAPK8; XBP1; TRAF2; ATF6; CASP9; ATF4; |
| Stress Pathway | EIF2AK3; CASP3 |
| Pyrimidine Metabolism | NME2; AICDA; RRM2; EIF2AK4; ENTPD1; RRM2B; |
| | NT5E; POLD1; NME1 |
| Parkinson's Signaling | UCHL1; MAPK8; MAPK13; MAPK14; CASP9; PARK7; |
| | PARK2; CASP3 |
| Cardiac & Beta Adrenergic | GNAS; GNAQ; PPP2R1A; GNB2L1; PPP2CA; PPP1CC; |
| Signaling | PPP2R5C |
| Glycolysis/Gluconeogenesis | HK2; GCK; GPI; ALDH1A1; PKM2; LDHA; HK1 |
| Interferon Signaling | IRF1; SOCS1; JAK1; JAK2; IFITM1; STAT1; IFIT3 |
| Sonic Hedgehog Signaling | ARRB2; SMO; GLI2; DYRK1A; GLI1; GSK3B; DYRK1B |
| Glycerophospholipid | PLD1; GRN; GPAM; YWHAZ; SPHK1; SPHK2 |
| Metabolism | |
| Phospholipid Degradation | PRDX6; PLD1; GRN; YWHAZ; SPHK1; SPHK2 |
| Tryptophan Metabolism | SIAH2; PRMT5; NEDD4; ALDH1A1; CYP1B1; SIAH1 |
| Lysine Degradation | SUV39H1; EHMT2; NSD1; SETD7; PPP2R5C |
| Nucleotide Excision Repair | ERCC5; ERCC4; XPA; XPC; ERCC1 |
| Pathway | |
| Starch and Sucrose | UCHL1; HK2; GCK; GPI; HK1 |
| Metabolism | |
| Aminosugars Metabolism | NQO1; HK2; GCK; HK1 |
| Arachidonic Acid | PRDX6; GRN; YWHAZ; CYP1B1 |
| Metabolism | |
| Circadian Rhythm Signaling | CSNK1E; CREB1; ATF4; NR1D1 |
| Coagulation System | BDKRB1; F2R; SERPINE1; F3 |
| Dopamine Receptor | PPP2R1A; PPP2CA; PPP1CC; PPP2R5C |
| Signaling | |
| Glutathione Metabolism | IDH2; GSTP1; ANPEP; IDH1 |
| Glycerolipid Metabolism | ALDH1A1; GPAM; SPHK1; SPHK2 |
| Linoleic Acid Metabolism | PRDX6; GRN; YWHAZ; CYP1B1 |
| Methionine Metabolism | DNMT1; DNMT3B; AHCY; DNMT3A |
| Pyruvate Metabolism | GLO1; ALDH1A1; PKM2; LDHA |
| Arginine and Proline | ALDH1A1; NOS3; NOS2A |
| Metabolism | |
| Eicosanoid Signaling | PRDX6; GRN; YWHAZ |
| Fructose and Mannose | HK2; GCK; HK1 |
| Metabolism | |
| Galactose Metabolism | HK2; GCK; HK1 |
| Stilbene, Coumarine and | PRDX6; PRDX1; TYR |
| Lignin Biosynthesis | |
| Antigen Presentation | CALR; B2M |
| Pathway | |
| Biosynthesis of Steroids | NQO1; DHCR7 |
| Butanoate Metabolism | ALDH1A1; NLGN1 |
| Citrate Cycle | IDH2; IDH1 |
| Fatty Acid Metabolism | ALDH1A1; CYP1B1 |
| Glycerophospholipid | PRDX6; CHKA |
| Metabolism | |
| Histidine Metabolism | PRMT5; ALDH1A1 |
| Inositol Metabolism | ERO1L; APEX1 |
| Metabolism of Xenobiotics | GSTP1; CYP1B1 |
| by Cytochrome p450 | |
| Methane Metabolism | PRDX6; PRDX1 |
| Phenylalanine Metabolism | PRDX6; PRDX1 |
| Propanoate Metabolism | ALDH1A1; LDHA |
| Selenoamino Acid | PRMT5; AHCY |
| Metabolism | |
| Sphingolipid Metabolism | SPHK1; SPHK2 |
| Aminophosphonate | PRMT5 |
| Metabolism | |
| Androgen and Estrogen | PRMT5 |
| Metabolism | |
| Ascorbate and Aldarate | ALDH1A1 |
| Metabolism | |
| Bile Acid Biosynthesis | ALDH1A1 |
| Cysteine Metabolism | LDHA |
| Fatty Acid Biosynthesis | FASN |
| Glutamate Receptor | GNB2L1 |
| Signaling | |
| NRF2-mediated Oxidative | PRDX1 |
| Stress Response | |
| Pentose Phosphate | GPI |
| Pathway | |
| Pentose and Glucuronate | UCHL1 |
| Interconversions | |
| Retinol Metabolism | ALDH1A1 |
| Riboflavin Metabolism | TYR |
| Tyrosine Metabolism | PRMT5, TYR |
| Ubiquinone Biosynthesis | PRMT5 |
| Valine, Leucine and | ALDH1A1 |
| Isoleucine Degradation | |
| Glycine, Serine and | CHKA |
| Threonine Metabolism | |
| Lysine Degradation | ALDH1A1 |
| Pain/Taste | TRPM5; TRPA1 |
| Pain | TRPM7; TRPC5; TRPC6; TRPC1; Cnr1; cnr2; Grk2; |
| | Trpa1; Pomc; Cgrp; Crf; Pka; Era; Nr2b; TRPM5; Prkaca; |
| | Prkacb; Prkar1a; Prkar2a |
| Mitochondrial Function | AIF; CytC; SMAC (Diablo); Aifm-1; Aifm-2 |
| Developmental Neurology | BMP-4; Chordin (Chrd); Noggin (Nog); WNT (Wnt2; |
| | Wnt2b; Wnt3a; Wnt4; Wnt5a; Wnt6; Wnt7b; Wnt8b; |
| | Wnt9a; Wnt9b; Wnt10a; Wnt10b; Wnt16); beta-catenin; |
| | Dkk-1; Frizzled related proteins; Otx-2; Gbx2; FGF-8; |
| | Reelin; Dab1; unc-86 (Pou4f1 or Brn3a); Numb; Reln |

[0766] In an aspect, the invention provides a method of individualized or personalized treatment of a genetic disease in a subject in need of such treatment comprising: (a) introducing one or more mutations ex vivo in a tissue, organ or a cell line, or in vivo in a transgenic non-human mammal, comprising delivering to cell(s) of the tissue, organ, cell or mammal a composition comprising the particle delivery system or the delivery system or the virus particle of any one of the above embodiment or the cell of any one of the above embodiment, wherein the specific mutations or precise sequence substitutions are or have been correlated to the genetic disease; (b) testing treatment(s) for the genetic disease on the cells to which the vector has been delivered that have the specific mutations or precise sequence substitutions correlated to the genetic disease; and (c) treating the subject based on results from the testing of treatment(s) of step (b).

### Infectious Diseases

[0767] In one embodiment, the composition, system(s), or component(s) thereof can be used to diagnose, prognose, treat, and/or prevent an infectious disease caused by a microorganism, such as bacteria, virus, fungi, parasites, or combinations thereof.

[0768] In one embodiment, the system(s) or component(s) thereof can be capable of targeting specific microorganism within a mixed population. Exemplary methods of such techniques are described in e.g. Gomaa A A, Klumpe H E, Luo M L, Selle K, Barrangou R, Beisel C L. 2014. Programmable removal of bacterial strains by use of genome-targeting composition, systems, mBio 5:e00928-13; Citorik R J, Mimee M, Lu T K. 2014. Sequence-specific antimicrobials using efficiently delivered RNA-guided nucleases. Nat Biotechnol 32:1141-1145, the teachings of which can be adapted for use with the compositions, systems, and components thereof described herein.

[0769] In one embodiment, the composition, system(s), and/or components thereof can be capable of targeting pathogenic and/or drug-resistant microorganisms, such as bacteria, virus, parasites, and fungi. In one embodiment, the composition, system(s), and/or components thereof can be capable of targeting and modifying one or more polynucleotides in a pathogenic microorganism such that the microorganism is less virulent, killed, inhibited, or is otherwise rendered incapable of causing disease and/or infecting and/or replicating in a host cell.

[0770] In one embodiment, the pathogenic bacteria that can be targeted and/or modified by the composition, system(s) and/or component(s) thereof described herein include, but are not limited to, those of the genus Actinomyces (e.g. A. israelii), Bacillus (e.g. B. anthracis, B. cereus), Bactereoides (e.g. B. fragilis), Bartonella (B. henselae, B. quintana), Bordetella (B. pertussis), Borrelia (e.g. B. burgdorferi, B. garinii, B. afzelii, and B. recurreentis), Brucella (e.g. B. abortus, B. canis, B. melitensis, and B. suis), Campylobacter (e.g. C. jejuni), Chlamydia (e.g. C. pneumoniae and C. trachomatis), Chlamydophila (e.g. C. psittaci), Clostridium (e.g. C. botulinum, C. difficile, C. perfringens. C. tetani), Corynebacterium (e.g. C. diptheriae), Enterococcus (e.g. E. Faecalis, E. faecium), Ehrlichia (E. canis and E. chaffensis) Escherichia (e.g. E. coli), Francisella (e.g. F. tularensis), Haemophilus (e.g. H. influenzae), Helicobacter (H. pylori), Klebsiella (E.g. K. pneumoniae), Legionella (e.g. L. pneumophila), Leptospira (e.g. L. interrogans, L. santarosai, L. weilii, L. noguchii), Listereia (e.g. L. monocytogeenes), Mycobacterium (e.g. M. leprae, M. tuberculosis, M. ulcerans), Mycoplasma (M. pneumoniae), Neisseria (N. gonorrhoeae and N. menigitidis), Nocardia (e.g. N. asteeroides), Pseudomonas (P. aeruginosa), Rickettsia (R. rickettsia), Salmonella (S. typhi and S. typhimurium), Shigella (S. sonnei and S. dysenteriae), Staphylococcus (S. aureus, S. epidermidis, and S. saprophyticus), Streeptococcus (S. agalactiaee, S. pneumoniae, S. pyogenes), Treponema (T. pallidum), Ureeaplasma (e.g. U. urealyticum), Vibrio (e.g. V. cholerae), Yersinia (e.g. Y. pestis, Y. enteerocolitica, and Y. pseudotuberculosis).

[0771] In one embodiment, the pathogenic virus that can be targeted and/or modified by the composition, system(s), and/or component(s) thereof described herein include, but are not limited to, a double-stranded DNA virus, a partly double-stranded DNA virus, a single-stranded DNA virus, a positive single-stranded RNA virus, a negative single-stranded RNA virus, or a double stranded RNA virus. In one embodiment, the pathogenic virus can be from the family Adenoviridae (e.g. Adenovirus), Herpeesviridae (e.g. Herpes simplex, type 1, Herpes simplex, type 2, Varicella-zoster virus, Epstein-Barr virus, Human cytomegalovirus, Human herpesvirus, type 8), Papillomaviridae (e.g. Human papillomavirus), Polyomaviridae (e.g. BK virus, JC virus), Poxviridae (e.g. smallpox), Hepadnaviridae (e.g. Hepatitis B), Parvoviridae (e.g. Parvovirus B19), Astroviridae (e.g. Human astrovirus), Caliciviridae (e.g. Norwalk virus), Picornaviridae (e.g. coxsackievirus, hepatitis A virus, poliovirus, rhinovirus), Coronaviridae (e.g. Severe acute respiratory syndrome-related coronavirus, strains: Severe acute respiratory syndrome virus, Severe acute respiratory syndrome coronavirus 2 (COVID-19)), Flaviviridae (e.g. Hepatitis C virus, yellow fever virus, dengue virus, West Nile virus, TBE virus), Togaviridae (e.g. Rubella virus), Hepeviridae (e.g. Hepatitis E virus), Retroviridae (Human immunodeficiency virus (HIV)), Orthomyxoviridae (e.g. Influenza virus), Arenaviridae (e.g. Lassa virus), Bunyaviridae (e.g. Crimean-Congo hemorrhagic fever virus, Hantaan virus), Filoviridae (e.g. Ebola virus and Marburg virus), Paramyxoviridae (e.g. Measles virus, Mumps virus, Parainfluenza virus, Respiratory syncytial virus), Rhabdoviridae (Rabies virus), Hepatits D virus, Reoviridae (e.g. Rotavirus, Orbivirus, Coltivirus, Banna virus).

[0772] In one embodiment, the pathogenic fungi that can be targeted and/or modified by the composition, system(s) and/or component(s) thereof described herein include, but are not limited to, those of the genus Candida (e.g. C. albicans), Aspergillus (e.g. A. fumigatus, A. flavus, A. clavatus), Cryptococcus (e.g. C. neoformans, C. gattii), Histoplasma (H. capsulatum), Pneumocystis (e.g. P. jiroveecii), Stachybotrys (e.g. S. chartarum).

[0773] In one embodiment, the pathogenic parasites that can be targeted and/or modified by the composition, system(s) and/or component(s) thereof described herein include, but are not limited to, protozoa, helminths, and ectoparasites. In one embodiment, the pathogenic protozoa that can be targeted and/or modified by the composition, system(s), and/or component(s) thereof described herein include, but are not limited to, those from the groups Sarcodina (e.g. ameba such as Entamoeba), Mastigophora (e.g. flagellates such as Giardia and Leishmania), Cilophora (e.g. ciliates such as Balantidum), and sporozoa (e.g. plasmodium and cryptosporidium). In one embodiment, the pathogenic helminths that can be targeted and/or modified by the composition, system(s), and/or component(s) thereof described herein include, but are not limited to, flatworms (platyhelminths), thorny-headed worms (acanthoceephalins), and roundworms (nematodes). In one embodiment, the pathogenic ectoparasites that can be targeted and/or modified by the composition, system(s), and/or component(s) thereof described herein include, but are not limited to, ticks, fleas, lice, and mites.

[0774] In one embodiment, the pathogenic parasite that can be targeted and/or modified by the composition, system(s), and/or component(s) thereof described herein include, but are not limited to, Acanthamoeba spp., Balamuthia mandrillaris, Babesiosis spp. (e.g. Babesia B. divergens, B. bigemina, B. equi, B. microfti, B. duncani), Balantidiasis spp. (e.g. Balantidium coli), Blastocystis spp., Cryptosporidium spp., Cyclosporiasis spp. (e.g. Cyclospora cayetanensis), Dientamoebiasis spp. (e.g. Dientamoeba fragilis), Amoebiasis spp. (e.g. Entamoeba histolytica), Giardiasis spp. (e.g. Giardia lamblia), Isosporiasis spp. (e.g. Isospora belli), Leishmania spp., Naegleria spp. (e.g. Naegleria fowleri), Plasmodium spp. (e.g. Plasmodium falciparum, Plasmodium vivax, Plasmodium ovale curtisi, Plasmodium ovale wallikeri, Plasmodium malariae, Plasmodium knowlesi), Rhinosporidiosis spp. (e.g. Rhinosporidium seeberi), Sarcocystosis spp. (e.g. Sarcocystis bovihominis, Sarcocystis suihominis), Toxoplasma spp. (e.g. Toxoplasma gondii), Trichomonas spp. (e.g. Trichomonas vaginalis), Trypanosoma spp. (e.g. Trypanosoma brucei), Trypanosoma spp. (e.g. Trypanosoma cruzi), Tapeworm (e.g. Cestoda, Taenia multiceps, Taenia saginata, Taenia solium), Diphyllobothrium latum spp., Echinococcus spp. (e.g. Echinococcus granulosus, Echinococcus multilocularis, E. vogeli, E. oligarthrus), Hymenolepis spp. (e.g. Hymenolepis nana, Hymenolepis diminuta), Bertiella spp. (e.g. Bertiella mucronata, Bertiella studeri), Spirometra (e.g. Spirometra erinaceieuropaei), Clonorchis spp. (e.g. Clonorchis sinensis; Clonorchis viverrini), Dicrocoelium spp. (e.g. Dicrocoelium dendriticum), Fasciola spp. (e.g. Fasciola hepatica, Fasciola gigantica), Fasciolopsis spp. (e.g. Fasciolopsis buski), Metagonimus spp. (e.g. Metagonimus yokogawai), Metorchis spp. (e.g. Metorchis conjunctus), Opisthorchis spp. (e.g. Opisthorchis viverrini, Opisthorchis felineus), Clonorchis spp. (e.g. Clonorchis sinensis), Paragonimus spp. (e.g. Paragonimus westermani; Paragonimus africanus; Paragonimus caliensis; Paragonimus kellicotti; Paragonimus skrjabini; Paragonimus uterobilateralis), Schistosoma sp., Schistosoma spp. (e.g. Schistosoma mansoni, Schistosoma haematobium, Schistosoma japonicum, Schistosoma mekongi, and Schistosoma intercalatum), Echinostoma spp. (e.g. E. echinatum), Trichobilharzia spp. (e.g. Trichobilharzia regent), Ancylostoma spp. (e.g. Ancylostoma duodenale), Necator spp. (e.g. Necator americanus), Angiostrongylus spp., Anisakis spp., Ascaris spp. (e.g. Ascaris lumbricoides), Baylisascaris spp. (e.g. Baylisascaris procyonis), Brugia spp. (e.g. Brugia malayi, Brugia timori), Dioctophyme spp. (e.g. Dioctophyme renale), Dracunculus spp. (e.g. Dracunculus medinensis), Enterobius spp. (e.g. Enterobius vermicularis, Enterobius gregorii), Gnathostoma spp. (e.g. Gnathostoma spinigerum, Gnathostoma hispidum), Halicephalobus spp. (e.g. Halicephalobus gingivalis), Loa loa spp. (e.g. Loa loa filaria), Mansonella spp. (e.g. Mansonella streptocerca), Onchocerca spp. (e.g. Onchocerca volvulus), Strongyloides spp. (e.g. Strongyloides stercoralis), Thelazia spp. (e.g. Thelazia cahforniensis, Thelazia callipaeda), Toxocara spp. (e.g. Toxocara canis, Toxocara cati, Toxascaris leonine), Trichinella spp. (e.g. Trichinella spiralis, Trichinella britovi, Trichinella nelsoni, Trichinella nativa), Trichuris spp. (e.g. Trichuris trichiura, Trichuris vulpis), Wuchereria spp. (e.g. Wuchereria bancrofti), Dermatobia spp. (e.g. Dermatobia hominis), Tunga spp. (e.g. Tunga penetrans), Cochliomyia spp. (e.g. Cochliomyia hominivorax), Linguatula spp. (e.g. Linguatula serrata), Archiacanthocephala sp., Moniliformis sp. (e.g. Monilformis moniliformis), Pediculus spp. (e.g. Pediculus humanus capitis, Pediculus humanus humanus), Pthirus spp. (e.g. Pthirus pubis), Arachnida spp. (e.g. Trombiculidae, Ixodidae, Argaside), Siphonaptera spp (e.g. Siphonaptera: Pulicinae), Cimicidae spp. (e.g. Cimex lectularius and Cimex hemipterus), Diptera spp., Demodex spp. (e.g. Demodex folliculorum brevis canis), Sarcoptes spp. (e.g. Sarcoptes scabiei), Dermanyssus spp. (e.g. Dermanyssus gallinae), Ornithonyssus spp. (e.g. Ornithonyssus sylviarum, Ornithonyssus bursa, Ornithonyssus bacoti), Laelaps spp. (e.g. Laelaps echidnina), Liponyssoides spp. (e.g. Liponyssoides sanguineus).

[0775] In one embodiment the gene targets can be any of those as set forth in Table 1 of Strich and Chertow. 2019. J. Clin. Microbio. 57:4 e01307-18, which is incorporated herein as if expressed in its entirety herein.

[0776] In one embodiment, the method can include delivering a composition, system, and/or component thereof to a pathogenic organism described herein, allowing the composition, system, and/or component thereof to specifically bind and modify one or more targets in the pathogenic organism, whereby the modification kills, inhibits, reduces the pathogenicity of the pathogenic organism, or otherwise renders the pathogenic organism non-pathogenic. In one embodiment, delivery of the composition, system, occurs in vivo (i.e., in the subject being treated). In one embodiment occurs by an intermediary, such as microorganism or phage that is non-pathogenic to the subject but is capable of transferring polynucleotides and/or infecting the pathogenic microorganism. In one embodiment, the intermediary microorganism can be an engineered bacteria, virus, or phage that contains the composition, system(s), and/or component(s) thereof and/or vectors and/or vector systems. The method can include administering an intermediary microorganism containing the composition, system(s), and/or component(s) thereof and/or vectors and/or vector systems to the subject to be treated. The intermediary microorganism can then produce the compositions and/or component thereof or transfer a composition, system, polynucleotide to the pathogenic organism. In embodiments, where the compositions and/or component thereof, vector, or vector system is transferred to the pathogenic microorganism, the composition, system, or component thereof is then produced in the pathogenic microorganism and modifies the pathogenic microorganism such that it is less virulent, killed, inhibited, or is otherwise rendered incapable of causing disease and/or infecting and/or replicating in a host or cell thereof.

[0777] In one embodiment, where the pathogenic microorganism inserts its genetic material into the host cell's genome (e.g., a virus), the composition, system, can be designed such that it modifies the host cell's genome such that the viral DNA or cDNA cannot be replicated by the host cell's machinery into a functional virus. In one embodiment, where the pathogenic microorganism inserts its genetic material into the host cell's genome (e.g., a virus), the composition, system, can be designed such that it modifies the host cell's genome such that the viral DNA or cDNA is deleted from the host cell's genome.

[0778] It will be appreciated that inhibiting or killing the pathogenic microorganism, the disease and/or condition that its infection causes in the subject can be treated or prevented. Thus, also provided herein are methods of treating and/or preventing one or more diseases or symptoms thereof caused by any one or more pathogenic microorganisms, such as any of those described herein.

### Mitochondrial Diseases

[0779] Some of the most challenging mitochondrial disorders arise from mutations in mitochondrial DNA (mtDNA), a high copy number genome that is maternally inherited. In one embodiment, mtDNA mutations can be modified using a composition, system, described herein. In one embodiment, the mitochondrial disease that can be diagnosed, prognosed, treated, and/or prevented can be MELAS (mitochondrial myopathy encephalopathy, and lactic acidosis and stroke-like episodes), CPEO/PEO (chronic progressive external ophthalmoplegia syndrome/progressive external ophthalmoplegia), KSS (Kearns-Sayre syndrome), MIDD (maternally inherited diabetes and deafness), MERRF (myoclonic epilepsy associated with ragged red fibers), NIDDM (noninsulin-dependent diabetes mellitus), LHON (Leber hereditary optic neuropathy), LS (Leigh Syndrome) an aminoglycoside induced hearing disorder, NARP (neuropathy, ataxia, and pigmentary retinopathy), Extrapyramidal disorder with akinesia-rigidity, psychosis and SNHL, Nonsyndromic hearing loss a cardiomyopathy, an encephalomyopathy, Pearson's syndrome, or a combination thereof.

[0780] In one embodiment, the mtDNA of a subject can be modified in vivo or ex vivo. In one embodiment, where the mtDNA is modified ex vivo, after modification the cells containing the modified mitochondria can be administered back to the subject. In one embodiment, the composition, system, or component thereof can be capable of correcting an mtDNA mutation, or a combination thereof.

[0781] In one embodiment, at least one of the one or more mtDNA mutations is selected from the group consisting of: A3243G, C3256T, T3271C, G1019A, A1304T, A15533G, C1494T, C4467A, T1658C, G12315A, A3421G, A8344G, T8356C, G8363A, A13042T, T3200C, G3242A, A3252G, T3264C, G3316A, T3394C, T14577C, A4833G, G3460A, G9804A, G11778A, G14459A, A14484G, G15257A, T8993C, T8993G, G10197A, G13513A, T1095C, C1494T, A1555G, G1541A, C1634T, A3260G, A4269G, T7587C, A8296G, A8348G, G8363A, T9957C, T9997C, G12192A, C12297T, A14484G, G15059A, duplication of CCCCCTCCCC-tandem repeats at positions 305-314 and/or 956-965, deletion at positions from 8,469-13,447, 4,308-14,874, and/or 4,398-14,822, 961ins/delC, the mitochondrial common deletion (e.g. mtDNA 4,977 bp deletion), and combinations thereof.

[0782] In one embodiment, the mitochondrial mutation can be any mutation as set forth in or as identified by use of one or more bioinformatic tools available at Mitomap available at mitomap.org. Such tools include, but are not limited to, “Variant Search, aka Market Finder”, Find Sequences for Any Haplogroup, aka “Sequence Finder”, “Variant Info”, “POLG Pathogenicity Prediction Server”, “MITOMASTER”, “Allele Search”, “Sequence and Variant Downloads”, “Data Downloads”. MitoMap contains reports of mutations in mtDNA that can be associated with disease and maintains a database of reported mitochondrial DNA Base Substitution Diseases: rRNA/tRNA mutations.

[0783] In one embodiment, the method includes delivering a composition, system, and/or a component thereof to a cell, and more specifically one or more mitochondria in a cell, allowing the composition, system, and/or component thereof to modify one or more target polynucleotides in the cell, and more specifically one or more mitochondria in the cell. The target polynucleotides can correspond to a mutation in the mtDNA, such as any one or more of those described herein. In one embodiment, the modification can alter a function of the mitochondria such that the mitochondria functions normally or at least is/are less dysfunctional as compared to an unmodified mitochondria. Modification can occur in vivo or ex vivo. Where modification is performed ex vivo, cells containing modified mitochondria can be administered to a subject in need thereof in an autologous or allogenic manner.

### Microbiome Modification

[0784] Microbiomes play important roles in health and disease. For example, the gut microbiome can play a role in health by controlling digestion, preventing growth of pathogenic microorganisms and have been suggested to influence mood and emotion. Imbalanced microbiomes can promote disease and are suggested to contribute to weight gain, unregulated blood sugar, high cholesterol, cancer, and other disorders. A healthy microbiome has a series of joint characteristics that can be distinguished from non-healthy individuals, thus detection and identification of the disease-associated microbiome can be used to diagnose and detect disease in an individual. The compositions, systems, and components thereof can be used to screen the microbiome cell population and be used to identify a disease associated microbiome. Cell screening methods utilizing compositions, systems, and components thereof are described elsewhere herein and can be applied to screening a microbiome, such as a gut, skin, vagina, and/or oral microbiome, of a subject.

[0785] In one embodiment, the microbe population of a microbiome in a subject can be modified using a composition, system, and/or component thereof described herein. In one embodiment, the composition, system, and/or component thereof can be used to identify and select one or more cell types in the microbiome and remove them from the microbiome population. Exemplary methods of selecting cells using a composition, system, and/or component thereof are described elsewhere herein. In this way the make-up or microorganism profile of the microbiome can be altered. In one embodiment, the alteration causes a change from a diseased microbiome composition to a healthy microbiome composition. In this way the ratio of one type or species of microorganism to another can be modified, such as going from a diseased ratio to a healthy ratio. In one embodiment, the cells selected are pathogenic microorganisms.

[0786] In one embodiment, the compositions and systems described herein can be used to modify a polynucleotide in a microorganism of a microbiome in a subject. In one embodiment, the microorganism is a pathogenic microorganism. In one embodiment, the microorganism is a commensal and non-pathogenic microorganism. Methods of modifying polynucleotides in a cell in the subject are described elsewhere herein and can be applied to these embodiments.

### Models of Diseases and Conditions

[0787] In an aspect, the invention provides a method of modeling a disease associated with a genomic locus in a eukaryotic organism or a non-human organism comprising manipulation of a target sequence within a coding, non-coding or regulatory element of said genomic locus comprising delivering a non-naturally occurring or engineered composition comprising a viral vector system comprising one or more viral vectors operably encoding a composition for expression thereof, wherein the composition comprises particle delivery system or the delivery system or the virus particle of any one of the above embodiments or the cell of any one of the above embodiment.

[0788] In one aspect, the invention provides a method of generating a model eukaryotic cell that can include one or more a mutated disease genes and/or infectious microorganisms. In one embodiment, a disease gene is any gene associated an increase in the risk of having or developing a disease. In one embodiment, the method includes (a) introducing one or more vectors into a eukaryotic cell, wherein the one or more vectors comprise a composition, system, and/or component thereof and/or a vector or vector system that is capable of driving expression of a composition, system, and/or component thereof including, but not limited to: a guide sequence, one or more chimeric IscB systems, and combinations thereof and (b) allowing a composition, system, or complex to bind to one or more target polynucleotides, e.g., to effect cleavage, nicking, or other modification of the target polynucleotide within said disease gene, wherein the composition, system, or complex is composed of one or more chimeric IscB systems complexed with (1) one or more ωRNAs or guide sequences that is/are hybridized to the target sequence(s) within the target polynucleotide(s), and optionally (2) the ωRNA scaffold sequence(s), thereby generating a model eukaryotic cell comprising one or more mutated disease gene(s). Thus, in one embodiment the composition and system, contains nucleic acid molecules for and drives expression of one or more of: a chimeric IscB system, a guide sequence and/or a Homologous Recombination template and/or a stabilizing ligand if the chimeric IscB system has a destabilization domain. In one embodiment, said cleavage comprises cleaving one or two strands at the location of the target sequence by the chimeric IscB systems. In one embodiment, nicking comprises nicking one or two strands at the location of the target sequence by the chimeric IscB systems. In one embodiment, said cleavage or nicking results in modified transcription of a target polynucleotide. In one embodiment, modification results in decreased transcription of the target polynucleotide. In one embodiment, the method further comprises repairing said cleaved or nicked target polynucleotide by homologous recombination with a recombination template polynucleotide, wherein said repair results in a mutation comprising an insertion, deletion, or substitution of one or more nucleotides of said target polynucleotide. In one embodiment, said mutation results in one or more amino acid changes in a protein expression from a gene comprising the target sequence.

[0789] The disease modeled can be any disease with a genetic or epigenetic component. In one embodiment, the disease modeled can be any as discussed elsewhere herein.

### In Situ Disease Detection

[0790] The compositions, systems, and/or components thereof can be used for diagnostic methods of detection such as in CASFISH (see e.g., Deng et al. 2015. PNAS USA 112(38): 11870-11875), CRISPR-Live FISH (see e.g., Wang et al. 2020. Science; 365(6459):1301-1305), sm-FISH (Lee and Jefcoate. 2017. Front. Endocrinol. doi.org/10.3389/fendo.2017.00289), sequential FISH CRISPRainbow (Ma et al. Nat Biotechnol, 34 (2016), pp. 528-530), CRISPR-Sirius (Nat Methods, 15 (2018), pp. 928-931), Casilio (Cheng et al. Cell Res, 26 (2016), pp. 254-257), Halo-Tag based genomic loci visualization techniques (e.g., Deng et al. 2015. PNAS USA 112(38): 11870-11875; Knight et al., Science, 350 (2015), pp. 823-826), RNA-aptamer based methods (e.g., Ma et al., J Cell Biol, 214 (2016), pp. 529-537), molecular beacon-based methods (e.g., Zhao et al. Biomaterials, 100 (2016), pp. 172-183; Wu et al. Nucleic Acids Res (2018)), Quantum Dot-based systems (e.g., Ma et al. Anal Chem, 89 (2017), pp. 12896-12901), multiplexed methods (e.g., Ma et al., Proc Natl Acad Sci USA, 112 (2015), pp. 3002-3007; Fu et al. Nat Commun, 7 (2016), p. 11707; Ma et al. Nat Biotechnol, 34 (2016), pp. 528-530; Shao et al. Nucleic Acids Res, 44 (2016), Article e86); Wang et al. Sci Rep, 6 (2016), p. 26857), 9, and other in situ CRISPR-hybridization based methods (e.g., Chen et al. Cell, 155 (2013), pp. 1479-1491; Gu et al. Science, 359 (2018), pp. 1050-1055; Tanebaum et al. Cell, 159 (2014), pp. 635-646; Ye et al. Protein Cell, 8 (2017), pp. 853-855; Chen et al. Nat Commun, 9 (2018), p. 5065; Shao et al. ACS Synth Biol (2017); Fu et al. Nat Commun, 7 (2016), p. 11707; Shao et al. Nucleic Acids Res, 44 (2016), Article e86; Wang et al., Sci Rep, 6 (2016), p. 26857), all of which are incorporated by reference herein as if expressed in their entirety and whose teachings can be adapted to the compositions, systems, and components thereof described herein in view of the description herein.

[0791] In one embodiment, the composition, system, or component thereof can be used in a detection method, such as an in-situ detection method described herein. In one embodiment, the composition, system, or component thereof can include a catalytically inactivate chimeric IscB system described herein and use this system in detection methods such as fluorescence in situ hybridization (FISH) or any other described herein. In one embodiment, the inactivated chimeric IscB system, which lacks the ability to produce DNA double-strand breaks may be fused with a marker, such as fluorescent protein, such as the enhanced green fluorescent protein (eEGFP) and co-expressed with small guide RNAs to target pericentric, centric and telomeric repeats in vivo. The dead chimeric IscB systems or system thereof can be used to visualize both repetitive sequences and individual genes in the human genome. Such new applications of labelled dead chimeric IscB systems and compositions, systems, thereof can be important in imaging cells and studying the functional nuclear architecture, especially in cases with a small nucleus volume or complex 3-D structures.

### Cell Selection

[0792] In one embodiment, the compositions, systems, and/or components thereof described herein can be used in a method to screen and/or select cells. In one embodiment, composition, system-based screening/selection method can be used to identify diseased cells in a cell population. In one embodiment, selection of the cells results in a modification in the cells such that the selected cells die. In this way, diseased cells can be identified, and removed from the healthy cell population. In one embodiment, the diseased cells can be a cancer cell, pre-cancerous cell, a virus or other pathogenic organism infected cells, or otherwise abnormal cell. In one embodiment, the modification can impart another detectable change in the cells to be selected (e.g., a functional change and/or genomic barcode) that facilitates selection of the desired cells. In one embodiment a negative selection scheme can be used to obtain a desired cell population. In these embodiments, the cells to be selected against are modified, thus can be removed from the cell population based on their death or identification or sorting based the detectable change imparted on the cells. Thus, in these embodiments, the remaining cells after selection are the desired cell population.

[0793] In one embodiment, a method of selecting one or more cell(s) containing a polynucleotide modification can include: introducing one or more composition, system(s) and/or components thereof, and/or vectors or vector systems into the cell(s), wherein the composition, system(s), and/or components thereof, and/or vectors or vector systems contains and/or is capable of expressing one or more of: a chimeric IscB system, an ωRNA sequence, and an recombination template; wherein, for example that which is being expressed is within and expressed in vivo by the composition, system, vector or vector system and/or the recombination template comprises the one or more mutations that abolish chimeric IscB systems cleavage; allowing homologous recombination of the recombination template with the target polynucleotide in the cell(s) to be selected; allowing a composition, system, or complex to bind to a target polynucleotide to effect cleavage of the target polynucleotide within said gene, wherein the AAV-complex comprises the chimeric IscB systems complexed with (1) the ωRNA or guide sequence that is hybridized to the target sequence within the target polynucleotide, and (2) the ωRNA scaffold, wherein binding of the complex to the target polynucleotide induces cell death or imparts some other detectable change to the cell, thereby allowing one or more cell(s) in which one or more mutations have been introduced to be selected. In one embodiment, the cell to be selected may be a eukaryotic cell. In one embodiment, the cell to be selected may be a prokaryotic cell. Selection of specific cells via the methods herein can be performed without requiring a selection marker or a two-step process that may include a counter-selection system.

### Therapeutic Agent Development

[0794] The compositions, systems, and components thereof described herein can be used to develop chimeric IscB based therapeutics. Thus, described herein are methods for developing a biologically active agent that modulates a cell function and/or signaling event associated with a disease and/or disease gene. In one embodiment, the method comprises (a) contacting a test compound with a diseased cell and/or a cell containing a disease gene cell; and (b) detecting a change in a readout that is indicative of a reduction or an augmentation of a cell signaling event or other cell functionality associated with said disease or disease gene, thereby developing said biologically active agent that modulates said cell signaling event or other functionality associated with said disease gene. In one embodiment, the diseased cell is a model cell described elsewhere herein. In one embodiment, the diseased cell is a diseased cell isolated from a subject in need of treatment. In one embodiment, the test compound is a small molecule agent. In one embodiment, test compound is a small molecule agent. In one embodiment, the test compound is a biologic molecule agent.

[0795] In one embodiment, the method involves developing a therapeutic based on the composition, system, described herein. In one embodiment, the therapeutic comprises a chimeric IscB system and/or a ωRNA with a reprogrammable spacer capable of hybridizing to a target sequence of interest. In one embodiment, the therapeutic is a vector or vector system that can contain a) a first regulatory element operably linked to a nucleotide sequence encoding the chimeric IscB systems; and b) a second regulatory element operably linked to one or more nucleotide sequences encoding one or more nucleic acid molecules comprising a ωRNA comprising a reprogrammable spacer sequence, a conserved RNA sequence; wherein components (a) and (b) are located on same or different vectors. In one embodiment, the biologically active agent is a composition comprising a delivery system operably configured to deliver composition, system, or components thereof, and/or or one or more polynucleotide sequences, vectors, or vector systems containing or encoding said components into a cell and capable of forming a complex with the components of the composition and system herein, and wherein said complex is operable in the cell. In one embodiment, the complex can include the chimeric IscB systems as described herein, ωRNA scaffold comprising the guide sequence (reprogrammable spacer sequence), and a conserved nucleotide sequence. In any such compositions, the delivery system can be a yeast system, a lipofection system, a microinjection system, a biolistic system, virosomes, liposomes, immunoliposomes, polycations, lipid:nucleic acid conjugates or artificial virions, or any other system as described herein. In one embodiment, the delivery is via a particle, a nanoparticle, a lipid or a cell penetrating peptide (CPP).

[0796] Also described herein are methods for developing or designing a composition, system, optionally a composition, system, based therapy or therapeutic, comprising (a) selecting for a (therapeutic) locus of interest ωRNA target sites, wherein said target sites have minimal sequence variation across a population, and from said selected target sites sub-selecting target sites, wherein a ωRNA directed against said target sites recognizes a minimal number of off-target sites across said population, or (b) selecting for a (therapeutic) locus of interest ωRNA target sites, wherein said target sites have minimal sequence variation across a population, or selecting for a (therapeutic) locus of interest ωRNA target sites, wherein a ωRNA directed against said target sites recognizes a minimal number of off-target sites across said population, and optionally estimating the number of (sub)selected target sites needed to treat or otherwise modulate or manipulate a population, and optionally validating one or more of the (sub)selected target sites for an individual subject, optionally designing one or more ωRNA recognizing one or more of said (sub)selected target sites.

[0797] In one embodiment, the method for developing or designing a ωRNA for use in a composition, system, optionally a composition, system, based therapy or therapeutic, can include (a) selecting for a (therapeutic) locus of interest ωRNA target sites, wherein said target sites have minimal sequence variation across a population, and from said selected target sites sub-selecting target sites, wherein a gRNA directed against said target sites recognizes a minimal number of off-target sites across said population, or (b) selecting for a (therapeutic) locus of interest gRNA target sites, wherein said target sites have minimal sequence variation across a population, or selecting for a (therapeutic) locus of interest gRNA target sites, wherein a gRNA directed against said target sites recognizes a minimal number of off-target sites across said population, and optionally estimating the number of (sub)selected target sites needed to treat or otherwise modulate or manipulate a population, optionally validating one or more of the (sub)selected target sites for an individual subject, optionally designing one or more gRNA recognizing one or more of said (sub)selected target sites.

[0798] In one embodiment, the method for developing or designing a composition, system, optionally a composition, system, based therapy or therapeutic in a population, can include (a) selecting for a (therapeutic) locus of interest reprogrammable spacer target sites, wherein said target sites have minimal sequence variation across a population, and from said selected target sites sub-selecting target sites, wherein a ωRNA directed against said target sites recognizes a minimal number of off-target sites across said population, or (b) selecting for a (therapeutic) locus of interest ωRNA reprogrammable spacer target sites, wherein said target sites have minimal sequence variation across a population, or selecting for a (therapeutic) locus of interest ωRNA reprogrammable spacer target sites, wherein a ωRNA directed against said target sites recognizes a minimal number of off-target sites across said population, and optionally estimating the number of (sub)selected target sites needed to treat or otherwise modulate or manipulate a population, optionally validating one or more of the (sub)selected target sites for an individual subject, optionally designing one or more ωRNA recognizing one or more of said (sub)selected target sites.

[0799] In one embodiment the method for developing or designing a gRNA for use in a composition, system, optionally a composition, system, based therapy or therapeutic in a population, can include (a) selecting for a (therapeutic) locus of interest gRNA target sites, wherein said target sites have minimal sequence variation across a population, and from said selected target sites sub-selecting target sites, wherein a gRNA directed against said target sites recognizes a minimal number of off-target sites across said population, or (b) selecting for a (therapeutic) locus of interest gRNA target sites, wherein said target sites have minimal sequence variation across a population, or selecting for a (therapeutic) locus of interest gRNA target sites, wherein a gRNA directed against said target sites recognizes a minimal number of off-target sites across said population, and optionally estimating the number of (sub)selected target sites needed to treat or otherwise modulate or manipulate a population, optionally validating one or more of the (sub)selected target sites for an individual subject, optionally designing one or more ωRNA reprogrammable spacer recognizing one or more of said (sub)selected target sites.

[0800] In one embodiment, the method for developing or designing a composition, system, such as a composition, system, based therapy or therapeutic, optionally in a population; or for developing or designing a ωRNA reprogrammable spacer for use in a composition, system, optionally a composition, system, based therapy or therapeutic, optionally in a population, can include selecting a set of target sequences for one or more loci in a target population, wherein the target sequences do not contain variants occurring above a threshold allele frequency in the target population (i.e., platinum target sequences); removing from said selected (platinum) target sequences any target sequences having high frequency off-target candidates (relative to other (platinum) targets in the set) to define a final target sequence set; preparing one or more, such as a set of compositions, systems, based on the final target sequence set, optionally wherein a number of composition prepared is based (at least in part) on the size of a target population.

[0801] In an embodiment, off-target candidates/off-targets, TAM restrictiveness, target cleavage efficiency, or effector protein specificity is identified or determined using a sequencing-based double-strand break (DSB) detection assay, such as described herein elsewhere. In an embodiment, off-target candidates/off-targets are identified or determined using a sequencing-based double-strand break (DSB) detection assay, such as described herein elsewhere. In an embodiment, off-targets, or off target candidates have at least 1, preferably 1-3, mismatches or (distal) TAM mismatches, such as 1 or more, such as 1, 2, 3, or more (distal) TAM mismatches. In an embodiment, sequencing-based DSB detection assay comprises labeling a site of a DSB with an adapter comprising a primer binding site, labeling a site of a DSB with a barcode or unique molecular identifier, or combination thereof, as described herein elsewhere.

[0802] It will be understood that the reprogrammable spacer sequence of the ωRNA is 100% complementary to the target site, i.e., does not comprise any mismatch with the target site. It will be further understood that “recognition” of an (off-)target site by a reprogrammable spacer presupposes composition, system, functionality, i.e., an (off-)target site is only recognized by a reprogrammable spacer RNA if binding of the reprogrammable spacer RNA to the (off-)target site leads to composition, system, activity (such as induction of single or double strand DNA cleavage, transcriptional modulation, etc.).

[0803] In an embodiment, the target sites having minimal sequence variation across a population are characterized by absence of sequence variation in at least 99%, preferably at least 99.9%, more preferably at least 99.99% of the population. In an embodiment, optimizing target location comprises selecting target sequences or loci having an absence of sequence variation in at least 99%, %, preferably at least 99.9%, more preferably at least 99.99% of a population. These targets are referred to herein elsewhere also as “platinum targets”. In an embodiment, said population comprises at least 1000 individuals, such as at least 5000 individuals, such as at least 10000 individuals, such as at least 50000 individuals.

[0804] In an embodiment, the off-target sites are characterized by at least one mismatch between the off-target site and the ωRNA. In an embodiment, the off-target sites are characterized by at most five, preferably at most four, more preferably at most three mismatches between the off-target site and the ωRNA. In an embodiment, the off-target sites are characterized by at least one mismatch between the off-target site and the ωRNA and by at most five, preferably at most four, more preferably at most three mismatches between the off-target site and the ωRNA.

[0805] In an embodiment, said minimal number of off-target sites across said population is determined for high-frequency haplotypes in said population. In an embodiment, said minimal number of off-target sites across said population is determined for high-frequency haplotypes of the off-target site locus in said population. In an embodiment, said minimal number of off-target sites across said population is determined for high-frequency haplotypes of the target site locus in said population. In an embodiment, the high-frequency haplotypes are characterized by occurrence in at least 0.1% of the population.

[0806] In an embodiment, the number of (sub)selected target sites needed to treat a population is estimated based on based low frequency sequence variation, such as low frequency sequence variation captured in large scale sequencing datasets. In an embodiment, the number of (sub)selected target sites needed to treat a population of a given size is estimated.

[0807] In an embodiment, the method further comprises obtaining genome sequencing data of a subject to be treated; and treating the subject with a composition, system, selected from the set of compositions, systems, wherein the composition, system, selected is based (at least in part) on the genome sequencing data of the individual. In an embodiment, the ((sub)selected) target is validated by genome sequencing, preferably whole genome sequencing.

[0808] In an embodiment, target sequences or loci as described herein are (further) selected based on optimization of one or more parameters, such as TAM type (natural or modified), TAM nucleotide content, TAM length, target sequence length, TAM restrictiveness, target cleavage efficiency, and target sequence position within a gene, a locus or other genomic region. Methods of optimization are discussed in greater detail elsewhere herein.

[0809] In an embodiment, target sequences or loci as described herein are (further) selected based on optimization of one or more of target loci location, target length, target specificity, and TAM characteristics. As used herein, TAM characteristics may comprise for instance TAM sequence, TAM length, and/or TAM GC contents. In an embodiment, optimizing TAM characteristics comprises optimizing nucleotide content of a TAM. In an embodiment, optimizing nucleotide content of TAM is selecting a TAM with a motif that maximizes abundance in the one or more target loci, minimizes mutation frequency, or both. Minimizing mutation frequency can for instance be achieved by selecting TAM sequences devoid of or having low or minimal CpG.

[0810] In an embodiment, the effector protein for each composition and system, in the set of compositions, systems, is selected based on optimization of one or more parameters selected from the group consisting of; effector protein size, ability of effector protein to access regions of high chromatin accessibility, degree of uniform enzyme activity across genomic targets, epigenetic tolerance, mismatch/budge tolerance, effector protein specificity, effector protein stability or half-life, effector protein immunogenicity or toxicity. Methods of optimization are discussed in greater detail elsewhere herein.

### Optimization of the Systems

[0811] The methods of the present invention can involve optimization of selected parameters or variables associated with the composition, system, and/or its functionality, as described herein further elsewhere. Optimization of the composition, system, in the methods as described herein may depend on the target(s), such as the therapeutic target or therapeutic targets, the mode or type of composition, system, modulation, such as composition, system, based therapeutic target(s) modulation, modification, or manipulation, as well as the delivery of the composition, system, components. One or more targets may be selected, depending on the genotypic and/or phenotypic outcome. For instance, one or more therapeutic targets may be selected, depending on (genetic) disease etiology or the desired therapeutic outcome. The (therapeutic) target(s) may be a single gene, locus, or other genomic site, or may be multiple genes, loci or other genomic sites. As is known in the art, a single gene, locus, or other genomic site may be targeted more than once, such as by use of multiple ωRNAs, or ωRNA scaffold and multiple reprogrammable spacers.

[0812] The activity of the composition and/or system, such as chimeric IscB system-based therapy or therapeutics may involve target disruption, such as target mutation, such as leading to gene knockout. The activity of the composition and/or system, such as chimeric IscB system-based therapy or therapeutics may involve replacement of particular target sites, such as leading to target correction. chimeric IscB system-based therapy or therapeutics may involve removal of particular target sites, such as leading to target deletion. The activity of the composition and/or system, such as chimeric IscB system-based therapy or therapeutics may involve modulation of target site functionality, such as target site activity or accessibility, leading for instance to (transcriptional and/or epigenetic) gene or genomic region activation or gene or genomic region silencing. The skilled person will understand that modulation of target site functionality may involve chimeric IscB system mutation (such as for instance generation of a catalytically inactive chimeric IscB system) and/or functionalization (such as for instance fusion of the chimeric IscB systems with a heterologous functional domain, such as a transcriptional activator or repressor), as described herein elsewhere.

[0813] Accordingly, in an aspect, the invention relates to a method as described herein, comprising selection of one or more (therapeutic) target, selecting one or more functionality of the composition and/or system, and optimization of selected parameters or variables associated with the composition and/or its functionality. In a related aspect, the invention relates to a method as described herein, comprising (a) selecting one or more (therapeutic) target loci, (b) selecting one or more composition functionalities, (c) optionally selecting one or more modes of delivery, and preparing, developing, or designing a composition herein selected based on steps (a)-(c).

[0814] In an embodiment, the functionality of the composition and/or system comprises genomic mutation. In an embodiment, the functionality of the composition and/or system comprises single genomic mutation. In an embodiment, the functionality of the composition and/or system functionality comprises multiple genomic mutation. In an embodiment, the functionality of the composition and/or system comprises gene knockout. In an embodiment, the functionality of the composition and/or system comprises single gene knockout. In an embodiment, the functionality of the composition and/or system comprises multiple gene knockout. In an embodiment, the functionality of the composition and/or system comprises gene correction. In an embodiment, the functionality of the composition and/or system comprises single gene correction. In an embodiment, the functionality of the composition and/or system comprises multiple gene correction. In an embodiment, the functionality of the composition and/or system comprises genomic region correction. In an embodiment, the functionality of the composition and/or system comprises single genomic region correction. In an embodiment, the functionality of the composition and/or system comprises multiple genomic region correction. In an embodiment, the functionality of the composition and/or system comprises gene deletion. In an embodiment, the functionality of the composition and/or system comprises single gene deletion. In an embodiment, the functionality of the composition and/or system comprises multiple gene deletion. In an embodiment, the functionality of the composition and/or system comprises genomic region deletion. In an embodiment, the functionality of the composition and/or system comprises single genomic region deletion. In an embodiment, the functionality of the composition and/or system comprises multiple genomic region deletion. In an embodiment, the functionality of the composition and/or system comprises modulation of gene or genomic region functionality. In an embodiment, the functionality of the composition and/or system comprises modulation of single gene or genomic region functionality. In an embodiment, the functionality of the composition and/or system comprises modulation of multiple gene or genomic region functionality. In an embodiment, the functionality of the composition and/or system comprises gene or genomic region functionality, such as gene or genomic region activity. In an embodiment, the functionality of the composition and/or system comprises single gene or genomic region functionality, such as gene or genomic region activity. In an embodiment, the functionality of the composition and/or system comprises multiple gene or genomic region functionality, such as gene or genomic region activity. In an embodiment, the functionality of the composition and/or system comprises modulation gene activity or accessibility optionally leading to transcriptional and/or epigenetic gene or genomic region activation or gene or genomic region silencing. In an embodiment, the functionality of the composition and/or system comprises modulation single gene activity or accessibility optionally leading to transcriptional and/or epigenetic gene or genomic region activation or gene or genomic region silencing. In an embodiment, the functionality of the composition and/or system comprises modulation multiple gene activity or accessibility optionally leading to transcriptional and/or epigenetic gene or genomic region activation or gene or genomic region silencing.

[0815] Optimization of selected parameters or variables in the methods as described herein may result in optimized or improved the system, such as chimeric IscB system-based therapy or therapeutic, specificity, efficacy, and/or safety. In an embodiment, one or more of the following parameters or variables are taken into account, are selected, or are optimized in the methods of the invention as described herein: chimeric IscB system allosteric interactions, chimeric IscB system functional domains and functional domain interactions, chimeric IscB system specificity, ωRNA specificity, composition specificity, TAM restrictiveness, TAM type (natural or modified), TAM nucleotide content, TAM length, chimeric IscB system activity, ωRNA activity, chimeric IscB system/guide complex activity, target cleavage efficiency, target site selection, target sequence length, ability of effector protein to access regions of high chromatin accessibility, degree of uniform enzyme activity across genomic targets, epigenetic tolerance, mismatch/budge tolerance, chimeric IscB system stability, IscB polypeptide or chimeric IscB system mRNA stability, gRNA stability, chimeric IscB system complex stability, chimeric IscB system or mRNA immunogenicity or toxicity, gRNA immunogenicity or toxicity, chimeric IscB system immunogenicity or toxicity, chimeric IscB system or mRNA dose or titer, gRNA dose or titer, dose or titer, chimeric IscB system protein size, chimeric IscB system expression level, gRNA expression level, chimeric IscB system expression level, chimeric IscB system spatiotemporal expression, gRNA spatiotemporal expression, chimeric IscB system/ωRNA spatiotemporal expression.

[0816] By means of example, and without limitation, parameter or variable optimization may be achieved as follows. chimeric IscB system specificity may be optimized by selecting the most specific chimeric IscB system, e.g. IscB polypeptide or chimeric IscB systems. This may be achieved for instance by selecting the most specific chimeric IscB system orthologue or by specific chimeric IscB system mutations which increase specificity. ωRNA specificity may be optimized by selecting the most specific ωRNA. This can be achieved for instance by selecting ωRNA having low homology, i.e. at least one or preferably more, such as at least 2, or preferably at least 3, mismatches to off-target sites. The specificity may be optimized by increasing chimeric IscB system specificity and/or ωRNA specificity as above. TAM restrictiveness may be optimized by selecting a chimeric IscB system having to most restrictive TAM recognition. This can be achieved for instance by selecting a chimeric IscB system ortholog having more restrictive TAM recognition or by specific chimeric IscB system mutations which increase or alter TAM restrictiveness. TAM type may be optimized for instance by selecting the appropriate chimeric IscB systems, such as the appropriate chimeric IscB systems recognizing a desired TAM type. The chimeric IscB systems or TAM type may be naturally occurring or may for instance be optimized based on chimeric IscB system mutants having an altered TAM recognition, or TAM recognition repertoire. TAM nucleotide content may for instance be optimized by selecting the appropriate chimeric IscB systems, such as the appropriate chimeric IscB system recognizing a desired TAM nucleotide content. The chimeric IscB systems or TAM type may be naturally occurring or may for instance be optimized based on chimeric IscB system mutants having an altered TAM recognition, or TAM recognition repertoire. TAM length may for instance be optimized by selecting the appropriate chimeric IscB system, such as the appropriate chimeric IscB systems recognizing a desired TAM nucleotide length. The chimeric IscB systems or TAM type may be naturally occurring or may for instance be optimized based on chimeric IscB system mutants having an altered TAM recognition, or TAM recognition repertoire.

[0817] Target length or target sequence length may be optimized, for instance, by selecting the appropriate chimeric IscB systems, such as the appropriate chimeric IscB system recognizing a desired target or target sequence nucleotide length. Alternatively, or in addition, the target (sequence) length may be optimized by providing a target having a length deviating from the target (sequence) length typically associated with the chimeric IscB system, such as the naturally occurring chimeric IscB systems. The chimeric IscB system or target (sequence) length may be naturally occurring or may for instance be optimized based on chimeric IscB system mutants having an altered target (sequence) length recognition, or target (sequence) length recognition repertoire. For instance, increasing or decreasing target (sequence) length may influence target recognition and/or off-target recognition. chimeric IscB system activity may be optimized by selecting the most active chimeric IscB systems. This may be achieved for instance by selecting the most active chimeric IscB system ortholog or by specific chimeric IscB system mutations which increase activity. The ability of the chimeric IscB systems to access regions of high chromatin accessibility, may be optimized by selecting the appropriate chimeric IscB systems or mutant thereof, and can consider the size of the chimeric IscB systems, charge, or other dimensional variables etc. The degree of uniform chimeric IscB system activity may be optimized by selecting the appropriate chimeric IscB system or mutant thereof, and can consider chimeric IscB system specificity and/or activity, TAM specificity, target length, mismatch tolerance, epigenetic tolerance, chimeric IscB system and/or ωRNA stability and/or half-life, chimeric IscB system and/or ωRNA immunogenicity and/or toxicity, etc. ωRNA activity may be optimized by selecting the most active ωRNA. In one embodiment, this can be achieved by increasing ωRNA stability through RNA modification. compositions activity may be optimized by increasing chimeric IscB system activity and/or ωRNA activity as above.

[0818] The target site selection may be optimized by selecting the optimal position of the target site within a gene, locus or other genomic region. The target site selection may be optimized by optimizing target location comprises selecting a target sequence with a gene, locus, or other genomic region having low variability. This may be achieved for instance by selecting a target site in an early and/or conserved exon or domain (i.e., having low variability, such as polymorphisms, within a population).

[0819] In an embodiment, optimizing target (sequence) length comprises selecting a target sequence within one or more target loci between 5 and 25 nucleotides. In an embodiment, a target sequence is 20 nucleotides.

[0820] In an embodiment, optimizing target specificity comprises selecting targets loci that minimize off-target candidates.

[0821] In one embodiment, the target site may be selected by minimization of off-target effects (e.g., off-targets qualified as having 1-5, 1-4, or preferably 1-3 mismatches compared to target and/or having one or more TAM mismatches, such as distal TAM mismatches), preferably also considering variability within a population. Chimeric IscB system stability may be optimized by selecting chimeric IscB system having appropriate half-life, such as preferably a short half-life while still capable of maintaining sufficient activity. In one embodiment, this can be achieved by selecting an appropriate chimeric IscB system orthologue having a specific half-life or by specific chimeric IscB system mutations or modifications which affect half-life or stability, such as inclusion (e.g., fusion) of stabilizing or destabilizing domains or sequences. chimeric IscB system mRNA stability may be optimized by increasing or decreasing chimeric IscB system mRNA stability. In one embodiment, this can be achieved by increasing or chimeric IscB system mRNA stability through mRNA modification. ωRNA stability may be optimized by increasing or decreasing ωRNA stability. In one embodiment, this can be achieved by increasing or decreasing ωRNA stability through RNA modification. The stability may be optimized by increasing or decreasing chimeric IscB system stability and/or gRNA stability as above. Chimeric IscB system protein or mRNA immunogenicity or toxicity may be optimized by decreasing chimeric IscB system or mRNA immunogenicity or toxicity. In one embodiment, this can be achieved by mRNA or protein modifications. Similarly, in case of DNA based expression systems, DNA immunogenicity or toxicity may be decreased. ωRNA immunogenicity or toxicity may be optimized by decreasing ωRNA immunogenicity or toxicity. In one embodiment, this can be achieved by ωRNA modifications. Similarly, in case of DNA based expression systems, DNA immunogenicity or toxicity may be decreased. The immunogenicity or toxicity may be optimized by decreasing chimeric IscB system immunogenicity or toxicity and/or ωRNA immunogenicity or toxicity as above, or by selecting the least immunogenic or toxic chimeric IscB system/ωRNA combination. Similarly, in case of DNA based expression systems, DNA immunogenicity or toxicity may be decreased. chimeric IscB system or mRNA dose or titer may be optimized by selecting dosage or titer to minimize toxicity and/or maximize specificity and/or efficacy. ωRNA dose or titer may be optimized by selecting dosage or titer to minimize toxicity and/or maximize specificity and/or efficacy. The composition dose or titer may be optimized by selecting dosage or titer to minimize toxicity and/or maximize specificity and/or efficacy. The chimeric IscB system size may be optimized by selecting minimal protein size to increase efficiency of delivery, in particular for virus mediated delivery. chimeric IscB systems, ωRNA, or complex thereof expression level may be optimized by limiting (or extending) the duration of expression and/or limiting (or increasing) expression level. This may be achieved for instance by using self-inactivating compositions, systems, such as including a self-targeting (e.g., chimeric IscB system targeting) gRNA, by using viral vectors having limited expression duration, by using appropriate promoters for low (or high) expression levels, by combining different delivery methods for individual chimeric IscB system components, such as virus mediated delivery of chimeric IscB systems encoding nucleic acid combined with non-virus mediated delivery of ωRNA, or virus mediated delivery of ωRNA combined with non-virus mediated delivery of chimeric IscB systems or mRNA. IscB polypeptide nuclease, ωRNA, or chimeric IscB system complex spatiotemporal expression may be optimized by appropriate choice of conditional and/or inducible expression systems, including controllable chimeric IscB system activity optionally a destabilized chimeric IscB system and/or a split chimeric IscB system, and/or cell- or tissue-specific expression systems.

[0822] In an aspect, the invention relates to a method as described herein, comprising selection of one or more (therapeutic) target, selecting the functionality of the composition and/or system, selecting composition mode of delivery, selecting composition delivery vehicle or expression system, and optimization of selected parameters or variables associated with the composition and/or its functionality, optionally wherein the parameters or variables are one or more selected from chimeric IscB system specificity, ωRNA specificity, chimeric IscB system complex specificity, TAM restrictiveness, TAM type (natural or modified), TAM nucleotide content, TAM length, chimeric IscB system activity, gRNA activity, chimeric IscB system/ωRNA complex activity, target cleavage efficiency, target site selection, target sequence length, ability of effector protein to access regions of high chromatin accessibility, degree of uniform enzyme activity across genomic targets, epigenetic tolerance, mismatch/budge tolerance, chimeric IscB system stability, chimeric IscB system mRNA stability, ωRNA stability, IscB polypeptide or chimeric IscB system stability, chimeric IscB system or mRNA immunogenicity or toxicity, ωRNA immunogenicity or toxicity, chimeric IscB system/ωRNA complex immunogenicity or toxicity, chimeric IscB system or mRNA dose or titer, ωRNA dose or titer, chimeric IscB system dose or titer, chimeric IscB system size, chimeric IscB system expression level, ωRNA expression level, chimeric IscB system/ωRNA molecule complex expression level, chimeric IscB system spatiotemporal expression, ωRNA spatiotemporal expression, chimeric IscB system/ωRNA complex spatiotemporal expression.

[0823] It will be understood that the parameters or variables to be optimized as well as the nature of optimization may depend on the (therapeutic) target, the functionality of the composition and/or system, the system mode of delivery, and/or the composition delivery vehicle or expression system.

[0824] In an aspect, the invention relates to a method as described herein, comprising optimization of ωRNA specificity at the population level. Preferably, said optimization of ωRNA specificity comprises minimizing ωRNA target site sequence variation across a population and/or minimizing ωRNA off-target incidence across a population.

[0825] In one embodiment, optimization can result in selection of a chimeric IscB system that is naturally occurring or is modified. In one embodiment, optimization can result in selection of a chimeric IscB system that has nuclease, nickase, deaminase, transposase, and/or has one or more effector functionalities deactivated or eliminated. In one embodiment, optimizing a TAM specificity can include selecting a chimeric IscB system with a modified TAM specificity. In one embodiment, optimizing can include selecting a chimeric IscB system having a minimal size. In an embodiment, optimizing effector protein stability comprises selecting an effector protein having a short half-life while maintaining sufficient activity, such as by selecting an appropriate chimeric IscB system orthologue having a specific half-life or stability. In an embodiment, optimizing immunogenicity or toxicity comprises minimizing effector protein immunogenicity or toxicity by protein modifications. In an embodiment, optimizing functional specific comprises selecting a protein effector with reduced tolerance of mismatches and/or bulges between the guide RNA and one or more target loci.

[0826] In an embodiment, optimizing efficacy comprises optimizing overall efficiency, epigenetic tolerance, or both. In an embodiment, maximizing overall efficiency comprises selecting an effector protein with uniform enzyme activity across target loci with varying chromatin complexity, selecting an effector protein with enzyme activity limited to areas of open chromatin accessibility. In an embodiment, chromatin accessibility is measured using one or more of ATAC-seq, or a DNA-proximity ligation assay. In an embodiment, optimizing epigenetic tolerance comprises optimizing methylation tolerance, epigenetic mark competition, or both. In an embodiment, optimizing methylation tolerance comprises selecting an effector protein that modify methylated DNA. In an embodiment, optimizing epigenetic tolerance comprises selecting an effector protein unable to modify silenced regions of a chromosome, selecting an effector protein able to modify silenced regions of a chromosome, or selecting target loci not enriched for epigenetic markers.

[0827] In an embodiment, selecting an optimized guide RNA comprises optimizing gRNA stability, gRNA immunogenicity, or both, or other gRNA associated parameters or variables as described herein elsewhere.

[0828] In an embodiment, optimizing gRNA stability and/or gRNA immunogenicity comprises RNA modification, or other gRNA associated parameters or variables as described herein elsewhere. In an embodiment, the modification comprises removing 1-3 nucleotides form the 3′ end of a target complementarity region of the gRNA. In an embodiment, modification comprises an extended gRNA and/or trans RNA/DNA element that create stable structures in the gRNA that compete with gRNA base pairing at a target of off-target loci, or extended complimentary nucleotides between the gRNA and target sequence, or both.

[0829] In an embodiment, the mode of delivery comprises delivering gRNA and/or chimeric IscB systems, delivering gRNA and/or chimeric IscB system mRNA, or delivery gRNA and/or chimeric IscB system as a DNA based expression system. In an embodiment, the mode of delivery further comprises selecting a delivery vehicle and/or expression systems from the group consisting of liposomes, lipid particles, nanoparticles, biolistics, or viral-based expression/delivery systems. In an embodiment, expression is spatiotemporal expression is optimized by choice of conditional and/or inducible expression systems, including controllable chimeric IscB system activity optionally a destabilized chimeric IscB system and/or a split chimeric IscB system, and/or cell- or tissue-specific expression system.

[0830] The methods as described herein may further involve selection of the mode of delivery. In an embodiment, ωRNA and/or chimeric IscB systems are or are to be delivered. In an embodiment, ωRNA and/or chimeric IscB system mRNA are or are to be delivered. In an embodiment, ωRNA and/or chimeric IscB systems provided in a DNA-based expression system are or are to be delivered. In an embodiment, delivery of the individual system components comprises a combination of the above modes of delivery. In an embodiment, delivery comprises delivering ωRNA and/or chimeric IscB systems, delivering ωRNA and/or chimeric IscB system mRNA, or delivering ωRNA and/or chimeric IscB systems as a DNA based expression system.

[0831] The methods as described herein may further involve selection of the composition delivery vehicle and/or expression system. Delivery vehicles and expression systems are described herein elsewhere. By means of example, delivery vehicles of nucleic acids and/or proteins include nanoparticles, liposomes, etc. Delivery vehicles for DNA, such as DNA-based expression systems include for instance biolistics, viral based vector systems (e.g. adenoviral, AAV, lentiviral), etc. the skilled person will understand that selection of the mode of delivery, as well as delivery vehicle or expression system may depend on for instance the cell or tissues to be targeted. In an embodiment, the delivery vehicle and/or expression system for delivering the compositions, systems, or components thereof comprises liposomes, lipid particles, nanoparticles, biolistics, or viral-based expression/delivery systems.

### Considerations for Therapeutic Applications

[0832] A consideration in genome editing therapy is the choice of sequence-specific nuclease, such as a variant of a chimeric IscB system. Each nuclease variant may possess its own unique set of strengths and weaknesses, many of which must be balanced in the context of treatment to maximize therapeutic benefit. For a specific editing therapy to be efficacious, a sufficiently high level of modification must be achieved in target cell populations to reverse disease symptoms. This therapeutic modification ‘threshold’ is determined by the fitness of edited cells following treatment and the amount of gene product necessary to reverse symptoms. With regard to fitness, editing creates three potential outcomes for treated cells relative to their unedited counterparts: increased, neutral, or decreased fitness. In the case of increased fitness, corrected cells may be able and expand relative to their diseased counterparts to mediate therapy. In this case, where edited cells possess a selective advantage, even low numbers of edited cells can be amplified through expansion, providing a therapeutic benefit to the patient. Where the edited cells possess no change in fitness, an increase the therapeutic modification threshold can be warranted. As such, significantly greater levels of editing may be needed to treat diseases, where editing creates a neutral fitness advantage, relative to diseases where editing creates increased fitness for target cells. If editing imposes a fitness disadvantage, as would be the case for restoring function to a tumor suppressor gene in cancer cells, modified cells would be outcompeted by their diseased counterparts, causing the benefit of treatment to be low relative to editing rates. This may be overcome with supplemental therapies to increase the potency and/or fitness of the edited cells relative to the diseased counterparts.

[0833] In addition to cell fitness, the amount of gene product necessary to treat disease can also influence the minimal level of therapeutic genome editing that can treat or prevent a disease or a symptom thereof. In cases where a small change in the gene product levels can result in significant changes in clinical outcome, the minimal level of therapeutic genome editing is less relative to cases where a larger change in the gene product levels is needed to gain a clinically relevant response. In one embodiment, the minimal level of therapeutic genome editing can range from 0.1 to 1%, 1-5%, 5-10%, 10-15%, 15-20%, 20-25%, 25-30%, 30-35%, 35-40%, 40-45%. 45-50%, or 50-55%. Thus, where a small change in gene product levels can influence clinical outcomes and diseases where there is a fitness advantage for edited cells, are ideal targets for genome editing therapy, as the therapeutic modification threshold is low enough to permit a high chance of success.

[0834] The activity of NHEJ and HDR DSB repair can vary by cell type and cell state. NHEJ is not highly regulated by the cell cycle and is efficient across cell types, allowing for high levels of gene disruption in accessible target cell populations. In contrast, HDR acts primarily during S/G2 phase, and is therefore restricted to cells that are actively dividing, limiting treatments that require precise genome modifications to mitotic cells [Ciccia, A. & Elledge, S. J. Molecular cell 40, 179-204 (2010); Chapman, J. R., et al. Molecular cell 47, 497-510 (2012)].

[0835] The efficiency of correction via HDR may be controlled by the epigenetic state or sequence of the targeted locus, or the specific repair template configuration (single vs. double stranded, long vs. short homology arms) used [Hacein-Bey-Abina, S., et al. The New England journal of medicine 346, 1185-1193 (2002); Gaspar, H. B., et al. Lancet 364, 2181-2187 (2004); Beumer, K. J., et al. G3 (2013)]. The relative activity of NHEJ and HDR machineries in target cells may also affect gene correction efficiency, as these pathways may compete to resolve DSBs [Beumer, K. J., et al. Proceedings of the National Academy of Sciences of the United States of America 105, 19821-19826 (2008)]. HDR also imposes a delivery challenge not seen with NHEJ strategies, as it uses the concurrent delivery of nucleases and repair templates. Thus, these differences can be kept in mind when designing, optimizing, and/or selecting a chimeric IscB system based therapeutic as described in greater detail elsewhere herein.

[0836] chimeric IscB system-based polynucleotide modification application can include combinations of proteins, small RNA molecules, and/or repair templates, and can make, In one embodiment, delivery of these multiple parts substantially more challenging than, for example, traditional small molecule therapeutics. Two main strategies for delivery of compositions, systems, and components thereof have been developed: ex vivo and in vivo. In one embodiment of ex vivo treatments, diseased cells are removed from a subject, edited and then transplanted back into the patient. In other embodiments, cells from a healthy allogeneic donor are collected, modified using a composition or component thereof, to impart various functionalities and/or reduce immunogenicity, and administered to an allogeneic recipient in need of treatment. Ex vivo editing has the advantage of allowing the target cell population to be well defined and the specific dosage of therapeutic molecules delivered to cells to be specified. The latter consideration may be particularly important when off-target modifications are a concern, as titrating the amount of nuclease may decrease such mutations (Hsu et al., 2013). Another advantage of ex vivo approaches is the typically high editing rates that can be achieved, due to the development of efficient delivery systems for proteins and nucleic acids into cells in culture for research and gene therapy applications.

[0837] In vivo polynucleotide modification via compositions, systems, and/or components thereof involves direct delivery of the compositions, systems, and/or components thereof to cell types in their native tissues. In vivo polynucleotide modification via compositions, systems, and/or components thereof allows diseases in which the affected cell population is not amenable to ex vivo manipulation to be treated. Furthermore, delivering compositions, systems, and/or components thereof to cells in situ allows for the treatment of multiple tissue and cell types.

[0838] In one embodiment, such as those where viral vector systems are used to generate viral particles to deliver the composition and/or component thereof to a cell, the total cargo size of the composition and/or component thereof should be considered as vector systems can have limits on the size of a polynucleotide that can be expressed therefrom and/or packaged into cargo inside of a viral particle. In one embodiment, the tropism of a vector system, such as a viral vector system, should be considered as it can impact the cell type to which the composition or component thereof can be efficiently and/or effectively delivered.

[0839] When delivering a system or component thereof via a viral-based system, it can be important to consider the amount of viral particles that will be needed to achieve a therapeutic effect so as to account for the potential immune response that can be elicited by the viral particles when delivered to a subject or cell(s). When delivering a system or component thereof via a viral based system, it can be important to consider mechanisms of controlling the distribution and/or dosage of the system in vivo. Generally, to reduce the potential for off-target effects, it is optimal but not necessarily required, that the amount of the system be as close to the minimum or least effective dose. In practice this can be challenging to do.

[0840] In one embodiment, it can be important to consider the immunogenicity of the system or component thereof. In embodiments, where the immunogenicity of the system or component thereof is of concern, the immunogenicity system or component thereof can be reduced. By way of example only, the immunogenicity of the system or component thereof can be reduced using the approach set out in Tangri et al. Accordingly, directed evolution or rational design may be used to reduce the immunogenicity of the chimeric IscB system in the host species (human or other species).

### Xenotransplantation

[0841] The present invention also contemplates use of the composition described herein, e.g. chimeric IscB system protein systems, to provide RNA-guided DNA nucleases adapted to be used to provide modified tissues for transplantation. For example, RNA-guided DNA nucleases may be used to knockout, knockdown or disrupt selected genes in an animal, such as a transgenic pig (such as the human heme oxygenase-1 transgenic pig line), for example by disrupting expression of genes that encode epitopes recognized by the human immune system, i.e. xenoantigen genes. Candidate porcine genes for disruption may for example include α(1,3)-galactosyltransferase and cytidine monophosphate-N-acetylneuraminic acid hydroxylase genes (see PCT Patent Publication WO 2014/066505). In addition, genes encoding endogenous retroviruses may be disrupted, for example the genes encoding all porcine endogenous retroviruses (see Yang et al., 2015, Genome-wide inactivation of porcine endogenous retroviruses (PERVs), Science 27 Nov. 2015: Vol. 350 no. 6264 pp. 1101-1104). In addition, RNA-guided DNA nucleases may be used to target a site for integration of additional genes in xenotransplant donor animals, such as a human CD55 gene to improve protection against hyperacute rejection.

[0842] Embodiments of the invention also relate to methods and compositions related to knocking out genes, amplifying genes and repairing particular mutations associated with DNA repeat instability and neurological disorders (Robert D. Wells, Tetsuo Ashizawa, Genetic Instabilities and Neurological Diseases, Second Edition, Academic Press, Oct. 13, 2011—Medical). Specific aspects of tandem repeat sequences have been found to be responsible for more than twenty human diseases (New insights into repeat instability: role of RNA•DNA hybrids. McIvor E I, Polak U, Napierala M. RNA Biol. 2010 September-October; 7(5):551-8). The present effector protein systems may be harnessed to correct these defects of genomic instability.

[0843] Several further aspects of the invention relate to correcting defects associated with a wide range of genetic diseases which are further described on the website of the National Institutes of Health under the topic subsection Genetic Disorders (website at health.nih.gov/topic/GeneticDisorders). The genetic brain diseases may include but are not limited to Adrenoleukodystrophy, Agenesis of the Corpus Callosum, Aicardi Syndrome, Alpers' Disease, Alzheimer's Disease, Barth Syndrome, Batten Disease, CADASIL, Cerebellar Degeneration, Fabry's Disease, Gerstmann-Straussler-Scheinker Disease, Huntington's Disease and other Triplet Repeat Disorders, Leigh's Disease, Lesch-Nyhan Syndrome, Menkes Disease, Mitochondrial Myopathies and NINDS Colpocephaly. These diseases are further described on the website of the National Institutes of Health under the subsection Genetic Brain Disorders.

### Applications in Plants and Fungi

[0844] The compositions, systems, and methods described herein can be used to perform gene or genome interrogation or editing or manipulation in plants and fungi. For example, the applications include investigation and/or selection and/or interrogations and/or comparison and/or manipulations and/or transformation of plant genes or genomes; e.g., to create, identify, develop, optimize, or confer trait(s) or characteristic(s) to plant(s) or to transform a plant or fungus genome. There can accordingly be improved production of plants, new plants with new combinations of traits or characteristics or new plants with enhanced traits. The compositions, systems, and methods can be used with regard to plants in Site-Directed Integration (SDI) or Gene Editing (GE) or any Near Reverse Breeding (NRB) or Reverse Breeding (RB) techniques.

[0845] The compositions, systems, and methods herein may be used to confer desired traits (e.g., enhanced nutritional quality, increased resistance to diseases and resistance to biotic and abiotic stress, and increased production of commercially valuable plant products or heterologous compounds) on essentially any plants and fungi, and their cells and tissues. The compositions, systems, and methods may be used to modify endogenous genes or to modify their expression without the permanent introduction into the genome of any foreign gene.

[0846] In one embodiment, compositions, systems, and methods may be used in genome editing in plants or where RNAi or similar genome editing techniques have been used previously; see, e.g., Nekrasov, “Plant genome editing made easy: targeted mutagenesis in model and crop plants using the CRISPR-Cas system,” Plant Methods 2013, 9:39 (doi:10.1186/1746-4811-9-39); Brooks, “Efficient gene editing in tomato in the first generation using the CRISPR-Cas9 system,” Plant Physiology September 2014 pp 114.247577; Shan, “Targeted genome modification of crop plants using a CRISPR-Cas system,” Nature Biotechnology 31, 686-688 (2013); Feng, “Efficient genome editing in plants using a CRISPR/Cas system,” Cell Research (2013) 23:1229-1232. doi:10.1038/cr.2013.114; published online 20 Aug. 2013; Xie, “RNA-guided genome editing in plants using a CRISPR-Cas system,” Mol Plant. 2013 November; 6(6):1975-83. doi: 10.1093/mp/sst119. Epub 2013 August 17; Xu, “Gene targeting using the Agrobacterium tumefaciens-mediated CRISPR-Cas system in rice,” Rice 2014, 7:5 (2014), Zhou et al., “Exploiting SNPs for biallelic CRISPR mutations in the outcrossing woody perennial Populus reveals 4-coumarate: CoA ligase specificity and Redundancy,” New Phytologist (2015) (Forum) 1-4 (available online only at www.newphytologist.com); Caliando et al, “Targeted DNA degradation using a CRISPR device stably carried in the host genome, NATURE COMMUNICATIONS 6:6989, DOI: 10.1038/ncomms7989, www.nature.com/naturecommunications DOI: 10.1038/ncomms7989; U.S. Pat. No. 6,603,061 —Agrobacterium-Mediated Plant Transformation Method; U.S. Pat. No. 7,868,149—Plant Genome Sequences and Uses Thereof and US 2009/0100536-Transgenic Plants with Enhanced Agronomic Traits, Morrell et al “Crop genomics: advances and applications,” Nat Rev Genet. 2011 Dec. 29; 13(2):85-96, all the contents and disclosure of each of which are herein incorporated by reference in their entirety. Aspects of utilizing the compositions, systems, and methods may be analogous to the use of the composition in plants, and mention is made of the University of Arizona website “CRISPR-PLANT” (genome.arizona.edu/crispr/) (supported by Penn State and AGI).

[0847] The compositions, systems, and methods may also be used on protoplasts. A “protoplast” refers to a plant cell that has had its protective cell wall completely or partially removed using, for example, mechanical or enzymatic means resulting in an intact biochemical competent unit of living plant that can reform their cell wall, proliferate and regenerate grow into a whole plant under proper growing conditions.

[0848] The compositions, systems, and methods may be used for screening genes (e.g., endogenous, mutations) of interest. In some examples, genes of interest include those encoding enzymes involved in the production of a component of added nutritional value or generally genes affecting agronomic traits of interest, across species, phyla, and plant kingdom. By selectively targeting e.g., genes encoding enzymes of metabolic pathways, the genes responsible for certain nutritional aspects of a plant can be identified. Similarly, by selectively targeting genes which may affect a desirable agronomic trait, the relevant genes can be identified. Accordingly, the present invention encompasses screening methods for genes encoding enzymes involved in the production of compounds with a particular nutritional value and/or agronomic traits.

[0849] It is also understood that reference herein to animal cells may also apply, mutatis mutandis, to plant or fungal cells unless otherwise apparent; and the enzymes herein having reduced off-target effects and systems employing such enzymes can be used in plant applications, including those mentioned herein.

[0850] In some cases, nucleic acids introduced to plants and fungi may be codon optimized for expression in the plants and fungi. Methods of codon optimization include those described in Kwon K C, et al., Codon Optimization to Enhance Expression Yields Insights into Chloroplast Translation, Plant Physiol. 2016 September; 172(1):62-77.

[0851] The components (e.g., chimeric IscB system) in the compositions and systems may further comprise one or more functional domains described herein. In some examples, the functional domains may be an exonuclease. Such exonuclease may increase the efficiency of the chimeric IscB system' function, e.g., mutagenesis efficiency. An example of the functional domain is Trex2, as described in Weiss T et al., www.biorxiv.org/content/10.1101/2020.04.11.037572v1, doi: doi.org/10.1101/2020.04.11.037572.

### Examples of Plants

[0852] The compositions, systems, and methods herein can be used to confer desired traits on essentially any plant. A wide variety of plants and plant cell systems may be engineered for the desired physiological and agronomic characteristics. In general, the term “plant” relates to any various photosynthetic, eukaryotic, unicellular or multicellular organism of the kingdom Plantae characteristically growing by cell division, containing chloroplasts, and having cell walls comprised of cellulose. The term plant encompasses monocotyledonous and dicotyledonous plants.

[0853] The compositions, systems, and methods may be used over a broad range of plants, such as for example with dicotyledonous plants belonging to the orders Magniolales, Illiciales, Laurales, Piperales, Aristochiales, Nymphaeales, Ranunculales, Papeverales, Sarraceniaceae, Trochodendrales, Hamamelidales, Eucomiales, Leitneriales, Myricales, Fagales, Casuarinales, Caryophyllales, Batales, Polygonales, Plumbaginales, Dilleniales, Theales, Malvales, Urticales, Lecythidales, Violales, Salicales, Capparales, Ericales, Diapensales, Ebenales, Primulales, Rosales, Fabales, Podostemales, Haloragales, Myrtales, Cornales, Proteales, San tales, Rafflesiales, Celastrales, Euphorbiales, Rhamnales, Sapindales, Juglandales, Geraniales, Polygalales, Umbellales, Gentianales, Polemoniales, Lamiales, Plantaginales, Scrophulariales, Campanulales, Rubiales, Dipsacales, and Asterales; monocotyledonous plants such as those belonging to the orders Alismatales, Hydrocharitales, Najadales, Triuridales, Commelinales, Eriocaulales, Restionales, Poales, Juncales, Cyperales, Typhales, Bromeliales, Zingiberales, Arecales, Cyclanthales, Pandanales, Arales, Lilliales, and Orchidales, or with plants belonging to Gymnospermae, e.g., those belonging to the orders Pinales, Ginkgoales, Cycadales, Araucariales, Cupressales and Gnetales.

[0854] The compositions, systems, and methods herein can be used over a broad range of plant species, included in the non-limitative list of dicot, monocot or gymnosperm genera hereunder: Atropa, Alseodaphne, Anacardium, Arachis, Beilschmiedia, Brassica, Carthamus, Cocculus, Croton, Cucumis, Citrus, Citrullus, Capsicum, Catharanthus, Cocos, Coffea, Cucurbita, Daucus, Duguetia, Eschscholzia, Ficus, Fragaria, Glaucium, Glycine, Gossypium, Helianthus, Hevea, Hyoscyamus, Lactuca, Landolphia, Linum, Litsea, Lycopersicon, Lupinus, Manihot, Majorana, Malus, Medicago, Nicotiana, Olea, Parthenium, Papaver, Persea, Phaseolus, Pistacia, Pisum, Pyrus, Prunus, Raphanus, Ricinus, Senecio, Sinomenium, Stephania, Sinapis, Solanum, Theobroma, Trifolium, Trigonella, Vicia, Vinca, Vilis, and Vigna; and the genera Allium, Andropogon, Aragrostis, Asparagus, Avena, Cynodon, Elaeis, Festuca, Festulolium, Heterocallis, Hordeum, Lemna, Lolium, Musa, Oryza, Panicum, Pannesetum, Phleum, Poa, Secale, Sorghum, Triticum, Zea, Abies, Cunninghamia, Ephedra, Picea, Pinus, and Pseudotsuga.

[0855] In one embodiment, target plants and plant cells for engineering include those monocotyledonous and dicotyledonous plants, such as crops including grain crops (e.g., wheat, maize, rice, millet, barley), fruit crops (e.g., tomato, apple, pear, strawberry, orange), forage crops (e.g., alfalfa), root vegetable crops (e.g., carrot, potato, sugar beets, yam), leafy vegetable crops (e.g., lettuce, spinach); flowering plants (e.g., petunia, rose, chrysanthemum), conifers and pine trees (e.g., pine fir, spruce); plants used in phytoremediation (e.g., heavy metal accumulating plants); oil crops (e.g., sunflower, rape seed) and plants used for experimental purposes (e.g., Arabidopsis). Specifically, the plants are intended to comprise without limitation angiosperm and gymnosperm plants such as acacia, alfalfa, amaranth, apple, apricot, artichoke, ash tree, asparagus, avocado, banana, barley, beans, beet, birch, beech, blackberry, blueberry, broccoli, Brussel's sprouts, cabbage, canola, cantaloupe, carrot, cassava, cauliflower, cedar, a cereal, celery, chestnut, cherry, Chinese cabbage, citrus, clementine, clover, coffee, corn, cotton, cowpea, cucumber, cypress, eggplant, elm, endive, eucalyptus, fennel, figs, fir, geranium, grape, grapefruit, groundnuts, ground cherry, gum hemlock, hickory, kale, kiwifruit, kohlrabi, larch, lettuce, leek, lemon, lime, locust, pine, maidenhair, maize, mango, maple, melon, millet, mushroom, mustard, nuts, oak, oats, oil palm, okra, onion, orange, an ornamental plant or flower or tree, papaya, palm, parsley, parsnip, pea, peach, peanut, pear, peat, pepper, persimmon, pigeon pea, pine, pineapple, plantain, plum, pomegranate, potato, pumpkin, radicchio, radish, rapeseed, raspberry, rice, rye, sorghum, safflower, sallow, soybean, spinach, spruce, squash, strawberry, sugar beet, sugarcane, sunflower, sweet potato, sweet corn, tangerine, tea, tobacco, tomato, trees, triticale, turf grasses, turnips, vine, walnut, watercress, watermelon, wheat, yams, yew, and zucchini.

[0856] The term plant also encompasses Algae, which are mainly photoautotrophs unified primarily by their lack of roots, leaves and other organs that characterize higher plants. The compositions, systems, and methods can be used over a broad range of “algae” or “algae cells.” Examples of algae include eukaryotic phyla, including the Rhodophyta (red algae), Chlorophyta (green algae), Phaeophyta (brown algae), Bacillariophyta (diatoms), Eustigmatophyta and dinoflagellates as well as the prokaryotic phylum Cyanobacteria (blue-green algae). Examples of algae species include those of Amphora, Anabaena, Anikstrodesmis, Botryococcus, Chaetoceros, Chlamydomonas, Chlorella, Chlorococcum, Cyclotella, Cylindrotheca, Dunaliella, Emiliana, Euglena, Hematococcus, Isochrysis, Monochrysis, Monoraphidium, Nannochloris, Nannnochloropsis, Navicula, Nephrochloris, Nephroselmis, Nitzschia, Nodularia, Nostoc, Oochromonas, Oocystis, Oscillartoria, Pavlova, Phaeodactylum, Playtmonas, Pleurochrysis, Porhyra, Pseudoanabaena, Pyramimonas, Stichococcus, Synechococcus, Synechocystis, Tetraselmis, Thalassiosira, and Trichodesmium.

### Plant Promoters

[0857] In order to ensure appropriate expression in a plant cell, the components of the components and systems herein may be placed under control of a plant promoter. A plant promoter is a promoter operable in plant cells. A plant promoter is capable of initiating transcription in plant cells, whether or not its origin is a plant cell. The use of different types of promoters is envisaged.

[0858] In some examples, the plant promoter is a constitutive plant promoter, which is a promoter that is able to express the open reading frame (ORF) that it controls in all or nearly all of the plant tissues during all or nearly all developmental stages of the plant (referred to as “constitutive expression”). One example of a constitutive promoter is the cauliflower mosaic virus 35S promoter. In some examples, the plant promoter is a regulated promoter, which directs gene expression not constitutively, but in a temporally- and/or spatially-regulated manner, and includes tissue-specific, tissue-preferred and inducible promoters. Different promoters may direct the expression of a gene in different tissues or cell types, or at different stages of development, or in response to different environmental conditions. In some examples, the plant promoter is a tissue-preferred promoters, which can be utilized to target enhanced expression in certain cell types within a particular plant tissue, for instance vascular cells in leaves or roots or in specific cells of the seed.

[0859] Exemplary plant promoters include those obtained from plants, plant viruses, and bacteria such as Agrobacterium or Rhizobium which comprise genes expressed in plant cells. Additional examples of promoters include those described in Kawamata et al., (1997) Plant Cell Physiol 38:792-803; Yamamoto et al., (1997) Plant J 12:255-65; Hire et al, (1992) Plant Mol Biol 20:207-18, Kuster et al, (1995) Plant Mol Biol 29:759-72, and Capana et al., (1994) Plant Mol Biol 25:681-91.

[0860] In some examples, a plant promoter may be an inducible promoter, which is inducible and allows for spatiotemporal control of gene editing or gene expression may use a form of energy. The form of energy may include sound energy, electromagnetic radiation, chemical energy and/or thermal energy. Examples of inducible systems include tetracycline inducible promoters (Tet-On or Tet-Off), small molecule two-hybrid transcription activations systems (FKBP, ABA, etc.), or light inducible systems (Phytochrome, LOV domains, or cryptochrome), such as a Light Inducible Transcriptional Effector (LITE) that direct changes in transcriptional activity in a sequence-specific manner. In a particular example, of the components of a light inducible system include a chimeric IscB system, a light-responsive cytochrome heterodimer (e.g., from Arabidopsis thaliana), and a transcriptional activation/repression domain.

[0861] In some examples, the promoter may be a chemical-regulated promotor (where the application of an exogenous chemical induces gene expression) or a chemical-repressible promoter (where application of the chemical represses gene expression). Examples of chemical-inducible promoters include maize 1n2-2 promoter (activated by benzene sulfonamide herbicide safeners), the maize GST promoter (activated by hydrophobic electrophilic compounds used as pre-emergent herbicides), the tobacco PR-1 a promoter (activated by salicylic acid), promoters regulated by antibiotics (such as tetracycline-inducible and tetracycline-repressible promoters).

### Stable Integration in the Genome of Plants

[0862] In one embodiment, polynucleotides encoding the components of the compositions and systems may be introduced for stable integration into the genome of a plant cell. In some cases, vectors or expression systems may be used for such integration. The design of the vector or the expression system can be adjusted depending on for when, where and under what conditions the guide RNA and/or the chimeric IscB system gene are expressed. In some cases, the polynucleotides may be integrated into an organelle of a plant, such as a plastid, mitochondrion or a chloroplast. The elements of the expression system may be on one or more expression constructs which are either circular such as a plasmid or transformation vector, or non-circular such as linear double stranded DNA.

[0863] In one embodiment, the method of integration generally comprises the steps of selecting a suitable host cell or host tissue, introducing the construct(s) into the host cell or host tissue, and regenerating plant cells or plants therefrom. In some examples, the expression system for stable integration into the genome of a plant cell may contain one or more of the following elements: a promoter element that can be used to express the RNA and/or chimeric IscB system in a plant cell; a 5′ untranslated region to enhance expression; an intron element to further enhance expression in certain cells, such as monocot cells; a multiple-cloning site to provide convenient restriction sites for inserting the guide RNA and/or the chimeric IscB system gene sequences and other desired elements; and a 3′ untranslated region to provide for efficient termination of the expressed transcript.

### Transient Expression in Plants

[0864] In one embodiment, the components of the compositions and systems may be transiently expressed in the plant cell. In some examples, the compositions and systems may modify a target nucleic acid only when both the guide RNA and the chimeric IscB systems are present in a cell, such that genomic modification can further be controlled. As the expression of the chimeric IscB system is transient, plants regenerated from such plant cells typically contain no foreign DNA. In certain examples, the chimeric IscB system is stably expressed and the guide sequence is transiently expressed.

[0865] DNA and/or RNA (e.g., mRNA) may be introduced to plant cells for transient expression. In such cases, the introduced nucleic acid may be provided in sufficient quantity to modify the cell but do not persist after a contemplated period of time has passed or after one or more cell divisions.

[0866] The transient expression may be achieved using suitable vectors. Exemplary vectors that may be used for transient expression include a pEAQ vector (may be tailored for Agrobacterium-mediated transient expression) and Cabbage Leaf Curl virus (CaLCuV), and vectors described in Sainsbury F. et al., Plant Biotechnol J. 2009 September; 7(7):682-93; and Yin K et al., Scientific Reports volume 5, Article number: 14926 (2015).

[0867] Combinations of the different methods described above are also envisaged.

Translocation to and/or Expression in Specific Plant Organelles

[0868] The compositions and systems herein may comprise elements for translocation to and/or expression in a specific plant organelle.

### Chloroplast Targeting

[0869] In one embodiment, it is envisaged that the compositions and systems are used to specifically modify chloroplast genes or to ensure expression in the chloroplast. The compositions and systems (e.g., chimeric IscB systems, ωRNAs, or their encoding polynucleotides) may be transformed, compartmentalized, and/or targeted to the chloroplast. In an example, the introduction of genetic modifications in the plastid genome can reduce biosafety issues such as gene flow through pollen.

[0870] Examples of methods of chloroplast transformation include Particle bombardment, PEG treatment, and microinjection, and the translocation of transformation cassettes from the nuclear genome to the plastid. In some examples, targeting of chloroplasts may be achieved by incorporating in chloroplast localization sequence, and/or the expression construct a sequence encoding a chloroplast transit peptide (CTP) or plastid transit peptide, operably linked to the 5′ region of the sequence encoding the components of the compositions and systems. Additional examples of transforming, targeting and localization of chloroplasts include those described in WO2010061186, Protein Transport into Chloroplasts, 2010, Annual Review of Plant Biology, Vol. 61: 157-180, and US 20040142476, which are incorporated by reference herein in their entireties.

### Exemplary Applications in Plants

[0871] The compositions, systems, and methods may be used to generate genetic variation(s) in a plant (e.g., crop) of interest. One or more, e.g., a library of, ωRNAs targeting one or more locations in a genome may be provided and introduced into plant cells together with the chimeric IscB system. For example, a collection of genome-scale point mutations and gene knock-outs can be generated. In some examples, the compositions, systems, and methods may be used to generate a plant part or plant from the cells so obtained and screening the cells for a trait of interest. The target genes may include both coding and non-coding regions. In some cases, the trait is stress tolerance, and the method is a method for the generation of stress-tolerant crop varieties.

[0872] In one embodiment, the compositions, systems, and methods are used to modify endogenous genes or to modify their expression. The expression of the components may induce targeted modification of the genome, either by direct activity of the chimeric IscB systems and optionally introduction of recombination template DNA, or by modification of genes targeted. The different strategies described herein above allow chimeric IscB system-mediated targeted genome editing without requiring the introduction of the components into the plant genome.

[0873] In some cases, the modification may be performed without the permanent introduction into the genome of the plant of any foreign gene, including those encoding components of the composition herein, so as to avoid the presence of foreign DNA in the genome of the plant. This can be of interest as the regulatory requirements for non-transgenic plants are less rigorous. Components which are transiently introduced into the plant cell are typically removed upon crossing.

[0874] For example, the modification may be performed by transient expression of the components of the compositions and systems. The transient expression may be performed by delivering the components of the compositions and systems with viral vectors, delivery into protoplasts, with the aid of particulate molecules such as nanoparticles or CPPs.

Generation of Plants with Desired Traits

[0875] The compositions, systems, and methods herein may be used to introduce desired traits to plants. The approaches include introduction of one or more foreign genes to confer a trait of interest, editing or modulating endogenous genes to confer a trait of interest.

### Agronomic Traits

[0876] In one embodiment, crop plants can be improved by influencing specific plant traits. Examples of the traits include improved agronomic traits such as herbicide resistance, disease resistance, abiotic stress tolerance, high yield, and superior quality, pesticide-resistance, disease resistance, insect and nematode resistance, resistance against parasitic weeds, drought tolerance, nutritional value, stress tolerance, self-pollination voidance, forage digestibility biomass, and grain yield.

[0877] In one embodiment, genes that confer resistance to pests or diseases may be introduced to plants. In cases there are endogenous genes that confer such resistance in a plants, their expression and function may be enhanced (e.g., by introducing extra copies, modifications that enhance expression and/or activity).

[0878] Examples of genes that confer resistance include plant disease resistance genes (e.g., Cf-9, Pto, RSP2, S1DMR6-1), genes conferring resistance to a pest (e.g., those described in WO96/30517), Bacillus thuringiensis proteins, lectins, Vitamin-binding proteins (e.g., avidin), enzyme inhibitors (e.g., protease or proteinase inhibitors or amylase inhibitors), insect-specific hormones or pheromones (e.g., ecdysteroid or a juvenile hormone, variant thereof, a mimetic based thereon, or an antagonist or agonist thereof) or genes involved in the production and regulation of such hormone and pheromones, insect-specific peptides or neuropeptide, Insect-specific venom (e.g., produced by a snake, a wasp, etc., or analog thereof), Enzymes responsible for a hyperaccumulation of a monoterpene, a sesquiterpene, a steroid, hydroxamic acid, a phenylpropanoid derivative or another nonprotein molecule with insecticidal activity, Enzymes involved in the modification of biologically active molecule (e.g., a glycolytic enzyme, a proteolytic enzyme, a lipolytic enzyme, a nuclease, a cyclase, a transaminase, an esterase, a hydrolase, a phosphatase, a kinase, a phosphorylase, a polymerase, an elastase, a chitinase and a glucanase, whether natural or synthetic), molecules that stimulates signal transduction, Viral-invasive proteins or a complex toxin derived therefrom, Developmental-arrestive proteins produced in nature by a pathogen or a parasite, a developmental-arrestive protein produced in nature by a plant, or any combination thereof.

[0879] The compositions, systems, and methods may be used to identify, screen, introduce or remove mutations or sequences lead to genetic variability that give rise to susceptibility to certain pathogens, e.g., host specific pathogens. Such approach may generate plants that are non-host resistance, e.g., the host and pathogen are incompatible or there can be partial resistance against all races of a pathogen, typically controlled by many genes and/or also complete resistance to some races of a pathogen but not to other races.

[0880] In one embodiment, the compositions, systems, and methods may be used to modify genes involved in plant diseases. Such genes may be removed, inactivated, or otherwise regulated or modified. Examples of plant diseases include those described in [0045]-[0080] of US20140213619A1, which is incorporated by reference herein in its entirety.

[0881] In one embodiment, genes that confer resistance to herbicides may be introduced to plants. Examples of genes that confer resistance to herbicides include genes conferring resistance to herbicides that inhibit the growing point or meristem, such as an imidazolinone or a sulfonylurea, genes conferring glyphosate tolerance (e.g., resistance conferred by, e.g., mutant 5-enolpyruvylshikimate-3-phosphate synthase genes, aroA genes and glyphosate acetyl transferase (GAT) genes, respectively), or resistance to other phosphono compounds such as by glufosinate (phosphinothricin acetyl transferase (PAT) genes from Streptomyces species, including Streptomyces hygroscopicus and Streptomyces viridichromogenes), and to pyridinoxy or phenoxy proprionic acids and cyclohexones by ACCase inhibitor-encoding genes), genes conferring resistance to herbicides that inhibit photosynthesis (such as a triazine (psbA and gs+ genes) or a benzonitrile (nitrilase gene), and glutathione S-transferase), genes encoding enzymes detoxifying the herbicide or a mutant glutamine synthase enzyme that is resistant to inhibition, genes encoding a detoxifying enzyme is an enzyme encoding a phosphinothricin acetyltransferase (such as the bar or pat protein from Streptomyces species), genes encoding hydroxyphenylpyruvatedioxygenases (HPPD) inhibitors, e.g., naturally occurring HPPD resistant enzymes, and genes encoding a mutated or chimeric HPPD enzyme.

[0882] In one embodiment, genes involved in Abiotic stress tolerance may be introduced to plants. Examples of genes include those capable of reducing the expression and/or the activity of poly(ADP-ribose) polymerase (PARP) gene, transgenes capable of reducing the expression and/or the activity of the PARG encoding genes, genes coding for a plant-functional enzyme of the nicotineamide adenine dinucleotide salvage synthesis pathway including nicotinamidase, nicotinate phosphoribosyltransferase, nicotinic acid mononucleotide adenyl transferase, nicotinamide adenine dinucleotide synthetase or nicotine amide phosphorybosyltransferase, enzymes involved in carbohydrate biosynthesis, enzymes involved in the production of polyfructose (e.g., the inulin and levan-type), the production of alpha-1,6 branched alpha-1,4-glucans, the production of alternan, the production of hyaluronan.

[0883] In one embodiment, genes that improve drought resistance may be introduced to plants. Examples of genes Ubiquitin Protein Ligase protein (UPL) protein (UPL3), DR02, DR03, ABC transporter, and DREB1A.

### Nutritionally Improved Plants

[0884] In one embodiment, the compositions, systems, and methods may be used to produce nutritionally improved plants. In some examples, such plants may provide functional foods, e.g., a modified food or food ingredient that may provide a health benefit beyond the traditional nutrients it contains. In certain examples, such plants may provide nutraceuticals foods, e.g., substances that may be considered a food or part of a food and provides health benefits, including the prevention and treatment of disease. The nutraceutical foods may be useful in the prevention and/or treatment of diseases in animals and humans, e.g., cancers, diabetes, cardiovascular disease, and hypertension.

[0885] An improved plant may naturally produce one or more desired compounds and the modification may enhance the level or activity or quality of the compounds. In some cases, the improved plant may not naturally produce the compound(s), while the modification enables the plant to produce such compound(s). In some cases, the compositions, systems, and methods used to modify the endogenous synthesis of these compounds indirectly, e.g. by modifying one or more transcription factors that controls the metabolism of this compound.

[0886] Examples of nutritionally improved plants include plants comprising modified protein quality, content and/or amino acid composition, essential amino acid contents, oils and fatty acids, carbohydrates, vitamins and carotenoids, functional secondary metabolites, and minerals. In some examples, the improved plants may comprise or produce compounds with health benefits. Examples of nutritionally improved plants include those described in Newell-McGloughlin, Plant Physiology, July 2008, Vol. 147, pp. 939-953.

[0887] Examples of compounds that can be produced include carotenoids (e.g., α-Carotene or β-Carotene), lutein, lycopene, Zeaxanthin, Dietary fiber (e.g., insoluble fibers, β-Glucan, soluble fibers, fatty acids (e.g., ω-3 fatty acids, Conjugated linoleic acid, GLA), Flavonoids (e.g., Hydroxycinnamates, flavonols, catechins and tannins), Glucosinolates, indoles, isothiocyanates (e.g., Sulforaphane), Phenolics (e.g., stilbenes, caffeic acid and ferulic acid, epicatechin), Plant stanols/sterols, Fructans, inulins, fructo-oligosaccharides, Saponins, Soybean proteins, Phytoestrogens (e.g., isoflavones, lignans), Sulfides and thiols such as diallyl sulphide, Allyl methyl trisulfide, dithiolthiones, Tannins, such as proanthocyanidins, or any combination thereof.

[0888] The compositions, systems, and methods may also be used to modify protein/starch functionality, shelf life, taste/aesthetics, fiber quality, and allergen, antinutrient, and toxin reduction traits.

[0889] Examples of genes and nucleic acids that can be modified to introduce the traits include stearyl-ACP desaturase, DNA associated with the single allele which may be responsible for maize mutants characterized by low levels of phytic acid, Tf RAP2.2 and its interacting partner SINAT2, Tf Dof1, and DOF Tf AtDof1.1 (OBP2).

### Modification of Polyploid Plants

[0890] The compositions, systems, and methods may be used to modify polyploid plants. Polyploid plants carry duplicate copies of their genomes (e.g., as many as six, such as in wheat). In some cases, the compositions, systems, and methods may be/can be multiplexed to affect all copies of a gene, or to target dozens of genes at once. For instance, the compositions, systems, and methods may be used to simultaneously ensure a loss of function mutation in different genes responsible for suppressing defenses against a disease. The modification may be simultaneous suppression the expression of the TaMLO-A1, TaMLO-B1 and TaMLO-D1 nucleic acid sequence in a wheat plant cell and regenerating a wheat plant therefrom, in order to ensure that the wheat plant is resistant to powdery mildew (e.g., as described in WO2015109752).

### Regulation of Fruit-Ripening

[0891] The compositions, systems, and methods may be used to regulate ripening of fruits. Ripening is a normal phase in the maturation process of fruits and vegetables. Only a few days after it starts it may render a fruit or vegetable inedible, which can bring significant losses to both farmers and consumers.

[0892] In one embodiment, the compositions, systems, and methods are used to reduce ethylene production. In some examples, the compositions, systems, and methods may be used to suppress the expression and/or activity of ACC synthase, insert a ACC deaminase gene or a functional fragment thereof, insert a SAM hydrolase gene or functional fragment thereof, suppress ACC oxidase gene expression

[0893] Alternatively or additionally, the compositions, systems, and methods may be used to modify ethylene receptors (e.g., suppressing ETR1) and/or Polygalacturonase (PG). Suppression of a gene may be achieved by introducing a mutation, an antisense sequence, and/or a truncated copy of the gene to the genome.

### Increasing Storage Life of Plants

[0894] In one embodiment, the compositions, systems, and methods are used to modify genes involved in the production of compounds which affect storage life of the plant or plant part. The modification may be in a gene that prevents the accumulation of reducing sugars in potato tubers. Upon high-temperature processing, these reducing sugars react with free amino acids, resulting in brown, bitter-tasting products and elevated levels of acrylamide, which is a potential carcinogen. In one embodiment, the methods provided herein are used to reduce or inhibit expression of the vacuolar invertase gene (VInv), which encodes a protein that breaks down sucrose to glucose and fructose.

### Reducing Allergens in Plants

[0895] In one embodiment, the compositions, systems, and methods are used to generate plants with a reduced level of allergens, making them safer for consumers. To this end, the compositions, systems, and methods may be used to identify and modify (e.g., suppress) one or more genes responsible for the production of plant allergens. Examples of such genes include Lol p5, as well as those in peanuts, soybeans, lentils, peas, lupin, green beans, mung beans, such as those described in Nicolaou et al., Current Opinion in Allergy and Clinical Immunology 2011; 11(3):222), which is incorporated by reference herein in its entirety.

### Generation of Male Sterile Plants

[0896] The compositions, systems, and methods may be used to generate male sterile plants. Hybrid plants typically have advantageous agronomic traits compared to inbred plants. However, for self-pollinating plants, the generation of hybrids can be challenging. In different plant types (e.g., maize and rice), genes have been identified which are important for plant fertility, more particularly male fertility. Plants that are as such genetically altered can be used in hybrid breeding programs.

[0897] The compositions, systems, and methods may be used to modify genes involved male fertility, e.g., inactivating (such as by introducing mutations to) genes required for male fertility. Examples of the genes involved in male fertility include cytochrome P450-like gene (MS26) or the meganuclease gene (MS45), and those described in Wan X et al., Mol Plant. 2019 Mar. 4; 12(3):321-342; and Kim Y J, et al., Trends Plant Sci. 2018 January; 23(1):53-65.

### Increasing the Fertility Stage in Plants

[0898] In one embodiment, the compositions, systems, and methods may be used to prolong the fertility stage of a plant such as of a rice. For instance, a rice fertility stage gene such as Ehd3 can be targeted in order to generate a mutation in the gene and plantlets can be selected for a prolonged regeneration plant fertility stage.

### Production of Early Yield of Products

[0899] In one embodiment, the compositions, systems, and methods may be used to produce early yield of the product. For example, flowering process may be modulated, e.g., by mutating flowering repressor gene such as SP5G. Examples of such approaches include those described in Soyk S, et al., Nat Genet. 2017 January; 49(1):162-168.

### Oil and Biofuel Production

[0900] The compositions, systems, and methods may be used to generate plants for oil and biofuel production. Biofuels include fuels made from plant and plant-derived resources. Biofuels may be extracted from organic matter whose energy has been obtained through a process of carbon fixation or are made through the use or conversion of biomass. This biomass can be used directly for biofuels or can be converted to convenient energy containing substances by thermal conversion, chemical conversion, and biochemical conversion. This biomass conversion can result in fuel in solid, liquid, or gas form. Biofuels include bioethanol and biodiesel. Bioethanol can be produced by the sugar fermentation process of cellulose (starch), which may be derived from maize and sugar cane. Biodiesel can be produced from oil crops such as rapeseed, palm, and soybean. Biofuels can be used for transportation.

### Generation of Plants for Production of Vegetable Oils and Biofuels

[0901] The compositions, systems, and methods may be used to generate algae (e.g., diatom) and other plants (e.g., grapes) that express or overexpress high levels of oil or biofuels.

[0902] In some cases, the compositions, systems, and methods may be used to modify genes involved in the modification of the quantity of lipids and/or the quality of the lipids. Examples of such genes include those involved in the pathways of fatty acid synthesis, e.g., acetyl-CoA carboxylase, fatty acid synthase, 3-ketoacyl_acyl-carrier protein synthase III, glycerol-3-phospate deshydrogenase (G3PDH), Enoyl-acyl carrier protein reductase (Enoyl-ACP-reductase), glycerol-3-phosphate acyltransferase, lysophosphatidic acyl transferase or diacylglycerol acyltransferase, phospholipid:diacylglycerol acyltransferase, phoshatidate phosphatase, fatty acid thioesterase such as palmitoyi protein thioesterase, or malic enzyme activities.

[0903] In further embodiments, it is envisaged to generate diatoms that have increased lipid accumulation. This can be achieved by targeting genes that decrease lipid catabolization. Examples of genes include those involved in the activation of triacylglycerol and free fatty acids, β-oxidation of fatty acids, such as genes of acyl-CoA synthetase, 3-ketoacyl-CoA thiolase, acyl-CoA oxidase activity and phosphoglucomutase.

[0904] In some examples, algae may be modified for production of oil and biofuels, including fatty acids (e.g., fatty esters such as acid methyl esters (FAME) and fatty acid ethyl esters (FAEE)). Examples of methods of modifying microalgae include those described in Stovicek et al. Metab. Eng. Comm., 2015; 2:1; U.S. Pat. No. 8,945,839; and International Patent Publication No. WO 2015/086795.

[0905] In some examples, one or more genes may be introduced (e.g., overexpressed) to the plants (e.g., algae) to produce oils and biofuels (e.g., fatty acids) from a carbon source (e.g., alcohol). Examples of the genes include genes encoding acyl-CoA synthases, ester synthases, thioesterases (e.g., tesA, ′tesA, tesB, fatB, fatB2, fatB3, fatA1, or fatA), acyl-CoA synthases (e.g., fadD, JadK, BH3103, pf1-4354, EAV15023, fadD1, fadD2, RPC_4074, fadDD35, fadDD22, faa39), ester synthases (e.g., synthase/acyl-CoA:diacylglycerl acyltransferase from Simmondsia chinensis, Acinetobacter sp. ADP, Alcanivorax borkumensis, Pseudomonas aeruginosa, Fundibacter jadensis, Arabidopsis thaliana, or Alkaligenes eutrophus, or variants thereof).

[0906] Additionally or alternatively, one or more genes in the plants (e.g., algae) may be inactivated (e.g., expression of the genes is decreased). For examples, one or more mutations may be introduced to the genes. Examples of such genes include genes encoding acyl-CoA dehydrogenases (e.g., fade), outer membrane protein receptors, and transcriptional regulator (e.g., repressor) of fatty acid biosynthesis (e.g., fabR), pyruvate formate lyases (e.g., pflB), lactate dehydrogenases (e.g., IdhA).

### Organic Acid Production

[0907] In one embodiment, plants may be modified to produce organic acids such as lactic acid. The plants may produce organic acids using sugars, pentose or hexose sugars. To this end, one or more genes may be introduced (e.g., and overexpressed) in the plants. An example of such genes includes LDH gene.

[0908] In some examples, one or more genes may be inactivated (e.g., expression of the genes is decreased). For examples, one or more mutations may be introduced to the genes. The genes may include those encoding proteins involved an endogenous metabolic pathway which produces a metabolite other than the organic acid of interest and/or wherein the endogenous metabolic pathway consumes the organic acid.

[0909] Examples of genes that can be modified or introduced include those encoding pyruvate decarboxylases (pdc), fumarate reductases, alcohol dehydrogenases (adh), acetaldehyde dehydrogenases, phosphoenolpyruvate carboxylases (ppc), D-lactate dehydrogenases (d-ldh), L-lactate dehydrogenases (l-ldh), lactate 2-monooxygenases, lactate dehydrogenase, cytochrome-dependent lactate dehydrogenases (e.g., cytochrome B2-dependent L-lactate dehydrogenases).

### Enhancing Plant Properties for Biofuel Production

[0910] In one embodiment, the compositions, systems, and methods are used to alter the properties of the cell wall of plants to facilitate access by key hydrolyzing agents for a more efficient release of sugars for fermentation. By reducing the proportion of lignin in a plant the proportion of cellulose can be increased. In one embodiment, lignin biosynthesis may be downregulated in the plant so as to increase fermentable carbohydrates.

[0911] In some examples, one or more lignin biosynthesis genes may be down regulated. Examples of such genes include 4-coumarate 3-hydroxylases (C3H), phenylalanine ammonia-lyases (PAL), cinnamate 4-hydroxylases (C4H), hydroxycinnamoyl transferases (HCT), caffeic acid O-methyltransferases (COMT), caffeoyl CoA 3-O-methyltransferases (CCoAOMT), ferulate 5-hydroxylases (F5H), cinnamyl alcohol dehydrogenases (CAD), cinnamoyl CoA-reductases (CCR), 4-coumarate-CoA ligases (4CL), monolignol-lignin-specific glycosyltransferases, and aldehyde dehydrogenases (ALDH), and those described in WO 2008064289.

[0912] In some examples, plant mass that produces lower level of acetic acid during fermentation may be reduced. To this end, genes involved in polysaccharide acetylation (e.g., Cas1L and those described in WO 2010096488) may be inactivated.

### Other Microorganisms for Oils and Biofuel Production

[0913] In one embodiment, microorganisms other than plants may be used for production of oils and biofuels using the compositions, systems, and methods herein. Examples of the microorganisms include those of the genus of Escherichia, Bacillus, Lactobacillus, Rhodococcus, Synechococcus, Synechoystis, Pseudomonas, Aspergillus, Trichoderma, Neurospora, Fusarium, Humicola, Rhizomucor, Kluyveromyces, Pichia, Mucor, Myceliophtora, Penicillium, Phanerochaete, Pleurotus, Trametes, Chrysosporium, Saccharomyces, Stenotrophamonas, Schizosaccharomyces, Yarrowia, or Streptomyces.

### Plant Cultures and Regeneration

[0914] In one embodiment, the modified plants or plant cells may be cultured to regenerate a whole plant which possesses the transformed or modified genotype and thus the desired phenotype. Examples of regeneration techniques include those relying on manipulation of certain phytohormones in a tissue culture growth medium, relying on a biocide and/or herbicide marker which has been introduced together with the desired nucleotide sequences, obtaining from cultured protoplasts, plant callus, explants, organs, pollens, embryos or parts thereof.

### Detecting Modifications in the Plant Genome-Selectable Markers

[0915] When the compositions, systems, and methods are used to modify a plant, suitable methods may be used to confirm and detect the modification made in the plant. In some examples, when a variety of modifications are made, one or more desired modifications or traits resulting from the modifications may be selected and detected. The detection and confirmation may be performed by biochemical and molecular biology techniques such as Southern analysis, PCR, Northern blot, S1 RNase protection, primer-extension or reverse transcriptase-PCR, enzymatic assays, ribozyme activity, gel electrophoresis, Western blot, immunoprecipitation, enzyme-linked immunoassays, in situ hybridization, enzyme staining, and immunostaining.

[0916] In some cases, one or more markers, such as selectable and detectable markers, may be introduced to the plants. Such markers may be used for selecting, monitoring, isolating cells and plants with desired modifications and traits. A selectable marker can confer positive or negative selection and is conditional or non-conditional on the presence of external substrates. Examples of such markers include genes and proteins that confer resistance to antibiotics, such as hygromycin (hpt) and kanamycin (nptII), and genes that confer resistance to herbicides, such as phosphinothricin (bar) and chlorosulfuron (als), enzyme capable of producing or processing a colored substances (e.g., the β-glucuronidase, luciferase, B or C1 genes).

### Applications in Fungi

[0917] The compositions, systems, and methods described herein can be used to perform efficient and cost-effective gene or genome interrogation or editing or manipulation in fungi or fungal cells, such as yeast. The approaches and applications in plants may be applied to fungi as well.

[0918] A fungal cell may be any type of eukaryotic cell within the kingdom of fungi, such as phyla of Ascomycota, Basidiomycota, Blastocladiomycota, Chytridiomycota, Glomeromycota, Microsporidia, and Neocallimastigomycota. Examples of fungi or fungal cells in include yeasts, molds, and filamentous fungi.

[0919] In one embodiment, the fungal cell is a yeast cell. A yeast cell refers to any fungal cell within the phyla Ascomycota and Basidiomycota. Examples of yeasts include budding yeast, fission yeast, and mold, S. cerervisiae, Kluyveromyces marxianus, Issatchenkia orientalis, Candida spp. (e.g., Candida albicans), Yarrowia spp. (e.g., Yarrowia lipolytica), Pichia spp. (e.g., Pichia pastoris), Kluyveromyces spp. (e.g., Kluyveromyces lactis and Kluyveromyces marxianus), Neurospora spp. (e.g., Neurospora crassa), Fusarium spp. (e.g., Fusarium oxysporum), and Issatchenkia spp. (e.g., Issatchenkia orientalis, Pichia kudriavzevii and Candida acidothermophilum).

[0920] In one embodiment, the fungal cell is a filamentous fungal cell, which grow in filaments, e.g., hyphae or mycelia. Examples of filamentous fungal cells include Aspergillus spp. (e.g., Aspergillus niger), Trichoderma spp. (e.g., Trichoderma reesei), Rhizopus spp. (e.g., Rhizopus oryzae), and Mortierella spp. (e.g., Mortierella isabellina).

[0921] In one embodiment, the fungal cell is of an industrial strain. Industrial strains include any strain of fungal cell used in or isolated from an industrial process, e.g., production of a product on a commercial or industrial scale. Industrial strain may refer to a fungal species that is typically used in an industrial process, or it may refer to an isolate of a fungal species that may be also used for non-industrial purposes (e.g., laboratory research). Examples of industrial processes include fermentation (e.g., in production of food or beverage products), distillation, biofuel production, production of a compound, and production of a polypeptide. Examples of industrial strains include, without limitation, JAY270 and ATCC4124.

[0922] In one embodiment, the fungal cell is a polyploid cell whose genome is present in more than one copy. Polyploid cells include cells naturally found in a polyploid state, and cells that has been induced to exist in a polyploid state (e.g., through specific regulation, alteration, inactivation, activation, or modification of meiosis, cytokinesis, or DNA replication). A polyploid cell may be a cell whose entire genome is polyploid, or a cell that is polyploid in a particular genomic locus of interest. In some examples, the abundance of guide RNA may more often be a rate-limiting component in genome engineering of polyploid cells than in haploid cells, and thus the methods using the composition described herein may take advantage of using certain fungal cell types.

[0923] In one embodiment, the fungal cell is a diploid cell, whose genome is present in two copies. Diploid cells include cells naturally found in a diploid state, and cells that have been induced to exist in a diploid state (e.g., through specific regulation, alteration, inactivation, activation, or modification of meiosis, cytokinesis, or DNA replication). A diploid cell may refer to a cell whose entire genome is diploid, or it may refer to a cell that is diploid in a particular genomic locus of interest.

[0924] In one embodiment, the fungal cell is a haploid cell, whose genome is present in one copy. Haploid cells include cells naturally found in a haploid state, or cells that have been induced to exist in a haploid state (e.g., through specific regulation, alteration, inactivation, activation, or modification of meiosis, cytokinesis, or DNA replication). A haploid cell may refer to a cell whose entire genome is haploid, or it may refer to a cell that is haploid in a particular genomic locus of interest.

[0925] The compositions and systems, and nucleic acid encoding thereof may be introduced to fungi cells using the delivery systems and methods herein. Examples of delivery systems include lithium acetate treatment, bombardment, electroporation, and those described in Kawai et al., 2010, Bioeng Bugs. 2010 November-December; 1(6): 395-403.

[0926] In some examples, a yeast expression vector (e.g., those with one or more regulatory elements) may be used. Examples of such vectors include a centromeric (CEN) sequence, an autonomous replication sequence (ARS), a promoter, such as an RNA Polymerase III promoter, operably linked to a sequence or gene of interest, a terminator such as an RNA polymerase III terminator, an origin of replication, and a marker gene (e.g., auxotrophic, antibiotic, or other selectable markers). Examples of expression vectors for use in yeast may include plasmids, yeast artificial chromosomes, 2μ plasmids, yeast integrative plasmids, yeast replicative plasmids, shuttle vectors, and episomal plasmids.

### Biofuel and Materials Production by Fungi

[0927] In one embodiment, the compositions, systems, and methods may be used for generating modified fungi for biofuel and material productions. For instance, the modified fungi for production of biofuel or biopolymers from fermentable sugars and optionally to be able to degrade plant-derived lignocellulose derived from agricultural waste as a source of fermentable sugars. Foreign genes required for biofuel production and synthesis may be introduced in to fungi In some examples, the genes may encode enzymes involved in the conversion of pyruvate to ethanol or another product of interest, degrade cellulose (e.g., cellulase), endogenous metabolic pathways which compete with the biofuel production pathway.

[0928] In some examples, the compositions, systems, and methods may be used for generating and/or selecting yeast strains with improved xylose or cellobiose utilization, isoprenoid biosynthesis, and/or lactic acid production. One or more genes involved in the metabolism and synthesis of these compounds may be modified and/or introduced to yeast cells. Examples of the methods and genes include lactate dehydrogenase, PDC1 and PDC5, and those described in Ha, S. J., et al. (2011) Proc. Natl. Acad. Sci. USA 108(2):504-9 and Galazka, J. M., et al. (2010) Science 330(6000):84-6; Jakočiūnas T et al., Metab Eng. 2015 March; 28:213-222; Stovicek V, et al., FEMS Yeast Res. 2017 Aug. 1; 17 (5).

### Improved Plants and Yeast Cells

[0929] The present disclosure further provides improved plants and fungi. The improved and fungi may comprise one or more genes introduced, and/or one or more genes modified by the compositions, systems, and methods herein. The improved plants and fungi may have increased food or feed production (e.g., higher protein, carbohydrate, nutrient or vitamin levels), oil and biofuel production (e.g., methanol, ethanol), tolerance to pests, herbicides, drought, low or high temperatures, excessive water, etc.

[0930] The plants or fungi may have one or more parts that are improved, e.g., leaves, stems, roots, tubers, seeds, endosperm, ovule, and pollen. The parts may be viable, nonviable, regeneratable, and/or non-regeneratable.

[0931] The improved plants and fungi may include gametes, seeds, embryos, either zygotic or somatic, progeny and/or hybrids of improved plants and fungi. The progeny may be a clone of the produced plant or fungi, or may result from sexual reproduction by crossing with other individuals of the same species to introgress further desirable traits into their offspring. The cell may be in vivo or ex vivo in the cases of multicellular organisms, particularly plants.

### Further Applications in Plants

[0932] Further applications of the compositions, systems, and methods on plants and fungi include visualization of genetic element dynamics (e.g., as described in Chen B, et al., Cell. 2013 Dec. 19; 155(7):1479-91), targeted gene disruption positive-selection in vitro and in vivo (as described in Malina A et al., Genes Dev. 2013 Dec. 1; 27(23):2602-14), epigenetic modification such as using fusion of chimeric IscB system and histone-modifying enzymes (e.g., as described in Rusk N, Nat Methods. 2014 January; 11(1):28), identifying transcription regulators (e.g., as described in Waldrip Z J, Epigenetics. 2014 September; 9(9):1207-11), anti-virus treatment for both RNA and DNA viruses (e.g., as described in Price A A, et al., Proc Natl Acad Sci USA. 2015 May 12; 112(19):6164-9; Ramanan V et al., Sci Rep. 2015 Jun. 2; 5:10833), alteration of genome complexity such as chromosome numbers (e.g., as described in Karimi-Ashtiyani R et al., Proc Natl Acad Sci USA. 2015 Sep. 8; 112(36):11211-6; Anton T, et al., Nucleus. 2014 March-April; 5(2):163-72), self-cleavage of the composition for controlled inactivation/activation (e.g., as described Sugano S S et al., Plant Cell Physiol. 2014 March; 55(3):475-81), multiplexed gene editing (as described in Kabadi A M et al., Nucleic Acids Res. 2014 Oct. 29; 42 (19):e147), development of kits for multiplex genome editing (as described in Xing H L et al., BMC Plant Biol. 2014 Nov. 29; 14:327), starch production (as described in Hebelstrup K H et al., Front Plant Sci. 2015 Apr. 23; 6:247), targeting multiple genes in a family or pathway (e.g., as described in Ma X et al., Mol Plant. 2015 August; 8(8):1274-84), regulation of non-coding genes and sequences (e.g., as described in Lowder L G, et al., Plant Physiol. 2015 October; 169(2):971-85), editing genes in trees (e.g., as described in Belhaj K et al., Plant Methods. 2013 Oct. 11; 9(1):39; Harrison M M, et al., Genes Dev. 2014 Sep. 1; 28(17):1859-72; Zhou X et al., New Phytol. 2015 October; 208(2):298-301), introduction of mutations for resistance to host-specific pathogens and pests.

[0933] Additional examples of modifications of plants and fungi that may be performed using the compositions, systems, and methods include analogous modifications described in International Patent Publication Nos. WO2016/099887, WO2016/025131, WO2016/073433, WO2017/066175, WO2017/100158, WO 2017/105991, WO2017/106414, WO2016/100272, WO2016/100571, WO 2016/100568, WO 2016/100562, and WO 2017/019867.

### Applications in Non-Human Animals

[0934] The compositions, systems, and methods may be used to study and modify non-human animals, e.g., introducing desirable traits and disease resilience, treating diseases, facilitating breeding, etc. In one embodiment, the compositions, systems, and methods may be used to improve breeding and introducing desired traits, e.g., increasing the frequency of trait-associated alleles, introgression of alleles from other breeds/species without linkage drag, and creation of de novo favorable alleles. Genes and other genetic elements that can be targeted may be screened and identified. Examples of application and approaches include those described in Tait-Burkard C, et al., Livestock 2.0—genome editing for fitter, healthier, and more productive farmed animals. Genome Biol. 2018 Nov. 26; 19(1):204; Lillico S, Agricultural applications of genome editing in farmed animals. Transgenic Res. 2019 August; 28 (Suppl 2):57-60; Houston R D, et al., Harnessing genomics to fast-track genetic improvement in aquaculture. Nat Rev Genet. 2020 Apr. 16. doi: 10.1038/s41576-020-0227-y, which are incorporated herein by reference in their entireties. Applications described in other sections such as therapeutic, diagnostic, etc. can also be used on the animals herein.

[0935] The compositions, systems, and methods may be used on animals such as fish, amphibians, reptiles, mammals, and birds. The animals may be farm and agriculture animals, or pets. Examples of farm and agriculture animals include horses, goats, sheep, swine, cattle, llamas, alpacas, and birds, e.g., chickens, turkeys, ducks, and geese. The animals may be a non-human primate, e.g., baboons, capuchin monkeys, chimpanzees, lemurs, macaques, marmosets, tamarins, spider monkeys, squirrel monkeys, and vervet monkeys. Examples of pets include dogs, cats horses, wolfs, rabbits, ferrets, gerbils, hamsters, chinchillas, fancy rats, guinea pigs, canaries, parakeets, and parrots.

[0936] In one embodiment, one or more genes may be introduced (e.g., overexpressed) in the animals to obtain or enhance one or more desired traits. Growth hormones, insulin-like growth factors (IGF-1) may be introduced to increase the growth of the animals, e.g., pigs or salmon (such as described in Pursel V G et al., J Reprod Fertil Suppl. 1990; 40:235-45; Waltz E, Nature. 2017; 548:148). Fat-1 gene (e.g., from C. elegans) may be introduced for production of larger ratio of n-3 to n-6 fatty acids may be induced, e.g. in pigs (such as described in Li M, et al., Genetics. 2018; 8:1747-54). Phytase (e.g., from E. coli) xylanase (e.g., from Aspergillus niger), beta-glucanase (e.g., from bacillus lichenformis) may be introduced to reduce the environmental impact through phosphorous and nitrogen release reduction, e.g. in pigs (such as described in Golovan S P, et al., Nat Biotechnol. 2001; 19:741-5; Zhang X et al., elife. 2018). shRNA decoy may be introduced to induce avian influenza resilience e.g. in chicken (such as described in Lyall et al., Science. 2011; 331:223-6). Lysozyme or lysostaphin may be introduced to induce mastitis resilience e.g., in goat and cow (such as described in Maga E A et al., Foodborne Pathog Dis. 2006; 3:384-92; Wall R J, et al., Nat Biotechnol. 2005; 23:445-51). Histone deacetylase such as HDAC6 may be introduced to induce PRRSV resilience, e.g., in pig (such as described in Lu T., et al., PLoS One. 2017; 12:e0169317). CD163 may be modified (e.g., inactivated or removed) to introduce PRRSV resilience in pigs (such as described in Prather R S et al., Sci Rep. 2017 Oct. 17; 7(1):13371). Similar approaches may be used to inhibit or remove viruses and bacteria (e.g., Swine Influenza Virus (SIV) strains which include influenza C and the subtypes of influenza A known as H1N1, H1N2, H2N1, H3N1, H3N2, and H2N3, as well as pneumonia, meningitis and oedema) that may be transmitted from animals to humans.

[0937] In one embodiment, one or more genes may be modified or edited for disease resistance and production traits. Myostatin (e.g., GDF8) may be modified to increase muscle growth, e.g., in cow, sheep, goat, catfish, and pig (such as described in Crispo M et al., PLoS One. 2015; 10:e0136690; Wang X, et al., Anim Genet. 2018; 49:43-51; Khalil K, et al., Sci Rep. 2017; 7:7301; Kang J-D, et al., RSC Adv. 2017; 7:12541-9). Pc POLLED may be modified to induce horlessness, e.g., in cow (such as described in Carlson D F et al., Nat Biotechnol. 2016; 34:479-81). KISSIR may be modified to induce boretaint (hormone release during sexual maturity leading to undesired meat taste), e.g., in pigs. Dead end protein (dnd) may be modified to induce sterility, e.g., in salmon (such as described in Wargelius A, et al., Sci Rep. 2016; 6:21284). Nano2 and DDX may be modified to induce sterility (e.g., in surrogate hosts), e.g., in pigs and chicken (such as described Park K-E, et al., Sci Rep. 2017; 7:40176; Taylor L et al., Development. 2017; 144:928-34). CD163 may be modified to induce PRRSV resistance, e.g., in pigs (such as described in Whitworth K M, et al., Nat Biotechnol. 2015; 34:20-2). RELA may be modified to induce ASFV resilience, e.g., in pigs (such as described in Lillico S G, et al., Sci Rep. 2016; 6:21645). CD18 may be modified to induce Mannheimia (Pasteurella) haemolytica resilience, e.g., in cows (such as described in Shanthalingam S, et al., roc Natl Acad Sci USA. 2016; 113:13186-90). NRAMP1 may be modified to induce tuberculosis resilience, e.g., in cows (such as described in Gao Y et al., Genome Biol. 2017; 18:13). Endogenous retrovirus genes may be modified or removed for xenotransplantation such as described in Yang L, et al. Science. 2015; 350:1101-4; Niu D et al., Science. 2017; 357:1303-7). Negative regulators of muscle mass (e.g., Myostatin) may be modified (e.g., inactivated) to increase muscle mass, e.g., in dogs (as described in Zou Q et al., J Mol Cell Biol. 2015 December; 7(6):580-3).

[0938] Animals such as pigs with severe combined immunodeficiency (SCID) may generated (e.g., by modifying RAG2) to provide useful models for regenerative medicine, xenotransplantation (discussed also elsewhere herein), and tumor development. Examples of methods and approaches include those described Lee K, et al., Proc Natl Acad Sci USA. 2014 May 20; 111(20):7260-5; and Schomberg et al. FASEB Journal, April 2016; 30 (1):Suppl 571.1.

[0939] SNPs in the animals may be modified. Examples of methods and approaches include those described Tan W. et al., Proc Natl Acad Sci USA. 2013 Oct. 8; 110(41):16526-31; Mali P, et al., Science. 2013 Feb. 15; 339(6121):823-6.

[0940] Stem cells (e.g., induced pluripotent stem cells) may be modified and differentiated into desired progeny cells, e.g., as described in Heo Y T et al., Stem Cells Dev. 2015 Feb. 1; 24(3):393-402.

[0941] Profile analysis (such as Igenity) may be performed on animals to screen and identify genetic variations related to economic traits. The genetic variations may be modified to introduce or improve the traits, such as carcass composition, carcass quality, maternal and reproductive traits and average daily gain.

### Kits

[0942] In one aspect, the invention provides kits containing any one or more of the elements disclosed in the above methods and compositions. In one aspect, the invention provides a kit comprising one or more of the components described herein. In one embodiment, the kit comprises the compositions herein and instructions for using the kit. In one embodiment, the kit comprises a vector system and instructions for using the kit. In one embodiment, the kit comprises a delivery system and instructions for using the kit. In one embodiment, the kit comprises a vector system and instructions for using the kit. Elements may be provided individually or in combinations, and may be provided in any suitable container, such as a vial, a bottle, or a tube. The kits may include the ωRNA and optionally an unbound protector strand as described herein. The kits may include the ωRNA with a protector strand bound to at least partially to a reprogrammable spacer portion of the ωRNA sequence (i.e., phRNA). Thus, the kits may include the phRNA in the form of a partially double stranded nucleotide sequence as described here. In one embodiment, the kit includes instructions in one or more languages, for example in more than one language. The instructions may be specific to the applications and methods described herein.

[0943] In one embodiment, a kit comprises one or more reagents for use in a process utilizing one or more of the elements described herein. Reagents may be provided in any suitable container. For example, a kit may provide one or more reaction or storage buffers. Reagents may be provided in a form that is usable in a particular assay, or in a form that requires addition of one or more other components before use (e.g., in concentrate or lyophilized form). A buffer can be any buffer, including but not limited to a sodium carbonate buffer, a sodium bicarbonate buffer, a borate buffer, a Tris buffer, a MOPS buffer, a HEPES buffer, and combinations thereof. In one embodiment, the buffer is alkaline. In one embodiment, the buffer has a pH from about 7 to about 10. In one embodiment, the kit comprises one or more oligonucleotides corresponding to a ωRNA scaffold, reprogrammable sequence for insertion into a vector so as to operably link the ωRNA sequence and a regulatory element. In one embodiment, the kit comprises a homologous recombination template polynucleotide. In one embodiment, the kit comprises one or more of the vectors and/or one or more of the polynucleotides described herein. The kit may advantageously allow to provide all elements of the systems of the invention.

[0944] The invention is further described in the following examples, which do not limit the scope of the invention described in the claims.

[0945] Further embodiments are illustrated in the following Examples which are given for illustrative purposes only and are not intended to limit the scope of the invention.

### EXAMPLES

### Example 1. Engineered IscBs

[0946] Applicants have investigated improvement of IscB compositions by engineering of domains in the IscB polypeptide and engineering ωRNA for increased specificity and/or activity.

IscB Engineered with REC Domains

[0947] The REC helical bundle is involved in RNA stem binding, as shown in FIG. 1A for Cje Cas9. A small REC like insertion, shown in a large IscB (IscB-L) protein in FIG. 1B has compatible join locations that can allow for insertion of CjeCas9 REC domains. As shown in FIG. 2A the Type II Cas9 and the IscB-L have common connections to the RuvC-II domain and to the bridge helix that provide join locations for a REC domain insertion in IscB. FIG. 2B shows example junction positions at or near amino acids 153-160 on Rd8_117. Identification of secondary structures between orthologs can be used to define junctions and identify locations for potential insertions or domain replacements, which, for example can be between beta sheet alignments or loop regions. An example insertion of a Type II-D REC3 domain into IscB is shown in FIG. 3, with the interactions with ωRNA, the guide portion and target DNA depicted.

[0948] The PK-loop of ωRNA clashes with many REC domains, with designed insertion location on the IscB polypeptide having potential to clash sterically with the REC-like ωRNA region (FIG. 4A, 4B). As depicted in FIG. 4C, the highlighted REC-like ωRNA region in ribbon diagram and the clashing portion of the REC like domain can be addressed with approach to remove clashing region and rejoin with a linker. ALphafold2 models show clash free folding for an example Rd8_117 IscB polypeptide with a REC fragment from CjeCas9 inserted. (FIG. 5A, 5B). The insertion of the small region of the CjeCAs9REC in the IscB polypeptide shows a new RNA/DNA hybrid recognizing groove. (FIG. 6) A ribbon diagram of RNaseH insertion in same region of example IscB shows fit, but that may need some rearrangement; this region of IscB can also permit other domain insertions. (FIG. 7).

### IscB TAM Determining Region

[0949] An example IscB ribbon diagram shows 2 TAM determining regions, with the WED/adaptor stabilizer region and Tudor domain region highlighted. (FIG. 9). Strong polar and hydrophobic interactions suggest reduction in TAM length could present challenge in engineering. Large structural diversity exists in both the WED/adaptor stabilizer domain and the tudor core+divergent extensions. (FIG. 11).

### IscB Domain Engineering Strategies

[0950] IscB polypeptide Rd8_117 has 3 key contacts with TAM-proximal DNA (FIG. 12). Considering the IscB structure, some engineering strategies are identified in FIG. 13A-13F. Example IscB polypeptide approaches include full TI domain exchange with an NGG TAM/PAM (13A), RNA interaction-preserving insertions with large IscBs which can include insertion at one linker, two linkers, and/or the tudor lance region which can correspond to Rd8_117 amino acid positions 376-383, 446-448, and 462-486 (13B); exchange of Tudor Lance region of the IscB polypeptide with NGG TAM/PAMs (13C); exchange of Tudor region of the IscB polypeptide with NGG TAM/PAMs (13D); fairly comprehensive insertions or exchange of the IscB polypeptide with domains of a different IscB polypeptide (13E replacement of Rd8_117 domains with Rd8_149 domains) and (13F replacement of Rd8_117 domains with Diverse_7 domains). A ribbon diagram of FnCas9 guide RNA shows circular rerouting of ωRNAs, which provides additional opportunities for engineering. (FIG. 8). IscB polypeptide Rd8_117 comprises a C-terminal helix, shown interacting with nucleotide strand in FIG. 14, another location for potential engineering of the IscB polypeptides.

### Trans-RNA On-Switch and Off-Switch

[0951] The pseudoknot (PK) region of ωRNA can be engineered as a transRNA off-switch. (FIG. 15) As detailed in the application, it is possible to alter base identity of bases in the PK region to engineer a trans RNA off-switch. Similarly, the terminal hairpin region of ωRNA can be engineered as a transRNA on-switch wherein one could modify the structure of the ωRNA, with a portion of the ωRNA supplied in trans as the hairpin is needed for function of the IscB composition. (FIG. 16).

Activity of IscB with Cas9 REC domains

[0952] Applicants confirmed that chimeric IscBs with Cas9 REC domains are functional in vitro. (FIG. 17) Additionally, chimeric IscBs with Cas9 REC domains to extend enforced guide:target duplex are functional in vitro (FIG. 18). The chimeric IscBs with Cas9 REC domains mediate indel formation in human cells (Rd8_117) with FIG. 19 charting % indels for protein/REC insertion for guide 1 and guide 2. REC insertions on the IscB polypeptides destabilize TAM-distal guide mismatches with results of guides with varying mismatches shown in FIG. 20B. A further insertion utilizing 1261 REC in an IscB polypeptide accesses more target sites and improves indel activity in general at varying loci (FIG. 21).

### IscB Polypeptide Engineering and TAM Specificity

[0953] Applicants also investigated how TAM changed with insertion or exchange of various domains/subdomains. FIG. 22A shows weblogos indicating no changes in TAM of example Rd8_117 IscB polypeptide with insertion of full TI domain. The Rd8_117 IscB polypeptide with partial TI domain insertion showed no changes in TAM (FIG. 22B). Rd8_117 IscB polypeptide with Tudor domain insertions or Lance domain insertions shows no changes in TAM (FIG. 22C, 22D) However, only some Lance TIL domain insertions retain same TAM in example Rd8_117 IscB chimeric polypeptide (FIG. 22E); an insertion of Lance_TIL domain can lead to alterations in TAM of example Rd8_117 IscB polypeptide (FIG. 22F). A weblogo of altered TAMs in comparison to TAM from wild-type Rd_117 IscB polypeptide is shown in FIG. 23.

### ωRNA Engineering in IscB Compositions

[0954] ωRNA engineering with Rd8_117 IscB polypeptide shows Rd8_117 can tolerate up to 21 nucleotides truncated from the 3′ end of the ωRNA (FIG. 24A). However, insertions in the nexus pseudoknot of the ωRNA are minimally functional (FIG. 24B-24C). FIG. 24D shows that reduced activity from insertions in the nexus pseudoknot can be rescued by compensating insertions in nexus stem.

Example insertions and polypeptides are provided in Table 2, below.

TABLE 2

| SEQ ID NO: | Description |
|---|---|
| 25194 | Rd8_66_SpyCas9_Hyb_Stab_ins1 |
| | Hyb stabilizer domain from SpyCas9 comprising amino acids 309 to 327 was |
| | inserted starting at amino acid 308 of Rd8_117 polypeptide from Table 1 |
| 25195 | Rd8_117_2089_REC_ins1 |
| | Rec domain from 2089 comprising amino acids 155 to 190, Junction 1 |
| | comprising amino acids 141 to 154, and Junction 2 comprising 191 to 213 |
| | was inserted starting at amino acid 140 of Rd8_117 polypeptide from Table 1 |
| 25196 | Rd8_117_Ace_REC_ins1 |
| | Rec domain 1 from AceCas9 comprising amino acids 155 to 304, Linker 1 |
| | comprising amino acids 305 to 307, Rec domain 2 from AceCas9 comprising |
| | amino acids 308 to 354, Linker 2 comprising 355 to 364, Junction 1 |
| | comprising amino acids 141 to 154, and Junction 2 comprising amino-acids |
| | 365 to 387 was inserted starting at amino acid 140 of Rd8_117 polypeptide from Table 1 |
| 25197 | Rd8_117_Cas9_665_REC_ins1 |
| | Rec domain from Cas9 comprising amino acids 155 to 298, Junction 1 comprising |
| | amino acids 141 to 154, and Junction 2 comprising 299 to 321 was inserted |
| | starting at amino acid 140 of Rd8_117 polypeptide from Table 1 |
| 25198 | Rd8_117_Cas9_971_1_REC_ins1 |
| | Rec domain from Cas9 comprising amino acids 155 to 313, Junction 1 comprising |
| | amino acids 141 to 154, and Junction 2 comprising 314 to 336 was inserted |
| | starting at amino acid 140 of Rd8_117 polypeptide from Table 1 |
| 25199 | Rd8_117_Cas9_971_2_REC_ins1 |
| | Rec domain from Cas9 comprising amino acids 155 to 318, Junction 1 comprising |
| | amino acids 141 to 154, and Junction 2 comprising 319 to 341 was inserted |
| | starting at amino acid 140 of Rd8_117 polypeptide from Table 1 |
| 25200 | Rd8_117_Cas9_1079_1_REC_ins1 |
| | Rec domain from Cas9 comprising amino acids 155 to 259, Junction 1 comprising |
| | amino acids 141 to 154, and Junction 2 comprising 260 to 282 was inserted |
| | starting at amino acid 140 of Rd8_117 polypeptide from Table 1 |
| 25201 | Rd8_117_Cas9_1079_2_REC_ins1 |
| | Rec domain from Cas9 comprising amino acids 155 to 258, Junction 1 comprising |
| | amino acids 141 to 154, and Junction 2 comprising 259 to 281 was inserted |
| | starting at amino acid 140 of Rd8_117 polypeptide from Table 1 |
| 25202 | Rd8_117_Cas9_1079_3_REC_ins1 |
| | Rec domain from Cas9 comprising amino acids 155 to 265, Junction 1 comprising |
| | amino acids 141 to 154, and Junction 2 comprising 266 to 288 was inserted |
| | starting at amino acid 140 of Rd8_117 polypeptide from Table 1 |
| 25203 | Rd8_117_Cas9_1079_4_REC_ins1 |
| | Rec domain from Cas9 comprising amino acids 155 to 259, Junction 1 comprising |
| | amino acids 141 to 154, and Junction 2 comprising 260 to 282 was inserted |
| | starting at amino acid 140 of Rd8_117 polypeptide from Table 1 |
| 25204 | Rd8_117_Cas9_1261_REC_ins1 |
| | Rec domain from Cas9 comprising amino acids 155 to 301, Junction 1 comprising |
| | amino acids 141 to 154, and Junction 2 comprising 302 to 324 was inserted |
| | starting at amino acid 140 of Rd8_117 polypeptide from Table 1 |
| 25205 | Rd8_117_Cdi_REC_ins1 |
| | Rec domain 1 from CdiCas9 comprising amino acids 155 to 292, Linker 1 comprising |
| | amino acids 293 to 295, Rec domain 2 from CdiCas9 comprising amino acids 296 to 343, |
| | Linker 2 comprising 344 to 353, Junction 1 comprising amino acids 141 to 154, and |
| | Junction 2 comprising amino-acids 354 to 376 was inserted starting at amino acid |
| | 140of Rd8_117 polypeptide from Table 1 |
| 25206 | Rd8_117_Cje_REC_ins1 |
| | Rec domain 1 from CjiCas9 comprising amino acids 155 to 276, Linker 1 comprising |
| | amino acids 277 to 279, Rec domain 2 from CjiCas9 comprising amino acids 280 to 323, |
| | Linker 2 comprising 324 to 333, Junction 1 comprising amino acids 141 to 154, |
| | and Junction 2 comprising amino-acids 334 to 356 was inserted starting at amino |
| | acid 140of Rd8_117 polypeptide from Table 1 |
| 25207 | Rd8_117_Fno_REC_ins1 |
| | Rec domain from Cas9 comprising amino acids 155 to 301, Junction 1 comprising |
| | amino acids 141 to 154, and Junction 2 comprising 302 to 324 was inserted |
| | starting at amino acid 140 of Rd8_117 polypeptide from Table 1 |
| 25208 | Rd8_117_Fno_REC_ins2 |
| 25209 | Rd8_117_Fno_REC_ins3 |
| 25210 | Rd8_117_Nme1_HNH_swap1 |
| 25211 | Rd8_117_Nme1_REC_ins1 |
| 25212 | Rd8_117_Nme1_RuvCIII_ins1 |
| 25213 | Rd8_117_Rd8_66_REC_ins1 |
| 25214 | Rd8_117_Sau_REC_ins1 |
| 25215 | Rd8_117_Spy_REC_ins1 |
| 25216 | Rd8_117_SpyCas9_Hyb_Stab_ins1 |
| 25217 | Rd8_117_Sth_HNH_swap1 |
| 25218 | Rd8_117_Sth_REC_ins1 |
| 25219 | Rd8_117_REC_665_TI |
| 25220 | Rd8_117_REC_1079_1_TI |
| 25221 | Rd8_117_REC_1079_2_TI |
| 25222 | Rd8_117_REC_1079_3_TI |
| 25223 | Rd8_117_REC_2089_TI |
| 25224 | Rd8_117_REC_cA2_TI |
| 25225 | Rd8_117_REC_Diverse_7_TI |
| 25226 | Rd8_117_REC_Rd8_149_TI |
| 25227 | Rd8_117_REC_Cas9_665_tudor_lance |
| 25228 | Rd8_117_REC_Cas9_971_tudor |
| 25229 | Rd8_117_REC_Cas9_1079_1_tudor_lance |
| 25230 | Rd8_117_REC_Cas9_1079_1_tudor |
| 25231 | Rd8_117_REC_Cas9_1079_2_tudor_lance |
| 25232 | Rd8_117_REC_Cas9_1079_2_tudor |
| 25233 | Rd8_117_REC_Cas9_1079_3_tudor_lance |
| 25234 | Rd8_117_REC_Cas9_1079_3_tudor |
| 25235 | Rd8_117_REC_Cas9_1261_tudor_lance |
| 25236 | Rd8_117_REC_Cas9_1261_tudor |
| 25237 | Rd8_117_REC_ChlorlscB_tudor_lance |
| 25238 | Rd8_117_REC_ChlorlscB_tudor |
| 25239 | Rd8_117_REC_Diverse_7_NTS |
| 25240 | Rd8_117_REC_Diverse_7_REC |
| 25241 | Rd8_117_REC_Diverse_7_TI_L_tudor_lance |
| 25242 | Rd8_117_REC_Diverse_7_TI_L |
| 25243 | Rd8_117_REC_Diverse_7_TI_L1 |
| 25244 | Rd8_117_REC_Diverse_7_TI_L2 |
| 25245 | Rd8_117_REC_Diverse_7_TI_restore_WED |
| 25246 | Rd8_117_REC_Rd8_127_tudor_lance |
| 25247 | Rd8_117_REC_Rd8_149_NTS_1 |
| 25248 | Rd8_117_REC_Rd8_149_NTS_2 |
| 25249 | Rd8_117_REC_Rd8_149_TI_L |
| 25250 | Rd8_117_REC_Rd8_149_TI_restore_WED |
| 25251 | Rd8_117_REC_Rd8_149_tudor_nontudor |
| 25252 | Rd8_117_REC_Rd8_149_WED_ins |
| 25253 | Rd8_117_REC_Rd8_149_WED_swap |
| 25254 | Rd8_117_REC_644_2_tudor_ext |
| 25255 | Rd8_117_REC_644_2_tudor_lance |
| 25256 | Rd8_117_REC_644_2_tudor |
| 25257 | Rd8_117_REC_2089_tudor_lance |
| 25258 | Rd8_117_REC_2089_tudor |
| 25259 | Rd8_117_REC_cA2_tudor_lance |
| 25260 | Rd8_117_REC_cA2_tudor_swap |
| 25261 | Rd8_117_REC_Cas9_665_tudor |
| 25262 | Rd8_117_REC_SpCas9_RuvC_loop |
| 25263 | iscb_diverse_7-iscb_rd4_7-hrna-in-pab0001-bpii-backbone |
| 25264 | iscb_diverse_7-iscb_rd4_7-in-phs0728-pcdna3-1-cmv-sv40-nls-bamhi-nucleoplasmin-nls-3xha |
| 25265 | iscb_pathogens_14-quisiscb-hrna-pab0001-bpii-backbone |
| 25266 | iscb_pathogens_14-quisiscb-in-phs0728-pcdna3-1-cmv-sv40-nls-bamhi-nucleoplasmin-nls-3xha |
| 25267 | iscb-rd8_149-omegarna-in-pab0001 |
| 25268 | phs0902-iscb_eukaryotic_1-ite-in-phs0728 |
| 25269 | phs0928-eukaryotic-1-hrna-pab0001-b06-crrna-bpii-backbone |
| 25270 | phs1085-ii-d_1-sgrna-in-pab0001-bpii-backbone |
| 25271 | phs1087-ii-d_5-alt-sgrna-in-pab0001-bpii-backbone |
| 25272 | phs1089-ii-d_7-alt-sgrna-in-pab0001-bpii-backbone |
| 25273 | phs1107-ii-d_1-protein-in-phs0728-pcdna3-1-cmv-sv40-nls-bamhi-nucleoplasmin-nls-3xha |
| 25274 | phs1108-ii-d_5-protein-in-phs0728-pcdna3-1-cmv-sv40-nls-bamhi-nucleoplasmin-nls-3xha |
| 25275 | rd8_149-in-phs0728-pcdna3-1-cmv-sv40-nls-bamhi-nucleoplasmin-nls-3xha |

### Example 2. Characterization of Rd8 117 IscB

[0955] Applicants took biochemical measurements of Rd8_117, Rd8_66 and the chimeric Rd8_117+Cas9 1079_1 REC insertion, with varying RNA:protein molar ratio from 4:1 to 0.25:1 (FIG. 96A). 1 uM protein was used in a buffer solution of 20 mM Tris ph 7.5, 5 mM MgCL2 and 50 mM NaCl with varying amounts of protein shows in vitro cleavage improves up to 4:1 molar ratio of RNA:protein. Varying temperature with measurement of activity of IscBs indicate Rd*_66 and Rd8_117 are meso-/thermophilic. RNA modifications also show modulation of activity at different temperatures using example chimeric IscB Rd8_117 with 1079_1 REC insertion (FIG. 96C). Cleavage kinetics were measured using 1 uM protein in the same buffer, with cleavage kinetics measured of the example chimeric IscB with REC insert. (FIG. 96D) Rd8_117 with REC inserts, Rd8_117+1079_1 REC insert or Rd8_117+1079_2 REC insert are functionally delivered by engineered Virus Like Particles (eVLPs) to HEK293 cells, with percent indels measured by 0. 0.005. 0.01. 0.05. 0.2. 1. 2 or 5 μL of eVLP delivered. (FIG. 97). Rd8_117+1079_1 REC is ˜1/10 as efficient as plasmid transfection with highest dose.

### Example 3. Chimeric IscB Base Editing

[0956] Applicants conducted an initial test of adenine ABE8 base editors with Rd8_117 IscBs, showing compatibility with ABE8 base editors. (FIG. 98A, 98B). Two guides were tested at CTNNB1 and CA2, and one guide was tested at DYNCJH1 and HPRT1, with percent editing measured at A positions noted on x-axis. (FIG. 98B). Chimeric IscB with 1079_1 REC insert shows improved adenine base editing at the same loci tested for the unmodified IscB ABE8 base editor. (FIG. 98C). The editing window for IscB adenine base editing is wide compared to Cas9 editing outcomes. Without being bound by theory it may be that the non-targeting sequence in the R loop is more exposed in the IscB protein than in Cas9.

### Example 4. ωRNA Modifications

[0957] Applicants undertook study of ωRNA modifications in example IscB polypeptides. Initial Rd8_66 and Rd8_117 demonstrate detectable binding of DNA targeting of IPTG1 via PAM-SCANR (FIG. 99A); with Rd8_66 indel formation appears affected by the inclusion of different structures of the ωRNA at VEGFA1 loci, including hairpin 3, hairpin 2+3, 3′ truncation, hairpin 3+3′ truncation and hairpin 2+3+3′ truncation studied (FIG. 99B). Using Rd8_66, a 3′ 20 bp truncation was used to measure indel rates measurement across guides. (FIG. 100). FIG. 101 includes a schematic of engineered ωRNA that can be developed for trans on-switch and trans off-switch.

[0958] Rd8_117 cleavage activity measured with ωRNA 3′ truncations indicated ωRNA tolerates up to 21 bp 3′ truncations (FIG. 102A, 102B) but not 5′ truncations (FIG. 102C, 102D).

[0959] Rd8_117 nexus loop reprogramming was explored (FIG. 103A), with 5′FAM/3′Cy5 labeled target, nexus loop modifications shown in FIG. 103B. Nexus pseudoknot insertion variants relative to WT ωRNA are indicated in FIG. 104A, with the cleavage activity of ωRNA variants shown in FIG. 104B. Further depictions of ωRNA folding and effects of 21 bp 3′ truncation and relative to full ωRNA with Gibbs free energy measurements are indicated in FIG. 105.

[0960] The addition of the last 35 base pairs of Rd8_117 ωRNA can restore activity to the Rd8_117 35 bp 3′ truncated ωRNA (FIG. 106A). FIG. 106B indicates 35 bp transRNA is active with multiple guides using example IscB Rd8_117 protein or Rd8_117+1079 REC insertion chimeric IscB. Indications of −21 or −35 guide is a 3′ truncation of 21 bp or 35 bp; similarly indications of −21 or −35 transRNA is a template consisting of last 3′ 21 bp or 35 bp. Images from Cy5 channelRd8_117 ωRNA scaffold structure with truncations indicated. Trans-on RNA was shown to restore activity in mammalian cells, (FIG. 107A). Construct type measured for % indel indicated as follows: WT is the unmodified Rd8_117 IscB and 1079 indicates for results of Rd8_117 IscB with Cas 9 1079_1 REC insertion. A full transRNA=last 35 bp of Rd8_117 ωRNA scaffold; +G is addition of G after U6 and before the transRNA sequence; mini transRNA=14 bp that span distance from −35 from 3′ end to −21 from 3′ end. Measurements made for DYNCHI (107A) and HPRT1 (B).

### Example 5. Chimeric IscB Mutations

[0961] Applicants tested mutations and measured activity improvement relative to Rd8_117+Cas9_1079_1_REC insertion without mutations. The chimeric IscB polypeptide subjected to further mutations for gain of function evaluation has the following sequence: Rd8_117_Cas9_1079_1:

(SEQ ID NO: 25278)
MRYVYVLDVDGKPLMPTCRFGKVRRMLKSGQAKAVDTLPFTIQLTYKPRT
RILQPVTLGQDPGRTNIGMAAVRFDGKELGRFHCITRNKEIPKLMADRMA
ARKASRRGERLARKRLARKLHTTAKHLNGRILPGCSEPIAVKDIINTESR
FNNRILTKCKVCGKNTPLRRNVRELLLENIVRFLPLESELKETLKRTILE
GQQGNINKLFRKLKFNQKDWPGKNLTDIAKNKLPGRLPFCKEHFAENEKF
TTIEKSTFRLTPTATQLLRTHINLFRKLSGILPVTDVAVELNKFAFMQLD
NPEMKKREIDFCHGPLCGTGGLEAAVKEQQDGKCLLCGKESIGHYHHIVP
RSRRGSNTIANIAGLCPKCHELVHKDADTAESLTEMKTGLMKKYGGTSVL
NQIIPKLVETLADLFPGHFHVTNGWNTKEFREKHHLEKDHDVDAYCIACS
HLKPEETLVETEPFEILQFRKHNRAIIHHQTERTYKLDGVTVAKNRKKRM
EQKTDSLEDWYVDMAKEHGKTQADAMRSRLTVIKSTRYYNTPGRMMPGTV
FLYEGKRYVMTGQITNGKYYRAYGQEKRNFPAVKVRILTKNTGLVFVA.

[0962] Mutations can be selected by investigating the natural distribution of amino acids at each position and sampling the distributions for desired changes. For example, if additional binding to DNA is desired in different regions, K, R, or H substitutions were identified by identifying positions that naturally tolerate K, R, H based on a multiple sequence alignment. FIGS. 108-115 show the different mutations in affecting various allosteric mechanisms involved with DNA binding and protein packing as well as indicating fold improvement in IscB activity with particular mutations.

TABLE 3
Mutations in Rd8_117 Cas9 1079_1 REC insertion and
Activity Fold Improvement Averaged over two guides

| | FOLD INCREASE | |
|---|---|---|
| MUTATION | ACTIVITY | Notes |
| Q60I | 1.7435468168893, | hydrophobic repacking of |
| | | RuvC |
| A288V | 2.07450864829255 | hydrophobic repacking of |
| | | RuvC |
| G395R | 1.1227821869606 | |
| W425R | 1.64932718864797 | hydrophobic repacking of |
| | | RuvC |
| T358R | 1.16183142694273 | enhancing existing |
| | | DNA/RNA channel |
| S325R | 2.07347940926662 | |
| M500K | 1.27873398239969 | |
| E409R | 2.17304365761619 | extending the DNA/RNA |
| | | duplex channel |
| D413K | 2.22701849334025 | extending the DNA/RNA |
| | | duplex channel |
| P405R | 1.84352340394802 | extending the DNA/RNA |
| | | duplex channel |
| E137K | 1.69421379430915 | enhancing existing |
| | | DNA/RNA channel |
| T147R | 1.03058538524008 | |
| L260K | 1.2254347524772 | |
| E308R | 1.47748789689566 | extending the DNA/RNA |
| | | duplex channel |
| L467R | 1.92783745258766 | |
| N66H | 1.6802402145208 | new non-targeting strand |
| | | channel |
| T65K | 1.35060670006904 | |
| I85E | 1.81117812402217 | |
| I85R | 1.85091381825009 | new non-targeting strand |
| | | channel |
| E90R | 1.20650321021699 | |
| E501K | 0.084486229388418 | enhancing existing |
| | | DNA/RNA channel |
| M500K | 1.09694754180498 | enhancing existing |
| | | DNA/RNA channel |
| S352H | 1.74258630946715 | enhancing existing |
| | | DNA/RNA channel |
| K93D | 1.35540572541723 | |
| T561R | 1.85242173829211 | altering unwinding activity |
| E576R | 2.04892696341647 | altering unwinding activity |
| G417K | 1.9385824020467 | extending the DNA/RNA |
| | | duplex channel |
| L291R | 2.12332880739941 | extending the DNA/RNA |
| | | duplex channel |
| V490K | 1.96187720091516 | non-specific DNA binding |
| | | mutations |
| V490R | 2.04413299842519 | non-specific DNA binding |
| | | mutations |
| G489K | 1.8661312489374 | non-specific DNA binding |
| | | mutations |
| T481R | 1.76169099892367 | non-specific DNA binding |
| | | mutations |
| T536R | 2.0215905621095 | non-specific DNA binding |
| | | mutations |
| I533K | 2.22498173347667 | non-specific DNA binding |
| | | mutations |
| T484K | 2.04784709609413 | non-specific DNA binding |
| | | mutations |
| N566R | 1.83160206355917 | non-specific DNA binding |
| | | mutations |
| Y538R | 1.42813000040608 | non-specific DNA binding |
| | | mutations |
| H271I | 1.00520784107492 | hydrophobic repacking of |
| | | RuvC |

[0963] Applicants are further exploring combination mutations that consider limited improving mutations from each of the major allosteric mechanisms involved in the cleavage process. Applicants plan on improving activity in multiple distinct networks, aiming to achieve a better level of independence between the mutations, thereby increasing their combinability. Table 4 below provides examples of mutations that will be tested, relative to Rd8_117_Cas9_1079_1.

TABLE 4
Combinations of Mutations

| Description | Mutations | | | | | |
|---|---|---|---|---|---|---|
| Pack | Q60I | W425R | A288V | | | |
| Pack_del1 | | W425R | A288V | | | |
| Pack_del2 | Q60I | | A288V | | | |
| Pack_del3 | Q60I | W425R | | | | |
| Distal | P405R | E409R | E308R | L291R | | |
| Distal_del1 | | E409R | E308R | L291R | | |
| Distal_del2 | P405R | | E308R | L291R | | |
| Distal_del3 | P405R | E409R | | L291R | | |
| Distal_del4 | P405R | E409R | E308R | | | |
| Blend | I85R | E576R | E137K | I533K | E409R | A88V |
| Blend_del1 | | E576R | E137K | I533K | E409R | A88V |
| Blend_del2 | I85R | | E137K | I533K | E409R | A88V |
| Blend_del3 | I85R | E576R | | I533K | E409R | A88V |
| Blend_del4 | I85R | E576R | E137K | | E409R | A88V |
| Blend_del5 | I85R | E576R | E137K | I533K | | A88V |
| Blend_del6 | I85R | E576R | E137K | I533K | E409R | |
| P1 | E409R | E576R | | | | |
| P2 | E409R | A288V | | | | |
| P3 | E409R | I533K | | | | |
| P4 | E409R | I85R | | | | |
| P5 | E409R | E137K | | | | |
| P6 | P405R | E576R | | | | |
| Unwind | T561R | E576R | | | | |
| Stabilize | E137K | S352H | | | | |

### Example 6. Natural Diversity-Inspired Engineering of OrufIscB for High Efficiency Genome Editing

[0964] Applicants sought to increase the effective guide length by introducing REC domains from Cas9s into OrufIscB. SpCas9 has been shown to effectively use the first 20 bp of the guide sequence²⁶⁶, which is also protected by the protein when bound to target DNA^{261,262}. In contrast, superimposing the AlphaFold2 structure of OrufIscB onto cryo-EM structures of the OgeuIscB ternary complex^{261,262} suggests that only about 16 bp of the guide:target heteroduplex are protected by IscB. Applicants therefore reasoned that increasing the surface area of protein that could interact with the guide:target heteroduplex could increase the effective guide length. Additionally, the Cas9 REC domain, in particular the REC2 and REC3 subdomains, has been shown to be involved in PAM-distal guide:target heteroduplex mismatch detection in SpCas^{9264,265} in addition to target unwinding and interaction. Applicants hypothesized that an inserted REC domain may confer mismatch detection to an extended guide as well.

[0965] To determine where to insert REC domains in the OrufIscB scaffold, Applicants performed a multiple sequence alignment of several IscB and Cas9 proteins, and observed homology at sites flanking the REC domain of Cas9s and REC-like insert of IscBs, in particular between REC-containing IscBs and the recently identified Type II-D Cas9s²¹⁵, which are the closest relatives of IscB (FIG. 116). Notably, despite previous observations that the REC domain of Cas9 is generally not conserved²⁶⁸⁻²⁷⁴, Applicants found that the small REC domains in Type II-D Cas9 REC domains share several particularly conserved residues (FIG. 116), which are also shared by TbaIscB, the founding member of the Cas9 family²¹⁵, and CzcbIscB, suggesting a common origin of REC domains despite extant diversity. Given the homology of the sites surrounding REC domains, Applicants reasoned that Cas9 REC domains could be inserted into the homologous location in OrufIscB. Applicants constructed OrufIscB-REC domain chimeras with 183 REC domains derived largely from the Type II-D Cas9s, as well as several from Cas9s commonly used for genome editing such as SpCas9 and SaCas9, and some IscBs with divergent REC-like insertions.

[0966] To assess the ability of these REC domain insertions to increase guide length and retain high dsDNA cleavage efficiency, Applicants tested each variant using an IVTT target/guide screen, in which Applicants included a library of 100 ωRNAs targeting human genomic sequences and a corresponding library of targets including every possible mismatch and increasing numbers of TAM-distal mismatches to assess the effective guide length (FIG. 117A). Applicants measured the normalized read count of cleaved products derived from each variant in the target library and compared to the wild-type OrufIscB. From this screen, Applicants identified 54 REC insertions that exhibited decreased cleavage with 5, 6 and 7 TAM-distal mismatches relative to wild-type OrufIscB, while still maintaining appreciable on-target efficiency (see Methods) (FIG. 117B). Applicants selected these candidates for further validation in human cells and found that several improved the on-target activity of OrufIscB (FIG. 118). In particular, Applicants identified the REC domain from NbaCas9-1, which displayed the best improvement on average across 6 tested guides (FIG. 118). Applicants further compared the activity of wild-type OrufIscB and OrufIscB with the NbaCas9-1 REC domain and found that the chimeric protein improved activity up to 20-fold for some guides, as well as displayed activity at several sites that could not be targeted by the wild-type protein (FIG. 117C). Applicants assessed the optimal guide length of the chimeric OrufIscB with the NbaCas9-1 REC domain insertion at 4 target sites in the human genome and compared the resulting distribution with wild-type OrufIscB. Applicants found that the chimeric version exhibited optimal activity with ˜19-20 bp guides (FIG. 119), suggesting that the insertion of the NbaCas9-1 REC domain skewed the optimal guide length to be longer. Applicants therefore continued with the OrufIscB including the NbaCas9-1 REC insertion, which Applicants termed enOrufIscB-v1, for further optimization.

[0967] Based on natural variation at homologous sites across the diversity of IscBs at positions likely contacting target DNA or ωRNA, Applicants selected 38 amino acid changes and tested them on top of enOrufIscB-v1. Applicants found that most variants improved activity relative to enOrufIscB-v1 across 2 tested guides (FIG. 117D), illustrating the utility of natural variant-guided rational engineering. From these, Applicants selected 3 mutants at different locations in the predicted structure of OrufIscB, as Applicants hypothesized that improvements to DNA binding kinetics by different domains may act synergistically to facilitate enhanced DNA interaction (FIG. 117E). Applicants tested all possible combinations of these 3 mutants, including single, double and triple mutants, at a panel of 12 sites and found that the triple mutant exhibited the best improvement in activity relative to enOrufIscB-v1 and exhibited indel rates up to 45% for some sites (FIG. 117F). Applicants therefore termed this enOrufIscB-v2.

Application of enOrufIscB-v2 as a Versatile Genome Interrogation Tool

[0968] Although genome editing has traditionally relied upon induction of double-stranded breaks (DSBs) and repair of break sites to generate genomic edits, DSBs can cause adverse effects such as chromosomal translocations²⁶⁶ and growth arrest due to activation of p53-mediated DNA damage response²⁵⁸. Therefore, genome modification platforms such as base editing245, prime editing²⁴⁶, and epigenome editing^{76,78,217,275} that do not require DSBs, are promising therapeutic modalities for avoiding such undesired outcomes. As both base editing and transcriptional repression systems have already demonstrated positive preclinical results^{76,78,217,276} and are desirable for conducting in vivo screens, Applicants sought to further develop these platforms for in vivo application using enOrufIscB-v2.

[0969] Given its compact size, enOrufIscB-v2 fused to the required effector domains for base editing and transcriptional repression along with the corresponding ωRNA can be packaged in a single AAV genome for therapeutic delivery (FIG. 120A). Applicants set out to develop this platform by first assessing the compatibility of enOrufIscB-v2 with these genome editing modalities. Applicants began by fusing enOrufIscB-v2 with base editing enzymes using off-the-shelf construct designs optimized for SpCas9. For adenine base editing, Applicants used ABE8e²⁷⁶, which was optimized using phage-assisted continuous evolution. Applicants transfected this construct in HEK293FT cells along with 10 guides containing adenines at a variety of positions, to simultaneously assess the editing window for each base editor. Applicants found that enOrufIscB-v2-ABE was capable of efficient base editing at all sites tested with varying efficiencies roughly corresponding to the efficiency of indel generation at the same sites by cleavage-competent enOrufIscB-v2 (FIG. 120B). The editing window was approximately at positions 3-17, counted from the 5′ end of the guide sequence.

[0970] Applicants then developed a transcriptional repression system using enOrufIscB-v2. Applicants fused enOrufIscB-v2 with the DNMT3A and DNMT3L DNA methylation writers and a KRAB transcriptional repression domain, again using an off-the-shelf design originally optimized for SpCas9 (CRISPRoff-v2.1)²⁷⁷, and termed this system OMEGAoff. Applicants transfected OMEGAoff in HEK293FT cells with guides targeting the promoter regions of several clinically relevant genes, such as FABP4, using previously determined rules for relative positioning to the transcription start site^{76,88,89,258}. Applicants found that OMEGAoff was capable of repressing transcription of all targeted genes to similar levels as CRISPRoff-v2.1 as measured by qPCR (FIG. 120C). Together, these results demonstrate the flexibility of enOrufIscB-v2 to mediate diverse genome interrogation modalities. Further, the mechanistic similarities between IscB and Cas9 enable straightforward construct design using systems previously optimized for Cas9.

Materials and Methods Associated with Sections 3.8-3.11

### Cell-Free Transcription/Translation TAM Interference Assay

[0971] IscB protein sequences were human codon optimized using the GenScript codon optimization tool. IscB genes and ωRNA scaffolds were custom synthesized by Twist Biosciences, and transcription/translation templates were generated by PCR from custom synthesis products. Cell-free transcription/translation reactions were carried out using a PURExpress In Vitro Protein Synthesis Kit (NEB) as per the manufacturer's protocol with half-volume reactions, using 75 ng of template for the protein of interest, 125 ng of template for the corresponding ωRNA with a guide targeting the TAM library and 25 ng of TAM library plasmid. Reactions were incubated at 37° C. for 4 hours, then quenched by placing at 4° C. or on ice and adding 10 g RNase A (Qiagen) and 8 units Proteinase K (NEB) each followed by a 5 min incubation at 37° C. DNA was extracted by PCR purification and adaptors were ligated using an NEBNext Ultra II DNA Library Prep Kit for Illumina (NEB) using the NEBNext Adaptor for Illumina (NEB) as per the manufacturer's protocol. Following adaptor ligation, cleaved products were amplified specifically using one primer specific to the TAM library backbone and one primer specific to the NEBNext adaptor with a 12-cycle PCR using NEBNext High Fidelity 2×PCR Master Mix (NEB) with an annealing temperature of 63° C., followed by a second 18-cycle round of PCR to further add the Illumina i5 adaptor. Amplified libraries were gel extracted, quantified by qPCR using a KAPA Library Quantification Kit for Illumina (Roche) on a StepOne Plus machine (Applied Biosystems/Thermo Fisher Scientific) and subject to single-end sequencing on an Illumina MiSeq with Read 1 80 cycles, Index 1 8 cycles and Index 2 8 cycles. TAMs were extracted and enrichment score for each PAM was calculated by filtering for all TAMs present more than once and normalizing to the TAM frequency in the input library subject to the same in vitro transcription/translation and quenching reactions. A position weight matrix based on the enrichment score was generated and weblogos were visualized based on this position weight matrix using a custom Python script.

### Mammalian Cell Culture and Transfection

[0972] Mammalian cell culture experiments were performed in the HEK293FT line (Thermo Fisher) grown in Dulbecco's Modified Eagle Medium with high glucose, sodium pyruvate, and GlutaMAX (Thermo Fisher), additionally supplemented with 1× penicillin-streptomycin (Thermo Fisher), 10 mM HEPES (Thermo Fisher), and 10% fetal bovine serum (VWR Seradigm). All cells were maintained at confluency below 80%.

[0973] All transfections were performed with Lipofectamine 3000 (Thermo Fisher). Cells were plated 16-20 hours prior to transfection to ensure 90% confluency at the time of transfection. For 96-well plates, cells were plated at 20,000 cells/well, and for 24-well plates, cells were plated at 100,000 cells/well. For each well on the plate, transfection plasmids were combined with 2 μL of P3000 solution per every 1 g DNA and OptiMEM I Reduced Serum Medium (Thermo Fisher) to a total of 25 μL. Separately, 23 μL of OptiMEM was combined with 2 μL of Lipofectamine 2000. Plasmid and Lipofectamine solutions were then combined and pipetted onto cells.

### Mammalian Genome Editing

[0974] ωRNA scaffold backbones were cloned into a pUC19-based human U6 expression backbone by Gibson Assembly. Human codon-optimized IscB genes were cloned into a CMV expression backbone by Gibson assembly using 2× Gibson Assembly Master Mix (NEB) to generate pCMV-SV40 NLS-IscB protein-nucleoplasmin NLS-3×HA constructs. For initial testing, 12-guide libraries were cloned in a pool mixing primers to add each of the 12 guides in in a given pool at equimolar ratios, and ωRNA scaffold backbones were subject to whole plasmid amplification with guide primers annealing to the U6 promoter and a second primer annealing to the start of the ωRNA scaffold using Phusion Flash High-Fidelity 2× Master Mix (Thermo Fisher Scientific). PCR products were gel extracted and eluted in 30 uL, then blunt-end ligated to circularize by addition of 5 units T4 PNK (NEB), 200 units T4 DNA Ligase (NEB) and final 1× T4 DNA Ligase Buffer (NEB) and incubation for 1.5 h at room temperature prior to transformation in Stbl3 chemically competent E. coli (NEB). For individual guide constructs, oligos with appropriate overhangs were synthesized by Genewiz, annealed and phosphorylated using T4 PNK (NEB) and cloned into ωRNA backbones by restriction-ligation cloning. Human codon-optimized IscB genes were cloned into a CMV expression backbone by Gibson assembly using 2× Gibson Assembly Master Mix (NEB) to generate pCMV-SV40 NLS-IscB protein-nucleoplasmin NLS-3×HA constructs.

[0975] Prior to testing individual guides, each tested IscB protein was screened for activity in HEK293FT using a pool of 12 guides cloned as described. For this 12-guide pooled initial screening of IscB proteins, 800 ng protein expression construct and 800-1200 ng of the corresponding guide pool with corresponding ωRNA scaffold were transfected in one well of a 24-well plate as described. After 60-72 hours, genomic DNA was harvested by washing the cells once in 1×DPBS (Sigma Aldrich) and dry trypsinizing cells using TrypLE (Thermo Fisher Scientific). Trypsinized cells were collected in 1 mL 1×DPBS and pelleted by centrifugation at 300×g at 4° C. for 5 min. The supernatant was removed and cells were resuspended in 50 uL QuickExtract DNA Extraction Solution (Lucigen) and cycled at 65° C. for 15 min, 68° C. for 15 min then 95° C. for 10 min to lyse cells. 2.5 μL of lysed cells were used as input into each PCR reaction. Amplification of each region targeted by a guide in a given guide pool was performed individually.

[0976] For individual guide sequences, 100 ng guide/ωRNA expression plasmid and 100 ng protein expression plasmid were transfected in each of 4 wells as biological replicates in a 96-well plate for each guide condition as described. After 60-72 hours, genomic DNA was harvested by washing the cells once in 1×DPBS (Sigma Aldrich) and adding 50 uL QuickExtract DNA Extraction Solution (Lucigen). Cells were scraped from the plates to suspend in QuickExtract and cycled at 65° C. for 15 min, 68° C. for 15 min then 95° C. for 10 min to lyse cells. 2.5 μL of lysed cells were used as input into each PCR reaction.

[0977] For library amplification, target genomic regions were amplified and with a 12-cycle PCR using NEBNext High Fidelity 2×PCR Master Mix (NEB) with an annealing temperature of 63° C. for 15 s, followed by a second 18-cycle round of PCR to add Illumina adapters and barcodes. The libraries were gel extracted and subject to single-end sequencing on an Illumina MiSeq with Read 1 300 cycles, Index 1 8 cycles, Index 2 8 cycles. Insertion/deletion (indel) frequency was analyzed using CRISPResso2²¹², with a quantification window center of −9 and a window size of 6 based on a previous analysis of IscB cleavage patterns²¹⁵. To eliminate noise from PCR and sequencing error only indels with at least 2 reads or more than 1 base inserted or deleted were counted towards reported indel frequencies. For 12-guide pooled screens, read alignments were further inspected manually for presence of “true” indels to select candidates for validation. For individual guide/ωRNA experiments, to assess statistical significance, 2-tailed T-tests were performed using non-targeting guide/ωRNA conditions as a negative control.

### Cell Free Transcription-Translation Mismatch Tolerance Assay

[0978] The target library was designed by selecting 100 random sites from coding sequences in the human genome (hg38 assembly) adjacent to ATAAA TAMs. Target sites were selected to avoid homopolymeric sequences of 4 or more Ts or Gs to avoid guides with potential termination signals for later use with PolIII promoters and those with potential to form G quadruplexes. Targets were also selected to have an edit distance of at least 3 away from all other targets in the TAM-proximal 7 bp, and at least edit distance of 10 in total. All possible single mismatches for each target were then generated, and progressive mismatch targets were also generated by selecting 8 sequences each with TAM-distal mismatches ranging from 2 to 7 bp at the 5′ end of the target, with at least an edit distance of 8 from any of the non-template original targets in the library. 316 random sequences with an edit distance of at least 10 from all other library members were added as negative controls. ION barcodes were added to each individual target for distinguishing target identity after cleavage. The library was synthesized by GenScript and cloned into a pUC19 vector by Gibson Assembly.

[0979] An associated guide library was synthesized by IDT and cloned into a backbone containing the OrufIscB ωRNA scaffold by Gibson Assembly. In vitro transcription templates for the pooled guide library were then generated by PCR and were transcribed using a HiScribe T7 Quick High Yield RNA synthesis kit (NEB). In vitro transcription/translation templates for IscB proteins with REC domain insertions were prepared as described in “Cell-free transcription/translation TAM interference assay” above. Cell-free transcription/translation reactions were carried out using a PURExpress In Vitro Protein Synthesis Kit (NEB) as per the manufacturer's protocol with half-volume reactions, using 75 ng of template for the protein of interest, 1.5 uM final concentration of the in vitro-transcribed ωRNA guide library and 25 ng of target library plasmid. Cas9 and a guide targeting a non-library control were also included as an internal activity control for downstream library preparation and sequencing. Reactions were carried out and libraries were prepared as in “Cell-free transcription/translation TAM interference assay” above. Barcodes were extracted and the read count of all mismatch targets was normalized to the read count of the associated perfectly matched target to generate relative scores for cleavage of “off-target” substrates. Medians for various categories were then counted and analyzed using a custom Python script.

### Mammalian Base Editing Assays

[0980] Constructs expressing base editors and associated guideRNAs were transfected, gDNA was harvested and libraries were prepared as described for individual protein/guide combinations in “Mammalian cell culture and transfection” and “Mammalian genome editing” above. Editing was quantified by counting the number of reads at which the expected edited position in the amplicon was called as a G (on top strand) or C (on bottom strand) and dividing by the total number of reads in the sample using a previously described custom Python script²⁷⁸. Unless otherwise noted, all reported data is the average of 4 biological replicates.

### Mammalian Transcriptional Repression Assays

[0981] Constructs expressing base editors and associated guideRNAs were transfected as described for individual protein/guide combinations in “Mammalian cell culture and transfection” and “Mammalian genome editing” above. RNA was extracted using an RNeasy 96 Plus kit (Qiagen) and reverse transcribed using a RevertAid First Strand cDNA Synthesis Kit (Thermo Fisher) using random hexamer primers as previously described²⁷⁸. RNA expression was measured by qPCR using commercially available TaqMan probes (Thermo Fisher) on a LightCycler 480 II (Roche) with GAPDH as an endogenous internal control in 5 uL multiplexed reactions. Each of the 4 biological replicate is the average of 4 technical qPCR replicates, and relative expression was calculated using the ddCt method279 with a negative control condition consisting of the corresponding OMEGAoff or CRISPRoffv2.1 expression plasmid co-transfected with an AAVS targeting guide. Statistical significance was assessed using a two-tailed t-test.

### Bibliography for Example 6

[0982] 76. Yan, W. X. et al. Functionally diverse type V CRISPR-Cas systems. Science 363, 88-91 (2019).
[0983] 78. Shmakov, S. et al. Discovery and functional characterization of diverse Class 2 CRISPR-Cas systems. Mol. Cell 60, 385-397 (2015).
[0984] 88. Shmakov, S. et al. Diversity and evolution of class 2 CRISPR-Cas systems. Nat. Rev. Microbiol. 15, 169-182 (2017).
[0985] 89. Shmakov, S. A., Makarova, K. S., Wolf, Y. I., Severinov, K. V. & Koonin, E. V. Systematic prediction of genes functionally linked to CRISPR-Cas systems by gene neighborhood analysis. Proc. Natl. Acad. Sci. U.S.A 115, E5307-E5316 (2018).
[0986] 212. Clement, K. et al. CRISPResso2 provides accurate and rapid genome editing sequence analysis. Nat. Biotechnol. 37, 224-226 (2019).
[0987] 215. Altae-Tran, H. et al. The widespread IS200/IS605 transposon family encodes diverse programmable RNA-guided endonucleases. Science 374, 57-65 (2021).
[0988] 217. Wang, J. Y. & Doudna, J. A. CRISPR technology: A decade of genome editing is only the beginning. Science 379, eadd8643 (2023).
[0989] 246. Schmittgen, T. D. & Livak, K. J. Analyzing real-time PCR data by the comparative CT method. Nat. Protoc. 3, 1101-1108 (2008).
[0990] 258. Kannan, S. et al. Compact RNA editors with small Cas13 proteins. Nat. Biotechnol. 40, 194-197 (2022).
[0991] 261. Kato, K. et al. Structure of the IscB-ωRNA ribonucleoprotein complex, the likely ancestor of CRISPR-Cas9. Nat. Commun. 13, 6719 (2022).
[0992] 262. Schuler, G., Hu, C. & Ke, A. Structural basis for RNA-guided DNA cleavage by IscB-ωRNA and mechanistic comparison with Cas9. Science 376, 1476-1481 (2022).
[0993] 264. Pacesa, M. et al. Structural basis for Cas9 off-target activity. Cell 185, 4067-4081.e21 (2022).
[0994] 265. Pacesa, M. et al. R-loop formation and conformational activation mechanisms of Cas9. Nature 609, 191-196 (2022).
[0995] 266. Kosicki, M., Tomberg, K. & Bradley, A. Repair of double-strand breaks induced by CRISPR-Cas9 leads to large deletions and complex rearrangements. Nat. Biotechnol. 36, 765-771 (2018).
[0996] 268. Musunuru, K. et al. In vivo CRISPR base editing of PCSK9 durably lowers cholesterol in primates. Nature 593, 429-434 (2021).
[0997] 269. Rothgangl, T. et al. In vivo adenine base editing of PCSK9 in macaques reduces LDL cholesterol levels. Nat. Biotechnol. 39, 949-957 (2021).
[0998] 270. Moreno, A. M. et al. Long-lasting analgesia via targeted in situ repression of NaV1.7 in mice. Sci. Transl. Med. 13, eaay9056 (2021).
[0999] 271. Choi, E. H. et al. In vivo base editing rescues cone photoreceptors in a mouse model of early-onset inherited retinal degeneration. Nat. Commun. 13, 1830 (2022).
[1000] 272. Su, J. et al. In vivo base editing rescues photoreceptors in a mouse model of retinitis pigmentosa. Mol. Ther. Nucleic Acids 31, 596-609 (2023).
[1001] 273. Backstrom, J. R., Sheng, J., Wang, M. C., Bernardo-Col6n, A. & Rex, T. S. Optimization of S. aureus dCas9 and CRISPRi elements for a single adeno-associated virus that targets an endogenous gene. Mol. Ther. Methods Clin. Dev. 19, 139-148 (2020).
[1002] 274. Newby, G. A. & Liu, D. R. In vivo somatic cell base editing and prime editing. Mol. Ther. 29, 3107-3124 (2021).
[1003] 275. Richter, M. F. et al. Phage-assisted evolution of an adenine base editor with improved Cas domain compatibility and activity. Nat. Biotechnol. 38, 883-891 (2020).
[1004] 276. Shmakov, S. A. et al. Systematic prediction of functionally linked genes in bacterial and archaeal genomes. Nature Protocols vol. 14 3013-3031 Preprint at https://doi.org/10.1038/s41596-019-0211-1 (2019).
[1005] 277. Makarova, K. S. et al. Evolutionary classification of CRISPR-Cas systems: a burst of class 2 and derived variants. Nat. Rev. Microbiol. 18, 67-83 (2020).
[1006] 278. UniProt Consortium. UniProt: a worldwide hub of protein knowledge. Nucleic Acids Res. 47, D506-D515 (2019).

[1007] Various modifications and variations of the described methods, pharmaceutical compositions, and kits of the invention will be apparent to those skilled in the art without departing from the scope and spirit of the invention. Although the invention has been described in connection with specific embodiments, it will be understood that it is capable of further modifications and that the invention as claimed should not be unduly limited to such specific embodiments. Indeed, various modifications of the described modes for carrying out the invention that are obvious to those skilled in the art are intended to be within the scope of the invention. This application is intended to cover any variations, uses, or adaptations of the invention following, in general, the principles of the invention and including such departures from the present disclosure come within known customary practice within the art to which the invention pertains and may be applied to the essential features herein before set forth.

The application's sequence listing, which the Patent Office published only in electronic form, follows.

SEQUENCE LISTING (25280 sequences)

SEQ ID NO: 1 - DNA, 12 bp, synthetic construct
  misc_feature 1..12: note = Synthetic
  source 1..12: mol_type = other DNA
acttgtttaagt

SEQ ID NO: 2 - skipped

SEQ ID NO: 3 - protein, 383 aa, Actinoplanes lobatus
MKLVVQVKLQPTAEQASMLEATLRACNTAANEVAQVARRARVYRNYDLRKHVYAGIKADHRLGSQAAQHVIKKVCDAYKTLTSNLRAGNYGPPDAKRYRRVSTEPVRFRWQAAQPYDARMLSWQHDARTVSIWTVAGRMKNIAYTGSPDQLKAVAELPVGECDLVHRDGMWLLYATVEIAEATPVEPAGFLGVDLGIVQIATDSDGTVYAGEQLNRYRRRQIRLRAKLQAKKTESARRLLVKRARRESRHATNVNHVISKSIVAEAERTSRGIAVEDLTGIRARVRLRKPQRAALHSWSFAQLGGFLTYKARRAGIPLVQVDPRYTSQTCSACGHRDKRNRPDQATFICRSCGVVAHADVNAAVNIAARGVDVWGAVSRPYVA

SEQ ID NO: 4 - DNA, 600 bp, unidentified
  misc_feature 1..600: note = Ga0207030_1011 JGI
  source 1..600: mol_type = other DNA
atgtctgtttttgtgttagacaaaaagaaaaacccattaatgccatgttctgaaaagcgtgcgcggctattgctacaacgtgggcgtgcagttgtcattcgagtgtatccatttaccattcgtttgaaagatcgagtgggcggtgaaacacaggatttacgtttaggcattgatcccaggagtaaaacaacagggttaatgctcgcgcgggagtgtgagaaaattgattcagagagcggcgaaattaagcgaactcgcttaacagcgcggggtttccctcgcggatatttgctgcgtaaaaaatctgttaatggatttcaaacaggagacatggttattgctgatataccaaaaggggttaaaagtggcgtacatgttgggagagtggcaatacgttcatctggttattttaatattcaatcgacaaaaaatgttatccaaggtgtatcacatcgtcactgcaaaatgatgcagcgagctgatggatatggttattcaattgtagcgcaacaaaaagaggtaagtgggaatttggggcacgcttcgcgcgccgcgctatccatccccggcatgaatgctgaggtttcccgcgcaatttga

SEQ ID NO: 5 - DNA, 303 bp, unidentified
  misc_feature 1..303: note = Ga0207030_1011 JGI
  source 1..303: mol_type = other DNA
gtcaatcaccccgccctaaaggacggagcttgtaaagcataagccaaacaagcttgaggttgaccagggaaagcggtaaccaacccgctaagttgtaaacaggtacaagacccaccagcgaatgcttcctcagttcgctgctctggaagttgcagatgcagacaaggttcgggtaactacgaaacggtctgtgactaggtagacatactgaaggccggtttacaacattcccgaggggagatacaccgcaaggtgtgcgtcacaagacccgtaagggtattttttaggaaaatggttatgtct

SEQ ID NO: 6 - DNA, 771 bp, Moorena sp.
  source 1..771: mol_type = other DNA
atgcgagtttttgtacttgataaaaacaaaaaaccattagacccatgccagcctgctagagctagaatcttgctcaaacaaggaagggctaaggtctttaggagatacccgttcacaatcatcatatgcgatttggaggaattggaatgtgtgacacataatcatcagatcaaacttgaccctggttctcaaacaacaggtttagcaattgttcaagaaaaggtggttgtttggggtgcggaactaacccacagaggtcttcaaattcgagatggtttaacctcacgtagaaagttgagaagttctcgtagaaaccgcaaaactcgttatcgacagccacggtttcttaaccgtaaacgtcctgatgggtggttagctcccagtctaatgtcgagagttcataatattctcacatgggtaaaaaaacttactcgattttgtccgataactggcatttctcaggaattagttaggttcgatactcagaagatggaaaaccctgaaatttctggaacagagtatcagcagggcacactctacggatatgaagttagagaatatctactttccaaatggaatcgtaaatgtgcttactgtggtgtgactgatactcaactagaggtcgaacacatcaaacctaaatcaaagggcggttctgaccgagtaagtaacctagcaagtgaggtatggttccagtgtatgagtgaaggagtcaactatcccgttactgatttggtgtcgtggcagggaaaaagttactgtggggtctag

SEQ ID NO: 7 - DNA, 265 bp, Moorena sp.
  source 1..265: mol_type = other DNA
gtcaggagcctgggagtagcaaaccccacggataaatccgggggcttgtgaatcattacctgaccagcccaagtcccatcagggactacgttatcagcaagagttaaagttcctaccttgaaatgcgacgctagtttcaagctctagaaccggattgttaaacatctttatcaggttaaggaagtgcaacgcgcgaaagtaccgactgataacattggcgcagcgaactttaccctagcaataggagaatactcacattatgcga

SEQ ID NO: 8 - DNA, 1554 bp, unidentified
  misc_feature 1..1554: note = contig_4171967 MG-RAST
  source 1..1554: mol_type = other DNA
gtgatctggatagctgtatcgaagctatggaattgtaataccacagggaagtgctttacaggcggtgccctgtggaacaagggaagatttttggaaaggaggcatcggcagatgctcatatacatcatagacgcatcaggaaaaccgctgatgccgactgaaagaaaaggacatattaagagacttttgaatcgtggcaaggcacgaattgtcactaaggtgccattcacggtacagctgaaatatgagacaccaggcatcacacagccgttatacggcgggactgatcccggtagaacaaacctcggggaagctgtgattgatgaaaatggtactgtgatatataaatcacatgtcgaaacacgaagcaaagatatccctaagctaatgtctgagagaaaacagcacaggcaggcgtcccgcaggggagaacgtctgagaaagaaacggcgtgctgcgaaatgcggtacaactaaagtatttactgaaggacgcacgataccaggatgcgaaaaacccgtcatgatgaaggatatcatcaatactgaaagcagatttgccaacaggaagcgttctgaaaactggataacaccgacaacgaggcaactcatacagacgcacctcaatatggtgcgaaaaatatgtcaggtgcttccggtaacagactggactcttgaaatcaaccgttttgccttcatgaagatggatgatggcggtatcagaggtttggatttccagaacggcaggctcaaaggctacagcagctcacatgagtacatatacgctatgcaggatggcaaatgtgcctgctgtgataataacatcgagcattatcaccatctgacaccacgttcaaaaggcgggtctgatacaccggaaaaccttataggcctctgtggttcatgccataaaaagatacatactggtgacctgaagcttgaaaatatcggactcagaaagaaatacgctgcactaagcgtactgaaccaggcaataccgtttattattgatggacttgtagagatattcggtgaaaaacacgtccatttctgcgaaggctataatactcagatgataaggaaaagcctctgcataggaaaggatcatccggaggatgcggtatgcatcgcacttcttggagtgggtatccaaaaggtaacggataacacggaagcctttgaagtgatgcagttccgaaggcataatcgagcaataataaataatcagcgtgagcgtacctattatcttgatggtaaggccgtttgtaagaatcgtcacaagcgttttgagcagaaaggagactctcttgaggaatttagtaagaaacatccgtctgacgtgaaacgtttgactgttaaaaggagcacacgtttctataatgctaataacagattgatgcctggagtagtatttacgtacaaagggcagaggtatgtaatgtcaggacagcttacaggaggaaaataccttcgtgctgtcggagacacaaagacaaactatccggttacacaatgctatatcttaaatgaaaacacaggccttgtgtatatttaa

SEQ ID NO: 9 - DNA, 178 bp, unidentified
  misc_feature 1..178: note = contig_4171967 MG-RAST
  source 1..178: mol_type = other DNA
gtcaataaccccgccccgtgaaggggcgaggcttgaaaaagcctaatctgagttattgagcagagctatgatacagcagcaacaacgccaccacatctgattccaaggtatgtgatctggatagctgtatcgaagctatggaattgtaataccacagggaagtgctttacaggcggtg

SEQ ID NO: 10 - DNA, 1344 bp, unidentified
  misc_feature 1..1344: note = rumenHiSeq_NODE_3861232_len_211451_cov_5_332990 JGI
  source 1..1344: mol_type = other DNA
atgaaaccaaaacataaaatcaaaaggaggaagaaatgcttaaagcagaaactagtatttgtagttgataagaaagaacgttctttgatgccttgtacacctagaatagcaagattattgcttaaacaatgtaaagcaaggatatacaaacacgcttacacaggattctttgctatcaaactcaattatattccttctaagtgttaccttcagaagaataggattggagttgatactggaagtaaatacatcggtgtttcagttgtaaggattgacaaaaatcaagaaaaagtttctagaagttgcactcacctttatgaagttaaactaagaggtgacgaaataactaagaacatcgaacagcgaaggatgtacagaagaaatagaaggaataggaagacaaggtatcgtaaacctagatttcttaaccgtaagaactctagacgggaaggactaaaaaatccaacaatgatacataaatttgaaactcattgtaaggttattaatactctacaatccttacttccaaaaacaaagttaatcttcgaagttggaaactttgacccacatttgatgaagaatgaaagaaaagcatttaacagacattggggttatcaacgtggggtaaattatggattcgctaatcgtaaagcttatgtattatgtagagataattacacatgtcaacaatgtaagaaaaagaatgtagcattacatgttcaccatatagtttatcgttctaacggcggaagtgacgatgaatcaaacttgataactctttgtgaggattgtcaccacaaacttcatcaaggaaagataaagttaaagaaatccatcagtcaaggtaaaaagaaagcacttaaagatgcaactcaaatgaactatcttaaaggtcttttgatagaacattatcccaaggctagaataacttggggttatatcactaaagaaaaccgtcaataccttaaactatctaaagagcattattttgatgctctggtgattgcgtctaaaggtaagaaagttaaggtggaaacaaatcaagttaccaagatagtcaaagttgctaaaggtgactatcaactttcaaaaggaagctgtagcgaaaagatgctacctaaaggtaaagttaatggatttagaagatttgataaagttaagtattttggtaatgaatatttcattaaaggaagaagaacatctggaacaggagaattaatggatgtagaaggaaataaaattgacttttcttatatgccgaagggatttagaacaccttcaatgaagaatatgataagattttcatcaagaaggtctttgatagttaaaaacgtttcactttaa

SEQ ID NO: 11 - DNA, 355 bp, unidentified
  misc_feature 1..355: note = rumenHiSeq_NODE_3861232_len_211451_cov_5_332990 JGI
  source 1..355: mol_type = other DNA
gtaaactactgctagtctaaagacatagcagcttccttaaatgttaccagacttagttctttagttaggactacgataagaaagtcatgacaccttaggttgtcgcctcagacctatgctctgtcgttgatagttaaacaaggcgggaattaaatgaacctagtgctatcaacataaaaagctttcttatctttgtcgagaggaaatccgaagtccttgaataaggcagtaggtacacttgttgtgagaacaacaaggatggacatcaagtttgtctatcaaatatctctaaagcaaggagagttaaaaaatgaaaccaaaacataaaatcaaaaggaggaagaaatgcttaaag

SEQ ID NO: 12 - DNA, 1104 bp, unidentified
  misc_feature 1..1104: note = Ga0334820_006144 JGI
  source 1..1104: mol_type = other DNA
atgcaggatgcttctcaagtcctgcttcccttggttagtcagtctcgaagagagaaattgccccgtaagggagataagaaggtaacttctttgtcaataagagttccggttgtttcgtcaaacggaattccattgatgccatgtgaaccagcaagagcgagagaattggtaaagagtgatagggcgattaggagattcaagacaggaattttctatattaaattggtagaaagagaaaccggagatgtacagaaagtaacatgcggaatagatcctggaagtaagcgagaaggattcacagtaaagtcagccaatcatacatatataaatgtactttctaatgcagtggatacggtaaaagataaaattaaaacaagaatgatgatgagaagaaatagaagacaaagaaaaactccttatagaaaaaataaatgtaatcgaaaacatgggggtttgccgccttcaaccagggccaggtggcaagcaaaattaagaataattaacatattaaaaacattatatccaataagtgtttatattgtagaagatataaaagtcagaacaataccaggaaaaacaaattggaacaaatcattttcatcattagaaactggaaaaaatttgttttattttgaactgagaaaaattggtagtgttatattaaaacaaggttatgaaacaaaagaatatagagataaacttggattaataaaaacaaaagctaaattagagaatgttttttcagcacacaatgtagatagttgggttttggctaatttagaatttgaccagaaagttccagataacactaatatttttagaatgattccattaaattttcacagaaggcagttgtattatttacaaacagaaaagaatgaaataaaaagaccgtttggtggtactataagtcacggaattactaaaggaactgttataaaacataataaatatggttatgtttatataggtggaaaatataaagatagagtttctgggcatgatttaagtacaggggcgagagtttatgctaatattaaaccacttgaagtagatatactatatatgattaagtggaggtttttgattagtctaaattcttaa

SEQ ID NO: 13 - DNA, 273 bp, unidentified
  misc_feature 1..273: note = Ga0334820_006144 JGI
  source 1..273: mol_type = other DNA
attaattatccatattaaaatatggacttgagtaagtaggaaatgccaatttcgaaagaacaagttaaacaagagattagagtgcccaagatcattggacgcaagcgtaagtctgcgtccaagggtcgtttgaaggaaactgaactaactaaccgtggcaggttgaacaatatgcaggatgcttctcaagtcctgcttcccttggttagtcagtctcgaagagagaaattgccccgtaagggagataagaaggtaacttctttgtcaataaga

SEQ ID NO: 14 - DNA, 1380 bp, unidentified
  misc_feature 1..1380: note = Ga0210025_1000354 JGI
  source 1..1380: mol_type = other DNA
atgcagcgagtgttagtgttagacaaacataaaaatccattaatgccatgcacacccgcaagggcaaggatattattgtctcaacataaagctgcagtgtttaagatctatccatttacacttattttgaaaaacaaaacccaacataacactcaaccaatacaagttaaaatagatcaaggttccaaaaatacaggcattgcactggttgctgagtttaagcaaggtaaaacggtgatatttgctgctaacttacaacataaaggccatgccatttctgaaaaactggctagccgtgctgcctcgcgtagatcaagacgcagtagaaaaactcgatatcgaaaaccgaaatggactaatgctatgtctaaaaagcaattggtgcatattaatcaacgtccaaaaggatggtttcctccatctgttacttcaagagtggataatgtaacgaatttagtgaataagttaacaagattaacacctattagtgctattgccgttgaaaatgtgcgttttgacactcaattaatggaaaataaaagcataagtgggatcgaatatcaacaaggtacattgtttgaaaaagaagtaaaagaatatttattgcatttattccattataaatgtgcctattgtaatggattaagtaaagatcctattttggaaaaagagcatattattcctagatctaaaaaaggttcaaacagaatagataatttatccttggcatgtcatacttgcaatcaagctaaaaataatttgttgccacaagaatggttaatggtgcttaaaaaatcaacgtcaaaaattaataaagagcgagtaaaacgctttacccatatcattaagggcattaaaccgtcattgcgtgatgcggcagtcatgaacgccattcgttataaattagtagacgcattaagggtatttaatttaccgattgaattaggcagtggtgggttaaccaaattcaatagaaccaatcaacaattacccaaagatcattggatcgatgcagcgtgtattggacaaagcggcaataatattattatccctaaaaatctaatacccattaatattaaggccgttgggcgtggttcaaggcaaatgtgcttgatgaataaatttggttttccacgaacaaagccgaagaagaaagggcattgctttaattttaaaacaggtgatctcattaaggctatagtcactaagggtaaaaaggaaggaacgtatattggtagattagcggtaagaacaagtggtaatttcaatatatcaacaaaaaatggcatagtgcaaggtattaactaccgttattgtcgattgcttcaaaaaaacgatggctatcattatagcaatcatataaatcaattaattaactaa

SEQ ID NO: 15 - DNA, 258 bp, unidentified
  misc_feature 1..258: note = Ga0210025_1000354 JGI
  source 1..258: mol_type = other DNA
gtcaacaaattaaggtgagatcgtaagattatggttgacccgactcagtgtttgcatttttgcattcactacgttaagtaagaatatatagtgagttcggaatactactccagttccacaaactcaggatctacgttaaacagtgacttttgggtaagaagcagtgcgtagttcaataaaccttatttaacattgtctaggagtattttaccctcgtaagaggtgtcccgttatgggaaaatttaacaaaaaggaata

SEQ ID NO: 16 - DNA, 1311 bp, unidentified
  misc_feature 1..1311: note = Ga0256405_10001455 JGI
  source 1..1311: mol_type = other DNA
atgtatttagtatacgtaaaatctaaaaatggaaaccccttaatgcctactaaacggtgtggtagggttagaaagctgttaaaagagggaaaagcaaaagtgatatgtaaatgtccttttacgattaaacttctttatgacagtactgagtacactcaaaaactgtctttgggtattgatgttggttcatcacatatcggttctgccgttgttaatgaaaaaggcgatactgtttatatggctgaaacaacaatcaaaaatgacataaaagataaaatggaacaaagacggatgtataggagacacagacgttcaagaaaaactcgttatagaaaagctagattcttaaatagaaagaatagtactaaaaaaggtagattaccacctactttaattagtaaaattcattctcatgtaaaagagattgaatttgttaaatctattcttccggtaacagatgatgatctaatttttgaaacagctaaattcgatatgcatttattgaaaaatcctaaattgcataatgaaaaatatagacattttggttatcaaaaaggtatactttatgggtatgctaatgcccgtgaatacgttttagaacgagataatcatgaatgtcagatatgttgtaaaaaagaaggttataaacgtaaaaatggtattcgattagaaacacatcatattgtttatagaagtcggggtggaagtgacgatccaaggaatttaattactgtatgtccagtatgccatccaaaaatacatgatggtaaaataacaatagacattaaaggaatgccttttggggttttaagacatgatactcatatgaatataatctcaaaacgattagttgaccgttacccaaatgcaatagaaacatacggttatataactaaacaaaatcgttttgaagctaaattgcctaaacgacattatatagatgcatgtataatagctaatggtggaccagatgttaattttaaatctgatatagtatatattaaaagaagtgttactaaaggtgattatagacagactaacggaaaacggtctgaaaagcgaatgaatagaggtaaagtaaacggtttaagacgttatgataaagttcaatataaaggtaatatatactttataaaaggtattgatagcaaaggttatgcgactttaatggatataaacaataaaacaattaaatttccagatgcgcctaaaagagataaaacacctaaattatctaaaataaaaaggataactgcaagaaacacatgtctaatagatatagaaaaggttcacattgcatatactcgttaa

SEQ ID NO: 17 - DNA, 298 bp, unidentified
  misc_feature 1..298: note = Ga0256405_10001455 JGI
  source 1..298: mol_type = other DNA
gtaaactaccccaccccatgaaggggtgtggctttcattaaataacagtttaccagactaagtttagagaaatctaaactacgatgttaaggtcatgctacctttggttgacgcatcagatcaatgctctagcatcttaaaaaactgataaggttgaagtaataaatgccttacgataagatatgacaagccttaatgtcattgtcgagatgaagtcggattttaattgtggtaacagcaattaaatacgcataactaagtcttaggactttgaattatattcttaaggaataattat

SEQ ID NO: 18 - DNA, 1380 bp, unidentified
  misc_feature 1..1380: note = Ga0224415_10000689 JGI_Dark_Harvest
  source 1..1380: mol_type = other DNA
atgccttgtctgaatccaaagaaggtacgaaagcttctgaaagaaggacgtgccgtcatcgccggatataagccgtttaccattcagcttacatacgaatccgggaaggaaaaacagcctgttgaaatgtccatagacgccggcgacaggcacgtaggtaattccatcaaatcagaaaagcatgaattcattcatgaacagcgtgacctgcttaaagatggaaaacaaaaacatgatgatcagagaagactacgcaggacacgccgtaacagaaagcggtacagaaaacccaggtttgacaacagacgtatccctgaaggctggcttgctcccagcatcagaaacaagaaaaacatccatgtcatgttatacgacacgtacagaaaagtaattcctataacggatgtttttattgaaaccggttcgtttgacacaaacgcgctgcatcttcaggagcaagggcttcccgcacctgaagaaacagattatcagcatggtccccgattcggatatgacaacctgcgggaagcagtattttacagggatcatcatacctgtcagatctgtggttctacgatcggtcagataaaaaagaaagatgggtcctttaaaccaggcgaagttattttaaggatgcatcacataggatatcgaacaggagaccggaccgatcgtatgtctaatctccttacagtatgtacaaggtgccatacgcctaataatcataaacccggcgggaagttatatgatctggaacctgtgacacgaaccatatccggagccgctttcatgaatacagtacgatggtatgtattcaatgagataaaagccattgacagcgctgtacatgttcatatgacatatggatcggtaacaaaacgtgaaaggctgtcaaggcgtatcagaaagacgcacgcaaatgacgcgtactgtataggatacttcagaccgaaacataaagcttctgaggaaatctttcagaagatccgccgtaataacaggtgccttgaaaaattctatgacgctgtatatatcgacagccgtacaggagaaagagcttccggcggatcattaagctgcggaagaacaaacagatcagagtcaagaaactctgatacaaataaacgaatatatcatggcagaaaacgtacaaaaggatacagaaatatccgcagaaaacgtcatcccctgcaggcaggagacaaagtaatattccaagggaaaaaatacacagtaaaggccagcaggacaagatataccaaaacacatggttttcatgaaaccgttgaactaaaagaaataccaaaagaacatcttttagaagagataaaactggttagtcacatatccggctggaaaaaagtccagccggcatcataa

SEQ ID NO: 19 - DNA, 376 bp, unidentified
  misc_feature 1..376: note = Ga0224415_10000689 JGI_Dark_Harvest
  source 1..376: mol_type = other DNA
ttcggattactctttatgaatctctgtaagcccggttgattagcctaaatgacgaaattggtgtctctgacatcacaaccgtcatttatcagagaaggcatttatgccagtatctacgtttgataccaataatatagtcacgtcagaatgctccacaagttctgtcccatgagcctgtatattaaaaatttctgagggtaggaaacgtgtatacaggatgatatccgaaaccggtttaccggttttggatatctgaaacggtgttgaacattggcgttgtggcccactcccgagagggaagataccgtacatgcttttaatgtacggaaggcgtaagccattaaaaagaaaggaggcataagccttgagctatatt

SEQ ID NO: 20 - DNA, 1329 bp, unidentified
  misc_feature 1..1329: note = Ga0210041_1000150 JGI
  source 1..1329: mol_type = other DNA
gtgtctgtattggtgatcgacaagcgaaagaaaccgctgatgccgtgtagcgagaaacgagcaagaaagttgcttggttctggccgtgcgcgtattcatcggctcattccgtttgcgatacgactgattgatcgtgaagttgccggttgcgatttgcagcccgttaaaatcaagattgacccgggtagcaagtacaccggcattgccgtggtgcgcgaatcaaaggaagtggatgttgcaactggcgagatcagcgttaccgcgcatgtactgaatatttttgagttactgcatcgcggccgtcagatcagcgaagccttaacgtcgcgccgggcaatgcgccgccgtaggcgtggatgtttgcgctaccgagcgcccaggtttcttaatcgcggtaacaaagccaagggctggttagcgccaagcctgcaacaccgtgtcgatacgactgttgcatgggtgaaccgtttccggcaattggctccgatcaccgatatcgctcaggagttggtgcgcttcgacatgcaggcgatggagaatccggagatttcgggtgtcgaatatcagcaaggtgcgctgattggttacgaagtgcgcgagtatttgctggaaaaatggggtcgcaagtgcgcgtactgtgacgccaaggatgtgccgctgaatctggatcacatccagccaaaagccagcggtggaagcaaccgtgtttcaaatttgaccctggcctgtgtgccgtgcaaccagaagaaaggcgcacaggatgttagcgtgttcttggcgaaagaccccaagcgattggatcgaatcctgacgcaagctaagcgtcctttaaaggatgctgctgcggtcaatgcgacacgctgggcgttgttcaacgcgctcaaggccactggcgttcctgtatcaacaggttcaggtggcttaacgaagtataaccgtgctcgatttggtatcccaaaagcgcacgcgtttgacgctgtgtgtgttggcctggtgagtgccgtgacaggctggggaaagccgacgctggcaatcaaggctaccgggcggggaagctaccagcgcacgcgcttagatgcgttcgggtttccgcgcggttacctgacacgagaaaagcggattcaaggattccagactggcgatatggtcagcgctaatgttgccaacggcaagaagattggtttttatgttggtcgagtggcggttcgcgcaaccggtagtttcaatattcagaccgcgcaaggagtcgtacaaggcatatcccataggcattgcaaagtgattcagcgtgctgatggatatggttattcaatcgtggcaaaaatgtag

SEQ ID NO: 21 - DNA, 298 bp, unidentified
  misc_feature 1..298: note = Ga0210041_1000150 JGI
  source 1..298: mol_type = other DNA
gtcaactaccccgccctaaccggcggagcttggaagggcagtaagaagctcggttgaccagcctaagttacggagaaacgtaactacgttgtagcgaagtacaagaccgacgttgggatgcttcctcagtcccaacctctcgaagcggcaggagtagacaagcgaagggtaagcacgaaacagcttgtcgcaaagttcaaagtaccgaactgaagctgcgttacaacattggcgaggggagcgaaccgaaaggttctgtcacaaggtgcgtaagcacatttaggagaaacaagtgtct

SEQ ID NO: 22 - DNA, 1302 bp, unidentified
  misc_feature 1..1302: note = Ga0163150_10004194 JGI
  source 1..1302: mol_type = other DNA
atgttagtcttcattttaaattctcatggcaaacctctgatgccttgtaagccgcagaaagcccgtgttcttttaaaagacaacaaagcaaaagtgatcaaacgactgccgttcaccattaagctcaaatttggagcttcaggttttaagcaggagttaacggcagggatggactctggcagtaaagtcattggcaccgctgtagtaactagaagtggcaaagtactgtatcaggctgaaacgactcttcgaggtgaagagattaaaagtaagatggccaccagggcgatgtatcggcggaatagaagaggcaggaagaccagataccgacaaccaagatttctcaatagaagagcctcgacttcccttaaccggcttcccccctcgacaaaacacaaggttgagtcccatttagccgaaaagaagtatattgagtcaatcctgccgatcacaaattggcggctagaattagcttctttcgacatccacgccttaagcaatccagaagtatccaaagccgcatggtggacctatcaacgtggcgaaatgtatggcttccagaatcttaagcaatatgtcctaagtcgagatacctatacttgtcagacctgtaaaaagaaaccgaagcagaacgttgagcttcatgtccaccatattcatttcaaatcaaatgggggggctgataccaaaaacaacctgattaccttgtgtaaaccttgccacgacaagcttcacagcataaaaaatgctcaacagcattctctaaaattaaagccaaaggcgacaaataccaaacatgcaactgagattaacatcgtcgccgctcaactaagaaaaagtgattggaacttcgcagagacttttggctttattacaaaagttaaccgattggcacaaggtttgccgaaaagacacttcatcgatgccgcagtcatagcctcccaaggactggatatccgagctttaaaaagaacgatcattagaagacgtgtagccaaaggcgattaccagcagacaaaaggttctagatctgagaaaaccataccgacgggaaaactctttggtctaagaaaattcgatttaatcaaaacacctaagtgtactggctttatcaaaggcaaaagatcgtcaggtttttttgccattagcgacatacatggccattcgatctgtaactccgtcaaagttaaagccgactgtacccgcatcacagcgcgaacgacaacccttgcttatgtggagaatttcgaggctgacgcatcgatgctcgccgcagggcttcaccattcctcctccacctaa

SEQ ID NO: 23 - DNA, 295 bp, unidentified
  misc_feature 1..295: note = Ga0163150_10004194 JGI
  source 1..295: mol_type = other DNA
gtcaattacccccacctaaaggagggggcttgtgaggtgactcataagggtaactagttgaccagaccactaacaaagaaaggcaagaaaaattgttagtaaacgttaaagcagaatatcacaccttcggatgccgcctcagtccgttgctctgtggcctactattaaacagagttgaaagactcagtgtagtaggcgtaaaaagttgttttaactggtcgggaggaagtcgtgatatcagattcaaccttttagaagctgatatcatgcgtcactgtttagaatttagcaggag

SEQ ID NO: 24 - DNA, 1038 bp, unidentified
  misc_feature 1..1038: note = Ga0209777_10000113 JGI
  source 1..1038: mol_type = other DNA
atgaagaaagtaatggttcctgtagtagacaaaaataataagccacttatgccaactagttgttggagagcttccaagtggattaagtctagaaaggctactccattttggaaacatggtatattttgtgtacgattaaacgtagaaccttctgccagaaatatgcaacctatagcagtaggtattgatccaggtagcaaaagagaagcatttactgttaaatctaagaagaatacctatgtaaatattctgacacatgccgttactcatgttaaagatgtgatggaagatagaaaaagtgctcgtaaaagtcgccgatttagaaaaacaccatatagaaaacaaagaaaaaataggaaaatgggtggactaccaccttctactaaagctagatggcagttgaaacttagggttattaataagcttattaaaatttttccaatttctcaatttgtagtagaaaacattaaagccgtaacaactggacaaaaaagatgggattctaattttagtccattaggggctggcaagaaatggttttatggcgagcttagaaaaattgctccagttaagcttatgcaaggttgggaaacttgtaatttaagaaatcgacttggacttgagaaaacttattcaaaattggatgaaaaattttcggtacataatgttgatagttggactttagcttggagtggggttggcggaaaagaaaaaccagataatgaatctttattaattttagtttcactaagatttcatcgaagacaattacattattgtaatttttttaaggggggaaaacgacgtttatatggaggaacaagaagtttagggttaaaacggggaagtttagtagatcattcagaatatggactttgttatgttggtggatcatctaaaggtatgataagtttacattcacttgtagatggttgcagaatttatcaaaaagttaaattgaaagatattaaatttaaatgttatagtagttttagattttatacagagaaagatattactgatccttttgttgcttaa

SEQ ID NO: 25 - DNA, 281 bp, unidentified
  misc_feature 1..281: note = Ga0209777_10000113 JGI
  source 1..281: mol_type = other DNA
gtcaatggccagtttctaaaatggtttgaaagtccctccaaagggcaactttcaacgtaagcattgactagacaacgattggaaaggaggttaaagacaaaagaaaattccaatcaaactgaacaatctacccgtggaagggtgaaacacgttgcgaatgctaccctagtttgcatcctctgtgattgtcagtgtcgaagggttgtatacatgatagagttttctttgaattgcctaaaacgattcaaggaattttggagaagcaaatgaagaaagtaatg

SEQ ID NO: 26 - DNA, 1350 bp, unidentified
  source 1..1350: mol_type = other DNA; note = uncultured Clostridiales bacterium
atgacgactttcgttatatcggcagaaggcgaaaagctgatgccgacaacaaatatcaaaaaaatccgaaagctcctccgatcaggaagagccaagatcgtgaagcacgcgccgttcaccgtgcagcttctgtacgagagcggaaacgccgtgcagccaatcgagtttacggaagataccggctatcagtatatcggagtctctctcaaatcggagaagcacgaatacgtgagcgccgagtatacgcttcttaagaacgagaagcagcatcacgacgatcagcgtcgcgaggtaagacgcccgcgtcgcaacagaaaacgctaccgcaaggcgcgcttcgacaacagaagaaagtctgaaggctggctcgctccgtcgctcagaaacaaggcggaccgccatgtagatatcttcaagatgtactgcgaggtatgcccgataacaagcgtcacgctcgagattggacagttcgacccggcggtgctcgatgctgtagagcaaggcaagcccttgccggaaggcgttgattaccaatacgggccgcgttacggatacgacacgctgagagaagcagtcttcgcaagagacggttacagatgcctctgctgcggtaaatcagttatagaagacggcaccgctctcaggctccatcatgtgggctttcgcacgggcgacagatcgaacaggctcggcaacctcgcatcagtatgcgagaaatgccacagcccgaagaaccataaacccggcggaaaactgtgggatatggcacctcctaaaggcacggcatccgcagcgtacatgaacatcgtcaggtggcatatctacgagggagtcaaggcgtttggcgtagacacacatataacctatggtgccgtaacgaagcgcacaagacgtgatctcaacatcggaaagtcacacgcgaatgatgcctactgcatcggcagcatgagaccgaaacgccgcacgaagacgcaatactttgaaaagcgccgccgcaacaaccgcatactcgagaagttctacgacgcgaagtatctggatattcgtgatggcaaaacaaagaaggcggcggagctcgggtgtaatcgcacctcgagatccataccgcgaagcaatccgcagaacgagcgcgtcttccgcggggagaaggtgtcgaacggcagacgcagtatacgcgctcagaggtatctgtaccagccggacgacattatcatcttcggcggcaagaagcgcatggtcaagggtacgcataacaagggctcgagtgtgcagcttattggaggaggcgatatttcgccgagaaagataaaacttcatcaccacgctggtggctggagacaagtagtttaa

SEQ ID NO: 27 - DNA, 332 bp, unidentified
  source 1..332: mol_type = other DNA; note = uncultured Clostridiales bacterium
gtcaactacccaccgcttagactgacgtcttgaagcgggggcttgtgaaaacaagtcagttgattagcctgagtgctcagggcactacgttatctgcgaatatacaggtaccccgggatgctccacaagtcccgggcactacggatatgcgttaaacatcggtgagggtagccgaagtgcgtatatcatcaaaccgcggaataacattggcgatgtggacaccgcccttcggggcgaggatccgtatacacgcctcttcggagacacggtatgcggaaagccgtaaggcagcatgttagcactaaaaaaacagaaaggaggagcacatgacg

SEQ ID NO: 28 - DNA, 1440 bp, unidentified
  misc_feature 1..1440: note = Ga0190327_1001504 JGI
  source 1..1440: mol_type = other DNA
atggattcacaaggtaatattggacatccaacacgaaaaggtagaatggtccgaagattattgaagaaaggtaaagcaaaagtaatagctggtggtgtaaagaaaggtcagccattgttaatacaattgcttgataaagtatttgataaatctaagactatagatacagaatttcgtattggtattgattcaggctataaatatattggttatagtttatttaaaatatataaaaatcatattgaactattactatctggtgaagtagaaactcgtacatctgaagttactaaaaatctaagtgatcggaagatgtatcgaagtcttaggcatcaatatagacgaaagaatgttaaacgtaagtttagtaaagctaagtttagacatcctaaatggaaaaacagagctaaacatgcttttcaacctactcatagacatttgattacaagtcatattaatatattaaaatggttatttaaaagagtaccaaaggatcaatgtgaggtacatttagaatatagtaaatttgatgttcaaaaaatgatcaatccaggtattcacagttggcaatatcaacgtggtcctcaatatggttttgaaaatgtgaaagcatatattcgtgatagagataattatacttgtcagatatgtaagaaacatattgctaatgaaaaaaatgaagtacatcatattataccaagatctaaaggtggatcagatagaccggataatttgattcttttatgtcaaaattgtcatacaaaagtacataccggaaaagtttcttgcacatcaaatttgattcacagtaaatttcgtgacgctggtgtattgaattcttgcatgaaatggatgtttgataactttagtaagaaagtttcattagtaaaaacttttggatatattacaaagactgttagattaaatagtaatggtaagatttcaaagacacatgctcatgatgccatgataattgcactttgcaatgaaaatggtcctgaaactaaattcaaaacatatactaattatgatcatcatataacagttaattttaaacaatatcgtagacatattagatcttggacacaaagattagaagatcgaaaatattatttaattgatgatttgaaatttaaaaaatgcgtagctcataatagaagaagagctacagcacaaaataaaaaatatcctagtcttgaagaatatttagaaaaatattctaatatgcaattaatagcaaagcctggtggacggattatgaaacaaagcgaaaagaatatgaattttcgccgaggtgatataattaaatgtccaaaaggtattgctactgtgcaattttatgaacttagacataaagaaattactactgcacaatttggtagaattagagaaagagtttgtactaagattttaaataatgctggaatgtgtatcgtttag

SEQ ID NO: 29 - DNA, 313 bp, unidentified
  misc_feature 1..313: note = Ga0190327_1001504 JGI
  source 1..313: mol_type = other DNA
ttttaaaaaacaggaggagaaaatttatgaaagtcgtgcaggcattaagtcaatcttaaattttaatatttaagttgacacagacgactgactattggttcaccctggaatgccactcccagttccaggctctgaaggtgttagtaattatattacttagtcctcattgcgatatatttcttaaatataacgtattaccaatagtcaagtcgggggagaccaacctaattaattaagctgagcttttaattagcttttatcatgaagttatttttaaaagcaagtgaattggagacaaattttaaacatgatt

SEQ ID NO: 30 - DNA, 660 bp, unidentified
  misc_feature 1..660: note = Ga0376669_0068582 JGI
  source 1..660: mol_type = other DNA
ttgtcgaggcccccattacctgggcaaccagagactccgaaaggggtaatcgtgagcaaagtattcatgttagacaccaatttcagacaactcaatcccgtccatcctggggaagccagaaaattgctttcagcaggaaaggcagcggtctaccgtcgctatccttttacgatcatcctcaaaagggctgtcaagacacctgttgaaccactacgggtcaagatcgatccaggctcaaaaaccacggggatcgccgtcgtcaacgatacgacaggagaagtcgtgtttgcagcagaattgtctcatcagggagagatcatcaagaagcgcttagacaaacggcgtggagtgcgtagaagcagacgtaatcggcgtacccgctatcgccaagcacgatggagaaaccgacgcaacaagaaaaggggctggttgccaccatctttgcagagcaggatcaccaacagtgcagggcgcatggcagcacgtgcgacaggctcattcaatatcacaaccaagggcaagacggtccaaggaattggataccagtattgcaaagctctccatcggtcagatggatacagttaccagaagggagcgaccattgtgcttgcccagccggaaacagagacggtagtcgcttcccctgaacgtgttgtctag

SEQ ID NO: 31 - DNA, 280 bp, unidentified
  misc_feature 1..280: note = Ga0376669_0068582 JGI
  source 1..280: mol_type = other DNA
gtcagggaccccacgcatgaatgcgggggcttgcagtgatccggcaatggattagtgcggcttcacctgaccagactcagtgctaggcttgtctctagcactacgttaggagcgaaataggtacgttgggatgcgtgggccagtcccaaccgctacggttgcaggttaaacaggattacgagggttagtgccagtgcttacaacgctaaaccgcataaccttgtcgaggcccccattacctgggcaaccagagactccgaaaggggtaatcgtgagcaaa

SEQ ID NO: 32 - DNA, 876 bp, unidentified
  misc_feature 1..876: note = Ga0394878_0025107 JGI
  source 1..876: mol_type = other DNA
atgtccaaagtattcttaatcgacactgatttacgaccattagaccccgttcatccagcacaagcaagacaattattaagagagaaaaaagcagcagtatttaggcggtttcctttcaccttaatcttgaaggagtcacgccctaattcttctgtttcagtttcacccctcagattaaaaattgatcctggagctaagtttacaggaattgccttagttaacgattctaatggcgaggttgtctttgctgctgagttaaagcacagaggatttgtaattcgagacgctttaatttctagaagacaattacgacgtagtagaagaaaccgcaaaacccgttaccgtcaaccaagattcttaaacagaacaagacctaaaagctggttagctccaagcttacaaagtcgagttgataacatcaaaacttgggttgaaagactaagaaaaatagccccaatcaaagctatcagtcaagagttagtacgttttgatacacagctaatgcgtaacccaaacatccaaggtaacgagtatcaacaaggaactcaatcaacacctgttcttaaaattaaaggagttaaaccattgttaattacagccaatggacatggttctagacaatcatgccgtactgataagtatggatttccatctcgttatgttccacgttttaaatttgttaaaggttttcaaactggtgacatcattaaatctattgtcacgaatggcaaaaagattggcgtttatattggacgaattgctgtccgctcgacagggagttttaacatcgcaacttctcaaggattagtacaaggcattaattacaaatactgtaacccaattcacaaaaaagacggttattcctatgcaacatag

SEQ ID NO: 33 - DNA, 249 bp, unidentified
  misc_feature 1..249: note = Ga0394878_0025107 JGI
  source 1..249: mol_type = other DNA
gtcaacaacccaccgatttatcgggggcttgaaatacagccctagttgaccagattcaggtagcaatacctacgtttaagggaagagttaatctcctaccttggaatgcgaagctagttccaagctctagaactcaaaggttaaacagccatctgggaggcagtgcttttgagatagtaccgaccttaaacattccttaaacattatcaaagctaacattacccgaaaggaggggcagaaatgtccaaa

SEQ ID NO: 34 - DNA, 1149 bp, unidentified
  misc_feature 1..1149: note = Ga0163150_10002834 JGI
  source 1..1149: mol_type = other DNA
atgcccaccgaaaggcatggatgggtgcgccgctctatacggggtgggcaagtcaaagtcgtcaagaggttccccttcacgattcaattgacttacgaatctgaagacgcagttcagcctttgactctaggtcaggatattggatttgggacggttggagtcagcgtaacttccgaactaaaggaagtctttgctgccgagtacaaaatccgcaccgacgtttcagaaaaagtaactgaaagaagatcctaccgcagaactaggcgaggcaataagacccgttacaggccagcgaggtttgacaatcgaaagagaaaagcgttgcagccttcgatcaagcaaaaagtcgagagtcatgagcagataatcaaaaatttgcaaacgatcctgccaatctcaaatgtgattatcgaagccaataactttgatatggccaaaatcaataagcccaacatatcaggacgagattatcagaatggtgaacaaaaaggcttctataatgtcaaacagtatgttctcgccagagatggctatacctgtcaggcagggaaaaaaggctgcgtggacaaacttcacgtccaccatctcacattcaaaagccagggcggaagcgatgccccttccaacctcttgacgctttgtgaaaaacatcatgccgatcttcatgctggcaagcttcaagttaccatcaaaaagcataagacactcaaaaccgccaccatgatgaatatcgtgcgcagccagctactcatacggaatccaggttttacggaaacttttggatatgagacaaaatttgaacgagaactgcttgaactgcaaaaaacccatcacaatgatgccttcgtcatagctggcggcagatgtcaaaggcgagccagggtccatttcatcacgcaaaagcgcaagaataatcgggcaattcagatgaaccgaaaaggccaagcaccagccataaggaggcaaagatacaaaattcagcccaaggacatcatccaatggcgaggaaaaaagtattttgctgggggtatgcaaaacaaaggggcttacctcatgttttggagtgattgtaaggaaaagtatgttaaaccgattgcgcagatcaaaatcatttttcatcaaagaagctatgttctcgacgcgatctaa

SEQ ID NO: 35 - DNA, 295 bp, unidentified
  misc_feature 1..295: note = Ga0163150_10002834 JGI
  source 1..295: mol_type = other DNA
gtcaatcaccccacccaaccctagcgggtatgggtagggcttggaagaaaggaaacaattttccaagctcttgattgattagactcagccctggcaacagggctacgttactggcgaatgacataggcaccttgggatacttctctagtcccaggctctgcgcgagacggctaaacagttctgatgggtaggaacagtgctttctcgaaaaaccgccggataactttgtcgaagagaatccacagccgaaaggctgccttacaggaacccctaacggggaagaaagaaatagatg

SEQ ID NO: 36 - DNA, 540 bp, unidentified
  misc_feature 1..540: note = Ga0208279_1011523 JGI
  source 1..540: mol_type = other DNA
atggtgcgcagaggacgcagaactcgcaagacccgctaccgccaaccacgcttcgacaaccggcggcgagcggaaggatggcggcagccatctctcatgtctcgcgtgcagaatgtgcgccattgggcagatcgcttggcggctctcgtaccactcagtcagattgcggtagagactgttcgcttcgacacccaactcatggagaacccaagtatcactggagttgagtaccagcaaggcgaactggcaggctacgaggtgcgcgagtacctactggagaagtggggccgcaagtgtgcctactgtggcgcggagaatgtgccacttgaggtagagcacatccgtccgaagtcgcggcgtggaagcaatcgcgtcagcaacctactcatttcgtgccatgcctgcaaccaggccaaggggagtcgggatgtgcgagagttcctggcacatgatccagcacgattgaaaaggatactggcgcaagccagacagccgctttcggatgcggcggcggtgaacgccacccgatacgcgattggg

SEQ ID NO: 37 - DNA, 373 bp, unidentified
  misc_feature 1..373: note = Ga0208279_1011523 JGI
  source 1..373: mol_type = other DNA
ggcaaccgctcattttcgaccaggatttcgtcgatccgggcttggtacggccccaggaccggtgcctcgcgtggcgctcgaagtgtatattccttcccctcggccgactcgatggcccttttgactgtcgggcgcgagtgtcccatctctcgggctattcgcctgatgctcttgttttcatgaaagaaagctcgtcggatgttttctcgttcgtccacctttatcatctcctcctccgctatcataggatttgttctcacactgcccataatagcagagatcgtttcaggtggtcctgttttcagtgatcaaaatccggtcaggtggtccccttttagtttatcaaaaacacaaggcggctctggacaagagg

SEQ ID NO: 38 - DNA, 1824 bp, unidentified
  misc_feature 1..1824: note = Ga0247609_10000157 JGI
  source 1..1824: mol_type = other DNA
atggtttacgtaatagacaaaaacaatcatcctctaatgcctacgcatcgttacggaaaagtacgcagaatgcttaaagaaggcaaagctaaagtcgtaaaacgagaaccttttacgattaaactgctgtacgattcatgtgattttgtgcagccactagttctcggtattgacacaggaagcgaatacataggaactgccgcctgttctgacaaaggaaatggaaaagtaattttgtattcatccatcgttaaacttcgtacagacatcaagactaaaatggaacaacgtagaaagtatcgttccgcacgtcgtggaaagttacgttgcagaccaccaaggttcttaacacgttttgcgtacactaaaaaagacatcatggacaaactgaaactctgtggtgaatctgtcaagcaaacggttattaaagacggcaaagaagtcacaactacagtgtttaagaaatacaacaagaagcagatacagcatttgaaacgatgcctgtcatgtgcaccagacaaacttcctgactcacagacgacaactctgtctcctacgatacgaagcaagataggttcgcatgtaagagaagttgtggatattagcaggatacttcctgtcagtcgtttagtgcttgaagtcggtcagttcgacacacatgctttgaaaaatccagaactgaaagacatgtcgaatcctgacattcgtgcatggggttatcagcacggacccaactatggttatgaaagcacaaaagcacatgttttagctagggataagtacaaatgcagaatatgcggtgtttccttcaaaggacgttcagggaaatcactgcatgttcatcacattgtattccgaagtaatggcggaagtgatgaccttgaaaatttagttacgctatgtgaagactgtcaccacacactgcataatgatttcaagacgatgacaaaggacgcatttgatgtgaaatacaagaccttgggttctggaaacgcatcaagatggaaagtgttaaaacacgcagctcacatgaatgtcatacgtgcacaacttttacagaacgccgccaattcagtcaaaatggtcgtgaaagattcatcagaacaaaagcatattatctcgttatttgagaatgcaaccgaaacttttgggtacattacaaaagcgaacaggcaatggcatggaatcgcaaaagaccatcatctggatgcgtgtatgattgcatctggtggttctaaattcacggttgacccagatacaccggttttcaagaaacgccatattgaatctggaaattatcaggtatgcgtccgtaaagacagcaatgcggatattatggctgagttcaagaaagcactgaaaaaggaaggtagagaacttggggatgcttcaaagaatgaatacaagcggtttaagaaagcacgtagagagcgtttaaaagctgaatttgagtctttcataagtgataatgcggaacagctcaaaaaatgtaaacgcagatggattcagacggatgtgtcctggtcaacacgcgacaaagttcatggatgtcggctgtattacaaagtcaattactacggtcagtctggattcctcggtgcttgcggactcaaaagtgccgggtatcttttggatgtgttcggtaaaaaattggaaatctcagaacacagaatacgattgaagaaaaagacagtgactgcaaattcgctttccaataaaaaggatgttcgtgtgctgtcggcacggcatactacgttatgcgaccatgaagttccaaaagactggatgcatcaaacgattgttacgtctgtttctgaggtatga

SEQ ID NO: 39 - DNA, 419 bp, unidentified
  misc_feature 1..419: note = Ga0247609_10000157 JGI
  source 1..419: mol_type = other DNA
acgagtgttatacccaggtgaggtggtgatatggcactgattagtctcagaggtatgacatttgttatgagtgtaatacgacgaaaccgtctgactcaacggatacgtggtctcagaggtatgacatttgtaacgggtgtaatactcttgcccgtaccgactgtctcagaggtatgacatttgttatgagtgtaatacctctaaaacgcctgtaacaaatgtcatgctaatgggaacagactcagctcttcggagctatgcatcaactttaacgaaacgttctgatgcctcctcagtcagttcaattctgtcgatgctttgtcgaggggaagtcgtatcgcccttacgggctgtacgcattacatcggctctcatgctgatggcttacagcaacatctttaacgtggagttctaaaatg

SEQ ID NO: 40 - DNA, 303 bp, unidentified
  misc_feature 1..303: note = Ga0116227_10015234 JGI
  source 1..303: mol_type = other DNA
atgtccaaagtactagtaattgacaccaacaaaaaaccgcaaaatccaattcatccctccctggcgagacagcttttaaataacggtaaagccgcaatatttagaaaatacccgtttacaggctatgaaacgcgagaatacctgttagaaaagtggaacagaaaatgtgcttactgcgatatcaaagatgtcccgttgcagatagaacacattcattcgagagcaaaaggagggtcaaatcgcatttctaatctaactttaagttgtgagaaatgcaatattttgcaaaaaaacgatcagtag

SEQ ID NO: 41 - DNA, 292 bp, unidentified
  misc_feature 1..292: note = Ga0116227_10015234 JGI
  source 1..292: mol_type = other DNA
gtcagtaactcaggtctaaagacgctgagcttgtctcagagttttagccacactagctgacccgatgcgagtacctcgtgtactacgttatcggtaagtgtttaagttcctaccttgagatgcattcgccagtttcaagctctagaactgggtgattaaacaggtttatattgagttaacactccttgttgcccagatagtaccgtccgataactttggcattagcgcagcgttagcgagtactcgagcgtcggctaacatcacccagtaatggagggaatttatgtccaaa

SEQ ID NO: 42 - skipped

SEQ ID NO: 43 - DNA, 337 bp, synthetic construct
  source 1..337: mol_type = other DNA
gttaagttctcactaccctaaagggtaggagcttattgagtttttcgataagttacttaaatagcttaagcatatcgcaatatatgctacgttactaaagaatatataggtacttcagggtttgtatctagcacaaactagatttgactctagctctgaactctacggtataaagctaaacatctctgacgagaaggagaagtgcgatatacattaaaacctttagataacattggcgaagggaagtaacttaaaagattttgtacttaggtacatatgttttaaagagttttatctctacttacaaaaaggagtttttatgattaaaataacaaat

SEQ ID NO: 44 - DNA, 1347 bp, unidentified
  misc_feature 1..1347: note = Ga0207421_10008055 JGI
  source 1..1347: mol_type = other DNA
atgcaacgagtttttgtacaaggggttaccggggaacgactgatgccgtgccatccagcccgtgctcgacaactacttcggtctgggcgggcgcgggtaattcgctcccgccccttcaccatcgagatgatcgaccgagccgagggcacggtgcagccggtgcgcttgaagattgaccccggcgcacgggtcaccggcattgccctagttgccgagggcaagaccggagcccgggttgtttgggccggggaactggctcaccgtagtcaggctatccgcaaggctctcgccgaccggcgctcctatcggcgcgcacgccgggggcgcaagtgccgcaatcgcgccccacgtttcaacaaccgcagtcgggtacccggctggttgccgccgagcctccaacaccgggtagacaccacccggacatgggttgggcgactactatcccgggttccggtcaccgctgtggatgtggagacggtgcgcttcgatgtgcatgcgctggccgccgggcggccgctctccagcgtggagtaccagcaaggcaccctgcacggcgtcgagctacgtgaatacctacttcaacgggatggctatgcttgtgtctattgccgaggcgcgagccatgatcctgtgttggagttggaccatgtgcagccgagcagccggggcggcagcaaccgaaccggcaatctggtaaccagttgcaccacctgtaatcaggcaaaaaacaaccgcactgccgaggagtgggcggcggcactggctggcagttactccagacttgaccgcacccgggcagaacgggcggggaagatccaagccggatggagcccgggcctgcgggatgccgccgctatgaacgccagccgctatgccatcggacgcgcgttaaaagaaaccggcctgccggtgacgttcgccagcggcgggcgcaccaaacacaaccgcagtacccagcattatccgaaggcacactggattgacgcggcgtgcgtcggcgaatccggcgaaaaggtgaaactggacccaaaaaccccgatccttcatatcgaagcccgaggtcgcgggcagcgcctagtctgccgggtggatcggtttggtttcccccgcacggctcccgggcgggtgaagcgggtgcatggctttcaaaccggcgacgtagtgcgtctaaaccagccccggggaaagtatcgaggccagcacaccggggcgctagccggtattcgtgcccggggctctatggatcttcgcacctcttctggacagaagatcagtgcctcgcaccaacatatgcgtctgctccggcgattcgacgggtattgctactcggaggcacgggcatgctag

SEQ ID NO: 45 - DNA, 271 bp, unidentified
  misc_feature 1..271: note = Ga0207421_10008055 JGI
  source 1..271: mol_type = other DNA
gtcgccgctttagccctgcccatcccggcctccgtgccggatgatcagggcagactcaaccagcccgagcctcctttgaggggctacggccgacaggaatagatagtcactccggggtgcttctccagccccggaccatgaggccggtggtcatgctgcccgattgcggtgaagggcgaaggctgccggtgaaaaccctgtcggatcatgggcgaggagacttgaccggccctgcggggccgagactgagaggggtaacgaaatgcaacga

SEQ ID NO: 46 - DNA, 264 bp, unidentified
  misc_feature 1..264: note = GENOME_ID: 238320 MG-RAST
  source 1..264: mol_type = other DNA
atggtcgtatttgtcaaaaacaatcatggcgaagcactaatgccgtgttcagaaagaaaagctcgcttattattacgagataaaaaagggaaaattgggtttatttcaggattttctggaaaaacgcaatgttatgtgaaaaacatttttggtgattatgtcacgatttcgccaaaatacaaaatggtagggctaaaaaaactaaaccgattagcgcacaacaataattggatacagcaaagaacaccagcgtacgctggctaa

SEQ ID NO: 47 - DNA, 264 bp, unidentified
  misc_feature 1..264: note = GENOME_ID: 238320 MG-RAST
  source 1..264: mol_type = other DNA
gtcaataacccaccacttaaaatcattttatgatttttgaagtgggggcttgcaaaagcttgattgactagcatcagttcttcgagaactacgttcgttttgttatcatacccgtaggtgattcccaagccgtcggctctatgctggctctgtaaaagtcctgagaggtaaggacggtcaaccagatgtgacagtcacactgttcaagcgtttcgaacatttgcgaagggaaacaaactccaaaggaggaaatacgatatggtc

SEQ ID NO: 48 - DNA, 1335 bp, unidentified
  source 1..1335: mol_type = other DNA; note = Candidatus Anoxychlamydiales sp.
atgttagcctttgttttaaacaaattaaaaaaacctttgatgccttgctcttcggctaaggctaaaaggttactaaaaaaaggtttggccaaagtcatatcaaaaaaaccatttacaataaagttgctttttggctctagcggacataaacaagaagttattagtggaatggatacgggttcaaaaaccattggcatagcagctattgccaatggaaaaattttgtatcaagctcaaacaaaactaagaggcgaagaaattaaaaaaaagatggatcaaagaaggatgtacagaaggagtaggaggagcagaaaacttcgttatcgaaaacctagatttttaaatagaagagcaagtacagctattaataggctcgctcctagtgttaaacataaactactctctcatctaagagaaaaaaagtttatcgaatcgattcttcctgtaagtatgtggattgtagaaactgcaagttttgacatccacaaaatcacaaatccgaaaggggtttcaaaagctttaggtaaaggccggacttatcaaaagggcaggatgttagatttttataatgtaaaacaatacgttctcaatcgagataagtatcaatgccaagtgtgtaaaaagaaaaataatcttaaattgcatgttcatcacattcaatttagatcaaacggcggctctaattcacctgacaacttagtaattctttgtgaaacttgtcatgacaaactccataagctaaaaaaagaagaagctgaaaaatcttcaaaaaaattacaaaaaagcgcacaaaaacagactaaacatgcaacagagtcttcaattctcagatcacaactttgtaaacattttaaaaagcttgaaagttctcaagtatttgaagaaacttttggctatattacaaaatttaacagagagagagctcttcttcccaaatcgcattatatagatgcaatctgtatcgctagccgggggaagatacctgagatgcatattcaaaataacacctcagatctttttcttagaagatgtgtttcaaaaggcgattataaacaaagaagaggaatttgttcggaactgaaaataccaaccggaaaactttttggattaaaaaaatttgatcttgttaagacttccaagggagttggatttgttaaagggaaaagaagctccggtttctttgccatttcagatatcaatggaactctcatctctgatagtgtaaacattaagaaaaacataggccggatacaagctaggaaggccgttttaacttggaggtcgcaattcctccctgacctaaaggacagggtttccttgcgagaaaaaagatga

SEQ ID NO: 49 - DNA, 314 bp, unidentified
  source 1..314: mol_type = other DNA; note = Candidatus Anoxychlamydiales sp.
gtcaatcacccctccctaaaggaaggggcttgaaccgtgaggattaagggcaactggttgaccagaagacaaactcaaggagttttattaatgtttgtaaccgttaagacagagaaaagacaacagaccaacgagtgccacctcagcttgttgctctctgctgtgcaattaaacaaagtccaaagacttagtgttgcccaggaaaaaacctgttttaactcttcgagaggaggacttgacgatctattggttgctccaaccggctggatcgttgagcataaccggtttgtttgtaccgggaaggctttatgtta

SEQ ID NO: 50 - DNA, 1233 bp, unidentified
  misc_feature 1..1233: note = Ga0172380_10022713 JGI
  source 1..1233: mol_type = other DNA
atgtcaagtaagaaatttgcttttgttgtagatattaaaggtaagaaattagcacctacacctgataataatgcatggtatttaattagaaaaggcagggctaaattattacaaaaattccctatggttattgaattacaaagagaaataccaaaagaacaattagataattcagaatatattgttggtatagacgatggttctaaacatgtcggtatttctattattcagaaatgtaaatataagactaaaactatatttaaaggaactttagaacaaagaaatgacgttaccaaattaataagtttaagaagatcttatagacggcatagaagagggcaaaaaagataccgtccagttaggtttaataatagaagttcatctaaaagaaaaggtagaatacctccatctattaagcaaaagaaagatgctattttaagagtagtaaataaattaaattcattacttccttctatatataaaatatttttagaagatgtagcaatagatattcgtgtattacaagatggtaaaaagttatatggagggcaatataaaatttctaatagattagacgagaatattcgtaaagctgtattgattagagataaaaattcttgtatgaactgtggtagatctaattgtaaacttgaaatccatcatataattcctaaaagaatgcaaggaaataatactatggataatcttatatctctctgtgagaaatgtcacaaagaggtaacaggacaagagtttagatttataaataagtttcaacaattaatcaaaggtaaaaacattcgttttgattatgctcaacatgttatgcaaggaaagacttatttaagaaataatttaagagatatagcagaagtaatcctaactactggaggagatacggctaacaaaagaataaatttaaatattgaaaaatctcattctaatgatgcagtagtaattgctggaggtaatgaaattacactttatgattgggttattaaacctctacgaaaaaaatcaaaaagtaaagggtatataattaatggttttagatgtagagacattgtaaaatatactaaaaaaaatggagagtcatataaaggctatatcacaagtcttgatccaaaaagaaatacttgcaatattactacatttaatggtatgcaattaataagatatggaataaaaagattgatcttgatagatcgtccaaaaaatgtaatatggatttaa

SEQ ID NO: 51 - DNA, 289 bp, unidentified
  misc_feature 1..289: note = Ga0172380_10022713 JGI
  source 1..289: mol_type = other DNA
aacagtaatttcttaagtggacacatagtctttagaaattagttgtttgagtgctttctagcctaagtgagtgtaaaaaatcgaaagatttttagcacgatgaactacgttagcggacaaaggcaaagacacacctttagatgtatccagcagtcttaagctctgtgagtattgaggaagaacaatttctaatgtcctgaagttaatcaccaaaaatacatgtcctcccgctgacattggcaagcaggaaaattcctaataagtgggtgacagagatgtcaagtaagaa

SEQ ID NO: 52 - DNA, 1281 bp, unidentified
  misc_feature 1..1281: note = Ga0310695_10007302 JGI
  source 1..1281: mol_type = other DNA
atggtttatgtattagataaggatggaaaccctctcatgccaaccaaacggtatgggaaggtaagacatcttctaaaggatggcaaggcagttgttgtcagacgtgatccgtttacgatacggcttacatacgacagcgggaaacacacacagcccgtaagccttggcgttgatgcaggaagtaagcatatcggtctatctgctacaactgaaaggaaagagctgctttctgcacaagtagatttaagacaggatatcagtaagttgctcatggctaggagagaaacacggcgtagcagacgtagcagaaagacacgttacaggaagccacgttttcagaaccgtgtccatagcaagcagaaaggatggcttgccccatctgttcaggcaaagtgcgatacacacgttaaagtcgtaaaggatgtatgtaggatactccctgtaacaactataacgattgagatggcaccttttgatacgcagaaactgaaggcagacatccttggtatgaagactccttcgggaactgactatcagcatggggaagcagaaggctttgataatatcaaagcttatgttaaatggcgtgatggttataagtgtgccgtatgcggtgcagaacacgttcaactacaggtacaccacaaaaagcaacgcaaggatggcggtacggatatgccggcaaatcttataaccgtctgtgctgactgccacaaggcataccacgcaggaactcttactggcagaaaatccgaggtcatgagacctgacacaaagataaagactatgcaggatgcttcgttcatgggcatcatgagatgggctgtctggaacaggctcaaagcactcggtatcccgctccacatgacgtacggttataagacggctgaaaagcgtaagcaatgtgatttgccgaaagatcaccgcattgatgcaaggtgtataagcggtcaccctgacgtagaacccgctggtgaatggttcttctgtaagaaggtgcgatgccacaacaggcaaatacataaggtcaagacactaaagggcagcatccgtaaacgcaatcaggcagaacacgagattaaaggcttcagactgttcgataaagtcaaatgtaacagtacggagtgctttatcttcggaagacgttctgccggatacatggatgtgcgtacgcttgatggaacaaaaataaatgcaggtatcagttataaaaaactcaaatttgttaaccctgcaaaacatttactcatagaaaggaggtgcgtctcctcccgcgactaa

SEQ ID NO: 53 - DNA, 309 bp, unidentified
  misc_feature 1..309: note = Ga0310695_10007302 JGI
  source 1..309: mol_type = other DNA
gtcaatgacccatgactaaagtcacgagcttgtaatcaaaagctccattgactagcctaagccttgaaataaaggctacgttagatatgttatcacacccgtgggcgtagcacctaacctacggctctgtgcgggccctgtaaacagcggtgagagggtaaaccgcagtcaacccaagatgaccgagtacggaaagcatttctaacattggcgaaggtgtgacaactgatatggtttttacatctgaaattcagaatgtaagactgtagtaaggcttactgtttaagtacagtagaaaggtaacttatg

SEQ ID NO: 54 - DNA, 879 bp, unidentified
  misc_feature 1..879: note = GENOME_ACESSION: mgm4547164.3 MG-RAST
  source 1..879: mol_type = other DNA
atgaaacattcatacgttgcttttgtaatagccatggacgggacaaggctgatgccatgcctgaatccaaagaaagtacgtagattgctgaaaagcaggaaagcggtcattgcaaaatatgacccgttcacgattcagcttacatatgaaacgactaatgaagtacagccggtggagctgtccgtggatacaggtgaacaacatattggcatatccatgaaatcagaaaaacatgaattcgttcatgaacaaagagacctgcttgcggatgagaaatcacaccacgatgaccagaggcgctatcgcagggcaaggcgtaaccggaaacgttacaggaaagcccgttttgataacaggcgcattccaaaaggctggctggcaccgagcctggaccacaaaaaagaacaacacatccggctttgcgaaaaatacgtcgatgtagcaccggtcacagccatctggctggaagccggacaattcgatacaacggcgctgcaccttgcggaacaagggctgccagcgcctagtggtacggattaccagcagggaccgcggtttggctatgataacctgcgggaagccgtcttttacagggatggtcatacctgccaggtatgcggttcgactatcgggaagattaagaccaaggaaggttataagtcaggtacggtcatacttcgaatgcaccatattgggtataggaccggtgaccatacagacaggatgagcaatctcctgactgtttgcaccaggtgtcacacctcggcaaatcaccagcctggcggcgctttatatgacttaaagccaaaagccaaaactctgaaaggcgccgcgttcatgaacacggtcaggtggtacatagttaatgctttaacctaa

SEQ ID NO: 55 - DNA, 421 bp, unidentified
  misc_feature 1..421: note = GENOME_ACESSION: mgm4547164.3 MG-RAST
  source 1..421: mol_type = other DNA
gtcaataacccccactaaatcgctgcggcgattttgagggggcttgacaggaatttcaatgaattgcctttgggtgaatcattgcctgacctgttaagcccgattgattagccccttcctgtgctggcaacagtacggaaagagacgttacccgtaaataacatagtcacgccagggtgcttcacaagctctggccactgagcctgttacattaaacatccctgagggtaggggaagtgtgtacagggtatacgtaagctgtttcctccgggacatggcttatgtatataaaactgcgggataacaagggcgttgtgaaccacgtccctacggggatagatgctgtacatgctctttatgtacagaaggcgtaagccaatttttcaggaaggaggcagcagccatgaaacattcatacgtt

SEQ ID NO: 56 - DNA, 1368 bp, unidentified
  misc_feature 1..1368: note = GENOME_ACESSION: mgm4547164.3 MG-RAST
  source 1..1368: mol_type = other DNA
atgacaacaatagtttatatattgaacaaagatggaaaacctttaatgccaacagaacgacacggaaaagtccgaaaacttttaaacgaaaataaagcgattgttgtaaagaaaattcctttcacaataaaattgctttatgaccaaacggaatttacacaacccatcacgctcggtattgacacaggtgctaaacatattggtatttctgcaaccacagaatcaaaagaattatatgcaggagaacataatcttcgtgatggaaaaacaagtgttacatcacttatgacaaagagaagaacattaagacgagcaagacgcaacagaaaaactcgttatagaaaaagccgatttgaaaatcgcaaaagaaaacctacagatggattcgacaaatggttaccaccaacaatacgcacacagattgctggtcatgaacatgttatacaagaagtatcaaagattcttccaatatcacatatcatagttgaaactgcttcgtttgatacgcaacttttaaagaatccagaaattcaaggaattgaataccaacaaggagaaatgagtgattggtcagctaacttaagagaatatatacttgcgagagacaattacacatgtcaatggtgcaaaaaaagttcattccaacatgatttggttctccaaacgcatcatatacagtttagaagtaatggaggttctaatagaccggacaacctcataacgctgtgtttggactgtcatcaaaaactccacaccattacaaaagaaactggaaaaattcctattgatttaagaaaatcgccaaatcttaaatgtgcagcatattcatctattatgaaatatggaatctttaatatggcaaaaaagtatgataaaaacgcaaacatgacatttggttataaaacaaagaaaacacgaatcgacacaaatcgaaaatttggattacatcttccgaaacaacattatattgatgcaagatgtataaccggaaatcctacagcaaaacctcttggtcaaatatacgtttcagaacaaagacgatgtcataatcggtccttctttgacacagtacctattaggatacctaaaaaaccaaatgaaaaagcacttatcaaaaataactcatatttcagaccccaaatagtcatgaccgatatccttggatttagagacggcgatataatagaagctgataatactctatacatggtaaaaagacgcggagatttaaaaacgcgtgtagcactcggatgtattcgttggaatagcgatgacactacactagaaacaatctcctcaaacaaagtaaagctctggtcaagaaataaagatagaattgtaattctaaaagaaaatattggaggataa

SEQ ID NO: 57 - DNA, 302 bp, unidentified
  misc_feature 1..302: note = GENOME_ACESSION: mgm4547164.3 MG-RAST
  source 1..302: mol_type = other DNA
ataaaacctcaaacaatagattcaaacacatattatttaacaataatcataagattatactaaaacaagactaagttccaaataaggaactacgttatgtgagaatatatagttacctgtcgatagaagccaagtcttcagctctaaggtcttagtttaaacagtcctattaggtagggacagtgattaagacatataaaacctcacaataacattgtcgatggctaccattacgagttatgcatctcggcttacagcaataaaatgcatacgataataacaagaaaggaatgacaacaata

SEQ ID NO: 58 - DNA, 1287 bp, unidentified
  misc_feature 1..1287: note = Ga0255336_100223 JGI
  source 1..1287: mol_type = other DNA
atggcagtattcgtactggatcgacgcggcagaccattaatgccgtgttcggagaaacgggctcggctgatgcttgagcgtcagcgagcacgcgttcatcgcgtgatgccgtttgtcattcgtcttaccgaccggctcctcgaggaaagcacattgcagccggtacgcattaagattgaatccgggagcaagataaccgggctcgcactggtgcgagaggatggcgagtcgaccgccgttcttaacctgtttgaattgatacatcggggtcgtcagatcagcgagggcctatctgcccgcagcaacttccgccgacgcaggcgcagcgctaacctgcggtaccgggccccacactatgccaatcccgcacgaacaagtggttggctcccacccagcttgagacatcggatcgacacgacgaaatcatgggtgacgcgttttatccggtgggcaccagtgagcggacttgttagcgaactggtgcgctacgacctcgcagcggcagaaggtgacgagagagcctccgacaataaggagcatgctgaaatcgccgcccaggagatacgcgcgtatctcttggataagtggggacgccaatgcgtttattgcgataccgatcgccaacatctgcagattgacccgatcgatcttcgtacggcaggcgagccggcaaggcacatatccggtttgatcctggcctgtacttcctgcatcgcgcggcgagctggacgtgacattggcgagttcgtcaccgatcgggcgcggctcgagcggctgcggaactggacaaaagcgccgcagagagatcgcgcggctgtagatggcgcgcgttcggccatcgcgcaattcctcgcaacgacggggctccctgtcgagctgtccagtggcggacgcacgaaatggaaccgtacacgccttgctcttcccaagtcgcaggctctggatgcggtatgtgtgggcgcagtcacggctgtcgtctgctggcgtattcccgtcatcaagataaagtgtacgggccgaggccgataccagcgaacacttgtgaacgcgtatggcttcccccgtgcccacctgatgcgcaacaagcgcatacataacgttcagaccggtgatcgcgttcgcgccaccgtcccgaccggcaagaaagctggtatccatacggggcgagtggcggtccgttcgcgcggctattttgatgtgcacaagccagacgggccggttactgggattcaccatcgatactgcgtcgttttgcagcgggctgatggatacagttattcgatgtaa

SEQ ID NO: 59 - DNA, 270 bp, unidentified
  misc_feature 1..270: note = Ga0255336_100223 JGI
  source 1..270: mol_type = other DNA
gtcaatcgctccggcctaacggccgaggcttgcaaaagcctgaggttgaccagccagagccctgcaaggggctacgttgtgcagaagttcaagacccactccgcgatgcttcctcagttgcggacactggaacctgcggcagtagacacgcttcgagcaagcacgaaacgggtcgcggggtaacgctgctgtacaacattggcgaggggagcggagcccgaatggctcccgtaacaaggttccgtaagggacaattgagaacacatggca

SEQ ID NO: 60 - DNA, 1275 bp, unidentified
  source 1..1275: mol_type = other DNA
atgtccaccaattatgtatttgtacttgatgcaaataaaaagcctttagcaccatgcaaggcaggaatggcaaggtcattattaaaagcaggtaaagccaaggtttttaggcgctatccattcagcataattctcaataaattggtagcagaaaaacatcaggatttacagctaaaaattgaccctgggtctaagcaaacaggttttgctttagtaactcaagaaggggaagttatttgggcgatggtcttaatccatcgaggtcaacaaataaaaaacgctatgcttaggcggcgaaatcttcggcgaggtcgccgccgtcgaaaaacccgctatcgacaaccgcgttttcttaacagaaagcgtaaaaaaggatggctgccaccaagtttaatgcacagagttttaactgtagaagcttgggttaacaaattatgcttcttagcacccattaattccctagcaatggaattagtaaagttcgatacccaaaaagttgaaaatcccgaaatctctggaattgaataccagcaaggaactttatcgggatacgatcttcgcgaatatttgctcttaaagtttaatcgcaaatgtgtttattgcggcgcaaaagatactcgcttagaaattgagcatacaactccccgttcaaaaggtggaagcaatagggtgtcgaatctagttattgcttgtcatcaatgcaacaaagataagggtgctatggatattagagaatttttgaaggataaaccatctcttttggaacgagttttgaaacaagccaaaacgccattaaaagatgcagcagcagttaatgcaactcgttggaaaatctttgaaactttaaaaaagacagaactacccgttgttaccgggagtggtgcgcaaaccaagtacaatcgtcgtcgattggatttaccaaaagaacattggatagatgcagcgtgcgttggggaagtagaaaaattaacaattcttacggctcaaccattgattgttacagcaatgggacacggttgcaggcagatggtacaaatggataaatatggttttccccgcaaaggttataaggctacaaaacctgtccctggttggaaaactggagatattatcaatgtcgtaaaaggccaaaatattggactaaaaggagtcaggattaaaactgtaagaagtaaaggcaattttgatatccgacatcaagatgaaattttgtctgtttctcgaaaccatatccaacccgttcacagacgagatggatacaattactcgttttga

SEQ ID NO: 61 - DNA, 253 bp, unidentified
  source 1..253: mol_type = other DNA
ataaagactaaccacaaatctaatcaaaacgcttatttgtgtttaaatggttagtccagcctacttttttaaggtaaacgttattttggtcacaatacgtcggaatgcgcggccagttccgacctctattgctcggcattaaacaggcaaagagacttgaaaagctagtgtgtcgagcctaacaagccaaaataaccgggcgaggccaactttacatttctataggagggacgcaacaatgtccaccaattat

SEQ ID NO: 62 - DNA, 531 bp, unidentified
  misc_feature 1..531: note = 11783J13700_1016113 | JGI
  source 1..531: mol_type = other DNA
atgttacgagtaccagttctatcaaagtcaggcaaacccttaatgccgactaaacctagtcgtgctaaccagacaccagagacacacgctgttgatggtgtgagcctagcggcgtttgagtttattcaatggcgggagcgatattctaagaatgccaagcatggcaactgggagggtggtgttcatataacaccagcgccgtttacggtaatccgcagaccacctattaaccgccggcagttgcacctatttgttccatccaagggtggcaagcgacgaaagtatggcggcacggttactcgtcatagcttcagaaaaggagacaaggttgtagctgaaaaagccggaaaaacctatacgggctggtgttctggagacaccaaaacacaggtttctgtttctaacggaaactggaaacgaattgggcagtttactgccaaaaaagtcaggttgttgcagcgaagcacgggtttaatcgtcgtgccttcaactggattgtcaaatcttaccactcaaagtggtaagatttga

SEQ ID NO: 63 - DNA, 313 bp, unidentified
  misc_feature 1..313: note = 11783J13700_1016113 | JGI
  source 1..313: mol_type = other DNA
ttcaataaccccaacttacttcgttgaagttggggattgccggacaaacggactgtttaaaccgttgaataccacatagagtctcggtttggtacaaactctcggatgcctccctagtccgagttacatttaaggctttttgtcgagtcgctgttaagtcaggacatcttaaccgagatggtgggaagggacatagtggtcagtggtcagtggtcagttatcagtggtcagtaattggctgataaatgataaccgatacctggtaactgataactgataacttaactcgtgaggtttatcacccatgttacga

SEQ ID NO: 64 - DNA, 783 bp, Symploca sp.
  source 1..783: mol_type = other DNA
atgcgagttttcgttctagacaaaaaccattatcctcttgacccctgccacccagcacgggcgagagaactactacactcaaggagggctaaagtatacagacgctatccgtttactattgttttgcaagacagaacggttgaagaatctacaactcattctcatcggattaaaatcgatcctggtagcaaggttactgggtttgcagttgtccaagaagagacaggacgtatcacaaacgcccttgaagtctctcatagaggacaacaaatcaaagattctcttgagtctcgtagagctttaaggagaggtcgtcgtaaccgtaaaacccgttaccgcaagtctcgttttcttaaccgcactcgtaaacaaggctggctaccaccatcacttgagagccgaatttccaatattgaaacttgggtcaggagaattagaaaattgtgtccaatcactgcaatttctcaagagctagtcaggtttgatttgcaacagattaaggtagcggcaaaaggacacggaaccagacaacgatgccgtcctgataagtttggattcccaaaagctcatgctccaaaggctaagtttttccaaggctttcaaactggcgatatcgttaaagccgatgttcaaaaaggtaagtttacgggtcaatatgttggtcgaattgccattcggttcagaccgagttttgtcctgcaactaccgaatcaaaagtttgatgttcaccccaaatacctaaaaactatccacaggaatgacggctatgaataccaattctga

SEQ ID NO: 65 - DNA, 262 bp, Symploca sp.
  source 1..262: mol_type = other DNA
gtcaacaactcaccgttaagttctagcgaactataacgggagcttgaaataaagctctagttgaccagactaaggtttgaaataaaacctacgttcagagtaagagttaaagttcctaccttaaaatacgtgccagttttaagctctagaactagaaagttaaacatctgtagttgagttaaggaagtgctttctagatgtaccgactttgaacattgtcgaggctaactttaccagaaatgagagtctcaaagtaatgcga

SEQ ID NO: 66 - DNA, 756 bp, unidentified
  source 1..756: mol_type = other DNA; note = Burkholderiaceae bacterium 16
ttgcagacaagcggcagggtaagcacgaaacggatccgggcacatcgccggttctcaacatgccgaggggagacctcccggaagggaggtgtttcccggcccgtaacaatgagggggattgccatggcagtcattgtgttggacagaagcagccaggcgtcgatgccgtgcagcgaggagcgagcccgccagctctccgagcgcggtcgcgcgtgcgtacaccgcctgatgccgttcgccatccgagatcgccgccgagcggactgcatcatcccgccgatgcgcatcaaactcgatccaggctgcaatgtcactggcatggccgtcgtgcgcgcggtcgatgccaatggcgctgcaccgaggcgccatgccgtcgcgctattcctggttgagccgatccaccacggcatgcggatccgaccgaatctaagtgtgcgcaggcgccatgcaccaaccgcgccgcagctgcaagccccgttatcgcgccgctcacttcgacaatcagcgccggcccgcaggctggctggtgccccgcctgcagcaccacatcgacacgacaatggcctgggtgcgcgcaccaagtacaaccggcggcgccttgatctgcccaagacccgcgccatcgatgcactgtgcatgggcgctgtcgtgtctatccagcattggcaggtaccggtgcagcccatcaaatgcgtcgcacgcgactcggcaccgtcggcttcccgcacggcgacctcatgcgcagcaagcaggtga

SEQ ID NO: 67 - DNA, 242 bp, unidentified
  source 1..242: mol_type = other DNA; note = Burkholderiaceae bacterium 16
gctgtcaacccctccctgacggatggagctctaaggcagctccgctacgttgtcaacaggggcaagaccaacgttgggatgcttcactcagtcccaacctccgcaagccccggttgcagacaagcggcagggtaagcacgaaacggatccgggcacatcgccggttctcaacatgccgaggggagacctcccggaagggaggtgtttcccggcccgtaacaatgagggggattgccatggca

SEQ ID NO: 68 - DNA, 435 bp, unidentified
  source 1..435: mol_type = other DNA; note = filamentous cyanobacterium ESFC-1
atgcaacgtatcccagtacaaaaccctgacggcacaaccgctatgcccacaaagcgcacccgcgctgaaaaatgggtaaaacagggtaaagcccagtgggtcaaaaccgacctccgaatcaaagctgtccgcctacgcactgttacccgacacggcttccgaaaaggagatttggttcgggctgaaatggcaggacgcatctccatgggctatgtgagtggtgacaccgcccgtcaggtgtctgtatctgatttcaattggaagcgaattggccagtttaccgcttccaaagttcaattactcgatcgcgcaacgggcattctggttacttgcccgaagatattgttagtcaacggggcaaccccgccgactaacgctcctatccctctctcacctgctgcgcgaggtgggggtatcaaaggagttttttcatga

SEQ ID NO: 69 - DNA, 224 bp, unidentified
  source 1..224: mol_type = other DNA; note = filamentous cyanobacterium ESFC-1
ttcaatgacctccaccgactacgcgcgtgtatgggggagcgatcggagataacccggtcgtagctgcgaataggctattcaggttagtgcggcaacacttccagccgcttctctaggttggattatctgtaaggccctggaatctcagggagtggtatcaaaccagacacaccgtactagctggcttaagagacctgtagttggggaattatcttccatgcaac

SEQ ID NO: 70 - DNA, 1356 bp, unidentified
  source 1..1356: mol_type = other DNA; note = Erysipelotrichaceae bacterium SG0102
atgagcgtatgcgttgtagcgccggataaaaagccgctgatgccgacaagcgagtaccgtgcaagaaagctgctgaaaagcggcaaggctgttatctttaagtataagccgttcacgatcatgcttacaagaatcgtaagcgagaatatgcagccgatcgagtactgctgcgatacgggatacaaacatattggtgtatccatcaaatcagaaaaacacgagtattttgactgccaatttgacatgcttcaggatgagaagaagcggcacgatgaccgtcggaaaatgcgccgcgcaagaagaaacaggcttcgctacagaaagccccgttttgataatcggacagcttccaaaaaggaaggatggctggcgccgtcgctgagaaacatccgtgatcagcatatccgtatttttgagcggttccttgaggtcatgccgatagtctcagccacgtttgaaatgggctcgtttgacgtccacgccatgcatgagtttgaggcaacaggcaccgtgcttaaaggcgatgattatcagaaggggccgcgatacggcatgaacacgctgagaaaagccgttttctatcgtgacaattacacatgccaggtgtgcggggaaaccgcggatgaaggcgctattctgagagtgcatcatatcggcttcgaaacaggcgatcatacgaaccgcatgagcaatctgctgaccgtctgcacaaaatgccatacttcggcaaaccacaagccgggcggaaagctgtacgacctgaagcctaggacgaagccgtttaacggcgcagccttcatgaacgctgtcagatggcagatgttcagaacgctgaaaagcacccaccctgatttagaatggcacatgacatatggcgctgctacgcaggaggcaagaagagtcctacaccttgaaaagtcgcatgccaatgacgcctacgccatgggagaattccatccaagacgcaggacgccttttatgcattttcagaagctgagacggaataaccgcatccttgaaaaattctttgatgcaaaatacgttgatgcgcgagacggcaagacaaagaaaggtgcagagctgtcatgcggacgcacagacagaagcgagtcaagacactccgagaagaaccttcgcgtattcagagagcggaaagtttcgaaaggcagacgcgtgatcagaagaagccactataaactgcgtcctggcgatactgttgttattggcggagagaagcatagggcaaagggcgttcataacaaaggcacatatgttgtgacagacgccaagaagtcagtgcctgttaagaaagtagagaagattattcatgcaggtgggtatatgcctgttaaatag

SEQ ID NO: 71 - DNA, 338 bp, unidentified
  source 1..338: mol_type = other DNA; note = Erysipelotrichaceae bacterium SG0102
gtcaactacccgcgactaaagtcgcaggcttgtctcgcgcaagtctaagactggcgtcggtacatatgtactagctgattagcctaatgtgtttcgggcactacgttatccgcaaaaatacaggcacctggggattcttcccacgtccctcgctctgcgggcatgcattaaacatctctgacgtgcaggagaagtgtgcatgtcatacacaactgcggataaccttggcgatgggaactaccctgaaagggagaaactgcatatatactgcctctggcaagcgtatgcaggcgtgcgtaagcgcacacttattcatcaatcttagctcagctgattaa

SEQ ID NO: 72 - DNA, 1254 bp, unidentified
  misc_feature 1..1254: note = Ga0075125_10000791 JGI
  source 1..1254: mol_type = other DNA
atgttagtatatatactgaataaacaaggtaaaccattaatgccttgtaaacccacaaaagcaaaacaccttctcaaagaaaaaaaagctagagttatccaagtagaaccatttatcatccaactattgtttggatcaagtaattatagacaaccaataacattaggtgttgatccaggataccaaaatgttggtttatctgctatatccaataaaaaagaaatataccgaagtgatgtgcaattacgaatagatatacccaaacttttaatggaacgcaaaatgtttagaaaaaatcgcaggaacagaaagactcggtatagaaaaccacgttttgataaccgtagcaaaaaaaacggtcggcttgtaccaagtatcaagcacaaacttgatagtcatattcggttagtaaatgcagtcgaaaaaatattacctattactaaaattattattgaggttgcatcttttgattcgcagaaaatgcagaaccctgagatatccggagttgaatatcaacaaggaactctgcatggttatgcagtaagagaatatttattggaaaagtggagtagagagtgtgtctattgtggaaaaaggaatgtacccttggagatagaacacattgtgccaaagtcaagaggtggtacagatagagtatcaaatcttacattatcatgtcacgaatgcaatcaagaaaagagcaatatgactgcagaagagtttggacatccagagattcagaaacaggcagaaaaatcgttgaaggctacagctttcatgaacattgttcgttggaaattggtaaatattttgaactgtaagcatacatatggtaatataactaaacgcaacagaataaaaaatgatattgtcaaatctcatagtaatgatgcttttgttatagctgggggtactaaagatgtggatcgatcagatgttctcatcaaacaaaagcaggtacgcagaaacaatcgcaaactggtcaagggtcagagaggtgagatatctaacaaatgtccaagagaagtattcggattcagattgtttgataaagtagtatataataacaagaaatattttgtttggggacgtaggaaaggaggatcttttttgcttaaaactttatctggtgataaaattgagagaacatataaaaagttacaaaaggtatgtggtcaggtttcttttcttgttgagatccaattttcatccattctaaacgaaggttttttaagaggtataatcaatgaataa

SEQ ID NO: 73 - DNA, 236 bp, unidentified
  misc_feature 1..236: note = Ga0075125_10000791 JGI
  source 1..236: mol_type = other DNA
ggtcaacagccctattctaatgaacaaatcttatgaagttgactaggaggcataatatgcagacgttaagaagaagaaacacatacacaccttaccgtaccactctagcggcaagctctgtgaccatgcaattaaacagacctgttagggtagggttagtgttgcaaagtctcaaaactcttcttaactctccgaagagaccattactcggaaacaggaggtatactttatgttag

SEQ ID NO: 74 - DNA, 1005 bp, unidentified
  misc_feature 1..1005: note = Ga0180109_1294567 JGI
  source 1..1005: mol_type = other DNA
atggcagttttcgtattggacaagaggagcaaaccgctcctcaatcgcaggaggcccgcgggctctcttgcaccctccctgcgccaccgagtcgatacgacgatggcatgggtgcagcgtatctcccgatgggcacccgtgacagcgatcggtacggagctggtgcgttttgatacccaggcgttgcagaacccggacatcgaaggcagtgaataccagcaaggcgaactcgccggctatgagctacgcgagtatctgctggaaaagtggggtcgctgctgcgcctactgcggcgcgacggatgtgcccttgcagatcgagcatatccacccaagggccaagggcggaagcaaccgcgcggccaatctcacgctcgcttgtgtgccctgcaatacggcgaaaggggcaagggacgtgcacgagtttgtcaaggacgacacgcgcctgaaacgcctcctcggacaggccaaagcgcccttgaaggatgcggcggcggtgaatgcaacccgccggatgctttgtcgtgccttgaaggccaccgcactaccggtagaaatcggctcaggcggccggacgaagtggaatcgttcgcgtctcggcattcccaagacccatgccctcgatgcggtctgcgtcgggcgcgttgaagcggtgaagggatggcagatcgccgcttggcaactcaaggccaccggacgcggaagctaccagcgcacccggctcacgaaatacggttttccgcgcggctacctgatgcgcgaaaagcgggtgaagggtttccagacaggcgatttcgtcgtggccgcagtaccgagcggcaagaagactggaatctatactggccgcgttgccgtgcgaaaatccggcagcttcaacattcagaccgcatacggcgtcgtcgaaggcatcggccacaagcattgccggcggattcagcggtctgatggctatgggtattttttacaaccatgggccgtaacaaaaggagagcgggagggactttcg

SEQ ID NO: 75 - DNA, 298 bp, unidentified
  misc_feature 1..298: note = Ga0180109_1294567 JGI
  source 1..298: mol_type = other DNA
gtcaatcaccccggcctaaaggctggggcttgagggggcaaccccaaaagcccgagattgaccagggaaagcggtagccaatccgctgcgttgcaacgaagtacaagacccacatacggatgcttcctcagtccgtagcactggaagcggcagatgcagacaaggtccgggtagctacgaaacggtctgctgtaaggcgaaaacccaagctgcgttgcaacattcccgaggggagcggtgctgcaaggcacccgtaacaaggcccgtaagggcattttagtggacaagaacgatggca

SEQ ID NO: 76 - DNA, 1485 bp, unidentified
  misc_feature 1..1485: note = Ga0073583_1167572 JGI
  source 1..1485: mol_type = other DNA
ttgaacgcgaagttaaagaccgacggtagggtgcttcctcagccctgccctctcgaagctcatgctgcagacaacccggatcagggacgaaacgggtgtgggcgcgatgctgccgttcaacatggtcgaggggagcccaacggaaccgtcaagccgttggcgtcacgggcggaagcccagtgcggcgtaagccgcgtatttgtgctggatcgaaaggggttacccttgatgccttgtcatccagcccgagcccgcaagctactcaggaacggtagagcgcgggtccatcggctgattccgtttacgatccggatcgtagatcgagacgtcgaagacagccaactgcagccagttcggctcaagttggatcccggttccaaggtaaccggcatcgcgatcgttcgtgaggacggtgctgatcagcatgtattgcacctggccgagcttcaccaccgaggacaggtcgttcgcaagaaaatgcaacagcgtgcgatgtaccgtagacgtaggcgttctgctaacctccggtatagacagcagcggtttggtaatagaaagcatagacttaaaatcggaggaaaatggctaccgccgtctatacatagttgcgtaagtaatatacttaattggtctgtaaattacagagggtggtgtccggtttccggacttactgcagagaccgccaaattcgacacccagttgatgcaggaccccgagatctcaggcatagaatatcagcagggcgaactccaaggctacgagatccgggagtatctgctggagaagtggggcaggatgtgtgcgtattgtgctggtaaagacatcccgttgcaggtggaacacgtggtgtcgaaagctaagggcggctccagccgtgtcagcaatttgacgttggcctgtggtccctgcaaccaagctaagggtgctcgggacgtccgtgagttcttgcaggggcgccctgccagattggcccatctactgtctaagacgaaaaggtcgctgcgaagtgcagcagtaatgaactctacacgtaatgctttgctcggtgcattcgcctcggcgggttttttggtagacacagctacaggaagtcgtaccaaatacaatcgagaacggttacgcgtcgcaaagacccatgcccttgacgctgcttgctgtggtctagttagccgcgttttggggtggggacagcgtgtattgacaataaaagctcagggccgaggaaaataccaaagaaccaccacgaccaagtatggcttccctcgaagctattcgatgaggaaaaagaaagtacatgggtttcaatctggtgatcttgtacgcgcagtaatcaccaaaggaaaatatgtaggtatacaccaaggaagtgtagtggtccgctcgcggggctttttcgacgtaaagacaccagaaaaaattggtgttaattggcgctattgctcactacttcagagatcgaatggctactcttgtagctacagctaa

SEQ ID NO: 77 - DNA, 233 bp, unidentified
  misc_feature 1..233: note = Ga0073583_1167572 JGI
  source 1..233: mol_type = other DNA
gctgcagtcagacgatcttctcttcggagaaagccccatgggctcatgctgaccagaccaagttcacagaaggctgacagccgcaaaaggaactacgttgaacgcgaagttaaagaccgacggtagggtgcttcctcagccctgccctctcgaagctcatgctgcagacaacccggatcagggacgaaacgggtgtgggcgcgatgctgccgttcaacatggtcgaggggagc

SEQ ID NO: 78 - DNA, 957 bp, unidentified
  misc_feature 1..957: note = Ga0070741_10072506 JGI
  source 1..957: mol_type = other DNA
atgtcaaaagttttcgtgggagatacccaccgaacgccgcttgatccggttcatccgggccgcgctcggcttctgctcaagcaaggcaaggcagccgtgtttcggcgctctccgtttccgctcctcttgaaggtgcagggaacctatccgaagccacagccgctgcgagtcaagatcgatcctgggagcgacgtccccggtctggccgtcctggatgacgccacgggcaaagggatctgtgcggtggagttggggcaccgtgcaggcacgagtatgcatgcactggagagctgcggagcaggccggcgctcgcgccggcaacgctacacccgttaccgccaggcaagatggcgcaatcggcgggccaggtatcgcactcgcgaatgccagggtcagccatctcttgcactgtctctggagagcagactcgccaatgtgctgacccgggtgcaacggcttcgtcggttcgcgccgattcctgccatcagtcaggaacgggtgacgtttgatatgcaactggtgagccatctcgaaatcagcggcgaagaggaccaccagggcgatgtacggggccttgaagtgtatgagtatctgctcgagaagtggggcaagccaggtgcctcctgcgcgacaaaacacgttccgctccagattgagcatatgctggtccgcgccaacggcggaaccgaacgggtgagcaatcgttgcctggcctgtgagccctgcaatctcaccctggcgaagaagccggaggtgcttgagcgtatgctggcacaggccacggctccgttgaaggatgcggcggccgtggatgccatgcgaggggcaccgtatcggcggctggtggcgttggggttgccggttgaggcagagactggcgggaggaccagatggaatcgcaccacgcgccagttgcccgggatgcatcgggtggaggcagcctgctccggtgccagt

SEQ ID NO: 79 - DNA, 263 bp, unidentified
  misc_feature 1..263: note = Ga0070741_10072506 JGI
  source 1..263: mol_type = other DNA
tcatgaacccctgtattcaatgcaggagcttgcagtgaggcatcagctcccctgtaagccctcatcatgaccttgaaagagagcctgcgttttcaggaagcgttcacgttcctcccttcgggtgcgcggccatagtgaaacaggtcgaggaggtgaaggcagtactgagaagacagttaccgcctgaaaaccttgtcgaggccaacgttacccgtgcaagcggagtccctttcgagggcagaaagtcaagcatcatgtcaaaa

SEQ ID NO: 80 - DNA, 804 bp, unidentified
  misc_feature 1..804: note = JGI12273J12029_10000967 jgi
  source 1..804: mol_type = other DNA
gtgcccgtagtaagtcaagacgcaaaaccactaatgcccacaaagccaagcagggcaagaaagggggtgaaagttggtaaagcaatcggcaaatggtcagacttaggagtctactatgtgcaactgctgcaaccatcgggagaagaaacgcagcctattgtggttggagtagaccccggtaaatcttatgctggaatcggagttcaatccgctaaatacaccctactaaggctgcacttaatccttccctttggtcgtgttcgagaaaggatggataaacggcgagagttgaggcgttctcgccggggaagaagaattaaccgcaagctaccacgcaagctacgcaatcaccgacagtgcaggttcgacaatcgtaaacagtctaagattgccccttcaatcagggcatctcggcaactggaactgagagtagttaaggaattatcaaaaatattcccaataatcacgataggttacgagcgagtcagagcgaatgtagacagaaccaagaggaagaaagccaagtcaggtaaaggtttctctccggtgatgtcaggtcaaaactgggctatcgaacaaatgggagctattgcacctgtcttcattcgggaaggatggcaaaaagatggcaacggtacatctcagattagaaagcatctgggattggaaaaggacaagaaaaacaaaggcgaggctaagccagaaactcatgcagtagatggtgttgccttagcagcaggatactttgttcaatacagccgtcacatccgtgtaaatattcagggatatatctggaaaggcaat

SEQ ID NO: 81 - DNA, 232 bp, unidentified
  misc_feature 1..232: note = JGI12273J12029_10000967 JGI
  source 1..232: mol_type = other DNA
ttcacgaacccctggctagtacgttgagccaggggattgcaggagataaccctgcatgaaatcgtgaatacggctctcgttggcgcgagacaaacacttccgaatgcttccctaattcggatgaaatgtacagaccctggaatcttagggggtggggtaaagcccagaaacaatcgcgccaatgccgtaagggactataaactttagctctaaaggattatctccatcatta

SEQ ID NO: 82 - DNA, 1278 bp, unidentified
  misc_feature 1..1278: note = MIS_10001517 JGI
  source 1..1278: mol_type = other DNA
atgaataatgtgtttgttttggatacggggaagaagcccttaagtatgtgtagacctgctagggctagacagttattgaaagaaggcaaggctgctgtatataggaaatatccatttacgataattttgaaggtggcaatgcctgaagctgtggtgaaagaggttattgttaaattagaccccggaagtaaaacaacggggattgctttagtatctgataatcgggtggtgtttgctgctgaattagagcatagggggcaatatattaaaaatagaatagttagacgtgctgcattaaggcgtaatcgcagaagtcgtaagacacgttatcgtgctgcgaggtttaataataggtgccgtaaagctggatggttaccccctagtttacaacaccgtgtattaactacgatgacgtgggttaataaatttagaaagtttgcatcagtatctgaattggcgatagagagggttaaatttgatatgcagaagatggtaaatcctgaaataagtggtattgagtatcagcaaggcacattgcaagggtatgaggttcgagaatatttattagagaagtttaatagaacctgtgtatattgtgatgctaaggatgttccattgcaaattgagcatatacatgctaaatcaaaaggtggctcaaataaaatttctaatttaactttagcctgtgaagcctgtaataagaagaaggataatttagatattaatgtatttttaaagaataagcctgagttattaaaaaatatattgaaaaaggttaaaacacctttgaaggatgctgctgctgtaaatgctactaggaatgccttatttaaagcacttttagatactggattacctgttgaaacaggaactggatcacagaccaagtacaatcgtaccaatctaaaattaccaaaagagcattggatagatgctgcgtgtgtaggtgattctggttctgaggttaaggtggatgctacttttaaacccttaaaaataaagagtatgggtcacggtaatagacaaatgtgtattactaataaacatgggtttcctattaagcacagaactaggaaaaaagtacattttggatttcaaacaggggatatagctagagttgtagtttttaaaggggttaatacgggtatccatgtgggtagggttatctgtaatattaagggtaacttttctgttagaactactgctaggatatatgaaactatctcgtataagaagttcatcttacttcaaaagaatgatggatatagttataattaa

SEQ ID NO: 83 - DNA, 289 bp, unidentified
  misc_feature 1..289: note = MIS_10001517 JGI
  source 1..289: mol_type = other DNA
ataaagaatactccgttatatacaggggcggcatcagtatatccgtgtcgaaaagttcatttaaaaactttaattagttttaatttacgaccagactaagttttaagtaactacgtacatttaatcataacacctatgaatgctttccagtttgtagctctgttgttaattatcaagatattatggttgaacacataatgaaggtgattagcttagtaagttttatgtacattgtcgaggaaaacataaccaacgaaagttgcgtaggagtattaaaaccatgaataat

SEQ ID NO: 84 - DNA, 765 bp, unidentified
  misc_feature 1..765: note = MIS_1002273 JGI
  source 1..765: mol_type = other DNA
gctgtctggaaacgttacccgttcaccatcatcctgaaagatgttctaccaaatccccaaattgcacccttgcgattaaaaatagatccaggcgctaaatttactggcttagcactggtagatgatgcaacaggagaagtagcttgggccgccgaactagaacatagaggctttcaaattcgcgatgctttaaccaaacgccgccagttaagaagaggaagacgccatcgaaaaactcggtatcgtcaaccacgctttgataaccggaaacgccctacagggtggctcccacccagtctgcaaagccgagttgagaatatcgtaacttgggttcgtaggttacaaaagctagctttgatttctgatatttctcaggaattagtcaagtttgatactcaactcatggagaatccagacatcagtggattcgcataccaacaaggtgagttagctggttacgaagtgcgagaatttctgcttttcaaattcaatcatacctgtatgtactgtggggctaaagatactcgtttggagattgagcatcttttacccaagtctaaaggtggttcaaatagaattagtaatttaggcattgcttgtaggaattgcaaccaaaaaaaaggccgtcaagctctcagagaatttttagcccaaaaacctgacttgttacagcgcattctgagacaagtaaaacaacagaaagccgacactgctgccgttaattctacccgttgggcattatttaatcgactcaaagagactgga

SEQ ID NO: 85 - DNA, 254 bp, unidentified
  misc_feature 1..254: note = MIS_1002273 JGI
  variation 216..254: note = n represents any nucleotide
  source 1..254: mol_type = other DNA
gctatccgcgaaccactggacaaacctggacaatcccgataaatccttggtagagatagcccggttaagtctaaccacagactacgttaagaaggtcacgacaccctgtgagtgcttgccagctccttgctctgtcgctaccagttaaacatctttatttcgctaaggaagtgctgctagcatgacaagccctcttaacattaccaaggcaaaagnnnnnnnnnnnnnnnnnnnnnnnnnnnnnnnnnnnnnnn

SEQ ID NO: 86 - DNA, 1245 bp, unidentified
  misc_feature 1..1245: note = Ga0377217_000700 JGI
  source 1..1245: mol_type = other DNA
atgaccactaaacaattcagtttagttattgattcagagggaaaacagttaagtccaactaatgccaataaggcatggtatttaattaggaaacaaaaagctaaattaattacaagatttccaatggttattcaattgttcaagaagattattcctaaagcaattgataaatcaaaatttatctgtggcattgatatcggcaataaacacacgggcatcgcgattgttcaagaatgccaaactaaatctaaagtaatattaaagggaacaattgagcatcgaaatgatgttaaaaaattaatggaagagcgagcgagttatcgcagatatcgtagaaaaaataagagatatcgccccgaaagatttaacaataggggttcaagcaaaaagaaagggcgcatcgccccatctattagacaaaagaaagagtctattctaagagtaattaataggttaaagagacatgtatctatccataaatatatagtagaagatgttttaatagatataagaaaaattcaagagccaaatatttcttcaacggaataccaaaaatctaataaattagattctaatattcgaatggctgttatgatgcgtgataaatttaaatgccaagaatgtaaaagaggttatgctaaattagaagtccatcatataacgccgaagagattaagtgggaacaatacaattgataatctaataacgctttgtgtcgattgtcataaacaaacacatggaaaagaagaggtatttataaaaaaatattataatattataaaaggaaaaaatattaatttcagggacgcttcgtgcgtaatgcaaggcaaaacatattttagaggtgaattaaataaactagggatagtcgagttaacaactggatgcgaaactttttataaaagacatatgtggaatattattaaatctcattctaacgacgccatagttatttgcaataaagaggtttgtcaagaacaatgcaacataatcgattggattatcaagccattaagaaggcaaagcaaaacagaatataaagaaatatgtggattgacacatcgggattttgtatgttacactactattaagaacgaaatagtgactggatatataaccgcaatgcctattggcaaaaaccaagtaaatattcaatctaagaataaaaaatggactagggtaagagccgaaagatgctttttaattaatcgtcctaatagaataatgtggagaattaatgattaa

SEQ ID NO: 87 - DNA, 268 bp, unidentified
  misc_feature 1..268: note = Ga0377217_000700 JGI
  source 1..268: mol_type = other DNA
tcgaaatcttattaatatgttatttattcgggttcaagctcaagtgagtgcataatctgaaaggaagttgcacgatgaactacaattttacagaaggctaaaaatacacctacgaatgtaacttcagtttgtagctctgtaagcacaaaggatgaccgacacctacgacatggtgtcaaacaccgaactgcatatgccctgtaatgttatgagcaagaagtaaaacgctcgaaagaaggatggttagaaatgaccactaaacaattca

SEQ ID NO: 88 - DNA, 1395 bp, unidentified
  misc_feature 1..1395: note = Ga0180007_10009944 JGI
  source 1..1395: mol_type = other DNA
atggtattcgttatctcagaggatcggaagcctttggatatgtgttccgaggcgcgtgccaggatcctgttagacaaggggagagcggttgtctttagacactttccctttgtaatattgctcaaaaatacctggtcctttgcagccgaaactcacgaatacaggctgaagatcgatcctggcgcgaaatttgctggtcttgccatcctgagagaggataacggacaggttgtatgggcggcggagatacagcatcgcggctggaagataaaaaaggacatggacaggagacggaattgcaggagagggagaaggagcaggaaaacccgacatagagagccgaggtttgataatagaacaagaccgaagggctggctgcctccgtcgctgatgcacaggccgttgaccgtttacacctggctcaagaggctcatgaggtattgcccaatagagcacatatccatcgagtctagcaagtttgatacgcagaagtttgagaaccctgacattgaaggcgttgaatatcagcagggagagcttcagggctatgagctgcgagaatatttgctggagaagtacaacaggctgtgtatctactgcaaaaacccggcgcgtattcccaacgttgagcataatgtacctatgagccggggaggtacggacaggctaaaaaacctggttctgtcatgtgagaaatgcaacatagagaagggaagcaggaccgccgaagaatactttaagttcttacgcaagcgcgaagagaggaaattagagcgggagctgactgagctggaggcatggcggttttcagctaaaggcgcgatccgtcctgagtttatgaaggcaatagccgtgaccaacagcataaggaataaactggctgaactcctgagatcaaccggaatacctctggaagttagctatggatacgtcacgaaaaagaaccgccaggagctgcaacttgagaaggcccattggatcgacgccgcctgtgtgggaacacagaggcagccagataaggaatctattgacaagatcaaaccgttgcaaatagtctgcaagggacgtggaacgcgccggagggtccaggtttacgggccttataaactggatgataatggaaagcctattataccgaaggctaaaaaggatttccctgccgtagctcctgggatgccatgctcaaagcccaaaagcggaaatgagtttttcggcttcaagtctgtcgactacgttaaggccaggactaagcaaggggagaaaacagggagacttctttctgtgaggaaaaccggaagctttacactcagaacaagggataagcaaaaatacagcgtaaattgtaagaattgcagcattatacagcggaatgatggttacgaatatttaaactaa

SEQ ID NO: 89 - DNA, 316 bp, unidentified
  misc_feature 1..316: note = Ga0180007_10009944 JGI
  source 1..316: mol_type = other DNA
aagaatgttgaaatattttcgcaaatcggatttctgcggaaaaacccgcttgatttgcgcaaatccgtctgcaattgcataattgatggctacagagttgtaaccagcctaagacgctttataacggtctacgttatcggcagagctaaagaacgtaccctgggatgcttgccagtcccaggctctataattcatgagttaaacaggcgatctgagtcgaagccagtgctcgtgagaaaagctgaccgataacattggcgaggcaaacgttacccgcgaaagcggagttcccttacgggaaaaggaaacgcagatg

SEQ ID NO: 90 - DNA, 1401 bp, unidentified
  misc_feature 1..1401: note = Ga0233412_10000478 JGI
  source 1..1401: mol_type = other DNA
atgcagaagtttaatttaaagttaaagaacacaccaaaggatgctccacaagtcctttgctctgtaaattcttcattaaacaaagatcaaagtcttagtgtgaagaataaagtactggaattaaacagtcccgatgtggatctacctcaacgtaaagaggagaagaacttgagagtctcttctatggtttacgtattaaataaacgaggagaacctttgatgccttgttctccacagaaagcaaagaaactgattaaggagaatttagcatgtatagttagaagaagtccatttactattcagttaaaatatgcgactggagagaataagcaagaagtaacattaggaatagattctggagctaagaatataggttttagtacagtctcaaaagaaaaagaattaataagtggaactgtcattttagatgacaaaatgaaatctagattagataatagaagaatgtatagaaaacataaaagaagtaaactttggtatagaaaacctagattcaataatagagtttctactaagaaaaaaggttggctaccaccttctattttgagaaaatatcagactcacttaactcttatctataagattaagagattattacctattaaacaagtaatagtagaagtaggtaattttgacatacaaaaaattaagaatccagatattaaagggaaagagtatcaagaaggtgatttattaggatataacaacataaagtcttacatttttgcaagagaaagttataaatgtcaactttgtgacaagtctgtaattggtagaaagactaatttacatcatattatccctaaacctgaaggaactgacaagtctgataatttagccttattgcacaaaaagtgccataaaaaacttcatgaacaaggtttgcaaggtaagttaaaaaagagtagacaatacaaagaagcaacatttatgaatattgttaagaatagatttcaaaaagatttagattgtaaagtagtttttggatatgaaacttttactaaaagaaatgagttagatctgcctaaaaatcatgttaatgatgcttttgtaatttctggtggagagaaacagattaggactatcccttttgaggttgcacaaaaaagaaaaaacaatagatgtttacaaaagaatagaaaaggttttaaaccttctattaggaaacaaaggtactctatcagacctaaagatttagtaaaaatagaaggtaaactttttgtagttaaaggtatatctagttatggaaagtgtattagtctaattaacgaattaggaaaaaccgttaataaatcagttaaaaaaatagattgggtttttcataataaaacgttgatatgggagaagactacagttcatctaaaagaaagtttgcttacataa

SEQ ID NO: 91 - DNA, 273 bp, unidentified
  misc_feature 1..273: note = Ga0233412_10000478 JGI
  source 1..273: mol_type = other DNA
gtcaattaccccttcttttaggaaggggcttgaaccgtgaggtttaacgtaagagttgattagggagcttagttaagaaagttaattatgcagaagtttaatttaaagttaaagaacacaccaaaggatgctccacaagtcctttgctctgtaaattcttcattaaacaaagatcaaagtcttagtgtgaagaataaagtactggaattaaacagtcccgatgtggatctacctcaacgtaaagaggagaagaacttgagagtctcttctatg

SEQ ID NO: 92 - DNA, 1236 bp, unidentified
  source 1..1236: mol_type = other DNA; note = Clostridia sp.
atgaccgaatattgttttgtgttagacaaagacaacaaaaagctttcgcctacaaatgttaataatggatggagattaatcagaaggcaaaaagcagaactggtttccagatatcccatggcaataaagcttaaaaaagtagttaaagatgaagacacagacaaatctgaattttcatgtggtatagatacaggaagtatttatacaggcattgcaatcgttcagaggtgcagcacagggaataagccggttttcaaaggaactttggagcacaggcaagatgtaaaacaaaaaatggaaataagacgtggctacaggagatataaaagaagcaataaacgatacaggaaagcgagatttgacaatagatctgccagtaaaagaatcaacagagcagctcccagcatattacagaaaaaacaggctatcgtcagggtattaaacagccttaataagtatataaatatatcaaaggtcgtaatagaagacgtagccatagatatcagagcattgaccgaaggttgtaaactgtataaatggcagtatcagcagtcaaacagattagatgaaaatataagaaaagctgttattctcagagataagtgcaaatgcatggaatgcagcagatcaaacactaaattagaggtacatcatattgttccaaagcgatcaaacggcaaaaacaacctgggaaatttgataacactctgttctaaatgtcacgatgaaactaaaggcagggaagaacagttcatcaataaatatcaggggatgatagatggcaaaaacataaggtttgattatgcccagcatgttatgcaaggcaagaattggcttagaaaagaattatctaaacaatttcatgtggaatttacttttggttcagatactgcaaacaaaagaatcgactggaatatagaaaagacccacgccaatgatgccatatgcattgcaggccttgaagtcaatgaaagaaagtgcggtattaaggactggacgataaaaacaatcaacaggcgctgcaaatcaaaacttaaagaagaagtatgcggattcaggcacagggattatgcggaatatacagacactaaaggagtaagttatacaggatatgtaacagccatgtaccctgaattaaatgccatcaatattaactctccacaaaaacatttgaaaaaagcaaatgctgaaaaatgtaaattagtgtggaggtttaataagatatattggttttaa

SEQ ID NO: 93 - DNA, 304 bp, unidentified
  source 1..304: mol_type = other DNA; note = Clostridia sp.
tatatagatatgtacaaatatactcacagtcccataataccctgttagtatatgacttaatgtcaggtttcaagcctaagtgaatactgcactgtgaaaacatgctgtatgatgaactacgattgtatgaatgctgaagacttaccttcagatgtgatttgcagtctgaagctctaagagtacaaaggatgaccgacttctaattgggtgaagtcaaacaccgaaatacatgagcaccatactgtcattggcaagcagaaaaatcccacgaaagtgagagtggttagaaatgaccgaatattgt

SEQ ID NO: 94 - DNA, 1554 bp, synthetic construct
  source 1..1554: mol_type = other DNA
gtgcttcctcagccccaagctcttgaatctgtgcctgtagacaaccctggggtagggacgaaacggggcacggacaccgccgtgatggtggtagctggtgtgcaacatggtcgaggggagaccacccgtgagggtggcgtcacgaaccatcagcgggagaccgcaggtggttccggaagccgggttgtcccggcaacaacacagcagcgggtgttcgtacttgaccggcatggtcgtccgttgcagccctgccgtcccgccagggcgcgcaagctacttcgtcaaggccgtgcgcgtgttcatcgcatggtcccgttcgtggtccgcctgattgaccgggaggtggagaccagtgtcgtcgatggggtgacggtcaaggttgatcccggatcacgtactaccggtctggctgttgtggagcagcgggacaccctcaaccccgccaccggcgaaaccaccaccgtgaaggggttgtggttgggcgagctcgtcctgcgcggtctccagatcaagcgcgcgatgcattcgcgtgctgctcttcgcaggggtcgccggtcgcggaacctgcgctaccgccaaccgaggttcaacaatcgcacccgacccgagggatggcttccgccatcactacaacaccgggtggatgtcaccttgtcgtgggttcggcgtttgagtcgctgggctcctgtcatcgctgtcgcctatgagctcgtacggttcgacacccaagcgattgagaaccccgacatctccggtgtcgagtaccagcagggcgctttggctgggtgggaggttcgggagtacctgtatgccaagtgggggtaccgctgcgcgtactgcgatgcccccggggctggtgtgcagatcaacatcgaccacgttgttccccgatcccgcggtggcagcagccgggtgtcgaacctggtaccggcgtgccgcccatgcaatgaactcaaggacactcggctggttgaggacttcctcgcccatgaccccgcacgtctcgcccgcatcactgccgggctgaaacggccgttgcgggacgcggcagcggtcaacaccacccgctgggtgctgtggcggcaactcaccgccctcggataccaggtgaccaccggcacaggcgggcagacccggtggaaccgataccggcaccgcatccccaagagtcacgcgctcgatgcgctgtgcgtcggggccgttgacgcgggggctagctacacggcgggccccaaccagatcatggccaccggcaggggcagctacgcccggacccgcagcaacaagtacgggttcccccggctgcggctcacccgcacaaagcggcactacgggttcgccaccggcgaccttgtacgcgcggtcgttcccgccgggaagaacaccggaacccacatcgggaaaatcgctgtccgagcctcggggtcattcaacatcaccaccacaaccggcgtcgcccaaggaatccaccaccgtcacgtcaccctgatccaacgcggtgacggctacacatacaaaacccaaccgacacccacgaaaggcatgacatgatag

SEQ ID NO: 95 - DNA, 324 bp, synthetic construct
  source 1..324: mol_type = other DNA
gtcaggcaccccacggctgaagccgggggcttggtgattccaagccgctagcagcagccgagtttgaccagaccgagatacctcgaagggagggatctacgttgtacataagtgagcggaccaaccttggggtgcttcctcagccccaagctcttgaatctgtgcctgtagacaaccctggggtagggacgaaacggggcacggacaccgccgtgatggtggtagctggtgtgcaacatggtcgaggggagaccacccgtgagggtggcgtcacgaaccatcagcgggagaccgcaggtggttccggaagccgggttgtcccgg

SEQ ID NO: 96 - DNA, 1263 bp, synthetic construct
  source 1..1263: mol_type = other DNA
atggtatatatccttaataaacataatgagcctctgatgccttgtccagagagaaaagcaagacttctcttgaaacagggaagggctgtcatatacagaaaggacgtgtttaccattaaactgataaatggaagctatggatataaacagcacataacaatgggaattgactgtggaagcaaacatataggaatttctgcaacaaccaataagaaagaactgttctcggcaaatgccgaactaagaaatgacattgttaagctactttctgatagaaagtcattaagaagaaacagaaggtacagaaaggcaagatacaggaaacccaggtttgacaacagaaggattaaagaagggtggctcgcaccatcaatcagacaaaagattgactcacatgtaaggattgtcagtttaatccacaaattgttacctgtgaaacaggttaatgtggaggtggctgcatttgacattcagaagattaaaaatacagacattaaaagctctgaatatcagatgggggaacaacttgattcttataatgtaagggaatatgtattgttcagggacaatcacatttgtcaacattgcaagggaaaaagcaaggatgatgtattgcaggttcatcatattgagagcaggaaaacaggtggcaatgctcctaacaacttggttacactttgcaagacttgtcatgaaaagtaccattcaggtgaaataacattgaatgttaatcgtggaaagtcatttagggatgcgagtgcaatgagtacgatgaggtggctcttgtatgaagaactgaagagtaggttcagcaatgtgaatattacttatggttatattactaagtacaagaggattaagttaggcttgtctaaggagcattacaacgatgcttattgcatagctggtaatcttaatacaagtaggctttgcaatcatcatttaataaggttcatacctaggcatagtaggatattgcatatgcagaaattcagtaaaggcggtgtaagacgaagtgctagtgcttcttattggcttaactgtggtaaaccttcaaaaagcggagcaatgtttaccatgtttgacaaggttaagttcaatggtattgtttgtttcattagtggaagtagtaatggttatgctgcattaagagatataaattggaataaggttcacggttgtaagacaactgtaactgttaataaattagcattagtttctcgaaggcgtggcagcatgttgtttggggaattatgcggatag

SEQ ID NO: 97 - DNA, 271 bp, synthetic construct
  source 1..271: mol_type = other DNA
agacagatgtaagtatttgactatccgcaatcatccccaaagggtaattgatgggtaagcagattagcctaagcacaggtacaacctgtgctacgttagaaatgaatgtataggaacgttgggatgtttatccaagtcccaacctcttcggtcagtgattaaacagaacctaaaggaacggtgttgctgacaactgaaaccatttcataaccttggcgatgggtaacttatgggagaagtcctgggcagctctattttagctgccgtaata

SEQ ID NO: 98 - DNA, 1278 bp, unidentified
  misc_feature 1..1278: note = Ga0180007_10001273 JGI
  source 1..1278: mol_type = other DNA
atgcaaaaagtattagtgctggataataacatgaatccattgatgccttgtcatccagcacgagctaggcaattactcaaacaaggtaaagccgctgtctatcgtcattatcctttcattattattctgaagaatagaaaagggggcgatgtacagccagtcgaattgcggatagaccccggcagcaaagtaacggggctggcggttgtagctcaatttggtagaggacgaaccgttgtctgggcagctaatttacaacataagggctggagagtcaagaaggctttagataaacgtcgtattcttagacggagtaggcgatcacgaaagattcgctatcgcccgccacgttggaggaacagaaaaacggaaaaggggtggctgtcaccctctctgatgtcgcgcgtgaataatatacggcattgggccgagaaattaacaacactaataccaataaaaactattgcggttgagactatacgttttgatacacaattgatggaaaaccccgaaattagtggtgtagaatatcaacaaggtgaattgcagggctatgaggtgcgcgagtacttattagaaaagtgggggcgcaagtgtgtttattgtagtgcagacaataaacagcttgagattgaccatgtttggcccaagtctcgtggaggcagtaatagggtgagcaacctcgttatttcttgtgagccttgtaatagagcgaagggtagcagctctgtacaggaattcttggcacatgatccaaaacgacttgagctcatattagcgcagaagcgaaagcccttacgagacgctgctattatcaatgctatttgttatcgtattggtgatgagcttaaagagttgggaatgtcggttacgttttggagcggggggcttactaaatacaatcgttgtaatgctggttatccaaaagatcattggatagatgccgcttgtgtaggaactcatgcagcgcagatactagaaggaatgcttccgctgaatatcaaagcaatgggtagagggaaacgacgggtgtgtcaacctgataagtacggttttcctaaagcgaaacccagaacggtaaaacgggttcacggctttcagacaggcgactttgtgaaagcggttgtgccactaggacggaaagctgaggggacacatgttggtcgagtgacaatacgggcgagtggatatttttgtattagcaagatcgacggcattaactggaaatattgtaaattgttgcagcaaagtgatggctatgagtacactcagatatga

SEQ ID NO: 99 - DNA, 286 bp, unidentified
  misc_feature 1..286: note = Ga0180007_10001273 JGI
  source 1..286: mol_type = other DNA
ggaagtcgaaatgctcttaagtgagatagctgaagtaacgttatccttcccacgtatgtattggataaccagccttagtaattagtttttcaaaaactaattactacgttacaagcgaatacataggcacttcggaatgcttctccagttccgaactctgcggttgaaagttaaataaactgtacgtgtggaacggttagtgctttcaacattaaaccgcttgctaacattggcgaggagaccataaccgccgaaaggcgagactgaggtaactcagatgcaaaaa

SEQ ID NO: 100 - DNA, 1260 bp, unidentified
  misc_feature 1..1260: note = Ga0256407_10000103 JGI
  source 1..1260: mol_type = other DNA
atggtttacgtattagacacagacggtacacctttaatgcctacacagaggcattacagagtaagattcctcctcaaaaagaaggaagcaaccgttgtgtccgtatatccgttcaccattaaacttaccactgacaagccaaggcatacccaaaacgtatcacttggtattgactgtggaaccagacacatcggtgtttctgctacaacggaaaccaaggtactttactcagcagaggcaatactgcgtggggacactactaaactgattgccacaagaaaggagctacgtaaaacacgccggaaccgtttacgttacagacccgaaagattcaataaccgtataacatctaagaaaaagggatggctagcgccttccattcttaacaaagtggcattccatgccaaagtcgttaagtacgtaaggaaacttctaccgataacctcgataattttggaagttgcaccgttcgatattcaaaaacttgctaatcctgatataaaagggacggactatcagcacggggaacaggaggggtcatataatacacgcgagtatgtactgtacagagaccatcacgaatgtcagcactgtcacggtaagtccggtgataaaatactgaatgtacatcacattgaaagcagaaagaccggcggtaatgcaccgaataatctggttacgttatgtcatacatgtcatgatgcatatcataggggcgagatagagcttaacattaaacgcggtaagtccatgcgtgatgcagccggtatgaatctaatcaaagaccgtctgtacgaggttgtaaaagaggaaaacggtgacatcactgttcggtacacgtatgggtatataacgaagtacaaccgtataaagtacggtatagagaaaagtcatacgaacgatgcacaagtgataagtggtaatcttaatgcgaagttatgctgtgatatgtgggagttaaggcaggtacgtagacataacagacagatacacaagttcaatatctgtaaaggcggcaaacttaaacgtaatcagagtgcatactgtgtaaagggttatcgtttatgggacgtggttaagtacaaaagtaacacatatctgataaaggctaaacgaagcagtggttcattccgtctgatgagtttagatggagaggaacgtgacggtgtgggttacaaacatttgagaatagttactatatgtaacagactgattaaaataaaaagtgaaaagagagggtgcaattcatcccacggttaa

SEQ ID NO: 101 - DNA, 317 bp, unidentified
  misc_feature 1..317: note = Ga0256407_10000103 JGI
  source 1..317: mol_type = other DNA
gtcaataacccacccctaaaaggagtgggcttgataggcgaggcaagcgtgccttactgaaaacaagcccttattgattagccttggtgatagggatttatccccttgaactccgttatccgtgaatgcataggcaccggtggatatacttccaagtctgccgctctgcggtcagtggttaaacagtcctgagaggtagggacagtgctgctgacgaataaaggaaaccacggaataacattggcgatgggagccttacccaacttaggttggagacttacccctaacagggttatttttaaaaaacaaaaacaatg

SEQ ID NO: 102 - DNA, 822 bp, unidentified
  misc_feature 1..822: note = Ga0373630_0001637 JGI
  source 1..822: mol_type = other DNA
atggtggtgacaatgcgaaacttgactagacggcccggctctgcgagtcgggttagcggcgtggaaagctacaagaacgtacaggtgcaagacctagcctgtacctcttcgctagaaccactaaatggcgtggctgccagaaatggtagcctaagccttccatgcaacgtcgaaggtcactcaactcaaactggggagcccgcaatcgggagagttccagtcgtctccgcagacagtacgtccttgatgccatgtaacccatcgaaagcacgtaagctcctagaacatggcctagcggagaagcgatggagcaagcttggacaactcacgctctattcgggcgtagaaaccgctgtgctacgtgaaaggttcagcctaccaaagaatccagtcaaaagggagcttacatggactacgcatgctgtagacgccatagccatcggctccgctgagatcggatgtgtgaatccgtatccgccagagttctgggtttggaaacgcttcgagtatgctcgacgtcaacttcacaggcttgaacctgacaagggcggagttcgcagaaggtacggtggcatatggagtactccaccattcagaaaaggagacgtcgtgttatggcgtggcaagcttgcgagagttggaggcttcatggatggctacgggatctcactacactctttcgggctgaagaacaaacgtttcacacaagccgccaatccaaacgaatgcgtcaggctattcaatcagcacgtattcagtagacgggagcagccccgattccttccacccatgaatggtgtgggtttccttgggggaccttga

SEQ ID NO: 103 - DNA, 310 bp, unidentified
  misc_feature 1..310: note = Ga0373630_0001637 JGI
  source 1..310: mol_type = other DNA
gtcgattcgacactcttaaggaagtgttgaaacgacatcgaggaatatgtccagtctcgacacaacgaacctgtccaataggggtgagggagtcggttccacgtgatgaactccgaccggttaaactgtgtttaacaagtcctagaggacacagtgttgacgccgaatacccgagcctccggtagcttcgatggtgaattcggtcaggaacccatgcctaaaggcatgggcttgtgatggtggtgacaatgcgaaacttgactagacggcccggctctgcgagtcgggttagcggcgtggaaagctacaa

SEQ ID NO: 104 - DNA, 1608 bp, synthetic construct
  source 1..1608: mol_type = other DNA
atgtacaggcttaccaccgaagcggggatcccgttgatccctgagagactacatgacaccaaaaaaagaaaggagacatcgaggatgtctgaatatatttatgtcataggcatggatggagatccacagatgccgatcaaacgaaagagacatgtcgaaaaaatgttacagacaggaagagcacgcgtcttccggcaagtcccttatacaatacaattaacttataagaatcaaccagtcttacagccagttacgatcgcggaagatcccggacgttctaatatcggaatggcagtggtctctctgagtggagagttactatccgcagcggttgtgcagaccaggaacaaggaaatcgttaaattaatggagaaacgtaagttgcatcgcagagcttccaggaatggagagcgaaaggcaagacaacgactggctaagaggtgtcatacgatgctcaaagctggttttctgatgcgaaaacttccgatgtatagaaaagacaaacgagtgaaatgtcttgtgatccgcaatacggaagcaagattctgtaatcgaaagcgagaagatggatggctgacaccaagtgcggaacatctggtgcggacacacatcaatctgatccataagatgcagaaattcctgccgatcaccgatgttgcgatcgagatcaaccggtttgctttcttatcactggaagatccgagtatcagtggagtcgatttccagaatggcccgttaaaaggctatgatgatctgaatgcagcggtagaagatctacaggacggacactgtttaatgtgtaacagcctgatcgaacaccggcatcatatcgtaccacgaagtatgcagggctccaatacgatcggaaacatcgcaggattatgctgcaaatgtcatgagagagtccataaagatgcaagatttgaggaccgtctgaagaaaaagaaagccggactggacaagcgttatgcagcggtcagtgccttaaatcaggcgatcccgtttatctgcaaacgactggaacaggaattcgggaaagaacatgtccattactgttctggccgagatactgccatggtccgaaggtcctttggataccataagacaaaagaagagcagctacatgtggtcgatgcctggtgtatcgcagttctttctttacggcagatcccagagaaagctccagagttcgatcatgtgcatgagatcctgcaatttcgcagacaggatcgcagccggatcaaagctcagacctctcgtgcatactatcatgaaggaaagaaaattgtcaggaatcgcaaaaaagcggaagggcaaggagaagattcccttcaggaatggagaaaacgacaggttgatagatatggagaagagcagaccagaaagatgatcagtcagttaaaagtcaagaaaagtatccggcgttacaatcgtctggaccgtctcatgccaggagctgtcttttattatcaagacgttcgatatgtcatgcgtggacaacattgcgaagggacatatcttcaggcggttggaatgggaagcaaggattttcctgcaaagaaatgcaagatcgttgctaacaatgagggactggtctttgtgtcataa

SEQ ID NO: 105 - DNA, 272 bp, synthetic construct
  source 1..272: mol_type = other DNA
gtcaattaactcatgactaaagtcacgagcttgcagaaagttttatgaattagttagcgcgttaatgagcagaaacaagatgtcagcgatcttctttggaaagtgggcactctgggattctctagtcccagaccctgtcaagctgacaccaagtttaagaagaccaaaatcttgtcatgtacaggcttaccaccgaagcggggatcccgttgatccctgagagactacatgacaccaaaaaaagaaaggagacatcgaggatgtctgaatat

SEQ ID NO: 106 - DNA, 735 bp, synthetic construct
  source 1..735: mol_type = other DNA
atggtgtacgtacaagacataaatggtaaacctatgatgcctacaacaaggcatggtaaggtaagacgactgcttaaagaaaacaaggcagttgttgtgaacctatgtccgtttaccatcaaattaacgtacgtcacatctgattacaaacaagaaattgtgttaggcgttgatgctgggaccaaacacgttggtctatcagctacaacgaaaagcaaagaactttacagcagtgaagtaattcttagaaatgatatcgtagatcttttgtctaccagaagagagctacgaaaaacaagacggaatagattgagacatagaaaacatcgttttaacaatagaataaaaagtaggcgtcccggatgggtagcaccttcggtgaagtacaaaatagacgcccatattcgtgttattgataatgttttttctatactgtctgtatcccgtattgttattgaagtagctcaattcgatactcaaaagattaacaatcctaatatatcaggtaaagaatatcaggagggtgatcaacttggattttggaacgttagggaatatgttttagcaagagatggacataaatgccagcattgcaagggaaagtcaaaagacccagtattgaatgttcatcatattgaatcacgaaagacaggtggagattccccatctaatcttattaccttatgtgaaacttgtcataaagaataccataaaggtaatatagatttaaaaatc

SEQ ID NO: 107 - DNA, 269 bp, synthetic construct
  source 1..269: mol_type = other DNA
ataaccaatttgtattgtattatgcataatagccaaaagctattccgattattagcctaagtgttgaaacaaacactacgttatttaagaatagatagttacctacggatatttacccaagtctgtagctctaaggtaggtgattaaacagttctggtattcaggaacagtgttgcttacgaaaaaccttaaataacattggcgatgggtactaacagagttttactctgacttatgttgaataaacattaaaaacgtttgtagatatg

SEQ ID NO: 108 - DNA, 1029 bp, unidentified
  misc_feature 1..1029: note = Ga0315279_10002905 JGI
  source 1..1029: mol_type = other DNA
atggttccagtatttgattcaaaaaacaaaccgttaatgccctgcacagagaagcgtgcacggaaattactggagaaaaagcaagccttctgtttctggaagaagggaatcttttgtattaagttgttgcgagaaccttctgatagacagtatcaggatgttgttgtaggtattgatgttggatcgaaaagagaggcttataccgttactactgtcaaacatgtagtattgaatattctcacgaatacacctgattgggtaaaagacgcagtaaaaagtcgtagagaaatgcgtagaggtcgcagatttcgtaagacaccatgtaggcaaaatagaactaaccgtgctattatggagctttcgcttggtatgttagcaccttcgacaaaggcacgatggcaaacgaaattaaggattctaaattggctatcaacattgtatccgataactgatgtcgttgtagaagatgtgaaagccaaaactcgtaaaactggagcttacgctggttcaaagaaatggaatatgtcattttcaccattggaagtggggaaaacttggttgtactcggagataaagaagttctggaatttgtatttggttcagggatacgaaacaaaagaatggcgtgatatggcaaagtataaaaagagtagcaataaactaaaggactgttgggaatctcacaatgtagattctcatgttctttgtgagatcggtcttggaggttgtatcaagccattcaagaagatacttagactagagtttctacaccttcatagaaggcagttgcatgttctacaatttgccaaaggtggtattcgtaaattgtatggtggaacgagaagcatgggatttaagcgtggcagttgggtaaaccatatcaagcatggtttgtgctatatcggtggcacatcaaaagaaagagttagtctccacgagatgtcaacaggcaaacgtttgacgcaaactgcaaagccagaggattgtagattcttgacttatgcaacgtggagaatgtcatttatttga

SEQ ID NO: 109 - DNA, 209 bp, unidentified
  misc_feature 1..209: note = Ga0315279_10002905 JGI
  source 1..209: mol_type = other DNA
gtcaataaccccacgcataaatgcgggggcttgagtaatctggaagccaaccagaccaatcgagacgaaactgttgactagactatgttttagaaaccaattgagctatctgatcgtggcaggtcaaaagatgtcatagacgccaccctaatctataaccaatctgatagccaatgtcgaagggtcgtttaacaaggagtgtaaactca

SEQ ID NO: 110 - DNA, 1257 bp, unidentified
  misc_feature 1..1257: note = Ga0194137_10007470 JGI
  source 1..1257: mol_type = other DNA
atgaaagtatatgtattaaataaacatagtaagccattgatgccttgttctccaagaaaggcacgattattattacgtgataagaaagctaaagtagtcaaaaaatacccatttactatacaattactatatggatcaagtggatatcggcaacaaatcactttgggtatcgatgcgggcagcaaaactatcggtttatcagcaacaaccgaaaaccatgaactatattcggcagaagtcatattgcgcaatgatatcagtgataacatcactaccaaaaagcaactaagaagaacacgtagaaatcgtttgcgctataggaaaccaaggtttttaaatcgagtgagtaataaaaagaaaggttggctacctccatcaacacaacacaaaattgatacgcataaatttatggttgaacaagtacataaattgttgccaattagtaagattatagtagaaacagcagcttttgatattcaaaagattgataatccaaatattagtggaagccaatatcaacaaggaaaccaacatggattctggaacacacgggagtatgttctttatcgtgatggtcatacatgtcagatgtgtaaggggaaatccaaagataagatactgaatgtgcatcatattgtatatcgtagccatggcggtactgataaacctaataatttgattacattatgtaatacctgtcatagtcctaaaaaccataagaaaggtgcaatattatggcaatggatggaaaatggaaaaaaggtaattacttcatataaagatgctacgtttatgtctataatgcgttggtcattttataattggttgaaagataagtatatagatgtatcaatgacttatgggtataccactaaaaataaaagaattagtaatcaattaccgaaagagcattatattgatgcgtattgtattacaggcaatattaatgctaagagattagatggtcattggatatataagaaaatgcgtaagcataatagatcattgtatatgctaaatccactgaaaggtggtatatggaaaaagagacaagctaattattatgttaagggctttgctttatttgataaagtacgttatgataatgttgtatgttttattatgggacgtagggctactggatatttcaaattaaggactattatgggaaatgaagtacataatagtgcgagttataagaagattgagtatgtaggacgtagtggtgggtatatgtatgattatgtggtacattag

SEQ ID NO: 111 - DNA, 283 bp, unidentified
  misc_feature 1..283: note = Ga0194137_10007470 JGI
  source 1..283: mol_type = other DNA
gtcaactaccactgggctaataacccagtggcttgataatatatcaagccacagttgattagactaaggtattaatttacctacgttgatccggtcatgatacctatggatgtacaatatagcctagtccatagctctatcgtatattattaaacgatttcaaagtggttaatggaatcagtgtaatatatgtaaaaaagccatttcaacattgtcgaaggctaattacttacttcggtaagaagggcttatctattagcccaattaagaggaaattatgaaa

SEQ ID NO: 112 - DNA, 1032 bp, unidentified
  misc_feature 1..1032: note = Ga0310696_10080563 JGI
  source 1..1032: mol_type = other DNA
atgctggtatatgtccaagacaaggaaggaaaggcgataagccccaccaagaggtgcggacgcgtcggctatctccgccgtcacggacttgccgtggtcatcatgctcgagccgttcacaataaaaacgcccgaggaagatgccgaatctttagttcggcataggaatcgggcgggggttgacacatcctctggaaaaatggtatactatgaaccgaaagaacccgtcccagaagttgcaaaggcactctgcgaagagaaaacggctcaaaatgcaacgggacatgacacccgccatcgtcttgaaaggactttggcggcagggcttggtcaacggcccaatcgtcggggcgaaagcctacggcaagcattcgcgtcttcagcgcggaagcagttgacgatacggctcctgtacgatgtccacgggaccgagcatgtccaggcggcgacgcttggtgtcgacacgggggcgaagcacatcgggctctcggcgtcgaccaagaaaagcgaactctattcctcacaggtggaattgagggacgatgtgtcgagactcctgacagcccgcagggagaatcggagaggacggcgggggcgcaggcacaactggtaccgccccgcgaggtggcagaaccgcgctgatgcgcgggaagagcacttgccaccaagcatagtgcatcgggcggagtcccatgttcgcgcaatcaagaacgcggcgaagatacttccactgcggaagatagtggttgagattgggaagttcgatgtgcagaagataaagaaccccgacatcgagggcgtcgagtaccagcgcggtcctcagatggggtggaagaacctaaaggcatacgcccgctggcgcgatggcgagaagtgccgcatctgcgggaagtcgtcgttcaaggacaaggcgaagctggatgtccaccacatcatccagcgtgcatatggcgggacggatgtccccgagaatgtcgtgaccttgtgcgagaactgccaccacgcccaccacgccaatctgcgcaggataaag

SEQ ID NO: 113 - DNA, 299 bp, unidentified
  misc_feature 1..299: note = Ga0310696_10080563 JGI
  source 1..299: mol_type = other DNA
gtcagcggcccaaccctgaagggttgggcttgtgggtgaaagagaccgcgagcccgagctgactaggcgactgaaacgaaaggagaaaaactgagtgacagtagaagttgatagagaatgcataggcaccgtgggatggtcgtccaagtcccacgctctgcggtgtgcggttaaacagtcctgcgaggtaggggcagtgccgtacacgggaaacctctttcaacgcgccgatgggcaccacacccgccttcgggcggagactaaccccgcaaggggataatataggaaacaccatgctg

SEQ ID NO: 114 - DNA, 1395 bp, synthetic construct
  source 1..1395: mol_type = other DNA
atgtatgtattcgttatagggctggatggaacaagacttatgccttgtaaaccaagaaaagcccgaaaattaatagaagctcacaaggctgaaatctataagaaacagccgtttacaataagattactgtataagacaggctgtgcttcacaacccataacattaggtatagatacaggttcccagcatatcggaattgcggtaacatcagaaaacaaagtcttataccaggcagagatagaactgcgcagcactatggataagcgttcactcatggaaaccagatacagttaccgcagaagcagaagataccgcaagaccaggtacagaagtcctaaattcagatttcatacaaaacggacatattctgaaacacttgttaagcgtaagaccacaggtattatgacccactgggttaaacatattaactcaatgagtacaaacagaccggacggatggcttgcaccatccatgcagtcgaaagtagatcatcatatccgatggattaacagatttttagatgtgcttccaccagatacgaaactccggctggaaattgccaggtttgacatggcaaggatgaaaaatccggaagtgcataatgaattataccagcatggtccacagtatgattacgaaaatttaaaagcttatgtatttgacagagatcattataagtgtgtggtctgtaaaaggaaattagggagtaaacagccggatggacattctttaaaaggaatgatgcatcacataacattccggtccaaaggagctacggacaatcctgatcagcttgttacagtctgcgaatactgtcatactccccaggcgcataaagaaggtggagtactctgggatctgaaagagaaacacaaatcagtgcagcggggactaagggatgccacgcagatgaacataatccgtacacgactggttaaagcatttccagatgcggagctgacttatggaaatattacggctgctgatagaaagaagatgcatcttccaaagtcacatgctggtgatgcagttgcaatagcaatgaaaggtgaggatgttaatatctgtgaaccgactgtatatataaaacagattcggaagaaaaagcgttcactccatgaagcaacgcctagaaaagggcgtaaaaggcctaatacccaggcagtaagaaatcctaagaatacaaaaagcataggtatttatcatatttatgacactgtaagattccagaatgaaacaggatttatctcaggattcacaggcaagtctgcatatgtccaggattttgacggcaattatatcacaatgcctggaaaatcgtataaacagataaatttatcgagtttagaactggtaaagcataacaacaactggattcaaaagaccagaaattaa

SEQ ID NO: 115 - DNA, 224 bp, synthetic construct
  source 1..224: mol_type = other DNA
ttgaataaccgagcatggttaaataattgtcgcccgtaaggacaggatgactagcctaagttccaagagaactacatcagaagtatgatcccagttccagacggtaccctaatctgagcgctgggcgggcaacatatgaatccaggagaaaggatgatgtaacccggtgttacaagtactctgatattggcgaagggtaaatgctgactttggccagcatagac

SEQ ID NO: 116 - DNA, 1503 bp, unidentified
  misc_feature 1..1503: note = Ga0307373_10037003 JGI
  source 1..1503: mol_type = other DNA
gtggtcttcgtcttggatcggcgcaagaagccgctgatgccttgcagtgagcggcgggcgcgcatcctgctgcagcgcggccgggcggtcgtccaccgcctgcggccgttcaccatccggctccgggaccgcacggccggggagtcggtgcttcaacccctgcgcctgaaggtggcgcccgccacgaaggtgacggggggcgctctggtccgcgacgacggtcccgatgctggcgccgttgtcttcgcggcggagatcaagcacaagcccggcatccacgccaagatgctgcgccgggcgggctaccggcggcgccgccggtcagccaacctgcgctaccgggccccgcgctttgacaaccggcgccctgagccgtgcatcgtttgcggcggcaacgcccggcacgggcacaaccgctgccgccgatgcgtcgaggccggggacgaacccgcaggcctcggggcgcgccccccgcgcctggcgccgaccctgcggagccgggcggacaacacccgctcctgggtcgcccggctgcgccgctgggccccggtgacggcggcatcggtgctgttggggcgctacgacacgcaggctctgcaggaccccgaggtccggggggtcgagtaccagcaggggaccctgcaggggtacgaagtgcgcgagtacctgctggagaagttcgggcaccgctgcgtttactgcggcggcctttccggcgaccctgtgctcaacatcgaccatgtggtgccgcgcagccgcgagggcaccgatcgcgtctccaacctggcgctggcgtgccgggcgtgcaacgaggcgaaggacgaccggccacccgaggagtgggcggcgcgcctggcacgcctgcattccccgctggcggtcgcgcggatggcgggatgcaaggccgtcgcgggccggctgcaggcgccgctgcgcggcccggcggccgtcaacgccactcgctgggccgtctggcgtgtgctggcgcagacggggctgcccctggaagcggggaccgctgcccgcaccaagtggaatcgcgcacgcctcggggagccgcggagcccggccgccgacgcggcctgcgtgggcgcctcgacgccagccgcactgcggtgggcgggacggtgggtacacgccatcacggcgctcggccgggggcgctatcagcggacgaacacggatgcccacgggtttccgcgcggctacctgatgcgcggcaagagcgtgcatggcctgcggagcggcgacctggtgacggcgggggtgcggcatcgggccgggggccggctgccggcggcgtttgtggcagagatcgaagccacaggccccgtcgcggtgcgcgccagcgggtccttccgcctcgggccgttcgaccccgtgcgttggcaggcctcccgtctgctgcagcgcggggatgggtacgcctaccacgtggccccgctcggcgacaccggcgcccggcggggcggcggggtggaactggaggaggcggctccgtga

SEQ ID NO: 117 - DNA, 297 bp, unidentified
  misc_feature 1..297: note = Ga0307373_10037003 JGI
  source 1..297: mol_type = other DNA
gcccgttgacccccgggatgcttaccaggccgagcgcccgaggttggcagccgttgagggcgctacgttgccgccaggcccaagacccaccccgggatgcttcctcagtcccgggctctggaaccggccgcagcagacaagccccgtgggcgggggcacgaaacgggcggtcggacgcgccgggcggtgacatggccgaggggagcggatcgggcaagccggcccggtcccgtcacacaggccccgtaaggggcaccccgcaaggggcctgatcgcgaggaagggggcgcgcccgtg

SEQ ID NO: 118 - DNA, 651 bp, unidentified
  misc_feature 1..651: note = Ga0373633_0030533 JGI
  source 1..651: mol_type = other DNA
atggttttgagcgtgtttgtattggacaaccgaggtgtggcagtgatgccgtgtacacagaagcgtgcaaggctgttgcttgcgcgtggacgtgcccgcgtgcatcggctggtgccttttgtcatccgatcggtcgatgtcaaagcacaggattgcagcttgcagcccttgtctttgaagatcgacccaggcagcaaaaccatgtgccaaagacccatgcgctggatgcggcgtgtgtcggtgagatggactgggtatcggcccagcctgcacatcaaatccacagggcgtggcagctaccagcgcacacgcctggatgcgtttgggttcccgcgcggctacctgatgcgaaataaatcggtcaagggttttgccacaggtgatctggtcaaggccacggtgacacacggcaaaaagcaaggcggctaccgagggcgtgtggcaatcagggccacaggcagtttcaacatccaaacccgagagggtgtggttcaaggcgtctctcacaggcattgcacgttgttgcaacgcggtgatggatatggttaccaacagcagagcaaatcagacgcaggaagagatcgtgcttcgcacgatgcgctctgcctccccggcatgaatgccggggtctcccgcgcaattcaagggtga

SEQ ID NO: 119 - DNA, 312 bp, unidentified
  misc_feature 1..312: note = Ga0373633_0030533 JGI
  source 1..312: mol_type = other DNA
gtcaactaccccggactaaaggccgaggcttgatcagagatgtttaagcctggttgaccagaccaagaaaggagtcattttttctacgttgttgttaaggcgaaaagtccgacccacgaatgcttcctcagttcgtggctctcgaaggcggtggtgcagacaagcaaatgggtacgcacgaaacggccccgtcattcccacgccggacagcaacatggacgaggggagatgcaccgaaaggtgcgcgtcacaaggcccttacgggctggctgctggaaagacagcacttattttggagagatggttttgagc

SEQ ID NO: 120 - DNA, 1329 bp, Ktedonobacter sp.
  source 1..1329: mol_type = other DNA
atgtcaaaagtgttgctcctggatatgaccaaacagcccttagacccagtgcatccgggccgagcacgcctgttgctcaaagagggcaaggccgccgtgtatcgcaggtacccctttaccctcatcctgaagacgcaagtggactcccctgcggtgtctgccctgcggctcaaacttgatccaggggcgaagacgagcgggctggccctggtcgatgacgcgagcggggaagtggtgtgggcggcagaactcggccatcggggagccagcatcaagaagcgcatagatgcccggcgtggcgtgcggcgcaagagacgctcccgtttcacgcggtaccgcaagccgcgcttccacaaccgcaggagttccaggagaaaagggcggcttccgccctcgctggaaagccgggttgccaacatgctgacctgggtagggcgcctgaggcgtttgtgccccattgaggtgatcagcatggaactggttaagttcgatatgcaggccatgcaaaacccggagatcactggcgcccagtaccaacaaggggaacgcatgggctatgagacgcgggaatacctgctcgcaaagtgggggcggcgatgcgcctactgcggggctgaggatgttcccctggagattgagcacatcctctgccgcgcacgaggcggcacgcatcgcgtgagcaacctcaccctggcctgcgagccgtgtaacgtcaagaagggcacgcaactcatcgaggatttcctgaacaagaaaccagacgtgttggcacgcatcctggcccaggcgaaaacgccgctcaaagctgctgccgccgtcaatgcgacccgctggcacctctttgaacggctgaaggcgaccggcttacccctggagaccagcagtggcggtttgaccaaatacaaccgggcgaagcggcatctgccgaaaacgcattggctcgatgcagcgtgtgtcggccagagcaccccaaagcctctggaaacgagccaggtggttcctttgctgatcgaagccaccggtcatggcaaccggcaaatgtgcggcgtcgatgagcatggctttcccatccgccataggcagcggaagaaggtgcatttcggctaccagacgggcgacctggtgcgggcggtggttcccacgggggcgagggcggggacgcatgttgggcgcgtgctggcacgagccagcggctctttcgatttgaggaccaaagctggacgccaggccgggatcagttatcggtattgccgtcccatccatcgcaacgatggctatcgttaccagcaaggagggcggcatgcagtccccgccacccaatccacctga

SEQ ID NO: 121 - DNA, 290 bp, Ktedonobacter sp.
  source 1..290: mol_type = other DNA
gtcatgaacccctgcatcgaatgcgggggcttgcagcaaggctcatcgtctcgctacaagcccggaacatgaccagactcaggcttgaaacagagcctacgttaggagcgaatccataggcacgtccgggtgcgacgccagcccggaccgctgcggcaatcgattaaacagggctagcgggttaccccagtgtcgtttgcgtcaaaccgctccataaccttgtcgaggcgaacatcacccggcgcttgccggaggctcgcaagagcaaagaggaccccatcatgtcaaaa

SEQ ID NO: 122 - DNA, 1317 bp, unidentified
  misc_feature 1..1317: note = Ga0209048_10010134 JGI
  source 1..1317: mol_type = other DNA
atgtcacaggtctttgtcctagatgcaaacgaacaggcattgaacccgatccatccgggacgcgcccgcttgctgctcaagcaaggcaaggcagccgtccatcgacgctacccgttcacgatcattctgaagagggtggtagagcagcccacactccatccattgcgcgtcaaaatcgatccggggagccacaccactggcatcgctctcgtcaatgaacacacgggagaagtggtgtgggcggctgaactgacccatcggggtgagcagatcaagcgcgatttggacaagcgtcgagcagtcagaagaagcagaagacagcgcaagaccagatataggaagccacgctttgctaatcggcgcaaacgcacagggacgttgcctccctctttagagagccgcgtatgcaacgtgctcacgtgggtacggcgcctgatgcagatctgccctgtcaccgccatcagccaggaactggcgcgctttgatacccaggccttggagcaccccgatatcgagggcgtagactatcagcgcggacagctagcaggctatgaggtcagagagtatgtcctgctcaagtggaaccatcagtgcgcttactgtgatgcgcgcgaggtcccgctggaactcgatcatgtgcagcctcgcagcaagcgctgccttgatagagtgagcaacttgacgctgtcctgtcgatcctgtaaccagcgcaagggcaatcgggatgtgcgcgagttcctgcatgacgatcctgctcgccttgcccgcatcctggcacacctaaaaagtccgctgcgggatgcagcagctgtcaacactacccgctgggcactcaacgcgcggctcaagttatttggggttccggtcgagagtggcagcggcggcttgaccaagtataaccgcgtgatgcgggggctcgacaagacccactggctcgatgcggccaacgtaggcaggagcacgccagcctcgctcatcatcaaaggcatcgttcctttgcacatcattgcaaccgggcacggcagccgccaaatgtgtcgcatggacaagtacgggttccctcgtaccggacccaagcagcgcaagcgtgtccaggggttccagacgggtgatctcgtgcgcgctgtggtgacaagtggcacgaagcagggaacctacgtgggcaaagtggctgtgcgtactcgtggcgtcttcaacatcaccactgcgcagggtgtggtcaccgacattcatcatcgctactgtacgctcatcgctagagccgatggctatacctatcggcggcccaaggaggtggcactctctcccatcgcctga

SEQ ID NO: 123 - DNA, 307 bp, unidentified
  misc_feature 1..307: note = Ga0209048_10010134 JGI
  source 1..307: mol_type = other DNA
gtcaggaacccgccctgtagaacggggcaggcttgcttgcaggagcaagcctcatcttgaccagtctcagccaccggtcttcttcttcattggaagagggccgacggggcttcgttcggagcgaatggataggcacgtccgagtgcttcaccagcccggacctctgcagagtagcattaatcaggttgacgaggtaaagccggtgtgctgctcaaatgaaaccgctcaagaacactgacgaggtgaacatcacccgcgcaagcggaggctcgtaagagcacaaccaaaggaatccagcatgtcacag

SEQ ID NO: 124 - DNA, 1356 bp, synthetic construct
  source 1..1356: mol_type = other DNA
atgttcgttgcagtcattagcaagactggcgtgagactcatgccaacaagtgaataccgggctcgtaagctgctgaactccggaaaagcaatcatctatggataccgtccgtttacgatccagttaacagaaagggaaactggcgctcttcagccagtagaactctgtgtggataccggatatatccatattggagtatctgtaaagtcagagaagcacgaatatctggaattacaggtcgatacattaaccaacgagaagaaaaagcatgatgaacgccggatgtaccgtaagcagagacgaaaccggaagcgataccggaagccgcggtttgataaccggaaacgggaatctggctggcttgccccgtcactgagacataagaaagaggttcatctgcaagtcataacaaagatatgcgatgtatatccaattgcagacatcactctggaaatgggaaactttgatacacaggttctgaaagctcaggaaaaaggtaagccgataccgcaaggaaccgattaccagcatggggaacggtatgggattgcaacactccgggaagccgtctttacaagagatgagtataaatgccagtgctgcgatcgaggaatcaaagatggcgcaatcctgcatgcccaccatatccagtatcggagccatggcggaaccaaccggatgtccaatctgatcacggtatgtgagaaatgccatacaccagccaatcataaaccgggtggaaaactgtacggttggaaaccaaaggctgcctcgttcaagggcgcaacttacatgacgattgtccggtggcagttatacaacaaagtgaaagaagcactgccagtgattggtgtcaagattacctatggcgcagaaactaaggaacgccgcaggagcatggatgtcaaaaagtcccatgtgaacgatgcattcgtaataggacggttccatccaaagcaccgttcatcaccggtactttataaaaagaaacgccggaataaccggtgtctggagaacttctatgatgcgaaatacatcgacagcaggaacggaaagaaacgatccggccaggaactgtttagtggcaggatcagccggaaccataagaaggattccgagaacctgcatcgataccggaagaaaaaggtgtcacggggtaagcggactattcgcatacagcgttacaagatccagcctcatgatatcgtcctatttgacggaaagaaatatgagaccaccggatgccataacaaggggaccagggcaatcctgctaccggagaagaaatcgaaatccgtggataaacttacaatttataaatatgcaggtggatattatccatcgaagtttgcttag

SEQ ID NO: 125 - DNA, 420 bp, synthetic construct
  source 1..420: mol_type = other DNA
gtcaacaaccccgtctgaaataaatttcaggcggagcttataaaagatctgatttttattagatcttagccccgtcttagatttattgatggcgacgaccgaaaggccgtaaatgattagcctcagtgcaacgaaactggtcagaccagacacggtgaattattagcactacgttaccggtaaaattaggcactccgggatacacctctagtcccggaccctgcggtatcttattaaacatctctgagggtaagagaagtgtgagatacgcgaaactaccggataactttggcgaagaggaccaccgattctgagtaggtacttgtaccgaaaggatagagaacctgtatggggtatccataaggatatctgatacagaaggcgtaagccagattttaggaaggaggacagctgatgttc

SEQ ID NO: 126 - DNA, 1329 bp, unidentified
  source 1..1329: mol_type = other DNA; note = Proteobacteria bacterium
atgagccatgtctttgtcctggaccgtgcccgtacccctctggacccctgccacccggcgcgggcacgggagttgttgcagcatggccgtgccgcggtgttccggcgtttccccttcaccatcatcctgcgcgaccgcaagcgagccgagtcggtggtacacgaccaccgcttaaagattgacccaggcagtaagaccagcgggttggccctcgtgcaagaccagcgcgtcgtctgggctgctgagctgacccaccgagggcagcggatcagagacgccctggagagtcgccggggccttcggcgtagtcgccggcaacgccagacgcgctaccggcaaccacgttttctcaaccgcacacgtccatccgggtggctcccgccgtcgctggggagccggatagcccatacgatgacctgggtagagcgtctggcgcggtcgtgtcccatcaccgccctgagccaggagctggtgcgcttcgatacccagatgatgcaagaccctgagatggctggggtggcgtatcagcagggcgagctggctgggtatgaggtccgcgagtatctgctggagaagtggaagcgcacctgtgcctactgccacaagacgggcgtgcccttgcaagtcgaacatctcatccccaaagcgcgaggtggctcggaccgcgtgtcgaatttgacgctcgcctgtggcccatgcaatcaacagaaaggcacacagacggcagcagagttcgggttcccagcgatccaggctcaggccaaacagccgctgaaagacgccgcggccggcaacgcgacacgttgggggctctatcgtgcattagcaacgacggggctccccgtcgaaacaggcaccgggggacgcaccaagtacaaccgcacccgcctgaacatcccaaagtcccactggggtgacgcggcgtgcgtcggtgccagcacgccagaggcgttgcgtgtcgcggggatccagccgctgggcatccgtgctatggggcatgggacgcggcagatgtgtcgcaccgaggcccatggctttcccaaggcgcaccgcacacgccagaagaaatatggcggcatgcagaccggcgatctcgtccaggcggtggtccccaaaggcaagtatgccggcacctgggtcagccgtgtggtcgtcagggccagcgggtggtttgacctggtcatccacggcaagaaggccagcgtgcaccacaaacattgcacgcggctgtgggctgccgatggctatacgtacaccctgcctgctggtgcaggcaccgctgtgtcctccccccactcaagcgaggggtctccacagcggaatctttag

SEQ ID NO: 127 - DNA, 265 bp, unidentified
  source 1..265: mol_type = other DNA; note = Proteobacteria bacterium
atcagagtcgacgtactcccccgactgaagtcgggggactcttaggaaactgagagtcggtgtcgagcagactccgtgccgcaaggcacgccgttcttttggtcatgacaccctggaatgcgtggctagttccaggccctgtcgtctgtcgttaaatgtccgtggcgcgtaccacgctgtgcggcagacaggacaagccatgagaacattgtcgaggccaacgtgaccggcgcaagccgagcggaaaggtaacttcatgagccat

SEQ ID NO: 128 - DNA, 1407 bp, unidentified
  misc_feature 1..1407: note = Ga0256831_1000378 JGI
  source 1..1407: mol_type = other DNA
atgtctaatcgtgtatttgtattagatacaaatcgtaaaccattagctccgtgccatccggctagagctagggaactattaaggaaaggtaaagctaaggtatttagaaaatacccttttaccattattttaaataaagcttatccaaatgctaaactaacatacattaccataaaagtagatccgggtagtaagcagacaggaatggcattaattgctaaaggacagaataaaacccgttgtatttttggtttaaatatagttcatagaggacaacagattgttgatgctttactcagtagaagacaatctagaaggactagaagatccagaaaaaccagatatagaaaacctaggtttgataacagagctattcctaagggatggttacccccttcaatcttatctagactatcgaatattaaaacctggatactgcgttttagtaaacttactactatagctaacgctgtagtggaattagtaaaatttgatatgcaaagaataagaaatcctgatataaaaggtaaggaatatcagaatggtttattaaaagatttagagttaaaggaatatctcttatacgcatataaccatacttgccaatattgccatggagtatccaatgattctattcttgagaaggaacatatacaccctaagtctaaaggaggatctgattctgttgacaatctcaccatagcctgtaggacttgtaatattgcgaaatctaatctgctattgaatgattggttaaggattgtgtctgataagaaagataagctatctgtagctagaactaaatatatccctaaagttataaaaggaattaaaccgagtttaaaagatgctacggttagcaatattctttctaatcgtaccatagctttctgtgaatctatgggtttaaatacagaggctgcgccttcttatctcactaaatataatcgtaagaatcatggttacaggaaagaccattggatagatgcgactatgtgtggtaatctagacagaaaaatagagatatataagtctatgcgttgtataacagccattgctcagaaaactaataatagacaaatgtgtctaatggataaatatggttttcctaggactaaggctaaagggcaatctactgtatatgggtttaaaacaggagatattgttagggctgtggtgcctagtggtaagtataagggaaaacatatagggaaagttatggttaggaatagtggatggtttgatgttaaaaccattaaaggtaaaattatcactaattattcttattgtaaaaccacgcataagaaagaaagttttacctatcaacacggtactaaaactattctaaaaataatatccaatagaagggattgtattaaagatatttttaatactgtaaaatctcaa

SEQ ID NO: 129 - DNA, 330 bp, unidentified
  misc_feature 1..330: note = Ga0256831_1000378 JGI
  source 1..330: mol_type = other DNA
gtcaacaacctcgtcctaaagaacgaggcttgtattaatttataagtctctattaattagggtgagccctaagaaggctatgttgaccagactctgtgttatgtaaataacactctgttaccaaagaatatataggtacccgtaggtggctttccagcccacggctctacgctagcctgttaaacaatgctgaggaaaggcatagtgcagtctagatataaaacctttggataacattgtcgaggaaaacgttatggtttgggtcggtatgtgccagactagattttaaatggaaacatttatattaaggagactgtaatgtctaatcgt

SEQ ID NO: 130 - DNA, 1260 bp, unidentified
  misc_feature 1..1260: note = Ga0315550_1018591 JGI
  source 1..1260: mol_type = other DNA
atgcagcgagtattcgtgctgagcagcgaccgcgagccgctagacccgtgccacccggcacgggcgcgcaagctgctcaaacaggggcgggcagcggtccttcggaagtggccgtttacgataatcttgaaggatcgcacggtggccgagtcggtcacacacccgcaccgggtcaagatcgatccgggcagcaatacgacgggcctgggagttgtgcaggagcaaacaggcgaggtcgtctgggcagcggaactggagcaccggggccagcagatcaagcaccgaatgacgagccgccgccagttgcggcgggcgcggcgtggcaggaagtgccgttaccgcaagccgcgcttcgacaatcgggcgtcgagtcgtcgcaagggcaggcttccgcccagcttgcagagccgtgtcgagaacgtgagcacctgggtcgaacggctgaggcgctactgcccggtcgaggcgctgtcacttgagctggctaagttcgacacgcagagaatggagaaccccgaaatcagcggcgtcgaataccagcagggtgaactggcaggctacgaggtgcgcgagtacctgctggagaaatggggccgcaagtgcgcctactgcggtgcggagaacgtgccattgcaaatcgagcatatcgtacccaaggcccgaggagggtctgatcgggtgagcaacctggcgatctcgtgcgggccgtgcaaccaggagaagggaagctgcacggcggaggagtttggacaccccgaggttcaggcgcaggctcgcaagccgctgaaggatgcggcggtactgaacgcgacacgctgggtgctgtttcgcagacttcaggcgatcggcctgccgctagagatcggcacgggcgggcggaccaagtacaaccgcacgcagctgggacttcccaaggcgcattggactgacgcggtgtgtgttggggagttgggtgagcaagtgcgcgttccgcccggcctggtaccgctgcagatccgggcgaccggccacggaagacgacagcggtgcgggacggacaagtacggcttcccgatccggcacgcgcctggcgcgaaaaagtttcggggttggcagacgggcgacatcgccaaggcggtgatccccaaagggaagtatgcaggcgtgcatgttgggcgtgtcgccattcggcataggctatcgttcaggctgaatgggatcgacgtgcatcccaagtatctggagctcgtgcagagggcagacgggtatgcatactcctag

SEQ ID NO: 131 - DNA, 300 bp, unidentified
  misc_feature 1..300: note = Ga0315550_1018591 JGI
  source 1..300: mol_type = other DNA
gtcaactaccccacggatgaatccgggggcttgtgcggaagcattgcgagcccggagttgaccagtcccagccaccagccgagaggctgatggggctacgttatcgagaagtgccaaggttcacaccttggggtgcgcgagccagccccaagctctgtaaccggaagctaaacagccatacggggtagaaggcagtgctttcgggagatggccgcccgataacatcgacgaggctcactttaccggcaagtccttcgggacgaaccgagaatccgtaaggaggaaatcgaaatgcagcga

SEQ ID NO: 132 - DNA, 1299 bp, unidentified
  misc_feature 1..1299: note = Ga0137384_10001405 JGI
  source 1..1299: mol_type = other DNA
atgtcacggattttcgttgtggatgcccagcgcaatcccctgatgccttgtactcctgcgcgtgcccgcctgctgctcaaagcaggcaaagcggcgatcttgcgccgcgcccctctggtgttgattctcaaagagcgtcggccagaggcggtggtccagccattgcgagtcaaacttgatcctggagcaagcaccagtgggatcgccgtcgtcaacgatcgctcgggggaagtggtgtgggctgcagaagtgacccatcgcgggcgagagatccgcgaagctctcaccagaagacgagcggtacgccgccagcgtcggcgtcgacagaggagatatcgccccaaacgctttgccaatcgccgtcgcccgttagggtggctagctccctctttgctctcacgtgtgctgaatctgctgacctgggtggcgcgtctgcgaagcttttgtccgatagaagcactctcgcaggaactggccagattcgacacccaggccatgcaagatccgaccattgctggcatccagtatcagcaggggagccttgctggatatgagataagatcatacttgctagaaaagtggcaaaggcgttgtgcctactgccagcagccctcgacgaagttgcaagtcgaacatctgattcccaagagccggggagggagcgacagaatttccaatgtggtgctggcctgcgaaatctgcaacatcgccaagggtgacaggacggctgaagagtttggttttgtgcagctgatggctcaggcaaaagtaccccttgcaagtgcggcagtaatgaatgccacccgttggaggttgtaccaggagttgcaggcgataggcttgccagtagaagtggacaccggggggagaacaggctacaaccgtgccattcgccagcttcccaagcagcactggatagacgcggccctggtggggacctcaactcctgaacagctccaacttcagcacgttcgcccctggcagatcacagccaccggctggcagcggcgtcaaatgtgcctggtagatggagcaggatttccacgcacccgcgccaagcagcgatccctggttaagggattcaggaccggcgacctggtagttggcgtggtcaagagcggaacgaaacagggcatctacaaggggcgcgtggcggtcagagcttctggttcttttaacatcacgaccgacaaagtcacgatccagggcatcaatcatcgctggtgccgggtgctccagcggcgtgatggatatgcatatcagcaacgagaggaggcggcgtttcctcccaccccttga

SEQ ID NO: 133 - DNA, 297 bp, unidentified
  misc_feature 1..297: note = Ga0137384_10001405 JGI
  source 1..297: mol_type = other DNA
gtcagatgcccaagcctctgtaagggggcgggcttgcccctatctggccagtcccctcggtgttcgcactgaggagccctttgggaggagcgcccaaggtcgcacgtcggggtgaccggatcagccccgacccctgtaagtcggctggtaaacagctttggtgggagaaagcagtccagtggacagatggccgctcccaaagcggacgaggaccactttacctgagcaggcaactgctcagcgacgccccattatcggggtccgcagtgcgggaaaggaaagcgtgcgatgtcacgg

SEQ ID NO: 134 - DNA, 942 bp, synthetic construct
  source 1..942: mol_type = other DNA
atgtcaaccggccttcgggccgagcaagcggagcctgcgggtatccgcaaaggagacactttgaaagtatttgttttgaacatgcgcggcaagccgctgatgccgtgttcgcctgcaaaggcgagacacatgctgaaagcgggcaaggccgtcgtcttgcgacgcacgccgttcacgatcagtctgaccgtcgccacgggcgagacgaagcaggaagtgacgcttggcgtcgatgcaggcgccgaacacgttggcatttccgccacgacggaaaaggaggaagtcttcgcgtccgaagtcgagcttcgacaggacatcaagggacttctggctgatcgtctggcattccgacgtgcaaggcgcaatcgcaagacgcgctaccgcgcaccacgcttcaacaaccgcgttcgatccaagcacaagggctggcttgcgccgtccgtggagaaccgcattcaggcgcacatatcgcgcattgaagcggtttgccgagtgcttccgatcaccaaaatcgtgattgaaaccgcatccttcgacattcagaagatcaaaaacccggagattgaaggcgaaggctatcagcagggcgagcagcttggcttttggaacgtgcgcgaatatgtgctgttccgcgacggtcacgtttgccaagcctgcaaaggcagatcgaaagatctgattctcaacgtgcatcacattgagagtcggaaaacgggaggcgacgcgccgggcaacctcattacgctctgcgaggcgtgccacaaggcgtatcacgcaggcaagttgaagcagttcagtccccggcgcggcgcttctttcagggcagagactttcatgggcatcatgcgttggacggtgctcaaccgcctgcgcgagcgccatcccgaattgcctgtcacgaatacctacgggtatctgaccaaacacaagcgcatcgtcgcg

SEQ ID NO: 135 - DNA, 278 bp, synthetic construct
  source 1..278: mol_type = other DNA
gtcaataacccccgcctgaaggcggaggcttgaaaaagcctttgttgactagtctcagcaaacctcttccgggaggggagctacgttggttgggaatgtacaggcaccgtgggatgttcatcctagctccacgctctgcggccagtggttaaaagctctgagaggtaggagcggtgctgctggcaagaaaccctttccaacattgacgaaggatgtcaaccggccttcgggccgagcaagcggagcctgcgggtatccgcaaaggagacactttgaaa

SEQ ID NO: 136 - DNA, 411 bp, unidentified
  misc_feature 1..411: note = Ga0137365_10006127 JGI
  source 1..411: mol_type = other DNA
ctacaagagagcgtgctcaaaattgaccctggcagcagaaccagcggcatgaccctggtgcgggcagaagagacgccagcgggagaggtgcatcatgcgctcttttgctccgaagtgcagcagcgaggagagctcgtccatcgaggcaagcagacccaaagcaatgcccgacggcgtagacgcagtgccactctgcgtcaccgcgcgccacgcttcgacaaccgggctgttgccaaagggtggctgccgccctcgatgtgctcccgtgtgggtaacatcctcacctgggccaggcgatacagccgatgggtgcccgtcggcacctggacgggaggacgaacgcggtggaaccgggcgcgcttgggcatcgcgaaaacgcatgccaacgacgcgttgtgcgtgggagagatc

SEQ ID NO: 137 - DNA, 319 bp, unidentified
  misc_feature 1..319: note = Ga0137365_10006127 JGI
  source 1..319: mol_type = other DNA
gtcaacgaccccagcgctgaagcgcggggcttgcaggatcttcccgcaggcccgtcgttgtccagcctgagttcctgatcccgcaggtagggagacgagggaactccgttcgtccggtcaggacacccaggaacgcctcctcaattcctggccctgtcgtccagcattaaaagcccgttcggggtgtcgggcggtgtgctggacaagagcaagccggaggaacattggcgagaggagctgcctgggaacgccgtcccaggcgcgtcagacagccccgtaaggggtcccgaaagggaacagaaaggcttcaacagtcatg

SEQ ID NO: 138 - DNA, 699 bp, synthetic construct
  source 1..699: mol_type = other DNA
ttgagagtatttgtcctaaacaaacgcggaaaaccgctgatgccctgttcaccggcaaaagcgcgccttctgcttaaagagaagaaagctattgtgaagaggcgaacgcctttcactattcagctgacgattgcaacgggtgagtccaaacagccggtaagcctgggtgttgatgccggatacaaacatgtcggcctttccgcatcaacggaaaaggctgagctttatgcatcagaagtcgaactccgtcaggacgtctctgatctgctctctgctcgtcgtgcgttacggcagtcgcgccgtaaccgcaaaacgcgctaccgtgctccgaggttcgacaaccgcatccgcaccaagcgcaaagggtggcttgcaccatcagttgaaaaccgaatcaacgcgcacttgtcgcgcatagaagcggttcttcgactgctgccggtcacgaagatcaccgtggaaacggcgtccttcgacacgcagctgctgaagaattcagacattgcagggaaaaagtaccaagagggcgaacagctcggcttctggaacgtccgcgagtacgttcttttcagagacgggcacgtttgtcagcattgtcacggcagatcgaaagatccggtgctcaatgttcatcacttggagagcagacgtacgggcggtgattcgcccggcaacctgattacgctttgtgagacgtgc

SEQ ID NO: 139 - DNA, 247 bp, synthetic construct
  source 1..247: mol_type = other DNA
gtcaactacctcggcctaaaggccgaggcttgaaaaagcctctagttgactagcctcaggccgtcgtttggcggactacgttggtcgggaacctataggcaccgcgggatgcagatcctagtcccgcgctctgcggccgatggttaaaagctctgagaggcaggagcggtgctgtcggcttgaaaccccttccaacattggcgaaggatcacaaccggtcgaaagaccgaggagataaaacttgaga

SEQ ID NO: 140 - DNA, 1389 bp, synthetic construct
  source 1..1389: mol_type = other DNA
atgagcgtacttgtaatcgggcaaaatggaagggcgttgatgccaaccaccacaagaaaagcccggatcttgctgaaagaaaacaaagcttctgttgtatgcagacatccgttcacgattcatttgcggtataaaaccggatgtgcgacacaggaaggaagcatcggtatcgatactggttcacaacatatcggaatcggagtcacctgtggaaataaagtgatcctcaaagatgaacatgaattacgttcttttatggagaagcgttccctgatggaaacgagggcaacaatgcggcgtggacgcagatatcgaaaggtgcggtaccggaagccaaagtggaaacatcatacaaaacgtatgtatttcgagaaggcgaaccggaaaggccaacactggagaaaagtaaaaacaaccacacagtcaccaagaccggaaagctggctgccaccgtcactacagtcaaagtgcgaccaccatttccgtatcattgaccggtatttgaaatgcctgccggattcaatcacgaagaatttagtgatcgaggtaggacgttttgatatggcgcgcatgaatgatccgacgatccatggtgaaatgtaccagcgtggtccgatgtatgatacagagaacctgagagcgtacattttcgcaagggatggatataaatgtgcctgctgcaaagcaaaggcaggatctatccgaaagaaagatgggacatccgtgaaactgattgcccaccatatccagttccgcagtcgcggagctacggacaatccaaaatatatgatcagcgtatgcgatcactgccatacgacaaaggcacaccagcctggtgggatcctgtattcctggatggaaaagaataaaaaagttacccgcggattaagggatgcgacatttatgaacatccttcggagacgattatttgacagatttccacaggcagcatttacatatgggaatataacagcggttgaccggaaacgtttactgcttccaaagagccatgcaaatgatcctgttgcaatctccctgtttgggaaagatgtttctgtcatcaatgccacttgccagacgttacgttataagcaggtgcgaaaatccaaacgttctctgcatgaagcaacaccaaggaaaggacggaaggaaccaaatacaaaagcgattcgtaataagaagaacacaacccatgtaaatggatttaagctgtgggatagtgtgcttgtaaatggacagaaactatttatttgcggtttcacaggctctagtgcatatctggttgatcaggatggacattatgtatcgcctcctgggaaaacatacaaacagtggacattatcgaagttgagccggttgcatccaaatggtaactggctgatggcgtaa

SEQ ID NO: 141 - DNA, 327 bp, synthetic construct
  source 1..327: mol_type = other DNA
gtcaagttacccaccgcttagatctctgatgaaatcttgaagcgggggcttgaaaaagccatttgactagcctcagtgattttggtaagtctgtgctggtccgccggatacagatactgtcagataaactacgttatgagtgtcatgataccatcctgtgaaccctagcaggaagcggtatccgggcaaccgatcgtggtgtgggaacccacacggacccgaaaactcaagcctcatgacattggcgaagggaccttacgcgggcacgcggcagggacggtttcgttccctgtgtaatgcaataacataaaggaggcgcttatgagc

SEQ ID NO: 142 - DNA, 1338 bp, synthetic construct
  source 1..1338: mol_type = other DNA
atgacaaaaacactaaccaaacaaactacgcaagcttgcgtgttagaccaacacggtaaaccgttaatgccaaccacacgtcttggcaaagtttatcgtcttttaaagacacaaaaggctcatattgtgtcttatgagccattcacaatccaattggattataaacctgacacacatgttattcaaccaatgacacttggtgttgatagtggtgctattcattcaggttattctgtagctaatgaacaacgtgaattttatagtagcgaagttattgcacgtgataatatttcgtctcgtatatcagatagacgtatgtaccgtcagactcgccgttcacgaaaaacgcgttatcgtaaaccacgtttcaataatcgtaaaaataagaaaaaaggttggttaccaccatctcttgaacaaaaagttgctgttcaattaaatgaaatcgaccatcttcatcgttattttccaattgaaacaattattgtcgaagtagctgagtttgatattcaaaaaattaaaaatcctgatatttcgggaaaagattatcaacaaggaactttacaaggctataatattcgcaattatcttcttgaaaagcatagtcgtaaatgtttttattgtgataaagaagtgtcaacttttgaagttgaacacatgattccaaaagctaggggtggttctaatcgtattgacaatttaaccttatcatgtcataaatgtaatcagaaaaaaggaacactaacggcagatgaatttatcaaacgaactttaccggttgaaaatgccgctaaaaaattaaaacaattgtctaaagaaaaacgattgtttaaatatatggcgcatatgaatgctacaagatggacgttatataatgcaattgatgacaaatatccaaatgtcaaaatgacttatggttatattacgaaatacaatcgtattcaagcaggtcttccaaaagcccatcatatcgatgctaaatgtattacgggctttgctcaagtaccatcatttgatataatggttgttaaaacgaagatgcgtaggcataatcgtcaattgcatcgagcaacatttagtaaaggtcatgtacgtaaagcggcaagtttgccgacagttatgtttggctttagattatatgaccgtgtattatataataatcaccattattatataaaaggtcgtcgaagtacgggtttatttgcacttgcttctgttgaaggtttgaaagacgaaagcagaacttatagaaaattgacatttttggcgcatacgaacgcttatttgactaaccgatacattaacaatgatacagtaacaattttaattaaaaaatag

SEQ ID NO: 143 - DNA, 336 bp, synthetic construct
  source 1..336: mol_type = other DNA
acataaattaataaccaccccgctgaagtgggcggtttgcttgactcctttaccgtgagttaatcaaacctttattgattagcctcagtgtaaactacgttacttgtaaatatataggtaccttgagatgtctgcctagtcccaagctctacgcgttatcattaaacagttctaaggggtaggaacagtgtaatgacgatataaaactacaagataacattggcgaaggcaacatagggtttgtttatacccgcttaccgcataaaataaacaaatttaaacgaaaggactttgtcaaaacgtatgacaaaaacactaaccaaacaaactacgcaa

SEQ ID NO: 144 - DNA, 1020 bp, unidentified
  misc_feature 1..1020: note = Ga0070706_100018127 JGI
  source 1..1020: mol_type = other DNA
atgtcacaagtctttgtcttagacacgaccaagcgaccgctcaacccggtgcatgcggggcgtgcccgcttgctcttgaagcaaggcaaggcggcggtgtatcgccgctatccgttcacgatcatcctgaagcgcgcggtcgagcaaccttctcttgaaccgcttcgagtcaaagtcgatccggggagccaaaccaccgggctggcggtggtcaacgatgccagcggcgaagtcgtgtgggccgctctcctgacgcaccggggtaagcaaatcacgcgcgatctggcgagccgccgcacggtcagaaggagtcgcaggcaacgcaggaccaggtaccgcaagccacgcttcgacaaccggcgcaaaaagaaaggcacgctgccgccgtcgttagagagccgaatctgcaacatggtcacgtgggtgcggcgtcttctgcggctgtgtccggtagcggccatcagtcaagaactcgtgaagttcgacctgcaacagatggagcagcccgacatcagcggcgtggagtaccagcagggcacactcttcggctatgaggtgcgcgagtacatcctctcgaagtggcagcaccagtgtgcctactgtgaagcccgtgaggtgccattagaactcgatcacgtgcaccctagagccaagcatggctctaaccgggtgagtaatctcgtggcggcctgcacgacttgtaaccagcgcaagagcaaccaggatattcgcgacttcctcgccgatgatcctgagcggctggcgcgcatcctggctcaggtcaagacgccgttgcgggatgcagcggcggtcaatgcgacccgctgggcattacacgaccgactcatacgggtagggctgcccgtggaatgcggcagtggcgggaggacgaagtacaaccgcgtgaggcgggggctgcccaagtcacattggctcgatgcggcgtgcgtgggggccagcacgccggagcacctggacgtgcggggcgtggcgcccctgcacattagggcgacagggcac

SEQ ID NO: 145 - DNA, 297 bp, unidentified
  misc_feature 1..297: note = Ga0070706_100018127 JGI
  source 1..297: mol_type = other DNA
gtcagagacccgtcccgttcaacgggacgggcttgcgtggtaccacgcaggccccgctctgaccagtctcagccaccagtctccaagggactgacggggctccgttggaagcgaatgcataggaacgtccgggtgcttcaccagcccggaccgcttcggggtagcattaagcaggctgaggggtaaagccagtgtgctgtccaccggaaaccgcttcacaacgttgacgaggtgagcattacctgggcaaccagaggcccatgcgggcacatcaccaaggagtcatgtatgtcacaa

SEQ ID NO: 146 - DNA, 702 bp, unidentified
  misc_feature 1..702: note = Ga0137383_10047051 JGI
  source 1..702: mol_type = other DNA
atgagcaaagtgtttgttcttgatacccacaaacaaccattaaacccggtgcatcctggcagagcgcgtctcctgctctcctctggcaaagcggcagtgttgaagcggtacccatttacgatcatcctcaaaactgtggtcgagcagtcggtccttgagccgttgcgggtcaagattgatcctggcagcaagacgaccgggctggcactggtcaatgatgccacaggcgaggtcgttttcgcagcggaactggagcatcgaggtgagcagatcaccaaagcccttgccaggcgagccttccccaagacgcattggctggatgctgcctgtgtcggcaagaatacgcctgagcgtcttcgcctcaagggggttgtgccattgctcatcaaagccaacgggcatggctgtcggcaactgtgtttgatggatgagcatggcttcccacgcaccaagccgaaacagaagaaatttcggcatctgtttcggacgggcgatattgtccaggccagagttccggctcacctcaaacacccaggcgtccatgtgggtagagtgtctgctaaggcaaacggagccttcacgattgcgaccagatcagggaaagtcaccgatattggcaagaagtattgccgctgtctgcaacgggcagatggctatggctatctacagaaaggagaggaggcatttcttcccgccccctaa

SEQ ID NO: 147 - DNA, 247 bp, unidentified
  misc_feature 1..247: note = Ga0137383_10047051 JGI
  source 1..247: mol_type = other DNA
gtcaggaacccatcccgtagaacgggataggcttgcagaagcaagtttgaacctgacccgactcagctcgacaacgggctacgttaggagcgaatttaggtacgtttgggtgcgaggccagccccaacctctacggtacaacattaaacagctgtaacgggtgaaggccgtgtgttgtacgtcaaaccgctccataaccttgtcaaggccaccattaccctcgcgagaggaggctcgcatgagcaaa

SEQ ID NO: 148 - DNA, 1251 bp, unidentified
  misc_feature 1..1251: note = Ga0373956_0000940 JGI
  source 1..1251: mol_type = other DNA
atgaaggtttccgtcgtatccagggaaagaacaccacggatgccgacgacttccaggcgggcccgcctctggctcaaagcgggacgcgcccgagtggtgcatagtgagccatgtcccatccagatacggtgtgacactacaacgtctactcagcctgtcacggtggatgtagagacgggatcccagacaggtaggatcgccgatggggaggttgtttccctggctgaggtcgtcctgcgcaccaacatcagccacacagtgaggcaacgacgccaggactgcagaaagaggcgaggccggacaactcgggatagacaggcccgatgtgcgaaccatcgccgtaagccagggtcgcttgcactgtcagtgcgagccatcgccaagacaactgtcaagaccgtgcgcgttgtggccactggagtgccagtggggcgggtcgatgtggacgtcggacgcgttgcgacgcagacggtgcagactcccgacatctccgggtggcaaggccagcatagtgcgcttcaggactctcatcttcgtgaagacctgcgtgccagatggcacacgccatgcgcctcctggcacctgagtgcagtgccgctccagggagagtatctgagacccgtcagccgaggagacaacgattgcgcctcgcacatggcaatcgcctgtgcggcctggaatcaggcaaaagggaagcacaccgccgccgagtgtgtgtttccacaggttcaggctcaggcatgggtggccctcacagatgcagcgcatggagcgagtgaaaagacagtgagtgtgtaccaatgcagggatctctgcggatcggattgggtgacgatcacagttggctctgcaacgaagaagacacgtatgcaaatccccggccttcccagctcgcacaccaacgatgccatcgcgatggcctgtgcaggaggcgaggtggtaaaaccacatgcggtcgcctcccacttgcacaacgggaaacggagtgagcacgcggtctgggcatcttgcatggtcaaaggctggaaggtggacgaagtggtgaacgtcaaagggcggatcggttccattggtagatggtgtctcacaggagcgtatgtggtcaaggatctgacgagtgggaaagcatgtgtggaggtgacatcacgcatactcgaacggttggcccgtccggtacaaggctggatgatcactcgtctttctttctctcacatcagaggaaaggagggtggcgcttcctcccctgtctga

SEQ ID NO: 149 - DNA, 305 bp, unidentified
  misc_feature 1..305: note = Ga0373956_0000940 JGI
  source 1..305: mol_type = other DNA
gtcaatgacctgtcccttccagagggagatttgtgagagcaaagctcttgcgcgtcggattgaccagactgagcctcagtgccaggcgagccgagcacgtgagcgtcccatctgggaaagaagaggcgacgagatggctatgtgttgctcttctgactccagcgtgctgccccggcgtcggaccttccatcgcctgatctcaccagcggtgaggtcagcagcagtggtcaggagaacgaacggggtcctttctgtgtcgaggggatcacatgtcctccaatcggaagagaggagccttctctgat

SEQ ID NO: 150 - DNA, 1338 bp, unidentified
  misc_feature 1..1338: note = GENOME_ACESSION: mgm4547164.3 MG-RAST
  variation 1105..1227: note = n represents any nucleotide
  source 1..1338: mol_type = other DNA
atgcagtatgtatttgtattatccagaaacggttcgccgctgatgccgacaacatgcggtcatgccagaaaactgcttcactccggcagagccgatatcgaaaagcacgagccgttcacaatccgtctagatcatgacgccgccggtattcagcctgtcgagtataagacagataccggggcagtgcatgtcggtgtatcaatctgctcggcgaagcacgaatatgtgcatgcacggttcgatatgctggctgatgagaagctgcggcatgacgattgccgtaagcaccgcagagcaaggcgcggcaggctaagataccgtaagccgcggttcaacaaccgtgcaaagccaaaaggctggcttgcgccgacgaatcagcacaagctggatacgcaggaaaatctgttcgccagatatgctgcagtctgtccgatcacagctggatacttcgaagtcggcaagtttgatacatcagcgattgaagcaatcgaacgcacaggtgttaagccggaaggcacggactatcagcacggctatcggtatcagatggccgcactcaggaatgccgtgttttacagagatggctacaaatgccagatttgtggcaagtctatcaaagacggtgcaattctcagaatacaccatattggtttctgggcaggtgatcatacgggccgcatggcaaatctgctgacggtatgcacaaagtgtcatacgtcagcaaaccacaagcccggcggcaaactgtatgatctcaagccaaaggttggcaatctgtctggcgcagcattcatgaatcagattcgccggaagatcatatctgatctgcaggaaaaataccagagcattgcattccatgcagtctatggatcagataccaaagtccgcagacatgaccggagtatcacaaagagccatgctaacgatgcatatgtgctcggtacgctcatttcgaagcatcggacgcaggagaaacactttgcaaagcatcgcagaaacaaccgtattctgagtaagttctacgatgcgaagtatattgacattcgggataacactacgaagtctggtgcacagctaagctgtggacggacggatcgctctgagnnnnnnnnnnnnnnnnnnnnnnnnnnnnnnnnnnnnnnnnnnnnnnnnnnnnnnnnnnnnnnnnnnnnnnnnnnnnnnnnnnnnnnnnnnnnnnnnnnnnnnnnnnnnnnnnnnnnnnnnnnnagagtagacattctgaaaagaacgaacgcatcttcagaggccggcaggtgcggaaaggcagagtttccatcaggaaacaacactatccgtatcagcctggcgacattgtga

SEQ ID NO: 151 - DNA, 468 bp, unidentified
  misc_feature 1..468: note = GENOME_ACESSION: mgm4547164.3 MG-RAST
  source 1..468: mol_type = other DNA
gtcagccaccccatgactaaagtcaggggcttgcagggaagaaagaaaaaggcgttgcttggtatttcttcttaggaaagccatagctgatcagcctcagtgtttgtatcatcgttctgcgatgcgctgcagatactacgatacctgagaatcctgtgagtaatcacaacataacaggcaccagcgaatgctccacaagtccgctgctctgcggaacgtcattaaacatctctgagaggtaggagaagtgtggcgttcagaaaacctcaggcactcattggcgatgtggactacggcactggctcggcttcggctgagtacaggctcgaatctgcaaatagtccgatatccaatccgaacgtttgcagaggtgcgtaagcaccgattttttccaaacacactggtagatggtgtgtggttcattgctttatcagcattacagagaggaggcatcagcctatgcagtat

SEQ ID NO: 152 - DNA, 726 bp, unidentified
  misc_feature 1..726: note = Ga0256831_1010291 JGI
  source 1..726: mol_type = other DNA
atggtttttgtattagataaaaccaaaactcccttagcccccactacggagtctaaggctagaattttgttaaaaaaaggtaaagctgttgtgcataaaatatttccctttaccataagattaaaagagaacaaaacgtgtactaaacactttgaaataaagtttgatgtaggtgcaaccgttacaggtgtagcgattgttgatgcactaaaatgctttttctttgcagaaatagtgcatagaggaaaagccgttaaaaaagcaatggattcaaggagagcaataagaagaggtagacgagatagaaaaacaagatacagagaagcaagatttgataatagaacaagaccaaagggttggttacctccaagtgttaaatcaagagcagataatgttattaactttgcaaaaaaatatgcaaaactaatcccattaaaaatggctacagtagaaaaagtctcttttgatactagctctatgactaatggtaaaaagttgcatggagtagagtatcaaaatggtagccttaaaaatacaaagttaagagagtttatctttatgaagaacaactacaaatgtgtatattgtggaaatcatggagaagagatagaacatattattcctcgctcaaaaggtggaacaaattctgttcaaaatttaacacttagttgtagaaaatgtaacgaacttaaaggcaatctaactcttaaagagtttggtaaaaaa

SEQ ID NO: 153 - DNA, 275 bp, unidentified
  misc_feature 1..275: note = Ga0256831_1010291 JGI
  source 1..275: mol_type = other DNA
gtcaataacctctcccaaaccttaacggttagggaagaggcttgattgaccagactaagtagctagagatagccaactacgataatagtgttatcacaccttggaatgcttctccagttccaagctctatgtaggctctttaagttgggttaaagccctgtgaacctaaggacgattcgccattgcgaacaagcatttttatcattgtcgaggagagaagcaaagcccgtcaccactgaaaagtgagttaatctgaaaaaggatttttaaaaatg

SEQ ID NO: 154 - DNA, 834 bp, Marinobacter lipolyticus
  variation 358: note = n represents any nucleotide
  variation 411: note = n represents any nucleotide
  source 1..834: mol_type = other DNA
ctgggatcacgctggcgaaaggtaaagcgccgaaggttccggtcgccgcgcaagcgggagccggtgatagacattcccgaggggagagaggcttcggcctccgttactaggcccgtaagggcattcattgaaaggaaaacgatgtcggtcttcgtactggatagacgcaaacacccccttatgccgtgcaccgaaaggcgtgcgcggcttctactcgaccgtggtcaagcggtggtggtgcgtgcgtatccgtttacgatccggttgaaaagccgggttggcggaaatactcagccggtccggatcaagatcgatcccggcagcaagaccaccgggattgcagtggttcgagaaagcngccagaagcaacacgttctggcgttaatggagttggctcatcgcggtcgccanatcagcaagtctctggagcaacgtcgggcgtttcgccgccggcgtcgcaaccagctgcggtacagggcaccccgatttaacaatcgaaccaagcccaggggctggctggccccgagcctgcaacaccgggtggataccacgaaaagcttggtgaatcggcttcggtctttggtgccggttgaatttatcagccaggaactggttcgattcgacacgcagaagatggaaaacccggaagtcagcggtgtcgaatatcagcagggcaccttgctcggctacgaggtccgcgaataccttctggagaagtgggggcgcgaatgcgcttactgcaccgacaaagacacccctcttcaaattgagcatatcgacccaaaagccaacggtggctcgaaccggatcagcaacctgacattggcgtgccgg

SEQ ID NO: 155 - DNA, 295 bp, Marinobacter lipolyticus
  source 1..295: mol_type = other DNA
gtcaactaccccgccctgaaggacgaagcttgtagagaataccctgcaagccaggttgaccagggagagcggacaccaacccgctacgtttatcacaggtcgctaagactcatcgccgaatgcttcctcagttcggcgctctgaaagactgggatcacgctggcgaaaggtaaagcgccgaaggttccggtcgccgcgcaagcgggagccggtgatagacattcccgaggggagagaggcttcggcctccgttactaggcccgtaagggcattcattgaaaggaaaacgatgtcg

SEQ ID NO: 156 - DNA, 927 bp, unidentified
  misc_feature 1..927: note = Ga0307968_1027799 JGI
  source 1..927: mol_type = other DNA
atggcggtgtatgttctggacaagaaaggcaggcccctgatgccttgtaccgaaaaacgagcgagattgctgctggagcggggccgtgcccgggtgcattattgtgtgccgttcgtgatccgtttggtggatcggctgcaatcggagtccgagcttcagtcgctgacggtgaagattgatccgggcagcaaggtgacgggcattgctttggtgcgggagcgcgaaaagaaggtggttgtgctatccctgatcgaactggtgcaccggggcgccagttcgatcaaaaaatccctgggccagcgagccgggtaccggcgtcgccggcgtagtgccaacctgcgccaccgggcaccccggtttctgaaccggaccaagccgaaaggttggctggcaccaagccttcagcatcgggtgaacaccacgctgagttgggtagaccggttacagcgctggacgccggttgccgaactggccgtggagcgggtgaaattcgacatgcagaagatggagaacccggagatccaggatgctgagtaccaacaaggcaccttgatggggtttgaggttaaggagtatctgctggcccggcaccaacacacttgctcgtactgcgctggcctgtccaaagaccccatcctggaggtcgagcacatcgttccccggggcctgggtggcacccaccggattgggaatcttacattagtttgcaagacctgtaatggggacaagggcatgcacgaaccgggtgcatggcagacgctctgtgagcggagcaagactgccatcaacaaggctcgcgccaagagcatggcccgcatcctggatggctaccgccccaccctgaaagatgcggcggcggtgaacgccacccgcaatgccttgtttcaggatttgctggcaacgggcttgccggtggaggccggcact

SEQ ID NO: 157 - DNA, 298 bp, unidentified
  misc_feature 1..298: note = Ga0307968_1027799 JGI
  source 1..298: mol_type = other DNA
gtcaactaccccgcccttaggacggagcttattggggcaatccgaagagctaggttgaccaggaagagcggtaatcaatccgctacgttacacacagggtacaagacccacctcgccgtgcttcctcagcgacgggctctggaatcgaccgatcatgctggcgaaaggtaaagcgtcgaaggttgggagaacggcttaaagccagtccggtgtgtgacattcccgaggggagcgaggcttcgacctccgtcacaaggcccgtaagggttttaattgaaaaggaagcgttttgatggcg

SEQ ID NO: 158 - DNA, 1165 bp, Moorena sp.
  source 1..1165: mol_type = other DNA
atgcaaaattatgtttttgttattgacgcgaacaagcaaccattaaatcctattcacccaaagaaggctcgccgcctgctagaaaaaggaaaagcagctgtctttagaatgtatccatttacaatcatcttgaagactgcgtacgctaatccagttatctcaccttgccaaataaaaattgacccgggtagcaatactactgggttcgccctggttcgagacgggcaagttatttggggaatggaattaaaacacagaggaggattgatcaagaaaaaactggaatctagaagagctgtcagacgcggaagacgtaatcgcaacactcgttaccgaaagcccagattccttaaccgcaaacgaccacagggctggcttcctcctagtttagaacacaggattttgacaactgaaacttgggttaagcgattaattaaattctgcccagtctgtgaaatctggattgaacgagttaagtttgacactcaaaaaatgccaaaccctgaaatcagtggagtagactaccaacaaggcgagttagctggctacgaagtcagagagtatttactcgaaaagtgggggatagaatgtacttattgcgggaggcaaaatgtccctctacagatcgagcacattcacccaagatcaaagggtggtagtaacagagtaagtaatctctgtttggcttgcgaaaagtgtaatcagcgcaaaggaaacaagcccatagaatagtttataaaaaagaaacccagcctactacaaaaaatcaaaaccaaagccaaacaaccattattggatgcagcagcggtaaacgcgactcggaacaaattggtcaaggtattgaaagatactaaagtagtcgtcactggaacaggagcgcagactaagtacaaccggacaaggctaggactacctaagcagcacgcttattgacgccgcttgtgtaggaaatattgaaaacttagatctcaagaccttacaacctctatttgttacctgtaaagggcagggaggacgacagaaagcggctctcaacaagtacggttaccctattaggcacaacccactgaagcctgttaaaggatggatgactggggatatagcgagacaccagaaactggggataggcaaagtcacccctagtggtctgtcaaactcattttga

SEQ ID NO: 159 - DNA, 251 bp, Moorena sp.
  source 1..251: mol_type = other DNA
ctaagccttggtaattcccggtaactccaggaattgccaaccaggatgcagactaagtattcatttactacgttgttcaagccatgatacctacaaatgaacgccagtttgtagctctatcgctaactattaagacgaaggcaaccgtgtagttagctcaacaagcttttacaacattgtcgttcgcgcaagcgtgtgcgaagcactcggcacaccttaccaacttgaggcatttaacgatgcaaaattat

SEQ ID NO: 160 - DNA, 999 bp, unidentified
  variation 675..774: note = n represents any nucleotide
  source 1..999: mol_type = other DNA; note = Geitlerinema catellasis PCC 7105
atgcacgttttcgttctcgacaaagacaaaaaccccctagcaccatgccatccagccaaggcgcggcggctcctgaaatccggtcgagcttcggtatttcgtcgctatccatttacccttatcttgcacgagattgaagccaaagattgtgtcgttccggaaactcaactcaacgcttcggctccgctcgcttcgacttcgctcagcgttgagtccgagcggagtcgaggactcaaaatcgatcccggctcgccaacaactgggttggctatcctgtccgaaaaccgagtcatttgggcgtccgaactcagctatcgcggacagcaaattaagaacgacttagagaaacgtcgcgctttacgacgctcccgacgccatcgaaaaactcgttaccgaaagcctcgctgtcttaaccgtactcgtccgaagggttggcttccaccgtctctcaacgcttcggctccgctcgcttcgacttcgctcagcgttgagtccgagcggagtcgaggactcaaccatcgggtcgaaactacgatgacctgggtgaaccgtttgcgaaaacttttgaaagaaactggattgcccgttgaagtgggaacgggcggacagactaagtttaatcggactcgattgggtttgccgaaaactcacgggttcgatgcggcttgcgtcggnnnnnnnnnnnnnnnnnnnnnnnnnnnnnnnnnnnnnnnnnnnnnnnnnnnnnnnnnnnnnnnnnnnnnnnnnnnnnnnnnnnnnnnnnnnnnnnnnnnnggaattcccctcccgctaatcctgtcggatataacgggagtccccttcccgcattttagatggaaatttatagcagtcgccaacagaatctttctcctcaagaagaacgcgacctttccgcacttgccgaacaagccaaacgcgctcttgaggacggtgtcgtctcgcgagaagaacgagatgcactcattgcggcaatttatgccgatggaaaagtttcggtag

SEQ ID NO: 161 - DNA, 258 bp, unidentified
  source 1..258: mol_type = other DNA; note = Geitlerinema catellasis PCC 7105
gtcaacaacccgccgtcaagcctgttggctatgacgggggcttgaaaaagcccacaagttgaccagcctaagtcttccgaagactacgttacgtccgagagtttaagttcctaccgacgagtacgttgccagcttgtcgctctagaactgaaaagttaaacagcttaaaacgggttaaggcagtgcttttcagatagtaccgagacgtaaccttggcgaggcaaacgttaccccttttgggagttgtgtattatgcac

SEQ ID NO: 162 - DNA, 1278 bp, Methylobacter whittenburyi
  source 1..1278: mol_type = other DNA
atgacgggtaaccgtcaacttttcaggtttacaggaatgaataaagtttttgttttggatcgcgagaaaaacccgttaatgccttgtcatccggcgagagctcgacagttattggatcgtaaacgggccaaagtttttcgcttacatccattcacgatcattttgcaggatcgagccggcggcgctgttcagccggttgaaatcaagctagatccaggcagcaagataaccgggattgcgataaccgttttgggcgataacggacgcacgcttgtctggtcgtgtcacttgagccatcgcggctgcactattaaggatagcctgcaaaaaaggcgtgggattcggcgtagccggcgtcatcgccattgccgataccggcagcctcgcttcgataatgtatttacctgggttaagcgcttgctgagctggacaccgggacagtgtattcatgttgagacggttaggtttgacacacaaaagctgatgaatcccgaaatatcgggcgccgaataccaacaaggtgagctgcaaggttatgaggtttgcgaatatttgctggaaaaatttcaccgaacctgtgtctattgcggtttaggcgatagaccgctggaggtggaacacgtagtagccaaggctaacggtggcagcaaccgggtctccaatttagcgctatcctgtcgggattgtaatgaacgtaaaggcactcaacgggtagaggatttcgtaacggaccctgttaagctggagcgattgcgcaagcagctaaagacaccgctaaaggatgcgactgctgttaatgcaacccgttatgctattggcaacaaacttaaaaacctgggtttaccggtccggttctggtcaggcggacgcaccaagatgaatcgaattcagcaaggttacggcaaagatcattttatcgatgcggcttgcgtcggcgataccggtagtcgcgtgtttattccggaagccctaacccctttaaccatttccgccaaaggacgtggtaaccggcaaatgtgcctgatggataaattcggttttccccgaacccggcctaaaggcgttaagcaagtcgatggctttaccaccggcgatagcgttcgactcaatcagccccgaggcaaataccggggtagctggacggggagtatcagtattcgagccagcagggtttttgacattacaacccgcaataaagaaggcaaaaaccaaaagatatcggcgtccagtcaacatttcgttcggcttcaagggtttgacggctatgtttacggctaa

SEQ ID NO: 163 - DNA, 332 bp, Methylobacter whittenburyi
  source 1..332: mol_type = other DNA
gtcagcagcttaaaccagagttgagccctcgacttatccaagcctgcgttaaatccgtttaacacaagcttggctagggttaattaagtgatttaattaacggctcaacccgcctaagctgcttagtggcagctacgttagtcaagtgatcttaccctgggatgcttctccagtcccgggcactaaggcaataggttaaacagtgagcgatcgagagtgaacagtgcttattgcatgacaagctttactaaccttggcaaggagatatttaaccgcttcggcggataatgacgggtaaccgtcaacttttcaggtttacaggaatgaataaa

SEQ ID NO: 164 - DNA, 1224 bp, unidentified
  misc_feature 1..1224: note = JGI24702J35022_10000018 JGI
  source 1..1224: mol_type = other DNA
atgttagtttatgttttgagcaaatctggaacatctttgatgcccaccgctagaaatggttgggtgcgaagggcgttacgagacggcagggcgaaagttatttcccgctcaccgttcacaatccggttatgttacgattctaccgagtatgtacaggaatgtacctgctcggtagatgcagggagtaagtttgttggattatcggtaaccacaggagagaaagaagtttatgcagctacagttcagttgagggcggatattgtagatttgttgtcaacaaggcgggaacttcgtcgttcacgcaggaacagaaaaactcgttaccggaaggcacggtggcaaaaccgtaaaaaaccagaaggttggcttcctccgtctgttagatggaaggtcgaagcccataagagggtaattgcaaagttacataagattttacccattagtaaaatcatcgttgaaacagcacagtttgacagccagaaaattaacaatcctgaaatatccggcattgactatcagatgggagaccagttaggctatcaaaacgtcaaggagtatgttttagtgagagacgggcacaagtgtcaggtgtgcggcaagggcaagataaaacttcatgtacatcatatcgaaagtcgtaagacaggcggaaatgcaccgaacaaccttgttactctatgcttggaatgtcatgatggtgttcataatggaacgaaacaactcaaaaagaaaagagggcaatcgttccgtgatgcaacacaaatgaccgtgatgagacccacactgttgagggaattgaaagaaatatatccttatgctcaagaaacctttgggtatattacgaaatttcacaggcaacaggctggtttagagaaatctcatgtcaatgatgctcggtgtattgaaggtaatatgccgactgttttgacaaagccttacctgattaagtttgtcagggctaataatagacagttgcacaaatgtacaatagccaagggcggttacagaaaatctaacaaggcggagaaatatgtctttggttttcggttgtttgatatggttaaatatcaaggacaagaatgttttatattcggaagacggtcttccggtagttttgatgtgcgattattagacgggacaaaagttagtgccggcatttcgtataagaaactaaaactgattaagaaaagtacaacaattttaacagaacgctgctcctcctga

SEQ ID NO: 165 - DNA, 263 bp, unidentified
  misc_feature 1..263: note = JGI24702J35022_10000018 JGI
  source 1..263: mol_type = other DNA
caactacacagtagaaagtaaacaacccacacgctaaagcgtggggcttttagcccttgtttactagattaagtttaacgcccggtttgtccgggagacaactacgttgattaggaataaataggtacttcaggatgcttgttctagtcctgaacactacggtttacggttaaaagttccaatgggtaagaacggtgccataaacattaaacccttttcaacattatcgaagaacacctaactccgtaaggagatttacaatt

SEQ ID NO: 166 - DNA, 1554 bp, Leptospirillum sp.
  source 1..1554: mol_type = other DNA
atgcttcctcagtcccgggctctggaagctgccgatgcagacaaccgcgagggccaggacgaaacggtcggcggcaagggagcgatcccgaagccggttgccaacattcccgaggggagacgcgtcgaaagaagcgcgttacggccgaaaggccagtgcaacgtaaggttcgacggaggattcgtgcaggtttttgtgctcgacaagaaaaagaagcccctgatgccctgccacccggcccgggctcgggagcttttgcgagagggacgggcggtggttcacaggatcgccccgttcaccatccggctgaaggaccggatcgggggcgaaacccagcccattcgggtcaaactcgatcccggatcgaagaccaccggactcgccgtggtccgggaggaagagacggacggggagaagaccgcccatgtcctgtttcaggcggagattcatcaccggggatccgccatcaaaaagagactggaccagcgccgggccttccggagacggcggcgaagtcagcttcgcgaccggacgccccggttcgacaaccggacacgtccggacggctggttgcccccgagcctgcgccatcggatcgacacgaccctcgcctgggtcgaacggctccggagactggttcccgtttccgaactgtcccaggagctggtccggttcgacatgcagaagatcgaaaacccggaaatctccggagccgaataccagcagggaaccctggccggatacgaggtccgggaatatctcctggagaagtggggccggacctgtgcctactgtgggtccgagaacgtgcccctcgagatcgaccacatccacccccggagcctgggcggatcggaccgggtctccaacctgacgctggcttgccgttcctgcaacctgaagaagggaaaccgtccggtcggggagtttctggcgaagacgccggagcgtctgtcgacgatcctcgcccgggccaaggccccgctgaaagacgcggcggccgtcaacacgacccggtgggcgctgtttcaggcgttaaaggcgacggggcttccggtcgagaccgcctccggaggacggacgaagtggaacaggactcggcttgtgctccccaagacccatgccctcgatgcagcgtgtgtcgggaaggtcgacaggatcgagggctggaaccgtccctacctttcgatcaagtccacgggacggggatcctatcagcggacccggctggatgcgttcggcttcccccgagggtctctgacccggacgaaagcccacttcggttttcagaccggagaccgggtcatggcgatcgtgacgaagggcaaaaaaaccggaacctatgccggacgggtggccgtgagaagctccggcagtttcaacatccagaccggctccggagtggtgcaggggatttcttacaaggactgtcggcttctccagcgggccgacgggtacggatattctatccatccgatcactgagaaaggagaagcgggagaggcgctacccctccccggcatgaatgccggactctcccgcgcaagaggatga

SEQ ID NO: 167 - DNA, 306 bp, Leptospirillum sp.
  source 1..306: mol_type = other DNA
gtcaaccaccccgcgctgaagggcggagcttgaaaggaggttcgacaggctcgggttgaccagggaaagcgggttccaacccgctacgttggcaacaggtacaagacccaccccgggatgcttcctcagtcccgggctctggaagctgccgatgcagacaaccgcgagggccaggacgaaacggtcggcggcaagggagcgatcccgaagccggttgccaacattcccgaggggagacgcgtcgaaagaagcgcgttacggccgaaaggccagtgcaacgtaaggttcgacggaggattcgtgcag

SEQ ID NO: 168 - DNA, 1290 bp, unidentified
  misc_feature 1..1290: note = Ga0101770_1065076 JGI
  variation 345: note = n represents any nucleotide
  variation 370: note = n represents any nucleotide
  source 1..1290: mol_type = other DNA
atggtatttgtattagatattaatagaaaaccattatcaccttgtcatgaagcagttgcaagaaaattgcttaaacagggtaaggctgcaatatttaaaaggtatccatttacaataatacttaataaatctgtagataatactgacaataaacaagaatatagactaaaaattgattatggaagtaaacatacagggttggctatattacaaaataacaatgtaatatggttagctcaaatagatcacagaacagatattaaaaagaaacttgatgaaagacgtatgtttagacgcagtagaagaaacagaaaaataagatatagaaaaccaagatttttaaanagaaaaagaaaagaaggatggatancgcctagtttagaaagtagagttaataatataaaaacgtgggttaatagattacaaaaattaattccattaactcacatatcttatgaaaatgttaagtttgatactcaattattaagaaatcctgaaataagtggtattgagtatcaacaaggaattttatatggttatgaagttagagaatatttgcttgagaaatttagtagaaaatgttgctattgtggaaaagaaaacattccattagaaatagaacatataataccaaaatcaagaggtggtacaaatagaatagacaacctttgtttatcttgtcatgagtgcaatcaaaagaaaggcaatttgacagcagaagaatttggttatccagaggtacaaagacaagttaaagaaacgttaaaggacgctgccgtagtaaattctactagatggaaagtgtatgatgttttactacgaattggtttaccagttgaatgtggcacaggtgctttgactaaaatgaatagaattaaattaagattaccaaaaacacattatttcgatgcttgttgtgtaggacaaagtacaccagataaattatattttaagacaaaagatgttttgtatataaaagcaaaaggcagagggagtcattgtagaacaaatttagataaatacggctttccgagaggatatttagcaagacaaaaatatttctttggttttcaaacgggagatatagttaaagttgaaataccaaaaggaaaatataaaggcatttggtacggagaagttgcatgtagaaaatcaggtagttttgatattaaagacaaggaaggtcaaagagttgtacaaggcgtcaattataaatattttcaagtagtacaacgctttgatggatatagttatagaagggaggtagcaattcttacgcagcgtgtttaa

SEQ ID NO: 169 - DNA, 241 bp, unidentified
  misc_feature 1..241: note = Ga0101770_1065076 JGI
  variation 66: note = n represents any nucleotide
  variation 89: note = n represents any nucleotide
  source 1..241: mol_type = other DNA
gtcaactacccaacggctaaagccgtgggcttgaaaccccatgttgaccaggctaaggtttgaaanagaacctacgttatctatgttangacaccctaggatgccctcccagttctaggctctgtcgtatagcattaaacaggtgtagtgggttaagccagtgtgctatacgtgtaagcatagataacattgccgagggagatgttacctgcgtaagcagaggaaaggagaaaatcctatg

SEQ ID NO: 170 - DNA, 1278 bp, unidentified
  misc_feature 1..1278: note = Ga0075125_10001675 JGI
  source 1..1278: mol_type = other DNA
atggaaacaaaaataaactacgagaaaggaactgaaaaaacaccaacagacgcttcactaatctgttgctctgtaagagaacccattaactctacgagtttagaaaacaagagaaacactcttgataactctaagttcttttttctttgtggaagtgagtataactttccgaataggaaagcggtttgtagccgagtgtttgtattaggggttgatgggaaaccattaactccttgtaaacataaaagagcaaggttgttaatgaaacaaaataaagcaaaacctgtatggaataagtttggagaatttggaattaagatgttagaagaaacaggcagtgaaacagcagaaattattttagggatagataatggaacaaagtttgaaggttattctataattgttgataaaacaaataattttaatgtgatgtggaaacttccagataaacaaaaacttgtaaaaaaacttgaagaaagaagtagattaagaagagcgagaagacaaagaaattgcaggagaagagaagcaagatttaataatcgttcaaaagatggttttattgcaccaagtcaattacaggttgttcaaagtaggttgaaagcaataactgagttatttaaatcttacccaataagcaaggttgcatttgaagatgtgaagtttaatcaccgagataataggtgggggaagaatttttctacaattgaagtcggaaaaaatatgattaaagattttattaataataaaattggaaggaaaaatttaataaattttgaaggaatagaaacatataacttgagaaataaatataatttgaaaaagtcttcagataaatcaaaacagagtttttatagccattgtgtagatagttttattatatcaatggaaactattggaaaacctattattcttaatgaaagtataacttatatcgatgataactacagacctgttagaagaaggttacacgacactcaattttcaaaaggtggaattagaagtaaattttctactggaaaatttcaaggaatatcaaaggggtgtattataggagatgaaaatggttggttgggacaattggttggtggaactaaagataattgctggtattgtgattttgaaatgagaggtaatagaaaagtttatcaaaaaggaaaatccataaataaaattagttggatttcacatcacttcaaatataataaactaaatataaacagccaattcatcccccacctgaaggaaggggacttcttggctcagacaatatgttaa

SEQ ID NO: 171 - DNA, 324 bp, unidentified
  misc_feature 1..324: note = Ga0075125_10001675 JGI
  source 1..324: mol_type = other DNA
taaaaagaatacgtgaaaaaagaaaaagaattaatgctaaagaaaaaagaagttctcaaaaaagaagtgtagaaattgttgagtatgaggatggaacatattctttgattgggtatgcttgggatcttaaacttaaagaaaaagaagtctctgatgctgttaaaaattggattaatggttctcttgaaaatggggaagaaggtgaactacccctccataaatgaaggggcttcttatgatggtaagaacgcaagagttcactacactaagtttgaggaaacaaagaaatggaaacaaaaataaactacgagaaaggaactgaaa

SEQ ID NO: 172 - DNA, 1230 bp, unidentified
  misc_feature 1..1230: note = Ga0209347_1000563 JGI
  source 1..1230: mol_type = other DNA
atgacgcatgtctacgtactttccaggaacggccgccctctgatgccgaccatgccggccagagccagacacctgctcagagcaggcgaagcgagggtggtaaggatcaagccgttcaccatccagctaaccattaacacgccagaagtggcgcagccggtatacggcggccaggaccccggattaactcagggagtggccgcagtaaggaacgacggcaaagttttgtttaaagccgaagtcaaatgccgacctgacatttcagagagactcagggaacgcgggagttaccgcaaaggacgccggaaccggaaaacaaggtaccgccagcccaggtttttaaaccgcaaaaagccggaaggctgggtggccccgtcaatcaagcagttaaaacacgagcatgataaactccggcagttggtggaaagcatcctgcccgtgaccggctggttcatagaactcaacaaattcgactttcagaagatggaggacccgaacatccagggtgttcagtaccagaacggcccgcagaaaggctgcttcgacgtaagggaatacgtcctcgaacgcgacggctacgcctgtattctgtgcggcggcgtaaaaaaccgcaaactctatcactttcgcggcaaatccgagcgtccgaagaacctggtcaccctctgcggggaatgccacagaaaggccgtcaacaaagaaatcccttttgcggtattgctggagagctaccgttgggcagccagggtcaacgtgatgcgtgcgctgtgggggccgtccggacaaatcaattttgtcacagcagagcaggcagccgcgtcccgggaactgctccgcatggctaaaacgcacagcaacgacgccttggccgcagttcatgcggcttatggaacagtacccgccgccggcgaatgcaccctgcacggccgctacgtccggcagaagaaccggcaactgcaccgggcgaatcccggtaaaggcggcgtaaggcagttggctaacgccaaccggtacctggtaagcaaggcgggagtgagggtgcaaaaatacgacctggtaatataccgtacccggagtggccggaaaatcaccgggtacgtcaacaccctgttcagccgcggcgcggcgcggatagctgattacgccggcagggaactgtacagcggagcgagtgtcaacaaactcaagaagctgcagaatgctgataatttggtatgggaggtgttataa

SEQ ID NO: 173 - DNA, 262 bp, unidentified
  misc_feature 1..262: note = Ga0209347_1000563 JGI
  source 1..262: mol_type = other DNA
gtcaaccaccccccccactgaagtgggaggcttgcagaaaacactgcgagcctcgggttgactagccccagcctgtcagttacatgccagactacgttggaaaggccatcacaccctggagcgtagcccgaactccaggctctgtggtccgggattaaaagccctgcggggcaggggcggtgttccggacataacaaacccttccaacatgggcgacgggcgcaataacttcaacgtggaggaggtcatctaaatgacgcat

SEQ ID NO: 174 - DNA, 1254 bp, unidentified
  misc_feature 1..1254: note = Ga0209941_1000055 JGI
  source 1..1254: mol_type = other DNA
atgacggtatttgtcttggacaaacgtaaacggccgctgatgccgtgtagtaacaaacgagctcgtttactgttagagcgtgggcgcgctgttgtccaccgctttaagccctttaccattcggctgaaagaccgtattcagggcgactgcgtatttcaacctatcatgctgggtatagacccgggttcaaagaccacgggtctagccctcacacgccgtgacggtgaggacgccgtactggtgtttggtgttgagttacagcaccgggggttggctatacgggccaagcttttaaggcgcagtgcttaccgccgtaatcggcgctcccgtaagacccgctatcgccctgcccgttttaaaaaccgtacgaaaccaaaagggtggttacccccctctcttcgacatcgagtagaatcaacgttgacatgggcgggtcgctttcgacgcttagcaccagtgaccgctttggcttatgaagctgtggaattcgacacacagcgtttacgtaatcctgaggtctctggcatacagtaccagcaaggcacgttgcaagggtataccgtccgtgcctacgtacttcagaagtgggattacgcctgtgcgtactgtggatccaaagaccgtctgacacttgatcacgttatccctcgctctcgacacgggagtgacgcggtgacaaacctggtctgtgcttgttacggctgtaatcaacgtaagggcaaccgtcgggtgcaagagtttttagcaaagaaacccacggtactaaaacgtgtcctcgaacaactgaaaaagcccttacgagacgctagtgcggtgattagtacgcgccccgcgttacataaggcgttaggggaggtaggattgccactcactgttggtactggggcggaaaccagctacattagacaccgattgaaactccctaagagtcatgtcgtggacgctgcttgtgtggcgctaacaggaacccttaaaggagaatggtttaaaccattacttgtcgtttgtgctggtacgggacgttaccaacgtgtcagaacagatcgcttcggatttcctaaagcgcacagagttcgcgtcaaacggccattcggatttcaaacaggtgacctggtgcgttatgggaaagttattggtaggacagctgtaagaatgacgggttttttcagtttccaacacaaacatcaaaactttaacgtaaaatggtcgaaactaacactggtgcagagaagtgacggctatctctattgttga

SEQ ID NO: 175 - DNA, 289 bp, unidentified
  misc_feature 1..289: note = Ga0209941_1000055 JGI
  source 1..289: mol_type = other DNA
gtcagcggctgcgatcaagttcaggtacgctgactttcccgaacctagtttcgtcagggaaccagactcaatctgacgtaaagtcagactacgttactcaagaaataggtatcttcagatacctcctcagtctgaagctctacggtattacgttaaacagctttatgggtttaaggcagtgcgtaatgcgtcaaaccttgggataactttgtcgagaggactgtggggtaacgccccactgtcactgaaggcccgtaagggcgttgtaaaggtatttcaccatgacggt

SEQ ID NO: 176 - DNA, 1329 bp, unidentified
  misc_feature 1..1329: note = Ga0208186_100002 JGI
  source 1..1329: mol_type = other DNA
atgcttgtctacgtattagataaagatggaaacccgttgatgccaacacgccgtttaggacgtgttcgtcattggcttaaagatggtgaagcaatcgttgtttcgcatcaaccatttaccattcaatttacaaaaacaactgaacgtcatactcaagacttaaatcttggtattgacgctggttataaacacattggtgtttctgtgctaaacacgtctaaaaatgaagagatctactcagaatctgtcgatcaacgtgcaaacgaggttaaaaagaatattgaccgtcgtatgtatcgtagaactagacgtaataaactacgtcaccgtaaaccccgttttgataatcgtaaacaatttaaaaagtctgaaggctttacgccttcaatttatcacaagttccaagaacatttgaaagcaattggccgtgttaagaaattcttacctgtgtctaacatccatattgaagttgctccatttgataaccaaatgattaaagctaaatttaataacgaagctgttaaacgtcaaaatggcgatatgcaaagacattctgacattaagtcttatatctttgaacgcgacaactacacatgtgcagtctgcaatattaaaaagcaagtgtcacaattacattgtcatcacgtcaaatttaaatccaaaggcggaacgaaccaacctgataatttacttacagtatgtactaactgtcatacacctgacaatcatcaaaagggtcacgtactctatcaaatgatgcaagcaaaacaaaacccattttatcaaggggcgttcttcatgtcagcactcaagattttattagaaaagcaccttacatttcaacaagcctttggttatgaaacctctgctaaacgtattagctttggctggaataaagaccatcacgttgacgcattagtcattgccggcgcaaataatgacaccaaaccatattctgttcatattaaccgtacaaaactacaacgaaataatcgaagtttgtctaagttctatgatgcgaaatggttagactctcgtgaccacaatgtcaaatccggcaaagaattgtctaatggacgcgtaaaccgtaatcacaccaataattctgaaaatgagcacgtttaccgttgtcagaaaattaaaacaggacgtatctctacacgaaaacaacattatcaaattcgaccacatgatattctaaatattggtattgttaaaggtgtacaaaatcttggtaaatacctcaagctaaacagtggaaaagtggtttctactaaaaccgttagagtacttcgtcatgtaaacgggtatctagtagaaactaactaa

SEQ ID NO: 177 - DNA, 326 bp, unidentified
  misc_feature 1..326: note = Ga0208186_100002 JGI
  source 1..326: mol_type = other DNA
gtcaatgactcccgactaaagtcggaagcttgccaaagcacttttaattagaaaagtgtctttacaggcttaattgattagactcggtgaagagaatcttacgattctctgaactccgttagctaagaatacataggcacgtttggatactactcacgtctgaaccactgcgtgttataattaaacatccctaagagtaaggggaagtgttataacaatcaaaccttagcataacattgtcaaagagtacgaacaggaagcaagcttcctgaattatctttaattagatacaaacaacactattagaaaggacatgtcacatgctt

SEQ ID NO: 178 - DNA, 1356 bp, unidentified
  misc_feature 1..1356: note = Ga0315284_10000153 JGI
  source 1..1356: mol_type = other DNA
atgcagaagattaatataaggctaaagaattcaccagagaatacttctctagttctctgctctgagagttcttgtctaaacaaagaagaaattcttagtgataagagcatacagccagtattaatcaatcccgaagagaatcaagtccaacaagtaggacgctcaatacaagcacttgtacttgtcctttcaaaggaaggtaaacctttgatgccttgttcttatgctaagagcaaacgtatggtaaaatcgggtaaggctacagtaattaaaagatttccgtttgttatccagcttaattttagctgtgaagaaaagacacaagagattatttttagtttagatacaggctacgaatatgcaggtgtatcagtaagaacggaaaagagagaaatagtaagaattgaagtaaaattaagaaccgatgtaagtgacaagattgaagaaagagctatgtatcgaagaaatagaagaaacagattatggtacagagaaccaagattcgacaacagaaaaggattcatatttgctccatcagtacagcataagattgattctcatatagggattcttgataagatttctaaatatgttcctgtatcaagagtttgtgtggaatcgggaaagtttgatattcagaaaattttaaatccggaaatatcgggaaaagaatatcaacaaggaattctttatggttatgaaaatgtaaaggcttatgtgacaacaagagaacatggaaaatgccagctatgcggcaaggaatcaagtaaaggtaatggttttagattgcatcatataattccaaaacctaaaggaactgataaacctgataatttagctcttttacatgagaaatgtcatgaaagactacataaaaagaacttgcatcatcttttgacaaaaaataagcaatacaaagatgcaacaatgatgaatataatcaggaaagaagtagtccgaagaacacaggaattgtatccaacagcagtaacttatggatatgaaactaaagtaaaaagaaacgaactaaaccttgaaaaatctcatactaatgatgcttttgtaataggtaacggaacagttcaagaaagatgtaaagaagtaaggtggacacaaaaaagaagaaataatagagccttacagttaaacaggataggttttaagccttccataagaaaacaaaaatacaaggttcaaaataaggatttgatttatatagatggtcaaccattcgtttctaaaggatgtcagaatttaggaacaagagttgcttataatgattatcagggaaagaacagaactgtcagaatagaaaacatagataggttttataattacggaggtttttatgtatga

SEQ ID NO: 179 - DNA, 267 bp, unidentified
  misc_feature 1..267: note = Ga0315284_10000153 JGI
  source 1..267: mol_type = other DNA
gtcaactaccccttggctaaagaccaaggggcttgtacggtgacgtacaacgatgaaaagagttgattagggagcttaggaaactatgcagaagattaatataaggctaaagaattcaccagagaatacttctctagttctctgctctgagagttcttgtctaaacaaagaagaaattcttagtgataagagcatacagccagtattaatcaatcccgaagagaatcaagtccaacaagtaggacgctcaatacaagcacttgtact

SEQ ID NO: 180 - DNA, 573 bp, Nocardiopsis sp.
  source 1..573: mol_type = other DNA
atggctacgttccgcacaggacagaagacccaccaggccgtgcttcctcagcggcctgctctggaaccggagtcggtggacacgccccggatcgggcacgaaacgggactccgacaccaccccagggtggtatccggtgcggaccatgtgcgaggggagaccacccacatcccacctgatgtcggtggcgtcaccacccagcctctggctggggagaggccgcgtgagcggcacccatccgtcttcgtcctggacaagaaccaggtcccccttcagccctgtcacccggccaccgatacaccgctgaacctggcccacgtccatccccgctcccgtagcgggctggaacaacgaccgcccactcatgtcggttcgggtcgtcggaccaggtggaaccggacccgcgaccacctaccgaaaacccacaccctggacgccctggccgtgggcaaggtcgacaccaccacccacggcaccgtccaaggcatcggacacaagtacatgcgtctgctccaaagagcggacggctacggctacacctggaagggagagggcgtttcctcccggctctga

SEQ ID NO: 181 - DNA, 298 bp, Nocardiopsis sp.
  source 1..298: mol_type = other DNA
gtgaagggatcccggccctgttggaccgggctttcagtccttagggttgagagccgtctttaccagcaccagccatcgcctatgaggaggtgacctcgatggctacgttccgcacaggacagaagacccaccaggccgtgcttcctcagcggcctgctctggaaccggagtcggtggacacgccccggatcgggcacgaaacgggactccgacaccaccccagggtggtatccggtgcggaccatgtgcgaggggagaccacccacatcccacctgatgtcggtggcgtcaccaccca

SEQ ID NO: 182 - DNA, 1368 bp, synthetic construct
  source 1..1368: mol_type = other DNA
atgtcaaatagagttttggtgctagacactaaccgcgtaccacttatgccgtgccatccggcacgagcgcgggagttactaaacggtggtaaggctgcggtataccgcagatatccattcacgattatcctgaagaaccgtgaaggaggcgatgtacagcacatcgatatcaaaatagatccaggtacgaagtacaccggcatggcgctggtagcactcttcgatagaggaccacgctgtgtatacggtctgcacatcaaacaccgtggtgacgtggtccgacagtcgatgactcagcgagcagcgtctagacgcacacgtagatctcgtaaattacgttacaggcaacctagatttaataatcgtactcgtccaccagggtgggtaccaccctcgatcgaatcgcgggtgtctaacgtgacgacgtgggttagacgactattcggtgtaacacccgctgacaaggtctacttcgaagtggtcaaattcgacacgaacgccatggcgaacgtaacacgcgatcagtatgacacagacgctcgtatccgtactcagatgcgtcactatttactgacaactcgtggtaatgtatgttcgtactgtaagggagtctccgcagataaccggttagaacgcgaacatgtaatacctcgatctagaggtggtacagatgcactcgccaatgctgaactcgcgtgtagacggtgtaatctagacaaaggaacgatgttattgagcgagtggttgaatgcactaaaaggacgtatagatcctctctcgatggcacggttaaaacatatccctaaatgtattcgtcgtatcagacattcgttacgtgacgccagtatcatgaactggacacgctacatcatcgtggaacgcatacgtgatctagggatcgaggtcgtggagtgtccagcgtgggagaccgcgtaccatcgtcatgtcggacagtacgtgaagacccactgggtcgacgcagcgtgcatagggtacgtaccgtacctggatgatcagtctacgatctacaccgcagtcgcatcaggatatggtaatcgccagatgatcaaatccgacaagtatgggttccctaggggacgtcctaaaggaccctcctcaaataatgggtttcgtagtggagatatgtgtaaactaaaccaacccggtggtaaatataaagggacatatgtgggaaaagtaacgatacgcacaacgggttattttgatataaaggtcctaaactctaaaatcgcttctaaatatacaaactatgtaaagttacatcatcgggatggatatgtgtatactacaggtacaggtatcctgtctataacaatcaaaatgaatttgatcacagtatctatctag

SEQ ID NO: 183 - DNA, 258 bp, synthetic construct
  source 1..258: mol_type = other DNA
gatgttaacgttcaaagttactagtgccctttattagcttataactaaatagtaaccagatctagctaccgtgaggtagctacgttacttaggaatacataggtaccgtgggatggccgtgccagtcccacgctctacgctgtgcagttaaacagacatgtgggtaacgtgtcggtgctgtacagatataaaaccctaggataacatgatcgaggcgcacgttactgtacgatctcgtgtcgtacaaggagataatgt

SEQ ID NO: 184 - DNA, 1290 bp, unidentified
  misc_feature 1..1290: note = Ga0371488_0019773 JGI
  source 1..1290: mol_type = other DNA
atgaacaacgtccccgaccgcgtcttcgtcctctacgacaacaaatcaccggctatgccatgcttccgcggccgcgcatggcacctgctcaaagccggacgcgccgcagtctaccggctcgtgccgtttaccatcatcctcaaagatcgcacctcgggcgacgcacagcctgtcgaacttcgcctcgacccgggctcgaaaacctccggaatcgccgtggtcgctaacgacaccgtcgtcttcgccgccaacctgcaacaccgcggccaggccgtcaaaaaggcgctcgagcagcggcgcgccctccgccgcggccggcgagcacgcaagactcgctaccgagcaccgcgcttcgataaccgcacccgcccggaaaactggctcccgccaagtctgctctcccgcgtcgacaacgtcgtctcgtgggcacgacgactcgcacacctcgcgccactgacctctatcgccgtcgaaaccgtccggttcgatacgcagcagatgcagaacccggaaatctccggcgtcgcgtaccagcaaggcaccctcgccggctacgaaatgcgcgaatacctcctcgaaaaatggaaccgcacctgcgcctactgcggagccaagaacgtcccgctgcaaatcgaacacatccaagcacgcgccaacggcggctccgaccgcgtcgcgaatctcacgctcgcctgcgagccctgcaacgtacgcaagggcacgcacgacgtcgccgtgttcctagcccggaagccgaacgtcctgaagaagttgctcgcacaagcgaaagcgccgctcaaagacgcagcggcggtgaacagcacgcgcaaagaaatcgggcgacgactcgtcgcactcggcttgccgacgagcttctgggccggcgggcgtaccaagatgaaccgcgtcgcacagggctatcacaaagaccactggatcgacgccgcctgcgtgggcgaaaacggcgctcacgtgcggatcgcaacgacgatcgcgcctcttggaatcaaggcactcggccgcggatcgcgactcctatgccgaccggacagatacggattcccgcgactcgccgccaagagcgtcaaacgcatagccggcttccaaacaggcgatctcgtccgactcgctcagccgagcggaaagtacgccggaacgcacatcggcaccgtcgccgtgcgcgcgcgaggcgacttcgacctcagaaccgccggcgcaatcatcaccagcgccggccgaaactttacgctcctccagcgaaccaacggatacgcctatgccgcagcctga

SEQ ID NO: 185 - DNA, 343 bp, unidentified
  misc_feature 1..343: note = Ga0371488_0019773 JGI
  source 1..343: mol_type = other DNA
tccaatacggtcccgtagctcagttgttgattcggcgcttcacggcttccgtgccgtgaagcaaagttgtcaggccacaacgcctagcaacgtcgacaaccagcctcagaaaggataatcatccgatctacgatcttcgagaatgatataggcaccgtcgaatgcttctccagttcgacgccctgcggtgcacgacgacacgagcatggaccgaaacaacaggctcacgtcgcgtacgaaaacctcgacgatcattggcgaggagaccgtcccccgcaaagggggtagcccggcgtaagccggatccgcgaaaagaacccaaatgaacaacgtccccgaccgc

SEQ ID NO: 186 - DNA, 1356 bp, unidentified
  misc_feature 1..1356: note = Ga0302192_10002069 | JGI
  source 1..1356: mol_type = other DNA
gtgctttgtcgagaggagcagacggttcaagccgtctcgttacccaaggagcaatccttggagactaatccggtaacggattcggaaaccaagggcaaggagaaccccaaagttttcgtgatcggtaaaagaaaatctcctctcatgccctgtcatccagccagagcaagagaacttctaaccaaggtcaagggaatcgcaatcctgcgattccccttcgttctacggttaaaaaaccgcaccgctggatccacacaaaccatagaaatcaaactcgacccaggcgctaaagcttctgggttagcactggtcaccaataaagcaataattctcctagtagagatcctgcacagagctcaggaaatcaagaaagccctccttcaaagaaagggttatcgccgtaggcgtagaacctccaaccttcggagcaggccagcacgctggctcaatcaacggagaaaagaaggctggttacctccatcccttcgctccatcatcaacaatctcattaactgggtaaaacgcttcgcacgatgggctcccttaacgggaatcaccattgaacgtatcaaatttgatatccagaaactggagaacccagaaatcagcggagctgaataccaaaagggcactctcctcggctgggaaatctgggaatacttactcgaaaaatttgatcataaatgtgtctattgcaacggagcaagtaacgaccccaagctgacaaaagatcacgtcattgctaccacaaatggcggtagcaatagagtcagcaacctcgtagttgcctgctacacctgcaaccaagaaaagggagacactcccattgaaagctatttggcaggaaatccccagctcctcggcgggatactcagtatcctcaaaaaacccttacaaggagcagccaaaatgaactccatcagaaattctctagttcgtgaaatgaaaactttcggactaccgcttactttaagctcaggagcagaaaccaaatacaatagggagaaacatagaatccctaaatcccacgctctggatgcagccttcaccggaacggtgcagaccgcaaagaactggagacaacctacttttaccatcacagctcaaggccgtggaaaacatcaacgcaccaaacctgacaggtttggattcccgcgtctcctccttccccgtaagaaaatcttttacggattcaaaacaggcaacatcgtccaaaccccattcggggtaggaagaatcgccgtccgatcaactggttactttgccttaaacggcaaagtaaccatcaaacacacacaatgctgcctgctccaaagagcagacggctacaactatacgctctcatctccggcctaa

SEQ ID NO: 187 - DNA, 284 bp, unidentified
  misc_feature 1..284: note = Ga0302192_10002069 | JGI
  source 1..284: mol_type = other DNA
gtcaaccacctctccctaaaggaagaggcttgaccagactaagccactgaaacgtgactacgcacactaacaaaaaacaccaagggatacctaagggacaacgcgaaagcgttgccacctggcctcagtcccttgctctgtcatcttaccccgaaaggggcaaggatgttcttgtgctttgtcgagaggagcagacggttcaagccgtctcgttacccaaggagcaatccttggagactaatccggtaacggattcggaaaccaagggcaaggagaaccccaaa

SEQ ID NO: 188 - DNA, 1236 bp, unidentified
  misc_feature 1..1236: note = Ga0376455_0025877 JGI
  source 1..1236: mol_type = other DNA
atgccttgcacacaaagaaaagcgagaatccttttaagggatggaaaagcaaaaatatataagtatcacccatttactattcagctgacctatgcaacaggagaaacaaaacaggagtgtagcataggggtagatactggtagtagacatatcggtttagctatcacatcagaaaataaagtattcttcaaaggtgaagtagaacttagacaagatgtaaagtctaatctggacacgagaagaatgtatcgtagagatagaagaaaccgtaaaacaagatatcgaaagcctagatttttaaacagaaaacaacaggagaattggttgcctcctagtttacaaaatagaatcaatcatacctatcattggatagatgtattacaaagtctaatacccactccagatttacatattgaggtggggaagtttgacacagcaaaaatgataaacccagatattaatggggtagactaccaacatggtaagacttatggattttacgatgaaagatattatgtatttgcgagggataactatacttgtcaggtatgtaagaaatcggttggtaaaatcttacaaacgcaccatattctttataaaagttgtggtggaacagatagggtagataatcttatcactgtatgtacagattgtcacacatcagcaaaccataaagaagggggcatcctctataaatggatgttacagcataaaaaagtaaatcaatataaagaaccaccttttatgaatatacttcgtagaagaatttttgagaggtattcaaatgcagtgattacttatggttcagagactacaccaaagcgtaaggctatggggttagaaaaaacgcattataatgatgctatcattataagtggaatcaggaatattatggagaacccagatgagtggttgttcatcaaacagtttcgtaagaagaaacgctctttgcatgaagccacagctcgtaaaggaagaaaagtaccgaatcgcaatcagaaacgtaattctaaaaatacacctttttataaagggttttatttgaatgataaagtacgtgtatttgggcgagaggggtatatcacaggttttacaggtggtggtgcttatgtaaaagatgaggatggtaaatatattacgataccaaataagacgtataaacaagtaagtatgagtaagctatcttttttatgccacaataataattggcagtatattagaaagatggctatgtaa

SEQ ID NO: 189 - DNA, 277 bp, unidentified
  misc_feature 1..277: note = Ga0376455_0025877 JGI
  source 1..277: mol_type = other DNA
gtcaacaacccaccacttgaagaagtgggggcttgcaaaaagccatgttgactagcctaagtttttttagaaactacgttgtagatgttatcataccctagaatgatttcctagttctaggctctatgtaggctctgtaaaagttctgttgggtaggaacggtcaacctagagtggtcgattacgacaagcatttataacattggcgaagggaaacaaactttctttatagaaaggtgtggaacttgagagtatccacaaaggtaaaaattatgaga

SEQ ID NO: 190 - DNA, 1167 bp, unidentified
  misc_feature 1..1167: note = GENOME_ACESSION: mgm4743569.3 MG-RAST
  variation 4..39: note = n represents any nucleotide
  variation 456..538: note = n represents any nucleotide
  variation 791..882: note = n represents any nucleotide
  source 1..1167: mol_type = other DNA
atgnnnnnnnnnnnnnnnnnnnnnnnnnnnnnnnnnnnnaagaagcacgaattattatcagcagaagcagaactgcgcaccgacatttccaacaacatcacacagcgcaggacactgcgccattcacgcaggaacaggaagacgagataccgcaagccgagattccagaaccgtgtccacgcaaagaataaaggatggctcgcaccttccgtacaggcaaagtgcgacgcacatgtggataccgtgaaaaaggcgattgatatccttccggtatcagagatcacgattgagatggcacctttcgatacacagatgctgaaagccgagatggcaggccagccgcttccatccggtgaaaactaccagcacggagaatcagaaggttatgacaacatcaaggcttacgtgaaatggcgcgacggttatgaatgccgcatctgcggggccgagcatgtnnnnnnnnnnnnnnnnnnnnnnnnnnnnnnnnnnnnnnnnnnnnnnnnnnnnnnnnnnnnnnnnnnnnnnnnnnnnnnnnnnntgatcaccgtctgcccggactgccacaaagcgtatcatgaaggcaggctgcatgggaaaaacgcggaactgatggaacccggaccggaagtaaagccaatgcgtgatgccgtattcatggggatcatgcgctgggcggtatggaacaggctgaaacagttcggccttccgctacatatgaccttcggctatatcacagcgaaacagcgcgagaagtacgggcttgaaaagtcacatcgtaacgacgccagatnnnnnnnnnnnnnnnnnnnnnnnnnnnnnnnnnnnnnnnnnnnnnnnnnnnnnnnnnnnnnnnnnnnnnnnnnnnnnnnnnnnnnnnnnnnntacgtgaagaaagtacgctgccataacaggcaaatccacaagctgacgatccagcctggaggggagagaaaacggaatcagtgcgcatacgaggtaaaaggattccgcctgtttgacgaggtacgctttgccggacaggaatgttttatcttcggcagacggacgacaggatattttgacctgcggaaagcggatggcacaaaagtctatccctgtgccagctataagaaactggagctgattcacaaagcttcgtatgtattagtagaaaggaggtccgcctaa

SEQ ID NO: 191 - DNA, 329 bp, unidentified
  misc_feature 1..329: note = GENOME_ACESSION: mgm4743569.3 MG-RAST
  source 1..329: mol_type = other DNA
gtcaataacccgcggtcaaaaccgcaggcttgaaaaagcttattgactagcctaagcgcagcgacggcctcatgccagagagtctaaccgctagtgctccgttaattcagttatcacaccccggggtgttatacctggctccgcggctctgtgcaggctctgtaaacagtcctgagagggtaagggacagtcaacctggtccgtgcgcttggcgcacaagctgttttaacattggcgaaggtatccaactggccggaacattcagtacacaaggaacaatgcgaagggtaagtattaccggatttggttccggagaaaggcaactgatg

SEQ ID NO: 192 - DNA, 1359 bp, unidentified
  misc_feature 1..1359: note = Ga0265294_10008100 JGI
  source 1..1359: mol_type = other DNA
atgccgacaaatccggcaaatgccagaattttgctcaagcagggcaaggcaaaggtgattcaaagaacaccctttgcaattcacttgctttatgagaccaccgagcatattcagccgataaccgttgggcttgatgacggagggatcaatatcgggattgcagcggtttcaaacggcaaggttttatttcaacaggaagttgttttacgttcggacgtcaagtcaaaactggatacccggaggcaataccgtaaatccagaagaaaccgcaaaacaaggtatcgaaagtcaagatttctgaacagaaagtcatccattcccacatgcaaggtgtgtggcgggaatgccccggcatctcaggtgatctgtcgatcctgtctgaacagagcggatggggttcatcagaaatatgcgaagatcaaaaaaagtgttttccgaatcccaccatcaatcaaggcaaaaaaagatgcgattatccgggtggtcaagcagatcccactgcccatttcccgaattgtgctggaagatctctatttcgatttccaggcaatggagaatccggacatttccggtgagcagtatcagcatggagatctgctttatcacaagaatttcaaacagtcgtgcctggtgcgtgacaagttcagatgccgtgtttgcggtgcgcaaacaaaactgcaatgccatcatatccgtcaaagggcaaagggcgggacagacaagctctcaaatctgatgacgctttgtgatctctgccatgatcgacatcataaagaagggctcaaacttccgaaacaaaagagttccttctacatgtcggcagcacatgtccagcaggggaagcactatctgcaagctaagttgtcacgaatcgcgccattacggacgacattcgggtatatcaccagtcattttcggaacaatgccgggatagaaaaatcccatgtcaatgatgctgttatcattgcagataaacaggcaactcctctggaccggcagatacagacaaaacatgtgcagtcacggaaaagaagtttgcatgaagcaattgcaagaaaaggaaggaaaaccccgaaccgaacccagaaacggaataacaaaaacgtatttaccctgagaggttttaaccggtgggatacagtgcagtacaagggacgtgtcggttttatctccggttttacaggcagttcatcctgccggatcatcgatattcatggggaatatatcaaaaatccggaaaaaaaatatacgcaggtcaacctgcgggaagtgagaaaaatacatgggaacagatcaaccgtcagttactgcgccaattcctcccccaccttcgctgtcgctcaggaaggggactccttg

SEQ ID NO: 193 - DNA, 263 bp, unidentified
  misc_feature 1..263: note = Ga0265294_10008100 JGI
  source 1..263: mol_type = other DNA
gtcaactacccctcctgaatcaaagattcagaaggggcttgtaaaagcccaagttgactagcctcagtctctttattagggactacgttcggcaggatgtagatacctttggatgtaatcgccagtccgaagctctgtcgtggctctgtaaaagctctgtgaggaaggagcggtcaaccacgttgtgaagcctgctgaacattggcgaggcgaaccttacccctctttggagggtgtgcataactgaaaggttttttttgaaa

SEQ ID NO: 194 - DNA, 1020 bp, unidentified
  misc_feature 1..1020: note = Ga0104756_1007894 JGI
  source 1..1020: mol_type = other DNA
atggttccagtagtcaataaaaatgggcagcctttgatgccaacgactccggcgagagccaagagatggttggcatccaaaaaggctacctatttttggaagaaaggagttttctgtgttcggttgaacgatgatccatcgagtacttttacccaacagatcgcttgtggcgtcgatcccggctcgaaatgggaagggatgaccttgaaatccagggctcatactattctcaatacacagaacgacgctactacttgggtcaaagatgccgtcgaaattagaagaaatatgcgtcgaagccgacgttttcgaaagactccttgtcgaaagaataggagtaatcgcagtagcctaagtaagaagggaagactaccgccttctacccgagccagatgggaaactaagttacgtttaatccatagctggcgaaaggtcttcccgataagtgactatgtagtcgaagatatcgctgcggctacccaaccaagaaaacgacgttggaattcatcttttagcccgttagaagttggaaagaactggttctatgatgaacttcggaaactcggtaatttagttaccaaagctggctgggaaactaagaatctgcgggatgctttgggattagtaaaatctaagaataatccagatgcgtttgaagctcactgtgtcgattcttgggttttagctaattctgttgtcggaggacaccaagctcccgagaataaaaaaatcttattcctcagccctcttcgattccatcgtcggcaattacatcgcttccagccgactaaggaagtcggtcgattagcctacggtggaacgatgagcttaggattgaaaaaaggcagtttagtagaacatcctacttacggtcgatgctacattggtggtaataccaaaggacgtttaagtctgcattctctggaaaccggtggacgcttaacccagacagctaaggttgaagagtgtcaattccttagctataatagctggcgttggcgggtttcctcctccccctaa

SEQ ID NO: 195 - DNA, 296 bp, unidentified
  misc_feature 1..296: note = Ga0104756_1007894 jgi
  source 1..296: mol_type = other DNA
gtcaactacccccacctaaaggtgggggcttgtgaccaacgcagaacgttgccactttgcaaaggtcacgaggtattctctggtaacagagggtatcaggagactagcctggccaagatcaaaggtcgaaagatcgatggtcgtttgaaggcaattgaaccatctaaccgtggcaggttggaatatgctggcgatgcttcccaagttgctagcctctatgatggtcaatggcgaagggaaaaattaacctcagtttcattgaaagctgaggacttacccgcaagggtgcgttgaag

SEQ ID NO: 196 - DNA, 393 bp, unidentified
  misc_feature 1..393: note = Ga0394872_0157437 JGI
  source 1..393: mol_type = other DNA
atgtccaaaatctttgtaattgatacaaacaaacaaccattaaaccccatccacccagcacaagcgaggcaactattaagaaacaaaaaagcagccgtctttagacgttttccttttactttgattcttaaagaatcaaccccagattcatctatatctcctctgagattgaaaattgaccctggtgcaaagttcactggaatcgccttagtcaacgattctactggcgaggttgtcttttctgggaaaaaagttgggacatatattgggcgtgtagctgtaagatcttcaggaagctttaatgtttcaactaagaatggactggttcagggaatcagtcacaaatattgtactcatattcaccaaaaggatggttattcctatgtgtattag

SEQ ID NO: 197 - DNA, 244 bp, unidentified
  misc_feature 1..244: note = Ga0394872_0157437 JGI
  source 1..244: mol_type = other DNA
atcaacaacccaccgataaatcgggggcttgaaagagcctaagttgaccagactaagacctcaaaggtctacgtttaaggtaagagttaaagacctaccagggaatgcgtagctagttccttgctctagaaccaaaagattaaacaggcttaaagggttaaaccagtgtcttttggatagttaccgaccttaaacattgtcgaagctaacattacccaagcaattggagggacttatgtccaaa

SEQ ID NO: 198 - DNA, 1302 bp, unidentified
  misc_feature 1..1302: note = Ga0376456_0000023 JGI
  source 1..1302: mol_type = other DNA
atgcgagtatttgtagtaagccaaagaaataaacctctgatgccatgtacacagagaaaggcaaggttattattaaaggaaggcaaagccaagatatataaatacaatccatttaccatcaaattaaaatatgcaaccggtgaatcactgcagccttgtcatattggaattgataccgggtttaaacatattggacttgcagtaaccagtaatgataaagttcttttcaaagggaaagtcgaattaagagaatatggagaacctcagaaagatgcaaacggtcataatgcttttatgacatgtgttggaaaaagaaaaatgatgaggcgaagtagacgtaatagaaaaacacgttacagggcacctcgttttcgtaatagaaaaaagccggatggttggctgccaccgacaacgcaggcaaagcttaattctaatttcaaatggatagatttattagctgagcttgtacctaatcctattcttcacatagaaatagctaagtttgatgtacagaagatgatggatccagatattgaaggtgtcggttatcagaacggacagactaaaggcttttgggatgtacgatattttgtgtttgcaagagataattatacatgccaggtttgtgaaggaaagtctaaggacagtattttaaggactcaccatatcgtgtataaaagcatgggtggaacggacagagctgataacttaattactatttgtaactcttgtcataccggtaagaattataagccaggtggaatcctttacgattggtgtcaaaatgaattcaaaataaatacatataaggaaccaccttttatgaatataatcagcagcagaataagaaacagatatccggctgcttatatgacttatggatcagtaaccaggtctaaacgtacagagttaaaacttgaaaaaacgcattacaatgatgctatagcaataagtggtattgaagatattaaagaaaatcctaatgatctgttttatgtaaagcagattagaaagaaaagccgacagttgcattatatgcagccatataaaggacataatccaaatcagacaagacgtagtgctaatatactaaatgtaaaaggtatatataaaggtgataaagttcaatatagaaataaatatggatatgtaaccggatttacgcactcaagtgcatatgtaaatgataaaaatggaaggctgcctattccggaaaataaaactcaaggtgtaatatcaataagtaagcttaaattagtatgtcataacgcaaactggatgtacttcacaaccactgtataa

SEQ ID NO: 199 - DNA, 342 bp, unidentified
  misc_feature 1..342: note = Ga0376456_0000023 JGI
  source 1..342: mol_type = other DNA
acctcaaatgtgaacacctacaaaaatgtgtgtacctcattctagcctaagtcttaactgactacgttaattatgttatcacacctacggatggttccctagtccgtagcatctgtgcaggctctgtaaaagcttcacgagtcttagattggaagcagtcaacctggagtgtccgatatcggcaagcatttttaacattggcgaagggaaaatgccttatggcatgacaactaactacagatgattctgtagttaggtatggcacttgagagtagccataaaacattaaagggtatgttacagtacccttttactttttagaaaggagcttttaggatgcga

SEQ ID NO: 200 - DNA, 1338 bp, unidentified
  misc_feature 1..1338: note = Ga0370511_0001040 JGI
  source 1..1338: mol_type = other DNA
atgcaaagagtattagtacttagtaataacaggaatcaacttatgccgtgctcttcagcgagagcgcggatgctgttgcggaacaagaaggccgcggtcttacggaagtatcccttcacgatcatcctcaaggaccgagaggaaggcgctatacagtctatcgagttcaaagcagatcccggcagcaaagtcacaggcatcgctctcgttgccgatttcgcaacgagaggtaagacagtagtctttgccactgagcttcatcacagagggcatgcgatcaaagagtctctggattccagatgtgcggtccgcagaagccgcagaaacaggaagacaaggtatcgtgctccacggtttgataaccgaacaagaccctccggatggctgccgccatctctaatgtcccgagcctacaacgttcagaccttagcactgagacttcagcggttttctcccctttcttctattgcggtcgagaccgtccgtttcgacatgcagaagatgaccaaccccgagatatccggcatcgagtatcagcagggcacactccaaggctacgaagtcagagagtatctgcttgagacgtggaacagacaatgtgcttactgtggcaagagggatattcctttgcagattgagcacattgttccgcgcagccgaggtggaactgaccgggtgtcaaacctcacattatcgtgtgagacatgcaacacgaagaagggaacgaagactgccgccgagttcgggttccccgatatccagaagcaggcattgcgaccgcttaaggatgctgcagcagtcaacgcgactcgttatgccattggggatacgctcaagactcttggactgccagtatcgttctggtccggtggacggacaaagttcaatcgcacccagcaaggctatccgaagtctcattggatcgacgcggcctgcgtcggagaatctggctccaatgtccatctcgatcctaatatgttactgcttacagttaaagcttgcggtcatggatccaggcaaatgtgccgaatggacaagttcgggttccctcgtacttcagccaaagcgtctcgtgtcgtccaaggtttccgaaccggagatattgtaaagacgattattccgtctggcaagaaagtgggcaaccatttcggtaaagtcgctattcgcacttcggggagctttaatatttcaactagcgccggcgttgttcagggcatcagtcacaaatactgctcagtagtgcatgctgctgacggatattcgtatccccggccaataaagggaggctctcctctcagcaataaattaccgcgtatccgcgcccaggaggtgttatga

SEQ ID NO: 201 - DNA, 267 bp, unidentified
  misc_feature 1..267: note = Ga0370511_0001040 JGI
  source 1..267: mol_type = other DNA
gtcaacgactcgggattaagatcccgagcatgcgaagtcatgcatgctcaagttggccaggctcagtcctaatgtttaggactacgttaccggcgaatacataggcaccttgggatgcacgccagtcccaggctctgcggcagacagttaaacaggtctaagagttaagccagtattgtttgcatataaaaccgtcggataacattgccgaggcacacattacccgcgcaagcggagaacgatggagtaatcgtcaatatgcaaaga

SEQ ID NO: 202 - DNA, 1296 bp, unidentified
  misc_feature 1..1296: note = JGI25616J43925_10003507 JGI
  source 1..1296: mol_type = other DNA
atgtcgcgtgtgttcgtcgtggacgcgaagctgcgaccacttcagccttgcacgcctgctcgtgcgcgtctgctgctcaagcagcagaaggcagcggtcctgcgtcatactccctttatgctgatcttacaggaaacgcgaactgaggcagtcattgagccgttgcgtctcaaaatcgatccgggctccaaggtgacgggactggcactggtggacgatcagcgcggcgaactggtctgggcagcagaactgacccaccgcagcgagcagattcgggagcgactgcgcaaacgcagggccgtacgccgtgcccgacgcatgcggcacacccgctatcgacctgctcgctgggccaatcgacgacgaccgcgaggttggctggctccgtcgttgctcagccgtgtgcttcaggtgatgacctgggtccagcgactgaaacgctggtgtcccattggggcgatcagccaggaactggttcactttgatccacaggcattgcaagatccagaaatccacggtagtgcctatcagcgcggaccctttttcgggatggaggtccgtgaatatatcctggcaaaatggcagtatcggtgtgcatattgccagcgcgaacaggttccctttgaactggatcatatgctcccgaaaagtcgtgggggcagtgagcgtgtgagtaatctcgtgctcagttgccatgactgtaaccagaccaaagcagaccgaacagccgaagaatttggacatccagaggtcgcagcacaggcgcaaacgcctctcacggatgtggcagcggtcaatagtacgcggtggcgactctatcaggacctgtgtgccaccgggttgccagtcgaaacaggcagcggtggacggaccaaatggaacagacaacggcaaggactgccaaaaacccattggctggatgcagcggcggtgggagcctcgacgccagtacgattgcgggtaggccatctacgcagtctatcgatccgggcaaccgggtggcaacgaaggcagatgtgcctcatgactgaggcgggttttccacgaacccgtgcgaaacagcagagttgtgtcaagggcttcagaacgggagatacggtgcgagccgtggtcccgaaagggaagagagccggagtccatgtgggacgagtcgcagtgcgtgcgtcaggatatttcaatataaggacgcagagcggaaccgtcgaggggattcacgcgaagtattgccgcctgctccatcgcagagatggatacgagtatgggaaaggagatgcggcgtttcctcctgccccgtaa

SEQ ID NO: 203 - DNA, 300 bp, unidentified
  misc_feature 1..300: note = JGI25616J43925_10003507
  source 1..300: mol_type = other DNA
gtcaggcacccaagccccctaaaagggggcgggcttgtacccctgcctgaccagtcccctgggtgcttgcattcaggagccgttcacacggagcgctcaaagacgcacctgtggctgaccgatccaggccacagccctgctagttggcggttaaacatgcctggtggacaaagcacgtgccgcaaacacatgccgcgtgtgaacacggacgaggatcactttacctgtctgggcgaccgggcagcgatccctcattagcgagggccccttccggggaaaggaggcttacgtatgtcgcgt

SEQ ID NO: 204 - DNA, 1314 bp, unidentified
  misc_feature 1..1314: note = Ga0315295_10008866 JGI
  source 1..1314: mol_type = other DNA
ttgagagcgtttgttttagatatgcacaaaaaccccttgatgccttgtcatcaagcgagagcgcgaaaacttctcaagagtaaaaaagctaaagttttcagaatgtttccattcactatcattttgcaacaagaaacgactaatcaagttcaaaaagtagaaatcaaaatcgatccaggctcaaaaaccacaggagtcgctttagtttctaatcaaaaagtaatttgggcttgcaacctttcacatcgaggctcgctcatcaaaaaagcattactacaacgcagacaagtcagacgcagcagacgatttagaaagaccagatatagacaagcacgtttcctcaatcgcaaaagaatttccgaatggcttccaccatctttgatgtcgagagttgacaacgtttcgacctgggttcaaaaactaaattcactcgtcagattgacatcagcttgtatcgagacagttagatttgatacgcaaaagatgcagaaccctgaaatttcaggtatcgaatatcagcaaggtgagcttgttggatacgaagttagagaatacttgttagaaaagttcaatcgaaagtgtgtatactgtggcgcagagaacattcctttagaaatcgagcatcttcatcctcgaagcttgggcggttctgataaaattagtaatttagctttagcttgtcacaaatgtaatcaaaaaaagagcaatacacctttagaattgtttgttaaagacaagactaatctggcgaaaatcaaagctactgcaaaagctccactcgctgataccgctgccgtaaatgcaacaagatatgcaatcggcagagctgtaaaagaaatcattcttgatacctcgttttggtcaggtggtagaacgaaatgtaatcgaacaaaacaaaactaccaaaaagatcattggattgatgccgcgtgtgttggaacgactggtgaaaatatctggctcgatccaaacgataacattttgttagttcaagctgctggacggggcaaccgtcaaaaatgtttagtaaataagttcggattcccttgctcaaaaccgcgaacaatcaaacgagtttttgatttttctagtggtgatatctgccgtctcgataaatcgaagggcaaagatgccgggcggtatgtaggaaaaatttcggttcgtgtccgtggtgattttgacattcaagtgccaaaagaaaaaaacaagactgggaaagttggagcgaattggcaattcttcaagttagtgcagcgggctgatgggttcgcctatcaaatggcgggtacaaccgccagggctgcaacaacttag

SEQ ID NO: 205 - DNA, 279 bp, unidentified
  misc_feature 1..279: note = Ga0315295_10008866 JGI
  source 1..279: mol_type = other DNA
acgaacttcctttgacttccctgtcaaagagtttcgcccgttgtgaccccagggacagccagactcaggcgaaagcctacgttagaggcgaatgtataggcacttcgaggtgcttctccagtctcgaaccctgcggctagtgattaaacagcaaaactccgggtgatgcagtgttgctagagagaaaccgcctcataacattgtcgaggagacctttaccagcgaaagctgagttcgctagcgtaagctagcacaaaagcgaggtgacaagctttgaga

SEQ ID NO: 206 - DNA, 693 bp, unidentified
  misc_feature 1..693: note = Ga0256845_1000645 JGI
  source 1..693: mol_type = other DNA
atggtttttgtattaagcaaaaacagaacacctttagcccccacccgtgaggctaaagctagaattttattaaaagagggaaaggctgttgttcataaagtctatccttttactatacgactaaaggagaacagagagtgcattaaaagatatataattaaatttgatgttggagcatcagtcacaagtgtagctattgtagatgctctgaaatgttttttcttcgctgaaatagtgcatcgaggaaaagtcattaaaaaagcaatggattcaagaagagcaattagaacttatactctaaaagagttaaatctacccaaacaacactattatgacgctatgtgtattggagataagtataaatataaaatagtaacaaataaggttttagaggtaaaggcacaaggaagaggagatagacaaatgtgtcgaatggatagatttggatttcctagaacaaaagctaaaggctctaaagtagtaaaaggtttccaaacaggtgatattgtaaaagcagtagttaccaaaggaaaaaagataggaacttatcttggaaaagtggctgttagagttagtggtaattttaatattactacaactttagggactatacaaggtattaattttaaatattgtaaaactatacaaaaaggagacggctatgcttatgcagtggcaacaatcaaacaataa

SEQ ID NO: 207 - DNA, 273 bp, unidentified
  misc_feature 1..273: note = Ga0256845_1000645 JGI
  source 1..273: mol_type = other DNA
gtcaataacctaccacaatccttgacggatatggaggaggcttgattgaccagattgagttgctagagatagctaactacgatatttttgttatcacaccttggggtgcttctccagctccaagctctgtgtaggctctttaagttgggttaaagccctgtgaacctaaggacgatttgccattgcaaacaagcatctatatcactatcgaggagagagtcgcaagaccgtcaccaccataaggtgcgttaatttgaaaaaggattgtaaatg

SEQ ID NO: 208 - DNA, 2412 bp, synthetic construct
  source 1..2412: mol_type = other DNA
ctgggcgaaggattacaaccgggcgcaagcccgaggagacaaaacttgagagtatttgttttgaacaaacgagggcaaccgctcatgccgtgttcaccggcgaaggcgcggttgcttctgaaggagaaaaaagcggtggtcaagcgccgtacacctttcacgattcaactcacgcaggccacgggcgaaacccgtcagccggtgacgttgggcgtggatgctggggcgaaattcatcggcctttcggcttcaacggacaaggccgagcactatgcttcggaggtcgaactgcgtaaggacgtggtggacttattgtcagcgcgtcgggagctgcgttgtgctcgccgccaccgcaagacgcgctaccgcgctccccgattcgataaccgtgtccattccaagaacaaaggctggttcgccccgagcgttgagaacaaaatcaacgcccacctgtctcgtgtagcggctgtctggaagattcttccggtgacgaagatcgtcgtggaaacggcggccttcgacatccagaagatcaagaacccgggcattgaatgcacggagtaccaacagggcgaccagctcggcttctggaacgtccgagaatacgtcctcttccgcgacggccataaatgctgccactgccacggcaaatccaaagatccgattctcaacgtccaccacctcgaaagccgtaaaacgggtggaaacgcgccgaacaacttgatcacgctttgcgagacgtgccataaggcgtaccacgcaggaaagatcgttctcaagcagaagcgtggacagtccttccgagacgccgccttcatgggaattatgcggtggacgttcttcaatcgcctgaaggcacagtgtccggaactcgaagtccggaacacctacggctacctgacgaagaacacgcgcattcggcacggattggaaaagtcccatcatacggacgccttctgcattgccggcaacttcgaagcaaagcgattgggtgagtacttcttccagaagcagacccgcaagcacaatcggcagattcacaagatgtcccttcttaagggcggcgtccggaaacggcagcaggctccctacgaggtgaaggggtttcggttgttcgacaaggtgcgtttcaacggtcaagaggctttcgttttcggtcgccgcagttctggttcgtttgatgtccggacactggcgggacagaaactctctgccgaggttaactgtaaaaaacttcggctgttggaaaagcgacggactttcttaacgcaacttttaaaggagaacgcgattcctatgaaagaacttcgatttgacgtcaccggcatgagttgcgccgcgtgttcggcccgcgtggaaaaagcggcccgcagcacggacggtgtgacggacgccgcggtgaatcttttgaaaaatacgttggtctgccgtttggcggattcggcggatgcggcaagcgtgacggcggcggtgtccgaagccgttgaaaaagcgggctacggggctcgtccggcgggaaagaccgaggacgcccaaaaagcaacggtcgcaaaaaatgaggcgcagaaagcggcggacgccgaggccgcggcgttaaaaaagcggctttgtctttccgtcgtgttctgtctgattctcttcgggctcgcgatggggccgatgatcggggtgacggtgccgggacttgatcccatgaagaaccccgcggggatggggctcgcgcaattcattctcgcgctccccgtggcgtttttaaaccgcaaattttttgtgaacggcgcaaagggcctcttaaaccgctcacccaacatggatacgttggtggcgatcggttccggggcgtcgctttgcttcgggatctttgcgcttttccggatgattgcggaagtgacggcggggaatcttgcggcggcgcagcactacgcgatgaatctttattttgattcgtcggcgatgattctcaccttgatcaccgtggggaaattttttgaggcccgcgcaaagggcaagaccacgcaggccatttcaagcctcatgaaattggtgcccgaccgagccgtgcgcttgacttcggacggtcgcgaagaaattgtggtggcaaccgacctgcgggttggcgacaaactcgtcctcaaaaccggggagcgcattgccgtcgacggcgtgattctcgaaggcgcgggaacggcggacgaatcggcgatgacgggggaaagcctgccggtcacgaaaaaggtcggtgaccgggtgtcgggcgcgacgctcgtgacgtccgggcgctttgtgatgcgggcggataaagtcggcgaagacacggccttgtcgcagatcatccgtttggtggatgaagcgacgtcgggaaaagcccctgtgtcgaggttagcggacaaagtgagtgccgtcttcgtgccg

SEQ ID NO: 209 - DNA, 246 bp, synthetic construct
  source 1..246: mol_type = other DNA
gtcaaccacccctgcctgaaggcagaggcttgtgaaagcaagccttgattgactagccccagtgaggaaacgaactacgttggttgggaatgtataggcaccgcgggatgtcaatcctagttccgcgctctgcggcccgtgattaaaagcactgagaggtaggtgcggtgttgcgggtaagaaaccccttccaacctgggcgaaggattacaaccgggcgcaagcccgaggagacaaaacttgaga

SEQ ID NO: 210 - DNA, 915 bp, unidentified
  source 1..915: mol_type = other DNA; note = Chloroflexi bacterium
atgtcacatgtctttgtcatcgataccgacaaacagccgctttctcccgtgcatctggggcgagcacgcctgctactcaaagagggaaaggctactgtttacacgcttttcggttttgaggtgcgtgaatatgtattcgcaaagtggaaccgcatgtgtgcctactgtggagccagggacctgcccttagagctggagcatatcgtgccacgcgcacgcggtggcacggatcgcatcagtaatttgtgcctagcctgcgagtcctgcaatagacgcaagggaacgcaggatattagcgacttcttggccgatcagcccgcacggctctgccgtgtactagctcagacgaaagcgcctctcaaaaatgccacagcggtcaacgcaacccgttgggaactatcgcggcgcttgcaggccactgggctacccctggaaacgggttcaggtggacagaccaattataaccgcagtgtgcgtggcttgccaaaagcccactggacagatgcggcctgcgtgggagcatcaacccctacgcctctttccactgagggggtaatcccattgctcatcacggccactggtcacagtagacgaaaaatgtgcaataccaacgatttaggcttcccgaccagtcatcgcaagaggtgcaagcgctactttagctaccagactgccgatctggtgcgagcggtggtgccagatcgactcaagtgcgcggggacgcatgtaggcagggtgacagttaaagctgcgagaacctttaccatccaaacccggcatggcaaaatcactgatgtcccacaccgcttttgtcagcccgtccatcgctgcgatggatattcttattctcaagtggtgagggttgccccacccccaaccaacccgaaaggagcgcctgtttcctcctccgcctag

SEQ ID NO: 211 - DNA, 307 bp, unidentified
  source 1..307: mol_type = other DNA; note = Chloroflexi bacterium
gtcaagtccccccactgtgacgtgtcacagtggaggcttggaagcaagactttcaagcccgaaacttgagcagacagaggtttgaaagacaaccaacgttatcagcaagtgtaaaagaacctacctacagctgcttcaccagcttgtaaacctagaaccgttcagttaaaccggcgtagagggagaaaccagtgctgagcggaaagtagcgactgataaccgtgtcgaggtgagtatcacctgggaaaccagaggccccacggggcacaaaacaaaaagaaggaacgcaacgaccgtcatgtcacat

SEQ ID NO: 212 - DNA, 1041 bp, unidentified
  misc_feature 1..1041: note = Ga0376455_0000343 JGI
  source 1..1041: mol_type = other DNA
atggtcattacattagacaaacacaaaaagcctgttggattttgtacggaacgccgtgctagaatcctgatgggtaagcggagagcgtgtttgtatcgtcgatttcctgctatcatcatcctcaaagacgttgatgtgcgggacttagagaatctgcacagctaccgcatcaaaattgaccccggctctaagtacaccggcattgcgattgtagacaacacagacaatagtgttgtgtttaccatgcagattgagcatcgtgctactacaatcgtaaagtcattaaaaacacgcaatgccgtacgtagaaaccgcagaaatcgggaaacccgttatcgccgttgcaagtggattaaccactacacgaaaaagggtagccgctacaaagcagattcgccccgccctgatggttggttgcctccgtctgtcaagtccattggtgacaatatcatcaactgggtcaagcggttgtgcaaatggattaacattacagagtgcagtttcgaggcagtgcgtttcgacactcagttgatggacaaccccgatattgagggtgtggaatatcagcacggaactctgtacggttacgaaatccgtgagtatctgctggacaagtacaagcatacttgccagtattgcaacggcgaatccaaagatgatgttctggaatgggagcataaacttcccaaatccagaggcggcagtgattcggtcaagaacgctacccttgcctgtcacaagtgcaaccaggacaaggggagtatgacccccgctgagtggttggaagttgtcaagaaacagcgttcttccaaactgcgtgatgctcgtattcagggaatccagcgtgtcattgataacaaaacaactggtagcaatcggtattgtgcgtgggtgtctgcaactcgtagatacatcgagcgatttctgtttgatgcgtttggcgatgtcgaatgttccagcggcggtagaaccaaatacaaccgcacgaagctgggacttcccaaagaccatcactacgatgctctgtgtgtcggtacagtg

SEQ ID NO: 213 - DNA, 308 bp, unidentified
  misc_feature 1..308: note = SL_8KL_010_SEDDRAFT_10003558 JGI
  source 1..308: mol_type = other DNA
gtcaacaactcggctattgaataaccgagcatgaggacggggaatatccctttaaaactcatgtgaggttgtttgatagatttgttgagcagactaaggtctctcgaatgagagaactacgttatttgagtggcggactaggtgtgcttctccagcaccagtatccgaggctggcagtctaaacaggcaatccgagatgaaatagccagtgctgtcagcgtgaaacctcagataacattgtcgaggggacgtggctttttgccacacaataagcccgtaattgggatttaattaaggagcaacttatg

SEQ ID NO: 214 - DNA, 1359 bp, unidentified
  source 1..1359: mol_type = other DNA; note = Leptolyngbyaceae cyanobacterium CCMR0082
atgtctaactatgtttttgtaattgaccaagacaaacaacccctcaaccctgtgcccccaggtctgggccgaaagatgcagaccgaccagaaagcggcaacattcaaaaagtatccgtacacgctgatacttaatcattctgttgtcgcgccaaggctaaaggggctaaccctcaagctcgatcctggttccaagtttttggggctctctatcttggatggcaacaaagtgatttgggccgccgaactagaacatcggggatggggcatccatgaaggacttgagaaacgttccggctatcgtcggaatagacgctcacgtaagactggctaccgaaagaaccggggacagtttgagtttaagcctgatggatggctccccccatcactgcttcaccgggttcaaaccacaatgacttgggtgaatcgactgcgcaagcttgcccccattgagtttgtcaagatggagctagtcaagtttgacactcagttgatggacaatgccgacattgaaggcacccagtaccagcaagggacattagccggatataccgccagggaatacctacttgaaaaatgggggcggcagtgcgcttattgcagcaagtcaggcgttcctctgcaggttgagcatgttcaccccaagtcgaaagggggatctaactcaatccgtaacttgtgccttgcctgtgagaaatgcaacacccgcaagggtagtaagtctgttgaggagttcttaaagaacaaacctgaggctcttaaaaggattcaggccacactcaagccccctctgaaggatgccgccgctgttaatgcgacccgttgggcgctttaccatgccctgcaagacacagggcttccagtgagcaccgcaacgggagcgcggaccaaaatgaaccgggctaaacaggggctacctaaggagcattggatcgatgcggcgtgtgttggtgatgggggagaaaacctcgatatcaagaccgctcaaccgctgagaattcaagcaaaggggcacggtagccgccaaatgtgtaaggtgtacggcaccaaaaagaacggtgaaccgatccgaggactgccctacccaactgctcccggcatgcctaagcgcagaaaggacggcacccgagaggcccccaagtttcgcctgcatggttctgttgagtcaggcgacattattgatgtccaaatccctaacggcaagtacaagggcatttacaagggagtcagagtggctgtcaggggtgacggtcggatagccataagacccaagggctttagctctaagttcgatctgaccaccgcatctatctacaaagttgttcaaaggaaagatggctatgcttactcggttcaatga

SEQ ID NO: 215 - DNA, 292 bp, unidentified
  source 1..292: mol_type = other DNA; note = Leptolyngbyaceae cyanobacterium CCMR0082
tctgactgctcgaccctatcgggcgagatgagaaagccgttagcttaccagctcaccgggttattggttttcccggtaaaggataggacacccgcaagggttgaaaaacgccaacaccttctctaatgcgagacgctaaccagtcgagagccagttgtgtagagggttgcccaaagctaagcgaggtcacggggttgactacagtgcgagggcagagcgaatgctcaaaagctgcttatccgagcgaggctcacattacccgatttatcggaggactcttatgtctaactat

SEQ ID NO: 216 - DNA, 447 bp, Scytonema sp.
  source 1..447: mol_type = other DNA
cgctcaagaaaaactagatatcgtcaaccacgcttttctaatcgtagccgtaggcaaggttggctagctccttctctacttcaccgctttcttagtatagaaacttgggtcaaaagactttgcaaatattcacccatcacagaaatagtgatggaattagtgaagttcgatacccaaaaaatgcaagcagaaacgatagaaggtgtacagtatcagcaaggaactctctggggttatcaagttcgtgagtatctgttagaaaaatggggacgttgctgtgcttactgtaattcttctggtgttccacttcaaattgatcacatcaaaccaaaaagtaagggaggcagcgatagaatttcaaacctaacgttggcgtgtgaacgttgcaatctcgccaagggaaataaaccagttgaagactttctaaaaaaagattctgcgcgacta

SEQ ID NO: 217 - DNA, 325 bp, Scytonema sp.
  source 1..325: mol_type = other DNA
cgtttgaccggcaatccccaccatgctcgcaatctgggattggtactgggacgcttggcacagggtgcaacaattttgttgggtctatttgtttctctgtccattgtgattcccacatttcgggcgggcgatttagtgcaactgctaggaattagcggtgtggcgattggctttgctttccgcgacattttgcaaaactttttagccggcattttaatcctgttgacagaaccattccaaattgatgaccagatagtctttaaaaactttgagggaactgtagaaagtattcagacacgagctacaacaatcagaacctacgatg

SEQ ID NO: 218 - DNA, 762 bp, unidentified
  misc_feature 1..762: note = Ga0310150_005743 JGI
  source 1..762: mol_type = other DNA
atggtgtacgttatttcaaaagatggtaaaccacttatgccaacaaaaagacatggtaaagttagaagacttttaaaacaaggtcttgctaaagttgttagaagagaaccatttacaattcaactattgtatgatactacaacctatacacaacctgttactgtcggaatagacattggttcaaaagtagttggtatttcagcagtaacaaacaaacaagaattgtgcagtgctgaagttgaacttagacaagatatcagaaagttgctactgaagagaagagaacacagaaggtttagaagatatcgcaagagaagatatagaaaaccaagatttttgaacaggcgtcgatacaaaggatggcttgcaccaagtgttcaatggagggttgatgcacacatcagactggttaatttaatagccaagatactaccagttactaaagttgttgttgaaatagcaccatttgatacacacaaaatagttaatccagaagttagtggcaaagaataccaagaaggaccacaaaaaagttttagtgatgtaagagaatactgcttgtggagagcaggttataaatcagaactgtcgggtaaaaaaggcatacttgaagtccatcatattattccaagaagtaaaggtggtactgataatccctctaatttaatagtgttaaccgttgaggaacacaaagcaatacatgaggggaaaattaagattccacgtagtaaacttaaaaaagttaaaattctcaaagatgca

SEQ ID NO: 219 - DNA, 266 bp, unidentified
  misc_feature 1..266: note = Ga0310150_005743 JGI
  source 1..266: mol_type = other DNA
gtcaactacccaccacttaaagcctaacggcttttgaagtgggggcttgccaagccctagttgactaccctcagccaggggaagttaatcttcctatcggactacgttagactggtcatgacaccctgggatgctgctcaagttccaggctctgtcgtatgtacctaaacagtcctgaggggtagggacagtggtacatacctaacaagccagtctaacattggggatgagcacctaactccttcaaaggaggcttaccacatatg

SEQ ID NO: 220 - DNA, 2244 bp, Leptospirillum rubarum
  variation 966..1015: note = n represents any nucleotide
  source 1..2244: mol_type = other DNA
atggcccgtaagggcatttgcaaaggagagatcgtggctgtgtttgttctggacaagaaaaagaaacccctgatgccgtgctcggaaaaacgggccagactcctcctggaacggaaaaaagccgtggttcaccggatggctcccttcaccatccggctgaaagaccgggtcgggggcgtgacccaacccgtccgggtcaagctcgatcccggatcgaagagcaccggcctcgccgtggtccgggaggaggagggggacgggaagaccaccgcccatgtcctgtttcaggcggagatccatcaccggggagccgccattaaaaagaaactggaccagcgccgggccttccggagacggcggagggggaacctccggtaccgaaaaccccgggtcgacaaccggacacgtccggacggctggttgcccccgagcctgcgccaccgggtcgatacgaccctctcctgggtcgaccggctccggagacgggttccggtcacggggatcagccaggagctggtccggttcgacatgcagaagatcgaaaacccggaaatctccggagtcgaataccagcagggaaccttggccggatacgaggtccgggaatatctcctggagaagtggggccggacctgtgcctactgtgggtccgagaacgtgcccctcgagatcgaccacatccacccccggagccttggcggatcggaccgggtctccaacctgacgctggcttgccgttcctgcaacctgaagaagggaaaccgtccggtcggggagtttctggcgaagacgccggagcgtctgtcgatgatcctcgcccgggccaaggccccgctgaaagacgcggcggccgtcaacacgacccggtgggcgctgtttcaggcgttaaaggcgacggggcttccggtcgagaccgcctccggaggacggacaaaatacaaccggacccggctcggaatccccaannnnnnnnnnnnnnnnnnnnnnnnnnnnnnnnnnnnnnnnnnnnnnnnnngcgaaacccagcccattcgggtcaaactcgatcccggatcgaagaccaccggactcgccgtggtccgggaggaagagacggacggggagaagaccgcccatgtcctgtttcaggcggagattcatcaccggggatccgccatcaaaaagaaactggaccagcgccgggccttccggagccggcggcgaagtcagcttcgctaccggacgccccggttcgacaaccggacacgtccggacggctggttgcccccgagcctgcgccatcgggtcgacacgaccctcgcctgggtcgaacggctccggagactggttcccgtttccgaactgtcccaggagctggtccggttcgacatgcagaagatcgaaaacccggaaatctccggagtcgaataccagcagggaaccttggccggatacgaggtccgggaatatctcctggagaagtggggccggacctgtgcctactgtgggtccgagaacgtgcccctcgagatcgaccacatccacccccggagccttggcggatcggaccgggtctccaacctgacgctggcttgccgttcctgcaacctgaagaagggaaaccgtccggtcggggagtttctggcgaagacgccggagcgtctgtcgacgatcctcgcccgggccaaggccccgctgaaagacgcggcggccgtcaacacgacccggtgggcgctgtttcaggcgttaaaggcgacggggcttccggtcgagaccgcctccggaggacggacgaagtggaacaggactcggcttgtgctccccaagacccatgccctcgatgcagcgtgtgtcgggaatatcgacaggatcgagggctggaaccgtccctacctttcgatcaagtccacgggacggggatcgtatcggcggacccggctggatgcgttcggcttcccccgtgggtctctgacccggacgaaagcccacttcggttttcagaccggagaccgggtcatggcgatcgtgacgaagggcaaaaaaaccggaacctatgccggacgggtggccgtgagaagctccggcagtttcaacctccagaccggctccggagtggtgcaggggatttcttacaaggactgtcggcttctccagcgggccgacgggtacggatattctatccatccgatcactgagaaaggagaagcgggagaggcgctatccctccccggcatgaatgccggagtctcccgcgcaagaggatga

SEQ ID NO: 221 - DNA, 298 bp, Leptospirillum rubarum
  source 1..298: mol_type = other DNA
gtcaaccaccccgccctgaagggcggagcttgaaaggaggttcgacaggctcgggttgaccagggaaagcggtacccaacccgctccgttggcaacaggtacaagacccaccccgggatgcttcctcagtcccgggctctggaagccgccgatgcagacaaccgcgagggccaggacgaaacggtcggcggcaagggagcgatcccgaagccggttgccaacattcccgaggggagacgcgtcgtaagacgcgcgttacatggcccgtaagggcatttgcaaaggagagatcgtggct

SEQ ID NO: 222 - DNA, 972 bp, unidentified
  misc_feature 1..972: note = Ga0209061_1001914 JGI
  source 1..972: mol_type = other DNA
atggtcccggtgctcgacagcagaggggccccgctcgacccatgcacggagaaacgggctcggctgctgcttgagcgtgggcgcgccgtggtggtgagccgcaacccgttcgccatccggctgaaggaccgcacggcagagcagtcggtcgtccacccgctcgtctgcaagctcgacccaggctcggccaccgacggtgtggcgctcgtgcgcaggcaggaaggcacggacgtgctcgtggccgcagcccacgtcgagcacaagcgctcggtgagcaaggccatcgccaggcgcgccggttacaggaagcggcgccgctccaagctctggcaccggaaggagcgctcctccaaccgcaggcccgccccctgtacctcctgcggggccaacgccgtgcacggccgggaccgctgcaggccctgtgccgaggcaagggccccgcgcaccgagggcgcccgcccacggcggctcccgccgtctctcagggcacgggtggacgagaccgtccacgccatagagaagctggccaagctctacccgctggcggccattgccatagaggtcgcccgcttcgacgcacagctgttgcgcgacccaggcgtctcgggcgaggggtaccagcaagggccgctctaccagtcaaacctgcgcgagtacgtgctccaccgcgacggccacaggtgccgctactgcggccgccgcggcgtggcgctcaacttggaccacgtcaccccgaggtcgcgcggcggggccaccagggccgacaacctcgtggcgtgctgcctcaagtgcaacaaggccaagggcaaccgcgacgccgccgagtacggccacccggaggtccaagcgcaagtcgacgtgccgctcagggacgccgcctacgtcaactaccccgccctaaagggcggggcttgtgggaaggtcccacaagcccaggttgaccaggccaagacatcgacgaaagagaggtga

SEQ ID NO: 223 - DNA, 354 bp, unidentified
  misc_feature 1..354: note = Ga0209061_1001914 JGI
  source 1..354: mol_type = other DNA
gtcaactaccccgcccttacgggcggggcttgtggggcaacccacgagcccaggttgaccagagggcttggcaggaaggaggcaagaaagccaagcagaagcgcgtcaggtaggcgcaaaagcacctcgggatgcttctccagtcccgagcactgcgcaccacgcaaggagacaaccgtgagggcaatgggcgaaaccgtgcgtgggagccgaggatcctgacaaaacgcacccccgaggagagaccaaagcctcccgcctccatctgggaggttgcggcgtcactaggcccgtaagggcacctataaggacaaggaaggagcatgaagaaatgagaggagggcaaggctgatg

SEQ ID NO: 224 - DNA, 816 bp, unidentified
  misc_feature 1..816: note = Ga0334887_1007052 JGI
  source 1..816: mol_type = other DNA
atgctagtctatgttcttaacaggcacgggaaaccgctgatgccgtgtaaaccacagaaagcacgaagactattgaaagaacaaaaggcaaaagtagtaaaaagaacaccgtttactattcaactgttgtacggttcctctggatacaaacaagatgtaattctcggtgtagatgccggtagcaagacaataggagtatcggcctcaactgagaacaaggaagtgttttcagcagaagtcgaattgagaacagatattgtagatctgttatctaccagaaggacgcttagaaggtctagaagaaacagaaagacgcgttatagacaatctcgtttccttaatcgaagaaagcctgaaggttgggtagcaccgtcggtacagaataagattgacactcacattaaagtggttaagctggttcacgcaatcctgccaataactagagtagtagtagaagtggctcaattcgacatacagaaaataaagaaccccgacattcttggcgaggattaccagcaaggcgaacagctgggattctataatgtcagggagtatgttttgttcagggataaacatacctgtcaacactgtaatggtaagtcaagggatccaattctaaatgtgcaccacatcgagtcgagaaagacaggcgggaactctccggataatttgattactctatgcgaaacctgtcataagagataccataaaggggagatcagacttaaagtcaagcgaagttcttcattcagggatgcagcctttatgggcataatgcgatgggcttcctataacaaactaaaagaactgtattca

SEQ ID NO: 225 - DNA, 239 bp, unidentified
  misc_feature 1..239: note = Ga0334887_1007052 JGI
  source 1..239: mol_type = other DNA
gtcaaataccccacggctaaagccgggagcttgtaaaagctctgtttgactagcctgagtgcttcgagcactacgttatcggcaaatgtataggcaccgtaggatgcgttcccaagtcttacgctctgcggttggtggttaaacagtcctgatgggtagggacagtgctgctaacgagaaactgtcgaataacattggcgatgggaagattactccgtaaggaggtagactatatgcta

SEQ ID NO: 226 - DNA, 1344 bp, Halomonas jeotgali
  source 1..1344: mol_type = other DNA; strain = Hwa
atggcggttttcgtgttggacaaacgcaagcagccgttgatgccgtgcagcgaaaagcgcgcccgattgctgctggaacgcggtcgcgccgtggtgcataaacgctatccgttcacgatccggctcagggatcgggtgggcggcgacacgcaggcgcttcgtctgggcattgatcccggcagcaaggccacggggctggcgctgatgcgtgaatcggacggtcagcagcgccatgtgctgtgtctgttcgagcttttgcaccgcggctttcagatcaagaaggcgctggaacagcgcgccgcgtttcggcgtcgccgccgttcggccaatctgcgctaccgggcgccacgctttgataatcgcactcggcccgaaggttggctgcccccttcattgcaacatcgggtcgataccgtcacggcctgggtggaacggctgcgcaggcttgcaccaatcaccgcactggaccaggaactggtgcgctttgatacgcaaaagctcgacaacccggaggtcagcgacatcgagtaccagcaaggcacgctgctcgggtacgaggtgcgcgagtacctgctggagaaatggggccgggaatgtgcctactgcggcgccaccgagacgccgctggaaatcgagcatgtcgagccacgcagccggggcggttccaaccgcgtcagcaacttgtcattagcctgccatgcctgcaatcaggaaaaggatcggcaatcgctgactgacttcttcgctaccagcaaacgtctcaaaaagcgcctcaaagccaatggtctgtcggcgaacgtgcagcttgagcgcgtacagcgccagctcaagcagccgctacgcgatgccagcgcggtcaatgcgacccgctgggcgctgtttgacgccctcaaggccaccggcttgccggtcacggtcggcacgggtggacgtacaaaatacaaccgccagcggctcggcattcccaaaactcacgccctggatgccgcctgcgttggcgcgatggaggcgctgcacgactggccggtgccaacgctgatgatcaaggccaccggacgcgggagctatcagcgcactcggctgacccggcacggttttccgcgtggctacctgatgcggcaaaaacaggtacacggttttcagaccggcgatagggtcaaggccatcgtccccgccggcaggaaagccggcacgcatatcggtcgtgtggccgtgcgcaaaaccggccgcttcaacatccagacgccacagggggcagtacagggcatttcgcacaagcattgcaccctgattcaacgcggtgatggctacggctaccacctcacaccatccatcaaccactaa

SEQ ID NO: 227 - DNA, 1344 bp, Halomonas jeotgali; identical to SEQ ID NO: 226
  source 1..1344: mol_type = other DNA; strain = Hwa

SEQ ID NO: 228 - DNA, 1410 bp, unidentified
  misc_feature 1..1410: note = Ga0222658_1000616 JGI
  source 1..1410: mol_type = other DNA
atggaaacagaaaagactaagaacagacctgggaatgctccacaagttccctgctctctggtgcgagttaaacagagttcaaagactcagtgcgtagcgctattgacttctaataacaacctcgatgtggatctacctcagcatagagaggggcggaacttgagagtctccgccaacgtctatgtacttaatatgagaggggaacccctcatgccatgttctccgagaaaagctaaaaagttattaaaagagagcaaagccgttgtccgtaaaagatgtccatttacgatacaactgacaacccaaacaggggaatcttgtcagagcattagtttaggcgttgattcaggcacgaaattcataggaattagtgccacaacagagaagaatgaactattctcagcggagttagttcttgacaccaacctcaaggaaaggcttgctagcagacaaatgtatcgcagaaacaggagaagcaggctatggcatagagaacaacgctataataataggagaaaaccccgtggttggttaccaccatccatagaaagacggtataatactcatatcaatatcattgaatttattaagactgttttgcctgtgtctaatgtaactattgaacttggaaactttgatacgcagaagattaaaaatcaagatatcaatggaaagttatatcaacaaggtgatatgtatggatatcaaaatatgagagcataccttatagcaagagaaaaaggtatctgtcagttttgtgggaaatctgttaagggaaagaagatttctttgcatcatatagaatcaaggaaatctggttcaaactctgcatctaatatggctttgcttcacgaaccatgccataagaagatgcataaaatgggtttagaaccaaaaataaatagaaataagcagttccgtgaacatgcttttatgaacataatgcatgaaaaaatacagaaagaaactgactataaacgaacatttggttacgtaacatttgttgacaggaatgctatcggcttagaaaagtcacatattaacgatgctttcgttgtctcaagtggaggaatccaaaaaagatgtataccattctctattgagcagaaaagaaagaataacagatcactacaaaagaacagaaaaggttatgctcctagcatcagaaggcaaagatatccaatacagatcaatgatctggtaaaaataaacggacagtgggttcagacaaaaggtacacattgcaaaggaacaagaattatggtaaataaaaaatctattaacattaaaaatgtggaaagtgtatttcatcgaggaactcttaaatggagtatagattcttcttgtacatatgaagctgatgggattgtaacttttaaacatcatgaagggagcaaatatgacgaatga

SEQ ID NO: 229 - DNA, 295 bp, unidentified
  misc_feature 1..295: note = Ga0222658_1000616 JGI
  source 1..295: mol_type = other DNA
cggaagtaaagcataacatatataatgacaatcttcctgttggtaatgatgacaagggtgatccatatttagatgaaagaactgactttattactatatctgatctcgtaaatgaaaaatatgacaagagtgatggtaaatctatatatgtacaagaaagaagggatgccgtgcttcttctgtatcgggctattagcaaaaggatcgtatcgtcaactacctccggttaaacccgcgggcttgtagtgtgagctacaccgataaagagttgattagagggcttgaaaaaagcaga

SEQ ID NO: 230 - DNA, 1374 bp, unidentified
  misc_feature 1..1374: note = GENOME_ACESSION: IMG_2061766007_$F_2061766007 JGI
  variation 104..113: note = n represents any nucleotide
  variation 259..795: note = n represents any nucleotide
  variation 1360..1369: note = n represents any nucleotide
  source 1..1374: mol_type = other DNA
atgtcttcgacgagaagagctctaagaagctctaccgcacgatgtccctgctcgcggaggtacagtgatttaccgtgcagcatacctggtgctttttctccatnnnnnnnnnntaccgaggacgagcgcatcgcctactaccagaagcagctcggcaaggtccgggagatgctatcgcagaagttcttcaagccggaaccggcatacgaggaagcctaccttaataacacaaaggtgacctacatagcgacttccggannnnnnnnnnnnnnnnnnnnnnnnnnnnnnnnnnnnnnnnnnnnnnnnnnnnnnnnnnnnnnnnnnnnnnnnnnnnnnnnnnnnnnnnnnnnnnnnnnnnnnnnnnnnnnnnnnnnnnnnnnnnnnnnnnnnnnnnnnnnnnnnnnnnnnnnnnnnnnnnnnnnnnnnnnnnnnnnnnnnnnnnnnnnnnnnnnnnnnnnnnnnnnnnnnnnnnnnnnnnnnnnnnnnnnnnnnnnnnnnnnnnnnnnnnnnnnnnnnnnnnnnnnnnnnnnnnnnnnnnnnnnnnnnnnnnnnnnnnnnnnnnnnnnnnnnnnnnnnnnnnnnnnnnnnnnnnnnnnnnnnnnnnnnnnnnnnnnnnnnnnnnnnnnnnnnnnnnnnnnnnnnnnnnnnnnnnnnnnnnnnnnnnnnnnnnnnnnnnnnnnnnnnnnnnnnnnnnnnnnnnnnnnnnnnnnnnnnnnnnnnnnnnnnnnnnnnnnnnnnnnnnnnnnnnnnnnnnnnnnnnnnnnnnnnnnnnnnnnnnnnnnnnnnnnnnnnnnnactaccaaaaagaaggtattgttcgaggctcagcttgaactgcgtgacgatatcgtgaagaaactcgccaccagacgcgagttccgtcgggcaagacgaaaccgtaaaaccaggtatcgtaaagctagattcttgaatcgtaccaagaccaagaaggaaggatggcttgccccgtccatcaagcacaaggtatggtctcatctatggaacatcgctagaatcaagcgaatccttcctataagcaggataaccatagaggtggcccagtttgacacccagttgttaaaggctaaagaacacggtttgcctgttccacagggtacggattaccagaatggtgaacaactgggtttctggaacgtaagggagtacgtattgttccgtgacggtcatagatgccagtgctgcaagggaaagacgggcgattccgttctcaacgtgcatcacatagaatcccgaaagaccggtggtaacgcacccaacaaccttgtgactctttgtgaaacttgccacaagagataccataggggtgaaatcaagcttccgacatctataaaacgtggtnnnnnnnnnncttaa

SEQ ID NO: 231 - DNA, 328 bp, unidentified
  misc_feature 1..328: note = GENOME_ACESSION: IMG_2061766007_$F_2061766007 JGI
  variation 149..158: note = n represents any nucleotide
  variation 315..324: note = n represents any nucleotide
  source 1..328: mol_type = other DNA
gtcggcgccacgtccgagcgcggagtgttcaagatatattccagggaggaactcaggaagagccatagggcagcggcaacggcatacgcagtaatgtacgcgataatgccgtatcctcccggactggactatggcaagttgaatagctnnnnnnnnnngggcaagggtcggcgccgcgtccgagtacggagtgttcaagatatattccatgaacgagctcaggaagagcccgagggcagtggcaacggcatacgcagtaatgtacgcgataatgccgtatccgcccggactggactatggcaagttgaatagccnnnnnnnnnntcca

SEQ ID NO: 232 - DNA, 657 bp, Microcystis aeruginosa
  variation 298..397: note = n represents any nucleotide
  source 1..657: mol_type = other DNA
atggcaagagttcctgttatctcaaaagacggaaagccgttgatgcccaccaaacccagtcgggccaggcggtggattaaggaaggaaaagctatcggtaaattcaacgacttagatattttctatgtccagctaaccactgaaccttccgataacaaaacccaaccgattgctattggtattgacccgggtaaattattctctggaattggcgttcaatcctctctttttactctttggaaggctcacttagaacttccttttaagcgagtaagagagtgcctagacaatcgatgcnnnnnnnnnnnnnnnnnnnnnnnnnnnnnnnnnnnnnnnnnnnnnnnnnnnnnnnnnnnnnnnnnnnnnnnnnnnnnnnnnnnnnnnnnnnnnnnnnnnnccgatatttactttgagtacatcaaagccgatattgatttaacttccagtagaaaaggagctaagtctggaaaaggtttctcgtcggttatggtcggacagaaatgggcgattgagcaactatctcaattggcaaaagtccatacccgctttggttggcaaacctctaatctcagaaaatatttgcgactagaaaagtccaaaaataaagcaaaacaatcaccagaaagtcatgctaacgatggcattgctaagaggtag

SEQ ID NO: 233 - DNA, 222 bp, Microcystis aeruginosa
  source 1..222: mol_type = other DNA
gtcactaaccccgccctaaaagggacggggcttgcctagaccaatttaggcgacgcaagtagagactaccgcatcgagacacaatctggcccagacctccgaatacttccctagttcggattccctctcagctctattggtaaagcgttgttagacaagacatctggattgtgttgcggtaagggactttaactttactcttaaggattatctccatggcaa

SEQ ID NO: 234 - DNA, 813 bp, unidentified
  misc_feature 1..813: note = Ga0255147_1001158 JGI
  source 1..813: mol_type = other DNA
atgttagcgtatgttctgaacgcccaaggcgaggccctcatgccgtgctctcccgccagggcgagaaaacttttgagggacaaaaaggccaaggtcgtccgccgtatgccttttaccatcaaactcctccatggctcgtccggctatcggcagaaggtctcccttttggtcgacgccggggctaaccatataggggcggcggcaaaaagagaggacggagtagtgctctacgcgtccgagacaaaaacaagaggagacatcacagaaaaaatgacccaaagacgctcctatcgaaggacaagacgtggaagaaaaacacgctatcgggctccgaggttcgacaataggagaagaaaggacggctggctcaccccgacggtctggagcaaaatcgaggcgcacgtcgccgagatagccttcgtcaaaaaaatgcttcccatatcgggaacaaaaatcgagacggcctcgttcgacatccatgggatttctaatcccgacgtcaaagactatcagaatggactacaaaagggcttttataacctaaaagagttcgtccttcatagggattcccacagctgtcaggagtgtcggggtaagaaaaaggacaaaaggcttcacgtccaccatgtgaggtttcgctctaacggcggcacaaatgtcccggagaacctcatcaccctgtgcgaaagttgccacaatgcccttcacgcgaaaaagaacgcccaatccgtatcgctggaaagatacgggaagaagaaagccccttcgctgaagggtgcgaccatcatgtcgacggtatcggcggccctcgaa

SEQ ID NO: 235 - DNA, 309 bp, unidentified
  misc_feature 1..309: note = Ga0255147_1001158 JGI
  source 1..309: mol_type = other DNA
gtgaagcctccccgcgactaaagatcgcggggcttcctggaaacagggagcacttcaccagaccaccaacaaagaaaggagtttaggctaaatgttggtagacgatggacaggaatatataggcacttcgggatggcgactcagtcccgaaccctgcgccgtagcgttaaaagccggaagaggtgtcggcggtgcgctgcggatagaaaaccctgcattcatcaggtctagagtaggtcggagtcctttggcggctttcccgccgaaggatacgcacgactccagttcagggaggtacgctttatgtta

SEQ ID NO: 236 - DNA, 1257 bp, unidentified
  misc_feature 1..1257: note = Ga0137716_10010158 JGI
  source 1..1257: mol_type = other DNA
atgttagccttcgtattaaacaaatatggtaaaccacttatgccctgtcatcctgctaaggcaagaatactgctcaagcagggtaaggcaaaagtggtaaaacaaactcccttcaccattcagctactgtatggcagttccggttacaaacaaccagttgtgcttggagtggattctggatatagcaatgtcggattatcagcagtctctgagaaaagagagctgttttcagcagaagttgccttgagaacagacatagtcaaacttttatccgaaagaaggcagtatcgtagattcagacggtatcgtaagacatggtatcgtaaaccgaggtttcagaacaggaaaaaacctgaaggatggctcgctccatctattcagaacaaactggatactcatattaaggttatcaatcaggtcagcagaatactccctgtaacagaggtaaaagtagaagtagcagcatttgatattcaaaaaatcaaaactcctgatatatctggtgtggattatcagaatggggtgcagaaggggtttagtaatgtcagggagtatgttctgtctagagatgggcatatctgtcagcactgcaaagggaaatccaaagaccctgtgttagaagttcaccatatagtatcgaggcagattggcagtaatagccctgataacctgataaccctttgcaggacatgtcatcaaaaggtttctcaaggaaagattaagctacaggtgaccccttcaaaggagtttaaggcagagacctttatgactacggttagatggaaactgatagagagactgagagaactcggttatgaggtttcacacacctacgggtatatcacaaaggacaaaaggatagcgttagggatagggaaatcccatgctaacgatgcctttgtgatagcagggagaaacggtcaaaggagactatcagttcagtattttattcagcaggtaagaaagtgtaatcgtaagctattcaaaggtgacaggtcacatatcaagaacatagccgacaggtttgtaaaagggtatcagaggtttgataaggttttgtggaaaggtatagagtgtttcatctttggcaggagggtaacaggatattttgacctgaggaaattagatgggacacggttaaacccatcgttaagttataaacaaatctctctccttgagagagcaaagacattgctaatagaaaggaggataggtctctcctccccatgtctgaaggcaggggtctccgagacctga

SEQ ID NO: 237 - DNA, 260 bp, unidentified
  misc_feature 1..260: note = Ga0137716_10010158 JGI
  source 1..260: mol_type = other DNA
gtcaatcaccccatgcctgaaggcaggggcttgtcccgtgagggataagggtaactggttgaccagggggcatggagaaccatgcagcagttatcaggaagagatacatacacaccccgggatgttccgccagttccgggcaactgtggtctgtcattaaacgtggtggaaacacccagtgtggcaggcttaaaaactcctgataacatcccgaggcggcacttactccccgtaaggggaagagaggaggctttatgtta

SEQ ID NO: 238 - DNA, 1341 bp, unidentified
  misc_feature 1..1341: note = Ga0257068_1000081 JGI
  source 1..1341: mol_type = other DNA
atggcagtttttgtactggaccgtcacaagaaaccgctggacccgtgcagcgagaaacgcgccagacagcttctggagcgaggacgcgcacgtgtccacaaactgaaacccttcacgattcgcatcgtggaccggctttttgaaaacagctgcgtcaacggcgtcgcggtcaaaattgaccccggcagccgggagacgggcatcgctgtcgtccgcgaggacggtgacggagcccacgccctagcgttcatcaatctcagacaccgcggtctcgtcatccgcaagaagctggagcagcgggccgcatatcggcgtcggcgccggtcctcgaatcttcggtaccgcgcgccgcgttttaacaatcgtcgcaggcccgaaggctggcttgcgccaagcctgcggcaccgtgtcgactccacggtcgcctggatgcgcagactgtgccgtattgcgccggtgcgccgtatctcgatggaactcgtgaagttcgacatgcaggccatgcagaatccggaaatctccggcgtcgagtaccagcagggagagctcgccggctatgaggtgcgcgagtacctgctggaaaaatggggccggaagtgcgcctactgcggcaaggaaaacgtgccgctggaaatcgagcacatcacggccaaatcggtcggcggcagcaaccgcgtttccaacctgaccctcgcctgtcatgactgcaaccaggccaagggcaacatgccggtcgaggcgttcctgaagaaccgcccggaagccctggacaggatacggcggcaggcaaaacagccgctcaaagacgcggctgcggtcaatgccacacgctgggagctctacagggagctgcaggtcttcggactgcccgtggagactgccagtggcggcaggacgaaatggaaccggacgcgtctccatgtgcccaaggcgcactggctggacgccctctgcgtcggcagtgtggacgccgtgtccgggattgggaagccagtgcttgagattgcctgcacaggccgcggctcgcatcagcgcacccgcgtcgacaggaacggcttcccgcgtggtttctgtctgcggcagaaacgtgtccacggctttgcgacgggcgacctggcggccgctgtcgtgcccaggggcaaacatgcagggaaacatgtcggaagactcgccgtgcgcgagaacggttccttctgtgtggctgcggcagacggtaagcacgacggcatatcgtggcggcactgcaggctgctgcagcgtgccgacggctatggctacgggcatctgctcggtaacgtcaaccaggaaaattttggaggcagcgtttcctccccggcttga

SEQ ID NO: 239 - DNA, 283 bp, unidentified
  misc_feature 1..283: note = Ga0257068_1000081 JGI
  source 1..283: mol_type = other DNA
gtcaatcaccccgccctgaaggacgaggcttgtaaaagctgaatcccaagagccgattgaccagcccaagtgaggtgtaaccggactccgttgctatcaggctaaagaccaacgccagaatgcttcctcagttctgacctcttgaaattcctgttgcagacatgcccggggtaggcgcgaaacgggcaggagtgtgacaccggacagcaacatgggcgagaggagccggcgggcaaccgccgcgtaacagggccccttgcggggcaggaaaacgacaatggca

SEQ ID NO: 240 - DNA, 1284 bp, Desulfobacter sp.
  source 1..1284: mol_type = other DNA
ttgaacgtatttgttttagatacaaacaaaaaaccacaaaatccagtgcatccggcaaaggccagattgcttttatcggaagagaaagcggcggttttcaggcagtatcctttcacaattattttaaaagaagagattggggtaaatccacaagcacttcgggttaaaattgatccaggcagcaaaacctccggcattgccgtcactgatgatgccacaggtgaaatcgtttttgctatgcaattagaacatcgaggccaacaaatcaaaaacgatctggaatccagacgggcaatcagaagatctcggagaaacagaaaaacccgatacagaaaaccacgatttgaaaacagaatcagaccggaaggatggttggcgccatcattgaaaagccgggttcacaatattgagacgtgggtcaatcgattatgccgattcagtaatattcaggcaatctcaatggagcttgttcgttttgatatgcagaaaatactcaatcccgaaatctccggggttgagtatcagcaaggggcactttcgggatatgaggtacgggagtatcttcttgagaagtggggcagaacgtgtgcctattgtggcaaaacgaatctgccactggagattgagcacattctcccgaaatcaaagggcggttcaaatcgcgtcagcaatttgaccctggcatgtaccgaatgcaatcagaagaaagggaacaggccgattgacatcttcctttcaaagaggccggaattactgaaacggattcaagccagggcaaaagcaccgctcaaggatgcggcagccgtcaatagtacccgatgggatctattccgcacactgaaagagacagggcttcctgtggagattggttccggcggattgacaaaattcaaccggacaattagagggctttccaaaacacattggcttgatgcggcttgtgtggggaaaagcacacctgaaaaattattccaaactgacaaggctgttttgattgttaaagcaaatggtcatgggagcaggcaaatgtgccgggtcaatacgtttggattccccaggacaaaagcgaaatcccggaagaaaaaagttaacggttttcagacaggtgatattgccaaagcaattgtgacttccggaaaaaaggttggaacatatattggtcgtgtcgccgttagaaaaagtggattttttaacattaagacaagagaaacgaccatacaaggtattaattggaagtattgtcatatgcttcatatgtctgatggatattcatataacatttga

SEQ ID NO: 241 - DNA, 246 bp, Desulfobacter sp.
  source 1..246: mol_type = other DNA
gtcaactacccctcctgaatcacagattcagaaggggcttgtaaaaagccctatgttgacccgtctaagtgctttgcgcactacgttagatcggaaataggtaccctggggtgcttgccagctccaggcgctacggcaagtagttaaacaggtgtaagaggttaaaccggtgctgcttgcgctaaacccggtcataacattgacaaggcaaacattaccctggaaacaggagaatttagattgaac

SEQ ID NO: 242 - DNA, 915 bp, synthetic construct
  variation 63..72: note = n is a, c, g, or t
  source 1..915: mol_type = other DNA
atgggcattatgcgctggacagtctacggtaaactcaaagaattataccctaatgtcaaattnnnnnnnnnncatatcggtctatcagccacaacagataagaaagtcttatttgaatctgaagtcgaattaagaaacgacatagtaaaactcctatcaaacagaagagaattaaggagaggcaggagatatcgcaaaaccagatacagaaagccaaagttcaataaccgcaaaaaacctaaaggttggttagctccttcaatcaggaacaaaattgatactcatctgaaggttatcgctttagcttgcaatatactgccgataacaaaactgaccattgaagtagcacagtttgatattcaaaagattagaagccccaacatccaaggcaaatcataccgagatactgctttcatgggcattatgcgctggacagtctacggtaaactcaaagaattataccctaatgtcaaattgacctacgggtatataactaaacataccagaattaacgcagggttgaacaagtttcatcgtacagatgcacgctgcatcagcggcaacccatcagctgaaccactaaacatctggtactacttcaagcaagtaagaggccagaaccggcagctgcacaaagccaacccgaaaaaaggcattcgcaaggccaacaaagccccgcgatacgttcacggttttcagttatttgacaaggtactgtatcagggacaagaatgttttatctttggcagacgatcatccggctattttgatttaaggaaattggatggtagtaaagtacacgcatctgccagccataagaaacttaaattgctagaaagcgcaaatacattattatgcgaaagagaggaagtggcttcctccctacgactaaagtcgggggtatacgccgcgtaa

SEQ ID NO: 243 - DNA, 240 bp, synthetic construct
  source 1..240: mol_type = other DNA
gtcaatcaccccacgcctaaaggcgggggcttgcaaaagtcttgattgactagcctcagtcttaattgactacgttatattagaatacatagttaccctgggatgcgtgcccaagttccaggcactaaggtcggtggttaatcagttctgaggggtaggaacagtgctgctggtacaaaacctaatataacattggcgatgggcaaccaactccaaaaaaaggaggtaggcttaatgcta

SEQ ID NO: 244 - DNA, 981 bp, Fischerella sp.
  source 1..981: mol_type = other DNA; note = PCC 9605
atgaactcaaatgctcgaattccagttttgtcaccagatggtaagccattgatgccaaccttgtatcgacgggcacaggtctgggtagaacaaggcaaagcaaaatggatcggcaatgacctgaatattaagcaagttcatctgttacaagaaccatccggtaacgcaactcagcccgttgcgatcggcattgaccctggtaaaaagttttcaggaattgctgttcaatctagtcagttcactttgttcgcagcacacttggtattgccgtttcctaatgtcactaaaaagatgacggggagacgaattttaagacgtgcgagacgctcaagacgtatcaaccgcaaaattccattccatcttagggcgcatcgtcaaaaacgctttgacaatcgcaggcacaaaaaactggttccatctatccgtgctaaccgtgaatttgagttgcgagttgtcaaagagttgatgcgactattcccagtctcaactattgtctatgaatacatagaagcaaagggggataaagcgtttagtcctgtaatggtgggtcaaaaagtcatgttggagttcttaacagaactagctccagtggcaacttgttttggttggcaaaccgctaacctcagaactcacctgaatttgattaagcacaaaaacaaggcctcacaatctcctcaatctcatggagtagacggaattgcgttggcttctagccaattcgtaaactacgaagccttccaaaccaagcgagaacatgggcgtcgctgggttggaagcgtgcgtctgacgccttctccgtttcgggtgattactcgccccaatctattccgtcgccagttgcactttgagaatttcaggcaaggcgctgtacgtaagcgtaaggggggaactgttacgccattcggatttcgttctggtgatttcgttcaaggtgaaaaggctggaaagattcatagaggttggattggtggctttaagtga

SEQ ID NO: 245 - DNA, 238 bp, Fischerella sp.
  source 1..238: mol_type = other DNA; note = PCC 9605
gtcaagaacccccacctgcactcttgcaagtgggggcgtgaaacagccaggttttaccggtaactcctgactagagccaatgagccactatctcgcacggacttccgcttatttccctagagcggattatctccaaacctactggctgtaggtgcttgagggtcgctcaaatgattcggaggcaacctccgaatccgcgacctccagaaaggacatcgtgatagtggtggcgtaaggg

SEQ ID NO: 246 - DNA, 1152 bp, unidentified
  misc_feature 1..1152: note = Ga0187846_10005139 JGI
  source 1..1152: mol_type = other DNA
gtgttcgtttacgtattaaattgtcacggtgaaccgttcatgccctgtagaccacgaaaagcacgcctgctcttgcaagagggcaaggcgaaggttgtgagaatggttccgttcacgatccaactgctgtatggcagcagtggctacaaacaagcaatctctcttggtgtcgatgcaggcacccaacggatcggggtttctgcgaccactgagcggcaagtgcttttcgaagcagaggtgcagcccagaactgacatccaggcattgctggcgacccgccgtcaattccgccatgccaggcgcagtcgcaagacgcgctatcgccagtgtcgtttcctcaatcgaaagaagcgatcaggctggctcacgccttctgtgcggcacaaagtagcagcccatctgaaaacaatccgtttggttcaccagttggtgcctgtgagtaggaccaccatcgaggtggcacagttcgacatccagaaaatacgcaatcccgagatcgagggcagagagtaccaacacggtccccagctcggtttctggaatgtcagggcatatgttcttgccagagaccgtcatgtgtgtcaatggtgtcagggccagtcgcaagaccccattctcacggtccatcacatcgagtcccgcaagacaggcggggataggcccgagaatttgatgactttgtgtgagacgtgccatgatctcattcaccgaatgcaccaggaacacacgatcgaacagaagtccaggggctttcgagatgcggcgcaaatgggcatcatgcgctggcgcatctatgagcaggcgaaagcactcttcccgcatgtccatctgacctatgggtacatcacaaagcacactcgaattgccaaccactttgaaaaatcgcatgtgatcgacgctcgctgtatcagtggtcatgcgctggcatgctcggatgagacgtggtatctgatcaagtacgtgaggagaaataagcgtcagttgcacaaagcgaccatcagaaggggcggcaagaggcagtgtcacacggctcccaagtatgtccacggctttcgcttgtttgattgcgtgaactatcaagggaagtgctgttttgtgtttggcagacgcagttctggctactttgatctgcgtctgcttgacgggacgaag

SEQ ID NO: 247 - DNA, 237 bp, unidentified
  misc_feature 1..237: note = Ga0187846_10005139 JGI
  source 1..237: mol_type = other DNA
gtcaagaacccaatcgcctccaggcgatgggcttgtgtgaacaagccatgcttgactagcctgagtctagactacgttcgacaggtcatgctacctacgggtgcctactctagcctgtagctctagcgtctgtgattaaaagctctgatgggtaggaacggtgttgcagacacgacaagcctgttgaaccttggcgaagagtaccatacatccgaaaggatggtaaacgttgtgttc

SEQ ID NO: 248 - DNA, 825 bp, Moorena sp.
  source 1..825: mol_type = other DNA
gtgaagccagtgtcaggagcatgcacaagctttgatagccgagcgaggcacactttaccctcaacgggagtaaacacatgcgccatgtgtaattacgtctttgttttagatgcaaatcataaacccctcaacccctgccgtcccgttaccgccaggaagctgttaacggctggtaaggcggctgtatatcgccgttaccctttcaccattatcttgaaaaagcaggtagaggccgaacccaaaccgatgtctctcaagatcgatcctggctccaagatgactggtctagctattgtgtacgggaatcaggtggtatggtcagctgaaatcgaacatcgtggctccaaaatcaaatcagctcttgactctcgtcgggcagtgcgtcgttcccgtagaaacaggaaatgccgctaccgaaagccacgtttcaacaaccggaaacgcccagaaggttggttggctccgagcctacagcacagagtggcaaccactatgacctgggtgctgagattaattaaactcacccccattggttcgatatcccaggagctagttcggtttgatacccaaaagctgcaaaatccggaaatctctggcatagagtaccaacagggggagctgatgggctatgaagtgcgggagtacttgtatcagaaatggggtcgtcaatgtgtttactgtggggcacactcggtcaagctagaggtggaacacatagttcccaaatcaaagggaggaaccaatcgtgtcagtaacttaaccctagcctgtcatcggtataatcaggccaaaggaaatcttaatgctcaggattttttattgggg

SEQ ID NO: 249 - DNA, 271 bp, Moorena sp.
  source 1..271: mol_type = other DNA
cagaagcagaccaattactaaaccttagcaaacctgctcaaatcggggtttacctgagtcttcagattggtcaagctcaccaaatggtaaacgctatcaaggtcaagataccctggggtgcgagccagctccaggctctatcgcttctgattaaacaggtgatgagttaattttagtgaagccagtgtcaggagcatgcacaagctttgatagccgagcgaggcacactttaccctcaacgggagtaaacacatgcgccatgtgtaattac

SEQ ID NO: 250 - DNA, 534 bp, unidentified
  misc_feature 1..534: note = GENOME_ACESSION: IMG_3300000938_$F_3300000938 JGI
  source 1..534: mol_type = other DNA
aaaactcggtatcgtcaaccacgctttgataaccggaaacgccctacagggtggctcccacccagtctgcaaagccgagttgagaatatcgtaacttgggttcgtaggttacaaaagctagctttgatttctgatatttctcaggaattagtcaagtttgatactcaactcatggagaatccagacatcagtggattcgcataccaacaaggtgagttagctggttacgaagtgcgagaatttctgcttttcaaattcaatcatacctgtatgtactgtggggctaaagatactcgtttggagattgagcatcttttacccaagtctaaaggtggttcaaatagaattagtaatttaggcattgcttgtaggaattgcaaccaaaaaaaaggccgtcaagctctcagagaatttttagcccaaaaacctgacttgttacagcgcattctgagacaagtaaaacaacagaaagccgacactgctgccgttaattctacccgttgggcattatttaatcgactcaaagagactgga

SEQ ID NO: 251 - DNA, 257 bp, unidentified
  misc_feature 1..257: note = GENOME_ACESSION: IMG_3300000938_$F_3300000938 JGI
  variation 216..257: note = n represents any nucleotide
  source 1..257: mol_type = other DNA
gctatccgcgaaccactggacaaacctggacaatcccgataaatccttggtagagatagcccggttaagtctaaccacagactacgttaagaaggtcacgacaccctgtgagtgcttgccagctccttgctctgtcgctaccagttaaacatctttatttcgctaaggaagtgctgctagcatgacaagccctcttaacattaccaaggcaaaagnnnnnnnnnnnnnnnnnnnnnnnnnnnnnnnnnnnnnnnnnn

SEQ ID NO: 252 - DNA, 1377 bp, unidentified
  misc_feature 1..1377: note = Ga0172380_10006798 JGI
  source 1..1377: mol_type = other DNA
atgcagaagtttaaagcaaagttaaagaacgtacctacaaatgcttcactagtttgtagctctacaaacacacaattaaacagagacgacagtcttagtgttgtgagtggtcaagaaattgacaaactgactttaaacaatcccgaagtgaatcaaccggaggaaactccgggacaggagttgagactacctgtcaaagtttttgtattgaatcttaggggcaagcccctgatgccttgctcatgccgacaggcaaagtgtctcttaaaagagaaaaaggcaaaagtagttaaaaggagtcctttcacattacagttgttagttgcaacaggtgaaacaaaacaagatattgttttaggaatggattcaggttattcaaatgttggaatttcctgtgttactaaaaaacaggaattattgagattgatttgtgttttagaaaatggaatgagtaaaaggcttgaagaaaaagcaatgtacagacgcggcagaagaaataaattgtggtatcgtaaaccgcggtttatgaatagggtttcaactaagaaaaaaggatggttaccgccttcaacactaagacgttttgaaacacatataaggcttattgaaagtattaaaaaacttttaccaataacaactgttagaattgaagtgggtaattttgatattcagaaaataaacaatcctgaaatttcaggaaaagattaccagcaaggttcgatgtatgaatatcaaaacaaacgaaattatttaatgagccgtgaaaatggaaagtgtcaattttgtggaaaagattttaaaggtcagtcgagtcatatacaccatataacaccacgaagtaaaggaggtactgacaaaactaacaatctggcaatcttacataaaaaatgtcatgaagaacttcacgccaaacatttagaaaaaacactgaaaaaaaataaacagttcaaagatgcgacatttatgaatattattcaacataaatttcaagaagtgttagattgtgaaatcacttttgggtatgagactttcataaaaagaaaggagttaggaattttgaaatcacattcaaatgatgcttttgtaattgcaaacgatactaataataaaagggttaaagaaattcaagtaatccagaagaagaaaaataatagatgtttacaattaaatagaaagggttttaagccaagcataaggaaagaaaaatctaaaataagtccacatgatttattttggattggtaaaaaacagtatacttgtaaaggtatgcacagttatggtagatatgttctttggggggatataagaaaaaaagaatatgttagattttcagatgtaactaaaatatttcgtgttagtggtttagtatggatataa

SEQ ID NO: 253 - DNA, 264 bp, unidentified
  misc_feature 1..264: note = Ga0172380_10006798 JGI
  source 1..264: mol_type = other DNA
gtcaactaccccttaacaagttaaggggcttgtccggtaacggacagagcaaaagttgattagggagcgttttaaaaaaatgcagaagtttaaagcaaagttaaagaacgtacctacaaatgcttcactagtttgtagctctacaaacacacaattaaacagagacgacagtcttagtgttgtgagtggtcaagaaattgacaaactgactttaaacaatcccgaagtgaatcaaccggaggaaactccgggacaggagttgag

SEQ ID NO: 254 - DNA, 462 bp, unidentified
  misc_feature 1..462: note = Ga0114359_1005163 JGI
  source 1..462: mol_type = other DNA
atgcgaagaggacgtagaggaagacggattaaccgccaacttccttttaatctaagagcgcatcgacaaaaacgattttcaaatagaagaacaggaaaattagctccctcaatcagagctaatcgtcaacttgaacttcgagtcgtttctgaactaaccaaaatctatccaattactgacatttactttgagtatgtcaaaaccgatattgatctaacttccagtagaaaaggagctaagtctggaaaaggtttctcgccagttatggtcagacagaaatgggcgattgagcaactatctcaattggcaaaagtccatactcgctttggttggcaaacctctaatctcagaaaatatttgcgactagaaaaatccaaaaataaagcaaaacaatcaccagaaagtcatgctaacgatggcattgctaagagggagggagcatctcacctttgtaacccctaa

SEQ ID NO: 255 - DNA, 112 bp, unidentified
  misc_feature 1..112: note = Ga0114359_1005163 JGI
  source 1..112: mol_type = other DNA
gtcactaaccccgccctaaaagggacggggcttgcctagcttaatgcgaagaggacgtagaggaagacggattaaccgccaacttccttttaatctaagagcgcatcgacaa

SEQ ID NO: 256 - DNA, 873 bp, unidentified
  misc_feature 1..873: note = Ga0394881_0010240 JGI
  source 1..873: mol_type = other DNA
atgtctaattttgtctttgttgtcgatactaatggacaaccgcttaacccagtaccaccgggacaagcaaggcgattgttaaaacttcaaaaagctgctatttatcgacgttaccccttgacgctcgtactcaaatacacagtatccgctccccaaatacaaccccatcaattaaaaatcgatccgggtgccaaagttagtggattagcaattgtccgagacgacaaagtaatctggggtgctgaattaacccacaggggacaacaaattaagcacgataacgaagccaagggaaatcaggaacttaaagatttcttagcacagcaacctgagttgttcgagcgaatcgcaaaacaagccaaacaaccattgaaagatgcagcagcagtcaatagcacccgctggcaactctttaacagactgaaagaaacatcattaccagttgaaatcggaacaggcggtcagaccaaatacaatcgtactcgattggaattaccaaaaactcattggttagatgcagcttgtgtgggactcgtgtcccaattaaaaattttgactgccgggcctttgttaattcaagcttcaggatggggtagccgtcagatctgccagccaaataaatatggcttcccaatcagacacaagacacggtgcaaggaatttttcggctttaaaactggcgacatggtacaagcaactctgcctacaggaaaatttgcgggtactcatagaggcaggctaattgttcgagcgagtggagtttttgagatgatttcaccaacgggaaaagttagcccagtacgtcacaaatactgtagggcaattcaccataatgatggttatacgtatacattgtccacttgcgtccagtaa

SEQ ID NO: 257 - DNA, 242 bp, unidentified
  misc_feature 1..242: note = Ga0394881_0010240 JGI
  source 1..242: mol_type = other DNA
gctatccaccaaacagcagacaagagtggacaaccacttccaacgctcgagagatagccagcctcagttacaaactacgtttcgagggtcatgacacctacaggtgctttccagcttgtagccctgtcgtcaatagttaaacatccctatttggttaaggaagtgcgattggcatcacaagccctcaaaacattggcgaggaaaacattaccccgcaagggaggacatccatgtctaatttt

SEQ ID NO: 258 - DNA, 1242 bp, unidentified
  source 1..1242: mol_type = other DNA; note = Erysipelotrichaceae bacterium SG0102
atgacaagctatgcttttgtattggatgctgataataaacaattagcgccaaccaaagaacagaaggcttggtttcttattcgtaagaaacgagcaacattgctcagcagatatccaatggtaatacaactcaaaaagaaaatttcagatcaagaaatctgcaaagatgaaattcgttgtggaatagatgacggaggtcttcatgttggtgtcgcattagtacagaaatgtcagacgcgaaacaaagtcatttttaaaggaactattgaacagcgtaatgatgtaaaacatcttatggacgttagacgtggatttaggcgttatcaccgtgatcataaaagatatagaccagtgagatttgacaacagaaaatcctctaaacgaaaagggagaattgcaccaagtattttacaaaaacgtcaatcaacaataagagttatcaatcaacttaacaaatgggtaaatataacgaattattggttagaagatgttgctattgatataagagcattgacagatggctataaaccatatcggtggcaatatcaaaaatcaaatagactggacgagaatatccgtaaagctgtcattttacgagacggttgccaatgtatggaatgtggaaaatctaattgtagattagaggttcatcacattaagccaagaagactgaaaggttcaaatacgcttggtaatcttattacgttatgtacaggatgtcaccagaaaacagaaggtgtagaagaattatacatgaacagatacttcgctttgttaaattcttctgacaataagaacctgaattatgcacagcatgtaatgataggtaaaaaatggctgagaaaacagttatcaaatttaggaatgttacatttaaccaacggaggtgatacagccaataagcgtattgactggggtattgcaaaatcacattctaatgatgccatctgtatcacagacttgcggccagacacatgtgaaatcaaagaatgggtaataaaacctatgcgaagacaaagtaaggctaagacagataatgttcttggaattaaacatagggatttggttgagtacacttttatgaacggtgaaacacatagagggtatgtaacagctttatatccagaacaaaacgttcttaattttcaaagtccaacaaaacattgcaagaaagttaacgcaagaaaatgcaaagtgctttggaaatattctaagatttattggttagataatgttagttag

SEQ ID NO: 259 - DNA, 289 bp, unidentified
  source 1..289: mol_type = other DNA; note = Erysipelotrichaceae bacterium SG0102
tacgtaaacatagacaggagtggacacattaagtctcttgtctatggcttaacaataggtttcgagcctaagtgactgctgctatcgaaagatatgttgcagatatgaactacattaagcagtaaggtaaagacacacctttagatgtaatcttcagtctgaagctctgtgagtgcaaaccaagaaacaatgctaatgtcctgcattgataacagggaaacacatgtcctctactcgatattggcacgaagagaaatactccgaaaggaaggtgtcagaaatgacaagc

SEQ ID NO: 260 - DNA, 753 bp, unidentified
  misc_feature 1..753: note = Ga0247609_10038159 JGI
  source 1..753: mol_type = other DNA
atgacaagttactcatttgtgttggatgctgatggtaaaccgttaagtccaacgaaagaaacaaaagcgtggtatatgatacgtaaaggtaaagccaaactcgtatcaaaatacccaatggtagtacaactgaatcggataatccctactgatgaaatctgtaaagatgaagttcgtggcggaattgatgacggtggtttgcatacgggtattgctgtcgtacagaaatgtcaaacaagaaataaagttttatttaagggtactattgaacagcgtaatgatgtgaaaaatcttatggatgttcgtagaggttatcgcagataccacagacagcataaaaggtatcgtgaagcaagatttgataaccgaaattcaactaaacgacaaggcagaatatctccaagtatcttacaaaagcgacaagccacaatgcgagtgatatatcatttgaataaatggataaatataacaacttattggcttgaagatgttgcaatagatataagagcattaacggatgattacaagccttatagctggcaatatcaaaaatctaatcgtttagatgaaaatatacgtaaagcggtaatacttcgtgatggatgtaaatgtatggaatgcggaaagaaaaatatcaaactcgaagtacatcatataaatccacgcagaaagaatggctctaatacgttaggaaatctgataactctttgtgaaaagtgtcatcaaaaaacggaaggtaaagaagaacaatat

SEQ ID NO: 261 - DNA, 291 bp, unidentified
  misc_feature 1..291: note = Ga0247609_10038159 JGI
  source 1..291: mol_type = other DNA
tagtcaaacatactcaaaagtggacacgattaagccttttgagtgtggacttagcagtaggtttcgagcctcagtgagtgctgacagtgaaaactgttctgcacgatgaactacgatagagaagtaaggtaaagatacacctgcggatgtactttcagtctgctgctctgtgagtgccaaccaagaaacaccgctaatgtcctgtggtgataacagggaaacacacgaccttctttctgtcattggcacgaaggaaaattctccgaaaggaaggtttcagaaatgacaagt

SEQ ID NO: 262 - DNA, 1305 bp, Pseudomonas sp.
  source 1..1305: isolate = OV081; mol_type = other DNA
atggcggtctacgtgttggacaagcaagggcatccactgatgccgtgcagcgaaaaacgggccaggctgcttctggagcgtggtcgtgcacgtgtacatcgccagatgccgtttgtgatccggctgactgaccgcctgcagaccgaatcgcagtaccagccgctgtcgatcaagatcgatcctggcagcaaattcactgggatcgccgttgttcgccagcgggacaagcaggtctttgtcctgtcgctgatcgaattggtacatcgtggcgccatgatccaaaagacattgctgcaacgcgccggctatcgccgtggacgtcgcagcaggaacctgcgctaccgggcgccgcgcttcaataaccgtacccgcaaggccagttggctggcgccgagcttgcagcatcgggtggacaccacgatgagctgggtgcagcgcctgcgccgctgggcgccggtgactgatctggctgtggagcgagtaaaatttgatatgcagctgatgcaaaaccctgaagtcgcgggtgttgagtatcagcggggtgcgcttcaaggctatgaggttcgggaatacctgttagagaagtggggtcgcctttgcatgtattgcaacactcctaacgtcccactacagatcgagcacattcttgccagagccaacggcggcagcgaccgcgcttcaaacttgggcctggcctgcgacccatgcaatcaacgcaaaggaaagctgctgatcgaagtgtttttgaagaaaaatccagaattgctgaagcatattttggccagagctaagactacattacgcgatgcggcggcggtgaactccacacgcaacgctatattcgcatctctgtcagagaccggcctgccggtcgaggcaggtacaggaggtcagacaaaattcaaccgctgcacctatggcttgccaaaaacacatgcgctcgatgctgtctgtgttggggatatctcaggggttaaaaactggaaaattccgacacttgccgtcaaagcgatgggacgtggaaattatcaacgaacgcgggttttcggcagtggctttcctagaggatatctaacacggcagaaacggcattttggtttccaaacgggtgacatggtgaaagcaaacgtaaccagaggtaaaaaaatgggcatttaccaggggcgcattgcagtgagagcaactggaaaattcaacatccaacttcatgatcgtgttgttcaaggaatcaaccacaagtattgcgcaatcgtccaaagggcggatggctacggttaccagcaaataaatacagaagcttattaa

SEQ ID NO: 263 - DNA, 293 bp, Pseudomonas sp.
  source 1..293: isolate = OV081; mol_type = other DNA
gtcaactaccccgccctgaaggacggggcttgctgaggaatcggtgagtcgggttgaccagggggccgagattttttcggcagatgtttgcaacaggtcgttgagacccactccggaatgcttcctcagttccggacactggaaattctagatcacgctggcgaaaggtaaagcgccgaaggttttggatgccgcgcaagcgggagccggttgcaaactccccgaggggagcgaggcctaaaaacctccgtcactaggcccgtaagggcataaattaggaggatcgcatggcg

SEQ ID NO: 264 - DNA, 585 bp, unidentified
  misc_feature 1..585: note = Ga0307373_10033165 JGI
  source 1..585: mol_type = other DNA
atgcaacatgttttggcgctggatgcccagcagcgtccactcgcgcactgccgcccggcccgcgcgcggctgttgctcacccagcgcaaggccgccgtcgttcggcgttaccccttcaccatccgcctgaagcaggcgttgccagcggcgtcttcgccgctgctccggctcaaactggatccagggagcaagacgaccggcttcgcggtggtcaacgacgtcaccgggcaggtggtgtttgccgcctcgaatcgggtgagcaatctcacgctcgcctgccatccctgtaacacggccaaaggcgcccagacagcggcggagtttggtcatccgaaggtccaggcgcaggccagcgccccgctcaaagacgctgccgctgtcaataccgcgcgctgggcgctctatcaccgcctcaaggcgggcgtgtatgtgggacggctagcggtgcgagcaaccggatcgtgcaacctcaagacggcgacagggacgattcaaggcatccatgtccgctattgtcagccgctccagcggggagatggctatgcctatgcgaaagggggcgcggcgttgcttccccacgcctga

SEQ ID NO: 265 - DNA, 295 bp, unidentified
  misc_feature 1..295: note = Ga0307373_10033165 JGI
  source 1..295: mol_type = other DNA
atcaacgacttcacgcagcagcggcaatagctgaccagtccccttgccgtctcggcggcagggagccgttcacgaggagcgcccaagctcctaccctgggatagcatctcagtcccaggccctagaatgctcaggttaaacagagacgtggggtatgaaactcagtgcttgagcaagatggccgctcgtgagccgggacgagggaacccttacctgcgcaagcagcgtcgccgcgtacggcgccccctcacgggggatagcacagacaagaaagcgacccgacacgatgcaacat

SEQ ID NO: 266 - DNA, 282 bp, unidentified
  misc_feature 1..282: note = Ga0118725_1008328 | JGI
  source 1..282: mol_type = other DNA
atgcaaaaagtatttgttttggatacaaagaagcgtccccttgcacctactcatcctgcgcgggcaagacaattacttaaaaaagggaaagctggtatttatattggaaccgtggcaattagaacttctggcagttttaatctcaagaccgacaacggcacaatacaaggtatcagttatcggtactgtcatttacttcaacgtgctgatgggtacaactaccaaaaaggaggaacggcacttcctcccaccccattcaatggggtgggtttccgtgcctaa

SEQ ID NO: 267 - DNA, 333 bp, unidentified
  misc_feature 1..333: note = Ga0118725_1008328 | JGI
  source 1..333: mol_type = other DNA
gtcaactaccctaccccttgaaggggtagggcttgtggctttgcgcggttacttcgtgaaccgcttagcaactcaagcccggagttgaccagctttagtcccgagaatcgggactccgttaggggtgaatatataggtaccgtcgcgatgcttcaccagtccgacgctctacggcaagtcgttaaacgagcatacgggtagaagccggtgcggcttgcatcttactgaacgatatttactttaggattcaaaaccacccactaacattggcaaggtgactgttactggaacttaggttctacgactgaaaggagactttcaccaatgcaaaaa

SEQ ID NO: 268 - DNA, 1365 bp, unidentified
  misc_feature 1..1365: note = Ga0247841_10001800 JGI
  source 1..1365: mol_type = other DNA
gtggctctgtggtctgtcattaaaagttctgagggtaggaacggtgtggcagacttaaaaaccttttccaacaacctcgatgcgtctctaactctgaaaggagaacgtaacttgagagtatacgttgttaatttaagaaacgaacctttaatgccaactactccacgaaaagcaaaaatcctgcttaaaagtggcgaagcatcggtattcaaaagaactccgttcaccatacagttgctacatgctagtggcgaaacaaaacaacctataacattaggtgttgatagtggatttcagaatgttggattatctgttataacagaaaaagaagaagtctttagtgcagaagttaagttgagaacagatatagtaaaactaaattcggagaaaaggcagtatcgcagggcaaggcgtaatcgcaagacttggcatcgtgagccaagattccttaatcgcaaaaaggatagtggttggttagcgccttctatacaacacaaattagattctcatatcaggttgatagatatggtaaagaagatattgccgataaccaagataaatattgaagttgccaattttgacatacagaagataaagaatcaagacatagaaggaacagattatcaaaatggagaacagtgtggcttctggaacgttcgtgagtatgtattgcatcgtgatggtcatatctgtcagcattgcagaggtaaatcgggtgataaaatcctagaagttcatcatataaacaccagacaaacaggtggagatagaccagataacttaataaccttatgtggtttatgccatgagaaagtatcacaaaataagttacaactcaaaatcaaagctagtaaaggatataaagccgaatcgtttatgtcaatggttagatggcgcttggttaatattataagagacattggagatattgtgtctcatacttatgggtatataaccaaagggaatcgaatagcactaggtataagcaaatctcatgctaatgatgcttttgtgatttcgggaggtactaatcagatacgtcttaatggttatttaatccaacaagtgcgaaagtgcaaccgcaaactctataaaggcatacgaagtcacatcaagaatacagccactagattcattaggggattccaacgttttgataaggtattgtggaaaggtgtattccctactcggcggagcagaggtgttgagtgtttcatatttggtcgtagaacatcgggctattttgacataagaagacttgatagcacgaaattaagtcaatcagttaaatatacggaattacgactattagagacatttagaacattttcactagaaaggagagtggcagactttcccgaataa

SEQ ID NO: 269 - DNA, 253 bp, unidentified
  misc_feature 1..253: note = Ga0247841_10001800 JGI
  source 1..253: mol_type = other DNA
ccatgatttgtgggtaaagattagcataaatgcggaggcttgcaaaagccttgattgactagagggtgtttaattacacagaagttggttaagagaaatacatacacacctacgaatattacgcaagtttgtggctctgtggtctgtcattaaaagttctgagggtaggaacggtgtggcagacttaaaaaccttttccaacaacctcgatgcgtctctaactctgaaaggagaacgtaacttgagagtatac

SEQ ID NO: 270 - DNA, 1299 bp, unidentified
  misc_feature 1..1299: note = Ga0194121_10011106 JGI
  source 1..1299: mol_type = other DNA
atgttagtgtacgttttgaacaaagaaggagagcctttaatgccctgtagcccttgtaaagcaagaaaactcctggcatccggaaaagcaaaagttgtcaaccgagagccttttaccattaaacttatgtttggttcatccggatataagcaaaaggtcactgtcgggtgtgatagcggttcgaaagtagctgcttttgcagcaacggtgagtaacaaaaccctttacgtatcggaggttaaattaagacaagatattagatccaacatggaccaaaggcgatcttttagaaggatgagaaggtctagaaaaactcgttatagaaagcctcgtttcaacaatagaaaaagggatggatggttgacgcctacagtgcaaagcaaagtaaactctcacaaaagggaactggcttacattaaaaaacttattcccgtacacaaaatcattattgaaaccgcaagtttcgatattcacaaaatcacaaatccagaggtctcctcttgtggttatcaagaaggaagacttaaggacttctataatgtaaaacactatgtattacatagggatcatcacacctgccaacaatgcaaaaaaacaaagcttgcgctgcatgtgcatcacattatttttagatctaatggaggaagcagctctccggacaaccttattacactttgtaaaaactgtcatgagactctacacggttcctctcaagctgaactgctctccaaaaaactcttcacaaaacttaaaagcaagcctacccttgatgccacgcaagtggctaccattggctcttttttgaaaaaagaggtagtatgcgaggaaacttttggttatgaaacaaaatacaaaagagagtccctaggcctgcaaaaaactcactaccatgatgcaatttgcattgcaatcaagcaagggcaacctatgcagattggggtgcctcttttaaaaaaagtacacatagctcaaggagattacaagctttgctcaggagatagatcagagaaaatccttcctacagggaaggttatggggattaagaaatttgacaaagtaaattctaatggggtaactgcttttgtcaaaggtagaatgtcgacaggttatgctatccttatggatatcgagggtcataagctaaatattaaacccatccccaagcttaaagaattaaaacgcgttgctgcaagaaaatcatgccttacaagtcttgttcccatcgaaaatatcttcttaggtaccacatcatcttggtcacaaaatacagaaaaccactcttttgcaatgagtccataa

SEQ ID NO: 271 - DNA, 306 bp, unidentified
  misc_feature 1..306: note = Ga0194121_10011106 JGI
  source 1..306: mol_type = other DNA
gtgaagctcccctagactaaagatctaggggcttcttagaaactaggaagcctacttcacaagaacacaaacaaaaggaagtaaaacaatgtttgtaaacgatagaacagaaaatataggcacttcaggatgccgactcagtcctgaactctgcgaattgcagttaaacagtcctgagggaagggacagtgctgcaattgtcaaacctgtttatatccgttcgagagtaagtcagaaaaagcatggccatccttgggtctgctttcttatgcataaccctagttcaagggggtgcactttatgtta

SEQ ID NO: 272 - DNA, 441 bp, unidentified
  misc_feature 1..441: note = GENOME_ACESSION: ElkSloMetagenome_4_$F_3300000354 JGI
  source 1..441: mol_type = other DNA
atgaaagtctacgttataaacaaacatgggcgtcccttgatgcccacaactcctagaaaagctagattgttactcaaaaatggtcaagccaaaatcgttggacgtgacccgttcactatccagttaatttatggctcctctgggtacactcaacctgtggacaaagggaagcgtcgggaattagagatagaaaaatctcaccataatgatgcttatgtcattgctggtgggatgactcagccccgtgtactcaagcctttgatgcaacatgacttagttctgtttgagggacgaatttatcctgttgtcggagtccaaaatttgggaactcgcctcagtttaaagccagagccaggatgcaaaaccaagtataaaactgcggcaatgaacaaggttaaacctttaaaaacaagaggaggaatctgtgagcaacaagcataa

SEQ ID NO: 273 - DNA, 319 bp, unidentified
  misc_feature 1..319: note = GENOME_ACESSION: ElkSloMetagenome_4_$F_3300000354 JGI
  source 1..319: mol_type = other DNA
ccgtcacgaacccaacgctgaccgatacgagcggtacagcgtgggcttgagagaaatcttaagccctcgtgattagcctcagtattccgacgaaagcaaggaatactacgttgatcggaaatacataggcaccgtgaagtacagggttggcaacccgtttcctagcttcacgccctgcggttttcattaaacattcctattgggtagggaaagtgtgaaaacatcaacatctcgactccgctcgatgttgaaactccgatgaacattggcgcaggaaaccacaccgcaaggtgaaaacctacttgttaggtctatgaaa

SEQ ID NO: 274 - DNA, 1275 bp, synthetic construct
  source 1..1275: mol_type = other DNA
gtgtgccaaggtgacaacttatttcaacattggcgaagggaatctacgggagttatcccgaattacatttttaaaaataacaaaatggtttatgtgttagacaagtctggaaaacctatgatgccgacaaagcggtatggctgggtacgtcgtgctttgcgtgatggacgcgctaaggtagtcagacgtgatccttttacgatccaattaacctacgagccggacacacacgtgttgcaagacactacgcttggtattgacattggctatgagaacgtaggtacaagtgtgctaacaaaacaaaaggaattgtttagcggcaattttaagctacggacagacatccaaaagcgtttgtcatatcgtaggatgtacagacgaactagacgaggacgaaagacgcgttatagaaaagctcgttttttgaatcgcaaaaagtattatgccgacgctccgagcgtaagacacaaggtacatagccacgtaagaatcattaatctgataacatcaattttgccggtcaatcaattgattgtcgaggttgccaattttgatgcacaaaagattaagaatccagacattcagggtgaagaatatcaacaaggttgtcaattaggctatcagaatgtcaaggagtatgtaaagagtcgagattgtcaccgttgctactttaacacaggcaagtgtagcaaaaagctagaagtacatcacattgtattcaaaagtcaaggcggatcggatgctccaagtaatttgattactgtttgtgataagtgccataagtctattcacgatggtaaaaagccaaacccaaaagctagtaaatacaaatcactaagacctattagctttatgaaaacagtatctaagcgtctacaagaaatgctaccagacattgagtatacctatggttaccagacaaagcaaaaacggtataatctcaatctcggaaagtcacacgtaaatgatgcttttgtaattgcaaatggtacaagtcaggttcgatgtaagacaacgaattatgttttcaaaagaaaaaataacagacaattgggtaagctaagaaaaggctttgctccatcgagtagaaagcaacgttatccgatacaacctaaagatttagttgagtacgaaggaaaaaagtattatgctattggcacacattgtaaaggtaaaagagtgattgtgatgtacaacggcaaaaaaaaatcaatagcaattaagataataaaattattatttaaccaacgaagtttgttagccctcacgggctga

SEQ ID NO: 275 - DNA, 248 bp, synthetic construct
  source 1..248: mol_type = other DNA
atccacaccaagcgctaatgcgctatggaatgggtttgaaaaaacctggttgattagcctaagtcttaactgactacgttgaaataattatcataccctaggatgcttcccaagtcttaggctctatggttgagtattaaaagttctgatgggtaggaacggtgtgccaaggtgacaacttatttcaacattggcgaagggaatctacgggagttatcccgaattacatttttaaaaataacaaaatg

SEQ ID NO: 276 - DNA, 1338 bp, unidentified
  misc_feature 1..1338: note = Ga0170573_10661034 JGI
  source 1..1338: mol_type = other DNA
atgttagtctttgttctaaacaaaaatgcacaaccgttaatgccctgcgctccgcgcaaggcgagactgttgttgcgaaatggagaagcaaaagttgtaaacagaactccgttcgtgattaagttaaatttcggctcctctggatatacccaaccagtaggtttaagtttggacacaggggctaaaaatgcgggatttgccgcgacagcgaatggaaaggttttgtacacaagtgaggtaaagctgcgtacagacattccagaaaaaatgaagcaaagattatcgttcaggcgaactcgtcgcggacgcaatacacgctacagagcgtcgcgatttgataatcgctctagactggaggggtggctctctccaacgatgacttcaaaggttaattctcatgttcgagaaattaattttattaagaaaataatgccagtgaaatcaatggtcgctgagattgcgcaatttgatattcacaaaatcacaaatccagaagttgtaaatgacttaactgggaaaagttatcaaactggccgacaaaaggatttctataacacgaaggcttttattttatcgagagataattacgagtgtaaaaaatgctgcggcaagaaaaataacccaaaactccacgttcatcatattattttttgttcaaatggcgggacaaattcgccagacaatttaattacgctttgcgaaccgtgccataacgggattcatgcacacaagaccccagaaaaagaatcattaaaattttcaacagaaatcaagaagcaaagacacaccgcaagtgccgttcaagtttcaacggtcagttcgtatctgcaaaaaatatatccagaaatgaaattaacctacggatacgagacaaaatttaagagagagatttttggcgctaaaaaggaacattataatgacgcaatttttgctggacttgttgaaggtgaaatttgcgaaatgccaaaatcatattttaaaaaagttcatatcgcaaatggcgattacaaattaagaaatggcaaccactctgaacaagtaattccaactggaaaaattatgggatttaagaagttcgataagattgagtatctaggagaaaagtattttattaaaggtcgaatgtcgacagggtatgcaattttaatgaacgaaaaacacgaaactgtaaaattaaaaccgataccaaagttttcaaaaatgaaaagaatttctgcgaggaagtcgtgccttacaagtcagattgtcatcggaaattcactctcaaatatcacattatcttcgtctgcaaatacagaaaaaatctccttgcaagaaaagaagttggtgaatttatga

SEQ ID NO: 277 - DNA, 321 bp, unidentified
  misc_feature 1..321: note = Ga0170573_10661034 JGI
  source 1..321: mol_type = other DNA
gtgaaggctccgctaagctaaagacttagcggcttctataggaggcggaatttatttcgcctcagaccaagaagtacttcacaagaacaacaacagaagggttgagagaatgttgttaaacgatagaacagaaataggcactttgggatgtcgacttagtcccgaacaatgcgaatgcaagttaaacaacgataagagtaatcgcagtgcttgcattgttaaacctgttcatatcagttcgaaagtaagccgtgcaaaaacaaaattccttggtttgtttagtgcgcactactcgagtttagcgaggaagactttatgtta

SEQ ID NO: 278 - DNA, 951 bp, Beggiatoa sp.
  source 1..951: isolate = 4572_84; mol_type = other DNA
atgttagtctatgtcattaataaaaatggtaatccattaatgccttgcaaaccagcaaaagcgaggaaacttttgcgcgctggaaaagccaaaatcgttaatcgttgtcccttcaccattcaattgcaatgggactgtgaagaaaatgtgcaacccgttacgttggggattgataaaggaagtcattacaccggtttgtgcagtgtgggttttggtcaaattttactttctggcattattaatcatcgcaccgatattaaagacaaaatgaccgcacgacgtggtaatcgctgtcaaagacgttatcgtaaatggtatcgtcccaaacgatttttaaatcgtgcaactagtaagcacagcggacgattacagccttctattaaagctaatgcagaagaggtaataagggttgtgcgtcaaattcctttgcccctcagtcaaattgtgattgaagatgtgcaagttgatattgctcgtctcaacaatcctgatttgcttgggattgagtatcaacgatctaatcgtttagatgaaaatcttcggatagccacattgatgcgagataaatatcaatgtatctcttgcggaaaaaaaaaggttcaacttcaagcacatcacatagtgcctcaaaatcaaggcggtaaggatacgattaaaaacttaataacgctttgtcaatcctgtcataataaagtacatcaaggccaaatcactcttcatgctgatggcataagtggttttaaagaccagatagcccaaagaaccatgcaaggaaaatcttttatttaccaaattttagaaaactttgccccggttttcaaagtgtttggttaccaaaccgcttcgtttagaaaatatttaagcttacctaaagaacatgatgttgatgctctttgtgtggcaaccttagataaaggaacaaaagtgcctctctttgtgtggcaaccttag

SEQ ID NO: 279 - DNA, 264 bp, Beggiatoa sp.
  source 1..264: isolate = 4572_84; mol_type = other DNA
atcataatagttcctaaatctatagaataatgttctaaatatagaaatttattcctagacatggaactaacagtgggctacttgaatgagtcgcagaagttagataggccatcacaccttccgatgtgattccagtcggtcgctctgtggtctagtattaagggtagcggaaacgtgaaagtgtgctaaacgtaaaaaacctatttaacaaccacaaggagtacctcactctcactaacaggaggtcctaaagatattatgtta

SEQ ID NO: 280 - DNA, 1050 bp, synthetic construct
  source 1..1050: mol_type = other DNA
atggctgtattcgtactggacaagcacaagaaaccactaatgccctgcactgaaaaacgggctaggctgttactcgaacgcagacgtgcggtggtgcacaagatgtcgccttttactatccggctcaaagaccggacggtagaacaaagccaacttcaaccgttacgtctgaagttagatccaggtagcaaaactaccggtatcagcatcttacaagaagcagtgtccgagaaagcagatgtcgtctttttggcggagctgcgccacaagccgggcatcaaagagaagctggccgacagaaagacacagcggcggaatcgtcgcaaccgcaaaacacgctaccgcgagaaacggtttgataatcgtaccaggccaagcggctggctgccgccgtcgcttcaagcccgggttaatcaggtcgagaataccgtaaacaaattgcaaaagctgttgcccataaccgcaatcagcaccgaacatgccaaattcgacacacaacttatgcaaaaccctgccattgccggtatcgagtaccagcaaggcgaacttttaggttacgaggttcgggaatatctattagaaaaatggaaacacaaatgcgcctactgccgtaccgccgacacaccgctggaaatagagcacattacccccaaatcaaggggcggcagtgacagaatcagcaacctaacattagcctgtcgcccgtgcaaccaagccaagggcaacaggacggcagaagagtttggccaccctgaaatccaaaagcaggccaaattgccgttaaaagacgcggccatgatgaacgccacgcggtgggcattgtttaacaggctaaaagaaactggcctcccggtcgagtgcggtactggcgccagaaccaagaaacagcgtatagaacataaactcccgaaaacccattactacgatgcgtgttgcgtgggtgccggcaccccggcaaatcttgcgatcaggcaaaagtatgtttccatttggaaagcgatcggcagaggcaccaggaggatgtgcaacacagacaaatatggttttccg

SEQ ID NO: 281 - DNA, 265 bp, synthetic construct
  source 1..265: mol_type = other DNA; mol_type = other DNA
gtcatagaccccacggctaaagccgggggcttagcatttgccccactatgaccagcctaagtcccacgaggactacgtttacttagccatgacaccctggggtgcttctccagctccaggcactgtcgtccggactaaacagcgagtaggggttgtacgagcagtgccccggacgcgacaagctaagctaacattggcgaggagagactaaaaatagcgttaccggccccttaaggggctccgaaaggagagaaaaagatggctg

SEQ ID NO: 282 - DNA, 1167 bp, unidentified
  misc_feature 1..1167: note = Ga0315276_10000018 JGI
  source 1..1167: mol_type = other DNA
ttgactagacagtttgtaactgaactcactggacgtggcagtccaaaagacgtagaggatgcttccctagtcttcttcctctctgtgagtcagtgtcgaagggacgtacaaacgagtttttcaaggttctcggcttactgcaacaaaaaccttgagttgaggagttcaataaagatgtttgttcctgttactgacaagaatcataaacccttgatgtcgactactccttcaagagcgaggaagtggataaagacaggcaaagcgacaccgtattggagcaaccaaattttctgtgttcggttgaatcaagaaccaagtgacgacaagaagcaaaagattgtgatgggtatcgacacgggcagcaaaagagaggcattcacgatcaagtcacagggtcatacatatctgaacattcttgctgatgcggtgacttgggttaaagatgctattaaaataagaagaggagcaaggcaggtaagacgtcaaagaaaaacgccataccgtcaatgtagatctaacagatcaaagagagaaattgcaccttcaataatatcaagatggcaactgaaattaagaatcatcaacagaatgatgcgtatctttccaatcacagattttgttgttgaagacatcaaagctgaaacaaagaaaggaaagagacgttggaacaaatctttttcgcctcttgaaattggaaagaagtggttctataatgaacttaggaaatttggtaatcttgagacacgacagggatatgaaacaaaggaactacgtgatacatggttattgaataaaacagagtcaaagatgtcattgtcatttgattctcataatgttgattcttgggttcttgctaattatcttgttggaggtcatattaaaccagataacaaagaaatcaaaaggatgataccaattcagtttcatcgaagacaattacatcgatttaagattgaaaaaggaggtgaaaggaaacgatatggcggtacgatgagtttgggatttaagaaaggaagtttggttaagaataagaagcatggtatttgttatatcggtggaaattcatatggtaaattgagtcttcattctcttaaaacaggaaagagactatgtcaaggagctaaaattgaagaaataaaatttttaacatattgtagttttagatga

SEQ ID NO: 283 - DNA, 335 bp, unidentified
  misc_feature 1..335: note = Ga0315276_10000018 JGI
  source 1..335: mol_type = other DNA
gtcactcatgagcccgggcagcgcatggaggtgaatgacgtcaaggacctggccaagcagctcgtgcggacactcggtgacaagaaccagatcctacgcaacgcgaagatcacgaaggacaacatcgcacagctcgtcaaggcggtgaaggaggagaagcgcttcgcggtggtcaacaaaaagcgcgtccttgttgaccgagctgacgcggtactgaacagccttcgcgagatgtacccggaacttgttatatgagatgcatattaaaacttattttaaaagaaagatgtaccctgaggtcaattacctagggtatttttttaggcacaaagaaa

SEQ ID NO: 284 - DNA, 1362 bp, unidentified
  misc_feature 1..1362: note = Ga0117909_1048905 JGI
  source 1..1362: mol_type = other DNA
atgcgtgtgtatgtaataaacaaaaacggtaacccacttatgccctgcaaaccagccaaagcaaggcatcttctacgggacggcaaggcaaaatttgtcaatcgaaaaccattcacaattcagttactttgggattgctcagaaaatgtgcaagacgttcgttgtggtattgacaagggatgcatggtaacgggtgttgcttgcgtaggtaatggagaaatcctgttctctgccaatatcaaacacagaaatccggtagcattacaacaaaaagacggttcaacgaaaacatttatacaagtgagagcagaaaggcgcaaaagtcgtagacatcgccacaaatggtatagaaaaccaagattcaataatagagcatcatcaaaaagatctggtaggttgccaccgaccattaagatgaatgtcatggaagttgtcagggttataaagaaaattcctttgccaatctcccatattaccgttgaagatgtccaggtggatattaggagattaagtacccctgacgtggaaggtagtaagtaccagcaatctaatcggctagatgagaatttaagacttgcttgtttaatcagggataattttacttgtcagaaatgtggaaaaaagaatacccgattggaagctcatcatgtaatttggactgctaaaggcggaaaagatagtatttacaatttgattactctttgtgaggattgtcatgagaaagtacaccaaacaggggaaagtagcaaagtcaagctcaaaagaaacaaagtagtaactggcatggatggattcaaggataagatagctgcccgaacaatgcaagggaaaactttgatgtatcaagaactggaaaagattgcgccgctgtcttgtgtatacggttatcagacttctgaatttagaaaagcattagatttacctaaagagcattggatagatgctatttgtgttgcctatttagaaaccggtgagattgttccattagatagtaataatcattattctatatggtttcgggctaaacaaaccagacgcatttttgacacgcaaccatcaaaaggtggaatgataaagcagtggcaaaagtacaaaggattagcaagtaatggcaaagattgtattttagtagacaaacggactaaaaacgttgttttaccagaaggctataccctttaccaaaaaggcgatgttattgacattttaggtttacagactgaaatagcttctatcaatggaaagggcaaaaggttttattattggatatatcagcctgatggaactagaaagtatgcttctgtatcccataagaaagtcaggttggtagaatatgctaagacactcatactatatctcaagtaa

SEQ ID NO: 285 - DNA, 303 bp, unidentified
  misc_feature 1..303: note = Ga0117909_1048905 JGI
  source 1..303: mol_type = other DNA
gtcaacaacccctcctgattcacagaatcagaaggggcttgctgaataactcggtaagccctgggttagaccagtccccttcatccttgactttgatgaaggagcagttacctgttgtatcacacctttgggtgttcttccagcctgaagctctgtggtttattcgtaaacagttctacggggtaggaacagtcggataagcgtaaaaacacgggtgaagacataggctttgtctatgtctgtaacaaggacgaggaggaacatactctttacacgtaggaggttataaaaaacataatgcgt

SEQ ID NO: 286 - DNA, 1266 bp, synthetic construct
  source 1..1266: mol_type = other DNA; mol_type = other DNA
atgttgcaaaaacaagaatatgcgttagtattggatagtgatgggaataaacttgctccaactaaagtacagaaggcttggttcttaataagaaagaaacgagcaaaactaattcaaaggtatcctatggttattcaattaaccaaaaaagtgaatatgataaaagatggcacaactctagaatgtggaattgatgatggttctaaatatgttggcattgcattagtgcaaaagtgtaaaactaaaaacaaagttttcttcaaagggactattgaattaagacaagatgttaaaaagaaaatggatatccgtagagaatatcgtagatatagaaggagtcataaacattatagaccagcaagatttaataatcgtgtttctatgataaagaaaggactgcccccaccaagtattaaacaaaagaaagactcaataattagagttgtaaatagtttaaacaaatttgtcaatattgataatatccatttagaagatgtaaaaattaatattagagaaatggttgaaggcaagaaactttatggtgatgaatataatattccaaataaagaaaatgccaatctaagaatagcgactttgattagagataattatacttgtcaagagtgtagcaaaaaaacaaatttggaagttcaccatataattcctagaagtaaaaatggttctaatagtatttataatacaataacattatgtgcggattgtcatcaaaagacagaaggtaaagaatttttattcgctggtaaatatttaaggcaaataggaagtgattttcttaaaggtcttaattatgcacaacacgtaatgcaaggcaagaagtatttaagggctagattgagagaaattgtaaacttggacacaaccgatggtttaacaacttcagaaagaagggaaatgtggggtatagacaaatctcatagtaatgatgcagtttgcatcacaggattaaaacctaatgacatagaaattactgaatatactataattccacaaagaagaaagagtaaagctaaaagtaaagggttaaatgggtttaaacatcgtgatatagttacatatcatcacacaaataacatagattatattggtaacatcaccgcaatttatactgatggaacaaatacattgaatgtaaaaaccaaagaaaaacattttaaaagagtttcttacaaaagatgtaaattattttataggtttgataaaatttggtggttacaagataaatttatacaattttatataatttag

SEQ ID NO: 287 - DNA, 298 bp, synthetic construct
  source 1..298: mol_type = other DNA; mol_type = other DNA
tagaaaaatatatgataaagtagatgcttggcctttattacatagattttctaacaggtttcaagccttagtgattgtcaatattgaaaaatatttggctgatatgaactgcattgagagaaaaagttaaagacatacctttagatgttatctccagtctgaagctctatgaactccaaccaagaaacatatctaacatcttgatatgataacagggaaaagtaagaactcctcttgatttgggcaaggagaaaatactccgtaaaaggaaggtgacagagatgttgcaaaaacaaga

SEQ ID NO: 288 - DNA, 921 bp, synthetic construct
  source 1..921: mol_type = other DNA; mol_type = other DNA
atgtccgttgctgtgattagcaaaactggcatagtactcatgccaacaagtgaataccgggcacgtaagctgctggactccgggaaagcaatcatttatggataccgtccattcacgatccagctaacagaaagggaaaccggtgatgttcaaccggttgaactctgtgtggatacaggatatatccatattggagtatctgtaaagtcagaaaagcacgaatatctgggattacaggtcgatacattaactgacgagaaggcaaaacacgatgaccgccggatgtaccgcaggcaaagacgaaaccggaagcgataccggaagtcgcggtttgataaccggaaacggaaatctggctggcttgccccgtcactggaacataagaaagagatcaatctgcagatcataactgctatctgtggagtatatccaattgcagacatcacgctggagatgggaaactttgatacgcaggttctgaaagcaaaggaagaaggtaagcagataccgcaaggaactgattaccaacatggagaacggtatggaattgcaacgctccgggaagccgtctttacaagggatgggtataaatgccagtgctgtgatcgaggcatcaaagatggcgcaatcttgcacgctcatcatatccagtatcggagtcagggtggaaccaaccggatgtccaatctgatcacggtatgtgaaaagtgccatacaccagccaatcataaaccgggtggaaaactgtatggttggaagccgaaaattgcttcgttcaaggacgcaacttacatgacagcagtccggtggcaactgtatcgtaaagtgaaagagatgttcccggggatccatgtcaaaattacctatggagcagaaaccaaggaacgccgtagaatcctggatatcaaaaatcccatgtga

SEQ ID NO: 289 - DNA, 418 bp, synthetic construct
  source 1..418: mol_type = other DNA; mol_type = other DNA
gtcaacaaccccgtctgaaataaatttcaggcggggcttataaaagatctgattttttattggatcttagtcccgtcttaggtttattgatggcgacgaccgcaaggccgtaaatgattagcctcagtgcaacgaaaccggtcagaccagacacggtgaatcattagcactacgttaccggtaaaattaggcactccgggatgcacctctagtcccagaccctgcggtatcttattaaacatctctgagggtaagagaagtgtgagatacgcgaaactaccggataacattggcgaagaggaccaccgattctgagtaggtgcttgtaccgaaaggatagagaacctgtatgggatacctaggatatctgatacagaaggcgtaagccaaatttcaggaaggaggacagcttatgtcc

SEQ ID NO: 290 - DNA, 1278 bp, unidentified
  misc_feature 1..1278: note = Ga0074469_10883752 JGI
  source 1..1278: mol_type = other DNA
atggtttatgtactatcgcaaacaggcaaaccgttaatgtcgactgagcgacacggaaaagtcaggcgcttgcttaagtcgggcagagcaaaggttgtcagtcggacgccgttcactatccagttgctttacgagactacccaacatactcaacctgttactctgggcattgatcccggatataagaatgtgggtttatccgcagtgacagacaagagcgaggtcttcagtgcagagactaaagttaggacggatattccgaaattgatggaggttaggaaacagtatcgcagagctaggcgcaataggaagaccaggtatcgcaagcccagattcaacaacagggtacgtactaagcataaggggtggctagctccatcagtagaaaacaagatggatgcacatatcaagctgttaaaattggtgtgttctatactgcccataagcagtattgtgattgaagccgcccaattcgatatgcagaaactaaagaaccccgaaaccaaatggactgactaccagcagggagagcaagctggcttctggaatgtgagagagtatgtattatggcgtgatgcaaatacatgccagcattgtgaaggcaagtcgaaagacgttatcttggaagtccatcaccttgagagtagacggacaggcggggatcgacctgcaaacctgttaacactgtgcaaaacctgccataataggtatcataaggacggttttgaacttccaaagcccgggtgtggattcaaagcagcggcgcacgcaaacataatgcgctggaagttatacgaacgcgcaaaggcgttaggcttccctgtaaagataacgtatggctatcaaaccaagtgcagtcgcatatcacaaaagctggagaaaagtcatatcaacgatgcgtttgtcattgcaggcggcagtggtcagctacggaagcaaggaggattccagtttcggcaggtacggaagcagaatagaaagctatacaggggtatcagaagtcacgttaggagcaaattggctagagttctattcggattccgtcaatgggacaaggtgagatacaagggtcaagagtattttattaagggacgcagatcatctggctatttcagcttatcggatattcatggccaaagtgtttcactggacggcaagaaactagatggtgttaagtattcagaactctgtttagtagaaagagcatcgactttattatcaaggaggagcgacttcctctccccgatgaatcggggagtatccgtcgctgatattcta

SEQ ID NO: 291 - DNA, 250 bp, unidentified
  misc_feature 1..250: note = Ga0074469_10883752 JGI
  source 1..250: mol_type = other DNA
gtcaactacccccgcataaatgcgggagcttgtagaaagcttctggttgactagcttaagtgcttcgagcactacgttggttgggtcaggataccctggaatactcctctagttccaggcactatcgttaggcattaaaagctctgagggagtcggagcagtgtgtttagcgtgtaagccctaccaacattggcgaagaggacacaacagatacctcggtatctgatttatccgaaaggattctcctatg

SEQ ID NO: 292 - DNA, 819 bp, unidentified
  misc_feature 1..819: note = Ga0209253_10060444 JGI
  source 1..819: mol_type = other DNA
atggcagtctttgttttggaccgcagcggcaagccgctgatgccgtgttcagaaaagcgggcgcggctgctgctggaacgcggccgggcgcgggtgcatcggcgcgtgccgttcgccatccgcctgaccgaccggcgtgtggccgactgcgagaggcagccgctggcggtgaagctggacccgggcgcgaagacgacgggcatagccgttgtgtgcacgacgggcaaagcggtggccgtgcttggtctattcgaattgcagcatcgcggcgacgcgatccgggacgcgctcacgtcacgcagccagaaacgccgccgtcgccggggtgcaaacctgcgctaccgcgcaccgcgtttcgacaatcgccgtcgtcccgacgactggctcgcaccgtcgctgcagcaccgcgtcgataccgtgctgacgtgggtgcgcaggttccaacgatgggcgccgatcgacagtcttgccgtcgagcgcgtgaagttcgacatgcagttgatgcagcacccggacatcgccggcattgagtatcagcagggcacactctccgggtattcggtgcgcgagtacctgctggagaagttcggccgccagtgcgtctactgcgatgcacagagtgtgccgctggaaatcgagcacgttgtgccgcgggcagccggcggatcgaaccggccgagcaatctgacgctggcctgccggccgtgcaacgcgaacaaaggatcgcgtccggtcgagcagttcctgaacgggcagcctgaccgtctggcgcggctcaaacgccagttgaacgcgccgctcgcggctgccgccgcggtg

SEQ ID NO: 293 - DNA, 293 bp, unidentified
  misc_feature 1..293: note = Ga0209253_10060444 JGI
  source 1..293: mol_type = other DNA
gtcaatcactccggcctgaagtgaaggccggagcttgtggggggtcactccacggctcgggattgaccagagaaagcggtaaccaacccgctacgttatgtagaggttcaagacccaccggcgaatgcttcctcagttcgccgctctggaacctgcgaccgcagacacgcttcgggtaagcacgaaacgggtcgcaaggatgtgccgctacacaacattctcgaggggagacagccgaaaggctgcgtaacaaggcccgtaagggcagcaacacaggagagattgccatggca

SEQ ID NO: 294 - DNA, 1266 bp, unidentified
  misc_feature 1..1266: note = Ga0172378_10009394 JGI
  source 1..1266: mol_type = other DNA
atggtttatgtaattaacaaagacgggagtccgttaatgccttgcaaacctgtaatcgcaagattacttttaaagcagggtaaggcaaaatgtatcaagagaacgccttttacaatcaagttattgtatcaggcaacatcgtacactcaacatttgacattgggaattgatactggtagcggtacaatcggaactgcggtggttgataacgataaccaagtggtttacgtgtcgcaagttgaagtcagaaatgatattaacgacaaaatgacacagagggcgaagtacagggtgaacagacgaagcagaaaaaccagataccgaaaagcacgttggttaaacagggcaaacagtatcagaaaagaccgtttttcgcctacaatgacaagcaagattaattcacacttgaaggaagtcaagtttgtaaattcgatattaccgattagcaaaataattgttgaaacggcaacatttgatcctcatgccttaaaaaatcccgccgtcctacaaaacaagtggttgtatcaaaaaggcgtgaattacggttttgcaaacactaaggcgtatgtattggacagagataggcacaagtgtcaatattgcaaaggcaaaacaaaggattcaaggttgcatgttcatcatattacattcagacgaaacaaaggttccgataaacctgaaaaccttgtaactttatgcaagacttgtcatgacaagttgcacgccggggaaattatattaaagacatacggcaaaactaagaataatttaaaacatgctacgcagatgaatagtatacggattcaattattaaagtgcttgccggatgcgcaggaaacattcggatacataactaaggaacatcggcaattgatggacttgccgaaagaacattgttttgatgccgtggctatcgcttgtttgaacaatatctccaatgacgggttgttgagtgtagattttaaaagcgacaaaataattttaaagaagtgcataccagatggagattatcagcagacaaagggcgtgagaagcgaacaaaggattccgacgggtaaaatacaaggatttaggaagtttgacaaggttatgtatttaggaaaagagtatttcattaaaggtaggatgtcaacagggtatgcaatattgatggatattaacggtaataaggttgattcgaaacctattcctaagtttgacaagatgaaacgaataagatcgagaaaatcatggatggtgagcgacgcattcatccctcacttatag

SEQ ID NO: 295 - DNA, 302 bp, unidentified
  misc_feature 1..302: note = Ga0172378_10009394 JGI
  source 1..302: mol_type = other DNA
gtgaactaccaccacttaacctgaaggtttgaagtggtggcttctacggaagcctaagttcaccggactaagttggtagaaatatcagctacgttgaaacggttatgacacctacggttgacgcaccagaccgttgctctgtcgcatatgtttaagtagagccgaggtaaggttcggtgatatatgcatgtaagccgtttcaacattgtcgaagtgaagtcggattccttgcatggttacagtgcaaggatacgcacgacttaccgaaaggcaaagtattttctgaaaggattcacaacatg

SEQ ID NO: 296 - DNA, 447 bp, unidentified
  misc_feature 1..447: note = Ga0137388_10019024 JGI
  source 1..447: mol_type = other DNA
ttgagcaaagttttcgtcgtcgacacgaataagcagccacttgatccagtccatccaggacgagctcgtattttgcttaacactggaaaagcagcgatctacaagaagtttccattcacaattattctacaagaagaaatacatgatccagaggtaaaagagctgaggatcaagattgatctaggaagccgggtcacgggaattgcaattatcaatgatcagtcaggtgaagtgatttttgcagccgagctttcccatcgcggacaagcgattaagaacaagaacacgggcctgcatatcggacgagtattaacacgtgcaactggatcatttgatatgacaacgcgggctggacgtgtcggtaacgtcaattcccaatattgccgacctatccatcaaagggacggctatagttatcagaaaggtggcgggctctccgttcgctag

SEQ ID NO: 297 - DNA, 296 bp, unidentified
  misc_feature 1..296: note = Ga0137388_10019024 JGI
  source 1..296: mol_type = other DNA
atcatgaaccacccactgaaaagcgggagcttgtagtgacccgaaaggggaactacaaacccaacatgaccagactcagtgctagggcttgtctccagcactccgttaggagcgaaactaggtacgttgggatgcgcggccagtcccaacctctacggtagcaggttaaacatctctacagtggttaaggaagtgcttgctacgctaaaccgctccataacgttgtcgaggccaacatcacctgggaaaccagaggctcaatgaggagcaaatacaggagtatacacttgagcaaa

SEQ ID NO: 298 - DNA, 1146 bp, unidentified
  misc_feature 1..1146: note = Ga0126377_10033159 JGI
  source 1..1146: mol_type = other DNA
atgagaatagccgttttagacacagccaaaaaaactctggcgccgacgacgccgcgccgcgcccgattgctgttgaaatcgggcaaggccgcggtgttcaagcgctatccgttcacgatcattctcaagcgagagatcgaaaaccccaccctgcccgacctgaagttaaagattgatcccggctcgaaaacgaccggcgtcgcgatcgtcaaccaagaaagcggcgaggttgtcttcgcggccgagatcgagcatcgcgggcaagcgatcaaatccagactcgatgcgcggcgctcgcttcgccacggacgccgcgccagaaagacccgctatcggaaggctcgcttcgacaatcgaaggcggccggaaggctggcttccgccttcgctcgaaagccgcgtcgagaatgtccatacctggacgcgcaggctcattcgcgtgtatccgatcagtggcatcgcgatggaactcgtcaaattcgacacccagttgatacagaaccccgagatcgaaggaattgaatatcaacaaggcgagctccagggctttgagctgcgcgaatacgtgttgatcaaattcaatcacaaatgcgtctacgccggcgacgacagtccctgcgatcacgccctgaacgttgatcacatcatccccaggtcgcgcggcggctcgaaccgcgtcagtaatctcgtttgcgcctgccgcaagcacaatgaagagaaaaacaatctatcgctcgaagaatacgggcgcatgcgaggcaaagactttgcccatgtgaaggcgctggcaagagcgccgttgaaggatgccgcggccgtcaacgcgacgcgatgggcgctcttcaaccggctcaaatgcagggagttgccgatcggaacaggttcgggcggactcacgaagttcaatcggaggctgagaggattaccgaaggcgcattggatcgacgcggcttgtgtcggcaaggagacgcctgaaaagctcgacatatcaaacgttcacccgctccggatcaaggcgatggggcatggggcgcgtcagatgtgccgaaccgataagtacggcttcccgaaagcgcaccggacacacaagacgatgtttatgggatttcaaaccggcgacgtcgtgaaggctgacattccaggtgga

SEQ ID NO: 299 - DNA, 297 bp, unidentified
  misc_feature 1..297: note = Ga0126377_10033159 JGI
  source 1..297: mol_type = other DNA
atctgctacgccgcgagcatgagaatgcttacggcgggactcaacccgactaagcgtctctcgcaagagagcgtcgtgagcgtcacacacgtcgagctacgatctttgcgaataaatagtcactctgggatgcgacgccagtcccagactctgaggcttgcgattaaacaggcgacaaacgcgaagcccgtgtcgcaggcgaacaaaccgcaaaagatcattgtccaggcgaacatcacgtgacagcgatgtcacgccgaaatcgaaagatttccttttgaatatgagaatagccgt

SEQ ID NO: 300 - DNA, 1407 bp, unidentified
  misc_feature 1..1407: note = GENOME_ACESSION: mgm4581772.3 MG-RAST
  source 1..1407: mol_type = other DNA
atggccgtactagtgttggacaagcgcaagtgtccgctgatgccttgcaccgagaagcgtgcccggttgctactggatcgaggtcgggcggtggtagtgcgaattcacccgttcacgatccggttgaaggatcggatcggtggggccacccagccggtgcgactcaagatcgaccccgggtcgcagacaaccggcatggcgctggttcgagtggatagcgatggcaccaagcatgttctcttgctcgcagaactccgccaccgcagctatctcatcagcaagcaactgacccagcgccggtaccgtcgaaagcgtcgcagaagcaagctacggcatcggccagccagattcaaaaaccggtcccgcccacagggatggttgtccccaagccaacaacaccctgtcgacaacgtcatgacttgggtcgagcgattccgacgctgggcgccgatcaccgacatcattcgagaagtggcacggttcgacaggcactgccgggagaccctgggcatcgatgacatccggcagcaaaacgccccccagctcagaaccaccagtgtgcgagagcgcctactgcatctgcacgatggcacctgtgcctactgtgaagggctgtcaggtgaaactcgcctggaagtagagcatgtgcaaccacgaagccgaggtggcagtcagcgcctagcaaacctggtgatcagttgccggagatgcaacgaagacaagggtggccggaatgcggccgaatgggccgaggcattggccaggtctcgaagcaggctgggccagacgcgccatcgcaatgccatgctggtcaatgccggccagcgacctagcggtcgagaccctgcggcagtccatcgcaccagctcggcactatccggctacctgaaagcaacgggcctgcccttgtcttctggacgcggctggctaactcaggagaatcgtcgacgccttgggataccgaagacccatgcattggatgcagcctgcgtcggtctagtcgacagcctggtgggctggaggcggccgacccttggtatcacggccgcgggccgagggagctatcggcggacaaacgtggaccgtcacgggttcccgaggagctaccggccccggcgaaagatgtcacatgggtaccaaaccggtgaccacgtacgagccaccgtgccgaccggaaagaaggcgggcactcatgtcgggcgggtagcgatacgtgccggcaggcaggtggacatagtgacagccaccggacgtgtacagagcatcagttatcgccactgccgcctgatccagcgggccgacggttatgggtacgccactcttccctcaccacggatggaggaagccgggctagcgaagtgcaacgaacccgccctcctcaccaccctattcgttcgaccgaagtaa

SEQ ID NO: 301 - DNA, 291 bp, unidentified
  misc_feature 1..291: note = GENOME_ACESSION: mgm4581772.3 MG-RAST
  source 1..291: mol_type = other DNA
gcctactgccccgccgtgatcggcggagcctgtgaacaggctgggtgggccagggagagcggtacccaacccgctacgtcggcaacaggtcgttgcgatccactccggggtgcttcctcagccccggaccctggaaggtgaggtcatgctggtgaaaggcaaagcaccgaaggctgacaccgctgccgcaaggcaggagccagttgtcgacattcccgaggggagacggagcacttatgctccgcgtcacaagcgtccgtaagggcggagatcaggaggtatggcatggcc

SEQ ID NO: 302 - DNA, 1647 bp, Streptomyces sp.
  source 1..1647: isolate = SAT1; mol_type = other DNA
atgactacgtttcatacaggtgagcagacccaccctgccgtacttcctcagcggcaggctctggaacccacggctgcagacaaccccgggagctgggacgaaacgggccgtgagcgcatcacccgccagggtgatgcagccggtatggaacatgggcgaggggagaccgtacgcacgtcacctcccggcgtacggcgacaccccgacgctgccgcgtccgcggtagtgaagggaggagaggctgttcgtgagagcagcattccgcaggcaggagcgagtcaaccgagggcaggggcacaaatggtcgccgtcctcgacaggaacgggtgtccgctgatgccctgccatcccgctcgagcccgcagactcatggccggtggccgggcggtcgtagtgaaaaccgcaccgttcgtcatccgtctgaaagaccgcgttgcggagagctccgaggtatccggcgttgcggtacgcatcgaccccggttcgaagggtacgggcatcgccgtcaccgccgatgtcgagtgctccgaccggggcagcggtgaggtcacgacaagtcgccgggggctgcacgcaacggaactccagcaccgtggcgcacagatccacaagagcatgcgacagcgggcggatcaccgccgcaggcgacgcggcgcgaatctacgctaccgggcgccccgatttctcaaccggtcacgtcccaagggatggcttgccccgtccctgcagcaccgggtggacacgaccctgagtaccgtcgctcggctcacaagatggttcccggtcactgaactccatgtcgagcgtgctgctttcgacaccgcggcgtttggccttgatcgtggcggcccgaacagtgtggagtaccagcagggcgctctcgcgggatacgaggttcgccagtacctactggagaagtgggatcgctcctgcgcctactgcggagcgaagaacgtcccgctccagatcgaccacatccaccctcgcgctaccgggggctccgaccgcatcagtaacctgaccctcgcctgtgcttcctgcaatcaggacaaagccgcgcgtccggtggaggagttcctggccggcaggcccgtgcagttggcgcggctcctcgccggagcacagacgccactgcgggacgcggcagccatgaacgccacccgctggaagctttggcaggccctcgagagcctggggctgcctctgtccgcgtggtccggcggacggaccaagtacaaccggtcgatgcagggcctcgcgaagtcgcacacactcgatgccctcgcggtcggcgaggccggccccagcacccgggttgtccgataccccggcacagtactggtcacctcagcgtgtgggcgcggctcctacgcacgcacgcgctcggacaagcacggcttccccaggctctacctgccacgtcagaagcagcaccacggttttgcgactggcgatctcgtccgggcccacattccacgcggcaagtaccgaggtacacacaccggtcgcgttgctgtgcgtgcttccggcacccaccgcatctccatccctggcgggtacgccgacaccagccacagcaacctgcgccttcttcaacgaggcgacggatacgcctacaccatgaggaaggaggacgcgcggccttag

SEQ ID NO: 303 - DNA, 291 bp, Streptomyces sp.
  source 1..291: isolate = SAT1; mol_type = other DNA
gtcagccgctccccggccgaagaggccggggcccgcccgcccctagtgggcgagtccctggttgaccagcccgagtcatcggtgaacggaggtgttcgatgactacgtttcatacaggtgagcagacccaccctgccgtacttcctcagcggcaggctctggaacccacggctgcagacaaccccgggagctgggacgaaacgggccgtgagcgcatcacccgccagggtgatgcagccggtatggaacatgggcgaggggagaccgtacgcacgtcacctcccggcgtac

SEQ ID NO: 304 - DNA, 1440 bp, unidentified
  misc_feature 1..1440: note = GENOME_ACESSION: GCA_009843725.1_ASM984372v1_genomic
  source 1..1440: mol_type = other DNA
atgccgggtcaggctcgaaacggggcgaaccgcagcgcgggcggtcaggttgtgcgaggggagtccggcgcaagccgcgtcttcgtcctcgaccggtggggcgacccgctgatgccgtgccatccggcgcggacgaggacgcttctgaggaaggggcgcgccgtcgtggtgcgtctccatcccttcaccatgcgcctcagggacaggaccggagggaagacccaggaggtcggcctcgggatcgacccagggtcgaagaggacgggcattgcgcttgtccgtagcgacggcgaggtcctgtcccttgccgagatcgagcacaggggaaatagggtccggaaactgatgcttcggcgcgcggcatgtcgaaggcggcggcgatcagccagcctgagataccggaagaagcggttcctgaaccggcgctcggggagacggctcccgccctctcttcagtcgcgggcggacaacgtgctgtcctggtcggcacggttcagcaggcttgcgccagtgaccgggatccggtgcgagacggtgcgcttcgacatgcaggccatggacagccccggcatcgagggcgtggagtgccggcaggggacgctcgccggatacgacgccaaggagtgccttctggagaggtgggggcgcaaatgcgcctgctgcgacgcgtcaggcaaaccgctccagatcaaccacgcctggccgaaagccctgggcgggtcccgccgggtttcgaacctgacgctcgcctgtgcgtcctgcaacccggccaggggatcgcggtccgtggagaccttgctggccggccggcccgatcggttgcggaggatcctggctgaggccagggcgccgcttcatgacgccgccgcggtcaatgcagcccgtcgcgtccagttcgaggctctggagcgaacggggcctcctgtcatcggcttctcagggggacgaacgaaggtcaaccgggcgcggctggggatccccaagccgcatgcgctggacgcggcctgtgttggcgagacgtcttcgctttcgggctgggaccagcccgtgttcggaatcagggccatgggccgggggacccatgcacggacccgcgtcatgcgcttcggctttcccgtcggctgcctggcggcgcgaaagtccgagatgggcttccggacgggggacgtcgtgcgcgcggccgcgcccgcgggcacgcggcaaggccttcatgccgggcgcgtcgcggtgcgcgcctcgggctccttcaacgtccagacggtcagcggcaccgtccaggggatctcccgccggcaccgccgcatcgccgagcgcgatgacggttacggataccacatcgacgcgtcacggaagaaggggactgcgacgatgcacggaacacggaatcccgcattcctccccgcccggaggtgcagagtttcctgcgggtcggaccgatga

SEQ ID NO: 305 - DNA, 247 bp, unidentified
  misc_feature 1..247: note = GENOME_ACESSION: GCA_009843725.1_ASM984372v1_genomic
  source 1..247: mol_type = other DNA
gtcagcgacccctccctgaagggaggggcttgaggggcggaagccccgagagcccatgctgaccagcgcgagaaaggagaccatcatccaatctaccctgaaccatacgttgaagaccgaccctgggatgctgcctcagtcccaggctctcgaaggttcgcctgcagacatgccgggtcaggctcgaaacggggcgaaccgcagcgcgggcggtcaggttgtgcgaggggagtccggcgcaagccgc

SEQ ID NO: 306 - DNA, 540 bp, unidentified
  misc_feature 1..540: note = Ga0376441_00010 JGI
  source 1..540: mol_type = other DNA
atgcaaaaagtgtttgttttaaattcagagaaagaccccctgatgccctgccatccagcaagggccaggcaattgcttaggactaaacgagcaaaggtgtttcgcaggtatccttttgtcattattttaatcgcaaaaacaaccaatgcaattcaaccgattgagattaagttcgatcccgggagtagaacaacgggagtatgtgttggggaaacaggtgagaacgttttaatccagaaaaccacgttgccgatcttaatcaaggccatgggaagaggatccaggcaaatgtgtcgggttgatcaatttggatttccccggacaggcgcaaagtctgcaaaaaccgtcaaaggattccaaactggggaccttgtaaaggcaattgttaccaagggaaagaaaattggcatatatactggtcgagtagctgtacggacatctggtagtttcaacatcaagactggatcagaaacggtgcaagggattagttggaaatactgtaatctaattcaaaaaacggatggttatacttatgggtaa

SEQ ID NO: 307 - DNA, 278 bp, unidentified
  misc_feature 1..278: note = Ga0376441_00010 JGI
  source 1..278: mol_type = other DNA
gtcaactaccccgccctgaaggacggagcttgtagaaagctctcatgttgaccagcctacgaagtcttgaaacaaaggctacgttactgaagaatatataggtactttggaatgctcttccagttccaaacactacggataagtgttaaacaggtttaaggggttaagccggtgctcttatcaaacaaaccttcggataacattggcgaggaagtatttaccggcttaaacgccgagcgacaggtaactgtcaatttaaaggatgtttgatgcaaaaa

SEQ ID NO: 308 - DNA, 1290 bp, synthetic construct
  source 1..1290: mol_type = other DNA
atgttagtgtatgtattaaaacaaaacggacaaccttttatgccaacagaacgctttggcaaggttcgtagattattgaaagaaggaaaagcgaaggttgtccgtagagagccattcaccatcaagttgctttatgaatctgaaacagatgtggttcaggaatgttactgtggtgtagatacaggctcaaaatatgttggtgtagcggttgttggaaatgacaaggtgttgtaccaatctcaaacagaattaagaagcgacatcaaaaagaagatgggccgtagacgtggttttagaaaagtaagacgctcaagaaaaacacattacagaaaacccaggtttttaaatagaagaaattctatcaaaaaagatagacttccaccttcagtaaaacataaagttcaggctcacatagatgagatagagttctgtaaaaagattttacctgtttcagacttaattttagaggttagtcagttcgatatagctttgatgaaaaatcctagtttaatcaatgagagagtaaaacactggagctatcaacaaggtttcaactatggctattcgtctagaagaagtgcgattcttcatagagatggttatacttgtcagtgctgtggaaagaagaactgtagattagaggttcaccacattaaatttagaagtgatggtggtacagatgatgaagaaaatttgattactctgtgtgaagattgtcataaaggtattcatgcaggtactatagtcttgaacaagaaacctaagaagaataagaatttgaaatacgctactcacatgagcataattaggagttggttgttgaagaaatatccggacgctattgaaacctttggttttattacagcagaaaataggaatcacttaaaattagaaaaagaccattatatagacgcttgtgtaatcgcaagtggcggattagagttcaaaatgttagatgtgatttatagaaaaagacgtgttccggttcaagataggattttgacaaaaggtgttcgagatgaaagaaaaataccaactagcaaaattcatggatttaagagatacgacaaagttaaatatcttggagaaattcatttcattaaaggtagaaaaagtattggagcgtttgttttgatggatattgacaacaactctattgattttagagatagaggaggaaaacagaatccaccatataggtttatcaagagattaaacacgagaagaagtgttttatgtattaaagaaaaaatagaaagagaggtaaggcttattcctgtattaagctaa

SEQ ID NO: 309 - DNA, 332 bp, synthetic construct
  source 1..332: mol_type = other DNA
gtaaatatgcactaggttaaaaacctagtaccattaaggtacgattgtttacaagactaaggttagagaaatttaacctacgatagttagatgaaacacatacacaccctcggttgaatgctcaagactgaggctctgtgattactgattaagttgagttgagagtgctaaaagaactctgtgtcagtaatttcaaaactctaattatctttgtcgatgagaagaccgacaccaactttggtaacagaagttggttaggcgctacagttcgataagtactgtcttaaagagttaaacttgtcatcaacgaaaggaattgaagtgtgatgtta

SEQ ID NO: 310 - DNA, 1593 bp, unidentified
  misc_feature 1..1593: note = Ga0307374_10008841 JGI
  source 1..1593: mol_type = other DNA
gtggctacgttgcaagcaggcgagaagacccaccaagggatgcttcctcagtcccttgctctggaatccgcgccagcagacactcccaggggtgggcacgaaacggggcgcggaggcaggccgagacggcctgcaaccggcttgcaacttcgtcaagaggagactgccttgggccacaccgcccaagacggcgtcaccccccaacaggagaccgctcctggcaagggcgctggacggagcaatccgtcaaaccatgtgttcgtgctcgataagcatgggcatccacttatgccctgcaacgcggccagggccaggcaactgctcggcgcaggccgggcaagggtccaccggatcgccccgttcgtcatccggctcgtggaccgcgaacagggggcggcgacaactcagccgatccgccttgggatcgacccgggctccaagggcaccggattggccctctacaggatcgagagccccagccagtgtgaggtgcgccatgtgctcttcgggctggagctccagcaccgctcagggatcatccggaagcggataggccagcgggccgcgcaccgccgccggcgccgctcgtccaacctccgttatcggtcgccgcggttcgacaaccgcaccaccaagcagggctggctggcgcccagcctctactctcgcgtgcagcacatcgacagctggactgcgcggcttttgcggtgggccccaatcaccgggacggatctggaacttgtgcgcttcgacatgcagcagatgcagaacccggagatcagcggcgtggagtaccagcagggcaccctcgccggctacgaggcccgggagtacctgctggagaagtggggccggaagtgcgcctactgcgacgccgagaacgtccccctcaacctcgaccacgtggcgcccaagtctcgagacggctccgaccgggtctcgaacctgactcttgcctgcatcccctgcaaccaggcaaaggacaaccggccagtcgaggagttcctggcacatgacgccaagcggctgggtcgggtgaaggcccaactcaggtcgccgctccgcgacgccgcggctgtcaatgccacccgctgggccgtcaaggcgcgacttgaggcccttggcacgcctgtggcctgctggtctggagggcgaaccaagtggaatcgccaccggcttctcgtcgcgaagtctcacgtcgccgacgccgccgtctgtggggacgttcagggtgtgcgccatgctggagtcgtttatctggtggcagcggccactggccggggaagtcaccagcggacacgcaccgacgccttcggcttcgcgcgcctctacttgcctaaggtcaagcggttccacggcttcgccaccggcgacctcgtggtcgccgacgttccactcgggcgcaaggcctcaggacatcacaccggtcgggtcgcagtgcgtgcctctggctcgtttcgcgtcggaaccctggacgggatcaattggcaacactgtcgcttgctccagcgagccgacggctaccgctacacacaaggagccgctcctcctcccggccctgaacgaccgggtctccggaccggcgggatttga

SEQ ID NO: 311 - DNA, 314 bp, unidentified
  misc_feature 1..314: note = Ga0307374_10008841 JGI
  source 1..314: mol_type = other DNA
gtcaaccaccccgccctgaaggacgggcttgtgaggcggccgagccgccttccgggctctgctcgaagggaaacggttgaccagaccaagccgctgacaggaggtgtgacacaggtggctacgttgcaagcaggcgagaagacccaccaagggatgcttcctcagtcccttgctctggaatccgcgccagcagacactcccaggggtgggcacgaaacggggcgcggaggcaggccgagacggcctgcaaccggcttgcaacttcgtcaagaggagactgccttgggccacaccgcccaagacggcgtcacccc

SEQ ID NO: 312 - DNA, 1365 bp, unidentified
  misc_feature 1..1365: note = Ga0111052_100017 JGI
  source 1..1365: mol_type = other DNA
ttggatactgtagctgtaataagtgcatcaggcaaaaagctgatgccgaccaattcttacagagccagagggctcttaaaatcaaagagagctgtcatacacaaatacagacctgtatttaccattaaactggtagataggactaacgggtatacacagccgatagaatacaaatgtgatactggatatcaaaatatcggtatttccatttgttcagatacaaaagagttcgtcaacgagcaaagagatctgcttaaagacgaagtaaaaaagcatagcgacagccgtaaataccgcagaaccagacaaaatcgcttgcgttacagaaagaaacgattcaataaccgcaggggtatgattagcagagatgggtttgccccatctatccgcaacaaaagagacgtacatattcgtctgtatgaggagtattgcaaaatattcccaatcgcaaaagctatctttaaaatggggcagtttgatacgcaggtcttaaaagccatagaagctggacttccagtccctaaaggagcagattatcagaggggtgaacagtatggttatgccacgcttagagaagctgtatttgcaagagataactataaatgtatctgctgcgggaagtcagcaatcaaagatggggtaaaactaagaatccatcatatcggatatctcagtggggacagaagcaacagaatggcaaaccttggttctgtatgtgaaaactgtcatacgccaaagaaccataaacagggtggaaagttgtataacctaaaaccaaagctaaaagaactcaagggagcgacttttatgacgacggtccgctacagcatggtaaaaaatcttaaagctgcaacaccaaacgtagatatcaaagttacctatggagcagcaaccaagctcgccagaaaagatctcaatgttaggaaaacgcactctaacgatgcatactgtatgggagaatttcatccaaaacatcgaagcgactttaggcattacaagaagtgtcgacgtaataatcgtgtgttaagtaggttttatgatgcaaaatatcgtgatctcagagatggttctactaaaacaggctctcagttatcctgcggacgaacaaaccgaaagatctcaagacatataaagcttgatgaacgtatttatcgagctcacaagatctccaaggggcgtgtttctacaagaagacaacattactcattaagacctggagacaaggttttatacgatggaaaagtatacttcgtaaaaggagtacagagtaatgggaccagcatcaaattagcgaatggaaaagtttgcccattaaagaaagttaacatattgcagcactgcaacgcatgggcttttatttgctaa

SEQ ID NO: 313 - DNA, 310 bp, unidentified
  misc_feature 1..310: note = Ga0111052_100017 JGI
  source 1..310: mol_type = other DNA
gtcaacaaccaaccacttaggctaaagccttgaagtgggagcttttgtaaaaaagccctgttgattagcctaagcacttcgagtgctacgttaaagcagaatagataggtacgtcagaatgcttcacaagttctgacctctacggatatatattaaacatctctgacgggtaggagaagtgtgtatatcgaaaaacctgttattaacattggcgatgtgaaccactcccgtaagggaagaacccgacatcttcatggtcggaggcgtaagccaaatattttagaagaaggaggtatcagttttggatact

SEQ ID NO: 314 - DNA, 888 bp, unidentified
  misc_feature 1..888: note = Ga0210003_1012872 JGI
  source 1..888: mol_type = other DNA
atgcagaagttagggaaaaagctaaagaacgtacctatggatacttcacacgtccatagctctataagttcttctttaaacagagttcaaagactcagtgagaagaacatgtgctgttcccataacaatcccgaagtgaatcaacctcaatgtaaagaggggcagaacttgagagtatctaccaaagtttacatattgaatatgctaggtaatcctttaatgccatgtagtccgagaaaagcaaaaaaattattaaaagaagggaaagtagtagttgtcaaaagatttccattcacaatccaattgttaattccaacaggggaaacaaaacaaaaaataacattaggaattgattctgggtatatgaatattgggtttagtgcagtatcagaaaaagaggaattagtatctggtacagttaaattagatgaaagaacatcagaaagattaacagaacgtaggatgtatagaaaaattagaaggagcaaactttggtacaggaaatcaagatttttaaatcgctccaaaccaaaagactggcttcctccatctatacaaagaaaatatgatgcacatttgaatcttattaacagaattaagaagattattcctgtttctgaaacaattattgaagtagcaaatttcgatattcaaaaaattatgaaccctgatatttcaggaacaggttatcaacaaggttctctatatgaatatcagaatatcagaagttatttaatgaccagagaaaaaggaaaatgtcaactttgtggtaaggattttaaaggacagtcaagtcatatacatcactgtaaacaaaggaatgagaatggaagtaatagacctaaaaatcttgctattttacataaggcttgtcataaaaaactgcaa

SEQ ID NO: 315 - DNA, 266 bp, unidentified
  misc_feature 1..266: note = Ga0210003_1012872 JGI
  source 1..266: mol_type = other DNA
gtcaaataccacgcactaaagtacgtggcttgagtcgtgagactcaacgtaagagttgattagggggcttaaaggaatttatgcagaagttagggaaaaagctaaagaacgtacctatggatacttcacacgtccatagctctataagttcttctttaaacagagttcaaagactcagtgagaagaacatgtgctgttcccataacaatcccgaagtgaatcaacctcaatgtaaagaggggcagaacttgagagtatctaccaaa

SEQ ID NO: 316 - DNA, 720 bp, unidentified
  misc_feature 1..720: note = Ga0310695_10070301 JGI
  source 1..720: mol_type = other DNA
atggtctatgtactgagcgcatcagggaagcccctgatgcctacaaaacgcttcggacatgtaaggcgcatcctccgcggcggcagggcgaaagtcgtaagacgcacgccctttacgatacagctgacgtatgatggcacggcttacacccagcccatatccttgggagtcgacgccgggtcaaagcacattggtctctcggcgacaacggaaacgtctgtcctctacgaggcagacctggagctgaggaacgacatcacagggctcctctcagcgaggagggagtcgagacgttcaaggcgcagccgcaagacgcggtaccgcaagccgaggttttcacaccgcacaaagtcaaagcataagggatggctggcgccctctgttgagcagaaggtacagtcacacctgacagcggtaaggaaggcctgtaagatgctccctgtttcggagatcacggcagagacggcggcgttcgacacacagcttttaaaggcacaggaaaagggatttccgctcccggaaggagaaggctaccagcagggggaccagctcggctgctggaacgtaagggagtacgtactgttcagggacggtctcacctgccgctgctgcagggggaagtccaaagaccccgtactggaagtacaccatatacagagccgtaagaccggaggcgactcaccggacaacctggtgacgctgtgccgtacctgccataag

SEQ ID NO: 317 - DNA, 306 bp, unidentified
  misc_feature 1..306: note = Ga0310695_10070301 JGI
  source 1..306: mol_type = other DNA
gtcaactacccaccgcttaggcgctgatgcgccttgaagcgggggcttgaggagaaaggaaaagcgcttgctttatctttctcctgcaggcccggttgaccagcctgagtgcttcgggcactacgttaagagggtcacggtacccgtgggcgtacagcctaacctgcggctatgccgcccgtggttaaacagtcctgagggcaagggacagtgctgcgggcatgacaagcccccttaacattggcgcaggctgcactacagcgaaagctggcttactgactattgtcagttaaaggaggaacgatg

SEQ ID NO: 318 - DNA, 1344 bp, unidentified
  misc_feature 1..1344: note = Ga0137371_10000096 JGI
  source 1..1344: mol_type = other DNA
atggttttcgtgcttgatcgtcacaaaaagccgctgatgcccaccacacccaaacgagcgcgcctgctgctggctcgaggtcgggcggtcgtgcatcgcgtcagccctttcgtcattcgattacgcgaccgacgcgtcgaggagagtcggttgcaagaggtcgccctcaaaatcgatcctggcagcaagactaccggcatcgccctggctcgcgtggaagagggagaggttcatcacgcgctctttttggcggaagtggcacatcgagggcaccaggttcatgagaacaaagtcaggcaagctcaagcccgcagacgtcgcaggagtagcaacttgcgctaccgcgcaccccgtttcgaccaccggggtatccccgctggttggctggcaccctgcctgctctccagagttggcaacacgctcgcctggacgcacagactcacgcgctgggcacccctcacacgtcttgagatcgagcaggtgcgcttcgacacgcagttgcttcagaacccggaaatcgcgggcgtgcagtatcaacggggcgaactggcaggttgggaaacccgagcgtacctgctcctcaagtacgcgtatcagtgcgtctattgtggtaagacggattgccccttggagatcgaccatctcctgcctagaagcagagggggctccaaccgcctggcgaatctggtgctctgctgtcacgactgcaaccaggccaagggaaacaagacggccaccgagtttggacaccccgaggtcgaggcacaagccaaacgccccctcagcgatgcagcagccgtcaatgccacgcgcttcaagctggtggaggccttgcgggtctgtggacttcccatcggcacctggacaggtgggcggaccagatggaatcgggcgcgctttggcgtggagaagacgcacgcgttggatgccttgtgtgtgggagaactggcgggggtcagcataggcaggctcaaaacactggctgtcaaggcgaccggcagaggcgagcactgccgaaccaactgggacaggtacggcttcccgcgtggctacaagatgcggcagaaggtggtgcgaggctttcaaacgggggaccgagtgcgagcggtcgtgccagctcccctcaagacggcgggtacgcacattggacgcgtgcaggtgcgcaaaagcggctcgttctctgtgcaaacccgcgacaaggacctcgatgggatcggtgcgcactacatacatctgatccagaaagcagatgggtatgagtatgctctggcggagcaccaaaaccaaccaggaaggccacccctcccctctccaacaaggaacggccattcctccccgtcctga

SEQ ID NO: 319 - DNA, 333 bp, unidentified
  misc_feature 1..333: note = Ga0137371_10000096 JGI
  source 1..333: mol_type = other DNA
gtcacgaacccccggattcatccgggggcttgcagcgggggcgcgcgtcgtttgcgctgcaagccctatagtgtccagcctcagcgtccaatggcgtaggcagccacgtgcgggcgctccgttcgacaggtcagggtacagccggacgcttcttcaatctggcgcatctaccgtccagggttaaaaggtccgcaggggccagaccggtgccctgggcaagacaagcctgttgaaccttggcgagaagagatgcctgcgcacgccggtgcaggcgcgtcagaccgccccttacggggactcttccttctgggaagaggaaaggatgtccagatg

SEQ ID NO: 320 - DNA, 1227 bp, synthetic construct
  source 1..1227: mol_type = other DNA
atggtgtacgtacaagatataaatggtaaacctatgatgcctacaacaaggcatggtaaggttaggagattgcttaaagacaaaaaggcagtcgttgtaaacctatgtcctttcacgattaaattaacctacgaaacaacaaattacaaacaagaaattgtgttaggcgttgatactggcactaagcatgtaggaatttcagcaacaacaaaaagcaaagaactttatagtagtgaagtgatccttagaaatgatatcgttgatcttttggcaacaaggagagagctaagacggacaaggcgatcaagattaagatatagaaaatctcgttttgataatagggtaaaatcaaagcgtgaaggatgggtagcaccttcggtgaagtacaaaatagacgctcatattcgtgttattaataatgtttgctctatactaccaatatctcgtattattatcgaagtagctcaatttgatactcaaaagattaacaatcctgaaatatcaggtaaagaatatcaggagggaaatcaacttggtttttggaacgtaagggagtatgttttggcaagagatgggcataaatgctgtcattgtaaaggaaaatcgaaggataagatccttaatgttcatcatattgaatctcgtaaaataggaggggattctccgtcaaatcttgtaaccttgtgtgaaacctgtcacaaggaatatcacaaaggtaatatagatttaaaaatcaaaagaggtaaatctttacgtgatgcagctataatgggaattatgaaatggagactttatgagactttaaaatcaaaattttctaatatttcaatgacttttggttatattacgaaatacaatcgtattcgtaataacattgaaaaatcccatatctctgatgcctttgttatttcaaataactttaatgcaaaaaggttaggattcttatataagataaaattggttagaagacataatcgtcaaatacataaaatgaaaatccaaaaaggtggagtaaagagacttaatcaatctccttttgaggtttttggattccgtttgtttgatagagtgaaggttgacaataaattctattttatctatggaagacgtaggactggcagatttaacattcgtgatataaatggagaaaattcaaaggatgttacgcataaaaagttaaatttgtcaaggtgtaagcgttttatggtgaaaattgaaatgaaataa

SEQ ID NO: 321 - DNA, 269 bp, synthetic construct
  source 1..269: mol_type = other DNA
attaagttttatactatatcttgtgtgttgaatgaaagttcaattcggttattagcctaagccttgaaacagaggctacgttatttaagaatatatagttacctacggatgtttgcccaagtctgtaactctaaggtaagtgattaaacagtttttgtatttgagaaacagtgttgcttacaaaaacctttaataacattggcgatgggtactaacaggattttatcctgatttatgttgaataaacattaaaaacgtttgtagatatg

SEQ ID NO: 322 - DNA, 753 bp, unidentified
  misc_feature 1..753: note = Ga0129284_10010797 JGI
  source 1..753: mol_type = other DNA
atggtgtatgtaattaacaagaacggaaatcccttgatgccctgtaaggcagcaaaggccagaaagcttttgcgaagtggtaaagcgaaggttcttctcagaattccctttgtaattgctctgttgtgggattgtgaagaaaaggttcaatccgtgatcggtggaatcgatagtggcagcaaggtaattggttcggcagcagttggaaatggaaaagtgctgtatcaggcagagactattcttcgaggcgaggagatcaggaagaagatggacaagagaagaatgtatcgccgaaacagaagaggaagaaagacccgctaccgagaggctaaatttctcaatcgatccgcttccacaagaaagggcagactggcacccagcgtcaatcataaggtagaagcccatctgagagagaaaggatttatggaaaaaattctcccgatagcaaagtggttggtcgaggtggcccagtttgatattcacaggattaccaatccagaagtaaggggcgctggctatcaggatggcaacaagaagggcttttacaacgccaaggcctatgtgcttcacagggacgattataaatgccagaagtgcagggcaaagaattgcgccctccatgttcatcatataatttttcggagcaggggaggaaccaactctacagagaatctgatcaccctatgcgagagttgccacaaccgtttgcatgagggagaattcgagatcaaagcgaagagatcgaaaaccaga

SEQ ID NO: 323 - DNA, 293 bp, unidentified
  misc_feature 1..293: note = Ga0129284_10010797 JGI
  source 1..293: mol_type = other DNA
gtcaactaccccggcctgaaggccggagcttgtaaaagctcaagttgaccagagggctaacagaggatcttgttaatgttagcagccgttagaaccgagaaatacatacataccatcggatgccaccccagtccggcgctctatggcctcagattaaacagtcctgtgggtagggacagtgtgtggggcacaaaaaccggttctaactcttcgaggggaagtcggattccagtcgagactcctacccgactggatacgcatcactccaacatacaggaggtcctaaagacatg

SEQ ID NO: 324 - DNA, 1011 bp, synthetic construct
  source 1..1011: mol_type = other DNA
ctgactaggcgccggcttgccggagccgaaaggatagagaacctgtatgggctgcttttaaatatcttcggatgtttggaagtagttggtacagaaggcgtaagccatcccggcttgccgggaaaatataaacacaaaggagggcagcttatgtcagttgcagtcattagtaagacagtcgaaagattgatgccaacaagtgaatacagagcacgtaagttgctcaaatcaggcaaagcaataaaacatagttatcatccgtttaccatacagcttactgaaagggaaactggagatatccagctaatagagctttgtatggataccggatatatacatattggaatatctgtgaagtcaaagaagcacgaatatctggcagaacagattgacacgttaacagacgaaagaagcaagcatgatgcatgccgtatgtatcgaagacagagacggaacagaaagagataccgtcagccacgattcaataatagaaagaaagataaaggctggattgccccttctttggaacacaaaaagaaaatacatattcaggcaatttcacgcatcagcagagttatgcctgttactgatatcacaatggaaatgggaaattttgacacacagattctgaaatctaaagaggaagggagaccattaccacatggcgcagattatcagcacggcgaacgttacggcatcgcgacgcttcgcgaagcagttttttctcgtgatagttataaatgccaatgctgcggaagaacaataaaagacggagcaatactccatattcatcatattaaatacaggagccagggtggaaccaacagtatgtcaaatctggctacggtatgtgataaatgtcatacaccgaaaaatcacaagccaggaggaaaactatataattggaaaccaaagctttcatcctttaaaggagcaaccttcatgactgcgatacgatggcagctttacaatgaagttaaagctttattcccagatattgatattcacatt

SEQ ID NO: 325 - DNA, 475 bp, synthetic construct
  source 1..475: mol_type = other DNA
gtcaataacccgcgccagaggtaaacctcggacggggcttgcaaaagaataaattttcttatttccacttttgtttagtcccgttacagtttacggaaagctgttggctgtaaagccttattgattagccttagcagtaacgaaaccggccaagccaggtcaggtaaatctttaactgctacgttaccggtaaaataggcaccgtgggatgctcctcaagtctcacgctctgcggtatgctgttaaacatctcttagggtaggagaagtgcagtatgcgctaaactatcggataacattggcgatgaggacaaccgattctgactaggcgccggcttgccggagccgaaaggatagagaacctgtatgggctgcttttaaatatcttcggatgtttggaagtagttggtacagaaggcgtaagccatcccggcttgccgggaaaatataaacacaaaggagggcagcttatgtca

SEQ ID NO: 326 - DNA, 1020 bp, unidentified
  misc_feature 1..1020: note = Ga0315288_10027781 JGI
  source 1..1020: mol_type = other DNA
atgtttagagtgcctgtgataactggtgaccgcaaagcgttgatgcctacgcatcaagcgaatgcgagagtgcttataaagagcgctcgtactacaccgttttttcataaaggtattttttgcattcgtctcaataaatggttaagtgaaaatattcaacctatatcaataggcattgatcctggttccaaaaaggaagcatttactgtgatgtgcgaacatcacactctgctaaatattcaattggatgcggtgactcatgttaaagatgcagtggaagcgaaacgaaatgctcgtagagcaagacgctatcgcaacactccgtgcagaaaaccaagatacaaacaatgcagaagaaaaggatgggttcctccatcaaccaaggcaagatgggataataaaatcaatccaattattgcattgaaaaaagtttatcctatttccgttgtggttgccgaagatgtgtccgcaaggacaatgaagaatggcaaaagatggaacaagtctttcagtcctgtacagtgtggaaagcactatttcgttgaatctattaaatcacttaacttaaatttaactttgaaagaaggttgggaaacggctgctctacgagcaattaattctctacctaaatcaaagaataagatggataatacatgggaagcacattgcgttgactcttgggttctggcaagcgttccgcttgctcaaacaccaatagttaataaagcaatgatagttgcaaagccattgcggtttcaccgcagacaattgcatgtctttcaacccgccaaaggcggtattagaaagtcatatggatcaacacggagttttggacttcgtagaggttctattgttactcatccaaaatttggaaaatgtattgtaggaggttcgtccaaaggacgaatatctttacatagcatttccgacaataaacgattaacacagaattctaaaatagaagatattaaatttttgtgttataacaattggaattttaattttaatcccacccgctaa

SEQ ID NO: 327 - DNA, 297 bp, unidentified
  misc_feature 1..297: note = Ga0315288_10027781 JGI
  source 1..297: mol_type = other DNA
gtcaactacccactgattaaatattaatgggcttgtagagtgaaacgagttgctacgaggtagcactacgagattcaaagcagttgactagcctatgtcagtttgttcacgagcaatcgtgaatggatatgacgaactgaatcaactgactatagcaggtcgaattcgttccgaatgctcgtctagtttggagtagcgatgttggtcagtggcgaagatgtacacggagcgtaagctccatatacccaccgtaaggtggagattgctcgtaagagctaaaggagatgaatgtttaga

SEQ ID NO: 328 - DNA, 1248 bp, unidentified
  misc_feature 1..1248: note = Ga0123349_10013493 JGI
  source 1..1248: mol_type = other DNA
atgtcaaacatatgttatgtcgttgactatagtggtacaccattaagtccaaccaaagaagttaaagcatggtacatgatacgtaaaggtaaagcaatactcgtatctaaatatcctatggttattaaacttcttaaagttatacctaaagaagatatatgtaaagatgaaatacgaatgggtattgatgatgggccattacatacaggtatagcagtagtacaaaaaggtaaaaagtataataaagttctatttaaaggaaccatagaacatcgtaaagatgttaaaaagaaaatggaattaagaaaattttatagaaggaatagacggtctaataaaagacatagagaagaaagatttaataatagaacttctcataaaagatctaatatagctccttctattaaacaaaagaaacaagctaccattagagttattgataatattaataaatttattaatatagattcttattatctagaagatgtcaaaatagatattagatgtctatctgatgactatacaccatataaatgggaataccaaaagtctaataaattagataataacctaagaatagctactttaataagagataattatacatgcaaaatgtgtggtaaaaagaaaggtgtacttgaggtacatcatatattacctaaaagactatctggtacaaataatatagataatcttattacactatgccataaatgtcataagaaagtaacaaataaagaaactaaatatatatcttattttcataagatactaaataatgaagataaagatattaataaaaaacttaaatatgcttctcatgtaatggtagggaagagttatttacagaatagtattaaagatagaggtagtctatttttaactactggaggtgatactgctaataagagaagtgattggaaaatagaaaaaactcactctaatgatgctatatgtataacagatttaaaaccaagaagagacactatagatataaaagattggaatattaagccattaagaaagaagtatgataataaaaagaaaaacgataacttagttatatttcagcatagagattatgtttcatacaaaactaaagataataaattacatgaaggatatataaccgcgttatatccaaataaaaaattacttagttttaaaactaaaaataaaagttataataaaataagtagtaaaaaatgcaaattactttggcattttgataaaataatgtatttataa

SEQ ID NO: 329 - DNA, 347 bp, unidentified
  misc_feature 1..347: note = Ga0123349_10013493 JGI
  source 1..347: mol_type = other DNA
cctttaaatatattataaagtggacgcttagtctttatattatttattatttgacagctttctagcctaagtgagtgttgctggtgaaaatcacgctgcatgatgaactacgttgaatagtaaggtaaagacacaccctcggatgtaatcttcagtccgttgctctgtgagtgccaaccaagaaacaagtgctaacgtcctgcacggattatcatagctaaatactatgagtaacagggaaacacatgtcctctatttgacattggcaagaagaaaaatactcaatttgattgtaaatataataaattatataaactcttagaaagaaggtgatagaaatgtcaaac

SEQ ID NO: 330 - DNA, 1062 bp, unidentified
  misc_feature 1..1062: note = Ga0117908_1041818 JGI
  source 1..1062: mol_type = other DNA
atgcctactaagccagctaaggcaagaaagctggtagagggtggagtggctaagaaatgctggtcaaaggtaggtgtgttctacataacgatgttaatacctgtgggcgaaaaggtacaggatgtggcactggctattgacccaggcagcaaatacgacggctacgccgtatcaggctcaaaagatgcggcactcaaggcaatggcagtgatgcctcaaaaggtacacaagaaggtaacagaacgccggcagttaaggcgcagcagacgctatcggaataaacgacatggcaagtgcaaatttaacaatagaaagcgtaagcagggatggatagcaccaagccaattagctaaggtgcaattccgcatcaagataatacgcgaccttgttaaggtattccctatcaacttcattgcagtagaagatgtgcgatttaaccattacaagaaacggtggggcaagcacttttctactgttgagataggtaagagtatgctatatgacgagttagagaaacatggcaaggtaataaagtatgcaggctggcagacagcagaagcgaggcagtattggggtattaagaagtcaagtgctaaggatgctttgacacctgagtctcatgctaatgatgctcttgcgatgctcaatgaggtattcggggataatgtggataattcatgcatattcatggtatggcgtcgacttgagttttcaagacgctcattgcatcggcaaaattatcagaagggtggtactcgtccccgctttggcggaactaccaacggacattatctccgtaagggagatattgtctatggagagattggagacaggcaattggtgggatgggtatgtggattaccgacagacaggacaaaagccgttgctatagctgatgcttcaggtaaacgtttagcacagtgctctgagcaaaaggtgagactgatacgcagagccactggtatcacatgggaaagtcagtatataaccagggtccctatggcaatcatagtacaaaagccgattcaattagagtatacctctggcaattcctccccttag

SEQ ID NO: 331 - DNA, 292 bp, unidentified
  misc_feature 1..292: note = Ga0117908_1041818 JGI
  source 1..292: mol_type = other DNA
agtcaataacccctcctgaatcagagattcagaaggggcttgggggacacaggactcccgacgcaagtgttgactagagtgcttaggaactcctgagcagccgcactgcgatggtacatacgttagggtgtttcgctagctcttacctctataaactgtctcttgtgggcagtggggataaagccccgacatacttcgcagtcgcaatctcaaagcgacctttacttagaggaaagggcttgccctttcctccagcctgtatatcaggctccgagaggagacaatcatgaga

SEQ ID NO: 332 - DNA, 999 bp, unidentified
  misc_feature 1..999: note = Ga0395718_000631 JGI
  source 1..999: mol_type = other DNA
atgataccagtaattgataataaccagaaaccattaatgccttgctcagaaaaaagagcaaggaaaatgattgaatccaagaaagcaacaccattttggaagaaaggagtattttgtattagattgaatcaggaaccctcagcaaggaatcttcaaccaatagttgttgggattgatcctggatctaagaaggaaggatgtacagtaaagagcgaggctcatacattattaaatatcaatgcagatgccgtaacatgggtcaaattctcagttgaaacacgaagaatgataagaaaaaacagaaggcgtagaaaaacaccatgtcgcaaaagaagattaaataataattatcataagcctgggtggctggccccatcgaccagggccagatgggagtggaagattaggatatgtaattggcttgttaaaatgtatcccattactgattttgtaattgaagatattaaggcaaacagcaatgtgcataaagggttttctatacttgaaactagtaaaaagtggttttataaaaatcttacaaaattaggagtggtatatattagacaagggtgggaaactaaagagcttcgtgatagtcttggattatttaaagttaaggaaaaattagccgaagtatttgaagctcattgtgttgatagttgggtacttgccaactgtattgttggtggacattctaaaccagagaatactagattgttatgtataacaccaattagattacacagaagacaacttcattatctacagccagaaagaggtggttttagaaagacgtttggtggcactagtagttgtggtttgaaaagaggatcatattttataaacccaaagtgtggggctttttatcttggtggtgaaatgaatggtaaaataacaatgctttcaattattgatggtaagagaaaatctcaaaaaacaaatccattgaaagtaaaatttaaatcgtataatacatggaaaagacacgtaatagcataa

SEQ ID NO: 333 - DNA, 245 bp, unidentified
  misc_feature 1..245: note = Ga0395718_000631 JGI
  source 1..245: mol_type = other DNA
gttaattatccagaaatggatttgaaggagtaaaaaagccaactttgaaacaacaaattaaaatagaaactagagtggtcaagattcgcgtaaaccgggtcgtttgaaggcaactgaattaactaaccatggcaggttgaatgatattgaggatgcctccctagtcttcattctctcagttattcagtctcgaagggaagtataatcaaggtgcgtaagcacatttctaggaaataatgatacca

SEQ ID NO: 334 - DNA, 1350 bp, unidentified
  misc_feature 1..1350: note = Ga0187860_1009162 JGI
  source 1..1350: mol_type = other DNA
atgcagaagttaagacagagaactaaaaagaacacacctacggatactccacaagtccgtagcaactgtgatcagttattaaacagagaccaaagtctcagtgtaactgatttaaaaacctgttttaacaatcccgaagtggatctacgccaacaacatagtggcgagcttaaagctaaggtctatgtattaaataatgatagtacaccattaatgccgtgtagtccatgtaaagctagaaaattgttaaaaagtaaaaaagctgcagtaattaaattatatcccttcacaatcaaattgacttatgaaagtgaatttcatgttcaagtcattaaattaggcattgatagtggttataaaaacattggtttttctgccattactgaaaatgaagaattattcggaggtgaattaattatagatgataaaactagtgaaagattaagtgacaaaagtatgtatcgtagacttagaaggagaaaactttggtatcgtaagcaaagatttctaaatcgcaaaagaatgtttggatttttaaatcccagtatacaaagacgttataatacacacataaaattaatagataaaattaaaaaacttttaccaatttccgaaataattattgaagtgtctaattttaatattgctaaaatagaaaatcctgatattaagggaattgaatatcaagagggaaatatgtatggttatcaaagcataagaagttatttaatggcaagagaagaaggaaattgtcaattatgtggtaaagacattaaaaataaatcaagccatattcatcatataattcctagaagtaggggtggaacaaatcgtcctaaaaatcttgcaatacttcatgaagattgccatgaaaaattacacaaacaaaatttattttatttattaaaaaaatcaaaacaatataaatcagaaatttttatgtcaattataaataaaagagttcaacaagatattccaaatttaaaaattacttatggttatattacttggattaatagaattaagttaagtttagagaaatctcatcataatgatgcttttataattgcgggaggaggtactaatcaaattagaattaaaccaattattataatacaaaaacatagaaataatagaaaacttcaaacacaaagaaaaggattaaaacgaggtattagaaaagaaaaatataaaattcaaccattagatttattttggattaataataaaaaatttatttctaaaggtatgtgccataatggagaacgagtgatgataaataaaaatgaaagttttttacttaaaaaagttgaaaaaatatttcattttggcacttttgtttttaattaa

SEQ ID NO: 335 - DNA, 260 bp, unidentified
  misc_feature 1..260: note = Ga0187860_1009162 JGI
  source 1..260: mol_type = other DNA
atcaattgtcaacgaatgttgattcaaatcgtgaggtttgaggtaagtgttgattagggagcttaaaaattaaattttatgcagaagttaagacagagaactaaaaagaacacacctacggatactccacaagtccgtagcaactgtgatcagttattaaacagagaccaaagtctcagtgtaactgatttaaaaacctgttttaacaatcccgaagtggatctacgccaacaacatagtggcgagcttaaagctaaggt

SEQ ID NO: 336 - DNA, 1527 bp, unidentified
  misc_feature 1..1527: note = Ga0074046_10018987 JGI
  source 1..1527: mol_type = other DNA
atgcaatctacgttgaaatgcaagtcaaagacccactccggagtgcttcctcagctccggaccctggaagtcttggttgacgttacgggaaaggtaaagcccggcacgatcgagacgggttcgctacgcgcggacgaggctggctttcaacatggtcgaggggagagtccgcaaggaccgtcaccttctccgcaaagagaagagaagagcggggtaacccgcgtttttgtgttgtcgaaggacggcaggccgctaatgccatgccacgcggccagagcccgagaactgctaaggaaggggagggcggtcattgtgcgccgctacccgtttgttattcgccttaaaaacaacccgaaccaacccacaacgcagcctattactatcaaacttgatcccggagcagaaacgaccgggatcgcacttgtgagactaacttcatctgctcacatcgttttgcacctgtccgaactgacgcatcggggcgcaaggattagagagaacctcgatcagcggcggagtttcagggctaatcgacgaaggcgcaaaactcggtatcgcgcatcgagattcaataaccggaccaggcgtgaagggtggctggcgccaagtctgcaatcacgggtagacaacgtgacttcatgggttgcgcgttaccgatgctgggcgccgattacggcgatcgtcattgagacggtccgctttgatacgcagaagcttatcaatcctgaaatatcgggtgtcgagtaccaacagggcacattgttttcctacgagcttagagagtatctgctggaaaaattcgagcgtacgtgcgcctactgcggaaggacgaacgtgccgcttgaaatcgaccacgtgcatccgcgttccagaggtgggaccatgagccctaccaaccttgtcctggcgtgccacgggtgcaaccaggctaaagggaatcagttggtagaagactttctggctgaggagccagaacgcctgaagcgtatcaaaagtcagctcaaaagcccacttaaagcaaccgcagctgtaaacgccacgcgcgcaaaaatcctgagcggactattcaagacgaagctacccgtagaaatagcaaccgggggcaagaccaagttcaaccgggctcgtctctccatcccgaaaatgcacgccctggacgcggcatgtacaggtgatacgccagaattgctgggatggaatatgcccgtgctggctattaaagccggcggaaggggctcgtatcagcggacgcagctggacaagtacggtttcccaagaggctacatgatccggcagaaaaaagccaaaggctttcagaccggcgacatcgttcgagcatcgattgccaaaggcaaaaaggcaggcgtgcatgtcggacgcgtcgcgatccgggcgagcggttcattcaacatccaaaccctcaccaccaccattcaaggcatcggctacaaaaattgtcgtctgatccagcgagcggacggctacaactactgcaataacaaggacagcgattcatcccacggctga

SEQ ID NO: 337 - DNA, 275 bp, unidentified
  misc_feature 1..275: note = Ga0074046_10018987 JGI
  source 1..275: mol_type = other DNA
gtcaactacccacgactaaaagccgtgggcttgtagaaatacgagccgacggttgaccagacccagaaagcagaaatgcaatctacgttgaaatgcaagtcaaagacccactccggagtgcttcctcagctccggaccctggaagtcttggttgacgttacgggaaaggtaaagcccggcacgatcgagacgggttcgctacgcgcggacgaggctggctttcaacatggtcgaggggagagtccgcaaggaccgtcaccttctccgcaaagaga

SEQ ID NO: 338 - DNA, 1500 bp, unidentified
  misc_feature 1..1500: note = Ga0307380_10077270 JGI
  source 1..1500: mol_type = other DNA
atgatttacgtacagaacgcagacggaacgccgttaatgccgacgacacgggcaggatatgtccgccggttattgaagaagaaagaagctattgttatgtctagaaaaccatttgttgtgaggttagcgcagcagacacatcaagactgtcaaccccttattttggggatagaccctgggatgacgattgggtttgccgtgatacacgataacggggatcctcttttactcggagagctaaccacgcggtcagcggaaatccctgcactaatggaagaacgacgcatgcatagaatggcacgccaccgctatcgacgaatgagaaccgtcaggcgggcaaaaaaggcgggaacgatatatgacggagagcgcgaattccaactcccagggacaaaccctgacggtgacccgctcggttcgcttcattgccatgcgataaagccgaggttagcgcggttttctaaccggacacgaccggacggatggctaacaccaacggcgtcgcatttgcgggcaacgcatatccgacttgttgattatctctgttcgattttgccaatatctcggattgttattgaatacgctgcctttgaccaacagaaacttgataccccggacatatcagggaaggggtatcaacaaggtcaactcttgggatttgaaaacgtcaagcaatacgttctggagcgtgatggacacctgtgccaattatgtaaaaagaaatcacaggtatttctccacgttcaccatgtaatttggcggagtcaagggggcgcgaatacgcataaaaaccttgtgacgctctgtgacggatgccacgacaaggttcatacatcacaaaaaacaaacacaatgcttcaagaaaaaatgccggggatacgcaaacgaaagatgaagacaacgctcatcaatacgattatgccacatttttatcggtgggtagaatggaaacacgatgtcgggcgaacgtatggattcctgacaaaacacgtcagaaaagagtctgggcttgacaaaacacatgcccttgatgcctatattatcgcacttcgtggggcaccaacgacggggcgcatcaatatggatgttaaaacatttcccgtgatgtatgggaaacaatatcgtcgccataatcggcaagagattacacgacaaccagatcggaaatattataatgggaaaacgtgtgttgcgaaaaaccgggcaaaacgcgagtcacagcatgacgacagtctaactgaaatacgtcaacaattcggggagtcatatgtttctgcactgagggtcgtcaagggaacccatgctaaaaaaagtgggtttactctggtgcagagaggagataaagtcgatattggtggacatgtaaaagtcgtcagagggtttgggagctatgggacaagattactgattgagggcgaagggaagacaccaactccaacccgaaacgcctctcttcttttaaaaaacacaggcattgtgtggggggaataacatggaaaa

SEQ ID NO: 339 - DNA, 376 bp, unidentified
  misc_feature 1..376: note = Ga0307380_10077270 JGI
  source 1..376: mol_type = other DNA
attgacacattacttcatctcgcgcgcgtgcacgggatgccataacaattgagtaaaagaaggagtaaacactatgtcgcttcatctcgcgcgcgtgcacgggatgccatcagcaacattgacaccaggcgcgagcttgccagagcttcatctcgcgcgcgtgcacgggatgccatcaataaattatcatgaagatctgagtaaatccaagcttcatctcgcgcgcgtgcacgggatgccatagcgtgcgcgggatgaagacaggatagacagataccagtaacaccctgtggtgagccgagctgcaggccctgtgcaaatccggtatctaatccacggcaacctactccgcttcggcggagccttataggagatt

SEQ ID NO: 340 - DNA, 924 bp, unidentified
  misc_feature 1..924: note = Ga0209647_1007495 JGI
  source 1..924: mol_type = other DNA
atgtctgtctatgtaaaaaatcatgatggagcagcactgatgccctgcacagaggcaaaagcacgcaagttgttagaggcagggaaagcaaagattgtggactatcgtcctttcacgatccaactcagctggcagtgtgagggacacgttcaggaagtcacgtgtgggattgataaaggcagcagtatcacaggccttgcctgcgtgggcaatggtgtggtcttgcttgccgccgagatccagcatcgtagagatgtgaaagacaaaatggaggatcgacgggatcgacgcaaaagccgcagagcatgtcgctggtatcggcctgcacgctttctcaatcgtggaagtcacctacggagcggacggttgcccccttcgatcagaaccaatgtggaggaagtcattcgtgtggtcaagcttcttcctcttccgatcagttctcttgtcatcgaggacgtccaggtggatattgctcgtttgaacaaccccgaactcaagggaagtcagtaccaagatccgacgcgattggatgagaatttgcgcatggcctgtttgatgcgtgatggttatcagtgtcagcactgcggtcagagtgccagaaaactggaagcccatcatctcatcttccgtgctgatggcggcaaagacactctgaccaatctgttgacgctttgtgagcggtgccatcaccaactgcacaagggcaaaatcacgctcaaggtaacgggagtaagtggtcatctggaccagattgctcaacggactatgcaggggaaaacacatctatatacaactttgaggacgtttgctcctttgaccaccgtgtttggctatgaaacatccacgtaccgtaagtaccggagtttgccgaaaacgcatattattgaccattgtgtatcgcaacccttgggactggcgaagtag

SEQ ID NO: 341 - DNA, 242 bp, unidentified
  misc_feature 1..242: note = Ga0209647_1007495 JGI
  source 1..242: mol_type = other DNA
gatcatagttgctaaaagtatggtgttttcggacatcctattcaaggaactaccagcgggcctcttcggaggcagcagtttgtcaggtcatcacaccctgggatgttcgttccagtcccaggctctgtggttccggtctaagggtagccgaaaggcgaaagtgatcggagcatgacaagcctgatgaacaatcgcgaggagcaattcactcttgacagaggagggcttatagctagatgtct

SEQ ID NO: 342 - DNA, 1296 bp, unidentified
  source 1..1296: mol_type = other DNA; note = Human gut metagenome
atgccaaacaaagtgtatgtcatcaacaagcacgggcgtccgctgatgccctgcacaccggcgaaggcccgtcatcttctggatgcgggcaaggcaaaagtgagacacagaacaccatttaccattcagctgctctacggcagtaccggctatacgcaggaggtcatcctcggtgtggacgccggcagcaaaaccattggcctttcagctgccaccgaaacggaggaactgttctccgcagaggccaagccgcgcaacgatgtagtcgagctgatgtccgcacgcaggcagttccgccgtgcgcggcgcaatcgtaccacccgatatcgcaagccacgcttcgacaatcgcgtgcggagcaagcacaaaggctggctcgcaccctccgtggaggtcaagattcaggagcacatgaccgccatccggcgtgcctgcgccatcctgcctgtcagcaaggtggtcgtggagaccgccgagttcgacttgcagctcctcaaggccgttgcggaagggaagcctgttccgcagggcgaggactaccagaagggcgagatgtacggccactacaacgtgcgccagtacgtcctgtggcgcgacagctatacctgctgcatctgcggggtgcatggctccgtcaggaagggcgtcccgctccatgtgcatcatcttgagagccgcagggtaggcggtgacgctccgggcaatctggggacgctctgtaccgcctgtcacgataagctccacaagggcattatcatggcagcggacatcaagaagcgcaagcgccgctccacccgcgacgcgaccttcatgggcatcatgcgcatgacgctgctgcggaggctttgggagcagcttcctgtccccgttgtggagaccaggggctacatcaccaaagttacgcgggagaagctgctggtgctgccgaagagccatgccaacgacgcgctggcaatcgcgcacggcccgcagggctttcgcgcagaatatctgccaaatatccgtcaggcggaccgactttacaccatccgccctgtgagacatcacaaccgtcagctgcacaaggcgaccatcctgaagggcggtgtgcggaaggccaatcaggcagagaagtacatctgcggcttccgcctctacgacaaggtactctacaacggtatcgagtgctttgtctgggggagacgtaccagcggttccttcctactgcggcagctcaacggagaaaaggtcaaagacggcgtgagctacaaacacttaaaactattggaacgcagccaaagttatttggttgcatag

SEQ ID NO: 343 - DNA, 304 bp, unidentified
  source 1..304: mol_type = other DNA; note = Human gut metagenome
gtcaataacccccaccaaatctaatgatttggagggggcttgcgagaaaacgtaagcccagattgactaccctaagcattacgaatgctacgttactcaagaatgtatgtataggcaccggcgggcgtgaatccgaacctgccgcactgcggtgtgtgattaaaagctctgagggtaaggagcggtggtgcacacgaaaaccttgagataacattgggtacggatacctgacggccgaaaggccgcgtggctttttcgttagccacaatcaaagaagaaggaggaaggcatcatgccaaacaaa

SEQ ID NO: 344 - DNA, 972 bp, unidentified
  misc_feature 1..972: note = Ga0070698_100018796 JGI
  source 1..972: mol_type = other DNA
atgtcgttcgtgttggtcgtcgatcaggagcgcaagccgctcgctccggtgcatccaggccgtgcccgcttgctgctgaacgcggcgaaagcggcggtgctgcggcgctaccccttcaccatcattctcaagaccgtcgtgcccgctgcccagcccgactcactccgcctcaagattgacccgggctccaagacaacaggcatcgccgtggtccacgacgccaccggacaggtggtgtggaccgcggagctcgcccatcgtggcgagcaggtcacggaacgcctcacgcagcgccacgcctgtcgtcggtctcggcgtcaacgccacacgcgctaccgcccggcgcgctttgccaaccgcgggcgacgggagggctggttgcccccctcgctggagagtcgcatcgccaatgtgctcacctgggtgcagcgattgcgtcactctgcgcccatcgacgccatcagcttggaactggtgaaatttgacacgcaactgctgcagaacgccgagatcagtggggtggagtatcaacaggggactctggcggggtacgaagtgcgggagtatctcctcgagaagtggggcaggaagtgcgcgcactgtggcgcgaccgaccgaccgctgcaagtcgagcatatcacgccgcaggcgcgccacggctccgatcgggtctccaacctcaccctggcctgcaagacttgcaatgacgccaaggggaagcgcacggcggaggagtttgggtatccccagatccaggcgcaggcaaagcagccgttgcgtgacgcggcggcggtgaatgcgacgcgctgggcgctcttccaccggctcagtgcgctgggattgcccctcgagacggggacgggaggacgcacgaagtggaaccgcacccggcgtgatctgcccaaggcgcattggactgacgccgcctgtgtgggcgccagcacgcctgctatactggacatgcgcggtgtt

SEQ ID NO: 345 - DNA, 275 bp, unidentified
  misc_feature 1..275: note = Ga0070698_100018796 JGI
  source 1..275: mol_type = other DNA
gttagcgaccccagccagaaatggcggggcttgaacgagccccgatgctgaccagtcccctggcagttgccaggagccgttggcgaggagtgtcaaagttcacaccctgggatggcatctcagtcccaggcgctgcaatcggttggttaaacaggttgatggggtagaacagccagtgccgaccgaagatggccgctcgccaactcggacgagggaatccttacccgcgtcaagcggaggcgcgcaagcgcacgaaggagtcggagatgtcgttc

SEQ ID NO: 346 - DNA, 1323 bp, Tepidimonas sp.
  source 1..1323: mol_type = other DNA
atggctgtacttgtattggataaacgcaaacgcccgctgatgccatgctcagagaagcgggcgcggcttttgctggagcgcggtcgggcgcgggtgcattgcatggttccgttcaccattcgactggtggaccgtcgaatcgaagacagtgtgttgcaacccctgcgcgtcaaaatcgaccccggtagccaaaccacgggtattgcgctggttcgggatcaggacgatgtggacgtggacactggcgaggtgaagaaggtggcgcatgtcgtgctgttggccgaacttaagcatcgcgggcagacgatccgggatgcgctcacgcagcgccgcgcgtttcgtcgtcggcggcgcagctccaacctgtgctaccgtgctccacgttttgataaccgtgtgcgcaaggctggctggttgccgcccagtctgcaacatcgggtggatacgatcatggcctgggtgaatcgactcaggcgatgggtgccggtcacggcgataaaccaggaactcgtgcgtttcgacactcaggcgttgcaaaaccccgagatcggcggtgttgaataccagcaaggcacactagccgggtacgaagtccgggaatatctgctggagaagtggggccggaagtgcgcgtattgcgatgcgaaggatgttccgcttgaaatcgaccatatccttcctcgtagccggggcggtagcgaccgggtgagcaatcttgtcatcgcctgtcacgactgcaaccgggccaaaggcaatatgcctgtggaacggtttctggcgaaacaaccagagcgcatccgaaaaatactggcccaggccaaggcgcccctcagggacgccgcagccgtcaacagcactcgttgggcattgttcaacgcgctgaaggcgactggcttaccggtagagagcggcaccggtggcaggacgaagttcaaccgcacacggctgaatatccccaaggggcatgctttggacgccgcctgtgtcggaaatgtggacgacgttcaggaatggcaaaagcccgtactttgcatcaaggcgacgggtcgaggaagctatcagcgcaccaggctggatcggtttggcttcccgcggagctacctgacacggaacaaaagcgcctttggctttcagacgggcgacagcgtgaaagccgtggtaccctcgggcaagaggacaggcagatatcgaggccgcgtagccattcgcgctagcggaagtttcaacatccagacgccgcaaggcgtcgttcagggcatccattaccgtttctgttcgctgatccagcgggcggacgggtatgggtattcgtgggcaagatag

SEQ ID NO: 347 - DNA, 289 bp, Tepidimonas sp.
  source 1..289: mol_type = other DNA
gtcaactaccccgcccttcagggcggagcttgcgatagcaggctcggttgatcagggaaagcggtaaccaagccgcttgcgtcggcaacaggtcgtcaagacccactccgggatgcttcctcagtcccggacactggaaggttgggatcatgctggcgaaaggtaaagcgccgaaggttccaaccgcctcgcaagagggagccggttgccgacattcccgaggggagatggggccgcaaggctccgcgtaacaagtcccgtaagggataacaggaggtacaacatggct

SEQ ID NO: 348 - DNA, 1398 bp, unidentified
  source 1..1398: mol_type = other DNA; note = Human gut metagenome
atgagcacttgcgtttgtgttctcggcaacaatggtgaacgcttaatgcctaccttccgtcttggcaaggtacgccgactcttgaaagacggaaaagcaaaaatcgttaagcatcatccttttactattcaactgctgtatgacagcaaaacaaacacacaacccatcgaaatctgcgaggatgtgggctacaactacatcggcatcagcgtgaaaagcgaatcccacgaatatgtgtctgcgcagtatgatacattacaggatgagaaagcctgccacgacagttgtcgtaagtatcgccgtacccgcagaaacagactgcgttaccgtaaaccgcgcttcgataaccgcaagcgcagcgaaggttggcttgctccttctttgaggcataagaaagaactcaatgtcaacgttgtcaagatgtattgtgcagtaatgcccattacgcatgcaacggttgaagttggttcttttgacacaatgttgctgcaagccatccagaaaggcaaatcaaaaccggaaggtgtagactaccagaaaggtccccgctacaacttggcaaccttgcgtgaggcagtgttctaccgtgataattacacctgccaagtttgtggacgcaaaatcgcggatggtgccattttacatatgcaccacatgttttattggaaaggaagacacggctaccagcttgatgagttggttacagcgtgtgaaaaatgccacacgccagcaaatcatcaaaaaggtggcaagctctacggatttggcgaagataaagaatttgccaatctttcaggtgcagcatttatgaacgctgttcgctggcagatagtaaatgcattgtacgccacatacggtaaagaatttgtaaccatcacttatggcgctatgacaaaagaaaagcgtatcgcgcttcatcttgaaaagagtcataacaacgatgcgtatgcaatgggcagctttcatccagttaaccgctgcgcgtttgaacattatgaaaagatgaaacgcaataaccgcattctcgaaaagttttatgactcgcagtacattgacactcgcactggtgaactgactaacggcaaaagcttattcaacggtagaatcagccgcagccataaaaaggattccgagaacctgcacaagtaccgtggaaagaggatttgtaaagggcaccgcgctctacgccgaaaaaagttggccctcaatcccggagatttagtttctctcaacggagaaattcttgttgtccatggcactcataccaataaaaagggtgctgtaaatgtagaattcaaagcacccgcaaaaaacggtcaaaaatccgcgagccttaaaaaactcaaaattgtaaaagcagcagattccatacatcccgcatgggaaaaagtatcttaa

SEQ ID NO: 349 - DNA, 324 bp, unidentified
  source 1..324: mol_type = other DNA; note = Human gut metagenome
gtcaacaaccccgcctaagccggttcgccggttatagacggggcttgcggggcaacccgtaagcccagttgattagcctaagtctgctgctccggcggcaggaaactacgttgtgtactaataatataggcaccttactcatgctccacaagtggtgagctctgcggatgtttgttaaaaatctctgagggtaggagacgtgcaaacatcataccgaaaggtaaaacagtacaacaacattggcgaagtggaccacagggcgcaagccctgacttatagttttattactgttttacgaaaggagtgccttgcatgagcacttgc

SEQ ID NO: 350 - DNA, 1158 bp, unidentified
  misc_feature 1..1158: note = Ga0190367_1011244 JGI
  source 1..1158: mol_type = other DNA
atgtcacccgggctgagacccggcggggtaatccccaaggtgattgatatgggaaaggggaggagtgggaagggcactgtgaagagagtaccggtagttgatgcgagagggtttccattgatgcctacgacgccagtaagagcacggcgaatgttgaaagaaggggaggcagtagcgagaaggaacaagttgggcattttctatattcagttgaagcgcgctgtcgatccggtgccgaaagaagtgcaagaaagaacgcagccgatagcagcgtccgtggatctgggttcttcctttgctggtctttcagtggtagggactaaggacacgattctcaacataatgacggagccagtgaattgggtggaagatgctctaaggaagcggcgagagatgagaagattgagaagataccgcaagtgcaggcgtcggaagaagcgtttcgacaatcgtaagagaccagagggatgggttccaccatcaacgaaggcgagatgggatacgtacctaaggataatagaccatcttaggaaaatagtaccgatcacgcatgtcggcgtagaggagggcaaagcgaggacaaagaagggacagaaaagatggaacaataacttttcccctttacagaacggcagaaactacttcattaaagagctgcaaaagagaggcttgagtgtgactttgcttccagcgcgagaggttgcgaggctgagaaagaagcatggtttgacaaaggtaaaagataaagccgagaagagtttttactcacactgcgtggatgcgtgggttatatcagcttggataacaggtgctgcgacgccgaactgtcttgatatctggtacgctgttcctttaaggtttcacaggaggcagttgcacgggttaaagccgtcaaaagggggagtgagaaagaggtatggtggtacaagatctctcggcttcaagagggggacgctggtgaaatctgggtacgggctgtgctacatcggcgggttcgacgagaaaaggaaaaggctgagtttgcacgacgttaagacggggaagagaacaacaaaagctgccaaacccgacgacatcagagttctaacttctgtcagcttcaggagtttttacattcccgcaattcccccgcaagcttgcggcacccttgcggggtga

SEQ ID NO: 351 - DNA, 306 bp, unidentified
  misc_feature 1..306: note = Ga0190367_1011244 JGI
  source 1..306: mol_type = other DNA
gtcaacgaccctgggctaaagcttggcttgggttggcgggcccaagggccgaagaggcttcgttgactagcctcagtcccgcccgaccgaggcggggctacgccccgcgggctacaaggacggtggggtgctcccccagcctcacccgctccggcagaaccgctgaatgccgtggtgggcggacgctcacctaagcctgcggggcattggcgagggggaatgtcacccgggctgagacccggcggggtaatccccaaggtgattgatatgggaaaggggaggagtgggaagggcactgtgaagaga

SEQ ID NO: 352 - DNA, 1287 bp, Azohydromonas sp.
  source 1..1287: mol_type = other DNA
atgtattccgagaactctgtgttcgtgctggatgcggcaaggcggcccctttcgccttgccgcccagcgcaggctcgccgactcctgcgcgacgggaaggccgcagtgctgcgccgctacccgttcaccatcatcctcaccgaagaaaagccgcaggctgacccgaagccgctggcgttcaagatcgacccgggctccaaggcgaccggcctggcgctgctggacaaggcgggccgcgtggtgttcgcagccgagttggagcatcgcggcgagtcgatcaagaaggggctggacgaccggcgcatgtaccggcgcaaccgccgcagccgcaagacccgctaccgcgccccgcgctttgacaaccggcgccgcgcgaacggttggctgccgccatccctgcaacaccgcgtggacacgaccatgacctgggtgcggcgcatttggagcagttccaacgtcgcgcagctgtcggttgagcgcgtcaagttcgacacgcaggcgatgcagaaccctgaagtcagcggcgccgaataccagcagggtgagttggccggcaacgaagtgcgggagtacctgcttgagaagtggcagcgccgctgtgcctactgcgatgccagccgcgtgccgctccagatcgagcatgtcgtggcgcgctcgcgcggcggcaccaaccgggtgagcaacctcaccctgtcttgcgggccttgcaaccgggccaagggcgccgatccggtggagcagttcctgtgcaggaagccggacgtgctggcacacatcaaggcgaagctcaagcagccgctcaaggacaccaccgccgtgaacgcgacacgttgggcgttgttcagcgcgcttgccgcaacggagctggccgtcgaggcaggatcgggcgcgcgcacgaagttcaaccgcacgcgacagggctaccccaaggcacactggatcgacgcggcatgcgtgggtgagagcggcgccctggtcgcgctcgatcccgccctgcgcccgttgcgcatcaaggcatgcggccatggcctgcgccagcggtgccgccccgacaaatacgggtttcctaggacggctgcgccgagggccaagttcttcttgggattccagacgggcgatctggtcaacgcccgcgtgcctacaggcaagtacgccggccggcacacaggacgcattgccatccggttccgcccctcatttcgcctgacctccaaggacaccacgttcgacgtgcatcccaagtacctcaccgccgtgcaaagggctgacggctatgcctacttctga

SEQ ID NO: 353 - DNA, 275 bp, Azohydromonas sp.
  source 1..275: mol_type = other DNA
cccgattcgatgaattggatggagcttgcgaaagcaggctccccggttgaccaggctcagtgattcaggagcgatcttgatgaactacgttcagacggtcatgacaccctaggatgcgtgccagtcccaggctctgtcggcaggaatcatggtgccagcagggagaaggctggcgaaggttcccgcctcaacaagccgttgggacattgccgaggcaaacattaccggccgcaaggccgtgaaggagttttgaaaccatgtattccgagaactct

SEQ ID NO: 354 - DNA, 1389 bp, unidentified
  misc_feature 1..1389: note = GENOME_ACESSION: IMG_3300000053_$F_3300000053 JGI
  variation 132: note = n represents any nucleotide
  variation 150: note = n represents any nucleotide
  variation 183: note = n represents any nucleotide
  variation 199: note = n represents any nucleotide
  variation 273: note = n represents any nucleotide
  variation 288: note = n represents any nucleotide
  variation 303: note = n represents any nucleotide
  variation 306: note = n represents any nucleotide
  variation 315: note = n represents any nucleotide
  source 1..1389: mol_type = other DNA
gtgagtgtcttggtactggacaaacagaaacaaccgttaatgccatgccgcagtgcacgggcgcgtcagctcttgcgcgatggcaaggccgcagtgtttcgtcgttatccgttcacgattatcttaaaaganagagtgggcggtgatacncagccgctgtctctgaatgttgaccctggcagnaaaacaaccggtgtgnctctggtcgcagagtatcagcgcggccagtgcgcagtattggctattcacattggccaccgtggtcagcagatnaaatccgcattgganggcaggcgcggtatncgncggtcacgncgaaaccgcaaaacccgctaccgggcaccgcggtttttaaatcgtacacggcctaaaggttggttagcgccatccattatgtcacgggtgcacaatgttgatacgtgggcaaagcggttaatccggcttgcacctatcattagcgccaatgtggaaaccgttcgcttcgatatgcagttgatggaaaacccgtcgatggccggcgcggactatcagcaagggtcattgtttggttgggagcttcgggaatacctgttgtatcgccacaagcatacctgtgcctattgcgatggattgacgggcgattcagtgctggagaaagaacacattattccaagggcattaggcggcagcaaccggctggcaaatcatgttatcagttgccgcacctgcaacgaggataaaggttctctgcaccccaatgcctgggcgcagctttgcatgcagcgcggtgggaaattaaatacgacacgggccaaaaacatgcagcgcattctggccggttaccggccatccttaaaggatgcagcggcagttaatgctacgcggtatgccgtgggtggcgttgttaagcgcttaataccagatacgcagttttggtctggtggccgcaccaagaaaaaccgctcagaccagggttatcacaaagaccactggattgatgcggcctgtgtcggtgagaaaggtggcgcggtgtcactgttatgcgatgctgtgcttatggccaatgccaaaggacatggttcacgccagatgtgtctggtggacaagtacggtttcccgcgcaccagcgccaaaacaacctcggtcgtacacggatttaaaaccggcgacatggtggcggccagtgtgccaacgggcaagaaacaaggtgtgtatgtgggacgagtagcggtacgtagcagcgggtttttcaacattcaaaccaaaatgggcgttgtgcagggtgtatcccacaagcattgtcggatactccagcgcaacgatgggtataactttacctatggagcggcaattcctccgacgactgattcaaagaattcagtcgcggtatccttgccgaatagttggtga

SEQ ID NO: 355 - DNA, 289 bp, unidentified
  misc_feature 1..289: note = GENOME_ACESSION: IMG_3300000053_$F_3300000053 JGI
  source 1..289: mol_type = other DNA
gtcaacgacccacgacttattcgcgttgcgaattaagtcggggcttgtaaagccctaagttgaccagaccccatcaggcaacggatggagacgttatcgaagaatacataggcaccgtgggatgacttgccagtcccccgctctgcgcaaaacgattaaacaggtgtaatgggttaagccagtgtcgttttgaaaaaaccttcgaataacacggtcgaggcacacataacccacttcggtggagaacgacgggtaaccgtcataattttggagattggataacgtgagt

SEQ ID NO: 356 - DNA, 1287 bp, Moorena sp.
  source 1..1287: mol_type = other DNA
atgcgagttttcgttttagatcaaaataaaaaacccctggatccatgccacccggcacgagctagggaactacttaagaaaagaagggctaaagtatttaagcgctatccattcactattatcatgcaggacagaagtgttaataattctgtaactcatccacacagaatcaaaatagatcctggttcaaaaacaaccggaatagctgttattcaagaacagactggacgagtgacaagtgcattagaaattaaccatcgaggacagagtatcaagaattctttagaatccagaagagccttaaggcgaggtaggcgaaacagaaaaactcgttaccgcaagcctcgatttcttaatcggaagcgcccagaagggtggttacctccgtcactaatgagtcgaatatttaacgttgagacttgggtaagacgactgaggaagttgtgtccagtgactgcaatatctcaagagctagtgcggtttgatactcagaagatgcaaaatccagaagtatcaggtgttgaatatcaacatggcgagctatacgggtttgaggttaaagagtaccttcttgccaaatggggacacagttgtgtttattgtggtgctatgaatacgcccttagaagttgaacacattgtcccaaaatcaaaaggtggcagcaatcgggtcagcaacctaacccttgcttgtcggtgttgtaatcagaaaaaaggtaatgaccccattgaaaaatttttaaagaaaaaaccagcaattctcaaaaaagtattagctaaagcaaaaattcctttaaaagatgccgcagtcgtcaactcaacccgttgggaattatggagaagactacaatcaactggattacccgtcgaaacaggctcgggtggattgactaagtttaatcgcaagactaggggtctcggaaaaactcactggatcgatgctctttgtgttggtaaaaccacccctgagcaaatattactgaacggaacaaagccactaacagtaacagctaaaggtcatggtattcgtcaaaggtgccgacctaataaatacgggtttccaaaggctcatgctccttctgctaagtcgtttaaaggctttcagacaggagatatcgtcaaagctgacataaagaaaggaaaatatgccgggcagtatacaggacggatagctattcgttatcgtccaagttttgtacttcagactcccgagaagaagttcgatgttcatccaaagtatctgagaataatatttaaagctgacggatacgaatatgcgtctaactag

SEQ ID NO: 357 - DNA, 253 bp, Moorena sp.
  source 1..253: mol_type = other DNA
gtcaataactcaccgctaagtcctatgggactatagcgggagcttgtagaagctcatagttgaccagactgagacttagattaggtctacgttatttgagttataacacctgtaggtgcgtgccagccttcagctctgttgttaacaattaaacatctgtagcgagttaaggaagtgttgttaacctctcaagctcttataacattgtcgaggcaaactttacccacatcgtggagtgttcaaagtaatgcga

SEQ ID NO: 358 - DNA, 717 bp, Methanosarcina sp.
  source 1..717: mol_type = other DNA; strain = 2.H.T1A.3
atgttagttttcgtaatcaatcaaaacaaaaaaccactgatgccctgcaaaccctcaaaagccagaaagctactgcaagcaggcaaagcaaaagtggtccgaaatacgccattcacaatcaagttacttttcagaagcagtggctatactcaacctgtaactgcagggatggataccggctctaaggtagtgggctgtgcagccattgctaacggaaaagtgttgtatcagtccgaaatctacctgagagaaaacgtttcgaaaaagatggaacaacggaagatgtaccggagaacccggagaagtcggaagacaaggtatagacccgcaagatttgataaccggggaaattcaaagaaagaaggaagattggctccttctatccgaagcaaacttgaagctcatttccgggaaaagaggtttgtggaatccctgcttcctgtaaccgagtggaaggtagaacttgcttcctttgatattcacaaaataacaaatccggaagtttccgggatcggatatcaggaaggggaccttaaagggttctacaatatcaaagcttacgttctggacagggacggctacacctgccagcactgcaggggaaagtcaaaggattccaggctgcattgccatcatatcgttttcaggtcacaaaagggaacagatgcaccggaaaacctgataacgctctgtgaaacctgtcacaaagccctgcac

SEQ ID NO: 359 - DNA, 289 bp, Methanosarcina sp.
  source 1..289: mol_type = other DNA; strain = 2.H.T1A.3
gtcaactacccctgagctaaagactcaggggcttgtctaacaagccctggttgaccagatcaccgattaggagcaacggaaaatcggtaaacgataggaaagaatacatagttacccttgaatgtcgcctcagtttaaggctctaaggatgccggttaaacagtcctgagaggtagggacagtgcttgcatcgttaaacctttccatatcagatcgagaggaggacggattcctgaattgactccacaattcggatacgcataactcttcggaggaaaactatatgtta

SEQ ID NO: 360 - DNA, 471 bp, unidentified
  misc_feature 1..471: note = GENOME_ACESSION: IMG_3300000938_$F_3300000938 JGI
  source 1..471: mol_type = other DNA
ttggaatctcgccgttcattgcgtagaagtaggagaaatcgtcatactcgttatcgtcaagggaggttcctaaataggactcgccctaaagggtggttggctcccagcttgcaacatcgcgtcgaaacaaccctaacctgggtaactagattgatgaagctcgcccccattgcctctattactcaagaacttgtacggttcgacttacaacaattagaaaatccagagatttctggaatcgaatatcagcaaggtgttgtatgtggctacgaggttcgggaatacttgctcaacaagtgggatagaaagtgtgcttactgtggtgttacaaatacaccattacaagtcgaacatattcatcccaaagctaagggtgattctcatcgcatttctaatctttgccttgcttgcgatgcttgcaataaaaagaaaggtactcaaggtattgagcaattcctctctaaaaagcca

SEQ ID NO: 361 - DNA, 260 bp, unidentified
  misc_feature 1..260: note = GENOME_ACESSION: IMG_3300000938_$F_3300000938 JGI
  variation 246: note = n represents any nucleotide
  source 1..260: mol_type = other DNA
gtcaacaacccggcaccgatcggattaccgatacggtgcgggcaagaaattcgccaagttgaccagtctaaatggttcgcccactacgtttaaggtaagcgttaaagtacctaccagaaaatgcgtgctagttttctgctctagaaattaaaagttaaacaggtgtaagggttaagccagtgcttttaatatagttaccgaccttaaacattgacgaagcaagcattaccccgcaagggaggactnaaatgtctaatttt

SEQ ID NO: 362 - DNA, 696 bp, unidentified
  misc_feature 1..696: note = Ga0376654_0004951 JGI
  source 1..696: mol_type = other DNA
atgagcaaagtattcgttgttgatacgcataaacgaccagtaaatccgatccatccggggcgtgcccgcctcttgctttcccagggcagagcagcagtactcaaacgctatccttttaccattgtgctcaaaggagcgatagagcaaccgcagcttcagctattacgtgtcaaacttgatcctggctcaagaactagcggactcgccatcgtcaatgatgcgtctggtgaagtcgtctttgcggcggaaatcagtcatcgaggacaggccatcaaagcggctctcgatgatcgcagatctgtgcgtcgttctcgtcgccatcgcaaaacccgctatcgcaaagcaaggtttgctaatcgacgccaacccaagggatggatccccccatcgctcgccagtcgagtgaccaacgtcgtgacctgggtccagcgtttacgcaggctctgtccactcacgaacatcagcatggagttggtcaagttcgatttgcaacagatggagcaccctgaaatcagtggtactgagtaccagcagggtacgttagcaggatatgaagtgcgtgaatatctgctgggaaagtggaaccgccaatgtgcctactgtagcgcgaaggatatgccgttgcaagtggagcatattcatccccgtgccactggtgggacgaaccgggtgagcaatcttgcgctggcctgtgaa

SEQ ID NO: 363 - DNA, 241 bp, unidentified
  misc_feature 1..241: note = Ga0376654_0004951 JGI
  source 1..241: mol_type = other DNA
gtcaaatacccccggctttcagccagaggcttgttcgcaagcctgaatttgaccagactcagttcttcggaactagcgctcggagcgaaataggtacgttggggtgcgcggccagccccgaccgctacggtgaagcattaaacaggcgtacgggtgaagccagtgtgtttcacgttaaaccgctccataacattgtcgaggccaacatcacctgcgcaagcggaggctctgtatgagcaaa

SEQ ID NO: 364 - DNA, 774 bp, unidentified
  misc_feature 1..774: note = Ga0070741_10036040 JGI
  source 1..774: mol_type = other DNA
atgccaacccatccagcaagagcacgtgtgttgctctcatcgggcaaggcggctgtctttaaacggtttccatttaccatcattctcaacaaggccgttgagcaacccacgtgtgcccccttgcgcatcaagattgatcctggcagcaaaacgaccgggttggccattgtcaatgatacatctggggacgtggtctttgccgctgaactcgctcatcgagggcagcagatagccaaagatctggagaaacgacgagccgtgcgacgaagccgacgacaacgcacaacccgctacagaaaagcccgttttcagaaccggagcaacaaaaagaaggggtggttggctccctcgttcgagagtcgcatggtcaacatgctcacctggatcaatcgactcaggaacgtgtgtcccattgtggccatcagccaagaactggtcaagttcgacttgcagaaaatggaacatcctgagatcagtgggattgaatatcagcaaggcacactctacggctatgaggtcaaagagtatctgcttgaaaagtggggcagacagtgtgtctactgcggagcacagaacgtgcctttggaggtcgagcatatccatccacgttcaaagagccgtgacaatcgggtcagcaatctgacccttgcatgtcatgcttgcaatcagaaaaaggatgatcgcgatattcgagagttcctggcacacaagcccaaactgctagagcaactgctcgcccaagccaaagcaccgctcaaggatgcgtcggctgtc

SEQ ID NO: 365 - DNA, 286 bp, unidentified
  misc_feature 1..286: note = Ga0070741_10036040 JGI
  source 1..286: mol_type = other DNA
gtcatgaacccaccggctcaagccaggggcttgcgggaggccgaagagcgttctgcaagccgaacatgaccaatctgagtccgggagaccgggctccgttacaggcgaaaataggtacgtccaggtgcgagtccagcctgcgaccactacggtacagcattaaacaggactacgggttaatccagtgtgttgtacgtcaaaccgcttgataacattgacgaggccaacgtgacctgagcgatcaggggtccgaaaggacaaaaaaggagtgactgcattgagtcac

SEQ ID NO: 366 - DNA, 882 bp, Methanosarcinales archaeon
  variation 686..873: note = n represents any nucleotide
  source 1..882: isolate = UBA203; mol_type = other DNA
atgttagtgtttgtactgaataaacacggaaatccgcttatgcctgcatcgccagccaaagcgagacatttactggataacggacaggctgtagtcgttagacggactccattcacgatacaactattatacggttcaagcggatacaaacagggcgtcacccttggcatagacgccgggtactctacggtcggctttagtgctgtggcaggcagagaactcatcgcgggtgaattgaccttacgcaacgacattaaacgacttctcgaaaaacgaagagcatatcgccgcacgcgaagaagtcgtaagtggtacagagaaccgcgatttaacaaccgcggaaagaaaggttggcttgcaccaagcatcaaacacaaactcgatagccacatcaggctcatcgaaaaactgaagaaaatcctaccgatcacacgaatcatcgtagaggtcgcttctttcgacacgcagaagatgcagaatccagaaatctctaacatcgaatatcagcagggagaactgcagggatacgaggttagagaatacctgcttgagaaattcggacgcaagtgtgtttattgcggcaaaaccgacgtaccactggagatagagcacatcgtaccgcggtcgagaggaggttcagatcgagtctctaatctgaccacagcatgtcacgagtgcaaccaaannnnnnnnnnnnnnnnnnnnnnnnnnnnnnnnnnnnnnnnnnnnnnnnnnnnnnnnnnnnnnnnnnnnnnnnnnnnnnnnnnnnnnnnnnnnnnnnnnnnnnnnnnnnnnnnnnnnnnnnnnnnnnnnnnnnnnnnnnnnnnnnnnnnnnnnnnnnnnnnnnnnnnnnnnnnnnnnnnnnnnnnnnnnatcaggtaa

SEQ ID NO: 367 - DNA, 249 bp, Methanosarcinales archaeon
  source 1..249: isolate = UBA203; mol_type = other DNA
ctctccctgaccctaacgggtcgaggaaaggacttaaaaagccccttagttgatcaggaggcataagaatatgcagaagttacgcggaagaaatacatacacaccttggaatgctgctccagttccaagctctgtggcaggatggttaaacagttctgagagggtaggaacggtgctgtccagcttaaaaaccccgcataacaactccgaggagcatttactcggaaacaggaggaacactttatgtta

SEQ ID NO: 368 - DNA, 1329 bp, unidentified
  misc_feature 1..1329: note = Ga0376443_00295 JGI
  source 1..1329: mol_type = other DNA
ttggaggtcttaaatttgaaagtatttgttcttgacaacaataagtaccagcaagcccctgtacatccagcagaagctcgattgctactaaaagagcagaaagcggctgtatataggaggtatccattcaccatcatattaaaggaggtttccaaacaacaaccagaagaactaaggttaaagatagatccaggcagcagaaatactgggctcgctgttatttctgataacaccggagaaattgtttttgccatggagttagaacatagaggcctcaggatcaaaagtctacttgattccagaagatgtgtcaggggaagccgtagaagtagaaaaacaagataccgacaacctcggtttctaaatagagctctgcccaaaggttggctggctccatctttaaaaagcagggttcacaacattgagacgtgggtaaggagattgataaaaatttgtaatatccaggctatctcaatggaacttgtacgctttgatatgcaaaaacttcagaatccagagatatcaggagtagaataccaacaaggcgaacttgcaggtttcgaggtaaaggagtacttgttggagaaatggggcaggtcttgtgtttactgcggtaaggagaacgtatcactggaagttgagcatattatcgcgaaatcctgtggaggctcaaacagggtcagcaatttaacaatcgcttgcattgattgcaatcaaaagaaaaacaacaaccctatagaactatttctgaaaaataagccagaattattgaaaaaaattctatccaaaaccaaaacacctttaaaagatgctgctgctgttaatattgttagatggaatctttatcacaccctgcagacttttggattgcctgttgaagttggctctggtggcttaacaaagttcaatcgtaaagctcgaagcttaccaaaaatacattggcttgatgctgcttgtgttggaaagagtacgcctgaaagattattccaaacacacaaacaggtgttggaagtaaaagctatggggcatggcagtatacaaatgtgcagagttgataaatatggctttcccaggacaacgtcaaaaccaacaaccaagaaagtaagaggattccagacaggagatataataaaatctgttgtaaccaaagggaagaaggttggaacatatgttggcagggtagcggtaagaaccagcggatcatttaatatcaaaacaaagaaagacacagtgcaaggtattggctggaaatattgtaagaaaatacattgcatagatggctataactacaacaatagaatggaggcggcaattccccccctgagctaa

SEQ ID NO: 369 - DNA, 247 bp, unidentified
  misc_feature 1..247: note = Ga0376443_00295 JGI
  source 1..247: mol_type = other DNA
gtcaacaacccctgagctaaagactcaggggcttgcaaggtaacttgtaagcccagttgaccagtctaagtgcttagcgcactacgttagatcagaaataggtactctggggtgcttgccagctccagactctacggtaaacagttaaacaggtgtagggattaatccaatgctgtttacgttaaacctgatcataacattgacgaggcaaacgtaacccaagaaattggaggtcttaaatttgaaa

SEQ ID NO: 370 - DNA, 1350 bp, unidentified
  misc_feature 1..1350: note = Ga0211577_10055383 JGI
  source 1..1350: mol_type = other DNA
atgtcccaagtttttgttgtcgacaaagaacgtcgtccactagccccctgcaccccgaggcgagctcgcttgctcctctcggagtgcaaagcttccgtatttcgacgataccctttcaccatcatcctcaaggagtcccacgccacagccactccacgacctctcaggctcaaaatctaccctgcgagtaaaacgacagggttggctgtcataaatgagtctacagctgaagtggtctgggctgccgaacttaagcatcgtagccaactgatcaagaaagcactggagagtcgtcgttctttacgtagtggacgacgcagtcgcaaaactcgctaccgaccagctcgctggctaaaccgcgtacgtaataatcctgtgtttaccaatacagagggggctgtcatcacaggaaagtggttgcctccctctcttcaacatcgggttgaagtagtaatgacctgggtagaacgcctccagcgctatcttccgatcacagcgctatctcaggagattatgcgctttgatacgcagaagctacagaatccggagatcagcggtgttgagtatcagcagggtactctgcacggttatgaagtgcgtgagtatcttctagaaaagtggtcacgaaaatgtgcctactgtggagctagagatactcgtctggagataaatcatatcgttgctcggagtcgtgggggtagtgatcgggtcagtaatttgaccctagcttgtagatcctgccgagagcagagaggagcttccaatttggaagaatttctggcaacaaggcccgcgttgttgatgaaactccaaagtcaggctcaggtctccttgagagatgtagcagcgatcaactctacacgttttgtgttgttagagcgcttgaaggctagaggcttgcccgttgaagtttccagcggaggagagacaaagtttaatcgtaatcagcaacaaatacccaggtcccattggcttaatgcggtttgtattgggcccaataccccagaaaatttaaaatgggatcaggtacagccgttagcaatcaaggcaatgggccatggcaagcggcagatggtcaatgttgatgcctttggattcccgaggggtaaaccgaaggggactccggttcacccatttcgtacaggtgatgtcgtacgggcagcaatacccaagggtaagtacgttggagaatacgaggaacggatctcatcaatcaagacttcagaaacaagggtggggattccaaataaaaaaggccaaggaaccatctatctacagactaaatacatcactacaaaaatatttagttcagatggctttgactatgaatttcttaccagtgaatcataa

SEQ ID NO: 371 - DNA, 295 bp, unidentified
  misc_feature 1..295: note = Ga0211577_10055383 JGI
  source 1..295: mol_type = other DNA
atgttcattaaaaagagtgaactctgggctgactctcgcaaatgaagtgcggtttttccgcagctacaaccagactaagttcttcgagaactacgttattttcgtgatcatacctacgggtgcgtgccagcccgtagctctatggccattgcgttaaacagagactttggagggtgctcagtgcgcgtggcgtgacaagcgatgataacattgtcgaggcaaactttacgtgagggtctagcttcctcggaagcaaacattcgatcgctagcttcaaggctaaccaaatgtccca

SEQ ID NO: 372 - DNA, 1338 bp, Burkholderia sp.
  source 1..1338: mol_type = other DNA
atgccgtgcagtgaaaagcgcgcgagattgctgctcgcgcgggaccgcgcacgcgtgcatcgagttgtgacgttcgttattcggctcacgcaccgtaacgccaattgcagcaaatttcaaccgttgcgcctcaagttcgaccccggtagcaagaccaccggtctagcgcacgtgcgcgacatcgtaacgccgagcaaggagtccgtcgaactcatccgcggcgcagccgtacttaatctattcgaactggcccaacgcggccggcaaatcagtgaggcgcttacggcgcgtcgggccatgcgttgccggcgacgcggtaagctgcgctaccgtgcaccacgcttctcgaaccgcacgcgctctatgggttggcttgccccctcgctccagcacagggttgatactacaaaggcctgggttcatcgtatcatgcgctgggcaccgatcagcgcattctccagcgagctcgtgcgcatcgacacgcacctgctcgaaaaccctaaagtcactggggtgggctatcagcggggaacgctggcaggctacgaaatacgcgaataccttttggagaactggggccggcgttgctcatactgcgacgcaagtggtgcgccgctgcaagtagatcacatcgtcgctcgggcccgcggtggcaccgatcgagtgtcgaacctgacgctggcctgcgaaccttgcaaccgggcaaagggggcgctgtctgctgaagcatttctagcgaagcggccaacgcgattggcgaagatcctgtcccaagcgaagcgtccactgaaagatgctgcagcagtgaacgccacacgcggggcgctgaccaacgcactggacacgatcggcctactcttggaacttgcctcaggcggacgtaccaaattcaatcggttggcagtcggtgtaccgaaaacacatgcgctcgacgccgcttgtgtcggggcagtatctgtcgtaacaaactggattagaccgatcctgtctatcagctgcaccggtcgcggcagttaccagaggacagggctcgaccgctgtggcttcccgcgcggcggatatctgacaagggcaaagcgtgtgcacggattccagaccggcgacctcgtgcgcgccgatgtaccctttggaaagaaggctggcacatacgtcggcagagtggcgatgcgtgctaccggttacttcaacattcaaagagctgggaaagttgtacagggcgtcgcgcatcggcattgccgattggttcaacgtggcgacggctacgcatactcccggataagcccggcccacgcaggcgcccgcagacgcggtgagggcccgtcgccctatcccttgtga

SEQ ID NO: 373 - DNA, 318 bp, Burkholderia sp.
  source 1..318: mol_type = other DNA
gtcaatcaccccggcaaagcccggagctttttgaagcactcgaaagctcgagattgaccagacctagcactgtaaagcgctacgttgtgcagagacagcaaacccaccgtcgaatgcttcctcagttcgacgctctggaagtcgcagcagcagacaagccccgggtaggtacgaaacgggctgcgacggaagcgaaggcttcacctgctgcacaacatggtcgaggggagccatacccgaaggtatgcgtcactaggcccgtaaggccaaccgcgccgaacggacttcggcggtgatcgaataggggctgccttggct

SEQ ID NO: 374 - DNA, 1593 bp, unidentified
  source 1..1593: mol_type = other DNA; note = Human gut metagenome
ttgcaaccccgtgcatcaagttctgtagaccttggcgatgggcaacacacaccgatttgctgtgaatcaggagtgaggacgcagagatgcggacaggacagtgttgttcctgtcatatctgaagaaaggaggcgtaagcctatgaacagatctgacaagtcagttcttgttattggaatgaatggtatcgggcttatgcctaccacaccacgtaaagcaagacttctaatcagacaaaaaaaagctgaagtggtacgaaagatgccattcacaatcagactgcggtacaaaaccggcagtgccacgcaacatgtagaacttggcatagatacgggttctcagcatattggagtcgctgttgcggcagacggcaaagtattgcaaaaatctgagcatgtgctccgttcaacaatggataaaagagtgctgaacgaaaaacgcaaggctcagagaagatccagacgatatcgcaaaacagaataccgtcatccgaagtttagccagcatacgaaatatgtgtacgtagagaaaacagtcactcggaagaagcacaagacgcactggaagaaaatcagcaacaggtacggtacaaaccgtaaagaaggatggcttccgccatctattcagcagaaaatcgacatgcatatcatgatcatcaggagatatcaggaagctctgccacttgatacgtcaacaaatatcgaaattgcaagatttgatatccagaaaatcaataagccagatatcgaaggcattggatatcagctgggcagaatgtatcagtttgaaaatgtaaaagcatacgtgctatggaaacacagctaccgctgtcccgtctgtggtacggaattcgggacaaaaagaaaatctgatggaatcatggctttaccagaacttcaccataagcatttcagaagcagaggagccacagacaatccggatgagtatatgcctgtctgtacagtagatcatcgtgctgcagagcatggtgacagtggaatacttggaaagctgcgaaaagcagaagaaaagacaatccgtggacagagagatatgacattcatgaatatcctcagaaaacgaatgtgggaggcttttccaacagctgtgtttacatatggcaatgtgacgaatgcggacagaaaaactatcggtctatcaaagactcatgcaaatgatgcggtggcaattgccatgcacagacagatactgtctggcgtgcgaagcgttgcagatgctgcagatactacatactacaagcaggtacgcaaaaagaaacgttcactgcatgaagcaactgcaagaaaaggtagagccagaccaaatactgctgcaaaacgcaatgcaaaaaacacaaagtctttgactgtaaaaggaaagaagtactgcctgcgtgacaaagtagaatacaacggacagattgcgtggattgctggcttttcaggaaaaacaggttgtagaattcagtctattgatgacaaatatttatcccaaccaggaaaatcatacacatcaatcaatctttcagacgttaatgtactcaatcacaacaataactggatcgtaggatccatacaagaaaaatcaatataa

SEQ ID NO: 375 - DNA, 355 bp, unidentified
  source 1..355: mol_type = other DNA; note = Human gut metagenome
acaagtaaccgagcatgtcagcaccgacgtgcctgttgtagcttatgtgggtgtcctgcataggatactccgtcgactagcctgagatcgcttatacagattgcgatgactaagtttgcagaatcaatactcgaaccagtgatgcccaagttggatagagttggggcaatgtatttcagagagaacagaatgattgcaaccccgtgcatcaagttctgtagaccttggcgatgggcaacacacaccgatttgctgtgaatcaggagtgaggacgcagagatgcggacaggacagtgttgttcctgtcatatctgaagaaaggaggcgtaagcctatgaacagatctgacaagtca

SEQ ID NO: 376 - DNA, 882 bp, unidentified
  misc_feature 1..882: note = Ga0061017_10387965 JGI
  source 1..882: mol_type = other DNA
atgcctacggaaaaccatgcaaaagtccgtattctgctaaagaacaaacaggcaaatgtaattaaaaggtgtccgtttacaatacagttagcgtatgatagcacgaattatacgcaagacgttactttaggtgtagatagcggcagtaaacatatcggtctttcagctaccacaaaagacaaagtattatttgaatctgatgtggaacttcggaacgatatagtggatttgctttctacccgtagacaaaaccgtagaaccagaagaaaccgcaagacccgttaccgtaagccacgtttcgataatcgtaaacgcaaaaacggatggttagcaccttcggttcagaataaggtagattcgcaccttacggtaatccgtaaaatacacgaaatcttgcctatcggtaaggttattgtagaagtcgcttctttcgacatacagaagattaaaaatcctggaataagcggtacggagtatcagcagggtgatcagttaggcttttggaatgtacgggaatacgtacttttcagagacggacacgcttgccagtgctgtaaaggcaggtcaaaagacaaaatccttaacgtacaccacattgaaagcagacataccggaggagatgctcaaaacaaccttattacattgtgcaagacctgtcatacaggataccataaaggtacagtaaaactgccaaaaactataaggcgagggatgccttttaaagatgctgcctttatgggaattttacgatggtctatgtataacaaattaaagcagatatatcctaatgtaagtctgacttatggatatatcactaaatccactcgtatagagaatggtctcccaaaagaccattacatagatgcccgttgtataagcggt

SEQ ID NO: 377 - DNA, 277 bp, unidentified
  misc_feature 1..277: note = Ga0061017_10387965 JGI
  source 1..277: mol_type = other DNA
actaatacccacgggcaagcccgtggggttgcttgacaacccagagtgagtagcctaagtgaagccttttggctgaactacgttaagagagaatatatagtcacctacgagcgtaatgcctaacttgtagctctgaggtcagtgattaaacaatcctgtggtataaggatagtgttgctgatataaaacctctcattaacattggcgaaggcatacaaccgctcttcggagcgagtaattaaatccttatgggatttggaaaggagacagacttatt

SEQ ID NO: 378 - DNA, 1071 bp, unidentified
  misc_feature 1..1071: note = Ga0310140_0030813 JGI
  source 1..1071: mol_type = other DNA
atggtaccagtattagatataaataaagttccaatgatgccttgctcagaaaaaagggcaagaaagtttatggataaaaaagaagcaaaaccatattggcaacatgggatcttttgtataatgcttttgaaagaaccaagcaatagaaattatcaaaaggtagtagcaggtatagatccgggaagcaaacgagaagggtatacagtagtaacggaaaagaaagtaattctaaatgtaactacagatacaccatattgggttaaagataaggtagagacaaggagaacattaagaagaacccgaaggcaaagaaaaactccatatagagcgtgtagaaataatcgctcatctttaagaaggattaataggctcccaccatcaacgaaagcccgatgggatgccaagcttagaatcttaaatatattatctaagctattcagaatcacagatatcaatgtggaagatatccaagctatgaccagaaaaggaaaaagcaaatggaacatttctttttcccctcttcaaactggaaaaaattccttttataataaaataaaagaaatttatccaaaagttaatttagttttaacagaaggttataatacgaaattacatcgggataaaagaagctttttcaaatcaaaagccaaattagattatatttgggatcggcataatgttgatagtcattcattatgtgagatggccttgaataaagagataaaaccatataaaggaatgtataaaatagagtttatgcaatttcatagaaggcagttacatatgaagcagccattaaaaggaaatgcccgcaagcaatatggcggaacagtttcattagggtattcgcgaggatcaattttaagatataagagagataacaaaatatattatttgggtggtactggagttactcgtaaaaataaaatagccatacatagtgtggtaacaggcaagagaataaagcaacatacaaatttatcagatatagagattatgtataataatacaattagaacgcaatttctgccatctttaaagaaatgggcatctttgtgcactttaggataa

SEQ ID NO: 379 - DNA, 254 bp, unidentified
  misc_feature 1..254: note = Ga0310140_0030813 JGI
  source 1..254: mol_type = other DNA
gtcaataacccttaaataaaattaagggcttgtgcgaagaaaaatagtcaatttcttttgatcaagactaaaatattgtactagacaaggcagtatgcaaatagctggatcagctttcgttatgacaagaaggcaaagtacgttatggatgtttcgctagtctttaacctctatgattcaggtatgtcgaagcgagttggacaagggtgcgtaagcatcgtttttgtagtaaaggaaaaataagtaaatggtac

SEQ ID NO: 380 - DNA, 1515 bp, unidentified
  source 1..1515: mol_type = other DNA; note = Human gut metagenome
atgggagggaacagtgagctagtcatattaacatatttaattaaaaccttatataacattggtgatggtaaccacccacaaatgtggagaaacttagtatgctgtactatttatttagtacattgtagtatacagaaagaagacgtaaatcattttattagaaaggaggcaacaattatggttgctgtattaagtagtattggcactaaattgatgccaacttctaattacagagcacggaaattacttaaaaaggaacgtgctaaaatttataagtatagaccatttactattcagttattggatagggaagagggtgatactcaaccaattgagtataaatgtgatactggatatcaacatattggtattagtatctgttcacaaaagcacgaatatgtgaatttacaagtagacatgttaaaagacgagactgaaaggcacaacgatcaacgtaaatatcgtagaactagaagaaatcgtctcaggcatagagcacctagatttaaaaatagagtttcatctaaaaagaaaggttggttagctccatctgttaggcataaaaaagaaatccatattcaatggttcaaaaaatattatgaggtaatgcctataacagatgctacttttgaagttggtgaatttgatactcaacttttaaaagcattacaaactggatctcctataccaactggtaatatgtatcagcagggacctaggtataaaataagtacattgagaaatgcaatatttacaagagataattacacttgctgtatatgtggtaatggaatacctcaaaataccatattatgtgtacatcatattggttattggtgtggagatagaacagacagactagataatttacttacagtttgtactaaatgccatgtgccagcaaatcatcaaccaggtggcatattatatggtcttaaaccaaaattaaaaaatttcaaaggtgccacttttatgacaattatcagatggcaattgttagatgagttaaaaactaactttcctgatatagatttccatgcaacttatggtagtgaaacaaaagaaagaagacgcatattaaaggttaagaaatctcatagtaatgatgcttatgtaatgggtgattttcatccaaaacatagaactgattttgtactactaaccaaaaagagatgtaataatcgcatattagaaaagttctatgatgctaaatatatagatagtagagatggatctaaaaaatcaggcaaggatttatcttctggtagaacaagaagaggtatatattctacaaaccttagatgttatagacaacaaaaagtttctaaaggaagacgttctatcagaagaaaccattatttattacaaccacatgatgttgtaatatggaacaatcaaaaatatacagtaaaaggggtacataataatggaacacgtgttatattaaagaaaaataataaatctgttaagatatctgatattaaaattattagacattgtaatggatactattaa

SEQ ID NO: 381 - DNA, 311 bp, unidentified
  source 1..311: mol_type = other DNA; note = Human gut metagenome
ataagagttaattattactttgtaataattttctagaaatcagttggggcttgtaattcttattgcaagccttattgaatagcctaagtatttcggatactacgttatataagaataatataggtaccaaggtgatgcttaccaagtcccttgctctacggattagctttaaacagttctcatgggagggaacagtgagctagtcatattaacatatttaattaaaaccttatataacattggtgatggtaaccacccacaaatgtggagaaacttagtatgctgtactatttatttagtacattgtagta

SEQ ID NO: 382 - DNA, 1488 bp, unidentified
  misc_feature 1..1488: note = Ga0120377_1000528 JGI
  source 1..1488: mol_type = other DNA
gtggcgaagagcaccaccctcgcaagaggagaatccggcggttctatgaccggggaagtaattcacgaaaggagacacaaagtgatggcatacgttgcagtcctgtcagcatctggaaaatcgctgatgcctacaactgcatacaaagcacggaaactcttaaagagtagacgtgcaaagatctacagctacagaccgctgttcaccattcagctgcaggaccgtgaagaaggtgctacacagcctgttgagctgaagatggataccggtgcacagcatatcgggatcagtgtctgctctgaaaagcacgaatattggaacaggcgctacgatatgctgcctgacgaaaaagagatgcatgatgaggcaagaaaaaaccgccgtaacagaagaaacagccttcgttatcgcgctccacgctttgataaccgcactcacggtcataatcgcaaggaagataagtggtttgccccttctctgaaacacaaagaaaacatccacattcagcttgcaaaaaaaatctgtgcagttgtcccggtaacagacgctcacttcgagatggggcagttcgacatccagactttgaaagcctatgaagcaggaaagcccatccctgtaggaaacgactaccagaaaggtgagcggtatggttatgccactcttcgcgaggcagtctttgcgcgtgacaattacacctgtcaggtatgcggcgccaaactggatgacaagcaccatccgattttgagaatgcatcatatcggctattggaagcacgatcattccaatcgcatgagcaacctgatgaccgtttgcaccaaatgtcataccgcagcgaatcataagcccggaggcaggctgtatggtctggagccagagcttccaacattcaagggtgccgcattcatgaatacggtgcggtgggatatgtttgcacagctgaaaaaagcattgccgaatgtcaaatgccacatgacatatggtgccatgaccaagctgaaacgctcagaactcaatgtcaagaaaacgcacagcaatgatgcgtattgtatgggaaagctgcatccgaaatggaggaccgactttcagcattatcagaaagtacggcgcaataaccgagtgctgtccaaattctacgatgcacagtatatcgatacacgcgacggagagaaaatgagtggttctcagctttcctgcgggcgaaccaaacgcagtgagtccagacacagcataaaagatcttcgtggatacagagggcatcgggcaacatcaaaaaagggaaaaatatccaaaggccatatttcaacaagaagacataaatatgtattcaacaccggagacattgtaatcgtcgaaggcaagaaactgacggtttccgggacacagcattacggtgaatatgtagtgtttcgggacaaaacacatgcatctgcaaaagcaaaagaggtaacaatgtatcgacacggtgatggctgggtacgtgttgtataa

SEQ ID NO: 383 - DNA, 261 bp, unidentified
  misc_feature 1..261: note = Ga0120377_1000528 JGI
  source 1..261: mol_type = other DNA
gtcaaccaccccgcccatttacttcggtaaatggacggggcttgcggggaccagaatacccccgtaagcccggttgaaaagccagttacatgttgcggaggaaatatacaataggcacttcggaacgctgctcaaattctgaacactgcgggcgtgcattaaacatcctataggggaagggaagtgtgtacgtctcggcggactgacagcaacatcgccagaatgccgtaaaaccctctgataacagtggcgaagagcacc

SEQ ID NO: 384 - DNA, 915 bp, unidentified
  misc_feature 1..915: note = Ga0209066_10011920 JGI
  source 1..915: mol_type = other DNA
atggcagtttttgttctggaccgaagcggcaagccattgatgccgtgcagcgaaaagcgcgcaagaaagctgcttgccgcgggtcgtgcgcgcgtgcatcgggtgatgccgttcgtgatccggatcgtcgatcgccgcctgcaggatagcgcgttgcaaccgcttcgcgtcaagatcgacccgggcagcaagacgaccggactcgcgctcgtgcgcgaagtcgattcgatcgatgtttcgagtggtgaagtgcgccgcgaagtcttcgtgctcaacctcttcgagctggtgcatcgaggtcgccagatctcggagacgctcacccagcgcagtgcctttcgccgtcgtcggcgtagcgcgaatctgcgctatcgcgcaccgcgcttcctgaatcgcaagaagggccagggctggctcgcgccttcgctgcgccaccgcatcgagaccacgctcgcctgggtgcgtcggttcgagcactgggcgccggtcaccgcgctctcgcaggagctcgtgcgcttcgacacgcaaaagatggagaacgccgagatctccggcgtcggctatcagcaaggcacgctcgcgggctacgagctgcgcgagtatctgctcgagaagttcaaccgcacctgttgctactgcgacgcccaagatgtgccgctcaacatcgagcacattcacccgaaggcgcaaggcggcacgaaccgcgtttccaatctggcgatcgcctgcatcccgtgcaacacaaaaaagggcgcgcgctcaatcgaggtctttctcgcgaaggatcctgcgcgtcttgcacgcatccgggcgcagttgaagcgtccgctcaaggacgcggccgctgtcaatgcgacccgctgggcactcttcgaggcgctcaaatcaacggggctgcaagtcgaagtcggcagc

SEQ ID NO: 385 - DNA, 316 bp, unidentified
  misc_feature 1..316: note = Ga0209066_10011920 JGI
  source 1..316: mol_type = other DNA
gtcaattacccgccacctggcgtaaccgccgaggtgggggcttgtgaacaacaagcctgattgaccaggcccagctgcgatgcatcgcagctacgttgcaacgaagtacaagacgcaccgccggatgcttcctcagtccggcgctctgcaagcggcagcagcagacacgccttcgggttggcacgaaacgggctgtcgcaagatcgggatcatcgatcgaagctgcgttgcaacatggccgaggggagcggcacgaccggaagggagtgcccgtaacaaggcccgtaagggcatgcattaaggagtcgacatggca

SEQ ID NO: 386 - DNA, 1182 bp, unidentified
  misc_feature 1..1182: note = Ga0373621_017898 JGI
  source 1..1182: mol_type = other DNA
atgaacaatatctaccaggacaaaccgctacaagcaccggcggatgcttctccagtccgccgctctgctggctgcgcccaagccgatgaccataagaggtctaagcggagttctgctggtcgaggagagaatacttcccgaaagggaaggccgattatcggcaagcatggcgtgtgggtggtgggggtggacgggaaaccgttgacccccacctctcccgcccgtgcccggaagttgattgaggatggtcaggcagagaaggcgtggaataagtttggagtattcggtatcaggatgttggtagccgtcgggaatactaccccgcagacgaccctgacggtggacaacggcacgaagtacgaaggctatacggtagtctgtgggacggagaacaatcaggcggtgaaccttaatctgcctgacaagaagaagattgtgcgaaaactggaaggccgtcggcagatgcggcgggcaagacggcaacgcaacacccgacggagagcggcgagatttgacaatcgaagtcgcaatggtttcattgccccgagccagatggtgatggtcaattcccggctaaagatcatcaatgaacttgctcggtgctatccgatttcggatgcggggattgaagatgttcgttttaaccatgcccagcatcgttggggagtgaacttctcaacggtggagattggcaagaatttgattcgggagttctttaagtctcggggcattaagatatttgagtttgcgggttacgagacgaaagaactgcgatccaaatacggctataaaaagattaaggataagtcggcggatcggtttgaagcgcattgctctgacgccctggcgatggcctgcgaagtcgggcctggggaacgaattgagcttggaccattggttatcgttgacgacacctaccgcccggttcgacggcagttacatgacacccaaccggcaaagggcgagattcgggcgagttattctcggggtacggtgttcgggttgagaaagggcctgctgattggccgccccgatggacagatggggcggttgtgcggcgagtatcgggggggataccgttattttgattcaagaggcaatcgccaatcgactaaaaagctgttatttatttcggatcaatttataaccagaagggaggtgggcgcttctcccgccccttaa

SEQ ID NO: 387 - DNA, 293 bp, unidentified
  misc_feature 1..293: note = Ga0373621_017898 JGI
  source 1..293: mol_type = other DNA
gtttgatcgttcatccttggaagctgcgggagtttcacgaatgccgaatgcgggagatgtagtttgcgcttggaatcgttattatgatattattcagcaggaactaatgggttatcttgatgacataaactatttcactcaagttcaatgcgatttgaagaatcggtcgaagtttgaacctcagagaaagattgtataaggagaaaaagagtcaactacccgccccctaaaggggacgggcttgtgtaaggactatcacaacgtaagagttgactaggccaagagaggttcag

SEQ ID NO: 388 - DNA, 1632 bp, unidentified
  misc_feature 1..1632: note = Ga0209726_10008685 JGI
  source 1..1632: mol_type = other DNA
atgttgaccagggtaagcaggattagggcaggcaacccgcttgagtcttgctccgttgcggatagtgccaaagaccgacggcagagtgcttctccagccctgccctctcgaactcacgccagcagacacgccgggtcaggcacgaaacggggcgcgagagacgaccggtccgcaacattcccgaggagagccttcgagacggatgccaatctcgacgcgtcacggcccaagggtacgaccgaaggccgtctcgtcgcgaggggtaacccccgcgttttcgttctcgaccggcatggacgcccactcatgtcgtgccgattctgccgggcaaaggaattgctcgataagggtcaggccgttgtctacagtatccgccctttcacgattcgtctcgttgaccgtgtgggtggcgcggtccaaccggtccgcgccaagatcgatcccggctcgaagatgaccggcatcgctgttgttcgcgatgttgagcacgttgatgcaacgacaggtgaagtcacccgcgaagccgtggtgctgcacctgcttgagttagagcatcgcggcgcgacgattcgaaggcgccttcagcagcgtcgcggattccgtcgccgtcgccggtcggcgaatctccgatctcgcgccccgcggttcgacaaccgaacaagacccgatggctggctcgccccgagcctacaacaccgggtcgtcacaacaatgacgtgggtctcgcgcctgagacgagcgtgtcccatttccgctctctcggttgagagggtacgcttcgacactcacgctctcctcaacccggaaatcgatggcgttcaataccagcgcgggacgttgttcggcacggaaattcgtgagtatctgctcgcgaagtggagccacgcctgcgcgtattgtgacaaggcaggcgtgcccctgaacacagatcacctcgttgctcaggcgcggggtggctcggatcgggtgagcaatctcgtgatgtcctgcatcgactgcaacacacgaaaggccgatcggctgatcgaggagtttctcgcgcatgaccctgagagactcgcgagcattctcgcgcaggcaacggctccactgagggacgccgccgcagtcaacgcaacgcggaatgccctgttcttcgctcttcgggacacggggcttccaatcgaagccggaactggtggtcgaaccaagtggaatcggtctcggctcgacatcccgaagacccacgctctcgacgcagcctgtgtcggcattgttgattcggttgccaactggcagatgccggtgctctcgatcaaggccactggccgtggaagccgaaagcggacgcggctcgataggtacggcttcccgcgaggctacctcatgcgggggaagaccgttcgaggattccgaacaggcgatctcgtccgggccgtggttccatccggcacgaaagcgggcacgtggacgggccgggtagccgtgcgggccaacggttcgttcaacgtacagaccccggccggcacgatccaaggcatctcacacaggcattgccgcctcctcatgcgaggagacggctattcgtacacgatcgaagtagcgctcctccccgccgtgaacggcgaggtttccgcgccgggagaaatttga

SEQ ID NO: 389 - DNA, 327 bp, unidentified
  misc_feature 1..327: note = Ga0209726_10008685 JGI
  source 1..327: mol_type = other DNA
ttggcaatcaagacaagcacaatctttgaagtccaagacccgcaaggtttagccgtcatcctcgaacgcaatacatggcagcacattagcggtggtcatcccgaaatgcgagatcgcctcgatgatatcttccaggcaatcaagacccccaatttcatccaaaaggaccctcttgatcctgatagccgacgctattattggttgaaaccaacttcatttgggaaacactccaggctgtatgtactggtggttgtagggatagacaaagagtcggtaaacgggaaagtgcgcactgctcatctggttgaaaaaccgaagaagggaaca

SEQ ID NO: 390 - DNA, 918 bp, unidentified
  misc_feature 1..918: note = Ga0376502_004060 JGI
  source 1..918: mol_type = other DNA
gtggatcacttgcgaatgcaagggcagagcttgagagtctctgccaaaataatcaaaggaatctcaatgagcgtttgtgtaaaaaatatgcggggcggcacattgatgctgacgacaccgcaaaaggcaaaaattctattgaaacaaggaaaggcagtcattgccggctatcacccgtttaccatccagctgaattatgctaccggtgaggccaggcaggctctggttcttggcgtagatgccggttttaaaacaatgggagtttcaatcaccggcccgacaaaagagttctattcttgcgaaatcagcctgcttgagggacaggtggaacgaaataaggaacgaaggatgtaccggattcaaagaagatcccggctgcgtcacagaaaagcacgctttgataatcgcaggagaagtgacggttggctgcccccaagcatccagcataagcttgatagccatatcaacatcattgagcggctgaagtccgtattcccgattgcaaataccatcgtggaagtggcggcctttgatattcaaaaaatcaagatgcctgaaattaacggcacgcagtatcaggaaggggctcaatcaggattctggaatctaagggaatatatgctgcaccgtgataaccatacatgtcaaaatccggactgcaagaacaaatccaggcatcccgttttggaagtacatcacatagggtattggaaattggacaggtcggacagaccgggaaatctgatcacactatgcaacaagtgtcatacaccggccgaacataagaaaaatggttttctctatggttgggaacccaaaaccaagtcgttcaagccggaaacattcatgagtacagtccgttggaaactggtgaatacacttaagtgcgaccacacatacggttataagacaaaacaa

SEQ ID NO: 391 - DNA, 312 bp, unidentified
  misc_feature 1..312: note = Ga0376502_004060 JGI
  source 1..312: mol_type = other DNA
gtcaacaacccctcggctgaagaccgaggggcttgtggggaagcccgcaagcccggttgattagcctcagccctgcgttattggtaagcggggctacgttactgcagaatacataggtacttcgggatacagatctgaccaatcgtccacacgtcccgaatgttacggtcagtgtttaaacatctgtgagggtagcagaagtgatgctgatattaaaaacctgcggataacattggcaatgtggatcacttgcgaatgcaagggcagagcttgagagtctctgccaaaataatcaaaggaatctcaatgagc

SEQ ID NO: 392 - DNA, 1242 bp, Oribacterium sp.
  source 1..1242: mol_type = other DNA; strain = NK2B42
atggtttatgtgataagtaaagaccgacatcctcttatgcctacaatgcggtatggcaaagtgagacggatgcttaaatcaggtcttgctaaagtaataaacagatatccgttcacaatacagcttttatataatgctacagattatacacaggatgtattattaggtgtagatgcaggcagtaagaacataggattatcggctacgaccattaaaaaggtattgttcgaagccaaagtcacactaagaaacgacatagttgaacttataggcactagacgcgagcagcgccgtacaaggcgtaaccgtaagacaaggtatcgtaagccgcgattcgataaccgtaaacgttccaataagtggttagctccatctgtaagacagaagatggagtctcatatcaacatggtacagaaggtgcataagattctccctgtatcacgtataaaggtagaaacagcttcctttgatatcaagaagataaaggcccccaatatacagggtactgactaccaaaacggtgaacaaacggggttctggaatacaagggaatacgtactgtggcgagacggtcatgtatgccagtgctgtaaaggcaagtcaaaggataagatacttaatgtccaccacatagaaagtcgtaaaacaggcggtgattcacctgacaacctcgtaacactgtgcgagtactgtcataaacagtatcatatgggaaaaataaaactccctaagacgatacgcaggggaatgagcttcagggatgcatcatttatgggtatcatgagatgggcggtgtatgacagactgaagggattatatcctgatgtaagcctcacatatggatacatcacaaagaatacacgcatcaggaataacctgcctaaagaccaccatatagatgcacggtgtatcagtggcaacccgacagctgaaagtgatggcacagtatatatctataagaaagtacggtgtcataacaggcagatacataaatgtaagatactaaagggcaacatacgtaaaagaaaccaggcaccatataaagtacatggattcaggctgtatgataaggttctgtataataatgagctgtataccatatatggacgaagggccagtggttttttcgatataaggaaacctgatggtacaaaagtcaataatggaagtatcagctgcaaaaaactgaaactcgtggctatgcagcatggctatatagtagacatgactgcatccgcatga

SEQ ID NO: 393 - DNA, 282 bp, Oribacterium sp.
  source 1..282: mol_type = other DNA; strain = NK2B42
gtcaatgatacccaccacctaaaggtagtgggcttgcgtaaaaacaagctatgttgactagcctaagtgcctcggcactacgttaagagagaatacatagtcacctgtggatgtagtaccaagtctgcagctctgaggtcagtgattaaacagccctgtggtataggggcagtgttgctgacaaaaacctctttttaaccttggcgatggtacaccaacggtcagatatgtaccggcttacagcataaaacatatcaatacacgaaaggagtaccgcatatg

SEQ ID NO: 394 - DNA, 735 bp, unidentified
  misc_feature 1..735: note = Ga0099364_10003290 JGI
  source 1..735: mol_type = other DNA
atgcctaccgctagaaacggttgggtacgtagggcgttacgtagtggacgtgcggtcgttacttcccgcatcccgttcactatccagttgtgctatgattctactgaacatgtgcaagaatgcacttgtaaagtagatagcggaagtacgtttgttggaatttcagtaactacaggagaaaagattataaaagaggtattcgcagcagaagcacacctgagaacggatattgttgagttgctatctgctagaaaggtgcttcgtcgaaaccgtcgcggtaggaaaactcgttatcgtaaggctagatttaagaatcgtaaaaagcctgatggttggcttccgccttctgtgcgttggaaacttgatgcacataagcggctgattgctatgttgcataagtttttgcctataagtgacattttagtggaaactgcaccttttgatattcagaaaataaataatcctactatttctggtattggttatcaatgtggagatcagttaggcttccagaatgtcaaggaatatgttttgtatcgagataaacacaagtgtcagatttgtggtaaatcgaaagtgaaacttcatgtacaccatattgagtcaaggcaaacaggtggagatgcgcctaataatttggttgctttatgtttagaatgtcatgatatgttgcataaaggcgaagtaaaattaaagaaaaacgagggcaatcttttcgcgatgcaacacagatga

SEQ ID NO: 395 - DNA, 278 bp, unidentified
  misc_feature 1..278: note = Ga0099364_10003290 JGI
  source 1..278: mol_type = other DNA
agagctccgctcataaagtaaacaacccacacgttttattgcgtgagacatattagtctttgtttactagattaagttttaatgcccggctttcgttcgggaacataactacgttgattaggaaatacataggcacttcgggatacttgtcctagtcccgaatgctgcggtttatgattaaaagttctgatgggtaggagcggtgtcataagcttaaaaccccttttcaacattatcgaagggcacctcacgggaggaatcccgtcttatagaatttt

SEQ ID NO: 396 - DNA, 1116 bp, unidentified
  source 1..1116: mol_type = other DNA; note = Human gut metagenome
atgagtgtgttcgtggtagggctgaacggatgccggctgatgcctacatctgaaagagaggcccgtttattactgaaacatgggaaagcttctgtttatcggaaagtcccatttaccataaaactaaattataagacaggcagtaccacacagcctggttatttgggaatcgataccggatcgcagcatatcggagtgtccgttgtccgcgaagatggtaccgtgttacataaggaagagatcggtctcagggattccatgagtaaaagaaaactgatggagtcaaggtcttcattaagaagaggaagacgtcatcgaaagaccagatatcgccatccaaaatggagactaaaagccaaacgtgtttattacgaaactccagaccgaaaaggaagacactggaagaagcaaaagatcacgttcgcgtccaaacgaccgcagggctggcttcctccatcgctgcagtcaaagacggatcatcatatccagtggatcaagaagttacaggatcttcttccagatggatatcgtctttcgatcgaacttggtcgtttcgatccggcaagaatgaaagatacagagatccatggagatctataccagaaaggaccacagtatgactatgaaaatgttcgtgcttatgtcctcgatcgtgacagatatacttgtcaggtatgtggaaagaagggtggaaaattacatatacaccatatcctgtacagaagtcatggtgcgaccgataatccacagtatatggctacgatatgcagcgattgtcatagcacagagaaccatcaaccgggaggcatcctttatcagtggatgcaggagcagaagaaatttaccagaggactaagagatgctacattcatgaacatcttaaggaaacgtctgatgaaagcatttccaaaagcaacttttacctatggaaatatcacaaaagcagacagagagaaactgaagattcctaaaagccatggaaatgatgccactgcgatcgcaatcgtaaaaactgggatcatgacggtaaaggataacgaacctgtgatctatatccaacaggtccgaagaaaaaaacgttctctgcatgaagaaactccgagaaaaggacgcaaa

SEQ ID NO: 397 - DNA, 320 bp, unidentified
  source 1..320: mol_type = other DNA; note = Human gut metagenome
tagaataaccgagcatgcagaaatgtatggatcagttatctgtagtacctgaaagggcatgctgactagactaagcacaacggaacttacagcttccatgctgtgaaggataccattagtgctacgtcccagatatcaatacccgacccggtggtacctaagccggcacagggttcaggcaacggatgtcttcccggagaagaagataccgacctggtgcaggaagtatccggaacattgtcgaagggtgaacactcccctgtgggagggcaggacttttgcgtacctgccataataacataaggagggaccagccatga

SEQ ID NO: 398 - DNA, 1368 bp, unidentified
  misc_feature 1..1368: note = Ga0209948_1000490 JGI
  source 1..1368: mol_type = other DNA
atggtatttgtattgaataaaaacaaagaatcagttatgccttgcagtgaaaagaaagcaaaaaagttattagaaaaagaaaaggcggttattcaccggcttgtgccgatggttataagactaaaggaaaacaaagattatgaaataaaaggtttgagattaaaacttgatcctggtgcaaagacaacaggatttgcagttctgatgcaaaaaagcaaaaacgaagcggatgctattttgttaggggaaattatacacaaaacaagtattaaaggcgcattggatgacaggcgttcaatgagaagagggaggagaaacaggaacacgagatatagacctgcaagatggttaaacagagcagcttcaaggaagaaaggtttatccccttctcttgaatcgagattgaatcaaaccgttcacgctgtacaaaaattaatgaagtggttgccgataggtgcaatatcggtagaacacgttaagtttgatactcagaaaatggaaaacaatgcaatagaaggaaccggataccaacaaggcacattagcaggttatgagatcagagaatatttactcgaaaaattccagagaaaatgcgcttattgtggggctgaaaacataccgcttgaagtagagcatatatacccaaagagtaaaggcggcacaaacaggattgacaaccttgcaatagcttgcaacgattgcaacaaagacaaaggaaacaaattacctaaggtatggcttgaagaattgcggacaagcaaaaggaaatcagacaatgacagagcgaagaagtttgaaaaatcactcagagatgcaaagaaaacactgaaagatgctgcggctgttaattcaaccagatggcgtttatatgaaaaaatgaaagaacttacacccttcgttgaatgtggttcaggagcacttaccaagatgaatcgcattcggcataatttgcctaaagaacattactttgacgcttgttgcattggaaaaagcacgccggaaataatcaacattaaaacaaattatattgaagaatggaaagcagttggtagagggaaaagacaaataattatgcctaataaatacggattcccaagaggacacacgtattttttgccgaaagataaaaacgggaacaaagtaggacacaggagaagaaagaaagttaaaaacggattcatgaccggtgacattgtgaaaggcacgcaacccaaaaaagggttgactgtaaccggtagatgtgacagcgtgaaagccacaggctctattatggttcctcacaacggtaaaagaatagcgtttagctctaaaaacaccgttttgattcagcggggagatggatggcaatattcaaaacgtaaaatataa

SEQ ID NO: 399 - DNA, 309 bp, unidentified
  misc_feature 1..309: note = Ga0209948_1000490 JGI
  source 1..309: mol_type = other DNA
agcgtttatagaatttgcgtcaaggttccagttttaaacgtttatagtacctcagcttcggctgattgaaccagactaagttccaagagaactacgttattcaggttatgacacctccagatgcttctccagtcgggagccatgtcgctatgctttaaacaggcttaaaggtattcagggaatgccagtgagtatagtgtaaaaagcctttataacattgtcgaggagagagaacgaaagttccgtaacaagccgcgtaagcggaaacccttcggggttattttgaataccagaggaggaaaaattatg

SEQ ID NO: 400 - DNA, 1221 bp, unidentified
  misc_feature 1..1221: note = Ga0123355_10000410 JGI
  source 1..1221: mol_type = other DNA
atggctgatttttgttttgttattgacgctgaaagtaaacctttagcacctacgaacgttaatcgcggttggtaccttattcgtaaaaatcgcgccgctttagtagaacgttttccaatggtaataaaactacacaaaattgtagaaaatccaagttgcaatacaactcttggaattgatgacggaagtaagtataccggtattgcagtaattcaagaatgttccactaaaaacaaatgtgtattcaaaggcacattggaacaccgacaagatgtaaaaaaattattggaacagcgcgctagatatcgtaaattacgacgtttcaacaaacgacatcgtaaaccgcgtttcagtaatcgtaaaaatagcaagcgactcggaagagtagccccaagtattttacagaaacggcaagcagtaatccgattactaaacaaactctgcaaatggatacctattaaccatatcatccttgaggatgtatcaattgatattagggcacttaccgatggatataggccttacaagtggcaatatcagaaaagcaatcgtttagacgagaatctgcgaaaagcaacaatcatacgagatgacaataagtgttgcaaatgcggaaaaagaaatcaagaattacaagtacatcatattgtaccaaagcgtatgaaaggtgctgatatattagctaacttgattacattgtgcgttaaatgccacgaaagtataaatggttgtgaatatgaatttatacaactattccaaaaaaagatagagggtcaaaatatacgatttgattacgctcaacatgtaatgcaaggcaaacattggttaagaaaccaattatcaattcttgcaactctggaattaacagacggtggcacaacagcaaatcataggattgattggggcatagaaaaatcacatgttaacgatgctgttgttattacaggattatatccaacaatcttgtcacaaaaagattgggatataaggcctaaacgtaaaaaacgcaaaatgaaacataaggttgatgtttgcggttttcgacatggtgattacgctaaatatactgatacaaaaggtgttacttggtcagggtatataactgctatatatcccgataaaaagcagtttaatttacagtgcaaaacaaaacatttgaaacgggttaatgctacaaaaagtacattgttggccaagtacccacaattgtccatgttttag

SEQ ID NO: 401 - DNA, 278 bp, unidentified
  misc_feature 1..278: note = Ga0123355_10000410 JGI
  source 1..278: mol_type = other DNA
taaacaaatgtggacacaaatggtcatatgtttataactattgagggggtttcaagcctaagtgagtgccgtaaagcgaaagcatactgcacgacgaactacgattagcgggtaagttaaagacgcaccaatggatgtatgcatcagtccattgctctgcgagtgaggcaggatggccgactactaatgtcctgtagtcaaacaccgaatcacatgaacttccgtctgtcattggcaagaagcaaagttccatgaaagtgagggtggtcagaaatggc

SEQ ID NO: 402 - DNA, 1194 bp, unidentified
  misc_feature 1..1194: note = Ga0134588_000160 JGI
  source 1..1194: mol_type = other DNA
atgctagtttatgtgttaaacaaaaatgggttaccattgatgccttgcaaaccagcaaaagcaagaaaactgttaaaagctggtaaggctacagtagttagaagaacaccgttcactattcaattaaattgggattatgaaaatcacattcaatctgctactttgggtgtagatgctgggtataaggtagttggtatatcagcagttaatgaacaaaaagaattatttgctacagaagttaagttaaaaacagatgttagtaaaaaactaactgaaagaagaatgtatcgtagaatgcgtagaaacaagctatggtatagaaaaccaagatttctaaacagaaaaagaaatgatagctggttaacaccaagtgttcaacacaggttagatagtcatttaaaggctattaagtttgtatgctcaatcttaccaataagtaaaataaatattgaaacagctaaatttgatattcaaaagattaagaatcctggtatttcaagtactgaatatcaaaatggtgaacaaaaggatttttggaatgttagaaattatgttatttatagggataatcatcaatgtcaatattgtaaaaaatccaatatacctcttaatgtgcatcatataaaaccaagaaaagatggtggtactgataaaccagataatttaataacgttatgtgaaacctgtcatcaattatatcataggggtaaaataatattaggtaagattaaatattcaaaggagttcaaagcagagagttttatgagtataattagatggagaatatataatattctcaaagctatttattcaaatgttaattttacctatggatatataactaaaagtaaaagaatagaacttggtttatctaaatcccatgtaaatgacgcttttgttatagctgggggcacagagcaaaatagaatagaagtattggatagttattttaacagaagaaataatagatcacttcaattgaatagaaatggttttaaaccatctgttaggaaacagaaatatcaatatcaaccaggtgatatagttagcttaaataatattatctattttgttaaaggggtatttaacaaaggtaaatatataaaattaatagataagtacaaaaatatagttaatgttaatattaacaaagtgaggttaataacttatggtaaaggattacaattcatctga

SEQ ID NO: 403 - DNA, 258 bp, unidentified
  misc_feature 1..258: note = Ga0134588_000160 JGI
  source 1..258: mol_type = other DNA
gtcaactaccaaccacttatagaagtgggggcttgtgagaaacaagttagttgattagggagcttatgtatgagtaagcagcagttatcaagaagagatacatacacacctacagatacttctctagtctgtagtaactgtgatctatcattaaacatgcatgagagggtaagtgcaagtgtgatagatttaaaaactcttgataacaatcccgaagagaaccaaccatatctgatagtgggctttataagcaaaagt

SEQ ID NO: 404 - DNA, 1245 bp, unidentified
  source 1..1245: mol_type = other DNA
atgacaaattatgtttttgtaatagatgctaatggtaaacaattagcaccaacaaaagaacaaaaagcatggtatcttattcgtaagaaaggtgctacattagttaataaatatccaatggtaatacaattaaataaagtgattaaagataataatatttgtaaagatgaaattcgttgtggaattgatgatggtggacttcatgtaggaattgcattaattcaaagatgtcaaacaaagaacaaggttctttttaaaggaactattgaacaacgtaatgatgttaaacatttaatgcaagttagaaaaaaatatagacaatatcatcgttatcataaaagatatagaccagcaagatttaataatcgtagttcttctaaaagacagagcagaatagctccaagtatttttcaaaaacgtcaagctataattagagtaataaatcaattaaataaatggataaatataaaaaattattggcttgaagatgtttctatagatataagagcattaacagatggatacaaaccttatagttggcaatatcaaaaatctaatagattagacgaaaatattcgtaaagctattattttaagagatggctgtaaatgtatggaatgtggtaaagcaaattgtagattagaagtacatcatataaaacccagaagattaaatggttcaaatacaatagataatttaatcatattatgtaaaaaatgtcatcaaaagacagagggtaaagaagaattgtttatgaacaaatatttttctttattgggtaaatcaaaagataataaaaatttaaattatgcaagtcatgtaatgataggaaagaattggttaagagaacaattgtctaatcttggtgaattatatttaacaaatggtggagatactgcaaataaacgaattgattggaatatagaaaaaacacattctaatgacgcaatatgtataactgaattaaaacctgacacaacagatataaaagattggattataaaagctatgcgtagacaaagtaaagctaaaacagacaatgtattaggaataaagcatagagatttagtggaatataaatataaaaatggagaaatacatagagggtatgtaacagcattgtatccagaaataaaggcattaaattttcaaagtccaacgaagcattgtaaaaaagtaaatgctcgaaaatgtaaactactttggaaatataacaaaatatattggttagataatgtgaattaa

SEQ ID NO: 405 - DNA, 289 bp, unidentified
  source 1..289: mol_type = other DNA
tgtttgaacatagacaaaagaggacagattaaatcttttgtctatgtcttagcaataggtctcaaggcttagtgactgctactatcgaaagatatgttgcagatatgaactacgttgtacagtaaggtaaagacacaccaatggatgtaattctcagtccattgctctgtgagtgccaatcaagaaacaatgctaatgtcctgcattgataacagagaaacacatatcctctgtatgacattgccaagaggaaaaatactccgaaaggaaggtgtcagaaatgacaaat

SEQ ID NO: 406 - DNA, 795 bp, unidentified
  misc_feature 1..795: note = Ga0066903_100182758 JGI
  source 1..795: mol_type = other DNA
atgagctgcgatcttttcgaatataacaataggcgccccgggatgcggcgccagtcccaggctctgatgcttgcgattaaacaggcgacgaacgcgaagccagtgtcgcaagcaaacaaaccgcaacggtcattgtccgggcgaacattacgtaacagcgctgtcgcgtcgaaatcgaaaggtttctttgtcgatatgagagtagctgttttagacgcgaccaaaaaacctttggcgccgacgaccccgcgccgcgcccgattgcttttgaaatcaggcaaagcagccgtctttcgtcgctacccattcacgctcattttgaagagggaggtggtcggcgttcaaacgcccgatctccgattgaaagtcgatcccggctcaaaaacgacaggcgtcgcgattgttcatcgagaagccggcgaggtcgtcttcgccgctgaaatcggacatcgcgggcaggcgatcaaaaagagcctcgatgcgcgacaaggcgagcttgggggctttgaactgcgcgaaggcaaaagcgcgcctgagaaagtcgagatcgcgaatgcgcgaccgcttcggatcaaagccactgggcagggaacgcgacaaaagtgttcgacgaacaaatatggctttccgatacgacatcgaacagggcggaaaacattaatggggtttgaaaccggcgacatcgtgaaggcggacattccgagaggcaagtatgcgggtagatatgtcggacgggtgacgattcgtcaaaggccgtctttcattttgaacggcttcgatacgcatccgaagtat

SEQ ID NO: 407 - DNA, 292 bp, unidentified
  misc_feature 1..292: note = Ga0066903_100182758 JGI
  source 1..292: mol_type = other DNA
atctgctatgccgcgagcgtgacaacgctttcggccccagctcaactctcctccggcgtctctcgaaagatagcgtcgtgagcgtcaaacacgatgagctgcgatcttttcgaatataacaataggcgccccgggatgcggcgccagtcccaggctctgatgcttcgattaaacaggcgacgaacgcgaagccagtgtcgcaagcaaacaaaccgcaacggtcattgtccgggcgaacattacgtaacagcgctgtcgcgtcgaaatcgaaaggtttctttgtcgatatgag

SEQ ID NO: 408 - DNA, 849 bp, Microcoleus chthonoplastes
  source 1..849: mol_type = other DNA
atgctacgagtaccagttctatcaaagagaagattcaataaccgtaaacagggtaaactacctccctctattcgagccaacaggcagttggagttacgagtagtcaaacaactgtgccaactatttccgattagtgcgattcactacgagctagtcatggctgacgtagataggactaggggaagaaaattagcacgatccggcgttggcttctccccggtcatggtgggacaaggacaaatgctgacttggttatctgaattagctccagttacaacccacaagggatggcagcgagacggcaatggaaccagtcaactcagaaagtggctgggactacccaaggataagaagaataaagcttgctctacacctgcgacccatgctgttgacggtgtaattctagccgctttcgagttcattcaatggcgcgaatggcattctgatcatactaagcacggtgactggagaggtgatgttcagattacacccgcgccatttacgatcatccgcagacctccaatcagtcgtaggcagttgcatttatgtgtcccgtctaaaggtggaaagcggcgtaagtacggtggcactgttactcgtcacgtagagacgcgccatggcgcgtctttacgcaagggtgatcaggttatcgctgaaaaagccgggaagtcctatgttggttggtgttctggtgatactgatcaagcgatttcggttagtgatgctaactggaagcgacttgggcagtttacggctaaaaaagtccgattgttgcagcgaagcacgggattaattgtcgcgccttcagttggattgtcaaacctaaccgcatcgagcggcgcggtttga

SEQ ID NO: 409 - DNA, 275 bp, Microcoleus chthonoplastes
  source 1..275: mol_type = other DNA
ttcaacaaccccaacctacttcgttgaggttggggattgccggacaaacggcaatttaaaccgttgaataccgcattgagtctcggtttggcacagacacccggatacttccctagtccggatcaaatctaaagccttttgtcgggctgttgtaagacaagacatcttaaccgagatggcgggaagggactacatttcgacttatctcgacttcgctcgatacaagtcgctcaatgtaaacactttcactcgtgaggattatctccatgctacga

SEQ ID NO: 410 - DNA, 870 bp, unidentified
  misc_feature 1..870: note = Ga0376082_0035695 JGI
  source 1..870: mol_type = other DNA
atgtcaaactacgtctttctaattgaccgcaaccaaacaccgctaaatccagtacatccaaaacaagctagaaagttgttggatgcaggcaccgcagcagtgtttcggcgatatccgttcactttaatactcaaacgagttattgacaatcccaacgtttatcctctgacacttaaaattgacccaggctcaaagtttactggtattgcgctagtaaccaaccaagggaatgtcatttgggggatggaattgcaacatagaggtcaacaaatcaaaaacgcgctcttagcacgtaaagcactgcgtagaggacggaggaatcgcaatactcgttatcgtcaagctcgattcctgaaccgcaagcgtccaaatggttggttagcaccatctttgaagcatcgcgtcttgacaacccaaacctgggtcaaacgaattcaaaagtttgcttcaattagttcaattgttcaagaactggttaagttcgacacccaggcagtccagaatccagaaatctctgggattgaataccggaccggaactttgaaaggttacgaatgtcgcgaatacttattggagaaatggaatcgtcaatgcgcttactgtggtgtcaaggatgttccgctcgaaattgaacatatcgaaccaaagtccaaaggtggttcagaccgtatatccaatctgtgcttggcttgtcacaagtgcaatcaatgcaagggaaataaagatatcaaagactttctaaaaggtaagtcagagctgttgaaccgcgttttgaaacaagccaaaactcccttaaaggatgcggcatcagttaactcaacgggcgtgggcattgttcaatactttgaagtcttttggattgcctgttag

SEQ ID NO: 411 - DNA, 249 bp, unidentified
  misc_feature 1..249: note = Ga0376082_0035695 JGI
  source 1..249: mol_type = other DNA
cggtaaaacctacccagagttggacatttactgacaactctaccgagcgtgcagactcagctatttcggtagctacgatttttgagtcataacaccaacaaatgaacgccagtttgttgctctgttgattgtcattaagccacggattaacggtttataaatccgcgtgtggcagtccaaacaagctcttaaatcattgtcgaggcaaacattactgagaaatcaggctgacagaatatgtcaaactac

SEQ ID NO: 412 - DNA, 984 bp, Actinoplanes derwentensis
  source 1..984: mol_type = other DNA
ttgaacacaggtgagtcggcccacggccgggtgcttcctcagcccggtcctctggaatcgcggtcagcagacaacccgtcgggtcgggacgaaacgggatcgcgacgtcccatcgttgtggtggggcaaaccggtgttcaacatgggcgaggggagaccgctgttccggttccggcacagcggcgtcaccccggcacggtggaaaccgtgtcgggagcgggcggtaacgcccagcaacagaggttgaaagagtcgcgggtctttgtactggaccaggccggaaaggcactccagccatgcgctccggctcgcgcccgccagttgttgcgtgctgggcgggcagccgtgcaccgccggacccctttcgtcatccggctgcgcgatcgtggccgcgacgaatcggtcgtgccgggcgtagaggccggagtcgatcccggatcgcggtacaccgggatcagcgtcttcaccagccgatccgacgagaccgggcccgagccggtggtggtccgcaccggtgcctacagcatcggggtccagcatcgaggcggtcagatacgcgacagactcaccgcacgggccgcgctgcgccgaggtcgccggacgcggaatctcaggtaccgggcaccgcggttcgacaaccgccgacgaccggcaggttggctgcctccgtcgttgcggcaccggatcgagacgaccatgtcctggatcaaccggctccggaggtgggctccggtcaccgcggtgcacgtggaacacgtcgcattcgacactcaactgctcgccgatccgcaggtgcaaggtcgcggctatcagcacggtgaacacgcgggccgcgtcgcggtgcgctcatccggcaggttcaacatccgtacggcaatgggactcgtccagggaatccaccaccgccatgtccggctgctgcaacgcggcgacggctggtcctaccgctaccaacaggagcgtttcgaatccccgccggcttga

SEQ ID NO: 413 - DNA, 280 bp, Actinoplanes derwentensis
  source 1..280: mol_type = other DNA
gtcggggtcgccccggagagcccggtcggtcatagcgtgtgtgaccagcccgagtgagccttggaatgaggtgaactacgttgaacacaggtgagtcggcccacggccgggtgcttcctcagcccggtcctctggaatcgcggtcagcagacaacccgtcgggtcgggacgaaacgggatcgcgacgtcccatcgttgtggtggggcaaaccggtgttcaacatgggcgaggggagaccgctgttccggttccggcacagcggcgtcaccccggcacggt

SEQ ID NO: 414 - DNA, 1194 bp, unidentified
  misc_feature 1..1194: note = Ga0310375_1000145 JGI
  source 1..1194: mol_type = other DNA
atggggaaggcggccgtttaccggctgaaacccttcaccataatcctgaagagggaagtgaacaaccccgtgatcgcggagcggaccgaggtgaagttcgacccgggcagcaagattagcggcatagccgtggtcgcccaggggagcgtgatcttcgcgatggaacttcatcaccgggggcagcggataaagggagccctttacaggagggctgctctaagacgcggcagacgcaaccgcaagacccgctaccgggcgccaaggttcaacaaccgcgcacgcccgaagggatggctcccgccgtcccttcagtcgcgggtggacaactgcgtcagctggatgaggaagctcatgaggtttgtcccggtcacggagtgccatgtcgagaccgtgcggttcgacactcagagactcgagaacccggagatatcgggtatcgagtatcagcagggcacgctcatgggctatgagatcaggggatacctgctggagaagtggggaaggaagtgcgcttattgcgatgagaaaggagtcccgctcgaggtggagcacgtagtgcctccgcccaggggatccaaccgggtaagcaacctcactctcgcctgcaggtcctgcaatgagaagaaaggcaataagagcatcgaggaatttctgaaaaggaaacccgataggctccagaggatcaagtcccagctcagaaagcccctgaaggacgttgcggcggtcaacgcgacccgcaacgccatatatggggccctcaagtcgttcggtgtcccaacgtccatgtggagttccggccgcacgaagctgaacagggtgaggcagggatatgagaagtcccactggatagacgctgcctgcgtcggcgagtccggtgcccaggtctccatcgcgggggtgaaacccctcgagataagggccatgggcaggggctgccggcaagtacgcatgacggacaaatacggtttcccgagagggaaggcgggacgcgtgaagcgcgtcttcggcttcagcacaggagaccgcgcacggctagcactgcccaaaggcaagtacgcgggcacatgggaaggggccattgccgggatcagggaaaggggctatcacgacatcaggtgtgggcgcctgaagatcaaggcaaggcactgcaactttaaacttttacaacgggcggatggatatgcctacgcatga

SEQ ID NO: 415 - DNA, 265 bp, unidentified
  misc_feature 1..265: note = Ga0310375_1000145 JGI
  source 1..265: mol_type = other DNA
accttcgacgtccatgtctcaggtcaaccgggataactcatgcttcggcatgagctcaaccagcatcagccgcaaggctacgttatgggcgaatacataggcacttcggggtgcttctccagccccggaccctgcggccgcggtttaaacagcacggcagccgtgaaaacgggcagtgaccgcggcatacaaaaccgcccgataacatttgcgaggagaccattacccccgcaaggggagaaagtgaaactttattatgcagaga

SEQ ID NO: 416 - DNA, 1251 bp, unidentified
  misc_feature 1..1251: note = Ga0265297_10088569 JGI
  source 1..1251: mol_type = other DNA
atgaataatctagctttcgttaaaagcagaactggcaagcccttaatgccatgcagccgagccaaagcaaggcatttgctacaagctggcaaagccaaagtattaaggtgtgagccttacacaattaaacttcttgttgattgtagtgaacagacacaagaggttgtagctggtatggatgttggaagtaagaatattggagtgtgcgtggttagtaagaatgataatgaaattaaggagttgtttaaagaggaagtcattcttaatggtgatggtattaagaagaaaatgactcagagaaagatgtatcgtgttaataggagatatagaaaaactcgttatagacctactagatttttaaatcgagcaagtcaaaatagaattggaagattagcaccaagcattaaacataaagtggattgccatctaaaggaaaagaaaatagtagaatctttattaccagttactaaatggaatattgaaacaacccaatttgatatccataaaatctcaaatcctgaagttgtagattaccaaagtggagatcaaaagggattttataatactaaagaatttatcttatacagagataatcacacatgtcaaatctgtggttgtaaaaataagaaacttcaagttcatcatataattgaacgatcaaaaggtggtactgatgatcctaaaaatcttacaactctttgtgtagaatgccatgataaagttcatagtggagtaattgaaaatttaaaagttagaagaagtattactaaaaatgctgatcatgttaatattataagttcacaaataaaaaagcattttggagattatatttccacctttggatatgaaactaaatataaacgagaattaatgggacttcctaaaacacattataatgatgctttagctatatgtcttaatgatgaagaagctaaatctaataatatcaaattgttaaattattattatgtaaaaaagatggtagctaaaggagattacaagcaaactagaggaagtcgttctgaaattaagatacctacaaagaagttatttggttttagaaaatttgataaagtgaaaacacctaaaggaatagggtttgttaaagctaaacgtgcaagaggctattttcatatctgtgatgtgtttggtaatactgtagtagatggtattaatgctaaaaaaattactagagtgtctgctagaaaaaattatatgatggatactataaaaataacaagaaaggattga

SEQ ID NO: 417 - DNA, 308 bp, unidentified
  misc_feature 1..308: note = Ga0265297_10088569 JGI
  source 1..308: mol_type = other DNA
atcaaacaccctcccgcaaggggagggttcagaccgtgaggactgaaagtaattgtttgatcagaagacaaacaggaggatgtttaacagaatgtttgtagccgttaaaatgaagaaaaacatacacaccagcgtgtgccgcctcagcacgttgctctgtgactgtatattaaacagagttcaacgactcagtgtatacagtttaaaaactcattttaactcttcgagaggatgccgaattcacacaaacacttccaaattgtgtgatacgcatagactgttactgtacagggaaagtatatgaataa

SEQ ID NO: 418 - DNA, 1254 bp, unidentified
  misc_feature 1..1254: note = Ga0209608_1000352 JGI
  source 1..1254: mol_type = other DNA
ttgagagtgttcgtattaaatatgcgtggcaaaccacttatgccatgtaaaccacgaaaagcaagattgttattgaaacaaggtaaagccaaagttgtcaaacgagatccatttactatccaattgacaattgccactggggaagcaaaacaagatatttctcttggtgtggattcaggtagtaaatatattggtatatctgcaactaccaaaaaacatgttttgtttgaagcagaagttgaactcagaaatgatattgtaaaacttttagctgataggagacaatatcgtcgaagtaggcgttatcgcaaaacgcggtatcgtcaagcaaggtttttgaatcgtaaaaaacctgaaggttggttagctccgagtatacaacacaaaataaatagtcatatcaaaataatagatatgctaaccaagttattaccaataaccgatatcacaattgaggttgcaagttttgatatccaaaaaatcaagaacccagatattcaagacaaagaatatcaacaaggtgatcagttaggcttttacaatgtaagagaatatgttctgtggcgggataattaccaatgtcaaggtagaaaaggatgtaaaaacaaaatactgaacgttcaccacatcgagtctcgcaagacaggtggcaattctccaaacaaccttataacactttgtgaaacgtgccataatgattatcatgcaggtaaattaaagttgaacttaaaacgtggccaaatgtttaaagatgcaacatttatgggcgttatgcgatgggcaacttataatgcactcaaagagttatatccaaatgttaaattgacatatggatatataaccaaacacaagagaatcaaatatggtcttgaaaaatctcatagaatggatgctcgatgtattagtggtaatcctttggcgaaaccattagatacctattattatttcaaatgtgttcgcaaacaaaatcgtcagctacacaaagccactccatctaaaggcggtgttcgtaaaaataataaagctccaagatatctacatggttttcaactatttgacaaagtatcttaccaaaatcaagaatgttttatatttggtagacgaactagtggttattttgatttacggaaattagatgggacaaaagttactgcatcagctagtgtcaagaaattgaaattgattgaaagagcaaatacattattatgtgaaaggagggaaggcaattcctcccctgcttacactatcgtttag

SEQ ID NO: 419 - DNA, 240 bp, unidentified
  misc_feature 1..240: note = Ga0209608_1000352 JGI
  source 1..240: mol_type = other DNA
gtcaaccacccaccacttaaagaagtgggggcttgtaaaagctctagttgactagcctaagtcttaactgactacgttgggatggtcatgataccttagtgtactcctctagcactatgctctatcgtcggtggttaaaagttctaaggggtaggaacggtgctgctgacatgacaagccatttcaacattggcgaagaggcactaacccttttttaaaaaggaggtacgaaccttgaga

SEQ ID NO: 420 - DNA, 1356 bp, unidentified
  misc_feature 1..1356: note = Ga0208824_1000448 JGI
  source 1..1356: mol_type = other DNA
atggtattcgtacttaacaaacacaaagaacctttgatgccttgctccgagaagagagcaagaaagttactcgaaaacaaaaaagcagttatacacaaatacactccgtttacgattcgcctaaaaaacgaagttgaggattgtaaggttgagccattacaaataaagattgatcccggaagtaaagaaacaggaatcgctgttattcaagagaaagaagacaaattacttttacgttatgccggaatagtgaagcataaaataacggtcgcggataaccttaaacacaggtcgcaaatgcgccgtggccgcagaaacagaaacacacggtatcgaccagctcgttgggccaatagaaaaaacagcacaaagaaagggcgtttcgcaccctctatgctttcaagagtatactcaactcttaacttagttagaaaaatgaagtcattagcgcctattcaaattgtatcagttgaacacgtgaagttcgatatgcaaaagttagcaaaccccgaagtgtctggcgttgaatatcaacatggaaagttattcgggtatgaagtgaaagaatacttgctcgaaaaatacggtaggaaatgcgcttattgtggtgctgaaaaagttcctcttgaaattgaacacatgattccgaaaagcaaaggcggcacggaccgcattgataatctcgcaatcgcttgcgttaaatgcaatcaagagaagtccaatatgatgccgaaagaatatatagaatacttatcaaaacaaaaaggcgataaagccaaaaccatgatcgcaaatttcgaaaaggcgataaaggacgcaaaacagacccttaaagatgctgcaagcgtaaacacaacccgatgggttttatgcaacaagctcaaagaggaatttggagacgttgagctcgcttctggcgggagaacgaaattcaacaggcacaatcaagggttgccaaaagaacattattttgatgctgcttgtgttggtttgtgcgataagcacattgatgttaaaacacaatacgcaacaataaacaagataatgggccgtggaaacagacaaacgattataccggacaaacatggctttgcaagaggtcatcgcagtcgcaacaagaccaaagaaggattcatgactggcgattttgtaaaagtcaaaggcataaccggacgcgcaatcgcggtgaaaagcgccggaacagttcatatcagggataaaaatgggaaggaaataagttgtagcactaaaaaggcactaatgcttcaacacggcgatggttggcagcgttctattttgaaaataaactttaacagaaaatcagaaaaaatacaaacagaagaaaaacaaatttga

SEQ ID NO: 421 - DNA, 301 bp, unidentified
  misc_feature 1..301: note = Ga0208824_1000448 JGI
  source 1..301: mol_type = other DNA
atcacggattaattttaccttatgtgtagcggtttgtaacttatctatttacaaagcgggtccagactaaggtcttagagacctacgttattttgctcatgacaccagcaggtgcttctccagccggctgctctgtcgaaccagtctaaacatgcgattgtaaacacggaaggtacgcaagtgattggctcgtaaaaaggcattataacattgtcgaggagagacgaggcatatgcctcgcgttacaaggcgcgtaagcgcaagccttcgggctgtaaataaaaggagtgatacctgtatg

SEQ ID NO: 422 - DNA, 1260 bp, unidentified
  misc_feature 1..1260: note = Ga0223845_10169920 JGI
  source 1..1260: mol_type = other DNA
atggtatatgtattaaacaagaatggtgaacccttgatgccaactaagcgtcacggaaaggtgcggcgtatgctgcgcgatggcaaagcacacgtggcaaggagctttccattcaccatccaacttgactattccaccagtggctatctacagcccgtgtcgcttggtgttgacgcagggacacagcacatcggcatgtcggcaagcacggatacaaaagaacttttcagtgcagaagtggagttgcgcagtgatgtgaagaagaaaatatcagagcgaaggatgtaccgccgtaatcgtcgctataggaagacgcgctaccgcaagccccgctggcagcatcgtggacgcactgaaaattggctcacaccaaccgtgaaaaacaagattgaaagacacttgcacgttatcggtatggcacattccgtccttcccataacgaagacggtcattgaaactgcccagtttgacatagcaaaaataaagaacccaaacattagcggtgttgaatatcagaacggcccgaagaaagattacggcggcgtacgcgagtatgttttgtggcgtgacggacacaagtgctgtcattgcaagggaaactcgggtgacaaaattctcgaagtgcatcacattgagacccgtcagactggcagtaatgctccagataaccttgtcacgctgtgcaagacttgccacaaggcataccatgaccacaaaatacatttggacgtgaagagcggcatcggcatccccttccgcgatccttcacagatgaacattatgcgtaaggctttactgaacaaagctagaacgatgtttcctaatgtccataacacctatggctacatcactaaagacacacgcatcagtaatggcatagagaaaacacactgcgccgacgctttctgcatagctggtaacttgaaagccgagagactagatacattcttgctctgccactgtctaccaagacacacaaggtcattgcatgtagctaactttaggaagggaggcgtaagacgccctaccgtcgctcctcactggttaaatgaaaatctacgactacagagatacgacacggtggaatggaacggcatccgctgtttcatttccggaagtaccaatggaaggcctgttctaagagacataaactggaagcttgtaacaccaactacttccgtaaacgcaaagactgttaggttcctatgccgcctacacggaagactattatcatcacaacaaccgcaaggtgcaatataa

SEQ ID NO: 423 - DNA, 282 bp, unidentified
  misc_feature 1..282: note = Ga0223845_10169920 JGI
  source 1..282: mol_type = other DNA
gtttactcacaaaaatgctgtcattaacagtcgatagtgagtaagccgattagcctcagtcatttaaacatcatatcgagaatgtgaatattaaatgaactacgttagaagtgaatgtataggcaccttgaaatagtcgcccaagtttcaagctctgcggtcagtgattaaaaggagcgaaagcaacagtgttgctgacaagaaaccatttcataacattggcgatgggcgcataacgggcattagcccgacttacagtattttaaaattttagagtagatg

SEQ ID NO: 424 - DNA, 1230 bp, unidentified
  source 1..1230: mol_type = other DNA; note = Sediment metagenome
atgccaatccgaaacaaacaggttaaacgggagactagagtggtcaagatcagcagaaaagctggtcgtttaaagacaactgaactgtctgcttgtggcaaggcaaaggatgttggaaatgcctccctagtttccaacctctccgacagtcagcctcgaagggaaagcacattgagggattctgaaaagaaccccttggtgaccgggaaggtaacttcccctgttctatggatcccggttgtttctaagaccgggaaacccctgatgcccactcgtccaaagagggcgagagagttgatgaagaaaggaaaggcgatcccgaagtggaaaactggtatcttctatcttcaactaaccgaaaggaaagacggagatgttcagaaagtggtagttggaattgatccgggcagcaaaagagaagcattcacgatcaagagtaacaagcacacttatttgaacatattaagtgatgcggttacttgggtgaaagaggcagttgaggcgaggggacaagccagaagaggtaggaggtacagaaaaactccttgtcgaaaaaacagagaaaatcgcctaagaggaagtttggctccatcaaccaaggcaagatggcaggcaaaactgagaattgtcaacattctgaaaaaattatttccggtgaccagttttattgttgaggacattaaggcaacaactaatcacggtaaacgatggaacaaatcgttttcacctcttgaggttggcaagcaatggttttattctgagctaaaagaatttggtaatcttgaggttaagcgaggatatgaaaccaaagaattcagggatgttttgggtttgataaagacgcaaagtaaaatggaagaaaaattttctgctcacaacattgactcgtgggttttagcaaattcagtggtcggtggtcacactcaaccagacaatacttcaattttccgtttgattcctttaagattccatcgtcgccagcttcacgcctttcagccagacaaaggaaatttcaggcgatcttacggcggaacactctctcaagggctaaaaagaggttcattgattaagcataaaaaatgggggttgtgctatttaggtggatattctgaaaaaacaggattaagcttgcataagctgggggacggcaagagattgtgccagaccgccaaggaaaaagacttaataattttaaggtttaataattggcgatggtacaagagaacataa

SEQ ID NO: 425 - DNA, 415 bp, unidentified
  source 1..415: mol_type = other DNA; note = Sediment metagenome
gtagtttcatttccttatccagttgaaggcactgtggttcgcccaccgggtcagggctgcctttcctgtgtgcataaaacctactgttcggcgatttactggttgcgccgtgatgacagccgttttgacgatcatacgggtcgggcttgtgcttcttggtcaaacaaccccgccgatattgttaccaccgtgacagaggatgacattgagcaaaataattacgagattgatacggggattgttgatggttgggaagataatcagttttttgaccagaaccagaaattttagcaatacaaacgggaatccctaatgcctagagatattgttaaccaccccatagagtaaaatctaatggggcttgtaaggagtaggaatgccaatccgaaacaaacaggttaaacgggagactaga

SEQ ID NO: 426 - DNA, 1599 bp, unidentified
  misc_feature 1..1599: note = Ga0310139_000809 JGI
  source 1..1599: mol_type = other DNA
atgccactcccagtcccggacgatgaagtgccgtatctgccgagggagaccaaccggcaaaagccgtgtttttaccttttttttttgaaaggtggtggattacgaatggtatatgtaatatccagggaaggcaggccattaatgccgacaaagagatatgcaaaagtcagggttctgctgaagcaaaagagagcgaaagtagtaatgtcaaagccatttacgatacagctgttgtatgaaaccacagcatatacgcagccgatagtggcgggatatgatcctggcagaactcaccaatcgataacggctgttaaagaagaaacgggtgaagtgcagatatcatcagagttaataagcaggaataaagaggtaccgaaactgatggcgaaaaggaagatgcacagaatgataaggcgtcgcaatcgtcggatgaggaaaataaggcatgcgaaaaggtgtggcgccacattcgaagtaacgaaatatatatatcagcccggtgcagacaagccaattccagtcaaatatataaagtgcaaagaagcgaggttctgcaataggaaacggccggagggctggcttacgccaacggcaaaccatctgcttcagacgcatatcaattatctaaagaagatccggaaaatactgccgataaccagggtggtactcgagtatgcgaagtttgacatacaaaaacttgaaaatcccgatattaaaggtgagggatatcaggggggcaggttatatggatatgccaatacaagggaatatatagaagaaaggcaaaaccacaaatgtttgttatgcggtaaaaatccgatagaacatttacaccacataaagccaaggcatgaaagcggaagtgacagttgcaggaataaagctggtttttgcaataaatgtcatataaaagtgcacaaaaatgaaaaagtcagggaaaagcttgccgagaaattggaaggcttaagcaagcaatatgattcaacaaacattttaaactcaattatgccgtatttgtataaggagatacagaaaataatgggtgcaaagaatgtgcaaatatgctatggatacgaaacgaaaataatgagaaagagtctgggtctgggaaagactcattacaacgacagttatgcaatggcattaatggcggcaaaacaaacaagcaagattcaagatataaccccgtatatgttcaaacaatacagaaggcataaccgtcaattctgtgatgcggaaagggacaggctgtataagaaaggcagggagatagcagccaggaacagaaagaagaaaatggagcagaaaaatccatcgctggaagattatcgggaagaactaattacaagcataggcaaaaaagaagcagcgagggtaatatccgggctaacggtgtataaagcgataaagagaataagaacgtctatcaaggaaataccgatgccgcaaggcagcatagtgatgtacaaaggtaagcgaatggtagtgatgggcgtattaaacaaaggtaatttattggtgttggaaaaccatgaaggttatgtaccggtaaaggaatgcaaattactggcaagaaacagcggtatagtatgtctgtag

SEQ ID NO: 427 - DNA, 226 bp, unidentified
  misc_feature 1..226: note = Ga0310139_000809 JGI
  source 1..226: mol_type = other DNA
gtcaactactccttaatgaattaaggagcttgcagctttgtagctgtcggttgtatctataggggaacctgctggtacagtagttgaacaggcggttgtacggcagcgcactccgaggatgccactcccagtcccggacgatgaagtgccgtatctgccgagggagaccaaccggcaaaagccgtgtttttaccttttttttttgaaaggtggtggattacgaatg

SEQ ID NO: 428 - DNA, 750 bp, unidentified
  source 1..750: mol_type = other DNA; note = Activated sludge metagenome
atgcaacatgtttttgtgctagaccagaacaaaaaaccacttgacccttgccatcccgcacgggcaagaaagcttttgcgttctggtcaagcggcggtgttccgtaggtttccatttacgattattctcatggagcgaacactgaaagaatctgtgacgcacaagtactgtgtcaagattgaccccggaagcaagcaaacgggaatggccttagttcgagaaggtgaccacaaggtcgtttgggcggcgataattcaacatcgtggacaggtcattcgagacaacctgcttgcacgtagagctatcagacgcgggaggagggcacatcattgtcgctaccgtcctgcacgatttgataatcgtcatcgccaaaaaggttggttgccgccaagtctggaaagtcgtttggcgaacatcgagacttgggtgcgaaggctggcgttgcacacgccattgactgccatttcaatggaactggtcaaattcgatactcagaagatagaaaatcctgaaatatcaggggttgagtatcagcaaggcaagcttgttggctacgaagtccgtgaatatctactcgaaaaatggggacgaaagtgtgcctactgcgggaaaactggcgttccgcttgaaatcgaacacatcattccaaagtcgcggggtgggtcaaaccaagtttcaaacctaacactggcgtgtgagacatgcaaccgcgccaaaaacaacctatccgccgtagaattcggccatccg

SEQ ID NO: 429 - DNA, 286 bp, unidentified
  source 1..286: mol_type = other DNA; note = Activated sludge metagenome
gtcaacgactgctaggctaaagacctagcggcttgggaaaatccaagcccatgttgaccagccacagccaccagcggtaacgctgacggggctacgttgtcaggagagtcaaagaacacacgttggggtgcgtgccagcctcaaccactgcaactggatgattaaaagaacaagggtcttgttcggtgtcatctggaagtgctgactgataacattggcgaggcaaactttacccccgataggggagtacaacccgtaagggaaaggacataagaaaatgcaacat

SEQ ID NO: 430 - DNA, 1287 bp, unidentified
  misc_feature 1..1287: note = Ga0373625_0000621 JGI
  source 1..1287: mol_type = other DNA
atgaaaatgcagcagttacaattaaagttaaacaacatacctacaaatgcttcactagtttgtagctctataagttttgatttaaacaaagatgtaagtcttagtgatcaagacaaagtactggattgtaacaatctcgaagtgaatcaacgcttacatacaagcggtcttaaagacattgtgtatgtattaaatgtaaatgcgcaaccattaatgccgtgtagttgtgcaaaagctagaaaattattaaaaaaaaggagagctaatgtcgttaaaaattatccttttacaattagattaacttttaattgtgaaaatgtggttcaagatgtcatgttaggcatagatagtggatttaagtatattggttattcagcaattactaaaacaaaagaattaatttctggaacattgacattagattgtcaaacgattagtagattagcaaatcgcagaatgtatcgaagaaatagaagagatagattgtggtatagaaagtctagatttaataatagaaaatctagtaaaaaaggttggttgtcgccgtcaattaaaagaaagtataatactcatgttaatttgattaataaattaaaaaaactcttacctattaaagaagttattatagaagttgcaaaatttaacagtaatattaagtcgtcaaaattaattgataatagtaaatgtcaattgtgccataaaaattttagtaatactaatcacgttaatgaacatcacattattactagactgtatggaactaatagaaaagctaatatagcttatgtacatgaatcttgtcacaaaaaaattcataaaaacaaaatgttagatatgttcgagaaagataaaatttatagacagtctgcttttatgaacattattagtaaaagatttttagaagatggttataagactatttttggatttgacacttttaataaaagacaagtttataatttagaaaagactcatactgatgatgcctttattatagcaggaggagataatcaagaaagagcaattaataaaaatgtagttcaaaaacatagaaataatagaatattacagttaaatagaaaaggttttaaacgttcaatacgacgtcaaaggttcaaaatacaacccaaagatttgatatggataaacaacaagaaatatatttcaaaagggtgctttggaaaacgcaaacgggtgacatataatgatgaaaatggtaaaagttgtcaacaatacatagatagaattgacaaatattataattttggaagtttaatttttctatga

SEQ ID NO: 431 - DNA, 361 bp, unidentified
  misc_feature 1..361: note = Ga0373625_0000621 JGI
  source 1..361: mol_type = other DNA
gtcgactgctaatttttagtttaaatggtgacatttaatgaaaaagtcgattagagagcatgaaaatgcagcagttacaattaaagttaaacaacatacctacaaatgcttcactagtttgtagctctataagttttgatttaaacaaagatgtaagtcttagtgatcaagacaaagtactggattgtaacaatctcgaagtgaatcaacgcttacatacaagcggtcttaaagacattgtgtatgtattaaatgtaaatgcgcaaccattaatgccgtgtagttgtgcaaaagctagaaaattattaaaaaaaaggagagctaatgtcgttaaaaattatccttttacaattagattaac

SEQ ID NO: 432 - DNA, 1281 bp, unidentified
  misc_feature 1..1281: note = Ga0307928_10005039 JGI
  source 1..1281: mol_type = other DNA
atggtagtgtatgtaataaataaatatggaagacctttaatgccatgtagtcctgctaaagcgagacatctattaagagatgggaaagctaaggttaaaaaacgtacaccttttactatccaacttaaatatggaagttcaggttacactcaagatttaaatttaggtattgatcctggatctaagaaagttggaacagcagttcgcagaagtggaacaaaagaaattttttactcttctgaaattactttaagaacagatataacaaaaaagttgaaacagagatcttcttatagaaaaactcgtagaaatagaaagacaagatatagaccaccaagattcttaaacagaacaagaagtgaaggttggttacctccttcagttcaaagtaaaattaattctactaagaaagagatagattatattttaagtattcttcctataactagaatatcttttgagtattctaaatttgatatccatagactcacaaataaatttgtgagaggtttctggtatcaattaggagatatgtatggttatgaatctaccaaagcttatgtcttagaaagagataattataaatgtcaatcatgtaaaggaaaatctaaagataaaaagttagaagtacatcatataatctatagaagaaatggtggaactaacaaaccttctaatctacttaccttgtgttctacttgtcatgatcttgtacataaagatcaacttattttaactaaatatcaattaaaagcttgtgttaatacaatagatgccactcaagtatctataattagtaagaggatttgggagtatcttttatctcttaaaccagattatattttagctaagacatatggatatagtaccaaagttaaaagaaggttacttaaaattaagaaatctcatactttggacgcagtagctatctcttatggtaggaataagaagtacagaaaaggacttaggaaaccaagaataatagataacttttataacaagatttgcacttctaaaggagactaccaacagactaaaggtagacattcagaaaagcaaattccaacagataaaatacaagggttcaggaaatttgatcttgttaagtaccttggtaagatttatagtattaaaggaagaagatccacaggatatgtagaattaatggatcaaacagttaagaatctgaatttaagaccaatacctaagtttgataatttaaccaggttacaagctagaaattcatggattatatttccaaatacaattcaaaatatttga

SEQ ID NO: 433 - DNA, 311 bp, unidentified
  misc_feature 1..311: note = Ga0307928_10005039 JGI
  source 1..311: mol_type = other DNA
gtaaactacctacgaactaaagtttgtaggcttcaaggtgacttgaggatagctaatagtttaccagactcagaactaagaaattagttctccgttatttaagttatcagaccaaagaatgccgcctcagttctttgctctctggaggcactgtaaacagagattaatatgtctcggtcaacctcagtacgacctacgaagtaggtaagcttagataacattgtcgagaggaagttggaaaagtttagtggtaacagctaaatttagtacacacaacttttaacttaggttaggaggtacactcaatggta

SEQ ID NO: 434 - DNA, 1365 bp, unidentified
  misc_feature 1..1365: note = Ga0315291_10038423 JGI
  source 1..1365: mol_type = other DNA
atgcagaagttacaagcaaagttcaagaacacaccaaaggatgcttctctagtcccttgctctgtaaattcttcattaaacaaagaggaaactcttagtgtgaaggataaaatactgacttgtaacaatcccgaagagaatctacaccaacatagaggtggttcgagcttgcgagtttcgaatattgtctatgtacttaacatgagaggacaacctctcatgccaactactccacgaaaagcaaggatattactacaaagcaaaaaagcaaaagtcgttaaaagaatacctttcaccattcaattaacatatcaaacaggtgaatctaaacaattaatagatctttgtgttgattctgggtacaaacacattggtctatcagctaaaacaagtaaaaatgaagttttctcagcagatattaaactcagagataatatcaaacaattacttgcagaaagaagtatgtacagaagaaacaaaagaaacagattgtggtatagaaaatcgagattcaataatagaggtaaagaaggatggtttccaccgtctataatgaacaaaattaattctcatattaatattattgacaagatatgttttcttttgccaatcacaaacattatagtagagacagcttcttttgatatacaaaagattaaaaatccagatattcaagggaaagaatatcaagaaggtccacagaaagactttgataatgtaaaagcatatgttttgtacagagacgaatatcaatgtcaatattgtaaaaaatcagatataaaacttcatgtacaccatattgaatcaagacaaaccggaacaaataatccggataatttgattactttatgcgagaaacatcatagagatcttcacgatggtaaaattaaattaaatgttaaaaagccaaaagattttagaaaccagacatttatgtctatagcaagaaataaaatgatggaaatgttaagaaaaagatataataatgtacaagagacctttggatatataacaaaagccaatagattatcattaggtttggagaaatcacatataaatgatgctttctccataggtaatggaaacatacagacgagatgtttctcaaatattattgttcaaaagagaagaaataatagatgtttacagataaatagaaatgggtttaagccgtctataagaagaaagaaatctaagttacaacccggagatttggtaaaagttaagaatattttgtataatgtggtgggtatgtttaacaagggaacatatgtaagagtgaagaacaatatgaataagatattgaattttaatattaagaagattaattgggaatatagttttggaggatttgtttggaattaa

SEQ ID NO: 435 - DNA, 269 bp, unidentified
  misc_feature 1..269: note = Ga0315291_10038423 JGI
  source 1..269: mol_type = other DNA
gtcaactaccctcacctaaaggtgggggcttgtgaagtgatttacatggtaacagttgattagggagcttaattcaaaagattatgcagaagttacaagcaaagttcaagaacacaccaaaggatgcttctctagtcccttgctctgtaaattcttcattaaacaaagaggaaactcttagtgtgaaggataaaatactgacttgtaacaatcccgaagagaatctacaccaacatagaggtggttcgagcttgcgagtttcgaatatt

SEQ ID NO: 436 - DNA, 1266 bp, unidentified
  misc_feature 1..1266: note = GENOME_ACESSION: mgm4743564.3 MG-RAST
  variation 1129..1176: note = n represents any nucleotide
  source 1..1266: mol_type = other DNA
atgccagagagtctaaccgctagtgctccgttaattcagttatcacaccccggggtgttatacctggctccgcggctctgtgcaggctctgtaaacagtcctgagagggtaagggacagtcaacctggtccgtgcgcttggcgcacaagctgttttaacattggcgaaggtatccaactggccggaacattcagtacacaaggaacaatgcgaagggtaagtattaccggatttggttccggagaaaggcaactgatggtttatgtattaagtgcagcgggacagccgctgatgccgacaagacggtatggcaaggtccggcatctcttacgggaaggacgggctgttgtcgtaagacggtgcccgtctacgatccggctgatgtatgacacgcctgaaagaacacagtcggtctctctcggtattgatgcaggatccatacatattggattgtctgcatgcgagaagaagcacgaattattatcagcagaagcagaactgcgcaccgacatttccaacaacatcacacagcgcaggacactgcgccattcacgcaggaacaggaagacgagataccgcaagccgagattccagaaccgtgtccacgcaaagaataaaggatggctcgcaccttccgtacaggcaaagtgcgacgcacatgtggataccgtgaaaaaggcgattgatatccttccggtatcagagatcacgattgagatggcacctttcgatacacagatgctgaaagccgagatggcaggccagccgcttccatccggtgaaaactaccagcacggagaatcagaaggttatgacaacatcaaggcttacgtgaaatggcgcgacggttatgaatgccgcatctgcggggccgagcatgtacacttacaggtacaccaccgcgatcagcgtcatgatggcggaagcaacatgccggcaaacctgatcaccgtctgcccggactgccacaaagcgtatcatgaaggcaggctgcatgggaaaaacgcggaactgatggaacccggaccggaagtaaagccaatgcgtgatgccgtattcatggggatcatgcgctgggcggtatggaacaggctgaaacagttcggccttccgctacatatgaccttcnnnnnnnnnnnnnnnnnnnnnnnnnnnnnnnnnnnnnnnnnnnnnnnnagtacgggcttgaaaagtcacatcgtaacgacgccagatgcattgcaggatatggcggggcagaacctgatcctgagtggtattacgtga

SEQ ID NO: 437 - DNA, 271 bp, unidentified
  misc_feature 1..271: note = GENOME_ACESSION: mgm4743564.3 MG-RAST
  source 1..271: mol_type = other DNA
gtcaataacccgcggtcaaaaccgcaggcttgaaaaagcttattgactagcctaagcgcagcgacggcctcatgccagagagtctaaccgctagtgctccgttaattcagttatcacaccccggggtgttatacctggctccgcggctctgtgcaggctctgtaaacagtcctgagagggtaagggacagtcaacctggtccgtgcgcttggcgcacaagctgttttaacattggcgaaggtatccaactggccggaacattcagtacaca

SEQ ID NO: 438 - DNA, 3735 bp, unidentified
  source 1..3735: mol_type = other DNA; note = Human gut metagenome
atgagagtatttgtattcaatatgcgtggcagaccattaatgccatgctcacaaagaaaagccagattactcctaagggaaaataaggctatgatttataaatatcatccatttacgattcagttgacttatacaactggagaaacaaagcaggactgtcatataggtatagacacaggttctaaatatataggagctgctgtcagatcagaggataaggttttttggaaaggcgaaatcgagcttcgacaggatatcaggtcaaatcttgatacgaaacgtatttatcgtagaagcagacgaaatcgtaaaacaagataccgaaaaccaaggtttttaaatcgtaagagaagagatgaatggcttccacctagcttgcaaagcaggataaatcatacgtttcattggattgacacattgagtagtttggttccaaaccccattcttcacatagaagtcggtaagtttgatgtagcaaagatgataaatcctgaaatccatggagttgactatcaacatggtcagacatatggtttcttcgatgaaaggtattttgtttttgcaagagataactacacttgtcagtgctgtggaaagtcaaaaaataagattttgaacacacatcatatcatctaccgcagtaatggcggaacaaacagagttgataatcttattacagtttgcacagattgtcatacatcgcagaatcacaggaaaggtggaatattctatcaatggcaggagcagcataaaaaggtaaaacaatacaaagaaccgccgttcatgaataccttacgtaagaggatatttgtagcgtatccagatgctgagatcacatatggatctgaaacaacaccaaaacgtaaggcgatgaaattggataagacgcactataatgatgcgattgtcattagtggtatcaatgaaatcaaagaaaatcctgaagaatggttactgataaaacaattccgcaaaaagaaacgctctttacacgaggctaccgcccgtaagggaagaaaaaagccaaacagaaatcagacgcgtaacagtaagaatacgccttattataaaggattttatcttaacgataaggtttcagtttttggaagaccaatgattgagtactacagaagcggaacaggttcaggaggagctgtaaacgttgaatacacaacaaatattttggacggatttgaaaacagcaaccttaactttaacaagactatagttgaagactataaggaatggttaaaagaccatccatttgataacggtggcggtggctgggcatgcgagccatggttccagaaagatatggaaatcacagcagattatgcaaagaaacaggcagaatcaactaacaaggctgtatacattatcggacgtacagcaggagaagataaggacaacgccaactgggtaggaagctatcttcttacagatgaagaaaaagaaaaccttaagaatataacagaagctttcgaggatgtttgtgtagttcttaacgtttcaaatattatcgaccttaagtggattgatgaagaacagtttaaaggacacatcaaatcagtaattattgtatggcaaggcggtatggaaggtggaaacgcagtagctgaagcactttcaggcaaggctacaccaagcggtaaattacctgacacagtagcttatgatattgaagactatcctgctaatgacaactttggcaacgaacttacaaatctttacaaagaagacatttatgtaggatatcgttattttgaaacatttgcacctgaaaaagttcaatttgaatttggtttcggactttcatatacaacatttgatatcgaaacagtatcagccgatgcagatgatgaaaaaatcacattagaagttaaggtaactaacacaggcgacaagttctcaggaaaagaagttgttcaggtatattacgaagcaccacagggaactttgggacagcctgcaagacagctttgtgcatacgagaaaacagaaaatcttgcaccgggtcagagccagacattaaagattgctttcgatattaacggaattgcatcatatgatgactcaggcgttacaggcaacaagtcatgctacgtattagaagcaggagattacaacttctacgtaggtaacagcgtaaaaaataataaactagcttatacatataaaattgaagaacttaaagtaacagaacagctttcagaagctgcttgtcctaacgatgaaaatcttacattaatgaagccgggcgagagaagagaagacggaacatacgaaattacatatgtaccatcacagaagcctacagttgatatggctaagagaatagaagacaatcttccaaaagacatgaaaattacaggcgatgtaggaattacattacaggatgtaaaagcaggtaaaaacactattgaagagttcgttgcacagcttacagttgcagaattggcacagattgtaagaggtgaaggaatgagtaaccctagagttacaacaggaacagcttcagcttttggtggattaagcgatacattgtttgcttacggaatccctgcagcatgttgtgctgacggccctagtggacttagaatggaaggaaaagctacacagcttcctattggaacagcactttcagcatcatggaatcctaaacttgtaagagaactttacacaatggaaggtcaggaattatacggaaatcaggtagatacattacttggacccggagtaaacattcacagacatcctttaaatggacgtaactttgaatactattcagaagatccatacctttcaggaacaatgtcagttgcatcaacaggcggtattaaagacggtggtgcttggggaacaattaagcatttcgcattaaatggtcaggaatcacatagatttaagattgacgcagtttgctcagaaagagcaatcagacagatttatctcaaatcatttgaaatggcagtaaaagccggcacagttaaaacattaatgacagcttacaatcctattaacggacactgggcagcttcaaactacgacctttgtacaacaatccttagaaatgaatggggatacgagggtatcgtaatgactgactggtgggccaagatgaatgacgttgtagaaggtggcgaagaatcaaatcaggatacaagagatatggttcgctcacagaacgacgtatatatggttgtaaacaataacggcgcagaagttaactcaaacaacgacaacacagaggaatcaattaaagagggaagacttacaatcggagaacttcagcgagctgcaatcaacatctgcaacttcattctttcagcacctgttattgaaagagaattagttgacacagacgttgcaaaacattacgattcagttccaaatgatcaggccaagtatgaagtatttaacattgaaaaagataataaggtaatgttcaatagcggagcagaagcaacattagaagttgaagacgaaggggaatacacaattattgttaacatctcatttgacaagtccaacttatcacagtcaacagtaaacgttaatgccaacggcacaacaatggtagtaatccagactaacggaacagacggcaactggattacacagaagctttgcaaggttaaacttgacaagggtgtatacaacttaaaacttgaagaagtattagcaggaatcaaagttaaatatattcagtttaagaagattcctaagaaaaaataa

SEQ ID NO: 439 - DNA, 286 bp, unidentified
  source 1..286: mol_type = other DNA; note = Human gut metagenome
gtcaataaccccgacctacagtaataactgttgaggtcggagcttgtaaaagctcatattgactagcctaagttcttcgagaactacgttgtttatgttatcacacctgcgaatgataccatagtttgcagccttgtgtaggctctgtaaaagttctgtgaggtaggaacggtcaacctagtatgttcgatcacgacaagcatttacaacattggcgaagggtaacaaactttcaaaagaaagggacagcacttgagagtagctgtcaaaggtaaaaactatgaga

SEQ ID NO: 440 - DNA, 1140 bp, unidentified
  misc_feature 1..1140: note = Ga0172382_10042448 JGI
  source 1..1140: mol_type = other DNA
atgttagtttatgtcatcaacaaaaacggcaatccgttaatgccgtgtaagccgtcgaaagctcgtaaacttttacgcgacaagaaagcgaagattgtgaactatgcaccattcacaattcagcttcaatgggactgtaaggaatatgttcaaaaagtgtctgtaggaatagatagaggttcgtcttacacgggttactgtgctatttctaaagacaaagtattgatttcaggacgaattgaccacagattagatattaaagacaagatgactgctcggctcggtaatagaaaaagtagacgaagccgtatgtggtatcgtaagccacgttttctcaatcgagcatctagcagacgagcagggcgcttaccaccatcaattaaagcaagtgtagaagaagtgtttcgtgtaatacgaaaattaccaattcctatttttgaaattacttgtgaagatgtgctgattgatatcacgaaattaaatgatccaagtctaaaaggtagtgcgtatcagaagtcgaataagctcaacgagaacttgcgtctagcttgtttactgcgtgataatttcacatgttatttatgtgggaacaaacgcaagcatgaaaagctagaagcgcatcacatcgtgcccgtttcacagaatggtaagaatagtatttataatttagtaacgttatgtaataagtgccatgatgatgttcatagcgagaagttgaagttagatttaaaaggtatgggtggtattcaagatgtagtagcacaacgaactatgattggtaagacatatttgtataatttgttgaaaaaatatataacaccaaatttatatttactatttggttatgaaacgtcacattatcggaaggaattaggtctagtgaaagatcatgacacagatgctttttgtatagcaaatcaccacgcacgttacgatttaacatatgaacgtgataatgtatataatgtgactttcagagctaaacagacgagacgtagatatcatgataagcctcagaaaggtaagggtcgagttgaatatcaagtgaatgaaagtctagaaggtttccggaaaggtgatttggtgttagtaaatagttgtgtgaaacagattaattcgatatattctgatgggcgttta

SEQ ID NO: 441 - DNA, 249 bp, unidentified
  misc_feature 1..249: note = Ga0172382_10042448 JGI
  source 1..249: mol_type = other DNA
gatatggtctttttagacatagttccttagctagtagtatttcatagtatggaactaacaggaggctggctgttgctagcagaagttattaggtgaacagtttacttaccctggggtgttcgctccagctccaggctctaagggacaggtttaagggtagcggaaacgtgaaggtgatctgtctgaggaaaccctaataacaactccaaggagcaaagaactctgtcaaaggagaatataactatgtta

SEQ ID NO: 442 - DNA, 1995 bp, unidentified
  source 1..1995: mol_type = other DNA; note = Human gut metagenome
atgccctgttcaccggcaaaagcgcgccttctgcttaaagagaagaaagctattgtgaagaggcgaacgcctttcactattcagctgacgattgcaacgggtgagtccaaacagccggtgactctgggtgttgatgccgggtacaaacatgtcggcctttccgcatcaacggaaaaggctgagctttatgcatcagaagtcgaactccgtcaggacgtctctgatctgctctctgctcgtcgtgcgttacggcagtcccgccgtagccgcaacacgcgctatcgtgcaccgaggttcgacaaccgcatccgcaccaaacgcaaaggctggcttgcaccgtcggttgaaaaccgaatcaacgcgcacttgtcgcgcatagaagcggttcttcgactgctgccggtcacaaagatcaccgtggaaacggcgtctttcgacttgcagctgctgaagaatcccgacatttcagggaaagaataccaggagggagaacagctcggcttctggaacatccgcgagtatgttctttgcagagacgggcatgtttgccagcattgttacggcagatcgaaagacccggtgcttaatgttcatcatctggaaagcagacgtacgggcggagattcacccggcaacctgattacgctttgtgagacgtgccataaggcccttcatcgcggtgaaatcacgctgaaggcaaagcgcggacaatcgttccgcgcggaagccttcatgggaattatgcgctcggaggtgctgaatcgcctgaaggcgtcgcatcctgagctggaagtgaacaacacctacggttatcggactaagcacgcacggatcgcgaacgacatcgctaagtcgcattgtgcagatgctttctgcatcgccggcaacctcggcgccgaaaggctcggcgaattcttcttccagaagcagacgcgtcggaacaaccggcagattcacaagctctccatcctcaaaggcggcattcgaaagcgcaatcaggctccctttgaggtcaaaggcttccgtctttttgacaaagttgcctgccagggagaagaaggcttcattttcgggcgtcgatcaaccgggtactttgatgttcgaaagcttgacggaacctgcatttcggcaggcatcagctacaagaagctgcatctgctggaaaagagacgaacctatttaacagaaattcgaaaggaggaggcgcttccccccccctgcctgaaggcaggggctccgcgcctaaatgtgatgaataacatcgactttcacggcatcgaggagatttggtcctcgctttccacttcttcccttctgtggctgacggtcacgctggccgcttacctctttgctcagaaactctataaatggagtaattggaattcgctcttaaatcccgttgcggtttccattgtcacggtcgtccttttgctgatggccacgcatacgccctatcagacttacttttccggcgcccagttcattcattttctgctgggaccgacaaccgttgctttggccgttcctctgtacgacctccgaattcagcttgctaaaaattggctgccgattctgctgggactttttgccggcgccgttacagcaattacttcgaccgtcttgattgcaggactcctcggcgcatctccggaaaccatcatcagcctggcgccgaagagcgtgacgaccccgattgctatgtccatcgcagaaaaactcggcggtctcccggccctctctgcttccctagtggtactgacaggtgtcctcggttcaatttgcgagggccccctcttcctgcttttgaaagtcgactcttcatcagctaaaggttttgcgctgggactttccgcgcacggcatgggcacttcccgtgccttccagattgattcaacagccggcgcctatggcagtttggctatcggcttaaccggtttaaccactgccctgttggcgccgctgctcacaccgcttttaatgaagcttttcttctaa

SEQ ID NO: 443 - DNA, 247 bp, unidentified
  source 1..247: mol_type = other DNA; note = Human gut metagenome
gtcaactacctcggcctaaaggccgcgacttgaaaaagcctctagttgactagcctcaggccgtcatttggcggactacgttggtcgggattttataggcaccgcgggatgcagatcctagtcccgcgctctgcggccgatggttaaaagctctgagaggtaggagcggtgctgtcggcttgaaaccccttccaacattggcgaaggatcacaaccggtcgaaagaccgaggagataaaacttgaga

SEQ ID NO: 444 - DNA, 1107 bp, unidentified
  misc_feature 1..1107: note = EM338_1079660 JGI
  variation 994..1062: note = n represents any nucleotide
  source 1..1107: mol_type = other DNA
atggtgtacgtacaagacataaatggtaaacctatgatgccaacaacgaggcatggtaaggttaggagactgcttaaagacaaaaaggcagtcgttgtgaacctatgtccgtttaccatccgattaacgtacgttacatctgattacaaacaggaaattgtgttaggcgttgatgctggtactaaacatgttggtttatcagctacgacgaaaagcaaagaactttacagtagtgaagttatccttagaaatgatatcgtagatcttttgtctaccagaagagagctacggaaaacaagacggaataggttaagatatagaaaacctcgttttaataatagaataaaaagcaagcgttcaggatggatagcaccttcggtgaagtacaaaatagacgcccatattcgtgttattgacaatgtatgttctatattaccaatatctcgtattgttattgaagtagctcaatttgatactcaaaagattaagaatcctgaaatattaggtaaagaataccaggaaggtgatcaacttgagttttggaacacaagggagtatgttttagcaagggatgggcataaatgtcagtattgtaaagggaagtcaaaagataagatccttaaagtccatcatcttgaatcccgaaaaacgggaggtgattccccttctaatcttattaccttatgtgaaacttgtcacaaagaataccataaaggtaatatagatttgaagatcaaacggggatcgtcgctccgcgacgcggccgtaatggggatcatgaaatggaagttgtatgaagaactgagatccagatacgacagagtttctatgacgtttggttacattacgaaacataatcggattaaatacggtattgaaaaatcccatacatccgacgcgtttgtcatttctatgaacattaatgcgaaacgaatcgaacgtcaatatttaaaacgtttaattcgtagacataataggcaaatacataaaatgnnnnnnnnnnnnnnnnnnnnnnnnnnnnnnnnnnnnnnnnnnnnnnnnnnnnnnnnnnnnnnnnnnnnnaattttaaaaggaggaaagaagaaaaacaatcaagctccttttga

SEQ ID NO: 445 - DNA, 271 bp, unidentified
  misc_feature 1..271: note = EM338_1079660 JGI
  source 1..271: mol_type = other DNA
atataatttcattataaggttttaatgtaccataaatggtccggatattagcctaagccttgaaacgaaggctacgttatttgagaatatatagttacctacggatgtttgcccaagtctgtagctctaaggatggtgattaaacaggagtagtgtatttggcgaaacagtgttgccattatataaaacctcttataacattggcgatgggtactaacagagttttactctgacttatgttgaataaacattaaaaacgtttgtagatatg

SEQ ID NO: 446 - DNA, 1410 bp, unidentified
  misc_feature 1..1410: note = Ga0209249_1001676 JGI
  source 1..1410: mol_type = other DNA
atggatgctcgtaataatgttggacacccaactagacgtgttggatggattaacaagaaattacgagatggtactgctaagaagctcaaacaatatacaaatgtaatacaagtacaattattagataagaaatttaatacacaagagactgttgattgtgaattccggatcggaattgatcctggatatcaacatattggtttctgtatgtacaagatctacaacaataagattacaaaattattctctggagaagtaactactagaacagaggagatcaaacgattattatcagagcgtaagatgtatcgaaaagctaggcgacgatgtagacgtgagaatgttaaacgtaagtttggagctcgtaagtttcgacatcccagatggaagaatcgaagagacaagcttgattggaatcctactctcagacatttgatagaagttcattgtaatttgatgaataagatcacaaatctggttggattaaatcaaatgaaagtgcatgttgaatactcgacgtttgatatacataaactggttaatcctggtgtaagatcattttggtatcaactaggaccaaaatatgggtatcagaattcaaagttgtactcaaagaaacgagatggttattactgtcaagtgtgcaaatctagggacatccctaatcttacgatacatcatattgttcaacagattgatggtggtacagatcgtccagataatcttgtgactgtctgtagaaagtgtcatgataagattcatgccggaaagattaaacttagttctaattataaaccgaagatctttcgagatacaggagttctaaattcttgtatgaagaagatctttgaaaccttcgaagatgtaattccaactcaaaacacttatggatacataactgatgttatgagaaagagtcaagatctagagaagacacattcattagatgcaagtataattgctttgtgtgattcacttgggtttcaagaagaatttaatgattatgatttcgaagatcttaagaatgagttagaatttgtacagaaaagaagacatgtacgtactcatacaacgagactcgaagatcgtaagtattatcatgatgattacattgttgctaaaaatcgacggagacgagagactcagaaagatgatagtcttgaggactttcgaaaagattttccacgattacaaatgactgtgaaacctggagttaagagaccaagaatatcgaatacaaaagttctctttaaacctggtgacaaagtcttgtataataatcaaatttgtacttgttatgggtggggttctactcatggtgaagtcggattaattgaagttggatcttatgtcaagactcgtctaagtaaagtacttgcaaaaaatagtggactcgtatgcttacattga

SEQ ID NO: 447 - DNA, 260 bp, unidentified
  misc_feature 1..260: note = Ga0209249_1001676 JGI
  source 1..260: mol_type = other DNA
gtcaacgactacccactaaaagtgggtagcttgtaattagttctaaagaacgttttacaagccattgttttaatggggttgaacagacgtttgactagtggttcaccaacgaatgccactcccagttcgttgctctggaggttaagtacaatcctagtcctcattgccgattagtaggtaacgaaaaccggtattactgctagccaagtcgggggagactaagctttaaaggaatgtttccacaccataggagacacaaa

SEQ ID NO: 448 - DNA, 1422 bp, unidentified
  misc_feature 1..1422: note = Ga0116188_1006392 JGI
  source 1..1422: mol_type = other DNA
gtgaaacttgagggtaattggttgattagggggcttaatttggaaggaattatgcagacgttacaaagagagttcaagaacgtacctacggatgcttcactagtctgtagctctacaagtcgtgcgttaaacagagaggaaactctcagtgctcatggcaaagtactgatttgtaacaaccccgaagtgaatcaaccccagcaaggaggggattcgaacttgagagtatcgaatattgtctttgtactttctatgagtggcaagacgttaatgccatgtaaaccacaaaaagctaagaaattgttaaaaggaggtaaagctaatgttgtaaaaagatttccatttacgattcgattaactatgggtactggtgagacagtacaggatattaatttaggcattgatagtggttataagcatgttggattttcaagtataacagaaaaagaagagttgttttcaggaacattaaatcttgatctaaagactaaagatagacttaatgagaaaaagatgtatcgcaggaatcgcagaaataagttaagatatagaaagtcaagatttaataataggaaacgaaaagataattggctaccaccatcaattgagagaaaatatcaaactcatttgactttgatagaaaaaattaaaaatctattacctattaaaaatgttatagttgaggtagcaaaatttgatatacaaaaaataatgaatcccaaaattaatggtaaagaatatcagcaaggcaatctttttaattatcagaatatggttagttatttacaggtaaggcaaaataatatctgtccttattgtaaaaaagaatttaaaggtgagccaaaagctacacatcatatttatagacatggagattcaagaagatctaatagacctgatggtttattgcttttacataaaagttgccatgtagatttacacgaaaaacatagagaaaaagagtttcaaaaacctgttaaaaggtatgagccttcaacttttatgtctataatacataagagattttatgaagatattacaggtttgcaggtaacttatggttatattacacaaatgaagcataacgaatataatatagaaaaaactcatttcaatgatgcttttattattgcaggtggaactcaacaagtaagatgtaaacctataattatagagcaaagacatagaaataatagggttttgcagttaaataggaaaggttttaaaccatcaattaaaagagaaagaagtaaaatattgccgaaagatttgttttggtcaaataatattaaatatacttgcaaagggatgtttaataaaggtaaatatgttttatttggtgactctaaaaagaaagaatatattaagtttacattaatagataagatttacaattttggaagttttgtatggaatatctaa

SEQ ID NO: 449 - DNA, 236 bp, unidentified
  misc_feature 1..236: note = Ga0116188_1006392 JGI
  source 1..236: mol_type = other DNA
gtcaatcacccctgaataaattcaggggcttgagttgtgaaacttgagggtaattggttgattagggggcttaatttggaaggaattatgcagacgttacaaagagagttcaagaacgtacctacggatgcttcactagtctgtagctctacaagtcgtgcgttaaacagagaggaaactctcagtgctcatggcaaagtactgatttgtaacaaccccgaagtgaatcaacccca

SEQ ID NO: 450 - DNA, 1575 bp, unidentified
  misc_feature 1..1575: note = Ga0307376_10003019 JGI
  source 1..1575: mol_type = other DNA
ttgaatcaaagcgaaacaagacccgaacaggaaccaatctttgtcatatcaaagtcggggaaatccttggcgccaacccgtcgtcccggcaaagtgcggcatcttctcaaggacggaaaagcccgtatctattgctacgaaccattcactatccaactaacttacgagagcatcgagtttgttcctgtagaaataaccttgggtattgaccctggttccagcgacactccgatagccgctgaagagcatgtgcctggttcaggcatatgctccatcatctacgcgaaagagatcctgctgcggacagacatctcggcgcaattgaagcgcaggtctggtgttcgacgtagacgcagaggtgataagatacgccaccgtaaaccaagatttgataatcgggtgaagtcagtctgttcggtctttggtaaaaaacgcacccctaaacactggaagaaggtcaatcgtaaaaaaggcggtaaaagcctaaagaaagtagaaaacggaagggctgcgatctgtcgtaaatgtcaacatgaacgggttggcgagaaagggaaacatgatgccgacaagatcctcaatcccacgcttcagaacaaagttaacgccatcgtatccgaggtcaagaaattggttgagataatgcccgtgacgaagatccgagtagagttgactgctttcgacacccagaagatggccaatcccaaaattcagggagaggaataccagcaaggtacattgttcggatacgaggtgaaggaatatcttctccataagtatggccataaatgcgtttactgtaagggtaagagtaggaatcccgtcttggaagtcgagcatgtcatcccgaagaaacgtggcggaacgaatatagtatctaatctggtaattgcatgtgaaacgtgcaatcgtgaaaagggttcacgaaccgctgatgaatacagttttcctaatatccaaaaacaagcggtaaagtttcgggccttccgttacagcgcattgacccagagttacaaatgggcactctggcgggaactgaagaaacttggcataccggttgaagcaacatttggatatcagacaaagtattaccggttgaagatgcgtttgcctaaagcccaggtagttgacgcgatggtgatagcatccggtggtcgcagttttgatctgccgacgcaatgtctgatcgaaaggcgcctcaaggcgcggaagcctttccaccgactttcgaacgaaaacaagaaaggcaagacatgtgagaaaactcccgcgatgagacaaatcaatggttttcgcttatacgataaggtgtcttttgttgatgggaatggcataagggtctatggttatgtcaccgggttgcgtactcggggaacctttgaggtgtcccacttggaaggaaatatgatctcggacaaggattggaagaaacttaagttggaagaccatatgtatcgaaacaaattgatcgagaaacgctcaattatcggtacgattctcaaaactctgaagggtaagggtattccgaaatggattcaggaaagggggtgcgccggcgctcctccccatggataa

SEQ ID NO: 451 - DNA, 368 bp, unidentified
  misc_feature 1..368: note = Ga0307376_10003019 JGI
  source 1..368: mol_type = other DNA
gtcaattaccccacgcctaaagccgggggcttgagggagaaatcctgatagtcttaggttttagacgggagcgaaagctccataagagacagcctaagtcttaactgactacgttctttcgaatatcagacagctggatgaaactgatcttctccgggtcagccagtctggcataactttctggaggctctgtaaaagtccttttggggatgggacagtcaacctcgggacgacctgccattgcaggcaattcgaaagaacattggctgggaaatgaacggacgaaagtccgcattattccccgcaaggggaaccaaggagaggtatttccattgaatcaaagcgaaacaagacccgaacaggaacca

SEQ ID NO: 452 - DNA, 1443 bp, unidentified
  misc_feature 1..1443: note = Ga0247608_10100524 JGI
  source 1..1443: mol_type = other DNA
atgaaagcggaacaggtgaaacgccgtaaaggagatgaaccggatcctgtcaaggagaccggcaagggagtccccgtctatgtgcaggacaaggacgggaatcccctcatgccgacgttccggaacggcaaggtacggaggatgctcaaggatggtctcgccgttgtcgtgaggggatgccccttcactatccgcctcacctatgagccgaagactcaggtggtccagagggtcaccctcgggatcgacccgggatacggcactgtcggcttctcggcgggtacgatcgtgcgtgagctcatttgcggtgaagtggtccttcggaacgacgtcgtggagaaggtgtcgacaaagcgcgaattgcgaaagaccagacgctccaggaagcttcgctaccgtgccccaaggttcaacaacaggaagaggaagaagggcagcttgagcccgtccgtgcgctcgaggtgcgacgcccacctgtcggtcataaggaccgtgtgctccgtgcttccggtaaagaggatcttcgtcgagatgacgagtttcgacgtccggaagctcaaggacccggaagtgtcgggggaagggtatcagcacggagagagggacggcttcttcaacactagggaatatgtcctccaccgggacggacaccgttgccgcaactgcggcggcaagtccggcgacaggatcctcgaggtgcatcacctcgagagcaggaaaaccggaggcgacagccccgggaacctcgtcaccctgtgcaggacctgccacacgggataccatgcgggcacggtcgaacttaagataaagcgtgccgcccctctcaagtctgcgaccgtgatgaacatgatgaagggaaggcttttcctctcactgagaaaggcatatcccgacaaggaggtgctcgggtccttcgcctaccagacgaagtcgcacaggatagacgagggactcgggaagagtcacgcgaacgacgcctactgcatatccggcaacttgggggccgaccgctgcccggtcttcatccgggggaagcagatccccagacacacgaggagcctccacgtgcagaagacttcgaaaggagggaagaggagaagcacggtagccccgcaccggatcgggaagtccgacctccagagatacgacgtcgtgaagtaccgcggggaaaaggcggtcatcgccggcagcacgaacggaaggccggtcctccgcgacatggactggaagaccacgaaggaggcgtcggtgaacgcgaagaaagtgaagttcctgtaccggagacaaggatcgatcatctacatgagctcccccgccagggagacggaacttaagcggggcgccaccctgtgggacacctggatggagttcatcgaccgtaatcaggagtactgggatgatcttgcgagggagttcgccggaatgaaaaaatcggagcaatga

SEQ ID NO: 453 - DNA, 413 bp, unidentified
  misc_feature 1..413: note = Ga0247608_10100524 JGI
  source 1..413: mol_type = other DNA
ctcaactttcgcaagtgaatcccaagtcactgaaagggtccattggccgccctgcgaagggggttagccggagtccccgccaataatagggaactacgttcggaagaatactgcaaaggataggcactccgggatggtcgccctagtcccggacactgcgggtcggagttaatggagcgaaagcgacggtgctccgtccacgaaaccttaccgaacatcggcgaagggcgctttgaccttccggtcctccggaaggacttatccctgaacaggggatgcggaacggttctccgttctgtccggtcagctccggacaagaatgaaccgaaaaaactaagagtccgcattgcggacaaaacaaacaaaagacgcaatgatgaaagcggaacaggtgaaacgccgtaaaggagatg

SEQ ID NO: 454 - DNA, 972 bp, unidentified
  misc_feature 1..972: note = Ga0194060_10004581 JGI
  source 1..972: mol_type = other DNA
atggaaatcaatcacttggagcagaaagtgcaaaaatcgcaaggggggtctaaacggttactgaataagatgttgccgtttactatccgcatcgttgatctcaaggccgaaaactgcgcgtttcaggcactgcgcgtcaaacttgaccctggaagcaaggaaacaggcattgcgctggtgcgtgagacagaaagcagtggcatcgctgtactcaacttgtttgagttggctcaccgtggccagcagatcagcgaagccttgacatcaaggcgcgggcatcgcaggttacgcagggcaaaacttcgctaccgttcgccccgttttgataaccgtgccaatcagcaaagcggctggcttgcgcccagcctgaaacatcgggtcgatacgacactggcctgggtaaaacggattgaaagtttgacccccatttcagccatcagcacagaacttgttcgatttaatatgcaggcgctggagaatcctgaaattgaaggggcgcagtatcaacagggaacacttgcagggtacgagatgcgcgagtatctgttggagaaatggggccggacttgtgcctattgcgataccaaaaatgtccccttacaaattgagcacattcatccaaaatcacaaggtggctcaaaccgcattagcaacctcacactggcttgtcagtgctgcaacacaaaaaaatcagctttaccaattgaagtgtttttagccaaacaaccagagcgtctaaagcatatcaaggcacaggccaagcggccactcaaggatgctgcggcgctcaattcaacccgatgggcgcttgtcaatgcacttaaaacgcacgaactggcgattgaaaccgcatcaggtggcagaacaaaattcaatcgacatcagttttgcattccaaaaactcatgcgcttgatgccgcttgtgttggtgaagttggatcaatcacagattggcaaaagccgaccctgtga

SEQ ID NO: 455 - DNA, 316 bp, unidentified
  misc_feature 1..316: note = Ga0194060_10004581 JGI
  source 1..316: mol_type = other DNA
gtcaatctcccctgcctaaaggcaggggcttggagtcgaaagacaacgagttaggtttaaacagggaaagcggtaaccaacccgctacgttaataacatgtcgtcaagacgcaccagcaaatgcttccccagcctgtcggcagacaggtcagtttgctgcactgcaaaacttgaatcatgcaaaccaaaggtaaatggtcgaatgttttagtcgcgactcgcaagggtgggagccggttactgacattcccgatgggagatgagctgcaaggcttacgtcactaggcccgtaagggcaaaaggattgtttatggca

SEQ ID NO: 456 - DNA, 1257 bp, unidentified
  misc_feature 1..1257: note = Ga0209056_10004009 WGS
  source 1..1257: mol_type = other DNA
gtgaacgtgtttgtattagcgcctgacaaaaagccactcatgccgactacgccgcgcagggctagggtgtggctcaagcagaagcgagcgcgaattgtcaatcgcacaccatttactatccaactgcgtttcgaacccagcagtggatacgcccagcatgtgaaggtgggagtggatacaggttcaaagactgtcggagttgcagctcttgctcactcccaagttctctatcaggcagagattagcttgcgtacggacattaaacgaaggttggaccaacgaagacaatatcggcgcaatcgtcgaagccgcaagacacgctaccgcccagttcgatttaacaatcggaagaagccgagaggttggttccccccatcgctgtgctctaaagccaaggcgacggtaacggcggtcgtgcaggtggctcgcatcttaccagtaaagcacgtcagggtggaggtggctagtttcgatacgcagaagatgcaatttcctgaaatttcgggagttgagtaccaacggggagagctgatgggctaccatgtgcgcgaatacctgttggcgaagtgggggaggaagtgtgcctattgcagtagggagggcatgccccttcaggtcgagcacattatacctagaatcagaggcggcaccaatcgcgtgtccaaccttactttggcttgtgagacctgtaaccaggcgaaggggaatcgcactgctgaagagttcggctacccagatatacaagcacatgctctgaaacctttgagagatgctgtacaggtttccatcataaagccatggataatcgggaccctgtcaagactattgggtcaagaaaatgtttcgaccacctatggctatgagaccaagtacaagcgaatgaaaatgttgaagctgcctaagacgcactattttgatgcggttgcaattgcctgcgagcttggggaaatagttatgccaggcacggtatggtatcaattcaagtgcgtcccacgcggtagttatcagctctataacgggagtcggagcgagcacagagtgtcaggtccgaagaaagtatttggctggaagctgtttgagcttgtcaaggtcaatggtcaagtaggctacatcagtggacgtagggtaagtggccgcttctcagtgaaagacgcgattactggcaagctattggtggatggcataggccacaagaagatcatccgattagcaagagctacgcacggcttgattgtacacgttaatttagttcagtga

SEQ ID NO: 457 - DNA, 289 bp, unidentified
  misc_feature 1..289: note = SL_8KL_010_SEDDRAFT_10003558 JGI
  source 1..289: mol_type = other DNA
gtcaacgaccatcgctgaaatgtggtggcctggagagcaacctccaggccgtgttgaccagactcagcctttgagggcactcctgctgtgcaggcttacatcaggtggtccggaaaaggctacgattgcgctaagagtttaagttcgtaccctggagtactgcctcagctccaggctctacaactcctggattaaacgttcgtgaggtcagcgacagtgtccaggagaaagtaccgggtgcaatcattgtcgaggggaaagcctgtactccgaaaggagctttacacgt

SEQ ID NO: 458 - DNA, 999 bp, Streptomyces sp.
  source 1..999: mol_type = other DNA; strain = NL15-2K
atgggcgaggggagaccgacgggcacggcaccgaggcccgtcggcgtcacgccaagcacgttgccacggcagcggaggcggcagagaacgggggcggtgacgcttccacgcacaatccggcgtacgcgggcggtgtcggcgcaagcagggtcttcgtcctctccaaggacgggaagccactctggaaccggcctcgccctcaccgacgataagaaggaagtcgacgggcaaggagttgtgatcaccgtcaggcgggggttggtctcggttgaactccagcaccgcggtgaacagatccgcctgtgcatgcggcagcgcgcgggctaccggcacaggcgccgctccgccaaccgccgctaccgagcaccccgtccggacaaccggccccgtccagcaggatggctaccgccctccctacgccaccgtgtcgataccgcctactccttggcgtctcgcctctgccgctacgcaccggtcactgaaattcatgtggaacacgttgccttcgacgtccactccatgagtacgggcaggcccttcgccggggtggagtaccagcgaggaactctggccgggatcgaatcccgcgcctacctccacgccaagtggaacagcgcctgcgcttactgcgacgccacgggcgtgcccttgaacgtcgagcacctcagaccccgcagccgagggggctcaaatcgcatttccaacctcgtcctagcctgcgtcccctgcaacaaggccaaggacaacatgcccgtcgaggtcttcctcgccgaccgccccgcccgcctcgcccgcctcgcccgcctcgcgaagatcctccggcaagccaggacaccgctcaacgacgctaccgcgatgaacgcgaccctctggcagcttgtaaaggcgctggggaccctcggcagaccagtgcatccctggtcgggtgcgcgcacaatgtggaaccgcgaggccatggggctcgacaagacgcacacgatggccttccggtccgaatga

SEQ ID NO: 459 - DNA, 400 bp, Streptomyces sp.
  source 1..400: mol_type = other DNA; strain = NL15-2K
gttttcggtacccggacgtgcgaggtcagtcgctccccgaccgcaaggttgccggctgaccagccccagtcatcgagatctgaagatcaaggaggtgccctagatgactacgtttcccgcaggcgagcagacccacgaggctgtgcttcctcagcagcctgctctggaatccgtgggagcagacacccctgggagaagggacgaaacggctcagggacaccccgccatcgggcggggcaccggcagggaacatgggcgaggggagaccgacgggcacggcaccgaggcccgtcggcgtcacgccaagcacgttgccacggcagcggaggcggcagagaacgggggcggtgacgcttccacgcacaatccggcgtacgcgggcggtgtcggcgcaagcagg

SEQ ID NO: 460 - DNA, 798 bp, unidentified
  misc_feature 1..798: note = Ga0376465_0015542 JGI
  source 1..798: mol_type = other DNA
atgagagtattcgtactgaacatgcgtggcgaaccattgatgccatgcacacagagaaaagcccgtatccttctaaaagaagggaaggctgaaatacaccgatacgatccgttcacgatacagcttacttatgctacaggtgaaacaaaacaggactgtcatatcggtgtggacaccggaagcaagcatatcggacttgcggtaacatccggaaacaaagttttgttcaaaggagaagtcgaactgcgacaggatgtaaaaccgaagattgatgcacgcagatggtaccgcagggacaggcggaaccgcaagaccagatacagaaaagcaagatttcttaaccgcaagaaatctaagaaatggctgccgccgagtatccagaacagggtcaaccatacataccattggatcgccgtgctgcagagtcttgtgccggaagcagaactccacgtagaagtcggcaagtttgatactgctaagatgataaatccggacatcaatggagtggattaccagcacgggcagacctacggtttctatgatgaacggtactttgtgttcgcaagggatgattacacctgtcaggtatgcggtaaatccagtggcaagatactgcagacgcaccatatcgtttaccggagcaatggcggcacggacagggtggataacctcataaccgtatgtaccgactgccacacctcagaaaaccacaagaagggcggaatcctttataagtggcaggaggaacacaagaaggtaaagcagtataaggaaccgccgtttatgaacacactccgc

SEQ ID NO: 461 - DNA, 288 bp, unidentified
  misc_feature 1..288: note = Ga0376465_0015542 JGI
  source 1..288: mol_type = other DNA
gtcaaccaccccgacctatggctaatgccttagaggtcggagcttgtaaaagctcagattgactagcctaagtccttcggggactacgttgtttatgttatcacacctacgaatgattacctagttcgtagcaactgtgcaggcactgtaaaagttctgtgaggcaggaacggtcaacctggtattgccgattacggaaagcatttacaacattggcgaaggtaaacaaactttcataggaaaggggcggcacctgcgggtagccgccaaaggtaacaagtaatgaga

SEQ ID NO: 462 - DNA, 1377 bp, unidentified
  misc_feature 1..1377: note = Ga0373622_0034557 JGI
  source 1..1377: mol_type = other DNA
atgaaaaagcagacgttaaaacagagagcgattaaatcgaacacacctacggatgcttcacaagtccgtagcaactgtggtttgtcattaaacagagatgaaagtctcagtgtggcgagctcaaaaacctgttttaacaatcccgaagtgaatcaactccaatcacgggcaggaggacttaaagtcaacgtgcctgtactttcgctaagggggaaaccgcttatgccctgctctccagcgaaagcccgaaaactattaaaacagggaaaggcgaaagtggtcaagcgaataccatttattatcaaactcaattttgcttgtgaaaacaaaacgcagagaattactttcggacttgattgcggatacgccaatattggattctctgcaatcacttctaagaaagagctcatctctggaagcgtatgtattgacaacaaaacatccgaacgaattaccgacaagagtatgtatcgcaggaatcggaggaggaggttgcgctatcgtcagcgtaggtacttgaacagaaagagttctaagaagcaaattccgccatcagtacaacgaaggattgatacgcacattcaattagttagaagatgggcaaaatggattcctataacaaaagtaaatattgagattgctaatttcgatattcaaaaaatcatcaatcaaaatatcaaaggcaagcagtatgctcagggaaatttatatggatacgaaaacttaaaagcgtatatcatagcgcgagaatatagcaagtgtcagttatgtaaaaatgggatggataagcaaggatggcatctacaccatattatcgaaagagcaaatggcggaacgaataggtcagacaacatcgcattacttcacaaaagatgtcacaagaagttacatacaaaagggctaaaactaaagcctaatagtcaatttaaggctgagacatttatgtcaatagcaaaatggcgcattgtaaataaattaaaattaaaatttaccacaaaaacaacatttggatatgaaactaaaatcagaagaaatgaattagaattagacaagtcgcatattaatgatgcgtttgtaattgcaaatggaggcaaccaaaacagatgcctaccaataatcatcactcaaaagcacataaataatcgctcgcttggattacagaaaaacggatttcctcttgcatccagaagatgtagatataaaattcagccaaatgatttaatttgggtggacggaaaaaaagaaaccgcaaagggatgttttaaatacggagaatgggttgtattaaagaatgacttatcgaagaaaaggaaatctgtaagcataaatagaatagataaggtgtataattttggaagttttatttatagtaattaa

SEQ ID NO: 463 - DNA, 265 bp, unidentified
  misc_feature 1..265: note = Ga0373622_0034557 JGI
  source 1..265: mol_type = other DNA
gtcaatctcccagcaatgggcttgagccgtgaggcgcaagggcaacaggttgattagggagcttcaaaatcgaaagatgaaaaagcagacgttaaaacagagagcgattaaatcgaacacacctacggatgcttcacaagtccgtagcaactgtggtttgtcattaaacagagatgaaagtctcagtgtggcgagctcaaaaacctgttttaacaatcccgaagtgaatcaactccaatcacgggcaggaggacttaaagtcaac

SEQ ID NO: 464 - DNA, 1557 bp, unidentified
  source 1..1557: mol_type = other DNA; note = Human gut metagenome
atggtttatgtttttgtactggaccgggacgggaacccgctcatgccgaccacccgctgcgggaaggtccgcaggatgctaaaaaacgggcaggctgaggtggttttccggatcccgttcacaatccgcctctgctatgagccggcttctaaggaaacccagcggctggtatacggctgcgacccggggcgtaccaatatcgggagcgccgttgtcagggaaaacggctgctgtgtctacctggacaaatgtgccacaaggaaccgggaaatcccacagctgatggcaaagcgccggcagcaccggcaggcttcccgccgcggcgaacggcttgcaaggaaaaggctggcaaaacggctcgggaccaccacaaagaaactgctggacaggctcctgccgggatatgagaagccggtccgggtgaaggatatcatcaatacggaagcccggtttaacaaccgtttccgcccgaagggctggctgacgcctacggcaaggcagcttttaaggacccacctgaacattctgaagaaggtccggaagatcctgccgataacggatgtggtgctggaagccaacaggtttgcattcatgcaactggacaacccgcatatcttccggtggcagttccagtacggccccctgcatgggaaagggagtgtggaaaatgccgtaaaggagcagcagggcggaacctgtatcttctgtaaacatgagatcgagcattaccaccacatcatcccccggagccggggaggaagcgatacccttccaaatatggcggggttatgcaatgcatgccacgataaagtccataagtcggaagaatggttccggaagctgaagaaaaagaaagccgggctgaataagaaatacggggccctgtccgtgctgaaccagatcatcccgtacctggtggacagttacacggaactgttcccggaccatacctatgtgacagccgggtacagcacgaagcagttccgggaagaccacggcatagaaaaagaccatgacagcgacgccgcctgcatcgcttgcagcattctggagaaggtggacaggatcatattcccgggaatgacataccagatggaacagttccggaggcatgaccgtgccaagataaaatctttccggaacaggtattattacctggggaaagaaaaggtggcggtcaaccggaaaaaggcaattatggcagacccttccgggaaagagaaaaacgggaagcttcagacccaggactcgctggaggactggtttaccaaagaaactgagagaaacggcttgcaggaagcggagagaaagcgttcccgcctgagggcggtgaaaagcatccggatccggaacaacatgcagaggcccctgcctgggagtatctttatctttgagggaaagaggtatctcctgacaggcaatcatggggaatattatcagacaaaagtggcaggaaaaacagtagaattcctgaagtcaaaatgtaggatagcctcggggaaccaggggctggtctataccggacaggtaaaaagcggcgcttcctcccatgtctaa

SEQ ID NO: 465 - DNA, 221 bp, unidentified
  source 1..221: mol_type = other DNA; note = Human gut metagenome
gtcaataactcatgactgaagtcacgagcttgttggatggatgcgcctgcatccatcgggacagcttctggctgatgccgggttattgagcagagcagtgatacgccgatcactccggggcggctccaaactccggacactgtctataggcgtacctatgctatggaaaccttactgccccacggggcaggcttaccgcaaaggagtaacttatggtttat

SEQ ID NO: 466 - DNA, 1185 bp, unidentified
  misc_feature 1..1185: note = Ga0373620_0052976 JGI
  source 1..1185: mol_type = other DNA
atgaagactcgaaggtcaactgaactgtctgggcgtggtagcccgaaagcacgcaggggatgctcgcctagtcccctccctctgcgacagtcagtggcgaaggtgaatacaaccaaggcccgtaagggcattttcgctagcgttcctgtcgtagatcgagatcagcagcctctgatgccttgctccgtagctcgtgccttcaagatgattcggagtcggaaggcaacgcccttctacaagaagggactcttctgcgtcaggctgaacgtcgagccttcagcccggcggactcagccgatcgctgtggggatcgatccagggtcgaagaaggaaggcttctcagtcgtctcagcgaagtacaccttcctgaacctccaggcagatgccaggacagggatcaaggagaagatcgagaaccggcgaagcctacgaagatcgcgtagaagtaggaagacgccctgtcgggcacgccgcagcaaccgatcttcactgcgaaataagggtgttcccccgagtacgttggcgcggtgggattggaagctgcggctcctgggaggtctagctaagctctatccggtcaccgacgcgatcgtagaagacatcgctgcgccgacgaagaagtaccagagaaagtggaacaggtccttctcgcctctggaagttggcaaggcttggttctacgcagaggttgcaaagattgcctcgctacagacgcgcaagggttacgagacgaaggctctgcgagagcgctacgggctcccgaagctcaagaacaagatgtccagcgacttctatgcccactgcgtcgacgcttgggtgctagccgcagaagctgtaggcgcagcggctccgacggagaagcacgtcctctgcgtaacgccgctcgactttcgcaggcggtcacttcactaccaagtacctgccgaggcaggtaagcgtgggctgcatggaggcacgcgaagtctaggaagccgtaggggaagcctcgtacgatctccaaagtatggcctcgtatatcttggtggatcatccaaaggccggatttccttgcatgacctagagactgggaagaggttgaccaagagcgaggatcgcacaaagtgcaggatcctgagtcataactcagtcaggttttctgccccgctgagcacggtgctgcgtcgggcagcagaggagtttgtctga

SEQ ID NO: 467 - DNA, 285 bp, unidentified
  misc_feature 1..285: note = Ga0373620_0052976 JGI
  source 1..285: mol_type = other DNA
atgtccgaggcgaccagcacgtccatctggcggatgttgttgagacgtgcgtcctggttgctcggcataggcagctccatgtcccccaggcgaggcatgggaccggagttagctataacagccagatcgcgtgcgcgacagacacgccactgctggcgagacagttcgccggtagcgaagctcacgcagagctgacaccgtcgggcgcgctcgaaggactgcccgtgcgcccccatccccttgtggtttggatccgacatagctaaccgtgtacgccttatagca

SEQ ID NO: 468 - DNA, 1083 bp, unidentified
  misc_feature 1..1083: note = Ga0114925_10000117 JGI
  source 1..1083: mol_type = other DNA
atgccttgtagttcaagaaaagctagactgttacttaaacaaggtagagctaaggttgttagtaagtgttcctttactattcaactactatttggaagttcaggttataaacaagaagtaaaagcttccttaattccaagtagttctaaagtaggagtagcttgttcttctttaggtaaatgtttatattcttctgaagtagaattaagacaagatatttcaaagaaaatgaagaggagagctgtctatagaagaacccgtagaaatagaaagactcgttatagaaaatcaagatttcttaatagaaaatctgatagaaagtttactccaactatgaggtctaaacttgagagtcatgcgagagaggttaaaagaacaactaaactacttcctatcagtagttgggtatttgttaagaactctattaagaaagattatagaggttctaagaatttagaatggttaaatctacaaaggcaaacttttgagagagatagatttaaatgtagttattgtagaggtaaatctaaatgctatgaacttcatgctcatcatttgatactaagaagtgaagtaggtgaagatactttagaaaatcttgtaactctttgtaagacttgtcatatagcttatcataaaggtgaaattgagttaaagaataataaaagtaagggaaaagctaaaattaatactgaacttaatattattagaaagtatttagaacttccaagtagtattagtaaaatttacggctttgaagtcaaagctaaaagaaaagagttagatctggaacctacacctattaacaatgcttgtagtgtcttagagatactaccaaataatagttattatattaaaaatgttcctaaaggagattatcaaagaacaaaaggagttaggagtgaaaaattattacctaaaggtaaaatattagaattttctaagtttgataaagttatatttaaaaacaatacttattttattaaaggtagaatgagcactggttatttcataggaatgaatattttaggtaaagctttgaaaggtaagactttaaaagctaaagaatgcgaactaatttag

SEQ ID NO: 469 - DNA, 291 bp, unidentified
  misc_feature 1..291: note = Ga0114925_10000117 JGI
  source 1..291: mol_type = other DNA
gtgaattacccatagtgttttcgacaactgtgggcttcaatcgtgagattggagagtaattagttcaccagactcagttgggagaaattctaactacgttatctttgaagtagaaacctactaatgtcgcctcagttagtagctctttcgtggctctgtaaacagagattaaagtctcagtcaaccacaatgcgaagcaaagataacattgtcgagaggaagtagaattccttaactggtaacaggttaagaatactcaatacttaggaataggagatatactcaatgtta

SEQ ID NO: 470 - DNA, 1293 bp, unidentified
  misc_feature 1..1293: note = Ga0370498_000007 JGI
  source 1..1293: mol_type = other DNA
atgccaaatttagtacataaacaagttaaatcaatgactagagtatccggtcttcctgctcgtaagagtaggaagattaaggaaactgaatcatcttcctgtggcaaggaaaaatatatttctaatgtttctctagttggaaatccctatgatgatcagtctcgaagagagcaattatccaaattatcgaaaggtaatttggactggaaggtaacttccaaatttgttacgaaaatatatgttccagtaatttcttgtactggagttccattaatgccttgctctccaaggagagcaaaagaattaatgagaaaatataaagcgaaaaagcagtggagatatggtattttctatattaaattactagaaagagatataggaaatattcaagagatatcatgtggaatagattctggatctaagagagaagcgataacggtaaaatccaagaataaaacttttattaatgttttagcagatgctagaacaggagtaaaagaatctcttgaagttagaaaaaatatgagaagggcaagaagatttaaaaaaactccttgtagaaagaataaattaaatagaaaaaggaataaaaactttattccaccatcaacaagggcgagatggaattccaagttaaggttgataaatatattaaagaaaatatatccaatatcgatatatgttgtagaagatataaaggcaaaaactttaaaaggaaagaaaaattggaataagaatttttcaccattagaagtaggaaagaaatatttctataatatattaaaaacatatggaaatcttattttgaaagaaggatgggaaacatttaacaaaagaacagaattaggtttagtaaaaacaactaagaaattagataaaatattttctgcgcataatgttgatagttgggttttggctaatttcccttttaatattcaaacatatcctgaaaatattgatatgtattattttcaacaaattgaattgcatagaagacaattacacatgttacagtttgctaagggagggaaaaggaaaagatatggaggaacagtatctcttggaataccaaagggaacagtagtaatagcaaaatataaaaagaaagaaatatatagttatattggtggaaatatgaatggtaaattatcaatccataatatgcagaatggagaaagaataagtaaatgtataaataaagaagatataaaatatatgggatatatagcaaagtggaaagtagaaaaaataacagaaaataacgagcattcgtggaagaacatgcatatttaa

SEQ ID NO: 471 - DNA, 255 bp, unidentified
  misc_feature 1..255: note = Ga0370498_000007 JGI
  source 1..255: mol_type = other DNA
ctgtcataacccccatcaagttttcatcttgatcgaggcttgttagagtcatttaatgccaaatttagtacataaacaagttaaatcaatgactagagtatccggtcttcctgctcgtaagagtaggaagattaaggaaactgaatcatcttcctgtggcaaggaaaaatatatttctaatgtttctctagttggaaatccctatgatgatcagtctcgaagagagcaattatccaaattatcgaaaggtaattt

SEQ ID NO: 472 - DNA, 1245 bp, unidentified
  misc_feature 1..1245: note = Ga0247608_10002058 JGI
  source 1..1245: mol_type = other DNA
atggtgtacgttttagacatagagggcaagccgttgatgccaactgagaggcacggaaaggtcagaagacttcttcgtgacagcaaggctcatgtcgtaagactgcagccattcacaattcagttggattatgagagtaccacctacaagcaagaagttagtttaggcattgacgcaggcagcgtacatattggagtgtctgcaacaacagagaagaaagagttgttcgctgcggaggttgttcttcggacggacatagtaaagaaacttgcgagccgtcttgaaatgcgtcgcacaaggcgtaaccgcaagactcgttatcgtaagccgaggttcgacaacagacgaagaaaggaaggttggcttgcaccgagtataagaaacaaagtggatagccacataaaggttatccgtttggttcattatttgcttcctgttacaaagaccactatcgaagttgctcagtttgatgcgcagaagataaagaacgatgccattcaaggtgtggagtatcagcagggagaacagatgggtttctggaatgtgagggagtacgttctcgcaagagaccatcatacttgtcagcattgcaaggggaagagcggtgataatattctgaatgttcatcatttggaaagccgaaagactggtggtaatgcacctaacaacctcataacactatgcgagacctgtcataaggcgtaccatcgtggagagtttgagttaaaagtgaagcgtggcacttccttgcgtgacgcagccgttatgaatatcatgcggtgggcggtgtatgaacaggcaaaggcagagtttgggaacgtccatctcacatacggctatgtgactaagcatacacgtattaagaacggaattgaaaagacgcattgcgcggacgctttctgtatcagcaagaatgtaaaagcagtgcgtttaggttcgtatcttaaatgccgttgccttgcaagacatacaagaacattgcatgtatgcagtccgaaaaagggcggtattaggcgtagcgcagtagcaagccactggataggcaagtcacgtctacaaaggtacgatagtgttgagtggaacggagtgaggtgctttatcttcggcagtacacacggcagaccagtattgcgtgacattgacggaaaatctatcactccaaacgcgtcaattaatgccaaagaaatgatttttaaacatagaaacaataagattattatgcaagaattaacttgcgaaacttga

SEQ ID NO: 473 - DNA, 283 bp, unidentified
  misc_feature 1..283: note = Ga0247608_10002058 JGI
  source 1..283: mol_type = other DNA
ggttataagattcaagtttcgcaagtagtggattagccagtcagtccagcggagcggattagcctaagtcccgattggcaaaagggaactacgttagaggtgaatgatataggcactttcggatggtcgtccaagtctgaaaccctgcggcaagtgattaaaaggagcgaaagcgacggtgttgcttgtaaaaaccacctcataacattggcgatgggcgcataacagcagaaatgctgacttacaacaaaagttgtttaacaattaaaagtaaaaaagaatg

SEQ ID NO: 474 - DNA, 993 bp, unidentified
  misc_feature 1..993: note = Ga0401359_0000081 JGI
  source 1..993: mol_type = other DNA
atgctacgtctttccaggacatctttactgagatggcgggaagggactaagaacttaactcgaaggattatatccatgttacgagtgccagttttatcaaaatcaggtaaacccttgatgccaaccaaagctagtcgagctagacgttggttggaagaaggaaaagccaaagttgtacacaacgatcttgaatgcttcgcggtgcagttgaccgtctcttctagagaagacttgcagcccgttgctgtaggattagatccaggaaaactctattcgggaattggagtgcaatcgagtcgtgctaccttgtggatggcacatttgattctgccgttcaaaacggttaaagaccgaatggagctacggcggatcatgcgtagagcaagacgagggcgacgaattaatcgcaaaattccatacaatattagaaaatggctgggattagccaaagacaagaaaaacaaggctgatcaaactccagcgacacacgctgttgatggtgttaccttagccgcgtttgagttcattcggtggcgagagtggcactccggttccaacaaacatgggagctggaagggtgacgttcaaatcacacctgcaccctttgcgacgattcgtagaccacctgttagccgtaggcaactgcacttgtgtgttccgtcaaaaggtggaaagcggcgcaagtacggcggcacaattacccgccacggaatcaggaagggtgataaggtaattgccgaaaaagccggaaaagtttatacaggttggtgttctggagacaccaaaaccaaactgtctgtttccgattgttactggaaacgaattggacagtttactgcaaaaaaagttcagttgttgcagcgaagcacaggattaatcgttgtgccttcaactggaccggtcaaaccttaccgcatcgaacggttcggtttgacctggagttcctctccaagttgcttcgctgaacttggagtctcacgaggtttacgatga

SEQ ID NO: 475 - DNA, 250 bp, unidentified
  misc_feature 1..250: note = Ga0401359_0000081 JGI
  source 1..250: mol_type = other DNA
gttcacgaccctgacttacttcgttgaagtcagggattgtaaggcaaattacaatttaaaccgttgaatatccgcattgagtctcagtatggtacagacttccgaatacttccctcgttcggagcatctctaagactttttgtcgagtcgctagtagagacgtagcatgctacgtctttccaggacatctttactgagatggcgggaagggactaagaacttaactcgaaggattatatccatgttacga

SEQ ID NO: 476 - DNA, 1287 bp, unidentified
  misc_feature 1..1287: note = Ga0181589_10009757 JGI
  source 1..1287: mol_type = other DNA
atgcaaaaagtctttgtagtagataaaaacggcagacctctgatgccttgcagtccaacacgctgcaagcagttcaagaaagaaggtcgtagtagagtctatcggttgaaaccattcacgattcaactgatagatgttgaaggtggcgagactaaagatgtcgagtacaaggttgatgctggatcaaagtttactggacttgctctagtgggaaactttgagaagcaaggcaacgtgttgctttgggctgcaaatcttcagcacagaggtcaagaaattaagaatgcccttgagtcaagacgttccttgaggcgaggtagacgcaatcgtaaaaaacgctatcgggctgcacgatggagatttcgcaatggaatcaaaggcggactagcaccatcactgatgagcagagtcaacaacatcaccaattggctaaagaagttgatgaagtatgtgcctgtgaccaagatcgtcagtgagttagtacgattcgatctgcagaaactagtcaatccagagatcagtagcattgagtatcaacaaggcactcttcaaggctatgaggtcaaagagtatcttttggagaagtggggtagacagtgtgtgtactgcaacaaaaaagatgtgccactccaagttgagcatattcatccaagagctaaaggcggaacaaatcgaataggcaatctaacaatctcatgtgccaagtgtaatgagaagaagagtgccagatctatcggagactttctttctggcaaaccaacactgctgaagaagatcaaagctcaaatgggtaagccactgaaggatgctacggcagttaataccacacgctggagattaaaggaagaactagagtcattcggactgccactagagttgagttctggaggaagaacaaagtttaatcgattacaacagggttacaagaaagaccactggctagatgcagcatgtactggttccagtggtgagtctgttagcttaaacagaatcaaaccactacagatcaaggcgatgggtagaggttccagacaagtgatgaagacagacaagtatggattccctagaggatctgctggcacagtcaagcgtgtcaatggcttccagacaggggatctggtgaaactggatcaacctaaagggaagtatgcagggacttggattggtcgtttagtaggagttcgaagtcgtggaattcttgacattatgactcctcttggaaaggcaggagcgacatggaagaacttcaccttattacagcatagtgatggatacgagtatgcttga

SEQ ID NO: 477 - DNA, 288 bp, unidentified
  misc_feature 1..288: note = Ga0181589_10009757 JGI
  source 1..288: mol_type = other DNA
caccccctttagggggtggctttataaggagaagttcgttgagtccctgacttagcaccacctcaacgcatccatgctgctgaattggtgttatttggctcaaccagactagggcttgtcgaggcccacgatgcacaagaatgatataggcaactcttgaatgcttcaccagttcaagatagcggctttcagttaagttgaggggggtcaggataaccactctgtgctgttagcaaaaaccttgttcatcattgtcgaggtgactgatttttaatcaacaatctttcg

SEQ ID NO: 478 - DNA, 1578 bp, unidentified
  misc_feature 1..1578: note = Ga0080699_1005680 JGI
  source 1..1578: mol_type = other DNA
atgtggaccacggaacggaatgcgccatggggctctgccccagacgcgcatgaagggacagatgcccgtgaggccaccctgctttatgcagggatggatcacggggagggcgtaagcccagaaaggaaacttatgacagcagtagcagtaataggcaacacaggcaaaccgctgatgccgaccagcccgtacagggccaggaggcttttaaagtcagggcgtgccaagatctatggatacaggccgttcacgatcatgatccttgacagggaggatggcgctgtgcaggaaattgagtacaaaagcgacacgggttacctgcatgtgggtatctcagtatgttccaaaaaacatgagttcctgcgggaacagagggatctgctccctgatgagcgggagaaacataacgaccggaggaaataccgccggacgagaaggaaccgcaaacgttataggaaaccgcggtttgacaaccgcatcgggaagagccgtaaggcggagaaagagggcggcgtatggctgcctccgtcgctggaacacaaggtggatgcacagctccgtcttttcacccaggcatgcaggatcatgccgataagcagcgcggcatttgagatgggaaagtttgacccggcttgtttaaaagcggaagagagcggtggcccagttccccaaggcgtggattaccagcatggcgggcgttaccaggccgccacaataagggcagctgtttttgcccgggatggacacacatgcctgttctgtggcagggggataaaggatggtgctttccttcacgtacaccatatcgggtattggaagaaagaccgttcgaaccgtctggggaacctggcgacatgctgcgggatgtgccacacatcggaaaaccacaagcctggcggaatcctttacgggaagcagccggaagtatccggactggcccctgccacatacatgaatacggtacgttttgaacttttgagaaggctgaagggaagcgccccggctgtggatatccatatctcctacggggcaaggaccagcatggtccgcaaggaacgggcgatcataaagagccataccaatgacgcttactgcctgggaaggttctttccgaagcacagggcatcagaggaagtgttccagaagacccgccgcaacagccggatactccagaagttctatgatgcggtatatattgacggccgcacaggagaggaagctaagggccaggaacttacgaacggcaggattagcagaaatcataagaaagaccacaaaaatctgcatccattccggagcaggaaagtcagcaaagggcgcgttacgatccggagatccaggacagcgttaaagcctggcagtctggtggaattcaatgacgaagttttgactgtgcatggcacacatacaagccggcataaatccaaaaagacaggcaaaacggctgtcagtatcaatatagagtttaaacagccagccaggaatggcaaaaagagcgcggcattgagcaaatgccggatcattaacaagtcatataatactggctggaaaaagattactgcttcggctttaaaatag

SEQ ID NO: 479 - DNA, 390 bp, unidentified
  misc_feature 1..390: note = Ga0080699_1005680 JGI
  source 1..390: mol_type = other DNA
gtcaattaccccacctgatccagtgggtcagatggggcttgcaaaaaaaaagagaaagatgaagtttttttttctttttgcaagcccggttgattacccttagcttcggctacgttaccagttaataatataggcaccaggggatactccacacgtcccccgcactgcggcatggtgttaaacatccctgagggaaaggggaagtgcattatgcatgacagcttatcgtataagccgtctaaaacatctgggaacattgggtatgtggaccacggaacggaatgcgccatggggctctgccccagacgcgcatgaagggacagatgcccgtgaggccaccctgctttatgcagggatggatcacggggagggcgtaagcccagaaaggaa

SEQ ID NO: 480 - DNA, 738 bp, Fischerella sp.
  source 1..738: mol_type = other DNA; strain = PCC 9431
atgtccaaagtatttgttttagattcagaaaaaagaccactcttaccaattcatccagcacaggcaaggcaactattacgaaacaaaaaagcagcagtatttagacaattcccattcacaattattttgaagggagctagtccagatgcacctacaacagatttacgaattaagattgaccccggtgcaaaatatacaggaattgcgctagtcaacgatattactggagaagttgtatttgcagcagcagtcaacgctactagatttgctttacttaaagttttgaaatcaacaggtttaccagttgaatgtggttcaggagggctaacaaagttcaatcgtaatcaacagaatttagcgaaagctcattggctggatgctgcttgtgttgggaagtccacaccgattcttaatatcaaaggtattaaaccattgttgattacagccaatgggcatggtactcgccagtcatgccgaacggataaatttggatttccgagcagatatgtgcctagatttaaatttgtcaaaggttttcaaactggagatattgttaaagctattgtcaccaacggtaagaagattggtgtgtatgtagggcgtgtagctgtgcgttctacgggtagctttaacatttcagctaaacaaggattgattcaaggaatcagtttcaaatattgtttacccattcataaaaaggacggttacgcatatgcgtttggatttgacggcgaatga

SEQ ID NO: 481 - DNA, 242 bp, Fischerella sp.
  source 1..242: mol_type = other DNA; strain = PCC 9431
gtcataaagcccagccctaaagggcggggcttgaaagaagctctatatgaccagcttaagtcttaattgactacgtttaaggcaagagttaaagacctaccagggaatgcgtagctagttccctgctctagaaccaaactgttaaacagatgtacaagggttaagtcagtgcagtttggatagtaccgaccttaaacattagcgaagctaacattacccgcaaggagggacttatgtccaaa

SEQ ID NO: 482 - DNA, 1335 bp, unidentified
  misc_feature 1..1335: note = Ga0310136_005546 JGI
  source 1..1335: mol_type = other DNA
atgttgttgttcactgttgacaaatgcggcaaacctgggcatccaactagaaggtttgacatgataagaaagcttaaaaagcagggcagggtaagaatcgtcggtggtggcgcttccggcaaaccgccggtggtagtctttctggatagggaattcgattattcaaaaactgcagaaagaaagcttgtcatagcgcttgacccggggtatagatatatcggctttggggtctgcgaaccaaaaagcgggaaactaacagtgtactgcaaaggtgttcttgaaacgaggatacccgaaatcaaagggctaatgacagaaagaaggatgcatcggagatttagacgttactgttcccgccataagaaaaggcgtttatccaagcggcaaggcagaagtctaacaaaattcaaagcgccgagaaatgtaagaggcaagaacagggacaatgctacactcaagcatggcgtagagacacatatcaatctttgcggcaggcttttgaagttctttccatttcctaaacatcaggtcgtttttgtcatggaggacaacgtttttgacgtcagggcaatgacctggggcaagacatacggtgcaggatatcagaaatcgccgagaacagaagttgaaaagcgatgtgtaatctgcggttcgacggagaacttgcacaagcaccacataatacagcgtaaagacggaggaacggacattgacgaaaatctggtttacctctgcagggactgtcatgaagatgtgcacgccgggcgggtatatattcccataaaaggcatgaagcagtggcgcgcattgggaacgatgaacgccataataggcgaactgcggaagataccctggttagaattcatccctgcgccggatgcggcaaaggcgagaaaaacagctgggcttgaaaagggacatgggaacgacgcattggcaacagcggcggcttactgcaatcccgctgaaattgacacaacacaatcaatggaactgcatcttgttaaggtaagaaggcacagcagggcgcggatacatgctgtgagagacaggctatacaaagtaaatgggaaaattgtagccaggaatagacagaaaagaaccgatcaaatggagccgtctttggctgatgtgctgccttttaccccagcgcagcagagggatctgaaagtgtatccaggagtcaaagtgctcaaaccgtttaggagagacatgccgtccgtggaaggcgatgtgtgggttcatttagcgacaggaaagcgttttatagtgaccagcgtaatatcgaagaattacctgtattctccgcagttgagagagattgtggggaaaccc

SEQ ID NO: 483 - DNA, 246 bp, unidentified
  misc_feature 1..246: note = Ga0310136_005546 JGI
  source 1..246: mol_type = other DNA
gtcaactacccctgattaaaatcaggggcttgccagcagggggcgtgctgctggcgggtctgttaacggcaggtagttgaacgcgggtgtgcggcggcgggaactgacgttccgggacgacactcccagttccgggagacagcggtgaaatcccgcagccttacacagggtgctgccgcacgcctcggggagacccaccgccttttggcgcccggatcacagggctcctgaacgaggagggaaagc

SEQ ID NO: 484 - DNA, 1395 bp, unidentified
  misc_feature 1..1395: note = Ga0063591_100011 JGI
  source 1..1395: mol_type = other DNA
gtgttcgtgttggatcgcagcggcaagccgctgatgccgtgcagcgagaagcgcgccaggaagctcctggccgccggtcgtgcgcgcgtgcatcggctgtacccgtttgcggttcggctcgttgaccggcacgtcgaagactgcgcgttgcagcccctgcgcctatcaactgaccctggcagcaaggtcacaggcattgcgctggcgcgcatcgagccaaagctcgtcgccgagactgatgaaattctcgagccggtgatgcacatcagcgtgttgatggagatcacgcaccgaggcgcgcagatcaaaaaagacctgcaaagtcgcgccgcgctgcgtcgcggccgccgcagccgcaacctgcggtaccgcgcgccacgctttgacaaccgcacgcgtcctgacggctggctggcgccaagcctgcagcaccgcgttgacaccacgctgtcgtgggtgcgccggcttctccgccttgccgccgtcacgcacctagcccaagagctggtgcgcttcgacatgcaggccatgcaagctgaagaggaaggcaacccgcaaggcaataccatcgaaggccttgagtaccagcgcggcacactcgcaggctacgagcttggcgagtacctgctggccaagtggaatcggacttgcgcctactgcgacaagaccgacgtgcccctcgagaaggagcacatcgtcgcgcgcagcaaaggtggctccaaccgcgtcagcaacctgacgctggcctgccggccgtgcaaccaaaagaaggcagcgcgcgatgtgcgcgagttcctcgctaaagagccgctgcgcctgcagcgcatcttggccaacgccaaagcgcccctcaaggatgcggccgccgtcaacaccacccgctgggcgctgctgggcgcgctcaagcgcacaggcctgcccgtcgagacaggctcgggtggccggacaaagttcaaccggacgcgactgggcattcccaaaacccacgcgctggacgcggcgtgcgtcggtgcggtcagcgacgtgcgtcggccggcgcagccggccatccaagtcaagtgcgcaggccgcggctcgcgcagccgcacgcgcaacgatgcctttggcttcccgcgcggccacctgatgcgcgagaagtcgatcaagggcttccgtaccggtgacatggttcgagcgaccgtgacgcaaggcaagaagtctggtgtgcacaccggccgcgtcgctgtgcgcgcgaccggcagcttcaacatccagacgcccggcggcgtcgttcagggcatcagccacaagcattgcgtcgtgctcatgcgaggcgacggctactcgtactcaagaaccgcctcagcagggcaagccaaagaaaggacgcgggaagctggtcacgctatcgcgtga

SEQ ID NO: 485 - DNA, 325 bp, unidentified
  misc_feature 1..325: note = Ga0063591_100011 JGI
  source 1..325: mol_type = other DNA
gtcaatcaccccacgactgaagtcgggggctgaagaagcaaaaacttcgacagccctggttgaccagaccaagaaaggatttcgaaagaacaccaatctacgttgcacacaggtcgcaagaccgacggcaggatgcttctccagtcctgccctctcgaagtcacggaagcagacaagccaaggggttggcacgaaacggtccgtggcctggtggcgcatgtcaccaaagccggtgtgcaacatggtcgaggagagcgccaaagccgcaaggcggaggccgtcacaaggcccgtaagggcgtttacatagaggaatcgacgtgtca

SEQ ID NO: 486 - DNA, 1707 bp, Branchiibius hedensis
  source 1..1707: mol_type = other DNA
atgtctacgttgcacacgggtgcgcgaacccaccggcgggtgcttcctcagcctgccgctctggaatcggtgccagcagacaaccccggggtagggacgaaacggggcaccgacatcccgcgcacggcgcaagccgggcggcgggacaccggtgtgcaacatggtcgaggggagaccaccgggggcgcacctgtacccggcggcgtagcagcagtacccgcagggcgtaagcccagcagcaccaagcaacacagcgccacccagcagaaccgcaccacccgcatcaccagcagccccaagcagtctcggttcacggctgacaacgcggtcgtgttcgtgctggaccggcacaagcggccgttgatgccgaccgattgcaaacgagccaagaagttgttggcgcggggtcgggcggttgtgcaccgcaaggtgccgttcacgatccggttgaaagaccgcacggtcgatcagtcgatgctggaaccgctcggactggggatcgaccccggctcccagcacaccggactctccctcgacaaaaccgtggaggctgttgacgagagtacgggagaagtgaccacgacccgcaccgggctgtggcttggacagttggaccatcgcggccagcatattcacctgcgtttggtggcacgggcccagcggcgtcggggtcgacgtgggcgaaacctccgccatcgcgcagcccgcaataggaaccggagcgtgcgcgttggctggctgccgccgtcggtgcagcaccgggtggactccactatgacgtgcgtaacgcgactccagtcgctcgcaccgatcgcaagtctgcggttggaacgcgtcagcttcgacactcatgcgatgaccgcaccgggcattagcggtttggaataccagcagggcacgctggccgggaccgaaatccgtgagtacctgctagcgaagttctgtcaccggtgtgtctactgcgacgccaccggcgttggaacgggctcggtgccgttgaacatcgaccacctgttgcctcgtgcccgcggcgggactaaccgagtcagcaaccttgtcctggcctgcgtccgatgcaaccaagccaagggtgcccggtcggtggatgcgttcgtaactgacggagtgagacgcgctcggatcaaagccgaggccaaaacgccgctgcgggatgcggcagccatgaacgcttgccgcaaccggctcgcggcagaactagacgcgaccgggctgccggtggagtgggccagtggcggacgcaccaaatggaaccgcgtgcgtaacggtgtgccgaaagaccacagcttggacgcgctctgcgttggcgccgtcgacgtgatcgtccgatgggtacccacagtgctgcacattcagtgtgtcgggcgtggccggtaccagcgcgtaacgacagacaggttcggcttccctcgttcccaccggccacggcggaaacagcactacgggttcatcaccggcgaccttgtgaaggctgtgatcccaacggggccgaaggcgggtgtctaccgcggccgggtcatcgtgcgatccaccaggacgttccggcttgtgaccccaacgcaccggtacgacgggatcaactgcagatacatgacaactatgcagcgaggtgacggctactcatacaaggccagaccgtcgctgcagcgccgcctcgccccgcatggcgaccaaacgaaagcagcctga

SEQ ID NO: 487 - DNA, 270 bp, Branchiibius hedensis
  source 1..270: mol_type = other DNA
gtcgacgaccctgccctctctccgggctcgttgaccagaccaagacatcagtgatttggaggtgaccaagatgtctacgttgcacacgggtgcgcgaacccaccggcgggtgcttcctcagcctgccgctctggaatcggtgccagcagacaaccccggggtagggacgaaacggggcaccgacatcccgcgcacggcgcaagccgggcggcgggacaccggtgtgcaacatggtcgaggggagaccaccgggggcgcacctgtacccgg

SEQ ID NO: 488 - DNA, 1614 bp, Brevibacterium aurantiacum
  source 1..1614: mol_type = other DNA
atgcctcctcagtcccaggctctcgaatctgtgccagcagacaaggacggggtatctacgaaacggggcacagaagttgaaaccatttcagcaccgggtgttcaacatggtcgagaggagacagccgtacccacacccaaagacgtggtcacggttgcgcaacagcgaaacccaaacgggaatcgcagtcaccggggtaactcggtacaaccacgtgtcttcgtcctcgataagaggaagaagccgctggatcccacctcaccagctcgcgcacgcgagctcttaaagaagggacgcgcccgtgtccacaagatgatgcccttcaccatccgcctcatcgacagaatagtcgccgactcagtcgtccacgaccacacgatcggcatcgacccaggctcccgcaccacgggcattgctgtagcgcgagagacccgaaccgtagatgaggcgacgggcgaaatcacgactgatcgccaagcggtctctctcgttgaacttgtccatcgtgggccacagatcaagaagaagctccagcagagggcagggtaccggcgggggcgcaggtcacggaatctcaggtatcgcgcaccgcggttcaacaaccgtacgaagccaaaaggatggttgccaccatcgttacagcaccgtgtggattcgacgatgacgtgggtcaacaggttccaacatctggcacctgtgtcgaaggtggcatatgaggctgtgcgattcgatactcaaaagcttcagaatccagagatcacgggtgtcgagtatcagcttggtacgttggcaggattcgaggttcgcgaatatttgctggagaagttcaaccgcacctgcgtctattgcgacgcgacgaatgtgccgctgaatattgatcatgttcacccgcgtgctcgtggtggcagtgaccgagtttcgaatctcgtgaccgcatgtattctctgtaatcaagctaagggcaagttgttagttgaggagttcgtttccgaccgcaagcgactggaacatattaggaagcagctgaaagtatgtctgcgtgatgcggcaatcgtgaccgcaactaggtggagtttgcacacagcattgatgacaaccggcctgtatgtagttgcttcatcaggtgggcgcacaaagttcaatcgctcccgactgggtgtaccgaaagaacattgcctcgacgccctgtgtgtcggtgatgtcgactcggtggggcagtggcccgaccaccggctgacaattgccacgaccggtcgtgggctgcatcagcgtactcagccgaacaagtatggatttccgagatcctaccggactcgccggaaggtccattatgggttcattactggcgactttgtgcacgcaattgtcccgagagggaaaaacgctgggacacatgtgggccgagcagcggtgcgaaaatctggcagtttcgacatcaccacaactgctgggacccggcaggggatcaggtacaaatatgtgactctaatccagcgtggtgatggcttcaactactcaatcaacaaactgctaggccgaagtgaggttgccaggaccaatggcagtgcctactcctccctacgggtagagtcatcgactatctggcgcacctga

SEQ ID NO: 489 - DNA, 248 bp, Brevibacterium aurantiacum
  source 1..248: mol_type = other DNA
gtcagcgacctcatggtgtacgagcgacgcctcgaaacggcgtccagcctcatcagttcgctgaccagaccaagacaccttgaaggaggtgactacgttgcacatacgacagaagaccgaccctgggatgcctcctcagtcccaggctctcgaatctgtgccagcagacaaggacggggtatctacgaaacggggcacagaagttgaaaccatttcagcaccgggtgttcaacatggtcgagaggaga

SEQ ID NO: 490 - DNA, 1278 bp, unidentified
  misc_feature 1..1278: note = Ga0209594_1000294 JGI
  source 1..1278: mol_type = other DNA
atgagtaattttgtatttgttctcgattcaactaaaaaaccactcgacccctgtcatccagcagtcgctcgtaaactactaaataataaaaaggctgctatttttagacgctacccttttactattattttgtttaaaactgttgaagctcaaactcaaccagttgaactaaaattagacccaggtagcaaaacaacaggaattgctctagttagaaataatcaagtaatctgggcagcagagttaactcatagaggttctaaaattaaatctgatttagataatagaagggctattcgacgtagtagaagaaatagaaaaactaggtatagaaaacctagatttctaaatagaactaaagctcaaggctggctacctcctagtctagaacatagagtactaactactctaacttgggtgaaaagattaattaaattttgtcctattaattctattgctcaagaattagtacggtttgatactcaagttattcagaacccagaaatatctggagttcagtaccaacaaggaactttactaggttatgaaataagagaatatttactagaaaaatggcagaggaaatgtacctactgtcaaaaagaaaatattcctttacaaatagaatacgttgtaccaaaagctaaaggaggaacagatagaatctcaaatctatgtttagcctgcaaaccatgtaataacagaaaaggtacgaaaagtattgaggaatttctaaaaggaaagcctaatgttttacaaagagttaaaactcaacttaaaaccaccctaagagatgcagccgcagtaaattcaactagatggaaactatttaataacttaaaagaattaggattaccagtaagttgtggtagtggaggtttaaccaagtataacagaacaaaactgaacttagaaaaagcacattggattgatgcagcctgcgtgggcaaggttgagaatttagtaataaaaatcaatcaaccattattgataaaagcgtgtggttatggttcaagacaaatgaaaaatgtaaataagtatggttttccacgttcaaaagccaaacaaaagccttatggaaattggaaaactggagacatagttttactaataactaaaaaaggagaaaaatatgtgaacagattattagcaacgaataatcctagtgcatttgagataagagttgaaggtaagagaattaaagcaaaccccaaaagcaatttattaattaaggtatttgctaaagatggttactcttacacatttagagaagtttaa

SEQ ID NO: 491 - DNA, 252 bp, unidentified
  misc_feature 1..252: note = Ga0209594_1000294 JGI
  source 1..252: mol_type = other DNA
aagcaaaaacctagctaaacattaacaaactttagcaaaccttcacttgcaccagctcactgtaaaaacagtaaacgttattaaggtcataacacctacagatacatgaagctagtttgtagctctgttgctattagttaaacaggtaagaagcttaggttttttaaaccagtgctattagcttaacaagccttaataactgagcatcaggatacttttacccgcaaggagttttcagtaatgagtaatttt

SEQ ID NO: 492 - DNA, 1347 bp, unidentified
  misc_feature 1..1347: note = Ga0207997_1001251 JGI
  source 1..1347: mol_type = other DNA
atgggaaaccaacaacagaagttaggaaagagaaatacatacacacctacgaatttgcaagtttgtagctctgtggcgatgtctttaaacagagaggaaactctcagtgagcatggcttaaaaacctttcctaacaacctcgatgcaactcagcaacatcatacagttgtccagacaatatctggaattgtgtatgtaatgaatagagaaggaaaagcattgatgccaacaacatcaccgaaagcaagaaaactgttgaagaaaggattggcaaaggttgtgaaacgaaaaccttttgtgatacagctattagttccttgcaggaatgaaacgcagaaaatcatttgtaagattgatagtgggtataagaacatcggtttttcttgcacaacagacaagaaagaactattttgtggagaggttgttttggaaaacaaaacttcaaaacgattgacagacagaaagatgtatcgcaggtcaaaacgaaacaggctatggtatcgtaaaccacgattcaataatcggacaagaccagaagggtggttacccccaagcattgaacggaattatcagacacatctgagcctaatcaatagaattggtaatttgttgccgattacacgaaagattattgaggttggtaacttcgacatccagaaattagaaaacccagagattgaagggacagaatatcaacaaggaagtctatatagataccaaaatatgaaacattttgtattcagccgagaaaaaggtagatgtcagttatgtggtaaagatgcaaaagataagatggtattacatcatctaaagcaaaggaaagatgggggaactaacaaaccaaccaatattgcattattacatgagaaatgccatgataagttacacaaagaaggattaaatattaagttcacaaacaaggaatataagggagcaacctttatgaatatcatcaaatggagattcaagaaagatattgattgtctcttgacctttggctacaagacattttgtaatagattgaagttaggtttggagaaaacacattataatgatgcgttttgtatagaaaatacagataataatatcataagatgccttccaacaatattcaaacagaaacgagtgacaaacagatgttgtcagttgaataggaaaggttacaaaccaagcattagaagaacaacatataagattcagccgaaagattcagtatggattaaaggtaaagaatttattgtgaatggaatgatgaatcttggaaaaacaattttattatccaacaaaaaaactatttcaattaacaaaattgagaaatatttttcagtaggtggtttatatgtatga

SEQ ID NO: 493 - DNA, 281 bp, unidentified
  misc_feature 1..281: note = Ga0207997_1001251 JGI
  source 1..281: mol_type = other DNA
gtcaatcacccctccctaaacccgaaaaggttttgaggaaggggcttgaatcgtgagatttgagagtaattggttgattagagggttgaaaaatgggaaaccaacaacagaagttaggaaagagaaatacatacacacctacgaatttgcaagtttgtagctctgtggcgatgtctttaaacagagaggaaactctcagtgagcatggcttaaaaacctttcctaacaacctcgatgcaactcagcaacatcatacagttgtccagacaatatctggaatt

SEQ ID NO: 494 - DNA, 1287 bp, unidentified
  misc_feature 1..1287: note = Ga0193914_10090 JGI
  source 1..1287: mol_type = other DNA
atgcaaagagtatttgtcttagatcataataaacaaccgttgatgccttgccacccggcaagagcacgcaaactcttaaaaaagggaaaggctgctgtttaccgacgctaccctttcgcaattattatgacacaccgcgtaggtggtgatttgcaaacggtggaaattaaatttgacccaggtagccgcacaactggcatcgctttggttggggattttgaccgtggcaaagaagttatctgggctggcaacttaaaccatcgtgggcatcagataaaaagcaatctcaattcaagacgagcaatacgcagagcacggcgaaatagaaagactcgttatcgtcaggcacggtttaataaccgacggcggccaaaaggttggcttccaccatcattacggtcacgagttgataataccaagaattggatgcataagctggcacggttggcaccactcactcaaatagcagttgaaacggttaggtttgatactcagaaactgcaaaaaccggaaatatcgggggttgaatatcaacaaggcgagcttgccggctatgagttacgggaatatttgctagaaaaatggggtcgtgaatgtgcttattgtggtgccaaaaatataccgcttgaaattgaacacatccaagctcgtagcaaaggagggtccgatcgagtatccaacctaaccttagcttgcactccatgtaatatcgataagggcaataaggatattaaagagtttctttcgctaaagccgaaacgtttaaagaaaatccaagcgactgctacggcacctttaaaagatgcagcagcagtcaatgctacccgctacgcgactggcaatgtcctaaaatgtttcagtttaccgattactttctcaagtggtgggcgaaccaaatttaaccgtgtcaagctaggctacttaaaagaccattggattgacgcagcctgtgtcggcgaaagtggtagtcaagttgttattcctaaagcgataacacccctaattatcacatctaagggacgtgggtcaagacagaagtgtcgtatgaatcaatacggttttccgagaactggccctaaaaaacagaagcaggtcaagggttttcaaaccggcgatattgtaaaagccatcgtgactaaagggaaaaagataggcacgtatattgggcgtgttgtggtgcgatcccggggaagctttgatattggtagtggcgaaaagaaagtgggcagcatttcatataaatattgccaattgctccaaagggcagatggttacgagtacacataa

SEQ ID NO: 495 - DNA, 261 bp, unidentified
  misc_feature 1..261: note = Ga0193914_10090 JGI
  source 1..261: mol_type = other DNA
aattataagctaagtaactgtccataaataacttagtcaactaagttattttaaagttacccgcctaagttcttcgagaactacgttagggatgaaaacataggtactctcgcgatgcttctccagtccgagactctacggggaactattaaacaggtccgatggaaaggccagtgtagtttccattcaaaaccgtcctataacattggctaggagactattacccgcgtcagcggagctaggtaacaatttatgcaaaga

SEQ ID NO: 496 - DNA, 1311 bp, unidentified
  misc_feature 1..1311: note = Ga0223825_11034434 JGI
  source 1..1311: mol_type = other DNA
atgctagtatacgtacaggataaagagggcaaacctctaatgccgaccaaacggttcgggtgggttgcatattctctaaagcataagagggcgaaggtagtacggcgagagccttttaccattcgacttctttgcgatagtttccatcatcgtcaagaagttactcttggcgtcgatgttggaagcaagcacatcgggatgactgcatcaacagaaaagaaggaactatactctgcgcaagttgagatacgggatgatgtgtctaatctattgactgcccgtagggaaatgcggagggggagacgaggaagaaagcacaactggtataggcctgcgaggtgggcgaacagggcgaacgaagaaagaaatgcttctctcccgccgtctgtgaagcataaggctgattctcacatacgagcaatagagttcgtaagaaagattctgccagtaagcagattacgtgtggagattggaaagtttgatactcaaaagatacagaatccatcaatcaaaggagaagagtatcagcaaggcgcattggaaggatgggagaatttgaaatcctatgccaagtggcgggacgggaacaaatgccgagtgtgcggtgcaagtccatataaggacaagtccgtaaggttagaggtgcatcatatccgccgtagggcggatggcggtagcaattctccagacaatgtggtgactttgtgccacgaatgccacgaatcccatcaccagaagaagaaggtgttgaagtttaagagaccgcctatacacaaaaatgaggcacatatgaattccatgcgaaaatatctgattgataaacttgtgcataattcttggaagactccagtagagttcacctatgggtatgagactgcgatggcacggagggaacacaatgtcgagaaaagccacagaaacgattctttctgcatagcagggaattttaatgcacttctcaattcatataatgtctatcgtctgtatcagagaagaaggcataggaggaatctgcatgacaacacgattttgtctccaaagtcaatcaaggacaaaagtaagatgaccgctaaagaactaaagtgcggatataggagacctcaaaagatgagcggaaggattcgtggattctctctttgggatactgtcaagttcaacggagttatatatatagtatcgtcagtaaaagggtcagataacagagtgtgtcttagccgtagcgatgaggggaagacaattgtgaaagccatgagcaagtgcaagttgctctgccataacgggaacttggtaacagaaagagttggagcttga

SEQ ID NO: 497 - DNA, 340 bp, unidentified
  misc_feature 1..340: note = Ga0223825_11034434 JGI
  source 1..340: mol_type = other DNA
catttacaacctagaacctgcaagaggctttatttcaactaattttttcgggaatccgcaaggatagttcaactaggagactagaaaggaaacgaaagaaacagaaaacctagtagaagttacagggaaatgcataggcaccggcgaatagttgtccaagtttgccgcactgcggatgtacattaaacagttctgtggtagaggaacagtgtgtgcatcgaacaaaggaaactctctgcaaccctccgatgggcaccaaacaccagaaggagtaatctgactggtgacttaccgagaaatcggttaacaaaaaaagtaagacacagaaaaaagaatgcta

SEQ ID NO: 498 - DNA, 1305 bp, unidentified
  misc_feature 1..1305: note = Ga0116592_1000084 JGI
  source 1..1305: mol_type = other DNA
atgctcgtattcgtaattaatcagcatggtgaggcgctcatgccttgcccaacgcgaaaagcaagactattgctgaatgaaggaaaagcgaagattattggttatcagccattcagtatccagttattatatggatccagtggctacaaacagtcggttaaagtaggcacgaaaatcggggagaaacatatcggcattgcagttatatccgagggccgtgtactgatgaaaggtgaagtcgaattacggactgatgtgaaaagtctaatcgaaacacgtaaaatatacagacgcattcgtagacaacgaaaaacaagataccgaaaagcacgcttcctgaatcggaaaaagccaaaagggtggttgccaccgagtttggaaagtcgaaacgcaaacacttttcgttggattaatcgttttagtagtttgctacccaaccctacactacatatcgaaatcgccaagttcgaagtacataagctaatcattccaagcgtaggcaacgttgtccgtcaaatgggtcatagcgacggctattacaatacgcggtattatgtattcgcgagagacaactatatttgccaagtatgtaaaaagaaaaataaaatagtaaatgcgcatcatattctctacaggacacaaggtggaagcgatcgtgcggataacttgatcaccgtttgcaccgattgccatacgtttgacaatcatcggcccggcgagatcttttggcggtggatggaaggtgggaaaaaactgggggcctacaaagaaccaccttttacgaacagtttgcgaaaccgcgtttacgagcaatacccggatgcaatactctcatatgggagcgaaacgacgcctcatcgaaaattgattgggttagaaaagtcacttgtcaacgatgccatcgcgataacggggataccagctattatgaagataactgacaccaccttcatggtgaaacagttccgcaagaaaaagcgaagcctgcatgaagcgaccgcacgtaaaggacggaagcagccaaatactgaaagcagacgcaacgcaaagaataccaaggcgtccaaaggattctttttgaacgatgaagtgcgaacaccttgtggtaacatcggctacattagtggctttactggaaaaaacgcctgctacgtcaagtcaattaatggccagtatatcgttattccagagaaaacacataaacaacaatcgctcaagggactagtcaagagaagccatcaaggcaattggcgctaccaactcctacataatgaagaaggcgaacagttctacataaaggattaa

SEQ ID NO: 499 - DNA, 265 bp, unidentified
  misc_feature 1..265: note = Ga0116592_1000084 JGI
  source 1..265: mol_type = other DNA
gtcaactacccaccactccaacattactagctgtcgaagtgggggcttgaaagagtctaagttgtctagccatagtcttttttgactacgttggttcggtgatcacaccctgggataatactctagtcccttgcactgtgtcggcgctgtaaaagctctgttgggtcggagcggtcaaccgaatttggcgacatttaatgtcggaagccttaccaacattggcgaagggtgacaaactccaaaaaggagggaatacgctatgctc

SEQ ID NO: 500 - DNA, 1227 bp, unidentified
  misc_feature 1..1227: note = PROU1_101214 JGI
  source 1..1227: mol_type = other DNA
atgtcagtttatgttttaagtaaaaacggaaaaccgctaatgccgactaattcgggtaacgcaagattaatgcttagacaaggcaaggcaaaagtaattaaaagaacgccgtttactattcagctgacttatagcagtgataactataagcaggatgtagttttaggcatagataccggatataagaatgtaggcttatccgcagtatcggacaccaaagaattatttagctccgaaaccaagttgagaacagacatcgttaagctgttatccgaaaaaaggcaataccgcagaggaagacggaacaaactttggtatcgcaaggcaagattcttaaatcgtggtattaagaaaggctggcttgcgccgtcagttcagcataggcttgatagtcatattaagttagtcaatttcgttaagtctattttgcctatatcaagtattaatgttgaatccgccgcttttgatattcaaaagattaataatcctgaaatatcaggcgttgaatatcaaaacggagttcagaaagacttctggaacgtcagggaatatgtgttatacagggataatcataaatgccaaaattcaaaatacaagcatacggacaagatattaaatgttcatcacatcgtatcaaggcagacaggcggggatagacctgataatctgataaccttatgtgaaacttgccataaagcgtatcacaaaggcaagattaagttagagattaagaaacataaaggttttaaagccgaaactataatgtcaatattacgctggaaaatagttgataggttaagggaactcggtaataccgttaatattacctatggctatcttaccaagtccgcaagaatagtattaggattagacaagacacatagtaatgacgctttctgtatagcgggcggggataggcaggaaaaagttaatcaatcctattttatcaagtttgttcgtaaatgtaaccgttcgctgtttaaagctaaccttttaaaaggcggaaagcgtaaggttaacactattaagcaggctttcggcttccacaggtttgataatgttttatacggcaaaatggagtgctttattcacgggttgaggtcatctggctattttgatattagacttttaacgggagagaaaatcaatgattccgttaaatatagcaaattaaggttaatagaaacttttaaaacacggaggatagctctcctccccgccttatag

SEQ ID NO: 501 - DNA, 262 bp, unidentified
  misc_feature 1..262: note = PROU1_101214 JGI
  source 1..262: mol_type = other DNA
gtcaaccacccgccgcttgaagaagcgggggcttgaaagagctggctgataagggagattaaattatgtttaatcagcagttatttaagagaaccgttaaggaacacaccttaagatattgcgcaagtcttaagctctgtggattagtattaaacagtcttgagagggtaaaagacagtgtgctaatcttaaaaaccttaaataacaatcccgatgcgtatctaacccttgtaaaaggaggtaaaacattatgtcagtttat

SEQ ID NO: 502 - DNA, 1485 bp, unidentified
  misc_feature 1..1485: note = Ga0256407_10017433 JGI
  source 1..1485: mol_type = other DNA
atggcaaatatatacgttctatcaaaagacgggcagcctttaatgcctgtccacactttcggcagagtcagaaggctcttgaaaagcggcaaagctcgcattgtcgcacatattccgtttactatacagctgacctatgatatcaaagaacctgtgattgacgactgccttttagggatagaccctggcaggacaaatatcggcttatgcgtcatagacagcaaagccaacgtgcttttcgcatcagatgtagaaacaaggaacaaagcgatagcaaaactgatgctgaaaaggaagacagcacgacaggcgtcacgcaggggcgaaaggctccgcagacagagacgtgccataacggcagacaaaaccggcatggcaaagcatacagagttctggaggatgctcccgggctgcaaggagccggtgtgctgcaagatcataaggaataccgaagcccgcttcaataacagaaaacgtaaaaagggtgaactaaccactgccacggcaaaacacctattacaggcacatcttaaccttataaagaagacacaaaaactgttgcccctttcaggcatagtcatagagatcaataagttcgactttgcccgcatggagaaccctcaaataaggaactgggaataccagaaaggcaggctctttggattcagggatgtttatgacgccgtacaccaccggcaggaaggcaagtgccttctttgcgggaaagcagatatagaacattatcatcacttaacgccaaggcatcaggacggaagcaatactcttgataacatagccggattatgtaatggatgtcacagcaaagtgcatacagaccaaaaaacaaaagaggaattactctcaaagcatgaaggcatcaagaaaaaataccatgcactgtcagtgataaaccagataatgccggaacttttggggaaatgtgcagaaatccttcccacatacgtcactaccggggaagaaacaatgctgacaaggggttgcttcgcccttgaaaaagaccactatgtagacgcatggtgcatagcagcctctcggataacggaattttcggaagattacgatatccccgatttcaaaggcagtattcataatatcaggcagttccgccgtcacgacagagccattatcaaatcacagacagaaagaacatataagctggatggcaagatagtcgcaaagaaccgcaagccccgtttcgagcagcagggaccggcgctgtcagacttaaccctgacaaagcaggagatatcaagacttaaagtaaccaaaagcacgcgcaggtacaatattaaagacagactgatgcccggagcggcattcttacataacgggagctaccatataatgagcggtcaattaactaacgggcagtacctgagagcattaggagacggcaaaactaattacccaacaaggaaatgtaagatactcaaacacaatacaggattagtgtttatagcataa

SEQ ID NO: 503 - DNA, 261 bp, unidentified
  misc_feature 1..261: note = Ga0256407_10017433 JGI
  source 1..261: mol_type = other DNA
gtcaactacccaccgcctacgctaacgctaagaggcgggggcttgtgaaaacaagcaatacacaagtattgtagttgagcagagaccaaagttgagtaagcttcacgcttacaagtccgacatgccacgttccatggggtgccactcccagccccatgtattcaaagggtatgccgagtctcgggagacctacggaccagcccaccgggtttgcagccattaaagggctaatctttaagaaaggacaggattatggcaaat

SEQ ID NO: 504 - DNA, 1134 bp, unidentified
  misc_feature 1..1134: note = Ga0190346_1003230 JGI
  source 1..1134: mol_type = other DNA
atgcaaagagtatttattctggatcataacaaaaagccgttgatgccctgccatcccgcaagagcacgcaaactcttaaaaaacggaaaggctgctgtttatcgtcgttatcctttcataattattatgaagtgccgtgtaggtggtgatttgcagcctatcgagatcaaatttgatcccggtagccgcacaactgggatcgctttggttgggcattttgatcgtggcccagaggtgatctgggcgggcaacctaaaccatcgtggacatcagataaaaagaaatcttgattcaagacgggcggtacgtcgttctcgaagaaatagaaaaactcgttatcgcccagcacgttttaataaccgacagcggcccaaaagctggcttcccccctcattgaggtcacgagttgataacgtaaagaattggatgattaagttgtcgcgattagcaccactcactcaaatagcagttgaaacggttaggttcgatactcagaaaatacaaaatcccgaaatatcgggggttgaatatcaacaaggcgagcttgctggctatgagttgcgggaatatttgctagaaaaatgggatcgtgaatgtgcctattgtggtgctaaaaatgtaccgcttgaaattgagcacattcaagctcgtagcaaaggagggtcagatcgagtatccaacctaaccttagcttgcactccatgtaaccaaaaaaaaggcaacaaggacattaaggaatttctaaaacgcaaacctaagcgtttgaagaaaattcaagcacaagcgaaggtacccttaaaagacgctgcggcagtcaatgctactcgctacgctactggcaatgttctaaaagatttcggtttaccaatcactttctcaactggtgggcgaaccaaatttaaccgtacaacgcgcggctatccaaaagcccattggatagacgcggcttgtgtaggggaaagtggtgctaaagtcgttattcccccagcgataacgcctttgattatcactgccaaaggacgtggctcaaggcaaaagtgcagtatgaatcaatatggatttccgagaaccagccccaaaaaacacaagcgagtaaaagggtttcaaacgggtgacattgttaaagcggtcgtg

SEQ ID NO: 505 - DNA, 264 bp, unidentified
  misc_feature 1..264: note = Ga0190346_1003230 JGI
  source 1..264: mol_type = other DNA
aactacagactcttataagtaaccgtccataaataacttaggcaactaagtattttaaggttacccgctttagttcttcggaactacgttagggacgaaaatataggtactcttgtgatgcttctccagtccgagattctacggggagtcattaaacaagtctgatggaaaggctagtgtggctcccattcaaaaccgtcctataacattagctaggagaccattaccagtgcaaactgagttaggtgacaatttatgcaaaga

SEQ ID NO: 506 - DNA, 1257 bp, Moorena sp.
  source 1..1257: mol_type = other DNA
atgcagaattacgtattcgttattgacacaaacaagcaaccattaaaccctattccaccaaagaaagctcgccggttattaaacaaaggtaaggctgccgtttttaggatgtacccgttcacaatcatcttaaagactgcgatcaataatccaaccatctcaccttgtcaaataaagattgaccctggtagtaaggtaactggatttgccctagtccaaaacaaccaagttatttggggaatggaattagagcacagaggaggattaattaagaaaaaactagagtctagaagcgctgtaaggcgtaggagacgtaaccgcaacacccgctacaggaaacccagattccttaaccgtaagcgtccagagggatggcttccacctagtctagaacacaggattttgactattcagacttgggtaaaacgattgattaaattctgcccagtcaatgagatttgggtcgaaagggttaagtttgacacccaaaaaatgcaaaatcctgaaatcagtggcattcagtaccagcaaggagagttagccggatatgaggttagagagtacttacttgaaaaatggggaagagaatgcacttactgtggtaagcaatccgttccattgcaaatcgaacacattcacccaaggtcacttggtggaagcgatcgcgtaagtaatctttgtttggcttgtaaaaagtgtaatcaacgcaaaggtaacaagcctatagaagacttcttaaaaaagaagccaagtctactgcaaaaaatcaaatctaaagctaagcagccattaaaagatgcaacagcagtaaatgcaactcggaacaagttagttaaggtacttcaattaatcaaggttgtggtcaccggaacgggagcgcaaaccaaatacaaccggactagattagaactacctaagcagcactggattgatgccgcttgtgttggggatattgagaccttagtgttgagaacctctcagccgctgttagtcacttgcaagggacccggagggagacagaaagcagcacttaacaaatacggttaccccatcagacacaatccattaaaaccaatcaaaggctgggttactggggacatagcccagcatcctctactaggaataggcaaagtcacccctagaagcaaaggaagctttggatttaccccgttaggaaccaagggctacaaaagttgcaaacctcaagatatatcggcaatataccgaaaagatggatacacttatagcttttgctag

SEQ ID NO: 507 - DNA, 230 bp, Moorena sp.
  source 1..230: mol_type = other DNA
cgttaaagcctggcaattcccggtaaactctgggattgcctagcgaagatgcagactaaggattagtttcctacgttggtctggtcaggatacccgagggtgacctccagctcccggctctatcgctaactattaagaaaaggcaaaatgtgtggttagcatgacaagccattccaacattgtcgaggaacacattaccgaattgagttgcactaatcatgcagaattac

SEQ ID NO: 508 - DNA, 1212 bp, unidentified
  misc_feature 1..1212: note = Ga0207747_1000200 JGI
  source 1..1212: mol_type = other DNA
atgcctacaacaccaagtaaagcgagaaaattattaaaacaaggtaaggcaaaagtagtaaaaagagaaccatttacaattcaattattatacgcaactggtgaaaccaagcaggatataacattaggtatagatgcaggaagtaaatttattggagtatctgctacaacagaaaagcaagagctattttcagcagaagtagaattaagaaacgatattgtagacttactatctacacgtagagaattcagacgtacaagaaggaatagattaaggtatagaaaacccagatttttaaatcgtgtttatagtaaaaataaaggttggttagcaccttctgttgaaaataaaatacaaacacatttaaaaataacaagtaagatacacgaaattttgcctatatcaaaaataataatagaagttgcttcctttgatatacaaaagattaaaaatcccgatatagaaggtgaacaataccaacaaggagaacaattgggattttggaatgtaagagaatatgtcctttggagagatggatataaatgtcaaggtaaaaagggttgcaaaaataaaatattaaatgtacatcatatagaatcaaggaaaactggtggaaattccccaagcaaccttattactttgtgtgaaagttgccataaagattatcatgctggtaaattaaaattaaatttaaaacgcggtcaatcgtttaaagatgcagcttttatggggattatgaggtggacattttataatagactcaaagaaatatattctaatgtaaaaataacttatggatatattactaaaaacactagaatacagaataatctaccaaaagaacataggattgatgcattatgtataagtggtaatcctaatgttaaaagattagattattggtattatattaagcaagtaagaaggcacaatagacaaattcataaagccaatatattaaagggcgacaaaaagaaattaaatcaagctccttatttagtaaaaggattcagattgtttgacaaggtaaaatacaaaggacaagaatgttttatattcggtagacgcagttctggttattttgatttaagaaaacttgatggtacagttattcataggagtgccaattgtaaagatttaaaacttataagcaaggcaaaaacattattatgggaaaggaggatagatgtggctgtttcctcacatgactaa

SEQ ID NO: 509 - DNA, 228 bp, unidentified
  misc_feature 1..228: note = Ga0207747_1000200 JGI
  source 1..228: mol_type = other DNA
gtcaataacccaccactaaagtggcgggcttgcaaaagcctttattgactagactaagcgaaagctacgttacctatatcataacacctacgaatgtttaccctagttcgtagctctgttgcttaactttaaacagttctgatgggtaggaacagtgagttaagtgtaaaaagtataggtaacattgtctaagggtactaactccagaaaggaggacataacttgaga

SEQ ID NO: 510 - DNA, 1242 bp, unidentified
  misc_feature 1..1242: note = Ga0315268_10018380 JGI
  source 1..1242: mol_type = other DNA
atgccgtgctcgccggccaaagcggggttcctgctccggcggggaaaagccgaggtcgtgaagagaaccccctttgtgatccggctgaagtacggaagcggggggtaccggcaaccggtgaccgcggggctggacagcgggtacctgaatgtcggggtgtccgtagttgcgggtgggaaagagctccacgcggaagaggtggtgttgagatccgacatcgttgtactgaacagcgaaagaaggcagcaccggcgcaaccgaaggaacaggaaaacctggtaccgccaaccgcggttcctgaaccgcaagaaaccggaaggttggctggcgccttccctccagcacaagctggacagccaggtgaagctggtggtcgggttggccaaggtagtaccggtcacgaaggtagtggtggaagtcgccagcttcgacatccagaagatcaaaaaccccgagatcgcgggagtcgggtaccagcagggcgagcaggccgggtttgccaacgtgagggagtacgttctctaccgggacgggcacaggtgcaggtgctgcaacggcaggtcaaaagacgagcggttggaagttcaccaccgggagagcagaaaaaccggaggcaatcgaccggagaatctggtgacgctctgcgagacctgtcacgaccgggctacggccggagaggatcttgggtttggaaaaactcctcttgggttcaaggcggagaccttcatgacaacggtccgatggaagctgatggcccggctccgggagtgggggtttgaggttgctcacaccttcggctacatcaccaagatgcgaagggaagaagcgcggatcgagaaaactcacgccaacgatgcgttcgtcatcgccggagggaccggggaatacgagaggcagagggtgatcctgctgaaaatgcaggtccggaagtgcaaccggaagctgttcaagggcgaccggagccacctcaggaacacggcgcctcggctggtcaaggggttcgcccggttcgacaaggtccgatacagggggatcgagtgttttgtgtccggcaggagaagcaccggatatttcgacctgcggaagctggatgggacccgagtccatgcaagcgcgaagtgggcagatctgagactgctggaacggggaggaacgatgccgtcgggatacaagcaagccaggagaggggccgcgcattcctccccaggggcaagccccggggtctcctgcgcgatgctatga

SEQ ID NO: 511 - DNA, 274 bp, unidentified
  misc_feature 1..274: note = Ga0315268_10018380 JGI
  source 1..274: mol_type = other DNA
gtcaattaccctcgggacgagcccgggggcttgcgggaagcaacggcaacacccgcagacctcgattgactagggggccgggtggaaacacccggcagcagttgcttcggtcagcacaccccgggatattccgcacgtcccgggccctgtggtccacggttaaaagggtttcaggggtaaaacccggtgccgtagacatgacaagccgaggcaacaatcccgatgcggcaccaaccccctgaaacggggagaaggagactgcttgttagtcttc

SEQ ID NO: 512 - DNA, 1377 bp, unidentified
  misc_feature 1..1377: note = Ga0209317_1000713 JGI
  source 1..1377: mol_type = other DNA
atggcagttttcgtgatcgacaaaagaaaagatccactcatgccttgttcagagaaaagggcgagacttctgctggaaaagggtaaggcagttattcaccgtcgaattccttttactatcaggttgaaggaccgcattgctggtgaagtacagccgctttgcgtcaaggtcgatccaggcagcaagactacgggattggcggtgactaccgagtatggcaaggttgtttttgcagcagagatacagcatcgagggcaacaagccagagaagcactgcaaggacggaaaggattcaggaaaggccgtcgcagccgtaatcttcgctaccgggcaccgcggttcgacaaccgaaccagactaaagggttggctaccgccatcgttggagagcagaatcggcaacatcgtcacatgggcggagagattacgcaaactcgcgccagtgacatctctgtcacaggagttggttcgcttcgatttacagcagatggagaatccggagatttccggcatcgagtaccagcaaggcactttggccggatacgaagtacgcgaatatcttcttgaaaagtggggccgtaagtgtgcctattgcgacgcggaaaacacacccttgcagttcgaccacatacatgcaaaggccagcggtggtagcaaccgaatcagcaacctcactttggcctgcgggccgtgcaatcagaaaaaggactcgcttgatattgaggttttcctgaagtcaaaaccgaaaatactcaaacgtatacttgcccaggcaaaacgaccgctcaaggatgctgccgctgtaaacgcgacacgatgggaattgtataacaggctcaccgcaactggccttccagtcgaaatcgggtctggggggcggacgaaattcaacagaacccagcagcatcttccgaaaagtcactggatcgacgccgcttgtgtaggtctctctggcgaacaggttgttatgccagcaggagtatgcgtttttggaattaaggccatgggacgcggatcgtatcagaggacccgggtgaatgcctccggttttcctcgcgggtatctatccaggcaaaagcagtatttaggtttccaaactggtgacattgtaatcgcggacgtacccaaagggaaaaagtctggtgtccatgccggcagagttgctatccgtatgtctggatctttcaacattcagactgctgatggggtcgtccaaggaatcagtcatcgccactgccgcgtaatccagcgtggcgatggttataactactcgacaacgctgatagcaaaccataaaggagagcgggcaaagggtcatgctttgcacgacgcgctatccctccccggcctgaacgccggggtttcccgcgcagcttga

SEQ ID NO: 513 - DNA, 294 bp, unidentified
  misc_feature 1..294: note = Ga0209317_1000713 JGI
  source 1..294: mol_type = other DNA
gtcaactaccccggcctgaaggccgaggcttgtgagagattacaagcttgaggttgaccagggggagccgtaaccaaccggctacgttgtatggaggttcaagaccgacggcagaatgcttcctcagttctgcccaatcgaagtcccggttgcagacacgccacgggtaggcccgaaacgggtcgggacatatcgccgccatacaacatccccgaggggagatttcccgcaagggaagcgtcacaaggcccgtaagggcgttttgaaaagaagcttcaaaaggatcaaatggca

SEQ ID NO: 514 - DNA, 1215 bp, unidentified
  misc_feature 1..1215: note = Ga0373927_0000546 JGI
  source 1..1215: mol_type = other DNA
gtgcgagacggcgagcgcaccgctcaagctcctgactaccaggccgatctgcggcagaagcgctataggacaacaagaacgttcgcgtgccaccctgttcggacgacatctcgccacgcgcagcagacgagagggaggcacacctctctcagccctcagtgccatcgggaagagttctatgacccgggcatgggcctggagaaagggagatccctaatcatacgcataccagtcggagacgcacggggagtagctctcataccctgtacacctgccaaagctcgccacctcttgatgtgtggcaacgcccggtggcctggtgtactctccgtgcaagtgtacaacgaacaggagcccactaaccaaccgttggtggcaggtgtggatgcaggcaggacgtctgagggcgaccgtgtggttggcagcatagacacggcgctcaaccttctgggagaggcccgcgatcacatccgggaggccgtggaaatatgcagaacgctgcgacgagctatgtgccgactcacacgtcggcggaaaaccagagcccgcatccggcccgtgagggaaggtgtgcccgctgtgacacgaccgagcaaaggtggccagtgccatggcgcctttcgcccggttcaggtgggcaaggagcacttctccggccttctgcgtgcgaggggacgcatggtgtatctcaaggaaggctggcagaccagagaactgcatgaaaggtatggcttgcagaggccgaaacgggagagcctgcaattttttgagtatcatgcgatagacgcccgggtcctggcagccagcagcatccgtgggacatgtgttccgactagcgcgcatccccgccaacagcatcgtttgcacgcagcccggggtggtctgcgcaaaccctctgacgggaggcatgtgcctggactcaaacgtggcacgcttgtttgtcattccgggtatgggttctgtgcggtgggtggttttggccagagagcgtccattatcagcgtgcatgcgtgttggacgaacgcacgacggacgcgaggagcacgaggcaacgattgtcggcccttgacccgggtggcgtgtcgctcccgactcgtcggtgtgatcccaaagaagcgaggcaagggaggccacccgactcctgccccatctcagaaacgcctgttttttcccactgcgggaacgctggtgggcccgcacaggcgggaggtttga

SEQ ID NO: 515 - DNA, 296 bp, unidentified
  misc_feature 1..296: note = Ga0373927_0000546 JGI
  source 1..296: mol_type = other DNA
acgaacacaaaccgtctgtgttcttgcattcgatgatcggtcactgcgggccagaacgtgtgatctctgcaaaacgtctctggtcgctgctggcccttcgacgaatatactgtatcaacgtaaggcaggtccatttttccaggctattatactgcagtgtctgcaaactggcaagcgccgaagtaccgcgtccctctcctctagccctgccacagactggctgtgctggcaggtatacccggcggccagcagaagtgggggtggtgttgctccctggcgagatatgctatataata

SEQ ID NO: 516 - DNA, 1437 bp, unidentified
  misc_feature 1..1437: note = Ga0136449_100279210 JGI
  source 1..1437: mol_type = other DNA
gtgcttcctcagccccggacccttgaagcgccgtcagcagacaaccccaggggtgggcacgaaacggggcggcacggccgtaaggcacccggcttcccggaaggggcgcgagcgcaacatggccgagaggagaccagccggaaggctggcgtcacccccgcaaggggagaccgccgagtgtttgtactcgacaagcggggtaacccgctcatgccctgtcatccgtcccgcgcccgcgcgctgctgcgttcgggccgggcggcggttcacaggcacacgccgttcgtcatccggctgaaggaccgtgacggcggcgatgttcagcaggtccgcctcggcgtggatccgggctcaaagaccaccgggatggcgcttacccgccaggacggcgacgcgacccgggaagtcctcgtactactggaggtcacccatcagtcggtcctgatccgcaaaaggatccaacaacgcgccgcgagccgccgacgtcgccgatcagccaacctccgctaccgcgcgccgaggtttagtaatcgcaccaagccgagcgggtggctggccccgtcgttgcgatcccgcgtgcagcatgttgagacatgggcgcgacgactccagcgctggtgccctatcgctgcgatcgacctggaactagtccggttcgatacccaggccatggagaagcccgagatcgcgggaacggaatatcagcagggcaccctcgccggatatgaggcccgtgagtacctgctagagaagtgggagcgcaggtgcgcttattgcgatgcgcaaaatgttcctctcaacatcgaccacatcgtgccccgctcgcgcggcggcagtgatcgcgtctccaacctcacgcttgcttgtatcccgtgcaaccaagccaagggctccatgccggtgcgccggttcgtcgcggatccggaccggctggcgcggatcctcgcacaggcaagggtttcgctacgggacgccgcagcggtgaactcgaccagattcgcctgtctcgccgcgctacgcggcctaggggtccccgtcgaatgctggtccggtggccgcaccaagtggaaccgccgtcggaccgggacaccgaaaactcatgctcttgacgccgcttgctgcggcgaggtgagccagctgaaaggaacctctgcgcctgtctacgtggtcaaagcggccggtcgaggattgcatcgacggacgtgtccagatgcctacggattccctcggctgcgcatgccgcgagtcaagcaggtgtacggattccagaccggagacctagtgcgggcacacgttcctaacgggagatatgccgggatgcatctcggtcgcgtcagcgtccgaagcagagggcagttccgcatcggcggcagggacatcaactacaggaattgcatgctaatccagcgagcggacggatatgaccatgccatttag

SEQ ID NO: 517 - DNA, 297 bp, unidentified
  misc_feature 1..297: note = Ga0136449_100279210 JGI
  source 1..297: mol_type = other DNA
gcctggctccgctcccctgagggtgaggagtaaccgatccccaatgttctacatcggttaccaggccaagtcgctaaggaggtgactacgttgcaggcaggacagaagaccgactccggggtgcttcctcagccccggacccttgaagcgccgtcagcagacaaccccaggggtgggcacgaaacggggcggcacggccgtaaggcacccggcttcccggaaggggcgcgagcgcaacatggccgagaggagaccagccggaaggctggcgtcacccccgcaaggggagaccgccga

SEQ ID NO: 518 - DNA, 1377 bp, unidentified
  misc_feature 1..1377: note = Ga0213873_10000897 JGI
  source 1..1377: mol_type = other DNA
atgcaagttttcgtcctggacaccggccgcaagccgctcgatccgtgctcgccggcgcgggcccggatcctgctggccaaggggcgggccgcggtcttccggcgctaccccttcacgatcatcctgcacgatcggaaggttgaggattcggtcgtgcacgagcatcgggtcaagatcgacccgggttccaagacgaccggcatcgcggtcgtgcaggaggccacgggcgcggtcgtcgctgcggtcgaagtcgagcaccggggccaggcgatcaaggcgttgctgcgcgatcgcaaggccctccgccgcaatcgacgggcccgcaagacgcgctatcgccggccccggagcaaggccgaggccgcgaaccaagaggcgcagaagaaggccaagggttggctccctccgagtttgctgagccggatcgccaacgtcctgacctgggtcgctcggctccggcgcctggtcccggtcgcggcgatctcgcaagagttggtccggttcgacctccagaagcacgaggatcccgagatctccggcatcgcgtaccagcaaggcacgctggccggctacgagttgcgggagtacctcttggagaagttcgaccgcacgtgcgcgtattgcggcaggaccgacgtaccgctccaggtcgaacacatcgtaccgcggagcaagggcggatccgaccgggtcagcaacctcacgctggcctgcgagccgtgcaaccgccgcaagggaaaccgacccgtcgaggactttctgaagagcaagcttgaggtcctggccaagatcctgaagcgagccaaggccccgctcaaggacgccacggccgtcaacgcgacacgctgggagctgtaccgccggctccgggcgacgggcttgcccgtcgagtgcggctcgggcggccggacgaagttcaaccgcgcgacgcgcggcctgcccaagacacactggctcgacgccgcatgcgtcggggccagcacgcccgaggtgctcgacgtcgaaggtttgcggccgttgctggtccaggcgtgcgggcacggcacgcgacagcggcagaagttggataagttcgggtcgccaaggggtaacccggcccagaggaacaagcacgcttacgggttccggaccggggatatcgtgcgtgccgacatcccccatggaaagcacagcgggatacacacggggcgaatccagatccggaatcgaccgtcattcctgctaggaaaggccgacgtgcatcccaagtatctcacgatcatccacgacgccgacggatacgcgtattcgctcggcgagaccatcgttatccgggccgagcccggaccggatttgctcccccccacggctaaagccggggggccccgcaaatcctga

SEQ ID NO: 519 - DNA, 281 bp, unidentified
  misc_feature 1..281: note = Ga0213873_10000897 JGI
  source 1..281: mol_type = other DNA
gtgaagttccccacccgtcaacggaccccagccctaaagggcggggcttggtgttgcaagacgccaagcacggtgaacaggctcagccctagcaatagggctacgttggaaggtgacgacagacgggatgcgaagccagtctccgatcctgtcgcccgcgattaaaagtccgaaggtctaggacggtgtcgcgggccgtagggatgcagaagccgaccaacattgccgaggcgaacgttactgcgaaagcaaggacctcgtaagaggcaatctacatgcaa

SEQ ID NO: 520 - DNA, 1404 bp, unidentified
  misc_feature 1..1404: note = Ga0070717_10012599 JGI
  source 1..1404: mol_type = other DNA
atgtcacatgtgtttctcctggacgctgagcggcgtccgcttgctccggtgcacccgggacgggcacggctcttactcaaagcaggcaaggctgccgtcttcaagcgcttccccttcaccctgattctcagacagctcgcagcgcaagccgcccgtgagccgctgcgtttgaagatcgacccgggcagtcacaccactggtctggcgctggtagcagagaggagtggcgaggtgctgtgggcaggggagctcacccatcaaggggaggcgatcgtcgagcgcctgcggaagcggcgagcggtgcgcagagggcgccgacagcgccatacacgctaccgagaggcgcgctttgccaaccggcgcaggaaagacggctggctgcctccgtcgctgcgcagccgggtgcaaaacgtgctgacctgggtccagcgcttgcggcggctctgtccgatcgcggcgctctcgctggagttggtgcggttcgacacgcaggccatacaggacccggacatcgcgggagtcgtgtaccaacagggcacgctggccggctttgaggtcaaggagtatgtgttggagaagtggggcaggcgctgcgcgtactgcgatgcgagcggcgtgccgctggagatcgagcatatcatgccgcgcagccgtggggggagcagccgcgagagtaatctgacgctctcctgtgtgccctgtaacacggccaaggggacacaggacattggcgtgttcctggcccacgaccccgagcgactcgcgcgcatcctggcgcaggcgaaggcgccgctgcgtgacgtggcggcggtcaatgcgacgcggtgggcgctctatgaacggctcgtagccttagggctgtccgtcgaggtgggcagcggcgggcgtaccaaatacaaccgcaacaggcaacagatgcccaagacgcattggacggatgccgcctgcgtgggggagagcacgcccgagcagttgcggaactggcagaccgtccgacccttgctgattactgccaccgggaggcaaagccgtcagatgtgccacgtggataagcgcggctttccgcgtggtaagcccaaggggccgagccggtcacacgggttccggaccggggatatggtgcgagccgtggtcaccaaaggcgtacacatgggcacctacgtggggcgggtggccatcaagtccgatggctacttcaagctcacgaccagggccagggtggtggagggcatccatgcccgctattgcaccccactgcatcgtagcgatggctatgggtacgccattgggagtctagcagcgcttcctccccaggtctcaaggaccggggctccgcgctgctttgaggggaaggggcaccggaatcgtcaagcatccatcccttcgcaagggatgggctcgtga

SEQ ID NO: 521 - DNA, 315 bp, unidentified
  misc_feature 1..315: note = Ga0070717_10012599 JGI
  source 1..315: mol_type = other DNA
gtcagcgaccccacggggaaacccgggggcatgtgcttgagaaagagcatgccctgatgctgaccagctcccctgggtgctcttgctgagagggcagccagggagccgttcgttgggagcgccaccagtcggaccctgggatggcctttccagtcccaggcgctgcaatcctgctgttaaacaggtgcacggggaagcagagccggtgcagcgggaagagggccgccaacgaacaggagcgaggaaaacttcacccgcgcaagcggaggccccaagcgggccagaccacgaaaggaagcagtagatatgtcacat

SEQ ID NO: 522 - DNA, 1329 bp, unidentified
  misc_feature 1..1329: note = Ga0163147_10008687 JGI
  source 1..1329: mol_type = other DNA
atgcaacgagtattggtgctagataagagcaaaaacccgctgatgccgtgtcatcccgcacgcgcacatcaactgctcaagcaagggaaggcggcggtctttcgtcaatatcccttcaccatcattttgaaagaacgggatggtggggatgttcaacccgtcactatcaaggtagacccgggcagtaagaccactgggataccgatggtcgctgatttcagagcgggtaagcgtgtgatttgggctgggaagctcacccatcgcgggcagcaaatccgagataggttgttatcgcaccgtcaaataaggcggggtcggcgtgtccgtaagacacgctatcgcttggctcgtttcctaaatcggcgtcgtgtgggaagcaaacttgcgccatcgttacaaagtcgagtcgagaacacactaacttgggtcgggcgtctgagtcgttggtcgcctattaactcgatctcaatggagcttgtgcgctttgatatgcagttgatggaaaatgctgaaatatctggcgtggaataccaacagggcgaacttgctggttatgaggttcgagaatatctactggaaaagtggggacgcgagtgcgcctattgtcatgccgccgataggccattagaaatcgaacatatcaccccaaaatcacgcggtggctcaaatcgtgtgagtaatcttaccgtggcttgccatgactgtaatcaacgtaagggtagccaaactgcgacagaatttgggcacgccaatatccaacagcaagccaagcaaccgctcaaagatgcggcggcggttaacgcgactcgctgggcgttgtggagacgcatggacacattgggtttgccattggaagtcgggacagggggacgcacgaaatttaatcgggtaaaacaggactatccaaaagcgcattggattgacgcggcttgtgtaggagaaagtggagaacaaatttacaccagcctaaatcatgcgccacttcagatgaagacgacagggcatcaatcgcggcaaatgtgccgcgttgataagtacggcttcccaagaaccagcgccaaacaagggcgtgtccactttggtttccaaacaggggatatagtcagggcaatggtcacaaaaggagtaaaacgcggtatgtatgttgggagagttagtgtcagggctagtggtttttttaatatcactacccctaccggaacgattcagggtatcagctatcgctacttcaccccaattcacaaatccgatggctatctttacgagaaaggagaggcgctttcccccgctaccacaagggtagcggtacccccgcgccaagttcaatga

SEQ ID NO: 523 - DNA, 255 bp, unidentified
  misc_feature 1..255: note = Ga0163147_10008687 JGI
  source 1..255: mol_type = other DNA
gtcaacgaccacccctatgaagggggtggcttgcgataagcaagcccatgttgaccagccttagtctcattcgtgagacaccgttattcgggtcacgataccggcgggtgagtgaaccagcccgtcgctctatcgttcaccgttaaacatgccgagggtctaggcaagtgcggtgggcatgacaagcccgaataccattggcgaggttcactttaccgccgcaaggcgagaataatgaggtaactcatgcaacga

SEQ ID NO: 524 - DNA, 1065 bp, unidentified
  source 1..1065: mol_type = other DNA
ttgtgttacttaactgggaaatatacacaagatatagagcttggcatagatgcagggtattcagccatagggttcagtgcaacaacagacaaaagggaattaatttcaggtgagttaattttgagaaagagaatttccaaactcattgagcagaaaagaaattacagaaaaggtaggcgaaataagttatggcacagaaaattaagatttaataatcgtagcaaacctgaaggttggtttgcacccagtattcagcataaacttgagacacatctcagattgatagaaaaactgaagaagatactacccataacaaaaatcaccatagaggtggcaaagtttgaccagcagaagatgaacaaaacagagattaagggtgtagaataccggcagggcgagttacagggctatgaagtgagagaatatctgctggagaagtggaaacataaatgtgcttattgtggtaagaataatcttcctctggaaattgaacatataatccctaaaatcagaggaggaacaaacagagtttccaatttaaccatagcgtgtcacaaatgtaatcagaagaaaggagacaagacagcagcagagttcggatatccagaaatacagaagaaagcaaagcaaacattaaaagcaactgcatttatgaatatcgtcagatggagactggtgaatactctggagtgtggctggacgtatggatatatcaccaagcatgacaggattaaattaggattagagaagagccatgtgaatgatgcttttgttattgctggtggaacaacacagagcagaagtaaactgtatatggcaacacaaaccagaaggaataacagaagtattcaaaccaatagggtgggtttcaaaccctctatcagacgacagagatatgaattacagcccaatgacttagtgaaatataagaaaatactgtgtaaagtcaaaggagggttcagttatggtaaatgggtcagattggtaaccaaagcaggtaaaattattaacaccaatgttaagaaagtggaattggtaaaatatggaaaaggaatacagttttaa

SEQ ID NO: 525 - DNA, 253 bp, unidentified
  source 1..253: mol_type = other DNA
gtcagtcacccacggctaaagcacgtgggcttgttctgtgaggagcaagagcaattggttgattaggaggcattgaatatgcagaagttattggtagagtttcagaacacaccagaggatgctcctcaagtcctctgctctgtaagtgaggtattaaacagagacaaaagtctcagtgtgcctcgcacagtactggctaataacaactccgctcaggaccaacactctggcaagagtggacaggtgttaagcg

SEQ ID NO: 526 - DNA, 1248 bp, unidentified
  misc_feature 1..1248: note = Ga0256404_1016703 JGI
  source 1..1248: mol_type = other DNA
atggtttatgtagtttcaaagagtggaaaacctctgatgccaaccgagagatacggtaaagttcggaggatgttaaagaatggcgaggctatcgttattaaacgtgtgccattcaccattcagttacaatatgattcaaaggaatacactcaagacttaactcttggtgttgatgcgggtagtaaaaaggttggattatctgtgtcttctaaggaaaaagaagtctttgctggggagttggcactaagaaatgatattgtaaatctcttgtctacaagaagagaatcacgaaaaacaaggcgaaatcataagacgagataccgtaaggcaagatttgacaatcgcaaaaagccaaaaggatggctggcaccatctgttcaaaataagattaacagtcatttaaaaatagtgggtgatcttaaaaagattcttccaatatccaagattgttgttgaggttgcaagttttgacacacaaagacttaaagcagatattgaaggtctgcaaacaccacaaagtattgactatcagcatggtgaacagtttggtttctggaatgtgagagaatatatcctttatcgtgataatcatacatgtcagtgttgcaaaggaaaatctggtgacaaagttttaaatgttcatcatattgaatctcgtaagactggtggtaattcccctggcaatctaattacactttgcgaatattgtcacaagaaataccacgaaggaaaagtcaaacttccagatgcgattaaacgtaaagcttctatgcgagacgccgcttttatgggaatcatgcgatgggcgctctacaataagctcaaagaaatgtatcatggagaagtgtcaatgacttatggatatattacaaagcatacacgcatccaaaatggtattcaaaaaacacatgcggctgacgctctgtgtattgcaggacatcccaaagctataagagcatatgagttttataacataagaaagataaggtgccataatcgtcagatacacaaaatggcaatctcaaaaggcggagttagaaaaaggaatcaagcgccatatcttgttaaaggatttagattgtttgatcgtgttttgtttgatagtcaagagtgttttatctttgggcgtagaagtagtggttattttgatttgcgtaagcttaacggagagaaagtgagtccatgtgcttcgtacaaaaagatattgttactttcaaaagctaaaaaatatttatgggaaaggatgtga

SEQ ID NO: 527 - DNA, 257 bp, unidentified
  misc_feature 1..257: note = Ga0256404_1016703 JGI
  source 1..257: mol_type = other DNA
gtcaatgactcacgattaaaatcgtgagcttgcggttttaattgtcgtgcaaacgaatgttgactagcctaagcaccacgagtgctacgttgttttggtcataacacctacgaatatcatacctagtttgtagctctgttgttggtgattaaaagtcctgtggagtagggacggtgttaccagcatgacaagccattacaacattggcgaaggtatataacggtcttgagaccgatttatctgaaaggatattaatg

SEQ ID NO: 528 - DNA, 1215 bp, unidentified
  misc_feature 1..1215: note = Ga0247608_10002393 JGI
  source 1..1215: mol_type = other DNA
atggtgagacgtatgctcaagtccggaaatgccgttgtagtttgtcttgagccgttcaccatacggctgtgctatgaaacgactggatacatccagccgtgtactctcggaatagacccaggtgcaaagcacgtgggtataagcgttactacagagaagaaagaactgttaaaagtacaagtagatttaaggacagacatcaaaaaacgacttgatgagagaagagaatacaggaatatgagacgatatctgctgagatatcgtcaagcaagattcaacaacagagtttctgtaaagaaagagggatggattccgccgtcactgatgagcaggaattctgctcatctcagaatactcaaatttatttccaagatagttccgtttgactgcatcagatttgaatactgtccgtttgatacaagacagatgagagaccctgatgtacagggttctgactatcaacattcagaaaaagaagactttgataacacaaagtctttcgtgaagcacagagatggtttcaagtgtcaggtgtgtcacggaaagtctggtgataccagacttgaagtccatcatcttactccagtgtcaaaaggaggcagcaatcatccggataatctggctacagtgtgtcacaaatgtcacactgagatacatcaggataaagtcaagttgaagatcaccaagaaaacattacagaaaaagaatgtaaaattgcttagggatgctgctgtaatgaatgtcattaaagacattcttgtcaagatgataagacaggaattcccagatagggaattccatatcacatacggttacaagacagcaagactgagaagagaacacaacattgacaagtcacactgctttgatgcatatgtcatagcaaggaatcttgaagcagaatcagcaaatactatgtactacggaagagtcttccgtaggcataacagacagaaattcaaggcaaacagaatcaagcacggaattctgaagaagtcaaagacagaatacaagttgttcggattctgtctgtgggacagaatcctttatgacaaccaaatatgttatattggaggaagaagagattctggatacttcaagataacttccattgatgggaagttaatcaaagacggagttaattattcaagattaaaatatacaagtcattccaaaggactgacttttgagaaaataaaatataataacaattaa

SEQ ID NO: 529 - DNA, 332 bp, unidentified
  misc_feature 1..332: note = Ga0247608_10002393 JGI
  source 1..332: mol_type = other DNA
gtcaatgaccggctggtctcgtcactggtgtgacagaggaccagcggcttgtttagacagcaacgtccggcaagccgacgttgatagagcctgaggccggatatcatccggactatgttactctgaaatacataggcaccaagggatgcatatcccagtcctttgctctgcgcactgtgattaaacagtcctgtccggtagggacagtgttgcagtgatataaaactcagagataacattggtcaggggtaactaacagacagcaatgctgtctgacttacagtgaataactgttataattaaaaaattgaaagaaacaaatacagatggta

SEQ ID NO: 530 - DNA, 777 bp, unidentified
  misc_feature 1..777: note = Ga0370498_000133 JGI
  source 1..777: mol_type = other DNA
atgagaaggtcaaggagaagtaggaaaaccccttgtagaaagaataaattaaacagaaaaagaaaaataaattttattccaccatcaacaaaagcgagatggaattctaagttaagactgataaatatattaaaaaagatatatccaatatcaatatatgttgtagaagatataaaagcgaaaacaaaagaagggcaaagaaattggaataagaatttttcaccattagaagttgggaaaacatatttctataatattattaaaacatatggaaatcttattctaaaagaaggacgggaaacaagtaaaattagggaaaaattaaatttagtaaaaactaaaaataaattaaataaagtattttctgctcataatattgatagttgggtattagctaatttaccatttgatgttcaaacttaccctgataatattgatatgtattattttagacaaattgtattatacagaagacaattacagatgtttcaatttgctaaaggaggaaaaaggaagagatttggagggacagtatctcttggaatacctaagggaacggtagtaaaagcaaaatataaaaagaaagaaatattatgttatatcggtggaaatatgaatggtaaactatctgttcttaatatagagaatggtgaaagaataagtagaagcataaataaaaaagatataaaatatatgggatatatagcgaagtggaaagtagaaagaataaaagggaagaataaagagataacgagcaattcctccatacctgcgtag

SEQ ID NO: 531 - DNA, 475 bp, unidentified
  misc_feature 1..475: note = Ga0370498_000133 JGI
  source 1..475: mol_type = other DNA
gtgtaataaccccttccaagcttttatcttggttgaggcttgttaaagtaaattatgccaaaatctaaacaacaagttaaatcaatgactagagtatccggtcttcctactcgtaagagtaggaagatacaggaaactgaatcatcttctcatggcagggaaaaatatatttccgatgtttctctagttggaaatttctatgataatcagtctcgaagagagcaattaccagagcaatctggacggaaggtaacttccaaatttgttacgaaaatatatattccagtaatttcttgtgctggaattgcattaatgccttgctctcctaggagagcaaaagaattaattaaaaagaataaagcgaagaagcagtttacaaatagtattttctatattaaattacttgaaagagatataggaaatattcaagacatatcatgtggaatagattccggatcaaagagagaagcaataa

SEQ ID NO: 532 - DNA, 1008 bp, unidentified
  misc_feature 1..1008: note = Ga0197142_1009778 JGI
  source 1..1008: mol_type = other DNA
atgtatgttcctgtagttgatcgaaatcaaaaaccccttatgcccaccacaccaagtcgcgccaggcgttggattaagtctggcaaggcgactcctttctggaagaaggggatattctgcgtcagactcaatgttgaaccttctgaccgtcgaactcaaccgattgcggtaggcatcgaccctggcagtaagaaggaaggctggacagtcaagtccaaagctcatacttatctcaaccttcaaaccaacgccgtcacttgggtgaaggagcacgttgagctacgacggcagatgcgtcgtactcgacggtatcgcaaaacaccctgtcgtcagcccagggctaatcgagcgagaggtggtattcctccctctaccaaagctagatggcagtggaaactacgcctagcaaaatggttgagtaaattatttccaatcactacctttgtggtagaagacatcaaggcaaagacgaaaggtaagcggcggtgggatgtctcgttctctcctttggaagtagggaaacagtggttttacgagcaactggctaaactatgccaggtggtaacccgttcaggttgggagaccaaacaaatgcgggatactctaggtctcaggaagacgggtaataaaactgctgaagtcttcgaggctcattgcgtcgattcttgggtgttagccaactctgttgttggtggacatcttcagcctgacaacaaaagactggtgttcgttgtacctctacaatttcatcgtcgccaactccaccgtttgcaacctggcaaacaaggaaaacgcctaccctatgggggaactttaagtctagggttgaaaaggggtagtttagtcaaacaccccgaatacggactcacctttgtaggtggtagctccaagggtaggctgagtttgcatggcctagcagatggaaaaaggttaacgcaaaacgccaaaaaagaagatgtcaagtttttaactttttgttcgtggaggttctatgttagaagcgaataa

SEQ ID NO: 533 - DNA, 267 bp, unidentified
  misc_feature 1..267: note = Ga0197142_1009778 JGI
  source 1..267: mol_type = other DNA
gtcaagtacccccagctttagctgggggcttgtgggattagagcctagccagctggaaaccacaggggcaaggaaagactagcctgcccaagcaacctaccttcgagtagggggcgtttgaagggaactgaaccagctggacgtggcagtccgaaagacgtagcgaatgcctccctagtttgctacctctctgctggtcagtggcgttagcgaagcgagccgcaaggcttagggaagtatacactccactaggagacttactctcat

SEQ ID NO: 534 - DNA, 699 bp, unidentified
  source 1..699: mol_type = other DNA; note = Human gut metagenome
atgccaaacaaagtgtatgtcatcaacaaacacgggcgtccgctgatgccctgctccccggcaaaagcccgtcatctgctggatgaagggaaagccaaaataaagaagaggacgccctttaccatccagctggtctacggaagcagcggctacacccaagaagtcattttgggcgtggacgctggaagtaagaccatcggaatgtccacatccacaaagaaggaagaagttcggctccatgtccatcatctggagagcaggaaggtaggcggcgacgccccggacaaccaagttaccctttgcgagagctgtcacgagaaactccacaaggggttgattacggcgaaggacttcaaaaagcgtaagcgtcgttccacacgggatgccacattcatgggcatcatgcggaagactttaatgcagaggctctgctctgagttgcctatccccgtcattgagaccaggggctacatcacaaaggcgacccgagagaagctgctggtgcttcccaagagccacaccaatgacgctctggcaatcgcacaggggaagcagggcttcaatgtgggctacctaccgggaatcgtacaaattaataagatttatacgatttgccccgtaaggcatcacaaccgccagctgcacaaggcgactatcctcaagggaggcatccgtaaatccaatcaagcagaaaagtac

SEQ ID NO: 535 - DNA, 310 bp, unidentified
  source 1..310: mol_type = other DNA; note = Human gut metagenome
gtcaataacccccaccaaatctaacgatttggagggggcttgcgagaaatcgtaagccctgattgactaccctaagtgtttcgagcactacgttactcaagaatgtaagaataggcaccggcgggcgtgaatccgaacctgccgcactgcggtgtgtgattaaaagctctgagggtaaggagcggtgttgcacacgaaaaccttgagataacattgggtacggatacctgacggccgaaaggccgcgtggctttttcgttagccacaatcaaagaagaaggaggaggaggaaggcatcatgccaaacaaa

SEQ ID NO: 536 - DNA, 1197 bp, unidentified
  misc_feature 1..1197: note = Ga0307988_1006404 JGI
  source 1..1197: mol_type = other DNA
gtgaaagtctatgttttaacaaaaaacaaaaaatcattgatgcccacaacttgctctaaagcaagaatattaattaaaaaaggcaaagctagggttcataagagacaaccttttacaattcagcttttaaatagagtagctggagaggttgaacatgttaatctaggtattgacagcggagcaaataatattggtttttccgcagtatcaggaagagaagagttaatttcaggaacagttatacttgatgtgatgatgaaatcaagacttgatgacaggcgaatgtaccgaagaaacaggaggaaccgcctctggtacagaaaaccgagatttgataacagaaaacgcgctgacgactggttgccgcccagtattaaaaggcgataccagtcacatctgactattatcaataaaattaagtcactattacctgttaagtatatttgtatagaagtaggtaattttgatatacaagctattaaaaaaccgggaataagtagtacaggttatcaacagggcgataggtatggttatgcaaatctaaagtcttatataatagccagagaaaaaagtcattgtcagttgtgcggtaagagtgttataggaacaaagattaatctacatcacataatatcaagatgtaaaggcggaacgaataaagctgataatttggcactgttacatgtaaaatgtcataaaagaatacataaaaaaggtcttggaaaaaccttaaagagaaataaacagtaccgggaatctacatttatgaatataattaaatggaaatttaagcaggatttagtttgcactttaacttttggatttaaaacattctgcaaaagaacagagctaaatatcccaaaaacgcataacaatgacgcatttgttattgccggcggtacagaacaagcgagattgcttcatcttgaagttatacagaaacgaaagaataaccgctcgctacagaaaaacaggaaaggctttgctccggcaatacgcaggcaaaggtattcaatacagccgaaagatctggtaaggatcaaaagcaaatggctaattaccaacggttgtcactgtaaaggaacaagaatattagttaataaaagatcaattaacattaaacaagtggaaagcgttttcaacgtaggaacattaggagggtggcaattcctccccttgttaaaaagttataactag

SEQ ID NO: 537 - DNA, 243 bp, unidentified
  misc_feature 1..243: note = Ga0307988_1006404 JGI
  source 1..243: mol_type = other DNA
gtcagttaccccatagctaaagctagggggcttatccgcaaggatatctaattagctgattaggaggtagaaatacagaagttaaaaaaggtgaaatacatacacaccaacaattacctccctagattgttgcaactgtgaactgtaattaaacaaagttcaaagacttagtgttgcagttttaaaaactttttttaacagctccgaagggaattaaccacgaaagtgaggtgacttgtgaaa

SEQ ID NO: 538 - DNA, 762 bp, unidentified
  source 1..762: mol_type = other DNA; note = Bioreactor metagenome
atggtatttgtattagatgcaaataaaaagtcattatcgccttgccatgaagcagttgcaagaaaattgcttaagcaaggtaaggctgcaatatttagaagatacccatttacaataatccttaaaaaagtagtagaagacactaaaaacaagcaagaatatagattaaaaattgattatggtagtaagcatacaggattagctatactacaaaataataatgtaatatggctagggcaaatagaccatagaacagatattaaaaagaagcttgatgaaagacgtatgtttagacgtagtagaagaaacagaaaaataagatatagaaaaccaagatttttaaatagaaaaagaaaagaaggatggatgtcaccaagtttagaaagtaggattaataatataaaaacatgggttaataggttacaaaaattaattccattaactcacatatcttatgaaaatgttaaatttgatactcaattaatgcaaaatcctgaaataagtggtattgagtatcaacaaggtacacttcaagggtatgaaattagagaatatttacttgaaaagtttggtagaaaatgttgttattgtggaaaagaaaacattccattagaaatagaacatataataccaaaatcaaggggtggaacaaacagaattgataatctctgtttagcttgtcatgagtgtaaccagaagaaaggtaatatgacagcagaagaatttggttatccagaggtacaaagacaagttaaagaaaca

SEQ ID NO: 539 - DNA, 241 bp, unidentified
  source 1..241: mol_type = other DNA; note = Bioreactor metagenome
gtcaactacccaacgactaaagtcgtggacttgatagccctatgttgaccaggttaaggtttgaaacagaacctacgttatctatgtcatgacaccctaggatgccctcctagttctaggctctgtcgtacaacattaaacaggtgtagtgggttaagccagtgtgttgtacatgtaagcatagataacattgccgagggagatgttacctgcgtaagcagagaaaggagaaaatcctatg

SEQ ID NO: 540 - DNA, 1329 bp, unidentified
  misc_feature 1..1329: note = Ga0070738_10015183 JGI
  source 1..1329: mol_type = other DNA
ttgagcaacgtctttgttcttgatacccacaagcagccgctggccccggttcatcctgggcaggcccgcctgctcttaaaacaggggaaggccgcggtcttcaagccttacccattcaccctgattttgaagcgagccatccccaccgaagaggtccacgcccccccgctgcggatcaaaatcgatcccggcagcaaaactaccggccttgcgctcgtggatgaccacagcggcgtggtcgtctttgttgccgagctgtcccaccgggggcagcagatcaaaaaaagcctcgacacccgaagaggagcccggcggggacgccgccaccgcaccactcgctaccgtgctccccgctggcgcaatcgcaggcgagagccgggctggttgcccccctcgctcgtgagccgcatccgcaatgtggtcacctgggtcgagcgtttgtgccgcctggctcccatccgagcgatcagcctggagctggtccggttcgacctgcacgccatggagaacccggccatcagcggtctggagtaccagcaaggcactctggcaggctacgagatccgcgaatacttgctggagaagtggcagcggacctgtgcctattgtgggaaagagggcgttccgttccaggtggaacatatcgtgccccgtgcaaaggggggcagcaaccgcgtgagcaacttggtgctcgcgtgcgaaccctgcaacacgaagaaaggcacgtgtgatatcaccgagttcctcaagaagaagcccgaggtgttgaaacgcatccagggacaggcgaaggcccccctcaaggatgcagcggccgtcaatgctacccggttcgcgcttctggagcaggtcaagcaactcggattgccggtggagtgtggcagcggggggcgcacgaagttcaaccggacccaacggggcttgcccaaaacgcactggggagatgcggcctgtgtgggagccagtacgccagagcggttgcaggtcagaggggtccgccccttgttgatcgaggcgtgtggccatgggtgtcgacgggtgcgcaatgtcactgccattggcttgccccgctcagcgcccaaaggcccaaaacacgtgcagggcttccagaccggcgatatcgcccgcgccattgtcaccaccggtgccaagcaggggatctatgagggtcgggtgctggtccgggccagcagatcatttgatctgctgacgaagcatggacggattgctgggctcaatgcgcgcttttttcgccatctgcaccgctcggatggctatcgctacacccaaggagacgtctatgcaacccctgcccaatccacccgataa

SEQ ID NO: 541 - DNA, 278 bp, unidentified
  misc_feature 1..278: note = Ga0070738_10015183 JGI
  source 1..278: mol_type = other DNA
gtcatggaccccggtttgaaaaccggggcttggagcaatccgagcgattgaagcaagccccgccctattccgaccgcaacatgagcagacttggcccgaaagggctccgttgggggcgaatacaccaataggtaccggtgggtgcgcggccagcccaccgctctacggccaggggttaaacagatcgagggtacggtcagtgcctctggcaaacaaaccgcttccaacattgtcgaggccaccattacccttgaaagaggaggctcagtttgagcaac

SEQ ID NO: 542 - DNA, 1293 bp, unidentified
  source 1..1293: mol_type = other DNA; note = Human gut metagenome
atgccaaaggtctatgttctcaaccggcacgggcgtccgctgatgccatgctccccagcaaaagcccgtcatcttctggatgcgggcaaggcaaaagtgagacgcagaacaccgtttaccattcaactgctctacggcagtaccggctatgcgcaggaggtcatcctcggtgtggacgccggcagcaaaaccatcggactttcggcttccaccgaaacggaggaactgttctccgcagaggtcaagccgcgcaacgatgtggtcgagctgatgtccgtacgcaggcagttccgccgtgcgcggcgcaatcgcaccacccggtatcgtaagccacgcttcgacaaccgcgtgcggagcaagcataaaggctggctcgcaccttccgtggaagtaaaaatccaagatcatatcaccgccatccggcgcgtctgtggtatcctgcccgtcagcaaagtggtcgtagagaccgccgagttcgacttgcagctcctcaaggccgttgcggaagggaagcctgttccgcagggcgaggactaccagcatggggagatgtatggtcactacaacgtgcgccagtatgttttgtggcgcgatggctatacctgccaatgctgcggagcgcacgcgacccagaagaaagaggtgcggctccatgtgcatcatttggaaagccggaaggtaggcggcgacgccccggacaaccaagttaccctttgcgagagctgtcacaagaagctccacaggggattgattgaggcgaagaacttcaagaagcgcaagcgtcgtcccacacgggatgccacattcatgggcatcatgcgggcaacgttgctgcaaaggcttcgttccgagttgcctatccccgtcattgaaaccagaggctacatcacaaaagcaaccagagaaaagctgctggttctgcctaaaagccacaccaatgatgctctggcaatcacgcaggggaagcatggcttcaatgtgggctacctcccaggaatcgtacaaagcgataagacttacacgattcgccccgtgcgacaccataaccggcaactgcacaaagcgactatcctcacgggaggcatccgcaaagccaaccaagcggaaaagtacgtctgtggcttccgtctatacgacaaggtgctctacaacggtatcgagtgttttgtttggggcaggcggaccagcggctcttttctacttcgagcgttagacggaacaaaggtcaaagatggtgctggacacagaatcctcactttgctcgaacgaagcagcaattatctcattgcttaa

SEQ ID NO: 543 - DNA, 307 bp, unidentified
  source 1..307: mol_type = other DNA; note = Human gut metagenome
gtcaagaacccaccacttaaactctgacgagttttgaagtgggggcttgtggtgtaaaccgcaagccagattgactaccctaagtgtttcgagcactacgttactcaagaatgtaagaataggcaccggcgggcgtgaatccgaacctgccgcactgcggtgtgtgattaaaagctctgagggtaaggagcggtgttgcacacgaaaaccttgagataacattgggtacggatacctgacagccgaaaggctgagcggcttatttttagccgcacccaaagaaaggaggcatcaacgtatgccaaag

SEQ ID NO: 544 - DNA, 1161 bp, unidentified
  misc_feature 1..1161: note = Ga0071116_1002195 JGI
  source 1..1161: mol_type = other DNA
atgccatgttcacccgctaaagggaaaaaattcttaagagaaggcaaagcaaaagtagtaaggagaactccctttacaattcaacttactattgcaacaggagagacaaaacaggatgttactctgggaatagatagcgggtatcttcatattggattatcagcaatcacagagaaaaaagaattattttcaggttctgttatattaaggaaagatatagttaaattgaattcagaaagaaggagttatagaagatgtagaagaaacagaaaaacctggtacagaccggtaaggtttctaaacagaaagaaagaagaagggtggttagctccttcattacaacacaaagagaatagccataaaagaattatagaaaaacttgaaaacatattacctgttaatgatatagtcatagaagtagcaaattttgatatacagaaaattaagaaccctgaaatagaaggggtagaatatcaaaatggagaacagaaaggtttctggaatgaacgagagtatgtcttatatagagacggccatacctgccagcattgcaggggaaaatctaaagataagatacttgaaactcatcatttagaaagcagacaaacaggaggtaatagacctgataatttaataactctctgtaaaacctgtcacagtaaggtatcagccgggaaaattactctcacagttaaaccctctaaaggttacagagaggcaggatttatgacgaccataagatggaaattactctcctctctaaaagaaagagaaaggaaactttcatatacttatggttatattacaaaaaagaagagaatagaactggcacttccaaaatcacatattaatgatgcttttgttatagcaggaggaaaagaacagagtagaagtaagtcttattctataatacaacacaggcgacataacaggtcattacaaacaaacaggtcaggttttaaaccttctattagaaagaaaaaatatccttaccagcctggagacacagtaagactgacaggtaaaatctggactattaaaggtgtttttaattatggaaactgggttagattaaaaaatagaaccggaacgattagaaatgtggcaactaagaaaatagaactgattaaatatggtggaggattttcttttgaatattaa

SEQ ID NO: 545 - DNA, 322 bp, unidentified
  misc_feature 1..322: note = Ga0071116_1002195 JGI
  source 1..322: mol_type = other DNA
gtcaatgaccccgcccacaaggggacagggcttgcggtgcaacccgtaagttatcacattgcttagaggcttaaggaataatgttctttatgcagcagttattcaggagagatacatacacacctgcggatatctctcacgtccagtcagctctgtggttttaagttaaacagtcctgtggggtagggacagtgcttaaagcttaaaaaccctgaataacacctcgatgggatccaaccggttttaaaaggttccggaatagaacttgagagtatctattggcaaaatcttttagtaaggagtaatcaagttgtatagcttt

SEQ ID NO: 546 - DNA, 1326 bp, unidentified
  source 1..1326: mol_type = other DNA; note = Human gut metagenome
atgtcagtttctgtttttgttctggacaggaagcaccggcctctgatgccgtgccgacccgctcgggcgcgaaggctcctgaaatcgggccgagcccgcgtcgtcaagcgcttcccgttcacgatccgcttggtggatcggctgatcgagaactctgacgttcagcccgtcctcgtcaagttcgatccgggctcacgcgagaccggcatcgccgttgttcgagccgacgggaagaggcgccaccatgcgctgttcttcattgacctcgttcatcgcggatcggtcatccgggaatgcctgagcgctcgttgtgcctttggccgtcggcggcgcagcaatctgcgctatcgagccccacggtttctcaatcgcaccaagccgcagggttggccggcaccgtcgcttcgacaccgcgtggatgccgtagccgcatgggcggccaagctcatccgtctcgtccccgcaacgggattgatggaagagctcgtcaagttcgacgcgcagaagctgcagaatccggaaatttcgggcgccgagtatcagcaagggacgctcttcgagtatgaggtgcgtgaatacctactggaaaaattcggcaggaaatgcgtctactgctcagccgagaacgtgccgctcaacatcgagcacgttgtgccgaaggcacgaggcggatccaaccgcctctcgaacctcgcgctcgcctgcgtggcctgcaaccaaaagaagggggcgcagcccgttgaagttttcctcaaagaccgccctgaggtgcttgagcgcctcaagcagcaatgcaggcgttctctctcggacgcggcggcggtcaacgcaacccgctggtcgcttctcaatgcgctcaagacgttcgggctccctgtgcagacgggttccggcgcattgacgaaattcaatcgaagttccttgggcattgccaaagaacattggctcgatgcgctctgcgcgggtcgaatcaacgcagcgcactatcccaagagcatgggcgtccttgaattccgatgcaccggtcgggggagctatcaacgtacgaggctcaccaagcacgggttcccgcgcggctttctgatgcgccaaaaacgcgttcacggcttcgccacgggcgacatggtcaaggccatcgtcccatcagggaagaaggccggcgtctatcggggccgcgtggccgttcgtgcgtcgggcagcttcaacattcagacgcccggaggcgtcattcaaggcattagttggcgtcactgtcaactgctttcctacaacgacggatacgggtatgcgtggctgcgccgcgcacctcattcctcccccgtctga

SEQ ID NO: 547 - DNA, 288 bp, unidentified
  source 1..288: mol_type = other DNA; note = Human gut metagenome
gtcaaccacccctccttaaaaggagaggcttgagccatcaagccggttgaccagcctcagtgatccgaaaggagaactacgttgtcgtcaggtgacaagacccgccccggggggcttcctcagctccgagctccggaaacggcagaagcagacaagctttgggtatgcacgaaacggtctgccgttgcaatgccggacggcaacattggcgaggggaattcaactttgttgatgtcacgggggcaaccccgattcgaaccgtaaggtttcaacaccatgtcagtttct

SEQ ID NO: 548 - DNA, 903 bp, unidentified
  misc_feature 1..903: note = Ga0116164_10013910 JGI
  source 1..903: mol_type = other DNA
atggtatttgtgttgaataaagacaaagagccggttatgccgtgttctgaaaaaaaggcaaggaagttgttagaaaagaaaaaagctgtgatacatcgtctgtacccgatggttattcgtttgaaagaacaaaaagactacgaagtgaggggattgaggttgaaacttgaccccggagcaaagagaactggcttcgcggtgttgcatgaaaaatcagagcatgaagcggatgctatacttttaggtgagattatacataaagtttacgctcccgcaaaaggtaaaaaagatggtaaaccgcatatatatcatggtggcgcagctgcgttgtataaaagaagaatgttcaggataggcaggcgaagcagaaaaacaagatacagaccggcgagatggttaaacagaaaagcatcaagaaagaaagggttaccgccctcttttgaatcaagaataaaccagactgttcatgcggtagagaagttgatgaaatggttgccgattgcggctatatcagttgaacacgtcaagtttgatatgcagaaaatgagagatgcggatattgagggtgttggttaccaacaaggtacacttgcagggtatgaaatcagagagtatttactcgaaaagtttgggagaaaatgcgcttattgcggtgcggaaaacatcccgcttgaaattgagcatattgtgccgaagagtagaggtggcacaaacaggattgataatcttgctatcgcttgccgtaagtgtaatgaagataaaggaaacaagctgccggacgagtggttagctgagttaaaaacaagcagtagaaaatcagacaagctgcgcgcaaaaaactttgagaaggcgaaaagagatgttaaaaagactttgaaagacgcggcatttgtgaactcaact

SEQ ID NO: 549 - DNA, 313 bp, unidentified
  misc_feature 1..313: note = Ga0116164_10013910 JGI
  source 1..313: mol_type = other DNA
actgttgaaaagaaaagaagtaatggttcagactcgcgcgtgcgcgttacctttagtatttcaatactaaactgaaccagactaagttctacgagaactacgttatttgggttacgataccttcaggtgcttctccagccggaagctctatcatcgtacattaaacagagttaagggtaaagcgaaatctcagtgtgtgcgaagcaatcaagcctttataacattgtcgaggagagaggatttaatcccgttacaagccgcgtgagcggaaaccctacggggttattttaaataccaaaggaggaaaaaaatg

SEQ ID NO: 550 - DNA, 813 bp, unidentified
  misc_feature 1..813: note = Ga0074478_1419092 JGI
  source 1..813: mol_type = other DNA
atgttagtgttagttttaaacaataatggcaaaaatctaatgccatgcagtccacgaaaagcaagacttttattaaaattaggtaaagcaaaagttaaattcagaaaaccttttactatccagcttatttatggttcagcaggatataaacaaccaatttatttaggaatagataaaggttttaaatttacaggaattagctatattataaaagacaaaataattttatcagctcaaataaaccatcggattgatgtatctgataaaatgattacaagaagtcaaaatagaaaacagagacgtagtaggctttgctatagaaaaccaagatttaataacagagcatcaagtaaaagaaaaaatagattatcgccatcagtaaaaacaaatatagaagaaatcttaaggataattaatagaatcaaacttcctacaactcatattgctatagaagatgtgcaggttgatattgcaagattaaataatcctgacttaacaggaaaagattatcaaaaatcaaacagattgaatgaaaatcttagaattgcatgtctaatgagagataattatcaatgtaatgtctgtaaaaagaaaaatttaagattagaagtccaccacattattccaagaaaagaagagggaaaagactcaataaccaatttaatagcattatgttcatcttgtcattcaaaagttcacgacaataagattaaattagatattgatggtgtaagcggttttaaagataagatttcacagcaggcaatgcaaggcaaatcttatttatatgcagaattaagtaaaattggataa

SEQ ID NO: 551 - DNA, 251 bp, unidentified
  misc_feature 1..251: note = Ga0074478_1419092 JGI
  source 1..251: mol_type = other DNA
ctcaatctgatagttgctaagtctataaaatatatttattttttatagatatgtaactaacagagggcttagaaataagcaaaagttgtttaagctatcttacctttagatgttattccagtctgaagctctaaggttcataattaagggtaagcgaaagccgaaagtgttatgaacgtaaaaaacttttacaacagcctcaaggaatatctaactcttatttataggagaaacactttatgttagtgtta

SEQ ID NO: 552 - DNA, 411 bp, unidentified
  misc_feature 1..411: note = Ga0400266_0006374 JGI
  source 1..411: mol_type = other DNA
atggtgcgtgcgtatccgtttacgatccggctgaaaggccgtgccgatggcatcacacagccggtccgtatcaagatcgatcccggcagcacgaccaccgggatcgcagtggttcgagaaaacggccagaagcaacacgttctggccttgatggaattagcccatcgcggccgcacgaaattcaatcggcagagactgggcattccaaagactcacgcgctggacgcggcttgcgtcggagaagtcgagatcgtagagggttgggacgctccaaccctagcgatcaaagctaccatccagggaatatcccatcgccactgtgttttaacccagcgagcagatagctacggctatcacatccaacccaaccaacgaaaggaggagggagacagggaaaacgagtcgcgctga

SEQ ID NO: 553 - DNA, 295 bp, unidentified
  misc_feature 1..295: note = Ga0400266_0006374 JGI
  source 1..295: mol_type = other DNA
gtcaactaccccgccctaaaggacggagcttgtagagaacaccctacaagccaggttgaccagggaaagcggacacccacccgctacgtttgccacaggtcgttaagacccactgcggtgtgcttcctcagcaccggacactggaaaactggaatcacgctggcaaaaggcaaagcgccgaaggtttcagttgccgcgcaagcgggagccggtggtagacattcccgaggggagagaggcttcggcctccgtcacaaggcccgtaagggcattcattgaaaggaaagtaatgtcg

SEQ ID NO: 554 - DNA, 1383 bp, unidentified
  source 1..1383: mol_type = other DNA
atgcagaagttatcagtaaagttaaagaacgcaccaggggatgctccacaagttccctgctctgtaagtgatggtttaaacagagaggaaactctcagtgatcgtcgcaaagtactgtctgataacagctccgaagtggatcaactctctggcaagagagaacaggacttgagagtccctgttataaacatgcgtggagaagcattaatgcctactacccctgggatggcacgaagaatgttggtttctggcaaggcaaaggttgttaagagagcaccattcgttatccaaatgacaaaagctactggcgaaaacaaacagtctgttacttgcgggattgatatgggttatgggaagattggttattcttgtgttacagataagtctgaattgtttgccggtgaggtagaggtggacaacagaacagctaaaaggatggaaaagagaagaaagtataggagaaatcgtagaagtaggatgtggcatcgtgaacctcgttttaacaatcgtaagaaagacaaaggatggttgccaccatcaacccaaagaagggttgatacacacattaggttagttgagaaactgtcgcagtggttgccgataacgaaggtgagagtagaagttgccaaatttgatattcagaagattaagaaccccaacattgaaggagtagaatatcaacagggaagtatgtatggttaccaaaacaccaaagaatacattctattcagagaaaaaggtaaatgtcaactgtgctctaatggttggaagaaaacagataggtgggaactccaccacattatttcgagaaatgaggggggaacagacaagaccgacaacttagcactattacataaaaaatgccacgaaaagttacataaaaaaggattaaaactaaaaccgaacagacaatataaagcagagacgtttatgtcaatagcgaggtggaaaatagttgatggattaagggaaaaattttacaccgaacacacttatggttataaaacaaaagttaagagaaacaggttaaatttggaaaaatctcacagaaacgatgcctttgttatagcaggcggaaatgggcaagtaagatgtaaagaattacatatcgttcaaaagcacaggaataatagatctttgggatatcagagaaaggggttcgcaccatcatcaagaaaacaaagatacaagatacagcccaaagatttagtgaagattaatggagaatggaaagaagcaaaagggatacattgtaaaggagaacgtgttatggtagaaggaaaatcggttaatggtaagaatatagaggaaatatacaattttggaagtttccaattcctctccacatctaaagaggggagtttacttggaggtaacagatga

SEQ ID NO: 555 - DNA, 251 bp, unidentified
  source 1..251: mol_type = other DNA
gtcaatcaccccatgactaaagtcaggggcttgagccgtgaggcttgagggcaattggttgattaggaggcaataaatgcagaagttatcagtaaagttaaagaacgcaccaggggatgctccacaagttccctgctctgtaagtgatggtttaaacagagaggaaactctcagtgatcgtcgcaaagtactgtctgataacagctccgaagtggatcaactctctggcaagagagaacaggacttgagag

SEQ ID NO: 556 - DNA, 849 bp, unidentified
  misc_feature 1..849: note = Ga0265294_10038476 JGI
  source 1..849: mol_type = other DNA
atggtttatgtaattaataaagatgggagtcctttaatgccttgtaaaccagcaatagcaagattattgttaaaagatggtaaagcaaaatgcataagaagaactccatttacaattaaattactatatcatgctacagactatacacaagatttaactttaggaattgatactggtagtagtaaaataggaagtgcggtagcaaatgacgaaaatgaagtgtattatatatcagaagtagaaattagaaatgatatatctgacaaaatggacaaaagagctaaatataggagaactagaaggaataggaaaactagatatagggaacctagatttaataataggaaaaacagcattaaaaaagatagattttctcctacaatgacaagtaaaattaattcacacttaaaagaaattgattttgcaaaatcaataattcccattacaaatataataatagaaacagcaacatttgacccacatgctttaaaaaatccagcagtattaagtaataaatggctttatcaaaaaggaactaattatggatttgcgaatactaaagcttatgtattaagtagagataaatatatttgccagtattgcaaagggaaaagtaaagacagcagattagaggtacatcacatagtttttagaaaaaatggtggctcagatgatgcagaaaatttaattacactttgtaaaacttgtcatgatagtttgcacaaaggagaaattaaactaaagaagaatggtaaaattaaaggacaattaaaacacgcaacacagatgaatagtataagacaacaattattaagacagctaccaaatgtaaaagaaacctttggattt

SEQ ID NO: 557 - DNA, 292 bp, unidentified
  misc_feature 1..292: note = Ga0265294_10038476 JGI
  source 1..292: mol_type = other DNA
gtgaactacccccgactaaagtcggaggcttctaaagtctaagttcaccagacttagtatagagaaatttatactacaatagaatagttatgatacctttggttgacgcatcagaccattgctctatcgtatatcattaagtagagttggagggtaaggctcggtgtgatatacatgtaagctattttattattgtcgagatgaggacggattctatatatggtaatagtatatagatacgcataacctgcttttaagcagagtgtttatccgaaaggatttgattttatgg

SEQ ID NO: 558 - DNA, 1278 bp, unidentified
  source 1..1278: mol_type = other DNA; note = Wastewater metagenome
atggctataacttacgttttaaaccaagatggacaaccacttatgccaaccactaggtgtggcaaagtaagacgactattaaactcaggtcaagcgcgtgttgtacgcaaaagacctttcactattcaactaaattatgagcccaaaactaatgttgttaaagacttaacattgggtgttgatgcaggctcaaaaactattggtctttcagtcacttcagaaaatagagaatactatgcttccgaagtcaaactgagagatgatgtttctaaactattagagtctagaagtaactctagatatacacgtagaaaccgtaaaatccgctatcgcaaaccacggtttaacaacagaactaaatccaagccaaaaggttggattgcaccgagcattaaacacaaagttcagacacatgtagatgctgtaaaagacatcatgagctttttaccaataaaacaggtaattgttgagaccgctcagtttgatactcaaaaaatggtaaatcctgagatttcaggagtagagtatcaacaaggtgaactcatgggttatcacatccgagagtacttgttggagaaattcaagagacaatgtgtctattgtaaaaagaagaatattccacttgagattgaacatataattccaaaatcacgaggtggttcaaatagagtaaacaatttaactattgcttgtcgcgaatgtaatcagcgtaaagacaacatgacagccgccgaatttggctttcccaatgttcaaaaacaagcgtctaagggtcttaagcatgcggcacatatgaaccttattcgtaagtcctttttgacgcagttacaagagcttggaattgatgtaaaagaaacctttggatatatcaccaagaaaacacggatagacgccggattagagaaaacacatgcgattgatgctagatgtataacaggcaatgtcaatgtacaaccaattgaagacctatggctcaagaaaaaagtgagacgccataaccgcagcatccacaagatgacgctatataaaggtggagtcaaacgagcaaaacaggcaccatatgaaacgcaaggttatagactttttgaccttgtgtctgttgacggggccttatggtatgttcatgctcgtcgcgttaaagggggtttcactctaaaacgcatgtctgatggaaacagcctgaataaagccccatcaaaaataacctttgttgcgcatcaaccatcttatatacaagaaaaggtgccaaatactggagtaataacattgatgaaataa

SEQ ID NO: 559 - DNA, 309 bp, unidentified
  source 1..309: mol_type = other DNA; note = Wastewater metagenome
tccatcatcaataatcaccacctaaggtagagctttgctattatcataggtggggtttagtgaaacaactaaaccctgattgattagccttagtcttacatagactacgttagacttgaaataggtaccttggggtgttatacctagctccaggctctacggttaagcattaaacaattttgagtggtagaaatagtgtgcttagcgttaaaccaagtcataacattggcgaaggtattttatgggcttcgtgtcccagcttaccgcataaaacacgaaaatcacagaaaggcacatctagatggctat

SEQ ID NO: 560 - DNA, 1344 bp, unidentified
  misc_feature 1..1344: note = Ga0206225_1000096 JGI
  source 1..1344: mol_type = other DNA
atgagtgtgtttgttttagacaaaaacaaaaagcccctcatgccgtgccatccggcacgcgcaagggatttgcttgcaaaaggaaaagccgccgtatttcggcgtgctccttttacgattattttaatcaaacgagcaaatgggatttgccaagatcttatccttaaatttgatcctggcagtaaaacgacgggagtggctctcgtcgcaaattttgagtgtagcgattgtgtcatttgggcggctcatttaaaacaccggggagccgctataaaaaaaactctggatcaaagaagggcgcttcgcaggggaagaagatcgcgccatacacgctatcgagcttctcgttttgaaaatcgaacgcggccgtccggatggctgccgccatctatccaatcgagggtagatcaagtagctcgcctggggttgcgactctctctcatagcccccgtaacatctgttgctgttgaaacggttcgtttcgatatgcaaaaacttaagaatccggaaatttcaggagcagcctatcaacaaggcactctttttggctatgaggtgcgagaatatctcctcgaaaaatggggaagaaaatgcgcctattgcgaaaaaacggatatccgattggagattgaccacatcgttcccaaaagttccggaggaacaaacgcagtcggaaatctcactatttgctgcagaaattgtaacgaaaaaaaagggaataaggcacttcaagatttcttaaaacagcctgtaaaggttgctcagattctttctagcagcaaaaggactcttaaagacgccgcagccgtaaatgcctcaaggcttgcaataggagaagctctgtccgttcttggcaaaccgatttcttactggagcggagggcaaacgaagcacaatagacagaaacaaggatttcctaaggaacattggctggatgccgcatgcgtaggcgattttgtctcgctgacaattccgcaagaaatttccgtactggaaatgactgcaaagggaagaggctctcgccaaaaatgcttagtcgatcgctttgggtttccaagaagtgctcccaaagcgcaaaaacgagtctttggctttcaaacaggtgatctcgtttctgcaaccgtcccttctggaaaaaagcaaggacattaccgaggatgtgttgctgtaagagcgacaggtaattttaatattcaaactccatgtggagtgattcaaggaattcacgccaaacactgcgtccttacgcagcgtatggatggctattcatacatacatttaaaagaggagcggcacttcctccccggcctaaaggccggagtttccgtgccgtcaagaggatga

SEQ ID NO: 561 - DNA, 278 bp, unidentified
  misc_feature 1..278: note = Ga0206225_1000096 JGI
  source 1..278: mol_type = other DNA
gtcaaccacccctccctaaagggaggagcttgaaaagaaattaacaagctcgaagttgaccagccttaactttagagaaatctaaagctacgttaggagcgaatatataggtaccgtgggatgcttctccagtcccacgctctacggtaagtggttaaacaggcgtacgggttaaaccagtgctgcttacacacaaaccgctccataacattggcgaggagaccattacccgggaaaccggagcgcgggtaaccgcaaaaggtattttttaaatgagt

SEQ ID NO: 562 - DNA, 1281 bp, unidentified
  misc_feature 1..1281: note = Ga0335049_0000303 JGI
  source 1..1281: mol_type = other DNA
atgtcaaaagtgtttgttttagataccaacaaaaaacctctagatcctgttcatcctggacaagctagaaggctattgaatcaaggaaaagcagcaatctttcgtcgctatccttttactatcattctgaaaatggaggttaatagtgatgtaaatccactccggttaaaaatcgaccctggtgcaaaaacaactggattagttgtagttaacgaccaaacaggagaagtaatttgggctgctgaattaacccataggggttttgctattagagaatctttaagcagtcgtcgtcaattaagacgaagccgaagaaaccgcaaaactcggtatcgccaacctcgttttcataatagaaagcgaggacagaaatggttgccacctagcttaatgtcacgaatttacaatatcttgacttgggtgaaaaagctgaaggagattgttcctattatggctatctctcaagagttagtaaggtttgatacccaagctattcagaaccctgaaataagtggaactgaatatcaacaaggggagttagcgggctacgaggttagagagtatcttttagaaaagtttaatcgacaatgtatctattgtggtgttaaagatactagattagagattgaacatttaacccctcgttcaaagggcggtagcaatcgagtttctaatttaggaattgcctgttcaaaatgcaatcagaaaaaagggaacaaagatgttatcgagttccttaaagggaaacaagatttagctaaaaagatattagcaagagcaaaaaaaacgtcttctgatgctgctgctgttaatgtgacaagatgggaattgtttaatcaattaaagcacttgggtttacctgtagaggtaggaagtggtggtttaactaagtttaatcgttgtcgtcagaatcttgataagactcattggcttgatgcagcttgtgtaggaaagtcaacacccaaattaattatcaaaggaattaagcctttattgataattgctacaggtcatggttcgagacaatcttgtagaacggacaaatacggttttccttctagatatgtgcctagaaacaaatttgttaaaggttttcaaacaggagatattgtcaaagcctttgtgacatcaggcaagaaaattggagtatatacagggcgtgtagctgtacgttctagtggtagttttaatatctcaacagctaaaggtctaattcagggaattagtcataaatattgtactcatattcacaaaaaagatggctattcgtatgcaacatag

SEQ ID NO: 563 - DNA, 251 bp, unidentified
  misc_feature 1..251: note = Ga0335049_0000303 JGI
  source 1..251: mol_type = other DNA
gtcaacaacccaccgctaaagcgggggcttgaaaaagctctagttgaccagactaaggtagcaatacctacgttagtggcaagcgttaaagttcttaccttcagatgcgtagctagtctgaagctctaaaactcaaaggttaaacaggtctaaagggttaagccagtgcttttgggatagtaccgaccactaacattgtcgaagctcacatcaccctagaaataggagactccccaagagttatgtcaaaa

SEQ ID NO: 564 - DNA, 1275 bp, Scytonema sp.
  source 1..1275: mol_type = other DNA
atgcaaaattatgttttcgttattgaccaaaacaaacaaccactcaatccagtttctccagcacgagcaagagagttactcacaaaacaaaaagctgctgtatatcgggtttacccgtttgtaatcattctgaaacacgtggttgataacccccagagcaagccattaactatcaagctcgaccccggtagtcgattcacgggtattgcaattttggatcaagacaaggttgtttgggcggcagaactggaacatagaggctggcaaattaagaatgctttagaatcaagacgctctttacgtcgcagccgtcgtaatcgcaaaactcggtatcgccaaccacgtttcaataaccgcaagcgcaaagagggatggcttgctccatcgttgatgcatcgtgtcctgacgattgagacatgggtaaaacggctttgcttgtattctcctatcactcaaatagcgatggagttgattaagttcgatactcaaaaaatgcaaaacccagaaattgatggtgttgagtatcaacaaggggaactcgctggttatgaggtgcgagaatacttgcttgaaaagtggggcaggaagtgcgcttactgtgatcatgctggtgtacccctccaagttgagcatattcaccctagagcaaaaggaggtagcaacagagtcagtaatctaactttgtcatgcgaacgatgtaacaccaaaaaaggaactaagtctataggcgagtttctcaaaaagaatggttctaggttagaaaaaattcaacgacaagccaagcaaccattaaaagatgcagccgcagtcaatgcaactcgttgggaattatttcgcaccttaaaaaacatcctacccaccacaacgggaacgggtggacaaacgaaatataaccgaacaaggcttgaactacccaagcaacattggattgatgcagcttgtgttggagaagttaataatttaaatctgttaacccaacagccactgaagattaaatgtactggttggggaactcgtcaaatgtgcggcactgataagtatgggtttccgacccgtcacagagaacgcaaacaaattcactttggtttcaaaactggcgacattgcaaaagctgttgtcacttttgggaagaaggttggtacatatattggtcgcgtgttatgccgcaagactggcagctttgacattgcaaccattagtggtcgtgttgcaggtattagccacagattttgtatatcaattcacaaaaaggacggctattcgtatggattttag

SEQ ID NO: 565 - DNA, 242 bp, Scytonema sp.
  source 1..242: mol_type = other DNA
tcgttaaatgccaaccccatgcctaaaggcaaggggcttgtcggttgactcacctgaccagactactcgtttagggcaagagttaaagacctacttcaggatgcttgctagtcctgaaccctagaaccgaacgattaaacaggcttacagagaataaaccagtgtcgcgcgtgatagtaccgaccctaaacattgtcgaagcaaactttacccgcaaggagtatgcagtaatgcaaaattat

SEQ ID NO: 566 - DNA, 1458 bp, unidentified
  misc_feature 1..1458: note = Ga0120161_1001269 JGI
  source 1..1458: mol_type = other DNA
gtgccggacggtttccggtgttttcaggaaaggtgcattttgtcggtgttcgttctggatcagaaactgcgccctttgatgccgtgcagggaaaagcgggcgcgcaagctgctcgctgctggccgcgcgcgcattcatcggctgtatccgttctgtattcggatcgttgaccgcgcgcttgaagattccgtgttgcagcctctggtcattaagattgatccaggcagtaaagtcactggcttggcagtttgtcggatatctgaagcagttgacgatgatggtgtcgtcgctcccgtcatgcatatccagttcttgatggaactgttgcatcgcggacagacaatcaaacaatccctacatgcacgcagcagcatgcgtcggcggcggcgtggcaacctgcgttatcgtcaaccgcgctttgataatcggacacgtcaaacagggtggttgccgccctcgctgctccatcgcgtgctgacgatagaaacgtgggtcaatcgcatcagaaacatggcaccgatcacacagatcgcgcaagagttagtgcggttcgatatgcaaaagatgcaaaaccctgaaattgccggtatcgaataccagcaaggcacgctcgcaggctacgagctgcgcgaatacctgcttgaaaagtggaaccgtgagtgttcttattgcggtgcaaaggaccttcctttgcagatggaacatatcgttgctaaagcgaatggcggtagcaaccgtgcctcgaatttgtgcctgggctgtgaatcttgcaaccagaagaagggcgcaaaggatatccgcgccttcctcaaaaatgacccgattcgattggcgcaaattttgaaacatgcaaagatgtccctacgcgatgcggctgcagttaacgccacccggaacgctctactgaaagtattgaaggcaactgacttgccggttgaaaccggcactggtggccgcacgaaatggaatcgcagtcggcttggcatcgtcaaaacccatgctcttgacgcagcttgtgtgggtgttgttgccgatgtagttagcatcaatgcgcctgcattacaaattacgtgcatgggccgcggaacccacagcagaactcttttagaccagtatggtttcccgcgcactacgctgccccgaacaaaaactttctttggcttcaagactggcgatatgatcactgctgaagtcaccaaaggcaaaagaattggctcccataaaggccgcgtcgcggtacggtcctctggatacttcaacatccagtctggtatcaaaggcatgaaagcagttcaaggcattcctcataaggattgccgtatcgcgcaacgcgccgatggatataactatttgtggaagtcggtttctgaccaaccaaaggcaaaggcatcgactgctgtgcagtcggctccttgcctcaccgccctgaaggacggtgtatctcggagcatattctga

SEQ ID NO: 567 - DNA, 397 bp, unidentified
  misc_feature 1..397: note = Ga0120161_1001269 JGI
  source 1..397: mol_type = other DNA
gtcaactaccccgccctaaaaagacggagcttgaaaggcgaaagcctcgatagttcaggttgaccagggttagtgataatcggcgcaagctgatgttcactccgttgtaagtaggtacaaaaccaacgccgggacgcttcaccaatcccggatagaagtgcgaaagcatttcggttgaagttgcgatcgcagacaagcgacagggcaaggcacgaaacggatcgcaaccgggtagcaaagcaccgctgcttaaaaccggcttacaacattcccgaggtgagcggtattgtcaatctatcggcggtacccgtcactaggcgcgtaagcgcattgcgccgtgaggcgtcttgccgtgccggacggtttccggtgttttcaggaaaggtgcattttgtcg

SEQ ID NO: 568 - DNA, 1275 bp, Cyanothece sp.
  source 1..1275: mol_type = other DNA; strain = PCC 7822
atgtcaaattttgtatttgttctagatgcgaagaaaaaccctcttagtccctgtcatccatcagtagctagaaaacttctcaagcagggcaaagctgcggttttaaggcgttatccttttactataattttgaaaaaagaatgccaaaaacccacagaaactatcaaactaaagctagaccctggaagcaagacgactgggattgcattagttcaacaagacaagcttatttggggagcagaattaattcacagaggacaacagattaaagataatttgttaactcgaagacaaattcgtcgtagccgtagaaaccgaaaaacccgatatcggcaagcgcgatttctaaatcgtactcgacttaaaggttggcttcctcccagtctccgacatcgtgtagaaacgaccatgacctgggtaaaacgtatttgcaaatttgttcatgttactaatatttcggtagaacttgttaaatttgatactcaagctttagataaccccgaaatatcaggtaaagaataccaacaaggagaactttttggatatgagattcgagaatatttacttgaaaaatgggggagacgatgcgtttactgtggtattaaagatgtaccgttagaagttgaacatattctagcaaaatcaaaaggaggatcagacagatgttcaaatttaactatttcttgtagaatttgtaatcaattgaaagggaatcaagatattaaagatttcttatctaaccaacctagtttactagaaaagattctaaaacaatctaagcaatcccttaagaatgtcgctgctgttaacacaactcgttgggcattatttaacaagctgaaagaaacaggattatcaattgaaacaggaacaggaggtagaactaaatataacagatgtagattaaatctagaaaaaagacattttatagatgcgggatgtgtcggaaatcttgaaagcttaaaactattaacaaggcaaccattgttaattaaagcgacaggacacggaaatagacagatgtgcggaatcaataaatacggttttcctattcgacatcggtctagaaacaaattttacaaaggatttcaaactggagctcaagtaaaagcagtagttacaaaaggaaaaaaagttggtgtttatttaggtcgagttttatgtcgagcttcgggccgcttcgacatagcatcccatcaaggcagaacaacaggaattacctataaattttgcacagctattcaaaaaaaagatggatataactatgagttttaa

SEQ ID NO: 569 - DNA, 266 bp, Cyanothece sp.
  source 1..266: mol_type = other DNA; strain = PCC 7822
gtcagcaccccgcattgaaattgcggggctaggctacgcctcgctgcgcgtccatgcccccagtttcagttagttgaccagcctaagtcttaaatgactacgtttttcaggtcataatacctacaaatacgttgctagtttgtagctctattgttaacaattaaacagttttacgaggggtaagacagtgttgttaacccaacaagccttaaaaacattggcgaagcgaactttacccgaaaggagagacagaaatgtcaaatttt

SEQ ID NO: 570 - DNA, 789 bp, unidentified
  misc_feature 1..789: note = Ga0193910_10667 JGI
  source 1..789: mol_type = other DNA
atgaaagtctatgtcattaacaaagacggtcgtcaattaatgccttgccgtcccgcaaaggcaagaaagctactgcgtgatgaaaaggccaagtcagtgaaacgactaccgtttacgattcaactgaaatgggactgcgaagagaatattcagaaaataaccgttggcattgataaaggtagccatacgacgggttattgtgccatagccaatggtgaaatcttaatgtcaggctatatcaaccatagaacagatgttaaaaagaagatgcaaggacgtgctgctaatcgcagacaaagaagatcaaggttgtggtatagaaaggcacggtttgataatcgcgaagccgcaaagcgtgcttttaggttgcccgtctcaatcaaaaccaatgtagaagaggttataagaacgataaacaaattacctttaccgattaaagtggttattatagaagatgtgcaaattgatattgcgaaactgaatgatgccaaactaaatggtaaatattatcaacaatcaaaccgactgcatgaaaatctcagactggtttcgaggtttaagttttttgaagaaaaacttaaacctcgaaagttgattcgagatcatttcacctgccagtattgcaaggcaaagcagacaccacttgaagcacaccacatccattatcgaaaaaatggcggttccgagacgattaaaaatctgataacggtttgttcgaattgtcatgacgggattcatgatggaacaatcacactcaaaaagaaaggggtggatggctttaaagatcag

SEQ ID NO: 571 - DNA, 241 bp, unidentified
  misc_feature 1..241: note = Ga0193910_10667 JGI
  source 1..241: mol_type = other DNA
attataatagttacctaaccaatggtatttaatggtattgtatggaactaacaggcggctaataattagcagaagttagataggttataacacctttaaatgttcaatccagtttgaagccctgttgtttatctttaagggtagtggaaacacgaaagtgagataagcgcaaaaagcctttttaacaacgccaaggattacttcactcttaaccgagggcctaaagccactatttatgaaa

SEQ ID NO: 572 - DNA, 968 bp, Bacillus sp.
  source 1..968: mol_type = other DNA; strain = AFS014408
atgcgtgtatttgtcaagaatgtaagaggagaaccgctcatgccttgcagtaatcgcaaggcacggcttcttctcaaacaaggaaaagcaaaaattgtgaagtacacaccatttacgattcaactcctatatgccaccggtgaaacggtgcaacccgttacaattggcgttgatagcggagcaaagcatatcggtattgcgattactactgcagataaagtgctagcaaaaggaaccacccagctgcgtcaagacgtcaaagaaaatcttatactaagagctacattacgcagaggtagaagacaacgaaaaacaagatatcgagaagtacgttttctcaaccgaaaaaagaaagaaggatggttaccgccatcgattcaaagcagagtggataaccaaattcattggattgaaacatttcgctcgttattaccatctccaaaagtgattgttgaagtaggggaatttgatgcacaaaagctaaaaaaccccaatatacaaggaacagaatatcaacaaggagatacttttggcttttggaatacgagatactacgtatttgcgagagacaactacacctgtcaaatttgtaagaaaaaaggtggtattttgcatacgcatcatatcattgaacgatgcaatggcggttcgaatatggcagataatcttgtaaccgtgcatgatgaatgtcatcaaaaacttcatcaagggaacatcaaacacagtttcaagaaagtcaaacaatataaagaaactgcttttatgaatatattgcggctgcaaatcatgaatcgtttagattgtgacattacgtatggtagctacaccacaccaaagagaaaagaacttggattagccaaaacacatgcaaatgatgccattgcgattaccaatcccatacaactacaagaatacgatcaaagcggtgaattttgcatcaagcaatttagaaagaaaaaacgctccct

SEQ ID NO: 573 - DNA, 265 bp, Bacillus sp.
  source 1..265: mol_type = other DNA; strain = AFS014408
gtcaactacccaccgcttaaacgctaacacgttttgaagtgggggcttgtaaaaagctctggttgtctagcctcagtctttcgtggactccgttcgtaggttgcatacccaagaatgattccctagttcttggctctatggtggctctgtaacagttctgattgggaaggaacggtcaaccacatgccttcttgcatgagaagttgcctacacctacaaacattggcgaagggaaacaaactcttaggagggacaaaacatgcgt

SEQ ID NO: 574 - DNA, 1227 bp, unidentified
  misc_feature 1..1227: note = Ga0315282_10014819 JGI
  source 1..1227: mol_type = other DNA
atgcaaaaggtgactagactaagtccttcgaggcctacgtgtatcgggctacaagaacggcaagatgcctccctagtcttgccctcttcggaagaaccactaaattccacgctcccacaaagggaactaagcctgatgcacattgtcgaagggaaacacgacttggaaaagaccgtaatcggtagagttccagtagtgtcagcagatggaacacctttgatgccctgtaaaccatccaaagcaagaaaactacttgaaaacggaaaagcaacaaaacaatggaacaaactaagcatattctacctgcaactacacttcaaccctaagaaaccgtcaactcaaccattagcattgggcgttgactgtggaagcaagtctgaaggcttttctgtcgtcggcacaaaagacactgtgctaaacatcatgtccaaagcaacaacatgggtcaaaaaagcagttgagcaaagaagacaaatgcgaaagacaagacgcaacagaaaaaccagacgacgtgaatgcaggttcaacaatcggttagcccaccaaaaatatattcccccttcaacaagagcaaggtgggacacgaaattgcgtgtaattcgccagttggagaaaattttgccaattcaaacagtagtcgttgaagacgtcaaagccgtaacccgaaagaacggaaaacgatggaacaacagtttttcgccaatagaagttggcaaacaatacttctatgcccagataaacaaactcgtcgtaaaatcaggtgtagaaacgaaaatgctgcgagagcaatctatgttgaagaaacttgaggataagagcaaacctgtttttgaaacccactgcgttgatgcttgggtgcttgcggcttcagagacgggtgccaagcagcctacaacaagaagcctttattatcttgttccgctgcgttggcacagacgacaattgcacaggttgcagccagagaaaggcggaagaagaaaaccttacggcggaacatgctcgcttggactaaaacgcggaaccttagttaaacatcgaaaacacggtttctgttacgtcggcggaaacctaaacggtaaactcagcctgcacagcgtcaaaacgggtgaacgcctgaccaaatgtgcaaaaaaagaagagtgcaaaatcttgactaaaatttcgtttcgaactcaaacccaatttccccctcctacaagcaggagggtacccttggaggctttttga

SEQ ID NO: 575 - DNA, 338 bp, unidentified
  misc_feature 1..338: note = Ga0315282_10014819 JGI
  source 1..338: mol_type = other DNA
gtgtattccaccggaaactcgaagggcaagagaaatcatgacgagccccattgttgccattgaccaaaacgctagcgtgaaggaagcaacacaaataatggtccaccgaaaaataaagaaactaatcgtggtggaccaaggaaaactagttggcataatcacacacaccgacatcattagcaaaatgccaaacatgatgtccacgctggaagcactgttacgaccgcaaaagacgtattgagctccactgcaaagccttgaaagcatttaagtggctacgcaataacatattaggagcaactgtgaacttgtcaactaccactcaacaagttgagtgg

SEQ ID NO: 576 - DNA, 1392 bp, Chlamydia sp.
  source 1..1392: mol_type = other DNA
atgcagaagttagtcggaagagatacatacacacctacggatactccactagtccgtagcaactgtgatctgtcattaaacagagaggaaactctcagtgtgtcagatttaaaaactccttctaacaaccccgaagtggataactctagcatacaggaggccatagcggcatatgtgtatgtgatttcaaagaatggaaaagctttgatgccttgctctaaggccaaagctagaaaattattaaaggaggaaaaggctctgattgtttgccacaaaccatttactattaaactggttttcaaatgcgaaaatcaagttcaaaaaatcactttaggtattgatccaagatatgaaaatattggtttatcagctatttcagaaaaaggagaattattctcagctgaggcaaaattaagaaacaatatttctaacttattagcaaagaaaaaaagctatcgtagaaatagaagaaacaaactctggtataggaaaccaagatttttaaatagaaaaaaaactaaaaatttacctcccagtttagagcataagctagattcacatcttaggatggtaaaaaaggttctctcttttattcctatttcaaaaatcaatatagaagtagctaattttgacattcaaaagattaaaaatcctcaaatagaaagctttcaatatcaaagaggagatttgtatggatatcaaaatttaaaagcatatcttgtagagcgcgagatggcaaaatgccagctttgctctaaaaaatcaactaaaggcaattcttttaggattcatcacattattccaagaaatgagggaggaacgaacaagactaataacctatcgttgctacatgaaaaatgccatgataagttacactccaaaaatctacttcatattttaaaaaagaataggcagtttaaacctgagacttttatgtcttcaattcgttggaaactagtttctgaattgaaaaaactttgcagcgatactgtcctatcttttggatatataacaaaaattaaaagaaattctctcaagctcgaaaaagaccatcatacggatgcatttgtgattgcgaatggaagctcagaaaaaagagctcaaccttctttgtttttgcaaaaaagaaaaaataatcgctctctacaattaaatagaaagggcttaaaattatcgattagacgacaaagatataagattcagccaaaagatgaagtgcaagtgaaaaacaaaaaatatgcagttataggcatttttaacaaaggtagttggttaagagttagagacaaagctaaaacatttaattttcagatttcgagagttgaaaaacatttttataataacggctggcaattcattcattccctaaaagaaagggttttcttgccataa

SEQ ID NO: 577 - DNA, 258 bp, Chlamydia sp.
  source 1..258: mol_type = other DNA
gtcaatcacctctccctaaaggaagtggcttgaaccgtgaggatcaggggtaactggttgattagggggcaaaaaggaaactttatgcagaagttagtcggaagagatacatacacacctacggatactccactagtccgtagcaactgtgatctgtcattaaacagagaggaaactctcagtgtgtcagatttaaaaactccttctaacaaccccgaagtggataactctagcatacaggaggccatagcggcatat

SEQ ID NO: 578 - DNA, 1647 bp, unidentified
  misc_feature 1..1647: note = Ga0223845_11964739 JGI
  source 1..1647: mol_type = other DNA
atggaatacaaagaatatgtatatgtaattgataaaaatgatatgccgtgcaatccgatcactcatggaaaagccagatatttattaaacaataatatggctgttataaaaaaccatgatccatttgttatcaaacgaactgatgattatttaaggggttttgaggttgataatcattatgtcttaaaaattgacatgggatataagcatattggattttcaataacttctgaatatgatgaggtaatttgtgggcaagttgaattgttggaaggaatgtctaaaagattagcggaaagggcaagatatagaagagggcgcagaaatagactcaggcataggcgtaataagaacatagatattaaaacaattaagaatccaaattacaaaaatggcaatgaagacggctggttcgcaccgtcaataagacataaaatggatactcataccagacttgttgataaattgagggcgtggattcctattgaccgtattgaattagaagtttcaaactttgatattcagcagatgaaagcagatctgaaagattatgagatgcatggtactgattatcaaaatggtgaaatgaaaggatatgataatgtaaaattatatattaaagagcgtgacaaatacacatgccagtgttgtaagaaaaaaacaacatctggggaagtacaccatattattccaagaagttggggtggaagtaatcgcccaggaaatcttatatacctatgtgtagaatgtcactccaaatgtcataggaataataatgataatgacttatttagggatatccaagaaaagagagtcgatggtgattttaaagaagcgactttcatgaatgctgttcgctgggcaatttacgatgctttaggagagcatttcgatgtagatgcatattttggatacgaaacaaatagaaatcgcaatgcagctaatttgccaaaatttcatcacaacgatgcagtgtgtattaattcatttaataatacttctctttcaaaatcattatatatcattaaacaatcaagatgtaataataggtcgatgaaagatttttttgatgcaaaatatattgatagtagaactggcaaagtagcaagcgggaacgatttaaaaaaaatacacaaagagggtaggcttaagagatctactagaaaagaagatataaataatttaagggtttttagacaagaaaaagtcaagtctggaaatgaacgcaattcttgccatagttattgtttaaagcctggcgatttaattaggatcattaaagataataagataatcgaagtaaatactatgcaaaaaaggaataatggttttataattgtatgcgataatccagatgaggatgcaactagcgaacagttaacattctctataaaatcagacgaatacgaaaaattaaaaactacagggaagtgtaatcgcatagagattgttagaacaaggcgtggtttaatttggtacaggtatgatcgtgttgaatttgaagaaaaacatgtggatcagtatcatattaaagaagtagatgcagcagaaaaagcagctagatcaaaagaaatcaaagcaagaaaagaacagaaaaagaaagaaaaagatgcattgagagaatccaatgaaaccgctctttcgtaa

SEQ ID NO: 579 - DNA, 316 bp, unidentified
  misc_feature 1..316: note = Ga0223845_11964739 JGI
  source 1..316: mol_type = other DNA
ctaaaacctcaattccaaaacaattttagaacattataaaattatgtggcaaaccaaaaatagattaagagaagttcttatttgaacaatatctacgttattatgagataatatattattgtgtaactctagcaataaacatatcgcaaaagtttaaacatccaaagccatacaatattaatggaagtgactgagcagtaatgaattgaatttattacaagactcgtaataacattatcgaagagtatgaccgctatttagcgagatttatttattaaatattaaaaaggaaataaatatggaatacaaagaatat

SEQ ID NO: 580 - DNA, 1074 bp, unidentified
  misc_feature 1..1074: note = Ga0376681_0131425 JGI
  source 1..1074: mol_type = other DNA
atgtttgtaccagtcatagatcaggaccagcatccactgatgccaacgaccccagcacgtgcacagcgttggatcaagagtggcaaagccacggctttctggaaaggtgggatcttctgtgtacggctcaacgttgatccatcggcccacgtcctgcaacccatcgccataggaattgatcctggaagcaagcgtgagggctatagtgtcatttcagcctcgcatacctacctgaatatccaagccgaagccagggatggcgtcaaggatgcagaaaaggactcgaccaggatgcgtcggacgcgccggaatcgcaaaacgccctgccgccagccacgccagaatcgcaagcagagcaagcagaagcttcccccttcgaccagagctagatggcagtggaaacttcggttggctcgcttcttgaaccagatttttccggtgagtgcctttgtggtggaagatgttgctgccgtgacgaagaaaggcaaacgacgctggaacagcagctttgctcccctggaagtcggcaagcactggttctatgaagaacttaggaaacttgcacctgtagcaatcaaaccggggtatgaaaccaaagtcttgcgtgagcagttaggcttcaaaaagaccggcaagaaattggccgaagtgtgggaagcccattgcgttgatgcctggatactggcttatagcgccattggcggcaagacgacccctgataatcagcgactggtctgcatggtgccgctcaactggcatcaccggcaactccatcgcttcaaaccggagaaagggggcaagcgaaagccctacggtggtacactctcgcaaggcatcaagcggggaacgctggtcacccatccaaggtggggaaaggcgacagttgggggcactatggacggcaagctcagtttgcacgatcctcatacgaacaagcgactgacgcaaacggcgaaagtcatcgattgcctgcccatcaagttgttacgctggaggacgcggctcgtgcctcctgcgctgatccccgcgtcccctgccccaaaaagggaagacttgcttcctccccggcttgaa

SEQ ID NO: 581 - DNA, 240 bp, unidentified
  misc_feature 1..240: note = Ga0376681_0131425 JGI
  source 1..240: mol_type = other DNA
gtcaagcacccccgcatcgaatgcgggggcttgtgaagcgaaccgacttgccatcggggaaccaacgagggcaactgcgagactagcttgtccaagctccggcaccggggcgattgaaggaagctgaatcacctgggcatggcagcctatagaacgagcgagacgcctccctaatcccgctcctcttcagtggtcagcagcgaagggaacatattcacccgcaaggggcttatcgcacat

SEQ ID NO: 582 - DNA, 1515 bp, unidentified
  misc_feature 1..1515: note = Ga0315902_10061306 JGI
  source 1..1515: mol_type = other DNA
atgcctacgcacaaacataagtccaagacctaccagcagatgcttcctcagtctgctgctctagaatcgttgccgatttccacgaaagtggataaggcaacgaagacggctggtgctgtgcattgtcgaggggagagcccttgcctaaaccgcaaggggcgttaccacctggcaacaggtgagactgagtcggtaacggctcccagcatcttcgtgctggccaaatcgaagacacccctcatgccctgccatccagcacgggctagagaactaataggaaacggcaaagccgtgatctatcgccaccaacccttcgtcattcggcttaccgctagaaccgaaggcaatgtgcaaccgatccagctcaagcttgatcccggcgcgaaaacgacgggcatcagcgtagtggtaaccgctaccgcgtccagcaaattggacaaagtagttcgacacattgagctgaatcaccgcaaagaaaacgtgaagaagcggatggcgcaacgcaaaacgtttcgccgccgtcgccgcaccgcaaacctgcgttgccgcaaagctcggtttctcaatcgcggtaaaattgggaagatcgcaccatcgatcaaatcaaccctcgaccaaactcggggatggatcaatcggctacgccgctgggcacccatcacttcgatcgtgattgaaaccgctcgattcgatgctcagaaaattcagaaccctgaaatttctggcgtcgaataccaacaaggaacgttggctggcttcgaagtcaaagaatacctcctcgataagtggtgcagaaaatgcgcttactgtggggataaaaacaccccactcgaaatcgagcatatcgtcccgaaatccaaaggtggatcagatcgagtcagcaacctcacccttgcctgcactccgtgcaatttggcaaaaggaaatatggatgttgccgatttacttgcgggcaaacccgcccggctcaaagccattctggctaccgccaaaaagccgttggcgtcatgtgccaccatgaacatccttaaacctaggttgatgcaaatggctcacgaaactggcttgcccgtgacaactgccacaggcagcatgaccaaattcaaccgcaaacaatttggtattcccaaaactcatgcgcttgatgccgcattctgcgggccaatggaaaaaagtttgaaagggtggaaccaatccatcctacaaatcaccgcgacaggacgtggttcgtatcaacgcactcgcaccgacaaattcggatttccaaggctacgcctgccacgaaccaaatctgtccgcggctttcaaaccggcgacctcgtcttaactcccaaaggaaatggtcgcatcgctacccgctcctcgggatactttgcgctcgcaacggttgatggcagcaaagccaccatcaaccactcaaactgccgcctgctccaaagagccgacggctaccaataccaacaaacaaacaaaatcatctcgcagcaagctgcggggtttctaccctaccgttaa

SEQ ID NO: 583 - DNA, 224 bp, unidentified
  misc_feature 1..224: note = Ga0315902_10061306 JGI
  source 1..224: mol_type = other DNA
gtaaaatacccctaggcaagcctaggggcgtttttccagactaagacatagcaatatgcctacgcacaaacataagtccaagacctaccagcagatgcttcctcagtctgctgctctagaatcgttgccgatttccacgaaagtggataaggcaacgaagacggctggtgctgtgcattgtcgaggggagagcccttgcctaaaccgcaaggggcgttaccacc

SEQ ID NO: 584 - DNA, 1356 bp, unidentified
  misc_feature 1..1356: note = GENOME_ACESSION: mgm4527699.3 MG-RAST
  source 1..1356: mol_type = other DNA
atgcagaagttatcagaagagttaaagaacacaccaaaggatacttcccaagtcctttgctctgtaaaccatcaattaaacaaagaggaaactcttagtgttgatagtatagtactgtctgataacaatcccgatgggaatcaacccgagtcaaatcggaaacagaacacgagtgtatctgtttatgtcttaaaccaaagagttgaaccgttaatgccttgctcaccaagaaagacaaaagttttgttgaaacaaagaaaagcaaaagtagttaaaagaagtccgtttacaattcaattaactattgctacaggagaaacaaaacaagaagtaattttaggagtagatacaggttattcaaatgtaggggtatcagctattacagaaaagaaagaattattatcagcaacattcaagttaagaacgaatatttcagacttattaaaagaacgctctatgcacaggagaggtagaagaaataggctttggtatagagaaccgagatggaaaaatagagccaacgcaagaaaagaaggaagattaatgccttcaattctacataaagttaatactcatatttctattattgagaagattaaaaagttattacctatttcaaaagtagtattagaaacaggattatttgatatgcaaaaaatggagaatgacaagattaaaaattatcagtaccaaaaaggcgagatgtttgggtttgaaaatgtaaagtcttatgttctttcaagagacaatcataagtgctattttaaatgcaaggattcttctaaaattgaagtacaccatattaaattcagaagtcagggcggtacagataatccgaataatttgattactttatgtgaaaaatgtcataagaaagttcatctatgtgaattggagttaaacattaaaaagcataaagaattaaaatctaccacagcaatgaatgttataaggaaaagattgttagaattttatacagaagcagaagaaacatttggttatgagacaaaagttaaaagaagagaaattgatttagaaaaatctcattctaatgatgcttttgtaatcgcaaatggaactaatcaaattagaagtaaagagtttgaaataattcagaaaagaagaaacaataggtgtcttcagttaaaccgtaaaggatacaaaccttctataaagaaagaaaggtcaaaaatacaacccttcgatttgttttgggttaaaggaaaacaatacgtatgtaaggggatgttcaactatggtaaatatatttgttatggtagtactaaattaaaagagtattttaaaatagagctattagagaagcattataatcaaggtggtttagtatggaattaa

SEQ ID NO: 585 - DNA, 270 bp, unidentified
  misc_feature 1..270: note = GENOME_ACESSION: mgm4527699.3 MG-RAST
  source 1..270: mol_type = other DNA
gtcaactaccacgccttaaaggacgtggcttgtaaggtaacttacaacgtaagagttgattagggagcttaaaattttaaaagaggttttatgcagaagttatcagaagagttaaagaacacaccaaaggatacttcccaagtcctttgctctgtaaaccatcaattaaacaaagaggaaactcttagtgttgatagtatagtactgtctgataacaatcccgatgggaatcaacccgagtcaaatcggaaacagaacacgagtgtatct

SEQ ID NO: 586 - DNA, 849 bp, unidentified
  misc_feature 1..849: note = Ga0307377_10069547 JGI
  source 1..849: mol_type = other DNA
atgttagtatatgttaaaaactgtaaaggtgaacctcttatgccttgctctcctacaaaggctaagagactgttgaaaagtggtgaagctaaagtagttagtcgaatgccttttactattaaactattgtttggtagtagttcttacaaacaagaagtagtagctagtatggatactggttctaagtttattggatgtgcagctaaaagtaacggtaggattttgtaccagtcagaggtacagataagacaagacgtttctatgaaaatgaaacaaagactcatgtatagaagaacaagaagaagcagaaaacttagatatcgtaaacctagatggcaaaatagatcttcttcaagaagaaaaggaagattaccacctagcatcagaagtaaaattgattctcacctaagagagaaaaagtttattgaatctattttacctgtaactagatggatagtagaaactgctaagtttgatattcatgagataactaatcctgatgttaaaggaattggatatcaagaaggtagtcaaaagagtttttacaatgtaaaagcttatgttagacatagagacagttatatttgtcaacattgtaaaggaaaatcaaaagataaagtcttaatagttcatcatattacttctagacttataggcactgattctccagataatttaataactttatgtgttacttgtcatgacgattttcatgctggtaagattaagttaaatataaaaggaaaacgatctaaaactaaacatgctactgagataggaatagttaagtcacaattgaaaaagcaatggttaggttttgaggagacttttggttatgaaacaaaatat

SEQ ID NO: 587 - DNA, 300 bp, unidentified
  misc_feature 1..300: note = Ga0307377_10069547 JGI
  source 1..300: mol_type = other DNA
gtcaactaccctcccctaaagttttctttaaggagaacctatttattaggttaagttgaccagaccactaacaggagaataaaagttgttagtaaacgatacaaaagaaattagtcaccttgggatgccgtcccagttccaagctctgaggttacgaactaaacagttcttagggtacagaacagtgtttgtaacgataaaccttttgatatcaggtcgagggaaagttgaactctataattgctccaaaattatagatacacactactctgttttcagtcaggggtatactttatgtta

SEQ ID NO: 588 - DNA, 1317 bp, unidentified
  misc_feature 1..1317: note = Ga0223826_10002115 JGI
  source 1..1317: mol_type = other DNA
atgacaatttatgtcttagacatcacaggaaaaccgttaatgccgacacacaagcccggtaaagtcagacatatgctgaacgacggcagagcaatcatcgtcaactattatccgtttacgattaagttaacgtatgtaacaacaaactacgttcaaccagtaactctcggtgtagatgctggaagcgttcacgtcggtgtgagcgcttcgacagagaagaaagaactgtattccgctgagattgatttgaggagcaagcaaatgccgaaacttatagaaaaacgggcagcagcaagaggaatgcgacgttatcacttgcgctacagaaaaccaagattcaataatcgagtctcttcgaaaaaagaaggatggttggcgccatcattgaatcatcgtgtcaattctcatatcagaatcgtagagaatgtaatgaagattcttccaatcagcaaaatcatcgttgaagttggattgtttgatactcagaagatttccaatccggaaatctcaggagaagagtatcagaaaggacagatgtctggttctgacaatacgaaagcgtttgtcagattcagagacaagaacacttgtcagcagtgtggttcgaaagaacacattgaagttcatcatatccagcatcgagaagatgatggtccagacaggccagataacttaatttgtttatgtcacaaatgtcattatgaacatcacaacaatggtttggttctaaagaagttcaaaaatataaacaagaagaatgccgtttcattgcgtgatgcggcagcgatgaatcttatcaaagacaaggtattctctaaacttaaggaacgtcattcagatattgttatttggagaacgtatggttatgttacgaaacataacagaagaaaatataacattgataaatctcatgcgaatgatgcgtttgtgatttcgaagaatttcaacgctgaacctttggattatatgttcaggggatttcaaattagaaggcataacagaaagatacacaaagacactattcttaaaggtaacaaattgaaaaagaaccaatctgcacatttggtgttcggttttacacgatttgatagagtaagatatgatgggaaagaatgtttcatatacgcaagacgaacttctggatatttcgacttgagagatatagatggtagcaaaatacacgctactgctcctgtaaggaaaatcaaactaatcaaacatgagaatagtataataattaagaaaatcaaaaaggatagtgctgattcttctgctgacgctaaaggcgtcgcagtttcctcagcagatttaatatga

SEQ ID NO: 589 - DNA, 318 bp, unidentified
  misc_feature 1..318: note = Ga0223826_10002115 JGI
  source 1..318: mol_type = other DNA
gtcaccaaccggcgacactaaaaatgtcgcggcttggctcttaaatgagcggagtcgatggtgattagcctaagtgaaagagtttcaaactcttgaactacgttactgacgaaaacataggtaccaagggatgttagtcttagtcccttgctctacgtctgaatgttaaacagtcctgtccggtaggggcagtgcattcagaatacaaaaccgtcggataacattggcgcagggctgcattacagcgtcgctttagcgacgtctgcgttatcccttaattgggaataaaaattaatttcattaaaaacgactatgaca

SEQ ID NO: 590 - DNA, 1398 bp, unidentified
  source 1..1398: mol_type = other DNA; note = Fermentation metagenome
ttgacaaggaggacacatagcaatacatgtattgctaatttatttaataggagaaattctatgaaatgcatttatgtaattaatcaagacggtaagccactgatgcctactaaaagattaggcagggtgagtcgttggttaaaaagcggccaggcgcattggtataaaaaccgtcgtgataccattcaatttaatcgtaaaactactaattatgtccaagaagttattcaaggatgtgatcttggtgatcacttaggaatgtccgttatcactaacaatcaagaagtttatgccagtgaaagttactgtaatggtaagcaaacgcatcgactaatgcaaaaacgaaaagaactgcgtcgaacaagacgtaatcgtttacgtcatcgcaagccacgttttgataatcgcaaaaagaaaggatacgctccttcgattcaaagaaagctagattttcaaattaaagaaattaaacgcttagatgagtttttaccaatcactaaacgtgtttttgaaggctcgaccttcgatattaacaagatcactcatcatgctcagctgcaaaaaggttataaaactacgtttgattttttgtatgatcgggatcatggctgtgacgcgctagacggtaagcattatcctaagaaaaatatggttatccaccatttagtacagcgacataacggcggtacaaacaatcctgataaccttgttttattagcacgtaaaaatcatacgcaggtaaatcataaaaacggggttttagacaaattagctaaacagcgtcagaaaaaatataagaatgcggatactcgtggagcatatttcatgaatgtgctaggtaaggaattacctaagtattttgattttgtcccaacatatggctatatcactgctaaaaagcgtaagaagtacggtattgctaaaactcatcacgatgatgcctttgtaattgctggtggaactaatcaaacaaaacgttttgatacatgcttttatcgtgaaaaacagcgtctcaataatcgttctttagaaaaattttacgatgcgcaatatcgtgatttacgtactggtgaaaaagaaaaaggtgctgttttatcatcaggtagaacacgtcgttctttaaaagatccacgcaacaatcaacgtgttttccgtgctaacaaacttaaaaagggcagaagaacgattcgtaaacagcattatcaattgcgtcctaaagatttagttagttacaatgataaaatttatcgagtaaagggcatgcagaacaatggcacgcgtgttttattaattacttctgctaaagataaatcagtagccattaaaaacgtaaaatatctgtttcatattaacggtgtttatcaaacggaaaggagaactacggcattcatctcctga

SEQ ID NO: 591 - DNA, 319 bp, unidentified
  source 1..319: mol_type = other DNA; note = Fermentation metagenome
gtcaaccactcctgactaaagtcaggagcttgtaattattacaagctcagttgattagtctaagcattaaattgctacgttactggcaaatgagttattaatcatgctacaacgagtcaaaacgttgcttagttgataactttaataggtaccttgaaacgctactccaatttcaagctctacggatacggtttaaacagagctgaagagtaaggctcagtgatcgtattagaaaaactgtcggataacattgacaaggaggacacatagcaatacatgtattgctaatttatttaataggagaaattctatgaaatgc

SEQ ID NO: 592 - DNA, 1485 bp, unidentified
  misc_feature 1..1485: note = Ga0117909_1085896 JGI
  source 1..1485: mol_type = other DNA
atgttagtccacattatttccaaggatggtaaggctttgatgccttgccatcctgctaaggcaagaaaattactcaaagaaggtaaggctaaacctgtcaaaggaaagactggatattttactattcaattgctctatggtagcagtggctataaacaagaagttgtggttggtatagatactggcgcaaaacgagtgccaatcgctgctgttggtaacggcaaagtgtattatgcaaaagagaagatactaaggacagatgtaaagaagcagttgtctgataggtcaagatacagacgcacaaggcgaagtcgtaagacacgttatcgtaaacccagattcttaaatcgggtaaagacaaaatgctccaggtgtggtgttaataacgtgcccaagcgttggaagagtgtcaagcgcaaaacaggtaagagcaaaaagaaggtatgtaatggtagggcgcaactttgtcggcagtgtctgggtaaaaaggggctacacgagaaaccgcatgtacttgccccatcagtattaaatcgtgctttgagtattctcaatgacattcacaagttatcttctacactccctatatccagggtagttattgagatagcatcatttgatacgcagaagatgacaaacgctttcatagacggcgtcgaatatcagcatgggacgctctttggctacgaagtcaagcaatatctcttgacagttcacaagcataagtgcgcttattgcggtggattgtctggcgataacatcttacaggttgagcatatatttccacaatctaaaggcggcaccgataaggtcaataatctaactatctcttgtggggtgtgtaacgaagctaaaggaagtatgacgttggaccagtgggagggagtgttgcgtgcttctccaagcgatataaacgagaagcgattgaagaacatacctggtattaatcgacagagcaagctaaagaagggattccagtacagcgcacttacacaaagctacaagaattatttgctaagtgaactacataaagatttcatagtggaagttacctttggcgcaaaaacaaagtataatcgaactcagttgggcttgtctaaatcgcaaatcaatgatgctctcgttatagcatcagaaggtaagccagtgaagatgccagggtggtacatccttgaaaaacaagtcaagaagcgttactcatatcactacatttctcccccaaagaagggacagccaattgttaagtgtaagagagacttagagatgttcggtttccggctatgggacaaggtagagtgtaatcatccaaagaacgggaatgtagtcggatatgttcaagggcgtagaagtagcggtagctttgccatcgcttctcttgatggggaattacttataggaggtatatcctacaagaagcttaccttgctaaagaaggcggggagtaattacgttagagaaaggagacggcaattcctccccgcctga

SEQ ID NO: 593 - DNA, 326 bp, unidentified
  misc_feature 1..326: note = Ga0117909_1085896 JGI
  source 1..326: mol_type = other DNA
gtcaataacccctcctgattcaaagaatcagaaggggcttgtagtggttatccctgcaagccctatattgacagcctaagttacttaggtagctacgttattctggttatcagaccccggggtgctccaccagctccgactatcattttgttgatcgcatggctctctgatggcgtctgatgcttcggtatcagacattgtaaacagtcctaagaggctctgggacagtcaaccataggacgacttagcattctaagcaagctggaataacattggcggggtggaatctaaccctatcttatataggagtgtgagacttcatgtta

SEQ ID NO: 594 - DNA, 1332 bp, unidentified
  misc_feature 1..1332: note = Ga0175859_1302585 JGI
  source 1..1332: mol_type = other DNA
atgaaagtttacgttatcaacaaacatggtcgtcccttaatgcccacaaccccaagaaacgcaagattgctgttaaaggaggggaaagcaaaaatttatggtcgtgacccttttactatccaattaatttacggttctagtggttacactcagccgggaaggctaggaattgatgctggttatgagcatattgggtatagtgtggttaacgaaaaagaagaattgattggtggggaaattgatatgttaaaaggcatgtcagcccgattaacggaacggtcaaaataccgtcgtcaaagaagaaataggaaacgtcaccgcgcaccaagatttgataatcgcaggcgtaaagaaggatggttggctcctagtattcagcacaagcttgatacccaccacaaaataatccaaaagattgtagatattgtgccagtcaagaaaaagataatagaggttgccagttttgatattcaaaaaatcaaagacactggtattgacggcattggatatcaacaaggcgaacagtacggttttgacaatgttcgtgaatatatacttcaccgtgacaagcacgaatgtcaaaatcccagatgtaagaacaagtcaactgagcctatcttacaggtgcatcatataggtttttggaaggaggacaggacggatagaccagcaaatctaattactctttgcgataagtgccatacaccaaagaatcacaagaagaatggttttttgtttggttgggaaccaaaacttaaatcctttaagggtgaaaccttcatgaccacagtcaggtggcgcttaagcaatgaaggggaatatgaatcaacttacggttacattaccaaaggagtaagaagagattttcagatagagaaatcacaccacaacgatgcctttgtgattgctggcggtactacccaaaaaaggattgagccattaattctagaacagattagacgaaataagcgttctctagaacagttttatgacgcgaaatatattgatactagagatggttcattaaaaacaggctcagatttgtcatctggtcgtataacccgtaataaaaacaagagtggtgaaaacttaagacgatttcgaggtcagaaaataaccgccggacaacgacgaattaagaagtctcgatatcgttaccaaccgcgagatttggtgaagtttgagaacaagccttatgaggtgattggaatgcaaaacttaggtactggtgttaagttaaaagactatccaggagtcaaaaacaaggttgtacaagtaaagtttgtccagccactaagaaggagatcgggtatctgtactaggcttggatag

SEQ ID NO: 595 - DNA, 302 bp, unidentified
  misc_feature 1..302: note = Ga0175859_1302585 JGI
  source 1..302: mol_type = other DNA
ctgtgacgactccacacaccgacgccctttggggtacggtgtgggcttctaagaaattagaggttcgtcattagcctcagtgactcctgatcgcaagagtcgctccgttttccagaatatataggcactccgaggatgcagggggtagcgccctgattcctagtcgcggatactgcggtcactgattaaacattcctactggcagagggttcgtgttggtgacaaaaaacctggacaaacattggcaaaggaaaccacgtcgaaagacgattctctcttaattagggatatcaataatgaaa

SEQ ID NO: 596 - DNA, 1140 bp, unidentified
  misc_feature 1..1140: note = Ga0394874_0000250 JGI
  source 1..1140: mol_type = other DNA
atgtctaattttgtcttagtcatagatgcccaaaaacagccccttaacccggttcatcccggtcaggcgcgccggttgttgaaagcaggaattgctgctgtatttcgcagatttccctttgtcatcattctcaaacaatcctgttcggttttgagcgcgctcaagactttagagttaaaaatcgctccgggatctacaaccactggattagccttgctgcaagacaaaaaagttgtatttgctgcacagttgacgcaccgtggacaagcgattagagctaaattagaaacgcggcgcaaccaacgcatgtcgcggagaagtcgccatactcgctaccgacagccgcgatttctaaaccgcacccgtcgtcaaggttggttagctcccagcttgcagcaccgcgtcgaaacaacgattacttgggtgaacaaacttatccgatttgcacccattggctcaattgttcaagagcttgtcaaattcgagctgcaaaaattagaaaaccctgagatttcagggattgaatatcagcaaggcgaattgcagggctacgaagtccgcgaatatatgctggcaaaatgggagcgaaaatgcgctgaatgcggtattgaaaatgtgccgttacaggttgaacacatccatcccaaatcaaaaggaggctctaatcgaatctcgaatctttgcctggcttgcgaaaagtgcaatatcaaaaaaggaactcaaagtattgagcaatttcttgccaaaaaaccggatgtactgaaacgagttttgtctcaagctaaatgtccccttaaggatgcagcggcggttaattcaacacgatggactttgttcaatcgattaaaagaaacgctgttaattacctctactggacgcggtacgcgccgcaggtgtcggatagacaagtttgggttcccttgttctaaaccccgccagaattacgatattggctggcagaccggcgatatcgcgatgactgtcaaagatggggtaaagtatgttggtaaggttgtcgtgcaatccgaaaaacggttggaagtaagaactggaaaattaagaatcggcggcacgcttgataaattcgtaaaattgcactcgcaagacgggtatcaatatgccaagattgactccacttaa

SEQ ID NO: 597 - DNA, 250 bp, unidentified
  misc_feature 1..250: note = Ga0394874_0000250 JGI
  source 1..250: mol_type = other DNA
agcaccaatttggagtaaatcgcagcaatctggtttatttcggctactccagaccgctgaattttgattcagcagccgttatcttcaagcgttaaagttcgcaccttgggattcgctagtcctgagcttctgcaagtccactgttaaacatcctcgattgggtaaaaaaaatgcagtggacaaagtaccgggagataacagggtcgaagcaaacattaccccgtaagggaggacttagatgtctaatttt

SEQ ID NO: 598 - DNA, 804 bp, unidentified
  misc_feature 1..804: note = Ga0007854_10018219 JGI
  source 1..804: mol_type = other DNA
atgcaaagagtttttgtattagataaaagtagacggcctttgatgccctgcacggcatctagagcaagaaagcttctttctcaaggaaaagctacaatgctcaaactccatccttttacgattcttattcaagatagagaaggaggcgaggtgcaaaatattgaagtaaaaatcgatcctggaagtaaaatttcaggaatggtacttattggacactttaaaaaaaggatgacagtcatatgggcagccaatcttgaacacagaggagctactattagatcctcgctagaatctagaagagctattagacgaagtcgaagacatagaaaaacccgttatcgagcagctcgatttaataatcgaaaacgtaaagaagtatggatagcaccttcattacaagctagagtggataacatttgtcattggatcaaaagactggaaaagttagctcctatttcttccattgcattagaaacggtacggtttgatatgcaaaaaatccaaaatcctgagattacaggagagctttaccaacaaggtgagcttatgggttacgagatccgagagtaccttcttgagaaatggggtcgcaaatgtgcctattgtagcggagaacatacaaggttagaaatcgatcatattgttcccaaaagcaaaggtggaactaacagagtctctaatctcaccattgtttgtagaacctgtaatgtaaaaaaagcaaatcatcctctcgaagaatttctccataaaaaatcagctctttgcgctaagattttatccaaagcagaaaagcctttggacaac

SEQ ID NO: 599 - DNA, 311 bp, unidentified
  misc_feature 1..311: note = Ga0007854_10018219 JGI
  source 1..311: mol_type = other DNA
gtcaactaccaccccctaaaggaggtggcttgaagaggtgactcttaaagcttggttgaccagactaagcatccatgtggatgctacgattacaataggtcgttaagacctaccttgggatgctactccagtcccaagctctagaagggtaagatcacgatgggtaaaggtaaagacccgaaggttttacttgccgaaagggagccggttgtaatcattgccctggaggacgttatccacaaagcgcttttgcgtaagtggagattgcacttacgtgctaaattttttttattttggaagatatgcaaaga

SEQ ID NO: 600 - DNA, 1356 bp, unidentified
  misc_feature 1..1356: note = Ga0209720_1000657 JGI
  source 1..1356: mol_type = other DNA
atgatacatcgttggattaaacaaggaaaagctaagtttaggaaacgtaacttagttcaagtatttaaacaattcgatccagcaaaaactataccagctaaatttgtagttggtatcgatcccggatacaaaaatattggttacgcagtttataagatttataataataaaattacagagctagtttcaggtgaagtagtcaccagaactagtgagattaaagagctattagatatcagacgaatgtttcgtagactcagacgctattatcgaagaaagaatgtcttaagaaaattcggtaaagttaagtttagagctccgcgatggaagaatcgtaagaagaaaccattcgctcctactcataatcatttgattcagagtcatttgaatcttctaactaggttatttaaattagttaactttacagaaattcatctagaatactctagctttgacactcagaaattacagaatcctaatattaagaactggcaatatcagaaaggtcctcagtttggatttgaaaatgttaaagcatatgtgagagctagagataattatcagtgccagaattgtggttctggagataacttaagagtacatcatatagtagagcgaagtaaaggtggcagtgacaggtctgacaatttaatcacagtttgtgagagctgtcacaatctgattcatcaaaatggattatcttctccagcgatttcaactgatattaaaatgagagatagcggagttctgaattcatgtctgaagaagctatatgaagttctagctgacagtataactactgttaaaacattcggttacatcactagtactcttcgaaagatctaccagttagagaaaagtcacgaaactgatgctaaattaatagctttatctgatgaaaatggattagctgtagatttagaaaactgcgattattctagtagtgatctaaactataatttttatcagttcagaaggcatcagcgtagctgggttaagagatatgtagacagaaaatatatagaaacagatttttatgcaacagttgcttggaatagaagacgtcgttctgctcaagatgaggagaagccaagtcttcaagaacttaaagctgaatatcctgacgctcgcttaatagctaaacccggaaaagtcgtctatagaaagagtcatcaattaactaaattcagacccggtgatatctttagatacggaaacaagattgatgtagcgaaaggatggtcgtctactatgaatagagtaggtggtctagacatcggatacgttccgataagtaaaactactaaaatctgtaacaattcaggattagttatactacccgctaaagcgggataa

SEQ ID NO: 601 - DNA, 301 bp, unidentified
  misc_feature 1..301: note = Ga0209720_1000657 JGI
  source 1..301: mol_type = other DNA
gtcaactaccacccgctaaagcaggtggcttgtaagagtcatctgcttagtggttggggttgaacaggcacgtggaagttaaagcttctgcaggatctgattaagcgttcaccctggggtgccactcccagctccaggctctgaaggtaatagctaaagttttagctagaagtcctagttgctagcaagtaggtaacgaaagctagtattacgcttaaccaagccgagggagactcacacttgatacccgatctatgggtatcgcttttaaaggtagaggtaactaaaattgaaacagata

SEQ ID NO: 602 - DNA, 1356 bp, unidentified
  misc_feature 1..1356: note = Ga0177923_1152199 JGI
  source 1..1356: mol_type = other DNA
atgacagtatttgttatcagtaaaaacggtgaacgcctgatgcctacttcccggtttgggaaagttcggcacatgatcaaggatggcagagccgtcatttattgccacaatccatttaccatccagctgacctatgacacaaccggctacacgcagcccattgaaatttgcgaggataccgggtatcagcacataggaatcagcgtaaaaagcgagactgcagaatatgtttcggcgcaatacgatctccttgagcacgaaaaggaaaaccatgatgactgccgaaaatacagaagggctcgaagaaaccggaagcggtaccgcgccccaaggtttaataaccgccgagcgtccaagaaagaaggctggctggctccatctctgagaaataaagcaaatcggcatatcgatctaatccagaaatatgtcaaggttgctcccatcacttccatcacggttgagcttgggcaattcgatacgcaggtcctgaaagcagtgacagaaggaaagccggttccagaaggtcttgattaccaacatgggcctcagtatggcattgatactttgcgggaagcagtctttcaaagagataatcacacctgcattttttgcggaagaggattaaaaaacggagccatcctgcatgttcatcatgtctatttctggcgtgggcagcatggtaattctcttgacgaactggctacctgctgtgaaaagtgccatactcccaaaaaccataaggagggtggcaagctctggggttacaacaagaagcttcccagatacaacggtgcggcattcatgaatatcgtccgttggtatatctacaaccaggtcaaggaccttaatcctggcattgatattcacgttacttatggcgctgctacaaaacgcagccggatggatttaggacttgaaaaggcccatgtcaacgatgcctattcaatggggctatttcatcatacaaaaaggacagccaaggagtttttcgtaaaacgccgccgtaataatcgctgcctggaaaaattctatgatgcaaaatacatagatgccagagacgggaaaatcaagtccggctcccagcttggatgcgaaaggataaacaggagagagcctagaatatctgataaaaaccttcgcatttttcgtggaggaaaaaagtcaaagggtcaccgatccattagacgacagcgatatggaatacgtcccggagatatcatgctttgtagcaacaagaaaattcctgctactggggtccattgtaatgggacaagagttttagtcggtggaaaatcttacaaattggaccagatggaagttatccgacatatcggcggttgggaaaaaactgactaa

SEQ ID NO: 603 - DNA, 358 bp, unidentified
  misc_feature 1..358: note = Ga0177923_1152199 JGI
  source 1..358: mol_type = other DNA
gtcaacaacccgccactaaatcaaagatttagtgggggcttgagaaacagtcccattcgactgtccctttcaagcttagttgattagcctcagttggtcggtatggcttgccagcgaaccaactacgttatcttggaatccttcattttgggaaataggcaccagtgtttggtactccacaagcccactgctctgcggtatgatctaaacatctctaacggtaggagaagtgcgtaatacaaaaacccaagataacattggcgatgtggaccacggtactgcgctgtcatcttcgcatgacagttgcgaaggccgcattattcccctcacggggagtcaggagtaaatcacaatgaca

SEQ ID NO: 604 - DNA, 885 bp, unidentified
  misc_feature 1..885: note = Ga0256405_10019152 JGI
  source 1..885: mol_type = other DNA
atggtttacgtattaaatcaaaacggacgacctttaatgcctacaaaaaaccatgccaaagtgcgtgttcttctaaaacagggcaaagcaaaggtgataaacaagtgtccgtttacaattcaactgttgtatagtagcacgaactatgcacaaaaggtaactttaggtgtagatagcggaagtaagcatattggtctttcagcaaccacaaaggataaagtattatttgagtctgatgtagagcttagaaacgatattatggatttgctttcttctcgtagagaattaaggcgttcccgtagaaatcgtaagcttcgttaccgtaaaccaagatttaataatcgcagacgtggtaaggggtggttagcaccttctgtaaagcaaaaggtagattctcacttaacaatggtatcaaaagtatgcaaaatacttccaatatcaaatatagtagtagaggtcgcttctttcgatatacaaaagattaaagatcctacaataagcggtgctgattatcaacatggcgaacaattagacttttggaatgtcagggaatatgtgttattccgtgacgggcatacttgtcagtgctgtaagggtaagtctaaagacaaaatccttaatgtacatcatatagaaagccgtaagacaggcggtaatgcacctaacaacctgatcacactatgtgaaacctgtcatactggatatcataagggaactgtaaaactgcctaagacaatacatagaggaatgtcttttaaggatgctacgtttatgggtatcatgcgttgggctttgtatgggaaacttaagtctatatatccagacgtaaaacttacttacggatatattacaaacccattgcggcgggaaagcccacggttttaa

SEQ ID NO: 605 - DNA, 294 bp, unidentified
  misc_feature 1..294: note = Ga0256405_10019152 JGI
  source 1..294: mol_type = other DNA
ttcaactacccaccgcctaaaggcagtgggattgtgcagtagcagtgctacgaagcaatcctaagttgaatagcctaagttctttgagaactacgttaccttggaatatataggtacttcgggacgtaatacctaattccgaacactacggactatgattaaacagttctgtgaggtaggaacagtgttgtagtcatacaaaacccagggataacattggcgaaggtatgcaaaccccttttcggagggagtaattaaaacctttatggtttttggaaaggagaatgcgtaatg

SEQ ID NO: 606 - DNA, 1275 bp, unidentified
  source 1..1275: mol_type = other DNA; note = Mouse gut metagenome
atggaactaaaagacataacattcttttttgtagtagatagtaaaggtaaacccttagctcctactacaaataatagaggatttgaactattaagaaaaagaaaagctactcttattagtaaataccctctagtaattaaattaaataaagaaatagaaaatcctaaatgtaatattgaaattggtatagatgatggctcaggtcatgtaggcttatctattactcaaaaatgtaaaactaaaaataaagtagtctttaaagccaaaatagaacaacgtggagatgttaagactttaatgactaaaagacgtgaacatcgtcgctatagaagataccataaacgttataggaaaccgaggtttaataatagggcttcttctaaaaagaaaggaagaatacccccatctattaaacaaaaaaaagatgctattcttagagttattagacaactttctaaatggattaatattaatcttacaacacctattcatttagaagatgtggctattgatataagagctcttacagatgcctttaaaccttatagatgggaatatcaacaatctaatagattagatgaaaatttaagaaaagcggctattttaagagataaaaatacatgtcaaatgtgtcaatgtaaagaaggcacaaaagaagtccatcacataagggcaaggcgtttacatggagcagatactataagtaatttaattactttatgtcctaagtgccatgaatctataaaagataaagaacctctttatgaaaacttcttttatgagaaaattaaatctattggtaacattcgctttgactatgccacacatgttatgcaaggaaaaacttatcttagagaagaactttctaaaataggtgttctacaacttactaatggaggagatacagcaaataaaagaatagagtggaatatagaaaagtctcacgcaaatgatgctatctgtataataggcttaaaacctgataccactgatatttttgaatggactataaagcctattagaaaaagaaacaactttaataaaaaaacagattttgtagaaggttctaatggcattattaaacataaagatttagtttcttatacctataaagatggtaatacttatgtaggttatgtaactgctttatatcctagtgataagaaaacaaaatcagattatttaaattttcagagtaaagaaaaacattgtaagaaagtaaatgcaaagaagacaaagctcttatggagcttcagtcatctttattggctatag

SEQ ID NO: 607 - DNA, 369 bp, unidentified
  source 1..369: mol_type = other DNA; note = Mouse gut metagenome
tataaagatgtattatataatacatcttgtattgtataatttatatttattagtatttttaaaagatctcaagcctaagtgatagcaccataacgaaagttatgcaataaaagaaattttattttaaagtgctgatatgaactacgttgataagtaagctaaaaatatacctttaggtacacctttagcctaaagctctataactgccaaccaagaaacaaagttcttacattactttgataacagggaaacagatatgctcttattgacattggcaaaaaggacaatactcattaaatagtagtttctaactactaggaaaggagaggcgaaagccaaaaacttatggaactaaaagacataacattc

SEQ ID NO: 608 - DNA, 912 bp, unidentified
  misc_feature 1..912: note = Ga0114843_102905 JGI
  source 1..912: mol_type = other DNA
atggtatttgtattagataggtctaaaaagcctttagacatgatttcacatgctaaggctagaatattgcttaaaaacagattagcagtagtccataaagtatatccttttactattagactaaaggacaatagttgtgtaagtaataatagaacttacactgttaaacttgatccaggttcaagaactactggagttgccactgaaatagatcacatcataccaagaagtaatggcggaactaacagttcatacaatctaactccagcttgcagaccatgcaatgaaaagaaatcaaacttatcactaaaagaatttgggaagcttatgaacaaagactattctcagctagaacctaagaaactgcctaaagatgcagcaatagttcaatctgctagaaactatatgattaaagagataactaaactggtttctaatacaacttcgtatgacgcttggttaactaaatataatagagatagactagacttatctaagcaacattactatgatgctttatcagtaggaaatatagagaactttagatttcttacagataaggtattacaaatatcagctaaaggtagaggttctaggcaaatgtgccttatggataagtttggctttccaagaaccaaaccaaaaggtagtaagttagttaaaggcttccagactggagatatggttaaagccacagttccaaaaggtttaaaaaaaggagaatatcttggtaaggttgcagttagatctagtggatattttaatattcagactaaaactcaagttatccaagatataggatataagtattgccgtcttattcaaagaagcgatgggtactcatacaattataaggagtgcgacttcctctcggctattcataaccgagtctccatcgcagattttagatga

SEQ ID NO: 609 - DNA, 270 bp, unidentified
  misc_feature 1..270: note = Ga0114843_102905 JGI
  source 1..270: mol_type = other DNA
atcaattactcagtagttaactactgagcttgattgaccagactaagttgctaagaaattagcttactacgatagataagttatcacacccgcatgatgcttctccagtttgcggctctgtgtaggctctgtaagaatgcttaaaggcaggtcaacctaggaacggctctagcaagcttatctatcattgtcgaggagagactcacttccaaaagaagtgggcgataccgtagcaatacgagattattaaaagaaaggaatttactgatg

SEQ ID NO: 610 - DNA, 1362 bp, unidentified
  source 1..1362: mol_type = other DNA; note = uncultured Erysipelotrichaceae bacterium sp.
atgtctgtggcagtactatccagcaccggcagaaagctgatgccgacttcgaactacagagcacggaagctcttaaaaagcaaacgtgctgtcattgaatgctatcgtccgatttttacaatccggttaaccgaccgggaggagggaaacacacagccgattgagtatgcctgcgatacgggataccagcatgtcggcgtatcaatcaagtccgaaaaacatgagttcgtccatgcgcagtatgacatgctgagcgatgagacagagcggcacaatgactgccgcaagtgccgcagaaccaggcgaaacagactgcggtaccgtaaaccgagattcgacaaccgttcgaagaagaacaaggagatggcgccttccctgcggcaccgcaaggagaaccagatccgcttgttcgaatcgttctgcaaagtcatgccgatcacatcggcggcattcgagatggggaagttcgacactcagcttctgcaggcaattgcagacaagaagcctctcccgaaagggaaggactaccagcggggatcgaagtacctgtatcagaccgaacgggaagccgttttcggcagagatcactatacctgccaggtatgcggtaaatccgtcaaagacggcgtgattctgcatacgcaccatatcgggttctggaaaggataccgctccaaccgaatcagcaatcttctgacagtatgtgagcactgccatacggcaaagaatcaccagcccggaggaaagctctggggactggagccgaaaagcacaaatctggctccggcgacgtatatgagtaccgtgcgctgggcaatgtatcgcgatctggtgctgacgcatccggagctcgatatttatttccagtatggtgcaaagactgctgtaaccagaaagtcgctgcatcttgaaaagacacatgcaaacgatgcttactgcattgggtctctgcatccgaagcatcgaacagcagagcttgtctatcagaaaaagcgccgcaataaccggattcttgcaaagttctacgatgcaaagtacatcgacatccgggatggcgaaaagaagtccggttccgcactctcatgcgggagaaccaaccgcagggaaagcaggcgctctgataagaatcagcgcatctatcgcgggaagaagtgttcttcagggcgcacttcggttcggaagaagcgttattcatatcagcctggggatgcgattctgtttcggtctcagcgtttcactgtcaatggtgctcattgcaatggaacccgcgtaattctaaataccggaaaatcagtcaagatggcagatttgacctgcattaaaatggaaggaggatggtgcttcctccccgcccaagcctga

SEQ ID NO: 611 - DNA, 370 bp, unidentified
  source 1..370: mol_type = other DNA; note = uncultured Erysipelotrichaceae bacterium sp.
gtcaacaaccccgcctaagtcctaacggactatagacggggcttggagaggctattacagctcttcaagcccggttgataagcctcagtctgcgtaagagccttcggactctgaagtggcggactccgttgccgtgagctacgtacgaatgctccactagttcgtacctcttgggtgcagatgctaaaaatcccctagggtaagggacgtgcatctgtagtattcaacccacggataacattggcgaagtggaccaccgcggctgcggttcttcggaaccgtaagtgcgagatgctgcatgtcttcaggaatgcagaaagcgtaagcgcccttaacggggcaggcagaaaggaggcatcagaagatgtct

SEQ ID NO: 612 - DNA, 276 bp, unidentified
  misc_feature 1..276: note = Ga0105046_10007489 JGI
  source 1..276: mol_type = other DNA
atgcaacgagtattagtgctagacaagaacaaaaacccgctgatgccctgtcactcggcgcgtgcgcggcaattgctcacacaagggaaggcggcggtctttcgtcaatacccctttaccatcagcccaaatcatgcgccgcttcaaattagggcgaccgggcatcaatctcgccaaatgtgccgtgtcgataagtacggctttccacgaaccagccccaaacaagggcgcattcactatggtttccaaacgggagatatggtcaaggcgctggtc

SEQ ID NO: 613 - DNA, 255 bp, unidentified
  misc_feature 1..255: note = Ga0105046_10007489 JGI
  source 1..255: mol_type = other DNA
gtcaacgaccacctccataaagggggtgacttgcgataagcaagcccatgttgaccagcctcagtctcattcgtgagacaccgttatccgggtcatgataccgacgggtgactgaaccagcccgtcgctctatcgctcaccgttaaacatgccgagggtctaggcaagtgcggtgggcatgacaagcccgaataccattggcgaggttcactttactgccgcaaggcgagcataatgaggtaactcatgcaacga

SEQ ID NO: 614 - DNA, 1293 bp, unidentified
  source 1..1293: mol_type = other DNA; note = Human gut metagenome
atgcaagtagtatatgtattaaacaaagatggattaccacttatgccaacgcataaactgggtaaagtaagacatcttttaaaagatggtaaagcaaaaattgttaagcgtaatccatttactattcaactaaattatgagtgtggtaattacattcaaccaattacattaggagttgacgctggttctaaacacataggactaagcgcctcaacagaaaaagaagaactatattcttctgatgtagaacttcgtaaagatattgttgatttattatcaacacgtagacaaaacagaagaacaagacgcaatcatctaagataccgtccagcaagatttgataatcgtaaaaaagaagatagttggctagcaccatctattagacaaaagattgattctcatttaaaggtaattgaagatgtacataagattctgcctatcacaaacattattgtagaagttgcatcgtttgatactcaacttttaaaagctgaggctgaaggcaaaaccattagtggtactgattaccaaaaaggcgaaatgttaggttataacactcgtgagtatgtattatttagagataatcacacttgccaacattgtcatggtaaatccaaagataaggtattagaggttcatcatcttgaaagtcgtaaaacaggtagtaatgcaccaaataacttaatcactttatgtaaaacatgtcacgaagcatatcataaaggaaaaatagaattaaaacaaaaacgaggtgctaaatataatgacgctgcctttataggtattatgagatgggctttctacaacaaacttaaagaaatctatccaaacgtttctttaacttatggatatataaccaaatataatcgcattaatttaggtttagaaaaagaacattataacgatgcttattgtattgctggaaattttaacgctaaaccacttaatacctttatctaccaaaagaaagttagatgtcataatcgccaaatacataagtctaaccttttaaaaggcggtgttaaaaagcgtaaccaagcaccttacttagttaaaggatttagattatttgacaaagttaaatatcaaaatactgaatgttttatctttggaagaagatcgtctggctacttcgatattagaaaattagatggaactaaaatacatagttttattaattataaaaaattggaattgcttaatgcaagggaaaattttattaaagaagaaaggagcaggcaattcctctcacgccctcttaaagagggtgaagtttccttgcctacttgttga

SEQ ID NO: 615 - DNA, 300 bp, unidentified
  source 1..300: mol_type = other DNA; note = Human gut metagenome
gaagcgaggaagctgaatagtcaactacccacggttaaatccgtagacttgtaataagcctagttgattagactaaggagaaaactttaagttaatatcctacgttatataagaatatatagttacctacaaatgtatagccaagtttgtagctctaaggtatgtgattaaacagttttgatgggtaaaaacagtgttgcgtatttaaaaaccttatataacattgtcgatggctacattacaaatcgtaagatttgaattatctattaagttagatagaaaggaaagtttatgcaagta

SEQ ID NO: 616 - DNA, 1353 bp, unidentified
  misc_feature 1..1353: note = Ga0209647_1002274 JGI
  source 1..1353: mol_type = other DNA
atgtcgtgtgtgtttgtggtggacaccgagcaccgcccactggacccggtgcatccgggcgccgcccgccggctgctctcacgagggcgggcggcggtgtggcggcgctccccgttcacgctgatcctgaagcgggccgtgccggacgcgcagccgcacccactgcggctcaagctcgatccgggcagccgcaccaccggcctggcgctcgtcaccgcatcgccagcggcaccgcctgctgacgaggtatcaatcgggcgggtggtgtgggcgggggagctgacccaccgggggcaggccgtccatgagaaactggtaacgcgccgtgccattcggtgcggccgccgccagcgccacatgcgctaccgcccggcgcgcttcgccaatcgtcgccggccggaggggtggctgccgccgtcgctggagagccgcctggccaacaccgagacctgggtgcggcgcctctgccgcctcgccaacgtcgtcgccatctcgcaggagttggtcaagtttgacacccaggcgttgcagaatccggagatcagcggggcggaataccagcaggggacgctggcggggtatgagctgcgggaatatctgctggagaagtgggggcggcgctgcgcctattgccacgcgacaggcgccccgctccaggtggagcacatcgtacccaaaacgcgccctggcggctctgaccgtgccagcaacctcacgctggcctgcgcgccgtgcaaccagcgcaagggcacgcggaccgccgaggagttcgggcacccagaggtgcaggcgcaggcccagcggcccctgcgcgatgccgccgccgtcaacgcgagccgctgggcgttgtttcagcggctgcgggcaaccggcttgccggtggaaacaggtaccggcgggcgcaccaagtggaaccggacgcaacgaaacctgcccaagacgcactggctggacgccgcctgtgtaggggcgtccacgccgcaacacctgctggtggcaggcatacgcccattgacgatcaccgccacgggccggcatgcgcgccagatgcgccgcatggaccgctttggcttcccgcgcaccggccccaaggccaccagcacggtaggggggctgcgcacgggcgatctggtgcgggcggtggtgccggcgccgagcgtgaaggctggcacgtacgtagggcggctggcggtgcgtgccagcggcatgtgcaacatctcgacggcccggcagggtgtggtgcagggcatccatgtgcggcactgccgcccgctgcatcgcagcgatggctacggctacggctacggctacggcgatggggcatcccatcacactgaaacagaggcgcgttga

SEQ ID NO: 617 - DNA, 282 bp, unidentified
  misc_feature 1..282: note = Ga0209647_1002274 JGI
  source 1..282: mol_type = other DNA
gtcagggaccccacggctgaagccgggggcgtgtgctgagcacgcccaccctgaccagcctcagctctgaaaggagctccgataccggcgaatgcataggcaccggcgggtggcacctcagcccgccgcgctgcggggcacggttaaacaggtccacggggtgacgaccagtgccgtgtccgaagaaaggaaaccgccggatatccttggcgaggggaccattacccgcgcaagcggaggcccacaagggcagcaagatcggagtcgcgttgtatgtcgtgt

SEQ ID NO: 618 - DNA, 420 bp, unidentified
  misc_feature 1..420: note = Ga0401364_0036777 JGI
  source 1..420: mol_type = other DNA
atgcaacgtgtactcgtactagataaaaacagagagccgctgatgccctgccacccggcgcgggcgcgggtgtttcgtcgctacccgttcaccatcatcatcacagatcgggaaggcggcgacgtgcaacctgttgccttcaacgttgacccaggcagccgcacgtcgggcctggcgctgttcaacgggttcaaatcatccggcatgccgctggaaacgggaacaggcgcacgcacgaaatacaatcgccgtcgccagaactacccgaaagcccattggattgacgcggcctgcgtgggcgaaagtggcgcatgtgtgtacatcgcatccgatcacgcgccactgctcatcaaagctaatgggcgtcaatcgcgcttgatgtgccgtccagataagtacggctttccgcgcacgaaggcc

SEQ ID NO: 619 - DNA, 261 bp, unidentified
  misc_feature 1..261: note = Ga0401364_0036777 JGI
  source 1..261: mol_type = other DNA
gtaagcatccccacgcctgaaggcgggggcttttaacagcccaaatgcttaccagcctcagcccttcgggggctacgttacgggcgaatacataggcactccggggtgacgccaccagccccggactctgcggtgagtggttaaacaggacggttgggggacaacggcccgtgctgctcacatcaaaccgcccgataacattggcgaggtggacgttacccgcgtaagcggagattagaggggtaactctcaatgcaacgt

SEQ ID NO: 620 - DNA, 1389 bp, unidentified
  source 1..1389: mol_type = other DNA
ttgtggcgagtaccacgttgtggggcagacacgacaagcctgttgaacattgtcgaggcaaacatgacccgagtaatcggagagaccatgtccacctgtgtgttcgtcctgacgactgatcatgtcccacaaacccccgtgcatcccgctgtggcgcggaagatgttgacggctagggccgcggcagtgttcaagcgcttccctttcaccatcatcttgaagacggcagaggccgcccaccttcccgtgcacacgcatcgcctgaagattgaccctggcagcaagaccacgggactggcgttgctcgatggccccaaggtcgtctgggcggcagagatcacgcataggggccaacggatcacagatgcgctgctccgtcgacgcgccctacggcgtagtcgccgccaacgccagacacgctaccgccaagcgcgcttcctcaatcgcacccggccagcgggctggctgcctccatcgctgcacagtcgtgtggcgaacatgatgacctgggtgcaacgtctgcaacgactgtgccccatcgtggcgctgagtcaagagctggtgcgttttgatgcgcagctcctgcagcaccccgcaatcagcggcatcgagtaccagcacggcacgttggcgggctatgaggtgcgtgagtatctgttggagaagtggggccgtgcttgcgcctactgtggcgcgaccgacgtaccgcttgaagtcgagcatatcgtgccgaaagtgcgtgggggctcacatcgcgtcagcaacctcaccctggcctgcgtgtcctgtaatcagcagaaaggcagccagacggcgggagagtttgggtttgcgaagatacaggcgcaggccagggtgccgctcaaagatgccgccgtcgtcaacgccacacgctgggcgctgtatagtgcgttgaaaaccactgagctgccagtcgaaacaggcacaggggggcgcacgaagtacaaccggactcgccgaggcattcccaagtctcactggagcgatgctgcctgcgtgggcgccagcacgccagaggcattgcatgttgccggtgtacaacccttgggtattcgggcgatggggcacgggaccaggcagatgtgtcgcgtaggtgcccagggcttcccgaaggcgcaccgcacgcgccagaagcagtactttggtatgcagattggcgatatcgtcaaggccagtgtcccccagggcaagtatgccggcacatggaccagccgcgtcgttgtcaagaacagtggttggtttgacctggttatccatggcaaaaaggccagcgtgcatcacaagcattgcacacgcctctggtcgtcggatggctatacgtacaccctgcctgctggtgcaggcaccgccgtttcctccccccactga

SEQ ID NO: 621 - DNA, 249 bp, unidentified
  source 1..249: mol_type = other DNA
gagtgagtcgacgtactcccccgactgaagtcgggggactcttaggagtcggtgtcgagcagacatagtgccgcaatgcgctccgttcagcaggtcacgataccctggaatgcgtgccagttccaggctctatcgtctgtccttaaatagttgtggcgagtaccacgttgtggggcagacacgacaagcctgttgaacattgtcgaggcaaacatgacccgagtaatcggagagaccatgtccacctgt

SEQ ID NO: 622 - DNA, 507 bp, unidentified
  misc_feature 1..507: note = Ga0137390_10046836 JGI
  source 1..507: mol_type = other DNA
atggatgctcgtcgcgctcaccggaagagccgtcgagcacgacaatggtatcgtcctgcacgcttcgccaaccgagctgcaagctcgcgcagggggagaatcccgccttgcatcaaaaccaatgtcgaagaggtgatccgggttatcaagcggctgcctttgccgatcagccagatcatcatcgaagatgtccaggtggatatcgcgcggctgaataatcctgagctcaaagggagccaatatcaagacccgacacggctggatgagaacctgcgcctcgcctgtctgatgcgcgacggctatgcctgtcagcactgcgggaaacaccacgttcgcctgcaagcgcaccatctggtgtatcgagaacacggcggaaaagatacgctgaccaatctgctgacgctgtgtgaggcttgccaccagaaggtccatcaggacaagctcaccttacaggtgactggtgtgagtgggcatctcgaccagggagcctacttctgctctccctaa

SEQ ID NO: 623 - DNA, 237 bp, unidentified
  misc_feature 1..237: note = Ga0137390_10046836 JGI
  source 1..237: mol_type = other DNA
aatagctgctaaaaatctagcgttttgttacgccgggttcatggagctaccagcgggcttcttgggaagcagcagttgggatggtcatgacaccaccagatgtggttccagtcgggtgcaactgtcggtatccattaagggtagcggaaacgtgaaggtgtggatactgcaaaaagctctctcaacagccgcgaggagcatttcactctgaaaggagggcctagagccaccatgtat

SEQ ID NO: 624 - DNA, 1161 bp, unidentified
  misc_feature 1..1161: note = JGI11876J14442_10022172 JGI
  source 1..1161: mol_type = other DNA
atgaatcgtgttccagtaatcagtcaagaaggaaagcctctgatgcctaccaagccgtctagggctagacggtgggtcaaagaaggaaaagccgtggggaagtggtcagacctgggcgtctattatgtccaactaactacaccaccatcggctgaggaagcacaaccaatcgccgttggagtcgatccgggcaagtcttattccggtgtcggtatccagtccgctaaatgcaccctgctacaactgcatcttattcttccgtttgggcgggtcaagaaacggatggaaactcgcgccatgttacgacgggggcgacgagggcgacggattaaccgggatgtcccattcaagcagcgtaaccatcggcaatgcaggttcgataatcgcaaacaatgtaagcttcccccatccattaaagcctcacggcaactggagttaagggtagttacggagttggtaaacatcttcccggtggcagcgattggttatgagcaggttaaagccgacatagaccagactaagcgcaaacgcgccaagtcgggcaagggcttctccccggtgatggttggtcagaattgggcaatatcccagatgggaaaaatcgcccctgtctacgtccgacatggttggcaaaaggatgggaacggtacatcccaactccgaacccaactagggctagagaaggataaaacgaataagtccatagctaaaccggagacccacgcagttgatggagtggctttagcttgtgggtatttcatcaaatatgtcccgttcactggctctaactcccatggctacacccacaagggtggcgttaccgtgaccccttccccgttcaaaattatcacccgtcctggtgcggtgaagcgggggaaagagtatgggtttttccgtcgccaattgcactttgaagtaccggataaatctggagtcaggaagcgcaaaggcggaacaatcacaccatttggagcaaggattggtgatttggtcagagcagagaaagctgggaagtcttacatcggctacgttggtgggtttaccgataccaaaaagtctcagaaggtttctgtttgtgactatacctggaaacggattgggcagtttgctcctagcaaagtcgagttaatcaggagaaataacggtctatgcgtagcgtaa

SEQ ID NO: 625 - DNA, 212 bp, unidentified
  misc_feature 1..212: note = JGI11876J14442_10022172 JGI
  source 1..212: mol_type = other DNA
ttcatgaaccgcgccttacttcgtgaagacgcggattggcagagataacctgctccgaagtcatgaatagggcatgagttggtaggggataatcacttccgaacgcttctctagttcggactccatgtaggtctaggaatctctaggcactgggtcattccaggacacacccctaccaatgccttaagagacgaaaacattacacgagtgga

SEQ ID NO: 626 - DNA, 1353 bp, unidentified
  misc_feature 1..1353: note = Ga0209616_1000698 JGI
  source 1..1353: mol_type = other DNA
atggtatttgttttagacaaacataagaaaccgctaatgccgtgttcggagaagcgcgcgcgacaactattgcaacgcaaacgtgcagtagttcacaaaatgcagccattcacgattcggttaaaagaccgcatagtagagaaaagtcaattgcaaccacttagattaaaactagattcaggcagtaaaattaccggctttgcggtgctccgggaatacggcacagagaaatctgtggcaattctgatgggagaactgcatcacaagcctggaataaagaccggtttagataacagaagagctcttcggcgcagccgtcgaaaccgcaagacccggtaccggaagccaagatttatcaatcgcacccgtcgacaaggttggctaccgccatcgttgcgggcaagagttaatcaaaccctaagtgttgtaaccaagttaagaaacgtgctaccgataatcacaattagcactgaacatgtcaaatttgacactcagctcatacaaagcccaaatatatccagtatcgaatatcagcagggcgaattgttcggctacgaagtcaaagagtacctgctggaaaaatggagacataggtgcgcctactgtcacgaaacaaatgtacctttacatgtagaacatgttataccacgaaatcctaaacgtggttgtaaaggcacaaaccgcatatccaatctggccttggcatgtaagccatgtaatgatgcaaaaaacaacctacagcctgtagaatggttaggacaattaatgtgcactaaaaaagctatcgaccaaaagcgggcaaaaaacttgcctgaagtactaaaacagctaaaaacccccttgaaagacgctgccataatgaacataacccgatgggagctattaaattgccttaaaaaacttggcctatccgtagagagcggcaccggcgcaaggacaaaaaagcagcgtattgagcataaacttccaaaaacccactattatgacgcttgttgtgttggccctagtactccgcaaaacctcgtaactttacaaaaatatgtactaatttggaaagcgataggcagaggcacaagacagatgtgtaacacggacaaatacggctttccaaaaggccacagacaaaacaaaaagaatcatttcggttttcagacaaacgatatggtcaaagcggatattcctcgcggtaaataccagggtaatcacgccgggcgcgttgcagttagaactagtggatattttgatattaaaaatattactggcaaccgtatttgtcaaggcatcaaccacaaatattttcaattatcgcaaagagctgatggttggcagtacgaaaaaataaaaataacatag

SEQ ID NO: 627 - DNA, 270 bp, unidentified
  misc_feature 1..270: note = Ga0209616_1000698 JGI
  source 1..270: mol_type = other DNA
gtcatagaccccacgcctaaaggcggaggcttgaaaaagcccaactatgaccagcctaagcccgccggttgaggcggactacgttgggaaggtgcatacccaagaatgcttctccagttcttggcactatggaacggacgttaaaaacgagcaggggcacagcaagtggtgcgttcgttgtagtcaacccttcccaacattggcaaggagagacgggataaccgcgttactagccccttacggggctccgaaaggagtagttagtttatg

SEQ ID NO: 628 - DNA, 381 bp, unidentified
  source 1..381: mol_type = other DNA
atgtccaactcaactaattatgtattcgtgcttgacgcgagtaaaaaaccattaacaccatgcaaacctggcatggcaatgctgacgaatcaacccctaatggtaacagcaatgggacatggttgcaggcagatggtacagatggacaaatatggttttccccgcaagggttatcaggctaaaaaacctgtaccaggttggaaaactggagatatgatcaatgtcgtcaaaggcaaaaacattggattaaagggagtcaggattaaaactgtcagaagtaaaggtaattttgacatccgacatggggataaaatcttgtctgtatctcgaaatcatatccaacccattcacagacgagatggatacaattactcgttttga

SEQ ID NO: 629 - DNA, 260 bp, unidentified
  source 1..260: mol_type = other DNA
tcgaagactaaccacaaatctaatcaaagcgctcaaatcgcttaaatggttagtccagcctacttagcaataagtaaacgttattttggtcacaatacgtcagaatgcgtggccagttctgacctctattgtttggcattaaacaggtaaagagatttgaaaaaccagtgtgtcgaacttaacaagccaaaataaccaggcgaggccaactttacactttttgtaggagggacgcaaaaatgtccaactcaactaattat

SEQ ID NO: 630 - DNA, 255 bp, unidentified
  source 1..255: mol_type = other DNA
atgtccaactcaactaattatgtattcgtgcttgacgcgagtaaaaaaccattaacaccatgcaaacctggcatggcaatgctgacgaatcaacccctaatggtaacagcaatgggacatggttgcaggcagatggtacagatggacaaatatggttttccccgcaagggttatcaggctaaaaaacctgtaccaggttggaaaactggagatatgatcaatgtcgtcaaaggcaaaaacattggattaaagtga

SEQ ID NO: 631 - DNA, 260 bp, unidentified
  source 1..260: mol_type = other DNA
tcgaagactaaccacaaatctaatcaaagcgctcaaatcgcttaaatggttagtccagcctacttagcaataagtaaacgttattttggtcacaatacgtcgggatgcgtggccagttccgacctctattgtttggcattaaacaggtaaagagatttgaaaaaccagtgtgtcgaacttaacaagccaaaataaccaggcgaggccaactttacactttttgtaggagggacgcaaaaatgtccaactcaactaattat

SEQ ID NO: 632 - DNA, 1185 bp, unidentified
  misc_feature 1..1185: note = Ga0256832_1033259 JGI
  source 1..1185: mol_type = other DNA
atggaagtttttgtaattaataagcatggcgaaacattgatgccatgtagctcaagaaaagcaagattattgcttgaaagtggcaaggctaaggttattcgccgtagtccatttactatccaactaattcatggttcaacaggttataagcaggatttaaccttaggtgttgatacgggtcattcagaggttggattatcagttgtatcaaagaccaaggaggtattttcagcagtagcgaagatgcgtaatgatatttcatcgaagatggatacaagacgcatgtatagaaggcagaaaagaaacaagcttagataccgtaaaccaagatttttgaaccgctctgccagtacaaaaaaaggacgtttagccccatctgtacaatggaaagtggacgctcatatcaatttaattaatcaacttaaatcattactaccgataaccaaggtggttttagaaacgggtacatttgatatggctaagataaagaacccaaacataacaaatgagcaatatcaaaaaggcgttcaatatggttttgagaatgttaaggcttatgttttaagtcgggatggctatcaatgccagagtaaaaagaaaggatgtagcgacagattacaagttcatcatattaaatatcgctctaatggtggttcaaatgcacctaacaacttgattactttatgtgaaaaacatcataaagcattacacgctggcaagtttgagctagatattaaatctcataaaagcttaaaatcagcaacgactatgaatattatccgcagtcgattattacgctattttccagaagcgattgagacatttggctacatcaccaaagcaaaccgctatcagcataatattgaaaaaacgcatactaatgatgcgtttgttattgctggtgggtcaaagcagaagagagcagaagaaagaaccatccactttaagcgtaaaaataaccgttcattacaaaagaaccgaaacggctacgcccctgctattcggaggcaacgatatccgattcaaccaaaagacttggtcacatttgagggtagacaatatcaggcggttgggatgcaaaacaaaggggcttacctgaaaatgacagatggattgagaaccatcgttaagtccgtgaaaaaaattgaaatagtgtttcatcaaaaaggtgtgatttacgtatga

SEQ ID NO: 633 - DNA, 286 bp, unidentified
  misc_feature 1..286: note = Ga0256832_1033259 JGI
  source 1..286: mol_type = other DNA
gtcaactacccctcagctaaagacagaggggcttgagtcgtgagatttaagataggtcttcggattgaataggtgattaggctaagttcctcgagaactacgttgttttagttatgacacccttggatgcctcccaagtctgaggctctgtctccaagtattaaaagacctcaacgggtcggtgtgcttggattgacaagcttttacaacattgccgatgggaatcaacctcgcaagaggaatcgttcaattttaacgattaaattttaaaggttttaaaatggaa

SEQ ID NO: 634 - DNA, 1278 bp, unidentified
  misc_feature 1..1278: note = Ga0105041_100006 JGI
  source 1..1278: mol_type = other DNA
atggcagtttttgtactaaatacggataaatcccccttagctccttgttcagagagaagggccagaaagttactagaacagggaaaggctgccatatggctacatagacctttcacgttgatcctaaagtctgtggctagttcacctgcagctgcccattgtcctgcaattgagctacgtatcgacccaggtagcaagttcacaggattcgctctagtcaacttggtcacaggtgcagctgtgcactgcgcagaacttcaacaccgaggttacaccataagttgcgacctgactcgaagatcgcaacttcgccggagccggcggtccaggaaaacacgctaccgaccggctagatttaataatcgaactaaacccgaggggtggctcgcaccatccctcgaacaccgtgtcttgacaacgttgtcctgggtaaaaaagtatttgagactatgcccaatacaaagtatcgccgtagaatcggtaaaatttgatacacagaagttgcaaaatccagaaatatccggagtggaataccagcgaggcgaactgtttgaatacgaagttcgtgagtatgtattcaacaaattcaatcacacctgcgtatactgtaaacgctctgctgtaccgctgaccattgaacacgtgaccccaagatctttagggggatctaatcgagtcagcaacttagcggctgcctgtagaacgtgtaatcagaaaagaggtaataggcccctggaacaatttacggacgccgaaacaatcagcagaatcaaaaatctgacccggtttccactgaaagatgcggcggccgtaaactcaactcgcaatgctctagttaagcagctatcgtctataggcaaacccgtgtcgtgctggaccgggggaagaacaaaatacaatcggactcaagctgaactgacaaagacccattgctacgatgccgcgtgtgttggggacaggcctgccaaaaaagtaccaaaagtttggttaacgatcaagtctatgggcaggggtaatcgccagatggtggctaacgacaaatttggcttccctaagaagcaagctcctcgacgaagatctaagagcgtccatggcatgtgtacaggggacatcgcaaaaacccctgttggtacagggcgcataaccggtgctagaacaaaaggaagcttttccctgaaagtaaagggaaaattggtatctatgacaccccgtaaactaaaagtggtacaaagaggcaacgggtacgagttcggtcaatcctgcgcagaagctgaatga

SEQ ID NO: 635 - DNA, 382 bp, unidentified
  misc_feature 1..382: note = Ga0105041_100006 JGI
  source 1..382: mol_type = other DNA
accaagccataatcccttcctctttctctaccctttgcaacaacctagcccgtggcaggggtacacacggactcctacagccataatcccttcctctttctctaccctttgcaactcgtcccaaaaaactctttgactttacgcgatattacagtacactctgcgagaggttaattgtgacccgactcagtttgaggtaactcaagctacgtactcgaaaaaccaaagactcacctaagggtgccctaccagcctttagctctgtgattcggaatcaatgaccgcttgcaaaggggcaggcgtaatgatccggaatcggtaaaatcgagatacattgtctaggtagacattacaaggccgttattggcattttattatggca

SEQ ID NO: 636 - DNA, 597 bp, unidentified
  misc_feature 1..597: note = Ga0370539_00069 JGI
  source 1..597: mol_type = other DNA
atgtctaactttgtctttgtagtggataccaatcgccaaccgctctcactctgtacagccgggatggcaaggtcattattaaaagcgggaaaagcagcggtatttcgccgctatccctttacgattattttgaacaaggcagtggtcactgagcacttcgacaagctcagtgttccaccttgccgaagtgtggtcactgacccttcccttcgacacgctcagggcaatgcgactgcccttcggcaagctcaggaaccacgctcaggccgaagtgtcgattcgcttgaagtgctgacctcaaaaccgttgctgattgcggcaaaagggcatggaacccgccagatgtgcggcactgataagtatgggtttcccactcggcatcgctcacggatgcagattcataaaggctttcagactggagaccttgttgcagcaacagttacaacaggtaagaaaatcggcttctatgtggggcgggttctttgccgcgcttctggcaattttgatattgccacttcatcgggaagagtggctggtattagccacaaatattgccaagcaattcacaaaaaggatggttactcctatggattctga

SEQ ID NO: 637 - DNA, 236 bp, unidentified
  misc_feature 1..236: note = Ga0370539_00069 JGI
  source 1..236: mol_type = other DNA
gtagactgcccgattctagcgggatacaagccacaacatgaccagcctaagaccttcgaggtctacgttttcacgcgtcatgatacctacaaatgcgtcgctagtttgtagctctatcgttggttgttaaacatctgtagtgggttaaggaagtgcagccaacacaacaaaccttgaaaaccttggcgaagcgaacgttacgagcaattagaggagacgcaacaatgtctaacttt

SEQ ID NO: 638 - DNA, 999 bp, unidentified
  source 1..999: mol_type = other DNA
ttggtagctgaagaaaatcaaggcttgcaattaaaaattgaccctggttctaaacaaacaggctttgcaatggtcacccaaagtgaagaagttatctttgcaatggttttaatccatcgtggtcagcaaatcaagaatgctttggaacgacggcgaactcttcgtcgaggtcgtcgtcatcgaaaaactcgctaccgtaagtgcagatttttcaatcgcaaacgaaacaaaggatggctgccaccaagtttgaggcatcgggttttgatatcatgtccgttggggcgcgtttgtgtaaaagttagcgtggatatctacaggaaatttaagtttttttcttgctcaattgccttcctgtttgttgcctgttgcttgttgcctgttgccttcctgtttgttgcctgttgcctaccttttctatacaataccgatgctaccggacatgatatgactgtagaaacttgggttaatagactttgtaaactaagtccgataagtagtttgactatggaattggtcaagtttgacacccagaaaatacagaacccagaaatttcaggagttgaatatcaaaaaggggaactatttggtgatcatgtccgggagtatctattagagaaatggggtcgattatctgctgattgtggggcaatagatacgcccttagaagttgaacatatagttccacgctcaaaaggtggtagtaatcgggtgtctaatttagccatagcttgtcatcaatacaaccaaaataagagtgctatggatattcgggaatttctcgaaaataaaccgtctatactagctcatgttctaaaggttgccaaaacgccattaaaagatgctgctgcagtcaacacaacccgcactcaaatctttgaaactttaaaagcaaaaggtttgcgtgtgattaccggtagtggtgctggtactaaatataaccgttgtcgcttgaatttgccaaaagaacattggtatagatgctgctggcgttggtga

SEQ ID NO: 639 - DNA, 261 bp, unidentified
  source 1..261: mol_type = other DNA
tttaggactaaccacaaatctaatcaaaacgcaaattttgtgtttaaatcgttagtccagcccacttttttcaagtaaacattattttggtgacaatacgtcgggatgctaggccagttccaacctctattgttcggcattaaacagccaaagagatttgaaaagctagtgtgccgaacgtaaaaagtttaaataaccgggcgaggccaactttacatctgaagaaattggtagctgaagaaaatcaaggcttgcaattaa

SEQ ID NO: 640 - DNA, 1383 bp, Acidithiobacillus ferrivorans
  source 1..1383: mol_type = other DNA
atgctgaataaagtgtttgttttggacacgcatcgaacaccgctcatgccctgccatccggcccgtgcgcgggagttgttacgcaagggcaaggcgtcggtcttccgtcgctttccattcacgatcatcctgcgggaacgggttggcggagacaggcagaatatcaccgccaaatcggatcccgacagcaagacgaccggcctggcgttggtagcggcgttcaagcgaggactcaccgtcatatgggcggctgaactggcgcaccgcggtcagactatccgtgccgccctggagaaacgcagtaatcagcggcattcccgcaggaaccggaaaacacggtaccgcgccacgcgtttcgatcatcgcactcggtcggcgagatggttgccaccatccattgagcaccgcgtcttaacggtcatcacctggttcaaacgcctcatgcgctgggcgcccattactgattccagcatggggcgggtgcgcttcgacatgcaggctatggagaactcggagatatccggcgccgagtaccagcaggggactttgttcggttacgaagtgcgggagtacctgctggagaagtggatgctgacctgtgcctattgcgatgcccagaatgtaccgctcgaaatagaccatgttcacccgcgcagtatgggcggcagtgaccgggtgagtaacctggcgatagcctgtcacgattgcaaccaggcaaaggacaatgctcgactatcggcatttttgcagacggacaaaggcagacagacaagacagcaggtttctgctgcagtatatgctggcaacgaccccaaaaagcgcgcggagcgggaacgtcacgagtcgaactggctggagcgggtgctgaagcaggtcaaggcaccattgcgggatgccgcagcggtcaatgtcacccgcaacatcctgttcgagcgtttgctggaactggggttgccggtggagacggggtccggcgggcgcaccaagtttaaccggagtcagcagcattatccgaaagcgcactggatagacgcggcttgcgtgggtgaatccggagcttcagtttgcttgaatcttgaattaaaacccctacagatcaccgccaccggtcatggtcgcagacagatgcaaaacatgacgaagaaagggttcccgagaggaaaggcaaagtcccggcagaagacgtattttggctttcagacgggagacatggtgcgggctattgtgccaaaagggaggttcgctgggaaacatgttggccgggtggcgtgcaagaaatcaggaaacttcaaactcaaggtcggcgggaaagagttggatggtgtttcatggcgtcactgcactccggttcatagaggtgacggctatgcctacacacattga

SEQ ID NO: 641 - DNA, 263 bp, Acidithiobacillus ferrivorans
  source 1..263: mol_type = other DNA
agcgtcatgaacaccatggataaatccaggggcttgtaggagccctgattcatgaccagcccgagaaagctgaaaggcgatctacgttcaaggtgtcatggcactccgggatgcttgccagttccggactctgccgttgccaatcatgctgtcgtacctgggggtatggcgaaggcgggcaacatgacaagcaccatggacatgggcgaggcacacgttaacggcgcaagccgatatttacaggagtaatccttatgctgaat

SEQ ID NO: 642 - DNA, 1254 bp, unidentified
  misc_feature 1..1254: note = Ga0209318_1005124 JGI
  source 1..1254: mol_type = other DNA
atgacaaataataaaataaaagaatatagttttgtattggataaaaataataaaaaattatctcctacacttgttaataatgcttggtatcttataagaaaacaaagagcaatattaatttctaagtatccaatggttattaaaattaaaaaagaaattaaaaatgatgaaaataataatgataaatcagagtttgtttgtggtatagatgatggttctattcacgttggaattgctataattcaaaaatgtaaaaataaaaataaggttgtatttaaaggtattattgaacaaaggcaggatgtaaagaaattaatggaattaagaaaaggatatagacaataccgtagaaaacataaaagatatagacctgctagattcaataatcgttcatcttctaaaagaaaaggtagattagtaccaactattaaacaaaagaaacaagcaatattaagagtagttaatcaactaaataaatggatagatatacataaaataatattagaagatgttaaaattgatattagagcattgcaagaaggtcataaattatataaatggcaatatcaaaaaagtaatagattagatgagaatttgagaattgctactttaatgagagataattatacctgtcaagaatgtggtaagaaagattgtagattagaagcacatcatataattgctagaagattaaaaggttctgattcaataggtaatttaattactctttgtgatatttgtcatgataaaactgaaggtaatgaagaattatttattgaaaaatatcaaaataaaataaaaggtaaaaatattagattcgattatgttcaacacgttatgcaagggaaaaattatttaaaacaggaattaagtaaaatagcagaattagaattgactataggaagtgaaactgcaaataaaagaattgattggaatattaataaatctcatagtaatgatgctattgtgatttgtggatttaaacctgatacatgtaatataaaagaatggattattaaacctatgagaagacaaagtaaagcaaaaacagataatgtattaggtataaaacatagagatttagtttcttatacatttaaaaatggagaaacacatattggatatgttacagctttatatccagaattgaatgcattaaattttcaatcaaaaacaaaacattgtaaaaaagtaaatgtgaagaaatgttatttactttggaaatacaacaaaatttattggttgtgtgcataa

SEQ ID NO: 643 - DNA, 305 bp, unidentified
  misc_feature 1..305: note = Ga0209318_1005124 JGI
  source 1..305: mol_type = other DNA
tagacaaatgtatatagtagtggacatatatatatctattatatacagactattgagtgtgtttcaagcctaagtgagtaccactaacgaaagttatttgtacgatgaactacgattatataaatgctaaaaacacacctttagatgtaatcttcagtctattgctctgtgagtacaaaggatgaccgacttctaatgtcctgaagtcaaacaccgaaatacatgtgcattatattgtctttggcaagaagaaaaattctccgaaaggatggttagtcagaaatgacaaataataaaataaaaga

SEQ ID NO: 644 - DNA, 1437 bp, unidentified
  misc_feature 1..1437: note = GENOME_ACESSION: mgm4743560.3 MG-RAST
  source 1..1437: mol_type = other DNA
atgcagaaaaacaaaacagtactggtaatcgggaagaacggccgtggccttatgccatgcacaccaagaaaggccagaattctccttaaaaagaagaaggccaaagtagtaagaagaacgccgttcacgatccgattgctgtacaagacaggctgtgcgatacagccaacaacgctgggcgtagatactggttcccagcacatcggcattgccattgtttcagacgacattgtctttagcaaaagcgagtacgaactccgctccacaatggaaaaacggaagctgatggaaacaagaaaacagtatcgccgtggcaggcggtatcgcaagacacgataccgccacccaaagttcctgttccataccaaacggacatatgtggaaaagccaatcaagcggaacagtcatctgacacactggaagaaggaaactgtttcctgtatgtcaagccgtcagacaggctggcttccgccgtccgtgcagagcaagtgtgatcatcacattcggattatcaaccgctatatcgaagccctgccgccaagcacaagagtcgtaattgagattggccggtttgacatggcgcacatgctgaatccagatatccatggtgaggagtaccagcacggtctgctgtatgagtttgagaacaagaaggcttatctactcaagctgtacgactacaagtgcccgatttgcagtaagaaatttggctcaaagaggtctgacggtacaactgtcaaagcatgtatgcaccatgtcctgtaccgctcaaaaggcagtacggacaatgccagtgttctgattcctgtatgtgatcattgccacacggcagaagctcatcaggaaggcggaacactggacaaattgcagaaggctgctgccaagcagaacaacggtatcagaggcctgcgtgatgcaactatgatgaacgttgttgccaagcgtcttaggatagcgtttcctgatgcctgctacacctatggcaacatcacgcatgccgacagagaaatgatgcgtttagagaagagccatgctaacgatgcggtagcaattgccaagcatcttgatataagggtattcggcgactacacaatcaatgattgcgattatacgactctgtataaacaggttcgcaagaagaagcggtcactgcatgaggctaatccccgcaaaggcagaaagcagccaaatcgtgaggcaaaacgcaatgcaaagaatacaaaacagcggtttggcatctgtctgtttgacaatgttcgctatgctggaaaatcaggcgtagtaacaggcttcaactcttctggatgcagagcaacgttgccggacggcacatatcttggtgcgactgcagcacagaaatcaccatcattgcggccatcgcaagttgtagttctgcatcataacaacaactggcttgaaaggaggctagtcatatga

SEQ ID NO: 645 - DNA, 254 bp, unidentified
  misc_feature 1..254: note = GENOME_ACESSION: mgm4743560.3 MG-RAST
  source 1..254: mol_type = other DNA
acaagtaaccgagcaagtcaggacttccagtcctgacttgcgaagttgcaagtagagcacgcgtaagagcgtgcagatgactagcctcagcagagaacacaacggctctgctatgtccgcaatgtgatgatgcaaaactacgatgccctaatagcgcagcatccaggcaacgtataccgcacaaacgagaatgtgcatgcgacctgatttccaagcattgcgaacattggcaaagggcaactgtaagtaactgg

SEQ ID NO: 646 - DNA, 888 bp, unidentified
  misc_feature 1..888: note = GENOME_ACESSION: IMG_2199352033_$F_2199352033 JGI
  source 1..888: mol_type = other DNA
atggctactgagggcagagtattcgtgctagacacaaaccgcaaaccacttgcgcctaccatgcccgcaagggctaggcgcttgctcaatgcaggcaaggctgccgtgtttaggcgcgtgccattcacaatcatcttgaagcgcgcggttgagcttgatccacagcccgcgattgaattcaaggtcgatcctggtagtcgcacatcggggcttgccctcattgggaatttccccaagcaagggcgggttgtcctgtgggcggccaatctgcatcaccgcgggcaggctatcaaggacaggctcaaaccccgccgctcacttcgccgtagccgtcgtgctcgcaagacgcggtatcgtgcaccgcgatttgataaccgaacgcggccgaaaggttggttaccgccgtctttacaatcgcgcgtgcttaacgtcgcttcgtggtttgagaagctacttgatagggcgcagattactgagtgccacatcgaaaccgtgcggtttgacacacaagcattgcagtatcctgagatatccggagttgaatatcagcaaggcgagctcgcgggtcacgaggttcgcgagtacctgctagaaaaatggcagcgcaagtgcgcctattgcgggaaggagaatgtgccattggagatcgaacatattaacccgcgttccaatggcggatcaaaccgagtgagcaatttaacgcttgcttgccatgcgtgtaatgagaagaagagcaatcgcgatgtgcgagagtttctggagaaaaagcccgatgcgcttaagcgcatcttgacgcacgctaaagcaccacttaaggatgccgctgcagtaaatgcaacgcgctacgccatagggaatgcaatgcgcgctattgggctaccaacttcg

SEQ ID NO: 647 - DNA, 275 bp, unidentified
  misc_feature 1..275: note = GENOME_ACESSION: IMG_2199352033_$F_2199352033 JGI
  source 1..275: mol_type = other DNA
ctcgcacatccatgtgttcgttcgctaatcattttcgtcaatgtgctccggcatattgactgctcaaccagactcaggcggatggccgcctacgttatgcagagagctcaagaacacactccggggtgcttaaccagctccggaccctgtaaccgaatcgttaaacagtgcggaccgtgggcaacggacagtgcggtttgggtgcgctgatgcataacattgtcgaggttaccattacttagttgttgcgagagctttatggctactgagggcag

SEQ ID NO: 648 - DNA, 1281 bp, unidentified
  misc_feature 1..1281: note = Ga0272428_1021842 JGI
  source 1..1281: mol_type = other DNA
atgagcaacgtgtttgttttagataccatgcatagaccacttgacctgatacacccaggactagcacgtaagttattgaccagtggcaaggcggcggtgttttgtcgctatccgttcacgatcatactcaaaaaagaagtggaggaaccaacaatacacccgttacgcatcaagcttgacccaggcagtaagacaacaggcatagcgatagtcaacgatgcatcgggcgaggtcgtatgggccgcagaactggcgcatcgagggcaagcaataaaagacgcattagagagtagacgtgccatacgccgttcacgtcggcagcgtcacacacgctatcgcaagccacgctttgacaatcgacgccgcaaagagggttggcttccaccgtcgctagagagtcgtatccataccatcctgacatgggtcaaccgcttatcgaggtattgcccaatagccgcaatctcacaagagttagtcaagtttgatatgcaacttatgcacaaccccgaaataagcggcgtagaatatcagcaaggggaattacaaggctacgaactgcgagaatacctgcttgaaaagtgggggcgagtgtgtgcctattgcggcgtgaaggatgtgtcattgcaaattgagcatatccaggcaagagccaacggcggttccaaccgtgtgagcaacctcacacttgcgtgtgaaccatgtaatgtcaagaaaggaacacaagacatacgggacttcttgaagggcaagcccgatacgttggaacgggcacttgctcatgcgaaagcccccttaaaggacgcggcggcggtgaacgcgacacgatgggcattgtacgaacgcttgaagcaaaagggcttacccgttgagacaggaacgggaggacgcaccaagttcaaccgcatgacgcaaggcttagacaagcagcattgggtagacgccgcctgtgtcggggcgtcaactcctgtcctcttgattgatcgggtacgtcccttgctcatcaaggcaacagggcatggcaaccgtcagatgtgcttgatggatagatacggcttccctcgcactggccccaaatccgcgaaagtggtacacggttttcaaacgggagatatggtcaaagccgttgtaccaacgggcaagaaagtggggacgtacatcgggcgcgtcgcagtacgggcaacgggcagcttcaatgtgacgacgaaaacacatgggacggtacagggcattggctataaagcttgtgtaatactacataaaaccgatggctatagttactaa

SEQ ID NO: 649 - DNA, 242 bp, unidentified
  misc_feature 1..242: note = Ga0272428_1021842 JGI
  source 1..242: mol_type = other DNA
gtcaagaaccccacgcagagaatgcgggggcttgtgaaagcaagcctgtcttgaccagtctcagggaaacctacgccagggaagaatgtataggtacgtcaggatgcagaccagtcttgaccactacggttgggaattaaacagtctgtcggggtgataggcagtgttgccaacaagaaaccttcccatagcattgacgaggtactcattacctccgaaaggagaggctcatcatgagcaac

SEQ ID NO: 650 - DNA, 1494 bp, unidentified
  misc_feature 1..1494: note = Ga0310134_003633 JGI
  source 1..1494: mol_type = other DNA
atggtatacgttatatcaaaaaacgggaaacctctcatgccgacaaaacggcatggcctggtgaggatactgctaaaagagaaaaaagcgcgtgtagtgcagcgcaagccgttcactatacagctgttgtacgacagcacgacatacacacaagacataacagcggggtttgacacaggccgagcgtaccagtcaatcacagccgtcaatgcccggacaggcgaggttttgtactcgtctgtgctggaaacgcggaacaaggaagtacccaagcttatgaaatcgcgcaaaatgtatcgggcgataaggcggcacaacaggcggatgaaaaaagtaagacgcgctgtaaggaataaaacatacttcagagcgccgaagaaagtagtctggcccggcgcaaaagagccgataaccgccaagtatatcaaacccaaagaagcgcggttcaataacaggaagaggccggaaggctggctaacgccgacagcagtgcatcttttgcggacccacctcaactattttaagaaggtcaggaagatactgccgattaagacgctggtgctggaatacggaaaatttgacattcagaagctagagaaccctgatatcaaaggtgccgaataccaacgcggcaaattgtacggctacaataatctgcgggaatatgttatagcggtacagcagggcaaatgcctgttatgtgaaaagaagccgatagaacacctgcaccacgtaatgccggggtcaaaagaaggcagcgacacatacaaaaacatagccgggctgtgcagcaagtgccacgcaaaggtgcacacaagcccaaaagcaaaagaaaagctggccgagaaagctgccggcactgcaaaagaatacgccgacacgagtatactcaacataatcatgccatatctgtacagcgagctaaaatcgatgctgggcacggaaaacatagcattatgctacggctacgaaaccgaggcagccaggaaatctttcgggctggctaaaagccacagcaacgacagctatgcaatggcgcttatggcaatcggacaggcgtccaggatagagaagatagagccgtaccggtacaaacaatacaggcgtcacaacagggcgttttgcgatgcccagcgcgacaggctgtacaagaaggacgggaagatagcggcgaggaacagacgccgcaggacggaacaggaaggcatctctctggcggaataccgcagcgagcttataactgcgcttggcaagaagattgcgacgagagagatatcaaagctcaaggtgtatagagcagtcaagaaaaagagcacgtcaatcaaagatgtgctatttccaccaggatgcgcagtcaactacaaaggacaaagagcagttgtcaaaagttttttcaacaaaggcagctcgctgatattggaaggcatttctgggtatgtgccggccaaggactgtcagcttattactaagaaagcggggatagtatgtctgtga

SEQ ID NO: 651 - DNA, 212 bp, unidentified
  misc_feature 1..212: note = Ga0310134_003633 JGI
  source 1..212: mol_type = other DNA
gtcaactacccccgtctaaagacggaggcatgaggtttcgtaaccaagtgttgtacctgcgggtacagtagttgaacaggcggcgatgcggctgggcactccaggatgccactcccagtcccggacactgccgacgagccgcatcaagccgggggagaccaaccggctaacgatagccgagcaattacctaaaaagaggtgcaaaggaaatg

SEQ ID NO: 652 - DNA, 1239 bp, unidentified
  misc_feature 1..1239: note = Ga0247610_10094209 JGI
  source 1..1239: mol_type = other DNA
atgatatatgtattgaataaagagggtaaacctcttatgccgacttctcggcatggcaaggtaagacgtttattgcgtgataaagccgcagtaatagtcaattacaacccttttactattcaattaactacggagacaagaaatgaagtagatgaagtttcattaggtgttgataccggttatagatatattggtttatcagccacaactaaagataaagtcttatttgagtgcaaagcagaattaagaattgatttagttgacaatttaactgctagaagagaattaagacgtaccagacgcaatagaaagttaagatacagaaaacctagattcttaaatcgtaaacgtgaaaaaggatggttgcctccgtctattaaaaacagattggaatgccataaaacacttattgcaaaagtacacaagtttttgcctgtaggcaaaactattgtagaagttgcaaatttcgatattcagaaaatcaagaatcctgatataaaaggtgctgagtatcagcagggtgatcaattaggtttttggaatgtacgtgcctttgttttatatagagataattatacttgtcaatgctgttttggtgaatccggtaatgataaattacaagctcatcatttaaaacaaagaaaagatggaggaagtaatgctcctgacaacttaattactttatgtgacccatgtcataatgatattcatgctaaaaggaaaacattaaatgttgaccctaaagggaaatcttataacgcagaaacccttatgaatacattgcgtaaatatctgtttagagaccttaaagaaatatatcaaaatgtaagttttacttatggttatataacaaaatcagtaagaattgaaaataaattagaaaaagaccataatgtagatgctagatgtatttcaggaaatcctttagcaaaacctaatggtatttacttatttaaaaaggtaagatgtcataatagacaacttcataaatgtaaaacattaacaggtggaataagaaaacttaatcaatcaccttatatagtacatgggttcagactgtttgataaagttaagataaataatcagataggatttatatatggcagaagacaaacaggatattttgctattaaaaatatagatgggaaaactatttcaaaaagtatttcatataaaaagttaaatctcgttgaaaaacgaaaagggtggattgttgattttaaacaatctgaattgtaa

SEQ ID NO: 653 - DNA, 335 bp, unidentified
  misc_feature 1..335: note = Ga0247610_10094209 JGI
  source 1..335: mol_type = other DNA
attgacatagagtacaagtgaaacgcatacaagtgagcaaagtaactgtatataaataaactttacaatttgtttatatcttttacatagtctaagtgatttcactgaaaagtgaatgaactacgttatgagagaatgactgtaaaaagtcaaatagttaccttcggatgttcatctagtctgaagctctaaggtgtatgattaaacagtcggtattgctgacagtgttgtacacaacaaacctctcaataacattgacgaaggtgcttatcagttttgcagtatctggctttgtgaaagcataaactgcaacctattttaaggaattttaaatg

SEQ ID NO: 654 - DNA, 1323 bp, unidentified
  misc_feature 1..1323: note = Ga0265292_1000080 JGI
  source 1..1323: mol_type = other DNA
atgaaaaccacaaacagagttttcgttgttgacacaaatcataaaccattgacattatgccgacccgttagggcaaggcaattgttatgggacaagaaagcggcagtactgcgccgatatccattcacaattattttgaaagaatcaaaactaaatgctgttgttaatcccgtaaaggttaaggttgatcccggtgcaaatactactggaattgcgttagtagacataaaaaagaatattgttatattcgcatcggaacttgaacaccgtgggtttggaattaaatcttcaatagattcccgccgctcacagcggcggtctcgtcgcaatcacaatctcagatatcgcgaggcaagatttgatcaccggaccagaacagacaaatggttgccgccgtcattacggcatcgtgtagaaacaacaatgacctggattaatagatttatgcgatttgcacctattgaatcgcttgctatagagcacgcgaaatttgatattcagaaaatgcagaaccccgaaatatcggtggtagggtatcaacaaggcgaactatttggctatgaagtcagagagtatctacttgaaaagtgggggcggaagtgtgcatattgcgggaaagagaatattccgcttgaagtagaacatatagtttctaaaagcaaaggcggaacagacagagtgtctaatctaaccatttcctgccgagaatgtaacgagtcgaagggcaatcatcctgtagcagaatttttagcagataagtccgatgtccttaaacgcatcttagcccaagccaaatctccgttaaaaagtgcggcaataacccaagccacccgtaatgttttaacattagcgatgtgcgataccaatcttatagtagaaaccggaactggcgcacaaacgaagatgaaccgggtaaagttgggatataaaaaagcccattggattgatgctgcgtgtgtcggcagttccggcgtggcagttaatctgaatgtcggtatgattccgatgtccattaaatccaaaggacatggcaatcggcagatgtgcggaacggataaattcggctttccaataagacatcgctcaggacaaaagaagtattttggttttgagactggcgatatagttaaagcggatgtcctcgccggcaaaaaaaacggaagatatattggacgagtgctgtgccgtaaaagtggctcatttgatatttcaacggctatcggtcgaattgaaggaattccttggaggtgttgcaaagtagtccatgccaatgacggctatagttatagacaaggggagggagcaattcctcctcatgtctaa

SEQ ID NO: 655 - DNA, 331 bp, unidentified
  misc_feature 1..331: note = Ga0265292_1000080 JGI
  source 1..331: mol_type = other DNA
gtaatgaaccccacgacttcagtcgagggcttgtagaagctccaattcattaccagcccaagtcccggattttcggggctacgtttaattggagatggtacctacgaatgcgtgccagttcgtagcaataccgctgtttttcatgctgccgtagatgaggatacggcgaaggaggctggcgtaacaatccttttagacattggcgaggcaaacattactcccgcaagggatggaacggctgggattaacccagcaacaaactgtggttggcggggagcaatactctccgccgacttcagataaacgagtcggagtcgtaaactatcgggag

SEQ ID NO: 656 - DNA, 1281 bp, unidentified
  misc_feature 1..1281: note = Ga0257070_1000485 JGI
  source 1..1281: mol_type = other DNA
atggtttatgttctaaatcaaaacggacagcctataatgccgacatcgaaccatgcaaaggttcgtattctcttaaaaacaggtaaggcaaaagtaatccacaggtgtccgtttaccatacagttacagtatagtagcacgaactatacacaggaagtcagtcttggaattgatgcaggaagcaagcatatcggagtatccgctacaacagaaagtagagttttatatgaagccgatgttgagcttagaaacgatatagtggatttactgtccacacgtagacagaatcgcagagcaagaagaagccgtaagacccgttaccgtaaaccccggttcaacaatagagtttccgctaaaaaagaaggatggttagcaccctctgtaaaactgaaagtaaatactcacttaactgtcatagcgaaagtacataagatacttcccatatcgaaaatcgttgtggaaacggcatctttcgatattcagaagattaaaaaccctgcgataagcggtacagaatatcagcagggcgaacaattaaacttctggaatgtcagggaatatgtgcttttcagagatggtcacacctgtcagtgctgcaaaggcaaatcaaaagacaaaatccttaacgtgcatcatatagagtcgagacatacaggtggagacgcacccaataatctgattactctatgctcagtctgtcataagggacaccacaacggtactgtgcagttaccaaaaaccatcagacgtggaatgtctttcaaggatgcaacgtttatgggtatcatgcggtggtcttgctataacaaactgaaagcgatctacccaaatgtaaatctcacatacgggtatattacaaagaatactcgaattgagaatggtttaccaaaagagcattatatagatgcccgttgtataagtggtcattcgttagcggtaagcggtggcgaagttttctatcagaagaaagtacgttgtcacaatcgtcagatacacaaaagcaccataaacaaaggtggcaagcgcaaacttaatcaatgtccatatcaagtacaaggatacaggctttttgacaaagttctgtataagggacaggaatgcttcatattcggtaggcgtagggatggaagattcgccgtcaggttgctagacggaaccaaacttaatgaacagatcacatacagaaaactgagatttttagaatctgcaaaacatttcatcacagaaaggaggacgccgctcctcatcggggcaagccccgacgttcccgcggctgtttaa

SEQ ID NO: 657 - DNA, 278 bp, unidentified
  misc_feature 1..278: note = Ga0257070_1000485 JGI
  source 1..278: mol_type = other DNA
actaatacccacgggcaagcccgtggggttgtgcaaacaacccggagtgagtagcctaagtgaagtcttttgactgaactacgttaagagagaatatatagtcacctacgagcataatgcctaacttgtagctctgaggtcagtaattaaacaatcctgcggtatagggatagtgttgctgatataaaacctctcattaacattggcgaaggcgtgcaaccgctcttcagagcgagtaattaaatccttatgggatttggaaaggagcgaaccttatg

SEQ ID NO: 658 - DNA, 1449 bp, unidentified
  source 1..1449: mol_type = other DNA; note = uncultured Erysipelotrichaceae bacterium
atgtggaccccgtccataaggacgagaacccgtaacccgtttggggataaggacgtgcgtaagcacacaactttacagtacaggaggaaggcatctgccatgaaaacagtatttgttattgcgaatgacggcacacggctgatgccgaccaatattaaacgtgcaaggcgtttgatgaaacgcagagaagccgtcatttgcagacatgatccattcactattaagctcaccagagattctgaacataatgttcaggatatcgagtttaaacaggatacaggcgataagcatattggcatatccgtctgctccgaaaaacatgaatatatcagtgctcagtatgatcctctgaaagatgaaacaaagaagcacaacgatcagcgcaagtaccgtcgaacccgcagaaaccgcaggcgctatcgcaagccgaggtttgacaaccgcaagaaagacaggggatggtttgcgcccagtattgagcacaagaaggaactgcatgtcagactcttcgagaaatacaatgatgtctgtccaatcaaaaaagcggtatttgaagtcggaagctatgatatccatgcaatgcaggaatatgaacagaacggtgcagttctgacaggcactgattatcagaaaggaccaagatacggcatgaccacacttcgtgaagcagtgctgtatcaccagaattatatctgtcctctctgcagaaagagtcttatcggtgcaagaactgctattcatcacagaggattccgaacaggcgacagatcaaacagactgaataatctgatggcagttcacgcatgggaacacacatcagccaatcacaaacccggcggattattatgggacatcaagcctgatcacaggccattcaaaggtgcggcgttcatgaacatcgtaagaaaagcaattgcggatgaaatcgagaaacggcatccgaatgttgccgtgatacgaacttatggcgcagagacaaagctccgcaggcaggatctgcacatccgcaaatcacatgcgaatgatgcctatgcaatgggcgagtatcatcctaaacacagatcgcagacaatgcactttcagaagcatcgcagaaacaaccggatactgagcaaattttatgattcgaagtacatcgatgttcgggacggcaggaagaaatcaggtgccgagcttagctgcggacgaacaaacagatgcgtgccccgcaacaatccggagaacaacagagtattcagagggcagaagctcgctaaaggcagagtatcagtaagaagacggagatatccaattaacagcgaggatgctgttattgtcaacagaaaaaagctgattgccagcggcactgcacattacggtgaatacgtgcacttcggcaaaggtcataaagatgtaaaaacatcacaagtgaggatccgctgccatgcaggcggatgggtacagatataa

SEQ ID NO: 659 - DNA, 345 bp, unidentified
  source 1..345: mol_type = other DNA; note = uncultured Erysipelotrichaceae bacterium
gtcaataaccccgcctaagttctaatgaactataggtgaggcttgcggaaaacgcaggcctgattgattagcctgagtgcttcgagcactgcgttatacaggaatgtataggcacttcagaatgctccacaagttctgaacactgcgagcccgagtaaacatctctgagggcaggagaagtcggaggcagtctgatatcttcggatatcagaaaaaccctgtataactttggcgatgtggaccccgtccataaggacgagaacccgtaacccgtttggggataaggacgtgcgtaagcacacaactttacagtacaggaggaaggcatctgccatgaaaacagta

SEQ ID NO: 660 - DNA, 1431 bp, unidentified
  misc_feature 1..1431: note = Ga0223845_11721960 JGI
  source 1..1431: mol_type = other DNA
atgcctaccctccgcaggcaccacgtggaaaagctcttaaggcgcgggaaggcaagggtcgtggaatacgtccccttcgtcatacagctcatgtatgactccccgtgcgtgacacagcccctctacggcgggacagaccccggaaggaccaacatcggcaacgccgtcatggacggcaggggcacagtggtctacaaggaccacgtgacgacaaggaacaaggagatttcaaagctcatggctgccaggaggcagtacaggatggcctcccgcaggggagagcgcctggccaggaagcgcctcgcgaagaggctcggcactacgatgaaagctgtactggaacgggtactgcccggctgtgacgggcctgtcaaggtgaaggacatcatcaacactgaggcacggttcaacaaccgcagccgcccgaagggctgggtaacgccttctgtaaaacagctcatccgcacccatgtgaatatggtccggcggatcaggaagtacctgccggtggaacattggacactggaacttaacaggtttgccttcatgcagctggatgacggttccgtttatggcaccgacttccagaacgggaagctcaggggctaccgtgacgtaaaggactatatctggcacctgcaggaagggaagtgcctgtgctgcaaaaaggcaggcatagagcattaccaccacatcctgccaaggcacaagaacgggagcgaccgctggtacaacctggcagggctgtgcacatcatgccacgacaaggtccaccggggggagatatccataaaagcggaagggacccgccggcgctataccgggacatccgtcctgaaccaggccatcccggggatcctgaaggaattggaggaaatgttcccctctgtggacacatgcaccggcagggaaacagccgccgtaagggagctgctctctgtggagaagacccacacggacgatgctgtctgcatcgccgcgtacggggcaccagtatctggcgtgacagacaatgcgcatacctttaaggtaaggcagttccggcgccatgaccgagcccgtgtcaacagccagcgtgagcgcacctacaaggtacagacgggcttcaataaaaagggggaaccggagtacaccattatcgcgaagaaccggaagccccgctatgaacagaaggggcctgccctgagccagctggggctgtccaggcagcagatatcggtactgcacgtcgaaaagagcaaacggcactgtaatacaccgggccgcatgatgcctggagctgtattcatttataagggtgaacggtacgtgatgaccggccagctgacaaaaggaaaatatttccatgcagcaggctgcgggaaaaagagtttcccgacagcaaaatgcagcatcgtcagccacaatagaggattggtctacatagcgtaa

SEQ ID NO: 661 - DNA, 253 bp, unidentified
  misc_feature 1..253: note = Ga0223845_11721960 JGI
  source 1..253: mol_type = other DNA
gtcaatgacccacgactaaagtcacgggcttgcagataaaagaaagaagcactgctttcatctttttctgtcatccgtggctatcatgcatcattgagcagaggcgtgacgcgccgctcaccccggggtgctttctagccccgggcgatggcaacaggcgcgccaagcataaggaaacatttttggcagtgcggagccttacaagctgtgaaacactgccctttatcacaggaaggaggtaccagtggggtac

SEQ ID NO: 662 - DNA, 1011 bp, unidentified
  misc_feature 1..1011: note = Ga0118727_1075366 JGI
  source 1..1011: mol_type = other DNA
atgttagtgcatgttttaaataagcatggtaaacctttgatgccatgcgaacctcggaaagcaagaatccttctcacagaaggaaaagcaaagcctgtcaaaggcaagactggctattttacaattcaattattatacggaagcagcggttacaaacaagatattgttatcggaatagatacaggcgctaaaagagtgccagtagctgctgttggtaatggtaaagtgtattacgcaaaggaaaaaattcttaggacggacgttaagaaacaattgtctgacagagtaagttacagacgtacaaggagaagtaggaaaacgagataccgtaaacctcggtttctgaacagaacaaagaccaaatgtgccagatgtggcatcaataacgtgccaaagcgttggaaagaagtaaaacgcaaaaatggcaagagcagaaagagggtgtgcgatggcagagcgcaactttgtcgtcaatgtcaaggcaagaaaggcacacacaagaggccgcatattcttgcgccatctgttaaaaatcgtgccgaaagcatccttaacgacattcacaggttatctcagtcacttcctatctccaagatagtcgttgagatagcatcttttgatacgcagaaaatggctgatgccatgataaaaggtgttgagtatcagcatggaacgttgttcggctatgaagtcaagcagtacctcctaacagtacacaagcataagtgcgcatgctgcggtggattatcagaagacaatgtattgcaggtggagcacatatacccacagaccaagggcggaaccgataaggttagcaatctgaccatctcctgccgagtatgtaatgaggccaaaggaagtttgacattaggtcaatgggagagaatgttgcgtgctttcccaagtgagattaatgagaagcgattgaaaaacatacctgctattaggaagcagagcaaactcaagaagggattccagtacagcgcgttgactcaaagttataagaattac

SEQ ID NO: 663 - DNA, 291 bp, unidentified
  misc_feature 1..291: note = Ga0118727_1075366 JGI
  source 1..291: mol_type = other DNA
gtcaagaacccctcctgattgttccaatcagaaggagcttgcataggcaactcttgcaacccctatattgacagcctaagtttctttttagatactacgttatccagttatcacacccttgggtgtttcaccagcccatagaagtagtttggctctgtgggggctctgtaaccagtcgtgagaggtagcgacagtcaaccccaggacgacctgacattttaggcaagctggataacattggcgaggtggtgcgtacaaatctaactccgaaaggagctgcactttatgtta

SEQ ID NO: 664 - DNA, 1245 bp, unidentified
  misc_feature 1..1245: note = Ga0326512_10006706 JGI
  source 1..1245: mol_type = other DNA
atggtttatgtattacataaaaatggaaatcctttaatgcctactaaaaatcattctaaagtaagatgtttattaacaaataaacaagctaaagttgtaaatacagaaccttttacaattcagcttttatatgatacttctgaatatgttcaggacgttaatttaggagtagatagtggttgtaaacacattggcatttctgctactactgaaaaagatgttttatttgaagctgttgtagaagaatacgataaaacttctgaaatgttacaacaaagagctatgcttagatgtactcgtagaagtcgtaaaacaaggtacagaaaaccacgttttatgaatagaactaagtctaaaaaagaaggatggatagccccttctataaaacatactgttcaaacacatttaacaataattaataaagtacataaaatattacctattaaaaatattattgtagaaatagcaaattttgatattcataaacttaaaaatcctaatattaacggtaaagaatatcaggaaggagaaatgaaagattattataatgtaaaacaatatgttttagatagggacaatcatatttgtcaatgttgtaaaggtaaatccaaatgtaagaagttaaatgtacatcatataaagtttagaagtaacggcggtggaaattcacctttaaatcttataactttatgtgaagactgtcatagtgatttacacgataataaaataacattaccagaaaaagtaattaaaaatgtaacatttaaatttcctacacatatgaatataatgaaaaatactttaattaaagaattaaaacaattatattcaaatgtagatattacatacggctatataacaaaatattatagagaatcatataatcttccgaaagaacattatatagatgctagatgtatttcaggaaattatacggcagaatcattaggatattattatatatttaaaaaacttcgttgtcataatagacagattcataaatgtataataaaatctaataatgtaagacctttagcaaaattatcttatgctatttatggatttagaatgtttgataaagttttatatgataataaagaatattttgtttatagcagaagaaataatggctgtttcagtataagtcctttatatgacctaaaaacatatattcagaaaacatataaaaaacttaaacttatagaaccgtgtaaacatttagtgtgtcaaaaagtagttatttaa

SEQ ID NO: 665 - DNA, 290 bp, unidentified
  misc_feature 1..290: note = Ga0326512_10006706 JGI
  source 1..290: mol_type = other DNA
ataaaaatttattaaagttaataatcctaaaattaaaaactttaggttagtaattagtctaagttctgaaataagaactacgttatttgagaatatattatagttacccatgggtgtaataccaagcctgtggctctaaggtaaatagttaaacaattcttatttgtggggaatagtgctatttatttttaaaacctcaaagtaacattgacgatggtattttaccacttttatagtgagcttatttaagtgtttaaacactttttaaagaaaggaaaaggttttaaatg

SEQ ID NO: 666 - DNA, 1371 bp, unidentified
  misc_feature 1..1371: note = Ga0209777_10000441 JGI
  source 1..1371: mol_type = other DNA
atgcagaagtttaaagaagagtttcagaacgtacctacgaatgcttcactagtttgtagctctacaaatttgatgttaaacagagaggacactctcagtgcatcaaatcgcctcgaaagaagcacactgactttaaacaatcccgaagtgaatcgagttcaacaaacaggacgctcattaaaagtatttgtgtttgtacttaatatgcaaggcattcctttaatgccttgttcttatgctaaatcaaaacgattaattaaaaaaggagctgctaaagtaattaaaagatttccttttactatccaactcaattttgagtgtgaaaatcacactcaaaacataaatttaggaatagattctggttatgaaaacatcggtttttctgcttctactgaaaaacaagaattaatttcaggcactttaattttagatggaaaaactaaagaaagattagaagaaaaaggaatataccgaagaggaagaagatataaattatggtacagaaaatctagatttaataatagaaaaaataaaaaaatacaattacctccaagtatagaaagaaaataccaaactcatttaaatttaattaaaaaattaaaacaaattcttcctatttctgaaatttacatagaattaggaatttttaatgttcaaaaattagaaaatccacacattaggggagcacaatatacgcaaggaaatctctataaatatcaaaatatgcgaaattatttatttgctaaacaaaatggaaaatgtcttttttgtaaaaaagatttgaaaggattttcttctcatattcaccacattaaatcaagaaataataacggaaataatagagcagaaaatttaactttatctcataaaaaatgtcatgtaaaaatacataaaaaatctttagataaaaatctaaaatcaaattctaaagattataaacaatctacttttatgaatataattagtaagagatttcaaaaaaatcttccagatataatagggatatttggatatgttacttctatgaaaagaaatgaattaggattagaaaaaactcattttaatgatgctttcgtaatagctagaggaaataatcaaattagatgtaagtctattgaaattaaacaaatacatagaaataacagagttttacaattaaatagaaaaggatttaagccttctattaaaaaaaataaatctaaagtaaatcctggagatttattttggattggaaaaaaagaatatacttgtaaaggaatgtttaactatagtagatatattctttttggaaaaatgaataaaaaagaatattttaaattttcagaaataacaaaaatttttcattttggaagttttgcatggaatatttaa

SEQ ID NO: 667 - DNA, 271 bp, unidentified
  misc_feature 1..271: note = Ga0209777_10000441 JGI
  source 1..271: mol_type = other DNA
gtcaattgtctatccataatagattaaaatcgtgagattttacgtaagaattgattagggagcttaaaagaaatttttatgcagaagtttaaagaagagtttcagaacgtacctacgaatgcttcactagtttgtagctctacaaatttgatgttaaacagagaggacactctcagtgcatcaaatcgcctcgaaagaagcacactgactttaaacaatcccgaagtgaatcgagttcaacaaacaggacgctcattaaaagtatttgtgt

SEQ ID NO: 668 - DNA, 1242 bp, unidentified
  misc_feature 1..1242: note = Ga0268280_1002972 JGI
  source 1..1242: mol_type = other DNA
ttgaaagtatttgtagttgataaaaacctaaaaccctgtgacccagttaattctgcggttgcacgtatcttgcttagagagaagaaagcgactgtctataagcattatccatttgtaattaaattgaaagtagcttcagacatagagccacaaggcttacagttgaagattgacccaggttcaaaggtaactggtctagcaatcgtgaaccaggaaacaggagaaataatatttggtgcggaattggaacaccgtggatggataattaaaagagacttggatagtaggcgaaagtcaagacaatttagaaggtatcgtacagttaggtatagacctgctagatatcttaatagaaaaacccctagtgggtggatagctccgtctctaatgagtagagtatacaacattttaacttgggtaaaaagactgttaatttatactaatatatcaagtctggcagtggaaaaaagcacatttgacattcaaagaatgaatgatcccaatatctttaagagagaataccagaggggagaattatttggatttgacgctagacattacttattgcaaaaatataattatacttgtgtttattgtggaagtcggggtggctctttcgaattagaccatgttattccaaggtcaaaaggtggaacaaacaagataagtaatctggttttagcttgtaaagaatgtaatagaaaaaagggaaaatcttttctagatgagtttttagcaacaaaacccggattatgccagaagataaaaaatacaatttctcgtcctttacaacacgcagcagctgtaaatattactaataatcggctggtaaaagaattactacaatttaatttaccattggacgtggggtttggtagccagactagttttaatcggaattctcaaaaaatgaagaaagaacactggatagatgctgcgtgtgttggaacacttaatcacgatcttcattataatgataactttttggtgtttaatataaaagcatatggtcgtggtaagcgaaaaatgtgtcagaccaataaatacggaataccgacaaagtatagagaaagagcaaaaattagatttggttttcaaactggagatattgtaaaagcgttagttcctagaggtaaaaataaagggtttttaaagggaagggtaactgttagaaagaggcccacatttcatattgattgtgcagattctataaatcctaaatatatgactctacttcaaaaa

SEQ ID NO: 669 - DNA, 293 bp, unidentified
  misc_feature 1..293: note = Ga0268280_1002972 JGI
  source 1..293: mol_type = other DNA
ccccttgaaaactgataccatgatttgtaatttttttgataccaacttttgtaatcttgctttaactttgtgtattcagaaaggttacccggctaagtgatgatagcaatatctgaactacgttatttcggtcacgacaccatgggatgcttcaccagtcccatgcaactgtcgcctgcggttaaacagggtaattccagtgctgcaagcttaacaagccaagatatacattgccaaggtgacgtgtggaaacacacaccacccctttaatgggagagtatttaattgaaagt

SEQ ID NO: 670 - DNA, 1335 bp, unidentified
  misc_feature 1..1335: note = LHMISPF_alex1_c100 JGI
  source 1..1335: mol_type = other DNA
atgtctaaaacccccaatcaagtattcgtacttgacaacagcaagaaacctctaaccccgtgcctaccagtgatagctagaaaactattaaatgcaggtaaagctaaggtttttagactgtacccatttacgattatcctgaaaaaaacagttgatgaacaaccggaaccaatagaaattcgcatagatccaggtagtaaaactacaggcctagctttggtgagcttaacccaagtaatttggggggctgaacttacccatcgggggcacgcgatcaaatcccggttggaaacccgcagcgccatccggcgcagccgtcgtcatcgtaaaactcgttatcgtcagccacgatttctaaatcgcacccgcccgaaaggttggctacctccctgtttggaacatcgagtgttaaccacaattacatgggttaatcgcctttgtaagttagcaccaattaagtcaatagcttttgagttggtaaactttgatactcaaaaaatgcaaaacccagaggtttctggtgttgaatatcaacagggggaactgcaaggttatgaggtgagagaatacttacttgaaaagtggaatcgcaaatgtgcttactgtggcgctgaaaaattaccattgcaagttgagcatattaacccacgcgcttcttgtggtagcaaccgcgtttctaacctatgcttggcctgtaaaaaatgcaacaccaaaaaggggactcaagacatcaaagactttctgaaaggtaagcctgagattctgaaaagaataatgagtcaagctaaagcaccgttaaaggatgcggcggcggtcaatgggactaaatctgctttgcttcaagctttaaaggctacgaaactagagcctatttatgtgggacggggttctctaactaagttcaatcggactaaattaggtttaccaaaggctcattggatagatgcggcttgctgtggagatgtgactcagggattaactttggcaatcaatcaacctttgttaattaaagctatgggttggggtagtcgccaagttgtacagactgataaatatggtttgactcgcaagggttatcagcctaagcaaaaggtcaaaggttggaataccggagatatgatctcagtgattggtggcaaacatgagggggtgaaatgcaagggaattaaaactacaaggtttaagggtaactttgatattcgagtaaacgatactactgtgattagcgtttcgagaaatcaaattaagccggtttacagaaatgacggatacaactactcatttgtaggaaattgtcgcgaaatgtccgagaaaagagtgagagcaataggatag

SEQ ID NO: 671 - DNA, 276 bp, unidentified
  misc_feature 1..276: note = LHMISPF_alex1_c100 JGI
  source 1..276: mol_type = other DNA
agttacggtttcgcttaggttctatagacttactcaaatcctagacatttccgaataaaccccgaaattgctaagtaagtccaggctttcgttattggcaagcgttcaagttcataccttgaggtgcgtgccagccccaagctctataactcggcagttaaacaggcaaggattttgtaaagccagtgctgctgagaaagtaccgaccaataacaatgccgaggccacctttactaactaggaatagacgcaaccatgtctaaaacccccaatcaa

SEQ ID NO: 672 - DNA, 1362 bp, unidentified
  misc_feature 1..1362: note = Ga0307249_10042978 JGI
  source 1..1362: mol_type = other DNA
atggcaacatttgttatcgcaaaagacggcacccggctgatgcccaccaccaacatcaagaaggtgcgaaccttgttgaagaagaaacgtgccgtcgtctactgttatgacccatttacgatccagttgacctatgaaggaaccaaacatgtgcagcctatggaactgacacaggacgccggctaccagcatatcggcgtatccgtgaagtcagagaaacacgagtatgtttccgagcagtacgacctgctcccagatgaaccggagcggcataacgaccggcgtaaataccgccgttcccggcgaagccggaaacggtaccgcaaaccccgtttcgacaaccgagccattcccaaaggatggctcccgccatccctggagcataaggagcagctgcatgtacagatcttcgataagtacaacgcggtagctcctatctcacaggtagtggtagaggtagcccagttcgatacgcagctgctggaagcaatagaagccggtaagcccttgccggaaggcaaggactaccagcgaggtgaacagtacggatacgacaccctgcgggaagcggtattcagccgggataagtacacctgcctctgctgtggaaggaatgcgttcaaagacggtgccatcctccggatgcaccatataggattccaaaccggcgacaggagcaaccgcatggggaacctggcatctgtgtgtaccaaatgccacaccgccagaaaccataagcccggcgggaagctgtacggctggaagccgaagctgacaggcttcaagggcgccgccttcatgaacgcggtgaaatttcagatttgtgaggcacttcggatgaaacacccggatgtagcagttaccttcggcgcccgtacgaagcgagcgcgcctttaccggcaactagccaagtctcataccaacgatgcctactgcatcggcagttatagacccagacacagatcgagaccgacggtatacgccaagcgccgcaggaacaaccgctgcctggagaaattttacgatgccaagtatgtggacacccgcgatgaaaccgtcaaaagcggcgctcagctgtcttgcggacgaacgaaccgttcgacaccaaggagcaatccgctcaatgagcggatctaccgcggtgaaaagaagtccaaaggacgcaggagtattcgccggaggcggtactcactgcgaccctatgacatcgttcaagtcaacgggcgcagatgtaccgttaagggcgtgcaaaacaaaggcgcctatgtggccctcagtgatggtactgtggtcagcatcgcaaaggtcaaggccatccgccacattggcggatggtccaaggaaaccacaaaaccggcgtag

SEQ ID NO: 673 - DNA, 377 bp, unidentified
  misc_feature 1..377: note = Ga0307249_10042978 JGI
  source 1..377: mol_type = other DNA
gtcaataacccccacttaacctagttggttagaagtggaggcttgtgggaacgcggaagcgttcctgtgagcctgattgattagccagggtctaacgacccctagagtgaccctgccaagtctgcggatactggcaggtgagaactacgttacacacaaatgtataggcaccggaggatgctccacaagtcctccgcactgcggtgtgtctttaaacatctctgagggtaggagaagtgaggcacacatcgaaactgtgtgtaacattggcgatgtggaccaccgcccaaaagggtgaggatcccggacgcttgccgtccgggaaggcgtaggcctttgcaacactgaacgaaaggagcatcagcttcatggcaaca

SEQ ID NO: 674 - DNA, 1365 bp, unidentified
  misc_feature 1..1365: note = Ga0163144_10177891 JGI
  source 1..1365: mol_type = other DNA
atgctatacgcattactccgtgttgttgcggaggagcgcatgatgactaagtcgtcgtctgttgtgttcgttatcaacaaaaatagtaggccgcttatgccttgtcgctctatgagggcgcgagtccttctgcgagatggtctagctaaagtggtatcgcgagttccgttcaccattaaacttctaacccagcaatcggagtacaaacaggatgtaacggctggcatggacactggagcaaaacacattggcgtcgctgctatttcaagcggtagcgtcgtataccaggccgaagtaaaacttcgcggggacgaaattaagggcaagatggaccagcgtagaatgtatcgccgcacccgtcgtggccgcaagacacgctacaggaagccaagatttcttaaccgcggtaactccacaaagactggtcgcataccgccaagcgtgcgtcacaagttacaggcccatgaccgcgaaagactattcgtcgaatccatcctgcctgtcacaaaatgggtcgtagaaaccgccgcgtttgatatcgctaaactatctttatcagataatgtagcgacgcttaaaggcgccgattaccagaatggacgccagaaaggtttctacaacgctaaggcattcgtcctccaacgcgacgcctacaagtgccagtacggcaaaggtaagtgctcaaaaattcttcacgtccaccacattatctttcgttcgaatggcgggaccgataagccagaaaatctcataactctctgcaaaattcatcacgacgcccttcatgcagaaaaattaggtacatttctttcgctcgaaaaatctcttgcgcgaaaagcctctacaaaagtaaagggagccacccaaattagcatgattgcggcccacattcgtcgcaactggtggaatataactgagacattcggctacgagactaaattaaaacgagaagcccttggtcttccgaaaactcattacaacgacgccgtcgcaatctgccttaacgaaaaagaaaccgtcgagatttcaaacatcaagtattcaaagcgcctcgtatcaaaaggcgattaccagcagacatcaggttccagaagcgaaaaaactatccctacaggcaaattatttggcctcaggaaattcgacctaatatcgacacccaagggaacagggtttgttaagggaaagcgcagttcaggatttttcgccatatcgctactcgatggcgagtccatcaccgattccgtaagcgttacgaaaaatactgtccgattatccgcaagggccttagtcctgatttccagaactatccttgccaaattccttcccgccgtaaacgacggaatatcctttggaggttcaagatga

SEQ ID NO: 675 - DNA, 318 bp, unidentified
  misc_feature 1..318: note = Ga0163144_10177891 JGI
  source 1..318: mol_type = other DNA
gtcaatcaccccaccctaaacggtggggcttctagggtgacctaggagggtaactggttgaccagaggactaacaaaggagacgaaagaaagtgttagtagacgttaaagcggagaaaaacatacacacccagggatgccatcccagtcgccggctctgtggttctgtcgttaaaagagaggaaactctcggtgcgctgaactttaaaacccgctttaacccctcgagggaaggtcggattcgtgtggctactcctacgccatgctatacgcattactccgtgttgttgcggaggagcgcatgatgactaagtcgtcg

SEQ ID NO: 676 - DNA, 1392 bp, unidentified
  misc_feature 1..1392: note = Ga0265595_1002166 JGI
  source 1..1392: mol_type = other DNA
atgcagaagttatcaaagagagatacatacacacctacgaatgcttctcaagtttgtaagctctgtgatctgacattaaacattcctatgggtaaggaaagtgtggaagatttaaaaacctttgataacaactccgaagagaatctacagcattcacatagagctggtttgaacccaaaagtatcaaacattgtctatgtacttcaccaaaatggtagtcctttaatgccaactaaaccacaaaaagcaaggaggttattacaatgtaaaaaagcaaaagtagtaacaaaatttccatttacaattcaaatgttgataccaacaggagaagtaaaacaagagattacattaggtgttgattctggttatgagaatgtaggaatatcagcagttacagcaaagaaagaattattatcttataactttaaattaagaacaaatatgtcaaagttaatttctgacaaatcaatgtatcgtagaggtagaagaaataagttgtggtatagagagaaaaaatttcttaacaaaggtataccaaaaggttggttagcaccaagtatacttcacaaatataatagtcatttaaaaattatagagagaatacataagtttctactaataaccaagataatatttgagatagcaatttttgatatacaaaaaattaagcatcctattattaaaggtaaagaatatcaggaaggtgaacaaaaaggttttgaaaatgtaaagatgtatgtaagaagtagagatagttatcaatgtagaaattgtaagaagaagaatgttaaattacaagttcatcatataataagtagaaaaacaggtggtgatagtcctgataatttagtaactttatgtaaaaaatgtcatagtgattatcatagtgattatcatagtggtaaaattgaattagatattaaaaagagaaaaggctttaaagcagagacttttatgtcaacaataagaaaaagaattatagaagatttaaaaagcaaatatgatgatgtagaagagacttttggttatttgacaaaatgtaatagattagagttaaaattagaaaagagtcatataaatgatgcattttgtatagcaaatggtagtaatcaagaaagaagttttgttcaaaatataattcaaaagagaaagaataacagaaaattacaaatacaaaggaaaagatataaaccttctataagaaggcaaagatatagtattcaaccatatgatttattaaaaatcaatggtaaagaatatgtaagtaaaggtatacattgcaaaggtgaatcagtaataataataaaaaatggtaaaaagaagagtatttctgttaagaaagtagagaaagtatttcattttggaacattaatttatgtaaaggaggtatga

SEQ ID NO: 677 - DNA, 259 bp, unidentified
  misc_feature 1..259: note = Ga0265595_1002166 JGI
  source 1..259: mol_type = other DNA
gtcagtaacccacgactgaaggtcgtgggcttgcagaagcccttgctgactaggaggcatacttagtatgcagaagttatcaaagagagatacatacacacctacgaatgcttctcaagtttgtaagctctgtgatctgacattaaacattcctatgggtaaggaaagtgtggaagatttaaaaacctttgataacaactccgaagagaatctacagcattcacatagagctggtttgaacccaaaagtatcaaacatt

SEQ ID NO: 678 - DNA, 1410 bp, unidentified
  misc_feature 1..1410: note = Ga0111033_1162652 JGI
  source 1..1410: mol_type = other DNA
atgcaaacagtatctaagttatcagcagagttaaagaacgcaccaagggatgcttctctagtcccttgctctgcaagttctgcattaaacagagaggaaactctcagtgtgcaggacaaagtactggctgataaccttggcgaagagaacctactcgggaacaggagaaaacactctgtattagtgtttgtactgaacaaggagggcaaggctttaatgccctgccctcctggaaaagcaagacatttattgaagaagaaggcaagggtggttacctgcaagccgttcactatccaattactttatggcagttcaggatataagcagccgattacacttggaatagatgcaggctatagtaacataggattcagcgcggtttcacaggagtcagaattgattgccggggaagttaaattaagaaagaatatgtccaagaaactgacagaaagacgaatgtatcgcagagagagacgaaacaagttgtggcacagaaagccaagattctcaaacagggtttcatccaagaaagaaggctggttagcaccatccatacagcacagattagattctcatattaggttgatagaaaaagtccagagactattaccaatttccaaaacaataatagaagtggcttcttttgatacccaaaaaatgcagaacccggaaatatcaggaatcgaatatcagcagggagaactgcaaggctatgagatcaaagaatatctactggagaggtggggaaggaaatgtgcttattgtggtaagacaaatgttcctttggaaatagagcatatcactcctgagtcgcgaggaggaaccaaccgggtctcaaacttgacgatctcttgtgaaaaatgcaaccggaagaaaggtaacaagacagcagaagaatttggatatccagagatacaaaaacaggcaaaagaaacactgaaagcagttgcgttcatgaacagcgtcaggtggaaattagtagactccttagactgtgactggacttatggatactccacgaagcataacagggcgcaaataggtttagaaaaatctcatgttaatgatgcctttgtaatagccggaggaagtaatcaaaaacgaatttgggattgcagtgtgaatcaactcagacgaaacaaccgctgtttgcagatgaatagaaatggattcaagccgtccataagaaaacatagatatgctttccagccttattctctggtaaattacgctggtgctatttatgaagtcaagggagtatttaacagaggcacctacatcagattaaaagcagaaaaagacatcaatgcgagaacagaaaaagtaacattatatcaacacatgaacggaatggcaatccatcccccaccaatcagagattggagggggtcttcttgccagaaaagataa

SEQ ID NO: 679 - DNA, 278 bp, unidentified
  misc_feature 1..278: note = Ga0111033_1162652 JGI
  source 1..278: mol_type = other DNA
gtcaatcacccccaccaaattctgacgaatttggaaggggcttgtagggcgacctgcaagggcaactggttgattagccaaagagaggtttgcgatgcaaacagtatctaagttatcagcagagttaaagaacgcaccaagggatgcttctctagtcccttgctctgcaagttctgcattaaacagagaggaaactctcagtgtgcaggacaaagtactggctgataaccttggcgaagagaacctactcgggaacaggagaaaacactctgtattag

SEQ ID NO: 680 - DNA, 813 bp, unidentified
  misc_feature 1..813: note = Ga0373927_0000008 JGI
  source 1..813: mol_type = other DNA
atgctggtgtttgtcgtatcacaagaaggaatgcctttaatgccgacgatgccccggcgaacacggatctggctcaaggcgaaacaggcccgtgtcgggcgtcgagagccgttcaccatccaactgcgctgcgagacgaaagcctctgcccaacctgcgcctgtaggcgtggacgcaggatcacacacggtcgggattgctgccatcgcaaacggcgcggtcgtgtttcagacggaggtacagttgcacgataccattccagagaagatgacacacaggtgcaggtcccgccgctcccgttgtgctcgcaaaacacgctatcgagctgcgagatgggccaatcgacgtcgcctggaggaccaaatgccgccctctccgcgttccagggcaacgtccatggtgcaagcggcccggtatattatctcactgctcctcatcggtcaggtgaaccatgatgccgtggctattgcctgtgagatgggcaaggtgatcaagcccctttcgatcattcagcagacccgatgcctgccgcgaggtctgtatcagcgcttcaacggactgtgtagcgagcagaagtgttggacgccaaagaaggtcaaaggcttcaagcgctacgagctggtccaggccagaggggtgatgggttccatgggagaaaggcgagagaaaggatcttttgttctcaacgatgttgccagtgggaagagagcgttagaggtgacgtcacgcacgcttactcagggcaggatatcgctacggtatctcgccctggagaatacgagaaaggagagcggcgcttcctcccccgattga

SEQ ID NO: 681 - DNA, 813 bp, unidentified; identical to SEQ ID NO: 680
  misc_feature 1..813: note = Ga0373927_0000008 JGI
  source 1..813: mol_type = other DNA

SEQ ID NO: 682 - DNA, 819 bp, unidentified
  misc_feature 1..819: note = Ga0070730_10006957 JGI
  source 1..819: mol_type = other DNA
atgggccgtaaggccatccttttctgtgaggtcgtgatggtattcgttctggatcagagcaaacagccgctgatgccctgtagcccgaagcgggcccggctgctgttggcgcggggtcgcgcgcgcgtccaccggctggtgcccttcaccatccgcctggtcgaccgccgcgtggccgcgagcaacctgcagccggtggtgttggggatcgaccccggcagcaagacgaccggcctggccctgacgcgggaggagccgacgcccgcgggtccgctgcggcacgtcttgcacctgggcgaactagagcaccgcggcgggctggtgcgcgagcgcttgcgcaagcgcgcggcggcccgccgccgccggcgcggggccaacctgcgctatcgcccgccacggttccacaatcgccgccgtagcgcgggctggctgccgccatcgctgcaaagtcgggtggacagtgtggcgcattgggcgcgctgttaccgccggctggccccgctccgccgggtggcggtcgaggcggtgcgcttcgacacccaactgctggagcacccggatattggtggtgtcgagtaccaacggggcgagctggcgggctgtgagttgtgggagtatctgctgctgaagtgggggcaccagtgcgcctactgcgggcgggacgacgtccctttgcagaaggagcacatcacccccaaagcgcgcgggggcagcaaccgagcgagcaacctctgcccggcgtgcgccccgtgcaatatcgccaaagggccgcgtcccgcagcggagtacggccacccaaaggtgcaggcgcaggccaag

SEQ ID NO: 683 - DNA, 309 bp, unidentified
  misc_feature 1..309: note = Ga0070730_10006957 JGI
  source 1..309: mol_type = other DNA
gtcaagtaccccacccgtaaacggggggcttgtgaggagcaagcccggacttgaccagccttagcagtggagccgaaggacaaggcgttgacactgctacgttgtgggtagagcaaaagtacacaccgggggatgcttctccagtcccccgctctgtcagcggccaggtgcagataacgtccgggggggcgcggaacggcctggcgcagatggctgacctacaacattggcgaggagagccgcttcgagccgtccgtcggagcgcgtcacatgggccgtaaggccatccttttctgtgaggtcgtgatg

SEQ ID NO: 684 - DNA, 1335 bp, unidentified
  misc_feature 1..1335: note = Ga0118720_1022568 JGI
  source 1..1335: mol_type = other DNA
atgttagtctttgttaaaaacagaaacggtaaaccactaatgccttgtagtcccactaaagcacgaaaacttttaaaagcgggacaggcaaaagtggaccagcggaccccttttgtaattaagctgaaattcggttctagtggttacactcagaaaaccacggctggaatggacaccggtagtaaagtgattggaaatgctgccacatcccatcaaaaaactctataccaatctgaaactatacttagaggagatgagattaaaagtaaaatggaacaacgccgaatgtataggcgtagccgtagaggacgaaaaaccagataccgaaaaccacgatttctaaatagaagggcaagtactagagaagggcgactagctccaagcctgctacacaaagttaaagcacatttaaaagaacgaaaattcattgaatcaattctacctatctctcattggaaagttgaactcagccagtttgatattcatgctatctcaaatcctgatgtttctaaaagatattggtggacttaccagaatggtccacagaaaaacttttacaataccaaatcttacattttgagtcgtgatgaacacacttgtcaatcatgtaaatcaaagaaaaagaatttaaaacttcatgtacatcatattgaattccgttccaatggaggaacagatgcccccactaaccttataacactatgtaaaaattgtcatgacaaagtacacaaccacaataacgctcaacaagaatctctaaaaatgtcaaaaaaaatcaaaaacaaaactaaacatgctactgaaaccaacattatagcctcacatcttcaaaactctgactggagttttgaagaaacttttgggtttgagactaaatttaaaagagagaaattgagactacctaaagagcattactttgatgcggtagctatctgcttggctgatgatgaaatgattaaatttgaaccgcaaactttcattaaaagacttattgctaaaggagattatcaacaaacaaaaggaatcaggtctgaaaagaaaatgcgtacagaaaaaatactaggtttcaaaaagtttgacaaagttgagtggatgggacataaagctttcattaaaggcagaatgtcatccggatacgccattttaatggacataaaaggggataagataaatttaaaacccatccctaagctaaaaaatggacttgtacgcatacaagcgaggaaatcatcgattatagatcaaaaaatcatagaaaatacctcattctctaccacatcatccttgtcaccaagtacagaaaacaacttctcgtttatacaggagaacatgtga

SEQ ID NO: 685 - DNA, 311 bp, unidentified
  misc_feature 1..311: note = Ga0118720_1022568 JGI
  source 1..311: mol_type = other DNA
gtgaagaacccagcgactaaagatcgctgggcttcctacattaatcatggaagccctacttcaccagaaggctaacagaaaggagagaaaatgttagcagctgttagaacagagaaacacatacagacccctgggtgccacctcagccttgggctctctgattatgcattaaacagctgtgagggtaacagcagtgtgtatagtttaaaaacctgttctaactcttcgagaggatgtcggattctgaatgtgatccttactcattcagatacgcattactctgttttctgtcagagggagactttatgtta

SEQ ID NO: 686 - DNA, 804 bp, unidentified
  misc_feature 1..804: note = Ga0395674_000262 JGI
  source 1..804: mol_type = other DNA
atgccctgcactccagcaagggcaaggatgctactgcgtgggcggaaggccgcggtcctcaggcgctatcccttcacgattatcctgaaggcccgcacagatggggatttacagccgatagagctcaaagccgaccctggcagcaaggtcaccggatttactgtggcttgcgaagattgcaaccagagcaagaacaaccttaccgccgcagaattcgggcatccgaacattcagaagcaggcattacgacctctcaaagacgcttctgctgtcaatgccactcactatgtcatcggggctgcactcaagtctttgggattgccggtatcgttctggaccggtggcaggactaagttcagccccactcaacaggactatccgaaagcccactggattgacgcggcctgtgtcggtgagtccgggaatcaggtcaagcttgatctgcggatgcaggtatcgcaggttaaggctacagggcacggatcacggcagatgtgtcggatggacaggtttggattcccccggacttctactaagacagctcgtgtagtcaaagggttcaggactggagatattgtcagagcagttctcccttacgggaagaagacaggtacttatgacggcaaggtagccgtcagggcatccgggagtttcaatgtatcgactgctaccggtatagtcctggggattagctacaaatactgttctgtggttcatagggcagatggatattcatatctaacaaatacaggcgctcctctcggcaatgaattaccgagtatccgcgcccaggagttgtcatga

SEQ ID NO: 687 - DNA, 270 bp, unidentified
  misc_feature 1..270: note = Ga0395674_000262 JGI
  source 1..270: mol_type = other DNA
gtcaaccactcgggattgaaatcccgagcatgttaagtatccgaaagggtacgcgcatgctctagttgaccaggctcagtgtattaacactacgttaccggcgaatacataggcaccttgggatgctggccagtcccagactctgcggcagacagttaaacaggtgtgagggttaagcccgtgctgcctgcatataaaccgtcggataacattgccgaggtaaacattacccgcgtaagcggagattaacggagtagtccaattcaacgt

SEQ ID NO: 688 - DNA, 753 bp, unidentified
  misc_feature 1..753: note = Ga0315273_10011693 JGI
  source 1..753: mol_type = other DNA
ttgagagttcctatcaatatttatgtattaaataaaagaggtgaaccccttatgccttgttcaccaagaaaagcaagaattttgcttaaagagggtaaagcaaaagtaacaaagaactatccacttattattcaattgacacaagcaactggtgagcaaatacaagaatgttctcttggtattgactctggtgctaaaaatgtaggtttttcagtaattactgataaaaaagagatagtttctggagagttgattcttgatcagaaaacttctgaaagattaacagaaaaaaggatgtaccgtcgtggtcgaagaaataaattatggtatagaaaaccacgatttaataatcgaaagaaatcagaaggatggttgcctccatcagttcaaagaaaatttaacactcatattactctgattaataagttgaaaaagcttcttcctatcaaacaaacaatcatagaggtgggtaattttgatattcaaaaaataaacaatccagatatttcgagtgtacaatatcaacaaggatcaatgtttgaatatcagaatgtaagaagtttcttaatggctagagaacatggtgaatgtcagttatgtaaaaagaaattttcaaaaggtaacggtcctcacgtccaccatattataccaaaaaataatggaggaacggattcagaaaaaaatctatctttacttcatgaaaagtgtcataaaaagttgcatagacaaagtttatataatttgttaaaacag

SEQ ID NO: 689 - DNA, 247 bp, unidentified
  misc_feature 1..247: note = Ga0315273_10011693 JGI
  source 1..247: mol_type = other DNA
gtcaactacccacggataaatccgtgggcttgaatcgtgaggttcaacgcaagagttgattagagagcagtttaaagcaaggttaaagaacacacctacaggtactccactagcctgtagctctgtaaattttatattaaacagagaagaaattctcagtgtataaagtaaagtaccgactttaaacaatctcgaagtggatctacttcaacataaaggaggatagggcttgagagttcctatcaat

SEQ ID NO: 690 - DNA, 819 bp, unidentified
  misc_feature 1..819: note = Ga0113881_100828 JGI
  source 1..819: mol_type = other DNA
atgccctgttcaccggcaaaagcgcgccttctgcttaaagagaagaaagctattgtgaagaggcgaacgcctttcactattcagctgacgattgcaacgggtgaaaccaaacagccggggagtctgggcgttgatgccgggtacgaacatgtcggcctttccgcatcaacggaaaaggctgaactttatgcatccgaagtcgaactgcggcaggacatcaccgatctgctctctgctcgtcgcgcgttacggcagtcacgccgcaaccgcaaaacgcgctaccgtgctccgaggttcgacaaccgcatccgcaccaagcgcaaaggctggcttgctctgtcgcttgaaaaccgaatcaacgcgcacttgtcgcgcatagaagcggttcttcgactgctgccggtcacgaagatcagcgtggaaacggcttccttcgacatgcagctgctgaagaatcccgacattgcagggaaagagtacccagagggcgagcagctcggcttctggaacgtccgcgagtatgttcttttcagagacaggcacgtttgtcagcattgttacggcagatcgaaggatccggtgctcaatgttcatcacttggaaagcagacgtaccggtggagattcgcccggcaacctgattacgctttgtgagacgtgccataaggcacttcaccgcggcgatatcacgttgaaggccaagcgagggaaatcgttccgtgcggaagccttcatgggaattatgcgctgggaagtacacaaccgtctaagagctttgcatccggggattgaggtgagcaacacctatggataccggacc

SEQ ID NO: 691 - DNA, 247 bp, unidentified
  misc_feature 1..247: note = Ga0113881_100828 JGI
  source 1..247: mol_type = other DNA
gtcaactacctcggcctaaaggccgcggcttgaaaaagcctctagttgactagcctcaggccgtcatttggcggactatgttggtcgggattttataggcaccgcgggatgcagatcctagtcccgcgctctgcggctgatggttaaaagctctgagaggtaggagcggtgctgtcagcttgaaacccctttcaacattggcgaaggatcacaaccggtcgaaagaccgaggagataaaacttgaga

SEQ ID NO: 692 - DNA, 1275 bp, Coprobacillus sp.
  source 1..1275: mol_type = other DNA; strain = 3_3_56FAA
atggtttatgtaatttcaaaagatggcaaccctttgatgtcttgttgcaatgtaattgcaagactgcttcttaagcaaggtaaagcacaagtcaagaagcgcgagccatttacaatcaaattaaattatgaaacaacgaactatcttcaaaatctaactcttggagtcgatacaggaagtagaaccattggaactgcggttagcaacgacaatggagatattttatatatgtctgaagtggtagttaggaatgatattacagaaaaaatgacacagagagctaaatatcgcagaaatagacgaaatcgtaagacccgttacagaaaagcaagatggttaaatcgagctaattcgattaaaaatgatagatttagcccaacaatgagaagtaaactttatagtcatgtaaaagagatagagtgcattaaatctatcctccctattacgcaaatggtttttgaaactgggcagtttgatacacatcttatgaaaaatccaagtcttgctaaccctagaataaggcgttggggttatcaaaaaggtcccaattatggatacgaaaatacaaaagccatggttcttaatcgcgataattatacatgtcaatgttgtaaaggaaaacataaggacagtaaattagaaattcatcatattgtatttcgtagcaaaggtggttcagacgaggcaagcaatcttattacactatgccacacttgtcacaaagacttacatagtggaaaaattaatcctaaattgaaaggtagaattaaaggtaaccttaaatttgccacacaaatgaacacaatacgtaaacaactttttcgattatacccaaatgcaattgaaacttttggatatataacaaaagcaaatcggttacaacttggtgtaaataaagaacattattacgatgcttgtactattgcaactcaagggaacagattcacaataaagagtaatctttataaaaagaaatgtatttcagatggtgattttcaacaaacaaaaggtatatgttcaaaacaaccgattgttacaaataagattcatggatttagaaaatttgataaggttcgctatttgggcaagaattattttattaaaggtagaatgtctactggatacgcagttcttatggatataaatggcaaaaaagcagacttttcaaatatgccaaaaggatttaagactccaaaaatggctaattttaaaagaatagaggctaggacgacatggatgactacaaccgtggtgctcacttcaaatatagcatga

SEQ ID NO: 693 - DNA, 295 bp, Coprobacillus sp.
  source 1..295: mol_type = other DNA; strain = 3_3_56FAA
gtgaactaccatagaccataaaggtctatagcttctgttaaatggttcaccagactcagctgatagaaacatcagctacgatatttaggtcatgataccctcggttgacgcaacagaccgtcgctctatcgtacatatttaagttgggtcagagtaagaacagccctgtgatatgtatgtaaaaagcctttatatcattgtcgagttgaggacggaacagctatatggtaacagtataggaaagtacgcatcacctaccattaggtagagtatttataaggagacttatttatgg

SEQ ID NO: 694 - DNA, 1176 bp, unidentified
  source 1..1176: mol_type = other DNA; note = Metagenome
atgatagaaaataaaaaagaatttgcgtttgttttagatggtaacggtaagcaattagaccctaccgttatacaaaacgcatggagattaattagaaaacaaaaagctgtattagtttctaaatttcctatggttattaaattacacaaatgtataaataaggttaatgatgatgaaatacatatgggaatagatgatggttctaagtttgttggtatagctttagttcaaaaatgcaaaactaaaaataaattgttgtttttgggtacaattcaacaacgtaaggatgttcataaattaatggttgaacgaaaagaatatagaatgtatcgacgaaaattcaaacattatcgtgaacaaagatttaataatagagcatcatctaagcgtagtggcagattaccaccaactattaaacaaaagaaacaatctatactgagagtaattgatagattattaaaatatatcaaaatcaatgtatatcatttggaaaatacaaaatttgatataagagttttaatagatggatataaaccgaaaaattatacaaaaagcaatcgtttggatgaaaatttaagagtcgcaactatattaagagataaatgttgtgtggagtgtggaataaaaaatgttagatttgaagtgcatcacataacaccaaaatcaaaaggtggaaatgatacaataaaaaatctagtaacactatgcccacaatgtcatcaaaaaacatttggaaaagaatctgaatttgcagataaatattataaaattacaaatggtaagaaagtatttatagaagatgcaatgcacgtaatgcaaggaaaaaaatacttacaagacgaaatatctaaacgtggtattcttgtattgacaaatggcgcgaatacagcaaatacaagaattgaatggaatatagaaaaatcacatgatttagatgcttattgttgctgtgagttaaaatgcaacaaaacaaatttaataacatatatcattaaacctatgcggaaaaagagtagaaaaaagaaaacgaattctgtactagggtttaaacacagagattttgttgaatatacttatcgcaacggtgaaacttatcaaggatatataacagcattaaattggaaaaggaatgcgataagttttcgttctttatacaaggtatttacctggaaataa

SEQ ID NO: 695 - DNA, 306 bp, unidentified
  source 1..306: mol_type = other DNA; note = Metagenome
caataaaaactatatataagtgaatagaaatttatatgtcgttgtttaattttggtttccagcctaagtgactgcatttatatgaaaatataaatgcagatatgaactacgtcagtagaacatggtaaaaacacaccaatagatgtattccatcagtctgttgctctgtgagtgctaactaagaaactatactactgttctgtatagataacagggaaacacacgttcattctattgactttggcaagaaggaattttccattgtttataatgaggtttatcagagatgatagaaaataaaaaaga

SEQ ID NO: 696 - DNA, 1977 bp, unidentified
  misc_feature 1..1977: note = Ga0209343_10010378 JGI
  source 1..1977: mol_type = other DNA
atgcaaggacaaaaacttggtatagatttaggcggtaagcatgtcggtcttgctgttgtaagaacaccgataaacgaggtggcacattactgcactattgaactcagagaagacattaaggataagatggatgagaggaggtctcttcggagggcgaggagaaacaggctctggcatagggaagcgaggtttgacaataggcaattaagggtgaaatgcaaatatattgataaagatacaggcgaaatctgcggagctaatactccaaagaaatccaatgtaaaacatcttctacttgagaatatactcgtcaatcttaaaatagctgatgaatctaaagaggaaatcagaagaagagggctggacagagacacaaacaaaagtgaattacagacaatccttgagaaattttcaataaataccttcctgaaaaaacagattaaagacatcattcttgaaaagggggaagggagggctgtcttttgcagagagcatatcccctttcattatgaacaggttgcaacagaggctgagagtttctggctgtcaaattcaataagggctaaacaggaccagatactctcccgccttaaaagaatagcaaaggattttaagatagatgaggtggttattgaaagggcgaactttgatttgcaaaagctccagagacctgatgagatagaagcacctgaagattacatgaagggtcctaacttcgggcacagaaacaggtttgaggcattgaagcaggaatatggcaaccgatgctgtttctgcggaaagaagggtggagatgaagtaaagctgaagatagggcatctctatccgaaggctaaagatgagataaacaggtgggaaaaccttataactatatgtgaaaaatgtaatgcgaagcagggtaaaaggacaccagaggaggcagggatggaatttgtaattgtaaaggagaaggtttttaatcctgcagcaggaagggtaatacccataaaaagagaactcaagccgaagcccataaatgaatcaaaggttaataaatatatgacccatactgatattggcataaggaggctcaaaagagaaatccagaatatttttggaagcatacctataagagaaacatacggctatatcacatcgtattttagaaataaatgggagcttgaaaaagaacattataatgatgctgtagtcatagcctctgacaaagaagatttgaatataaaacctgtatttaaagatgcagtccctcagacaattaaatcatctatcaagggcgggaaactctttgatacaaatcccctccagtttagtgatggaaagttttaccagaacataacccttataggcagaaaggcagggatgcgttcatcaaaacataaaaggggtcagaggaatatcaggaactatggctcaatttatatggatgagattgaacttataacctcagaatggaagaaaaaggttctctgcgaattaagagataaacttggttatgtaaaaggagataagaataagtcttttaagcctgaggaactgatgaatgcaaatctgcctttcaggactgtaactattgacaaaaggggtgtaggagaatcttcaacccgcttaatcaataacaatgtattccgtgcctcagctgaagtaaatacgcatataatggtctattcaaataatgacggtagaatgaaggcatttgcagtaaaaaatcctaagatatttaaagatgccggactccctcatgattttcaaaaaaagatattcattgtaaaaaagggggatattgttacatggaaaaaaagtgaagatggaattgccgtaacaggcagggtgaccaaatgtttgacaaaaaatggggtaattgatataaaggacatgaataataaaatacactcagggaaaaaccctgtgtatattgaaaagatagtatctcctgaaaggggtgctatttttgagagaaaatctctttctgctctttga

SEQ ID NO: 697 - DNA, 262 bp, unidentified
  misc_feature 1..262: note = Ga0209343_10010378 JGI
  source 1..262: mol_type = other DNA
ctcgccataagaaggatactgtctgaaaggaggtttgagcctgaacactcttccaccttcctgatcaattgcgattaatagagggattttatggcttttaattgataattcctgaagggaattgcataaatctttaacctgtgacggagactctatatttcttgaaaataggattacccccccgaccccataatcagttattattccttttaactcatctgacatagtagtcccatgaaatcccaccataaacatctgcccg

SEQ ID NO: 698 - DNA, 1368 bp, unidentified
  misc_feature 1..1368: note = Ga0209737_10031347 JGI
  source 1..1368: mol_type = other DNA
atggtatatgtaataagcaaggaagggcagccgttgatgccgacggaacgtcacggcaaggtgaaacacctgttgcgccagggcagggcgaaagtggtacggtctgccccgttcacaatccagttgcagtacgagactggaagccacacgcaggaggttacccttggcatagacagcgggtatacgtatataggtataagcgcaatgagcgacaataaggaattgctgtcgtgcgaggttgagttgcttgacggaatgaaagagcggatatatgacagggcaatgtacaggagaaaccgcaggcagaggctaagacacagggcaccaaggttcgacaaccgtggcagggcgcaagggtggtttccacctagcgtcaggcacaaatccgacagccacattaggctggcatatatgctgaaaggactgctccctataacgtaccccattgcagaggtggcgaacttcgacatacagaggataaataacccagacatacaagggaaagaataccaacagggtgagcagatggggtggcagaacgttagggaatacatattccacagggacggacacaaatgccagaagccagagtgcaaaagcaagggagagaaagtgttgtgcgagcaccacataatcccccgggcgcagggcggcaccgatgccccagacaacctcgtgaccctttgcaaccaatgccacacttccgaaaaccacaagggtttcctcaaagactggaaaccaaaggtgaacggtttcaaggcggagacctttatgaccaccgtcaggcatactatatgcgagcagctcaaagggatattccccaatgtcggaatcacgtatgggtatatcacgaaacacaggaggatagggcaaaaactggctaagacacacgcgaacgatgggtatataatagcgggaggtaaagggcaaccacgtgcggaaacgctgtcaattaggcagataaggcggaacaacagaagcctcgaacggttctacgacgctaaatacattgatacaagaacgggaaagcccgaatatgcgagtgtgttgaacaacggcaggactacccggaacatgaacctgaacggggagaacctgaaaaaataccgtggggaaaaagtcggcaagggtcgaaggagcattcgcagaaaccactatttctatcagcccaacgaccttgtaaagtatgaaggcaagatttatgaggtcaagggtgtcgtcaacaggggcaactatgtcgctctcaaaggcattaaaaaacagccaaaggtggaacagttgaaaccatacagattcagaaaggggtttgtgattgaaaacagaaagggcaagaggaatcaagggggcgcaattcaccccaccgcctaa

SEQ ID NO: 699 - DNA, 304 bp, unidentified
  misc_feature 1..304: note = Ga0209737_10031347 JGI
  source 1..304: mol_type = other DNA
gtcaaccacccaccgcctaacgcctaacggcgtttgaggcgggggcttgtatgggactacgcaacctacaggccagttgaatagcccaagccttgaaacaaaggctacgttaccaagaatgacataggcacccacggatgcttcccaagtccgtggcactgcggacggtgattaaacatccccgagggtaggggaagtgttgccgccaaaaaccttggataacatcggcgatgggaaccaaccggggcaggtcaaactgcaacggcattatgaccccaacgggttcaaaaggagaaagagcatg

SEQ ID NO: 700 - DNA, 1173 bp, unidentified
  misc_feature 1..1173: note = Ga0075011_10000624 JGI
  source 1..1173: mol_type = other DNA
atgtttcactcctctgaaccaaacaaacaaccactagtaccggttgtttccgtactcggctatcctctcatgccgtgtagacctgttagagctcgtaagcttgtagagcaaggtagagctaaaaagtgctggaaaaagggcttcttctatatacagatgcttgttcttaccgaagaacagactcaacctgtagttgtaggtatagaccctggatctaagagagaagcgtttactgttaagtcagaacacgctactctgttaaatctacaatcacatgcctgtgacggcaatagtataaagaaagctctagaatttagaaaggttatgcgtagggctcgtagatctagaactactccttgtagacctcctagattcaacaaccgctctagaaaaggctgggtaccaccatctactctagcgagatggcagttaaagctcaacatacttaatcatctgtgctttctctatcccataaaaactgtggttatagaggacgtaaaggctatgaccagaaaaggtaagaaacaatggaacagcaacttttcacctgtgcaagcaggtaagaactggctatacagccgtatacaacagaagggtcttgaactgattaaggttgatggatacaaaacctttgagctacgtgaagctgccaatctaggtaagactaaaaataagcttgctgaaacatttagtgcccactgcgtagactcatgggtgcttgctaactactatataggcgggcatgtacaaccagataacaccactctacttactcttaagcaggtaaaagttatacgtagacaactacattttgcctgtagatatagtaacggaaaaagacagcgttacggtggaagtatgtccttagggataaagaagggtactgtagtatttcatcctaaatatggacgctgtcttataagcggaaactataacggacgaataagtttactatcaccatactcacttgagagagttactatacacgctaaagtctcagatctgaaaatagtggcatactcaccgtgggttataaatggtaactataatcttcctatatcgtctaaacgtaacgatagagctactagaaagaacatagctagaactaggtttcttcaacaatctatgcgtagttgttgctcacaaaagaatttaatttcacttcttccctaa

SEQ ID NO: 701 - DNA, 231 bp, unidentified
  misc_feature 1..231: note = Ga0075011_10000624 JGI
  source 1..231: mol_type = other DNA
atcaactatccagctcacaaggctgggtctgctaaatgctgccaacagctcatagcggaatagctagtcgaaaggctagtaatagttgattagccattaccaaaactgaacgacctgtggatggaaccacacagtacctacggatgctcccctagtctgtagctctacggttgtcagtggctaaggggtccttactcgtctcctcctgaacttaccgttaaaaggacacac

SEQ ID NO: 702 - DNA, 693 bp, unidentified
  misc_feature 1..693: note = Ga0116227_10001884 JGI
  source 1..693: mol_type = other DNA
atgcaaacggttttggtagtagatacaaatagacggcctttgatgcgttgctctccgattagcgcaaggaagcttttacaagaagggcagtccgcagttttacagctgcagccttttacaatcgtcttgaaaaaaagagaaggagggtccgatagggtgtccaatttgacaatcggttgcagagaatgccatagcaaaaagtctaaccggtcccttcggggatttttacaaggcaaaccttctttacagtctcaaattcgggggaaggctaaaaagcctcttgccgatgcgtctgccgtcaataggacggggaaagagattgtatatcgtctcgccacatttgatctgcccatatcttgctccccgggaggaagggcaaagtttaacaggactcttcaaggatatcccgaaggtgaaagaagagtccgcggttttgcaacggcagatttggtaaaagcggttgtcctacaaggtaaaaaaaagggaacatactccggaagagtcgccatccgatcatcgggaagtttttgcatcgatacccctaagggaaaagtagcccgtatcagctatagattttgtaaacatctgcaatacgcagacggttatcaatattcacaacaaccacaacaaccaagggagcgacgcttcctaccgcgactcaagtcgcaggtttccgcgtcgtcagttctatga

SEQ ID NO: 703 - DNA, 252 bp, unidentified
  misc_feature 1..252: note = Ga0116227_10001884 JGI
  source 1..252: mol_type = other DNA
gtcaactcccccttactctaaagagagaggcttgtaagaaaactaagcctaagttgaccggactaagttcttgtaagtaacaagagctacgttagagaagagtagataggcaccttggaatgcggctccggttccaagctctgcggtttacggtcaaaaacttctcatcccgttgccgacgagaacatcccccgggaaaagggagattgcaggtaactgctaactagtaaaaaaagagaaacgatgcaaacg

SEQ ID NO: 704 - DNA, 393 bp, Pelotomaculum sp.
  source 1..393: isolate = PtaB.Bin104; mol_type = other DNA
atgccttgcaaaccgcagaaagcacgaaagccgctcacggcaggcaaggcaaaagtggtaaaccacgaaccgtttaccatccaactgctgtttggttctagcgggtacaggcagtctgttacgctgggcatcgacgctggctctgtccatatcggtgcctcggcatctacgaagaagcaagaactctatgcttctgccaaaggagaacgttggtatattcgagggcttcgttctaaaagcagcttcgttctaaaaaaacttgatgggacgaagcttgagattatgccaagcaagattagcttcggctggcacaataagtcgtatttagtagaaaggaggagcgcggctcctctcgcggttaaaaccgcaagtacccgccgcgcaaattgttaa

SEQ ID NO: 705 - DNA, 302 bp, unidentified
  misc_feature 1..302: note = GENOME_ACESSION: mgm4547164.3 MG-RAST
  source 1..302: mol_type = other DNA
gtcaactacccgcacctaaaggcgtaggcttgcgaaagcccaaacctttagatgcaggcatagcctaagttgactagcctaggtctcggtctcatttgctgggactccgttgtttttgttatcacacctgtgggcgtatatcctaacccgtggctctgtgctggctctgtaaaagccctgtgaggtaggggcggtcaaccagatgtaggccgattacggcaagcaattacaacattggcgaagggtagatttactctgatttgaggcttcggccttggaaaggaggtagacgtatcttgttc

SEQ ID NO: 706 - DNA, 1314 bp, Pelotomaculum sp.
  source 1..1314: isolate = PtaB.Bin104; mol_type = other DNA
atggtatacgttttatccaaagacggcgcacccctgatgccgaccgaaaggcacggaaaggtgaggcggatgctaaaggacggcagggcgaaggtagtcaaagccaggccgttcaccattcaattaacgtatgaaacaacaagctacacccaacccataaccctgggcatagacgccgggtatcaagaagtcggcctgtcagcggtaacttccgaaaaggagcttttgtccgccgaatgcaccctgtttaaagggcaggtggaacgcaacaaagaaaggctcatgtaccgcaggcagagaagaaaccggctgcgttaccgtgcgccacgttttgacaaccggaggaaaccagaaggctggctggcgccgagcattcagcacaagctggacagtcacctgcgcctgatagcctgggtaaaaaagatacttcctatcaccgatgtggttatcaaggtagccagttttgacatccaggcgattaaaaatcccggtattcaaggcatagagtaccagaaaggagagcagtacggcttctggaaccttcgcgaatacattctgcaccgggacagtcaccagtgtcaaaacccggagtgccgtaacaaatccaaaaccccggtgcttcaaactcaccacataggattttggaaaagcgatattacagacaggcccgggaacatgatcaccctctgcgacaaatgccaccggccagagaaccacaagaaaggcaagttcctgtggggatgggagccgaaggtaaagtcgttcagggcggaaacatttataacaacagtgcggtggagaatggtcaatacgcttggctgccggcatacctacggccacataaccaaaccccgcaggatagagctaagactggagaaaagctactccaacgacgccttcgtaatagccgggggtagcagccaaacccgggcaaaaatgctcagcatcgagcagatccggcgcaacaaccggtctttgcagaagttctacgatgccaggtacatcgacattcgcaacggaaatgcagttggcggccaagaactaaactgcggccgacgtacccgtaacaggaatattaacgggcccaatcagcgggtataccggggcgagaaggtgtttaaaggcagggtgagcatcagaaagcagaggtactcgtaccagcccaaagatattgttgaatatggcggctggcggtacacagttaaaggcgtgcagaactgcggcgtctacatcaaattggcagaattgagcaagccagtgaggacggagttggtcaaacctgtgcggtacagcaagggtttgtgtgtgatgtaa

SEQ ID NO: 707 - DNA, 314 bp, Pelotomaculum sp.
  source 1..314: isolate = PtaB.Bin104; mol_type = other DNA
gtcaacaacccccacttaacggctgcgccgttagaagtgggggcttggggtagcgtgaggcgatagtcttacgtctccaggcccggttgattagctttagtggttggtatccggaaggaacgaaccgctacgttacggtggaatgggaaaccaaataggcactccggggtactccacacgctccggacactgcggccggtggttaaacatcgctgagggtaggcgaagtgctgccggcgacaaacccgtcgtaacattggcgaagtggacccacagccgaaaggctggcttatttccgaaaggagatcgcgatg

SEQ ID NO: 708 - DNA, 1380 bp, unidentified
  misc_feature 1..1380: note = Ga0256404_1034523 JGI
  source 1..1380: mol_type = other DNA
atgctgacatatgtactggctgcagacggctcaccactgatgccgacctacaacatcaaaaaggtgagacggatgctaaaagacggcagggctgttatagcaggacacaatccggggtttaccataaggcttaattataatctgccggaacaggacgcccctcatactcaggagactgagttttgcgaggacacgggcgaccatcacatcggcgtgtctgtaaagtctgtaaagcatgaatacttccacggtcagttcgacctgctgacagacgaaaaacagcgtcatgacgactgccgggcgtaccgcaggacaaggcgtaaccgtaagcgctacagaaagccacgttttgataaccgccgcaggaaagacggctggtttgctccatcggttgagaacaaggtacagcgtcacgcagatatctttgcaatgttcgcaaaggtcctgcctataaagtctgctactcttgaaacggcgaggtttgacactcagctattagaagcccagcagacaggaaataaacttccacaaggcaaagattatcagcatgggccgaggtttaagcttatcaacctaagagaagcggtctttacgagagatggctatacctgtcagatatgtggcaagtctgtatctgacggagcaatactccgtgtgcaccatgcactgtactggaaaggcgaccatactgacaggttatctggtctgataacggtatgcgataagtgccacacgcctgagaaccatcagaaaggcggcaggttatggggcataacaccagaagtaaagtccatggcaggcgcagccttcatgaatgctgtacggtggcacataacagagatcttcaggtcagggttccccgatgtggagacccataccactaatggtgcggctaccaaagcttcaagaaggatgcagcgtatggcaaagacacacgctaataacgcttactgtatgggtgagttcagaccacggcacaaagcaagggagatgcattacaaaaagcaccgccgtaacaaccgtgtgctgagcaagttctacgatgctaaatatattgatgtcaggaccggcaaaaaggcttccggcaaggaattaggcagtaatcgtaccaataggtcggttccaagggataatcctaataacctgagaaagttccacggcatgaagctgataaaagggcatgtatctgtccggaaaaagcattatgacatacacgctggtgatgtagtgctctgcaaaggcgtgaagcgtctggtgcacgcaatacacagagggaacaacgtagagtttgaagctgacggcataagcccgaagtcagcttcgccggacaaggtaaagatcatacgaatgataggaggatggcacgcctcttctgaataa

SEQ ID NO: 709 - DNA, 373 bp, unidentified
  misc_feature 1..373: note = Ga0256404_1034523 JGI
  source 1..373: mol_type = other DNA
gtcaataacccgcggttaaaaccgcaggcttggtctgaaacacaggactgagcctggttgataagcaatagcgaccccgtcaagtcgtttttacgatactggcagggcataagctacgttacccggcaaatataccataggcactttcggatgctccacaagtccgtaacactgcgggcgtgcattaaacatctctgagggtaaggagaagtgtgtacgtctcgttcttagaacgtaaaacaccgggataacatttgcgatgtggacacgtccttttaaaggacagaatcctgtgatggtctttatcacaggaagccgtaaggcattagtaacttattagcatagcagaaaggaggcatcagttatgctgaca

SEQ ID NO: 710 - DNA, 774 bp, unidentified
  source 1..774: mol_type = other DNA; note = Viral metagenome
atggtatatgtaatttcaaaaagtggaaaaccgcttatgccgtgtgagaatgtaattgcacgattacttcttaaaaatggtaaagcaaaagttaagaggaaatgtccattcacaattcaattaacatatgattcaacagaatatgtgcaagatgtgacattaggacaagatactggatcaaaacatataggtacagcatgtgttggaaacaacaaagttctatatcaatctcaagtagaactcagagacgacattaaatcaaagatggatggtcgtaggcaagctcgtagattcagacgaagtagaaaaactcgctatcgcaaagcacgatttttaaatcgtaagaattctactaaacttgataggttgcctccatcaattaaaagcaaggttagttcacattttaaagaattagaattttgtcacaagattttaccaatttcaagagaagttttagaagtagcacagttcgatactcaattactccaaaatccaatattagcaagtgaaaaggttagacattggggatatcaaagaggtaggctttatggctttgaaaatgctaaagcgtatgttttaatgagagataactacacatgtcaatgttgcaaaactaaaaaaggtacattgcacattcatcatattgtatatcgttctaaaggcggaagtaatgacacagataatttaattaccttgtgtgaaaattgtctatcttgtcttgatacacattttttgaaaaatactgtgtcgctttgtttaaatgagtttccttga

SEQ ID NO: 711 - DNA, 323 bp, unidentified
  source 1..323: mol_type = other DNA; note = Viral metagenome
gtaaatatgtgctcggataaagactgaccgccttttagtgtggcacagcacttaaattatttacaagacttaggtttgagaaatcttacctacgttagattggagaaacacatacacaccctcggttgatgctcaagaccgtcgctctgtgactactaattaagttaggtgtgcttaaaaaaatagccttgtgttagtagtttcaaaacccagtttaacattgtcgatgagaagaccaattctaattttggtaacagaaattagataggcactaccaagatagaaatatcttgagtttatactctaacaaggagttaaaaatg

SEQ ID NO: 712 - DNA, 1398 bp, unidentified
  misc_feature 1..1398: note = GENOME_ACESSION: mgm4547164.3 MG-RAST
  source 1..1398: mol_type = other DNA
ttggcgaaggtattcaacggtatagtgtgtaccgtcttatcgagtaaaacacactattcagagaaaggagtgctgcttatgcaggcatatgtatttgtaattaataaagatggacagccgctcatgcctacacagcggtacggtaaaatccgcaggctgctgcgagacggacaagcaaaagttgttaaacgctgtccatttacgatccaactgctgtatgaaacaacagatgttgttcaaccggtagatttaggtattgacacagggtataagcatattggtgtttctgcctgtactgaaaagaaagaattgtatgctgccgatatgcaggtgcgtacggacatttccaagaaccttgaacagcggagagttcttcgccgcgcaaggagaaaccgcaaaacacggtatcgcaagccgagattcaacaaccgtgtccgcagtaaacataaagggtggcttgccccatcagtagaagcaactatcggtttgcatatcagagttattcatgatgtctgtaagattcttccgatcacatcaatcacgcttgaaaccgccgcatttgacacgcagaaaatgcagaacgctgaaatcagcggcgtcgagtatcagcagggaacactgatgggctataccatccgcggctaccttgcggagaaattcaatcaccgctgtgcctattgtggcaagacggaaaatagtgagacgaagttcgaagttgagcatgtcgtaccaaaagcacgtggtggttcctcaagaatcagcaatcttgtgtgggcctgccacggctgcaacgaagacaaaggcacacgtaccgccgctgaatatggacatccggaagtgcaggcacttgctgcaaagggcggatcaatgcgttcagcagctgcaatgtctgtgatgaagtggtatctctacaaccgtgtaaaaactgaatacgatgatgcagtgcgtatgacatatggtgcggatactgcgacaaagcggtataagttcaatctgcagaaagatcaccatatcgacgcccgctgcatttctggccatccaaatgcaattccttcgcaggaagtatattacatgcggaaaatcaggtgtcacaaccgtcagctgcataggctgaagatcaacaagggcggtactcgcaggaacaatcaggtgccatacgaagtatggggcatccggttgtttgacaaagttatatatcaaaacagggaatgctttgtgtttggcagaaggaattccggcagcatggatatcagattgctgaatggtgcaaaagttaatgccggagtatcgtataaaaaattgtctgtcatttgcaaagcgggaaatattattttagaaaggaaggtgattaccgacattccctgcctatggatgtctcaaatggtttcctgtcggtga

SEQ ID NO: 713 - DNA, 312 bp, unidentified
  misc_feature 1..312: note = GENOME_ACESSION: mgm4547164.3 MG-RAST
  source 1..312: mol_type = other DNA
gtcagtaatccacggatatacccgactgtatgtctgaagtaaatccgggtgcttgtaggaaactataagtccatgctgactagcctaagtgttgaaacaagcactacgttgctttggtcatgacaccctgggacgtcgtacctaatctcctgcactgtcgttatgcattaaaagccctgttgggtaggggcggtgtgcataacataacaagccattgcaacattggcgaaggtattcaacggtatagtgtgtaccgtcttatcgagtaaaacacactattcagagaaaggagtgctgcttatgcaggcatat

SEQ ID NO: 714 - DNA, 756 bp, unidentified
  misc_feature 1..756: note = Ga0190303_1007606 JGI
  source 1..756: mol_type = other DNA
atggattcacaaggtaatattggacatccaacacgaaattgtagaatggttcgaagattattgaagaaaggtaaagcaaaagtaatagctggtggtataaagaaaggtcagccactattaatacaattgcttgacaaagtatttgataaatctaaaacaactgatgcagaatttcgcattggtattgatccaggatataaacatatcggttatagtttatttaaaatatataaaaatcatattgagttactattatctggcgaagtagaaaccagaacatctgaagttactgagaatttaagtaatcggaagatgtatcgaaatctcagacgtcaatatagacgaaagaatgttaaacgtaagtttggaagagctaagtttagacatcctagatggaagaacagagctaaacatgcttttcaacctactcatagacatttgattaatagtcacattaatatattaaaatggctgttcaaaagagtaccaaaagatcaatgtgaagtgcatttagaatatagtaaatttgatgttcaaaagattattaatccaaatatttatggatggcagtatcaacatggtcctcaatataattttgaaaatgtaaaatcatatattcgtgatagagataattatacttgtcagatatgtaagaagcatgttggaaatatacaaaatgaagtacatcatattataccaagatctaaaggtggatcagacagaccggataatttgattcttttatgtcaaaattgt

SEQ ID NO: 715 - DNA, 324 bp, unidentified
  misc_feature 1..324: note = Ga0190303_1007606 JGI
  source 1..324: mol_type = other DNA
ccaactgttgattaatataatttggagattttgaaaaaatgaaaaattttttttgatgtagattacctaatttcttaaaattagggctacaacaggcctgattaaatgttcaccctggaatgccactcccagtcccaggctctggaggtatcagtaattatattacttagtccttattgttgactagtaggtaacgaagatcaatattacatttaatcaagccgagggagaccaatctaattaattaagctgagctttttaattagcttttattttaagttaatttttaagtaaaaaaattggagacaaattttaaacatgatt

SEQ ID NO: 716 - DNA, 1260 bp, unidentified
  misc_feature 1..1260: note = EMG_10019972 JGI
  source 1..1260: mol_type = other DNA
atgccgacactacgtaacggtcgtgtccgttaccttctgaaagaaggaaaagctaaaatctttaagtatcatccctttactatccagcttacttacgatactcctgataagacccagcctattgaaataggtatggacgcaggttatcagtatatcggagtatcggtcaagactaagcagaaagaactgttctctgcagaattcgagcttctgcctgatgagaaacagcgacatgacgattgcagaaagtaccgtagaacaagacgcaaccgtcttagataccgcaaaccacgttggaacaacagagtccattcaaagcctgaaggctggcttgcgccgagcatcaataacaaagctgagcggcatatagatatcattagacgaatcattagtgtcgctcctgtcaaatctataaccatagaagtcggagaattcgacccggctctgctcaaagccatgtacgaaggcaaagaaccgcctcagggaaaagaatatcagcagggcccactatactttgcagacagcttgagaaaagcagtatttcagcgtgataattatacctgtaatatatgcagaaagtctgcattaaaggacaagaacgtaatactgaaaactcatcacgcactgttctggaaaggcaggcatggcaacagcctgaatgagatgataacagtatgcagcaaatgtcatacgtcagctaaccatcagcctacaggaaaactgtacgggttagaacctagattacctaggcttgagggtgcaacatatatgaatattgtccgctggtatattatcaacacattgaaagcagcattacctgataccaacatagatttctgttatggtgcgttaacttcacgcaagcgtaaagatttaggtatagaaaaaactcatgccaatgacgcatattgtataggcagttttcagcctgaacagcgacctgtttctacaacatactataagaagaaacgtaggaatagccgtattcttgaaaagttctatgatgcgaaatactatgatattcgcgacggaagtatcaggaagggttcagaactaggctgtaacagaaccaaccgcagagaactgcgtaattctgaaaataacctgagaagatttcacggtgctaaaaaatctaaaggcaggcgtgtaatccgtagaactagatacccatttcagccgtttgaccaggttttgtttaatagcaaaaaatacattgtcaaaggagcgcagaatttaggcatatatattgctttaattgga

SEQ ID NO: 717 - DNA, 287 bp, unidentified
  misc_feature 1..287: note = EMG_10019972 JGI
  source 1..287: mol_type = other DNA
gtcaactacccactgcctacgcgagcaagctcgcttagaggcgggggcttgtaaaagcctagttgattagcctaagtcttaaataaggctacgttataccagaatacattgtaggcaccagcggatgcttcacaagtccgctgctctgcgggtatatgttaaacatctctgaagggtaggagaagtgcatatatctttaaacctgatataacattggcgatgtgaaccacagggtttatccctgcattatcgtcccttacgggagaaaggagaccgttatgactacg

SEQ ID NO: 718 - DNA, 1356 bp, unidentified
  misc_feature 1..1356: note = GENOME_ACESSION: mgm4784118.3 MG-RAST
  source 1..1356: mol_type = other DNA
atggacacgacaagccctcaaaacattggcgaggaaaccattaccccgacagggaggacattcatgtctaattttgtttttgttgtcgatactaaccttcaaccgcttaacccaataccgtcgggacaagcaagaagactgttagcacaacagaaagcagctatttatcggcgttacccatttacgctcgtactcaaaagggcagtaagagttccccaaacgcaaccgcatcaattaaaaatcgatccgggttccaaagttagcggattagcaattgttcgagatcgcaaagtaatttggggtgccgaattaacccatcgcgggcaacaaattaaaaatgacttagagtcacgtagcaaccttcgtcgcaatcgtcgcaaccgcaaaactcgttaccgcaaaccgcgttttcttaaccgcaatcgaaagcctggatggttgccaccaagcttagaatccagagtgaaaaacatcgtgacttgggtcagccgcatccgccgatatgtcccaattacaggcatatcccaagagttagttaaatttgatacccaagccatccaaaaccctgaaatatccggtgttgagtaccaacaaggagaacttgcgggttatgaagtcagggaatacttgctcgccaagtgggggagaaaatgcgcttattgtggcgttgaaaacgtaccttttgaggtagaacacatctacccaaaatcaaaaggggggagcgatcgcgtttccaatcttaccctggcttgtcgccagtgcaaccaagccaaaggcgatcgatatcttcgggagttcttgtcaggtaaacccgacattctgtcccgtattttgcagcaggcaaaacaacccttgaaagatgcggctgctgtgaattcaacccgcccttcattgttccaacaactcaagcaaacaggattgccaatagaagtttcaacaggaggtagaaccaagtacaaccgcactcgtttaggactacctaaaactcattggctggatgcagcttgtgtgggaaatcaagaagtgctgcaagttgtgacgaagcagccgttgttaattgcagctaaaggatgggggagccgtcaaatgtgtacgaccaataaatacggatttcctgtcaagcacaaaacgcgatgcaaaacgttttttgggtttgggactggcgacatggtaagtgcaattctcccatctggaaagtttgcaggcactcacgccggcaggttgacggttaggcaaagcggggttttttccatgacaacgccacttggcaaaattagtccggtgcgtcataaatactgcaagttaatccaccgcaacgatgggtatatgtatgcgttgtccgccgttgttcattaa

SEQ ID NO: 719 - DNA, 243 bp, unidentified
  misc_feature 1..243: note = GENOME_ACESSION: mgm4784118.3 MG-RAST
  source 1..243: mol_type = other DNA
gctattcaccaaacagcgaacaaaagtggacaactacttcatatgctggagagatagccagcctcagttacaaactacgttttgggggtcatgacacctacgggtgcttttccagcttgtagctctgtcgtcaatcgttaaacatccctatttggttaaggaagtacgatggacacgacaagccctcaaaacattggcgaggaaaccattaccccgacagggaggacattcatgtctaatttt

SEQ ID NO: 720 - DNA, 648 bp, unidentified
  source 1..648: mol_type = other DNA
atgtcatacgtctttgtcatcgataccgataagcagccgctttcccctgtccatccggggcgagcacgcctgctgctcaaagggggaaaggccgccgtctataggaggtatccgttcaccctgattctcaagcacaaggttgacaaacccgtgcccgcaccgttacgtctcaagcaggatattcgagacttccttgctgatcagcccgaccgactctgccatgtgctaacccaaacgaaagtacctctcaaagatgccaccgtggtcaacgtgacccgctccgaactcctgcggcgcttgcaggccattgggctatccctagaaacaggttcaggtggacgcaccaaatacaaccgcatcatgcgtggcctgccaaaaacccactggacagatgcagcctgtgtagtggtagggattgggggtccagggggcgaagccaccctggcggggtttggggtgtccccaaattctcccattccccaaagggttttgggcttctgcactaggcacggcaaaatcactgatgttccacaccgcttttgtcagcccatccatcgtagcgatggctatacctatcatcacggagtgaggatttccccacccccaactagcccgaaaggagcgcctgtaagtacctccacttgctag

SEQ ID NO: 721 - DNA, 307 bp, Chloroflexus sp.
  source 1..307: mol_type = other DNA
gtcaagtccccccatcctgacgtgtcagggtggaggctcggaagctagacttccaagccggaaacttgagcagacagaggtttgaaaaacaaccaacgttatcagtaagcgttaaagaacctacctgcgggtgcttcaccagcccgtagccctagaaccgttcagttaaacaggtgtagagggagaaactagtgctgagcggaaagtaccggctgataactgtgtcgaggtgagcatcacctgggaaaccagaggccccacggggcataaaacaaatagaaggaacacgacatccgccatgtcatac

SEQ ID NO: 722 - DNA, 1371 bp, unidentified
  misc_feature 1..1371: note = Ga0183746_00132 JGI
  source 1..1371: mol_type = other DNA
atggcggttttcgtactggacaaaaagaagcaaccgctgatgccgtgcagtgaaaagcgcgctcggttgctgctggcgcgtggtcgtgccgtggtgcataagcgctacccgttcacgattcggctcaagaatcgcgtcggtggcgaggcgcaaccgcttcgcctgggcatcgaccctggcagcaaaacgaccgggctggcgctgatgcacgaaccggacagtcagcagcggcatgtgctgtgcctgtttgaactgatccatcgcggctttcagatcaaaaaggcattacagcaacgcgccgcctttcggcgtcgccgccgcagtgccaacctgcgctaccgcgccccgcgcttcaataatcgcatcaaacctaagggctggctggcaccgtcgctgcagcatcgggtggatacggtgatggcgtgggtcaatcggctatccaagtcggcacccatcaccggcatcagccaggagttagtgcgctttgacacgcagaagttggaaagccccgagatcagcggcgtggagtaccagcaaggcaccctgctgggctacgaggtgcgcgaatacctactggaaaaatgggggcgtgagtgtgcctactgtggcaccgccgatacgccgctggagatcgagcatatggtgccgcgttcacgcggcggctcgaatcgcgtcagcaatttgaccctaagctgccatccctgtaatgccgagaaagatagccagacactgaccgattttttcgccaccaacaaaggcctgaaaaagcgcctcaaggctaacggcttatcagctgacgcacagctggaacgtgtacagcgccagctcaagcaaccgatgcgcgatgccagtgcggtcaatgcgacccgctgggcgctgttctccgcgctcaaaaccacggatttaccggtcgccgtgagcagcggtggccgcaccaaatacaaccggcagcgcctcaacatccccaagacgcatgccctggacgccgcgtgtgtcggagcttttggtaagctgtatgactggacagagccgacactgacgatcaaggcgatggggcgcggcagctaccagcgcacgcgcttaacgaaacacgggtttccgcgtggctatctgatgcggcagaagcaggtgcacggctttcaaaccggcgacatggtgcgtgcgatagtacccaccggtaagaaggccggtacccatacggggcgtgtcgcgatacgcaaaaccggcagtttcaacatccaagccgaacacggtgcagtgcaaggcatttcccataaatactgcaccctcatccaacggagcgatggctacggctattacgtcacactcttcagcaacctaacaggagaagcgggacgggcggtggcgtaa

SEQ ID NO: 723 - DNA, 294 bp, unidentified
  misc_feature 1..294: note = Ga0183746_00132 JGI
  source 1..294: mol_type = other DNA
gtcaactacccccgcctgaaggcgggagcttgtgaaagcaagcctagttgaccagggtaagcgggcggtacagccgctacgttgataacaggtcgccaagactcacccacggatgcttcctcagtccgtggctctgaaaggtcaagatcatgctggcgcagggtaaaacgccgaaggtcttgaccgctgccacaaggcaggagccggttatcgacattcccgaggggagacggggcgtaagccctgcgacacaaggcccgtaagggcgctatttaaggagaagatcgcatggcg

SEQ ID NO: 724 - DNA, 2622 bp, unidentified
  source 1..2622: mol_type = other DNA; note = Rock porewater metagenome
atgcgctggctgctaacattggcgagagggaccttactccgagaggaggtagactctatgttagtctacgttatcaacaagcacggaaaaccgttaatgccctgcaaaccacagaaggcaaggaggctgctgcaagagggcagagcgaaggtcatgaggcgcacgccctttacggtccagttgctttacgggtcgagcggttacagacaacccgtcagcctcggagttgatacgggagccaagtacgtgggggttgccgctgttcggacagacgagaaaggaagagcaaagaatactttgctgcaaggcgagtgtcagctgcgagcagatattcgcggcaagatggaccgacgcaggtcctatcgcagaacaagacgtggccggaagacgaggtatcgaaagccaagatttgataacaggcgtcgaccggaaggatggttggcacccagcattcagtccagggttgacggcacgctaaaggtgaccgatttgctccgccagctgcttccggttacttcagtagaagtggagaccgcgcagtttgacacggcagcaatggcaagaggagtcctgcgactgaggccctggcagtaccaacggggcgagcagtaccagtttgaaaacgtcaaatcgtacgttcgacatcgagacggatatcgatgtcgccagtgcaaggccaaaggtcgtccgttggaggttcaccacatacgaaaaagagctgatggcggaacagatcgccccgctaacctgataacgctgtgtgaaggttgccacgatcgggtccataagggcgggatcaagctgacggcggttcctggaagaaccaatctccggtatgccgcccacacccaagcaggcaagacggcccttgtggcagccctacgggaacgactcccgacttccgagacgacaggcgccgtgaccaaagtcgatcgacttgagatgggactatcgaaaacccatgcgggcgatgcgctggccatagcggctacaggggtacccgtcgaacctgtggacacccagttttttatgcgctgtatcccaaagggaaactaccggctgttcaaaggtgctcgcagccatatccgtaatcagagcgcccgcgaactgtttggcttccggcgtctggacaaagtatgcttgcccggtggtcaagaagggttcgtcaaaggtaaacggacctctggttacttcaatgtgagcacacttgacggcactgtgatcagcgcgtcgatctcgtacaagagattgcgtctattggagaaacaaacatcgctgctcgtcgaaaggaggcaggccgtttctatgaaggacaccaggcttgtgctgacggctactgttgttactgtagggtccgagatcgttgaggggatcattctcaacagtaatgcccggtatttatcacttcaactgcaggcagccaatatcagggtgctaaagcacgtttccgttgacgatgacccaagtgcgctaacggaggcgctcaaggaagccattaaagaaactgacgtggttgtagtcaccggggggctaggcccaactgaagatgacataacgagggaagcggccgccagcgccctgggagttggcctgactcaagatagggaaatggttgagcagatcgagaggtacttcagggaccgacacctgacaatgagcgagaataacttgaggcaggcaatgtctcttgagggcggcgaggcgctgactaacgatagagggacagcacctggtcagttcgtcttactggatggatctcagaaggcccttgtgctcctgccggggccaccttcagaaatggctgctatgtatgagaaacaggcgcagccgcgattggagagatttgccatggccagcggcagggcggttcagtgggtctcaaagcagattcatttctttggcctgggtgagtcggagctagcaaggcgactagaggggatactgcctgcagggcagagggacgagggacttaagattgctacaatggccagtggaggcacggtaactctgcgcctgggcgccgccagcggccgcctaaagctgctaagaacagccgggcaagctgtccacagggcactgggcgaatacgtctacggggaggataccgatacccttccaggggctgttgggcgtgggctgattgagcgcggtttaaagatggccatcgctgaatcctgcaccggtgggctcctgggctatcaacttacaaccgtggcaggtagttcagactactttataggtggtattcaggcctacagcaacggcgttaagaaggatgtgctaggggtaacaaagagcattttcctggaggatggggccgttagccctcagtgcgctgaggccatggctctaggggtgatcaacacgttgaaggccgatattggtgcctcgattaccgggattgccgggccaggtggagggagccccgagaaaccagtgggaactgtctggtttgctgtggctggtccagatggtactgtggtagatggacagcggttccagggagatcgggatacaattcgacgtcgagccgcgactcactgcctgggtctggtgtggaaatccctatgcaggaatcactcaaacccttcccgaatggaacacagcatgagagaggtgtaa

SEQ ID NO: 725 - DNA, 272 bp, unidentified
  source 1..272: mol_type = other DNA; note = Rock porewater metagenome
gtcaactaccccggactgaagtccgaggcttgtaaaagcctctagttgaccagcctaagccttgaaacagaggctacgttagcagtagagcttagacgccttacccggaatacccggataggcgacctaccctggggtgccccctcagctccaggctctagaactccttggttaaatagtcctgagagggtagggacagtgccttggagatgcgctggctgctaacattggcgagagggaccttactccgagaggaggtagactctatgtta

SEQ ID NO: 726 - DNA, 480 bp, Symploca sp.
  source 1..480: mol_type = other DNA
atgcaacgagttccagttatctcaccacaagggcttccactgatgccaaccaaaccttcaagagccagacgttggctccgtgaagataaagccaagatttatgccgatgtcaggcgtaatattcgtggtggctgttgggagggaaaagcaactattacttcggctcccttcaaggtgatagccaagccgaatatttatcggcgtcagctacattttgagaatcccgatagtaagaaacctaaccccacgcaataccggaagcgaaaaggtggaacaattacaccctttggttttagatctggagattttgttagtgctgaaaaagcaggacttatatacagaggttgggtgggtggtcacacccaaacagcgaagtcgaaaaacgtttctgtttacgacagtaactggaaaagaatagggcagttttcccctaaaaaagtcaagttactcaagcgttcatgcaagttatgcgtaagctga

SEQ ID NO: 727 - DNA, 224 bp, Symploca sp.
  source 1..224: mol_type = other DNA
gtcaactactcacggctacttccttgagccgtgagcttgaaagagccagatttcaacaatagttgtctaccgcgagagtcacgccatgtcacacacggcacaatgttctcctagttgtgcctgctgtaagttccctggcaccgagcgctttaagagaggacatgtttggcgtgatggcggtaaggagcaagtaactttctcgtaggattatctccatgcaacga

SEQ ID NO: 728 - DNA, 942 bp, unidentified
  misc_feature 1..942: note = Ga0374055_0154238 JGI
  source 1..942: mol_type = other DNA
atgtcggttccagtattagatacaaataagaagccattaatgccttgctcggagaagcgagcaagaaaattaatggagaaaggtcaagctaaaccttgctggcaaaaaggtatattctgtattaagcttatgcaagagccatctactagaaactatcagaaggtcgctcttggtattgatcctggaagtaaacgagaaggctataccgtctctacagaaaaagccgttgttcttaacgtgacaacagatacaaaagattggattaagaaacacgttgaagtaaggagaagtattcgtatggcaaggaggcaaagaaagacaccttatcgtaaacgcagatctaatagattaaggaacagagtttttcttccaccatctaccagagcaagatggaatactaagctacagatgatcaagtttattatatctattctgccaataacaatagttaatgtagaagatattaaagctgctactaagaaaggaaaaacgaagtggaacagatcattctcacctattgaagtgggtaaaacttggttctataatcaggtagaaaaacttggagttaagttaatgattatacaaggatctgataccaagatagaaagagacgcaagaggatttagtaaatctaaaaagaagttggactttatttgggagacacataatgtagactctcatatattgtgtgagcttgctttaggtaagcaagttaagccatattttggcatatggaagatagaatttctcctatattatagaagacaattgcagaaacagaatataagtaaagaaggaaagagaatagagtatggttctacagtaagtatgggaatgtcgagaggctctatagtcttgtataggaataaaatgtattatcttggaggatcatctaaaggaagagtaagtatacattctataattacaggagagagagactga

SEQ ID NO: 729 - DNA, 243 bp, unidentified
  misc_feature 1..243: note = Ga0374055_0154238 JGI
  source 1..243: mol_type = other DNA
gtcaataacctacgacattactcgtaggcttgtgcggagaaacttaaccagtttttctcgatcaagactaaaatgttgtactagacagtatatatagttgatcagctctcgttatggtaagagggtaaagtacatagagaatgtttcgctagttctctttccctacggtcagctatgtcgaagcgagttgaacaaggatgcgtaagcatcatttttagaaaagagaaaaaaaaatgtcggttc

SEQ ID NO: 730 - DNA, 1566 bp, unidentified
  misc_feature 1..1566: note = Ga0310147_000821 JGI
  source 1..1566: mol_type = other DNA
atgggctgtatcaagccgggggagacctaccaacctgtatggttgagtatttaccttgagaaaggtggaaagatggtatacgttatatcaaaagacggaaaaccgctcatgccgacaaaacggcatgacagggtaaggatattgctgaaacagaagaaagcatgtgtagtccagagcaaaccgtttactatacagcttttatatgacagcacaacatacacgcaggatgtggcatctgcatatgacacggggcgcacacatcagtccatcacggctattgacagcagcacaaccgatgttttgtactcatctgtgaatcactgccgcaacaaagacgtgcccaagctgatgaaagaacgcaagatgtaccgtatgataaggcgtcataacaggcgccggaagaaaataaggcgtgctattgcgaatcatacttatttccgagcaccaagaaaagtggtacagcctggaactaaggagcctataacagcaaagtatgtcaagccgaagcaagcgcggttcagcaacaggaaaaggccgaaaggttggcttacgccgacagcccgccagttattgcagactcacatcaactatttcaataaagttgcgaagatactgcctatcaggaaggtggtgctcgagtatggcaagtttgatatgcaaaagcttgagaatcccgatatagcaggaaagcagtatcaacaaggtacgctgtacagctacaacaacatgcgtgagtatattatagcaaaacaggaaggtaaatgcctgttatgcggcaagcgcaagatagagcatttgcaccatatagtcccgcgctcaaaaggcggcagcgatacctacaaaaacatagcggggctatgcggcaaatgccatgaaaaagtgcacaaagatcctaaggccggaacgaagctggcggagaaagcagccggcacggctaaggagtatgctgatccgagcatactcaataccattatgccgtatctctatgaatatcttaagtcaaagctcggcgaagagaacgtagagatacgttacgggtacgaaaccgagacaatgaggcggcaactgggcttgagtaagacgcattataatgacagctatgcgctggcgcttatgggagtcgggcatataagccgtatagagaagataaaaccgtatgagtataagcagtacaggcgtcataaccgtagttttacagatgcacaaagggacagactatacaaacaagacagcaagatagtggcgaggaacaggcacaagaaaaccgagcaggaagagccgtcgcttgaagaataccggcaggagataaaaggaactgcaggaaaaaaggaagcgtcacgtgccatatctgggctgaaagtatacagggcagccaagcggatgagaacgcccgccaaagacgtaccgataacaagcggaagcagcgtattgtacaaaggccaacgctttattgtcaaaggcattttacacaaagggcaatcgttgttgttggaaggacatgacggttatgtgtctgccggcagttgcagactgatgacgaggaatacaggcatagtatgcttgtga

SEQ ID NO: 731 - DNA, 208 bp, unidentified
  misc_feature 1..208: note = Ga0310147_000821 JGI
  source 1..208: mol_type = other DNA
gtcaactactcctcaataaattgaggagcatacagccgcgtggatgctatgttgcatcttaggatgcggtagttgaacaggctggctgatacggctgcgcactccgggatgccactctcagttccggacgctgatgggctgtatcaagccgggggagacctaccaacctgtatggttgagtatttaccttgagaaaggtggaaagatg

SEQ ID NO: 732 - DNA, 1347 bp, unidentified
  source 1..1347: mol_type = other DNA; note = Metagenome
atgtcaaccggccttcgggccgagcaagcggagcctgcgggtatccgcgaaggatgtactttgaaagtatttgttttgaacatgcgaggtcagcccttgatgccgtgctcgcctgcaaaggcgaggcatctgctcaaggcaggcaaggccgtggcgaggcgtcgaacgccgttcacgattcaacttcgaatcgctacaggtgaaacgaagcagagcgtgacgttgggcgttgacgccggcacaaagcatgtcggcctttccgctacgacggaaaaggaagaggtctttgcgtccgaagtcgaacttcgacaagacatcacggagcttctggctgctcggctctcgcagcgtcgtgagcgccgctatcgcaagacgcgctaccgtgcgccgcgctttttgaaccgtgtacgctcgaaacacaagggatggcttgccccttccgttgaaaaccgcattcaggcgcacatctcgcgcattgaagcggtttgccgagtgttgccgatcagcaagatcttgattgaaaccgcatccttcgacattcagaaaatcaaaaatcccgaagtcgagggtacggactatcagcagggcgaccagcttggattctggaacgtgcgcgagtatgttcttttccgtgacggtcatgtctgccagcactgtcgaggtcgatccaaggatccgatcctcaacgtgcatcatcttgagagccgcaagacaggcggcgatgcgcccaacaacctgatcacgctctgcgagacatgccacaaggcatatcacgcaggaaggatcaagttgaaggttggtcgcggcacgtcgttcagggcagaagccttcatgggcatcatgcgttggacgctacttgaccgcattcgcaaggcacatcctgaactgcctgtcgaaaacacctacggctatctgacgaagcacaagcgcattatccttggcttgcccaagacgcattgcgccgacgccttctgtattgccggaaacctgaatgcgctgcgacgaggagaaatcctaaaccagcgccagacgcgcaagcacaaccgtcagattcacaagtgtacggtgctctcgaagacgcttacggacggcacgaagatcggataccgaaagctcaatcaaacaccgcatctggtcaagaacttcaggctcttcgacaaggtgagatgtcttgggcaaaccggcttcatcttcggtcgaagatcgtccggctacttcgatgtccggaggctggacggcgtaaagctttcttccggcatcagctacaggaagctcacgcttctcgaaaagagaagcacctatttaaccgaacttagaaacgaggacggcgcttcctcccctgtctga

SEQ ID NO: 733 - DNA, 276 bp, unidentified
  source 1..276: mol_type = other DNA; note = Metagenome
gtcaataacccctgcctgaaggcagaggcttgaaggagcctttattgactagcctcagcgcccctctttcgagaggtgctacgttggttgggaatgtataggcaccgtggaatgtacatcctagttccacgcactgcggcctgtgattaaaagctccgagaggtaagagcggtgttgcaggcaccaaaccccgtccaacattggcgaaggatgtcaaccggccttcgggccgagcaagcggagcctgcgggtatccgcgaaggatgtactttgaaa

SEQ ID NO: 734 - DNA, 1053 bp, unidentified
  misc_feature 1..1053: note = Ga0310695_10005296 JGI
  source 1..1053: mol_type = other DNA
atggttccagttttagataagaacttaattccattgatgccgtgtaaagaacgtagagcacgtaccatgatgaaaaaaggtagagctaaaccgtattggagagatggtatcttttgtattatactacaaaacgaaccatctgctagaaactacagcgatgtagttgttggaatcgatcctggttctaaacgtgaaggaattacagttgcaacggaacaacgagtagttctcaatattacgtctgaagcgattactcatgttaaagacaacgtagaaactagacgtacattaagaagatcgcgtcgtcaaagaaaaacaccatatcgtaaatgtcgtgaaaatcgaaaaaataataacaaagacgataaattgccatcatcaacaaaatctcgttgggatgctaaattacgtatacttaaaaaacttaaacaaatacttcctattaccgatgtttcagtagaagatgttgctgcaaaaacgataaaacgtgcgtctaaatggaataatatgttttctcctttagaaactggtaaatcgtatttttacaaagctatcgaaggtctaggtttaatcgtattcaagtggaagggttacgagacgcacgaatggcgtttacaagctggatataagaaaacgtctgaaaaacttaaaaatgcgtgggaagcgcataatgtagatagtcattgtttatgtgaaatggttttaggttattgtataaaaccagtaaagatattgtgtctactatcgtttttacaagtcaatagacgtaatctatttaaacaaactattcttaaacatggagctagaatacggtatggtggtacaatgtcgttaggatttaagaagaatacgttagtaagatatcctaagtatggtttaagtttagttggtggtaatacgaaaggtaagctatcgttacataatatacacaacggtagtcgtctttgtcaaaacgcaaaattaagtgacttaacgattgttagttacaatttaaaatgggttttacaactgatagttcctaaagttgtaaaagcaggctcttcccatgactaa

SEQ ID NO: 735 - DNA, 279 bp, unidentified
  misc_feature 1..279: note = Ga0310695_10005296 JGI
  source 1..279: mol_type = other DNA
gtcaataacccacgactaaagtcgtgggcttgtgaagaaaactgaaggtggcgcttcaaataactcacaagggtaagaagagactagattcgctgagtggaacaacacacgtttgaaggcaattatacgcagatggaaagccaaccagtgacagaaagacgtattacggatacctccctagtctgtattcaacgtcgcgtataatatcgaagggaattcaatactagaggtgcagttactgctgcacactccgaaaggagaaagatgtttatggttcca

SEQ ID NO: 736 - DNA, 1272 bp, unidentified
  source 1..1272: mol_type = other DNA; note = Human gut metagenome
atggtatatgtaatatcaatagataatgaacccttaatgcctaccaaaaggcatggtaaagttagaaggctcttaagggataaaaaagcaaaagtggttagaagagaaccttttacaataaagctactctatagaccagaaaccaatgtggtacaagattgtacccttggtatagatacaggctctaaatatattggagctgccgtagtatcaaacggcgaaatattatacgcatcagaagttaaaacaaaagacgatgttaaaaagaaaatggataggcgtagaaactatagatccaacagaagatatagaaaaataaggtatagaaagcctagatttctaaatagaggtaattccacaaaagaaggtagatataacctaacgcttgtaagtaaatttaattctcatgttagagaaattgaatttatcaaaagcatactaccaataaacaagctagtatttgaagtaggtcaattcgatactcacttgatgaaaaacccaagtttaaataatcccaagataagacattggggttatcaaaaaggaacaaattacggttttgcaaatagtagagaacatgccttaaatagggataaatatacttgtcaatgttgtggagttaaaaatacaaggttagaagttcatcatataatatatcgatctaatggtggtactgatgacttggataatttaataaccctttgtgaagaatgtcataaaaaagtacacgctggaataataactataaacaagaaacctaaaaagttacctaatttcagtgatgcaactataatgtcaatacttagaagtatgttattaaaaagatatccagaggcaatagaaacatatggctatgtaactaaagaaaataggataggcttgggtcttccaaaagaacactttgtagatgcctgtgttattgctactggaggctatgactttgacttgccaaaagagatctttgttaaaagacatgtctctaaaggagattatcagctaacaaaaggttctcgtagtgaaaagaagattcctcaaaccaaaatactgggctttagaaaatgggataaggttaaatatctaggaggaatatactttattaagggtaggcgctctaggggcacttgtgtgctagaagatatatatggcaataaggttgatttttctcatatgccaagaggtttcaaggatcctaaactttctaattgcaaaagaattagtgcaaggaaaacaactttatgtcaaagaatagaatacattccaaaggcaagttaa

SEQ ID NO: 737 - DNA, 341 bp, unidentified
  source 1..341: mol_type = other DNA; note = Human gut metagenome
gtaaactacaacgcccttaaaggaatgttgctttaggttatctaaacaacaaaccttgggatataaggtttaccagactcagtaagtagaaatgtttactacgatatattgatgcacacctttggttgtcgccccagaccattgctctgtggttagcatttaaacagttgcgatatattaaagttgtaagcaacagtgatgctaacgctaaactcaatatatcattgtcgaggggaaggtttaaactatctatggtaaaagtaggtagaaaaacaatacagttcgttatgtactgaattaagttttaaaacataataaagttaagaaaggagtgccttatg

SEQ ID NO: 738 - DNA, 1275 bp, unidentified
  misc_feature 1..1275: note = Ga0111054_100026 JGI
  source 1..1275: mol_type = other DNA
ttgaaatatagaagagaacttaaggtaattaaaatggtatatgtacaatcaatccggggcaagaaattaatgccttgctcagaaacgaaagctcgacatcttcttaaagaaaaacgagcaaagattattaattatgaaccatttacgattaagctgttgtttaaatgtgaaaacaaaacacagccgataacgcttggcgtagacacgggttcaaaggttgtaggtctttcagctacaacttctaaaaaagagctgttttctggagaatttgaacttagaaataacattgttaaacttatttctactagagctaaacttagaagaagtagaagaagcagaaaaacaagataccgtcctgctagatttttaaacagaagaaaaacaaaaaagaaaggatggttacctccatctattaaaaataaattaaacgctcatgtaaaaaccatagacagtgttattaatttacttccagtgactaaaataattttagaaactgcaaaatttaatattgctaaaataaataatccagaaataaaagattatacttctggccctcaaaaaggatttgccaatgtaagagcttatatccttgcaagagataattatcaatgtcaatcatgtaaaaagaaaaatgttaaacttcaagttcatcatatcgagtctcgaaaaactggaggaaatgctccaaacaatttaataacattatgtgaagaatgtcatttaaaatatcattccggagatttaaagttaaactttaaaagaggaaaatcttttagagatgcaacctttatgtcaattttaagaaaaagacttccaactcaattaagggaaaagtattcatctatccaaattgaagagactttcggttatataacaaaggcgaatagagaaaaagcaggtctcccgaaagaacatagatatgatgcttgggctatttcaaataatcctaatgcacagcttggttctgagtggtggaaaatgaagcaagtccgaaagcataacaggaaaatacataaagctactcctaaaaagggaggaaaacgtgatttagaacaaagtccatataaaactcatggatatagattatatgacaaaataaaatttaacaatgaaattttctttatcattgctagaagattaaatggctgttttacgttaaaaaatattaaaacaggaactttgcttgataaaatgcaaaagtttatctcattttattcagttagaaataatagtgttttattagaaagaaggaacaatcaatatgaatgctcgtaa

SEQ ID NO: 739 - DNA, 306 bp, unidentified
  misc_feature 1..306: note = Ga0111054_100026 JGI
  source 1..306: mol_type = other DNA
attatttaaatcatggctaatgcatcattttattattaaaatgattagcctaagtcttaattgactacgttatctaagaataatataggtactcttggagtgttactcctagctccagattctacgatatatggttaaatagttctgatgaatatgaacagtgctgtatgtgcgaccgtccaatattttattagatagtctaaaaccttagaataacattggcgaaggggtcataaccttcttgaaatatagaagagaacttaaggtaattaaaatggtatatgtacaatcaatccggggcaagaa

SEQ ID NO: 740 - DNA, 1581 bp, unidentified
  misc_feature 1..1581: note = Ga0272423_1005921 JGI
  source 1..1581: mol_type = other DNA
atgtctacgttgcaggcaagacagaagacccaccaagggatgcttcctcagtcccttgctctggaatccgtgtcagcagacaccgttggggtaacgacgaaacggggcacggacgcgggcaagaccgcacctggcacgcaacatggtcgaggggagaatctgcaccgcattcgccagcgcgcagatcgtcaccgggtaacccccggaagtgggagtaatcccgcaccatcagtgagaacggttcagccgagcgtgttcgtgctggacaagtgcaagcagccactcatgccgaccagccccgcgcgggcgaaacagttgctgcgggccggtcgagcacgagtggtccgactccacccgttcaccattcggttggtggaccgcacccgtgagcactcagcagtggaaggggtgcaaatcaagatcgaccccggtagccggtgcactggcgtctcggtggtccgggtaccaccctcggaggcggtccacggattgttcggtatcgagatccagcatcggggcagacagatcagtaagaatctcacctcccgtgccgcgttacggcgtggacggcggtccagaaacctgcgacaccgggcgccacggttctccaaccggatgacaccgcagggctggttggctccctcgctgcaacaccgggtggactcgacaagctcagtggtgtcccggttgcgcaccatcgcgcccgtcacttcggtggcgatggaactagtccggttcgacctacagaaattggtcaacccggagatcaccggcaccgaatatcagcagggcaccctcgccgggttcgaggttcgcgaatacctgctcgccaagtggcaccggagctgtgcctactgcgaggtcagcggggttggtccccgttcggtgccgatgaacatcgatcacattcgtccgcgcgtcaaaggcggctcgaatcgagtgtctaatcttgccttggcctgcgtcccgtgcaaccaggccaaaggttcccgggatgtggccgagtttgtcaccgaccccgcgcgcctggcccggatcgctgctcaagcccagcggccattggtggatgcggcggcggtcaacgcaacccgttgggtgctgtacgaggcgatcaaagcaacgggcctgccagtccacaccggcacaggcggccgcaccaagtggaaccgagtgtctaacgggctaccgaagtcccacaccctcgacgcactgtgtgtcggtggtatcactggtgttgctgcggtgccgaacgctgtgctggtagccacatccaccgggcgcggcacctacgcccgcacccgtagcgacaagtacggattcccccggctgcggctgactcgacagaagcggcacttcgggttcgccaccggagatcatgtccgcgcggtcgtgtccaccgggaccaacaccggtacctatgtcggacgcgtagccgtgcgcgccagcggcagattcaacatcaccactacccggccagatggaaagtccgtcaccgtccaaggcatccatcaccgacacttccgcctgctcaaccgagccgacggctggagttacacgagaaaggaggaggagcgcatctaa

SEQ ID NO: 741 - DNA, 316 bp, unidentified
  misc_feature 1..316: note = Ga0272423_1005921 JGI
  source 1..316: mol_type = other DNA
atcaaccaccctgccctgaaggggcggggcttgtaacggagctatccgttcccgaatgagcccagccgctagggctggttgaccagaccaagacatcaagattggaggcgaaacagatgtctacgttgcaggcaagacagaagacccaccaagggatgcttcctcagtcccttgctctggaatccgtgtcagcagacaccgttggggtaacgacgaaacggggcacggacgcgggcaagaccgcacctggcacgcaacatggtcgaggggagaatctgcaccgcattcgccagcgcgcagatcgtcaccgggtaac

SEQ ID NO: 742 - DNA, 993 bp, unidentified
  misc_feature 1..993: note = Ga0116158_10014977 JGI
  source 1..993: mol_type = other DNA
atggttccagttttagacaaaaataaaaatccgttgatgccttgctcagaaaagagagcaagaaaactattggaatgtaaaagagcaaaacctttttggtataaaggcttctttacaatcattctgcaagaagattcttctggaaacactatgcaggatatttgtgtaggacttgacccgggaagtaaaatgaacggaatgactgtaaaatcagaatcacacactcttttaaatcttcaggttaaggcaagatgcgacgtaaaggaaaaagtagaaaaaagagcaattatacgtagagctagacggcgtagaaattgtccttatcgtaaatgtaggattaaaagaaaaggtcgagagatgccgccatctacaaaaactagatggcagcagcatttaaacatggtcaaactttgttccaatctgtatccgattactcatgtttctgtagaagatgtcaaagctattacaaaaaaacatgcacggaaatggaatgtgaattttagcccgattgaagttggtaaatcatggttttattcagaactagaaaagagttataaactttatactttcggcggatacgaaacatatggggaacgtaatgctttaggtttaaaaaaatcaaaaaataaactagaaaaagtgttttctgcacattgcgtagattcttgggtattggctaataaagtaattggtgggcacgtcaaacctgaatatacaaaggttattggtgttactccgttaatttattataaacgacaactacacgtttttttaccagtaaaaggatttaggaaaaaatacggaggaacatctacttttggaatcaaaaaaggaacgttagtaaatagtaagcgtcacggactttctattattggaggatccgctcgaggagggattagtttgcactctttaagtgataataaaagatttactcaaaccgctaaaaaagaagaacttactgtcttaacaactttaaaatttatattaaaataa

SEQ ID NO: 743 - DNA, 246 bp, unidentified
  misc_feature 1..246: note = Ga0116158_10014977 JGI
  source 1..246: mol_type = other DNA
atcaactatcccattactgggaattttaggaaaactcttaccaagactaactagaatttaaacaggagaatagcttgcccaagataataaccttcgaaagttattgtcgtttgaaggaaactaagatgataggttgtggtagaccaaaacacatagaggatgcttcccaagtcttctttcaatgtttcatcgagtagcgaagggaaattaaaacaagatgcgtaagcataattttttatggttcca

SEQ ID NO: 744 - DNA, 1362 bp, unidentified
  misc_feature 1..1362: note = Ga0207997_1002358 JGI
  source 1..1362: mol_type = other DNA
atggtaaaacaacaacagaagttattcaagagagatacatgcatacctagagatacttctctagtctctggctctatgattagtaatgtaaacaaagaggaaactcttagtcatactaattcaaaaaccttagataacaatctcgaagagaaccaacaccaacaaacaggtgggtttaagaccaaagtgtttgtaatagcaaagagtggaaaagttttgatgccaactactccaagaaaagcaaggcatcttttgaaacaacagaaagcaaaagtagtaacgacaaaaccatttgcaatcaaacttaattgggattgtgaagaaatagtgcaagaagtcaatttaggaattgatactggagtaaaaacaattggttattcagtaacatcaaaaactaaagaattgatttctggagaatttgtgttaagaacaaatattagtaaaaaaattagcgatagagcaatgtatcgaagaaataaaagaaataaactttggtacagagaagcaagattcttgaatagaactaaatcaaaacctaaaggttggttagcaccatcagttcagcataaaattgattcgcatatcagattgattaataaaataaaatctttgattccaataactaaagtaattattgaatcaagtcaatttgatgctcaaaagttacagaatccagatattgaaggaagtgaatatcaaaatggtcaaatgaaagatttcgagaatgtaaagatgtttgttagacaaagagataaatacacttgtcaaatctgtaagaaaaaagatgataaaatgttagatgttcatcatatcaaacaacgaaaagatggtggaagcgatagaccagataatctgataacattacatcaatcatgtcataagaaatttcattctggtaaaatcaaacatgtatttgtcaaaccaaaatcattcaaagaaacttcaatgatgaatagtttatggtcaagattgaaatatttagtagattgtactgaaacatttggttatattaccaaaataaatagaaaagaattaggacttgaaaaaacacattataatgatgcgtttgtaatttctggtggaactaatcaagaaagatgtcaatcaaatgtttcaaaacaaattagaagaaataatcgacaattacaacaaaatagaaaaggacaaaaattggcaatcagaaaagaacgatataaaatacaatctggagatattattttatatcaaaataaaaaattaatttgtaatggaatgtttaatttaggtaaatatgtaagttttgtaaaaaatatatttaatataaaatatgcaaaaataaatgatattaaggtattatattatggtaaaggaatcaaaatataa

SEQ ID NO: 745 - DNA, 264 bp, unidentified
  misc_feature 1..264: note = Ga0207997_1002358 JGI
  source 1..264: mol_type = other DNA
gtcaatcacctcgccctaaaggacgaggcttgagaagtgattttcaagagtaattggttgattagagagttgaaaaatggtaaaacaacaacagaagttattcaagagagatacatgcatacctagagatacttctctagtctctggctctatgattagtaatgtaaacaaagaggaaactcttagtcatactaattcaaaaaccttagataacaatctcgaagagaaccaacaccaacaaacaggtgggtttaagaccaaagt

SEQ ID NO: 746 - DNA, 540 bp, unidentified
  misc_feature 1..540: note = Ga0101770_1107140 JGI
  source 1..540: mol_type = other DNA
gtgcaagattgtatattaggaattgacgcaggaagtaaacatataggaatggcagttataactgaacaaggtaatgtgctttatcgtgccgaagcagaattaagacaagacataaaagagaatattgaaacaaggagacgacttcgacgtgcaagacgtaatagaaaaacaaggtatagaaaaccacgttttttaaacagaaaaagaaaggaaggctggttaccgccaagtatacaatcaagaattaatgctcatattagattggttaatgatattgtaaaaattttacctataagcagaataagagtagaaatagggcaatttgatacacaggcattagttaatccagatattaatggtatagaatatcaacagggagaaatgcatggatatgatagcgtaaaagaatatgtaaaaataagagataattttacttgtcattatgcaaaattaagaccagacataccttgtaatgatattcttgaagtagaccatattataccaagaagcaagggtggtagcaataatcaagcaatttag

SEQ ID NO: 747 - DNA, 240 bp, unidentified
  misc_feature 1..240: note = Ga0101770_1107140 JGI
  source 1..240: mol_type = other DNA
gtcaactaccccaacctatagaggttggggcttgtaaaagctcaagttgactagactaagtgccgaataagcactacgttattctccatgtagacaccgtagaatgatgccctagttctatgctctgtcgtggctctgtaaacagtcctgtgaggtagggacagtcaaccacgttgtgaagggagaataacattgtcgaagggcaaataactccgaaaggagggcttaagccaattgtta

SEQ ID NO: 748 - DNA, 930 bp, unidentified
  misc_feature 1..930: note = Ga0307373_10069487 JGI
  source 1..930: mol_type = other DNA
atgccggcagctgtcttcgcggcggagatcaagcacaagcccggcatccacgcaaagatgctgcgccgggcgggctaccggcgccgccgccggtcggccaacctgcgcgatcgcgcccgacgtttcgccaaccggcatcccgagccgtgcatcgtctgcggcggcaacgcccaacacgggcgcaagcattgccggcgatgcgccgaggccgggcgtgaaccggacgagttggggcggcgggttccgcgcctagcgccgaccctgcggagtcgtgtggacagcacccgctcctgggtcgcccggctgcgccactgggccccggtgacggcggcatcagtgcagttgggccgctacgacacccaggccctccaaggccccgagatccggggcgtcgagtaccagcacgggaccctgctcgggtacgaagtgcgggagtacctgctggagaagttcgggcatcgctgcgtttactgcggtggcctctcccgcgaccctgtgctcaacatcgaccatgtggtgccgcgcagccgcgggggcaccgaccgcgtctccaacctggcgcttgcgtgccgctcctgcaacgaggcgaaggacgatcgaccgcccgaggagtgggcggcgcgcctggcacgcctgcattccccgttggccgtcgcccggacggcgggatgcgcggccgtcgtggggcgcctgcaggcgccgttgcgcggcccggctgccgtcaacgccacccgctgggccgtccggcgcgtcctgggggagacggggctgcccctggaggcggggaccgctgctcgcaccaaggggaatcgcgcacgcctcgggctgccgcggagcccgtccgccgatgcggcgtgcgtgggcgcctcgacgccggctgcacggcgctgggccgggaaggcggtcctcgccatcgcggcccagcgccgg

SEQ ID NO: 749 - DNA, 298 bp, unidentified
  misc_feature 1..298: note = Ga0307373_10069487 JGI
  source 1..298: mol_type = other DNA
gcccgttgacccctggatgcttaccaggcccagcgccagaggttggcagccgttgagggcgctacgttgccgccaaggtccaagacccaccccgggatgcttcctcagtcccgggctctggaaccggccgcagcagacaagccccgtgggcaggggcacgagacgggcggccggatgcgccgggcggtgacatggccgaggggagcggatcgggagcgccagcccgatcccgtcacacaggccccgtaaggggcgccccgcaagaggacctgatcgcgaggaagggggcgcgcccgtg

SEQ ID NO: 750 - DNA, 417 bp, unidentified
  source 1..417: mol_type = other DNA; note = Human gut metagenome
atggaagttaggcgaaactatagacgttaccatcgttatcacaaaagatatcggcaggcgagattcgacaatcgtaaatcttctaaaagaaaaggacgaattgctccaagtattttacagaaacggcaagctaccataagagttattaatcggcttaataaatggataaatataacaaattattggctggaagatgtttctattgatatccgggtattaacagatgggtataagtcttatagctggcaatatcaaaaatccaacagactggacgaaaatatccgtaaagcaacgattctaagagatggcggtaagtgtatggaatgcggaaaatctaattgtagattagaggttcaccatattaagccaagaagacgaaatggttctaatacgttagacaatctgattacattatag

SEQ ID NO: 751 - DNA, 289 bp, unidentified
  source 1..289: mol_type = other DNA; note = Human gut metagenome
tatataaatgtaaataagagtggacatatgaaatctcttatctatagcttaacaataggtctcaagcctaagtgactgctactgtcgaaagacatgttgcagataggaactatgttaagtagtaaggtaaagacacacctttagatgtaatcttcagtctgaagctctgtgagtacaaaccaggaaacaatgctaatgtcctgcattgataacagggaaacacatatcctctacttgactttggcacgaagagcaattctccgaaaggaaggtgtcagaaatgacaagt

SEQ ID NO: 752 - DNA, 1398 bp, unidentified
  source 1..1398: mol_type = other DNA; note = Human gut metagenome
atgagcacttgcgtttgtgttctcagtaatagtgatgaacgcctgatgccaaccatccgtcttggcaaggtgcgccacctcctgaaagacggaaaagccaaaattgttaagcaccatccgtttaccatccagctgttatatgacagcgaaacgaatgttcaacccatcgaaatctgtgaggacgtcggctacaactacattggaatcagcgtgaaaagtgaatctcatgaatatgtgtctgctcagtatgatacattgcaagacgagaaagaacatcacgatgactgccgtatgcatcgccgtacacgcagaaacagattgcgctaccgtaagcggcgcttcgataaccgcaagcgcgacaaaggttggcttgcaccttctctagaacacaagaaacagctgaatatcagtcttatcgaacagtatgtatctgtaattccgattactcacgcaacggttgaggttgattcctttgacacgatgctgctgcaagctatccagaaaggcgaagcgaaaccggaaggcgtagactaccagaagggtccgcgttataacttagctacactacgtgaggcggtattctaccgtgatgattacacctgccaggtttgtgggcgtaaaattacggatggtgccatcctgcacatgcaccacatgttctactggaaaggcagacatggcaatagtctcagcgagcttataacagtatgcgagaagtgccatacaccagctaaccatcaaaaaggcggcaagctctacggatttggtgaagatataaagttcgccaatctttctggtgcggcattcatgaacaccgtgcgctggcaaatcgttaatgtactttacgctgcttttggaaagtcgttcgtcacattcacttatggtgcgatgaccaaagaaaagcggattgctcttcatcttgaaaagagtcataacaacgatgcgtatgcaatgggcagctttcatccagttaaccgctgcgcgtttgaacattatgaaaaggtgaaacgcaataaccgcattctcgaaaagttttatgactcgcagtacattgacactcgcactggtgaaaaggcaagtggaaaagctctctttaacggaaggattaaccgtaatcataaaaaggattctgaaaacctgcacaagtatcgcggaaagcggttatataaaggacatcgcgccttagtgcgcaagaaagtgaacctcaatcctggtgatttggtttcttttaacggcgaagtccttgttgttcatggcactcataccaataaaaagggtgctgtaaatgtagaattcaaagtacccgcaaaaaacggtcaaaaatccgcgagccttaaaaaactcaaaattgtaaaagcagcagattccatacatcccgcatgggaaaaagtatcttaa

SEQ ID NO: 753 - DNA, 326 bp, unidentified
  source 1..326: mol_type = other DNA; note = Human gut metagenome
gtcaacaaccacgcctaaatcggtcagtcggttatagacgggacttgcggggaaacccgtaagtctggttggttagcctaagtctgctgctccggtagcaggaaactacgttgtgtactaataatataggcaccttactcatgctccacaagtgataagctctgcggacggctcgttaaacatctctgagggtaggagaagtgcgaacgtcatgtcgagaggctaaaacagtacaacaacattggcgatgtggaccacagggcgcaagtcctgacttatagttatattactattttacgaaaggagtatcttgcatgagcacttgc

SEQ ID NO: 754 - DNA, 1566 bp, unidentified
  source 1..1566: mol_type = other DNA; note = Human gut metagenome
atgtggctgtgcccaggttatggcaacacaacagggacatgttccctggcttacagcaaaggagatacaatgaattatgtttatgtactggatcagcggggaagcccgctgatgccgaccagacggtacggttgggtacgcaggacattaaagtccggcaaggcgaaagccgtacgtactttaccgtttaccattagactgatgtatgatccggatacaacaaagatacagagccttaccctggggattgatccgggaaggaccaacatcggcatggcaactgccgatgaaacaggcagatgtctgtattcttcccagtgcgaaaccagaaaccgggtgatccccagactcatggaaaaacgccggcagcaccgacaggcatccagaaggggagaacgccttgcgaggaaacggctggccagaaagcttggaaccactatgagggatatcctggaacggatgctccctggctgcgaaaaaccagttagggtgaaggacatcatcaatacagaatccaggttcaacaaccgacgccgtcgggaaagctggctgacaccgacggcaacccagcttcttaggactcatctgaacctggtggaaaaggtgtgccggatccttccaatcagcgggattgcactggaagcaaaccggtttgcatttatggagctggaagcaggcggccatctggaatccggagtggattaccagcgcggcccgctttacggatatcgcagtattcgcgaagccctggaagaacttcaggacggaagatgtcttctgtgtggcgaacgcgccattgaacatgaccatcatctggtccccagatcaaagggtggaagcgacactatagccaatatggctggtttgtgtgaacattgccatacattggtacataccgaccagactgctgcggagaagctggaaaccatcaaggcaggccagaacaaaacgtatggagtcttatccgtactgaaccagatcattccgtatctggtagaggctctgtctaagaaattcaatgggaacatccgtctggtatccggttgggagacaaagcagttccgggacgaaaactatatcgataaggaccatggcattgatgcctactgcattgcagtaatagggcaacatcccaagaaaattgatgtcccggaaacccattttcagatccggcagttccggaggcatgacagggcacgaattaaatcccagaccgaacggacttaccggctcgatggagagaaagtagccataaaccgccggaaacagttggaacagaaaacggattctctggaagactggtatcaaaaaatggcagcatattacggccgccaacaggcagaccggatgcgttccaagctgcaggtacaaaggagtaccaggcggtataacaacccaaaccggctgctgccgggaacagtttttgtatatcagggaaaggcatacatcatgaccggtcagctgacaggaggacagtatttcagggccgcaggatgtgacaggaaaaacttttctgccagaagtgcccaaatcgtgagatataatcagggactggtatatgtataa

SEQ ID NO: 755 - DNA, 211 bp, unidentified
  source 1..211: mol_type = other DNA; note = Human gut metagenome
gtcaactacccatccgctaaagcgaatgggcttgtaaaagcccagggactttacaggtgagcagttgagcagaaccgtgacgcagcaggttcgccctatcactccgggatgacgccaagttccggacactgagatgtggctgtgcccaggttatggcaacacaacagggacatgttccctggcttacagcaaaggagatacaatgaattat

SEQ ID NO: 756 - DNA, 1383 bp, unidentified
  source 1..1383: mol_type = other DNA; note = Mouse gut metagenome
atgtcatatattgcttttgttatagcaaatgataacagtagacttatgcctacaagaaaccctaaaaaagtaagaaggctactaaaagaaaagaaagctattatctattcttatgaaccttttaccataaagcttttatataaaagcgaaaaatgcacacaagacatagagctatgtgtagatataggctataatcatcaaggaatgtctataaaatctagaaaacaagaatttgtttccgaagaaaggacatttttattagatgaaaaagataaacatcaagaacaattaaaaataaggcgtgctagaagaaacagacttcgttacaggaagcctcgttttgataatagagctattcctaaaggatggatagcaccatcacttagacataaaaaagaagcaggaattaatgtaatacttaaatattgtgaagttttacctattacaagtataactttagaagtaggtaactttgatactcatgctattaaaaaataccttgaaaatggagaaattttagaaggtattgactatcaacatggagatacttatggctatgattccctaagagaagctattttttctagagataattacacatgtgccatttgtaaaaaaggaataaaagataatgtaatacttagaatgcaccatataaattattataataaagataggtctaatagaccaggtaatcttttaacagtttgcactaattgtcacaattctaagaaccatggcatagatggcgctttatggggcttaaaacctaaaacagattctttaagagatgcagcttatatgaatattgttaaatattcatttaaagaagacttagaaaaaagtttaaagaaattaaatttagaaacacctattaatattacttatggagctgttactaaaagacaaaggttaaaattaaatatacctaaaactcatgcaaatgatgcttattgtatgggaagctttagacctaaatacaaaataaaaacaagatactttaaaaagataagacgaaataacagaaaattagagaaattctatgactctaaagttcttgatacaagaacaaatgaatatatgaaaggaaatgagctttcctgtaataggactaatagaagtgtacctagaaacaatcctttaaacgaaagaatttatagaggacccaaaaaatcaaaaggtaaaagagttataagaaaaactcactataaatataaatcaggagatatagttaatataaaaggaatgaaaggacattatctttgtaaaggtattaataatttaggtaaaacagctaaaatattagtagataacaaatacatatatccatctacctctaaattaagtattcataaatatagtaatggatggatagaaacataa

SEQ ID NO: 757 - DNA, 286 bp, unidentified
  source 1..286: mol_type = other DNA; note = Mouse gut metagenome
taaagaaacgtagattcttatatatttataattatatctactacgttatattagaataacaaaattattttaattttgtaatgatagttaccaatagatacttcacaagtctattgctctaaggtatggtattaaaaacttctgaggtaaggaagcgtgtactatacataaaacctaatataacattggcgttgtgaaccacactcgaaagagtagatactttaaataagacttatcttatttaaagaaatccgtaaggaggtaaataaaaatgtcatatattgct

SEQ ID NO: 758 - DNA, 1368 bp, unidentified
  misc_feature 1..1368: note = Ga0256404_1004876 JGI
  source 1..1368: mol_type = other DNA
atgtctgttgcagttatcagtaagaccggcatccgtctgatgccgacaagtgaatatcgggcgcggcatctgcttaaatcaggtaaagctgtcattgaacagtaccgcccgatcttcacaatccgtttaacagaaagagaggacggcgatacacagccgatcgagtatgccagtgatactggctaccagcatgtcggcgtatccatcaaatcagagaaacatgagtttgtacatgctcagtatgacatgctgagcaatgagaaagaacggcatgacaagtgccgcaagtaccgcagagaaagaagaaacagactgcggtacagaaagccgcggttcagaaaccgcaagccgaagatgacaaaaggcgaagtactggcgccttctctgcagcatagagttgataaccagacaatgttgttcgactcgttctgcaaagtaatgccaatcaccagtgccacatttgagatgggcaagttcgacacccagttgttgcaggcaatggcagatggcagtctgctccccaagggaaaggactaccagcatggcagtaagtatctgtatcagacagcgcgtgcagctgtatttggcagagacaactacacgtgccagatttgcggccgttccatcaaagatggtgccattctgcatacccatcatattgggttctggaagtcataccgttccaaccgtgtcggcaatcttctcactgtctgcgagaagtgtcacacggcaaagaatcacaagcctggtggaaagctctggggcatagaaccaaaagtaagcaatcttgccgaggcaacgttcatgtccgcagtacgctggcggatgtattacgcactggtgctggcacatccagaggtcgatatccacattcagtatggtgccaaaacagcggcagttcgcaaagaacggcatattgccaagacacatgcgaatgatgcttactgcatcggtcagttccatccgaggcaccgctgcgaagaagtgttgtttgctaaaagaagacggaacaaccgtgttctgacaaagttctatgatgccaaatatatcgacatccgtgacggcaagaagaagtctggtgctcagttgtcatgtgacaggactaatcgtcgtgaaagcagacacacggaaaagaacgaacgtatctatcgtggacaaaaggtttccaaaggcaagacatctatgaggaaacagcactatttgtttcagccaagcgacattgtgctttggcaaaatgccaaatattcagttaagggcacacattgcaatggcacaagagtgttgttggaaacagggaaatcggtcaagttggctgatttgagaattattaaaagacaaggaggctatgtggctcctcccaccgcctaa

SEQ ID NO: 759 - DNA, 365 bp, unidentified
  misc_feature 1..365: note = Ga0256404_1004876 JGI
  source 1..365: mol_type = other DNA
gtcaactacccacggcctaaaggccggtgggcttgagtgggaaatcatttaagctcggttgattagcctaagtgccttgagcactacgttgccgctagctacgctgggatgctccacaagtcccagcctcttgggatctgttgttaaaaacctctaagggtaggaggcgtgcagcagatgtattcgaccagcggacaacattggcgatgtggactaccgttactgcgatccttgtgatcgtaagtgcgagatgccgcaggtctgtatgactgcggaaagtgtaaacattcttctccgtaaggagacctgaaggtcagcaatgctgaccggaacgcgaaattgaaaggaggcatcagcatatgtct

SEQ ID NO: 760 - DNA, 1299 bp, unidentified
  misc_feature 1..1299: note = Ga0164242_10000399 JGI
  source 1..1299: mol_type = other DNA
atgccgtgctcggagaaacgagcacagctcttgctggagcgcgggagagcccgtgtgcatcgcgtgaagccatttacgattcgattagtggatcgtttcgttgaagactcggagcttcagccggtggagctaaagctggatcccggctcaaggcataccgggatggcactcgtgcgcgatgatcatggggtcaagcattgcttgaatctctaccagctcgatcaccgcggacatctgatccatcgcaagctcctgcaacgagcagcattccgacggaatcgccgtaatcataaaacgcgatatcgccctgcgcggttccataaccgtacgcggctgaaaggctggcttccgcccagtctgcagcatcgcgtggatagtaccctgagttgggcgcgtaaatttcaacgctcactcccgctcacgaagctggtcgtcgaaagtaatcgcttcgatacccagctgatggacaatccggacattcaaggacgcgactaccaacgcggcagtctctgggactgtgagctgcgcgaatgcgtattcgcgaaatggggctatacctgcgtctactgcggggtgtcggcatttgatggcgatgggctcattatggaattggatcatttctggccaaagtcgaagggtggcagcgatagcccccgcaatcgcgtgccggcctgcgtccgatgtaatcggcgaaagagcaatactcttccggcgatatttctcattgatgaaccggagaagcgagcttggatagaggccggactcaagactccgctcaaggatgctgcggccatgaatgccacgcgctacaagctcgtggaagccattgagcgactgggcctaccggtcgaaacgagtacgggtggtcgtacgcgctggaatcgccaacgattcgatgtcccgaaaactcatgcgttggacgcgctctgcgcgggcaatgtcaacggagtcaaggactggaaggggaaaccgacacaggtgattacgtgcatgggtcgcggtaggtactctcgaactgccaacgataagcacggtttcccgcgcggataccttgcgaggcataagcgtcattttggcttcgctactggggacttggtgcgcatttcaaactctcttaagaaatccacaagtagagctggagcacgactcaactccatataccggatcactgtgtcggctaaaggagactttcgcctcttcatcagtggtctaaagtactgcgttcactattcaaggtgtagagtggtgcaacgtagtggcgggtatcatttttccaaaataatgaaaggtgttatgtga

SEQ ID NO: 761 - DNA, 292 bp, unidentified
  misc_feature 1..292: note = Ga0164242_10000399 JGI
  source 1..292: mol_type = other DNA
gtcgtatcccattcctcatgcaaaggagaacctagtggcaggtttccgaacctagtttcatcaggaaaccagactcagtgtgaccttggtcacactacgataccttagaatacataggcactccgggatgcctcctcagtcccggactctgcggcttactgttaaacagctgtatgggtttaaggcagtgcagtaagcgtataaaacctaaggatatccttgtcgagaggagctcggtccctgagaccggcgtcacaatgaggcccgtaagggcatcggagaaatcgtgagt

SEQ ID NO: 762 - DNA, 723 bp, unidentified
  source 1..723: mol_type = other DNA; note = Human oral metagenome
atgttggtatatgtattaaaacaaaatggacaaccttttatgccaacggcacgctttggcaaggttcgtagattattaaaaacaaagaaagcaaaggttgttcgtagagagccgttcactatcaaactactttatgaaccagaaacagatgtggttcaagagtgttattgtggtgtggatacaggctcacgacatattggtgtagcagttgtcagtaatgacaaaatgttataccaatctcaaaccgaattaagaagtgacataaaacgaaaaatggatgctcgtagaatgcataggcgtaatcgcagaagtagaaaaacacgctatagaaagcctagatttctaaatcgcagtaattctacaaaaagtaataggctgccaccttcagtcaaacacaaggctcaggctcatattgacgaaattgagttctgtaaaaagatacttccagtttctgatctgattgtggaaataagtcagttcgatacagctttaatgaagaatccaagtctgatcagtgagaaggtaaaacattggggttatcaacaaggtttcaattatggttattcatccagacgagaagcagttcttcatcgagatcactacacttgccaatgttgtggcaaaaagaattgtagactagaagtgcatcacgttcaattcaaaagcaacggtggtacagatgatgaagagaatctcattacattgtgtgaagatttgtcataa

SEQ ID NO: 763 - DNA, 340 bp, unidentified
  source 1..340: mol_type = other DNA; note = Human oral metagenome
gtgaagctatgctcagctaaagactgaccatcttctggttagtcattagttgttgcttcacaagtcttaggttagagaaatcttacctacgttgaattgaagaaccataaggttactcacctacggttgtcgccttagaccgttgctctgagtctatacattaagttggaaggatagcattgagttcttgtgtgtatagattaaaaattcaattcaacattgacgaaaggaagcccaattcttaacttggtaatagagctaagataggcactacagtctgataagtgctgtcttatagagtaaaacttatcatcaacgaaaggagcgaagcgtaatgttg

SEQ ID NO: 764 - DNA, 1269 bp, unidentified
  misc_feature 1..1269: note = Ga0318466_10005777 JGI
  source 1..1269: mol_type = other DNA
atggtatacgtgataagcaaagacggacatcctctcatgcctactgtaaggcatggcaaggttcgtcgtttactgaaagaaaacaaagcaattgtagtaaaaagatgtccgttcaccatcaaactaacttgcgacacgcctgacatcgttcaggaagtcacgctcggcgtagatgccggatcaaaacatatcggtctgtcagctacaaccgaaacgaaagaattgtacgcttcggaggtcgagcttcgcgatgacataagcaagctcctcgaagcaaggcgtgaataccgcagctcgagaagaaaccgcaagacaaggtatcgcaaagctcgtttcgaaaacagagtaaagtcaaagcacaaaggatggcttgcaccgtcagtcgaggcgaagatcggaacgcacgtccgcattatcgagaatgtatgcaacatacttccgatcaaagatatcactgttgaagtcgcatcgttcgacacgcagaaaatgcaggatcccgagataacaggcattgagtaccagcagggcacgctcatgggttatacgattcgcgaataccttgcggagaagttcgaccacaaatgctgctactgcggcaagcctcaaggtaacggtgcccgcttcgaagtcgaacactttactccaaaatcgagaggcggatcgaaccgcatcacgaacctcggctggtcatgccacgagtgcaacgaagcaaaaggtaatctcacctgtgaggaattcggtcatccggaagtacgcaaaaaagctgaagccggcatgaaacatgccgctcacatgagcatcatgcgctggacgctgtacgaacgcctcaaagccatctacggcgaacggcttcatctgacttacggatcgacgactttatatcttcgacatgaggcaggactcgaaaagagccacataaacgatgcgcgctgtatttcaggccattctgctgccgagcctgccgaagaatacttctaccggaagaaagtgcgccgccacaaccgtcagatacacaagctgactattcagaaaggcgggatccgaaagcgcaaccaggcaccttacgaagttaagggattcaggcttttcgacaaggtaaaagctaaaggcagcatgtggtacatccacggcagaagagtaaaaggctcattcgtactcaaaacacttgaaggtgaaaagcttgaaatcgcaccaagtaagataacgctaatagggcatcaaagtgcttatataacagaaaggagaacggcgctcctacccgccctttag

SEQ ID NO: 765 - DNA, 287 bp, unidentified
  misc_feature 1..287: note = Ga0318466_10005777 JGI
  source 1..287: mol_type = other DNA
gtcaaccacccaccgcttaggctaacgccttgaagcgggggcttgtgaaagcccggttgactagcctaagtcttagctgactacgttacgagagaatatataggtaccctggagtgtaatacctagctcctcgcaatacggtatgtgattaaacagttctgacgggtaggaacagtattgcatacgcaaaacctctcgataacattggcgaaggtatcactacagtccgtaagtactggcttaccgcataaaacttacaaaaattcagaaaggagtcgtgccttatg

SEQ ID NO: 766 - DNA, 1383 bp, unidentified
  misc_feature 1..1383: note = Ga0118733_100054452 JGI
  source 1..1383: mol_type = other DNA
atgccttgtagaccagctaaggccagacatttgctaaaggctggtaaagctaaggttcttaacagattaccttttaccattcagctattacaagctactggtgaaactaaacaggaactaattttaggtttagatcctggttctaaaacactaggaacagcggttaggttgattaaaactactaagatattttacgcttctaatgtaacttttagatctgatattaagaaaaaacttaaacaaagaagcagttacagacgaactcgaaggagtagaaaattaagatccagaagatgtaaattttatgggatgtgtaaaacttgtaaattgaaatttacttgtgggtttaggcttaacagaattaaatttaaaattaataaaggcaaatgtgaattagaaaagaaaaataagaaaaatggttttagttttggtagaaaaccagggtggttacctccttcggttcaatctaaagtagattctactattaaagaaattaattatattttaagcatattacctgtaaaccacgtaatctatgaatattcagcttttgatatccataagcttaaaaatcctgatgttaagggaattgaataccaaaaaggtgatatgtatggctatgaaaatactaaaagctatatattatcaagagataattacaaatgtcaaagttgtaaagggaaatcaaaggataaagttttacaggttcatcacataattcatagaaaacatggaggtacggataaaccagctaatttaattactttatgctctatttgccatgataaattgcataaagggaaattaaaacttaaaactaaaaagaaattaattaatactatagatgctactcaagtatctattattaacaaaagaattagaagttatttatttaaaataagaaaaaaatataatctaaaagtttatagaacctatggttatattaacaaagttaaaaggaaattacttaatttacctaaagatcactatttagatggaatattatgtacttatcctaagagggataaatattctaacagatcaaaacctaagattttaaatttctataaaaaagtatcagttcctaaaggcgattacaaacaaactaaaggcagtcatagccaaatatctatgcctacagggaaaattcatggttttaggaaatttgatactgttaggtatttgggtaaaaattatttcatcagaggtagaatgagtactggctatgctaatttaatgaatattgaacaaaaggtaattaagattaggccaatgcctaagtttgaaaaaattaaaaaaataaatgctgggaaaacaataattgtcgattcatcccctcccttcgtttcactcaggaaggggtcttctcgacaggaaagctaa

SEQ ID NO: 767 - DNA, 230 bp, unidentified
  misc_feature 1..230: note = Ga0118733_100054452 JGI
  source 1..230: mol_type = other DNA
gtgaacaacccccaccttcgcctaacggctcaggaggggcttcaccagattaagcttaaagaaatttaagctacatagtttagcccagcgaggtaaaggaataccgcctcagttcctatatacttcctaagctaaactgtattgtcgagaggaagtcttaaaaattagctggtaacaggctaatgagtagagcattaccctaatttattaggagagaacaaaacttgaga

SEQ ID NO: 768 - DNA, 1329 bp, Ktedonobacter sp.
  source 1..1329: isolate = 13_1_20CM_4_53_11; mol_type = other DNA
atgtcaaaagtgttgctcctggatatgaccaaacagcccttagacccagtgcatccgggccgagcacgcctgttgctcaaagagggcaaggccgccgtgtatcgcaggtacccctttaccctcatcctgaagacgcaagtggactcccctgcggtgtctgccctgcggctcaaacttgatccaggggcgaagacgagcgggctggccctggtcgatgacgcgagcggggaagtggtgtgggcggcagaactcggccatcggggagccagcatcaagaagcgcatagatgcccggcgtggcgtgcggcgcaagagacgctcacgtttcacgcggtaccgcaagccgcgcttccacaaccgcaagagttccaggagaaaagggcggcttccgccctcgctggaaagccgggttgccaacatgctgacctgggtagggcgcctgaggcgtttgtgccccattgaggtgatcagcatggaactggttaagttcgatatgcaggccatgcaaaacccggagatcactggcgcccagtaccaacaaggggaacgcatgggctatgagacgcgggaatacctgctcgcaaagtgggggcggcgatgcgcctactgcggggctgaggatgttcccctggagattgagcacatcctctgccgcgcacgaggcggcacgcatcgcgtgagcaacctcaccctggcctgcgagccgtgtaacgtcaagaagggcacgcaactcatcgaggatttcctgaacaagaagccagacgtgttggcacgcatcctggcccaggcgaaaacgccgctcaaagctgctgccgccgtcaatgcgacccgctggcacctctttgaacggctgaaggcgaccggcttacccctggagaccagcagtggcggtttgaccaaatacaaccgggcgaagcggcatctgccgaaaacgcattggctcgatgcagcgtgtgtcggccagagcaccccacagcctctggaaacgagccaggtggttcctttgctgatcgaagccaccggtcatggcaaccggcaaatgtgcggcgtcgatgagcatggctttcccatccgccataggcagcggaagaaggtgcatttcggctaccagacgggtgacctggtgcgggcggtggttcccacgggggcgagggcggggacgcatgttgggcgcgtgctggcacgagccagcggctctttcgatttgaggaccaaagctggacgccaggccgggatcagttatcggtattgccgtcccatccatcgcaacgatggctatcgttaccagcaaggagggcggcatgcagtccccgccacccaatccacctga

SEQ ID NO: 769 - DNA, 290 bp, Ktedonobacter sp.; identical to SEQ ID NO: 121
  source 1..290: isolate = 13_1_20CM_4_53_11; mol_type = other DNA

SEQ ID NO: 770 - DNA, 1278 bp, unidentified
  misc_feature 1..1278: note = Ga0272449_1005167 JGI
  source 1..1278: mol_type = other DNA
atggtgtacgttatttcaaaagatggtaaaccacttatgccaaccaaaagacatggcaaagtgaaaagactcttaaaacaaggtcttgctaaagttgttagaagagaaccatttacaatccagctgttatatgatactacaacctatacacaacctgtcacagttggtatagacattggttcaaaaacagctggtatttcagcaataacggaaaagcaagaactatttagtgctgaaattgaactcagacaagatattaagaagttattgctggaaagaagggagcatagaagattcagaagataccgcaagagaagatatagagaaccaagatttttaaacaggcgtagacatgagaattggcttgctccaagtgtacaatggaaagttgatgcacatgtcagacttgttaactttgtagccaaaatactaccagttacaaaagttgtacttgaagtagcaccatttgatacacacaaaatactgaaccctgaagtaggaggcagcaaataccaggaaggaccacaaaagggtttttgggaggttagagaatattgcttgtggcgtgcaggatataaatctgaactgtcaggcaaaaaaggtgtgttggaagtacatcatattgttcccagaagtcagggtggaacggataatccctctaatctgatagtgttaactgctgaggaacacaaagcaatacatgaggggaaaattaagattccacgcagtagacttgaaaaagttaaaattctaaaagacgcaagttgtgtatccacaataggatggcatatagtgaacaaattaaaagaacaatatgatgttcatataacatacggtagtattacaaaagcaaaaagaatagaaatgggattggagaagacgcatagaaacgatgcgtttataattgcaggtggtagtagagatattaacagagcatctgagtggtattttggtaagtttttcagaagacagaaccgctccttgtacaaagcaaacccaattaagggtggtaaaagaccagtaaatactgtcaaggaagtacatggttttagaagatttgacaaagttgagtaccaaggtagaacgggaattattttaggattaaggagtagtggatattttgcaataggttctctgactggggagaagatatgtgatagtgtaaagcacagcaaactaagacttttagaaaaagcaaagacattaatgttcaaaaggagggaagagcgcattcctctccatcttggaaaagatggagtctcctgcgctcaattatga

SEQ ID NO: 771 - DNA, 256 bp, unidentified
  misc_feature 1..256: note = Ga0272449_1005167 JGI
  source 1..256: mol_type = other DNA
gtcaactaccacccacctgtagaggtggtggcttgtgaaagccatagttgactaccctcagccatggggaaggttaacttcccatcgggctaagttagactggtcatgacaccctgggatgctgctcaagtcccaggctctgtcgtctgccattaaacagtcctgagtggtaggggcagtgtgacagacatgagaagccagtctaacattggggatgagcacctaactcctaaccaaaggaggcttaccgcatatg

SEQ ID NO: 772 - DNA, 1038 bp, unidentified
  source 1..1038: mol_type = other DNA; note = Human oral metagenome
atgttagtatatgtgttagataaaaacggacaaccacttatgcctacacataatggtgctaaagttcgagttttattaaaacaaaatagagcaaaagtagtttcaaagtgtccgtttacaataaaattattatatgaaagtacaacatttacacaaccgcttactttaggagttgatacaggttctaagtatgtaggtagtgcagttatcaatgatgtaacagcagaagttgtttacgaaagtcaattagagttaagagatgacatcaagtctaaaatggatagacgtagagcgtttagaagaagtagaagaaacaaattacgttatcgttcgaagaggtttaataaccgtaaatcttctaaatatagagactgttacacaccaactcttatatccaagttacaaggtcatacaagagagataaaatttattaactctatacttccaattagtgatattattttagaagtgggagagtttgacacacatctattacaagacccaacgttagcatatcgtaagtggggttatgcacagggagaattataccaacaagagaactttaaacaggcaacaaaagcaagagacgactacaagtgtcaatgctgtggtaagaagaactgtagattagaagtccatcaccttttacctagaagtagaggtggaagtgataagttagtgaacctaattactctatgttccaactgtcatcacttggcacacagttcagaagaacagttattagcatttcagaagagatttggtaaaaaggcaaaggatatgttgaagtatgctactcaaatgaatatattaagacacgtgttgcaacgagaatatcctgatgctaaattgacctatggttttattacgaaggaaatgtgtagagtgtttgggttagaaaaatctcatataatagatgcttgctgtatcgctagtagaggagttttgtttaaaaatagcgactcaaataagtataagaagaaatgtgttgcaaaaggtgattatgcctatcttagacacagagtacgtagaagatga

SEQ ID NO: 773 - DNA, 336 bp, unidentified
  source 1..336: mol_type = other DNA; note = Human oral metagenome
gtagacttgtttgacaagtatgattggagatggtgatataccgagcactagtttttactagtaatcaccatacagactaagtattcagaaatgaatactacgttattaaggtcatgacacctccagatgccacctcagttgggagcaactgtcgctatgtattaagttggattgggtatgtaagagtcctgtgtacatagtgtaaaaagcctttataacattgtcgagaggaagtcggatttttgatatggtaacagtatcaaaatacgcattaccacctgtaaaaaggtgagttagttaattttatttttaaaagaaaggagtgtcattatgtta

SEQ ID NO: 774 - DNA, 1308 bp, Lactobacillus sp.
  source 1..1308: mol_type = other DNA
atgcaaaatcgggtttttgtcatcaataaacatggtgaagctttaatgccttgtaagccaagaactgctcgtaaattgttagcccaaggtaaggccaaacccattaagaaagaaccattcaccattcaatttttgtatggtgcaagtggttataagcaacctattaacttaggtgttgatagcgggcaacgtcacattggacttgcggttacaagtcaagataaagttttctttcaaagtgaagtcgaattgcgccaagacgttaagaaattgcttgataccagacggacttatcgcagaagtagacgaaatcgcaaaactcgctatcgtaaagcacgatttttaaatcgcatcaaaaatagaaaaaataattggttgccaccgtcggtacaaagcaaagttaatcacaacattaattggattaaacgcatgttagccgtattgccgaacccagaattacacatcgaagttggtaaatttgatatgcaaaagatgaaagatcccaccattaaaggtgaaggttatcaaaaaggtgatttgtacggctatcaaacggttaaacaatatgttttagctcgtgaccaatacaagtgtcaagtctgcaagaaaaaaggtggcaaactaaaaattcatcacattatttaccgttccttaggtggcactaatgtaccatcgaatttattaacagtctgtgcggattgtcatacagctaagaatcacgctgaaggcggcaaattatatgaattatgtaagaaggaaaagaaagtaactaagcctttgaaaggcgcaacctttatgaatattcttcgtaggagattatgggacgcctttcctaatgcccaatttaagtatggtgcgcaaaccactttacaacgggcaaacttaggcttagcgaaatcgcaccacaacgatgccattacgattagtggtatcaaacttattagcgaaaagccaacgagtgttgtgatgtttgcgcaatttcgtaagaaaaaacgttcactacacgaggcaacagctcgtaaaggacgcaaaaacaagaatatcaccagtaaacgaaatgccaaaaacactaaagaagcaaacggattttggcttaatgattatgtcagaattaagaatagtaaactcaaaggctacattagtggctttatgtccaaaggttctaatgtaaggttgcgagatagtctcaatcattatgttagcgtcacagataaaaattacacatctattaaaaatattattttaattcatcataacaacaattggaataagacagtaatcagcgagaaacaatatgttatgtgttag

SEQ ID NO: 775 - DNA, 312 bp, Lactobacillus sp.
  source 1..312: mol_type = other DNA
tttaagtctgctcactttgatgaggattctggagcaatccagaatttgttgtctagactaagcagtcagcttcggctgactgggaaactacgttattttagtcatcataccttaggatgatgccctagttctaagctctatggaggctctgtaaacaatcgtaaggttaatgcgatagtcaaccttgttaacaagctaaaataacattgtcgaagggtaaccacatgtaactgttagttctctgatagttgcgtgataaggtacatgctaccttataaaaaatgaaaggagaaaatcaaaatgcaaaatcgg

SEQ ID NO: 776 - DNA, 798 bp, unidentified
  misc_feature 1..798: note = Ga0335394_10066399 JGI
  source 1..798: mol_type = other DNA
atgcaacgagtattggtgctagacaagagcaaaaacccgctgatggcgtgtcattcggtgcgcgcacggcaattgctcaagcaagggaaggcggcggtctttcgtgaataccctttcaccatcatcttgaaagaacgggatggcggggatgttcaacctgtcagtatcaagatagacccgggcagtaaaaccactgggatatctatggtcgctgatttcaaagggggcaagcgcgtgatttgggctggagagttaacccatcgggggcaacaaatccgagataagttattgtcgcgccgtcaggtattgggcttgccattggaagtcgggacaggaggacgcacgaaatttaatcgggtaaaacagcactatccaaaagcgcattggattgacgcgatttgtgtaggagaaagtgggggacgagtcatcatcagtccaaatcatgcgccgcttcagattagggcgaccgggcatcaatcacgccaaatgtgccgcgttgataagtacggttttccacgaaccagcgccaaacaagggcgcgtccactttggcttccaaacgggggatatagtcaaagcaatcgttacaaaaggtgtaaaatacggcacatacattgggaaggtcagtgtgaggtctactggttttttcaatatcactacccccaccgcaacagtgcagggtatcagctatcgctactgcacaccgattcacaattccgacggctatctttaccagagaggagaggcgctttcctccgctaccacaagggtagcggtgtcctcgcgccaagattcatga

SEQ ID NO: 777 - DNA, 254 bp, unidentified
  misc_feature 1..254: note = Ga0335394_10066399 JGI
  source 1..254: mol_type = other DNA
gtcaacgaccactggcacgaggccggtggcttgcgataagcaagcccatgttgaccagcctcagtctccttcgtgagacaccgttatttgggtcacgataccgacgggtgactgaaccagcccgtcgctctatcgtctaccgttaaacagccgagggtctaggcaagcgcggtgggcatgacaagcccgaataccattggcgagggtcactttactgccgcaaggcgagaaaaatgaggtaactcatgcaacga

SEQ ID NO: 778 - DNA, 2175 bp, unidentified
  misc_feature 1..2175: note = Ga0115617_100462 JGI
  source 1..2175: mol_type = other DNA
atgccctgttcaccggcaaaagcgcggcttctgcttaaagagaagaaagctattgtgaagaggagaacgcctttcactattcagctgacgattgcaacgggtgagaccaaacagccggtgggtctgggcgttgatgccgggtacaaacatgtcggactgtccgcatcaacggacaaggctgaactttatgcatcccaagtcgaactgcgacaggacatcaccgatctgctctccgctcgtcgtgcgttacgacgggctcgcagaaaccgcaaaacgcgctaccgcgcgccaagattcaacaaccgcatccgcaccaagcgcaaaggctggcttgctccgtcggttgaaaaccgaatcaacgcgcacttgtcgcgcatagaagcggttcttcgactgcttccagtcacgaagatcaccgtggaaacggcgtccttcgacatgctgctgctgaagaatccagacattgcagggaaagagtaccaagagggcgaacaactcggcttctggaacgtccgcgagtgcgttctttttagagacgggcacgtttgtcagcattgttacggcagatcgaaagacccggtgctcaatgttcatcatctggaaagcagacgcacgggcggagattcgcccggcaacctgattacgctttgtgagacgtgccacgaagcgcttcatcgcggcgaaatcgcgctgaagacaaagcgcggacactcgttccgtgcggaagccttcatgggaatgatgcgctgggaggttttgaaccgcctaaaggcgtcgcattctgagttggaagtgaacaacacctacggctaccggactaagcacgcacggatcgtgaacggcatcgacaagtcgcattgtgcggatgctttttgcattgccggcaacctcggcgccgaaaggctatgcgaattcttcttccagaagcagacgcgtcggaacaatcggcagattcacaagctctccattctcaaaggcggcattcgaaagcgcaatcaggctccctttgagatcaaaggcttccgtctttttgacaaggttgcctgcaagggagaagaaagcttcattttcggccgtcgatcatccgggtactttgatgttcgaaagcttgatggaacccgcatttcagccggcatcagctacaagaagctgcgtctgctggaaaagagacgaacctatttaacagaaattcgaaaagaggaggcgcttcctcccccccccccccgccgggggggggcggcgcgccgcccgcgcgggagaatcaaacagagaacgcttaagaaggtattctccactgtcggtatcggtttgcactccggccgcaaagtccgtctgactctgcgtccggcacctcccgataccggtttggtgtttactcgaaccgatttgaagccgcccgttgcgattaaggctgagcctgaacgcgtcaacgacacgcgcatggcgacgacgttggataaagacggagcccgtattgcgacgatcgagcacttgatgagtgcgctgtccggtttggcgatcgacaactgctacatcgatgtcgatgcacctgagatcccgattatggacggctccggctctacgtttgtctttttgatcagagctgccggtatccaggaacaggatgctccgcgaaaattcgtccgtgtgaagaaaaacgtctccatccacgtcggcgacaagtgggcttcccttgaaccttatgacggctacaaactgtcttttgcaattgacttcggtcatccggcgattgacgaaacagctcagtttgttgaagttgacttcaacaaggaaaactatatcgaaagcgtttcccacgcccgtaccttcggctttgtgaacgacttagagatgctctggggcatgggcttggcacaaggcggaacattagacaacgcgattgtgctcgatgatttccacgtcttaaatccgggcggtctgcgctctcaggacgagtttgcaaaacacaagctcttggatgccatgggcgacttgtacgttttaggtcatccgctggtggcgcactaccgtgccttcaagtccggtcacgaaatcaacaacaaacttttgcggacgctgttagctgatcccgaaaactgggagtttgttgaataccaggatgaacacagtgctccgaaggcttttaccgaagcggtaaaagaaccttcgaactaa

SEQ ID NO: 779 - DNA, 247 bp, unidentified
  misc_feature 1..247: note = Ga0115617_100462 JGI
  source 1..247: mol_type = other DNA
gtcaactacctcggcctaaaggccggggcttgaaatagcctctagttgactagcctcaggccgtcatttggcggactacgttggttgagaatatataggcaccgcgggatgtagatactagtcccgcgctctgcggccgatggttaaaagctccgagaggtaggagcggtgctgtcggtacgaaaccccttccaacattggcgaaggatcacaaccggtcgaaagaccgaggagacaaaacttgaga

SEQ ID NO: 780 - DNA, 1281 bp, unidentified
  misc_feature 1..1281: note = Ga0209607_1003300 JGI
  source 1..1281: mol_type = other DNA
atggtatacgtaatttcaaaagatggacagccgcttatgcctacaactagacatggcaaggttcgtcgactattaaagtcaaaacaagcaaaagtaattaatcgctgtccatttacaataaaacttttatacgaaactacagatttcatgcaggaaattaatttgggagtagacactggttcgaagtatgttggttttgcagtttactcaaatgacaaaattttatatcaatcccagctagaactcagagatgatattaagtctaaaatggacgatagacgcggttatcgtagatttcgtaggcaaagaaaaacccgctatcgaaaacctagatttttaaaccgtaaacattcaactaagctaaatcgactaccaccttcaactaaatctaaagtaaatagccatatcaaagaaattaaatatataaaatcaattcttccagtgactaatttaattttagaggtagctcaatttgatactcacttgcttaaaaatcatatgctagcaaacgaaaaaatcaaacattggggctatcagaatggtaccttatatggttttgcaaatatgaaggcttatgttttaacaagagataagtacacttgtcagcactgtaaaactaaaaatggtactttgcatacgcaccatataatttatcgctcaaaaggaggttcagatgaagaaacaaacttgattaccctctgcgagtcttgtcacaaaaaattacataaaggcgagttagcaagtttcgagtctaaattagtaggtaaaagaaagcctaatttacgctacgcgactcaaatgtcgattgtgagaagtcaattgcttaaatattatgtcaacgcaattgaaacttatggctacataaccaaagaaaatcgacaaaatctaggtttgcttaaagaccattatatcgatgcttgcgttattgctagtcaaggaaataaatttaagcctaacagcgaaattttttataaaaaagttgttggtagaggcagccgtgtactagctaaatttagaaaaatatcaattcaactacgtagaggtaaaatctgtggttttagacaatatgacaaagttaagtatttaggtaaaatctattttatcaaaggacgaagatctgcaggtacttgtgctttgatggatatttttaataacccagtttattttaatcacatgcctaaaggctgtaaaataccaaagctcgctaattgcaaacgagtaagttctagaaaatctgttattattgaaaggaggataggtgcgattcctgtactaagctaa

SEQ ID NO: 781 - DNA, 325 bp, unidentified
  misc_feature 1..325: note = Ga0209607_1003300 JGI
  source 1..325: mol_type = other DNA
gtaaatatgtgctcggctaaagaccgaccacctttggactaagctgaatatttactagactaagcctagagaaatcttggctacgataattaggtcatgacacctttggttgctgccctagaccattgcaactgtcgcttaacgttaaattggaaaaatatagcactaaaatccggtgcgttaagtataaaaagcctttttatcattgtcgaagggaagtcttattctttggttggtaatagattaaagataagaactacagtttggtaagtactgatttatcatttaaaacttactaattcgcgaaaggagccatttcttatgg

SEQ ID NO: 782 - DNA, 2349 bp, unidentified
  source 1..2349: mol_type = other DNA; note = Soil metagenome
atggtgaaactgaaccaggaaagatcgtcataccgcagaaacagaaggaacaggaaaacatggtacagggagccaagattcgataaccgcaagaaggagaagggatggtttgcaccatcaatccggaataaacttgatacgcatatcaaggttttaaaccaagtcagtgggattctgccagtatcggaaacaatcattgaggtagcatccttcgatacacagaaaatgcagaatccggagatctatggaattgaataccagcagggtgaactgcaggggtatctcgtgaaggaataccttctggagaagttcgagagaaaatgtgtatattgccggaaaacaaacgttccgttggaaatagagcacattattcctaaatcccgccatggctcgaacagggtttctaaccttgctatttcttgtcataaatgcaaccaaaggaaaggagatatgactgcaaaggagttcggacaccccaatgtcatgaagaatgccagaaaaaatctgacacagacggcatttatgaacgctgtcaggtggaaactcaccaaactcactcagagccatcatacttttggatacatcaccaaacacgacaggatcaggctgggtcttccaaagagtcacacaaacgatgccttcgtcattgctggcggcactacgggccatgcaacacctgacaaattcggcagaatcattggtgaagcggtgaagaggtttcctgatgttgagattgaagtgcactgccacaacgatgccgggctttctgttgccaatgcaatcgccgggattgaggcaggagcccacagggttgacaccactgtgtacggcctcgaggagaggaacggaatatccgatcagctcaccattgcggaataccttaaggattacacagggaaacagcaggtggacgggaataaactgctctcagtctatgactatgtgcttgaactgatccatgagaagatgggcatggatttcttccagcacaactgtccccacaccggcaggaacgtccagacgcacaccgctggtacgcacgccgcattctctgatgtattccagggcggggacttctccgtgaacgtatacgcgggaaggagcatgatcaggaaaatactctccgccaacaatatggatgttggggaagacgaactcaggaagatcgtgctcagtataaagaatgaggcggtggagacaggcagggcactccacgttgatgacatcctgagaataggggtgaagtgcatggcaagagtgattgagctgggacacatcattgcaggcccttgtgcaggcctgatactgtctgatctggggcatgaggtcataaagatcgagaaaccgggatcaggggacatatccaggaggctgacgaagcagagtgccggtgcattccccttctacaaccggaacaagaagagcgtgtgcattgacatcaactccagggaaggtgcagaggcattccgaaggctcattggcacagcggatgttataattgacaacctgggtcccggggcggtggagagggcaggcttcccatttgagaagatttccgcaatcaatccccgtataatttacctgtcgctcaagggatacgggaaagggccttatgagaagaggaagtccctggactatcccattgaggtgcacagcggccttgcatacatgacaggcctcaagggaaagccaatgagggtagacgcatccatagttgatatgtcggcggctatgttcggcgttatcggcgttcttaacgcgctcattgaacgagaggcaacaggcaggggaaaataccttgatgtcgggatgtttgaaacctcggccgtctttatggggcagcacgtggcaaccgcacagcttaagaatgtcagcatggaaccccttaatgaaatgggcttcgcctggggaatctatgatttcttcaggacagaggatgacgttgaggtattcattgctgttacaaccgatccgcagtgtaaggcattctgcaggggcttttccatggaagtgtgcggcaatggcgactacgaaacaaacgcagcgagatttgacagtagggacacgctgattccttcaatcagggaaaagatttccgtaatggattcctccgatgttactggcattctggaggaactcaacataagctatgcactcctgaacgcaccccgggatcttctcaatgatccgcagatgaaagacaagatggtaaccgaaacatacaatggcagaaccataagggtgccacagacccctctcggttcgatacagagatcagatccgccggaacttggtgaacacacggaagaagtgattaactctctggaaaaagaatcgggacacagttga

SEQ ID NO: 783 - DNA, 296 bp, unidentified
  source 1..296: mol_type = other DNA; note = Soil metagenome
gtcggtgacgttgtcatacacagaccgaagatcgacatgcacccctcaatgaagatcaagagacaccctgaggtgtccacagaagtcagaggatacatcaggacagaggggaagggaaagaagctgcagaaggtcagttgggacttctatgaccgctgcatcggtgagttgacagttctcaggaatgagtgtgagaggatcgcccaggatttcggcaacctatcaggcttggcatcgattccggttatctgcacatcggagtatccgccgtctcggagaagagggaactctactct

SEQ ID NO: 784 - DNA, 597 bp, unidentified
  misc_feature 1..597: note = Ga0116227_10003227 JGI
  source 1..597: mol_type = other DNA
atgccttgctctccgaccggggcaaggaagcttttacaagaagtgcagggcgcagttttacagctgcagccttttacaatcgtcttgaaaaaaagagaagggggggaagtacaagagataggggttaaaatagatccgggaagtaaagtatcgcgtatcgcacttgtcggaaatttttccggggaaagcgcggttgtgtggggagctaatcttgagcgtaaaggcacggcaatacgatcatcccttgccggcagaagcgttataagaagaaaccgaagaagcagaaagacacgcaccggaaaagaaggaagacttcccccctctttacaaagaagagtccacggttttgcaacgggagattcggtaaaagcggttgtcctaaaaggtaaacaaagggcaacacactccggaagagtctccatcccattatccggaagtttttccatcgatacccctaggggaaaagtagacggtatcagctgtagattttgtaaaaatctgcaacacgcagacggttatcaatattcacaacaaccaagggagcgacgcttcctcccgcgactgaagtcgcaggtttccgcgtcgtcagttgtatga

SEQ ID NO: 785 - DNA, 288 bp, unidentified
  misc_feature 1..288: note = Ga0116227_10003227 JGI
  source 1..288: mol_type = other DNA
gtcaactcctcctctctaaagagagaggcttgtaagacaactaagcgtaagttgaccgggctaagttcttgtaagtaacaagagctacgttagagaagagtagataagcaccttggaatgctgctccggttccaagctctgcgtttacggttaaacggatataagggttaagtcagtgccgtaaacatacaaaaccttctcataccattgccgaggagaacattacccgggaaaagggggattgcaggtaactgctaactagtaaaaaaagagaaacgattgcaaagg

SEQ ID NO: 786 - DNA, 1443 bp, unidentified
  misc_feature 1..1443: note = Ga0393264_0001341 JGI
  source 1..1443: mol_type = other DNA
atgcaacaaagctctcttctatttcaagagagacctgcattaagattggacataggtggcgtattcgtgctaaaccacgattacacacctatgctacctgtctctcaaaaatgcagtgagtttctcttaaaaaatggccacgcggccacctaccgtcattaccccgctgtaatcattctaaagaagcaacaagctgacaatcgttcgcctgagcgttatacggtggaactgaaaattgacccaggggcgagacacagcggtctcgcgttagttgcccatgataaagtaacgaatcaatacacagccttatggggtgccaacctcacccacaaaggcaatatcgtctctgcaagactagaatcccgtctcagtattagaagaggccgacgcaatagacagacgcgctataggccgtcccgtcaagcgaatcgtgctaatgcaagaaccgaaggtcggctaatgccttccagtcggtcaattctaggtaacatcattacctgggcaaggagactgcaaagatacacacccattcacagtattgcttacgaatgggtaaagtttgatacccagaaaatggataacccagagataagcggggtggagtatcaacgtggtgagttagagggatacgagttaagagagtatctacttgagaagtataagcggaagtgtgtatattgcgaagtggataacaagcctctgcaaattgaacacgtcataccgcggtcaaagggcggctctgatagagcctctaatttggcgatagcgtgcgaaaaatgcaatcagaaaaaaggaaacaagcccattgaggagtttctatcacacgacccagagcgtctcaaaaaggttaagggtcaactgaaaaaaggactccaaccagccgccgctgtgcaaacgataaggaacgcaacccataagctgttatgcgaatctaccggcttaccagtgtcgctatggtcaggtggccggacgaaaatgaatagagtgaaacaaggctatctcaaagaccactggatagatgccatctgcgtaggtgagactggggagcgtgtgacgatgccacctgacatgcaaccgttgcttatccgggcgatggggagaggcaaccgacattttcaagagactgacagctacggtttccctagagtaaagaaggttgcaattgatggtaaggaggtaatggttagatgcaatgccaaagaaaaaaggaagcgggtgggttcaaacggcgtgcaaaccggcgacatggttttgtttagacacaaaactgggttagagtttaaatcgcgggttatcagtattgacccaaaaagtaagtcaggcggcgtaacagccaggcatcctaccactggcaagaaaataagtgcccgtgccgccgcctgcaagattttacagaagacggacgggtatggttataataccaaggaaactgaagaggcgtaa

SEQ ID NO: 787 - DNA, 290 bp, unidentified
  misc_feature 1..290: note = Ga0393264_0001341 JGI
  source 1..290: mol_type = other DNA
gtcgtgaaccctccatttcatgcggttcttgagttttgtggttcaggttcaggactcttataaacacagcgaaaccagtctcagccagaaaaaacgctggctacgttattcgtgaaaatatagtaaccgtcggatgcttctccagtcctacgctcttagagatacttttaaacagctacgtgttataaatttggtagtggcagtgaagtatctataaaaaaccacgattaacattgacgaggagaccattgctgctatgcaaatagcaaacgaaaaataacatgcaacaa

SEQ ID NO: 788 - DNA, 504 bp, unidentified
  misc_feature 1..504: note = Ga0127503_10276577 JGI
  source 1..504: mol_type = other DNA
atgggcaagcaagggagtggtgcagcggacgcatcagagccggccagtgcttcggctgctgcggaccgagagcgagcatcaaacaggttgacggggtgtgcccgcctgctcatgaagcagggcaaggcggcggtctaccggcgctacccgttcacgctgatcctcaaggggcagccggaacgattggcgcgtcttctggctcatctcaaagcgccgctaagagatgcggcagcggtcaacacgacgcgctgggccatgtatgaacggctcaccgccctgggctcgccggtggagggtggaagtggagggttgacgaaatacaaccgggtgaggcggggaacctatgtcggcaaagtggccgtgcgcagccgtggcatcttcaacatcaccacggcacaaagtgtcgttaccgacattcatcatcgctggtgtcggctcgtggcaagagccgacggccatacctatcagcaaagaaaggaggcggcgtttcctccctccgaatga

SEQ ID NO: 789 - DNA, 275 bp, unidentified
  misc_feature 1..275: note = Ga0127503_10276577 JGI
  source 1..275: mol_type = other DNA
gcctgggcacacacgatcctgcttgatccgtgtgcccgggcttttgtctcaggtgtaatcaccgcttgcaagaaatgagagcaaacgctatccagtgcaagcaagtactccatgaccgctttctgatcgctctgagagaataatctctcaaactatccggactttggtgaagactgctgatctgctcagtgctcatgagttgatactgtaggatatcaatgggcaagcaagggagtggtgcagcggacgcatcagagccggccagtgcttcggct

SEQ ID NO: 790 - DNA, 1461 bp, unidentified
  misc_feature 1..1461: note = Ga0075519_1000010 JGI
  source 1..1461: mol_type = other DNA
atgcagaagttagaagaaagaaatacatacacacctacggacattccgcacattcgtagcaactgtggtttgccattaaacagagaggaaactctcagtgtgtcagacttaaaaacattttctaacaactccgatgcggctctaattgcgacaggacacgcaaagcagaacacgagtgtatctgctgtatttgttctaaacatgagaggccaaccactcatgcctacaacaccaagaaaagcaaaacagttattaaaggaggataaagcgaaagtaatcaggagaacaccattcacgattcaactaaaatatgcaacaggagaaacaaaacaaccaataattcttggagtggatagcggattcttgaatgtgggattatctgccacaacagacaggaaagaagtatattccgcagagataaaacttcgctcagatatggtaaaactcaattcagaaagaaagcagtatcgcagagcaagacgcagcagaaaaacatggtacagacctccaagattccttaaccgaaaaaagccagatggatggcttgctccctcaatccaacataaacttgaaagccatatcaagttaattgacagcataaaaagattgcttccaattactaaaatcgttattgaagtagctgcatttgatatccagaaaatcaagaatcctgaaatatctggaactggatatcagaatggtgtgcagaaagatagctggaatgtcagggaatatgtgtttcatcgggacgatcatacctgtcaggcatgtaaagggaaatcaaaatacccgatacttgaaacacatcatatcatttcaagacaaattggcggggatgctcctgataatctcttgaccctgtgccagtcctgtcataagaaagtctcaaaaggcaaactcaaactggatataagattacccacaggtttcaaaccagaaacttttatgtcgataataagatggaaaatggtcaatatgttaagggatgcaggaaatattgtatatcacacttatggatatatcacaaaatttgatagaattgcattaggtcttgataaatctcataataccgatgcttttgtaatcgcaggtggaactatgcaagaaagaagttcagtaagccatttaatcaaacaagtcaggaaatgcaatcgtaaattattcaaaggcgaaagaagccatatcaagaacacagctgcccgattcattcacggattccaaagattcgataaagttctatggaataatattgaatgtttcgtattcggaagaagaaaaacaggttatttcgagttgagaaaacttgatggtacaaaaatccatgcttcagcaaaggcaaaagaacttactttagtacaaagttctaatacatttttaatagcgaatttgaggcggggtacgctcccccacactctgaagagtgtggtttccgctacccctgcaccccatggagttttatga

SEQ ID NO: 791 - DNA, 227 bp, unidentified
  misc_feature 1..227: note = Ga0075519_1000010 JGI
  source 1..227: mol_type = other DNA
gtcaatcacccacacctgaaaggtgtgggcatgttccgtgaggaggatgggcaacaggttgacaaggaggcataaattatgcagaagttagaagaaagaaatacatacacacctacggacattccgcacattcgtagcaactgtggtttgccattaaacagagaggaaactctcagtgtgtcagacttaaaaacattttctaacaactccgatgcggctctaattgc

SEQ ID NO: 792 - DNA, 1554 bp, unidentified
  misc_feature 1..1554: note = Ga0063356_100000074 JGI
  source 1..1554: mol_type = other DNA
gtgcctcctcagccccgggctcttcgagcgcgtcgtgcagacaagcctgggaacgcacgaaacgacggcgcgcatacggctgctgcccaacattcccgagaggagcgtacagccccgccagggctgataccgtcacctgagcaatcagtgagcggggtaacccgcctaacacaaagcaccatgcagaccaaacaaacccaatcccgcgtcttcgtcctcgacaggcatcagaagcctctgatgccctgtcatccggcacgggcccgcgaactgctcgacaaaggcagggcccgcgtccaccgtctcaacccctacaccatccgcctggttgatcgaaccctggagaactcatccctccagccggtccgcctcaagttcgatcccggcgccaccaccagcggcgtcgccatcgtccgggaggacgaggaggcccagcacgtcctccacctcgccgagatcgagcatcgcggcaaggctgtccgcaaacacatgatccagcggggcaactaccgcggtcgccggcgttcggcaaacctgcgctaccgccagccccggttcgacaaccgcacccgtctcgccggctggctgccgccctcactgaactcccgctgcgacaacctgatctcctggacaaaccactaccgccggctggttcctgtcactgccatcacggtcgaaagcgttcgcttcgatatgcagttgcttgagaacccgaacatctcgggcatcgagtaccagcagggcacgctggccggctacgaggttcgtgaatacctgctggagaaatggggccgccgctgcgcctattgcgacaaggaacacctgcctctccagatcgaacacatccaggctcgggcaaagaacggctccaaccgcatctccaacctgtgcctcgcctgcgaaaagtgcaaccggcgcaaaggctcgaaggacgtccgggacttcctgaaacgcgatcccgaacggctcaagcgcatcctcgctaccgcgaagaagccgctcgccgccgcagcagccgtcaacgccacccgcaacagcctggtccgccaactccgattaaccggactaccggtcgagacatccagcggcggccgcaccaagtggaaccggtcccgcctcggcgtaccgaagacccacgccctcgatgccgcttgcaccgggaccgtcgacaccctgctgaactggcagatgcaaacgctcgccatcaaggccaccggccgcggctcctaccagcgaacccgcgtcaacaaacacggcttcccccgtggctatctgcctcgaactaaaaccgttcacggcgtccgcaccggcgacctgatccgagctactgtcccaaccggcaaaaaagccggctcctacaccggtcgcgccgccgtccgttcctcaggcaacttcaacatccaaatgccccacaccaccgtcgaaggcatcgcccaccgcttctgcaaggtgcttgcacgcagtgacggctatacctactcccctcaatccctggacttgacgcccgtgctcctcccggccgttaacggccgggtttccgcacggagtttttga

SEQ ID NO: 793 - DNA, 240 bp, unidentified
  misc_feature 1..240: note = Ga0063356_100000074 JGI
  source 1..240: mol_type = other DNA
gtcaataacccggccttaaaaggccaggcttgaagtccgaaaggagttcaagcctacgttgaccagggaaagtcacagagaagggcatcgttgatgtgactacgttgagcagtaagccaaagacggaccccggggtgcctcctcagccccgggctcttcgagcgcgtcgtgcagacaagcctgggaacgcacgaaacgacggcgcgcatacggctgctgcccaacattcccgagaggagc

SEQ ID NO: 794 - DNA, 1371 bp, unidentified
  source 1..1371: mol_type = other DNA; note = Soda lake metagenome
atgtcggttttcgtactcgacaagcagaaacggcccttgatgccgtgcagcgagaagcgcgcacggctgctgcttcagcgaggccgagcggtggtgcataagcgctatccattcacgatccgtctcaaggatcgggtgggtggcgaaacgcaacctctgcgcctgagcctcgatcccggcagcaagaccacggggctggcgctgctacgcgaaacgggcgacgaccagcgccatgtgctgtgcctgttcgagctggtgcatcgtggctttcagattcgcaaggcgctggagcaacgcctggcgtttcgccgtcgtcggcgctcgaccaaccttcgctatcgggcgccgcgcttcgataaccgtactcgccgggacggctggctaccgcccagcctgcaacaccgtgtcgacacggtgatggcgtgggtggataggctctgccgcctggccccgatcagcgccatcagccaggagctggtgcgcttcgacctgcagaagctggaaaaaccggagatcagcggcgtcgagtatcagcagggcaccctgctcggctacgaagtgcgcgaatacctgctggaaaaatggggccgggagtgtgcctactgcggcaccaccgacacgccgctggaaatcgagcatgtggtgccacgctcaagcggcggctcgaatcgcatcaccaatctgacgctggcctgccacgtctgcaaccaggccaaaggcaacggcacactggatgccttcttcgccaccgacaaggggctgaagaagcggctcaaggccaatggcctgtcagcggatacccggctggatcgcgtgcagcgtgaactcaagcggccgctgcgtgatgccacggccgtcaatgcgacccgctgggcgctgtatcaagcgctcaaggccactggcctgccggtcaacaccggaagcggcggactcaccaattacaaccgccagcgcctgtgcctccccaagacccatgccctggatgccgcgtgtgtcggtccattcgaccggcttcatggagagaaccgccccacgctgaccatcaaggccatggggcgcggcagctatcagcgcactcggctcaaccaatatggcttcccgcgtggctacctgatgcggcagaagcaggtaaagggcttccagaccggcgacatggtgcgagccatcgtgcccaccggaaagaaggccggcacgcatacgggccgcgtcgccatccgcaagaccggcagcttcaacatccagacccccgaaggggccgtgcagggtatctcctaccgtcactgcatcctgattcaacgcggtgatggttacggctatcaccagacaccatccacccacgcaaaaggaggagcgggacaggctgtggcatag

SEQ ID NO: 795 - DNA, 307 bp, unidentified
  source 1..307: mol_type = other DNA; note = Soda lake metagenome
gtcaactacccccgcctgaaggcgggagcttgtaaaagcaagctgggttgaccagggaaagcggtaatcaatccactacgttagtcacaggtcgttaagacccaccgccgaatgcttcctcagttcggcgctctggaaggtcaggatcatgctgcggtacgccgcccgggcgaaaggtaaagcgccgaaggttctgatcgctgcggcaacgcaggagccggtggctgacattcccgaggggagatgggccgaaaggcccacgacacaggacccgtaaggggagtgattaggagaaaatcgcatgtcg

SEQ ID NO: 796 - DNA, 1140 bp, Lactobacillus delbrueckii
  variation 774..1123: note = n represents any nucleotide
  source 1..1140: mol_type = other DNA
atgaagcacgaaaatgccaatcgggtgtttctgcttaacaaggacggcaagccgctaatgccatgttgtccaagaaaggccaggctgcttctgaaaagcggcaaggcttttgtggtcaagaaatatccgttcaccattcagctgaaatacggctcatacggctataagcagaaggttagccttggcgtagacactgggcagagacacattggctttgccattgtcagtcaaaacaaggtgctgcatcaaagcgaggtagagcttcgccaagacgtacacaaaaatctgtacacccgcaagatctaccgcagaagcaaaagaaaccgcaagactcgctatcgccaagcccgctttttaaacagagtgcatggcaagcgagacggcttatggcttccgccatcagtaaaaagcaaggtaagccataacattgcttggatcaagcgctatctggctgtattgccaaatcccgatctccatatcgaagtaggcaagtttgacatggccaagatggtcaatccagacatttcgggcaagcagtatcaagaaggcagtctaaaggactggaagaactatgagtactacgtgctggcacgtgacgagtacacctgtcagctttgccataagcatggcgaaggcgtaaagcttgtcgttcaccacatcgtctaccgctcacaaggcgggacagaccgagtggacaatctgataacgctttgcacgaattgtcatactacgaagaaccaccagccaggcggcaagctctacaagtggatgaannnnnnnnnnnnnnnnnnnnnnnnnnnnnnnnnnnnnnnnnnnnnnnnnnnnnnnnnnnnnnnnnnnnnnnnnnnnnnnnnnnnnnnnnnnnnnnnnnnnnnnnnnnnnnnnnnnnnnnnnnnnnnnnnnnnnnnnnnnnnnnnnnnnnnnnnnnnnnnnnnnnnnnnnnnnnnnnnnnnnnnnnnnnnnnnnnnnnnnnnnnnnnnnnnnnnnnnnnnnnnnnnnnnnnnnnnnnnnnnnnnnnnnnnnnnnnnnnnnnnnnnnnnnnnnnnnnnnnnnnnnnnnnnnnnnnnnnnnnnnnnnnnnnnnnnnnnnnnnnnnnnnnnnnnnnnnnnnnnnnnnnnnnnnntgactacgttcgtgtga

SEQ ID NO: 797 - DNA, 337 bp, Lactobacillus delbrueckii
  source 1..337: mol_type = other DNA
ttcgggtctcttatctttagcagggaagctggagaaatccagctttcattgtctagactaagctatccaatcggcttcagctgactggatagagggactacgttatccatgtcatcacacccaaggatgatgcccaagtctttggctctgtggcagctctgtaaacagtcatgaggttaacgtgacagtcaactgcgttggcaagcatggataacattgtcgatgggcaacaacgcaaatccggattgggtctcctgattcggacaagtggcaggaatcactgtttcctgcattacggaaaaggagaaaaagcatgaagcacgaaaatgccaatcgg

SEQ ID NO: 798 - DNA, 273 bp, unidentified
  misc_feature 1..273: note = Ga0197810_1087 JGI
  source 1..273: mol_type = other DNA
atgcaacgagtgtttgtggtagacaaaaatcgagagccactgatgccctgccaccgggcacggaagctgctcaacatcgtgcgggcggttgtaaccagcggcaagaagattagcgcatataccgcgcgggtggcggtgcgaagctcaggcagcttcaacatcaccacgcgcaaaaaaacggtacagggtatcagctaccgctgctgcaccccgctgcacaaatccgatggttatagctacgagaaaggagaagcggcttccttcaccttttga

SEQ ID NO: 799 - DNA, 252 bp, unidentified
  misc_feature 1..252: note = Ga0197810_1087 JGI
  source 1..252: mol_type = other DNA
gtcaacgaccacccgatttatcgggtggcttgtaaaagcccatgtcgaccagcctcagccctatggggctgcgttacgggcgaatgcataggcactccggggtgacgccaccagccccggtccctgcggtcagtggttaaatcgtctgagggtctgagccagtgctgctgacaccaaaccgcccgataacattggcgaggtggacttcaccgccatctggcgagaatagaggggtaactctcaatgcaacga

SEQ ID NO: 800 - DNA, 702 bp, unidentified
  misc_feature 1..702: note = Ga0116167_1020986 JGI
  source 1..702: mol_type = other DNA
atgcatccgttcactatacgtctaaaagacagaacagtacagcaaagcgagttacaacctttaagattaaaactcgaccaaggagcgaaggttactggtctttcagttttgcgagaagacggcgatgtagcagaaacagtttttctttgcgagatacaccacaaaacagacataaagcaaaaacttgatgccaggcgtgctgttcgtcgaagtagaagaaacagaaagactagatatcgaaagccgaggtttctaaatcgaagacggcctgaagggtggctgccaccatcgttcaaagcaagagctgaccagcttataaatgcggtaaggaaactgacaaagctgttgccaataattgcaatatccatcgaagatgcaaagtttgatactcaaaagttgcaaaatccagagatttctggcatcgagtatcaacgaggcacactttttggctacgaggtaagggaatatcttttggaaaagtggggacgaagatgtgcatactgtggtagaagcgatgtaccactggaaatcgaccacatcgtaccaaggtcaagaggtggcacagatagagtatcaaacctaacacttgcttgccacgagtgtaaccaaaagaagagcaacaaaacagctgctgagtttggatacccacatattgaagagcgggcaagacaaacatacaagcaagcagcattcatgaactcg

SEQ ID NO: 801 - DNA, 298 bp, unidentified
  misc_feature 1..298: note = Ga0116167_1020986 JGI
  source 1..298: mol_type = other DNA
gtcaactacccccgactgaagtcgagggcttgtaaaagccctggttgaccagcctaagcaccggacccaaaggacaaggggacgaaggtgctacgttggtagtgggctcaagacccactccgggatgcttctccagtcccggacactggaagtgctggttgcagacaacctttggggtgtgggcgaaacggaccagcacacgtgccggctaccaacattggcgaggagagtgctaaagtgagtccgctttagcgcgtcacaaggcccgtaagggcattttcaaggagtgagacacatg

SEQ ID NO: 802 - DNA, 1254 bp, unidentified
  misc_feature 1..1254: note = Ga0123348_10016055 JGI
  source 1..1254: mol_type = other DNA
atggtatatatactaaacaaagatggtcatcccttgatgcctaccgaacgtcacggcaaggttcgtcgtatgctgcgtgatggtttagcacatgtggttcgacttgttccatttaccatacaattagattactcgtctggcaaggaagtacaagaggtgtcgttagggatagatgctggcagtaaacacattggggtgtctgcaacaacggagcgacgtgaactattagcaatgcaagtggaagagcgtgatgatatcgtgaaactaattgccgacagaagagaggcaaggcgaactcgaaggaatcgtaaaacacgttatcgtgcagcacggttcgataatcgtcgtagaatggatggatggtttgcgcccagtattgaaaatcgcatctctgcacatttgcgtctaattcgacttgtgtgttcaattttgcctgttactcaaaaaacgattgaggttgcacaattcgactcacagaaaatcaagaatgacaagatttcaggagttgaataccaacaaggagagcaacttggtttctggaatgtaagagaatatgttcttgcaagagacggacacagatgccagcactgcaaaggaaaatctaaagacaaaattttgaatgttcatcatctggaaagcagaaagactggaggcaatgcgccaaacaatctcattacgctgtgtgaaacctgtcataaggcataccatcgcggtgaaatccaattaaaagcaaaacgtggaacaagtctgcgcgatgccgcagtgatgtccataatgcgttgggagatttataaccgtgctcaacgtgagtttacgaatgtgaatttgacgtatggttatattacaaaacacagccgtatcaataatactattgccaagacacattgtgctgacgctttttgtatttcaggaaacgtccaagctgaacgcctaccatggttctatggagttcggctgcaacgtcggcacaatagatctcttcatatattaaagcctacgaaaggtggtgttagaagaagtaatttggcggctcattggattggaaaatcgcaattgcaacaatatgactatgttgaatggaatggatataaggcatttatctctggcagtcaaaatggaagaccataccttaaaaactttgacgataagtatatcatgacacccaaagcatccgtcaatgcaaagacagtgaaattcattcgaagaaagcgtggaagtatgataattgaacaattacctaaaaatattgtatag

SEQ ID NO: 803 - DNA, 283 bp, unidentified
  misc_feature 1..283: note = Ga0123348_10016055 JGI
  source 1..283: mol_type = other DNA
gtttacccacaaaaatgctggtactaacagcagattatgtgtaagccgattagcctcaggcatataaagggcatacgtgttatgcaaattatatgacctacgttaggagtgaatgtataggcaccttggaatggtcgcccaagttccaagctctgcggtcagcgattaaaaggagcgaaagcaacggtgtcgctgatatatgaaaccactctataacattggcgatgggcgcataacgggcgcaagcccgacttatagtttttaaatagaaaatctaaatatg

SEQ ID NO: 804 - DNA, 1269 bp, unidentified
  misc_feature 1..1269: note = Ga0257072_1000039 JGI
  source 1..1269: mol_type = other DNA
atgttcgtgtacatcattaacaaaaacggacagccgctaatgccctgcaagcctcaaaaagcaagaaagctcctgaaggctggcaaggcggaggttgtcaaatatgagccattcactatcaagctgaaatttggctcagctggctacaaacagccgataactttaggtattgacgccggctccaaacatattggggcttccgtgtcaacagaaaaacaggaattatatgcttcggaaacagtcatgcgttctgatgatggcaaggctactatcgtgaatcttatagcaaaacgcagagagcttcgacgtaaccgcagaaaccgtaagacccgttatcgcgaagcaagattcttaaaccatgttcatcgcaagcacaaaggctggcttgctccaagcgtagagaacaaaatccatgtccacctaaagctggtggcggatatccacaagatactgcccatcactaaagtagtggtggaagttgcccagttcgacattcagaagattaagaatcctgatatttccggtgtcgaatatcaacaaggtgaacaacttggttgggctaacgtcagggaatatgtattattccgcgacaatcacgaatgtcagtgttgcaaaggcagatctggagatccgatactgaatgtgcatcacattgagtcgcgaaaaactggcggcaacgcaccaaacaatctgataactctctgcgaacattgccatcagagctatcaccaaggcaaaatttctttacctaagtcgatacatcgcggcatgagtttccgagatgcagctttcatgggcatcatgcgatgggcattctacaatagaattaaggcgttatatcaagacgtcaaactaacttatggttacatcacgaaaaatactcgcatcaagaataacattgccaagacacatacagctgacgcttactgtatcgccgggaacgtcaaagctagacggcttaaacatgagtatttacgtaagcaagttcgcaggcataatcgcaaactacatcgagaagtgccagctaaaggtggtattcgtcgattggctcaagcagggcatttcgtaagaggcttttgcttgaacgatactgtgatggccaaaaatcagcagtggtttattcgaggcatgcgtcaaaagggcagttttgttctaagacatcttgatggcacaaaactggaaattgcgctttcaaaaataacatttttgagacataacaattcttatttaatcgagaggagagaagtggcgcttacctccaccctgtag

SEQ ID NO: 805 - DNA, 288 bp, unidentified
  misc_feature 1..288: note = Ga0257072_1000039 JGI
  source 1..288: mol_type = other DNA
gtcaataacccccgcctagcggctttgcgcttgaggcgggagcttgcggaagcaagctctgattgactagcctaagtcttaactgactacgttgctttcgttatctcacccgtgggtgtttatcctagcttacggctctgagcaggctctgtaaaagttctgagaggtaggaacggtcaacctgaggacggtctggcgttaatccagacaagcgattacaacattggcgaagggtagattactctaatttgaagcttttgcttcggaaaggaggtacacgttatgttc

SEQ ID NO: 806 - DNA, 981 bp, unidentified
  misc_feature 1..981: note = Ga0075017_100018482 JGI
  source 1..981: mol_type = other DNA
atggtaccagtatttgataaagaaaaagttccattaatgccttgttctgaaaaaagagcaagacttcttatggaaagaggcaaggcgaaaccgtattggcaacatggcttcttttgtattaggcttactgtggagccttcggctcgtcattatcaggatgtcgctcttggaattgatcctggatcaaaacgggagggatatactgtactgactgagacgcaagtggtaatcaatattactacagatactccggatcaagtaaaaggtaaggttgaaaccaggagaaatcttagacgaagtcgtcgtcaaagaaaaactccttatcgaaaatgtagagcaaatagatcttcattgaaaaacaaaggcgttccaccatctacaaaagcaagatgggataagaagctgacaatgattcgttatctcacagacatgcttcctattacaaagataaatgtagaggatgtggcagctaaaaccaaacatggaaaaggaagatggaatagatctttttctcctttggaagttggcaaagcatatttttatgaaaatgttgctaaaacttatccagatatttctttgagtaagaccaaaggttttgaaacaaaagctcatcgagatattagggaatttgagaaatctaagaaaaagttagagtggacatgggaagctcataatgtagattctcattctctagcggagatggtacttaataaacaagttaaaccatatcgtggacttttaagattgaagtggatgaatttttcaagaaggcaacttcacgtccaagttcctattaaaggaggtattagaaagccttatggcaaatctattacacaaggaataccaaaaggaatgatttgtaagtatattggcgaaagcaagtcgtgtaatagtaatgatttgtattatcttggtggagaatctaaaggaaaagtgacactttgtaattataattggggaaaacgcgcatcccgatcaatc

SEQ ID NO: 807 - DNA, 248 bp, unidentified
  misc_feature 1..248: note = Ga0075017_100018482 JGI
  source 1..248: mol_type = other DNA
ttcagctaccataatctagataagtagattatgtattgctcacatagaagtaatagttctaaccaaacgttatgatgtgacgaaagtgaattgattagacaggcgataactgaaaagttatcgcaaaaacatatagtagaatcaaacccgttattggttagggttaaagtatgtagagaatgtttcgctagttctcttcctctacgattctagtatgtcgaagcgagattaacaagtcccgtgaggga

SEQ ID NO: 808 - DNA, 1242 bp, unidentified
  misc_feature 1..1242: note = ERB_1001085 JGI
  source 1..1242: mol_type = other DNA
atggtctttgtcttggacaagaaaaaacgaccgctgatgccttgttctgaaaaacgagcaagattattgcttgaacgcggcagagcgagagtacacaaaatgtacccgttcaccatccgcttggtagatcggttgcaagaggattccgtattgcaagaagaacggctcaaacttgatcccggttctaaaacaacaggtgtggctgtcacgttggatggagcaacaggcacaaaggcagttttccttggcgaagtcattcacaagccaggaatcaaagcaaaactagacagtcgacgcgagcttcggagatcaaggcgcaatcggaaaacccgctatcgcaagccgcgtttcctcaaccgcaaacgcaaagaaggatggttgcctccaagcctagaagccagagtcaatcaaacgatgaatgccgttgctaaactgattagattcataccaatcaccgccgttagtgtagaacacgtcaaatttgatacacagttgatgcaaaacgcagagatttcgggtgttgagtatcagcagggcgaacttgcaggctacgaggttcgcgagtatctcttagagaagtgggggcacgcttgtgtgtattgcggagcgactgatgtgccacttgaggtcgaacacattgtcccgaaatctcgtggtggaagcaatcgggtatccaacctaacacttgcttgccacgagtgcaatcaggagaaaggcaatcgaacagcagaagaatttggccacccaaatatccaagcgcaggcgaaaaaaccactcaaggatgcagcaacaatgacccttcatcggcgagagacgagcgatgacgagctagatcacgtgagcgagatcaggcgcgaaactcgttccaaaggcccagccaaagggaattgcgcttcaacgacgcacctcttccgccgatctcataactcgcgttgcgcctctccgtgtggcctgatgggccgttggagcgtgcgatcacgcgcttcttcaggcgcggtcttgcacgacgttaagaccagcacgccgcgcgcagtgagcgcagcaaaagtaggcttcgccgacttccactccatgcccgatgatccggcacccacagtgagcgcaagtcggggcgagagcctgaatggcacattcgaagctatcgaacgtgtgagtgcgcccttgcatgatgacctgaaaagctttgtcgtagtcgttgccacagagttcacactgcgccatggtcacctccttttcgtctag

SEQ ID NO: 809 - DNA, 332 bp, unidentified
  misc_feature 1..332: note = ERB_1001085 JGI
  source 1..332: mol_type = other DNA
gtcatagaccccacggcgcgcagccggggggcttggaggtgccagaaggtacctgagagtcgcttgcgtagctgaacatctatgaccagcctgagtgccggagcccgaaggacaagggcggcgaaagcactacgttccgtgggtcatggcaccccggggtacttctccagccccaggccctgccgcctgcggttaaacgcaagctgggggtgtagcgagccgtgccgcaggcgcggaaagcccttggaacatgggcgaggagagacgcgggcggagtccggtccgcgcgtcaccaggcccgtaagggttatccaaaaggagcggaaacgatg

SEQ ID NO: 810 - DNA, 1257 bp, unidentified
  source 1..1257: mol_type = other DNA; note = Human gut metagenome
atggtttacgtaattaacaaacaaggacaggcacttatgccaactgaaaggtttggtaaagtgagaaggctattaaagaatggtcttgcccatgttatgtaccgtattccattcacaattcaattggattatgacacaactaacttcattcagcccataagtttgggtatagatgctggtagcaagcatatcggcatatcggcaacgacaagtgagaaggaattgtatgcagcagatgtagaacttagaaatgatattgtagagaaactatctactcgtagagaacaaagaagaactcgtagaaatagattgcgttatcgtagggctcgtttcaataatagggtttcatctaaaagaaaaggttggttagcaccatctattgaaaacaaaatccagactcacttaactgttgtagagaagatacataagtttctgccaataactaatattatagtagaaactgctgcttttgatatacaaaagattaagaatccaagtatatcaggtaaagaatatcaacaaggagaacaactcaacttctttaatgtgcgtgagtatgtgcttcatcgtgatggtcatcagtgtcaacattgcaaaggtaagagtaaagaccctatcttgaatgtgcatcatattgagtcgagaaaggttggtggaaattcaagtcaaaacctcataacactttgcgaatcttgtcataaagcataccataaaggtgaaatagaactcgaagttaagcgtggcacatcattcagggattctgcatttatgtctacaatgcgatggagcttctacaagaagttgaagaatatctatcctaatgtaagtatgacttttgggtatatcacaaagcacactcgtatcactaatgggctatcaaaaagccactatgttgatgcaaggtgtataagtggtaatcctaccgctaaacctcttgaatattatttctatcaaaagaaagtgcgttgtcaaaacagacaaatacacaaggctaatttcttgaaaggtgggaggaagaaactcaatcaagcaccatacttggtaaaagggtataggttatttgacttagttgaataccaaaaggatttgtattacatatttggaagaagaggtagtggtttctttgatattaggaaacttgacggtacaaaagtaaacaagggttctcttagttgtaagcagatgcgattgatagatataagaaaaacaataataattgaaaagcgaatgcaaggcgcaatttctcccataaactaa

SEQ ID NO: 811 - DNA, 273 bp, unidentified
  source 1..273: mol_type = other DNA; note = Human gut metagenome
aaccagaataatattgtcaactacccacaggctaaagacctgtgggcttgaaaaagcccaagttgattagtctaagcacttcgggtgctacgttaggagagaatatatagttaccaagtgggtgtttgctcaagccccctgctctaaggttagtgattaaacaattccgtgaggtagggatagtgttgctaacgaaaacctctccataacattgacgatgagcatttaacggagaaatccgacttatagtaaaatttttaaaaaaaaagaatg

SEQ ID NO: 812 - DNA, 1332 bp, unidentified
  misc_feature 1..1332: note = Ga0074432_100015 JGI
  source 1..1332: mol_type = other DNA
atgtcagtatttgtcctagataagcgcaagaaacctctgatgccttgtactgagaaacgggcaaggcttctactagaacggaagaaagcggtcattcaccgaacggttccgttcacgattcgcctcaaagaacgcgtaggcggagaagttcaacccgtcgcagtgaagcttgacccggggtcaaaggtcactggaatcgccctcacccgtgaagtgggtaccgaaacgacccaccctatgttcctcgccgaattgcatcaccgaggggcatccatcaagaagtcactcgagcaacgctctggttatagacgtcgacgaaggtcggcaaaccttcgctaccgagcccacagattttccaacagaacgaagcctaagggttggttggcccccagtctcctacatagggtagagacgaccttgtcttgggtcaataggttccgacgactggttccggtcagtcgaatctcgatggagttggttcgattcgacctacagaagcatctcaatccagaaatctctggtattgagtaccaacaaggggagcttcaggggtacgaagtacgggagtatttgttggagaagtggggtcggaagtgtgcttactgtggggttgaaggggttccacttcaagttgagcacattgtaccgaaggcttcgggtggctcaaatcgtgtctcgaacctgacgttatcgtgtcacacatgtaaccagaagaagggttcgaggtctgtcaagacatttcttgcgaagaagccggaggtgctcaagagggttcttgttggtgcgaaggcgccattgcgggacgcagcggcggtgaactcgacaaggtgtgttctatacgatacactcaaggctacagagctacctgtcgaaacggctagtggaggtcaaacgaagtggaatagaagccgatttagtataccgaagactcacgcactcgacgctttatgtgtgggtatattaaaaggcatcaaaaactggttacaaccaacgcttgctatctattctacaggtcggggagtctaccagaggacgagggttacgttatgtgggttcccacgtgggtacctaatgcgaaagaagtcggcgttcggatttcaaactggcgacttggttcaggcagttgtactgaaaggtaagaacgtgggaacccacacgggacgtgtagcgattcgggtgactggaagttttaatatccaaacaagtcacgggttaatacaaggtatttcatatcgttactgccggatggtccagcgtggcgatgggtacaggtacgagattgggctcttcccaactttcaaggacggggtttttgccccgaagaaccaatga

SEQ ID NO: 813 - DNA, 277 bp, unidentified
  misc_feature 1..277: note = Ga0074432_100015 JGI
  source 1..277: mol_type = other DNA
gtaaacaactcctcctttatgggaggtgctttgtgcgggagacatcacaaagcacctgtttaccagggatagcgaaagctacgttgtgattagggatccagaccgacgtccgaatgcttcctcagttcagacctctcgaagacatctttgcagacaagccagagttaggcacgaaacggaagatgtcccaacaccggatcacaacattcccgaggggagacggctcgtaagggccgcgttactaggcccgtaagggctccgcaaggaagatatgtca

SEQ ID NO: 814 - DNA, 1386 bp, Chloroflexus sp.
  source 1..1386: mol_type = other DNA; mol_type = other DNA
atgcaacacgtgttggttctcgatgcccagcggcgtccgttgatgccgtgtcgccccgcacgagcgcgattgctcttaacacaaggcaaagcagctgtgctgcgacgctctcccttcctcatcattttgaaggagtccaaaccagacgctggcgtgaagcccatgcgcctcaagattgatcccggtagtcagacgacgggcttggccctcgtcaccgctgcgacggacacctctgagcaggtgcacggtatggtgctgtgggcagcagaattgacccatcggggcagtgaaatccatcgggacgtgaccagccgtggcaaggtccgccgttcccgcaggtttcgccatacctggtatcgcgaggcgcggtaccacaaccggacccgtcccgcggggtggcttccgccctcactggaaagccgtgtgcacaacgtcgccacctgggtccagcgtctggcgcggtggtgtcccatcggagccatctcgtttgaggcggtacggtttgatacgcagttactccaacacccggatattgctggcatggagtaccaacggggggacctcgcagggatcgaggtgcgggagtatctcttgctgaaatgggggtatcgctgcgcctattgccaccagcaggcgacttctaccaattggtgggaaattgaccacatcatgccacgcagtcggggaggaagtgatcgggtctctaatctcgccctcgcatgtcacaaatgtaatagtacaaaaggagaccagactgctcttgagtttgggcacccggaggtccaggcgcaggcgagagcacccttgatggatgccgccgctgtcaacagcactcgacgagcggtgcatcaacgcctcctagcgtttggcatgcccgtggagaccaacagtggcggtctgacgaaatggaataggacacagcatagcctacccaagacccattggcttgatgcttgctgcgtcggccggagtactcctacgtttctgcggggctggcaggaccttgtcccgctcttgatcacggcacagcgctggcagcggcggcagatgtgcttaatgaacgagcatggcttcccgcgtacgagggccaagggagccagccgagtgcagggattcaagaccggcgatatggtcaaggcggtggtgccgagtggaaaacccgaggggatccatgttggcaaagtggcagtcaaagcgcgcggctacttcactgtggctagtgtgcccgatgtgccctctcgctattgccggctccttcagcatgccgatggctatgagtatacccagggagtacccgctgggagatcttcccagtcagcaccgggtcaggcggcgggtagcggagggagcgttgtccgcgaagagaccagagtgtcacgggactga

SEQ ID NO: 815 - DNA, 320 bp, Chloroflexus sp.
  source 1..320: mol_type = other DNA
gtcagatacccggtccccagaagagggcgggcttgtgcgagcaagccatctgaccagttcccttcctctgcggagggaggagccgttgacgaggagcgttcagagtcgcaccctgggatgaccgatccagtcccaggcaactgcaagcgcacggttaaacagcggttgggtgccgcagtgccgtgcgcagagtaccgctcgtcaaccaggacgaggatcaccttacctgcgcgtcttccgagccatcgccaggcaagcagcgtcgccgtgtatggcgtccctttagccagggaagaaagttctgatgtgttatgcaacac

SEQ ID NO: 816 - DNA, 723 bp, unidentified
  misc_feature 1..723: note = Ga0123338_10037050 JGI
  source 1..723: mol_type = other DNA
atgaaagaaaaccagagatatgcttttgtactagataataggggtattaagttatccacaacaaaagaagaaaaagcatggtataagataagaaaaggtaacgcaaaattaatacaactaaaacctatgataattcaattaaattataaggtagacaatacagacaatagtaacatttacgtaggattagatgtaggtgaaacaactggtgtaggtatagttcaaaaatgcaaaacaagaaataaagtaatatttaaaggtgaaataaagcatagaaaagatgtaagtaagttaatggagcaaagaaaaaattatagaaaattaagaagggcagaaaaaagatataggcaagccagatttgataatagaggtagtagtaaaaaagaaggtagattaccaccttcaataaaaacaagacaagatgaaataataagatttataaataaattattaaaattactagatataaataaagtaatagtagaagatgtttcatttgatatacatgtattaacaagtggttataaaccatataaatgggaatatcaaaacacttataggttagatgaaaatacaagaaaagcagtattaatgagagataagtttacgtgtcaaatgtgtggtgcagtagagacaagattagaagcacatcatataacaccaaaaagacaaaacggtgaaaatacattggataacttaataactttatgtagcaactgtcat

SEQ ID NO: 817 - DNA, 292 bp, unidentified
  misc_feature 1..292: note = Ga0123338_10037050 JGI
  source 1..292: mol_type = other DNA
tataaaaagttataagtaattgttagtggtttcaagtcagagtgagtgcagctacaggaaactgagacgcacaatgaactacgttagtgaaagaagttaaacacttacctttggatgtatccatcagtctgaagctctaagagtttttgaggaagaaagtaaacctaagtagccttgatacagaggttatatgaaaacctaaccccaatttaacatgaacttatcgttgacattgacaagaaggaaaatacttttaggaaggttggagaaatcctatgaaagaaaaccagag

SEQ ID NO: 818 - DNA, 798 bp, unidentified
  misc_feature 1..798: note = Ga0187784_10040265 JGI
  source 1..798: mol_type = other DNA
atggcctttgtgcttgaccggaaacaacgaccgctaatgccgtgcacagagaaacgggcacggctgctcctcgaacggggccgggcgcgcgtgcaccgcttgtatccgttcacgatccgcctccgcgaccgggtggtggaggacagcgcgctccagccactgacgctgaaacttgatccgggatccaagaccaccggcattgccgttgcgcgcgtggcagaggcacccgccggatacacgcacgagacagtgcatctcgccgaactggctcaccggagcgatcaggtctgtcgtcagatgcagcaacgcgcaaattaccgccgacgacgtcggacagccaacctccgttaccgagctccccggttccgcaatcggcgtcgagcggtagggtggctcggcccatgcctccggtcaagggttggcaacgtggtcaatgcagcgcggatgtacgcgcggctcgcacccatcacacgcgttgacttggaactggtcaagttcgatacacaaaagctccaggcttcagagacctccgggatcgcgtatcagcagggcacgcttgccggctatgaagtccgtgagtacttgttcgaaaagtgggggcggaagtgtgcgtactgcggtgccgaggacgtcccgctccaaatcgagcacattgtccccagaagccgacacggttcgaatcgcgtcggcaacctgacgttggcatgtcgactgtgtaacgaggccaaaggaaaccgcaccgccgcggaattcggtcacccggaggtccaggtccgggctgacctgcccctgcgaggc

SEQ ID NO: 819 - DNA, 304 bp, unidentified
  misc_feature 1..304: note = Ga0187784_10040265 JGI
  source 1..304: mol_type = other DNA
gtcatagaccccacggctgaagccggggggcttgctcgtcgagcctgtctatgaccaggtcaaggtcctgagcggccggacaccgcggtgacggacctacgttgcaggggaagccaaacgacccactccgggatgcttccccagtcccggactctggaagcgccggttgcagacaacctttggggtgtggacgaaacggatcggcgccgaaggcggccctgcaacattgccgaggggagcggctcgggcacgtccgcccaagcccgtcacgaggcccgtaagggcgcgtaaggaggtcaagatg

SEQ ID NO: 820 - DNA, 1008 bp, unidentified
  misc_feature 1..1008: note = Ga0373634_0000655 JGI
  source 1..1008: mol_type = other DNA
atgataccagtattagatataaataaaaaaccattcttgccctgctcagaaaaaagggcaagaatattaatgtcacgtaaagaagcgaagccttattggtataaaggattattttgtattattttacaaaaagagccttcttcaagaagctatcaaaagatatgtataggagttgatcctggatcaaagatgagtggttatacggtaaaatctgttaaacacacattaatgaatcttcaggtgaaagcgcctaatcatgttaaagcggcagtggaacaacggaaaataatgcgtcaagcacgacgaagtagaaatactccgtatagaaaatgcagatttaatagatctgtaggtaaaagaataccaccatcaacaaaaagtagatggttacaacatcttaatattattagattaacatcaaagatgtatccaataaaagaagttgtagttgaggacataaaagcaaagaccttagagggaaagcgtaaatataatgttaacttttcgccattagaagttggaaaaaactggttttataatcaagttaagttgacctatcctttaaaaacatatcaaggatatgacacatacaatgagcgtcaaagattaggattaaagaaaacatcaaagaagttagataaagtatttgaggcacatgcggtagatagttgggcattatgtaatttagtattaggtggtgataagttaccagagaacaaaaggttaacatatttagagccattagtattttccaggaggcagttacatgtattagtaccatcaaaaggaaatattcgtaaaaaatacggatcaacgatgagccttggaataaagaggggaacattagtgcaacataagaaatatggatattgtttagttggtgggactattaatagcaggctaagtttacataatacttttaattataaaagattaactcaaagcgcaaaattagaagatttaaaaataaaaacgcatttaaaatataaaatggtgtttttaagataa

SEQ ID NO: 821 - DNA, 237 bp, unidentified
  misc_feature 1..237: note = Ga0373634_0000655 JGI
  source 1..237: mol_type = other DNA
atataattatcaacagcctagcaataggtgctttatgaaaactttaaccaagactaagtaaagtaaatggagattagcttagacaagatcgcgctttgtgcggtcgcttgaagtcaactaagtcaataggtcgtggtagaccattatatattaaggatacctctctagtcctttttccctatattgacgagtagcgaagagaaattaaaacaaggtacgtaagtacaaaaaaataaa

SEQ ID NO: 822 - DNA, 1242 bp, unidentified
  source 1..1242: mol_type = other DNA; note = uncultured Bacteroidales bacterium
atggtttacgttcttgataaagaaggaaggccgattatgccgactgaacggcatggcaaggtaagaaggcttttgcgtgatggcaaggctagtgttgtcagactccagccatttaccattcggcttaattatgatagtgacacctataaacaggaggtatgccttggcatcaaccctggatccaagcatttcggagtgtcagcttcatcagaaaagaaggagctgttctctgcggaagtcgtgttaagagacgatatcgttgagaacatctctacccgaagggaactccgtcgtggaagaaggttccgcaagactcgctaccgtatgccgagattcaaaaatcgaggtaaaaatgagggatggttggctcccagtgatattaacaggatagatatgcacatgaagatgattcgtaatgtgcatgatatccttcctgtcagcaaaacaatcatcgagatttcgaattttgacatacagaaaatccacaatccttccataaaaggtattgagtatcagcaaggcccccagatgggattctggaatgtaagggaatacgtgctttggcgtgacaatcatgtatgccgcaactgttttggcaagtcccaggatcctgttctagaagttcaccatatcgaaagcccgaagacgggcggtgatgcgccggataatcttatgacgctgtgcaagacctgtcatcaggcataccatcaaggcaaaatagatttgaaaggcaagagaggtgcatctgatcgcaacgcatccgcagtaaataaaatgaagcaaaaccttattgacagagcaacgaaggagttctccaacgtcagctttacgtatggctatattactaagaatacgagaataagtaatggtattgcaaaaagtgatagttccgatgccttctgcatagccggttgcatttctgcaagcaggttgccttatctgtttaagtgtagatgtgtccgcagacataacagatcacttcatgtctgcaaccctaaaaaaggtggcaagagacgaagtaacctcgctccacactggattgtaggtacaaggctgcaaagattcgacatcgttaaatgggatggaacacgttgctttattttcggcagttcggctggaagactctatctgaaagacatagaaggttcgcgtgttagtcaatcagctacagtcagtgcaaaacaagtcagatttctatcaaggaaaaaaggtagcatgataatgcaaattgttccttgctga

SEQ ID NO: 823 - DNA, 278 bp, unidentified
  source 1..278: mol_type = other DNA; note = uncultured Bacteroidales bacterium
gttgacaccctcgcacgtggctgttgactcaagcgtgtacaaagaagcggactagcctcagtcccgggacaccccgggaactacgttgggggtgaatgtataggcactccgggatggtcgcccaagtcccggactctggttggccagtggttaaaaggagcgaaagctacggtgctgctggtatatgaaaccaccccgcaacattggcgatgggcgcataacaggcgcaagcctgtattacaacatagttgtttaattaataaataaagagaattatg

SEQ ID NO: 824 - DNA, 1272 bp, Fischerella sp.
  source 1..1272: mol_type = other DNA; strain = NIES-4106
atgtcaaactatgtctttttgattgaccaaaacaaaacaccactgaatcctatacatccggcacaggctagaaagttattagattcaggtaaagctgctttgtttcggcgctatccatgtactttaattttaaagcgagtgatagagaatcctaccgtatatccacttgcgctcaaaattgatccaggttcaaaatttactggaatagctctagtaactaaccaaggtaatgtcatctggggaatggagttaaaacaccgtggtcaacaaatcaaagacgctctagagcatcgtttagcggtgcgtagaggacgacggaaccgaaacacccgctacagaaaagcgcggtttcttaatcgtaaacgtccagaaggttggttagctccatcattgcgacaccgcgttctcacaactgagacttgggtcaagcgacttcataaatttgcaccaatcggtttgattactcaagagttagtgaagttcgatactcaagctattcagaatcctgagatatccagcactgagtaccaacaaggaacactacatggttatgagtgccgtgagtacttgctggagaagtggaatcgtcaatgtgcttattgtggagtgaaggatgttcctctagaaattgaacacatccaacctaaatcaaaaggtgggtctgaccggatatctaatctctgcttagcttgccacaagtgcaatcaacgcaaaggaaacaaagatattaaggacttcctcaaaggtaagtctgacatattgaatcgtgttctgaaacaagctaaaacaccgctcaaagatgcagcatcggttaattccactagatgggctttgttcaatattttgaagtctttcggcgtgagcgtcagcacaggtacaggtggtcaaaccaaattcaatcggattcggcttgaactgccaaaagctcactggattgatgctgcgtgtgtcggagcagtcgaaaccataaaacttgtcacgaccaagattcttctcgtgaaagcaactggttttggtagtaggcaacgataccagacagataagtttggctacccacaaaaacatcgtccactacgtccaatatttggattttgcacaggtgacattgttcgtgctgatgttccaaaaggtaagtatgccggaacatttaccgcacgtgtttgcccaatgtctcacggatacggcgagtttgttattgacaaaaaacggagatcaatcaaattggagtacttaacacctgttcaccggaaagatggatacgactatgcctag

SEQ ID NO: 825 - DNA, 278 bp, Fischerella sp.
  source 1..278: mol_type = other DNA; strain = NIES-4106
ccgaaaaacctatgcagaactagtcaaggctaggcatatctgtacaaagtcggggcgtgcagactaagacttttgttagcgcagcggcgcgatagcacggtctacgatttttgagtcatgacacctacaggtaaacgccagccagtagccctgtcggaagtggttaagtaatcggtaaacaggtttatagccgtagtgccacttccttaaaaagctcttaaatcattgtcgaggcaaactttacttagtaataaggatgacagaatatgtcaaactat

SEQ ID NO: 826 - DNA, 1134 bp, Synechococcus sp.
  source 1..1134: mol_type = other DNA; strain = PCC 7335
atgaacagtcgagttcctgtagtcgataataacgacaagccattaatgccgaccaaggcgagccgtgcgcgtcgaatggtgcgagacggtaaagcgataggtcaatggtcagatctaggtgtgtggtatatcaagctagttgcagaaccatcaggtgacgctactcagcctattgtggcgggtgtagatcctggtaaatcatattcaggcgttggtgttcagtcgggcaaacatacgctgtttagaggccatctggttctaccgtttaatcgtgttagagccagaatggatcagcgccgattgttgcgtagaggtcgtagaggacgacggatagatcgttctattccgtttgctcagcggtcgcaccgtcaaaagcgctttgacaatcggcgcggtaataaacttccgcctagcattagagctgctagacaacttgagttacgggtcattactgagctatcgaaactcttcccgattgttgccattggttatgagcgggtagcagctagaactaaaaaagggtgcaactttagtcctgtccaagtcggtcaagactgggctatcgaacaaatgagtaagttagcgcctgtttaccaaataaaaggatggcagaaagacggcaacggaacttctcaaatccgaaaatttctaggacttgagaaagataaaacaaacaaatcccacgcggaacctgagactcattctgttgacggcgttgctatagcatcaagttattttgtcaaattcaagtcatgtcatcggttcaaagaagatggtaaatcttgtttcggcagcgttggcataacgccatcagttttcaaaattatcactcggttcggcgcagtcaagcgaggtaagcaatacgggttttatcgtcgtcagctccattttgaggttccagccaaaggtgatgttcgcaaacgcaaaggcggtactgtcacaccttggctattcaggattggcgattttgtctcatctacaaaagggaaagcggctgtaactggctatatcggcggctacagcgaacccaataaagtcgtttctatctacgattggcagtggaagcgcatcgggcaatttttagttggcaaaacaaagttactaaggaggtctaacggattatgcgtagcgtag

SEQ ID NO: 827 - DNA, 238 bp, Synechococcus sp.
  source 1..238: mol_type = other DNA; strain = PCC 7335
ttcaatgatccccacctgtaacgaggtgggggagtggtcggagataacccgaccgtaactgcgaatagctcactgagctaattacggtaacactaccaaacacttctctagtttggtttatctgtagggtctggaatctcagacagtagagtaacgcctagaaacaccgtaattagtgggttaagagacgaaacgaaagtttcacaaacatttattggattatctctaatgaacagtc

SEQ ID NO: 828 - DNA, 2184 bp, Parasutterella excrementihominis
  variation 522..555: note = n represents any nucleotide
  variation 1346: note = n represents any nucleotide
  source 1..2184: mol_type = other DNA
atgccctgttcaccggcaaaagcgcgccttctgcttaaagagaagaaagctattgtggtaaggcgcacgcctttcactattcagctgacgattgcaacgggtgagtccaaacagccggtaagcctgggtgttgatgccgggtacaaacatgtcggcctttccgcatcaacggaaaaggctgagctttatgaatcagaagtcgaactccgtcaggacgtctctgatctgctctctgctcgtcgtgcgttacggcagtctcgccgtaaccgcaaaacgcgctaccgtgccccgaggttcgacaaccgcatccgcaccaagcgcaaagggtggcttgcaccatcagttgaaaaccgaatcaacgcgcacttgtcgcgcgtagaaacggttattcgactgctgccggtcacgaagatcaccgtggaaacgacctccttcgatatgcagctgctgaagaattcagacattgcagggaaagagtaccaagagggcgaacagctcggcttctggaacgtccgcgagtannnnnnnnnnnnnnnnnnnnnnnnnnnnnnnnnncgctaccgtgctccgaggttcgacaaccgcatccgcaccaagcgcaaagggtggcttgcaccatcagttgaaaaccgaatcaacgcgcacttgtcgcgcatagaaacggttattcgactgctgccggtcacgaagatcaccgtggaaacgacctccttcgatatgcagctgctgaagaattcagacattgcagggaaaaagtaccaagagggcgaacagctcggcttctggaacgtccgcgagtacgttcttttcagagacgggcacgtttgtcagcattgtcacggcagatcgaaagacccggtgcttaatgttcatcacttggagagcagacgtacgggcggtgattcgcccggcaacctgattacgctttgtgagacgtgccataaggcgcttcatcgcggtgaaatcacgctgaaggcaaagcgcggacaatcattccgtgcggagaccttcatgggaattatgcgccgggaggttttggaccgcctgaaggcgtcgcatccgaagctagaggtgcaaaacacctacggctaccggaccaagcatgcgcggatctcgaatggcattgccaaatcgcattgtgcggatgctttctgcatcgccggcaatcttggcgccaaaaggctaggcgaattcctattccagaagcagactcgccggaacaaccggcagattcacaaactctccatcctcaaaggcagcctgcgaaaacgcaaccaggcgccctttgaggtcaaaggcttccgtctttttgacaaggtagcctaccagggggaagaaggctttangaagatcaccgtggaaacgacctccttcgacatgcagctgctgaagaattcagacattgcagggaaagagtaccaagagggcgaacagctcggcttctggaacgtccgcgagtacgttcttttcagagacgggcacgtttgtcagcattgtcacggcagatcgaaagacccggtgcttaatgttcatcacttggagagcagacgtacgggcggtgattcgcccggcaacctgattacgctttgtgagacgtgccataaggcactccaccgcggtgaaatcacgctgaaggcaaagcgcggacaatcattccgtgcggagaccttcatgggaattatgcgctgggaggttttggaccgcctgaaggcgtcacattcaaagctagaggtgcaaaacacctacggctaccgcaccaagcacgcgcggatctcgaacggcattgccaaatcacattgtgcagacgctttctgcatcgccggaaatctcggcgccgaaaggctcggcgaattcttcttccagaagcagacgcgccggaacaaccggcagattcataagctttccatcctcaaaggcggcattcgaaagcgcaatcaggctccctatgagatcaaaggcttccgcctttttgacaaggttgcctgccagggagaagaaggcttcattttcggccgtcgatcatccgggtactttgatgttcgaaagcttaacggaacccacatttcagcaggcatcagctgcaagaagctgcgtctgctggaaaagagacaaacctatttaacagaaattcgaaaggagaaggcgcttcctcctctgcctgaaggcaggggtctccgcgcctaa

SEQ ID NO: 829 - DNA, 246 bp, Parasutterella excrementihominis
  source 1..246: mol_type = other DNA
gtcaactacctcggcctaaaggccgaggtttgaaaaagcctctagttgactagcctcagtctgctgttcggggactactttggtcgggaatgcacaggcaccgcgggatgcagatcctagtcccgcgctctgcggccgatggttaaaagctctgagaggtaggagcggtgctgtcggcttgaaaccccttccaacattggcgaaggatcacaaccggtcgaaagaccgaggagataaaacttgaaa

SEQ ID NO: 830 - DNA, 1812 bp, unidentified
  source 1..1812: mol_type = other DNA; note = Human gut metagenome
atggtgtatgtacaggacatagatggtaaaccgatgatgcctacgacaaggcatgggaaggttaggcgattgctaaaagacaacaaagcggtcgttgtgaacacatgtccttttaccatcaaattgatgtacaagacatcagattacaaacaagagattgtgttaggcgtcgactcgggaaccaagcatgttggtttgtcagctacgacgaaaagcaaggagctttacgcaagtgaggttattctaagaagtgatgttgttgatcttctatcaacaagaaggggattaaggaggactagaagaagcaggcttaggtatagaaagcaaagattcaataatagggtaaaatccaagaaggatggatggattgctccatctgtccgccataagattgattctcatgttagaattatcagttttgtatattctatactacctgtctcaaaattgattgttgaggtagcccaatttgatactcaaaagatcaagaatccagagatatcaggtaaagagtatcaggaaggtgagcaattaggattttggaatgttagggagtatgtcttagcaagagacgggcataaatgccagcattgtaagggtaagtcaaaagatcctatccttaatatccatcatattgagtcaaggaagataggaggagattcaccatccaatttaattactctttgtgagacttgtcataaggaatttcataaaggaaatatcaaattgaaagtaagcagaggcaagtcacttcgtgacgcagccgtcatgggaatcatgaaatggaagttgtacgaggagttaaaatccagatacgataacgtttcgatgacgttcggatacataacaaaatataatcgtataaaccatggaattgaaaaatcccatgtatccgacgcttttgtgatttcaaggaattttaattcatgtaggcttggatattattacaaacgtaaattagttcgtcgccataaccgtcagattcataagatgaaaatattgaaaggaggaattagaaagcgaaaccaggctccttttaaagtttttggatttaggttatttgataaagtgatgtttcaaggagaagagcattttatttacgcaagaaggctttctgggcaatttaatattcgggatattaatggagagaataagaaagatgtatcttgcaagaaattaaaatatgtcagccggggcggattaaagcttgaaaaggctgtagaggtatggaagcctgatatagaaggaagcgtatgtatagatgtcggcgcatccacaggaggttttaccgactgtatgcttcaaaacggcgcgaagaaagtgtatgcgatagacgtaggaactaatcagcttgcatacagcctccgtcaggatgaacgtgttgtatgcatggaaaaaaccaatatccgctatgttacagaggatgatatatctgagaaagcggactttgtaacaatagacgtcgcatttatttcactgaaaaaggtgcttgagccggtgtataagcttatgcacaaagaaagtacgatagtatgtctgataaaaccgcagtttgaagcaggccgtgaaaaagttggaaaaaaaggcgtagtcagggatcaaacggtgcatcttgaggttgtaaccgatattataaaatatgtcgatggacttggtttttacatacttggacttgaattttcacctgtaagaggaccggaaggaaatatagagtatcttatttatatgaagaaagacgatgaagctaatgataccggatactggcttgatacggcaagtgatgttgtaagcagagccaattctgcactttag

SEQ ID NO: 831 - DNA, 266 bp, unidentified
  source 1..266: mol_type = other DNA; note = Human gut metagenome
gttgaaattcatttaatattttatatatatctatataggatcaggttattagcctaagtcttgaaataaagactacgttattggagaatatatagttacctacggatgtttatccaagtccgtagctctaaggtaggtgattaaacagggattgtatttgggttccagtgttgcctatataaaaccttcaataacattggcgatgggtactaacagggttttgccctgacttatgttgaataaacattgaattagtttgtaaaatg

SEQ ID NO: 832 - DNA, 1320 bp, unidentified
  misc_feature 1..1320: note = Ga0307928_10013462 JGI
  source 1..1320: mol_type = other DNA
ttgaaaaacgtaaacagagtttttgttttaaatcatgacaagacacctcttagtccttgtcatcctgcaagagcaaggcaacttttgtttaaaggtaaagcagcaatttttagaaagtacccttttactattattttaaagaaccaaaaagttaatcctaagtttcaaaatactcaagttaaaatagatcctggaagtaagaccacagggttagctattactttaaaaggaaaaaataaaggatggatcttaatctgggctgctaatttggaacatagaggacaatatattaaaagacttttagaaaaaagaaaaaatgttagaagaagtagaagacatagaaagtgtagatatagaccctcaagatttttaaatagaacaaggaacgaagattggttagctccttctattttaagtaggattaataatgttattgtctgggtagaaaaacttcaggaattttgttacttaagatcttgtattatggaagtagcaagatttaatatgcaaaaaatgatgaatccagaaataagaggagtagagtaccaacaaggaactttacaaggatatgatgttagagaatacttattagagaaatatcacagaacttgtatttattgttctaagaaaaatgtacctttggaaatagaacatgtagttccaaagtctaaaggaggaagtaatagagtatctaatttaactttagcatgtaagatttgtaatcaaaggaaaggtaatcaaccaattgaatttttcttaaaaaggaagccagaacttcttagaaagataaaaagaagtttaaaagtatctttgaaagatgcagcagcagttaacattattagaaaaaggcttagaaaggaagttgattactgtattgaaactaaaacctcaacaggtagtataactaagtttaatagaacaaagcaatattacaagaaagatcattggatagatgcagcttgtgtgggaaaaagaagtggcagaaacgtaagtattccagataattttcaaccacttttaattaaagctatgggacgaggacgtagacaaatgtgtttggtagataaatatggatttccaagagctaaatctaaaagtagaaataaaattattaaaggttttcaaacaggagatattgtaaaagcaattgtaacagaaggtaagaaagttgggacttatgttggaagaatagcagttaggaacaagggtacttgtgatatatctaccaaagaaagtttaattcaaggcataagtttaagatattgtaaattgctacaaaaaattgatggatattcttataaacttttaactggaggttag

SEQ ID NO: 833 - DNA, 266 bp, unidentified
  misc_feature 1..266: note = Ga0307928_10013462 JGI
  source 1..266: mol_type = other DNA
gttaatcattacgtaccacagaattataattctgtgactgattaagtcgacgtaatcagactaagtacttagagtactacgttaaggaagaatatataggtactttggaatgcttctccagttccaaactctacgattaggttttaaacagagataaggtcactgtctcagtgaatctaatactaaaccttccattaacattgtcgaggagaacataacagattttatctagtaggaggaatcctaaattgaaaaacgtaaacaga

SEQ ID NO: 834 - DNA, 1329 bp, Lactobacillus harbinensis
  source 1..1329: mol_type = other DNA; strain = DSM 16991
gtggtgactgaggtggttcaaaatagaatatttgtcctcaatcaggatgggcaagcattgatgccctgtcgtccgtcaaagtgtcggcatctgcttcattgtaatcgtgctatcatagtcagccatactccgttcaccatccagttaaagtatcagtcggggtcttgcttacaggacgtgtcaattggtgttgattcaggtcagcgacatattggacttgcagtaacgagcaacgaaaaagtgctttggcaaggagaagtgactctgcgacaaaatgtaaaaagccttttagatacacgtcacatgtatcgacacacacgtcgacagcgacacacacgatatcgaatggtacgcttctcgaaccgaaagcctagagatatccgcttgggcgtgtggttaccaccatccgttcgacaaaaatgcgagcacaatatccaatggattaatcgagtgcgtaatgttttgccacaagctgatatatctattgaagtggccaaatttgacgtacaaaagttgaaggatccgaccattcacggtatcgggtatcaacaaggcgacgcctttggttatgaaaatgtgaaacaatatgttctagaacgtgatgaacatacctgccaattgtgtaaacgcaaaattgataccgagacgaagaaaacattgaagttgcacattcaccacatcgtttacaggagtaaaggcggtactaacgcagccacgaatctgctgacggtatgtactaagtgtcacacagatcgaaaccatagagccggcggccctctttatgcgttatttgagcaaaaaaagacaataccaccgcttaaaaatgccacatttatgaatatgttgcgtaatcgattgcttaccgcttttcctgaggcgcatttcacctatggctacatcacaacggttcagcgaaaaaagttgggtttggcaaaagcacattatcgcgatgctgtagcaatcagtggaattcaacaaattattgaagagccaaaatcagttgtgatgtttgatcagtttcggacgaaaaaacgatcattgcatgaagcaacggcacgcagggggcgaaagcaaaagaatgttactcaaaaacgagtgaaaaagaatacgaagaaagtaaaaggttggtgcttgaacgattatgttcgaatcagtgatggacgttgcgggttcatcaccgggtttagtggtctctggatggctcatattagggatcgtcagggtggtttggttaaaaagctcgtgagtctgactaagcttgcctttcttcatcacacaggaacttggaggtgtacaactttaccaacagatgtctatgacatgcaataa

SEQ ID NO: 835 - DNA, 341 bp, Lactobacillus harbinensis
  source 1..341: mol_type = other DNA; strain = DSM 16991
gtcagttacccacggcgaaagccgagagcaaatatgttcttaactgactagcctctgtctagcaatctaacattaccagactacgttaagtaggtgcacaccttcagatggtgccctagtctgtcgcactgtgagggcaacgtaaacagcggtgagggtgtagccgcagtcgaccctgacatcatccagtgccgtctccacaggcacggaccctatttaacattggcgaagggcaatccacacatgttagtctcattgctgcatgtgatcagccccttacttgaaggttggctgataaataaaaaaacaaaggggtggtgactgaggtggttcaaaataga

SEQ ID NO: 836 - DNA, 1266 bp, unidentified
  source 1..1266: mol_type = other DNA; note = Human gut metagenome
atgcgcggtcagcccttgatgccgtgctcgcctgcaaaggcgaggcatctgctcaaggcaggcaaggccgcggtgagacgacgaacgccgttcacgattcaacttcgaatcgccaccggtgaaacgaagcagagcgtgacactgggcgttgacgccggcgcaaagcatgtcggcctttccgctgcgacggaaaaggaagaggtctttgcgtccgaagtcgaacttcgacaggacatcacggggcttctggctgctcggctctcactgcgtcgtgatcgacgtcatcgcaagacgcgctaccgtgcgccgcgctttttgaaccgtgtccgatcgaaacacaagggctggcttgcaccgtccgttgaaaaccgcattcaggcgcacatgtcgcgcattgatgcgatctgcggactgctgcctgtcaccaagatcgtgatcgagacggcatccttcgacattcagaagatcaagcatccggatgtcgagggcacggactatcagcagggcgatcagctcggcttttggaacgtgcgtgaatacgttctctttagagacggtcacgtttgccaacactgtcacggttattcgaaggacaagatcctcaacgtgcaccacctcgaaagccgccaaaccggcggcgatgcgcccaacaacctgattacgctctgcgagacctgccacaaggcctgtcacgcagggaagatcaagttgaaggtcaagcgcggtcaatcgttcagggcggaagccttcatgggcatcatgcgttggacattgctcgatcgcatgcgcaaggcgcattctggtttgcctgttgagaacacctacggctatctgacgaagaacacgcgcatcactctgggactccccaagacgcattgcgtcgatgcatactgcatcgcggggaacctcaaggccgtacgaagaggcgtctgcctccatcagcgacaggtgcgcaagcacaaccgtcagattcacaagtgtacggtgctctcgaagacgcttaaggacggcacgaagatcggataccgaaagctcaatcaaacaccgcatctggtcaagaacttcaggctcttcgacaaggtgagatgtcttgggcaaaccggcttcatcttcgggcgaagatcgtccggctacttcgatgtccggaggctggacggcgtaaagctttcttccggcatcagctacaggaagctcacgcttctcgaaaagagaagcacctatttaaccgaacttagaaaggaggacggcgcttcctcccctgtctga

SEQ ID NO: 837 - DNA, 277 bp, unidentified
  source 1..277: mol_type = other DNA; note = Human gut metagenome
gtcaataacccctgtctgaagacagaggcttgaaagagcctttattgactagcctcagcgcccctctttcgagaggcgctacgttggttgggaatgtataggcaccgtgggatgtacatcctagttccacgctctgcggcctgtgattaaaagctccgagaggtaggagcggtgttgcaggcaccaaaccccttccaacattggcgaaggatgtcaacccggccttcgggccgtgtaggcggaacctgcgggtatccgcaaaggagatgctttgaaa

SEQ ID NO: 838 - DNA, 525 bp, unidentified
  misc_feature 1..525: note = SAR324 cluster bacterium isolate NORP136 Contig_source1382A_8018, whole genome shotgun sequence WGS
  source 1..525: mol_type = other DNA
ctggtaacattagcgaggcacacattacccggcttgccgggattctcttcaaggagaaaagatgcaacgagtattcgtgctcgatacaaagaagaaacctttaaccccttgccgacccaagagagcaaaacaattgctaaaacaaggtatagaaagccccgcttccttaatagaacactgcctcaaggctggctagctccatccctgctcagtagggttttcaacatagaaacatgggttgaaaagttatgttgttttgctccagtcaaagcgatatctcaagagttggtacgcttcgacatgcaacagatggagaacccggaaatttccggtaaggaataccagcaaggcactttagctggatacgagacaaagcaatatctcttggagaaatggaatcgtacttgtgtctattgtggagcgcaaaatgtacccttggaaatcgagcatatcattccaaaaagtaaaggtggatccaatagggttagtaacttaactcttgcctgtgtgtcttgtaatcaaaag

SEQ ID NO: 839 - DNA, 246 bp, unidentified
  misc_feature 1..246: note = SAR324 cluster bacterium isolate NORP136 Contig_source1382A_8018, whole genome shotgun sequence WGS
  source 1..246: mol_type = other DNA
gtcaactacccctccctaaagggaggagcttgaatagctcatgttgaccagcttaagtttttcgaaaactacgttaccttggtgatcttaccctggagtgcttgccagctccaggctctaaggttggatgttaaacagactgagggtataggtcagtgcattcagtgtaaaaagccctggtaacattagcgaggcacacattacccggcttgccgggattctcttcaaggagaaaagatgcaacga

SEQ ID NO: 840 - DNA, 1074 bp, unidentified
  misc_feature 1..1074: note = Ga0395987_006804 JGI
  source 1..1074: mol_type = other DNA
atgttacgagtacctgtggtttcaaaagacggcaaacccatcagccctacaattccatccaaagcaagaaagatgatcagagatggcgtggctacgccgaagcgcgacaagctgggcaacttctacatccaaatgaacatccctgtcggcgagaagattccccacgaaaccatcgccggcatcgaccccggaaaactctactccggcattgccgtccagaccccgaaagcaactctctggatcggacatctggtacttcccttccctgaagtcaagaagtccatgaaaaaccgaaagcagcttcgccgtgcaaggcgctaccgcaaaactccccaaagagagtgccgcttcctgcaccgcaccggccacaagatcccgcccagcattcgatctaaccgggaaatggaataccgggtgctgaccgagcttcgtaaaatctacccgattgacgaagtagtctacgaagtcgtcaaggccaacggttccaaatccttctccccggtgatggtgggccagaagtggcagatcaaccgtatctctaagatcctgccggtaactattcgtgagggttgggagacatcaacgatgcgaaaacatctcggccttgagaaaagtagaaagaagtccgaagcatcgccccagacccacgccgttgatggcgttgcgctggcagccaccaacctgttgagttacgagtcatttgtcaaagccaacgaacacggccatctctggtcaggcgaatgcactgtgaccgatgccccattctccatcatccaaagaccactgctctttcgccgcagtctccacgtgcagaacttcgccaagggcggcgttcgtaagcgtcacggtggaacaacgacaccctacggcttcagaaaaggcgactacgtggaagcagaaaaggccggcaggattgtccggggctatatttccggctacagcgaagccaaaggcgtgttaagtattgctgatcatcaatggagaagaatcgggcaattcactccatcaaaggtgcagctgttgcagagatcgtgtcatttacttgtagaacacaaaaattgcgtcagcatctga

SEQ ID NO: 841 - DNA, 270 bp, unidentified
  misc_feature 1..270: note = Ga0395987_006804 JGI
  source 1..270: mol_type = other DNA
gtcaactacccccgcttagcccatccggggcttgaagcgggggcttgcagggtgcagtcccgcatcgtaagagctgactaggccacgagaaattcgtagcggcatctgcggaccaacccagtagggcgtttttcctaactctattttcggatgggacgagactcacccgccaggcaagcagcaatgcttgcgacacagccgcagattgcaaggtcgaaggaacgtcgtaaggcaaatactccacaaggagggggcttatcccaatgttac

SEQ ID NO: 842 - DNA, 1344 bp, unidentified
  misc_feature 1..1344: note = GENOME_ACESSION: mgm4743561.3 MG-RAST
  variation 1167..1320: note = n represents any nucleotide
  source 1..1344: mol_type = other DNA
atgagagtattagtggttggcgcaaacggcatcggcttgatgccgacaacgccaaggaaagcgcgggttcttctgaaatgccacaaggcagttgtatgtcagaagaaaccgtttaccatccgtctgaactataagacgggttgtgcgacgcagcactgcgagcttggcatagacacaggtacccagcatatcggggccggtgtcatggtcgggccggatgtgctccgaaaggatgaatgggtgcttcgttccacaatgacaaaacggtctctgatagaaacttgtaagtcaatgcggagaggcaggcggtatagaaataccggctaccgtcatccgaaattccgtccgcataccaagaggacatactcggagaaaccggtgcttcggcacaagcataaaacacactggatcgttaagacaaacagttttaccacaaaccgggaagcagggtggctgccgccttcggtgcagtcgaaggttgaccaccatatccgcaccatcgaaaaatacctgaaagctctgcctctggacacgcatatgacgctagaacttggacgttttgatatgcagaagatcaaaaatcccgatatcgagggaatccagtaccagcagggacggctctaccagtatgaaaatattaaggggtatgtccttgcacgccagcattacaaatgtgcgatttgcgggaagaagtttggctcaaaacggaaggacggttccatcgtcaagatgaaaatgcatcatatgcattatgtctcaaaaggggccacgaacaatcctgatgagtatcttggagtttgtgaccagtgccatacgccggaagcgcatgataccggggcattggaaaaactccgcaggaaggtaagggaccaggccaggggcatgcgcgacatgacaatgatgaacattgtcaccgcccgtctcaaaaaggctttcccgaaaagcgacaaggtctcctacacctacgggaacatcaccaatgcggaccgtaaacagatgagacttccaaaagctcatgcgtatgacgcagttgcaatcgccaaacacgcagccatcgtgcatgataatgattacacagtgcatgacgacgaaggggaaaccatgtatgtgcagcaccggaaaaagaaacggtccctgcatgaggcaaacccgcggaagggcagaaannnnnnnnnnnnnnnnnnnnnnnnnnnnnnnnnnnnnnnnnnnnnnnnnnnnnnnnnnnnnnnnnnnnnnnnnnnnnnnnnnnnnnnnnnnnnnnnnnnnnnnnnnnnnnnnnnnnnnnnnnnnnnnnnnnnnnnnnnnnnnnnnnnnnnnnnntaccaatacgtcgtgccgtgttga

SEQ ID NO: 843 - DNA, 322 bp, unidentified
  misc_feature 1..322: note = GENOME_ACESSION: mgm4743561.3 MG-RAST
  source 1..322: mol_type = other DNA
ttgaatagccgagcatggtcgtaagactgtgcaaagctgtttggtgacagtatccttcgggatacagatgactagctgaagccggacacattgcagaccggctagattccaatcgtaacgacatgaatgcatgatgccctagtgcagtaatgtccgggcaacatatggaggtgtgagaagccgagaatgacccgatgtttcaagcggctgggattgcagcgaagggcaactcgcgagtacccgcaatgggggaaaacaggcgacgtggagacacggacaggccggtatcgtgcctgtcattatcggaaaggaactgatgaga

SEQ ID NO: 844 - DNA, 1383 bp, unidentified
  misc_feature 1..1383: note = Ga0172381_10008462 JGI
  source 1..1383: mol_type = other DNA
atgtacgtaccagtggtagaccaaaatcaaaaaccgttaatgccaacgattccaagtcgggcaaggaagtggattaaaagtggcaaggctactccgttttggaagaaaggtgtattttctgtgagattaaatgtggaaccaagtgattctaaaatacaagagattgcagttggtgttgaccctggttctaaaaaagaaggatttacggttaaatcagaactacatacttacttaaatattcagacagatgcagtaacttgggttaaggacgctgtaaaaactcgtagccagatgcgtagaactcgtaggggccggaattgtccacatagactttgtagaccgaatcggaatatttataaagtttttatgccaccatctacaaaagcacgttggcaatggaagttacgaatcctaaattggttaaagaaaatatacccgataacttgcgttgtggttgaagatattaaggcgtggacttataaaaatgctcgtaaatggaatgtcagattttcaccattagaagttagtaaacagtggttttacgatcaaattaatgtgcaatttaaacttgaaactaaacaaggatacgagacaaaacaaatgcgtgatgagtttggtttgaagaagtctagtaataaattatctaacaaatttaatgcacactgcgtggatagttgggtgttagcgaattggtttgtgggtggtcatacaaatgttgataacaaagacatgctcttaatcacaccaattcaattccatcgtaggatgttacacgcattgcaaccggttaaaggcaatatccgtagaccttatggtggaacacgaagtttaagttttaaacgtggtagtctggttgaacatattaagtacggattgtgttttgtgggtggatttggttctattcgattgtggttggtattcggaggaattactatgagtactaacctaatctttattgatgtggcggggggcatttgtcagttagttattggtcaaaattatcgcaatttgtaccaacaaccacagaccaaagaatctacaaatcaatgcagacattttgcggcacctccttctaaaaatcgctttttaccgtttataaaaagcattctcctcgaagtcggttattttgtcccccgccacttctcaattataaaccatcctgtgtattgttttgtgcaaaagtcattatctattgtatcatctaagcttttactgcataatccccttatagaaaaaataagggggattaagtcatgcgccttttacggtctatcgggttattatttttacttgtttttgccactaatgcgttatacgttcaaggttcgtatctactccataatcacactcaagggatgtggaacgctgtgtgggatatgttaa

SEQ ID NO: 845 - DNA, 226 bp, unidentified
  misc_feature 1..226: note = Ga0172381_10008462 JGI
  source 1..226: mol_type = other DNA
gtcaattaccgtcgcctaaaggcggacggcttgaaagtgagacagaagccaactgttaaattttcaacgtaagaattagactagacaaacccaaagtggagactgaactaactgatcgtggtagatcgaactacgctacggatgccaccctagtctgtagtctctaggttagtcagaatgtcaaagggttgtagaaactcgcaaagaggtttaaaacaaaatgtac

SEQ ID NO: 846 - DNA, 1275 bp, unidentified
  misc_feature 1..1275: note = Ga0268280_1002972 JGI
  source 1..1275: mol_type = other DNA
ttgattaaagtttttctgcttgacaaatccttaaaagcgcaggatccggttcacccggcggtagcccgtatccttctcagcgagcgcaaagcacgaatacatcgtgctcagccgttctgcatccgcctccgcgtgtcttctaacaaagccacgcatggtcttcaactcaaattagaccctgggtcaaagacgacaggcatagccttggtaaatcatcaaagcggcgaagtcgtgtggggagcagagctgacgcatcatggacagctgataaagaagaaattggagaagcgcttagcacaacgccgtgctcgtagatcacgtaagacacgctatcgccctgcaaggttcttaaacagaactaagccaaaaggctggcttccaccttcgctagaacaccgcttaggtaacgttatgacttttgtgcatcgcttgcgtaagcttgctaacattactggaatctcgctagagcttgttaagtttgatacgcaggctatgcaaaatcctgaaatctctggtattttatatcagcaaggtgagctagcaggttatgaaatgcgtgagtatcttcttgaaaaatttaatcgcacttgcgtgtattgcggagctaaaaatgtaccgttgcaagtggaacatgttgttccaaaggctttaggtggttcaagtcgcattagcaatctaacacttgcgtgcgatgcttgcaacaaagctaaaggtgctttgctcatcgaagaatacttgaaaggcaagccagcgctactcaagaaaattaaagcgcagctgaaagcgccacttaaggacgctgctgctgtgaatgcaacacgctgggaactttggagacgcctgtcggctttaggcttaccagtggaatgtggctcaggcgctttaacaaaatttaatagaaccaagcagggcctacctaaagctcattggttagatgctgcttgcataggtaataacacacccgctttgaagttaattaaagtggagccactttatataaagtcttacggacgcggttccaggcaaatttggcaaatggatgcttctggttttcccaaacgttcacgaactaaagaaaagacaaagtttggttttcgtactggcgattgggtaaaagcaatagttcctaaaggtaagcatatgggggtacatattggaagagtaggaactagaagtaaacccagctttgctgtaggtaaagtagatggaattaatttaaattgtattttacttatgcagcgtaatgatggttacgaatatagttatgggacgtag

SEQ ID NO: 847 - DNA, 282 bp, unidentified
  misc_feature 1..282: note = Ga0268280_1002972 JGI
  source 1..282: mol_type = other DNA
atcttcaaagactgatacttaacaaaactgtcgaggttgtaaccttctgttaagtatatacttaacatgggttacccgactcagtgtttgcagtttaagcaaacactacgttatttcggttatgacaccatgggatgcttcaccagttccatgcaactgtcgcctgcggttaaacagggtaattccagtgctgcaggcttaacaagccattataacattgtctaggtgacgtgggcttaggcctatatacccgctaatcacggagagtattttgattaaagt

SEQ ID NO: 848 - DNA, 1362 bp, Lactobacillus salivarius
  source 1..1362: mol_type = other DNA
atgatgtcagaaaagaaaaaagttgattatatctatgtagtagactccaacgacacaccactcatgcctacttcacgtttaggtatggtgcgtcgttggttgaagacaggacaggcaagatggtacggaaatagtcgcaagactatccaatttgttagacctgttactactaatactcaaaaactaacactaggagtagatgctggttttcacttaggtttatcagttgtaggtaatcagcgtgaatattatgcagctgaaagtctaagaaaatcagaaaaagatcgaattactagtcgaagagaattaagacgtactcgaagaggacgtttaagacatcgtaaggctagatttaataatcgtagacgcaaagacggttggctagttcctagtattcaacacagactagattttacgattaaagaaatcaaacgcttatatacgtttttacccattactaatttagtcgttgaagttacaccgttcgacaaccaaaaactactaaatccagatattaaaccttggcaatatactcaaggcaagatgcacggttttaagacgattaaagattatcttctagctagggataattatcgtgatgctttagatggaaaacaatatccagctagccaattaagagttcatcacttagttcaaagaaaagatggtggctctaataaaccagataatttggttttgttatcagatgtaaatcacaatcaagctaaccataataacggtatcttagctaagttgaaagaaaatcgtcaaaagaccattgattatcgtggagcttattttatgagtgttttggcaacaagattaagcgattattttgaacattatacaacaactcaaggttatctaaccgctaacttaagacaaaagtataagattgaaaaatctcacttaaatgacgcttttgtgattgctggcggaactgatgtaacgcttagaatgaacaacgtttactcaaggcaaaaactaagaaacaacaaccgaagtttacagaagttctatgatgctaaatatgttgatagccgagatggtaagaaaaagactggtaaagaattaagttcaggtagaattaaacgttccaaagagcttaattatgataatttaagacagtttagaaaagaaaaagttaaaaaaggtcgtgtttcgattagacgaaatcactaccagttaagaccacatgatgttgtgctaaatacaaagactaataagattgaaagagtcgctagtgttcaaaacaatggaaaagtagttagatttcaaactggtaagacttgttcaattaaaagtgtagttagtttatatcatgtgaatggaatattagaaaagaaaatggaaaatatttag

SEQ ID NO: 849 - DNA, 295 bp, Lactobacillus salivarius
  source 1..295: mol_type = other DNA
acaagttaacagaaccgccgactaaagtaggtgacttgtagaaatacaagctggttgattagcctaagttttaagtaactacgttagggttgaatagataggtactttggaatgccaccctagttctaaacactatggttaattattaaacagagctgaggttcaggctcagtgtgattaacattaaaccaacctataacattggcgaagggtacacacgtgccaactttatgttaggtgcgaattatgattgaaaggagctggcatgatgtcagaaaagaaaaaagttgattat

SEQ ID NO: 850 - DNA, 1467 bp, unidentified
  misc_feature 1..1467: note = Ga0233437_1033046 JGI
  source 1..1467: mol_type = other DNA
atgttagtgtttgtgatggacaagaatggtcgaatgggacatccgactagtaagtgtgggatgattcgacggaaattaaaacaagggaaagcgaagattgtacatcgctttcaagacacgattgttgttaagatctttgatctagttattgatgaagataagacagtcgattgtaaatttattctagggattgatcctggatattcgaacattggttactatgtgatcaaagttgctgatggtaaagtgtatgacattctttctggagaattgaaaacgagaacagagaagatcaagggtttgttattagacaggaaaatgtatcgaaatggtcgtcggagacatcgtcgaaaacgtgtccaacgattacatgggtcagtaaagtttcgacacccaagatggaagaacaggaagaaacatcagtttcaaccaactcatatacatcttattcagacgcatttgaatttgattaagaagatacattcgattgtgaatttcgatgaaattaatatcgagtacttcaagtatgattcacaaaaggcactgaatccagatattaaaggcgttcaataccaaagaggtatacagtatggtttcgctaatactagtgcatatgtattagatagagatggttataagtgtcaatcatgtggcgaaacagatattagtttgaaagctcatcatattgtcgagagaactgataatggttctgatcgtccagaaaatcttgtaactgtttgttataagtgtcaccatgagattcatactggtagaagaaagtgtcctgtgggtctaataggtaatagcactcaatttcgagattcaggtgtattgaattcgtgcatgccagcattattccgattgttacaagatagtaaatttatggtaagaaagactttcggtagtgctactaaagtgattcgagagtatcttgatattcctaagacacatcgaacagatgctttctgtattgctatcgaacaactgagtgaagatattaaatttgatgactctacaggtaatgttgttaattatcaacaattccggagacacaatcgaaagtttgtaaatcgatttgaagatcgtaagtattatattagtgggattcgaactgttcaagcaaggaatcggaagagacgaagtggtcaagataagaaagatgatctatcattagaagatttccgtcagacaacatttaatgggtacgagaatttaatcgctaaagctggtggagtaattatgaataatcctcatacttatgttccagacaaacgatccggaatgaaatttcgtgtaggtaatcaatataagttcaagaaaaaaattcgaacaattattagtactagtaatatccagcaacgggtgttctatgaaaagattgagaaaacacgtttatttgatacgtttacacaaattcgaaagcatggagaacatcttttgtgtaattcgggaatcgttcccgtttga

SEQ ID NO: 851 - DNA, 286 bp, unidentified
  misc_feature 1..286: note = Ga0233437_1033046 JGI
  source 1..286: mol_type = other DNA
gtataatcatgcaagtaaaaccgtgtggatttcgaatagcgaagcattataaatatagattagtcaactactgggagcatagtactcaggattgacacagacaatgaactagagttcaccggtgagtgccactcccagcttgctgtaagtattattttaaaaactggaggtttgaatcctcattgtacgaaagtaggtaacgaaatcgtatattactctagctcagtcgagggagactggtttcgactaactttaagttaactcgatcaaggagtttcaaatgtta

SEQ ID NO: 852 - DNA, 1275 bp, unidentified
  source 1..1275: mol_type = other DNA
atgtctaactatgtttttgttcttgataccctcaaaaaacctttaactccctgtaagccatcaatagcacgaaagttgttaaatgctggcaaggcggctgtgtttcaatggtatccatttaccatcattttaaaaaaggaggttgatgccaatcctgaaccactggaactgaaactagatcccggttctaaagtgacaggaattgcactaaaacaaggcaacaaaattatttttgctgccgagttgattcatcgaggatacgcgattaaatctcgtcttgattcccgtcgcgctattcgacgttctcgacgaaaccgaaaaactcggtatcgtcaagctagatttcttaatcgcactcgttcaaagggctggttaactccctccctacaacatcgagtagaaacgacgatgacttgggtgaatcgcgttcgtcaacttgcacccattggatctgtgtctcaagaattggtgagatttgatctgcaaaagatggagaatcctgaaatttcagggattgaatatcagcaaggggaattacaaggttacgagattcgagaatatctacttaataaatgggagagaaaatgtgcttattgtcgggcagaaaatgtgccgttacaagtggaacatattaaacccaaagctaaaggtggaactaatcgaatttccaatctttgtctttcttgtgatatgtgttaccagaaaaaggggactcaagatattgggcaattcttagcgaaaaagccagaagttcttcaacgaattttgtctcaagctaaaagacctcttaaggatgcggccgcggttaattcaactcggtgggcgctgtttaatcgactccaagaaacaggtttacctgtctcaacgggttcaggtggattaactaaatttaatcgagtgcgattaggtttacccaaatcacattggttagatgccgcgtgcgtgggaaaagttgattcactagagattctgacaactcaaccattatgtatcaccgcgaaaggatggggatgtcgccaaatggttcaaaatgacaaatatggttttcctcgaaagaattatcgggctaaacaaaaagtgaaagaatggaaaacgggtgatatcgtttctgtaatcaaaggaaaatgggcaccaataacaggaaaacggatcaaaacggttcgatttcagggtaattttgatgtccgattagatcgctcaaccgtgatctgtgtatctcgaaatcacctcaaggctattcatcgccttgatggatacgattatacctttgtctaa

SEQ ID NO: 853 - DNA, 294 bp, unidentified
  misc_feature 1..294: note = Ga0209175_10000039 JGI
  source 1..294: mol_type = other DNA
acgcgtcgatctgtccagattcctgacaagcaattaaaatagggacttactgaaaccctagacaattcgggacaatccatgaattctaagtaagtccaggctcaggatcagaccaccgttatcgggaagcgttaaagttcctaccttgggatgcttgccagtcccaagccccttaaccgaacagttaaacaagcaagggtttattcaaagctagtgctgtttggatagtaccgactgataacttagccgaggcacacattactgaaaaggtcagacacaaccatgtctaactat

SEQ ID NO: 854 - DNA, 1557 bp, unidentified
  misc_feature 1..1557: note = Ga0306922_10010477 JGI
  source 1..1557: mol_type = other DNA
atgcttcctcagtcccaggctcttcgagttgccgctgcagacaagccagggtcagcgcgaaacgggcgacaacagacggcttgcgctcaacctgttcgaggggaaaagaaaccggcgcctcaaaacgccgagcgcggggtaacccgcacgtttgtattatccaacgcagggcatcccttgatgccgtgctccaatgccagggcgaggattctgattcggaaaggccgagccagggtttaccggcttttcccgttcacgattcagttgatcgacagggcatcaggcgacattcaacccgtcgctataaagcttgaccccggagcaaatacgactggtgtggccattgtacgcaaggacccaaacgattcgaccagacaaagcgtactacacctcgcggaaataacccaccgtggtaacgcgatccgcaaacacatgatcaaaagggcgatgttcaggcgtcgccggagaaatgctaatcttcgatatcgcgcaccgaggtttgataaccgaaccaagcgcgaagactggctgccgccgtcacttcaaagccgtgtcgacaatgtggcctcctggctcaaccggtacaggaaactcgcgcccatcacatcaatctacgttgagtcggtcaggttcgacatacaggccttggaaaacccctgcatcgaaggcttggaataccagcgtgggatgttgttcggagcggaactctgggaatacctgtttgagaaatgggggcgaaggtgcgcgtactgcgacgccgaaggcctggcgctggaggcggaacacatcgtgcccagggtttgcggcggatcgaatagggtcagcaacctgacgcttgcctgccgcaagtgcaaccaacagaaagggtcgcagtcgattcatgtgtttttagcagatgacccctcaagactggcgcgcatcttgagttacaccaaaaaaccgttatcgagcgccgcagcggtaaacgttacccgaaaatccattaaccgggtactgtacgggactggcctggaggttcagtgctcatcgggcggccgaacgaagttcaatcgcacccggcttggcattccaaagacccatgcgcttgacgccgcttgcgtcggggaactgtcaaaacttgagggttggaacgttcccattctctcgatcaaagccaccggacgcggaagctaccagcggactcgtcttgacagttttgggtttccacgaggctatctgacgcgccagaaggctgtgaagggttttcaaacgggtgacttggtaaaggcgacaatcccaaaaggaaaattcaacggcacacaccaaggccggctagcgataagggccagcggttattttgtaatccagagctcagcggggaacgtcggaaccaactggaaatactgcaaacatctcatgcgaaacgacggttacacctacgaaatcaaaccatctccggccacccaaactcttcctagactcgaaacattccagttattgagtcgaaaaacccgtaaacaagaacacgcacacaactcagtaaataacaaaaacaacaacacgttatggcaaatctga

SEQ ID NO: 855 - DNA, 257 bp, unidentified
  misc_feature 1..257: note = Ga0306922_10010477 JGI
  source 1..257: mol_type = other DNA
gtcaacgaccgcccgctaaaagcaggcggcttgtgagctaatcgcaagcccatggttgaccagaacaagtgaaaactacgttgaacgacaagcaaaagactaaccctgggatgcttcctcagtcccaggctcttcgagttgccgctgcagacaagccagggtcagcgcgaaacgggcgacaacagacggcttgcgctcaacctgttcgaggggaaaagaaaccggcgcctcaaaacgccgagcgcggggtaacccgc

SEQ ID NO: 856 - DNA, 1077 bp, unidentified
  misc_feature 1..1077: note = Ga0393278_0001403 JGI
  source 1..1077: mol_type = other DNA
atggttccagtattagacatgaagaaaattccgttaatgccttgtacagaaaaacgtgctaggaaacttatggagaagggagatgcaaaagcatattggaaaagtggcgtattttgtattattttacaaagagagccttcggcaagaaactatcaggaagttgtgattggaattgatccaggttcaaaaagaactgggatcaccactgcaacagaaaagaaagttatctgtaatcaactttttgatactccaagcggagtaaagaagaatgttgagacaagaagaatgtttagaagacacagacgttccagaaaaactccttataggaaatgtagaaacaatagaaggataggtggcgtgccaccatcaacaaaggcaagatggggagcccatcttaaaataatagatttttggaaaaaacttattcctctcactgttgtttctttggaggatattaaagcagaaactaaaataaattgtaggaagtggaataagaattttagtccattggaagttggaaagaaatggtttgagaatgaggttgtagttcgtggatataatttctataaatttccaggatttgaaacaaaagcacaaagagtttatagagaatttcataagacatcttcaaaactaagagatacttgggatgcccataatgttgattcacattgcctttgcgaattaacagtaggagatattaaaccatattatggaattcttaaatgtgaatttttcaaatggagtagaagacaaattcatgtttttaatcctgaaaaatataaagagcaagaaggcattcctaatcttaaaaaagatgggattagaaaacaatatggaacaacaagatctctaggactaaacagaggaacattggttaaacataaaaaattaggtttaacatatgttggaggaacatcaaatgagaaaatttctttacatgatgtgaaaactggaaaaagattaactcaacatgctaacaaagaagattgtaaagttttaactaatttaagatggaggacgcaaattcctcccatggctaaagccatgggtttcctttgcgtaaaaccaaaatga

SEQ ID NO: 857 - DNA, 238 bp, unidentified
  misc_feature 1..238: note = Ga0393278_0001403 JGI
  source 1..238: mol_type = other DNA
gtcaataacccaaggctttagccttgggcttgtgaggaaaatcattcaccagaactaattcacaagggcaagaagagactagattagccaagggggaacaaaacccgataaaggcaactagggagatggtcatggtagacaacatagtatcttcaggatgttcagctagtcttgatgctctacttctcccagtatcgaagctgtagtttactaagaaggagtaatccaaatggttcca

SEQ ID NO: 858 - DNA, 1095 bp, unidentified
  misc_feature 1..1095: note = Ga0272428_1004076 JGI
  source 1..1095: mol_type = other DNA
atgcgaattccagttgttgattcaaatcaaaaacaacttatgcccaccacaccagcaagagcgcgaaagtggattcaatctggcaaggcagttaaacgctggtcagattgtgggcagttttacgtgcaactcactgtagaaccatctggacgcgatactcaggatattgttatcggggttgaccctggcaagaagtattcagggattggcgttcagtctgtaagattcacgttgtacacagcacatttaattctcccttttcaaacggtaaaggacagaatggatgcacggcgactgatgcgacgtggacgtagaggaagaagaatcaaccgccagattgaattctcaaaacgcgctcatcgtcagaagcgctttgagaatcgtcgtcaagccaaacttccaccatctattcgtgccaatcgccagttagaactcaggatcgtgtctgaactctgtaaaatctatccggttacagaaatccgttacgagtacgtccgagctgatgtggatttaacgagtggacgcaagaaagcaagatccggcaaggggtttagcgctgtgatggttggtcagaagtggatgttacaacagttggagcagtttgcgcctgtcgttaaagttgaaggctatcaaacttctaaaactcgtgaacatctaggattgaccaagaacaaaacagagaaagcaaaagctgaatttgccactcatgcggtagacggcgtaagtattgcggcatcgcactttgttgaatatcggaaatatcacagagtaaacgttgatggagctaactggtttgggactgtttcgattacgactgcatcattctttgtgattcgtcgccctccatactcccgtcgtcaacttcatctcatggtgcctgccaagagtggagttaggcgtaagtatggtggctctacaactcgtcatggtgtgcgtaaaggcgatttagtcaactccccaaaaggaattggttatgtgtcaggagacaccgaaaaacagatatccgtcagcagcgatagctggaaacggctagggcagatatcggctaaaaaagtaactttagtccgtcgctctaatggattacttgtttcttag

SEQ ID NO: 859 - DNA, 223 bp, unidentified
  misc_feature 1..223: note = Ga0272428_1004076 JGI
  source 1..223: mol_type = other DNA
ttcaccaacctcggcctcaaggcgcgaggattgtccgaaccaattcggacaacgtaagaggtgaatagcccattgagactcgatttggtacaaacttccaaacacttctctagttcggatttcctttaagcctgattggttcaggcgttgggtcaagccaagacatcttgatcgagttgggttaagagacttaaacgagtaattgggttataccaaaatgcga

SEQ ID NO: 860 - DNA, 1296 bp, unidentified
  misc_feature 1..1296: note = Ga0315294_10016080 JGI
  source 1..1296: mol_type = other DNA
atgttagtatatattattaataaagatagcaaacctttaatgcctactagtcctaggaaagctagattgcttttgaaagaaggaaaagcaaaaatacataagtatgaaccatttactattcaacttatatatggtagttatggttatagacaatcagttacattaggcttagattcaggatctaagaatgtaggtttagcagcagtaactgaacaaggaaaagtattatatcttgctgaagtagaacttcggcaagatattaaagaaaatttagcaactagaagtatgatgagacgcgatagacgaaagagaaaaacaagatatcgaaaaccaagattcttaaatagaaaaaaagcgaaaggttggctaccacctagtattagatccagaatagaatctcacgtaaagctagttactgatgtgactaaaatactaccagtaaaaaatattgtagtagaagtaggattatttgatgttcaagctttaatgaatccaaatattgaaggaaaagaatatcagaatggtattcttaaaggatatgatagtgttaaagaatatataaaagttagagataaatatttatgtcactacaaagatttacgttctgatatactttgtagtaagaagttagaaatagatcatatgataccaacgagtaaaggaggtactgatagaccaacgaatttagtttgttcttgtgctgcacataatagaatcaaaagtaatatgagttatgaagaatttactagtaagcgtctacctaagatagaatcctttaaagaaaccgtttttatgaatgtagtaaagagtcacttagtttctttgctagcaaaacttagaccagtaagtataacttatggatatctgactactctgaagagaaaagaatttggattagaaaagaatcatacagatgatgctatcgctataacaaatatccggcctaaagaatatataggaaacagttatcagattaaacaagtacgtaagaagaagagatctttacatcaaatgactcctttctctagtaagaaaggaaatccgaattcgataagattaaaaaagaatactaaagtagttattgttagaaaacttaaatggtgtttgagagataaagttagagtaggtaatcaagtaggatttatatccggatttgcccttcctaactttgatgtagtagatattaacggaaatataataagattattaggaaggaagagtgatgaagtatcagctaaaaatactcagttgatatgtcgaaataataattggcaatgttgttttaatgttgcataa

SEQ ID NO: 861 - DNA, 266 bp, unidentified
  misc_feature 1..266: note = Ga0315294_10016080 JGI
  source 1..266: mol_type = other DNA
gacgtagctgatacttatattgatgctaggatcgactcaacctcaaaagtgattttaggcgtcgattagtttaagtctacttcaataagtagactacgttaacaaagaaatgaagatacctacgaatgatgctctagttcgtagcaaactatcgtagctctgtaaacagttctcaagaggttagagaacagtcaactacatgtaaaagctttgttaacattaacgaagggcaaataacttctgaaaggaagatatactatatgtta

SEQ ID NO: 862 - DNA, 1119 bp, unidentified
  misc_feature 1..1119: note = Ga0136617_10020436 JGI
  source 1..1119: mol_type = other DNA
atgtcaaaccacgtatttctcatagacagtaataagacaccgctcaatccagttcatccagcacaagctcgcaagttactggattccgggaaagccgctgtgtttcagtgttatccattcacgttgattttgaagcgagtcattgaaaatccaaatgtatatccgttaacactcaaaatagaccctggttcaaagtttactggcattgcgttagttacgaatcaaggcaatgttgtctgggcaatggagttgcagcatcgcggacaacaaattaaggaagctctcttgcatcgtagagcggtacgtagagggcgcaggaaccgcaatactcgttatcgccaagcacgattcctcaatcgtaaaagaccagatgggtggttagctccatctttaagacaccgcattttgacaatagaaacttgggtaaaacgactgcaaaagtttgcaccacttggttcaattgctcaagaacttgttaagttcgacacccaagcaatccagaatccagaaatctctgggattgaataccagcaaggaactttgaaaggttatgagtgccgtgagtacctgttggaaaaatggaatcgtcaatgcgcttattgtggtgtcaaggacgttccgctcgaaattgaacatatccaaccaaaatcacaaggtggttcagaccgtatttctaatctttgcttggcttgccacaagtgcaatcaacgcaaaggaaatagagatataaaggacttcctcaaaggtaagtcagatgtgttgaaccgcgttttgaaacaagccaaaacgaccctaaaggatgcggcatcagttaactcaagtcggtgggcattgttcaatactttgaagtcttttggattgcctgtgagcatcggcactggtggtcaaacaaagttcaatcggattcgattttcgtggccaaaagctcattggattgatgcggcttgcgttcccgcgtgtcaatgccatcaaacttgttacaaccaagattctcaaggtaaaagcaacaggttttggtggtcggcagcgatgtcaaacagacaagtttggctatccgcaaaaacatcgcccgttgcgtccaattctgggattctgtacaggcgatatagttcgcgctaa

SEQ ID NO: 863 - DNA, 249 bp, unidentified
  misc_feature 1..249: note = Ga0136617_10020436 JGI
  source 1..249: mol_type = other DNA
cggtaaaacctacccagagttggacatttattgacaactctaccgaacgtgcagactaagcgaaagctacgatttttgagtcatgacaccaacgaatgaacgccagtttgttgctctgtcgattgtcatgtttggcacggattaacggttgattaatccgcgtgtggcagtccaaacaagctcttaaatcattgtcgaggcaaactttacttagcaataaagttgattgaataaatcatgtcaaaccac

SEQ ID NO: 864 - DNA, 1026 bp, unidentified
  misc_feature 1..1026: note = Ga0376462_0006212 JGI
  source 1..1026: mol_type = other DNA
atggaccgaaaggtcactacttcggtagtagaaaggaaaaatattatggtaatagctctagataagagaaaaaaaccattaggttttataactccaaaaagagcaagaaagctcttagaatctaatagagcagtagttcacagaatgtatccatttattataaggattaaagatgtggatactagagactgcgatacaaaagaatttagattaaaaattgacccaggtagtaaatatacagggctttcaattatagatgacttaggtaatgtatatttcttggctgaacttgaacatagaggctctgttgtaaaagataagcttaaaactagagcaggtgctagaagaaatagaagaagcagagaaactagatatagaagacctaagtttggtaacaaaataggtaagaaaaatgcacaaattaaatatgactcagctagagaggaaggttggttgcctcctagcatacaaagcatagaggataacataattaatttcattaaaaagtactctaaatggattaatattacttctataagtgttgaaggagttaactttgatacccaaaaattagataatgacaaaattaaaggtgttgagtatcaacagggtacactttttggctatgaggtcaaagaatatttattagataaatatgggcgtaattgccaatattgttatgattcaacagagagacgcaatttgtcaggtgataacatattagaaatagaacatatgatatcagtcaaaaatggtggttcaaactctgttaaaaacttgactctagcttgcagtaaatgtaatcaaaagaaaggtagtcaaaacctagaagattggtttaaagttcttgaaaaatcaaaaaccaaacttgataaaaagagagctgaaaatatagcaaaaattcttaaagatgggaagccttttagaggttatagatatgcatcatggtctaatagctataaaaacaagctaattaaggatattaaaaatttagaaaacataaaatctgttgaaatgtcatacgga

SEQ ID NO: 865 - DNA, 325 bp, unidentified
  misc_feature 1..325: note = Ga0376462_0006212 JGI
  source 1..325: mol_type = other DNA
gtcaatgaaccctcggctgaagccgaaggcatgtaatcgcaaggttgcataaattcggttttcggttgaattgagcagactttcgttatcttagttatgatggactggtgtgcttctccagcacctatttcatcgccgaaatctaaacagggcttcgagggaacttttacagcattgctgtaaaagcaaacccagtgattaggttaaccaattcgagagttattaaaaaagctgagataacattgtcgaggagagataaccttcgggttacgtaactatggaccgaaaggtcactacttcggtagtagaaaggaaaaatattatg

SEQ ID NO: 866 - DNA, 1083 bp, unidentified
  source 1..1083: mol_type = other DNA; note = Spirochaetales bacterium UBA4673
atggtttatgttcataattgttttggcttaccgctcatgccatgcactgaggcgaaagctaaacatctgttaaaagcacataaagccaaagttgtgaatcttacaccgttcacaatacgccttaacttcgtcgttgacgatattactcagcctgtaaccctcggtgtagacgcaggctacaaaactataggattatctgcatccactgaggataaagtactctttgaaggagaggtaaaacttcgtgaggatataatagcccttctcgaaggaagacgagcgagaaaaacccgatatcgtgctcctcgttttgataacagagttcgctctaaaaacagagggtggtttgcgccttctgtagaaaatcgtatcggaacgcacttaagtgttattgctaaagtttgccgtctcgtccctgtttctagacagaaaggagagcaactaggtttttggaatgttagagagtatgtactatggcgagacggccataagtgcagaagttgctttggtaaaactaaagacacagttctcgaagtacaccacctagtacaacgtaaagacggtggttcagatagaccggataatctaataacactttgtaagacgtgccatgaagcttatcacagaggagagattaaactagataagccgaaaaaaggattcaaaggcgcaacgttcatgggaactatgagaaaggcacttattaagcgtctaagagagctttatggctcggggatggtagaagtaacttatggttatattaccaaaaacactcgtattgagaatgaccttgataaagctcactacatagacgctagatgtatagcgagccaccctaaagccactcctactaagactatctacagtttacttaagcatcgctctcataacagacagatacatagacttacaatccttaagagtggcgtaaggaaaaataatcaatgtccaagaaagatttcggctttaggctctttgacactgttcaatacaacagagaaatatgctctgtgcagggaagacgtactagtggaagttttagcattcgaaaaccgaatggtgagaaggtttctgaaggcgtga

SEQ ID NO: 867 - DNA, 362 bp, unidentified
  source 1..362: mol_type = other DNA; note = Spirochaetales bacterium UBA4673
taatgagtgaggatatcaacaacccacggtgcaagcactggggtatgaggagtgaaaacgactcatgctcttgttgattagcctaagtgctctatgcactactttattagagaatatataggtactgttggatgtcgtcctagtctgacactctacggttcgtgtttaaagagtctcaaggggtagagacagtgatacgaacttcaaacctctaataacattggcgaaggacaccggagagtaagactccgttaccgaagaagacgcgggccttaatgtcgtattgtcttcctctctattctcattcacggcatgagtattagagagtcttaagccgcatcacccataggaggacagtcatg

SEQ ID NO: 868 - DNA, 756 bp, unidentified
  source 1..756: mol_type = other DNA; note = Human gut metagenome
atgatttacgtaagaagtaaagaaggcatggtattaatgccaacagaacgttgtggtaagataggttatcttcttcgtcacggaaaggctcacgtagtcagccgtgttccatttgttgtacagttggattacgatagtaccacctacacgcaagatgtgagtcttggcattgatgctggctcaaagcacattggcgtttcggcaagttccgagaagaaggagatgcttgcagcacaagtcgagttaagaagtgatattgtgaaattactttctactcgtagggagttgagacggaatagaagaaaccgcaagacacgctaccgcaaggctcgttttgataatcgcaagaagaaagatggttggctagcaccaagtgttgaacaaaagattgagagccacttgaaggttattcgtttggttcataaactacttcctgtcacgaagaccacaatcgaggtcgctcagtttgatgctcagaaaatcaaaaacccagacataaagggtgatgaatatcagcaaggcgaacagatgggattttggaacgtaagggagtacgttttggcaagggatgggcataaatgtgttcactgcaaaggcaagagcaaagacccaattttgaacgttcaccatttggagagccgcaagacaggcggcaattctcctagcaatctcgtaacgctttgcgagacctgccataaagcttatcatcgtggagagttcgatttgaaaattaagcgaggaagttccttgcgtgat

SEQ ID NO: 869 - DNA, 277 bp, unidentified
  source 1..277: mol_type = other DNA; note = Human gut metagenome
tttaagttttggaatcctttaattaggttacagcgattatccattcaatcgtccgaagcggattagccttagccccgaatggaattagggagctacgttaggaatgaatgcataggcacgtcagaatgttcgtccaagttctgacctctgcggtcgatgattaaaagaagcgaaaacaacggtgttgtcggcaagaaaccattctataacatttgcgatgggcgcacaaccccacttcggtgggagatttatttattaatttaaatttgagtttatg

SEQ ID NO: 870 - DNA, 1277 bp, unidentified
  source 1..1277: mol_type = other DNA
atgttcgtgtatgttttgaattgtcatgggaaaccacttatgccctgtcagccacacaaggcacggctgctcttgaagcagggcaaggcaaacattgtacggatggaacccttcaccattcaattgcgccatggcagttccgggtacaaacaagagatatcactcggcattgatgccggaagcagacacatcggagtggcagcaacgacagagcagaccgttctctttgaagcggaggcaaagcctcgcacggatatccagcaactgttggcgacacgtcagcaatttcgccgagccagaaggagccgcaagacccgctaccgaccatccagatttcgcaatagaaagaagccagatggctggcttgctccctcagtccaacaccggctcgatgcccatctcaaactcatcaagatggttcataagctcttgccagtgaaccaaacgacgattgaggtggctcagttcgatatccagaagatccagcatcctgagattgagggcatacactaccagcaagggccacaactgggcttctggaatgtgcgtgagtacgtgctctggcgcgattcccaccggtgccagtggtgccagggcacgtcgcaagatgcagtactcaatgtgcatcacatcgagagtcgaaagacgggtggggatcgtccagagaacctgattaccttgtgtgagacctgtcacgatctcattcaccggaggcaccaagagcacaagatcaccaggaagagcaacgggtttcgggatgcaacccagatgggcatcattgggggaagatctatgagcaggcacgtgctcagtttcccaacgtccatctgacatatgggtacatcaccaagcagtcccggattgaacacaaattggagaaatctcatctcgtggatgcccgctgcatcagtaggaaccccctggcttgctccgatggcacctcttacctgatgaagttcgttcggcgcaataaccgccaactgcacaaagccaccatcagaaaagggggcaacaggcagcgcaataccgctgccaagttggtccatggttttcgactttttgactgcgtgagctatcaagggacagtctgctttgtgtttgggcgcagaagttcgggctactttgatttgcggtccctggatgggaagaagatccatgccagcgccagtcacaaacagttgaaacgagtccagagggcttctgcctgtttaatcgaaaggaggagcggcattcttccctcccctcaaggggcgggtctcctgccgctgaaatcatga

SEQ ID NO: 871 - DNA, 238 bp, unidentified
  source 1..238: mol_type = other DNA
gtcaatgacccccggagagatcgccggaggcttgtaagagccttcattgactagcctgagtcctttactggactacgttcgagcggtcacgatacctccaggtgtctacgctagcctggagccctatcgcctgtgattaaaagttctgatgggtaggaacggtgttgcagaccgaacaagccgcttgaacattggcgaagcgtaccatacatctgaaaggatgatgcacgttatgttc

SEQ ID NO: 872 - DNA, 1362 bp, unidentified
  misc_feature 1..1362: note = Ga0180433_10023929 JGI
  source 1..1362: mol_type = other DNA
atgcagaagttatcacaaagaaatacatgcacaccaacagatgctcaaccagtctgttgcaactgtgattctgaattaaacagagaagaaattctcagtgatcagaatttaaaaacttgtgataacagctccgaggttgatcaagctcaacatacagagcggtcattacaaccaaaagtgtatgtgcttaattgtcggggaaaaccactaatgccttgcagttatgctaagtctaaaagaatggttagaaaaggtgcagcaaaagtcattaaaagatctccttttacaattcaattaaattttgattgtgaaaacaaagttcaagatgtaacattaggaattgatacaggttattccaatattggattttcagcagtatcagaaaaagacgaactgatatcaggagaagttatattagaaaatgggatgactaaacgtattcaagacaaagctatgtaccgaaggaatagaagaaatagattgtggtacagagaaccaagatggaaaaatagatcagctaataaaaaagaaggttggttacctccttctactttgagaagatttaaaactcatatttctttaattaaaaagattaaaaaattattaccgatttctaaaattagaattgaaatcgcaaatttcgatattcagaaaattgaaaatcctgacattgagggaacaggatatcaacagggctcaatgtatcaatatagaaatcgcatagcttatttaatcactagggaaaaaggaaaatgtcagtattgtgataaagaatataaaaaaggtgacgggtggcgactacatcatatttgggggaaattaaaaaatagaccacaagattgggctttagttcatgaatcatgtcataagaaattacacgcaaaacatgaagaatatgtattacaacaaaagaaatcaaattcatacaaagattctacgtttatgaatattattagaaaaagatttataggtttgtttgaaattacatatggaaatataacttttcaaaatagatgtgatttagatttagaaaaatctcatgttaatgatgcttttgttatagctggaggagctaatcaaaaaagatgttcacaatttaaaatagagcagaaaagaaaaaataacaggtgtcttcaacttaacagaaaaggatttaaaccttctattagacgacaacgttattctttacaaccaaaagatttagttaagattaatggagaaatatatgaagttaaaggaattcacagttatggtgcccaggttaaattaaaaaatagttttggaaatataattaacaagtcagttaaaaaattagatgaatggaaatttcatcaaaaaactttaatatggaggacagtctga

SEQ ID NO: 873 - DNA, 256 bp, unidentified
  misc_feature 1..256: note = Ga0180433_10023929 JGI
  source 1..256: mol_type = other DNA
gtcaactaccaaaggctaaagcctttggcttgaatggtaacattcaacgcaagagttgattaggaggcataaaaattatgcagaagttatcacaaagaaatacatgcacaccaacagatgctcaaccagtctgttgcaactgtgattctgaattaaacagagaagaaattctcagtgatcagaatttaaaaacttgtgataacagctccgaggttgatcaagctcaacatacagagcggtcattacaaccaaaagt

SEQ ID NO: 874 - DNA, 852 bp, unidentified
  misc_feature 1..852: note = GENOME_ACESSION: mgm4784220.3 MG-RAST
  source 1..852: mol_type = other DNA
ttgaggcttgacatcattcctctgattctacatgattgcataggttatttctgcgagactcctaagctccgtgcccatcgccaaaaacgcttttctaatcgcaatcaaaaaaaggttgcgccatctattaaagcctcgcggttgatggaaattcgcattgttaaagagcttgcctctatatttcctgtcagttcaattgtttatgaagtcgtcaaggctgatgtagacaagacatcaggtagaaaaggcgctaagtctggtaaaggtttctctcccgttatggtcggtcagtattgggcaattgctcagcttgaggcgattgcgcccgtcgtaaaacgtcaaggctggcaaaaagacggtaatggaacaagccagatcagaactcacttaggactgattaaagacaagcaaaataaagctaaagcaagtcctgaaactcatgcagtagatggtattgcgttagctgccagccagttcactcagtatcggattactcacaagtttggcgaagattctggcgactggatgggtgctgtagagattacgcccgcaccgtttcacgtcataactcgacctgagtacttccgtcgtgccttgcacttcgacaatgccgacaagggcgggaagcgaaagcgcaaaggcggtactgtgaatccgtttggatacagagcaggtgacaaagtaaaggtcaagaccaaaggcgaagtcattacgggctgggtgggaggtttcaccgataccgaaaagtcgaaaaaggttagcgtttacgaccaaaactggcatcgccttgggcagtttggcatcaagcaaatcaaattaattcggaggtctaacaagctatgtgtagcttga

SEQ ID NO: 875 - DNA, 294 bp, unidentified
  misc_feature 1..294: note = GENOME_ACESSION: mgm4784220.3 MG-RAST
  source 1..294: mol_type = other DNA
gcaaactatatccctgttctctcagcaagctataaaccgtccggggactgacctgatgccccatctcttgcagcgtggcggcgagttgatgcgtactctgggttgtccatctcagcgacgactccggatcgcctcgggtacccggttcaattaaggttgccaaatcttctaaaagcgtggtatctgtggtggtcaaacgtttccgtcccccgccaggtctgcgaactgcacccagttccagcccttcatcatcggcttgactcctttgctctagctcttgcattccccatcgca

SEQ ID NO: 876 - DNA, 1242 bp, unidentified
  source 1..1242: mol_type = other DNA; note = Human gut metagenome
atgcgaggagaaccgctgatgccgtgctcaccggcaaaggcccggattttgctcaagcaaaagaaggcggttgttcggcgcagaactccgtttacgattcaactcaccatcgctacgggtgaaaccaaacaacctgtgactcttggtgttgactgcggctacaagcacgtcggcctatcagcgagcaccgacaaagatgaggtgtacgcctcgaaagtcgagttgcgcactgacatcgttgatctgctctccaccaagcgtgaactgcgtcgttcacgacgcaaccgcaagacacgctatcgtgccccaaggtttgacaaccgggtccatagcaaaaacaaaggttggcttgctccttcggttgaaaaccggattcaagcacacctgtcacgagtggagtcggtttgcgatcttgtgccggtcacgaaaatcattgtgcaaacagcggcctttgatattcagaaaatcaaaaatccggatattgaaggcgttggttaccagcagggagatcaactgggtttctggaacgtgcgcgagtacgtgctctggcgtgacggacacgtctgccaacactgcaagggcaagtccaaggatccggtgctcaacgtgcaccatctggaaagcagaaagaccggaggtgacgctcccaacaacctgattacgctctgcgaggcctgccacaaggcattgcatcgcggggaaatcacgctcaaggcaaagcgcggaaagtccttccgtgcagagaccttcatgggagtgatgcgttgggcgtttttcaatcgcctcaaagcaacctatccgcagcttgaagtgagaaatacctacggttatctcaccaaacacaagcgcattcatcatggcatcgccaagacgcattgcgcggacgccttctgcatcgcaggcaacctcacggcaaaacgtgccggaagttatttctttcagaagcaaacccgcaaacacaaccgacagattcacaaactgacggttttgaagggcggtgttcgcaaaaagaaccaatccccctacgaggtcaaaggtttccggttgtttgacaaggtgatctgcaaaggcgaagaggcttttatcttcggccgcagagcgacgggcaggtttgatgtccgccgtctggacggcactcgcatttctgcgggaatcagttgcaaaaagctcagactggttgaaccgcgcagaacttttttaacccaacttgtaaaggaggaaggcgattcctcccctgcttga

SEQ ID NO: 877 - DNA, 249 bp, unidentified
  source 1..249: mol_type = other DNA; note = Human gut metagenome
gtcaacgaccccggcctgaaggccgaggcttgaataaagcctgagttgactagcctcagtttccgaaaacggaaactacgttggttgggaatacataggcaccgtgggatgtcaatcctagtcccacgctctgcggtctgtcgttaaaagctctgcgaggtaggagcggtgcggcagatagacaaaaccccttccaacattggcgaaggattacaaccggccttcgggccgaggagataaaacttgaga

SEQ ID NO: 878 - DNA, 1239 bp, unidentified
  misc_feature 1..1239: note = Ga0376486_000912 JGI
  source 1..1239: mol_type = other DNA
atgttagtatatgtattacatcaagatggaacaccattaatgccttgtaaaccagtaatagcaagattattgctgaaaagtggtaaagcaagagtggttagaagaacgccattcacaattaaattaacgtatgataccactaaaaatactcaagaactaacattgggtattgatagtggatctaaaactattggcagtgcagtaagagatgatcaaaatagagtatactatttatcagaagttacagttcgtcaagatgttaaagatcatatggaacaacgtagaatgtatagaagaaatagacgaaacaggaaaacaaggtatcgcaaacctcgttttttaaatcgtaaaaactctattcaagacaatcgttattcgcctactttaatatctaaatatagtagtctaataaaagagttatggtttatatataaaatattaccaataaccaatcttattattgaaatgggaacctttgatccacatgctatgcatagaccagaggttatgtggcatccatggttatatcaaaaaggattacaatttggtttcaataatatcaaggcatatgtattatcaagagatcaatatacatgtcaatattgtaagaataagaataaagatccacatttagaaatacatcatattgtatataaatcacaaggtggttctgatagaccagacaatttacttactctttgtaagacttgtcatgaaaaattgcataagaatcaaattaaacttactaatagtaagttaagatcaacatttaaacatgcgacacagatgaatgtattgcaaagtatgattagaaaatatataccagattatacagaaacatatggatatatcactaagacaattagacaatattttagtctagaaaaagctcattgtatagatgctgtatgcgtagaagctactagtgatatacaaccagagtttcttacagatcgtgttattttcaagaaatgtattagtaaaggtaattatcaattaactaaaggcaaacattctgaaaagaagatgcctaaagctaaaattcaaggatttaaaagatgggatactgtattatataataacaccgtctgttttatcaaaggtagaatgagtactggatatgctgtattatgtgatattcttggtaataagtatagttttaaacctattccaaaatttaataaaatgaaacggatatcagctagaaagtcatggattatgatagagggaatcatgtaa

SEQ ID NO: 879 - DNA, 289 bp, unidentified
  misc_feature 1..289: note = Ga0376486_000912 JGI
  source 1..289: mol_type = other DNA
gtgaactccccacccgctaaagacgggtgagcttcaatattttgaagctctggttcaccagactcaatatctagaaatagatactacgttatcttggatgtagataccttggattgccgcctcagatccttgctctatcgtggcactgtaaacatcgctgaagggaaggcgaagtcaaccacacctcgaagcctagataacattgtcgagaggatgtcggattctttatatggtaacagtatagagatacgcataaccctattaaattaggagattaattatcatgtta

SEQ ID NO: 880 - DNA, 1548 bp, unidentified
  source 1..1548: mol_type = other DNA; note = Human gut metagenome
atggcatcttacgaaaggaggcatccaatgccggagtatatctatgtgttaggcagggacgggagtccgcagatgccgacaacacgaaggagacatgtgcagaagttactggataccggcaaagcacgcatcgccgaacatgtcccttttaccatacagttactttatgacaatacccccgtcctccagcccgttacatttgcagaagatccggggcggacgaatatcgggatggcagccctgtccctgaaaggggaattactgttttctgccgtctgcgagacgagaaataaggagatcgcaaaactgatggaggaccgcaggaagtaccgccgtgcctccaggtctggagaacggaaggcaagacagcggctggcgatacggtttggcacggtcttaaaagccgggatgatgatgcggaagctgccaaagtatgcagcagacaagttcatcacctgtaaggtcatccggaacacggaatcccggttctgcaaccggaaacgggacgaagggtggttgaccccatcggtcaaccatctggtggatacgcacatccatctgctccataagatgcagaagtttctgcccatcaccgatgtggcactggaagtcaaccggtttgctttcctgcttctggaagatccgtccatctctggtgtggacttccagaacggaccattgaaaggattcgataaccgggatgccgcagtctatgacctgcaggatggaaaatgtctgctctgtagaaaagagattgagcattaccatcatatcgtccccaaaagcaggggcggttccaacacccttggaaacattgccggactatgtaaaagctgtcatgacagggtacacaaagacaccatgtatgccaaacgactggaagacctgaaaaagggactggacaaaaagtatggtgccctgagtgtcctgaaccaggcggtcccgttcctctgccagaagctggtacaggagtttggaaaagatcatgtcttttactgtaccggcagggatacggcaagagtacgtaccgccctgggctaccagaagacaaaggaaaaccagctccacgaagtggatgcctggtgtattggacttctggcattggaaaaagttccagaaaagctgccagacttccatccccaccggatcctccagttccggagacaggacagaagtttgatcgatgcacaggtggaacggacatacaaactggacggaaaaaccgttgcaaagaaccggaagaaacggacggaacagaagaccgattccctggaagaatggtttgaaaaacaggtaaaatctttcgggaagaaggaagccaaacgaaagagaagccggctaacggtggtaaaagcgtatcgccggtacaacgatccggaccgtctgatgccaggtgctgttttcctgtaccagggagtccggtacgtcatgcgtggacggcactgcaaaggggcctacctgcaggctgtcggtatgggaagtaaagatttcccagtaaagcaatgtaagatcttaaaacaaaataccgggttagtctttgttgcttga

SEQ ID NO: 881 - DNA, 269 bp, unidentified
  source 1..269: mol_type = other DNA; note = Human gut metagenome
gtcaatcacccacgactaaagtcgcgggcttgcaatagcaggtctgtgctttagccgctgggaatttgagcggagacgtgatgtctgtgttcccgtaagggatggcactccgggatgtttttccagtcccgtgaccctgcagagcagacaccaagtctaggaagactgttttacagccatgcacaggcttaccaccggtgcggggatcccgctgatccccgtgggactgcatggcatcttacgaaaggaggcatccaatgccggagtat

SEQ ID NO: 882 - DNA, 1335 bp, unidentified
  misc_feature 1..1335: note = Ga0114934_10005458 JGI
  source 1..1335: mol_type = other DNA
atgaaagatgtaaaaaacagagtcctggtagttgatactaactatcagcccatgactccagtacacccagcggtagctaggaagctaatcaaacaccgtaaagcggctatcttccgtagacagcccttcaccatagtcatgcgttccgagagtaccgagaaacctaaagaacatacccttaagatagaccctggctctaaacaaacaggtctagctgtagtagatactacaactaacacagtagtatgggctgcaactctggtacaccgaggacaggcgattaaagcccgactcatctccagatctcaaataaggagcactcgtagatctcgtaagtgcaggtatcgtaaacccaggttcgataacagagcaaaaccaaaaggatggctaccgccgtctctaatgtcccgaatccataacactatgacatgggtcaacagactacgtaagttctgcaacataacagaactgtcagcagaacgtgttaagttcgatatggccttaatgaaggaccctaccatacaaggcagtggatatcaacaaggagatctctacagaaccaatctatgggagtacctactggagagagaccatcgtgcctgccagtactgtggtgccaagaatgtaccactagaacgtgatcacatacaacctaagtctaaaggaggactagatgtcaaagaaaacctagtactagcatgtaaactatgcaaccaagctaagaacaacacagatgttagggtcttccttaagaacagaccaatgactcttaagaaagtcttaaatcgtaagtcggtaaggttatcagatgcagctgctgttaatgccacacgtaacaaactcttacgggaacttctgaatacaggacttccagtagagacaggaacaggagcacaaactaagcttaatagggtcagtcagggctatcctaaagatcactggatagatgctgcttgtgtaggtgactctgggagagttgttactcttaatagctccatggcaccattagttataaaagccatgggtcacggtaaccgtcaggtaactcatactgacaaatacggcttccctaatagtaaacctaggagcactaagaggctcctctctccagtaggttatgtcaagactggcgatatagtacaactagacgttactactggtaagtatcaaggtatgtctaaggatatgtccagagataggatatcgagtatcaatacaattaaaaacttcttatccatcatagtagacggacggtcaagggcgttcccagttaggcatgtcactcatctactccatcttcatgatggatactcatataaccacaggagtctgtag

SEQ ID NO: 883 - DNA, 279 bp, unidentified
  misc_feature 1..279: note = Ga0114934_10005458 JGI
  source 1..279: mol_type = other DNA
tatacagtaagtaatatagtcatgttgagtagctagctcacttattagataagtgtggtcctataggactaactcaaccagctcgctcctaagggagcagacgatatggataagatcatacctaggggtgctccgccagctcctagctatatggtgtgcgtgaatgacctataggctagcactatagtaatcaggtacacatataaccttcatgtctgagcgaggctaacagtactttacagtacacaacccgaaaggagttaacaatgaaagatgtaa

SEQ ID NO: 884 - DNA, 1605 bp, unidentified
  misc_feature 1..1605: note = Ga0377182_011632 JGI
  source 1..1605: mol_type = other DNA
ttgagattagcaaccaaagagagaactacgttgtacacagagttaaagaccaacgccggggtgcttcctcagctccggcctcttgaagcgcaggcagcagacaagccgcagggttcggcacgaaacgggtctgtgcgtgatgccggtgtgcaacatgcccgaggggagagttcaggaaacgccaagcctgaaccgtcacccgcgcaagcggagcgcggcgtaagccgtgtatttgtattgggtaagaaccatcaacctttaatgccctgtcatccggcacgggctaggaagctgcttcgacagggacgggccgtggttgtgaaacgctttccgttcacaatccggcttaaagacaggattggaggggaaacccagccgatcagagtaaagattgaccccggatcaaagactactgggttggctgttgtcctggaacagggtgaaacgcaacacgttgtgcacctgagcgaactaacccaccgaggctggaaagttcagaagagcatggggcagcgtgcagcgtttcgccgtggaagacgaagcaggaatcttcgttaccgccagccgcggttcaacaaccgaaccaggcctaaaggctggttgccgccaagcctgcaaagccgcgttgacaatatcttgtcttgggtcaacaggattcgtcggctctgccctgtgtcttcgaccacagtagagcgtgtccgattcgacatgcagctcatggagaatccgaatatttcaggcgttaagtatcaacaaggaacgctctttggttacgaactcagggagtacattcttgagaagttcaatcgttcctgtgtgtattgcaacggtctgtcaaaagacccaatcctagaggtagaacatattgtgccgcgaaaccccaaacatggggagcgcggctctaatcgggtttccaatctgaccttggcctgtcgcacctgcaacaaatcaaaggggaattgtcagcccgaagagtggctaaaaattttgtccaaatcccgaaagagaatcgacaagcaacgacacaagggcttgctccaggttctggaaggcaaacggcccactctggcacatgctgctgctgtgaacgcgactcgcaatagattgttttttgatctgctcaacacaggtcttcctgtcgaggccagcacaggaggccaaacaaaagtcaaccgccattggttgcaaattcccaaagcacattgtcttgatgcagcttgtaccggtcaagtttcaacactttatggatggaaccagcctgtgctcttgatctgggctatgggccggggaagctacaagcgaacccgtttaacaaaacatggatttcctcgtggattcctgatgcgccagaaagccgctcacggctttcaaaccggcgatatggtcaaagccgttgtgccaaaaggaaagaagcgtggaacttatgttggtcgggttgctgttcgtgcttccggtagttttaatattaaaaccgagactcagaccgttcagggaataccgtggaagcattgccgtcttctcgctaaggcggatggctacggttatgccgtaacctcgcttcctcctctacctgaaggaaggcgtctccgcgaggaagaaggatga

SEQ ID NO: 885 - DNA, 320 bp, unidentified
  misc_feature 1..320: note = Ga0311301_10001791 JGI
  source 1..320: mol_type = other DNA
gtcacgtaccctatcgccttttgaaacttcatcatgcgatgggcttgtgaagaacgaagtcctggacgtgaccagcccaccaggctcgtcctggtaaccgtttcccatgaatgcataggcactccgcgatgccgatccagtcgcggacgcagcggtcaacgattaaacagacagacagggttcgagtcagtgtcgttggcaaccgaaggaaaccacgggaaaacaggggcgaggataccctcacttcatccggctacggatgaacgacgtctcattacgagacccccgcaaggggatgaaaggaacgaaccatgtcgcgc

SEQ ID NO: 886 - DNA, 1311 bp, unidentified
  misc_feature 1..1311: note = Ga0311301_10001791 JGI
  source 1..1311: mol_type = other DNA
atgtcgcgcgtgttggtgctcgaccagcagaggcggccattgatgccctgcactccggctcgcgcacgcctgctgctcaagcaacacaaggcagcagtctggcgccgttacccgtttacgctgatcctgcgggtcgcccgtccagatgccattgcacagccgttgcgcctcaagatcgacccaggcagccgaaccagcggcctggcgctgacaaatgatgcgacgggagaagtggtatgggcggcagaactcacccatcgcggcgagcaggtccacaaagccctccagaaacgggcagccgtgcgcagggggcgacgccagcggcatacgcgataccgcaagccgcgctttctcaatcgccgacggcccaagggctggcttcccccgtcgcttctcagccgggtgcgcaacatcgagacctgggtcgcccgcttgatgcgctggtgcccactcggggcgctttcgtacgaggtggtgcgcttcgatacccaggccttgcagaatcccgaaattgcaggaactgcctaccaacacggcacactggcgggttatgaagtcaaagagtacctgctgctcaagtggggacaccgctgcgcgtactgcaagcaaacgggcatagccctgcaggtcgagcacctcgtgcccaaggcgcgcgggggcagtaaccgcgtgagcaacctgacgttagcttgcgaacgctgcaaccggaagaagggcaaccgcacttcggaggaattcggctttcctcatctccaggcccaggccgggctccctctcagagacgccgcggccgtcaatagcatcaggtgggcgctgtacgaacgcctcaagtgcagcgggcttcgcatcgagacgagcacgggtgggcgcaccaagtggaaccgcacgcaacgcgacatccccaaagcacactggctggacgcggccaacgtcggtcaatcgactcctccgcgactgctctggcagcacgtgcgaccgctgctcatccgggcaatgggacagcagagccgtcagatgtgccgcatggatgcgcaaggcttcccacgcacaaaggccaagaaaccgagcgcgaaacacgcgtttcggacaggcgatatcgtgcgagcagtcgtcccggcgcacctgaagaacaagggggtgcatgtggggcgcatggcagccagagccaatggtgccttcacgattgccacgcggcgtgggacagtcaccgacattggctatcgctactgcacccgcctgcagcgcaatgacggctacggctatctgactcagagcataagggagtgcagcttcccctcggtcttccaatga

SEQ ID NO: 887 - DNA, 320 bp, unidentified; identical to SEQ ID NO: 885
  misc_feature 1..320: note = Ga0311301_10001791 JGI
  source 1..320: mol_type = other DNA

SEQ ID NO: 888 - DNA, 798 bp, unidentified
  misc_feature 1..798: note = BBAY79_10002962 JGI
  source 1..798: mol_type = other DNA
atgtcaaactttgtattcgtaatagataccaacaaaaagccactagaaccctgctctcctaccatagctaaaaagctactgaaggcaggaaaagctgcggtttttaggcaatatcctttcactatcattcttaagaaggttgtagagccaggagaaatcaaatcatgcaaacttaaattagacccaggctcaaaaacaactggtatagctattctgcaagaagataaacttatctgggcagcagagttaactcatcgaggtcaaaagattaaagacgatcttgaatctcgtagatcactaagacgtggacgcagaggtagaaaaactcgttatcgtcagcctagatttctgaatcgaaagaaagagaaagcttggttagcaccaagcttggagcatcgggttctgactactatgacctgggttaagagattaatcaaatattgtccaattgattctatagctcaagagttagtcagatttgatacccaaaaaatgactgaacctgaaatcagtggcaaagaatatcagcaaggcactctttaccaatacgaggttagagaatatcttctagagaaattcaatcgtacctgtgcttattgcggagtcaaagatactcccttagaagttgagcatatcaaagctaaatccaaaggtggctctaatcgagtatctaatctggcaatagcttgtgtaccttgtaatcaagctaaatctaatcttgatattaaagattttctggctggcaaaccatctgtactcaagcgaatattagcccaagctaaagcacctttgaaagat

SEQ ID NO: 889 - DNA, 268 bp, unidentified
  misc_feature 1..268: note = BBAY79_10002962 JGI
  source 1..268: mol_type = other DNA
gtcaggaatctcgtagatagcgactccgctttaaaaagacggagcttgaaaatctagtacctgaccagttcaagtccttcgaggactacgttaagagcaagagttaaagacctaccttggagtgcgtgccagccccaagctctagaaccgaaaagttaaacagatgtatcgagattaaatcagtgctttttggatagttaccgactcttaacatggacgaggcaaacataatcctttactggagaaagacgcaaaaatgtcaaacttt

SEQ ID NO: 890 - DNA, 1365 bp, unidentified
  source 1..1365: mol_type = other DNA
atggaaacaaaaatgcagaagttaggaaagagaaatacatacatacctactgatacttctctagtcggtagctctatggtcttgtctttaaacagagaggaaattcttagtgagcaagacttaaaaaccttttctaacaactccgaagagaaccattcccaacatacagggaatcagaacttgagagtatctgatattgtgtatgtgcaaaacatcaaggggcaacctttgatgccttgcaaacaacaaaaagcaaacaaattactaaaacaaggaaaagcaatagttatcaaaagaaaaccattcactatacaactaactattgcaacaggagaaaccacgcaaccaatcactctcggcatagatgcaggaagtaaagtgattggtttctcagcgataactgagacacaagaattggtgagtggtgaattagaactaagacaaaatgtgagtgaaaaactaatagagcgagcaatgtatagaagaggaagacgtaacaagttatggtatcgagaaccaagattcaacaaccgaaaacgagaagaaggttggctagcaccaagtatacaacataaacttgacacacaccaaacattaattaacaaaataacaaagttgttacctattaacaacatagtcgtggaagttgcaaagtttgacacacagaaactacaaaatgcagacatagaaggagccgagtatcaacaaggtcaaatgagcggttataataaccttagagcattcatatttacaagagataaatacacttgtcaaatatgcaaagagcaaggaggaatacttgaaacacaccatattattcagagaaaagatggtggtagtaatagacccgataacttagttacattacatttaaagtgccacaaagattttcactcaggaaaaatcaaacacaaatttactaaaccaaaaagtttcaaagacacaagcgttatgaacaatgtttggacaagattagttgataaaaacaattacgaacacacgtttggttacataacaaaagaaaacagacaaaaacttgaattagaaaaatcacacgtaaacgacgcattcatcatagctggtggaagtaatcaaacaagatgtataatcagtaatttgaagcaaataagaagaaacaatcgttgcctgcaacttaacaggaaagggtttaaaccaagtattagaaggcagagatacaaaatacaatcaaatgatttagttaaatttgacaacaaaatttatacatctaaaggtgtgtttaacaaaggaacttgggttaaattaacagatgatttaggaaatacaattaacaaaaatattaaatgtgtagaggtaacaaaatatggaaaaggattacaaatatga

SEQ ID NO: 891 - DNA, 272 bp, unidentified
  source 1..272: mol_type = other DNA
gtcaatcacccctccctgaaggaaggggcttgagccgtgaggtttgagagcaattggttgattaggaggcaaagatggaaacaaaaatgcagaagttaggaaagagaaatacatacatacctactgatacttctctagtcggtagctctatggtcttgtctttaaacagagaggaaattcttagtgagcaagacttaaaaaccttttctaacaactccgaagagaaccattcccaacatacagggaatcagaacttgagagtatctgatatt

SEQ ID NO: 892 - DNA, 1137 bp, Nocardiopsis sp.
  source 1..1137: mol_type = other DNA
atggctacgttccgcacaggacgaaaggcccaccctggcgtgcttcctcagcgccaggccctggaatccgcgccagctgacactccccggatcgggaacgaaacagggcacggagaccaccggcaggtggtacccggtgcggaacatggtcgaggggagaccggtaccgcctcacctggcggttccggtgtcacccccgagccctgcggggccgcggagaagggccgtgaggcccacaccacccacccctacgtgttcgtcctcgacaaacacggcacacccctgcagccctgcccgcccgcacgggcccgcatcctcctggcgaagggccgggcggccgtccaccggcacacccccttcaccatccgactcaaggaccgcaccgccgccgactcccagatcgacggcgtcgagatcggtgtcgaccccggctccaagaacaccggcatcgccgtgttcacggaagaagccgggcagcgccggggccggtacagcatccagctcgaccaccgcggcgcgaccatccgcaagaagatgggccagcggtccgcctaccgcaggcgccgccggtcggcgaacctgcgccaccgcccgccccgattcaacaaccgcacccgccccaaggggtggttggccccgtccctgcgacaccgaccggacaccaccatggggtgggtgcaccggctgacccgactcgctcccgtgcgcgtggcgcacgaggtggaaccggacccgcaaccagctgcccaagtcccacaccctggacgcggtggcggtcggcaaggtcgaggcgatcaccgagaccgtggacacggtcctggtcgcggggtgcacgggccgtggatcgtatgcccgtacccgcaccgaccggcacgggttccccggctgcggctgccgcgtaccacgcggttcttcgggttcgccaccggcgacctggtccgcgccgccgtgcccaccgggaagaaggccggaacccataccggccgggtcgcggtgcgcgcctcggggagcttcaacgtcaccaccgcccgcggcaccgtccagggcgtcaaccacaggcacgtccgcctgctccagcgagccgacggctacgcctacaccacccggaaggagaagggcgtttcctcccggccctga

SEQ ID NO: 893 - DNA, 298 bp, Nocardiopsis sp.
  source 1..298: mol_type = other DNA
gtaaagggatcctggtcctgaaagaccgggctttcaacccgcgtggttgagggccgcctttaccagacccagccatcacccatgaggaggtgacctcgatggctacgttccgcacaggacgaaaggcccaccctggcgtgcttcctcagcgccaggccctggaatccgcgccagctgacactccccggatcgggaacgaaacagggcacggagaccaccggcaggtggtacccggtgcggaacatggtcgaggggagaccggtaccgcctcacctggcggttccggtgtcacccccga

SEQ ID NO: 894 - DNA, 1626 bp, Streptosporangium sp.
  source 1..1626: mol_type = other DNA; strain = caverna
atgactacgtttcctgtgagtgagaagacccaccaagccgtgcttcctcagcggcttgctctggaatcggtgagagcagacaaccccgagggtggggacgaaacggctcatcgacccccggctgtgccgggcactggcatggaacatgggcgaggggagatcggttcgggcggcacccgcctggaccggcgtcaccccgagggtgcttcggcgtctgagggagcggaccgtgaggttcacccggccgtgttcgtcctggacgcacacggccaatcgctggatccgtgccacccggcccgtgcccgtcgcctgctggcggcgggtcgggcggtggtggcccggcacaccccgttcgtcataaggctcaaagaccgcacggtagccgactccgccatccagggtgtgcaggtcagcatcgaccccggcagcaaacacaccggcatcgcgatattcaccgaatacggcgggagccggaccggcgtgtacagcgtgcagctcgaccaccggggtgcgcagatccgagacaagctcacctcgcgggccgcattgcgccggggccgccggtcgcggaacctgcgctatcgcgcgccccggtttaacaaccggacacggccgaaggggtggctcgcgccgtcgcttcgccaccgcgtggacaccaccatgtcctgggtgtcgcgcctgacccggtgggctccggtcaccgccatccacgtggagaaggtcgccttcgacacgcacgccctgtcggcgggtcatccgctcgaaggatcgcaataccagcagggcaccctcgccggatacgaggtgcgcgagtacctgctggagaagtggggtcgcacctgcgcctactgcggcgcccagaacgtcccgctgaacatcgatcacctccacccgcgctcccggggcggctctgaccggatcagtaacctcgtcctggcgtgcatcccgtgcaaccaggcgaagaacgccactccgatcgaggagttcctgaagagcaggcccgcgctcctggcgaagatcttcaagcgggcgaaggcgtcgttgcgagacgcggcggcggtcaacgccacgaggtgggcgttgtggcgggcgttggacgcgaccggcctatccgtgactacggcctcgggcgggcgcacgaagtggaaccgctcgcgcactggcgccccgaagtcgcacacgctcgatgcgctgcacgtcggtgacctggagacggtgactgcctggccgtccatggtgttggtggtgaaggcgaccgggcgcggcacctattgccgtacccgcaccgacgcctacggctttcccaggctgcggctgccccggatcaagcaggtcaaggggttcaccaccggcgacctggtccgcgcgaacgtaccgaatggcaagaaagccggggttcacaccggtcgggtcgccgtccgctccaccggaagattcaatatcaccacgcggcatggcaccgtccaaggaatcggccaccgccacattcggctactccaacgagccgacggctacggctacaccactcaatcagacgcccggactattccgtgtttcctcccggccctgaaggaccgggtttccacgctggaggtaatcgatgacacttccggcatctccccatga

SEQ ID NO: 895 - DNA, 303 bp, Streptosporangium sp.
  source 1..303: mol_type = other DNA; strain = caverna
gtcaacgaccccggcctgaaggccagggcctgaggtgccgcattgtgcaccgatggccccgcgttgaccagccccagtcatcagctcaaggaggtgccttttgatgactacgtttcctgtgagtgagaagacccaccaagccgtgcttcctcagcggcttgctctggaatcggtgagagcagacaaccccgagggtggggacgaaacggctcatcgacccccggctgtgccgggcactggcatggaacatgggcgaggggagatcggttcgggcggcacccgcctggaccggcgtcaccccga

SEQ ID NO: 896 - DNA, 1434 bp, unidentified
  misc_feature 1..1434: note = Ga0307928_10027040 | JGI
  source 1..1434: mol_type = other DNA
atggtaacttttcttattgatggaaagaataacatactgcacccaacaaagaaatcagacatgatttatcgctggctgcgtcaaggtaaagcaaaagtactgaaaggtggtcttaaaccaggacaaccattattagtacaggtatttaaaacatttatgaaaccaacaaaatgtaactgtgaattcagaatcggaattgatcctggatacaaacacattggttactgtatttataaaatagatgtggagaaacagacaataattgcattaatttctggagaagttgaaacaagaacttcagaaattacaaaaaatatgttagaacgaaagatgtatcgccaaaataggagacataacagaagaaaaaatgttaagagaaaatttaactcatgtaagtttcgaaaacctgtatggaaaaacagagcaaaacacaagtttcaaccaacacactggcatttgattaactctcacaacaatctcttaaagtggatcttcgacagaattccatttgaacagagtaaattacatatagagtacaatacatttgatatacataaagttatcaatccaagcatttacaaatggcaatatcagaaaggtccacagtacggatttgaaaatgttaaatcatatgtacgatatcgagacaattataaatgtcaaatatgtaacaaaaatgttggaaaagaaatgaatcatgtacatcacattatacatagaaatgatggtctaaatgatcggcctgagaatttgattctattgtgtactaaatgtcatgatgctgttcatgctggaagagttgcatgtccaatatcaacagcaaaaagtttcagagacatgggtgtattaaattcctgtatgaaatatttatttgaagagtatgaaaatgtaatttcagtacaagatatttatggacacattacaaaaactgttcgaaagaaatatggaattgaaaaatcccatgcaaatgatgcgaaagtaatcgcgttatgtgattcaaatgggtttaccgaagagttcagagagtatgattggagtgattctaatattgttataaatttcaaacagagcagaaggcatgttcgaaattgggtacagagatatgaggatcgaaagtattacatgattggaaatccatattgcgatgcatggaatagaagaaaacgatctggacaggagaaaatgagtttgaaagagtttcgaaagttatatccgaaagaacaactgaatgcgaaacctgggagaacaatatatcgaaaaaataacagaaatatcttattcaaacctggtgatataattaattgttcagaaggagttgatactattaaaggctgggcatctacacaacataaagttgttggagaacgccttggacgaattcgacaaggagattgtgaaaaagtgttaaacagttgtggaatgtgtattgtttaa

SEQ ID NO: 897 - DNA, 313 bp, unidentified
  misc_feature 1..313: note = Ga0307928_10027040 | JGI
  source 1..313: mol_type = other DNA
tcaagtaccgggcgcagagcacccggcttgggatgagcgcagagcgcttatgctaacgccgagaactttgcttctgggcttgaacagacactctgaccagatgttcaccctgagataccactcccagtttcaggctctggaggtaaccagtccttattgctgaccagtaggtaacgaagatcagtattacatctggccaagtcgagggagaccaagtcttcataaggagatgccgaccaatggtaacttttcttattgatggaaagaataacatactgcacccaacaaagaaatcagacatgatttatcgctg

SEQ ID NO: 898 - DNA, 1329 bp, unidentified
  misc_feature 1..1329: note = Ga0209749_1010998 JGI
  source 1..1329: mol_type = other DNA
atgagagtactggttttatcaagcataaaggatcccctcatgccctgccatccggcacgggccagggagctactaaaaaagggacaggctgcagtattcaggcagtacccctttacaattatccttaaaaacaggcaggcaggtatttgccagccctttgaactgaaaattgatccaggcagtaaggctacaggtatgacgcttgttgctgattgcaaaaagggttatagggtcttctgggcctctgaagtaactcaccggggtcaggcagtcaggagtagtcttgcggaacgcagggcaatacgaaaaaaccgccgtaaccgcaaaacccggtaccgagctccccgcttcttaaaccgcacaaggcctgaaggctggttggcaccatcgcttatgagtcgtgtgtacaatatgcaaacatgggcagcacgccttataaaagtgtgccctgtaacagacattcatcttgaactcaataaatttgacacccagcttatggagaatcctgagatcacaggtgttgagtaccagcagggcactcttgtcgggtatgaaatcagggaatatctccttgagaagtggggaagaaaatgtgtgtattgtggtaaggaaaacgtaccccttgagattgagcatattatacccagatcaagaggcggtagcagtcgaataagtaatcttgcccttgcttgtaaaacatgtaacaaagataaaggcaacatgacagccgaagaatttggttatcccgaagtccagaaagcagcgaagctgccgctaagggatgctgcagctatgaacgcaacacggtatgctataggcagggcgctcaagcaaacaggtctttatgtggctttctggtctggaggaagaacaaaattcaaccggattagtcaaaactacccgaaagagcactggatagacgctgcatgtatcggagagacaggagacagggttattatccctgccgggacaaaacctttaaatattactgcagccggccatggcaacaggcaaatgtgcgggacaaataaatatggtttcccgatacggcacaggacaagagataaaaagtattttggtttttgtaccggagacatagcaaaagcaatagtgccaaaaggaaaatatgtcggtacttatataggtagcatagccataagagcatcaggatattttgatataaagaatggagcgggaaagcgaattgtacaaggaatttctcataaatattttaaaacagtccagcattttgatggatacagatatgagacaggcaatgcattcctcccggcaataaattgccgggcttcctgcgtggaaggatcgtga

SEQ ID NO: 899 - DNA, 282 bp, unidentified
  misc_feature 1..282: note = Ga0209749_1010998 JGI
  source 1..282: mol_type = other DNA
gtcaactacccgggttttaaaacccgggcatgaaagagagttcacataattctcttcatgccccatgttgaccaggtacagccacggatcataaggtctatggggctacgttattccggtcatgacaccctgaagtgcttgccagctttaggctctgtcgtcaggcattaaacaggcataaggggtttagaccagtgtgtctgacacaacaagccggaataacattaccgaggcaaacattaccgccgcaaggcgagaacaaggagtaatctttttatgaga

SEQ ID NO: 900 - DNA, 1284 bp, unidentified
  source 1..1284: mol_type = other DNA
atgtccaatgttttcgtcttaaacaccaataaacagcttcttaaccctatccatccaggtcgggcaagaatgctgttgtctcagggaaaagccgctgtttttcgacgctatcccttcaccttaatactgaaagaggaggtgttaaatcctcaagttgaaccactccgcatcaagatcgaccctggcgctaaaaccagcggactagcaatagtcaacgattgcacaggcgaagttgtttgggtagccgaattgcagcatcgcggttttcaaatccgggatgctttaacctcacggcgtcaactccgacggtcacgtcgcaatcgcaaaactcgctaccgtcaaccacgctttctcaatcgcacccgaccaaagggatggttaccaccgtccctcaacagtcgagttgctaacatcctgacttgggtcaagcggctgtctgcgctatgccaaattacagccatatctcaagagttggtaaggtttgacacccagcagatggaaaatgcagaaattagcgcaattggttaccaacaaggcacgttggctggatacgaaatccgtgagtttctgcttgagaaatgggatagagcctgtgcttactgcggcgcaaaagacaccaagcttgaaattgagcatatccaacctcggtcaaaaggcggttccaatcgtgtcagtaatttgtgtctagcttgtgttccttgcaaccagaaaaaaggtaaccaggatattaaggagttcctcaagggtaagtcagagctactcaagcgaattttggcacaagctaaaagacccttagctgatacagcggctgttaatgcaacccgatggaatttgtatgaaaacctcaagaaaacaggcttacctgttgaggcgggcacaggtggtcgcaccaaatacaaccgaagcttgcgaggtttagagaaaacccattattgggatgcggcttgcgttggggcttcgacaccagaacagttaatcacatcagggattaagccaatactcattgctgccaagggtcatggaacccgtcaacaatgccgcactgacaaatgggggtttccggtgcgttactgctctagaaccaagtttcacaaaggttttcagacgggtgacatcgttaaagcagttgttacctctgggaaaaagattggagtttacgttggtcgtgtagccactcgtgccacgggtagtttcaatatctcgacacctgacgggctaactcaaggcatcagccacaagtactgcatacacattcacaaaaaggatggttattcctatgtatag

SEQ ID NO: 901 - DNA, 254 bp, unidentified
  misc_feature 1..254: note = Ga0376086_0000584 JGI
  source 1..254: mol_type = other DNA
gtaaactacccgccaccaagctgagtacagctatggtgggggcttttaaaaaaaagtccagagtttacccgactaagtaccttgtgtactacgttttagaagccatcacaccctgggatacgaagccagtcccctgctctgtggctgacgattaaacaggcatatcgggttgaagccagtgtcgtcagcgcgacaaacttctaaaacattgtcaaggctaacattacccgcaaggagggacaggaatgtccaat

SEQ ID NO: 902 - DNA, 1587 bp, unidentified
  source 1..1587: mol_type = other DNA
ttgaccagcgggcctggtctccaggaccaggcagacgttgcacacaggttcaagacccaccgtagagcgcttcctcaactctacgctctggaagcccaagcagcagacaaaccaacgggtggtacgaaacgggtttgggcgcaacgccgatgtgcaacagccgcgaggggagattccgcactatgtgcggaacgttacggagacggatgcttttatccgtcaacggatttacggaacctttacgggttccacctgtttggaggtattgtcatgtatgtgttcgtactggacaagcacaagaagccgctgacaccgtgccgcccgtcaagggcgaggcatctgctcggctcggggcgggcggtcgtccacaagcgtttccctttcaccatccgtctcaaggaccggacggcggaagagagcgttatcaaacctgtccgtgtcaaggtcgacccgggcgcccggttcaccggaatagccattgtccgggaggacaggcaaggtggaccccgtctgattgccggaatcgaactggaacacagggggaacgctatacgagacaacatgacgaagcgggcgggctaccgccggagacggcggagcgcgaacacccgctatcgtgccccgagattcgacaacaggcgaagaccggaaggccggtttccgccgagcctgcggcaccggatcgacacgaccgtctcgtggatgcggcggcttacacgcatagcgcctgtctccggattcagcgtcgaatcggtcaagttcgatacgcagaagatgttggacccggaggtttcgggaaaggagtaccagcagggagagcttgagggatacgaggtgcgggaatacctgctggaaaagtggtgtcgcaagtgcgcctattgcaatgccgggaacgttccgctgcaggtggagcacatcgtaccgagagcgagaggcggttcggacagggtgtcgaacctgacgctggcgtgcgagaggtgcaatcgggccaagggagcgcgtcctgttaaagagtttctgcatgacaaaccggcgcttcttggacggatacgggcgcacgcgaaagctccgctgtcctccgccgctgcggtcaactcgacccgcaacgcactctttggcgagatgcgtgcgtttggcttgccggtggagacggggagcggcggactcaccaagtacaaccgcacccgcctcgggctgccgaagagtcatgtgctcgatgctctgtgtgtcgggacagtctcttcagcaaaagttttaacagacagcgtcctccatgttcgctgtacaggacggggacgatactcacgaacactgacggacaaatacggattcccgagagcatacctccctcggggtaagcgctttttcggattcgccaccggtgatatcgtccggacggcggttccgaaaggaaagtacaaaggaacgtggacagggcgggtggctgtacgggaatctgggtggttcgcactgtccacagggaaaaatacgccagacggcaaaaaagagagggttaatgtcaaatgggatacctgcaaaatactggaacgaaacaatgggtacgaatacagcgtaatagcggtgtag

SEQ ID NO: 903 - DNA, 276 bp, unidentified
  source 1..276: mol_type = other DNA
gtcaattacccgccacctaaccgatgttaacgcctcggtttgaggtgggggcttgaaaaagcccagattgaccagcgggcctggtctccaggaccaggcagacgttgcacacaggttcaagacccaccgtagagcgcttcctcaactctacgctctggaagcccaagcagcagacaaaccaacgggtggtacgaaacgggtttgggcgcaacgccgatgtgcaacagccgcgaggggagattccgcactatgtgcggaacgttacggagacggatg

SEQ ID NO: 904 - DNA, 1365 bp, unidentified
  misc_feature 1..1365: note = Ga0310695_10017382 JGI
  source 1..1365: mol_type = other DNA
atgacagtattcgtggcagcaaaagacggtacaccccttatgccgactttcaatatcaaaaaggtacggcgtatgttaaaagacggtcgtgccaaaatctacgggtatagcccgttcacaatacagttacagtatgagagcacgactcatacgcaagaaattgaagcctgtgaggacacaggtgaccattatgtaggattttcactaaaatctaagaaacatgaatatgtttcagggcagtatgaccacttgacggatgagaaactgcgccacgatgatgcccgtaaactccgcaggagcaggcgaaatcataagcgctaccgcaaaccgaggtttgataacaggagacacctcatgccggaaggcgataaatggtttgctccatccataaggaataagatcaacaaccatttatccatactgcaaaagtatcataaagcctgccccataaaggatatttaccttgaatgcggctcctttgacacacagaccttacaggcggtagaggcagggcttcctgctcctaaaggtaaagattttcaaagaggttcaagatatggttacgatactttaagggaagcagtattcgcccgtgacggatacaggtgtatatgttgcggtaaaggtatagaggacggtgcggtactccgcctccaccatttaggttataagacaggcgaccacaccaaccgcatgtcggggcttgcgactgtatgcacaaaatgccacacaccggcagcacataaacctggcggaaaactttatgaacttgagccgaaactcaaacctttcaaagctgcgagttttatgacatcgatgaggttccagctcataaaagacgccaaagttttgcttccaaacacagaggtacacatatgctacggggcatatacaaaacgcgaaagattgtcgcgtcgaatcagtaaatcccacgccaatgacgcttattgcataggttgtttcagatcggcgcacaggacggatataaagcattataaaaaactccgccggaacaaccgcatccttgaaaaattttatgacgcaaaggttatagatgtaagggatggtacagcacataaaggtgcggaattatcctgtaaccgcacaaaccgaagtatttcaaggaataacgaaaacaatctccgtatataccggggaataaaagtgtccaaaggacacaggaacataagaacaaaaagatacgccatacgtcccggtgatatggttctttaccaaggcaaacgatataagtccaaggggttgcagcattatggcgaatacaccactttggaagggcataaggcggtcaaagtaaaagacgtaaaaatcattaaacacactggcgggtgggagacggcagcatga

SEQ ID NO: 905 - DNA, 439 bp, unidentified
  misc_feature 1..439: note = Ga0310695_10017382 JGI
  source 1..439: mol_type = other DNA
gtcaataaccccatctaaatgcattgcattatagatgaggcttgtaaaagaaaaggcttcgcgcctgacttttcaagcctgattgattagcctaagtccgtaagtcttcggaaactacggactacgttaccggtgaattcctgggagggcgaccgtttgtaccaggtaaacaggcactccggggtactccacaagccccgccgaccacttaggtggccggggaatgaaatacaatacacgacactgcggtctgtatttaaacatccgtgtaacagcggatatgcctgagggtagggtaagtgatacagacaataaaaccaccggataacattggcgatgtggacccgcccttttgggcagaaccccgggatgctttatatcccgggaagccgtaaggcaacttgttttaagaaaggaggcataagaataatttatgaca

SEQ ID NO: 906 - skipped

SEQ ID NO: 907 - DNA, 243 bp, unidentified
  misc_feature 1..243: note = Ga0197142_1000319 JGI
  source 1..243: mol_type = other DNA
gtcaagtacccccagctaaagctgggggcttgcgggagtagagcctagccagctggaaaccgcaagggcaaggaaagactagcctgcccaagcaacctgttctacagggggcgtttgaagggaactgaaccaactggacgtggcagtccaaaagacgtagcgaatgcttccctagtttgctacctctctgttggtcagtggcaaagggatgtacacactccgaaaggaggcttacttaacaat

SEQ ID NO: 908 - DNA, 315 bp, unidentified
  misc_feature 1..315: note = Ga0310136_007496 JGI
  source 1..315: mol_type = other DNA
atggtatatgttatttcaaaggatggtaaaccattaatgccaacaaaaaggcatggtaaagttagaaggcttttagaacaaggtcttgctaaagttgttagaagagaaccatttacaattcaactattgtatgatactacaacatatacacaacctgttgtagttggcgtagataatcgttcactgcataaagcaaatccaattaaaggtggaaaaagaccagtaaatactgtaaaggaagttagagggtttagaagattcgacaaagtaagatataaaaatcaaattggtataatctacgggttaagaatctct

SEQ ID NO: 909 - DNA, 255 bp, unidentified
  misc_feature 1..255: note = Ga0310136_007496 JGI
  source 1..255: mol_type = other DNA
gtcaactacccaccacctatagaggtggaggcttgcaaaagccttagttgactaccctcagccaggggaagttaatcttcctatcgggctacgttagactggtcatgacaccctgggatgctgctcaagttccaggctctgtcgtatgtacctaaacagtcctgaggggtagggacagtggtgcatgcataacaagccagtctaacattggggatgagcgcctaactcctaaccaaaggaggcttaccgcatatg

SEQ ID NO: 910 - DNA, 963 bp, unidentified
  misc_feature 1..963: note = Ga0181858_1003566 JGI
  source 1..963: mol_type = other DNA
atgaaaactgtgaaccgtgtgttggtcattgacaagcatgggaaaccgctcatgccgtgtcatcctgcacgggcgcggcaacttctcaggaaaggacgagccgtcatctaccgtcgttatccattcaccatcttgatcaaagaccgggaagtaaggaatgacgggaaagacgtccagccggtcaggctcaagatagatccgggctcaaaggtcaccggcctttcacttgtcggtgagttccaacgagggaagaccgttatctgggctgcggaactgcaccatcggggccagcagatccgtaatgcgcttgcggaacggcgggtacttcgacgttcacgccggtatcgcaagacacggtatcgtgctccacgatttctcaaccgccgccgcccggaagggtggcttccacccagcattatgagccgtgtgtgcaacgtgcgcacatgggtgtatcgcttgcagaagtttgcgcctgttacaagcctttcgatggaacttgccaagtttgatacccaaaagctgatgaatcccgagattcagggtattgagtaccagcaaggcacgcttttcgggtatgaggtgcgggaatatctgttagagaagtttggccgccgttgtgtgtactgtgacagggaaaatgtgccgctggaaatcgatcacgttattcctcgttcaaaaggaggtggtgatcgtgtctccaaccttgtcattgcttgccatgactgcaaccaggaaaaaggcaaccgttcactggaagaattcctggcgcatgaaccagaccgggccaaacgaatcaaagcggagcttgagacaccgctcaaagacgcggcggcagtcaatgcgacgcgatggactctctttcatcttctgaaagagacagggttggagcttgaggttggaaccggcggtcgaacgaagcgtaaccctcttaagccccgaaattggattggacagcctccctaa

SEQ ID NO: 911 - DNA, 266 bp, unidentified
  misc_feature 1..266: note = Ga0181858_1003566 JGI
  source 1..266: mol_type = other DNA
gtcaactacccccgtctgaagacggaggcatgaagcctcggagttgaccagcctcagccagggccaaaggccatcgggctacgttattccggtcatggcaccctggggtgcttgggccagctccaggccactgccgtccggcattaaacaggcatacggggttgaagccagtgtgccgggcatgacaagccggaataacattggcgaggcccacatgaccccacgaagggaggaagcgggtaaccgccatgaaaactgtgaaccgt

SEQ ID NO: 912 - DNA, 1284 bp, unidentified
  misc_feature 1..1284: note = Ga0137378_10000779 JGI
  source 1..1284: mol_type = other DNA
atggtctttgtactcgataggcacaaaaagccgctgatgccctgcacacccaaacgggcacggctcctcctggcgcgtgggcgcgctgtggtccatcgcctcaagccgtttgtcattcgcctcaaagatcggtgcgtcgaagattcggtgctgcaagccatcgcgctcaaactggatcccggcagcaagaccacgggcatggcgctggctcgtgtggaagagacagaggagggagaagtgcatcacggcgtgcacctctcagaagtgcagcaccggggaggggaggtccacgcggccaaacagagccaaaggaatgtccgtcgtcggcgccgcagcgccaatctgagacatcgcaagccccgctaccagaaccggcgcatccccaaaggctggttgccaccctccctgctgagtcgggtgggcaatgtgttcacctggacagctcgatatgcccgctgggcaccaatcacccggatcgaggtcgagcgagtgcgcttcgatacgcagttgctccaaaacccggaaattgacggagtgcagtatcagcgaggcgagctcgccggatgggaggtgcgcgcctacctgctcattaagtacgagtataggtgcgcctattgcgggaaaacgagcgctgccttcgagatcgaccacatccgtcctcgcagtcgcggcggctccaaccgtgtgtccaatctatgtgtcgcgtgtcacgactgcaatcaggccaagggagaaaggacggcggccgagtggaaacacccagaagtggaagccagagccgggaccccgctcaaggatgctgccgctgtcaacgcgacccgcttcaagttggtcgaggccctgcgagtgttcggacggcccatcggcgcgtggacgggcggacggacccgctggaaccgggcgagattcttgctcgagaagacgcacgccttggatgcgctgtgcgtgggggagatcgcgggcgtccgggcagggaagatcaagacactacgcatcacggcgatgggtcggggcgatcattgccgtaccaactggaccaaagcggggttcccgcgtggctacaagatggggcacaaacaagtcagaggtttcaaaacaggagaccgtgtgcgggccgttgtcccagccaggctcaagacggcgggcatccacgtcgggcgggtgcaggtgcgccaaagcggctcctttgatattgagacacgcgagaggaggattgcgggcgtcaatgcgaaatactgtcagctggttcagagaggagatgggtatgactattccctcgcctaa

SEQ ID NO: 913 - DNA, 312 bp, unidentified
  misc_feature 1..312: note = Ga0137378_10000779 JGI
  source 1..312: mol_type = other DNA
gtcaacgaccccacgcgtaaatgcgggggcttgtagtgggtctacaagctcgattcgttgtccagccccagttcctgatcccgcaggccgggagatgaaggaactccgttagatgggtcagggcaccaccgaacgcctcctcaattcggcgccactgccgcccagggttaaaggtcctcatcggggtggggacggtgctctgagcgcaacaagcccgtcgaacatggacgagaggagcggtgtgggaacgcctgcccacgcccgtcagtcagccccttacggggcctcgcaagaggaaaaggaagaagcatg

SEQ ID NO: 914 - DNA, 1350 bp, unidentified
  misc_feature 1..1350: note = Ga0247842_10000474 JGI
  source 1..1350: mol_type = other DNA
atgcagaagttattgagaagacggttaaccgacacacctacggatgtacaatcactcctagtctgtagctctgtggacttgtctttaaacagacctcaaagggtcagtgagcaagttttatcaactctcgataacaatcccgaaggagttcaacctgaatacacacaggggcttaaagccaacaaagtgtatgttttaagcattgagggaaaacctcttatgccttgtactccatgtaaagcaaagaagttattaaaaaacaaacaggcgatagttattaaaagattcccattcactattcagattaattttgaatgtgaaaatcaagttcagaaagtaacgctaggcattgattcaggatatgagaatatcggatttagtgctgtatcagaaacaaaagaattaatatcaggaacagtcaaacttgatggaaaaacatctgaaagattacaagaaaagaagatgtatcggagaggaagaagaaacaaactctggtacggaaaaccaagattccttaacagaacaagaaaagaaggttggctccctccaagtgttgacagaagatatcagacacatttgaatcttatcaacagactgaagaagattcttccaataacacaagttattattgaaacagctaaatttgatattcaaaaaattatgaatcctgaaattgagggcattggttatcagcaaggttctttatatgaatatcaaaacatgagagcttatcttatggctcgtgaacatggaaaatgtcagttatgtggtaaagattttaaaggaaaatcttcacatatacatcattgtaagcaaaggtcagaatcaggaagtaacagagcagagaatttagctatacttcacaaagattgccatatcaaattacataagcaaggtctgaaattatcaaaaccaaagagttataagcctaatacttttatgtccataattaacaaaaagtttagacaagatattccagatgtaaaaattacttatggaaacatcacttttgtgaataggaataatttaggattagaaaagagccatgtcaacgatgcttttgtaattgcaaatagaactatgcaggaaagaattaatccttggaacatagaacaaaaacacagacataatagagcgatacagcttaacaggaaaggttttaaaccttctataagaacatctgtgtacaagattcagccaaaggatttgatagcagttaatggacaagtgttttctgttgtaggaatacagaacaaaggttcttatgtaaaagttaaagattacccaaaagtcattcctacaaaaaatatagagagtatgtataatttcggaggtttagtatggaactaa

SEQ ID NO: 915 - DNA, 268 bp, unidentified
  misc_feature 1..268: note = Ga0247842_10000474 JGI
  source 1..268: mol_type = other DNA
gtcaactaccacgggaacaagccccgtggcttgaacagtgatgttcatggtaacagttgattagggagctaaaggaaactttatgcagaagttattgagaagacggttaaccgacacacctacggatgtacaatcactcctagtctgtagctctgtggacttgtctttaaacagacctcaaagggtcagtgagcaagttttatcaactctcgataacaatcccgaaggagttcaacctgaatacacacaggggcttaaagccaacaaa

SEQ ID NO: 916 - DNA, 1284 bp, unidentified
  misc_feature 1..1284: note = Ga0310696_10000167 JGI
  source 1..1284: mol_type = other DNA
atggtttatgtgttgaacaagtcgggaaccccactaatgccaactagacggtatggtaaggttcgccgtcttatcaaaaccggattagctattgtaattcagcaccaaccgttcactatcaaattattatatgatactcttaacaaagtacaatttgttaatctaggtgttgatgcgggaagtaaacatgttggcttttcggcatctacaacacaaacagtattgtttgaagctcaactagatttacgaaccgacatcactaaaaaaatagcaactcgcaaacaatatcgtattggacgacgctaccacaaaacacggtatcgagaagctagatttaataatcgtatcaaatcaaaacgacataattgggtagcgccatcaattaaaaataaaatcgatagccatatatattggattactcgaatatgttcttttttaccaattaaaaaaataataattgaagtaggacaatttgatactcaattattaaaagcaaatgataataatgaacttgctcccaggggacgtgactatcaaactggtgtgcaactcgccttttggaatacacgcgaatatatattataccgcgacaatcacacttgtcaatgttgcaaagggaaaagtggcgattcgatactgaacattcatcacattgaaagccgcaagattggcggaaatcgaccagataatttaattaccttatgtaaaacatgccatcgcaactatcacgctggtattttaaaattacctagtcgaataaaacgacccaaatcatatcgggatgccgctacaatgaatatgtttcgaaaccacatgtataaacaattaaaacaaatgcttgaaccaattattcaagtaaatgtaacatatggatatatcactaagcattgccgcattaagtataacctacctaaaacacatataatagatgctagatgcattagcgaacacccattagctaaaccgagttcaacatattggcgtatcaaaaaacgaagaaaccataatagacaattgcacaaatctaccattcttaaaggtgggttaagaaaaaataatcaagcaccatatgaagtatttggatttcgattatttgacgctgttaaatatcaccaaatgacttgttttgtaacgggacgccgtttaaccgggttatttgcaataaacaatattgataaaactatacgggacaattcaattagttataaaaaattatctcatatgtatcacactaattctaacctaatggaggaaatgatgtatcattcatctaataccaactaa

SEQ ID NO: 917 - DNA, 295 bp, unidentified
  misc_feature 1..295: note = Ga0310696_10000167 JGI
  source 1..295: mol_type = other DNA
atcaacggcccatagatgtataatctaaaagtgaatcttgaactctttgctctggataacacttttcgttgattagactcagtgaagcataataatatgctgaactatgttaaaaagaccatgacaccctgagatatttggccaagtctctcgccctgtcgaacgatattaaacaacccagatgggtaagggtagtgtatcgttcataaaaatctttttaaccttgtcgatggtcacccacagggattaatccctgcattacctattaaattaggtataaaaggatagcgaaatg

SEQ ID NO: 918 - DNA, 1437 bp, unidentified
  misc_feature 1..1437: note = Ga0257048_100529 JGI
  source 1..1437: mol_type = other DNA
atgaaaacagataaatttgtacttgttatcggcatgaatggtcttgggcttatgcctacaacaccacaaaaggctcgaattcttttgaaagaaaagaaagcttttgtaaaaagaaaagtaccattcacgatacaactatcctacaagacaggaagtgcaacacaacaaacaagattgggaatcgataccggttctcaaaatataggagttggcattactgacaatcaagaaaatgttcattctaaatcagaatataagttgcgttcaacaatggaaaaaagacagcttatagaaacaagaaagacttatcgccaaggaagacgatatcgaaaagtaagatatcggaaacctggctataagcctcatacaaaatatatctatgtaaaatgtccggtaaaaagaaatggtaaaatgacacactggatgaagtcgaaaaatgaatatggaactaacagatgcgaaggatggctaccaccttctgttcagcaaaaagttgaccatcatattcaaattattgacagatatcttgaagctttaccaataaatacaaaactgacaatagaaattggacgttttgatatgcaacaaatcaaaaatcccaatatttcaaatgaagaatatcaacagggacgcatgtatggctatgaaaatatgaaggcatatgtacttcataagtatggctatagatgccctgtatgtggacaaaagtttggaactgaaagaaaaaataagacgattgttctacctcaaatgcatcataagcatttcaagagcaaaggagctacagataacccggacgagtatatgcctgtgtgtgataaatgtcataatgcagcagctcataaaaatggtggagttctcgatgctataagaaaagctgaagctaaaaacattcgaggtatgagagatatgacacttatgaatatcgttgcctatcgacttatggattattataaagaagcatcatttacttttggaaacataacaaatgccgacagaaaagaattgaaaatgggtaaatctcattccaatgatgctgtgactatagcattacatagtgatattctttgcggaaatgtagaaataaatgatacagaaacaactatttattacaagcaagtcagaaagaaaaaacgttctcttcatgaagctacaccgagaaaaggtcgtaaacttccaaataaagaagctaaacgtaataataagaatacaaaagaagttgtttctaaaggaaagaagtattctttatacgacaaggttgtctataatgaacaaaatggatggataacagggtttacaggaacttcagcttatgtacaaacatatgatggagaatatctaattcctgtaggaaagaattataaacaaataagtctttcacaattggaattcgttcaaagaaataacaattggatattagaaataaaaagaaaatga

SEQ ID NO: 919 - DNA, 348 bp, unidentified
  misc_feature 1..348: note = Ga0257048_100529 JGI
  source 1..348: mol_type = other DNA
acaagtaaccgagcttgtaaaagcttggtctttagctgccctgcttcgtagggacgatgactagcctcagtttacataccacaattcgtaagctacgtttatagaatcaacactctacccagcgatgccctaactggtatgggttggagctctgtataagactgaaagtaaggttgccgcaactccatgcatcaagttctatagacattggcgaagggcaacgcataccgtcttgttgtgaagacaggagcgaatacgcagggatgcggatgagacagtgctgtactcatcatatcttttatataaataacaaaggaggcatagttcaaaatgaaaacagataaattt

SEQ ID NO: 920 - DNA, 1236 bp, Clostridium estertheticum
  source 1..1236: mol_type = other DNA
atggtcgaatattcttttgtagtggacttatctggcaacagattaagtccctgcaacaaaaataaagcatattatcttattcgtaaaaataaagctaaaatgcttaataaatttccaatggtaatacagttacaaaaaacagttaaggatgacaagaatgatgatgttaaaaattatcttggaattgatgatggaagtaaaaatgttgggctcggaataattcaaaaatgtaaaacaaaagttagaacaatttttaaaggaactatagaattaaggcaggatgtttctaaaaaaatgactgtacggaagggctatagaatgtatcatagataccataaaaggtatcgtaaaatgagatttaataacagaagcgcatctaaacgcaagaatagacttgttccaactatactacaaaaaaaacagtctatattaagggttgtaaataaactgttaaaatggactaagatagatgctatatatcttgaagatgttcttatagacataaggtctatggttgaaggtaaagctctatacaaatggcagtatcaaaagtcaaatagacttgacaataacatcagattagctgtatttatgagagatggctttaaatgcgtagactgtaattctaacaccaaacttcaaatgcaccacgctaaacccaaaaatagtggtggagcagatagtatttataatggtgtaactctatgcgaaaaatgccacatgaaaacttttggcaaagagttgctgatgatggatggatatttaactaagattaaaggtaagaatctatgtcttacacatccaatgcatgttatgcaaggtaaaaaatatctgcaagtggaacttgaaaaaatagcaccgatatctttgactacaggagctgatactgcaaatcatagaatagactggaatatagaaaaaagtcattctaatgatgctttagtggtttgtgacactgaaattaaagctactgatatcaacattaaagactggtatataagagctttacgtaagaaatcaaagggtgatacagatacgattattgatggatttaaattaagagattatgttaaatatacaaagcgaaatggcataagttatattggatatatcacagcattgtatccagttaagaaacagtttaacatgacaactaaagatgatattgtacttaaaagatacggattaaaaagtcttagccttatttcaagaccaaatagtatacggttttcataa

SEQ ID NO: 921 - DNA, 262 bp, Clostridium estertheticum
  source 1..262: mol_type = other DNA
atatacaaattgtaagaagtgaatgttgctttcaagcctaagtgagtgtagttttttgaaaaggaaatagcacgatgaactacgttagatgatcggttaaagacgtacctttagatgtacttcagtctgaagcactacgatagttagaaagaaactaacctaaggcattgttatggttagacacatcaaaactcaatacaccaccatttgacattggcaagaagaaaaatacccactaggaggatgactagagatggtcgaa

SEQ ID NO: 922 - DNA, 966 bp, Acidithiobacillus sp.
  source 1..966: mol_type = other DNA; strain = GGI-221
atgcgtcgtccgaaaaaagccccgataaccttgccgaggcacactttacccgcgagagcggagactgaaaaggtagcgacatgcagaacagagtattggtattggacaaaaatcggcaaccgctcatgccctgccatccggccagggcatgagcggttgctggaagggaaggcggcggtgttccggcgctatcctttcgtcatcatcctgaagcaccgggagggtggtgaaaagcaggaattggtggaaaaactggatccgggcagcaaaaccaccggcattgccctggtggcttcgttcgcccgccgtggacccaccgttatctgggcggccgaactggcgcatcgcggcgcggccattcgcaaggcgctggagcagcggagcgggcatcgacggcatcggcggggaaacctgcggtaccgggaaccccggtttgataaccggacccggcctgcgggctggttgccgccgtctctacagcaccgggtggacaccaccgggacctgggtggcgcggtgtggccgatgggcgcccgtaacccgcctctcgcaggagttggtgaagttcgatctgcaggccatggagaaccccgagatatccggaacggaataccagcagggaacactttggggctacgaagtgaaggaatatctgctggagaagtggggccggacctgcgtgtattgcgacgccgagatggtgcccctggaggtggatcatattcatccaaaaggtaagggcggcaccgaccgggcagccaatctcaccattgcctgccacgactgcaaccaggaaaaagatcaacagcccctggatctgttcctgaaaacgggcaagggacggcgccggcgcatgcaggccaacgccaaagcgttcgcgggcaaggacgcgaagaagatcgcgcaacggaagatccatgagggaacccggttgcagcggatacagcgtcaagcgaaagccccgctg

SEQ ID NO: 923 - DNA, 297 bp, Acidithiobacillus sp.
  source 1..297: mol_type = other DNA; strain = GGI-221
gtcaaccactccccctaaagccctaacgggttataggcggagcttgcgggtaaaaccaaaggctcctggttgaccaggctcagtcccagaataccgggactacgttattggggtcaggacaccctggaatgcgcgccagttccaggctctgtcggataaggattaaacagcaagctgggagtagtgcaagccgtgtccttgtggtatgcgtcgtccgaaaaaagccccgataaccttgccgaggcacactttacccgcgagagcggagactgaaaaggtagcgacatgcagaacaga

SEQ ID NO: 924 - DNA, 975 bp, unidentified
  misc_feature 1..975: note = Ga0105758_1004307 JGI
  source 1..975: mol_type = other DNA
atgccctgttcaccggcaaaagcgcggcttctgcttaaagagaagaaagctattgtgaagaggagaacgcctttcactattcagctgacgattgcaacgggtgagaccaaacagccggtgggtctgggcgttgatgccgggtacaaacatgtcggactgtccgcatcaacggacaaggctgaactttatgcatcccaagtcgaactgcgacaggacatcaccgatctgctctccgctcgtcgtgcgttacgacgggctcgcagaaaccgcaaaacgcgctaccgcgcgccaagattcaacaaccgcatccgcaccaagcgcaaaggctggcttgctccgtcggttgaaaaccgaatcaacgcgcacttgtcgcgcatagaagcggttcttcgactgctgccggtcacaaagatcaccgtggaaacggcgtctttcgacttgcagctgctgaagaatcccgacatttcagggaaagaataccaggagggagaacagctcggcttctggaacatccgcgagtatgttctttgcagagacgggcatgtttgccagcattgttacggcagatcgaaagacccggtgcttaatgttcatcatctggaaagcagacgtacgggcggagattcacccggcaacctgattacgctttgtgagacgtgccataaggcccttcatcgcggtgaaatcacgctgaaggcaaagcgcggacaatcgttccgcgcggaagccttcatgggaattatgcgctgggaggtgctgaatcgcctgaaggcgtcgcatcctgagctggaagtgaacaacacctacggctatcggactaagcacgcacggatcgcgaacgacatcgctaagtcgcattgtgcagatgctttctgcatcgccggcaacctcggcgccgaaaggctcggcgaattcttcttccagaagcagacgcgtcggaacaaccggcagattcataagctttccatcctcaaa

SEQ ID NO: 925 - DNA, 247 bp, unidentified; identical to SEQ ID NO: 779
  misc_feature 1..247: note = Ga0105758_1004307 JGI
  source 1..247: mol_type = other DNA

SEQ ID NO: 926 - DNA, 987 bp, unidentified
  source 1..987: mol_type = other DNA; note = Human gut metagenome
ttgaaaaaagaagccgcagggcaccggcaggggaaggactgccgccccgtccggtacggtccgccgtaccgggcagggatgccggacggaaggcgtaagccggaaaggaaacatatggtagcagttgtgaccagtactgggaagcccctgatgccgaccagtgcataccgggcacgtaagctcttgaaaaagggacgtgccgttatctttaaataccgtccgtattttaccatccagctcgtggaccgggcagacggggaagtacaggaagtggaatataaatccgacaccggatccgtccatgtggggatcagtgtgtgtacggagaaaaaagaacttttaagcgaacagcgtgaccttctggagaatgaaccggaacatcacaatgaccggaagaagaaccgcaggacacggcggaaccggaaacggtaccggaagcccaggtttgacaaccggaagaagaagccccaggagggccatgaaaaatggctgccgcctaccctcctccacaagatggaggtccaggtacggctgttcagggaattctgcagggttgtcccggtgacctccgcctgcttcgagatggggaaatttgacacacaggccctgaaagccgtatcgaagggggaacccgtaccggaaggggaaggataccagaagggggaacgctatggcacggataccctccgggctgccgtattcctgcgggacggacatacctgccgtttctgcgggcgttccgtaaaggacggggctatcctccatgtacaccatgtcggttactggaagggggaccggacaaaccgtccggcaaaccttgcctctgcctgtgagcagtgccatacccctgcaaaccatgggaagaacgggatcctgtacggaaaggaaccggagtttaagaccttaaaggatgcatcttatatgacatctgtaaggtggatcatgctggacgagatcaaaaaagccgcccccggggtccaggtgtcc

SEQ ID NO: 927 - DNA, 409 bp, unidentified
  source 1..409: mol_type = other DNA; note = Human gut metagenome
gtcaattacccacggccatatctccctccgggagaatgaccggggcttgcagaaggaaagataacttttgttatccggaatgacgtaagcctggttgattacttcaggccagctctgtatgtcagcggccccggctgctgaaactgcagggtaacggctccgttataaaggaatatataggcaccaggggatatcctccacgtcccacttgctctgcggcctgctgttaaacatccctttttgggtacggggaagtgtagccggcataaaccctttataacatcaagtatggagaacacttgaaaaaagaagccgcagggcaccggcaggggaaggactgccgccccgtccggtacggtccgccgtaccgggcagggatgccggacggaaggcgtaagccggaaaggaa

SEQ ID NO: 928 - DNA, 1347 bp, unidentified
  misc_feature 1..1347: note = Ga0311351_10027103 JGI
  source 1..1347: mol_type = other DNA
atgacatcaaccaaagccttcgtggttgtcttagatgtaaatgggaaacccatcatgccgacttcaggcaagcgtgctcggaagtttctggcctctggccgtgctcacatggtacgagtcagaccgtgggtcatccagatgaacgacacctaccaagaagactgtaccctcacagacatgatcgtcaaggtagatcctggcagcaagtataccgatgtggctgtggcgatacagcctgagccaggtgtcttgaaggtcaccaacctgatagagttacagcatcgtggtcgactgattagcatgcagctgaccaggagagccgctttttgcagaaacaggcgaaatcgcaatactcgctatcgtgctgcaaggtttttaaatagaacaaagccaaaaggttggttagcgccatctttgatgcaccgtgtcatcacgacggtgaattggtgcaagcgtttgatgaagtggtacccgatcactgagctggctgtcgagtgtgtgaagtttgacatgcagaagatgcaagacgccagcatccaaggtaaggagtaccagcgaggtgagctcttcgagcgtgaaatgatggagtacttgcttgtcaagtatgaccatacctgcgtctattgtgataccaagatagcccgttttgaaaaagatcatgtactggcacggagtcaaaacggatcaaacaggatctcgaacttaatcttgtcttgcagaccctgtaaccaggctaagagcaacctgtctgtgcagacctttctggctaaagatcctgtcagattagctcgtatcttaaaacagctgaagacacctctcagagatgccgcagctgtgaacgctacgcgtaaccgactgttacttgaaatgatcaaacttggcttacctgtctctacagggacaggcgctcagactaaatggaatcgcagcagacttggtattcctaagacacatgcactcgatgctatatgtatcggagatgtaaaaaccgtatctgactggcaaagacctcatcttgaagtcaagtgctccgggagaggccggtatgctcggaccattaccgataaatacggcttccctcgacttctatgtgctcgtaagaaagtacatggaggttttcaaacaggtgatctggtaaaagcttatcgccctgtcgaaaagaaaagctactatggggtagcttctgtgcgagctagattagaattttctatagatttgggcttcggtagagatgctatttctgttagaagtaataattgtaaattactgcaaagagccgacggatacaaatattttctcaagacatacagctatatctttattcaaggaaaatgtattgtcagttag

SEQ ID NO: 929 - DNA, 269 bp, unidentified
  misc_feature 1..269: note = Ga0311351_10027103 JGI
  source 1..269: mol_type = other DNA
gtccgctacccactctgtaacaagggcaggatgctaaaacatcctagttgaccagtctcagtcctgaaaaggactacgtttgtatagtcatgacaccctggagtgcctcctcagctccttgctctgtcgtctgtcattaaaagtcccgggaggtagggacggtgtggcagacctagtaagctactcaaacattgacgagaggaatttttctaggccgttaaaggcctccgtttaaccaaggagaaaagatgacatcaaccaaagccttc

SEQ ID NO: 930 - DNA, 798 bp, unidentified
  source 1..798: mol_type = other DNA; note = Marine metagenome
ctgagtatttttatgagagtttttgtagttaacaaacatggtgaagtattgatgccctgtaagccgcgcaaggcgaagatcttacttcgtgagggcaaggcaacagttgttaagcgcaatccgtttacgatacagctcaagcatggctcaacgggctacaagcaagatttaacgcttggcgttgatacgggacataatgaagttggtatttctgtcgtatccgcaacgaaagaggtcttttctgctgtcgctaagatgcgcaatgatatatctgacaaaatgactacgcgaaaaatgtatcgccgtcaaaaacgtaataagttgcgctaccgagcaccacgctttttaaaccgttctgcgagcgcacgaaaagggaggctggccccttctattcaatggaaagttgatgcgcatattaaactaattaatcagcttaaatccttactgcctatcactaaggttatcctggagacaggtacgtttgatatggctaaaattaacaatccagacatcacaaacgcgcagtatcaacaaggcgttcagtatggatttgagaatgtaaaagcttatattctggcgcgtgatggatacaagtgccaaagtggaaagaaaggctgctgcgataagctacacgtacatcatatagtgtttagatcacaaggtggttcagatgcaccaagcaaccttaaaacactgtgcgaaaaacatcatgcagcgttacatgacggaaagtggtcgctggccgataagaaacacaagagtctgaaatctgccacgacaatgaacattattcgctca

SEQ ID NO: 931 - DNA, 268 bp, unidentified
  source 1..268: mol_type = other DNA; note = Marine metagenome
gtcaactacccgcagctaaagcaagcgggcttgtaaggtgacttacgagataggtcttcggactgaataggtgattagtctaagtcttaattgactacgttgtttaggttatgacaccagtggatgcctcccaagtctgctgctctgtcgcttggtattaaagagttcaacgactcggtgtgctaagtgcaaaaagcctttacaacattgacgatgggaatcaacccgcaagggattagttaatttttaactgagtatttttatgaga

SEQ ID NO: 932 - DNA, 1065 bp, unidentified
  misc_feature 1..1065: note = GENOME_ACESSION: mgm4799991.3 MG-RAST
  source 1..1065: mol_type = other DNA
atgcgcgtacctgtactcgattcaaggaagaaaccgttgatgccaactacttcagccaaggccagaatccttatcaaaactggtaaggcgaagccttactggaataagttgggcatcttctgtataatcctaacgagagaagttgaacccgataaccagcaaatagcagttggaattgaccccggatcttcattcgaaggttggtccgtggtcggtaccaaaacaaccatcttgaacggcatgtctgaggcaccaacttatatcaagaaggctgtggaagttcgcagaacgatgcgtcgcgcacgaagacacagaaatcttcgtagacgtgaagcacgatttgacaatagattgaggaataagtcttcgctaccaccatcaaccttagccaggtggaacgcgaaactaaggatattgaatcagttgctcaaggttctgcctatctcagatgttgttgtggaagatgttcaagccaagtccaagaagaattgtaagaagtggaacctatgctttagtccgattgaagccggtaagaattggttctatactgaaatcaggaaacttggactgaagttgtatctcaaacaaggatacgaaaccaagattcttcgcgagaagtttaacttgaaaaaatcttcgcagaagagtaagcagacatttgggtctcatgcagttgatgcgtgggtgttagcagccgatgtggttggcgcaatcaagccaacctgtttggaattgatctattggataccgattaggttgcacagaagacagttacataggttcgaaccaacaacaggaggcttgaggtcgtcttatggtggaacaaggtcaatgggattgaccagaggaacattggtcaagcacatcaagtacggcttgacctacataggcggaactctgaagaacagagtttcgttgcatagcgttaagacgggtaaaagggtgacacagggcgcaaagatccaggattgccggatcttgaccaggatatcctggcggggcacgctcctcccacgaataaattcgtgggtttccgctacccccgcgccccacggagtttcatga

SEQ ID NO: 933 - DNA, 230 bp, unidentified
  misc_feature 1..230: note = GENOME_ACESSION: mgm4799991.3 MG-RAST
  source 1..230: mol_type = other DNA
tccagatatcgttctgggttaaatttcccttcggagttgcgaagcaggcttagtgtttcgatcctacgaaacccatcggggtcggcgtgcccaggagaggtacgtgctagggaagtacacgaacgtccttgtagcccacaatgcttctgcaaagttttttgcctcctagtctactgtttagtctcgcttagccgttcacaagccccggtcttcaggccggggtagttgac

SEQ ID NO: 934 - DNA, 756 bp, unidentified
  misc_feature 1..756: note = JGI24025J20009_10017887
  source 1..756: mol_type = other DNA
atgcaaaaagtatatgtattgaacaaagacggaacacctttgatgccttgtaaagaagcaaaggcaagacatttaataagagatggtagggcaaaagtagtaaggcgtaatcctttcacaattcgcttgaattgggattgtgagaaaaacactcaaacaattactttaggagtagatagtgggtattcgaagattgggttttcagctatcattaatacccaagaattaatatcaggtgaagttcagttaaggaatgatgtatcaaagaaactatcagaaagaagaatgtatcgaagaaacagaagaagtaaattatggtatagaaaacctagatttgacaatagagtatcaagtaaaaagaagaactggttagcaccctcaattcagcacaaattggatactcatatcaaaataatatataaggttagagaaatattacctatttcagatactgtagtagaagttgcttcatttgatatacaaaagattaagaatccggatattcaaggtaaagattatcagaatggagaacaaaagggctactataacatcaaggcatatgttaaacacagagataattatacttgccaacattgtaaaggaaagtctaaagacaagattttgcaggttcaccatataagaggaaaaaaagaaagggcaacaaacagaccagaagagttaattacagtttgtaaaacttgccatgagaaacaccacaagggaattattactattgctgttaaacccatcaagaca

SEQ ID NO: 935 - DNA, 300 bp, unidentified
  misc_feature 1..300: note = JGI24025J20009_10017887
  source 1..300: mol_type = other DNA
gtcaatcgcccctccctaaaggaaggggcttgagtcgtgagacttgagggtaactggttgattagaaggcatagaaatatgcagaagttatcagtaaagttaaagaacacaccaggagatacttctctagtctcttgctctgtaagttctgtattaaacaaagaggaaactcttagtatgcagaacatagtactggctgataacaactccgaagagaacatacgcttatcagtgggcgggcctaaagccattacactgatatatatactaaataaaaaatgagaatctattatgcaaaaa

SEQ ID NO: 936 - DNA, 1443 bp, unidentified
  misc_feature 1..1443: note = Ga0182027_10092596 JGI
  source 1..1443: mol_type = other DNA
atgttaaagcagcagttaagttggagagatacatgcacacctacggatgcttcactagtccgtggctctgtggcttcgtctttaaacagacccgaaagggtcagtgagcgaagcctaaaaacccaatttaacaactccgaagtggaccaaccccgcaaggggagaccggtcttgagagtaccagtcctaaacatgcgcatgcaaccgttaatgccaacaacacccacaaaagcaaaaaaactgctacgacaaggcaaagcaaaagtcattcaaagagcaccattcaccatacaattgctttacgctactggcgaaacaaaacagccaataacactaggcatagaccccggatacaaaaccattggattcagcgcagtaaccgccaaaaccgaattaatagctggcgaagcacccctccgcacagatatacccaaattgttaaaagaaaaagcaatgtatcgacgacaaaaacgtagccgacaccactggtacaggcaagcacgattcaacaaccgaaaaagaacagaaaaacagctaccgccaagcctacaacaaaaacttgattcacacatcagactcgcccagaaactgcaaagaattctgccgataacaaaagtaattgttgaagttgcagcttttgacacccaaaaaatgatgaacacagaaatcagcggagtagaatatcaacaaggaacattacaaggctacgaaatccgagaatatctgcttgaaaaatggggaagaaaatgcgcatactgtaaaaaacaaaacatcccgcttgaaatagaacacataattcccaagtcaagaggcggaacagatagcgtcaacaatctcacgttagcatgccatgattgcaaccaacaaaaaaataatctgaccgcagccgagtttggatacctagaaattcagcagcaagctcaagaaacactcaaacaaacgccattcatgaacgtcataaacgcaagaatcaaagaattacttaattgcgaaatcacttacggttacgtaaccaaaaacaaccgcattgcacaaggtttagagaaaacacacgtaaacgacgctttcaccatagccaaaggcatagaacaacaacgaagcttaacatatattgtaactcagcgaagaagaaacaaccgagcactacaagttaatagaaaaggcttcaaaccatccataagaagaaaaaggcacatcttccaaagcggagatttagtcagatacaaaaaagaattatgtatagttaaaggcgtcttcaactacgggatatgggcaaaattgatagattccaaagaaaaaaacttcaattcaaacgttaaaaacttgaggttgattaagtacggcaaagggctacaatttcacgctaagcaattcagccccaacatgaatgttggggtcttcttgcaaaatttagataaagtcaagaattgtggaaacgcttaa

SEQ ID NO: 937 - DNA, 229 bp, unidentified
  misc_feature 1..229: note = Ga0182027_10092596 JGI
  source 1..229: mol_type = other DNA
gtcaactacctcgtcctgaaggacgaggcttgtctcgtgagggataaggtaagagttgattaggaggctttaaaaaacatgttaaagcagcagttaagttggagagatacatgcacacctacggatgcttcactagtccgtggctctgtggcttcgtctttaaacagacccgaaagggtcagtgagcgaagcctaaaaacccaatttaacaactccgaagtggaccaac

SEQ ID NO: 938 - DNA, 1326 bp, unidentified
  source 1..1326: mol_type = other DNA; note = Human gut metagenome
atgtcggtttctgtatttgttcaggacaggaagcaccggtctctgatgccgtgccgacccgctcgggcgcgaagactcctgaagtcgggccgagctcgcgtcgtgagactcttcccgttcacgatccgcttggtggatcggcttctcgaagattcttccgttcagtccatcctcgtgaagatcgatccgggttcccgtcagacgggcgttgcccttgttcgagcggacgagaaggctcatcaccatgcgctcttcttcgtcaatctcgttcatcgcggcgaatccatccgtgatgcgttgacggctcgccgaaactgtcgccgtcggcgacgcgggaatctccgccatcgtgccccgaggtttctcaaccgcacgaagccgcagggatggcttcctccgtcgcttcgacaccgcgtggataccgcaaccgcatgggtggcgaagctcgtcaaactcgcgcccgttacggggatcgtggaggagctcgtcaagttcgacgcgcagaagctgcagaacccggaaatctcgggcaccgagtatcagcaggggacgctcttcgagtacgaggtgcgcgagtatcttcttgagaagttcggcaggaagtgcgtttactgcggagcggagaacgttccgctcaacatcgatcacgtggtcccgaaggcgcgcggcggttcgaatcgcatctcgaacctcgtgctttcctgcgtgaactgcaaccaaaagaaggattcgcaacctgttgaggttttcctgaaaaatcgccccgaagtgcttgatcgcatcaagcgccggctcaagacttcgctcgcgcacgcggcaacggtcaatgcaacgcgttggtcgctcttcaacgcgctcaaggcgttcggtcttcccgtcgaaacgggttcgggcgcactgacgaagttcaaccgccatacgttcggcgttcccaaagagcactggcttgatgcgctctgcgcggggcgggtgaacggggtgcactaccccgaggggatgggcatccttcaagtccgttgtacgggacgggggagctatcagcgcacgcgggtcgacaagtacggcttcccgcgcggctgcttgacgcgccaaaaacgcgttcacggattcgccacgggcgacatggtgaaggccgtcgtcccttcggggaagaaggccggaacctaccggggccgtgtggctgtccgtgcgcgaggttgctttgtcattcagacgcctgaaggcaaggtggacggcatcggttggcgtcattgccgactgctttcttttaacgacggatacgggtatgcgtggcttcgccccgcacctcattcctcctccgtctga

SEQ ID NO: 939 - DNA, 289 bp, unidentified
  source 1..289: mol_type = other DNA; note = Human gut metagenome
gtcaatcacccctgcctgaaggcagaggcttgagcgatcaggccggttgaccagtctcagtgatccaaaaggagaactacgttgcagttaggttacaagacccgccccggggtgcttcctcagctccgggctccggaaacggcagaagcagacaagatttgggtattcacgaaacggtctgccgttgcaatgccggactgcaacattggcgaggggaattcaacttctttgttgatgtcacgggggtaaccccgattaaccgtaaggtttacaaaacatgtcggtttct

SEQ ID NO: 940 - DNA, 885 bp, unidentified
  source 1..885: mol_type = other DNA; note = Human gut metagenome
gtggtaaggcgcacgcctttcaccattcagctcacgattgcgaccggcgagtccaaacagccggtgagtctgggtgttgatgccgggtacaaacatgtcggactttccgcatcaactgaaaaggctgaactttatgcatccgaagtcgaactgcggaaggacatcaccgatctgctctctgctcgtcgtgcgttacggcaatcccgccgtaaccgcaaaacgcgctaccgcgcaccgaggttcgacaaccgcatccgcaccaagcgcaaaggctggcttgcaccgtcggttgaaaaccgaatcaacgcgcatttgtcgcgcatagaagcggttctccgactgctgccgatcacgaagattaccgtggaaacggcgtccttcgacatgcagcggctgaagaatcccgacatttcaggaaaagagtaccaagaaggtgaacagctcggcttttggaacgtccgcgagtatgttctttttagagatgggcacgtctgtcggcattgtcacggcagatcgaaagacccggtgcttaatgttcatcacttggagagcagacgtaccggcagcgattcgcccgacaacctgattacgctttgtgagacgtgccataaggcgcttcaccgcggcgaaatcacgctgaaggccaagcgaggacaatcgttccgggcgcaagctttcatgggaattatgcgccgggaggttttgaaccgcctaaaggcgtcgtatcctgagctgaaggtgcacgaaacctacggctacttaaccaagcacgcgcggattgcgaacggcattgtcaagtcacaatggtgcagatgctttctgtattgccggcaacttggaagccgaaaggcctacgggcgcgaaattcatttctttcccagtaac

SEQ ID NO: 941 - DNA, 247 bp, unidentified
  source 1..247: mol_type = other DNA; note = Human gut metagenome
gtcaactacctcggcctaaaggccgaggcttgaaaaagcctctagttgactagcctcagtctgtcgttttgaggactacgttggttgggaatgcacaggcaccgcgggatgcagatcctagtcccgcgctctgcggccgatggttaaaagctctgagaggtaggagcggtgctgtcggcttgaaaccccctccaacattggcgaaggatcacaaccggtcgaaagaccgaggagacaaaacttgaga

SEQ ID NO: 942 - DNA, 1020 bp, unidentified
  misc_feature 1..1020: note = Ga0066665_10044143 JGI
  source 1..1020: mol_type = other DNA
atgtttgtacccgttgttaatagcaaacacaaaccactgatgcccaccacagctgccagggcacggcgctggatcaagagcgggaaagccacaccgttttggaagcagggcatcttctgcgttcggctcaacgtcgagccttctgccagcaacatccaaccggttgctgtcggaatcgacccaggttccaaacgagaaggttacagcgtcgtgtccgccgcccatacgtacctcaacctgcaggctgataccgtggactgggtcatggaggcggtaaccactcgccgccagatgcgccggacgcgccgagggcgcaatactccctgtcggcagccacgctataatcgcttgcgaaacacaaagaagctcccaccttctacgaaagcccgctggcaatggaaactgcggctgtgccggtggcttatatccttatatcccatcgcagcctttgtggtcgaagatatcagggttcagacagcaggcaagcggcgatgggatcggagtttttctccgcttgaagtcggcaagcggtggttttatgcggaactagcgaggcttgccccagtgttgacgaaacaaggatgggaaaccaaggagcttcgagaccaacttggcctcaagaaaaccaacaagaaaacggcggaggtgtgggaggcccattgcgtcgacgcctggtgtctggctcattggtgggtaggaggcaaactcactccggacaatatccgcttgcttgcggtgacgcctttgcactggtatcgtcgacaattacaccgacgcgaaccagaaaagggtgggaaacgcaagccctacggaggcaccatgagtctgggcatcaagcgtggcaccctggttaaacacccacattatggacttgtgtatgtagggggcaccatgcgcgggaaactcagcctacatgcacccgagagcggtaggagactcacacaaggggccaaacactccgaatgccatcttatcaagctgttacgctggaggacgcgactcctcccaatccgcttatga

SEQ ID NO: 943 - DNA, 241 bp, unidentified
  misc_feature 1..241: note = Ga0066665_10044143 JGI
  source 1..241: mol_type = other DNA
gtcaagtaactgctcccccagaagggggcttgtgagcacgaacgactggccatcgggaggcccacaagaccaaacacgagactagcttgcccaagctctggctacagggcacttgaagggaactgaaccatctgggtgtggcagcccgcaagacgatacgaatgcctccctagtttgtatccgctctggtggtcagcagcgaagggaacgtagaaactccgcaaggaggcttatcgcatat

SEQ ID NO: 944 - DNA, 1185 bp, unidentified
  misc_feature 1..1185: note = Ga0216255_10000297 JGI
  source 1..1185: mol_type = other DNA
atgagagtttttgttattaatcagcatggtgaagcattaatgccttgctatccccgaaaagccaaaatactgcttagagcaggaaaagcgaaagttatttctcgttcaccttttactattcaactgaaatacggctcaactggttataaacaggatttaactctgggcgttgacacggggcataacgaagttggcttgagtgttgtttcagaaacaaaggaagttttttcagcggtggcttctatgcgaaatgatatttccaagaaggtgactgagcgaaaaatgtaccgtagaaacagaagaaaccgattgaggtatagacagcctcgttttctcaacaggaaagccagcaccagacaaggtaggcttgcaccttctgttcaatggaaagtggatgcccatgcaaaattgatccgtcagttaaaaatgttattaccaataacaaaggtggtattcgaaacgggtacgtttgatacccataagctaaaaaatcctgacattaagaatgagcaatatcagaaaggcgttcaatatggttttgagaatgtaaaggcttatgtcttaagtcgtgatggctataagtgccagtgtgggcaaaaaggatgtgcctctacattagaggttcaccacattaaataccgctctcaaggtggttctgatgcacctgaaaatctcattacattgtgttcaaaacatcataaggcactgcatgacggaaaattgagtctgaatattacaaagcacaaaagtttaaagtctgccactacgatgaatgtgatccgttctcagttgttgaagttgtttcctgatgcgatagaaacttttggttatgtgactaaagcaaatcgctatcaacatgacatcgataaaagtcatagcaatgatgcttttgtcatagcgggcgggtcttttcaggaaagagagttagagcggatggtgagctttaaacgtaagaataaccgttctatccagaagaaccgaaaaggtttttctccttccattagaaaacaacgatatgcaatacaaccaaaagacctggtgaattttaaaggaaagcaataccaggcggtaggcatacagaacaagggagcatacttgaaaatgtccgatggacttaaagctattgtaaaatccatgaagcaaattgaagtggtatttcatcaaaaaggtattatttacgcatga

SEQ ID NO: 945 - DNA, 283 bp, unidentified
  misc_feature 1..283: note = Ga0216255_10000297 JGI
  source 1..283: mol_type = other DNA
gtcaactacccactgagctgaagactcaggggcttgaatcgtgagattcgagatagcggtagcaatatcgtaataggtgattagcctaagtgcttagagcactacgttgttttagttatagcaccctcggatacctcccaagtccgttgccctgcttcttggtattaaaagagttcaacgactcggtgtactaagactgacaagctattacaacattggcgatgggaatcaacctcgtgagaggattagtttttaattaactatttaaggttttaaaatgaga

SEQ ID NO: 946 - DNA, 357 bp, unidentified
  source 1..357: mol_type = other DNA; note = Wastewater metagenome
atgttagtatatgttttaaataaccaaggaaccccaattatgccttgtagttcagctaaagctagaaaactactaaaagatggaaaagctaaaatattaaaaggaggaattagaaaattaaatcaagctaagtatgatatacataactttagattgtttgataaggtaaaatatgagaataaagaatattttatatttggtagaagaaatagtgggttttttgatattagaaatttaaaaggcgaaaaagtcaacaaaggtagtattggatataagaatttaaaattagttttaccaagaaaaaatatattaattgagaggagagaaggcaattcctcagctaagctaaagacttag

SEQ ID NO: 947 - DNA, 259 bp, unidentified
  source 1..259: mol_type = other DNA; note = Wastewater metagenome
ttataagtcaactaaccccttgctaaagcaagaggcttgaaaaagcctaagttgaccagtctttgtggggtttaaaccccactccgttattttagttatcataccttggtgtgttttgtctagcaccatgctctatgtgggcaacgtaaacagttctgagaggtaggaacagtcgacccaatgtgtatgtctcacatacaagctattataaccaatctaagacaacattacccgaaaggagattatatattttatgtta

SEQ ID NO: 948 - DNA, 852 bp, unidentified
  misc_feature 1..852: note = Ga0306925_10047498 JGI
  source 1..852: mol_type = other DNA
gtggcgtcagcggcgcacacgtacctcaatgtgctagcggatagcgtcgattgggtaaaagacgccgtggaaacacgtgccatgttgcgtcggtcccgcagaaaccgaaatacaccttgcagagcgaatcgcaaaaacagagctaaatgtccatttcctccaagcaccaaggcgcgctggcaacttaagctgcgcgtagtcgatcgctttcgccgtatgtaccccattaccggttatgcggttgaagacataaaggcatctactcacgggaagaacgaacgctggaactcggcgttctcgcctttggaagtaggtaaaaagtggatgtatgccgagttgcgcaaactcggcaccctgacgttaaaggctgggcacgagaccgcagaactgcgcaaggcgtttggtgttgtaaaaggtagcgataagatggcgttgtgctttgccgctcacaatgtcgattcctgggtattggccaaggatgcgttgagagcggcaggaacgccggagaacacgcagcttcttcactgtaaagcgcttcaattcagacgccgagcgctccatctccagaacccggcaaaatacggagtgcgtcgtagtcatgggggtacgctgagcatggggtttaaacgaggatcgctcgttaaacatccgaagcacgggctctcgaccgtaggcggaacgatgcaaggacgagtcagcctgcacagcttgcacgggaaaaggctttgccgaaacgcaaaacgcgaagaaacgacccttttaaaacgaacaaccttaatttttcaagccgtccgcaggaagggcattcctcccatgccggaaggggtgggtttcctgcctaaatctctatga

SEQ ID NO: 949 - DNA, 281 bp, unidentified
  misc_feature 1..281: note = Ga0306925_10047498 JGI
  source 1..281: mol_type = other DNA
gtcaacgacccacgaccaaagccgtgggcttgagggagcacgaaacaaacgatgcgaactgaagttaaatccgagactagcttggacaagattcgaggcgactcgggtcgtttgaagtcaactgagatcactgccggtggtacggcgcaagacatgcggggtgcttcccaagctccgcctcaatctgtggtacagcagcgaagggaatgcatacacagatacaggactggcttaccgcgaaatcctgtagttcccgtccttgctcaggatggcgaaccatt

SEQ ID NO: 950 - DNA, 813 bp, unidentified
  source 1..813: mol_type = other DNA; note = Human gut metagenome
atgacaaattatgcttttgtattagatactaatggtaaacaattagcaccaacaaaagaacaaaaagcatggtttctaattcgtaaaaagcgtgcaacattggttagtaaatatccaatggtaatacaacttaataaagaaattccagatgaagacatctgcaaagataaaattcgttttggaattgacgatggtggactccatgtaggtgttgcattagttcaaaaatgtcaaactaaaaataaagtattgtttaaaggaattattgaacaacgcaatgatgtaaaacatcttatggaagttagacgtgaatatagacgttatcatcgttatcacaaaagatatagacagaataggtttaataatcgtagttcttctaaaagaaaaggaagaattgcaccaagtattttacaaaaaagacaagctataataagagttatcaaccaactaaataaatggataaatattactgattattggttagaagatgtatctattgatattagagcattgacggatggttataaatcctgtggttggcaatatcagaaatctaatagattggatgaaaatattaggaaggctgttattcttagagatggttgtaaatgtatggaatgtggcagatcaaattgtaaattagaagtacatcatattaaaccaagaagattaaatggttctaatacattaagtaatcttattacgctatgtaaaacatgtcatcaaaaaacagagggcaaagaagaacagtatatgaaacattattttgatatattgaaatcttctgataagaaaaatcttaattacgcttaa

SEQ ID NO: 951 - DNA, 289 bp, unidentified
  source 1..289: mol_type = other DNA; note = Human gut metagenome
tagataaacatactcaaaagtggacacaataagtcttttgagcatggattaacaataggtctcaaggctaagtgactgctactatggaaacatatgttgcagatatgaactacgttgtatagtaaggtaaaaacacacctgtaaatgtaatcttcagtttgctgctctgtgagtgccaatcaagaaacatagctaatgtcctgctatgataacagagaaatacatgtcctctatatgacattgccaagaagaaaaattctccgcaaggaaggtgtcagaaatgacaaat

SEQ ID NO: 952 - DNA, 1443 bp, unidentified
  source 1..1443: mol_type = other DNA; note = Mine drainage metagenome
atggaaaagaggtgcgaaatggcggtttatgtactggacaaaaagaagcaaccgttgatgccgtgctcggagaaacgggcacggctgctactggagcgtggacgggcggtcgtgcataagatttatccgttcaccatccgtctcaaggaccgggtcggtggggcactgcagccgctgcggctcaaaatcggtccggccagccacaagaccggaatcgccctggtgcgcgaatccgagacggtggatccggtgacgggagaagtacaacgggtggagcacgtgattaacctgattgacctggagcatcggggcgggctgatcagcaagaagctggaacagcgttccaacatgcgtggcggtcggcggcaccggaaaacgcgttatcgtcccgcccggttcaataaccgcagccgtccggagggttggctgccgccaagtctgcagcatcgggtggacaccacggagtcctggtgcaaccgattaacgtctttggcgccgattacggcgatcagcaccatgctccaccggttcgatacgcagaaactacaggatcctgaaatatcaggcatcgagtatcaacagggcaccctgttcggatatgaggtgcgcgaatacctcctggagaaatggggacgcacctgcacctattgtgacgccgatgacaaacccttgcaggtggaacacatcctggccaaggcgaatggcggcaccgataggatcagcaatctgacgttggcctgcgagccctgcaaccaggagaagggcaagctgttcctgcccgagttcttgagtacgggcaaaaagcggttccgccgctttgaacggaacgcgcggcatttcgctacgacggggaaaggcaacattgatgcaaagaagctcgcagaacgcaaacagcacgaggtgacccgattggcgcgcatacaggcgcaggccaaggcgccactcaaggatgtggcagccattaacgctacccgcgccgccgtactgaggatgttggaaggcacaggattaccggtggagatcagcaccgggggtcgagccaaatggaatcgcacccggttcagtataccgaagcggcacgccctggacgccgcctgcatgggtcaggtggatcgtatcgaggattgggatcgtccctattggcgggtgcattgtgacgggcgtggtcagtaccagcgcaccaatctggacaagaaaggtcgccgtgttggttttttgccgcggcagaaacagcaccacggatttcagacgggggacatggtgcgggccgaagtggcgaatggcgtacataaaggtatccatatgggacgggtggccgtgcgttcgtcggggtcattcaagatgcgcacgaaaactggtctgcacgatggcgttaaagcggaagattgccggttgattcagcgttcagatgggtacagctattttcgggagcacgttgcatga

SEQ ID NO: 953 - DNA, 321 bp, unidentified
  source 1..321: mol_type = other DNA; note = Mine drainage metagenome
gtcaattaccccgccctgaagggcggagcttgcaaggcggtacgcaggctaggttgatcatggggaccgtgtaacgtcgtgagacgttggtagacgtttataacaggtcgtacagacgcactccgggatgctgcctcagttccgcgacactgcaaggttgggctcatgctgcggaaaggcaaagccgcgaaggaccaatcgtcaccgcaaggtgagagccggttatagaccccccgaggggagacatttgtacaagttgttaccgggcccgtaagggttgcaccccgcaagggcgttatggaaaagaggtgcgaaatggcg

SEQ ID NO: 954 - DNA, 675 bp, unidentified
  misc_feature 1..675: note = Ga0401356_0239 JGI
  source 1..675: mol_type = other DNA
atgtctaatcttgttttcgttctagacactaatataaaaccactcaatctctgtacaccgggggttgctaggggtttactcaaagccgcaaaagctaaggttttcaggaggtttccgtttacgattattctgaacaaaagtcctgatgtcttaaaacggattttggcacaagccaaacgacccttgaaagacgcagccgccgtcaactctacccgatgggctttgttgaatcggctcaaggaaatcgggttacctgtctcaacaggtagtggtgggaaaactaagtacaatcgcattcgtttgaagttacataagcggcactatatcgatgcggcttgtgttggggatgttgagcaattagaaattgcaacgaatcaaccattgctcatcaaagctacagggcatggaactcgtcaaatgtgtcgcacagataaatttgggtttccgagtcggtacgtccccagaaataagtttgtcaaatgctttcagactggtgacattgttaaggctgtcgtcacctctggaaaaaaggttggaacttatgtgggtcgtgtagccgtgcgaacaactggcagcttcaacatttcggcagctaatggattgattcaaggcattagccacaaatattgcagcctagtacatcggaaagatggataccaatacagcttcttctaa

SEQ ID NO: 955 - DNA, 244 bp, unidentified
  misc_feature 1..244: note = Ga0401356_0239 JGI
  source 1..244: mol_type = other DNA
ggctataagccgggggcttgaatgaagcccacacctgaccagaagacccgttgaaaactggtagccgttattagcaagagtttaagttctcaccttgggatgcgtgccagttccaagctctgaaacctcagcattaaacaggtctacaagggttaagccagtgtgttgaggatacgccacctaataacaacttcgaggcaaacgttacgagtttttcaggacagacgcaacaatgtctaatctt

SEQ ID NO: 956 - DNA, 1245 bp, unidentified
  source 1..1245: mol_type = other DNA; note = Human metagenome
atgccttgttctccggcaaaagcacgccttctgcttaaagagaagaaagctattgtgaagaggcgaacgcctttcactattcagctgacgattgcgaccggcgaggccaaacagcccgtgagtctaggtattgatgccgggtacaaacatgtcggcctttctgcatcaacggaaaaggctgaactttatgcatccgaagtcgaactgcggcaggacatcaccgatctgctctctgctcgtcgcgcgttacggcagtcgcgccgtaaccgcaaaacgcgctaccgcgcaccgaggttcgacaaccgcatcagcaccaagcgcaaaggctggcttgctccgtcggttgaaaaccgaatcaacgcgcacttgtcgcgcatagaagcggttcttcgactgctgccggtcacaaagatcaccgtggaaacggcgtctttcgacttgcagctgctgaagaatcccgacatttcagggaaagaatatcaggagggagaacagctcggcttctggaacatccgcgagtatgttctttgcagagacgggcatgtttgccagcattgttacggcagatcgaaagacccggtgcttaatgttcatcatctggaaagcagacgtacgggcggagattcacccggcaacctgattacgctctgtgagacgtgccataaggcccttcatcgcggtgaaatcacgctgaagccaaagcgcggacaatcgttccgcgcggaagccttcatgggaattatgcgctgggaggttttgggccgcctgaaggcgtcgcatcctgagctggaagtgaacaacacctacggctatcggactaagcacgcacggattgcgaacgacatcgctaagtcgcattgtgcagatgctttctgcatcgccggcaacctcggcgccgaaaggctcggcgaattcttcttccagaagcagacgcgtcggaacaaccggcagattcataagctttccatcctcaaaggcggcattcgaaagcgcaatcaggctccctatgagatcaaaggcttccgcctttttgacaaagttgcctgccagggagaagaaggcttcattttcggccgtcgatcatctgggttctttgatgttcggaaggttgacggaacccgaatttcggcaggcatcagctacaagaagctgcatctgctggaaaagagacgaacctatttaacagaaattcgaaaggaggaggtgcttcctcccctgcctgaaggcaggggtctccgcgcctaa

SEQ ID NO: 957 - DNA, 247 bp, unidentified
  source 1..247: mol_type = other DNA; note = Human metagenome
gtcaactacctcggcctaaaggccgaggcttgaaaaagcctctagttgactagcctcagtctgtcgttttgaggactacgttggttgggaatgcacaggcaccgcgggatgcagatcctagtcccgcgctctgcggccgatggttaaaagctctgagaggtaggagcggtgctgtcggcttgaaaccccttccaacattggcgaaggatcacaaccggtcgaaagaccgaggagataaaacttgaga

SEQ ID NO: 958 - DNA, 1326 bp, unidentified
  misc_feature 1..1326: note = Ga0213833_1005875 JGI
  source 1..1326: mol_type = other DNA
atgccaaaacaaaaacatagaaaccttgggcagcaaagagtccttgtgctttcaaacacaaagaagccgttgatgccttgccatcctgcaagggcaagacgcttcctgaagcaaggaagagctgttgtctatcgacgtttccctttcaccattttgttaaaagaccgtgaagacggctacatacaacccattgaatgcaagattgatcctggtgccaaagagacaggcattgcattcgtagcctctttcaagcgtgggaacgtttgcatttgggccgctcatcttgaacacaaagggtttcaagtcaagcaagcactcgaaaagcgaagacactttcgaagagcgagacgcaatcgaaagacccgtcacaggaaggcccgctttgacaatcgcgcaaggcccgagggttggttgcctccaagtctacaaagtcgtgtggataacatcacgaacttcatccgtaagtatcatcgctttgttgtcttcactggcttcaccgttgagcatgtcaagtttgacatggtgctaatgcaaaacccagaagtgtccggtattgagtaccaacagggaacgcttcatggttacaccgtcaaggaatacttgctcgagaaatacaagcgttcctgttgttactgcaacaaaacagatgtgcctctggaagtcgaacatgtcgtacctaagagtaaaggcggctcgaatcggattgcgaatctggtgttggcttgtcgcaagtgtaacgaaaagaaaggcaccaaggatattgaagtctttctcaggaaaaagcctgaacgcttgaagacaatcaaagcaggtctcaagaagccactccgtgcagcggctgcggtcaatgccacacgcaacaagattgttagagagcttcgagccttcggattgccagtcactacgacaacaggcgcacaaacaaaattcaaccgaaaggttcaaggctaccccaaagcacactggctcgatgctgctgtcctgggagaacaaggcgaatctgtcgaattactctctggttctatcttacacatcaaggccatggggagaggttcacggcaatcttgcaagccagataaacacggcttccctcgtacaaagccaaaggcaaaagcaaagaaagtcaaagggtttcaaacaggagacattgtcaaagctgttgtccctacaggaaagaaagtgggtacgcacatgggtcgtgtcgcagttcgaagtagcggctcatttaatatcaaaaccaaggacaaaaccatacaaggcatcggttatcaacactgtcagttattacacaaaatggatgggtacgcctatgactttaccgactga

SEQ ID NO: 959 - DNA, 330 bp, unidentified
  misc_feature 1..330: note = Ga0213833_1005875 JGI
  source 1..330: mol_type = other DNA
gtcaacgaccccatggctgaagccaggggcttacgagagtcagcccgtatgttgaccagggtcagtcgctcaaaggcgactacgttcgagtggaacatataggtaccgtatggttcttctccagccatacgctctacgatagatggttaaacggttacggggtgatgccagtgccatttgtagacaaaacccactcagaacattcccgaggagacctttacccgcgaaagcggtgaacgttagacctcaatcattgaggtcacttgataacaaggagttggcacaatgccaaaacaaaaacatagaaaccttgggcagcaaagagtcctt

SEQ ID NO: 960 - DNA, 1482 bp, unidentified
  misc_feature 1..1482: note = GENOME_ACESSION: mgm4547164.3 MG-RAST
  source 1..1482: mol_type = other DNA
atgacaccatgcccaaacacaagcaaggaggcatcaatgcaggaatacatttatgtgttggcgaaagatggcaccccattgatgccaactttaaggaaacgccacgttgagaaccttattaaacgtgacaaagcggtcagagtggaacttgtaccgtatgtcatacagctgacatatgagggccccaaagaaacacagccgttatatggaggtactgaccccggaaggaccaatatcggaaatgccgttatgaccaaaggcggggtagttgtgtacaaagaccatgtgaccaccagaaataaagacatagcaaaactgatggcggaacgaaaaatgcatcgccaacaatcaagacgaggtgagcgtctggcacgcaaacgtcttgccaaacgtcttgggacaacaaccaaacaccttgagagaaggattcttccagggtgtaaagaaccggtaatgttcaaagatattagcaacacagaagcacggttcaataatagaaaacgtgctcccggatggataactccaagtacaaggcacatgatacatactcatatcaatatgattaagcgaatctgcaaaatactgccggttacatattggacacttgaaacgaataaattttcattcatgttaatggaagacggaactgtacgtgggagagacttccagaatggacgacttaaaaactttactgatgtgtacgaatatgttgggaaccaacaaaatggaaaatgtatttgctgcggaaagccaatagaacattaccatcatatcgtaccaagacatagtggaggttcaaaccgtcctgagaacattattggcgtatgcaaaacatgccatgaggaaatacatactggacaaagagatatcacagccattggtgagcataagaaatatgcagcactttcggtattaaaccaggcgataccgttcattgaaatggaactatcaaaaatattcggtaataactttatgacttgtacgggatatgaaacatacgaactgcgtcaacgtttcgccattgcaaaagaccacgacaacgatgccgtatgcattgcatcctaccaggcatccccagattttatcgaggatacacaattaactcatcaagttatgcagttcagaaggcacaaccggcagagaattaattcacaacgtgaacggacatataagcttgacggcaaagccatagcaaaaaatcgtaagccaagatttgagcaaaaagataaggcgttgtctgatttaaatttgtcaccggctgaaatttcaaggctgacagtaataccaagtcgtcggtattacaacaatatggaccgacttatgccgggaaccgaattcttgtatgaaggtcaacgctacatcatgagcgggcagcactcgaacggttctttgctgagagcggtaggacaaggtaacagagagttcaaagcttccaaatgtcgtgtcataaaacaaaacaggggacttgtatacgtctcctaa

SEQ ID NO: 961 - DNA, 238 bp, unidentified
  misc_feature 1..238: note = GENOME_ACESSION: mgm4547164.3 MG-RAST
  source 1..238: mol_type = other DNA
gtcaataaccaatgactaaagtcacgggcttgtaagagctgtcatgtgcaattttagcatgttcgtgatggcggaagtggattattgagcagagctatgacccggtattcaccagtggatggaactagtccgctgctctggttaaccgggccgaggctaaggaaacagttttatggcatggaagagccttacaagctatgacaccatgcccaaacacaagcaaggaggcatcaatgca

SEQ ID NO: 962 - DNA, 1200 bp, unidentified
  misc_feature 1..1200: note = Ga0209345_10000187 JGI
  source 1..1200: mol_type = other DNA
atgttagtatacatactaaacaaaaataatcaacctttaatgccttgcaaaccagcaaaagcgtctaagcttttgagggagaaaagggcagaagttgtcaaaagaacaccttttactattaaattgaaatatggtagttcgggatatgttcaaaaagctatattaggaatagatacaggatatcaactcataggtttttcagctattaatgaaaaacaagaactaatctcaggtgaagttaaattagattgtatgatgcctaaacgcttacaggatagagctatgtacagaaaaagtagaaggaataggttatggtatagaaaaccacgttggagaaataggattggttcaaaaaagaaaggctggctacctccatccattcaaagaagatatgaaacacatttaaaacttatagaactgattaaacaaatgttacctatacataggattataatagaagtcgggaattttgatatacaaaaaataaacaatccggatattcaaggaaaagaatatcaacaaggcaatatgtatgaatatcaaaatattagaagttatcttatgagaagggaacatggaaaatgccaattatgcgggaaggaattttcaaaaacaaattcatcacatatgcatcatattataccaaaaatgaaaggcggtacagataaaacaaacaatctatctttactacatcaaaaatgtcatattagattacataagaaagggttgtataaccaattgaaaaaaaacaagcaatacaaagattctacattcatgaatatcgtcaaatggaaatataaaaaagatattgattgtgatataacttacggagcatatactttttctgatagggttaaaataggaatggagaaatctcatgtgaatgatgcttttataatagctaaaggtgagatccaatccagatgtcattcttttaatatagagcaaaaaagaagaaataatagatgtttacaagtgaatagaaagaaatttaaaccatctataagaaggaaaaggtataaacatagacctggagatttagttaaaatcaatggaaatttatacgaagttaaaggaatacattcctatggtactcggattagattattagattcatctggaaatattataaatatatctactaaaaaattagatgattggatatatcatcaaaaaactttgatatggagagcagcttga

SEQ ID NO: 963 - DNA, 250 bp, unidentified
  misc_feature 1..250: note = Ga0209345_10000187 JGI
  source 1..250: mol_type = other DNA
gtcaactaccctttactaaaggaaggggtttgaatggtaacattcaacgcaagagttgattaggaggcatgagtaattatgcagcagtttggaaatgaaatacatacacaccttggagatgcttcaccagtcccaagccctgtgatttgatattaaacagagattataggtctcagtgtatcagatttaaaaactttccaaacaactccgaggtgaatcaatccatggatagggagtatactttatgtta

SEQ ID NO: 964 - DNA, 1332 bp, unidentified
  source 1..1332: mol_type = other DNA; note = uncultured Clostridiales bacterium
atgttagtctatgtaatcagcaagggcggacagcccctcatgccgacatccagatgcggcaaagtccgcaggatgctaaaacaaggcaaggcaaaagttattaagcgctgtccgtttaccattcagctgctgtatgaacctgaaacagccgttatccagcctgttgaggtcggtgacgataccgggtcaaagcacaacggaatatcagcagttgcagtctatccggacggcagaacaaaggaagtctatgcatcagaggttcagatgcgtcaggacataacgaaaaatctttctgtacggcgtgagatgcgccgcgcaaggagaaaccgcaaaaccagataccggaaaccaagatttgacaaccgggtacgatccaagcacaaaggctggctgccgcctacagtggaaaacaagatccagacacatcgtcatgagctgctgtatgtgtgttcaatccttccggtgaccaaagtaacgatagagacagcatcctttgaccttcagaagctaaaggccgatctcgatggcttaaagcaaccggaaggcactgattatcagaaaggcgagcagttcggtttctggaacgtcagggagtatgtgttattcagggatggccatatctgtcagtgctgcaagggcaaaaggaaagatcccattctaaatgttcatcacattgagagcaggcaagccggcggcgatgcgccaaataacctgataaccctgtgcgagacatgccataaggcataccatgccggaaagatcaaactgcctgcggatatcaaacgcaaagcaactttccgggatgccacttttatggggatcattcgatgggccttctataacgtcataaaggacgaacttggcaccagaggcatcagtgtcaggatgacatacggctatctgaccaagaataccaggataacaaataaccttcaaaagacgcactgcattgatgccaggtgtatagcgggatatccggaggctgatccattaggctattacttctacaaacagaaaataagatgccacaatcgtcagatccacaagatgaccataggcaagcacggcatcaggaaagccaatcaggcgccttatctggttaaagggttcagacttaacgatatagttacagctaaaggcagtgaatggttcgttcacgggagacgtagtaaaggatcgtttgtactggcgacattaaacaatcagaagttggaaatctcaccatcaaaaataagatttgtttctgtttctgacacatatcttacagaaaggagaaaagcgctccccaccctccctatagaggaaggggtacccgcgcttgtgtgctcttga

SEQ ID NO: 965 - DNA, 314 bp, unidentified
  source 1..314: mol_type = other DNA; note = uncultured Clostridiales bacterium
gtcaatcacccaccacttaacctgacggtttgaagtgggggcttgcaaaagctctgattaactagcctcagtgcaacggcccggcgtaggccggattccattagcactacgttgtcccagtcacaacacctgcgagcgttatgcctaactcgctgctctgttgtccgttattaaatgttctgatgggtaggaactgtgtggcggatctaaaaagctctgacaacattggcgaaggcatcattacggcccggtatgtgccggcttaaagcgttaaacatacctattctacggaaaggagccgctatcagatgtta

SEQ ID NO: 966 - DNA, 1509 bp, unidentified
  source 1..1509: mol_type = other DNA; note = Sediment metagenome
gtgcgttgccagctccaggccctgtcgttcggcagtaaacaggcatacggggtcgaagccagtgtgcagcacataaaaagcctggataacattggcgaggcaaacattaccccgaacgggaggctctttatgagcaaagtctttgtgcttgataccaagaaaaggccgcttctaccttgccatcctgcgaaggcgaggaaactgcttaagcagggaaaggcagctgtgtttcgatactatccctttaccatcatcttgaaaagggaagttctcgagccagcactgcagccattgaggttaaaggtcgatcctggaagtaagatagccggtcttgcagtagtaaatgatgcaactggcgaggttgtgtttgcagctgagatccagcatcggggagatgagattaaagatagtctagatacccggcggacgctccgaagggcacgcaggaaccgtaagacgcggtatcgtgcaccacggtttttaaaccgcaggagaagagaggggtggttacctccttccctggagagccgggttgccaatgtggtaacctgggtaagtcgtataagaagatactgtcctatccaatccatctcgatggagctggcaaaattcgacctgcagaagctggagaatccagaaatccagggggttgagtatcagcagggaaccctctttggctatgaagttaaggaatatctgctggagaagttcggacacaagtgtgcctattgccacgggaaatctggggacccaatgcttgaagttgagcacgttatacctaaaaatcctaaacatggtccgaaaggcacagaccgaataagcaacctggttattgcctgtgagacctgtaacaaagccaaagataacgatcaaccggaagaatggtatgcacgcttacaggcttcggaagacccgcttgaccaggagcgtgccaggaatttcccggctgttatgcaacagcttaagcaacctctaaaggacgcgactgccgtgaatgcgacaagatgggttctttaccggcaattaaaggatatgggactgccaatggaagccggctctggcggcagaacgaaatataataggtcaaaattaggtctaccaaaagctcactggatagatgctgcgtgtgtaggcgtcagtaccccagagcagattagcattaataaagttgtagtcttggagataagagctgtagggcatggcaagcgccagcggtgcgggaccgacaaatatggtttccctatccggtatgcgcctaaagttaaaacatttatggggtacaagacaggtgatttagtaaaggcagtaattccgaaaggcaaatacgccggggttcatatcggtaggatagccatacgacataagccaagctttaagctaaatggcttcgatgtgcatcctaagtacctgcggctccttcaaggggctgatgggtacgaatatgttttgaaaaggaaaagcgacgtctcctccccaggcataaatgccggggctcccggcgtcgcatga

SEQ ID NO: 967 - DNA, 254 bp, unidentified
  source 1..254: mol_type = other DNA; note = Sediment metagenome
gtcagctaccccacgcataaatgcgggggcttgtgatgagcaagcccggagctgaccagcctcagccagggccgtaaggccatcgggctacgttatccaggtcatgacaccctggggtgcgttgccagctccaggccctgtcgttcggcagtaaacaggcatacggggtcgaagccagtgtgcagcacataaaaagcctggataacattggcgaggcaaacattaccccgaacgggaggctctttatgagcaaa

SEQ ID NO: 968 - DNA, 1449 bp, unidentified
  misc_feature 1..1449: note = Ga0172379_10011290 JGI
  source 1..1449: mol_type = other DNA
atgatttactatatcgaagattgtgatggaaatgtaggacacccgacgaagaaacatgatatgattcgtcgatggttaaagagtaaaaaagcgaagataaagaagagatcgaaagactggatgttaatcaaaattcacaagaagattgatcctgagaagactattccagcacaatttcgtatcggattagatccaggatacgaaaacgttggatttgcggtcttcaagttgactgaaacgaaagtggaaaagatacttgaaggagaagctaagttacgaaccaaacaagtgacagagaacttgactgaaagaaagatgcatcgacaaaatagacgccagaacagacgaaagaatgtgcttcgtaaatttgactcatgtaaatttagacaccctatttggaagaaccgtaagaagcataagtttcaaccaacacaaatacacttaattcagtctcataccaacatactaaagaagatttttcaactagtacctctagatgaaagtcatgtagtagtagaatatgctaagttcgattcacaaaagataaacgatccgagtatcaagaactatcagtatcaaaaaggattgcaatacgggtacgaaaacgtgaagaactatgttcgagcaagagacaaatacacttgtcaaatctgtaagaagaagaagtctgttgatcttcatgttcatcacatcttacctcggtctcagcatggaacagatattcctaaaaacttaatcactctttgtaaaccttgtcacgatagagttcataagggtcaagagaagtgtacaaaacctaaattgaatacttttgtcgctagtggagtactgaattcaattatgaaagagctttatgaaatcataagctcggaagtgagtgctagtaagacttacggatatgttactgatactcatcgaaagagtttaggactagagaaaactcattgcggtgatgctagtattatcgccttttgtgacgaagacaacgtatttgagtatgacggtgagtatatcgacaatacaagtcatatgtttttgcaacaatttcgtcgacataatcgtagttttacgaatcaagttgaagatcgtaagtataagattaatggtagtgttgttgcttggaatcgaaatcgacgagaaggacaagataagaaaaaaccatcattaactgagttacaacaagaatacggatatcacaagattcgtgttagtcctggaggtataaaatcacgacgaaataataaagatatgttatttcgtccaggagacatgataaaggtagcaccatcaaaaaagaccgagactttcgctagttacatcgatatctgtaaaggttggttatcgacacaaggaaccatatcaggagtaaactcgattaagaatataccaaatagatatgtgagcaagaaactcaataatggtggtctcgtaatcgataataaattttga

SEQ ID NO: 969 - DNA, 266 bp, unidentified
  misc_feature 1..266: note = Ga0172379_10011290 JGI
  source 1..266: mol_type = other DNA
gtcaattacccagcggttaaagaccattgggcttgcgagctagtatagtcgcaatgccgtttacgggattgaacagacgtagtgactaacgattcaccagcgggtgccactcccagctcgttgctctggaggtagtgagatctaatctcaagtcctcattgctagctattaggtaacgaagactagtattatcgttagccaagtcgagggagacttatttttgtgcatgcacaaaaccgatcaaggaacacaaacatgatttacta

SEQ ID NO: 970 - DNA, 987 bp, unidentified
  misc_feature 1..987: note = Ga0120380_1006999
  source 1..987: mol_type = other DNA
gtggcgaagagcaccaccctcgcaagaggagaatccggcggttctatgaccggggaagtaattcacgaaaggagatacaaagtgatggcatacgttgcagtcctgtcagcatctggaaaatcgctgatgcctacaactgcatacaaagcacggaaactcttaaagagtagacgtgcaaagatctacagctacagaccgctgttcaccattcagctgcaggaccgtgaagaaggtgctacacagcctgttgagctgaagatggataccggtgcacagcatatcgggatcagtgtctgctctgaaaagcacgaatattggaacaggcgctacgatatgctgcctgacgaaaaagaaatgcatgatgaggcaagaaaaaaccgccgtaacagaaggcaaaaacttcgttatcgcgccacacgcttcgataaccgcactcacggccataatcgcaaggaagataagtggtttgccccttctttgaaacataaagaaaacatccacattcagcttgcagaaaagatctgtgcggtagtcccggtgacagacgcttatttcgagatggggcagttcgatattcaggtattgaaagcctatgaagcaggcaagcccattcctgtaggggacgactaccagaagggtgagcggtatggttatgccactcttcgcgaggcagtctttgcgcgtgacaattacacctgtcaggtatgcggcgccaaactggatgacaagcaccatccgattttgagaatgcatcatatcggctattggaagcacgatcattccaatcgcatgagcaacctgatgaccgtttgcaccaaatgtcataccgcagcgaaccataagcccggaggaaggctatatggtctggagccagagcttccaacattcaagggcgccgcattcatgaacacggtgcggtgggatatgtttgcacagctgaaaaaagcattgccgaatgtcagatgccacatgacatatggcaatgct

SEQ ID NO: 971 - DNA, 261 bp, unidentified
  misc_feature 1..261: note = Ga0120380_1006999 JGI
  source 1..261: mol_type = other DNA
gtcaaccaccccgcccatttacttcggtaaatggacggggcttgcggggaccagaatacccccgtaagcccggttgaaaagccagttacatgttgcggaggaaatatacaataggcacttcggaacgctgctcaaattctgaacactgcgggcgtgcattaaacatcctataggggaagggaagtgtgtacgtctcggcggactgacagcaacatcgccagaatgccgtaaaaccctccgataacagtggcgaagagcacc

SEQ ID NO: 972 - DNA, 1224 bp, unidentified
  misc_feature 1..1224: note = Ga0256407_10008120 JGI
  source 1..1224: mol_type = other DNA
atggtgtatgtattgggacaaaataatttacctttaatgcctacagataattataggaaagttagactattattaaaggaaaagaaagctgttgtcgtaaaaagaacaccgtttacaattaaattattacattgtactaatgtatataagcaaaatatttcattaggaatcgatcctggaagtaaaagtattggcttatctgcaacaacgtcgaacaaagaaatttttgctggaacggttatattgagaaacgatgtgactaaactgatttcaactagaaaagaacatagattatctagaagaagtcgtaaaactaggtatagaaaagaaaggtttttaaaccgtaccaaaaatcagaaacctggatggattccacccacatatagacaaaagcttgatgttcatcttaagataattaatatgataaagagtattttacctataactaatttgtgcctagagttaaccgtatttgatactgccttagagcctacgaaatgtagtacatttagacggtctgttttaataagagataattacgaatgtcaatattgccatgggtcttctggagataaaactttacaaatacatcatattgaaactagacaaactggaggaaactcttttggaaatttaataacattatgtaaaacctgtcatgctaaatatcatagaggtgaaatagatatctcacaaacaagaacgaaatccttaaggcacgagtcatttatgaacattttaaatactagattagataagtatttaaaactagagggatatgataatatagacataaccaacggcttaaatacatataatactagaataaagtacaatctcccaaaagatcattcggtagatgcaagatgtattagtggaaatccattagctataatgtgtgatcatttttatatctttagatcagtacgaagacgaaacagacgcattcataaagatacaattcaaaaaggcggaactagaagacttaatcaatcaccaaaatatatgtttggttttcaattgtacgataaagttcattataaaaatgaagaactgtttattatgtctaggagaaaagatggaagaattactttaaaaactataggtggaaagatgagatatgaatctgtttcctataaaaaattgaaattccttgaaccaagaaaagctattattgtagcacgttatacaagaaataaactatatttgaaaggagatttttaa

SEQ ID NO: 973 - DNA, 288 bp, unidentified
  misc_feature 1..288: note = Ga0256407_10008120 JGI
  source 1..288: mol_type = other DNA
gacagggttagcgattcgtaagtaatatttattattacttagtaattgagatatattacttgctgactaccctaagagtattattactctacgttacttaagaatatataggcacctgttgatatttgctctagtcttcagctctgcgattgcatattaaaagatctgacgaataggatcggtgtatgtaatatataaaaccttaagataacattggggaagggcaaattacatctttcgagatgagtcacttcagttggtagtgactgttttgaggtgatagttatg

SEQ ID NO: 974 - DNA, 945 bp, unidentified
  misc_feature 1..945: note = Ga0315286_10038107 JGI
  source 1..945: mol_type = other DNA
atgcagtacgtgttcgtgttggacaagaacaagcagccgctggacctctgccaacctgccagggcaagacagcttctcaagaagggaagagcaaccgtatttcgccgttatcccttcacgatccggctcaaggaccgggagctggaagagtccgtcacccatgtccaccaggtcaagttcgaccccggcagccggataagcggtattgcaatggtcagagaagaggatggcaaggtgctttgggcaggtgaactggcacaccggggactggccatccagagtgccctggatgaccggagagccatccgacgagggcggcgaagccggaaatgccgctaccgcccacctcgcttcgacaaccgcaggcggggggagggttggctgcctcccagcctggaaagccgggtggccaatatccaaacctgggtaaagcggctgaggtggtctgctcccgtggaaagcatctcaatggaactggtgaagttcgacacccaggctctgcagaacccggaaatatcgggagtggaataccagcagggcgagctgatggggtacgagatccgagaatacctgctcgaaaaatggggtcggaagtgtgcctactgcggcgggacaggagtgcccctgcaagtggagcacatcgtcccgaaaagcaggggcggatcaaagcgggtcagcaacctgaccttatcctgccaggagtgcaacctggagaagggcagccgcacggcggaagagttcggtcacccggagatccaggccgaagcccggcagcccctcaaggatgcggcggctgtgaataccacccgttgggagctctggcgcaggctgtctgagagcggattacccgttcattgcgggacgggaggcaggaccaaattcaaccgcacccgtttcgacctgcccaaggcccactggatcgatgcggcctgcgtgggtgaagta

SEQ ID NO: 975 - DNA, 274 bp, unidentified
  misc_feature 1..274: note = Ga0315286_10038107 JGI
  source 1..274: mol_type = other DNA
gtcaacgaccccacgcataaatgcgggggcttgtgagaaccacaagccgagttgaccagcctcagccaccagtcgaaggactgacggggctacgttatcgggagagttgaagaacgcacgttgggatgcgcgagccagccccaacctctgcaactggatggttaaacatcttgagggtctaaagaagtgccacccagaagtgctgaccgataacattggcgaggctcacattaccgccgaatggcgagaaagggagtaatcccctatgcagtac

SEQ ID NO: 976 - DNA, 1284 bp, unidentified
  misc_feature 1..1284: note = Ga0224423_10002744 JGI
  source 1..1284: mol_type = other DNA
atgacagtatatgtaattgactcttgcgaaacacctcttatgccgaccagaaggctcggcagagtcagacatatgctcgactccggtgaagcggaaatagtctgctatttcccgtttacaatcaaactgagaagaaaagtggagcgagtgtacacacaacccctgcgggttggtgttgacactggtttcaaacacgtcggcataagtatatcaactccaagaagagaactcttccgttatcatttccgtcatcgctcacatgaagtgaagaagaacttgaaagaaagaagagaagatagaaccggaagaagacacagaaaagttcgtcatcgaaagccgcggttcaataaccgcgtcaagtcgaagaagaaaggatggattccgccgacatctcgtcatatggtagagtctcataagaaagatatagaacttgctttgagattcattccaaagtctgctatagaatttataaatctcgaaatcggagaattcgacacgcataagatgcgtgactcagatgtagaaggagagatgtatcagcaaggcgacttaaccggcttcgacaacgtcaaagccttcgtcagatggcgtgacggaaacatatgtcagcattgtcacgggaaatccggtgacaagaagatcagagttcatcatatcaagcaccgtgtcaacgacggtcctgataacccagcaaacctagtttgcttatgtcacacatgccatactaaataccataacggagaaatcaaattgaagatgtccaatttgaatttgaagactattgactctcttcgttctgctgctgcgatgaatatagtcaaagatagaatattcgacgaagtgaagaatatgtttccagagactgacgtgagaaagacatacggttacatcacacggaaaaaccgtgtgataagtgaacttgagaagtcacatacaaatgacgctctgattatctcaaagaatttcaatgctgttccggaggaacagactatagaagttaagcatatgagacgtcataacagacagattcataagaaaaatcccattaaaggtgggatccgaaagaaaaaccaagcaaagcatttcataaagggatttgctctcaatgatttcgtctgcttggacaaccaagcaaccgggtttataaccggccgtatgtctagcggatatgtgactatcaagacgattgatgatgaaaagattcacgaaaagacagtcgtttctatgaaacgaatcagattgataagaagagcaaaaggaatgatttatgattacaaaaaataa

SEQ ID NO: 977 - DNA, 341 bp, unidentified
  misc_feature 1..341: note = Ga0224423_10002744 JGI
  source 1..341: mol_type = other DNA
gtcaccaactgtctaagtaaaagacttagcggcttggttctttagggaactgaagccgatggtgactagcctgagtgaaaggagatagccggatggaatccggcagactcccgaactacgttactggagaatataacgataggtaccgatggatataagtcctagttctccgctctacgcttcaagagttaaacagtcctgtacggtagggacagtgcattgaagaaagaaacctccggataacattggcgaagggctaccaacagggcgtaacgccctgcataatccttaacgggatatttataaaatgttaaattaaaattattaaactctcaatgaca

SEQ ID NO: 978 - DNA, 1305 bp, unidentified
  misc_feature 1..1305: note = Ga0224508_10013895 JGI
  source 1..1305: mol_type = other DNA
atgtcgaatgcagtattggtgatcagcagcgcatacaaacccttgaagccgattcacccagccgtcgctcggcgcatgctgcaatcccggcaagcggcggtgtttcggcgctatccgttcacactcatttgcaaatccggggtgaccacgggacaagctgaaaacgttcggttgaagatcgaccctggcagcaagaccactggtctagcgctacttgttgatgatgcgctggtgtggggcgcagagctgaaacatcgtgggcaacagattcaagatgcactcgaaaaacgccggtcgtttcgtcggggccgtcgaagccgcaagacgcgctatcgcaagccccgtttcgataaccggcgacgttgtgcgggctggttgccgccaagcctcctgcatcgcgttgaaaccaccatgacctgggtgcaacgcttgtgtcgatatgcgccggtttgcgaaatctcggtagaatgtgtgcggtttgatatgcagctcatccgcaacccggacattgaaggcgtggactaccaacagggcgaactctggcagcaagaggtccggcagtatgtgttcacccgtgccggatatgcctgtgcctactgcggcgcgaagcatgtcccacttgagcttgaacatatcataccgcggagcaaaggcgggtcgaacgcgcccaacaacctcacagcatcatgtgtgtcctgtaatcaggcgaagggcaatgaatcgattgagacgtttctcaagaccaagcccagcgttctggcccgcatcagggcccaactcaaggcgcccctgaaagatgccgccgctgtgaacgccacacgctggcgtctaggggaggaactttgccgcacgggtcacccggttgaagccggaacgggaggccagacggcatggaaccgcaaacgacagggcttgccaaagacgcattgggttgacgccgcgtgtgtcggtcagtcgacccccgacgcgttgcatatgtgggtgacgcatccgttgcagatcgtctgtgccgggcatagctcgcgccgtatgtgtttgtccgacaagtatggctttccacgcacctcgccaaaaggctctagccaagttcaaggctttaaaactggagatatcgttcgtgccgttgtgccgagtgggaaaaaggcgggtatctatgttggccgggttgccgtgcgaagctctggctcattcaatattcaaacgccaaagaggactgttcaaggtattggctggaagtgctgtatgcttgtgcatcgtgcagatggctatctctacagctttggagcatcgagctccatgctatag

SEQ ID NO: 979 - DNA, 251 bp, unidentified
  misc_feature 1..251: note = Ga0224508_10013895 JGI
  source 1..251: mol_type = other DNA
gtcagctaccgcctcgactgaagtcgagcggcttgaaaacgccgagagctgaccagactcagtcgcgttcagtcgcggctacgttaggcgcgaaataggtaccctggggtggccgaaccagctccaggctctacggtgtcaggttaaacaggtccgatgcggtcaagcccgtgcctgacacgcgaaaccgtgccctaacttggtcgaggagcacatcacctcctttaggagagaagaccatgtcgaatgca

SEQ ID NO: 980 - DNA, 654 bp, unidentified
  misc_feature 1..654: note = Ga0272428_1003415 JGI
  source 1..654: mol_type = other DNA
atgaacggtgtgtatgtcctttcaccagatggggtgccattgatgccttgctcctgcgtgatcgctcgtttgttactcaaagatggaaaagccaaagtcgtgcgtagaacgccatttaccatcaagctgtatacacagccagtgaacccctctacacaggcattgacgcttggcatagatacgggcagttcagtgatgggttcggctgtggctgatgaaaacgggaatgttctctatctttctgaggtggaaatccgcaatgatatggcaggattgtcaaaagagcatgtctttgatgcaacgatgatcgccacgcgagggatcataccaatcttccgcacaaccactgttctctccaaacgatgtgtgcctgatggagattaccagcaaacgaagggaattcgcagtgaacagcgaatcatcacagggaagattgggggatttcgtaagttcgacaaagtgcgttacttaggtcaggaatacttcatcaaagggagaatgtctacaggctacgtcatcttgatggagctttctggcaacaaagtggctttgaaacctctccccaagtttgacaagatgaaaagagtgagcgcccgttcatcatgggtgatgagacaaaaaaccatgccaagtttctcatcctctatcacctga

SEQ ID NO: 981 - DNA, 299 bp, unidentified
  misc_feature 1..299: note = Ga0272428_1003415 JGI
  source 1..299: mol_type = other DNA
gtgaactaccacggggctaaagccctcgtagcttcttcggaagcctgagttcaccagacttgtcaccagaaatggtggcaccgttcgagaggtcatgacacctgcggttgacgcatcagatcgctgctctgtcgcctgggtttaagaaggactgagggaaggttcggtgatccaggctcaaaaagccttttgaaccctgtcgagatgaagccggattctcttcgtggtcacagcgaagagatacgcgccacctgcgtaagcagagcatttttctgaaaggaattctttctatgaacggt

SEQ ID NO: 982 - DNA, 1311 bp, unidentified
  misc_feature 1..1311: note = JGI1684J13235_1001204 JGI
  source 1..1311: mol_type = other DNA
ttggtaaaagttattgccaaagatggtacagtattacaacccacaaacagacatggcaaagttagaagattacttgataacaataaagctgaagtggtatgtaaagaaccttttactattcgtttactttatgaagttgaatcaaaaaaaactcaaacaattaaggtttattttgatactgggggtaaatatcagggctttgccattatttctaatggtaaagtgattcataaagggactattgaattaagggatggtattccaaagcttttaagacaacgaagacagtacagaagaggtagacgacacagaaacaaacgctatcgccaacctagatttgataatcgcaaaagagataaaggttggttaccaccttcagttaggtctaaatataagcatatactgaactggataaataaactaacaagttatctgtcggaatatgagcttactgtagaagtggctaattttgacatacaaaaaataaaagaccctggcattgaaggtaaagattatcagcggggagaaaaatatggctatgaaaatacaaaacaatatcttatctttagagaaaatgccagatgtcagctatgtggcaaaactaaaggtgaagatagctggaacatccaccatattatttccagaaaagatggtggtaccgatactcctgataacctggctttacttcatagtaaatgtcatgagaagctgcataatgataatttagatagagagtttaaaacaaaggcagataatttagataataatggtcaaaactttaagtatacaacttttatgaatatcattaagaacaaattatatagagatttatctgacagatataaaggtaaagttgattttacctacggatatattactaatattaatcgtagaaaactagaattatctaaaacccattataatgatgctatagcaatgaataaagaatctgttgaagataacaaaaagccaatatatatcaaacaggttagaaagaaaaagcgttcattgcatgaagccattccacgagctggcagaggagataaggtaaatagtgagcaaaaacgtagttctaaaaatactaaagaagttgtaaaaaacggcaagaagtgggttttatgggataaaatatatatcccagaattaggtacaacagggtttatatcaggatttagtggtaaatgggtatatgtacaaaatatagatggagaatatttgcaattaccctctaaaacctataagcaaataaatcctgatagtgtaaagcttgtatgtagaaataacaactggattagaaaaaaaacagcatag

SEQ ID NO: 983 - DNA, 291 bp, unidentified
  misc_feature 1..291: note = JGI1684J13235_1001204 JGI
  source 1..291: mol_type = other DNA
gtcaactaccacccctaaattataatcaagatttagaggtggcttgtgaaaaacagtcaagccactagttgactactctaagccttagttggctacgttatcttagttatgatacctgtggatgatgctctagtctgtcgctctatcgtgcataggtaaacagtcctgagtggtagggacagtcgtatgcacccaacaagctaagataacattgaggaagggcaaaatagttttacctacggcttttatagccgccttaacggggtttaaattccttaacgaaaggactga

SEQ ID NO: 984 - DNA, 1227 bp, unidentified
  misc_feature 1..1227: note = Ga0071116_1000008 JGI
  source 1..1227: mol_type = other DNA
atgtcaaatttagtttatgtaattaataagaatgggaatcctttgatgccttgtaaacctgctaaggctaggcatttactagaggctggtaaagctaaggttatcaagcgtataccttttacaattcaactgttatggaattgtgaagagaatgtgcagcctataactttaggaattgataaaggttccaagattactggtttatgtgttgtagaaagtgacaatagcaaagtgttatttcaagcagatttaagacatcgtctagacgttaaagaaaagatggagacgcgtagagagcatcgtaggtctcgtaggaaccgtaaatggtatagaccatgtaggtttttaaatcgcagtagttctaaacgtataggaagactacctccttcaattagaaccaatgttgaggaagtaatcagggtagttaataagttaaaagtgatgttacctataaccagtattgtagtagaagatgtattagtggatataagaaaattgaatgaacccataattaaaggtaagcaatatcaagtttctaatcgcctatctgagaatttgcggctagcatgtttaatgagagataattttgtttgttatacgtgtaagtctaaaggagaactacatgctcaccacattgtatggaggtctaagggtggttcagatactattactaatttgattacattatgtaagaagtgccacaacaaggtacatagtaataaattaacattggacttacgaggttctaacaattttaaagaccgtatagcacaacgtacaatgcaaggtaaatcttatctttatagacaattaggaaatcctgggttagtttatggatatgaaaccgctgagcagcgtaagaaattacaattggataaaacacacatgatagatgcatttataattgctggtggtaataaatatacaactgataactcttatttcataaatttcagacttaggcaaactaggcgacaatattatgatttgcctagaaaaggggtgggtagagttagatatcaagtcaatgaagaattaaatggatttaaaaaaggggatgtcgttttggtaaaatcttttgtgaaacaaattaattcgattcgtagtgatggacgcttaggtttttctaaaagcataaatagtggaccacagacggcactaccaaaacattgtatattactagaacgccagaagacagttgtctttaatacagttaatataaggtag

SEQ ID NO: 985 - DNA, 250 bp, unidentified
  misc_feature 1..250: note = Ga0071116_1000008 JGI
  source 1..250: mol_type = other DNA
ggcaatgtgattatttctaaaaaagataaagcaaattactattatcttttatgaaataaacagcgggctctggataagtgcaagagcagaagttaatttaattattctaccaacagatgttgttccagtctgttgctctagaacttgtaactaagggtagcggaaacgtgaatgtgttacaagtgtaaaaagtttaattaacaaccgcgaggagcaactaactctacggaggacttaaatgtcaaattta

SEQ ID NO: 986 - DNA, 1251 bp, unidentified
  misc_feature 1..1251: note = Ga0180438_10003339 JGI
  source 1..1251: mol_type = other DNA
atgcgtgtatctaacaataaacacaacaccaacacacacaacacctcccgtaaagtgtatgcgtatgtgttaaacatgcgaggacaaccgctgatgccaactacaccacgaaaagcgcgtcttcttttgaagaaagagcaagcaagagtagttaatcgctgtccttttatcattcagttacaatatgccaccggagaaactacacaaccgattaagctgggaacggatcttggatatactaaaatcggctttagcgccacaacaaatcggttagaactgataagcggcatatttacgcttcgcaaagacttgtcaaaaaagataggcgaaagacgaagctatcgtcgaactcgtagagggaaactatggtatagaaaaccgaggtttcttaataggaaacaggaggaaggctggttggcacccagtaagcagcaccggttagcgtcccatcttgaactggtcactaagctggagtcattgttgccaatcagcttcaaaaaggtagaagttggcaatttcgacacacaacgtatgcagaaccctgaaattacaggcgtagaatatcagcagggcgaacttcagggctacgaagtcaaagaatacctgttagacaaatggggacgaaaatgcgcctattgtgataaaacggacgtgcccttagaagtcgaacatatcgtcccgaaaagtagaggcgggaccgatcgagtgtcgaatttgacgatcgcttgtcgcgcctgtaatctaaaaaagggagatcagacggccgaggagtttggctaccctaacatccagcaacaggcaacgcaaccgcttaaagcagctgcctgtctgaataacattcgctggaggatagtggagcagttagaggcagaatatatctacggatatgttaccaaatacctgcgtaataagttagaactagaaaaatctcatgttaatgacgcattcgtaatcgcaggcggaactaatcaagaacgctgccgtccgtacgaggtcattcaagtcaggcgaaataatcgttgcttacaactgaaccgaaaaggctttagaccgtctattaggagaaagcggtaccagttacaaccccacgatcttgtaaaatatgagggcagaacttataaagtaaagggagtccattgctatggaacacgggttattttaaaaaatgttaaaggaaaaaacaaaagtgtaactatcgacaaagtagagttggttacatatggaaagggattacaattcattttatgttag

SEQ ID NO: 987 - DNA, 258 bp, unidentified
  misc_feature 1..258: note = Ga0180438_10003339 JGI
  source 1..258: mol_type = other DNA
gtcaactacctcaccctgaagggtaggggcttgggaacttgttaacgagccctttagttgattagagggctttcctttgtgggaagcagcagttgttgaggttatgacaccctggggtgctccactagccccttgctctgtcgtccattgattaaaagttctgaggggtaggaacggtgtcatggacgggtaagccttgacaacagtctcgaagtggacttactccgtattcgtaagaaaaaggaggttagaacatgc

SEQ ID NO: 988 - DNA, 1071 bp, unidentified
  misc_feature 1..1071: note = Ga0213878_10002132 JGI
  source 1..1071: mol_type = other DNA
atgcaatctacgttgaaagcgaagtccaagactcaccctgggatgcttcctcagttccaggctctgaaagtctcgtttgacgcatcggcaaaggtaaaggccgggacgagcgagacggattcgggcaagcaaaggcttaaagcctcgcgtgttgtggatcagactgcatttcaacatggccgaggggagcgtccgaaaggaccgttaccttctcttcaaagggaagaggaaagcggagtaatccgcgtatttgtgaggtcatcgaatggaaagcctctcatgccctgtcaccctgccagggcccgacaactcctgggaagcggacgtgcccgcgttcacagattatatccatacacgattcggctggtggaccgtaagaagggagctaagcagccggtggtgttaaaagttgacccaggggcagtcacaaccggcattgcgctaaatcggcaagaactccacaacagaaaacaccaagccgtactccacttggccgagctcacccatcgcggggcacaagtccgtgccgcgctagctcggcgagcggcatatcggcgccggcggcgcagccgaaaccttcgctaccgggctccgcgatttcttaaccgaacgaaggacaaagggtggctggtgccaagcctgcggtcacgcgtcgataacatcctctcatggcagcagcgttactccaagctggtgccaatcacctcgatcgaaatagaatctgtcaggtttgatctgcagaaagataacaatccagagattagtggaatcggctaccagcaaggtacgctagcgggctacgaggtacgcgagtatctgctcgaaaagtggggccgtaaatgcgcctactgtgacgcaaacaacgtcccacttcagatcgaccacatcgttcctcagaaaccgaaaaaccgcttggcttcaaaggggtctaacagaccaagtaatctgaccgttgcttgcgagtcatgtaatagagctaaaagcaacaacccagtcgaactcttcttgtccgatcaacccgaccggcttgaatacattctttcgcatacaaagcgaccgctgaatgccgcg

SEQ ID NO: 989 - DNA, 241 bp, unidentified
  misc_feature 1..241: note = Ga0213878_10002132 JGI
  source 1..241: mol_type = other DNA
gtcagctacccgcgctcaaacgcgtgggcctgtagcgatacaagccaggctgaccaggccaagaaagcaactaaatgcaatctacgttgaaagcgaagtccaagactcaccctgggatgcttcctcagttccaggctctgaaagtctcgtttgacgcatcggcaaaggtaaaggccgggacgagcgagacggattcgggcaagcaaaggcttaaagcctcgcgtgttgtggatcagactgc

SEQ ID NO: 990 - DNA, 1446 bp, unidentified
  misc_feature 1..1446: note = Ga0181296_101698 JGI
  source 1..1446: mol_type = other DNA
atgaaagtatttgtggttggatccgatcaaacacctttaatgcctatgcatgctgcaaaagcccgcaaattattaaaacttaagaaagccaggttgaaaagccggaagcccgcttgtattcaacttctttttgcgcccgaaaccatttcgcatcagcctgttaaagttgggatcagcaacggcgccagggagaccggcatagctgttgtccaggaaagagttaaaaagcggagtgttactctcttagtcggagagatatccctggcgaacgacatttccaggcgcattaaagttcgtcgcacttaccgaagggcaagacgcggcagactgcgttatcgtaagccgcgttatgataacagggtcagggtgaagtgtcatgtttgcggtaagaacgccgcgaagggcaaacaaacctgcaaggcgcacagggcggtaaagccggaggataaaatcagcacgaactcctggctacccccttcgcttaaagcgagaaaagactcaataataagagttattaaaaagatccggcgctgggccccggttagttcttgcacaatccaattgggaaggttcgatttgcataaaatcgcagccgtcggcattaatgaagcgggttatcgacaatatcccgtatatgaacgtgatacagtcaaagcggctcttatttttgaatatggtcgcagacaaaaagagggggatacagaaaagattattccacgctgttgttattgcgataaagaaggtaacggagtggaaatcgaacatatcctgcccaaaagtaaaggaggcggtgatagttggcgaaatctcacactggcctgtaaggaatgcaacaataaaaaaggcgacatgacccctgaagaagctggaatgaccctgttatatgagcccaagccgcttcacctgtccagggtctacaagtatatcatgcggtgtcagcaaggcaagaattacctgttgagcaatatcaattcttttggaataccttgtagtttcacttatggacagtttacaagctggcagagaaaaaggtttggaattgataaaaaagattatgacgactcaattttaattgccgcgtcggtatacgacgacagaattagaccggggctgccgataaaaaaagttgcgcctttttatatctggctaacgcctacaaagcgcagacagatatttaacgcttcccattattctccaagcaagagaacgccaaaaggtttctccagcgaagctacggtggactttggttacactttaaagactcttgtagaagtcaataaagcatgcgttatcatgtgggacagagctaaactcgtctcaaaagctattaagaaaagcgaaagcattccgaaaaatgccgtcttggttttaagaaagggagatatcatcaatactttgcatgcaggcaaaaagattacaggtagagtcagctccttgatgagcaac

SEQ ID NO: 991 - DNA, 320 bp, unidentified
  misc_feature 1..320: note = Ga0181296_101698 JGI
  source 1..320: mol_type = other DNA
gcagctccccattgattgtgagccagcttcagcgacaaacccccagtaatgggaataaggatgagctacctttgatgggtttgccaaagtgccaccctggggtgttgttccagctccaggctctggaacctttgagtaggaaaactcgccctactgttttggagggaaggaatccgagatattcaggtacacctcaaaggacaaggttaccattaaagtttagcgaggagcgattttaccgctcttttagaaagagcgagtagcttattataagcgccataatcaaattagagttgataatggggtactcatttatgaaa

SEQ ID NO: 992 - DNA, 1296 bp, unidentified
  misc_feature 1..1296: note = Ga0335394_10010380 JGI
  source 1..1296: mol_type = other DNA
atgcaacgtgtattggtgatcgacaaaaacaagcaaccgctcatgccctgtcatccggcacgagcgagagaactgcttaataaggggaaagcggcggtctaccgtacttttcctttcaccatcatcctgaaagaacgtgagggcggtgatacacagcccatcgcgttcaagatcgatcccggcagcaaggcgactggcatggctttagtcgcagacttcaagcgtggcaagcgggtgatttgggcaggcgaactcacccatcgcgggcagcagatacgcgatgcgctcctgtcaaggcggcaactgcgacgttctcgccgcgcacgacacacgcgctatcgacaggcgcgctttgataatcgccgtcgtccagaggggtggctgccgccgtcattaaaaagccgcgtggagaacatttggacatgggcatgtcgcctgaaccgtgcttgtcccatcgccagtatcagtcaggaattggtgaagtttgatatgcagttgatgcagaacgccgaaatcaggggcgtggaataccagcagggcgaactggcggggtatgaggtgcgcgagtacctactggaaaagtgggggcgcaaatgtgcctactgtaatgcgaaggacttaccgctgcaagttgagcatatcaaccccaaattgcgcggcggcagcaaccgtgtcagcaacttaaccctcgcttgtcacgactgcaaccaggagaagagaacacagacggtggcggaatttggtttccccgaaattcaaaagctggcaaaagcccctctgaaagacgctgcggcggtgaatgccacacgatgggcgctctaccatcgtttggaaacaatcggactgccattggaggtcggcacgggtgggcgcaccaagttcaatcgcacaacgcaaggttacgcaaaaactcactggctggacgcgacgtgtgtgggcgagagtggcgaaaaagtctatatcacggctagcgatacaccgttgttggttaaagcaacgggtcacggttcacgccagatgtgtcgtaccgacaagtatggtttcccatcgcgttaccgtctgcgtcagaagcgccatttcggttttcaaacgggcgacatggttaaagctatcgtccctgctggcaaggttgtgggaacgcatagtggtcgcgtggcttgccgtgcgacaggcagtttcgacatcacaacagcaaccggaaaagtgaccgtatcgcatcgatataccaaggttacccatcacgccgacggctacaattataagaaaggacaaggcgctatccctccccatgcctaa

SEQ ID NO: 993 - DNA, 253 bp, unidentified
  misc_feature 1..253: note = Ga0335394_10010380 JGI
  source 1..253: mol_type = other DNA
gtaagcatccccacgcctaaaggcgggggcttttagccccaatgcttacccgactcagcctcgcaagaggctacgttagcggcgaaaatataggcacttcggaatgctacgccagttccgaactctgcggtgaacgattaaaaagaatgcttgggagcaaacagtgtcgttcgcaccaaaccgtcgtataactttgtctaggcaacattacacccgtaagggaagaaaagttgaggtaactcaaatgcaacgt

SEQ ID NO: 994 - DNA, 1221 bp, unidentified
  source 1..1221: mol_type = other DNA; note = Human gut metagenome
atgcgcggcaagcctctgatgccgtgttcgccagcaaaggcgcgacacatgctgaaggcgggcaaggccgtcgtcgtgcgtcgaacgccgttcacgatcaagctgaccatcgccacgggcgagacgaagcaggacgtgacgcttggcgtcgatgcaggcgcaaggcacgttggcatttccgccacgacggaaaaggaggaggtcttcgcgtccgaagtcgcgcttcgacaggacatcacgggacttctggccgatcgtctggcattccgacgtgcaaggcgcaatcgaaagacgcgctaccgctccccgcgcttcaacaatcgcgttcgatcaaagcacaagggatggcttgcgttgtccgttgaaaaccgcattcaggcgcacatgtcgcgcatcgatgcggtctgcagactgcttcccgtcaccaagatcgtgattgaggcggcatcgttcgacgttcagaagatcaagaatccgactattgaaggcacggactatcagcagggcgaccagcttggattctggaacgtgcgcgagtacgttcttttcagagacggtcatgtttgccagcactgtcatggtcgttcgagggacaagatcctcaacgtgcatcatcttgagagtcggaaaacgggcggtgatgcgccaaacaacctgatcacgctgtgcgagacatgccacaaggcttatcacgcaggaaagatcaagttgaaggtcaagcgcggtcaatcgttcagggcggaagccttcatgggcatcatgcgctggacgctgcttgaccgcgtacgcaagacgcaccctaaactgcctgtcgagaacacctacggctatctgacgaagcacaagcgcattgctcttggcttgcccaagacgcattgcgccgacgccttctgcattgcgggaaatctgaaagcgttgcgaagaggagatttcctcttccagcaacagacgcgaaagcacaaccgacagatacacaggtgttcgattctcaaaggcggagtgcgaaaactcaatcaggcgccattcctcgtcaaggggttccgcctattcgacaaggtaagaatcggcggacagattggttttgttttcgggcgacgcgttagaggcatattcaacattcgtcgccttgacaaaactgtgatcgggaaagacatcaattgcaaaaaactgagtcttctcgaaacacgcaaaacttttttgattgaactacgaaaggagtaa

SEQ ID NO: 995 - DNA, 300 bp, unidentified
  source 1..300: mol_type = other DNA; note = Human gut metagenome
gtcaataacccccgcctaaaggcggaggcttgaaagagcctttattgactagtctcagcaaacctcctctgggaggagagctacgttggttgggaatgtacaggcaccgtgggatgtttatcctagtcccacgctctgcggtctgtgtttaaaagttctgagaggtaggaacggtgatgcagacaagaaaccctttccaacattgacgaaggatgacaatcggccttcgggccgatcaacaccggccttcgggccgagcaagcggagcctgcgggtatccgcaaaggagatactttgaaa

SEQ ID NO: 996 - DNA, 1167 bp, unidentified
  misc_feature 1..1167: note = JGI11958J13698_1112174
  source 1..1167: mol_type = other DNA
atgttacgagtaccagttttatcaaaatcaggtaagccgttaatgcccaccaaacctagccgcgctagacgttggttaagggatggcaaagccaaagtggtacataatgacttagaatgctttgctattcagttgacctttgagacaggagaggaagcgcaacccatagccatggggatagaccctggtaagggttactcagggatcggggttcagtcaagtcatttcaccctctggatgggacacctagttctaccgtttaagacggtgaaagaacggatggaattacgacggattatgcgtcgagctagacgagggaaacgaattaaccggaagttgccctactctgaacgttgccatcgtcaagctcggtttgacaatcgtaaaaagggtaaactgccaccgtcaatccgagctaataagcaactggaattgcggatagtcaaagagttgtttaaactgtttccgattagtgccattcattatgagttggtcatggctgacgtagataaaaccagtgggcgcaagtcggctcggtctggcgttggtttctccccagtgatggtaggtcagaaacaaatgcttaagtggttgtctgagttagcgaccgtgataactcaccaaggatggcaaagggacgggaacggaaccagtcagcttaggcaatggttaagattagccaaagacaagaaagacaaatcgaaccagacaccagctacacaagccgttgatggtgtaaccttagccgcgtttgagtttacccgatggcaggaatggcactctgataatgccaagcatggtgactggcaaggcagtgtcgaagttacctcagcaccatttgccataatccgtagaccaccaattagccgtagacagttgcatctgtgtgttccatccaaagggggtaaacggcgcaagtatggcggcacagttacccgccatgggtttaggaaaggcgacaaagttatagccgaaaaagctggaaaaacttacgtcggctggtgttctggagacaccgagaaacaagtttcagttagcggtattaactggaaacgacttgggcaatttagtgccaaaaaagtccagttgttgcagcgaagcacgggattaatcgtcgtgccttcacctggactgtcaaatctccccttattgaaagggtcgatttga

SEQ ID NO: 997 - DNA, 228 bp, unidentified
  misc_feature 1..228: note = JGI11958J13698_1112174
  source 1..228: mol_type = other DNA
ttcaacaaccccacgctactagcgtagagcgtggggattgccggacaaacgacaatttaaaccgttgaataccgctcttagtctcagcttggcacagacctccggatacttccctagtccggattacctctaaaaccttttgtcgggttgttgttggacaagacatcttagctgagatggcgggaagggactaattactttactcggaggtttatcaccatgttacga

SEQ ID NO: 998 - DNA, 723 bp, unidentified
  misc_feature 1..723: note = Ga0206349_1775808 JGI
  source 1..723: mol_type = other DNA
ttgagtaacgtttttgtagtcgacaccaacaaacagccattaaatacgattcatcctggaaaggcacgatttctccttaatagagggaaagcagcggtcttgaagcactttccgttcacaatcattttaaaggttgaaatttccgatccagtggttgcagaactgcgaatcaagatcgacccaggctcaaaaaccacggggatagcgatcgtcaacgaccagtcgggcgaagtcgtctttgcagctgaactatcgcacagaggtcagcagatcaagaagagcctggacgatcggcgtggtgtacgtcgaggcaggcgcaaccgacacactcgctacagaaagccacgttggcacaatcgacgcaccaagaagaaaggctggttaccaccatccttgcagagtcggatcagcaatatcatcacgtgggtccagcgacttgcaagagtctgccatatcacagctgtgagcctggaattagtgaagtttgacatgcaactgatggaaaacgctgagatatcagggattgagtaccaacaaggtacattagcaggatatgaggtgcgtgagtaccttctggaaaagtggggacggaaatgtgcctattgcaacaaggatacggtgcaacttcagattgagcacattcatcctcgggccaatggcggtaccaatcgcatatccaacctctctttagcgtgcgagaagtgcaaccgtgcgaaaggaacc

SEQ ID NO: 999 - DNA, 279 bp, unidentified
  misc_feature 1..279: note = Ga0206349_1775808 JGI
  source 1..279: mol_type = other DNA
gtcagggacccgatcccctaaaggggatgggcttgcagtgatccggtaatggattgctacaagcttcacctgtccagactcagctaggcaactagctacgttagaggcgaaattaggtaccataggatgcgaggccagtccaatgcgctacggttgcaggttaaacaggtttacaagggttagtgccagtgcttgcaacgccaaaccgtccctaacattgtcaaggccaccattacccgggtaaccggaggctctcaaaggagcaagcacttgagtaac

SEQ ID NO: 1000 - DNA, 486 bp, Calothrix parasitica
  source 1..486: mol_type = other DNA
atgcgtgtacctgtaattaatttcgatggcaagccgttaatgccgactaagccaagtagagctagacggtggataaaagaaggtaaagcagtagataagtggtcaaagttaaacctattttacgtacagcttttaaaacctgattctggcaataaaactcaggatgtagtagtaggtatcgacccaggtaagcaatttagcggaatagcagttttatcccaaaaagatactaccaaaggaggtaaaagacgtaaatatggcggcactgttacacagcacggatatcgcaaaggtgattatgtcgaggctattaaagctgataaaacttaccgagggtgggtaagtggagatactaaaactcaagtatcaatttctgatgctaattggaagcgtctgggacagtttagggtatctaaagtaaaacttctacagcgctccaggggtctaatagtaactttccaaaaatacaaagtccacggcgaataa

SEQ ID NO: 1001 - DNA, 264 bp, Calothrix parasitica
  source 1..264: mol_type = other DNA
gtcagtaactcaggtaagacagacactgagcttgccggagccaaatccagcaacgtaagtattgactagcccactgagccgttactcggtaaagacttccgaatgtttccctagttcggattatatctaaactcgtttggtcgagtgcttgacggcaataatgcgggaagaacatctacactgcattttgccttaagaaaggacatcttagtagcggtgggcgaagagacttaaactttacacgaaggattatctcttatgcgt

SEQ ID NO: 1002 - DNA, 1263 bp, unidentified
  source 1..1263: mol_type = other DNA; note = Human oral metagenome
atggtttatgtaataagcaaagaaggacagccaataatgccaacagagaaccatgcaaaggttcgtctacttcttaaatcaaataaggcaagggttgtcaaaagaacaccattcacaatacagttggtcagtacaagcaaaacgtacacacaggagataacgctcggtgtggatgcaggatctaaacacgttggtctatcagcttcgacagaaaagaaggagttatttgcagcagagcttcgcccacgaaatgatgtcgtaaatttgatgtcatcaagacgagagttacggcgttctcgtagaagtaggactacacgctatcgtcaagctcgttttcttaataggattcactctaaacacaaaggatggcttgcaccatctgttgaagtaaaaatctggaatcatattcaaggtattaagttgataacaaaacttttgcctattaaaactatctgcatagaaacagcagaatttgacttacagagactcaaggctttggaagcaggagagcctattccagttggtaaagattatcaactcggagagatgtatggacactacaatgtgagacagtatgttctacaccgtgatggctattcctgccagtgttgcggtgctcatagcacagataagaagaaggtaaaactccatgttcaccatctggaaacccgcaagacgggcggtaacgctcctgacaacttgataactctttgtgaagattgtcatacagggtatcatgctgggactgttgcactaccaacgacaaagcgtaagagaaggtctactcgcgacgctacctttatgggaatcatgcgaaagacactgatagaaaggcttcacaatatgttcctagacataaatatttgtagcatttatggctacattacaaaatactggcgcgagaagaaaaatatcaccaagacacatataagtgatgcctttgtgatagcaaagaatcttgatgcagaaagactagaaaaggctttgttgatagttccgaaacgacaacataaccgtcaaattcacaaatgcaagatcaataaaggtggcacgaggaagatgaaccagacaccaaaatttgtgttcggctatcaactttttgatagagttatgtgtctaggacaggaaggttttatcttcgcaaggcgttctagtggatcgtttgacattcgtaaactaaatggtgagaaaatcaaaccaaatatcaactataaaaagttaaagcacttagaaagccgcaaggcattattagtttcttattga

SEQ ID NO: 1003 - DNA, 283 bp, unidentified
  source 1..283: mol_type = other DNA; note = Human oral metagenome
agtttgatcagtaaccaacgactttagtcgtgggattttacaatcccttactgattagcctaagttccatgagaactacgttatctgagaatatataggcactttgggacgtgagtccgaatcccgaactctgcggcttgcagttaaacagttctgagaggtaggaacagtgctgtaagcatataaaaccttggaataacattggctacggacaactaaccctagattactaggagataacacctgctttgataggtgctgaaacaaggagttatataatatg

SEQ ID NO: 1004 - DNA, 357 bp, Halomonas pantelleriensis
  source 1..357: mol_type = other DNA
atggcggttttcacgctcgacaaacacaaacggcccctgatgccgtgcagcgagaagcgcgcccggctcaacaagtacggttttccgcgtggctacctgatgcgacagaaacagatccgtggcttccagaccggcgatagggtcaaggccatcgtgccgagcggcaagaaagccggcgtgcatgtgggccgagttgccatccgcaagaccgggagcttcaacatccagaccgaacagggtggcgttcagggcattgcctggcgtcactgcgccctgctgcaacgtggcgatggctacgactatcaccagacacccacccgtaacgacaaaggaggagcgggacgggcggtagcgtga

SEQ ID NO: 1005 - DNA, 293 bp, Halomonas pantelleriensis
  source 1..293: mol_type = other DNA
gtcaactacctctccctgaagagagaggcttgtgaacacaagcccggttgaccagggaaagcggtagccaacccgctacgtttgcaacaggtcgccaagacccacgccaccgtgcttcctcagcggtgggctctggaaggtcagaatcatgctggcgaaaggtaaagcgccgaaggctctgatcgctacggcaacgtaggagccggttgcagacattcccgaggggagacgggccgataggcccgcgacaccaggcccgtaagggcaacgacacggaggaaatcgtcatggcg

SEQ ID NO: 1006 - DNA, 1323 bp, unidentified
  misc_feature 1..1323: note = Ga0136257_102499 JGI
  source 1..1323: mol_type = other DNA
atggatcaaaacagaatacttgtacttttcgcagatggcagcgaagcgatgccttgtcatccagcgagggcacgacaactgctcgacgcggataaagctgcagtatatcgataccagccgttcacaatcattcttactgaacgagaagatggcgatactcaggatgttagtcttcaaattgaccctggaagccaaacaactggattagcactggttgggcatttccaagaaggaactcggttaatttgggcagcaaacttggaacacagaggcgatcagatcaaagaagctttgaggaagaagagacagattcggcgcagcagaaggacgagaaaaactcgttatcgagagcctcggttcgaaaaccgaacgaaatcggatgggtggtttccaccgtccgttcaatctcgcattgataatattagagaatgggcgaaacgactaacgagccgttgtcctgttgcgcaaattaaatgcgagacggttcgttttgatactcagaaaattcaaaatccagaaatcaaaggaaccgagtatcaggacgggaccctgaaaggctacgagctcagggagtatcttctgcagaagtttaatcactcttgcgtatactgtggcatcacagatgtacctttggaactcgatcacgtaaaacctgaaagccgtgggggttctgatcgcactagtaatttagttgtgtcctgcacggtctgtaatcgggacaaaggaagtcagcccgtcgaggaatttgttgaagacgaagaaaaactgagttggatcaaaaagagacaggatgaaaccatgaaggacatgggtgtgatgaacagcatccagtggaaagttggtgaagtacttgaggagaccggtctacttgtaagctaccactctggaggagaaaccaaatataatcggaccgatcaaaactataaaaaagaccactggatcgacgctgcttgtgtcggagaaccgaatgtgcatattccaaagacctatcgatgtttgaaaatcagagcgaaaggtaggggtgatcggcagatgtgtcgagtagatgccaacggttttcctcgcacgtctccgaagcaatacaaacgcatcgatggattccagactggagatctcgttcgggcagttgtgcctgaaaaatacaaaactagcggcacgcatgtagggaaagtcacgattcggtctaatggattcttcgcgataaacacgagagaagaacaagttgatggaattaactcaaaatactgcgagcctcttcagcgagctgatggatactcctactcacaagaaccgaaacaaactacgcactcctctcttgattaa

SEQ ID NO: 1007 - DNA, 317 bp, unidentified
  misc_feature 1..317: note = Ga0136257_102499 JGI
  source 1..317: mol_type = other DNA
gtcaacgacctccgagtaaaaccgggagcttctaacagaagctcacgttgaccagcctaagtcatgctgaaaggctacgactacgttacgggcaaaaataacgataggcaccctggagtgccctcccagctccaggctctgcggcttctggataaacagactgagggtctaagtcagttccagtggcaaacaaactgtccgataacattggcgagggagccctgacctgcaagcgcgacattcgcgtaagcagagactggtaggtaactactactaacaattaataatcgcaaaccatagcgatggatcaaaacaga

SEQ ID NO: 1008 - DNA, 708 bp, unidentified
  misc_feature 1..708: note = Ga0137385_10003252 JGI
  source 1..708: mol_type = other DNA
atgtcacaggtgtttgtcttagatacgaataagcaaccgctcaatccggtgcatcccggttgtgcccgcctgctcttgaaacagggcaaggctgcggtctaccggcgctacccgttcacgctgatcctcaagcgtacggtggagcgaccggagcttcagccgctgcgcgtcaagatcgatccaggcagccagaccaccggcctcgccctggtcaacgatgcgagcgaggaggtcgtgtgggcggcggaagtgcgccaccgggggggacagatcaagcgcgccctggacaagcggcgtgcggcgcggcgtagcaggaggcagcgcaagaccaggtaccgcccgccacgctttcggaaccggaggcctcgcacgggggccctgccgccctccctggagagccgggtgtgcaacgccctcacctgggtccgccgtctgatgcggctctgccccgtcaccgccatcagcttggaactcgtgcggttcgacacgcaagccctccagaatccgcagatcgagggcctcgagtatcagcaggggacgctttggggctacgaagtgcgggaatatgtcctgctcaagtggaatcaccagtgcgcctactgcgacgcgcgcgctgtcccgttggaactcgaccacgtgcagccgagagccaaaggcggctccaaccgcgtcagcaacttaacactggcctgcacttcctgtaaccaa

SEQ ID NO: 1009 - DNA, 312 bp, unidentified
  misc_feature 1..312: note = Ga0137385_10003252 JGI
  source 1..312: mol_type = other DNA
gtcaggaacccgccccctagaagggggcaggcttgctcacaagaagaggaagcctcactcttgaccagtctcagccaccagtcttctccttcggaagagggctgacggggctccattcagggcgaatgcataggcacgtccgggtgcttcaccagcccggaccgctgcggagcagcattaaacaggtggacggggtaaagccagtgtgctgctcatctgaaaccgctcaggaacgttgacgaggtgagcatcacccgcgcaagcggaggctcgcaagagcaaaggaacgcaaggaatggctcgatgtcacag

SEQ ID NO: 1010 - DNA, 975 bp, Ktedonobacter sp.
  source 1..975: isolate = 13_2_20CM_2_54_8; mol_type = other DNA
gtgttgaagttcgcacccagggatgctgccccagttcctggctctgcaacctctgacttaaagaactgcggtccaggaacggtggtcagaggaaagtaccgcgtgctatccccgtcgaggggatcgttttcactccgaaaggagccttacctgatgaaggtgtttgtgttatcacaagaaggaaagcccttgatgcccacgactccacggcgcgcaagagtgtggctgaaggcaaaacgtgcccgtctcgtgcgccaagagcctttcaccattcgcttgcgctttgccacaaaggcgcatgtgcaagcggcgaaggtgggcgttgatactggctccaaaggcgtgggcattgctgccatcgccaatggcgaggtggtcttccaggccgaggtccatctgcgtgatgacatcacggagaaactgacccaacgacgccagtttcggcgcaatcgacgtgctcgcaagacgcgctatcgtgaagcgcgctatgacaatcgacgccgacctgatggctggttgcccccttctctgcactccaaagcagaggcgaccgtcaaggcggtgcgcttcatggcctcctttttgccggttggtcgggtcaccgtcgaggttggccgttttgacacccaaaggatgcaaaaccctgacatcgcccacttggagtaccagcaaggcgaactgcaagggtacttcctgcgtgagtatgtcttagcaaagtggcagaggacatgcgcctactgtgaggcgcgtgaggtgcccttggaactcgagcatattgtccccaggtcaaggggaggaagcaatcgggccagcaatctcaccctggcctgccatgcctgcaaccggcgcaaagggcagcaaaccgcagcggagtttggcttcccagacgtgcaggcaaaggctcgtgtgccgttgaaggatgccgcgcatgtgtcttccctgaaaagccgggtggtccaggacttgcaagccgtc

SEQ ID NO: 1011 - DNA, 298 bp, Ktedonobacter sp.
  source 1..298: isolate = 13_2_20CM_2_54_8; mol_type = other DNA
gtcaatgacctccccacagagtggggaggcttgtgaggggttcgcccctcgcaagccggattgaccagacgacacctccgagccagtcgcgccgagaaagcgagcgtcgtggctggtgctgaagaggtgggcgatagcaccaagtgttgaagttcgcacccagggatgctgccccagttcctggctctgcaacctctgacttaaagaactgcggtccaggaacggtggtcagaggaaagtaccgcgtgctatccccgtcgaggggatcgttttcactccgaaaggagccttacctgat

SEQ ID NO: 1012 - DNA, 1068 bp, unidentified
  source 1..1068: mol_type = other DNA; note = Wastewater metagenome
atgttagttccagtcatggatttggacgggaagaccccgctgatgccaacgagaaagcaccgcgctatgcgcttgatcgagcgcggagacgcgaccccgttttggcgtaaaggagtgtggtgtattcggctcaaccgtgagccgagtgcccgcaatcttcaggcgattgtcgtaggagtcgatcccggctcgaagcgggaaggttattcagtagtctcggaggcgcacacgattgccaacgtccaagccgacgcgataacgcacgtcaaagacgcagtcgaagcacgacgtaacgcacggcgctctcgccggacacgtaacaagccacaccgtgcgtgccgttcgaaccgtggcgcgctacgtcggcaggagaatgggtggctccccccgtcaacgcgggcacggtgggagtggaaactacggaacatccggttcctggcgcggctgtaccccgtcactgacgtggtggtcgaggacatcaaagcccgcacccgcaaaggacgaggaggacagtggaacgggtcgttcagcccgctggaagtcggcaagcagtggttctacgtccaagttcagaaagactatcggctgtacttgaagcaaggctgggaaaccgccgagattcgcaaaacattgggcctgtcaaagtcgtcagacaagatgttggaacgttgggacgcgcattgtgtagatgcgtgggctatcgccaacgacgcgctgggacagccacatgccgctcctggcgacacatcgatgctggtcaccaaatcgctgaagttttcacgccgacagttgcatcgcttccagccctctaagggcggtgaacgtcgcccttacgggtctacgcggtctctaggattcaagcgcgggtccatcgtgcgacacccgaaatggggagtgtgtctcgtgggagggacctcccagggacgcatcagcctgcattcgcaggaaaccaacaaacgtctatgccaaaacgccagagttggggacattacgttcctcgcgtataatgataggagccagcgttatgtcccctccgtgaatgttggggtctccacgctgggaatctga

SEQ ID NO: 1013 - DNA, 210 bp, unidentified
  source 1..210: mol_type = other DNA; note = Wastewater metagenome
gtcaataacccctccccaatagggaggggcttggggaagcgaaagccacctcgcgaaaccgagataacaccgttgactacacaacaactgaatagttgaactgttgatctgggcgtggcagcccaaacgacgctagagatgcccacctagtccctagcctctcggatcaggagtgtggaaggtgcgtatataggaaggcgtaagccacat

SEQ ID NO: 1014 - DNA, 1464 bp, unidentified
  source 1..1464: mol_type = other DNA; note = Mouse gut metagenome
atggtatatgtactggacagggacgggaggccgctcatgccgacagacaagcacgcatacgtgcgcatcctgctgaaatccggcagggcatcggtggcacgcgtgcacccgttcaccataaaattgaactacgacactacatacaatgtacggccggtcatcctcggcatcgacccggggcggacgaacatagggctgtgcgccgtaacggaggcggggaaaccgctgttcaccgcggaggtgcggacgaggaataaggacatccctggtctgatggcggcgcggaaggcattccgtcaggcgcacaggaagcacaggcggagagagaagcgccagaggcgcgcactggcaaacggaacggcgctgaaggacggaaagatcgagcggcggcttccctcgtacgggaaggacaggaccgtcacatgtaaggtgatcaggaataaacaggcgcggttctcgaacaggaaacgccctgacgggtgtctgacgcccacggcgtcacagctactgcggacgcatttaaacctcgtaaggaaggtggcggggttcctccccgtttcaaaaatcgtgctggaactcaataaattcgccttcatgaggctggacgacccctcaacgcacggcgacatgttccaacgcggcccgctgtacggctatgacagcagcgttgagtccgcagtgtacgcccttcaggacgggaagtgcctgctctgcggcgaacccatacaacagtaccaccacgtgagggaatgcaggcgtgacgggagcgagaccgtgaggaaccgcgccgggctgtgcacggcatgccacagactcgtgcacacggacgaagcggcgcgcggaaaacttgcatccgtcgcggcgggcatgcggaagaagcatgacgcgctgggcgtgctcaaccagatcataccgcacctcgtggaagggctgtccgtggattatgacgtgtccgcaacggcggggtgggagacgaaggagttcagggaaacccacaatattccgaagggtcaccacctcgacgcctacgccgtggcgtgctccgcactggaaaactttgaagtgtgtgttcccaatgaatgttaccacatatgccagttcaggaggcatgacaggaaggcatgtgaacgtgagatgtacaacaggaactatgtccttgacgggaaggttgccgcgcagaacaggcacaaagccatggggcagaaggcggacagcctcgaagaatatatcgcaaagggcgggagaaccgaccgcctgaaggtgaagcatgcccgcagggcgatgaaggacatggcaaggcattaccccggctgccaggtggtacataacggcaggataaggacgctgctgaagcgggcgtcggggagctactggttcgacgacggttcgaaaagccccgtccgtaagacggatgtgacactgaacaattcggggctggtgtttgtatcaaacacgttagcttaa

SEQ ID NO: 1015 - DNA, 258 bp, unidentified
  source 1..258: mol_type = other DNA; note = Mouse gut metagenome
ataaaatgattccgtgcaccaatattccgttacataatgacccggcttgtggatgaggtcattttctgaccacatccacgggtcgggtacaggcatattctgacggcgtcggtcgtgccccttacggccgtggcacccgcggatggtttcccagtccgcagcactgcagagccggcaggaagccgggggagacattacccccgcgcaccagcgcggggagtttacattccatgtaaaggagacaagtaaatggtatat

SEQ ID NO: 1016 - DNA, 1509 bp, unidentified
  misc_feature 1..1509: note = Ga0223845_11796712 JGI
  source 1..1509: mol_type = other DNA
ttggcgaagtggaacacgtgcggatgcacagaacccgcctggacatatgccctggcggaagacgtaagtcattgcaaccgtttgtttaaggaaaggagggcgtcagtggctgacatgagagatgtcgcggtgatctcgaagacaggcacgtcactgatgccgacgtcggggtaccgcgcaaggaaacttcttaagaagggaaaggccgttatcgaaaaataccgccctgtgttcaccatccgccttacagaacgcgaggacggtgaggtgcaggacatggaactgaaggaggatacggggtacctgcatatcgggatatctgtctgttccgaaaaacacgaacatatgcaccgtcagtacgaccttctgagtgatgaggtggagaaacacaacgaccgtctgaaatatcgcaggacgcgccgtaacagaaaacgttacaggaaaccgcgctttgacaacaggaagagtcttatcacaaaagacggttttgcgccctccatcaggaacaggcgtgacaggcatgtggatcttgtgcgtgagatatgcgcggtaatgcccataaagcgtgcctacatcgaaatgggacagtttgacacgcaggtactgaaagctgttgaactcggccttccgatacccgaaggggaggattatcagcacggagaacagtacgggttcatgacactcagggaagcggtattcacaagggacagccatacctgtgttgtctgcgggcgctccgttaaggaaggcgccatccttcacgaacaccatatcgggttctggaaaggcgaccgcaccgatcgtccttccaacctcgccacggtctgcgaaaaatgccacacgccttccaaccacaggcctggagggaagctgtatggcatgaatccggtcatgaagcccctgaaggaggcgacattcatgacgaccgtgcggtatgacatgctgaggaggatgaaagaatccgccccgcacgtggcattccatatgacatacggcgcggcgacaaagctgtcccgcagaaatctcggcattgaaaagacacacgcgaatgacgcgtatgccatgggaaaataccatccgaaacaccgtgcgcgccaggaaacgttccggaagagaaggcgaaacagccgtgtactggaaaggttctatgacgcggtgtacatcgatacgcgggatggccgtaagaagaaaggttcagagcttggatgtaacaggacgaaccgccgtgagacgaggatgtctcccaaaaacgaacgtatctttcacgggaagaaggtttcggcgggacaccgttccatcaggaaagaacgtacacgaatcacacccggaagcctggtaaaatacgacagtgaggtgatgaccgtaaaggggatccacagccccgtttcgggaaccaatgtggaattcgcaaagcccgcgtcaaacggaagaaaatccgcctctctgaaaaagctgaaagtactgaaagtaaacctgttttcaggatgggagcgggtaaacactttataa

SEQ ID NO: 1017 - DNA, 402 bp, unidentified
  misc_feature 1..402: note = Ga0223845_11796712 JGI
  source 1..402: mol_type = other DNA
gtcaactgaccacctcccatgcggtgaacgtcccggcgttcatcctgtggaaggggcttgcgggaagaaattttcgtgagtcggttgattagctgagcaggaacaggtcctggtggaaaccgttcctgctgcacttcaaaagagtgtaagtgacttccatgtgtttacagacagaagttaccggaagagaactacgttgccggcgaaaatacaggcaccatgggatactccacacgtcccatgcaactgcgccgtggcattaaacatccctgagggtcaggggaagtgtgctgcggatataaaaccgtcggataacattggcgaagtggaacacgtgcggatgcacagaacccgcctggacatatgccctggcggaagacgtaagtcattgcaaccgtttgt

SEQ ID NO: 1018 - DNA, 1272 bp, unidentified
  source 1..1272: mol_type = other DNA; note = Human oral metagenome
atggtgtatgttatttcaaaatacgggcaaccgcttatgccaattcgtagacacggtaaagttcgaagattattaaaagaagggaaggcaaaggttactcatagagaaccgttcactattcggctactagttgaaactgaaagtaatgtatcagatttaacacttggggttgatacaggttcatcaaaaataggttgtgcagtagttacatcaaaagaagaggttttatatttatcagaagtaaaaatcaggaatgatatatctgtaaagatgaaacggagagcaatatatcgtagagcaagaagaacaaggaaaactagatatagaaaatcaaaatttctaaatcgtggtaattctataagaaaagatagatttagtcctactatgacaagcaagattaactcacatattagagagattgagtttatcaagtctatcctgcctattaaatatttaataattgaaactggaacgttcgatacgcatttacttaaatatgaaggagaggcgttcaatcgtcattggggatatcagaaaggtcaaaattacagattcgctaattcaaagtcagcttgtttaaatagagatagttatacttgtcaatgttgcaaaactaaaaaaggaacacttcatattcaccatattgtatatcggtcaaatggtggcgcagatactttagataatctaattactttgtgtgcagattgccataaaaaacttcaccgcggagaacttaatgactttgaaagtaagttagctggtaagaaaaaggggaaactcaaacacgctacgcagatgaatagtattagagttcaacttttaaaacattatccagaagcaatcgaaacatttgggtttataactaaagaaaatagacaacttataggcttagagaaaaagcattacaatgacgctgttgtaatagctactggatgtttaaataagcctaagtttttagtggatgttgtgtataagaaaatatgtattgcaaaaggtcggtaccgattacatcaaggtcagcgttcagaaatgaagctcccaagaggaaaggtcgaaggttttttaaataaggacattgttaaatatagaggttgtaattatttaattaaagggttaataagtcgtggtggttattgtgcattgatgaatattgatggcattacacagagatttgagaatccgaaaaatgttaaattaaacaatcttaaaagagtgtccgcaaggagtacaacaagatgtataagccagaaaatcattccaaatatagcttaa

SEQ ID NO: 1019 - DNA, 328 bp, unidentified
  source 1..328: mol_type = other DNA; note = Human oral metagenome
gtgacgctgcactcagctaaaggccgagtacctttaaggtacgctgcgtcaacagattgagctctcagaaatgagggctacgatagttgagagaaatacatacacacctgcagttgtcgcctcagactgctgctctgtgactactaattaagtcgagaggaaagtgctaagtctctgtgttagtagtttaaaaacctcaattatcattgtcgagaggaagtcggattcttatcttggttacagagataagatacgcactacagttgaaaacgaactggtgtataacattaaatcgttttaatctaagaaaggagccgtagatactatg

SEQ ID NO: 1020 - DNA, 1299 bp, unidentified
  misc_feature 1..1299: note = Ga0256407_10001717 JGI
  source 1..1299: mol_type = other DNA
atggtttatgtacaagacttcgacgggaatcctctgatgccgactgaaaagtacggcagcgtgaggatcatgctcaggaccggacgggccagggttgtgaagtcatgtccgttcaccatacagctcacgactgagaagcgacgctatacccagcccgtgagccttggggtcaggtgcggttcccgccgtatcggcctgtcagcgacgacggagaagaaagaacttctgtgcgctgccggtgaacttaggactgacatcgtggatctcctgtcaacacgacgcgaatcccgccgtaccagacggtcaaggctccgtcacagggaagcacggtttgacaaccgcgtcagcaccaagaaggaaggctggctgccgccatcggtgaggagcagaatggacttccacctgaagatggtggactgggttcgcaggatccttcccgtgactacggtcacttttgaggtcggctcctacgacatccagaagatcaagaaccccgacatctcaggtgagcagtaccagcagggcgaacagctcgctttctggaatgtcagggagtatgtgcttgcccgcgacggccacaagtgccagcactgcaagggcaagtccaaggatccggttttgaatgtccaccacatcgagagtcagaagaccggcggcgatgccccgaacaatcttatcaccctctgtgagacctgccataaggcataccataggggagagattgatctgaaagtccgtcgtggcaacagcttcagggatgcagcagccatcaatgtggtgaagaacgctgtgtaccgcaaggctatacagtctttggatggctgtagtgtctgcaggacatacaggtatgtcacgaagcacagacggataaatgcaggtctggagaacgacagctacactgactatagggtcatcagcggtaatctggcggcaatggtttctgacagtgtattcgcgcttcggcagatacgcaggcataatcgccagatccacaaggcaaatatcctgaaaggctgtcgtctgaaaaagaaccaggcaccctatctggtgttcggctaccgcctgaacgatattgttctcttcaagagtaaccggtgtatcatcaccgggcgcaggagcagcggtagttttgccctgaaggacttggaaaccggagataggtatgcagctgtcagctacaagaggttgtccttgttacaagtctgtaacagaactgtagtgtttaaccaaaaaagaggaatgtccggcgtttcctcagcccgcctgaagacgggagtatccacgccgaatgaatcatga

SEQ ID NO: 1021 - DNA, 278 bp, unidentified
  misc_feature 1..278: note = Ga0256407_10001717 JGI
  source 1..278: mol_type = other DNA
gtcagccacccacccctgaagggatgagcttgtaacagctccagctgattagacggcactctaatgtgcagccgttacgggcgaatatacaggcacctttggatgttcttccaagtccgaagctctgcggccagtggttaaacagtcctgggaggtagggacagtgctgctggcacacaaaccgcccgataacaacgtcgatgggagcattaccctccttctggaggagtcatctgccaaaaggcagtatttttaaacgactaaaaaagtaaagtatg

SEQ ID NO: 1022 - DNA, 1479 bp, unidentified
  misc_feature 1..1479: note = Ga0223824_10002447 JGI
  source 1..1479: mol_type = other DNA
atgtatgtagtttatgttttagacaaagacggcaatccactcatgccaacaaaaagatttggacatgtacgtaagcttttgaaatccggacaggcaaaagctgtatccactaaaccttttgtgattcaacttttgtacgagtccactaaatttactcagtcactttatggcggaactgaccccggcagaaccaatattggtgaagctgtggtcaaccagaagggggaagttgtctatgctgcgcatgtcatcacaaggaataaagatattccaaagttaatgactaatagagccgctcatcgcagagcttctcgtcgtggcgaacgactccgtagaaaacgcagagcgaaaaccaacggtactttaacgaattttcccgacgggcgaaagctacctaaatataaggatggggttctagtgctgaaagacattattaatactgaggcgaagtttgctaaccgcaaacgtcccgctggatggttaacaccaacagcaagacaatgtgtgcaaacgcatattaatatcatcaaacagatttgcaaaatcttgcctgtaacaaactggacactggaatacaacaaatttgctttcatgagaatgaatgatggctccgtaaaaggcatggattttcagaatggtagaatgaaatgtttcgccaatgttaacgagtatgtctgttcattacaggacggacattgcgtcctgtgtgatggtaagattgaccattaccaccatatcgtacctcgtcataaaggaggtagtaatactccggagaatattgttggactatgcagtgagtgtcactctgaaatacatcaaaacaaagttacccttgatgatattggtcttaaaaagaaatatgctggtacgtccattgttaatattgccatgccatatatttacgaagagttattaaacatgtttagtgaggagcattttcacgtttgtgatggctatgctacctcaaacaaaagagcagaaaataatattgacaaagagcattctgctgatgctgcttgtattgcagcaattggcagcaatgtcaatcttaaatatgatatggaaaatatctttgaaataaggcaatatcgcaatcatgatagagctatcgttaataatcagcctgaacgaacctataaagtaggcagaaaggtcgttgccaagaaccgcaagccacgttttgagcaagataagaaagtgcctgctataagtgattggtatgaacagctttgcgacgaaatcggctatcggcaagctcgtatagcattatcaaaagttagagttataaagtcgtatcgcagatacaacgatactaaaagaattctggccggtgcgatattcctgtttcaagataaaagatatgtccttaccagcagccttacaaacggacaatattacagagcttatggatatggacaaaagaatttttcagctcgaaattgcacaattgtacaacgaaaatctttagtatatgtttag

SEQ ID NO: 1023 - DNA, 223 bp, unidentified
  misc_feature 1..223: note = Ga0223824_10002447 JGI
  source 1..223: mol_type = other DNA
gtcaactacctctgctttatgcttcgcatttgaagcaggggctttttcgagcccctagcagacgtagttgagcagagacatgacgtagcaggattaagttccgaaacaccgggggtgatgccaagcctccagctctgtgcgtagctacgccgagtctatggcaatctaacttcgtgacgactgtcacgaagacttatctcaaaggagatttcaaatgtatgta

SEQ ID NO: 1024 - DNA, 1365 bp, unidentified
  misc_feature 1..1365: note = Ga0307929_1001023 JGI
  source 1..1365: mol_type = other DNA
atgttaagtaattcagtatgcgctttaaatcaaagaggtaagccgttaatgccttgctctcaaagaaaagcaaggcttttgcttaaggcaaaaaaggcaaaaatagttgctcatagaccttttactattcagctaaattatgccactggggaaactaaacaatcaattaccataggcgttgatgctggttacaaaaatgttgggatctcaattgtaagtcctaaaaaagaatttttatcaagtgaaattcaattgcttgaaggacagattgaacgaaacaaaaagcgaaagatgtaccgaaataacagaagaagtcaattgaggtacaggaagccaaggtttgataaccggaaaacgcccaaagggtggttggcaccaagtattgggcataaatttgatagtcatattaagtttattgaacacttaaaatcagtctttccgattactgaagtgattattgaagtggctacctttgatattcaaaagattaagaatacagatataagtgagactgaatatcaaaatggtgagcaaaaagatttctggaatcttcgggaatatgttttccatagagattaccatcaatgccagagtctaaaatgtcaggaaaaggaaaaacaagacaaaaatcagatattaagaacacaccatattggtttttggaaaaaagatagatccaataggccagggaacctaatcactctttgcactaaatgtcatacacctaaaaaccataaaaaaaagggtatgctgtttggttgggaacccaaggttaaatcctttagacctgaaactttcatgtcaacggttgggtggaaaatggtcaatcaattaaaatgcaagcatacttatggttatcaaaccaaatcaaaaagaattaatcaaaagcttgaaaaaactcattatactgatgctttttgtattgctaatggtactcatcaagaacgaaccgcaccaataatgtttaagcagaaaagaagaaataaccgaagtttagaaaggttctatgatgctaaatatattgacattcgaacaggtacggttctcaaaggtgctgagttacattctggtagaacaaccagaaacaagaatctcaatagtgagaatttaagaaaatatagaggggaaaaaaagtcaaaaggaaaaagagtgattcgaaggcagagatatctttttcaaccgcatgatttagttgtgtacgaaaacaaaatttggaaagtaattggtacacataataagggagcttctgttagaattacaaatggtcaacaaacgtttagtcgatctccaaagaaactcaagcataaattacatattaattcattaattttaacacaggaggtggcaattcctcccctgagctaa

SEQ ID NO: 1025 - DNA, 303 bp, unidentified
  misc_feature 1..303: note = Ga0307929_1001023 JGI
  source 1..303: mol_type = other DNA
gtcaacaacccctgagctaaagactcaggggcttgcaaagtaacttttgcaagcctggttgattagcctaagttttaattaactacgttactttagaaaaatataggcacctttagatactccactcgtctgaagctctgcggttagtgtttaaacatctctgagggtaaggagaagtgatgctgacaaccaaaacctattgtaacattggcaaagtggacaaattatcttcggatgaggacaggacttgagagtacccgtcaattttttagaaaaagtaggtaaaaaatgttaagtaattca

SEQ ID NO: 1026 - DNA, 1401 bp, unidentified
  misc_feature 1..1401: note = GENOME_ACESSION: mgm4530144.3 MG-RAST
  source 1..1401: mol_type = other DNA
atgggagatgtaggtatagtccaacctacacgtcacccagcactgctggaggaaggaggaaaactccatatggtgtttgtgttgaacagggataaaacacctttagcaccctgtcacgaggcagttgcaaggaaattgcttaaacaaggaaaagcagttgtacacagaattttccctttcacgataaggctcaaagaacagaaggatacatcaatgtttaaaccagactacagactcaaaatcgattatggaagcaggcatacagggattgcaataatcaaaaacaactctgaagtaattttcatgatgcagctacatcataggacagacgtaaaagaaaatatagatagaagacgtgcattccgatgtagcagaagaaacagaaaaacaagatacagaaaaccaaggtttttgaacagacgaagagatgaagattggttaccacctacactacagagcagggtaaacaacattgcaacgtgggtaagaagactttgtgagttgtgtcctattacagtgatttcttatgagaacgtcaaattcgatacgcagttgctaaggaatccagagatttcaggtattgagtatcagcgaggaacgttgcaagggtatgaggtcaaagaatacttgcttgagaagtttggcagaagatgtgtttactgtggtgctacaaacgtaccacttgaagttgagcatgtaattccaaaatcaagaggtggaacaaacagagtagataatcttgttatagcctgtcatgaatgtaatcagaagaaaaggaataagacagcggaagagtttggatatccagaaattcagcaacttgtcaaagaaccattaaaggactgtgcagtagtcaacactactagatggaagatctacaaggttttgaaggcaactggactgccagtagaatgtggtacaggagctactacaaagatgaacaggctgagacttggtttacctaaagaccatcattttgatgctgtatgtgtaggacattctacacctgacaggatttggttcaagacaggaactgttttgcacgtgttagcaaaaggtagaggcacaagacagattgctgtgcttgatagatatggttttccacgagggtatagaactaggaagaaatgtttttatggctttcaaagcggagacatagtaagagctaacgttccgaaaggcaaatacaaaggagtatggacagggatagtagcatgtagagaaagtggatattttgatataaagaacagagctggaaaaaggattgctcaaggtatttcatacaaatattgcaaagtagttcagcggtttgacggatattgttatgagttggaacaaacaaaaatatctggcacatttcctctccaacctgtagaggttggagcctccatgtgccagtag

SEQ ID NO: 1027 - DNA, 290 bp, unidentified
  misc_feature 1..290: note = GENOME_ACESSION: mgm4530144.3 MG-RAST
  source 1..290: mol_type = other DNA
gtcaactaccacccgtctgtagaggcggaggcttgaaagagccatggttgaccagcccaaggaactgacctgaaggacaagggaatgatgttcctacgttatccctgtcagggcactctggggtgcgtcccaagctccagacactgccgtgcagacttaaacagtcctgagtggtagggacagtggtctgcacatggcaagcagggataacatgggcgatgggagatgtaggtatagtccaacctacacgtcacccagcactgctggaggaaggaggaaaactccatatg

SEQ ID NO: 1028 - DNA, 774 bp, unidentified
  source 1..774: mol_type = other DNA; note = Metagenome
gtggttgagcagaagcatggatggatacgtgtcacaaggcaggcactgccggattttcccagttcggcacaatgcagagtgtccacccagcttagggaaacagtacgacaaggtgtgcacaggtttacaaccggtgccgtccgatgcgctggacggcggtactgcacgcagcatttaatgaaacaaaaaggagggcatcacatgccggatacagactacatatatgtgcttggcagggatgggaaaccgcagatgccgacaaaaagaaaaagatatatcaaaaagctgcttgatgctggtaaggcaaggattgcctgccttggtgccggtttgataccggcggcagcccaggggtttacctatgtacataaaatcgtacagttccggagacatgaccgtgcaattatcaataaccagagggagaggacatacagactcagtggaaagatcattgcaaagaaccgcagaccacggtttgaacaaaagtgcccatcactttccggctggtatgaagaacaggttaaatgtcatggccggaaggaggcagaccggatgcggtcacagcttaccgttgagaaaagcacaagacgttacaacaatccggaccgtctgatgcctggtgccctgttcgaatacatgggtgaataccatgtattgtccggacagttgtcaaacggccagtatcttcgtgcgtatggtgataagaaaacaaactacccggcaaagaaatgccggatcataagacacaacgaggggcttgtatttgttgcgtag

SEQ ID NO: 1029 - DNA, 198 bp, unidentified
  source 1..198: mol_type = other DNA; note = Metagenome
ataaggtaggaaaggcaggggaagaagaggtgtgattatggcagaaagaacagggaaaaagaaaaagactccgatgtatgcggaccggatcggcggtgtccgtccggtgtatgcatgcccgtcatgtggggagcatctgtttattccggatatctgcgtagcgtgcgggcagaaaattaaatgggatagttaatgtgt

SEQ ID NO: 1030 - DNA, 1341 bp, unidentified
  misc_feature 1..1341: note = Ga0310691_10013239 JGI
  source 1..1341: mol_type = other DNA
atgactgtattcgttcaggacataaacggaaacccgctgatgccgacagaacgctgcggcatggttcgccgcagaataaaagaaggcaagatgtctattgtctcatatgaaccgttcacggttcgactgacatacgacaacgggaagaattatgttcaggaatgtactctcggcattgactcggggacgagtcatatcggtttgagcgtcactactgaaaagaatgaacttttcagtgctgaagcagaagtaaggacaagggaagtaaaagacaaacttaaagaaagaaaagaaaacagaagacacaggagatgtaagaaccgtcgctacagacaagcccggttcaataaccggactcacagcaagaaagcgggatggcttcctcctactgtttggcagaacataaacacatacactcttttgataaaaagagtgagttctattcttccagtcagtaaaataatatttgaagctgctgactttgatacacagaagatgtgcaatccagatatctccggggaagaataccggcacggtcagatggaaggccatctgaacacaagggagtttgtattatggagagacaactatacttgtgccatatgtaataagaatgctttcactgacaaagtgaaagttcattcacaccatatcatatggaaaacaaacggaggttctgacagacctgataatcaggtctgtgtatgtgagaagtgtcacaacaagattcacaaaaacaaggcacatctgccagagaacctgaatatcaaagcaaagactgctttgaagttaagggatgccggactgatgaacaacataaagtggcaagcagtcagggaaatcaggaaaacatttcctgatattccggtgaaagtgacatacggatacaagacaaaatctgtcaggtatgttcataacatagagaagtctcatgcaaatgacgcatacgtcatttccggaaatatcaatgcgattcattcagacagaatctatttgtacagacagaaccgtcgtcataagagacaacttcaggactttgcaccgagatcaaggagagacaaggatgggaaattcaaaatgtcaagaaaagagagaaagaaaagaggatatgtgataaaaagatgtaaggagataaaggagatatacggcttcacgaagcgaagcctcgtcaaatacaataataagttattcactataaccggtctcagagcgaccgggaatttctcactcagaaacaccaaagacaaaactgaatcaattgattcagtttcacacaaagaactcaaattgataagaaaacaatacaaatcattgtatatagaaaatatcaagaaaagataa

SEQ ID NO: 1031 - DNA, 341 bp, unidentified
  misc_feature 1..341: note = Ga0310691_10013239 JGI
  source 1..341: mol_type = other DNA
gtcaccaaccgccgggtctgaagaacccgcggcttggctgaccggaaggtcgacacaggctgatggtgaataccctaagtctacggagacagccggtcgatgaccggcacactcccaggctacgttacttcagaatatatagtcactatcggatgtttgtccaagtccggtactctgaggcagataactaaacagttctatgcggtagggacagtgagtctgcatacaaacctgaggataacattggggatgggctttcaccggagcaattccgttgctccgtgtacttatggattagtttccatttaaattaaaaaaaaaacaaaagaaagaaaatgact

SEQ ID NO: 1032 - DNA, 642 bp, unidentified
  misc_feature 1..642: note = Ga0117908_1060975 JGI
  source 1..642: mol_type = other DNA
atggtgtcgggtgttgcctgcgtaggtaacggagaaatccttttctctgctgatatcaaacatagaaatccagtggcattgcaacagaaagatggtttcaagacatttgtgcaagtccgagcagaaagacgcagagcacgcagaaaccgtcatagatggcacagaaaagcaagattcaataatagagcatcatccaaaagagctggtagattgcctccaactattaagatgaatgtcatggaagttgttagagttgtcaggcaaattcctctcccaatttcccatatcaccgttgaagatgttgctgtggatattaggagattaagcaatcctgatgtggaagggagtgaataccaacaatctaatcggctggacgagaatctaagacttgcctgcctgatgagagacaacttcacttgtcggaaatgtggtaaaaaggaaatcaaactcacatctcatcatatagtttggacttctaaaggtggcaaagatagtatttacaacttgataaccctttgcgagaattgccatgaaaaggtacactctacgggagaaagcggcaaaatcaagctcaaaggcggcaaagtaacgacaggctcggaacgaagtggagaggtttcatccgatggatggtttttctga

SEQ ID NO: 1033 - DNA, 288 bp, unidentified
  misc_feature 1..288: note = Ga0117908_1060975 JGI
  source 1..288: mol_type = other DNA
gtcaatcacccctcctgattccgagaatcagaaggggcttgcgtagacaatgcgcaagccccaggttagaccagcccccttcatctacgaggtgaaggagaagttacctgttgtatcacaccctgggatgtgcttccagttccgatccataaggacacggctctgtggcttattcgtaaacatttctgtgagggtaggaagagtcgaataagcgtaaaaacacaggataacaggggcgaggaggaatttactctttacacgtaggaggttctaacaaacataatgcgt

SEQ ID NO: 1034 - DNA, 1008 bp, unidentified
  misc_feature 1..1008: note = Ga0117908_1013265 JGI
  source 1..1008: mol_type = other DNA
atgttacaaagagtaccagtattacaccaagacggaacaccactgatgccgtgcaagccagcaaaggctcgtaagttactacgtaatggtaaggctgtcaagcgctggacaagagaaggtgtgttctatattcaacttacttgggatagtacaaaacgtactcagccgatgtgcttgggtattgacccaggcagtaaattcgatgggtacgctgtgctaactgaccaggagattgtgacctccgcaatggcaatattgccagacattacgaggaaagtaaagaacaggagaataatgcggaggtctcgacggcagcgtaagaacagacggcgcaaggtacgtcggaaagatacgaagaaggctggatggattagccctacacaaagagccaaagtggaattcagactaacgctaattaggagatacctgaagttatatcctattacctactttgctgtggaagatgtacggttcaatcactacaagaagcgatggggtaagcacttctctggtgttgaaatcggtaagactatgctttatatcgaattggagaagtttggcactctctataagttcgagggttggcaaacaaaggaactaagggatagagatgggttgaagaagagcagtagcaaagacaagttgagttttgactcacatgcggtagatgctgctgtaatagcaggagaagtaatagggtatgtaggtgattataatgtaccagagttctgggtattcaaacgccctaatctacgaagacgttcattacacttgcagaacccgcagaaaggtggaataagacgggtacatggtggaacatgggcattaggtattaggaagaacactgtgtgtatctggaaggatggcgtatatcgcacaggtggttcaacgaaaggtcgattaagtctgcacgatatgtcaatcaaagcaaagcgagtaacacaaagtgcgaaggtagaagatttgatgttactataccaccagactatttacgcggaaaggatgtag

SEQ ID NO: 1035 - DNA, 298 bp, unidentified
  misc_feature 1..298: note = Ga0117908_1013265 JGI
  source 1..298: mol_type = other DNA
gctaaaattgaccttcaactcgcacttgacagcatgaatggagatatgccccccgaacttatcgctatcgacctgaaaggcgcactggataaacttggaataatcgtgggaaagacaagtacggacgatattttggagagaatattttctaagttttgtattggcaagtgagagtcaataacccctgaattcaatttaggggcttgtgggaatgctaccacaagggtaactgttgaactatgactcagctttagctacgtgtttgagccaaggtggagcgatatagtcgggtacaaag

SEQ ID NO: 1036 - DNA, 708 bp, unidentified
  misc_feature 1..708: note = Ga0137372_10037833 JGI
  source 1..708: mol_type = other DNA
ctagacacgaacaagcagccactcaacccggtgcatccaggacgtgcacgtttgttgcttcaagcagggaaagctgccgtgctcaagtactacccatttactatcatcctcaagagcagtggagagcagccacaggtagagcccttgcgcatcaagctcgaccccggcagccgcaccactggcatagctcttgtcaacgaccggagtggccaggtgctttttgcggctgaactcacgcaccgaggccagcagatcaacaaggcgctcgacgaccgccgagcggtacgcagaagccgcaggcgtcgacacagcagataccgcaagcccagattcgataatcgccgcaggccacagggctggctggccccttccctcatgagtcgagtacacaacgtggtgagctgggtacaccgactccgaaagctctctccgatcacagccatcagcatggaattggttcgcttcgatctgcaaacgatgcagcagccagggatcgagggcatcgcgtatcaacaggggacgcttgctggatacgaactcagagaatttttgctggaaaaatgggggcgtgcctgcagctattgtgggaagcagaacatccccctccaggtcgagcacatggttgcgcgtgccaacggcggcacgaaccgcgtcagcaatttgtgtctctcctgtgaaccctgcaatacacgtaagggtacccaggac

SEQ ID NO: 1037 - DNA, 271 bp, unidentified
  misc_feature 1..271: note = Ga0137372_10037833 JGI
  source 1..271: mol_type = other DNA
gtcaggaacccaatccccttttaggggatgggcttgtttcggcaagctcacctgaccagactcagctagcccgctagctacgttcagagcgaaataggtacgtcggggtacgttgccagcctcgaccgctacggtgcaaggttaaaaggtgtacaagggtcaagccggtgctttgcacgccaaaccgcttatgaacattgtcaaggcacacattaccccggtcacacgggaggctcgtaagagcacaccaaggagttatccagtgagtttc

SEQ ID NO: 1038 - DNA, 1299 bp, unidentified
  misc_feature 1..1299: note = Ga0137380_10001296 JGI
  source 1..1299: mol_type = other DNA
ttgagcaacgtctttgtcttagataccaaccaccaggcattaaaccctgtccatccggcgcgagcacgcctgctgctctcctgggggcaagccgccgtgtttcgtcgctatcccttcaccatcatcctgaaaggggctctcgaccatcccgttcttgcccccttgcgtctcaagctggacccaggcagcaaaaccaccggaatagcgatagtcaacgatgcgacgggggaagtcgtctttgccgccgaactcacgcaccgagggcaggccatcaaagagcgtctggatacgcgacgggctgtccgccggagccgacgggcacgcaaaacacgctaccgcaagccacgctttgacaaccgacgccgcgcatcggaatgggttcccccttctcgcgagagtcgtctctccaacaccctcacgcaggtcaagcgccttatgagcctgtgtcccatcacagctatcagtcaagaactcgtcaaatttgacctgcaagccatggacaagccggagattgccggagccaactaccaacaagggacgctggccggatacgaactgcgagagtacctgctcgaaaagtggcagcgtcgatgcgcctattgcggcaaagacaacgtgcctctgcaaattgagcatattcatcccacaagcaagggcggcacgaatcgcgtcagcaatctcacgctcgcctgtgagccctgcaacatcgcgaaaggcacgagggatatcaaggagtttctcgcgaacaaaccagacgtactcaagcgcattctcgctcaatcaaaagcaccgcttaaagatgcttcggcggtcaatgccacacggtgggaactctcccgacgcttgcaagcattaggcttgccggtagaatgtggcagtggaggactgaccaagttcaatcgtctctcccaaggactcgacaaggcgcactggattgatgccgcgtgcgtgggcaagagcaccccaccgtgtctctctctccatggggtagtgccacttctcatcacggctacaggctcaggcaatcggcaaatgtgcggcacgaataagtacggcttgcctgttcggcatcggcaacgccagaagcaccactatggatatcaaaccggcgatatggtgcgagcggttgtcacctcaggccgacgcgttggggagtatgtcggacgagtgctcgtgcgtgccactggctcctttgatattcaaaccaaacaaggacgggtgcaaggaattagccatcgtttcttcacaccccttcatcggcgggatggctatcgttatcaaaaaggagaggtggtatga

SEQ ID NO: 1039 - DNA, 249 bp, unidentified
  misc_feature 1..249: note = Ga0137380_10001296 JGI
  source 1..249: mol_type = other DNA
gtcaggaaccccgggctaaagccacggggcttgtgtgaacaagccggaacctgaccagtctcagccgggcaaccagctacgttgggagcgaatgcataggcacgttggggtgcgcggccagccccaacctctgcgacggatggttaaacagagctaacgggttaactcagtgctctccgtatcgaaaccgctcacgaactttgacgaggccaccattaccctggaaacaggaggctcatcttgagcaac

SEQ ID NO: 1040 - DNA, 1134 bp, unidentified
  misc_feature 1..1134: note = JGI24023J19991_10009125
  source 1..1134: mol_type = other DNA
atgtccgttgatagccaaggcagtcagcgagctaagcctgcattgcccctcgaagggtgctcaacaggcccacgggagcctggccggataccggcactaatccccgtgctccacaaggacggcacttccctcacaccctgtaaaccggcgaaggcccgcaagctgttgaagggtggcgtagcagagaagcgttggaacaagctaggccaattctatattcagatgttggttgaaacaggcaaggagaggccagagatgtggctggccgacgatcccggctccaagtatgacggattagcgatagcctcgcacaaacaggttcagatggcggtcatgctggagctgcccacaggtattgcggacaagctcaccaatcgtagtcagttgcggcgggctaggcggttcaagctacgccggaggcccaagcgatttgataatcgccacaggccggagggctggattgcgccttcacagaaggcgaaggtagagtttcggctgaaggtcattcgtgagttgtgcaggatctatccgatcaccggctttgtcgtggaggatgtgcggttcaaccattaccgcaagcactggggaaagaacttctctaccgtcgaaattgggaaggcatacctctacgaggagttaaagaagctgggccagctcaagctctacgagggctgggagacacaagaggagcgggatgtgcaggggctcaagaagatcaagtcgaagtccaagcgcgtgctggagagccatgctgtggacgcggtagcaatgctctctaggtggctgggaacgcttgacttacgggtgccggagttttgggtgtttaagcacccgaacctacgcaggcgaagcctccatcttcagaatccagctaaaggcggggtccggcgagtgcatggcggcacagttgctttaggcgttcccaagaatacaatctgcattttgaaaagcaggctctatcgcacagggggttctaccaagggtagattgagcctgcacgatctatcactagaggcaaagcgagtcaggcggaacgcaaagattggagagattaagctgctattcaggcagactatatttggaaaggaggttctcaagggctttgcccttgcgcctgctcctccccatggataa

SEQ ID NO: 1041 - DNA, 221 bp, unidentified
  misc_feature 1..221: note = JGI24023J19991_10009125
  source 1..221: mol_type = other DNA
gtcagggaaaactggtctagccgagcttcctaatgaggatatatatcgctttatagatatagctaatgtcttttatggacctggtcttaatattgtgtgggttacactgagagcctgggttaaagatccatataatccaaacattgtcaaaccctttcccgctgtggtagaaggagaaataaatctaacagtagagtagtagtcaacgaccccatagctaa

SEQ ID NO: 1042 - DNA, 1386 bp, unidentified
  misc_feature 1..1386: note = Ga0079367_1013592 JGI
  source 1..1386: mol_type = other DNA
atgcagcatattttcgtgctggacgccgagagaaagccgcttatgccctgccatccggcccgggcgcgagagctgatgagcaaaagcaaggccgcgcgattccgccagtacccgtttaccatcatcctgagtcagaggagcggaggcgcagtcgaagcactgcggctgaagattgacccgggcgcgaagacgacgggcctggcgctggtcgaggagagcaccgggcgcgtggtgtgggcggcggaactcgagcatcggagcttcgcgatcaaaaagaagatggaggaccgcagcgggcaccggcgcagccgccgcacgcggaagctgcgacatcggcccgcccgttttgagaatcgaacgcggccggaaggatggctggggccgtcgctgcgcagtcgctgcgaggggaccatcacctgggtgcgcagattgcaggagctggcgccgatcacgcacctgagcttcgagcaggtccgcttcgacatgcagaagatggaaaacccggagatctcgggcgtcgagtaccaacagggcacacttgcgggctacgagctgcgcgagtacctgctggagaaatggggccggaaatgcgcttactgcgggcgcgaggacgtcccgctgcagatagagcacatcgtgccgaaaagccgcggcggcagcaaccgggtgagcaaccttacgctgtcatgccccgcgcataatatggagaaaggcaacaggacggcggcggagttcgggcatccggaggtcgaggcaaacgcgaagaagccgctgcgcgcggcggggatgctgaacgcaacgcggtgggcgatctggcgtgggctcaaggaggtgggattgccgctggagagcgggagcggcggccgcacgaagtacaaccgcacgcggcagcgatacccgaaggctcactggattgatgcggcgtgcgtgggcgaatcgggcgagaagatcatcatcgacagcgatcaccggccactcatcatcagcgcgaaaggacatgggagcagacaaatgtgcgcgacggacgcatacggcttccccaagcagcataagagcaggcggaagctgcactatggctttcagacgggggacatcgtgcgcgcagtgctgccgaaggggaaatatgcaggcacccacgtcggcaggatcgtggtgcgcgcgacgggcagcttcgacctgaaagagatggggagcgggcagaagatgacggcgaactggaaatactgcgaagcggtgcaccgggcagatggatatgagtatggcgcagggcaatcccttgaggagcttgtggaggcggcggaagcgtgtcgcgctgcgcgcgacgggccggacggtagtccggcccctccggacggcaacggcgcgtccatacggcagcaatggtga

SEQ ID NO: 1043 - DNA, 265 bp, unidentified
  misc_feature 1..265: note = Ga0079367_1013592 JGI
  source 1..265: mol_type = other DNA
acatgaacgcctctcacctcgcgcgcgcgcgaagcgcggcacagtcgcgctcatgaggccagcctcagcagccaacgcggctgctaccttacgggcgaatgtataggcactccggggtgcgttgccagccccggacaatgcgggcagcggctaaacaggcacaagggtgtaggccagtgccgctgccgagaaaccgcccgataagattggcgaggcaaacgttacccccttcgggggagaaaggcgggtaaccgccatgcagcat

SEQ ID NO: 1044 - DNA, 1227 bp, unidentified
  misc_feature 1..1227: note = Ga0134857_007242 JGI
  source 1..1227: mol_type = other DNA
atgccctgttcgcaaaagaaagcaaggttattactaaaacaaaataaagctaaaataactaactataatccatttactattcaattattagtcccaactggtgaaacaatacaagaatgtaatttaggaatagatagtggtgctaaaaatgtgggttttgcaattacttcacaagataaagtattaataaaaggagaaatagaattaaggcaagacgtttccaaattattaactactaaaagaacatttagaaaaagcaggcgaaaccgcaaaacaagatataggaaagcaagatgggaaaacagaacacgaaaagaaggctggctacctccaagtattcaatcaagaattgataatcaaattaattggattaataaatttatgtcattattgcctaattgtaatttaattgttgaagttggtaaatttgatacggctaaattaataaatccagacatacaaggtgaagaatatcaacaaggaaatttatatgaatatgagaatataaaatcatatcttatagtaagagaaaataacaaatgtcagttttgtggtaaagagtatgatggtaatgggtggcatattcaccatataaaacaaagaaaagatggtggaacaaataaagtggataatttagcacttgtacacgaacaatgtcataaagattatcatttaggtttattaaaagttaaattaaaagaaccaaaggattataaagaaacagcatttatgaatatattaagacaacagatattcaaaagagttaattgtaaaataacttatggtagttacacaaaggttgatagaaatagtttaaatttagataaaacacattataatgatgctattgctataagtgggattaagaaagtcaaagaaaaccctgaacaattattaaaaataaaacaatttagaaaaaagaaaagaagtttgcatgaagctataccaagaaaaggcagaaaagaaaaaaatataactcaaaagagaaatagtaaaaatactaaatgttcaaatgggttttatcttaatgacaaagtaaaagtattagataaggtaggttggataagtggattttgtaatggaggttgttatataaaagatattgaagataattatataactttagaaggtaaaacttataaacaagtaggatttaagaatttagaattaatatgccataataataactggcaatatgggatgttgtgtgtttcatctcatgaatga

SEQ ID NO: 1045 - DNA, 258 bp, unidentified
  misc_feature 1..258: note = Ga0134857_007242 JGI
  source 1..258: mol_type = other DNA
gtcaactacccacgactgaagtcgtaggcttgtagaagtaattctattaggtctaaagttgactactctaagtcttaattgactacgttagatataatatcacaccataagatgatacccaagtcttatgcaactgtgtaggctctgtaaacagttctgttgggtaggaacagtcaacctaatttggagattttacctcaaactatatctaacattgaggatgggtaaataactctgaaaggagaacgaaacttgaga

SEQ ID NO: 1046 - DNA, 1038 bp, unidentified
  misc_feature 1..1038: note = Ga0224514_10000173 JGI
  source 1..1038: mol_type = other DNA
gtgaaatttatacctgtaataggtaaggataaaaaacctttaatgcctaccattccatcacgagcaagaagatggattaaagaaggtaaagcaactcctttttggaagaaaggaattttctgtgtaagattaaataaagaactgtcaaacgaaaaattacagaaagttgtcgttggtattgatccaggcagtaggagagaagcatttacaattaaatccaaaagtcatacatatgcaaatattttatccgatgccgtttattgggtgaaacacaatttggacaccagacgaatgatgagacgtactagacgcagacggaaaacaccatgtaggaaaccaagatttaataacaaacctaaaaaagtatttctatcaccatccacaaaagctagatgggatataaaattgagagtttgtaagtggataattggaatatatccaataacagattttatagtagaagatatcaaggcgaaaaccaaaggaaagaaaaagtgggattgtatattttctcctttacaggttggaaaaacttggttttacaaggaacttgaacgcttaggaaatctttcattgaaacgaggttatgaaaccaaggctctaagggacaaattggatttagagaaatcttcagataaaaaggcagaaatatttgaatcccataacatagactcttgggttttagcaaatgagatcgaacagggacatgaagcaccagataataaagaattattgagattggtgcctttgaggaattataggcgacaattacatatgtttcagccatctaaaagaaatatgaggagacgggtaggtggaacaattagtcttggattaaaacgtggatctataggaaaacatatgaattatggattggtctttataggagggtattgtaggaatagaattagtctacatgaaccaagagcacataaaagaatttctcaaagtgccaaattggaggacattcatattttaacaaataatagttggagaattatagatttgggagagaaagatggatattataggttgtga

SEQ ID NO: 1047 - DNA, 241 bp, unidentified
  misc_feature 1..241: note = Ga0224514_10000173 JGI
  source 1..241: mol_type = other DNA
gtcaactatccaaaaattggatctgagaatcgagaccgacgagtgtggatcagattaaacaggagactagagtgaccaagttcagaaatggacgtttgaaggaaactgaactatctgtccgtggtagggtgaaagacgttatgagtgcttccctagcttatatcctctctgatggtcagtctcgaagggaaaatacatactctgtgaaaggagacttatagtgaaatttatacctgtaata

SEQ ID NO: 1048 - DNA, 1104 bp, unidentified
  misc_feature 1..1104: note = GENOME_ACESSION: mgm4547164.3 MG-RAST
  variation 415..552: note = n represents any nucleotide
  source 1..1104: mol_type = other DNA
atgctggtatatgtattaaactcaaacggacagccccttatgccgacaacgcgctgcggcaaggttcgtaggctattaaatacgaagcaggcaaaggttgtcaagcgctgtccgttcaccatacagtttttgtatgatacaacgaattgtgtacagccgatcgaccttggaatcgacgcaggatccgaacatatcggaacatccgcatgtacggagagaaaggaactgtacgcatccgagattcagctgcgtaccgacatcacaaagatcctttcggaccgcagacagtaccgccgatccagaagaaacaggaagacccgatacaggaagccgagatttctgaaccgcgtacacgcaaagaacaaaggatggctcgcgccttcggtcgaagcaaagatatccgctcacctgaagnnnnnnnnnnnnnnnnnnnnnnnnnnnnnnnnnnnnnnnnnnnnnnnnnnnnnnnnnnnnnnnnnnnnnnnnnnnnnnnnnnnnnnnnnnnnnnnnnnnnnnnnnnnnnnnnnnnnnnnnnnnnnnnnnnnnnnnnnncctcatccggaaggaacggactaccagcaaggagaccagctcggcttctggaatgtcagagagtatgttcttttcagggacggtcatacctgtcaatgctgcaagggcagatctaaagacaggatcctgaatgtacaccacattgagtcgagaaagacaggcggcgattcgccggacaacctgatgactctttgtgagtactgtcataagcagtatcatttgggaaagatcaagcttccggacagtattaaacgaggccagagtcttcgggatgcggcattcatggggatcatgcgctggacgttctacaacaggctgaaggaactgtaccccgggatagtatccatgacatacggatacatcacgaagaatacaaggattcgtcacggactggagaaatcccatgcggttgatgcgagatgtatttcagggcatcctgatgcaaatccgttggggtttatctactttcaaaagaaggtacgctgtcataacaggcagttacggaaagccaacaccttaaagggcggcattgttaaatctaaccaggcggaa

SEQ ID NO: 1049 - DNA, 313 bp, unidentified
  misc_feature 1..313: note = GENOME_ACESSION: mgm4547164.3 MG-RAST
  source 1..313: mol_type = other DNA
gtcaactacccaccacttaaaccctaatgggttttgaagtgggggcttgtgacgaagttcatcttcgttataagtccggctgactaccctcagtctctccgagagactacgttactttggtcatcacacctgcggacgttcgtcctaatctgcagctctgtggttcgtcattaaacagtcctgacgggaagggacagtgtggcggacgcaaaaagcctttgtaacattggggaaggacaccttacggttagtacgcaccggcttacagcattaagcgtaccgataatctacgaaaggagtcgcggttatgctg

SEQ ID NO: 1050 - DNA, 1251 bp, unidentified
  misc_feature 1..1251: note = Ga0209992_10008281 JGI
  source 1..1251: mol_type = other DNA
atgcttaactcaaaaaaagcggcagtctatcgacgggcaccttttacgattattttgaaagatcgatctgagggtgacgttcaacctgtccgtgtcaaaattgatcccggttcaaaaacaacgggtattgccgtggtgggagaatttcccaagcaaggtaatgttgttttgtggggggcaaaccttgagcatcaagggcaagcagtcaaaatgaggttaaccaacagaagtatgctcagaaggggtagacgtggacgtaaaacccgataccgtccggctcgatgggaaaacagagcaagacaaccggtcacttatgacaaatggctacccccatctttacgttctcgattagataacacccgttcgatcattagtaagttaatggataggtcaccagtaacggatttctctgttgagattgtacggtttgatatgcaaaaaatacaaaaccctgaaatctctggtgtggagtatcaacagggtgaattgatggggtatgaagttaaagaatacctgttagagaaatggggacgtaaatgtgcttattgcgataaagaaaacgttcccttacagactgagcatattgttcccagagcaagtggcggtacgaataatgtctctaatttaacgattgcttgtgaaccttgtaatcaacgaaaagataatcagaatgtcgaggtatttcttgcccgaaaacctgagaaattagcacgactaagaagacaaatgatatcgactgtaaacttgagagatgcggcggcagttaatgcgtctagatggtcattagcgaactatctacaagatacttatggactacctgttgaacatggatcaggtggacgtacaaaattcaatcgtgctaatcaatcgattgataaagaccattggaaagatgcggcttgtgttggtgaatcaggatcatccatttttattcctgagtctcttaatccattaaccattaagacacggggacgtggaaatagacaaatgcaacgtgtggatcgttatggctttccaagaagtagagcacggtcaataaaacgtctacatggacttcaaactggtgatattgttcgattagatcaacctagtggcaaatatcagggtacttatgtcggtcgattatctgccattcaatcccaaaatggaggacgggggacaataaaagtaaatggtaatagtattattactaattggtctaacttcacacgacttcaatgcatcgacggatatgaatattcttatggttaa

SEQ ID NO: 1051 - DNA, 357 bp, unidentified
  misc_feature 1..357: note = Ga0209992_10008281 JGI
  source 1..357: mol_type = other DNA
gacaacgttgtgactaccctctgtttttaggggacgaacaacgcgatttcttgggaagtgacctcaacgagggttgtgactaccctctgtttttaggggacgaacaactggtgtttactaagtgtttgtttttgaaaacagatgtcgcaaccagaccactcagaaatgagtagacgatagggatgaaataggtacgttagggtgcttctccagccttaaccactacgggtattagttaaacagtacgatgggtaatacgacagtgctgataccgttaaaccattctatatctggtcgaggagacctttacaggatgaatctttcgagattttgactgtgacgtaagtcaaaaaacaa

SEQ ID NO: 1052 - DNA, 1602 bp, Brachybacterium phenoliresistens
  source 1..1602: mol_type = other DNA
gtgcttcctcagcggcctgctctggaatcgacgtcagcagacaaccccggggcagggacgaaacggggcgtcgagcctgggaccatccaggacacgggtgtgcaccgtgggcgaggggagaccgcggctccgtccgcggcgtcaccggggaagggctcgttcccgcccccggacggcgggagtgatcccgtcacccacgagcaaccggcatccgagggtgggacctcggatgcgcctcgccgcgccgaggcacgggtgctcgtcctggatcggcgcgggaagccgctcatgcccacgactccgcgtcgtgcgcgtcagctgcttcgttccggccgcgcccgagtgcatcgggtgcagcccttcgtcctccggatcgtcgaccgcagggtcgaggactcggagacagagcccctcgtcctgggcatcgacccgggattccgacataccggcgtcgccctggcgcgcgagcaggaggtccccgacccccgcagcggccgggcgacgacgatccgacacggcctcttcctcctgcgggtggaccatcgcggcgccgtgatccgcgaccgcctctcggcacgctccgccctgcgccgcggccggcgctcgcgcaagctccgctaccgggcgccgcgcttcgacaaccgcgcccgtgccgcgggctggctcgccccgtcgatccgccatcgggcggagaccaccgtgacctgggcgcgccgcctggccgcctgggcccccgtgacgcggatcgacctcgaggtcccgcgcttcgacgcccgtgccctgcaccgggccgacgccgccgtgggcgaccgcggccagggcaccctgcacggcaccgaggtgcgcgaatacgtcctggagcgcgacggccggacctgcgtgtactgcggtgcgagcggcctgggcgccgcctccgtcccgctcacgctggaccatgtgcgtgcccgggcgcacggcgggccggacgcgccggcgaacctcgtcgccgcctgcgtcccctgcaaccgcgacaagggcgaccgcgaggtggaggagtacctcgcccgccggcccgccgtgctcgcccgggtgcgccgcagcctcgcctccgtggtgcagcaggacctctcggtgtccgtctcccgcagcgccctctgccgcgcgctgcagtccgtcggccccgaggtgcgcacccactcgggagggcgcaccaagtggaaccgctcccgggccggcctgccctgggaccacgtgaccgatgcgctgtgcgtgggccgcgtcgacgcgatcgcgtccctgccggcgctgcagcatgtcgccgtctccatggggcgcggctcctattcccgcacccgcatggaccggtacggcttcccccggctccgcctgacccggcgcaagatgcaccacgggctgatcaccggcgacctggtgcgcgccgtggtccccagcggcaggagagcggggacccacgtgggccgcgtcgccgttcgggcgagcggctcctgcaacatcaccaccgcccgcagcaccgtccagcacatcgggcaccgccacatcaccgtcctccagcgcggggacgggtaccggcatctccgcgcgccggtggcgctggccgcctga

SEQ ID NO: 1053 - DNA, 309 bp, Brachybacterium phenoliresistens
  source 1..309: mol_type = other DNA
gtcaggcgccccaccacagacatcgacgggccccagggcacatcggtggatgtcgagtctgaccagctcgagacaccgctcagagggaggtgactacgttgcacacacgcgagaagacccaccaggccgtgcttcctcagcggcctgctctggaatcgacgtcagcagacaaccccggggcagggacgaaacggggcgtcgagcctgggaccatccaggacacgggtgtgcaccgtgggcgaggggagaccgcggctccgtccgcggcgtcaccggggaagggctcgttcccgcccccggacggcggga

SEQ ID NO: 1054 - DNA, 1305 bp, unidentified
  misc_feature 1..1305: note = Ga0116183_1003561 JGI
  source 1..1305: mol_type = other DNA
atgcagcatgtgttggtagtggatacagatagaaggccatgcaacccagtagcacccgggagagcaaggatacttctatccagaggcaaggctgcggttcttaggcgctatcctttcacgattgtgttgaaggggagatcggcaggtgaaacccagcctcttcgtcttaaaatcgatcccggttctaagcagacagggttcgcgctggtgaatgaaatcacaaggaaggttgtgtttgctatggtgcttacgcaccgcggccagcagatcaggaatggtttgctgtctcgaaaaggaatcaggagaaacagaaggaatcgcaaaaccagatacagaaagccccgtttcctgaataggatgaggaagaaaggttggcttccgccgtctctgcagcatcgggtcgataccgtgacaacttgggtgagcaggctgcagaggtttgcgccggtctcagccttatccacacaacttgtgaagttcgacttgcagaagatggagaatcccgaaatatccggtgtcgagtatcagcagggaacgttgcagggctacgaggttagggaatatctactggaaaagtggggacgtaaatgcgcctactgtggagcagagaacgtacccctgcaagtagagcacatccacccgaaggcaaagggtgggagcaacagggtatccaacctgacgctgtcctgcgaggtgtgtaatacagaaaaaggaacgcagcctattgaaatattcctgaagggcaggcctctgaccttaaagcgtatcctagctcaggccaaggcaccgttaaaagacgcggcggcggttaatgcaaccaggtgggctctgtacgaaaggctgaaagatacagaacttccagttgaagcaggaagcggcggccttaccaagttcaacaggacaaggcaaggctacgggaaaggccactggatcgatgctgcgtgtgtcggggtgtcaggagaatcggttgccatcccggtagggatgcaacccttaacagttaaggcaacaggccacggcagccgcctgatgaccagggtggacaagtacggtttccccaggcaggtatcaaagaaaggtggtgccgtcttcgggttccaaaccggagatatcgttaaagcggctgtgccatcagggaaatacgagggcactcataccggcagggtagccgtaagggcaagaggctctttcgtgattgcaacctccgccgggaaaattgaaaccggctacaaaaactgtagcctactacaccgaaaggacgggtacaactacggggcgcattccccgtccaaccaagtcctgtga

SEQ ID NO: 1055 - DNA, 279 bp, unidentified
  misc_feature 1..279: note = Ga0116183_1003561 JGI
  source 1..279: mol_type = other DNA
gtcaattaccccacccaagcctaacggctatggatgaggcttgcgggaaaccgtaggcctggttgaccagcctaagttcttcgaaaactacgttattgcggttatgacaccctgggatgcgtgccagttccaggctctgtcggcatgagttaaacagttctttagggtacggaacagtgcttatgccatgacaagccacaataaccttggcgaggcaaacattacccccgaaaggggaggctcgtaagagcagaaaggtttcatgtcttaatgcagcat

SEQ ID NO: 1056 - DNA, 684 bp, Pseudothermotoga lettingae
  source 1..684: mol_type = other DNA; strain = TMO
atggtatatgttatttcgaaggatagtaaaccattaatgccaacaaaaagacatggcaaagtaagaagactactaaaacaaggtcttgcaaaagttgttagaagagaaccatttacaattcagttgctgtatgacacaacgacctatacgcaacctattacagttggggtagacattggctcaaaagtaatcggtgtttcagccataacagacaaacaagaattatttagtgcagaagtagaactgcgacaagatataaagaaactgcttttagagagaagagagtatagaagaaacagaagatatggaaaaacaagatatagaaaaccaaaagatgcaaatcatgtttcgacaataggatggcacatagtaaacaggttgaaacaacaatacgatgttgaaataacttttggcagtatcacaaaagcaaaaagaacagaaatggggttagagaaaacacatagaaacgatgcatttgtaatagcaggtggtagcaaagatgttaacagagctactgaatggtactttgggaaatatttcagaagacaaaacacgtcattacacaaagctaatctaatcaagggtggaattaggcaatcgaatactgtaaaggaagttaaagggtttaaaagattcgacagagtaagatataacgatcaaataggcatgcgctggatactttga

SEQ ID NO: 1057 - DNA, 233 bp, Pseudothermotoga lettingae
  source 1..233: mol_type = other DNA; strain = TMO
gtcaactacccgccgcctatagaggcgggggcttgaaaaagccctgattgactaccctcagccacataagtggctacgttagacaggtacaccctatgatgctgctcaagttccaggctctgtcgtacaggtctaaacagtcctgagaggtagggacagtgatctgcacataacaagcctgtctaacattgaggatgagcacctaactccgaaaaggaggcttaccgcatatg

SEQ ID NO: 1058 - DNA, 1386 bp, unidentified
  misc_feature 1..1386: note = GENOME_ACESSION: mgm4547164.3 MG-RAST
  source 1..1386: mol_type = other DNA
atgcttacctacgtactatcggcagacggctcacccctgatgccgacatacaacatccgtaaggtgagacacatgcttaaagacggccgtgccgtcattgtcggtcataagccgggattcacgatccggctgacctatccgcttccacagcaggaaggaccgtgcgtacagccggtagagatctgcgaggacgcgggatatcagcacatcggagtctcggttaagtccgagaagcacgagttcgcccatgagcagtacgatctgctcttggacgaaaagcagcgtcatgacgatcagcggagataccgccggatgagaagaaaccggctccgctatcgcaagccccggttcgataatcggcagaaggacgatcaatggctcgcgccgtcgctggagaacaagaaacagcgccatgccgatatcgtccggatgtatgcgaaagtcctgcctcttacgagcgctacggtcgaaatcgcgacattcgacacgcaggcactggaagccaaagcgtccggaaaggaagcaccggaaggaaaggattatcagcatgggccacgctatcagatcgcgacgaagaggaaagcggtctttcagcgggacggttatacctgccaggtatgcggaaggaactctttcaaagacggagcgatcctgagggtccaccacatcggatactgggaaaaagaccattccgaccgtatgagcaatatgatcaccgtatgcacccattgccatacgccggccaaccacaagctgggagggaagctctacggctgggaaccgaagatcagaccgatgggcggagcggcctttatgaatgccgtccgctggcagatcgtcgaaaagattcgcacggactttccggacctggacgtccatacgacctatggggcgtggacggaacttgccagacgacagcggtgcaccggaaagacacacgccaacgacgcctattgtatggggttcttccgtccgaaacatcgggcgaaggaagttctgtataagaaactgcgccgtgcgacacgcgtccttgagaaattctacgatgccaagtacatcgatcttcgagacggcgcgaaaaaaagcggccaggagctctcctgcgggaggacgaaccggccggaaagccgtcattcgaagaaagatcagcggatgcaccggggtcagaaagtgtccaaaggccgacgttcgatccgccggcagcattacgccatccagccgggatgcgtcgtccggtaccggaaacagaagtgcgtgacaaccggaatacacaactatgggacgaggctcctgatcggcggaagttctgtcgccgttaagaatatacagctcctgcgatatgcgggggcatggaccttaagcaaaagaaaggaggtccgcgcataa

SEQ ID NO: 1059 - DNA, 386 bp, unidentified
  misc_feature 1..386: note = GENOME_ACESSION: mgm4547164.3 MG-RAST
  source 1..386: mol_type = other DNA
gtcaataacccacgactgaagtcgcgggcttgctaagagcaagctccggcagcagtcgagcccttcggggcattattgattagccccagtaccggcagcaatgccggcactacgttacccgcgaatatacaggcaccggcggatgcttcacaagtccaccgctctgcggtccgccattaaacatccctgatgggaaggggaagtgtggcgggcaaaaaaccgcgggataacatcggcgatgtgaacacaccgaaagcggtatcttcggatgccgtaagtaagcaggatccatatcaggaccggcctccacgagcggataccggtatgggagccgtaaggcaaaacatttcgttaaccatttcaggaaggaagcatcaggtatgctt

SEQ ID NO: 1060 - DNA, 1374 bp, unidentified
  misc_feature 1..1374: note = Ga0247841_10015468 JGI
  source 1..1374: mol_type = other DNA
atgcagcagttacaagcaaagttaaagaacacacctacggatgcttcccaagtctgtagctctgtaagttccgcattaaacaaggaagaaattcctagtgtacgggacacagtactgacttgtaataacctcgaagggaatctacttcaacatacaggagggcagaaccacaaagtctctgctgttgtgtatgtgttgggcataaatggctctccaattatgccaactagtcctatgagagccagaaaactgttgaagtctggtaaagcaatggtagtaaagcaattcccatttaccatacaatcaatagttcctataggcaataataagcaagaaatagtattggggattgatagtggttataagaatattggttattcttgtaaaacttctaaaaaagaattgtttagtggcatagttgttctggaaaacaaaacgaaggaaaggttatctgaaagaagaatgtatcgcagttataaaaggggcaaattgtggtatagaaagccaagatttaacaatagaaagaaaagtagtacttggcttcctccctccattgaacgcaactatgatgttcatctgttaatgtttgacaagattaagaagtttttaccaatagccaaaactattgttgaaaacggcaattttgacatacaaaagattattaatccagaaattaaaggcaaggaatatcaacaaggcaatatgtatggttttgaaaatttaaaagcgtttgtaatctctagagagaaaggcgagtgtcaattctgtggtaaagaaaaaggcaatgatgtttggcgtttccaccatattaatggccgaatgactagttctaattctgcttacaatttggctttgttacattctaagtgccacgacaagatacataaaaagaatttagagaagtcaatcaatagtaacagggaatataaagaaattacttttatgaatataattaaggatagattccagaaagatttagattgtcaaactacttacggatatattacttacgcaaaaagaatggaattgaaacttcccaaaactcacattaacgatgcttttgtaattgctggtggaactaaccaaattaggtgcttgcccatgacggtaattcagaaaagaaaaaacaacagaactctacaatgcaatcgcaatggttttgccccttccattagaaaacaaagatatatctatcagcccaaagatttagtaacgataaataataaaaaatatagcattgttggcactagaaattatggcgaatatgtttatgtaaagaataaaaatgctattaaaccattgaatttttctgtaaaaaagatacaaaaacattttatgaacaatagtttaatatttcaaggaagcaagagttaa

SEQ ID NO: 1061 - DNA, 289 bp, unidentified
  misc_feature 1..289: note = Ga0247841_10015468 JGI
  source 1..289: mol_type = other DNA
gtcaattgcttctgcctaaaagcaggagtttgcgcagtaatgcacaacgagtaaatatgtaaaagtatttgcaagagttgattagagggcaggagaaagcaagatgcagcagttacaagcaaagttaaagaacacacctacggatgcttcccaagtctgtagctctgtaagttccgcattaaacaaggaagaaattcctagtgtacgggacacagtactgacttgtaataacctcgaagggaatctacttcaacatacaggagggcagaaccacaaagtctctgctgtt

SEQ ID NO: 1062 - DNA, 807 bp, unidentified
  misc_feature 1..807: note = Ga0070741_10034480 JGI
  source 1..807: mol_type = other DNA
atgccttgcacccctccgaaggcaagggtcttgctcaaagagggaaaagcgaaaccacggagtcgatgggaggccaaagcaaggattgtggctcatctggggaagaccttgcccatcaccgatgtcgtggtggaagatgtagctgccgtgacaaggaaagggaaaggtggcaagtggaatggatcgtttagtcccgttcaagtcggcaaggaccatctctatgggatgctgcaagagatggggttggtgcttcacttgaggtcagggtggcaaacaaaggagttaagagacctgtatggtttgaagaaaacgaaaagcaaatcgaagcaatcttttgactctcatgccgtagacgcctgggtgctagcagcagccatcacgggtgccaaagagccaacctgtaggcagttgtggtatgtcgtcccagctatcctccacaggcgacaattgcaccgactgcaagccgcaaaaggcggagagcgcaagccctatggggggacgcgttcgcttgggtacaagcgtggaaccctggtcagacacaagaaatacggcctctgtaccgttggcggctttgaccgcaagcgtgcaacggtgagcctgcatgactatcaaacgaacaaaaggctgacgcagggagcaaaagtggaggggtgccaaaccttaacgtggatggcattccgttcctggttggtcagagagccacatcagaagacaggcaagggaaccgcccatcccaagccgctgcgatcaggaagacctgcttcatccccacatctctgcgaaaggggtctccgcaggtcgagttga

SEQ ID NO: 1063 - DNA, 247 bp, unidentified
  misc_feature 1..247: note = Ga0070741_10034480 JGI
  source 1..247: mol_type = other DNA
gtcaggaaccccacggcgaaagccgggggcttgcgaaagggctagcgcaacgtaagtttctgtctagtgggtcttcctctgaagacaggcagcattgtagagctacaagaacgtccagataccaccctagtctggaccgcttctcaccacgcccaagtggatgctacggatacaatcgtagctaagcccacagtgccaccacgaagggtcattgtaccctggctttgaccaggcgaaaggaaatcct

SEQ ID NO: 1064 - DNA, 1044 bp, unidentified
  misc_feature 1..1044: note = Ga0163155_10003458 JGI
  source 1..1044: mol_type = other DNA
atgtttgttccagtagtagattctttaaataaaccattgatgccaaccacgtgttcaagggcggctagatggattaaattcaaaaaagcaactggtttttggaaacgtggaatctattgtgtaagactaaatgttgaaccctcagatagaaagtttcaagaaattgcagtaggaatagacccaggttcaaagagagagggtttcactgtaaaatcagaatctcatacttttgctaatatacaaacccatgcaattggttgggtaaagagagcaatggaaacaagaaagatactgagaaggacaagacgttcaagaaatacgccctatagaaaatgtagatggaatagagcaataggtggtttagttccaagcacaaaatcaagatggcaattgaagttaagaatttgcaaatggttattgaaattattcccaattacacatttcaattgtgaagatattaaagcagtgagtaaagaaggacaaagaaagtggaatgtgtcttttagccctattgaagttggtaagcagtggttttattctgaacttagaaaactaggaactctaaaagagacacctggattttcaacttatattgatagaaatgccctaggtttaaataagacaagaaagaaactaagcagtggatttgatgctcattgtgtagacagttgggttcttgcaaatcaaatagtgggtggacatacaaaaccagataatacaaaagttctagaaataattccattgcaatttcataacagacaattgcatgttcagaatttttctaaaggtggagttagaaaaagttttggcggttctatgagtgaaggttttaaaagaggaagtttagtaaaacacatcaagcatggactatgtttgattggtggtgcatcaaagggcttcataagtctacacaataaaaacagtaacaaaagaatatgtcagaatgcaaagaaacaagatattaacttcttatcctataacacttggagggtgacaattcctcccacagataaatcagtgggtttccttgtcacgattgcatga

SEQ ID NO: 1065 - DNA, 190 bp, unidentified
  misc_feature 1..190: note = Ga0163155_10003458 JGI
  source 1..190: mol_type = other DNA
gtcaataacccacgaataaatatcgtgggcttgtgaaaggtagccaactatcaaacacaagattaaaaactattgactagacattaataattaggtttctgaacgtggtagttcaaaagatattgaggatgcttcactagtcttctttccctctgaaatccaatgtcgaagtgatgtagaaaaagagtta

SEQ ID NO: 1066 - DNA, 1287 bp, unidentified
  misc_feature 1..1287: note = Ga0315289_10016130 JGI
  source 1..1287: mol_type = other DNA
atggtagtttttgtaattaacaagcatggggaggcattgatgccttgcagtacaagaaaagcaagattgcttcttaaagaagaaaaagcaaaaattgtaaattataaaccatttacaattcagttgctttatggttcttctgggtataagcaagaaaccaaattaggtatagatataggggcaaaacatgttggagttgctataacttctggaaacactgtgttagtaaaagggcagattgatcttagacaagatgtttcaaaattattagaaacaagaaaaatattaagaaaatcaagaagaaatagaacaactcgttatagacaagcaagatttcttaatagggttgcttctaaaaaagagaactggttacctccctcaattcaaagtagaataaataatacagtgatgtggataaataaattttataatttattacctaagtgcaaattaagtattgaagtagctaaatttgatattcaaaaaattgagaatccggaaatttctggaaaagaatatcaacagggaactttatatgaatatagaaatagaattgcttatttaatagctagagaaaaaggaaaatgtcaattttgtaataaagaatatcaaaaaaataatggctggagattacatcatattttcggtaagaaaaaagatagaccggcagattgggcattattgcatttgcaatgtcataatgaattacatgctaaaaaactagaacatattttgcaaaaacaaaaatctaaatcttataaagaagctacttttatgaatattataagaaaagggttgtttagtatttttcctgaagcaaatttcacgtatggaaatataacttttcaagatagatgtcaattagatttaggaaagtcacatgttaatgatgccgtagcaattacaggaataaaaaatataaataaaaattctgattctatattttttataaatcaatttagaaaaaagaaaaggagtttacatgaagcaacagcaagaaaaagaaaaaatggtaatatattatcaataagaaattcaaaaaatactaaatctttaaatgggtttaatttaaatgatcaagtaaaagtttttaataaaattggatttatttctggattcacatctggtgcttgctatataaaagatatttttggaaaatatataatattaccagaaaaatcgtataaacaagtatcatttttaaatataagaaaaataagttataataataactggcaattcatcccccacctgaaggaaggggatttcttgccagaaataggttaa

SEQ ID NO: 1067 - DNA, 242 bp, unidentified
  misc_feature 1..242: note = Ga0315289_10016130 JGI
  source 1..242: mol_type = other DNA
gtcaattacccctccctaaagggaggggcttgaacggtaacgtttgagagtaattagttgactacactaaggtctttgagacctacgttatttagatgatgatacctacagatgatacccaagtctgtggctctatcgaggcgctgtaaacaaagaggaaactcttagtcaacctcatttagtaaagtctttataactttgtggatgggtaacaaatccgaaaggaggaaaacttaatggta

SEQ ID NO: 1068 - DNA, 1029 bp, unidentified
  source 1..1029: mol_type = other DNA; note = Human oral metagenome
atgtatgtcgtctatgtattaaatcgtcaaggcaagccgctcatgccaaccaaacgatttggacatgtgcggcgtatgctaaaaactggcaaagcaaaagccatttcgacaaagcctttcgtcattcagttgcagtacgagtccacggattttgttcagcctctttatggaggaacagatcctggacgcaccaatattggcgaggctgtgttaaacaacaaaggcgaggtcgtgtacgcggctcatgtcataacacgcaataaggaaataccaaaactaatggcggatcgtgccacacatcgtagggcttctcgccgtggggaacgtctacgccgtaaacgtcgcgcaaaagccaatggtacaatgacatgcttcccagaaggacggaagctatcaggatataaagatggggttcttgaattaaaaggcatcatcaacacggagagtcgcttcaacaatcgaaaacgccctgccggatggctgacacctaccgcaaggcaatgtattcagacgcacttaaacatggtgcagaacatctgcaagattcttcctgtcacagattggacactagagtacaaccgcttcgcgttcatgcaactagaggatggttctgttcgtggatggggtttccagaacggcaggctcaaaggctacgccaataaagaagactatatctatgccttgcaaggcggcgtttgcatttgttgcggtgctcctattgaacattatcaccatatcaaaccacggcacaaaggaggttctaatactcctgaaaatcttgttggactttgctccgtttgccatgcagagatacatacaggcaaacggaatttagacaaaattggcaaatacaaaaagtatgccggaacttctatcgttaatatcgctattccattcatttgggatggcatagtgaagatgttcgggaacaaggctcatatttgtgaagggcaagagactgccgaacttcggagggcgaacaatatttcaaaggaacactttacagatgcagtctgtattgcaggtatt

SEQ ID NO: 1069 - DNA, 230 bp, unidentified
  source 1..230: mol_type = other DNA; note = Human oral metagenome
gtcaataacccaccgcccatcaccaaatggtgattaaggcgtgggcttgaaaaagcccagcgttattgagcagagacaaataatgacacgacaggattaagttccgaaccaccttgggtgatgccaagcctcttgctctgggcgtagtcgtgccgagtctatggcaacacaacttgatgactttatgtcattaagacttatctctaaaaggagatttttgtatgtatgtc

SEQ ID NO: 1070 - DNA, 1536 bp, unidentified
  misc_feature 1..1536: note = Ga0395764_001082 JGI
  source 1..1536: mol_type = other DNA
atgaaagtatttgttatcggtatgaacgacagaccgctcatgccaaccacaccaagaaaggcacggatattacttcgtgataagaaagccacagtagtaaaaaaagtgcctttcacaatcaaactgaattacaaaacgggttctgcaacacaaacgggttatatggggatagatacaggatctcaacatatcggtgtatccgttttacgtgaaaatgctgaaggtaattatactgttttatcgaaaacagagtattcgcttcgcacaaccatgaataaacggaaactgatagaatctcgtaaaacccttcgccgtggtcgaagatttcgcaaaacgccgtatcgacatcctaaatggcattttcatacgaaacgggtttatgttaaaaaagcgataaatcgtaaaaaacatacgacacactggaagaaaaaatctgtgaagtttacatcatccagacaggctggatggttaccgccatcaatccagcaaaaagtggatcacacaattactattattaagacctataaagaaattcttccagacagcattacagcaaatgttaccatagaagttggacggttcgatgtagctcgaatgaaaaatcctgaaatacatggggagatgtatcaacaaggatcgcaatatgaccatgagaatgttcgagcgtatgtattcgagagagatggatataaatgtcagtgttgcaaaaagaaagccgggacaaaaagaaaagatggttctgttgtaaagattattgcacatcatatcgattttgtgtcacaaggtgcaaccgatgatcctgacggaatgattacaatctgcaataaatgtcatacaacaaagaatcataagccgggcggcattctttataaatggatggtagcaggtaagaagatggctcgcagatatcgtgatgccacatttatgaatatactaagaaagcgtttgtttgatgctttcccggattgtcattttacttatggtaattttactaaggtgaatcgggaaaaactgaaactggataaaacacatgcaaacgatgcaaccgcaattgcattgtcatatgttttttatattcttaaagatgcgatatctgtatatgataatgaagaaactgtctatatacagcaggttcgtaaaaagaaacggtcgcttcacgaacagaccccacgtaaaggcaaaaaagacaaaccaaatacaaaacaggtgagaaataacaaaaatacaaagtctgtaactgttaaaatgaaaagaatggttgatggtaaaccagtaagggatgaaaacaaacatatcgtatatgatcataaaacaataagtatttttgataaggtatcatacaataatagagaagggtgggtcacatcattttccgaatcttcatgtcgcatacaggatgtgaatggtgaatacataaaaaaatatgaaaactctgaattgattcctgtgactgaagtgacatttttgcatcataatagtaattggttaataggtcccaaaatggagttgccacgattaaaaacgaataaagtctaa

SEQ ID NO: 1071 - DNA, 303 bp, unidentified
  misc_feature 1..303: note = Ga0395764_001082 JGI
  source 1..303: mol_type = other DNA
tcggcaattgaattaccgagcatgtgttcgcatatgcaaagtggttctattgttttccttcgggaacaagttgactagccttagtgaagcttactcttcggagtatgtcggaactagattctgattatcaatactctaacttgtagtacccaagcaagggtgggttcaggcaacggatgtttactgggagtaggtaaacaccgacctgatgcaagaagtagtcaggattttggcgatgggtgattacacggcagtgaaggtggctgtatagtccacctaatatgcaaaggagttactatgaaa

SEQ ID NO: 1072 - DNA, 1125 bp, unidentified
  misc_feature 1..1125: note = Ga0373632_0063621 JGI
  source 1..1125: mol_type = other DNA
atggcagtttttgttttagatcgtaatggcaaggcattaatgccgtgcaatgagaagcgcgctagcttattgctaacacgcaatcgtgcgcgcgtgcatcgcatcctgccattctcgattcgaatcattgaccgtcaggcgtcttcctgtgagtttcaagcattacgcattaagttagatccaggcagtaaaacgacaggcatggctttagtaagagaatcagataacggcagcattgctgtgctgaatctgttcgagttaattcatcgcggacgtcaaatcagtgaagcattaacagcaagaagcaatatgcgccgccgtcgccgtactgctaatctgcgctatcgcgcaccgcgttttctgaatcgcggaaataagcaatctggctggttagccccaagcctgcagcatagaatcaacaccagtatggcttgggtaaatagattccgtaaattagcgccgatcagcgctatctcgcaagagctggtgaagtttgatatgcagcagatggcgtcaccagaaatctctggcgttgaatatcagcaaggcactttgctaggttacgaggtacgcgagtatttgttagagaaattcaaccgcacctgcgtttactgcgacgctaaagatacacccatgcagattgagcacatccatcctaaagctaatggcggcactaaccgcatcagtaatttggcgttagcttgcggcccctgcaatcagcgcaaagccgcacaggatattaatgtgtttttggcaaaagatccggtgcgtctaaaacgcattttagcgcaagttacaaagcctttgaaagacgcggccgcggtgaatgctactcgatgggctttgttcagcgcattaaaagcgactggattaggtgtggaaatcacatccggcggtaagactaaatacaaccgcagtcgcctgaatattccaaagacgcatgccttggatgcggtctgtgtcggcgctgtagaatcgattgaagattggaataagccgacattgaatatcaaatccatgggccgcggttgctatcaacgcacgcgcctgacggcctttggctttcctcgcggttacttaacgcgcgttaaaaatattcaaggctttcaaacgggcgatatggtc

SEQ ID NO: 1073 - DNA, 342 bp, unidentified
  misc_feature 1..342: note = Ga0373632_0063621 JGI
  source 1..342: mol_type = other DNA
gtaaaccaccccgaccttaaggtcggagcttttagaggaaaggctaaaagttcaagtttaccagcctaagccgtgtcatttagcggctacgttgtacagatgtaaaagacctacgtcaggatgcttccttagtcctggcctctagaagtagcgacgcagacaagcgacagggtaagtacgaaacggtctgctacaagataagcaattatcgaagctgctgtacaacattggcgaagggagagtgattgaactgtcgtgagacaggttaatcaccgtcacaagacccgtaagggttgacgatctgcaaagacagataattattaaaataggagatttatggca

SEQ ID NO: 1074 - DNA, 1287 bp, unidentified
  misc_feature 1..1287: note = Ga0137373_10002777 JGI
  source 1..1287: mol_type = other DNA
atggtctttgtgatctcaagcgacggagcgccgctggacccctgccatgaggccagggccagggagttgctgaagaagggccgcgcggcggtttggcgcacctacccattcacgatccggctgaagaaccgcacggcggctgaaagcgtcacgcacgatcatcggctgaaaatcgatccgggtagcaagaccactggcctcgccgtcgtccaggagaggaccgggcgcgtagtgttcgccgctgaactcagccaccgaggccaggtcatccgcgacgcgctgctggcgcgccgggccctccggcgtagtcgccgcagccgccacacccggtatcggcctgcgcggttcgataatcgccgccgcccggcgggttggcttgcgccgagcctgctgcaccgagtcctgaccacggaaacctggctcaatcgtctgcgacggctctgtccaatcgcggccttgtcagtcgagttggcgcggtttgacactcaactgttggacaacccggagatcagtggagtggagtaccagcagggcactctgctcggttacgaaatccgggcctacttgctggaaaagtggggccgctgctgtgcctactgcggcgtgaccggcgtacccttgcaggtcgagcatatcgtcccgcgcatgcggggcggcagcagccgtgtctcgaacctcaccctggcctgcgcggactgcaaccaagcgaaagggaacaaaacagccgccgagtttggctatccccacatccaggcgcaggccaggcaaccgctcaaggacgccgccgcgatgaacagcgtgcgttgggcgctctatgggcggctgctggcgaccgggctgtcccgcgaagtcggcacgggtggacggacgcgtgccaaccgagcgcggctcaacctgcccaaggcgcattggagtgatgccgcagtggtgggcgtgagcacgccggacaatctgcgtgtggtggccaggtccgtcctgctcatcgccgccaaagggcacggctctcggcagatgtgcgggacgaacgccagcggcttcccgattcgccacaaactagggcagaaacggttcttcgggttccagacaggtgacttggtgcgggcggtcgtgcttactgggaggcgggcgggcactcacgtcgggcgtgtgttgtgtcgcgcctccggttggtttgaccttacaacgaagcaaggtcgccaagcgggcattagccatcggtattgccggatggtgcagcgggccgatggatatgcctatgcaaccagaaaaacgagcgcggcttcctga

SEQ ID NO: 1075 - DNA, 284 bp, unidentified
  misc_feature 1..284: note = Ga0137373_10002777 JGI
  source 1..284: mol_type = other DNA
ggtgccagggtagtttttctgcagtctctggatgtcgtgggcttgcggggcaaccgcaggcccgtcctgaccatgaccaagtggtagccaacccgctccgtgcgggaggccatgacactccgggctgcgtcgcgccaggcccggactctgtcgcccgtcatcatgagccgtggggtaagcggcgaaggtggtgggtaagacaagcctcctgcacatggtcgcggcgcacatcacccccgcgaggggagaggccccggtaacggggcataggaacgaagcaaatg

SEQ ID NO: 1076 - DNA, 1380 bp, unidentified
  misc_feature 1..1380: note = Ga0373625_0005570 JGI
  source 1..1380: mol_type = other DNA
atgaaagtatttgttttaagttcagataaaaaacctcttgatccctgcaatccagcaagagcaagaaaaatgcttaatcaaggtaaagcctctgtgtttaagcaatatccttttactatcattctaaaatcgtgttggtcattcatggtaaaaacaagtgaatatagattaaagattgaccccggtagcaaggttgctggattggcgatagtatcgtcaaaaggtgaagcggtatttgcgtgtgaggtaaagcacagagggtatactatcacagatttgctaaagtcaagacgtggtattaggcggtcaagacgtaatcgcaaaacacgttaccgaaaagctaggttcatgaataggcgcagacagggacaatttagtcccaatatcagtattgatgaagaaaaaaatataaaaggcaagggctggcttccaccaagtttatgcagtagaatgtataatgtggaaacatgggttagacgattaagaaaactctgtcctataaaaacaatatcttatgagctgacaaagtttgatacacagcggatgcagaatccagatatttcaggtgtggaatatcagcaaggtgaacttgcgggatacgatgtaagagagtatttgttagagaaatatgagaggaaatgcgtttattgtggcgcaaaagatgtgcctttggaagtagaacatgtcattccaaaagacaagggtggtagcgatagggtatcgaaccttgtaatctcatgtcgtaagtgtaacatgagaaaggcaaataaaagcattgaggagtttttgaagagcaaaccagaccaattagctaatataaaaatacagttaaaagagccattaaaagatactgcctctatgaacgctacaagatgggcattgtttaacaaattaaaagcattaggattgccgattgagataggaacaggagctactacgaaatataatcgttcaagacttgatttgccaaaggaacactggatagacgccgcttgcgttggattaagcacacccgataatcttgatattagtaatacaaagcctttatgtattaaagctgttggacatggctctcgtcaaatgtgccgtgtttatggtttaagttgtaaaggtcagaagtcggaatctggcaaagtaaagatgcccgggtacccaagatcgaaagctaaatcattaaaatgttatggcgggattcaaactggtgatatagctaaggctgttgtcccttcgggcaaggaaaagggaacacatgtaggcaaagtagccattcggagtactggagatttccatgttattaataagacaggtgatcatgaccatattcatcgtagattttgtgaattgatacaacatgctgatggatattcatataattattaa

SEQ ID NO: 1077 - DNA, 259 bp, unidentified
  misc_feature 1..259: note = Ga0373625_0005570 JGI
  source 1..259: mol_type = other DNA
gacgacaaaagcttgactcaaacatagccgagaaatcgggatagtaaccagactcagccctgaaccagattcagggctacgttattcatgtcatgataccctgagatgcgctgccagtctcaagctctatcgtatagcattaaacaggacgatggaactaagccagtgattatacatgacaagcatggataacattgtcgaggcaaacattaccccagaaatgggagacgccccttgcggggcattttgaaatatgaaa

SEQ ID NO: 1078 - DNA, 918 bp, unidentified
  misc_feature 1..918: note = GENOME_ACESSION: mgm4784118.3 MG-RAST
  source 1..918: mol_type = other DNA
atgtgcaaagttctattaattgacaccgaaaaaagaccgttaagcccaatttatccagcccaagcgaggcaattgttaagaaacaaaaaggcagcagtttttaggcgtttcccgttcactttgattctcaaagaatcacgtcctgattccccgatctcacctttaagattaaaaattgaccctggtgcaaaatttacgggaattgcactggtcaacgattcaacaggagaggtcgtatttgcagccgaattaaagcatagaggtttggcaattcgagattctttaacgtcaagaaggcaacttcgcagaagtagaagaaatcgtaaaacacgttatcgcccaccaagattcttaaacagaactagaccgttaggatggctagcgccaagtctacaaagtcggattgggaatattaaagcttgggtcgagaaactacgcaaattcgcaccaattgcagcaattagccaggaattagtacgcttcgatctgcaactaatgcgcaatccagatcttcaaggtaaggaataccaacaaggtacacttgcgggttatgaaactagagaatacttgctcgaaaaatggaatagacaatgcgcttattgtggcgtaaaggatgttccacttcagatagaacatatttacccccgagcaaaaggaggctctaactcaattacaaatctgactttaagttgcgaaaaatgtaacaaaaagaaaggaactaaggctcttaaagaattcctcaaaaaagaccagtcaaggttagaaaaaatcttgaaacaagcaaaaagaccattggcagatgcagcagcagttaatgcaactagatttgcacagatattgttcaattattcacaaaaaggatggttattcctatgcgtcatagctcctgccccccgtttcctctcaccgccaaactga

SEQ ID NO: 1079 - DNA, 260 bp, unidentified
  misc_feature 1..260: note = GENOME_ACESSION: mgm4784118.3 MG-RAST
  source 1..260: mol_type = other DNA
gtaaacaacccaccaccaattgctaagagcaatatggtgggggcttttaaagaagctctagtttaccagtctaagtgttaaatcactacgtttaaggcaagtgttaaagacctaccaggggatgcgaagctagtcccttgctctagaacccaacgattaaacaggcttaaagggttaaaccagtgtcgtgcgtggatagttaccgaccttaaacattgacgaagctaacattacccgaaaggaggcactttatgtgcaaa

SEQ ID NO: 1080 - DNA, 1098 bp, Gloeocapsa sp.
  source 1..1098: mol_type = other DNA; strain = PCC 73106
atgccaagagtacctgtaatttcaaaagacaacatccctctaatgccgaccaaaccaagtcgcgctagaaaatggattaaagaaggaaaagccctagggcaattcaacgacctcggtattttctatatccagttaaccgaatccccatctagcaatcaaactcaacctatttctgtaggaattgaccccggtaaattgttttcaggaataggtgttcaatcccccctctataccctttggacagctcatctagagttacccttcaaacgagttagaaaaaggatggagaagcgtcgtataatgcgacgagcaagacggggaagacggattaaccgtaagcaaacctttgaactgagagcgcatcgccaaaagcggttctctaatcgaaaacaatcgaagttaccgccaagtattaaagcaaaccgtcaactagaaattagagtagtttctgaactatctaaaatctatccaattactggtatatactttgaatacgtgaaagccgacgtagatttaacgtctggtagaaaaggagctaaatcagggaaagggttttcagctgtaatggtaggacaaaactgggcgatcgaacaattgtctaaaactgctcctgttcatacacgctttggttgggagacatctaatcttagaaaacatttagggttagaaaagtcaacaaataaagccaagcaaagtccagagagtcatgcgaacgatggtatcgctttagcttgtttccattttttacagtacttaccttttcatactactacctcccatggacatctatggaaaggaaaagttaacttaacaacagcaatctttgctgtaattaaaagacctccagtcagtcgtcgtcaacttcatctaatggttccagtcaaagggggagtaaggcgaaaatatggaggaacaactacaaaattcggtttaagaaaaggtgacttagtctttaccccaaaagggattggctttgtcagtggacagaccgaaaaacaaatatctgtcagcgatgctaactggaaaaggttagggcagataagctctcttaaagtaaaattaatccgacgttctacgggtttaattgttagttgctag

SEQ ID NO: 1081 - DNA, 228 bp, Gloeocapsa sp.
  source 1..228: mol_type = other DNA; strain = PCC 73106
ttcaccaaccctgacctaaaggtacagggattgaccaaaccaatgtggttgacttaagcggtgaatagcccacagagcctaactatctcacagacctccgaatacttctctagttcggattcaatctaaacccgattggtacgggtgctcttaaagacaggacatggttagttaggtgggcgaagggacacaaactctctctcttgaggattatctcccatgccaaga

SEQ ID NO: 1082 - DNA, 732 bp, unidentified
  source 1..732: mol_type = other DNA; note = Human gut metagenome
atggtgtatgtactgaacaggatcggccagcccctgatgccctgtaaggaggcaaaggccagaaagttattaaaaaatcataaagcaagagtagataaaagagagccgtttacgattcaattactgtttgactgcgaaaaccggatacaggatattacgcttggcatcgatgccggaagtaaacatctgggactgtcggcaacaacagaacaaaaggaattgtatgccgcagatgtggagctgcgaagtgatattgtggaactgttatcaacccgcaggcaatacaggagaacacgcagaggcagattaagatatcgtgctccgagattttgtaaccgggttcgttctagaaacaaaggctggcttgctccgtccgtcgaacagaaaattaagactcatttacgggtggtcaacgatgtatgcaggattcttccggtttcgaaaatcattgtggaaacagctgctttcgatgtacagaaaatagagaatccggatataagcggagaaggataccagcagggaagccaattggatttttggaatgtcagggagtatgtattatggagagataaccatgaatgccaatgctgccatgggaaatcaatggataaaatattaaatgtacatcatatagagagccggaaaaccggcggtgattcaccgaagaatctgattactttgtgtaaaaattgccatgatcaatatcatatgggaaaaataatccgaacttga

SEQ ID NO: 1083 - DNA, 245 bp, unidentified
  source 1..245: mol_type = other DNA; note = Human gut metagenome
ggcgtgtcaataacccaccacgaaagcagtgagcttatataagcttttattgactagacccggtgtataaagcactccgttatgtaagaatatatagttaccagtggacgtacagcctaatccactgctctaagaatggtgattaaacagttctgacgggaaggaacagtgttgctgttagaaaaccttatataacatcgtctaaggctgcatgacttcggcatacaggaggatttaaaatcatg

SEQ ID NO: 1084 - DNA, 900 bp, unidentified
  misc_feature 1..900: note = Ga0307928_10009122 JGI
  source 1..900: mol_type = other DNA
atggtaaaacaacaacagaagttattcaagagagatacatgcatacctagagatacttctctagtctctggctctatgattagtaatgtaaacaaagaggaaactcttagtcatactaattcaaaaaccttagataacaatctcgaagagaaccaacaccaacaaacaggtgggtttaagaccaaagtgtttgtaatagcaaagagtggaaaagttttgatgccaactactccaagaaaagcaaggcatcttttgaaacaacagaaagcaaaagtagtaacgacaaaaccatttgcaatcaaacttaattgggattgtgaagaaatagtgcaagaagtcaatttaggaattgatactggagtaaaaacaattggttattcagtaacatcaaaaactaaagaattgatttctggagaatttgtgttaagaacaaatattagtaaaaaaattagcgatagagcaatgtatcgaagaaataaaagaaataaactttggtacagagaagcaagattcttgaatagaactaaatcaaaacccaaaggttggttagcaccatcagttcagcataaaattgattcgcatatcagattgattaataaaataaaatctttgattccaataactaaagtaattattgaatcaagtcaatttgatgctcaaaagttacagaatccagatattgaaggaagtgaatatcaaaatggtcaaatgaaagatttcgagaatgtaaagatgtttgttagacaaagagataaatacacttgtcaaatctgtaagaaaaaagatgataaaatgttagatgttcaccacataattcagaggaaagatggtggaagcgatagaccagataatctgataacattacatcaatcatgtcataagaaattccatttgggtaag

SEQ ID NO: 1085 - DNA, 264 bp, unidentified; identical to SEQ ID NO: 745
  misc_feature 1..264: note = Ga0307928_10009122 JGI
  source 1..264: mol_type = other DNA

SEQ ID NO: 1086 - DNA, 612 bp, unidentified
  misc_feature 1..612: note = Ga0126373_10059781 | JGI
  source 1..612: mol_type = other DNA
atgccctgccagcctcgcaaggcacgccttctgctcaaagcaggcaaggccaaagtgaaaagcatggtgccttttaccatccaactgctctatgggagtagcggctacacgcaagaggtctccttgggcatcgatgctggcacacagcatatcggcgtctctgcgacaacagagcaggccgtcttgttcgaggctgaggtctccccccgtacagatgtgactgaactgctggcaacgcgccggcaatttcgccgggccaggcgtcaccgcaagaccagataccgcaaagcgcgcttccccaatgtgcatctgacctatggatacctaactaagtctacccgcatcgctcaccaattggagaagtcccacatcatggatgctcgctgtatcagtggtaacccgtgtgcgcagagtgagggagcttcctacctcatgaggtgggtccgacgcaataaccgccaactccacaaggcgactatcaggaagaaaggacagcgacaaaaaaacactgcatccaaatacgtccagggctctcgcctcttcgactgcgtgcgctatcaggggaagccttgctttgtattcggcagacgcagtagtggctattttgatctt

SEQ ID NO: 1087 - DNA, 241 bp, unidentified
  misc_feature 1..241: note = Ga0126373_10059781 | JGI
  source 1..241: mol_type = other DNA
gtcaaggacccgttcccctcaaggggatgggcttgcgtgagcaagccttgtttgactagccttcgtctcgtcgaagactccgttggatgcgtcaggatacctacgggtgcctactctagcctgtagctctatcgctggtgattaacagttctgatgggcaggaacggtgttgccagcagaacaagcgcactcaacattggcgaagagtaccagactccgaaaggaggtagacgttgtgttc

SEQ ID NO: 1088 - DNA, 687 bp, unidentified
  misc_feature 1..687: note = Ga0120401_1040793 JGI
  source 1..687: mol_type = other DNA
atgaatggtttcgatacgcaagctactcaacccaaggtttatgtcagaaacaaaaatggtaatcctttaatgccatgcaaacccgcaaaagcaagaaaactattgcgagacggtaaagccaaggtagtgtctcggtctccttttactatccaactcctctgggattgtgaggactcagttcaatctgttaccttaggtattgacaaggggagtcacataacaggctttagttgtgttggaaacgaacagattttaatgtcaggccaaatccatcaccggacggacatcaaaggaaaaatggacgctcgaatttggacgactaaaggtggaaaagatagcatctacaatttgataactctttgtgagatttgtcatgacagagtacatcaaaaaggcgaaagtggcaaagttaagatcaaaggcggtaaggtagtaacaggtatggatggattttctgataggattgctcaaaggacaatgaaaagccgcttcgcctctccgcttcgctccgagcaaggtaaaactttaatgtaccaaaagttagaaaaaatagcctccttatcaactgtgtatggttatcagacttcagcttaccgtaagtcactttctttgcccaagacgcatgacattgatgcgatgttaattgccactctttatactggtgaagtgattaggtaccatcgtgac

SEQ ID NO: 1089 - DNA, 346 bp, unidentified
  misc_feature 1..346: note = Ga0120401_1040793 JGI
  source 1..346: mol_type = other DNA
tcggtagtttacataaaaccgtaaactacaaaagccgacatggagctaacagtgggcatccagagactctatctggatgcagaagttagatagtcaccgcaaagcggggacctctacgggatatcacaccgacagatgttgttccagttttcgtcttgaaagggtgtacaccgtctttcaagacaaattggtcgctctgtgggaccgtattaagggtagccgaaaggtgaaggtgtgcggtctgtaaaaaaccgatctaacagccacgaggagcaaaaaactctcacattcaggaggtcataggtacgttatgaatggtttcgatacgcaagctactcaacccaag

SEQ ID NO: 1090 - DNA, 1473 bp, unidentified
  misc_feature 1..1473: note = Ga0101770_1001685 JGI
  source 1..1473: mol_type = other DNA
gtggcagttttcgtgttagacagacacaaaaaaccgttaatgccatgtaccgagaagcgggcaagaaagatgcttgaagccggtcgtgccgtgatacacagaatgtatccgttcacaataaggctaaaagatcgaaccgttgaggaaagctctttgcaaccgttgaggctgaagatcgatcccgggtcaaaagataccggactagccgttatacgtgagaagagccaagaagagggagctgtaatatggctatgcaaccttcatcataaagcaggcattaaagacaagctcgattctcgcagagccatcaggcgaagcagaagaaacagaaagacaagatacagagccccacggttcttaaacaggcataacgagaagtgcagagcttgcggcagaaacgcccaacatggaaaacactactgcaggcaatgcaatgaggctaagaactttgtagataatgggcataggaatatttggttgccgccttcgctaaatgctcgtgttatgcaaacgataaatacagtaaacaagctcagaaagtttatgccaataagggcaatatctatggagcttgtgagattcgatattcagcaaatggagaatcctgatatatcgggagttgagtatcagcaaggtgatttgttaggctatgaggttaaagaatatctgcttactaaacacaattattcctgcgcttactgtggggccagagacgatattcttgaggttgagcacgtagtgcctagaaaacccaaagcagggccaaagggcaccaacaggcttggcaatcttgtcatagcttgcagggagtgtaacatggccaaaggtaatctacaaccgcaggagtggcttgaaatattgaagaagtcgagtagcaagaaagatcagactagagctaagaatttagctaacatcctgaaagtggtaaaacgaccactccccgatcctgccatgatgaatgccacacgatggaaacttttcgagttattgaagagcactggtctcccattagaatgcggttcaggtggaaggacgaagaaacaaaggatagatcatggcctaccgaaggcatcatcagacaagaaagaggtctatcactactacgatgcttgctgtgtggggacaagcacaccggacagactggactttaagacaagttacgctgagatgtggtccgcaattggtagaggaacaaggcagatgtgtttccctgacaaatatgggtttccgagcaagcatcggcagaggcacaagcaatactttggtttccagactggtgacattgtaagagctatgaaacctaaaggcaaggatgcaggagagcatatgggtagagttacagttagagtatctggtagtttcgacataagaaaccacaagggggagattgtttgccatagcgtaaattataagtactgcaagttgattatgaagggcgatgggtacggatacggcaaaactttaaggggataa

SEQ ID NO: 1091 - DNA, 288 bp, unidentified
  misc_feature 1..288: note = Ga0101770_1001685 JGI
  source 1..288: mol_type = other DNA
ttcaactaaccttttaaccactaacgcgcaaaagttgtaggccaactaggcccgaaagggcaggcgaaaccagcctaaacccgaaacttagggctacgttatcctggtcatgacaccttggaatgcttctccagttccaagctctgtcgctcaacgttaaacagatgattgtagcgaagtcagtgcgttgagcgtaaaaagccaggataacattggcgaggagagactcacgaaagtgagcgttacaagtcccgtaagggaatttttaaggagcgtgttaaagtggca

SEQ ID NO: 1092 - DNA, 1347 bp, unidentified
  misc_feature 1..1347: note = Ga0114977_10001865 JGI
  source 1..1347: mol_type = other DNA
atgaacagagtttttgttttagatacaaataaacaaccactagctccttgcactccagcacgggctagacagttgttagataacaataaggctgccgcctatcgatataatccattcacgattatattgcatagagaagtagaattagatgtacaagatatctattctatcaatttagacccaggtgcagtgactaccggattagctattatcggccatttccctaaacaaggtgatgttgtgatttttggtgcagaaattacccataaatctaaagctattaaagctaaattatatgcccgtagcggttttcgcgccggaagacgtagccgattacgttatagaaaaccaagatttgataacagaaccagaccagaaggatggttgccaccatctcttgaatcacgggttaattgcattacccattttgttaataaatttaaacagttattatctaatgctaatatgtgcaatattgaattgcccaaattcgatacacaaaaaatgaataatcccaatatcaaaaattatcaataccaacaaggtgttatgaaagattttgataatacaaaagattatttaatccatagagatggcgaatcttgtttctattgtggtgctactgatactaaattatttaaagaacatgttgcgcctcgcgcaattggtggtaattcggttaataatctggttttatcatgcatagcttgcaataccaaaaaatctaataaaccagttgatgaattcttatcagataaaccagaagttttagataaattgaaaaataagaatgtccctcagtgggcggctgccgccatgaactcaatgcgaaatcgtttgatatcagatattactaaattaaatattgaaattggggtttactccggataccaaaccagttataatagaaatatgttgggttatatcaaagaacattggattgatgcagcttgtgttggtgaccatgttcaggtacatatccctcataatatgatacctgtgaaaattaaagctatcggcaaaggctctcggcgcgtagtgaataacgacaaatatggattcccatgcatcaataaaaaaactggtgaacaacaagccgctggaaatataaaacgcatccatggattttcaacaggagattttgtacacctatccgccaccggaaaatataccggtgaatataaaggacgaatagcagctatttctaaacgagggattttagcatttaaactaaaaataccaattccaacaattgttaaaggcgtacctaaaatgcaaaatatgatttatagcaattataaaaatttccgattaatacaacatggggatagttatgaataccattaa

SEQ ID NO: 1093 - DNA, 271 bp, unidentified
  misc_feature 1..271: note = Ga0114977_10001865 JGI
  source 1..271: mol_type = other DNA
gatgcaataataagttttgttaggatggtttttaaactatcttaatgttcaaccagactaagttattagatttatctaataactacgttatgaagaaaagttaaagacttacctatgggtgcttctccagcccgtagctctaagagtacagaactaaacaggggctaaatcgatggcaacagtgggtgtacatgaacttatttataagtttgtcgaggagagcagtactaggtgggagaccacatttttatataggaaaaatatgaacaga

SEQ ID NO: 1094 - DNA, 726 bp, unidentified
  misc_feature 1..726: note = Ga0137384_10058259 JGI
  source 1..726: mol_type = other DNA
atgtcacgcctgttgattgtggatgcccaacggcgtccgttgatgccttgcacgcccgcgcgtgcgcgcctgctcttaaggcagcggaaagctacagtgctgcgcaggtttccattcgtcttgattttgaaggaagcgaaacaggaaccagtcggtcaccccctacggctcaaacttgatccaggctcgaagacgaccgggctggctgtggtcaacgatgcttctggcgaagtcgtctgggcagcggaaatcacgcatcgcggggatcaggtgcagaaaaacctgctgactcgccgaagtgtgcgtcgccgccgtcgccagagacataccagatatcgccaagcgcgctggctcaatcgtcgtcgtcccaaagggtggcttccaccttccctgcgttcacagatacaaaatgtgctcacctgggtcgtacggctctcgcgcttttgtcccattggcgcgatctcgttcgagctggttcggtttgacatgcaactgctccagaatctctcgatcgagcgcatacactatcagcgcgggacgctttggggcacggaagtccgccagtacctcctcgccaaatgggagcatcggtgtgcctattgtactgcgactggattacccctggagatcgaccacgtggttccacggagtcacggaggcagcgaccgtgtggctaatctggtcattgcctgccgggcgtgtaacctggccaagggggacaagctc

SEQ ID NO: 1095 - DNA, 311 bp, unidentified
  misc_feature 1..311: note = Ga0137384_10058259 JGI
  source 1..311: mol_type = other DNA
gtcagcgaccccagcgctgaacgcgcggggcttgcacatgtgcaagccccgaagctgaccagccccctccttgccaggcaaggaggagccgttaggagagaaagcataggcaccggcgagtgacttttccagctcgccgctctgcgattgcacattaaacagcgtcatggggttcaaaacgcagtgtgtgcaatgtatgaaacctttccataactgggcgaggaaaaccttaccgttgacgttttccgggcagccggcaacgccaacgcgccgcctcataacgaggcacgtttggagggagtatgtcacgc

SEQ ID NO: 1096 - DNA, 1338 bp, unidentified
  misc_feature 1..1338: note = rank12_10070934; GENOME_ACESSION: IMG_3300001484_$F_3300001484
  source 1..1338: mol_type = other DNA
atgatgaacgaagcagtttacatcatcggtattaacggtaaacctaaaatgccttgtttcagaaaaggcagaatcaggcatctgttaaaagaacacaaagcaaagtgggtgaagaattcagtcttacctactctgcaactcttgtacgaacaagactgtgtctacactcaagatgtaaatcttggtttagatgagggtgccaatcacatcggtgtggctgcaacttcacacgggaaagagattctgtctcttgaacttgaaatccgaagcagtgacatcaagaaatgtaaagatgagcaaagaacaaacagaagagacagacgtaacaggaaaacccgttacagaaagccgagattcaataatcgggttgcatcgaagaaagaaggatggctgtctccaacagccagacacagagaagacactcacgtaaatctcgtgaagtatattcatcgtattcttccaatcagttgtcagactttcgaagaaggcagatttgatacccaaatgatagaaaacccggaaatcagcggcactgactatcagcacggaaagatgtatgagcatgagaacttcaaagagttcgttcgctacagagacaactatacgtgtgctatctgccacacaaggggaaagggtgatgtgcatcatatcataccggtctcaaaaggaggcactaaccgtgccgacaacggtgttttcctctgcaagaaatgtcacgaagatttacataaggggaaagtcaaattaccagagaatatcaatcttgctgcaaagaatctaaagaatctgaaagatgcagcagcaatgaacactatgtcaaaacgactcatcaaaagaatgtgtgagacatttcccaatgttatcacacgacggacgtttggttctatgactaaagcgaagaggtttaaatacaatatcaaaaagtcacatgcggcagatgcgcgtgtgataagcggccagccagaagcgacaccgctcggatacacatactgcttgaaacaattgagacgccataacagacagatgcacgagcatcagccgagaatcagaaaggcacacgacgggaaacccggcatggcaagagcaagaagacggaaattgggatatgttcgaagagagtgtaaggaaatcaaatctgttttcggtttcacaaaacgaagcatcgttttgtatgaaggaaagaaatggatgataactggtctaagacagaccgggttcttttctttggtaaatataaaagacaaaaaagagaaaataaattcaatcaaatatacaaaactcaaacttataaaacctcaatataaatcaattgtaatagatgatatcagaagattataa

SEQ ID NO: 1097 - DNA, 315 bp, unidentified
  misc_feature 1..315: note = rank12_10070934; GENOME_ACESSION: IMG_3300001484_$F_3300001484
  source 1..315: mol_type = other DNA
gtcaccaaccggctaagctaaagacttagcggcttggctcctcaacgaatcaaagctgatggtgactagcctaagtgaaagagcatatgctctcgaactacgttactggcgaatacataggtaccaagggatgttcgtcctagtcccttgctctacgtctgggtattaaacagtcctgtccggtagggacagtgtattcagaatataaaccgctggataacattggcgaagggcatctacagagacagtagtctctgacttacagatttaatctgttattttaaaaaattaattaaacaaatgatgaacgaagca

SEQ ID NO: 1098 - DNA, 834 bp, unidentified
  misc_feature 1..834: note = Ga0116142_10030893 JGI
  source 1..834: mol_type = other DNA
atgaaaatggtgtttgtggtagataagaataaaagacctttaaatatgtgtcattctgcaaaggcaaggaagttattgtctgataacaaagctgtagtaatttcttattatccttttgttatccggttaaagaaagaagttaatactcctatagtagcagattatcaaataaaaatagatcccggtgcaaaatggacaggtttggcaatattgcagaatgaagttaatgttaactttttaggagtattaaaacataaggcatttgaggtagtggataagttaaaatccagaagctctttaaggcatgggaggagaagcagaaaaacaagatacaggcaaccgagatttgataatcgtggaaacgctagaaaattaggtagaataatgccttctttaagatcaaggtttgataatattacaaattggattaagaagttacagaagttctgccctataggagaaattgtttatgaaaatgttaaatttgatactcagttattggaaaatcctgacatagtcggaactgaatatcagagaggagagttatgtggatttgagataattgaatacttacgagagaaaacgggctttaaatgtgcttattgtggaaaggggggaatgaaggaaaaattagaagtggagcatattatcccaagaagcaggaatggaagcaataggataagtaatttaaccttggcttgccataagtgcaatcaaaagaaaggaaatatgaccgctaaagaatttggtaaacctgaagttcaaggtaatgctaaaaaacctttaaaagatacagcaatggtaaatagttctcgtaaaagaatgtatgaagaa

SEQ ID NO: 1099 - DNA, 283 bp, unidentified
  misc_feature 1..283: note = Ga0116142_10030893 JGI
  source 1..283: mol_type = other DNA
ttcgaaaactactattcacaaattcgagagtgaaaactctcactatgtaaccagccataagtcgagtgactacgttagaaatgttatgacacctacggatacttcctcagttcgtagcaactgtcaagtattattaagtgaggtcttgattgagactacagtataatatttatgtaagcatacctaacattggcgaggggagatatttcgaaagaagtacgttacctgttgatataaataaacaacagagattatctgaaaagataaggagtaaatgaaaatg

SEQ ID NO: 1100 - DNA, 1407 bp, unidentified
  misc_feature 1..1407: note = Ga0180432_10045612 JGI
  source 1..1407: mol_type = other DNA
atgcagaagttattagcaaagtttgagaacgtaccagagaatgcttctctagttctctgctctacaagttctgatttaaacagagaggacactctcagtgatcagaacatacaactgactaataacactcccgaagagaatcattcccaacgtacagggaggtcattaaaaccatttgtgtacgtattatctaaacaaggcaaacctttgatgccttgttctcaagccaaatctcaaagaatgttaaaaggaggaaaagcacatgttataaaaagaactccgttcactatccaattgaattttgaatgtgcaaacagaattcaaccaataacttgtggaatagaccctggttattctcatattggattcagttgcactactgataacaaagaactcttatcaggaacagttgaacttgataacaatatgaaatcaagacttgatgacagacgaatgtaccgtagaaatagaagaaacagactatggtacagaaaaccaaggtttaacaataggacatctacaaagaaaaaaggatggtttgcaccatccattcaaagaaaacttaacactcatgttaatcttgttaaaaaactaaaacaaattctcccaataacaaagataatagtggaagcagcaaactttgacattcagaaaattaacgatccaaacataaagggagaacaatatcaacaaggttctttgtttggatatgagaacttaaaagcatatttaattcacagagaacaggggaagtgtcaactatgtgggaaagaatacaataatggttggcatgttcaccacatcattccaagaaatgatggtggaacagacaaaccagacaattgtgcactccttcatgataaatgtcataagaaactgcacaagcagaagttattttcttcattgaagaaagccaaacagttcaaagcagagacctttatgtccatggttagatggagactaacagaagagttaaagaagataatttctgatattaatgtgacatttggatatataacaaagataagaaggcatgagaacaatatagagaaaacacattcaaatgatgcatttattatatcgggaggaagtgaacagggcagatgtttgtctgatataatagttcaaaagagggagaataacaggagtttgcagaagaacagaaaggggttcaaggtttctgttaggaaagagagatataagattcagtccaaagatttggttaaaatagaagggaagtgggaagagacaaaggggacacattgcaagggaaagagaataatggttaatgggaaatctattagtattaagaaagtagaagagatatataatgtagggagtttaatatggagggcggcaattcctcccctgcctaaaggcaggggtctccttgtcgcaagaggatga

SEQ ID NO: 1101 - DNA, 268 bp, unidentified
  misc_feature 1..268: note = Ga0180432_10045612 JGI
  source 1..268: mol_type = other DNA
gtcaactacccctgcctaaaggcaggggcttgctccgtgaggagcaagagtaattagttgattagggagcttttaaggagacttaaatgcagaagttattagcaaagtttgagaacgtaccagagaatgcttctctagttctctgctctacaagttctgatttaaacagagaggacactctcagtgatcagaacatacaactgactaataacactcccgaagagaatcattcccaacgtacagggaggtcattaaaaccatttgtgta

SEQ ID NO: 1102 - DNA, 1350 bp, unidentified
  misc_feature 1..1350: note = Ga0311361_10020611 JGI
  source 1..1350: mol_type = other DNA
atgcagcagttagaaaagagagatacatacacacctacggatgcttcacaagtccgtagcaactgtgattcattattaaacagagaggaaactctcagtgtaatggatttaaaaacctcttctaacaatcccgaagtgaatttacctgtccatagcaggggcttagagccactaatctatgtattaaatttaagtaatgaacctttgatgccgtgtacggcttgcaaggcaaagaaactattgaaaactaataaagcaatagttgtaaaatttaaaccttatactattaaacttaattttgaatgtgaaaataaaacacaagaggttactttaggaattgattctggaagtaaattcattggtttctctgccgtgtcagatgataaggaactaatttgtggtacgttaattttagacaataaaacaaagagtaggcttactgaaagaaaaatgtatagaaaatatcgtaggaataaactttggtatcgaaaaccaagatttttaaataagaaaatcgaaaaaggatggctaccaccatcaattcatagaaaatatgatactcatttaaatctaattaatcggattaagtatcttttaccaataaataaggtagttattgaagttggtaattttgatattcaaaagatagaaaatcctgacattaatggaattgaatatcaacaaggcaataagtttggttatcaaaatacaagggctttcttaatgttcagagaaaaaggattgtgccaattatgtggtaaatcatttacgaaaggaaatacagcccacgttcatcattgcaagcaaagaaaagattctggttctaattcggttaagaatttagttatattacataaaaaatgtcatgagagattacacaaaaaggggttaaaattaaagactccgaagtcttataaagatgcttctttcatgaatatcatgaaaaataggtttgtcaaagatattcctgatgttgaattaactttcggttatataacttttataaatagagtaggcttagacttagaaaagactcattataatgacgcttttgtaattggtgatggttcagttcaagacagaattaagccaatagaaattatacagaaacaaataaataataggacacttcaaattaatagaaagcattttaagcctgccattaggaaacaaagatactcaataaggccaaaagacttggtatttgtaaatggtaaaattcattctgttattggcacacattgtaaaggtcgtagtataatattagaaaataaaataaataatcagaaatcaatatcgttgtgtaaaatagaaaaggtgtatcactttggtagtttagcaataagataa

SEQ ID NO: 1103 - DNA, 276 bp, unidentified
  misc_feature 1..276: note = Ga0311361_10020611 JGI
  source 1..276: mol_type = other DNA
gtcaatcacccaaagctgaagcaagcagtgggcttaacccgtgagggataagagcaattggttgattagggagcaataaaagaaattaaaagcaaaatttatgcagcagttagaaaagagagatacatacacacctacggatgcttcacaagtccgtagcaactgtgattcattattaaacagagaggaaactctcagtgtaatggatttaaaaacctcttctaacaatcccgaagtgaatttacctgtccatagcaggggcttagagccactaat

SEQ ID NO: 1104 - DNA, 1275 bp, unidentified
  misc_feature 1..1275: note = Ga0163148_10007436 JGI
  source 1..1275: mol_type = other DNA
atgtctaaccaaattttcgttctagatgccaacaaaaagcctttaaccccttgccgccctattacggcaagaaaattgttagaagccaataaagccaaggtatttagacagttcccattcacaatcatgctcaaaaaggaagttactgccacaccggaaccgattgagttaaagcttgacccaggttccaaagtaacgggcatagcccttaagcaaggaaacaaagtcatctggggtgcggaattaacccaccggggcggcgcaatcaaagcaagcttagagtctagacgttcccttcgtcggggacgtagaaaccgtcacacccgttatcgtcaagctcgattcctgaatcggactcgttcaaaaggttggttagctcctagcctcatgcaccgggttcggactactgaaacttgggtcaagaaattgattaagtttgcgcctatcggctcaatcgttcaagagttagttcgctttgatttgcagcaggttgagaacccggaagtcacaggtgttgagtaccagcaaggcgaactagctggctacgaagtcagagaatatctacttaacaagtgggacagaaaatgcacctactgttctgttgagaacgttccgctacagattgagcatattcaacccaaagctaagggcggttccaatagaatctctaacctgtgcttggcttgtgagaaatgcaatcaaaaaaaggggactcaggatgtcaaagactttttggctaagaagtccgaccttttgaagcagatcttggctcaagctaaacgccctttgaaggatgctgccgctgtgaattctacccgttgggctttgttcaacaccctaaaagaaacgggtctacctgtttctactggtagtgggggactaaccaagttcaaccgaacccgcttaggtttgcctaaaactcattggctggacgcagcttgtgtgggacaggttgagacattggaagtattaaccatccagcccttgctaattaaggcaacgggtcacggttctaggcagatgtgtaggacagacaagtttggttttccttcccggtatgtgcctaggttaaagtttgtgcaaggtttccagactggcgacatcgtgaaagcggtggtcacgaaaggaaagaacattggcacccatgttggtagggtggcagtgaggacaagagggatcttcaatatctcatccgctctgggtttgattcagggcatcagtcacaaatactgcaaaaccattcacaaaaaggatggctacggttacggattttaa

SEQ ID NO: 1105 - DNA, 273 bp, unidentified
  misc_feature 1..273: note = Ga0163148_10007436 JGI
  source 1..273: mol_type = other DNA
gtcagatacccagccctaaaggactgagcttgcagactgcccgactctagcgagcgggtataaaccaagctaatctgaccagcctaagccttaactggctacgttttttgagtcacgacaccgggcgaatgcgaagctagttccctgccctgtcgttgaaagttaaacagtcttaaggtcactgagacagtgctttcagcctaacaagctcttaaaacagtggcgaagctaacttaacgtgaaaacagtagagacaaaaccatgtctaaccaa

SEQ ID NO: 1106 - DNA, 1104 bp, unidentified
  misc_feature 1..1104: note = Ga0272448_1029175 JGI
  source 1..1104: mol_type = other DNA
atgaattacgttccggtcatctccagtaccggtaagcccctgatgccctgccacccggccagggcacgggagctcgttcgcaggggccgggcagtacgcaggttccggaaagggtttttctacatccagcttctcgaccgcagcgaggggcaaacccagcacgtgatatgcggtatcgacccaggttccaaaagggaaggattcacgatcaaggacacaaagcgcacgttcctgaacttattggcggatacggttacccacgttaaggaggctgtagctatcaggagaaagatgcggcggagcaggaggtacaggaagaccccctgtaggaagcctcgggctaacaggagatgtggcggaattccgccttccattctggctaggtggggttggaagcttaggttgtctaggtttttatgctccctgtaccctatcgacctgttcgtggtcgaggacatcaaggcaaggcttcgcaaggggcagaagaggtggaacgtctccttctcccccctccagatagggaaggaatggttttactgggaactccgcaagctcgccccggtgaccctcgttaaggggtacgagaccgctcaaatgcgggaggagctagggttgcgcaagtcctcccggaaggacgaggagagtttctggtcccactgtgtggactcctgggtcttggcagcatccgccgttggtggatcggttccagaagacacctggatcgtccggatcgcccccttgcggtttcgtaggcgatccctgcatctgcggcagtcagctaaaggtagtgtacgcaggcggcatggcgggacagtcagcttggggctccggcggggcacgcaggtgctccacccgcgcttcgggttctgctatgtcggcgggtatatgggggaccgccttagcctacacgcggtgcgagatgggcggcggctgactcgaggggcccgccaggaggatctgacggtgctcgcaccttgctcttggagggtgtgggtgccggagaaaagggtgaaaggaggtacattctatgagaatacgagtgacttcaccggacacttgtgtgaggttgaatcttccggggggattcaaattcataacggctga

SEQ ID NO: 1107 - DNA, 246 bp, unidentified
  misc_feature 1..246: note = Ga0272448_1029175 JGI
  source 1..246: mol_type = other DNA
cttgaagaccgagatgtctcgggtatatgtgttgtggaagtggggaatcctgagcgagggaggaccacttgcacaatgttaacggatgcccgagactttgccaactatgttttggatgaatgtcaagtaccccggactgaagtccggggcttgtgaggagtagcggaaatgccgaccgcgaaaccgcaagacaccgtgcaagcggtgggaaaaactagcctggccgagcaaccggacccagtaatg

SEQ ID NO: 1108 - DNA, 1365 bp, unidentified
  misc_feature 1..1365: note = Ga0224414_10007183 JGI
  source 1..1365: mol_type = other DNA
atgcaaagctgcgtatttgtgatgagcaaagatggtgaacggctcatgccgacaaagcgatctggccgagttcgccatttattaagagatggaaaggcaaagatcataaaccacagaccgttcaccatacaactggtatatgaggtcagtacatatacccaacctatggagttgtgtcaggatacagggtatcagcacataggaatctcactgaagtcagaagcgcacgaatatgtgagtgaagaacgaatcctgctgaaagacgaaaaacagcgtcatgatgatcagcgaagatacaggcgagacaggaggaaccggcttcggtacagggcagtgcgcttcagcaactgcaaacggcgggaaggatggctggcgccgagcctgcagcacaaagcagatgcgcatgtgaacgagatcatcagatatgcggcagcagctccgataacggatatatacatggaactgggagaatttgatccggcactgctgaaagcgctgggcaaaggagagccggtcccggagggatccgattaccagcatggcgatctctacgggcaggaaactctgcggaaagcggtctttcaaagagatgggtacaaatgctgtatatgcggaagaggagtggaagaaggggcgatactgcatatgcatcatgcgctgttctggaaaggtcggcacggcagtcagatcgatgagcttgccactgtatgcgagaaatgccatacatccgcgaaccataagaaaggcggattgctatggggatacgagccaaaacggtttgcaagtcttgagaatgcgacttttatgaacaccgtccgatggaatatctacaacagagtaaaaaagcagttggaagatatcaatgtccatataacatacggtgcaaagacatcaacagagcgaaaactgctgaatatggaaaagagccactgcaatgacgcatattgcatgggtaactacagaccggaggacagagcagagcagcagacatttcagaaagtgcggaggaacaaccggatcctgagcaaattctatgacgcgagaatagtggatatacgcgatgggaagataaagagcggatcggagttaggaagtgagcggacaaaccgcagggaatcgaggagcagcgataaaagtctgaggcaatacagagggactaaagttactaagggcagggtgtccgaaagaacgcagcactatcagataagaccgggagacattctgctgtggaaaaacacgccatataaggcaacaggagtgcattgtaacggaacaagggtgctcctgcaaaacaaaaagagtgtctcattaaaacaaataacaatacaaaaacatataggaggatggcagtttctccacgcctga

SEQ ID NO: 1109 - DNA, 318 bp, unidentified
  misc_feature 1..318: note = Ga0224414_10007183 JGI
  source 1..318: mol_type = other DNA
gtcaataaccccgcccgattcaaagaatcggacgaggcttgtccagtaggataagcctgattgataagcctgagtcttgaaacagagactacgttatgcagtgacgcataagcaactcaccttaggatgctccacaagttctaagctctgaggatatgcattaaacatctctgagggtaggagaagtgtgcatattttaaaaacctgcataacattggcgatgtggaccacagcaatggcggagagatccgtacatgctgaattatccggatggccggatggaaaaaaggaaaggaattctgccggatgcaaagctgc

SEQ ID NO: 1110 - DNA, 1227 bp, unidentified
  misc_feature 1..1227: note = Ga0182027_10069116 JGI
  source 1..1227: mol_type = other DNA
atgaaagtctttgtaattagtaagagcggtaagccactaatgccaacttgtccggcaattgcaagattgttattaaaaacaggtaaggataagtgtattagggtaacaccatttacaattaagatgttggttgagacaacggagtatactcaaccagttgaagcgggaatggatacggcggggaaaattatgggttgtgccgctaaaacaaatggagaagtagtttatatgtcagaagttattttgagggatgatattcataggaagatggtacaaaggaaaatgtatcgtagccatagacgatataaaaagactcgttatcgtcccatgagatatagtaaccgtatatctgcaaaaacaaaaggacgaatggctccaagcattaagtctaaggttgattctcatttgagagagaagagttttatggaatcaatattgcctaatgtaaaatggacaatagagattgctaagtttgatttgcagaagataaataatcctgacattaagggaagagaatatcaaaatggtccgatgaaagattattataatattaatgcttatgtgttgaatagggataattataaatgtcaaaaatgtaaagggaaaaacaaggacaatagattgcacgtacatcatattatatggagaagtattggtggaacggatgggccaagtaatagaataactctttgtaaaacctgtcatgatcgattgcataatggagaatttgatataaaagggagtaaatcaaaatctaaatatgcgtctgaggtgtcaatgataagttctcaattgcagaagtattttggggaacataaagaaacatttggatatgagactaaatataaaagagaacaaattttaggattgcagaaagaacattattttgatgcggttgctatttgttgtaatgataatgaaaaagtaaaagtaagtaatgttgtttatattaagagacatgtttctgctggggattatagacagacgaatggcaagagaagtgaaaagaaaattcctacgggtaaattgtttggattgagaaaatatgatttgattaaaactaaaaaaggaattgggtggatttcgggcaaaagaagtgaaggattttttgaattatctgagataaatggaaattcaatatgtcatgctattaatataaaaaaatataataaacgtatttctgcgagatcgaccacattggtttctatggtaaattcaaacagataa

SEQ ID NO: 1111 - DNA, 283 bp, unidentified
  misc_feature 1..283: note = Ga0182027_10069116 JGI
  source 1..283: mol_type = other DNA
atcgtctaccattatcctaattcgttagaataatcctttcggggtaagacgatcagaccactaattggattcgttgattagtagccgttatctaacatgtagaaaccttcagatgccgtcccagttggaagctctttcgtggctctgtaaacagttctaaggtaaggaacagtcaaccacagcgtgaaggttagataacaggtcgagggaaggtcggattctggtattatccaaaatatcagatacgcataactccaagttgttggaaggatataagatgaaa

SEQ ID NO: 1112 - DNA, 1320 bp, unidentified
  misc_feature 1..1320: note = Ga0307430_1002475 JGI
  source 1..1320: mol_type = other DNA
atgaaggtctttgtactcaacaagcacggggaaccgctgatgcccacgacgccacgaaaggcccgtctgctgctgaagcagggcaaggccaaagttgccggcagggagccgttcaccattcagcttttgcacggatcgagcggctacaagcagccggtcaccctcggcgtcgacgggggctatgcaaccatcggatactctgccctgacggagagagaagaactcatcggcgggcaggtgcacctcctggccggggtgtcacagcggatcacggagcgaaagatgtaccgcaagctgaggcgcaggcgaaagcgataccgtgccccccggttcgacaaccggcgtaagccggagggctggctggccccgtcggtgcagcacaaactggacgcccacttgaaattgatcacacgcgtccgctcgatccttccagtaacacgggtgatcattgaagtcgcgaatttcgatatccagcagatcaagagaccggacatttcgggggtcgagtaccagcagggagaacaggcggggttctggaacgtgcgggagtacatcttgcacagggacgggcacgaatgccagaaccccgagtgcaccaagaagagcgttgtgctcaagacgcaccacctggggtattggaagaacgactacagtgacaggccggacaacctgatcacgctttgtaccgagtgtcacacgcaagacaaccaccggccgggagggcttctctacggatgggaaccgagagtcaggcccttcaaagctgagacgttcatgacgacggtgagatggcgcttgatcgatgcagtcggagcggaggcgacgtatgggtacctcacgaagagcaagcggatcgcgctaaagctggagaagagccaccacaacgacgcgttcgtgatcgcgggcggggcggaccaaacgcgggcggaggcggcggatttcgaagagatcaagaatcacgcccgtgcgcgctccaggttctacgatgcgatctacgtcgacacacgtacgggagagaaggcatacgggaaggagctccactgcggcagaacgacgcggaacaggaacctgagcggggaaaacctgagaaagtatcgggggcagaaggtacgaaagggcagagtctctatcaggcgcaacgactatccgatccgtcccagagatatcgtgttgtgcgacggggagaaacacgtcgtgaagggaatgtgcagctatgggaaacaggttgagctgtatgtgcctgatggcaagccacggtacgtcgctacgagcaaggccgtgccgctgagaaagaggagggggttatgcgctgtcgtttga

SEQ ID NO: 1113 - DNA, 291 bp, unidentified
  misc_feature 1..291: note = Ga0307430_1002475 JGI
  source 1..291: mol_type = other DNA
gtcagcaacccgccccccgaaggggttaggcttgcgggagatacttgcaagcccggctgatcagcctcagccaccagccttcgggctgatggggctacgttcattgcgaatacataggcactttgggatattgccaagtcccaaacactgcgggccaagattaaacatcgctgagggtaggcgaagtgttttggccgacaaaccgctttgaacattggcgatggcaaccactcccacaagggaggcaagcttcttgttagcttgcacactatcaggagcacgacgatgaag

SEQ ID NO: 1114 - DNA, 1008 bp, unidentified
  source 1..1008: mol_type = other DNA; note = Human gut metagenome
atggcagtatgtgttttaagtgcaaacggtgaacggctgatgccgaccgaaaattacggcaaagtgcgccatctgctgaaagatggccgcgccgtgattgcgaagcgaaacccattcaccatccagctgacctacgataccagtacctatacccagcccatcgaaatgtgcgttggcaccggctatgagcatatcggcgtcagcattaagacgaaggcaaaagaggtcgtatcgcagcaatatgatttgctcacgaatgagcgctcccgccatgacgactgccgagcgtaccgccggacgcgcagaaaccgcctgcggtatcgggctgcacggttcaataaccgtgtatccagcaaaaagcccggttggattgctccgtccctggataacaaggtggagcgacacctggatattatctcccgctatctgtctgtcatgcctgtcaaggatgtctttatcaaggccgcgacatacgatacacagctccttgcggcgctggaggcaggggagcctgtcccgcagggcaaggactatcagcatgggccgcagtacggccacgatacgctgcgggaagctgtctttgaacgggaccactatacctgtgtgtattgcaagagaggtctgaaagacggcgctatccttcatgtccatcacgcctactactggaagggtctgcatgggaacagcatgagggagcttgcgacctgctgcgagaagtgcaacacacctgccaatcacaaggagggcgggaagctgtggggcttcgataagcctctgcggaaatataccggcgaagcgtttatgaatagcgtgcgctggattctctatcagcgtgcgatggctcgcttccagggtgctgcggaagtacacatgacctatggcgtcatctccaagcgtgttcgcaccaacctcggcctcccgtattcctgcgctacggatgcctactgcatgggcgagctgcgtccggaagccagatgcgaaacagaggtcttccagaaatacaggcga

SEQ ID NO: 1115 - DNA, 440 bp, unidentified
  source 1..440: mol_type = other DNA; note = Human gut metagenome
gtgcgtaccatcaaacccggtttatccttggcgatgtggaccacagtaacgccgaatgagcggcaagtgctgatttacctttttggtttgtcatttgaatattaccatttctgtattcgttgatgcccccgccaaatgacaggtagctataccatggctgggactacatcaataagcgtgtcggttgacgtcccccaccaaatgacaggcagctataccaagaagcatctcacacattaaattagttcggttgacgtcccccaccaaatgacaggcagctatacctgaccccccatgtaaaccctgcgatgataatgttgacgtcccccaccaaatgacaggcaactataccctgacggtgaatgcctttacctgtgccaccgttgacgtcccccaccaaatgacaggcaactatacccggctgcgaaagggaaaagaaa

SEQ ID NO: 1116 - DNA, 1470 bp, unidentified
  misc_feature 1..1470: note = Ga0190313_1000813 JGI
  source 1..1470: mol_type = other DNA
atgatcgtatttgtagtagattcacgcaacaatattggtcatcccacacgcaagtgtgacatgatcagacgattattaaaacgtggcaaagccaaagttttaaaaggcggactcaagtcaggtcagcctatattagtacaaatattcaagaagtttgataagtcaaaaacaatcgattgcgaattcagagtcggaatagatcctggatacaaacatatcggttattgtgtttacaagatatatagtaacaaagttataaagttgttttcaggcgaacttgaaactagaacatcagatgttaaagacgggttagatactcgtcgaatgtatagaaataatcgacggggcaatcatagaaagaataataaacgcaaattcaaggtggctaaatttaaacatccaatttggaagaatcgacgcaagcacaaatttcaaccgacacattggcatttgattaattcacacagcaatctattaggttggatttttgatagaataccattagatcaaagtaagttacatgttgaatataataagtttgatttgcataagataattaaaccgaatattcgtaattggcaatatgcaaaaggtacacaatatggtttcgagaatactaaactatatgttcgaaatcgagataattatcaatgtcagatatgtaaacagtatattggtcgattaccaaacgaagtacaccatatagtttggaaatcaaatggaggatcagacagtccacttaatttaatattactttgttcggaatgtcataaaaaagttcacgcttgtaaaatagtatgtcctactaaatcaggatcagtcaataaatatcgtgatgctggtgtattgaattcatgtatgaagcatatgtttgctgaatatgaaagtattataccaacgcaagatacatatggatatattacaaatgctgtccggaagcaatggggattagaaaagacccatgcaaacgatgctagtgtaatagcaatatgtgattcgaatggctttatggaagagcttagacaatatactcaatggtcggatgaagatgtaactatcaattttaaacagtatagaagacatgttcgtaattgggtacaacgatatgaagatcgaaaatattatattgatggttttaaaaatcctagaaaagcgtttgcgtggaatcgtaatcgtcgatctgggcaagctaagaacaagtgtagtttagtagaattaaaacaaaaattaatatctaaaaatgcattaaataaagttcagattattgctaaacctggtggaagagttatgaaacaaagtgaaaagaagatgacatttcgtcgtggtgatataattcgttgttcgaaaggaactgcaactgtgcaatattatgagcttgggcataaagtaattaatactgttcaattatgcaaaattaaacaaaaatattgtaccaaaatattaaacaatagcggaatgtgtgtaatttag

SEQ ID NO: 1117 - DNA, 301 bp, unidentified
  misc_feature 1..301: note = Ga0190313_1000813 JGI
  source 1..301: mol_type = other DNA
ccgatcattaacccggacaacccttttaatttatgcggcgaaataattaccaatacctaagtctaatggattagggccgcgacagacgtattgattaaatgttcaccctagaatgccattcccagttccaggctctggaggtgtcggtgcttaatattattatttaatattaagtacctagtcctcattgtcgacaaagtaggtaacgaaagtcgatattacatttaatcaagtcgagggagaccaatctaactttttaagttaatctctatcatgagattttttaaggagatacatgatc

SEQ ID NO: 1118 - DNA, 978 bp, unidentified
  misc_feature 1..978: note = Ga0272429_1007931 JGI
  source 1..978: mol_type = other DNA
atgtcaacgattagtcattcaatcccggtgattggtgtcgatgggacgccgctcacgccgaccgtgccgtcgaaggcgcgcaaactcgtcaaaggagggcaggccacgggcttctggaacaagctcgaccagtactgcatccgcctgaccgtggagacacggacgggcgggctcgacgcggaactgggcgtcgaccccggcgccaagtatgacgggtacgccgtcgtctgcggcaacgagaacctcctgaatatcaaggttgatgtgcccgacaaagagaagatcgtgcgcaagatcgccgaacgtcggcagctacgccgggcgcgtcgttcccgcacatgccgtcgccgaccacagcgcttcagcaatcgtcgccgctctcctgggtggatcgcgccgagtcaactcgtgctggtccaggtgcgcctcaaggttttgaccgtgttgtgtgacacctatccgatcaccaacgtcgggttggaggatgtggccttcaaccacggcgcacaccgttacggcaagcacttcagtaccgctgaaattggcaaggccagggtgcgcaccttgctggaagaacgagggacgttggtcgcgcgcttcaggggctacgagacgaaggcgctgcgcgagggctacggctacaagaaatccagtagcaagaaagctgatcgcttcgaagcccactgttccgatgccctcgcgttggccctggcggtgcggcgtgacgcctctctcgcgccggggccgttcgtggtcattgatgatcgctaccgcgcggtgcggcgtcgcttacacgacacgcagcccgcgccgggtggcctgcgcgcgccgtacagcagcggggttgtctttggcttgcgcaagggattgatgatcgggacgccgcgcgggaaggttggacaactctgcggagagttgaaaggaggttatcgctattacgacaccgacggaaagcggcaatcgaccacaaagtgttag

SEQ ID NO: 1119 - DNA, 270 bp, unidentified
  misc_feature 1..270: note = Ga0272429_1007931 JGI
  source 1..270: mol_type = other DNA
gtcaagaaccgccgcttgaaagcggcggcttgaaatgagggtatcaccgaccgcgcgcggcgaacgtgcgcgggagttttgactagggggcatcatccgatgcagacgctccgcagggctacaagaacgtccgactgcttcacgaggccggaccccttcgctagaacccttcaatagcacggtacgtttcggcgcacctacgcccggcgggcacccccgacgcgagaagacatccgaaaggatggttgtatgtcaacgattagtcattca

SEQ ID NO: 1120 - DNA, 978 bp, unidentified
  misc_feature 1..978: note = Ga0137383_10000411 JGI
  source 1..978: mol_type = other DNA
atggtgttcgttttggacagacacaagaagccgttgatgccctgtacccccaggcgggcgcgactcttgctcgcgcgccggcgggcggtggttcatcggatcaggccgtttgtcatccgtttgcgagaccgacgcacccaggacagcgtgctacaagagagcgtgctcaaaattgaccctggcagcagaaccagcggcatgaccctggtgcgggcagaagagacgccagcgggagaggtgcatcatgcgctcttttgctccgaagtgcagcatcgaggagagctcgtccatcgaggcaagcagacccaaagcaatgcccgacggcgtagacgcagtgccactctgcgtcaccgcgcgccacgcttcgacaaccgggctgttgccaaagggtggctgccgccctcgatgtgctcccgtgtgggtaacatcctcacctgggccaggcgatacagccgatgggtgcccgtcggcacctggacgggaggacgaacgcggtggaaccgggcgcgcttgggcatcgcgaaaacgcatgccaacgacgcgttgtgcgtgggagagatcgcgggcgtcaagctcttgaggctgaagacgctccggatcaaggcaacaggccgaggcgagcattgtcgcaccaactggacagcagaaggcttcccgcgcggctacaagatgcgtcagaagcaggtgcggggctttaagaccggcgacttggtgcgagcggaggtgccagagccgctcacgacggcaggtatccacctgggtcgtgtggccgtgcgggcttctggctcgttccgcgtgggcaaagtggacgggatccacgcgcgttatggtgtcctggtacagagggcagatgggtatgagtacgaatggaccgagcagcagaacaggaggctgttccccacccctgccccaaggaaaggaacgcctgcttcctccccatctttgaaaagtggggcatccgcaggcggggattggtga

SEQ ID NO: 1121 - DNA, 319 bp, unidentified; identical to SEQ ID NO: 137
  misc_feature 1..319: note = Ga0137383_10000411 JGI
  source 1..319: mol_type = other DNA

SEQ ID NO: 1122 - DNA, 975 bp, unidentified
  source 1..975: mol_type = other DNA; note = Human gut metagenome
ttgagagtatttgttttaaacaaacgagggcaaccgttgatgccgtgctcaccggcaaaagcaaggctgcttctcaaagagaagaaagcaatcgtcaaaagacgcacgccttttacgattcaacttacgatcgcaacgggcgaagcaaggcagcctgtaacgcttggcgtggattccggctacaagcacattggtctttcggccacaaccgaaaaggccgaactctatgcctcggaagtcgaactgcgtcaagacatcacggatcttttgtctgcccgtcttgctttgcgccgctctcgccgcagccgcaagacgcgctaccgtgcgcctcgtttcgacaaccgggtggcaagcaagcgcgaaggctggcttgctccttctgtggaaaaccgcattgcggcgcacatgtcgcgtgtagaagcggtcatgcaggtcttgccggtgactgccataaccgtcgaaacagcggcgtttgacacgcaactgctgaagaacccggacattgccggagaggcgtaccaacaaggcgaacagctcggattttggaacgtgcgggaatacgtgcttttccgggacggacacgtttgtcagcactgccgcgggaagtccaaagatccgatactcaatgttcaccacattgagagccgacggaccgggggcgatgcgccgaacaatctcatcacgctgtgcgagacctgtcacaaggctttccatcgaggggaaatcgaactcaaagtcaggcgaggaaagtcgttcaaagcggaaaccttcatgggcatcatgcgttggacgctctttgagcgtttgaaaaaggctcacccggaactcagagttcgcaacacctacggttatctcacaaagcacaagcgcatctcacacggaatcgcaaagagccactgtgcagacgcgtactgcattgcggacaaccttggtgcaaagcgactggagggctttttctttcaaaagcaaacccga

SEQ ID NO: 1123 - DNA, 250 bp, unidentified
  source 1..250: mol_type = other DNA; note = Human gut metagenome
gtcaactaccccgctctaaagagcgaggcttgataaaagccttggttgactagcctcagaccgccccaaaaggcgggctacgttggttgggaatgcataggcaccgcgggatgtcaatcctagtcccgcgctctgcggttcgcggttaaaagctctgagaggtaggagcggtgccgtgaacaggtaaaccccttccaacattggcgaagaatttcaaccggtcgcaagaccgaggagtcaaatcttgaga

SEQ ID NO: 1124 - DNA, 1428 bp, unidentified
  misc_feature 1..1428: note = GENOME_ACESSION: mgm4547164.3 MG-RAST
  source 1..1428: mol_type = other DNA
atgaaaccagtatatgttgtaggttataacggccaagggcttatgcctacgaccccaaggaaggcaagaaaactagtggaatcaggaagagctgtagtgctttttaagactccgtacacaatcaaacttctgtataaaacaggagttaatactcagcccacattcgaaggaacagatacgggaagccagcacataggcgttgccgtaacaacggatgagaaagtcttatcaaaggaagagtatgcacttcgaagcacaatggacaagcgtgctcttatcgaaacaagagcttcttacagaaagggaagacgttatcgcaaaactaggtaccgtcatccgaaattcagaccacatacaaaacgagtctatgtggaaaaaccagttcgttataataagcacttaactcactggaagaaatgtaagaatgtattcgcatcaagtaaaaagaagggatggcttccgccatccatccagtccaagtgtgatatgacgatgcaaatcatagacagatataagatgatacttccgccaaagacaaggtttcgtcatgaagtcggaagattcgatatcgcaagaatcaaagacccgtccattcacggggagatgtatcaatacggacgtctttacgacgaggagaacgtcagagcctatgtgtttgagagagacggttacacttgcaaagtttgcaagaagaaggccggttctaaacgaaaagatggttctacagttaaacttgcggcacatcatatcgactttcgctccaaaggagccacagataatcctgacaggatgataactgtgtgtgacggatgccatacaacagttaatcatcaaaagggaggaattctttatcagtggatgcttgatgagaagaaagtcgccagaggatatcgagacgagacgtttatgaacatcattcgcaggaaattattcaaagagtttcccaatgacgaattcacttacgggaacttcacggctgccgacagaaagacgcttggcttagagaagacacacgccaacgacgctgttgccattgcatgtcagggacgtcctgttaaggataatcctgatacaacctattatcaacaagtaaggcataataaacgttcacttcatgaggctacggcgcgtaaaggacgcaaagaacccaaccgtagacagattcgcaatgcgaagaacacaaaatctgtcacaattgggcgctataatagcaagaaaacattttatgtatacgacaaggtttcttacaaaggacaggtgggatggataagcgggttcactaaaacggcggcttatgttaaggacaaagatgataactatatcaagtatcctgataagagttacaaccagataaatttaagcgatttgtctgtgatatcacacaacgacaattggctgattggagcagtgtctccaataggcaagtag

SEQ ID NO: 1125 - DNA, 342 bp, unidentified
  misc_feature 1..342: note = GENOME_ACESSION: mgm4547164.3 MG-RAST
  source 1..342: mol_type = other DNA
gtcaactacccaccactaagcctaaggcttgaagtggggggcttgtaaaagccaacactttaggcaggcagtggagaatgttgactagcctcaggagttagatgtatttagtgcagctaactactacgttacagagatgaatacgcccaacatgctgctcaagtggataaggcgttcgggcaacggatgtctgatatagggtaagtaggacaccgacccaggagcacgaagtctctggacattggcgatgagcaatacgtgctgtggacacgggcagaaccgtcgagtctctgccgcaaatcacattcttagaggaaggaggcataagccttgatgaaacca

SEQ ID NO: 1126 - DNA, 1392 bp, unidentified
  misc_feature 1..1392: note = Ga0210056_1025515 JGI
  source 1..1392: mol_type = other DNA
atgcagaagttattagtagagttaaagaacgcacctacggatgttccacaagtctgtagctctgtaagtcctgtattaaacagtccgtgtgaggtaatggacagtgtacaggacatacaactggctaataacaactccgatgtggaccaacttgggaacaggaggaacacacttttagtagtgttcacactgaacaaaaatggtaaacccctaatgccttgtaaacctgcaaaggcaaggcatttactaaaagaaggcaaagcaaaagtagtaagaggtcagccttttactattcaattactatatggttcgggaactgcaattcaacctattattcttgggatagatcctggatatgacaagataggattttctgctatcacagataagaaagagttaatttcaggagaagtcagattaagaaaagatgtatcagcaaaattaacagaaaggagaatgtatagacgaaacagaaggaataaattatggtataggaagcccagatttcttaatagagtatctaaaaaagaaaattggttagctccatctattaggtataaattggatagtcatattagcctgataaataaaataaaggaaatattgcctatatcagatactatagttgaaatagcctcttttgatgcccagaaaatagtaaatccagagattagtagtattaaatatcaacaaggagaattacagggatatgaaatacgagaatatttattagaaaagtggggtagaaaatgtgcttactgtggtaaaaaagatattccattagaagtagaacatataataccaaaatcaagaggtggaactgatagggtatctaacctaactctttcttgtcaaaaatgtaatctcaagaaaggaaacagaacagcaaaagaatttggatatccagaaatacagaagcaagggaaagaatcactaaaagcaactgcatttatgaataatgttaggtggaggttagttaatatattgaattgtaagtggacttatggatataaaacaaagcacgatagaattaaattagggttagagaaatcacacagcaatgatgcttttacaatagcaggtggtaataagcagttagggtcggttcaatatattggaaataggtatagaaggaatgatcgttccttacaacttaatagaaaaggatttacaccttccattaggaggcaaagatataatttacagccacatagtttagtaaaatggaacaatcaattattaagaattagaggaatatcttgtaaaggggcaagagtagttttagagaataagaaatcagtcaagatagatagtgttcaattatataaatatatgagaggatggcaattattccctgatataaatgacggagtttccttgctacaaaattaa

SEQ ID NO: 1127 - DNA, 250 bp, unidentified
  misc_feature 1..250: note = Ga0210056_1025515 JGI
  source 1..250: mol_type = other DNA
gtcaaccacctctccttaaaggaaggaacttgtgaaagcaagtccctggttgattagggggtattgaaaaatgcagaagttattagtagagttaaagaacgcacctacggatgttccacaagtctgtagctctgtaagtcctgtattaaacagtccgtgtgaggtaatggacagtgtacaggacatacaactggctaataacaactccgatgtggaccaacttgggaacaggaggaacacacttttagta

SEQ ID NO: 1128 - DNA, 1308 bp, Geitlerinema sp.
  source 1..1308: mol_type = other DNA; strain = FC II
atgtctaattttgtttttgtactcgatacgaagcgacagcccctcgcaccgtgccatcccgcacgggctagggaactgttagccaagggaaaagcggcaatttacaggcgctatccgttcaccatcgttttaaatcgcgctgtgggcgacgtgccgccatcgtaccaactcaagattgaccccggctcccaaactaccggactcgccctcgtaaatcgcagccagctcgtttggggtgcggaattgcaacaccgaggcgctcgcattaaagcgaaattggcaacccgtcgcgtctgtcgtcggaatcgccggaaccgcaagacgcgatatcgcaagcctcggtttctcaaccgtacccgcccgaagggttggctgccaccgtctctaaaccatcgcgtcgaaaccacgatgacgtgggtgaaccgcttgcgaaaactttgtccgattgtgtgcgtctctcaagaactcgtgcggttcgatacccaaaaactccagaaccccgaagtgagtggtattgagtaccagcagggtgaattgttgggctatgaagtgcgcgaatacgtgttgcaaaagtggggtcgaaagtgcgtctattgcggcgttgagaacgtgccgttagaggtcgaacacatccagccccaatcgaagggtggaagcgatcgcgtctccaatcttaccttggcttgccgtccgtgcaaccagtctaagggcaaccgcgacgttcgagagtttctgttggagaaaccctccgttctcgagcgcatcttgagacaggcaaaaaccccgttgaaagatgcggcggcggtcaacgcaactcggtggcaactgtaccagcgattgaaagagacgggtttgcccgtcgaagtcggaacgggcggtttaaccaagttcaaccgcacccgattggggttgccgaaagctcactggctcgatgccgcttgtgtgggagagacgccatcgctgcatttagcaactgaaactccgatagcgatcttgagcaaaggtcacagcacgagatttcgcaccctcatcgaccgttacggattcccccgcgccgtgagacaaacgaaggcgcaagtcaacggcttacaggcaggcgacatcgtgcgagcgatcgtgccgaacgggaaatatcgcggacagtggacgggagcgatcgccggagtgcgaaaaaaacgcccacctgccttgcgtccttttggaaaaaaacagatcgatttaaccgctcaaacacaaatccagatcgttcacaaacaagatggctatgaatacgacattaattcgtgcgggcattcctcccgacgctga

SEQ ID NO: 1129 - DNA, 260 bp, Geitlerinema sp.
  source 1..260: mol_type = other DNA; strain = FC II
gtcaaccacccgacgccgatcgagcacgggtacggcgcgggcttgaaaaagcccgacagttgaccaggctaagtcctttacagactccgttatcgaggtcacgacaccgataagttagccagcttgttgctctgtcgtcggtcgttaaacagccctactcgggttaaggcagtgcgaccgacctcacaagcctcgataaccttgccgaggcaaacgttacgtcgcctaagcgacaggagtagacagaaatgtctaatttt

SEQ ID NO: 1130 - DNA, 831 bp, unidentified
  misc_feature 1..831: note = Ga0307954_1000334 JGI
  source 1..831: mol_type = other DNA
atggctgtttttgtactcgacagacagaagaacccactgatgccgtgctcggaaaaacgagcccggcttttgctcactcgcaggcgcgcggtggtggtgcgagcgtatccgttcactattcgcttgaaagaccgcgctggcggtgctgttcagaaagtcgtgctcaagatcgaccccggcagcaaagaaaccggcttagcggtgtccagagtcagcgcccaaggggagcatgtactgtgcttgatagagctgactcaccgtggccatcagatcagcaaagcattggaccagcgccggggatttcggagtcggcgccgtggtcaactgcgctaccgtgcaccaagattcagcaaccggacaaagccaaaaggttggctggcgccgagcctgcagcatcgagtggataccaccgccagcatcgtcaaccgtctttgtaccttggtgccggtgtcgtcaatcagccaagagctggtgcggtttgacctgcaacagatggagaatcccgaaatcagcggcgttgagtatcagcaaggcactttgttgggctacgaagttcgggagtatttattggaaaaatggggccttgaatgcgcttattgtgccgtgaccgacactccactggaaattgaacacattgttccgaaatcgaacggcggctctaaccgaatcagcaatctgaccctcgcctgtcacgactgcaatcaggaaaaaggctcgcaaactctggccgagttcttccaaacgtccagtcgcctgaaagacaaacagccgcgcatggacaacgtgctgattcagtgcaagcgccccttgcgggacgctgcggcggtgaac

SEQ ID NO: 1131 - DNA, 293 bp, unidentified
  misc_feature 1..293: note = Ga0307954_1000334 JGI
  source 1..293: mol_type = other DNA
gtcaactaccccgccgtgaacgacggggcttgtagagaacacatttcaagccaggttgaccagggaaagcggacaccaacccgctacgtttgccacaggtcgttaagacccactccggtgtgctacctcagcaccggacactagaaagctgggatcacgctggcgaaaggtaaagcgccgaaggtttcagttgccgcgcaagcgggagccggtggtcgacattcccgaggggagagaggtttcggcctccgttacaaggcctgtaaaggcactatttggaaaacgatatggct

SEQ ID NO: 1132 - DNA, 1272 bp, unidentified
  misc_feature 1..1272: note = Ga0376687_0042770 JGI
  source 1..1272: mol_type = other DNA
ctgctcaggaccgtcagacagcccggtaacggggccctcatccgagggcacagaaaggagtcacccatggtgtttgtgctcgaccaacacaaaaagccgctcatgccgtgtacccccaggcgcgcacgcctcctgcttgcacgcaagcgggcggtggtccatcggctcagccccttcacgatccggcggcatcggaccgcagcgtccaggagagcacgctgcaaccggtggtcctcaagatcgatcccggttcgaagaccaccggcctggccctggcgcgggtcgaggagacggatgagggggaggtgcaccacgcgctgcatcttgccgagctcacccatcggggagaagagatccgcgagcgtctgcgcaaacgggcggtctatcgccgccgcaggcgttcggccaacctgcgctaccggccagcccgcttcctcaaccgtcgccgtgcgcccggctggcttcctccgtcgctgcgctcacggatcgacaacgtcgtgtcctggacttcccgctaccggcgctgggtcccgctggtgcgcgtggaggtcgagcgcgtcaagttcgacacccagaggctcgcagaatccggagatctccggggtcgagtaccagcgcggggaactggccggttgggaagtgcgatcctacctgctggagaagttcgagcaccggtgtgcctactgcggccgcacggacacgcccttcgaactggaccatatccagtcacgcagtcgcggtggttccgaccgggtgtccaacctggcgctgagttgccacgcgtgcaacgtcgccaagggagatcacaccgccgcggagttcggccatcccgaggtggcggctcaggcgaagcagcccctgcgggatgcggccgccgtcaacgccacgcgcgttgcgctctgcgacgaactgcgcaagcttggtctgccgctcaccagccttgtgtggcggacgcacgcgctggaaccgggcgcgcttcgcgatccccaagacccacgcactggatgcggatgtcgcgtgggagcactggcgggagtcagcgcctcccggcacaaaactctcgcgatcaaagcgacgggtcgtggccgctacagccgcaccaatgtggatgagcatggcttcccggtgggctatttgatgcgccacaagcaggtgatgggcatcaagacgggcgaccgggtgctccagttcgctgacggctacgactacgcactggtggacacagggtctgagcacgtcgcagtggcgcctcccccgaccctgtgtccacca

SEQ ID NO: 1133 - DNA, 323 bp, unidentified
  misc_feature 1..323: note = Ga0376687_0042770 JGI
  source 1..323: mol_type = other DNA
gtcaacgatccccacgcatgaatgcgggggcttgtcccccgggttgatgccgtcttcgttgtccagccgaggtgcccgagccttgtggcaaggcgctgatgggtaccagcgttgcgctcgtcacgacacccgcgtgtgcttcctcagcactcggcgctgtcgttcatcgttaaaagaacctgtcggggtacgggtcggtgcggtgagcccaacaagcgagcgcaacactggcgaagggagcgtcctgagcccgcctgctcaggaccgtcagacagcccggtaacggggccctcatccgagggcacagaaaggagtcacccatg

SEQ ID NO: 1134 - DNA, 837 bp, unidentified
  misc_feature 1..837: note = Ga0172375_10015289 JGI
  source 1..837: mol_type = other DNA
ttggcatcaagacgttccctgcgccgcggccggcggacccggaagacccgctatcggcaggcaaggtttcttaaccggaagcgcaatcagggctggctgccgccgtcattggagagccgggttctgaacgtcaattcctgggtaaaccgcttgaggcgattagcgcccgtaagctcgatctccctggaactggttaagttcgacacgcagaaactccaaaaccctgaagtttccggcgtagagtaccagcaaggcgagcttttagggtatgaagtgcgagagtaccttctggagaaatggggccggaaatgcgcgtattgcaagactgcgaacgtaccgttgcagattgaacacattgttccgaaaattcggggcgggactaaccgggtatcaaatctaacgctggcctgtgagtcatgcaatcaggcaaaaggtaatcttaccgccgccgagttcggccatcctggcatccaatctcaagccaggatgccgctcaaggatgcggctgcggtcaatgcaacgagatgggcactgtttaatcaattaaaaggtctgggccttcctgtcgagatgggcagcggcggacggacaaagttcaatcgagtgcgccagggatacccgaaggctcactggattgatgcggcgtgtgttggggaatctgggtctaagatcaatattccttcttgggcaattcctgtgcaaatcaaggcggtcggtcacggttctcggcaacgatgtggaacggataaatatggctttcccgttcggcatgcaccgaaggccaaatctttcatggggtatcaaaccggggacattgtgcaggcgaacatcccgtaa

SEQ ID NO: 1135 - DNA, 254 bp, unidentified
  misc_feature 1..254: note = Ga0172375_10015289 JGI
  source 1..254: mol_type = other DNA
gtcaaccaccccacggctgaagccgggggcttgagagatcaggcctgaggttgaccagccacagccagggccgcaaggccatcgggctacgttagtcaggtcatgacaccccgggatgcgtgccagttccaggctctgtcggccagcattaaacaggcatacggggttgaagccggtgtgttggccacaaaaagcttgattaaccttggcgaggcaaacattaccctggaaacaggaggctcattgtgagcaag

SEQ ID NO: 1136 - DNA, 1461 bp, unidentified
  misc_feature 1..1461: note = Ga0180732_1000856 JGI
  source 1..1461: mol_type = other DNA
atgaaagtttatgtaatttcaaaatcaggcaaaccattaatgccgacagaaagatttggaaaggtaagaagattattaaagtcggggaaagcaaaagtggttcaccgaaagccttttacgattcagcttctttacgagactactgaaattgtgcaaccattgattcttggggtggatacgggagcgaatgacattggagttgtagttacaaaagaagatggtgaacctgtatttttaggtgaattagaaacgaggacaatagaagttgctcaaaatatgaaggatagatgcgaacatagaagggcaagacgcagacatcgcagagaaaagcgaaagagaagagcaaaggcagcaggtacgatttttgaaaagaaaaaataccacattaacggctgtgaagaagcaataacttgcaaactcatcaagccgggaatggtacgatttgaaaatagaaagcgagcggataaatggcttactccaacttgtactcacttattacagacgcatattaattttatcaagaagatagcaaaaatactaccgattgctatagtcaattttgagtatgccaaatttgatttgcataagattaataatcccgatgtaaaaggtaaagattatcaaaatgggagaaagaaaggatatgtcaataccgctgaatacgtgctttgccgagataaacattcttgccagttatgcaaggtaaagagtgggaagatgcgcgttcaccatgttatttggcaaagtgagaatggaagcgatactcctgagaatttagtgacgttgtgtgaaaagtgccatgaaaaagttcacaacaatcagaaagcagacaagaaaataaaaggattatttgaaggaatcaagaaaaagtatgtccatgctaccattcttaattcggttttacctaagttgtttcaatggttaaaaagcacttttgaaaatgtcaataagacctatggatacgaaactaaagagaaacgttgggaatataatttgccaaaatctcatgtagttgatgcttatttaatagctattggtgataaccccccccatgatttgacgagttgtgaatcgttcttgttcaaacagttcagacgacataatagggcgaacataaaaagacaagaagaccgaaaatattacatcgggaagaagaaagtcgctgttaatcgtaataaaaggacaggacaaacctttgatagcttaaaggatttagtcacaaaatgtgcagaacatgagactgttctgaatctgttgactgtaaagccagcgactagaccgaagagaagcaccaagccttttgggatgggcgatgtcgttaaattcaggggagggattcatatagtcaagggatttacaggaaactacttgggatttgttgatgctgctgatggcaaatacaacaaaaacataaaagaagcggaattggttatcaaaaatcaaggaattgtttgtatttga

SEQ ID NO: 1137 - DNA, 257 bp, unidentified
  misc_feature 1..257: note = Ga0180732_1000856 JGI
  source 1..257: mol_type = other DNA
tcatcatatagctcgtgacattagcattgaagctgttgatggtgcgttggagaaaggtttaatttctgttaaaaaatattaaaaagcattcagctttttataaaaatatttagcaacaaaggttagaccacaggctaaaaaaggagttgcaggtaagagcaccttgtgattttcccagtccaagtagctgttaatcctgtaactaagtcagggaaaccaacgaccgaaaggtcgctttacaggagtttttcatgaaa

SEQ ID NO: 1138 - DNA, 1326 bp, unidentified
  source 1..1326: mol_type = other DNA; note = Human oral metagenome
atgtctatgagtttgacatatgttttagataagaatggacaacctttaatgccaactcaaagatgtggcaaagtctatagactactaaaatctggaaaagcaaaggttgttcaaagagaaccgtttactatcaaattattatatgaacctgaaactcatatagttcaagatttaactttaggagtagatactggttcaagtaaaattggtactgcagtagtagataatgatgcaaatgtttattatgcttctaaagttacaatcaggaatgatatttctaacaagatgagcagacgcagaatttatcgtagagctaggcgaactagaaaacttagatatagacctgtaagatttagtaatcgtaaaaactcaactaagaaagatagattttcaccgactatggtgagcaaaatcaattcgcatattagagaaattgagtttgtaaagtctattttacctgttaagacactagttattgaaactggtacatttgatccacatctactggagcacatagaagatggaattgcttttaacaaacattggggttatcaaaaaggatctaactatggttttgctaattctagagaagcttgcttaaatagagacaactacacttgtcaatgttgtggagctaaaaatactagactggaagttcatcatattatttatcgttccaaaggtggtagtgatgaattagttaatctaattacgctatgcgagaagtgtcataaacttcttcatgatggaaagttaaaagaatttgagtcaaaacttagtggtaaaagaaaaggtatattaaaacatgctactcaaatgaatagtattcgaattcaactattgagacactatccagaagctattgagacatttgggttcatgactaaagaaaacagacaatcgtccgatttagagaaatcgcatgtaaacgatgctattatcatctctacaggttgtattacaaagcctaagtataagacagaagtgtactacaagaagaaatgtatacctagaggtgactatgctgttacattgtacgctggacaaggaaaaaagaataagttaggcaaaactactaagccaagaaatacaagaccagtgtatggatttagaaagcatgataaagttgaatactgcaatactatatgctttttgaagtcattgaggtttgctggtaatggtccgcttatggacattgacggtaatattttgaagtttagagagcgatatggaaaagctgatacgacgtcagtaaagaacctcaagagaatatcagctagaaaaaattgcttgtgtacaaaagtgactttcttgtgcacatcatga

SEQ ID NO: 1139 - DNA, 339 bp, unidentified
  source 1..339: mol_type = other DNA; note = Human oral metagenome
atcaaattgccttgtatacatcagatggtgagcactcagtgctaaaggttaacagactaagctagtagaaatactagactacgatgattgagtgagatacatacacacctgtagttgccgcctcagactgctgctctgtggctaagtattaagtagagcaaaaagtacaaaaagagctcggtgtacttagcttaaaaacctctttcatcattgtcgagaggaagtcagattcttaacttggtaacagagttaagatatgcacaaaggtctattacaaatacctgcttacagcataaaatttgtgaagtccattagaaaggagtcatgtctatgagtttg

SEQ ID NO: 1140 - DNA, 1491 bp, unidentified
  misc_feature 1..1491: note = Ga0307930_1006096 JGI
  source 1..1491: mol_type = other DNA
atgatttacattgtagacgcaaggaataagataggccatccgaccaagaagcatgatatggtaggtcggttaatccgaaacgaaagagcgaagattattaaaagattgaacaaggatgttatgatagttcaattattaacaaaggttttttctaaaagcgaaaccattgattgtgaatttaggataggtattgatcctggatatgcaaatattggatttgcagtatttaaaatccatggaaacattatcacaaaacttattaaaggagaggcatgtttacgaacaaaaaagatcaaagaaggacttgatgccaagaggatgtatcgccgtagtcgaaggtatcttgctcgaaagaatattaaaaagaaatatggaacaggtcgagctaagttcaaacatcctgcttggaaaaatcgaagtaaacacaaatttcagcctacgcatcttcatgtaattcaatcacatgagaatgtgttggcaaaattattaaaattaattccaatcgaacaagttaaaatccatttggaatataataactttgatattcataaaatgattaatcctaagatacaatctttttggtatcaaaaagggttacagtttggttttgaaaacgtgaaaagttatgtgaggaatcgagataattatcaatgtcagatttgcaaaaaggatgttggtagtatcagaaacgaggtccatcatatcaaatggaagagtactggtggctcagatcgtcctgaaaatttaatactgttgtgtgaagtctgccacaacaaggtccataaaaagggattaaattgtccagacaaatctatttcagtaaacggataccgtaatgctggagttttaaactcagttatgggaacaatatggagtaggtttgaaaatcaatgtccagttcaagacacctatggttatattacaagtggtgttcggaatcgagacaacattattaaatctcatgccagtgatgccagcgttattgcatttaatgatagcttgggaagtcaaaacattgaagattattcttggaaggattataattctaaattaaatatgaatcaattccccagacatactcgatcattcacattaagacataccgaccgtagatatacaattttaaattctaatttacctgggaaaaagaaaactgtagtggcttggaatcgcaaacgaagggcgggccaagatcctaagaagcaaagccttgccgagttgaaacaatctcttatgattgatggaacgcttaactcaacagttatagttgcaattccagggcaaaaggtaatgagaagtttgatcactgattacacgatccgaaaaggtgatgttgtcaatgtgggctcaatgattaaagtttgtaaaggtgtgcaaaacaaaggtacggttgttacttttgaaaatgatttaaacccaaagaaattagatacatttggaactaaaaaatgtcataaaataataaacaattgtggattggtgacttattaa

SEQ ID NO: 1141 - DNA, 265 bp, unidentified
  misc_feature 1..265: note = Ga0307930_1006096 JGI
  source 1..265: mol_type = other DNA
aacctaaaggatttgggcttgcagttaatcgcaagctgatttaattcaggattgaacagacgtttaatcaaaggttcacttacggatgccactcccagtccgtagcaatggaggtaagcggagcattgcaagtcctcattgctgattagtaggtaacgaagatcagtattacttttgattaagtcgggggagacgaaccgaactattgaaccattcttagtttgcccgatcaatgggtttttattaagaggtaaaaatgatttac

SEQ ID NO: 1142 - DNA, 1587 bp, unidentified
  misc_feature 1..1587: note = Ga0182741_1016627 JGI
  source 1..1587: mol_type = other DNA
gtgcttcctcagccccggaccctggaaaccgcgccagcagacacggctggggtagccacgaaacggggcgcggtagacggcatccgcccgacaactggtgtgcaacatggtcgaggggagaccacccgcgagggtggcggcacgcccgatcctgttccggcaggtcgggcagcaggtgcgggtgaccgcaccatcaccagtcgagtgttcgtgctcgaccgcaagggtcggccgttgatgccgactcatcccgcacgcgcacgcgagttgctgcgcaagggtcgggcgcgagtccaccgcctgaccccgttcacgatccgactggtggatgtggacgccaccgaccccggggtggttgtcgatggagtggagctcggcatcgatcctggaagcaagaccaccggcatggccttgttcgtcaccgacgcatccggtaaccggacggcagtgtccctgatcgaactggtccaccgaggactcgcgatcaagatgtccctgtccaagcgggcggcgctgcgccggggccgccggtcccggaacctgcgctaccgcgcacccaggttcgacaaccgcacccgcaagcccgccgacggcctggacgtgtggctgccaccgtccgtgcggcaccgggtggtcaccactgtggcctggctggaccgactggcacggctggctccgatcacccgggtgcatgtggagtcggcgcgcttcgacacccacctgctccacgagcccgaggtcagcggcgtcggctaccagcagggcaccctggcgggcactgaggcacgtgagtatctgctagcgaagtaccagcaccggtgtgtctactgtgacgccaccggggtggtgctgaacctcgatcacgtccgcccgcgctcgcgtggcggcagcaaccgggtctccaacctggtgaccgcgtgcgtgccctgtaacgaggccaaggacaacctgccggtggagcagttcctggcccatgacccagcccgactggcgcgggtgctggctgggttgaagaagccgttgcgtgacgccgcagccatgaactccactcggcacgccctggtcggtgccatcgcctcacgcgggttcgatcccgtcactgccaccggtggtcgcaccaagtggaaccgcacccggttcggcgtccccaagacccatgcgctggacgccctgtgcgtgggtgaggtcgggggagtgtccggatggccgagcaccaccctggcggtgacagcaaccgggcgcggctcctacgcccgcacccgcagcgaccggcacggctttcctcggctgcgactgactcgggtcaagcgtcaccacgggttcgccaccggagacctcgtgcgggcagtcgtgcccaccggtaagaaggcgggcacccacttcggcagggtcgccgtccgcgccaccggcagtttcaacatcaccacctccgctggcaccgtccagggcatccaccaccgtcacgtccggctgctgcaacgagcagacggctacacctacgcaaccatgaaggagggagtcgggacgaggggcagcgcctatccctccccacggctaaagccgggggtatcccggcgcacccgatga

SEQ ID NO: 1143 - DNA, 301 bp, unidentified
  misc_feature 1..301: note = Ga0182741_1016627 JGI
  source 1..301: mol_type = other DNA
gtcagacaccccacggctgatgccgggggcttgaagccctcagcatcagcagtctgaccagaccgagacaccttgaaggaggtgactacgttgcacacgagcgaacagacccactccggggtgcttcctcagccccggaccctggaaaccgcgccagcagacacggctggggtagccacgaaacggggcgcggtagacggcatccgcccgacaactggtgtgcaacatggtcgaggggagaccacccgcgagggtggcggcacgcccgatcctgttccggcaggtcgggcagcaggtgcgg

SEQ ID NO: 1144 - DNA, 1311 bp, unidentified
  misc_feature 1..1311: note = Ga0164242_10000581 JGI
  source 1..1311: mol_type = other DNA
atgagtgttttcgttttggataagaagggtagggcactgatgccgtgcagtgaaaagcgcgcacggctcctcctgacccggaggaaagcgtttgtcaaagtgatgcagccgtttactattcagttgaaagaacggctgttggaggactcggagctacaatccgtcgagcttaagctcgatcccggttccagacataccgggatggcgctggtgagagacgcggaaggtatcaagtattgcttgaatttgtatcaactggatcattgcggtcagatgattcaccggaagctattgaggcgagcaatgtatcgaaaacagcgccgttcacgcaagacgcggtatcgacaagcacgctttctcaatcgccggaaacccaaagggtggcttgcgcccagcctgatgcatcgggtgaatagcacactgagctgggcgttgaaattccaacgctgggtaccgctcacgaagctcgtcgttgagcgcaatcgctttgatattcagaagctccagcgcccggagatcaaggggatcgaataccaacggggtacactctttggcatggaggtctgggaatacttactggaaaagtgggggcatcgctgtgtgtactgcgaggctcctgaccgtaaattgacgattgatcatgttacccctcgctcacgcggaggcagcgatcgcgtgagtaaccttgtaccggcctgcgagtactgtaaccagtttaagggcaataagcccgttcaagaattcctgaaaaggcatccggatcgcttgaagcgcattctggaagggcttaagcaatcgctaaaagacgccgctgctgtaaattcaacaaggtacaagctcattgaggttttcgaacaactgaagcttccaattgaaaccgacactggagccatgactaagtggaatcggcgtcggttaaatgtgccaaaaacccactcacttgatgcgctttgcgttggagatgtgcgatccgtttctgattggattggcaagcccactcaggtcattgcatgctacggtcgcggtagatatcaacgcgtcatcttagataggttcgggttccctaaggctaatctaacgcgcatcaaacgtccgtacggattcggaactggagacatagcccaagttttttcagaggcacatgtgaaacgtcagttccctttccagatctccaagatgcatagattgacagttaaaatagatggattcttccaactggcgcggcgtaaaaagatagtgaagctatcctaccgctatcttaaaatgaagcagcgcaataacggctatttcattacgctgcaacgtttctaa

SEQ ID NO: 1145 - DNA, 268 bp, unidentified
  misc_feature 1..268: note = SL_8KL_010_SEDDRAFT_10003558 JGI
  source 1..268: mol_type = other DNA
tcaatgaagcgtctttcactgacaaactacacacctaggtttccgaacctagcttcaccaggaaaccagactcagcgtgaccgcggtcacgctacgatacccgtgaaattaggtacccctgcgtgcctcctcagcgttgggctctacgggtgtatgttaaacaggcctacaggtttaagccagtgcatacatcgttaaaccacgggatatctttgtcgagaggacctttacaggatccgtaaggattcatggagaaagaaccatgagt

SEQ ID NO: 1146 - DNA, 870 bp, unidentified
  misc_feature 1..870: note = Ga0209697_10006283 JGI
  source 1..870: mol_type = other DNA
atgaaaatatcaagagataagcaacaggttgcagacaaaccagagcagaaaaccgctgtggtattcgtccgcaatatgtggggcaaagcaatcaaccccaccaagcctggcaaagcttatcgtcttgtaagagacggtaaagcagtgccggtttgtgcaaagccatacacgatccagatgcttggacactgcggaggatctgttcagccgtacagactcggactggacagtggttacagtaatgttggggcttcggttatcaacgaacggactggagttgaagtcctttcaatggaaattgaacttcaaaaagggcaaaaagatcgtaacaccgatcgcaaaactcgccgtcacggcagaagaaacaagaagtgccgacatcgggcagctcggtttgataaccggagaagggccaaaggcaaactggctccgagcattcagcataagctggacactcatgtcagaatagccaccgcccttatcaatgaaaagttcgtgcctatcagccgggctgttgtagaaggggctcagttcgatattcagaagatcaaaaatcctaatatcgaaggtgttgactatcagcaaggtgaccaagctggcttttggaatctccgtgaatatgtttttcacagagatgagcacaaatgccaaaatcctgattgtaaacacaaaaaggagaagaaccttcccctacaagtgcatcaccttggcttctggaaaggtgatagtactgaccgtcccggtaatctgatcacgttgtgtgttcattgccataggcctcagaaccatgcaaagaaaggatttttatacggatgggaaccaaaacttaaaaacttccgtcctgaaaccttcatgagcaccatctactag

SEQ ID NO: 1147 - DNA, 419 bp, unidentified
  misc_feature 1..419: note = Ga0209697_10006283 JGI
  source 1..419: mol_type = other DNA
cccgcatgaaaccgcggcttgaggtgggggcttgttacgagcagtacggtatttcgtagcaagctcggttgattagcctcagtagcgtgtcgtgatgacattgctactacgttttctgagaatctcttccagcagcatcggaagagtgtaataggcaccttgggatcctccacacgtcccaggcactggagaaacaacgaatctgttgcaatccggttggttgtcaaatgacagctacttgcggtttagtgattaaacatcgctttttgggaatggcgaagtgttgctaacaaaaacctcagaaaaacattggcgaagtggaccaatggatgccttcgggcatccacacgaggcttacgagtcctcgttaaaaatcaaaagaaagggccgtctatatgaaaatatcaagagataagcaa

SEQ ID NO: 1148 - DNA, 354 bp, unidentified
  misc_feature 1..354: note = Ga0137371_10000193 JGI
  source 1..354: mol_type = other DNA
atgccatgtcaaccacgcaaagcacgccttttactgaaagggggcaaggccaaagtggtgaagatggtgagaaggaacaatcgacaactacacaaagcgaccatcagaaagggtggcaagaggcagcgtaacactgcacccaagtatgtgcatggttttcgcttgtttgattgtgtgaagcatcaaggacagacctgctttgtgtttgggaggaggagttctggttacttcgatctacgtacccttgatggtgccaaagtccatgccagtgccagttacaaaaagttggctgttgtccagaaggcttcggccttgttagtagaaaggagggcggcgtttcctcctgtctcgtaa

SEQ ID NO: 1149 - DNA, 232 bp, unidentified
  misc_feature 1..232: note = Ga0137371_10000193 JGI
  source 1..232: mol_type = other DNA
gtcaagaacccaatccccatgatcggggacgggcttgcagaagtcctgcttgactagcctgagtgcaaactacgttgggtgagtcatgatacctatggatgcttactctagtctgtagctctatcgtttacggttaaaagttctgaggggaggaacggtgctgtaagtgtaaaaagctcatccaacattggcgaagagtacctgactccgaaaggaggtaaacgctttgttc

SEQ ID NO: 1150 - DNA, 1536 bp, unidentified
  source 1..1536: mol_type = other DNA; note = Human gut metagenome
atgtatgtagtctatgtattagatgaagaaggcaaaccgcttatgccgacaaaacgcttcggcaaagtcagacggatgctcagggacaaacttgcaaaagttgtatcagtaaagcctttcgtaatccagcttctatataagccaaaaacacatatcacccaaccgttacacggcggcacagatcccggtcgtaaaaacatcggcatgtctgtaatcaatgacaaaggagaaatcctctactcctctaccactgaatcaaggaaccaagaaatcccgaaacttatggcagaaagaaaagctcaccgtcaagcatcacgcagaggcgaacgtctccgcagaaaacgccgggcgaaaaaatataaaacaacaacaactttcccggaaggcagaaaactgctgggttatgaaaacggagtccttgctctgaaagatatcatcaatactcaggctcgttttaataacaggaagcgtcccgagaattggataacgcctacagtaagacaatgcattcaaacacatatcagccttgtcaggcagatatgcagattcttgccggtaacagactggagtatagaacataacaaattcgcttttatgaaaatggaagacggtactgtaaaaggtacagactaccagaatggcagactaaaaacctataaaaatgtgaatgactatatctggcatctgcagaacggaaaatgcgcaatctgcgacagcaaaatagaacactatcatcacatcgtacaaagaacaaaaggtggcagtaaccgccccgacaatataatcggactctgtgaatcctgccacgctaaagtacatagtggagaaactagtctcaaagaaatcggcgaaaagaaaaaatacgcccatctttccgtgctgaatcaagcaataccgttcatctgctccgagctggaacagctctttggtgaagataatttatatacctgcagcggttatgagacttatacatatagagaaatgtataagctggacaaaacccatgatatagatgcagcctgcatagctgctataccgcacaacatagaaacaccgatacaaaaagtcaagacctataaaatcaagcagtaccgtaaccataacaggcagataatccattgccagaaagagcgtacctacaaactcggcaaggaaaaaatagccaagaacaggaaaagacgtacagaccaaaaagaattgtctttcaacgaatggtataagatacaaaagaagaactgcagcaaaacagagcttgcagaaatcatgaaaaagctaacagttataaaaagcatccgcgcttacaacaacatgaaaagattaaagcccggcagtgtttttatatatgcaaagcctgaaaccaaaaaagctgaaaagccagagcaaaagcataagcaagcaatcaatcacagcgggaaatacattttaagaggtgctattaccaatggaaaatactacaaagccgaagactataataaaaacaatttctcggcaaaaaactgcagatttcaatacttcaagtctctgctctacatctaa

SEQ ID NO: 1151 - DNA, 209 bp, unidentified
  source 1..209: mol_type = other DNA; note = Human gut metagenome
gtcaattacacccacctaaagaggtgggtgcctgcaagcttgcttgcaggcaaaaaaggtaattgagcagagacatgatgcagcgctcactacggggtaatgccaagccccgtaccctggttacagctgcacctagtctatggcactcttacattcccttcttagggaatgaattatcttatttttaaggagaaccaaaaatgtatgta

SEQ ID NO: 1152 - DNA, 1698 bp, unidentified
  misc_feature 1..1698: note = Ga0079226_10027342 JGI
  source 1..1698: mol_type = other DNA
ttgcatacaggcgaacagaccgaccttggggtgcttcctcagctccaagctctcgaacccgcgtcagcagacacggctggggtagcttcgaaacggggcgcgggagacggcgggcgtgcccgctcgacaaccggtgtgcaacatggtcgaggggagaccgggcgcaaagccggcgtggcaccttcgggtgcggcccgtgagggcaacccgaccaccggggttgcggtggtgttcgtggtggacaagcaccacaagccgttgcagccgaccaccgagcggcgggcacggaagttgttgaaggcgggccgggcggtggtgcaccgccggtacccgtttgtgatcagggtcaaggaccgcacggtgggcggctcctgtgtcgacggtgtacaggtcgggatcgaccccggctcccgccacaccggcatagccgtattcaccgagaaggccactagtaaaggagtggtgcggaccgggttgtggctgggcgagttggatcaccggggccagcgaatcagccgaaacctgtcatcgcgggcggcgctgcgccggggccgacgcagccgcaacctgcgataccgcaagccgaggttcctgaaccgtcatccggccccgtgtgactcgtgcggagccaacgctcaaagtggcaagcgactgtgccgaccgtgccagaaccttccccgtgccgagcgtgaacgtggggcgcgcccggcacggctggccccgtcgctgcggcaccgggtggacactctcgcctcctgggcgaacaggttgcagcggtgggcgcctgtcaccggctggcatcaggaattggtccggttcgatctgcatgcgatgcagcgcccgggcatcaccagtgtcgagtaccagcagggcaccctggccggcttcgaggtccgcgagtacttgctgtccaagtggaaccacaagtgcgcctactgcggcgcgtccggagtcggccccggctcggtgccgctgaacatcgaccacattcacccgggcagcaagggcggctccaaccggatctccaacctggccctggcgtgcgtggcctgcaaccaggccaagagcaacatgccggtggaggacttcctggttggcaagccggccgtgctcgctcgggtactggcgcaggcgaaggcgccgctggccgacgcagcggcggtgaacaccacccggtgggccgtgtttcacatgttggcggacaccgggcttccggttaccgccgcctccggcgggcgcaccaagtacaaccgcacggtcacgggcaccccgaaagcgcacgcgctggacgcgttatgcgtcggcgttctcgaccgggtgaagtcgtatccgtccacgaccatggtgatcggctgcgccggacgcggcacctatgcccgcacccggtcggacaaacacggcttccaacgcctgcacctgacccgcaccaaacggcactacgggttccagacgggagacctggtcaccgcagccgtacccaccggcgccaaggccgggatccatatcggcacggttgccgttcgagcacgcggaatgttcaacatcaccaccgccgccggaaccatccgcgacatccatcaccgacacgtccgcctgatccagcgggcggacggatacacctaccactcgacatcgacaccacgcgtccggctcctctccaccgcgaacgacagagtacccgccggacagaagaaatga

SEQ ID NO: 1153 - DNA, 295 bp, unidentified
  misc_feature 1..295: note = Ga0079226_10027342 JGI
  source 1..295: mol_type = other DNA
gtcacttaccccgtcgtgaagggcgggggttgtagccccgttcggcaggactgagtgaccagactgagaaaccctttgaagggagggaatctacgttgcatacaggcgaacagaccgaccttggggtgcttcctcagctccaagctctcgaacccgcgtcagcagacacggctggggtagcttcgaaacggggcgcgggagacggcgggcgtgcccgctcgacaaccggtgtgcaacatggtcgaggggagaccgggcgcaaagccggcgtggcaccttcgggtgcggcccgtga

SEQ ID NO: 1154 - DNA, 1164 bp, unidentified
  misc_feature 1..1164: note = Ga0315295_10106663 JGI
  source 1..1164: mol_type = other DNA
atggctacgaccaccacacgtcagaagacccaccagtccgtgcttcctcagcgggctgctctggaatccctgtcagcagacaccgttggagtaacgacgaaacggggcagggaggctcacgtcacgggaaaccgtggcgtggcagcgggtagtgatcatggtcgaggggagaccgtacgcgacgatcgccgtcgcgtacggcgtcacggacaaccgggtcacaccggaagttccgtcaccggtgggggtgaccccaccaccacaacaactgaatcaacaactgaacaggttcgtttcaccgcgggaaaggttttcgttctcgaccgccacggtgaaccgttgatgccgtgccacccggcgcgggcacgtcaacttctcgacaagggccgcgctcgcgtggcccggatgtatccgttcaccatccgtgtggtcgatcgcactgtcgccgacagtgaggtcgatggtgtggtggtgaaactcgatcccggcagcaaggcgaccgggatctcggtggctcgcgtcgatatcgacggcgggatcactggtctggtggcggtggaagttcgccaccgcgggcatcagatccaccagaaactggtggcccgcgccgcgttgcggcgtggccggcggacacgtaactgccgtcatcgggcaccgcggtttctcaaccgtgcacgtccgaaagggcggctggcgccgtcgctgcagcatcgggtggacaacgtcaccggctgggttgaccggtttcgccggctggcaccggtcaccggtatcgcaatggaactggtgcgtttcgacacccagctactggagaacccgaacatcagtggtgtggagtatcagcagggcaccttggcgggtttcgaggtcaaggagtacctgctggagaagtgggggcgcaagtgcgcctactgcgacatcaccggggtggcactcaacgtcgaccacatccacccgcggtcacggggtggaagtcaccggatctccaacctcaccctgtcgtgtgttccctgcaaccaggacaaagacaaccagcccgtcgagcagttcgtcaccgatcccgcacggttggcgcgcatcctggcagccgccaaacggccgctgcgtgacgccgcggcggtcaacaccacccgctgggcactgtggcgaaaactggctgccacc

SEQ ID NO: 1155 - DNA, 315 bp, unidentified
  misc_feature 1..315: note = Ga0315295_10106663 JGI
  source 1..315: mol_type = other DNA
gtcaaccactccgccctgaaggacggagcttgtgggggcttgttcccgacaagttcctgacatccgggatcggttgaccagaccaagccatcactgaaaggaggcgatcaccaagatggctacgaccaccacacgtcagaagacccaccagtccgtgcttcctcagcgggctgctctggaatccctgtcagcagacaccgttggagtaacgacgaaacggggcagggaggctcacgtcacgggaaaccgtggcgtggcagcgggtagtgatcatggtcgaggggagaccgtacgcgacgatcgccgtcgcgtacg

SEQ ID NO: 1156 - DNA, 1380 bp, unidentified
  misc_feature 1..1380: note = Ga0265297_10033497 JGI
  source 1..1380: mol_type = other DNA
atgtatttcatagtagatggaagaaacaatcttcagcatccaacgaagaaacatgacatgattattcgctggatctcaacaggaaaagctaaattcattggaagagatatagttcaagtatttaagaaattcgacagatctaaaactatcgactgtagatttatcataggtctagatcctggatacaaaaacatcggttatagtgtttttaaaatttataagaatcagatccagaatattctgaatggtgaagtactaactagaacttctgagattactaagttaatctcagaaagaagaatgtatcgtagaagtaggagaagcaaacaccgagagaatattctgagaaaatttggaagagcaaaatttaaagctcctagatggaagaacaggaagaagaaaccatgggctcctactcacatgcatctgtttcaaagtcatctaaatcttcttcagtgcatcttcaataggatagattataatcaatcagagatagtattagaacattttaaattcgattctcaaaaagctttagattcaactgtctctagctggaagtatcagaaaggtcctcaatttggattcgaaaatgttaaagcatacgttagagctagagataattataaatgtcagatatgtggtgagaaattattaagtcttagcgtccatcacatccaagagagagctgatggtggaagtgatagacccgagaatttagttactctgtgtcaaagttgtcatttactccttcatcaaactctagctgaatgtccaagaccctctaaagcttctccaatgagagatagtggagtattgaacagttgtatgaactacttagttaattatatttctccagcttatactatcactggatctgacactgccgctctgagacactactataacattgagaaatcacacgttaacgatgctaaagtgatagctttatctaaattagatctagaaaatttcaattgtcaagacttatccaatactgtcaatcttaaacagtttcgtcgtcacacgagaaactgtgttcagagatacgaagatagaaaatacatctgtgacggatttacagttgcttggaatagaaaatctagatctacacaggctgagtcgaagccatctttacaagagtttaaacaagaatatccagaagaaaaagtagtagctaaacctggtagaataatctactttagaactaattctcaagctaagtttagacctggagacatctttaaacatcagaacattaattatgttctcaagcagtgggcttctactcaaggaactgtaacatctgaaactgaaattaaatttaaaatcagaaattgtcgcaaaattagaaacaattcaggattagtaaccacccgctaa

SEQ ID NO: 1157 - DNA, 282 bp, unidentified
  misc_feature 1..282: note = Ga0265297_10033497 JGI
  source 1..282: mol_type = other DNA
gtcaactaccacccgctaaagcaggtggcttgaaagagccaacgtagctttagttgttggggttgaacaggcactgggtgtggaaacacacccaaggatctgatctagtgttcaccatggggtgccactcccagctccatgcaactggaggtaacagatagtaatatcttaagtcctcattgctgtcatagtaggtaacgaagacagtattacactagaccaagccgagggagactaaagacaggacctgatctataggtcactaactaggagaaacagatg

SEQ ID NO: 1158 - DNA, 984 bp, unidentified
  misc_feature 1..984: note = Ga0256842_1000027 JGI
  source 1..984: mol_type = other DNA
atggtttttgtattaagcaagaataaaactcctttagccccaactagcgaggctaaagctagaattttactaaaaaaaggaaaagctattgttcacaaagtttatccttttacaataagattaaaagagaataaagagtgtaaaaaaatttttgaaataaaatttgatgtaggtgcatcagttacaggagtagctatagtagatgcagttaaatgttttttctttgcagagatagtgcatagaggagcagtaattaaaaaagcaatggactcaaggagagcaataagaagaagtagaagaaatagaaaaactagatacagagagccaagatttgataatagaactagacctgaagggtggttacccccaagtgtgaaatcaagagcagacaatgtaataaattttgcaaaaaaatacgctaaattaatacctattttctccgtagctgtagagaaggatttatcacatctaaagcctaaaaaaacaccaaaacaggcatcaattgttcaaagtgctagaacttatactataaaagagttaagtagaaactttgatgtaatagtaggagaggggtgggaaacttacgcaaatagaaaagagcttggtttaccaaaacaacactactatgatgctatgtgtattggaaaagaatataaatatgaaatagtaacagataaagttttagagattaaagcacaaggaagaggaagccgacagatgtgtcgaatggatagatttggatttcctagaactaaagctaaaagctctaaaatagtaaaaggtttccaaacaggtgacattatgaaagcaatagtaagcaaagggaaaaagataggaacttaccttggaaaagtggctgtaagagctagtgggaattttaacattactaccacaaaaacgactattcaaggtattaattataaatactgtagaacaatacaaaaaggagacggatatgcatacgcaatatcgacaatcaaatag

SEQ ID NO: 1159 - DNA, 273 bp, unidentified
  misc_feature 1..273: note = Ga0256842_1000027 JGI
  source 1..273: mol_type = other DNA
gtcaataacctctcccaatccttgacggatatggaagaggcttgattgaccagactgagttgctagaaatagctaactacgatatttatgttaccacaccttggagtgcttctccagctccaagctctgtgtaggctctttaagttgggttaaagccctgtgaacctagggacggtttgccatagcaaacaagcattaatatcattgtcgaggagagagtcaaaagaccgttaccactgcaaggtgagttaatttgaaaaaggattttaaatg

SEQ ID NO: 1160 - DNA, 1281 bp, unidentified
  misc_feature 1..1281: note = Ga0209123_1000186 JGI
  source 1..1281: mol_type = other DNA
atgaacggagtatttgtcatcagtaatagcaaacagccgcttatgccgacctcgccggccagggcacggaagctcctatccggaggcaaggccgctgtgttccgaagttatccattcacgatcatcttaaaggatcgtgcaatcggggttattcaaccggtcagggtgaaaatcgatccggggtccaaggaaacaggcatcgccttggtcaacgaagtcacaatgaaagttgtcttcgttatggtattggttcaccgtggattggccatcagcacgatattagcatcccgtagggtactccggagtggccgcagaaaccgtaacaccagataccgcaagccgggattggcgaacacgacaaaacctgagggttggctggcgccatcgctattacaccgggttcatacgacgatgacctgggtcaggaggctttcttgcctagcgccggtcgctgcaatctctcaagagctggttaagtttgatctccaaaagcttgagaacccagatataagcggcatcgaatatcagcagggcacgctggctgggtatgaggttcgggaatatcttttggagaagtggcaccgcacctgctcctactgcgatgctaaggatatcccactccagattgagcacgtaaaagccaagaccaacggcggcaccaaccgtatcagcaacctgacattggcgtgcgaaccctgcaacacggcgaaaggaaaactctcaatcgaagtttttctggcaggtaaaccagatcgcctgaaaaagatcaaggggcagctaaggcaaccgctcaaggacgcaaccgcagtcaatgcaacgcgttggcgtttgttcgagtccctgaaattaacaggactgcctgttgagaccggatctggaggtagaactaaattcaaccggacgattcaaggatacggcaaagcacattggatcgacgcagcctgcgttggagtctcgggcgccagtgtcatcatcccttcgggcctccaccccctggtcgccaaggcttctggtcatggcaaccggcagatgtgtggcacagataagttcgggttccccatcaggcatcggactgcccagaagcaatttttcggttttcagactggcgatatggttacggccaacgtccctaaagggaagaaaattggaatacataccggccgtgtgctggttcgtgccaatggtaatttcgatattcaaaccggtacaggtcgtgttgccgggatcggccacagacactgcaccatggtccatcaaaaggatggctatgcatatcaataa

SEQ ID NO: 1161 - DNA, 284 bp, unidentified
  misc_feature 1..284: note = Ga0209123_1000186 JGI
  source 1..284: mol_type = other DNA
gtcagataccccacggctgccgggggcttgaaaaagctctaatccgaccagccacagccaccaattcaacggatcggattgacggggctacgattaacggtcatgaccggaggatatgcattgccagtatcccgatggtcgctataaggaagaaacggcgaagggtaaaccgcgaacctgaccagcattgacaagctgttaatcattggcgaggcacacattactcccacaagggaagacggtccgtaaggaccaaacctatcaaaggatgtcggatgaacgga

SEQ ID NO: 1162 - DNA, 1950 bp, unidentified
  misc_feature 1..1950: note = Ga0373956_0001933 JGI
  source 1..1950: mol_type = other DNA
atgtttgtccctgttgtagaccagaaccagcagcccatgatgccgacgacgcctgcccgcgcccggcgctggatcgccagcggaaaggcgaccgctttctggagaggcggtctcttctgcgtccggctcaatcaggaaccatcgtcgcgcgtcgtgcagccggtagcggtggggattgacccgggatcgaaacgggaaggctacagtgtcatctcggcggcacatacctatctcaatatccaggccaaagccagggtgggtgtcaaagaagcagaggagcaaagcacgcggatgcgccgaactcgccggaaccgcaagacgccttgcaggcagccacgtcccaaccgcaggcagagcaagaagacactgccgccatcgaccagggccaggtggcagtggaaactgcgggtggcccgttttctatgctcgctcttcccggtcagcatcatcgcggtggaggacgtggctgctgcaaccaggccgggcaaacggcgttggaatcgctcgttttcgccgctggaagtggggaagcactggttttacgaggagatccgcgcgcttgctcctctggaactcgtgcacagctacgaaaccaaagctgtgcgtgagcagttggggctcaagaagacgagcaagaagttggccgaggtctgggaagcgcattgcgttgatgcctggtgcctggcctaccgtgcggtcggtggcaacaccgccccggatcatcggggtgtggtcgtcttcgcgccactcatctggcatcgccgccaattgcatcgctttcaactggaaaaagggggcatgcgcaagccctatggcggaacactctcacaagggatcaaacgagggacgctagtccagcatccgaggtggggcaaggccctggtgggtggcacgatggatggcagactcagtctgcatgatccaggaacatacaagcgactgactcagggcgcgaaggtggcagagtgtcacgtcgtgacggtgttgcgatggagaacatgcttgcttccgctccatcccctccccaagaaaagacgtgcttcctccccggcttcaaaagcgcgggttctgggcaagtcgcgtttgatgagcgtaactctattgcgtgagggcgagcgagaggcaagcatgcagaagcttgctggcgcttcgtcgctctcgtttgctcataaacgcgtgtggacgtcaaaaactgcttcgcgtctgttcaccgtcctggcacctgtgctgctcggcatggtcctgctagggggctggtactttagcacgtccagaggactggttgccacctacgagctgccacctccatctgatgtctggacctctctgtcggttgggttcggctccggcctttttctgcatatggcctgggtgacgctgcaggagagcctgggtggctttctgctggcggttatgatcgccctgccggtgggcttcggtctggcgaaatggcgcctgttcgcagcgacgatctacccctacctggctgccggccaggctattcccgcaattgtgatcgcaccattcctggttgtctggatgggctatggcatgggacctaccgttgtgctctgcctcctggtggtgcttttccctatgatcatcactactgctctgggctttcagacgcttgatcaggcgctggtggatgcagcgcgcgtagagggggcctctttgtggccaatgctcaccaggatcgaattgcctctggccctgcctgcgatcatggcagctgtgcgcactggtctgactctatcagtagttggggcgctggtcggtgaatttgtgaccaacaccgatcagggactgggggccctggtgcagattgcgaagaaccagtatgatgtgccgctgatgttcgcgaccgtgctggtgctggcaatcatggcgggggtcttttacgggatcacctggggcctgaccaggatatctgagattctctctacctag

SEQ ID NO: 1163 - DNA, 239 bp, unidentified
  misc_feature 1..239: note = Ga0373956_0001933 JGI
  source 1..239: mol_type = other DNA
gtcaagcaccccggcatgtcatgccggggcttgtgaagccttccgactcgccagcggaagacgagcaagcgaaagagcgagactagcttgtccaagctctggcaacggggcgattgaaggaagctgaatcacctgggcgtggcagcctccagaacgaacaggacgcctccctaatcttgttccacttcggtgatcagcagcgaagggattatcctacccgaaaggggcttatcgcacat

SEQ ID NO: 1164 - DNA, 732 bp, unidentified
  misc_feature 1..732: note = Ga0316622_100118550 JGI
  source 1..732: mol_type = other DNA
atgctcgtgtacgtgcaggaccaggaagggaaaccgctcatgcccacccgccgctgcggggcggtgcgccgctggctgaagagcggccgggcccgcgtcgtgcggcgcgaaccgttcaccatccgattggtggaccgggcgggtgggtacacccagcacttgcaggccggcgtggacctgggcacagcgcacgtcggggtagccgtcgtgtccgcccaggaggaagtgttctccggcgagttccggctgcgcacggacgtgagcgggctgctcacggagcggcggcagttccggcgggcgcggcgtagccggaagtgccggcaccgccctccgcgcttccgcaatcgccgccgcagggacgaactcgccccctcggtgcgggcccaggtggcggagacactccgggtggtgcgactggtggagggcctcctgccggtggccgcctggacgtttgagatcggcaacttcgacccgcaccagttggtccatccggacgtgcggggggtgggctaccaacagggcgagcagtacggcttcgccaatgcccgggagtacgtcctgtggcgggaccgccacacctgccaggcgtgccgagggcagtcgggtgatccgcgcctgaccgtccaccacctgcggcagcgccaagagcgcgggagcaaccggccggccaacctcatcacgctctgccggacctgccaccaacggcaccaccagggaccgccgctccccttg

SEQ ID NO: 1165 - DNA, 291 bp, unidentified
  misc_feature 1..291: note = Ga0316622_100118550 JGI
  source 1..291: mol_type = other DNA
gtcaaccaccacccgcttcagcgggtggcttgtggggaagcccacaagccacgggttgaccagccccagccagggggccacaaggccccaccgggctacgttcaggaggtcacgacacccggtcgtaaacgctccagcggccggcaactgtcgggtaaggtcaaaagccccgcgtggtaggggcggtgccttacccagggcaagcctcccgaacatcggcgaggagcaccacacggcccaacggccggcttaccccgcaaggggtagaaggaaccagcgatgctcgtgtac

SEQ ID NO: 1166 - DNA, 1287 bp, Oscillatoria sp.
  source 1..1287: mol_type = other DNA; strain = PCC 10802
atgaaggtttttgttttggatacaaatcgaagacctctcgatccgacgactcctcgtagggcaaggaagctgctcaagggaggaaaagcagctgtttttaggctgtatccctttactgtaattcttaaacgggctgttgacagtgagccagttcagccactcagactgaaaatagatccgggttccaaaaccaccggattggccattgttagcgaaaggaccggcgcagtcgtttgggcggcagaattgacgcatcggggttttcaaatccgtgaggcattaaatagccgcaaggtgaaacgacgcaaccggcgctaccgaaagactcgctatcgcgcacgaagattcaacaaccggcttcggaaagctggatggttgcccccaagccttaacagcagggttgagaatattgttgcctgggtgcgccggctgcggcgttttgcgccaatcagcgctatttctcaggagttagtcagatttgacacgcaagttatccaaaacccagagataagtggggttgaataccagcagggtgagttacaaggctgcgaggttcgtgaatacttgcttgagaaatgggggcggaagtgcgcttactgtggggccaaagagactcccctagaagtcgagcatatttatcccaggagtaaggggggaagcaattgtgtttctaacctcactttggcttgccacccgtgcaacgagaaaaagggaaaccgagatgtagcggattttctgtcgggcaaaccagacctactgcagcgcatcctctccgctgccaaagcgcctttgaaagatgccgctgctgttaactcaacgagatgggcgctgtatgaaggtttgaaaaatacaggattgccggttgaagcaggttcggggggactgaccaaatataaccgaaaacgccttggcttaccaaaaactcactggcttgacgccgcctgtgttggcgagtcaactcccgaaaatttggatgctagcaaaatcgaaaagccactgttaataaaagcgacagggagaggctgccggcagcgcgttaacccagacaaaaacgggtttcttatttcccataagtccagagctaaaacttatcagggatgggcaacgggtgatatcgcacgagctgacattccgaaggggaaatacaccggcatccacagagggcggattgcaatcggtcaagacggccagttcaaaatacaagtggcccacaagaagcgattcagcgtcaattacaagtatttaacgccaattcaaaaaggggatggctacggttatagcttctag

SEQ ID NO: 1167 - DNA, 328 bp, Oscillatoria sp.
  source 1..328: mol_type = other DNA; strain = PPC 10802
gtctgacctaattcctgacaaaggaggtgggttggagcgcggcggacaatcgcgatccactaaaggcgtataaatcgtaaattcggtattattacgtcagccgaaaggacgggatcgccagtttcagcctgggttttagaacgaccgggctacgttggggaagtcatgacacccacaggtgcggtgccagcttgtggctctgtcgctcagcattaaaaggtgtagttagtggaagccagtgtgttgatcttaaaaagcttctccaaccttaacgaggcaaacattacccagcaatgggctgacctgtgagggtttaatttgcatgaag

SEQ ID NO: 1168 - DNA, 711 bp, unidentified
  misc_feature 1..711: note = Ga0101763_1138 JGI
  source 1..711: mol_type = other DNA
ttgggcaatggagttgactcacatagggctacaaataaagactgcactcgaaaatcgtcgagctgttcgtcgcaatcggcgcaatcgaaaaacgcgatcgagaaacctcgattcaaaaatcgcaagcgccccgaagggtggttaccgatcagcctaatgcacagagtttttggagtcaaaacatgggcagatcgcctaactaggttagcccctgtaggttctgtcgttcaagagttggtaaggtttgacactcagaagatgcaaaacccggaattatcgggagtcgaatatcagcaaggagagttgtttaggtatgaagtgcgcgaatatctactagaaaagtgggggcgaaaatgcgcctactgtagtgtttctgacgttccaacaggaaccggagcacaaacaaaatttaatcggtgtcgtttaaatctgccgaaagaacattggattgacgcagcctgtataggtcaggttgatactgtaaagttagcaactacccaacccttgcttattaaatcaactgggtacggcagtcatcaggtcattcaaatcgacaaatacggctttcctcgtaagggctatcaagtcaagcttcctgtcaaggattggaagactggtgacattgttaatgtggttgctgataaaaatgctggattaagaggcgtcaggctaaaaactgttcgtgccaaaactcttgcggcatccggttaa

SEQ ID NO: 1169 - DNA, 182 bp, unidentified
  misc_feature 1..182: note = Ga0101763_1138 JGI
  source 1..182: mol_type = other DNA
agctcacccgcaagggtaaacgttattccggtcatgacaccttggggtacgtggctagcgacaagctctgtcgggtgtcgttaaacaggcaaccgggtgcgctcattgccagtgcggcattcgcaaaaagccgtgtatccctcgcgaagccaacgtgttgagacgcaacaatgtctaattac

SEQ ID NO: 1170 - DNA, 1485 bp, unidentified
  source 1..1485: mol_type = other DNA
gtgcagacaaggcacgggtggccacgaaacggccccgccagctacgcggggttgcaacatggtcgaggggagatgtgccgcgaggcacacgtcaccgccgaaaggcgtgaacaaaggagtaatccaattcaatcacaggtttttgtattgaaccaagaaggacagccactgatgccctgccaccccgccagggccaggcaactactcaaaaaaggacgggctgtcgtccatcgcgctgtacctttggtgacccgtcttaagaatcgcaccaaagccatcgtgcagccggtgcgccttaaagtcgatccgggcagcaaggctacaggcatggcgctggtgcgacaccagccctcagactctattaccgtgctgagcctttttgagttacagcaccgtggtcaccagatcagtgagtcattgacagcccgccgtcacatgcgtcgtcggcgcagaggcaacctgcgctaccgcgcaccccgcgttcttaatcgcgctcgctctgccggttggcttccacccagcctacagcaccgcatagataccacgctggcctgggtcaaacgccttcaacgctttgcccctattaagaacatcagttgcgaactggtacgcttcgacatgcaggcgatgcagaatccagaaattgacggcaccgcgtaccagcaaggcacgctgactggttacgaagtgcgtgagtatctgctcgaaacatttggcaggcagtgcgtctactgcgaggccaaagacaccccactacagattgagcatatccagcccaaggcactgggcggcaccaaccgaattagtaaccttgcgctggcgtgccggtcttgcaaccagaagaaggctgcgcaggcgatcgaaaccttccttgctgacaagcccgagataccgcgccatatacggaagcaggccgagcgcccactcaaggatgcggcggcggtaaactcaacgcgctgggcacttacccaggcgctgcgttcaaccggcctaccgctggagctggcctcgggtggccgcacgaagtacaaccgcgaacgccttaatgtgcccaagactcatgcccttgatgctgcgtgtattggcgagttccgtgtactgaaaggctggcggaggagcactttgcacctccgctgcacggggcgcggcaggtatcaacggaccagactcagcaaagacggctttccggttggctacttgatgcgccataaacgagtcaacggcttccaaacaggcgatctggtcgaggcccacgtgccctcaggcaagaaggcaggaacctaccaagggcgcatagcagtacgcgtctcgggcagcttcaacatcaggacagacgaagaagttattcaaggaatttcgtatcgatattgcaaactgattcagcgtggagatgggtacggatacattgtgagacctcaaatgacaagccacaaagcacagagtatgcggcctgctttgaatgccgcgctattccatccacaatga

SEQ ID NO: 1171 - DNA, 299 bp, unidentified
  source 1..299: mol_type = other DNA
gtcaaccgcccctcccctaaaggaaggagcttgcagaaaggattcccggtaagctcgaggttgaccagaccaagaatgggtacgtcccaatctacgttgcgactagagctaaagaaccgaccctgggatgcttcctcagtcccgggcaatcgaaggcggcggtgcagacaaggcacgggtggccacgaaacggccccgccagctacgcggggttgcaacatggtcgaggggagatgtgccgcgaggcacacgtcaccgccgaaaggcgtgaacaaaggagtaatccaattcaatcacag

SEQ ID NO: 1172 - DNA, 1392 bp, unidentified
  misc_feature 1..1392: note = Ga0209639_1000561 JGI
  source 1..1392: mol_type = other DNA
atgcatgtatttgtattggatacgaacaaaaaaccattatcgccgtgtcatgcggcggtagcacgaaaacttcttaggcaggggagagctgcaatctataggcagtacccatttgcgataattctcagagaaattaaacaatgtgcagaacccacaaagttacgcatcaaaatcgatcccggttcaaagactacaggacttgtagtgctgtgggaaaggaataatacgggtatcgtaatatgggctgtagaactcaaacaccgtggtcatgccatcaagaaattattagataagcgtagggcgaatcggagaagtaggcgaaacagaaagactcgatatagagcttgtcggttccttaatcgagcgagggctgggggttggctcccaccttccttgcaaagtcgggtccaaaatacgctaacatgggttaaccggctttgtaggttggcacctattagtagttgctcaatggaacttattaagtttgatactcagcttatacaaagtcctgagatttccggtgttgagtatcagcaaggcgagttgcaaggctatgaggtcagggaatatctcttagagaagtttggccgaaaatgcgtgtattgcggggagacagacgtaccgctgcaagtagagcatgtcatcccaaagcatccagcggttggtccgatagggacgaatcgggtaagtaatctgacgttagcgtgtgaggtctgcaacaaagctaaaggaaatagtcagccgaacgattggctggaaaagctgcaacagtccacgatagctaaagacaagatacgggctggaaacttgcccaaggtcttgaagcaacttaagcaaccactcaaggatgcggcagcgattaatagtacgcgctgggcgctttatcgggtgttggagcagttaggacttccgttagaagttggttcaggcggccttactaaatttaaccgaacgcaacgtaatttaccgaaaacgcattggctagatgccgcttgtgttggaaaaagtacgccggaacagatcgtcttttctgatggtccaatcctggctatctctgctaccgggcatggaaaacggcaacgatgtgttacggataagtatggattccctattaaacatgctccaagggcgaagtcgttcatggggtttcagacaggtgacatagttaatgctgtaattcctaaaggcaaatataagggaatgcacacagggcgtgtagcgatccggttcagaccgagctttaaactgaatggatttgatgtgcatacgaagtatctaaggattattcacagagctgatggctacgcttatgagtttgctttgggggtgcaggtttcctccccacagatgaatctgggggctcccacctggcgcttgattggtggagattaa

SEQ ID NO: 1173 - DNA, 254 bp, unidentified
  misc_feature 1..254: note = Ga0209639_1000561 JGI
  source 1..254: mol_type = other DNA
gtcaactaccccacggctaaagccggaggcttgtagggagaaatctttataagctcagttgaccagcctaagtcttgcaacaaagactacgttatcgaggtcatgacaccttggaatgcgtgccagttccaagctcctgtcgcttagcattaaacaggtgtactagggtcaagccagtgtgttaagcataacaagccttgataactttggcgaggcaaacattacctccgaaaggggagattgcagaaatgcat

SEQ ID NO: 1174 - DNA, 1260 bp, unidentified
  misc_feature 1..1260: note = Ga0209347_1003246 JGI
  source 1..1260: mol_type = other DNA
atgttagtctacgttatcaacaagcacggtaaaccgttaatgccctgcaaaccaaagaaggcaaagaggctgctgcaagagggcagagcgaaggtcgtgaggcgcacgccctttacggtccaactgctttacgggtcgagcggttacagacaacgcgtcagggtcggagttgacacgggagccaagtacgtgggggttgccgctgttcgaacagacgagaaaggaagagcaaagaatactctgctgcaaggcgagtgtcatttgcgagcagatattcgcggcaagatggaccggcgcagggcctatcgcagagcaagacgtggccggaagacgaggtaccggaagccaagatttgataacaggcggcgatgggaaggatggttggcccccagcattcagtcacgggttgacggcacgctgaaggtaatggagttgcttcgccagttgctcccggttgcttcagtagaagtggagaccgcgcaatttgacacggcagcgatggcaagaggagtcttgcgactgaggccctggcagtaccaacggggcgagcagtaccagtttgaaaacgtcaaatcatacgttcgacatcgagatggatatcagtgtcgccagtgcaaggctaaaggtcgtccgttggcggttcaccacctacgacaaagagctgatggcggaacaaaccgtcccgctaacctgatcacgctatgtgaagagtgccacgatcgggtccatacgggcggaatcaagctgactgcggttcctggaagaacgaatctccggtatgccgcgcacacccaggcaggaaagacggcgcttatgacagccctacgggaacaactcccgacctctgagacgacaggcgccgtgaccaaagtcgatcgacttgagatgggactatcgaaaactcatgccaacgatgcgctggccatagcggctacaggggtacccgtcgaacccgtggacacccagttctttatgcgctgtgtcccaaagggaaactaccggctgttcaaaggtgctcgcagccatattcgcaatcaaagcgcccgcgagctatttggcttccggcgcctggacaaagtatgcttgcccggtggtcaagaagggttcgtcaaaggcaaacggtcctctggttacttcaatgtgagcacgcttgacggcactgtgatcagcgcgtcgatttcgtacaagagattgcgtttattagagaaacaaacatctctacttgttgagaggaggcaggccgtttcctccccggactga

SEQ ID NO: 1175 - DNA, 272 bp, unidentified
  misc_feature 1..272: note = Ga0209347_1003246 JGI
  source 1..272: mol_type = other DNA
gtcaactaccccggactgaagtccgaggcttgcaggagcctctagttgaccagcctaagccttgagatagaggctacgttagcagtagagcttagacgccttacccggaatgtccggataggtgacctaccctggggtgccccctcagctccaggctctagaactccctggttaaacagtcctgagagggtagggacagtgccttggagatgcgctggctgctaacattggcgagagggacctaactccgagaggaggtagactctatgtta

SEQ ID NO: 1176 - DNA, 1479 bp, Streptomyces sp.
  source 1..1479: mol_type = other DNA; strain = SID12501
ttggctctggaattcgagtcagcagacaaccccgggatcagggacgaaacggggctcggacgccgtaaggcatccggtgtggaacatgtgcgaggggagatcaccggcagtgcacctactgccggtggcgtcaccccggaccatcaggtccgggagcccggccgtgaggccgaccccgccgtgttcgtcctggacaagcacggcacgccattacagcccaccagccccgccagggcccgcaagctcctggtatccggccgcgcggtcgtcgcccggcacacaccgttcgtgatccgtctgaaggaccgcaccgccgacgcctcggaggtcgacggtgtcgagctgggcatcgaccccggctccaagcacaccggcctggctgtgttcaccgcccgggacggtgagcgccggggccggttcgcggtccagctcgaccaccggggcgccgcgatccgcaagaagctggagcagcgatccgcctaccggcggggccggcgtacccgcaacctgcgctaccgcgcaccccgcttcctcaaccgaacccgcccgaagggctggctgccgccgtcgctccagcaccgtgtcgacaccaccatgtcgtggaccggccgcctcgcccgctgggcaccggtccgtacggtccacgtcgagcgcgtcgcattcgacacccacgccatcagtgccgggaagccgctggaaggagccgagtaccagcacggcaccctgcacggcacggaggtccgcgagtacctcctcgcgaagttcggccgcgcctgctcctactgcggcgcgacgggcgtgccgctgaacatcgaccacatccggccccgcagccgtggcgggtccgaccgggtctccaacctgaccctcgcgtgcatcccctgcaaccaggccaagggccaccggcccgtcgaggagttcgcccccaagcaggccgccgacatcctcaagcgcgcgaaggcccccctccgggacgccgccgccgtcaacgccacccggtgggccctgtggcgggccctggacgcacgactgcccacccggaccgccagtggcgggcgcacgaaatggaaccgcgtccggtgcgcactgcccaagacccacaccctcgacgccctggccgtcggtgacctcgacaccgtcaccgcatggccgcgcaccgtcctggtcgtcaaagccaccgggcgcggcacctacgcccgaacccgcgccgacaagcacggtttcccccgcctgcgcctgccccgcaccaaacagttcttcggctacgccaccggcgacctcgtccgggccgtcgtcccgtcgggaaagaacgcgggcacccacaccggccgcatcgccgtccgatcctccggcagcttcgcagtccgcaccgccggcggcctctacaccgcccggtacaagtacttccgtctgctccagcgcgccgacggctacgcctacaccacgcaacccgaaggcgggccgagtgatgcgccctga

SEQ ID NO: 1177 - DNA, 335 bp, Streptomyces sp.
  source 1..335: mol_type = other DNA; strain = SID12501
gtaatgggatcccccgcctgaaggcggcgggggctttcagcccgaccggctgatggtccgctgttaccagcaccagccaactgatatggaggtgaccgaagttggctacgttccacgcaggacagaagacccacccatctgtgcttcctcagcagttggctctggaattcgagtcagcagacaaccccgggatcagggacgaaacggggctcggacgccgtaaggcatccggtgtggaacatgtgcgaggggagatcaccggcagtgcacctactgccggtggcgtcaccccggaccatcaggtccgggagcccggccgtgaggccgaccccgcc

SEQ ID NO: 1178 - DNA, 891 bp, unidentified
  source 1..891: mol_type = other DNA; note = Lachnospiraceae bacterium UBA2891
ctgatgccgacgaatgcgtaccgggcgcggaagcttttaaaaagcggacgcgccggaattgagtgttataaaccggtgttcacgatccggcttacagaccgggaggaaggagctgtacagcctgttgaatacacctgcgatacgggatatcagcatgtgggtatatctatcaaatctgaaaagcatgagttcgtgcacaatcagtacgatatgctcaaagacgagacggaacgccacaatgactgccgtaaataccgcagggtaagaagaaaccgcaaacggtatcgcaaacccagattcgacagccgttctaaaaagaacaaggacatggcgccttccctgcgtcaccgcatggagaaccagatccggctgttcgaatcgttctgcagggtgctgccgattacaacggccacatttgagatgggcaaatttgatacccagctcctgcaggcgatcgcggaagaaaagcctcttccaaagggaagggattaccagcatggttcgaaatacctgtaccagacagaacgtatggcagtatttggcagagatcactatacgtgccagatctgtgggcgttccgtcagagacggtgccattctgcacacccatcatatcgggttctggatgagcccaccgtaccggtcaggcaggatcagcaatctgctgaccgtctgtgagaaatgccatacggcatggaatcacaagcctggcggcaggctatggggtattaagcccaaattaacaaatttgacagcagcgacatatatgagcactgtcagatgggcgatgtaccggaggctggtcaaaacacatccggatgtggatatccatatccagtacggtgcaaagaccggtatcaccaggcaggaacgtcatatcgccaaaacacat

SEQ ID NO: 1179 - DNA, 342 bp, unidentified
  variation 283..337: note = n represents any nucleotide
  source 1..342: mol_type = other DNA; note = Lachnospiraceae bacterium UBA2891
gtcaactacccgcgactaaagtcgcaggcttgtaaaaccgtcaggttttgacgattgtacaggcttggttgattagcctgagtgcttcgtgcactacgttactgtgagccgcgtccggatactccacaagtccggaccaactgggaactgtcgttaaaaactgctgagggaaggcagcgtgcggcagctgttttcaacccacggataacattggcgatgtggaccaccgtggctgcggagtaatccgtaagtacgagaatccgcaggtctctgcgactgcggnnnnnnnnnnnnnnnnnnnnnnnnnnnnnnnnnnnnnnnnnnnnnnnnnnnnnnnagtgt

SEQ ID NO: 1180 - DNA, 1002 bp, unidentified
  source 1..1002: mol_type = other DNA; note = Metagenome
atggttccagtattggacaaaaacaggattccgttaatgccttgctccgaaaaaagagctaaaaagttaatggatagaggtgatgcaaggcccttttggtgtaaaggtgtcttctgtattattctacaacgtgagcctaaaagcaggcatatgcaagacattgccgttgctatcgatccgggcagtaaatttaatggctacactgttaaatcagaagctcatacgcttttgaacgtacaagctcatgccatcacagatgtcaaaaagaaaatggaagaacgagcaatgcttcgaagaggaagaagagggcgcaaaacaccttatagaaaatgcaggttcaacagatcggttaaagaaagacttgccccatcaacaaaagcaagatggcaacaacatttaaacatcgtaaagtggtttggtaaaatgtacaacattaaacatattgttgttgaagatattgctgccaaaacactaaagggcgcaaagaaatggaataaaacctttagccctttacaagttggaaaaaaatggttttatgataccgtagagtctttaggttatttgcttcataagtttaaaggatatcaaactgctcttatcagaaatagtttaggcttaaaaaagaactcaaaaaaagataaaaaatgtttttatggtcactgtgtggatacgttttgtttggcaacacaagttataggcggcagcggtgtgcctgataatttatttgtaaagtttataaagccattaagatgttatagaagaaaattacatgaaatattaccaaagaaaaatgggttgagaagaaattatggcagcacgttgtcattgggcataaatagaggcacattagttgaacatataaagtatgggatatgtttaataggtggtacatctaagggcagattaagcctacatgatttggcaacgaataaacggctttgccaaaatgctaaaaaagaagatattaaaattctaactcaaatgagatggaatatttattaa

SEQ ID NO: 1181 - DNA, 250 bp, unidentified
  source 1..250: mol_type = other DNA; note = Metagenome
atcaactacccacccactaaagatggggtgggtttgaaggaaaaccttaacgaggactaacttcaaattaaacgggagattagactggacaagatcacggaagtggtcgcttgaagtcaactaaagggttatctgcacagagaggcaaagattatcttatgaggtgtttccctagcctataagctctaatcaccctgagtgtcgaagggaatagttataaagtgcgtaagcacataaaaaaaaaacgtta

SEQ ID NO: 1182 - DNA, 1536 bp, unidentified
  misc_feature 1..1536: note = Ga0257069_1000440 JGI
  source 1..1536: mol_type = other DNA
ttgaaacacaaacaaaaagagcgcgtcaacatcgtctacgttgttgacaaaaacggcaggccgctcatgccgacaaaacacttcggcaaagtcaagcatatgctacgggatgggcgtgcaacgatatatctgcatcgcccgttcacgattcggctatgctacgaaacgccggggaaaacacaatctgtcgttatcggagttgatcctgggcggacgaatattggccttgtttctgtatcgcagaaaggggaggttctttacgctgccaaggtcgagacaaggaacaaagatgtgtcgaaactcatcgccgaacgcgcggtacatcgtagagcttcacgcataggtgagcggcagcgtcgtaagcgtcgcgcgagaaagcatggcacgacaaccaagttccccaatggtagaaaactccccggttacaaagatggcgtgcttgaactgaaggatattatcaatcaagaggcgcggttcaacaatcgtaaacgcgcagctaagtggttggcgccaactgcaaggcacttgcttcagacccatcagaatcttttgttacatgtccgtcggtttcttccgataacagcagttgccattgaacataacaagtttgcattcatgcttcttgaggatgggaccgttcgcggcgctgatttccagaacggacggctcaaggggtacgagtctgttgcggtttatgttcgtgctcgtcaaaatgacaagtgcgagatttgcggagcaccaatcgaacacatccatcacatccaggcgaggagcgagaacgggagtaatctccccgaaaatctcgtcggcctttgctcgaaatgtcacgaagccgtgcatgttggaaagaaagaaatcaacatcaaaggctttgcgaagaagtacgcaagcacgtcggttttaaatcaagcattgccacattttcttttttggctggaaacggcctttggcgatggaaatgtccgaacttgtgcaggttgggagacgaaagttgagcgtaagcggttgggcttttcgaaagaccaccactatgatgcagtatctattatctcggcttgtggccatccggttgatttgaatctcgggggtggacggattttagtacatacccctcatctgattatgcagttccgacatcatgatcgccagattattcattgccaattcgagcgcacatataaagttgtaggagataacggaaagttgatttccgtggtaaaaaatcgaaagccccgtttcgagcaaccaaaatcaatgcctgcgctcaatgtgtggtacgatgacgaagtgaagcggagcgggcagcacaaggctcgtctggctctatctcagctcgttgtagtgaaaagcaatcgacgttacaagaaccccgctcgggttatgccaggaaccgtattccgctacgaagacgatttgtatgttatgcaaggcagcgtgtcgtacggtcagtatttttgcgcgatcggtcaagggaaaaggatgttctcttctaaaaaatgcgaagttttgtgccgtcgaggacttatttatctgtaa

SEQ ID NO: 1183 - DNA, 279 bp, unidentified
  misc_feature 1..279: note = Ga0257069_1000440 JGI
  source 1..279: mol_type = other DNA
gtcaacaactcctactttatgcctgttaacgtttgaggtaggagcttgcaggagaaaatctgcgagtcaccagaaaatatctgggggagttgagcagaggcatgacgcggcgggattaattccgaaacaccgagggtaataccaagcctctcgcactgtgggtagccgtgccgagcctatggtttgtacctgctttttgcttttgcagggattatgtacctaacggtacaaaggaggtgttttattttgaaacacaaacaaaaagagcgcgtcaacatc

SEQ ID NO: 1184 - DNA, 1263 bp, unidentified
  source 1..1263: mol_type = other DNA; note = Human gut metagenome
atggtttatgttatttcaaagagggggaaacctctcatgccatgtacaaatgttattgcaagattgctgttaaaacaggacaaagcaaaggtaaaaagaagatgcccgtttatgattcagctgacttatgatgctacgcaatatatccaagattgtacgcttggtgtagacaccggaagcgctcatattggtgctgctgtagtagatgctgacaaacgtgttttgtacatgtctgaaacgaaaatcagaaatgatatcacacagaaaatggacagacgcagagcctatcgtaaagtaagacgatatcggaaaacgagataccgcaaaacaagatggatgaaccgtaaaaattccaaaagggaaaacaggttctctcctacaatggtgagtaaactacattcacatcagaaagagattgaatttgtaaaatctattttgcctattacgaggcttgtgattgagacaggtacatttgattgccatttaatgaaaaacccaatgttatacaatcaaaaatacaggcattggggttatcagcaaggacctgattatggttttgcaaataccaaggcaaaagtcttaaacagagacagttatacttgccaatgctgcagggggaaacggaaagattctaagcttgaagttcaccacattgtgtaccgctctaagggtggctctaacgaagaagataacctgattactctttgccatacctgccattctgcacttcatcatggaatgatgaaattaaaggtaaacggtaaacaaaaaggtaacttgcgatatgctactcaaatgaacagtatcagaacacagttgttaaagctttatccagaagctattgaaacatttggatatgtgacaaaagagaatttgcaactgtcaggtctgccgaaaacgcattgcaatgatgcggttatgattgccagtggaggaaatacggtgaatttcaaaacacatagcttatgcaggaaaaaatgtatccccaaaggggattatcagcaaacaaagggtatacgaagtgagcagccacttataacgaaaaagatatacggatttcgcaaatttgataaggtacaataccttggtaaagaatattttattaagggcaggatgtctactggatatactgtacttatggatattgatggaaacaaagtagatttttcgtatatgccgaaaggttataagacaccaaaattaaagaactgtaagagaattacggcaaggaacgggtggatgattcaggaaattgctatctga

SEQ ID NO: 1185 - DNA, 295 bp, unidentified
  source 1..295: mol_type = other DNA; note = Human gut metagenome
gtgaactacccatcccctaaagggaatgggcttccattaaatggttcaccagactcagcagccagaaatgactgctacgataattaggtcatgacaccctcggttgacgcatcagaccgttgctctatcgagtatgtttaagttgggttggtgtaagcaaagccctgtgatatattcgcaaaaagcctttttatcattgtcgagatgaagtcggaacaactgtatggtaacagtacggcatagtacgcaccacctgcttttaagcagagtatttatcggaggatttactcaatgg

SEQ ID NO: 1186 - DNA, 1305 bp, unidentified
  misc_feature 1..1305: note = Ga0310136_005540 JGI
  source 1..1305: mol_type = other DNA
atgacattggcgaggccaactttacctccgaaaggagagattgcagagatgtatgtatttgtcgttgacgccgaaaggaaaccgcttgctccatgtcacccagcagtagcgaggaaactgctgaagcaggggcgtgcggcagtgctgaggaaatatccgttcactatcgtacttaaagagacgaaggaaactcatccgcaggacattaggcttaagattgactccggctcaaaagcaacgggaatgataatattacacaaaaacaaagtcatttgggcagcagaacttgaacaccggggacacaagataagggaaagattgctggagaggaggcagcttcgccgaagcaggagataccgcaaagaaaggtatcgcaagccgaggtttgacaaccgcaggagaccggaaggttggctcccgccgagccttgaaagcagggtcgccaacataataacctgggcaaaccggttaataaagctgtgttcaatctcagcaatatctcttgagcttgtcaagttcgacacccagaaattacagaacccggagataaccggtatcgagtaccagcggggcgagctttacggctacgaagtcagagaatacctgttggagaaatgggggaggaagtgtgcctactgcggcaggaacgacgtaccgttagagcttgaacatatagtgccaaaatcgaggggcggcaccgacagggtgtccaacctgacgctggcttgccacgactgcaaccagaagaaaggcaatctcacggcagaagaattcggttattcagaagtgcaaaaaaaggcaaaggtcccattgaaggatgttgccgcagtcaatgcaacacgctgggcgttatatggcagactgaaagaaactggtttgcctgtggagtgcgggacaggaggaatgacgaagtacaaccggagcaaactgggtttgccgaaggagcattggacagacgcagcctgtgtaggggccagtacgcctgaaaacctgcgggtgagcattaattctgtcttgcaggtcaaagcagttgggcatggcaggagacaaaggtgcataacagacaaatatggttttccgaaggcgtatgcaaacagacaaaaaacatatcagggttttgcgacgggagatattgtaagggcagtaataccaaaagggaaatatgcggggagccatattggcaggatagtcataagacacaggccgtcgttcgggctgaacggctttgacgtacacccgaagtatctgacgattcttcagcgaggcgatggttatgattacagccttttagcaatagagcgataa

SEQ ID NO: 1187 - DNA, 250 bp, unidentified
  misc_feature 1..250: note = Ga0310136_005540 JGI
  source 1..250: mol_type = other DNA
gttgactgctaataactgcagttggaggcgtataagcctcagagtcaaccagcctcagccagggccgtaaggctatcgggctacgttatcctggtcacgacaccctggggtgcggggccagctccaggctctgtcgcccgctgttatgaggagctgacttggcaaggctcgaaggcagctggcatgaaaagccaggatgacattggcgaggccaactttacctccgaaaggagagattgcagagatgtat

SEQ ID NO: 1188 - DNA, 1551 bp, unidentified
  misc_feature 1..1551: note = Ga0187878_1000231 JGI
  source 1..1551: mol_type = other DNA
atgaatacgcgagacagaagactaacacccaccaacgcctccctaattgctggatgggatgaagccgtacatcgcgagggtacggagttaaaagctgacacagcttctgctttttatctcgatggcgaagggacgtctaaaaattcgaaagaatcaaaggacattgctaggcttatacccaacaaagatcttaagattttggagaatagtagaataaataagaaaatcaaaatatcaaaaaagaataactatagagtaccggttttatatccagacggaaaaccaggaatgcctacatctaataagagagctaataaatggctaaaagaaggcaaagccgaaaaagtaagaaataaattgaatgtatttgctattaaattgaagttctggcctatctatagaaatttacaacagatagtattgttaatagatcctgggagtacattcacaggaatagctgtgatgtccaagaaatgtattttgatttcatatatgttagaacttccgggatataagaaaggttcgaaaccgttcactgttatcaatagacatagaaagaaaatagagaagtatcacaatactattgtagataggataacagatagaaggaggctaagaagatcaaggagacatagaaattgtagaagaagagatgaaagatggctaaatagaactaagaaaggtaagatagcaccatcgatgttagcaaagaaacaattagaattagaggcggttaatgaactgagtaaattgtatccgattacaatcataggatttgaagatgttgctttcaatcactggggagataaagatggtacaaagggtcaatacttttctcaagtagaaattggtaagaatttgctattagatagactgaaaaagatagctcttatccaaataataaaagggtatgagactgctagaagaagggaacaattgaaactgcctaaagaaggagataagacaaaaaggtcaataaaatctcatgtaactgactgcattgcaatgggttcaataattctgaatactaatcaatcttctagtaataaatttcatttcaatgtaatatcaaggcctaaatattctagaagagtcctatttgcagaacagcctaataaagatggtattacagaaagagctggaggtcatattcctcataccccaatattcaaaggattgagaaaaggagattatgttgaagcaaatgcgccaaatttaaagaagatatatagaggatggatatcaggatatactgatgacagaatctatatatctgatttcgattggaatcaatctccatctttttctgtagataatattagattattggatagaaatcacggattgataaatctgagattgggatggattaaagatactatagatatttgtcaatttggatctaaacaaattgatgcagaaaataagataataaatatgaaagtcataaataatattatagagatgaaaaagaaagctgaaaaggatgcaattaaagaatcaaacaaacaagataagacaatacagagaggaatagatgatgcttggtaa

SEQ ID NO: 1189 - DNA, 233 bp, unidentified
  misc_feature 1..233: note = Ga0187878_1000231 JGI
  source 1..233: mol_type = other DNA
gtcaactactgcccccagcgatcagctttagctgagagcgactgccggcttgccggcactctgaagggggcagcttgtagctcagaatacaacgaaagaattgactagcctgtaggagaaatatctaatctatgaatacgcgagacagaagactaacacccaccaacgcctccctaattgctggatgggatgaagccgtacatcgcgagggtacggagttaaaagctgacaca

SEQ ID NO: 1190 - DNA, 1143 bp, unidentified
  misc_feature 1..1143: note = Ga0268280_1010517 JGI
  source 1..1143: mol_type = other DNA
atgcagaagttacaagcaaagttaaagaacatacctacagatacttctctagtctgtagctctataaattctgtattaaacaaagaccaaagtcttagtgtacagaataaagtactgacttgtaacaattccgaagagaatcttcagaaacataaatctggttcagacttgagagttctgaatattgtttatgtacttaataagaggggtttagctcttatgccttcttgccaatccaaggcaagaaggctcttaaggttagggaaagctcaagtagtaaaaatgtatccttttactatacaattagctaatgctagtggagaagcaaaacaagagatagtattaggagtagatgtaggatataaacatgttgggatttcagctattagtcagaataaagaattatattcagcagaggtagtcctaagaacaaatatttccgaattattatctgagagaaaaatgtatagaaggaatagaagaaataaattatggtatagaaaacctagatttaataatagggaaaaaggtaaaggttggctatctccatctgtacaacataaaatagattctcatattagaataatagataatataaagaaattattaccaataacaaaaattattatagaaactgctaaatttgatattcaaaaaataaataatcctgaaatatgtaatatagaatatcagaatggagtacaaaaagatttttggaatgtaagagaatatgtattatatagagataatcacacttgtcaaaattgtaaaaagaataataaagtattaaatgtacatcatcttgaaactaggaaaactggtggtaatagacctgataatttaattacattatgtgttgaatgtcacaaaaagtatcatttagggaaaatcaaattagatataaagattaagaataattttagtagtgagacatgtatgtctataattaggaatagactaattgataaattaagattaaagtataatatagaagagacatatggatatataacaaagagtaaaagaatggagaataagatagaaaaaagtcatattaatgatgcttttatcatttctggaggtattaatcaatttagagttagtagttatttagtaactcagaagaggaagaataatagaggg

SEQ ID NO: 1191 - DNA, 288 bp, unidentified
  misc_feature 1..288: note = Ga0268280_1010517 JGI
  source 1..288: mol_type = other DNA
gtcaactactccaggctaaagctacggagcttgcagagtaatctgcaacaagcaagtgcgtaagcacttgcaagagttgattaggaagcaaaaaggaaacaaatgcagaagttacaagcaaagttaaagaacatacctacagatacttctctagtctgtagctctataaattctgtattaaacaaagaccaaagtcttagtgtacagaataaagtactgacttgtaacaattccgaagagaatcttcagaaacataaatctggttcagacttgagagttctgaatatt

SEQ ID NO: 1192 - DNA, 1260 bp, unidentified
  misc_feature 1..1260: note = Ga0326511_10041793 JGI
  source 1..1260: mol_type = other DNA
atggtttatgtgcaagacattaatgggaaggcactgatgccaacagagagacacggaaaggttagaaaacttctgcgtgacggcatggctgttgttgttatgcgtgaaccgttcacaattcgcctaacgtatgaaagcacctcatttatacaagaggtttcattgggaatagatgcaggaagccgtcatattggtgtgtcggctaccacagcagacagagaacttttctcggcacaggtggaattgcgtacaaatattcagaaattgctggcaaatcgtatggaactacgcaggacacgcaggagccgcaaaacccgctatcgcaaaccgatgtttgacaataggaggcatgataatggctggcttttcccaagtaccagacagaaggttgatacacatcttagggttatccgcatggtgatggatatactacccattagcaaaacgacaatcgaggttgcaaaattcgatgtccaaaagataaaaaacgatgcaatcgctgggattgaataccagcaaggcgagcaatttggtttttacaatgttagggagtatgttcttacacgcgatggttatcaatgccagcattgcaaaggaaagtcaaaagacccagttcttaatgttcaccacattgagagtagaaagataggaggtaatgcgccaaacaatcttgtaaccttgtgtaaaacatgtcataagaaatatcataagggggagattactctaagatttatgcgcggtgtgagttttcgtgacgcagcagcgatgaatgctatgcgatggtgcgtgtataactcggcaaaggatgagttccgtaatgtgcatctgacttatgggtatatcacaaagcatactcgaatcaggaacggaataaaaaaatcacatacggcagatgcaaggtgcatcagcgggcatccgttagcggtagcacaaacggatgtgtatatctttaaacagcgcaggcgacacaacagacagattcacaagtgtgcaattctaagtggaggatataggaaactcaaccaggctccgtatcttgttaaaggatacaggctattcgacaaagtttcctttaatgggcaggaggcttttattactggtagacggcagagtggttcttttgccataaagaccattgattggaagtctctttcagagggggtctctgccaagaaactttcttttctgaatatcagtagaggttttttaatttctaataaaaagagtttgacgaactataataaatcaacaaatgagtaa

SEQ ID NO: 1193 - DNA, 262 bp, unidentified
  misc_feature 1..262: note = Ga0326511_10041793 JGI
  source 1..262: mol_type = other DNA
ctcctggctaaaaccaaagagttcgcttcggctgctcttaactgattagactaagtgtttagaacactacgttggttgagaatgtataggcactccgagatatatatcccagtttcggacactgcggacggcgattaaaagaccgaaaggagatgtggtcggtgttgtcgttacttgaaacctcttccaactttgtcgaggggtacaccacgggagtaatcccgacttacaacaaagttgtttaaaaaaagcaaaacaaatg

SEQ ID NO: 1194 - DNA, 438 bp, unidentified
  misc_feature 1..438: note = Ga0334886_1000752 JGI
  source 1..438: mol_type = other DNA
atgctagtctatgttcttaacaggcacggaaaaccactgatgccgtgtaaaccacagaaagcacgaagactattgaaagaacagaaggctaaagtagtaaaaagaacaccctttactattcaactgttgtacggttcctctggatacaaacaagatgtaattctcggtgtagatgccggaagcaagacaataggagtatcggcctcaactgagaacaaggaagtgtttgacgaagtagaatatcagggagaaccatgcttcatatttggaagacggaatagcggatactttgacatcagaaagctcgacggaacgaaagtgcatgcttcagcaagctataagaaactaaagttgttaagtaaaacaacatccttactatgtgaaaggaggcaggcggtttcctccccacagctaaagcagggggtctccgccgattaa

SEQ ID NO: 1195 - DNA, 239 bp, unidentified
  misc_feature 1..239: note = Ga0334886_1000752 JGI
  source 1..239: mol_type = other DNA
gtcaaataccccacggctaaagccgggggcttgtaaaagctctgtttgactagcctgagtgcttcgagcactacgttatcggcaaatgtataggcaccgtaggatgcgttcccaagtcttacgctctgcggttggtggttaaacagtcctgatgggtagggacagtgctgctaacgagaaactgtcgaataacattggcgatgggaagattactccgtaaggaggtggactatatgcta

SEQ ID NO: 1196 - DNA, 1245 bp, unidentified
  source 1..1245: mol_type = other DNA; note = Human gut metagenome
atgccctgttcaccggcaaaagcgcggcttctgcttaaagagaagaaagctattgtgaagaggagaacgcctttcactattcagctgacgattgcaacgggtgagaccaaacagccggtgggtctgggcgttgatgccgggtacaaacatgtcggactgtccgcatcaacggacaaggctgaactttatgcatcccaagtcgaactgcgacaggacatcaccgatctgctctccgctcgtcgtgcgttacgacgggctcgcagaaaccgcaaaacgcgctaccgcgcgccaagattcaacaaccgcatccgcaccaagcgcaaaggctggcttgctccgtcggttgaaaaccgaatcaacgcgcatttatcgcgcatcgaaacggttcttcgaatgctgccggtcacgaagatcaccgtggaaacggcgtccttcgacatgcagctgctgaaggatcccgacatttcgggaaaagagtaccaagagggcgaacagctcggcttctggaacgtccgcgagtgtgttcttttcagagatgggcacgtttgtcagcattgtcacggcagattgaaagatccggtactcaatgttcatcacctgaaaagcagacgtaccggcggagattcgcccggcaacctgattacgctttgtgagacgtgccataaggcgcttcatcgcggcgaactcactctaaaggccaagcgcgggcaatcgttccgtgcggaagccttcatgggcattatgcgctgggaggtactgaaccgcctgaaggcgtcgcatcctgagctggaagtgaacaacacttacggctaccggactaagcacgcacggatctcgaacgacatcgccaagtcgcattgtgcagatgctttctgcgtcgccggcaatctcggcgccaaaaggctctgcgaattcttcttccagaagcagacgcgttggaacaaccggcagattcacaaactttccgtcctcaaacacggacttcgaaaacgcaatcaagttccctttgaggtcaatggcttccgtctttttgacaaggttgcctgcaagggagaagaaggcttcattttcggccgtcgatcatccgggtactttgatgttcgaaaacttgacggaacccgcatttcggcaggcatcagctacaagaagctgcatctgctggaaaagagacaaacttatataacagaaattcgaaaggagaaggcgcttcctcccctgcctgaaggcagaggtctccgcgcctaa

SEQ ID NO: 1197 - DNA, 247 bp, unidentified; identical to SEQ ID NO: 779
  misc_feature 1..247: note = human gut metagenome genome assembly, contig: NODE_64_length_112578_cov_13.342685, whole genome shotgun sequence WGS
  source 1..247: mol_type = other DNA

SEQ ID NO: 1198 - DNA, 1014 bp, unidentified
  misc_feature 1..1014: note = Ga0172375_10009941 JGI
  source 1..1014: mol_type = other DNA
atgtttattcctgtagtttctaaaaaaggtaaacctttaatgcctactactccttatagagctagaaagttaattaaggcggggaaggccattaaaaaatttaaaaaaggtttattttatattcttttaactgaaaggatgattggtaaaactcaggatattgctgttggtattgatccgggtattaaaaaagaagcttttacaataaaatctaatagccacacatatttgaatatccaaatagacgcaattaattgggttaaggataatgtaaaaacaagaagtctattaagaagaagtagacgacaaaggaaaacaccttatagaaaatgcagattaaatagaaaaaagtcaaaaaatcttcaaccttctataaaagctagatggcaatggaaattaagaattataaattttttagtttctatttttcctattacttattttatagttgaagatataaaagctaaatctaaaaaaaattgtaaaaaatggaatatgtctttttctccgttagaagatgggaaaaattatttttataccgaacttagaaaacaaggtaatgttgaattaaaaatggggtatgatactgctgaattaaggaataatttaaaacttgaaaaatcttataacaaaaattcaaataaattcgaggctcattgtattgattcttttgtattggctaattggtttgttggcgggcatttgacgcctgataataaaaatattttattaattaaacctatagaactccatagaagacaacttcacaggttacaaccaagtaaaaaggggataagaagaagatacggctccactaattctttaggatttaaaaggggtagtttagtaaaacatgttaaatatggattatgttatgttggtggttatttaaaaaataatataagtttgcataatatagaaaatggaaaaagaattactcaaaaagcagaattaaaagattgtatttgtttaaattttaacgcatggaaaatttcttatctattcaataaatag

SEQ ID NO: 1199 - DNA, 206 bp, unidentified
  misc_feature 1..206: note = Ga0172375_10009941 JGI
  source 1..206: mol_type = other DNA
attcaactacccttccctttaattgttaagggcttaaaagactaacaataccatgttagaaatttaagttaaacaggagaatagagtggctaagatcataagtggtcgtttgaaagcagtaagcaaactgaaggtggtacttcaaaatatgttaaggatgttcccctagtctttatcctctatgtttgcctatctcgaaggggttg

SEQ ID NO: 1200 - DNA, 1272 bp, unidentified
  source 1..1272: mol_type = other DNA; note = Human gut metagenome
atgaaacaagaccagaaatatgcttttgttcaggataatcgaggggtagttttaagccctactaagattgaaaaagcttggtatttaataaggcataataaagcaactttagtaaagacagagcctatggttattagattgaatagaaagcaaaataatacagatatgagtttcatgaaagtaggtttagatccaggtgatactacaggggtagccatagttcaggaaagtcatttgaatatgtctaaaaacaaagcagtttttaaggcaaatatacaacatcgtaatgatattaagtcattagtagagtcaagaagagagtatagacgattacatcgatacaataaacgttatagacaggctcgattcaataacagagcatcttctagaagaaaaggtaaagtagctcctagtattaaaaataaaaaagatgaaatcttgagagtgcttagatacctttcaaaatatgtatgtattgacggtatctatattgaagatgtaagttttgatattagagctttgacagatgagtataagccttacagatggcagtatcaaaagtcaaatcgtcttgatgaaaatatccgcaaagcagtaatacaaagagataagtgtaaatgtaaaatgtgtggagcaaaagatacacaattagaagtacatcatatcactccaaaacgtgaaggtggaaacaatactttgaagaatcttattactctttgtagtgaatgtcataaatcagtaacaggggtagaagatgattataaaagttatctatattcacttatagatggaaaacaaattcctttagctcctgcaatgcatgtaatgataggtaaaaattatttataccagcagttgagacagtttattggaggtgattcctatgtttatttaactacaggaggagatacagcaaatagtaggcttgattggaatattgagaaatctcatagtaatgatgcagcatgtataacagatgtgagatgtttaccagaaaatttaaagacttatgtttatactatcaagccacagcgtaaaaagaaaaagactaagcaaaatacaagtaatctagctataaggcatagagatttagtttggtatactccaaggggtagagaacctattaagtgttatgttacagctattatgcagacaggatgctgtgtaggtaagtataaattaaaatctatagatggtgaaagatttggaccgatagcagagtcaagtctaagaaagatacaacaaggaacaagtagcttgatgttcgtataa

SEQ ID NO: 1201 - DNA, 1371 bp, unidentified
  source 1..1371: mol_type = other DNA; note = Human gut metagenome
atgcagaagttatcagaaaagttaaagaacacaccaaggaatgcttcactagttccttgctctgtaaattctcaattaaacaaagaggaaactcttagtgttgagagtatagtactgactgataacaatcccgaagtgaatctatctcaacatgcagagagacttaaagtcaaagtgtatgtaatctctaaagagggcaatcctataatgccttgtagctgtgcaaaggctaaacatttgttgaaagagggaaaagcaaaagtgattaaaagaagtccgtttgctattcaattaaattttgaatgtgaaaaccaagttcaagacgttactttgggaattgatacaggatttgaattcattggtttttcagcagtctcagaaagagaagagctaattgcagggactttgaaattggatgggaaaacaaaagagagactgaatgataagagaatgtatcgaaggataaaaagaaacaaattatggtatagaaaaccaagattcaacaatagaaagaaagtaaaagattggttgcctccttcaattgaaagaagatatcaaactcatttaactttgattgaaaaaattaagaagatgttgcccataacacaagtgatagttgaagtagcaaaatttgatattcaaaaattagagaattcagagatacaaggagaagaatatcaacaaggtacattgtatggatatcaaaatacagtaagttatctgaaaacagttcagaaaaatatctgtccattttgtaaacgaaagcttgagtcgggtgaatctaaagcaactcatcacagatttatgaggagtgattcacgaagaacagacagaatagaaggattaattttattccataaaaaatgtcatgttcgacttcatgaacaaaaacgagaaaaagaatttcaaaacatcaagatcggtaagtatcaaccatcaattttcatgtctattattaataaaagattttggaaagatattcctgatttgaaagtaacttatggaaatgtcacctttgtggataggaataatttaggattagcaaaaagtcacaccaacgatgcttttgttattgcaaaaggaaactcacaaacaagagttaagtcttttgaaataattcaaaaacatagaaacaacagaatacttcagagacaaaggagaggatacaaaccaagcatcagaaggagtagatcaattatccagcctttagatttgatttggatcaaaggaattaaatatatttctaaaggaatgaatggatatgggagatacgtttatgttgatattggagaaaataaaacatctctcaacatgaaattagttgaaaaatattttagtcaaggcagtttatcatttagtttaaaaaattaa

SEQ ID NO: 1202 - DNA, 266 bp, unidentified
  misc_feature 1..266: note = Ga0114919_10025663 JGI
  source 1..266: mol_type = other DNA
gtcaatcatcctaacctaaaggaaaggacttgatccgcgaggaacaagagcaattggttgattagggagcttaaaattacgaaaggagttttatgcagaagttatcagaaaagttaaagaacacaccaaggaatgcttcactagttccttgctctgtaaattctcaattaaacaaagaggaaactcttagtgttgagagtatagtactgactgataacaatcccgaagtgaatctatctcaacatgcagagagacttaaagtcaaa

SEQ ID NO: 1203 - DNA, 1338 bp, unidentified
  misc_feature 1..1338: note = Ga0376445_000045 JGI
  source 1..1338: mol_type = other DNA
atgcaccgcgtgttcgtcctgagcagcaccgcagaaccgctcatgccctgccatccggcacgggcccgggcgctgctgtctgccgggaaggcgaaggtctatcggcgggtgccgttcaccgtcatcctcatggagcgcgccgagggcgagacgcaaccgctcaccgagcagctcgacccgggcagcaagaccacgggcatcgccctggtcgcgctgttccagcgcggccgctgcgtcgtctgggccggtgagatgagccaccgcggccaggcgatcaagtccggcctcgacagccgccgggctctgcgccgcgggcggcgccaccgcaagacccggtaccgcgcaccgcgctttgacaaccgccgccggccgccgggctggctgccgccatcgatccagtcccgcgtcgacaactgtgccgcctgggatgccaagctgcggcgcctagcaccggtgacagccatcgccgtcgagacggtgcgtttcgacacccaactgctggagcacccggacatcgccggcgtcgagtaccaacagggaacgctgctgggctgcgagctgcgcgagtacctgctggcgcgccaccatcacacctgcgcctactgcctggggcagtcgaaggatccgatcctggagcgcgagcacgtcgtgccgcgctgccgcggcggcagcgatcgggtggccaacgcggtgctggcctgccgcacttgcaatgtggccaaagcgaacctgctgccggggacatggatcgagcagctgcgtcgctcgaagaagcccattgacgccacccgcgcccggcagatggagaagatcctcaccggctggcggccgagcctgcgcgatgcggcggcgatgaacgccacccgctacgccatcggtcgcacactcaaggccgccggcctgccggtcagtttcagcagcggcggccgcacccgtttcaaccgcaccgctcagggctacccaaaagcgcactggatcgatgccgcctgcgtcggtgaggaaggcagcaccgtgcgcctggatccggcggccaagccgttgcagatccaggccgtcggccgcggcagccggcagatgacccggcccgaccgctacggcttcccgcgcaccggtgccaagcgcgtcaagcgcgtgctgggcttgcagaccggcgattgggtgcgactctgtcaatcgagcggcaagtacgcgggcacctacgtcggccgcgtagccgtgcgtgagcgtggcgacttcgacatccaggtcgtccgtgacggtcagaagatcaagattaccgcgccggcagcgcggttcaccctactgcaacgaggcgacggctatgcctacaccacctga

SEQ ID NO: 1204 - DNA, 287 bp, unidentified
  misc_feature 1..287: note = Ga0376445_000045 JGI
  source 1..287: mol_type = other DNA
tccatcgccgcgcgtggtcagcgtgaggttcaggcgacagcccggacctgattcaaccagccccagccctttcgggctacgttacgcgggaatgccataggcaccccgggatgcttctccagtcccgggctctgcggtgagtcgttaaacagcacggcactgggacaacgggcagtgcggctcacgaaaaccccgcgataacctgggcgaggagaccttgacccccgcgaggggagaaccggcgggtaaccgccactgatttgagacaggagccgacgatgcaccgc

SEQ ID NO: 1205 - DNA, 1080 bp, unidentified
  misc_feature 1..1080: note = Ga0255344_1006041 JGI
  source 1..1080: mol_type = other DNA
atgctagttccggtcgtagatcaggttggaacaccactccaacctactcaccccgcaaaagcacggcgttggttgaaagaaggacgttgctcgaagcattttcatcgtggcacgttctatattcgtttaaagaaaattgttacagaaccgcacataaatatcattctaggaatagatccgggttcgaaacgaactgcttttacagtggctacaagaaaccgtgtagtattgaattggatgattgattctacaaatttcacaaaaaacaatattgagaaacgacgtatgtatcgtcgacaaaggcgttatcgaaacacaccgtatcgtgaatgtaggtggaatcgctctagtcttcgtaatgatggacgtgttccgccctctactttatctaggtggaaaagacatttaagattgatttatagtttgttaaaaatacttccaatcactaaagttattattgaagatgtagctgctgttactcataattctaaaaagaagagattagttgactcaaagtatgtttcatgttggaatgctgctttttcaccattacaagctggaaagaatttattttataatttcttagaagaccgtgggatagcggtgtataagaaaaaaggttggcagacagcgaagcatcgtaagaaacatgggtataagaaaatttctgataaactttcaaccaaatgggaatatcaatgtatagattctcattcgttgtgtgagatgtattataatcgaaagattagacctgttcggaatttaaatttcatacaatttctcacattttctagacgcgaattatttcggatgtttggtaaaatcagaagaagacatgggtcgacaagaacactaggtcataacagaggcacgttggtttattgtaaatatgttaagcgtggtcgattagaaccaataggattatgttatttagcgggttacatgaaagtgaaagaagaatatcgagtatgtttatattctttacaaggtaaagaattgggccaaagtttcaaattaagtgattgtgtgatgttaacaaatttacgttatttaaataattatattcgaaacgaaaggtag

SEQ ID NO: 1206 - DNA, 211 bp, unidentified
  misc_feature 1..211: note = Ga0255344_1006041 JGI
  source 1..211: mol_type = other DNA
gtcaactacccaccgctgaatcggtgggcttgtgggaaaaccgttagccaggactaaccacaattaaaacaagactagactgtccaaatgggttcttttgaactccgcgtggtcgagcggcaacgcatcggacacgtttgaaggaaactagctacctgtcgtggcagacaacatgtgacgttttgggtgttccgctagcctgattcctctc

SEQ ID NO: 1207 - DNA, 1314 bp, Bacillus sp.
  source 1..1314: mol_type = other DNA; strain = REN51N
atggtatttgtactcaaccaagaaggaaaacccttaatgccaaccaaacggcaccgtaaggtccgtctatggctaaaaaacggacaagctaaagtggtgaaacgaaaaccgtttaccattcaactattatttaaaaccgaagactatgttcaacccatatctttaggggtagacagtggtttttatcatatcggtatctctgctgtgacagagaaagaagaagtgttttcatcagaggtttcgttactaaaaggaatggtggaacgaaatgaagaacgtgcttcctatcgaagaacaagacgggctcgtcttcgttaccgaaaaccgcgttttgataaccgaaagaaagacaaaggatggttagccccatccattcaacataagctagatagtcacctgcgttatattgagtgggtaaagtctatacttcctatctctaacactattattgaagtcgctaattttgatacacagaagatattaaaccctgatattcaagggttagaatatcaagaaggcgtacaaaaagagttttataacttaagagaatacattttacaccgtgaccatcatacatgtcagaacccgaattgtaaaaacaaaagcaaagaaaaagtattggtccttcatcacattatcttccggtccaatggaggaagtgacagtcctaataacctcattactctttgtgataagtgtcataccccacgaaaccacaaagggtttttaagagactggagaccaaaggtgaaacgcctaaggtctgcgacctttatgagcatggtgcgttggaagttagtcaacgctttggagtgtaaccacacatatgggtacttgaccaagtctaaacgcatagaatttgaaatagagaagacacatgccaatgatgcgtttgtcattgcaggaggaacaagcaaacacgtaagagctcaagtccatcaggtggagcaggttcgaagaaacaaccgttctttagataagttctacgacgctaagtacattgacgctagaacgggagaaaaagcagcgggacaagacttatttaatggtcgaaccaagcgaaataaaaatacgaatggagagaacctccgaaagtatcgtcaggaaaaggtatctaaagggagaagagccatacgtactatgcgatatcctttccagccaagggatttagttcgaagtgaaggttacaccgcttttgtggtaggcactcaaaacaaaggcgcttacgttaaactaaaagatagaaaaaaagtagcgaaaaccgctacattaacgttaattaaaagtggaaaaggattctgctttctagactga

SEQ ID NO: 1208 - DNA, 293 bp, Bacillus sp.
  source 1..293: mol_type = other DNA; strain = REN51N
gtcaataaccctcgactaaagtcgaaggcttgaaaaagcgtttgagagtcgaaatgcaagaccatcggtcttgtgttgattgattagccctaggctcctcttaggagactacgttaggagtgaaataggtaccctagaatactccactcgttctaggctctacggtttgttgttaaacatctctgagggtaaggagaagtgggacaaatgttaaaccactctataacatgggcaaagtggacctacagccttcggctgcattactcagtgtaaggagttaaaaaaagaaaatg

SEQ ID NO: 1209 - DNA, 1329 bp, unidentified
  misc_feature 1..1329: note = GENOME_ACESSION: mgm4491404.3 MG-RAST
  source 1..1329: mol_type = other DNA
atgggcgaaggattacaaccggacgcgagtccgaggagacaaaacttgagagtatttgttttaaataaacgaggccaaccgctgatgccgtgttcaccggcaaaagcgcggttactgctgaaagagaaaaaagctgtggtgatgcgtcgtacgccattcaccatccagctcacgcaggccacgggtgaaaccgtgcagccagtgaagttgggcgtggacgccggttcgaaattcatcggcttatcggcttcgaccgacaaggctgagttctatgcgtcagaagtcgaacttcgtacggatgtagttgacttattgtcttcacgtcgggaactgcgtagggctcgtcgcaatcgtaagacacgttaccgtgcaccgcggttcaataatcgtgttcacagcaaaaacaagggttggttggcaccgagcgttgaaaacaaaattaacgcccatttatcccgcgttgacgctgtaaggcaacttctcccggtgacgaagatcgttgtggaaacggccagtttcgacatccagaagatcaagaacccggatatcgaaggggcggactatcagtggggagagcaactaggattttggaatgtccgcgaatacgttctctttcgtgatgggcatcggtgctgccattgccacggaaagtccaaagccccgattctgaatgtccaccatcttgaaagccgtaaaacgggtggggacgccccgaataacctgatcacgctatgcgagacgtgccataaggcgtatcacgctggaaagattgttctgaaggcaaagcgcggacaagcattccgagacgctgcctttatgggaatcatgcgatggacatttttcaaccgcctgaaggcacagtgcccggagcttgatgtacgaaatacctacggctatctgacgaaaaacacccgcatccgacacggactggacaaatcccatcatacggacgcgttctgtattgccggcaacctcggggcaaagcggctgggtgagtacttcttccaaaagcagactcgcaagcacaatcggcaaattcacaagatgtccatcctcaaaggcggtgtccgcaaacgacagcaggccccgtacgaggtaaaaggttttcggttgttcgacaaggtgcggtatggcagccgagaggcattcatcttcggaagacgcaattccggctactttgacatccgtttgttgaaaggcgagaaggtttctcctgccatcagttacaagtatcttcagcttttagaaagtcgaaaaacttttttaactcagcttattaagaaggacgcgattcctcccgcgactgaagtcgcgggtttcctcgcgtaa

SEQ ID NO: 1210 - DNA, 252 bp, unidentified
  misc_feature 1..252: note = GENOME_ACESSION: mgm4491404.3 MG-RAST
  source 1..252: mol_type = other DNA
gtcaaccacccctgactaaaggcagaggcttgcgaaagcaagtcttagttgactagccccagtgaggagaaatccggactacgttggttgggaatgtataggcaccgcgggatgtcaatcctagtcccgtgctctgtggcccgtgattaaaagcactgagaggtaggtgcggtgttgcgggtatctgaaaccccttccaacatgggcgaaggattacaaccggacgcgagtccgaggagacaaaacttgaga

SEQ ID NO: 1211 - DNA, 855 bp, unidentified
  misc_feature 1..855: note = Ga0079226_10038291 JGI
  source 1..855: mol_type = other DNA
atggccaccagtggtggccgcgtgacaaccaagccaaccggtgaggttgctggcggggttgtgcccgccccagtgcgtgcaccacagccgcgggtgttcgtgctggataagaataagcggccgttgcagccgatgcgcccggatcgggcgcgcaagctgctggatgcgggccgggcacgtgtgcaccggcgcgccccgtttgtgattcgcagggtcgatgtggatgcccgcaccgaggaggtgattgtcgatggggtcgaggtggggatcgaccccggatccaaggcaacgggtatcgctgctttcatcaccacaccggagggtgcccggcagggcgtctggctgggggagctggtgcatcggggcctgcagatcaaacaaaggatgcaggcacgtgcccagttgcgtcgtgggcgccggtcacggaactcgcgtcaccgggcgcccaggttcgataaccgtacccggcccgccgggtggcgcccaccctcgctggcccaccgggtcgataccaccctctcgtgggtgaacaggctgcgcagatgggcaccagtgatggcgatccacattgagcgggtcaggttcgacacccacgccatggccagccccgaggtcagtgggatcgagtatcagcagggcaccctggccgggtatgaggtccgcgagtacctgttggctaagttcgaccgggcgtgcgtgtactgcggggccagtggggtgccgctgaacatcgaccacgtccacccgcgcagcaagggcggctctgaccgggtctcgaatctggtgctggcctgcatcggctgtaatcaggccaaaggcaacatggctgtcgccgagttcgtgaccgaccctgcc

SEQ ID NO: 1212 - DNA, 337 bp, unidentified
  misc_feature 1..337: note = Ga0079226_10038291 JGI
  source 1..337: mol_type = other DNA
gtcaaccaccccgccctgacggacggggcttgtgagcctcgtactagatgggctggttgaccagaccgagagaccttgaaaggaggaatctacgttgagcgtgcgacaggagaccgaccctgggatgcttcctcagtcccaggctctcgaatcagtgccagcagacacggctggggtagccacgaaacggggcactgaggtcgaagctgattcgacaccgggcgttcaacatggtcgaggggagatggccaccagtggtggccgcgtgacaaccaagccaaccggtgaggttgctggcggggttgtgcccgccccagtgcgtgcaccacagccgcgg

SEQ ID NO: 1213 - DNA, 1401 bp, unidentified
  misc_feature 1..1401: note = Ga0194044_10012301 JGI
  source 1..1401: mol_type = other DNA
atgataaccctggctatagattacggtgcttcaaatgtgggtatagctctggtcagaaataccgaagcggggaatgaaccgctgttcgctggaactgttatcctcgatgctaggaagctgaaggaaaaagtggagacgagggctggcattagagggttgagaaggacgagaaagacgaagaatcgacggctcagagaacttggtgaagccctctcgggcttaggcatggagggagacaaggtcgccagaatagtccggttctcgaataggcgtgggtataagtctctgttttcagacccgaacgaaacggaaaaggtggacgaggctgaatcggcataccgatgcactagagaacagtttttccaccaactggaacaagaactgcaagagattctgagcgaccgtgaggcttgcgacaaagcactctccgtctgtgaaagaatactcaaccgcaagggggaccgatacgctgaaatcagattgataagaattgataatcggggagccagccgctgcgcatggggggattgcaacaaggtgaccccgaggcgggacaacgctactgacgatgcaattgcccagcaactggtcacgtattttcagagtgcaatcaagacggaaccccacaagcttgaaatgctcaaccaaacggtttgtgaactcgattcgatttccaagaatctccgaggggctattgcaaacaacgacgattcttcaaagaagatactgcgcaggagggcaagaaagagtctaagaaatcttagagccgagttaccaagcaccgaacctgaggacgtctcaggcgacgcgtggaagtatgtggaaaagggtattctgaacacccttgagaacagtggcggcaggaaccgttactgcagggaacacagcaagtcctacgtggaaaaagttctggaagggaagccaccagagttcaagtctaccattgcagattctgacattatttccagacgggaacagattgcgttcagcaagctctggagatacatagaggcgcgactgcttcctctcgctccgaagggaattgaccgaattgttgttgaacgaactgcgttcgaccttttagccggtaagcgaaagaaaattagagacgcctccagcgaaggtgtggaaaatatttatcagtacggccccatgtatgggttccccaatgaaaaggagatgctgcgaaaggaattcggagggctatgcgcttactgtggtaatccgtctgatacactcatggaccgagaccacatcctgccgaggcgagatttcttcttcgatagctatctgaacacactacccgcttgcccgacttgtaattcggaaaaatcggcgagtcttccttcccaggtctcacttcgaataagtgaggacgcctattcaatgtacaaacagtac

SEQ ID NO: 1214 - DNA, 292 bp, unidentified
  misc_feature 1..292: note = Ga0194044_10012301 JGI
  source 1..292: mol_type = other DNA
atcagcacgcgccagcttcagatcgaccgaccttattaagtcctgcattcgagatactgcaccgagttcgtacaatgattagatggtctgcataagccatgaaaaccagaccgtttccttctgtataggaaggtcccgcttcttcttgtacggtcttgtaatatcattcaaattaacgactgtccagattcgtgccccaaatacttcctaggcatcttggggcgatgtcgctcggcacgtcctgcttatttatctatccgaatttatacagattctcccacatatcccgctg

SEQ ID NO: 1215 - DNA, 1266 bp, unidentified
  misc_feature 1..1266: note = Ga0310914_10061055 JGI
  source 1..1266: mol_type = other DNA
atgcaacgaaaagttaaatccgatactagactggacaagattcaagactgcgaagttttgggtcgtttgaagtcaactgaacactctgggagtggtatcccgaaagatatgcccgatgcttcccaagtcgggcttccctctgggcgtcagcgtcgatgggattgcagacacctacacagcaagggcttaccgccaaatgctgtgattgttcctgtcctggcactggatggagaaccacttatgccgacgtgcgcgtcgcgtgctagacgttgggttaaacagcacaaagctacgccgttctggctcaatggtgtttggtgtgtgcggttgcgctttgagccgagcgacaggaataagcacgaagtggttgtcgggattgatccaggaagcaaacgcgaggcgtacaccgtggcttccaaagagcacacctatctgaatgtgctcagtgatgccatagattgggttaaggatgccgtgggatcgcgcaagattctgcgacgagcgcgacggaatcgcaagacaccataccgaactaacaagcagaatcgagcacgcggaggcatcccgccatcaaccaaagcacgttggcagctcaagctgcgagtggttaaccaactgcgaaagatgtttccgatcacagggtacgtggtcgaagacgtaaaggcgactacgcacggcaggggcaggcgctggaatagctctttctcaccgttggaagtcggcaagagctggatgtacggagagctgttaaagctcggaacactgactctcaaagccggtcacgagacggctgaactgcgaaaaactttcggcgtggtcaaatgctgcggtgacaagatgtcgatgcgctttgacatacataacgtggacagttgggtgctggcaaaagatgcacttggagcagcaaagggacgcccggagaatatgcaactggtgcacgcaaggccactccgattcaggcggcgcgcacttcacttgcagaatccaaccaaaggcggtgtccgccgtagtcatggtggaacgctgagccaaggatttaagcgcggctcactcgttaagcatccaaagcacgggctgacgagcgttggtggcactaaagacgaccgtatcagcctgcacaaagtttcaggaaaacgcctttgtcagaacgcgaaggctcaagacatcacattgctgcgaagaagctcgatagctttccggccgataccaaagaacggcattcctctgccgcctaaaggcgacagtttcctgcctaagattttatga

SEQ ID NO: 1216 - DNA, 251 bp, unidentified
  misc_feature 1..251: note = Ga0310914_10061055 JGI
  source 1..251: mol_type = other DNA
gtaaacgaccgccagctaaagcaggcggctttttagagcagcaaaccaagcatgcaacgaaaagttaaatccgatactagactggacaagattcaagactgcgaagttttgggtcgtttgaagtcaactgaacactctgggagtggtatcccgaaagatatgcccgatgcttcccaagtcgggcttccctctgggcgtcagcgtcgatgggattgcagacacctacacagcaagggcttaccgccaaatgc

SEQ ID NO: 1217 - DNA, 1386 bp, unidentified
  misc_feature 1..1386: note = Ga0223826_10007721 JGI
  source 1..1386: mol_type = other DNA
atgctgacatacgtattggcaaaagacggtacaccgctgatgccaacttataagatcaacaaggtgcgccgtatgctgaaggagggtaaagcggaaatcgcgggccataagcccgggtttaccatccgcctcctgtatgaaagcgggaagggtgcgcagcctgtagaggtttgtgaagataccggttatgggacaattggcgtatcggtaaagtccgaaaagcacgagttcacccatgaggagtatacgcttcttccggatgaaaagatccgtcacgatgactgccgtaaatacagaaggacaagaaggaaccgcatcaggcacagggctgccaagttcgataaccggaagaaggataagggctggatcgccccgtcactggataataaggtacagcgccatgtggatatcgtaaccatgtataaaaaagtgctgccagtaacggatgtgacgttggaagtaggaactttcgatacgcaggtgttggaagccgtagaggctggcagacccctccccaaggggatcgggtaccagtatggtccgcagtacgggtttgatacgctccgggaagcggtcttttaccgggacggatacaaatgcatctgctgcgggaagtccgctattaaggaccacgcgattcttaagatccatcaccttggatttttaaagggcgaccacagcgacaggatgggaaatttggccacggtttgttcgaagtgccatacaccttccaaccataaaccgggaggaaaactatataaccttaagcccaagctgaaaccgctcgggggcgcagcattcatgaatgccgtcaggtggaaaatatacaacatggttaaagagcggaaccctggtttatacgttcacatgacatatggcgcggttacaaaacgcgaacggttaaggcgccatattgggaagacgcacgccaatgatgcttactgcatagggtttttccacccaaaacataaaacaagggctgtggcctataagaaggtgaagaggaacgaccgtatccttcaaaagttttatgacgcagtatatatagaccgccgggacgggaaaaagaaaaaaggcgcggagctttcctgtaacaggacgaaccgctctgttccgaggaacaacagccggaatgaacgcccgttccgaaaggagaaggcgtcaaagggccatgtaacgacccgaaaggggcgtacacagctgaaaccgggaagccttgtactgtataaagggaaggtaatgactgtccacggcacacatacgaataaagggaaggtcaacgtagaattcacgcaaaaggcttcagatgacaggaaatccgcaaatttaagcaaagtaacaattatcaggcctatgtatcaatccgggtgggtgcgcataagctga

SEQ ID NO: 1218 - DNA, 319 bp, unidentified
  misc_feature 1..319: note = Ga0223826_10007721 JGI
  source 1..319: mol_type = other DNA
ctatgtttccggcaaatatgtttaggagcttcggcatctgcactaaacgtataggcacttcggggtgctccacaagccccgcgcgtgaaaccctttcatcagggggttgagtggtacgaaagtacaaccctgcgcctgtgtgttaaaaacctctgaggtcaggaggcgtgcatacaggatataaaactgccggataaccttggcgatgtggaaccctgcctgtaagggcagagaaccccgcggcgcaacttaccgcgggaagccgtaaggcaaatgttactgtaaaccatacataagaaaaggaggcatcggaatgctg

SEQ ID NO: 1219 - DNA, 1476 bp, unidentified
  misc_feature 1..1476: note = Ga0209656_10018899 JGI
  source 1..1476: mol_type = other DNA
atgcttcctcagtcccaggctcttcgagttgccgccgcagacaagccatggtcagcgcgaaacgggcagcaacagacggctacggttcaacctgttcgaggggaaatcaaaccggcgcctcaaaacgccgagcgcggggtaacccgcacgtttgtgttatcgaaagaggggaatcctttgatgccgtgttcaaatgccagggctaggattctgattcgtaaaggccgagccaaggtttatcggctattcccgttcacgattcagttgatagacaaagcatccggcgacgttcaaccagtcgctataaagttggaccccggagcaaatacgactggtgttgccttggttcgagagcatgcagacccgaccaaacaaaccgtgttgcacctcgcggaaatagcgcaccgaagccgagcgatacggaaacacatgatccagagggcgatgttcaggcgtcgccggcgaactgctaaccttcgataccgcgcaccaaggtttgataaccgaaccagacgcgaagactggctgcctccttcgcttcaaagccgagtcgacaatgtggcttcctggcttaaccggtaccgcaaactcgcaccaattacctcaatctacgttgagtccgtcaggttcgacatgcaggccttggaaaaccccgacatcgagggtttagagtaccagcggggtacgttgttcgggtcagaactctgggaatacctgcttgagaagtgggggcgaagatgcgcttactgcgatgcggaaggcctgccccttgaggcggaacacatcgcgcccaaggcttgcggcggatccaatagggtcagcaacctgacgctcgcctgccacaagtgcaaccaacggaagggatcacagccggttcatttgtttctggcaaacgatccgtccaggctggctcgcattctcagtcatacgaaaaaacccttatcgagtgccgcagcagtaaacgttacccgaaaagccactacccgagtcatgtctgcgacaggcttagaggttcactgctcatcgggcggtcgcacaaagtttaatcgtacccagctcggaattccgaagacccatgcgcttgacgccgcttgtgtcggtgaactctcagaacttgagagttcgaacattcccgtcctttgcatcaaagctaccgggcgcggaagttaccaacgcacccggctagacagtttcgggtttccgcgaggctatctcacgcgccaaaaggcggtgaaaggttttcaaacgggtgacttggtaaaggcaaccatgccaagagggaaattcaaaggcgtgcaccaaggccgattggcagtgcgagtgcgtggagcttttgtgatccagagctcagcaggaaacgtcgaaacgagctggaaacactgcaaacgtctcatgcgaaacgacggttacacctacgaaatcaactcaccggcgattcctccgccacctaaaggaggcggttccctcgcttattaa

SEQ ID NO: 1220 - DNA, 254 bp, unidentified
  misc_feature 1..254: note = Ga0209656_10018899 JGI
  source 1..254: mol_type = other DNA
gtcaacgaccgccagctaaagcaggcggcttgtgagcgattgcaggcctgtgttgaccagaacaagtgaaaactacgttgagccgcaagcaaaagactaaccctgggatgcttcctcagtcccaggctcttcgagttgccgccgcagacaagccatggtcagcgcgaaacgggcagcaacagacggctacggttcaacctgttcgaggggaaatcaaaccggcgcctcaaaacgccgagcgcggggtaacccgc

SEQ ID NO: 1221 - DNA, 1293 bp, unidentified
  misc_feature 1..1293: note = Candidate divison MSBL1 archaeon SCGC-AAA382M17 AAA382M17_Contig_8_C, whole genome shotgun sequence
  source 1..1293: mol_type = other DNA
atgagtcaaaaagtctacgttcggatcatgaggggcgaaccgctcatgcccacgaacccagcgaaggccaggcacctcttagatgacgacagagcggaggttgttaagaggaagccgttcacgattcggctgaagtacccaacaggagaaaacgggcaggaggtgaccctcggggtggacgccggctactccaccgtcgggttctccgccgtcacggaggatgaggagctgatccgcggtgagctcgacctgagagacgacgtgtccgataggctgaggcggagggcggactacaggagaaacaggcggagcaggaagaccaggtacagagaacctcgtttcgacaacagggggaaggaggacggctggctcgccccctcaataaagtacaagatgagcgaccacctccagctcgtcgagatgatcggggagctacttcccgttacccgaaccgtggttgaggtggccacgttcgacacggagaagctggcggaccctgagctggacgtgacggagtacgtcccggagacgttcaggggttacgaggtgaaggagtacctgctggcgaagtgggggaggaggtgcgtctactgcggcgcggaggacgtgccccttgaggtcgaccacatagtcccgaagtcgaggggcggttcggaccgggtcgacaacctgacgatcagttgcgtggactgcaaccgggagaagggcgaccggaccgcagaggagtatgggcaccctgaggtacagaggaaggcgggggagtccctgaaggaggccgcgttcgtgaacatcgtccggtggaagatcgtgaacgagctggactgcgaccacacgtacggctacaggacgaagaagggacgcatagacctcggcctggagaagtccgacgacaacgacgccttcgtgatagcgggcggcggggaccaggagcgaactggaccctaccgcgtcacccgtggacgccggaacaaccgcaagctggagatcaacaggaggggtcacggccggagcgtccgtcgggagcgctacgagttccagccgggtgatttggtcagaggggatgacgctctgtaccgcgtcaggggttcctgctcctatggcaggtacgtccgagcctttgacgaagaaaggaacgaggaatacttgagagcggattccctcaaacttgtgaagtacggtaaaggtctctgctggcgggagaaaacaagtcgcaattcctctcccaccgaatccgaagattcgaaaggagtctcctcgcgacaaccagatggaatggcggagagattgtggtaa

SEQ ID NO: 1222 - DNA, 342 bp, unidentified
  misc_feature 1..342: note = Candidate divison MSBL1 archaeon SCGC-AAA382M17 AAA382M17_Contig_8_C, whole genome shotgun sequence
  source 1..342: mol_type = other DNA
gttgactactcccacctaagctctgcttaggaaggagcctgaaagggttccgatccgggagcgggagactagccttggcgatgtcccctcgggagtgggggcagatgagctacgttcggggctgagtgttcgaaaagcacttgtggatgcctcccaagtccgcaactctgcaaggcaggtggacgaaacacgccgttatcccgatggtgtgcaacatcacctgttcgagcccaccccaacattggcgatgggaacttactcctctggtgtgcgggaggccgggactcgagagtccccggcatttaacataccatttaggacgtgtacaaaatgagtcaaaaa

SEQ ID NO: 1223 - DNA, 1437 bp, Ferroplasma sp.
  source 1..1437: mol_type = other DNA; note = Type II
atggagaaacatatgaaagagaagcagaagttagataggagagatacatacacacctacggatgctccacaagtccgtggcaactgtgatcatgcattaaacagagaggaaactctcagtgtgcatggtttaaaaaccccttctaacaacccccatgtggacctactctcaccggtaggagggcataaagccgatatgccggtatttattctaaacgatgatggaaaaccattgattccatgcaaacccgccaaggcaagacatcttctaagtgacaagaaagccaaagtaatttcttctaatccgttcacaatacagttgctttggcattgtgagggaaacgtggaaacaataacactgggcatagattctggatacaaacacataggtttttctgctgtaacagacaataaagaactcatatccggggaagtagtaataagaactgacataccgaagctcaatgaagaaaaggcaatgtaccgcagaaaaaagagaaataagctctggtacaggaaaccaagattcatgaatcgtggcaataataaagaaggacggttcgcaccaagcattgaacacaaactggaaactcatataagattgattgagaagttgaagcgaatacttcccgtatcaaacacagtgatagaggttgcatcctttgatacccagaagatgaagaatcctgagataagtggaatagaataccagcagggagaacttcagggatatgagatcagggaatatctccttgagaaattccatcgcacatgtgtgtattgtggcaagacaggtgtgcctcttgaaatagagcatctaacgcccagatcaagagatggtcccgatacggtcaataatctcgcaatctcatgtcatgactgtaaccagaagaagaacaacctcacagcagaagagtttggatatcctgaagtgaggaagagggcattgatcaccatgagagatgcagcattcatgaacactgtaaggtggaagcttacacaacttacaggatcagaacatacattgggattcattacaaagaagaatcgtatttctcttggtctggataaaacccatgccaacgatgcatttgtgattgctggaggaactgttcagatcaggacattgccatttacaatcacacagagaaggaggaacaaccgttccatccagacgaacaggaagggattcaggccatcaataataaggaaaagatatgcattccagcctggagacatggttctgcatgatcatgagagattcagtgttgttggtatgcataactatgggaaatcaatcgtaataaaaggaggagggaagaagatggacataaacacgaagaaggtcaagctggtaaaatatggaaaaggattgcaattcgcaccccaattccttcccaccctttcggatggggtctcattggggggagttagatga

SEQ ID NO: 1224 - DNA, 277 bp, Ferroplasma sp.
  source 1..277: mol_type = other DNA; note = Type II
gtcaactacccctccctgacggaaggggcttgtctcgtgaggaacagcgcaagagttgattagggggctttaaaaacatggagaaacatatgaaagagaagcagaagttagataggagagatacatacacacctacggatgctccacaagtccgtggcaactgtgatcatgcattaaacagagaggaaactctcagtgtgcatggtttaaaaaccccttctaacaacccccatgtggacctactctcaccggtaggagggcataaagccgatatgcc

SEQ ID NO: 1225 - DNA, 1815 bp, Mastigocladus laminosus
  variation 949..1668: note = n represents any nucleotide
  source 1..1815: mol_type = other DNA; strain = UU774
atgttacgagtaccagtattaacaccatcaggcaaaccattgatgccaaccaaagcaagtagggcgcgtcgttggctcaaagaggggaaagcgcgggttgtatataacgacgttggtatcttccagattcagttagtcagatgccccaggacgcaagacatacaacccattgcggttggcatcgacccaggtaaattgtacacaggtattggtgtacagtctgccaagtttactttgtggttggcacatctccaattaccgttcaaaacggtgcgagaacgcatggagcaacgcgccatgatgcggagagggcgtagaggtagacggattaaccgcaagttgccctacaatcaacgcgcacatcgccagaaacgttttgacaatcgtcgtcaatgcaagattccaccaagtattcgtgctaaccgcgaattagagttacgggtgcttgacgaattatcgctgatttacccaattaccacggttgcctacgaaatagtaaaagcgagtggtgataaggggtttagtcctgtgatagttggtcagaaatggcaattagagaatctggcaacctatgccgaagttaaacaggttgagggttggcaaaccgccaatattagacagcagctaggattgcacaaacaaaaacattctaaaggtgacgcaattcctgcaacccacgctgtagacggtgttgctgcttcgtgtagcgcctttgttcggtacggcatcattgaccgtcattcacgaggctggaaaggtgatgttactgtaactcccgcacccttcacagttattcgccgtcccccagtatcgcgccgccaactacaccttatgcttccctccatcggtggggtaaggagaaagtacggtggcactgtaacccggcacgattttagaaagggtgacttagtaaaagtccctagtggtgaaattggttattgcagtggcnnnnnnnnnnnnnnnnnnnnnnnnnnnnnnnnnnnnnnnnnnnnnnnnnnnnnnnnnnnnnnnnnnnnnnnnnnnnnnnnnnnnnnnnnnnnnnnnnnnnnnnnnnnnnnnnnnnnnnnnnnnnnnnnnnnnnnnnnnnnnnnnnnnnnnnnnnnnnnnnnnnnnnnnnnnnnnnnnnnnnnnnnnnnnnnnnnnnnnnnnnnnnnnnnnnnnnnnnnnnnnnnnnnnnnnnnnnnnnnnnnnnnnnnnnnnnnnnnnnnnnnnnnnnnnnnnnnnnnnnnnnnnnnnnnnnnnnnnnnnnnnnnnnnnnnnnnnnnnnnnnnnnnnnnnnnnnnnnnnnnnnnnnnnnnnnnnnnnnnnnnnnnnnnnnnnnnnnnnnnnnnnnnnnnnnnnnnnnnnnnnnnnnnnnnnnnnnnnnnnnnnnnnnnnnnnnnnnnnnnnnnnnnnnnnnnnnnnnnnnnnnnnnnnnnnnnnnnnnnnnnnnnnnnnnnnnnnnnnnnnnnnnnnnnnnnnnnnnnnnnnnnnnnnnnnnnnnnnnnnnnnnnnnnnnnnnnnnnnnnnnnnnnnnnnnnnnnnnnnnnnnnnnnnnnnnnnnnnnnnnnnnnnnnnnnnnnnnnnnnnnnnnnnnnnnnnnnnnnnnnnnnnnnnnnnnnnnnnnnnnnnnnnnnnnnnnnnnnnnnnnnnnnnnnnnnnnnnnnnnnnnnnnnnnnnnnnnnnnnncgccaagttgttcccggtgatcaactaattatgactgtggaactgttgtggatcaaacaacgtcgtttcggtaagatgcaggctcgcgccgaggttgacagtcagttagttgctgaaggcgaattaatgttttccctcgtaagctga

SEQ ID NO: 1226 - DNA, 235 bp, Mastigocladus laminosus
  source 1..235: mol_type = other DNA; strain = UU774
ttcaactaccccgccctgcctaacggctgaggacggggattgctaaaaacaaatttagcagcgcaagtgttgaatagcccactaagactaatcctgatacgcacttccgaatgcttccccagttcggattatctgcaagactttttgttaagtcgttgggtaaagccaagtcattctggattagttgggcgaggggacttaacactttactcggaggtttatcaccatgttacga

SEQ ID NO: 1227 - DNA, 1194 bp, Lactococcus sp.
  source 1..1194: mol_type = other DNA
atggtacgtcgatggattaaaacaggacaagcacactggattggacgtgacaccattcaattcgaccgtccaataggttcagaaacacaagaactcacattaggcattaatgccggctataaaatcattggtgcatcagtgacaagtgagacacaagagtattatgcctcagaaacgaacctgcgcactgatattgtcaagaacttgagtacaaaacgtcaatatagacggtctcgtagaaatcacaagacacgatatcgtcaggcacgctttgacaatcgtgtgaagtcaaagcataaaggttggcttgcctcaagtattgaagtcaagattgacaatcatgtccagctcattcgcaagcttataaagaagcttccgataactaatattatcgttgaagctggacagtttgacattcaaaatctcaaaaaccctgacatcacaggtaaagaataccaagaaggaaatcaacttggatttgctaatgtcagagagtatgtcttagcaagagaccatcacaaatgtcaacactgcaaggcagatggtttgaaaggtatcaagttacacgtccgtcacctcgtctcacgaaaagtgggaggtaaccgccctgacaatctcatcattttgtgtgaaaactgtcacgcagcttaccaccgtggcgagtttgaattaaagaaagcaccaaaaggctatgcgccagctagtgcaatgtcaatcatgcgttcgaccctgcttgaccgactcattaatgaatttggtgacaaggtggagacaacgtttggctatttggtcaaagaagcacgactcacaattgacttgccaaaaacaagcatgactgatgccttcgtcattgcaggcaatctaatggctgacagattagactttcaagagctgagaaagcatgtgcgctgccataacagacaactccacaaagcaaaatttcttaaaggtggcatccgcaaagccaatcaagctccaagagaagttcatggttttcgactgtttgacaaggttcaggtagaaaacaaaaattggtttgtttttggaagaagaaccagtggctattttgaccttcgtagtctgacaggagaaaagctcaataaggggagctatagtgccaaaaaaattaagctcgtacaccgagcaaattcagtaatcacacaatacgcaacaatcgctccaacgggagcatag

SEQ ID NO: 1228 - DNA, 209 bp, Lactococcus sp.
  source 1..209: mol_type = other DNA
atcaaggaggttcaatagctccagtgacacacgggtttgaaaacccatgattgctcgctttgctcagtcgcattgcaagatgtgattcgagcgaaatattgaatagtctaagctagaaatagctacgttatcttggttaacagacccgtggacctttgttctcatctacggctctctggaggcactgtaaacagttctgttggagacgg

SEQ ID NO: 1229 - DNA, 1341 bp, unidentified
  source 1..1341: mol_type = other DNA; note = Wastewater metagenome
atgtttaaacaattaaactttaataaagtgttagtcttggatactaaccgcaaaccactgatgccatgctatccagcacgagccaaaaaattgctttcaagtggtcgtgcttctgtatttcgcagatttccatttactattattttgcatgatcgaactggggaagaaagcaatctacaagacatagaaatcaaaatcgaccagggttctaaaaccactggtgtagccttagttgtacatggtgccacaggccatgctgtggcctttgctgcacacattgagcatagaaccaatattaaatttgctcttgattcaagacgtgctattcgcagaagcaaaagacaacgtaaaacacgttatcgccaagctagatttctcaaccgtactaagcctaaaggatggctgccaccatcgttggtaagcaaagctgagaatattttaaactgggttgtccgctttgctaaattaacaccccttagcaagtttgcacttgagacagctaagtttgacactcaaaagcttgagaaccctagtattaaaggtgttgaatatcaacaaggtaaaatgtttggatatgctgataagaaagcttatctacttgaacgtgaaaactattactgtatttactgtggcatacatgctagtcaagccaaaatggagattgaacacgttatacctagaagtaaaggtggtacagatagtctgaacaatcttgtattatcctgtgaaacctgtaatcaggccaaaggtaatcaagatgttgaaaccttcctaaaaggtaaaccaagtgtattaaaacgtgtgaaaaaacatttagatacaagtcacaaagatgctgcacatatgaacagtattcgttggtatgtgatgaacaatctccgaggcatggcagatgccattggtgcaactctaaaaattggttttggttcaactactaaacaaaatcgtttatcacttggattgcccaaagatcattggattgatgctgcggtttgtacaagtgatggtagtactgtcaaagtagaaccaaatttaaaaccgcttattatcaaagcagtgggtcgaggctcaaggcaattctgtcgtatggacaaatatgggtttccaagaactagtccaaaacctagaagtaaaaacttctttggttttaaaacaggagatatggttaaagccgttatacctgaaggagctaaaaccaaagtacctgcaagtacctatgtaggccgtgtagcggtgcgtagtacaggttactttgatgtaaaaaccagaaataccaagatcactatgtcttataaacattgtaaaccaattcacttaatggacggatatagttatgcgtaa

SEQ ID NO: 1230 - DNA, 266 bp, unidentified
  source 1..266: mol_type = other DNA; note = Wastewater metagenome
gtcaacaaccccaccctaaagggtgaggcttgcaaaagcctagttgaccagccttagttttaagctacgttatcttagttatcacactttagagtgcttcaccagctctaaaccctgtgcaggctctgtaaacatctcttgggtaagagaagtcaacctgaatttggcattaaattgcaaagcttagataacattggcgaggtgaacgttacaacagtgatttatcactaggttccgtaaggaaaaaaatatgtttaaacaattaa

SEQ ID NO: 1231 - DNA, 1101 bp, unidentified
  misc_feature 1..1101: note = Ga0099741_1041 JGI
  source 1..1101: mol_type = other DNA
atgcaaaatctaagagttccagtgttgaatccagatggctgccccgctatgccaaccaaacccagccgcgcacgtcgttggctcaaggagggcaaggcacgagttatctataacgatctgagcatcttctctattcagctaatagaggagccatcgggtagaaacactcagcaggtggtgttaggtattgatccaggaaaattatacacaggtatagcagcacagacagctagagccactctatttatggcgcacctgcaattacctttccagacggtcaaagatcggatggagcaacgccgagtgatgcgtcgattgcgacgctatcgtaactgccgtcgtcgtcccgccagattctcgaatcgacgggtcaaaaaagtaccaccatcaatcaaggctaatcgtcaacttgaactacgggtagccaaagaattgtgtgccgtatatcccatcaccttgattgtttacgaggtggtcaaggctgctggttccaagtctttctcccctgtaatggttggacagttttggatgcttagtcaacttgagaaactgcgcccaactgagcagaaatatggttgggaaacttctcaagttcggactcaattggggctggaaaagcagaaaaatcacaaaggcgacactatccctcaaactcatgcagttgacggcattgctctagcagccagtcaattcctaacctatcaacaatggcacactaaaaatgctcatggagctaattgggtgggtttttgtcgggttactcctgctctatttttcgtgattcgcagaccaccaattaaccgccgtcaactgcatctcatggttccggctattggtggaattaggcgcaagtatggcggtacgacaactaggcatggattaagaaaaggagatctagtccaagcagaacaggcaagtcgtgtatctattggttgggtgagtggcgacacgaaaaaccaaatatcagtgtctaatttcggctggaaacgtattgctcagtttacagcctcaaaagtccatttgattcagcgctcaacgggtttactcgttgcgtcagatggcaagttgtcaaggttgacggcattgagtcatcaaccttga

SEQ ID NO: 1232 - DNA, 243 bp, unidentified
  misc_feature 1..243: note = Ga0099741_1041 JGI
  source 1..243: mol_type = other DNA
gtcaactaccccaccctagtcgaaacgaccgaggatggggcttaaaagaaagccaatcttttaacgcaagagttgactagaccacttacaaaacatctagttggcacgcacttccgaatacttctctagttcggactatctgcaaactgattggttttcagtgttgtttaaagacaagacatcttgctagatgtggtcgaagagacaaataactgcaaaggattatctctatgcaaaatctaa

SEQ ID NO: 1233 - DNA, 717 bp, unidentified
  misc_feature 1..717: note = Ga0376514_000350 JGI
  source 1..717: mol_type = other DNA
gtggaaggatggttgccgccttcattaaaaagccgggttcacaatatcgaaacctggaccaaccggttgtgccggttttgcaatattcaggcaatttcaatggagttggtgcggtttgacatgcagaaaatacagaatcccgaaatatccggtgtcgcgtatcagcagggggaactcatgggttatgaggtgcgggaataccttctggaaaaatgggacagaacgtgtgcctattgcggaaaaacagatatcccgttggagattgaacatatcgtgccaaaatcgaaaggtggttccaacagagtcagcaatctgacactggcctgtagggcgtgcaacaggaagaaggggaacaagcccctagaagagttcctttcaaggaaaccgggactgttgaagcgaattcaaaagcagtctaaagtgccgctcaaggatgcgggtgccgtcaacacgacccgatgggacttgttccgtaccttgaaaaaaatcggactgccggttgaaacaggctccggcggtctgacaaaattcaaccggacgaccaggggacttcacaaaacgcattggctcgatgccgcctgtgtcgggaaaagcacacctgaaaagatttttcagatcgacaaaaccgtgttgattgtaaaggcagacggtcatggctcaaggcagatatgcagggtaaacaagttcggattcccggacaacagcaaagtcaactga

SEQ ID NO: 1234 - DNA, 260 bp, unidentified
  misc_feature 1..260: note = Ga0376514_000350 JGI
  source 1..260: mol_type = other DNA
gtcaactacccctcggctgaagaccgaggggcttgaaaaagccccaaagttgaccagtctaagtgcttcgagtactacgttagatcgaaaacaggtatcctggggtgctcgccggctccaggttctacggcaagtggttaaacaggtctaaggggttaaacaggtctaaggggttaaaccggtgctgcttgcgccaaacccggtcataacattgacgcggcaaacattaccttggaaacaagaggattttaaaattgagt

SEQ ID NO: 1235 - DNA, 1281 bp, unidentified
  source 1..1281: mol_type = other DNA; note = Human gut metagenome
ttggcgaaggatcattaccggtcaatagaccgcgaggaaactaacttgagagtatatgttttgaacaaacgaggagaaccgctgatgccgtgttcgtcagccaaggcacggattcttctcaaagaaaagaaggcggtggtgaaacggcgcacacccttcaccattcagctcacgatcgccacgggagaaacgacgcagcccgtgaccctcggcgtcgacgccgggtacaagcacgttggactttcggcctccaccaaaaaggcggaactctatgcgtcggaaatcgaacttcgtcaggacgtttccgagcttcttgcgggtcgcagtgctctgcgtcacgcccgtcgatcccgcaagacccgtcaccgtgctccgcggttcgacaaccgcaagagagataagggatggcttgcgccgtccgtggagaaccgcatcggcgcacatgtctctcgcgttgaggcggtcctgcgcatcctgccggtgacgaagatcatcgtggaaacggcgtcctttgacgtgcagcgtctgaagaatcccgacattcagggtgtcgagtatcaacagggcgaacagctcggcttctggaacgttcgtgaatacgtccttttccgagacggacacgagtgccaacactgccacggaaagtccaaggacaaggttctcaacgtccatcacattgagagccggcgcacgggaggcgacgctcccaacaatctgatcacgctctgcgagacgtgccacaaggcattccaccgcggcgagatcgagttgagagtgaaacgcggccgatcgtttcaggcggaaaccttcatgggcgtcatgcgctggacgttcttcgagcggctgcgggcgaggcactccgaaattgaggttcgaaacacattcggttatctcacgaagaacacccgcatcacacacggaattgagaaaactcactgcgcggacgccttctgcattgcgggcaacctcaaggcgaagcggctcggatactacttctttcagaaacagacccgccgccacaaccgacagatccacaagctcacgatcctcaagggtggcgctcgcaaacgccatcagacgccgtacgaaatcaaaggattccgtctttacgacaaggtcctgttccagggcaaaacggccttcatcttcggccgtcgttcttcgggatacttcgacattcgaacgttggacggggagcggatttccgccagcgtcagctacaagaaactgcgtctcttggaaaaacgtcgcacctatttgattgagctcagacgcaactaa

SEQ ID NO: 1236 - DNA, 259 bp, unidentified
  source 1..259: mol_type = other DNA; note = Human gut metagenome
gtcaataacccctgtctaaagacagaggcttgatagccattgtggccttcgagccttgattgactagcctcagtccgccgtaacggactacgttggttgggaatgtataggcaccgcgggatgtagatcctagtcccgcgctctgcggccggcggttaaaagctctgagaggtaggagcggtgccgtcggtgaaaaccccttccaacattggcgaaggatcattaccggtcaatagaccgcgaggaaactaacttgaga

SEQ ID NO: 1237 - DNA, 1197 bp, unidentified
  misc_feature 1..1197: note = Ga0256829_1001599 JGI
  source 1..1197: mol_type = other DNA
atggtaagagttgtaagcatagacggtaaaaatcttatgcctactaatagacatggtaaagtaagaagattgctaaaggataataaagcaaaagttatatgcaaaaatccttttacaattcaattgctttatcagacagatgatgttactcaaaagataacaataggagtagatacaggatataaatttacaggatttgcttttatagcaaataataaagttttacaaaaaggaactattgaactaagacaagatgtttcatcattaattactttaagaagaacattaagaagaggtagaagaaatagaaaaacaagatacagaaaaccaagatttctaaatagaacaagacctgacggatggttagccccatcaacacaaagtaaatacaatcatatcttgaattggatagatagatttactaaatatcttccaaattaccaactaaaagtagaaatagcaaattttgatattgcaaaaattaataatcctgatatagaaaaagagttatatcagcagggaaatatgtatggatatgagaatataaaacagtatttattagcaagagaacatggaacttgtcaatattgcaagaaaaagaagaatgataaatggcatatacaccatatagttccaaaatcaaaaggtggaagtgatagggtagataatttagctttactgcatgaaagttgtcataagaaacttcatgagaaaaatgatactaataaaatatctaagcccaaacagtataaagatgcaacatttatgaatatcataaaatggaaacttgtcaatgatttaaaagccaaatatcaagataaagtatcttttacctttggttatatcactaaaatagacagaaatgatttaggattagaaaaaactcactacaacgatgcaatagcaataacaaaagagatagtcaatgaaaataaaagcaatcctatttatatcaaacaagttagaaagaaaaaaaggtctttacatgaagcaacaccacgaaaaggtagaagaataaaaaatacaactcaaaagagaagctctaaaaatacaaaagggataacagtaaacaataaaaaaatagctttatatgataaagtaaaaataaataatcaaataggttatgtcagtggctttacaggtaaaatggtttatgtgatagatatacaaggcaactatatcaaacagtcaaataaa

SEQ ID NO: 1238 - DNA, 276 bp, unidentified
  misc_feature 1..276: note = Ga0256829_1001599 JGI
  source 1..276: mol_type = other DNA
aatcacctcccctaaatctcagattatagaggaggcttgttagcaatagcaagataatcaatggttgactagactaagttgcctcgcaagaggtcaaactaccttattactgttatcacacctttggatgatacccaagtccaaagctctgtgctgatactgtaaacaaagaggaaactcttagtcagtatcaggtaaaaagcagtaataagattgtcgatgggtaattactccgtaaggagctttacaagattatatataaaggacaaagagatg

SEQ ID NO: 1239 - DNA, 837 bp, unidentified
  misc_feature 1..837: note = GENOME_ACESSION: mgm4799989.3 MG-RAST
  source 1..837: mol_type = other DNA
atgggagaattactccgtaaggaggtgggctatatgttagtctacgttattaacaggcacgggaaaccgctaatgccgtgtaaaccgcagaaggcacggaagctattgaaagaacagaaggctaaagtagttaaaagaacaccattcaccattcagttgttgtacggttcctctggatacagacaagatgtaattctcggtgtagatgccggaagtaagacaatagggctatcggccacaactgagaacagggaagtattttcagcagaagtcgaattgagaacagatattgaggtcgaacttaaagtcaaacgcaactcctcattcagggatgcagactttatgggcataatgcgatgggctttctacgataaactaaaagaactgtattcaaatgtgtctctaacttttgggtacataactaaacacgctcgcattaaacacaatctcgaaaagtcgcaccgtataaatgccaggtgcatctcaggaaacccatcgacaaaagaaagcgattgttggtacttcttcaaacaagtacgcaaacaaaacaggcaattgcacaaaacaaatccgaaaaagggtatccgcagagagaacaaagctcctggatacgtacacggttatcagctgttcgataaggttgaatatcttggtagggaatgttttgtgtttggacgcagatcgtccggatattttgatttgcgtactcttgacggagaagtcgtcagtcgttctgccagtgtaggtaaactaaaacttgtagaaagagcttcatcattattgtgtgaaaggagggaagcgtcatttctcaccgcgctaaagcacggtgtctcctga

SEQ ID NO: 1240 - DNA, 235 bp, unidentified
  misc_feature 1..235: note = GENOME_ACESSION: mgm4799989.3 MG-RAST
  source 1..235: mol_type = other DNA
gtcaacgacccccggcaaaagccgtgagctagtagctcttgttgactagcctaagtgtttcgagcactacgttaccggcaaatgtataggcaccgtaggatgcgttcccaagtcttacgctctgcggttagtggttaaacagttctgatgggtagggacagtgctgctaacgagaaactgtcggataacattggcgatgggagaattactccgtaaggaggtgggctatatgtta

SEQ ID NO: 1241 - DNA, 1668 bp, unidentified
  source 1..1668: mol_type = other DNA; note = Viral metagenome
atgcttcctcagtcccaggctcttgaatccgcgtcagcagacaaccgtaagggcaaggacgaaacgggacacggacgtcgtggaaacatgataactggtatgcaacatggtcgagaggatcgtttcttagagttcacctctctgggagacagtcacactgcaacttcggagcaatccgagggagcagaagcacggggcgttatagccccacccaatagtaccgcatcacgggtgttcgtgcttgacaagcacgggaagccgctcatgccctgtcatccagccagggcacgcaaattacttaagtccggacgagccagagtccaccgactggctccgttcgtgattagagtggtggacagagaaatagagcagtgtgaggttcccggagtcaccataaagattgatccaggttccaagcacaccggcattgtctgtgccagcgtagatgaggccggtataactcatgggctggtgtcgatccagctcgaccatcgcgggcagcttattcacaagaggatggaacagcgggccaactaccgccgtcgcaggcgctcggccaatctacgttatcgtgctccacggtggagaaatcgccacccgcaggcttgccgggcatgcgggaaaaatgcaaagcacaacaaggggtattgcggcccgtgcatacaaaagcgtgatttcgtggataacggatatcgccagtaccgtcttccaccaagcctcttccatcgagtcgcaaccaccacagcgtgggtaaatcgcctgtccagatgggctccggtcacgggtctggcgatggaactggtgcgctttgatactcaggtaatgcagaaccccgaaatttcaggtgttgagtaccagcagggcaccctagcaggttacgaggtacgggaatacttattggaaaaatgggacagaaagtgcgcttattgtggagccagcggtgtgccgcttaacattgatcacgttgttgctcgatccagaggggggactaatcggatatcaaatcttactctgtcctgcagaagctgcaacgaatccaaaggttctgaagacgcagaagtttggtgcaaacgacgcttcggagaacagaacggagagaagattgctcgtaaggtcaccgctcaggcaaaagcatcactcaaggatacagcagcagttaattccacccgttgggcattatggagagaacttctgaaaacgggactgccagttgaaaccggtacaggtgggcaaaccaagtggaacaggaaacgattcggtatccccaagtctcacacccttgatgctctctgcgttggagaggttgataatatcggatcagtgcccaatagcgtgttgatcgttgcctgtacaggacgaggcaagcatcagaggacgacactagacaaatacggttttgtccgttcaaggttgccacgaaccaagactcatcacggcttgcgcaccggggattttgtgcgggcggtggcgtcgaagggcaagcacaagggtgtccatgctggccgcgtaatcgcgcgttcatctggaagcgtctttgtgggtaaggtagatgggatttcttgcaagaactgctcggttttacaacgggcagatggttatggatataatagaaaggaggaagcgcttctcatttccgccctcacggacggggcttccgaggcgcgataa

SEQ ID NO: 1242 - DNA, 223 bp, unidentified
  source 1..223: mol_type = other DNA; note = Viral metagenome
gtcaactaccccgtcctgatggacgaggcttgcggaaagtttccggaagcccaggttgaccagaccgagatattagaaagaaggtgagacaaaatatctacgttgtatacgagtaagaggaccaaccctgggatgcttcctcagtcccaggctcttgaatccgcgtcagcagacaaccgtaagggcaaggacgaaacgggacacggacgtcgtggaaacatga

SEQ ID NO: 1243 - DNA, 1680 bp, unidentified
  misc_feature 1..1680: note = Ga0207433_10050431 JGI
  source 1..1680: mol_type = other DNA
atggctacgttgcacacgagcgagaagacccaccgggggatgcttcctcagtcccctgctctggaacccgtgccagcagacaaccccggggtagggacgaaacggggcacggggccggtacccatcccgggcactggtgtgcaccatggtcgaggggagaccggggatgtgtgtgcctgcgcaccccggcgtcacccgtcgaagaccgacgaaccggtcgagacggagagcggggctgttaccggccctgtcgctgtacccttgtccgtcgcgtcccgggtgttcgtgctcggggtcgacggcgctgcgttggacccgtgccatccggctcgtgcccgcaggttgctcgcctgcggccgggcccgggtggcgcaccacaccccgttcgtcatccgcctgatcgacaggagcgccgagcagtccgtcacccacccgctcgccgtcaagatcgacccaggctcccgccacaccggcatggtcgtcgcccgggtcgacccggagggccgcacccacggcttgttcgccgtgcaggtcgatcatcggggccgccagatctccgagcggctgacagcccgggccggctaccggcgtcggcggcgcagcgccaacctgcgctaccgggccccgcgttggcgtaaccgccacccggccgcctgcgacgcctgtggggcgaatgccatccacggccgccggttctgccgtccctgcgcagccgccaagaccccggggatgggagcgagagagtcccggcttgccccgagcctcgcccaccgggtcgacgggacctgctcgatggtggcccgcctggcccgctgggcgccggtcgctgcggcggtgatggaactggtccgcttcgacctccaagccctcgaggaccccggcatcgccgggatcggctaccagcagggcaccctcgccggttacgagatccgcgagtacctgttggagaagtacagccgcacttgcgtgtactgcgacaggaccggcgtgccgctccaagtcgagcacgtccggccccgttcccgctccggctcggaccgggtctcgaacctggtcatcgcctgcgatccgtgcaacaacgcgaaagactcccgctccgtcgaggagttcttggccgccgaccccgaccgcctggccaaggtcctcgccgggctccgcaagcccctgcgggacgcgaccgcggtcaacgccacccggtgggccctgcaccgccgcctccaggccatgttccccgaccgagtgagcgtcggttccggtgggcgcaccaaatacaaccggacccgagccggcctacccaagacccacaccctcgacgccctctgcgtcggaaggacccacgcagtcaactcgtacccggcgcagttggttatagctgtcgccgtcggccgaggcgtgtactcccgcaccgtccccgacgcctacggtttcccccgcctacaacgaccccgcaccaaactcgcccacggctacgccaccggcgacctcgtcagagcggccattccaaccggcaagtacaccggtacccataccggacgagtgatggtccggaccagcggagcgttcgacgtccgcaccctcaccgggcgagtcggcgccaaccggcggcactgcagtctccttcaacgagccgacggctggagatggtcccgccaggaagaaggacattccaatgactcatga

SEQ ID NO: 1244 - DNA, 310 bp, unidentified
  misc_feature 1..310: note = Ga0207433_10050431 JGI
  source 1..310: mol_type = other DNA
gtcaaccaccccgccctagcggatgggggctagtggcgaagcgattcgctgccagtcccgtccgactagggctggttgaccagaccgagccatcgaaaggaggcgaacagatggctacgttgcacacgagcgagaagacccaccgggggatgcttcctcagtcccctgctctggaacccgtgccagcagacaaccccggggtagggacgaaacggggcacggggccggtacccatcccgggcactggtgtgcaccatggtcgaggggagaccggggatgtgtgtgcctgcgcaccccggcgtcacccgtc

SEQ ID NO: 1245 - DNA, 1335 bp, unidentified
  misc_feature 1..1335: note = Ga0207433_10084486 JGI
  source 1..1335: mol_type = other DNA
gtggaagactccaccttgcagccggttcggctcaagctggaccccggcagcaagaccacgggcatggcgctggtgcgggagtcggaggaggtctatcccgacacgggcgaggtgcagcgcacggcgcatgtgctgaagctggccgatcttcagcaccgcggacacgtgatccgcgaagcgctcacgcagcgtgcgtcgtttcgccgccgtcggcgcggtgcgaacctgcgtcaccgcgcaccgcgcttctgcaaccgcacgcgcccggctggctggcttgcgccatccttgcagcaccgcgccgacacgacgctggcctgggtgcgcaggttgcagcgctggtcgccaatcacagcgctgtcgcaggaactggtgcgcttcgacatgcagttgattcagaacccggagatcagcggcgttgaataccagcatggcacgctccagggatacgaggtgcgtgagtacctgctagagaagtggcaccgcacctgcgcgtactgcccagccacaaacgtgcctctacaggtcgaacacatagttcctcgtgcgaagggcggcagccatcgtgtatccaacctcacgctggcgtgcggaccttgcaacacagccaaggggacgcaggatgtgcgcgcgttcctggcgcaagatccgaagcgcctggcgcgcgtgctggcgcaggccaaggctccgcttcgcgatgcggcagcgatgaaattatttacacaagctgagtttgacaacttacctgtcattgacggagtgaagcaatgccctacgggcgactattcttcggttcgtaattttggtgagaggtgcgtcttcggcgcagaatccattttctgtcgggatagccgcttcgccgattcgtgcattttcggcgaaaagagccgatttggcgtgggttgtagcttctgcgatcggtgcgtcttcggtattgggatccgatttgaaatatggtgcaaattcggcttaggatgcatctttggctcagaaacccgcttcggcgattggtgtggattcggagcggagtgcgtattcggcgatcgttgcgctttcggtgtacagaaccgctttggtgagcgttgcatctttgccgggcggcgtgcgcttccggagaatccgctattggttttccccggagctggaacagatgaccgaattgtatatgcgatcaacgtcgagggtggcccctggatcgaaggttggagtttttcaggcggcattgacgagtttcgtgcaaaagttcgagtcaatggcggcggactcaagtcgcgatacctatcggttgcatatgaggtcgctgcgaagtggtgcccggaaaaggtggaatcgtga

SEQ ID NO: 1246 - DNA, 248 bp, unidentified
  misc_feature 1..248: note = Ga0207433_10084486 JGI
  source 1..248: mol_type = other DNA
taccataacgacgcatcaggagagtacgggactgtttgttgacggggctttttctgcgcaaaccctatgtggcgcgtcctctgattgcgaaacgaagtcgcgttggttgatcagttgcgcgaatttcagcatagcgatgtcgcaaagtcgggttagtggagcgatagaggatgcaatgggtcggcgcaggtcttggttctaggcttcggcgaaaacgccttgcaaatactcaaatcatgtcacgccca

SEQ ID NO: 1247 - DNA, 1404 bp, Cupriavidus basilensis
  source 1..1404: mol_type = other DNA
gtggcagtctttgtgttggataagagcggcaagccgctcatgccgtgcagcgagaagcgcgccagattgttgctcgtgcgccgccgcgcgcgcgtgcaccgcgtaatgccgttcacgatccgcctagtggatcgggggcaggcgaacagcgtcttgcaaccggttcgccttaaactcgatccgggcagcaagggaaccggcgtggccatcacgcgcgaggtcaaggccggcggtgacgagacggctcgggatgttgccgtcctgtctctcgcggaactgatccaccgcggcgcgcagatcagcctgagcctgaccgcacggcgggccatgcgacgtggcaggcgtggccgcaagactcggtatcgtgccgctcgtttcaataaccggcgcaagcccgtaggctggttggcgccaagcctacaacaccgtgtgcagaccacgatggcctgggtgcgccgtttccgggcgctcgcgccgattacagccgtcagcaccgaactcgtccgcttcgacatgcaggcgctgcaaaacccggagatctctggcgtcgagtatcaacaaggcgaactggccggctacgagatccgggagtacctgctagagaaatggggccggcagtgcgcgtactgcgatgcccgcgatacgccgctggaaatggagcatatcgatgcccgggcaaacggtggctccaacagggtctccaacctgacgctggcgtgcgtgccttgcaatcggaagaaggacgcgcgtccgctctctgatttcctgcgcaaggacccggagcgtctcagacgcattctggccaaggcaaagacaccgcttcgcgacgcagctgcggtcaattcgacccggtgggctttgtacaacgcgctgaagaccacggggctttcagtggagaccgggtcgggtgcacgaacgaagttcaatcgccgacgattcgatctgccaaagacgcacgcgctggacgccgcgtgcgttggggtgatcgactcagtttcgggatggcaaaagcccacgttggctatgaagtgctcgggccgcggcgcttaccagcgcacgcgactcaccgcatccggctttcctcgcggctacctcatgcgcagcaagcgcgcattcggctttcagaccggtgacatggtgcgggccgttgtgccgtctgggaagaaggctggcaggcatattgggcgggtggcgattcgcgccaccggctccttcaacattcagaccgccgaaggggtcgtccagggtgtctctcaccgctattgcaagatcatgcaacgcggcgacggatatggttattcgctcgtagcgcaatccacgaaggagagcgggcacaggggcgacgcttcgcgtcgcgcgctatccctcaccggcctgaaggccgatgtttcccgcgcgaactga

SEQ ID NO: 1248 - DNA, 290 bp, Cupriavidus basilensis
  source 1..290: mol_type = other DNA
gtcaactaccccgctctgaagggcggagcttgtaaaggcaactgaaaaggctcgggttgaccaggcaaagcggtaaccaacccgctacgttgtgaataggtgcaagaccaacgttgggatgcttcctcagtcccaacctcttgaagccccggttgcagacaagcgacagggtaagcacgaaacggatcggggcggatcgccggttcgcaacattgccgaggggagacctcccgaaagggaggcgtcactaggcccgtaagggcaactttttaggagagattgcagtggca

SEQ ID NO: 1249 - DNA, 720 bp, Archaeon sp.
  source 1..720: isolate = BMS3Bbin15; mol_type = other DNA
atgcagaagttattgatagagttcaagaacacaccagagaatactcctcaagttctctgctctgtaagtgaggtattaaacagagaggaaactctcaatgtgccctacaaagtactggctgataacagctccgatgaggacttacactctggcaggagtggacaggacttgcgagttcctgtcataaatatgcacaaacaacctttgatgcctacaacaccaagaaaagcaagaatatttttaaaacaaaaaaaagcaaagcaaacactaaaatcagctacatttatgaatatagtaagatggagactggtaaatactctgaagtgtgcatggacttatggctatattacaaaacatgacaggattaagatgaaattggaaaaatctcatgtaaatgatgcttttgtaattgctggtggaacaacccagagcagaagtgtaccatatatgaccacacaaaccagaaggaataataggagtattcagacaaatagaaaaggttttaaacctgctatcagacgacagagatataaattacagcctggcgatttagtaaaatatattaaatatttattcagagtaaaaggagtattcaattatggtaaatgggttagactaatatctttaactaaagcaaataagattattaatgtaaatattaagaaagtggagttggtaaaatatgggaaaggaatccaatttaaaaaagatggaaattag

SEQ ID NO: 1250 - DNA, 250 bp, Archaeon sp.
  source 1..250: isolate = BMS3Bbin15; mol_type = other DNA
gtcagtcacccacggctaaagcacgtcttgtcccgtgaggggcaggagcaattggttgattaggaggcattatatatgcagaagttattgatagagttcaagaacacaccagagaatactcctcaagttctctgctctgtaagtgaggtattaaacagagaggaaactctcaatgtgccctacaaagtactggctgataacagctccgatgaggacttacactctggcaggagtggacaggacttgcgag

SEQ ID NO: 1251 - DNA, 1173 bp, unidentified
  misc_feature 1..1173: note = Ga0209591_10003844 JGI
  source 1..1173: mol_type = other DNA
atgaaagttttcgtagtcaacaaagatggtcgtcccttgatgcccaccacgccccgcaaagcgcgaatcttactcgaaacagggaaagcaagaattattggtcgcgacccatttacgatccaattaatctacggcagtgctggatatgtccagccgataactctcggtattgatactggttatctcacgattggtttcagcgctgtgagtgtaaaagaagagttgattggtggagaattaagtttgcttccatctgtaagtgaacgcttaactgagcgaagaaaatatcggcttggacgccgaaatcgactacgacatcgcgcttccagattcgataaccggcgccgtccggctggctggttagctccgtcaattcaacacaaacttgatgctcatatcaaactggttgaacggattaaatctcgactacctatcagcaaggtcatcgttgagacggctagttttgatatccagaaaataaataaccctgagattgagaaagcagggtatcagactggagagcagatgggctatcacaacttaacagcatacatacgtcatcgagatggctataaatgccagaatcccgaatgcaatagtaaacccagtaccccaactcaaatccaccatttaggttactggaagtcaaaccctgaccggagtgatcgaccagcaaacctgattactctatgcgttaaatgccatacaccagtcaaccataaacaaggcaaacttctacatggttggaaggctcatgttaaaagcttcaaacccgaaactttcatgaccacaatctatcggcggttgctgaatgttttaggttcaggggaagccttcggttttgaaaccaagttcaaacgagaggaacagaaattagagaagtctcatcacaatgatgctttcgtgattgctggcgggacgaatcagtttcgctccgaaacactggtcttagagcagattcggtgtaacaaacggtcgatggagcaattctacgatgcgaaatatatcgatactcgaacaggcgagaaggtgtcaggtagtcagcttttttctggtcgtcgaactcggaatacgaacctgaatggtgagaacttgcgagtctatcgtggagtgaagatatcactcatgtcagcgtcgaatcaaacgacaacggtatcgattcaatccgaatga

SEQ ID NO: 1252 - DNA, 299 bp, unidentified
  misc_feature 1..299: note = Ga0209591_10003844 JGI
  source 1..299: mol_type = other DNA
gacaactccacacactgaacgggataccgttgcagtgtgggcttcttaagaaatcaagaagcgtgtcaatagtctcagtaattcatcaagccagaattactacgttatttcagaatatataggcactttgggatataggtttggcagccgagttctagtcccagacactgcggttaatcattaaatattcctacggcgagagggaaagtgtgattagcattaaacctggagtaacattggcgaagaacaccactcgcaagagttaagttatttgttaacttacaacttaaatcatgaaa

SEQ ID NO: 1253 - DNA, 438 bp, unidentified
  source 1..438: mol_type = other DNA; note = Ga0307929_1002028 JGI
atgccgacccatccgaccaatgccaggattatgctcaagcaggaaaaggcccgggtgattcaaagaaccccatttacgctccagcttttgtatgacaccacagaccatattcaagcggtcaccgtggggattgatgacggagggatcaatatcgggattgcagctatttcccacggcaaggttctatttcaacaagaacttcttttgcgctcggatatcaagccaaaatcaaagggcggaacggacaagctgtcaaatctaatgaccttgtgtaaaaattgccatgatcaacatcactcaagtcaatctacgagaagtgatgttaatatgcagaaaccaaacaaccataagccagtagcgccaattcctcctccactgaatcagagattcagaaggggactccttggcggagagttgaatgaggtggtttggtcataa

SEQ ID NO: 1254 - DNA, 366 bp, unidentified
  misc_feature 1..366: note = Ga0307929_1002028 JGI
  source 1..366: mol_type = other DNA
gtcaactacccctcctgaatcaaagattcataaggggcttgtaaaagcccaagttggctagccgaagtcttaactgactacgttcggcaggatatagatacctttggacgtaatcgccagtccaaagccctatcgtggctctgtaaaagcgctgtgaggtagataaccacattgcgaagcctgctgaacattggcgaggcgaaccttacccctctttacgagggtgataataaccgaaaggtttttttggcatccttcatatgacatccaaagtactttacagtttttttggaaaaagtccctgcaaatggagattgccctaaaaaagtgtaaagtgtttttgaaggatgccgtttttttatgcaa

SEQ ID NO: 1255 - DNA, 1050 bp, unidentified
  misc_feature 1..1050: note = Ga0208461_1018587 JGI
  source 1..1050: mol_type = other DNA
atgttagtatacgttttaaataagcatggtaagcatttaatgccatgtaaaccttcaaaagccagaaaacttttaaagcaaggcaaagcaaaaatagtacaaagagaacctttcacaattcaacttatttatggtagtagtggatacaaacagcctattacattaggtatagatgcaggaagtaagtttattggagtgtctgctacaacagaaaagcaagagctattttcagcagaagtagaattaagaaacgatatagtgcaattattatcagaacgtaggcagtatcgtagaagtaggagatatagaaagacaagatatagaaagtcacgatttctaaatagagtgcgaagtaaaaataaaggttggttagcaccttctattgaaaacaaaatacaagtacatttgaaaatagtagaaaaagttcataagatattgcctataactaaaataattacagaagtagcttcctttgatatacaaaagattaaaaatcctaatatagaaggcgtagaatatcaacaaggtgaacagttaggattttggaatgtaagagaatatgttctttggagagataatcatacttgtcaaatttgtaaaggtaagagcaaagacaaaaggttaaatgttcatcatatagaaagtaggcaaataggtggaaatgcacctaacaacctcataactttgtgtgagacctgccacaacaaatatcacaaaggagaactgaaagttaaattaaaaagagggcaaagttttaaagatactgcatttatgggtattatgagatggacgttctataacaggttaaaaaatatctatccaaatgtagaattgactcatggatatataacaaaaaacaccagaattactcataagttgcccaaatcacacagaatagatgctttgtgtattagcggtaatccaacagcaaaacaattagattattggtattacattaagcaggtaagaaaacataataggcaaatacacaaagctaaaatactaaaaggtggtataagaaaattaaaccaagcaccttatttagtaaaa

SEQ ID NO: 1256 - DNA, 236 bp, unidentified
  misc_feature 1..236: note = Ga0208461_1018587 JGI
  source 1..236: mol_type = other DNA
gtcaactcccccaccctatagagggtggagcttgtaaaagctcaagttgactaccctaagtctttcgaggactacgttatataggtcataacacctacgggcgtttctcctaaccagtagctctgttgcttaactttaaacaatcctgtgaggtagggatagtgagttaaatgtaaaaagcctatataacattggggaaggggacattactccaaaaggaggtatactttatgtta

SEQ ID NO: 1257 - DNA, 1212 bp, unidentified
  variation 920..1100: note = n represents any nucleotide
  source 1..1212: mol_type = other DNA
atgctatggaaattttacagattgattggaaggacatctgtccgaccaatcagtctggcttaccgcaaaaaggagttatttatgagaccagtatacgtactggacatgaacggcaaaccgcttatgccaacctgccgcttcggcaaggttcggcggatgttaaaatccggcgaggtaaaggtggtggataccttgccgttcacggtccagttggacagaccaacgaagactcatgtggtgcagtcagtaacactcggctgtgaccctggtagaacaaatatcggattggctgcagtccgttccgacggaacggatttataccgatcccattgtgagacaagaaacaaggaaatcgtcgatctgatggacgctcggcgagcagcaagacgggcatcacgtcgaggagagcgactggcgagaaaacgtctggcagctaagcatgaaacggctacaacttttccggacggtcggaaactccccggatacgagaaacccatcatgctaaaggacatcatcaatacggaagcgcgattcaacaaccgtgttcgcccggcaggatggctgacacctacagcaacgcagcttcttcggacgcacctgaatctgataaaacgcatatctcgcattcttccggtatccgatattgcgttggaaatcaacaagtttgcttttatgcagttggacgaacccgacaaaaacaaatggaatatcgacttccaacatggaccgttatacggtaccggtggactgaaggctgccgttcgacagcttcagaacgatacctgtctgttgtgtcaagaaaatgtcattgagcattttcatcatcttattccgaggagcaagcgcggagacaataccatcaacaatattgctggtttatgccagaagtgccatgaagctgtacataaatccgccgatannnnnnnnnnnnnnnnnnnnnnnnnnnnnnnnnnnnnnnnnnnnnnnnnnnnnnnnnnnnnnnnnnnnnnnnnnnnnnnnnnnnnnnnnnnnnnnnnnnnnnnnnnnnnnnnnnnnnnnnnnnnnnnnnnnnnnnnnnnnnnnnnnnnnnnnnnnnnnnnnnnnnnnnnnnnnnnnnnnnnccgccgatacggcagagaagttgtcgaccttaaagaaaggtcagacaaaacgttatggcggcacggctgtgttgaaccagatcattccgaaactcgtggaagaactgggtaa

SEQ ID NO: 1258 - DNA, 219 bp, unidentified
  source 1..219: mol_type = other DNA
gtcaattacccatgactaaagtcacgggcttgcaatagtctgtgatgatttcagagtaattgagcagagcagtgacacattattcgcccggacggtgttccaagcctccggcaccggttagatgtgcctatgctatggaaattttacagattgattggaaggacatctgtccgaccaatcagtctggcttaccgcaaaaaggagttatttatgagacca

SEQ ID NO: 1259 - DNA, 390 bp, unidentified
  misc_feature 1..390: note = Ga0163147_10029708 JGI
  source 1..390: mol_type = other DNA
atgcaacgtgtattggtgaccgacaaaaacaagcaaccgctcatgccctgtcatccggcatgggcgagagaagtgccccataaggggaaagcggcggtctaccgtacttttcctttcaccatcatcttgaaagaacgtgagggctaccgtcttcgtcagaagcgccatttcggttttcaaacgggcgacatggttaaagccatcgtccctgctggcaaggttgtgggaacgcatagtggtcgcgtggcttgccgtgcgacaggcagtttcgacatcagcacctctttgggaaaagcagccggcgtttcacaccgtcactgccgcgtgctacaccattcggacggttacacttataagaaaggacaaggcgctatccctccccacgcctaa

SEQ ID NO: 1260 - DNA, 479 bp, unidentified
  misc_feature 1..479: note = Ga0163147_10029708 JGI
  source 1..479: mol_type = other DNA
ataagcatccccacgcctaaaggcggggcttttagccctaatgcttacccgactcagcctcttgcgaggctacgttagcggcgaaactataggcacttcgggatgctacgccagtcccgaactctgcggtgaacgattaaagagaatgcttgggagcaaacagtgtcgttcgcgccaaaccgtcgcataactttgtctaggcgtgactacccaggtataaaaacagaataaaataaacagagaggcatgaagacgtgaagaaaaacaggaaaatacccctcgaaacgtggatgtaggggtggattaggcgcttgtcaatcgttcgttaacatgaaggttcgcgtgccgaatatccacccatttgccgccaacggtcatttcttcctttattatcgaccgtttttcagcctgagcagttacgtctgggcaactttaccccccgtaagggaagaaaagttgaggtaactcaaatgcaacgt

SEQ ID NO: 1261 - DNA, 1122 bp, unidentified
  misc_feature 1..1122: note = Ga0137385_10022959 JGI
  source 1..1122: mol_type = other DNA
atggcggtttttgtcctagaccagcgccaccagccgctgatgccttgctcagagaaacgggcacggctcttgcttggtcggcaacgggccgtcgtgcatcggagagcgccttttgttattcgcctgaaagacccgacgcgcgcacagagcacggtgcagccggtcgctttgaaacttgatccaggcagcaagacgaccgggatggccctggtacgtgtccaagagggagaggaaggcgaagtccatcagcgcggcgaactgttcggatgggagattcgctcgtatctgctggagaagtttgggcgccgttgcgtctattgtgggcggggccagatggcctttgagatcgagcatgtggttccaaagagccgaggcggatcagaccgggtgagcaacctcgtgctcagttgccatgagtgcaatgaggccaaagggaacaggaccgccgcagagttcggccacccccaggtgcaagcgcaagccagaactcccctgaaggatgcggcagcgatgaatgcggcacgctttgcgctggtggcaacgctgcggcaggtcggcctacccctcgacacctggagcggcggacgcacgcgctggaatcgggatcgctttgggatcgagaaggatcactgcctcgacgccctatgtgtgggcgagctagcaggggtcgagctccctgccttgtgcatcctgaccatccacacacaaggccggggcagccatcagcgcacgaatgtggacgctgtcggctttccgcgcggctaccgaacgaggcagaagcgcattcgaggtttttcgacgggtgatctggtgcaagctgtggtgcctgctcctctcaagacggcaggggtgcgtgtggggcgggttgcggtgcgcaaaagtggctccttccgtgtaggcaagatcgatgggatcaatgcgaagtacttggccttgatccagaaggaacgcctgcttcctctccgcgaatacattcgggggcatccgcaggcggaggtgggtcaacatgccaacactgctacaacgtatccagcacaggtggcgcgtgaggagccggcgtgtagggacgcgatttatcgagtcctcaaaggtgagcaaggagcccctggaacaggaagatga

SEQ ID NO: 1262 - DNA, 322 bp, unidentified
  misc_feature 1..322: note = Ga0137385_10022959 JGI
  source 1..322: mol_type = other DNA
gtcaacgaccccacgcgtgaacgcgggggcttggagtgtaactgcaagtccgtcgttgtccagccttagcatccaatggctcaggcagccaggtgcggatgctccgttggatgggtcagggcaccggccaatgccacctcagttggccgctctgccgttggtcgttaatagctcgttcggggtatcgagcggtgcggccagcagctcaagcccatttaccattggcgagaggggttgcctgggtcagccggcccgaggcgcgtcaccagccccgtaagggggtctcgcaagagacagcaagaaaggatcgtccaagatggcg

SEQ ID NO: 1263 - DNA, 1317 bp, unidentified
  misc_feature 1..1317: note = Ga0376681_0062128 JGI
  source 1..1317: mol_type = other DNA
atgtcgaacgtttttgtgctcgataccaacaagcagccgctcaacccggttcatccgggccgggcccgtcttttgctcaaagaaggcaaagcggcggtgtaccgcaggttcccgttcacgttgattctcaaccgagccgtcaaggagcctgacctccagctgttgcgggtcaagatcgaccctggcagcaagacgagcgggatggcgctcgtgaacgacacgacagggagggtcgtgtgggccgccgaactgacgcatcggggtgagcggattcagcgcgctctggacaagcgtcgcgcggtgagaaggagcaggaggcagcgcaagaccagataccgcaagccgcgctttcagaaccgccaccagcgcaagggcaccctgcccccgtccttagaaagtcgggtgtgcaacgtgctcacgtgggtgtgccgtctgatgcgactgtcgcccgtgcgtggcattagccaagaactcgtacggttcgatacacaggcgctagaaaacccggatatcgagggcgtcgcataccaacaagggacgctctgcggctacgaagtgcgtgaatatgtcctgctcaagtggaatcaccaatgcgcctactgtgacggacgctcagtcccattggaactggatcatgtccacccagcgagccgacacggctccaaccgcgtgaacaacctggtcgcagcgtgtacatcctgcaatcagcgtaaaagcaatcaggatgtacgcgacttcctcaagcatgagccggagcggcttgcacgcatcctggcgcatctcaaagcgccgctccgagacgcggcagcagtcaacatgacgcgctgggcgctctacgggcggctcaaagggcttggcctgccagttgaatgcggcagcggcggcaggaccaagtacaaccggacggtgcgaggactgcccaaaacccactggtgtgacgcggtgtgcgtgggggcgagcacgccaaagcgtcttgacgtgagaggcgtgaatccgcttcagatcatggcgacggggcatggctcacgacaaatgtgccgcatggacaagtacgggttccctcgtaccggccccaagcaacacaagcgcgtccagggattccagacgggcgacctcgtgcgcgctgtggtaagaagtggcccgaagcagggaacctatgtgggtaaagtggccgtgcgtactcgtggcatcttcaacatcaccacggcgcagggcgtggtcaccgacattcatcatcgtttttgtgtcctcatcgcgcgcagcgatggctatacctatcagcagcgaaaggaggcggcgtttcctccctccgcctga

SEQ ID NO: 1264 - DNA, 305 bp, unidentified
  misc_feature 1..305: note = Ga0376681_0062128 JGI
  source 1..305: mol_type = other DNA
gtcagagacccgtcccgttgaacgggacgggcttgcgtggagacatgcaggccccgctctgaccagtctcagccaccagccttcttcttcggaagaggactgacggggctccgttggaagcgaatgcataggaacgtccgggtacttcaccagcccggaccccttcgggactgcattaaacaggacgagggagtaagccggtgtgtggtccatctgaaaccgcttcacaacattgacgaggtgagcattaccctggcaacaggaggcccatctgggcagaacaaaaggaacgatggatgtcgaac

SEQ ID NO: 1265 - DNA, 1485 bp, unidentified
  source 1..1485: mol_type = other DNA; note = Human gut metagenome
atggatattgcttatgttttggacaatcaaggcaacccgcttatgccaactaaaaggcttggtcgggtgcggcaccttttacaggaggacaaggcagaaattgcttgttataaaccctttaccatccagctgaaatatgaaagcactcactttgtccaagatctatatgtaggtattgatcctggacgaaccaatattggccttgctgtagtcaacggcaaaggtgaagtgttttatgcggctaatgtcactacgcgtaaccaagaaattcctaagctgatgacagaccgtgcgcaacatcgcaaagcctctcgtagaggacagcgattagcacgtaaacgccttgctaagcgaaataatactttaactgagtttcctaatggccgtaagcttccaggatacaaggatggcaatatgccagttaaagacatcatcaacaaggaaagtcgctttaataaccgcaagcgttctgctagatggcttactccaactgcaaaccagtgtgtgcgtactcatataaatttggctaagcacatcaacaagtttatgcctattaagagctggactatggagtacaacaagttcgcttttatgcaactagatgatggctcggttctaggagctgactttcaaaatggtactctcaaaggctatgctagagttgaggattatgtcttcgatatgcaagggggatgttgtgctctttgtggtaagccaatggataaaaataactaccattgccaccatatcgaccctcaaagtaaaggaggcagcgataaggcatataaccgtattggtttatgcgactcttgtcatggacagcttcatcaaaatgaagcatggctagaagagaagggcaaacgcaaaaagtatgcaggaacgtccataattaatattgctatgccttttatatatgaaggtctagtgcagttatttggcgatgataatgtgcatatatgtagcggttttgatacagcccatcttcgcgaatacatgcatatgcctaaagaccattttgcagatgctatttgtatagcctgtattggcgctcatatcgaaccaaagtacgataacgacaagcactttgaaattcatcaattccgttgtcataaccgttcgctcatacactctcaaactgaaagaacttataggtacaaaggggaaatcgttgcaaagaaccgtacccctcgttttgagcaaaagggagactctcttagtcagtggcgcatcaaaatggccaaacaatatggagaggctaaagcccaaaggatggtgtcacagcttgaagtgacaaagtctatgcgccgatacaatagcttaaagagagctatgccagggtctatctttatataccaaggtaagagctttgtattaactggccagctatcaaaaggactatactatcgcgcttttggccaaggcaagaaaaatttccctgctaaggaatgcaaaatcttaggcagacgatcattagtttatgtgtaa

SEQ ID NO: 1266 - DNA, 255 bp, unidentified
  source 1..255: mol_type = other DNA; note = Human gut metagenome
gtcaactactccatcctaaaatgagcctagctcattttcaggatggagcttgaaacttcggttttagttgagcagagacaattacgacacagaaggattaagttctcaaccaccttggggtgtttaccaagcccctcgctctgggcgtatctgtgccgagtctatggtacttttacgttatatcttgttaggcattatgtttgacaagatatggcgcattaaatttatttttatagtggatattgaatggatatt

SEQ ID NO: 1267 - DNA, 1251 bp, unidentified
  source 1..1251: mol_type = other DNA; note = Human gut metagenome
atgtgcaacacaggaaggatgtgcattggtattgatactggttcacagcatattggtgttgggattacctgtggagacagagtgattcttaaggatgaacatgcgcttcgttcgtctatggagaaacgttccctgttagcgacaagaacagtaatgcggcgtgggcgtagataccgtaaagtacggtatcgtaagccgaaatggagacatcatacgaaacgcatgtattttgaaaaagcaaaccgcagaggacagcattggagaaaagtaaaaacaaccacacagtcaccaaaactaaaaggatggctgccgccgtcactgcagtcgaagtgtgaccatcatttccgtatcattgaccggtacctgaaataccttccggatcctatcacaagaaatctggtgatcgaggccggtcggtttgatatagcccggatgaatgacccaacgatacatggagagatgtaccagcgtggaccgatgtatgatgcagaaaacctgagagcatatattttcgcaagggataactatcaatgcgcctgctgtaaggcaaaagcggggactacccgtaaggcagatgggacaacagtaaagctggttgctcatcatatcctgttccgcagccgaggggcaacagataatcccaaatacatcatcagtgtatgcgaccactgccatacaacaaaagcacatcaacccggcgggatcctgtattcctggatggaaaacaataaaaaggttgcccgtggattaagggatgctacttttatgaacatcctgagaaagcgtttatttgccagatatccacaggccgcatttacctatgggaatataacggcagctgaccgaaagcagttacgtcttccgaaaagccatgcgaatgatgcggtggctatctcgctgtttgggaaagaggcttctactgtcaagaatatctgtcagactatgcattacaaacagatacggaagtccaaacgctccctgcatgaagcaatcccaaggaaaggaaggaagaacccaaatacgaaggcagtccgtaataagaaaaatacaacacaggcgaatggatttaagttatgggatagtgtacttgctgatggaaagaagctgttcatctgtagttttactggaacaagtgcctacttaattgataaaaatggctgttatatatcacagcccggaaaaacatataaacaatggccattatcaaaactgaagcggttacatcccaatggtaactggctgatggcataa

SEQ ID NO: 1268 - DNA, 326 bp, unidentified
  source 1..326: mol_type = other DNA; note = Human gut metagenome
gtcaattacccaccgcttagatctctaaagagatcttgaagcgggggcttgcaagagccatttgactagcctcagtgattttagtaagtctgtgccgggatgccggaggcagatactgccagatgaactacgttatgagtgtcatgataccgccctgtgaaccctagcagggactggtatccgggcaactgatcatggcgtgggaagccatacagacccgaaggatcaagcctcatgacattggcgaagggaccttacgcagacatgcggcagggacggtttcattccctgtattatgtaagaacagaaaggagactcttatgagt

SEQ ID NO: 1269 - DNA, 309 bp, unidentified
  misc_feature 1..309: note = Ga0400264_0001320 JGI
  source 1..309: mol_type = other DNA
atgtcggtcttggtactggatagacgcaagcaaccactgatgccgtgcaccgaaaagcgcgcgcggcttctgcttggccgtggtcgggcggtggtggtgcgtgcgtatccgtttacaatccggctgaaaaaccacctgggcaggctggattgcattctaaaacagtgcaaaaagcccttaagagacgcctctgcggttagttcaacccggtgggcgctgtatcagaccctgaagaaaatgggcctgaaggttgaagtgggtactggcggtcgcaagaccggcagtttcaacattcagacaaacagcggt

SEQ ID NO: 1270 - DNA, 295 bp, unidentified
  misc_feature 1..295: note = Ga0400264_0001320 JGI
  source 1..295: mol_type = other DNA
gtcaactaccccgccttaaatgacggagcttgcagagaacaccctacatgccgggttgaccagggaaagcggacacccacccgcaccgtttatcacaggtcgctaagacccaccgccgaatgcttcctcagttcggcgctctggaagactgggatcacgctggcgaaaggtaaagcgctgaaggttccggtcgccgcgcaagcgggagccggtgatagacattcccgaggggagagaggcttcggcctccgtcacaaggcccgtaagggcattcattgaaaggaaagtaatgtcg

SEQ ID NO: 1271 - DNA, 1332 bp, unidentified
  misc_feature 1..1332: note = TB_FS06_10DRAFT_1000002 JGI
  source 1..1332: mol_type = other DNA
atgtctcagaactacgtcttcgtggttgatgcgaagcgtcaaccactcatgccgtgcacgccagggcgtgcacgtgagttgcttaccaagcaacgtgctgcggtcttacgtcgcacaccgttcacgatcgtcttgaaagatcgagtcggtggcggtattcagccgctagatgttaaactcgatcctggctccaagacgaccggacttgccctggttatccacggcaagaacgggtcgcgagtcatctacgcgcttcatctccatcatcgaggtaacgcgattcaaaaagcactccttcagcgacgtagctatcgtagcaaccgtcgcgcgcgtcacacgcgctatcgcgctcgtcgcttccttaatcgcactcgtcgtgacggttggctcccaccatcggtgcagtcgagggtggatcacatcgtgacgtgggtgaagcgacttcagcgcttcaccccactcaatatggtcttcactgaacatgttcagttcgacctccaaagacttaaacatccagaaacacgccacgtcactccaggcacctcagacaccttcgggatggagatgcgtagttacctacgcatggcacataactacacctgtcaatactgtcatggtgcgagcggcgataaacgtctcacctgggatcatatcgtccctcgctcgcgccacggctccgacagcctcgataatgccacgcttgcatgttacacatgcaaccagtctaaatcgaatttatcgatagaggcttggatcgcgtcgctcacgacttccaacgcacaccataccgcgatccgtcagtatgcacccaaggtgcgtgcacagcgtcgcacgctacgcgatgccgccgctgtcaactcgtccaacaacgcgttgtttaaatcgctctcgacgttcgttccgatagtgcgtacaccctcctgggtgacacacatgaaccgaacgtcgttacgtgctcctaaggagcactgggttgatgccgcctgtgtcgacacgccaccctcttgccctatcgacccaacccttaagccccttaacgcccatgccgtcggtcacgtgtcgagacgcatggtgcgcaccgacagttacggcttcccctcaacacgtccgaagggttcatccacccttcgcggtgtccgtaccggtgacatcgtcacttacaccttgatgtcaggtcgtcgtcaaggtgtcacggacacgtcacgcgtgacttcactcgtacatacgacaaggtctctacgcgtgacatacggtgggatgtcgatcgacatcccgtcatcctctccgatcaccgtctgttcaagaacagacggttaccgttacactcactga

SEQ ID NO: 1272 - DNA, 299 bp, unidentified
  misc_feature 1..299: note = TB_FS06_10DRAFT_1000002 JGI
  source 1..299: mol_type = other DNA
gtcagtgagtgatctatcagtcagggtcttccctgaccctgactgatagatggatccttacggatccttgatgaccagactcagtgcacgcaaatgcactacgttcagcaggtcatgacaccggaggatgtctgatccagtcttccgctctgtcgtgtgtcattaaaagagatgagctcaacgtctcggtgtgacacacacgacaagcctgctgaaccttgtcgaggaccactttacacgcaagtgtgtgaggtaactcacagtgtttttataggaacctctttatgtctcagaactac

SEQ ID NO: 1273 - DNA, 1191 bp, unidentified
  misc_feature 1..1191: note = Ga0206350_10291578 JGI
  source 1..1191: mol_type = other DNA
atgagcaaagtttttgtagtagataccaacaaacagccattaaatcctgtcaatccaggacgagcaagagtactacttgacacagggcgtgcggcaatcttcaaaatgcatcctttcagtataatcctgaaggttgccatagaagatcccattattgcagagttgcgcatcaaacttgatccaggctcaaaaacgacaggcatagccatcatgaacgacgcaaccggagaggttgtttttgctgcagaactctcccacagaggacagcaaatcaaatcagatctagacgatcggcgtggtgtgcgtagaggcagacgaaatagacacacacgctatcgccagcctcgttggcagaatcggaaacgaccagaaggttggttgccaccatctctgcagagccgaatagccaatgtcatcacttgggtacagcggcttgcaagagtctgtcatctcacaaacattagtctagagcgtgtcaagtttgacatgcagtttctagaaaatccagagatctcaggcattgagtatcaacaaggaacactagcaggatacgaagttagggagtacttgctagagaagtggggacacaaatgcacctattgcggaaagcaagatatccaacttcagattgagcatataattccccgtgccaagggtggttcaagccggatctcgaatctctgccttgcctgcgagaagtgtaacagagccaagggaacgaaggacatcaaggacttcctcaaaaagaagccagaactgctcttaaagatcttagctcaggccaaagctccacttcaggatgctgcagcagtcaactcgacacgcaaagaattgcatctgagactagaagctctgggattaccaatcgagtgcggatctggaggactcaccaagtacaaccggactagacgtgagcttcccaaaacacactggatagatgctgcatgtgtgggcaagagtactccagagtgcatcgaaatcaggggtgttgttcccctagcaatcacggcctatgggcacggatcgagacaaatgtgcttgatgaacaaatacggcttccctcgcacagacccaaaggagaaacatcccaaacacggatttaagacgggcgatatggtgaaagctatcgtgccacatcatctcaagcgtgctggtacgcacattgggagaatgtcagctaaggcaagcgga

SEQ ID NO: 1274 - DNA, 280 bp, unidentified
  misc_feature 1..280: note = Ga0206350_10291578 JGI
  source 1..280: mol_type = other DNA
gtcagggacccgatcccctaaaggggatgggcttgcagtaatccttcggggttgctccgagcttcacctgtccagactcagctagataactagctacgttagaggcgaaattaggtaccagagggtgcgaagccagcccgatgctctacggttgcaggttaaacaggattacaagggttagtgccagtgcttgcaacgtcaaaccgctttctaacattgtcgaggctaccatcacctacgaaagtagaggctccttggagcaaacaaaaagatgagcaaa

SEQ ID NO: 1275 - DNA, 1362 bp, Janthinobacterium sp.
  source 1..1362: mol_type = other DNA
atgggtatttttgtactggataagaaaagccggccgctgatgccgtgcagcgagaagcgggcgcgcaagctgctcgattgccgccgtgcgcgggtgcacctgctgttcccgttcagtatcggcctagttgaccgtttgctggaggacggagtcctccagccgctgcgtctgtccgatgatccgggcagcgtcaccagcggcctagccgtttgccgcatcgaagaaggcgatgtcaacgacatgagcgatgccgctggcattaatgccccggtcatgcacatcctgtgtttgatggagttggtgcaccgcggcccagccatcaagaagtcgctgcacgcacgttccagcatgcgccggcgccgccgcggcaatctgcgctaccgcgcgccgcgtttcaataaccgtacccggcgcaaggtatggctggcgccatctctgcagcgccggatcgacaccaccatgtcctgggccgcgcgccggcgccgtttggcgccaatcacgcacctggcgcaagagcgggtgcacttcgatatgaggaagatggaaaatccggagatctgcggcgtaaggtatcagcagggtacgctattgggctatgagatgcgcgaatacctgttggataaatttaaccgcagctgcgccgattgcgatgcaaccggcgtgccgctgcagatggcgcacatcgacgccgaggccgatggcggctcgaatcgcgtcagcgacctgacgctggcctgcgacccatgcaacaagaatgcacgcgatatccgcgagtttcaaaagaaagacccggtgcgcctggcgaagatcctcgccaaagcgaaggcgccgctacgcgacgccgcagcggtcaatgccaccaggtggacccggttcgaggccctcaaaaagaccggccttccggcagaaactggcggcgggcacaccaactggagccgctcgcgtctgggccttccaaaaacgcgcgcccacaatgccgcctgcgtcggcattgtgggcggcataggcggcacgcgtgcgccgaccttgcgcgtcaaatgcaccggctgcggctcgcgctgcaagacgcgcctgaaccaatatggattccggcgtgccgacctaccctccggcaagggtatccacaagggccgcgtggcgctccgaatgacgggtaatttcaacatccagaccggcatcgcccacgcgctgacggttcggggcttctcacaaaagcattgcagtgtcattcagcgcgcagatggttatggctatgtctggcaaaaagcaattcaactatcaaatttaagagctccgagcgcttcgcggtcggctcctgccctccccgccgtgaacgccggggtatctcggagcaacatctga

SEQ ID NO: 1276 - DNA, 288 bp, Janthinobacterium sp.
  source 1..288: mol_type = other DNA
gtcaacgacccgccctaagggcggagcttgaaaggcgcaagcctcgatcgttcaggttgccccggaaaagtgccaagcaagcctggcacttgcaagtaggtacaggagcgacgccggtatgcacgaaacggaccgtaaccaggcagcaaaatagcgttgccatagccggattacaacattttccaagaatggcggcgccgtcctcaagggcggcacccgacatcgggcgcgtaagcccacgccggtcgcagattttgcggccggcaccaaccaaggagtcgcatgggt

SEQ ID NO: 1277 - DNA, 1659 bp, unidentified
  source 1..1659: mol_type = other DNA
atgactacgtttcccgcaggcgagcagacccaccaggctgtgcttcctcagcagcctgctctggaatccgtgggagcagacacccctgggagcagggacgaaacggctcacggacaccccgccgccgcgcggggcgccggcagggaacatgggcgaggggagaccgacgggcagggcaccggagcctgtcggcgtcacgccaagcgcgctgccacggcagcgaaggcggcagagaacgggagcggtgacgctcccccacatgagcagtcgtacgacggtggcgtgggcgaaagcagagtcttcgtactctccaaggaagggcaaccgctcatgccctgccaccccgcccgcgcccgcgaactcctcggcaaaggacgggccgtcgtcgcccgacaagtgcccttcaccatccgcctcaaagaccgcacgctggccgactcggaagtcgacggcgttcagttacgcatcgaccccggctccaaaggcaccggcctcgccctcaccgacgagaagaaagaaaccagcggacaaggcaccacagtcagcatccggcgcggactggtctcagtcgaactccaacatcgcggcgaccagatccacaagtgcatgcaacagcgcgccggctaccgacaccgacgacgctccgccaactgccgctaccgagcccgcagatcgaacaaccggacccaccccgaaaggtggctaccaccctcccagcgccaccgcgtcgacaccaccttctccatggccagccgcctctgccgctacgcacccgtcaccgagatacacgtggaattcgtcgccttcgacacccacagcatgagcgcaggcagacccctcaacggcgtcgagtacgggcagggaccactcgccggaaccaacactcgcgcctacctgcaagcccaatggaacaacgcctgcgcctactgcgacgccaccggcgtccccctcaacatcgagcacctcacaccccgcagccgaggaggctcgaaccgcatctccaacctcgtcctcgcctgcgtcccctgcaaccgggccaagggcagccaacccatcgaggtcttcctcgcccacagacccgaccgcctcacgaaaatccttcagcaggtcaaggcacccctccatgacgccgccgccatgaacgcgacccgatggcagctcatcgaggcactgggcaccctcggcagaccggtgcacacctggacaggcgaaggcaccaaggaaaaccgcaatgccatggggctgaccaagacgcacaccctggacgctctgtgcgtcgggcctctcgatcacgagagcggcgacgcgatcgtacggttccccgagcaggtcctcgtcgccaaagccaccggacgcggctcctacacccgcaccaccccggaccgctacgggtttcccaggctgcggcgcgcccgaaccaagcagcacttcgggtatgtcactggagatctcgtacgtgctgtcatgcccatcggcaagtgggcagggacctggaccggccgcatctcggtgcgagccagcggacagcacagcctcacgacgccgatgggcagattcaatgtctcccactggaatctgcggcttctgcaacggggcgatggctacggctacagcacgcgatcggaatcgccacagtcaacatctcgaaaaacccgttga

SEQ ID NO: 1278 - DNA, 304 bp, unidentified
  source 1..304: mol_type = other DNA
gtcagctgcacatacgagaagggaggccactcgctccccgaccacaaggtcgtcgagtgaccagccccagtcatcacgatccacaggatcagggaggtgccccgatgactacgtttcccgcaggcgagcagacccaccaggctgtgcttcctcagcagcctgctctggaatccgtgggagcagacacccctgggagcagggacgaaacggctcacggacaccccgccgccgcgcggggcgccggcagggaacatgggcgaggggagaccgacgggcagggcaccggagcctgtcggcgtcacgc

SEQ ID NO: 1279 - DNA, 348 bp, Sulfobacillus thermosulfidooxidans
  source 1..348: mol_type = other DNA
atggtttttgtgttagacaaacatcaaaaaccgctgatgccgtgttcggaaaaacgggcgaggttgttattggaacgtggtagagcgcgtattcacaagatgtatctcgcgtgtcatgcgtgcaaccaagaaaagggtccgcgaacggctgaggaattcgggtatcccgatatcccaatccaagcccgacaccccctcaaggatgcggcgatgatgaacgcgactcgctggcggttgtacgaccagctcaaggctacagaactttctgttgaggggagatcgggggcacgcacgaaaatgcaacggattcagcacaacctcccgaaagaacactattatgatgcctga

SEQ ID NO: 1280 - DNA, 268 bp, Sulfobacillus thermosulfidooxidans
  source 1..268: mol_type = other DNA
gtcaaccaccccgccctgaagggcggagcttgtccaagctccatgggttgaccagtctcagccaggaggtctgagacctcatcgggcttcgttcgttgcgtcatgacaccctggggtgcttctccagctccaggctctgtcgcccgcgattaaaagcgagcttagggtagtgcaagcggtgtggcgggctgaacaagcggaatgaacattggcgaggagagacttttttaagcgttacgagtcccgtaagggaggatattatatggtt

SEQ ID NO: 1281 - DNA, 2310 bp, unidentified
  misc_feature 1..2310: note = Ga0209615_100317 JGI
  source 1..2310: mol_type = other DNA
ttgccaccgggcaagcaaaggcccatctgtagtccaacatggtcgaggggagcggcgccgcaaggcgcccgtcacaaggcccgtaagggcatacgccgggaggcgcacagtcgtagccgcgttgactcaagcgcggttgtttgggatagcaaaaggttgagagcgatcatggtttttgttctggatcgaaatggcttggcgctaatgccgtgcagcgaaaaacgggcgcgactgctgcttgcccgtgggcgcgcgcgtgtgcatcgcgtgctgccctttgcgatccggctcgtggatcgcaagcaaagcgactgcgaattgcagccgctgcgcctcaagattgaccccggcagcaagagcaccggcatggcgttggtgcgcgaggttgagcacgttagcgcagccactggagaggttacacgagaagttgcagtgctcaacctgtttgagttggtgcatcgtggtcgccagatcagcgaggcgctgacagcgagacgccagatgcgccgtgcccgcagggggcgcaagacccgttatcgcgctgctcgctttctcaatcgcaccaagccccaaggctggcttgcgcccagcttgcagcatcgagttgacacaacgctggcatgggtcaagcgcctacagcgctgggctcccatcggtggactctctcaggagttggtgcgctttgatatgcaaaagctcgaaacccctgagattgctggggtcgaataccagcaaggcacgcttgcgggctacgaggtgcgcgagtacctgttggagaagtgggggcgcgcttgcgcttactgtggcgccaaagatgtgccactgcaaatcgagcacattcaaccccgagcgcggggcggcagcaatcgggtgagcaacctcacgctggcttgccagtgctgcaaccaagccaagggggccaaggctgctgaggatttcttgtccaaaaagccggatgcgctacggcggattctggctcaagccaagcgcccgctaaaggacgccgcagccgtcaattcgacccgctgggcgctgtttcaggcgctcaaggataccgggctgcccttgagcacgggtagcggtgggcaaacgaagttcaaccgcacgcgcctgcaagtgcccaagacgcacgcgcttgatgccgcatgcgttggacacgttgacgcgctgcgcgactggcgcaagccaacgctgaacatcaaatgcactgggcgcggcagctaccagcgcacgcgcctggacaagtatggcttcccaaggggccacttgaccagagccaagcgcattcacgggtttcaaaccggggatcgggtccaggcagtagtgggttctggcaagaaggctggcacccatgtggggcgcgtggctgtgcgctccagtggcagcttcaacatccaagccggcagcggtttggttcaaggcatctcgtatcggcactgcacgctggttcagcgcagtgatgggtacgggtatttcaatcaaccgatagcacaagacagggataaccagatgaagccttttttgaagtgggcgggcagcaaatataaaataatcgatcgcattctgaaaacacttcctaatggaagacgattgattgagccatttgcgggatcgggggcggtttttttaaacgtcgattttgaagagtatctgatcgccgatgcaaacgaagatttaataaatctttacaagcaagttcagacgaacgggaaggattttgttgcctatgcttcagccctgttcacacctgagaacaacaccgaagccgcattctatgaactacgggcagaattcaatgcatgtacggaacccgccaggaagtcggtgcttttcgtttatttgaacaggcattgctttaacgggctgtgtcggtacaactcaagagggcaattcaatgttccttttgggcggtacaccaaaccagtcttcccaaatgttgcgatgcttaacttccatgaaaagagcaagcgcgctgtttttgaggttgcagacttcaaggtcataatggaaaaggccgacatcggctcggtggtttattgcgatccgccttatgcaccattaaccgcaaccgcgagttttagcagctacgccaaagacgggttcacactgaccgaccaacaggcgttagctgattgcgccaagaaactcattgctcgcggtgttcctgtagtcattagcaatcacgatacggagtttacacggtcaatttactcggaggctaaaatcacatcttttgatgtacagcgctttatttcaagtgatgcaagcaacaggaataaagcagccgaactactcgcactctatggttaa

SEQ ID NO: 1282 - DNA, 304 bp, unidentified
  misc_feature 1..304: note = Ga0209615_100317 JGI
  source 1..304: mol_type = other DNA
gtcaatcacccctccctaaaggaaggggcttgagggagcaatcctgatggcccgaggttgaccagaccgcgaaaggagattttctctaatcaccgttggattaaagaccgcagactcacccagggatgcttcctcagtccctggctctgaaagtggcaactgcagacacgcttcgggtaagcacgaaacgggttgccaccgggcaagcaaaggcccatctgtagtccaacatggtcgaggggagcggcgccgcaaggcgcccgtcacaaggcccgtaagggcatacgccgggaggcgcacagtc

SEQ ID NO: 1283 - DNA, 459 bp, unidentified
  misc_feature 1..459: note = Ga0394881_0001061 JGI
  source 1..459: mol_type = other DNA
gtgcaactagcccaacaagctcttaaaccattggcgaagcgaacattacgagaaatcagaagagacgcaacaatgtctaattttgtctttgttcttgataccgaaaaacgaccgctgacatcctgtaccgcaggtgtggcaaggtcactcttgaaagctggaaaagcggcgatttatcgtcgttatccattcacactcattttgagcaaaacggtagcggcaagtcctaaaccgctagaactcaaattagatccaggttcaaaggtgacagggattgccatcaaacaaggcaacaaagttatctttggagccgaattgcagcaccgaggacaccagatggttctctgccgcgcatcaggcagttttgacatcgccacaaccaatggaagagtggcaggaattagccacaaatattgcaaaccaatccacaaaaaggacggttattcgtatggattctga

SEQ ID NO: 1284 - DNA, 262 bp, unidentified
  misc_feature 1..262: note = Ga0394881_0001061 JGI
  source 1..262: mol_type = other DNA
gtaaactgcccggttctatgcctgacggcaggctagcgccaaccagcgggatacaagccacaacatgaccagcctcagtctttcgaggactacgttttttgagtcatgacacccaagagtgcgtcgctagttcttggctctgtcgctagttgttaaacatctgtagtgggttaaggaagtgcaactagcccaacaagctcttaaaccattggcgaagcgaacattacgagaaatcagaagagacgcaacaatgtctaatttt

SEQ ID NO: 1285 - DNA, 1668 bp, Desulfovibrio sp.
  source 1..1668: mol_type = other DNA
atgcttcctcagtcccggacaatcgaagcccggatggcagacacggcgggtcggccacgaaacgcgtccgggcagacagcggctagaacatgcgggaggcataacgccgatcaccgcatagcccaacatgcccgaggggagcgttccggaaaagccagcccggagccgtcacgggagaaggcgcaagccgactcccagcagggaagcgtaagctcccaaatcaccaactatcccaagcaccgcgaagccgccgtgctcgtcctcgacaggcacggcaagcctttgatgcccacccatccggccagggccaggaagctcatgaaagtcgggagggcgcgcattcacaaacagtatccgttcaccatcaggctgatcgaccgtatccttgaagagtccgccgtccagccgatccgcctcaagatagatcccggctcgaagaccaccgggatgtgtctagtccgcgaggaagtcaaaacggacggcactaccatcgtccaccatgtattattccatctcgaactcactcaccgcggccagaagatccgcaaatccatactccagcggaaaggctatcgccgccgtcggcggtcagtgaacctgcgctaccgggggcctacgttcgacaatcgcaccaagccggaaggttggctgccgccgtcgctgcgttcccttgtcgacaacgtcatgtcctggaaagggcggctgtccgggttggctcctgtgtccgccgcgactgtcgagcgggtccgcttcgacactcaggccatgcagaacccggagatctccgggatcgagtaccagcagggcgagttggccggatacgagatccgcgaatatttgctcgaaaagtggggccgcaagtgcgcgtactgcggggcagtgcatttgcctttgcaagtcgagcatatccaccctaaggccaagggcggctcgaaccgcgtgtcgaacctgactctggcctgccaaccgtgcaacgaagcgaagggatcgatgcccgttggggagttcctggccgaccgcccggacgtgctggagcgtgtgctggcccaggccaagaccccgcttgcgcgacgacgcggcggtgaacgccacgcgcaacgccatcttcttcgcgctgcgggagaccggattgccagtggagtccgccactggcggcaggaccaaatacaaccgctctcggcttggcatccccaaggcgcactgtctggacgcggcctgcgccggacaagtcgaccaggtgatcggctgggacatgcctgtgctgtcgatcaaagcaactggacggggcgcatatcaacgcaccaatgtttacgccaatggcttcccacgcggctatctgacacgggagaagatggcgcggggcttccgcaccggggacatggtagttgccgatgttccgaacggcaagaaaatgggccgccatatcgggcgtgtagcggtgcgggccagtgggtcgttcaacatccagaccaagcacgctgtcgtccagggcatcaacgccaggcattgccgcctgctgtcgcgggccgacggctacggttacgcccggcatgcctcgcccatcctccaggaggccgcatgacaacgctggccaaatattcccgcggactcgccgtccgcattcctccccgccgtgaacgacggggcctcctgcggaggtttggttga

SEQ ID NO: 1286 - DNA, 289 bp, Desulfovibrio sp.
  source 1..289: mol_type = other DNA
gtcaatgatccctcccttcagggaggggcttgctgagggagaccttggcaggcccgtgttgaccagggcaagttgtttgagtttggcaaacgttagaggacaactacgttgaaattggcgctaaacaccgactccgggatgcttcctcagtcccggacaatcgaagcccggatggcagacacggcgggtcggccacgaaacgcgtccgggcagacagcggctagaacatgcgggaggcataacgccgatcaccgcatagcccaacatgcccgaggggagcgttccggaa

SEQ ID NO: 1287 - DNA, 1098 bp, unidentified
  misc_feature 1..1098: note = Ga0394874_0001047 JGI
  source 1..1098: mol_type = other DNA
atgttacgagtaccagttttatcaccatcaggcaaaccattaatgccaacgaaagctagtcgtgctagacgttggttgaaagagggaaaagcacgggttgtgtacaacgaccttggtatttttcaaatccaactacttagatgccccagaactcagaacacgcaacctattgcagttgggattgaccccggtaaacattacacgggcgttggcgtgcagtctgccaaatttactttgtggttggctcatttacaactgccattcaagacggtgcgggaacggatggagcaacgtgccatgatgcggagagggcgtagaggcagacgaattaaccgcaagctaccttacaatcaacgcgctcatcgtcaaaaacgatttgacaatcgtagaagtaaaaagttgcctcccagcattcgagccaaccgcgaattagagttgcgagtagtagacgaattatcgctgatttacccaatcactacaatcgcctacgaaatcattaaagcgcgtggtgataaaggatttagtcctgtgatggttggtcagaaatggcagttcgagaacttagaaatttattgccaagtgcagcaagttgaaggctggcagaccgcaaacatcagacagcaattaggattgcacaaacaaaaacattctaagggtgatgcaattcctgctactcatgctgcagatggtgttgctttaggtgcaagcgcgtttattcgatatggcatcacttctacccattcaatgggttggaaagggagcgtaactataactcctgcaccctttaccgtaattcgccgtcccccggtatcgcgtcgtcaactccacctcatggttccaactaaaggtggaacgaggagaaaatatggcggaactgtgacgcggcatggattcaggaagggtgatttggtcaaaacacctaacggtgaaattgggtattgcagtggtgataccgaaaaagctttgtcagtcagtgacgctgactggcgtagattggggcggtttagccctaaaaaatctcagttggtacagcgaaacacgggattaatcgtgttgccaactaagagattgtctaatctactggcatcgagccagtag

SEQ ID NO: 1288 - DNA, 222 bp, unidentified
  misc_feature 1..222: note = Ga0394874_0001047 JGI
  source 1..222: mol_type = other DNA
gtcaataaccccgccctgaagagggacggggcttgtaagaaccaaatcttacgtgtttgactagcccgttgagtctaatcctggcacgcacttctgaatacttccccagttcggacacattgcaaggctgtttggtcagtcgttggttaaagccaagtcatcttggattaggtgggcgaggggacttaatactttactcggaggtttatcaccatgttacga

SEQ ID NO: 1289 - DNA, 816 bp, unidentified
  misc_feature 1..816: note = Ga0376669_0038378 JGI
  source 1..816: mol_type = other DNA
atgccatgtacacccgccaaagcacgccacttgttcaaaagtggtaaagcaaaaccaaagcgtaacaaacttggattgttctctgtgcagctctgctacgaacaggagcccgacaaccagcccttagttgccggtgtcgatccaggctcaaagtttgaagggtatagtgtcgttggctctcaagacaccgtgctcaatctgatggtggaagcgcctgatcatgtcaaagacgctgttaagacccgtaggactatgcgacgggctagacggcatcgcaaatggagaagacccaagcggtttgacaatcgcctcaaccgcaagaagaggatcccaccatcgacccgaagtcggtgggaagcaaaagcacgcgtgattgctcaactcaaaaagatcatgccactgactgatgtggtggtagaagatgtttgtgcagaaacacgcaaagggaatggtggaaagtggaacggctcgtttagtccgatacaagtgggcaaagagcatctctatcgccttctcgtcgagatgggattacatgttcacttgaaaggaggatatcaaacaaaagagttgcgagaaaagtacaagctcaagaagacgaagagcaaatcgaagcagtcctttgactcacatgccattgacgcttgggttatggcagcatcagtgagtggtgctcctcaaccgacttgcacacgactctcctacatcgttggtgctcagctccacaggcgtcagatccatcgtttgcaagcctcaaagggtggcgagagaaagccctgtcagggacccgatcccctaaaggggatgggcttgcagtga

SEQ ID NO: 1290 - DNA, 252 bp, unidentified
  misc_feature 1..252: note = Ga0376669_0038378 JGI
  source 1..252: mol_type = other DNA
gtcaggaacctcatggctaaagccaggggcttgagaaacggctagctcaacgtaagttcctgtctagcgggctctcttttcggagggagcagtagcgtatccggctaaggaaagcatgtccgagcgccaccctaactcggaccactgcctgccacgccgaagcagacgaccggaggggtctatgccggataggccatcgcgaagggtcatcttaaccctagcagtgactaggagaagggaaatcccttgaga

SEQ ID NO: 1291 - DNA, 969 bp, unidentified
  misc_feature 1..969: note = Ga0334819_000080 JGI
  source 1..969: mol_type = other DNA
atgcccaccaccaattggcgggcgaacgagctaatccgtaagggcaacgcgttacgacgtttcagcaagggcgtcttctacatccgcctgacgcaacggtctgacggggtcatacaggaagttgcgtgcgggatagaccccggctcgaagaaggaagcgttcacggtaaagtcggatgcccacactttcatcaatattcaggcggacgctgtgacttgggtcaagaaagcggtggaaacccgcaggttgctgagaaggtcaaggcgcagccggaatacaccttgccgtcagaaccggtccaaccggacaatcggcggaattccgccgagtaccagggctcgattcgggtggaaggtgaggattagcacctggctctctaagctctatccgatttcccgctttgtggtcgaggacattaaggcgacgacccacaagggacgccgttggaataagagttttagcccactcgaagttggcaagaagtggttcaaggtagagcttgagaagctcgctccgatcacactcaagcaagggtgggagacattccagatgcggaacgcagcggggttgaaaaagacgaaggcgaagatgtcggagaggtttgacgcccactgtgtggacagttggatcttggcgaacagttgggtcggcgggaacatcaagcctgacaacgaaaagatgtggctggtaacgccgcttcaattcagccgtagacagcttcatgttcagaatcccgccgcaggcggtatccgaaagccctacggcggaacgcggagcctgggcttcaagcggggaagctgggtacagcatcctaagtttgggacgtgctttgttggcgggtcgtcaaaaggcagagtcagcctgcacagcctttcgaccggaaaacgcttaacccagagtgccaaatctcaagatatggaatttctgcattatgcaagctggagggcgtccaattcctccgctggctaa

SEQ ID NO: 1292 - DNA, 205 bp, unidentified
  misc_feature 1..205: note = Ga0334819_000080 JGI
  source 1..205: mol_type = other DNA
gtcaatgaccgtcgcctaaaggcgacggcttgtgcccaaggccaagccaaggttgaaagcacaacgtaagcggagactagggatgtagtaactgagcttcctgggcgtggcagcccgaaagcacaccgagaatgctccccaagttttcggtccctgcggaagccagtcccgaagggggaaattgagaaagagagaggtaactctt

SEQ ID NO: 1293 - DNA, 1419 bp, unidentified
  misc_feature 1..1419: note = Ga0172381_10002433 JGI
  source 1..1419: mol_type = other DNA
atgaaaaaagtattcgtacttaacaaaaacggagaaccgcttatgccaaccgaaaaatacggtaaagttaggcgattaattaaagatggtaaagctgaaattttttcgcatgaaccatttactattaaattactatatgatacaccagaattcatacaaccaattacacttggtattgataccggttattcattcattggaatttcagctttaacaattaaagaagaattgtttggttgtgaattggaacttcgtaatgatatcaaatcattgatatctgataaacaacgatgtcgtagcttacgaaggagtagacttagatatcgtgcaaagcgattcgattttagaactagaaaagataattggttaccaccatcaactcaacacaaatttgatactcatatcaaacagattgataaactaattactagattgccaataactaaaattatattagaaacggctaattttgatattcagaaaattaataacccattaattactagtgttgaatatcaacaaggtgaacaattaggatattggaatattagagaatatattctccatagagatgaccataaatgtcaaaatccagattgtaaacataaagacgataaaaactataaaccggtattaaacgtacatcatattatatatagacgtaatggtggttcagataaaccaagtaatttaataacactttgtgaaaaatgtcatacagctaaaaaccatgaaaaaggattcttagtagattggcaaaaaaacggttttaaagttaaaggttttaaagattctacatttatgaatattattaaaactagaattcttaatcaattacgagaattatatcccaatatagaaattactaatacacacggttatattactaaagctaatagaattcataataaaattgagaaatctcaccataacgatgcttttattatagctggtggtactgacaaagataaaatatctgaaactattaatcttaagtgtgaacgtagaaacaatagagcattacaaacatttagagatgctaaatatattgattcaagagatggtgaaataaaaaccggatatgtattaaattctggtagaacaaaacgaaataaatcgactaatggtgaaaatttgagacaatatagaacaccaatattaaatccagatggaaccagaaaacaagttaccaaaggtaataatagtattagaaaaactcgttataatttctcgaaaggtgctaaaattaaaataactgaaaattggtctggtaaacatttaagtgttaataaaaaccaaattcttattagtggtggcacagctaaccaaggtacatatatctatataggcaaaaatcttataccagcaaaagtatgtaaagaaataactaatagaaaaggtataatagaaaaattataa

SEQ ID NO: 1294 - DNA, 262 bp, unidentified
  misc_feature 1..262: note = Ga0172381_10002433 JGI
  source 1..262: mol_type = other DNA
attaaaaacataccttatttttaaaattgagaatgaagttctcgatgattacaattatgactcagggaaacctacgttatttaagtcatcacacctacggtgctccactagcctgtagcaatgtgttacccgactaaacatctctaaccctatacggagaagtggaaggtaaattacaagcttttataacattgtcaaagtggaccacagggtttcgaccctgatttatttattaatttaaattaaaaacaaaatgaaaaaa

SEQ ID NO: 1295 - DNA, 693 bp, unidentified
  misc_feature 1..693: note = Archaeon IPdc08 DNA, NODE_102_48, whole genome shotgun sequence; GENOME_ACESSION: GCA_006538205.1_ASM653820v1_genomic
  source 1..693: mol_type = other DNA
atgcagaagttattggtagagttaaagaacacatcaggagatgctcctcaagttccctgctctgtaagtgaggtattaaacagagataaaagtctcagtgtgccttacaaagtactggccaataacagctccgatgaggacaaacactctggcaagagtaggcaggacttgagagttcctgtgttaaatatgcatggaaaacctttaatgcccatgagacctagaaaggcaagagttttccagaaacaagaaaaggcagcagtagttcagcgaagtccttttaccatacagttaagacacccttcaggcgaaacaaaacaagctttaaaattgggtatagatgctggatattcaacaataggctttagtgttataagtgacaagagtgaattactctacagtgagttaaccttgagaaaaagaatttctaaactcattgagcagaaaagaaattacagaaaaacacgaagaagtagattatggtatagaaaaaggcataagccctctgtaagaagaaagaggtataggttacaacccaatgatttagtgaaatatattaagtctctatgtaaagtgaaaggtgtccctaattatggggaatatgtaacattggtgaataaaatagggaaaatatgtggtattaatgttagaaaaatagagatggtcaaatatggtaaaggaatacaattctaa

SEQ ID NO: 1296 - DNA, 253 bp, unidentified
  misc_feature 1..253: note = Archaeon IPdc08 DNA, NODE_102_48, whole genome shotgun sequence; GENOME_ACESSION: GCA_006538205.1_ASM653820v1_genomic
  source 1..253: mol_type = other DNA
gtcaatcaccacccattaaaatgggtggcctgcctcgtgagagaccagggtaacaggttgattaggaggcattgaagaatgcagaagttattggtagagttaaagaacacatcaggagatgctcctcaagttccctgctctgtaagtgaggtattaaacagagataaaagtctcagtgtgccttacaaagtactggccaataacagctccgatgaggacaaacactctggcaagagtaggcaggacttgagag

SEQ ID NO: 1297 - DNA, 819 bp, unidentified
  misc_feature 1..819: note = Ga0376652_0002900 JGI
  source 1..819: mol_type = other DNA
atgagcaacgtctttgttttagataccgatctcagacaactcaatccagttcatcccggggaagccagaatattgctctcatcaggaaaagcagcagtttacaggcgttacccctttaccattgtgctcaaaaaggctgtagagacacccattgagcctttacgcatcaagatcgatccagggagtaagaccaccggcatagccatcatcaacgatcagactggtgaagtcgtcacggcttttgagctttctcaccgtggggaaacaatcaaagcacgcctggacaaacggcgtacggtgcgaggaagcagacgcaaccgccataccagatatcgcaaaccaaggtggcagaaggtaactggtgtctacccgctgctcatcacggccaatgggcacggtcgcagaagaatgtgttctgtcgacgagtatggcttcacgtatggcaatcccaagcaatctggacgcaagtacggcttcaaaacgggcgatatcgtccgtgccgttgtgacagagggcaagcctattgggacctatgtgggacgtctcactgcacgagcgactggatcattcaatatcacaaccaaaaaggggacaacgcaaggaattggataccagtattgccgtgctcttcatcgctcggatggctacagttaccagaaaggagctgccattgttcttgcccaatcagaatcagaggcggtttctgcttcctcccaaccatccgttcagatagaagagtgccccggtgtaagagccccaagaaaggaaggcctctttcctccccttagcggcgccgcaaggagtatccagaggccataa

SEQ ID NO: 1298 - DNA, 272 bp, unidentified
  misc_feature 1..272: note = Ga0376652_0002900 JGI
  source 1..272: mol_type = other DNA
gtcagggaccctatggcttttgccaagggcttacaggaatccgaaaggattcttgtggcttcacctgaccagactcagcgcggaggcccgtcctccgaagctacgttaggagcgaaataggtacgttgggatgcgtgggccagtccccaccgctacggtgaagggttaaacaggattacaagggttagtgccagtgctcttcacgttaaaccgctctataaccttgtcgaggcccccattacctacgaaagtagaggctcacgatgagcaac

SEQ ID NO: 1299 - DNA, 1338 bp, unidentified
  misc_feature 1..1338: note = MLSBCLC_10010460 JGI
  source 1..1338: mol_type = other DNA
atggcagtatttgtattaggtaaagatggcaaaccattgatgccttgcaatgagaaaagagcacgattgttgttagcaaaaaatcgtgcagttgtaaaacgcgttaaaccgtttgtaattcaactaaaagacagggatcagaccaactgtgaattacaagacctagaagtcaagattgacccaggtagtaaatttacaggaatctgtctttctagaacagagaatagagtagtcaacgttttaaatctatttgaattagaacacagaggacgactaatttctcgcaagctaaaagccagagcagcaatgcgtagaaatagacgtaatagaaacacacgctatcgcaaagctagatttctaaatcgtgctaaacctaaaggttggttagcgccttctctgatgcaccgtgttgaaactacgatgagttggattaaccgacttattcggtggtcacctgttgaatctttagctttagagcgtgttaagtttgatatgcagaaaatgcaaaatgctgatattcagggaacagaatatcaacaagggacattgttcgagaaagaggtaatggaataccttttagaaaaatggaaccataaatgcatgtattgcggtattgaggatgtttcatttgaaaaagaacatcttatccctcgcagtagaggcggtagtaaccgcatatctaatttaggtttatcttgcaggaaatgtaatcaggctaaaagcaatttaactttgaaagaattcttggttaacaaacctgaattactaaagaaaataaaagctggtttaaagcgacctttaaaagatgctgctgctgtaaatgcgactaggaataagcttttggttgaaatgttgaaaaccggtttatctgtagaaaccggaactggtgctcagacaaaatacaatagaaaattgtattccatacctaagacacacgcgctagacgcggcatgcgtaggtgatatttgtggtgttaagaattggactgttccacacttaggaataaaatgtaccggtagaggaagctacgcaagaacaatattagacaaatatggttttcctaaagcatactttccaaaagaaaaacgagtatttggttttcaaacaggagatgttgtaaaagctataatcaaaactaaaaatacgtttaaaatagtcattggaaaaattgttataagaacttctggttatttttccttagtaaaagaaaaagaaagttttaccgtaaaatggtctaaatgtaaacttgcccaaagagcagacgggtaccattactataataaacaatacggtttctatagtgttggtaataatattttaacaactggacaattatga

SEQ ID NO: 1300 - DNA, 243 bp, unidentified
  misc_feature 1..243: note = MLSBCLC_10010460 JGI
  source 1..243: mol_type = other DNA
gtcaactacccctccctaaaggaaggagctttgctctaagttgaccagcctcagtctttaactagactacgttatctgagaatatataggtactccgggatgctcactcagtcccggactctacgcttgcatattaaacaatcctgagggtaagggatagtgtatgtgagatacaaaacctcagaataaccttggcgagggtgtttttacaagtcgcgtaagcgaaaggacaaaatcatggca

SEQ ID NO: 1301 - DNA, 1044 bp, unidentified
  misc_feature 1..1044: note = Ga0335055_0000121 JGI
  source 1..1044: mol_type = other DNA
atggtagcagtattagatgaaaacaagaaacctttaatgccttgttcagaaaaaagagcaagaaaattattggaaaaaggagaagcaaaaccttattggtttaaaggagacttttgtattattttacagagaaaacctaaatcagattacaaacaagatatttgtataggtattgacccaggtagtaaaatgtcagccttaacgattaagtcagaagctcagacaattaaaaacgttcaatattctgccccaaatttcgtaaagaaaaaggtagaaataaggtcagcttcaagaggtggtagaagaaagagaaacacaccttatagaaaatgtagatttaacagaaagggtaataaaagaataccaccctcaacaaaatcaagatggttgcaacatttaaacttaattaagcatttttctaaaatttatcctatcaatcttgtagcttttgaagacgtaaaagctaaaaaaattaaaggagctaaaagatggaataaaaactttagtcctttagaagtaggtaaaaattggttttacgatgaagttgaaaaaagttatgcactttacttatatcgaggatttgaaacttacacttttagaaacagtttaggtttacacaaaggtaaagataaaatgaaagttgcttttgaaagtcattgtgtagacagttgggttttagctaatcaagtagttggaggacatatagaaccagataataaaaaattaacatttttaaaacctttaaacttttacagaagacagctacatgaacattgtcctgctaaaaaaggaattaggagaaattatggaggtactttatccttaggaataaaaagaggtactttagtaaagcacaataagtggggtttttgtttagttggaggaacaagtaaaggtagaattagtttacattgcttacaaactaataaaagattgacacaattagcaaaaaaagaagatttaaaaataataactaatttaaaatggaacagctcaattcccacttttatagaagaaaagagtaactttgagcagaaattatga

SEQ ID NO: 1302 - DNA, 241 bp, unidentified
  misc_feature 1..241: note = Ga0335055_0000121 JGI
  source 1..241: mol_type = other DNA
gccaactacccacttctgaagagagtgggattgaaggaaaaccttaacgaggactaactttaagttaaacaggagaatagcttagacaagttcagaaatggacgtttgaagtcaactaaggagtgtagtgcatcgaaaggcacgagttatgttacaagatgcttcccaagtcagtaaccaataactatccgagtagcgaagggaaattaaaacaaggtgcctacgcacattaaacagttaa

SEQ ID NO: 1303 - DNA, 1404 bp, unidentified
  misc_feature 1..1404: note = Ga0265338_10013913 JGI
  source 1..1404: mol_type = other DNA
atgtccaaggtgctggtggtggatacaaacaggcagccgcttgatcccgtgcatccagggcgggcgcgccagttgctcacccagggcaaagcggcggtgctgcgcgctgtgccctttacgttgatcttgaaaactgcctgcccggaggcgcaaccccaaccactgcgtctcaaactggacccagggagcaaaacgaccgggctggtgctgctgaatgacgcgaccggtgaggtggtcttcgccgcggaactccagcatcggagtcaggcaatcaaatcggcgctggttgagcggcgcgcgtctcgacggttccggcgtcagcgtcagacgcggtatcggcagccacgctggcgcaatcggcgccgggcagcgggctggttgtctccctctcgtgagagccggctggccaatatccagacctgggtccggcgtttgcggcaattcgccccggttgccgcgcttgcgttggaactgctgcaattcgatccctctcgcatagaacaggccgtgtgcagtggcgaggagtaccagccagggacgctggcaggttctgagatccgtgcgtatctgctggaaaagtggcagcatacctgtgcgttctgcggcgtgcggcatctcccgctccggatcacccctattcagctctccgccagtagtgggacaacccaggtagagaatctcaccctggtctgtggcgcgtgccagggagccagaggcacgcaggatctgcctgtttttctggcgaccaggccagatctgctcaagcgactccttgccgttgccagggttccgtgcaaagatattccagcagtcaatgtcatgcgcagggtgttgtatgagcgtctccaatcctctggtttgcctctcgaatgtggcagcggaggacgcaccgcgtggaatagcaccacgcgccagcttcccaaaacgccctggcttgacgcggccaatgttggcgcaagtaccccggctgtgttgctgttcaagcaggttcgggtgctccagatcaaagcgacggggcatgggagccgtcagatgtgcagtcagttagcgtatgggtttcccgtcgggcaccacctgccacgcgagcaagggaagccagtgcgagggcaccgccagcgccagaagcgctactttggatttcaaaccggggatatggtccgcatcgttattccagtcggtcggagtaaatacgcaggcacctatgtgacgcgcatcacggtccgggcgaatggcaactttaagtttcggctggcaggaggtcagtatgttgcgtgcaaatatgggtattgccagatgatccagcgcagcgatggctatcagtatacttccagaacagagagcctgtcgaattcagggatgccagtggtgctgatagagtcgctctgtcagcaccagagcagatag

SEQ ID NO: 1304 - DNA, 285 bp, unidentified
  misc_feature 1..285: note = Ga0265338_10013913 JGI
  source 1..285: mol_type = other DNA
gttgtgcacctgccgacaggcggtgggaccaggcgtctcaccgtctgccaacaggtgaagttcatgaaaccagaccaggttctgcggaactccgttagaaacgaatagataggtacctacaggtgcgaggccagccggtagcactacggtggatgattaaacaggtgaaacggcacgacgaagccagtgtcatccacaacaaaccgtttctaaccttgtcgaggccaccattacccgcgcaagcggaggcttcttcggaagcagaaggtataatccatgtccaag

SEQ ID NO: 1305 - DNA, 1329 bp, unidentified
  misc_feature 1..1329: note = Ga0063011_10003046 JGI
  source 1..1329: mol_type = other DNA
atgatcaggaaattgtttaaacgaaagcaggtaaggattacaggtggtggaccatcaggaaaacctgtagtggtaatttttctatacaaggagtttgaccctgacaggacagtcaatcgcaggtttatcactgttgttgaccctggctataacaggatagggtttgcagtatgtgagattaaggataacagactggtagttttctgtaaaggtgatatggagacatttatatctgacataaagaaaaggatgacagaaagaagggcctatcggagactaagaagatatatcagtcgctataaaaagagaaggctatcagtaagacagggcagaccacttacaaagttcaagaaaccaaggaacgtaaagtcaacacacaggatttcagctacactcagacatgcagtagatattcacctgaacatgtatgcactgcttcaaaagctatgtcctttgcctgtatatcagactgaaagggtcatagaagataatacatttgacataagggcaatgacatggggatctgcatatggtagagagtatcaaaaaatccccaggcagactaatacagaaaaaagatgccttatctgtggtgaaaccagcgatttacagaggcaccacttaatcccgaggaaacagaacggcacggatgtaagggaaaaccttatctatctatgtcgcaactgtcatgaagacattcatgctggcagggtatatctgcctgttaagggggtaaccatgtggagagcattaggaacaatgaatgcagtagcaggcatactgaatcaggttagcggactccgacatgttcctgcctctgacatggccttagcaagaaaaacactggggatagagaaattgcatggtaacgatgcagcagcagcaggcgtggcatacagtcactgccatgaggtagttgacactggcagttatctatccttgaagaagacccgcaggcataacagggcaagggtgcatgcagtcagggacagactttataagataggtggcagggtagtagctaaaaatagaagaaaaaggacagaccagaaggagaagtcatttgcagagctatcgctggatgaaagaaagagagtaacagtctatcctggggtaaagatactgaacccattaagggagaatatgcctgcaatagctggagacatctgggtacacaaacaaactggtaaaagatttgtagcaaacggcgttattgcaaggaactatatctactcgcctgacctgaaaggaataacagggaacccctacattagccctgatcagtgcaggagattgttgagaaacgaggggatagtaatatatgggtaa

SEQ ID NO: 1306 - DNA, 276 bp, unidentified
  misc_feature 1..276: note = Ga0063011_10003046 JGI
  source 1..276: mol_type = other DNA
gtcaaccaccccgccctgacgggcaggggcttgcattagggggtgaacctggtgcaggtattccgggctaaccggatagtggttgaacgagggctgtgctgatgcagaaactggcgtttcagggttacactccaggctctgagagacagaggtgcactcctcttgcaggagtaacccctcaacctcacacagggtgcatcagcatcccccatggagacgaaccatcctcatggatgcccggatcacagggcaccgtaaggtggtagaaaggagcag

SEQ ID NO: 1307 - DNA, 1449 bp, unidentified
  source 1..1449: mol_type = other DNA; note = Human gut metagenome
ttggcgatgtggaccacggggatgtcatccaaaataaaccgaaaaaccggtttttataggatttcagaaccgatttattcattcaatatgaattataacagaaagaagagaacacttatgacgatttttgtattaagtaaagacgggaagcgactaatgcctaccataagacccggtaaagtccgtcacctgttaaaagatggaaaagctaaaattataagtcaccagccattcacgatacagcttttatatgatacgaccggctatacacagccgattgaattctgtgaagatactggtgaccgctatattggaattagtatcaaaagtgagaagcaggaatatgtcagtcaggaagtgttgccacttgccgacgaaaaacagaaacatgacgcacagaggaaaaatcgccgcaaccggagaggacgcaggcgttaccgaaaaaacaggtttgataatcgccaaagagaagagggttggattgctccatccatagagcataaaaaggaagtcaacttagcatggtatcgaaaatatttaaacgtatgcccgatcactaatgcaacctttgaaactgggcagtttgacacccagaaacttcaggctatcgaaggtggcagtattcttccagaaggaaaagactaccagcaggggccacgttataatacggcaacgctccgcgaagtcgtgttcgtgcgtgatcactatacctgcgtattctgtggacgttccgtaaaagacaaagcagttcttcatgtacatcatgcattttactggaaaggcaggcatggcagtcaggtaaacgagctggcaacggcctgtgaaaggtgccatacaccggcaaaccatgcaaaagacggactattgtggggttataccccgggaacattcgttgcaatgggcggagctgctacaatgaatatcctccgccaccggatcgtgaaggaagcgaaagcgctggatgagcatgtacaggtatccgttacctacggagcagataccaaagcaatgagacagttcatgggtcttgaaaagagtcatgtgaatgatgcctatgttatgggaaatctacatccggaagaacgtgcagtttatatacgatacaagaaaaaacgacgtaacaaccgtatcctggaagatttctatgatgccagctatgtagattcgcgtgacggcagtatcaaaaacggcaaggaactttataatggccgtaccaaacgtaacaaaaacaggaacactgagaacctgcataaataccgtagacggaaggttacaaacggtcgtcgcgcaatgaagcgcaaaacagtttcattaagacctggagacatcgtatccctgaatggggaaactcttgttgttcacggcacacacaccagtaagaagggtgctgtaaatgtacagttcacaaagcctgccagaaacggacgaaaatctgccgatctgaagaag

SEQ ID NO: 1308 - DNA, 362 bp, unidentified
  source 1..362: mol_type = other DNA; note = Human gut metagenome
gtcaataaccccgtctgatttccttcgggaaatcagacgaggcttgtgaaaagaagagaatagtaacattcttcattgtttcataggcctgattgattagcctaagcagcaatgctacgttatccaggaatatactgtaggcaccgtcagatgctccacaagtgcgacgctctgcggcttatgattaaacatctctgagggtaggagaagtgttgtaagctttaaaccctggagtaacattggcgatgtggaccacggggatgtcatccaaaataaaccgaaaaaccggtttttataggatttcagaaccgatttattcattcaatatgaattataacagaaagaagagaacacttatgacg

SEQ ID NO: 1309 - DNA, 1125 bp, unidentified
  misc_feature 1..1125: note = Ga0315284_10064466 JGI
  source 1..1125: mol_type = other DNA
atgatgccttgctctccggcaagagctaggaagttactgcatctgaaaaaggctaaagtagttaaaaaatgtccctttacgattcagttatcctatggatcttcaggctataagcaagaaatggtcggatctatcgtgcctagctcttccactataggaatagccgcaaagtcaaatgagaagtgcctatattcttcagaaatagtagtaaggcaagacatttctaaaaagatggatggaaggaaaacatatagaaacaggcgtagaaatagaaagaccagatatcgaaaagccagatttttaaatagaaaatcagaccgaaggcatactcctacggttaatagcaaaatagaatcccatattagggagattaatagagttcaaaaacttttgcctgtttctaaatggttggttgtaaaggcatccaaagtagaagggcattttaaaaatggttctctcgatgaacagtggttaaaccttcaaagacaaacttttgagagagatggtttcaaatgtagacattgtaaaaaaagaggaaaagagcttcatgcccaccacattatacaccgacaagacggtggtgaagattctatagacaacttagttactttagataaagattgtcatgtcaagtatcatcaaggtaaattggaattgaaaataggagaacataaattcagggggaaaatagatactgagttagctatactgagaaaaaatttagatttggcgaatagtgaaaatgtatatggatttcaagccaaagttaaaagaaaactattagggttggaatactctccgagtaatgatgcttgcgctattttggaagtcacgcctcaaaacacttttttagttaaaaatgtccctaaaggagattaccaaaggactagaggggtgagaagtcagcaaaaagtacctaagaataaaattgttggttttaatcgttatgataaaatagagtatgaaaataatatctattttatcaaaatgagaatgtctataggatattttaagttgacggatatttataaccgagaggttccgaaggtaatagcagggcgcaaactaaaattattaggcaggagaaaatcatgtctcatagtgaacaaaacatttcatccctaa

SEQ ID NO: 1310 - DNA, 265 bp, unidentified
  misc_feature 1..265: note = Ga0315284_10064466 JGI
  source 1..265: mol_type = other DNA
gtggattacccgcccctttaggggcgggcttcgagggtaaccttggggagtaattatttcaccatgactcggttttaggaaactaaaactccgttatttagcatgtagaaaccctagaatgccgcctcagttctaggctctttcgtggctctgtaaacaaggacgacagtcctagtcaaccacgttgcgaaggctgaataacattgtcgagaggaagtggttcaatgaacccacaacttaggaataggagataaactacttgtta

SEQ ID NO: 1311 - DNA, 1677 bp, unidentified
  misc_feature 1..1677: note = Ga0194138_10000001 JGI
  source 1..1677: mol_type = other DNA
ctgaccagccttagtcccgttagggactacgttatcttagttatcataccccggtgtggccggtccagcaccgggcgctatgcaggctctgtaaacatacctagaggtagggtaagtcaacctggagagccgattacggtaagctttgataacattgacgaggaccacgtaactgccctacgggcacgtaaagggaacgatattatgtctaattccgtattcgtcttaaatgacgataaaacgccattaatgccgtgtaaaccggcacgggcgagattattattaaaacaaggtagggcagcagttttcagaaagcagccctttactatcattatgaaagaacagatagaaaaccctgttcttgagaacattgaggtaaagatagaccccggtagtaaaaccaccgggatagcgctagtaatgaatactaaacgtggagctagatgtatctggggtgccaaccttaagcaccgaggtcagcagatacgtgatgccttattgtcccgcgctcaaacgcgacgggggcgacgcagtcgtaaactgcgctaccgtaagcctcgatttttaaaccgagttaaatctaaagggtggttggcgcccagtatttacactcgagtagataataccctcacttgggttaaccgtcttatgcgctattcgccagtgacgtcggcagtggttgaactcgttaagtttgatatgcaaaagatggaaaacccggagattgcaggtaaggcgtatcagcgaggaagtctctttaactatgaagttaaagagtatttactgtatcgatataaccacacctgtcagtattgttctggtgcatctaaagaccccattttggagattgaacatattgttcctagagcatcaggtggtagcaatcgactgagtaacctgacactctcctgtgcgacatgtaaccgagagaaagggaaactgtctttggctgactggaaggataaatgtacccaccgaaaaaaccctattgacatgaagcgattaaaaggtattgttcgagtgggacagaacattaagcccgcactgaaagatgcggctgccgtgaacgctactcgatatcgtctagtagctgagctggactatctgggactacatacggaaacctcaggaggacacattaccaaatataatcgtaagcaacagggttatccgaaggaccattggatagatgctgctttagtcggagaaaggggttctcacgttcatatccctccggagttacatcctttaatcattaaaaaggtaaaagttaataaccgccagatgacaaagcctgacaaatatggcttccctcgaacgaaagctaaaggtccttcccgagctttcggttttaagacaggagatatcgcggcttccccgtttggcgtggggagggtggtcatccggacctcgggtacttttaacgtattaggaagagatgttagctggaagcgtttagtccatctctcctttactgacggttacgaatatgtggaccaacgcatcgtcaagatgattgttgataagcatactgtaattaaagaggtgtttgagagagtcatatcaaaaacattaattgacgccgattcccttctcatagaaggtacattgaatcgtaaagtagttcatggtatccgtagggacagtaaaactagagaccatactaaactatattaa

SEQ ID NO: 1312 - DNA, 246 bp, unidentified
  misc_feature 1..246: note = Ga0194138_10000001 JGI
  source 1..246: mol_type = other DNA
gtcaataacctccccctaaaggggtaggcttgtaaaagcctaattgaccagccttagttcttaacagaactacgttatcttagttatcataccctggggtggccggtccagccccaggctctatgcaggctctgtaaacagttctagaggtaagaaccgtcaacctggtgagccgattacggtaagctttgataacattggcgaggaccacttaactgcttaaatgcacgtaaacaggaacgatat

SEQ ID NO: 1313 - DNA, 855 bp, unidentified
  misc_feature 1..855: note = Ga0070706_100065069 JGI
  source 1..855: mol_type = other DNA
atgaaggtgtttgtcctatcacacaccggaaagccgttgatgcccaccacgccgaggcgtgcgcggatctttctcaaaacgtggcgcgcacgcatggtgactcgtgagccattcaccattcagcttcgtttcgagacgactacctatacccagccggtcaccgtaggagtggataccggttcccaaacggtcggcatagctgcaatcacgaaccaggaggtggtcgttcaggcggagatgtgcctacgcacagacatcagcaagcacctcctccagcgcaggcagtatcgcagaaaccgccgctcccgcaaaacgcgctaccgtgcggcgcgtggggccaatcgtcgcagaccctttggctggctgcctccgtctctgcgctcgaaagctgaagcgaccgtcaaagcggtacgttttgtcgcgaggatcctgcccattagtcaaatcaacgtggaaattggcagctttgatacccagcaaatgcagaacccggaggtctccggtgtttcctaccagcagggccaccttcagggctatctgctgcgcgagtatctgcttcaaaaatggcagagacagtgtgcctattgtcaagcgagcggagttccattacagatagaacacctcattcccaaatcacgaggaggcagtgatcgcgccagcaatctcgtgatcgcgtgcgatgcctgtaacaagcggaaaggaacccggacggcagaagagtttggctatcccgaaatccaggcccaggctcgtgtgccactcaaagatgctgcccacgtctcgtccatcaagactgccgttgtagatgctcttgcccagcagttcggactagagcgggtagcggtgagatatggg

SEQ ID NO: 1314 - DNA, 298 bp, unidentified
  misc_feature 1..298: note = Ga0070706_100065069 JGI
  source 1..298: mol_type = other DNA
gttaatgacctccccattcgatggggaggcttgtgagagctggtctcttgcaagccggattgaccagactcagtctcagagccagccaggccgaggaagcgagcgtcttgactggcagtgaagaggctacgatacaactgagtgttcacgttcggaccctggtgtgctgccccagcaccaggcactccaactcctggcctaaccagtggtgcggttagccgccgtggccaggggaaagtaccgcgttgtatctgtgtcgaggggatcgacttctactccgaaaggagccttacccgat

SEQ ID NO: 1315 - DNA, 705 bp, unidentified
  source 1..705: mol_type = other DNA; note = Metagenome
ttgagagtatttgtattaaaccaacgaggtgaacccctcatgccttgctccccggcaaaggcacgcaagcttctaaaagccggtcatgcgaaaatcaaaagggtcaatccctttcaaattcaattgacccgagccacaggagagagcgtgcaaccggtgacattgggtgtggatgccggcagtaaaacgatcggtttaagcgccagtagcgccaagaccgaactctatgtgagcgaagtggctcttcgcacggatgtgagcgatttactgtccacgcgacgtgaatttcgtcgcgcccgtcgaaatcgaaaaacacggtaccgtgccgctcgattcgataaccgggttcgctctaaaaataaaggctggttagcccctagcgtggaaaataagatccaagcgcacatctcgcgcgtgcaaaacgtgtgccgtcttatacccgtgaacaaaatccgagtggaaacggcggcttttgacatccaaaagattaaaaatcccgacattgcagggatagattatcaaaagggtgatcaattggggttttggaacgtgcgtgagtatgtgttaaaccgtgacggtcatgtctgccaacactgcaaaggtaaatcgaaagataggatacttaatgtccatcatctcgagagccgaaaaacagggggtgacagtcccggcaacttgatcacgctttgtgaaacgtgccacaag

SEQ ID NO: 1316 - DNA, 252 bp, unidentified
  source 1..252: mol_type = other DNA; note = Metagenome
gtcaataaacccccgcttaaaagcggaggcttgaaaagccttgattgactagccccagtctgaagcattgtttcagactccgttcattgggaatacataggcactccgtggtgtcaatcctagctgcggaccctgcgaccatcgattaaaagcactgagggtaaggtgcggtgttgatggtacttaaacccctttgaacatggtcgaaggatttttaccgaccggcaacggtcgtggaaacaaaacttgaga

SEQ ID NO: 1317 - DNA, 1356 bp, unidentified
  source 1..1356: mol_type = other DNA; note = Firmicutes bacterium
atgtcagttgcggttatgagcaagacaggtatgcgattgatgccaacaagcgaatatcgggcacgtaagctgctcaagtcaaagaaggcaacggtatatagatacaatccatttacgattcagctgacagaaagagagacgggtgatgttcagacggtagaactttgcatggataccgggtatcttcatattggaacgtctgtaaaatcggagaagcacgaatatcttggcgtgcagattgatacgttaacagacgagaagcagaagcacgatgcgtgcaggatgtaccgcagacagagacgcagtaggaagagataccgccagtcacgattcaataacagaaaacgtagtgacggatggattgcaccgtctctggagcataagaaagatatccatatccagacgatttcacgcatctgcaatgcaatgccgattaccaacattacattggaaatgggaaattttgatacacaggtattgaaggcactggaagaaaatagaccactgccacagggaacggattatcagcatggagagagatacggtattgcaacgctccgtgaagcagtgtttgcacgtgacaagtatacgtgtcagtgctgtagaaaaacgatagcagacggtgcaattctgcacgtgcatcatataatataccgaagtcgaggtggcacaaatcgtatgtccaacctcgctacagtatgcgatagatgtcatactcctgcaaatcataagccaggtggtaggctgtacaactggaaaccaaagattgcgtcgttcaaaggtgcaacattcatgaccgccgtgcgatggaagatgtacaacgaggtaaaatctaagttttcagatatcaatatccatatcacgtatggagctgagacaaaggaacagcgcagggcttttgatatcaccaaatcgcacgtcaatgatgctcttgtaatgggacagtttcatccgaagcatcgttcaagaccagtatgctataagaagaaacgcaggaacaatcggtgtctggagaaattctacgatgcgaagtatatcgacagtcgtgacggtaagaagagaagcggtcaggaactgttcaatggcagaatcaaccgtaatcataagaaagattccgagaatctacatcaatacagacaacagaaagtatccgctggcagaagaacaataaggaaacaacattattcgatccagcctcacgatattattgtgtttaacaggcaacaattcgagacatccggatgtcactgtaatggggcaagagcaatcctgctgccacagaaaaaatctgttgctatcaaaaaacttagcatccacaaatatgctggtggatatttcaaatcagattttacgtaa

SEQ ID NO: 1318 - DNA, 457 bp, unidentified
  source 1..457: mol_type = other DNA; note = Firmicutes bacterium
gtcaataacccacgcccgagataaatctcggacggggcttgtgaaaacagatatgtttttataagtcacgtttttatttatcgaaggcgttgaccgtaaggtcagattgattagcctcagtgtgcagcggagccagtcgactgtttcatatagccaggaacacttccagcacactacgttaccggtaaaataggcactctgtggatgctcctcaagtcccagactctgcggcatgcgattaaacatctctgagggtaggagaagtgtggtatgcgttaaactaccggataacattggcgatgaggacaaccgactctgattcggtactggcttgccagtgccgaaaggatagagaatctgtgcgagttgctttgaggtttcaaagtggccggcacagaaggcgtaagccatccggttctgccggaaatatttcatgtaaggagggcagcttatgtca

SEQ ID NO: 1319 - DNA, 798 bp, unidentified
  misc_feature 1..798: note = Ga0370526_00122 JGI
  source 1..798: mol_type = other DNA
atgtctaactttgtattcgtgcttgataccaacaaacaaccgttaagtccagtccatccagggcaagcaaggcgactattaaatttacaacaagctgcggtgtatcggcgctacccattcacaatcatattaaaatatgcagttcccgaccgcacaatacagccctgtaaactaaagattgatccaggctctaaaactactggcttggcgattgtgcaagatgataaagttatctggggtgctgagttgacgcaccgaggacagcaaatcaaggatgacttagaatcgcgtcgcgctattcgtcgcaaccgtcgcaatcgcaaaactcgttaccgcaaaccgcgttttttgaaccgtactcgaagagaaggatggttgccaccaagcctagaatctaggattgaaaatatccttacttgggttaggcgaataactcgatatgtcccgattacagggatatctcaagaactggtcaaattcgatcttcaagcaatgcaaaatccacaagtttcggggaaagagtaccagcaaggcgaacttgcagggtatgaagtcagagagtacttactagagaagtggggtaggaagtgcgcttactgtggtgctgaaaacgtgccttttgaaatagaacacattcacccgaaatcaaagggaggtagcgatcgcgtttctaacctcactcttgcttgccatttatgcaaccaagccaagggtaatagagatattaaagattttctagccaaaaagcctgacgtgctatcccatgttttaagacaattgacatcctccccggtctga

SEQ ID NO: 1320 - DNA, 273 bp, unidentified
  misc_feature 1..273: note = Ga0370526_00122 JGI
  source 1..273: mol_type = other DNA
gctatccgctaaacggtgaacagggctggacaaccagcccttttgctggacagatagccagttcctaagccttaaatggctacgttaagaaggtcaagacacctaaaagtgctttccagcttttagctctgtcgattaactttaaacatccgtatttagctaaggaagtgagttaatcccaacaagcctttttaacattggcgttcgcgaagcgtctccctttgggagaggaaaacataacctgagaaatcagaggacaaaatgtctaacttt

SEQ ID NO: 1321 - DNA, 1284 bp, Nostoc commune sp.
  source 1..1284: mol_type = other DNA; strain = HK-02
atgtccaaagtatttgtaattgatactgaaaaaagaccattagacccaatccattcagcccaagctagacaactattaagaaacggtaaagcagcagtttaccgccgttttccgttcaccattattctcaaaaaatcacattcagatttatcagtaacaccactgcgattaaagcttgatcctggagctaaaacaacagggattatattggtcaacgatactactggggaagttatatttgcagccgaactaaaacatagaggctttgcaattagagatgctttaacttataggagacagttgagaagtagcagaagaagccgtaaaactagataccgtaaaccaagattcttaaacagaatacgtccaaaagggtggttagcaccgagcttacaaagtcgtgttgaaaatatcaaaacatgggttaataagctacgtaaaattgcacaaattgaagcaattagccaggaattagtacgctttgatatgcaattaatgcgtaatccagatatccaaggaaaggagtatcaacaaggtactttgactggttacgaaatcagagaatatttacttgaaaaatggagtagacaatgcgcttactgtgatgctaaagacgttccactacagatagaacatattcacccaagagccaaaggaggcagtaattcgattactaacctgactctaagttgtgaaaaatgcaacacaaagaaagaaattaaggatatcaaagagttcctaaaaaaagacaaaacaaggctagcaaaaatattggctcaaacaaaaaaaacattaactgatgcagcagcagtaaacacaactcgttttgcattgctagaggctctaaaagcaactggattaacaatagaaacaggttctggtggattaacaaagtttaatcgtagccaacagaatctagaaaaaactcattggttagatgctgcttgtgttggtaaatcaacgcccaaattgattattaaaggtgttaaaccattgttgattatagctaacggtcatggtactaggcaattatgtcgcacagataaatacggttttccaaatcgtcattgttcaagagctaaatttcactttggttttcagactggagacattgttaaagctgttgttaaaactggtaagaaagttggtgaatatattgggagaattgcaactcgtgcaacagggagtttcaacatctctactaaaaacggattagttcaaggaattagtcacaaatattgttcagtaattcacaaaaaagatggctactcatatacacaataa

SEQ ID NO: 1322 - DNA, 252 bp, Nostoc commune sp.
  source 1..252: mol_type = other DNA; strain = HK-02
gtcaaccacccaccactaatcggagtaccgatatagtgggagcttgaaagagcctagttgtccagtctaagtgttaaatcactacgtttaaggtaagtgttcaagacctaccagagaatgcgtagctagttctttgctctagaacttaagagttaaacaggtttaagggttaagccagtacttttgagatagttaccgacctgaaacattgacgaagctaacattacccgaaaggagggacttatgtccaaa

SEQ ID NO: 1323 - DNA, 1374 bp, Streptomyces lincolnensis
  source 1..1374: mol_type = other DNA
gtgggagcagacacccccgggagcagggacgaaacggctcacggacatcccgccaccgcgcgggacaccggccgggaacatgggcgaggggagaccgacgggcgcggtgacgctcccccgcacaacccgccgtacaccggcggcatcggcgcgagcagagtcttcgtcctgtccaaggacggacacccgctcatgccctgccaccccgcccgcgcccgggaactcctcggcaagggacgggccgtggtcgcccgacaagtacccttcgccattcggctgcgtcgaccccggctccaagggcacgggtctcgccctcaccgacgagaagaaggaagtcgacgcgcacggcgccgtcgtcaccgtcagacgcgggctcacagcactggaactccagcaccgcggcgaccagaaccaccgatccatgcagcagcgtgccggttaccgacaccggcggcgctccgccaactgccgctaccgagcccctcgcccagacaaccgaccgcgccccgcaggatggctcccaccctccctgcgccaccgcgtcgacaccacctattcccaggcagcacgcctctgccgctacgcccccgccaccgagatccacatcgaacgcgtcgccttcgacacccacgccatgagcgcgggcagacccctcacccaagccgagtaccagcaaggcacactcgccggaaccgaagcccgcgcctacctccacgccaagtggaaccactcctgcgcctactgcgacgccaccggcgtacccctgaacatcgaccacctcaggccccgcagccaaggagggtcgaaccgcatctccagcaggtgagaacgcccctccatgacgccgccgccatgaacgcgacccgttggcagctcacggaaaccctcagcgacctcggcaagccggtacacgcctggtcaggcggccgtacgaagtggaaccgcagcgccatgggactggagaagacccacaccctggacgcgctgtcggtcgggcgcctgaatcatcagagcggcgacgccatcgtgcggttcccggggcaggtgctcaacgtcaaagccaccggtcgcggatcgtacgcccgcaccactccggaccgcttcgggttcccacggctccgccgggcccgcaccaagcagcacttcgggtacgtcaccggggatcttgtccgggcccatgtaccgaccggcaagtgggcaggcacatggaccgggcgcatctccgtccgcgccagggggcaacacagcctcaccacaccgaggggtcgtatcaacgtctcccaccggaatctgagactgctgcaacggggcgacggatacggctacagcacccggcaggaactctcagagtcaacttctcaaaaaaccggttga

SEQ ID NO: 1324 - DNA, 330 bp, Streptomyces lincolnensis
  source 1..330: mol_type = other DNA
gttgcttgcacccttcggaaaggaggtcactcgctccccaacgcaggttgccgagtgaccagccccagtcatcacgatccccaagatcagggaggtgccccgatgactacgttccccgcaggtgagtagacccaccaggctgtgcttcctcagcagcctgctctggaatccgtgggagcagacacccccgggagcagggacgaaacggctcacggacatcccgccaccgcgcgggacaccggccgggaacatgggcgaggggagaccgacgggcgcggtgacgctcccccgcacaacccgccgtacaccggcggcatcggcgcgagcaga

SEQ ID NO: 1325 - DNA, 861 bp, unidentified
  source 1..861: mol_type = other DNA; note = Thermoplasmatales archaeon Gpl
atgtaccgtaggaacaggagagacaaactctggtacaggaaaccaagatttatgaaccgtggaaacaaaaagaaaggatggcttgcacccagcatagatcacaaactacagactcacataagactgattgagaaactgaaaaaaatacttacaatatccgatattattattgaggttgcttcattcgatcagcagaagatgaagaaccctgagataagtggaatagagtaccagcagggagaacttcagggatatgagatcagagaatatctccttgagaagttccatcatatctgtgtgtattgcagcaagaccggtgtgcctcttgaaatagagcatctcacacccagatcaaggggcggctctaatacagtagacaaccttgccatctcatgccatgaatgcaaccagaagaagaacaaccttaccgcagaagagttcggatatcccgatctgagaaagagtgcattgatgccgttaagagatgcggctttcatgaacactgtaaggtggaaactcactcagctaactggagcagatcatacattcggttacatcacaaagaggaatcgtatttctttggggttggataagagccatgccaacgatgcatttgtgattgctggaggaaccaaccaggccagggtattgccatttacaatcacacagagaaggagggacaaccgttctatccagacaaacaggaagggattcaggccatcaataagaaggaaaagataccccttacaacccggtgatgtagtggaattcggggagagcagatacgacgttgttggggttcatagttatggaaattatgtaataataaggaatggtgaaaagaagatgaatataagcacg

SEQ ID NO: 1326 - DNA, 520 bp, unidentified
  source 1..520: mol_type = other DNA; note = Thermoplasmatales archaeon Gpl
gtcaactacccctccctgacggaaggggcttgttccgtgaggaacagcgcaagagttgattagggggctttgaaagacatggtgaaaaacatgaaagagaagcagaagttagattggagaaatacatacacacctacggatgctccacaagtccgtggcaactgtgatcatgcattaaacagagaggaaactctcagtgtgcatggtttaaaaaccccttctaacaaccccaatgtggacctacagtcaggcatggctggacaggacctgagggttcccgttataaacatgcgcaacgaaccattaatgccgacaacaccaggaaaggcacgaacactattgaaatctggaaaagcaagggtgatcagttcaaatccattcactattcagctcctctatgcaaccggagagacaaagcagccagtaatattgggtatagatgccggatacaagcacattggattctctgcagtaacagaaaagaaggaactgatatacccaaactcaataaagagaaatc

SEQ ID NO: 1327 - DNA, 942 bp, Microcoleus chthonoplastes
  source 1..942: mol_type = other DNA; strain = PCC 7420
ttgagcaaagttttcgttttagataccaacaagcaaaccctcaatccaattcatccgggtagagccaggttactgttgtctcaagggaaagccgccgtattccggcagtatccctttaccataatcttaaaaaaggaggtaagtaatccagttgttcaaccattgcgagtaaagattgacccaggggcgaaaaccactggactagcaatagtcaacgacaacactggcgaggtagtttgggtagccgagttacagcaccgagggtttcaacttcgggatgctttgacttcacgtcgtcaactacgacggtcgcgacgcaaccggaaaacccgttaccgtaaacctcattttttaaaccgcacccgtccgccatcatggttgccgccatctctaaatagtcgagtggctaatatactgacctgggttaagcgtttgtcggcactgtgtcaaatcactgccatttctcaagaattggtcaggtttgacacgcaaaagatgcaacaagcagatattagcggagttggctaccagcaaggcaccctagcaggctacgagatacgagagtttctactcgaaaaatggcataggacttgtgcttactgtagcgctcgcggaaccaagcttgagattgagcatatcaagcttaaacccctactgattgctgccaagggacatgggactcgccaagcgtgccgtaccgataagtggggttttccacagcgttattgctcccgaaataaagtccacaaaggctttcaaactggagatattgtgaaagcgatagttaccaagggcaaaaaagtcgggacttatgtggggcgtgtagctactcgtgcctctggcagcttcaatatttcagcgaggaacggattagttcagggcattaatcacaagtattgtaaatttatgcacaaaaaggatgggtattcatacgcaaattaa

SEQ ID NO: 1328 - DNA, 241 bp, Microcoleus chthonoplastes
  source 1..241: mol_type = other DNA; strain = PCC 7420
gtcaacaacccaccactgaccctaggggtacagtgggggcttgaaagaaagccctagttgaccagtctaagtacttttgtactccgttttttgagtcaagacacctacaaatacgacgccagtttgttgctctgtcatctaacgttaaacaaccatttgggaggtagtgcgttaggtctaacaagctcaaaaaacattgactaggcgaacattacccgcaaggaggctcactttgagcaaa

SEQ ID NO: 1329 - DNA, 1077 bp, unidentified
  source 1..1077: mol_type = other DNA
atgttacgagttccagttatttcgcctgatggcaaaccattgatgcctacaaaagcttctcgcgctcgtcgttggcttaatcaaggtcttgctatcgtttacccaaatgatctaaatgtttttgctgttcagttagttaatcaaccatctagttatcagactcaggatatcgctattggtattgaccccggaaaatctttttctggtatcgctgttcagtcaaataaagccactctttggacagggcatttagtgttgccgtacaaaaaagtccgcgtaggcatggatactaggcgaatgatgcgaagaactcgcagaagtcgtcgaataaatcgcaagattccttattctcaaaggtctcatagacaaaagcgattctcgaacaggaggaacaaaaaggttcccccttcgattcgggcaaaccgtcaactagaaaatcgggtagtaagagaacttagtcttttgtacccagtaagtgccattgtttgcgaaatagtcaaggctaatggcaacaaaggtttttctcctgtgatggtaggacaatactgggcaatatctcagttagaaaaaatagccccagtgactcagaaacaaggctgggagacagccttgaagagagaagcgctagggctgatcaaagacaaaatagacaaaagtcggcaaacagttaatactcatgcagtagatgggattgcgttagctgctactcatttttaccgacgcaaaaattattatcaccgcaatggaaaattgagtgtccccaaaaactgtgaagtaactaacgctgtgttttccgtaattagacgtgcccccataagtcgccgtcagttacacctattgcagttttctaaaggtgcaaaacgtcgcaaatacggaggaacaaccactagtcatggttttcgcaaaggagactacgttgaagcggtcaaagccgggaaagcctaccgaggttgggtaagcggtgagacagcaagacaagtttccgtcagcgatatcaattggaaaagaatcggacaatttaccgcccgaaaagtccgacttttaaaacgttcgaccggcttaattgtaaaccactaa

SEQ ID NO: 1330 - DNA, 217 bp, unidentified
  source 1..217: mol_type = other DNA
gtcaataaccccaacctcaacgcagtaggttggggcttggtagacaaccaactaccatgattgactagaccatttgagccgaattttgggacgaacgcttggatacttccccagtccaagcctcttcaaaactgtgttgtcagttgctgttagacaggaaatcttcaattcggtggtcgaggggacgagttattaactcaaatacttttctcgtgag

SEQ ID NO: 1331 - DNA, 1473 bp, unidentified
  source 1..1473: mol_type = other DNA; note = Human gut metagenome
atgaactacgtttatgtattagataagaaagggaagccattaatgccgactacccgttacgggaaagtccgccggatgctaaagtctggacaggcaaaaccggttcagaaccttccatttacaatccaattaacttatataccaaaaacaacggtctgtcagccagtgattgtcggatttgatccagggcggactaatatcggcatttctgctgtccgagaagatggaacctgtctcaatcttacacattgtgagacacggaacagagaaattccaaagctgatgcagaagcggaaagaacaccggcagacatccagaagaggagaacgtcttgtccggaagagactggcaaaacgtcatgggacagtaagttcaaaaccactggaacggatactcccaggttgtgaaaagccgcttaaagtcaaagacatcattaacacagagagtcgttttaacaaccgtctgcgttcggaaggatggctgacaccaacggcgacacaactgttacgaacccatgtgaacttattaaaacgcatgtgtcagatacttcctgccacggatgttgttatggaagttaaccggtttgcttttatgcagctggatcaaccaaatgtaaaaaagtgtgggattgattttcagcatggtccgctgttcgggacagacgggataaaagaggctgtctctatccagcaggatggacgctgcctcctttgtgaaaaacggactattgaacattaccatcacatcgtaccaagagcataccgtggaagtgatactgccgaaaacatcgcaggactttgtgccggctgccacaaattagtacatacttcacgggaagcctcgaataaactaaagcacaagaaggatgggatcaacaagaaatacggcggaatttctgtcttaaatcaggtaattccatttctgtttatggagtttgagcagatgttcccaggacatacttatgcaacaaatggatggaatacaaaacagttccgtgaaaaatacaggcttgcaaaagatcatagtgtagatgcttattgtatcgctgcaagtattctgccagaacccaaagtggagcttccagaagatacgcatgagattgtccagtaccgcaggcatgaccgtgctcgtatcaaacggcagacggaacggacatattgccttggaaagaagggggtctgtaagaatcgacataagcgtttcgaacagaaaacggattctctggaagagtatgtagagaaatacccgaattttttatccaatctaactgtaaagaaatcgcagcgttcttataacgacttaaagagagttcttccaggggcagtgatactttatcagggaaaacgatatatactaagtgggcgatcttctggtgggaaacagtaccgtatgctcggatatggaaatcaaaattttactgcatcgaagtgtacgattgtacaacagaacactggacttgtgtatgtaagttag

SEQ ID NO: 1332 - DNA, 235 bp, unidentified
  source 1..235: mol_type = other DNA; note = Human gut metagenome
gtcatgaacaccgagcgacttcgtcggtctggggcttggatgggcttacgccctgaaaagctttaagacggaagctgcaaagagtttatgagcagagcagtgacataccgatcgccttcaggtgattccaagcctgaagctccggctataggtgtgcctatgctatggaaacacaacaggatggaggaaagatccaaagtcctgacttaccgtaaaggagtaacttatgaactac

SEQ ID NO: 1333 - DNA, 1419 bp, unidentified
  misc_feature 1..1419: note = Ga0119967_10003500 JGI
  source 1..1419: mol_type = other DNA
ttgccgacatccccgaggggagcgaagccggaaggcttccgttacaaggcccctaagggcagaagttgggagaaaacaatggctgtttttgtattggacagaaggaaaagaccgttgatgccgtgctctgagaagcgggcaagattgctgcttgcacggggacgggcaaggatccatcggttgacgccgttcaccattcgattggtcaaccgcacggttgagcaatccgtgttgcagcctgtacgcatcaagttggaccctggaagcaggacaaccggaattgcgctggtaagagacggtgaaacgggtaggacagcgcatgtgctgtttctcgccgaactgcaccatcgtgggcaggtgatcagggatgcgctcacacagcgcagggctttcagacgcaggcgacgcacggcaaacctgcggtatcgagcaaagcgattttataaccgcacgagacctgaaggctggattgcgccatctttgcggcatcgtatcgagacgactgtttcttgggtgaaccggctgcggcgctggacaccggttgcagcgatcagccaggagctggttcgcttcgatacccaaaagcttcagaacccggaaatctccggagttgaataccagaaggggacgcttttcggcctcgaggtgcgcgaatacctgttggagaagtggaaccgagcctgcgcgtattgtggtgctcggaatgttcctctggaaatagagcatatccagcccaggagccgaggcgggtcggatcgggtatcgaacctaacgcttgcctgtgacaggtgcaacaagcggaaagggaataaatccatcgaggagttcctggcccacgatccgaagcgcctggctcaggtcaaggcgcaggccaaatcaccactcaaggacgcagcggcggtcaacagcacacggtggaccttgtggcgacagcttcgggatatggacctggaaatagaggtcggcacaggcggtcggacgaagtggaaccggacccgtttggggctacctaaaacccatgcccttgatgcggtttgtgtgggggatgtgaaagcggtgcaaggatgggccgtgccggtgttacaagttaaagctgctggccatgggagctatcagcgcacacgtcttgaccgttttggttttccaagaggctgcctgatacgtcaaaaacgtgttcaggggtttcagatcggagacctggtcaaggctgcgatatcaaagggtataaaggcaggaatttatgttggccgtgttgctgtgcgggcttcgggaagtttcaacgtgcaaacggcacacggcgttgttgaggggatttcataccgctattgccgattgctccaacgcgcagacggctatggctactttgtgcaactttgtggaatagcccttggaaaggaagaattgcgagaggccgcctga

SEQ ID NO: 1334 - DNA, 287 bp, unidentified
  misc_feature 1..287: note = Ga0119967_10003500 JGI
  source 1..287: mol_type = other DNA
gtcaactaccccgtcctgaagggcggagcttggggaaacctgagccaggttgaccagggggagcggggaatccgctacgttggcaacaggtcgttaagacccactccgggatgcttcctcagtcccggacactggaaggctcggatcatgctggcgaaaggtaaagcgccgaaggttcaagtcgccgcgaaagcgggagccggttgccgacatccccgaggggagcgaagccggaaggcttccgttacaaggcccctaagggcagaagttgggagaaaacaatggct

SEQ ID NO: 1335 - DNA, 900 bp, Polaromonas sp.
  source 1..900: mol_type = other DNA; strain = JS666
atgccgtgcaccgagaagcgggccaggctgctgctggcacgcggccgggcgcgcgtgcatcggctggtgccactggtgatccggcttgttgaccgtcaggccgccgcctgcgactttcagccgctacggatcaagctcgatccgggcagcaagaccaccggcgtcgcgctggtgagggatgtggaatcggttgacgcgtccacgggtgaaattcatagtggggtagccgtcatcaacctgctggatctggtccaccggggccggcagatatccgaagccttgacggctcgtcgtcagatgcgccggcgccgcaggagcaatttgcgctgtcgcgcacccaggttcctgaaccgcggcaacaagaagtccggctggatcgcgccctccctgcagcaccgggtggacacggccatggcctgggtcaggcgcattcaacgttgggcgccggtgagggccatcagctccgagctggtgcgctttgacatgcaggcactgcaaaacccagaaatttccggcgtggagtaccagcaaggcaccttgttcggctatgagctgcgcgagtacctgatgcgcggcaagcgtgtgcagggctttggcaccggcgatatggtgcgcgccgaagtgcccaagggcgtcaaggccggggttcacgttggccgagtggcggtacgcgccagcggcagtttcaacatccagacccatcagggcggaatctccggcgtggttcagggcatcagccataagcattgccgggtgacgcagcgcaacgacgggtatgggtatttcttcaaccgggccgatcacacagggcgtgagcaggtatggcccaaggcatcggatgctgcgcatccggcgctctacctccccgccatgaatggcagggtttcacgcgcaatctga

SEQ ID NO: 1336 - DNA, 361 bp, Polaromonas sp.
  source 1..361: mol_type = other DNA; strain = JS666
gtcaatcaccccaccctaaaggatggggcttggaactgaaaggagccaagccaggttgaccagggaaagcggtaatcaacccgctacgttagcaacaggtcgttcagacacaccagcgaatgcttcctcagttcgctgctctgtaaggtcttgatcatgctggacaaaggtaaaggtccgaaggtcttgatcgcagctcgcaagggctggagccggttgctgacattcccgaggggagcgttctggagcgtcgtgaggcgcaccagagccgtcaccaggcccgtaagggctgaccgctggaaagacggcctggctgcacagtttgcagtgtgaattattgatgtcaggagttggtgtggca

SEQ ID NO: 1337 - DNA, 930 bp, Fervidicola ferrireducens
  source 1..930: mol_type = other DNA
gtgcccggatcacagggctcctgcaagaggaggaaaaagatggtattgttcactgccgacaaatacggtaggcccggccacccgacgaaaaggttcgacatgataaggaaactgaggaagaagggtaaagtaagaatcgttggtggagggacctccggcaagccaccggtagcagtgttcctggacagggaatttgattgctccaaaacagtaccaaggaaactcatcatagcgctcgacccgggatataactacatagggtttgttgtgtgcgaaacaaaaaatgggaaactgatcgcatactgccagggtgttttacaaaccagaattcccgagattaaggagttgatgacagaaagaagaagacaccgaaggaacagaagatactattcgcggtgcaaaaagagacatttatccgccagacatggtagggttttaacaaaatttaaggcgccaagaatagtaagggctagagacaagtcgaacgccaccctcaaacatggtgtggaaacgcacttcaatctttacaaaaagcttttaaggctcttcccctttccagcagagcaggttgtatttgtcatggaggataacgtcttcgatgtcagggcaatgacatggggcaaaacatacggcacgggttaccagagatcacccagaacgccagcagagaggaaatgcatcctttgcgggacaaaagagaatttgcaaaaacaccacctgatacagcggaagagcggtggtacggacgttcaggagaacctggtatacctatgcaaagactgccatgaagatgtacatgccgggagggtatatatccccataaaaggcatcaagcagtggcgtgcattggggacgatgaacgcaataatggggaaactgcggaaaatgccgcggctggagtttgtacctgcatcggacgtggcacaggcg

SEQ ID NO: 1338 - DNA, 251 bp, Fervidicola ferrireducens
  source 1..251: mol_type = other DNA
gtcaactacccccgcttgtagaagtgggggcttgtcggtaggggtgaactgctgacaggtctgctgacaggcaggtagttgaacgcgggtgtgcggcagcagaacctgacgttctgggacgacactcccagtcccgggagacagcggtgaaatcccgcggccttacacggggtgctgccgcacacctcagggagacccaccacctttcaaaaaggtgcccggatcacagggctcctgcaagaggaggaaaa

SEQ ID NO: 1339 - DNA, 852 bp, unidentified
  source 1..852: mol_type = other DNA; note = uncultured Lachnospiraceae bacterium
atgatgcagagtgttgctgttttatcacgcaccggcagaaaactgatgccgacaaatgcgtacagggcgcggaagcttttaaaaagcggacgcgccggaattgagtgttataaaccgatgttcacgatccggcttgcagaccgggaggaaggagatgtgcagcctgtcgaatatgcctgcgatacaggctatcagcatgtcggtgtatctgtcaaatcagaaaagcatgagtacgtgcacaatcagtacgacatgctcaaagatgagacagaacgccacaatgactgctgtaaataccgcagggcaagaagaaaccgcaagcggtaccgcaaaccaaggtttgacagccgctctaagaaaaacaaggaaatggcaccttccctgcgtcaccgcataatgtatcagcgactggtcaaagcacacccggaaatcgacatacatatccagtacggtacaaagacctgtcttacccgacgtcttacccgacaggaacgtcatatcgcaaagacacacgcaaatgatgcttattgtatcgggcagtttcatccgaaacaccgtaccagaggacagatattccagaaacagcgccgcaataatcgtgtcttagcgaaattctacgatgcgaagtacattgacatgcgtgacggctccaagaaatcaggttcgcagctttcatgcggcagaacaaaacgacgtgaaagcagacgtactgacaaaaatgagcgtatttatcgtggcatcaaatgtcaggcaggcagtctgcatacaagaaaacagcgttatgacattcaggcaggcgatgtggtcatatttcacgacaggatacgtgttgtaaaaggcacacaatgttga

SEQ ID NO: 1340 - DNA, 320 bp, unidentified
  source 1..320: mol_type = other DNA; note = uncultured Lachnospiraceae bacterium
gtcaactacccgcgactaaagtcgtaggcttgtagagctacaagtctggttgattagcctgagtgcctcgtgcactacgttaccgtgagctgcgtccggatgctccacaagtccggaccaactgggaactgtcgttaaaaattgctgagggcaggcaacgtgcggcagctgtttttaacccacggataacattggcgatgtggaccaccgtggctacggattttatccgcaagtacgagcatccgctggtctctacgactgcggaaaacgtaagttattgacttaagcaggaaggaggcatcagcgatgatgcagagtgt

SEQ ID NO: 1341 - DNA, 1203 bp, unidentified
  source 1..1203: mol_type = other DNA; note = Thermotogaceae bacterium
atgggtgttcctaaatatcatatggtgcttgtggtagatgcaaaaggcaggtcgttattgccaacacatccagcaagggcaagaaaactattgaaacaaggtaaagcaaaggtatacaagatggtacctttcactattcagttgaggtacgaagtcaaagaaccaaaaggagaatttactattggaatagacgatggagcagagttcgtaggtattgctgttaaaggtaaagataaaattatatttgcaactgatgtgagattgagacaggatgtcaaacgcaagattgacgaacgtaggatgtatagaagaaacagacgaaacagaaaactacgttacaggcctgcgaggtttttgaacagacgtcgtcctaaaggatggatgccaccaagtgtcaaatatagaaaagatgtaattttaagagcggtagatgatttacgaaaatacatgaatatgaccagagtcgtagtcgaattaggttggtttgatacgtcaagcatggcatgtggaagaaaacttaaaagcatagagtatcagcaaccagactttgaaggcagaaacagacgtgaacaggtgttgtggagagatggttataaatgtcaacattgtggtacaactatcaaattgcagatacaccacattattccaagaaacaaaggtggtacggacacattaaacaatctgataacgttgtgcgctaagtgtcacaaggaactacacgaaggcaaatgggtattaaaaaagaaacctaaacaatacaagtatcctgctatattgcaacaagggaaatggtatttgtacgagcaattagtggatagattcggcaaagaaaatgttaaagtaacatttggatggataacatcaaagaaacgaaaagaattaggattggagaaagatcattggttggatgcatgttctatattgaatacaaacaaaatagagacaagaccttttttgattatccctaaacgtcgtagaaaagaaataaacaatccaacgaagaaacacgaaactttcaaagggttcaaacattgggatcttgttaaagctgttcgtagtggtaagaaaatggtaggtgtaattaggagtttaaagaaacgaactttaaccttacgtacatcttttgatgataattttgaggttagttattcgaagacaaaattgttgtggagaccacaaggtttggtttacatattgatgtaa

SEQ ID NO: 1342 - DNA, 311 bp, unidentified
  source 1..311: mol_type = other DNA; note = Thermotogaceae bacterium
tataacaattagtgtttttaggggtctgagcccgaggtggtccttggaagtgggataagctcccctgaggaaatgaactcagggtgtgaaagaggtggaaatctcaccacctacgttccgtggttgtccgtgaggacaggtaccttaaggtgttgctccagctctaagctctaccggccatcgggaacgaaacgtagactgagatgtcggtatacatttcgatggctatcagagaccatgggacatgggcgaggggcaccataaccccacaagggaggtacccttaaatgggtgttcctaaatatcatatg

SEQ ID NO: 1343 - DNA, 969 bp, unidentified
  misc_feature 1..969: note = Ga0307376_10002476 JGI
  source 1..969: mol_type = other DNA
ttggcggcaacccggcgttccggtagagtgcggcaccttctcaaagaaggaaaagcccgcattttctgctacgaaccgtttactatccaattaacttacgagaacacggaatttgtgccggtagaaatgacgttggggattgatcctggttccagcgatactccagtagcagtcgaggtgcatgagcctgacgcggaaatgtgcagtatcgtttatgcgaaagagattctgcttcgcacagacatctctgcacagttgaagcgcagatccgatgcccggggtaatcgcagaaaccggactacccgttatcgtaagtgtcgttttcagaaccgcgttaaatctgtatgttcggtgtgcggcaaaaatcacacgccgaagtcttggaagaaagagaaacgcaaaaacagtaagggccacaaaaacgtttctaatggtcgtgcagcggtttgcaggaaatgtcagcatgaacgtccgagcgaaaagggtaatcatgataccgacaagatccttaaccccacgctgcagaacaaagttgataccatcgtagctgaggtcaagaaattggtcgagataatgcctgtgacgaagatccgagtggagttgaccgcctttgacactcagaaaatggccaaacccgagattcagggtatggagtatcaacaggggaccctgttcggttatgaagtaaaagaatatttgcttcataaatatggtcataattgtgtgtactgcaaagggaaaagcaaggaccttgttttggagatcgagcatgttataccgaagtcccggggtggcactgataagatatcaaacttggtgatctcctgcgagacgtgcaaccgggagaagggatcccggactgccgaggaatacgggttccccaatattcagaaagaggcggcgaagttcagggcttttcgctacagcgctcttactcaagctataaatgggcgttatggcaggagttaa

SEQ ID NO: 1344 - DNA, 368 bp, unidentified
  misc_feature 1..368: note = Ga0307376_10002476 JGI
  source 1..368: mol_type = other DNA
gtcaattaccccaggctaaagccgggggcttgagggagaaatcctgacagtcttccgctttagtcaggaacgaaagttccataagcgacagcctaagtcctaatcgactacgttctttcgaatatcagacagccggatgaaacgcggcccttctccgggtcagctagtccggcacaactttctggaggctctgtaaagtccttttggggatggggcggtcaacctcgggacgacctgtcgttacaggcaactcggaagaacattggctgggaaatgaacgggcgaaagcctgtattattccccgcgaggggaaccatggagatgtatttgcagtgacacaggccgaaagaaggcccgaacaagaaccg

SEQ ID NO: 1345 - DNA, 750 bp, unidentified
  source 1..750: mol_type = other DNA; note = Human gut metagenome
ctgggcgtggatgccggcagcaagcatgtcggcctgtcagccacgactgaaaaggaggagctttatgccgcagaggtcgaattaaggaccgatatcgtggacctgctgtccacccgcaggcagaacaggcggacccgcaggaacaggctgcgttaccgtctcgcaaggttcgacaaccgtgtccactccaagaacaagggatggctggcaccatcgattgaacagaagattcagagccatctgaaagcggtaaaggatgtacataaactgctccctatatcaaagatcattgtcgaaactgccagctttgacatccaaaagatcaagaacccggatattgccgggaaagactaccaggaaggcgaacagctaggcttttggaatgtccgagaatacgtcttatggcgggacggacatgtatgccagaactgcaaaggcagatccggggacaagatcctcaatgtccaccacatagaaagccgaaaaacgggaggagacgccccgaataacctgatcaccctatgcgacacttgtcacgataaataccataagggagagatagagcttcacattaaacgggggcagtccttcagggatgccgcgtttatgggagtcatgcgatgggcgttctatgccaggcttcaggaacaatatagtaatgtccatatgacctacgggtatatcacaaagcacgtccggatcagcaaccatctggaaaaggatcactgcgtagacgccaggtgcataagt

SEQ ID NO: 1346 - DNA, 245 bp, unidentified
  source 1..245: mol_type = other DNA; note = Human gut metagenome
tggatgtcaataactcgccacttgtagaagtgggggcttcaagcctttattgatcagactaagcgcttcgagcgctacgttaccctctaatatatagttaccggtggatgttcagcctagtctgccgctctaaggacagtgattaaacagttctgacgggtaggaacagtgttgctgttaaaaaccgagggataacattgtcgaaggctgcctaactctagcatacaggaggttttaaaaacatg

SEQ ID NO: 1347 - DNA, 1527 bp, unidentified
  source 1..1527: mol_type = other DNA; note = Erysipelotrichaceae bacterium
atgcatcaagcgctgcagacattggcgatgggtgctacgtgcggtggacacggacagaacagtgttgtatctgtcgcaaatcaccaacttatagaaaaggaggcgtcagtcatgaaggtttttgtcatagggcggaatggtctcgggctgatgcccaccaaaccacgccttgcccgtatccttctttccaaaggaaaggcaatcgttgttaagaagagaccattcacaatcaaactgttatataagaccggcagtgccacacagcactgtgaggtcgggatcgacaccggttctcaacacatcggtgtagccattgttgcggacgatgttgtacttacaaaagaagagtgggaacttcgctcctcaatggagaaacgctctcttatggaaacgcgcaaggagtatcgaagtggaagacgttatcgtaaaaccagataccgtcaccctaagttcatgcctcacacaaaacgagtctattatgaaaaagctgtaactcggcacggccataagacacactggatcaaagtgaagaatgaattcacttcctacagagaagacggatggttagcacccagccttcaatcaaaggtggatcatcatcaccggattatagactcatatctttccgcattgccaaaagatacacatctgaatatcgagctcgcacggtttgatacacacaaagctgtagatcctgatgttactggagaaggatatcagtatggtccgctttatcaacaggaaaacctgaaggcttatgtgtttgcaagagacaactacacctgtcagatctgcggagctaaagccggccgggtcagaaaagacggcagtaccgtcaagctgatcgggcatcatatcaattatcgatccaacggcaccaccaataatccttcagggatcttgtctgtttgcgacaaatgccatacacaggctgatcatcaaccaggcggaaagctctatcaactgatgatatccaataagaagatcgcccgtggattaagagatatgacaacagttaatatcgttgtgtctcaattacgaaagatgtatccttcggcattcttcacatacggcaactataccaaggctaatcgcgatctgatgggattgcttaagtcgcacgccaatgacgctgtggctatcgcgaaatgccaggacatcctgtttacgggaaatctgaccatctgcgattgtaatggaaccgtatattacaagcaggttcgtcgcaaaaagcgttctttgcatgaagcgaacccccggaaaggccgtaagactcttaaccgcacagcaaagcgttattccaagaatacgaagcgtgtgaagggctatgacctatatgccaaagtgacatatgatggacaactcggttacatatccggctttaccggtacaagcgcctatatccaggattgggaagggcgttacatcagaatgcagaacaaaacatatttgaacatttcgctatctaaattacacaaactggataacggccacaattggctgtcccgattcatcccctccctatag

SEQ ID NO: 1348 - DNA, 299 bp, unidentified
  source 1..299: mol_type = other DNA; note = Erysipelotrichaceae bacterium
gtcaattacccaccacttagaacctgatggttcctgaagtgggggcttgtgaaaacaagtcggttgactagcctgagatcttcgagatctacgtttgcagagttatgactctacccgatggtacccaagtcggtatgagtccgagcaacgaatgaaggagatgggttccctgaatcgactcgatgcatcaagcgctgcagacattggcgatgggtgctacgtgcggtggacacggacagaacagtgttgtatctgtcgcaaatcaccaacttatagaaaaggaggcgtcagtcatgaag

SEQ ID NO: 1349 - DNA, 708 bp, unidentified
  misc_feature 1..708: note = Ga0265594_1010503 JGI
  source 1..708: mol_type = other DNA
atggtagtttttgtactcaacaaacatggtaaacctttgatgccttgcactccttgcaaagcaaagaagttgttaagaaacaaaagagcaaaagtagtaagaaagactccattcactattaaattacttggttggtctagtggttatgttcaaaaagtaacagtaggaatggatactggcagtaagaaggtaggagtagcagcaatatctaataacaaagttttgtatcaatcagagataactttgagaaacgatattgtaaagaagatgaaacaaagagcatcttatcgtagaacaagaagagctagaaaacttaggtatcgagaaccaagattttcaaacagaggtaaaaaaggttttcttgcaccttcaatgctttctaagattaattctcatttaaaagagaagaaatttgttgaaagtattttaccagtatttgaatggatattagaaacagcaagttttgatattcataaaattacaagtccaactgtaaaaagtaaaggttattgtaaaggaattttaaaggattattataatgtaaagcaatatattttgcatcgagacaattacaaatgtcaaaaatgtaaaaaaggtaatttaaaattacatgttcatcatattatttttcgttctgaaggaggtacaaacgaatcaaaaaatcttatatgtttatgtgatgaatgtcatgataaattacataaagga

SEQ ID NO: 1350 - DNA, 242 bp, unidentified
  misc_feature 1..242: note = Ga0265594_1010503 JGI
  source 1..242: mol_type = other DNA
gtgaactacccccaccttaaaggtggaggcttctaattatcattaaggagtctggttcaccagaacactaacaggagaaaagtaatacaatgttagtaaacgataggaaagaaattaggtaccttggaatgtcacctcagtttcaagctctacggatacagattaaacaactttatagggtaataagtagtgtttgtatcgtaaaacctttccatatctgttcgagaggaagtcggattcta

SEQ ID NO: 1351 - DNA, 1515 bp, unidentified
  misc_feature 1..1515: note = Ga0310786_10003093 JGI
  source 1..1515: mol_type = other DNA
gtgctgcgcgttaaaaccttgtataacatcggcgatgtggaccacagagcgttaggctctgcattatccgttaaatcggatcaaaaagacgaaaggggacgcagaatcatgacaatattcatcatcggcaaaaacggtgaacggttgatgcctactgtcagatgcggacgtgtccgccatctgttacaggatggcaaagcaatcatcgtaaagcatgacccgttcaccgtacaattaacgtacggaagcaatgaatacgtgcaggatattgagctgtgcatagactccggttacgaacacgcaggtgtgagcatgaagtccgacgcacgggaatacgtttccgcacagtacgatatgctttcggacgaaaaacagcggcacgacgatcaacgtcgctaccgcagaacaagaagaaaccgcaaacgctatcgcaaaccccgtttcgataaccgcaacaaaccgaaaggctggctcgcaccctctatacaacacaagaaagaaacgcaggtaaggttgatagaacgtttcgtatcagtcgcacccgtaacatccataattgttgaggtggggcagttcgatcctgccgtactaaaagcgatagaggaaggtacttctatcccggagggtacggattaccagcggggcgaaagatacaggttcgctacgctgagagaagccgtatttcaaagagacggatacaaatgctgtttctgcggaagagggatcaaagagaacgcgatcctgtacgcgcaccatgcactctactggaaaggcagacatgctgatcgtgtgagagagctggccgcttgttgtgagagatgtcatacggccgctaaccaccatcgaggcggaaagctttggggatacgagccaaaggtttccaaacttgagggtgcatcttttatgaacgcggtacgatgggcaatcatcaatgagttgaaagccaagttttctggatacgtacactttacatacggagtaacgactaagctgaaacgccagaccctgaggatagaaaagtctcacatcaacgacgcttatgctatggggaataaacatccagaaaaaagggcgagtttcgagcattacgtcaaaagacgcagaaacaatcgttgtttggagttgttctacgacgccaaatacattgatttgcgcgacgggaaaactaaagcaggcaaatccctcggatgcgaacgtactaaccgaagagagccgagaaacaacgaaaagagccttcgcaagtacagaggtcaaaagatatccaagggaagaagaagtatacgcaaaacccattacacgatacaaccgggaacactcttgtcgattaacaacgagcagtatgtagcaaaaggttgtcactgtaacgggaaaagcgtaatgcttacgaatggcaaaagtgtcactgtttctaaagccagagtattaaaatacgcatctgggtggatgcaaaaaaacataacgaaaggatgcgccattcctcccaccttttacgaagtgggcttactggcgcagtag

SEQ ID NO: 1352 - DNA, 282 bp, unidentified
  misc_feature 1..282: note = Ga0310786_10003093 JGI
  source 1..282: mol_type = other DNA
gtcatgaaccaaccactcacgtagtgggcttgtatgggactacgagcgcatgattagcccaagtgctacgagcactacgttatacaagaatatatagtcactccgggatgctccacaagtcccggactctgaggtacagtattaaacatctctgagggtaggagaagtgtgctgcgcgttaaaaccttgtataacatcggcgatgtggaccacagagcgttaggctctgcattatccgttaaatcggatcaaaaagacgaaaggggacgcagaatcatgaca

SEQ ID NO: 1353 - DNA, 1296 bp, unidentified
  source 1..1296: mol_type = other DNA; note = Human gut metagenome
atgccgaacaaagtgtatgtcatcaataaacacgggcgtccgctgattccctgctccccagcaaaagcccgtcatcttctggatgacggaaaagctaaagtcaagaagagaacgccgtttaccattcagttgatttacgggagcagcggatatactgaggatgtcatcctcggcgtagatgcaggaagtaaaactattggattatcggcaagtacagagcaagaagaactctttgcagcgaatgtaaccccacgcaatgatgtggtagatttactttctactcgcagagaattccgaagaaccagaagaagccgtaaaacgcggcatcgtaaagcacggttcaacaaccgtgttcacagcaagcataaagggtggttagcgccatctgtagaggtcaaaatccaagaacatattacctgcattaagagagtctgtaacattcttcccatcagcaaagtggtcgtagagaccgctgagtttgatttgcaactgctgaaagccgttgaagaaggtaagcctgtcccgcaaggagaggactaccagaagggagaaatgtacggacactacaatgtacggcagtatgtgctctggagagacggctatacctgccagtgctgcggtgctcattctaccaagaagaaagatgtcaaacttcacgttcatcatcttgagactcgtaaaactggaggagatgctccatccaaccaaattaccctctgtgaagactgccaccagaagctgcacaaaggattgattcctgcggcagacttcaaaaagaggaagcgtaagtctaccagagatgctgcttttatgggaatcatgagaaataccttgatgcagaggcttcgcagcgaactaccgattcccgttgctgaaaccagaggttatattaccaaggcaacacgagaaaagctgctggtactttctaaaagccataccaatgacgcactggcaatcgcccaagggagacatggcttcaatgtaggatatctccagagcatcccacaaaataacaggatttatacgattcgtcctgtaagacaccacaatcgtcaattacacaaagcaaccgttttgaagggcggcatacgacgggtaaaccaagcagtaaagtacgtctacggattccgcctatacgacaaagtgcgatataacggtgttgaatgctttgtctgggcaagacgagttatgggctatttccgactgaggcatcttggaggagaaaatgtcaaatgcggtgctaattataagaacctcgaactattagaacgcagtcaaaactatttgatcgcgtaa

SEQ ID NO: 1354 - DNA, 314 bp, unidentified
  source 1..314: mol_type = other DNA; note = Human gut metagenome
gtcaattaacccaccgcttaaacgctgaaacgttttgaagcgggggcttgcggtaaaagtcgtaagcctgattgactaccctaaacacttcgggtgctacgttactcaagaatgtatgtataggcaccggtaggcgttcatccgaacctgccgctctgcggtgtatgattaaaagctctgagggtaaggagcggtgttgcgcacgaaaaccttgagataacattggggacggatacctgacagtcgaaagactgcgtggttttctattaaccacaataatctacaaaaaggaggaaggcatcatgccgaacaaa

SEQ ID NO: 1355 - DNA, 750 bp, unidentified
  misc_feature 1..750: note = Ga0302213_1000513 JGI
  source 1..750: mol_type = other DNA
atgacaaattattgttatgtaattgataaaaacaaaaagccacttgagccaactaattataataatggttggagattggttagaaagaagaaagcgacattagtttcaatgtatccgtttgtgattaaattagaacgagaagttgaaacatcggaagtaaattttaatatatgtggtattgataccggaagtaaatttactggaattgctatcatttctgaatgtaaaaccataaataaagttttgtttaagggaaccatagcccatagacgagacgtaaacaagttaatggaattacgcaaaggacaaagaaaatatattggatatgctcaacattgtatgcaaggcaaaacttatctcagagaaaatttgctaaagatatatccaattgaattaacgattggttcagaaactgcgaataaacgcattgattggtgcattgagaaatcacatagtaatgatgcgattgttattgctggaataaaaccgtacaagtgtgatattcaagattgggttataaaaccaatgcgaaggcagagcaaagccaaaacggacaatgtattgggaattaaacacaaagatttggttttatacacatataaaaatggtgaaacacatattggatatgtgacagcaatttatccagaactaaatgctttgaatcttcagtcatcatcaaaacattgtaaaaaggttaacgctaaaaagtgtaaatttatatggagatttaataaaatttattggatgtag

SEQ ID NO: 1356 - DNA, 286 bp, unidentified
  misc_feature 1..286: note = Ga0302213_1000513 JGI
  source 1..286: mol_type = other DNA
tagataaacgtgtacaatagtggacaaacatctattactcgcggacagctgatgaggtttcacgcctaagtgaatgctatcaatgaaaattgcttgcatgatgagctacgatcgtataaatgccaaagacacaccctcggatgtaatcttcagtccgttgctctgtgagtataaaggatgaccgacttctaatgtcctgaagtcaaacaccgaactacatgtgcattatattgtcattggcaagaagaaaatactgcgaaagcgagagtagtcagagatgacaaat

SEQ ID NO: 1357 - DNA, 1350 bp, unidentified
  misc_feature 1..1350: note = LO132_10002610 JGI
  source 1..1350: mol_type = other DNA
gtggcgcgtgcccggccgggcaatccccggcgtctcacgcgcaagggaaaacgccagatgtcacaattggtatacgttctgcaccaagacggcacaccgctgatgccgacccgtcctgcaaaggcccgccacctgttggacgcgggaaaggcggtcgtggtacagcgcgacccgttcaccatccaattgaaggtgctctccggcaagcacgtccggccggtcacggtgggtgtggacatgggagcaaaggtggtgggagtagccgccgcaggctccgggcgggtgctgtaccagggagaggtgatcctgcgggacgacatccgtcggcggatggacagacgacgggcttaccgtcgcgcgcgccggagtcgcaagtgccgctaccgtgcccctcggttcaacaaccgccgccggccggcgggatggctgccaccctccatccgctcgaaggtggacacgacggtcaaggtcgtgcggcgagtagcctctttcctgcccgtctccctcatccgggtggaaatcgtcaacttcgacacacgagcgatgcaggccgggggaagcagattgccgggatgggcttatcagcgcggggagcagtacgggtgggaaaacgtcaagatgtacgtgcgtgcccgcgacgagtacacctgccggtattgcggtgcggtgatgccgcccgacctggaggtagaccacgtcgtaccgaggagtcggggtgggacagaccggcccaacaacctggtggcggcgtgtcacgagtgcaaccggcgcaaggggaatcagacggcgacggaattcagttacccccaggtggcagaacggagcgggcaatcgtttcgcgtggcggctcacacccaggtgggcaagatggctacgctggatgggctgaccgaaatcgccccggtcgagaccacctacggctacgtgacgaaggtagatcgggaagcgatgggtttgccgaaggcgcactactacgatgcggtagccatcgcgtcggcggggaagccggtcgaggtgctgggggtctacgaggcgctgcgggcggtggcacggggggcataccggcaacgcaagggagaccgttcccacctcgttgccagcctgccctacgaggtgtttggttttcggcagtgggacagggtggcgctaccagacggaggagtgggattcgtcgagggacggcggtcgagtgggtactttgccatctccgatctggaggggcaactgattgcaccgtcggtcaattgcaggaggctgcggcttgtcggccgagccggtgcacttctgacgggaaggaggagggcggcttcccttcgggctgagcctcagggcgaagcctcccccgactga

SEQ ID NO: 1358 - DNA, 360 bp, unidentified
  misc_feature 1..360: note = LO132_10002610 JGI
  source 1..360: mol_type = other DNA
gtcaaccacccccgactgaaagtcgggggcttgtaggggagaccttgcaagccccggttgaccggcctcagcccgtttcggctcaggccgatatagtcgagggctacgttgtcggcaaggctaagacccttaccaacgccttttggccgcgataggggacgtaccctgggatgctccctcagttccaggctctacaactaccggttgcagacaggctgaaggggtaggcgcgaaacgggccggtagatatgcggaccgacaacattggcgagggggacctgacgggtggcgcgtgcccggccgggcaatccccggcgtctcacgcgcaagggaaaacgccagatgtcacaattggtatac

SEQ ID NO: 1359 - DNA, 1227 bp, unidentified
  source 1..1227: mol_type = other DNA; note = Human gut metagenome
atggtatatgtgttaaatataaacggtgaacctttaatgccaaccgaacggtacggtaaagtcagacgaattttaaagtccggcagagcaaaggtagtaaaaaggacaccgtttacaattcagttgttgtatgaagcaacaaactgcacccagcctgttacattaggcgtggatgcagggtataaacatatcggcttgtcggctacgacagaaagtaaagaaatatattcaagtgaagttgttgaacgctgtgatatagtcaatttacttaaaaccaaaagggaatgtcgtagaacaagacgaaataacaaaacacggtatagaaaaccaaggtttaataaccgtgttcgcagtaagcataagggttggttagcaccttcagtagaacataaaatacaaacacatattaaggttatacaaaatgtgtgcagtatcgttcctgtaaccaaaattcgtattgaaacagctgagtttgatgttcataaaatcaaaaaccctgaagtacagggaatagggtatcaacaaggcgaaaagtacggctttgttaatacaagaaattatgttttgtggagagataaccacacttgccgatgctgtggtaagtcgaaaggcgtactttttgtggtaaatgctaaaggtataataacagtagcacctgaagatttgtatacggtgtgtaaagaatgtcttgataatcatattaaaggtattaaacctttaaagttcaagaaaaaaagacattttgcaccacctacacaaatgggtattatgagaaacactcttcttgacagactgaaaaattcagtaaatgttcctgttgaaaatacatacggttatgtaacaaaaggcataagggaagagtatggtattaataaatctcatacaaacgatgcctattgtattgcaggcaatttacaagcaaaaagattaaacgaatattacctacaaaagaaggttcgttgtcataacaggcaaatacataagatgaacactctcaaaggtggtaagaaaaaacttaaccaagcaccgtatattgtaaaaggttacaagctaaatgataaagttttatatgataatcaaatttgttttatatccggcaggcgtacttcaggatattttgcaataaaggatatattcggcaaaactttatcaagttctgtaagctacaaaaaattaaggctgttggaaacagctaaacactatactttagaaaggattgcaaggtaa

SEQ ID NO: 1360 - DNA, 289 bp, unidentified
  source 1..289: mol_type = other DNA; note = Human gut metagenome
gtcaacgacccacgactgaagtcacggacttgtaaatttaacaagtcactttagttggctgcaaaagcagcttgttgattagcctaagtcttaattgactacgttatacaagaatatatagacacctacggattttacgccaagtctgtggctctgtggagtacgattaaagagttctgaagggtaggaacagtgtcgtgcatatgtaaaaaccttgtaataacattggcgatggcgttttacagcacttatgtgctgacttacagtaaatgaaaggagtaccgtgatg

SEQ ID NO: 1361 - DNA, 1230 bp, unidentified
  misc_feature 1..1230: note = NODE_1723_length_10022_cov_2.7427 MG-RAST
  source 1..1230: mol_type = other DNA
ttgcgtaaaggcaagacacgctggctgtgttgcggtaagggacttaaaccatttgcgggattatatccaatgcaaaatcaacgaattccggtcctatctccaagtggtaaaccattaatgcccactactcccgcaagggctaggaaatgggtagaaagtggcaaagccataggcaagtggtctgacttaaatgtttggcacgttcagctagtttctgagccttctggacatgaaactcagcctattgctatcggtgtagaccctggcaaatcctactcaggaatttcagcccagtctaagcacttcaccctatttcgttcccatgttgttctgccttttaacagagttagggcaaggatggatcagcgtcgaatgcttagacgtggacgtagggggcgaagagtaaaccgaaaggtggcatacaaccttcgagcccatcgtcaggttcggttcaacaaccgcagaagctccaaagttgcgccatcaattaaggcgtctcgggatactgagtttcgcgttgtttctgagctggttagcctttatccaatctctcagattgtttatgagaaagtgagagccgacgtagacctcacttcaggtcgcaagtctgcccgctctgggaaaggttttagcccagtgatggttgggcaacgttaccagctcgctcaacttgccactatcgccccggttgtcactcgcgagggttggcagaaagacggtaatggcacgtctcaacttagatctcgcttagggttgtttaaggacaaagaaaacaaaggcaaggcttctcctgaaactcacgcagtagatggagtcgctttggcctgctctgcctttgttcggtacggcaaaaagtcgctaaccgaatgtgggtgggctgggtctgtttctattactgattcagtcttcagggtcattactcgctttggagctgtaaagcgtggaaagcaatatggcttctatcgccgtcagctccatgtagaagtgcctgctaaggctgctgttcgcaagcgcaaaggaggaaccatcactccgtttggcgtgagggtcggcgactttgttcaagccaccaaggcaggagaaaccattactggctggattggcggcttcaccaatacagaaaagtctcaaaagctttctgtctacgactggacttggaagcgtattgggcaattctcaatctcaaaagtaaaactactcaaaaggtccacaggattatgtgttgtctag

SEQ ID NO: 1362 - DNA, 319 bp, unidentified
  misc_feature 1..319: note = NODE_1723_length_10022_cov_2.7427 MG-RAST
  source 1..319: mol_type = other DNA
attatgccctttcatccgctcgagcgccgagcttcggtgaccttctaaaatgctttcctcactcactttcgcgttatcccacagacgatacgccgctttcgtccttccccaatctccgctcgcctggggcacactcgcctccggctgctgagctaggtcctcttcaatctacaatttccatcaagcggcgattcagccgcgcatctcctaaatctgagcttctcagctcttgcttggcccaattctgcatgattcctgcctgctcctggctggcgctactcctttcagaataactcatgccttggatctctcaaagtca

SEQ ID NO: 1363 - DNA, 1191 bp, unidentified
  misc_feature 1..1191: note = Ga0194137_10001287 JGI
  source 1..1191: mol_type = other DNA
atgacgtacaataagcaaggccagtgtaaggaaaggtggataccggtggtgtcctccacgggtaaagcattgatgccttgtcaccctagtagagcgcgtaagctagtagctaagggtaaagcagttaagaagtggctcaaaggcttcttctacatccagttgctggatcgtgaggacggcgacacgcaggagatctgcgtaggcgtagatccagggagtaagcgagaagggttcacagtgctctcaggcacacgcaccttcctcaacatcaacgcccacgccagagatggaaaggctgtcaagaaggcgatagaaaaacgcgctaatgcacgtaaaactaggcgtagtaggaataccccgtaccggtctcctaggtttaacaaccgttctcgtgaagactggataccccctagcactaaagcccggtggcagctaaaactcaacatcgtgaagcacttgatgaggctttacccgatcacgcgtgtagcggtggaagacgtggccgcagtcagtatgaaaggtggttatcgttggaacaatagcttctcgcccatccagacgggaaagaactatttctacaaggagttagagggtctaggtttaacactcacacagttcaagggcactgaaaccgcctctctacgcgctgcgctagggttgcgtaagacctcgtctaagctagctgaagtgttttcagcccactgtgtggactcctgggtgctcgccaaccaggtgttaggtcaacgaatcaccgtagacctaactgaactggttaccttgatcccgctggtctacgcccgtagacagctccatgtcttcaactgggctaagggaggtgtacggaagcggtggggtagtacgctgtctttaggacttcaaaagggtacgctatgttatcaccctaagtggggtaaatgctacctcggtggtagtgacggtgataagagagtgtcgcttcatgcttacagtaacaccaagcggctagcacggaacgttaagctggaagacacccaggtagtagcccactcaccctggcgactgttagacactcccgcgatgacgacacatcacgaaaagaggatcaggaggctaaacacactgtgcattagactcgcaacactaggcacgtcagactccagagtgtttcgcgcactcaagtcgggcacacccactcaccaaagggcagcatag

SEQ ID NO: 1364 - DNA, 258 bp, unidentified
  misc_feature 1..258: note = Ga0194137_10001287 JGI
  source 1..258: mol_type = other DNA
gtcaactaccccttcctaaccgaaggggcttgtaacgagtgaccacatcgctctaacaggactaaacagttgactagcctatgaccctagaggtcaaactgaacgaccttcgggtggaaccgagacgcacctacggatgcttccctagtctgtagctctgtggtcgtcagtggcgaagggaccttaacatgacatcattgatcctgtagaggactgaacatgacgtacaataagcaaggccagtgtaaggaaaggtgg

SEQ ID NO: 1365 - DNA, 1350 bp, unidentified
  misc_feature 1..1350: note = GENOME_ACESSION: mgm4547164.3 MG-RAST
  source 1..1350: mol_type = other DNA
gtgttaaaacagcagttacaagtaaagaaaaagaacatacctacggattcttcacaagttcatagctctataattcctacattaaacgagtctaaagacacagtgtgtaggaaagatactctggcttgtaacaactccgatgtgaatctacctgagtctaacaggattgagagaaatacaaaagtatttgtcctcaatgtaaaaggacaaccactaatacctacaactccttgtaaagctaaatatttgattaaaaaaggattagctaaagtagttaaagcatatccattttttgttattaaaatgttagtaaaaacaaggaattgtaagcaaaatgtagtattaggagtagatagtgattatcaaaatattggatttagtgcagtaagcaataagaaagagttaattagtggaactttggttttagataataaaactaaagatagattaacagaaagaagaatgtatagaagaagaagaagaaataaactttggtatagagaagtaagatttaataatagaagaagaaaagaaggatggttacctccatcagtagaaaaaagatatcaaactcatttaggacttattaataagattaaaactttgttacctattagtgatgtagtaatagaaacagctaactttgatatacagaaaatagaaaatcctaatattcaaggaaaaggataccaacaaggagaacagttaggatttgaaaatgtgaaacaatatgtattaacaagagataaaagaacttgtcaacattgtggtaaagataatactaaattagaagtccatcatattaaatttagaagtcaaggtggaactgataaaccatctaatttgataacattatgtagtaaatgtcataaagatttacataaaaataaatttagtataaaaagtattaaaagagattataaaccaaatacatttatgtctattattcataaaagattttggaaggatataccaacaatgtatgaaacatatggttatataactaaagctactagattaagtttaggattagataaaactcattataatgatgcattttgtatagctggtggaaatactcaagaaagagtaaaatcaatagaattaaagcaaaaacataggaataatagagtattacaactaaatagaaaaggatttaaaccttctattagaatacaaagatataagatacaacctaaagatttagttaaaattaataataaatggtatataacgaacggattacattgtaaaggaacaagaattatgataaataaaaagtcagtaaatataagtaatattagcaaatattttaatatgggaggtatgttcttttcctcccaaagttaa

SEQ ID NO: 1366 - DNA, 259 bp, unidentified
  misc_feature 1..259: note = GENOME_ACESSION: mgm4547164.3 MG-RAST
  source 1..259: mol_type = other DNA
gtcagctacctaaaactaaagcattgggcttgtagtgagaactacaacgtaagagttgattaggaggttttagaaggtgttaaaacagcagttacaagtaaagaaaaagaacatacctacggattcttcacaagttcatagctctataattcctacattaaacgagtctaaagacacagtgtgtaggaaagatactctggcttgtaacaactccgatgtgaatctacctgagtctaacaggattgagagaaatacaaaa

SEQ ID NO: 1367 - DNA, 1293 bp, unidentified
  misc_feature 1..1293: note = Ga0373632_0083918 JGI
  source 1..1293: mol_type = other DNA
atggcagtttttgtatgggacaagcgtaaacaaccgctaatgccttgctcagaaaaacgggcaaggttgttgctgatgcgtggacatgccgtagtggttacacactatccgtttaccattcgtttgaaaaaccgtattggcggcgaaatccagccgttgcgggtaaaacttgaccctggcagtcgccatacaggcatggcgttagttcgggaggataaagaaaaactcacggtcttgaatttgttccagctcaatcatcgtggtttgtcgatcagtgaaaacttaacctcacgccgtgttatgcgtaaccgtagacgcggtaacttgcgttatcgtccgacgcgtttcaacaaccgcactaagccgcaaggctggttagcgccctcgttacaacaccgtgttgatacaagcataagttgggtgaacaaacttcaacgccttgcccctgtgacagcgctttcccaagaactggtgcgctttgatatgcaactgattaacaaccctgaaatcagcggcactgaatatcaacaaggcgagttgcaaggctatgaggtacgcgagtacctgttggaaaaatggggcaggcaatgcgcgtattgtggtgcggaacacataccattggaaattgaacatatcgtgccaaaatccatctgtggcagtgatcgggtgtctaatctgaccttggcttgccgcgcttgcaaccaatgcaaaagcagccaacccattgaaactttcttggctaaaaagcctgtattattgcagaaaatcaaagcacaagcccaacgcccattgagggatgccgcagcagtcaatatcacccgctgggtcttagctaagcaacttaaagcaacaggtttacccgtagaattagccagtggtggcaggacgaaattcaaccgcataacccacggcattcccaaatcccatgccttggatgcggtgtgtgttggcgaaatagtcgcggttgcccattggaacattcctaccttggaaatcaaatgtactgggcgcggcagctatcaacgcacccgtttggacaaatatggtttcccgcgtgggtatttactgcgtcaaaaagcggtttatggcttccagactggcgaccaagtgaccgccaatgtgaccaaaggtaaaaagacaggcacgtataagggacgtgttgcaatacgtgccagtggttttttcaatatcaccaccgcaacaggtatcgtgcaaggcattagccacaaacattgccaactaatcgctcgtaacgacggttatgggtatatttttcaactaaaggtagcttaa

SEQ ID NO: 1368 - DNA, 293 bp, unidentified
  misc_feature 1..293: note = Ga0373632_0083918 JGI
  source 1..293: mol_type = other DNA
gtcaactaccccgccctaaagggcggagcttgcaagagctaggttgaccagactcagtgctgcaaggcactacgcagataagaggtcgttaagacttaccaagggatgcttccttagtcccttgctctaaaaggtcgtgatcacgctggcgcaaggtaaaacgccgcaggttgccgccgacactgagcgtagctgaagtgtgagccgcttatctgcattgtcgaagggagattacgggaaaccgtagcgttactagacccgtaagggtaactatttgaggcacaacaatggca

SEQ ID NO: 1369 - DNA, 1392 bp, unidentified
  misc_feature 1..1392: note = Ga0172378_10001289 JGI
  source 1..1392: mol_type = other DNA
atggtatttgttattggatataatgatatggcacttatgccatgtaaagaaagtaaagcccgtaagctcttatcaaatggcagagctacggttatacataaaatgccatttactataaaacttttatacaaaacaggttgtgctacacagcccatagaacttggaatagatactggtacaggcaatatagggattggaattacttcttgtaaaaaggttttacacaaagctgaagtgtctcttagaagtaaggatatagtcaagttgcttactactcgccgtatatatcgtagaagcagacgttctcgtaaaacggaatatagacatccaaaattccattatcagacaatctataaatatgttggtttgcttgtaaaacgtcaacataagattggtaaatcaacaaagagcttgtggtctaaggtgtccataaatcttatgtccaaacgccctgaaggatggctgccgccgagtacacaatcgaaggttaatgcacagattaagtggattgataaatatctttctatattaccacatccgtcattaacaatagaagttggtcgttttgatatggcacgaatgaaaaacccaactgtacataatgaactttatcaatatggggatatgtatgattatgacaatatcaatgtttatgtatttgcacgtgataattatacatgtcaatgctgtcatacaaagtcaacaccgcaaaacaatttaaagcttgttaatcaccatatcatttatcactcaaaaggcggtagtgatagaccgagtaaccgtatcacgatatgtgaaaggtgtcatacttctcaaaatcatcagccgggcggtatcttatatgattggatggtaaataaacgtaaggttgctaaaacttatagtgatgcaacacaaatgaatattatacgtagacgtatgttcaaagcatttccgcaagcaacttttacatacggaaatatcactaatcctgatcgtaagaaattgatactttcaaaaagccattgtaatgatgccatagctattgctcagcaaggacaggtaacaaatattcatgatatacctactgtattgtatataaaacaatcacgtaaaaagaaacgctcattgcatgaaggaattccacgtaaagggcgtaaaacacctaaccgtgcacagattcgcaacagtaagaatacaaaaactgttggtaccttccatctaaacgactgtgttaagtttaacaatcaaatcgggtggataagcggattttctggtaaatctgcttatgtaaaaggtttacaaggaacatatattcaagaagtaggaaaggcttataagcttatatcactatcaaagcttagtaagataggaaatgcgggcaattggctatatcaatacaagatagcctaa

SEQ ID NO: 1370 - DNA, 291 bp, unidentified
  misc_feature 1..291: note = Ga0172378_10001289 JGI
  source 1..291: mol_type = other DNA
atgaattaccgagcatgaaaatgcaaagtatttattacagctaataacttggatgactagcctcagtcctatattggactaagttatgaatgtcaatacatattggtacgataccctaatacctctaaatgtttaggctctgtaaacagttttgtcgagacgaaacagtcaacctaaagcacgaaacattcataaccttggcgaagggtacttacgtgaaataacacacgggcagatcagttttgtatctgccgtaaagttataacttgtagaaagggcaggtgttatatg

SEQ ID NO: 1371 - DNA, 1254 bp, unidentified
  source 1..1254: mol_type = other DNA; note = Human gut metagenome
atggtatatgttttagatattaacggacatccacttatgcctacagaacggcatggaaaagtaaaacatcttttaaaaaacggaaaagcaaaagtagtcaaaagatgtccgtttacaatacaattattgtataaaagtttgacttatacacagtctattatattaggtgttgatgcaggaagtaaacatatcggtctttcagcaacaacgaacgataaggagttttatgcttcagatgtagaacttagaactgatatagtaaaacttatatctaaacgtagagagttaagacggagcagacggaatagaaagacacgttacaggcaagcacgctttgacaacaggaaacgaaaagacggatggttagctccgtctataagtcaaaaaatcaaatgccatataaaagtagttgagaacgtacacaagatacttccgattacaaatattgttgtagaaacagcatcatttgatattcaaaaaattaaaaatcctaatattaaagatactgaatatcagcaaggcgaacaacttgatttttggaatgtcagagaatatgtcttatttcgtgacgaacatatatgtcagtgttgtaaaggtaaaactaaagataaaatccttaatgttcatcacatagaaagtcgtaaaaccggtggtaatgctcctaacaatttaatcactttatgtgagacttgccacaaaggttatcacaatgggactgttagattacctaaaactattaaacgtggaataatttttagagatgctgcttttatggggattatgcgttgggcattttataataagctaagagaaaaatataaaaatgtttcaatgacttatggttacataacaaagaatacaaggattgaaaataaattaccaaaaaagcattatgttgatgccagatgtattagtggacaccctttagcaaaaccatctgaaatgatttactatcaaaaaaagataagatgtcataataggcagttgttcaaaataaatactttgaagggtggcacacgtaaaagaaaccaatctgaacgagtcataaaaggatatatactttttgataaagttaaatatcagggtaaagaatattttgtctttggtagacgtataagtggattttttgatataagagaacttaatggcaacaaggttaacaaaggaagtataaattgcaaaaaactcaagctaattgaaagatgcagtggttatttaatagaattaagaaaggagacggtgctcctctcatga

SEQ ID NO: 1372 - DNA, 280 bp, unidentified
  source 1..280: mol_type = other DNA; note = Human gut metagenome
atgtcaataactcatgactaaagtcacgagcttgtaaaagcccgatattgaccagcctaagtgtttagtacactacgttaaaagagaatatatagttacctgtgaatgtttatccagttcgcagctctaaggtcagtggttaaacagttctgtggagtaggaacagtgctgctgatataaaaccttttattaactttggcgagggtaacttaacttctttaattttaaaggagcattatgtattaatttacatcatttgagaaaggagtgccgtgaaatg

SEQ ID NO: 1373 - DNA, 384 bp, unidentified
  misc_feature 1..384: note = Ga0395718_011872 JGI
  source 1..384: mol_type = other DNA
ctgcttcaagtcagattccccggctaccgacagccccgcttcgacaaccgcaggcggatggagggctggctgcctcccagcctggaaagccgggtggccaacctgcagacctgggaaagaagactggcctggtttgctcccgtggaaagcatctcgatggagctggtgaagtttgacacccaggccctgcagaacccagagatctccggggtggaataccagcagggtgagctgatgggatacgagatccgggaatacttgctcgaaaaatggggccggaagtgcgcctactgcggcaggacagaagtccccctggaagtggaacacattgtcccgaaaagccggggcggctcgaaccgggtcagcaacctgaccctgtcctgc

SEQ ID NO: 1374 - DNA, 293 bp, unidentified
  misc_feature 1..293: note = Ga0395718_011872 JGI
  source 1..293: mol_type = other DNA
gtgtactcgtggtcctgcgctcgcacttcatgcttttctgggtccagtttcatgtagatgcggaagaccttttccagtttggccttgccgaagatctcataccagctggcatccacgatcttccattcagccaccaggtccacaccttcgggttgtccatccacaatgtggaatggcgcactgtcacggttcaggcccatcaggcgcgtcttggtttcatcggcgctaagcgcggcggtatttccggcgggtttctttccaaataacggcatgtcacacctctctctatatta

SEQ ID NO: 1375 - DNA, 1305 bp, unidentified
  misc_feature 1..1305: note = Ga0208461_1004216 JGI
  source 1..1305: mol_type = other DNA
atgattagtaatagaaattcaatacgagtatttgtattgaacaaatataaacaaccactaatgccttgccatccggcaagagcacgtaaactacttagtaaaaaagaagcagcagtatatcgtagatatccatttacaattatacttcgtaaagaaactactaatttcactcaaccgattgaatttaaagttgatcctggtagtaaagtatctggtatcgctttagttagtaacaacgtccttttatggggcgctaatcttgagcatcgtggacatcaaattaaatctgatttagattcacgtagaagtattcgtagatgtagacgtaataaattacgttatcgtcaaccaagatggtctaatcgtaaacgtgaaaacggttggcttccgccatccttaatgtctagagtagataatataactaatttatgttatagattaagtaaacgagtaccacttacaaatatcgtaatagaaactgttaaatttgacatgcattctatgcagaatggatgtcaattatatggtactgagtatcaacaaggtactttacaaggatataatgtacgagaatacttacttgagaaatttcaaagagcttgtgtttactgtggcgaaactggtatacctttagaagtagaacatattataccgaaatcacgaggaggtactaatcagattagtaacttaactctagcttgtaatagttgtaatacaaataaaggcagtagcactgcaagtgaatttggttatccgaatgtacataaactagctcaaatgccactaaaagatgcagcagcagttaatgctactcgtaatcgtattggtaaagatcttaatttaagtggattgccagtagaattaactactggtgctcaaactaaaatgaatcgtattaaactcggtttaagtaaagaccattggattgatgctgcatgtactggaaatactggaagtaatatagttttcccaagtactaatatgagtatactcaatattaaagcaatgggtagagggaatcgtcaagtacaattaatggacaagtatggatttcctcgtaaaactaaaactaggttaatacaacctaaaactgttaaaagagttcatggattctctactggagatatagttaagttaacacaacctaatcatagtatttatgctggagtttacgttgaaagaattactgcaattcgatctagaggtcagctaagtattaaatttgacggtatgagtattgattctaattggcgtaactttaagttacttcaatacaacgatgggtactcatattcaacaatataa

SEQ ID NO: 1376 - DNA, 294 bp, unidentified
  misc_feature 1..294: note = Ga0208461_1004216 JGI
  source 1..294: mol_type = other DNA
gttgtccatcaactgcccctaattaatttcatgctcatccagcttaagtaatacttctgtattactacgttaattacgaatgagaatttattctcaaataggtactccaggatgcatctccagtccgggactctacggtaacgtattaaacaacacagaccgcgacaatgggtagtgtacattacaataaaccgtaattaacattagcgaggagaccttgacccttcgagaagactaatcccttacgggattatcataggaagtaatatgattagtaatagaaattcaatacga

SEQ ID NO: 1377 - DNA, 324 bp, unidentified
  source 1..324: mol_type = other DNA; note = Human gut metagenome
atgtccgtttccgtttttgttttggacaggaagcaccggcctctgatgccgtaccgacccgctcggacgcgaagttatctgacgcgtcaaaagcgcgttcacgggttcgccacgggtgacatggtgcgggccgaggtcccctcggggaaggaggtcggaacctatccggttcgcgtgactgttctaaatagcggctctttcaacattcagacgcccgaaggcatcatccagggtattggttggcgtcattgtcaacagctttcttacaacgacggatacgggtatgcgtggcttcgccccgcaccccattcctcccccgtttga

SEQ ID NO: 1378 - DNA, 278 bp, unidentified
  source 1..278: mol_type = other DNA; note = Human gut metagenome
gtcaaccacccctccttgaaaggagagacttgagcaatcaagccggttgaccggcctcagtgatccgaaaggagaactacgttgtcgtcgggttacaagacccgctccggggggcttcctcagctccgaactccggaaacggcagaagcagacaagcttcgggcaagtacgaagcggtctgtcgttgcaatgccggacgacaccattggcgaagggaattccgtcttttcggcggcccctccgattaaccgtaaggtttaccaaacatgtccgtttcc

SEQ ID NO: 1379 - DNA, 1293 bp, unidentified
  misc_feature 1..1293: note = Ga0137392_10005405 JGI
  source 1..1293: mol_type = other DNA
atggagcaatccatcatttatgttctcgcacagtcgggcaagcctctgatgccgaccagaaaccgcaacaaagtgtggtattggctccgcagaggactggcccgagtggtcagccgtgagccattcacgattcaactgcgctttgagaccaccggctacgcccaaccggtcacggttggggtagataccggctcgcagacggtggggatcgctgccatcacccagagcgaggcagtctaccaggccgaggtccatctgcgcgacgacattcataacaagctcatacaacgacgaaagtcacggcggaaccgccggagccgcaaaacgcgctaccgcgcggttcggttcgccaatcgtcgtcgcaagccaggctggcttgcgccttcgctgcgctccaaggcagaggccacagtgaaggctgtgctctttgtggcacggctgcttccggtgtgccagatcaacgtcgaagtagggagtttcgacacgcagaagatgcaagatcccgcagtaacgggtctggagtatcaacaaggccagatgcaaggttacctggtgcgagagtatcttttacggaagtggaagcgcacgtgttcgtattgtggcgcaactggccttcctctacaggtggaacatctcagtcctaaaaccagaggtggttcagatcgcatctcgaacctggtgctggcatgtgatccttgtaacaaaaagaagggaacacagacggctcttgagtttggatttccgcaccttcaggcgcaggcccgtgtgccactgagagatgctgcccacgtgtcttctatcaagactgccgtggttcatcagctcgttcagcagttcggaccagatcaggttgctgtgacctatgggtatgaaaccaaatacaagcgtcttcagatcttccaccttcccaagtcgcacaccaacgacgcgattgctattgcttgtgcagtgggagaggtggtgcaacccgctgcaagcatttttcaccaccgctgtgttcctcgcgggaactatcagttgtacaacggtgtgcggagcgagcacaaggtgtgggcgccgaagaagctgcatgggtggaagctgtatgaactggttgaggccaaaggggtagttgggtatattggcggtagacgcatccaaggggcctttgtcatgaaagatgtggcaacaggcaagggtatcctcgaagtaaccccgcgcaaactgcggcggctggctcgcccctggcacagctggatcgttgcccggcagtcgcttgtaagaaaggaggagcgcgcttcctcccccgcctag

SEQ ID NO: 1380 - DNA, 301 bp, unidentified
  misc_feature 1..301: note = Ga0137392_10005405 JGI
  source 1..301: mol_type = other DNA
gacctccaggctttgcctggaggcatgctccgaaagacccttggggtttgaggagcatgccgggttgaccagattgtgccttggagacaggcaggccgagcaagcgtgcgtcttgcctgtcgcagaaaaggctccgatagcaggaagtggtcaagcacctaccgagaagtgctgccccagcttctcgctctagaacggctttcttaaccagtggtgcggtcagccaccgtggagagccgacatcccgcctgctatcagtatcggggggaacgcttcactccgaaaggaaggcttatggagc

SEQ ID NO: 1381 - DNA, 780 bp, unidentified
  source 1..780: mol_type = other DNA; note = Metagenome
atggtgtatgtattgaatagaaacggaagtcctttgatgccatgtaaagaggcaaaggctagaagactgttaaagtatcataaagcaaaagtatataaaagggagccatttacgattcaattactatttgaatgtgaaaaccatatacaggatattacgcttggtattgatgccggtagtaagcatattggattgtcagcaacaacagggcaaaaggaattatatgccgctgatgttgaactgagatgtgatgttgtggaactgttatcaacccgcagacaatacaggcaagcccgtagaaacagattgagataccgggctccgagatttcataaccggatccattctaaaaacaaaggctggcttgctccgtcggtagaacagaaaatcaagactcacttacgggttccaaaagagcatattacagatgctcgctgtatatcagggaatccacaggcagaaccgctggggtattattttagtcaaaagaaggtgcgctgtcataacaggcagatccataaagcaaatattcaaaaaggcgggagcaggaaacgcaatcagatggagtatttagtaaaaggatttcgattattcgataaagtcagatatgataatcaggctggctttatctttggcagaagggcaagtggatattttgatataaggaagttgaatggcgaagtaatccatcgctctgcatcatataaaaaattagaattattggatacaagaaaaacattgttaacagaaaggagacaagcagtatctctcatggcttaa

SEQ ID NO: 1382 - DNA, 246 bp, unidentified
  source 1..246: mol_type = other DNA; note = Metagenome
ttccaggtcaataacccaccattaaaatggcgggcttgtaaaagcccttattgactagacttggtgttttaagcactccgttatgtaagaatatatagttaccagtggacgtacagcctaatccactgctctaagaatggtaattaaacagttctgacgggcaggaaccgtgttgccgttagtaaaccttatataacattgtctaaggctgcatgacttcagcatacaggaggatttaaaatcatg

SEQ ID NO: 1383 - DNA, 1257 bp, unidentified
  misc_feature 1..1257: note = Ga0131092_10008720 JGI
  source 1..1257: mol_type = other DNA
atggtttatgtaattaacaaacaaggacaagcacttatgccaaccgaaaggtttggtaaagtaagaagactattgaagaatagccttgcccatgttgtgtgccgtatcccattcacaatccaattagattatgacacaactaactttacgcagcccgtaagtttgggcattgatgctggtagtaaacatatcggcatttcagcaacgacgagtgagaaagaattgtacgcagcagacgtagaacttagaaacgatattgtagagaaattatctacccgtcgagaacaaagaagaactcgtagaaacaggttacgctatcgcaaggcacgtttcagcaatagagtggcatctaagcataagggatggttagcaccatctgttgaaaacaagattcaaactcacttaaccgttgtagagaaaatatacaagtttctacctataactaatatcacagtcgaaactgcttcttttgatatacaaaaaattaagaaccctaccatatctaacgaagagtaccagcaaggtgaccaacttaatttcttcaatgtgcgtgagtttgtgctgtttagagataatcacacttgccaacattgtaaaggtaagagtaaggataatatcctaaatgtacaccacattgaaagtagaaaagttggtggagattcgccaaataatcttataacactttgtgaaacctgccacaaggcataccataaaggagaaatagaactcaaggtaaaacgaggtgcatcatttagggatgctgcttttatgggaattatgaggtggaatttctacgaaagattgaaaaacacttacgctaatgtgagtatgactttcgggtatatcacgaagaatactcgtattactaatggtttgccaaaaaaccattatgtggatgcgaggtgtataagtgggcatcctacggctaaacctcttggttattatttctaccagaagaaagtgcgttgccaaaacaggcaaatacataaggtcaattttcttaaaggcggtagaaagaaactcaatcaagcaccgttcttggttaaaggttttaggctgtttgatttggttgagtatcaaaaagagttgtattatatctttggtagaagagatagtggtttcttcgatattagaaaacttgacgggacaaaagtaaacaaaggctctattagttgtaaacaaatacgattgatagatacgagaagaagtataataacagaaagaaggaatagtggttcaattcctcccacaaactaa

SEQ ID NO: 1384 - DNA, 283 bp, unidentified
  misc_feature 1..283: note = Ga0131092_10008720 JGI
  source 1..283: mol_type = other DNA
aaaaaaaatagatatgtcaactacccagaggctaaagacctcttggcttgaaaaagcccaagttgattagactaagtgatacccgaaagggttgaactacgttaggagagaatatatagttaccaagtgggtgtttgctcaagcctcttgctctaaggttggtgattaaacagttctgtgaggtaggaacagtgttgctaacgaaaaacctctccataacattgtcgatgagcatttaacggagaaatccgacttataataattattaaagtaagaccgaatg

SEQ ID NO: 1385 - DNA, 480 bp, unidentified
  source 1..480: mol_type = other DNA
atgtctaattacgtctttgtaattgatccgaataaacagcctcaaaacccagtacatcccgcccaagctcgattgttattgaatcaaggtcaagctgctgtttatcgccgttatccgtttactattatcttaaaggagtcaaaaccagcaccagaaatacaacaaataaccctcaaaattgaccccggttcaaaaaccaaatttaaccgcactcgattaaacctacctaaaacccattggttagatgcagcttgtgttggaaaacttgaaactttaaaggtgttaaccaataaacctttattgattcaggcaacgggacgtggtactcgtcaaatgtgtggtacagacaaatacggatttccaaccttcccatgtttttcttgtgattatgctgaaaaactctatgctgagtcagttaggatagggatctgttcttcaggtcttatcgattcagataggttaaagtcaaagaatcattga

SEQ ID NO: 1386 - DNA, 249 bp, unidentified
  source 1..249: mol_type = other DNA
gtcagcaccccgctctctttgtgacggggcttcatgcctccaactttagatagctcgtacccgcctcagcctaacggctacgttttctggatcataatacccacgaatgcgacgctagtttgtggctctattgttaacaattaaacagttttacgaggggtaagacagtgttgttaacgccaaaagttcagaaaacattggcgaagcgaacattaccctagaaataggagttatttcatgtctaattac

SEQ ID NO: 1387 - DNA, 402 bp, unidentified
  source 1..402: mol_type = other DNA; note = Human gut metagenome
atgccgtgccagccgcgcaaggcaagaatcttgctccgtgacggaaaggcaaaggtcatcaagcgcgagcctttcacaatccagttgaaattcggctccagtgaatataagcagaagattctcaagggcggaaaacgcaagctgaatcaggctgcctattccattcatggatttcatctgttcgacaaagtacggtttgctggacaagaatgcttcgtgtttggtcgccgtaccagcggatacttcgatcttcggaagctggacggaacagttgttcaccgttctgcttcttggaggcagttgcagaaaacctgcaatcgtaaatctatcttgattagtaaggaggtgatcggcgctcctcccacgactgaagtcgcgggtgtccgcgccgaaatatcatga

SEQ ID NO: 1388 - DNA, 291 bp, unidentified
  source 1..291: mol_type = other DNA; note = Human gut metagenome
gtcaattacccccgactgaagtcggaggcttgcaggaacgcgcaagcgtaactgacaagccctgattgactagactaagttctccgagaactatgttgccttggttatctcacccgtgggtgtttatcctagcctgcggctctgaggcggctctgtaaaagtcctaatgggtagggacggtcaaccgcgggacggccggacatttccggcaagccttggcaacattgtcgaagggtactttactcgttttgagccgctccggcggcgagaaaggaggtagacgtcttgttc

SEQ ID NO: 1389 - DNA, 1395 bp, unidentified
  misc_feature 1..1395: note = Ga0209200_1016766 JGI
  source 1..1395: mol_type = other DNA
atgaaagcttatgtattgaacaagaataaagaacctttgatgcctactactccggctatagcccgcattctgcttaaagagggcaaagctaaagtggttaagaaaacaccgtttactattcaactactgaacgattctacggggttcaaacaaccgatcgccggaggattggatatcggtgccgtgcatttagggtgtgcggccgtgtctgataaagaggttttgtatatgtccgaaacacttcttgaagacgattataccgtaaaacaaaagattcaacgaagaaagggattccggcggttaagaaggagccgaatcagataccggaagccgccatattcaagggcgatgatggtaagacttgctctgcaaaacagagttgcagaactaaagaaatcggaagtcgccgaactgtatccgaatttctcaaagaaaagaaaagtggcttttggcgatcaaagctcttttgtcgcaccatctgtacaaacaaaggtcaaccaccacctgcaggaaatgagaagggttgaaaaaatactacctgtatcgaggtgggtaatcgaaaccgcgaatttcgaccttcacaaaataacgaacccggaggttgccggggttggttatcaatatggcccacaatacaatttctacaatgtcaaatcatatgtcctcgacagagatggctacaagtgccaagtttgcggggcatccggtatcaaaaaagatggaaccgttttgaacgttcaccacatcgttccgaggagattatccaacagcacagatgatccctctaatctcatcactctatgtagctcctgccacaagaaagtacacaacaatgaagccaccttaaacgctaagccgatcaagaaagggaaacgccacgctacgttagctaacaccgttcgagcccgtttgattaaagctcttgactgtaagaacgttttgactacgtttggatatcaaacaaaattcaaaaggcaggcaatcttgggcttgccgaaagaacattacttcgacgcggtctctattgcgtttgacggaaccaaaaaaccaaaattgagcgatacggtttatcgtattcggagagtacccaaaaacgagtaccgaagagagcgtaggcgaaagaaaactgcaacgtccggaaaaacgtatcctgaggtaaaaatccgcggcaggtataacgggtataggaaatgggacttggttcgatatggtgatgtaactggttttgtaagatatttggcaacaaacaaaagtttagtgattacagaccttgacgggaacaaactactatcaatcagttctaacaaaaagcctgtaattcttcaagcgggcagccgttatccgacggtgataaaaaaagcacaagcccattgtataccacaacaaattcattga

SEQ ID NO: 1390 - DNA, 433 bp, unidentified
  misc_feature 1..433: note = Ga0209200_1016766 JGI
  source 1..433: mol_type = other DNA
tcaaaggatacggatacgtttacctcgccgcttcccccacacacgtgtggacagtacatttgaaactctttttggaaaaagggaaatagtgcttcccccacacacgtgtggacagtacactacgttccaagcgggtttgagggtaatcagtactgcctatgtgtccacccacacgtgtctcttgcaaaagagatgggattccagactctgactggagaaatccagtctccgttagtaatgtcatgatatccgtgtatgccgcctcagtacacgttagtatcgcttagtgtctcaaaaaggcctgaagtggagggcccggccgctaagtgtaaaaagcattattaacattgtcgagaggacgtcgaatgttttatctggtaacaggataaaactacgcacaaccctttttataaggaggatttagcttatgaaa

SEQ ID NO: 1391 - DNA, 1090 bp, unidentified
  source 1..1090: mol_type = other DNA; note = Oscillatoriales cyanobacterium
atattaactcaaggtaaagcagcagtttacagacgttatccgttcacaataatcctaaagtattcctgtgaaaaaccgcttaccaaatcgcacgaaattaagctcgatcccggctcgaaaaccacaggattagccgtattggaaggtgacaaagttatctgggcagccgagttagttcatcggggaaatcacatcactggtgacttagcatcccgagccgcaatccgtcgcaaccgcaggaatcgcaagactagataccgtcaacctaggtttctcaatcgtactcgcactcccggatggttgccaccgagtttagcttcaagagtatcgaatattgtgacttgggttcctgtaacagctatatctcaagaattagttaaattcgacacccaagcaatgcaatttcctgaaatatcaggaattgaatatactcaaggcgaactagcaggttatgaaatccgacaatatttgttagaaaaatggggcaggaaatgtgcttactgcggcatcaagaatacgcctttagaagtcgaacacattcacaaaggaggaagttcgcgggtgtcgaatctgactctggcctgtagaaactgcaatctggctaaaggtaatagagacatcacagattttctctcggaaaaatccgacattttatcaagggttttaaaatttgcttgcttgccattgaaggatgcagcagccgtgaattctactcgacgggcgctgtttgagaaactccaacacgggagggcaaactcagtacaatcgaactcgaatgggattgccaaaaactcactggctggatgctgcctgtgtaggtaaagtagaacaactggcggtactaagtaggcaaccactactgataactgccaaaggatggggcaaccgtcagatgtgtacgcccaataaatatgggtttcccagcaaacacagaaccaggtgcaagactttttttgggttccagactggagatatggtgaaagcaggtgatagcagttttgccgatcgggaaatttgcaggtactcacgttggtaggctggcagttagagagagtggagtctttgatttgaggacagcttggggaaaaat

SEQ ID NO: 1392 - DNA, 201 bp, unidentified
  source 1..201: mol_type = other DNA; note = Oscillatoriales cyanobacterium
gctatccaccaatcaccggacataacaggacaaccagtacctaaaggtgaagagatagccagcctcagttacaactacgttttcagggtgatgacacctacaggtactttccagcctgtggctctgtcgtcaatcgttaaacatctgtatttggttaaagaagtgcggttgactcaacaagccgatattaactcaaggtaa

SEQ ID NO: 1393 - DNA, 1092 bp, unidentified
  misc_feature 1..1092: note = Ga0376086_0019836 JGI
  source 1..1092: mol_type = other DNA
atgattcgtgtcccagtagtaagtcaaaatggaaaacctttaatgcccaccaaaagctcaagagcaagaaagtgggtaaagcaaggaaaggctgctggtaaatggtcagatgtaggcatttactatgtccaacttatcaacccagcagacgaagaaacacaacctgttatagccggagtagatccaggtaaatcgtatgcaggaatcggtgtacaatctggcaaattcacccttgctagatttcatctaatcctaccttttgggcgagtaaaacaacgaatggatcaacgaaggatgcttcggcgttcaagacgctctagaaggattaaccgcaaggttgcctttaatctcagaaaccatcgacaggttcggttcaataaccgcaagcaatccaaggttccaccatcaattaaagcgtctcgccaactagaactaagagttgttaaggaactatccaagatatttccgttaacagctattggctacgagcgagtcagagctgacgtagatagaaccaaacgaaaaacagccaagtcgggtaaaagcttctctcctgtaatgaatggtcaactttgggctatttcccaaatggagactattgcacctgtctttgttcgtgaaggttggcaaaaaaatgggaatggaacgtctcaaatcaggcagcatttaggactgattaaggacaaagaaaacaaaggtgaagccaaacctgaaactcatgctgttgatgctgtggctctagcctgcggttactttgttcaatacagccgccaccttacctcaaatacccaaggatacctctggaaagatgaagtccaagtcacggattcagtattcagaattatcacccgttctggtgctgtcaaacgaggtaaagaatatggattctttcggcgtcaactgcatttcgaggttcccgataaatttggaacaagaaaacgtaaagggggcacggttacaccctttagatttcgagtgggtgacttggttaaagccaataaagcccaagaaacatttgttggttacattggtggatttacttctaccaataaatctcaaaatgtttctatctacgactacacctggaagcga

SEQ ID NO: 1394 - DNA, 233 bp, unidentified
  misc_feature 1..233: note = Ga0376086_0019836 JGI
  source 1..233: mol_type = other DNA
ttcactgaccccgccttacttcgttgaaggcggggattgagggagataacccctcatgaaacagtgaatagtggcatgagttagtacgagataaacacctccgaacacttccctaattcggaaaaactgtaagattctggaatctcagaaagtggggtaatgcccagcaacaatcgtgctaatgccgtaagggacttttaaacttcacactcctaggattatctccatgattc

SEQ ID NO: 1395 - DNA, 2241 bp, unidentified
  variation 1034..1049: note = n represents any nucleotide
  source 1..2241: mol_type = other DNA; note = Chloroflexi bacterium
atgtcacaggtctttgtcctagacacgaccaagcgagcgctcaacccggtgcatccggggcgtgcccgcttgctcttgaagcagggccaagcggcggtgtatcgccgctatccgttcacgatcatcctgaagcgtgcggtcgagcaaccttctcttgaagcgcttcgagtcaaagtcgacccagggagccaaaccaccggactggcagtggtcaacgatgccagtggcgaagtcgtgtgggccgctgaactgaggcaccggggcaagcaaatcaagcgcgacctgcagagccgccgcgccctcagaaggagtcgcaggcaacgcaagaccaggtaccgccagccacgcttcgacaaccggcgcaaaaagcaaggcacgctgccgccatcgttagagagccgagtctgcaacgtggtcacctgggtgcggcgtctgcggcggctgtgtccgatcgcggccatcagtcaagaacttgtccggttcgatacgcaagcgctagagaacccagctatcgagggtgtcgaataccagcaaggccagctttcaggctatgaggtcagggagtatctcctgctcaagtggaaccatcggtgcgcctactgtgacgcaagctcagtgcccttggaactcgatcacgtgcatcctagagccaagcacggctccaaccgggtgagtaatctcgtggcggcctgcacgccttgtaatcggcgcaagggcaaccaggagattggcgtcttcctcgccgatgatcctgagcgactggcgcgcatcctggctcaggtcaagacgccgctcatggatgcggcggcggtcagtgcgacgcgctgggcattacacgaccgactcgtgcggctagggctgcccgtggaatgcggcagtggcgggaggacgaagtacaaccgcgtgaggcgagggctgcccaagtcccattggctcgatgcggcgtgcgtgggggtcagcacgccggagcatctggacgtgcatggcgtggtgcccctgcacatcagggcaacagggcatggctcgcggcagannnnnnnnnnnnnnnnggctccttcaatctcacgacagagcacaggaccgtccaagggatcagccatcgcttttgtacgctcatcgcgcgtagcgatgggtatagctaccaacaaggaaaggagcgggtgcttcctcccgtcgcctgaaggcagacaggtctccgcacccaggtttttgatgaaagccatacgcctggtcgaggttcatcgtcccctacagatgcaagaaatcccagtgcccacgatcggcgatgacgatgtgctggtgcgcgttcgggctgccggcatttgtcacaccgacgtccactatcgagcgggaaaatcgcctgtgcgaccattgcccaggacgctggggcacgaggtcgcgggtgtggttgaacaggtgggcaagcaggtaacatctgtcaaggtgggcgaccgcgtctgcgtgcattacgtcttgagctgcggcaactgcttctattgcagtgccggcaacgaacaattctgcgtgcggggctctatggtggggcgttatgccgatggcggctatgccgaatacgtcgccgtgccggaacgtaatgccctgcacctacccggcgaaatcccctttgaacatggcgctatcctgatgtgttcgtcgtccaccgctttccacgccctgcgcaagtcgagactcaagagtggcgagaccgttgccatctttggcgtgggcggactaggcatatcggcagttcagcttgcgtatgcctttggcgcgctcgatgtctacgctgtagatatcaacgcagacaagctagggctggccgaaaaatacggagcgattccggtgaatggcaggtcgaacgatgcggttgccgagatacgcaggctcaccaaaggcaaaggggtggacgttgcgctcgagatgatcggacttccacagacgatgatgcaagccgtgcaatcgttggcggtcatgggccgcgcggtcgtggcgggtatcagcgataagccgcttgagatcgatacctaccgggaactggttgccagggaagccgaagtcattggcacgagcgaccatctgcttcacgagttgccactcctgctcgaactgacccggcggggaaagctcgacctttcagaagccgttacaagaactgtgcccttggatgccggtgcgatcaaccaggtgctggataatctcgaacacttccgcggagatgttcgcaccgtgattgtgccatga

SEQ ID NO: 1396 - DNA, 303 bp, unidentified
  source 1..303: mol_type = other DNA; note = Chloroflexi bacterium
gtcagagacccgtcccgtcgaacgggacgggcttgcgtggtgagacgcaggcccccctctgaccagtctcagccaccggtctcgcttcggcgaggctgacggggctccgttggaagcgaatgcataggaacgtccgggtgcttcaccagcccggaccgcttcggggcagcattaagcaagctgacgggtaaagccagtgtgctgtccaccggaaaccgcttcgcaacgttgacgaggtgagcattacctgggcaaccagaggcccatgcgggcacatcacataaggagtcctgtatgtcacag

SEQ ID NO: 1397 - DNA, 1038 bp, unidentified
  misc_feature 1..1038: note = Ga0370494_000001 JGI
  source 1..1038: mol_type = other DNA
ttgtttgtatttgtcgttaatcaattaaatcaaccaatcatgccaacaacacccagtcgcgccaaacgctggattcgtgacggcaaagccacaccattctggaagcgtggcttcttttgcattcgattaaatttcgatccatctgataaagagtcagaacttgtcgccgtaggtatcgatcctggcagcaagaaggaaggtatcaccgtcaaatctcaagcccatacctatctcaacctacaagcagatgccgtcacttgggtcaaagatgccgtctcaactcgcagagatatgcgcaaagcacgcagatttcgcaaaacaccttgcaggaaaaatcgcatgaatcgcaaacgtggtggtcttccgccttcgaccaaagcccgctggcaatggaaattgcggatcattcgtcatctggtaaaaatcatccccattgccgagtttgtggtggaagacatcaaagccaaaactaaaggacagcgcaaatgggatgtatctttctcacctttacaagtcggcaaacaatggttctatgaccaattagaacaaattggctttgttcatttgttggaaggctggcaaaccaagaacttgcgcgatagttcagggctatccaagactaaaaacaaaatggctgaggtatttgaggcgcattgtgttgatagttgggtgttggcgaattggttggtcggcggtcacatcaaaccggataatactgcgatgatgtatttgacgccattacgatttcatcggcgtcaattgcatgttttgcagccgatgagtggtggaattcgtaaatcctatggcagtacgcaaagtcatcaatttgaacgcggtagtttgattaagcatatcaaatttggaatttgttatattggtggttatatgaaggatagaattagtttacatcatgttaagatcgggacacgtttgacacaaaccgccaaaccagttgagtgcaagtttttaacttataacacatggcgaggcttcctccccgccctgaaggacggggtctccgcctcgcaaaaaagatga

SEQ ID NO: 1398 - DNA, 255 bp, unidentified
  misc_feature 1..255: note = Ga0370494_000001 JGI
  source 1..255: mol_type = other DNA
gtcaattaccccgccctgaagggcggggcttgttcgaataatgttcaccacatcttgaaggacaagattaaaagcaatcgactagccgaatatgtggtaagacccacatgacgaactgaattgactacccatggtagggtgaaatacgtgttagatgtcattctagtccgacacctctatgtcagtcagtggcgaagaatagtatatacctcgaaagaggacttatcgtaactttataaagaactcattttgttt

SEQ ID NO: 1399 - DNA, 444 bp, unidentified
  source 1..444: mol_type = other DNA; note = Gammaproteobacteria bacterium
atggccgttttggtattggacaaaagaacaaagccgctgatgccctgtgcggagaaacgggcacggttgctattggagcggggccgggctgtggttcacaggatgcgtccgtttacgatccggctcaaagatcgtacgctggaggaatcgaacctgcaaccgctccagataaagatcgatcccggcagcaagaccaccggggtcacggtgatccgcgccgacgacgctgatccagagcagcagcaggtcgtgatgctgatcgacatcgaacatcgcggccaatcgatcgatgcggcctgtgtcggacccgtcacggcgatcacccactggaacgtgcccaccctgaccgttcgggccacggggcggggcagttatcagcgcacccggctcaaccggtttggcttcccgcgtggctacctgatgcggcaaaaacaagtgaagggc

SEQ ID NO: 1400 - DNA, 290 bp, unidentified
  source 1..290: mol_type = other DNA; note = Gammaproteobacteria bacterium
gtcaactacccccgcctaaaggcgggagcttgtgaaagcaagctgggttgaccagggagagcggccaatacgccgctacgttggcaacaggtcgtcaagacccaccagcgaatgctgcctcagttcgctgctctggaagacggggatcatgcaggcgaaaggtaaagcgccgaaggttcccgtcgccgcgcaagcgggagccggttgccgaccttcccgaggggagccggggcgcaagccccgcgtcactggatctgtaagggtggtatgtttggagcattgagatggcc

SEQ ID NO: 1401 - DNA, 1335 bp, Trichococcus palustris
  source 1..1335: mol_type = other DNA
atggtattcgtgttaagcaaacaaaaacaaccaatggacaactgtacgcctgcaaaagcacggatacttcttcgtgacggctcggcaaccatacataagcagtacccctttaccatccggttgaaggacaatgcggcgcacaccgccgacaaaacgtatcagattaagttggacccgggcgccaaaataacaggcgttgccttagtagacagtgaagcccatgcggttttctttgccgaactggaacaccgcggagagcgcatcgttgctttattgcagacgcggtaccgtaaacccaagtggggaaatagctttaaaaagaaggattctaaattcaacgcggatacccgcagaccggagggatggctaccgccgtccgttgtgtcgattgagcaggatatcgtacatttcgtcaagaaaatgcgaaatctctgcatgattcagttggcggcggtggaatccgtcaaattcgacatgcagaagatggagaatgcttccattacggacgtggtctaccagcaaggcacgttgatgggttacgaaatccgccattacctgttggaaaagaaaggccatgcctgtcaatattgcggtggcctctcccaagacaaacatctggaagtggagcatatgcatcccaagtcccgcggcggttccgaccgcctgagcaacttgaatgtagcctgtcatacgtgcaatcaggataaggacaatcgcacgctggccgaatacgtggagcggctaaaaagctccaaaaccaaactcgaccagacgcgcattaaacggatagagcaaatcctaaggacaaacaaaacgttcatcggtctgcgctatgcggcttgggccaacagcatgcgacaccatttggtggctgacttagaaaagttgttgccacacataagccaaggcaccggcggacagacgcaatacaaccgcacgaccggcatggggttgccgaaagaacactattatgacgctttatgcgttggcagaatcccttccagcggctatcgtttggtaacagacaaggttttgtgcatcaagtcctatggacgaggcagccggttccgcggccggacgaacagttgcggcatcatcaccaagcaactgacacgccaaaagcagtttttcagctttcagacgggcgacgtcgtccgagcaaccgtgccaaacggcaagaagaaaggcattcacctcggacgagtggctgttcgcaaaagcggttatttcaacatccaaagcaccggattagttgtgcaaggggttagttacaaacattgccgcatcatccaaaggaatgacggatacggctatactttaaaacaaaggagttga

SEQ ID NO: 1402 - DNA, 312 bp, Trichococcus palustris
  source 1..312: mol_type = other DNA
gtcaactacccacgactgaagtcgtaggcttgtaaaagccttagttgagcagactcagtttccgctttgcgggagctacgttaaattagccatcatggtctcttgtgcttctccagcaggaacagtcatggtcagcagtctaaacagtccgaagggttagggccgtgctgctgatgtaaaaaacttttttaactttgtcgaggagagagaggccgaacggcctccgttacctgtctgccagcttcattcgacagatagagatagttttatttttgattgtaaaataaatgcaaaaaggagctgaacgaaatg

SEQ ID NO: 1403 - DNA, 855 bp, unidentified
  misc_feature 1..855: note = Ga0209167_10018693 JGI
  source 1..855: mol_type = other DNA
atgtcggtccttgttctggataggcacaagcggccactcatgccgtgttcggagaaacgagcacggctgctgctcgtccgtaaacgcgccgtggtccatcgctttgtcccttttaccatccggctgaaagagcgcacggtccaggagagcctggggcagccaatcgtgctcaagattgagccaggctcccgaaccaccgggatggcactggcccgcattgagcagactgaggagggcgaagtgcatcacgcgctgagtctttccgaactcacccaccgcggcgaagcagtccatcacgcccttttgcaacgagcaggctatcggcgacggaggagatccgccaacttgcgctacaggccagcccgcttcgccaatcgtaaacgccagagcggctggcttcccccttcccttttgagcagggtcgggaacgtgcttagctggacgcgacgctatcgccgatgggttcacttgatgcggatcgaggtggagcgcgtgaagttcgatctgacgctccttcaaaacccagaggtcgcgggcgtcgagtatcaaagaggcgaactgttcgggtgggagatcaggagctatctgctggagaaattccagcatcggtgcgtctactgcgggcgcgcaaacaccgcctttgaactggaccatatccggcctcgttcgcgcggcggatccaatcgtgtctcgaatcttgcgctcagttgccaccactgcaacaccatcaaaggggatcggacagccagcgaattcggccacccggaagtggaagcccgggccaggaagccacttcaagacgccgctgcggtcaatgcgactcgtttcgccctggtcgaggcgctgcgtctcctc

SEQ ID NO: 1404 - DNA, 325 bp, unidentified
  misc_feature 1..325: note = Ga0209167_10018693 JGI
  source 1..325: mol_type = other DNA
gtcaacgaccccacacgtaaacgtgggggcatgctcccgcagtttacgcggtcctcgttgtccagcctgagttcctgatcctagaggcagggagctgagggaactacgttggtcaggtcatggcacctctggatgccacctcagtccagagcactgccgctggtcgttaaaaggccttcggggtaggggtcggtgcggccagccgaacaagcctgtggccaacattggcgagaggggttgcccgggcaagccgacccaggcgcgtcactagcccagtaatggggcctcatcacgaggcaaaacggaaaggagtgcttccatgtcg

SEQ ID NO: 1405 - DNA, 1413 bp, unidentified
  misc_feature 1..1413: note = Ga0222637_1000159 JGI
  source 1..1413: mol_type = other DNA
atgcagaagttagaaaagagaaatacatatacacctacgggtgctccacaagcccgtagcaactgtgaccctgtaattaaacagagctgtggggtaggctcggtgttgcggggtttaaaaaccttttctaacggctccgatgtggaccaacttcagcatacaggagggcttaaagctaatgtgtatgtatatgtaataaaccatgatggtttaccgttgatgccatgcaagcctgccaaagctcgtcacttattgagagacgggaaagcattggtagtgaaaagaaaaccttttattatcatgttgttgtgggattgtgaagattatagacaaccggttgtattaggcttagaccctggttatcgatatactggattttctgcgaggtcaggtaagaaagaattgatttcggggacagttgtggggagaaccgatatccctaaaaagatggagcaaagacgaaattatcgtagaactcgaaggggtaaattatggtatcgggaaccgagatttgataacagaacaaaggaaaagggttggttggctccttcgattcggcacaaacttgattcgtttgtaagattggtttggggtatatcaaatattttaccgataacgaagataatagttgaggtagcaagtttcgatatacagaagataaagaatcctggtatcagtgtcaagggatatcagcgtggggtgttgaaaggattttggaatattcgagaatacgttttgcatagagacaatcatttatgccagaagtgtaagggaaagtccaaagataaaatactccaggtacatcatgtacacggtaaaaaggaaggtgctactgatagacctgaggagttgttaactgtttgcaaaacatgtcataaaaaccatcataaaggaatagatttgattcctgataaagagataaagagatttaaagctgaaacatttatgacgatggttagatggaagtttgtgaataaattgatagatatatttggtgacattgtttctcatacttatgggtatatcacgaagtccaatagaattggattgggattggaaaaaagtcatgtgagcgatgcactgtcaattagcatgggtagaagttataaaggaataccattaccgatattttataatggaccgcaattattcgacaggtgtaaatcttttgatgtgaaacaggtcaggagaaataatcgttcgatacagattaatcgaacgggattcaggccctcgatacggagagagcgatatccgttccagcctcatgacctggttagatataacggtaaggaacatcgagtgaaaggcagtcattgttatggagcgagattggtattagataataagaaatcagtggatgtgaaccgagtggagttgataacttatggtaaaggattatgttacgcttaa

SEQ ID NO: 1406 - DNA, 249 bp, unidentified
  misc_feature 1..249: note = Ga0222637_1000159 JGI
  source 1..249: mol_type = other DNA
gtcagatacccaccgctaaagcgggttggcttagcctactgtctgattaggaggcattaaacatgcagaagttagaaaagagaaatacatatacacctacgggtgctccacaagcccgtagcaactgtgaccctgtaattaaacagagctgtggggtaggctcggtgttgcggggtttaaaaaccttttctaacggctccgatgtggaccaacttcagcatacaggagggcttaaagctaatgtgtatg

SEQ ID NO: 1407 - DNA, 1035 bp, unidentified
  misc_feature 1..1035: note = Ga0070698_100047374 JGI
  source 1..1035: mol_type = other DNA
atgtcgcacatctttgtccctgtggtcgatcaggaacacaccccgctgatgcccaccaggccatcgcgggcacggcgctggatcaagagcggcaaggcgacccacttctggaaagggggggtgttctgcgtgcgcctcaacaggcagccatccgcgcgcgagcagcaacctatcgcggtgggcatcgatcctggttccaaacgcgagggcctcgtggtggccggagcttcccacacctatctgaatatccaggctgaggccagagacggcgtcaaggaagcggagagggacagcacgcgcatgcgccgcacccgtagagggcgcaagaccccttaccgcaagccgcgccagaaccgcaagcagagcaagaagaagctgccgccctccaccagggcacgttggcactggaaactgcgcctggcagcctggctctgccagctcttcccggtgagcgtcttcgtggtcgaggacatcaaagccatgacccgtggcaaaaagcgctgggatcagtccttttccccgttagaagtgggcaagcactggttctatgcggaactctcgaagttggctcctgtccagatcaaacagggctaccagaccagggaactgcgcgagcggttgggactgaagaagacgcacaagaagttggcagaggtgtgggaagcgcactgtgtcgatgcctggatactggcccacagcgcagtaggagggcggaagtccccagacaatcggcggttggtctgcgtcgcgccactgaattggcaccatcgccaactccatcgcttcgagccagagaagagaggcaagcgcaagccctacgggggcacacgctcgctggggatcaagcgtggcaccctggtcaagcacccgaagtggggcaaaacctatgtaggtggcacgatggacgggaaactgagcctgcacgacccacaaacgggcaagcggctcacccaatcggccaacgtcgccgattgtcggctgatcaagctgttacggtggaagacgcggctggtgcctctcttccccactaaataa

SEQ ID NO: 1408 - DNA, 243 bp, unidentified
  misc_feature 1..243: note = Ga0070698_100047374 JGI
  source 1..243: mol_type = other DNA
gtcaagcacccatccccttgaaggggatgggcttatgaagggatccggcttgtcaccggggaaccaacgagggcaactgcgagactagcttgcccaagctctcgcaagagggcgtttgaaggagactgaacgatctgggcgtgacagcccaccggatggtgtgagcgcctccctaacttgcacccgctccgatcgtcagtagcgaagggaccatagcacacccgaaaggggcttatcgcacat

SEQ ID NO: 1409 - DNA, 936 bp, unidentified
  misc_feature 1..936: note = Ga0070739_10029292 JGI
  source 1..936: mol_type = other DNA
gtgctcacgctcctacctgcacgtgcgcggccagcgtgctgctctagaacttctggcttaaacagaggtaaggggttaactcagtgctcagaagatacgccgcctgagaaccttgtcgaggccaactttaccctggcaacaggaggctctgaaaggagcaaaccaagcatgtcgaacgtctttgtcgttgatgccaataggacaccgctagacccggtgcatccaggctacgcacgcctcttgctcacccaaaggaaggcagcggtgctgcgccgcttcccgttcacacttattctcaaagccgtggtggagcaaccacaggcagagcggctgcgcgtcaaactcgatccaggaagcaagaccacggggctggcgatcgtgaacgagaccacgggggaagtcgtcttcgccgcagagctctgccatcggggagcggcgagcaccaagaccctcgctgagcggcgtagggtacggcacagtcgaaggagtcgccatacgcgctacagaaagccgcgcttcgccaatcgcaagcgaaggcccggctggctgcccccgtctctggagagtcgagtatgcaacgtggtgacctgggtcaagcgattgctgcgcatctgtcccatctccagcatttcccaggagctcgtccggttcgatatgcaggcgctccaacagccagaaatcagcggcattgagtaccaacaagggacgaaggtcaaggggtttcagaccggggatatggtgcgtgccgtggtgaggacggggaccaaagtcgggacctataccggccgggtggctatccgcactcgtggctccttcaatattgccacagcatgtgggacggtcaaagatatcagtcatcgtttttgcagggtcttgcatcactgtgatgggtatagctatcagaaaggagagcgggcaatgcctcccgccccctag

SEQ ID NO: 1410 - DNA, 270 bp, unidentified
  misc_feature 1..270: note = Ga0070739_10029292 JGI
  source 1..270: mol_type = other DNA
gtcaggaacccctcccgtagaacgggataggcttgtataatcaagtctggacctgaccagactcagcctggcaacgggctacgttctcagggagtgctcacgctcctacctgcacgtgcgcggccagcgtgctgctctagaacttctggcttaaacagaggtaaggggttaactcagtgctcagaagatacgccgcctgagaaccttgtcgaggccaactttaccctggcaacaggaggctctgaaaggagcaaaccaagcatgtcgaac

SEQ ID NO: 1411 - DNA, 909 bp, unidentified
  source 1..909: mol_type = other DNA; note = Sutterellaceae bacterium
gtgcttcagacaacaaaccccttccaacattggcgaaggatcaccaccgaccgcaaggtcgagcagacggagcccgtgaggtatccgtcaatggagaacactttgaaagtttttgtgttgaatatgcgcgggcaaccgctcatgccgtgctccccgcccaaggcgcgtaagctgcttcgggccgggaaggccgtgcctgtgcgccgaacgcccttcgtgattcaactgacggtgccgatgggcgaaaccaagcagccgatcaccttgggtgtggatgcgggctacaagcacgtcggcatgagtgcaacgaccgccaaggaagagttgttggcttccgaggtcgaactgcggcaggacgtgacgggcttgctctcgaatcgcttggcacttcgccgcgcccgacgcaaccgcaagacccgctgccgtgcgccgcgttttgataatcgcgttcgatcaaagcacaagggttggcttgcgccgtccgtggagaaccgcattcaggcgcacatatcgcgcatcgtcgagggcttgccgaagacgcattgcgcggacgctttctgcattgctggcgtcctcgacgcaaaacgtcggggcgagtacctgtttcagaaacagacgcgccgccacaatcgccagatccacaagctgacgactctcaaaggccgtgtgcgcaagcgccatcaggctccgtacctagtgcacggcttcaggctctttgacaaggtgctgtgcaaaggggaagtcggctttatttttggcagacgctcctcgggtgcattcgatgtgcgccgtctggacagtacaaagatttctgccggtatttcctacaagaaactttcgcttcttgagaagcgaaagatgtttttaactgaactgagaaaggagggccgcgattcctcccgcgtctga

SEQ ID NO: 1412 - DNA, 301 bp, unidentified
  source 1..301: mol_type = other DNA; note = Sutterellaceae bacterium
gtctactacccctgactgaagtcagaggcttggcaacaagtcttggttgactagcctcagtccgttttcggacggactccgttggttgggaatccgttccgtcgcaagacgggacgcaaacaggcaccgcgggatgtcgatcctagtcccgcgctctgcggtctgcggttaaaagctctgagaggtaggagcggtgcttcagacaacaaaccccttccaacattggcgaaggatcaccaccgaccgcaaggtcgagcagacggagcccgtgaggtatccgtcaatggagaacactttgaaa

SEQ ID NO: 1413 - DNA, 1233 bp, unidentified
  source 1..1233: mol_type = other DNA; note = Fermentation metagenome
atgcctacaactcaaagaaaagcaagactattgttaaaacaaggaaaagctaaaatacactcatatagtccttttaccatccaactattaacggcaacagggcaaacaaaacaagacataactctaggtatagatactggctctaaaactataggaatttcagcaagtaccaaaaaagtagaattatattctgctgaattggaattaagaactaatatagtcgaattattatcaactaaaaagcaatatcgaaggagtaggcgaaataggaagacaagatatagaaaagtaagattttttaatagggcaaaatcaaaacataaaggatggttaactccgtctattgaaaataaaattcagggccattttagaattgtagaaaaagttaatcaacttctaccaataaatgaaaccatagtagaggtagcaagctttgatatacaaaaaataaacaacccagctatacaaggaaaagaatatcaggaaggaaatcaattaggtttctggaatgttagagaatatgtgttatttagagatggttataaatgtcaaggtaagaaaaattgtaagggcaagatactaaacgtacatcacatagagtcaagaaaaacaggcggtaatgcacccaataatttgataactctttgtgaagattgccataaagattaccattcaggaaagctaaaaaaggcctttaagcgagggaaaagcttcaaggattcgacattcatggggataatgcgttggactttttacaatagattgaaagaaatatatcctaatgtaaaaatgacatatggatatataactaaaaatacaagaataataaataaactggaaaaggcacatagaatagatgcaagatgtataagcggaaatccattggctgaagaatcacatgtttggtatcgtattaaacaagttagaaagaagaaaagaagccttcatgaagcagttgctaggaaaggcaaaaaaatgccaaatagagaatctaaaagaaatagcaaaaacactaaggaaataatatacaaaggaaagaagtggtgcctgtatgatgaagttagactaaatggagatatcgggtttatatcaggatttagtggcaacatggtatatatacaagatatatatgggaaatatattcaaatatctccaaaatataagcaaataagcacaaacaacatagaattaataaaaagaaacaacaattatatatgtagaggtatcgcctaa

SEQ ID NO: 1414 - DNA, 246 bp, unidentified
  source 1..246: mol_type = other DNA; note = Fermentation metagenome
gtcaactaaccccctcttgcagaagaggagacttataggagcaattttatgaagtcttagttgtctagcttaagtgttcgttcactacgttggattgcatgcagaaacctgcaaatgatactctagtttgtagctctttcgtggctctgtaaaagttctgagggcaaggaacggtcaaccacattgtgaaggctttccaacattggcgaagggtaaataactctgaaaggagaacgtaacttgaga

SEQ ID NO: 1415 - DNA, 1311 bp, unidentified
  misc_feature 1..1311: note = Ga0373625_0031164 JGI
  source 1..1311: mol_type = other DNA
atgttagtatacattctcgataaaaacaataaaccacttatgccttgctgtcctagaatagccaagttgttattgaaggcaggcaaagctgaggtggtacagagaacgccgtttactattaaactggtatttggtagtagcgggtataaacaggatataacgctaggcgttgatgctggctctaaaacgattggattatctgctattgatcaaactccgtttgaatacggatcaaaaacaacggacaagaaagaactattttcggcagaagtgcaactcagaactgatatagtagatttattatctactcggagacagaatcgtagaacaagacgaagccataagacaaggtatcgtaaggtaagatttctaaatcgcagaatagataaaggttggttagcacctagtataaggcacaaaatagatactcatttgactatggttgacaagatacataagatattaccgataacaaatatcatagttgaggtagcacagttcgatatacagaagataaagaatccggatatatcaggtatagaatatcaacaaggtgcgcaactagattttttcaatgtaagagagtacgtcttatatcgtgacgatcataagtgccaactatgcaatggcaaaagtaaagaccagatattaaacgttcatcatatagaaagcagaaagataggtggtaacgctccaaataatctgattactttgtgtgaaacgtgccataaaaagcatcacgatggtaatataatattaaaggtaaaaaggggtcagttgttcaaagacgcttcttttatgggtattatgcggtgggctttttacaatacactgaaagataaatatcctaatattagtttgacttatgggtatctaactaaaaacacaaggataactaacaagctaccgaagaatcatagaacagacgctttatgtatcacaggtaatccaacagttaaaggtcttgatacatggtatttctataaaaaggttagatgtcaaaatagacaaatacacaagacaactattaataaaggtgggtcaagaaagttaaaccaactgccttttatcgtatttgatatacgattatttgataaggtaaaatacaacaatcaagagtgttttgtttttggtaggcgtttaagtggtagttttgatatacggttacttgacggaacaacggtcaacgcaggtattagctataaaaaggtaaaagtgttagagcaacgtaaaacagttttaatcgaaaggagaaggcaattcctccccatgcctgaaggcagggggtatccttgccgaaacgagagatga

SEQ ID NO: 1416 - DNA, 248 bp, unidentified
  misc_feature 1..248: note = Ga0373625_0031164 JGI
  source 1..248: mol_type = other DNA
gtcaataaccccacgcataaatgcgggggcttgtaaaagcctttgttgactagcctaagtagtgatcgggtaacccgatcttctactacgttgttttggtcataacacctgcgaatattcagtctagtttgtagctctgttgtctaatattaaaaactctgagaggtaggggcggtgtgttaggcgtgacaagccattacaacattggcgaagactgctaaccctgaaagggggtatactttatgtta

SEQ ID NO: 1417 - DNA, 2019 bp, unidentified
  misc_feature 1..2019: note = Ga0114939_10003065 JGI
  source 1..2019: mol_type = other DNA
atgcagacgttagaagaaagaaatacatacacacagatagatgctccacaagtccgtcgcatctgtgatcaagtattaaacaaagatttaagtggccaggaaactggttgcggtcttagtgtacttgatttaaaaacttcttctaactctccgaagtggacctactcagaaatgagagaacagaactcgagagtctctgttaaatctaaaactatgagatcactttatcagctaaagctgaaaagtgttaggtctactaaagacaaaaaatcagacccaattcaagatttcaacaaatatacacaaggaatgaccttcgctcaaaaaattgaatatcttaacatgtctgatgcagaaagaggaaaaatcatagaaaaggtattaattcaagaaagaaaggagaaaaagcagaaagaaaaagagcaagcaaaagatagaaaaccaaaagaacctacaaagtataagaaacaaaaagtctatgtattcgtattgaatatgagaggacaacctctgatgcctacatcaccaagaaaggcaagacttctattgaaaaataagaaagctaaggtagtcaaaagatgtccatatacgatacagttaaattatccgaccggagaaaacaaacaacctattaagttaggaatcgattcaggatatgaacatgtaggtttatctgcgacaacagataaaaaagaattattttctgcagatgtcacattaaggactgatattcctgataagatgactgaaaaggctatgtatcgaaaaggaagaagaaataggaatactaggtatagagaaccgagatggttgaatagagggattccagaaggatggttggccccatcaatccaacataaattggacagtcatgttagattaatagataatataaaacagatattacctatcaataataatgatataactattgaagtggctacatttgatacacagaagatgaacaatccggagataagtggaatagaataccaacagggaactcttcagggatatgaagttagagaatatctattagaaaaatggggcagaaagtgtgcatactgtaaagtagagaatgtaccatttgagattgaacatatcattcccccttcgagatttggattatgtggaaataatagaatatccaatctaacgatagcttgtcatgattgtaatcaaaagaaatgtaatatgacagcagcagaatttggtcatccagaagtacaagtattggcacagaaatctctaaaagatgcggcattcatgaatattgttagatggagattagtcaattcaattcctgaatgtcatcatacatatggatatgttactaaatataatagaattagattaggacttgaaaagtctcatattaatgatgcattcgtaatcgccaatagaaacaatcaacttaatcaagaaagatgtaaatcgttcgaggtaaaacagattagacgcaacaatagatcattacaattaaatagaaaaggcttcgaaccatcaataagaaagaaaagatataaatattctcctggagatctagtcctattcaaagataataatacagaggctcacgtctgcgttgtaaaaggagttttcaattatggtgaatggataagattagtaaatcctattcctggagagaaagacattagcacaaatattaagaatgtaagaatagtcaaatatggaaaaggatttcggttctcatatccagatttttcgattaatcctgatattgttaatgttaagacaaaggaaatagaaaagactattattgaggacattgagaaacatgagacgacgatacaatatgacgtatttggagaagaagttataagacaatcaaagaaaatagaaaagaaacaagttatcaaaaatatcaaaactcaatatgatctgtttggaaagatcattaaacagaacaaatcaaagaaaataactaagaaaaagacggagactgttgaatcaattgattcgacaacacaggtaggaattgataatgcatggaattga

SEQ ID NO: 1418 - DNA, 281 bp, unidentified
  misc_feature 1..281: note = Ga0114939_10003065 JGI
  source 1..281: mol_type = other DNA
gtcaactaccgccccctgaagggggtggcttgcacagtaatgagcaaggttaaaaagagttgattaggaggcatttaaaatatgcagacgttagaagaaagaaatacatacacacagatagatgctccacaagtccgtcgcatctgtgatcaagtattaaacaaagatttaagtggccaggaaactggttgcggtcttagtgtacttgatttaaaaacttcttctaactctccgaagtggacctactcagaaatgagagaacagaactcgagagtctctgt

SEQ ID NO: 1419 - DNA, 1197 bp, unidentified
  source 1..1197: mol_type = other DNA; note = uncultured Erysipelotrichaceae bacterium
atgctgaaaaacggcaaggctaaaattatcggccatgacccgtttaccattcagcttcagtatgagtcggaaacaaacacgcaacctgtagaactcacagaagatacaggctatcagaacatcggactttcaattaagtccgaaaaacacgaatttgtaagccgggagtataaactgcttccggacgaaaagaacaggcatcaggcacagaagcgtattcgtaccgcaagacgtaaccggaagcgttaccgcaaacctatgtcaaagcgggcgaaatgttcccgcaggaaacagaaagactggctcgcgcctggtctcagaaacaaagcggatcgacacgttgatcttgtgaaacggtttatgaaactgttccccataacatccgttgtgctggaaatgggacagttcgataatgcagtgctttccgctgtaaatcagggattgccggtcccggaagggcttgcttatcaacatggacctaaatacggattcgacacgttgagagaagcggtatttgcccgcgatcattatcgctgcgtatgctgtggacgctctgcgatgaaagaccatgtgacgcttgtgattcatcacagaggttatcgcaaaggtgacagatcaaaccgtctttcaaaccttgcgactgtatgtgcagagcaccatacctcagcggaacacaagaaaggcggtaaactctggaatcttccaaaagacggagggtctctggcgccatccgcattcatgaatgcggtcaaatggtacatctgggactgtgtaagcaggcttgggatggagacaaagattacatatggcgctgttacaaaacgggaacgtctggacaggaacattatcaagtcacatgccaatgatgcgtattgtattggcgtatttcatccaaaacatcgtactcatacggagtattacagcaaacgcagaaggaatgatcgctgcttgcaaaagttctatgatgcgaagtataaagatgcacgtacgggtgcgatcaaaaaggcgtctgaacttggatgtaatcgcacgaagagaaatatgccgcgcaataacgaacgcaatctgcgtcccagtcgcggcgaaaaagtaaagtctggatacaacagtattcgtaaagaaaggcattcactgcaggcaggcgatattgttcagtacaagggacgcaggtatgaagtgaagacggtacgatttaaa

SEQ ID NO: 1420 - DNA, 286 bp, unidentified
  source 1..286: mol_type = other DNA; note = uncultured Erysipelotrichaceae bacterium
acatctaccgtgataactggtcctttcataggaacctcccttcatgcataaatcctggcaagacttccccgcaccctgtatcagaccatttttctggattacatacggcatcgcgatgtgttgcctgtgcgtgctcatttcgataaaacggaatgcgatacaagagggaagcagaacgtttttaatgactgactcgcggcattgccgggtctaaaaagtaacacgtccttactttacccaggccagtctgactgtatgcctacagcagaaaggtcagaaactgctg

SEQ ID NO: 1421 - DNA, 1470 bp, unidentified
  misc_feature 1..1470: note = Ga0307376_10002158 JGI
  source 1..1470: mol_type = other DNA
atggtttatgtactcgacaagcgcaagaaacccttaatgccctgttccgagaagcgggcccggctgctcctggagcgcggtcgggcggtggtccacaagctggcgccgttcacgatccggctcagggaccgcctggttgaggacagtgttttgcaacccctcgatctgaagctggatcccgggtcgaaggtaaccgggggcgcggtggtccgggacggcaaggaaaccatcggctgctgtgagtgctctcaccggacggatatcaaggcgaacctagacgcccggcgcagccagcgtcgttcccgtcggaaccggaagactcggtatcggaagccgcggttcgataaccgacatccggagaagtgcgcggcctgcggcgggaacgccaaacacgggagccggtactgccggccctgcggcgagacccggaacttcgttaacaacggccatcgggaggcctggctgccgccgtcgctccgggcccgggtggaggaaactatgtcctgggtggcaaagatgcgcaagctcctgcccattaccggggtcgcgatggagctggtccggttcgacacccaatggatggagaacccgaagatctccggggtggagtatcagcagggtagtctggccggctacgaggtccgagagtatctcctgcagaagttcggccacctatgtgcttactgtcggggtgcctccggagacccggttctgaatgtagaacatgtggtcccaaggaacccggaccacgggccgaagggtacggaccggatcagcaacctggtcatcgcatgcaagacgtgcaacgaagccaagggcaacctgcagccggaagaatggctggaagagttgcgggcgtccgggaaggctctggaccggatccgggcggagaacctgccgaagacgctccaacagttgaagcagcctctgaaggatgcggcgatgatgaacgccaccaggtgggcgctgtatcaccgtcttaaagcgctcggccttcccctggaaacaggcagcggcggtctgacgaagttcaaccggacccaggttatgaagctacccaagacccacttctatgacgccgtttgcgtagggaaaagcctcccggaaacggtggatgtgccgttcgtcgaggtctacacggcaaccgggcggggtaaccggcagatggccgggatcgacaagtacggttttccgtaccggtggcgggagcggaagaaggcccaccttggcttccagaccggagacctggtggccgtcgacatcccgaagggcaaatacaaaggcaagtggcgcggccgggtggccgtcagaaagaccgggtactttgatatcaaggacggcactgggaaacgcaattgccaggggatccgggcggagtattgccggctattacaaaaggccaatggctggcagtacgaaaaggtttccttgcgggctgacgcccgtgccgcgcttcctccccatggataa

SEQ ID NO: 1422 - DNA, 400 bp, unidentified
  misc_feature 1..400: note = Ga0307376_10002158 JGI
  source 1..400: mol_type = other DNA
gtcatagaccccacggctaaagccggggcttgaggaggccctcctccgacagtctctggatttaggcgagaaagcccgcaagggcgctatgaccagcccaagtctgccgggatccccgagcgagcagactacgttattccggttagggcaccctgggatgcttctccagtcccaggagctgccgccggcggttaaacagcgagcaggggtggatgtaacaatgcacgcagcacattcgtggtaatccccgtactttatgcgagcagtgccgtcggcgcaaagccgggataacatcggcgaggagagatgacccacctgcggtgggtgccccggtgccgaacccggcgcggaaccggtcccgtaagggatctccgcaaggagagaaagggatgaaatcatg

SEQ ID NO: 1423 - DNA, 663 bp, unidentified
  source 1..663: mol_type = other DNA; note = Synechococcales cyanobacterium S06
atgagcaattatgtttttgttttagatgccaacaaaacacctttacaacccactcaccctagtgtagctcgaaagctattaaaacaaaggaaagcatcggtttttagacgttatccatttacaattattctcaaggaagtaaaactcaatgttgttagtcaacctatagaattaaaactcgaccctggttcaaaaactacaggagttgctttagtttctaataatcaagtaatttggggagcagaattaaaacatcgtggtcatttcagttatcagttatcagttatcagttatcagttattaactattaattatctgttcactggtaactgttcactggtaactgaaagaggtgaattacaaggttatgaaattcgagaatatttattagaaaaatggggtagaaattgcgtttattgtggtaaaaaagatgttcctttagaaattgaacatattaaacccaaatcccttggaggtagtaatcgcatttctaatttaacccttgcttgtaaaggttgtaatcagaaaaaaggtagtcaattaattgatcactttttaagtgatcaaccacaattactacaacaaattaaaacacaagcaaaacaaccattaaaagacgctactgcggttaatacaactcgttggcaactgtttaattcttga

SEQ ID NO: 1424 - DNA, 240 bp, unidentified
  source 1..240: mol_type = other DNA; note = Synechococcales cyanobacterium S06
taaaaaagtagggatcaccaagaaacggagtaattcgtaatcaattggtgtgaaccagaccccccaaaaaaggggagcagttatcgctcgtcaagacaccttaaagttttgccagctttaagctctgtcgtcactgattaaacagtccgcaaggatagtgtctttgacctaacaagcttcgataacatggttgaggccaactttaccctattttaggagttcttagaaatgagcaattat

SEQ ID NO: 1425 - DNA, 1470 bp, unidentified
  source 1..1470: mol_type = other DNA; note = Marine metagenome
gtgggggcgcaatgccgggtcgtaacattctcgaggagagcgcgggcctggcccgccgtcacagggccccgtaaggggaattatcaccgccctcccgagggcagaaaggaacccgccatgtgcgtcttcgtactggacaaacggaaaaatccgttaatgccatgttcgcagcggcgcgcccggctcctgctggagcggggtcgtgcggttgtgcaccgacaccatcccttcacgatccgtcttaaagatcgtgtcggcggaaaaacccagccggtcgaaatccgggttgatccaggctcaaaaggaaccgggctcgcagtcgttcggatcgcagaagatacctgcccggaaacgggagaggtcacgacaattgttcatgtgctcgagcgtatcgaactccggcaccgtggggctgcgatccgcaaagcgcttcttcagcggtcgcagcgtcgtcgtcgccgccggagcaaaaatcttcgctaccgcgcgccccggtttaacaaccgccgccgcccgaagggctggctccctccatcccttcagcatcgggtagacacaaccgcatcctgggtccggcgcctatcgcgtatggctccggtcctgcgtgcccgggtcgagacggtacggttcgacacccaggcacttgagacgccggagatctccgggatcgagtaccagcagggaactctcgccggctacgaggttcgggaatacctgctcgaaaaatggggccggtgctgcgcctactgtgacgcgaccggtgttccgcttcagatcgatcatatccatccacgcgcccgaggcggatcgaaccgggtctcgaacctgaccctcgcttgcggcccttgcaatcagacgaaaggatcgacccctgtcgaggcgttcctcgctcacgcgccaaagcggctggcacgtattctcgcgcaagcacggcggccactgcaggacgcagctgcggtgaacgcaacccgctttgccgtctgcagcgcgatctcagatcagacaggtctccctatcacccggttcagcgggggccagacgaaatggaaccggacgcgggcggggctggcaaagacgcatgccaatgacgcagtctgtgttggcccgacggatcaggtcgtaggggcggcagggccgaccctcctcgtcacctgcaccggccgcggaacccgtcagagaataatgccaaatgcgcatggtttcgcacgcggccatcgcccccgcaccaagtctgtacaggggttccggaccggagatctcgtgcgtgcagagatcccgtccggcgtgaatgccggggtctggactggccggatcgcggtacggagcactggttggttccttctgacagcgaccggacagggtgcggacggagagcgcggtcaccgcaagatcggcggcgttgcagcgcgttattgcgccctcgttgcatcaggggatgggtatggctacgcgcgggaggtgcaaccgtga

SEQ ID NO: 1426 - DNA, 309 bp, unidentified
  source 1..309: mol_type = other DNA; note = Marine metagenome
gtcaacttctcccccttgaaagagggagcttatgccgaaaggaggaaagctcacggttgaccagagttagcggcgtctgacgccgctccgttacgatcaggttcaagaccgacgtcggggtgcttctccagctccgacctctcgaagcccccgcagcagacacgcgtagggagacgtccgaaacgggtgggggcgcaatgccgggtcgtaacattctcgaggagagcgcgggcctggcccgccgtcacagggccccgtaaggggaattatcaccgccctcccgagggcagaaaggaacccgccatgtgc

SEQ ID NO: 1427 - DNA, 777 bp, unidentified
  source 1..777: mol_type = other DNA; note = uncultured Lachnospiraceae bacterium
atgctgacatatgtattggctgcagacggctcaccgctgatgccgacatataacatcagtaaggtgagacgcatgctcaaagacggcagagccgtcattgcgggccacaagccgggatttaccatccggctgacctacgctctgccggatcagaaaacgccgcatacgcagaagattgaactctgcgaagataccggctatcagcatatcggagtttctgtaaagagcaaaaagcatgagtatgttcatctgcaagtcgatacgttggcagatgagaaaaaccatcacgatgcgcagagacggtaccgtcgcaacagacgaaaccgtctccggtatcgtgcaccaagatttgacaaccgcacacattccaagaagcccggatggattgccccatcacttcaacataaggcggatattcatgtgcgtcttgtatccacgttccaaaaggtactgccgatttgtgacgtataccttgaagtggggacattcgatacacaggtacttgaggcaaaggaaaagggtcttccaattccggaaggatcagactatcagcatggaacccgttacggtattgcaacactacgtgaagcggtcttttatcgtgatggatacaaatgccagtgctgcggcaagggaatcaaagatggccggattctgcgtgtacaccacatcggttactggaaaacaccgtctgaccacacagaccggatgggcaacctgatcacggtatgcacgaaatgccatacagcggcaaaccacaaaaaaggcgggaagtga

SEQ ID NO: 1428 - DNA, 405 bp, unidentified
  source 1..405: mol_type = other DNA; note = uncultured Lachnospiraceae bacterium
ggcaacacagccccattggcgtaacgtgaggactgcagcactatcgcaatcctgagtgagtagccagggcctgtccaaaaacctttggattgcggataggctacgttatcagcaaattcggcagatcagtttcggcttgtctgttcgtgaacacaggcaccagtgtatgctccacaagtccactgctctgcggtgtgccattaaacatctctgagggaaaggagaagtgtggtacacaacaaactgctgacacacattggcgaaggggacccgctgaacggggcttctaggagcctccagtaggcagaaccccatgtatgccttccttgaggagacacagcatgggaagccgtaaggcacgtaacaatggttgaattttgaaaggaggcatcagttatgctgaca

SEQ ID NO: 1429 - DNA, 1227 bp, unidentified
  misc_feature 1..1227: note = Ga0233412_10000063 JGI
  source 1..1227: mol_type = other DNA
atgttagtatacgttaaaaactgtaaagatgaacctttgatgccttgttctccgcgtattgctagaagaatgttaaaaagtggtaaagctaaaattgttagtcgtactccttttactattaaattgttatttggtagtagttcttataaacaggaggttgtagctggtatggatactggttctaaatttattgggtgtgcagtagtttcaaatgaaaaggttttgtatcagtcagaggtacaactaagacaagacgtttctaaaaagatgaaacaaagatttatgtatcgcaggactagaagatgcagaaagcttagatatcgtaaaatgagatggcagaacagagcttctttaagaagaaaagggagactagcaccaagcattagaagtaaaattaattctcatcttagagaaaagaagtttgttgaatctattttacctataacaaaatggatagtagaattagcttcttttgatattcataaaataactgatcctaacgtaaaaggaactgattatcagttaggcagtcagaaggatttttacaatgtaaaagcttatgttttatatagagataattatatttgtcaacattgtaaaggaaaatcaaaagataaaaagcttactgttcatcatgttatatttaggagtcgaggcggcacagattctcctaataatttaataactttgtgtgaaacgtgtcatgaacaattacatgatggaaaatttaaattagaaggaaaacgttctaaaaccaaacatgctacagaaataggtatagttaagtcacaattaaaaaagaagtggatagcctttgaagagactttcggtttcgaaactaaatatactagagaaaaaatgttaggtttacctaaaagtcatgctaatgatgcagtggctatttgttgtaaaaatagtagaattgaattgaataatgataatgtttatttgaaaagacatgtttcgtcaggcgattatcaacaaaccaaaggtaaacgcagcgaaactaggattcctacaggcaagttatttggattaagaaaatttgatcgaatcaaaacgactaaaggcgttggtttcgtaaaaggaaaaagatcttctggacactttgccttgtttactctagataaaaaaaagttcattccatcagttagtgtaaaaacaaattgtagtaaaatttcagctagaaaaactactttgatggaaagaattgcaaataatgaatag

SEQ ID NO: 1430 - DNA, 294 bp, unidentified
  misc_feature 1..294: note = Ga0233412_10000063 JGI
  source 1..294: mol_type = other DNA
gttagtcgcattccttcttaattgaagagtctcgtaagagattaggctaaccagaccattaacaggagaaaaataaaagttgttaataaacgataagaaagaaattagaaacgttggaatgccgtcccagttccaacctctttggttgcagattaaacagttctgtgaggcaggaacagtgtttgtaacgttaaaccttttattatccggtcgagggaaagtcgaattctataattactccaaaattatagatacgcactactctgtttacggtcagaggtatattttatgtta

SEQ ID NO: 1431 - DNA, 1323 bp, unidentified
  source 1..1323: mol_type = other DNA; note = Gammaproteobacteria bacterium
atgcaacgagttttagttttgagtagtaagaagcaaccgcttatgccttgccatccggcaagggcgcgggagctactcaaagaaaagaaagcggctgtctttcgccggttcccgttcacgataatcctgaaagagcgggaaggtggggaactacaaaggaccgagttgaagttagaccccgggagcaagacaacggggatggctctgactgttcacggggataacggcatccgccttgtttgggctggcaacctatctcatcgcggccatgcgattagcgaaagcttgtcatcgagagcagcccagcgcagagcgaggcgcaaccgaaagactcgctatcgcccggcgcgattcgacaatagagcgaagcccaaaggctggcttgctcccagcttgatgagccgggttcacaactgcgagacatgggcttatcggctaatccgactctgcccggtaactgacattgccattgagaccgttcgctttgatatgcaactcatggctaacccgaagattgccggtgtcgagtatcagcaaggcagcttgcatggctatgaactccgtgagtatttgttgcagcgggacgggcacacttgccgatattgcggcggcgcttccggtgaccctgttctgaacatcgaccatgtgcaacccagagctaaaggcggcagcgatagcgctaagaacctagtcacctcatgccgaacctgcaatgaggataaaggggccacactgctatccgattggttgaaagctgtcagcaagtcacgctccaaactcaacaaggcaagggcaaccagaataccaaaggtcatagctggccggagcccttcaatgcgagatgcggcggcagttaatgctacccggtatcggattggcgatgtgatgaaggcgaccggcctacccactactttctggagtggcggacgaaccaagttcaatcggtcgcagcaaggttatcaaaaagaccactggttggatgctgcttgcgtgggtgagactggccagcaagtgtttatcccttctagtgctgtgccgctggcaattaaagcaaccggtcacggctcccggcaaatgacgctgcctgataagtacggtttcccaagaaccaaagcgaaaggttgcagtcgggttaaagggttcaggactggggatgtagttaaagctgtcgtgcctgttggtaagtatgcaggcaaatacctaggccgaatctccgtgagaaaaacaggtacgtttagcctgcaagattcagcagggaaaagagatgtgagtcataggtattgcacgaaggttcactcgtgcgatgggtattcgtatgcctga

SEQ ID NO: 1432 - DNA, 255 bp, unidentified
  source 1..255: mol_type = other DNA; note = Gammaproteobacteria bacterium
gtcaactacccggccctaaaggaccgggcttgtaaaagcccatgttgaccagactaagccttaactggctacgttaggaaagaatccataggcaccgtgggatgaccttcgcaagtcccacgctctgcgggtaacagctaaacaggtgtaagaggttaagccagtgctgttgccatcaaacctttccataacattgtcgatgcgatttttaccggggaaacccgagactgcattagaggtaacacgatgcaacga

SEQ ID NO: 1433 - DNA, 2262 bp, unidentified
  variation 1310: note = n represents any nucleotide
  source 1..2262: mol_type = other DNA; note = Sutterellaceae bacterium
gtgcttcagacaacaaaccccttccaacattggcgaaggatcaccaccgaccgcaaggtcgagcagacggagcccgcgaggtatccgtcaatggagaacactttgaaagtttttgtgttgaatatgcgcgggcaaccgctcatgccgtgctccccgcccaaggcgcgtaagctccttcgggccgggaaggccgtgcctgtgcgccgaacgccctttgtgattcaactgacggtgccgacgggcgaaaccaagcagccgatcaccttgggtgtggatgcgggctacaagcacgtcggcctgagcgcaacgaccgccaaggaagagttgttggcttccgaggtcgaactgcggcaggacgtgacgggcttgctctcggatcgcttggcacttcgccgcgcccgacgcaatcgcaagacccgctaccgcgcaccacgcttcgacaaccgcgttcgatcaaagcacaagggctggcttgcgccgtccgtggagaaccgcattcaggcgcacatatcgcgcattgaagcggtttgccgagtgcttccgatcaccaaaatcgtgattgaaaccgcatccttcgacattcagaagatcaagaatcccgaagtcgaaggcacggactatcagcagggcgagcagcttggcttttggaacgtgcgcgaatatgtgctgttccgcgacggtcacgtttgccaagcctgcaaaggcagatcgaaagatctgattctcaacgtgcatcacattgagagtcggaaaacgggaggcgacgcgccgggcaacctcatcacgctgtgcgaggcgtgccacaaggcgtatcacgcaggcaagttgaagcagttcagtccccggcgcggcgcttctttcagggcagagactttcatgggcatcatgcgttggacggtgctcaaccgcctgcgcgagcgccatcccgaattgcctgtcacgaatacctacgggtatctgaccaaacacaagcgcattgtcgagggcttgccgaagacgcattgcgcggacgctttctgcattgctggcgtcctcgacgcaaaacgtcggggcgaatacctgtttcagaaacagacgcgccgccacaatcgccagatccacaagctgacgattctcaaaggcggtgtgcgcaagcgccatcaggctccgtacctagtgcacggcttcaggctctttgacaaggtgctgtgcaaaggggaagtcggctttatttttggcagacgctcctcgggtgcattcgatgtgcgccgtctggacggtacaaagatttctgccggtatttcctacaagaaactttcgcttcttgaganccgctaccgcgcaccacgcttcgacaaccgcgttcgatcaaagcacaagggctggcttgcgccgtccgtggagaaccgcattcaggcgcacatatcgcgcattgaagcggtttgccgagtgcttccgatcaccaaaatcgtgattgaaaccgcatccttcgacattcagaagatcaagaatcccgaagtcgaaggcacggactatcagcagggcgagcagcttggcttttggaacgtgcgcgaatatgtgctgttccgcgacggtcacgtttgccaagcctgcaaaggcagatcgaaagatctgattctcaacgtgcatcacattgagagtcggaaaacgggaggcgacgcgccgggcaacctcatcacgctgtgcgaggcgtgccacaaggcgtatcacgcaggcaagttgaagcagttcagtccccggcgcggcgcttctttcagggcagagactttcatgggcatcatgcgttggacggtgctcaaccgcctgcgcgagcgccatcccgaattgcctgtcacgaatacctacgggtatctgaccaaacacaagcgcatcgtcgcgggcttgccgaagacgcattgcgcggacgctttctgcattgctggcgtcctcgacgcaaaacgtcggggcgaatacctgtttcagaaacagacgcgccgccacaatcgccagatccacaagctgacgattctcaaaggcggtgtgcgcaagcgccatcaggctccgtacctagtgcacggcttcaggctctttgacaaggtgctgtgcaaaggggaagtcggctttatttttggcagacgctcctcgggtgcattcgatgtgcgccgtctggacggtacaaagatttctgccggtatttcctacaagaaactttcgcttcttgagaagcgaaagatgtttttaactgaactgagaaaggagggccgcgattcctcccgcgtctga

SEQ ID NO: 1434 - DNA, 301 bp, unidentified
  source 1..301: mol_type = other DNA; note = Sutterellaceae bacterium
gtcaactacccctgactgaagtcagaggcttggcaacaagtcttggttgactagcctcagtccgttttcggacggactccgttggttgggaatccgttccgtcgcaagacgggacgcaaacaggcaccgcgggatgtcgatcctagtcccgcgctctgcggtctgcggttaaaagctctgagaggtaggagcagtgcttcagacaacaaaccccttccaacattggcgaaggatcaccaccgaccgcaaggtcgagcagacggagcccgcgaggtatccgtcaatggagaacactttgaaa

SEQ ID NO: 1435 - DNA, 1290 bp, Candidatus Acidulodesulfobacterium acidiphilum
  source 1..1290: mol_type = other DNA
atggtaaaagtaattagcaagaacggaaaacagcttatgccgaccaaaagatacggcaaggtaaggcgtatgctaaaagaaggcaaggcggtaataatatcgaaaaagccgtttactatccggttattgttcgatactcccgaaattgtccagcacgcaaccgtaggcgttgaccccggcgatactaccggatacgcagtagcgttggataacggtaaaatagtagaaaaaggcgaaatcaggttaagaaccgacgttaaatctttacttgcggcaagaaaagtattgagacgtagtagaagaaacagaaatacccgttaccgcaaggcaagatttttaaaccgctgcaataaaaaagcaggacggttaccgtcgagcatagaacaaaaagcaaggcatatagttaataaaattaacgaactcgtaagctattatcccgattatacgttaaaaatagaaattaataaattcgatatgcaaaaacttattaatcccgacatatccggcgttgaatatcagcagggctctttatacggctatgaaaacgccaagcagtttttactcgtaagagaaagcggcaaatgccagctttgtcataaaggttacaaagaaaatgacggctggcatattcaccatataataccgagagcggacggcgggactaataaacccgataatcttgcgttattacataaaagctgtcatataaaaggacataagacaggagctttatcaaaactcaaaaaagcaaagcagtttatatccgccgcaatgtataacgccgtaagatataaacttatggacgaatttaaggctatttatggagataaggttgcatttacctacggctatcttacttctataaacaggcgcagtcttgaattagaaaaagagcattataacgacgccatagctattacaggcataacggaagtaaaagataacgttattcttataactgttattaagcaggcaagaaaaaagaaacgttccctgcacgaagctacggcgaggaaaggcagaaaagagcctaacgtccattcggtcaggaacgctaaaaataccaaagaaattaccgtaaacggcaggaagtttgcattatgggataaagttaaggtatgcggtaaaaagggatatatttcgggatttaccggaaacgcctgctacgttcaggatattaacggtgactatataaaagcggacggcaaatcctataagcaggttgccgcagataaaatagagcatataaggaggaataacaattggataacggaaagaatactggcgtaa

SEQ ID NO: 1436 - DNA, 269 bp, Candidatus Acidulodesulfobacterium acidiphilum
  source 1..269: mol_type = other DNA
gtcaatcaccccgccctttcggacggggtttgaaccgtaaggttcaagagtaattggttgtctaggctaagtatcggagacataaccgatactacgttatttgcgtgatgataccctgacgtaatgcccaagcgtcaagctctatcgaggctctgtaaacaaagaggaaactcttagtcaacctcatttaacaaagcgcttataacattgccgatgggcaataacttccaaaaggaagacttacagtaactttttagaggtaagaaatg

SEQ ID NO: 1437 - DNA, 1338 bp, unidentified
  misc_feature 1..1338: note = Ga0209647_1000722 JGI
  source 1..1338: mol_type = other DNA
ttgagtaaagtttttgtcttagacacgaacaagcaacaactcaatccggtgcatcctgggagggcgagattactgctcactcagggcaaagctgccatattcaaacgctatcctttcacaatcattctcaaggttgccattgagcaaccagaggtacaccctctcagaatcaagatcgatccagggagcaaaaccactggcatagccatcgtaaacgacgcgacaggcgaagtcgttttcgcggcggaacttgcgcatcgagggcaagcgatcaagaaagcgttagacgagagacgtgctgtgagacggtcacgacgccagagaaaaacccgctatcgcaaggcgcgatggcagaacaggcgacggggaaagggttggcttgcgccctctttggagagcagaatagcccatgttctgacgtgggttcaacgcttacgccgtcttgctttcatcgtggcaatcagtcaagaactggtcaagtttgacttgcaagcgatggataatcctgaaatcagcggcgtcaagtatcagcaaggaacgctggctggctatgaggtcagggagtatctgcttgagaagtggaagcgcatgtgcgcctactgtggcaaaaagaatattcccttgcagatagagcacatccagccgcgcgcgaaagacgggacccatcgggtaagcaacctctgtttagcctgtgagcaatgcaatctcgccaaagggatacaggatatcagggtgtttctcgcgaagaagccagaggacttgaagcgcattcttgctcaggccaaagcaccgctcaaggatgcagcggcggtgaataccacgcgatgggcgctctccgagcgattgaaggagggcgggctgccagtcgaatatggaagcggtggcttgaccaaattcaatcggagcacgcgcaacctcccgaagatgcactggctcgatgcggccaatgtcgggaagagcacgccagagaagctccagattcgggggatcatgcccttgcgcatcacggccaatggccacggctgccgccagatgtgcttgatggatgagacaggctttccccgcaccaaacccaaacagaagcattttacgcatgggtttcgcactggcgatatcgtgcgcgccatcattcctgctcagctcaaccatgcaggggtgcatgtgggaagactgtccgccaaggccaaaggcgggtttaccatcgccaccgccaaaggcaaaattaccggtgtgggaaagaagtattgccgcgtgctccaacgagctgacggttacgggtacgcgcagcaatatgcgcctacgggcgtctttctttcctccctcagcctgaaggcatga

SEQ ID NO: 1438 - DNA, 271 bp, unidentified
  misc_feature 1..271: note = Ga0209647_1000722 JGI
  source 1..271: mol_type = other DNA
gtcaggaacccaatcccccttttaggggatgggcttgtgtgaacaggctcacctgaccagactcagctcgcaagagctacgttacgggagaaattaggtacgttgcggtgcgaggccagccgcagcctctacggcaaacaattaaacagaggtacaagggttaactcagtgttgtttgcactaaaccttccagtaaccttgtcgaggccaccattacctacgcaagtagaggcttggcaacaagcaaaaaggaaccaagcatttgagtaaa

SEQ ID NO: 1439 - DNA, 813 bp, Chroococcidiopsis thermalis
  source 1..813: mol_type = other DNA
atgcaaaattacgtttttgttgttgacacaaataaacagcctctcaacccaatttctccagcaagagctagagaattgttgactaaacaaaaagccgctgtatttagaatgtatccctttacaattattctgaaacacgctgttttaaaccctgcaccaaagccattaactattaagctagacccaggcagcaaagttacgggactggcgattttagaaggagaaaatgttatttgggttgccgaacttgagcatagaggaggaataatcaaaaacgctctctctgctaggcgttctttacgccgcagtcgcaggaatcgtaaaactcgctatcgtccagcacgttttgataacagaaaacgtaaagaaggatggctacctccatcattgatgcatcgggttttgactactgagacttgggttaaacggctttgccgctacgcaccaattgctcaagttgtcatggagttggttaaatttgacactcaaaaaatgcaaaatcccgaaatagatggtgttgaataccagcaaggggaattagtagggtatgaggtacgcgaatacttgctcgaaaaatggggacgcaaatgcgcttattgcgatacatcaggcgtgccactccaaattgagcatattcacccacgcgccaaaggcggcagtaatcgagtttcaaacttatgtttgagttgccaacggtgcaatatcaaaaaaggagtcaaattgattgaagaatttctgaaaaaggataactctagactagaaaaaatcaagcaactagccaggaagcctctaaaagatgcctttctctgttag

SEQ ID NO: 1440 - DNA, 243 bp, Chroococcidiopsis thermalis
  source 1..243: mol_type = other DNA
gtcagcaacccccgacttgaagtcgggggcttcaggcagataacctgaagccctagttgaccagactatcgtttgaggcaagtgttaaagacctactttaggatgcttgctagtcctgaaccctagaaccagacgattaaacagacttattgggttaagtcagtgtcgtttggatagttaccgacctcaaacaatgtcgaagcaaacattacctgtaaaaaggatgcagcaatgcaaaattac

SEQ ID NO: 1441 - DNA, 1287 bp, unidentified
  misc_feature 1..1287: note = Ga0310694_10002417 JGI
  source 1..1287: mol_type = other DNA
atggtctatgtactgaaccgatacggcaaacctctgatgcctaccacccggtacggcagggtccgccgtctgctcaggaaagggatcgcggtcgttgtcgattaccgtccatttataatccagctcacttatgacacgcctaacggcgtgcaggaggtcagtctaggcgtagacgcgggtacgaagcacgtaggcttctccgcgacgacaaagaagaaggtacttttcgaagcagaattattgctgaggtcggatatcgtggagaaactctccacacgaagggagttccgtcgggccagaaggaacaggaaaactcgctaccgtaagtcaagattcctgaacaggacccgctccaagaagccgggatggcttgcaccttcggtaaggcagaaggtggattcccatatccactggatttcaaagatatgcaagttcttgcctatcaagaagataacggtggaggccacgcaatttgatacccagctgttgaaggctcaggaacagggtcttccgttgccgcaggacaccgactaccagaagggtgagcagctcggattctggaatgtgcgtgagtacgttttattccgggatggtcacaaatgccagtgctgcaaggggaagtccaaggacagtaagctgcatgtccatcatatcgaaagtagaaagacaggcggcgatgcaccgaacaacctcatcaccctgtgctcggaatgtcatgccaagtaccatcggggagaaattgatctgtcgaagattgcaaggcgtggcacctcgctacgtgatgccacacagatgggtatcatgcggacggctctatttaaccggctgaagaaagaaatcggtgagggaattacttgcttcaagacttacggctacatcaccaagagtactcgtagtaaatatggactgccgaaggaacatgtcatagatgcgcggtgcatcagcggcaatccgtgtgcatgttcagatggcaagtacttgataatccgcaagttgcgtgcgaacaacaggcaactgcacagggcaactataaataagggtggaaagcggaggaacaaccaggcaccccgtgaagtaaggggtttccggctgatggattccgtcgagtatgcatacagggattgcttcctgagcgcacgtagagtgtcgggctccttttccgttgcggatatcaccggaaaagttctatcagattcggccagttacaagaaactgaccttaaaacatcacaacaacacttatattatggaggaagcagcgctcctctcacccactaaagatgggtga

SEQ ID NO: 1442 - DNA, 297 bp, unidentified
  misc_feature 1..297: note = Ga0310694_10002417 JGI
  source 1..297: mol_type = other DNA
atcaactacccacgggctaaatacccgtgagtttggggtgacccggactcatagttgattagactcagtgaagcggagaaatccgctgaactacgttaggaaggtcatggcaccccgggatgtacggtcaagtcccccgctctgccgcttgtggttaaacagtcctgatgggtagggacagtgctgcaggcacgacaagccttcctaacattgtcgatgaccacccacagggagcaatccctgcattacctattaagttaggtcaaaaaacaacaaataacggataacgagcacatg

SEQ ID NO: 1443 - DNA, 1290 bp, unidentified
  misc_feature 1..1290: note = Ga0070697_100040654 JGI
  source 1..1290: mol_type = other DNA
atgaaggtgtttgtgctatcaaaagaaggaaagtgcttgatgcccacgacgccacggcgtgcaagggtgtggttgaaggcaaaacgtgcccgtgtcgtgcgccacgaccctttcaccattcgattgcgctttgccacccagcaacatgtgcaaccggccaaggtgggcgttgataccggctccaaagacgtgggcatcgctgcactcgccaatggcaaggtggtcttccaggccgaggtccatctgcgtgatgacatcactaagaaaatgacccaacgacggacgtttcggcgcaatcggcgtgcgcgcaagacgcgctatcgtgaagcgcgctatgacaatcgacgccgacctgatgggtggttgcccccttcgctgcactccaaagcagaggcgaccgtcaaggccgtgcgcttcattacttcgtttttgtcggttggtcgggtcacagtcgaggttggccgttttgacacccaaaagaggcaaaacccagacatcgctcacctggaataccaacaaggcgaactgcaaggatacttcctgcgtgagtatgtcttagacaagtggcagaggaaatgcgcgtactgtgatgctcacggggtccccttggaaatcgagcatattgtccctacgtcaaggggaggaagcaatcgggccagcaatctcaccctggcctgccatgcctgcaaccggcgcaaagggcagcacacagcagcggagtttggcttcccagaggtgcaggcaaaggctcgtgtgccgttgaaggatgcagcgcatgtgtcttcactgaaaagcagggtggtccatgacctgcaagcagtcttcggagagagccaggtgagcatcacatatggttaccagaccaaatataaacgcatccaggtgcttgacctgcccaagtcccacacgaacgacgctatggcgattgcctgcgagatcggcgaggtggtcaagccattggagatggtccatcagatccgatgtctagcacggggccactatcagcgtttcaatggcctgcacagtgagcacaagtgttgggccccgcgcaaagtgcgcgggttcaagctctacgaactggtcaaggccaaaggaggggtgggctacatcgcgggacggcgggagaagggagcgttcgtcatcaaagacgtcatcagtgggaagaacctgttggaggtcacgccgcgcaaattggtacgagtagcgcgtcccacccaggggtggatgattacgcgacagccgatgctggagagcatcagaaaggaaggcggcgcttcctcccccaattga

SEQ ID NO: 1444 - DNA, 298 bp, unidentified
  misc_feature 1..298: note = Ga0070697_100040654 JGI
  source 1..298: mol_type = other DNA
gtcaatgacctccccactctgtggggaggctcgtgaggggttcgccccttgcaagccggattgaccagacgacacctccgagccagtcgcgccgagaaaacgagcgtcgtggctggcgctgaagaggtgagcgatagtaccaagcgttgcagttcgcacccagggatgctgccccagttcctggctctgcaacttctgacttaaagaactgcggtccaggaacggtggtcagaggaaagtaccgggtgctatcaccgtcgaggggatcgtttttactccgaaaggagccttacctgat

SEQ ID NO: 1445 - DNA, 1254 bp, unidentified
  source 1..1254: mol_type = other DNA; note = Bioreactor metagenome
gtggtcagtagcgaagtgggacgaactataagacggagggtaacctctactgtagtaactagtaatcaaggagcatcgatcatgtcagaacctcaacctaagtctaatccaactggacagacttacaaagtaccagctcaacactgtaaacatccaccagctaactacgtaccagttgtcagtagtacaggtaaacctctgatgccttgtcatcctcaacgtgcaagagaactgatggaaaaaggtaaagccaaaccaagatggcacttcggtagcatcttctacatccagcttactgaacgtgaagatggtgtaactgatcctaacgtagccttaggagtagatccaggatctaagttcgaaggctactctatccgatctactaaacgtaccttacttaaccttcagtcagttgcacctactcatgtaaaagatcgagtagctgatagacggaatatgcgacgatctagacgcttccgtaatactccatgtcgtaagaacagaagtagtcgtagtaacttaactagtcaaggtaggatacctccatcaactagagctagatgtgatgctaagatcaacatagttaagcatctacttaagttataccctatcgttacgatcgtaatcgaagacataaaagcttatactaagaagaacaaaagtgccgatggcggtcctagtaacaaactgtggaacaagaacttctcgcccatccagatcgggaagaagtacttatatactaaattacaagagttagtatctaagctcatacttgttgagggcttcgtaacttatcaactccgtagtctactacaaaccgtcaagaaagctaagcttaagggagctaagatcttcgaagctcactgtctagatgcgtgggtactagctggtatcggagtaggtcatgaagctattgaagaacctgataatatgagcatgtggtgtgtagaaccgatactactgcatcgtagacagttacatgttaccaagcccgctaaggatgggttcagaagatcttatggtggtactagaagcatgggctggaagcgtggtagtctagtacatcatcctaagtacggtcacacttacgtaggtggtactagtaataatcggatcagcttacatagtatccgagatggacaacgactagctcagaacgtctatccagaagagtgtaagttccgtaccttcaacgccatgaagatcaagttcatccagcgagttgagatggtctgcaagatctgtaaaactact

SEQ ID NO: 1446 - DNA, 224 bp, unidentified
  source 1..224: mol_type = other DNA; note = Bioreactor metagenome
gtcaagtacccctccctaaaggaaggggcttgtagtctaggctacaaggtacctaggtaactctaggtagaaaagactagcttaaccaagtaacctagcctagtaatagtgttctaggggacgactgaaggtaactgaaccacataacaactgatgtacgggtgctccactagctcgtaacctctcaggtggtcagtagcgaagtgggacgaactataagacgg

SEQ ID NO: 1447 - DNA, 1374 bp, unidentified
  misc_feature 1..1374: note = Ga0209511_1005681 JGI
  source 1..1374: mol_type = other DNA
atggtatttgtattgtcaaaacaaaagaaacatttagacatgtgctctaatgctaaagcaagagtattgcttaaaaaaggttatgcagtagtgcataaggtatttccttttacaattagacttaaaaaagacgtgtcaataataaaaccaaaagaatataaaataaaaatagacccaggttctaaatatactggattatctattatagataataatgccaacgttgtttttcttgccaatatagagcatagaggagaaaaggttgtaagcaatcttataacaagacaacaatcacgtagaaatagacgccaaagagaaacccgttacagaagctgtaaatttataaatcgaaaactcaaaaaagatgctaagtatagggttgcaactaatagaccagaaggatggttgccaccatctgtaatatctatagaacaaaatataattaacttattaaagaagttaaaaaaggtttgtaatataacttcaagttcaatagaatatgttaaatttgacactcaactaatggaaaattctaaaatcaatggaatacaatatcaacaaggtactctttttggttatgaaataagagaatatctttatcataaatatggacatacatgtcaatattgtggtggggctacaaaagataatcatttagaagtggaacatatgatttcaaaaaaaaatagtgggtctaattcaattagaaatttaagtttagcatgtcatacttgcaataaagataaagactctttaaatttagaccaatggttaactaaccttaaatcattaaagactactaacttaaatgatacaagaataaaaagaattgaacatatattaagtaaaggtactatttatagaacaacaagatatagtgcatgggtaaatggttataaagaaaaattagtcaaagatactaaaaaactaattccagatatagaactaggtacaggagggcaaacaagtcataataggaatgtattaaaactatcaaaacaacactattatgatgcattgtgtgttggagctataccaagtagttttaaatttaagactactgatgtgttaactattaaagcgtatggaagaggttctcattttagaggaagaactaatagctgtggcattataatttcaaagttaccaagacaaaaacaattctatggctttcaaactggagatataattagtgcaaccgtaattaaaggtaaaaaaataggtagttattttggaagagtggctacaagaagtagtggatactttaacattcaaactaaagaagctacaatacaaggtataaaccataaaaattgtaaaatagtgcaacgaaatgatggatactcttataacatagaaaaaagggttatttaa

SEQ ID NO: 1448 - DNA, 307 bp, unidentified
  misc_feature 1..307: note = Ga0209511_1005681 JGI
  source 1..307: mol_type = other DNA
ataaatatgtcaattacccacgactgaagtcgagggcatgttaggcgactaacatatctttaacctaagttaattgagcagatttaagttaccttagtcatcataacctattatgcttctccagtaatagtcgttatgggatacaatctaaacatggctttgtgggaacgtgtattccgaaaggaatacattctaaaaccaagtgatgtattcataaagctatggtaacagtatcgaggagagacagtcgaaaggctgcgttacgcccgtaagggtggtttcttacaatgtaggaggttttaatatg

SEQ ID NO: 1449 - DNA, 1182 bp, unidentified
  misc_feature 1..1182: note = Ga0118733_100051634 JGI
  source 1..1182: mol_type = other DNA
ttgaaagtattagttttaaataatcatgaagaagcactaatgccttgctctgcgagaaaggcaagaattcttctcaagaataacaaagcaaaagtcgttagacgtttgccttttgttattcaattaaatgattattcttctactggatatctacagggtttaacactaggagttgactccggtcactctacaataggtttgtctgttacttcagaaacaaaagaatttattgctttagaactccaattaagaaatgatatatcaagtaagctagaaacaagaagtatgtatagaaggacaagaagaggtaggttaaggtatagaaaacctagatttaacaatagaactagaaaagaaggatggctacctccatcagttcaacataaagtggatagtcatgttaaaattattaagttatatcagagatacttaccaataagtaaattaataatagaaactggaagttttgatatggctaggattaataatcctagcatagagaatagtgattatcagaagggtaatcaatatggctttaacaacgttaaagcatatattctttcaagggataagtatacttgtcaatcaggtaagaagggctgttcaaaagagctccatgtacatcacttggtattcagatcaaaaggtggaagtgacaatcctaaaaacttaataacgttatgtaagaagcatcacagacaattacatgatggtaagttgaatattaactttaaaaagcataaagttttaaggtcagcaacggtgatgaatataataagagtttatatattaaaagagttaccaggagcgatagagacgtttggatatattactaaaagtattaggttggaaaacaatatagagaaaacgcatagtaatgatgcttttgtaatatctggaggggttaatcaagaaaggattgatgtaattgattataaattgagaagaaggaataaccgtagtttacaaaagaacagaaatggattttctaggagtattaggagagaaagatattattatcaaccacatgacgtagtggagtatgaaggaaagagatatgtagttacagggactatgaataaaggtaagagtatccaattaatgattgatggtaaaaagaagacaaagcctccagttaagttaacgagtatatataggtcaaggagtatggtattgtgttaa

SEQ ID NO: 1450 - DNA, 291 bp, unidentified
  misc_feature 1..291: note = Ga0118733_100051634 JGI
  source 1..291: mol_type = other DNA
gtcaaccacccatgaatgaattcatgggcatgctccgtgaggagcatgatattaataatgggtgattagattaagcttgagaacatcaagctacgttgtttaagttataataccttagagtgcctccctagctctaagctctattgcttaatattaaaagagtttaacgactcggtgtgttaagtgtgaaaagcttttacaactttatcgaagggaatctactcctgtagaggagggtagtttagcaattaagctatagctatctttaaactaaaaggaaagaaattgaaa

SEQ ID NO: 1451 - DNA, 819 bp, Clostridioides difficile
  source 1..819: mol_type = other DNA
ttggtgtttgtaattaataaaaacaaaaaaccattgactccttgtcactttgctgtagcaagaaaattacttaaacaaggaaaggctgttgttcataaacaatttcccttcactattagattaaaagaattaaaagaagctaatcctaaaggtttaattattaaattagacccaggagctaaacaaacaggcgtagcccttcacaaacctaatggtgaagttatacttcttgcaaccatagaacatagagcatttagaaggacaagaagaaatagaaaaacaaggtatagagcaccaagatttttgaatcgcaaacgacttgaaggatggttaccaccatcaattcaaagtatagtggataatatcaaaaattttataataaaacttaaaaagttatgctatataaagacaatctatatagaaacagtaaggtttgatactcaattaatgctaaatccttcaattgaaggagtagattatcaacaaggcactctcttagggtatgagattcgtgagtatctattatatacttatggccatacatgtcaatattgtaaaggactcacgaatgaccatcaattagaaattgagcataagtatcctaaatcaagaggaggttcaaattctattagaaatttaaccttagcttgtagaacttgtaaccaagaaaaaggaaataatacacttgatgaatggttacaatctctaagtaaatcaaagttagataaagaaagagtaaaaaatataaactcaatcttaaaaactaataaaccagtaaatctaaaagatattgccaaagtaaatagtagtagaaatgct

SEQ ID NO: 1452 - DNA, 279 bp, Clostridioides difficile
  source 1..279: mol_type = other DNA
gtcaataacccacctctaaagaggtaggcttgaagttatctacaagtcatattgaccagattaagttttaaactacattattaaggtcataacacctacaaatgcttctccagtttgtagcctctgttgcatattattaaacagtttgtgggtacaaacagtgtaatatgctatcaagccttaataatattatcgaggagagcagtttctaactgcgttacctatgaagttaatttcttaacttcatagagtttactcttaaaggaggttttttatttg

SEQ ID NO: 1453 - DNA, 1380 bp, unidentified
  misc_feature 1..1380: note = Ga0307994_1018066 JGI
  source 1..1380: mol_type = other DNA
ttggctgtatttgttttagataaacagaaaaatccacttatgccatgttctgagaaaagagcaagactgctcttatctagaaaaaaggcagttgtgcacttaatgtatccgtttaccattcgtttgaaagaacgagttggtggatgtttacagtctgtacatctaaagcttgatccaggtgctaaaacaactggagtggctgttttagtagagctacaagaaacgttcaaagtggcgatgtttgcgcacttagagcataacggttttgcaataagtgaaaaactaactcagcggagagcatttcgtcgcagacgtagaaatcagctttggtatcgtcaagctagatttgacaatagaaccaagccgaaaggctggcttgcgccatcgattcagcaccgagttgactcaacactttcatgggtaaaaaagatttctaacctttgccccgttagtgatattggatttgagcgtgttaagtttgacattcagaagatgcaaaatcctgaaatttcagggtttgattatcaacagggcactttatttgggcttgagttgaaagagtatttgctttacaaacataaccaccaatgcgcttattgctcaggtattagtaaagatccaatacttgaggttgaacacgttcaaccaaggtctaagggtggttcgaattcagtgaagaatttggtaattgcttgtagagcttgtaacgaggcaaaaggcgctttgcttttaacccagtggaaaaacaaattgagcagaagtgctttggccataactagaattaagggtattgaccgagttttatcaggtaaatggcgtggatttagagataccgcagctgtgaatgccaccagaaacgccttgttagctgatattttaaccttctccatcgaaataaaaaacaaagagcaaattagcgtctacacaggcacaggtgctatgacgaagcttaatcgaaagcttcaaggtttaccaaaagaccacgccatagatgcagcggttgtgggtgaaaacccaaaacacttgcagaactggcaagtacccgttctcagcatcaagagtacaggcagaggcgcttacaagcgcacaagacttgataaatttggttttcctcgcggttacttaatgcgtcagaaatcggtacaaggttttcaaacgggcgacatggtaaaagcattggttttaaagggcaaaaaacaaggtgaataccttggtcgtatcgctgttagagccagtggaagttttaatattcaatctaaagatgggttgatacaagggattagtcataagtgctgtacgttattgcaacgcaataatggttatggtttttgtttaacaaagatagctttaaccaacggagaagagagaaaagctgcctaa

SEQ ID NO: 1454 - DNA, 287 bp, unidentified
  misc_feature 1..287: note = Ga0307994_1018066 JGI
  source 1..287: mol_type = other DNA
gtcaactaccccgccctaaaggacggagcttgtaaaagctttggttgaccagagggcttaactttagttaagcagaagatcgtaacaggtcgttaagacttaccttgggatgcttccttagtcccaagctctaaaaggtttaaagaatgcaggcataaggtaagtgccgaatctttaagtcgctgtagaaatacaggagccggttactgtcaatctcgaagggagatgttggtttctccaacacgttactagacccgtaagggtaattattggagttagttttggct

SEQ ID NO: 1455 - DNA, 1179 bp, unidentified
  misc_feature 1..1179: note = Ga0114919_10027729 JGI
  source 1..1179: mol_type = other DNA
atgcccacaactcctagaaaagcacgcctactcttgaaaacaaataaagccaagatcaaaacacacaacccgttcaccattcaactaacaacagcaacaggagaaacaaaacaacccattgaactaggcactgacccaggtttcaaatttattgggtttagcgctacaacaaaaaaggaagaactaatcagcggtgtggttaagataagacaaaatatcaaaaaactaatggatccgcgtagaggtttcagaaaagcacgccgcaatcgcaaatggcatagaaaatctagatttaataaccgcaaaagaaaagcaggttggttaccaccaagtacacaacataaagttcaaacacataaaaacttaatcaagaaacttcagagtattcttccaatcaccaatatctatatagaaacaaacaagttcgacactcaaaaaatggagaacccagatatcaaaggtgtagaatatcaacatggaactttacaaggctacgaagtcaaggagtatttattagagaagtttgaaagaaaatgcgtctactgtaagaaatcaaacacacctttagaagtagaacatgtcataccgagatcaagaggaggtagtgatcgcatctcgaatctcactatatcatgtcatgattgcaatcaaaagaaaggcagtcaaacagctgaagaattcggatacccagacatccaaaaacaaacaaaaagatcattaaaagcagcgacacaaatgaatataatagtcaagaggctattggaagacccagatctgaacactatcccaatacctgcttatgaaaccaagtttaggagaaaacaactgaacttagagaaatcgcatgtcaacgatgcttttgtcatagcaggaggcacaacacaaacaagatcacaaccttatcagattaaacagacaagaagaaataatagaaaacttcaacaaaacagaaaaagatatggtatttcaattagaaaacaaagatatccaataagcgctaatgacttaattgagtatcgagtgagaggcgagagtaaatttagattgtttcgagttaaatcaacacaaggtttgagaggtttaattgttcgagataataagtttgatcaaaatcgttttccaaacgtttcaaaagttaaatttatctgttcaggtaaaggcctttgttttattggatga

SEQ ID NO: 1456 - DNA, 265 bp, unidentified
  misc_feature 1..265: note = Ga0114919_10027729 JGI
  source 1..265: mol_type = other DNA
aaggaggtcagtcataaacctcagggtggttagagggcttgacaaaccactcagtctaagttgcaacacgcccgggcacaacttaactgaacagtcaagcagcagttggtcaggtcatgataccttgggatgctccaatagtcccctgccctatcgcctagtattaaaagtcccgttgggcaaggacggtgtactaggccaaaaaagcctccccaacaatctcgaagtggaccaactccaagacgaagaggagggtagaacttga

SEQ ID NO: 1457 - DNA, 1464 bp, unidentified
  misc_feature 1..1464: note = Ga0256404_1000183 JGI
  source 1..1464: mol_type = other DNA
atgacatacgtatatgtgctgagcaggagcggcaggccgcttatgccgacagcaagatgcggccatgtgcgcatcctgctgaaggaaaagaaagccagggtcgtatgcggcaggccgttcacagtgcagcttctgtacgatacagacgaagcagagccatatctctacggaggaacagacccgggcaggacgaacatcggcaatgccgtcgtgacggaagacggcgagtgcgtttaccgcgacaaggtcgagacaagaaatgatgaagtggcgaaaggcgtgtccgacaggaagaagaatcgtcaggctcggcgcagaggtgaaaggctcgtaaggaagcgccgggcgaaaagatgcggcaccctgtcgacaaagctcggaagcggcagacttatcccggggacgaaaaagcctacgctcgtgaaggatatcatcaatcaggaggcgcggttccggaaccggaagaagaggcagctcataacaccgagtgttaaacagcttgtcgacacgcatctgaaccacgtcgatcagataagaaagatacttccggtcaaaggctggtgcctggaagctaaccgcttcgcgttcatgaagctggaggacggatcggtcagaggtatcgacttccagaacggcagactgaaaggctacgcctcggtcgatgatttcgtgtacgagcgtcagaaaggcaagtgcttctgctgcggagccccgatcgaacactaccatcatgtgaaggagcagaacgacaacggctttgacggaccggagaacaaggtgggtctgtgcaatagctgccacactaagatacatatcggtgagctcgagctcgatgtcgagggcttcggcaagaagtatcaggcgctgagcgtgctgaaccaggcaataccgtacatttatctgggccttgtcgaacgcttcgatgaagagaatgtcttcatctgcgccggatacgacacgaaggagatacgcgaagcagccggccttgacaaggaccacgatatcgatgctctgtgcatcgcgtcgatggcgacaggcgtgataccaaagcagcctgaggaacaggccttcagtgtgaagcagtacaggcgccacgacagagcgaagatcaacaatcagcctgaacgcacatacaagcttgacggcaagaccgttgcgaggaaccgaaagccgcgcatcgaccagaaaggcctcgcattgtcacagtggtacgaaaagcaggtcagactttgcggcaggaaagaagctgaccgcatgctgtcgaggctgaaggtaaggaagtcctacagacgctacaacaacctgtaccgcgtcatgccgggtgcgatcgttcgccatgacggcaggatcgaagttatggagagacagcagaacaacggctattacttcaaccttcgatgcgggagaataaaggcttcagaatgcgagatcctgcaccataacgcagggcttgtatatatttag

SEQ ID NO: 1458 - DNA, 223 bp, unidentified
  misc_feature 1..223: note = Ga0256404_1000183 JGI
  source 1..223: mol_type = other DNA
gtcaactacccgccgcttaactcgctgacgcttcgttagaagcgggggcttgtaaggcgagagtagttgagcaagagcgtgatgtatctcacactgcgggattttcccagtcccgcacatactggtctgatgcaccaagctcagggaaacatcacccgcccatcgaggcggagactaacagttataactcaactagaaggaaaggaggacgcacatgacatac

SEQ ID NO: 1459 - DNA, 1140 bp, unidentified
  misc_feature 1..1140: note = Ga0272443_10006725 JGI
  source 1..1140: mol_type = other DNA
atgccaacaacacaaggaaaagcaaggaagttgttaaaacaaaataaagcaaaagtatataaaagatacccttttactatacaattaaattatgctactggtgaagctaaacaaaatattacactcggtattgatactggatataacaacataggatttagtgctattacagaaaaagaagagatatattcaggaactttagaattagattcaaaaactacaaaaagacttacagggaaaagaatgtatagaaggacacgaagaaacagattgcgctatagaaaaccaagattcaataacagggtaaaaacaaaacataaaggctggttaccaccctcaataaaacgaaggtatgaaacacatatcaacttaataagaaaaataaagaatatattgccaataagtagactaatactggagatcgcaaagtttgacatccaaaagatagaaaatccaggaatagaaggttctggttatcaacaaggtaatatgtatggttatcagaacttaagaagttacttaatgtcacgtgaaaaagggaagtgccaattatgtggcaaagagtttagtaaaacagaccctgcacatatacaccatgttatttcaaggaatgatggtggtacaaataaacctaaaaatttggctttattgcataagagttgtcatcagagactacataaaaagaatctaaatcataagctaaaaaagaataaagaatataaaggttctacattcatgtcaataatacataagaagttttataaagatttaccaagtctggaagtaacttatggtaatataacatttgtaaatagaaatagtttaggtttagaaaaatcacatagtaatgatgcctttgtaatagcgggtggtaatatacagaaaagaataaatccaatagtaataaaacaaaaacatcgtaataacaggtctttaggtaaacagaggaaaggatttgccccatcaagtagaaaaaaaagatataagattcaaccaatggacttagtaaagatagctggtaaatggttaagaactaatggagtacattgtaaaggtaaaaggttaatggtaaataaaaaaagtataaatataaataaagtagagtcaatctatagtttcggaagttttatatttaactaa

SEQ ID NO: 1460 - DNA, 243 bp, unidentified
  misc_feature 1..243: note = Ga0272443_10006725 JGI
  source 1..243: mol_type = other DNA
gtcaataaccctcgactaaagtcgagggcttgcttggtgacaagtgagggtaacttgttgattagactaagtaccttgtagggtactacgttctttaagttataatacctgtgggtactccactagcctgcagctctattacttggtattaaaagagttaaaagactcggtgtattaagtgtaaaaagcttttagaacattgtcgaagtggattaactctgaaaggaggacgaaacttgagag

SEQ ID NO: 1461 - DNA, 1083 bp, unidentified
  misc_feature 1..1083: note = Ga0118725_1014359 JGI
  source 1..1083: mol_type = other DNA
atgagagttccagtagtatcaaaagatggtaaaccgctcatgcctaccaagccagccaaagcaagaaagatgatagaaggaggagtagctaaaaaatgctggtcaaaaactggcgtattctatatacaaatgttaatacctgtgggcaaacaagttcagtctgtggcactagcaatagacccaggcagcaaatacgatggctacgctgtgtctggtgagaaggatgtagcgctcaaggctatggcaataatgccacagaaggtacaaaagaaagtaactgagcgccgtcaattaagacgtagtagacgttatcgtaatacgagacataggaaggcacggtttgacaacagaaaacgcaaatctgggtggatagcaccatcgcaattggctaaagtacaattccgtatcaagatagtacgagatttagccaagatattccctctcaactatatcgcagtagaggatgtaagattcaatcattacaaaaagcgatggggtaagtatttctctacagtggagataggaaagacgatgttgtacgaagaactggaacgacatgttcaggtaataaagtacgccggttggcaaacagcagaagcacgtaagtattggggcattaagaagtcaaatgttaaggatgctttaacgcccgaatctcatgctaatgatgctcttgcgatgcttaatgagatgttcggaaataatgttgatgattcgtgcacttttcttgtttggcgtaggctggaattcgccagacgttcattacatcggcagaattataagaaaggtggtgtacgtctacgatttggcggaactaccaacggacattatatgcgtaaaggagatcttgtctctggtgagcaaaaagatagacaattcatcggttgggtctgtggcttacccacagacaagacaagggctattgctgtggctgatgcaacaggtaagcgtttagcacaatgtacagaacgaaaagtcggactaatgcgccggtttactggcgtaacatgggagagtcagtacataccaaagccaccaatagcacctatagcgcaggagccaacccaactacaatttttctaa

SEQ ID NO: 1462 - DNA, 277 bp, unidentified
  misc_feature 1..277: note = Ga0118725_1014359 JGI
  source 1..277: mol_type = other DNA
tggttcgtcaataaccccctcctgattctccgaatcagaaggggcttgggggacacaggatctccgacgcaagtattgactagagggtcccgaaagttttcgggacagccgcactgcgatggtacatacgtcatggtgtttcgctagctctgacctctataaactgtctcttgtgggcagtggggataaagacctgacatctttcgcagttgcaatctcgaagcgacctttactttagtcccgaatatcgggactccgagaggagaaaatcatgaga

SEQ ID NO: 1463 - DNA, 1308 bp, unidentified
  misc_feature 1..1308: note = Ga0335001_0013376 JGI
  source 1..1308: mol_type = other DNA
atgcctaggagaagttttatgactaaaaatgttgtgtttgtcttagacaacaccaagaaaccactaactccttgctcaccagcaagagctagaatgttgttacgggatggaaaagctgcagtttggcgaactgtcccgtttacaatcataatgcaaagtactataattgaaccaataatcaaaccgcttaaagtgaagatagaccccggttctaaaactactggcatagttctcgtgaatgaaaaaaatcgagttatatacgcagtcgaattagttcatcatggcgatatgataaaaagtgatttagaatcacggaagcataatcgaaaacttagaagatctcgtaaggtacgatatagaaaagctaggtggttaaatcgtggacgcaaaaaaggatggttaccaccatcaattttacatagggtgattacaaccgtaacgtgggttgataggtttatgaagtggtctgttattaatggcttatcagtagaacaaaataaatttgacacacagaagatggtcgattcgagtatatatggtgtaaaataccaacaaggaacgcttgctggatataacgtacgagagtatctacttgagaaatggaaaaggaaatgtgcatattgtgggacatctaacgtaccattacaggttgagcatgtacatccgaaatccaagggtggttcaaatcgcattagtaatttagttatggcgtgcgccaaatgtaatgatgctaaaaaatcattggatattgctgattttttgagaaacaaaccaaatacacttaaaactataatgtcacaattacagaaaccgttggtagatacagcggtaatgaattctacacggataaagttaataacggtattgggtgaatatggtttaccaattgaacttggtaatggtgcacaaacaaaatataatcgtgttaaactaggatatgtaaaagaacattggattgatgctgcgtgtgttggtgattctggtgagtcagttatcattcacccacaacaaaaaccgttacgcataatatctatgggttatggtaatagacagatgactcgtattaatagatttggttttccatgtgctagtgcaaaacgcggtaaagttgtattaggaataaaaactggcgatttggtttgtattaaccaaccaaaagggaaatacaccggaatatacacatcgagagtttctgcaattaggtataaagatgattatattgcaataacagtttccggtagaaaactatggtttccggctaaactagccagagttaaacaattagccgatggttatttgtatatgtaa

SEQ ID NO: 1464 - DNA, 311 bp, unidentified
  misc_feature 1..311: note = Ga0335001_0013376 JGI
  source 1..311: mol_type = other DNA
gacaatgaattatatattttaaacgtgccggactttccagttgagcgaccagattaacaatagttagtattttatcaatgtagtttattgataaagctcaaccagcttacttgagaattcaagtagacgatacgaattgaagcgaaagcgacacaccatagggtgcttcaccagctctatgcaactgtggtcgaaatgtatgactgggacatctggttgttccataagcatgtgactgaacgacattcgtcttccgagcgaggtaaacattacaggctatgcctaggagaagttttatgactaaaaatgtt

SEQ ID NO: 1465 - DNA, 1341 bp, unidentified
  misc_feature 1..1341: note = Ga0311301_10014764 JGI
  source 1..1341: mol_type = other DNA
atgtcacgtgtattggttgttgatgccaagcggcaaccgctgatgccctgcacgcctgctcgtgcccgtatcctactggcacagcgcaaggcagcggtcttgcgtcgctttcctttcactttaatcttgcgcgagacaaagccacaggccactgtggcaccgctgcgcctcaaaattgatccaggcgcgaaaacgactggcatggctgtcctgcatgctgagacgtctgaggtgctctgggcggcagagctcacgcatcgcggcgagcaggtgctcgccgagctgatgaggcgacggggcgtcagacgttctcgccgcgcccgacatacccgctacagagccgctcgcttccgcaatcgccgccgcgctcctggctggctgcccccctctctactttcacgtgtacacaatgtcgagacttgggtaatgcgtctgctccgcttttgtcccataagcgcgctctcctatgaactcgtgcgcttcgacacgcaactgctccaaaacccagatattgagaacctcgactaccagaaagggcctctcttcggcatcgaactgcggcactatctgcttgcaaagtgggagtaccagtgtgcgtactgtctgaccacaggggtcccgctcgaaatggaccatgtggagccgcgagctcggggaggcagcgatcgcgtggccaatgtggtgcctgcctgccacgcctgtaaccaggcgaaagcagacaaactcctggaagaattcctggcagaccgcccagaggttctggcacgagtgcaagccaaacgccaagcaccgctcaaggacgcagccgctgtgaataccacccgacttgccttgtatcgaaagttacaggcgacagggcttgcggtggagacgggaacaggttcgctgaccaaatggaaccggcaacagcagggggtgccaaaagcgcactgggtcgatgccgcatgttgcggcgtctcaactccggcgcacgtgcgactccagacggtgcgcccctggctgatcactgcgacaggccgacagaacaggcacatgcgcaatgttgacaaacacggtttccccgttggccgggccaaaggtccgagccgggtgcgcggctttcgcacgggagatatagtcaaagctgtctgtcctgcccatctgaaggcggcggggactcacgttgggcgtgtcttagtgcgcacacgtggaattttcgatgtgcaaacgaggcacggtcgggtcaaagatatccctgcacgctactgccagaggttccaagccggagatgggtatcgctatactcttggtgcggcgcttccccttactcccgaatgtggaggctcccgcgcggccgtttag

SEQ ID NO: 1466 - DNA, 306 bp, unidentified
  misc_feature 1..306: note = Ga0311301_10014764 JGI
  source 1..306: mol_type = other DNA
gtcagcgaccccaccgctaaagcggagggcatgtgcagagcatgtcctgatgctgaccagccccctgtgcctgggcacaggagccgttagttggaagcggcccaagttcggactctcgaatggcctttccagttcgagaccctccaatcccgatgttaaacaggcagacggggaagcagagccagtgcatcgggaagatggccgccagctaactgggcgaggaaaacattacctgtttggtgcctcaaggaccaggcagcgctgcccctttacggggtctccacaaggagttgcatgatgtcacgt

SEQ ID NO: 1467 - DNA, 1302 bp, unidentified
  source 1..1302: mol_type = other DNA; note = Human gut metagenome
atgaaacaaaaaaagtatgcatttgtagtagataaaactggaaaaagattatctcctacagatatcaataatgcatggagattaattcgcacaaaaaaagcaagatgcattaaatataatccaatgactattaagttaaataaaatcgtaaaagaagaagaaattgatccatctgtttttgaaattggaattgatgatggttcttctcatgttggattctcagtgattcaatattgtataaaaaataatcaaattacaagaataaaagttattcaaaaagcaaccatgattcaacggcaagatgtaaaacatcttatggatattagacgtagttatcagcataatcaccgttctgagaaaagaagcagagcatgtagatttaataatcgagtaacatctaaaagaaaaggacggattgtaccaaccattaaacaaaaaagagatgcagttgtaagagttgtaaaagcttatcaaaaacttgtcaatgtgacacaaattgcattagaagatgtaagcattgatattagagttttaactgaaggtgaaaaattagaaggaaaagattatcaaaaatcaaatagacaagatgacaatattcgtagagctgtttatcttcgagacaagggaatttgtcaaatgtgtggagaacataaacaaaaaatggaagttcatcacattcatcctcaaagattgggtggaccagatagtatttataatgaaattttattatgccatgactgtcatgcatctattaatggaaaagaattgcaatacaaagatactttttataaaaaaattaatggcaaattaatcagaactgattgtgcacaacatgttatgcaaggaaaatattatttaagaaaggaactttccttacttggagaattacatttaacatatggtggtacaacagcaaataaacgaaatgtttggaacattgaaaaatcacatagtaatgatgcaatctgtattggttgtaaagatattcatatgaaacctgatacggtgaatgtacaagaatatacaataaaaccaatcagacataaaaagaaatcaaatacaacatctatgggatttgagttgggtgattatgtggaacttgaaataagaagtaataaattaaaaaagaaaatcaaagtaaagggttacattactgcatttataaaatgtcagaatggaaaagataaaggaaaattaacttatataaatttaactgcagatgatggaactatttacaaaagatattctttaaaaaaatgtaaattactagaaaaacaaaaacatttacgttttatggaataa

SEQ ID NO: 1468 - DNA, 305 bp, unidentified
  source 1..305: mol_type = other DNA; note = Human gut metagenome
ttgctttcaagccttagtgagtgtagacttcggttagcacaatgaactacgttatgcccactgcttaaaactaacctttagattttctcagtctgaagctcttagagttatacatttgtataacatgtgcaacacatagcattggcaagaggaaaaacattaacttgttactttcattgagattacatcaatttgaaagaagatagaaatatcaatttttattatggattatgagtttcatttttcataatccataactatttattttttaagaaaggagatatcctatgaaacaaaaaaagtat

SEQ ID NO: 1469 - DNA, 816 bp, unidentified
  source 1..816: mol_type = other DNA; note = Human gut metagenome
atggtgtacgtacaagacataaatggtaaacctatgatgcccacaacaaggcatggaaaggttaggagactgcttaaagacaagaaggcagtcgttgtgaacctatgtccgtttaccatcaaattaatgtacgtaacatctgattacaaacaggaaattgtgttaggcgttgatgctggtactaaacatgttggtttatcggctacaacgaaaagcaaagaactttacagtagtgaagtaatccttagaaatgatattgtagatcttttgtctaccagaagggagctacgaagatcaagacgaaatagattgagatatagaaaacctcgttttgataatagaataaaaagtaagcgtccgggatgggtagcaccttcggtgaaatacaaagtagacgcccatattcgtgttattgacaatatatgttctatactaccaatatctcgtattgttattgaagtagctcaatttgatactcaaaagattaacaatcctgaaatatcaggtaaagaatatcaggaaggtgatcaacttggattttggaacgttagggaaagacataatcgtcagatccataaacaaaagattccaaaaggagggataaaaagaccaaatcaatctccttttgaagtttttggtttccgattgtttgatagggttatgtttgaaaacagttattattttatattcgcaaggcgtaaaaccggtagttttaatattcgagatattgatggtaaaaaccaaagagatattacatacaagaaattgaaattatcaaggtgtaaacgctttatggtacaaaaggaaatggattga

SEQ ID NO: 1470 - DNA, 269 bp, unidentified
  source 1..269: mol_type = other DNA; note = Human gut metagenome
ataaccaatttgtattgtattatgcataatagccaaaagctattccgattattagcctaagtgttgaaacaaacactacgttatttaagaatagatagttacctacggatgtttacccaagttcgtagctctaaggtaagtgattaaacagttctggtatttgaggaacagtgttgcttacgaaaactttaaataacattggcgatgggtactaacagagtttcactctgacttatgttgaataaacattaaaaacgtttgtagatatg

SEQ ID NO: 1471 - DNA, 1335 bp, unidentified
  misc_feature 1..1335: note = Ga0394881_0018228 JGI
  source 1..1335: mol_type = other DNA
atgcaaaaagtattcgtattagacacaaacaaacaagccttagatatgtgccaccctggacaagctcgaaggttgttaaaagcaggattgggggcagtctatcgacgttttccattcacaataattctcaagagagaagttactgctcaagaactacaaaactatttcttaaaactagatccaggaagtaaaacaacaggagtggcaatagtaaatcaagaaacaggagaagtggtatttgcagcagaaatagaacatcgaggagaaactattaaagctagcttagatagtcgcaggggtgtaaggagggcaagacgctcaagaaaaactcgttatcgcaagccaagattcaataacagaaccaggaaaaaagggtggttacctccatcactactaagcagagtagcaaatgtagaaacttgggttaagcgacttatacacttatgtccaatagccggaattagcttagaactagtcaagtttgatactcagcttatgcaaaatgctgaaattgaaggtgtcgagtaccaacaagggcaattagctggatatgagttacgcgagtaccttttagagaagtataagcgaaaatgtgcctattgcgaaaaacaaaacttgcctttgcagatagaacacatagtgccaaaaagcagaggtggaagtaatagtgtaacaaacctaacattggcttgtgaaaagtgtaacctaaagaaaagcaacaaaacagctttggagtttggttatcctcaagtgcaagcacaaggtaaattgccattaaaagacgctgctagcgtaaatagtacaaggtgggaaattttcaatagactaaaagttacaggattgccaatagaaataggaagtgggggattaactaagtacaatcgcagtaggcaaaacctacctaaagcacattggatagatgctgcttgcgttggattaactactccccaaaaactagatgttgataaaattaacctattgcaaataaaagctacaggacatggaagcaggcaaatgtgcagtatggataagtttgggtttcctcgtacctcaaagaaagctggtaaaaagttttttggttttcaaacaggcgatattgcaagggctgttgtcacaaagggcaaaaaagttggtacttatattggtaaagttgccgttagggctactggctcttttgacatttttacctcttctggcagagtctcaggtattggctataagtattttactcttttgcattcttgcgatggctattcttgtttttacttaattcaaaacaagaccgcaattcctcccacgcctgaagtcgtgggcttccttgcgggtgatctgtga

SEQ ID NO: 1472 - DNA, 260 bp, unidentified
  misc_feature 1..260: note = Ga0394881_0018228 JGI
  source 1..260: mol_type = other DNA
gtcacttacccacggctcaagccgtgggcttgttgggtagataactaacaagtccgagtgaccggactaagttctaagaactacgttattaggagagttaaagaagacaccttggaatacgtgccagttccaagcactgtaaccagtaagttaaacaattgcaagggtatagcgatagtgcttattggatgaactgattaataacattgttgaggcaaacattacttccgaaaggaaaggtttaacaaactatgcaaaaa

SEQ ID NO: 1473 - DNA, 459 bp, unidentified
  misc_feature 1..459: note = Ga0070717_10057385 JGI
  source 1..459: mol_type = other DNA
ctgaacatccaggccgaagccagggatggggtcaaaaaagcggaggaacacagcacgcgacagcgccgaacgcgccgggggcgcaagaccccttgccgcaagccacggcagaatcggcagcagagcaagaagaaattgccgccctcgacgaaagcgcgagggcctcggaaactccggctggcacggttcctctgtcagctcttcccggtgcgtgtcttcgtggtcgaagacatcaaggcccgcacccagggaaaaaggcgctgggatcagcagttttcgccgttggaggtggggaaacactggttttatgcagaactcggcaagcttgcccccgtggtgaccaggcagggctatgacacatcaaccttgcgtgaccaattggggttcaaaaagatcagcaagaagctggccgaagtgtgggaggcgcattgcgttgatgcctgggtgctggcgtatagc

SEQ ID NO: 1474 - DNA, 240 bp, unidentified
  misc_feature 1..240: note = Ga0070717_10057385 JGI
  source 1..240: mol_type = other DNA
gtcaagcacccccgcatagaatgcgggggcttgtgaagcgaaccgacttgccatcggggaaccagcgagggtaactgcgaaacgagcttatccaagctcgagcctcgggcgagtgatcggaagctgaacgatctgggcgtggcagcccacagcaacgagcgagacgcctccctaatctcgctccgcttgggtgggaagcctcgaagggaacagtttactcgaaagaggcttatcgcacat

SEQ ID NO: 1475 - DNA, 1452 bp, unidentified
  misc_feature 1..1452: note = Ga0224423_10003602 JGI
  source 1..1452: mol_type = other DNA
atggaagccggacagggcatacacagcaatgtatatgttcttccgggagtctgtagagacagtaaacactcaatttcagaaaggaggcgtcagttaatgtacgcatttgttctcgcaaaagacggttcccggctgatgccgacaaacatcaggaaagccagaaagcttcttgataaagggaaagccgtcatttacaaacatcacccgttcacgattcagttaaccggtgaatccaggcactgtactcaatcgatcgagttctgtaaagatacaggatcagaacatatcggtgtgagtatcaaatcagaaacgcatgagtatgttcatgcacaatacgatcatctcagtgatgagaaacagagacatgaggcacaggcatcgtatcgaagaagcaggcgcggaagaaagcgttatcgcaagccccgcttcgacaacaggagaagaaacgataagtggttagctccaacagtagaacacaagaaggacaaccatatacgtatctttgatatgtatgcagaggtatgtccaatcacaagagcagtcttcgaagtcggacagtttgatccggctgctatgcaggcacttgaggagacaggagaagtgctccaggggactgattatcagcatggtaagaagtttcaacttgccaatctgagagaagctgtattcacaagagaccgctacacctgtcaggtgtgcggtaagtcagtgaaagacggagtaattcttcatgcgcatcacattatttaccgttctaatggcggaacagaccgtatcaacaacttgatgactgtctgtgacaagtgtcacactccgaagaatcataagccgggaggcaagctctatggtctcaaaccactgaccggtatatatagagacgtaacattcatgaatattgtcagatggtacatcaaaaatgatattcagaatcgttatccggatattactgtcgaacacacctatggttcatataccaaggcgtcacgccgtgatctcggtcagctgcctaagactcatgcgaatgatgcatatgcgatgggtgagttccacccaaagcacagatgcaaagaaacgcattatgtgaaacgtcgcaggaacaatcgtgttctctcgaagttctacgatgcggtgtatatcgacatgcgtgatggaactgttaagaagggttccgagattggatgtaaccgcacagatcgcaatattccccgcagcaacccaagcaacgagaggatgtatcgcgggcataaagtgtcaaagggaagagtatctgtcagaagacagagatacagcatccagcccggagatacggttcggtatagaggaagtattgcccatgccaaaggtgtgcactgtaacggtacaagggtgatgctggatacaggcaagtctgtaaagatcacagatgttgccgtaattaaaagaacaggaggatggcaattcctccccgcctga

SEQ ID NO: 1476 - DNA, 245 bp, unidentified
  misc_feature 1..245: note = Ga0224423_10003602 JGI
  source 1..245: mol_type = other DNA
gtcaataaccccacctgattcaaagaatcagatggggcttgtgaaagaaaagcaattttcttacataagcccgattgactagcctaagtgcttcgagcactacgttatgcagtgacgcataagcgacttacctgtgaatgctccacaagttcacagctctaagggtatgcattaaacatttcagtgggtaaagagaagtgtgtataccttctaaacctgcataacattggcgatgtggacccgtc

SEQ ID NO: 1477 - DNA, 744 bp, unidentified
  misc_feature 1..744: note = Ga0395631_0033223 JGI
  source 1..744: mol_type = other DNA
gtgacagtgaatcacgtcttcgttctcaatcaaaatcgtgagcctctcgatccggtccaccctgcggtggcccggatgctcatcgatggcggccaagccgccatcctgcgacactcccccttcacgataatcatgaaaatgaccgtggacggaccaacccacacctaccgcatcggagtcgatccgggcagccggaagacgggaatggtcgtggtggacaatgagacgaacgaggtcgtcttcgcgatggagatcaagcatcggggaagtgagatcaagaagtccttggatcagcggaggggagtccgccgttctcgaaggtcccggaagtgccgacatcgggaaccacgattcctgaatcgagcgagaccgaaagggtggcttccgccctccatccagagtcggatcgaaaatgtggtgacctggattgggcgattttcccgatcagttccggtcgttcagatcaatctggaagatgtgaaattcgacacgcagctcctacagaatcctgacattcgtgggtttttatatcaacaaggagagttgtggggctacgaggtcaaagaattcctcctctccgtgtggagacacgagtgtgcctactgcgggaagaaagatgttcccctcgaggtggagcacatcattcctaagagccggaacggatcagatcgaatctccaacctgaccatcgcctgcgtctcctgcaatcggaagaagggaaagatgacggctgcggagttcgga

SEQ ID NO: 1478 - DNA, 317 bp, unidentified
  misc_feature 1..317: note = Ga0395631_0033223 JGI
  source 1..317: mol_type = other DNA
tccaagtcttccactgaaagtcggaagcctgtggcgaaaccctggcttggttgaccagactctgtgaagtgagaccgagaggcctcgccgaactccgtgcgattggtcacgacaccttgggatgcaacgccagtcccaagctctgtcgtccggtttcatgaggattgaagaggatagctccgaaggagccggaccgaacaagcctttcgcacattgtcgaggcgaacgtggctcatgagaatgagcctgacacccgtgagggataacacccaagcggagacactcaattttcttttcggagagtgacagtgaatcac

SEQ ID NO: 1479 - DNA, 1296 bp, unidentified
  misc_feature 1..1296: note = Ga0137383_10023908 JGI
  source 1..1296: mol_type = other DNA
atgtcacacgtgttggtcattgatcaggacaaacggccacttgatccgatccatccgggctacgcccgcaaactgctctcgtccggcaaggcggctgtgtatcgacgctttccgtttgtgctgatcctcaaacgccaggttcccgaagctcacccccagcccctgcgtctcaaaattgatccggggagccaaaccaccggcctggcggtgctcaacgatgcgaccggacaagtggtatgggctgcggagctcatccaccggggggagcaagtacacgcgggacttcagaaacgcgcaggggtgcgccgtggacgccgttcccgccatacacgttaccgacccgctcgctggcgcaatcgccgtcgccccaaaggctggcttcctccttccttgtgctcgcgggtgcagaatgtggagacctggacgaggcggttgatccgttggtgcccgctcggtgccatctcctacgaggccgtgcgcttcgacacccaggcactccaaaacccagagatcgagggggtagcctaccaacacgggacccttgccggcttggaggtcaaagaatacctgttgctcaaatggggatatagatgtgtctattgccagaagacgggtcttcccttagaaattgaacatattgtgccgaaaattcgtggaggaagcaaccggatcaccaatttgaccctggcctgtgaggtgtgtaatcagaggaaaagccatcaaactgcccaggaattcgggtttcctcaggtccaggcgcaggcgcggcagccgctaaaggatgccgcggcggtcaacgcgacgcgttgggtgctcttcgcgcgcctgcaagcgacgggattgtccatcgaaacaagcacggggggccggaccaaatggaatagaaagcaacgcagcattccgaaaacccattggttggatgctgtgtgcgttggtccatcgactccggaacgagtggactggcagcaggtgaccccgctgctcatcagagccagggggcgacaatgccggcgcatgtgtaatgttgacgagttggggttcccaaggagccgtcccagagggccgagcaaggtctacggctttcaaacgggggatatgattcgtgcacgggtcaccaaagggaaaaagatggggacctatgttgggcgagtcgccatcaaaacagatgggtatttcaagattaccggcaggcatggcatggtcgagggcattcatgctcggtattgcgcgcccattcatcgcgatgatggctatgggtatacccaaggcaaagcggcgcttcctccccaggtgtga

SEQ ID NO: 1480 - DNA, 291 bp, unidentified
  misc_feature 1..291: note = Ga0137383_10023908 JGI
  source 1..291: mol_type = other DNA
gtcagcgaccccacgcccaagggcgggggcttgcttcggcagccccgatgctgagcagtccccaggcatcgcgcctggtagtccttcgcgaagaatgtataggcactccggggtggccttccagctccggactctgcggcgatccgttaaacagcgagatggggtttcaatcgcagtgcggctcgcaactcaaggaaaccttcgctgaagttggacgaggaaaaccttacctgggcaaccagaggcccggcaacgggcaaacgaccaaaggagccaatcgtcatgtcacac

SEQ ID NO: 1481 - DNA, 1044 bp, unidentified
  misc_feature 1..1044: note = Ga0208478_1004398 JGI
  source 1..1044: mol_type = other DNA
gtgaatcaggtgtctacgtttccgataggtgagcggatccaccaggccgtgcttcctcagcggcttgctctggaactcgcgtcagcagacacggctggggtagctccgaaacggggcgcgagcgctgaactttctagttcggcagccagtcgggaacatgatcaaggggagacccgccagccgcacccggccggcgggcgtcacgaaaccacagccagtcaagtggttgtggcaacagatggtgggagtgattccaccgccaaatcacatggacctgcagtgccggcagcaacagcagtacaagacaaccgggcaaccccctcgatggtggcggtgctcgacaaacacggcaagccgctgatgccgtgccacccagcccgcgcccgggagctattgcgcaaaggccgggcggtagtggcgcatttcagcccgttcgtgatccgcctgaaggaccgcaccctggaacagtccgaagtcgagagcgtgcaggtcggcatcgaccccggctccaaacacaccggcatcgccgtattcgggttcggcctcacgaccggggacgcccgcaagggaatgttctcggcccagttggaccaccgcggtcagaagatcagcaaagccatgacctctcggtcgcagatgcgccgcggtcgccgatcccgaacgatgcggtaccgggcgccgcggttcgccaaccgcaggaggccgaacgggtggttggcgccgtcgttgcgtcaccgcgtcgagggtgtcatgtcctgggcatccaagctgcagcggtggtacccgatcaccgggtggcatatggagctggtccggttcgacctgcagctgcttgaaaccccggagatcagcggggttgagtatcagaacggcaccctggccgggtacgagttgcgggagtacctgctggagaagtggcaccgcacctgcgcatattgcgacgccacaggggtgcccctcaatatggaccatatccatccgaagtcaaagggcggctcgaaccgggcgacgaacttcacgttggcgtgcatcccgtgcaaccaa

SEQ ID NO: 1482 - DNA, 314 bp, unidentified
  misc_feature 1..314: note = Ga0208478_1004398 JGI
  source 1..314: mol_type = other DNA
gtcaatcaccccgcgctggcgtgcggggcttgttcttcgctgtgagcagcggtgggcttgccccgttcgcgagggttcgtttgaccagatcaagacaccacgtatgggattgaggtgaatcaggtgtctacgtttccgataggtgagcggatccaccaggccgtgcttcctcagcggcttgctctggaactcgcgtcagcagacacggctggggtagctccgaaacggggcgcgagcgctgaactttctagttcggcagccagtcgggaacatgatcaaggggagacccgccagccgcacccggccggcgggcg

SEQ ID NO: 1483 - DNA, 303 bp, unidentified
  source 1..303: mol_type = other DNA; note = Human gut metagenome
gtgtcagaaatgacaaattatgcttttgtgttagatgcgaatggaaaacaattggcaccaacaaaagagcagaaagcttggtttcttattcgtaaaaaacgtgcgacattggttaataaatatccaatggtaatacaacttaatataacaattccaaatggtggagatacagctaataaacgaattgattggaatattgaaaaatcacatagcaatgctgctatttgtattaccgacttgcaaccagatgtatatgaaattaaagagtggataataaaaccaatgcgtagacaaagtaaagct

SEQ ID NO: 1484 - DNA, 286 bp, unidentified
  source 1..286: mol_type = other DNA; note = Human gut metagenome
tattaaatataaataaaagtggacatataactttttgtttgtggcttaatagtaggtttcaagcctgagtgactgctactatcgaaagatatgttgtcgatatgaactatgttagatagtaaggtaaaaacacacctttagatgtaatcttcagtctaaagctctgtgagtgccaaccaagaaacaatgctaatgtcctgcattgataacagggaaacacatattctctatctgacattggcaagaagagaaatgctccgaaagaaaggtgtcagaaatgacaaat

SEQ ID NO: 1485 - DNA, 879 bp, unidentified
  misc_feature 1..879: note = Ga0066650_10013185 JGI
  source 1..879: mol_type = other DNA
atgaaaaatacacaacagaagttaggaaagagaaatacatacacacctacaaatacttcacaagtttgtagctctgtggttgtgtctttaaacagagaggaaactctcagtgagcatggcttaaaaacctttccaaacagcctcgatgtgaacaaacagtctggcaagactggacaggatttgagaattcctgttttaaatatacgtggaaaacctttgatgccaacaacaccagcaaaagcaaggcatttgttagaacaaagaaaagcaaaagtaatcaaaagaaaaccatttgttatacaattgacaatagcaacgggagagactaagcaaaagattacattaggaatagatagcggatatagtcaagtaggattcagcgcaaagacagaaaaagaagaattgatattaggagaactaactttaagaaaagatgtatccaaaaagttagaagaaagaaaaaggtatagaaaacagaagagaaataagttatggtacagagaagcaagatttgataaccgagtaatttcaaaagaattgttagcaccaagcatacagcacaaattggatacacatgttagattgattgaaaaaatcaaaagtttacttccaatcacaaaaacaataattgaaatagccaactttgatacacagaagatgcagaatccagaaatatcaggaataaaatatcaacaaggtgaattacaagggtatcatatacgagaatatcttttagacaagtttggcaggaaatgtgcttattgcaatcaaaagggtgttcctttagaggttgaacatattattccaaaatcaaaaggaggaagtaacagagcatctaaccttacaatctcatgcagtaaatgcaatttagaaaaaggt

SEQ ID NO: 1486 - DNA, 279 bp, unidentified
  misc_feature 1..279: note = Ga0066650_10013185 JGI
  source 1..279: mol_type = other DNA
gtcaatcaccacaccctaaataatagattttaggatgtggcttgagccgtgaggtttgagagcgattggttgattagagggttgaaaaagtatgaaaaatacacaacagaagttaggaaagagaaatacatacacacctacaaatacttcacaagtttgtagctctgtggttgtgtctttaaacagagaggaaactctcagtgagcatggcttaaaaacctttccaaacagcctcgatgtgaacaaacagtctggcaagactggacaggatttgagaat

SEQ ID NO: 1487 - DNA, 1284 bp, Microcoleus chthonoplastes
  source 1..1284: mol_type = other DNA
atgcgcgttttcgttctagacaaaaacttacagcctcttgacccttgccatccagcacgggcaagagaattactgaacaaagggagggctaaagcattcaagcgctatccatttactattgtcctgcaagacagaaccgttgaagagtcagtcacgcacccacatcgggtcaaaatagaccctggcagcaaaacaaccgggattgctgttgtccaggaagaaacagggcgagtaacaagcgccattgaaatctcacaccgagggcaacaaattaaagattccctcttagctcgcaggtcattaagaaggggacgccgtaaccgtaaaacccgttaccgccagcctcgtttcttaaacagaacccgtaaaaccggatggctaccaccatcgctggagagtcggattgccaacattgaaacttgggtacgacggattaaaaaactctgtccgatttcagccatctctcaagagctagtcaggtttgacttgcagcaaatgcaaaaccctgaaattagcggagttgagtaccaaagaggtgaactgtttggttttgaggtcaaagagtatttacttgccaaatggaacagaaaatgcgcttactgcgaggttgaaaacgttccgttcgagattgaacacattctggcaaaaagtaagggtggttcaaaccgagttagtaatctttgccttagttgtcattcttgtaaccaagttaaagggaacagacctgttgaagaattcctaaaaaagaagccaggagtccttaaacgggtattagctcaagccaaagcacctcttaaagatgccgcagccgtcaatgctacccgatgggaactgtatcgaaggcttcagtcaactggtttacctgtagaggtaggttctggaggtcgcactaagttcaaccgtaaaaccagagggattgaaaaagctcacgctttcgatgcagcctgtgtcggagcatctactcctgaacgattattaattcgaggaatcaaacctctaaaaattgccgcaaaaggacgcggaaccagacaacgttgtcgccctgataagtacggatttcctaaagctcatgctcctaaagccaagtatttccagggtttccaaactggcgacattgttaaagctgatgttcaaaaaggtaagttcgcaggtcaatatattggtcgaattgcgattcgatttagacctagttttgtcttgcagttaccaacacaaaagtttgatgtacatcccaaatacttgagaaccattcataaagcagacggctatgaataccaatcctaa

SEQ ID NO: 1488 - DNA, 250 bp, Microcoleus chthonoplastes
  source 1..250: mol_type = other DNA
gtcaacaactcaccgctaagttctatcgaactatagcgggagcttgtaaaaacaggctctagttgaccagactaagttctacgagaactacgttatttagctcatgacaccctaagatgcgtgccagttttaggctctgtcgtacagttttaaacaggtgtagagagttaagccagtgagctgtacctaacaaggctagataacattgtcgaggctaactttaccagtaatgagaggtgcagtaatgcgc

SEQ ID NO: 1489 - DNA, 1155 bp, unidentified
  misc_feature 1..1155: note = Ga0302349_1003924 JGI
  source 1..1155: mol_type = other DNA
gtgactacgttgcacacacgcgagaagacccaccaggccgtgcttcctcagcggcctgctctggaatcgacgtcagcagacaaccccggggcagggacgaaacggggcgtcgagcctgggaccacccaggacacgggtgtgcaccgtgggcgaggggagaccgcggctccggccgcggcgtcaccggggaagggctcgttcccgcccccggacggcgggagtgatcccgtcacgcacgagcatccggcatccgagggtgggacctcgggtgcgcctcgccgcgccgaggcgcgggtgctcgtcctggatcggcgcgggaagccgctcatgcccacgactccccgtcgtgcgcgccagctgcttcgttccggccgtgcccgagtgcatcgggtgcagcccttcgtcctccggatcgtcgaccgcagggtcgaggactcggaggtccagcccctcgtcctgggcatcgacccgggattccgacataccggcgtcgccctggcgcgcgagcaggaggtccccgacccccgcaccggccgggcgacgacgatccgacacggcctcttcctcctgcgggtggaccatcgcggcgccgtgatccgcgaccgcctctcggcacgctccgccctgcgccgcggccggcgctcgcgcaagctccgctaccgtgcgccgcgcttcgacaaccgcgcccgtgccgcgggatggctcgccccgtcgatccgccatcgggcggagaccaccgtgacctgggcacgccgcctggccgcctgggcacccgtgacgcggatcgacctcgaggtcccgcgcttcgacgcccgtgccctgcatcggcccgatgtcgccctgggcgaccgcggccagggcaccctgcacggcaccgaggtgcgcgagtacgtcctggagcgcgacggccgggcctgcgtgtactgcggtgcgagcggcctgggcgccgcctccgtcccgctcacgctggaccatgtgagtccccgggcgcacggcgggccggacgtgccggcgaacctcgtcgccgcctgcgtcccctgcaaccgcgacaagggcgaccgcgaggtggaggagttcctcgcccgccggcccgccgtgctcgcgcgggtgcgccgcagcctcgcctccgtcatgcaggaggacctctcggtctcc

SEQ ID NO: 1490 - DNA, 289 bp, unidentified
  misc_feature 1..289: note = Ga0302349_1003924 JGI
  source 1..289: mol_type = other DNA
gtcaggcgccccaccacagacatcgacgggccccagggcacatcggtggatgtcgagtctgaccagctcgagacaccgctcagagggaggtgactacgttgcacacacgcgagaagacccaccaggccgtgcttcctcagcggcctgctctggaatcgacgtcagcagacaaccccggggcagggacgaaacggggcgtcgagcctgggaccacccaggacacgggtgtgcaccgtgggcgaggggagaccgcggctccggccgcggcgtcaccggggaagggctcgtt

SEQ ID NO: 1491 - DNA, 612 bp, Leptolyngbya sp.
  source 1..612: mol_type = other DNA; strain = IPPAS B-1204
atgcgaattccagttgtttcacgcgataatcaaccactcatgccaaccactccagcgagagtcaggaggtggattgcatcaggtaaagccatcaagaagtggtctgacctgggagctgttgatggattagctctggcatgttctgaattcgttaactacgagtcgttccatatcgcgaacactcgcggtcatgcttggactggttcagttcagttaacgcctgctattttcagggtgattcgcagacctcccatttctcgcaggcaactacacttaatggttccctccattggtggagtacgcaggaagtatggcggaactacaacacggcatggagtcagaaagggggatgttgtcaaagctgaaatggcgggtcgggtctctgtcggctgggtcagtggtgacactcaaagacagatttccgtgtctgatagcaattggaaacgcttagggcagtttacggcatctaaagtgttgttgattgcccgaaatactgggttggtggtttcgggggcatcgttggcgcagcctgcgcggagcgcataccccactcaaccaccgctcctatccctccccatgcctaaaggcaggggtatctcggaggaagtttga

SEQ ID NO: 1492 - DNA, 227 bp, Leptolyngbya sp.
  source 1..227: mol_type = other DNA; strain = IPPAS B-1204
gtcaggaaccccatagctagaagctaggggcttgtccaaaccaatttgggcaacgcaagttctgactagcccgtagagccttcacctggtacagacttccgaatacttccctagttcggatttactctaagcctgattggttcagacgttggttaatgccaagacatcctggttgaggtgggcgaagggacttaaacaaagcaatttgggttataccaatcatgcga

SEQ ID NO: 1493 - DNA, 1140 bp, unidentified
  misc_feature 1..1140: note = Ga0114918_10006480 JGI
  source 1..1140: mol_type = other DNA
atgccttgtagttcaagaaaagctagactgctacttaaaaatggtaaagctaaggtagcccgtaggtgtccttttactattaagatactatatggctccagtggctataagcaggaagtaagagcttctttaattccaagtagttctaaagtaggtatagcttgttcttcaaatgggacttgtctatactcttctgaagtagagttaagacatgatatttcaaagaaaatgaaaagaagatcttcttacagaagaactcgtagaaatagaaaaactcgttatagagaatgcagattcctaaatagaaaatcagatagaaagtttactccaactatgatgtctaaatttgaaagtcatgcaagagaaattcaaagattatctaagctacttcctattagtaattggatagttgttaaaaattctgttaagaaagattatcaaggacctaaagatttagagtggttaaatctacaaaggcaaacttttgaaagagatagatttaaatgtacttattgtaaaggtaaatctaaatgttatgaactacatgctcaccacctaatatttaggagtgaagggggagaagatgttttagacaatcttattactctatgtaaaaaatgtcatgtatcttatcataaaggagagatagagcttaaaaagattaaaagtaaaggaaaaattgatactgagtcagccatcattagaaagaacttaaaaattcatgataatatccaagaaatctatggttttgaagttaaagctaagagaaaactattaaacttaaagcctacacctattaacaatgcttgtagtattttagaaatattatcagataatagttattatattaaaaatgtttctaaaggagattatcaaatgacaaaaggtgttagaagccagatgataattcctaaaggtaaaatatttggatttaataagtttgacaaagttaaattcaaaaataatatttacttcattaaaggtagaatgagtactggttattttatagggatggatattttaggaaataccttaaaaggtaaaactctaaaagctaaagaatgcaaactaatttcaaggagatcttcatgccttataacagagacggtagaagaaaatacatgttacaatgccatctaa

SEQ ID NO: 1494 - DNA, 304 bp, unidentified
  misc_feature 1..304: note = Ga0114918_10006480 JGI
  source 1..304: mol_type = other DNA
gtgaatcacccatagtgccttcgacaactatgggcttctttgtgaggaggagttaaactgttcaccagactctgattagagaaatctaatctacgttattttagttagtacacctaagaataccgcctcagttcttagctctgtagaggctctgtaaacagggactaaagttccagtcaacttcaggacagccagacatttctggtaagctattataacattgttgagaggaagttaggattctttaattggtaatagattaaagatactcaatactcaggaataggagatatacttaatgtta

SEQ ID NO: 1495 - DNA, 1299 bp, unidentified
  misc_feature 1..1299: note = GENOME_ACESSION: mgm4799983.3 MG-RAST
  source 1..1299: mol_type = other DNA
atgaacagagtttttgtattaagtaaaacaggtaagacgttgatgccctgccatccggcaagggcaagacagctattgcatagcaaaaaagcaagagttaaacgtctttatccttttactatacagttaactcagcgttcaaaaggatatatacagcctgttgaactcaagttcgatccgggttcaaaacaaacaggtgtagggctggttttacatgggaaaaacaggctgtctgccatatatgccgcagtgttaacgcatcggggacaggaaataaaaaacaatttagactctcggcgtatgataagaagagccagaagaaaccgtaaaacccgctatagacaggcacggttctttaatcgtgtaagaagtaagcataaaggatggttggctccatccgtccagagccgtgtagataatatagtagaatggtctaagcgtttcatacgattggctcctgttggttttatcactgttgaatcagttaagtttgatatgcagaagatggaaaacgctgcagttcaaggagtggagtaccagcgtggcacgctgtttgattatgaagtaaaagaatatttgcttgagaaataccattatagctgcgtctattgtggaacaaagaatgtgccatttgaaaaagagcatgttatcccacgtagccgtggcgggagtaacagaataagtaatctggtgttatcctgtcatgattgtaatcagaaaaaagataacttgccaatagaagtgtttttaaaggataacccggcgttattgaaaaagataaaagcacaattaaaaagttcgttaaaagatgctgcagcggtaaacataacccgtaaacaaatcgtaaaagaactgtctgatttaaatgtgcctgttctgacaggaacgggagcggaaacgaaatacaacagagtaagtcagggatatgaaaaggagcattatatagatgcgttgtgtgcaggcacaacgggagcgaagatatatatccctaaaaagttaaagccgttgttgataaaaaaggaaagaagaaataacaggcagatgtgtctggtggataaatatggctttcctagaggaaaagcgaaaggatctaagatagtgcatggatttaaaacaggtgatatagtgaaagcagttgtgttgaagggaaagaaaaaaggtgtatataaaggaaaagtagcggtaaggtcaagtggaagcttcaacataaacgtaaaacaaggaagagtagaaggaataggctggaagaactgcgtaatgctttaccgtttcgatgggtatagctatactacctattag

SEQ ID NO: 1496 - DNA, 337 bp, unidentified
  misc_feature 1..337: note = GENOME_ACESSION: mgm4799983.3 MG-RAST
  source 1..337: mol_type = other DNA
gtcagtaaccccgccctgtcggacgaggcttgtaactgaaaacagccttatcgttttcctaaacaagtctccgacttggattaactgaccagccttagtctgtgaaacgctgagttttacagactacgttaaaaaacagatgacaccgtagaatgcttctccagttctatgcaatgtcgtaatacattaaacatttctttggggtaaggaaaagtgtgtgctacatgaaatgttttttaactttggcgaggagatattactttatgaaaaacgccgtttttcataaaagataaaaggtaacttattaaaaaataataaaaggaaagtaatgaacaga

SEQ ID NO: 1497 - DNA, 921 bp, unidentified
  misc_feature 1..921: note = Ga0307376_10007847 JGI
  source 1..921: mol_type = other DNA
atggtgtatgtattggacaagcgcaagagacccatgaacccttgcaccgagaaacgggctcgcctactcttggaacgcggccgggcggtggttcacaagatggcgccgttcacgatccggttaaaggacgtggtggccgccgacctgcccggatttacgctgaaactggaccccggttccaaagtaaccgggggagccgcaatccgggacggaaaagaagtcgttggatgttacgagtgtcaccaccgaactgacatcaaagacaagatggacgcccggcgggggcaacgccggagccgccgggcacggaagacacgttataggaaaccctgttggggcaaccggcacccggagaagtgcgccgcctgcggtgggaacgcgaaacacggcagccggtactgccgtccctgcgccgcggtaaggcacttcgttgacaacggctgccgggagacctggctgccgccgtcgctccgtgcccgcgtggaagaaaccctattctgggtggaaaagatgcgccggcttctgccgatcaccgggattgcaatggaactggtccggttcgacacccagttgatggagaaccccgacatctccggggttgagtaccagcagggcactctgaccggctacgaggtccgggagtatctcctggagaagctcggtcatcggtgtgcctactgtcggggtacctcgggggatccggttcttaacgtggagcacgtggtaccacggaacccggctcaaggaccgaaaggcacggatcgggtttcgaatctggttatcgcctgcaagacgtgcaatgacgcgaaggacaacctgcagccggaagaatggttgaaacagttgcaggcttccggaaagaagattgatcaggtacgggcggagaacctgcccaatgttctaaagcaacttaagcaaccc

SEQ ID NO: 1498 - DNA, 350 bp, unidentified
  misc_feature 1..350: note = Ga0307376_10007847 JGI
  source 1..350: mol_type = other DNA
gtcatagacccacgcctaaaggcgggggcttgcggaggaaactccaaaagtccacgtcttaaggcgagaaagcggtatgaagttaccttcgggtacaaccatatcgcgctatgacccacccaagcccgccgggacatccaggcgagcgggctacgttatcttggtcatgacaccttgggatgcttctctagtcccatgccctgtcgccggtggttaaacagtaagccggggtgcagcgagcagtgctgtcggcgcaaaaagccgggataacattggttaggagagatgccggcggaagccggcgcgtcacaggctccgcaaggggtctccgaaaggggatgcacaagatg

SEQ ID NO: 1499 - DNA, 1137 bp, unidentified
  misc_feature 1..1137: note = Ga0209800_10000857 JGI
  source 1..1137: mol_type = other DNA
atggctgatgccgacaaatccggcaaatgccagaattttgctcaagcagggcagggcaaggcaaaggtgattcaaagaacaccctttgcaattcacttgctttatgagaccaccgagcatattcagccggtgaccgttgggattgatgacggagggatcaatatcgggattgcagcggtttcaaacggcaaggttttatttcaacagaaagttgttttacgttcggacgtcaagtcaaaactggatacccggaggcaataccgtaaatccagaagaaaccgcaaaacaaggtatcgaaagtcaagatttctgaacagaaagtcatccattcccacatgcaaggtgtgtggcgggaatgccccggtatctcaggtgatctgtcgatcctgcctgaacagagcggatggggttcatcaaaaatatgcgaagatcaaaaaaagtgttttccgaatcccaccatcaatcaaggcaaaaaaagatgcgattatccgggtggtcaagcagatcccactgcccatttccagaattgtgctggaagatctctatttcgatttccaggcaatggagaatccggacatttccggtgagcagtatcagcatggagatctgctttatcacaagaatttcaaacaggcgtgtctggtgcgtgacaagttcagatgccgtgtttgcggtgcgcaaacaaaactgcaatgccatcatatccgtcaaagggcaaagggcgggacagacaagctctcaaatctgatgacgctttgtgatgtctgccatgatcgacatcataaagaagggctcaaacttccgaaacaaaagagttccttctacatgtcggcagcacatgtccagcagggaaagcactatctgcaagctaagttgtcacgaatcgcgccattacggacgacattcgggtatatcaccagtcattttcggaacaatgccgggatagaaaaatcccatgtcaatgatgctgttatcattgcagataaacaggcaagtcctctggaccggcagatacagacaaaacatgtgcagtcacggaaaagaagtttgcatgaagcaactgcaagaaaaggaaggaaaaccccgaaccgaacccagaaacggaataacaaaaacgtatttaccctgaaaggtttt

SEQ ID NO: 1500 - DNA, 263 bp, unidentified
  misc_feature 1..263: note = Ga0209800_10000857 JGI
  source 1..263: mol_type = other DNA
gtcaactacccctcctgaatcaaagattcagaaggggcttgtaaaagcccaagttgactagcctcagtctctttattagggactacgttcggcaggatgtagatacctttggatgtaatcgccagtccgaagctctgtcgtggctctgtaaaagctctgtgaggaaggagcggttaaccacgttgtgaagcctgctgaacattggcgaggcgaaccttacccctctttggagggtgtgcataactgaaaggttttttatgaaa

SEQ ID NO: 1501 - DNA, 1209 bp, unidentified
  misc_feature 1..1209: note = Ga0180438_10006853 JGI
  source 1..1209: mol_type = other DNA
ttgagagtacctatctatgtgttgaacatcagggggcaacccctcatgtctaccacacaacacaacggcaagaagttgttaaaacaaggcaaggcaaaagttgttcagagatgtccttttaccattcagttgaactatgcaactggagaggcgacacaaccgattaaactgggagtggatattggatatacgaacattggatttagtgccaagaccgataagttagaagtcataagtggcacgctgaccttgcgaaataatgtttctaacaagctagaggaaagacgcaggtatcgtagcacgcgtagaggcagattagggtatcgaccaccacgatttgataacagaacacgacccgaaggatggttcgcccctagtattcagcataggcatgactcacatattcgattagttgaaacacttgaaacactgctaccgattacctacgaaaaggtagaagtggcgaatttcgatgcgcacaaaatgcagcatccagaaattacaggcgtcgcatatcagcagggcgaacttcagggctatgaagtcagagaatacctgttagacaaatggggacgaaagtgcgcctactgtggtgaaaagaacgtgccattagaagtagagcacatcattcctagaagtagaggtggaacagaccgagtatcgaatttgacgatcgcatgtaggaaatgcaatctaaagaagggagataagaccgcagaggagtttgggtatcctactatacagaagcaggcaaagcaacctctgaaagcacctgcatgtctgaataatattcgttggaaattagtagaacagttaggagcagagcatacctatggatacgtcactaagtacgaacgtaacaaattagggctggaaaagtctcatgttaatgacgcgtttgtcattgctggaggaacaactcaagagcgctgcaggtcttatgaagtgatgcaagtcaggcgcaataatcgttcgctacagacgaatcgaaagggattcaaaccctctattaggaaacagcgataccagttgcaaccccacgatgtggtaacttataatgggaaagtataccaagtcaaaggggtattcaattatggcacctgggtacgattacgtgactcacagggagcggtcgtcaacaccaacattaaaaacgtgaaactgttgaaatatggaaaaggcttagtatttaccttcaaaaacaactaa

SEQ ID NO: 1502 - DNA, 289 bp, unidentified
  misc_feature 1..289: note = Ga0180438_10006853 JGI
  source 1..289: mol_type = other DNA
gtcaatcaccccctagcaagtgagggggcttgttccgtgaggagtgagagtaattggttgattagcctaagagaggtcatggtggaaacaacatggcgacatctacgttatcaggagagttcaagaacacaccaggggatgcttctctagtcccttgctctgtaaatggtggtttaaacagagaggcaactctcagtgatcaccgtatagtactgactgataactttggcgaagagaaccaaccgactttaaagcaatttaaaggaggagataggacttgagagtacct

SEQ ID NO: 1503 - DNA, 1287 bp, unidentified
  misc_feature 1..1287: note = Ga0098074_1007018 JGI
  source 1..1287: mol_type = other DNA
atgcagtcaaacagggtctttgtggtgaatagcagtggggaaccgctgatgccgtgccatccggcacgagcgcgaaagctgctcaaggttggacgggccaagattcaccgttaccaaccgtttgcaatccagttgttggattgtgagaatcaggacgtccaaccggtagaggtcagggtcgatcctggcagcaagacgacgggcattgctctggtggcctatggcaaacgtgggggtagggtcgtgtgggcggcagagctacagcatcggggctggattatcaagagtcggcttgagaagcgtagtgctgttcgcaggggccgacgccatcgaaaatgccggtacaggcccaaacgctttgacaatcgaaaacgtaacaagtttgaccgttggttgccgcccagcttacagagcagggtggacaacattgatgtgtggataggccggctctgcaagtacgcaccgttgcgctgggcggcggtcgagacggccaagtttgatacccagaagatggaaaatcccgagatctcggggattgaataccagcggggtaccttggccggatgggacgaacgcgaatacctactggagaaatggggtcggcgttgtgtgttctgtggtgctgagaatgtgccgctccaggttgagcatttgatacccaaatcgagagcgggtacttctgagcgtacatataacaaggcgatagcttgcggtccttgcaatcaaaagaagggcaaccaaactgcggccgagttcggttttccagaactgatggacaaggccaagcagtctctaaatctaagggatgctgctcttatgaattccacacgctatgccataggcgatgcagtgaagcgacacctgcccactacgttctggacaggctcaaggaccaaaatgaaccgcataaatcagggctatcccaaagctcactggatcgacgctgcctgtgtgggagaggctggtgccgacgtgttcttgccgcaggggttacggcctcttcagataagagccgtaggtcgggggagccgacagatgtgtcgcatggatcgctatggcttcccgcgtaccggtcccaaaacggtcaaacgggtttttggtttccagacaggggatattgtcaaagccgacatcccaaagggcaagtatgctgggctacacattggccgtatatcctctgtccgtgcctctggaggttttagtttgaaatcggtaccaaaggtcaactggaaatattgccagctaatccagcgggctgatggatacgaatatggatggattgactaa

SEQ ID NO: 1504 - DNA, 353 bp, unidentified
  misc_feature 1..353: note = Ga0098074_1007018 JGI
  source 1..353: mol_type = other DNA
ggacacacccgtttcgcccttacccatgtggggcgaaccctaaccttttcgtgtgaaatggatagggtcgctacgaaaccagtcacagccaggggataatcgtcgtgattatcccaccgggctacgttaccgctgaatgtataggcaccttggggtgcttctctagccccaagctctgcggttggtagttaaacagacctgataaggagggtcggtgctgccagcgagaaaccagtggataacattgacgaggagacgggcaaatgggcatagccccgatgcctaaaccaccgaaaggtgagaacccggcgtaagccgggaaacagaaagagaagggaatgcagtcaaacagg

SEQ ID NO: 1505 - DNA, 1242 bp, unidentified
  misc_feature 1..1242: note = Draft_11733483 JGI
  source 1..1242: mol_type = other DNA
atgaaggtatatgtaatcaacaagcacgggagaccgttgatgccttgtagcccgagaaccgctcgtttacttttacgagataaggccgcgaaagtaatcaaacgagatcccttcactatcaaaattctagtcggagttaaaggctacacacaagatttaactcttgggattgatcctggttcaagatacattggttctgccgttagagatgataaaaatcaagcttattatctatcacaagtagagcagcgtactgatgttaaagcgaacatggatcaacgaagaatgtatcgacgaactagacgtaatcgtaaaactcgatatcgtaagccaagatttatgaatcgaaaagctagtactaaagacgatagatatccaccaacgctagaatctaaatatggagcaatcgtaagagagatcaatttcgtatgtaatattctcccgattaagaaattgtatatcgagattgcgaagtttgatacaagtgctcttacgaatccaaacgtacttgagtatcattggttgtatcaacgaggtccacagcttggattctacaatactaaagcgtatatactctttagagatacttatacttgtcagtattgtaagaacaagagaaaagactctcgattacatgttcatcatattcaacacaagtttcaaggcggaacggatcaaccgaataacttaatcacgctttgcaaatcctgtcatgatgatctgcacaagaaaaagattatgcttaatacaaagcatttaaacacaataaataatcttaaacatgcttcacagatgaatgttttatgtagtatgattaaaagtagatttgtttctggatcttatatcgagacgcttggtggaattgcaaaaggtgttcgagagaattttcaatatccaaaggagcattattgggacgctttctttggaagctttgaaaacggaaacactccaaaactattaatagaccgagtactgatgaagaagtgtgtcgcgaaaggatcttatcaattgactaacggtaagagatctgagaaacggttaccaactggaaagatttgtggttatcgagtctgggacaaagttttgtatcaagatcaacagtatttcgtaagaggtcgtatgtcgactggttatgctaatctttgtgacatttcgggtactcagtttaagattcgtccgatgcctaagtttaataaaatgacaagaattggagcaagagattcatggattatgaccacataa

SEQ ID NO: 1506 - DNA, 278 bp, unidentified
  misc_feature 1..278: note = Draft_11733483 JGI
  source 1..278: mol_type = other DNA
gtgaactacccattgattaaagatcgatgggctttggatcaaaccggagccggagatcaccagactaagtactaagaaattagaactacgttatttatgatgcagatacctttcggtgccgcctcagccgattgctctatcgtggctctgtaaacatcctgcggaaagggaagtcaaccacatcacgaagcatagataacattgtcgagaggaagtcgaatttactcgctggtaacaggtgggtaatacgcattactccttaaggagctcatatgaag

SEQ ID NO: 1507 - DNA, 1380 bp, unidentified
  misc_feature 1..1380: note = Ga0104854_10039936 JGI
  source 1..1380: mol_type = other DNA
atgaaccaggtatttgtgctcagtaccacgagacagccattgatgccgtgctccccagctcgtgcgcgacgattgttaaaagccaagcgagcggcggtcttccgacggcaaccttttacgattattctcaaaggtcgaatcgctggggctacccaaccagtggcttggcaaatggatccgggaagccgcacaaccggccttgcactcgtgggcgagtttcccgatcagggccgggtcgttctgtgggctggcgagctgcatcatcgaggacacctcattcgccaaaagcttctagcccgtcgggcaatgcgccggaaccgtcgatttcgcaagacccggtatcgggctccccgatttctcaatcgccggcgcgcagaagactggcttccaccctctctcaagtcgcgtgtggataatgtcgtgagttggacaagaaaaatccaacgtcttgtgccgattacctcgatcgcgatggaacttgtgcggtttgatacccaaaaactcatgaatcctgagattgagggggtggcataccaaaggggtgagctgtttggctatgaagtccgagagtatctgctcgagaagtggaaccgtacttgcgcatattgtcacaagatcaatgtgccgttggaaattgagcatttggttccgcggagtcgtggtggcagcgaccgtgtgagcaacctcacgcttgcctgcacgaaatgtaatcaacgaaagggtaatcagacggctacagagtttggctatccgcagttgatgaagcaggcccagcaaccgctaaaggatatggcggccgtaaacaatacccgctgggcgctctatcggcaactgcagtcactcggtctcccagtctcagcgtggtctggcgggcgaaccaaatacaatcgtacccaacaaggctaccccaaagcacattggattgatgcggcatgcattggagagcacatgctcctgcttgatcctaatatgagaccgctgaccatcacagctgtgggtcgtggcactcgccatgtcgttcggactaacaagttcggttttccgttagcaagggcaggtcgaattaaacgactctgtggttttcaaaccggcgatcttgtcgaactaatccagccgcgtggcaagtatgctggtcgatggtttgggcacctcaaagcgatacgtctgacagggtattgcgaactcagaacatcactgggcaaagtcggcgcgcctacatcgcgctttactattttgcaacgaatgggcggctacaaatttaccaagaaaggttccatctctagtgagctatctaagatcaatcttcttgggaataaatcagaatctatttcgataggagaatctaatggaagcaaaactctatcgatcagcgatgagtga

SEQ ID NO: 1508 - DNA, 329 bp, unidentified
  misc_feature 1..329: note = Ga0104854_10039936 JGI
  source 1..329: mol_type = other DNA
ccgtctcggtcctatctatatgtccaacgtggtagcaaaaaaggtccgagggacattgaaaataattcttgacctgtctcaaccaggctccgtccccatcaattcagcaatgcattggtgatgggactccgttctgcgcgaatacataggtaccctgggatgcttcaccagtccgcggcactacggtcagcgattaatcagcacggcgtcgggacaacgggcagtgtcgttggcaaacaaaccgcgcgagaacattgccgaggtgaccataactcccatcatgggacgtggctgtaaagccaataaagaaaggaagtcagatgaaccag

SEQ ID NO: 1509 - DNA, 1116 bp, unidentified
  misc_feature 1..1116: note = Ga0376082_0008098 JGI
  source 1..1116: mol_type = other DNA
atgcgagttccggtattatcaccaagaggaaaacctctgatgccagctaagcccagcagggtgaggcgctggctaaaagaagggttcgctaaagttgtcaagaacaaactcaaaatctttcaagttcagttagtagaagaaccatctgggacagaagttcaaggctgcgtagccggaaccgatcctgggaagctgtacaccggacttgcggtacagaccgcaaaagacacgctttggctagggcacattgtcctcccctatgcagtcatccgcaaacgattagatcaacggcgaatgatgcgtagggggcgaaggggtcgccgaattgatcgcaaactaccttatgcccagcgtaatcacagacaaaaacgattcaataaccgccggagcaaaaaactgcctccgtcgatccgagcaagtcggcagttagagattagcttgataaagacgctatgctctatctacccaataaactgcatagtctgggaaaaggttgtagctaaggggtcttcatgcttctctcccgtaatgcaagcgcagtactgggcaatcaatatcctagaaaaaagctgcggatgcgaggttcagcagctagaaggctgggaaacctctaacctccgacaatatctgggcttgcacaagcaaaagcatcaaaaaggagacgctataccagaaacccatgctgtcgatgctgttgctcttgcctccagttgttttgtttggtacaagcaacacaaaggtaaagcaggctggtgggaaggttcggtcaaagttacgcccgctccttttgttgtcattcgccgtccaccgattagccgtagacagctccacctaatgcttccctcaaaaggtggggtgcggcgcaagtatggtggaaccgtaactcgtcatggatttcgcaagggggattatgtttgcgctgaacaagcaggacgcatctactacggctgggtgtcaggcgacaccgccaagcaagtttcagttagcgattctagctggaatcggctagggcaattttctgttaaaaaagtccgtctgttgcagcgaagcacggggttaatcgtcgtgccttcagccggattgtcaaatctccccctattgaaggggtcgatttga

SEQ ID NO: 1510 - DNA, 247 bp, unidentified
  misc_feature 1..247: note = Ga0376082_0008098 JGI
  source 1..247: mol_type = other DNA
ttcaactaccctaggctgctacgctcaagctgagggattgcccggagcaggacgggtgacgcaagtgttgaatacgaccgctgagactagcctcggtaagcacttctaggatacttctctagtccggattatctgcaaaaccgcttgttacggtttcatctaaaaggtggacatcctaggttagttggtcaaagagacgttctgtaaggaacacatactctgaaaggagaattatcttaaaatgcga

SEQ ID NO: 1511 - DNA, 2460 bp, unidentified
  misc_feature 1..2460: note = Ga0373620_0000796 JGI
  source 1..2460: mol_type = other DNA
atgaagcagaagttaaaacagagaactaaaaagaacacacctacggatgctccacaagtccgtagcaactgtggtctgtcattaaacaaagaggaaactcttagtgtgtcaggctcaaaaacctgttttaacaatcccgaagtggatttatctcaacatacagagaggcttaaagccattgtgtatgtaattagtattgaaggacgcactttaatgccatgcactccagcaaaagcgaaaaaattacttaacggtaatcgcgctaaggttattaaattgtatccattcactattaaattaaattttgagtgcgagaatcaggcgcaagaaatcagacttggagttgattccggatttaacaatgttggaatgtcagccattacctcaacgaaagaagtattgtctcaaacaattacgcttgacagcaaaacatcaagtaggctgaccgaaagaagaatgtatcgcaggttaaagagaaacaaattatggtatcgaaaatcaagatttttgaatcgagggaatcaaaaagaaggttggcttccaccatcaattcaaaggagatatgacgctcatttgacgctaatcaagaatgcaaaatcaattctgccaatttcaaaagtcacaatcgaaactggcaattttgacatcgctaaaattataaatccagacattaatggcattggttatcagcaaggagatttgtatggctaccaaaatatgagagcatatctgatggcgcgagaacatggtttatgccagttgtgccacaaagaatttacaaaaggaaatccatcgcatattcatcactgcaaagagcgtcacgaacagggctctgaccgttcagaaaacttggcgataattcataagaagtgtcacaagaaattgcataataatggattaaaattatttactccaaaagagtataaagcaaatacatttatgtccatcatccaacataaattcaaacaagatattccagatgtaaatatcacctttggatacaaaactttcgttgaaagacaaaaactgggattagaaaaatcccacgccactgatgcgtttgttattgctggcggagcaacacaagagcgatacgggtcaattacaattcaacaaaagcatagaaataacagggcgattcaattaaacagaaaaggattttcgccttcaatccgaaagcaacgatatgctattcagccaaaagatttgatttggattaacggaaaaatattttcagttggcgggatgcaagacaaaggcacacgagttaaaattgaagattcaaaaaaggtttattctataaaaagtgtcgaaaaaatgtatcactttggtggattttttttacaactaaaaaaaatgaaacagaaaaaaataatgccttatacctctcaactaaatctaacaggttttacaggaaaatctcacaacaagcggtggaagcaggatgagattgatttcatccagcacaatataaataagccagtagattggctatcgtcccagcttaataggtctgagggttctatcaacacaatgatttggaaattaaaaaaggaatccgagactcagactacggttgcattacctcacgcatcatcagcaggacaacgattcgacataaaaaataatagcgacaagcccattaaaataatctcatcatcacctattgtattagagcctaacgaatccactaccatttccggctctacacctcactggcagaaccaagtagagaaggcaaggcaaatactggtagtcgaaggaatggctgagagtcaagctgacaccgagatgtcatacgtttattccatcttccacgaaaatccaactctcaaaaattgtcatcaagactcgatagtttccgcaatcattgacataggcagaaccaagagcacaattaatccagctttaaaacttgcataccttaaagccaaagacggcaaatgcgtattcgagctcacctatcgcggattaatcaagtccttgacagatagcggtagtataaaagttatggacgctcatatagtttatgaagatgactatgagttcgagtatcttccagccgagaataaaattacccataagccaaaagttgctaagaccgaagctgaaaataatgcacgccaaattgccggagcttattctgtcgccatactgaatgacggaacaaagcattatcacttcatggagatatggaagctcgcgaaaatagaacaaatgagtaccggaggcgagagcgactatttctataccgaatggaaaacagatatgtacaagaagtgtgcaatcagaagtcattataaattcctgccaaaaggaactacgctaccggaatacatccaacgagcaattatgattgatgatgaaaattcaagcatcatgatgagtagcagtaaattcggtgcgggcaaaaaaagaggtggaatgatggaatttttcaataatccaaaaattgactga

SEQ ID NO: 1512 - DNA, 263 bp, unidentified
  misc_feature 1..263: note = Ga0373620_0000796 JGI
  source 1..263: mol_type = other DNA
gtcaatcacccaatccaaaagaaagggcttgagccgtgaggtttaagggtaacaggttgattagggagcgtaaattggaaacaatgaagcagaagttaaaacagagaactaaaaagaacacacctacggatgctccacaagtccgtagcaactgtggtctgtcattaaacaaagaggaaactcttagtgtgtcaggctcaaaaacctgttttaacaatcccgaagtggatttatctcaacatacagagaggcttaaagccatt

SEQ ID NO: 1513 - DNA, 1290 bp, unidentified
  misc_feature 1..1290: note = Ga0180008_1007149 JGI
  source 1..1290: mol_type = other DNA
atgagctacgtatttgttttagacacgaacaagcaaccactcaacccggttcatccaggttgggcaagaaagctattatcatcaggacgtgcggcagtatataagagatatccatttaccattatcttgaaggctgccatcccttcagcggaaatacaaccattaagattaaagattgaccccggcagtaagacaacgggacttgctattgtcaatgacgtttcaggggatgtactgtttgccgctgaacttaaccatagggggcagcagataaagaagtcaatggatagcagaagggctattcggagaggcagaaggaataggaaaacgagataccgcaaaccacgtttcaataaccgcaggaggcaagaaggatggttgccaccatcgcttcgtagtagagtagagaacattgagacgtgggtagcccggctacaaaagttatgtatgattacagcgattagccttgaattggttaagtttgatatgcaagcaatggagaatcctgagataatcggtgttgaatatcaacagggagaacttcaagggtatgaggttagagaatatctccttgagaagttcaatcgtaaatgcgtctactgcggcgttgagaatgtaccattacaggtagaacatattgtaccaagagcaagaggtgggagcaatagagttagtaatttaactcttgcttgcgaaccatgtaataaaaagaagggtaaccaaacagcaaaagagtttgggtatcccaaagtacaatcccttgctaagaaaccattgaaggacgctgctgctgttaatgctacccggtgggcattatatcgtcggacggaagcaacgggattgcctatagaagtaagtactggtggtagaacgaagtacaatcgtagtataagaaagctacctaagacacactggcttgatgcgacttgtgtaggagcgtcaacgccagaagtcttggatgtcgaagggatacgtcctttggatattactgccactgggcgtggttcaagacagatgtgccgtgtagataagtacggtttcccgcgcacatcggctaagaagttcaaacgtgttcatggttttcaaacaggcgatatggttaaagctgttgtaccaactgggaagaatacagggacgtatatcggacgtatagctattcgggcttccggcagttttaacattaagacaccaaatagtaccatccaaggcattagctatcggtactgccaacttgtgcagcgacttgatggttatacttacgagagggagacggcattcctccccgcctga

SEQ ID NO: 1514 - DNA, 255 bp, unidentified
  misc_feature 1..255: note = Ga0180008_1007149 JGI
  source 1..255: mol_type = other DNA
gtcaactacccctcctaattctccgaatcagaaggggcttgcgaaagcgagcttcaaggttgaccagctatagttctttgagaactacgttaggaacgaatgtataggtactgtcgtggtgcttcaccagcccgacgctctacggtatgttgttaaacagctaaagagggataagcagtgcagcatacaaaaaaccgttccgcaacattagcgaggtgactattactcttactcttcggagtaaggaggtgtctt

SEQ ID NO: 1515 - DNA, 1296 bp, unidentified
  source 1..1296: mol_type = other DNA; note = Human gut metagenome
atggtatatgtacttaacaaaaacggacaaccacttatgccaacaaacagacacggaaaggtaagaaggcttttaaagataaacaaagccaaggttattaagcgttgtccatttacgatacagttgttgtataatacaacaaattgcatacaaaatattacattaggtgtagatgccggttctaagcatattggattatctgcaactacaaaagataaagtattgtttgaagctgatgtagaacttcgtaacgatataacaaaattacttgaggcacgaagaaaatttcgtcactcaaggcgaaatcgtaaaacccgttacagaaaaagacgatttaacaatcgagtatccagcaaacataaaggttggttggctccaagtattgagcataaaattcagactcattttgcaatggtagaaaaagtacacaagatgttgcctattacaaaaattgtagtagaaacagcatcgtttgatatgaaattgcttaaagctcaactggaaggtgaacccattccaaaagggacggattaccagaaaggtgagcttacaggttggaatatcagggaatatattttccaccgagataattacacctgtcaatggtgtaaaggtaaatcgaaagatttaattcttgtaacacaccaccatgcctactggaaaggcgaccatacaaacaaaccctcaagtctgattacactttgtaacacttgcaatgatagtaaatatcacaaaaaagaagctaataggctttggggttgggagccaaaaataacaaactcttataaacacgcggcctttatgaatgttatgagatgggtattttataatcggctaaaggaaatttatgcaaatgtttctatgacttatggttatattacgaaaaacactcgtataaaaaacaatctaccaaagacacattatttagatgcacgttgtattagtggaaatccaaaggctaagagtagtggagagtatttttactataaaaaggtcagatgtcataatcgtcagctatataaagctaatacgttaaaaggtggcatccgaaaacgtaatcaagctgagtatacagtcaaaggttttaaactctttgatagagtagaatatcagaatcacgaatattttatatttggtagaagggcatcaggtttctttgatattagaaatttaaatggccaaaaggttaacaaaggctctgtcagttttaagaaattaaaattaaaagaaacaaacaaaacttatttaattgaaaggtgtacggtggatacaagagatgatttagctcctctatga

SEQ ID NO: 1516 - DNA, 282 bp, unidentified
  source 1..282: mol_type = other DNA; note = Human gut metagenome
gtatagtcaataacccacgactaaagccgcaggcttgcaaaagcttttattgactagcctaagtgtttcaaacactacgttaaaagagaatatatagttaccaaagggtgttatacctagccttttgctctaaggtcggtggttaaacagttctgatgggtaggaacagtgttgccgatataaaacctcttattaacataggcgaaggtatcttacagtttgatatgtactggcttatagcatacaacatatcactattaaagaaaaggagtgtttgttatg

SEQ ID NO: 1517 - DNA, 699 bp, unidentified
  misc_feature 1..699: note = Ga0268283_1011674 JGI
  source 1..699: mol_type = other DNA
atgccatgttcaccaagaacagctcgattacttctacgcgataaatgtgctaaagtaatctcacgagatccatttacaattaaattattaataggagttccaggttatacacaaccattagtgttaggtattgatcctggatcaaaatatataggttcagcagttcgaaccaagaaaaaccaagcaatttatttatcagagattcatcaacgtacagatgttactgataagatgaagcaaagaaagatgtatagaagaactagacgcggaagaaaaactcgatatcgaaaaccaagatttcttaatcgaaagaatagcacaaagactaatcgttatccaccaacacttgaaaacaagtttcacactattcagaaagaagttgagtttgtaactaagatacttccaatcaccaaaatgtacatcgagatgggaaagtttgacatgcacgcaatgatgaacccagctgtattaaatcatcactggatgtatcaacaaggtaacgaatttggtttctacaacaccaaagcttatgttttgaatcgagatgattatacatgtcagtgttgtaagggaaagagaaaagaccctcatttacattgtcaccacataatctatcgaagaaatggtggtagtgatagagctgataacttgttagttgtttgtgaaacttgtcacgatgatattcacgctaacaagatt

SEQ ID NO: 1518 - DNA, 278 bp, unidentified
  misc_feature 1..278: note = Ga0268283_1011674 JGI
  source 1..278: mol_type = other DNA
gtggactacccaggaggcgttagctcccggacttcagagtaatctgaagcctaagatcaccagactcagtatctagaaacggatactacgatatctatgatgtagatacctgcgagtgccgcctcagctcgctgctctatcgtggctttgtaaacatcctgaggaaacggaagtcaaaccactttacgaagcatagatatcattgtcgagaggaagttggaaagtctactggtaataggtagacgctacacattactctgaaaggagacataaatttg

SEQ ID NO: 1519 - DNA, 1257 bp, uncultured Methanobrevibacter sp.
  source 1..1257: mol_type = other DNA
atgttcgtttatgtactaaacatgcatggtgaaccgttaatgccatgtaaaccaagaaaagcaagaaaattactgaaagaaaagaaagcaaaagtggtgaacaggacaccatttaccatacaattgttgtatggatcttctggttataaacaaacggttaatctgggtgttgatgccggaagcaaatacattggattatcagcaaccaccaataaaaaagaattatttaaagcaacagttgaattaagacaagacatacctaaattgttagaaagtagaaaaactcagcgcaagaatcgcaggagcaaattacgttatcgtccggcacggtttaataatcgtggtaaaaaaggaaaactggcacccagtattcagcataaaattgacagccatttaacaataattaaacgtatttgcaatataattcccatagaaaacatcattgttgaaactgctgaatttgacatgcataaactaaagaacccaagtgtatctggtgcggattatcagcatggcgatgcagaaggtttttataatgttaaatcagctgttttaagccgtgacaattacacctgccaaatatgcggagcaaaaaataccaaactgcaagttcatcatatcagattcagaagtgatggcggttccaatcgcatggacaatctagtaacattatgcaaagaatgccatgataaagtacatacaggcgaattgaaatatacaaaaaaagtcaaatcattcaaacattccagtcatatgaacatcatgagaaaaaaattaatacaatctttaaaaaaagaattcagaaatgtttttgagactttcggttatttaaccaagtatactcgtgaaaaattgggccttgttaagtctcattgcaatgatgcttttgtaattagtcacaatttggatgccgaacaatcgaatgttgaatattcatataagaaagttagacgacataatcgccaaatacataaattcaaacctagtaaaggtggaaaacgtcaacgcaatcagtcaccatatattgtaaatggttttagaagatatgataaagtaatgtacaacggtaagggatgttttataacaagtaagcgtagcagcggttattttcagttaaaaacatttgatggaactgtaattagccaaggagtaagtagtaagcggttgaaattattagaacctattaaaggttggttaatagattggaggttggcaattcctccccgacctaaagaggtcggggtatccttgccataa

SEQ ID NO: 1520 - DNA, 272 bp, uncultured Methanobrevibacter sp.
  source 1..272: mol_type = other DNA
gttgattaaactaccacggcttgtagaagccgtggatttctagagtcttttctaggaatccactagtttaatagactcagaccattaattggtctacgttactcaagaatattaggtaccgtggaatgtttaatcccagttccacgctctacggtaagtgattaaacaggttctgagatggtaggaacagtgttgcttacaattttaaaccttgggataacattgtcgagggataaaataactcaggaataggaggtaaacgtttaatgttc

SEQ ID NO: 1521 - DNA, 1026 bp, unidentified
  misc_feature 1..1026: note = Ga0401685_0570 JGI
  source 1..1026: mol_type = other DNA
ttgaaagttccagttttagaccgcaataaaaagccgttaatgccttgctcacctaaaagagcgagaaaattgatggaaagaggtgaagccaaaccttactggtctcgcggagttttctgcattattttgcaaaaagagccgagcggtcgagccaagcaaaaaatcgtagtaggcgtggatagcggttccaaaatggaaggctataccgttaagtccaagaaggacacgtttttgaacatccaatcagaagcggtcacttgggtaaagcgaaaggttaaaactaggcgagaagctaggcgaactcggagaactcgaaacaatccatatcgggctaataaatccaaccgggcttgcctgagaaaaaaccgaataccgccggcaacaaaggctcgttggggtttgaaactgcgagtgttaaattggctaagcaaactttatccgatttcgcacgtcgttgttgaggatgtgaaagcggtaacaaagtctggcaaacgtgcgtggaataaaagttttagtccgctacaagcaggcaaggcttggttttaccaacaaataaaaaatacgaaactcaaatcaaaactcaagctgaaactcgttagcggattttacacgtcgaagttgagaactcggtacggtctgcacaaaagcaaaagcaaaatggatgtgaactttaatacgcattgcgtagactcttgggttatggcagacaattgctttaaaggcagacgggttgttgacaatagcagagttctgtttattcagccgttaaactttgctcgcagacaactgcataagttcaatgctaaaaagggtgtgcgggctaattacggaggaacgcgaagtttggggctgaaccgaggagcgttagtcaaacatgtaaaacacggcttatgtttagttggcggaacctcaaaggggaaaatttcgctacacgcagccgacacttacgaaagattgtaccgaaatgcaaatacggctgactgcgaactgcgaacaaactttcgctgggcggtccagtgggcttga

SEQ ID NO: 1522 - DNA, 224 bp, unidentified
  misc_feature 1..224: note = Ga0401685_0570 JGI
  source 1..224: mol_type = other DNA
gccaatgggcttgtgaaagaagaaaccaacttctgaagcaattaaaaagtacgactaccctacggcactcgcagaaatgcgagaggccaaacttagcagcagcggcgtggtagccgcaagagtacggtaaaaatgttctgctagtttttaccctctacggctgaaagtggggaagcagtattaaaacttggcgggtaaccgctaaaacaaaagggagaagtgag

SEQ ID NO: 1523 - DNA, 495 bp, unidentified
  misc_feature 1..495: note = Ga0400245_005261 JGI
  source 1..495: mol_type = other DNA
atgtcggtcttcgtgttggatagacgcaagcacccccttatgccgtgcaccgaaaggcgtgcgcggcttttgctcggccgtggtcgggctgtggtggtgcgtgcgtatccgtttacgatccggctgaaagactgtgccggtggcatcacacagccggtccgtatcaagatcgattccggcagcaaaaccaccgggatcgcgatggttcgagaaaacggccagaagcaacacgttctggccttggcgatcaaagccaccgggcgcggccgctataagcgcacacgcttaacaaagcacggtttccctcgtagctatctgatgcgccagaagaaagttcaagggtttcagaccggtgacatggtgcgagccagatgccgacaggcacgaaagccgacatctggccgggccgggtcgccgttcgcaagaccggcagcttcaacatccagacaccgggcggcgccatacaaggcatcttatatcggtatttcacattaa

SEQ ID NO: 1524 - DNA, 295 bp, unidentified
  misc_feature 1..295: note = Ga0400245_005261 JGI
  source 1..295: mol_type = other DNA
gtcaactaccccgccctgaaggacggggcttgtagaaaacaccctgcaagccaggttgaccagggaaagcggacaccaacccgcaccgtttatcacaggtcgctaagactcaacgccgaacgcttcctcagttcggcgctctgaaaggctgggatcacgctggcgaaaggcaaagcaccgaaggttccggtcaccacgcaagtaggagccggtgatagacattcccgagggaagagaggcttcggcctccgtcacaaggcccgtaagggcattcattgaaaggaaaacgatgtcg

SEQ ID NO: 1525 - DNA, 411 bp, unidentified
  misc_feature 1..411: note = Ga0394872_0000490 JGI
  source 1..411: mol_type = other DNA
atgttaagagtacccgtattagacaaaaacaaccgacctttaatgccgactcttgccagtcgcgctagacgttggctcaaagaaggcaaagccatcggcaagttcaacaaattaggacaattttatgttcaactccaagaacatcctagtaacaacaaaactcaaccaatcgctattggtattgatcccggtaaactgttctcagggattggggttcaatcagctcttcataccttagcaggtattacttacacaggctggtgttctggagatactgcattccaagtatctgtttccgattttaattggaaacggctgggacaatttactgcctcaaaagtggagttgctccaacgctccacaggactaatttgtaaacaggaaacagtattcgttggagcaactggttaa

SEQ ID NO: 1526 - DNA, 219 bp, unidentified
  misc_feature 1..219: note = Ga0394872_0000490 JGI
  source 1..219: mol_type = other DNA
aacgttaattgaaagccattgaaattcatttcaaggcggtttatctggttggtgcaagatctcagtattagcctaatcttggaacaaacctccagatacttctctagtctggaatcactttaagttcttttgggagaacgttgtcagacaagacatcttagattaggtgggcgaagagactaaaactatttactcgataggattatatctatgttaaga

SEQ ID NO: 1527 - DNA, 1233 bp, unidentified
  source 1..1233: mol_type = other DNA; note = Human gut metagenome
ttgagagtatttgttttgaacaaacgcggaaagccgctgatgccttgttctccggcaaaagcgcgccttctgcttaaagagaagaaagctattgtggtaaggcgcacgcctttcaccattcagctcacgattgcgaccggcgagtccaaacagccggtgagtctgggtgttgatgccgggtacaaacatgtcggactttccgcatcaactgaaaaggctgaactttatgcatccgaagtcgaactgcggaaggacatcaccgatctgctctctgctcgtcgtgcgttacggcaatcccgccgtaaccgcaaaacgcgctaccgcgcaccgaggttcgacaaccgcatccgcaccaagcgcaaaggctggcttgcaccgtcggttgaaaaccgaatcaacgcgcatttgtcgcgcatagaagcggttctccgactgctgccgatcacgaagattaccgtggaaacggcgtccttcgacatgcagcggctgaagaatcccgacatttcaggaaaagagtaccaagaaggtgaacagctcggcttttggaacgtccgcgagtatgttctttttagagatgggcacgtctgtcggcattgtcacggcagatcgaaagacccggtgcttaatgttcatcacttggagagcagacgtaccggcagcgattcgcccgacaacctgattacgctttgtgagacgtgccataaggcgcttcaccgcggcgaaatcacgctgaaggccaagcgaggacaatcgttccgggcgcaagctttcatgggaattatgcgccgggaggttttgaaccgcctaaaggcgtcgtatcctgagctgaaggtgcacgaaacctacggctacttaaccaagcacgcgcggattgcgaacggcattgtcaagtcacatggtgcagatgctttctgtattgccggcaaccttggagccgaaagctcggcgaattcttcttccagaagcagactcgccgaaacaaccggcagattcacaaactttccatcctcaaagggggcattcgaaagcgcaatcaggcaccctttgaggccaaaggcttccgtctttttgataaggttgcctgccagggagaagaaggcttcattttcggccgtcgatcatccgggtcttttgatgtacgaaagctcgacggcacccgcatttcagccggcatcagctgcaagaagctgcgtctgctggaaaagagacgaacctatttaacagaaattcgaa

SEQ ID NO: 1528 - DNA, 247 bp, unidentified
  source 1..247: mol_type = other DNA; note = Human gut metagenome
gtcaactacctcggcctaaaggccggggcttgaaatagcctctagttgactagcctcaggccgtcatttggcggactacgttggttgagaatatataggcaccgcgggatgtagatactagtcccgcgctctgcggccgatggttaaaagctctgagaggtaggagcggtgctgtcggcttgaaaccccctccaacattggcgaaggatcacaaccggtcgaaagaccgaggagacaaaacttgaga

SEQ ID NO: 1529 - DNA, 1338 bp, unidentified
  misc_feature 1..1338: note = LHMISPF_alex1_c86 JGI
  source 1..1338: mol_type = other DNA
atgagcaaaatattcgttgtagacaccaacaaaaatcctctaaatcctatccatccaggccgagccaggatgctgcttcaagagggcaaagccgctgtctggaaacgttacccgttcaccatcatcctgaaagatgttctaccaaatccccaaattgcacccttgcgattaaaaatagatccaggcgctaaatttactggcttagcactggtagatgatgcaacaggagaagtagcttgggccgccgaactagaacatagaggctttcaaattcgcgatgctttaaccaaacgccgccagttaagaagaggaagacgccatcgaaaaactcggtatcgtcaaccacgctttgataaccggaaacgccctacagggtggctcccacccagtctgcaaagccgagttgagaatatcgtaacttgggttcgtaggttacaaaagctagctttgatttctgatatttctcaggaattagtcaagtttgatactcaactcatggagaatccagacatcagtggattcgcataccaacaaggtgagttagctggttacgaagtgcgagaatttctgcttttcaaattcaatcatacctgtatgtactgtggggctaaagatactcgtttggagattgagcatcttttacccaagtctaaaggtggttcaaatagaattagtaatttaggcattgcttgtaggaattgcaaccaaaaaaaaggccgtcaagctctcagagaatttttagcccaaaaacctgacttgttacagcgcattctgagacaagtaaaacaacagaaagccgacactgctgccgttaattctacccgttgggcattatttaatcgactcaaagagactggattatccgtggaagttgggactggtgggcggacaaagtttaaccgatgtcgtcaaaacctacctaaaactcactggctggatgctgcctgtgttggggcatctacacccctcaaactaaaagtttcaggggtagtgccgctgtcaataagggctgttggttatggaaatcgtcaaatgtgtcaagttgacaaatttggctttcctaagcgtggtaaggaaggtaagctaatcaaacgtgagcgacagaaaaattactttggttttcaaacgggcgacatggttaaagctattgttcctactgggaaacacgctggtactcacgttggtaaagtcaccgtcagaaaatccggtgcatttgatttgactgtggctcatgtgcgcttgcagagtattcgttggaagcactgccgcgcggttcaccgctttgatggttacagttatgcctctttgtccaccaatgtcgagtttttaaacgattag

SEQ ID NO: 1530 - DNA, 249 bp, unidentified
  misc_feature 1..249: note = LHMISPF_alex1_c86 JGI
  source 1..249: mol_type = other DNA
gctatccgcgaaccactggacaaacctggacaatcccgataaatccttggtagagatagcccggttaagtctaaccacagactacgttaagaaggtcacgacaccctgtgagtgcttgccagctccttgctctgtcgctaccagttaaacatctttatttcgctaaggaagtgctgctagcatgacaagccctcttaacattaccaaggcaaaagtcacccgattattcggaggctcaatatgagcaaa

SEQ ID NO: 1531 - DNA, 1350 bp, unidentified
  misc_feature 1..1350: note = Ga0172362_10014068 | JGI
  source 1..1350: mol_type = other DNA
atgcagaagttagaaaaaagagatacatacacacctacgaatacttctctagttcgtagcaactgtgattctgtgattaaacatggtcaattcgaccaagtgttgcagaatttaaaaactttttctaacaactccgaagagaaccaacagtctggcaagactgaacaggacttgcgagttcctgttttaaacatgcgtggacatcctttgatgcctacaaatccaagaaaagcaagaaagttgttagaacaaaacaaagctaaagtagtaacaataaaaccatttacgatacaactaaattatgctacaggagaaacaaaacagaatattatattaggcattgatgcaggatacaaaaaagttggtttttctgcaagaaccagcaaaaaggaacttatatctggagaagttgaattgagaacagatatacctaaaaaactacaagaaagggcaatgtatcgcagaaaccgaaaaaatcgtctttggtataggcaactacgatttaacaatcgtggacgaaacaacggatggcttgcaccaagtatacaacataagcttgatagtcatcttagaattgttgaaaaaattaaacaacttcttcctatcacacagattgtagtggaagttgcaagttttgatatacagaaaatcaaaaacccagaaacgcaaggtgagcaatatcaacagggtgaacaacttggtttctggaatgttcgtgaatatgttcttcatcgggataaccatttgtgtcagcattgtcatggtaaaaagaatgaccccttgttgcatgtgcatcatatcaacggtaaaaaagaaggtgctacagaccgtccagaagaacttttaacagtatgcaagacctgtcatgatgagcatcataaaggcattgatattatccctaaaaagataatcaagaatttcaagcctgaaacttttatgacaaccgttagatggaaaatagtcaacgctctaggttgtgagcatacttatgggcatatcacaaaaaacaacagaattaaagcaggtttgcctaaatcacatatcaatgatgcttttgttattgctggtgggactgaccagcaacgttgtaaaccgattgtttcaaaacagataaggcgtaacaatcgttcaatacagattaatcgtaagggattcaagccatctattcgcagacagaaatacaaacttcaaccaaacgatatagtcaaatatttggggaaggaatgcaaggtaaaagccatattcaacaaaggtaattggattaggattgttgatggtattgaaactattattaattcgaacattaaaaatgtagagttgttatattatggaaaaggaatatttaattag

SEQ ID NO: 1532 - DNA, 256 bp, unidentified
  misc_feature 1..256: note = Ga0172362_10014068 | JGI
  source 1..256: mol_type = other DNA
gtcaactaccacccactgaagtaggtggcttgtcccgtaagggatgacgtaagagttgattaggaggcatagaaaaatatgcagaagttagaaaaaagagatacatacacacctacgaatacttctctagttcgtagcaactgtgattctgtgattaaacatggtcaattcgaccaagtgttgcagaatttaaaaactttttctaacaactccgaagagaaccaacagtctggcaagactgaacaggacttgcgag

SEQ ID NO: 1533 - DNA, 828 bp, unidentified
  misc_feature 1..828: note = Ga0134404_104661 JGI
  variation 385..394: note = n represents any nucleotide
  source 1..828: mol_type = other DNA
atgagcacttgcgcttgtgttctcagtaagaatggcgaacgcctgatgccgactatccgtcttggcaaggtacgccatcttctgaaagacggaaaagcaaaaatcattaagcatcatccatttactattcagttactgtatgacagcgaaacgaatattcaacccattgaaatctgtgaggacgtcggttacaactacatcggcatcagtgtgaaaagccaatctcacgagtatgtatctgcacagtatgatacattgcaagacgagaaaagctgtcacgatgcttgccgtagaatgcgccgaactcgcagaaacaggctacgttaccgccaaaagcgctttgacaaccgcaaacgtgacaaaggctggcttgcaccctctcttnnnnnnnnnngcgaagttgtgcctattacgcatgcaaccgttgaagttggttctttcgacacaatgcttgtaaaagcaatcgaggaaggtaaagctacaccagaaggcgcagattatcaaaaaggccctcgctacaatttagcaaccttgcgggaagcagtattctaccgtgataactacacctgccaagtttgtgggcgcgaagccagtgaaggtgcaattttgcacgtgcatcacatgttttattggaaaggtcgccatgacaatagtctcagcgagcttataacagtatgcgagaagtgccatacaccagctaaccatcaaaaaggcggcaagctctatggattcggtgaagatataaagtttgccaacctttctggtgcagcatttatgaacactgtacgctggcaaatcgttaatgaactttacgctgcttttggaaag

SEQ ID NO: 1534 - DNA, 326 bp, unidentified
  misc_feature 1..326: note = Ga0134404_104661 JGI
  source 1..326: mol_type = other DNA
gtcaacaaccccgccttaaccagtccgctggttatagatggggcttgcagggcaacccgtaagcccggttgattagcctaagtctgctgctccagcggcaggaaactacgttgtgtactaataatataggcaccttactcatgctccacaagtggtaagcactgcggacggctcgttaaacatctctaagggtaggagaagtgcgaacgtcatgtcgaaaggctaaaacggtataacaacattggcgatgtggaccacagggcgcaagccctgacttatcgatttacaactattatacgaaaggagtaccttgcatgagcacttgc

SEQ ID NO: 1535 - DNA, 669 bp, unidentified
  misc_feature 1..669: note = Ga0123338_10030355 JGI
  source 1..669: mol_type = other DNA
gtgatcctcaaaggacaaatcgaacatagaaacgatgttaaaaaactgatgacgctaaggcgtggcaataggtcttataaaaggtatcacaaaaggtatagaatttgcaggtttgacaatcgcgcatcgtctaaaagaaaaggaaggattgccccaagcattaaacagaaaaaagattcggttcttagggcaatcaatcagttgagtaaacggattagaattaaagaattttggttagaagatgtcatgatagatattcgtgcatcaacagacggatatgaatcgtattcgtggcaatatcaaaaatccaacagacttgatgagaacttacgaaaagcggttatccttagggataaactcaagtgcgcagagtgcggaaagacaaacaccgttttagaggttcatcatataaaggctaaaagatgtaatggctcaaacaccttgggcaatttaatcgcattatgttctagttgtcatcaagaaacagcaggcagagaaaaagagtttgaggaaaaatactttaagctgatcaatggcaaaaatgtaaggcttgacgatgcacaacatgttatgcaggggaaaagctatctcagacatcaattatcaatgctggggcaattaagcattacaaatggtggcgatactgcaaacaagcgaatagattggagt

SEQ ID NO: 1536 - DNA, 499 bp, unidentified
  misc_feature 1..499: note = Ga0123338_10030355 JGI
  source 1..499: mol_type = other DNA
tagaaaaatatgtacaatagtggacacataggcctattgcacgtagactgttgagcaggtctcaagtcttagtgactgctacagtcgaaagatgtgttgcagatatgaactacgttggatagtaaggtaaagacacacctttggatgtaatcgtcagtctaaagctctgtgagtgccaaccaagaaactgcgctaatgccatgcgtagataacagggaaacacaagtcctctatctgacattgacaagacgaaaaatactccgaaaagatggcttatcagaaatgatactagagaaagaatattcattcgtcatagtcagcgaagggaaaaagttaactcctaccccaataaacaacgcatggtttttgatcagaaaaggcaaggctaaattagtgagcaaatatccaatggcaattcagttgttaagatccattgaaaaagaggatgttgacaagtcagctattttgtgtggaattgacgatgggtctaaacacgttg

SEQ ID NO: 1537 - DNA, 567 bp, unidentified
  misc_feature 1..567: note = GENOME_ACESSION: mgm4743570.3 MG-RAST
  source 1..567: mol_type = other DNA
atgacacgaagagcaaaatatcgcaggaacagaagaaatcgtaaaactcgctacagaaaggaaagatggttaaatcgtgccaactctattaaaaatggcaggtttagtcctacgatgcggagtaaacttcacagccatataaaagaaatagagtatattaaatctattcttccaattacagaaatggtatttgaggcaggtcagtttgacactcaccttatgaaaaatccaagccttgctaatctcaaagttaaacattggggctatcaaaaaggtgctaattacggatttgagaatactaaggcaatagttcttaatcgagataactatacttgtcaatactgtaaaggcaaacataaagacagtaagttagaagtacatcatattgtatttcgcagtcagggcggttctgatgaagaaggcaatctaattactttatgtcatacttgccataaaaacttgcatagtggaaaaattaacctcaaattgagtggcaaaattaagggaacccttaaatatgctacgcagatgaactctattcgtaagcaactttttagactatatcca

SEQ ID NO: 1538 - DNA, 312 bp, unidentified
  misc_feature 1..312: note = GENOME_ACESSION: mgm4743570.3 MG-RAST
  source 1..312: mol_type = other DNA
gtgaactacccaccacctaaaggcagtgggcttctgttaaatggttcaccagactaagttgttagaaatagcaactacgatatttaggtcaagatacccttggttgacgcaacagaccatcgctctatcgtacatatttaagttaggtcagagtaagaacagccttgtgatatgtgcttaaaaagcctttatatcattgtcgagttgaagtcggaacaactgcatggtaacagtgtagcaaagtacgcacaaccattgcataagtaatggcattatgtgattaagttcacaggaaaggagcacctgttatgg

SEQ ID NO: 1539 - DNA, 1065 bp, unidentified
  misc_feature 1..1065: note = Ga0114919_10008950 JGI
  source 1..1065: mol_type = other DNA
atgcaaatgcaacaacagaagttattgagaagaaatacatacacaccattgaatgcttcacaagttcaatgcaactgtgatttggcattaaacaaagaggaaactcttagtgtgtcaaatttaaaaactctcaataacaatcccgaagtgaatctaccgcagaatacagcgggtcttaaagacatttatgtattcattaaatcaattgacggtaaagctttaatgccgtgtaaaccagcgaaagccaaacatttattaaaagaaggaaatgctaaagtaattaaacgtgccccatttaccattcaattaacgtttgaatgtaaaaataaaatacaagacattacgttaggaattgattccggatatcaaaatattggattttcagcagtttcgaatttgaaagaattaatatctggaacagttaaacttgataacaaaacaaaagaaagactcgacacaaaaagaatgtatagaagaaataaaagaaataagttgtggtatagacaatccagatttttgaatcgttttatacctgaaggatggttaccaccatctatagagcgtagatataaaactcatttaaatttaattgaacgtttaaaaaacattttacctattaataaagtaataattgaagtaggtaagttcgatattcaaaaacttgagaatccagatattaaaggcgttagttatcaacaaggagaaatgtaccaatatcgaaatagaattggatatttactttcaagagaacatggagtatgtcaatattgtaaaaaacaaggtgggggaaactggcgattacatcatattttgggcaaagaaaaagatagacctaaggattgggctttattacatgaaaaatgtcatcaactcttacatattaaaaaacaagaaaacattttaagaaaacaaaaatctaaaagttataaagactcaacatttatgaacataatacgtaaaaaattcaaacaagatataaagtgtgaattaacttatggttattatacttttcaaaatagatgtaatttaaatttagacaaaagtcatgttaatgatgcatttgtt

SEQ ID NO: 1540 - DNA, 264 bp, unidentified
  misc_feature 1..264: note = Ga0114919_10008950 JGI
  source 1..264: mol_type = other DNA
gtcaactaccactgagctaaagactcagtggcttgcaatgtgaattgcaacgcaagagttgattagggagttgaaaaatgcaaatgcaacaacagaagttattgagaagaaatacatacacaccattgaatgcttcacaagttcaatgcaactgtgatttggcattaaacaaagaggaaactcttagtgtgtcaaatttaaaaactctcaataacaatcccgaagtgaatctaccgcagaatacagcgggtcttaaagacattt

SEQ ID NO: 1541 - DNA, 1287 bp, unidentified
  source 1..1287: mol_type = other DNA; note = Bioreactor metagenome
atgcaaagagttttagttttaagccaagataaaaagccattaatgccttgcttacctgcccgagctagaaaacttttaaataaatgcaaggcaaaagtatatcgttattatccattttgtattatattgcaacatcgtatagatggcgatatacaaccaatatcattgaaattcgatccgggtagtaagacaacaggagttgccctcgttggcttattcccaaaagggaatatctgtttatggggagctaatctaacacatcgtggctacgcaatcacaaaatctttgttatccagaaaagcaattcgtcgtggccgcagaaatcgaaacactagatatcgcccgccacgttttttgaatcgaaatattcctaaaggttggcttccgccatcgttacgttctcgaatttttaatatttatacgtggtgcaaaaagctcaagcaatttgcaccaatccaacaaatcgaaatagagagcgtcaaatttgatacccaaaaactgcagaatgctgaaatatctggtatagagtaccaacaaggtactctgcaaggatacgaaattcgcgagtatttgctagaaaaattcgggcatcagtgtgtatattgtggcaagtctgatgtaccattagaaatagaacatgtagtatgtcgtcataatggtggcagtgatcggattagcaacttagttatatcatgccgtatgtgtaacgaaaagaaaggtactcaagacatcagaatatttttaaaaaccaagcccgctctattgcaaaagatacaaagccaattacaagtcgcactcaaagacacagccgcagtaaatgccactcgatatgcaattttagacgcactgcaacaatttcaactaccaattcaatatggcactggtggccaaactaaatataatcgcacgacacaaggctatgcgaaagatcattggattgacgcggcgtgtgttggcgtaagtggttttaaagtaaaaattccccctaaaatgcacatattaaatatcaaggcagtaggacgcggtactcgccagatgtgtttaacagataagtacggtttcccgcgaacaggcccgaagcaaaagaaacggatatacggctttcaaactggggatatagtatatgctaaagtaccaaagggcaaaaaagccggggaatatataggccgagttgctattcgtagcaaagggtattttgatattcggacacacactgctctcataagtagcatttcatatcgttattttattctcctccaacgaagcgatgggtatcaatatgattag

SEQ ID NO: 1542 - DNA, 331 bp, unidentified
  source 1..331: mol_type = other DNA; note = Bioreactor metagenome
ctctacaagcccacctcaaaaaggcgaagtttgttagagaaatctggcgaatttcacgttgaccacgcctaagcctcaggtaacgaaagaggctacgttacgcacgaatccaagtaattggtgtaataggcacgtcaggatgcttcacttggtacgctaagtgctttactccagtcctgacctctgcggcaatccattaaacaggtgtaagtggtttaggccagtgtggattgcaaaaaccgtgtttcaagtaacattggcaaggagagcttaacctgcgcaagcagagttggtacgtaagtaccttcctgaaagggattttatgcaaaga

SEQ ID NO: 1543 - DNA, 897 bp, unidentified
  misc_feature 1..897: note = Ga0070707_100019090 JGI
  source 1..897: mol_type = other DNA
atgatgtttgtctatgttcgcaatcaggacagcacaccgatgatgccttgcacgccagcgaaagcccgcaagctcttgcaggcaggcaaggcgaaggtgatgaatcgctgtcccttcacgattcaactcacctggctgtgtgagggacacgttcaagagatcacactcggcatcgataagggcagttctatcacaggactttgctgtgttggcaataggaacgtcctgttctcagcagagatccaccatcgccgagatgtcaaagacaaaatggatgaccgccgtgatcggcgcaagagtcgtcgagggcgcaagtggtaccgccctgcgcgattcaagaatcgcgcatcaagcaggcggagtgggcgattgcctccctcgatcaaaacgaatgtcgaggaggtcattcgggtagtgaagcagatcccgttgccgatttcttcgctggtcatcgaggacgttcaggtagaccttgctcgcttgaatgaccccacgcttcaaggcagtcgataccaagatcccacgcgactcgatgagaatctgcgcatggcctgtttgatgcgcgacggctacgcctgccagtactgcggcaagcaaaaggttcggttagaagctcatcatctggtgtacagggaacaaggcggaaaagatacgctgacgaacttgctcaccctgtgccaagcatgtcataaaaaggttcaccaggggaaaatccggcttgagggagtgggagtcagtggacacctggaccagattgcgcagcgcacgatgcagggcaaaagctacttgtatgcgacgctgggcgcacatacccccttgagcacgctctttggataccagacggccaccctgcgccaaaccagagggtggccgaaaacgcacctcgccgatgccctc

SEQ ID NO: 1544 - DNA, 239 bp, unidentified
  misc_feature 1..239: note = Ga0070707_100019090 JGI
  source 1..239: mol_type = other DNA
gaaaatagttcctaaaaaggagagcgtttgagagcgctggactcatggagctaccagcgggccagcaatggcagcagttccttgagagatcacaccttccgatgttcgctccagtcggaagctctgtgggcagatattaagggtaagcgaaagccgaaggtgtatctgctgggaaaacctcctggaacagtcgcgaggagcaatttactccgcagggagggcctaaagccatgatgttt

SEQ ID NO: 1545 - DNA, 1248 bp, unidentified
  misc_feature 1..1248: note = Ga0187899_10002485 JGI
  source 1..1248: mol_type = other DNA
atgacgacctttgtcatctcggcagagggcgaaaagctgatgccgacgacaaacatcaggaagataagaaagctcctccgctccggaagagcaaagatcgtgaagaacgcgccgttcaccgtacagcttctgtacgagagcggaaacgctgtgcagcctatcgaatttacagaggataccggctatcagtatatcggagcctctctcaagtcggagaaacacgaatacgtaagcgccgagtatacgcttcttaaaaacgagaagcagcatcacgatgaccagcgccgcgaggtgagacgtcctcggcgaaacagaaagcgctatcgcaaggcgcgctttgataacaggagaagacctgaaagctggctcgcgccgtcgctcagaaacaaggcggaccgccacgttgacatcttcaggatgtattatgcggtatgcccaataatgagcgtctcgctggagatgggccagttcgatccggcggtccttgacgctatcgagcaggggaagcctgtacctgagggagctgattaccagtatggccctcgctacggctatgacacactgagagaagcagtcttcacaagagacggctacagatgcctttgctgcggtaagtcggctatagacgacggagtcatacttcgcatacatcacgtaggcttccgcacgggcgacagatccaacaggcttagcaatctcgcatcagtatgcgagaagtgccacagtccgaagaaccataagccgggcggaaagctctgggatctgaagccgcctaaaggtacggcatccgcagcgtatatgaacaccgtaaagtggcatattctcgaagagataaaggccttcggtatagagacccatatcacctacggtgccgtgacgaagcgcacgagacttgatctcaatatcggaaagtctcacgcaaacgatgcctattgtatcggcaatatgagaccgaaacaccgcacaaggacgcagtgcgttgagaagcgccgccgcaacaaccgcatacttgagaagttctacgatgcgaagtatgtggatgtacgtgacgacaaagcgaagaaggcggcggagctcggatgtaaccgcacgtcgagatccataccgcgaaacaaccctcagaacgagcgcaccttccgcgggaagaagatatccaaaggcaggcgcagtatccgcatgcagagatatttgtatcagccaggcgatattgtcatcttcggtggagagaagcgcatggtcaagggcact

SEQ ID NO: 1546 - DNA, 348 bp, unidentified
  misc_feature 1..348: note = Ga0187899_10002485 JGI
  source 1..348: mol_type = other DNA
atcaaccacccaccgcttaggctaacgccttgaagcgggggcttgtgaaaacacaagtcagttgattagcctaagtgcttcgagcactacgttatccgcgaatggctgcgaccaaataggtacgtcaggatactccacaagttctgacctctacggatatgcgttaaacatcggtgagggtagccgaagtgcgtatatcatcaaaccgcggaataacattggcgatgtggacaccgccctacggggcgaggatccgcatacacgcctctacggaaaaacggtatgcggaagccgtaaggcaaagtacgttagagcaaaagtaagaagagaaaggaggagcgtatgacg

SEQ ID NO: 1547 - DNA, 1038 bp, unidentified
  misc_feature 1..1038: note = Ga0394882_0012572 JGI
  source 1..1038: mol_type = other DNA
atgattaaaaaaccaaactatgtgttagttttagatgctaacaaaaacccattaattccgtgtaaaccatcgctagctaaaaaattattaaaagctcaaaaagctgccgtttaccgaagatttccttttacgcttattctgaaaaaagaatgtactgtaaatcagcaaaaactagaatctcgtcgtcagtatcgtcgcttaagacgaagtagattgaggtatagaaaaccaagatttgacaatcgccaaagagctaaagattggttagctcctagtttagagcatagggttttaactacgatgaccattgtgagacgactaattaaattcgctcatattagttcgatcgttatggagttggtaaagtttgatacccaaaagctagaaaaaccagaaattttaggaattgaatatcaacaaggagaattattaggctatgaaattagagaatatctattagaaaaatgggagagaaaatgtacttattgttctcaaaaggatattcctttgcaaatagagcatattgttccaaagtcgagaaacggttcaaacagacttagtaatttatgcctagcttgcgaaaaatgcaatcgaagaaaaggagttaaatcgatcgagcaatttttagccaaaaaccctagcttacttaagtctattttagttcaagctaaaaaaccattacacgatgctgctgcgattaatgccactagatggaaattgtttaatactctgaaagaaactggtttaacaattttaactggaacgggaggacaaactaaatttaatcgttctcagtttggtttagaaaaaaaccatttttatgatgctgcttgtgttggaaaaatggataaattagaaatttttgccaaccaacctttgattattatttgcaaaggacaagggggaagacagaaagcagcattaaataaatacggatatcccattagatacaacatctttggacaaaaagcaaaaagcattcacgtcaataaattaagacgagtccatcaaaaggatggatatagttatgcacaataa

SEQ ID NO: 1548 - DNA, 267 bp, unidentified
  misc_feature 1..267: note = Ga0394882_0012572 JGI
  source 1..267: mol_type = other DNA
ctaaaaaacctatacaaacctaattaaggttggtattttgttggaggttgcagactaagttatcacgtaaggtaactacgatagtcaagtcatgatacctacaaatgaacgccagtttgtagctctatcgctagaaattaaggaacgggtcaaaaggtttatatccaagcgtgtttctagcttaaaaagcttgcattatcattgtcgaggctaacttaacctattaactaggaactaatcaaaaccatgattaaaaaaccaaactat

SEQ ID NO: 1549 - DNA, 861 bp, unidentified
  source 1..861: mol_type = other DNA; note = Human gut metagenome
atgtatgtattcgtcatagggctggatggaacaaggcttatgccttgtaaaccaaggaaagcccggaaattaatagaagctcacaaagctgaaatctataagaagcagccatttacaataagattgttgtataagacaggctgtgctacacaacccgtaacaataggtatagatacaggttcccagcatatcggaattgcggtaacatcaggaaacaaagtcttgtaccaggcagagatagaattgcgcagcactatggacaagcgttcgctcatggaaactagacgcagttaccgcagaagcagaagataccgcaaaaccaggtacagaagtcctaaattcagatttcatacaaaacggacatactctgaaacacttgttaaacgtaagactacaggtgttatgacccactgggttaaacatactaactcaatgagtacaaacagaccggacggatggcttgcaccatccatgcagtcgaaagcagatcatcatatccgatggattaacagatttttagatgtacttccaccagatacgaaacttcggttggaaattgccagattcgatatagcaaggatgaaaaatccggaagtgcatagtgaattataccagtatggtccacagtatgattacgaaaatttaaaggcttatgtatttgacagagaccattacaaatgtgtggtctgtaagaggaaattggggagtaaacagccggatggacattctttaaaaggaatgatgcatcacataacattccggtctaaaggagctacggacaatcctgatcagcttgttacagtctgcgaatactgccatactcctcaggcgcataaaaaaggcggagtactctgggatctg

SEQ ID NO: 1550 - DNA, 224 bp, unidentified
  source 1..224: mol_type = other DNA; note = Human gut metagenome
ttaaataatcgagcatggttaaatgattgtcgcccgtaagggcaggatgactagcctaagttccaagagaactacatcagaagtacaatcccagttccagacagtaccctaatctgagcgctgggcgggcaacatatgaatccaggagaaagaatgatgtggcccggtgttacaagtactctgatattggcgaagggtaattgctgactttggccagcatagac

SEQ ID NO: 1551 - DNA, 1509 bp, unidentified
  source 1..1509: mol_type = other DNA; note = Human gut metagenome
gtggggacgacgacctggtgctccaagcgcaccggacacaggcgaggggcgaactaccccgtaaggggtcccggggcttttcagtccccgggaaaggaggaaataatgaaggtttttgtcattggcatgactgggaaaaggctctgcccaacttccccgtctaaagctaaaaaactgctgaaaacagggaaagcacatgtttacaggcgtgtgccgttcacgatccggcttgattataagaccggaggctccgcaccgccgctgaaactggggatcgatacaggggagcagcatatcggtacagcagtatgtaacgatgccacagtcttctgtaaatcagaaattgaacttataaaatccatggaaaagaagaaaaggctggaaaaacgcaaaatataccgcaggtcccgcaggtacaggaagacccggtacaggcatccgaaattccgtttccggacaaagcggatttatgtggaaggcgggtacaggaaacggaaaggcgggaagatggtgctccggcattggaagaaagtcccaaacacggtcatgacgaaccggcatgaaggatggctcccgccgtctatcgagtccaaggtaaagcaccatatcgactggatcaaccggtatatggatgtgctccctgacgggaccatgctcggcatagaagtagcccggttcgatattgccaggatgaaagacccgtctatccgcggagaactttaccagttcgggcggatgtatggccgggaaaatacgaaggcgtatgtactggcaaagtttgattatacctgcccgatctgtaaaaagaagtttgacagggacaggaagccgcgtatgcaccatgtcaccatgcggaagaacgcagccactgacaacccggatgagtatgcaccagtatgtgtgctctgccattccggggaggagcatctgccagggggtgtgctggataagctggcaaaggaatgcagacgcagggaataccgtgaacctacgttcatgaacatccttcgccgccggctgtttgagacttacccggaagcggaattcacatacgggaatatcacaaatgctgaccggaagatgctggggctggaaaaaacccacgcgaatgatgcggtctccattgccatgcatggggcgaaaaaagtaatagactgcgaagatacggtctattaccgccaggttcacaggaagaaacggtcccttcataaagcaaccccgcgcaaagggaagaaagagccgaaccataccgcaaagcggaacgtgaagaacgtcccttatgtaggcaagttccacatcaatgataaagtgaaaggtccagacggaaatatcggattcataaccggtttgacaggaagtgcggcctatatcacggatttcatcggggaatacatctatccggaagggaaggattacaaacaacatacgctttccagcctgcggtacgtccatcattgtgggaattggatcaccagctccgtatcaggtgcggctgtatctcacgactaa

SEQ ID NO: 1552 - DNA, 337 bp, unidentified
  source 1..337: mol_type = other DNA; note = Human gut metagenome
gtcaataactcatgactgaagtcacgagcttggaacagcttccaaggcttcctgttagccgtacatgaaacggcagttgactagccttgtccttttccctgcaccgcagggggaagggcagtcctgatgcgttaataccgccgcagacagaaaaagccctgcaaagggcggctcccatctgcagcgcggttcaggcaacggatggtcccttgagtggggacgacgacctggtgctccaagcgcaccggacacaggcgaggggcgaactaccccgtaaggggtcccggggcttttcagtccccgggaaaggaggaaataatgaaggtttttgtcattg

SEQ ID NO: 1553 - DNA, 1353 bp, Bacillus sp.
  source 1..1353: mol_type = other DNA; strain = FJAT-29814
atggtctttgtgttaaatgcgaataaacaaccgttaaacccttgccatcctgcaaaggcaagaaggttactcaagaaagggaaagccgtagttcataagaagtttccgtttactattcgattaaaggataggaaagatatttctttgaatcaacaaacctatcgaatcaaaatggatgttggttccaaaataacaggaatcagcatcatgaagaagaatgaagtggtgttcttagcggaactccaccacaaaacagacatcaaacaaaagttagaagcccgtcgttcttatagaaaatcaagacggaatcgtaagacccgttaccgtcaagctagatttttgaaccgtaaacggtccgaagggtggttgcccccttccctacagtcgagggtggacaatgtaatttcatggactaatcggttgaaaaaactaattcctttgacagatatcagcttagaattagtcaaatttgatactcaaaggatgatgaaccctgaaatcagcgggcttgagtatcaaaaagggaccttacaaggatacgaagtccgagaatatcttttagagaagttcggttggcaatgtgcttattgcggaaccaaagatgctccattggaaattgaacacgtttatccgaaatcaaggggaggttccgatcgagtcagcaacttgactcttgcctgtcgagagtttaacgaggaaaaagataccttaaccttggatgaatgggcaatccaattaatcaagaaaaaggataagcggagcaaacgaattttatccagttttgaccctatcaaaaaacagttacagaaacctttgaaagatactgcagttgtcaattcaacccgttggaaactttatcaaatgcttttgaccactgatttaaaggtggagtgtggaaccggggcaagaacaaaaatgcaacggatacaacatgaatttcctaaggaacattactacgatgcggtttgtatcggagagtctactccttccaccccaatacactttaaaactaactatgtgttacaaatcaaagccaaaggacgaggctcaaggtatcgatcgggaacagataaatacggttttcctatccgtcagttaccgagagtcaaaatgatccatggctttatgtcgggagatatggtcaaagcgattgtgcagagaggtaaatatctgggaacttggttcgggcaaattgctatgcgttccagtggttatgtggatatcaaagatatgaccggaaagcgaatagcacaagggattcaggtaaaatgctgtcagcttgtacagcgttttgatggatattgctattttataaacaaacgaaaggagtcggcaattccgcaccatgtgtga

SEQ ID NO: 1554 - DNA, 287 bp, Bacillus sp.
  source 1..287: mol_type = other DNA; strain = FJAT-29814
gtcaactacccacgccccaaaaaagcgggggcttgtgaaagtaagcccgcagttgtccagtttcagtttcttttaggaaactacgttggtttggtcatcatacccaaggatacttccctagtccttggctctatggaatctcattaaaagcaagcaagggtgttagcgagcggtgtgggattcacgacaagcctgtccaaccctaacgaagggaacagccttacggttgtgttacccgtgcaaacggagaaagattcacaatctttaaaaaggagccgagtcggatg

SEQ ID NO: 1555 - DNA, 1386 bp, unidentified
  misc_feature 1..1386: note = GENOME_ACESSION: mgm4773634.3 MG-RAST
  source 1..1386: mol_type = other DNA
atggttgctgtattatcaagtaccggtatccgtctgatgccgacatccaactacaaagcacggaagcttcttgcaagcggccgtgcagtcaaagagaaatacaacccaatcttcacgattcggcttttagatcggagtaacggagaaatacagccaattgaatacgattctgacacaggagctatccatgtagggatctcgatcaaatcacaaaatcacgaatatgtgagcgaacagagagatctcctctctgatgaaacagagcggcatgatatgcggagaaaataccgcagacagcgaaggagccggttgcggtaccggaagcccaggtttgataaccggagagcctccaaaaaagaaggttggctccctccaggcatccagaaccgtatggaccagcaagtccagatttttgagaaatacgctgaaacgttccctgttacacaggcaaccttcgagatgggatccttcgacacccagcttttacaggcggtcgaatccgagaaaccggagccgaaaaggacagattatcagcaaggcccaagataccggacagaaaccctgcgacaggcagtatttttacgtgacggatatcagtgctgcttctgcggacgtggtatcaaagaccacgcaaagctccatatccaccatctggggttccggaatggagatcatacgaaccggatgagcaatctggcaacagtttgcgaaaaatgccatacgccgaagaaccataaactgggtggcatcctttatgatgcgaaacccaagctgaaaccatttaagggggcggcgtttatgacagcggtacgatggaagatgtgggacatgctaagaacatccagaaccgacatagagttccatatcacttacggaaccaggacaaaactgacccgccagaagctgcatctggagaaatcccacgcaaacgatgcgtatgctatcgggaacttccatccgaagcaccggacacaaacggtttatctgcagaaacgccgcaggaataaccggtgtctggagaagttttacgatgcaaaatacatagacagccgtaccggcaaaaaggtcggtggacaggaactgttttccggaaggtcaaggcggaaccgggacctctccggagagaacctacatcgttaccggggaaggaagatctctgcagggaggcgggtaatccggaccagacattatctaatccagccaggaaccattctgaaatttgatagaaagcggtatctggtcaaaggggttcattgtaatggaacccgtgtaatcctggagaataagaaatcggtatcagttaaaaaagtaacaattattaaatacaacggtgggtggattcccgtcgagaaagggaaacgggagagtttatcagggggcgactga

SEQ ID NO: 1556 - DNA, 370 bp, unidentified
  misc_feature 1..370: note = GENOME_ACESSION: mgm4773634.3 MG-RAST
  source 1..370: mol_type = other DNA
gtcaactactcggtcattgaataaccgagcatgcaaaagcaagatcttgcgtgttcgattattcttggttgcctgtttcgacaggcggttgattagccttagctgtccggtacgggaaaccgacgaggcggctacgttgtccgggaagatacaggcacctggggattcttcccacgtccccagctctgcggccgtgtattaaacatccctgagagtaagggaagtgtgtacggtacttataaccccggccaacattggcgatgggaaccacccgaacccaggtgtttttgcctggaagtaggagatacccgttcagattcatcagtaacgggaaggcgtaagccatcaatggaaaggaggcaccggaatg

SEQ ID NO: 1557 - DNA, 1500 bp, unidentified
  source 1..1500: mol_type = other DNA; note = Human gut metagenome
atgacaggcagctataccaattttaccgtcttatttccttgtcgaatagttgacgtaccccaccgaatgacaggcagctataccaggctacgggaggaaaagaaaatggcagtatgtgttttaagtgcaaacggtgaacggctgatgccaaccgaaaattacggcaaagtgcgccatctgctgaaggagggccgcgctgtgattgcaaagcgaaacccgttcaccatccagctgacctacgagaccagtacctatactcagtccatcgaaatgtgcgtcggcaccggatatgagcatatcggcgtcagcattaagacaaaggcaaaagaggtcgtatcgcagcaatatgatttgctcacgaacgagcgctcccgccatgacgactgccgagtgcaccgccggacgcgcagaaaccacctgcggtatcgggctgcacggttcaataaccgtgtatccatcagaaagcccggttggattgctccgtccctggataataaggtggagcggcacctggatattatctcccgctatctgtctgtcatgcctgtcacggatgtctttatcaaggccgcaacatacgatacacagctccttgcggcgctggaggcaggggagcctgtcccgcagggcaaggactatcagcatgggccgcagtacggccacgatacgctgcgggaagcggtctttgaacgagaccactatacctgtgtgtattgcaagagaggcctgaaagacggcgctatccttcatgtccatcatgcctactactggaagggtctgcatgggaacagcatgagggaacttgcgacctgctgcgagaagtgcaacacacctgccaatcacaaggagggcggaaagctgtggggcttcgataagcctctgcggaaatataccggcgaagcgtttatgaatagcgtgcgctggattctctaccagcgtgcgatggctcacttccagggcgctgcggacatacacatgacctacggcgttatctccaagcgtgttcgcaccgacctcggcctcccgtattcctgcgctacggatgcctactgcatgggcgagctgcgtccagaagccagatgcgaaacagaggtcttccagaaatacaggcgaaacaacagagtcctatccaaattctatgacgccaaatactacgacacacgggaaaagggagttatccgctctggcaacgagctgtcctccggtaggacgaatcgcaatcataaccttgacggtgaaaatctgcgccggttccgtggctgcaagaagtcgaagggccggacctcgaccagaaagcagagatatgccttgcagccaggagatgtcgtggtctttggcaatcgcaaatacgtttccaagggctgctccagctatggcagggaattaaagctactcacggatggaaagccgcttgtggtcagcacgaagaaaatccagcttgtcagtcacaagggcggctgggtgcggcttccccaggcggcagccggggcaaaagaataa

SEQ ID NO: 1558 - DNA, 313 bp, unidentified
  source 1..313: mol_type = other DNA; note = Human gut metagenome
gtgcgtaccatcaaacccagtgtatctttggcgatgtggaccacagtaacgccgtgcaagcggtaagtgctgatttaccaaatttttggtttttcttgaagcctgtatcgaagactaccaacctacattgagttgatacccccgccaagtagctataccctatggcgaatacagcaatcaactctcgattgttgacgtaccccaccaaatgacaggcagctataccaattttaccgtcttatttccttgtcgaatagttgacgtaccccaccgaatgacaggcagctataccaggctacgggaggaaaagaaa

SEQ ID NO: 1559 - DNA, 1080 bp, unidentified
  misc_feature 1..1080: note = JGI1357J11328_10012623 JGI
  source 1..1080: mol_type = other DNA
atgttgaccagggtaagcaggattagggcaggcaacccgcttgagtcttgctccgttgcggatagtgccaaagaccgacggcagagtgcttctccagccctgccctctcgaactcacgccagcagacacgccgggtcaggcacgaaacggggcgcgagagacgaccggtccgcaacattcccgaggagagccttcgagacggatgccaatctcgacgcgtcacggcccaagggtacgaccgaaggccgtctcgtcgcgaggggtaacccccgcgttttcgttctcgaccggcatggacgcccactcatgtcgtgccgattctgccgggcaaaggaattgctcgataagggtcaggccgttgtctacagtatccgccctttcacgattcgtctcgttgaccgtgtgggtggcgcggtccaaccggtccgcgccaagatcgatcccggctcgaagatgaccggcatcgctgttgttcgcgatgttgagcacgttgatgcaacgacaggtgaagtcacccgcgaagccgtggtgctgcacctgcttgagttagagcatcgcggcgcgacgattcgaaggcgccttcagcagcgtcgcggattccgtcgccgtcgccggtcggcgaatctccgatctcgcgccccgcggttcgacaaccgaacaagacccgatggctggctcgccccgagcctacaacaccgggtcgtcacaacaatgacgtgggtctcgcgcctgagacgagcgtgtcccatttccgctctctcggttgagagggtacgcttcgacactcacgctctcctcaacccggaaatcgatggcgttcaataccagcgcgggacgttgttcggcacggaaattcgtgagtatctgctcgcgaagtggagccacgcctgcgcgtattgtgacaaggcaggcgtgcccctgaacacagatcacctcgttgctcaggcgcggggtggctcggatcgggtgagcaatctcgtgatgtcctgcatcgactgcaacacacgaaaggccgatcggctgatcgaggagtttctcgcgcatgaccctgagagactcgcgagcattctcgcgcaggca

SEQ ID NO: 1560 - DNA, 327 bp, unidentified; identical to SEQ ID NO: 389
  misc_feature 1..327: note = JGI1357J11328_10012623 JGI
  source 1..327: mol_type = other DNA

SEQ ID NO: 1561 - DNA, 1329 bp, unidentified
  misc_feature 1..1329: note = Ga0099364_10003009 JGI
  source 1..1329: mol_type = other DNA
atggtatatgtaataagcaaacagggaaggccgcttatgccaaccgaaaggcacggcaaggtaaaacatttgctccgccaaggcagggcgaaggtactgacgacaaaacccttcaccatacagctgctttacgactccgcagagcacgtacagccggtcacattaggcatagacacgggctacctaaatatgggcttcagcgccgtctccgggggtaaggagctcatatccggcgaagtcaggctgcttaaaggcatgtcggggcgcatctacgaacgctcaatgtaccgcaggccaagaaggaacaggctgcgccaccgcaggaacaaaggcaagcttcacacaaagccaaaagggtggcttgcgcccagcatcgaacacaaggtagacagccaagtaaggttcattacaaacaagctggctaaaatcttacccgaaccaaaagtcatagtggaaatagccaacttcgacatccagaggcttatgaacccggacatagaaggcaaggaataccagcagggtaagcagtacgggcacatcaatgtccggcactacgtattccaccgggataactacaagtgccaaaaccctaagtgtaaaaataaagacccgaagcccaccttgatagctcaccaccttcgctttaggaatgacggcggcaccggcaggccggacgaccaagtaacgctttgcagccagtgccacagctccgcaagccacaaaagctttttaaaggactggaagccaaagaacagggggtttaaggcggagactttcatgactgcaacctataggatgcttattgagcgcctgacggcattgggctttgacacggactacacctacggctacatcacaaaagccgacagggaagccctagggctggagaagacgcacgccaacgatgccttctgcatagcgggcgggacaaaccagacaaggatagagccattgacctatcagcagatgaggcgcaataaccgcaatcttgaaaggttttacgacgcaatctacatagacacccgcaccggcgagaaagcatccggctcagagctgtgcagcggcaggactacaaggaataaaaacaaaaacggcgaaaacctccgcgtttaccgcggcaagaagacccgcgagggccgacgcagcattaggaagaaacggcacccttaccagcctaatgacttggttaagcgcaatgggcaaatctatacagtcaaaggcagccacaatctaggcgcacgcgtcatgctaaaagaaaccggcaagtcagtgcaagcaaagctgctggagccatacagatacagtaaaggcttcgtttgcttggcataa

SEQ ID NO: 1562 - DNA, 298 bp, unidentified
  misc_feature 1..298: note = Ga0099364_10003009 JGI
  source 1..298: mol_type = other DNA
gtcaactacccaccgcttagcgtctagcgacgcttgaagcgggggcttgcaagaaacacggacttgcagcccggttgattagcctcagcctagcaataggctacgttatgcgggaatacatagttgcccccggacgctccacaaatccggaaggcaaggacaacggctaaacatccctgaggggtaggggaagtgccggctgacagaaaaccccgcataacattggcggtgtggaccaaccgcaaggccacggcctaagcggcattacgcgggcaaccgcatcatggagacccagatg

SEQ ID NO: 1563 - DNA, 1221 bp, unidentified
  misc_feature 1..1221: note = Ga0272440_1006716 JGI
  source 1..1221: mol_type = other DNA
gtgaaaaaagtttatgtagtaaataaagatgggaaaagtttaatgcctactaatcctgcaaaagctagaattttgcttaaagagggtaaagctaaagtggagaagagaaaaccctttactattaaacttacttatggaagttcaggttatgttcaacctataattgtaggtatagacaaaggtgcaaaatacacaggagtttgtgctatgtctgaaaatgaagttttattttcagctcaaattaaccacagaactgatgttaaagataagatggaaaatagaaaaaataatagaaggcagagaagaaacagactatggtatagagaagcaaggtttaataatcgttcatcttctaaaaagagtggtagaataccaccatctattaaaacaaatgtagaagaagtagtaagagttatgaataaaataagattacctatatctgaaatatatgtagaagatgtccaagtagatattagaggattaactgagggtaatacaccaaaagattatcaaaaaagtaacagattagatgagaatttaagaatggcttgtttgataagggatgattatacctgtcagtattgtggaaaatctaattgtaaattagaggctcatcacatagtatttaaaagtaatggaggatctgatacaattactaatttgatatctttatgttcagattgtcacaagaaagttcataaaggattaataaatattacttatggttttaaaaaaagttttcaattaaaaatgagtcaaaggtctatgcaaggtaaaacttacatgtatgaaaagcttaaaggattagcacctgtaaacttaatctttgggtatgaaaccgcaaagtttaggaaacggaataatttagaaaaagatcatgatattgatgctttttgtatagcttctttaagatctggttatacaataaattacaataaggataatttttacaacataaattttagacctaaacaaacaagaaggcagtattttgatcttccaagaaaaggtaagggtagaatcagatatcaagttaatcaagaaattgaaggtttaagaaaaggtgatattgttttggttaagggtaaatttgaaaaacaaataaattctatttatagtaatggtaatgttgcatttaaaaggactaagggagaaccttcagcagtaaagcctaataagtgtaagttattagaaaaaagtcgtacagttgtctacacttag

SEQ ID NO: 1564 - DNA, 272 bp, unidentified
  misc_feature 1..272: note = Ga0272440_1006716 JGI
  source 1..272: mol_type = other DNA
tattacagaaatagtctctaaaaatatagacaaataagactatattcatgaggctaacagagggcttagaaaataagcagaagttagattttgtatcacacctttaaatgttattccagtttaaagctctgtgttctaattttaagggtagcggaaacgtgagagtgaattagaagtgtaactttatctaacaacctcaaggagtaactaactaccttcgggtaagataaaagttttttattaacttttaataaagaggaaaagtgaaaaaa

SEQ ID NO: 1565 - DNA, 1233 bp, unidentified
  misc_feature 1..1233: note = Ga0209212_1034368 JGI
  source 1..1233: mol_type = other DNA
atgcaaagagccttggttttgagttccacgaagaagccgctcatgccctgtcatcctgcaagggcgagggagcttctgaagaaagggaaggcggcggtttaccgtaaatatcccttcaccatcatcctgaagtatcgggttgacggtgaagtacaaccagtggagctgaaggtagaccccggctccaaggtgtccggccttgccattgtctctaagttctccaagggggcagtagccatctggggaacgaacctgaaacacaggggtgatgccatcaggatggcgcttgcatcacgcaggagcttgaggaggggcaggagaaaccgcaagaccaggtatagggcaccaaggtttgacaatcggactcgtcctcaaggctggcttcctccttctctcatgtccagggtggataatgtggtggcctgggcacggaagctaataaggttcgtccccatttaccgcatagcagtggagaccgtgcggttcgacacgcagctcatgcagaatcccgagacttcaggagtcgagtatcaacgaggggaattgcagggctacgaagtcagggaatacctgcttgagaagtggggccgcaagtgcgcttattgtgattcggaggggattccccttgaagccgagcacatccatcccagatcaaaaggaggatccgacagggtaagcaatcttacgttggcttgcgaggaatgtaacaagaagaagggtaatcgggatatccgggagttcttggctgacgacaagcctcggctggaaagaatacaggctcatacaaaaactcccttgaaagacgccgcagccgtgaatgccgccagatacgtaatcgggagggaactcaagaagctcgggctcctggtctccttctggagcggcggacgcaccaaatacaacaggacgaaacagggctatttcaaagaccactggatagatgctgtctgtgtgggtgagtcgggagtcgatgtctgtatctacccggcccataagcccctcagtatctcatctatgggacgagggagcaggcaggtagtgcgaaccgaccgctatggattcccggcaagtaaggcagggagaataaaaagggtctttggtttccagaccggggatatcgtcaaactggttcaacccaacgggaagtatgccggggtacacaagggaaggctggcgggtatcagagtgaccggacaatttgatatcaaggcttcaattggaaaaataacagcg

SEQ ID NO: 1566 - DNA, 260 bp, unidentified
  misc_feature 1..260: note = Ga0209212_1034368 JGI
  source 1..260: mol_type = other DNA
acctgcgcacatccgtgtgcttgttcattcagcgttttgtcagactcaaccagacctcagcccttcggggctacgttaggggtgaatacatagtcactccgggatacttctccagtcccggactctgcggcaggaagttaaacaggacggaccgggtaaacggacagtgctccctgcataaaaccaccccataacattggcgaggagaccttaaccggcgcaagccgagtgagaagaaaggtagctttcaaatgcaaaga

SEQ ID NO: 1567 - DNA, 1326 bp, unidentified
  misc_feature 1..1326: note = Ga0123353_10014374 JGI
  source 1..1326: mol_type = other DNA
atggtctatgtcgtatcacacgaaggaaaccctttaatgccgacgtatcggcacaataaggtatctaagttgcttgatgagagaaaagctgttgtgataagcaacaacccgttcacaattcaactgctttatcaaacggaaaccgaagtaactcaaccaatcacattaggcatcgacgcaggctaccaaaaggtcggttacagcgcaataactgaccaagaggaactcatcggcggcgaactcgaactattacacggcatgaagaagcgtatagcggacgctgcaatgtatcgcggtcagagacgcggcaggctccgccaccgtgaaccgcgttttgataacagggcaagagacgagggctggctggcaccgagtatacagcataaacttgacagccatatacggctcatcgaaaaggtacttgggctaatgccagtgacaagtatcataatcgaagtggcaagctttgatacccagctattgaagaatcccggtattcgcggcaaggagtatcagcaaggcgaactaatggacttttggaacacccgtgaatatgtacttcacagggacaagcacaaatgtcagaaccccgattgtacgaacaaatcagagcagccaacacttgaaacacatcatatcatataccgcaggaacaatggctctgacgcgcattggaacctcgtaacgctctgtagtaagtgtcatacacctcaagcacatgatacatggctcaaggattggaagcctaaatacaaaggttttaaggctgaaacgttcatgtcaatggtacggtggaaactgatagaactgctctcggagtacaatgtgacacatacttacggttacgagacgaaggttaaacggttagcattaggtcttgataagacacatgccaacgacgcgtttgttatagccggtggaacgacacaggccagatgcaagcagattaattttgcacaaagaagacgcaataaccgctgcttggagaaatggtacgacgctaaatatacagataatcgtaccggtaaacctgaaaaggcggcaatcttgaataacggcagacgtacacgtaacaaaaacaaaaccaaacccgaggacaatctaaaggtgttccgtggtgagaagttaagcaaaggccgccgctcgataagaaaacagcgttatccgtatcagccgggtgataaagttctttttgagggtaagagatatacggttacaggtgctcactgtaagggaaaaagcgtaatacttaaagagaccggtaaatcggtagcaggaagcaaactaacacatctatcatacggcaaaggtatggtagctgtgtaa

SEQ ID NO: 1568 - DNA, 337 bp, unidentified
  misc_feature 1..337: note = Ga0123353_10014374 JGI
  source 1..337: mol_type = other DNA
gtcaactacccaagtctaaagagcttgggcttgtagtaaaacgcaatacgagcccggttgaatagcctaagaccttcgaggtctacgttacccaagaataattcaataggcaccatagggtacttcacaagctctatgcaactgcggtacatggttaaacatccctgtgggtaggggaagtgctgtgtacagtcacaacttaaggcagaacccgtaacgggcctatgctggtggcttgaaaccttgggatacccttggcaatgtgaaccgatacggtcagatagtaccagcttaccgctaaaactatcaaaaaaatgggaaggagtttatcgcaatg

SEQ ID NO: 1569 - DNA, 1338 bp, unidentified
  misc_feature 1..1338: note = Ga0209124_10001910 JGI
  source 1..1338: mol_type = other DNA
atgacgtatgtattggatcaaaacggcaaccccctcatgccaaccgagcgtggcgggaaagtccgaattctgttaaaaaccaaaaaagccaaagtggtgtgtcgtaacccgtttacgatccaactgctttatgatagtaaggcgtttacgcaacccgtaacgctgggtattgacagcggatatgccgaagtgggctattcggctgtcactgaaacaaaagaactcatgggtggcactttaaaactgctcacgggccagaaaaaccgtctcaaagaacgaaggatatatcgccgtacaaggcgtaaccgcttgaggtaccgccagtcacggttttcaaaccgtgcaagaaagaagggatggctggcaccctccattcaacacaagcttgacagccagttgcggtttattgagcgcatcaaaaagcttctgcccatcaccaaaacgatcattgaggtcgcctcctttgatacacagaaaatattaaaaccagatattgaaggccttgagtatcaggaaggcgcgcaaaaagacttctggaatgtaagagagtacgttctacatcgggataaccaccaatgccagaaccctgattgtaccaacaaagccagtcagccgatcctgcgtgtccatcacattgtatttagagacaacggtggcacagataaaccttctaacttgattaccctgtgtacccagtgtcatgtttctaaaaatcatcaggcgggacagttcctgcatgactggatgcaaaacggcaagaaagccccaagtctcaaaggggcgacctttatgaccatggtgcgctggcggttggtagacattctgaaagacgtaggcgccactgacatcgcctatggatatcagaccaagtctaatcgcataactttaggtttggagaaaagccatcacaacgatgccttctgcattgcacatggcgaagaacagaaacgattgtcagcgattgactatctgcaacggcgacgcaacaaccgctcccttgaaaagttttacgacgcatcctatctggacatacgggacgggatcaaaaaaagcggtaaagaactttcaagtggtcgcacaagtcgtaacctcactgagaacggcgaaaacctccgtccttaccgtggtgaaaaagtccgggtcggccgacgcagtatccgcaccaggcggtacccttttcgatcaggaaacatcgtttcttatgagggtatttgttataccagtggcggaagccacaacaagggcaacagtgtcaaactgttggaactgaaacgttcgatcacacccaggaagctaaaattaatacagtacaatgcaggcatcgcctgtgttgcttaa

SEQ ID NO: 1570 - DNA, 290 bp, unidentified
  misc_feature 1..290: note = Ga0209124_10001910 JGI
  source 1..290: mol_type = other DNA
gtcaattacccaccacttaaattctaatgaattttgaagtgggggcttgtataagctcagttgattagccttagtccttgaagaagggctccattagcttttaatgtataggtaccatgggatgccccacaagtctcatgctctacggtgcgtgattaaaccgtttcgatgggtcgaaaccgtgttgcgcatattaaacaaaagcataatattggcgatgtggacaaaccgccgttaacgcaacttttgccgagacggtgcggattaactttacaaaggagtttcaaatg

SEQ ID NO: 1571 - DNA, 1224 bp, unidentified
  misc_feature 1..1224: note = Ga0216255_10040300 JGI
  source 1..1224: mol_type = other DNA
atgccatgtggacctcaaaaagcaaggagattattaaaagaagaaaaagctgaagtatttttgttggtaccatttactattcgtttaaccattgtaactggagaaactgtacaatcctgtatagctgggattgatcctggatttagcaatgttggaatatctattgttattcttggaataaaagaagttttgagtatggaatttctattaaggacagatattgttaatctcaattccgaaagaagtcaatatcgcagagggaggcgttatagaaagacctggtatagagcatcaagatttttaaatagaaagaaaggtgatggctggcttgcaccatcgattcaacataagaaagacagtcatgttaaaataattgatttcataagcaagcttgtgccgattaaaaaaattattatagaagttgcagcttttgacattcaaaagattaaaaatccagcgattcaaggaaaacaatatcaagaaggagatcaaaaggatttttggaatattcgtgagtatgttctgcatagagattctcataaatgtcaacagtgtaagggtaagtcaaaagacaagatattgcaggtacaccatattgaatcacaaaaaacaggtggtgaccgtcctgacaatctcataactctatgtttagaatgccatgcaaagctgcatcaaaacaaaatacagttaaaagttaagaaaagaaaaggttttaaagccgaaaccttcatgtctacggttaggtggaaaatagttgaagatttaagaaagcttggatacgatgttgaacatacatatggctacattacaaaaaataatcgtatcaaaatagggttagaaaaaactcattgcaacgatgcatttgtaattgctggcggaacaacggaggcacagcctctcgcagaagaaagaagttgtatccaatacactgttaaacaggtacgcaggcaaaatagaaaattattcaaaggaataagaagccatttaagaaatactgcgtcaaggcatgttcatggctttcaacgttttgatcaagttatttttgaaaaagaaagatgttttgtttttggaagaagaagctctggctattttgatctcagaaaactcaatgggcaagttattcatcgttctgctaaagccaatagcctgaaactttttcaatcgtttaacactttactatgggagcaatcctcgaataaggcattcgcttcctcccctgattga

SEQ ID NO: 1572 - DNA, 297 bp, unidentified
  misc_feature 1..297: note = Ga0216255_10040300 JGI
  source 1..297: mol_type = other DNA
gtcaacaaccccccattgaaatgggaggcttgcaagagcctcatgttgactagggagcatatacaataggagatatgtttttatggctgtgcagaagttgtttaggtcaagacaccatggggtactcctctcgctccatgcaacacgggcaactgtttttttacagaagtccatggtactgtcgttagtggttaaaagctctgtgagggtaggagcggtgctgctagcagaacaagcctttacaacaatcccgaagaggccttcactccccacttttagggaggacagaacttgaga

SEQ ID NO: 1573 - DNA, 876 bp, unidentified
  source 1..876: mol_type = other DNA; note = Activated carbon metagenome
atggctgttttcgtgctggacaagcaaggcaagccgctgatgccctgtagcgagaaacgcgcgaggctgctcttgtcgcgcggccgcgcgcgcgtacatcgtgtggttccctttgtcattcgattggtggatcgcctccagtcggaaagtgcattgcagccggtggcaatcaagcttgatcccggcagcaaaacaacaggcgttgcagttgttcgcatcaaggaagaaacggacgaagacaacagcgagattcgcaacatcgcctgcgccatttcactgatggaattggtgcatcgcggcaagcagatcagcaagtcgcttacggcgcgtcgcgccttcaggcgccggcgcagaagccaacacctgcggcatcgccaagcgcgctttgacaaccgaaccaagccggaaggatggttgccgccttcgctgcaacaccgtgttgacgccaccgtgtctttggtgaaacgcctgcgtcgctgggcgccggcaaccggaatacagcaagagctggtgcgcttcgacacccacgccatgcagaatcccgacattgccggcatcgaatatcagcaaggcgaactggcgggttacgaagtgcgggaatatctccttgaagcatggagccgtcaatgcgcctattgcgacgcgaaagaggttcccttggaaatcgagcatatcattgcgaaaagccagggcggaaccgaccgtgtttcaaacctgaccttggcttgccggtgctgcaatcagaagaaaggagccctccccattcagcagtttgtgaaagaccctgcgcgcctggcgcgcatcctcgcccacgccaaggcgccattgaaagacgccgctgccgtcaatgctgcgcgctgggcgctgttttctgcg

SEQ ID NO: 1574 - DNA, 296 bp, unidentified
  source 1..296: mol_type = other DNA; note = Activated carbon metagenome
gtcaactacccccgactaaagtcgggggcttgaagggaacaatcccggaaagccagattgaccagggaaagcggtaaccaacccgctacgtgtactacaggtcgttaagacgtaccggcgaatgcttcctcagttcgccgctctacaaggtctggatcatgctgcggaaaggtaaagccgcgaaggttcggatcgacccgcacagggagccgggcgtacacattcccgaggggagacgccccgtaaggggcgcgtcacaaggcccgtaagggcaaatttggagaaagaagatggct

SEQ ID NO: 1575 - DNA, 1413 bp, unidentified
  source 1..1413: mol_type = other DNA; note = Wastewater metagenome
atgaaacaaacacaaacaaaaattgtacctgtgttggctgtagacggtacaccgttaatgccaactacacatggttacgcaagagtgttaattgctcgtggcaaagctgtagctgttaagcaaaagattttcactattcaattattacacgaacacaagacaaacaaagaagaaattaagtgtgaacttaaagttgattgtggttttggaaatattggttacagcgttgtagcgaataatgaagaattaattggtggtgaagttgaattattaactggcatgtcagcacgaattacaacaaaggctgggtataagactcagcgtaatggtcggaaacgttaccgtaagccaagatttgacaatcgcaaacgtaaggatgattggttgccaccatcaaatgaacataaaaacgagtcacattttaaattaattgatttaatgtgttcattatatccagtgaatcatttaaaattagaagctggtaattttgatatgcaaaaattcaagaatccagatattaaaggcaagcaataccaagaaagtaatttggataagaaattaaatcctaacttacgcttggctattttgtaccgtgatgattacaaatgtcaatgttgtggtgattctttaagtaagaataaaaacattaaactagaagttcatcatatagtctaccgttcaaaaggtggctcggattctgaagctaatttggttacgttgtgtacaaaatgtcacacagctaagaatcataaagatggtggcatattgcacaagtggatgcttcaaaagaaaagcatgggtagtttaaaagaagctacgtacatgaatatattagcatctagattaaaacagcgctatccacaagctgagatatgttttggatacgatacggctgaaaaacgcaagtcgttaggtcttgaaaaaactcaccataatgatgcttttgttgtaggtggtggtgtagatgagacaaccatgagagttgaatcatctactaatttcaagcaaaaacgtaggcatgataggtctctaacaaaattctatgacgcacaatacattgatattcgtgatggcaaaaagaaaaaaggcgcagaattaagttgtggtagaactaaacgcaataaaaatcttaatggtgaaaatgagcgaatatttcgcggtgagaaggttttaaaaggacgtgtaactcattgtttaacaaaatatccgattgaatctggtgatataatttcttatcaaggacaaatatatgtctcaggcggaaataaaaacaaaggtgcctatattaaagtagtggtagaaggtaaagaactaagtttaaaaacacctgaagttaaagttcttaaacgtaatcgtggaacttacattacaacgcaaccctcacgggcttgcttgaatccagtgaatggttaa

SEQ ID NO: 1576 - DNA, 301 bp, unidentified
  source 1..301: mol_type = other DNA; note = Wastewater metagenome
gttaagtacccacgacccaagggtcggggcttattagctctgctataagctcgcttaattagcttaagtgatgcttgtcgaaagataagctgaactacgttacctagtaatatataggtacttcggggttgctctcaagctccgaactctacggcttgtaattaaacatctctgacgggaaggagaagtgttgcaagcgtttaaaacattaggataacattagcgatgggaatttgctaaagttttaatccacttataaaaaggatttttatcccatatgaaacaaacacaaacaaaaatt

SEQ ID NO: 1577 - DNA, 960 bp, unidentified
  source 1..960: mol_type = other DNA; note = Human gut metagenome
atggtgtatatacaggacatagatggtaaaccgatgatgcctactacaaggcatgggaaggttaggagactgctaaaagacagcaaagcggtcgttgtgaacacatgtccttttaccatcaaattgatgtacaagacatcaggttacaaacaagagattgtgttaggtgtcgatgccggaaccaaacatgttggtctatcagcaacgacgaaaagcaaagaactttacagcagtgaagttattcttagaagtgatattgtagaacttttgtctacaagaagagagtcaagaagaacgagacgaaataggttgagatacaggaaacctcgttttaacaacaggataaaaagcaaacgtacaggatgggtagcaccttcggtgagacataggattgatgctcatatccgtgttatcgacaacatctgttctatcctgccggtatcccgtgtcatcgtcgaggttgcccagtttgatacccagaaaataaagaatcccgatatctccggtgatgaatatcaggaaggagatcaacttggtttttggaatgtcagggaatatatcttggcaagggatgggcataaatgtcaacattgtaaaggaaagtcaaaagacccgattttgaatgttcatcacatcgaatctcgaaaaacaggaggtgattctccttcaaatcttattactttatgtgagacttgtcataaggagtatcataaaggtaacatcgatttgaaggtaaaacgaggcaagtcgcttcgcgacgcagccgtgatggggatcatgaaatggaaattgtacgatgagttgaaatccagatgcgacaacgtttcgatggcgttcggatacattacgaaatacaatcggattaaatacgggattgaaaaatcccatacatccgatgcgtttgttatttctaggaacttcaatgcgaaacgaattgaacgtcaatatttaaaacgttaa

SEQ ID NO: 1578 - DNA, 271 bp, unidentified
  source 1..271: mol_type = other DNA; note = Human gut metagenome
atataatttcattatatggttttaatatatccataaggatcggattattagcctaagtcttgaaacagagtctacgttatttgagaatacatagttaccaaggaatgtttgcccaagttccttgctctaaggtaagtgattaaacaggagtagtgtatttgcgaaacagtattgcttatatataaaacctcaaaataacattggcgatgggtactaacagggtttttaccctgacttatgttgaataaacattgaattagtttgtaaaatg

SEQ ID NO: 1579 - DNA, 846 bp, unidentified
  source 1..846: mol_type = other DNA; note = Human oral metagenome
atgcgggcgaagtccaacttcgtgaaaaacctgtcgacgagaagagagatgcgaagagccagaagaagtcgcaaaacaagacataggaaggcgcgctttgacaacagaagaagaccggaaggctggctcgcgccgtctgtgagaaaaaagatcgatacccaccttaaggtgatagcggacctgcacaagatattgcccatcgcaaaagtgatcatcgagacatcggctttcgacacgcagaaactcaaagcggacctcaaagatcttgcccgcccgaagggcgaagaatatcagcaaggcgaaatgacgggcttttggaacgcgagaaagtatgcgcttttcagagatgggcaccgctgccagcactataaaggcaaatccaaagacccggtactggaagtgcatcacatcgaaagcaggaggactggaggcgatgcgccaaacaacctgatcacactctgtaaaacgtgtcacgacgcgtaccacaaggggaagatcgaactggatgtgaaacgatgcgcatcgttcagagacgcggccttcatgggcatcatgcgctgggcggtgtacggcgtactcaaggaggaacacccagatgtatcgatgaccttcggctacaagaccaagaatgcacgaatagagaatgggttagaaaaatcgcacatagttgacgcgcgctgtatatcaggaaaccctcttgccgccccggcagaatatatcttcgtgcagaagaaagtgagaaggcataaccggcagatgcacaggaggactatcggtaagggcgctatcgtaagagaaaccaggcgctgcacaccatcttcggtttcagattgttcgacaaggtaa

SEQ ID NO: 1580 - DNA, 299 bp, unidentified
  source 1..299: mol_type = other DNA; note = Human oral metagenome
gtcaactacccacggctaaagcatatgggcttgccgaagcccgtcagggcagatgtaaaagccccggttgactagcctaagtgttttcgagcactacgttacctgagaatatataggcaccgtggaatgtactacctagttccacgctctgcggcatgtgcttaaacagttccgggaggtaggcccagtgctgcatgtgaaaacctgcggataatattggcgaaggtagcattacgaccgcacgcgccggcttacagcgtaaagcgtgcaatatcttatgaaaggagcgatgccctatg

SEQ ID NO: 1581 - DNA, 1128 bp, unidentified
  misc_feature 1..1128: note = Ga0222708_1003174 JGI
  source 1..1128: mol_type = other DNA
atgcagagagtccccgtacaaaaccctgatggcagtccagccatgcccaccaagcgcagtcgcgctgaagcgtgggtgaggcaaggcaaagccgaatgggtcaagaccgatctcaggattaaagcagttcgactgctaagagaaccctccgggcacaatacccaggccattgtggtgggagtagatcccggcaagctctactcaggcattgccgttcagtcggccaaagccacgctgtttcaggctcacctggccctaccctttgagcgggttagggaacggatggacaatcgccgcatgttgcgtcgttctcggcgcagtcggcggatcaaccgggatgttccctttgcactccgcaaccaccggcagaagcggttcgataaccgccgtggcagcaaactcgccccctcaatccgcgccaaccgccaacttgagctgcgcgtagttcgggagttgtctaccctgtttccgattaccgccattggctatgagaaggtcaaggccgatgtggacttgacctcgggccgcaagggtgcccgctctgggaaagggttctctcctgtaatggtgggccaggcctacgccattgagcaaatgagccagattgcgccggtctacacccgctatgggtggcagaaggacggcaatgggacatctcaacttcgcacggctctaggcttggttaagtccaaaaacaaagcagagcagaccccccagagccatgccgtcgatggtgtggcgctggcctgcgggtacttcattgagtaccagtcctttcaccagtgccgcaaccatggccatgattggtttggccaggtcaatatcacgacggcaccatttgccgtgattaagcgcccacctatctctcgccgccagctccacctgatggttccggccaagggcggcgtgcgccggaaatatggcggcaccatcactcggcatgggttcagaaaaggggatctagtcaaagctgagatggcgggccgggtgtcggtcggctatgtcagcggggacacggagcgacaggtttcggtctccgacatcaattggcggcggattggccagttcaccgcatccaaagttcagcttctttatcgcgcaacgggcatcctggccacctgcccgcag

SEQ ID NO: 1582 - DNA, 229 bp, unidentified
  misc_feature 1..229: note = Ga0222708_1003174 JGI
  source 1..229: mol_type = other DNA
ttcaatgacccccacttagcaaagctgaagtgggggagtggccggagataacccggtcgtaactgcgaatagagccattgagcggttaacgagcaaacacttccaaattcttctctagtttggattagatgtgagggggcagaatctagctccactgggtcattccaggacacagcgttaaccgtggcgtaagagaccagtagttttggaattatcttccacatgcaga

SEQ ID NO: 1583 - DNA, 1482 bp, unidentified
  misc_feature 1..1482: note = Ga0207145_1003 JGI
  source 1..1482: mol_type = other DNA
atgcttgccagttccaagctctgtaacatagaagctaataagactgagggtataagtccgtgcttctatgatatgccgctgattaacattagcgaggcacacgttaccccagaaatgggcgaaggaaaaaacatggtactagttatcgacaacaataaaaagccggtcaacccctgccgtcctgcagatgcccgactattactaaaaggaggcaaagctgctgtctttagacggttcccatttactattattcttaatgaagactctcttcaaaaggttagaccattacgtttaaaaattgatcctggaagtactaccactggcatggccctagtggatgacaaaacgggaaaggttattagtgctcttgaaattagccatcgcagtaaaacaatttcacgatctatgatatctcgggcaagctctagaaaatcgagaagatacaggaatacccgctatcgtgaagcaaggtataacaacagaaaaactgcgagtggatggttgccaccttcttttggcagcagaattgcgaacgatgaaacctggataaaacggttcatgcgatatagccccatctcccacataagcgtagaaattgctaaattcgatacccaattgatgcagaatgcggagatttcggggattgaataccaacaaggtgcgctccaaggatatgaggtgagagagtaccttctggaaaaattcggtcggaaatgttgctactgtgggggtaaggatcgtccccttgaaatagaccatattgtgcctaaatcaagaggaggaagtaatagagtctcaaacctagctatctcttgtaagtcttgtaaccaaatgaaaagtaatcaaaatgcgcatgaatttggctatcctgaagtgcaaaaatatgctcaatcatcattaaaagatgctgcagcaatgaatattacaagaataattcttcttaaacgaatagaaacgaatggcttgccgctagaaacaggcaccggagctctcacaaaacttcatagaatggagcaaggtcttgagaaagcacattggattgatgcagcgtgtgtagggatctcgacaccaaagaaattattaataaatgatctacaacctttgctagtaaaggctacaggtcacggctcacgccaaatgtgcaaagttgataaatatggttttccgcgcactcaatcaaagaaaaataaaaaaaagttcggctttcaaactggcgatatgatcaaagctatagtcaaagatgggaaaaaaaagggtacccatcttggtaaagttgcggtaagatcaagtggatacttcgacatacttagacctcagggaatagtaacaggcattaaacatacagcatgtagaatcattcacaaatctgatgggtatagttatagctacttgcctatcattagagaaaagaatagattggtggagttgatgggactcgaacccatcacctcatggatgccatccatgcgctctaccagatga

SEQ ID NO: 1584 - DNA, 315 bp, unidentified
  misc_feature 1..315: note = Ga0207145_1003 JGI
  source 1..315: mol_type = other DNA
tggtggagttgatgggagtcgaacccatggcctcgtcaattaccgcgccattattggcgcagctcaacagctcgcgttgaccagcttcagccaggactagtgtagtcatcgggctacgttaattaggagcgctaaaaatcacaccttgggatgcttgccagttccaagctctgtaacatagaagctaataagactgagggtataagtccgtgcttctatgatatgccgctgattaacattagcgaggcacacgttaccccagaaatgggcgaaggaaaaaacatggtactagttatcgacaacaataaaaagccg

SEQ ID NO: 1585 - DNA, 867 bp, unidentified
  misc_feature 1..867: note = Ga0376510_00006 JGI
  source 1..867: mol_type = other DNA
ttgagcatatttgttctggatacaaacaaaaagccgcagaatccggtacatccggcaaaggcaagactgcttttgacagaagggaaagccgcagttttcagacagttccccttcacgatcattttgaaagagaaagtcttggacgtggcatcaaccccattgcggatcaagattgatccgggcagtagagagaccggaattgccgtgattaacgacgattccggagagattgtttttgccatggaactgagacatcgaggccaacagatcaaaaacaatctggaagcaagaagcgcaatcagaagatcccggagaaaccggcaaacgcgatacaggaaaccgcgctttgagaacaggaccaggccggaaggatggctgccgccttcattaaaaagccgggtttataatatcgaaacctgggtcaaccgcttgtgccgattttgcaatattcaggcaatttcaatggagttggttcggtttgacatgcagaaaataccgcattggctcgatgccgcctgtgtaggcaaaagcacacctgaaaagatttttcagatcgacaaaaccgtgttgattgtaaaggcagacggtcatggctcaagacagatgtgcagggtaaacaggttcggattcccccggacaacagcaaagtcaactgagaaaaaagtcaaaggctttcagacgggcgacatcgtcaaggcggttgttacttccggcaaaaaggttggaacgtacattgggcgtgtcgctgtcagaaaaagcggatcgtttaacattaaaacagtggacaaaacagtacagggcattagctggaaatactgcagactgcttcacgcatctgacggctattcctacaatacgacgtgctaa

SEQ ID NO: 1586 - DNA, 242 bp, unidentified
  misc_feature 1..242: note = Ga0376510_00006 JGI
  source 1..242: mol_type = other DNA
gtcaactacccctcggctgaagaccgaggggcttgaaaaagccccgaagttgaccagtctaagtgcttcgagcactacgttagatcggaaataggtaccctggggtgctcgccagccccaggttctacggcaagtggttaaacaggtctaaggggttaagccggtgctacttgcgccaaacccgatcataacattgacgcggcaaacattaccttggaaacaagaggattttaaaattgagc

SEQ ID NO: 1587 - DNA, 1254 bp, unidentified
  misc_feature 1..1254: note = Ga0172381_10003644 JGI
  source 1..1254: mol_type = other DNA
atggtttttgtagtagataaaaacaaaaagcctctggctttatgccattctgcaaaagcgagaaaacttttagaccgtcaagaagcagtaataattaatcattatccttttgtaatcaggctaaaaaaagaaacagagggagaagtaaaaaagacttactgcataaaaatagatcccggtgcaaagtttacaggtcttgcaattctcaataacaatgaggagattgtattctgtgcagttattcagcataaggcatttgagataaaagaaaaacttacttccagggcttcattaagaagaggaagaagggcaagaaataccaggtatagaaagccccgtttttcaaacagagtaagtaataaaaaggctggatggttaccaccttctttaagatcaagaatagacaatataacaaactgggtaaaaaagcttatggctatatgtcccataggagaaatttactttgagaatgtaaagtttgacactcagttaatggaaaatcctgatgtaaatggagttgaatatcagagaggggaattatatggctttgaaattcaggaatatcttagagaaaagaccggctttaaatgtgcttattgtggcaaagaaggcacgaaagagaaacttgaaatagagcatattattccaaaaagtaggggtggaagtaacagagtaagtaatttaactttagcttgccataagtgcaatcagaaaaagggaaataaaacggctaaagaattcggatatccacaagttgaagtcaatgcaaaaaagccattaaaagacactgccataatgaattcttcccggaaagcaatgtttattgaattaaagaaaataggacttccaataaagacaggtacaggtggaaggactaaatggaatagagtcaatcaaaaacttcctaaaactcattactttgacgcttcttgtgttggtattataccggaaaaattggaagtgaaaacagagcaagtcttaaatataaaggcagtaggaagaggaaaatataaaaggactgatactgataaatacggatttccaagagcttacagggcaagattaggatatttccagggatttaaaagtggagatgtggtaaaaagtatatacggaataaaaagtatagtcagtgtaagagctaaaggcagttttacattagagaataagaaaaatgtttcaccgaaaaaatgtcaattaattcaacgatgtaatggatatgtctataaaagtgagataaatgaggagaggtaa

SEQ ID NO: 1588 - DNA, 295 bp, unidentified
  misc_feature 1..295: note = Ga0172381_10003644 JGI
  source 1..295: mol_type = other DNA
ttcgaaactactttcttgcaaattccgaaaagtgaaaacttttcattatgtaaccagccaaaagtcgagtgactacgttagaaaagttatgacacccggaggtgcttcctcagcttccggctctgtcgtgtagcattaagcgaggtcgtgactgcggctacagtgtgttacacgtaaaaagcttatctaacattggcgaggggagactttttaaaagcgttacctgctctgtagtaatacagggtagagatggccgaaaggctaaatttaaaaagaaaggaaagcggttaaaatg

SEQ ID NO: 1589 - DNA, 1023 bp, Desulfitobacterium chlororespirans
  source 1..1023: mol_type = other DNA
gtgcataacaaagtaccagtcgtccatcaagacggcactccactgatgccatgctcaccggtcaaagcccggaagctattgcaaaaaggtggggctgttaagaagtggacggaagcaggaatcttctacatccagctcactacgtcaaccagtaaacatacgcaacctctggtattgggatatgaccccggagccaaatacgatggattttgcatagccagtaaaaagcaaatgcaaacatccggcatgatcatcgtcgaaaacagaatcaagaagaagctggaacagcggcgtaatatgcgtcgagccagacggttccgcaagaccagacggcgaccggcgcggtttaacaaccgaaagaacagggagaactggctgccgcccagcatcaaagccaaggtggaaatgcggatagcgtttctcaagcaactcctggccatttatccaatcagtcaagtcgttgtggaagatgtcaaaatcgacggcaataagctcaaaggacaaaagggccgtcaatactggacctggactatggtaggtaaaaccaagctctaccgatggttagaggcaagaacagagttgagcttatgtgaaccggaggataccgccagggtgcgaaaagaatacgggctaaccaagataggcgaaaagaaagcccatgtttttgaatcccaagccgtagatggatttgccttatgcattgccacacttggtactcaagataaaagcgtaaccagcttcagcgtttggagaaggccagagaatccacgaaggcaattgcaccggctagagccgaaaaaaggcggtatcagaccgccttatgggggcagcgttacactgggatttaaaaagaatacggtagtggaatacaaaggtaaactctaccgtacaggcgggacaacgaaggggaggctcagtctgcacagttttgactacgataacaggcgaatcacgcagaataccaagccggaagagtgtcgtaaagtgtttgtgcagagctggtttcacaaaaaagtagtttaa

SEQ ID NO: 1590 - DNA, 250 bp, Desulfitobacterium chlororespirans
  source 1..250: mol_type = other DNA
gtcaataacccccgcttaaagaagcgggggcttgccctggcgggggcaagggaaacaagttgactagactcagccctgagaggggctacgcgagttgggctataagaacctcctgggtgccagtcccagcctggggaaattcggcagaaccgctaaatgccatgataggttttaacctgtctaagcccggcttgctttgtcgagggacactcaactctgaaaaggaggcacgattaccgtgcataacaaa

SEQ ID NO: 1591 - DNA, 804 bp, unidentified
  source 1..804: mol_type = other DNA; note = Archaeon SCG-AAA382B04
ttgacaggaaaaaaggaggattcttacaccaaagacacaactttaggaatcgacgctggttactcaaaaatagggttctcagcagtcacagataacaaagaacttatctcaggaaaaatggaattaagaaacgacatctcaaaaaaacttgatgagagaaaaaagtatcggagacaaaggagacatagaaacaccagatacagagaacccagattcgataacagaacgaaagaagaaggaggggtggttagctccttcaatcaaacacaaaaaaaaaacacccacataaggttagtgaagaaaatcaagaaattattgcccattgatgaaacagtagtagaggttgcaaatttcgaccaacaaaagatgaaaaacccagaaatctcaggagtaaaataccaacaaggaaccctacaaggatacaacgtcaagaactatttattagagaagtttgattacgaatgtgcttactgtagtaaaagtgatgttcctcttgaagtagagcacataactccaaaatcaagaggaggaagtgacagagtttcaaacttaactataagttgcgtagactgcaaccaagaaaaagggcaaacaaactgcaaaagagtttgggtatccaaagatacaagaaagagcaggagaatccttgaaggaaacagcctttatgaaccaaatgcggtggaaaatagtcaacgaactaggatgcaaacatacactcggacacataaccaagaagaaaagactggaagaagaaatagaaaaatctcacatcaacgatgctttcgtgattgctggcagtgctaa

SEQ ID NO: 1592 - DNA, 320 bp, unidentified
  source 1..320: mol_type = other DNA; note = Archaeon SCG-AAA382B04
gtcaactacccctccctaactcactttgttcgtgaggaaggggcttggtaggagattagccatatgcgatgtcactctagggaagtggcaaatgaactacgttcgggactgagtgtctgacaatacaccttgcgggtgcctcccaagctccacgctctggaaaacatagtggacgacctcacagcgtcctctttcccaggctgtgcaacatcactacggtctacgcctgtcccaccattggcgatggaaacctgacccgcatctacgcggagatgacccttacgggtcgtaaaaaatagtttgtgagaaatatgaagaaa

SEQ ID NO: 1593 - DNA, 1257 bp, unidentified
  misc_feature 1..1257: note = Ga0376085_0000839 JGI
  source 1..1257: mol_type = other DNA
atgaagaaagaaaacacaagagttccagtaatttcgccatcgggtgaaccgttgatgccgaccaaagcctcgcgggctagacgctggataaaacaccagatagctaaaccattttggaacgatttaggtatctggtgcatccagttattggttgagccatcaggcagacaaacccaagatatcgttgttggtagcgacccaggtaaaaggtactcaggtattgctgttcagtcttctaaattcaccctgtttatgtcgcatcttgttctgatgggattcattcctaagcaaggcacagcaattgcaggcgtcaaagagaaggtgtcctatcgttccctactcaggcgtggtcgaagaggaagacgtattgcccgtggtaaaactttcaagctcagaaatcatcgccaaaagcggttttccaatcgtaagaaaactaagctagcgccctcaattcgctcaaaccgtcaactcgaaatacgggttatttctgaattatcccaaatatatccaattgcagcaattcgggtagaaaaagttcgagctgatgttgataagacatcagggagaaaaggggctaagtcgggtaaaggcttctctcccgtgatggtaggtcaggcttggatgattgaacagttatccaaaatagcgccagttgtcacagttgaaggttggcttcaagacgggaacggtacatctcaagttcgtgaacgcttaaagcttaccaaaaacaaatctgataaagcctcgccagttccagaaactcatgctgttgatgctgtgtccatagcttgtagtcattttgtccaatacaagccctttcatacagctaatactcgtggctgtacttggataggtgatgtgacggttacaccgtccatcttcaaagtcatctctaaacctcggattacgcgccgaagattgcatgatgccgtgccagccaaaggcggaattagggagcgttacggcggctcaacaacacccttcaaagcgaggaaaggggacttaattgagtactcgacttcatcaaaaggagaaatcaaaaaggtgattggatattgttcgggttacacggggaaaaatctgtctttaagtgatgctaattggttacgtctcggcagattcgctaattcaaaatgtcggattcttgccagaaatacaggtttggtaatttcggggggattgacccccgcgaaattaccctcctatccccctacgaccaaccctaacgggtatggtcgcactaccccggagatctga

SEQ ID NO: 1594 - DNA, 248 bp, unidentified
  misc_feature 1..248: note = Ga0376085_0000839 JGI
  source 1..248: mol_type = other DNA
ttgaactaccgttcctaaccctgcgggtatagaaacggattccaaggagataaccctggaacgcaagcgttcaatacctcacgagttcagtagcgtcttaacacttccgggtgcttcactagctcggatttcatgtagtccctggaatctcagggggttgggtaatgccaagacacgcgctactcaatgagggaagtgacctcaaacttatctttcgaggattgtatccatgaagaaagaaaacacaa

SEQ ID NO: 1595 - DNA, 927 bp, unidentified
  source 1..927: mol_type = other DNA; note = Wastewater metagenome
atgtccaaagtattcgtcgtggatgccaacaagcacccactgaatcctgtccatccgggttatgctcgtctcttgctgaaacagggcaaggcagcagttctgcggcactaccctttcgtcctcattctgcatgccgaagtggagatgcctcaacttgaaccacttcgggtcaagctcgatcctggcagcaagacgactggcctagcgctggtcaaggatgcaaccggcgaggtgatcttcgccgcagagatcacccatcggggggctgagatcaaacatgcccttgatggtcgacggggcgtacgtcgggggagaaggcagcgcgatacccgataccgcaaaccaaggtttctcaatcgccgacgaccaaagggctggctcccgccctcgttggaaagtcgggtgtgcaatgtcgttacctgggtgaagcggctgaggcgtctttgccctcttgctgccatttctcaggagttagtacgctttgatctgcaagcgatggagaacccagaaattgcgggaatagcttatcagcaaggcaccctcgcaggctacgaggcaagggaatacctcttagagaagtggggtcggaagtgttgctactgtggagcaactcgcctccccttacaaatcgagcatatccagtgccgagctaagggtgggtcagatcgcatttctaatttgtgtctcgcctgtggaccctgcaatctgaaaaaaggaacagtggatattcaggtgtttctggcaaagaagccagatctcctcaagcgcatcctggcccgggccagggcaccgcttgcggacgcggcggcagtgaattcaacgaggtgggcgttatatgagcggttgcaagcggtgggactgcccgttgagtgcggaagcgggggcgtaccaagttcaatcgggccagccgagggctagagaagaccc

SEQ ID NO: 1596 - DNA, 289 bp, unidentified
  misc_feature 1..289: note = Ga0137370_10002449 | GENOME_ACESSION: SagtaG_47_$F_3300012285 GENOME_ID: 35434 CONTIG_ID: 2448 SOURCE: JGI DATE: 2019-01-27.
  source 1..289: mol_type = other DNA
gtcatgaaccccggcttggaaagccggggcttgcagcagggctacccactctgcggtaggccacgattttccacgtctcacatgagcagactcagtccttcggggctacgttcggaacgaaataggtaccagtgggtgcgcggccagcccactgctctacgatgcagcattaaacaggtctagagggttaagccagtgtgttgcatgtgaaaccgttcctgaaccttgtcaaggccacctttacccgcgcaagcggaggctctgaaaggagcacctatcgatgtccaaa

SEQ ID NO: 1597 - DNA, 1266 bp, unidentified
  source 1..1266: mol_type = other DNA; note = Prevotellaceae bacterium UBA3839
atggtatatgtacttaataagaatggtcagcccttgatgccgacagaacgtcatggtaaggttcgtcgtatgctgcgtgatggtaaagctcacgttgtacgacttgaaccttttaccattcaactggactatccatcggaagaagtcgttcaggaggtttcgctaggagttgacgctggtagcaagcatattggtatttctgccacaacggaggaatgtgagttgttagcaatgcaagtggaagagcgtgatgatattgtagaacttatagctactcgtagagaatcaaggaggacacggagaagccgcaagttacgatatagaccatctcactttgacaaccgtcgccgcaaggaaggttggttgacaccaagttcagaaaacagggttgcggcacatctgcgtatcattcatcttgtcaattccatacttcctatagcaaagacaactatagaagttgcacaatttgattcacaaaaaatcaagaatgacaggattgcaggaatagaataccaacagggtgaacaacttggattctggaacgtccgagaatatgtactttcaagggacggacacatttgtcagcactgcaaagggaaaagtaaagacaagattttgaatgtgcatcacattgaaagtagaaagactggtgggaatgcacccaacaatcttataacactttgtgagacatgccacaagcaataccataatggcaacattcaactaaaggttagacgaggaaccaatctccgtgatatggctgcaatgtccattattcgctgggaggtctatactcgtgccaagcgagaatttaacaatgtacatttgacttttgggtatctaacaaagcacagtcgcattcaaaatggcattgcaaaaactcattgtgcagatgctttctgtatagcaggcaacattaaagcagaacgattaccttggctctatatggtgcggatgcaacgtcggcacaatcggtctttgcacttagtgaagccggctaaagggggcttgcgtcaacgcaacatagccccacattggatacctaagacaaaactacaacaatatgatgttgtggaatgggatggtagaaaatcttttatatctggaagcgctaacggtcgtctgtatctaaaagatattcaagggaaatatgtagctacctatgaatctggagcgaagaaagcgataaatgcaaagcacgtgagattcatcagacgcaaacgtggcagcatgataattgagcaattgaccaaaagtgttgtatag

SEQ ID NO: 1598 - DNA, 291 bp, unidentified
  source 1..291: mol_type = other DNA; note = Prevotellaceae bacterium UBA3839
gtttacccacaaaaatgctggcactaacagcctatagtgagtaagccgattagcctcagtcatttaaacatcatatcgagaatatgaatattgaatgaactacgttagaagtgaatgtataggcaccttgaaatagtcgtccaagtttcaagctctgcggtcagtgattaaaaggagcgaaagcaacggtgttactgatatatgaaaccactttataacattggcgatgggcgcataacgggcattagcccgacttacagtattttaaattgaattgaataatccccaatg

SEQ ID NO: 1599 - DNA, 846 bp, unidentified; identical to SEQ ID NO: 1579
  misc_feature 1..846: note = Ga0302321_100092658 JGI
  source 1..846: mol_type = other DNA

SEQ ID NO: 1600 - DNA, 299 bp, unidentified
  misc_feature 1..299: note = Ga0302321_100092658 JGI
  source 1..299: mol_type = other DNA
gtcaaccactcgggattgaaatcccgagcatgtgaaccaacagtaggtgcttttaggcaagcatgttctagttgaccaggctcagtgtattaacaactacgttaccagagaatacataggcaccttgggatactcgccagtcccaggctcttcggcagacggttaaataggtgtaagggttaagccagtgctgtctgcataccagaagtggacgctttaagcgtaaaccgtcggataacattgccgaggcacacattacccgcgcaagcggagattaaaggagtagttcgatgcaacgt

SEQ ID NO: 1601 - DNA, 1092 bp, Pelotomaculum thermopropionicum
  source 1..1092: mol_type = other DNA; strain = SI
gtgtatcggcaaatgattaccagagttcctgtggtgggcgtggacggaaaacccctcatgcccaccacgccaagaagagcccgcctgttaatacgggacggcctggccaaacgccggagaaacaagctggggcttttttacgtccagatgctccggccagtcggaaccgaaacccaacccatggccctggccgtggaccccggcgcgaagtacgacggcatatcaatagcttcacacaaacaaatcgaactaaaggcgatggtgttcctgcctgttggcgtgccggagaagatggaaacccggaggaatctgcgccgggccaggagattcaggaacactccccgcaggccagcccgtttcgacaatcggaggaggaaaggttactggttagctcccacgcagcgttccaaagtggaatgccggctgaaagtcgtccgggaactctgcaaagtattccccgtctggctcatcgtcaccgaagacgtgcggttcaaccacgccaggagtcgcaacggtaaatacttctccaccgtagagatcggcaaggccctcacttactttgagtacaaaaagctggccgaactcaagctcgtgaaggtatccgataccgacgcctggcgtgagaggttcgggttggtaaagtatacggaacgcaagtgggaacaaacacccgagacccacgccaatgacgccgtggcgatgttgatgggtataaccggctgcgaaaaagccgtcacgcctttctatgtctggcgaaaactccagtacgcccgccgtagcctgcaccggcagcatttccagaaaggcagcaaaaggcccctgttcggtggcgccagcaacggcacttttttccgcaagggcgactgggtggaggcagaaaaagccggagtaaaatatcgcggttgggtctgtggactgccgacggaaaccacgaaactggtgggtgttgcggatgcagacggcaagcggataggccagttcagcccgaagaaagtcaggctgctggccaggtcaacaggtttttcctggataacagcggcatgagttcagcttctttatcgcgcaacgggcatcctggccacctgcccgcag

SEQ ID NO: 1602 - DNA, 240 bp, Pelotomaculum thermopropionicum
  source 1..240: mol_type = other DNA; strain = SI
gtcaaccacccccgcttgtagaagcgggggcttgtcctggcggggacaggggcaactggctgactaggcggcaaccttacagttgcagaagtccgaggggctacctaatcacttccgggtgtttcgccagcccggactatgtgaggcagaaccgctaaatgccacgtacgaccaagaccgtattaagccccgtggacagcgccgaggcgacaatcactccgaaaggaggccgtgtatcgg

SEQ ID NO: 1603 - DNA, 1347 bp, unidentified
  misc_feature 1..1347: note = Ga0163153_10017205 JGI
  source 1..1347: mol_type = other DNA
atgaaagtttttgttgttaatcagaatggggaaccgctaatgccaacaacaccgcgcaatgcccgtttacttctgcgcgatggacgggcaagaatctttagtcgcaagccgtttgcaattcaattgctaaactcaactagtggctatgtgcaagataccattttaggcatcgacgcgggctacaagacaatcggctttagcatcgttaccgaaaaagaagaattggttggcggtgaagtcaagctgttggaagaaatgtcggaacggctaaaggaacgagcgaggtatcggcgcaatcgacgggggagcaagacgcgctatcgcgcaccacagttcgacaatcgccgtcgcgatagaggctggttagctccttcgattcagcacaagttggatacacattcacgattaatcgagatgtacaagcgagttttgccgatccagacgatcatcattgagacggcaaactttgatattcaggcgctcaagaatgctggcagtgaagggattgagtatcaacagggtgatcaggcaggattttggaatttacgcgaatatattctacacagagacaatcacgcgtgccaaagtccagtatgcgaaaagagacgcagggaagatttgcctgttcgcagcgagattttagatgtgcatcatatcggattttggaagcaggatcgaacagatcgccctagcaacttgattacactttgcgacaaatgtcatgttagcaaagaacatcaactaaaggggatgctgtggggatgggaaccaaagctcaagggattcaagcccgaaacgtttatgtcaacggttcgttggcggctaatcaatcaacatgatgccatcaacacttttgggtatattacaaagtcggcgcgtatcacgcttgggcttgcgaagtcgcaccataatgatgcctttgttattacttgcggaacaaatcaggagcgctctgaaacaatagttattcagcaacgcagacacaacaatcgcagtcttgagacctttaaggatgctaagtatatagatacccgcgatggtgaaatacgcgggggaaaggaattgtcaagcggtagacgaaaacgcaacaagaatttgtccagtgaaaacttgcgtcaataccgcggggaaaatgtcagaccagggacgcgatccataagaagaaagcgctatccgttgcgacctggggatattgtcttgtataaaggacagaaacggattgttaaggggacgcatagcgaaggaaaaagcgcttttctctacgcgaatgcaaaaccggaaaatgcacaggtcaaaaatcttgttcctatatgtcatatttctggtttgatggcgaatttcgcctga

SEQ ID NO: 1604 - DNA, 255 bp, unidentified
  misc_feature 1..255: note = Ga0163153_10017205 JGI
  source 1..255: mol_type = other DNA
gttatagaccccatccctaaagggaggggcttgaaccgtaaggaacaagccccctatgattagactcaggtcgcgagacctacgttatcgcgaatatatagacaccaggggatgcttcacaagtcctttgctctgtggacaatggttaaacatcgctgatgggtaggcgaagtgctgttgtttcaaaaccgcgaataacattgtcgatgtgaactacaaccgcaaggttgatcaaaagaaaggtttttgatgaaa

SEQ ID NO: 1605 - DNA, 1686 bp, unidentified
  source 1..1686: mol_type = other DNA
gtggcacttttcgatgcttctagtcggaaaccctgcaaagcagacaccgaatctaagaaaaccgtatttcccgccatgcacaggcttatccccgatgcaccgccaccgtttggcagtgtgacactgcatggcaatcatccaaaggagaaattctcattgcaggaacaggcgtatatctatgtgatcggtctggacggcagaccacaaatgcccaccagaagacatcgacatgtgaaaaaacttctaaataccggcaaagcccgtatcgtggaacacgttccctatacgattcagcttttatatgaaaacagccctgtattacagccattgcaactgaccgaaaatcccggtcggacgaacatcggcatcgctgtattaaccgaacagggaaaacttgtattctcagcatccgcagaaacgagaaacaaggaaatacataaattaatggaaaaaagaaaacagcaccgtcagaattccagagccggagagcggaaagcccgacagcgccttgccagaaaacatggtacgacactgaaagaagggcatctggatcggaagcttccatattataaggaagaaaaaccggtcacatgcaaagacatccggaacacggaagccagatactgtaaccgcaaacgaaaaagcggctggctgacaccgacagtcgaacaattggttcgcacgcatctgaacctggtccataaagtacagcgttttcttcccatcacagacatcgcactggaaatcaaccgatttgcgtttgcgttactggatgatccttctgctaccggcattgattttcagaccggtccgctgaaaggatacgatgatatccacgcagccgtatcagatcaacagcatggggtgtgccttttgtgtggaaaagagatagaagcatttacctatatcgttccaaaagcaaaaggcggatcagaaacactggcgaatgtagcaggcgtctgtaactgctgtctggaaaaactgcataccgatcagaacgtccgtgaggaactgaaacagcagaaagagggacagtttaaaaaatatggtgcactaagtgccatcaatcaggcaatcccatatatctgcgaacaactgatccgggaatatggaagctcacatgtgcaattttgcactggaggcgaaacctatcatatgagggaactgctgggctatacaaaagaacaggcgatgacagcaccagcaatagatgcttatgtgattggtctggtatcccttggaatcattccggaggaaaaaccggattttacattttcgcatcagattcgtcagtttcgcaggcaagaccgcaggattatcaaaagccagcgggaacgcacctataaatatcatggcacaaccgtggcaaagaaccgcaattcacgattccaacagaccagtccctcgttggcagactggtatcaggaaatgtgtctgacctacggaaccacacaggcagaaaaaatgcgatcccagcttactgtagttaaaagcacccgaagatacaataacccaaaccgcctgtatccgggaaccgtattttactatcgcggcgaacggcatgtgatgagcggccagctcagtaatggactgtatctgcgagcagtgggagacagtaagacgaattataaggcaaaagaatgttgggtggcgaagcggaatgcggggttggtgtttgtggagtag

SEQ ID NO: 1606 - DNA, 397 bp, unidentified
  source 1..397: mol_type = other DNA
gccagaagaactggaaaaagcactgaaaacgcttgcagaagacctgaagatcaagaccgatgcacgctttattccggtaacacatacagatgaagtcttcctccagcaattatatgacgggaacagacatttgaacatgtcacggggtgtgattcaaaacggcaaaacgatcatacaggaaggtcccttgcatgggctggaagaaaaaatcgtcaaaatcgaccgtcataaacgaatcgcatttctgaaaagcagtgaccagactaaagaagcattactgtttaaagtcggtctcgagattacagaaaaaacaactgcataacgcatatgggtatttacaaagtcagctgctccggcagaaaacacagcaggggcagttgagcagagatacgatgtc

SEQ ID NO: 1607 - DNA, 1365 bp, unidentified
  misc_feature 1..1365: note = Ga0307377_10081489 JGI
  source 1..1365: mol_type = other DNA
atgcagcagtttaaaggaaagttaaagaacgtaccaaaggatacttcactagtcctttgctctacaaatctggaattaaacagagatcaaagtctcagtgttccagatagccttagcaaaccgcctttaaacactcccgaagtgaatcaaccgtcaacgaacaacgaggacttaccatcaaaagtgttcgtattaagtatcaaaggtacaccacttatgcctactaaatgttccagggctagaaaaatgttgataagtgggaaagcaagagtagttaaacgattcccttttacaatacaattaaattttgaatgtgaaaatgtggtgcaagaaattagtttaggagttgatactggatttggaaatataggattttcagcaataacagagaaagaggaattaatatgtggtaccttaattctcgatggaagaactaaagaaagacttgatgaaaaaagaatgtatcgtagaaatagaagaaacaagttatggtatcgagaatcgagatggtcaaatagggtaagaaaagaaggctggttaccaccttctactgagagaagatatcaaacacatttaactattatgaagcaattgaaaaagctactacccatatcaaatataactttagaagtagcaaagttcgatattgctaaaattgaaaatcctttaatagaaggccaagattatcaacaaggtacactttatgattatcaaaatatgaaaagttatttgatgagtagagaaaaaggtaaatgccagttttgtggtgaagattttaaaggacaaccttcacatatacaccatattaaatctaaacgagaaggtggcaatgatagaccagacaatcttgctttgttacataagaaatgtcatgaggagatgcatgctaaacatttagaatacaaattaaaatcaaattctgaagattataagcaaactacatttatgaatattatcaacaaaagatttaaacaagatataccagagttgaagattacgtatggaaatattacatttgtcgatagaaataatttaggattagaaaaaacgcattataacgacgcatttgtaatatcaggtggaactcagcaatcaagaacaaaggcaataaaaattaagcaagtacatagaaataatagggtactacaattgaatcgtaaaggatttaaaccatcaatcaagaaggagaaatctaaagttgatcccggagatttgttttgggtagcaggtaaacaatatacttgtacaggaatgttcaacaaaggaaaatatatttgttttgggagtacttctaaaaaagaatatttcaatttctcaaaagtagtaaaaacattcaaacagggcagttttttatggaatatataa

SEQ ID NO: 1608 - DNA, 260 bp, unidentified
  misc_feature 1..260: note = Ga0307377_10081489 JGI
  source 1..260: mol_type = other DNA
gtcaactacccatgagctaaagactcatgggcttgaatcgtgaggttcaacgtaagagttgattagggagcatattatgcagcagtttaaaggaaagttaaagaacgtaccaaaggatacttcactagtcctttgctctacaaatctggaattaaacagagatcaaagtctcagtgttccagatagccttagcaaaccgcctttaaacactcccgaagtgaatcaaccgtcaacgaacaacgaggacttaccatcaaaag

SEQ ID NO: 1609 - DNA, 831 bp, unidentified
  misc_feature 1..831: note = Ga0310147_000164 JGI
  source 1..831: mol_type = other DNA
ttgttagtgttcgtacttaacaagcatggaaaaccccttatgccatgtaaaccatcaaaagcaagaaaactgttgaaacaggggaaagctaaagtagtcaaaaaagaacctttcacaattcaacttctgtatggaagtagcggatacaagcagaagtgtatagtgggaattgatgcaggaagtaaaaatatcggtatagcagtaacaactgaagatggcagggtaatttacaaggcacaggtagagttgagacaggatataaaagaaaaaatagaaacacgacgaagacttcgaagagcaagaagaaatagaaagacacgctaccgcaaacccagattcaacaaccgcaaaaaaccaaaaggatggttgcctccatctataagagcaagaatagaagcacattataatctcatcaaaagacttactcaaataattccagtatcaaagattaaggtagaagtagcgaaatttgacgtgcaggctattcttaatcctaacatacatggcaaagaatatcaaaaaggcaggatgcatggttttgacagtgttaaggaatatgtgaaaatcagagatggttttaagtgccattatgccaagttaagacctgatataccatgttcagggaaactgactgtagaccatatcgtacccagaagcaagggtgaaacagacaatccaacaaaccttgtgtgctgttgtgaagcacataatacagcaaaagggaatatgagttataaacaatttactggaaaacaaccaccaaaaattgaggattttcgtcccacagtatttatgaatgttttgagagtttatcttgttccgatgttgcag

SEQ ID NO: 1610 - DNA, 248 bp, unidentified
  misc_feature 1..248: note = Ga0310147_000164 JGI
  source 1..248: mol_type = other DNA
gtcaactacccaccgcttatagaagcggaggcttgcaaaagccttagttgactaccctcagccagggctaaaacgccatcgggctacgttaggcaagtcatgacaccatgggataatgcccaagtcccatgctctgtcgcatgtacctaaacagtcctgaggggtagggacagtggtacatgcatagcaagcttgcctaacattggggatgggcaaaataactccaaaaggaggaacacttcttgtta

SEQ ID NO: 1611 - DNA, 969 bp, unidentified
  misc_feature 1..969: note = Ga0073582_115410 JGI
  source 1..969: mol_type = other DNA
gtgttgaagcagaagttattggagagaaatacatacacacccaagagtgctcctccagctcttggcactgtgaccctgtgtttaaacagttctaaagcagaaggaacagtgatgcagagtttaaaaacctctaataacactcccgaggaggctctcacccctaaagcacgagggggacaggacttgagagttcctgttatttatgtgctcaacatgagaggtgatcctctcatgcctacttcaccacgtaaagctagaatattactcaaaaaaggagaagcacgtgtcacaaaaagaacacctctaactattcaactaacaaaacccacaggagaggctaaacagagcatcacattaggagtggatgctggttatagtcatgtcggtctctctgtgacaacacaaaacaaagaattgctatcgtcagaagtaaatcttagaatagacatggttaaacttaattcagatcgcagacagtaccgcagaactagaagaaacagaaaaacgtggtacagacaacctagattcttaaacagagttaagagcaaacataaagggtggctccctccttctgtacaacataagttagatactcatgttaaattagtcaaaaatgtacttaacatacttcctgtgtccaaaatcattgtagaagtaggtaactttgatattcaaaagattcagaacccagagatagagggcaaggaataccaaaaaggttctcaattagggttctataatgtcagagaatatgtacttcacagagacaatcacacttgtcagcactgtaaaagtaagaatgtacctcttgtagttcatcatattgagagccgacagactggtggagatagacctaataacttaatcactttgtgcaagaaatgtcacagtgaccatcatgaaggacttattaagttaaaagttatgaagagcaaaccttttagagcagcgactttcatgtctactatt

SEQ ID NO: 1612 - DNA, 230 bp, unidentified
  misc_feature 1..230: note = Ga0073582_115410 JGI
  source 1..230: mol_type = other DNA
gtcaacgactctggggttaaaaccccgcagcttgtaacaaaagctgctgtagtgaccagggagctttaaacaagtgttgaagcagaagttattggagagaaatacatacacacccaagagtgctcctccagctcttggcactgtgaccctgtgtttaaacagttctaaagcagaaggaacagtgatgcagagtttaaaaacctctaataacactcccgaggaggctctca

SEQ ID NO: 1613 - DNA, 1296 bp, unidentified
  source 1..1296: mol_type = other DNA; note = Anaerobic digester metagenome
atgaatcttgtgtttgtattagatgcaaataaaacaccattgttaccatgccatccaatgagggcacgcaagttgcttgagtcaggtaaggcatcagtttataagagatatccatttacaattattcttaaacgagtggttgaaaatcctgtagatcctaacttagaaataaaagtagaccctggttctaaaacaacaggtatagcagttgttaatccacacacaaaaagagtagtatttgcgggtaatttacaccatagaggagaacggattgtaagtgatttacttaaacgtagccaagttcgtaggggtagaaggaatagaaaaacaagatatagaaagccaaggtttgataatcgtaaaaaagaagagggttggttgccaccttcgttgttatctagggttaacaatgtggtagtatggacgcaaagattgatgaaatattgtcctattggtgttatacatgtagaaacagctaagtttgatacgcaacttatgcaaaatcctgaaattagtggcattgagtaccaacaaggcacattacaaggttacgaggtcaaagagtatttattagagaaatttgactataaatgtgcttattgtgggatacagaacgtaccattagaggtagagcatgtttgggctaaaagcaaaggtggttctgatagagtaagcaaccttgtaatatcttgtgttaaatgtaacgatgaaaaaactaatatgcctattgaagaatttctaaaagatagacctgagctactaaagaaaattcagtctcaaatgaaagcatctcttaaagattcggctgttatgaacgccatcagatatcgaatcggtgatgagttaaagaagttgggtttgccagtttgtttttggacaggtgggagaaccaagtataacagacataaacagggctatccaaaagagcactggattgatgctgcttgcataggagaaggtggtgatgatgttctcctagatcctaatatgcaaattttaataattgaggctattggtagaggtaatagacagatgtgtttaatggataagtatggctttcccagaactaaacctaaacagtctaagcgagttcatggttttcaaacaggtgacatggtacgcttagtgcaacctagtgggaagtatgctggcacatatgtagggaaagtagttgttagagcacgtggagactttgacattattacaaaagaaagacaaaaaataacagcaacatggaagcgatttactttattacaacgctttgatgggtatagctatacttttagccccgcttag

SEQ ID NO: 1614 - DNA, 253 bp, unidentified
  source 1..253: mol_type = other DNA; note = Anaerobic digester metagenome
actttataccctccatggcaacagtttaggtagagggctatatgcccaagttcaaccagtttaagctctatgagagctacgttatccacgaatatatagacaccttggggtgcttctccagctccaagctctgtggtaagtgattaaacagtacaatagcttagaagtgtgcagtgttgcttacaaaaaccgtggaataacattgactaggagaccgttacttttaaaaaggagtgattcttagatgaatctt

SEQ ID NO: 1615 - DNA, 1266 bp, unidentified
  misc_feature 1..1266: note = Ga0376687_0067215 JGI
  source 1..1266: mol_type = other DNA
gtgccagagccggaaggaagggcgctgatgggcaccagcgttgctctcgtcatgacacccagtcgtgcttccgaagctcctggagctgtcgcgagagcgttaaaagcacccgtcggggtacgggtcggtgcgttgagcccaacaagcgagagcaccagcggcgaggggagcgtgcctccggatacctgctcgggaccgtcagacagcccggtaacggggccctcatccgagggcacagaaaggagtcaccccatggtctttgtgctcgaccaacacaaaaagccgcttatgccgtgtacccccagaagagcacggctcctgctgacgcgcaagcgggcggtggtccatcggctcagtcccttcacgatccggcggcatcggaccgcagcatccagcagagtaccgtacagccggtggtgctcaagatcgatcccggctcgaaaaccaccggcctggccctggcgcgggtcgaggagagcgaagagggagaggtgcaccacgcgctgcaccttgccgagctcacccatcggggagaggagatccgcgagcgtctgcgcaaacgggcggtctatcgccgccgcaggcgttcggccaacctgcgctaccggccagcccgcttcctcaaccgtcgccgcccgcccggctggcttcctccgtccctgcgctcacggatcgacaacgtcgtgtcctgggcctcccgctaccggcgctgggtcccgctggtgcgcctggaggtcgagcgcgtcaagttcgacacccagaggctcgcagaatagggagatcacaccgccgcggagttcggccatcccgaagtggccgccctggccagccgtcccctgcgggatgcggccgccgtcaacgccacgcgctttgcgctctgtgacgaactgcgcgcgctgggcctgccgctcaccagccttgtgtggaggacgtacgaggtggaaccgtgcccgcttctcgctccccaagacgcacgcgctggacgcgttgtgcgtgggggaactggctgggattgatgctggcgcgcaccagacccttgccatcaaagcgatgggtcggggtcgctacagccggaccaatgtcgacgagtcggggttcccggtgggctacttgatgcgcgcagcgcgcaggttctggggatcaaaacgggggaccgggtgcgggcggtggttcccgaggggtttgcggcgcaggggacgcataccgggcgcatcgcggtgcgagccaaccggcagtttcgcatgggccgtgtgcaggggatacccg

SEQ ID NO: 1616 - DNA, 271 bp, unidentified
  misc_feature 1..271: note = Ga0376687_0067215 JGI
  source 1..271: mol_type = other DNA
gtcaacgatccccacgcatgaatgcgggggcttgtcccttgtgttgatgccgttttcgttgtccagccgaggtgccagagccggaaggaagggcgctgatgggcaccagcgttgctctcgtcatgacacccagtcgtgcttccgaagctcctggagctgtcgcgagagcgttaaaagcacccgtcggggtacgggtcggtgcgttgagcccaacaagcgagagcaccagcggcgaggggagcgtgcctccggatacctgctcgggaccgtc

SEQ ID NO: 1617 - DNA, 1332 bp, unidentified
  misc_feature 1..1332: note = human gut metagenome genome assembly, contig: NODE_8362_length_2558_cov_1.603676, whole genome shotgun sequence WGS
  source 1..1332: mol_type = other DNA
gtgaaggatcacaaccggctgcaaggccgaggagaacaaaacttgagagtatttgttttaaacaaacgaaggaagccgctgatgccgtgttcttcggctaaggcgcgcattctgctcaaagagaagaaggctgttgtagtgaggcgtacgccattcactattcagctgacgatcgctaccggcgaaacgaagcagccggtaagtctcggcgtcgatgccggatacaagcatgtcggcctttctgcttcaacggaaaaggccgaactctatgcatccgaagtcgaactgcgtcaggacataaccgacctgctttctacacgacttgcactgcgccgctcgcgtcgcaaccgaaagacgcgctaccgcgcacctcggttcgacaatcgcgttcgcagcaagcacaagggttggctggcaccgtctgttgagaatcgcatcaatgcacatctttcacgcattgctgccgttcttcgaatactgcctcttacgaagatcactgtggaaacagctgccttcgatacgcagcttctgaagaatccagatgtttcgggcgaagcgtaccagcagggcgaacagcttggcttttggaacgttcgcgaatatgtcttattcagagacgggcacgtctgccagcagtgtcacggcaaatcgaaagatccggtgctcaacgtccatcacttggaaagcagacgtaccggcggcgattctcctagcaatctactcacgctttgcgaaacctgtcacaaggcgctgcaccgtggcgagatcaagctgaaaactcaacgaggcaaatcgttcagagcagaaaccttcatgggcatcatgcgctggacggttctgaatcgactgaagtctgcatatcccgaactggatgtgcgcaacacctacggctatctcacgaagcacgcacgcatcacacatgggattgcaaaatctcattgtgcggatgcgttctgcatcgccgggaatttcggagcaaagcgactcgggtactactacttccaaaagcagacccgtcggcacaaccggcagattcacaagctttcaatcctgaagggcggcattcgcaagcgcaatcaagcgccttacgaagtcaagggattccgtctctttgacaaagttgcatgcaaaggagaaggtgccttcatcttcggccgccgctcatcgggaagcttcgatgttcgaaagcttgatggaacgcgaatttcagcaggcatcagcttcaagaagcttcgtctgctcgaaaagcgcagaacctacttaactgaaattcgaaaggaggcggcgcttccacccctgcctaaacgcaggggtctccgcgtcgatttttga

SEQ ID NO: 1618 - DNA, 248 bp, unidentified
  misc_feature 1..248: note = human gut metagenome genome assembly, contig: NODE_8362_length_2558_cov_1.603676, whole genome shotgun sequence WGS
  source 1..248: mol_type = other DNA
gtcaactaccccggcctgaaggccgaggcttgaatgagcctctagttgactagcctcagtccgtcatttgacgggctacgttggttgggaatgtacaggcaccgcgggatgtcgatcctagtctcgcgctctgcggccgatagttaaaagctcttagaggtaggagcggtgctgtcggcaagaaaccccttccatcattggtgaaggatcacaaccggctgcaaggccgaggagaacaaaacttgaga

SEQ ID NO: 1619 - DNA, 1842 bp, unidentified
  misc_feature 1..1842: note = Draft_c0007806 JGI
  source 1..1842: mol_type = other DNA
atgccgacggaaaggcacggcaaggtgcgccgaatgttaaaagacggcagggcgagagtaatcaaagccaggccgtttacgatccaactaacttacgaaactacaagttacacccaacacattaccctgggcatagacgccgggtaccaagaaatcggcctatctgcggtatctcccgggaaggagttgttatccgccggatgcacccttctaaaaggccaggtcgagcgcaacaaagaaagattaatgtaccgcagacagagaagaagccgcctgcgttaccggaaaccacgcttcaataaccgtaaaaaacccgaaggctggctggccccgagtattcagcacaaactggacagccacctgcgcctggttgcctgggcaaaaaagctgcttttcatcactgacatagtgatagaagtagcaagtttcgacatccaggcaattaaaaatcccggcatccagggaaaagagtaccagcaaggagaacagtacggcttctggaaccttcgcgaatacatcctgcaccgggacggccaccagtgccagaaccttaaatgccgcaacaaaaaccaggtgcttcaaactcaccacataggtttttggaaagacgatatgacggacaggccagggaacatcatcaccctctgcgacaaatgccaccggccggagaaccacaaggaaggcaagttcttgtggggatgggagccgaaagtaaagccgttccgggcagagacatttatgagcaccgtaagatggaagatagtcaacgctctaaaatgccggcatacatacggccatataacgaaatcccgcaggatagggctaaagctggaaaaaagccatgccaacgatgcctttgtaatagccgggggcagttgccaaacaagggcaaatacttttagtatagagcaggtccggcgcaataaccggtccttggggaagttttacgattcccgatatatagatatccgcacaggggagaaagtcagtggccaggagttgaactgtggccggcgcacccggaacaagaatctgaacagtccgaacctgcgggtataccggggcaaaaaagtatctaaaggcagggtgagcataagaaagcagaggtacccgtatcagcccaaagacattgttgaatttggtggctggcggtacacggttaaaggtatgcatagctacggcgcctatatcaatctggcggaattgagcaagccggtgaaaacggaactaggtcagacttgtgcggtacagcaaaggtttttgtgtagcgtagggaaaaacttgtcgctctgcgggcgacccggcattcatctttcgcctaaagaggcgggagtcttctgccggattatgataaatatattatcaggaattaatattacacatttaattgattatgaaagtgatgatgaattgcatactacgcaatttcaaagaacattagatttgctaaaagatacttccaaattgggcaaacaaatcaaataccgtttaggttacaccaatttgacttttgaattatggatgattttacataaagcgaattgtaatactttatttacatatagatggcaatatcttgatgcaataaacagagcatatggtgagaaatttgaaagtctcaaagagtataagcatgaattcaatttcaagagagtgcttggaaaaatatccttacctgaagtgaaagtggcgatcgatcgatccaaggccatcatgcaaacaaatatggcaaatggtctagtgttgcagcagtacaaaggatatcgttattacagagaaaatccgtctctttcagtttgggagcccatcgaaaaaataatgatggattgtggactgatgtaa

SEQ ID NO: 1620 - DNA, 292 bp, unidentified
  misc_feature 1..292: note = Draft_c0007806 JGI
  variation 11: note = n represents any nucleotide
  variation 23: note = n represents any nucleotide
  variation 38: note = n represents any nucleotide
  variation 48: note = n represents any nucleotide
  source 1..292: mol_type = other DNA
gtcaacaaccnccgcctatagangcgggggcttggggnagcgtatagnggaaaagctatacgtccccaagcccggttgattagcctcagccaccgggcgtaaagcctgacggggctgcgttgcaatggaatatataggcactccgggatactccactcgtcccggacactgcggccaatggttaaatatcgctgaagggtaggcgaagcgctgttggcgacaaacccgttgtaacattggcgaagtggacccactgcgaaagcagccttgtttccgaaaggagatcaacatg

SEQ ID NO: 1621 - DNA, 1431 bp, unidentified
  misc_feature 1..1431: note = Ga0376513_002019 JGI
  source 1..1431: mol_type = other DNA
atgatttattttgtgaaagataagaatggtaaacgtggtcatccgacaagacgtgcagattacataactaaacatttaaaacgtggtactgctaagataattagtcgtactaaagatagcttaacagtaaaactattggatattgaatttaaagatgaagatactattgacgctgaatttagagtaggtattgatcctggtacaaatcatattggatttgctctatataaaatttataaacaaaatattactttgttaataagtggtgaagcagatattagaagtactgatataactaagaatcttattaatcggaagatgtatcgtaatactagacggagatatcgtagaaaaaacgttcttcgtaaatatggaaaagctaagtttcgtaaaccaatttggaaaaacagaaaacgtaaacattttcaacctactttcaagcatttaattaacacacatattaatgtaattaaatatttcttaaatcgatgttcaattaataaagtacatattgaatatgctaaatttgatactcaaaaaatggttaatccaaacattaaatctatttggtatcaacatggaccacaatacatgtttgaaaatactaaatcttatatccgtagtcgagataattatacttgtcagatatgtaataaaaattgtcttgattataatgaagtacatcatattatatggcaagaatatggtggatctgataaaccagataatcttatattactttgtccaatttgtcataagaaagtgcataaaaatcttgttaaatgtccttctattccaactcagaatcttaaacaagcaggtcttcttaattcatgtatgaaatatatatttatgatatttgagaaaagtgtaccgactcaggatactcttggaagtattacaaaaatagtaagaattaattctggaatagagaaaactcatgaaaatgatgctaaaattatagcgttatgtgatagtcttgatttacaagatattgaaaattataaatatatcgacttaaataatcatgtaacagttaaacaatatcgtagacatgatcgagcttgggtaaaaagatatgaagatcgtaaatactatattactggacaaggtaaaaaagtatttgctcataatcgtagtaaatcaactgttcaaaaaactcgtggattagatgagttaaaacaagaattaaaaaaacgtggtataattaataagattcaaattattgctaagcctggtggtccaatatattgtcggggcaatattaataaacgatttattcctggtcaattaattaattataatggagatattgatatctgccgaggttgggcgtctacacaatgcaaagtaatacttgaaaataatggatatgttaaacaaaaattatgcaaagtaattcgtaataatagtggattagtgtttgtttag

SEQ ID NO: 1622 - DNA, 276 bp, unidentified
  misc_feature 1..276: note = Ga0376513_002019 JGI
  source 1..276: mol_type = other DNA
gtcaactaccgggtgcttagcacccggcatacagatgtgggcatagtccacataagtaatgctagttaaatactagggttgaacagacaatttagctaaagtttacttcagggtgccactcccagctctgaacacactttaaaactagaggtaaaaagaatatagtgtaaatcctcatcgctgactattaggtaacgaagatcagtgctactttagctaaagtcgagggagacgtaatgcaagtttctcagatcagaggaaaattttaaaatgatt

SEQ ID NO: 1623 - DNA, 1008 bp, unidentified
  misc_feature 1..1008: note = Ga0071116_1000899 JGI
  source 1..1008: mol_type = other DNA
atgttcgtaccaacaataaacaaccaaggcattccggcaatgccaacaacgccccaaagagcaaggaggcttatatgctctaaatctgctactccattctggagtcacggcattttctgtattcgactaaacgtagatgtgcaagacaataaacaagatatagccatcggtatagacacaggtagtaaaaaggaaggctttagcgtgtgctctaaaaagcacacgtacctaaatattcaggcagatgcattgacctacgtaaaagctaaagtagaaacccgtagaatgcttcgccggagtcgcaggagccgaaatactccatatcgcaagtgccgatggaatagaaagataggaagactaccgccttcgaccaaagctcgatgggattggaaactgcggattgttaatattctaaggcgagtaatacctcttactcactcttgcgtcgaagacattaaagccaaggccaagaaaagaaaaaggaagtggaacatatcgtttagtcctattgaagttgggaagaaatacttctataatgcacttgattcgacactaaagctaaaagtaattggtggaactaagacggctaagctacgaaaggaagccggactcaagaaaaacaagaaaaaactgagcgaaaagttcgagactcactgcgttgatgcgtttgtgttagcgtgtcatatcatttggcgacctataattccggacaataaagtcatcctttgcgtttcgccaatagaattaaaacgcagaatgctacatgccatggtgccttcaaaaggaggaactcgaagaaaatacggaggaacaagatcattaggactaaaacgtgggagtttagtcaaacataaaaaacacggaatatgctacgttggcggcaccatgaaaaatcgaatctcactacataaccttaatactggtaaacggttatgccgaaatgctaagccagaagaatgtaagaaactaacatttaatacatggaggcggcattcctacaatggataa

SEQ ID NO: 1624 - DNA, 179 bp, unidentified
  misc_feature 1..179: note = Ga0071116_1000899 JGI
  source 1..179: mol_type = other DNA
atcagtaacccacgactaaagttatgggtctgtctgaaaggaactaaccacttctggaggatggattaaaccactgattagacgcatgatttcacggtgaaatcaagctagccaactggacgtggtagtccgaagaatatgcaggatgctcctcaagtcctgcttcccttcgttggcca

SEQ ID NO: 1625 - DNA, 639 bp, unidentified
  misc_feature 1..639: note = Ga0134388_1000763 | JGI
  variation 141..150: note = n represents any nucleotide
  source 1..639: mol_type = other DNA
atgctgaaggcgggcaaggccgtcgtcgtgcgtcgaacgccgttcacgatcaagctgaccatcgccacaggcgagacgaagcaggacgtgacgcttggcgtcgatgcaggcgcaaggcacgttggcatttccgccacgacnnnnnnnnnncgacaggacatcacgggacttctggccgatcgtctggcattccgacgtgcaaggcgcaatcgaaagacgcgctaccgctccccgcgcttcaacaatcgcgttcgatcaaagcacaagggatggcttgcgtcgtccgtcgaaaaccgcattcaggcgcacatgtcgcgcatcgatgcggtctgcagactgcttcccgtcaccaagatcgtgattgaggcggcatcgttcgacgttcagaagatcaagaatccgactattgaaggcacggactatcagcagggcgaccagcttggattctggaacgtgcgcgagtacgttcttttcagagacggtcatgtttgccagcactgtcatggtcgttcgagggacaagatcctcaacgtgcatcatcttgagagtcggaaaacgggcggtgatgcgccaaacaacctgatcacgctgtgcgagacatgccacaaggcttatcacgcaggaaagatcaagttgaag

SEQ ID NO: 1626 - DNA, 300 bp, unidentified; identical to SEQ ID NO: 995
  misc_feature 1..300: note = Ga0134388_1000763 | JGI
  source 1..300: mol_type = other DNA

SEQ ID NO: 1627 - DNA, 1149 bp, unidentified
  misc_feature 1..1149: note = human gut metagenome genome assembly, contig: NODE_4209_length_4046_cov_2.370370, whole genome shotgun sequence WGS
  source 1..1149: mol_type = other DNA
atgctcacgaacgagcgctctcgccatgacgactgccgagcgtaccgccggacgcgcagaaaccgcctgcggtatcgggctgcacggttcaataaccgtgtatcaggcaaaaagcccggttggattgctccgtctctggacaacaaggtggagcggcacctggatattatctcccgttatctgtctgtcatgcctgtcacggatgtctttatcaaggccgcgacatacgatacacagctccttgcggcgctggaggcaggggaacctgtcccgcagggcaaggactatcagcatggaccgcagtacggctacgatacgctgcgggaagcggtctttgaacgggaccactatacctgtgtgtattgcaagagaggcctgaaagacggcgctatccttcatgtccatcacgcctactactggaagggtctgcatgggaacagcatgagggagcttgcgacctgctgcgagaagtgcaacacacctgccaatcacaaggagggcgggaagctgtggggcttcgataagcctctgcggaaatataccggcgaagcgtttatgaatagcgtgcgctggattctctatcagcgtgcgatggctcgcttccagggtgttgcggaagtacacatgacctatggcgtcatctccaagcgcgtccgcaccaacctcggcctcccgtattcctgcgctacggatgcctactgcatgggcgagctgcgtccggaagccagatgcgaaacagaggtcttccagaaatacaggcgaaacaacagagtcctatccaaattctatgacgccaaatattacgacacacgggaaaagggagttatccgttctggcaacgagctgtcctccggcaggacgaaccgcaatcataaccttgacggcgaaaatctgcgccggttccgtggctgtaagaagtcaaagggccgaacctcgaccagaaagcagagatatgccatgcagccgggagatatcgtggtctacggcaatcgcaaatacgtttccaagggctgctccagctatggcagggcattaagcctactcacggatggaaagccgcttatggtcagcatgaagaaaatccagcttgttcgtcataagggcggctgggtgcggcttccccatgcagcagccgaggcaaaaaaataa

SEQ ID NO: 1628 - DNA, 318 bp, unidentified
  misc_feature 1..318: note = human gut metagenome genome assembly, contig: NODE_4209_length_4046_cov_2.370370, whole genome shotgun sequence WGS
  source 1..318: mol_type = other DNA
gtgcgtaccatcaaacccggtatatccttggcgatgtggaccacagtaacgccgcgtgagcggtaagtgctgatttacctttttggtttgtcgtttggaatatactcggcaaactcaacttcagttgacgtcccccaccaaatgacagggagctataccgtacgattaaattgcaatccggattgacaggttgacgtcccccaccaaatgacaggtagctataccgcagccccccccgcaaacggagcatcacgcacagttgacgtcccccaccgaatgacaggaaactgcacccgcagcgtgaaaggaaaaaataag

SEQ ID NO: 1629 - DNA, 705 bp, unidentified
  source 1..705: mol_type = other DNA; note = Ruminococcaceae bacterium
gtgaaagtatacgtgataagcaaaagcggcaaagcgttaatgccgacgaagccgggcagggcgcgaaaaatgttaagggacgggaaagcgaaagtagagcagcgaacgccgtttacgattcggttgatggtagaaacgaaggaatacacgcagccgataacgttagggatagacgcggggagcaagacggtcggcgcctcggcgacgacagaagcagaagaggtgtacagttccgaaacagagcagagagacgacatagcggaattaatagcgacaaggttagaatatcggcgggcgaggcgcaagcgaaagaggcggtacagaaaaccacggtttcaaaacagggtaaaagcgaagaagcgcgggtggatagcgccgagtatacggcaaaaaatcgaaagccacttgaaaataatagcgagcgtgtgcaaaatattgccaataagcaaaatagtaatagaagcggcggcgttcgacatacagaaaatcaagaacccggagataagcggcgcggagtatcagcaaggcaatcagcttgatttctggaatgtgcgtgaatatgtgttgtaccgtgacgggcacaaatgccaaggcaaaaaaggctgcgcaaacaagatactgaacgtccaccatatcgagagccggaaaacgggcggagacgcgccaaacaatctgataacactatgcgaggagtgtcacaatgcg

SEQ ID NO: 1630 - DNA, 247 bp, unidentified
  source 1..247: mol_type = other DNA; note = Ruminococcaceae bacterium
gtcaacaacccacaactaaagtatggggcttgcggcgaaaacggtaagtcaggttgactactctaagccaggagaggctacgttatacaagaatatatataggcacttgcggatgtatgctcaagtctgcaacactgcggcgcgtgattaaacagtcctgaagggtagggagagtgttgcgcgtgaaaaccttgtaataacattgaggatgggcaactaactctgaaaggagaattatacagtgaaa

SEQ ID NO: 1631 - DNA, 1206 bp, unidentified
  misc_feature 1..1206: note = SL_8KL_010_SEDDRAFT_10000047 JGI
  source 1..1206: mol_type = other DNA
atgagtaaaaaagtttacgtgcaggacaaaaacggcgatcctttgatgccgacaaaaccggcaaaagcaaagcatatgctgaacgacggtagagctgaagtagtccaacgctcccctttcacgatccagctaacatacgagatcgaaggagaaaagaacaaacaagaggtggaactcggtctggacccgggctataccaagacagggttttcagcaaaagtggaagacaaagaactgatcaatgggacgatggatacggacaccaacgtgtccgacagattaacagaaagaagaaaatacaggaaaaaccggagaaacaggaatacaaggtacagagaaccaaggttcgacaacaggaaacgtgataacggctggttggcaccgtccatacagcacagattagatatgcacagacaactggtcgacgagatcaaaaagatactgcccgtcgataaagtagtagtagaagtcgcaaagttcgaccaacaaaaaatacaagatcccgaaatcgaaggtgtcgagtaccagcacggcaccttacagggatacaacgtcaaacactacctgttagagaaattcgactaccaatgtgtctactgcggtgcggaggacgtacctctcgaagtcgaacacatcgtgcctgattcgcgtggaggtaccgaccgcgtggacaacctcactatctcctgtcacgattgcaaccaggaaaaaggtgacagaacagcagcagagttcggctaccctgaagtgcaggaacagacaaaagaaacactgaaagaaaccgccttcatgaatcaagtaaggtggcaactgacggaagaactcgacgctgaaccaacttatggccatgtcaccaagaagaaacgaaaggaattggacctcaaaaagtcacacgtcaatgacgctttcgtgatcgcaggcgctgacggcaccgaagagcggtgtgaaccattcaaagtcgagcagcgcagaagaaacaaccgcaaactgcagttgaataggagcggcttcggtaggagtgtgaggaaacaacgttaccctatacaaccgggcgacacgataaaaaagaatgggcaagaaaaagtagctaaaggaacattacactatggtcagtacgtgcgggtagatgataatgatggttactctgactggaaaacagaagatgtgaaagtggtaacgtatggtaaaggattacagttcaactaa

SEQ ID NO: 1632 - DNA, 324 bp, unidentified
  misc_feature 1..324: note = SL_8KL_010_SEDDRAFT_10000047 JGI
  source 1..324: mol_type = other DNA
gtcaacaacccgcaccccagaggggtggggcttgaaaaagtcctaatacgcgggttggagattagcccaagcgatgtctcctcgaaggtggaggcagatgagctacgttcgggactgagtgttcgatatacaccccgggatgcccctcaagtcccgggcactggaagagtagagtggacgaaacacgtcacaatcccaacggcgtgcaacatcacctgctccaacacctgtcccaacatgggcgatgaggacctacctgtttgacataacagggctgagaacctcagcgtcaaaatatgtcaggaacgaaacatgagtaaaaaa

SEQ ID NO: 1633 - DNA, 1458 bp, unidentified
  misc_feature 1..1458: note = Ga0137415_10000002 JGI
  source 1..1458: mol_type = other DNA
gtgataagtagtagtcaacttaagataacattggcgagagtgactaacaagtcccttacgggattattggaatttttgatggaaaagaaacagaataatggaagacgtatcgttatctcaaaatcaggtcgagtaaaagttaaaccaattacttttgttagtgtaattggaagtgatggtaaaccactaatgccatgtagtggcaaaagtgcaaggaaacttttagataaaggtcgtgcgaaggtaattcgtagagaaccgttcattattcaattacttgatcgaacacaaatcaattgtaaattacaacctacacaaattaaaattgatcctggtagtaaaacaaccggattagctatcgtgcgtgaagatagaccaaacgaaattacagttattcgtttaatggaattagaacatcgtggccgtgttattaaattaaaactttataatcgagctatgcatcgccgtaacaggcgttcgcgtaaaacacgttatcgtgaagctcgtttcttaaatcgtactagaccacaaggatggttacctccttctatccaacatcgtattgatagcacgatgtcttgggttaatcgacttagacgatggtttccaattactaaaattgtttatgaggatgttaagttcgatacacaactggctcaaaatactcatttagaaggcataatgtatcaacaaggtacattattaggatacgaacttcgtgaatatttattacttaaattcgatcataaatgtgcttactgcggaaatgggtgttctaaaggttttcaaatagatcacgtaattcctcgtagtagaggtggatctaatcgtttgattaatttagttcttgcttgcaaagagtgtaatcaaactaaaggtaataaaagttatcaagagttcttaaattttaatcaaattaagatagataaatttaagaaacaaatattaaaacctcttcgagatatggcggttatgaacgctatacgaaatgaacttagattagcacttattaaaactggtttattaattgaaactggaagtggtgggttaacgaaatttaatagattacgttttaaaatacccaaaactcatgctctagatgctatttgtattggttatatagttaaaatacatggatggattcataaaacattacatataaaatgtaatggtagaggtagatatcaaagagcaatacctgaccaatatggttttattaaagcttatatacctagacagaaatatttctttggattcagaacaggtgatcttgttcgtgtaagatcttctatcaaatctggtattaacccaccactttggtcaaaggtcagtcgtgtagtatgccgagcttctggtaagtttgtttttaaaataaatgaaaagatttatcaaccttcttatcgatactgtcaacgtgttcaacatatcgatggatatagttacataactgttatataa

SEQ ID NO: 1634 - DNA, 363 bp, unidentified
  misc_feature 1..363: note = Ga0137415_10000002 JGI
  source 1..363: mol_type = other DNA
gtcactgtcgaataccttagctaacctcggaaaacattaaaaatggaaaaaagttcatccactccactttaatacgtgagttgtaagactagatgaatcagcctcagtatgaaaatactacgttattttgatgcatatcttggaatgcccactcagttccaagctctatggtcttatcattaaacaactctgtgagataggagtagtgtgataagtagtagtcaacttaagataacattggcgagagtgactaacaagtcccttacgggattattggaatttttgatggaaaagaaacagaataatggaagacgtatcgttatctcaaaatcaggtcgagtaaaagttaaaccaattactttt

SEQ ID NO: 1635 - DNA, 1191 bp, unidentified
  misc_feature 1..1191: note = Ga0256842_1002984 JGI
  source 1..1191: mol_type = other DNA
atgccaattaaacagataaaagtttttgtagtggatgcagaagagaaaccgctgctacctactacacctgcaagggcaagaatacttctaaagaagggtaaagctaaggtttacagaatgattccctttaccattcagttaagcaaggttattaacgaccctgctggaaaatttactgcctctgttgatgatggagctaaatgggtaggaattgctgtaaaagggaaagatgaaattgtttttgtagctaatgtgagactcaggcaagatgtaggcagaaaagtcaaagaaagagcaatgtatcgtagaaacagaaggagcaggttaaagtatagacctgcaaggtttttgaacaggaagagagctaaagactggctaccaccgtctatcagatatagaaaagaagttgttttgagaatcctcaatgacttaaagaaatttctcaacattacggaagttgttattgaacaggtcagatttgacatttcttctcttgtagctggaagaaaacttgtaggagcagaattccaacagaaaagatatgaaggaagaagctttagagaaaaagttcttaaaagagacaattacacctgtcagatttgtggaatcaaagagaatcttgaagctcatcacataattccaaaaagcaaaggaggaacgaatcttgtagagaatggaattaccctctgtaaggactgtcacagagcagttcatgaaggaaagataaaaataactgctaatattcttttcttaaaagctccatcagcaattcagcaaggaaagtggtggttatacaggaagttaaaggaacagtttaaaaaagtagaaataacttttggttatctaacaaagaagaagagagaaaaactcaatcttcctaaggaccattatgcagatgcttgtgcaatgcttaactgcaatcatgtagtttctcctgtttatctcctccttccacgaagaaggagacctgagataaacaactccacaaagaagcatgaagaatatagaggattcagacactttgatcttgtagttgcttatcatagaactaaagggaaggtgatagggtgtgtgaggagtttaaagaaaagagggttagctttaagaactaagttttcaaataactttgtagttggatacacgaaaagcagactactctggagaccaaaagggttagtgtatgtgttgtga

SEQ ID NO: 1636 - DNA, 318 bp, unidentified
  misc_feature 1..318: note = Ga0256842_1002984 JGI
  source 1..318: mol_type = other DNA
agttttcattacggtttggatgggtctgaggtggaggtagtcctgatgaaggataagctgaacctgccgaacaggaaggtaggaggtgaagaggagagggaattcctttcccgctacctacgttctgtagttgtccataaggacagacaccctggagtggagcaccagctccaggctctgttggtggtgggagacgaaactcagcctgagatggtgttggtgaacactctcatcactgttagagactacgggacttcaccgaggtgcagtttaacccctttatgggaggtagcttaaatgccaattaaacagataaaa

SEQ ID NO: 1637 - DNA, 1398 bp, unidentified
  misc_feature 1..1398: note = Ga0209777_10021516 JGI
  source 1..1398: mol_type = other DNA
atgcagaagttacaaggaaagtttaagaacacaccaaaggatgcttcccaagtcccttgctctgtaaattttcaattaaacagagacgaaagtctcagtgctgagaataaagtactgacttgtaacaatcccgaagggaatctagtccagcatacaggacgctcattaaaagcaattgtgtatgtattaaacaaagagggaaaacccttaatgccttgtagttttgcaaagtctaaaagattggtaaaaaaaggaggcgcaaatgttgtaaaaagatttcctttcacaattcaaattaattttgaatgtaaggaagagattcagtccgttattttaggaattgatcctggatatcagaatgtaggtatttctgctaggactaccaagaaagaattgataagagtagaagtacagttaagaacagatatcaataaaaaacttacagaaaaaagaatgtacagaaagaatagaagaaacaaactttggtacagacaaccaaggtggtcaaatagagttgctacaaaaaaacaaggttggttggctccttctgtgcagcacaaattggattctcatataagattagtaaagagaatctgtaaattgcttcctgtatcaaaaataattgtagaagtggcaaattttgatattcagaaaattaataatccagatatttctggagtagaataccaacaaggctccttgctaggatatgaaaacagcaagtcttacttaattgctagagaaggaaagtgtcagttgtgtaataaagaatccactaaaggaaatccttttaaaatacatcatataatacaaagaaaagatgggggcactaatagcccttctaatctagctttactgcataaaaaatgtcatgataaattacatgagcaaggattaaaactaaaagcaagtaagcaatttaaggcagagacttttatgtccacagtaagatggaaaatagtagaagaattaaagaatcttcccactagtattacttttggatatattacaaaagtaaaaaggcaggaaagtaatattgaaaagtctcattccaatgatgcctttataatttctgagggaaaagaccaagaaagagctgtgtgcctcaatattaaacaaaaaagaaagaataatagatgtctacaattaaatagaaaaggcttccagccttctattagaaaacaaagataccccatacaacctaacgatttagtaaaaataaatgggaaaattgctctttcaggaggagtacactgtaaaggtaaaagaattattgtaaacggaaaaagtgtcaatataagtttattagataaatggaaatttaattttggaagttttatgggggcagcaattcctcccacatctaaagatgtgggtttccttgctgcgaatttatga

SEQ ID NO: 1638 - DNA, 259 bp, unidentified
  misc_feature 1..259: note = Ga0209777_10021516 JGI
  source 1..259: mol_type = other DNA
gtcaactacccacgactaaagtcgtgggcttgtcaggtgactggtaacgtaagagttgattagggagcttaaaggaaactttatgcagaagttacaaggaaagtttaagaacacaccaaaggatgcttcccaagtcccttgctctgtaaattttcaattaaacagagacgaaagtctcagtgctgagaataaagtactgacttgtaacaatcccgaagggaatctagtccagcatacaggacgctcattaaaagcaatt

SEQ ID NO: 1639 - DNA, 1311 bp, unidentified
  misc_feature 1..1311: note = human oral metagenome genome assembly, contig: NODE_138_length_60038_cov_8.947085, whole genome shotgun sequence WGS
  source 1..1311: mol_type = other DNA
atgacaaaaacactaaccaaacaaacaacgcaagcttgcgtgttagatcaacaaggtaaaccgttaatgccaacgacacgtcttggcaaagtttatcgccttttaaaaacacaaaaagctcatattgtgtcatatgaaccgttcacaatccaattggattatgaacctgacacacacattattcaaccgatgacactcggcgttgatagtggtgctattcattcaggttattctgtaactaataaaaaccgtgaatactatagtgctgaagtcatcgcacgtaataatatttctaaacgtcttttagatagacgtatgtaccgcaaaaatcgtcggtctagaaaaacacgttaccgcaaaccacgatttaaaaatcgtaaaaacaaaaaaaaaggttggttaccaccatcacttgaacaaaaagttgcagtacaagtaaacgaaattgaccacttacatcactattttcctattgaaacaatcattgttgaagtcgctgaatttgatattcaaaaaatcaaaaatcctgatattgcaggcattgaataccaacaaggaaccttacaaggttataacatccgtaactatcttcttgaaaagcatggacgcaaatgtttctattgtggaaaaagcgtttctaagttcgaagttgaacacatgataccaaaaacaagaggtggctctgatcgtattgataatctaaccttatcttgtcatgactgtaatcaaaaaaaagatacattgaccgcagaagaatttattcgacaaaccttaccacctaaaaaagcagctaaaaagttaaaacaattgcctaatgaaaaacgtctgtttaaatacatggcacacatgaacgctaccagatgggctttatacaatgctattgacgaaaaatatccaaatgtcaaaataacttatggctacattacaaaatacaaccgtattcaagcaggtcttccaaaagctcaccacattgacgctaaatgtattactgatttttcaaccgttccatctataaaacaaactgttattaaaataaaaatgcgtagacacaatcgtcaattacatcaattgactttcagcaaaggacatatacgcaaggcagcaagtttaccaacaattatcttcggttttcagttatatgacctcgtgttatttgataatcattattattatattaaaagccgtcgaagttcaggatcatttgaccttacttctatagaaggtttaaaaaatacaaatcgaagttacaaaaaattaacattattagcacatacaaatgcatatctaactaacagatacactaatgactaa

SEQ ID NO: 1640 - DNA, 343 bp, unidentified
  misc_feature 1..343: note = human oral metagenome genome assembly, contig: NODE_138_length_60038_cov_8.947085, whole genome shotgun sequence WGS
  source 1..343: mol_type = other DNA
agctagatcaataaccacccactgaaatgggcggtttaattaacttctttacaatgagttaatcaaaccgtgattgattagccttagtttttttaaaactccgttacttgtaaatatataggtaccgtgggatatctgcctagtcccacgctctacgcgttattattaaatagttctgattggtaggaaccgtgtgataacgataaaaaactacaagataacattggcgaaggcaacaaagggtttgtttatacccgcttaccgcatcaaataaacaccaaatcaactagaaaggactttgtcaaaacatatgacaaaaacactaaccaaacaaacaacgcaa

SEQ ID NO: 1641 - DNA, 1347 bp, unidentified
  misc_feature 1..1347: note = Ga0167622_1004112 JGI
  source 1..1347: mol_type = other DNA
atggttttcgtcctcgcaaaaaataaacacccgctcatgccgtgctccgaaaaacgcgcgcgcctcctccttcaacgtgggcgggcacgcattcacacgctctacccattcacgatccgtctcatcgatcgcactaccggcgttctgcaaccaatcgcgctaaaaatcgatcccggctccaaaacaaccggtatcgccctcttgcgagagcagtgcgaggacgccaatgtactgttcttggcagacctcgcgcaccgcggaagcgctatttccaagaagatccacgagcgagcagggtatcggcgtcggcgccgctccgcaaacctccgctaccgcgcgccacgattaaataaccgcacgcgaaaggcgggttggctcgcgccctcgctccagcaccgaattgacagtacgttctcgtgggccaggaaactccaagcacgcgcgcccatcacctccttggcgcaagagcttgtcaggttcgatacccaggtaatacaaaatgctgaaatctccggaactgcatatcagcgcgggaccctctacgaatacgaagcacgcgaatatatcttcgagaaattcggacgccaatgcagctactgcgacacgaaaacgggaccattgaacctcgatcacgtccaacccaaaagccgcggcggatcgaaccgcgtcgcaaacctcgtaccagcatgcatcccgtgcaatacatccaaggggagccagcctatagaacaattccttagccacgacccgcttcgactcgcacgcatccgtaaccagctaaagacgccccttaaggacgccgcggctgtcaatgctactcgctgggcgcttttccaagcactgtcaagcctcgcgctaccactccaagcgggaacaggcgggcaaacaaaatttaatcgtaaacggtatgacctgccaaaaacgcatacgtttgatgccgtctgtgttggcatgatggacaccgtcgtcacgatcagcaacagcaacagagcaattctcgtaatcacttgtatgggacgcgggagctatcaacgcacgcgcgtcaccgccaatggtttcccacgaggatatcttatgcgcggcaagcgggcgcgcggatttgctacaggcgatctcgttatagcatcggtaccaaaaggcaagcacaccggcacccatacgggacgcgttgccgtacgggcaacagggtcattcaatatacagaagagtaatgacgtccttcaaggcattagcgtacgacacgtccgccttctgcagcgcaacgatggataccgatattgtctctccccctccagcgaaaggacgccgctcctcctcggcctgaacgccgaggtctccgcagcgtaa

SEQ ID NO: 1642 - DNA, 284 bp, unidentified
  misc_feature 1..284: note = Ga0167622_1004112 JGI
  source 1..284: mol_type = other DNA
gtaaactaccccggcctaaaggccggagctttctgaaagggacgctcatatttaccagggttggcgtgatgtagatcacgctccgttagagacaggtttaagaccgacgttgggatgcttcctcagttccaacctctcgaagttgcagtagcagacacgccgggtaaggcacgaaacggattgcaacaaaacgccgatctctaacattcccgaggggagcgagcccgcaaggctccgttacaaggctcttacgagcaaacacaaatagaaaggagtacgtcatg

SEQ ID NO: 1643 - DNA, 1323 bp, unidentified
  misc_feature 1..1323: note = Draft_10008528 JGI
  source 1..1323: mol_type = other DNA
atgaaaaatcgtgttttcgtggtggatcgccaccacgatcctttaatgccgtgctctgcaaaacgggcacggctactgcttcaacgcgggcgtgcccgcgtccatcgtttcaaaccgtttactattcgcttggtcgatcgcctccaggcgtcgtcggcgctacagcctgttaccgtcaagattgatcctggtagtcggtatacagggattgtagtggctcgtggcgccgataggcgtttcacgcatctccatgggctgtttctgatggagctggagcatcgcgggctgcggatcgcagcagccctccgtcaacgagccgcactgcgtcggaatcggcgcagtcgtaaaacacgctaccggcctgtacggttctcgaaccgcactcgcccagcgggctggttagccccatcgttgcttcatcgagtccagtcgacattgacgtgggtgcagcgactgcaccgctgggtacctgtgaccgcattggcgcaggagctggttcgcttcgacacgcagcgcatgcagaatcctgaaatctctggtgttgagtaccagcaagggacgctactagggtacgagattcgtgagtacctgatggccaaataccggggctgttgcgtgtattgcggtcgtaatgcgaaggacgtagagatacagattgaccacgttcgaccacgggcgcgtggcgggtcgaatcgcgtgagcaatctcgtactggcttgttggcgctgtaatcagtcgaagggtgctcgacctgtagaggagtttctctcagggcgacccgaggcgctgaaaagggtgctagcgggactgcgtcaaccgctacgggatgctgccgcggtcaacgccacgcgctggtgcctgtaccgtcgattactgggaacggggctccccgtccaaaccgggagcggtgcccaaacgaagtggaatcggactcggtttggattaccgaaaacccatgcgttggatgcgttgtgtgttggagaagtggtatctgtggcagatacaccgggccatgcgatgccggttcaatgcgcgggaaggggactttaccagagaactataacggaccgtttcgggttcccgtcgcggcaccggatgcgccagaagcttgtttcaggcttcaaaggtggtgacatttgctctactgtcatttcactacgtagaccaaaagcgatgttaggacacatcaccctgcgcctaaggggcgttttcagtttttatgacatcagtagtaagcttcctcacgatcgtaattttaggtttttgcgtagagttgcgatcagtgatggatttcgttattttaccaagaagggagatctgtga

SEQ ID NO: 1644 - DNA, 298 bp, unidentified
  misc_feature 1..298: note = Draft_10008528 JGI
  source 1..298: mol_type = other DNA
gtcattcatcgtaaataaaaaggagattcacaatgatcaaagttggtatcagcttccaaacctaagcacttaaggaagccagactcagtctcccgtaaaacggaggctacgataccccagaaataggtaccggcggatgcctcctcagtccgccgctctacggctagtcattaaacagctctacgggtttaaggcagtgtggctagcgccaaacctggggatatctttgtcgagaggagcccggctctagaagccggcgtcacatcgttccgtaaggaaaacccacatgaaaaatcgt

SEQ ID NO: 1645 - DNA, 1251 bp, unidentified
  misc_feature 1..1251: note = Ga0315284_10052402 JGI
  source 1..1251: mol_type = other DNA
gtggttctcggccctaaaggcagcaaaaccaaggagattttgaagttggtatatgtagttaacaaaaatggaaaccccttgatgccttgtaaggaggcaaaagctaggcatctgctaaaaagcggtaaggctagagttttacttaggtgcccttttacaatttgtctcaattgggaatgcgaagagggtgtacaagaggttgtagcttcactgataacaagtagtagtgaggtaggagtagctgttaagcgcgatagtggggagtgcctttacgctgctgaaatagaactcagacaaaacgtaacaagagctaccgttcaaattgtaaaaggtaaaaagaagaaagtttcacgaagaatgcagtataggagaccacgtaggaatagaaaaactaggtatagacagtgtagaaataggaatagaactggtaactatcgtcaaaagtattcgccaacacttaggagtaaaattgaagggcatgagagagaagtacgtagggtagaaaagctgttaccagtaacacggtggttagtggttagaggtgcaaaggttgaaggccattttaaggatggcagtctggaagaacagtggttaaatgttcagcgacaggtgtttgagagagatggtttccggtgtcgtcactgtaaaaaaggtaagagagaacttcatgctcaccatttagaagcacgtaaggatggcggtcttgatactctagaaaacttagtaacgctgtgtaaggagtgtcatggggattatcatcgaggtcttatatctttaaagataggtaaacatacttataaaggtaaagttgatacagaagtagctataataagaaagaatttagtggtggaaaagtcggaagacgtttacggctttcaagtaaaagctaaaagaaatgcactagaactatcttattcaccacttaatgatgcttgtgcggctcttaatgttaaaccatcgactaatgtttatggtattaggtgtatccctagaggggattaccaaagaactcgtggtcgtcactctcaacaagtagttcctaaggggaaaataatgggttttaaccgttttgataaggtacgatatttgggaaaggcactttttattaaaatgcgaatgagtacggggtattttaaattaacagatataaataataaagatataccaaaagtaatactaggaagaaaactgaagcttttaggaaggagaagatcctgtcttattgctttgaccaccccaacctccccctaa

SEQ ID NO: 1646 - DNA, 328 bp, unidentified
  misc_feature 1..328: note = Ga0315284_10052402 JGI
  source 1..328: mol_type = other DNA
gtgaacctcccctccctaaagggaggggcttctgaagtgatttaggagggtaacaggttcaccagactcggttctaagaaattagaactccgttatttagcatgtagaaaccctagaatgccgcctcagttctaggctctttcgtggcactgtaaacagacttggttttctatggaaaaagaaacgtgagtcagtcaaccacaaggtgaaggctaaataacattgtcgagaggaagtccgtggtttttaggtggttatagtctaaaaacaggcataacgagtggttctcggccctaaaggcagcaaaaccaaggagattttgaagttg

SEQ ID NO: 1647 - DNA, 1314 bp, unidentified
  misc_feature 1..1314: note = Ga0207193_1000837 JGI
  source 1..1314: mol_type = other DNA
ttgcatagaaaaacagtaaaaccatcaaacagtgtgtttgttctgaataaagacaaacagcctctttctccctgtcaccctgctagagctagggagttgttagacaagaagaaagcatcagtctttagactttatccattcacaattatactcaaaactcaaaagaagaacccaaagtttcaagatactagggttaagatagacccaggttctagaactacaggcatagctttaatcatagaaggagagaagaaagggtggtttctaatttgggctgcaaacctagagcataggggtcatgctatagttaagaaactcatctctagaagacaacaaagaagatctagaagaaacagaaaaactaggtacagacaaccaagattctcaaacaggaaacactcaaaacccaaaggttggcttcctccttctttactttctagagttaacaatgttacaaccattgttaagagaattcagaagttctgctacgttgaatcctgtactgtagaaactgtgaagtttgacacacaaaagatgcaaaattctgagattaaaggaattgagtatcaacaaggagaactacaagggtacgaagttaaagagtatcttctagagaagtacaagagaacttgtatttactgtggaaaaactgatgtaccactagaagtagaacacattgtacctaaatctaaaaatggaagtaacagagtttctaatttagcgatagcgtgccacttctgtaatcaaaagaaaggaaataagaacctagaagaattcttaaagaagaaacctgatattttaaaatctgttaaaagtgagttaaagaagagtctatctgatgttgctgctgtaaactctactagaaagaagataaaagaagagttaaagaagctaataatagaaacttctttctccaaaggatacattacaaaatacaacaggcttaaacaaaaatacaagaaagatcactggatagatgcagcttgtgtaggaaagtattctggaattgaagtgtttattcctaaaaggtttaaacctataataataaaggctaatggaagaggccatcgtagattctgctctatggataaatatgggttccctaagtctaaacctagacagagaagaaaacagatagagggagtacaatctaacgatacagtgagggctactcacaagaaaggtacttttgtaggcagagtaggattgtctaacgaccaatttacaatgaaagtagaaacagggtacattagatttaatgctagcgactgtaaaattctacacaaggaggatggatatgtttatagtgtttaa

SEQ ID NO: 1648 - DNA, 333 bp, unidentified
  misc_feature 1..333: note = Ga0207193_1000837 JGI
  source 1..333: mol_type = other DNA
attgattataatgatccaaaaaatcacttacctttaaaaagggtcacttaccaaggggcaagccccttggcttttgaccagactcagtgcatctagatgcactacgttatgagagaatatataggtactagtgggtgcttctccagcccatctgctctacgcttggattttaaacagatatgggagatatatgtttagcaacgttaactcttatgcagtgagttcaagatacaaaacctctcattaacattgtcgaggagaacttaacagctacgtgctagatttaggaggaatcctaccttgcatagaaaaacagtaaaaccatcaaacagt

SEQ ID NO: 1649 - DNA, 1020 bp, unidentified
  misc_feature 1..1020: note = Ga0180732_1000047 JGI
  source 1..1020: mol_type = other DNA
atgcagaagtctgtaccagtgatcagcgcgacagggaaaccattaatgccgactaataattatcgcgcgaacgaactgataaaaaagaacagagcaaaacgccgtttcaaggctgggattttttatatcaagttaatccagcgtactgatggtgtaacgcaggacattgtggtaggaatcgatcctggcagcaagagagaagcgttcacggtgaaatcagaattacatacttacttaaacattttaagtaattctgtttcatgggtaaaagaagcggtagaaacaaggagaaacgcgagaaaagtacggagatataggacaactccatgcaggaagaataaaaacaatagatctcaaacaacctttttagcaccaagtacaaaagcacgttggcaggcgaagttaaggattgcagtcattctcgcgaagttgtttcctattaagacatttgtagtagaagatataaaagcacctacatttaagaacgctaaaagatggaatacatctttttctccactcgaagtcggtaagaagtggttctataaagaacttgaaaaaattgcaaaagtagaattaaaatctggttacgatacataccaaataagacaggagttaggacttataaagacaggtaataaatcagccgaaattttttccgcgcacaatgtggactcttggtcattggcttggagttcagtgcgaggtggtactgttccagaaaacaaagaaattacaagattaattccaattcagtttcacaggaggcaacttcatcgttttaatttctcaaaaggcggcataagaaaagattatggcagcacaatgtcacttggattaaaacgcggcagccttgtaacacatcctaaatacggtatttgttatgtcggtggcagtagtaaagatagattaagtgtgcataatttagagacaggagaacgattagctcaaaacatagataagaaggatttagtatttctttcttataattactggaggacgacaattcctctgcacacataa

SEQ ID NO: 1650 - DNA, 232 bp, unidentified
  misc_feature 1..232: note = Ga0180732_1000047 JGI
  source 1..232: mol_type = other DNA
gtcaataacccctatttaaaaataggggcttgcgaaagagaagaccaatcatcttagcaggttaaacaattgactacacagctagtaactgaattctctgagcgtggtagctcgaaaagatgtaaagaatgcttcccaagttcttttcctctctgagagtcagtgtggatgggagaaattgtagtaaggttagggtaacttaactaaataataaggagtaataaatgcagaa

SEQ ID NO: 1651 - DNA, 1362 bp, unidentified
  misc_feature 1..1362: note = Ga0256404_1003517 JGI
  source 1..1362: mol_type = other DNA
atgccgaaaccagtattcgtaatagcttctgatggcacagcattgatgccaaccttagctgtaaaagctagaaaactactaaaagccaaaaaagctattattgtaagctacatgccgttcgccattcagcttacatatcaaagtggacacaacacacagccggtggagatttgtatcgacacaggctcggaacatatcggtgtttccgtaaaatcagagaagcatgaatatcttcatgcgcaatttgacaacctcaaggatgagaaacaacgacacgaagcaagagcaatgtatcgtcgcacaagacgaaacagattgcgttatcgcaaaccacgattcaacaatcgaggaattccagaaggttggttagcaccaactgtggagcataagaaaaacaatcacatccagattatcagcaggcttgtaggactcatcccagtgaaagacatatacgttgaggtcggacaattcgatacacatcttatgcaagctcttgagcaaggaataaagcttgaaggagaagattatcaacgtggattgaagtatggtcttgccaacacgagagaagcagtattcgtcagagacaactatacttgccaatgttgtgggaagagtgtaaaagatggagtaattctccgcgtccaccatatagtccatcgaagcaacggtggtagcgattctgctagcaatctgctaacaatatgtaataaatgtcacactccgaagaatcacaaacccggcgggaaattagatggtctaaagcccaaaaattcttctctgaaagatgcaagcttcatgaatgtcgtgcgttggtatattgtcaatgagcttaaagaaaaattcccaggaataggaatccacacaacttatggaagttacaccaaagcttcaagaagagctttaggtcagatagaaaaatctcacgccaacgatgcatatgcaatgggcaactttcacccatcacacagaacacacgaatcagttatcaagaaacatagaagaaacaacagagtcttaagtatattctacgatgctaagtatatagattcacgcaccggagaagttaaaagcggaagcgaattagcgtgtaacagaacaaatcgaagcattccaagaaacaattcgaacaacgagcgaatcttcagaggagataaggtttctaaaggaagagtttccataagaagaaggcattacgaaatacaaccaggggatatattaacttacagaggaaagaaatactcagcagtaggagttcattgtaacggcacaagagtaattttagagacaaagcaatccattaggataacggatttacatattaaaagaaagaaaggagggtggcaattcctctccgccctatag

SEQ ID NO: 1652 - DNA, 341 bp, unidentified
  misc_feature 1..341: note = Ga0256404_1003517 JGI
  source 1..341: mol_type = other DNA
gtcaaccacccaccacttaaattcctaatggaatcctgaagtgggggcttataagccaagcccagttgattagcctcagtgtttcgagaactacgttatgcagtgatgcttaagcaacttacccaggaatgctccacaagttcctggctctaagggtatgtattaaacatctctgatgggtaggagaagtgtgcataccttcaaaacatgcataacattggcgatgtggaccaccctgcatttggcaggagaatccagaaagggcgtaagctctcctggaaggtgtagaccagggcgaaagcctgaaacttaaagaaaggaggcatcaaatgccgaaacca

SEQ ID NO: 1653 - DNA, 618 bp, unidentified
  misc_feature 1..618: note = human gut metagenome genome assembly, contig: NODE_911_length_18023_cov_19.4281, whole genome shotgun sequence WGS
  source 1..618: mol_type = other DNA
atggaaaaacgccggcagcaccggcaggcatccagaagaggagaacaccttgcgaggaaacggctggtcaggagactgggaaccacgatggggaatatcctggaacggctgcttcctggctgtgaaaaaccagttatggtgaaggacatcatcaatacggagtcccgattcaacaaccggcgccgcaaggaagattggctgacgccaacagcaacacagctgttaagaacacatctgaacctggtggaaaaggtatgtcggatccttcccgtcagcgggattgcattggaggccaaccggtttgcatttatggaactggaagcaggcggccatctggaatccggagtggattaccagtgtggacctctttacggatatcgcagtattcgtgaagccctggaagagcttcaggatggaagatgtcttctgtgcggcgaacgtgccattgaacatgaccatcacctggttctcaggtcaaagggtggaagcaacactctggcgaatatggccggcttatgcgaaaaatgtcatacgctggtacatacgaaccaagaagctgcggagaaactggaagccatcaaggcagggagcttctcatttggaaaagcttctgcatag

SEQ ID NO: 1654 - DNA, 211 bp, unidentified
  misc_feature 1..211: note = human gut metagenome genome assembly, contig: NODE_911_length_18023_cov_19.4281, whole genome shotgun sequence WGS
  source 1..211: mol_type = other DNA
gtcaactatccatccgctaaagcgaatgggcttgtaaaagcccagagactttacaggtgagcagttgagcagaaccgtgacgcagcaggttcgccttatcactccgggatgacgccaagtcccggacactgagatgtggctgcgcccaggttatgacaacactacagggacatgttccctggcttatagcaaaggagatacaatgaactat

SEQ ID NO: 1655 - DNA, 309 bp, unidentified
  misc_feature 1..309: note = Ga0255345_1013787 JGI
  source 1..309: mol_type = other DNA
atggtatatgtattaaaccaagacggacaacctcttatgcctactaataggcacggtaaagtaaaacacttacttaaaagtggaaaacctacaggaaagattaaaggttttaaaaaattcgataaggtttcgtattttggaaaggaatatattatcaaaggtcgtatgagcagcggatatgctattcttatggatgctgatggtaacaagatagacttttcagatatgccgaaaggctataagacaccgaaattaagtaatcttaagagaatttctgctcgtaggagtgtgataacaacaatcgcttag

SEQ ID NO: 1656 - DNA, 302 bp, unidentified
  misc_feature 1..302: note = Ga0255345_1013787 JGI
  source 1..302: mol_type = other DNA
atggaatagccctaacttatacgcctgtggacattgtgtaagacattgagttgcgtatcatcgtagccaatgcagtagtggttgaagcaggaagctccgacttcaaatgcgtagcattaagtcggagtagttcacgttaggtcagagtaattatagccttgtgatgtatgtgtaaaaagtctatctatcattgtcgagagcaagaacgattctgtatatggtaacagtatacagatagtcgcaaccactacataagtagtggcattatgtattaagttacatagaaaggagtgccagttatg

SEQ ID NO: 1657 - DNA, 1023 bp, unidentified
  misc_feature 1..1023: note = Ga0376497_007558 JGI
  source 1..1023: mol_type = other DNA
ttgcatagagaactaaagaccaacggcgggatgcttcctcagtcccgtcctcttgaagcccgggttgcagaaggccttgtgtcatcccattgggacaacctacaggggtgtggacgaaacgggtccgggcatacagccgctgtgcaacaatcccgaggggagagttcaaccgatgccagggttgaaccgtcacccgcctttgcggtgaacggcgtaagccgtgtttttgtactcgacaagaacggtgacccgttgatgccgtgccatccggccagagcaagaaagtttctggcacggggccgtgcccgggtccaccagatgtttccatttaccatcagactcgttgaccggatccgggagaacagtgatgtgcagccggttaatgttaaaattgatcccggagccaaaacaaccggcatggccgtggtgagacaggatggtggccatgcccaaatcctgcacctgtcagaactgacacaccggggcgctgtcatccggaagaaactggatcaaagatccaattaccggagaaggcgaagaaccgcaaacctctggtatcggaagaaaagattcgacaacagaacctggcccaaagggtggcttccgccaagtctcagatcacgggtggataacactttatcctgggtgaaaaagtatcaaaggatctgcccggttacaggcattgtcctggaacgggtccggttcgatactcagaagctgcagaacccggatatttcagggatcgagtatcagcaaggcacactgttcgggtatgaggtaaaggaatacctgcttgaaaaattcaaccggacatgtgcctactgcaacggcttgagcaaggatccggtcttggagattgagcatttcatccctcgcaatccctcaaaaggggataagggatcaaaccggatcagtaacctggccattgcctgtaaaacctgtaatcaggaatcaaaaaagaacctgcagccggcagattggatcagccttttatccaggtcacagaaaaagatagatcaggtc

SEQ ID NO: 1658 - DNA, 219 bp, unidentified
  misc_feature 1..219: note = Ga0376497_007558 JGI
  source 1..219: mol_type = other DNA
gtcaactaccccggcctgaaggccggagcttgtaaaaggctccacggttgaccagggaaatgttcaaagttttatggcaaagacaaaaaaggagaacattagaagttgcatagagaactaaagaccaacggcgggatgcttcctcagtcccgtcctcttgaagcccgggttgcagaaggccttgtgtcatcccattgggacaacctacaggggtgtgga

SEQ ID NO: 1659 - DNA, 1221 bp, unidentified
  misc_feature 1..1221: note = Ga0247608_10001764 JGI
  source 1..1221: mol_type = other DNA
atgctgaaggacggacgggcagtgatagtctcttatgagccgttcaccatcaggctcacatatgagcctgaacacaagtatgtcgagaaggtaattctcggagtagacactggaagcaaatatgtcggactgagtgctgcaagtgatgagaatgagtatttctgtgcagaagcacagatacgttctgtcgaaatcaaggaactccttgatgaaaagagaggttgcagaagacaaaggagaacaagcaagctccgttacagaaaaccgaggttcaataacagggtttcttcaaagaaacccggatggcttccaccgtcagtgactgcaaagatgacgagccatgtacagttgattaaacttgttgaaaggattcttcctatatcagagattgttatagagaagggaaagttcgacacacacaaactgaagaacccggatgtatccggttctgactatcagcacggaaagaaagaatggtttgagaattcaaaggcattcgtcaaatacagagacaattacaaatgtgtatgctgcaagaagaaatccgcaaagaacagaaaacttgaagtgcatcatatactttatataaatgatgggggttctgatgacccggacaacctggtgacattatgtcaccagtgccatgagaaaatccacaagaataaactgaaacttccgaggaagttcaatgcacgttcaaagacagtcaaatctctcagggatgcagcatttatgaatgcaatgtcggacaaacttgtcgaacttgtccgtgcggaattcccacacgtcacagtgaaaaccacatacggttacatcacgaaaacaaaaagagaaaagatggggttgttgaaacgacattcaaatgatgctttggcaatcactggaaacttgtcagccaagccgtatagccggcttgtcagaataaaaagagtacgcagacacaaccgcaagatattcaatgtcagaatattcaagaaaagagtcaggaaaagaaaccagagtgatgtcaagttcatcggaggtttcctccggtgggacaaagttctcattaaagaaaccggtgttaccggtttcataacaggacggatgaagaaagaaaaacatgcagtagtctgtaatatggacggagagaaattacatgagaaaagcactattgctatgtggaagattaaactgttaaagcatgcaaacggtatgctttatgaagaaacaaacatataa

SEQ ID NO: 1660 - DNA, 301 bp, unidentified
  misc_feature 1..301: note = Ga0247608_10001764 JGI
  source 1..301: mol_type = other DNA
gtcaccaaccgccgggtctgaagaacccgcggcttggttccactgcggaaccgtagccgagtgaacagcctgagtgaaaggactgatgtccttgaactacgttacccaagaatatataggcaccgtcgggtgttcgttccagccttatgcactgcgtccggctgttaaacaaaaactcttgcggaagagtgtgcagccggaatacaaaaccttgggataacattggcgagggacaaccataggattctaaatcctacattgcaattaattttgctaaattaaaatcaagtttgaaatgtac

SEQ ID NO: 1661 - DNA, 1347 bp, unidentified
  misc_feature 1..1347: note = human gut metagenome genome assembly, contig: scaffold82971_2, whole genome shotgun sequence WGS
  source 1..1347: mol_type = other DNA
atgtgccggcttaccgctttaaacatatcatacagaaaggaagtgccttacatggtatatgtgttagatatcaatggacagcctcttatgccgactgcaaggcatggaaaagtaagaaggcttttgaacattcatcttgcaaaagtggtgaaacgctgtccatttacgatacagcttttgtatccaaatacaaaagaaacacagcctgtatctcttggcgtagatgcaggaagtaaacatattggtctggccgccacaaccgagaagaaagtcatttaccaagaggagctaattcctcgcaacgatgttgtaaagttgttgtcagcaagacgaactttacgccgttctcgaagaagtcgaaagacgagatacagaaagccaagattcaacaatcgtgtgcattccaaacataaaggatggttggctccatctgtagaagtcaaaattcaggagcatatcacagctatcaaaaacgtctgcaagattcttcctgtgtctgagattcacgtagaaacagccgaattcgatctccagcgtctgaaagcaatggaagaaggtaagcctttgccagttggtacggattaccagcttggagaacagtacgacttctacaacacgagacagtatgtacttcatcgagacggatacacctgtcagtgctgtgatgcacatgataaagatgtcaaactgcatgtacatcatatcgaaagccgtcagacaggaggtaatgctccgaacaatctggttacactttgtgaacactgtcataaggcacttcatgaaggaaagattgagcttcccaaaaataagaaaagaggcaaatcccatcgagatgccgcctttatgggtatcatgcgtaacactttgctggaacgtctgaaaaaagaagtagatgttccagcaacgatgacatatggatatatcacaaagtactggagagaaaaggcaggcttagagaaaagccatatcaatgatgccatctgcatcagtaagcatccatatgccaaacctttggatgcctactatctgacgaaagccgtacgacatcacaatcgccagattcataaagccaacttcagtaaaggtggtatccgtaaacgaaatcaagcaccatatcttgtaaaaggatttcgcctgtttgataaggtctcgtatcaaagtaaagagtatttcatctttggaagacgagctacaggcttctttgatataagaacgctggatggaactaaagtaaacaaaggttctgtcagttataagaaattgaggattcaggacacagcaaaagcatatgtaaaggaggtgcgagcaattcctcacatgaatgaattcacgtgtgtccttgcatga

SEQ ID NO: 1662 - DNA, 279 bp, unidentified
  misc_feature 1..279: note = human gut metagenome genome assembly, contig: scaffold82971_2, whole genome shotgun sequence WGS
  source 1..279: mol_type = other DNA
ctgtcaactacccgccaataaattggcaggcttgtaaaagcctaagttgactagcctaagtgcttcgagcactccgttaagagagaatatatagttacccgtggatgtaacacctagtctacggctctaaggagacacattaaaccgttctgtgaggtaggaaccgtgtgtgtcttattgcaaacctctcattaacattggcgaaggtgtcatttacggctcgatatgtgccggcttaccgctttaaacatatcatacagaaaggaagtgccttacatg

SEQ ID NO: 1663 - DNA, 1449 bp, unidentified
  misc_feature 1..1449: note = Ga0315282_10018675 JGI
  source 1..1449: mol_type = other DNA
atgcagaagttaaggaagagaaatacatacacacctacggttattccgcaagatcgtagcaactgtggcttgtcattaaacagagaggaaactctcagtgtggcaggctcaaaaacctttcttaacaactccgatgcggacctaactccgaaagaaggtcagaacttgagagtatctgacaaagtttatgttttaaacagaagggaacagccgttaatgccttgcagtcctgtaaaggcaagattattgttgaagaagggaaaggcaaaggtagtaaagagaacgccttttactatccagttggtctatgctacaggtgaagcaaaacaacctgttactcttgatgttgatagcggctataagcacatcggcttatcagcagtaacagataaaaaagaactatttagttcagaagtgcagttaagaaccgatattgttaaattgctgaaggatcgaagccagtaccgtagacacagacgaaacagattgtggtatagagaaccaagattccttaatcgtaagaggcctgaaggctggttagctccttctatccagaacaaactggatgctcacattaaggttatcaaccaggttaaagcaatactgcctgtatctaagattaatattgaagtagctacctttgatacgcaaaagatggtcaatccagaaatcagtggcgttgagtatcagcagggtaaactgcaaggctatgaagtgagagaatatcttcttgagaaatggggtaggaaatgtgcgtattgcggcaaaaagaatgttcctcttgagatagagcatattattcctaaatcaagaggtggaactgatagagtagataatttggcattagcttgccatgagtgcaaccagaagaaggacaacatgactgcagaggagtttgggcacccagaagttcaaatgaaagcgttagagacgcttaaagccacagcctttatgaacatagttcgatggaaactggttgataagctgagggagtcaggaaacatagttaatgtaacttatggatacattacaaagagtaacaggattgcattaaaaattcctaagtctcacataaacgatgctttcgtaatggcaggtggaagtaatcaaacaagatctaacgttcaatatttcatcaagcaggtaaggaagtgtaacaggagtttattcaaggcaaacctgcttaaaggaagcaaaagaaaagtgaatacgataagagaagcgtttggctttcatagatttgacaaggtactgtataacgggatagaatgcttcatatatggattaagaagcaagggttattttgatttaagaaaacttgatggaactaaggttcatagttctgcaaaggcaaaagaatgcactctgattgagtgtgcacacacgtttttaacagaaaggagaatggctctcctccccaaccttaaaagtggggtctccgagccataa

SEQ ID NO: 1664 - DNA, 259 bp, unidentified
  misc_feature 1..259: note = Ga0315282_10018675 JGI
  source 1..259: mol_type = other DNA
gtcaactaccctcacttaagaaatgagggtttgcatcgtgagatgcaacacaagagttgataaggaggcattgaacatgcagaagttaaggaagagaaatacatacacacctacggttattccgcaagatcgtagcaactgtggcttgtcattaaacagagaggaaactctcagtgtggcaggctcaaaaacctttcttaacaactccgatgcggacctaactccgaaagaaggtcagaacttgagagtatctgacaaa

SEQ ID NO: 1665 - DNA, 1014 bp, unidentified
  misc_feature 1..1014: note = Ga0315288_10049882 JGI
  source 1..1014: mol_type = other DNA
gtggaaatggtaccagtagtagataaacagcaaaagccacttatgccttgctccgaaaagagagcacggcaaatggttatatctagaaaggcgactcctttttggaaaaagggggtcttctgtattcgtctaaatgtggaaccttcagccagaaatttgcaacaagtagttgttggaattgatcctggatcaaaaaaagaaggtctgacggttaaatcgaaggcacatacttatcttaatgttcaagctgatgccattacgtgggttaaagaacatgtgaagctaagacgtataatgcgaaaagctcggcggcatagaaaaacaccttatagagagtgtcgaaataatcgcactatgaattgtcttccaccttcaacaaaagcgcgttggcaatggaagttaagacttattacttggttttcagagatgtacccaattactgattttatagttgaggacgctaatgcaattacaaaaaagaattgctctaaatggaatggtaacttttctcctataaaaataggtaaaaattggttttacagtcaaataaaaaaatttggaaatctgagtcttcgtaagggttgggatacaaaaactttgcgagataaaggtggacttggaaagagttcaaataagatgagagactcctttgactctcattgtgttgattcatgggttttggcaaatgaaattgcacaaggacacacaaaacctgaaaacaagagagttctttgtgttgttcctttgcgatttcatcgtagacaactacataggatagtcccgtctaaagggggtaaaaggccaagttatggtgggacaagaagtttaggtttaaaacgtggttctttggtacagaaccctaaatatggccttgcttatgttgggggtagttcgaaaaacagaattagtcttcattctttaagggatggtaaacgtttaagtacttccgtaaaggtaagtgattgcaaggttttatcttttggtggtactagagcctattgggctgaggtgtga

SEQ ID NO: 1666 - DNA, 247 bp, unidentified
  misc_feature 1..247: note = Ga0315288_10049882 JGI
  source 1..247: mol_type = other DNA
taaaggacacgcataacatctgaactactttaagtaagaagctagcccttctgaaaaaggcagagaaaggtaaactttctaggattagccaagattaaaaatcaactagccatctagagttggcaactcaagaacacatgaagaatgctaccctagtttttcttccctgtgatggtcagtggcgaagggttgtataaacaaggtctgtaaagacaagatgtaaattaaagagaaagtagtggaaatg

SEQ ID NO: 1667 - DNA, 1359 bp, unidentified
  misc_feature 1..1359: note = Ga0180435_10000153 JGI
  source 1..1359: mol_type = other DNA
atgcaaagagtattcgtacaatctatcgataaaaagccgttaatgccgtgcgctcctgcgcgcgccagaaagctgctgtcgtctggtcgtgcgcgcgtggtacgacgctatccatttaccattcaactagaacaggcgaccaccaacaatacgcaacctgttcgactgaagctcgaccccggctccaagaccacggggatttcattagtggcattgttcgaaaatggcttccgcgtggtttgggcggcgaatttgtcgcatcgaggccatactgttaaaaagaatcttgatagtcgccgcggttatcgccgtggtcgtcgtagtcgcaacctgcgctaccgaaagtcacgctttttaaatcgcggtggcgataaatcaggatggctaccgccatcactgatgtcgcgtgtacataacgttgaaacctggtcaaagcgcctcaaaagcttctcgctcatcactgcggttgatgttgaaacggtacgttttgatacgcagctaatgcaaaacccggatattcagggtgttgagtatcagcgcggcgaactggtcgattgggagttgcgccagtacctgctttaccgacacaagcatacttgcgcttattgcggcggtttaagcaacgacccaattctcgagcgcgagcacattcatccacgctcgaaaggtggaagcaaccgactatccaatcaagtgattgcttgtcacacctgtaacgatacgaaaggcaatttactgcccgagcagtggttgtcgttactcaatacatcaagcaaaaagattgatcgtgttcgcgctgacaactttaaacagattgttgcgggacagagaccaagcctgcgcgataccggcgcagtaaacgccactcgttacaaaatcggcgacgtgttgaaatcgcattttgaccaggtcgaattctggtccggtggccgaaccaagaaaaaccgctctgatcagggttatcggaaagatcactggatcgatgccgcatgtgtcggcaccagcggtggctccgtatttatccctgaaagcctgacacctctgctgattaaggcgcaggggcacggctcacgccagttcaccaagccgaatgcctcgggttttccaagaacatcggccaaggcgcgatcaccttttgttcgcggctttaagacgggtgatctggttaaggcctcagtgccgactggtttaaaggctggcattcacgttgggcgggttgctgtaagaaaaaccggctcttttaatatttcaacaaacacaagtaccgtgcagggaatcagtcacagatactgcgaaaagattcattgtgcggatggttataactacaactttggaggcgcgcttcctccccacggataa

SEQ ID NO: 1668 - DNA, 288 bp, unidentified
  misc_feature 1..288: note = Ga0180435_10000153 JGI
  source 1..288: mol_type = other DNA
gtcatctaccccacggttaaaaccgggggcttgaaaaagcccggatgaccaggctaaggccagaacatttttcgaagatgttttggactacgttggaaaagtcacgacaccctggaatgcttgccagttccaggctctgtcgctaaagattaaaagcccgttaggggtattgggcggtgtctttagcacgacaagcctttccaacattgccgaggcaaacaaactcatcttcggatggagaaccggcgggtaaccgcctaacttaaccaatggataatgatgcaaaga

SEQ ID NO: 1669 - DNA, 1320 bp, unidentified
  misc_feature 1..1320: note = Ga0070738_10016471 JGI
  source 1..1320: mol_type = other DNA
gtgtcaaaagtctttgtggtagatgccaaccagcagccactttccccggtgcatccagggcgagcacgagtgctgcttacgcggggaaaagcggtagtgtttcgccgctacccgtttaccatccgcttgaaaaacgcgccgctttctccagaggttgctcctctgcgcttgaaaatcgatccaggcagcaagaccacgggaatcgccctgctcgacgagacgacaggagaagtggtcttcgcggcagaactggcgcatcggggggatgccattaaacaagcccttgatcagcgtcgggccgttcgtcgaggacgccgacagcgcaaaacgcgctaccgaaagccgcgctttgccaatcggcgacggcgcgaagggaagctggctccctctctgcaaagccgagtgagcaacgtcctgacctgggtccagcgtctcatgcgtctgtgtcccatcacggcgctgagcctggaactggtcaagttcgatcttcagcagatggagcatcccgagatcagcggtgtgcagtatcagcaagggacgcttttcggctatgaagtcaagcaatatctgctggaaaaatgggatcgggcctgtagctactgtggaagaaaggatgtgccgctgcaagtggagcatatccaggccaaagtcaatggaggcaccgatcgggtcagcaatctctgtctggcttgtgatggctgtaataaggccaaaggaacgcaggatatccgagcgtttctggccgaaaagccggagctgcttgcgcgtcttctggctcaggccagggcttctctcaaggatgctgccgctgtcaatacgacccgatgggcgttgtacgaatgcttactggctctgggcttgcccattgagtgtggctcaggtgggctgacgcagttcaaccgaaggcagcggggattgccaaagcaacactggattgacgcggcctgtgtgggcaagagtactcccgttcaactcaagctggctgcgatcctgcctctgctcatcagcgcgaccgggcatggcagcaggcagaagtgcaatgtcaacaagatcggcttcccttgctccaaagccaaaggagccagaaaggtcaagggctaccagacaggggataccgttcgggctgtcgtcaccacaggcaccaaacaaggtatctatgtcggacgagtgcttgtgcgagccagtgggtcctttgacatccgcacgcgcagcggtcggatccagggcatcagttatcgcttctgtacgcccattcaccgctgcgatggctatagctatcaacaaggagtagcgtatgcacagcataatcccgcccaataa

SEQ ID NO: 1670 - DNA, 312 bp, unidentified
  misc_feature 1..312: note = Ga0070738_10016471 JGI
  source 1..312: mol_type = other DNA
gtcatgaacccccgcataaattgcgggggcttgcagacagagtttgctctgtggcaagccctgaacatgaccagactcagccagagtcttccctttggtgggaaggctaccgggctccgttaggagcgaaagcataggtacgtccgggtgcgaggccagcccggaccgctacggcaagcagttaaacaggtctagtgggttaagccagtgctgcttgcatctgaaaccgctccataacgctgtcgaggccacctttacctgggaaaccagaggcccgcaagggtagaagcaaaggaagcaatcgtgtcaaaa

SEQ ID NO: 1671 - DNA, 1359 bp, unidentified
  misc_feature 1..1359: note = Ga0114918_10012039 JGI
  source 1..1359: mol_type = other DNA
atgcagaagttagggaaaaagctaaagaacgtacctatggatacttcacacgtccatagctctataagttcttctttaaacagagttcaaagactcagtgagaagaacatgtgctgttcccataacaatcccgaagtgaatcaacctcaatgtaaagaggggcagaacttgagagtatctaccaaagtttacatattgaatatgctaggtaatcctttaatgccatgtagtccgagaaaagcaaaaaaattattaaaagaagggaaagtagtagttgtcaaaagatttccattcacaatccaattgttaattccaacaggggaaacaaaacaaaaaataacattaggaattgattctgggtatatgaatattgggtttagtgcagtatcagaaaaagaggaattagtatctggtacagttaaattagatgaaagaacatcagaaagattaacagaacgtaggatgtatagaaaaattagaaggagcaaactttggtacaggaaatcaagatttttaaatcgctccaaaccaaaagactggcttcctccatctatacaaagaaaatatgatgcacatttgaatcttattaacagaattaagaagattattcctgtttctgaaacaattattgaagtagcaaatttcgatattcaaaaaattatgaaccctgatatttcaggaacaggttatcaacaaggttctctatatgaatatcagaatatcagaagttatttaatgaccagagaaaaaggaaaatgtcaactttgtggtaaggattttaaaggacagtcaagtcatatacatcactgtaaacaaaggaatgagaatggaagtaatagacctaaaaatcttgctattttacataaggcttgtcataaaaaactgcacaagaaaggattgaaactatctaaaccaaaaagctataaaccaaatacatttatgtctatcatacataaaagattttggcaggatgtagatgatttacagataacttatggatatgaaacatttatcaaaagaaatgaattaaatttggaaaaaactcatagtactgatgcttttgtaatagcgaaaggtactattcaaaacagatgcaatgaacaaattatacaacaaaaacatagaaataatagagttttacaattaaacagaaatggattcaaaccttctattaaaaagaaaaaatctaaagttaatccagaagatttgttttgggttaatgaaaaacagtatatttgtaaaggtatgtttaataaaggacagtatatcacttatggaagcacaaaaaagaaagaatactttaaattttctaaagtagaaaagatatatcatcaagggagttttgcatggaatatataa

SEQ ID NO: 1672 - DNA, 266 bp, unidentified; identical to SEQ ID NO: 315
  misc_feature 1..266: note = Ga0114918_10012039 JGI
  source 1..266: mol_type = other DNA

SEQ ID NO: 1673 - DNA, 477 bp, unidentified
  misc_feature 1..477: note = Ga0137391_10019969 JGI
  source 1..477: mol_type = other DNA
gtgtggtattggctgcgcgcaggtctggcagaagtcgtcagacgcgagccattcacgatccgtttgaaatgtgcaaccgccgagtacacccaaccggtcagcgtcggggtagatactggttcacagacagctggagtagccgctaacgccaatgaagaggtggtctaccagatgcattgtgtcgctcgcggcaactaccagttgtataacgggaagcgcagcgagcataaagtctgggcacccaagaagctgcacggttggaagctgtacgaactggttgaggcgaaaggagtggttggctatattggtggcaggcgagtgaaaggcagctttgtgatgaaggatgtgaccaccggaaaaacactggtcgaggtgaccccgcgcaaacttattcggctggtccggccttgccgagggtggatcatcacgaaacaagaaatgcagagagaggaggagcgcgcttcctctcccgtttaa

SEQ ID NO: 1674 - DNA, 296 bp, unidentified
  misc_feature 1..296: note = Ga0137391_10019969 JGI
  source 1..296: mol_type = other DNA
gtcaatgaccaccccattgagggggtggctggtgagaaattcgtttcttgcacgccgaattgaccagactgtgctctcgagatcgaggagccgagcaagtaggcgtctgctcgatcaaggaaggagctccgatagcgggaagtggtcaagcacccaccttcgggtcctgccccagcctgaagccctggaactgttttcttaaccagtggtgcggtcagccaccgtggaaagcagacatcccgcccgctatccttgtcgaggggactacttgaccccgaaagggagacttatgggga

SEQ ID NO: 1675 - DNA, 1293 bp, unidentified
  misc_feature 1..1293: note = JGI11643J12802_10127370 JGI
  source 1..1293: mol_type = other DNA
gtgagagtgcctgttttagacacaaccaaaaaaccgctagcgccgacaacgccgcgtcgcgctcgattgcttttgaaatcgggcaaggcggcggtgtttcgtcgttacccattcacgatcattcttaagcgagagatcgaaaatccgacgacgcccgatctaaagatcaaaatcgatcccggatcgaaaacgacaggcgtcgcaatcatcaatcagcaaaccggcgaagttgcctttgccgccgagatagagcatcgcgggcaggcgatcaaagcctctctggactctcgtcgctcgcttcgtcgggggcggcgtcagcgaaaaacccgttaccgcaagcctcgtttcgagaaccgaactcgcccgaaaggatggctcccgccttcgctcgaaagccggattgagaacgtctacacctgggcgcgcagactacaacgtgtatatccgctgaaaagcgtcgcgtatgagcttgttcgattcgatatgcaactattgcagaaccctacaatcgaagacgtcgaatatcagcaaggcgtccttcaaggctttgaactgcgtgaatatgtgttgatcaaattcaaccatagatgtgtttacgccgacgcgaaaagcccttgcgatgaggtcttgaacgtcgaccacctgatccctcgttcacgcggcggatcgaatcgagcgagcaatctcgtttgcgcttgtcgaaaacacaacgaagagaaaggcgccctgtcacttgaagaatattcaaagttgcgtggcgtcgatttctcaccgattaaagctcaggcgaaggcgcccttgaaagacgccgccgctgtcaatgcgacaaggtgggcgctcttcaatcgcttgaagactctcgatctgccgattgaaacgggatcgggtgggttgaccaaattcaatcgaacaaagctggaggcgccgaaggcgcattgggtcgacgccgcatgcgttggaaagagcacgcctgagaacttgaagatctcgaacgttcagccgcttcggatcagagccatggggcatggctcgcgtcagatatgccgaaccgataagtacggctttccaaaaacacatcgcacacgcaaggcaatattcatgggatttcaaaccggggacatcgtgaaggctgacattccgaaggggaagtttgcgggccgccatgtcggcagattgtcggctgtacgccaacgaccatcattcacattgaacggcttcgatgtccacccaaagcatttaaagcgaatccatcacagcgatgggtttaactataaaatgaaaactgtgggctga

SEQ ID NO: 1676 - DNA, 283 bp, unidentified
  misc_feature 1..283: note = JGI11643J12802_10127370 JGI
  source 1..283: mol_type = other DNA
atctgctatgccacagttttcgagaaaagacaaaggcattgattcagcccgactaagtgattgactcgccagagttatgaactacgatctttgcgaatataacaatagtcaccttgggatgcgatgccagtcccaggctctgaggctcgcgtttaaacagttgatccgaacgcgaagacagtgacgtgagcaaacaaaccgcaaaagatcattgtccaggcgaacattacgtgagcgatcacgtcaaactcgaaagagtttaattaaccgtgagagtgcctgt

SEQ ID NO: 1677 - DNA, 1413 bp, unidentified
  misc_feature 1..1413: note = human gut metagenome genome assembly, contig: NODE_539_length_54612_cov_5.601316, whole genome shotgun sequence WGS
  source 1..1413: mol_type = other DNA
atgagtgtattcgtggtcgggctgaacggatgccggctgatgcctacatctgaaagagaggcccgtttattactgaaacatgggaaagcttctgtttatcggaaagtcccatttaccataaaactaaattataagacaggcagtaccacacagcctggttatttggggatcgataccggatcgcagcatatcggagtgtccgttgtccgcgaagatggtaccgtgttacataaggaagagatcggtctcagggattccatgagtaaaagaaaactgatggagtcaaggtcttcattaagaagaggaagacgtcatcgaaagaccagatatcgccatccaaaatggagactaaaagccaaacgtgtttattacgaaactccagaccgaaaaggaagacactggaagaagcaaaagatcacgttcgcgtccaaacgaccgcagggctggcttcctccatcgctgcagtcaaagacggatcatcatatccagtggatcaagaagttacaggatcttcttccagatggatatcgtctttcgatcgaacttggtcgtttcgatccggcaagaatgaaagatacagagatccatggagatctataccagaaaggaccacagtatgactatgaaaatgttcgtgcttatgtcctcgatcgtgacagatatacttgtcaggtatgtggaaagaagggtggaaaattacatatacaccatatcctgtacagaagtcatggtgcgaccgataatccacagtatatggctacgatatgcagcgattgtcatagcacagagaaccatcaaccgggaggcatcctttatcagtggatgcaggagcagaagaaatttaccagaggactaagagatgctacattcatgaacatcttaaggaaacgtctgatgaaagcatttccaaaagcaacttttacctatggaaatatcacaaaagcagacagagagaaactgaagattcctaaaagccatggaaatgatgccactgcgatcgcaatcgtaaaaactgggatcatgacggtaaaggataacgaacctgtgatctatatccaacaggtccgaagaaaaaaacgttctctgcatgaagaaactccgagaaaaggacgcaaagaaccgaaccgtaaagcttcacgatacaataagaatacgaaagcagtcaccgtgaccaaaagaaagaataagaaaaggatatcgatcactggctgtctgttcgatcgtgtagaactgaatggaaagaaaggatggatctctggatttactgataagtcctgctatataaaggatgagaatgaccaatatattcggatatctccgaagtacaaacaggtcagtctgtcaaaactcaagatcctgcatcactgtggaaactgggtgataggagcaagaagatcccttggtaagggatga

SEQ ID NO: 1678 - DNA, 316 bp, unidentified
  misc_feature 1..316: note = human gut metagenome genome assembly, contig: NODE_539_length_54612_cov_5.601316, whole genome shotgun sequence WGS
  source 1..316: mol_type = other DNA
ttgaataaccgagcatgcgaaaaaagtatgtgaagtcatttcatggtccccgaaagggcatgctgactagactcagtgcaacggaacccactttttgtgaggaataccattagtactacgtcccagatatcaatacccgacccggtagtacccaagccgggaacagggttcaggcaacggatgtctttcaggagaagaggacactgacctggagcacgaagtatctggaactttgtcgaagggtgatcactcccatccgggagggcaggacttttgtgtacctgccataacaatatataaggaggaccagccatga

SEQ ID NO: 1679 - DNA, 1248 bp, unidentified
  misc_feature 1..1248: note = marine metagenome genome assembly, contig: NODE_629_length_21822_cov_14.725040, whole genome shotgun sequence WGS
  source 1..1248: mol_type = other DNA
atgccttgcgttcccgcaagagctaggcagttgcttaaaaaaggtaaggcatcggtataccgtcgctttccttttacgatcatcttaaacgaacgggtaggtggaagaactcaacctaccgaactaaagtatgacccaggtagcaaaaccactggcatcagtcttgtggtgcatggtaaaaccgctagtcgtgtagtatgggcaggagaactaacacatcgtagttggagtattgttgaggcactaaatactcgcagaaacattaggagatttaggcgttaccgtaaaacccgttatcgccaaccacgcttcttaaaccgcactagaaaggatggatggctaccgccatccattcagtcgcgtgtggataatatcgtgaccataacgcggaaattacaagtatttgcgccattatcatcacttgcttgcgaagtggttaagttcgatacccaaaaactacgcaatcctgaaatcgatggtgcagagtaccagcgaggtacgttgtttggtttcgagctatgggagtatttattagttaaatggaatcattcatgtgcttactgtaatgctaaaaatacgccattagaaaaagagcatgttgtagctaaaagtaaaggcggttcaaacagtgtaactaacctagtcgtttcttgccgaccttgcaacgaaaggaaaggcaccaaatcgattgacgaatttttgaaaaagaaacctagcgttttaaagaaaataaaatcacagcttaaagcgccactaaaagatgcggcgtcaatgaatgcgaatcgctatgcgatagccagagaattagaaacattcaacttacctgttaattacggaacaggtggtcaaacaaaatataaccgcacaaatcaaggctatcgcaaagaacactggatagatgcgtcttgtgcaaccagcacaggtgagaatatccaaatactggataccatgacgccactcatcattaaagccgttggccgtggctcaagaaaaatgtgccaaacagatggttatggtttccctagctctaagccaaaagctgtaaagaggattaatggattccagactaatgatatcgttaaagctattgttacgaaaggtaaaaagaaaggtgtttatgttggtaaagtatcgattagaagcactggatactttaatattaaaacaaaacaaggtaagatacagggcataaatcacagatactgcaacctattacaaaggatagatggctatgaataccacacctaa

SEQ ID NO: 1680 - DNA, 277 bp, unidentified
  misc_feature 1..277: note = marine metagenome genome assembly, contig: NODE_629_length_21822_cov_14.725040, whole genome shotgun sequence WGS
  source 1..277: mol_type = other DNA
gttaactaccccgccctgaagggctgagcttgtaaaagctacgcttttcgggattagttgaccagcctaagttcttagagaactatgttagataggtcacgataccctagaatgcttccacagttctaggctctatcgtaagcagttaaacaggacggtgcgggaacaacggacagtgctgttgatgtaaaaagcctttctaaccttggcgagtggaccgttaccgcagaaatgcgtgagtcgcgtaagcgacataaatattaacaaattgaggtat

SEQ ID NO: 1681 - DNA, 780 bp, unidentified
  misc_feature 1..780: note = Ga0063293_10084471 JGI
  source 1..780: mol_type = other DNA
ttgagagtccctgtgttaaatatgagtggaaagcctctgatgcctacaagtccgagaaaggcaagaatacttttgaagcaaggaaaggcaacagtagttcagagaatgccctttaccatacagttaaaatacccatcaggcgaaacaaagcaagatattacattggacataaataatagatattcaacaattggcttcagtgcagtaacagaaaaaagcgaattaatttcaggtgagttaaccctgagaaaaggcatctcaaaacccttggagcagaaaagaaattacagacgagttcgaaggaataaattattgcatagaaagccaagactcaataatcgtagcaaacccaaaagctggcttgcgtcaggtattcaccataaactcaatacacatctgagattgattgaaaaattgaaagaagtactacccataacgaaagtgatagtagaagtatcagcatttgatactcaaaagctacagaatccagagattaaagatgtagaataccagcaggaagagttgcagggacatgaagtaatagaatacctgctggagaagtggaagcataagtgtgcttactgtggaaaggataatcttcctctggagattgaacacatcataccaaaatcacgaggaggttctgatagagtttctaatctgactttagcgtgtcataaatgtaatcagaataaaggagataagacggcagcagagtttggacatccagaaatacagaaggtgggaccatacagaaaaaaaacaggagttatcttgtaa

SEQ ID NO: 1682 - DNA, 221 bp, unidentified
  misc_feature 1..221: note = Ga0063293_10084471 JGI
  source 1..221: mol_type = other DNA
gtcaattacccccgttaaaaggggggttgttccgtgagggataagagcaatttgttgattaggagatattaaaaaatatgtggaagttattggtagagttaaagaacacatcaagggctcctcctcaagtctcctgctctataatatctctcgtacagtactggccaataataactctgctcaagacataccttctggcaggagtggaaagaacttgagag

SEQ ID NO: 1683 - DNA, 1311 bp, unidentified
  misc_feature 1..1311: note = Ga0074255_1053809 JGI
  source 1..1311: mol_type = other DNA
atgaataatggccgcccgatagcggcctacgtgcaggccatcgacggttcaccgctgatgcccacccgcaagaaaggcaaggtgcgccacctgctgaaagacggcctggccacggtcgtgtgcagggtgccgttcacgatcaggctgacctacgagaccacgaggtacgtccagaaggtgtcgctcgggatcgacacgggctacgggagcgtcggcctgtcggccaccaccggcgacggcgacggcagcggcggaggcggaggcgaggtcctctacgaggaggagctgaccctcagggacgacgtcaagggcaacatctccaccagggccgagctccgcagggggcgcaggtccaggaatacccgctaccgcgaggcgaggttcgacaacaggcgcacgcccgagggatggatccccccgtccatgtcggagaaggttgacagccacgtctccatggttgagagggctgccgccatactcccggtgtccagcataacggtggaggtggggcagttcgacatgcagctcataagggcgcaggaggagggccttcccgcccccgaggggaggggctaccagtcaggccccatggcggggtactggaacgttcgcgagtacgtgctgtacagggacggccacaggtgccggaactgcggcggcaggtcaggcgacaggatactccaggtgcaccacctggagtcccgcaagaccggagggaactccccgggcaacctcgtcaccctgtgcaggacctgccacgacgggtaccaccgcggcgaggtggagctgaagataaggcgcgcaaggcccatggccgccgggaccggcacgaacatcataggccagcgcgtatacgacatcctgagggagaggtacggggatgagaaggtccgcctcacccgcgggtacgtcaccaagatgcgccgcagcgagcacggcctggagaagacccactgcatcgacgcccgctgcatatcaggcaaccccggcgcggcccccgtagaggggacgatgtaccggtcgaggaaggtcgcgtgccacaccaggtcccttcacgtgatgaagaccggcaagaaaggggcgaggcgcagcaaggtcgcatcccacaagataggcaggagccgcttccagaggtacgacatggtgatgcacgaagggaaggagtgcttcatctccggaagcacgggcggaaggccggtgctcaaagacatcgactggaacagggtcaccgaaaagcagtccgtgaacgtaaaggaaatcaagttcgtaagaaggatgcgtaacgggataataatacagaaggttaaatag

SEQ ID NO: 1684 - DNA, 372 bp, unidentified
  misc_feature 1..372: note = Ga0074255_1053809 JGI
  source 1..372: mol_type = other DNA
ctcaagtttctaaagtaacttgtctcgacagagtaaagcggagccgcaagcgcgaatttaggagcgggttagtccaagccccctgcggccttgggggctacgttgggatggaaataggtaccccgggatgtgaaggagtcccaagtcccgggcactacgggcagcggttaaaagccccgaaaggggcggtgcccctgccgccaaacccatccgcaacatcgacgatgggaccacaactcctcctccgggaggagagttacgaccgaaaggttgtgtcggacccggacatccaccgagtccaaggaaaacaaaaaaaagaaagagatgaaaggacagaaggagaacaacatgaataatggccgcccgatagcg

SEQ ID NO: 1685 - DNA, 1341 bp, unidentified
  misc_feature 1..1341: note = Ga0209800_10005712 JGI
  source 1..1341: mol_type = other DNA
atggcggtctacgtgctggacaagaccggaaagccgctgatgccctgcagcgaaaagcgcgctcgcctgctgttggagcgcagtcgagcccgggtgcatcggctgctgccgttcgtgatccggctcaccgaccggcgccaagccgattgtaccctgcagccattggcgctcaagctcgatccgggcagccggttcaccagcatggcgctggtccgccggcagggccggcgggtttcggtgctgtcgctgctggagctgatccaccggggcgcggcgatccgccaggccctgctgcaacgggccgcgttccgccggcgccggcgcagtgccaacctgcgctaccgggcaccgcgcttcgacaaccgcacccggcctgcaggctggctgccgcccagcctgcgccaccggctggacacgagtctggcctgggtcgcacgcctgcggcgctgggcacccatcgccagccttgccgtcgagcgggtcaagttcgacctgcaggctctgcagaacccaggaattgtcgggatcgagtatcagcagggcacgttgcagggctacgaggtgcgcgagtacctgctggagaaatggggccgtcgctgtgcctactgcggaaccgagcaggtgccgctggaggtcgagcacatcgtgccgcgcagcgccggcggcagcgaccgggtgtcgaacctgacgctggcctgccggacctgcaaccagaacaagggcaatcggccactcgaggtgttcctggcacggcaacccctgcgcttggccagaatcatggcgcaggccaaggcgccgctacgcgatgcggcggcggtcaatgccacccgcaacgccctgttcgcctcgctcctggctaccggcctgtcggtggaggccggcagcggcgggcaaaccaagttcaaccgtcgccgcctgggcctgccgaagagccatgccctcgatgctgtctgcgtcggcgaggtcgaggcggtggcgggctggcagcggccgaccctggcgatcagggccaccggccgcggcgagtaccagcgtacgcgcctgaccgcgcatggctttccgaggggctacctgacccggcgcaaacgccatttcggcttccagaccggcgatcgggtccatgccgtcgtgcccaccggcaagaaggccggtgtccatcgtggccgcgtggcggtgcgccagaccggcagtttcaacatccagacagcgggcggtgtggtgcagggtatagggcatcgccattgccacctggtccagcgagccgatggctacggctattccctgcaatcgttcgatagtgcccaactcgagaaggaggcagcgagagcaggggcacgctga

SEQ ID NO: 1686 - DNA, 291 bp, unidentified
  misc_feature 1..291: note = Ga0209800_10005712 JGI
  source 1..291: mol_type = other DNA
gtcaactaccccggcctaaaggccggagcttgtgaaagcaggctgggttgaccagggaaagcggtaatcaacccgctccgtttgcaacaggtcgcatcgacccaccccggaatgcttcctcagttccgggctctggaaggtcgggatcatgcgggcgaaaggtaaagcgccgaaggttccgatcgccgcacttcgcgggagccggttgccgacattcccgaggggagcgagccgtaaggctccgtcaccaggcccgtaagggcattgtttgaaaggaggatcgccatggcg

SEQ ID NO: 1687 - DNA, 1227 bp, unidentified
  misc_feature 1..1227: note = Ga0068305_10111221 JGI
  source 1..1227: mol_type = other DNA
atgatttatgttttgaacaaatacgggaaaccccttatgccaaccacgaatgagggttacataaggaagctgttacacagaggcgatgccgctgtggtgcaacacgatttgtttacggttaagttgttgaacgatactactgaccatacggataaggttacactcggcatcgaccccggatattcacacatcggattttcggcagtttcgggtgataaagaacttatttcgggcacacttgaacaggaaggcgcaggtaagaaatgcaccaatcctatgagcaaacgacttgctgataagctgatgtatcgtcgtaacaggcggtcgagactgtggcatagaaaggcgagatggcaaaaccgtgtttcaacgaagcagaaaggttggttagcaccatctcttatgcgaaagaaagatacacacttatctctcgtaaacagattgaagaaggtattgccgattgaccacatagttattgagcgcaacaagtttgacattgccgcgattgaaaacccagatattcagggtgtacagtatcagcgtggtacgttgtacgattacgagaacaagaaggcgtacttgctgtcgaagcaagagggcatttgtccgatatgcggcgaaattctgaagtctgacgttcacctgcatcacgtcaagccacgcgcaaaaggtggttcggataatgttggcaatatggttgctctgcataacgactgccataagcggttgcatcgtgaaaagttaaagctgtcaacgagcggtttcaagaagaagcacaaagcagacacgtttatgaacatcgtcaggcacaggcttgttgacgaattacaggcggacgtaacgtttggcagttacacgaaggttgcgcggattgagaacggcatcgaaaagacgcactataacgacgccttcgtgattgcgggtggaacgacgcaagaacgatgccgccctgttgtgttcattcagaagcgaaagaacaacaggtctttgcagaggaacaacttgcacacaaaaggcggcaggtcaatccgtcgtcagcgttcaatttatcagacaggcgatttgatttggacagcgagcgggatgcacaggtgtggcggtatgacgggtggccgcattgttctcaaagatgaatacaaggagggatgtaaatccccaattagaataagtactaaattaataacaaagcatttgagttcaaaaagcatttggactctttgcggataa

SEQ ID NO: 1688 - DNA, 274 bp, unidentified
  misc_feature 1..274: note = Ga0068305_10111221 JGI
  source 1..274: mol_type = other DNA
ctttccaaagaagaattggataaggttttgaatttgattatccgcaatgagtccaatgacttggtgcggcagtcaaattagagggcaactcggaggagttgcagcagtttaagattgagatacatacacaccaaagggtgcttcccaagccctctgctctgtggttataaggacgtaaactcgaaagagcgacaccgaaataacttaaaaacatcttaaacaacctcgatgggaatcaacccgcttcggcggtgggcttgaaaaacaggaacaa

SEQ ID NO: 1689 - DNA, 906 bp, unidentified
  misc_feature 1..906: note = human oral metagenome genome assembly, contig: NODE_7457_length_3750_cov_2.000000, whole genome shotgun sequence WGS
  source 1..906: mol_type = other DNA
atgttcgtatatgttttggacaagaatgggcaaccacttatgccaacatcacgttttggcaaagttcgtaggttactaagagataaaaaagtaaaagtagtaaagcgttgtccatttacgattaggttgttgtacgagcctgaaactaaaatcgtacaagatgttgtgcttggtgtagatactggttctaaacacgtgggtgtagcatgtgtaggtaatgataaggtattgtatcaatcacaagttgaactaagggatgacattaaaagaaaaatggattctcgcagaatgtatcgaagaagtcgtagaaatagaaagactagatacagaaaagcaagatttttaaatcggggcaattctattaagaaaggtaggcattgtcctacgattgttagtaaatactacgggcatgagcgagagattgagttctgtaagaagattatacctgtcaaagatacagtccttgaaacaggtaaatttgacactcaattaatggaaaagccttggttacaacaatataagtgggcatatcaaagaggtgtgaactatgggtatgcgaatgcgagggaacatgctttagttagagataagtatacttgtcaatgttgtggcaaaaagaactgtagagtagaggcacatcacatagtttttagaagtaaaaatggcagtaatgatttagagaattatattacattatgtgaagattgccacaaagcagttcatttaggggagattgagttgaaactgaatggtaaacgtaaaagtgatttacgacatgcaactcaaatgtctaccatcagaagcatgttgttaaagaaataccatgatgctattgagacctatggttttgtgacaaaagcaaatagggaaaacttgaatatcgacaaagaacattacttagatgct

SEQ ID NO: 1690 - DNA, 337 bp, unidentified
  misc_feature 1..337: note = human oral metagenome genome assembly, contig: NODE_7457_length_3750_cov_2.000000, whole genome shotgun sequence WGS
  source 1..337: mol_type = other DNA
gtaaacatgcactaggttaaatacctagtaccttctaggtacggttgtttacaagactccgtggttagaaatagccactacgatagttggatgatacacatacacacccttggttgaatgctcaagactgaggttctgtgattgctgattaagttgggctaagagtgctgaataagtcctgtgttagtaatttcaaaactctaattatctttgtcgatgagaagtccgacacttattttgttaatagaaataagttaggcattacagttcagtgggtactgtcttacaaagtaaaactcactaaaaatcaatacgaaaggagttaagacgtatgttc

SEQ ID NO: 1691 - DNA, 525 bp, unidentified
  misc_feature 1..525: note = Ga0070770_10195732 JGI
  source 1..525: mol_type = other DNA
gtgaacagcgtatttgtactcgacaatcacaaacaaccactctccccgtgttcacctgcacgggcacgtatgctgttgcgtaaaggcaaggcagcggtgtatcggcgctatccgttcaccattatcctgaaacaccgtaccggtgggaacgtgcatcccgtagaactaaaactcgatccgggcagcaagaccacaggcgttgccctggtgcaacagaagggcactggcgcagcggttatcttcgcagccgaactccaacatcgaggcgcggccatcaagaaagcactcagcacccgtcgcgcccagcgtagatccagaagaagccgcaatacccgctaccgtgcgccgcgcttcaacaaccgcacctcccagcactatcccaaagctcactgggtagatgcagcctgtgtcggggattccggaaaaacagtaagactcgaccctaagcagcaacccctgacaatcaaagccacgggtcgtggcagtcgtcagatgcgtcgggtggataaatttggctttccgcgg

SEQ ID NO: 1692 - DNA, 310 bp, unidentified
  misc_feature 1..310: note = Ga0070770_10195732 JGI
  source 1..310: mol_type = other DNA
gtcaacgacccaccaccaaacctacccggttctggtgggggcttgtgagagcaagtccgaagttgaccaggcacagccaccagcgaactttcgctgacggggctacgttagtggcgaatacataggcaccttgggatgtccacccagttccaagctctgcggttggcgattaaacaggcttagaggggttaagccagtgtcgcccgcataaaaaaccgccgcataacattgccgagggtaacattaccgccgcaaggcgagaaagccggtgtagaccggcactgattcaaaaggaagtgacgtgaacagc

SEQ ID NO: 1693 - DNA, 1320 bp, unidentified
  source 1..1320: mol_type = other DNA
atggtttttgtgctggacaagagaaagaagccgctcatgccttgctcggagaagcgagcacgattgttactggaacgcggacgcgccgtcgtccaccggctccatccgttcacgattaggctcaaagaccggctacttgaggagagtgtgctgcagcccgtcgggctgaagctcgatccaggtagcaaggtcactggggtggcggttgtgcgccgggaagagagggcggatggtccttgggatcatgccttgcacctggcggtgatcgttcaccgtggagatgccattcgggaacggatgcagaaacgagcggcacaccgccgccggaggaggaacgccaatctgcgctaccgcgccccaaggttcaacaatcgccggagggcaaacggctggttcccgccttcgttgcgaagctgggttgggaacgtactctcgtgggcgagccggtaccggcgcttggcacccattgcttttatcgagatcgagaccgtccggtttgacacgcaggcgctccaaaacccggagatctccggcgtggagtaccagcgtggcgagcttttcggctatgaagtccgagaatatctgctggagaaatgggggcgccgctgtgtgtactgtggtgcggagaacgtgccactggagatcgagcacatcgttccgagatcgagaggcggaactgatcgggtaagcaatctcacattggcttgtcgagcctgcaaccaggccaagggggaccggacggcggaggagtttggtcacccggaagtgcaagccaaggcaaaggtgccgctcaaggagcccgcggccgtcaacacgacgcgctacgcgatccggaacggtctgtgcgccatgggcagagaggttcgctcatggacgggcgggcggacgaagtggaaccgggaacggtttggactcccgaagacgcatgcgttggacgcactgtgcgtgggcgatcttgccggtgtgtccagctggcatgctctggttcttgaaatcaaggcgctgggacgcgggcagcggtgccggacgaacgtggacgcccacggtttcccgcgcggatacaggatgcgttccaagacggtgcgcggatttcgcacgggggatctggtgcgtgcggaagtactgaagggcaagcgcaccggagtccatattggccctgtggccgtgcgcgcctctggatcgttccgggtgggaaaagcggatgggatttcgtggaggtgttgtcgcctgcttcagcgggcagatggatacgggtatatgaaaggagggcgcggcgcctcctccccaggcgtaaacgccggggcttccggcgccgcatga

SEQ ID NO: 1694 - DNA, 317 bp, unidentified
  source 1..317: mol_type = other DNA
gtcatagaccccacgcctaaaggcgggggcttgcggggatgacccgaccagcccgtctatgaccagcccaagcggttgagccgaaggacaaggcgaggaagccgctacgtcgccggcaggccaaagacccactccgggatgcttccccagtcccggaccctggaagctccggctgcagacaaccttcggggtgtgggcgaaacgggccggagcagatggccagccggcgacatgggcgaggggagcggtccgggagagtccacccgggcccgtcaccggccccgtaaaggggtcccgaaagggaggaaaggatcatg

SEQ ID NO: 1695 - DNA, 1209 bp, unidentified
  misc_feature 1..1209: note = Ga0207421_10015550 JGI
  source 1..1209: mol_type = other DNA
atggaagagaaagtttatgttcaagacaaaaatggtaaacctttagaccccacaaatccagccagagccagaaaattattagacaaaggcagagctgaagtagtacaaagagaaccttttactatcaaaatcgtagatagaaaaaaagaaaattcttatactaaagatgtaactttaggtgtagatgcagggtataagaaagtagggttttcagcaattaatgaaaatgaagagttaattagtggagtgttaaaactacgcaatgatatatctaaaaagttagaacaaaaagctaattatcgcagaaatagaaggcatagaaatactaggtatcgcaaacctcgctttgataatcgcaaaaaagaagaaggttggttagcacctagtattagacataagttaaatagccatattaaattggttaatagattaaaagatatattaccaattacaaaagtaatagttgaagttgctaaatttgacactcaaaaaatgcaaaatcccgaaatagaaggggttgagtatcaacaaggcaaattgcaggggtatttagttcggaattatctattagaaaaatttaattatcaatgtgcatattgtggaaaagaaaatacttctttagaagttgagcatataattcctaaatctagaggaggttctaatagagtaagtaatttaactattagttgccataagtgtaatcaaaagaaaggtagtcaaacagctaaagaatttggttatcctaaagtgcaacaacaagctaaaaagagtttaaaatcaacagcttttatgaatatagttagatgggaaatagttaataaattggattgtgattatacttttgggcatattacaaaaatgaatagaattaatttagatttagagaaaacacattataatgatgcttttgtaattgcaggaggtactaatcaaaatcgagttaatccaatagaagttaacattaatcgcagaaacaatcgttcattacagactaatcgcaaaacttatggtagaagtgttagaactcaaaaatattcattatcgccaaatgatttagttaaatatgaaggtgaagtttgtaaagttaaaggaacgtttaactatggtacttgggttagaatgaaagatagtcaaggtaatacagttaattcaaatgttaaagatgtagaattagttaaatatagccaaggtttatcatttataagttaa

SEQ ID NO: 1696 - DNA, 339 bp, unidentified
  misc_feature 1..339: note = Ga0207421_10015550 JGI
  source 1..339: mol_type = other DNA
tcaactactccacctgaatcaagctaaagattcagatggagcttgaaaaagctcataagtggagtaggagattagtctaagcgatgtcttctctaaggtgaaggcaaatgagctacgtcctgggctgagtgtttgacatacaccctggagtgcttctccagcttcaggctctggaaactatggtggacgacctcataccgttatcctgatggtatgcaacatcaccatagtctatgcctgctccagacgttgacgaggagaacccacctccatttggagagatgacctttacaggtcgtaaaattatagttttaaggaagtgttagtatggaagagaaa

SEQ ID NO: 1697 - DNA, 1389 bp, unidentified
  misc_feature 1..1389: note = Ga0180732_1000469 JGI
  source 1..1389: mol_type = other DNA
atgcagaagttattaaagagaaatacatacacacctacagatacttctctcgtctgtagctctgtggccgtgtctttaaacagagaggaaactctcagtgagcatggcttaaaaacctttgataacaccctcgaagagaatcgacctcagcatagagaggggcaaacattatctgccaaggtctatgtaattagtgtaggtggtgagagtctaatgccgacaacaccaagaaaggcgaggattttgttaaatcgaggtaaggcgaaagtgattagaaaaaccccgtttacggttcaattaacgtttcaaactacacggtttattcagccaataacacttggaattgacagtggttacaaaaacattgggtttagtacaataacggataataaggagttaatgagtggagaagttaaacttgataacatgatgagcaagagattgggtgatagggcaatgtatagaaggcaaaagagaaacaaactttggtataggaaaccaaggtttaataacagggtgtcgagtaagaagaagggatggttacctccttcgattcaaagaaggtatgacacacatttaaatttagttaataaaattaaagggttgttgcctattactaaggttatcatagaggtgggcaattttgatatacagaaattgaataatccagaaattgagagcaatggatatcaagaaggctcattgtaccaatatcagaatgttagatcttttattatttcgagagaaaagggtaaatgtcaattatgtggaaaggataagggaagtgattcgtggcgtcttcatcatattataacacaattaaaaggtggtactgataaacccaataattttgctttactacaccttaaatgccataaaaaattgcacaaacaaggattagagaatcaattcaaaaagaataaacaatataaagcatcgacatttatgaatattatcaaaaataagtttcagcaagatttggattgtgatatcacttttgggtataaaacctatgtggacaggtgtgaacttggtttagaaaaatcacacggcaatgatgcttttgttatagcgggtggaaacggacaggagagaattgacccgtttaaagttatgcaaaaacgcaaaaacaataggtgtttacaaaagaatcgcaggggatttgctccagcgattcgtaaacaaagatatccaattcaaccgaaggacttagttcaaatagccggtgaatggtcagagacaacaggtactcactgtaaaggctcaagaataatggtaaataaaaagtcaattaatatcagattagtggaaagtgtgtttcacacaggaactttaatatggagacaggcaatttctcccaaactcgaaaggttgggttttcttgcttga

SEQ ID NO: 1698 - DNA, 269 bp, unidentified
  misc_feature 1..269: note = Ga0180732_1000469 JGI
  source 1..269: mol_type = other DNA
gtcaactacccaaacctaaaggattgggcttgttccgtgaggttcaacgcaagagctgattagagggcaaagaaacaatggaaataaaaatgcagaagttattaaagagaaatacatacacacctacagatacttctctcgtctgtagctctgtggccgtgtctttaaacagagaggaaactctcagtgagcatggcttaaaaacctttgataacaccctcgaagagaatcgacctcagcatagagaggggcaaacattatctgccaag

SEQ ID NO: 1699 - DNA, 828 bp, unidentified
  misc_feature 1..828: note = Ga0394881_0000594 JGI
  source 1..828: mol_type = other DNA
atgcaaaaagtatttgtgttggacaaaaacagacagccccttatgccttgccatcccgctagggcgcgagagttattgacattggggaaggcatcggtgttcaaacgatttccatttacgattattctcaagaatcgtgaaggtggcgaactgcaacctatcgctctcaagattgaccccggcagtaaagaaacaggcattgtaatggtgggggatttcaagcgtggcaaacgggtgatttgggcgggtgtgctagagcctcgtggacaacaagttaagaatgcgatagaaatccgtcgcactttaagacgtgggcgtagggcagtaaatgccactcgttgggcattgtacaattgtctgaaaaattcgggattgcctatcgaagtcggtacaggcggacggacgaagtttaaccgcactaggcagggctacccaaaagcccattggattgatgcaagttgtatcggtgagagtggcatctgtgtttatcttgagccgaatatgtcttacttgcacatcaaagcaacaggtcatggttcgcgtcaaatgtgtggcaccgacaagtttggctttccaatacgccatcgtttacgccaaaaacgccattttggatttcaaacaggtgatatggttaaagccgttgtcatcaaaggcaagtatgtaggtgttcatgttggacgggttgcgtgtcgggcaacaggtagttttgatatcacgaccaaagcaggtaaagtaactgttaattacaaaaattgtagcatcctgcatcgcgcagatggctatagctacgcttatcaaagaaaggagtggcattcctctgtcagctaa

SEQ ID NO: 1700 - DNA, 253 bp, unidentified
  misc_feature 1..253: note = Ga0394881_0000594 JGI
  source 1..253: mol_type = other DNA
gtaagcaatccatcgccaaaagcgaagaccctttaataagcctcatgcttaccagattcagcccattcgggctacgttaagggtgaatacataggtacttcgggatacttcaccagtcccgaactctacggtacacgattaaacaggcaaaatggaatatgcccgtgtcgtgtacataaaccactcactaacattatcgaggtgaacattacatccgcaaggacaggaaaaaatgaggtaactcatgcaaaaa

SEQ ID NO: 1701 - DNA, 795 bp, unidentified
  misc_feature 1..795: note = Ga0209591_10074768 JGI
  source 1..795: mol_type = other DNA
atgcttaaaccaaattacgttttcgttctagatacccgcaaaatcccactcacgccatgtctgccctctgtagcatctcgcttattggatgcagggaaggcagcggttttcagaatgtttccgttcaccatcattctcaaaaaggaggtaaatgttacacctgaacctattgaactaaaaatagacccaggctcaaaaacaacaggactagcaatcctgcttggtgccaaagtcatctttgcggctgaactaacccatcgggggagagcaatcagcgcgtctttggaatcaagggcagcatcaagaggtagccgtcgggcacgccatacccgctatcgccagccgcgattcctgaaccggacgcgccctaaaggctggttggctcctagcctccaacatcgggttctaactaccctgagctgggtggagaaattccgccgctatgcgcccattggctcaatcactcaggagttagtcaggtttgatttgcaacagattgagaaccctgaaattgtcggggtcgaatatcagcaaggtgaactcgctggctacgaagtcagagaatatttgctcaacaaatgggataggaaatgtgcttactgtgacgcccaaaacctacccttgcaggttgagcatattcatcctaaatcaaagggagggagcaaccggatctctaatctggctctggcttgcgagaagtgcaacctcaaaaaagggactcaagatattaaggatttcctcaaaaagaaacctgaactactgaaaagcattcttgctcaagccaaacggccatta

SEQ ID NO: 1702 - DNA, 302 bp, unidentified
  misc_feature 1..302: note = Ga0209591_10074768 JGI
  source 1..302: mol_type = other DNA
gtcagatacccagccctaaaggactgagcttgtagactgcccgactctagcgagcgggtataaaccaagctaatctgaccagcctaagtcttcacggttcgacttggctcaccgtaaactggctacgttttttgagtcacgacaccttggaatcaagctagttccctgctctgtcatctgcaattaaacagtcttaaggtcactgagacagtgttgcaggtctaacaagctcttaaaacattggcgaagcaaacattatcccttacaggaaactaagcgtcataatgcttaaaccaaattac

SEQ ID NO: 1703 - DNA, 900 bp, Lactobacillus mucosae
  source 1..900: mol_type = other DNA
atgatgcaaaaacaaaaacaagttaattatgtctacgtagttgacgccaacggcacacccgtcatgccgacttcacgcttaggcatggtgcgccgctggttaaagtcgggccaagcggtctggtacggaaatagtcgtacgactatccagttcgtccgctcgattgatacgcagacccaaccgctgacgctgggcgtcaacaccgggtttcacttaggtatggcagtcgttggcaatgatcgcgaatactatgcttcagaaagcattcgtaagtcggaaaaggatcggatcacggcccgccgcgagtatcgacggacacgacgcaaccgcctgcgttatcgtaagccacgatttaacaatcggcggcgaaaagcaggttggctcgcgccgtccgttcagcatcggctcgagtttacggttcgcgagattcagcgcttgtaccggttcttgccgatcagtcagctggtcgtcgaggttagtcccttcgacaaccaaaaacttgccaatcccaacatcaagccgtgggaatacacgcaaggaaaaatgcacggctatcaaacagttaaggattatctgctggcccgcgatcataaccgtgatgccctggatggtcaagtctacccggcctcgcagctgcgggtgcaccacctcgttcagcgcaaagacggtggcacgaatcagcccgacaacctggttttgttgagtgacgtgcatcacaatcaagccaatcacgttaacgggacgctggccaagctggcagccaaccgacaacgaacgatcgactatcggggagcttactttatgagcctgcttgccagccgtttgaatcgttattttcctgactacgtgcagacgcagggctatctaacggctaatctgcgtaccgttacgggattgtga

SEQ ID NO: 1704 - DNA, 321 bp, Lactobacillus mucosae
  source 1..321: mol_type = other DNA
agcagtcaacagaacccactactaaagtagcgggcttgcggtgcaaaccgtaagcatggttgattagcctcagtcatctttggatggctacgttaccgctgaatagataggtactctggaatgccaccctagttccagactctacggtcagccattaaacagagccaaggttccggctcagtgtggctgatatacaaaaccagcggataaccttggcgaagggtactcacgtatcggtctttgaccagatgcgacttactgattcattaattgattctagaaaggagtggcatgatgcaaaaacaaaaacaagttaattat

SEQ ID NO: 1705 - DNA, 1479 bp, unidentified
  misc_feature 1..1479: note = Ga0256829_1004322 JGI
  source 1..1479: mol_type = other DNA
atgaaccgagtaatcgtactcgatacgaataagcaacaactagcaccttgccatccagcaagagctagagagttacttaggaatcaacaagcgtcagtctatcgtaaacaaccgttcacgatcatacttaaacatactgtagatgtagtcgatacacctactagatacgaactcaaaatagaccccggtagtaaaactacaggagtcgcggtcgtacaacacaccaccaatggttctaaagtagttatgggtatcaacctacaacacagaggacacatcataacacaacaactactagctagaagacagttacgtagttctagacgtagtagaaacttaagacatagaccagctaggtataataaccggagaagatcgtcagactggttacctccttctatacaatctagactagataacgtacgtacagtagtcaatcggttactaagaaccatacctataacgtctataactatggaagatatcaagttcgatccagctaagatgactaacaataacatacatggaaaagagtaccagaacggtaccttagtaggaacagagatcaaagagtatctcttagccgctaataaaggtacgtgtcagtactgtcacggtaaaactaatgataatcggttagaggtagaacacgtacaccctaaatcaagaggtggtagtaactccgttactaacctaacgttagcgtgtaggacgtgtaacatagctaaaagtaacatgctgctcccagagtggaaagcacacttggggctctctggtaaaccgttagatataatacgtatatctgttatagataaactaagactcaacaagactgttaaactcaaagatgctacagttatgaatgtgctacgtaagcatcttaaacatctcttagagtcgtacgggctaccagtagaatatgccttcggttacgttactaaatacaatagaactaatcagaaacacagaaaagatcactggatagatgctgcgtgtgttggtactactggtactaacgtatacatccataagaaacacaaatgtctaactatgcgtgctatgcaaaataacaacagacagatgtgtcttagtgataaatatgggttccctagaactagacctaaaggtcctagtaatgtctgtggttatcgtactggagatctagtcaacgctgtggtacctagaggtaagtatataggtagctatacaggaagaatatccgttagaaccagcggttacttcggtattaataaaatagatgttaactataaatatatgaagttactacaagctaatgataactataaatactcttatggcacacctacactacacaatatcatacatagagagaaccaaaacctctctaaactagttcatgatataggcgccaaacactacactatccaaaagatggttaagcatggtcaacaaggtaacactgtacgttatcttacaacggttactatagcggcatag

SEQ ID NO: 1706 - DNA, 285 bp, unidentified
  misc_feature 1..285: note = Ga0256829_1004322 JGI
  source 1..285: mol_type = other DNA
gtcaactaccactacctgaaggaagtggcttgtaatatagctacgacctaaccataggtaagacttgtaatatagtctaagttgtccagtctaagtacttagagtactacgttaggatagaatatataggtaccccgcggtggccgttccagcccagggctctacggtatatagttaaacaggtctgtgtggaaggaccagtgctatatacttacaacctatccataaccttgacgaggagcacataacagttatcctagtggtaactagaaacatagtaaggaa

SEQ ID NO: 1707 - DNA, 585 bp, unidentified
  source 1..585: mol_type = other DNA
atgcgtggaaaaccattaatacctacacgacctggaaaggcaagaatacttttgcagcaaggaaaagcaatagtaattcagcgagcgccatttactattcagcataaacttgagacacatctgagattgattgaaaaactgaagaaaatactacctgtaacaaagataggagtagaagtagcgagttttgatatacaaaaaacccagaatccagagattaaaggaatagagtaccagcagggagagttacagggttacgaagtaaggaaatatatgctggagaagtggaagcataagtgtgcgtactgcggcaagattaatcttcctctggagattgaacatattatacctaaattacgaggtggaacagatagagtttccaatctggttatagcgtgtcataaatgtaatcagaagaaagggaatcaaacagcagcagagtttggacatcctgaaatacatcagaaagcaaagcaagcattaaaagaaactgcgtttatgaatattgttagatggagactggtgaatactctaaagtgggttggacctgtgggtatattacaaagcatgctagaattaaattag

SEQ ID NO: 1708 - DNA, 257 bp, unidentified
  source 1..257: mol_type = other DNA
accaatcaccacttattaaaatggatggtctgcctcgtgagagataagggcaacaggctgattatggggcgttaaaagatgcagaagttattggtagagtttcagaacacaccagtagtagatactcctcaagtcccctgctctgtaagtgagacattaaacagagataaaaagtctcagtgtaccctgtatagtactggccaataacagctccgaagaggacttacactctggcaagagtggacaggcgttgagcg

SEQ ID NO: 1709 - DNA, 1308 bp, unidentified
  misc_feature 1..1308: note = Ga0209204_1004127 JGI
  source 1..1308: mol_type = other DNA
atggtttatgttttatctattgaaggcaaacctttaatgccaactaaaaggtatggtaaggttagacatcttctaaaacaaagacttgctaaagtagttaaagttaaaccttttactattcagttactttatgaaactactaactatacacaagacattacacttggtatagatagtggctataattatataggtttttctgctgtaacagagaaagaagaactaatctctggtgaagttaagctaagaaatgatatacctgaacttatcaaagaaaagcaaatgtatcgtagaattagacgaagtaaactaagatatagaaaacctaaatttaataacagaacatcatctaaaaaagaaggatggttagcaccttctattaaacataagttagattctcacattagatttatagaataccttaaaaagatactccctataactaatatagttatagaggtagctaattttgatacacataaactaaaaaatcctaacgtagaaggtgaaggttatcagcagggagaacaacaaggcttttataatcttcgtgagtatattctttatagagatgactatacttgtcaattatgtggtaaaaccaatgttccacttgaagtacaccatataggcttttggaaaggagatagaacagatagaccaagcaacctaataacactatgtactaaatgccatactcctaaaaatcataaagaaagtggcaaactatatggtatgaaacctatacaaaaatcactgaaggaagcgacatttatgtcaactgtaaggtggaaattagttaatacattaatgtgtaactatacttatggttatattacaaagtctaaaagaataagccttaacttagaaaaaactcattataatgatgcgttttgcatagcaggtggaactgttcaaacaagagtagaacctatatattttgaacaagtgagacgaaataatcgttcctttgaaaagttttacgatgctaaatatatagatataagagacaactctattaaaacagggcaagaactatttaacggtagacgaacacgcaacaaaaactacaatatagaaaacttaagactgtttagggggcaaagagtatctaaaggtagaagaagtattcgtacacaaaggtatttttatcaacctaaagatatagttatatttgaaggtaacaagtatattgctaagggaatacaaaacaagggtagttatattaaacttgaaaaactgcctaaacctgttaaaacagaattagttaaaccttatatgtttagaaaaggattatgtattctgtag

SEQ ID NO: 1710 - DNA, 270 bp, unidentified
  misc_feature 1..270: note = Ga0209204_1004127 JGI
  source 1..270: mol_type = other DNA
gtcaactacccaccgcctatagaggcgggggcttgtagaaatacaagctcggttgattagcctcagccaccagcgatatgctgacggggctacgttatatgggaacatatagtcaccataggatgctccacaagtcctatgctctgagggtagtggttaaacatctctgaggggtaggagaagtgctgctactatacaaaaccccatataacattggcgatgtggacctacaggcttttgcctgaattacctttaaggaggtttaatatg

SEQ ID NO: 1711 - DNA, 1023 bp, unidentified
  misc_feature 1..1023: note = Ga0102924_1014628 JGI
  source 1..1023: mol_type = other DNA
atgaatgtagtgtatgtactttcaccagacaaggtgccactcatgccttgctcgtgcgcgattgctcgcttgttgctcaaacaaggaaaagcaaaagtggcccgccgaaccccttttaccatcaaactgcatactcagccagagagcacctacacccaacccctgacgcttggaatggacacaggcagtgcggtgatgggttcggcagtggctgatgaacagggcaacatattgtatctctctgaagtagaagtgcgcaacgatatcgccaccacgctcaaagaacgggcttcctatcgccgcaatcgtcgtcaacggaaaacccgctaccgccaagcccgatggctcaatcgcaagaattccatcaagacagggcacttttcccccacgatgacgagcaaaatcgacgcgcacctgcgagaaattcgctttgtccagtcgttgttaccgattcactccctaatgctggaaacagggacatttgaccctcatgccttgaaacatcccgaggtcttgcagaacaaatggatgtaccagaagggcatcaactacggttttgccaataccaaagcctatgtgctcacacgagatggctacacctgccagcactgcaagggaaaagcaacagatcggcggttagaggtccatcacatcattttccgcagcgaacggggaagcgatgaggaagcgaatttgctcaccctctgcaagacctgccacgatgccctccatgcagggagcatcacgctcaaacaaaaaggcgcgagaaaaggaaatctgcttcatacgacgcagatgaacagtatccgcatccagttgctccggcgcgttgcggcagaggaaacctggggctttgtgaccaaagaacaccgcctcttggcaaaacttcccaaagcccatgtgtttgatgcagcggtcatcgccacacggggaacgatcccaacctttcacacgacaatcatgcttgcgaagagattcaaaaacccctgccgtgtttctgattctctcctgttggaatggtga

SEQ ID NO: 1712 - DNA, 298 bp, unidentified
  misc_feature 1..298: note = Ga0102924_1014628 JGI
  source 1..298: mol_type = other DNA
gggagccacggagtcttcagccctgtagcttcttcggaagcctgagttcaccagactcctttccagaaatgggaagaccgttcgagtggttatgatacctgcggttgacgcatcagactgccgctctatcgcctgtagttaagtagaactgagggaaggttcggtgctacaggtgcaaaaagctgcttgaacactgtcgagatgaagtcggattctcttcctggtcacaggggagggatacgcaccacccggcgcttgccggagcatttttccgaaaggaatcgccgtcatgaatgta

SEQ ID NO: 1713 - DNA, 1509 bp, unidentified
  misc_feature 1..1509: note = Draft_10001674 JGI
  source 1..1509: mol_type = other DNA
gtgcaagataaagtctacgtagtttcaatgaacaaaaagccactaatgccaactacaaactttgggtacgttagaattttattgaaacggaaaatggctaaagtcatactatcaaagccgtttaccgtgcagttactttttgaaaccgaagaaaatgttgtaccgactgtgttaggacttgatcccggtcgggtgaatctagctattactgtattagaaaaagaatctggtaatgttttaatttcttcggagttggtaacccgtaataaaagtgtttccaatctaatgaaggaacgaaaggcgcaccgaatgattcataggggctgccgaagagccaaaaaaatacgtagagctaaacattctaagacggtctttaaaaatgccaaaaacatcatacaatccggcgctttgaaacccatcaaggtaacgtatattaagccaaaaccagctaggtttttaaataggactagaaaagaaaattggcttactccaacggccaatcatcttttggaaacgcaccttcattatgtaaatcttatatgcagaatcatacccgtaagtgaaatagtcattgagtacagcaagtttgatacacagaaattgaacaatcctgcaattcaaggaaacgagtatcaagaaggactgcttaaagggtatgatagtgtccatgattatatttatcaagcacaagacaagcattgtttgatgtgcaaaaacaagattaaacatgatcatcatattgttcctcagcatgaaggcggtagtgaccatccggataacatagcgggtctttgtaagaaatgtcatactaaagctcatacagataagacgtttgttgctgaaattaaagtcaagaaggaaggatcaaaaaaatcctatgatagtgtcggaattcttaattccatcatgccaagagtactgcaaacaattcaagaattgtatgggacagaaaatgtcaccataacgacgggtgatcgaacaagtcaggcaaggaaagcgtatggcctcaagaaaatgcactgtaacgatagctacgttattgccctgtcaaatgttgatcatgtaagtcgtatacgcgatattttgccttatcagttcatgcaataccggaggcataatcggaaagtatgtgatgctgtaagagaacgtcattataaaaataatgacaagaagttagtcgcatccaacagaacgaaacgatacgagcaaaaggacaattctttatttgagtataaaaagcaactcaaagaagcgggactgactaaaaagaaaatcaagcaatctatatcaaatttaaacgttgagccatctaagaaacggcttaaaacgccaaccaaaaaacttgctattaatgcaggatgcaccgttctttataggtctaaacgatatgtggttaatggtactttaaataaaggcataacattgaaattccacggttttgataaagaaacgttctctattgaaaaatgcaaattaattacaaggaattcagggttagtatgtagttaa

SEQ ID NO: 1714 - DNA, 274 bp, unidentified
  misc_feature 1..274: note = Draft_10001674 JGI
  source 1..274: mol_type = other DNA
gtcaataacccctcattaaaatgagaggcatgttagattagcactttccgcaaggaaagaactttacctaatatgttatcaagtgtgcttggtagttattgaacagggaagagagatttacaagacaccttaaaataccactcccagttttaagccctgtgatacttgtatatctgtcccaagggagactcaccgacttaacttgtttgccaacaaacaggaagggtcgtgtttaccaaaattacgaaaggaattcatataagtgcaagataaa

SEQ ID NO: 1715 - DNA, 1050 bp, unidentified
  misc_feature 1..1050: note = Ga0306921_10158369 JGI
  source 1..1050: mol_type = other DNA
atgccacgcggccagagctcgagaattggtgaggaaaggcaaagcagtcgttgtgcgtcgctacccgtttgttattcgcctaaaaaaggatcattcggggcggcagccaatagccatcaaaatcgatcccggagcaaacacaactgggatcgcgctcgtccgattagcttcatctactcaggtcgttttgcatctttccgagttgacgcacgggggggatgcataagggagatgctcaataaacggcgtgcatccaggaaaagtcggcgtgcgcgcaaaacccgttatcgtgcgtcgaggtttaataaccgcatcaggcacgaaggctggttgacaccaagtctgcattcgcgtgtagacaatgtgatttcatgggtcaggcgctaccagctgtgggtaccgattagcgggatcgtcatagaggccgttcgtttcgacattcaaaaactccttaatccggggatatctaacgcggaatatagacaaggcacattgttttcgtacgagctaagagagtatctcctcgaaaaattccagcggacttgcgtctactgtggaagcgagaacgtccggcttgaaattgatcatgtgcagccgcggtccaaaggcggaaccatgaaccctaacaacctcgtactggcttgccacggttgtaaccgggctaaatggagccagccgattgaagacttccttgcaaataatcctgaacgcctaaagcggatcaagagccagcttcagacctcgcttagagcgactgcggcgataaacgccactcgcacaaaaattctgctggaacttttcaggatgcatctgccggttgaggtatcgacgggaggtgaaactaagtttaatcgaactcggcttagcattccgaaaagccacgcattagatgctgcatgcacgggcaaaacacaggaattgctcggatggaatatgtctgtgctctcgattaaggcctgtggcaggggctcgtatcagagaactctcctagacaagtatggttttccgagaggttttttgatccggaagaaaaaaaccaaaggctttcag

SEQ ID NO: 1716 - DNA, 296 bp, unidentified
  misc_feature 1..296: note = Ga0306921_10158369 JGI
  source 1..296: mol_type = other DNA
gtcagctacccacgactaacatcgtgggcttgtagaaatacgagccgtggttgaccagaccaagaaagcaaaaaatgcgatctacgttaaaatacaagtcaaagacccactccggagtgcttcctcagctccggaccctggaagtcccggttgacgttacgggaaaggtaaagcccggcacgaccgagacgggtccgccagatgcggatcagactggttttcaacatggtcgaggggagcgtccaaaaggactgtcaccttctcagcaacgagaagagaaaagcggggtaacccgc

SEQ ID NO: 1717 - DNA, 777 bp, unidentified
  misc_feature 1..777: note = Ga0103869_10001850 JGI
  source 1..777: mol_type = other DNA
atgcaaagagcgttcgtgctagacaagaaaaaacaaccgttgatgccctgccatccagcaagggcgcgagaactattacgtaaggggaaagcgcgggtcttcaagcaatacccttttacgattattctcacagaacgggaagcagggacggtacagaatgtcgctttcaagatagatccgggtagtaagaaaacagggattgtgttagcggcagatttcaaacgtggtaagcgtggtatttgggcagcggtactcgaacatcgtggacagcaaattaaagccgcacttgaaacccgtcgtaacctacgacgtagccgccgcgctcgacatacccgttatcgtccagcacggtttttgaaccgacatacgggcaaagggcatttaccgccgtcgctgcaatcgcgtattgagaatgtctggacgtggctatgtcgtatccatcgtgtatgtccgattagtagcatctcacaggaactcgtgcgcttcgatacccaactcatgcaaaacactgagatttcgggtgttgagtatcagcaaggaacgctgctcggtatggaagtccgcgaatacttattcgagaaatggggacgcaaatgtgcctactgtggtaaacaagatgtgccactggagatcgaacacatcacacccaagtctcgtggcggctcgaaccgtgtcagtaacctaacaatagcctgtcacaattgcaatcaagaaaaaggctcccaaaccgcagtcgaatttggtcatgctgaaattcaaagcaaatccaaacaaccg

SEQ ID NO: 1718 - DNA, 248 bp, unidentified
  misc_feature 1..248: note = Ga0103869_10001850 JGI
  source 1..248: mol_type = other DNA
gtaagcaaccccgcacctacaggtgggggcttttgaagcccaatgcttaccagactaagcgaaagctacgttaggggcgaatacataggcacttcggaatgcttcaccagttccgaattctgcggtggatggttaaacgggacgattgggagtaagccagtgccattcacaccaaaccgctccataacattgtctaggtgaacttatctcccgcaagggaagatttttgaggtaactcaatgcaaaga

SEQ ID NO: 1719 - DNA, 1629 bp, unidentified
  misc_feature 1..1629: note = Ga0114939_10008276 JGI
  source 1..1629: mol_type = other DNA
atgaaaagtaaacgagacaggagacaaacactcagaagtacttccctagcctctggcaagtctattgaagatttctgggctgatgctatacctcttgagggtatgggtccgaaagcaatttcgaacgacacagcttctgctttttatctcaatggcgaagggacgtctgaaaagaaagagaatgagaaagaggaggagaaatcgaaagatctatctcaatctggacctgaatctggaaataaggacaaacacaatgagattatatcaaaatcaaattattcttcgagacagaatccgaagaatacagtgtctgtatttggaccagataagaaaagattaaaaaatacaaggatatctaaagcgaagaaatggataaaacaaaagaaggcaagacaggtcaaggataaatctagacttggagaatttgcgatacagttattgaacaaacctgttggtaagataagagttccggtagtcgataaagatggaaagccattaatgccaacgttgtcgggcagggcaaggagatggattgagaaagggaaagctgtcggtaagagaactaagacaggaatattttatgttcagttattggtagaaccttctggaagaaataagcaagatattgtagcaacattagacccaggaagcagatatactggagtagcagtatgttctaagaaacaggttctatatggatgtaatctagaacttatagctgatgaaaaagaaaatagatttgcatctatcaaaaatagaatggataagagaagagaattgagacgaggaagaagatatagaaattgtagaagaagagaagccagatttgataatagatcgaaaacgggtaagatggctccatcaataagagcaagaaaacaattggaactgaaagtgatatcagaattatgtgagatatttcctatatcagttattgggatagaagatgtagctttcaatcactatacaaagagatggggtaagaacttcagtcaagtagaggtaggaaagaaatggttatatgaagaactgaagaaaatacctggaattagagaagttagactaataaaagggtatgatactaatatcagaagacaacaattaggactagagaaaggggctaagaaagaagaaagagaagtcagagcccatgtcaatgattgtatagcgatgggatctataatattggggattggaatagagacaaagactcggttaagacttggtataaattttgatatcattacaaggcctaaatattcaagaaggaaattgcatgatgagaaggcatcaaaaggcggaattaggaaaagacatggtggtacgacaatagattggacaaatatcagattaggagattatgtggaggctgctagaactgaaaaaggtattggaaagatgatttatagaggttgggctggcggattcagtagtggtaagaatgataataattcgatatctttatatgattttgattggaaaagaataggtcaatttggagttaataacgtaagattattgaatagaaggacaggactaatggtcaagagtatggagatttcagaaaatatagataatatctgtaaatatgggactgaacaggtgagaattgaagatgcttggaagtag

SEQ ID NO: 1720 - DNA, 241 bp, unidentified
  misc_feature 1..241: note = Ga0114939_10008276 JGI
  source 1..241: mol_type = other DNA
gtcaactaccccgccctgaagggcgggcttgttgtgagactcaggactcgccaagataaccaaaaaggtgaataagttagactagcctacttagaggtgaaataagtcaatgaaaagtaaacgagacaggagacaaacactcagaagtacttccctagcctctggcaagtctattgaagatttctgggctgatgctatacctcttgagggtatgggtccgaaagcaatttcgaacgacaca

SEQ ID NO: 1721 - DNA, 1005 bp, unidentified
  misc_feature 1..1005: note = Ga0311341_10020266 JGI
  source 1..1005: mol_type = other DNA
atgcaagtaccagtaatagaccaaaaccgaaatgctctgatgccgacttctccggcaagagcagcacagtggattaagtccaagaaggctaccccattttggaatttgggtatattctgtgtgcggttgaatcaacccacgggaaatatcaaagaaaatatttcgtgcggggtggacagcggaagcaaacgggaagcggtttgtgttaagtcctcaaaacacacttatgtcaacattttagcggatgcggtgacatgggttaaggaagcggtggaacaaaaacggaatgctcgtagaacaagacgaaatagaacgactccatgtcggaagaacaaatacaatagaactcgtggaggattgcctccttccaccaaggcaagatggaattcaaaactccgcattatcaataaactaaggaaaatctatcctattaactcatatgtggttgaagatattgctgcttccaccaaaaagggaaagaaatggaatgtgacgtttagtccgcttcaatgtggaaaagaatatttctacatggaattggagaaacttggaaaactcacgactaagcaaggatatgagaccaaagagatgcgggataaattgggattgaaaaaatcatccagtaaaatggctgagatttttgaggcacataacgtagatgcttgggtgttggctcattcagatgtaggtggagatttagacaacaaggaactaacgagagtagttccattgagattccatagacggcaactccatatgttccaaccatctgtgggtggattgcgaagaccttatggtggaacgatgtcactgggatttaagcgtgggtctttggttcggcatccaaaatatgatttgtgttatgtaggtggaactttgggagaccgaatttctctgcataatctaaaagatggaaagcgattatgccagaacgccaaaccatcagatattaagtttctggcatacaactattttcgttgctcctcccctactctaaagggatag

SEQ ID NO: 1722 - DNA, 168 bp, unidentified
  misc_feature 1..168: note = Ga0311341_10020266 JGI
  source 1..168: mol_type = other DNA
gtcaataacccacgaccctaaagggtcggggcttgaaagaatataattaaccaatatgtttagacaagttaaaacgttgactacacaatcaacaactgaacgaaatggatgtggtaatccaaaatatattgaggatgcttcccaagtcctcttttcctatgttcgtca

SEQ ID NO: 1723 - DNA, 933 bp, unidentified
  misc_feature 1..933: note = Ga0265294_10058290 JGI
  source 1..933: mol_type = other DNA
atgagggttccggttctggattctcgcaggacgccgttgatgccgaccacacccgtacgggcccgcctgctcatcaaactggggcgggcaaaaccgtactggaacaagctcggcatcttctgcatcatcctgacctatggcgtacagcctgacaaccaggatctggtcgtcgggatcgaccccggcagctcctttgagggctggtccgtggtcggcacccaagagactgtcttgaacggcatgtcggagacccccaagcacgtcaagaaagcagtggagactagaagagtgctgcgtcgggcccggcgaggccggaagtgctggcgtcgcccggcccggttcaacaaccggctccgtggtcggcagttcctgccgccgagcacgttcgcccggtggaacgccaaggtacggatcctcaaccaactccagaagatcctgccgatcaccgccgtggtcgtggaggacgttgcagcagcgacgaagaagcactgcaaacggtggaacacgaacttctcgccgttagaggggggaaaacagtggttttaccagacgatccgggatcacggccttgatctgcacccgcgtgccgggtacgaaaccaaagcactccgggaccggttcggcttgaagaagacaagccagaagagcaagccggtcttcgccgctcatgcagtcgatgcttgggtgatggcggcggacgtctcgggtgcggagcagccgaccgaacgggggttgttctactggacgccgatccggttgcaccggcggcagttgcaccggttgcagccggataccggcgggatccgaaaaccctacggaggaacccggtcgctcgggttcacccgggggacgcaggtccggcacgtcaagtacggattagcctatatcggaggaacgttgaaaggaaagatgtcattgcataacgcggtcacc

SEQ ID NO: 1724 - DNA, 366 bp, unidentified
  misc_feature 1..366: note = Ga0265294_10058290 JGI
  source 1..366: mol_type = other DNA
gtcaactacccctggttaaaaccgggggcctgtgaacggctacgcaggaccaaacagtagactaggaggcaagaaattgcagcagcgttacgggctacaagaacggcgggatgtttccctagtcctgccctcttccgggcacgccgaacccgacgtacctctcggggtactaagcctgcctcgcaactccgaagggaaatgcaaccccggctcgaccgggagaaggtaataccatgagggttccggttctggattctcgcaggacgccgttgatgccgaccacacccgtacgggcccgcctgctcatcaaactggggcgggcaaaaccgtactggaacaagctcggcatcttctgcatcatcctga

SEQ ID NO: 1725 - DNA, 981 bp, unidentified
  misc_feature 1..981: note = human gut metagenome genome assembly, contig: NODE_1363_length_7809_cov_11.459247, whole genome shotgun sequence WGS
  source 1..981: mol_type = other DNA
ttggtttggaatgtacaggcaccgtgggatgtttatcctagtcccacgctctgcggtctgtgtttaaaagttctgagaggtaggaacggtgatgcagacaagaaacccattccaacattgacgaaggatgagaatcggccctcgggccgaacaaccggccttcgggccgagcaagcggagcctgcgggtatccgcaaaggagatactttgaaagtatttgttttgaacatgcgcagcaagccgctgatgccgtgttcgccagcaaaggcgcgacacatgctgaaggcgggcaaggccgtcgtcgtgcgtcgaacgccgttcacgatcaagctgaccatcgccacaggcgagacgaagcaggacgtgacgcttggcgtcgatgcaggcgcaaggcacgttggcatttccgccacgacggaaaaggaggaggtcttcgcgtccgaagtcgcgcttcgacaggacatcacgggacttctggccgatcgtctggcattccgacgtgcaaggcgcaatcgaaagacgcgctaccgcgctccgcgcttcaacaatcgcgttcgatcaaagcacaagggatggcttgcgccgtccgtggagaaccgtatccaagcgcacatttcgcgcatcgaggcggtctgcagactgcttcccgtcaccaagatcgtgattgaaaccgcatccttcgacattcaaaagatcaggaatcccgaagtcgaagggacgggctatcagcagggcgaccagcttggattctggaacgtgcgcgagtacgttcttttcagagacggtcatatctgtcagcactgtcgaggccgatccaaggatccgatcctcaacgtgcatcatcttgagagtcgtaaaacgggcggagatgcgccaaacaacctgatcacgctgtgcgagacatgccacaaggcttatcacgcaggaaagatcaagttgaaggtcaagcgcggtcaatcgttcagggcggaagccttcatg

SEQ ID NO: 1726 - DNA, 285 bp, unidentified
  misc_feature 1..285: note = human gut metagenome genome assembly, contig: NODE_1363_length_7809_cov_11.459247, whole genome shotgun sequence WGS
  source 1..285: mol_type = other DNA
gtcaataacccccgcctaaaggcggaggcttcaaagagcctttattgactagtctcagcaaacctcctctgggaggcgagctacgttggtttggaatgtacaggcaccgtgggatgtttatcctagtcccacgctctgcggtctgtgtttaaaagttctgagaggtaggaacggtgatgcagacaagaaacccattccaacattgacgaaggatgagaatcggccctcgggccgaacaaccggccttcgggccgagcaagcggagcctgcgggtatccgcaaagg

SEQ ID NO: 1727 - DNA, 1308 bp, unidentified
  misc_feature 1..1308: note = sediment metagenome genome assembly, contig: NODE_138_length_117839_cov_9.207605, whole genome shotgun sequence WGS
  source 1..1308: mol_type = other DNA
atgccatgcaccgagaagcgggcgcgcctccttctcagaaaaggccgtgcggtggtccaccgcatctcccccttcaccatccgcctcaaggaccggctcgccgaagagagcaacctccagccctgccgcctcaagctggacccgggattccggcagaccggcgtcgcggtcgtgcgagaggagcaggaccctcacggtcccgtccaccacgccctccactgcgcagtgatccaccaccgccaggaggaggttcggtccgacatgctcgcccggcgctctgcccgtcgccgcaggcggagctccctgcggtaccggcctccccgattcgacaacaggcgcaggccccaaagatggctccccccgtccctgcgcagccgcgtctgcaacgtcgtttcgatcgcccggctgtacacgaggctttcccctatcgcggccatcgacgtggagctcgcgaagttcgacacccacaagctccagaacccggaggtctcgggggtgtcctaccagcaaggggagctgtggggctacgaagtccgggagtacctgctggagaaatggggccgcaggtgcgcctactgcggcgccacaaacgtcccccttgagatcgaccacatcgtccctgtgtccaggggtgggacggaccgggtcagcaacctcacgctggcctgctcggcctgcaatcaggccaaggggaaccgaacggctgaagaattcgggcaccccgaggtgcaggagaggacaaagcaacccctggtaggtgcggcggcgatgaacgccacccggtacgcgatgctcagtgccctccggtcctttgggctgtccgtgtactcccacacggcagcgcggacgaagtggaaccggagcaggctcgggctatctaagtcgcacactgtggacgccctctgtgtgggggagatggccgcagtcgccggatgggagatgccggtgcttgggatccgcgcgattggcaggggtcgccggtgccggacgaacttcgacgcgcacgggttgcccagaggatatctgccgcgcacgaagcgggtgttcgggttctgcacgggggatctggtcgttgccgaggtgccaagtgggatgtacgcaggccggcacatgggaacggtcctgatccgctccagcgggaggtttgacatcaaggacctgcgcgggcggcgggtggcgcaggggatcaggtggcagcactgccgcctcgtacagcggttctgcgggtactcttacggaaaggaggaagcggcgccttcctccccacgcctgaaggcgggggccttcggcgccgcagaaggatggtga

SEQ ID NO: 1728 - DNA, 318 bp, unidentified
  misc_feature 1..318: note = sediment metagenome genome assembly, contig: NODE_138_length_117839_cov_9.207605, whole genome shotgun sequence WGS
  source 1..318: mol_type = other DNA
gtcatggaccccacggctaaagccgggggcttgcgatgagcaagcctgcccatgaccaggccgagcgcttgatccgacggacaaggggatgacggcgctacgttgccggcagtgctcgcagacccactccgggatgcttccccagtcccggaccctggaagccccggctgcagacaaccttcggggtgtggagaaacgggccggggcacgtgccggccggcaacatggccgaggggagcgcggagaggagtccatcccgcgcgtcaccaggcccgtaagggcgccccttcgggggcagaaaggaggtagggagccttg

SEQ ID NO: 1729 - DNA, 837 bp, unidentified
  misc_feature 1..837: note = Ga0376086_0041273 JGI
  source 1..837: mol_type = other DNA
ttgtcactgtttcgtctaaaaggcggaatcatcctgatagaggtgtgcgaagggactttcaaacttgactcaaggattatctccatgcgagtaccagttttatcgccagaaggacagccactcatgccgactaaaccaagtcgtgcaaggcgatggctaaaaagcggaaaagccaaaattgtttataacgatttgggcatttttaccatccaactgatgtttgagtcatctggcactaacactcaaccaattagtgtcggtgtcgatccgggtaaaaaatatacgggaattggcgttcaatcagctaaatctactttgtggatggctcatttacaattaccttttgaaactgtcaaagggcggatggagcaacgacggatgatgcgtcgtggtcgcaggggaagacgagttaaccgcaaagttccctatagtcaaagagcgcatcgccaagcaagatttgacaatcgacgctccaaaaaagttccaccatcgctccgagcgtcgaggcagctagagctgcggattattaaggaactgactaaaatctatcctctaactacagctgtttgggaagtggttattactcgtggcagcaaaggattttcacccgtaatggttgctcaatattgggcaattgaccaactcaagcaactgctgccagtagtcacccaagaaggttggcaaacatccaatctcagacagtggctggaattggaaaaacagaaaacccaaaaaggtgatgcaattccggaaacccatgcagtagatggagtggtactggcttctactcagtttgtccgatatcgacaactcaagggtaaacaaggatggtgggaa

SEQ ID NO: 1730 - DNA, 236 bp, unidentified
  misc_feature 1..236: note = Ga0376086_0041273 JGI
  source 1..236: mol_type = other DNA
gtcaactaccccgcactccgctcacgctgcgtgacggggcttgcaagagacaaggtttgcaacgcaagagttgactagcacgcttgagcctctatctggcacgcactctcaggtatttccctagcctgagttatctgcaaaacagcttgtcactgtttcgtctaaaaggcggaatcatcctgatagaggtgtgcgaagggactttcaaacttgactcaaggattatctccatgcga

SEQ ID NO: 1731 - DNA, 1308 bp, unidentified
  misc_feature 1..1308: note = MIS_10021274 JGI
  source 1..1308: mol_type = other DNA
atggctgtatttgtattaggtaaaggtaaattacctttaatgccttgttctgaaaaaagggcaagaaaattattagaggctaatcgtgctgtagtggtacgggtatatccgtttactattagattaaaagatagatcagatggtattatgcagcccttaaatgttaagcttgaccccggtagcaaagttacaggtattgccttaacaagagatgtagaaacggtaactattgatggtgaaatagtaaaaacggtaaacgttttaaacttatttgaacttactcatagaggggaactaattagttcttctttaaaaactagaaaagcttttagagctagtcgtagagctagaaatactagataccgatctcctagatttttaaatcgggctagacctaaaggatggttgcctcctagtctaaaccatagagtgacttctattttaaatttagtaattaaattaaaaaaattagtaccattaactaatataacacaagaattagttaagtttgatatgcaaaagatggtaaatcctgagataagtggtattgaatatcagcaaggtacgttgcagggttatgaagtacgcgaatatttgttagagaaatataatagaacttgcgtatattgtggtgtgaaaaatgtacctttacaaatagaacatatccaagctaagtcaaaaggtggtaccaatagaattagtaatttgacattagcatgtgaatgctgtaataaaaagaaagataatttagatattagtgtgtttttgaaaaataagcctgagttattaaataatatcttaaaacaagtaaagtcccctctaaaggatgctgctgctgtaaatgctactagatggtcattatttaataacttaaaaaaaataggtttaagtatggaggtaggatcgggaggtttaacaaagtttaatagagtgaacttaggactacctaaaactcatgttttagatgctgtaagtgttggtaaattaaatgttatcaataattggaatatcccatccttaattatgaaatcaacgggtagaggtagatatagtagaacctataataattcttttggttttccaataggatacttaatgaaaacaaaaagtattaagggatttcagacaggagatactgttaaggcactaattacaaaaggtaaaaagataggggaatattttggtaggttaacaataaaagccacaggatatttcactataaaaacacgtagtaccactgtaaatagcttatcttttaagtactttacgttgattcaacgtgcagatggctatagctatactttttaa

SEQ ID NO: 1732 - DNA, 272 bp, unidentified
  misc_feature 1..272: note = MIS_10021274 JGI
  source 1..272: mol_type = other DNA
ataagtcacccccgcagtaatgcggtatttttgaaaggaaatatggatttaacagactaagttgaatttatttaactacgttgtaatagagtttaagacctacctatgaatgcttcctcagttcatagctctagaagtttaaatcgcagacacgcttagggtaagcacgaaacgggtttagacataatgctgaattacaacattgtcgaggggagattcacagaaatgtgagcgtaacaaggcgcgtaagcgtaaaggatttttaaatggct

SEQ ID NO: 1733 - DNA, 513 bp, unidentified
  misc_feature 1..513: note = JGI24712J26585_10005370 JGI
  source 1..513: mol_type = other DNA
ctggtcggtggtcgggaccagagagactgtcgcaaacggcatgttggaggctccaaaaacgtcaagaaagcaatcgaaacccgaagaacgctgcgtcgcgcccgtcgtcaccggaagtgctggcgtcgtcctgcccggtttgacaaccggctcagcggccggcggttcctgctaccgagcacgtttgcccggtggaacgccaggatccgaattctggaccagctccagaagatcctgccgatcaccgatgtggttgtagaggatgtttttgcggtgacaaagaagaattgtcggcggtggaacgaaaacctctcgccgttggaggtcggggaacaatggttttatcaggcaaccagggatcgcggactcgatctacacctgcgtgcggggtatgagagaaaagaactccgggagcggttcggcttgaagaagactcagcagaagagtaaaccggtgtttgctgcccacgcggttgatgcgtgggtgatggcagctgacgtcccgggtgcggag

SEQ ID NO: 1734 - DNA, 375 bp, unidentified
  misc_feature 1..375: note = JGI24712J26585_10005370 JGI
  source 1..375: mol_type = other DNA
gtcaactaccccaccctgaatggtggggcttgcgaacggctaagcgagaccaaacggtagaccaggaggcgaccaatcgattgcagcagcgtttcgggctacatgaacgggtgggtgcttccctggcctgtccctcttccgggcacgccaaaacccgatctgctctctggagcactaagcccgtctcgcaactccgaagggaaatgcgaccccgattcgaccgggaggaggtaatacctgccatgcgtgtacccgtatcagacaccaatcaaacaccgttgatgccgacgaccccggcacgtgcccgtctcctcctcaagcagggaaaggcgaagccgtactggaacaaactcggcatcttcagtatcatcctca

SEQ ID NO: 1735 - DNA, 1452 bp, unidentified
  misc_feature 1..1452: note = metagenome genome assembly, contig: NODE_590_length_29055_cov_3.058414, whole genome shotgun sequence WGS
  source 1..1452: mol_type = other DNA
atgaaagtatacgtaatcggatggaatgggttcgggcttgcgccaacgacgccacggaaagcacgcattctgctgaaatcaggcagagcaagtgttgcgtttcgtcacccattcaccatccgtcttaaatataagaccgggtgtgcgcacccggctggaatgagcatcggcgtggacaccgggtcccagcatatcgggatcagcgtcatcagcagagagcaggaaattgttatcagcaaagaggaatacgagctccgctccaccatggaaaagcgggctcttctggagacaaggaagaacctgcgaagaagtagacggtcacgaaaaacacgttaccgtcatccgaaatttagaccggataccaggcgcacctatcaggaaacccagattaagcgaaataaaaatatgacacactggaagaaggagacgaatacatatgagtcgtcgagaccagaaggatggcttccgccatccatgcagtcaaaactggaccatcatatccgtatcatttccagatatcaggaagccttgcctcctgatacgaccttaaggatcgaagttgggaggtttgacgtccagcatatggagaatccgatgattcacggtgaaatgtatcagaagggagcacagtatgaatcagagaatctgaaagcatatatcttctcaagagatggttacacctgccagtgctgtaagcaaaaagccggaacgaaacggaaggacggaacgaccgtccgcctgatcgtgcatcatatcgatttccggagcaaaggtgcttctgataacccgaaacacttgatcacagtatgtgacaaatgccatacgtccgcagcccataaaccgggcggcatcctgtacgactggatgctaaaaaacaaaacagtagcaagaggataccgggatacggcggtcatgaacgtcttaagacgtcggctctggaaagcgttcccgaatgccgaatttacatacggaaatatcacggcagcggacagaaaaactttcggtcttgagaaagctcactgtaacgacgcaacagcgatcgccgcacatggactgaaacagatccgggacattccggatacaacgtattatcgccagatccggaaacagaaacgttctctgcatgaggcaacaccacggaagggacggaaggaaccgaaccgcagcgcaaagcggaatccaaagaatactagccagtccggaggtctgtacctgaatgataaagtgtgggtatttggacagtacggatggatcagcgggttcagcggaacaagcagtgtctatatcaagaaccgggatgggaaatacattcgggttcccgggaaaagccatacgctgatcccggctaagggattgattgcaaggactcattgtaataactgggctgtttatagcgcaaatacgattttatatgacaggcgggaaggaactattaagaccacagaaacataa

SEQ ID NO: 1736 - DNA, 259 bp, unidentified
  misc_feature 1..259: note = metagenome genome assembly, contig: NODE_590_length_29055_cov_3.058414, whole genome shotgun sequence WGS
  source 1..259: mol_type = other DNA
ttgaataaccgagcatgcgaaggtagaaaatggtgtctgtgcaggttcgcctgcgcagactagttgactagcctaaggacaaggtccctacaagccagtaagggaagccttagtactacgtcttatggagtgaataccctacccgacaagttgtcccatcggtatgggttcgggctacgtatggaacaagagttcaacgacccggtgatagaagctcccggacattggcgaggacaaatcacatcgaaagatgaaccgg

SEQ ID NO: 1737 - DNA, 1242 bp, unidentified
  misc_feature 1..1242: note = fermentation metagenome genome assembly, contig: NODE_421_length_49700_cov_20.654930, whole genome shotgun sequence WGS
  source 1..1242: mol_type = other DNA
atgaaagaaataaagtattcatttgtagtagatagtaggggaaaagctttaagtcctactaaatctgagaaagcatggtattttataaggaaaggcaaagcaaaattagtaacacagtacccattaacaattaagttgacttatgaggtagacaatacggatattagtaaactacacatgggtttagacgtaggacaaacaacaggaatagccttagtacaagaatgtaaaacaagaaataaagtaatatttaaaggtgagatagtccaccgtaaagatgtaagtagcttaatgacaactcgcaaaggttatagaaaaaacagacgtagtgaaaagaggtatagacctgttaggtataataataggtcatcttcaagtagaaagggaaggttagcaccttcgataaaaacaagacaagatgagatactaaggttagtaaaaaggttacaaaagtatgtgggtatagacaaagtagtaatagaggatgtgagttttgatataaggtgtttaacagatggctacaaaccgtataggtgggaatatcaaaggggtaataggttagatgagaacataagaaaagcgacattaatgagggataactttacttgtcaggaatgtggtgtaaaagacacaatattggaggcacatcatatagtacccaaaaggttaaaaggtagtgacacaataagcaatctaataacgttatgcaatagttgtcatagtagtgtaacaggcaaagaggaagattatatagataaatttcaaagtctaactggtggaaagcaattaggtttacgctacgcgattcacgtaatgcaaggaaagacatatttatataacagtataagtaaattggtgtcagatatagccaaaacagatgggggtacaacaagtaatagaagaattgattggggtatagttaagagtcatagtaatgatgcaatagcaataacaagtttaaaaccagatacagtaggcgtatacgagtataatattcaaccattaagaaagaagcgaaaatgtaagttagataaaagttcagtaatagtgcaaggggacagagtaatatatactccaaggggtaagttctcaataaactgttatgtaaccgcaatattaaagagtggaaagttaaaaggatattacaagttaactgggttattagatggtaaacgttacggtcctgtaagtgtaagaagtctaaggaaattggtaacagaccgaggtttacgcataagttag

SEQ ID NO: 1738 - DNA, 313 bp, unidentified
  misc_feature 1..313: note = fermentation metagenome genome assembly, contig: NODE_421_length_49700_cov_20.654930, whole genome shotgun sequence WGS
  source 1..313: mol_type = other DNA
tataaaaatatgtaaataactattagtttttatagacataactgttggtggtttcaagcctaagtgagtacagcattggaaacagtgaagtacaatgaactacgttagtaggaaaagttaaagacttacctttagatgtaaccatcagtctaaagctctaagagttattgaggaagactgttaatctaagtaatattagcataagtattataagaaaaccaaacaccgaaataacatgaactttctattgaccttggcaagaagggaaatactttgaaagaaaggtaggagaaatcctgatgaaagaaataaa

SEQ ID NO: 1739 - DNA, 438 bp, unidentified
  misc_feature 1..438: note = Ga0137379_10004000 JGI
  source 1..438: mol_type = other DNA
atgtcacaggtgtttgtcttagatacgaataagcaaccgctcaatccggtgcatcccggttgtgcccgcctgctcttgaaacagggcaaggctgcggtctaccggcgctacccgttcacgctgatcctcaagcgtacggtggagcgaccggagcttcagccgctgcgcgtcaagatcgatccaggcagccagaccaccggcctcgccctggtcaacgatgcgagcggggaggtcgtgtgggcggcggaagtgcgggaatatgtcctgctcaagtggcatcaccagtgcgcctactgcgacgcgcgcgctgtcccgctggaactcgaccacgtgcagccgagagccaaaggcggctccaaccgcgtcagcaacttaacactggcctgcacttcctgtaaccaacgcaagggcaatcaagacgtccgcgacttcctcaag

SEQ ID NO: 1740 - DNA, 312 bp, unidentified; identical to SEQ ID NO: 1009
  misc_feature 1..312: note = Ga0137379_10004000 JGI
  source 1..312: mol_type = other DNA

SEQ ID NO: 1741 - DNA, 768 bp, Homo sapiens
  source 1..768: mol_type = other DNA
gtgggtgtaccgcagcaatgcgagattttttatgaaaggatatatatggtttttgtattagacaaatctaaaaaacctttagatatgatcacaaacgctgaagctagaatactaattagaaaaaagctagctgtaatccataagatatatcctttcactattaggcttagagacaatagttgtataagtaatgatagaacttataccgttaagcttgatccaagttcaagacatactggagtggctattattgatgataaagatcaagtagtcatgttagcagagcttgagcatagaggtcatctagttaaaaagaatatggatagcagaagagctattagacgcaaaagacgcagtagaaagattagatatagacctgcaagatttttaaatagaaccaagcctaaaggttggttagcacctagcattaaatcaagggctgacaacgtgattaatttcattaagaaatataagaagctcttgaatatcaataaggttatgattgagaatgtaagttttaatgtagctcaaatgagttctaacactaagctttggggtaataattaccaacaaggacctttgtaccaacaaaagcttagaagttttatattcggccgctcaaacggcaaatgtgtctactgcggagctgaggcaaccgagatagatcacattgtgcctagagctaaaggtggaactaatagcacatataatttagtagcatcttgtagagcttgtaatcaaatgaagtctaataagactttgaaagaa

SEQ ID NO: 1742 - DNA, 272 bp, Homo sapiens
  source 1..272: mol_type = other DNA
gtcaattactcgacaaaaacaaatcgagctcgattgaccagactcagtttatctaacttaactgttagattaaactacgatagataagttatcacacccatggatgcttctccagtctgtggctctgtgttatctatcattgtcgaggagagactagcttagaactttaattgggacattagtctctggttgatagctgtaagttagcgtgcctactgtaaaaggtgggtgtaccgcagcaatgcgagattttttatgaaaggatatatatg

SEQ ID NO: 1743 - DNA, 1284 bp, unidentified
  source 1..1284: mol_type = other DNA; note = Chloroflexi bacterium
atggtcttcgtcttagacacaaagaaaaagccgctgatgccttgcacacccaagcgggcacgacagctgcttgccagaggcagagcagtcgtccaccgggtggcacccttcgtcattcggctcaaagatcgccaggtggaggactcggtcctgcaaccgcttgccctgaaaatcgatccgggcagccagaccaccggcatgacgctggcccgtgtggaagacaggagcgagggagccatccaccatgcggtgttgctggctgaagtgcagcaccgaggccacgaggtgcgagcgcgcaaagtcacgcaacgccatgctcgcagacgccgccgcagtgccaatctgcgccaccgggctgcgcgcgcagccaaccgccgcatcgctcgtgggtggctgccgccgtcgctgctttcgcggatcggcaacgtggtgagttggacgaagcgcttgcgtcgttttgctcccgtcacacgcgtggatgttgagtgcgtccgcttcgatacgcaactactccagaaccccgagatcactggcgtccaataccagcatggggagctttttgggtgggaaatacgagcctatctcctgctcaaatatgcgtaccagtgcgtctactgcggaaaacgcgacaccccttttgagctcgatcatatccggccccgtagccgaggcgggtccagtcgcatcacgaacctggcattggcctgtcacgactgcaatcggcagaaaggggcgcaaacggcggcggaatgggggcacccggaagtggaggtgcaggcaaaaacaccgctcagggatgcggcggcggtgaatgccacacgccacaaactcgtccaggagctaggcgtgttcgggttacccgtcggcacctggacgggcgggcgcacgcgctggaatcgcgcccgctttggcatcgcgaagacgcatgccaaagacgcgctctgcgttggagatctcgcaggcgtgcgagagggcaggctgaagaccgtggcgatcacggccaccggacggggggagcattgtcgcaccaattggagcaaacagggcttcccgcgcggataccgcctgcgccacaagcaggtcaagggtttcaagaccggcgaccgggtgcgggccgtcgtgccggacaagctcaagaccaggggcatccatgtaggacgcgtgcaggtgcgcaaaagcggctcctttgatatccagacgcacgagcgggaggtcgaaggagtcaatgcgacctactgttgcctggtacagcgaggcgatggctatgcctatgcgcttgcatag

SEQ ID NO: 1744 - DNA, 332 bp, unidentified
  source 1..332: mol_type = other DNA; note = Chloroflexi bacterium
gtcacgaacccccggatgacatccgggggcttgcagccagaacgctcgtcgttcgcgttgcaagctccatagtgtccagccttagcgtccaatggcgcaggccgccaaatacggacgctccgttcgacgggtcatggcacccagggacgcctcctcaatccctggccctgccgtccagggttaaaaggttcgcaggggtcgagccggtgctctggacccatcaagcccgttgaccattggcgagaggagcatcttgggaatgcctgcccaggatcgtcagacagccccttacggggtcttctccaaagcgcgagaagaaaggaacgaggatg

SEQ ID NO: 1745 - DNA, 966 bp, unidentified
  misc_feature 1..966: note = Ga0072941_1026019 JGI
  source 1..966: mol_type = other DNA
atgtttgtaggagtaattggaaaatcaggaaaacaattaatgccgtgtagtccacgcaaggctagacttcttttgaagtctggcaaggcggagatcgtgcggtatgaaccgtttacgattaaattgaattacgacacaacagaaattacgcaagaagttactgtcggagttgaccttggtagtaaacatcttgcagtttcggcaacaacagaacaaaaggaggtctatacaacgcaagtagaattaagaacagatattgttgatttgttatcagggagaagagctttacgcagaacaagacgtaatcgtaaaacaaggtatcgtcaggctaggtggcaaaataggaagaaacctgaatattggcttccgccaagtgttcagcacaaggtaaacgctacgatcaaaatattggatacaattagacagtgtttccccataaccaagtttatcgttgaggttgctccgtttgacattcaaaagattaacaatcctgacattcagggaggacaataccagcaaggcgatcagtggggttttgctaatgttcgagagtatgtattgtacagagatgggcataaatgcagggtttgcggaaagtccggtaaattacacgttcaccatatagagagtcgcaaaacaggaggaaacgccccaaacaacttagttactttatgtgaaaattgtcataagggacatcataacagtaccaaactgataaagtttaagcgaggacaagtttttaaagatgcaattcaggtgacaattatttcaaagagtgtatgtgactggctagtacatcaaggtattaggtttgagaaaacatacggatacattaccaaacataaacgcaatcaggttggattacaaaaatctcatttgaacgatgcttttgtgatcagtgggaatttaaatgtcaggcggtctgatgaatttgtgcttcaaaagagagttagagcaaataatcga

SEQ ID NO: 1746 - DNA, 304 bp, unidentified
  misc_feature 1..304: note = Ga0072941_1026019 JGI
  source 1..304: mol_type = other DNA
ggatagtgtaatttttacgaaacggaaagaaaggatggattgtaagcaacctgtcccgtatagggatggaactttttagtccttgtttactagattgagcaacacaggcaacttgttgctacgttatttgagaatacataggcactttgggatacttgtcctagtcccaaaccctgcggtttgttattaaacagtcctgattggtaggggcagtgtaataaacatacaaaacctcaaaataacattatcgaaggacaccaactcccgtagggagataacatttaagttatattttattatgttt

SEQ ID NO: 1747 - DNA, 1251 bp, unidentified
  misc_feature 1..1251: note = Ga0374549_000851 JGI
  source 1..1251: mol_type = other DNA
atgccatgtcatcctgcccgcgcacggcaattactcaaagcaggaaaagcggcggtgtttcgccgctatccattctccatcattttgaaagagcgcgatgggggtgatacgcaatccgttgagcttaaacttgatcctggtagccagacaacgggcatagctctcattgcgaatgaacgggtgatatgggcggctgaactacaccatcgcggtacgcggattaagtacgcgctcgaccagcgtcgcgctgtgcggcacagcaggaggcagcgtaaaacgcggtatcgaaaaccgcgtttcctgaaccgtactcgtcccaaaggttggctaccgccgagtcttgaaagccgcgtggcaaatgtcgagacgtgggttgctcggttgcgtcgatttgctcccatcacggagatagccttagaagtagtgcggtttgatacccaatctatgcagaatccagatgtgagcgggattgagtatcaacaggggacgctggcgggctacgaggtgcgggaatatgtacttgagaaatggaaacgaacatgtgcctattgtggagcaacagaagtgcgattggaaatagagcatattgttcccaaatctcgtggaggaagtgatcgcgtgtcgaacctaacccttgcgtgtcatgcctgcaatcagaaaaaagggacacaaaccgccattgaatttggtcatccacacattcaggcacaagctcgccaaccgcttcgtgatgctgcaactatcaacgcaactcgctggcggttgtatgaacggttacaggcaatagggctaccgatgacgtgcggttctggaggacgcacgaaatataaccgcatccagcaaagctatccaaaagcgcattggatagatgcagcgtgtgtaggggaacgtggaagacatgtacaagttcatcctgagatgcaggtactcgttatccgcgcaatgggacatggcaatcggcagatgtgccgtataaacaagtacggtttcccacgcactagagcgaaaggaagcaaatgggtaaaggggtttcaaacaggggacatcgtgcgggcaatcgtgccaaaaggtatacacaagggtacacacatcggacgagtagtaatccgtgcaagagggtcgttctgtattggaacaatcgatggaatttcctatcggtattgcacctgtttgcaacggacagatgggtatgactatggctttggtagtggactgaagccgctgaaacgtggcacttcatcccaccgctga

SEQ ID NO: 1748 - DNA, 252 bp, unidentified
  misc_feature 1..252: note = Ga0374549_000851 JGI
  source 1..252: mol_type = other DNA
gtcaatgacccaagccttttcaggtttgggcttgtgagagcaagccgacattgaccagactcagcccgtgtgggctacgataggcgggtcatgacaccgtaggatgcaagccagtcttacgctctgtcgttggtagttaaacaagcagacggtctatgctcgtgctgccagcagaacaagcctccctatcattgtcgaggcacccattaccgccgtaaggcgagaaagcaacggtaacaattgcacaatcac

SEQ ID NO: 1749 - DNA, 885 bp, unidentified
  misc_feature 1..885: note = GENOME_ACESSION: mgm4707306.3 MG-RAST
  source 1..885: mol_type = other DNA
atgtttatgatatttctattaaataaaaacaagaaaccgctagatcctattcatcccgcaactgcccgaaaattattaaagtatggccaagcagttgttcataaaagaattccgttcacgattcgattaaaagaactcgtggatctggaaccaaagaaatatacgattaaaatcgatccaggatcaaaaacaactggcgctgcgattgtatcagacaacgaggttgtccatttggcggaaatcgaacacaagacaaacatctcaaagaaactccaagatagacgttcgtttaggagaagcagaagaacgcgaaagttgcgatatcgcaagccgagatttgataaccgcactcgagatggaggatggctaccgccatcgctaaatgcaagagtggacaatattttgtctcaggtcaaaaggtatcaaaaactcattccgatcacaagcgcttcacaagagttagttcgattcgatatgcagaagatgcggaatcctgaaatctcgggggttaagtatcagcagggagaactccaagggtatgaagtacgggagtatttacttgataagtttgaccgcaggtgtttttactgcgaagcagagaacatcccccttgaaattgagcatacacatccaaagtctcgcggaggttctaattctgttatcaatcttacgattgcctgcaataaatgcaatcaagagaaaggaaattttactccagaagaatggctaattaaaattaaaagtagacgctcgaaacgatatttactgataaagaaaaacataccaaaactgaagagtgctctaatcaaacctcttaaagatgcggcagctgttaatgcgacgaaaaataaacttaaaagagaactagaaaccatttttggatct

SEQ ID NO: 1750 - DNA, 414 bp, unidentified
  misc_feature 1..414: note = GENOME_ACESSION: mgm4707306.3 MG-RAST
  variation 204..318: note = n represents any nucleotide
  source 1..414: mol_type = other DNA
gtcaactacccgcgattgaaatcgcaggcttgtgttagttatatctaactatagtcatagtttcaatctggttgctgttacagaactaagttgaccagcctaagttcgattttagaactacgttattgaggtgcataccctagaatgcttctccagttctaggcactatggaacgcacattaaacatctaatcaacgggatagnnnnnnnnnnnnnnnnnnnnnnnnnnnnnnnnnnnnnnnnnnnnnnnnnnnnnnnnnnnnnnnnnnnnnnnnnnnnnnnnnnnnnnnnnnnnnnnnnnnnnnnnnnnnnnnnnnnagcgcagaaaaggaagtatgtttatgatatttctattaaataaaaacaagaaaccgctagatcctattcatcccgcaactgcccgaaaattattaa

SEQ ID NO: 1751 - DNA, 1077 bp, unidentified
  source 1..1077: mol_type = other DNA; note = Janthinobacterium sp.
atggccgtctgccgcatcgaggaagtcgttgaggccgccggcgtcaatggcccggtgatgcatattttgtttctgatggaattggtgcactgcggccaagccatcaagaagtcgctgcatgcgcgatccagtattcgtcggcgccgccgcggcaacctgcgctaccgcgcgccgcgcttcaataatcgcatccggcgcacgggatggctagcgccatcaacatcggatcgactcggccatggcctgggtggcgcgcctgcgccgtctggcgccaatcacgcatctggcgcaagagttggtccgtttcgacatgcagaagatacaaaatccggagatctccggtgtcgagtatcagccaagcacattgctcggctacgaggtgcgcgaatatttgctggaaaaattcaaccgcacctgtgcctattgcgacgcaaccggccgctgcagatggaacatatcgatgccaaggccaacggcggcccaaaccgcgtcagcaacctgacactggcctgcgagccttgtaataagaaaaaatgcgcgcgacgtccgcgaatttctcaagaaagacccggtgcgcctggcgaagatcctcgcgcagcgaaggcgccgctgcgcaatgccgcggccgtcaatgccaccggatgggccttgttccaggcattcaaaaatgctgatcttccggtggaggttggcacaggtgggcgcaccaaatggaaccgctcgcgccaaggtatttcaaaggcgcatgtcctggatgccgcttgcgttggcatcgtgggcgacgtgcgcggcgcgcgcacaccgaccttgcgcgtcaaatgcaccggccgcggttcgcgctgcaagacgcgactgaacaagtatggttttccgcgtgcctatttgacccgcaaaaagacggcgtttggctttcgcaccggtgacatggtggtggccgacgtaccttccggcaaaaacaagggaatccaccagggccgtgtggcgatccggatgacgggcattttcaacatccagaccggcatcgctgatgcgcagacggtgcagggtatctcacaaaaggattgccgcatcatttag

SEQ ID NO: 1752 - DNA, 289 bp, unidentified
  source 1..289: mol_type = other DNA; note = Janthinobacterium sp.
atacccggcatagccagcgcatcggcaatgttgcgccgctgctttgtgagtcgctgatagtactcaaagctcataagcacatgggccggtcggcctctatccgtgatgaacaccggcccgttgtttgcggcccgttttgcctcgctcgccccttggttgaactcgcggcttgataaggtggtaatggtcatgacgacacccccgtatgctcgaatgatgtagtaatgttactacatcattcgagcgggtgcaagtgtttcagagtcggtaaacggtcagctcagtggac

SEQ ID NO: 1753 - DNA, 828 bp, Actinomadura latina
  source 1..828: mol_type = other DNA
gtgtcgaactgggcatcgaccccggctccaagcacaccggcatcaccgtcttcaccgacatcggcgggaaccgccggggcctgtacggcatcgacctggcccaccggggcggcagcatccgagacaagatgtccatgcgcgccgcctaccgcaggggccgcaggtcgcggaacctgcgctaccgcgcccccccgctgctgcaaccgcaccaaacccagcggctggctcgcaccgtctctgcggttgcacggcaccgaggtgcgcgaatacctccttgccaagtggatacgcgcctgcgcgtactgcggcgccactggcgtgccactcaacatcgatcacatccgcccccgctccaggggcggctccaaccgggtcagcaacctgtgcaccgcgtgcatcccctgcaaccaggccaaatgcaaccggcccgtggaggagttcctcggccacatgaacaccatcgaccgcattccgcacaccgtcctcatcgccgcagccaccgagcgcggtacctacgctcgcacccgcaccgaccggtacggcttcccccgtctccgcctgccgcgcgcgaagcggttcttcgggttcgccaccggcgacctggtccatgccacggtcccgaccggccggtgggccggaacccacaccgggcgtgtcgcggtccgttccagcggcagccacaccgtcaccacccccgcaggggccgtcaagacctctcgacggctacgcctacaccaccaaacccgaggggccgtgatcagtgctgcggcccggcaggtcagagcaccgctggggccctcccgcgctttcgttctctccccccgctga

SEQ ID NO: 1754 - DNA, 828 bp, Actinomadura latina; identical to SEQ ID NO: 1753
  source 1..828: mol_type = other DNA

SEQ ID NO: 1755 - DNA, 1287 bp, Sulfobacillus sp.
  source 1..1287: mol_type = other DNA; strain = hq2
atggttgtcgtcttagaccagcaccaaaaacctctcatgccctgcaccgaaaagcgggcccgccaattgctggacagaggtcgggcggtggtgcaccggatggcccccttcacgatccggctgaaggatcgcacggcggaagaatccaggttccaaccattgcgcgtcaaattcgaccccggcagcaaaacaacgggggtcgccatccttttggagggggcccaaggccctaaggtcattttcttcgggaagcttgtccacaaagccagcatcaaagccaaactggacgcccggcgggctttgcgtcgagggcgccgccatcgcaagacgcgttaccggaaagcccggtttctgaaccgcaagcgcccccagggatggctgcccccgtcgctggaggcgcggatcggtcaaaccctgcattccttagcgaagctccgaaaactcgcgccgatcacggcgcttagcgtggagcatgtcaaatttgacacccagaagatgctaaatgccgaaatttctggggtggaataccagcagggcaccctgttggggtacgaagtgcgggagtacctgttggagaaatggggccgcgcttgcgtctattgcggcgccactgcggtgccgcttcaggtagagcacatcgtgcccaaaagtcgcgggggcagtgaccgggtcagcaatctggccttggcctgcgaaccttgcaatctggcgaagaacaaccggacggccgaagagttcggttatcctgcgattcaggcccaagccaagacaccgctgaaagatgcggcgatgctgaatgcgacccgctggcggttgtataaagacctcaaagcgaccggacttcccgtggaaggtgggtcaggcggccgcacgaagcagcagcgcatcgatcacggcttccccaaggagcactattacgacgcgctctgtgtcggagaaagcacccccaaacggttcaccagcctgccagcctacgtgcaggtttggaccgccaaaggccggagcaaccggcaacgctgtcgcacggacaagcacgggttcccgattcgccatttgtctgccaagaaagttcatttcggctttcagaccggggacctcatccgagcggaaatacccaacggcaagtataggggcgggtggacaggttctgttaccgtccgcgccacaggccgtttcgacatcgcgatcgcgggccgcaaaattgcccaaggcgtttcgcacaaatactgccgcattctccaacgcggagacggctggcagtatacaacgcaccgtataggtgcttga

SEQ ID NO: 1756 - DNA, 271 bp, Sulfobacillus sp.
  source 1..271: mol_type = other DNA; strain = hq2
gtcaaccaccccgccctgaagggcggagcttgtcgtaagctccacggttgaccagccttagcctcttcacgagactccgttcggtcggtgcacacccaggggtgcttctccagcccctggctctgtgggttcacgttaaaagccagctcggggtagtgcaagcggtgcgtggacggctttcgacccgaccgaacattggcgaggagagatgtgcgcaagcacacgttaccagccccttacggggctccgaaaggagcatcggcgaatggtt

SEQ ID NO: 1757 - DNA, 696 bp, Anoxybacillus flavithermus
  variation 121..220: note = n represents any nucleotide
  source 1..696: mol_type = other DNA
ttgtcacggagcagttgcaagaaagctgttgaacaagggaaggcggcgatttacaaacgattcccatttaccatcatcttgaaaaaatcagtagacgaatcagaaaatgaaacaacatatnnnnnnnnnnnnnnnnnnnnnnnnnnnnnnnnnnnnnnnnnnnnnnnnnnnnnnnnnnnnnnnnnnnnnnnnnnnnnnnnnnnnnnnnnnnnnnnnnnnnatgaagtgttaaagcagacaggattagatgtcgagtgtggaacaggtgcacgaacaaaaatgaatcgtattcgtttagacttgccgaaaacacattattttgacgcttgttgtgtaggcgaaagcacaacaaatcacttatatttcaaaacaaaagaagtgttatttatcaaggcaaaagggcgtggtagtcgctctcgtacaaacctagatagatatggcttcccaagaggttatcttgcaagacaaaagttcttctttggcttccaaacaggggacatggttaaggctgttgtcccaagagggaaatatcaaggcgtttggtttggcgaagtcgcatgtagaaagactggaagtttcgatattaaaggcaaggacggaaagcgtatcgcacaaggaataaattatagatatgtccaagtcattcagcgatttgacggatatgcttatggaaaggggggggcggaacttgcgtaa

SEQ ID NO: 1758 - DNA, 244 bp, Anoxybacillus flavithermus
  source 1..244: mol_type = other DNA
gtcaacaacccaatgactaaagtcatgggcttgtaagccccatgttgaccagaccaaggcttgaaacagagcctacgttatagatgtcatgacacgttcgggtacttctccagcccgttcctctgtcgtgcaaggttaaacaagcgtggtgggtagcgctagtgtcttgcacataacaagcatctataacatggtcgaggagaatatgacctgctttatgcagaggaaaggggagaaccctatg

SEQ ID NO: 1759 - DNA, 651 bp, unidentified
  misc_feature 1..651: note = Ga0307928_10012696 JGI
  source 1..651: mol_type = other DNA
atgcctacaactaggtgtggtgcagtgaggagatggcttagagacaacaaagcaatagttgttaatctatgtccttttacaattcaattaaaatgggattgtgagaacaacaagcaagaggttattgttggcttagatactggtgctgttaatgttggctgttcagcaataatcaacaacaagtgcttatatgcttccgagacaaaattgagaactgatataagcaaaaaaatgcaaagacgagccaaatacagaagaaatagaagaacaagaaagttaaggtatagaccagtaaggtttgataatagaacatcaaaaagacaattacctccgtcattacaaagtaagatggattcaactgtaaaagttgttaaacaattatcaaagattcttccaataacaaaggttattgtagagatagccaagtttgacacgcaaaagttacagaatccagaaattaaaggaaaggaatatcagaaaggcgttactgaaggatatgataatgtaagggcttatgtgtttgaaagagacaaatatacatgtcaaatctgcaaaaagcaaggtggaatattacaaacacatcatatcaagcaaagaaaagatggtgggacagatagaccagagaacttagctactgttcataaagattgt

SEQ ID NO: 1760 - DNA, 271 bp, unidentified
  misc_feature 1..271: note = Ga0307928_10012696 JGI
  source 1..271: mol_type = other DNA
gtaacacattcccaccgactaaagtcgggggcttttcggcaacgaagcctgtgttaccagacttaggaaagtaatctttcctacgttatttgagatgtagaaacccaacaatttgctcagttgttggctctttcgtggcactgtaaacagctctgagggatttggggcagtcaaccacattgcgaagctcagataacattgttgagagcaacattacagtttgaaggaactggcttacagcaaaaatccttcacacaaaaaaatgcaaaaa

SEQ ID NO: 1761 - DNA, 1227 bp, unidentified
  misc_feature 1..1227: note = Ga0315553_10003099 JGI
  source 1..1227: mol_type = other DNA
atgttagtgtacgtgcaagaccaggatggcaagcccttgatgccaacccgacgatacggcgcggtgcgtcgctggctcaaatcgggccgggcgaaagtggtgcggcgtgaaccgttcacgatccggctcctgaaccgccatggaggctacacccaaccgctggaggccggcgtcgatctggggtcggctcacgtcggtgtgtcggtcgtgtccgagcaagaggcagtactcgccggtgagttccgtctgcgaacggatgtgagcaagctgctgacccagcgccgccagttccggcgtgcgcgccggggacgtaagacgcgctaccgacagccgcgtttcctgaaccgtaagcacaaggacgagcttccgccttctctgcgggtcaaggtggacgagactatcaagctaatccgcctggtggacagcatcttgcccatcactcactggaccttcgagatcggcagcttcgatccgcacaagttggccgacccggacgtggagggcactggctaccaggaaggggatcagtatggcttctggaacgtgcgagaatacgtgctgtggcgtgaccggcacacctgtcaggcgtgcaagggcaagttgggcgatccgatcctgaccgtgcatcacctccggcaacgcaaagagggtggcagcgaccggccggcaaacctggtaacactgtgcgagacgtgccacaaggcgcaccacgccgggcagccgctcaagctggaagcgccgccgaccctacgggatgcgacacatttcaacgtgatcaaggcgtacgtgatgcgggtcactgtccatctgaaccggtcgatcacgttcggctacatcaccaaggcgcggcgagtggcgcaggggctgcccaaatcccacgtcaacgatgcctttgtgatcgccggaggccaggagcaggcccgatcacactatgtctacctgggcgggttctaccgccgccagaaccgcaaggtgaccaaaggagcgagatcgcacattcgcaacaccatccctcaggcattcggcttcaggcgcggagatcgggtcagaatgccagatggacgacaagggtttatctatggcttgcgcacgtccggctactttgacgttcggcagttggctggcgaggtgttgagccactcggtcagttggaagaagctaatgccgcttgagaaagcgcgtacactacgaatcgaaaggaggaggggttggaaacggcctgcctga

SEQ ID NO: 1762 - DNA, 305 bp, unidentified
  misc_feature 1..305: note = Ga0315553_10003099 JGI
  source 1..305: mol_type = other DNA
gtcaactaccaccggctgaaagccggtggcttggggagtgactgaaagtcacctaaagtcccaggccacggttgaccagcctcggccagagagcgcattgcgctctaccgggccacgttgggaaaggcacgacaccctggggtgaacgctccagctccaggctctgtcgctggtggttaaaagctcgcgtgtggtagtgagcggtgctgccagcataacaacctctcccaacattggcgaggagcacgccctgatgggcgactacagccgcaaggctgacttatccgagaggattgagcatgtta

SEQ ID NO: 1763 - DNA, 792 bp, unidentified
  misc_feature 1..792: note = Ga0209985_10000066 JGI
  source 1..792: mol_type = other DNA
atgcaaagagcttttgttctatcttctaccaaaaagcctcttatgccttgccatcacgcagaagcaagagagctgctacgtgatcgaaaagcagcagtctacagaagaatctctttcatgatcatccataaagagcgctcagatggggatcttcagtccattgcgctaaagcttgacccagggagtcggacgacaggcattgccatggtcggggaatttaaaagaggaaagcgccttatcttcgcagctaacctttctcatagggggcaagctgtgaaagatgcgctcgaatcacggcgatccctaaggcgctcgcatagggcaagcaagacaaggtatcgggctccaaggtttttaaatcggactcgccccataggctggcttccaggaaacgccttaagagagttttcactacccatgagcttttcatcgggcggaagaacaaagtttaacagatcaaagcaaggctatcccaaagatcattgggtcgatgcagcttgcgttggaataacgggcgaaaaggtttatatcgcgccttttcataaggcttcaattatgagggcagaatcaagaggctcaaggcagaaatgccttccagataagtatgggtttccaagaacagcgcccaaggcccaaaagcgcgtctttggctttcagactggagatctcgttgcagccaaagtcacgaaaggcaagaaggcgggaagctatcaggggtgcgttgctgttcgttcaactggcaactttaacatcaaagcacagggggcaggttgtccaaggcataagctataa

SEQ ID NO: 1764 - DNA, 271 bp, unidentified
  misc_feature 1..271: note = Ga0209985_10000066 JGI
  source 1..271: mol_type = other DNA
gtcaatcacccgcccctaaaggggcaggcttgtaagaaaggagactgatttcatgcctagttgacccgactcagtcccaaaaggggctccgttacgagcgaatcacatagttacccccggatgcttctccagtcctgggctctaaggttggcggttaaacagatcgaagaggttaagtcagtgccgcaagcaagtaaaccgctcgataacattgtctaggtgaccattacctgcgaaagcggagaaccgaaggtagctttaaatgcaaaga

SEQ ID NO: 1765 - DNA, 1245 bp, unidentified
  misc_feature 1..1245: note = Ga0307379_10050423 JGI
  source 1..1245: mol_type = other DNA
atgttagtttttacactcaacaaacaaggaaagcctttgatgtcttgcagtccctgcaaagcaaaaaggctgctcagagctaaaaaagcaaaagtcgtaagaactacaccttttacgatcaaactgctttatggttcaacagggtataagcagggaattacagctgggatggatacaggtagtaagaaaattggtgtagctgctgtatctgctgatagaattctctatcagtcagaagtagaactgagaaacgatataacaaagaagatgaaacaaagactatcttaccgcagaacaagaaggggtagaaaaaccaggtatcgaaaaccgcgtttcctcaacagaggaaaagcaggttttctggcaccgagtataaagagtaaaattgaatctcatttgagagaaaagagatttacagaaagtattttaccagtatcaaagtggatacttgaaactgcaagtttcgatattcatcttataaccaatcctagtgtagaaaaaaaaggctatcaagaaggtgaacaaaaaggtttttacaacacaaaagcgtatattctgcatagagacggatataaatgtcagaaatgtaaaaagagtaaagttaagttacaggttcatcatattatttcaaggtctaacaaaggaactaatgaaccaaaaaacctaataacattatgtgtagactgtcatgaaaaacttcataatggtgacttcaccattatgggaagtaaatcaaaaacaaaacatgcgacagaaatgggtataattaaatctcagttaaagaagaggtttggagaattcaaggaagtttttggttatgagacaaaatactggagagagcaagttttgggtttacccaaaacccattacaacgatgcaatcagcatcgtttgtaacggagaacaagaagagattaaaatattgaataatgtgatttacaaaaaacatgtttccagaggagattatcaacaaaccaaaggcaatcattctgaaaaaaagataccaaacagtaaactgtttgggtttaaaaaattcgataaagtaaagtataacaatgttttatactttatcaaaggcaggatgagtagtggatatgctatattgtcaaatgtatttggagagaaggttaaattaaagccaatacctaagtttagtaaaatggagagaataaatgcaagaacaacaacgcaggtggcaattcatcccccacctaaaggaaggggttttcttgccacaacaggataa

SEQ ID NO: 1766 - DNA, 293 bp, unidentified
  misc_feature 1..293: note = Ga0307379_10050423 JGI
  source 1..293: mol_type = other DNA
gtgaactacccctgcctaaaggcagaggcttccagaagcctaagttcaccagatcactaataggagaagaagcagtaaaaatattagtaaccgataagaaagaattaggcaccctggggtgccacctcagctccaggcactgcggagattaattaaacagtcttaaagggttatagacagtgttaatctcattaaaacctttcattatctgatcgagaggaaggcgtaagctgagtttgatctcacaaactcagccacgcactacctaaggagaggggaaaaactaaatgtta

SEQ ID NO: 1767 - DNA, 1785 bp, unidentified
  misc_feature 1..1785: note = Ga0113559_100101 JGI
  source 1..1785: mol_type = other DNA
atgaccaattttaaattgagattatattataaaggaaataaaaatatgaattatatggattttgtattaattgtggataaaaataataaaccatgcataccaataaaaaatggtaaagcaggttatttattaagagaacataaagcagaaattataaatcacgagccattagttatcaaaagaactgatgattataattcggatttagaaaatagagatatatttgaattaaaagtagatagtggatatttaaatatcggattttccgtaagcgataatgagcacgaatatattgcaggtcaagttgaaatgctaaacggaatgagtaatagattgttagaaagaaaatctatgcgtagtttcagaagaaatcgtttacgttatagaaaaaataagaacattgattataaaacagtacataatcctacttataaaaatggaaatgaagatggatggtttgcaccgtctattgtacataaaatggaaacgcatatcagaatcattgagcaattaaaacaatgggttccaatcgataaagttattgtagaggtggcaaattttgacattgctgcaatggatgcatatttaaaggacggaactattttaaatggaaaagattatcaaaatggtgaaatgaaaggatatgagaatgttgtatcttatgtaagagccagagataattattcttgttacttttgcaataagaaaaagaaaaaagatggtacactaaaagagaaaccaaaaagaatagaagtgcaccataaaataccaagatcctggggtggtactaataatccaggaaatttgatttgcgtatgtcaaggatgtcatcagaaaatacattcgaataataataacaacaaatattttaaagaattattagaacaagctttacaagaaaatacatttaaagattctacatatatgaatattgttagatgggaattattaaacagacttactgaaaaatatccagagcttgatattgaagctgaatatggttataacacaaaaattaatagaaaagaagcaggtttgagaaaattccattataatgatgcagtttgtataaaagaatttaagaatataactttatctaaaaaagtatttattgtcgaacaaaaacgttgtaatgatagaaaaatggaaagttttgcagatgcaaaatatatagattcaagagatggtaaaaagaaaaaaggaaatgatctaaaagtaattaggcatagtactaaatcaaaacgctctacaaataaagaacatattgataatgaaagaatctttagaaaagagaaagtatctaagggtaaaatacaatttgagtgtcatttatattgcgtaaaaccaggagatttaatatacataaaagaaggtaaacataaagggaaaattgcagaagtttctacaatacagattgtaggcgaaaaaattcctaatccgataattgatattaatgagataaataataaaaaaattgatttcaacagagagttgaaaaaaagaaaaacaacttctaatatgactgattatcaaaaacgttttgcaaaatatcaaattagatttacatataaagaatctgatgcagatggaccatctataacgcttacgcaaaaagaatatgaaaagcttaaagagaataaatcagatagagtaaaaattattcgtaccagacgtggattagtttggagagagtacgacagacttacatatgaagccgaaaatatggatcaggaagaaaagaaattagaagtaaaaaataagaaacaagaattaaaagctgcataa

SEQ ID NO: 1768 - DNA, 1785 bp, unidentified; identical to SEQ ID NO: 1767
  misc_feature 1..1785: note = Ga0113559_100101 JGI
  source 1..1785: mol_type = other DNA

SEQ ID NO: 1769 - DNA, 1296 bp, unidentified
  misc_feature 1..1296: note = human gut metagenome genome assembly, contig: NODE_2190_length_16758_cov_18.186733, whole genome shotgun sequence WGS
  source 1..1296: mol_type = other DNA
atgccaaacaaagtgtatgtactcaacaagcacgggcgtccgctgatgccctgctccccggcaacagcccgtcatctgttagatgacgggaaagccaaagtgaagaagaggacgccctttaccatccagctgctttttggcagcaccggctatacgcaggagattattctcggtgtggatgccggaagcaaaaccatcggcctttcggcttctaccgaaacggaggaactgttctccgctgaggtaaagcctcgcaacgatgtggtagacttactgtccacccgtcgagagtctcgtcgagccagaagaaaccgcaaaactcgctatcgtaagccacggttcgacaaccgcgtgcggagcaagcataagggttggttggctccctccgtggaggccaaaatccaagagcatattactgctatcaaaagagcctgccgcattttgcctgtcagcaaagtggtcgtagaaaccgccgagtttgacccgcagcttatcaaagctgtcgaggaagggaaacccatcccgcaaggagaggactaccagaagggcgagatgtatggtcactacaatgtgcgccagtacgtcttgtggcgtgatggctatgtctgccaatgctgcggagcgcatgcgacccataagaaagaggtgcggctccatgtgcatcatctggagagccggaaaaccggaggcgacgctcccagtaatctcattaccctatgtgataactgccacgagaaattacacaagggcattatcacggcagtggacctcaagaagcgtaagcgccgttcctcacgggatgccacattcatgggcatcatgcggaagactttgctgcaaaggctgtgtgctgaactaaccattcctgttgccgagaccagaggctacatcacaaaggcaaccagagaaaagctattggttctgcccaagagccatactaacgacgctctggcaatcgcgcagggtccacaggggttccgcactggataccttccaagcatccgacaagcaacccgcatttataccatccgacccgtgcggcatcataaccgacagctgcacaaagcaaccatcctcaagggtggtgtgcgaaaagctaatcaggcggagaagtatgtctacggcctccgcctctacgacaaggtgctttacaacggtattgagtgctttgtttggggcaggcggagcagcggctctttcttgctacgaaggcttggtggagcaaaggtcaaggatggcgtaagctacaagcatttaaaattattagagcgcagtcagaattatctgatagcgtaa

SEQ ID NO: 1770 - DNA, 291 bp, unidentified
  misc_feature 1..291: note = human gut metagenome genome assembly, contig: NODE_2190_length_16758_cov_18.186733, whole genome shotgun sequence WGS
  source 1..291: mol_type = other DNA
gtcaataaccccacggctaaagccgggacttgtggaaacacgagccctgattgactaccctaagtgcttcgagcactacgttactcaagaatgtatgtataggcaccggtggacgtttgcccaaatctgccgctctgcggtgtgtgattaaacagctctgagggtaaggagcagtgttgcacgcaaaaaccttgagataacattggggatgggtaccttacggccaaaaggctgagcggcttaatttttagccgcaatcttgaaaaggaggaaggcatcatgccaaacaaa

SEQ ID NO: 1771 - DNA, 1314 bp, unidentified
  misc_feature 1..1314: note = Ga0137365_10001047 JGI
  source 1..1314: mol_type = other DNA
atgaaggtgtttgtactatcgaaagaaggaaagcccttgatgcccacaacgccacggcgcgcgcgggtgtggcttaaggcaaaacgtgcccgtgtcgtgcgccgagaccctttcaccattcggttgcgctttgccacccagcagcatacacaaccggcgaaggtgggcgttgacaccggctcgaaacacgtcggcatcgctgccatcaccaatggcgaggtggtattccaggccgatgtccatctgcgtgatgacatcgctgaaaagctgaagcaacggcaccggtatcggcgcaatcggcgggggcgcaagacacgctatcgtgaagcgcgttatgacaatagacgccgacctgatgggtggctgcccccttcgctgcaatccaaatcacaggcgaccgtcagggctgtgcgcttcatcgccttgttcttgccggttggccagatcacagtcgaagtcggtagttttgacacccaaaagatgcaaaagccggacatcgctgggattgagtatcagcagggcgagcttgagggctacctgctgcgtgaatatctcctggagaggtttcagagaacgtgcgtgtattgtggagcccaaggggttcctttagaaatcgaccatctgattcccaaagctcgtggagggtcgaacagagcatcgaatttgacgttgtcgtgccgtccttgcaaccagcgcaaaggtcagcaaacagcggcggagtttggcttcccgggcgtgcaggcaaaggctcgtgttccgttgaagcatgcagcgcatgtgtcttcactgaaaagcagggtgatccatgacctgcaagcgatcttcggagagagccaagtgagcatcacatacggctacgagacgaaatacaaacgcgtccaggtgatttctgcccaagtcccactcgaacgacgccgtggcgattgcctgcgagatcggcgaggtggtcaagccattggaaatagtccatcagatccgctgtctaggacggggccaatatcagcgtttcaatggtctgcacagcgagcacaagtgttgggccccgcgcactttgcgcgggttcaagctctacgaattggtaaagaccaaaggaggcgtgggttacatcgcgggacggcgggagaaaggagcgttcgtcatcaaagacgtcatcagcgggaagaaagtggtcgaggtcacgccacgcaaattggtacggctagcgcgtcccacccagggctggataattactcgactgccggtcctggagagcatcagaaaggcgagcggcgcttcctccccaagttgaaacggggggcacccgcgccgccatga

SEQ ID NO: 1772 - DNA, 306 bp, unidentified
  misc_feature 1..306: note = Ga0137365_10001047 JGI
  source 1..306: mol_type = other DNA
gtcaatgacctccctataaaacggggagacttgtgaggggttcgccccttgcaagccggattgaccagacggcacctctaagccagtcgcgccgagaaagcgagcgtcgtggctggcgctgatgaggtgagcgatagcatcaagcgttgcagttcgcacccagggatgctgccccagttcctggctctgcaacctctgacttaaagaactgcggtcgaggaacggtggtcagaggaaagtaccgggtgctatcaccgtcgaggggatcgctttcactcatctcacaagagaggagccttacctgat

SEQ ID NO: 1773 - DNA, 933 bp, unidentified
  misc_feature 1..933: note = Ga0070717_10000790 JGI
  source 1..933: mol_type = other DNA
atggctaccaacgtttttgtcatcaatctgaacgggcatgccctgatgccctgccatcctgctaaggcacgcaagctcttgcgagatggcaaagccagagttattgctcgctgcccctttaccatcaaacttctttgggactgtgaagagcaggtccaggaagtggtgctgggcctcgataagggcagccactacacggggttctgttgcactggcaaggggcagattctcttatctggcgtgattcagcaccggcaggatgtgaaagacaaaatggagaatcgttgcagcaaccggagaaatcgtcggaagaggaagtggtatcgaccggctagattcagcaatcgtggatctagcaagcggagcgggcggctaccgccttcgatcaagtcgaatgtggaagaggtgatccgtgtcgtccggcagattccacttccgatcagcaagatcacaatagaggacgtccgggtagatatcgctcgcttaaacgattccacgcttgccagaagtcgctatcaggaccccacacggctcgatgaaaatcttcgtatggcctgcctcatgcgagacggctacacctgtcagcagtgcggcaaacaaaagattcgtctcgaagcgcaccacctcatcttcagagagcggggaggaaaggatacgctgaataacctgctgactctctgtgcagcctgccataaaaagcttcatcagaacaagatccagcttaaggcgacgggggtgagtgggcgtctcgatcagatcgcccaacacactatgcaaggcaagagctatctctacgccgtccttggcacacaggcagcactctctaggctttttggctaccagacggcaactctgcgtaaagccagggatctccccaaaacacatgacgctgatgccctctgtcttgccacctacgatacggcgagacggtag

SEQ ID NO: 1774 - DNA, 242 bp, unidentified
  misc_feature 1..242: note = Ga0070717_10000790 JGI
  source 1..242: mol_type = other DNA
aatagtgcctaaaaatctggaacgtctcgtaccggattcatggcactaccagcgggcttgtttgtcagcagcagttgagatggccatgacaccaccagatgttgctccagtcgggtgcaactgtcggcatccattaagggtagcggaaacgcgaatgtgtggatgctgtaaaaagccacttcaacacccgcgaggggcatcatactcctaatcaaggagggcttaacgccatggctaccaac

SEQ ID NO: 1775 - DNA, 717 bp, unidentified
  misc_feature 1..717: note = Ga0211664_10024503 JGI
  source 1..717: mol_type = other DNA
gtgagagtcttggtgctcgacaatcagaaacaaccgctgatgccttgctgtcctgcgcgagcacgccagctcctgcgtgatggcaaagcagcggtgtttcgtcgttatccgttcactatcgtattgaaaggacgacagggcggtgagatacaacctgtttcacttaatgtcgatccgggcagcaaaaacacaggtattgcacttgttgcgttattccaaggtggccacgctgcgctctacggtcagcatattgtccatcgtggacaacaaatcagggatgcactcgaaaaccgtcgcgctacccgtcgttcacgccgcaacagaaaaacacgctatcggaaaccgcgttttttaaaccgaacccgcccatttggatggctaccaccatccctaatgtcacgagtgcacaatgtggaaacgtgggcgaaacgtctaagcaggttcgcgcctgtcacgtcagcgaatgtcgagacggtgcgctttgacatgcagcttatcgaaaaacctgacatcgtaggaatggactaccaacaaggctcactgtttggctgggagttgcgtgaatacttgctgtatcgccaccagcatacctgtgcgtactgtcacggcctaacaaaggatgcggttcttgagaaggaacatatcatcccaaaaacattaggtggctcaaaccgactggcgaaccatgtcatcagttgccgcacatgcaacgaggac

SEQ ID NO: 1776 - DNA, 288 bp, unidentified
  misc_feature 1..288: note = Ga0211664_10024503 JGI
  source 1..288: mol_type = other DNA
gtcaacgacccacgacttattcgcttagcgaattaagtcggagcatggaagcctgagttgaccagaccccatcgggtaactgatggagccgttatcggagaatatataggcaccgtgggatgacttgccagttccacgcgctgcggaaaacgattaaacaggcgtaatgggttaagccagtgtcgtttttattaaaccttcgaataacagggtcgaggcaaacataacccacttcggtggagaacgtctggtaacagacattaattttggagtttggataacgtgaga

SEQ ID NO: 1777 - DNA, 1320 bp, unidentified
  misc_feature 1..1320: note = Ga0181555_1021736 JGI
  source 1..1320: mol_type = other DNA
atgttagtttttgttctgaacaaacatggcgaacccttaatgccatgtagtaatagaaaagctagacttcttcttaaagaaggtaaggctgaaattcattcatacaaaccattcacaatccaattgaaatttggtagtagtggatatgtacaggatgacgttgaaattggtgtggatactggattcacaaacgtaggaattgctgtcactactgaaacaaaaatatttcatgctaatgagattaagtttcgtaatgacgttagcgaattattaacaactcgtaaatcttatcgcaaaggtcgtagatatcgcaaaacaagatacagacctaagtcttttgcaagaagttctaaacggattttctgcatgaaacagaaaagatggattaaggttaagattaaataccgtggatatgatgattggttgtcccctagttatttagctaaggaagctaacttaattaattgggttgagaaatacaaaaaacgtgtaccatgtagtaagctaattcttgaagttgggcattttgatgttgctaaaataattaatccagagattagtggcaaagattatcaagaggggtcacaaaaaggatttgagaatgttaaggcatatgtgcgtcatcgcgatgaatacacgtgccaacattgcaagggcaaagaaaaggacgtgcgtttagaagtgcaccacactattttcaaaagtaatggtggttcagataagccagataacttgatttgtctttgcaaaacttgtcatgataatttgcatcaaggtgtaattaagcctaaacttaagattacaaaatcttacaaagaagcaactttcatgaatatcttagcatcgagattgagagaattctacccagaggctgagttaacttttggttatgagactaagttgcaccgcatggaattaggtttgccaaaatctcatgcgaatgatgcgatagcggtaacaaacattaagtctataccgcaagaaaagattgaggttttgtacgttaagcagtgccgtaagaaaaaacgtagtcttcatgaagctaaaccacgtaaaggtagaaaagaacctaacactacgtcatcaagaaatgctaaaaacacaaaagcagttggtaacatttgtctattcgacaaagtctcgattgataatcaagttggatgggttagtgggtttacgggtgggaattgttatgtggtggattttagtgggaaatacttaagttttaaaaatactaaaggtacagattcaatacggattaacatggggcgactaaaagtaatccacagaaacaacaattggatttctgagattagataa

SEQ ID NO: 1778 - DNA, 286 bp, unidentified
  misc_feature 1..286: note = Ga0181555_1021736 JGI
  source 1..286: mol_type = other DNA
gtcaagatacccacgcccaagggcgcgggcttgtgaaagccctacttgactagattcagtgagtagatgttcttagggatatctcgaactacgttatgatagttatctatctgttggatgataccaaagtccaacactatgcaggctctgtaaacattcctctttgggtggggaaagtcatcctgaatatccttgcggatattttggaagttctcgtaacttcacagctatcataacattatcgatgggtaataaactttctttagaaaggaaaaactttatgtta

SEQ ID NO: 1779 - DNA, 843 bp, unidentified
  source 1..843: mol_type = other DNA; note = Chloroflexi bacterium
atgtctgtctatgtcaaaaatcaagatggggcaacactcatgccctgcacagaggccaaagcacgcaagttgctagaagcaaagaaagccaagattgtagactatcgtcctttcaccatccaactgacttggcagtgcgaggggcggacccaagaggtgacctgtgggatcgataagggcagcagtgccacgggtctcgcctgtgtgagccatggcagagtgctgctggccgcagagatccatcatcgtagggatgtcaccgacaaaatgcaggatcggcgggatcgacgtaaaagccgccgggcacgtcgctggtatcggcctgctcgctttctcaatagggcttcaagccgacgcagcggacgcttgcctccttcgattaagaccaacgtcgaggagatcattcgtgtcgtccggcacattcctttgaccaccgtctttggctaccaaacctccgcctacaggaaatataggaacttgccaaaaacgcatatcatcgatgccttgtgcatcgcaaccatgccgaccggcgcagtggttgctgtggagccgaagaatgtgtaccacattcgatttcgtgccaggcaaacacgcaagcactatcacagtcagccgcaaaaaggcaaaggccgggttaaataccaagtcaatgaggagttacaaggctctcgcaaaggagatttggtcttggtcaaaggcaaatatgtcaagctgattcactctatctattccgacggctatttggcctttccacgtgtcaagggagaacccaataaagcactcccgcgagattgtcgcatcttagaacgagaagggacgattttatgggaaatggtgggataa

SEQ ID NO: 1780 - DNA, 249 bp, unidentified
  source 1..249: mol_type = other DNA; note = Chloroflexi bacterium
gatctacaatagttcctaaaagtatggagtttacggacatcatattcaaggagctagcagcgggctaggctagtcctagcagcagtttgccaggtgatcacaccttgagatgttcgctccagtctcaagctctgtggctccagtttaagggtagccgaaaggtgaaagtgattggagcacgacaagcctgatgaacactcgcaaggagcaactcactcttgacagaggagggcttacagtcagatgtct

SEQ ID NO: 1781 - DNA, 615 bp, Streptomyces sp.
  source 1..615: mol_type = other DNA; strain = HG99
gtggctacgttccgtacaggacagcagacccacccgactgtgcttcctcagcagtcggctctggaacccggctcagcagacaacctcaggagcatggacgaaacgggagccgggcgccgcgacgcggcacccggtacgggacatgtgcgaggggagacgcccggcagttcacctgccgctgggcgcgtcacctcggaccgtccggtccgggaggagggtcgtgaggcccacccatgtgtatttgtactcgacaagcacggcatgccgttgcagccgtgcagtccggcacgcgcgcgcaagctgctgcggtcgaagcgggcagttgtacaccggcacacgccgttcgtgatccagacggttcaccggttcaagaccggggacttcgttcgggcagtggttcccactggcaagaaggcgggaacccatacgggccgggtcgcggtccgcaccaagggcagcttcaacatcaccacccggcacggcattgtgcaggggatccatcaccggcacgtccgcctcctccagcgagctgacggatacgcctacaccacagagaaggaggcaggggcctccccaggcatagcctctgggaaatccgcccctcgtagcgcatga

SEQ ID NO: 1782 - DNA, 300 bp, Streptomyces sp.
  source 1..300: mol_type = other DNA; strain = HG99
gtcacaggcttctccactcgaagagtgggaggcgtcggcccatggcggccgacgcctgctgtgaccagcgccagccatcaccaaataggaggtgaccttggtggctacgttccgtacaggacagcagacccacccgactgtgcttcctcagcagtcggctctggaacccggctcagcagacaacctcaggagcatggacgaaacgggagccgggcgccgcgacgcggcacccggtacgggacatgtgcgaggggagacgcccggcagttcacctgccgctgggcgcgtcacctcggaccg

SEQ ID NO: 1783 - DNA, 744 bp, unidentified
  misc_feature 1..744: note = Ga0370532_0143 JGI
  source 1..744: mol_type = other DNA
atgtccaaagtgtttgtaattgattcagaaaaaagacctttagctccaatacatccggcgcaagcaagacaactgttaagaaataagaaagcagccgtttttaaacgctttccatttactttgattcttaaaaaatccgctattgacgttactgtttcactgctcaggctaaaaatagaccctggtgctaagcatacaggaattgctttggtgaatgactcaaggggtgacgcattgggacaaaaaaatggggcaagccctaataacaacacgataaatcgtgatgcttccagatcaacgcaagagggcttgccccatttttccagtcattcccccggtgaagttgtctttgctgccgaactaaagcatagaggttttgcaatcagagagtctttggcttccaggagacagataagacgcagcagacgaaaccgtaagaccagatatcgtcaaccaaggtttttaaacagaacacgtcctaaaggttggttagcgcctagcttacaaagtcgagtcgaaaatatcaaaacctgggttaacaaactgcgcaaggtagcccgaattgaagcgattagccaagagcttgtacgttttgatatgaagaaagttggtgtgtacctcggaaggattgcaacacgtgcaacaggtagtttcaatatttcaaccaaagacggattagtccaaggaattagccacaagttttgtaaacacattcacaaaaaggatggttactcgtatgcctaa

SEQ ID NO: 1784 - DNA, 382 bp, unidentified
  misc_feature 1..382: note = Ga0370532_0143 JGI
  source 1..382: mol_type = other DNA
gtaagcaacccctgcctaaaggctaggggcttcgacaaatgttgaagcccagcttaccagactaagtacttcgtgtactacgttcagaataagtgttaaagtttctacctacaaatgcgtagctagtttgtagctctagaaccaaaagattaaacatctgtatgggttaaggaagtgtcttttggatagtaccccttcggggtatgcgcaaagcgcacggcttgaggccgaacggcagtcgctcctgggggaaaccaacgccagacacctacggagggaaaccctcctgcatggctagcgctccccaagaccgcgctgcctcagcgattctgaacattgtcaaagctaactttacccgtaaggagggacatttatgtccaaa

SEQ ID NO: 1785 - DNA, 800 bp, unidentified
  source 1..800: mol_type = other DNA
atgtcaaattttgtttttgtcttggacagaaacaagcggcaacttgacccagtgcatccgggaaaagctcggcgactcctctgtacaggaaaggctgccgtatttcgccgttatccgttcaccatcattctcaaagaagcctacccagacatacccgtgcgggacctggaacttaaactcgatccgggttctcaggtcacaggaattgcgatcgtacagggcacgaaggtaatcttcggggctgagatcgaacaccgaggtcaacaaatcaaagatgcagcagccgtcaattcaacccgatgggcgttgttcaatgctctgaaacaaacaggcttgcctgtggcgacaggtacggggggacaaaccaagttcaatcggacgcgattagacctacccaaaacgcactggctagatgctgcaagggttgggaaaattgattcacttaaagtcttgaccaccaaaccgttgttaatttcagcaaaaggacatggtactcgatagatgtgcgggacggataaatatgggtttcctactcgtcatcccccctttagttccccccttaataaggggggttaggggggattcataaaagatttcagactggcgatctcgttactgccacggtcacaaaaggcaagaaaatagggtcttatgttgggcgagttctctgtcgcgcatcaggccactttgatattgtgactcgattgggtcgggtatctggaattagccacaggtattgccaacccattcacaaaagggatggttatgcttatgcgttcgctcataccataggcggctaa

SEQ ID NO: 1786 - DNA, 265 bp, unidentified
  source 1..265: mol_type = other DNA
gtcagcccccccggctgaagcacgcgggcttcatgcttccagcttcagtaggggcgtttcgcgaaacgcccctacccagcctaagtcttaactgactacgtttttaaggtcatggcacctacaaatgctttccagtttggaaccctgccgttaacggttaaacagccctaggaggggtaaggcagtgccgttagcccaacaagccctaaaaacattggcgaggaaaacattacccgttttacggagaccttcaatgtcaaatttt

SEQ ID NO: 1787 - DNA, 963 bp, unidentified
  misc_feature 1..963: note = marine metagenome genome assembly, contig: NODE_793_length_18947_cov_12.879862, whole genome shotgun sequence WGS
  source 1..963: mol_type = other DNA
atgaatcattacgtttatgtacaagatcacacaggacaaccactgatgcctaccaagcgtcatggctgggtgcgtcgtgcattgcgtgatggcaaggcaaccgttgtgaaacgctcgccttttacgattaaactcacttatgaaagtggcaatgaagttcaggatgtgtcacttcatcttgatgcaggatacgctaatatcgggttttctgcacaagcagaatcaagagaattactcggcggtgttttagagttattaaaaggtatgtcagaacgcatcaaagaacgcgctatgtatcgtacacagcgtcgttctcgtttgcgttaccgcaaacctaaattcaaaaagggtggtgattttgtttctaaccgtcccgatggttggttagcgcctagtattcagcataaactggatagtcatttgaatttaattcgtaaaatccagcagattttaccaattacctctattcaaattgaaaccgcgacgtttgatattcagaaaatcaacaatcctgacatcgaaggcgctggctatcagcaaggcgaacgattaggtttctggaatcttcgtgaatatatccttcacagagataaccatacttgccaaaattctgactgtaaaaacaaaagcaaagaaaagatccttcaagtgcatcatatcggcttttggaagcaggatagaagcgaccgtccagcaaacttgattaccttatgcaccaaatgccatacgactaaaaaccaccagaaaaatggcttcttgtatggttgggaaccacgcttgaagagcttcaagcctgaaaccttcatgactacggtgcgtcgtcgtttaatcatccaagcaagagaaatatttgacttacctgttactgaaacctttggttacttaacaaaagcaagccgtattcaaaaagagttgcctaaaagccatcactatgatgcgtttgcgatgggtaacgcaattaca

SEQ ID NO: 1788 - DNA, 281 bp, unidentified
  misc_feature 1..281: note = marine metagenome genome assembly, contig: NODE_793_length_18947_cov_12.879862, whole genome shotgun sequence WGS
  source 1..281: mol_type = other DNA
gtcaactaccccgccctgaagggcggggcttgtgaaaacaagcccagttgaatagctcccttatttattaaggagacgttgtaggaggaatagataggtgttctgttatgctccacaagtagcaggtgacacggaaacggattaaaaaccactgaagggtaaggtggcgtgttcgtttcagcaaaaccttccgcaaccgagcgatgtggctctacagccgttaggctgacttatcgttaatacgaattgttattactaaaaggtaaaatatgaatcattac

SEQ ID NO: 1789 - DNA, 888 bp, unidentified
  misc_feature 1..888: note = Ga0101770_1058525 JGI
  variation 358: note = n represents any nucleotide
  source 1..888: mol_type = other DNA
atgtatcgtagaattaggcgcaatagacttagatataggaaacctagatttgataacagaatttcatctaagaaagaaggttggttagcgccctctattaaacacaagttagattctcatgttaggtttattaattatcttaaaaagatattgcctataactaacatagtcatagaagtggcaaattttgacacacataaacttaaaaacccaaacgtagttggtgaaggttatcaacaaggtgaacaacaagatttttggaatgtaagagaatacgttctgtatagagataattatacctgccagctatgtggcaagaaaaacaccatacttgaggtacatcatataggctattggnaacaagatagaacagatagaccaggcaatctaataacattatgcaccaaatgccacaatcctaataatcataaagaggaaggtaaattgtatggaatgaagcctgttcaaaaaccattaaaggacgcaacatttatgtctactataagatggaaactggtcaatgcgctgatgtgtgactacacttacggttatattacaaaatccaaaagagtaagtcatgatttggaaaagacacattataacgatgcattttgcatagcaggtggaattaatcaacagagaatagaacctatctattttgagcaaattaggagaaacaatcgttcactcgaaaagttctatgatgcaaaatatgttgatataagagataagtctattaaaacaggacaagagcttttctgtggtagaaggacacggaacaaaaacttaaatgaagaaaatcttcataagtatcgtggagctaaaaaatcaaaaggcagaagaaatattcgtaagcaaagatacgcttatcagcctaaagatattgtt

SEQ ID NO: 1790 - DNA, 223 bp, unidentified
  misc_feature 1..223: note = Ga0101770_1058525 JGI
  variation 138: note = n represents any nucleotide
  source 1..223: mol_type = other DNA
gtcaattacccaccgcccctagaggcgggggcttgtagaaatacaagctcggttgattagcctatgtcattagcttttgctaatgattagttatagcagaatatatagtcaccgtgggatgctccacaagtcccatgntctgagggtaatggttaaacatctctgaggggtaggagaagtgctgttaccattaaacctgctataacattggcgatgtggacct

SEQ ID NO: 1791 - DNA, 1455 bp, Eubacterium sp.
  source 1..1455: mol_type = other DNA; strain = An3
atgacggggcattcgctccgtcccatgggaacgcgtaagcgaaaggagggaaactctatggtatttgttgtatctgcaaacggaacgcccctgatgccgaccagtccttaccgtgcaaggaagctgttaaagaaggggcgcgcgaagatctaccagtaccatccgttcaccatccaggatacagaccgggaagacggggaagtacagaagatcgaatactgcacggacgtgggatatctccatgtagggatctccgtgaaatcagaaaaacatgagtatctggggctgcaggcagacctgctgcccgatgaaacggagcggcacaatgccaggcggaagtaccgccgtacccggcggaaccggaaatgctacatgaagccccggtttaataaccgtaaaagagagaaaggctggctggcaccatccatccgccataaggtcgaggcacagctgctgctgttatcgaagatcctcgctgtctgcccggtcgtatccgtgtggctggagatggggaagttcgacacgcagctgctaaaagccctcctgcgcggggagaagccgccggaaggagcggagtaccagcagggagagaggtatgggatcgaaacactccgggaagcggtctttaccagggaccgccatacctgtgtattctgtgggcgggggatcaaggaccatgccatcctgcatgtccaccatgtcgggtattggaagaaagaccgcagcaaccggcttgccaaccttgctacctgctgtgagcagtgccatacgccagcaaaccaccagccggacggcatcttatatggaaggaacccaaactttccgtctctagcaccggcaacttatatgtccatgatccggtggcagatgctcgcgatggtgaaggagatgcacgataacgtccatatcacttatggtacacggacaaagatcgagcgtaagaaacgccatttgaaaaagacgcatatcaatgatgcgtactgtattggggagttccgcccgaaacaccggacgccggacgtctatattgaaaagaaacgccggaatgaccggatcctgcagaaattttatgatgcagtctatatcgaccggcgagatgggaaggaaaagtccgggaaggagctttttaatgggagaatcagccggaaccacaagaaggattccgagaatctgcatccttatcggcagaagaagatcaaaaaaggacatctttccatacggaaaagcaggacgcagctcaaacctggaagtgttgttctctataaaaacgagaggaagatcgtacacgggacacataccaggtattacaaaccgaaaagatcaccggtcccggtgaagcgtatcaatgtgcaatttaccgaaccagcctctgatgggcagaaaagtgcagaccttacgaattgcactgtgatcggacaggaattcatccgtggctggaagcaggttatagtataa

SEQ ID NO: 1792 - DNA, 338 bp, Eubacterium sp.
  source 1..338: mol_type = other DNA; strain = An3
gtcaataaccccgcctgatttgccttcggcaaattcaggcgaggcttgcggtccgccgtgagcctgattgattagcctcagctgtcggctcattcgctgtcagctacgttaccccagaatccatcatcaggtaagacaggcaccagtggatgctcctcaagtccactgctctgcggtgtgggattaaacagtctctgagggaaggagaagtgtcccgcataaaaacctggggataacattggcgatgaggaccacccccgaaagggagaaccccatgtatgacggggcattcgctccgtcccatgggaacgcgtaagcgaaaggagggaaactctatg

SEQ ID NO: 1793 - DNA, 1590 bp, unidentified
  misc_feature 1..1590: note = human gut metagenome genome assembly, contig: NODE_3304_length_8539_cov_2.986681, whole genome shotgun sequence WGS
  source 1..1590: mol_type = other DNA
atgcggagataccggttatctccgggatactgcatggcacattataaaaggaggcatctgatgcctgatacagattacatatatgtactcggcgttgacggtaaaccgcagatgccgacaaaacgaaagagacatgtcaaaagattacttaataccggcaaggcacgaattgcatgccatgtcccttatacaatacagttactttatgaaaacacacctgttctccagcctgtaatgctggctgaagacccgggacgcacaaatatcggcatggcgattttatccataaaaggtgaactactcatgtctgctgtcgtggaaacacgcaacagggaaatcgtaaggctcatgaatcaccgcaggggatatcgcagggcttcaagaattggtgaacgtaaggccagacagcgtcttgcaaaacgtttcggcacaatgcttaaggcaggtctgattatgcgtaaacttccaaagtttgcggctgacaagtttatcacatgccactgcatcaaaaatacggagtcgcgtttcttcaacagaaaacatccggatggatggcttacgccgacttcaaggcagcttgttgaaacacatatcaacttgatgcacaagatacagaaatacctgccggttacagacatcgccatggaagtaaaccgctttgcatttctgtcgctggaaaacccgtctgtttcgggagtagacttccagaatggaccgttaaaaggctttgacagcctgcatgatacagtaaatgaattacagcatggcaaatgcctgctgtgtgacaaaaagatagaacattatcatcatattgttccaagatccataaacggctcaaatactattggcaatatagccgggctgtgcatggaatgtcacgacaaggttcataaatgtgcagcatatcagaaaaagcttaacgatgtcaaaaagggactggataaaaagtatggtgcattgagtgccctgaatcaggcagtgccatttatctgtaaatgtcttgaagctgaatttggcagagagcatgtatcttactgtaccggccgggacactgcaaaaatgcgcagttcttttggattccaaaagacaaaggataatcagatgcatgaaactgacgcatggtgtataggaattctcgcattaaacaaaattccgaatgtggttccggattttggacagacatactgcatcagacagttcagacgtcaggacagaagccttgtttgcgcccagacagaaagagtctacaaactggacggtgtgacgattgccaaaaaccgtaaaaaacgtaccgaacagaaaacagattctctcgatgactggtacaacagacaggtgactttatacggcaaaaagaaagctgatttcatgcgcagccgattgactgtcattaagagcaaaagacgctataatgacttaacacgcgtcatgccgggagcagtattcatgtacaacggagagtgtcacgtcttaagcggacgtctcacagaaggacaatacttccgcgcagtgggtgacacaaaaacaaattatcctgcttcaaagtgtaagataatcagacacaatgaaggactggtgtttgtatgctaa

SEQ ID NO: 1794 - DNA, 801 bp, unidentified
  misc_feature 1..801: note = human gut metagenome genome assembly, contig: NODE_3304_length_8539_cov_2.986681, whole genome shotgun sequence WGS
  source 1..801: mol_type = other DNA
ttgctcgaagaacataaggctaaagtggtgagaaaatgtccatttacaattcagcttaattatgaatgtgtaaacattattcaacctgttagtcttggtgtagacatcggatttgaaaatattggaatttctgcaacaactgaaaaagatgttctctttgaggctaaagtcaaaattagaacagatatagttaaacttctttctcaaagaatagagataagacgtacaagacgatcacgaaagacaagatatcgtaacactcggtttctaaaccgaaaatatacgaaacctaaaggatggaaagcaccttcattcagagctagactagattcacatgtagaacttattgcaaaagttcacagtattctgcctatcggcaagatcattgtggagattgcaagttttgacatacagaaaatcaagaatcctgagatcaaaggtgctgagtatcagcaaggtgaaatgcttggattcaacaatttaaaagcttatatcttatgcagagatgggcatctatgccgatgttgcaaaggtaagagtggtgataagattttaagagttcatcatcttgaatcaagattaactggtggcaatgctcctaacaatctcataactttgtgtgattcgtgtcacacgaaatatcacaacggtttgatagatttaaaagatattaaacgtggaaattgttataaaactgaatcatgtatgacatctatgaaaaatcaattgattagagatctacgatcaaagtattctgaagtatatgtaacgtttggtgacaaaaccaaatttacaatataa

SEQ ID NO: 1795 - DNA, 301 bp, unidentified
  misc_feature 1..301: note = human gut metagenome genome assembly, contig: NODE_3304_length_8539_cov_2.986681, whole genome shotgun sequence WGS
  source 1..301: mol_type = other DNA
atcaggaaaaaataagtatctgtcataaaataacttgattatttcttgacttagtgcttagtcttagcaaagtttacttttcaaagtaaattgagctacgttatgaaagaatatatagttacgtcagaatgttctacctagttctgacctctaaggtttatgattaaacagttcacacgtttgaacagtgttgtagacaacaaaacctttcaataacattgacgaaggtagttttacagttttgcagtatctggcttatagcaataaactgtaacttttaaaaaggtttaaaatgaaattt

SEQ ID NO: 1796 - DNA, 231 bp, Ectothiorhodospira magna
  source 1..231: mol_type = other DNA
atggcgattctggtactggacaagaggaaaaagcccctgatgccctgctcggagaagcgggcacggttgctgctggagcgggaccgggccacgggcctgccggtgatcaccagtagcggtggccgcaccaaatacaatcgacagcggctgggcattcccaagacccacgccctggatgcagcttgtgtcgggccagtcactgccaccacccctggaatgtgccctccttga

SEQ ID NO: 1797 - DNA, 289 bp, Ectothiorhodospira magna
  source 1..289: mol_type = other DNA
gtcaactaccccgccctgaaggccggagcttgtgaaagcaagccgggttgaccagggtcagcggtgaaaacccgctacgtttgcaacaggtcgtcaagacccaccggcggatgctgcctcagtctgccgctctggaaggttaggatcatgctggcgaaaggtaaagcgccgaaggttccagccgccgcgtcagcgggagccggttgcagacattcccgaggggagatgaggcgcaagccctgcgtcactggacccgtaagggttctgttttaggagatttgaaatggcg

SEQ ID NO: 1798 - DNA, 1356 bp, unidentified
  source 1..1356: mol_type = other DNA
atgcagaagttattggtagagtttaagaacacatcaggggatgctcctcaagtcccctgctctgtaagtggggcattaaacagagaggaaactctcagtgtgccctgcatagtactggccaataacaactccgatgaggacctacactctggcaagagtagacaggacttgagagttcctgtgttaaatatgcgtggaaaacctttaatgcctatgagacctagaaaggcaagagttttcctgaaacaggaaaaggcagcagtagttcagcgaagtccttttatcatacagttaaaatacccttcaggtgaaacaaaacaagctctaaaattaggtatagatgctggatattcaacaataggcttcagtgctataaatgacaagagtgaattactctcaggtgagttaactttgcgaaaaagaatctctaaactccttgagcagaaaaaacattacaggcgagctcgaaggaataaattatggtacagaaagccaaaattcaataatcgtagcaaacccaaaggttggtttgcaccttctatacagcataaacttgagacacatctgagattgattgaaaaactgacgaaaatactgcctgtaacaaaaataacagtagaagtatcgagctttgaccagcagaagatgcagaatccagagattaatggagtagaataccatcaaggtgaattacagagctacgaagtaagagaatatctgctggagaaatggaagcataagtgtgcttattgtgggaagagtaatacacccttagagattgagcatattatacctaaaattcgaggtggaacagatagagtttcaaatctgactttagcgtgccataaatgtaatcagaagaaaggagataaaacagcagcagaggttggatatcctgaaatacagaaaaaagcaaatcaaacattaaaaacaactgcatttatgaatatcgttagatggagactggtgaatactctgaagtgtgactggacgtatgggtatattacaaagcatgctcgaattaaattagatatggagaaaagtcatataaatgatgcttttgtgattgctggtggaacaactcaaagtaggagtaaaccttataaagtgacacaaacaagacgcaataatagaagtattcaaacaaacagaaaaggttttaaaccttctataagaaaacaaagatataaattacagcccaatgatttagtaaaatatattaaatctctatgtaaagtgaagggtgtccataattatggggaatatgtaatagtagaagggaaaatagggaaaatctttgatattaatgttaagaaagtggagttattaaaatatggaaaaggaatacaattctaa

SEQ ID NO: 1799 - DNA, 253 bp, unidentified
  source 1..253: mol_type = other DNA
gtcaatcaccacccattaaaatgagtggcctgtctcgtgagagacaggggtaacaggttgattaggaggcattgaagaatgcagaagttattggtagagtttaagaacacatcaggggatgctcctcaagtcccctgctctgtaagtggggcattaaacagagaggaaactctcagtgtgccctgcatagtactggccaataacaactccgatgaggacctacactctggcaagagtagacaggacttgagag

SEQ ID NO: 1800 - DNA, 1191 bp, unidentified
  misc_feature 1..1191: note = Ga0074646_100108 JGI
  source 1..1191: mol_type = other DNA
atgaatccaaaagtatttgttttggcagaagatgggacaccattgatgcctacaactgcatcaagggctagacgaaaattgagggatggtcaagctaaagttgtgaaaagagaacctttcacaattcaattgctttacaaatcaggaatggagattcaaccaattaagttggggattgattcgggctatcaaaatataggtttttccgcaacaacagaaaaagatgaattaatatccggtgaagttaagttggataatggaatgtcaaagagaatccaagacaaagccatatatcgtaggaatcgcaggaatagacttagatacagacaatcaagatttgataatagaacacaaaaagaaaattggttgccaccatcaattcaaagaagatttgatactaatattagtcttattaacaaattgagatcaatacttcctatttctgagattattgttgaggcaggtagttttgatattcaaaagttacaaaatcctgaaattgaaagtaaacaatatcaacaaggtgaaatgtatggttatgcaaatctaaaatcttatcttttgacaagagaaaaaagtttatgtcaattgtgtggtaaagttcacaaaaagtggcagatgcatcatattattccaaggtctaaaggtggaacaaatagaccaaagaattttgcattgttgggcgataaatgtcatgataaattgcataaacaaaatttatatcacaaattaaaaaagaatagacaatttaaaggatctactttcatgtctatcattagaaagagattctatgatttcggatataacgtagtttatggttatcagacctttgtggatcgcaataaattgagtttatctaagagtcatgcaaatgatgcctttgtaatatcaggtggtataaatcaaaatagagtaaatatgttcatagtaactcaaaaaagaaaaaataatagatgtctgcaaattaatagaaagtcgggaattttgattcgtagaaagagatatagtattcgaccaaaagatttagttaaatattcaggtaagatgtttgaagtgatagggattattagtaggggattaagtgttggtctgacggatggaattaaaaagatttataaatcaccatcaaaattggatgattggatctttcatagaaagacattgatttggagaaactgtataggtcaataa

SEQ ID NO: 1801 - DNA, 249 bp, unidentified
  misc_feature 1..249: note = Ga0074646_100108 JGI
  source 1..249: mol_type = other DNA
gtcagttgtcaaggtcttaataccttggtttgttaggtgactaacaacgattaaaagagctgattagtctaagtcttaattgactacgttatcttagaatatataggtacttcagaatgcctcccaagttctgaacactacggatgatagttaaacagagttcaaagactcggtgctattattaaaaacctaagaataacattgacgatgggaatcaactccgaaaggagatttataatgaatccaaaa

SEQ ID NO: 1802 - DNA, 1251 bp, unidentified
  misc_feature 1..1251: note = Ga0318466_10004665 JGI
  source 1..1251: mol_type = other DNA
atgattttagtttatgttttgaataaagatagtaaacctttaatgccttgcaaagcttcaaaagcaagaaaattattaaaatcaaataaagcgaaagtcataaatagaactccttttactattcaattattatatggaagttcaggttataaacaacctatgatattaggagtggatacaggaagtaaaaatataggtttatctgtaacaacaaataaacaagaattattttcggctgaagttttattaagagatgatatcgtagaaaaattatcgacaagacgagaaataagacaaaatagaagaaatagaaaaacaaggtatagacagccaagatttaacaatagaattaaatcaaagaaaaaaggttggttgccaccttcttcattgcagaagataaatagtcatattcaaataataaataaagtatataaaattttacctgttacagatttaataatagaagtggcaagttttgacattcaaaaaatcaaaaatcctaatattcagggaatagaataccaacaaggagaacaattgggattttggaatacaagagaatatgttttatttagagataaccatacttgtcaatgctgtaaagggaaatcaaaagataaagttttaaatgttcatcatatagagagtcgcaaagttggtggagatgcaccaaataatttaattactctttgtgaaacttgtcataacaaatatcataaaggagaattaaatattattttaaaaagaagttcttcatctttacgagatgtggctttaatgaattcgataaaatacatattatataataaactaaaaaaaatttatccaaattgtaaaattacttatgggtatataacaaaatataaaagaataaataataatttatctaaaactcatgcagttgatgctttttgtataacaaataatctgttagcaaatagattaaattatttttatcaatataaatgtatgagaaatcataatagacaaattcataaaatgaaaatttataaaggaaatgttagaaaaccaaatagtttaggtaaatatgtacaaggatttcaagcttttgataaagtaaaaattcttaattctaacataataggatttataaaagcaagaagaaaaacaggtagttttgtaatatctgatatttatggaaatatcatacaaaatataacttataaaaaattaaaattgttagaaagtagacgaagttatttagtagaattactaataaaaggagaataa

SEQ ID NO: 1803 - DNA, 321 bp, unidentified
  misc_feature 1..321: note = Ga0318466_10004665 JGI
  source 1..321: mol_type = other DNA
gaaagttaagattattgtcacccatacatattgtggataacgagaccaaaatttcaatttaacataattgttgattgaagtttagcctcagtaaagaattttcttttactacgttactttagaatatatagttacctacaaatgttaagtccagtttgtagctctaaggttagtgattaaacatgtttttttagacaagtgttgctaatatataaaacctaaagataacattggcgagggctacctaacttactttaagtaaggattactttgttttagtaatcaaattatttttaggaaaggagtttatctatgatttta

SEQ ID NO: 1804 - DNA, 1308 bp, unidentified
  misc_feature 1..1308: note = Ga0182240_101142 JGI
  source 1..1308: mol_type = other DNA
atggtatacgtactgaattgtgaaggcaacccgcttatgccaaccaaacgtttcggcaaggtacgccgtatgttaaaagataaccgtgccagggtggtaagagctaaacctttcaccatccagttaacttacgagaccaccaactacgtacaaccggtgactcttggcatagacgccggctacgaaacagtaggcttttcggcagtcaccgaaaaagaagagctgattgccggtgagtgccagcttctgaccggccaagcagaacgtaacaaagagcgcgcaatgtaccgccgcgaacgccgcaatagattaagataccgcaagccccggtttgacaaccgcaagaagcccgcaggctggctttcgcctagcattcaacacaagctggacagccatatccggctggtgaacctggtcaaatccatactgtcggtgaccagggtagttgttgaagttgccagtttcgacatccaggccatcaagaacccgggtatccagggcaaagagtaccagcagggcgagcagtacggtttctggaacctgcgggaatatatcctgcaccgggacaaccaccagtgccagaatccagactgcagatccaaaaccccggaacttgaggtacatcatatcggttactggaaaggtgataggacagaccggccgggcaacctgattaccctttgcattaaatgccaccgcccggaaaaccacaaaaaaggcgggctactgtggggctgggaacccaaagtcaactcttttaaggcagaaactttcatgactactgtacgttggaaaatggtcaacatcctgggcagcgattatacttacggttacattaccaagaaaaaacgcatggaattaaacctgtccaagagccatattaacgatgcatttgttatcgccggtggtactgctcaaacccggtacaaaccgctgactataatccaagtgcgccgcaacaaccgtagcttgcagaaattttacgatgcaaaatacattgacatccgcactggcaagaaagcaaccggccaggacttgaactgtggcaagcgtaccagaaaccgtaaccttaacggtccgaacctgcgcatttatcgtggccaaaaattatccaaaggcagggtacaggtacgtagaaaacggcatccgttccagcctggtgatacagtaatatttcagggcaagaagtacactgtcaaaggcacccagaaccgcggagattacgtgcggctggcggagctacccaagccggtcaaggctggtttactcaatcatctgtattatggcaaaggacttcgggtagtttag

SEQ ID NO: 1805 - DNA, 311 bp, unidentified
  misc_feature 1..311: note = Ga0182240_101142 JGI
  source 1..311: mol_type = other DNA
gtcaactatccccacttaacggctaacgccgtttgaagtgggggcttgcagaagtatagcaaagatatttgccatacctgcaagcccggttgattagcctcagccaccagcgaaaagctgacagggctacgttacccgtgaatatataggcacttccgggtactccacacgctccgaaccctgcggccagcggttaaccatcgctgacgggtaggcgaagtgctgctggcgtaaaaccacgggataacattggcgaagtggaccaacagccacaaaggctgatttatctctgcaaaggagattcaaaaatg

SEQ ID NO: 1806 - DNA, 1200 bp, unidentified
  misc_feature 1..1200: note = Ga0310695_10004545 JGI
  source 1..1200: mol_type = other DNA
atgcctacagaagaccatcgtaaagtaaggttgcttctaaaatcaggtcaggcaaaggttgtccagagaacaccatttacaattcagttacttcacactactcacgtttataaacaagatattaatttaggcgtggatactggtagtaaagtaattggtttatcagcaactacttctaagaaagagttgtttgctgaggaagttactattagaaatgatattacagaattgttatctcttagaaaaatgtatcgtaaaaatagacgatggagaactactagatatagaaaagaacggtttttaaatagagttaaagtgatgaaaaaaggttgggtagcgccatctattagagctaaacttgaatatcatttaaatataattaagaaagtatacaagatattaccaataactaaattaatagtagaagttgcttcatttgatatgcaaaaaatacaaaattccgaaattgaaggtatagaatatcagcaaggttcacagtttggcttttggaatgtgagagagtatgtattgcatagagataatcacgaatgtcaatattgtcatggtaaaagtaaagacaaggtgttaaatgtacatcatattgtaacaagaaaaactggagggaattctccaagcaatttaattactttatgtagaacttgtcatcaaaagtatcatagcggagaaattaaattaaaggtaactaaaccaaaatctttaaaagatgcagcatttatgaatataatgagatggaagttatataatagtcttaaagaaatatataataatgtgtatatgacatttggatatattacaaaaaacattcgtattgaaaatagtcttcctaaagaacattatatagatgctagatgtatttctggaaatccaaaatctctttcattaggattattttatatgggcaagctagttcgtagacataataggcaacttcataaagcaacaatcgggaaaaaaggatatcgtaagagtaatcaatcgccaaaatatgtttttgggtaccaattgtatgataaagtatattgtaaaggtcaagtatgttttatattttctagaagaacaaagggatactttgatataagacatattgatgggactagagtaactgcaagtataacatataaaaaaatgaagctattggaaaaaagaaaaacgttgttacttgagattgttaaagtttaa

SEQ ID NO: 1807 - DNA, 294 bp, unidentified
  misc_feature 1..294: note = Ga0310695_10004545 JGI
  source 1..294: mol_type = other DNA
ggaaccatcaataacctataaactttagtttaagaagaaattctttattgattaccctaagtctggtttaccaggaaactacgttatcgaagaatgtataggcacctacggatgttcgtcctagtctgtagctctgcggctaatgattaaacagtcctgagaggtaggggcagtgttgttagcatataaaccttctaataacattgggtaagggcaactaacgtttacttttgtaaacgagttacttcatctggtagtgactacttttaagtaagaaggaggtaatcttacttg

SEQ ID NO: 1808 - DNA, 480 bp, unidentified
  misc_feature 1..480: note = Ga0310138_000236 JGI
  source 1..480: mol_type = other DNA
atggtatatgttatttcaaaggatggtaaaccattaatgccaacaaaaaggcatggtaaagttagaagacttttaaaacaaggtcttgctaaagttgttagaagagaaccatttacaattcaactattgtatgatactacaacatatacacaacctgttgtagttggcgtagataatcgttcactgcataaagcaaatccaattaaaggtggaaaaagaccagtaaatactgtaaaggaagttagagggtttagaagattcgacaaagtaagatataaaaatcaaattggtataatctacgggttaagaatctctggatactttgatatgcgttcattaagtggagaaaaaattcactcatcagttaagtggtcaaacctaaaacttttagaaaaagcaaaaacactaatattagaaaggagggaacagcgcattcctctccatcttaaagaagatggagtctcctgcgctggcttatga

SEQ ID NO: 1809 - DNA, 255 bp, unidentified; identical to SEQ ID NO: 909
  misc_feature 1..255: note = Ga0310138_000236 JGI
  source 1..255: mol_type = other DNA

SEQ ID NO: 1810 - DNA, 1179 bp, unidentified
  misc_feature 1..1179: note = TB_LI09_3DRAFT_1004762 JGI
  source 1..1179: mol_type = other DNA
atggtttatgttttatcaaacgatggaaaacctttaatgcctacttcaaggcatagaaaagtcagattgtggttaaaagagggaaaagccagagtcataagacgctttccgtttactatccaactattgtttgacccttgttgccaaaaaacacaaaatttaacgttaggcttagacgtcggatttaaaaccgtaggcgtcagcgttgtttctgacagggtggaagcgtttagcggtcaaattcaactccgaaacgacgtatctgccaacatgacagaacgccgtatgtatagacgtaatcgccgtaacaggttatggcacagaaaaccaagatttcttaaccgtaacaaaaagcgggttttagcgcctggcgtaaaacaaaaaatcgattctcatttacatttaattgccttattaaaattcatattgcccattacaaaagtcatcgttgaaacctgctcgtttgatccccataagctaaaaaatcctcatgttcaaggaaaggattatcagcaaggagaacaatatggctatgaaaatgtcaaagcttatgtgttagccagagacgggtatcaatgtcaggcaaatcaaaaagggcatagtcctatcctgaacgttcatcatattcaatcgagaggacaagggggaagcgataatccggataatttaataaccctttgtaaaaagcatcatgaacaattgcacgatggtaaaatcaggctacatgttaaagagggtaaaatcttaaaagccgcgacagcgatgaatatcgttagaagccaattgttaaaaaaaatgcctgaagcgattgaaacgtttggttatcttaccaaagcaaaacgtcaggaacaaaagcttcagaagagtcatgcaactgacgcgtttatcattgccggcggtaatggacaaccgagactcaacctgttggaattgttgttgaagcgtaaaaataatcgatcattgcaaaagaacagaaaaggttttagtccctctattcgagttcaacgatatgcaatacagccttatgatttagtattatttcaaggcaagcgatatagagcgataggaattcagaacaaaggggcttacttaaagatgacaaacggtattcatacattagtgaaaaatgtaaaacaaatagaagttatctatcatcaaaagactttggtttgtgtgtga

SEQ ID NO: 1811 - DNA, 308 bp, unidentified
  misc_feature 1..308: note = TB_LI09_3DRAFT_1004762 JGI
  source 1..308: mol_type = other DNA
gtcaatcacccctaagctaaagacttaggggcttgtaaggcgacttacaggatagctcaaaaaaagagtaatggttgattagggggccgaaaggcagaagttacggagtgagatacatgcacacccaagaatgctcctcaagtttttggctctgtgatttgtctttaaacagagaggaaactctcagtgaggcagatttaaaaacctccggtaacaaccccgaagaggatctacgagtttgacagttctcggcttacagcgctaaaaactgtcgtttcttcttaaaaataaggattttgatcataatg

SEQ ID NO: 1812 - DNA, 1560 bp, unidentified
  misc_feature 1..1560: note = Ga0180007_10021296 JGI
  source 1..1560: mol_type = other DNA
atgacagattctcagaaacttgagtattttaaaatgaataatgtagaaaaggtaaattatcttaaatctcaaaatgttgtcaaacatcaagaacaagaaagtcaaaaggatataaatcagaaagaaatatctgtcaaaataatcaaacaaggacaggtgtgtgtccatgtattgaacatgagaggtaaacctttgatgccaacgtctccaagaaaagcaagacttctattaaagaataaaaaagcaaaagtggttcagagaagtccatttaccattcagttgaaatatccaactggagaaaacaaacaaccaatcaaattagggttagatacaggttataaattcgtcggattttcggcggtgacaaataaaagggaattgatatcaggagaagtgattattaggactgatattcctgaaaagatgactgaaaagaagatgtatagaaggggaagacggaatagaaatactagatatagagaacctagatttgaaaatagaggtatcccagaaggatggcttcctccatcaacacaacataagttagatacctatgttagattagtcagtaagtttgacaaaatattacctataacgcatatcaatgtcgaaatagctccattcgatactcaaaagatgcagaatccagagatatctgggattgaatatcaacatggagagttgcaaggatatgaggtaaaggaatatctacttgaaaaatggggaaggaaatgtgcatattgtaaagcagagaatgtatcttttgagactgaacatataattccaacatcaagaggtggaacaaatagagtctcaaatctgacgatagcatgtcatgaatgtaatcaaaagaaaggtaatatgacagcagcagaatttggccatccagagattcaaatcctagcaagacaatcattgaaagctgcgacatttatgaatgttgtgagggcaagattagttgataatataaagaaatcgtttccagatctatatgttgataatacatatggatatattacaaaatatacgagaataaaattagatttagataaatctcatgctaatgatgcatttgcgatagcacattccaatagtaggatgagttttggtcagataagatcaaaaccttatcaggtcaaacaaattagaagaaacaataggtctctacagctaaatagaaaaggattcaaaccgtcgataagaaagaagagatataaatattctcctggagatttgataaagagaagatctgatatccaaacaactggatggggcgagaaaagagataaaaaagatagatcgatgatgtacactgtcaaaggaattttcaattatggtaaatggattagattggctaatcctatttcaggcgaaaaagatatttatattcctattgaagatgtgaaactattgaaatatggaagcgggttattatttcaattagcaaaatcaaatgaacataaaatagagaagaaggagaaggttatgaaattgaataagaaagaacagaggattatagatatgaaggagcagaaatcaatagatgatacatggagttaa

SEQ ID NO: 1813 - DNA, 292 bp, unidentified
  misc_feature 1..292: note = Ga0180007_10021296 JGI
  source 1..292: mol_type = other DNA
gtcaactaccccgccctgaagggcggggcctgtcagtgatgacaagagcaatagttgattaggaggtatacctcaaaaatatgcagacgttagaagttagaaatacatacacctcgcccgatgctccactagtcgggggaatacgtgatcctgtattaaataaagattcaagaaggcagccaaagctgtcttcaggtcttagtgtgcaggatttaaaaacttcttctaactctccgaagtggacctactcagcaatgagaagacaggactcgagagtctctgtaggtgatta

SEQ ID NO: 1814 - DNA, 1269 bp, unidentified
  misc_feature 1..1269: note = Ga0310133_003358 JGI
  source 1..1269: mol_type = other DNA
atgtcgtgcaaaccttcaaaagcaaggaaactgcttaagcaaggcaaagcaaagatagtcaaatatgaaccattcacaatccaactgttatacggcagtagtggttataaacaatgttgtactgctggtattgacgctggcagtaaaaacataggcatagcagtaacaacagatgatggcagaataatttataaagcacaagtaatattaagacaagacatcaaagaaaatattgaaacaaaacgtagacttagaagaagcagaagaaacagaaaaacacgttacagaaaaccaagatttcttaaccgcaaaaggaaaaatggttggcttccaccatccataacagcaagaattgatgcacattacaatattataaaaaagttatctaaaattatacctattacaaacatcattgtagaagtaggacaatttgatacacaggcattaataaatccaaatatacaaggtaaagaatatcaaaatggagatatgaaaggttttgacagtgttaaggaatacgtaaaaataagagacaattatcaatgtcattatgctaaattaagacctgatataccatgttcaggcaaaatgacagtagatcatataatacctaaaagtaaaggcggaacagataatccaactaatcttgtatgttgctgcgaagaacacaacagacagaaagacaatctattgtacaaagaatttactggcaaaaatccgccagcaattaggaattttaaggctactgcatttatgaatgtcttaagggattatcttgttcctaaattacaggaaatagcaccaacagaatatacttttggactatatacccgcagaaaacgcaaagaatggaatttagaaaaatcacacataaatgatgctattgctattgtggggataaaaccaagacaggaggtatcagtcagttattatatcaagcaagttcgtaaaaagaaacgcagtttacatgaagaaattccacgtaaaggaagaagtaaacctaatagagatgctaaaagaaacgaaaagaacataaagaaaatcataactaataataactgctggtgtttgtgggataaagtatatataccttcaatagataaaataggctatatatcaggttttacaggaaaatgggtatatgtacaggacatagaaggtaattatttacgaatatcagaaaaatataaacaaatcaatccgaaagaattgcagctaatttgtagaaataacaattatattagtcagcaattcatctccaccttatag

SEQ ID NO: 1815 - DNA, 246 bp, unidentified
  misc_feature 1..246: note = Ga0310133_003358 JGI
  source 1..246: mol_type = other DNA
gtcaactacccccgcttatagaagcggaggcttgaaaaagccttggttgactagcctcagccaccagcagtatgctgacagggctacgttagacaggttatgacaccttgaaatgatgctcaagtttcaagctctgtcgtacatgacctaaacagttctgtgggtaggaacagtggcttgtacgtgtaagcttgtctaacattggcgatgggcaaataactctgaaaggaggaacactttatgtta

SEQ ID NO: 1816 - DNA, 1548 bp, unidentified
  misc_feature 1..1548: note = human gut metagenome genome assembly, contig: NODE_78_length_104184_cov_6.349394, whole genome shotgun sequence WGS
  source 1..1548: mol_type = other DNA
atgcaatatttagattttactttagtagtagataaaaataataaaccatgtgtaccgattttaaacggtagagctggttatttgcttagaaataataaagcaaaaattattaatcatgatccattagtaataaaacgaatagacgattataagagtgattttgaaaatagggatattttcgagttaaaaattgatagcggatatttgaatataggattttctgtcagtgataattatcatgagtatttagctggacaagtcgaattattaaaaggaatgtcggatagattaacaaatcgaaatggatatcgaagaacacgaagatccagaattaggtacaggaaaaataaaaatgttgattacaaaaccgtacataatccaacatataaaaatggaaatgaagaaggatggtttgctccatcaatacaacataaaattgattcacatattcgtttaatagataaaattgcgtcatgggttccagtagataaggtaattgtagaagttgctaaatttgatatccagatgataaaagctttagctgacgggaaagaaatatcaggaaaagattatcaaaatggagaaatgaaaggatatgaaaatgcagcagcttatgttagagatagagataaacatacatgtcggttgtgtggcgcaaataaaaatgttgtgattgaagttcatcatatacaaccgcgttcaaagggaggaaccgataaaccaagtaatctaatatctttatgtcatagttgtcatcggaaggtgcattccaataataacgacaataaatattttgagaaagttaagagtatgaagttatcggatacatacaaagacagtacttatatgaatatggttcgttgggaactttttgaaaggctttctggcaaatatgacgtcaaagttgggtatggatatcaaacaaaaattaatagaaggaatgccggtttaagaaaatttcattatacggatgctgtttgtattaatgattacaaggatgtgacactaacggagaatatctatattgtagatcaaaaacgatgcaatgacaggagtatggagacatttagtgatgcaaaatacatagatgtacgtgatggaaaagaaaaaagtggaaatacattatataaggaaaggcttccaaatgctccgtctaaacgagtcacgcaaaaagaatatataaacaatatgagacaatttcgtggtaagaaaattaaacctggtaaacgcacttttgtttgtaattcatattgtttgaaatgtggagatttaatttacataaatagtggaaagcatagaggaaatatcgcagaagtagaatccatgcaaaaactacctaatggtaatttcaaaatacgatttacatataaagcacaaacagtcaaatacccttctataagtataaagccagaagaatatgaattattaaagaataatttattagacaaagtaaaaattgtaagaacaaggcgtggaatgatttggagaaaatataatcgtctagaatacgaagcgacccatgcagatcaagaaggaatggctgtataa

SEQ ID NO: 1817 - DNA, 267 bp, unidentified
  misc_feature 1..267: note = human gut metagenome genome assembly, contig: NODE_78_length_104184_cov_6.349394, whole genome shotgun sequence WGS
  source 1..267: mol_type = other DNA
gcaaatcctcaaaataaaataactctataaaattaagacgttaaataaaaatagacttagatttaatctacgttattacaagaaaatatattgatatgtaactctagtatcaaattatatcgtttagatttaaacatgcgttacgtctaactttcttgtcgcaagtgatttaagcataaaaacttgtaataacattgtcaaagagtattaccgactataagtcgagttattaattaaaaggagaaaattatgcaatatttagatttt

SEQ ID NO: 1818 - DNA, 1557 bp, unidentified
  misc_feature 1..1557: note = Ga0082212_10029072 JGI
  source 1..1557: mol_type = other DNA
ttgagtaaaagtaaagagacctaccctgaggatgcttccccagtcccaggctctagaaggaagagtagcagacaagctagtggtaagcacgaaacggattcttccaacaagcgcaagcgagcagctgatactcaacattggcgagaggagactggccgaaaggctagcgtcacagagttcctgactctgcccagtgagggtgacctcactgcccgcaagggcaaacaacccctccaaaactgcgtagcagtattggacaaaaaaggaaggccactacagccaacctcaccgcgccgagcacgcatcctgctcaaaaaaggaagagcacgagtccaccgcctctaccccttcaccatcagactagtggaccgcctccaagaagaatcaaccattgacggagtggaactcaaagttgacccaggcgcaaaaaccaccggcttagcaatcaccgtgaccaatagtcacggtgaaacaaaagccattcttctatcagaattagttcacaacggatggctcattaaaaagaatctgcagaaaagggctgctttgcggcgaggccgcagaagcagaaaactaagataccgggctccacgttggcataatcgagcacggcgtcctgtctgcggattagacgtctggctgccgccaagtattcggagtcgtcctcttgccatacttaatttgacaaagaagtgggccaaactctttcccattacttgcgtgtggattgaaaatgttaagtttgacatgcagagactacgtaatcctgcaatttctgggaaagagtatcagcagggcactcttgctggttacgagttgaaagagtacttactggaaaagtttaatcgtaagtgtgcctattgtgacaagagtggaataccgctaaatgtagatcatgtggtaccacgggctcgtgggggtactgatgctgttagcaatcttgttttggcttgtgttaagtgcaatcagaagaagagcgctaagagtttagatgaatttttggcggaagataaaacaagattggctaagattaagcggcagttgaaagtaccgctgcgcgatgctgcagcggtaaatgtggctcgcaaggttttacctatcgcattggttgaggctggttttattgtaaagcttggtagtggtgctcaaactaagttgaatcgtaagcagtttggtattcctaagtcgcatgccttggacgctttgtgtgttggcgctgacattaaagtgagtgacgagtatcctagttcaatgttggtcattacttgtcaaggtcgaggtggtcgtcagcggcagttagtagataagtttggttttcctcgtggaaaaccaaagcctaggtcgaagcaggtttttggttttgctactggtgacttggttcgagcggtagttcctaagggtaaaaaacagggtgagtatttcggcagggttgcggtgcgtagcggtggtaattttaatataaagactttgaacggtactgttcagggtattaagtattctcattgtcagctcgtgcaacgagctgatgggtatggttatcagtttagtaaaatataa

SEQ ID NO: 1819 - DNA, 211 bp, unidentified
  misc_feature 1..211: note = Ga0082212_10029072 JGI
  source 1..211: mol_type = other DNA
gtcaactaccaccacctaaaggaggtggcctgcagtgaatcagcttctgattcaccaaaagccaccgctaagtaagtgagattgcgaaagcaatcacggttgaccagcctaagacacccctgaaggaggtgactacgttgagtaaaagtaaagagacctaccctgaggatgcttccccagtcccaggctctagaaggaagagtagcagaca

SEQ ID NO: 1820 - DNA, 1290 bp, unidentified
  misc_feature 1..1290: note = Ga0247608_10014894 JGI
  source 1..1290: mol_type = other DNA
atgaaagtttatgtattagattggaaaggaaaaccaattatgcctacctctagaggaggtagagttaggtggcttttaaaaacaggaaaagccaaagtcgtgagaactattccctttactattcaattattggaagagggaaggaaatactatactcaagaaattaatctaggtataaaacccggatctaaagaattggggatatctgctacttcagaaaaagaggagctgttctgtgcatctgtaaaattgagaacagatatagtaaatctcctatctactagaagagaaactaggagaactagacgaagtagacttagatatagagagtctaggttcttaaatagagttaaaaccaaaaaacctggttggatagctccctctattcagaataaaattcaatttcatgtcaagatagtagaatttgtcaataagattttacctatatctaatatgatacttgagatagctatctttgatattcagaagataaaaaatcctagtattaatggagtacagtatcagaatggaccacagaaaggtttctggaatgtacgtgaatatgtcttatttcgagataatcatgtctgtcaatattgtcttggaaaatctggagatgaaatcctcaatgtacatcatattgtatcaagaaaaattggtggtaattctccaggaaacctgattactttatgtaagacttgtcataaagactatcatgaaggtaagattaagttatccattaaaaagagtaggtcttataaagatttaacatgtcttaatataataagagatagattatataaagagttattcaagagatatggatttatatatattacttatggttaccaaactaaatgtgatcgtatatctaagggtttattgaaaagtactgatacagatgcttatgttattagttcaggtgatactaatcctttattgagtgataccagatattgtattaatcaggttcgacgacataatagacaaatacataagtttaaaattcttaagggtggaaagctcaaaaagaatcaagctaggtataaagtatttggatatcgtcttaatgatatagttaagtatcaagggaatcgatattatataggtggtcgccgtgagagaggatctttcaatattaaatcattagagggagataagaaattagatatattatataagaaattaaaattcttatatgaacctagacgaatatttatgtataatcaaagaaggaatgttactccaattcctcccacggctaaagcagtgggtacccttggagtgtaa

SEQ ID NO: 1821 - DNA, 387 bp, unidentified
  misc_feature 1..387: note = Ga0247608_10014894 JGI
  source 1..387: mol_type = other DNA
aaaatatcagtaacccacgactgaacgatattataagaaaatatctggtcgagggcatgtaaatgccactatgctgattagtctaagtgaagtctctatgtattatagaattaatagaaagagatgaactacgttatgtgtgaatgtaatctcgagatctcgtatttctcggattatacaataggtacctacggatattcttccaagtctgtagctctacggttattgattaaacagctctgttgggtaggagcagtgttgatgacaacaaaaccatacaataacattgacgatgggagtactacctttaaagttattgatcataataatatgattagtaatgataaagtgtcttattgttaaacaatttttaaattaaaaatgaaa

SEQ ID NO: 1822 - DNA, 1284 bp, unidentified
  misc_feature 1..1284: note = Ga0373631_0015577 JGI
  source 1..1284: mol_type = other DNA
atgcataatagaatatttgttctgtctgcaataggagagaccttaatgccttgccatccagcaagagcaagggctctcctgagagacagtaaagcaaaagttgtgaaggtttatccttttacaattaagcttacagagagaaccacaggtgaattgcaacctgttcaattgaaaattgacccaggttcaagacacagtggtttagctcttgtgttaactggggaacagcacctgaaggttatcttcggtgcagttctacatcataagggtcatttgattaagcaatctcttgatggtcgtcgtagcctgcgtcgtggacgtaggcagcgtaagacaagatacagaccagctcgctgggctaataggaaaagggctgatgggtggttaccaccttcagctatgagtagagttaataatctgaaggtttggacacagaaattcagtaggttaacaacggtgagttcaatttcgtttgagaagacgaaatttgatactcaccttatggttaaccctgaagtgtctggtgtccagtatcaacagggaacattagaaggttataccgtaagggaatatcttctggagaaacacaatagaacttgtgtctattgtggggctaaaaatgtcccacttcagatagagcatatccatccacgttctcgtggtggttcaaatgctatatctaatcttactctatcttgtggtccatgcaatcagaggaaggggactcagaccttggaggagttccttcctcgtaagcctgagcttgttcgtaagataaaggctcagacaagaaagagctttgcggatgctgcacaagtgcaagcaatccgcaataagtctcttgaagttctatgtgactttggtttacctgttgaagtatcaacaggagcagaaacaaagtttaacagaactagactaggttatggtaaagaacattggattgatgcagcctgtataggctcatcaggacaacttgtttcaatccacagacctgatagcaattatgttttagacataaaggctatgggtcgtggatgtagaaatgttcttgcatgtgataaatatggctttccttcaaagaagaaacctaagactcggaaacgagtccttggttttgaaactggagattacattaagactgctattaagggtaaagccttcaaggtcagaatgagcttgaaggtttctaatagtagagcagattttgatggaacaggcaaagccttaaaagactgtaggctaattcagaagaatgatggatacagttacaatcacttacattaa

SEQ ID NO: 1823 - DNA, 229 bp, unidentified
  misc_feature 1..229: note = Ga0373631_0015577 JGI
  source 1..229: mol_type = other DNA
atgaactacgatttataagaatcttctagcaacttgttgctattggaaatagttaccgtggggtgcttctccagccccacgctctaaggttaggtgttaaacatttgtgaaacactgcacgaagtgcatctaacgacaaaccttataaatcattgtcgaggagacgttccgtaaggaacaataccgacataggattttcctattgttgagaaattcaaaaggtaacttt

SEQ ID NO: 1824 - DNA, 1293 bp, unidentified
  misc_feature 1..1293: note = Ga0194138_10000007 JGI
  source 1..1293: mol_type = other DNA
atgccctgtcatccggctagagctagagaacttctaggtaaaggtaaagcagcggtatttcgacgcttcccttttaccattatcttaaaagacccggtgggctccatccctcaacctacggcaatcaagatcgatccgggcagcaagaccaccgggatcgcagtcactgtcaaaggtaaacgcggcgaacgttgtatcatgggtgtccatctggagcaccgcggtatcacaatcaagaagaatctggtcagtcgtgctacctgccgacgtaaccgtcgtaatcgtaagacgcgttaccgtaaaccccgattcctcaaccgaactcgacccgccggatggctcccacccagtctaatgcaccgggtgctgacgactctgacctgggtgaaacgactctgtctagcgagtcctgtctccaagatcgagatcgaacatgtgtcctttgacacccagaagatgctcaacgggtcgatcaaaggcaaagggtatcagcaaggtacactgcaaggctacaagatccgtgagtacctactctatcggtacaactacatctgtcagtattgttcgggtatctccaaggataaacgtctggagactgaacatgtcactcccaaggctcaaggtggatcgaactcgatcaccaacctgaccctgtcctgccatacctgtaaccgcgacaagggcaatcgcactcctgtccagtgggaatggtccctcaagggcaaaggggatgtgctcagtgcagcgagacgcaaaggctgtcgccgagttgcccaaggtaagaaaccacctctcagagatgcagcagccgtcaacagcacagctaaacggttgatccaagaagtccgtgaaatcggactgctctcggtagaacgtccaagctacatgacgaaatacaaccgtcatcgtcaagggtatccaaaggatcactttatcgatgcagcggtactgggtggtgcctgtgacattgtatacattccgaaggggatgagaccgttgactgcaaaagcattgggacatggttcgagacagatgtgtcgggtagatcagtatggtttccctagaaccttagctaaaggtccttctatggtctgcggataccggaccggcgatatagtcgaagccaaagtacccagaggtaaatatatcggtgcgtatgtaggacgtgtagctgtaagaagtagtggccaatttgtcattacaactgacgttggtaaaatcaccacccgtcaacgtcacgtcagtcggttacagcacaatgacggttaccgctacgcgcatcaacccacataa

SEQ ID NO: 1825 - DNA, 286 bp, unidentified
  misc_feature 1..286: note = Ga0194138_10000007 JGI
  source 1..286: mol_type = other DNA
gtcaaccgccccatccttttaaccgaagataatctgctggtatagaggtttagttgaccagacccaggtttgtaatagaacctacgttacccaagaatacataggtactccgggatggccgagccagtcccggactctacgccgagctgttaaacaagcctgtgaggcagggttagtgcagtcaggatacaaaaccttgggataacatcgtcgaggctcacgttacaccgacttagatcggatagactaaggggaaaccctaatgaaggtaacacctactaactat

SEQ ID NO: 1826 - DNA, 1050 bp, unidentified
  misc_feature 1..1050: note = Ga0102947_1000378 JGI
  source 1..1050: mol_type = other DNA
atgataccagtaatagataaacaccaattacctttaatgcctacaacagaaaaaagggcaagaaagttaattgagacaagtaaagcaactcccttttggaaaaagggaatattttgtattagattaaattttgagccttctagcagaaacaaacagcaaattgttgttggaattgactcaggctcaaaaagagaagcttatacgataagaagtaaaaaacatacgttattaaacattcaaacagaaacgcctgtttgggtaaaaaagaaagttgaaacaaggcgaaatgccagaaaagcaagacggttccgaaaaacaccatgtagaaaacctaggttcaataacaaatcaaaacctaaattacctccaagcacaaaatcaagatggcaattaaaattaagaattttagattttctttccaaggcttatccaataactgatgttgtttttgaagacatcaaagcaacaacaaaaaagggaaagaaaagttggaatttaaatttctctccattgcaagttggaaaaaaatggttttgtgaacaagtaaaacaaaattataaattaactattaaagaaggttgggaaacagctgtagctagaaaagaactaggtttagaaaaaattaaagaaaagttgtccgatcgatttgaggcacattgtgttgacagctttacattgtcaagttttctatttttagataaaaagcaaccagaaaacaaaagtattttatatctaaaaccaattcaatttaacagaagacaacttcatgtttttaatttttcaaaaggaggaaaaagaaaactttacggaggaacaatgtcgcttagattcaagcgtggaagtattgtaaaacatcccaaatacaacatttgttatgttgggggaagttcaaaaggaagaataagtctacataatttagaaactggcaaaagactttgtcaaaattctaaaattgaagatttgaaatttttgagctataatagtttccagataaggaggaagccattcctcccacaggacgagcctgtgggtatcctggcttgagattaa

SEQ ID NO: 1827 - DNA, 248 bp, unidentified
  misc_feature 1..248: note = Ga0102947_1000378 JGI
  source 1..248: mol_type = other DNA
gtcaactacccccatgacaagcatgggggcttaaaaggagtacaaaagccaattggaaacaattaagactaaacagttgactagactacggaatgtacgtttgtacaagtccaaactgaatcaacttctggtggcacagaaaaaaatgtctcggatgcttcccaagtccggacctctttgttgatcagtgtcgaagggaaatatacacaaggcctttacgggcattttttataagaaacatgatacca

SEQ ID NO: 1828 - DNA, 1263 bp, unidentified
  misc_feature 1..1263: note = Ga0210402_10005866 JGI
  source 1..1263: mol_type = other DNA
atgccgtgcaatgaacgtcgagcacggctgttgttagaacgcggtcgggcacgagtacatttgcggtatccatttacgatacggttagtggatcgtgccgtggctgactccgcactacaaccgattaccgcgaagctcgacccaggttcgaaaaagaccgggttggctttagtgcggccatcatctgctactcaatcggtaaacgttttaaatctaatagaaatagagcatcgtggttcgcaaatttccgacaaccttacgaaacgccgtggccaccgtaaacatcggcgtagtaaactcaattatcgtgccccccgttttaacaaccgaacccgctcgaaaggatggctagcaccttcactacaacatcgggtagatggcatcattaatttgctagccaaattacgtaaactggcccctattacggatttagctcaagaactcgtgcgtttcgatacgcaattaatgcaaaactctgatattaaaggtatcgaatatcaacaaggcacgttacagggttacgaaatacgagagtatgtgctagaaaaatggggacggcagtgtgtgtactgtaataagcgcgagcgcatactaaatttggatcatatcgtgcctaagtcccgaggcggctctaatcgcccgtccaacctagtaccagcgtgtattaaatgtaatgccatcaagggtaatcgttcgatagaggattttcttgcccatgacccagcacgattaaaacatatcctaatttttgctaagacaccgctcaaagacgccgctgctgttaacactacacgatgggcattatggcgagcgttgacggcgactagcttacttttggtagtaggcaccggagggcgcaccaagtacaaccgacaccagtacggcgtggctaaatcacatgtaaatgatgcggtgtgcgtgggaccaatggataatgtcaccaaaatcaccggattaaatcggcccttgttagctatcaaatgtatggggcgtggttcctatcgtcgcactcgttcagatgcacacggttttcccgtgggatattgcatgcggacgaagcgagtatatggatttggtacaggcgatatagtacgtgcggtagtacctaaaggccgttaccaaggaacgtatataggacgagcagctataagagcaaatggcttatttgatattaaaacgttcaatggattaaaatttgatacatcttataaaaattgcactttgctccaaagaaatgatggatataaatatggtattaaataa

SEQ ID NO: 1829 - DNA, 306 bp, unidentified
  misc_feature 1..306: note = Ga0210402_10005866 JGI
  source 1..306: mol_type = other DNA
atcaacgaccccggctttaaaaaccggcttaccttaaataagtaagcgcgttgaacaggattagctcgcaagggctacgttgatcgggaggcaaaaactaccaacgtcagaatgcttcctcagttctgaccacttgaaatctcaatagtagacaagctacagggtatgcacgaaacggattgagatttagcggggaaccaagcgaaagcgaggtgaaccgtaaaaccgctcgacaacttttccgaggggaggcttcgtaagaggccgtaactaggcccgtaagggcacaccgaaggcaaaaaaatg

SEQ ID NO: 1830 - DNA, 1008 bp, unidentified
  misc_feature 1..1008: note = Ga0136175_10101454 JGI
  source 1..1008: mol_type = other DNA
atggttgtatttgtaataaataaaaacggaaaggcattaatgccctgttccgctagaaaagcaagaattttactaaagaaaaagaaagctcaaatttattgctacaagccatttacaataaaattgctttacggaagctacggttacactcaacctacaagaataggggttgaattaggtgctaaatgtgttggaatagctatacttcaagatgaaaacatattagcaaaaggtgaaattacgctaagaagtgatgtaaaacaaaatattcaaacacgcaagctataccgtcgcagccgaagaaacagaaaaacgaggtacagagaagagagattcttcaacaggattaagtccagaaaggacggctggttacctccaagtataagaagcaggattgagaacacttttatgtggatagacaaattcaaaaagcttgttccgaatccagtgcttagtattgagcttggcaaaaacaagaatgaatttttagaaaacaaggatactacttttatgcacattataaggaaacgcataataaggagataccctcattctgaatttacatacaaggatttgactacgctcagaagaatagaattagacctagagaagacttattataacaacgccatagctataagtggtgctgagaaaataagaagaaataaaaggaatatattcaagattgtgcagttcagaaagaaaaaaagaagtctgcacgaagcaaaccctagaaagggaagaaagacaaagaacgtattgtcaaagagaaacgaaaagaacaaaaagcaaattaaaaactggtgccttaatgatactgtaagagtattcggcaaagttggatttatatgcggtttttccggtgggagtgcttgttatgtcaaagacataagcgggaaatatatagttcctgaaggcaaaaaatacaagcagataaatttgaccagtttaaagctaatgttaagaaacaacaactggcaatacggttgcgtaccgcttagtcaataa

SEQ ID NO: 1831 - DNA, 256 bp, unidentified
  misc_feature 1..256: note = Ga0136175_10101454 JGI
  source 1..256: mol_type = other DNA
gttgattttcccgtactgccctagcagtacagccttaaaggcttaaccaactagcctaagttaattattatgctaacactgtttttaattagctacgttatttttcatacagaaacctgcgaatgataccctagtttgcagctctttcgcggctctgtaaacagctctgagggaaaggagcagtcaaccgtgtttaaaggttaaataacattggcgaagggtaaataactctaacaggagggaatacattatggtt

SEQ ID NO: 1832 - DNA, 1278 bp, unidentified
  misc_feature 1..1278: note = human oral metagenome genome assembly, contig: NODE_46_length_124855_cov_3.86146, whole genome shotgun sequence WGS
  source 1..1278: mol_type = other DNA
atggttttagtaattgataagcgtaagaaaccttgtaatactataagtgaagcttacgctcgaatattactatttaacaaacaagcggtaattcataagagatttccgttcactataagattaaaaaacgatagtgctgtattgaaagatagagcctatactgtaaaggttgaccctggttcaagaaccactggaatagctattgttgataacaaggattcagtggttatgctagctgaaattgaacatagaggtcatattattaaaagaaacatggatagtagaaggactcttaggcgtcatcgtagacaaagaaagactagatataggcctgcaagatttctcaataggaccaaacctaaaggatggttagctccgagtgtgaagtctagagctgataatgtgataaattttattaagaaatataagaaatttttgaatattaataaagttatgattgagagtgttagcttcgatgtagctcaaatgactgcaaacaataaccttgtaggaactgcttatcagcaaggtcctttatatcaaaacaaacttagaagcttcatatttaaccgttcaaatggtaaatgtgtttactgcggagccaaagcaaccgagatagaccatatcgtaccaagagctaagggcggaactaacagcgtttacaatctagtagcatcttgcagaagctgcaatgagaaaaaatcaaacttatcactaaaagcttttggtaaattaatgggtaaagactttagtaagttagaacctaaaaaattgcctaaggatgcaagtattgttcaagcagctagaaactatatgtttcaagaaatagctaaaatcgttcctagcaccgtaggttatgatgcttggcttactaaatacaatagaaatgagctcggtttacctaaagaacattattacgatgccttatctgttggtgaaattccatctaaattcaatttcctcactgataaggtattacaaatatctgctcaaggtagaggctctagacagatgtgtagggtggacaagtacggatttccacgaacatctgctaaagcttcaaagtcagtttatggtttccagactggagatatggttaaagccatagttccaaatggattaaaaaagggagaataccttggtagagttgctgtccgctctaatggtaactttgatataaaagcaaacaaaaaaactatccaaagtataagacataaatattttcacataattcaaaaatgtgatggatatttatatagttataatgagcgatcttag

SEQ ID NO: 1833 - DNA, 314 bp, unidentified
  misc_feature 1..314: note = human oral metagenome genome assembly, contig: NODE_46_length_124855_cov_3.86146, whole genome shotgun sequence WGS
  source 1..314: mol_type = other DNA
gtcaataacttggtaactagtttttactaagcttggttgaccagacttaggttagataacagataatgttgtcttaaactacgatagataggttatcacacccatacgatgcttctccagtctgtggctctgtgtaggctctgtaagttgggttaaagccctgtcaacctaggaacggctctagcaagcctatctatcattgtcgaggagagactaacttagaactttaattgggagcattagcttctggttaatagctgtaagttagcgtaacggtcgcaagactagattaactaaaaaaggaaaaatttatg

SEQ ID NO: 1834 - DNA, 1248 bp, unidentified
  misc_feature 1..1248: note = human gut metagenome genome assembly, contig: NODE_1068_length_23742_cov_9.115844, whole genome shotgun sequence WGS
  source 1..1248: mol_type = other DNA
atggtatatgtgttaaatatcaatggtgttccacttatgccaactgataggcacggtaaggtaagaaaactactaaaagctaaaaaggctaaagtagtcaaaagaacaccatttacaattcaattactatatgtttcaacggaatatacacaaccattaactttgggcgtggatgcaggctcgaaacatattggaatatctgttacatcaagtaacaaagaggtttattgtggtcaggttgaacctcgtcaggatgtatctaaacttttagatgcacgaagaaaaatcaggcgttcaagacgaaaccatttaaggtatagacagccgaggctcaataaccgagtggcatctaaacacaaaggttggttagcaccgtctgtcgaatgtaaaatcaacacacatattaaggtaatagaagatattacaaaaatactgcctattactaatatagctgttgaagttgcagaatttgatacacaaaaattgcttaatcctgatatacaaggtgttgaatatcaacgaggaccgttgtatcaatcaaatttaagacaatatgtgttagcaagagataattatacttgtcaatggtgtaaaggtaaaagtaaatctaaaatacttcatctacaccattggaactattggaataatgaccatagtaataaaccgtcaagtttaattactctttgtgatgtttgtaacaatagtaaaaaccataaggaaaacggtttcctttatggttggaaacctaaaattacaaataatttcagagatgccgctttaatgaactgtatgcgttgggctttatacaacagattaaaggaaatatatccaaatgtcaaaatgacttacggatatatcaccaaagctatgcgttctgaacacaatataccaaaatcacatgtaaatgatgctttatgtattaccggcaatcctgatgtaacacgaatgaatacaatgtatctttctaaaaagaacagagtacacaatcgacaaatacataaagccaacaaacttccaagaggcagattgaaacttaatcaagcaccttatattgtaaaaggttttcgattaaatgataaggttttgtataacggcgctatctgttttataacaggcagacgaaaaaccggctattttggtctaaaaaatattgaaggacaaaccttatcaaattcggccaaatggaaagatttaacattgcttgaaaaagcaaaatattactctatagaaaggatttcaaggagttag

SEQ ID NO: 1835 - DNA, 335 bp, unidentified
  misc_feature 1..335: note = human gut metagenome genome assembly, contig: NODE_1068_length_23742_cov_9.115844, whole genome shotgun sequence WGS
  source 1..335: mol_type = other DNA
gtcaactacccaccactgaagtagcgggcttgtaaagataatttacagcttttgccaagtggagaatttgatttaatcaaattccggttgattagtctaagtgttacgagcactacgttatttaagaaattaggcaccagtggatatagttccaagtccactgctctgcggtatgcaattaaacagtgactgaggggtaggaatacggtgttgcatacgttaaaccttaaaataacattgacgatggagcgtacagtatttattactgcataacaggaacttgtttcctgcattatttattaaattaaatttatagaaaggaatgcatatcaatg

SEQ ID NO: 1836 - DNA, 1395 bp, unidentified
  misc_feature 1..1395: note = mouse gut metagenome genome assembly, contig: NODE_4542_length_6004_cov_2.376702, whole genome shotgun sequence JGI
  source 1..1395: mol_type = other DNA
atggttattactcttgataagcgcaaaaagcctttgggcttttgctctgagaaacgcgcccgcactctgcttgaaaagcggcgggcctgcgtttacaagtatttcccattcaccattattatcaaggacgccgatgtcaggaccatggaacctgttgcctcttaccgggtaaaaattgaccccggcgcaaagcacaccggcctggccatcgtccgcaattcggacaactgcgtggtgtattacctgcaggttgagcaccgtgcagaacgcatcgtcaagaatctcgaaacccgcaaagctgccaggcgaaaccgccggcagcgtgagacccgataccgcccatgcaagtggattaaccactacctgccgcagggcagcaaatacaaaacagagtctccccgcccggaagggtggcttccgccgtctgtaaaatccattggtgataacattatcaactgggtcatccgattgcggaagttagtaaacattaccacctgttcttttgaggcggtccggtttgatacccagctgctggacaatccggatatcagcggcgtggcgtaccaacaggggacactctttggttacgaaatcaaagaatacctactcgacaaatatggccaccagtgtcaatactgcggcggtgcgtccagggaccctgttttggagtgggaacacattgttcccaaatccaggggcggcagcgacagcataaaaaacgccacccttgcctgccatacctgcaaccaggcaaaggggaatctttctttagaagagtggctcgccaaagaagcggctgccgcggacggcaaagccaccaaggcaaaacaggagttagcaaaagcccgggtatcaggtatcgcccatgtcctgaaggggaaagcccccagaaaaagcaatcgctactgtgcctgggctagttcttcccgccggtatgttgagactgggctgttcagcatctttggcaacgtggaatgctcctctggcggcaggactaagttcaaccggcagatgctgaagctgcccaaggaccaccactatgacgctctgtgcgtaggggaaattccagatggtggctatacggacctgacgcatgggtactgcctgtacatcaaggctattggtcgtggcacccggttccgggggaaaatcaacaagtgcggggttatcatccaaaagctcgcaaaaacaaccaagcgcccattcgggttccagaatggggatattgttctggcaaatgccccagccggcaaatacaaaggacgccacattgggcgtgttatgaccagaaagtctggttgttttgatataaggaccacaggtgataacctggtaactgtaaaccacaagtattgcaaactcttacagagagacaacggctaccaatatcggtag

SEQ ID NO: 1837 - DNA, 338 bp, unidentified
  misc_feature 1..338: note = mouse gut metagenome genome assembly, contig: NODE_4542_length_6004_cov_2.376702, whole genome shotgun sequence WGS
  source 1..338: mol_type = other DNA
gtcaactactcggctacaagtagccgagcttgacaaagagtaactctctttgttgagcctactgcttgtagattagttgagcagacatcagcaagtgctacgttaccaatcaggcggcccagggtgcttctccagccctggcgcggcgattcgccacgtgcggcgctacgccgcatgccgaggcatgcagtctaaacaggcaatccgagtacaatagccagtgctgcatgcgcgtaacggttgataacattgtcgaggagacggtgttctcttctctccattggggaggggagaacaccattacaagcccttaacagggactatttcttcagaaggga

SEQ ID NO: 1838 - DNA, 1500 bp, unidentified
  misc_feature 1..1500: note = human gut metagenome genome assembly, contig: NODE_2011_length_11952_cov_14.972463, whole genome shotgun sequence WGS
  source 1..1500: mol_type = other DNA
atgagatacgtatatgtactggatgtggacgggaaaccgctcatgccgacctgccggttcggcaaggtgcgccggatgcttaaatccggacaggcaaaagcagtggataccttgccgtttaccatccagcttacctatagaacaaggacccgcatccttcaaccggttactttaggccaggatccgggacgaaccaatatcggtatggctgctgtccgttccgacggaaaggaactgggccggtttcactgcataacccggaataaggaaatcccgaagctgatggcagaccgcatggcagccagaaaagcttcccgacgtggagaacgtctggcaaggaaacggctcgccagaaagctgcatacaacggcaaagcatctgaatgggaggattcttccaggatgcagcgaaccgatggcggtcaaggatatcatcaacacagaatcacggtttaacaaccgtctgagaccggagggatggctgacaccgacggccacgcagttactgagaacacacatcaacctgttcgtaagactggcaaagattcttccggtcacggacgtggccgtggaactcaacaagttcgccttcatgcagctggataatccggagatgaagaaacgggagattgatttctgccgcggtccgttacacggaaccggaggcgtggaagcggcggtaaaggaacaacagggcggcaaatgtctgttatgcgggaaagaaccaatcggtcattatcaccatatcgtgccgcgttccagaagaggcagtaacatcgttcagaacatcgccggtctttgtccaaagtgccatgaacgggtacataaggatgtggataccgcagagagactgacggagatgaaagccgggctcacaaagaagtacggtggtacatcggtattaaaccagatcatcccgaaactcgtcacacagctgtcggaattattttccggccatttctatgtgacaaacggatggaatacgaaggaattccgtgagaaacatgacctgggaaaagaccatgatgtggatgcctactgcatcgcctgcagccacctggaatcggaaggggcactgatggaaaccgaaccgtttgagatcctgcagttccggaagcatagccgggcgaggattaaccatcaaacagaacgtatttataagttgggtggaacgattgtggccagaaaccgccggaaacggatggaacagaagacggattcactggaagactggtataaggatatggtaagccaatacggaaaagtcaaagcggataccatgtgttccaaattggctgttatcaaaagtacccggtactacaacacacccggaagaatcatgccgggagctgtgttcctgtacgaagggaaacggtacgtgatgaccggccagatcacgaacggaaagtactatcgtgcttacggccaggagaaacggaatttcccggcggcaaacgtacggatactccgcaaaaataccggattggtatttgcagcatga

SEQ ID NO: 1839 - DNA, 212 bp, unidentified
  misc_feature 1..212: note = human gut metagenome genome assembly, contig: NODE_2011_length_11952_cov_14.972463, whole genome shotgun sequence WGS
  source 1..212: mol_type = other DNA
gtcaataacccatgactaaagtcacgggcctgcagatgcaggtcctgatggaagaaagggttattgagcagagcagagacatgtcattcgccgcggggtgattccaagccccgtgctccggttagacatgcccatgctatggaaactttaacggtatgtgcggttttccgtacataccggcttacaacaaataaggagctatcatgagatac

SEQ ID NO: 1840 - DNA, 1497 bp, unidentified
  misc_feature 1..1497: note = Ga0136851_10002495 JGI
  source 1..1497: mol_type = other DNA
atgaaggtacacgtaatcaataagaatggagagccattaatgccttgctcaccacgtaaggcaagattattactgaagcaaaagaaggcagtacccacaaaaggtaaaacagggtacttcacaataaagcttctgcatggttgctctggttacaaacaacctattacagttgggatagatctgggtgctaaatatgttcctatagcagcaacatctggtaagaatgtcttatacgctaaggagaagattctccgaacagacgtgaaagggcaactagaggaaagagcagctgctcgaagacgtagacgcaatgatacacgttatagacccgagaggttcaacaataggacaaagcagaagtgtaacgcatgtggagagaacaacttacctaaagtatggtcaaagacaaaaagaactaatggacgttctttaaagaatgaagctaaaggaagggcttcgctctgcagaagatgtgcagctgaaggtagaaaaggtgtaggaggtaagaagcatgtattaatgccttcagtgaaaaatagagcagagagtattattaatgatatagacaaactgtcttattctttaccaataagtgaggtagttgtagagacagtatcttttgatactcaaaagatggctaaccctgacataaaaggattagagtatcaacatgatactaaggaagggatgggattgagacaatacatctttactataaataggcacaaatgtgtttattgtggtaaaggtataagtgagagaaagaagttaaatatagaacatatcattcctatttcaagaggtggtagttctttattagaaaatctcacatgcgcttgcaaggagtgcaataggatcaagaacgcacgcactcctaaggagtggttagattttctactatacagaaagaataagggagccaaactaaacgaaacagaagttacttggataaagaatcttcctaagttatcttctattaacaaagtaggtaagacttttacctacagtgcattatctcaatcttacaaatattacttattagacgagctgagagaaagatggaacacatctaccactacaggagtagaaacgaaatgggctagatctcaactacacttagctaagtctcagattatagatgcaatagtgattgcgtctaaaggtgaagaagtagagatccctaacatctatctaaaagagaaacagatcaagaagagatacccacacgattacataggacccattaagaagaatgtaaagagacatatctatcctagagaagatgaggtatatgggttcaggttgtgggatcgagtaattgccaatcatgctaaaaaaggtagaatggaaggctatgtaacttctcgaaggaaaagtggaagctttgctattagtaacttagatggtgagctcctaataggaggaatcagttataaaaaattagaacttataagaccttcactctctaactatgtaagagagtggataaaagcttaa

SEQ ID NO: 1841 - DNA, 274 bp, unidentified
  misc_feature 1..274: note = Ga0136851_10002495 JGI
  source 1..274: mol_type = other DNA
atcgactatgctagtgagaaagtctactgtagatttacaggagtagaaagttataacttagattacgacagaaatattattactataagctctccatactataaaggagagatttcaatatctatgagatcattaagatctttagagacagcggacaaatctaagtatgtaatatacattgattgtacagaattcagttcacagaatagtgggtcatcaaacgctaaacctaatctaaaagcagtatatactaaaacaaggagggaagatgaag

SEQ ID NO: 1842 - DNA, 510 bp, unidentified
  misc_feature 1..510: note = metagenome genome assembly, contig: NODE_68_length_101563_cov_30.349657, whole genome shotgun sequence WGS
  source 1..510: mol_type = other DNA
atgacaaattatgcttttgtattagacgctaatggaaaacaattagcacctacaaaagaacaaaaagcatggtttctaattcgtaaaaaacgtgcgacattggttaataaatatccaatggtaatacaacttaatataacaattccaaatggtggagatacagctaataaacgaattgattggaatattgaaaaatcacatagcaatgctgctatttgtattaccgacttgcaaccagatgtatatgaaattaaagagtggataataaaaccaatgcgtagacaaagtaaagctaagacagataatgttttaggaattaaacatagagatttagttgaatatacatttaaaaatggagaaacgcataaaggttatgtaaccgcgttatatccaaatcaaaatgctttaaatttccaaagtccaacgaagcattgtaaaaaagtaaatgctaagaaatgtaaattactttggaaatataataaaatttattggcctgaatgtgtatcttaa

SEQ ID NO: 1843 - DNA, 286 bp, unidentified
  misc_feature 1..286: note = metagenome genome assembly, contig: NODE_68_length_101563_cov_30.349657, whole genome shotgun sequence WGS
  source 1..286: mol_type = other DNA
tattaaacataaataaaagtggacatataactttttgtttgtggcttaatagtaggtttcaagcctgagtgactgctactatcgaaagatatgttgtagatatgaactatgttagatagtaaggtaaaaacacacctttagatgtaatcttcagtctaaagctctgtgagtgccaaccaagaaacaatgctaatgtcctgcattgataacagggaaacacatattctctatctgacattggcaagaagagaaatgctccgaaagaaaggtgtcagaaatgacaaat

SEQ ID NO: 1844 - DNA, 903 bp, unidentified
  misc_feature 1..903: note = Ga0209636_10070277 JGI
  source 1..903: mol_type = other DNA
atgagggggcaacctctcatgcctaccacacaacataaaggaaagaagttattacacgaaggcaaggcaacagttgtaaaacggtgtcctttcaccattcagttgaactatgccactggagagactacacaacccattaaattaggagtggatataggttttacgaatcttggatttagcgccaagaccgatacgttagaagttattagtggaactttaaccttgcgcaaggatgtctcaaacaagcttgaagaaagacggaagtatcgtaaaacgcgtagaggtagacttgggtatcgaccacctcgatttgataaccgaacacgtcctgaaggatggttagcccctagtaatcagcataggcatgagtcacatattcgattagtggaaacacttgccacgctacttcctataaattacaaaaggatagagactgcgaatttcgacacacagaaaatgcagcagcctgaaattacaggcgtagagtatcaacagggcacacttcatggttatgaagtcaaagaatatctattggataagtggggacgaaagtgcgcctattgtggcaagaaagcgattcctttagaagtcgagcatatcgtcccgaaaagcagaggcgggacagatagagtgtcgaatttgacgatctcatgtaggaaatgtaatctaaagaagggagacaagaccgccaaggagtttgggtatccacacatccagcagcaggcaaagacgcctcttaaagcggcagcatgtatcaataatattcgctggaaattagtagagcagttaggagcagaacatacgtacgggtacgtcactaaataccagcgtaacaagttagggctgaaaaaatcacatgttaatgatgcttttgtcattgcgggaggcacaacacaattaagg

SEQ ID NO: 1845 - DNA, 289 bp, unidentified
  misc_feature 1..289: note = Ga0209636_10070277 JGI
  source 1..289: mol_type = other DNA
gtcaattaccccgccctgacggatggggcttgttccgtgaggagcgagagcaattagttgattagcctaagagaggtcatggtgaaacacacatggcgatatctgagttatcagcagagttaaagaacacaccaagggatgcttctctagtcccttgctctgtaaacggtggtttaaacagagaggaaactctcagtgatcatcgtatagtactgactgataaccttggcgaagagaaccaacctactttaacgcacgttaaaggaggagataggacttgagagtacct

SEQ ID NO: 1846 - DNA, 696 bp, unidentified
  misc_feature 1..696: note = Ga0209827_10194947 JGI
  source 1..696: mol_type = other DNA
atgactttcgtctttgtgctcgaccgcgacagaacaccgcttgacccgtgtcatccggcacgggcgcggcagttgttgcaccagggacgcgcctccgtgctgagacgctatccctttaccattatcttgcacgaccggcctgcggtgcaggcgcaggcacaacagcccttgaaagacgccgcagccgtcaacgccacccgatgggcgctataccggcaactctgcaccacgggcctgcctgtcgagtgtgggacgggtggcaggaccaagtacaaccgcacccgccagcagctgcccaaagcgcattggacggacgccgcctgtgtgggggtgagtacaccagagaccctgcgcgtctcagggttacagccactgggtatccgcgcgatgggccacgggacacggcagatgtgccggacaaataagtatggcttccctgtacagcaccgcgcacgacagaagcgctactgtggcatgcagacgggcgatctggtcaaagcggtggtgcccagcggcaagtatcaaggcgtgtggatcagccgcgtggtggtcaaggccagtgggtggtttgatctcaccattcgcggcaagaaggccagtgtgcaccagaagcattgcacgcggctgtgggctgcggatggctatacatacaccctgcctgcggtcgccggcaccgccgtttcctccccccgctga

SEQ ID NO: 1847 - DNA, 260 bp, unidentified
  misc_feature 1..260: note = Ga0209827_10194947 JGI
  source 1..260: mol_type = other DNA
ggctcagtcgacgtactcccccgactgcagtcgggggattctagggaagcctggaatcggtgtcgagcagacttagcccttcggggctccgttcagcaggtcacgataccctgaagtgcgtgccagcttcaggctctatcgtttgccgttaaaccgtcgtggcgagtaccacaccgtgcggcaagcctgacaagcctggtgaacattgtcgaggcatacgtcaccgccgcaaggcgcgtatgaggtaactcatgactttc

SEQ ID NO: 1848 - DNA, 1293 bp, unidentified
  misc_feature 1..1293: note = human gut metagenome genome assembly, contig: NODE_1604_length_6656_cov_3.864566, whole genome shotgun sequence WGS
  source 1..1293: mol_type = other DNA
atggtatatgtattagatcttgatggacagccgcttatgcctactaacaggcatggtaagatccggcatcttctcaaagatggtctggcagaagttgtaatgcgctgtccatttaccatacggttgctgtatgacagcacatgctatacacaggaagtcgtgttaggtgtagacaccggtagtaagcatatcgggctgtcagctactacagaaaccaaagaactctatgcttctgatgtggagttgaggaatgacattgtggatctgctttctacacgcagacagagccgcaggttccgtcgtaaccgaaagacgcgctaccgaaaagcccggttcaaaaatcgggtatcttccaaaaaggaaggctggatcgctcccagtgtccagcagaaaattgatacccatctaaccgtggtatccaaagtatgcaggatgctgcctgtcaccagaattgtcgtagaaacggctgcttttgatattcagaagattaagaatccggacatccagagagctgaatatcaacagggagaccagcttgggttctggaacgtccgggagtatgttttattccgagatgagcatacctgtcagtgctgcaagggaaagtctaaggacaaaattctgaacgtacatcatattgaaagtcgtaaaactgggggtaatgctccgaacaatctgattacgctctgtgaaacctgccatacgggttatcacaaaggcaccgtacaattaccaaagaccatcaagcgaggtatgacattccgggatgctacattcatgggaatcatgcgatgggtattttataacaagctaaaggaagtttataggtcacatggagtggaagtacagatgacattcggatatatcaccaagaatacacggatcgcccaccatcttccaaaagggcattgtgtagatgcgagatgtataagcggtcatccagatgtagagccaattggtgaaatattctatcaaaagaaggttcgctgccataaccgccagattcataacctaaccattttaaaaaatggggttcggaaacggaatcaggcagactatctggtaaaaggctacaggttgtttgataaagtatcctacggaaacaaggagtattttgtttttggacgtaggcagagtggattcttcgatttaagggatctgtcaggtaacaaagtaaacaaaggaagtctcagttataagaagatcagatttctggaaccgagacaatcttatttgtgtgaaaggagaagaaaggacacacaaaggatgcgcttaattgcgatcctcccatga

SEQ ID NO: 1849 - DNA, 270 bp, unidentified
  misc_feature 1..270: note = human gut metagenome genome assembly, contig: NODE_1604_length_6656_cov_3.864566, whole genome shotgun sequence WGS
  source 1..270: mol_type = other DNA
ctgtcaataacccatcactaaagtgacggacttgtaagcccgggattgactagcctaagtgctatgagcactacgttaagggagaatatatagtcacctgcagatgttatacctagtctgcagctctgagatccgtgattaaacagccctgctgggtagggacagtgttacggatacataaacctcccattaacattggcgaaggtatcattacaggggtgtatcccctgagttatgtgatttagttcacagaaaggagtgcctgttatg

SEQ ID NO: 1850 - DNA, 1314 bp, unidentified
  misc_feature 1..1314: note = Ga0209648_10006185 JGI
  source 1..1314: mol_type = other DNA
atgtccagggtcttggttgttgatgcagcacgtcggccactcatgcccactacccctgcaagagcacgtatactgctcaaaactggcagggcggcagtgctgcgtcgcttcccgttcatcctcattttgaaagaagcaaagcccgaagcggtggtccagcccttgcgcctgaaacttgatccaggcgcgaaaaccactggcctggccgtggtcaacgatgcttcaggagaggtcgtgtgggccgcagaaatcacgcatcgcggagaccaggtccacaaagccctgatcaagcgcgctcttgtccggcgcggtcgtcgccagcgacacacccaataccggcaagcgcgttttgcaaaccgtcggcgccccaaaggctggctcaccccctcgctgctctcacgggtccacaacgtgctcacctgggtgtcacgtctgcggcgcttctgtcccattggcgccatctcgtatgagttggtccgttttgatatggccctgcttcaaaacccaaacatcgaggggatcgagtatcaacgcggaacgctgtggggcgtggaagtgcgccagtacttgcttgccaggtgggagcatcagtgcgcctactgtagtgccactggattccccttggagattgatcacgtgattccacagagtcacggaggcagcaaccgggtggccaatctggtgatggcctgccgggcgtgtaacctggcgaaaggggacaagccgctggaagacttcctggcagaccgtcccgaggtgctcgcacgcgtccaagcgcaacgcaaagctccactcaaagatgccgctgtggtcaatagtacccggtgggcactccacaagcggctgggcgcgctgggcctgccgctcgaaaccggctctggcggcctcaccaaatggaacaggcagagcagggagcttccgaaggggcactggatcgatgcagcctgctgcggaccctcaactcctccggtgctgcgtctacaaacagtgcgtccctggctgattgaggccaagggccgacaagctcgtcagatggtcaacgttgaccatctgggattccctcgtagcaaaccaaaagggccaagccgggtacgaggatttcgcacaggcgatctggtcaaagccgtggtcccaccgcatctcggtgcgaaaggcgtgcatatcgggcgagtcctggtgcgcacgcgcggcacttttgacatacagaccaggcatggacgagtcaaagatattcctgcacgctattgtcagagtttgcatcaaaacgatgggtatgtctatcagcttggggcggcgcttcctccgcatgcctga

SEQ ID NO: 1851 - DNA, 306 bp, unidentified
  misc_feature 1..306: note = Ga0209648_10006185 JGI
  source 1..306: mol_type = other DNA
gtcagcgaccccagcgctaaaacgcggggcttgcacaggtcaagccccaatgctgagcagcctcctgcttgcttgcaggcaggagcagttaggaaggaacgtgtaggcaccggcagatggtttttccagtctgctgctctgcggccatccattaaacaggtgaacggggaagtagagccagtgtggatggcatttgaaacccttctataacgcgggcgaggaaaaccttacctgtctggcattccggtgccggacagcgttgctcccttatcggagccacagatcaggagtcaaagcatgtccagg

SEQ ID NO: 1852 - DNA, 771 bp, unidentified
  source 1..771: mol_type = other DNA
atgaataaaaattccgtctttgtactggatacaaatagaaaactatctaatccagtacatccagcacgagccagaaagttattaaagcaaggtaaagcagcagtgtttcgtagatatccatttaccattattttgaaagaggaatcagcaaatgaagtaaaggaattaagactaaaactagatccaggaagtcgcttcacgggattagctttgttatcagacactaacattgtttggtgtgcacaattagaacatcgaggttttcaaatctcggaagctttaactaaacgtagaactttgagaagttctcgtagaaaccgcaaaactcgttatcgtcagccaaggtttctgaatcgtaagcatcctaaaggttggttacctcctagcttaatgtccagagtatttaacatagaatcttgggttaagaaacaaggttatcagcctttgttaattaaagctatggggcatggaagtagacaaatggtcaattcagataaatatggctttcttcgtggccagccaaaactcagacaaaaatcattctatagttttatgactggcgatattgttaaagctgatattcctaaaggtaaatatgcaggtactcatactggcagaattgctactagaagaactggaagctttaaactcaaaacatcaactcaaacctttgatgttaaccataaatattgtcgtcatatccataagtctgatggttttagctacagttttggtgaattagtcaagtacaaagtcaaaactgataactaa

SEQ ID NO: 1853 - DNA, 262 bp, unidentified
  source 1..262: mol_type = other DNA
gtcagcaccccgctctaaagagacggagcttcgtgcatcgttgatttaggtatgctgacccggctaagtcttaactgactacgttattagtaagagttaaaagtcctaccttgaaatacctcacaagtttcaagctctagaatcagatagttaaacagtcctacgaggggtaagacagtgctatttgaaaagtaccgactaataacatagcttatgtgacttttaccctagcaataggagtttttcaatgaataaaaattcc

SEQ ID NO: 1854 - DNA, 1098 bp, Scytonema sp.
  source 1..1098: mol_type = other DNA
atgcaacgagtaccagtgttagataaagacggcaagccgcttatgccaaccaaacccagtcgggctagacgttggcttcaagaaggcaaagccaagattgtacgcaatgacctgaatgttttttgtattcagctattagtagaaccatctggatgtggcactcaaccaatagctttgggattagacccaggtaaaagatttactggtgttggtgtccaatctgccaagttcactttgttcatggcacatctaattcttcctttttctgatgtgacaaaaaagatgtcaggaaggctgattttgcgacgtgccagacgaggtagacgcatcaaccgtaaggttgcattcaacaaaagagcgcatcatcaaaaacggtttgataaccgtaagcagaacaaattgccacctagtattcgggctaataaagaactggaattacgagttaccaaagaattggtaaaactgtttcctgttactcaaatcacttatgaatatgtcaaagccaaaggtgataaaagatttagcccagtgatggttggtcaaaaagtgatgttgcaatggttggaaaagattgcaccaaccaaaatccaagaaggttggcagacttcaatactcaggcagcaactaggtttagctaaagacaaaaaagataaatctaggcaaagtcctgaaactcatgctcatgatggagtggcgttggctgcaagcaacttcatgaagtttgagaaatttcagactgcaaatagtcgtggtcatcgctggagaggaggaatcacagtcacatctgcgccatttcgagtgattgctcgtcctaatctgtttcgtcgccaacttcattttgagaatcctgtgaaagatgcaccaggtaatagaaaacgtaaaggtgggacagtaacaccttttggttttcgctctggcgatttagtcagggctgaaaaagcgggtaagtcgtattttggatgggttggtggatatactcaaacacccaaaaccaagaatatttcggtctataaccacaattggcacaggcttggacagttcagcccgtcaaaggtgcaattaatcaaacggagtacgagattatgcgtagcatcctaa

SEQ ID NO: 1855 - DNA, 219 bp, Scytonema sp.
  source 1..219: mol_type = other DNA
gtcaactacccacactgatctgagtacagatacagtgtgggcttgaaagaaccagctttcaacgcaagagatgactagccccaccagacttgttttgttacagacttccgaatgtttccttagttcggattatctctaagcctactggttgtaggcgcttgtagaaaggacatgctagacaagttgggctaagggacttattactttctcgtaaggatt

SEQ ID NO: 1856 - DNA, 1266 bp, unidentified
  misc_feature 1..1266: note = human gut metagenome genome assembly, contig: NODE_59_length_61911_cov_6.971902, whole genome shotgun sequence WGS
  source 1..1266: mol_type = other DNA
atgatttatgtaaggagcaaggatggtaaggcattgatgccaagtgagcgtggagggaggataggctatcttcttcgccatggcaaggctcatgtagtcagccgtgttccgtttgtcgttcagttggattatgagagcaccatctacacacaggaagtgagccttggcattgatgctggctcaaagcacattggcgtttcggctagttccgagaagaaggagctgcttgcagcgcaggtcgagttaagaagtgatgttgtgaacttgctatctactcgcaaggagttgagaaggacaaggcgaaaccgcaagacacgttaccgcaaggttcgttttgataaccgcaagaagaaagatggttggctagcacctagtgttgagcaaaaggttgagagtcacttgaaggttatccgcttggttcgtaagttacttccaattacgaagaccactatagaggttgctccgtttgatgcgcaaaagattaagaatcccgacatcaagggtgatgagtatcagcaaggcgagcagatgggcttttggaacgtgagggagtacgttttggctagggatgggcacaagtgtgttcattgcaagggcaagagcagagaccctatcttgaacgttcaccatttggagagccataagactggtggtaattcccctagtaatctcgtaacgctttgcgagacctgccacaaggcttaccatcgtggggagttcgacttgaaaatcaagcgtggcacaactttgcgtgatgctgcggtgatgaacattatgcgttggtcggtgtatgaacgagccaaggctgagtttgggaatgtgtacttgacctatggttacattaccaagcacactcgcatagagaatgatattgagaaaactcatgcagccgatgctttctgcattgccaagaacgtacacgcaaggcggtcgagaactttctttatgtgtcgttgtgtacctcgccatacgagagcattgcacgttgcgaacccgaagaaaggtggtattcgtaggtcttgcattgcctctcataagataggcaagtctcgctttcagcgtttcgacatggtatggtggaaaggcaaggaatgctttatctttgggagcacgcacggaagaccaatattgcgtgatgttgaaggaaagcaaattgcaggacaaccgagtgtgaatatcaaaacgataaagtttttaaagagattaagaaataacattttagtggaagaaaggacttccgaaagttggatagaaaatgaaagttag

SEQ ID NO: 1857 - DNA, 278 bp, unidentified
  misc_feature 1..278: note = human gut metagenome genome assembly, contig: NODE_59_length_61911_cov_6.971902, whole genome shotgun sequence WGS
  source 1..278: mol_type = other DNA
ttcaagtttcggaagcctttgattaggctacagcgattatccattcaatcgtccggagcggattagcctcagccccgaatggaattagggagctacgttaggggtgaatgcataggcacgtcaggatgtccgtccaagttctgacctctgcggttcgtggttaaaagtggcgaaagctgcggtgctgcgggcaagaaaccatcctataacattggcgatgggcgcacaaccacctttcgaggtgagatttattaatttgattaattgagttgattatg

SEQ ID NO: 1858 - DNA, 1287 bp, unidentified
  misc_feature 1..1287: note = Ga0302251_1000232 JGI
  source 1..1287: mol_type = other DNA
atgcagttggtgttcgtgctggaccggaagaagcaaccattgatgccgtgccatcccgcgcgggcgcggcaactgctgcgggcagggcgggccgtcgtccatcgcctgcgcccttttaccatccggctgaaggagcgcgtgggcggatcggtacaacccatacgcctgaagctcgaccccggcagcaagaccaccgggattgctatcgtgcgcgagtccgaggagcaagcggtcgtgctgcacctggccgagctgcaccacaagacggacatcaagaagaaattggatcaaaggcgggcctatcgccgcaaccgccgcacccggaagctccgctaccgcgctccgcgcttcctgaaccgcacccgcccggaggggtggctgccgccgtccctgcgggcgagggtggataacatcctctcttggctgcgacgctatcggcggctggcgcccgttacggccctctccctggagctggcccgcttcgacacgcaggcgctccagaacccggaaatcagcggggtacaataccagcaaggcgagctggcgggttacgaagtgcgcgagtatatcctggccaagttcggccacgcctgcgtctactgcggcgcgaccgacgtgcccctggaggtcgagcacgtcgtgcccaagtccaggggcggcagcgaccgggtgagcaatctcgccttatcctgtcacgtctgcaatcagcggaaaggcgaccgcaccgccgccgagttcggacaccccgaggtgcaggcgcaggcccgccagccgctccgcgacgcggcggcgatcaacagcacgcgctgggcgctgtggcgggcgctggcggcgacgggcttgccggtcgaggttgggacgggcgggcgcaccaagtacaaccgtactcgcctgaacctgcccaaaacccacgccctcgatgccttgtgcgtgggcttgtccacgccggagcgcgtgcgactgaatggcgcggggctactcaccatccgggcgcagggccgcgggcagtatcggcgcaccctcgtgtctgctagcggtttcccgcgtgggtacttgatgcgccacaagatggtgcgaggctttcgcactggcgacgtggtgcaggcgaccatccccaagggcaagtatgcgggtcggcacagcggcacggtgctggtgcgcgccggggggtattttgacctgaagcgcgcgggtcgcctggtggcccaggggattgccgcccgctattgcaggagagcgcaacggtcggacgggtatgggtatatgctttcgcccatccccctttag

SEQ ID NO: 1859 - DNA, 324 bp, unidentified
  misc_feature 1..324: note = Ga0302251_1000232 JGI
  source 1..324: mol_type = other DNA
gtcaatcacctcacggctggacgccgggggcttggggggcaactccataagcctgattgaccagggctagccgggaagcctgacgaacggctgtacccggctacgttggcgataggatagtagacccaccggcgggcgcttcctcaacccgccgctctggaaggactggcggcagacaggctcaggggtaagcgcgaaacgcgccagttcggggggccaccacccccacccggtcgccaacaggtccgaggggagccgcgcgggaaagtcggcccgcgcgcgtcacccgcgtaagcggggtggaggtaactccaaatgcagttg

SEQ ID NO: 1860 - DNA, 1239 bp, Hymenobacter sp.
  source 1..1239: mol_type = other DNA; strain = CCM 8763
atgtctaataaatattgttttgtattagattatgatggtaaaccattatcaccaactaaagaaaacaaaggttggtttctaatacgtaaaggtaaagcaacattagaaaagaaatacccaatgaccatacgtttaaataaacgtgtagaagataaagacttagataaatcaaaaatgcatgtaggtattgatgatggttctaaacatgtagggttatctattgttcaagaaggagagactaaaaataaagtagtttttaaatctacaatagaattaagacaaaatgtaaagaaattaatggatacgagaagaggtttaagaagatacaaaagatatcataaaagatacagaccttcacgttttaataatcgtaaatcttctaggaatacaggtagattagctcctagtattaaacaaaagaaacagtctattatacgagtagttaaagagttaaacaaacacataagatttaatcgtattcatttagaagatgtagctattgatactagagctatgacagatggttacaaaccttataaatggcaatatactaagtctaatcgtttagatgaaaatatacgtaaagctgttattatcagagataataatacttgccaaatgagtggtaataaaaatgtaagaatggaagttcatcatattattcctaaacgtttaaatggttctaactctataaataacttaattactttgtgtacagaatgtcatagggaagtaacaggtaaagaagaacaatacattgattatttacaatctattgtaggaaagaaaacaaacacctttttaaatcatgcttcacatgtaatgataggtaaaacttacttaagacaagagttatctaaaattgcctccataagattaacaacaggtggggacacagcaaataaacgtattgattggaatatagaaaaaacacattctaatgatgcaatcgtaattacaaatttaattcctagtaaggatttaaatatagaagaatatgtagttaaaccaataagaagaaaaagtaaatctatttataataatgttaatggaattaagcatagagatattgttcaatatacttatagaaatggtgacacgcatataggctatgttacaggtcttatacctagtagaaaggctattaatttccaatcgtcaacaaagcattgcaaagcagtcaatgctaagaaagttaagttattatggagatttacaaatatgtattggttaacataa

SEQ ID NO: 1861 - DNA, 310 bp, Hymenobacter sp.
  source 1..310: mol_type = other DNA; strain = CCM 8763
tagaagattatttaggtaagaaattagaagtttaaaataaaggacttacttatttagttggtctcaagcctcagtgactagggggttggaaacaacgtatcctagatatgaactacgttagaggataatggtaaagacttaccttcagatgcacgctttagtcggaagctctaagagtgtgaacaaagaaacacttctaagtcatttgatatgaagtgataacatggaagcacatatccaccctttgacattggcaaaaagcaaaataccacgaaagtgaggttagacagaaatgtctaataaatattgt

SEQ ID NO: 1862 - DNA, 810 bp, unidentified
  misc_feature 1..810: note = Ga0070707_100063183 JGI
  source 1..810: mol_type = other DNA
atgtcgtgtgtctttgtgctggataccgagcgccgcccgctggacccggtgcatcccggcgccgcccgccgcctgctctcccagcgggaggcggcagtgtggcgccgctctccgttcaccctcatcttgaagcaggcggtgccggaggccgccccgcagccagtgcggctcaagctcgatccgggcagccgcaccactggcctggcgctggtcaaggagccgacggcagccccggcagcggaagatacggcatcggcgccgctggccgagacggggcgggtggtgtgggcaggggagctgacccaccgggggcaggcagtccacgagaaactggcggcgcgccgagccgtgcgccgctcccgccggcagcgccacacccgttaccgtccccgccgcttcgagaaccgccgccggccggcgggctggctgccgccgtcgctggaaagccggctcgccaacgtggagacctgggtggcccggctctgccgcctgaccaacgtgacggcgatcagccaggagttggtcaagttcgacacccaggcgttgcagaatccggagatcagcggggcggaataccagcaggggacgctggcggggtatgagctgcgggaatatctgctggagaagtgggggcggcgttgcgcgtactgtcacgccacgggcgtgccgctgcaaattgagcacatcgtgcccaaaacgcgccccggcggctctgaccgtgccagcaatctcacgctggcctgcgcgccgtgcaaccagcgcaagggcacgcggaccgccgaggaattcgggcacccagaggtgcaggcg

SEQ ID NO: 1863 - DNA, 302 bp, unidentified
  misc_feature 1..302: note = Ga0070707_100063183 JGI
  source 1..302: mol_type = other DNA
gtcagatacccccggctgaagccgggggcttgcacggcggcaacgccggggaggccccacgtctgaccagcccccgctctcgcaggggagcggagccgttcggagcgaatgcataggcaccggcgggtgcttcaccagcccgccgctctgcggctagcggttaaacaggtctacggggttgtcaccagtgccgctggcaagcaaaggaaaccgctcacgaacacgggcgaggtgagcatcacccgcgcaagcggaggcccgcgagggcaccagaactgaaaggtcgttcgtgtatgtcgtgt

SEQ ID NO: 1864 - DNA, 1497 bp, unidentified
  misc_feature 1..1497: note = Ga0307376_10008654 JGI
  source 1..1497: mol_type = other DNA
gtgaagcaaagtgagagaaggccggatcagaaaccgatttttgtgatatcaaagtcgggaaggccgttggccccaacacgtcggccggggcgggttcgctacctactcaaaagcggttgtgcgcggatagtatgctatgacccctttgccgtccaactgctgtacgactgtcctgagttcgtgcagtgcgaggtcaccgtcgcaatcaaagaggattcgaaagatacgacaattgttgccgcagaacacattacaagatcggacacttgctccatagtctacgctaaagagatcttgcagcgggctggcgtttcggctcatgtgaaacgccgtacggacgcccgccgcagccgcaggaaccgcaagacccggtacagaaaaaaacggttcgacaaccggccaaaatccttatgttccatttgcggtcgaaaccacaccccgaaaacctgggcaaaagtcgaacgcaagaccggcacaagtctaaagaaggtaggagtcggtagatcggctgtttgtcgcaagtgcgaacatcaggggcttggcgagcactttgggcgtcttgccgaaaaacatctcaccccagcgctacggaacagagttgatgctaccgtacgcgaagtagggaaattgactgccatcatgccagtgacgaagataatgatggagcctacggcaccttatgcccaaataatggcctatttgaatgggcaacttaataaacctgcatcgagcaccatgtctgggcatactgttattgttagggagtaccttcttggaaaacacgggcatcagtgcgtttactgcaaaggtcaaagcggcgaccgttcgcttgtcaaggaacacgtgattccaaaatcacgcgggggaagcgatgccctatataacctggtgatatcgtgcaagacctgcaatgatgcgaagggggcgaagacggccgccgaattcggatacccggagattaacgagatggctgcgaagtttcttcgtgtcggatggggcgccattatccaaaggtaccagcggatgctctggcaggagttcgagaaatcgggcacagcggtcgaggtaccgtttggcagttgcacaaagcataacaggcttaggacaccgttgccgaaagtgatatacacaatggtggtagccgccaacggcttgaagtttgcccccccgaaggaatacatggtcgaaaagcgattaaaaataaggagtccttttcatcgatttaccaatgagaacagaaaagggtggccatgtaggaagaccctttccatgagagaagtcggtgggtttcaattgcacgacgaggtctcgtttatcgatggtaacggatcaaaaacctgctgttacattactgctttgcgtaaggacggatcggcagaagtgtctgacttggaaggaaatcttatttcaaaaaagagcttgagaaagctcacattggaacataacgtgtatcgaaaaaggtttatcgagcgtcgacgttttgaggggaataattga

SEQ ID NO: 1865 - DNA, 373 bp, unidentified
  misc_feature 1..373: note = Ga0307376_10008654 JGI
  source 1..373: mol_type = other DNA
tctacctacccagcgccctgagaccgtggttggacggaggattcttgaacgtcttcctcgtcttaaggcggagcgaaggctccataggagacagcctaagtcttaagtgactacgttcttccggttaacagacagtcagatgaaacaagacccttctccgggttagccagtctggcataactttctggaggctctgtaaaagccctttgggggatggggcagtcaacctcgggacggcccgccgttgcgggcaagccggtagaacattggcggggaagtgaacgggcggaaagcccgcattatctccctttcgggagaacaccaaaggatgctgtgagtgaagcaaagtgagagaaggccggatcagaaaccg

SEQ ID NO: 1866 - DNA, 1164 bp, unidentified
  misc_feature 1..1164: note = Ga0209096_1014402 JGI
  source 1..1164: mol_type = other DNA
ttgcagcgcgttttcgtagtggacaccaacaagaaaccattgagcccctgcacaccggccagggcgaggatgctcctgcggaagggtaaggcggcggtctatcgccgggaacccttcacgatcatcctcaagtacgggattgaagaacccgtgccgccggtagagttgcgaattgattccggcagcagaaccacggggatcgccctggtggggaagtgcaagaagggggaccaagtggtatgggcctgcgagttggaacatcgggggctggccgttagggatgctttaacttcccgcagggcaatccggcggggacgcaggaacaggcatacccgctaccgccagcctcggttcaataaccgtacccggcccgctggatggctgccgccttcccttatgtcacgggtaaataacgtcgttacgtggtcggggaagatcctcgccctggcgcctgtagcctccatcgccgtcgagaccgtccggtttgacacccaggcgctccagaatccggagatcagcggtatcgattaccagcgggggacgttgttcggttacgaggtccgggagtacctgctggagaagtgggggcggaaatgcgcctactgcggggcggagaacgttcaattggagatcgagcatattgtccccaagaaacccattcgagggccacacggtacggacaggataagcaacctcaccattgcctgtgtcccgtgcaatgaggacaagggcaacaagcctatcgaggagttcctcgccggcaagccggaggtcctccggaagatactcgcccaggccaagaagcccctgatcgacgcggcggcgatcaatgctacaaggtacgccattggcaacgcgctcaagtccctgaacgtgctggtgtccttctggtccggagggcgcaccaagttcaaccgctccaagcaggattatccgaaggcccactggatagactctgcgtgtgtgggggaggccggcgggcaagtgttcctcaagccggatatgcaagccctgaaggtgaaagcctgcggacggggcacgagacaggtggtgaaatccgacaagtacggctttcctcgtactgccgccggaagaatcaaaagggtacacggcttccaaacgggggacatggtaactctcaaccaaaccactggcaagtacgcc

SEQ ID NO: 1867 - DNA, 286 bp, unidentified
  misc_feature 1..286: note = Ga0209096_1014402 JGI
  source 1..286: mol_type = other DNA
gtccgtactgctccggcggtatggggcaactcgctcaaccagactcggcccgatagctcataacgtgttgtcgggctacgttaccggcgaatatataggcactccgggatgcttcgccagtcccggaccttgcggcaggtggtcaaacagcgcagaccagggaaatgagcagtgctgcctgcacacaaaccgccggataacattgtcgaggcgacctttaccgggggaacccgagtaaccggacgggaaaccgtccacccaatttgaaggagagattttgcagcgc

SEQ ID NO: 1868 - DNA, 1236 bp, Tissierella creatinini
  source 1..1236: mol_type = other DNA
attatggtctatgtgctaaataaagatggcaaaccattaatacctactaataggcatggtaaagtaaagcacctgttaaaagaaggtaaagctaaggtagttaaaagaacaccatttaccatacaactgctttatagtactactgaatttgtacaacctatcacattaggtgttgatgcaggtagtaagattattggtttaagtgctacaacagaagatgaagagttgttttcatccgaggtagttttaagaaatgacattgtagagctattatctacaaaaaggcaaaatcgcaggacaagaagaaaccgtctacgctacagaaagccaaggtttctaaatagagtaaaagctaaaaataagggatggttagctccatctattaggcataagatagatagtcatctaaaggttatagctaatatatataagatattaccaataagtaaccttattatagaaacggcttcttttgacatccaaaagattaaaaatccacaaataagcggcaccgattatcaagaaggtgagcagttaggcttttggaatgttagagagtatgtaatgtggcgtgatggtcatgaatgccaacattgccatggtaaatctaaagataatgttttaaatgttcatcataagataagtcgtaaaactggtggtgactccccaggtaatttagtaacactttgtgagacttgtcatagtttacaccatcaaggcaaactcacattaaagataactaaaaataagtcatacagggatgctgcctttatgggtattatgagatgggctgtttataataagcttaaagagatatatccaaatgtcactatgacatatggttatataactaaaaataatagaattactaatggcatcgagaaaactcatactgcagatgccttttgtatagctggtaatttaaaagcaaaaagaagtagcgtaatctaccttcaagcattcaaaagaaggcataatagacaaatccacaaagctaacttcttaaaaggtggtaagaaaaaactaaatcaatcgccttacatggttaaaggctttagattgtttgataaagtactgtttcaagaacaagaatgttttatctttggtagaagagctactggttatttcgatttaagaaaattggatggtacagtaattcataagagtgcaagtgttaaaagtattaaattattagaaaagaaaagcacactattaatagaaaggcaggtggcataa

SEQ ID NO: 1869 - DNA, 290 bp, Tissierella creatinini
  source 1..290: mol_type = other DNA
gtcaactaaccctcgactaaaatcgaaggcttgaagtagtacagcttttgggtctattttaagcctggttgattagcctaagtgctttgggcactacgttgtttttgtcataacacccatgggcgtttaccctaacctgtggctctgttgcttgtgattaaaagttctcgagggttaatgggaacggtgttgcaggtgtaaaaagcaatttacaacattagctaagggtatttaaccagttatttaactggcattatgtatttaactacattaaaaggagaagtattatg

SEQ ID NO: 1870 - DNA, 1503 bp, unidentified
  misc_feature 1..1503: note = Ga0208687_1000090 JGI
  source 1..1503: mol_type = other DNA
atgaagaaacgagacagaagacaaacacccatccgcgcctccctaacggctggctgggctgatgctgtacctgagagtacggaggtaaaacctgacacagctcaatgctgcgctcagcttgcgctgattacagcttctgctttttatctcgatggcgaagggacgtctagaaatttggaatcgaaagaagacaaatctaaggatactgctaggattatgtccaaacaattatctgagacgaagaaaaaagaattaaaagaagaaagaaaaaggaccaaaaacaattatagagtaccagtcttgaatccagatggaactccagctatgcctacgacaagtaggagagcgaataaatggattaaagaaaagaaagcaaagatagtcaaaaataaattaggaatatttcagattcaattacttttcgaaccaagtggaagaaagaaacaaccgatagtaatgacagttgatcctggatcagcatttacaggaataggagtcatatccaaaaagtctgtgttatatggttgtacattagaattgcctggatacaagcaaggttctaaaccaaagattgagaagaataaatttggtaagaaagttgagaaatatgcgaatgctatagttgaaggaatggataagaggagagaattaagaagaggtagaagacatagaaattgtcgaagaagagaagagagatggttaaatagaagtagatctaagatccctccttcaatacttgcgagaaaacaattagaactgaaagttgcaacaatattagcaaaaatatatccaattataatgattggttttgaagatgtagcattcgatcattttaaagacacgaaaggtgtaaaaggtcaattctttcctcatgttgaagttggtaagaattggatattgagagaactgagaaagatagcaccaagaggagttaaaataataaaaggatatgagactgctagaatgagaagtttgttattgatgaaaaaggaaggagataagactgttagatctgttgaagcccatgtcaatgattgtatagcgatgggagctatgatgtttaatggcggagttgagactaagaataaattcaaatatgatactattacaagacctaaatattcgagaagaattctacatttagaacaacctacaaaaggtggggtgagaagaagatatggaggaacgacttgcattgataaatggacaaatattaggaaaggtgactatgttgaagcaagacaaggagagaatgtgtatagatcttatgtgtctggatttactaccatgaatggtagaaattatatatacgtgtctgatttcgactggaaaggatttggtaaagatagaacacagacagcgatcgtaccgtctaatattaagatattgagtagaaatagtggattattggtaagaagtatggtaaaaattatgacaaaagatgaattatttgacaataaaactgggacagtacagatgaatattgaagatgcatgggggtaa

SEQ ID NO: 1871 - DNA, 264 bp, unidentified
  misc_feature 1..264: note = Ga0208687_1000090 JGI
  source 1..264: mol_type = other DNA
gtcaactacatcgccctagcgatcagcgctagctgagagcttatgccggcttgccggcacactaaagggcggtgcttgtatctcagaatacaacatgagagttaactagcctatcggagaaatacagaatctatgaagaaacgagacagaagacaaacacccatccgcgcctccctaacggctggctgggctgatgctgtacctgagagtacggaggtaaaacctgacacagctcaatgctgcgctcagcttgcgctgattaca

SEQ ID NO: 1872 - DNA, 1317 bp, Petrotoga mobilis
  source 1..1317: mol_type = other DNA
atggaaaaggaatctgtacaacgagtttttgtattagataaaaacaaacaaccacttatgccatgtcatcctgctagggcaagagagttattgaagaaaggtaaagcagcagtatttcgataccatccattcacaattattctaaaagatcgtgaaggcggcgacacgcaacctatacaggttaagatcgatcctggaagtaagatcactggagttactttagtaggcgattttaagaacggtaagaaagtaatttggggtgctgagattcatcacagaggtcaaagtatcaaaaaagcattagatactcgtagaggtgtaagacgttcacgaagaaaccgaaagataaggtatcgtatagcaaggtttgacaacagaaaacgttcaaaaggttggttaccacctagtcttataagccgtgtagaaaatatactcacatggattaaacgtattcgacgcttttcaccaattacaggtatttcattggaattagtacgttttgatactcaaaaactacaagatccagaaattaatggaatagagtatcaacgaggaacgttgtatggatacgaaataaaagagtaccttcttgagaaatggggtaggaaatgtgtatattgtggtaaagagaatgtaccgttagaaatagaacatatcgtacctaaatctaaaggtggaagtgacaggataagtaaccttacattagcttgccacgaatgcaatcagaagaaaggtaatcaatcaattgaagaatttttaacaaataatccagaaaggctgaaacagatcaaatcagaatcaaagagaccactcaaagatacagcagcactcaatgctacacgttggtatatattcaatcaattacgaggaaacagcctcacggcaggtaaggaagaattacctattgaagttggaacaggaggacgaacaaagtacaatcgtgagacacaaaactatcctaaaaagcattggatagatgcagcttgtgttggagaaagtggtcaaaacgttcaaattgaacctgatatgcaagttttagagatcaaagcaatgggtcatggaatgcgtagaatgtgttttgtagataaatacggattcccaaaaaaatatcgtccaaaagaacgaacatatatgggatacaaaacaggcgatatagtgttggcagttataccaaaaggaaaaaatatgggtatccatattggacgcattgcaatacgacataggccaagctttttattaaatggtgttggtgatgtacatccaaaatatcttacattactacaaaaaaatgacggttatggatatcaaatatcttaa

SEQ ID NO: 1873 - DNA, 280 bp, Petrotoga mobilis
  source 1..280: mol_type = other DNA
gtcaactacccccgtctaaagacggaggcttgaagcctcggagttgaccagcctaagttcgaagacagcctcacggcaaatttgaagaactacgttattctggtcatgacaccttggaatgctggagccagttccaagccctgtcgttcaacattaaacaggtatacggggttgaaaccagtgtgttgaatgtaaaaagccagaataacattggcgaggctcactttaacccgaaagggagaggaaggtaacttccatggaaaaggaatctgtacaacga

SEQ ID NO: 1874 - DNA, 1323 bp, unidentified
  source 1..1323: mol_type = other DNA; note = Chlamydiae bacterium
atgcgagtgttagttatagacaaaaacaaaaaaccgctaatgccttgcaaaccatcaagagcaagagagcttttaagcaagggaaaagcggctgtcattagacgatacccattcacgattatactttttgctcgtgaggagggtgccatgcaagaaacggaactaaaagtggatcctggtagcagaatttcaggaatcgcattagttgctaaatttaaacagggacgaaaggtgatttgggcatcaaacctacatcatagaggacttgcagtgagaaatgctcttgattctagaagggcattgagaagaggaagacgatttcgtaacactcgttatcgaaagcctcggtttgataaccgaacaaggccgaaaggttggctccccccttccttgcagtctcgagtaggtaacgttcatcagtgggcaaaaaaacttcaacgttttgttccgatttcatctatcgctgtagaaactgtccgttttgatacacaaaaaatgcaaaatcctgaaatatctggcattcagtatcaacagggagtattacttggatacgaaattcgagaatatcttttagaaaagtgggggagaacctgtgcttattgcgatgctaaagatgtccgcctagaaatagatcacattgttccaaaaagccgtggaggagtgagcgctgtatccaacttaacaatctgttgccggccttgcaatgagaaaaaatccaatcaatctgtccaagagtttctgaagagtaaaccaggagttttatctaaatttcagaaaaagaaccgattatctctttgcgacacggcagcggttaatgcaacacgtattgccatagggaatgctttaaggactctagaattgccgataacattctggagcggaggaatgactaaatataatcgctttctccaaggataccaaaaagatcactggatagatgcagcttgtgttggagaaagcggagaaagcgttacactttccgaaatattctcgattttagaaatctcagctacaggaagaggttcacggcaaatgtgtagagttgaccgctacggctttccaagaacattagcaaaaagcaaaaagcgcgttaatggatttcagacaggagacagagtgcatgcatttgttcctaaaggaaagaaagccggaacacatattggaaaggtgtctgttcgatcgtctggaaattttaacatcaagacatcttcgcaaacggtccaaggtgtacatgcaagatactgtaagcgactattccaagcagacggttacgaatatgtacaatttataattaaaggaggcggcgtttcctcctcggtctaa

SEQ ID NO: 1875 - DNA, 269 bp, unidentified
  source 1..269: mol_type = other DNA; note = Chlamydiae bacterium
gtcaactaccctcccctaaaggggaaggcttgtatgagccttatgttgaccagccttagtttccacgaggaaactacgttaggagcgaatacataggcaccgtgggatgcttctccagtcccacgctctgcggtgagtggttaaacaggtgtaagaggttaagccagtgctgctcatatataaaccgctctataacattggcgaggagaccattacccgggaaaccggagattggcgggtaaccgcaaaaaggaaaaaagaacatgcga

SEQ ID NO: 1876 - DNA, 2229 bp, unidentified
  misc_feature 1..2229: note = human gut metagenome genome assembly, contig: NODE_192_length_38345_cov_13.286210, whole genome shotgun sequence WGS
  source 1..2229: mol_type = other DNA
atgcgcggtcagcccttgatgccgtgctcgcctgcaaaggcgaggcatctgctcaaggctggaaaagccgtggtgaagcgtcgaacgccattcacgattcaacttcgaatcgccaccggtgaaacgaagcagaacgtgacgctgggcgttgatgcaggcgcaaagcatgtcggcctttccgctacgacggaaaaggaagaggtctttgcgtccgaagtcgaacttcgacaggacatcacggggcttctggctgcccggctctcgctgcgtcgtgagcgccgccagcgcaagacgcgctaccgtgcgccgcgctttttgaaccgtgtccgatcgaaacacaagggatggcttgcaccgtccgttgaaaaccgcattcaggcgcacatgtcgcgcatcgatgcggtctgcagactgcttcccgtcaccaagatcgtgattgagacggcatcgttcgacattcagaagatcaaggatccgtctgttgaaggcacggactatcagcagggcgatcagctcggcttttggaacgtgcgtgaatacgttctctttagagacggtcacgtttgccaacactgtcacggtcatgcgaaggacaagatcctcaacgtacaccacctcgaaagccgccaaaccggcggcgatgcgcccaacaacctgattacgctctgcgagaggtgccacaaggcctgtcacgcagggaagatcaagttgaaggtcaagcgcggccaatcgttcagggaggaagccttcataggcatcatgcgttggacattgctcgatcgcgtgcgcaaggcgcatcccggcttgcctgttgagaacacctgcggctatctgacgaagaacacgcgcatcaccctgggactccccaaagcgcattgcgtcgatgcctactgcattgcgggaaacctcaaggccgtacgaagaggcgtccacctctatcagcgacaggtgcgcaagcacaaccgtcagattcacaagtgtacggtgctctcgaagacgcttaaggacggcacgaagatcggataccgaaagctcaatcaaacaccgcatctggtcaagaacttcaggctcttcgacaaggtgagatgtcttgggcaaaccggcttcatcttcggccgaagatcgtccggttgcttcgatgtccggaggctggacggcgtaaagctttcttccgacatcagctacaggaagctcacgcttctcgaaaagagaggcacccatttaaccgaacttatcaaggaggacggcgcttcctcctctgtcagaagacagaggtttctgcgccgagtttctatgaacaagccgtgcacttatcttctttccgctctgatggcgtccgccgtgctggcgcctgtcgccgcttcggccgccgacaagtccgagctcgaggtccgcatggaggcggcgcagaaggtgctcgccgaccgctcctactacgagcgctggtcgcccgaggccgccctgaagacggttgaggatgcaaaggccgccaatgaggcgggttcggccaggcagaaggagatcgacggtgcgctcgacgtcatgaaggactggtgccacacgcgcttcctcgttaacgcctgcatcaaggacgcgagggacctgcatcacgagcgtgagaaggagatccgtagcgtacgcctcaaggccgacgagatgatccgcctcgaccgcgtcgagcagcgcagggcccgtcaggaaagccagaagcagaacgtgaagcagcccatgaagctcggcggctccaccgagtctcccgaaagccgcagcgagtcgcgcgccgaggaggtgaagaccaagcagagccgcgccgaggagcgcagggcccttgaggaggcgaacgtccgtgcctacgaggaaaagcaggcgagggccgccagaaaggcggaggagcgccacgatcccatcagggtgaagagccgcgtgaaggctccgtcaagtcccattgaaggacatctcggccgtacggcggctgacgttgaggcgggcagggccgaggcggccgagcgcatggctcaggaggacgccaacattgcggccttcaatgccaagcaggccgaggcgaagaagcgccttgaggaggccgaggccaccgccgccgaacgcaaggcgagccgcgaggcgcggcaggcgaacttcaacaagacgctcgaggagcgtcgcgccgcacagaagcgctatgaggagtccagggagaacaaggactccggcctcaagaagtatttctga

SEQ ID NO: 1877 - DNA, 276 bp, unidentified
  misc_feature 1..276: note = human gut metagenome genome assembly, contig: NODE_192_length_38345_cov_13.286210, whole genome shotgun sequence WGS
  source 1..276: mol_type = other DNA
gtcaataacccctgtctgaagacagaggcttgaaagagtctttattgactagcctcagcgcccctctttcgagaggcgctacgttggttgggaatgtataggcaccgtgggatgtacatcctagttccacgctctgcggcctgtgattaaaagctctgagaggtaggagcggtgttgcaggcaccaaaccccttccaacattggcgaaggatgtcaaccggccttcgggccgtgtaagcggaacctgcgggtatccgcaaaggagatactttgaaa

SEQ ID NO: 1878 - DNA, 639 bp, unidentified
  misc_feature 1..639: note = Ga0326513_10003181 JGI
  source 1..639: mol_type = other DNA
ctgagaacagatttagttgaaaatttatcaacccgaagggaaacgagacgaacccgacgttcaaggaaattacgatatagaaaagcaagattttcgaatcggaaacgtacggaaaaatggctgcctccgtcaataaaatcaaaactggaatgccatttaacactcatagcaaaactgcacaggtttttgccgataggaaaaatcgttgtcgaggttgcgagtttcgatattcagaaaataaaaaatcctgagataaaaggagctgaatatcagcagggtgttcaatcagacttttggaatgtacgtgaatacgttttgtatagagataatcataaatgcagatattgcaaaggtaaatcaaaagacagggttttaaatgttcatcatcttgaatcacgaaaaaccggcggcaactcgcctgacaatttaattaccttatgcgaaacctgccataacatgtatcaccggggtttaataagtctggataatgtaactaaaggcagttcctatagacccgaaacatttatgagcatactgaggaaatatctgattgaaaacctcaggaaaacatataacaatgtaagttatacctatggttatgaaactaaaagtaaaagaattgcaaacaggctggagaaa

SEQ ID NO: 1879 - DNA, 271 bp, unidentified
  misc_feature 1..271: note = Ga0326513_10003181 JGI
  source 1..271: mol_type = other DNA
taattatggcttttgcttagtctaagtgatttcgctgaaaagtgaatgaactacgttatgagagaatgaatttatgcaaataaattcaaatagttaccttcggatgttcatctagtctgaagctctaaggtgtatgattaaacagtcggtaatgctgacagtgttgtacacggcaaacctctcaataacattgacgaaggtgcatttacggttttgcagagttccggctgttaacagcataaactgcagctcataaagggatttttgtatg

SEQ ID NO: 1880 - DNA, 1254 bp, unidentified
  misc_feature 1..1254: note = Ga0326511_10001255 JGI
  source 1..1254: mol_type = other DNA
atgcgcggtaaggcattaatgccaactagtaatagaaaagcacgtatactgttaaaacaaggtaaagctaagattgtatgttataatccatttacaattcagcttaaatatccaacaggtgaaacgacacagccgactgaattagggatagaacccaattataatgatttaggcatagctgttgtttcacaggaaaaagtacttcacaaatgtgagatacattttcttccaggaatgcatactaatctaaaatcaagaggtgctttgagatcagcacgacgtgcacgtaaaacacgttatcgtaagcatcgttgttcaaatcgtgcaagtcgttataacgctatgtcaccaagtagtcggaataagctaagacattatataaactggataaacaagtttaaagcattgttaccgaactgcacagtgtacattgtttgtgctgatccagcagaacagataatatctgagtctaatgatgcaacaacacaaactaacaaaaaaccatttcgtaatatacgaatgcgtgtttttgaacgtgacggttacagatgtcagatttgtggtagaactggtgtaaagcttagcttacatcacatacggtttagaagtaagaatggtagaaatgatttagataatctgatcacagtgtgtgatgattgtcattctcatgaaaatcatttaccgggaggtattttagacaatttacgacaacagaaacgtgtcagcaagtctaaatcggcaattaccgactatccgttatctcgaaaagtacatgcacagcttaaacgagcatttcctgatattgtaagtgtagctaataatgatgtactaaatagatgcacaacattaggattaacacctactgtgtataataaagcaattgcagcaacaggtataaaccagcttaaacaagacacaaatgacatattacaaatcagacagtatcgaacaaaagatagaagcatacataattctgttccaataaaaggtagaaaagaaccaaacagaaatgcaacacgtcgtaatacaaacatacgtacataccgaggatgggttaagaatgataaagttcgtgtgttcggtactaaggttggttttataacaggatttggtaattttgttgcttgtgttaaggatatcaatggtaattacataacagacccaaatagaaagaactactcagtcaatttaagtagtttaaaattaatgtgtcacaataataattggcagtatcagacagtacaatgtgagtaa

SEQ ID NO: 1881 - DNA, 317 bp, unidentified
  misc_feature 1..317: note = Ga0326511_10001255 JGI
  source 1..317: mol_type = other DNA
gtcacggtacttataataataatagtacacacaaaatcgatgcactcatggaatatacatttcaaactgtgaataacagttacatcgattactctaagttctctgagaactacgttatttatgttatcatacatacggatgattctctagtctgtattcttatgtaggctctgtaaacagttctgttgagtaggaacagtcaacctaaggtggtcgagtacgacaagcatttataacatggaggaagggaaccaaactttcacagaaaggtataccacttgcgtagtaggtatttaattatgaaatcagaaaacaga

SEQ ID NO: 1882 - DNA, 1314 bp, unidentified
  misc_feature 1..1314: note = Ga0265293_10014478 JGI
  source 1..1314: mol_type = other DNA
atggtttatgtaatttcaaaagaagggaagcctttaatgccaactaaaaggcatggaaaaattagaattttacttaaaaatagtcaagcaaaggttgttaaaagaaaccctttcactattaagcttttgtatgataccacaaattatactcaacctgtaactttgggcgttgatagtggctatacttatattgggttttcagcaacaactgaaaaagaagaactgatttcaggagaatgtactttattaaaaggtcaatccgagagactgaaagaaaaatctatgtatagaaaacaaaggcgaagtagactaaggtatcgtgctccacgctttgataatagagcaattcccaaaggttggctagcaccatccattcaacataagtatgaatctcatcttagatttatcgcctatttacaatctatattgccaatttcaaaaatcatcatagaagtagcgaattttgatgttcaaaaaattaaaaatcctaaaattgagggaaaagaatatcaagaaggtgaacaaaaagacttttggaacttgaaagaatacattttgcatcgagataatcacaaatgtcagaatccagattgcaataacaagtcaaaagataagatattggaagtacaccacattggtttttggaaaaaagatagaaccaatagaccaagtaatttaattactctttgcgataagtgccacaatccaaagaatcacaaagagggtaactttctttggggttggaagcctaaattaaagagttttaaagaagctacctttatgtcagtagttcgttggaagcttgtgaatagcttaaattgcgaacatgcttatggtttcgacacaaaatcaaaaagaattgctttgggtttagaaaaaactcattttaatgatgctttttgcataacaaatggctctactcaaaaaagagtaaaaccaatctattttgaacaaatccgcagaaacaataggtctttagaaaagttttatgatgccaaatatatagattcaagaacaaaccaaaaagtaagtgggcaagacctttttagtggtcgtagagcacgaaacaaaaatctaaattcagagaatcttcataaatatcgaaagcaaaaactatcaaaaggtcaaagaagaataagaactcaaagatacttttatcaaccaaaagatttggttaaatatgaaaacaaaatctatacggttaaaggaattcaaaataagggagcttatattaaattagaaaatttatctaagccaattaaaactgaattagtagttccatatgagtttaggaaaggcatttgcgtgatttaa

SEQ ID NO: 1883 - DNA, 299 bp, unidentified
  misc_feature 1..299: note = Ga0265293_10014478 JGI
  source 1..299: mol_type = other DNA
gtcaacgacccaccacttagcaccgtaggtgcttgaagtgggggcttgagaaaggctctgccttttgaaaagcctagttgaatagcctaagttcttcaagaactacattatgtgggaatatatagttaccctagaatgctccactagttctaggctctaaggtgtaggattaaacatctctaaagggtaggagaagtgttctacatttgaaaccccatataatattggcgaagtggacttaccactactttttattcttaaagtagtgtgaattactctatagggagttgaaatcaatg

SEQ ID NO: 1884 - DNA, 1269 bp, unidentified
  misc_feature 1..1269: note = Ga0265298_10029446 JGI
  source 1..1269: mol_type = other DNA
atggtagtgtatgtgctagacaagagcggaaagccgctgatgccgaccgataggacggcgtgggtggcctatgccttgaagcacggagaagcgaaggttgtgaggcgagagcctttcaccattcagttgctccgcgatagcacgaactatctccaagcggtaacgcttggtgttgatgtgggaagcaagcacatcgggctttctgcaacaaccgaaaagaaggaactgtattccgcacaggtggagttacgggacgatgtgactaaacttctgttggctcgcagggagtttaggagaggaaggcgagggcggaaacacaactggtacagacctgcgaggtgggctaacagagcgaacgaaaagcgcaatgcggcattgccgccaagcataataaacaaggcggacgcacacttccgcgccgtgcagttcgtgtacaaactacttcccatcagcaagacacgggttgagttgggcaagttcgacgttcagaagataaagaatccgagcatcgaaggagagaagtaccaacaaggtgtgcttgcgggctgggagaacctgaaagcctatgcaaagtaccgtgatggttacaagtgccgtgcttgtggcaagagcaagcacaaagacggagtaaagttggaagtccaccacataatccgcagggctgacggtgggactgatgttcctgagaatgtggtgacattgtgccacgagtgtcacgagaagaaccaccaaggtgagaaaaagttgagattgaggcgtccaccacagcacaaaggcgaagcgcatatgaatgctatgcgatactatttgttagatacgcttctccatacgaacaggaagatagagaggacctatggctacaagacggcgacggctcgtcgcgaacacggcatagagaagagccatgtgtcagatgcgtactgcatagcggggaacttcaaggcggagcgaagcaacgataatgtgtatctgcacaagtttgttcgccgccacaataggcagttgcataagacgaccatcttgaagggtggctgtcgcaaggcgaatcaagccccgaagtatgtgtttgggttccgcctgtttgatggtgttcgctattgcggtcaaaattgcttcgtgttcggtaggaggagcagcggttcgtttgacatacgaacactggaagggaagaagatttcggcgggggtgtcgtacaagagactcaagccattgactaaatcgacaacaatattaactgaaaggaggatgtgcgattcctcccaaccctaa

SEQ ID NO: 1885 - DNA, 303 bp, unidentified
  misc_feature 1..303: note = Ga0265298_10029446 JGI
  source 1..303: mol_type = other DNA
gtcaactacccaaccctgaatggttgggcttgtgaggggaaccgagcaagcccgggttgactaggggactgaaacggaaaggaaactagaagtggaagtagcagttaggagagaatgcataggcaccctcggatgtgagtccaagtccgtggctctgcggtgtgcggttaaacagtcctacgaggtaggggcagtgccgcacacgataaacctctcccaacgccccgatgggcacctaacacagggaggagaaatctaacctgtgacttaccgagaagtcggttaaaggaaactaagatggta

SEQ ID NO: 1886 - DNA, 543 bp, unidentified
  misc_feature 1..543: note = Ga0335394_10082827 JGI
  source 1..543: mol_type = other DNA
gtgtggggcgcagagttgacccatcgtggtcagagtattcgggacgccctcttgagtcggcgtcagcagaggcgattccgtcgtcagcgccagacgcgctatcgtgcggcgcgtttcaacaaccggcggcgtgttgcgggatggttggctccgtcgttgcaaagtcgtgtggagaacatctggacatgggtggtgcggttggcgtggcgctgccctatcacatcgatctctcaggaacttgtgaggttcgatatgcagttgatggagaacgctgaaatctctggcgttgagtaccagcaaggcgcgttgcagggctacgaagtgcgcgagtatctcttggagaagtggggccgccagtgtgcctattgtggcgcaaaagacctgccgctagagattgagcacatcattcccaagacacgcggtggttccaaccgtgtgaccaatctgtctctggcgtgccacgattgcaaccagaagaaaggcacacagaccgccgcagagttcggccatcctgacattcagaagcaagccaaagcgcccttg

SEQ ID NO: 1887 - DNA, 252 bp, unidentified
  misc_feature 1..252: note = Ga0335394_10082827 JGI
  source 1..252: mol_type = other DNA
gtaagcatccccacacctaaaggtgggggcttttagccccaatgcttaccagacttagcctgagaaggctgcgttagagacgaatacagaggcacttcggaatgcctcaccagttccgaactctgcggtgaacgattaaacagggggcttgggagccaacagtgttgttcacacaaaaccgtctcataactttgtcgaggtgaactttatccgcgcaagcggaaatatgaaaggtaactttcaatgcaacgt

SEQ ID NO: 1888 - DNA, 702 bp, unidentified
  misc_feature 1..702: note = Ga0209720_1016953 JGI
  source 1..702: mol_type = other DNA
atgttagtatacgttttaaataagcatggtaagcctttaatgccttgcaaaccatcaaaagccagaaaacttttaaagcaaggcaaagcaaaaataacacaaagagaaccattcacaattcaacttatttatggtagtagtggatacaaacaacctattgcattaggtatagatgctggaagcaaatttatcggagtgtctgctacaacagaaacgcaagaactattttcggcagaagtagaactaagaaacgatatagtacaattattatcagaacgtaggcaatatcgtataagtaggagatatagaaaaacaagatatagaaaaccacgatttttaaatagagtacgaagtaaaaataaaggttggttagcaccttctgttgaaaataaaatacaaacacatttaaaaataatagaaaaagttcataagatattgcctataactaaaataattatagaagtagcttctttcgatatgcaaaagattaaaaatcctaatatagaaggcgtagaatatcaacaaggtgaacagttaggattttggaatgtaagagaatatgttctttggagagacaatcatacttgtcaaatttgtaaaggtaagagcaaagacaacaggttaaatgttcatcatatagaaagtaggcaaacaggtggaaatgcacctaacaacctcataactttgtgtgaggtctgccac

SEQ ID NO: 1889 - DNA, 236 bp, unidentified
  misc_feature 1..236: note = Ga0209720_1016953 JGI
  source 1..236: mol_type = other DNA
gtcaactaccccaacctatagaggttggagcttgtaaaagctcaagttgactaccctaagtccttcgaggactacgttatatatgtcataacacctacgggcgtttctcctaactcgtagctctgttgcttaactttaaacaatcctgtgaggtagggatagtgagttaagtgtaaaaagcctatataacattggggaaggagacattactccaaaaggaggtatactttatgtta

SEQ ID NO: 1890 - DNA, 1419 bp, unidentified
  misc_feature 1..1419: note = JGI12150J12686_102082 JGI
  source 1..1419: mol_type = other DNA
atgcagaagttacgcggaagaaatacatacacccccacgagtgctgctcaagcttgcggctctgtggcaggatggttaaacagttctgagagggtaggaacagtgcggtccagcttaaaaactccgcataacaactccgatgagcacttactccaaccagcgggagggcataaagccgatacgctggtatatgtgattaataagaacggaagaccattaatgccgtgtaaacctgcaaaagcgagacatctgctggaagcaggtaaagcagaagttgttcagcggacaccatttaccatacgccttctttgggattgtgaagaaatcacacagaacatcaccctcggcattgacgcagggtacacaacaatcggtttcagtgctgtaaccacagataaagaactaatcgcgggagaactcgaactccgcaacgatgtcaaaagactgcttgagaagcggaaagcatacaggcgcacgcgaagaagccgtaagtggtacagaaaaccgcgattcaacaaccgtggaaagaaaggttggcttgcaccgagcatcaaacacaaactcaatagccatatcaagcttatcgaaaaactgaagaaaatcctaccgatcacgcgaatcatcgtagaggttgcttctttcgacacacagaagatgcagaacccggaaatctctaacatcgaatatcagcaaggtgaactgcagggatatgaggtcagagaatacctgctcgaaaagtggggtaggaaatgcgcttactgcagcaaaaagtacgttccactggagatagagcacatcgtaccgcggtcgagaggtggttcggatcgagtctccaatctcacgatagcatgtcacgagtgcaaccagacagcagaggagttcggacacccgcagatacaggctaaagcagagaagtccttgaaagcaactgcgtttatgaatatcgtgagaaatagaatcgttgatatactgggttgcgatcagacttatggctatatcacgaaacatgaccgcatagaactctatctgaagaaatcacacgcgaatgatgcttttgtgatcgctgacggaaatgatcaggaacgcgctaaccacattcacatcggtaagcaggtaagacgacagaaccgatcattgtttaaagctaacttcttcaaaggaggaaagttaaaaagaaacactgtgaaagaagttaaaggattcaggaggtttgataaagtgaaatacgacgacaaagaatgttttatacacggactgcggagttccgggtacttcgatcttcggacaatcactggagatcgaatcggaacgtctgtgaacagcaagaagctaacgcttctggaacgagcgagaggaattatacaggagatgtgcgcaattcctccccgcgcttgcggacggggtctccttgcacggtga

SEQ ID NO: 1891 - DNA, 255 bp, unidentified
  misc_feature 1..255: note = JGI12150J12686_102082 JGI
  source 1..255: mol_type = other DNA
ccccttgaccctaacgggaccgaggaatgggctttttaagccccttagttgatcaggaggcatagaaatatgcagaagttacgcggaagaaatacatacacccccacgagtgctgctcaagcttgcggctctgtggcaggatggttaaacagttctgagagggtaggaacagtgcggtccagcttaaaaactccgcataacaactccgatgagcacttactccaaccagcgggagggcataaagccgatacgctg

SEQ ID NO: 1892 - DNA, 1320 bp, unidentified
  misc_feature 1..1320: note = Ga0137378_10002753 JGI
  source 1..1320: mol_type = other DNA
atgtcacacgtgtttctggtggacgcccacaagcgcccacttgctccggtacatccggggcgagcacggctcttgctcaaggccggcagggcggcggtcttcaagcgattccccttcaccctcctgctcaaagagcccggagcgcaagccgccggcgagccgctccgtttgaagatcgacccgggaagtcgcaccacgggtctggcgctggtaggagagacgagtggcgaggtggtgtgggcgggggagctcacccatcaaggagagacgatcgtggagcgcttgcgcaaacggcgagccgtgcgccgaggacgcaggcagcggcatacgcgctaccgacaagcgcgcttcgcgaaccgatgcaggtcggaaggctggctcccgccttcccagaggagccgcgtgcaaaacgtggtgacctgggtcgaacggctgcgcaggctgtgtcccatcacggcgctctctgtggagttggtgcgctttgatacgcaagccatgcaggcaccgggcatcgagggcatccagtaccagcaggggacgctggcgggctacgagaccagggaatatgtgctggagaagtgggggcacagatgcgcctattgtgatgcgacgggcgtgcctctggaggtggaacacattcgacccaggagccgtggggggagcagccgcgagagtaatctgacgctctcctgtgtgccgtgtaaccaggccaaggggacgcaggacatccgcgtgtttctggcacatgatccccagcggctcgtgcacattctggcacaggcgaaggcctcgctgcgggatgtggcagtggtcaatgcgacccgctgggcgctctatgaacggttggcagccttcgggctccccgtagagggggggagtggcgggcgcaccaaatacaaccgcagccgccagggcattccgaagacccattggacggatgccgcctgcgtgggcgccagcacccccgaggagttgcggaactggcagaccgtgcgacccttgctgattactgccaccggcaggcaatgccgtcagatgtgcaacatgaataagcgaggctttccgcgtggcaagccaaaggggccgagccgatcacacgggttccgcagcggggatatgttgcgggccgtagtcacgaaaggcgtgcacctgggcacctacgtgggacgtgtggccatcaagtccgatggctactttaaactcacgaccggggccagggtggtggaaggcatccatgcccgctattgcaccccactccatcgtggcgatggctatgggtacgcatgtgggagtccggcagcgcttcctccccaggcctga

SEQ ID NO: 1893 - DNA, 315 bp, unidentified
  misc_feature 1..315: note = Ga0137378_10002753 JGI
  source 1..315: mol_type = other DNA
gtcagcgaccccacggggaaacccgggggcatgttcttgagaaagggtgtgccctgatgctgaccagcccccctgagtgctcttgaggagagagcggccagggaaccgttcgttgggagcgccaaaagtcggaccctgagatggcctttccagtcccaggcgcttcaatcccgctgttaaacaggtgcacggggaagcagagccggtgcagcgggaagacggccgccaacgaaccagggcgaggaaaacatgacccgcgcaagcggaggccccaagcggggcagacaacgaaaggaagcagtaggtatgtcacac

SEQ ID NO: 1894 - DNA, 1296 bp, unidentified
  misc_feature 1..1296: note = SMTZ23_10055571 JGI
  source 1..1296: mol_type = other DNA
atggtttttgttctgagcaaaaccaaaaaaccactaatgccctgccatccagcaagggcacgagaactgctcaagaaaggtcgagcggttgtccacaaggtctatcccttcacgatccgtctcaaggatagggtcgagggggacgtacaaccgatcagggagaaggtagaccccggcgctaagacaacgggtattgctctcgaatcagaagggaagagagttcttttctttgcagagcttaaccacaaaactacgattcatgacaacatgagaaaacgagccaattaccggggtagacgaagaagtgcaaacctcaggtaccgagcaccaagattcaacaatcgcacacggccaaatggatggttgccaccgagtctccaatcaagggttgatgctattacgtcatggactgtgcggttcaagaaactatgcccggtcaccgattgctcggttgagaccgtacgatttgatacgcagaagctccaaaatcctgagatcaatggtgtcgagtaccaacagggagaactattcggatatgaagtgcgggaatacctgttggagaaatggggtcgaaaatgtgcctactgcgggaaagaaaatgtacccctggagatagagcatatcattccgaagtcgaggggtggtacaagtcgagtatcgaacctaacccttgcgtgttacacgtgtaacgagaagaaaggtaataagaccgcagcggaatttgggtatccagaagtccaaaagaaagccaaggttcccctgaaacaggcagctattgtcaatgcaacacgaaatgctctctacagggaactgagtaaactgttcataaaatgggttgaggtatctacaggaggccgaacgaagtacaacaggacaaggctcggattgcccaagacccactacttcgatgctctatgtgttggtaaatcaacaccaacgcagcccggtagtttcaggaacatagattcaacgccggtgctatcaatcacctgtaagggcaagggacaatatcgaagaacgaatgtgaataaatatggttttccgagactatatctcatgcggcagaagatggtcaacggattccagacgggggatatggtgaaaacagtcataccaaaaggaaaatattctggcaggtatcgaggagtcttggccgttaggaaaaccgggtacttcggtttgtatcgtaataagaaattggttgctgagggagtcaaagctcccaataccctattggttcaaagattcgatgggtacacatactctttacagagtcccgattcctcccccacttaa

SEQ ID NO: 1895 - DNA, 306 bp, unidentified
  misc_feature 1..306: note = SMTZ23_10055571 JGI
  source 1..306: mol_type = other DNA
gtcaatgacccccacttaaaagtgggggcttgctctacggggcaagcctcaaattgaccagcgctcagcaccggagccaacgacacggctacgatggtgctacgttagtataaggtacaagacccactccgggatgcttcctcagtcccggacactggaagtttcagcagcagacaaagttaggggtcgtacacgaaacgggctgaaacgatacgccgtatactaacattgccgaggggagatttcaggaaatgtcgatcctgaaacgttaccggcgaaagccgagaaaccaggaggtaaacaatg

SEQ ID NO: 1896 - DNA, 1356 bp, unidentified
  misc_feature 1..1356: note = human gut metagenome genome assembly, contig: NODE_117_length_59318_cov_12.435854, whole genome shotgun sequence WGS
  source 1..1356: mol_type = other DNA
atgtcagttgcagtcattagtaaaacaggcgaaagattgatgccaacaagtgaatacagagcacgtaagctgctcaaatcaggtaaagcaataaaatatagttatcatccgtttaccatacagctcactgaaagaaaaactggaaatattcagccaatagagctttgtatggatacgggatatatacatattggaatatctgtaaagtcagagaagcacgaatatctgacagaacagattgacacattaacagacgaaagaagcaggcataatgcacgccgtatgtataggagccagagacgaaacagaaaaagataccgccagccgcgcttcaacaatagaaagaaagataaaggctggattgccccgtctttggaacacaaaaagaatatacacgttcaggcaatttcacgcatcaacaatgtcatgcctcttacagatattactatggaaatgggaaattttgacactcaggtattaaaagctaaagaggaaggaagaccattaccgcaaggtgtagattatcaacacggtgaacgctacagtatcgcaacgcttcgtgaagcagtttttgcccgtgatggttataaatgtcaatgctgcggcagaacaataaaagatggagcgatactccatgttcatcatattaaatacagaagccagggcggaactaatagtatatcaaatctggctacagtatgtgataaatgtcatacaccgaagaaccataaaccaggtgggaaactatatggctggaagccaaaacttccatcatttaaaggtgcaactttcatgaccacgatacgatggcagctttacaacgaggctaaggctttattccctgatattgatattcacattacatacggagcagcaacaaaagaacggcgccgagagctgaatatcgataaatcacatatcaatgatgcgtttgttatggggcagtttcatccgagacaccgtataaaagcggttctttataagaaaaaacgaaggaataacagatgtcttgagaagttctatgatgcgaagtatattgacagccgcgacggaaagaaacgaagcggtcaggaattatttaacggtaggattaatcgtaatcataagaaggattctgaaaatctgcatcagtatcggttacaaaaagtaaccgcaggaaaaagaactgttaggaaacaacattacagtgtccagcctcacgatatcatcatatacgaaagcagaaagcgtgaaactacaggatgccactgtaatggagcacgggtgatgctactccctgataaaaaatctgtatctattaaaaaaatcaaaatatacagatatgctggcggttattttaaatcaacatttaattaa

SEQ ID NO: 1897 - DNA, 526 bp, unidentified
  misc_feature 1..526: note = human gut metagenome genome assembly, contig: NODE_117_length_59318_cov_12.435854, whole genome shotgun sequence WGS
  source 1..526: mol_type = other DNA
gtcaataacccgcgcccgaggtaaacctcggacggggcttgcaaaagaataagttttcttatttccacttttgtttagccccgttacagtttacggaaggctgttggctgtaaagccttattgatagcgccggggtcacccgtcgttaccacataaggcttacagccttattgattagccttggtagtaaagaagccggccaaaccaggtcaggtaaatctttaactgctacgttaccggtaaaataggcaccgtgggatgctcctcaagtctcacgctctgcggtatgctgttaaacatctcttagggtaggagaagtgcagtatacgctaaactatcggataacattggcgatgaggacaaccgattctgactaggcgccggcttgccggagccgaaaagatagagaacctgtatggactgcttttaaatatcttcggatgtttggaagcggttggtgcagaagacgtaagtcatcccggcttgccgggaaaatataagaataaaaggagggcagcttatgtca

SEQ ID NO: 1898 - DNA, 1362 bp, unidentified
  misc_feature 1..1362: note = human gut metagenome genome assembly, contig: NODE_3680_length_4513_cov_6.120682, whole genome shotgun sequence WGS
  source 1..1362: mol_type = other DNA
gtgccgccggcaacaaaccccttccaacattggcgaaggatcttaaccggtcgaaagaccgaggtaacaaacttgagagtatttgttttaaacaaacgcggaaagccgctgatgccgtgttcaccggcaaaggcccgcattctgctcaaagagaaaaaagccgtggtgacaaggcgcatgcctttcactatccggttgacaatcgccaccggcgaaaccaagcagccggtgacgctcggcgttgatgccggatacaaacacgttgggctttcagcttgtactgaaaaggctgagctgtatgcatctgaagttgaactccgacaggacatcacggagctgctctctgcgcgcttggcgctgcgtcgcgctcgccgaaaccgccagacgcgttatcgcgccccacgctttgacaatcgcgttcgcagcaaacacaaaggttggcttgctccttcggtcgagaaccgtatcaacgcgcatctttcacgcattgacgcagtacttcgcattttgccgatttcaaaaatagtcatcgaaacggcagcctttgatacgcagcttttaaaggataccaacattgaaggcgcaacctatcaacaaggcgaacagtttggtttttggaatgtacgcgaatacgtgctctttcgagacgggcacgtttgtcagcattgtcacggcaagtccaaagaccctgtactcaatgttcatcatctggagagtagacgtacaggaggcgatgcgccgaacaatctgatcacgctatgcgaaacgtgccacaaagcgctgcatcaaggcaaacttacgctcaaagtaaagcgagggttcacttataaggccgagacctttatgggaattatgcgatggacggtgcaggatcggctcaagacagcctatcccgacattgagattcgcaacacctacggctatctcaccaagcattcgcgtatttcacatgggattgccaagtcccattgcgccgatgcgtattgcatcgccggtcatcttaaggcaaaacgtctggccggttattactatcaaaagcaaacccgtcgacacaatcggcagatccataagctgacgattctgaagggtggcttgagaaagagaaatcaggcagcttacgaaatcaaaggctttcggctttttgacaaagtgaaggttcttggagaagaaggcttcatattcggtcgaagggcttcttactttgatgttcgcaagcttgacggaacacgtatttcagcgggcatcagtagcaaaaagctgactctgctggaaaaacgcaaaacctatttaacagaatacagaaaggaggcggcacttcctcctctgaatgaattcagaggtttccgcgccgatgttctatga

SEQ ID NO: 1899 - DNA, 259 bp, unidentified
  misc_feature 1..259: note = human gut metagenome genome assembly, contig: NODE_3680_length_4513_cov_6.120682, whole genome shotgun sequence WGS
  source 1..259: mol_type = other DNA
gtcaactagccataccccgctctaaagagcgaggctggataaaagccttggttgactagccttggtgatcttccttttgagaggtgaactccgttggttgggaatgtataggcaccgcgcaatgtcgttcctagttgcgcgctctgcggtcggtggttaaaagttctgagaggtaggagccgtgccgccggcaacaaaccccttccaacattggcgaaggatcttaaccggtcgaaagaccgaggtaacaaacttgaga

SEQ ID NO: 1900 - DNA, 1344 bp, unidentified
  misc_feature 1..1344: note = human gut metagenome genome assembly, contig: NODE_128_length_79994_cov_7.882986, whole genome shotgun sequence WGS
  source 1..1344: mol_type = other DNA
atgatggtatatgtcttagatgtaaacggccagccactgatgccaacagaaagatgtggctatgtacgcaaaccgctgaagagcaataaagctcaagtcgtaagtggcaatccgtttacaatccaattgctttatgagacggaaaacaatacacaagacattgatctgaaaatcgatgctggttatcagcatattggcatttctgcttgtactgataacaaagaattgttttccggtgaattaaagcttttagaaaaccaatccaaacgattagacgaccggcgagcatatcgtcgcacgcgtcgcaatcgtttgagatatcgcaagccaagatttgataatcgcagaagaccggatcaatggttggcacccagcattcagcataagctggacagccacaaaaaggtcattcgaaagttgatgtgccttcttccgattacaaaaatctatgtggaaacagcaaatttcgatattcaagcattaaagaaaccaagcatatccggtgagaaatatcaaaagggaaaaatgtacgacttccgaaatttgcgtgagtacactttctacagagacggatacacttgccagatctgtggtaaaaatgctttccgagatggtgcagtgcttcgcatgcatcatatcggatattggaaaaacgatcattcaaatacgcctgcaaatacattaacgctatgtagcaagtgtcatacgtcacgtaatcatcaaaagaggcagattttgtatggtctgcaaccaaagcaaaagtctttcaaaccggagacatttatgtctacggtcagacgaatgctaatcactcagctgcgtgatgaatacacaattccggttgtagagacgtttggctatttgacaaaatccaaacggatagatttgcagctggacaaaacacattacaacgatgcgtattgtatcggcgacaaacagccaaagcaccggtgtaaaccggtgttctggcaagagaagcgtaagaataatcgttgtcttgtaaagttctacgatgccaaatatgtggatgcaaggacgggtcaaaaggctaccggtaaagaattatttaacggtcgaacaactcgcaacaaaaacctgaatggtgagaacttgcatccatacagacagcaaaagatttccaaaggcaggatgtctgtcagaagacaacgatatccgtaccaaccgcatgatacggtgctttggcgtaacagaacatttgaagtggttggcgcacaaaaccgtggcgcttacgtatctatcaaaaataacgatttcaaaaaagttgtaagtaccaagcgattacagccattcaaatacgcgaaaacagtttataatacagcatag

SEQ ID NO: 1901 - DNA, 326 bp, unidentified
  misc_feature 1..326: note = human gut metagenome genome assembly, contig: NODE_128_length_79994_cov_7.882986, whole genome shotgun sequence WGS
  source 1..326: mol_type = other DNA
gtcaattaccccagactgaccgtaaaacagtcagtcggggcttgtgagtaattacaagtccatagttgattagtctaagcacttcgagtgctacgttatgttttaatggcagcttcggctgccaaataggtaccaaggggtgctccacaagccccttgcactacggtgtattgttaaaaatctttgatggggtcgaagacgtgcagtacacaacaaacaattcataacattgacgatgtgggtttaccacagaccgggcctttggctccgtctgcgcgctggtcattccagaccaaatttattgaaaggagccatatcttatgatg

SEQ ID NO: 1902 - DNA, 759 bp, unidentified
  misc_feature 1..759: note = human gut metagenome genome assembly, contig: NODE_1355_length_19542_cov_13.053583, whole genome shotgun sequence WGS
  source 1..759: mol_type = other DNA
atgccctgttcaccggcaaaagcgcgccttctgcttaaagagaagaaagctattgtgaagaggcgaacgcctttcactattcagctgacgattgcaacgggtgagtccaaacagccggtgactctgggtgttgatgccgggtacaaacatgtcggcctttccgcatcaacggaaaaggctgagctttatgcatcagaagtcgaactccgtcaggacgtctctgatctgctctctgctcgtcgtgcgttacggcagtcccgccgtaaccgcaaaacgcgctaccgcgcgccgagattcaacaaccgtctccgcaccaagcgcaaaggctggcttgctccgtcggttgaaaaccgaatcaacgcgcacttgtcgcgcatagaagcggttcttcgactgctgccggtcacaaagatcaccgtggaaacggcgtctttcgacttgcagctgctgaagaatcccgacatttcagggaaagaataccaggagggagaacagctcgacttctggaacatccgcgagtatgttctttgcagagacgggcatgtttgccagcattgttacggcagatcaaaagacccggtgcttaatgttcatcatttggaaagcagacgtacgggcggagattcacccggcaacctgattacgctctgtgagacgtgccataaggcccttcatcgcagtgaaatcacgctgaaggcaaagcgcggacaatcgttccgcgctttgccttcatgggaattatgcgctggaaggtgctga

SEQ ID NO: 1903 - DNA, 247 bp, unidentified
  misc_feature 1..247: note = human gut metagenome genome assembly, contig: NODE_1355_length_19542_cov_13.053583, whole genome shotgun sequence WGS
  source 1..247: mol_type = other DNA
gtcaactacctcggcctaaaggccgcggcttgaaaaagcctctagttgactagcctcaggccgtcatttggcggactatgttggtcgggattttataggcaccgcgggatgcagatcctagtcccgcgctctgcggccgatggttaaaagctctgagaggtaggagcggtgctgtcggcttgaaaccccttccaacattggcgaaggatcacaaccggtcgaaagaccgaggagataaaacttgaga

SEQ ID NO: 1904 - DNA, 675 bp, Marinitoga sp.
  source 1..675: mol_type = other DNA; strain = 38H-ov
atgaaaagaaaggagtacagaagaacaagaagataccgcaaaagaagatatagaaaaccacggtttctaaatagacgcaggcgtgaagattggcttgctccaaatatacaatggaaagttaatgcacatataaaaattattaacttcatagcaaagatactaccagtcaaaaaagttgtggttgaaatagcaccgtttgatacacacaaaatagttaatcctgatgttaaaggtaaagaatatcaagaaggtcagcaaaaaggtttttgggatgttagagagtactgtttgtggcgtgcaggatacaaatctgagacatcaggtaaaaaaggtatattggaagtacatcacgtcataccaagaagccaaggcggaactgataatccttccaatttaatagttttaactgcagaagaccacaaagctattcatgaagataaacttaaaatttcaagtatcagacttaagaaaattaaaatcctaaaagatgcgagtcatgtttcaacaatagtctggttcattgtgaaccacttaaaacaaaaatatgatgttggtataacatatggtagtgctacaaaatctaaaagaatagaaataggattggagaaaacacataggaacgatgcttttgtcatttctggaggaaataattttattaaaaaattagaccgttga

SEQ ID NO: 1905 - DNA, 254 bp, Marinitoga sp.
  source 1..254: mol_type = other DNA; strain = 38H-ov
gtcaattaccgccaacctatagaggtggtggcttgtaaaagccatagttgactaccctcagccaggggaagttaatcttcctatcgggctacgttagtctggtcataacaccctgggatgctgctcaagttccaggctctgttgtctgtcattaaacaatcctgagtggtagggatagtgcggcagacatggcaagccagtctaacattggggatgagcacctaactccaaataaatgaggcttacctcatatg

SEQ ID NO: 1906 - DNA, 1233 bp, unidentified
  misc_feature 1..1233: note = JGI25616J43925_10007359
  source 1..1233: mol_type = other DNA
atgatgtgtgtgtatgtacgtaatcacgatggggcggctctcatgccttgcacaccagccaaagcacggaaattgttacgagcaggcagagcgaaggtcgtagcctaccgaccctttaccattcaacttacctggcagtgcgaggggaaggtccaggagatcacctgtgggattgataagggcagcagcattacaggcgtagcttgtgtaggcaatggcaccgtgttgctcgcagcagagatccatcatcgtcgcgatgtcaaagacaaaatggaggatcggcgtgaccgacgcaagagtcgtcgagcacgcctctggtatcgcccggcccgctttctcaatcgtgcgtcgagtaagcgcagtgggcgcttgccgccctcgatcaaaaccaacgtcgaagaggtgatccgggtcgtccggcagctccccttacccatcagcgccctggtgattgaggatgtccaggtggacatcgcaagactcaacaaccccaccttacaggggccacagtatcaagacccgacgcggctggatgagaatctgcgcattgcctgtctgatgcgcgacgggtatgcctgccagcactgcgggaaacgggggacgcgtctggaggcccaccacctgatctttcgtcaaaacggaggcaaggatacgcttgccaatttgctgaccttgtgtgagggctgtcaccaccggctgcacgaaggaaaaattaccctgaaggcgacgggagtgggcgggcacctggatcagatagcccaacgcactatgcaaggaaaaacccatctctatgcagcactgagcgcgttcgcacctctgacaaccgtgtttggctatgaaacatctgcataccggaaatatcgtaatttgccgaaaacccatatcattgatgcactgtgtattgccacgcttacgaccggcgaagtggttgctccgccagagcgcaatatctaccacatcagctttcgccccaggcaaacgcgcaagcggtatcacagcttgccgcagaaagggaaaggccgcgtgaaatatcaggtcaatggcgaactgcaaggctttcgcaaaggcgatttggtgctggtcaaggagaagtatatgaagctggtcaattccatttattcgactggctatctggcctttccgcgcgtcaagggggaacccaatgctgcccgtccccaagactgtcgaatcttagaacgagagggaactgtgttgtggaaaaatgtggaataa

SEQ ID NO: 1907 - DNA, 245 bp, unidentified
  misc_feature 1..245: note = JGI25616J43925_10007359
  source 1..245: mol_type = other DNA
gatagagatatagttgctaaaaatatggcgaaatcttccgccgtattcatggaactaccagcgggcctcttcggaggcagcagttcgatgagcgatcacaccttgggatgtttgctccagtctcaagctctgtgggtatgcattaagggtagcggaaacgtgaacgtgtgcctaccgtaaaaacgtcgtcgaacagtcgcgaggagcaattcactccgacaggagggcttatagccatgatgtgt

SEQ ID NO: 1908 - DNA, 966 bp, Bacillus sp.
  source 1..966: mol_type = other DNA; strain = AFS014408
atgcgtgtatttgtcaagaatgtaagaggagaaccgctcatgccttgcagtaatcgcaaggcacggcttcttctcaaacaaggaaaagcaaaaattgtgaagtacacaccatttacgattcaactcctatatgccaccggtgaaacggtgcaacccgttacaattggcgttgatagcggagcaaagcatatcggtattgcgattactactgcagataaagtgctagcaaaaggaaccacccagctgcgtcaagacgtcaaagaaaatcttatactaagagctacattacgcagaggtagaagacaacgaaaaacaagatatcgagaagtacgttttctcaaccgaaaaaagaaagaaggatggttaccgccatcgattcaaagcagagtggataaccaaattcattggattgaaacatttcgctcgttattaccatctccaaaagtgattgttgaagtaggggaatttgatgcacaaaagctaaaaaaccccaatatacaaggaacagaatatcaacaaggagatacttttggcttttggaatacgagatactacgtatttgcgagagacaactacacctgtcaaatttgtaagaaaaaaggtggtattttgcatacgcatcatatcattgaacgatgcaatggcggttcgaatatggcagataatcttgtaaccgtgcatgatgaatgtcatcaaaaacttcatcaagggaacatcaaacacagtttcaagaaagtcaaacaatataaagaaactgcttttatgaatatattgcggctgcaaatcatgaatcgtttagattgtgacattacgtatggtagctacaccacaccaaagagaaaagaacttggattagccaaaacacatgcaaatgatgccattgcgattaccaatcccatacaactacaagaatacgatcaaagcggtgaattttgcatcaagcaatttagaaagaaaaaacgctcc

SEQ ID NO: 1909 - DNA, 265 bp, Bacillus sp.; identical to SEQ ID NO: 573
  source 1..265: mol_type = other DNA; strain = AFS014408

SEQ ID NO: 1910 - DNA, 1380 bp, Paenibacillus wynnii
  source 1..1380: mol_type = other DNA
atgcgtgtattcgtcaaaaacaaaagaggagaggcactcatgccctgctcggtaagaaaagctaggcttttacttaagcaacaaaaagcaataattgtcggttatcaaccgtttgcgattcaattgactatagccacaggcgagactgttcaagaacttcacgtcggtgtcgatactggcgtaaaacacctcggcatcgctgtcatcagcgaagataaaattttcgctcatggcgaaattgaattccgtcaagatgttagttcgctgctcgaaactcgcaaaacgtatcgccgtagccgtagaaatcgaaacacgcgctacagacgctgcaaatacaaatttaataccaaacgtgtttttgataagaaaaagaagaagtggataaaaccctccatttcgctcacgtccaaacgtccagaaggctggttaccgccttcgcttgaaaaccgcatccagcatacctttcggtgggtggacacctttacgaagctgttaccacatccaaagcttcatcttgaagtcgggaaatttgatgtgcagaaaatgatgaatcctttgatccaaggcaaagaatatcaagaaggagaaaccttcagctaccacgaggttcgctattacgtgtttgctcgggaccactatacgtgccaagtctgcaaaaagaaaaacaaaatcctaaacacccaccatatcatctaccgttcgcataaaggtagtgatcgcgccgataatctcataacggtgtgtaccgattgccatacgcatgagaatcatcaagaaggtgcgattttgtggacgtggatgatggctaaaaagaaagtgaagcaatataaggaaccgccctttatgcatgtcttgcgcaaacgaatcttttcccgttaccccgaagcacgcattacgtatgggagtgaaacgactccccaccggaaaacattggcgctcgaaaaaagccatcaaaatgatgcgatcgcgatcataggcatatctaaaatcaatgaacacccttgctcgcacttccgcatcgtacaatttcgaaaaaagaaacgttcactgcatgaagcaacggctcgaaaaggtcgaaaagagcccaattgtttgcaaaaaagaaacgccaaaaacacgaaagaatccttaggattccttctgaatgatcaagtttgcatccatggacagcgtggttttattacagggttcacaggaccatacgtccaaacaattgaaggaaagtatattacactgccaggaaaatcgtacaaacaagtgcctttgagagaactgcgccgaatggcacatcacaacaactggcagtatacgatccaaattgagacacgccctattcatgccccacctattaaggacggggaattacgggcaatttgttaa

SEQ ID NO: 1911 - DNA, 243 bp, Paenibacillus wynnii
  source 1..243: mol_type = other DNA
gtcaactccccaccacttaaacggtaaagcgttatgaagtgggggcttgaaaaagccctagttgtctagccttagctttaagctacgttgggcatgtcaatacggcttggtgtaattccctagcaccttttgtcgttcaggcgctgtaacagttctgttgggtcggaacggtcaacctgaggcacgaagcatgtccaacattggcgaagggaaacaaactctaaggagggacgaaacatgcgt

SEQ ID NO: 1912 - DNA, 1281 bp, unidentified
  misc_feature 1..1281: note = human gut metagenome genome assembly, contig: NODE_5646_length_3670_cov_1.870263, whole genome shotgun sequence WGS
  source 1..1281: mol_type = other DNA
ttgagagtatttgttttaaacaaacgtgggcaaccgctgatgccgtgctcaccggcaaaagcaaggttacttctcaaagagagaaaagcaatcgtcaaaaggcgcacgccttttacgattcaactcacgatcgcaacgggcgaagcaaagcagcctgtaatgcttggcgtggattccggctacaagcacattggtctttcggccacaactgaaaaggccgaactctatgcttcggaagtcgaactgcgtcaagacattacggatcttttgtctgcgcgtcttgctttgcgccgctctcgccgcagccgcaagacgcgctaccgtgcgcctcgtttcgacaaccgggtggcaagcaagcgcgaaggctggctagctccttcggtggaaaaccgcattgcggcgcacatgtcgcgcgtagaagcggtcatgcaggtcttgccggtgactgccataaccgtcgaaacagcggcgtttgatacgcaactgctgaagaacccggacattatcggagcggcgtaccaacaaggcgaacagctcggattttggaacgtgcgggaatacgtgcttttccgggacggacacgtttgtcagcaccgccgcgggaagtccaaagatccgatactcaatgttcaccacattgagagccgtcgaaccgggggcgatgcgccgaacaatctcatcacgctgtgtgagacctgtcacaaggcattgcaccgcggcgagatcaagctcaaagtcaagcgaggcaagtcgttcaaagcggaaaccttcatgggaatcatgcgttggacgttctttgaacgtttgaaaaaggctcacccagaactcaatgttcgcaacacctacggttatctcacaaagcacaagcgcatctcatacgggatcgcaaagagccactgtgcagacgcgtactgcattgcggacaaccttggtgcaaagcgcctggagggctttttctttcaaaagcaaacccgaaagcacaatcggcagattcacaagctgtcaattctgaaaggcggattgagaaagaagaaccaggcaccctacgaagtcaaaggcttccggctttttgacaaagtgatgtgcaaaggcgaagaagccttcatctttgggcgaaggacttcgggaagttttgatgtgcgccgtcttgacggtactcggatttccgccggtatcaactacaaaaaattgaggctgctggaacctcgaactacctacttaacagaatttagaaaggaggcggcgcttcctcccctgcatgaatgcaggggtttccgcgcc

SEQ ID NO: 1913 - DNA, 249 bp, unidentified
  misc_feature 1..249: note = human gut metagenome genome assembly, contig: NODE_5646_length_3670_cov_1.870263, whole genome shotgun sequence WGS
  source 1..249: mol_type = other DNA
gtcaacaacccctgcctaaaggcagaggcttgataaaagccttggttgactagcctcagaccgcccaaaaggcggactacgttggttgggaatgcataggcaccgcgggatgtcaatcctagtcccgcgctctgcggttcgcggttaaaagctctgagaggtaggagcggtgccgcgaacaggtaaaccccttccaacattggcgaaggatttcaaccggtcgcaagaccgaggagacaaatcttgaga

SEQ ID NO: 1914 - DNA, 687 bp, Anoxybacillus flavithermus
  variation 230..329: note = n represents any nucleotide
  source 1..687: mol_type = other DNA
atggtcgaggagaatatgacctgctttatgcagaggaaaggggagaaccctatggtttttgtgttagacacaaacaaacgtccgcttgctccttgtcacgaagcagttgcaagaaagctgttgaaacaagggaaggcggcgatttacaggcgatttccatttaccatcatcttgaaaaaatcagtagacgaatcagaaattaaagcaacatatcggctaaaaatcgactnnnnnnnnnnnnnnnnnnnnnnnnnnnnnnnnnnnnnnnnnnnnnnnnnnnnnnnnnnnnnnnnnnnnnnnnnnnnnnnnnnnnnnnnnnnnnnnnnnnncgaaagacacaacaaatcacttatatttacaaacaaaagaagtgtatttatcaaggcaaaagggcgtggtagtcgctctcgtacaaacctagatagatatggcttcccaagaggttatcttgcaagacaaaaattcttctttggttttcaaacaggggacatggttaaggctgttgtcccaagagggaaatatcaaggcgtttggtttggcgaagtcgcatgtagaaagactggaagtttcgatattaaaggcaaggacggaaagcgtatcgcacaaggaataaattatagatatgtccaagtcattcagcgatttgacggatatgcttatggaaagggggtggcggaacttgcgtaa

SEQ ID NO: 1915 - DNA, 244 bp, Anoxybacillus flavithermus
  source 1..244: mol_type = other DNA
gtcaacaacccaatgactaaaatcatgggcttgtaagccccatgttgatcagaccaaggcttgaaacagagcctacgttatagatgtcatgacacgttcgggtgcttctccatcccgttcctctgtcgtgcaaggttaaacaagcgtggtgggtagcgctagtgtcttgcacataacaagcatctataacatggtcgaggagaatatgacctgctttatgcagaggaaaggggagaaccctatg

SEQ ID NO: 1916 - DNA, 1410 bp, unidentified
  misc_feature 1..1410: note = Ga0121719_100007 JGI
  source 1..1410: mol_type = other DNA
atgccccgtaaagtggatgtaaacaacggttatattttagtggttgaccagcatggtcagccgttgatgccgtgtttgtcgtcacgagctaaaaaattgcgtgaccagaaacgcgctcgaatttacagcatgcaaccgttcaccattcagatattggaccgatcggttaatagcagtgtcttacaagagagcgaattgaaattggatccgggcagcaaaaccaccgggatggccttgtgtgtcaaaggggatatccgagggtggttcgtggccatggccatccatattgaacaccgaagtcatcatatccgtgatgcgttaatctcgcgaagtcaaatccgacgttcgcgacgcaaccgcaaaacccgttaccgcccaccacggttcaaaaatcgttcaagaaaagccagaacagcacaaggttacaatgtatggttccccccgtccttggtgtcacgaattgaaaacattgtcaatctggtaatcaagtttggcaaatatttccccgtaacacagattgcgggagagtttaacaagtttgacacgcacaaaatgcataatcctgaggtcaatggtattgaatatcaacgcggcacattgtatggggttgaagtgcgagaatatctgttgcaaaagtaccaatatacctgtgtgtactgtcagaagtgtgcatttcaaaataataaatccacgggtttaaaattggaaattgatcacgtggtgccccgttccaaaggcggcagtgatcaagtgaacaatttggtgttggcgtgtcacagttgcaaccaaaacaaaggcaatcaatccctccaagaatttctcaaaagaaaaccgtctgtgctcaagcgtattcaagagagtttggggaaaccattgaacttacaagacgcagctcagatgaacaccatgcgcaaagagttgtatcaggtgttgaaaaaacggaccgggttgcctgtgaaaacctatacagcgtctcaaaccaagttcaaccgcgtgcagcagaaacaccacaaagaccattggattgatgcagcctgtgtaggtgagagcggaaaccaggttaatattcagcacatctctcatattattgtttggaaagcagtggggcgcggcaatcgtcagatgtgcttaatggatcgctatgggtttccccgaaccaaagcaaaaacagtcaagcgctacatcacgtccatgggtcaaggtttccaaaccggtgatatagttcgacttaagcagccttcggggaaataccaaggaacacatatcggtactgtttcgatccgtgccagaggtcaacttgatatcaccacacaaaacgggcgaaaaatcacatcccattggaaaaattttcgaataatctcccggctcaacggctatcacgttaacccaaaacgagtatcttatggttga

SEQ ID NO: 1917 - DNA, 196 bp, unidentified
  misc_feature 1..196: note = Ga0121719_100007 JGI
  source 1..196: mol_type = other DNA
ctcaaccagcagatatgttgaataaaaaaggagggaaattaaaacaacatatcaacgttatacatgaatatataggtacctgtctgtgcttcaccagcaagcagctctacggcccacagttaaacagaatttcctcatgtggaaacagttgtatgcgtcgacaatgcttttgtattggtaaaccaagacaacgcgt

SEQ ID NO: 1918 - DNA, 1254 bp, unidentified
  misc_feature 1..1254: note = Ga0307928_10003230 JGI
  source 1..1254: mol_type = other DNA
atgcaaaaagtatatgtacaaaacaaggatggagaatctttaatgcctactgaaaggtatggtgcagtaaggagatggcttagagacaacaaagcaactgttgtaaacctaactccttttacaatcaaattaaactttgattgtgagaacaacacacaagaagtagttgtaggtttagatactggtgcagttaatattggttgttcagcagtaaacaacaatgggtgtttgtatgcttccgaaacaaaactaagaacagacatacataagaaaatgcagagaagagttatgtacaggaaaactagaagagttagaaaattgagatatagacagccaagatttcataataggacaagacctaaaggctggctgccgcccagcctaaaaagtaagttggactcaactgttaaggtaataaggcaattagcagagatcctaccaataagtaaggtgagagttgagattgctaagtttgacacgcagaaattgcagaacccagagattcaaggtaaagggtatcagaaaggggttactgaaggatatgataatgttcgggcttatgtgtttgagagggataagtatacctgccaaatatgtaagaaacgagaaggaatcttgcaaactcaccatatcatacaaagaaaagatgaaggaagtaatagacctgataatcttgccactgtccacaagagttgtcattctgattttcacaaaggattaattcaacacaagtttagaaaaccaaaggcatataagatgcaatcccaggtaacaatcttaaaagatttcatcgttagtgaactaaagaaaaacttcaaagttgaagttactttcggtcatataacaaagagaaataggatgagattaaacttgccaaaatctcattgttttgatgcagttgcaatatgtaatcctaaaaagattgaaaggctaactcatatattcaaaaggaaatgtataactcaaagaaggtatcagatgactaaaggcataagaagtgagaagaagttgcctaaaggagaattgtttgggttcaggcaatgggataaggttaagattaataatcgggttggatttatcaaaggtaaaagaagttcaggattttttgacgtttgtgatattgatggaaacaacatatcacattcaattaaatacacaaacctacaaagattatgtgggaataatataatggaggtaagcgtttctcctcccacgactaaagtcatgggtatccgaaatgcaaaagttttatga

SEQ ID NO: 1919 - DNA, 267 bp, unidentified
  misc_feature 1..267: note = Ga0307928_10003230 JGI
  source 1..267: mol_type = other DNA
gtaacacattcccaccctctaaagaggggggcttttaggtaactaagcctgtgttaccagacttagcaaaggaatttgctacgttatttgagatgtagaaacccaacaatttgctcagttgttggctctttcgtggcactgtaaaagtcttgagggattcgagacagtcaaccacattgcgaagctcggataacattgttgagagcaacataacagtttgaaggaactggcttacagcaaaaatccttcataaacaaaatgcaaaaa

SEQ ID NO: 1920 - DNA, 267 bp, Bacillus selenitireducens; identical to SEQ ID NO: 1919
  source 1..267: mol_type = other DNA

SEQ ID NO: 1921 - DNA, 235 bp, Bacillus selenitireducens
  source 1..235: mol_type = other DNA
gtcaacaacccaacgactaaagtcgtgggcttgtaaaagcccctgttgactagcctaagtctttcgaggactacgttggatcggtcaagacaccttacggtgcggattctagctgtaagccctgtcgcttgtgattaaaagtccgaacgggttgtgggcggtgttgcaagcgtaaaagcctttccaacattggcgaagaatacctgactcctgaaaggaggtacacgttatgttc

SEQ ID NO: 1922 - DNA, 1311 bp, unidentified
  misc_feature 1..1311: note = Ga0393278_0005903 JGI
  source 1..1311: mol_type = other DNA
atgttagtctttgttctgaataagtatggaaagccacttatgccttgtgaaccaagcgaggcaagaaggcttcttcgagatggtaaagcaaaagttaagagccggataccatttacgattaaattactttatggctcttctggttacaaacaacaaatttcattaaaagtagattctggttctaaggttgtaggatgtgcagcagtaagaagtgatggggaaacattatatgcaagtgaggtggaaactagaaaagatattcataaaaggatgacgcgacgttcttcttatagaagaactagaagaggtaggaaaacgtgttatcgtcaagcaagatttagtaatcgttgtagatcaaaaggttggcttaccccaacattaagatctaaaattcaaactcatttgaaagaaattaattatgtaaaatcaattttaccaataagtgaattgattattgaaacggcatcttttgatattcataaaattataaatcccgaagtaaatggaattgggtatcaacaaggtcaacaaaaaaattattataatgtaaaagcatttgtatttcatagagacaaatatgtttgtcaaaaatgtaaaaacaaaaaaaataatgtaaaattaaatgttcatcatattatatttcgctctgataatggaacaaattctccggataatttaattacattatgtgaaacctgtcatgataaaatacattctcatattgatgcaaaaaaagaatctttaaaattacaaaagaaaagaaaaattaatacaaccgatgctacacaagttttaataatttgttcttatttaaaaaagcatctgcaattcaaagaagtttttggttatgaaactaaatttaatagagaaacaattggattacccaaagcgcattttgtagatgctatgtgtattggattgactgatggtgaggttgtcaaaatgccaacttatgtttttaaaaaaattagtattaacaaaggagattatcaaagaaccaaaggaatcagatcagaattggaaatcccaatgggaaaaataatgggatttaaaaaactggatagggttaagtattttaaaactacagcttttgttaaaggtagaatgtcaacaggttatgcaattttaatagacatttatggaaatgaattaaattttggacatattccaaaacttgattctatgaaaagatttggagctaggaaaacatgtcttacaaatcaaattttcatagaaagtttcacatcaaatatcatattatattctgttgtaaatatagaaaaaacatcttcaaagaaaaaaaaattatag

SEQ ID NO: 1923 - DNA, 253 bp, unidentified
  misc_feature 1..253: note = Ga0393278_0005903 JGI
  source 1..253: mol_type = other DNA
tgaagcctcccctagactaaagatctaggggcttccaaagaaaggagaaagacaagggaagctacttcaccagaacaccaacagagaggatctaaaatgttggtaaacgatagggtagaatatataggtacttcagaatgcctactcagttctgaactctacggatgtaatttaaaagtgacgagaggagttgcggtgattacattttataaacctacccatatccgttcgagagtaagtcgtgttgaaatta

SEQ ID NO: 1924 - DNA, 1401 bp, unidentified
  misc_feature 1..1401: note = Ga0209719_1005600 JGI
  source 1..1401: mol_type = other DNA
atgcagaagttatcagagagacaattaattaacacacctacgagtgcttcactagctcgtagctctgtggttccgtctttaaacagagaggaaactctcagtgagcggagcttctcgacctctgataacaatcccgaagtgaacaacgcccacatacaggcggtcttaaagacaaatgtgtatgtattagcagtagatggcaaaccattaatgccatgttcaagagcgaaagctagaaagttattaaagagcaacaaagctacaattgttaaacataatccattcactataaaactaacttttgaatgtgaaaaccaaattcagtctattacattaggagtagatactggatatcaacatataggattatctgctaaatcagaaaaggcagagtattggtcttcagaagttgtattgcgaaacatttctcctttattaacagaaaagaaaatgtatcgtcgcggaagacgcaataaactgtggtatagaaaaccaagattcttgaatagaaaacgtaaaaaaggatggttacctccaagtattgattaccgcataaattctcatatcaaaatcattgagaaagtatgttctttgttaccaattacttccattatagttgaagtagcaaactttgacatacagaaactcaagaatcttgaaataaaaggggtaggttatcaacagggagatctatatggatatgaaaatataaaatcgtatttaatcgaacgcgaacacgccagatgtcaactatgccatgaaagatcaacacgtactaattcattcagagtgcaccatataatacaaaaaagtaaaggtggcacggacaaacctgacaatcttgctttgcttcacgaaaaatgtcatactaaattacacaaagagaatttaggacacctattaaccaagaacaaacaatacaaagcagaaacctttatgtcaattatgaggaatacgcttgtaactgaactaagaaatacgcatacggtaatggaaacctttggtcatattacaaagatgagaagaaacacattgaacattgaaaagtctcatattaatgatgcttttgtgatagccaagggcagtaaccaagtccgttctgcgcctctgactataattcagaaacggcataacaataggtgtcttcaattgaacaggaagggcttcaaaccttcagttagacaccagagatatccctaccaacccaaagacgtagttatgattcaaggtgtctattatgatgttactgggacttttaacaaaggttcttggatacgggtaacaaaagcaggaacagtgttcaacttttctacaaagaaggttgaaagacattatgtaactaacggttgggcaattcatccacaccctgaaggatgtggtcttcttgccccacagggataa

SEQ ID NO: 1925 - DNA, 259 bp, unidentified
  misc_feature 1..259: note = Ga0209719_1005600 JGI
  source 1..259: mol_type = other DNA
gtcaactaccacgtcctaaagggcatggcttgaacggtgacgttcgacgcaagagttgattagggagcttaggtgaaaatctatgcagaagttatcagagagacaattaattaacacacctacgagtgcttcactagctcgtagctctgtggttccgtctttaaacagagaggaaactctcagtgagcggagcttctcgacctctgataacaatcccgaagtgaacaacgcccacatacaggcggtcttaaagacaaat

SEQ ID NO: 1926 - DNA, 1035 bp, unidentified
  misc_feature 1..1035: note = Ga0394882_0003342 JGI
  source 1..1035: mol_type = other DNA
ttgggttacgacaccctgggatgcgtagctagtcccctgccctgtcatctgcaattaaacagttctaaggtcactggagcagtgttgcaggtcgaacaagcccagataacaaggtcgaagctaacgttacgagcaatcagaaaggacgcaacaatgtctaatttcgtttttgtactcgacaccaatcgcaaaccgctctcaccctgcaaaccaggggtagcgagatctttgctaaatgctggcaaggcggcggtattccgtcgatttccgttcacgattattttgcacaaggaggtagaggcaacgcctgaacctatcgaacttaagttagatcccggttctaaaacaactggaatcgctctaaaacaaggcaacaaaatcattgttggcgcagagctaacccatcgggggcacgccatcaaagccagtcttgattctcgtcggtcattgcgccgggggagacgttctagacatactcgctatcgtcaagcacggttcctgaatcgcacccgtcccgatggttggttagccccaagtctgaagcatcgggtagaaacaacgttgacctggtttgagcgattctgcaaagttgcaccgattggctcaattgttcaagaactggtacggttcgacctacaacagaggtcgaaccctgaaatctcaggcgttgaatatcagcagggcgaattgcaaggttacgaggtgcgcgagtacctgctgaacaaatgggatcggaagtgtgcttactgtgctaaagcaacggggcatggtactcggcaaatgtgtcgcaccgataagtatgggttcccttctcggtatgcgcctcggctcaagtttgttcaaggctttcagacaggcgacattgtgaaagcagttgtcaccaccggcaagaaggtcggtgaatacgtcggacgagttgcagtccgatcagtcggttcgttcaacatctcaacatctcaaggattagtgcaaggcatcaatcacaagtactgcaaatcaattcaacgaaaggatggctatagctatggcttttga

SEQ ID NO: 1927 - DNA, 270 bp, unidentified
  misc_feature 1..270: note = Ga0394882_0003342 JGI
  source 1..270: mol_type = other DNA
gtcactaacccccgactaaagttcgggggcttgcagactgcccgacgctaacgcgcgggacttgcaagccgtagtgaccagaccacccgaaagggtagccgttatttgggttacgacaccctgggatgcgtagctagtcccctgccctgtcatctgcaattaaacagttctaaggtcactggagcagtgttgcaggtcgaacaagcccagataacaaggtcgaagctaacgttacgagcaatcagaaaggacgcaacaatgtctaatttc

SEQ ID NO: 1928 - DNA, 1347 bp, unidentified
  misc_feature 1..1347: note = Ga0334896_1003582 JGI
  source 1..1347: mol_type = other DNA
ttggtatttgtgctaagtaaaaacaaaaaaccacttaatccttgtaataatgcagtagccagaaagctactaaaacaagggaaagcagttattcataagaaatatccttttactattaggcttaaatatataattaatgagcctaagttaaaggaatacactttaaaattagatccaggagctaagattactggcgtagccattgtagaaaataagcctaaccatgctaaagtagtttttctagctaatttagagcatagacaaaatattaaatctatattagatgatagaagagcatttagaaggactaggcgaaatagaaaaactagatatagaaagccaagattttcaaatcgaacaaggactgagggttggctaccaccttctattcagtcaatagtcggtaatattgagtcttggactaaaaagataaagaaattatgcaatatcacagcgatagctgttgaaacagtacgctttgacactcaattaatggacaatcctaatattgagggtgttgaatatcaacaaggtacgcttttagggtacgagcttcgtgagtacctattatataaatatgggcatgagtgtcaatattgcaaaggcgaatcagaagacagcgttcttaatatggaacatatgatttctaaggctaatggaggtagtaatagagtatctaatttaactttgtcctgtcggacttgtaatgaggataaaggtccacttaatttatctaattggttagatattttaaaaacacaatctaagacaaagttaaataaagagagaattaaaaacatagaagttatccttaaaaaaggacttcctaagtcctttaaagatgctgctaaggttaattcatcaagaaaagctacctatagagtgttaagtaattatacttcagatttagaagtatcatcagggggcaggactaaatttaatagaactacttcaaatttacctaaaactcactattttgatgcgctatgcgtagggaagaatacttctgatagttttacattcccaaaagcattgaaagtgctaaatattaaagctataggcagaggttcaagaagtcgtactaacttaaataaatatggcttccctagaagctacttaccaagacaaaagtatttcttcggtttccaaactggagatttagtaaaagctgaaatcccaaatggcaagtatcaaggcgtgtattatggctctgtagcttgtcgtagtaaaggtagctttgacattaaaactactgatgggaagagaataagcactaactacaaatacttttcattaatacaaagacttgatggttacaactatggtgttgaggatattgctctttaa

SEQ ID NO: 1929 - DNA, 267 bp, unidentified
  misc_feature 1..267: note = Ga0334896_1003582 JGI
  source 1..267: mol_type = other DNA
gtcaacttctccacgcttaaaagcgggagctttttgtaaaagaagctcatagttgaccagtctaagtctttaatgactatgttatttaggttatgacaccatagggtacttctctagctctatgcaactgtcgattagtcttaaacaactcctgcggagagaagagtagtgtgctaatcttaaaaagcctttataaccttgacgaagagagactgtctttgagacagcgttacctacattttgtagaggaaggagtttttacctttg

SEQ ID NO: 1930 - DNA, 1386 bp, unidentified
  misc_feature 1..1386: note = Ga0101770_1016828 JGI
  variation 434: note = n represents any nucleotide
  variation 436: note = n represents any nucleotide
  variation 438: note = n represents any nucleotide
  variation 440: note = n represents any nucleotide
  variation 445: note = n represents any nucleotide
  variation 816: note = n represents any nucleotide
  variation 825: note = n represents any nucleotide
  variation 834: note = n represents any nucleotide
  variation 840: note = n represents any nucleotide
  variation 1290: note = n represents any nucleotide
  source 1..1386: mol_type = other DNA
ttggtattcgtgctggacaaacacaagaaacccctgatgccgtgcaccgagaagcgtgcgcggctgctgcttcaaagaggccgcgcggtggtgcacaggatagcgccctttaccattcggttaaaggaccgggtggcagaagaaagcgcgctgcagccgttgcggttgaaagtcaagcctggcgcaaaagagaccgacatggcagtcctgcgggaagagaccacaggcgaatccgaagctgtcatgctgcttgaactccgccacaagcccggcataaaacagagccttgacagccgcagggccatgcgccgcagcaggagaaaccgcaagacccgttaccgcaggccccggttcgacaaccgcaatcctgcgaagtgcgccgcctgcggcaggaacgcgagacatggcaaccgttactgccgtccttgcgaganancnanaaacnttgtcgataacggttaccgtgagaagcggctgccggcttccctggaagcccgtgcgaaccagatcatgaacacagtcaagagactgaccaggctgctccctatagcgtcgatatcatacgaaaacgccaaattcgacacccaactgctgcagaaccccgagattgccggggttgagtaccagcagggcgagctttttggctatgaagtcagggaatacctgttagagaagtggggccgccagtgcgcctactgcggcaaaaacggcgtgccgttagaaatcgagcacatcgtgcccaaatccaggggcggcaccgacagggtgtccaaccttaccctggcctgtaaagactgcaaccaggagaaggggacnctgacggcngaagaattnggccancccgaggtgcaggccgaagccaggcggccaatgaaagaggaagcgatagtcaacgcaacccgctggaagctgttcaaccagttaaagaatatcggccttcctctggaatgcggcacggcggccctcacgaagaagcagcgcattgagcatggtttgccgaagagcaaatattacgaagcctgcgtagtggggaagagtacgcccggcaaactggctatcaggcagaaatacgttcaggtctggacagcagtgggccgcggcagccggaagatgtgcaacacagacaagtacggttttccggtcagccaccgggccaggcagaagatgcgctttggttttatgaccggggacttggtggtggccgagatacccaaaggaaaatacgctggtcgctgggttggcagggtggccgtaaggtcgagcggctacttcgacgtaaaagacggcgcnggcaggcgggtgtgccagggagtgtcccacaggcatttccgcctgttacagcgtgccaacggttggcaatacgaaaaggaaaaattagcgggctga

SEQ ID NO: 1931 - DNA, 350 bp, unidentified
  misc_feature 1..350: note = Ga0101770_1016828 JGI
  source 1..350: mol_type = other DNA
gtcatagaccccacgcctaaaggagggggcttgctgggaataactcccggcaggtctccgttttaagcggaaagctgctcttctgggcggcgctatgacccgccccagcgtgggagccgatggaccaggcgtatgaaccacgctacgttaaggaggtcatcacatcttggaatgcttctctagttccttgccctgtggtgcggcattaaacagcgagcgggggtgtcagcgagcagtgtgccgcacgcaaaaagcctccttaacattggccaggagagacgcccgggcgagtccggcccgggagcgtcacaagccccgtaaggggtctccggaaggagatgctcaaattg

SEQ ID NO: 1932 - DNA, 1527 bp, Streptomyces sp.
  source 1..1527: mol_type = other DNA; strain = NBS 14/10
gtgcctcctcagcagcttgctctggaattcgagtcagcagacaaccccgggaacagggacgaaacgggactcgaacaccgcgctgcggtaccgggcgcggaacctgtgcgagaggagacccgcaccgcttcacctggcgatgcgggcatcacccccaaccacccggttggggagaagccgcgtgagcggcacccattcgtgttcgtcctcgacaagcacggcacaccgttgcaaccctgcactgcggcccgtgcccgcaaaatgctcaagaagggacgtgcggttgtccaccgtcacaccccattcgtcatccgcctcaaagaccgcaccgcagcccagtccgagacagacggggtggagatcggtatcgacccgggcagcaagcacaccggtatcgccctgttcaccgcccgcgcgggggagcgccgggcccggtacagcgtgcagctcgaccaccggggcgcgacgatccgcaagaagctggagcagcgtgccgcctaccggcgcggacgccgcacccggaacctgcgttaccgcgcaccgaggttcctcaaccgcgcccggcgcgagggctggctgccgccgtcgctgcggcaccgggtggacaccactgtgtcgtgggtatcccgtctggcccgctgggcaccggtgagggccgtgcacgtggagcgggtggcgttcgacactcacgcactcgcggccggtcgcccgctggaaggcgccgagtaccagcggggcaccctgcacggctacgaagtccgcgaatacctgctcgccaagtggaaccggacgtgcgcctactgcggcgcgaccggcgtgccgctgaacatcgaccacatccacccccgctcacgcggcggctccgaccggatctcgaacctggccctggcctgcctgccctgtaacgagaccaagtcgaaccggcttgtggacgagttcctggcccacaagccgaacctcctggctcgcatcaaggcacaggccaaagcaccgttgcgggacgcggcagcggtacagtccacccgcacggccctatggcgcgccctggacgcccgctggcccacgcacaccgcctccgggggccgcaccaagtggaaccgcacccgctgccacctggccaagacccacactctcgacgccctcgccgtaggcacgctcgacacaatcgcagaaaccgtgaccacggtcttgctcgccggatgcatcgggcgcggtacccatacccgcacccgcacgaacaagcacggcttcccccgcttgcgcatgccccgccgcaagcggttcttcggcttcgccaccggcgacctcgtcaccgcccacgtacccaccggcaagaaggccgggacacacaccggacgggtagcagtccgcaccaccggaagcttcaacatcaccacccgccacggcaccgtccaaggcatccggcacaagcacgtccgtctcctccaacaagcagacggatacgcctacaccacccttcccgagcattccacagcgataccccgacgcaccgcgccggaggactga

SEQ ID NO: 1933 - DNA, 338 bp, Streptomyces sp.
  source 1..338: mol_type = other DNA; strain = NBS 14/10
gtaaccggttcccccgcctgagggcgggggctttcagccgaactggctgaggcccgtgtgttaccagcaccagccaacacctttggaggaggtgaccgaagttggctacgttccgcgcacgacagaagacccaccaggctgtgcctcctcagcagcttgctctggaattcgagtcagcagacaaccccgggaacagggacgaaacgggactcgaacaccgcgctgcggtaccgggcgcggaacctgtgcgagaggagacccgcaccgcttcacctggcgatgcgggcatcacccccaaccacccggttggggagaagccgcgtgagcggcacccattc

SEQ ID NO: 1934 - DNA, 927 bp, unidentified
  misc_feature 1..927: note = Ga0334813_001619 JGI
  source 1..927: mol_type = other DNA
ttgacaagggggcctgcgaaagcgggcagaagttgttttggtcgcgacaccatgggatattccgcacgtcccatgcaactgtcgccggtggttaaaagtcctgagggcaagggacggtgctgccagcacgacaagcctttacaacaaccccgatgcggctctaacctctcgtcggagagagaaaggaactttatgttagttccagtattaaacaaagacggacggtccctgatgccctgccacgccgctaaagcaaggcggatgctcagggaaggcacggccaccgtagtcaaacgaacgccgtttgtgatcaagcttgtatacggcagttccggctataggcagccgatgacgctgggagccgacagcggttatttgcatgtcggcatttccggggtaacggacggaaaagaggtctatgcggcggatgtgggtctccggaaagacatggtaaaactcaacgcggagagaaaccactatcgcagaggccgaagacagcggcatacgtggtatcgcaaaccccggttcgacaaccggaagaaacccgaaggctggcttgcgccttctattcagaacaagctggacacccaggtaaaacttatcgagaaaacagcgcgcattctgccgatcacacgcgtagtcgtggaagtcgcggcattcgatatccagaagatacaaaacccggatatcgaggacactggataccagaacggagcgcagaagggattctggaacgtccgtgagtatgtcatgcacagggacgaccatacctgtcagcagtgcaagggtaaatcgaaagaccctgttttcacggtccaccacatcgaaacccgtcagaccggtggaaaccggccggacaatctcgttacagtgtgtaaaacctgtcacgggaagatatcaaggggagagatcgcccccgaatttaag

SEQ ID NO: 1935 - DNA, 321 bp, unidentified
  misc_feature 1..321: note = Ga0334813_001619 JGI
  source 1..321: mol_type = other DNA
gtacaagactcgggaaaggcgttatcctgggaggacaggcaggtctcgttggccacatcgacctcggcgatcatgtcatggttggcgcccagtcgggtgttcatgacgacgtccccgcaaaccaggttgtgtccggttcaccccataggccccacagacaatggctgcgcgcagaggcatgcgtttcacaacttccggagatgcggaaaaacgtagcctccatgttgaaaaggctcgagaaactggaaagggacaaaaaaaataagacccacagcaccaaatcctgagtgctcgactgcgtcagaatccaaatacatagaa

SEQ ID NO: 1936 - DNA, 1116 bp, unidentified
  misc_feature 1..1116: note = Ga0209617_10003712 JGI
  source 1..1116: mol_type = other DNA
atgcgagtacctgtaatttcagtagacaatattccattaatgccagccaaacctagtcgcgctagacgttggattaaagaaagtaaagcaattggtaaattcaacaagttaggtattttctatgtccagttaatagctgaaccatctggcatgaaaactcaagaaatagtaattggattagacccaggcaaaatgttttctggtgtagcggttcaatctcaaaaatacaccttacaaatgttgcacttagttttaccattcaaaactgttaaagacagaatggaacaacggtctatgttgcgacgcggtagacgtggtagacgagttaaccgaaatttttctttcaataaacgtagtcaccgtcaagctaggtttgataatcgtcgggggtctaaacttcctccaagtattcgagcaaacaaagatttagaatatcggacaatcacacttctttgtgatatttacccggtaaaaacaattgtcgctgaagaggtagaagcaagaggaaataagagttttagtccagtaatggtaggtcaaagatatcaaattaaccgattatctgaactagcaaaagtagaattaagaaaaggatgggaaacatcgaatcttcgtaaacacttgggtttacacaaagcaaagtctgataagtctctacaaatcccagagactcacgcagttgacgctgtgacactagcgtgttccgaatttgttaaatacaagtcgtgggaaggtgctaaaactcatggtgctagttgggtgggaaatgcaattattaccaattctcaatttacgattttacgccgtcctccaatcagtcgcagacagctacacttaatggttttctcaaaaggtggaaatagacgaaaatacggaggtactgtgaccagacatggctatagtaaaggtgattatgtcgaagctactcaaggcaataaaacatatagaggctgggtaagtggagacacaaaaactcaagtttcagttagtgattttaactggaaacggttagggcaattcagtaaaaacaaagtccgactaattagacgctctattggactaattatcactgcggttaaaaccgctcgcgtcgcttccctctcagcactaaagtga

SEQ ID NO: 1937 - DNA, 219 bp, unidentified
  misc_feature 1..219: note = Ga0209617_10003712 JGI
  source 1..219: mol_type = other DNA
gtcaataactcagggttgaagccactgagcttgtaagaaacaagtcttacgtgtttgactagctcattgagatgcagtttggtacgaacttccgaatacttccccagttcggattatcttcaaactatcttgttaatagtgttgctttgggcaagacatcttaactgcgttgagcgaggggacttaaacttttactccaaggattatctctttatgcga

SEQ ID NO: 1938 - DNA, 747 bp, unidentified
  misc_feature 1..747: note = Ga0133913_10206209 JGI
  source 1..747: mol_type = other DNA
atgaacagagtttttgttttagatacaaataaacaaccactagctccctgcacaccagcaagagctagacagttgttagataacaataaggctgctgcctatcgatataatccattcacgattatattgcatagagaagtagaattagatgcacaagataactattctattaacttagacccaggtgcagtgactaccggattagctattatcggtcatttccctaaacaaggtgatgttgtgatttttggtgcagaaattacccataaatctaaagctattaaagctaaattatatgcccgtagcagttttcgttctaatagacgtagccgtttgcgtcacagagaaccaagatttgataatagaactagaaaagatggatggttaccaccatccctcgaatcacgggtgaattgcattactcatttcgttaataaatttaaacatttaatatctaatgctaatatgtgcaatattgaattaccaaaattcgatacacaaaaaatgaataatcctaatatcaaaaattatcaatataaacaagggggtatgactaattttgataatacaaaagattatttaatccatagagatggggaatcttgtttctattgtggtgctacagatattaaattatttaaagaacatgttgcgcctcgcgcaacaggtggtaattcagttaataatctggtgttatcatgcctagcttgcaatacaaaaaaatctaataacccagttgatgatttc

SEQ ID NO: 1939 - DNA, 269 bp, unidentified
  misc_feature 1..269: note = Ga0133913_10206209 JGI
  source 1..269: mol_type = other DNA
gatgcaataataagttttgttaggatggtttttaaactatcttaatgttcaaccagactaagttattagatttatctaataactacgttatgaagaaaagttaaagacttacctatgggtgcttctccagcccgtagctctaagagtacagaactaaacaggggctaaatcgatggcaaccgtgggtgtacatgaacttctttataactttgtcgaggagaccgttactaggtgggagaccacatttacacaggattcacatgaacaga

SEQ ID NO: 1940 - DNA, 1350 bp, unidentified
  misc_feature 1..1350: note = Ga0265319_1000103 JGI
  source 1..1350: mol_type = other DNA
atgcagcagttaaaacagagaactaaaaagaacacacctacgaatgcttcacaagttcgtagcaactgtggtttactattaaacaaagaggaaactcttagtgtagtagactcaaaaacctgttttaacaatcccgatgtgaatcaagttcaacatacagaacggtcattaaaaccaactgtgtatgtaattaattataatggcaaaccactaatgccttgtagttatgctaaatctaaaagattagtgaaaaaaaatgctgcaagtgtaattaagttatacccgtttacaattaaacttaaatttgaatgtaaaaacaaggtacaaccagttacgttaggaattgatagtggttataacaacattggtttctcttgtactagtgaaaaatctgaattaatctctggaactcttgttttagatgataaaacatctaaaagattgacagagagaagaatgtatcgtagaaatagaagaaataaactatggtatagaaaaccaaaatttttaaatagaaagaagaaagaaggttggttagcaccatcaatccaaagaagatatgatactcatttatctttgattaaaaaattaaaatctatattacctatagcagaggtgattatggagaccgctaatttcgatatacaaaagatcgaaaatcctgaaataacaggaattgattaccaacaaggtaatatgtataattatcaaaatgttagaagttatttaatggctagagaaaagggattgtgtcagttatgtaataaagaatttacaaaaggtaactcaagtcatatacatcactgtaaaccaagaagcaaaaatggatcaaatagggcaaagaatcttgcattattacatgaaaaatgtcataccaaacttcataaacaaggattaaaactaaaacctgctaaaatttataaatcaaatacgtttatgtcaatcatccgtaagaggttttggaatgatatacttgatttgaaagttacttatggttacataacctttttaaaaaggcaagaatttggaataaataaaagtcataataacgatgcttttatcattgcaaatggatcaatacaagaaagaataaaatcaattaatattaaacaaaaacatagaaataatagagcaattcaattaaacagaaagggatttaaaccctctatacgcaaacaaagatatgcaatacaaccaaaggacttaatttggatatgtaacaaaagatatgttgttattggtatacaaaatagcggagcttatattaaggttgaaaattgcaagaaaattttacctgtaagccagattataaagatttataactttggaagtttaacatacaataattaa

SEQ ID NO: 1941 - DNA, 272 bp, unidentified
  misc_feature 1..272: note = Ga0265319_1000103 JGI
  source 1..272: mol_type = other DNA
gtcaatcgccctttagctaatgaagtaaggggcttgaaccgtaaggtttaagggtaacgggttgattagggggcaaaaaattaaaaaataatgcagcagttaaaacagagaactaaaaagaacacacctacgaatgcttcacaagttcgtagcaactgtggtttactattaaacaaagaggaaactcttagtgtagtagactcaaaaacctgttttaacaatcccgatgtgaatcaagttcaacatacagaacggtcattaaaaccaactgt

SEQ ID NO: 1942 - DNA, 1062 bp, unidentified
  misc_feature 1..1062: note = Ga0207156_10850 JGI
  source 1..1062: mol_type = other DNA
atggcagtatttgtattagacaaaaaacatcaacctttaatgccctgcactgagaaacgggcccggctattattaaaaaaaaggaaggctcggatccattctatgtatccttttacgattcgactgattaaccgaactgttcaggaaagtgtcctacaacctttgcgttgtaagatcgatccaggaagcaaagtgacaggtattgctattgtacgagaagacttcgaacaacaagtagttatctctcttgtagaattaactcatcgtggatcagtcattcgcgaagcattgcaagcacgtgcgggtaagcgaagacgaagacgttcttcactaagataccgctccccacgctttgcaaatagaactaaacccaacggatggctcccgccctctttgcgccatcgcatagagactgtgatgagctgggttcatcgattaaaagccagagcttgcattacagccattacatgcgagagggttagttttgatacacaaaaaatgacctctccagaaatacagaatgttgaatacagccaggggactcttttgggatacgaaattcgggagtatttgcttgaaagatggggacggaagtgtacttattgcaatgttcaaaatgtgcccttgcaaatcgaccacatagttcctaaaagttgtggaggctccaatcgcattgataatctcaccttagcctgcgcctcttgtaatcagaaaaaaagcaatctacctctcacaatatttaatcccaaactagcgcaaaagttaccttctataacacctctgcgagatgcagctgcagtaaatagcacacgtaatgccctatggcagcaactgatcaagcttttactcccttgtgaggcgggtactggagggcaaacaaaatataatcgcaatcgtttaggaatcccgaaaacacatgctttagatgctgcctgcacaggcaccacttttcagatccaaaattggcaaattcccactctacagatccgttgcaccggaaggggttcttaccaaagaactcgtacagatcgctttggctttcctcgaggatttcttctccgc

SEQ ID NO: 1943 - DNA, 279 bp, unidentified
  misc_feature 1..279: note = Ga0207156_10850 JGI
  source 1..279: mol_type = other DNA
gtcaactacctctccctaaagggagaagcttgaaagggaactaacaagcttggttgaccagggaaagcggtaaccaacccgctacgttataacaaggtttaagacccactccggagtgcttcctcagctccggactctggaagcagcggttgcagacaaccgattgggtaaggacgaaacggatcgctgcaaatcgccgtgttataacattcccgaggggagcaagccgaaaggctccgttacaaggcccgtaagggcattttttagagaattatggca

SEQ ID NO: 1944 - DNA, 984 bp, unidentified
  misc_feature 1..984: note = Ga0187869_10014458 JGI
  source 1..984: mol_type = other DNA
atgccatgccaccctgcaagagcaagggaacttgttcgtgcaggaaaggcaaagcgtcggttcaacaagggtctgttctacatcctcctcactaaaaggtcggacggattcaaacagccagtggcacttggaattgatacaggttcgaagtgggaaggtttcacggtcaaatcagaagcccatacttttgagaatctgaacgctgatgcagtcacgtgggtcaaagataaaatagagactcgcaggaatatgcgtcggtcacggcgtaatcgcaaaactccatatcgtcaatgccgttggaatcgttcaaccaaagcgaactacgacggattcagacttgcaccttcgacccatgcacgttgggattggaaactacgtctcgcaaagtggctcagcaagttgtatcccatctcgtgcttcgtcgtagaagacattaaagccgaaactaagaagggctgtaagaagtggaatacctcctttagtccgatagagaatggcaagaagtggttttatcaggaactcggaaagttagggcgtgtagaaaccaagcaaggctatgaaactttcgagatgcgaaatcagatgagtctcaagaaactaaaggacaagaagtccaagagtttctatgctcactgcgtagactcgtggactcttgccaactggtttgtcggtggacatacaaagcctgagtttgagcatgtcacttgcgtcactccgtttcagtggaagcgacgacaattgcacaaactccaaaagtctgctggtggtattcgaaagagggagggctctaccaatagtctcggattcaaacgaggcagtttggtcaagcatgtcaaggtaggcttggcttatgttggggggtttatcaaaaacagaatcagtctgcactccgttcagacaggcgaacgtttaggacaaaacttcaaaccagcagattgcaagtttcttgcccacagcagttggagggtttatgcaccagcataa

SEQ ID NO: 1945 - DNA, 240 bp, unidentified
  misc_feature 1..240: note = Ga0187869_10014458 JGI
  source 1..240: mol_type = other DNA
gtcaataccccacgcctaaaggcgggggcttgaaagtcaaaacctaaccagttctggcaatcaagttaaacgttgtctagacaagtctcgcaatcgaaagattggagcaacaagttgtctgtacgtggtagtacgggttatgtcgaggatgttccgctagtcttcgacctctaagacagcctgtgtcgaagcggttattagccgtccttcgggacgagaaaaacgtaggttaactttatg

SEQ ID NO: 1946 - DNA, 1527 bp, unidentified
  misc_feature 1..1527: note = Ga0207639_10055049 JGI
  source 1..1527: mol_type = other DNA
ttgcgttacgcatttgttttagacaaacatcaacagcctctcatgccctgccatccagccagggcaagacaattgttgtcccaaggcaaagcggctgtatttcgtttgcatccctttaccattattctcttggaaagagattctggggaatgttctggccttgatttgaaatacgatccaggcagcaaaacgacaggcgttgttttaaccgttgatcggaaaaaaacaggtccaacggtactttgggcggctgagttacatcatcgtggtcaagcgattatggaaaatttgcgtgctcgcttggccattcgtaggggaagacggcatcgaaaaactcggtatcgagcgcctcgtttccttaatcgttgtcgggcaacgggtaaattagcgccttccctgcaatctagagttgacaatgtgaacaacttaacgctgaaattaagacgaatcgctcccatccatcgtatttggttggaacgagtcaaatttgatacccaaaaactgcaatctccggaagttcatggcattgaatatcaacagggaaccttgtttggttatgaacttcgagaatatcttttggaaaaatggcaacgaaagtgcgcctattgcgatgtgactcaggttcctctggaaatagatcacatggttccccgcgctaagggtggcagtgatcgcgtctcgaatcttaccttagcctgtcggagctgcaaccaaaaaaagggtgcccaaatactcgacttttttctggctaaagaaccggcacgtctgaagaagctcaaaagcacagctcaagctcctctacgagatgctgctgccgtcaacaccacccgaaaagccttacaaaactgcctatctgccttacccataccggtcttgaccgctaccggtgctgaaaccaagtataaccgttgccaacaaggctatcccaaagcacattggattgatgccgcctgcgtgggcagccaagggtattcggtttttttaccgcctcaaattcgtcctctgcaaatccaggccatggggcgaggttcaaggcaaatgtgccgcgtgaataaagcaggcttccccagaacgagcgcaaaatcagccaaacgcgttcaaggttttcaaacaggagattgggtagttgctatggtgcctacaggaaaaaaagcaggtatgcacagaggccgagttgccgttcgggctactggaaatttcaatatcaagacctctttaggggttattcaaggggtatccgcccggtattgtcaggtccagcatcgactggatggatactattatcaatataccgctatagacgcgcttcctccccctgctgaagcagggggtctccgcgcgaggtcttatgaacgaggcgagctagctggctttgctggactccggcgctctacatcctcagcaacagaagccgcaggcggaatgagatccttgtcaggatttgaatcttgcatggcgtttgaatatccaggcaatacgggcctatcaaagcgtctctcttccagatcggcgattggttgcggctga

SEQ ID NO: 1947 - DNA, 345 bp, unidentified
  misc_feature 1..345: note = Ga0207639_10055049 JGI
  source 1..345: mol_type = other DNA
gtcaactacctcccgttaaagcgggaggcttgcagggaacctttggtaacccgtaagcctctgagttgaccagactcagtccctactctctttgattcttctgggtcagggcggtagggattaccttaaggcagaatctgctctgttcagagcagcgagataggtaccctgggatgcttctccagtcccaggttctacggtttagagttaaacaggcataagaggtggaagccagtgctctaaacaaaaacctgccattaagtttgtcgaggagaccgttacctgcgaaagcagagcgcctggtaacaggcacttttttagaaggagttaagcccattgcgttac

SEQ ID NO: 1948 - DNA, 1056 bp, unidentified
  misc_feature 1..1056: note = Ga0315282_10012226 JGI
  source 1..1056: mol_type = other DNA
atgcactaccgcaggaaaaggttcaacaaccgaaagcgatctaaaaactggcttgctccaacgctaaggagcaaaaaagatgctatagtcaatgctgtaaagcggatagcaaagatacttcccgtaaagaaagtaacgattgaaacagcttcttttgacactcaggcaataaaaacaggacataagataccgaactggttataccagaaaggtccgctatacgatgaagagaacataaaagcatacgtaaggaagagggatgattatacctgccaatattgtggccaagaccttcacggcaaacgttgtgaagtagaccacataaagccgaagtcaagaggcggcacagatgtacctgacaatatggtggcatcttgtgaagactgcaataaaagtaaggataatttgactctggacgaatgggtaaagttattggaggctcatccaacggaaatcaacaaaaagcgattaaggcgggtaccgaagataagagagcaggtaaaaatatcgctggtaggatccgcccatgtccaaagtatgaagaatgcattggttaaggaaataagcgaacattttccagttcaagagaccaacggtgttactactaaactgatgcgggaaagcataaacctacctaaaacacactgcaatgatgcgatagcgatagcattggacacgtctaaagaaatagtaccgcttgacctaatgtatcgaataaagcaggttaggaagaaaaatcgcagtcttcatgaagcaatacccaggaaagggaggggcaagcctaatagagaggccaagcgcaacaggaagaacataaaagagattgtgataaacaacaagaaatggtgcctatgggacaaagtatatataccacagaaaggtaagattggatatataatcggctttacaggcaagtgggtatatatccaggacataggcggtagatacatccaattatcatccaaatacaaacagatcaatccgaaagaggtaaaactgatatgcaggaacaacaattatgttatagaaaatatgtcgctttcatctctccaatga

SEQ ID NO: 1949 - DNA, 245 bp, unidentified
  misc_feature 1..245: note = Ga0315282_10012226 JGI
  source 1..245: mol_type = other DNA
gtcaactacccgcctctaaagaggcaggcttgaaaaagcctcaagttgactagcctcagccagggcagaaatgccatcgggctacgttatccgtgttatgatacctttagatgataccctagtctgaagctctatcacctataatccaaacagttccaggggtagggacagtgatatgggcatgtaagcatggataacattggcgaagggcaaataactcccgaaaggagatacactggatgtta

SEQ ID NO: 1950 - DNA, 1362 bp, unidentified
  misc_feature 1..1362: note = Ga0395714_000473 JGI
  source 1..1362: mol_type = other DNA
atgcagaagtttaaagtaaagttaaagaacgtacctacagatactccacaagtctgtagctctacaaattctgtattaaacaaagaccaaagtcttagtgtacaggataaagtactgactttaaacaacctcgatgtggatctactccaacataagggaggacagggcttgagagttcctgttattgcttatgtacttaatcaacggggtaattcgttgatgccttgctctgcaaggaaagcaagattacttctaaaaaggagagatgcccatgtcgtaaaaactaatccattttttgttattcagttaaatcgcgcaagtggagaacaagtccaagaatgttcacttggtatcgattcaggttctaagaatatcggattttcggttattacaaacaaaaaagaaattgacagtggtacattgattttagataataaaacatccgacagactcactgaacgcgcaatgtaccgaagaggacgtagaaataaattgtggtatcgtaaaccaagatttaataatagaaagatagagaaaggttggctaccaccgtctgcacagagaaagtttgatactcatattacattaataaataaacttaaaaagttattaccaatcaaaaatattacaattgaagttggtaattttgatattcaaaagatagaaaatccagatattgcaggtatacaatatcaacaaggttcaatgtttgaatatcaaaatatgagaagtttcttgttagcaagagaacaaggtaaatgtcaattgtgcaataaagagtttagtaaaggtaattcttcgcacattcaccatataatacaaaaaagtaaaggcggtactgatagggaaaagaatttagcattacttcacgaatcttgtcataaaaaattacataaaaaccgatcttttagtttgctgaaaaagaataaacaatataaagatacaacatttatgaatataattcgatggagatttagaaaaatatttcctgattgcaaattaacttatggtaatgaaacattcgttaaaagaaataatttgagattagaaaagactcattacaatgatgcctttgttatcgctggtggaaatagtcaaactaaagttcaacctattattttaaaacaaaaacataaaaataacagagttcttcaacttaatagaaaaggctttaaaccatcaataagaaggcagaggtattctattcaacccggagatataatttggataaaagataaaaaatatattgttaagggttgtcattgttatggaaaatggatcctttgtacaaataatattaaaaattttgattttagtattaaaaaagtagaaaatgtttttcatacacaatcaatctattaa

SEQ ID NO: 1951 - DNA, 268 bp, unidentified
  misc_feature 1..268: note = Ga0395714_000473 JGI
  source 1..268: mol_type = other DNA
gtcaactacctacttctaaagaagtaggcttgaatcgtgaggttcaacgtaagagttgattagagggcaaaggttaaatcttatgcagaagtttaaagtaaagttaaagaacgtacctacagatactccacaagtctgtagctctacaaattctgtattaaacaaagaccaaagtcttagtgtacaggataaagtactgactttaaacaacctcgatgtggatctactccaacataagggaggacagggcttgagagttcctgttatt

SEQ ID NO: 1952 - DNA, 1281 bp, unidentified
  misc_feature 1..1281: note = Ga0137369_10007808 JGI
  source 1..1281: mol_type = other DNA
gtggttttcgttctctcaagtgacggccagccgcttgacccgtgccacgaggcgcgggcgaggaagctgctggcagcgggagaagccgtcgagtatcgccgttatccctataccattcggctgctccaccgcagagcagccgaatcgacgacgcacccgcaccggctcaagctcgatccgggcagcaaaacgaccggcctcgccatcgtgcaagaggatcagccccgcgtggtgtgggctgccgaactcgcccatcgcggccagcagatacgcgatgcactcttggcccggcgggcgctccgccgcagccggagacaacgcaaaacgcgttaccggcctgcacggtttctcaaccggcggcgcaaagacggctggctccctccatcgcttctgcatcgagtgctgactacgctgacctgggcaagaaggctgcggcggttgtgtccgatcggtgccatcagcatggagttggtgcgcttcgacacccaggcgctccaaaatcctgaaatcgcaggagtggcataccagcgcggcacattattcggctgggaggtctggaattacctgctgatgaagtggggccatcgctgcgcctactgcggcgcgactaacatgcggctggagcaggagcacctgatcccccgcacccggggtggcagcgaccgcatcacgaacctcaccatcgcctgccggccctgcaacgagcgcaaaggcaacctgactgccatcgagttcggctttccgcagcttatggcccaggcgaagcggccgctcaaagatgtcgctgcggtgaacagcgcgcggtgggcactctatcagcgcctactagcgacggggctgcccgtcgaggtgggcactggcggcaggacgaagtggaatcgcgcccggctcggctgggacaagagccattggcgtgatgcggcagtggtgggagcgagtacgccggacacgctccacgtggcggtaggaagcgtgctgctcatcgccgctacaggccatggccgccgccagatgtgccggacaaacaagtatggcttccccacgcgccatgtaccgcgccggaaacgccaccttggcttcaaaacgggcgatctggtgcgtgcggtactcccgagcggaaagcacgtaggaacgcacgtcgggcgggtcgccattcgcagtacgggcaagttcaatattgctacgcctgctggattggtacaaggcatccaccaccgtcattgtcagatcatccagcgtgccgacgggtacgcctatggctatcgaaaggagagcgcgtaa

SEQ ID NO: 1953 - DNA, 274 bp, unidentified
  misc_feature 1..274: note = Ga0137369_10007808 JGI
  source 1..274: mol_type = other DNA
attgttgtcaggaaccgcacggctcttgccggcggcttgcgatccgtcgtaagcccgtcctgaccagccccagctcgggcaaccgagctacgcccgtcgagtcacgacacctccggctgcgcgggccaggccggagccctgtcgcctgtcagaacgttcgcctggggcaaaggcggcatctggcgggcgcgacaagctcgacgcgcatgggcgaggcccactctaaccgccgcaaggcgagatgcacccgtaaggggcaaaggtatcatttgtg

SEQ ID NO: 1954 - DNA, 972 bp, unidentified
  misc_feature 1..972: note = human gut metagenome genome assembly, contig: NODE_4586_length_3121_cov_1.805284, whole genome shotgun sequence WGS
  source 1..972: mol_type = other DNA
gtgtgtcttattgcaaacctcttattaacattggcgaaggtgtcatatacggctcgatatgtgccggcttaccgctttaagcatatcacaaaaaaggaggtgccttatatggtatatgtattagatatcgatggacagccacttatgccaacttcaaggcacggaaaagtaagaaggctgttgaatagtcatcttgctaaagtagtaaagcgttgtccatttacgatacagcttttatatcaaagtacaaaagaaacacagcctgtatctcttggtgtagacgcaggaagtagacatgttggtctgtctgctacaacagagcgggaagttgtctatcaggaagaacttgttcctcgcaatgatattgtaaaactgttatcagcaagacgagcattgcgccgttctcgaaggaatcgaaagacgagatacagaagggttagattcaacaatcgtgtgcattctaaacacaaaggatggctggctccatctgtagaagtcaagatacaggagcacatcacagccaccaagagaatctgtcaaattctgcctatatttgatattcatgtagaaacagcagaattcgatcttcagcgtctaaaagcgatggaagaaggaaggctacttcctgctggtacagattatcagcttggggaacagtacgatttctataacacaagacagtatgtgcttcatcgagatgaatatacttgtcagtgttgtggtacgcatgataacaatgtaaaactacatgtgcatcatgtcgaaagccgtcagacaggtggagaggcacctaacaatctgattacactttgtgagcactgtcataaatcgatacatgccgggaagatgatgctgccaaaaggcaagaaacgaggcaagtcctatcgtgatgctgcttttatgggtatcatgcgtaatactctgctagaacgtttaagaaaagaagtaaatgttccagtgacgatgacatat

SEQ ID NO: 1955 - DNA, 276 bp, unidentified
  misc_feature 1..276: note = human gut metagenome genome assembly, contig: NODE_4586_length_3121_cov_1.805284, whole genome shotgun sequence WGS
  source 1..276: mol_type = other DNA
gtcaactacccgccaatgaattggcaggcttgtaaaagcctaagttgactagcctaagtgttttgagcactacgttaagagagaatatatagttacccgtggatgtaacacctagtctgcggctctaagaagatacattaaaaagttctgtagggtaggaactgtgtgtgtcttattgcaaacctcttattaacattggcgaaggtgtcatatacggctcgatatgtgccggcttaccgctttaagcatatcacaaaaaaggaggtgccttatatg

SEQ ID NO: 1956 - DNA, 1467 bp, unidentified
  misc_feature 1..1467: note = human gut metagenome genome assembly, contig: NODE_15547_length_4308_cov_2.449800, whole genome shotgun sequence WGS
  source 1..1467: mol_type = other DNA
atggtacggctgtctgacgggaggcgtaagccggaaaggaaacttatggtagcagttgtcacgaacactgggaagcccctgatgccgaccagtacataccgggcacggaagctcttaaagggcggacgtgccgtgatctataaataccgtccttactttaccatcatgctcgtggaccgggcagaaggggaagtacaggatatcgagtacaagtctgataccggctccaaacatgccgggatcagtgcctgtacagagaaacaggaacttttaagcgaacagcgtgaccttccggataaggagccggaacaccacaaagaacagcagcgttaccgccgcgggagaaggaacaggaaacggtaccggaagccgaagttcgataaccggaagaagaaaccgcaggaaggccatgaaaaatggctggcaccgacaaacctccacaagctggagatccaggtaaacctgttcaaagacttctgccaggtagttccggtaacctctgcttactttgaaatgggaaagtttgatacccaggtactgaaagcagtcctggaaggaagaccaataccacagggtgaagattaccagagaggggagcagtacgggacggatacgttacgtgctgccgtcttcctcagggatgactacacctgcaggatctgcgggcggaccattaaggacggtgccatcctccatgtacaccatgtggggtactggatgcaggaccggaccaaccgccctgcaaaccttgccacggtatgtgagcagtgccatacgcctgcgaaccatggcaggaacgggatcctgtatggaaggaaacctgagcatgggactttaaaggatgcctcctatatgacatcggtccgctggatcatgctgaaggaattaaaggatgccgccccggaagtgagtatccatgttacctatggggtcaccacaaagaggaagcgccagggcctgcaccttccaaagagccatgtcaacgatgccttttccatggggcggttccatccaaagaaacgggcggatactgcttactggaagaagaccatccggcatgaccgttccctgcagaagttctatgatgccgtatacctggataccagggacggcagagagaaaaagggcagtgaactttccaacggaaggatcagccggaaccacaaaaaggacagtgagaacctgcataagtaccgcgggcacaaggtgtcaaaaggccatgtttccatccgcagggacgggaacaaactgaagcctggaagcgttgtcctctataacggggaaaggctgacggtacacggcactcatacatcctacaggaaaaataaaaagggcgaagaggtcaagaacgtcaatgtccagtttacaagaccggcatctgacggaaagaagtctgcttcactgaaaaaatgtaagatcgtaacaaggaactataacacgggctggaaacgataccggcctgcataa

SEQ ID NO: 1957 - DNA, 375 bp, unidentified
  misc_feature 1..375: note = human gut metagenome genome assembly, contig: NODE_15547_length_4308_cov_2.449800, whole genome shotgun sequence WGS
  source 1..375: mol_type = other DNA
gtcaattacccacggtcatatcctgacggaatggccggggcttgctgatggaaggtaactttttgccggatatctgccagcccggttgattactctaagccggtccggtaagtcttttttgatactgccgggtaacggctacgttacactggaatatacaggcaccaggggatctttcttcaagtccctgctctgcgggctgtctgttaaacatccctttttgggtacggggaagtgcgtcagccgccaaaaccctttgtaacattgaggttggagaacacttgctatgtaaagaagccgcaggacacaggcagctgggaggctgccgccgtacatggtacggctgtctgacgggaggcgtaagccggaaaggaa

SEQ ID NO: 1958 - DNA, 1224 bp, Succinivibrio dextrinosolvens
  source 1..1224: mol_type = other DNA
atggtttatgttttaaattgcgaaggtgtaccaatcatgccgactactcggcacggtatggtaagacgtttgctcaaagaacataaagcaaaggtagttaaaagatgtccatttacaattcagcttagatatgagtgtgcaaacattacccaatctatcacacttggtgtagacacgggatatgaaaatgttggtatttctgcatgtactgagaaaaaggttctttttgaagctaaagctaaaatcagaactgatatggtaaagctcttgtctacaagaagagaaacaagacgtactcgtagatcaagaaaaacaagatatcgcaaagctcgtttttttaaccgaagtattgaaaaaggttggctacctccatctatcagagctaaagtagaatctcatttaagattagttgcaaaggttcacgaaattttgcctatagacaaaattgtcgtagagattgcaagttttgacattcagaaaatcaaaaatcctgatatcaaaagtgctgagtatcagcaaggtgatcaattaggattcaagaatatgaaagcttatgtcttatgtagagatagatgtacttgtagatgttgcaaaggtaagtctaaagacaaaattttgcgagttcaccatcttgaatcaagacttataggtggtgatgctcctaacaatctcgtgactttgtgcaattcgtgtcacacgaaatttcacaaaggtttgatttctttagatgacattaaaagaggaaaatctttcaaagctgaaactttcatgggattgatgcgaaatttctttttcaaagaactttgcgataaatatccatgtgttaaatgcacctatggttacataaccaagcatttaagagagaaatatcatttaaagaaagatcatcatgccgatgctcggtgcatttgcggtacaccgcaagctttaccaagtgatgtctatctgatgaaaaaggtaagatgtcataatcgacagactcataagtttactaccttaaaaggaggtcgaagaaagttgaatcaagcaccgtatacggtaaaaggtttcaggcttttcgacaaggttaaagttggcgatcaaattggatttatttttggaagaagaacaagtggacagtttgatatacgcaccgtatacggtgaacgtatcaatggatcaataagttataaaagacttcaattgattgaaactagaaaaagttggttaattgaaaaatgttaa

SEQ ID NO: 1959 - DNA, 359 bp, Succinivibrio dextrinosolvens
  source 1..359: mol_type = other DNA
ctctgcagacagtattgatgatattttcattatagatatcatgagagagaatattaaaaagctctgatgtagatgagtattgatatacggaatctgcaactaaagcttagtctcagcaaaatttactttcaaaagtagattaagctacgttatgaaagaatagataacaatctaaatagttacgtcagaatgttctacctagttctgacctctaaggtctatgattaaacagttttcattgaaaacagagttgtagacaacaaacctttcaataacattgacgaaggtagcattttacagttttgcaggatctggcttacagcaaaaaaactgcaactttttaaaggaattaaattatg

SEQ ID NO: 1960 - DNA, 948 bp, unidentified
  misc_feature 1..948: note = Ga0311329_10041539 JGI
  source 1..948: mol_type = other DNA
atgccgtgtactccgaagcgagcgcgcaagctgctcgaagcgggtcgtgcacgcgtacatcagctgattccgtttgctattcgactcactgaccgtgttgcacaaacatctaactttcagcccttaaaaataaagctggacccaggtagtaaggcatcaggattagccgtttgtcgtgtgtcagaaaaaacggatggcgacggtgttgttcaaccgacgatgcatatcctgtttttaatggaactggtgcaccgaggcgcagcaattaaaaaatcattgcaggctcgagcagcaatgcgtggacgtcgtaggggtaatctgcgctatcgcgcgccgcggttcaataaccgcacgaaatcgaaaggatggctgccgccttcccttcaacatcgggttgacaccttatcttcttgggttaaccgaataggcaggttggcgcccattactcatctagcccaagaactggtgcgattcgatatgcaactgatgcaaaacgccgaaatatccggagtggcctaccaacaaggcgagctggcaggctacgaagtacgcgaatacctgctagctaaattcaaccgaacttgtgcctattgcgatgcaacggaggtaccgctgcagatagagcatatccaagcaaaagcaaacgcagggtctaatcgggtcagtaacttaacgctcgcctgcaagaagtgtaatcaggcaaaaggttccttggatattcggacctttttagccaaagacccggcacgtctggcgcgaatactaaagcaggttaaagcaccgttacgagacgccgcggccgtaaatgcaacgcgctgggccgtctttaacatgctaaaacaaaccggtcttccggtcgaaaccggcagcggcggtcaaactaaatacaatcgcactcgcttaggcgtgattaaaacgcatgctttggatgcggcttgtgtgggacaa

SEQ ID NO: 1961 - DNA, 376 bp, unidentified
  misc_feature 1..376: note = Ga0311329_10041539 JGI
  source 1..376: mol_type = other DNA
gtcaactaccccgccctaaaggatggagcttgaaaagcgaaagccgattaagctcaggttgacccgagaaaggattgagtaacggaagttactgagtactacgttgtaagtaggtacaaaaccgacgccgggatgcttttccagttccggatagaaattcgtaagagtttccttcgaagttgcggtagcagacaagctacagggtatgcacgaaacggaccgcaacaaaacagcaaggtatcgctgttgaagccggcttacaacattctcaaggaaagcgggaccggaaggtctccgtcacaaggcgcgtaagcgcactgttttaccaataagaagtgattttacttaacgaaagaaagaacgcaattacgtgaaa

SEQ ID NO: 1962 - DNA, 1272 bp, unidentified
  misc_feature 1..1272: note = Ga0210051_1023303 JGI
  source 1..1272: mol_type = other DNA
atgaaaaatacacaacagaagttaggaaagagaaatacatacacacctacaaatacttcacaagtttgtagctctgtggttgtgtctttaaacagagaggaaactctcagtgagcatggcttaaaaacctttccaaacagcctcgatgtgaacaaacagtctggcaagactggacaggatttgagaattcctgttttaaatatacgtggaaaacctttgatgccaacaacaccagcaaaagcaaggcatttgttagaacaaagaaaagcaaaagtaatcaaaagaaaaccatttgttatacaattgacaatagcaacgggagagactaagcaaaagattacattaggaatagatagcggatatagtcaagtaggattcagcgcaaagacagaaaaagaagaattgatattaggagaactaactttaagaaaagatgtatccaaaaagttagaagaaagaaaaaggtatagaaaacagaagagaaataagttatggtacagagaagcaagatttgataaccgagtaatttcaaaagaattgttagcaccaagcatacagcacaaattggatacacatgttagattgattgaaaaaatcaaaagtttacttccaatcacaaaaacaataattgaaatagccaactttgatacacagaagatgcagaatccagaaatatcaggaataaaatatcaacaaggtgaattacaagggtatcatatacgagaatatcttttagacaagtttggcaggaaatgtgcttattgcaatcaaaagggtgttcctttagaggttgaacatattattccaaaatcaaaaggaggaagtaacagagcatctaaccttacaatctcatgcagtaaatgcaatttagaaaaaggtacattaacagtagaagagtttggtttccataacattcaaaaattagcaaaacaatccttaaaagcaacagcatttatgaatgttgtaaggaagagactgactaggcaggtaaatgcagatgaaacatttggctatatcacaaaatatagaaggattagatataacttaaacaaaagtcatgtcaacgatgcttttgtgattgctgagggaagtaatcaggcaagatgtcaaccatccattgtaacacaaataagaaggaataatagatgtttacaaatgaatagggatggatacaaaccatcaataagaatacagagatacaaattacaacctaatgatttagtaagatataatggtcaatcacaaaaaatcaaaggagtattcaattatgga

SEQ ID NO: 1963 - DNA, 279 bp, unidentified; identical to SEQ ID NO: 1486
  misc_feature 1..279: note = Ga0210051_1023303 JGI
  source 1..279: mol_type = other DNA

SEQ ID NO: 1964 - DNA, 1257 bp, unidentified
  misc_feature 1..1257: note = Ga0307377_10002004 JGI
  source 1..1257: mol_type = other DNA
atggcgacaacagcaagaagggcaaggttacttttaaaagaaggcaaggcaacagtaatcaaccgtacaccatttattatacgtttacttattgctacaggagaaacaaagcaaccaataatattaggtgtagatgcaggtagcaagacaattggattatcagctactatagaaaacgaagaactgttctctgcagaggttcagctaaggactgatattgtagaattattatctacaagaatggaaaacaggtgtaccagaagggctagattgaggcatagggaaccaagatttttaaatcgagttaagggtaaaaataagggttggcttgcaccgagtatagagaacaggattcagacacacctaaaaatggtggatagagtatgtagtattcttccaatatcaaagattattgttgaaacagcatcctttgatatacagaagattaagaatccagttatcgaaggtactggataccagcaaggagagcaactagacttttggaatgttcgtgagtatgttctgtttagggatagacaccaacgtaagggtaaaaagggatgcaagtgtaaaattctcaatgtgcatcacattgagagccgtaaaactggtggagatgcaccaaataacttgattaccttatgtgaggattgccatgacgattatcacaatggcaagttgaaattaaacatcaagcgtggtaattcatttagggatgttgctttcatgggtattatgcgttgggcattttataacagacttaaagagaaatattccaatgtacaaaacacatttggatatataacgaaaaacacacgcataactaacaatttaccaaaagagcatagaatagatgctttgtgtataacgagtaatcctttggtaataaggtgtagcgattggtatttgttaaaacaagtacggaaacacaatcgccagatacacaagtcaaatattctcaggggcggagtaaagaaactcaatcaagcaccatacctagttaagggttttagattatttgacaaggtgaattacaaaaatcaagaatgctttatctttggtagaagagctacgggctatttcgacttgcgtaagttagacggtacagttattcacagaagtgcaagctataaagatttagaattattagaaataagaaaaagtctattaacagaaaggaggaagcaggagcaaggaatgagtgagcattcctccacgaacctaaaagtatcgtggtttcctgccaagtttttatga

SEQ ID NO: 1965 - DNA, 239 bp, unidentified
  misc_feature 1..239: note = Ga0307377_10002004 JGI
  source 1..239: mol_type = other DNA
gtcaattaccactaccctaaagggatagtggcttgtaggaaactacaaaccataagttgactagactaagcgaaagctacgttatataagccatcatacccgtggatgtaaatcttagtctgcggctctatggtttaacattaaacaatcctgtgtggtaggggtcgtgtgttgagcataacaaacttatataacattgtctaaggattataactctgtaaggaggacgtaacttgaga

SEQ ID NO: 1966 - DNA, 1104 bp, unidentified
  misc_feature 1..1104: note = Ga0182238_1001861 JGI
  source 1..1104: mol_type = other DNA
atgcaacatcaaagagtctttgttctggacacgaaccgtaaaccgctcatgccctgtcatccggccagggcacggcggctgctaaagacaggccgtgcatcggtgtttcgtaaaacacccttcaccatcatcattcatgacagggacggaggcgaaacccaggacacagaactgcggatagatcccggttccaaggctaccggttgtgctttggtggtcagcggccacaacggggaccgggctgtggccgggatcgagattgggcacagaagccagcaaataaagcagaacctggaaaaacgccggggtgtgcgtagaagtaggcgcaaccgcaaaactcggtatcgtgccccacgctttaacaaccggcttcgcccaaagaactggtttccgcctagccttcaaagccgggtggagcatgtgcggacctgggcgaatcgtttctgcaaattatctccggtatcgagcattgccgtggagacggtgcgctttgatacacagaagatgcaaaacccggaaatatccggggtggagtatcagcaaggggagcttttcggctacgaggtccgggagtaccttttggagaagtggggacgaaaatgcgcctattgcggcaaggaaaatacacctttggaggtagagcacattgtgcccaagtccaggggcgggagtaaccgggtgtccaacctcaccctgtcctgcacggactgcaaccaagacaaagggaacaggactgcggctgagtacggtttccccaagatccaggcccaggccaaagctcccctgcgggacgctgcggcggtaaacgctacccggtacgccatcgggaatatgctaaaaggtttgggcctcccggtatccttttggtctggaggtaggactaagaagaatcggatcgggcagggatttgagaaggcccattggatagatgccgcttgcgtagggaagaaagggggaacggtctatattccaaggataattcctcttgtggccaaagctatggggcatgggagtaggcagttttgtcgggtggaaggcatatcctggaagtattgttctattttgcagcaagcagacgggtataccttttccttcccggcctga

SEQ ID NO: 1967 - DNA, 265 bp, unidentified
  misc_feature 1..265: note = Ga0182238_1001861 JGI
  source 1..265: mol_type = other DNA
gtcatctaccccgccctaaagggcggagcttgtaagctctgaagatgaccagccttagtcacattaaaagtgtgactacgttgggagcgaatatataggcactccgggatgccccgctagtcccggacactgcggcaaacggttaaacaggcatacggggttgaagccagtgccgtttgcaataaaccgctctacaacattggcgaagcggacgtaaccggcctttgagccgagaaaactaaggtaactcatgcaacatcaaaga

SEQ ID NO: 1968 - DNA, 702 bp, unidentified
  misc_feature 1..702: note = human gut metagenome genome assembly, contig: NODE_3471_length_5924_cov_5.665020, whole genome shotgun sequence WGS
  source 1..702: mol_type = other DNA
atgtcaacaacagttttcgtattggacaagaagcaccggcccctgatgccgtgccgcccggcaagggcgagacggcttctgcgggcgggccgcgcacgggtggtgaagcgcttccccttcgtcatccggctcgtggaccgcactgtggagcagtccgaggttcaacccgtgctcatcaagctcgatcccggctcaagggagacgggcgccgccgtcgtgcgggatgacgggaagaagcggcatcatgcgctcgcgttcttcgtcatcaagcatcggggcggcgccatccgcgacgcgctcaaggcgcgaagcgcatttcgtcgccgccgcaggtcgcagaatttccgctgtcggtcgccgcgctttctgaaccgcgtcaagcccaaggggtggctcccgccttctctgcggcaccgcgtggaaacgaccctttcgttcgtgaggaggatgtgccggtacctgccggtaagcggcatcgcgacggagttggtgaagttcgattcgcaaaagctccagaacccggaggtctcgggggtcaagtatcagcagggcacgctctttgagtatgaggtgcgcgaataccttcttgagaagttcggccggaagtgcgtctattgcggcgccgaaggcgtgccgctcaacatcgaccatgtggttccccgcgccaagggcggctccaaccgggtctccaacttggtgctc

SEQ ID NO: 1969 - DNA, 293 bp, unidentified
  misc_feature 1..293: note = human gut metagenome genome assembly, contig: NODE_3471_length_5924_cov_5.665020, whole genome shotgun sequence WGS
  source 1..293: mol_type = other DNA
gtcaactaccccggcctaaaggccgaggcttgtgaaagcaggtctggttgaccagcctaagtttttcgagaactacgttgcagacaggttcaagacccacctcggaatgcttcctcagttccgagctctggaagcctcagaagcagacaagcattgggtacgcacgaaacggtctgaggcaaaatgccggtctgttcaacattggcgaggggaattgctccgcccgcaagggcggagcatgtcacgggcatcagcccgaagaatcgtaaggttcatttttcatgtcaacaaca

SEQ ID NO: 1970 - DNA, 1101 bp, Richelia sp.
  source 1..1101: isolate = UBA3308; mol_type = other DNA
atgcgtgtacctgtaattaactacgacagcgagccgttaatgcctaccaaacgaagtcgcgctcgacgttggataaaagaaggtaaagctataggcaaatggtctaaactaggcattttctacattcaattattaacacccgctagtggggataaagcccaagatattgctgttggaatcgacccaggcaaacaatttaccgggatcgcagttttatctcacaaaagcactttactgactattcacgttgatttaccctttaaaaatataactaaaagaatggctcaacgtgccatgatgcgacgttgtagaagaggtagaagaattaacaaaaaaataccctttaaccaacgtagtcatcgtcaaactagattcgataaccgtagacagaaaaaattacccccaagcataaacgcgaataaacaactagaaagacgaatactaggattaataattaagttatttccagtatcaaaggttgtttacgaagttgtaaaagcgtcggggaacaaagggtttagtccggtcatggtaggtcaaatagaccaatgcaaaaaattaagtaagcttgattatttatttgatttcaaaactcttcaaggttacgaaacttatcaaatccgcgaacacttaaagcttgaaaaagagaaaagtgataagtctttaaaaattcctcaaacccatgctgtagatggaattgccttagctgcttctaactggatgaattacggaattgttgacaataattcgatgggatggcgaggagagataaccttaactgattcaatatttctggttatttctagacctcctatcagtcgtagacagttacatttaatggttccaaacaaaggaggtaaaagacgtaaatatggtggtagtgttacacagcacggatatcgtaaaggtgataatgtcgaagctgttaaagctaataaaacttaccgtggatgggtaagtggagatactaatacccaagtttctgttagtaatgcaaactggaaacggcttggacagttctctaaaaataaagtgcgattaattcgacgttctactggtttaatcatcacatctcgaaaatatctagctaaaggcacttaa

SEQ ID NO: 1971 - DNA, 214 bp, Richelia sp.
  source 1..214: isolate = UBA3308; mol_type = other DNA
gtcagtaactcccggctaaaagccgggagcttgcaagaaccaaattttgcgtgtctgactagcccgtgagccatcaatcggtaaagacttccggatgcttccccagtccggattatctctaaaactgtttggtcagttgcttgtagaaaggacatcttattgatggtgggcgaggggacttaaactttacacgaaggattatctctttatgcgt

SEQ ID NO: 1972 - DNA, 1344 bp, unidentified
  misc_feature 1..1344: note = Ga0119972_1000501 JGI
  source 1..1344: mol_type = other DNA
atgtctaactttgtatttgttttagataccaataaacaacctctagaaccctgttcgccaacaatagctaaaaagctactaaaagcaggtaaagctgctgtattcagacagtatccgtttacaatcattcttaagaaagtagtagatggaaaggatgtccaacaatgtcaacttaaactagatccaggttctaagactactggaatagcaatacttcaaggaaataaactaatctgggcagcagaacttactcatcgaggtcaacaaattaaagacgaccttgaatcccgtcgatctttaagacgtggacgcagaggaagaaaaactagatatagacaaccccgatttctgaatcgaaccagagccaagggttggttgccaccaagtttagaacatcgcgttttaacttgccagacttgggttgaacgattgattaggctctgtcccattagctctatagctatggaattagttaggtttgatactcaaaagatgcagaaccctgaaatgtcaggcactgaatatcaacaaggtactctttatcaatacgaagtacgagaatatttactagaaaaatttaaccgaacctgtgcttattgtggggcaaaaaatacacctttagaagtagaacatattgttgccttatctaaaggtgggtctaaccgagtatctaacctaactattgcttgtgtaccttgtaaccaatctaaatctaatcttgatattaaaaagtttctagccgacaaaccatcagttctcaaaaaggttttagctacagctaaagccccgcttaaagatgctgctgcggttaattcaacacgctggaaattgtttaatagcttaaaagaaactggtttaccaataattactggtacaggtagtcagactaagttcaaccgaactcaacaaggactcaaaaaaactcattgggtagatgctgcttgcgtcgggaatactccaaaacttgaaatattaaccagtctaccattacgggttcaatgcgctggttatggtaacagacaagtaatccatgttgataaatatggttttcctagaagaagcaaatctggaagtttggtcagaaaatctgctcgagttaaacaagttaaaggtttccagactggagatatcgtcaaagcagtggttatcaaaggcaagaaaatcggttcttatttgggcaaagtagctgttcgctcaagtggttcatttaatatcaaaactgtttcagaaacagtacaaggcattagttacaaatactgtaaacaaattcatcgtaaagatggctatgtttatgggtttcacggacagttaaaactgtcccacgattgttcctccgcgctttaa

SEQ ID NO: 1973 - DNA, 269 bp, unidentified
  misc_feature 1..269: note = Ga0119972_1000501 JGI
  source 1..269: mol_type = other DNA
gtcagaaatctcgtagaaagtaactccgctttaaaaagacggagcttgcaaacctagtatctgaccagtcctagtctttcacagactacgttaacggcaagagttaaagacctaccttggagtgcgtgccagctcgaagctcctagaaccaaaaagttaaacagacttatcgagattaaatcagtgctttttggatagtaccgaccgttaacttggacgaggcaaacattatcctttattggagaaaagacgcaaaaatgtctaacttt

SEQ ID NO: 1974 - DNA, 1392 bp, unidentified
  misc_feature 1..1392: note = SL_8KL_010_SEDDRAFT_10003558 JGI
  source 1..1392: mol_type = other DNA
atgtttaaaaaaacgttacaagtaaagttaaagaacacacttcaggatgctccactagtcctgaaccctgtaagttctgtattaaacagagaggaaactctcagtgtacaggacaaagtactggcttgtaacagtcccgaagtggatctactccaacatacaggagatcagaacttgagagtctctgatactgtgtatgtattaaacataaaaggatttcccttgatgcctactttttgtagaaaagccagactactgttaaaaacagggaaagcagtagttgtcagtagattcccttttactatacagttaacgtatcagacaggagaaaataaacaagaaattactttaggagttgatcctggatacaagaatgtaggattttcttgtattacagaaacaaaagagttgatttgtggaacagttgagttagataataatacttcaggcagattgacagaacgtagttcttacagaagaaacagacggaacaaattgaggtatcgtgaacctagatttaacaatagaataaggaagttgggatggcttcccccttcagtagaaagaagatatcaaactcatttgtctatagtgaataagttaagaaaaatattacctattcataagattattgttgaatcttgtaattttgatatacagaaacttaataatcctgaaattaaaggaaaagagtatcaagaagggaatctgttaggctattttaattctaaatcatatattttatcaagggagaatcattgttgtcagttgtgtggtaaatctgattctaaaacagatagttggagactgcatcacattattgagaggtctaaaggtggaaccgataaaccagataacttagctttgttacataaatcttgtcataaaagactacataaacaaggtttaaaacttaagaagaataaacaatataaagattctacttttatgaatattattaagaatagattacaaaaagaattaaattgtgatacaacttttggatatattacgcattttaaaagaaatgagttagaactagaaaaaactcattttaatgatgcttttattatagcaggtggaatttgtcagaaaagaatttctgattgttttgtagttcaaaaaaggaaaaataatagaagtatccagttaaacaggaaaggttttaaaccttcaattaggaaacagcgatataagttacaacctaaagatttagtaaaagttttagataggatttttgaagtagttggaacacattgtagaggtaaaaatgttgtgttaaaaaataatggaaagaatgttagtatttctattaagaagataagttggtattttaatgttaaaactttaatttggaatatgggaggaagtgtcaattcctctccctgctaa

SEQ ID NO: 1975 - DNA, 271 bp, unidentified
  misc_feature 1..271: note = SL_8KL_010_SEDDRAFT_10003558 JGI
  source 1..271: mol_type = other DNA
gtcaactacctgaagctaaagcattcaggcttgaatagtgatattcaacgtaagagttgattagggaaaattttaaattatgtttaaaaaaacgttacaagtaaagttaaagaacacacttcaggatgctccactagtcctgaaccctgtaagttctgtattaaacagagaggaaactctcagtgtacaggacaaagtactggcttgtaacagtcccgaagtggatctactccaacatacaggagatcagaacttgagagtctctgatact

SEQ ID NO: 1976 - DNA, 822 bp, unidentified
  misc_feature 1..822: note = Ga0255345_1030292 JGI
  source 1..822: mol_type = other DNA
atggtatatgtaattagcatcactggtaaagtattaatgccaacgtcaaatgcgaaagctagaatattactcaaacaaggtaaagcaaaagtggttacgattagaccgtttactattcaattgacctataagacgacggaatatacgcaaccaataacattggggattgatagcggttatttgaatattggtttcagtgcggtcactgaaaagaaagaattgattggtggtgaagttaaacttcttcaaaacatgagtcaacgaattcaagatagagctatgtatagaaccactcgaagacagaggttgagatatcgtaaaccacgtttcaataataggaaaaaagaaaaaggttggttagcaccaagcattcaacacaaattgaatagccacattagatttgttgagaagttgaagaaaattttgcctatcacgaaagtgatagttgaagtagcaagttttgatattcagaaaattatgaatccagatattcaaggtaaagaatatcaacaaggtgagcaactaggttattataatgttagagaatatgtatttcatagagacaatcacacatgtcagaatccgaattgtaagaataaagatgtggaaaagtatcttcaaacacatcacattgtatttagaagtaatggaggaacagatagacctaataatttaattactctttgttcacaatgccacacaccagaaaatcatttagaaggcgagtttttatataagtggcaaacagaaaagcctaaacttcgtgattttaaagaagctacatttatgtctattgtaagatggcgtttggttgatttgttg

SEQ ID NO: 1977 - DNA, 258 bp, unidentified
  misc_feature 1..258: note = Ga0255345_1030292 JGI
  source 1..258: mol_type = other DNA
atcaatagccaactatcctaaagggtagaggtttgtaggggaactacaagctggttgattagcctaagtcttaagtgactacgttatgtgagaatgatatagttaccttggaatgcttcactagttccaagctctaagggtagtgattaaacatctctaatggcaggagaagtgttgctgctaaaaacctcatataacattggcgaagtgaacctaccaccgtaaggtgcgttatatccgaaaggattgatttctatg

SEQ ID NO: 1978 - DNA, 1290 bp, unidentified
  misc_feature 1..1290: note = Ga0172372_10005216 JGI
  source 1..1290: mol_type = other DNA
atgactactaattcagtgttcgttttggacactaccaaaaaaccgcttacgccatgctcaccggcacgggcgcgggcattattaagggatggcaaagccgcggtttggcgtaccgcgcctttcacccttattttgaaggttgccatgcccgatgctgtcgtaaaaccgataaccgttaagatcgaccctggcagcaagcaaacaggtttggcgcttgttgatgctgatggccgtgttgtgtttgcagcggtacttgagcatcgtggcaaagccatcaaagcaggacttgagtcccgcaggtcgcttcgccgtggccgtcgcggacgtaacactcgttatcgtgcggcacggtttaacaatcgcattcgtcctgaaggctggttgccaccgagtttgcatcaccgtgtcgaaaccacattgacatgggttaatcgtttcagacgttggtgcggcgttgagaaaatttctgtcgagcgggttaaatttgacatgcaattgatgcgtaaccctgaaatatcaggcgtcgaatatcaacaaggcacgctagccggatatagttgcagagcgtatttgctggaaaaatggcagcgcaaatgtgcttattgcggtgctgaacacgttcccttgcaggttgagcatatccattctaaagccaaaggcggcggcaatgcggtttctaacctggcgttggcttgcgatccttgcaacaagaaaaaaggcacactggatataaccgttttcctgaaaaataaacctgaacaacttaagaaaatcctgtctcaagcgaaacgatcgttaagcgatgcggcgacggttaatgcaacacgtaataagttgtttgtcgaactgctgaacaccggcttacccgttgaagccggaaccggcgcacaaacccaattcaaccgaacccggcgggagtatccgaaggcgcattggatcgacgcggcttgtgtgggtaaatccggagcaactgttacgcttgatcctgatatgaagccgctgcttattaaagccaccggacacggaacacggcaggtggtgcgaactgataaatatggcttccctcgcaataaggccggacgagtcaaacggattcatggctttcaaacaggtgatctggttaagctcaagcaaccgaaaggcaaatacgcgggtgatcatattggacgcttagcgggcattcgcgctacggggcaattcgatattgctgctacggttggtaagataacagcaaaattcagcaatttcacactcattcaaagaggtgatggctatgcttacgcacactga

SEQ ID NO: 1979 - DNA, 320 bp, unidentified
  misc_feature 1..320: note = Ga0172372_10005216 JGI
  source 1..320: mol_type = other DNA
ttgtctaaattcgattcatcagttgagtgtccggcttgactgatttcaagcgcacgtcctgtgcgctcttatcagtcatttttgtcagtgtgcttacgcctactgatgatgctcaaccaggctcggtctctccaaagagactacgttatttaggtcatgacacctgcaaatgcttcaccagtttgcagctctgtcgttaaccattaaacagcacagaccggaacaatgggcagtgtgattaacatgacaagcctttataactttgccgaggtgacaattacgggtgaaagcccaggagaagttttatgactactaattca

SEQ ID NO: 1980 - DNA, 1020 bp, unidentified
  misc_feature 1..1020: note = Ga0334826_004099 JGI
  source 1..1020: mol_type = other DNA
atgatgatgttagtaggtgttgtatataatggaagtgctttgatgccttgttgccctgcaagggcaagaagactcattgcgtccagaaaagcaacacctttcatccataaaggtgtgttctgtatcaggttgaatcagtcaccttctgataataaaatacaacctatatcaatcggggtagaccccggatcaaagaaagaagggatatcaatagtaactgaaaagaaaactgtaattaacattcagttggatgctgtcacttgggttaaggatggtgtagaatcacgaagaaatgctcgcagagcgagaagatttcgtaaaaccccttgtaggaagccaacatcagataattatactcgtgataattggttgcctcctagcacaaaggctcggtggcaatccaaattgaatttgattcgttcgttacatcagatatttcctatgtccatatgtgtagtcgaggatatttgtgctgtcacaaaagaaggacaacctaaatggaataaatctttcagtccaatagaagttggtaaatcatggctttatacacaacttcaaaccgaaggtttcagtgtcgtgttaaagaaaggatttgaaacatccgagttgcgtaaacgactcggactgcataagtccactgataagttatctgataaatgggatgctcattgtgtcgatagttgggtactagctgcatctgcgatgcaaacactcccgttaattgacaagagcatgatattaatcaaaccaatgcaatttcatcgtagacaattgcatgcattccaacccgccaaaggcggggttagaagactatatggatctactagatcaatgggatttcgtagaggatcaatcgtatcacatcctaaattcggaatcgccaccataggtggcaattccaaaaataaattaagtctacactctataaaaacaggtaaaaggttaactcaaaatgctaacatcaaagatgttaaattcaaatcattcaacaattacaacgttttcactccccgaagctaa

SEQ ID NO: 1981 - DNA, 284 bp, unidentified
  misc_feature 1..284: note = Ga0334826_004099 JGI
  source 1..284: mol_type = other DNA
gtcaatcacccctgaactgaaagattcaggggcttgcgactgggaagattagtcatctttgtaaaagaagcgagatatattgaactgattgaactagcctatgcgagttttgttccgcaaggaacaaaatatagcaaactgaattatctatccgtgacagggtaagacatctactggtgctcgtctagctggtagctctgtgatggtcagtggcgaagatgtatatataccccagtaatgggagtgcccttacgggcaaattttagaaaggaatgatgatgtta

SEQ ID NO: 1982 - DNA, 1287 bp, unidentified
  misc_feature 1..1287: note = Ga0310786_10002951 JGI
  source 1..1287: mol_type = other DNA
atggtctatgtactgaacagatacggtaaacctctgatgcctaccacccggtacggcagggtccgccgtctgctcaggaaaggactcgcggtcgttgtcgattaccgtccattcacaatccagcttacttacgacacgccgaacggcgtgcaggaggtcagtctaggcgtagacgcgggaaccaagcacgttggtctctccgccactaccaagaagaaggtgctattcgaagcagaattacttttaaggtcggatatcgtggataagatctccacgcgaagggagttccgtcggaccagaaggaacaggaagactcgctaccgcaagtccaggttcctgaacagggcccgctccaagaagccgggatggcttgcaccttccgtacggcagaaggttgattctcacatctactggatttcgaagatacgcaaattcttgcctatcaagaagataaccgtggaaaccgcgcagtttgatacccagctgatgaaggctcaggaacaggggcttccgttgccacagggcaccgactaccagaagggtgaacagctcggattctggaatgtgcgtgaatacgtgctgttccgggacggccataaatgccagtgctgcaaggggaagtccaaggacagtaaattgcatgtccaccatatcgagagtcggaagacaggcggcgatgcgccgaacaacctcatcaccctgtgctcgaaatgccatgagaagtaccatcttggagaaatcgaactgccgaagaccgcaaagcgtggtacctcgctgcgtgacgcggcacagatgggtatcatgcggaagtccctattcatccggctgaaggaagaaattggaaacgaaattccttgctacgagacgtacggatacatcaccaagaatattcgcaccacggcaggcctaccgaaggaacatgtgaatgatgcccactgcatcagcggcaatcccggtgcatgttctgatggcaagtacttgatcatccgcaagttgcgtgcgaacaacaggcaactgcaccgtgcaaccattatgccgggcggaaagcggagaaacaaccagtcaccccgtgaagtaaggggcttccggctgatggattccgtcaggtatgcatacagggagtgctttctgagcggacgtaggatgtcaggctcgttttccgttgcggatatcaccggaaaagttctggcagattcggtcagttacaagaagctgacattaagacatcacaacaacacttacattatggaggaagcagcgctcctctcacccactaaagatgggtga

SEQ ID NO: 1983 - DNA, 294 bp, unidentified
  misc_feature 1..294: note = Ga0310786_10002951 JGI
  source 1..294: mol_type = other DNA
atcaactacccacgggctaaagacccgtgagtttggggtaactcaggctcatagttgattagactcagtgatgcaagtagaaatacttgctgaactacgttaggaaggtcacggcaccctgggatgtacggtcaagtcccccgccctgccgagcgtcattaaacagtcctgatgggtagggacagtgtggcgttcatgacaagcctccctaacattgtcgatgaccacccacagggagtaatccctgcattacctattaagttaggttaaaacataaaggataacgactagatg

SEQ ID NO: 1984 - DNA, 1359 bp, unidentified
  misc_feature 1..1359: note = Ga0393278_0000470 JGI
  source 1..1359: mol_type = other DNA
atgcagaagttagaaaaaagaaatacatacacacccacaaatacttctctagtttgtggcaactgtgattttttattaaacagagaccaaaatctcagtgtaaaaaattcaaaaactttttctaacaatctcgaagagactcaatcccaacatagagggaaacagggcttgagagttcctgttgttgtctatgtacttaatatgaggggagaacctctaatgccaacaacccctagaaatgcaaagaaatttctaaaagaagaaaaagcaaaggttgttaaacgatgtccttttacaattcaattgctcattcaaacaggagaatcaaaacaagaaattacatgtggaatagattctggttataataagatagggtatgattgtttaacaaagaaaaaagttttaatcaatggtgaattaaaattagatcagggtatgaagaaaagacttgatgaaagaaaaaggtatcgcaaatataaaagaagtaaattgtggtatcgtaaacctagatttttaaacagagcaaaaccaaaaggttggctttcaccatctattcagagaaaatttgatacccacatttctttaattgaaagattaaagaaaatacttcctatcacaagagtggttgtggaagtaggacagtttgatattcagaaaatagataatcctgatatccgagcaatagaatatcaacaagggaatctatataactatacaaatgtaaaaggttatatcttttcaagagaaaatgggacatgccaactgtgtaaaaagaaagacggtaagtttcaattacatcatataactccaagaagcaaaggtggaacagacaggcctagcaatttggctttacttcataaatcttgccatgataaattacataggaaacatttagaacattctttaagtaatagtaggcaacataagaccagttcgtttatgaatattatttgcaaaaaatttaaagatttaaatttcgaaattacatatggatatattacatttgtgaatagaaataatttaaatttagaaaagtcacatgcaaatgatgcttttgtgattgctggtggaacaactcaagagttcactaggccatatctaattattcaaaaaagaaaaaataatcgtagtttgcaaactaatagaaaaggttttaagcccagcatcaggagaagtcattatatttatcaacctcatgatcttgttatgtttaaaggagagatttgtgaagttgttggcacgcatagttatggaaaagcgatattggttaaaaataatttagggcaaaaatttggcgttaggattaaaaaaatagtttctttatttcacacgaatggtttaatatggagatatgagtaa

SEQ ID NO: 1985 - DNA, 264 bp, unidentified
  misc_feature 1..264: note = Ga0393278_0000470 JGI
  source 1..264: mol_type = other DNA
gtcagatacccatgtgtaaaaccatgggctttgtccgagagggctaagggcaactagatgattagagagcttggaaaggagaacttaccatgcagaagttagaaaaaagaaatacatacacacccacaaatacttctctagtttgtggcaactgtgattttttattaaacagagaccaaaatctcagtgtaaaaaattcaaaaactttttctaacaatctcgaagagactcaatcccaacatagagggaaacagggcttgagag

SEQ ID NO: 1986 - DNA, 1407 bp, unidentified
  misc_feature 1..1407: note = Ga0207870_100010 JGI
  source 1..1407: mol_type = other DNA
atgcagcagagagtgttggtcgtaggaagggacagaagtccgctcatgccgtgcagtcccgcccgagcccgaatgcttctgagaggcggtcgggcggcgatcctgcggcggtatcctttcacgatcatgttgagggatagagaaagcggtgaggttcagccggtcgcggtgaagtgcgatcccggttcggagaccacgggcatggccttggtggctgagtttggcaggcgggggccaaccgcggtctgggcagcggagatccaacaccggggcaaacaggtccggaaggcactcatgaaaaggcgggttctccggcgagccaggagaaatcggaagacgcggtaccggaagccgcggttcctgaaccggaatccgcaaaaatgcgacggatgcgggaagaacgctaagcacggcagccggtactgtcgcgcctgcggggcgggagacgggcatgggttccgggacaaacgcttgcccccttctctggaaagccgggtcgaaaacgtcgttacttgggtgaaccgtctctgccgatatgcgccggtttccttgataacggttgaacacgtcaaattcgacacgcagctgctccagaaccccgatatctcgggcgtggaataccaacgaggcacccttttcgggtatgagttgcgggagtacctgctggagaagtttggccgccagtgtgcgtactgtgggggagcatcgggagacgaagtgctgaacatcgaccacgtggtcccgaggtcgcgaggcggcagtgacagggtgagcaacctggcggtggtctgccggacgtgcaacgaggcgaaaggaaaccggatgccggaagaatggctggaggagttacatgcatcggtccggccgcttgatctcattcgggcgcagcgttttcccgaagcgctgaaaaggctcaaacagcctctccgggatgcagcggcggtgaacacggtccgatgggtgatcgttgagcggttgaagagactcggtttgccgttggagctgggatcgggcggtcagacgaagcgcaaccgttcgagccgaggttatccgaagaaacactggatcgacgcggcttgtgctggggaatcaggggagtgtgtgcggcttgacccggacatgcgaattttgcggatcgaggcaaaggggcatggaacgcggcgccggtgcgggacggacaagtacgggtttcccatacggcacgcgcctgctgcgaagtcgtacatggggtttcgaacgggggaccttgtgcgggctcatatcccgcgagggaagtatgcgggcacgcacgttggacgcattgctatccggcaccggccgagtttcaggctcaacgggttcgacgtgcatccgaaacacttgaaacttttgcagcgaggtgacgggtatgcgtacaacatgggataa

SEQ ID NO: 1987 - DNA, 287 bp, unidentified
  misc_feature 1..287: note = Ga0207870_100010 JGI
  source 1..287: mol_type = other DNA
gtcaaccaccccatggctaaagccaggggcttgtgaagaacaagcccggggttgaccagccgaagtccggaggcccattgccttgcggggctacgttattccggtcatgacaccttggggtgcgcgagccagctccaagccctgtcgcgggcggttaaacaggcatacggggtcgaagccggtgccgttcgcatgacaagccgggataacatcggcgaggctcacttgaccgtccaggggcgtaagcccgggacgagggaggaggcgtaagtcccatgcagcagaga

SEQ ID NO: 1988 - DNA, 1299 bp, unidentified
  misc_feature 1..1299: note = Ga0224415_10011456 JGI
  source 1..1299: mol_type = other DNA
atgccgacctttaatttcaggaaagtgcgcaggctccttaagagcgggcgggcggatatcttctgccatgagccctttacgatccggcttctgtacgccgaaaagcttgacacacagccagtagaactgtgcattgacgccggggacaggcacatcggcatatccgtaaagagcgaaaagcacgagttcgtccacgcccagtacgatcctctaagggatgagaaggaaaagcatgatgacaggcgcatgtaccgaaggacgagacgaagccgcagacggcacagaaagtcccgcttcgacaacaggaagaagccggaagggtggctcgctccgacggtggagcacaagaaggacctgcacatcagcattacgcagatgtacatcagggtctgccccgtaaccagcatcacggtagaaacggcatcctttgacacacaggccctggaagccatagaaagaggactgccgctgccgaagggaaaggactaccaaaagggtcctcggtacaggatgaacaccctgcgggacgccgtgttttaccgtgacggccacagatgccgcttgtgcgggaataatggcgtgctcagggtacatcacatcggctactggaagggcgaccgttccaaccgcatggggaaccttgctgcggtctgcacgggatgcaatacgcccgcaaaccacaggaagggcggaaggctctacggctgggagccggagatcaaaccccttaaaggcgcggcctttataaacgcggtgagaaagaggctggcggaagaactgagagaaagaacttctcttcccgtgacagagacaaacggcagcgccacaaagacggccagaaagcgcttctgcatagacaagacccacgcgaacgacgcttttgtcatgggaaaatttcacccgaggcacaggcggcaggagcaggtctggcagaagcgcaggagaaataaccggatcctgtcaaagttctatgacgccaggtatgtggacatccgcgacggaaaggtaaagtccggacaggagctgtcctacgggaggctgaaaaggagcgaatccagaaattctgaaaagaacatgcgtccgttccgaggccgcaaggtgaggaaaggccgtgtcagtacaaggaggcggcgctatgccataaggcccgggaccatagtcgtatacgatggacagaaacagtccgtcaagggcatccactgtggcggaacaagggcggttttagaaaacggaaagagcgtatccgtcaaaaaaatcaggggactgaggttccccggcgcatggatgcgcatatcgtaa

SEQ ID NO: 1989 - DNA, 503 bp, unidentified
  misc_feature 1..503: note = Ga0224415_10011456 JGI
  source 1..503: mol_type = other DNA
gtcaactacccaccgcttaggttctgatgagccttgaagcgggggcttgtagaaagagggaattgtttcttttctattgcaagcccggttgattagccgtgcggatgcaggtccaaaaagggaaaccgcatccgctgcgcggggaaacccgcacaagtgaccccggcatatgccgggagggaactacgttccgggagaaggtatgtaagtgaggcagtctctgccatcaccgcatacgcaggcaccatgggatactccacacgtcccatgcagctgcgccgcagcgttaaacatccctgagggtaaggggaagtgcgctgcgggttgaaaacctcccatgaacatcggcgaagtggatcacccactaaaaaggagaatccgcaggcgacaaactgtaccacgtacagtaaaaggctgcggaaggcgtaagccataacaagaaacattaacactatcgcctgcgggcatggccggaagcacgaatacggctatgggccgcagag

SEQ ID NO: 1990 - DNA, 1545 bp, Nocardiopsis sp.
  source 1..1545: mol_type = other DNA
atggctacgttccgcacagggcagaagacccaccaggccgtgcttcctcagcggcctgctctggaatcggagtcggtagacacgccccggatcgggcacgaaacgggacttcggcaccaccccagggtggtatccggtgcggaccatgtgcgaggggagaccaccctcatctcacctgatgtcggtggcgtcaccacccggcctttggctggggagaggccgcgtgagcggcacccatccgtcttcgtcctggacaagaaccagattccgctccagccctgtcacccggccagggcccgcaaactgttgaacaagggtcgggccgtggtggcccggcacacccctttcaccatccggctcaaggaccgcaccatcgccgagtccgaggtggacggtgtccaggtcgggatcgacccgggcagcaaacacaccggtatcgcggtgttcacccagcatgccggggaacgacgcggccggtacgcgatccagctcgaccaccgtggtgcgcgaatccgaaagaaaatcggccaacgctccgcctataggcggggtcgtcgcttccggaacctgcgccaccgcgcaccccggttcgccaaccgcacccgcccccaagggtggctcgcgccgtccctgcgacaccgggtggagaacaccaccggttgggtggaccggctcacccgatgggcaccggtcaaagcggtgcacgtggaacgggtcgccttcgacacccacgccctgtccgccggcaagcccctagagggcgtggagtatcaacggggcaccctgcacggctatgaggtacgcgagtacctgctggccaagttcgaccgtgcctgtgtgtactgcggggccacgaacacaccactcaacctggaccacgtccacccccgctcccgaggcgggtccgatcgggtgtccaacctggtgttggcgtgcgtgacctgcaaccaggccaagaacaaccggcccgtcgaagagttcatcaccaacaagcaggtcttggctcggattctggctcgggccaaggcacccttgcgagacgcggcggcggtgcagtccacccgatgggcgctctggcgcgctctgaacgaacggttgcctactcatgtcggttcgggtggtcggaccaagtggaaccggacccgcaaccacctaccgaaaacccacactctggacgccctatctgtgggcaagatcgacaccatcacccagaccaccaaccgggtcctggtcgccggatgtgcgggccggggctcctacgcccgcacccgccccgacaagcacggattcccgaggctgcgcctgccccgaaccaaggagttcttcgggttctccaccggcgatctggtccgggccgtggtcccccagggaaagaagaccggcacctataccggccgggtcgcggtacgcgcctcgggcagcttcaacatcaccaccacccaaggcaccgtccaaagcatccgttacaagcacatgcgtctactccaacgagcggacggctatggctacacctggaagggagagggcgtttcctcccggtcctga

SEQ ID NO: 1991 - DNA, 300 bp, Nocardiopsis sp.
  source 1..300: mol_type = other DNA
gtaaagggatctcggtcctgaaggaccgggcttttcagccccttgtggctgagagccgtctttaccagcaccagccatcgcctacggggaggtgacctcgatggctacgttccgcacagggcagaagacccaccaggccgtgcttcctcagcggcctgctctggaatcggagtcggtagacacgccccggatcgggcacgaaacgggacttcggcaccaccccagggtggtatccggtgcggaccatgtgcgaggggagaccaccctcatctcacctgatgtcggtggcgtcaccacccg

SEQ ID NO: 1992 - DNA, 1356 bp, unidentified
  misc_feature 1..1356: note = Ga0118657_10064171 JGI
  source 1..1356: mol_type = other DNA
gtggcaatctttattttagattgcacagaaaaggagttaaatgtgaaagtatttgtgcgaaacaggcagggacaaccgttgatgcccactacaccccgcaaggcgcgtttgttgctgaaggcgggcaaggccgagattgtcgggcgggaacccttcaccatccggttgctgtacggctcaagcggatacaggcaggacgtaacgctgggcattgatgccgggtacaagatgataggctatagcgccgtcaccggccagcgggagttgatcggcggtgaggtggtgatgctgaaggggatgtccgagcggctcaaggaacgggcgatgtaccgccggggcagacggaaccggaagcggtatcgccagccacgatttgacaaccgcaagcggcctgccgggtggcttgcgccgtccattcagcacaaactggatacgcaccggcggttgatagcgcgcattgagtctgttttgccggtgacaagaacgatcatcgaggtggcgaactttgacattcaggccatcagggaccccagtattgagggcaaggcgtatcagcaaggggaacaggcgggcttctggaacttgagggagtacattctgcatcgggacaagcaccaatgccaaaatccggcttgcggaaacaaggccaaggataaggtgctggaagtgcatcacatcgggtactggaagaaagaccggtcggacaggccgggcaacctgagcacgctttgtacgaagtgccacaccccgaggaaccatcaacccggcggtttcctgtacggctggcaacctgcactcaaatcgttcagaccggaaacgtttatgagtaccgtccggtggcggctggttgagggcgagggaacaagccatacctacggctatcgcaccaagtcggggcgcattgcgctggggcttgagaagtcacaccacaacgacgcctttgtgattgcgggcgggcgagagcaggaacgaactgaagcaattgactttgaacagatcaggcgaaatgaccgcagcttgcagaagttctatgacgccaaatacatcgacattcgcacggggcgggaagtgaaaggggctgaactctcatcaggccgaaggacgcgcaaccgcaacctgaacagcgagaacctacggcgataccgaggtccgaagaaacctggccgtctgcaaatcagacgcaggcggtatccctatcagtcgaatgacctgattatggtaggaggcgagaagtaccacagcaagggtacgaaagactacgggcgatacatcgttgttgacgggttgcagaaggcggtcagggctgcgctggtgaccccggttcggtggcgaaaagggctttgcacggcaatctga

SEQ ID NO: 1993 - DNA, 286 bp, unidentified
  misc_feature 1..286: note = Ga0118657_10064171 JGI
  source 1..286: mol_type = other DNA
gtcaactacccatgctttgaaagtgtgggcttgcggtagcgcaagcccggttgattagcctcagccaccacccgcaagggtgacggggctacgttaaggatgaaaacataggtacttcgggatactctacacgtcccgaacactacgggtcaggtctaaacatcgctgagggtaggcgaagtggcttgactgtatacaaccatctttaacattggcgatgtagaccacaccggaaacggtggcaatctttattttagattgcacagaaaaggagttaaatgtgaaa

SEQ ID NO: 1994 - DNA, 750 bp, unidentified
  misc_feature 1..750: note = Ga0120401_1023611 JGI
  source 1..750: mol_type = other DNA
atgagagttccagtagtatctaaagatgataagccacttatgccaactaagccagctaaggcacgtaaaatgatagaaggtagagtggctaagaagtgttggtcgaagactggcgtattctacatacaaatgttaatacctgtgggcaaaaaagttcaggatatgttcgcttcgctcaccgacgacttcgtcttacgggcactggcaatagaccctggcagtaaatacgatggatatgccgtgtctggtgagaaagatgtggcactcaaaacgatggcaataatgccacagaaggtacaaaagaaagtaactgagcggcgtcaattaagacgcagtagacgttatcgtaatacgagacgcaggaaggcacggtttgacaacaggaaacgcaaagctgggtggatagcgccgtcacaattggctaaagtgcagttccgcattaaggtagtacaagatttagccaagatgttccccctcaactatatcgctgttgaggatgttaggttcaaccattacaagaagcgatggggtaagcatttctctacagtggagataggaaaggcgatgttgtacgaggaattggaacgacatggcaaagtgataaagtacgctggttggcaaacggcagaagcacggaagtattggggcattaagaaatcaagcgctaaagatgctctgataccttcttcccatgccaatgatgctcttgcgatgctcaatgaagtattcggggataatgtggataattca

SEQ ID NO: 1995 - DNA, 268 bp, unidentified
  misc_feature 1..268: note = Ga0120401_1023611 JGI
  source 1..268: mol_type = other DNA
tcagtcaatgacccctcctgaatcatagattcagaagggcttggagatgcaggactctaagggtaactcttgactagagggcttaggtaatcctaagcaggcgcactgcgatggtacatacgtcagagtatttcgcaagctctgacctctataagctgcctcttgcgggtagcggggaaggacccgacatctttcgcagttgcaatctcgatgcgacctttactttatgtcccgaatatcgggactccgaaaggagacagcaatgaga

SEQ ID NO: 1996 - DNA, 1284 bp, unidentified
  misc_feature 1..1284: note = human gut metagenome genome assembly, contig: NODE_564_length_37814_cov_32.665907, whole genome shotgun sequence WGS
  source 1..1284: mol_type = other DNA
atgagagtatttgtattcaatatgcgtggcagaccattaatgccatgctcacaaagaaaagccagattactcctaagggaaaataaggctatgatttataaatatcatccatttacgattcagctgacttatacaactggagaaacaaagcaggactgtcatataggtatagacacaggttctaaatatataggagctgctgtcagatcagaggataaggttttttggaaaggcgaaatcgagcttcgacaggatatcaggtcaaatcttgatacgaaacgtatttatcgcagaagcagacgaaatcgtaaaacaagataccgaaaaccaaggtttttaaatcgtaagagaagagatgaatggcttccacctagcttgcaaagcaggataaatcatacgtttcattggattgacacattgagtagtttggttccaaaccccattcttcacatagaagtcggtaagtttgatgtagcaaagatgataaatcctgaaatccatggagttgactatcaacatggtcagacatatggtttcttcgatgaaaggtattttgtttttgcaagagataactacacttgtcagtgctgtggaaagtcaaaaaataagattttgaacacacatcatatcatctaccgcagtaatggcggaacaaacagagttgataatcttattacagtttgcacagattgtcatacatcgcagaatcacaggaaaggtggaatattctatcaatggcaggagcagcataaaaaggtaaaacaatacaaagaaccgccgttcatgaataccttacgtaagaggatatttgtagcgtatccagatgctgagatcacatatggatctgaaacaacaccaaaacgtaaggcgatgaaattggataagacgcactataatgatgcgattgtcattagtggtatcaatgaaatcaatgaaatcaaagaaaatcctgaagaatggttactgataaaacaattccgcaaaaagaaacgctctttacacgaggctaccgcccgtaagggaagaaaaaagccaaacagaaatcagacgcgtaacagtaagaatacgccttattataaaggattttatcttaacgataaggtttcagtttttggaaagagtggatatattacaggatttacgagcaatgcggcatatataaaagatgagaacaatgactatattactctgccaaacaaaacctataaacaggtcagcatcaataaaatgaagttggaatgtcataacaacaattggcagtacataataaaaaatgctgtgtaa

SEQ ID NO: 1997 - DNA, 286 bp, unidentified
  misc_feature 1..286: note = human gut metagenome genome assembly, contig: NODE_564_length_37814_cov_32.665907, whole genome shotgun sequence WGS
  source 1..286: mol_type = other DNA
gtcaataaccccgacctacagtaataactgttgaggtcggagattgtaaaagctcatattgactagcctaagttcttcgagaactacgttgtttatgttatcacacctgcgaatgataccatagtttgcagccttgtgtaggctctgtaaaagttctgtgaggtaggaacggtcaacctagtatgttcgatcacgacaagcatttacaacattggcgaagggtaacaaactttcaaaagaaagggacagcacttgagagtagctgtcaaaggtaaaaactatgaga

SEQ ID NO: 1998 - DNA, 714 bp, unidentified
  misc_feature 1..714: note = Ga0392328_0075420 JGI
  source 1..714: mol_type = other DNA
atgagtgtatctgtctatgtgttgaacatgagggggaaacctctcatgcccacaacaccaccaaaagcaagaaaattaattaaaaatgaaaaagtaaaagtaaagcaaagattaccatttattatccagttaaaatatgttactggagaaacaaaagaaccaattaccttaggaatagactctggttatcaatttgttggcttttcagctaatacagagaagaaagaattaatatcaggagaactagaacttagaaaagatatttcaaagaatcttactcaaaaaagacaatatcgaggaaccagaagaaatagattatggtaccgtaaaccacgctttaataatcggggttctaagaaaaaaagctggtttgcaccaagtattaagcacaagttaacctctcacaagaaactgattgaaaaacttgagcaaatacttccaataaccagaataattattgaagttgctacttttgatgcccataagatgaagaagccggaggtaacgggtgttgaatatcaacagggtgatcttcaaggttatgagatcagagaatatttgcttgaaaaatggaagagaaaatgtgcttattgtgacaagaaaaacgtgaaattggagatcgagcatattattcctaagtcaagaggaggaagtaatagagtagataacctaactatttcatgcagaaaatgcaatcttaaaaaaaggaaataa

SEQ ID NO: 1999 - DNA, 289 bp, unidentified
  misc_feature 1..289: note = Ga0392328_0075420 JGI
  source 1..289: mol_type = other DNA
gtcaatcacccactatcacccttcggggtgagacggggcttgtggagtgatctacaagagtaattggttgattagcctaagaggagtatgaaaatatgaaatctaagttatcagtaaagttaaagaacacaccaaaggatgcttctcaagtcctttgctctgtaagcggtggattaaacagagaggaaactctcagtgttcaccgcaaagtactggctgataaccttggcgaagagaacctacttcttaaatttttaaagtttaaggaggacagaacatgagtgtatct

SEQ ID NO: 2000 - DNA, 1290 bp, unidentified
  misc_feature 1..1290: note = Ga0207193_1000100 JGI
  source 1..1290: mol_type = other DNA
atggtatatgtattaaataaagatgggaaaccactcatgcctagcattagacatggtaaaatcagaagaatgttgaaagagaagaaagctgtagtagttaaaactactcctttcacagttaaactcttatacactcctaagacaaatgtaatacagaatctagttctaggaatagaccctggaagtagaactctgtcaactgtagttagagttgagaaaactcctaaactagtctatgtttctgaagttaaagttagaactgatattactagtaagttgaaaaagagaagttcctacagaaaaactaggagaaatcgtaaaactagatacagagaatcacgtttcttaaacaggaaaaggaaagagaaatggctaccacctagtgttgtttctaaacttaattctcacaagaaagagataaagtttatctttaacatcttacctgtctctagagtaatcctagagagaaatacttttgatactcataagttaaagaatcctagtatcagtggtaaaggatacaaacatggtacactctactcttatgagaatcacagacagtacgttttaactagagataagtactgctgtagaagttgtaaaaagaagaatgtagttctcaacactcatcacattacgtttaaaagtaaaggaggaaaagatcactactctaacctagttaccctttgtgaaacatgccacaagaaagttcacagtggaaagttaaaactacataagaaacttctagctagtctaggaacaagtgtaaacacattagatgctactcacgctacaatcatttctaagagactagaagaatttctcttaaaacacaaagacagaagaaattataaatttttaactacttttgggtatgagacagtagtaaaaagaagaattctaaagttaaagaaaactcactacaatgatgcaatttctatatcctatcctattaaaacctcttactctaagactagagcagaatttatgtttagaaagatatcggtgagtaaaggagactaccagcagactaaaggtgtaagaagtcaggtaaagatacctacttgcaagattcatgggtttaggaagtttgacattgtacagtatcttggaaagtattacattattaaaggtagaatgagttctggttacgcaattcttatgaattctaagttaaaaccagtaaattttggaactaatggtaagagtaaacctactgtgaactttaaacttttgaaaagaattagttctagaagaagtactcttataatagaagttagaaaacactag

SEQ ID NO: 2001 - DNA, 308 bp, unidentified
  misc_feature 1..308: note = Ga0207193_1000100 JGI
  source 1..308: mol_type = other DNA
gtgagctacgtcgggctaaagcactggcgcttctctaaggagatgcagtagttcaccagactcaggttagagaaatctaaactacgttgaagaagttaccacacctaagaatgccgcctcagttcctagctctgtgtaggctctgtaagaagggatgcaaaacccggtcaacctaagttcgatgtcccaaggacacaagctttttcaacattgtcgagaggaagttggaagatttcaatggttatagctgaaattagtacacgttacatcgaaagatggcttatagcaaactttaaaggtaatttatg

SEQ ID NO: 2002 - protein, 7 aa, Simian virus 40
PKKKRKV

SEQ ID NO: 2003 - protein, 16 aa, synthetic construct
  REGION 1..16: note = Synthetic nucleoplasmin bipartite NLS
KRPAATKKAGQAKKKK

SEQ ID NO: 2004 - protein, 9 aa, Homo sapiens
PAAKRVKLD

SEQ ID NO: 2005 - protein, 11 aa, Homo sapiens
RQRRNELKRSP

SEQ ID NO: 2006 - protein, 38 aa, Homo sapiens
NQSSNFGPMKGGNFGGRSSGPYGGGGQYFAKPRNQGGY

SEQ ID NO: 2007 - protein, 42 aa, Homo sapiens
RMRIZFKNKGKDTAELRRRRVEVSVELRKAKKDEQILKRRNV

SEQ ID NO: 2008 - protein, 8 aa, Homo sapiens
VSRKRPRP

SEQ ID NO: 2009 - protein, 8 aa, Homo sapiens
PPKKARED

SEQ ID NO: 2010 - protein, 8 aa, Homo sapiens
PQPKKKPL

SEQ ID NO: 2011 - protein, 12 aa, Mus sp.
SALIKKKKKMAP

SEQ ID NO: 2012 - protein, 5 aa, Influenza virus
DRLRR

SEQ ID NO: 2013 - protein, 7 aa, Influenza virus
PKQKKRK

SEQ ID NO: 2014 - protein, 10 aa, Hepatitis delta virus
RKLKKKIKKL

SEQ ID NO: 2015 - protein, 10 aa, Mus sp.
REKKKFLKRR

SEQ ID NO: 2016 - protein, 20 aa, Homo sapiens
KRKGDEVDGVDEVAKKKSKK

SEQ ID NO: 2017 - protein, 17 aa, Homo sapiens
RKCLQAGMNLEARKTKK

SEQ ID NO: 2018 - protein, 4 aa, synthetic construct
  REGION 1..4: note = Synthetic
GGGS

SEQ ID NO: 2019 - protein, 5 aa, synthetic construct
  REGION 1..5: note = Synthetic
GGGGS

SEQ ID NO: 2020 - protein, 9 aa, synthetic construct
  REGION 1..9: note = Synthetic
GGSGGSGGS

SEQ ID NO: 2021 - protein, 15 aa, synthetic construct
  REGION 1..15: note = Synthetic
GGGGSGGGGSGGGGS

SEQ ID NO: 2022 - protein, 5 aa, synthetic construct
  REGION 1..5: note = Synthetic
GGGGS

SEQ ID NO: 2023 - protein, 10 aa, synthetic construct
  REGION 1..10: note = Synthetic
GGGGSGGGGS

SEQ ID NO: 2024 - protein, 20 aa, synthetic construct
  REGION 1..20: note = Synthetic
GGGGSGGGGSGGGGSGGGGS

SEQ ID NO: 2025 - protein, 25 aa, synthetic construct
  REGION 1..25: note = Synthetic
GGGGSGGGGSGGGGSGGGGSGGGGS

SEQ ID NO: 2026 - protein, 30 aa, synthetic construct
  REGION 1..30: note = Synthetic
GGGGSGGGGSGGGGSGGGGSGGGGSGGGGS

SEQ ID NO: 2027 - protein, 35 aa, synthetic construct
  REGION 1..35: note = Synthetic
GGGGSGGGGSGGGGSGGGGSGGGGSGGGGSGGGGS

SEQ ID NO: 2028 - protein, 40 aa, synthetic construct
  REGION 1..40: note = Synthetic
GGGGSGGGGSGGGGSGGGGSGGGGSGGGGSGGGGSGGGGS

SEQ ID NO: 2029 - protein, 45 aa, synthetic construct
  REGION 1..45: note = Synsthetic
GGGGSGGGGSGGGGSGGGGSGGGGSGGGGSGGGGSGGGGSGGGGS

SEQ ID NO: 2030 - protein, 50 aa, synthetic construct
  REGION 1..50: note = Synthetic
GGGGSGGGGSGGGGSGGGGSGGGGSGGGGSGGGGSGGGGSGGGGSGGGGS

SEQ ID NO: 2031 - protein, 55 aa, synthetic construct
  REGION 1..55: note = Synthetic
GGGGSGGGGSGGGGSGGGGSGGGGSGGGGSGGGGSGGGGSGGGGSGGGGSGGGGS

SEQ ID NO: 2032 - protein, 60 aa, synthetic construct
  REGION 1..60: note = Synthetic
GGGGSGGGGSGGGGSGGGGSGGGGSGGGGSGGGGSGGGGSGGGGSGGGGSGGGGSGGGGS

SEQ ID NO: 2033 - protein, 32 aa, synthetic construct
  REGION 1..32: note = Synthetic
LEPGEKPYKCPECGKSFSQSGALTRHQRTHTR

SEQ ID NO: 2034 - protein, 20 aa, synthetic construct
  REGION 1..20: note = Synthetic
PKKKRKVEASSPKKRKVEAS

SEQ ID NO: 2035 - protein, 21 aa, synthetic construct
  REGION 1..21: note = Synthetic
GGSGGSGGSGGSGGSGGSGGS

SEQ ID NO: 2036 - DNA, 27 bp, synthetic construct
  misc_feature 1..27: note = Synthetic
  source 1..27: mol_type = other DNA
ggtggtagtggagggagcggcggttca

SEQ ID NO: 2037 - DNA, 72 bp, synthetic construct
  misc_feature 1..72: note = Synthetic
  source 1..72: mol_type = other DNA
ggtggaggaggctctggtggaggcggtagcggaggcggagggtcgggtggtagtggagggagcggcggttca

SEQ ID NO: 2038 - DNA, 48 bp, synthetic construct
  misc_feature 1..48: note = Synthetic
  source 1..48: mol_type = other DNA
tcgggatctgagacgcctgggacctcggaatcggctacgcccgaaagt

SEQ ID NO: 2039 - DNA, 192 bp, synthetic construct
  misc_feature 1..192: note = Synthetic
  source 1..192: mol_type = other DNA
gtggataacaaatttaacaaagaaatgtgggcggcgtgggaagaaattcgtaacctgccgaacctgaacggctggcagatgaccgcgtttattgcgagcctggtggatgatccgagccagagcgcgaacctgctggcggaagcgaaaaaactgaacgatgcgcaggcgccgaaaaccggcggtggttctggt

SEQ ID NO: 2040 - DNA, 108 bp, synthetic construct
  misc_feature 1..108: note = Synthetic
  source 1..108: mol_type = other DNA
ggtggttctgccggtggctccggttctggctccagcggtggcagctctggtgcgtccggcacgggtactgcgggtggcactggcagcggttccggtactggctctggc

SEQ ID NO: 2041 - protein, 400 aa, synthetic construct
  REGION 1..400: note = Synthetic
MSTDATLIRTTPSHAEADATDTLVATPLMPPRRVISPWPGPGEGQSLMRIPVVDIRGMALMPCTPAKARHLLKSGNARPKRNKLGLFYVQLSYEQEPDNQSLVAGVDPGSKFEGLSVVGTKDTVLNLMVEAPDHVKGAVQTRRTMRRARRQRKWRRPKRFHNRLNRMQRIPPSTRSRWEAKARIVAHLRTILPFTDVVVEDVQAVTRKGKGGTWNGSFSPVQVGKEHLYRLLRAMGLTLHLREGWQTKELREQHGLKKTKSKSKQSFESHAVDSWVLAASISGAEHPTCTRLWYMVPAILHRRQLHRLQASKGGVRKPYGGTRSLGVKRGTLVEHKKYGRCTVGGVDRKRNTISLHEYRTNTRLTQAAKVETCRVLTWLSWRSWLLRGKRTSSKGKGSHS

SEQ ID NO: 2042 - protein, 432 aa, synthetic construct
  REGION 1..432: note = Synthetic
MQPAKQQNWVFQINGDKQPLDMINPGRCRELQNRGKLASFRRFPYVVIQQQTIENPQTKEYILKIDPGSQWTGFAIQCGNDILFRAELNHRGEAIKFDLVKRAWFRRGRRSRNLRYRKKRLNRAKPEGWLAPSIRHRVLTVETWIKRFMRYCPIAWIEIEQVRFDTQKLANPEIDGVEYQQGELQGYEVREYLLQKWGRKCAYCGTENVPLEVEHIQSKSKGGSSRIGNLTLACHVCNVKKGNLDVRDFLAKSPDILNQVLENSTKPLKDAAAVNSTRYAIVKMAKSICENVKCSSGARTKMNRVRQGLEKTHSLDAACVGESGASIRVLTDRPLLITCKGHGSRQSIRVNASGFPAVKNAKTVFTHIAAGDVVRFTIGKDRKKAQAGTYTARVKTPTPKGFEVLIDGARISLSTMSNVVFVHRSDGYGYEL

SEQ ID NO: 2043 - protein, 461 aa, synthetic construct
  REGION 1..461: note = Synthetic
MAVFVIDKHKRPLMPCSEKRARLLLERGRAVVHRQVPFVIRLKDRTVQHSAVQPLRVALDPGSRATGMALVREKNTVDTGTGEVYRERIALNLFELVHRGHRIREQLDQRRNFRRRRRGANLRYRAPRFDNRRRPPGWLAPSLQHRVDTTMAWVRRLCRWAPASAIGIETVRFDTQRLQNPEISGVEYQQGALAGCEVREYLLEKWGRKCAYCGAENVPLEIEHIVPKSRGGSDRVSNLALACRACNQAKGNRDVRAFLADQPERLARILAQAKAPLKDAAAVNATRWALYRALVDTGLPVEAGTGGRTKWNRTRLGLPKTHALDALCVGQVDQVRHWRVPVLGIRCAGRGSYRRTRLTRHGFPRGYLTRNKSAFGFQTGDLIRAVVTKGKKAGTYLGRIAIRASGSFNIQTPMGVVQGIHHRFCTLLQRADGYGYFVQPKPTEAALSSPRLKAGVSSAGN

SEQ ID NO: 2044 - protein, 439 aa, synthetic construct
  REGION 1..439: note = Synthetic
MTTNVVFVIDTNQKPLQPCSAAVARKLLLRGKAAMFRRYPAVIILKKEVDSVGKPKIELRIDPGSKYTGFALVDSKDNADFIIWGTELEHRGAAICKELTKRSAIRRSRRNRKTRYRKKRFERRKPEGWLAPSLQHRVDTTLTWVKRICKFVPIMSISVEQVKFDLQKLENSDIQGIEYQQGTLAGYTLREALLEHWGRKCAYCDVENVFLEIEHIYPKSKGGSDKFSNLTLACHKCNINKGNKSIDEFLLSDHKRLEQIKLHQKKTLKDAAAVNATRKKLVTTLQEKTFLNVLVSDGASTKMTRLSSSLAKRHWIDAGCVNTTLIVILKTLQPLQVKCNGHGNKQFVTMDAYGFPRKSYEPKKVRKDWKAGDIIRVTKKDGTMLMGRVKKAAKKLVYIPFGGKEASFSSENAKAIHRSDGYRYSFAAIDSELLQKMAT

SEQ ID NO: 2045 - protein, 419 aa, synthetic construct
  REGION 1..419: note = Synthetic
MPNKYAFVLDSKGKLLDPTKSKKAWYLIRKGKASLVEEYPLIIKLKREVPKDQVNSDKLILGIDDGTKKVGFALVQKCQTKNKVLFKAVMEQRQDVSKKMEERRGYRRYRRSHKRYRPARFDNRSSSKRKGRIPPSILQKKQAILRVVNKLKKYIRIDKIVLEDVSIDIRKLTEGRELYNWEYQESNRLDENLRKATLYRDDCTCQLCGTTETMLHAHHIMPRRDGGADSIYNLITLCKACHKDKVDNNEYQYKDQFLAIIDSKELSDLKSASHVMQGKTWLRDKLSKIAQLEITSGGNTANKRIDYEIEKSHSNDAICTTGLLPVDNIDDIKEYYIKPLRKKSKAKIKELKCFRQRDLVKYTKRNGETYTGYITSLRIKNNKYNSKVCNFSTLKGKIFRGYGFRNLTLLNRPKGLMIV

SEQ ID NO: 2046 - protein, 1409 aa, synthetic construct
  REGION 1..1409: note = Synthetic
MLFNKCIIISINLDFSNKEKCMTKPYSIGLDIGTNSVGWAVITDNYKVPSKKMKVLGNTSKKYIKKNLLGVLLFDSGITAEGRRLKRTARRRYTRRRNRILYLQEIFSTEMATLDDAFFQRLDDSFLVPDDKRDSKYPIFGNLVEEKVYHDEFPTIYHLRKYLADSTKKADLRLVYLALAHMIKYRGHFLIEGEFNSKNNDIQKNFQDFLDTYNAIFESDLSLENSKQLEEIVKDKISKLEKKDRILKLFPGEKNSGIFSEFLKLIVGNQADFRKCFNLDEKASLHFSKESYDEDLETLLGYIGDDYSDVFLKAKKLYDAILLSGFLTVTDNETEAPLSSAMIKRYNEHKEDLALLKEYIRNISLKTYNEVFKDDTKNGYAGYIDGKTNQEDFYVYLKNLLAEFEGADYFLEKIDREDFLRKQRTFDNGSIPYQIHLQEMRAILDKQAKFYPFLAKNKERIEKILTFRIPYYVGPLARGNSDFAWSIRKRNEKITPWNFEDVIDKESSAEAFINRMTSFDLYLPEEKVLPKHSLLYETFNVYNELTKVRFIAESMRDYQFLDSKQKKDIVRLYFKDKRKVTDKDIIEYLHAIYGYDGIELKGIEKQFNSSLSTYHDLLNIINDKEFLDDSSNEAIIEEIIHTLTIFEDREMIKQRLSKFENIFDKSVLKKLSRRHYTGWGKLSAKLINGIRDEKSGNTILDYLIDDGISNRNFMQLIHDDALSFKKKIQKAQIIGDEDKGNIKEVVKSLPGSPAIKKGILQSIKIVDELVKVMGGRKPESIVVEMARENQYTNQGKSNSQQRLKRLEKSLKELGSKILKENIPAKLSKIDNNALQNDRLYLYYLQNGKDMYTGDDLDIDRLSNYDIDHIIPQAFLKDNSIDNKVLVSSASNRGKSDDFPSLEVVKKRKTFWYQLLKSKLISQRKFDNLTKAERGGLLPEDKAGFIQRQLVETRQITKHVARLLDEKFNNKKDENNRAVRTVKIITLKSTLVSQFRKDFELYKVREINDFHHAHDAYLNAVIASALLKKYPKLEPEFVYGDYPKYNSFRERKSATEKVYFYSNIMNIFKKSISLADGRVIERPLIEVNEETGESVWNKESDLATVRRVLSYPQVNVVKKVEEQNHGLDRGKPKGLFNANLSSKPKPNSNENLVGAKEYLDPKKYGGYAGISNSFAVLVKGTIEKGAKKKITNVLEFQGISILDRINYRKDKLNFLLEKGYKDIELIIELPKYSLFELSDGSRRMLASILSTNNKRGEIHKGNQIFLSQKFVKLLYHAKRISNTINENHRKYVENHKKEFEELFYYILEFNENYVGAKKNGKLLNSAFQSWQNHSIDELCSSFIGPTGSERKGLFELTSRGSAADFEFLGVKIPRYRDYTPSSLLKDATLIHQSVTGLYETRIDLAKLGEG

SEQ ID NO: 2047 - protein, 1053 aa, synthetic construct
  REGION 1..1053: note = Synthetic
MKRNYILGLDIGITSVGYGIIDYETRDVIDAGVRLFKEANVENNEGRRSKRGARRLKRRRRHRIQRVKKLLFDYNLLTDHSELSGINPYEARVKGLSQKLSEEEFSAALLHLAKRRGVHNVNEVEEDTGNELSTKEQISRNSKALEEKYVAELQLERLKKDGEVRGSINRFKTSDYVKEAKQLLKVQKAYHQLDQSFIDTYIDLLETRRTYYEGPGEGSPFGWKDIKEWYEMLMGHCTYFPEELRSVKYAYNADLYNALNDLNNLVITRDENEKLEYYEKFQIIENVFKQKKKPTLKQIAKEILVNEEDIKGYRVTSTGKPEFTNLKVYHDIKDITARKEIIENAELLDQIAKILTIYQSSEDIQEELTNLNSELTQEEIEQISNLKGYTGTHNLSLKAINLILDELWHTNDNQIAIFNRLKLVPKKVDLSQQKEIPTTLVDDFILSPVVKRSFIQSIKVINAIIKKYGLPNDIIIELAREKNSKDAQKMINEMQKRNRQTNERIEEIIRTTGKENAKYLIEKIKLHDMQEGKCLYSLEAIPLEDLLNNPFNYEVDHIIPRSVSFDNSFNNKVLVKQEENSKKGNRTPFQYLSSSDSKISYETFKKHILNLAKGKGRISKTKKEYLLEERDINRFSVQKDFINRNLVDTRYATRGLMNLLRSYFRVNNLDVKVKSINGGFTSFLRRKWKFKKERNKGYKHHAEDALIIANADFIFKEWKKLDKAKKVMENQMFEEKQAESMPEIETEQEYKEIFITPHQIKHIKDFKDYKYSHRVDKKPNRELINDTLYSTRKDDKGNTLIVNNLNGLYDKDNDKLKKLINKSPEKLLMYHHDPQTYQKLKLIMEQYGDEKNPLYKYYEETGNYLTKYSKKDNGPVIKKIKYYGNKLNAHLDITDDYPNSRNKVVKLSLKPYRFDVYLDNGVYKFVTVKNLDVIKKENYYEVNSKCYEEAKKLKKISNQAEFIASFYNNDLIKINGELYRVIGVNNDLLNRIEVNMIDITYREYLENMNDKRPPRIIKTIASKTQSIKKYSTDILGNLYEVKSKKHPQIIKKG

SEQ ID NO: 2048 - protein, 1365 aa, Streptococcus pyogenes
KYSIGLDIGTNSVGWAVITDEYKVPSKKFKVLGNTDRHSIKKNLIGALLFDSGETAEATRLKRTARRRYTRRKNRICYLQEIFSNEMAKVDDSFFHRLEESFLVEEDKKHERHPIFGNIVDEVAYHEKYPTIYHLRKKLVDSTDKADLRLIYLALAHMIKFRGHFLIEGDLNPDNSDVDKLFIQLVQTYNQLFEENPINASGVDAKAILSARLSKSRRLENLIAQLPGEKKNGLFGNLIALSLGLTPNFKSNFDLAEDAKLQLSKDTYDDDLDNLLAQIGDQYADLFLAAKNLSDAILLSDILRVNTEITKAPLSASMIKRYDEHHQDLTLLKALVRQQLPEKYKEIFFDQSKNGYAGYIDGGASQEEFYKFIKPILEKMDGTEELLVKLNREDLLRKQRTFDNGSIPHQIHLGELHAILRRQEDFYPFLKDNREKIEKILTFRIPYYVGPLARGNSRFAWMTRKSEETITPWNFEEVVDKGASAQSFIERMTNFDKNLPNEKVLPKHSLLYEYFTVYNELTKVKYVTEGMRKPAFLSGEQKKAIVDLLFKTNRKVTVKQLKEDYFKKIECFDSVEISGVEDRFNASLGTYHDLLKIIKDKDFLDNEENEDILEDIVLTLTLFEDREMIEERLKTYAHLFDDKVMKQLKRRRYTGWGRLSRKLINGIRDKQSGKTILDFLKSDGFANRNFMQLIHDDSLTFKEDIQKAQVSGQGDSLHEHIANLAGSPAIKKGILQTVKVVDELVKVMGRHKPENIVIEMARENQTTQKGQKNSRERMKRIEEGIKELGSQILKEHPVENTQLQNEKLYLYYLQNGRDMYVDQELDINRLSDYDVDHIVPQSFLKDDSIDNKVLTRSDKNRGKSDNVPSEEVVKKMKNYWRQLLNAKLITQRKFDNLTKAERGGLSELDKAGFIKRQLVETRQITKHVAQILDSRMNTKYDENDKLIREVKVITLKSKLVSDFRKDFQFYKVREINNYHHAHDAYLNAVVGTALIKKYPKLESEFVYGDYKVYDVRKMIAKSEQEIGKATAKYFFYSNIMNFFKTEITLANGEIRKRPLIETNGETGEIVWDKGRDFATVRKVLSMPQVNIVKKTEVQTGGFSKESILPKRNSDKLIARKKDWDPKKYGGFDSPTVAYSVLVVAKVEKGKSKKLKSVKELLGITIMERSSFEKNPIDFLEAKGYKEVKKDLIIKLPKYSLFELENGRKRMLASAGELQKGNELALPSKYVNFLYLASHYEKLKGSPEDNEQKQLFVEQHKHYLDEIIEQISEFSKRVILADANLDKVLSAYNKHRDKPIREQAENIIHLFTLTNLGAPAAFKYFDTTIDRKRYTSTKEVLDATLIHQSITGLYETRIDLSQLGGD

SEQ ID NO: 2049 - protein, 463 aa, synthetic construct
  REGION 1..463: note = Synthetic
MSRVLVVDADRRVLAPCTARRARLLLSGGKAAVLRRYPFTIILKQSYPTASPRPVRLKLDPGSKTTGIAVVTEATGEVVWAAELQHRGQLIKDALESRRSLRSSRRNRKTRYRPPRWRNRKRTGPPVLSSAGEVNQLGKWLAPSLQHRIEVIMTWVHRLRRYLPITAISQEIVRFDMQKMQNPEISGVEYQQGTLFGFEVREYLLDKWHRRCGYCGAQNTRLEVDHIVPRSHGGSDRVSNLTLSCEPCNKKKSNRPAALFLAKKPEVLQKLQRQAKAPLKDAAAVNSTRYALLERLKATGLPVEIASGGRTKFNRFERQIPKTHWLDAACVGASTPEVLQWEAVRPLAIKAMGHGKRQVTNVDAYGFPKGKPKGIPVHPFRTGDVIRAEVPVGKFAGNYVDRIVAIRTDQTRVSLPLRSQEKGKKKVPFLFQTKYITAKLFSADGYDYGFLQPPEPRTQRTES

SEQ ID NO: 2050 - protein, 463 aa, synthetic construct
  REGION 1..463: note = Synthetic
MSRVLVVDADRRVLAPCTARRARLLLSGGKAAVLRRYPFTIILKQSYPTASPRPVRLKLDPGSKTTGIAVVTEATGEVVWAAELQHRGQLIKDALESRRSLRSSRRNRKTRYRPPRWRNRKRTGPPVLSSAGEVNQLGKWLAPSLQHRIEVIMTWVHRLRRYLPITAISQEIVRFDMQKMQNPEISGVEYQQGTLFGFEVREYLLDKWHRRCGYCGAQNTRLEVDHIVPRSHGGSDRVSNLTLSCEPCNKKKSNRPAALFLAKKPEVLQKLQRQAKAPLKDAAAVNSTRYALLERLKATGLPVEIASGGRTKFNRFERQIPKTHWLDAACVGASTPEVLQWEAVRPLAIKAMGHGKRQVTNVDAYGFPKGKPKGIPVHPFRTGDVVRAEVPVGKFAGNYVDRIVAIRTDQTRVSLPLRSQEKGKKKVPFLFQTKYITAKLFSADGYDYGFLQPPEPRTQRTES

SEQ ID NO: 2051 - protein, 445 aa, synthetic construct
  REGION 1..445: note = Synthetic
MSKVFVVDKERRPLAPCTPRRARLLLSECKASVLRQYPFTIILKESHATATPRPLRLKIYPASKTTGLAVINESTAEVVWAAELKHRGHLIKKALESRRSLRRGRRSRKTRYRPARWLNRVRKPPVFTNTEGVVVTGKWLPPSLQHRIEVVMTWVERLQHYLQITAISQEVMRFDTQKLQNPELSGVEYQQGTLHGYEVREYLLEKWSRKCAYCGARDTRLEISHLIARSRGGSDQVSNLTLACKACRDQKGDSNLEKFLATKPKILKKLQSQARVSLKDVAAINSTRLALLERLKATGLPVEVSSGGETKYNRNQQQIPKSHWLDAVCVGASTPENLEWQQVKPLAIKAMGHGKRQMVNVDAFGFPRGKPKGIPVHPFRTGDIVRVTIPKGKYAGEYEERISSIKTSETRVGIPNKKEKGTIYLQTKYITAKIFSSDGYDYDYL

SEQ ID NO: 2052 - protein, 449 aa, synthetic construct
  REGION 1..449: note = Synthetic
MSQVFVVDKERRPLAPCTPRRARLLLSECKASVFRRYPFTIILKESHATATPRPLRLKIYPASKTTGLAVINESTAEVVWAAELKHRSQLIKKALESRRSLRSGRRSRKTRYRPARWLNRVRNNPVFTNTEGAVITGKWLPPSLQHRVEVVMTWVERLQRYLPITALSQEIMRFDTQKLQNPEISGVEYQQGTLHGYEVREYLLEKWSRKCAYCGARDTRLEINHIVARSRGGSDRVSNLTLACRSCREQRGASNLEEFLATRPALLMKLQSQAQVSLRDVAAINSTRFVLLERLKARGLPVEVSSGGETKFNRNQQQIPRSHWLNAVCIGPNTPENLKWDQVQPLAIKAMGHGKRQMVNVDAFGFPRGKPKGTPVHPFRTGDVVRAAIPKGKYVGEYEERISSIKTSETRVGIPNKKGQGTIYLQTKYITTKIFSSDGFDYEFLTSES

SEQ ID NO: 2053 - protein, 449 aa, synthetic construct; identical to SEQ ID NO: 2052
  REGION 1..449: note = Synthetic

SEQ ID NO: 2054 - protein, 457 aa, synthetic construct
  REGION 1..457: note = Synthetic
MSRVLVVDANRCPLAPCTPRRARLLLNSGKAAVLRRYPFTIILKQSYPTANPRPVRLKLDPGSKTTGIAVVTEATGEVVWAAELQHRGQLIKNALESRRSLRRGRRNRKTRYRPARWLNRKRTGPPVLSSADTVSTLGKWLAPSLQHRIEVIMTWVHRLRRYLPITAISQEIVRFDMQKMQNPEISGVEYQQGTLFGYEVREYLLDKWQRQCGYCGAKDKRLEVDHIVPRSHGGSDRVSNLTLSCEPCNKRKNQRPAAVFLAKKPEVLQKLQRQAKAPLKDAAAVNSTRYALLERLKATGLPVEIASGGRTKFNRSERQIPKTHWLDAACVGASTPEVLQWKAVKPLAIKAMGHGKRQVVNVDAYGFPRGKAKGIPVHPFRTGDIVRAEIPKGKYVGTYVSRIAETTTSKPLAGFKSKTGKRIQCHTKHMTKLFNSDGYGYGFLKAPEPRQTVISES

SEQ ID NO: 2055 - protein, 457 aa, synthetic construct
  REGION 1..457: note = Synthetic
MSRVLVVDADRCPLAPCTPRRARLLLNSGKAAVLRRYPFTIILKQSYPTASPRPVRLKLDPGSKTTGIAVVTEATGEVVWAAELQHRGQLIKNALESRRSLRRGRRNRKTRYRPARWLNRKRTGPPLLSSADTVSTLGKWLAPSLQHRIEVIMTWVHRLRRYLPITAISQEIVRFDMQKMQNPEISGVEYQQGTLFGYEVREYLLDKWRRQCGYCGAKDKRLEVDHIVPRSHGGSDRVSNLTLSCEPCNKRKNQRPAAVFLAKKPEVLQKLQRQAKAPLKDAAAVNSTRYALLERLKATGLPVEVASGGRTKFNRSERQIPKTHWLDAACVGASTPEVLQWEAVRPLAIKAMGHGKRQVVNVDAYGFPRGKAKGIPVHPFRTGDIVRAEIPKGKYVGTYVSRIAETTTSKPLAGFKSKTGKRIQCHTKHMTKLFNSDGYGYGFLKAPEPRQTVISES

SEQ ID NO: 2056 - protein, 448 aa, synthetic construct
  REGION 1..448: note = Synthetic
MSKVFVVDKERRPLAPCTPRRARLLLSECKASVLRQYPFTIILKESHATATPRPLRLKIYPASKTTGLAVINESTAEVVWAAELKHRGHLIKKALESRRSLRRGRRSRKTRYRPARWLNRVRKPPVLTNTEGVVVTGKWLPPSLQHRIKVVMTWVERLQHYLQITALSQEVMRFDTQKLQNPEISGVWYQQGTLHGYEVREYLLEKWSRKCAYCGARDTRLEISHLIARSRGGSDQVSNLTLACKACRDQKGDSNLEKFLATKPKILKKLQSQARVSLKDVAAINSTRLALLERLKATGLPVEVSSGGETKYNRNQQQIPKSHWLDAVCVGASTPENLEWQQVNPLAIKAMGHGKRQMVNVDAFGFPRGKPKGIPVHPFRTGDIVRVTIPKGKYAGEYEERISSIKTSETRVGIPNKKEKGTIYLQTKYITAKIFSSDGYEYYFYPNK

SEQ ID NO: 2057 - protein, 457 aa, synthetic construct; identical to SEQ ID NO: 2055
  REGION 1..457: note = Synthetic

SEQ ID NO: 2058 - protein, 9 aa, synthetic construct
  REGION 1..9: note = Synthetic
IEVMYPPPY

SEQ ID NO: 2059 - protein, 432 aa, Ktedonobacter racemifer
MNVVYVLSPERTPLMPCQPAIARLLLKQGKAKVRHRTPFTIQLLAQPEHVYTQPLTHGVDTGSSIIGSAVANEHGHVVYLSEVEIRNDIANTMKERARARRNRRQRKTRYRPARWLNRKKSIKTGRFSPTMRSKIDTHLREIRFIRSLLPITSTILETGSFDPYALRNPEVLQKKWLYQRGINYGFANTKAYVLTRDGYLCQQCKGKSKDRRLEVHHIIFRSRNGSDEEANLLTLCKTCHDGLHAGTITLKLTGKKKGTLQHATQMNSIRIQLLKRVEAEETWGFVTKEHRLLVGLPKEHIFDAAVIATRGVKPTFYTTSVLSKHCVSDGDYKQTKGKHGQQRVNTGKIMGFRKFDKVYYLGKEYFIKGRMSTGYAILMDIDGNKIEFKPLPKFDKMKRVSARSSWMMKQRTTPNPSFSITSSLSASAGKNV

SEQ ID NO: 2060 - DNA, 322 bp, synthetic construct
  misc_feature 1..322: note = Synthetic
  source 1..322: mol_type = other DNA
gtgaactaccactgagctgaagacgcagtggcttcttcggaagtcactgaagacgcagaccaggagctccttcggaagcttgagttcaccagactcgtttccagaaatgggaacagcgttcgattggtcatgacacctgcggttgacgcatcagaccgctgctctgtcgctgagggttaagtaggcttgaggaaagggccggtgctctcagcgcaaaaagccttttgaacactgtcgagatgaagccggattcccttcgtggtcacagcgaagggatacgcaccacccggcgcttgccggagcattttccgaaaggagtttt

SEQ ID NO: 2061 - DNA, 37 bp, synthetic construct
  misc_feature 1..37: note = Synthetic
  source 1..37: mol_type = other DNA
gaagaagaggccgcacccgtttgaggccgcaccaaat

SEQ ID NO: 2062 - DNA, 37 bp, synthetic construct
  misc_feature 1..37: note = Synthetic
  source 1..37: mol_type = other DNA
caagctttttaacagtggccttattaaatgacttctc

SEQ ID NO: 2063 - protein, 496 aa, unidentified
  REGION 1..496: note = IscB protein sequence
MMAVVYVISKSGKPLMPTTRCGHVRILLKEGKARVVERKPFTIQLTYESAEETQPLVLGIDPGRTNIGMSVVTESGESVFNAQIETRNKDVPKLMKDRKQYRMAHRRLKRRCKRRRRAKAAGTAFEEGEKQRLLPGCFKPITCKSIRNKEARFNNRKRPVGWLTPTANHLLVTHLNVVKKVQKILPVAKVVLELNRFSFMAMNNPKVQRWQYQRGPLYGKGSVEEAVSMQQDGHCLFCKHGIDHYHHVVPRRKNGSETLENRVGLCEEHHRLVHTDKEWEANLASKKSGMNKKYHALSVLNQIIPYLADQLADMFPGNFCVTSGQDTYLFREEHGIPKDHYLDAYCIACSALTDAKKVSSPKGRPYMVHQFRRHDRQACHKANLNRSYYMGGKLVATNRHKAMDQKTDSLEEYRAAHSAADVSKLTVKHPSAQYKDMSRIMPGSILVSGEGKLFTLSRSEGRNKGQVNYFVSTEGIKYWARKCQYLRNNGGLQIYV

SEQ ID NO: 2064 - DNA, 206 bp, synthetic construct
  misc_feature 1..206: note = Synthetic
  source 1..206: mol_type = other DNA
ggctcttccaactttatggttgcgaccgtaggttgaaagagcacaggctgagacattcgtaaggccgaaagaccggacgcaccctgggatttccccagtccccggaactgcatagcggatgccagttgatggagcaatctatcagataagccagggggaacaatcacctctctgtatcagagagagttttacaaaaggaggaacgg

SEQ ID NO: 2065 - DNA, 13 bp, synthetic construct
  misc_feature 1..13: note = Synthetic
  source 1..13: mol_type = other DNA
gaacatatgagtg

SEQ ID NO: 2066 - DNA, 15 bp, synthetic construct
  misc_feature 1..15: note = Synthetic
  source 1..15: mol_type = other DNA
gttaacatatgagtg

SEQ ID NO: 2067 - DNA, 17 bp, synthetic construct
  misc_feature 1..17: note = Synthetic
  source 1..17: mol_type = other DNA
ggtttaacatatgagtg

SEQ ID NO: 2068 - DNA, 19 bp, synthetic construct
  misc_feature 1..19: note = Synthetic
  source 1..19: mol_type = other DNA
gaagtttaacatatgagtg

SEQ ID NO: 2069 - DNA, 21 bp, synthetic construct
  misc_feature 1..21: note = Synthetic
  source 1..21: mol_type = other DNA
gacaagtttaacatatgagtg

SEQ ID NO: 2070 - DNA, 23 bp, synthetic construct
  misc_feature 1..23: note = Synthetic
  source 1..23: mol_type = other DNA
gaaacaagtttaacatatgagtg

SEQ ID NO: 2071 - DNA, 25 bp, synthetic construct
  misc_feature 1..25: note = Synthetic
  source 1..25: mol_type = other DNA
gacaaacaagtttaacatatgagtg

SEQ ID NO: 2072 - DNA, 27 bp, synthetic construct
  misc_feature 1..27: note = Synthetic
  source 1..27: mol_type = other DNA
gacacaaacaagtttaacatatgagtg

SEQ ID NO: 2073 - DNA, 24 bp, synthetic construct
  misc_feature 1..24: note = Synthetic
  source 1..24: mol_type = other DNA
gatgtcttcctgggacgaagacaa

SEQ ID NO: 2074 - DNA, 13 bp, synthetic construct
  misc_feature 1..13: note = Synthetic
  source 1..13: mol_type = other DNA
gtaggcatatgtc

SEQ ID NO: 2075 - DNA, 15 bp, synthetic construct
  misc_feature 1..15: note = Synthetic
  source 1..15: mol_type = other DNA
gtctaggcatatgtc

SEQ ID NO: 2076 - DNA, 17 bp, synthetic construct
  misc_feature 1..17: note = Synthetic
  source 1..17: mol_type = other DNA
gattctaggcatatgtc

SEQ ID NO: 2077 - DNA, 19 bp, synthetic construct
  misc_feature 1..19: note = Synthetic
  source 1..19: mol_type = other DNA
gaaattctaggcatatgtc

SEQ ID NO: 2078 - DNA, 21 bp, synthetic construct
  misc_feature 1..21: note = Synthetic
  source 1..21: mol_type = other DNA
gcaaaattctaggcatatgtc

SEQ ID NO: 2079 - DNA, 23 bp, synthetic construct
  misc_feature 1..23: note = Synthetic
  source 1..23: mol_type = other DNA
gaccaaaattctaggcatatgtc

SEQ ID NO: 2080 - DNA, 25 bp, synthetic construct
  misc_feature 1..25: note = Synthetic
  source 1..25: mol_type = other DNA
ggcaccaaaattctaggcatatgtc

SEQ ID NO: 2081 - DNA, 27 bp, synthetic construct
  misc_feature 1..27: note = Synthetic
  source 1..27: mol_type = other DNA
gaagcaccaaaattctaggcatatgtc

SEQ ID NO: 2082 - DNA, 24 bp, synthetic construct
  misc_feature 1..24: note = Synthetic
  source 1..24: mol_type = other DNA
gatgtcttcctgggacgaagacaa

SEQ ID NO: 2083 - DNA, 13 bp, synthetic construct
  misc_feature 1..13: note = Synthetic
  source 1..13: mol_type = other DNA
ggagtgaacgaga

SEQ ID NO: 2084 - DNA, 15 bp, synthetic construct
  misc_feature 1..15: note = Synthetic
  source 1..15: mol_type = other DNA
gaagagtgaacgaga

SEQ ID NO: 2085 - DNA, 17 bp, synthetic construct
  misc_feature 1..17: note = Synthetic
  source 1..17: mol_type = other DNA
gaaaagagtgaacgaga

SEQ ID NO: 2086 - DNA, 19 bp, synthetic construct
  misc_feature 1..19: note = Synthetic
  source 1..19: mol_type = other DNA
gcaaaaagagtgaacgaga

SEQ ID NO: 2087 - DNA, 21 bp, synthetic construct
  misc_feature 1..21: note = Synthetic
  source 1..21: mol_type = other DNA
gatcaaaaagagtgaacgaga

SEQ ID NO: 2088 - DNA, 23 bp, synthetic construct
  misc_feature 1..23: note = Synthetic
  source 1..23: mol_type = other DNA
gtcatcaaaaagagtgaacgaga

SEQ ID NO: 2089 - DNA, 25 bp, synthetic construct
  misc_feature 1..25: note = Synthetic
  source 1..25: mol_type = other DNA
gcatcatcaaaaagagtgaacgaga

SEQ ID NO: 2090 - DNA, 27 bp, synthetic construct
  misc_feature 1..27: note = Synthetic
  source 1..27: mol_type = other DNA
gagcatcatcaaaaagagtgaacgaga

SEQ ID NO: 2091 - DNA, 24 bp, synthetic construct
  misc_feature 1..24: note = Synthetic
  source 1..24: mol_type = other DNA
gatgtcttcctgggacgaagacaa

SEQ ID NO: 2092 - DNA, 17 bp, synthetic construct
  misc_feature 1..17: note = Synthetic
  source 1..17: mol_type = other DNA
gaaaagacgaggatgaa

SEQ ID NO: 2093 - DNA, 17 bp, synthetic construct
  misc_feature 1..17: note = Synthetic
  source 1..17: mol_type = other DNA
gagacagcttaacagaa

SEQ ID NO: 2094 - DNA, 17 bp, synthetic construct
  misc_feature 1..17: note = Synthetic
  source 1..17: mol_type = other DNA
ggtttaacatatgagtg

SEQ ID NO: 2095 - DNA, 17 bp, synthetic construct
  misc_feature 1..17: note = Synthetic
  source 1..17: mol_type = other DNA
gcctaaggccccttttc

SEQ ID NO: 2096 - DNA, 17 bp, synthetic construct
  misc_feature 1..17: note = Synthetic
  source 1..17: mol_type = other DNA
gagaaaaagaacctgaa

SEQ ID NO: 2097 - DNA, 17 bp, synthetic construct
  misc_feature 1..17: note = Synthetic
  source 1..17: mol_type = other DNA
gccccggttggtcttac

SEQ ID NO: 2098 - DNA, 17 bp, synthetic construct
  misc_feature 1..17: note = Synthetic
  source 1..17: mol_type = other DNA
gaaaagagtgaacgaga

SEQ ID NO: 2099 - DNA, 17 bp, synthetic construct
  misc_feature 1..17: note = Synthetic
  source 1..17: mol_type = other DNA
gatagagcaagacaaga

SEQ ID NO: 2100 - DNA, 17 bp, synthetic construct
  misc_feature 1..17: note = Synthetic
  source 1..17: mol_type = other DNA
gggaggctcaaagaggc

SEQ ID NO: 2101 - DNA, 17 bp, synthetic construct
  misc_feature 1..17: note = Synthetic
  source 1..17: mol_type = other DNA
gcccttcagatcagctt

SEQ ID NO: 2102 - DNA, 17 bp, synthetic construct
  misc_feature 1..17: note = Synthetic
  source 1..17: mol_type = other DNA
ggctgttcaggtctctg

SEQ ID NO: 2103 - DNA, 17 bp, synthetic construct
  misc_feature 1..17: note = Synthetic
  source 1..17: mol_type = other DNA
gaaggccgcacagctag

SEQ ID NO: 2104 - DNA, 17 bp, synthetic construct
  misc_feature 1..17: note = Synthetic
  source 1..17: mol_type = other DNA
gaatggtggaaacacag

SEQ ID NO: 2105 - DNA, 17 bp, synthetic construct
  misc_feature 1..17: note = Synthetic
  source 1..17: mol_type = other DNA
gggacatggcagataat

SEQ ID NO: 2106 - DNA, 17 bp, synthetic construct
  misc_feature 1..17: note = Synthetic
  source 1..17: mol_type = other DNA
gcctgactctgcaaagc

SEQ ID NO: 2107 - DNA, 17 bp, synthetic construct
  misc_feature 1..17: note = Synthetic
  source 1..17: mol_type = other DNA
gaatagcagattattcc

SEQ ID NO: 2108 - DNA, 17 bp, synthetic construct
  misc_feature 1..17: note = Synthetic
  source 1..17: mol_type = other DNA
gctagtcccttcccttt

SEQ ID NO: 2109 - DNA, 17 bp, synthetic construct
  misc_feature 1..17: note = Synthetic
  source 1..17: mol_type = other DNA
gagctttttccctgcag

SEQ ID NO: 2110 - DNA, 17 bp, synthetic construct
  misc_feature 1..17: note = Synthetic
  source 1..17: mol_type = other DNA
gtattatacctgcacga

SEQ ID NO: 2111 - DNA, 17 bp, synthetic construct
  misc_feature 1..17: note = Synthetic
  source 1..17: mol_type = other DNA
gagaataagttgagaaa

SEQ ID NO: 2112 - DNA, 17 bp, synthetic construct
  misc_feature 1..17: note = Synthetic
  source 1..17: mol_type = other DNA
gcttccttccaaggtca

SEQ ID NO: 2113 - DNA, 17 bp, synthetic construct
  misc_feature 1..17: note = Synthetic
  source 1..17: mol_type = other DNA
gtttctatctgtaaaat

SEQ ID NO: 2114 - DNA, 17 bp, synthetic construct
  misc_feature 1..17: note = Synthetic
  source 1..17: mol_type = other DNA
gattttacctttttcaa

SEQ ID NO: 2115 - DNA, 17 bp, synthetic construct
  misc_feature 1..17: note = Synthetic
  source 1..17: mol_type = other DNA
gaatttactttttgaaa

SEQ ID NO: 2116 - DNA, 17 bp, synthetic construct
  misc_feature 1..17: note = Synthetic
  source 1..17: mol_type = other DNA
gcaaagcccaaagtggt

SEQ ID NO: 2117 - DNA, 17 bp, synthetic construct
  misc_feature 1..17: note = Synthetic
  source 1..17: mol_type = other DNA
gagtgaatcacgtaaag

SEQ ID NO: 2118 - DNA, 17 bp, synthetic construct
  misc_feature 1..17: note = Synthetic
  source 1..17: mol_type = other DNA
gttacaaaattctttgt

SEQ ID NO: 2119 - DNA, 17 bp, synthetic construct
  misc_feature 1..17: note = Synthetic
  source 1..17: mol_type = other DNA
gattctaggcatatgtc

SEQ ID NO: 2120 - DNA, 17 bp, synthetic construct
  misc_feature 1..17: note = Synthetic
  source 1..17: mol_type = other DNA
gcaaggcagagccacgg

SEQ ID NO: 2121 - DNA, 17 bp, synthetic construct
  misc_feature 1..17: note = Synthetic
  source 1..17: mol_type = other DNA
gattcaattactaccca

SEQ ID NO: 2122 - DNA, 17 bp, synthetic construct
  misc_feature 1..17: note = Synthetic
  source 1..17: mol_type = other DNA
gtttctatgacatatgc

SEQ ID NO: 2123 - DNA, 17 bp, synthetic construct
  misc_feature 1..17: note = Synthetic
  source 1..17: mol_type = other DNA
gataattgtttctattc

SEQ ID NO: 2124 - DNA, 17 bp, synthetic construct
  misc_feature 1..17: note = Synthetic
  source 1..17: mol_type = other DNA
gaggaggctgtaaatct

SEQ ID NO: 2125 - DNA, 17 bp, synthetic construct
  misc_feature 1..17: note = Synthetic
  source 1..17: mol_type = other DNA
gcataaagtaacaaaac

SEQ ID NO: 2126 - DNA, 17 bp, synthetic construct
  misc_feature 1..17: note = Synthetic
  source 1..17: mol_type = other DNA
gatgttcacaagatagt

SEQ ID NO: 2127 - DNA, 17 bp, synthetic construct
  misc_feature 1..17: note = Synthetic
  source 1..17: mol_type = other DNA
gagtctggcaaggcaga

SEQ ID NO: 2128 - DNA, 17 bp, synthetic construct
  misc_feature 1..17: note = Synthetic
  source 1..17: mol_type = other DNA
gacctgccctagaaata

SEQ ID NO: 2129 - DNA, 17 bp, synthetic construct
  misc_feature 1..17: note = Synthetic
  source 1..17: mol_type = other DNA
gctaaaactaacctgcc

SEQ ID NO: 2130 - DNA, 17 bp, synthetic construct
  misc_feature 1..17: note = Synthetic
  source 1..17: mol_type = other DNA
ggcagtgcatttcacta

SEQ ID NO: 2131 - DNA, 17 bp, synthetic construct
  misc_feature 1..17: note = Synthetic
  source 1..17: mol_type = other DNA
gttaatggttttcacat

SEQ ID NO: 2132 - DNA, 17 bp, synthetic construct
  misc_feature 1..17: note = Synthetic
  source 1..17: mol_type = other DNA
gagtggaagaaggagat

SEQ ID NO: 2133 - DNA, 17 bp, synthetic construct
  misc_feature 1..17: note = Synthetic
  source 1..17: mol_type = other DNA
ggctctgcaggaacagg

SEQ ID NO: 2134 - DNA, 17 bp, synthetic construct
  misc_feature 1..17: note = Synthetic
  source 1..17: mol_type = other DNA
gtaaaataaatttgctc

SEQ ID NO: 2135 - DNA, 17 bp, synthetic construct
  misc_feature 1..17: note = Synthetic
  source 1..17: mol_type = other DNA
gagaaggcagctttctg

SEQ ID NO: 2136 - DNA, 17 bp, synthetic construct
  misc_feature 1..17: note = Synthetic
  source 1..17: mol_type = other DNA
gtctggcagaagacact

SEQ ID NO: 2137 - DNA, 17 bp, synthetic construct
  misc_feature 1..17: note = Synthetic
  source 1..17: mol_type = other DNA
gccagatttcttttctc

SEQ ID NO: 2138 - DNA, 17 bp, synthetic construct
  misc_feature 1..17: note = Synthetic
  source 1..17: mol_type = other DNA
gaaaagacgaggatgaa

SEQ ID NO: 2139 - DNA, 17 bp, synthetic construct
  misc_feature 1..17: note = Synthetic
  source 1..17: mol_type = other DNA
gagacagcttaacagaa

SEQ ID NO: 2140 - DNA, 17 bp, synthetic construct
  misc_feature 1..17: note = Synthetic
  source 1..17: mol_type = other DNA
ggtttaacatatgagtg

SEQ ID NO: 2141 - DNA, 17 bp, synthetic construct
  misc_feature 1..17: note = Synthetic
  source 1..17: mol_type = other DNA
gcctaaggccccttttc

SEQ ID NO: 2142 - DNA, 17 bp, synthetic construct
  misc_feature 1..17: note = Synthetic
  source 1..17: mol_type = other DNA
gagaaaaagaacctgaa

SEQ ID NO: 2143 - DNA, 17 bp, synthetic construct
  misc_feature 1..17: note = Synthetic
  source 1..17: mol_type = other DNA
gccccggttggtcttac

SEQ ID NO: 2144 - DNA, 17 bp, synthetic construct
  misc_feature 1..17: note = Synthetic
  source 1..17: mol_type = other DNA
gaaaagagtgaacgaga

SEQ ID NO: 2145 - DNA, 17 bp, synthetic construct
  misc_feature 1..17: note = Synthetic
  source 1..17: mol_type = other DNA
gatagagcaagacaaga

SEQ ID NO: 2146 - DNA, 17 bp, synthetic construct
  misc_feature 1..17: note = Synthetic
  source 1..17: mol_type = other DNA
gggaggctcaaagaggc

SEQ ID NO: 2147 - DNA, 17 bp, synthetic construct
  misc_feature 1..17: note = Synthetic
  source 1..17: mol_type = other DNA
gcccttcagatcagctt

SEQ ID NO: 2148 - DNA, 17 bp, synthetic construct
  misc_feature 1..17: note = Synthetic
  source 1..17: mol_type = other DNA
ggctgttcaggtctctg

SEQ ID NO: 2149 - DNA, 17 bp, synthetic construct
  misc_feature 1..17: note = Synthetic
  source 1..17: mol_type = other DNA
gaaggccgcacagctag

SEQ ID NO: 2150 - DNA, 17 bp, synthetic construct
  misc_feature 1..17: note = Synthetic
  source 1..17: mol_type = other DNA
gaatggtggaaacacag

SEQ ID NO: 2151 - DNA, 17 bp, synthetic construct
  misc_feature 1..17: note = Synthetic
  source 1..17: mol_type = other DNA
gggacatggcagataat

SEQ ID NO: 2152 - DNA, 17 bp, synthetic construct
  misc_feature 1..17: note = Synthetic
  source 1..17: mol_type = other DNA
gcctgactctgcaaagc

SEQ ID NO: 2153 - DNA, 17 bp, synthetic construct
  misc_feature 1..17: note = Synthetic
  source 1..17: mol_type = other DNA
gaatagcagattattcc

SEQ ID NO: 2154 - DNA, 17 bp, synthetic construct
  misc_feature 1..17: note = Synthetic
  source 1..17: mol_type = other DNA
gctagtcccttcccttt

SEQ ID NO: 2155 - DNA, 17 bp, synthetic construct
  misc_feature 1..17: note = Synthetic
  source 1..17: mol_type = other DNA
gagctttttccctgcag

SEQ ID NO: 2156 - DNA, 17 bp, synthetic construct
  misc_feature 1..17: note = Synthetic
  source 1..17: mol_type = other DNA
gtattatacctgcacga

SEQ ID NO: 2157 - DNA, 17 bp, synthetic construct
  misc_feature 1..17: note = Synthetic
  source 1..17: mol_type = other DNA
gagaataagttgagaaa

SEQ ID NO: 2158 - DNA, 17 bp, synthetic construct
  misc_feature 1..17: note = Synthetic
  source 1..17: mol_type = other DNA
gcttccttccaaggtca

SEQ ID NO: 2159 - DNA, 17 bp, synthetic construct
  misc_feature 1..17: note = Synthetic
  source 1..17: mol_type = other DNA
gtttctatctgtaaaat

SEQ ID NO: 2160 - DNA, 17 bp, synthetic construct
  misc_feature 1..17: note = Synthetic
  source 1..17: mol_type = other DNA
gattttacctttttcaa

SEQ ID NO: 2161 - DNA, 17 bp, synthetic construct
  misc_feature 1..17: note = Synthetic
  source 1..17: mol_type = other DNA
gaatttactttttgaaa

SEQ ID NO: 2162 - DNA, 17 bp, synthetic construct
  misc_feature 1..17: note = Synthetic
  source 1..17: mol_type = other DNA
gcaaagcccaaagtggt

SEQ ID NO: 2163 - DNA, 17 bp, synthetic construct
  misc_feature 1..17: note = Synthetic
  source 1..17: mol_type = other DNA
gagtgaatcacgtaaag

SEQ ID NO: 2164 - DNA, 17 bp, synthetic construct
  misc_feature 1..17: note = Synthetic
  source 1..17: mol_type = other DNA
gttacaaaattctttgt

SEQ ID NO: 2165 - DNA, 17 bp, synthetic construct
  misc_feature 1..17: note = Synthetic
  source 1..17: mol_type = other DNA
gattctaggcatatgtc

SEQ ID NO: 2166 - DNA, 17 bp, synthetic construct
  misc_feature 1..17: note = Synthetic
  source 1..17: mol_type = other DNA
gcaaggcagagccacgg

SEQ ID NO: 2167 - DNA, 17 bp, synthetic construct
  misc_feature 1..17: note = Synthetic
  source 1..17: mol_type = other DNA
gattcaattactaccca

SEQ ID NO: 2168 - DNA, 17 bp, synthetic construct
  misc_feature 1..17: note = Synthetic
  source 1..17: mol_type = other DNA
gtttctatgacatatgc

SEQ ID NO: 2169 - DNA, 17 bp, synthetic construct
  misc_feature 1..17: note = Synthetic
  source 1..17: mol_type = other DNA
gataattgtttctattc

SEQ ID NO: 2170 - DNA, 17 bp, synthetic construct
  misc_feature 1..17: note = Synthetic
  source 1..17: mol_type = other DNA
gaggaggctgtaaatct

SEQ ID NO: 2171 - DNA, 17 bp, synthetic construct
  misc_feature 1..17: note = Synthetic
  source 1..17: mol_type = other DNA
gcataaagtaacaaaac

SEQ ID NO: 2172 - DNA, 17 bp, synthetic construct
  misc_feature 1..17: note = Synthetic
  source 1..17: mol_type = other DNA
gatgttcacaagatagt

SEQ ID NO: 2173 - DNA, 17 bp, synthetic construct
  misc_feature 1..17: note = Synthetic
  source 1..17: mol_type = other DNA
gagtctggcaaggcaga

SEQ ID NO: 2174 - DNA, 17 bp, synthetic construct
  misc_feature 1..17: note = Synthetic
  source 1..17: mol_type = other DNA
gacctgccctagaaata

SEQ ID NO: 2175 - DNA, 17 bp, synthetic construct
  misc_feature 1..17: note = Synthetic
  source 1..17: mol_type = other DNA
gctaaaactaacctgcc

SEQ ID NO: 2176 - DNA, 17 bp, synthetic construct
  misc_feature 1..17: note = Synthetic
  source 1..17: mol_type = other DNA
ggcagtgcatttcacta

SEQ ID NO: 2177 - DNA, 17 bp, synthetic construct
  misc_feature 1..17: note = Synthetic
  source 1..17: mol_type = other DNA
gttaatggttttcacat

SEQ ID NO: 2178 - DNA, 17 bp, synthetic construct
  misc_feature 1..17: note = Synthetic
  source 1..17: mol_type = other DNA
gagtggaagaaggagat

SEQ ID NO: 2179 - DNA, 17 bp, synthetic construct
  misc_feature 1..17: note = Synthetic
  source 1..17: mol_type = other DNA
ggctctgcaggaacagg

SEQ ID NO: 2180 - DNA, 17 bp, synthetic construct
  misc_feature 1..17: note = Synthetic
  source 1..17: mol_type = other DNA
gtaaaataaatttgctc

SEQ ID NO: 2181 - DNA, 17 bp, synthetic construct
  misc_feature 1..17: note = Synthetic
  source 1..17: mol_type = other DNA
gagaaggcagctttctg

SEQ ID NO: 2182 - DNA, 17 bp, synthetic construct
  misc_feature 1..17: note = Synthetic
  source 1..17: mol_type = other DNA
gtctggcagaagacact

SEQ ID NO: 2183 - DNA, 17 bp, synthetic construct
  misc_feature 1..17: note = Synthetic
  source 1..17: mol_type = other DNA
gccagatttcttttctc

SEQ ID NO: 2184 - DNA, 20 bp, synthetic construct
  misc_feature 1..20: note = Synthetic
  source 1..20: mol_type = other DNA
cggttccgcaggacccaggg

SEQ ID NO: 2185 - DNA, 20 bp, synthetic construct
  misc_feature 1..20: note = Synthetic
  source 1..20: mol_type = other DNA
cccccttccctatgggaata

SEQ ID NO: 2186 - DNA, 20 bp, synthetic construct
  misc_feature 1..20: note = Synthetic
  source 1..20: mol_type = other DNA
agtggtgcctggaaaataaa

SEQ ID NO: 2187 - DNA, 20 bp, synthetic construct
  misc_feature 1..20: note = Synthetic
  source 1..20: mol_type = other DNA
actacagtggtgcctggaaa

SEQ ID NO: 2188 - DNA, 20 bp, synthetic construct
  misc_feature 1..20: note = Synthetic
  source 1..20: mol_type = other DNA
cccccttccctatgggaata

SEQ ID NO: 2189 - DNA, 20 bp, synthetic construct
  misc_feature 1..20: note = Synthetic
  source 1..20: mol_type = other DNA
atgcatataccagtttgtgg

SEQ ID NO: 2190 - DNA, 20 bp, synthetic construct
  misc_feature 1..20: note = Synthetic
  source 1..20: mol_type = other DNA
accgggaagtgaatggacgt

SEQ ID NO: 2191 - DNA, 20 bp, synthetic construct
  misc_feature 1..20: note = Synthetic
  source 1..20: mol_type = other DNA
acgaatttctgcaaacagaa

SEQ ID NO: 2192 - DNA, 20 bp, synthetic construct
  misc_feature 1..20: note = Synthetic
  source 1..20: mol_type = other DNA
ctccaaggacaaatctttat

SEQ ID NO: 2193 - DNA, 20 bp, synthetic construct
  misc_feature 1..20: note = Synthetic
  source 1..20: mol_type = other DNA
tttattttagctgaagggaa

SEQ ID NO: 2194 - DNA, 20 bp, synthetic construct
  misc_feature 1..20: note = Synthetic
  source 1..20: mol_type = other DNA
ccaagcaagaagtgaagccc

SEQ ID NO: 2195 - DNA, 20 bp, synthetic construct
  misc_feature 1..20: note = Synthetic
  source 1..20: mol_type = other DNA
tttatttcccttcagctaaa

SEQ ID NO: 2196 - DNA, 20 bp, synthetic construct
  misc_feature 1..20: note = Synthetic
  source 1..20: mol_type = other DNA
tcccaaagatgcccacctgc

SEQ ID NO: 2197 - DNA, 20 bp, synthetic construct
  misc_feature 1..20: note = Synthetic
  source 1..20: mol_type = other DNA
gagagcaaaagatacatctc

SEQ ID NO: 2198 - DNA, 20 bp, synthetic construct
  misc_feature 1..20: note = Synthetic
  source 1..20: mol_type = other DNA
atcaaaaagagtgaacgaga

SEQ ID NO: 2199 - DNA, 20 bp, synthetic construct
  misc_feature 1..20: note = Synthetic
  source 1..20: mol_type = other DNA
atttgtaccggtttttgtat

SEQ ID NO: 2200 - DNA, 20 bp, synthetic construct
  misc_feature 1..20: note = Synthetic
  source 1..20: mol_type = other DNA
tggtggtctggataaaagaa

SEQ ID NO: 2201 - DNA, 20 bp, synthetic construct
  misc_feature 1..20: note = Synthetic
  source 1..20: mol_type = other DNA
tgtgcccattggtggtctgg

SEQ ID NO: 2202 - DNA, 20 bp, synthetic construct
  misc_feature 1..20: note = Synthetic
  source 1..20: mol_type = other DNA
cgcagagagtcgccgtctcc

SEQ ID NO: 2203 - DNA, 20 bp, synthetic construct
  misc_feature 1..20: note = Synthetic
  source 1..20: mol_type = other DNA
tattcctgacactgccagga

SEQ ID NO: 2204 - DNA, 20 bp, synthetic construct
  misc_feature 1..20: note = Synthetic
  source 1..20: mol_type = other DNA
tttaaagaaaaagcagcttt

SEQ ID NO: 2205 - DNA, 20 bp, synthetic construct
  misc_feature 1..20: note = Synthetic
  source 1..20: mol_type = other DNA
gggacagaaaacctagaaaa

SEQ ID NO: 2206 - DNA, 20 bp, synthetic construct
  misc_feature 1..20: note = Synthetic
  source 1..20: mol_type = other DNA
tctgtccctccctcagtagt

SEQ ID NO: 2207 - DNA, 20 bp, synthetic construct
  misc_feature 1..20: note = Synthetic
  source 1..20: mol_type = other DNA
tttaagagcatcgaacaata

SEQ ID NO: 2208 - protein, 386 aa, synthetic construct
  REGION 1..386: note = Synthetic
  VARIANT 1..2: note = X represents any naturally occurring amino acid
  VARIANT 4: note = X represents any naturally occurring amino acid
  VARIANT 7..11: note = X represents any naturally occurring amino acid
  VARIANT 16..20: note = X represents any naturally occurring amino acid
  VARIANT 23: note = X represents any naturally occurring amino acid
  VARIANT 26..27: note = X represents any naturally occurring amino acid
  VARIANT 31: note = X represents any naturally occurring amino acid
  VARIANT 33..36: note = X represents any naturally occurring amino acid
  VARIANT 41: note = X represents any naturally occurring amino acid
  VARIANT 43..50: note = X represents any naturally occurring amino acid
  VARIANT 52..54: note = X represents any naturally occurring amino acid
  VARIANT 57: note = X represents any naturally occurring amino acid
  VARIANT 59: note = X represents any naturally occurring amino acid
  VARIANT 63..64: note = X represents any naturally occurring amino acid
  VARIANT 66..78: note = X represents any naturally occurring amino acid
  VARIANT 80..82: note = X represents any naturally occurring amino acid
  VARIANT 84..85: note = X represents any naturally occurring amino acid
  VARIANT 87..89: note = X represents any naturally occurring amino acid
  VARIANT 91..92: note = X represents any naturally occurring amino acid
  VARIANT 94..96: note = X represents any naturally occurring amino acid
  VARIANT 98: note = X represents any naturally occurring amino acid
  VARIANT 101: note = X represents any naturally occurring amino acid
  VARIANT 103..104: note = X represents any naturally occurring amino acid
  VARIANT 108..109: note = X represents any naturally occurring amino acid
  VARIANT 112: note = X represents any naturally occurring amino acid
  VARIANT 115..118: note = X represents any naturally occurring amino acid
  VARIANT 122: note = X represents any naturally occurring amino acid
  VARIANT 125..143: note = X represents any naturally occurring amino acid
  VARIANT 146..154: note = X represents any naturally occurring amino acid
  VARIANT 157: note = X represents any naturally occurring amino acid
  VARIANT 159..169: note = X represents any naturally occurring amino acid
  VARIANT 172: note = X represents any naturally occurring amino acid
  VARIANT 174..176: note = X represents any naturally occurring amino acid
  VARIANT 174..179: note = X represents any naturally occurring amino acid
  VARIANT 180..181: note = X represents any naturally occurring amino acid
  VARIANT 185: note = X represents any naturally occurring amino acid
  VARIANT 187..192: note = X represents any naturally occurring amino acid
  VARIANT 194..195: note = X represents any naturally occurring amino acid
  VARIANT 197..202: note = X represents any naturally occurring amino acid
  VARIANT 204..206: note = X represents any naturally occurring amino acid
  VARIANT 209..213: note = X represents any naturally occurring amino acid
  VARIANT 216..220: note = X represents any naturally occurring amino acid
  VARIANT 223..225: note = X represents any naturally occurring amino acid
  VARIANT 223..228: note = X represents any naturally occurring amino acid
  VARIANT 230..256: note = X represents any naturally occurring amino acid
  VARIANT 258..274: note = X represents any naturally occurring amino acid
  VARIANT 276..277: note = X represents any naturally occurring amino acid
  VARIANT 280..281: note = X represents any naturally occurring amino acid
  VARIANT 283..288: note = X represents any naturally occurring amino acid
  VARIANT 290: note = X represents any naturally occurring amino acid
  VARIANT 292..293: note = X represents any naturally occurring amino acid
  VARIANT 296..319: note = X represents any naturally occurring amino acid
  VARIANT 321..322: note = X represents any naturally occurring amino acid
  VARIANT 324..331: note = X represents any naturally occurring amino acid
  VARIANT 333..336: note = X represents any naturally occurring amino acid
  VARIANT 338: note = X represents any naturally occurring amino acid
  VARIANT 340..342: note = X represents any naturally occurring amino acid
  VARIANT 344..349: note = X represents any naturally occurring amino acid
  VARIANT 351..354: note = X represents any naturally occurring amino acid
  VARIANT 356..386: note = X represents any naturally occurring amino acid
XXVXVLXXXXXPLMPXXXXXARXLLXXGKAXVXXXXPFTIXLXXXXXXXXQXXXLGXDXGSKXXGXXXXXXXXXXXXXEXXXRXXIXXXLXXRXXXRXRRXRXXRYRXXRFXNRXXXXGWLXPSXXXXXXXXXXXXXXXXXXXPIXXXXXEXXXFDXQXXXNPXIXGXXYQXGXXXGXXXXREYXLXXXXXXCXXCXXXXXXLXXXHIXXXXXGGXXXXXNLXXXCXXCXXXXXXXXXXXXXXXXXXXXXXXXXXXRXXXXXXXXXXXXXXXXXGXXTKXXRXXXXXXKXHXXDAXXXXXXXXXXXXXXXXXXXXXXXXRXXGXXXXXXXXGXXXXDXVXXXGXXXXXXGXXXXGXXXXXXXXXXXXXXXXXXXXXXXXXXXXXXX

SEQ ID NO: 2209 - DNA, 40 bp, synthetic construct
  misc_feature 1..40: note = Synthetic
  source 1..40: mol_type = other DNA
gcaaagcatcatcaaaaagagtgaacgagactagaagtct

SEQ ID NO: 2210 - DNA, 36 bp, synthetic construct
  misc_feature 1..36: note = Synthetic
  source 1..36: mol_type = other DNA
gcaaagcatcatcaaaaagagtgagactagaagtct

SEQ ID NO: 2211 - DNA, 36 bp, synthetic construct; identical to SEQ ID NO: 2210
  misc_feature 1..36: note = Synthetic
  source 1..36: mol_type = other DNA

SEQ ID NO: 2212 - DNA, 35 bp, synthetic construct
  misc_feature 1..35: note = Synthetic
  source 1..35: mol_type = other DNA
gcaaagcatcatcaaaaagacgagactagaagtct

SEQ ID NO: 2213 - DNA, 34 bp, synthetic construct
  misc_feature 1..34: note = Synthetic
  source 1..34: mol_type = other DNA
gcaaagcatcatcaaaaagagagactagaagtct

SEQ ID NO: 2214 - DNA, 34 bp, synthetic construct; identical to SEQ ID NO: 2213
  misc_feature 1..34: note = Synthetic
  source 1..34: mol_type = other DNA

SEQ ID NO: 2215 - DNA, 33 bp, synthetic construct
  misc_feature 1..33: note = Synthetic
  source 1..33: mol_type = other DNA
gcaaagcatcatcaaaaagaagactagaagtct

SEQ ID NO: 2216 - DNA, 32 bp, synthetic construct
  misc_feature 1..32: note = Synthetic
  source 1..32: mol_type = other DNA
gcaaagcatcatcaaaaagagactagaagtct

SEQ ID NO: 2217 - DNA, 31 bp, synthetic construct
  misc_feature 1..31: note = Synthetic
  source 1..31: mol_type = other DNA
gcaaagcatcatcactcgagactagaagtct

SEQ ID NO: 2218 - DNA, 31 bp, synthetic construct
  misc_feature 1..31: note = Synthetic
  source 1..31: mol_type = other DNA
gcaaagcatcatcaaacgagactagaagtct

SEQ ID NO: 2219 - DNA, 28 bp, synthetic construct
  misc_feature 1..28: note = Synthetic
  source 1..28: mol_type = other DNA
gcaaagcatcatacgagactagaagtct

SEQ ID NO: 2220 - DNA, 27 bp, synthetic construct
  misc_feature 1..27: note = Synthetic
  source 1..27: mol_type = other DNA
gcaaagcatcatcgagactagaagtct

SEQ ID NO: 2221 - DNA, 27 bp, synthetic construct
  misc_feature 1..27: note = Synthetic
  source 1..27: mol_type = other DNA
gcaaagcatcatcgagactagaagtct

SEQ ID NO: 2222 - DNA, 25 bp, synthetic construct
  misc_feature 1..25: note = Synthetic
  source 1..25: mol_type = other DNA
gcaaagcatcatcaactagaagtct

SEQ ID NO: 2223 - DNA, 23 bp, synthetic construct
  misc_feature 1..23: note = Synthetic
  source 1..23: mol_type = other DNA
gcaaagcatcagactagaagtct

SEQ ID NO: 2224 - DNA, 65 bp, Ktedonobacter racemifer
  variation 1..65: note = n represents any nucleotide
  variation 48..55: note = n represents any nucleotide
  source 1..65: mol_type = other DNA
cttgcgggatgaagaagaggccgcacccgtttgaggccgcaccaaatnnnnnnnnatcgtccatt

SEQ ID NO: 2225 - DNA, 65 bp, Ktedonobacter racemifer
  variation 11..18: note = n represents any nucleotide
  source 1..65: mol_type = other DNA
aatggacgatnnnnnnnnatttggtgcggcctcaaacgggtgcggcctcttcttcatcccgcaag

SEQ ID NO: 2226 - RNA, 47 nt, Ktedonobacter racemifer
  source 1..47: mol_type = other RNA
gggaagaagaggkccgcacccgtttgaggccgcaccaaatgtgaact

SEQ ID NO: 2227 - DNA, 65 bp, synthetic construct
  misc_feature 1..65: note = Synthetic
  variation 48..55: note = n represents any nucleotide
  source 1..65: mol_type = other DNA
atgattacgccaagctttttaacagtggccttattaaatgacttctcnnnnnnnncccgggtacc

SEQ ID NO: 2228 - DNA, 65 bp, synthetic construct
  misc_feature 1..65: note = Synthetic
  variation 11..18: note = n represents any nucleotide
  source 1..65: mol_type = other DNA
ggtacccgggnnnnnnnngagaagtcatttaataaggccactgttaaaaagcttggcgtaatcat

SEQ ID NO: 2229 - RNA, 46 nt, synthetic construct
  misc_feature 1..46: note = Synthetic
  source 1..46: mol_type = other RNA
ggcaagctttttaacagtggccttattaaatgacttctcgtgaact

SEQ ID NO: 2230 - DNA, 46 bp, Allochromatium warmingii
  source 1..46: mol_type = other DNA
tttaacagtggccttattaaatgacttctcatgagatcatcgtcca

SEQ ID NO: 2231 - DNA, 46 bp, Allochromatium warmingii
  source 1..46: mol_type = other DNA
tggacgatgatctcatgagaagtcatttaataaggccactgttaaa

SEQ ID NO: 2232 - DNA, 46 bp, Allochromatium warmingii; identical to SEQ ID NO: 2230
  source 1..46: mol_type = other DNA

SEQ ID NO: 2233 - DNA, 46 bp, Allochromatium warmingii; identical to SEQ ID NO: 2231
  source 1..46: mol_type = other DNA

SEQ ID NO: 2234 - DNA, 46 bp, Allochromatium warmingii; identical to SEQ ID NO: 2230
  source 1..46: mol_type = other DNA

SEQ ID NO: 2235 - DNA, 46 bp, Allochromatium warmingii; identical to SEQ ID NO: 2231
  source 1..46: mol_type = other DNA

SEQ ID NO: 2236 - DNA, 46 bp, Allochromatium warmingii; identical to SEQ ID NO: 2230
  source 1..46: mol_type = other DNA

SEQ ID NO: 2237 - DNA, 46 bp, Allochromatium warmingii; identical to SEQ ID NO: 2231
  source 1..46: mol_type = other DNA

SEQ ID NO: 2238 - RNA, 25 nt, Allochromatium warmingii
  source 1..25: mol_type = other RNA
ggccttattaaatgacttctcgtca

SEQ ID NO: 2239 - DNA, 46 bp, Allochromatium warmingii; identical to SEQ ID NO: 2230
  source 1..46: mol_type = other DNA

SEQ ID NO: 2240 - DNA, 46 bp, Allochromatium warmingii; identical to SEQ ID NO: 2231
  source 1..46: mol_type = other DNA

SEQ ID NO: 2241 - DNA, 46 bp, Streptococcus pyogenes
  source 1..46: mol_type = other DNA
tttaacagtggccttattaaatgacttctctggttaatatcgtcca

SEQ ID NO: 2242 - DNA, 46 bp, Streptococcus pyogenes
  source 1..46: mol_type = other DNA
tggacgatattaaccagagaagtcatttaataaggccactgttaaa

SEQ ID NO: 2243 - RNA, 26 nt, Streptococcus pyogenes
  source 1..26: mol_type = other RNA
gggccttattaaatgacttctcgttt

SEQ ID NO: 2244 - DNA, 46 bp, Streptococcus pyogenes; identical to SEQ ID NO: 2241
  source 1..46: mol_type = other DNA

SEQ ID NO: 2245 - DNA, 46 bp, Streptococcus pyogenes; identical to SEQ ID NO: 2242
  source 1..46: mol_type = other DNA

SEQ ID NO: 2246 - DNA, 28 bp, unidentified
  source 1..28: mol_type = other DNA; note = Human gut metagenome
tcatcaaaaagagtgaacgagactagaa

SEQ ID NO: 2247 - DNA, 30 bp, unidentified
  source 1..30: mol_type = other DNA; note = Human gut metagenome
tcatcaaaaagagtgaacgcgagactagaa

SEQ ID NO: 2248 - DNA, 31 bp, unidentified
  source 1..31: mol_type = other DNA; note = Human gut metagenome
tcatcaaaaagagtgaacgacgagactagaa

SEQ ID NO: 2249 - DNA, 32 bp, unidentified
  source 1..32: mol_type = other DNA; note = Human gut metagenome
tcatcaaaaagagtgaacgaacgagactagaa

SEQ ID NO: 2250 - DNA, 15 bp, unidentified
  source 1..15: mol_type = other DNA; note = Human gut metagenome
tcatcgagactagaa

SEQ ID NO: 2251 - DNA, 20 bp, unidentified
  source 1..20: mol_type = other DNA; note = Human gut metagenome
tcatcaaaacgagactagaa

SEQ ID NO: 2252 - DNA, 22 bp, unidentified
  source 1..22: mol_type = other DNA; note = Human gut metagenome
tcatcaaaaagagagactagaa

SEQ ID NO: 2253 - DNA, 27 bp, unidentified
  source 1..27: mol_type = other DNA; note = Human gut metagenome
tcatcaaaaagagtgacgagactagaa

SEQ ID NO: 2254 - DNA, 17 bp, unidentified
  source 1..17: mol_type = other DNA; note = Human gut metagenome
tcatcacgagactagaa

SEQ ID NO: 2255 - protein, 199 aa, unidentified
  REGION 1..199: note = Ga0207030_1011_-_->_pfam14239(3,96)[74.0]
MSVFVLDKKKNPLMPCSEKRARLLLQRGRAVVIRVYPFTIRLKDRVGGETQDLRLGIDPRSKTTGLMLARECEKIDSESGEIKRTRLTARGFPRGYLLRKKSVNGFQTGDMVIADIPKGVKSGVHVGRVAIRSSGYFNIQSTKNVIQGVSHRHCKMMQRADGYGYSIVAQQKEVSGNLGHASRAALSIPGMNAEVSRAI

SEQ ID NO: 2256 - protein, 325 aa, unidentified
  REGION 1..325: note 0137383_10000411_-_->_IscB_BH_Trimmed_Muscle(80,148)[57.0]
MVFVLDRHKKPLMPCTPRRARLLLARRRAVVHRIRPFVIRLRDRRTQDSVLQESVLKIDPGSRTSGMTLVRAEETPAGEVHHALFCSEVQHRGELVHRGKQTQSNARRRRRSATLRHRAPRFDNRAVAKGWLPPSMCSRVGNILTWARRYSRWVPVGTWTGGRTRWNRARLGIAKTHANDALCVGEIAGVKLLRLKTLRIKATGRGEHCRTNWTAEGFPRGYKMRQKQVRGFKTGDLVRAEVPEPLTTAGIHLGRVAVRASGSFRVGKVDGIHARYGVLVQRADGYEYEWTEQQNRRLFPTPAPRKGTPASSPSLKSGASAGGDW

SEQ ID NO: 2257 - protein, 325 aa, unidentified
  source 1..325: note = Human gut metagenome
MRVFVLNKRGQPLMPCSPAKARLLLKEKKAIVKRRTPFTIQLTIATGEARQPVTLGVDSGYKHIGLSATTEKAELYASEVELRQDITDLLSARLALRRSRRSRKTRYRAPRFDNRVASKREGWLAPSVENRIAAHMSRVEAVMQVLPVTAITVETAAFDTQLLKNPDIAGEAYQQGEQLGFWNVREYVLFRDGHVCQHCRGKSKDPILNVHHIESRRTGGDAPNNLITLCETCHKAFHRGEIELKVRRGKSFKAETFMGIMRWTLFERLKKAHPELRVRNTYGYLTKHKRISHGIAKSHCADAYCIADNLGAKRLEGFFFQKQTR

SEQ ID NO: 2258 - protein, 475 aa, unidentified
  REGION 1..475: note = 335256_-_->_IscB_BH_Trimmed_Muscle(70,169)[47.7]
MKPVYVVGYNGQGLMPTTPRKARKLVESGRAVVLFKTPYTIKLLYKTGVNTQPTFEGTDTGSQHIGVAVTTDEKVLSKEEYALRSTMDKRALIETRASYRKGRRYRKTRYRHPKFRPHTKRVYVEKPVRYNKHLTHWKKCKNVFASSKKKGWLPPSIQSKCDMTMQIIDRYKMILPPKTRFRHEVGRFDIARIKDPSIHGEMYQYGRLYDEENVRAYVFERDGYTCKVCKKKAGSKRKDGSTVKLAAHHIDFRSKGATDNPDRMITVCDGCHTTVNHQKGGILYQWMLDEKKVARGYRDETFMNIIRRKLFKEFPNDEFTYGNFTAADRKTLGLEKTHANDAVAIACQGRPVKDNPDTTYYQQVRHNKRSLHEATARKGRKEPNRRQIRNAKNTKSVTIGRYNSKKTFYVYDKVSYKGQVGWISGFTKTAAYVKDKDDNYIKYPDKSYNQINLSDLSVISHNDNWLIGAVSPIGK

SEQ ID NO: 2259 - protein, 463 aa, unidentified
  REGION 1..463: note a0210056_1025515_-_->_IscB_BH_Trimmed_Muscle(124,198)[77.1
MQKLLVELKNAPTDVPQVCSSVSPVLNSPCEVMDSVQDIQLANNNSDVDQLGNRRNTLLVVFTLNKNGKPLMPCKPAKARHLLKEGKAKVVRGQPFTIQLLYGSGTAIQPIILGIDPGYDKIGFSAITDKKELISGEVRLRKDVSAKLTERRMYRRNRRNKLWYRKPRFLNRVSKKENWLAPSIRYKLDSHISLINKIKEILPISDTIVEIASFDAQKIVNPEISSIKYQQGELQGYEIREYLLEKWGRKCAYCGKKDIPLEVEHIIPKSRGGTDRVSNLTLSCQKCNLKKGNRTAKEFGYPEIQKQGKESLKATAFMNNVRWRLVNILNCKWTYGYKTKHDRIKLGLEKSHSNDAFTIAGGNKQLGSVQYIGNRYRRNDRSLQLNRKGFTPSIRRQRYNLQPHSLVKWNNQLLRIRGISCKGARVVLENKKSVKIDSVQLYKYMRGWQLFPDINDGVSLLQN

SEQ ID NO: 2260 - protein, 435 aa, Geitlerinema sp.
  source 1..435: note = str. FC II
MSNFVFVLDTKRQPLAPCHPARARELLAKGKAAIYRRYPFTIVLNRAVGDVPPSYQLKIDPGSQTTGLALVNRSQLVWGAELQHRGARIKAKLATRRVCRRNRRNRKTRYRKPRFLNRTRPKGWLPPSLNHRVETTMTWVNRLRKLCPIVCVSQELVRFDTQKLQNPEVSGIEYQQGELLGYEVREYVLQKWGRKCVYCGVENVPLEVEHIQPQSKGGSDRVSNLTLACRPCNQSKGNRDVREFLLEKPSVLERILRQAKTPLKDAAAVNATRWQLYQRLKETGLPVEVGTGGLTKFNRTRLGLPKAHWLDAACVGETPSLHLATETPIAILSKGHSTRFRTLIDRYGFPRAVRQTKAQVNGLQAGDIVRAIVPNGKYRGQWTGAIAGVRKKRPPALRPFGKKQIDLTAQTQIQIVHKQDGYEYDINSCGHSSRR

SEQ ID NO: 2261 - protein, 277 aa, unidentified
  REGION 1..277: note a0307954_1000334_-_->_IscB_BH_Trimmed_Muscle(72,144)[89.7
MAVFVLDRQKNPLMPCSEKRARLLLTRRRAVVVRAYPFTIRLKDRAGGAVQKVVLKIDPGSKETGLAVSRVSAQGEHVLCLIELTHRGHQISKALDQRRGFRSRRRGQLRYRAPRFSNRTKPKGWLAPSLQHRVDTTASIVNRLCTLVPVSSISQELVRFDLQQMENPEISGVEYQQGTLLGYEVREYLLEKWGLECAYCAVTDTPLEIEHIVPKSNGGSNRISNLTLACHDCNQEKGSQTLAEFFQTSSRLKDKQPRMDNVLIQCKRPLRDAAAVN

SEQ ID NO: 2262 - protein, 216 aa, unidentified
  REGION 1..216: note = a0373633_0030533_-_->_pfam14239(5,83)[54.9]
MVLSVFVLDNRGVAVMPCTQKRARLLLARGRARVHRLVPFVIRSVDVKAQDCSLQPLSLKIDPGSKTMCQRPMRWMRRVSVRWTGYRPSLHIKSTGRGSYQRTRLDAFGFPRGYLMRNKSVKGFATGDLVKATVTHGKKQGGYRGRVAIRATGSFNIQTREGVVQGVSHRHCTLLQRGDGYGYQQQSKSDAGRDRASHDALCLPGMNAGVSRAIQG

SEQ ID NO: 2263 - protein, 424 aa, unidentified
  REGION 1..424: note = a0376687_0042770_-_->_pfam14279(13,65)[44.2]
MLRTVRQPGNGALIRGHRKESPMVFVLDQHKKPLMPCTPRRARLLLARKRAVVHRLSPFTIRRHRTAASRRARCNRWSSRSIPVRRPPAWPWRGSRRRMRGRCTTRCILPSSPIGEKRSASVCANGRSIAAAGVRPTCATGQPASSTVAVRPAGFLRRCAHGSTTSCPGLPATGAGSRWCAWRSSASSSTPRGSQNPEISGVEYQRGELAGWEVRSYLLEKFEHRCAYCGRTDTPFELDHIQSRSRGGSDRVSNLALSCHACNVAKGDHTAAEFGHPEVAAQAKQPLRDAAAVNATRVALCDELRKLGLPLTSLVWRTHALEPGALRDPQDPRTGCGCRVGALAGVSASRHKTLAIKATGRGRYSRTNVDEHGFPVGYLMRHKQVMGIKTGDRVLQFADGYDYALVDTGSEHVAVAPPPTLCPP

SEQ ID NO: 2264 - protein, 278 aa, unidentified
  REGION 1..278: note = 0172375_10015289_-_->_cas9(114,151)[29.3
MASRRSLRRGRRTRKTRYRQARFLNRKRNQGWLPPSLESRVLNVNSWVNRLRRLAPVSSISLELVKFDTQKLQNPEVSGVEYQQGELLGYEVREYLLEKWGRKCAYCKTANVPLQIEHIVPKIRGGTNRVSNLTLACESCNQAKGNLTAAEFGHPGIQSQARMPLKDAAAVNATRWALFNQLKGLGLPVEMGSGGRTKFNRVRQGYPKAHWIDAACVGESGSKINIPSWAIPVQIKAVGHGSRQRCGTDKYGFPVRHAPKAKSFMGYQTGDIVQANIP

SEQ ID NO: 2265 - protein, 486 aa, unidentified
  REGION 1..486: note = a0180732_1000856_-_->_pfam14239(3,210)[179.7]
MKVYVISKSGKPLMPTERFGKVRRLLKSGKAKVVHRKPFTIQLLYETTEIVQPLILGVDTGANDIGVVVTKEDGEPVFLGELETRTIEVAQNMKDRCEHRRARRRHRREKRKRRAKAAGTIFEKKKYHINGCEEAITCKLIKPGMVRFENRKRADKWLTPTCTHLLQTHINFIKKIAKILPIAIVNFEYAKFDLHKINNPDVKGKDYQNGRKKGYVNTAEYVLCRDKHSCQLCKVKSGKMRVHHVIWQSENGSDTPENLVTLCEKCHEKVHNNQKADKKIKGLFEGIKKKYVHATILNSVLPKLFQWLKSTFENVNKTYGYETKEKRWEYNLPKSHVVDAYLIAIGDNPPHDLTSCESFLFKQFRRHNRANIKRQEDRKYYIGKKKVAVNRNKRTGQTFDSLKDLVTKCAEHETVLNLLTVKPATRPKRSTKPFGMGDVVKFRGGIHIVKGFTGNYLGFVDAADGKYNKNIKEAELVIKNQGIVCI

SEQ ID NO: 2266 - protein, 441 aa, unidentified
  source 1..441: note = Human oral metagenome
MSMSLTYVLDKNGQPLMPTQRCGKVYRLLKSGKAKVVQREPFTIKLLYEPETHIVQDLTLGVDTGSSKIGTAVVDNDANVYYASKVTIRNDISNKMSRRRIYRRARRTRKLRYRPVRFSNRKNSTKKDRFSPTMVSKINSHIREIEFVKSILPVKTLVIETGTFDPHLLEHIEDGIAFNKHWGYQKGSNYGFANSREACLNRDNYTCQCCGAKNTRLEVHHIIYRSKGGSDELVNLITLCEKCHKLLHDGKLKEFESKLSGKRKGILKHATQMNSIRIQLLRHYPEAIETFGFMTKENRQSSDLEKSHVNDAIIISTGCITKPKYKTEVYYKKKCIPRGDYAVTLYAGQGKKNKLGKTTKPRNTRPVYGFRKHDKVEYCNTICFLKSLRFAGNGPLMDIDGNILKFRERYGKADTTSVKNLKRISARKNCLCTKVTFLCTS

SEQ ID NO: 2267 - protein, 496 aa, unidentified
  REGION 1..496: note = a0307930_1006096_-_->_COG1403(194,267)[37.8]
MIYIVDARNKIGHPTKKHDMVGRLIRNERAKIIKRLNKDVMIVQLLTKVFSKSETIDCEFRIGIDPGYANIGFAVFKIHGNIITKLIKGEACLRTKKIKEGLDAKRMYRRSRRYLARKNIKKKYGTGRAKFKHPAWKNRSKHKFQPTHLHVIQSHENVLAKLLKLIPIEQVKIHLEYNNFDIHKMINPKIQSFWYQKGLQFGFENVKSYVRNRDNYQCQICKKDVGSIRNEVHHIKWKSTGGSDRPENLILLCEVCHNKVHKKGLNCPDKSISVNGYRNAGVLNSVMGTIWSRFENQCPVQDTYGYITSGVRNRDNIIKSHASDASVIAFNDSLGSQNIEDYSWKDYNSKLNMNQFPRHTRSFTLRHTDRRYTILNSNLPGKKKTVVAWNRKRRAGQDPKKQSLAELKQSLMIDGTLNSTVIVAIPGQKVMRSLITDYTIRKGDVVNVGSMIKVCKGVQNKGTVVTFENDLNPKKLDTFGTKKCHKIINNCGLVTY

SEQ ID NO: 2268 - protein, 442 aa, Ktedonobacter sp.
  source 1..442: note = 13_2_20CM_2_56_8
MSKVLLLDMTKQPLDPVHPGRARLLLKEGKAAVYRRYPFTLILKTQVDSPAVSALRLKLDPGAKTSGLALVDDASGEVVWAAELGHRGASIKKRIDARRGVRRKRRSRFTRYRKPRFHNRRSSRRKGRLPPSLESRVANMLTWVGRLRRLCPIEVISMELVKFDMQAMQNPEITGAQYQQGERMGYETREYLLAKWGRRCAYCGAEDVPLEIEHILCRARGGTHRVSNLTLACEPCNVKKGTQLIEDFLNKKPDVLARILAQAKTPLKAAAAVNATRWHLFERLKATGLPLETSSGGLTKYNRAKRHLPKTHWLDAACVGQSTPKPLETSQVVPLLIEATGHGNRQMCGVDEHGFPIRHRQRKKVHFGYQTGDLVRAVVPTGARAGTHVGRVLARASGSFDLRTKAGRQAGISYRYCRPIHRNDGYRYQQGGRHAVPATQST

SEQ ID NO: 2269 - protein, 528 aa, unidentified
  REGION 1..528: note = a0182741_1016627_-_->_pfam14239(1,185)[194.8]
VLPQPRTLETAPADTAGVATKRGAVDGIRPTTGVQHGRGETTREGGGTPDPVPAGRAAGAGDRTITSRVFVLDRKGRPLMPTHPARARELLRKGRARVHRLTPFTIRLVDVDATDPGVVVDGVELGIDPGSKTTGMALFVTDASGNRTAVSLIELVHRGLAIKMSLSKRAALRRGRRSRNLRYRAPRFDNRTRKPADGLDVWLPPSVRHRVVTTVAWLDRLARLAPITRVHVESARFDTHLLHEPEVSGVGYQQGTLAGTEAREYLLAKYQHRCVYCDATGVVLNLDHVRPRSRGGSNRVSNLVTACVPCNEAKDNLPVEQFLAHDPARLARVLAGLKKPLRDAAAMNSTRHALVGAIASRGFDPVTATGGRTKWNRTRFGVPKTHALDALCVGEVGGVSGWPSTTLAVTATGRGSYARTRSDRHGFPRLRLTRVKRHHGFATGDLVRAVVPTGKKAGTHFGRVAVRATGSFNITTSAGTVQGIHHRHVRLLQRADGYTYATMKEGVGTRGSAYPSPRLKPGVSRRTR

SEQ ID NO: 2270 - protein, 436 aa, unidentified
  REGION 1..436: note 0164242_10000581_-_->_IscB_BH_Trimmed_Muscle(77,145)[73.6]
MSVFVLDKKGRALMPCSEKRARLLLTRRKAFVKVMQPFTIQLKERLLEDSELQSVELKLDPGSRHTGMALVRDAEGIKYCLNLYQLDHCGQMIHRKLLRRAMYRKQRRSRKTRYRQARFLNRRKPKGWLAPSLMHRVNSTLSWALKFQRWVPLTKLVVERNRFDIQKLQRPEIKGIEYQRGTLFGMEVWEYLLEKWGHRCVYCEAPDRKLTIDHVTPRSRGGSDRVSNLVPACEYCNQFKGNKPVQEFLKRHPDRLKRILEGLKQSLKDAAAVNSTRYKLIEVFEQLKLPIETDTGAMTKWNRRRLNVPKTHSLDALCVGDVRSVSDWIGKPTQVIACYGRGRYQRVILDRFGFPKANLTRIKRPYGFGTGDIAQVFSEAHVKRQFPFQISKMHRLTVKIDGFFQLARRKKIVKLSYRYLKMKQRNNGYFITLQRF

SEQ ID NO: 2271 - protein, 289 aa, unidentified
  REGION 1..289: note = 0209697_10006283_-_->_pfam14239(21,196)[157.5]
MKISRDKQQVADKPEQKTAVVFVRNMWGKAINPTKPGKAYRLVRDGKAVPVCAKPYTIQMLGHCGGSVQPYRLGLDSGYSNVGASVINERTGVEVLSMEIELQKGQKDRNTDRKTRRHGRRNKKCRHRAARFDNRRRAKGKLAPSIQHKLDTHVRIATALINEKFVPISRAVVEGAQFDIQKIKNPNIEGVDYQQGDQAGFWNLREYVFHRDEHKCQNPDCKHKKEKNLPLQVHHLGFWKGDSTDRPGNLITLCVHCHRPQNHAKKGFLYGWEPKLKNFRPETFMSTIY

SEQ ID NO: 2272 - protein, 117 aa, unidentified
  REGION 1..117: note 0137371_10000193_-_->_IscB_CTerm_Trimmed_Muscle(18,110)[84. 4]
MPCQPRKARLLLKGGKAKVVKMVRRNNRQLHKATIRKGGKRQRNTAPKYVHGFRLFDCVKHQGQTCFVFGRRSSGYFDLRTLDGAKVHASASYKKLAVVQKASALLVERRAAFPPVS

SEQ ID NO: 2273 - protein, 511 aa, unidentified
  source 1..511: note = Human gut metagenome
MYVVYVLDEEGKPLMPTKRFGKVRRMLRDKLAKVVSVKPFVIQLLYKPKTHITQPLHGGTDPGRKNIGMSVINDKGEILYSSTTESRNQEIPKLMAERKAHRQASRRGERLRRKRRAKKYKTTTTFPEGRKLLGYENGVLALKDIINTQARFNNRKRPENWITPTVRQCIQTHISLVRQICRFLPVTDWSIEHNKFAFMKMEDGTVKGTDYQNGRLKTYKNVNDYIWHLQNGKCAICDSKIEHYHHIVQRTKGGSNRPDNIIGLCESCHAKVHSGETSLKEIGEKKKYAHLSVLNQAIPFICSELEQLFGEDNLYTCSGYETYTYREMYKLDKTHDIDAACIAAIPHNIETPIQKVKTYKIKQYRNHNRQIIHCQKERTYKLGKEKIAKNRKRRTDQKELSFNEWYKIQKKNCSKTELAEIMKKLTVIKSIRAYNNMKRLKPGSVFIYAKPETKKAEKPEQKHKQAINHSGKYILRGAITNGKYYKAEDYNKNNFSAKNCRFQYFKSLLYI

SEQ ID NO: 2274 - protein, 565 aa, unidentified
  REGION 1..565: note 0079226_10027342_-_->_IscB_BH_Trimmed_Muscle(155,257)[71.7]
MHTGEQTDLGVLPQLQALEPASADTAGVASKRGAGDGGRARSTTGVQHGRGETGRKAGVAPSGAAREGNPTTGVAVVFVVDKHHKPLQPTTERRARKLLKAGRAVVHRRYPFVIRVKDRTVGGSCVDGVQVGIDPGSRHTGIAVFTEKATSKGVVRTGLWLGELDHRGQRISRNLSSRAALRRGRRSRNLRYRKPRFLNRHPAPCDSCGANAQSGKRLCRPCQNLPRAERERGARPARLAPSLRHRVDTLASWANRLQRWAPVTGWHQELVRFDLHAMQRPGITSVEYQQGTLAGFEVREYLLSKWNHKCAYCGASGVGPGSVPLNIDHIHPGSKGGSNRISNLALACVACNQAKSNMPVEDFLVGKPAVLARVLAQAKAPLADAAAVNTTRWAVFHMLADTGLPVTAASGGRTKYNRTVTGTPKAHALDALCVGVLDRVKSYPSTTMVIGCAGRGTYARTRSDKHGFQRLHLTRTKRHYGFQTGDLVTAAVPTGAKAGIHIGTVAVRARGMFNITTAAGTIRDIHHRHVRLIQRADGYTYHSTSTPRVRLLSTANDRVPAGQKK

SEQ ID NO: 2275 - protein, 388 aa, unidentified
  REGION 1..388: note 0315295_10106663_-_->_IscB_BH_Trimmed_Muscle(182,248)[71.0]
MATTTTRQKTHQSVLPQRAALESLSADTVGVTTKRGREAHVTGNRGVAAGSDHGRGETVRDDRRRVRRHGQPGHTGSSVTGGGDPTTTTTESTTEQVRFTAGKVFVLDRHGEPLMPCHPARARQLLDKGRARVARMYPFTIRVVDRTVADSEVDGVVVKLDPGSKATGISVARVDIDGGITGLVAVEVRHRGHQIHQKLVARAALRRGRRTRNCRHRAPRFLNRARPKGRLAPSLQHRVDNVTGWVDRFRRLAPVTGIAMELVRFDTQLLENPNISGVEYQQGTLAGFEVKEYLLEKWGRKCAYCDITGVALNVDHIHPRSRGGSHRISNLTLSCVPCNQDKDNQPVEQFVTDPARLARILAAAKRPLRDAAAVNTTRWALWRKLAAT

SEQ ID NO: 2276 - protein, 459 aa, unidentified
  REGION 1..459: note = 0265297_10033497_-_->_pfam14239(2,190)[93.4]
MYFIVDGRNNLQHPTKKHDMIIRWISTGKAKFIGRDIVQVFKKFDRSKTIDCRFIIGLDPGYKNIGYSVFKIYKNQIQNILNGEVLTRTSEITKLISERRMYRRSRRSKHRENILRKFGRAKFKAPRWKNRKKKPWAPTHMHLFQSHLNLLQCIFNRIDYNQSEIVLEHFKFDSQKALDSTVSSWKYQKGPQFGFENVKAYVRARDNYKCQICGEKLLSLSVHHIQERADGGSDRPENLVTLCQSCHLLLHQTLAECPRPSKASPMRDSGVLNSCMNYLVNYISPAYTITGSDTAALRHYYNIEKSHVNDAKVIALSKLDLENFNCQDLSNTVNLKQFRRHTRNCVQRYEDRKYICDGFTVAWNRKSRSTQAESKPSLQEFKQEYPEEKVVAKPGRIIYFRTNSQAKFRPGDIFKHQNINYVLKQWASTQGTVTSETEIKFKIRNCRKIRNNSGLVTTR

SEQ ID NO: 2277 - protein, 327 aa, unidentified
  REGION 1..327: note = a0256842_1000027_-_->_pfam14239(2,168)[177.4]
MVFVLSKNKTPLAPTSEAKARILLKKGKAIVHKVYPFTIRLKENKECKKIFEIKFDVGASVTGVAIVDAVKCFFFAEIVHRGAVIKKAMDSRRAIRRSRRNRKTRYREPRFDNRTRPEGWLPPSVKSRADNVINFAKKYAKLIPIFSVAVEKDLSHLKPKKTPKQASIVQSARTYTIKELSRNFDVIVGEGWETYANRKELGLPKQHYYDAMCIGKEYKYEIVTDKVLEIKAQGRGSRQMCRMDRFGFPRTKAKSSKIVKGFQTGDIMKAIVSKGKKIGTYLGKVAVRASGNFNITTTKTTIQGINYKYCRTIQKGDGYAYAISTIK

SEQ ID NO: 2278 - protein, 426 aa, unidentified
  REGION 1..426: note = a0209123_1000186_-_->_pfam14239(4,178)[206.9]
MNGVFVISNSKQPLMPTSPARARKLLSGGKAAVFRSYPFTIILKDRAIGVIQPVRVKIDPGSKETGIALVNEVTMKVVFVMVLVHRGLAISTILASRRVLRSGRRNRNTRYRKPGLANTTKPEGWLAPSLLHRVHTTMTWVRRLSCLAPVAAISQELVKFDLQKLENPDISGIEYQQGTLAGYEVREYLLEKWHRTCSYCDAKDIPLQIEHVKAKTNGGTNRISNLTLACEPCNTAKGKLSIEVFLAGKPDRLKKIKGQLRQPLKDATAVNATRWRLFESLKLTGLPVETGSGGRTKFNRTIQGYGKAHWIDAACVGVSGASVIIPSGLHPLVAKASGHGNRQMCGTDKFGFPIRHRTAQKQFFGFQTGDMVTANVPKGKKIGIHTGRVLVRANGNFDIQTGTGRVAGIGHRHCTMVHQKDGYAYQ

SEQ ID NO: 2279 - protein, 649 aa, unidentified
  REGION 1..649: note = a0373956_0001933_-_->_pfam14239(3,165)[122.1]
MFVPVVDQNQQPMMPTTPARARRWIASGKATAFWRGGLFCVRLNQEPSSRVVQPVAVGIDPGSKREGYSVISAAHTYLNIQAKARVGVKEAEEQSTRMRRTRRNRKTPCRQPRPNRRQSKKTLPPSTRARWQWKLRVARFLCSLFPVSIIAVEDVAAATRPGKRRWNRSFSPLEVGKHWFYEEIRALAPLELVHSYETKAVREQLGLKKTSKKLAEVWEAHCVDAWCLAYRAVGGNTAPDHRGVVVFAPLIWHRRQLHRFQLEKGGMRKPYGGTLSQGIKRGTLVQHPRWGKALVGGTMDGRLSLHDPGTYKRLTQGAKVAECHVVTVLRWRTCLLPLHPLPKKRRASSPASKARVLGKSRLMSVTLLREGEREASMQKLAGASSLSFAHKRVWTSKTASRLFTVLAPVLLGMVLLGGWYFSTSRGLVATYELPPPSDVWTSLSVGFGSGLFLHMAWVTLQESLGGFLLAVMIALPVGFGLAKWRLFAATIYPYLAAGQAIPAIVIAPFLVVWMGYGMGPTVVLCLLVVLFPMIITTALGFQTLDQALVDAARVEGASLWPMLTRIELPLALPAIMAAVRTGLTLSVVGALVGEFVTNTDQGLGALVQIAKNQYDVPLMFATVLVLAIMAGVFYGITWGLTRISEILST

SEQ ID NO: 2280 - protein, 244 aa, unidentified
  REGION 1..244: note = 316622_100118550_-_->_pfam14239(3,174)[185.2
MLVYVQDQEGKPLMPTRRCGAVRRWLKSGRARVVRREPFTIRLVDRAGGYTQHLQAGVDLGTAHVGVAVVSAQEEVFSGEFRLRTDVSGLLTERRQFRRARRSRKCRHRPPRFRNRRRRDELAPSVRAQVAETLRVVRLVEGLLPVAAWTFEIGNFDPHQLVHPDVRGVGYQQGEQYGFANAREYVLWRDRHTCQACRGQSGDPRLTVHHLRQRQERGSNRPANLITLCRTCHQRHHQGPPLPL

SEQ ID NO: 2281 - protein, 438 aa, unidentified
  REGION 1..438: note = 0209048_10010134_-_->_pfam14239(4,179)[225.1]
MSQVFVLDANEQALNPIHPGRARLLLKQGKAAVHRRYPFTIILKRVVEQPTLHPLRVKIDPGSHTTGIALVNEHTGEVVWAAELTHRGEQIKRDLDKRRAVRRSRRQRKTRYRKPRFANRRKRTGTLPPSLESRVCNVLTWVRRLMQICPVTAISQELARFDTQALEHPDIEGVDYQRGQLAGYEVREYVLLKWNHQCAYCDAREVPLELDHVQPRSKRCLDRVSNLTLSCRSCNQRKGNRDVREFLHDDPARLARILAHLKSPLRDAAAVNTTRWALNARLKLFGVPVESGSGGLTKYNRVMRGLDKTHWLDAANVGRSTPASLIIKGIVPLHIIATGHGSRQMCRMDKYGFPRTGPKQRKRVQGFQTGDLVRAVVTSGTKQGTYVGKVAVRTRGVFNITTAQGVVTDIHHRYCTLIARADGYTYRRPKEVALSPIA

SEQ ID NO: 2282 - protein, 428 aa, Oscillatoria sp.
  source 1..428: note = str. PCC 10802
MKVFVLDTNRRPLDPTTPRRARKLLKGGKAAVFRLYPFTVILKRAVDSEPVQPLRLKIDPGSKTTGLAIVSERTGAVVWAAELTHRGFQIREALNSRKVKRRNRRYRKTRYRARRFNNRLRKAGWLPPSLNSRVENIVAWVRRLRRFAPISAISQELVRFDTQVIQNPEISGVEYQQGELQGCEVREYLLEKWGRKCAYCGAKETPLEVEHIYPRSKGGSNCVSNLTLACHPCNEKKGNRDVADFLSGKPDLLQRILSAAKAPLKDAAAVNSTRWALYEGLKNTGLPVEAGSGGLTKYNRKRLGLPKTHWLDAACVGESTPENLDASKIEKPLLIKATGRGCRQRVNPDKNGFLISHKSRAKTYQGWATGDIARADIPKGKYTGIHRGRIAIGQDGQFKIQVAHKKRFSVNYKYLTPIQKGDGYGYSF

SEQ ID NO: 2283 - protein, 236 aa, unidentified
  REGION 1..236: note Ga0101763_1138_-_->_IscB_BH_Trimmed_Muscle(33,66)[28.8]
MGNGVDSHRATNKDCTRKSSSCSSQSAQSKNAIEKPRFKNRKRPEGWLPISLMHRVFGVKTWADRLTRLAPVGSVVQELVRFDTQKMQNPELSGVEYQQGELFRYEVREYLLEKWGRKCAYCSVSDVPTGTGAQTKFNRCRLNLPKEHWIDAACIGQVDTVKLATTQPLLIKSTGYGSHQVIQIDKYGFPRKGYQVKLPVKDWKTGDIVNVVADKNAGLRGVRLKTVRAKTLAASG

SEQ ID NO: 2284 - protein, 494 aa, Nitrospira sp.
VQTRHGWPRNGPASYAGLQHGRGEMCREAHVTAERREQRSNPIQSQVFVLNQEGQPLMPCHPARARQLLKKGRAVVHRAVPLVTRLKNRTKAIVQPVRLKVDPGSKATGMALVRHQPSDSITVLSLFELQHRGHQISESLTARRHMRRRRRGNLRYRAPRVLNRARSAGWLPPSLQHRIDTTLAWVKRLQRFAPIKNISCELVRFDMQAMQNPEIDGTAYQQGTLTGYEVREYLLETFGRQCVYCEAKDTPLQIEHIQPKALGGTNRISNLALACRSCNQKKAAQAIETFLADKPEIPRHIRKQAERPLKDAAAVNSTRWALTQALRSTGLPLELASGGRTKYNRERLNVPKTHALDAACIGEFRVLKGWRRSTLHLRCTGRGRYQRTRLSKDGFPVGYLMRHKRVNGFQTGDLVEAHVPSGKKAGTYQGRIAVRVSGSFNIRTDEEVIQGISYRYCKLIQRGDGYGYIVRPQMTSHKAQSMRPALNAALFHPQ

SEQ ID NO: 2285 - protein, 463 aa, unidentified
  REGION 1..463: note = a0209639_1000561_-_->_pfam14239(3,180)[219.8
MHVFVLDTNKKPLSPCHAAVARKLLRQGRAAIYRQYPFAIILREIKQCAEPTKLRIKIDPGSKTTGLVVLWERNNTGIVIWAVELKHRGHAIKKLLDKRRANRRSRRNRKTRYRACRFLNRARAGGWLPPSLQSRVQNTLTWVNRLCRLAPISSCSMELIKFDTQLIQSPEISGVEYQQGELQGYEVREYLLEKFGRKCVYCGETDVPLQVEHVIPKHPAVGPIGTNRVSNLTLACEVCNKAKGNSQPNDWLEKLQQSTIAKDKIRAGNLPKVLKQLKQPLKDAAAINSTRWALYRVLEQLGLPLEVGSGGLTKFNRTQRNLPKTHWLDAACVGKSTPEQIVFSDGPILAISATGHGKRQRCVTDKYGFPIKHAPRAKSFMGFQTGDIVNAVIPKGKYKGMHTGRVAIRFRPSFKLNGFDVHTKYLRIIHRADGYAYEFALGVQVSSPQMNLGAPTWRLIGGD

SEQ ID NO: 2286 - protein, 419 aa, unidentified
  REGION 1..419: note = a0209347_1003246_-_->_pfam14239(3,182)[202.7]
MLVYVINKHGKPLMPCKPKKAKRLLQEGRAKVVRRTPFTVQLLYGSSGYRQRVRVGVDTGAKYVGVAAVRTDEKGRAKNTLLQGECHLRADIRGKMDRRRAYRRARRGRKTRYRKPRFDNRRRWEGWLAPSIQSRVDGTLKVMELLRQLLPVASVEVETAQFDTAAMARGVLRLRPWQYQRGEQYQFENVKSYVRHRDGYQCRQCKAKGRPLAVHHLRQRADGGTNRPANLITLCEECHDRVHTGGIKLTAVPGRTNLRYAAHTQAGKTALMTALREQLPTSETTGAVTKVDRLEMGLSKTHANDALAIAATGVPVEPVDTQFFMRCVPKGNYRLFKGARSHIRNQSARELFGFRRLDKVCLPGGQEGFVKGKRSSGYFNVSTLDGTVISASISYKRLRLLEKQTSLLVERRQAVSSPD

SEQ ID NO: 2287 - protein, 492 aa, Streptomyces sp.
  source 1..492: note = SID12501
MALEFESADNPGIRDETGLGRRKASGVEHVRGEITGSAPTAGGVTPDHQVREPGREADPAVFVLDKHGTPLQPTSPARARKLLVSGRAVVARHTPFVIRLKDRTADASEVDGVELGIDPGSKHTGLAVFTARDGERRGRFAVQLDHRGAAIRKKLEQRSAYRRGRRTRNLRYRAPRFLNRTRPKGWLPPSLQHRVDTTMSWTGRLARWAPVRTVHVERVAFDTHAISAGKPLEGAEYQHGTLHGTEVREYLLAKFGRACSYCGATGVPLNIDHIRPRSRGGSDRVSNLTLACIPCNQAKGHRPVEEFAPKQAADILKRAKAPLRDAAAVNATRWALWRALDARLPTRTASGGRTKWNRVRCALPKTHTLDALAVGDLDTVTAWPRTVLVVKATGRGTYARTRADKHGFPRLRLPRTKQFFGYATGDLVRAVVPSGKNAGTHTGRIAVRSSGSFAVRTAGGLYTARYKYFRLLQRADGYAYTTQPEGGPSDAP

SEQ ID NO: 2288 - protein, 297 aa, unidentified
  source 1..297: note = Lachnospiraceae bacterium UBA2891
MMPTNAYRARKLLKSGRAGIECYKPVFTIRLTDREEGAVQPVEYTCDTGYQHVGISIKSEKHEFVHNQYDMLKDETERHNDCRKYRRVRRNRKRYRKPRFDSRSKKNKDMAPSLRHRMENQIRLFESFCRVLPITTATFEMGKFDTQLLQAIAEEKPLPKGRDYQHGSKYLYQTERMAVFGRDHYTCQICGRSVRDGAILHTHHIGFWMSPPYRSGRISNLLTVCEKCHTAWNHKPGGRLWGIKPKLTNLTAATYMSTVRWAMYRRLVKTHPDVDIHIQYGAKTGITRQERHIAKTH

SEQ ID NO: 2289 - protein, 333 aa, unidentified
  source 1..333: note = Metagenome
MVPVLDKNRIPLMPCSEKRAKKLMDRGDARPFWCKGVFCIILQREPKSRHMQDIAVAIDPGSKFNGYTVKSEAHTLLNVQAHAITDVKKKMEERAMLRRGRRGRKTPYRKCRFNRSVKERLAPSTKARWQQHLNIVKWFGKMYNIKHIVVEDIAAKTLKGAKKWNKTFSPLQVGKKWFYDTVESLGYLLHKFKGYQTALIRNSLGLKKNSKKDKKCFYGHCVDTFCLATQVIGGSGVPDNLFVKFIKPLRCYRRKLHEILPKKNGLRRNYGSTLSLGINRGTLVEHIKYGICLIGGTSKGRLSLHDLATNKRLCQNAKKEDIKILTQMRWNIY

SEQ ID NO: 2290 - protein, 511 aa, unidentified
  REGION 1..511: note = a0257069_1000440_-_->_pfam14239(12,221)[152.1]
MKHKQKERVNIVYVVDKNGRPLMPTKHFGKVKHMLRDGRATIYLHRPFTIRLCYETPGKTQSVVIGVDPGRTNIGLVSVSQKGEVLYAAKVETRNKDVSKLIAERAVHRRASRIGERQRRKRRARKHGTTTKFPNGRKLPGYKDGVLELKDIINQEARFNNRKRAAKWLAPTARHLLQTHQNLLLHVRRFLPITAVAIEHNKFAFMLLEDGTVRGADFQNGRLKGYESVAVYVRARQNDKCEICGAPIEHIHHIQARSENGSNLPENLVGLCSKCHEAVHVGKKEINIKGFAKKYASTSVLNQALPHFLFWLETAFGDGNVRTCAGWETKVERKRLGFSKDHHYDAVSIISACGHPVDLNLGGGRILVHTPHLIMQFRHHDRQIIHCQFERTYKVVGDNGKLISVVKNRKPRFEQPKSMPALNVWYDDEVKRSGQHKARLALSQLVVVKSNRRYKNPARVMPGTVFRYEDDLYVMQGSVSYGQYFCAIGQGKRMFSSKKCEVLCRRGLIYL

SEQ ID NO: 2291 - protein, 420 aa, unidentified
  source 1..420: note = Human gut metagenome
MVYVISKRGKPLMPCTNVIARLLLKQDKAKVKRRCPFMIQLTYDATQYIQDCTLGVDTGSAHIGAAVVDADKRVLYMSETKIRNDITQKMDRRRAYRKVRRYRKTRYRKTRWMNRKNSKRENRFSPTMVSKLHSHQKEIEFVKSILPITRLVIETGTFDCHLMKNPMLYNQKYRHWGYQQGPDYGFANTKAKVLNRDSYTCQCCRGKRKDSKLEVHHIVYRSKGGSNEEDNLITLCHTCHSALHHGMMKLKVNGKQKGNLRYATQMNSIRTQLLKLYPEAIETFGYVTKENLQLSGLPKTHCNDAVMIASGGNTVNFKTHSLCRKKCIPKGDYQQTKGIRSEQPLITKKIYGFRKFDKVQYLGKEYFIKGRMSTGYTVLMDIDGNKVDFSYMPKGYKTPKLKNCKRITARNGWMIQEIAI

SEQ ID NO: 2292 - protein, 434 aa, unidentified
  REGION 1..434: note Ga0310136_005540_-_->_IscB_BH_Trimmed_Muscle(85,158)[95.2]
MTLARPTLPPKGEIAEMYVFVVDAERKPLAPCHPAVARKLLKQGRAAVLRKYPFTIVLKETKETHPQDIRLKIDSGSKATGMIILHKNKVIWAAELEHRGHKIRERLLERRQLRRSRRYRKERYRKPRFDNRRRPEGWLPPSLESRVANIITWANRLIKLCSISAISLELVKFDTQKLQNPEITGIEYQRGELYGYEVREYLLEKWGRKCAYCGRNDVPLELEHIVPKSRGGTDRVSNLTLACHDCNQKKGNLTAEEFGYSEVQKKAKVPLKDVAAVNATRWALYGRLKETGLPVECGTGGMTKYNRSKLGLPKEHWTDAACVGASTPENLRVSINSVLQVKAVGHGRRQRCITDKYGFPKAYANRQKTYQGFATGDIVRAVIPKGKYAGSHIGRIVIRHRPSFGLNGFDVHPKYLTILQRGDGYDYSLLAIER

SEQ ID NO: 2293 - protein, 451 aa, unidentified
  source 1..451: note = Human gut metagenome
MFVAVISKTGVRLMPTSEYRARKLLNSGKAIIYGYRPFTIQLTERETGALQPVELCVDTGYIHIGVSVKSEKHEYLELQVDTLTNEKKKHDERRMYRKQRRNRKRYRKPRFDNRKRESGWLAPSLRHKKEVHLQVITKICDVYPIADITLEMGNFDTQVLKAQEKGKPIPQGTDYQHGERYGIATLREAVFTRDEYKCQCCDRGIKDGAILHAHHIQYRSHGGTNRMSNLITVCEKCHTPANHKPGGKLYGWKPKAASFKGATYMTIVRWQLYNKVKEALPVIGVKITYGAETKERRRSMDVKKSHVNDAFVIGRFHPKHRSSPVLYKKKRRNNRCLENFYDAKYIDSRNGKKRSGQELFSGRISRNHKKDSENLHRYRKKKVSRGKRTIRIQRYKIQPHDIVLFDGKKYETTGCHNKGTRAILLPEKKSKSVDKLTIYKYAGGYYPSKFA

SEQ ID NO: 2294 - protein, 516 aa, unidentified
  REGION 1..516: note = a0187878_1000231_-_->_pfam14239(86,272)[124.3]
MNTRDRRLTPTNASLIAGWDEAVHREGTELKADTASAFYLDGEGTSKNSKESKDIARLIPNKDLKILENSRINKKIKISKKNNYRVPVLYPDGKPGMPTSNKRANKWLKEGKAEKVRNKLNVFAIKLKFWPIYRNLQQIVLLIDPGSTFTGIAVMSKKCILISYMLELPGYKKGSKPFTVINRHRKKIEKYHNTIVDRITDRRRLRRSRRHRNCRRRDERWLNRTKKGKIAPSMLAKKQLELEAVNELSKLYPITIIGFEDVAFNHWGDKDGTKGQYFSQVEIGKNLLLDRLKKIALIQIIKGYETARRREQLKLPKEGDKTKRSIKSHVTDCIAMGSIILNTNQSSSNKFHFNVISRPKYSRRVLFAEQPNKDGITERAGGHIPHTPIFKGLRKGDYVEANAPNLKKIYRGWISGYTDDRIYISDFDWNQSPSFSVDNIRLLDRNHGLINLRLGWIKDTIDICQFGSKQIDAENKIINMKVINNIIEMKKKAEKDAIKESNKQDKTIQRGIDDAW

SEQ ID NO: 2295 - protein, 381 aa, unidentified
  REGION 1..381: note = a0268280_1010517_-_->_pfam14239(63,233)[209.7]
MQKLQAKLKNIPTDTSLVCSSINSVLNKDQSLSVQNKVLTCNNSEENLQKHKSGSDLRVLNIVYVLNKRGLALMPSCQSKARRLLRLGKAQVVKMYPFTIQLANASGEAKQEIVLGVDVGYKHVGISAISQNKELYSAEVVLRTNISELLSERKMYRRNRRNKLWYRKPRFNNREKGKGWLSPSVQHKIDSHIRIIDNIKKLLPITKIIIETAKFDIQKINNPEICNIEYQNGVQKDFWNVREYVLYRDNHTCQNCKKNNKVLNVHHLETRKTGGNRPDNLITLCVECHKKYHLGKIKLDIKIKNNFSSETCMSIIRNRLIDKLRLKYNIEETYGYITKSKRMENKIEKSHINDAFIISGGINQFRVSSYLVTQKRKNNRG

SEQ ID NO: 2296 - protein, 419 aa, unidentified
  REGION 1..419: note = 0326511_10041793_-_->_pfam14239(2,174)[194.4]
MVYVQDINGKALMPTERHGKVRKLLRDGMAVVVMREPFTIRLTYESTSFIQEVSLGIDAGSRHIGVSATTADRELFSAQVELRTNIQKLLANRMELRRTRRSRKTRYRKPMFDNRRHDNGWLFPSTRQKVDTHLRVIRMVMDILPISKTTIEVAKFDVQKIKNDAIAGIEYQQGEQFGFYNVREYVLTRDGYQCQHCKGKSKDPVLNVHHIESRKIGGNAPNNLVTLCKTCHKKYHKGEITLRFMRGVSFRDAAAMNAMRWCVYNSAKDEFRNVHLTYGYITKHTRIRNGIKKSHTADARCISGHPLAVAQTDVYIFKQRRRHNRQIHKCAILSGGYRKLNQAPYLVKGYRLFDKVSFNGQEAFITGRRQSGSFAIKTIDWKSLSEGVSAKKLSFLNISRGFLISNKKSLTNYNKSTNE

SEQ ID NO: 2297 - protein, 145 aa, unidentified
  REGION 1..145: note = a0334886_1000752_-_->_pfam14239(3,84)[88.9]
MLVYVLNRHGKPLMPCKPQKARRLLKEQKAKVVKRTPFTIQLLYGSSGYKQDVILGVDAGSKTIGVSASTENKEVFDEVEYQGEPCFIFGRRNSGYFDIRKLDGTKVHASASYKKLKLLSKTTSLLCERRQAVSSPQLKQGVSAD

SEQ ID NO: 2298 - protein, 442 aa, unidentified
  source 1..442: note = Proteobacteria bacterium
MSHVFVLDRARTPLDPCHPARARELLQHGRAAVFRRFPFTIILRDRKRAESVVHDHRLKIDPGSKTSGLALVQDQRVVWAAELTHRGQRIRDALESRRGLRRSRRQRQTRYRQPRFLNRTRPSGWLPPSLGSRIAHTMTWVERLARSCPITALSQELVRFDTQMMQDPEMAGVAYQQGELAGYEVREYLLEKWKRTCAYCHKTGVPLQVEHLIPKARGGSDRVSNLTLACGPCNQQKGTQTAAEFGFPAIQAQAKQPLKDAAAGNATRWGLYRALATTGLPVETGTGGRTKYNRTRLNIPKSHWGDAACVGASTPEALRVAGIQPLGIRAMGHGTRQMCRTEAHGFPKAHRTRQKKYGGMQTGDLVQAVVPKGKYAGTWVSRVVVRASGWFDLVIHGKKASVHHKHCTRLWAADGYTYTLPAGAGTAVSSPHSSEGSPQRNL

SEQ ID NO: 2299 - protein, 414 aa, unidentified
  source 1..414: note = Human gut metagenome
MPCSPAKARLLLKEKKAIVKRRTPFTIQLTIATGETKQPVGLGVDAGYKHVGLSASTDKAELYASQVELRQDITDLLSARRALRRARRNRKTRYRAPRFNNRIRTKRKGWLAPSVENRINAHLSRIETVLRMLPVTKITVETASFDMQLLKDPDISGKEYQEGEQLGFWNVRECVLFRDGHVCQHCHGRLKDPVLNVHHLKSRRTGGDSPGNLITLCETCHKALHRGELTLKAKRGQSFRAEAFMGIMRWEVLNRLKASHPELEVNNTYGYRTKHARISNDIAKSHCADAFCVAGNLGAKRLCEFFFQKQTRWNNRQIHKLSVLKHGLRKRNQVPFEVNGFRLFDKVACKGEEGFIFGRRSSGYFDVRKLDGTRISAGISYKKLHLLEKRQTYITEIRKEKALPPLPEGRGLRA

SEQ ID NO: 2300 - protein, 337 aa, unidentified
  REGION 1..337: note 0172375_10009941_-_->_IscB_BH_Trimmed_Muscle(68,138)[50.4]
MFIPVVSKKGKPLMPTTPYRARKLIKAGKAIKKFKKGLFYILLTERMIGKTQDIAVGIDPGIKKEAFTIKSNSHTYLNIQIDAINWVKDNVKTRSLLRRSRRQRKTPYRKCRLNRKKSKNLQPSIKARWQWKLRIINFLVSIFPITYFIVEDIKAKSKKNCKKWNMSFSPLEDGKNYFYTELRKQGNVELKMGYDTAELRNNLKLEKSYNKNSNKFEAHCIDSFVLANWFVGGHLTPDNKNILLIKPIELHRRQLHRLQPSKKGIRRRYGSTNSLGFKRGSLVKHVKYGLCYVGGYLKNNISLHNIENGKRITQKAELKDCICLNFNAWKISYLFNK

SEQ ID NO: 2301 - protein, 423 aa, unidentified
  source 1..423: note = Human gut metagenome
MKQDQKYAFVQDNRGVVLSPTKIEKAWYLIRHNKATLVKTEPMVIRLNRKQNNTDMSFMKVGLDPGDTTGVAIVQESHLNMSKNKAVFKANIQHRNDIKSLVESRREYRRLHRYNKRYRQARFNNRASSRRKGKVAPSIKNKKDEILRVLRYLSKYVCIDGIYIEDVSFDIRALTDEYKPYRWQYQKSNRLDENIRKAVIQRDKCKCKMCGAKDTQLEVHHITPKREGGNNTLKNLITLCSECHKSVTGVEDDYKSYLYSLIDGKQIPLAPAMHVMIGKNYLYQQLRQFIGGDSYVYLTTGGDTANSRLDWNIEKSHSNDAACITDVRCLPENLKTYVYTIKPQRKKKKTKQNTSNLAIRHRDLVWYTPRGREPIKCYVTAIMQTGCCVGKYKLKSIDGERFGPIAESSLRKIQQGTSSLMFV

SEQ ID NO: 2302 - protein, 456 aa, unidentified
  REGION 1..456: note 0114919_10025663_-_->_IscB_BH_Trimmed_Muscle(122,196)[71.0]
MQKLSEKLKNTPRNASLVPCSVNSQLNKEETLSVESIVLTDNNPEVNLSQHAERLKVKVYVISKEGNPIMPCSCAKAKHLLKEGKAKVIKRSPFAIQLNFECENQVQDVTLGIDTGFEFIGFSAVSEREELIAGTLKLDGKTKERLNDKRMYRRIKRNKLWYRKPRFNNRKKVKDWLPPSIERRYQTHLTLIEKIKKMLPITQVIVEVAKFDIQKLENSEIQGEEYQQGTLYGYQNTVSYLKTVQKNICPFCKRKLESGESKATHHRFMRSDSRRTDRIEGLILFHKKCHVRLHEQKREKEFQNIKIGKYQPSIFMSIINKRFWKDIPDLKVTYGNVTFVDRNNLGLAKSHTNDAFVIAKGNSQTRVKSFEIIQKHRNNRILQRQRRGYKPSIRRSRSIIQPLDLIWIKGIKYISKGMNGYGRYVYVDIGENKTSLNMKLVEKYFSQGSLSFSLKN

SEQ ID NO: 2303 - protein, 445 aa, unidentified
  REGION 1..445: note = Ga0376445_000045_-_->_pfam14239(4,180)[222.6]
MHRVFVLSSTAEPLMPCHPARARALLSAGKAKVYRRVPFTVILMERAEGETQPLTEQLDPGSKTTGIALVALFQRGRCVVWAGEMSHRGQAIKSGLDSRRALRRGRRHRKTRYRAPRFDNRRRPPGWLPPSIQSRVDNCAAWDAKLRRLAPVTAIAVETVRFDTQLLEHPDIAGVEYQQGTLLGCELREYLLARHHHTCAYCLGQSKDPILEREHVVPRCRGGSDRVANAVLACRTCNVAKANLLPGTWIEQLRRSKKPIDATRARQMEKILTGWRPSLRDAAAMNATRYAIGRTLKAAGLPVSFSSGGRTRFNRTAQGYPKAHWIDAACVGEEGSTVRLDPAAKPLQIQAVGRGSRQMTRPDRYGFPRTGAKRVKRVLGLQTGDWVRLCQSSGKYAGTYVGRVAVRERGDFDIQVVRDGQKIKITAPAARFTLLQRGDGYAYTT

SEQ ID NO: 2304 - protein, 359 aa, unidentified
  REGION 1..359: note = a0255344_1006041_-_->_pfam14239(3,175)[123.3]
MLVPVVDQVGTPLQPTHPAKARRWLKEGRCSKHFHRGTFYIRLKKIVTEPHINIILGIDPGSKRTAFTVATRNRVVLNWMIDSTNFTKNNIEKRRMYRRQRRYRNTPYRECRWNRSSLRNDGRVPPSTLSRWKRHLRLIYSLLKILPITKVIIEDVAAVTHNSKKKRLVDSKYVSCWNAAFSPLQAGKNLFYNFLEDRGIAVYKKKGWQTAKHRKKHGYKKISDKLSTKWEYQCIDSHSLCEMYYNRKIRPVRNLNFIQFLTFSRRELFRMFGKIRRRHGSTRTLGHNRGTLVYCKYVKRGRLEPIGLCYLAGYMKVKEEYRVCLYSLQGKELGQSFKLSDCVMLTNLRYLNNYIRNER

SEQ ID NO: 2305 - protein, 437 aa, Bacillus sp.
  source 1..437: note = str. REN51N
MVFVLNQEGKPLMPTKRHRKVRLWLKNGQAKVVKRKPFTIQLLFKTEDYVQPISLGVDSGFYHIGISAVTEKEEVFSSEVSLLKGMVERNEERASYRRTRRARLRYRKPRFDNRKKDKGWLAPSIQHKLDSHLRYIEWVKSILPISNTIIEVANFDTQKILNPDIQGLEYQEGVQKEFYNLREYILHRDHHTCQNPNCKNKSKEKVLVLHHIIFRSNGGSDSPNNLITLCDKCHTPRNHKGFLRDWRPKVKRLRSATFMSMVRWKLVNALECNHTYGYLTKSKRIEFEIEKTHANDAFVIAGGTSKHVRAQVHQVEQVRRNNRSLDKFYDAKYIDARTGEKAAGQDLFNGRTKRNKNTNGENLRKYRQEKVSKGRRAIRTMRYPFQPRDLVRSEGYTAFVVGTQNKGAYVKLKDRKKVAKTATLTLIKSGKGFCFLD

SEQ ID NO: 2306 - protein, 442 aa, unidentified
  REGION 1..442: note = 556_-_->_IscB_BH_Trimmed_Muscle(81,155)[75.6]
MGEGLQPDASPRRQNLRVFVLNKRGQPLMPCSPAKARLLLKEKKAVVMRRTPFTIQLTQATGETVQPVKLGVDAGSKFIGLSASTDKAEFYASEVELRTDVVDLLSSRRELRRARRNRKTRYRAPRFNNRVHSKNKGWLAPSVENKINAHLSRVDAVRQLLPVTKIVVETASFDIQKIKNPDIEGADYQWGEQLGFWNVREYVLFRDGHRCCHCHGKSKAPILNVHHLESRKTGGDAPNNLITLCETCHKAYHAGKIVLKAKRGQAFRDAAFMGIMRWTFFNRLKAQCPELDVRNTYGYLTKNTRIRHGLDKSHHTDAFCIAGNLGAKRLGEYFFQKQTRKHNRQIHKMSILKGGVRKRQQAPYEVKGFRLFDKVRYGSREAFIFGRRNSGYFDIRLLKGEKVSPAISYKYLQLLESRKTFLTQLIKKDAIPPATEVAGFLA

SEQ ID NO: 2307 - protein, 285 aa, unidentified
  REGION 1..285: note = 0079226_10038291_-_->_pfam14239(32,213)[210.1]
MATSGGRVTTKPTGEVAGGVVPAPVRAPQPRVFVLDKNKRPLQPMRPDRARKLLDAGRARVHRRAPFVIRRVDVDARTEEVIVDGVEVGIDPGSKATGIAAFITTPEGARQGVWLGELVHRGLQIKQRMQARAQLRRGRRSRNSRHRAPRFDNRTRPAGWRPPSLAHRVDTTLSWVNRLRRWAPVMAIHIERVRFDTHAMASPEVSGIEYQQGTLAGYEVREYLLAKFDRACVYCGASGVPLNIDHVHPRSKGGSDRVSNLVLACIGCNQAKGNMAVAEFVTDPA

SEQ ID NO: 2308 - protein, 467 aa, unidentified
  REGION 1..467: note = 0194044_10012301_-_->_pfam14239(1,111)[34.7]
MITLAIDYGASNVGIALVRNTEAGNEPLFAGTVILDARKLKEKVETRAGIRGLRRTRKTKNRRLRELGEALSGLGMEGDKVARIVRFSNRRGYKSLFSDPNETEKVDEAESAYRCTREQFFHQLEQELQEILSDREACDKALSVCERILNRKGDRYAEIRLIRIDNRGASRCAWGDCNKVTPRRDNATDDAIAQQLVTYFQSAIKTEPHKLEMLNQTVCELDSISKNLRGAIANNDDSSKKILRRRARKSLRNLRAELPSTEPEDVSGDAWKYVEKGILNTLENSGGRNRYCREHSKSYVEKVLEGKPPEFKSTIADSDIISRREQIAFSKLWRYIEARLLPLAPKGIDRIVVERTAFDLLAGKRKKIRDASSEGVENIYQYGPMYGFPNEKEMLRKEFGGLCAYCGNPSDTLMDRDHILPRRDFFFDSYLNTLPACPTCNSEKSASLPSQVSLRISEDAYSMYKQY

SEQ ID NO: 2309 - protein, 469 aa, unidentified
  REGION 1..469: note a0256831_1000378_-_->_IscB_BH_Trimmed_Muscle(72,147)[76.9]
MSNRVFVLDTNRKPLAPCHPARARELLRKGKAKVFRKYPFTIILNKAYPNAKLTYITIKVDPGSKQTGMALIAKGQNKTRCIFGLNIVHRGQQIVDALLSRRQSRRTRRSRKTRYRKPRFDNRAIPKGWLPPSILSRLSNIKTWILRFSKLTTIANAVVELVKFDMQRIRNPDIKGKEYQNGLLKDLELKEYLLYAYNHTCQYCHGVSNDSILEKEHIHPKSKGGSDSVDNLTIACRTCNIAKSNLLLNDWLRIVSDKKDKLSVARTKYIPKVIKGIKPSLKDATVSNILSNRTIAFCESMGLNTEAAPSYLTKYNRKNHGYRKDHWIDATMCGNLDRKIEIYKSMRCITAIAQKTNNRQMCLMDKYGFPRTKAKGQSTVYGFKTGDIVRAVVPSGKYKGKHIGKVMVRNSGWFDVKTIKGKIITNYSYCKTTHKKESFTYQHGTKTILKIISNRRDCIKDIFNTVKSQ

SEQ ID NO: 2310 - protein, 421 aa, unidentified
  REGION 1..421: note = 0310914_10061055_-_->_pfam14239(70,230)[108.5]
MQRKVKSDTRLDKIQDCEVLGRLKSTEHSGSGIPKDMPDASQVGLPSGRQRRWDCRHLHSKGLPPNAVIVPVLALDGEPLMPTCASRARRWVKQHKATPFWLNGVWCVRLRFEPSDRNKHEVVVGIDPGSKREAYTVASKEHTYLNVLSDAIDWVKDAVGSRKILRRARRNRKTPYRTNKQNRARGGIPPSTKARWQLKLRVVNQLRKMFPITGYVVEDVKATTHGRGRRWNSSFSPLEVGKSWMYGELLKLGTLTLKAGHETAELRKTFGVVKCCGDKMSMRFDIHNVDSWVLAKDALGAAKGRPENMQLVHARPLRFRRRALHLQNPTKGGVRRSHGGTLSQGFKRGSLVKHPKHGLTSVGGTKDDRISLHKVSGKRLCQNAKAQDITLLRRSSIAFRPIPKNGIPLPPKGDSFLPKIL

SEQ ID NO: 2311 - protein, 461 aa, unidentified
  REGION 1..461: note = a0256871_1000783_-_->_pfam14239(6,179)[129.0]
MTTRIIYVLNANGEPLMPTHRLGKVRRWINRGEAHWYGNSRTTIQFNHPVGNITQNCIEGVDLGNHLGISVVCTTTNQELYSGISQRDYQGEVKRNVKRREYRRTRRNRLRHRKVRFNNRRKSDGWLAPSIQHYIDFTVDEILRIQKFLPISKVILETSVFDVAKLTNFGVRPEDYTKGRLHGYHSLKEYLYDQQNGIDPIDGRHYPLSEMVVHHLQYRSQGGTNSPDNTILLARKNHNTANHNNGVLADLAKHYQSSLVNTKGAFLMNVMHLRLPKRLNNKPLQLTFGYKTAQQRQLYGFEKDRNDLANHAIDALLIANGNSHTKSMTNIIHREKHHRNNRSLEKFYDAKYYSNVDGKVYAGKELGSGRTNRKQPRTYNSRRCERGCKKSKGRRSIRRQHYQFQPHDKILWQGKPVEDCLGTMSNGKSVLFKWNNKRKSSAPKKLQLLHHSNNLIETIIQ

SEQ ID NO: 2312 - protein, 461 aa, unidentified
  REGION 1..461: note 0223826_10007721_-_->_IscB_BH_Trimmed_Muscle(71,138)[55.0]
MLTYVLAKDGTPLMPTYKINKVRRMLKEGKAEIAGHKPGFTIRLLYESGKGAQPVEVCEDTGYGTIGVSVKSEKHEFTHEEYTLLPDEKIRHDDCRKYRRTRRNRIRHRAAKFDNRKKDKGWIAPSLDNKVQRHVDIVTMYKKVLPVTDVTLEVGTFDTQVLEAVEAGRPLPKGIGYQYGPQYGFDTLREAVFYRDGYKCICCGKSAIKDHAILKIHHLGFLKGDHSDRMGNLATVCSKCHTPSNHKPGGKLYNLKPKLKPLGGAAFMNAVRWKIYNMVKERNPGLYVHMTYGAVTKRERLRRHIGKTHANDAYCIGFFHPKHKTRAVAYKKVKRNDRILQKFYDAVYIDRRDGKKKKGAELSCNRTNRSVPRNNSRNERPFRKEKASKGHVTTRKGRTQLKPGSLVLYKGKVMTVHGTHTNKGKVNVEFTQKASDDRKSANLSKVTIIRPMYQSGWVRIS

SEQ ID NO: 2313 - protein, 491 aa, unidentified
  REGION 1..491: note = 0209656_10018899_-_->_pfam14239(1,168)[202.2]
MLPQSQALRVAAADKPWSARNGQQQTATVQPVRGEIKPAPQNAERGVTRTFVLSKEGNPLMPCSNARARILIRKGRAKVYRLFPFTIQLIDKASGDVQPVAIKLDPGANTTGVALVREHADPTKQTVLHLAEIAHRSRAIRKHMIQRAMFRRRRRTANLRYRAPRFDNRTRREDWLPPSLQSRVDNVASWLNRYRKLAPITSIYVESVRFDMQALENPDIEGLEYQRGTLFGSELWEYLLEKWGRRCAYCDAEGLPLEAEHIAPKACGGSNRVSNLTLACHKCNQRKGSQPVHLFLANDPSRLARILSHTKKPLSSAAAVNVTRKATTRVMSATGLEVHCSSGGRTKFNRTQLGIPKTHALDAACVGELSELESSNIPVLCIKATGRGSYQRTRLDSFGFPRGYLTRQKAVKGFQTGDLVKATMPRGKFKGVHQGRLAVRVRGAFVIQSSAGNVETSWKHCKRLMRNDGYTYEINSPAIPPPPKGGGSLAY

SEQ ID NO: 2314 - protein, 430 aa, unidentified
  source 1..430: note = Candidate division MSBL1 archaeon SCGC-AAA382M17
MSQKVYVRIMRGEPLMPTNPAKARHLLDDDRAEVVKRKPFTIRLKYPTGENGQEVTLGVDAGYSTVGFSAVTEDEELIRGELDLRDDVSDRLRRRADYRRNRRSRKTRYREPRFDNRGKEDGWLAPSIKYKMSDHLQLVEMIGELLPVTRTVVEVATFDTEKLADPELDVTEYVPETFRGYEVKEYLLAKWGRRCVYCGAEDVPLEVDHIVPKSRGGSDRVDNLTISCVDCNREKGDRTAEEYGHPEVQRKAGESLKEAAFVNIVRWKIVNELDCDHTYGYRTKKGRIDLGLEKSDDNDAFVIAGGGDQERTGPYRVTRGRRNNRKLEINRRGHGRSVRRERYEFQPGDLVRGDDALYRVRGSCSYGRYVRAFDEERNEEYLRADSLKLVKYGKGLCWREKTSRNSSPTESEDSKGVSSRQPDGMAERLW

SEQ ID NO: 2315 - protein, 419 aa, unidentified
  REGION 1..419: note a0315550_1018591_-_->_IscB_BH_Trimmed_Muscle(73,148)[92.2]
MQRVFVLSSDREPLDPCHPARARKLLKQGRAAVLRKWPFTIILKDRTVAESVTHPHRVKIDPGSNTTGLGVVQEQTGEVVWAAELEHRGQQIKHRMTSRRQLRRARRGRKCRYRKPRFDNRASSRRKGRLPPSLQSRVENVSTWVERLRRYCPVEALSLELAKFDTQRMENPEISGVEYQQGELAGYEVREYLLEKWGRKCAYCGAENVPLQIEHIVPKARGGSDRVSNLAISCGPCNQEKGSCTAEEFGHPEVQAQARKPLKDAAVLNATRWVLFRRLQAIGLPLEIGTGGRTKYNRTQLGLPKAHWTDAVCVGELGEQVRVPPGLVPLQIRATGHGRRQRCGTDKYGFPIRHAPGAKKFRGWQTGDIAKAVIPKGKYAGVHVGRVAIRHRLSFRLNGIDVHPKYLELVQRADGYAYS

SEQ ID NO: 2316 - protein, 478 aa, Ferroplasma sp.
  source 1..478: note = Type II
MEKHMKEKQKLDRRDTYTPTDAPQVRGNCDHALNREETLSVHGLKTPSNNPHVDLLSPVGGHKADMPVFILNDDGKPLIPCKPAKARHLLSDKKAKVISSNPFTIQLLWHCEGNVETITLGIDSGYKHIGFSAVTDNKELISGEVVIRTDIPKLNEEKAMYRRKKRNKLWYRKPRFMNRGNNKEGRFAPSIEHKLETHIRLIEKLKRILPVSNTVIEVASFDTQKMKNPEISGIEYQQGELQGYEIREYLLEKFHRTCVYCGKTGVPLEIEHLTPRSRDGPDTVNNLAISCHDCNQKKNNLTAEEFGYPEVRKRALITMRDAAFMNTVRWKLTQLTGSEHTLGFITKKNRISLGLDKTHANDAFVIAGGTVQIRTLPFTITQRRRNNRSIQTNRKGFRPSIIRKRYAFQPGDMVLHDHERFSVVGMHNYGKSIVIKGGGKKMDINTKKVKLVKYGKGLQFAPQFLPTLSDGVSLGGVR

SEQ ID NO: 2317 - protein, 604 aa, Mastigocladus laminosus
  VARIANT 317..556: note = X represents any naturally occurring amino acid
  source 1..604: note = str. UU774
MLRVPVLTPSGKPLMPTKASRARRWLKEGKARVVYNDVGIFQIQLVRCPRTQDIQPIAVGIDPGKLYTGIGVQSAKFTLWLAHLQLPFKTVRERMEQRAMMRRGRRGRRINRKLPYNQRAHRQKRFDNRRQCKIPPSIRANRELELRVLDELSLIYPITTVAYEIVKASGDKGFSPVIVGQKWQLENLATYAEVKQVEGWQTANIRQQLGLHKQKHSKGDAIPATHAVDGVAASCSAFVRYGIIDRHSRGWKGDVTVTPAPFTVIRRPPVSRRQLHLMLPSIGGVRRKYGGTVTRHDFRKGDLVKVPSGEIGYCSGXXXXXXXXXXXXXXXXXXXXXXXXXXXXXXXXXXXXXXXXXXXXXXXXXXXXXXXXXXXXXXXXXXXXXXXXXXXXXXXXXXXXXXXXXXXXXXXXXXXXXXXXXXXXXXXXXXXXXXXXXXXXXXXXXXXXXXXXXXXXXXXXXXXXXXXXXXXXXXXXXXXXXXXXXXXXXXXXXXXXXXXXXXXXXXXXXXXXXXXXXXXXXXXXXXXXXXXXXXXXXXXXXXXXXXXXXXXXXXXXRQVVPGDQLIMTVELLWIKQRRFGKMQARAEVDSQLVAEGELMFSLVS

SEQ ID NO: 2318 - protein, 397 aa, unidentified
MVRRWIKTGQAHWIGRDTIQFDRPIGSETQELTLGINAGYKIIGASVTSETQEYYASETNLRTDIVKNLSTKRQYRRSRRNHKTRYRQARFDNRVKSKHKGWLASSIEVKIDNHVQLIRKLIKKLPITNIIVEAGQFDIQNLKNPDITGKEYQEGNQLGFANVREYVLARDHHKCQHCKADGLKGIKLHVRHLVSRKVGGNRPDNLIILCENCHAAYHRGEFELKKAPKGYAPASAMSIMRSTLLDRLINEFGDKVETTFGYLVKEARLTIDLPKTSMTDAFVIAGNLMADRLDFQELRKHVRCHNRQLHKAKFLKGGIRKANQAPREVHGFRLFDKVQVENKNWFVFGRRTSGYFDLRSLTGEKLNKGSYSAKKIKLVHRANSVITQYATIAPTGA

SEQ ID NO: 2319 - protein, 446 aa, unidentified
  source 1..446: note = Wastewater metagenome
MFKQLNFNKVLVLDTNRKPLMPCYPARAKKLLSSGRASVFRRFPFTIILHDRTGEESNLQDIEIKIDQGSKTTGVALVVHGATGHAVAFAAHIEHRTNIKFALDSRRAIRRSKRQRKTRYRQARFLNRTKPKGWLPPSLVSKAENILNWVVRFAKLTPLSKFALETAKFDTQKLENPSIKGVEYQQGKMFGYADKKAYLLERENYYCIYCGIHASQAKMEIEHVIPRSKGGTDSLNNLVLSCETCNQAKGNQDVETFLKGKPSVLKRVKKHLDTSHKDAAHMNSIRWYVMNNLRGMADAIGATLKIGFGSTTKQNRLSLGLPKDHWIDAAVCTSDGSTVKVEPNLKPLIIKAVGRGSRQFCRMDKYGFPRTSPKPRSKNFFGFKTGDMVKAVIPEGAKTKVPASTYVGRVAVRSTGYFDVKTRNTKITMSYKHCKPIHLMDGYSYA

SEQ ID NO: 2320 - protein, 366 aa, unidentified
  REGION 1..366: note Ga0099741_1041_-_->_IscB_BH_Trimmed_Muscle(74,146)[72.1]
MQNLRVPVLNPDGCPAMPTKPSRARRWLKEGKARVIYNDLSIFSIQLIEEPSGRNTQQVVLGIDPGKLYTGIAAQTARATLFMAHLQLPFQTVKDRMEQRRVMRRLRRYRNCRRRPARFSNRRVKKVPPSIKANRQLELRVAKELCAVYPITLIVYEVVKAAGSKSFSPVMVGQFWMLSQLEKLRPTEQKYGWETSQVRTQLGLEKQKNHKGDTIPQTHAVDGIALAASQFLTYQQWHTKNAHGANWVGFCRVTPALFFVIRRPPINRRQLHLMVPAIGGIRRKYGGTTTRHGLRKGDLVQAEQASRVSIGWVSGDTKNQISVSNFGWKRIAQFTASKVHLIQRSTGLLVASDGKLSRLTALSHQP

SEQ ID NO: 2321 - protein, 238 aa, unidentified
  REGION 1..238: note Ga0376514_000350_-_->_IscB_BH_Trimmed_Muscle(1,24)[20.6]
VEGWLPPSLKSRVHNIETWTNRLCRFCNIQAISMELVRFDMQKIQNPEISGVAYQQGELMGYEVREYLLEKWDRTCAYCGKTDIPLEIEHIVPKSKGGSNRVSNLTLACRACNRKKGNKPLEEFLSRKPGLLKRIQKQSKVPLKDAGAVNTTRWDLFRTLKKIGLPVETGSGGLTKFNRTTRGLHKTHWLDAACVGKSTPEKIFQIDKTVLIVKADGHGSRQICRVNKFGFPDNSKVN

SEQ ID NO: 2322 - protein, 432 aa, unidentified
  REGION 1..432: note = 0137384_10001405_-_->_cas9(193,245)[32.7]
MSRIFVVDAQRNPLMPCTPARARLLLKAGKAAILRRAPLVLILKERRPEAVVQPLRVKLDPGASTSGIAVVNDRSGEVVWAAEVTHRGREIREALTRRRAVRRQRRRRQRRYRPKRFANRRRPLGWLAPSLLSRVLNLLTWVARLRSFCPIEALSQELARFDTQAMQDPTIAGIQYQQGSLAGYEIRSYLLEKWQRRCAYCQQPSTKLQVEHLIPKSRGGSDRISNVVLACEICNIAKGDRTAEEFGFVQLMAQAKVPLASAAVMNATRWRLYQELQAIGLPVEVDTGGRTGYNRAIRQLPKQHWIDAALVGTSTPEQLQLQHVRPWQITATGWQRRQMCLVDGAGFPRTRAKQRSLVKGFRTGDLVVGVVKSGTKQGIYKGRVAVRASGSFNITTDKVTIQGINHRWCRVLQRRDGYAYQQREEAAFPPTP

SEQ ID NO: 2323 - protein, 426 aa, unidentified
  source 1..426: note = Human gut metagenome
MAKDHYRSIDREETNLRVYVLNKRGEPLMPCSSAKARILLKEKKAVVKRRTPFTIQLTIATGETTQPVTLGVDAGYKHVGLSASTKKAELYASEIELRQDVSELLAGRSALRHARRSRKTRHRAPRFDNRKRDKGWLAPSVENRIGAHVSRVEAVLRILPVTKIIVETASFDVQRLKNPDIQGVEYQQGEQLGFWNVREYVLFRDGHECQHCHGKSKDKVLNVHHIESRRTGGDAPNNLITLCETCHKAFHRGEIELRVKRGRSFQAETFMGVMRWTFFERLRARHSEIEVRNTFGYLTKNTRITHGIEKTHCADAFCIAGNLKAKRLGYYFFQKQTRRHNRQIHKLTILKGGARKRHQTPYEIKGFRLYDKVLFQGKTAFIFGRRSSGYFDIRTLDGERISASVSYKKLRLLEKRRTYLIELRRN

SEQ ID NO: 2324 - protein, 399 aa, unidentified
  REGION 1..399: note a0256829_1001599_-_->_IscB_BH_Trimmed_Muscle(67,140)[82.1]
MVRVVSIDGKNLMPTNRHGKVRRLLKDNKAKVICKNPFTIQLLYQTDDVTQKITIGVDTGYKFTGFAFIANNKVLQKGTIELRQDVSSLITLRRTLRRGRRNRKTRYRKPRFLNRTRPDGWLAPSTQSKYNHILNWIDRFTKYLPNYQLKVEIANFDIAKINNPDIEKELYQQGNMYGYENIKQYLLAREHGTCQYCKKKKNDKWHIHHIVPKSKGGSDRVDNLALLHESCHKKLHEKNDTNKISKPKQYKDATFMNIIKWKLVNDLKAKYQDKVSFTFGYITKIDRNDLGLEKTHYNDAIAITKEIVNENKSNPIYIKQVRKKKRSLHEATPRKGRRIKNTTQKRSSKNTKGITVNNKKIALYDKVKINNQIGYVSGFTGKMVYVIDIQGNYIKQSNK

SEQ ID NO: 2325 - protein, 278 aa, unidentified
  REGION 1..278: note = 24_-_->_IscB_CTerm_Trimmed_Muscle(101,266)[161.9]
MGELLRKEVGYMLVYVINRHGKPLMPCKPQKARKLLKEQKAKVVKRTPFTIQLLYGSSGYRQDVILGVDAGSKTIGLSATTENREVFSAEVELRTDIEVELKVKRNSSFRDADFMGIMRWAFYDKLKELYSNVSLTFGYITKHARIKHNLEKSHRINARCISGNPSTKESDCWYFFKQVRKQNRQLHKTNPKKGIRRENKAPGYVHGYQLFDKVEYLGRECFVFGRRSSGYFDLRTLDGEVVSRSASVGKLKLVERASSLLCERREASFLTALKHGVS

SEQ ID NO: 2326 - protein, 555 aa, unidentified
  source 1..555: note = Viral metagenome
MLPQSQALESASADNRKGKDETGHGRRGNMITGMQHGREDRFLEFTSLGDSHTATSEQSEGAEARGVIAPPNSTASRVFVLDKHGKPLMPCHPARARKLLKSGRARVHRLAPFVIRVVDREIEQCEVPGVTIKIDPGSKHTGIVCASVDEAGITHGLVSIQLDHRGQLIHKRMEQRANYRRRRRSANLRYRAPRWRNRHPQACRACGKNAKHNKGYCGPCIQKRDFVDNGYRQYRLPPSLFHRVATTTAWVNRLSRWAPVTGLAMELVRFDTQVMQNPEISGVEYQQGTLAGYEVREYLLEKWDRKCAYCGASGVPLNIDHVVARSRGGTNRISNLTLSCRSCNESKGSEDAEVWCKRRFGEQNGEKIARKVTAQAKASLKDTAAVNSTRWALWRELLKTGLPVETGTGGQTKWNRKRFGIPKSHTLDALCVGEVDNIGSVPNSVLIVACTGRGKHQRTTLDKYGFVRSRLPRTKTHHGLRTGDFVRAVASKGKHKGVHAGRVIARSSGSVFVGKVDGISCKNCSVLQRADGYGYNRKEEALLISALTDGASEAR

SEQ ID NO: 2327 - protein, 559 aa, unidentified
  REGION 1..559: note = 0207433_10050431_-_->_pfam14239(94,220)[118.6]
MATLHTSEKTHRGMLPQSPALEPVPADNPGVGTKRGTGPVPIPGTGVHHGRGETGDVCACAPRRHPSKTDEPVETESGAVTGPVAVPLSVASRVFVLGVDGAALDPCHPARARRLLACGRARVAHHTPFVIRLIDRSAEQSVTHPLAVKIDPGSRHTGMVVARVDPEGRTHGLFAVQVDHRGRQISERLTARAGYRRRRRSANLRYRAPRWRNRHPAACDACGANAIHGRRFCRPCAAAKTPGMGARESRLAPSLAHRVDGTCSMVARLARWAPVAAAVMELVRFDLQALEDPGIAGIGYQQGTLAGYEIREYLLEKYSRTCVYCDRTGVPLQVEHVRPRSRSGSDRVSNLVIACDPCNNAKDSRSVEEFLAADPDRLAKVLAGLRKPLRDATAVNATRWALHRRLQAMFPDRVSVGSGGRTKYNRTRAGLPKTHTLDALCVGRTHAVNSYPAQLVIAVAVGRGVYSRTVPDAYGFPRLQRPRTKLAHGYATGDLVRAAIPTGKYTGTHTGRVMVRTSGAFDVRTLTGRVGANRRHCSLLQRADGWRWSRQEEGHSNDS

SEQ ID NO: 2328 - protein, 314 aa, unidentified
  source 1..314: note = Human gut metagenome
MSTGLRAEQAEPAGIRKGDTLKVFVLNMRGKPLMPCSPAKARHMLKAGKAVVLRRTPFTISLTVATGETKQEVTLGVDAGAEHVGISATTEKEEVFASEVELRQDIKGLLADRLAFRRARRNRKTRYRAPRFNNRVRSKHKGWLAPSVENRIQAHISRIEAVCRVLPITKIVIETASFDIQKIKNPEIEGEGYQQGEQLGFWNVREYVLFRDGHVCQACKGRSKDLILNVHHIESRKTGGDAPGNLITLCEACHKAYHAGKLKQFSPRRGASFRAETFMGIMRWTVLNRLRERHPELPVTNTYGYLTKHKRIVA

SEQ ID NO: 2329 - protein, 444 aa, unidentified
  REGION 1..444: note = 0207433_10084486_-_->_pfam14239(1,145)[158.9]
VEDSTLQPVRLKLDPGSKTTGMALVRESEEVYPDTGEVQRTAHVLKLADLQHRGHVIREALTQRASFRRRRRGANLRHRAPRFCNRTRPAGWLAPSLQHRADTTLAWVRRLQRWSPITALSQELVRFDMQLIQNPEISGVEYQHGTLQGYEVREYLLEKWHRTCAYCPATNVPLQVEHIVPRAKGGSHRVSNLTLACGPCNTAKGTQDVRAFLAQDPKRLARVLAQAKAPLRDAAAMKLFTQAEFDNLPVIDGVKQCPTGDYSSVRNFGERCVFGAESIFCRDSRFADSCIFGEKSRFGVGCSFCDRCVFGIGIRFEIWCKFGLGCIFGSETRFGDWCGFGAECVFGDRCAFGVQNRFGERCIFAGRRALPENPLLVFPGAGTDDRIVYAINVEGGPWIEGWSFSGGIDEFRAKVRVNGGGLKSRYLSVAYEVAAKWCPEKVES

SEQ ID NO: 2330 - DNA, 31 bp, synthetic construct
  misc_feature 1..31: note = Synthetic
  source 1..31: mol_type = other DNA
ttttaccttctgtgtttccaccattcatctc

SEQ ID NO: 2331 - DNA, 34 bp, synthetic construct
  misc_feature 1..34: note = Synthetic
  source 1..34: mol_type = other DNA
ttttaccttctgtgtgttttccaccattcatctc

SEQ ID NO: 2332 - DNA, 30 bp, synthetic construct
  misc_feature 1..30: note = Synthetic
  source 1..30: mol_type = other DNA
ttttaccttctgtgttccaccattcatctc

SEQ ID NO: 2333 - DNA, 30 bp, synthetic construct; identical to SEQ ID NO: 2332
  misc_feature 1..30: note = Synthetic
  source 1..30: mol_type = other DNA

SEQ ID NO: 2334 - DNA, 22 bp, synthetic construct
  misc_feature 1..22: note = Synthetic
  source 1..22: mol_type = other DNA
gtttaacatatgagtgttagaa

SEQ ID NO: 2335 - DNA, 22 bp, synthetic construct
  misc_feature 1..22: note = Synthetic
  source 1..22: mol_type = other DNA
attctaggcatatgtcatagaa

SEQ ID NO: 2336 - DNA, 22 bp, synthetic construct
  misc_feature 1..22: note = Synthetic
  source 1..22: mol_type = other DNA
aaaagagtgaacgagactagaa

SEQ ID NO: 2337 - DNA, 22 bp, synthetic construct
  misc_feature 1..22: note = Synthetic
  source 1..22: mol_type = other DNA
ttctaacactcatatgttaaac

SEQ ID NO: 2338 - DNA, 22 bp, synthetic construct
  misc_feature 1..22: note = Synthetic
  source 1..22: mol_type = other DNA
ttctatgacatatgcctagaat

SEQ ID NO: 2339 - DNA, 22 bp, synthetic construct
  misc_feature 1..22: note = Synthetic
  source 1..22: mol_type = other DNA
ttctagtctcgttcactctttt

SEQ ID NO: 2340 - RNA, 23 nt, synthetic construct
  misc_feature 1..23: note = Synthetic
  source 1..23: mol_type = other RNA
ggtttaacatatgagtgggctct

SEQ ID NO: 2341 - RNA, 23 nt, synthetic construct
  misc_feature 1..23: note = Synthetic
  source 1..23: mol_type = other RNA
gattctaggcatatgtcggctct

SEQ ID NO: 2342 - RNA, 23 nt, synthetic construct
  misc_feature 1..23: note = Synthetic
  source 1..23: mol_type = other RNA
gaaaagagtgaacgagaggctct

SEQ ID NO: 2343 - DNA, 52 bp, synthetic construct
  misc_feature 1..52: note = Synthetic
  variation 38..45: note = n represents any nucleotide
  source 1..52: mol_type = other DNA
tagggcgctgatgcgtttagctcaggcgaaagtcgatnnnnnnnnatcgtcc

SEQ ID NO: 2344 - DNA, 52 bp, synthetic construct
  misc_feature 1..52: note = Synthetic
  variation 8..15: note = n represents any nucleotide
  source 1..52: mol_type = other DNA
ggacgatnnnnnnnnatcgactttcgcctgagctaaacgcatcagcgcccta

SEQ ID NO: 2345 - RNA, 37 nt, synthetic construct
  source 1..37: mol_type = other RNA
ctgatgcgtttagctcaggcgaaagtcgatgtgtdag

SEQ ID NO: 2346 - DNA, 52 bp, synthetic construct
  misc_feature 1..52: note = Synthetic
  variation 38..45: note = n represents any nucleotide
  source 1..52: mol_type = other DNA
tagggcggtgggtggattcatctggagtctgggaatcnnnnnnnnatcgtcc

SEQ ID NO: 2347 - DNA, 52 bp, synthetic construct
  misc_feature 1..52: note = Synthetic
  variation 8..15: note = n represents any nucleotide
  source 1..52: mol_type = other DNA
ggacgatnnnnnnnngattcccagactccagatgaatccacccaccgcccta

SEQ ID NO: 2348 - RNA, 37 nt, synthetic construct
  misc_feature 1..37: note = Synthetic
  source 1..37: mol_type = other RNA
gtgggtggattcatctggagtctgggaatcgttgtag

SEQ ID NO: 2349 - DNA, 52 bp, synthetic construct
  misc_feature 1..52: note = Synthetic
  variation 38..45: note = n represents any nucleotide
  source 1..52: mol_type = other DNA
caacgtttttaacagtggccttattaaatgacttctcnnnnnnnnatcgtcc

SEQ ID NO: 2350 - DNA, 52 bp, synthetic construct
  misc_feature 1..52: note = Synthetic
  variation 8..15: note = n represents any nucleotide
  source 1..52: mol_type = other DNA
ggacgatnnnnnnnngagaagtcatttaataaggccactgttaaaaagcttg

SEQ ID NO: 2351 - RNA, 37 nt, synthetic construct
  misc_feature 1..37: note = Synthetic
  source 1..37: mol_type = other RNA
tttaacagtggccttattaaatgacttctcgttgtag

SEQ ID NO: 2352 - DNA, 91 bp, Klebsiella pneumoniae
  source 1..91: mol_type = other DNA
cgaaatctatcaacgacgctatttccattgttcgctcatatctccgttaactctgccaggcagacgtctgatggggtcagtaaaaacagta

SEQ ID NO: 2353 - protein, 16 aa, Klebsiella pneumoniae
TKSINDAISIVRSYLR

SEQ ID NO: 2354 - DNA, 145 bp, Escherichia coli
  source 1..145: mol_type = other DNA
cgaaatctatcaacgacgctatttccattgttcgctcatatctccgttaactctgccaggcagacgtctgatggggtcagtaaaaacagtagtcaatcacccctccctgaagggagaggcttgtaaaagagcctgagattgacca

SEQ ID NO: 2355 - protein, 16 aa, Escherichia coli
TKSINDAISIVRSYLR

SEQ ID NO: 2356 - DNA, 71 bp, Klebsiella pneumoniae
  source 1..71: mol_type = other DNA
ataaaaggatatgactatgaaatcacgtgcagctgtagcatttgctcctggtaagcccctcgagatcgttg

SEQ ID NO: 2357 - protein, 18 aa, Klebsiella pneumoniae
MKSRAAVAFAPGKPLEIV

SEQ ID NO: 2358 - DNA, 145 bp, Escherichia coli
  source 1..145: mol_type = other DNA
gagagaggcgtttgctttgcaaacggcgctatccctccccgccatgaatgacggggtttctcgcgcaaaattgataaaaggatatgacatatgaaatcacgtgcagctgtagcatttgctcctggtaagcccctcgagatcgttt

SEQ ID NO: 2359 - protein, 18 aa, Escherichia coli
MKSRAAVAFAPGKPLEIV

SEQ ID NO: 2360 - DNA, 46 bp, synthetic construct
  misc_feature 1..46: note = Synthetic
  source 1..46: mol_type = other DNA
atattcacgagaagtcatttaataaggccactgttaaaaagcttgg

SEQ ID NO: 2361 - DNA, 46 bp, synthetic construct
  misc_feature 1..46: note = Synthetic
  source 1..46: mol_type = other DNA
ccaagctttttaacagtggccttattaaatgacttctcgtgaatat

SEQ ID NO: 2362 - protein, 656 aa, synthetic construct
  REGION 1..656: note = Synthetic consensus sequence
  VARIANT 2..47: note = X can be any naturally occurring amino acid
  VARIANT 49..50: note = X can be any naturally occurring amino acid
  VARIANT 52..75: note = X can be any naturally occurring amino acid
  VARIANT 77..78: note = X can be any naturally occurring amino acid
  VARIANT 80: note = X can be any naturally occurring amino acid
  VARIANT 83: note = X can be any naturally occurring amino acid
  VARIANT 93..103: note = X can be any naturally occurring amino acid
  VARIANT 105: note = X can be any naturally occurring amino acid
  VARIANT 107..112: note = X can be any naturally occurring amino acid
  VARIANT 114: note = X can be any naturally occurring amino acid
  VARIANT 117..130: note = X can be any naturally occurring amino acid
  VARIANT 135: note = X can be any naturally occurring amino acid
  VARIANT 137..140: note = X can be any naturally occurring amino acid
  VARIANT 142: note = X can be any naturally occurring amino acid
  VARIANT 146..150: note = X can be any naturally occurring amino acid
  VARIANT 153..159: note = X can be any naturally occurring amino acid
  VARIANT 162..167: note = X can be any naturally occurring amino acid
  VARIANT 169..170: note = X can be any naturally occurring amino acid
  VARIANT 173..174: note = X can be any naturally occurring amino acid
  VARIANT 177: note = X can be any naturally occurring amino acid
  VARIANT 180..182: note = X can be any naturally occurring amino acid
  VARIANT 184: note = X can be any naturally occurring amino acid
  VARIANT 186..215: note = X can be any naturally occurring amino acid
  VARIANT 218..223: note = X can be any naturally occurring amino acid
  VARIANT 225..231: note = X can be any naturally occurring amino acid
  VARIANT 233..248: note = X can be any naturally occurring amino acid
  VARIANT 255..265: note = X can be any naturally occurring amino acid
  VARIANT 267..274: note = X can be any naturally occurring amino acid
  VARIANT 276..278: note = X can be any naturally occurring amino acid
  VARIANT 281: note = X can be any naturally occurring amino acid
  VARIANT 283..285: note = X can be any naturally occurring amino acid
  VARIANT 288: note = X can be any naturally occurring amino acid
  VARIANT 290: note = X can be any naturally occurring amino acid
  VARIANT 292..293: note = X can be any naturally occurring amino acid
  VARIANT 296..297: note = X can be any naturally occurring amino acid
  VARIANT 299..300: note = X can be any naturally occurring amino acid
  VARIANT 305..307: note = X can be any naturally occurring amino acid
  VARIANT 309..314: note = X can be any naturally occurring amino acid
  VARIANT 316..320: note = X can be any naturally occurring amino acid
  VARIANT 322: note = X can be any naturally occurring amino acid
  VARIANT 325: note = X can be any naturally occurring amino acid
  VARIANT 329..337: note = X can be any naturally occurring amino acid
  VARIANT 340..341: note = X can be any naturally occurring amino acid
  VARIANT 344: note = X can be any naturally occurring amino acid
  VARIANT 347..348: note = X can be any naturally occurring amino acid
  VARIANT 351: note = X can be any naturally occurring amino acid
  VARIANT 353..355: note = X can be any naturally occurring amino acid
  VARIANT 359..360: note = X can be any naturally occurring amino acid
  VARIANT 362: note = X can be any naturally occurring amino acid
  VARIANT 366..367: note = X can be any naturally occurring amino acid
  VARIANT 370..379: note = X can be any naturally occurring amino acid
  VARIANT 381..389: note = X can be any naturally occurring amino acid
  VARIANT 391..399: note = X can be any naturally occurring amino acid
  VARIANT 401..406: note = X can be any naturally occurring amino acid
  VARIANT 408..410: note = X can be any naturally occurring amino acid
  VARIANT 412..414: note = X can be any naturally occurring amino acid
  VARIANT 416: note = X can be any naturally occurring amino acid
  VARIANT 418..419: note = X can be any naturally occurring amino acid
  VARIANT 421..428: note = X can be any naturally occurring amino acid
  VARIANT 430..431: note = X can be any naturally occurring amino acid
  VARIANT 433..435: note = X can be any naturally occurring amino acid
  VARIANT 437..442: note = X can be any naturally occurring amino acid
  VARIANT 444: note = X can be any naturally occurring amino acid
  VARIANT 446..447: note = X can be any naturally occurring amino acid
  VARIANT 450..451: note = X can be any naturally occurring amino acid
  VARIANT 454..463: note = X can be any naturally occurring amino acid
  VARIANT 465..474: note = X can be any naturally occurring amino acid
  VARIANT 476..486: note = X can be any naturally occurring amino acid
  VARIANT 488..496: note = X can be any naturally occurring amino acid
  VARIANT 498..505: note = X can be any naturally occurring amino acid
  VARIANT 507: note = X can be any naturally occurring amino acid
  VARIANT 509..512: note = X can be any naturally occurring amino acid
  VARIANT 514..527: note = X can be any naturally occurring amino acid
  VARIANT 529..559: note = X can be any naturally occurring amino acid
  VARIANT 561..568: note = X can be any naturally occurring amino acid
  VARIANT 570..583: note = X can be any naturally occurring amino acid
  VARIANT 586..590: note = X can be any naturally occurring amino acid
  VARIANT 593..594: note = X can be any naturally occurring amino acid
  VARIANT 596..604: note = X can be any naturally occurring amino acid
  VARIANT 606..607: note = X can be any naturally occurring amino acid
  VARIANT 609..624: note = X can be any naturally occurring amino acid
  VARIANT 626..650: note = X can be any naturally occurring amino acid
  VARIANT 653: note = X can be any naturally occurring amino acid
  VARIANT 655..656: note = X can be any naturally occurring amino acid
MXXXXXXXXXXXXXXXXXXXXXXXXXXXXXXXXXXXXXXXXXXXXXXRXXHXXXXXXXXXXXXXXXXXXXXXXXXMXXVXVVXKBGKPLMPTXXXXXXXXXXXGXAXXXXXXPXTIXXXXXXXXXXXXXXLGIDXGXXXXGXAVVXXXXXZVXXXXXXXLRXXXXXXLXXRRXXRRXRRXXXRXRXXXXXXXXXXXXXXXXXXXXXXXXXXXXXXNRXXXXXXNXXXXXXXCXXXXXXXXXXXXXXXXWLPPSLXXXXXXXXXXXVXXXXXXXXPXXXIVXEXXXFDXQXLXXPZXXGXXYQQGXXXGXXXXXXAXXXXXGXRCXYCGXXXXXXXXXLEXXHVXPRXXGGXBXXXNLVXXCXKCNXXKGXXXXXXXXXXFXXXXXXXXXLXXXXXXXXXYXXXXXXGXXXLXXXLXQXXPXXXXXXXXGXXTXXXRXXXXXXKXHXXDAXXIAXXXXXXXXXXPXXXXXXXXXXDXXXXXXXXXXXFXXXXXXXXXZXXXXXXXXRXRXXXXRXXXXXXXXXXXXXXPXXXXXXXXXXXXXXXXXXXXXXXXXXXXXXXGXXXXXXXXNXXXXXXXXXXXXXXPVXXXXXKGXXVXXXXXXXXXRXXVXXXXXXXXXXXXXXXXGXXXXXXXXXXXXXXXXXXXXXXXXXPPXSXX

SEQ ID NO: 2363 - protein, 1263 aa, unidentified
  REGION 1..1263: note = Cas9_758 protein sequence of Fig. 58
MSTVEYKLNPLPKAEPPYDWKNDPFYTDAVALGIDIGLEGIGVWLRKGWKPIYTRTFLFETPDAAPLEGRRGLRAGRRCRQAERRREVALKKFCDDFGLPWVEITDKGRDDGPFRFRWIATRKDVEGLRDARAFSACLRHIIRHRGYDWHAPEDGGDYPWGDEAKAKDAIEWAKTAFCQQEHADKLRYILTDCGWADKERQAFETALNHAVEKYKTQGIDAVLAEHFSQPKNNLRFPARRHNFPREMVWAHLTDIVQKHPQFVGGVERVKEALNQLHEIINDHRKEPGALALRKVNRCPLAEILFNGSAPKCDSSKNRHIRRFKLLEFLATRTFVRKDGTRILASRGLFGWLLDDLLEADIQALDSNGKIQRGKISMREFKKQFVAKHDSTGETELAGDTQSHNGEFFIQLTDLLWPKMSELGGRASLCARSAEALFDYAKKEGFDAAQIAVRLKDKRFERAGKKMSFYEIRQTAAAGFGIYKQVEFLLGRWKKNAKPGDKPAVPGKLRQVFAQLIKDGILPPDKTAPDYVVVETVGDIPRNREQAKEIQEAQAARRKFKDKLREQFKDFERGNLSWEETNKRLLLYDQQRGICPYTGDSLGENPLAHDLEIDHVFPRTRGGISEMVNLVLTHRKTNGEIKREQTPYEAFGGKNNSPQWREIRDRVLKMQWNGQKREFFLRSEDTPPDWGNMTRVAQLARQLRFEVARWMDIADDDAKVRQFIGTPTGYQTSVCREAWGDKLPEDFWPKKNRDNLRHHMWDAAILSHIPPGKGLNHVRCHGIFWSETNRGNIKLLALPQLGPDLKQFEKETAGLCLVAKIQPAHNKQSRFQQTIYSPPDENGLMWARDPIEKLADKPKLLELLRDAGIDEKQLPASRFNEWQEKRQAQFFTREEALSAVEALALPTDNQILVAVFEEWWTDRLKGDKKRVTDKSLRALLAKARVPKALVTDQQLAGVLINRGNPGPLTRKDGTIIRGISGSASTMTPMAVIPHRNHEGETIGFKLATETFIRAEIWTTEKRDKNGEVVKDEDGKPLLDYHRRLIPHPRGLKNLGLRKMQCTGERLAWERALTDAEIIELGLKENAEVKRLRKNYDKAVKFQEKEISKSKVAESELTLANAKAMPLKPKPPVISLRKIFTGLPPLAKRLKAADGTDVSRFAKGDLMLVPLTQDAEICQPKQAPYRKFWFRVAALKTNGQIQLLIAERKQTKPLTDQEIKDGEKLTPDQDWLIKAGVKQPGDDAVIAFLLRHTHGHDQPPHSAKK

SEQ ID NO: 2364 - protein, 775 aa, unidentified
  REGION 1..775: note = Cas9_1261 protein sequence of Fig. 58
VVVRPQGKLDHIPIPKPERGGITIRSENVLGIDFGPEHVGLALVRREPAGEQVLYAASITLRDLSPVMKERRALRRQRRSESWYRQPRVPQRGGGSARGAGAQEDEQAVEGVPEEEEEDRSRARSAPEYRRAQGCNKPKRKCKYVDPKTGEVCGANTPRKEKVRDLLLWDICQHLPVEPEQRLAILSYVNQVNIVRPEVLACLALEERALLENHRALARASKSKPLPQLLCELKIKKQLQSQILAIASGDPERKAADLKGRMAFCRKHFLLHHQQTRIPKPSAWLPPSIRCRHADLERVCREEVAPRWPVHRIRLERAQFDLQAIQRDPQGRGKDWDPEEWQRGPCWGRRNIYSAKRHEQGNRCAYCGKEPKKENRLELEHVKPGGGNTWDNLVLACRKCNQRKGKAEARGAGLKFSVDPDTGVSLAPRGLGESVVARYMTQTDQGYRELVARLQQLFPDAQIEYRYGYQTDHIRKRWIGSAQFAETALSLGYKQSPPRPKKRRKQWSELAHLKRKPRRHSDPLKSHVMDAVAIAGSLQRDSPELCQADKITIRPSRRQLFDTNPLGRGSDGRFYQRVKICGTQGGLSFRRVKHVVDARKRAILERVARDLLIEQAKGNEESPPSAFTPDAAQLIPFTSVRLAKRDASKTNTRRLHAPDDDRLPQQKGGHWYKAAGGPNWATVVYRLGGREQVAVLRNPAAFPDASSDIPAGAQVLFSFRKGKLVSFEQDGQTTRARITKNNSDGTLTVERLDDGREVTRSARCFRPVPLLAPNA

SEQ ID NO: 2365 - protein, 671 aa, unidentified
  REGION 1..671: note = Cas9_665 protein sequence of Fig. 58
VNTETREQVLGIDFGPKHVGIALVARGASSEEVLFVAEVRLRDRKSLLADRRALRRGRRGRKRYRQPKIPQRGGGATSQSGEESERGRAAAPEYRRATGLNTGRRRCKFVDPQTGEICGWNTPRKANVRDLLLWNICRHLPVSVSEQAGFLAYVNQTNLHRAEILGALPAEEQAPLEAVFSQQRRPKDERLKDRLRRLGVDRHLRSQVTDIVGITSRRPLSGRLSFCREHFLRHHEQSRVPRPSVWLPNTVEMKQADVLKVCRQEVAPRWRVDCIVLERANFDLQLLRQQTAIEWSVEDWQRGPRWGYRNTFEAKKQEQGNRCAYCGSKPTAKNRLRLELEHVIPGGGDTWENLVLSCRKCNEGKGNRSPAQAGMRFWTDTETGETLSPAPLGAAHVSRYMTQTDQGWRRLQAALQQVFPQAAHEVTWGYVTSFYRNRWNLPKKHFVDAAVIASSHELERPVSVPEQPQRFAPTSGGKQLFDTNPLSKRPEGRFAQSKAIVCEQGTLAFKDVAKVENPRKRATLQRVADEATAAAKARGETPPTAFTAEMLPKIPFKSVRLAKQDASDTNTRRLGRBWFKVASAVNIATIVYQLDGKVCMQLQRNPAVFRHDPGLPQGARVVATFRKGDLVECDAGRGRVTKNHSNCTLTVELLDSGKEVTRLAKSFRPRH

SEQ ID NO: 2366 - protein, 763 aa, unidentified
  REGION 1..763: note = Cas9_1079 protein sequence of Fig. 58
  VARIANT 206..207: note = X can be any naturally occurring amino acid
MEKELVLGIDYGGKYIGLAVVNQKNNQVLYARTVKMRDDVTDILAGRREQRSLRRTLQTKKKRLRELKNYLESIGGIYEESSGTFTIEPFRTVYSLAHKRGYDYADLPEEKTSEEIEAMDAKERKQWEKEKKELEETQRNSRHRDEVLRDVRNVMTEGNLSEEQIIKVESIFNKQYRHKRFNNRILTKCKVCGKNYPLRINVREIXXIENIVRYLPLQNKERELLKLTILKGHQQDINEIFKHFRKVYKITLNQKDWPGKNLIDIARNQLRGRLLFCKVHFPENEKYVSIEKKTFRLAPSLKTKIENVLSVIKDDILPNFTLNNVVMESNNFDIAAKTKGKKRLLKEEYSKGHRESGETRKEALLRETDSRCIYCGKGIDLSNAHEDHIFPRKAGGINIFGNLVACCSVCNEEKRGRTPLESGILPKPEIVSFITNDLKKKILEDAQYINTLDFNKYMSHASIGWRHMRDRLRELTGNKELLIKRSQGIYTAYFRKWWGFIKERGNHGHHALDAVILASKKSYAEDGKVDMTIKPCGEDGKEFDIERHLSEMKEFRRDKGGKSAPLHDRNPLSFKNDIITRRFMVTEIECGKEAVIISEEYRKKLTEAFKRFGIAKGKYLTDEQAKDAGFYLRKNGEGVMSLKCEVKGTGYNQMIRIKNNIFKTNVHNVGVAVFLDEKGKKRACELKNPRLSKHFVKPAEQVKGKVIFILKRGNMVTVEGEEMIYRVKKLGTSPVIEAIVGSDGKTRTVSATKLLKINHTKKV

SEQ ID NO: 2367 - protein, 531 aa, unidentified
  REGION 1..531: note = IscB 2089 protein sequence of Fig. 58
MKVFVVDKNNNPLMPTHPAKARILLKNGKATVKRVEPFVIKLNYTIDNPKTQNVKVGIDDGARNAGLAVVVEKSKKDDEVVFKGQIDLNNMIKDKMEERSNYRRCRRTRLRYRKPRFNNRKRNKCVVCGGNTQSGKNTCRLHKVTDKQNKLKNTYWLPPSLKARKDCIVRVLNQLNKWIPINNIIIETGRFDIQKLVNPDLSGAGYQQGAKYGRDSVKSALIYEYGKEVRDENNKIKKIARCCYCGKEGVPLEIEHIKPRGQGGTDAWHNLTLACKKCNKEKGNRTPQQANMKLIVKPSKFHLSKTLKYAAQLQQGKNYLRQAIKDAVNIFPSYTYGQFTSWQRKRFNIPKTHMNDAIVIAITNYDTENKPRLPVVNCDEYYIKPIGTKSRSLFTATCYSPKDYCYNNEGKRKRINSINAAVLTNNNKTIRALKEINKACVLLEKNNKIVPKAIRMIEDIPDNAIMVVEKGDTVECNVGKKKLRGIVSACMSNGNIKINVQGKQQSASLKKTRLIYKKQNIIFQKIHKTTK

SEQ ID NO: 2368 - protein, 410 aa, unidentified
  REGION 1..410: note = IscB 50962 protein sequence of Fig. 58
MSKAFVLSLDGKPLMPMQYNKAWVFIRQGKARLVTFEPLTVQLTYRTATEATQPVRVGIDDGARTAGVAVVVEREQRGPEVVCAGEIRLRGDTKALLAARRQRRRRRRRQKRHRQPRSRRSKGKGWLPPSVRVRKENILRVVADLVWRAPISRIVWEEGQFDTHRLVEPEVEGATYQQGPGYGWENRRHAVLFRDGYRCQYCGEELVAAGKIAEVDHVIPRSRGGTDTFENLVCACRECNQRKGEQTAAEFSHPEVGGRTFAYPAYLQSGKRYLREGLEQLSSVEVVFSWQTKRWRKEMGLEESHVNDAVAIAVQGAETESPQGWMQIVARRRRRNFKRLKWKEKWGLRHWDLVCYTKRGGRKVVGTVRGFVESREEVKVRHAGCMNDPLKAKRVQLLQRQVAIAYAPWG

SEQ ID NO: 2369 - protein, 516 aa, unidentified
  REGION 1..516: note = IscB 61900 protein sequence of Fig. 58
MPTVYVLNKDGKPLMPTTRCMHVRHLLKNGKARVVKSKPFTIQLLYETDDVVQPLYLGIDPGRTNIGVAVVKADGAAVFTAHLETRNKEVPKLMKKRKESRCARRTNGRRCRRQRRAKTNGTISKKCVKQTTAQNGSVSKRAKEIGVIKRHLPGCEKDVLCVGIKNKEAKFSNRTRQEGWLTPTANQLLQTHSNLIKKIRKFLPISNVVLEINKFAFMQLDNPNIQKWQYQQGPLYQKGSLENAVSEQQDHHCLFCEKTIEHYHHVILRSENGSDTIANIVGLCAEHHDLIHKDDKLKEELAKKKQGLNKKYGALSVLNQIIPALTYELGSRFQGHFYVTTGKSTYDYRAAHSVSKDHWLDAYCIACSVLPDGCFDNTINSRVPYELKQFRRHDRQVCQQQNVKRKYYLDKKLVATNRHKAIKQETDSLEEYRNNGGTTDKLVVKEHKPTNKRLNRILPGALMAANGKLNVMVASRGLHNGIPDNYVFDNNSKAKPSKCMLINKNKGIVFVSNSVS

SEQ ID NO: 2370 - protein, 519 aa, unidentified
  REGION 1..519: note = IscB 20209 protein sequence of Fig. 58
MRQHHGIVTVAVVDKNGHPLMPTNSYRARHLKKSGRAVTYAHRPVYTIQMLDVEFDPEKNMVQEIEVTCDTGYEHIGVSVCSEKHEYLQREYDLLTDETEKHNDSRKYRRTRRNRKRHRAKMSRNRKGVIVKDGFAPSLRNKRDRHIDIITSLCFVMPITDVHVEMGEFDTQALKAIEEGKPLPQGTDYQQGEQYGYLTLRAAVFSRDNHTCQCCGRNAFSDKAMLHEHHIGFWKGDRTNRMANLLTVCEQCHTPKNHKPGGTLYGLEPKLKGLKGATFMTSVRWNMVNKLKEALPGISVHITYGAATKQSRQQLRLRKTHANDAYAVGNFHPKHRAHLEHFKKRRRNNRVLEKFYDAVYIDTRDGTEKMGSQLGCNRTKRNIPRNNPNNERKYRGEKKAKGHRSIRKQHYTLSPGDKVWCSTDKKMYIVNGMQNNGATVQLRTTKVVPLDKLQPMKKKGKTIPIAANQKLALISAKEKHTVLSVDEGTNTAVMRWFKGVNPSTLTRVSSYKTGWERIK

SEQ ID NO: 2371 - protein, 543 aa, unidentified
  REGION 1..543: note = IscB 51558 protein sequence of Fig. 58
MLHQSQALELVSADNPQVGTKRDTDTTAGASAGGVAGIQPGRDEIPTPRDIHSVGASLVSKPSGEGTTSGGNPGNPVQRVFVLDKRKKPLDPTSPARARKLLKKRRARVHKLVPFTIRLTDRLLEDSVVHDHTIGIDPGSKTTGIALFRDTEVANTDTGELTTDRTGLFLMELNHRGSMVSKKLGQRANYRRGRRSRNLRYRAPRFDNRSRPKGWLPPSLQHRVDTTMTQVHRFQKLLPVTGIAYEAVRFDTQKLERPEITGVQYQQGELFGFEVREYLLTKYGNTCVYCDTTDTVLNLDHVVPRAAGGSNRVSNLVTSCIKCNHAKGKQPVEIFVTNRARLARIKRGLKQPLKDAAAVNATRNALHRALLTTGLEVQAFTGGRTKYNRTQLRIPKTHALDALCIGHIDTVTSYPAQTLDIIAMGRGSHQRTNVNKHGFAIGNPKTRAKRHFGFSTGDLVKAIVPKGKKVGTHVGRVAVRTTGSFNIRTATETIQSINHKYCHLLQRADGYAYYQEPTAIPHASQDSGVFTQTRRNLPIAQLR

SEQ ID NO: 2372 - protein, 4 aa, synthetic construct
  REGION 1..4: note = Synthetic
PLMP

SEQ ID NO: 2373 - protein, 432 aa, Ktedonobacter racemifer; identical to SEQ ID NO: 2059

SEQ ID NO: 2374 - protein, 429 aa, Ktedonobacter racemifer
MSNVFVIDSDYKPLNPVHPARARLLLTQGNAAVYRRYPFTIVLKRVVDQPEVHPLRLKLDPGSKTTGIALVNDTNGKVVFAAELEHRGHAIKDSLDSRRGVRRRRRNRKTRYRKPRFQNRRRKKGWLPPSLESRLANILTWVARLCRSAPITALSQELVKFDLQLMENPDITGVEYQQGTLQGYEVREYVLEKWKRTCAYCGKQDVPLQIEHIHPRANGGTHRISNLTLACEPCNIAKGTQDIAVFLAKKPDVLKRILAQVKKPLKDASAVNATRFALLERLKAFGLPVECGSGGLTKYNRTTRGLAKTHWLDATCVGKSTPSAISHKGVVPLLITANGHGRRQMCVPDKYGFPEKHKQRRKTFLGYRTGDMVKAITSKGTFEGRIAIRHRPSFRLGKVDIHPKYMHCIHRADGYEYTQKGVRNAPPHV

SEQ ID NO: 2375 - protein, 433 aa, Ktedonobacter racemifer
MEPSMIYVLSVSGQPLMPTKRHNKVWYWLRRGLAKVVRREPFTIQLCFETSTHTQPVAVGVDTGSKTVGVAATTNGEVVYQAEVHLRTDISGKMTQRRTYRRNRRARKTRYRAARFANRRRQAGWLPPSLRSKAEATVKAVRLIASLLPVGTVNVEVGNFDTQRMQHPQISGLDYQQGTLQGYLVREYVLEKWKRTCAYCQARGVPLELEHIVPRSRGGGSRESNLTLACRPCNERKGQQTAAEFGFPQIQAQARVPLKDAAHVSAIKTSVLQQLRSLFGTAQVSVTYGYETKYKRIQVLGLPKSHTNDAVAIACEMGERVKPREEVYQIRCLPRGQYQRFNGRHSEHKCWAPRKVRGYKLYEVVKAKGVVGYIGGRREKGAFIIKEVSSGKKLLEVVPSKLERVARPTQGWMITRKPVVENLEKEDGASSPS

SEQ ID NO: 2376 - protein, 421 aa, Ktedonobacter racemifer
MNIVYVLSPERQPLMPCAPAIARLLLKERKAKVMRRTPFTIKLISRPETICTQPLTLGVDTGSSVVGSAVADEQGSVLYLSEVELRNDIATTMKERAMKRRTRRTRKTRYRPAHFLNRKHSRKQDRFSPTMTSKIDAHLREIRFVQSLLPIQSIVLETGTFDPHALKNPEVLHKKWLYQKGINYGFANTRAFVLTRDDYTCQQCTGASKDQQLEVHHLVFRSQNGSDEETNLVTLCKTCHDSLHAGTITLKKTGKKKGKLLHATQMNSIRVQLLKRVEAEETWGFVTKEHRLLAGLPKEHIFDATMIATRGVKPTFCTTSILSKRCVCDGDYQQTKGVRSEQRIATGKIMGFRKFDKVRYLGQEYFIKGRMSTGYAILMDLSGNKVALKPIPKFDKMKRVSARSSWMMTQRTMPHSSFSLR

SEQ ID NO: 2377 - protein, 438 aa, Ktedonobacter racemifer
MSRVLIVDAERRPLMPCTPARARLLLKAGKAAILRRFPFVLILREARPEAVVEPLRVKLDPGSKTSGIAVLHEQSGEVMWAAELTHRSTPLREALAKRRAVRRSRRSRHTRYRAARFANRRRPKGWLAPSLESRVLHLLTWVKRLSRWCPVGALSLELVRFDLALLQNPSIEEVEYQRGTLWGTEVRQYLLDKWQHRCTYCQASEVPLEIDHVSPRSKGGSHRIANLVIACRPCNQAKGDQPLESFLANRPDVLARVQVQRRAPLHDAAAVNSTRWQLYERLKALDLPVETGSGGLTKWNRQSRNLPKTHWIDAACTGRSTPERLQIRHVRPWLIQAQGRQARRMVNVDKRGFPRGKAKGPSGICGLRTGDLVRAVVTKGKKIGTYVGRVAIKSDGYLKLTGRPFGMVEGIHARYCRPVHRNDGYAYAQGEAALPPQA

SEQ ID NO: 2378 - protein, 392 aa, Ktedonobacter racemifer
MVYVVSADRTPLMPCSAAIARLLLKEGKAKVVRRTPFTIKLSAQPERTYTQPLTLGVDTGSAVIGSAVASEQGSILYLSEVEVRNDIATTMKERATHRRDRRNRKTRYRPARWLHRRNSIKTGRFSPTMRSKIDAHLREIHFAHSLLPISSIVLETGTFDPHALKNPEVLRKKWLYQKGINYGFANTKAYVLTRDGYTCQHCQGKSKDQRLEVHHIIFRSQHGSDEESNLLTLCKTCHDALHAGMITLKHTGKKKGDLLHATQMNSIRVQLLKQVEAEETWGFVTKEHRLLAGLPKEHCFDAAMIATRGNRPVFQIQTVFVKKCIPDGEYQQTKGKRSEQRIPTGKIQGCAQMRQSALSRSGILYQRAYVYWLCYFDDDRREKGRFETHSQV

SEQ ID NO: 2379 - protein, 429 aa, Lactobacillus equi
MPTSRLGMVRRWLKSGQAIWYGNSRNTIQFVRPITTNAQELTLGVDAGFHLGLSVVGNQREYYASESVRKSEKDKITARREYRRTRRNRLRYRKPRFDNRKRPDSWLAPSIQHRLDFTIKEIKRLYNFLPISKLVIEVSPFDNQKLLNPNIKPWEYTQGKMQGFKDVKDYLLARDVNRDALDGKIYPASQLRVHHLVQRKDGGTNQPDNLVLLSDRNHNQANHNNGVLAKLAQNRQNSIDYKGAYFMSILASRLPNYFDSYIETQGYITANLRKLYGIEKSHLNDAFVIAGGTNQYLRTSNVYSRTKVANNNRSLQKFYDAKYIDSRDGKKKSGKELSSGRTRRSREINYDNQRIYRQEKVSKGRVSIRRQHYQLRPHDIIRNLKTNKIEIVKGVINNGNSVLFQTGKSVTTKKVKCLYHINGLREEKI

SEQ ID NO: 2380 - protein, 451 aa, Petrotoga olearia
MVYVLSKDGAPLMPTKRHGKVKHMLKDGKAKVVRNKPFTIQLTYDTPHYTQPITLGIDSGYKYIGFSAVTEKGNTPNGVKEEVLSGEVNLRSNVSELLKERSMYRRIRRNKLRYRKSKFDNRVSSRKETPRKGFKESWLAPSIKHKLDTHIRFIEFIKKILPITNIVIEVAKFDTQKIKNPEIKGKEYQQGEQQNFYNLREYILYRDNYTCQLCGKSNVPLEVHHIGFWKGDRTNRPSNLITLCTKCHDPKNHLKGGKLYGMKPVQKPLKEATFMSTVRWKLVNILDCKYTYGYITKSKRIKLNLDKTHYNDAYCIAGGTSQRRIEPIYFEQIRRNNRSLEKFYDAKYIDTRDGSIKKGQELFNGRRTRNKNYNTENLRKFRGQKISKGRRSIRTQRYFYQPKDLVIYEGKKYTVKGIHCCGKRIILAELSKSFKIETVEPYMFRKGLCIT

SEQ ID NO: 2381 - protein, 447 aa, Petrotoga olearia
MQRVFVLDKNKRPLMPCHPARARELLKKGKAAVFRYHPFTIILKDRAGGDTQPTHVKIDPGSKITGVALIGNFKNGKKVIWSAEIQHRGQSIKKALDTRRALRRSRRNRKTRYRKARFDNRERSKDWLPPSLMSRVENILTWIKRMRHFALITGISMELVRFDTQKLQNPEIKGIEYQRGTLYGYEIKEYLLEKWGRKCVYCGKENVPLEIEHIIPKSKGGSDRISNLTLAFHECNQKKGNQSIEEFLANNPERLNQIKSESKKSLKDTAAVNATRWYLFNQLKKERLLIEVGTGGKTKYNRETQNYPKKHWIDAACVGESGQNVQIEPDMQVLEITAMGHGTRKMCNVDKYGFPRSHRRAKNAPNGVKGRTYMGYKTGDIVLAVIPKGKNAGIHIGRIAIRQQPNFKLNDLDGINPKYLRLLQRNDGYGYQTARKEGEKLLHSSYH

SEQ ID NO: 2382 - protein, 445 aa, Petrotoga miotherma
MLVFVFNKHGEPLMPCKPSKARKLLKGKKAKIISYEPFTIQLLYGSSGYKQGVSIGIDIGSKHIGVAITSENKVLVKGEIELRQDVSSLLTTRKTYRRSRRFRKTRYRKSKFLNRKRKEGWLPPSIESRISNTFKWIDKFASLVPNPKLNIEVGKFDSHKFVNPEVSGKDYQKGQMHGYDDIRYFVFERDNYTCEVCKKKGVILQTHHIKYKSKGGTDNPNNLITVCADCHTPENHKPGGIFWEWMTKSKKPKAYKEHPFMNIIRKRIYQRYPSANIVYGFWTTPRRKELGLSKTHYNDAIAISGIDFIKKNVDSVFEIRQVRKKKRSLHEATARKGRKEPNRDQIRNSKNTKFYKSFYLNDLVKVFSRKGWITGFTNGGAYIKDIFDNYITMPNKSYKQVSLKNIQFISHNNNWQFVPHMKEGDLLLNGKENQLSSLIKQPHGR

SEQ ID NO: 2383 - protein, 434 aa, Lactobacillus composti
MQNRVFVINRQGEPLMPCKQRKCRKLLQSGKAKVIKKEPFTIQLKYVSTGYKQPLAVGVDSGQHHIGLAVTSQNKVLFQGEVSLRQDVKKLLDTRRIYRRGRRNRNTRYRQPRFLNRARSAGWLPPSVASKVQHNINWIRRFQAVLPKTELHIEVGKFDMAKMVQPGITGLGYQQGDLYGYETAKQYVLDRDNYTCQICHGKSKDPKLKIHHIIYRSNSGTNQVSNLLTVCATCHSLANHQPGGKLYDLQAKKFQSHRSLKGATFMNILRRRLFTAFPEAKFQYGAQTTLDRAKLDLEKAHYNDAVIISGIQKNAQRPTAVVMFHQFRKKKRSLHEATARKGRKVPNITSKRNAKNTKFSRGFYLNDYVQLPNGQKGNISGFSSRARCFVKAGDGNYLAISSKYKHINLSELKVIRHQNNWNVAEINTADYLMA

SEQ ID NO: 2384 - protein, 442 aa, Lactobacillus equicursoris
MKHENANRVFLLNRDGKPLMPCRPRKARLLLKSGKAFVVKKYPFTIQLKYGSYGYKQKVSLGVDTGQRHIGFAIVSQNKVLYQSEVELRQDVHKNLYTRKIYRRSKRNRKTRYRQARFLNRVHGKRDGLWLPPSVKGKVNHNIAWIKRYLAVLPNPDLHVEVGKFDMAKMLNPQISGKQYQEGSLKDWKNYEYYVLARDEYTCQLCHKHGEGVKLVVHHIVYRSQGGTNRVDNLITLCTDCHTTKNHQPGGKLYKWMKVKKKVTKQLKGATFMNILRKRIMTAFPEASFQYGSQTYVDRKNLLLPKGHFMDAIAISGIKSVGQMPDTVTLISQFRKKKRSLHEATARKGRKQPNTSSKRNEKNTNHARGLWLNDYVRVIGNHAKGYVKGFKSNGYYVYLTNGLGNYVLNNGKNYINGQQCRLIMHNGNWQKAEQKLSLNEFK

SEQ ID NO: 2385 - protein, 443 aa, Caldicellulosiruptor bescii
MVFVLNRDKTPLAPCHEAVARKLLKHGKAVIHRIYPFTIRLKEQKDTSTFKPNYRLKIDYGSRCTGIVILKNNCEVVFMMKLYHRTEIKENMDRRRSLRRSRRNRKTRYRKARFSNRRRDENWLPPTLLSRVRNIETWVKRLCKLCPVTAISYENVKFDTQKLRNPEISGIEYQHGTLQGYEVKEYLLEKFNWRCVYCGATGVPLEVEHVIPKSRGGTDRVDNLVIACHGCNQKKGNKTAEEFGYPEIQKLVKAPLRDCALVNATRWRIYEVLKNTGLPVECGSGALTKMNRIKLGLPKDHHFDAICVGYSTPNRIWLKTKTVLHVIAKGRGTRQIAILDRYGFPRGHRTRKKFFYGFQTGDMVKVVVPKGKYKGTWVGTVSCRNSGYFDIKDKTGKRIVQSISYKHCKIIQRFDGYCYELERIRISGTFPLQPVEVGASMCQ

SEQ ID NO: 2386 - protein, 471 aa, Caldicellulosiruptor bescii
MVIFTVDKHGRPGHPTRRFDMVRKLVKQGRAKIIGGGASGKPPVVMFLDREFDYSKTIERRLFVVLDPGYHHIGFAVCELRWGVLIVYCIGVLETRIPEIKDLMTKRRGYRRNRRYHSRCRKKRMSKRHSRVLTKFKAPRNVRTKDRTNATLRHGIETHLNLYKKLLKFFPFPAEQVVFVMEDNIFDVRTMTWGKTYGTGYQKSPRVPAEKKCIICGTEDNLQKHHLIQRKCGGTDVQENLVYLCRDCHEDVHAGRVYIPVEGVRQWRALGTMNAIIGQLREIPWLKFVPASDAAQMRKKLGLKKGHANDALATAAVFCSCTEADRTHMIELTLVKFRRHNRARIHAVRDRLYKVDGKIVAKNRRKRTDQKEPSFADISPLPPEIQRKLKVYPGTKILNPLRKEMPTIAGDVWIHEPTGKRFVTTGVVSQKYLYSPQLKKIVGKMYVQPEECRQVLHNEGMVVMYNSLYHS

SEQ ID NO: 2387 - protein, 452 aa, Streptosporangium roseum
MVFVLDTHGHPLDPCHPARARRLLAAGRAVVVRHTPFVIRLKDRTVAGSTMQGVELGIDPGSKHTGIAAFSERGGSRIGLYALQLDHRGGQIRDKLASRAALRRGRRSRNLRYRAPRFNNRTRPQGWIAPSLRHRVDGTVSWVSRLSRWAPVTAVHVERVAFDTHLLSAGRPLEGVEYRYGTLHGYEVREYLLAKWGRACAYCGASGVPLNLDHIHPRSRGGSNRISNLCVACVGCNQAKNATPIEEFLTDRPVVLVKILQQSKAPLRDAAAVNATRWALWRALTATGLPVATASGGRTKWNRSRTGAAKSHTLDALHVGALDHVTGWPSMVLVIAATGRGTYARTRADRYGFPRLALPRTKQHHGFQTGDLVRAVVPTGKKAGVHTGRVAVRSTGNFNIRTRHGSVRGISHRHVRLLQRADGYGYTTHPEARNRAAFPPPPEGGGIHAGGN

SEQ ID NO: 2388 - protein, 449 aa, Allochromatium vinosum
MAVFVLDKQKHPLMPCTEKRARLLLERGRAVVVRLAPFTIRLKDRIGGALQPLRLKLDPGSRVTGLALVRESETCDADTGAVERLEHGLWFGELAHRGQAIRETLGQRRHLRRARRSRKTRYRAARFLNRTRRTGWLPPSVQHRVESTVNWVKRLRRLAPITALSQELVRFDTQALQNPEISGVEYQQGELAGYEVREYLLEKWHRTCAYCSATGVPLEIEHIVPRSRGGSDRVSNLTLACRACNQRKGNQSIEDFLKRQPALLRQIQAQAQAPLQDAAAVNATRWALFAALKAQGLPVETGSGGRTKFNRSRLNLPKTHALDASCVGAVDQVRDWNRPVLAIRATGRGTYSRTRLDRFGFPRGYLIREKRVHGFQTGDWVRAEVPAGKRAGVHVGRVAVRRTGAFNIQTQDATVQGISYRHCRVLQRADGYGYAFQSKPDAEKARRAA

SEQ ID NO: 2389 - protein, 419 aa, Anoxybacillus amylolyticus
MFVYVINKHGNPLMPCSPRKARILLKNKKAKVVKRTPFTIQLLYGCSGYKQPISLGVDAGTKHVGLSATTKNQVLLEAEVQLRTDIQELLATRRQFRRSRRNRKTRYRKARFLNRKKPNGWLAPSIQHKMDSHIKLVKWVHSMLPITHITVEVAQFDTQKIKNPDIQGAAYQQGEQLGFWNVREYVLYRDGHTCQWCKGKSKDPVLNVHHMESRKTGGDSPSNLITLCKTCHDRIHREGLEHEIQRRFSSLKDASHMTAMRWFIWNGLKKVYPHVKHTYGYITKHTRIVHGLAKTHMVDARCISENPLATPSDTVFLLKFVRKNNRQLHKATISKGGKRKANKAERFIKGFQLFDKVLYNSQECFVFGRRSSGYFDLRLLDGTRIHASASYKKLKKVEHASTLLIERRKGDSSPTFALA

SEQ ID NO: 2390 - protein, 451 aa, Paraburkholderia hospita
MSAFVLDRNGRPLMPCSEKRARHLLARGRARVHRVMPFVIRLVDRMADSCALQPLRIKLDPGSKVTGVALVREADSGIAVINLFELIHRGRQISEALTARRGFRRRRRGANLRYRAPRFLNREKPEGWLPPSLQHRVDTTMAWVQRIRRWAPVTALSSELVRFDLQQLENPEISGLEYQQGTLAGYEVREYLLEKWKRTCIYCDAKDRPLQIEHLTARARQGSNRVGNLGLACGDCNQDKGALDVRAYVKDSKRLARILATASRPLRDAAAVNTTRWALTDTLRATGLPLELASGGRTKFNRVTHDLPKTHALDAVCVGRVDAINDWKRPSLSIKATGRGSYQRTRLTRHGFPRGYLMRQKQVQGFRTGDHVRADVPTGKRAGIHVGRVAVRATGSFNIQTASTVVQGINHRHCRLVQRGDGYAYSLQSTDSYQGDAGICGAAHAALSLPG

SEQ ID NO: 2391 - protein, 469 aa, Paraburkholderia hospita
MAVCVLDRSGKALMPCSEKRARLLLARGRARVHRVVPFIIRLVDRRAHASRFQPLRIKVDPGSRTTGLALVRDTQLVDATSGEIQRGAAVLNLFELVHRGRQISEALSARRAMRRRRRGNLRYRAPRFLNRTRPAGWLAPSLEHRVATTMAWVNRVMDWTPVAALSSELVRFDMQALENPEIASVEYQQGTLAGYEVREYLLAKWGRRCAYCDQEHVPLQIEHILARASGGTNRISNLTLACACCNAKKAARPIEAFLARDPKRLAVILAQAKRPLKDAAAVNATRWALANALRATGLPVELASGGCTQFNRKQLGLPKTHALDAVCVGKVASVSVWYKPTLAVKCTGRGSYQRTRLDRYGFPRGYLTRSRRVHGFQTGDLVRAEVPTGKKAGRHTGRVAVRATGSFNIQVAGNVVQGIAHRHCRLIQRSDGYGYSRIALLKGDASDGTASLSALSLPAVNDGVSRAAG

SEQ ID NO: 2392 - protein, 420 aa, Methanobrevibacter millerae
MFVYVLNMHGEPLMPCKPRKARILLKEKKAKVVNRTPFTIQLLYGSYGHKQPVNLGVDAGSKYVGLSATTTNKELFKATVELRRDIPKLLENRSILRRNRRTRKLRYRPPRFKNRGKKGKLAPSIQHKIDCHLTIIKRVCNIIPIQNIIVETAEFDTHKLKNPNVQGVEYQNGEGKDFYNVKQAVLSRDKYTCQICGKKQVKFEAHHIIPKSQGGSNRMENLTTLCSECHHKVHNGELKFNKKVTRFNHTSHMNIIRKRLMELLKKEFDNVHETFGYLTKYNREKLGIPKSHCNDAFIISHNPQAEQSSIEYLFKKVRRHNRQIHKAKPSKGGKRRKNQSHYIINDFRRYDKVMYNGIECFITGKRSNGYFQLKSFDGTVISQSTNSKKLKLLEPIKGWLVDWRWTIPPRPKEIKVSLPN

SEQ ID NO: 2393 - protein, 430 aa, Eubacterium oxidoreducens
MVYVLNQDGQPIMPTRNHAKVRVLLKNGKAKVINRCPFTIQLLYPCDNQTQSISLGVDAGSKHIGISATTKGDSTGARVLYEADVTLRNDIVELLSTRRENRRARRNRKIRYRKPRFDNRRRKDGWLAPSVQNKVNTHLTVVANACKILPVTKIVVETASFNLQKLKADLEGLKRPEGIEYQQGEQLGFWNIREYVLFRDGHTCQCCKGKSKDKILNVHHIQSRKTGGDAPNNLITLCETCHTGYHKGLVKLPESIKRNKPLKDATFMGIMRWAFYNKVKEIYVPQGIDVHMTYGYITKNTRIKNGLPKEHYIDARCISNYPEAIHPWNKTEVYYQKKVRCHNRQIHKMSIHKGGVRKLNQAEYLVKGYRLFDRVQYQGKEYFVFGRRKSGFFDIRTLDGEKVNKGSISYKKLKLLEISKGFLTERKVVA

SEQ ID NO: 2394 - protein, 456 aa, Fervidobacterium changbaicum
MVFVISKDGKPLMPTKRHGKVRRLLKQGLAKVVNREPFTIQLLYETTNYTQPVTVGIDIGSKVVGVCAVTDKEEMFSAEIQLRQDISKLLLERRQHRRFRRYRKTRYRKPRFLNRRKEDGWLPPSLQWKVDAHVRIVNKLSKIIPITKVVVEVAPFDIQKVLNPDIEGEDYQNGPQKGFSDVRDYCLWRAGYKSELSGKTGILEVHHIIPRSKGGTDAPSNLIVLTTQEHKMLHEGKIKIPKSRLEQIKVFKDAAHVSTIEQHIVNKLKQNYHVEITYGSITKERRDMYGLEKSHRDDAFVIAGGNIQERASEWYFGKFFRRQNRSLHKANPIKGGRRPINTVKQVNGFIRFDKVECEGEKAIITGLRSSGYFSISSLSGEKISDSVKYTKLRLIERAKTLMFERRERATCSWLKPRVSVARFHEIKTAHSRSFKRSTICFTMDNWFSYFYAYTAH

SEQ ID NO: 2395 - protein, 440 aa, Fervidobacterium changbaicum
MVFVLDKNKKPLMPCSEKRARLLLSRGRAVVHKMHPFTIRLKDRTVQQSELQPLRLKLDQGAKVTGLSVLREDGDVAETVFLCEIHHKTDIKQKLDARRAVRRSRRNRKTRYRKPRFLNRRRPEGWLPSSFKARADQLVNVVIKLTKLLPISAISIEDAKFDTQKLQNPEISGIEYQRGTLFGYEVREYLLEKWGRRCAYCGRSDVPLEIDHIVPRSRGGTDRVSNLTLACRECNQKKSNKTAAEFGYPHIEERARQTYKQAAFMNSIRSYLSKSLSSFGIPVEYGTGALTKANRIRLGFPKEHYFDACCVGESTPSEIRITQSYVQIWRAVGRGTRQMCNTDKFGFPRGHRQRCKKHFGFQTGDIVKAIVPRGKYAGIWMGMVAVRASGFFDIKDKNGKRVCQGIRYKYCKLIQTADGWQYSKTKTNYSISHTTEVACI

SEQ ID NO: 2396 - protein, 439 aa, Allochromatium warmingii
MSVFVLNKQKRPLMPCSEKRARLLLERGRAVVVRLVPFTIRLKDRIGGVLQPLRLKLDPGSKTTGIALVREVVRRDESVVWLAELTHRGYQISEALRARSAMRRRRRSANLRYRAPRFLNRTKPKGWLAPSLRHRVETTINWVKRLRRLAPITEITQELVRFDLQAMQHPEISGIEYQQGELAGYEVREYLLEKWQRTCAYCGAQQVPLQIEHIRPKSAGGSNRLSNLTLACAPCNHKKGAQSIEAFLKHKLELLKQIQAQAQAPLKDAAAVNTTRWALFNALKATGLQVKTGSGGQTKYNRQRLGIPKTHALDAACVGKLDALHNWQIPTLAIKAMGRGSYQRTRLNRFGFPRGHLMRHKRIHGFQTGDRVIAHIPSGKKAGVHVGRVAVRTSGSFNIQTATGVIQGIAHRHCSVLQRADGYGYSFNLTQPEEARLAA

SEQ ID NO: 2397 - protein, 424 aa, Caldicoprobacter faecalis
MVYVISKAGKPLMPTERHGKVRRLLKQGLAKVVKREPFTVQLLYDTTTYTQPVTVGLDIGSKTTGVSAVTEKKEIFSAEVELRDDIKGLLLERRQYRRMRRYRKVRYRKPRFLNRARDDGWLAPSLQWKVDAHIRIVDMLGRIMPIERVVVEVAPFDTQKILNPGIEGEDYQNGAQKGFWDVREYCLWRAGYRSELSGKRGILEVHHIVPRSEGGTDTPSNLIVLTADEHKGVHEGRIRIPKSKVEKVKMFKDAAHVSTIGWHIVNRLRERYSVEVTYGSTTKAKRLSCGMEKSHRVDAFIIAGGDLQERLREWYLGKFLRRQNRSLHKANPIKGGVRPVNTIKEAYGFRRYDRVEYEGIIGIIAGLRSSGYFAVRSLSGEKIHDSAKHNRLRLVEKAKTLMLERREERIPLHLEEDGVSCARI

SEQ ID NO: 2398 - protein, 447 aa, Halolactibacillus miurensis
MRVFVKSMRGFNLDPCKNQKARQLLKEKKAKIISYKPFTIQMLIATGETTHESHVGIDLGAKYTGVAITQEDRVLAKGDIECRQDIKALLETKKIYRRSRRSRKTRYRKCKCKHKTTRVYSNKKGKWVKKKTSFTSPRPKSWLPPSLESRTQNLFFWIDTFTSLLPKVKLHIEVGKFDVQKMKSPDIQGKAYQEGDTFGYHDVRYFVFARDHYTCQVCKKKGNILNTHHIIYRSHGGSDAPSNLISVCTDCHTSDNHKRGRILWHWMEKRKKVPTYKEPPFMNALRIRTFRRYPDARIIYGSETTPRRKELHLEKTHYNDAIAISGIQHIKENPHTIFYIKQFRKKKRSLHEATARKGRKNKNLTQKRNKKNTKEMKGIHLNDTVRIFGKIGFVSGFTTTGIYIKDIHNAYITKPGKTYKQVGFKDVTVENHNNNWQFISHLAPDGA

SEQ ID NO: 2399 - protein, 427 aa, Alicyclobacillus macrosporangiidus
MKQNRVLVLDKNHHPLMPCHPARARQLLKAGRASVFRWYPFTIILHDRDRGEVQSVRLKLDPGAKVTGIAVTAAFQRGDTVVWAAELHHRGDQIRQALLTRRALRHARRNRKTRYRKPRFDNRRRPEGWLPPSLVSRVENVVTWVERLRRFAPLTHLSMELVRFDTQKLQDPEIHGVEYQQGTLFGYEVREYLLEKWGRKCVYCGAEDVPLEVEHVVPRSRGGTDRVSNLTVACHECNQAKGNQSLEEFLHHDPERLRQIKAGLKTSLKGAAVVNATRWALFRRLQATGLPLEVGSGGRTKYNRAVQGYPKAHWIDAACVGELGERMRLHPEMQVTRIVAKGHGTRRRCGTDKHGFPIRHAPAAKSYMGFRTGDLVRATIPRGKNTGRHVGRIAIRHRPSFRLNGFDVHPKYLKILQRGDGYAYATE

SEQ ID NO: 2400 - protein, 501 aa, Desulfotomaculum thermosubterraneum
MVFVLDKHKKPLMPCTEKRARLLLERGRAVVHRMSPFTIRLKDRTAEESRFQPLRLKLDPGSRTTGFAVLREDTPNRSEVILLGEIHHKPSIKDGLDVRRNQRHSRRNRKTRYREPRFNNRHPEKCAVCGKNAQHGSRYCRPCEKAKNFVDNGHREGRLVPSLEARVNQTLSVVDKLTRWLPITAISTEHVKFDTQLMQNPDISGVEYQQGELFGYEVREYLLEKWGRKCAYCGKEGVPLEVEHVVPRNPKRGPRGTDRISNLTLACEECNKAKGNLQPEEWLEKLKQSKRKLDQVRAENLPKILRKLKEPLRDAALVNATRWVLYDRLKKTGLSVECGTGARTKYNRLKMGLPKTHYYDACCVGESTPENLAINQEYVQVWTALGRGTRKMCNTDKYGFPVSHRTRQKMYFGFTTGDLVMAEVPEGKYAGRWVGRVAVRASGYFDIKDGSGKRICQGISYRHIKLLQRADGWQYEKIRVEKGGSGGASSPGVNAGASGAA

SEQ ID NO: 2401 - protein, 415 aa, Fervidobacterium gondwanense
MVYAISQQGKPLVPTKRHGKVRRLLKQGLAKVVKREPFTIQLLYDTTTYVQPVTVGIDIGSKTVGVSAITDKKEVFSSEIELRTDIKDLLCERREYRQLRRYRKTRYRKARFLNRRKPEGWLAPSLRWKVDAHIRIVNMLSKILPISKVIVEVAPFDTQKILNPDIQGEEYQNGVQKGFWDVREYCLWRAGYKSEVSGKKGVLEVHHIVPRSGGGTDNPSNLIVLTAQEHKAIHEGRLKIPKSKIEKVRILKDASHVSTIGWHIVNELKELYEDVRVTYGSITKAKRSEFGLEKTHRNDAYVIGGGTVQKRAKEWYFGKFFRRQNRSLHKVNPIKGGIRPVNTIKQSYGFRRFDKIEYEGKIGIIAGTRSSGYFVIRSLSGERIHDSVKYSKLKHFEKSKTIMLERREAAISSHD

SEQ ID NO: 2402 - protein, 442 aa, Desulfobacterium vacuolatum
MHVFVKNMRGEALMPTSPRKARVLIAHGKAKIDSYRPFTIQLCIATGESRQDLTLGVDAGYATIGFSVIDSTKELFACEIELLKGQVERNNKRRIYRRQRRSRLRYRKARFEKQNKPEGWLAPSIQHKLDTHIKFIHRLQSIMPITETIIEVAAFDIQKIKANGEIEGKEYQEGEQLGFWNLREYILHRDNHKCQHLDCKNKAKSPILEVHHIGFWKKDRTNRPGNLITLCTKCHTAPRHKKNGSLYGWEPKVKTFKPATFMSMIRWKLVNALQCDHTYGHITKHNRIRLDLPKTHFNDAFCIANGQHQTRAIPVFFQQKRKNNRCLEKFYDAKVLDIRTNKIVSGNDLNNGRRTRNKNLNGENLRKYRGLKKSKGRRQVRRQRYSIRPHDIVEFDGSIYKAVGVQNKGTYLKITNGVKTVVKNIKHVKTIFHQKTLMYVSR

SEQ ID NO: 2403 - protein, 469 aa, Desulfobacter hydrogenophilus
MKVYVKSQSGKWLMPTNPANARILLKKGKARVIQRTPFAIQLLYETTEHIQPVTVGIDDGGIHVGIAAVSHGQSLFQQEVVLRSDIKSKLDTRRQYRRSRRHRKTRYRKPRFLNRKQSIPTCKVCGKNAPASKVICRACLRKAEGVHQKYAGIQKKAFRIPPSIKAKKEAIIRVVRQIPLPISNIILEDVYFDFQAMENPGISGKQYQHGDLLYHKNFKQACWVRDKFKCRVCGAESKLQCHHIKPRADGGTNKLSNLMTLCEGCHEKHHKDGLKLPKQKSAFYISAAHVQQGKNYLQAELSRIAPLRTTFGYITAHHRNKAGIEKSHVNDAVLIADKQASPLDRQIQTKHVQLRKRSLHEATARKGRKAPNRTQKRNKKNVFTLKGFNRWDTVQYKGRVGFISGFTGTSSCRIVDIKGNYIKNPEKKYTQVNLREVRKIHENRSIVSYYANSSPTFAIAQEGDSLAGS

SEQ ID NO: 2404 - protein, 470 aa, Paraburkholderia nodosa
MAVFVLDRRGRPLMPCTEKRARLLLARGRARVHRVMPFVIRLTDRKADACSFQPLRVKLDPGSRVTGIALVREADDGIAVLNLFELVHRGRQISEALTARRAFRRRRRGTNLRYRAPRFLNRSKPEGWLAPSLMHRVHTTMAWVNRIRRLAPVAALSSELIRFDMQALENPEVSGVGYQQGTLAGYEVREYLLEKWNRTCIYCDATDRPLQVEHLTARARNGSNRIGNLGLACGGCNQEKGSLNVREYVKDPKRLARILAAASRPLKDAAAVNATRRALADALRATGLPLELASGGRTKFNRVTHGIPKTHALDAVCAGCVNAVRDWQRPSLTIAATGRGSYQRTRLTRYGFPRGYLMRQKQVQGFQTGDHVRADVPHGKRAGVHTGRVAVRATGSFNIQTATAVVQGISHRHCTLIQRGDGYAYLQPKDSFRQEDAGDGRASHAALSLPGMNPGFLAQSDDFEIDFQGI

SEQ ID NO: 2405 - protein, 468 aa, unidentified
MSVFVLDRRGRPLMPCSEKRAKLLLARGRARVHRVVPFVIRLIDRHVESCASQALRLKLDPGSRITGMALVRDTEIIVPATGEIQRGAAVLNLFELVHRGRQISETLTARRAMRRRRRGNLRYRAPRFLNRSRPAGWLAPSLQHRIDSTLAWVRRIQRWAPVTALSSELVRFDMQALENPEIRGIDYQQGTLAGYEAREYLLEKWGRQCAYCDTAGTPLQIEHIHAKARGGSNRVSNLTLACGACNRAKGASPVEVFLAKDSRRLARILARAKRPLKDAAAVNATRWVLSNVLKATGLPVELASGGRTKFNRMTLGLPKTHALDAVCVGEISFVTAWQKPTAQAKCTGRGSYQRTRLNRFGFPRGYLTREKQHFGFQTGDLVRASVPAGKKAGSYSGRVAVRASGSFNIQGAGGAVQGIAHRYCRLVQRSDGYAYSRIATSGRIAGAGTASRSALSLPAMNGGVSRAI

SEQ ID NO: 2406 - protein, 418 aa, Exiguobacterium antarcticum
MLVFVLNQHGEPLMPCKPRKARHLLDEKKAKIVKRTPFTIQLLYGASGYKQPISLGVDAGTKQIGFSATTSTKVLLEGEVQLRTDIQDLLATRRAMRNARRSRKTRYRQARFLNRKKPKGWLAPSIQHKVDAHLKLIRMIHRLLPIKHLTIEVAQFDIQKIKNPDISGDLYQKGDQLGFWNVREYVFFRDKHMCQHCKGKSKDNILNVHHIESRRTGGDSPDNLITLCETCHHKIHQQKLEHLFQRKSRSLRDASQMTVMRWFIYNAVKEAYPYVKLTYGFLTKNTRIQNGLEKRHAVDARCISGNPLGEAPKVSYLFRQVRANNRQLHKMTIGKKGKRKANKAERLVHGYQLFDKVQYEEQTCFVFGRRKNGYFDLRTIAGFSIHKSASYKKLTLLEKAKTWLVDIQPEGGEGRSQP

SEQ ID NO: 2407 - protein, 461 aa, Acidihalobacter prosperus; identical to SEQ ID NO: 2043

SEQ ID NO: 2408 - protein, 451 aa, Caldanaerobius polysaccharolyticus
MVFVLDKKKKPLMPCTEKRARKLLQSGRAVVHRLMPFVIRLKDRTAEESNFQPLRLKFDPGSKTTGFSLLREESAEKSAAIIMGEIHHKQGIKDRLDSRRVLRRGRRNHKTRYRKPRFDNRRREEGWLPPSLEARVEETVRAAEKLMKWLPITSISTEHVKFDTQLMQNPEISGIEYQQGELYGYEIREYLLEKYGRKCAYCGTENVPLQIEHVVPRNPKHGPKGTNRVSNLTISCERCNKDKGNKQPEEWLEELQKSKRKIDRVRAENLLKVLANLKKPLKDAAMMNATRWTLYERLKRTGLPVECGTGARTKKQRIEHGFPKAHYFDACCVGASTPKTIKIKTKYTEIWTAVGRGNRKMCNTDKYGFPISHRQRKKRHFGFQTGDIVEAEVLSGKYKGTWRGRVAVRASGYFDIKDSKGNRICQGISYRYVRLLQYVDGWQYEKEKVAY

SEQ ID NO: 2409 - protein, 477 aa, Azohydromonas australica
MSVFVLDRSKKPLMPCSEKRARKLLTAGRARVHRMYPFTIRLLDRTAEDSALQPLRLSIDPGSKATGLALCRVEDRVDADTGEAGEPALHIVALVELVHRGQAIRDSLRRRAMLRRSRRGRNTRYRAPRFDNRGGKRTGWLAPSLLHRVETTLTWVRRLRRWAPVSELAQELVRFDMQLMQARAAGKGIEGVEYQRGELAGFEVGEYLLAKWGRRCAYCDAEGVPLEKDHIVARARGGSDRVSNLALACRPCNRAKGAQDVGEFLAHAPARLARILAHAKAPLKDAAAVNATRWRLFNDLKSTGLPLQTASGGRTKFNRTRLALPKTHVLDAACVGRVGEVLRTAQPTLQVQCNGRGSRSRTRLDAHGFPRGYLMREKSVLGFRTGDMVHATVPASSRKAGTWVGRVAVRSSGSFNVQTAAGTVQGINHRHCRVLMRGDGYGYQLVAQHRKESGYRDGASRRALSLFGLKAEVSRAV

SEQ ID NO: 2410 - protein, 427 aa, Enterococcus cecorum
MVYVLSIDNEPLMPCSNVIARLLLKQGKAKVKYREPFTIKLTYETTTYTQPLTLGVDTGSQTFATAVADEKGNILYTSEVTLREDKNNSIKKKMDQRRMYRRNRRSCKTRYRKARFNNRKNSKRKERFSPTMTSKLHSHQKEIEFIKSILPIAKLIFETGTFDPHLMKNPSLANPKVKPWGYQQGPNYGFENTKARVLVRDNHTCQICNKKPKNERLEVHHIVFRSQGGSDEENNLVTLCHSCHVELHKGLIHPNFEGSLKSALKYATQMNSIRIQLLKLYPDAIETFGYVTKANRLNLGLPKEHYVDAAVIATAGNQVKFACNLMIKRCIPKGDFQRTKGVRSEKTIPKGKIDGFKKYDKVRYFGNEYFIKGRRTSGYFTLMDIYGQTISFNHMSKGQKTPKAKNCHRISARKSWIVTTKKLENIA

SEQ ID NO: 2411 - protein, 419 aa, Bacillus humi
MVYVLNIDGKPLMPCSSVIARLLLKQGKAKVKRRTPFTIQLFYKTDTEYIQPLTHGLDSGSSKVGSAVSDEKGNIVYMSQVEIRNDVSKKMQQRSKYRRNRRNRKTRYRKARWLNRKNSMKKDRFSPTMTSKIHAHMRETRFVQKVLPISKTIIETATFDPHALKNPAVLTNKWLYQTGINYRYANTKAYVLTRDGYCCRHCKGKTKDKRLEVHHIIFRSENGSDEEDNLITLCKTCHDALHQGKVALKKKGKKKGQLNHATQMNSIRIQLLKRIHAEETFGFVTKEHRQLMGLSKEHYFDAVAIATQGKEPTFKMSNVLFKKCVSDGDYQQTKGVRSEQVIPTGKLFGFRKFDKVQYIGNDYFIKGRMSSGYAILMDIEGNKVDLKPIPKFSKMQRVSARKSWIMIPKTIPSFYSYVT

SEQ ID NO: 2412 - protein, 447 aa, Micromonospora viridifaciens
MVFVVDRHHRPLQPCSPARARKLLASGRAVVHRHTPFVIRLKDRETADSQVDGVELGVDPGSKFTGIAVFRTDNDVRTGLFAIEVRHRGGRVRDKLAARSAFRRGRRSRNLRYRAPRFLNRRKPDGWLAPSLRHRVDNTMSWVQRLCRWAPVTGVHVERVAFDTQLMQNPNIGGVEYQHGTLHGYEVREYLLAKWGRKCAYCGVAGVPLNIDHIVARSRGGSDRVSNLTLACVPCNQAKDATPVDVFLADRPTVLARIRRQAKLPLRDAAAVSTTRRALWQALAATGLPVEVGTGGRTKWNRHQTGAPKTHTLDALHVGTITAVRSCPGHIMVATATGRGCYARTRCDRYGFPRLRMPRSKTVYGFQTGDLVRAVVPAGQNKGRHVGRVAVRTTGKFNIRTSHALVQGIHHRHFRLLQRADGWAYTREEERRFIPALNGQVSTPQRR

SEQ ID NO: 2413 - protein, 450 aa, Micromonospora siamensis
MVFVLDRHHRPLQPTTPARARKLLTSGRAVVHRHTPFVIRLKDREVASSEVDGVEVGIDPGSRFTGIAVFLAETAGDNLVRTGLFGIEVRHRGNQIRDRLFARAALRRARRSRKLRYRAPRYANRRRPHGWLAPSLRHRVDNTMSWIERLRRWTPVKLLHVERVAFDTQLMQEPDISGVEYQHGTLHGYEVREYLLARRGRKCVYCGAVGVPLNIDHVVPRSRGGSDRVSNLTLACVPCNQAKGATPIDTFLADQPAVLARIRRQQKLPLRDTAAVSATRWALWRALVATGLSVQVATGGRTKWNRHRTDVPKSHTLDALHVGVLTTVRSYPGQVLVATATGRGRYARTRADRYGFPRLRLPRIKTVCGFQTGDLVRAVVPTGKNIGKREGRVAVRTSGRFAIRTGQTLIQSVHHRYVHLLQRADGWAYTREEERRFDPVVTDRVPTPHT

SEQ ID NO: 2414 - protein, 430 aa, Clostridium magnum
MRVYVKNQRNQPLMPTTQRKARIFLKQKKAKIITYEPFTIQLLYATGETTQETILGVDAGNRTIGLSATTYKCELFSAELKLRTDIVELLATKRQFRRSRRSRKTRYRQPRFENRKKTEGWLAPSIENKIGTHLKVVNKVHSLLPISKIIIEVASFDIQKIKNPDIQGEKYQQGNQLGFWNVREYVIFRDGHKCQGKKNCKGKILNVHHIESRKTGGDSPDNLITLCEDCHKDYHSGKLKLNLKRGQSFRDAAFMGIMRWSFYNKLKELYSNVNLTYGYITKNTRITNNLPKEHRIDALCITGNSTVKRLDNWYLIKQVRKKKRSLHEAIARKGRKEPNITSKRNSKNTKEIISKGKKWCLFDKVKIGSNTGFVSGFTGNMVYVQDIEGNYLQVSPKYKQISTDNVSLISRNNNWIYKEVALGTANHPHL

SEQ ID NO: 2415 - protein, 423 aa, Clostridium magnum
MRVYVINQRKEPLMPTSQRKARVLLKQGKAKIHSYNPFTIQLLSSTGETKQDITLGVDAGSKTIGISATTKKVELYSAELELRTDIVELLSTKKQYRRSRRNRKTRYRKSRFLNRVKSKNKGWLAPSIENKIQGHFRIIEKVNQLLPISETIVEVASFNIQKINNPTIQGKEYQQGNQLDFWNVREYVLFRDGHKCQGKKNCKGKILNVHHIESRKVGGNAPANLITLCEDCHNDYHSGKLNKTFKRGKSFKDSTFMGIMRWTFYNRLKEIYPNVKMTYGYITKTIRITNKLEKAHRIDARCISGNSLAKESDVWYHVKQVRKKKRSLHEAVARKGRKTPNRQSKRNSKNTKEIIYKEKKWCLYDKVKVNGGIGFISGFSGNMVYVQDIDGKYIQLSPKYKQISTDNIELINRNNNYICECIA

SEQ ID NO: 2416 - protein, 442 aa, Macromonas bipunctata
MAVLVLDRSGKPLMPCSEKRARLLLERGRARVHRVVPMVIRLVDRQVADCTLQPVRVKLDPGSKTTGLALVRDAERIDVTTGEIQREAAVLNLMELVHRGRQISEALSARSRMRRCRRGNLRYRAPRFLNRRKPQGWLPPSLRHRVDTTVAWVERLRRWTPVVAISSELVRFNMQALANSEIAGVEYQQGTLAGYEVREYLLEKWGRKCAYCCATEVPLQVEHIQPKARGGTNRISNLTLACRPCNERKAARPVQEFLAKEPQRLASVLAQAKRPLKDAAAVNTTRWALANALKDTGLPVELASGGQTKYNRVRLGLQKTHALDAVCVGVVGTTVTHSQQPTLTITCTGRGSYQRTRLDQYGFPRGYLMRTKRVKGFGTGDMVRAHVTSGKKVGNYVGRVAVRASGSFNIRTSGELVQGISHKYCHLVQRADGYGYFFNYRA

SEQ ID NO: 2417 - protein, 441 aa, Macromonas bipunctata
MSVFVLDRCGKPLMPCSEKRARLLLERGRARVHRVVPMVIRLVDRQVANCKLQPVRVKVDPGSKTTGLALVRDMESTDSVTGEIYRQVAVLNLMELVHRGRQISEALSARSSMRRRRRGNLRYRAPRFLNRSKPQGWLPPSLQHRVDTTMAWVKRLQCWAPVVAISSELVRFDTQALDNPEISGAEYQQGTLQGYEVREYLLEKWGRKCAYCDATEVPLQIEHIHPKARGGTNRVSNLTLACAPCNQRKAAQPLQNFLATEPQRLARITAQAQRPLKDAAAVNATRWALANALKCTGLPLELASGGQTKYNRVRLGLEKTHALDAVCVGHVDAATYGLQPTLAIKCTGRGSYQRTRLDKYGFPRGYLMRTKRVKGFGTGDMVKACVLTGKKVGTYTGRVAVRASGSFNIRTSTELVQGISYKHCQLVQRADGYGYFFHYRA

SEQ ID NO: 2418 - protein, 436 aa, Nonomuraea polychroma
MVFALASDGTPLDPCHPARARRLLKAGRAVVARHTPFAIRLKDRSAEQSEIQGVEVSLDPGSRHTGMSLFRAHDGTRYGLFGIRLDHRGGKIRDKLAARTAYRRRRRTANLRYRAPRFANRTRPDGWLPPSLRHRVDTVISWVQRLRRLAPIRALHVETVRFDTHALPAGRPLEGTGYQHGTLHGYETREYLLTKWGRACAYCGTTGTPLNIDHIQPRSRGGSDRISNLTVACMPCNQAKNNMPVTDFLAGRPAVLARILAQAKAPLRDAAAVNTTRWALYTALTATGLPVRCGSGGRTKWNRHRTGAPKSHTLDALHVADLDRVASWPGRVLVIAATGRGSYCRTATDRFGFPRLRLPRTKQIFGYQTGDLVRAIIRKGKHPGSHTGRVVIRTSGSHTVQTASGPIKTSHKHLRLLQRANGYAYTTKKEEHRCAS

SEQ ID NO: 2419 - protein, 446 aa, unidentified
MAVYVLDKQGRALMPCSEKRARLLLARGRARVHRLTPFVIRLVDRLRIDSDVQPLTLKLDPGSRFTGMALVRQQAQRLSVLSLFELLHRGAAISKALGQRAGFRRRRRSANLRHRAPRFDNRTKPSGWLPPSLRHRLDTTLGWVTRLRRWAPITDLAVERVKFDMQVMQNPEISGVEYQQGELAGYEVREYLLEKWGRCCAYCGTENTPLEIEHIIARGNGGSNRVSNLTLACRSCNQRKGSQPVERFLKNKPQVLARIKVRAKAPLRDAAAVNATRNALLGALLHTGLALATGTGAQTKYNRRRLGIPKAHTLDAVCVGDVQAVKGWQRPTLTIKATGRGDYQRTRLTASGFPRGYLTRQKQHFGFQTGDQVLANVPAGKKAGMHRGRVAVRKTGSFNIRTPDGVIQGISHRHCRIIQRADGYAYTQSRFDSAQLEQEAARTGAH

SEQ ID NO: 2420 - protein, 439 aa, unidentified
MVFVLDKHGMPLQPCHPARARYLLRRGRAVVHRHTPFVIRLKDREIAGSEVDGVEVGIDPGSKHTGVSVFTAQTGERRARFAVQLNHRGATIGKRMRQRAAYRRRRRSANLRYRKARFSNRTRPQGWLAPSLRHRADTTTSWVDRLTRWAPVQAVHVERASFDTHLLAAGKPLEGTEYQHGTLHGFEVREYLLTKWGRACAYCGATGTPLNIDHIRPSSRSGSDRVSNLTLACIPCNQVKSNRLVTEFLAGRPDVLAKVLAQATKPLADAAAVNSTRWALWRALDARLPTHTATGGRTKWNRTCNGLPKSHALDALAVGTLDSITETVRRVLVVGCAGRGAHQRTTPNQHGFPRLTRPRKKTFYTFATGDLVRAVVPTGKKAGTHTGRIAVRERGYFDIHTRHGRVAGIGHRHVRLLQRADGYAYTTQLEVTPEHHKDG

SEQ ID NO: 2421 - protein, 447 aa, unidentified
MVFVLDGQGVPLQPCHPARARRLLASGRAVVARHTPFVIRLKDRLAAESQVDGVQVGIDPGSRHTGISVFTSQEGERRGRYSIQLDHRGAQIHKRVGQRAAYRRRRRSAKLRYRAPRFLNRQRPDGWLAPSLGHRVDTTVSWADRLTRWAPVRVLHVERVAFDTHLLSAGRPLEGTEYQQGTLCGYQAREYLLEKWGRVCVYCGAVDVPLNVDHIHPRSEGGSDRISNLTLACVPCNRAKGDQPVQRFLARRPAVLARILAQAKTPLRDAAAINATRWRLWRALDSRFPGQVRIGSGARTKWNRTQSGLPKSHTFDALCVGGSDAVTVTAYPADVLVIACTGRGTHCRTSPDKYGFPRLRLPRSKNVHGFQTGDLVKAIVPAGKKAGSHLGRVAVRTTGWFDITGGRGTVQGISHRHVRLLQRGDGYGYTIRPENTVPMYGPKEGIR

SEQ ID NO: 2422 - protein, 459 aa, Branchiibius hedensis
MVFVLDRHKRPLMPTDCKRAKKLLARGRAVVHRKVPFTIRLKDRTVDQSMLEPLGLGIDPGSQHTGLSLDKTVEAVDESTGEVTTTRTGLWLGQLDHRGQHIHLRLVARAQRRRGRRGRNLRHRAARNRNRSVRVGWLPPSVQHRVDSTMTCVTRLQSLAPIASLRLERVSFDTHAMTAPGISGLEYQQGTLAGTEIREYLLAKFCHRCVYCDATGVGTGSVPLNIDHLLPRARGGTNRVSNLVLACVRCNQAKGARSVDAFVTDGVRRARIKAEAKTPLRDAAAMNACRNRLAAELDATGLPVEWASGGRTKWNRVRNGVPKDHSLDALCVGAVDVIVRWVPTVLHIQCVGRGRYQRVTTDRFGFPRSHRPRRKQHYGFITGDLVKAVIPTGPKAGVYRGRVIVRSTRTFRLVTPTHRYDGINCRYMTTMQRGDGYSYKARPSLQRRLAPHGDQTKAA

SEQ ID NO: 2423 - protein, 446 aa, Pseudomonas rhodesiae
MAVYVLDKTGTPLMPCSEKRARLLLERGRARIHRQVPFVIRLVDRRQADSALQSLTLKFDPGSKFTGIALVRQKGQRVSVLSLMELAHRGAAIRQAMQQRAAFRRRRRGQNLRHRAPRFDNRTRPEGWLPPSLRHRLDTTLGWVGRMRNWAPISDLAVERVKFDMQAIQNPEISGVQYQQGELAGYEVREYLLEKWGRCCAYCDAENTPLEIEHIVPRSAGGSDRVPNLTLACRPCNQRKGNQPVEVFLKARPELLARIKAKAKAPLRDAAAVNATRNALFRGLLDTGLSVTTGTGAQTKYNRRRLDLPKTHALDAACVGEIRAIEHWHRPTLAIKATGRGDYQRTRLTTHGFPRGYLTRQKRHFGFQTGDQVRAEVPTGKKAGTHLGRVAVRKTGSFNIQTSDGVVQGVHHRHFTLIQRADGYAYSHIQTDSPQSQKEAARAEVR

SEQ ID NO: 2424 - protein, 451 aa, Ruminococcus sp.
MSVAVISKTGERLMPTSEYRARKLLKSGKAVKHSYHPFTIQLTERKTGDVQPIELCMDTGYIHIGISVKSEKHEYLAEQIDTLTDERIRHDACRMYRRQRRGRKRYRKPRFNNRKRDKGWIAPSLKHKKDIHVQAISRINKVMPLTDITMEMGNFDTQVLKAKEEGKPLPQGACYQHGERYGTATLREAVFSRDGYKCQCCGRTIRDGAMLHVHHVKYRSQGGTNSMANLATVCDKCHTPKNHKPGGKLYNWKPKLPDFKGATFMTTIRWQLYNEVKSLFPDINVHITYGAATKEQRRELNIDKSHVNDAFAMGKFHPKHRANAVLYKKKRRNNRCLEKFYDAKYIDSRDGSKKTGQELFNGRINRNHKKDSENLHQYRLQKIKAGKRTIRKQHYSIQPHDIIMYKNRKRETSGCHCNGTRVVLLPDKKTAAIQKVKIYKYAGGYFKSAFN

SEQ ID NO: 2425 - protein, 418 aa, Bacteroides dorei
MVYVINKQGQALMPTERFGKVRRLLKNGLAHVVCRIPFTIQLDYDTTDYTQPISLGVDAGSKHIGISATTSEKELYAADVELRNDIVDKLSTRREQRRTRRSRLRYRKARFNNRISSKRKGWLAPSVENKIQTHLTVVEKIHKFLPITNIVVETASFDIQKIKNPSISNEEYQQGEQLDFFNVREYILFRDGHTCQHCKGKSKDKVLNVHHIESRKTGGDSPNNLITLCETCHKAYHRGEFELNVKRGKSFRDAAFMGIMRWNLYDRLKHIYPNVSMTFGYITKNTRITNNLPKEHYVDARCISGNPVAKPLGYYFYQKKVRCQNRQIHKVNFLKGGRKKLNQAPFLVKGFRLFDLVEYQKDLYYIFGRRDSGFFDIRKLDGTKVNKGSISCKHLRLIDKRKSILTERRNSGSIPPTN

SEQ ID NO: 2426 - protein, 431 aa, Eubacterium sp.
MVYVLDINGQPLMPTTRHGKVRRLLNGHLAKVVKRCPFTIQLLYQSTKETQSTSLGVDAGSKHIGLAATTEKKVVYQEEFTPRNDVVKLLSARRILPHSRRNRKTRYRKPRFNNRVHSKHKGWLAPSVEIKIQEHITAIKRICQILPISEIHVETAEFDLQRLKALEDGNPLPVGTDYQLGEQYDFYNTRQYVLHRDGYTCQCCGTHDNNVKLHVHHIESRQTGGNAPNNLITLCEHCHSALHEGKLKLPKGKKRGKSYRDTAFMGIMRKTLLERLRKEIDIPVTETYGYITKYWREKVGLEKGHINDAVCISKHPYAEPLDIYYLTKAVRHHNRQIHKTKFSKGGIRKRNQAPYLVKGFRLFDKVLYQNREYFIFGRRATGYFDIRTLDGTKVNKGSISYKKLRIQDTANAYLKEVKAIPHMNKFTCVLA

SEQ ID NO: 2427 - protein, 413 aa, unidentified
MVYVIDKQGNPLMPMERYGKVRRMLKSGRARVYSRTPFVIQLCYDIKEPKCQEVVLGVDAGHKELALSGCSSAQELYAAKVMLRTDVPKLMEAKKNFKRRRKINRRYRAKRSQNRKRNSEHGWAAPSVKVKVDEIIQAILRVKQILPVTEVRMEIAEFNYPQIRQYIYDGIAIPHELDLYDVRQYMLWNSYHTCESCKGREDTKKLIVVGQEAKDMVVLCANCYLRYEAGKKKLPKPKMRKSPADIPEFGMVRKYLRRRIYSAIDPSEIVEVYGYQTKIRREKFKLPYSKLNNAFAIAASTESQSSSDKVYCYKILRRHNRMLHNATVLKGGTRKLHQAPYIVKGFRLWDKVLFENQECFVAGRRKTGYFLLKDIKGNIVHTAASYKRIRLLEMSKGYIVAEYSRKESMFGAE

SEQ ID NO: 2428 - protein, 446 aa, Pseudomonas aeruginosa
MAVYVLDKTGTPLMPCSEKRARLLLERGRARIHRQVPFVIRLVDRRQADSALQSLTLKFDPGSKFTGIALVRQKGQRVSVLSLMELAHRGAAIRQAMQQRAAFRRRRRGQNLRHRTPRFDNRTRPEGWLPPSLRHRLDTTLGWVGRMRNWAPISDLAVERVKFDMQAIQNPEISGVKYQQGELAGYEVREYLLEKWGRCCAYCNAENTPLEIEHIVPRSAGGSDRVPNLTLACRPCNQRKGNQPVEVFLKARSELLARIKAKAKVPLRDAAAVNATRNALFRALLDTGLSVTTGTGAQTKFNRRCLGLPKTHALDAASVGEIRAIEHWQRPTLAIKATGRGEYQRTRLTAHGFPRGYLTRQKRHFGFQTGDQVRAEVPTGKKAGTHQGRVAVRKTGSFNIQTPDGVVQGIHHRHCTLIQRADGYAYSDTPTDSAQPQKEAARAGAR

SEQ ID NO: 2429 - protein, 425 aa, unidentified
MVYVLNKNGQSLMPTNRHGKVKHLLKDGKAKVVKRCPFTIKLTYETTNYTQDLTLGVDTGSGTIGTAVSKDSGDIIYMSEIVVRNDITNKMSQRAKYRRNRRNRKTRYRQARWLNRRNSIRKDRFSPTMQSKLHSHVKEIEYIKSILPITTMVFETGQFDMHLMKNPMLANPKVKHWGYQKGTNYGFENTKAMVLNRDNYTCQYCKGKHKDSKLEVHHIIFRSQGGSDEDSNLITLCHTCHKNLHDGKIAPNFKGKAKGTLKYATQMNSIRKQLFRLYPEVIETFGYVTKANRLAIGIEKEHYYDACTIATQGKPFIVKTNLYKKKCISDGDFQKTKGIRSEQPIVTDKIYGFRKFDKVKYFGKEYFIKGRMSTGYAILMDIEGNKADFSTMPKGFKTPKMINLKRLEARSSWMVTIVEVTPNIA

SEQ ID NO: 2430 - protein, 424 aa, Ruminococcus sp.
MVYVLSKDGKPLMPCSNVIARLLLKQGKAKVRKRQPFTVKLNYETTNYTQNLTLGVDTGSGTFGTAVTRDNGEIVYLSEVTVRNDITDKMTQRAMYRRNRRSRKTRYRKARFLNRRNSIREGRFSPTMQSKLHSHVKEIEWIRSILPVRTMVFEAGQFDTHLMKNPAFADPKTRLWGYQKGPNYGYANTKAMVLNRDGYTCQYCHGKRKNSRLEVHHIQYRHMGGSDDSDNLITLCRSCHKDVHDGKITLPNVGKKKGTLKYATQMNSIRKQLSLAYPEAAETYGYVTKENAQLLGIEKRHCLDACVIATQGQPFTVKSLLYRKKCIPKGDFQQTKGVRSEQPVATGKIGGFQKFDKVRYLGKEYFIKGRMSSGYAILMDFEGKKADFSHMPRGQKTPKLSRMQRLETRSSWMTTAEAGIQNTA

SEQ ID NO: 2431 - protein, 415 aa, Bacillus cereus
MRVFVKNLRGEPLMPCSNRKARLLLKQGKAKIIGYTPFTIQLQYATGETVQSVAIGVDSGSKYVGIAITTEDKVLAKGTIELRQDVKENLTLRATLRRSRRQRKTRYRKARFLNRKKREGWLPPSIQSRMHNQIHWIEIFRSLLPSPKVIVEVGKFDAQKLKNSDIQGKEYQQGDAFGFWNTRYYVFTRDHYTCQICKKKGGILHTHHIIERCSGGSDMADNLVTVHEECHQKFHQGTIKHIFKKPKQYKETAFMNILRLQIMNRLGCEITYGSYTTPKRKELRLSKTHYNDAIAITTPTKLQEYEQSGEFRIKQFRKKKRSLHESTARKGRKTKNTTAKRNNKNTPKVHGIYLGDKVKVFGQVGFVTGFTGKMMYVQDIDGHYLQNPSKSYKQVKISDIECIHHNNNWLFLQIS

SEQ ID NO: 2432 - protein, 434 aa, Escherichia coli
MAVFVLDHHKKPLMPCSEKRARLLLERGRARVHRRVPFVIRLVDRKQPDCALQPLRLKIDAGSKVTGMALVQDKENSTVSAINLFELAHRGHAIRDALTARRAMRRRRRGNLRYRSPRFLNRKKDNGWLAPSLRHRIDTTMSWVNRFRRWTPLAAISSELVRFDMQSMTDSDIQGAEYQQGTLFGYEVREYLLEKWQRKCAYCDAVNTPLNIDHMEPRSRGGSNRVSNLVLSCIPCNQNKGVQSVTEFVKDKARLTRILAQIKRPLQDAAAVNATRWALANALKATGLPVELASGAKTKYNRTRLGLPKTHALDASCVGQVGYITRWERPVLRIKCTGRGSYQRTRLDKFGFPRGYLLRQKQVNGFQTGDMVRATVPESSKKAGCYTRRVAVRASGSFNIQTGDSVIQGISHKYCQLLQRADGFGYQLTKIAIN

SEQ ID NO: 2433 - protein, 470 aa, Ruminococcus sp.
MSVFVVGLNGCRLMPVSERKARLLLKGGKASVYRKVPFTIKLNYKTGSTVQPGYLGIDTGSQHIGVSVVQKDGTILHKEEIRLRDSMSKRKLLESRASSRRGRRYRKTRYRHPKWKPKTKRIYNEKADRKGRHWKKQKNTFTSKRQAGWLPPSLQSKTDHHIQWIRKLLDLLPEGYRLSIELGRFDPARMRDPEIHGELYQKGPQYDYENVRAYVLARDGYTCRVCKKKGGKLHVHHILYRSRGASDNPKYMAAVCSKCHTTENHLPGGILYQWMQDQKKFTRGLRDATFMNILKKRLRKAFPDAVFTYGNITKADREKLELPKSHGNDATAIALVKTEVKSVKDEEPVIHIQQVRRKKRSLHEETPRKGRKEPNRTASRSDKNTKSVTVAKGSGEKKASMTACLFDRVELDGKKGWITGFTGTSCYVKDKEDNYICTSSKYKQVSISRLRILHHCGNWAIGAEKPLGKG

SEQ ID NO: 2434 - protein, 457 aa, Ralstonia pickettii
MAVFVLDRHSRPLMPCSEKRARLLLERRRARVHRLMPFTIRLTDRRLNDCELQPLRLKLDPGSKETGVAIVRETIHDTDGTRTAIVLSLAEIVHRGRQISEALTARRSMRRARRGRKTRYRAPRFDNRSKPKGWLAPSLRHRVDTTAAWVRRFIELAPITALSMELVRFDMQAVENPEISGVEYQQGTLLGYEVKEYLLEKFGRICAYCDAPDRPLETEHIVAKANGGSNRISNLTLACRPCNEKKGKLPLEIFLCKDPERAKRILARAKAPLRDAAAVNATRFALLDALNSCGLSVETGSGGQTKYNRRRLEIPKSHALDAACVGEVHAVLDWQRSVLRIKCTGRGSYQRTRLTAHGFPRGYLMRNKRAFGFQTGDMVKAIVPTGKKTGTYVGRVAIRATGSFNIQTAAGAVQGISHKHCKVIQRGDGYGYQFVAQTTKESEKGATPRVAHYPSPA

SEQ ID NO: 2435 - protein, 431 aa, Klebsiella pneumoniae
MNRVFVLSKTGKTLMPCHPARARQLLHDKKAVIKRLYPFTIQLTHRSEEYIQPVELKFDPGSKQTGIGIVLHGKNRLSAIYGAVLTHRGNEIKNNLDSRRMIRRSRRNRKTRYRQVRFLNRVRSKHKGWLAPSVQSRVDNIVEWSKRFIRYVTVGFITVESVKFDMQKMENADVDGIEYQRGTLFDYEVKEYLLEKYNYSCVYCGAKNVPFEKEHVIPRSRGGSNRISNLVLSCRSCNEKKDNLPIEEYLKDNPALLKKIKAQLKSSLKDAAAVNITRKQIVKELENLNVPVLTGTGAETKYNRVSQGYKKEHYIDALCAGTTGTKVYIPSTLKPLLIKKERRNNRQMCLVDKYGFPRGKAKGSKIVHGFKTGDIVKAVVLKGKKKGTYKGKVAVRSSGSFNIKVKQGVVEGIGWKNCVMLYRFDGYSYAY

SEQ ID NO: 2436 - protein, 451 aa, Ruminococcus sp.
MSVAVISKTGERLMPTSEYRTRKLLKSGKAIKYSYHPFTIQLTERKTGNIQPIELCMDTGYIHIGISVKSEKHEYLTEQIDTLTDERSRHNARRMYRSQRRNRKRYRQPRFNNRKKDKGWIAPSLEHKKNIHVQAISRINNVMPLTDITMEMGNFDTQVLKAKEEGRPLPQGVDYQHGERYSIATLREAVFARDGYKCQCCGRTIKDGAILHVHHIKYRSQGGTNSISNLATVCDKCHTPKNHKPGGKLYGWKPKLPSFKGATFMTTIRWQLYNEAKALFPDIDIHITYGAATKERRRELNIDKSHINDAFVMGQFHPRHRIKAVLYKKKRRNNRCLEKFYDAKYIDSRDGKKRSGQELFNGRINRNHKKDSENLHQYRLQKVTAGKRTVRKQHYSVQPHDIIIYESRKRETTGCHCNGARVMLLPDKKSVSIKKIKIYRYAGGYFKSTFN

SEQ ID NO: 2437 - protein, 450 aa, Clostridioides difficile
MVYVINFEGKPLMPTTNAKARKLLKQKKATVKRVNPFIIQLLYKTDTEYIQTITLGIDSGYLNIGFSAITDSKELIVGEVKLLQGMKDRLLEKSQYRRIRRQRLRYRKPRWNNRKIKQGWLAPSLQHKLNTHLKFIDYLNSILPIRNIVIEVANFDIQKIKNPDISGVEYQQGEQMSFWNVREYVLHRDGHKCQNPNCKNKSKEQILEIHHIKYKSEGGSDAPSNLITLCNKCHTSPNHKKGKFLYDWCENGKKVRGFRDATFMSMIRWYLLEQLKEKYTNIKATYGYLTKNHRIEHGIEKSHFNDAFAIAKGVNQVRNLEIFKVEQSRLNNRSLEKFYDAKYIDNRTGEKVSASELNCGRRTRNKNLNSENLRVFRGQKISKGQRRIRKQKSLYQPNDLIKYDRNVYTVKGSQNEGKYIALKEIKKVPNVKLIKPYIFKKGLNWSHGLY

SEQ ID NO: 2438 - protein, 415 aa, Ruminococcus sp.
MENRIEYCFVVDKNNRPLTPTKVNKGWYLVRKSRAKLKSKYPMVIQLEKEVKSDEDDESHIVCGIDDGSAHVGLAIVQKCPTKNKVVFKGTIEQRQDVKHLMDVRRGHRRYHRYHKRYRQARFNNRSSSKRTCRLAPSIKQKKDAILRVLYQLNKWVNIQEYHLEDVCIDIRALTDDYKPYRWQYQKSNRLDENLRKATILRDECRCQEFGKSNCVLEVHHIRARKYGGADTIGNLITLCSGCHQKTEGRERDFEDRYFNMIKSKPKRFDYAMHVMQGKTYLREKISELGSLHLTNGGETANKRIEWNMEKSHGNDAICVTDCIPDNCDVKEWIIKPMRRKSKAKTNNLLGIRHRDLVSYTYKNGETHTGYVTALYPEQLVLNFQSKTKHCKKVNARKCRLLWKFNKIYWLEQCV

SEQ ID NO: 2439 - protein, 439 aa, Arcobacter butzleri
MVFVIDKQKNQLLPTTNAKARILLNANKAVIHKIYPFVIRLKTSKTINANNKCAIKLDPGANTTGVAIVDKEKCLFLMEIIHRGKEIRKALFQRKVVRRNRRQRNTRYRQARFQNRIKRNGWLAPSVKSRADNIINIVNKLSKYIPLTNVAIENVSFNTTDMTEGIKLYGKEYQNGNLKDTKLRKFLMEKYNNRCNYCGSIEKLEVEHILSKSKGGTDSIKNLTLSCRKCNELKNNLSLKQFGKLINRDLSHLEPLQTPKSAAIIQSARNYTIAQLAKSFEIETGEGWETSFNRKEVNLPKEHYYDALCVGKDYDYRIVANTVLVIKARGRGSRQMCLMDKYGFPRTSPKSSKSVKGFQTGDIIKAKVPDGKKQGKYFGKVAVRTNGYFNITTDTQTIQGIGHKHCKVIQRGDGYAYFMKGASGFLSGLEDRVSTAILR

SEQ ID NO: 2440 - protein, 460 aa, unidentified
MNSPRIHRTFPSGRCSFSTSAASRSCLATPARARQLLGKGRARVHKLYPFTIRLTDRLAETSEIDGMAVKIDPGSKATGIAVTRTDENGDLHGLVAVEVRHRGGQISKKLTARGAYRRRRRSANLRYRAPRFNNRTKPKGWLAPSLQHRVDNVIAWVTRLRKLAPVTSIAMETVRFDTQLLQNPEVSGVEYQQGTLAEYELREYLLEKYHRACVYCDATGVPLNLDHLVPRAHGGSDRAANRVLACVACNQAKGASAVEQFVTDPNRLAKILADVKKPLRDAAGVNSTRNALLRGLEATGMPVEAGTGGRTKWNRHHFSVPKSHTLDGLCVGEVSGIAKVSRDVLIASSTGRGTYQRTLPDKFGFPRLHRSRIRQHHGFQTGDLVRATVPSGKKAGTHTGRVAVRATGSFNITTGEGTVQGVHHRHCRLLQRADGFSYQTGKETALLPALTDGVSAREER

SEQ ID NO: 2441 - protein, 594 aa, Ruminococcus sp.
MTNFKLRLYYKGNKNMNYMDFVLIVDKNNKPCIPIKNGKAGYLLREHKAEIINHEPLVIKRTDDYNSDLENRDIFELKVDSGYLNIGFSVSDNDHEYIAGQVKMLNGMSNRLLERKSMRSSRRNRLRYRKNKNIDYKTVHNPTYKNGNEDGWFAPSIVHKMETHIRIIEQLKQWVPIDKVIVEVANFDIAAMDAYLKDGTILNGKDYQNGEMKGYENVVSYVRARDNYSCYFCNKKKKKDGTLKEKPKRIEVHHKIPRSWGGTNNPGNLICVCQGCHQKIHSNNNNNKYFKELLEQALQENTFKDSTYMNIVRWELLNRLTEKYPELDIEAEYGYNTKLIEKKQVLRKFHYNDAVCVKEFKNTTLSKKVFIVEQKRCNDRKMENFADAKYIDSRDGKKKSGNDLKVIRHSTKSKRSTNKEHIDNERVFRKEKVSKGKIQFECHSYCVKPGDLIYIKEGKHKGKIAEVSTIQIVGGKIPNPIIDINEINNKKIDFNRELKKRKTISNMTDYQKSFAKYQIRFTYKESDADGPSITLTQKEYEKLKENKSDRVKIIRTRRGLVWREYDRLTYEAENMDQEEKKLEVKNKKQELKAA

SEQ ID NO: 2442 - protein, 555 aa, unidentified
  source 1..555: note = Lachnospiraceae sp.
MYVRVIAKDGTPLMPTKRCGKVRHLLETGNAVAIKTRPFTIRLKYETTKYVQDLYGGIDTGRENIGSAVSKENGENVYLADTRSNNGSIHSQMYDRAGFRRERRRHDRQNKQRKAKHDHTEMQNGDKDKVRTTHDCISRKVSYPGAEEPVTHKVIQGKEGKFNNRKRPEGWITPSARQLVQVTMNEVKFMCDTMPIKQLSVERVSFDFQKLANVHIRKWQYSKGPLYGYNSYKDYIYDEQKGKCPFCGEELVHYHHMKPRHKRGTDTVQNIIGVCESCHEMIHCGEITDDMLHEAKDSVVRSFEVSLLNSVMPALIDAMKQFCDQRGIHLVVTDGKTTSDARDKYHIQKDHSTDAYCISLTGCDIDPANAKLDDHIFRKRRFKKKSKNIISARNQRVYYDGKEPVAYNRHRAMDQKTDSLEQYIAKFRLAHTSAEADKHFRSLTVKPARRTYTFHKNGTPAVIHAGDVVRYVKYNKTYGNTKTETFVALSCDMSGEGRVKYGNGNKAKKLKFCRTIAPGALQCVGVERTDVYLRATALEETKRKTVRAGRKKIAG

SEQ ID NO: 2443 - protein, 518 aa, unidentified
  source 1..518: note = Human gut metagenome
MANLKLIDTLLEKTEYIYVLGADGKPQMPTNRKVRVRSLFKSGLAKIVDTVPFTIRLLYENNAVLQPITLAEDPGRTNIGVAVLTQFGDLVFSAVVETRNKYIKKLMSDRKAHRQASRRGERKARQRLAKKHGSMIKSGMIMRKLPRYAADKFVTCKFIKNTEARFCNRKRIPDWLTPTVNHLVETHINIIRKISKYIPVTDIAVEVNRFAFMQMENPETTGIDFQNGPLKGFNDVKAALRVQQHGKCLMCKNDISDFHHIVPRSQGGSDNIQNQVGLCPKCHKKAHTNENFKQKLADKKVGLLKKYGALSALNQAVPFICKSLLEIYGKDHVHFCTGKDTSLIRTGLGYEKTKDNQMHEVDAYCIGLAAVGADIVNLPKFENIYKIKQFRRQDRSIINYQRERTYYLDGKKIATNRKPRFEQKKDAFSDWYSKRVKSDGKEQADKLTGRVTVKKSIRGYNSKNRLMPGTIFYYNGKRLVLTGQLTGGKYYRAYGDSKTNYPAAKCQVYKQNEGLVFV

SEQ ID NO: 2444 - protein, 512 aa, unidentified
  source 1..512: note = Human gut metagenome
MSTIYVLNKDGKPLMPTTRGGHVRHLLKEQKARVVQSNPFTIQLLYETNDVVQPLYLGIDPGRTNIGFAVVKADGTAVFAAHLETRNKKIPKLMQDRKKARRARRTNGRRCRRQRRAKANGTISKKCVKQDTAQSKNPSKRAKEIGVIKRHLPGCKKDVLCVGIKNKEAKYTNRARLEGWLTPTANQLLQTHINLVKKIQKFLPISDVVLEVNKFAFMRLDNPNIQKWQYQRGPLYQKGSLENAVSEMQEHHCLFCEKPIEHYHHVVPKSENGSNTIANIVGLCAEHHNLVHKDVAWQEKLVEEKTGLNKKYGALSVLNQIIPALTKELSFLFPKHSFMTNGKSTHDYRAAHGISKDHWLDAYCIACSVLPIDVCDSTINNCVPYELKQFRRHDRRALNNENMNRVYTLNDKVVATNRHKATEQEAASLEEFRKEHPNDVCKLKVKEHHPTYRNMNRNYPGSVFLVGKQIHVMQGIASSKDGKATKYNDTRATTIAAGKCKFVAKNSGILFV

SEQ ID NO: 2445 - protein, 511 aa, unidentified; identical to SEQ ID NO: 2273
  source 1..511: note = Human gut metagenome

SEQ ID NO: 2446 - protein, 507 aa, unidentified
  source 1..507: note = Human gut metagenome
MPEYIYVVGIDGKPQMPTRRRRHVNKLLNTGKARIAEHVPFTIQLLYKNEPVLQQIIMAEDPGRTNIGAAVVGLKGQLYLPAVVETRNKEIRKLMDKRRACRRASRNGERKARQRRAKRFGTMLKAGMLMRKLPQYGEDGFITCHVIRNTEARFCNRKHPKDWVTPTVEHLIRTHINLVHKMQKFLPITDVAIEVNRFAFMLLDDPTVAGVDFQKGPLKGYSNVNDAVFDQQDGKCLLCGQPIEHYHHIIPKSKGGSNTLENIAGLCCNCHDTAHKNEDVQKALKDKKSGLMKKYAALSALNQAIPFIYKRLVEEFGKEHVFTCTGRETALVRKSLGYTKTKKNQLHEVDAYCIALLALGCTDAVLPTFEHVYQMKQFRRQNRANINNQRERSYYYEGRLVAKNRKDRIEQKDDSLETWYQKIVQQYGEKEAERRRSVLQVKKSTRHYNTPGRVAPGAVFYCNGERHVLNGQITNGQYFKAVGDAKTNYPAKKCRIVKQNEGLVFLG

SEQ ID NO: 2447 - protein, 507 aa, unidentified
  source 1..507: note = Human gut metagenome
MPEYIYVLGMDGKPQMPTTRRRHVQKLLDTGKARIAERVPFTIQLLYDNDPVLQPVTLAEDPGRTNIGLAVLDLKGELLLSAVVETRNKEIAKLMEKRRQCRRASRNGERKARQRLSKKYGTMIKAGMVMRKLPLYKADKFITCKFIRNTEARFCNRKRKDGWLTPSARHLVQTHINLIHKIRKYLPVTDIAFEVNRFAFMQLENPSVSGVDFQNGPLKGYDDRDAAVYDLQDGKCLMCRHGITQYHHIVPRSRNGSNTIGNIAGLCDTCHDKVHKDADFAKQLKDKKEGLDKKYGALSVLNQAIPFICQKLEAEFGKEHVHYCTGRETSLVRRSIGYHKTKKDQFHEVDAWCIGALALNWIPERAPDFTEVHLVRQFRRQDRSLIKAQTERVYKLDGKTVAKNRKKRTGQKTDSLEDWYNKQVESYGKPKADQLRSRLTVEKSQRRYNDPFRIRPGTVFLYKGKRYVLSGQLTGGRYFRAVGDMKTNYPAAKCRILKQNEGLVFIS

SEQ ID NO: 2448 - protein, 498 aa, unidentified
  source 1..498: note = Human gut metagenome
MAVVYVLSASGEPLMPTTRCGHVRMLLKEKKARVVERNPFTIQLAYETEGVTQPLYLGIDPGRTNIGAAVIREDGECMFTAQLTTRNKDIPKLMKARKQYRMAHRRLKRRCKRQRRAKAAGTISPQKEIQRLLPGCEEPIICKGIRNKEARFNNRKRPAGWLTPTANHLLQAHINLVKKLKKFLPITGVVLELNQFAFMAMENPRIQRWQYQRGPLFGKGSVEEAVYAAQDGHCLFCEKGIDHYHHVVPRRKNGSETLENRVGLCEEHHRLVHTEDAWTKKMAAMKAGMNKKYHALSVLNQIIPSLTERLAELFPQHAFVTTGQNTYHFRVDHDIPKDHYLDAYCIACSVLSNAQKVSPPKREPYDIRQFRRHDRQACHKANITRKYYDADGKLVAANRHKAMEQKSDSLVEYRENHSDVEVSQLRVKPHFPQYKEMSRPMPGSLLATNGGNIFTLMRSDGKHYGKADYFVDTQGIKHLAKRCILLQNNQGIIFAEIG

SEQ ID NO: 2449 - protein, 489 aa, unidentified
  source 1..489: note = Mouse gut metagenome
MPVYVISSTGKPLMPSRRFVHVRLLLKEGKAKVVKTKPFTIQLLYESTEYTQPLYGGTDPGRTNIGEAVLDQCGTVQYAAHVESRNKDIPKLMENRAAHRSASRRGERKRRQRRAVANGTITFPLQKQRILPGCQKPITNKFIINSEAKFLNRKRPANWLTPTTNQLVQTHLNMVKKICSILPVTDWTLEINKFAFMLMEDGTIRGVDFQNGRMKGYPDVEAYIYAIQDGKCPFCGKTIEHYHHIKPRSEGGSNRPENLVGLCSDCHARIHKGDTEMAGLIDKLGEQKKYAALSVLNQAIPYIYQGLVEIFGEEHTHICYGWQTKEMYTKLKIPKTHSNDAICIAALGSGVVPPIQMTNPYEVKQCRRHNRAIVKAQRERTYKLFGETVAKNRHPRFKQEGPSLEDFVESIPAAYRQQVISVLKVTPSKRYYNTMDRDLPGTVFYYQGHRYVKSGQSSGGKDLRAYGMGSKNFPSAKVSIVPSGGVVYL

SEQ ID NO: 2450 - protein, 494 aa, unidentified
  source 1..494: note = Human gut metagenome
MAMVYVQNKDGKPLMPTTRYCYVRLLLKENKARVVSTTPFTIQLNYDTPDITQDLILGIDPGRTNIGVAVVKEDGQCVFSAHLETRNKDVPLLMQKRAGFRKQHRTLDRRRKRQRRAKVAGTTVEGETIERLLPGYEKPVVCHYIRNKEARFNNRSRPAGWLTPTANHLLQTHINLIAKVAKFLPITKVVVELNRFAFMAMDNPNIRRWEYQQGPLYGLGSVEDAVYAQQDGRCLFCKKPIDHYHHVVPRHKGGSETLANRCGLCREHHALVHTDKVWADKLVTRKEGVNKKYHALSVLNQIIPHLMEYLGSETRYDVYATDGRSTKGFRVAKNVPKEHYTDAYCIACSILDTDIEVSTPVEPFELKQFRRHDRQSCHQQRVDRKYYLNGKQVATNRHKAIEQKSDSLQEFRESYGDTAVSQLAVKPHSPQYKDMTRIMQGAVMDFGGTVGVFQGSDGFHNGKPDYYKSAKGARVLTKRCVLLAQNTGIVFIPA

SEQ ID NO: 2451 - protein, 496 aa, unidentified; identical to SEQ ID NO: 2063
  source 1..496: note = Metagenome

SEQ ID NO: 2452 - protein, 568 aa, unidentified
  source 1..568: note = Erysipelotrichaceae bacterium SG0102
MSGKKNKSNHYIYVVDRHGNPVMPSRRPGRIRHLLKEGKAVPISTHPFVVKLKYDIPGRTQPIHLGIDTGRENIGVGASLENGENVFLSDVETKNKAVTKAMSDRRAYRMSRRRHRREKKQRHAHAKKSEMKNGRPAVKGERHTRKTVGRDIRYPGCKNPVTHKVIKGKEARIANRRRDEGWQTPSARQLIQTHMRIVRNVMKFLPVTHITIEMVSFDFQKLANVEIKNWEYSDGPLHGFKSPADYVWARQNGKCYFCDKKIAICHHAMHRAKGGSDRVGNLVGLCPECHQKLHSDRDMDKRLQEEFGTPKTCISVLNSAMPEIDRQMRALCDARGIVYDTCTGFDTYEARKRYGIPKDHCTDGYAISLYGRNANNVCLTDSVCMMRRFRKKSGSIIQKLNQRVYKLKGKVVAVNRHKRTDQKEPALDDYMSRYAQKHSEAECRRHFHELKIIPARRTYTYRKQKLVSPVHIGDTVRYEKRNKTSGITKKAVFVAEEIDMFNGKVKYGDQSGRYGKKSPLMKYCRPIKAGSLKFIRTIRLADCLSMARKEAEVRRKKQLKKPKNLVID

SEQ ID NO: 2453 - protein, 671 aa, unidentified
  source 1..671: note = human gut metagenome
MKPWITTRILQASVREDARKCRKETIMVAVLSNTDVALMPTSSCRARILLRSKRAEIVGYHPFTIRLLDRETGNTQPIEYKSDTGSVYVRVSICSEKHEYISEERILLDDEKKKHDNCRTLRRTRRNLLRYRKPRFDNREKAKGWIAPTLQNKLDRQLDIFHAYKKVMPITSATFEVGKFDIQLLAAMESGKPVPEGKDYQQGARYQQETLRQAVFFRDSFTCQVCQKGVKDGVILRMHHIGFRKNDHSDRMANLLTVCTTCHSSKNHNPGGELWDLKPEIKPLHDAAFMNTIRWKLIDTLKETHPDVELHFTYGARTKCTRRTMHIGKSHANDAYCIGEFHPKHRCDTVYYQKQRRNNRVLEKFYDAVYLDLRTGEDEKAAALGSGRTKRNTHLAYKDQRPYRGRKVSSGHRSITRKRSPYKKGDILRVQKEYTVKEPDQNGKLQKVIKVMDVTAKLASSHSKVDSKTLKAFRTGKIKKIPKSAVMMAYDFTEPLPNGRQSCDGKHVKAVKTTKIQAWKRISKPELKKRRLTPNDKEQTRRIPRTTYKGGGTLRHDNGKTVFRIPYIQIKNKGFKIASQISRSSVPDRPHPYRIFLPVAICKRRLYAWAARYAGTRFLKCHDRWLYAADVLICTFHQPIHYGIHYHAAYDRGISEYRGNAKGRKDRTGPF

SEQ ID NO: 2454 - protein, 537 aa, unidentified
  source 1..537: note = human gut metagenome
MQYVYVVDKHGKALMPTTRYRHVRKLLKSGKAVAICNKPFTIRLKYESSTYTQDLWEGIDTGRQNIGDAVSNEKGENVYLADVRTNNKSIKSNMQDRAGFRRERRRHDRQSKQRKAKHDGTEIQNGDDDTVRTKHSCKSIKISYPTADEPVIHKVIRGKEGKFANRKRPEGWITPSARQVIQITMNEIRQTARILPVNHINLERVSFDFQKLENQDIRRWEYGKGALYGYKTYKDYIWDEQHGKCACCGKPITQYHHIIHRAEGGIDSVKNIIGLCNGCHNKIHASKDAEDKLKELKEGVRQRYYVGLLNSVIPALIEEVSAYCDEHGIEFTVTDGKTTAETREKYGLSKDHCTDAYAISLADRDVKSVSVSDRIYEKRRFKKKSGNIIAKRNQRVYKFDGKIIAYNRHKATNQKDDSFEEYMTKYAETHTDKECRQHVAQIEIIPAKRTYTYHKQGLVAPCHAGDIVRYEKHNKIKGNTKKDTFVATSVEMNGEGHIKYGDACGSRKIKFCRPIDSGCLQAVHNYQADEYLRKIAE

SEQ ID NO: 2455 - protein, 536 aa, unidentified
  source 1..536: note = Human gut metagenome
MKYVYIIDKHGKPLMPTTRFGHIRKLMKSGKAVPISNNPFTIRLKYDTTSYTQDLWEGIDTGRQNIGDAVSDKDGKNVYLADVCTNNKSIKSNMQDRAGFRRERRRHDRQSKQRKAKHDGTEIKNGDDDTIRTKYFCKSVKISYPAADEAVTHKVIRGKEGKFANRKRPDGWMTPSAKQVIQITINEIKQTAKILPITHINLERVSFDFQKLENQDIRKWEYGKGILYGYKTYKDYIWDKQHGKCACCGQPITQYHHIIHRAEGGIDNVKNIIGLCDACHDEIHGSQDAEDKLKELKEGVRQRYYIGLLNSVIPALIEEISAYCKKNGIEFMVTDGKMTADTRKEHGLQKDHCTDAYAISLAGRNITTVSVSDTIYEKRRFKKKSCNIIAARNQRVYKFCGKIIAYNRHKATNQKTDSFEEYMAKYTKTHTEKECRQHVAKIEIIPAKRTYTYHKNGLIAPMHTGDIVRYEKHNKIKRNTKFETFVATSVKMSGEGHIKYGDKCNSKKIKFCRPIGSGCLQVIHALCTEEYLKSLA

SEQ ID NO: 2456 - protein, 515 aa, Ruminococcus sp.
  source 1..515: note = str. OM08-7
MTTLEERLSKTEYIYVLGFDGKPQMPTRRKRHVLKLLKTGRARIAEDIPFTIRLTYRNAPVLQPVTLAEDPGRTNIGAAVLSPLGDLLFAAVIETRNKEIKKLMADRKKSRQASRRGERKARQRLAKRYGSMLKSGMIMRKLPMYAADKFVACKFIRNTQARFCNRKRCTDWITPTVQHLVQTHLNIIRKISRYLPVTDIAIEVNRFAFMHMENPKAVGVDFQNGPLKGYDDVKEAIRTQQHGKCLMCKKPIAHFHHIVPRSRGGSDTIQNLAGLCTEFHTKVHTDTAFRKDFDEKKSGQLKKYGALSALNQAVPFICKKLLEEYGEEHVHFCRGLDTSLIRTALGFEKTKKNQMHEVNAYCIGLAALEVNEVAAPAFDHTFQIRQFRRQDRSIIHHQTGRSYYQGKEKVAQNRKPGFEQKTTALSQWYKEQVRIHGEKEAEKLRSQLRVEKSCRHYNDMDRFLPGAVFLYEGKRYVLSGRITNGKYLRACGQGMKNFPAAECTFIRHNAGLVFI

SEQ ID NO: 2457 - protein, 544 aa, Ruminococcus sp.
  source 1..544: note = str. AM36-17
MKQKKQKVIVYILNKKGKPLMPTTRCGHVRKLLDSKKAVVVNSNPFTIRLKYDTPNGVQDVFAGIDSGRENIGSGVSNEDGDCLYLGELRTSNKSIKMKMNERAGFRRERRKHDRQNKQRKARKDHTEIQNGKADICRATISCKSVQISYPTAEESVTHKIIRGKEGKFANRHRDGDWITPSARQLVQIHMNDLKSICKILPISHVTLERVAFDFQKLENENIKAWEYGKGKLYGYDSPEEYIHDVQDGKCLVCGKPHIDYLHHIIPRSKGGSDKVSNIAGLCYDCHYGPMGVHNCQDTQDRLPELKNEANKQYKVSLLNSVMPVLIEEIDKFCKANSIMFSICEGHDTAKVRDMYDLQKDHCLDGFAISLVGRNVKSVDVMPDRIHQKQRYKKKSKNIIQKRNCREYYDGKKLVAINRHKGTDQKADSLEEYMNTYAETHTADECKMHFESLTVKPARRIYTFHKEGRICPLHIGDKVRYEKKNKIKGNTKVDTFICEGIYFSKDENKAKVEHNKTKSKKMKFCRAIESGCIPYIDYIKFALI

SEQ ID NO: 2458 - protein, 457 aa, Lactobacillus salivarius
MSKSQIKKLIYVVDSNGKSLMPTTRNRKVRHWLATGQAHWFGNSRKTIQFTRPVNQHIQPVTVGVDLGRHTGISAVDQSNNREYYSAQVERPYVQEVKRNKQRKMYRTQKRHRLRHRQSRFDNRRKPNGWLAPTIQHQLDFIDYEIQRVSQFLPVDKIVLEDQPFDIRKLTNDNQRPADYTKGPQSGFASLKAYLYASQNGIDPIDGQHYLLSDMVVHHLLPRSQGGTNSPHNLVLISKEHHNNANHRNGVLKHLAQQLRDCLDTRGAYLMNILYNRLPEQLSNIAPVVFTAGYITAQNRKTYGINKSHINDALVIAGGNAQTIRLAPSIKRVKLRRNNRSLAKFYDAKYEDLRDGQIKSGQELSSGRTSRSREYHYDNQRIYRARKIKKGRTSIRKNHYQLRPHDLIKYQNHIYEVNGVHNNGHRVLLFINCKKKSVAISKVTCIKHVNGILETIL

SEQ ID NO: 2459 - protein, 466 aa, unidentified
  source 1..466: note = Human gut metagenome
MSTCACVLSKSGERLMPTIRLGKVRHLLKDGKAKIIKHHPFTIQLLYDSETNIQPIEICEDVGYNYIGISVKSESHEYVSVQYDTLQDEKDCHDSCRKMRRIRRNRLRYRKPRFDNRKRNKDWLAPSLEHKKELNVNVIKMYCEVVPITHVTVEVGSFDTMLVKAIQEGKAIPEGADYQKGPRYNLATLREAVFYRDNYTCKVCGRKAKNDSAILHVHHMFYWKGRHGNSLNELLTVCEKCHTPANHQKGSKLYGFGENIKFANLSGAAFMNTVRWQIVNELYATFGKLFVTFTYGAMTKEKRIALHLEKCHNNDAYAMGNFHPVDRCAFEHYKKVKRNNRILEKFHDSQYIDIRTGKVANGRSLFNGRINRSHKKDSENLHKYRGKRTRKGYRALRRKKVALNPGDLVSLNGEILVVHSTHAGKNGYVGVEFKTPSKSGKKSASLKKLKIVKTSNSMHSAWTKVS

SEQ ID NO: 2460 - protein, 437 aa, unidentified
MNTILVLSSIKIPLMPSHPARARQLIQSGKAKVYRHNPFTIILTERNQGNIQPIECKIDPGSQTTGMALVVQGKKQTKALLGIHLKHRGKHITQALKKRSVSRKFRRSRKTRYRPPRFLNRTRPIGWLPPSINSRLNNITNWVRKLKVWAPLSSIEVENVKFDIQKLQNPEIQGIEYQQGTLMGYEVREYILEKFHKTCAYCGQTKGRLEIDHIIPKSKGGSNRMSNLTLACQRCNQKKGNQSLTEFVKNKQKLEKIKAQCRTSFKDAAIVNSMRKALVSTLKKFHLPVYCWSSGLTKYNRVRQNYEKHHWIDAACVGNSGSNVCLPRNSSVLTITAMGRGNRKKCQMNKYGFPKSKPKQAKRVHGLDTGDWVKIRALSPEQNANRNEKNQITRPVYGRVTVRATGNFAVTPKNGKQVSIMYKYCFLLQKNDGYNYT

SEQ ID NO: 2461 - protein, 457 aa, unidentified; identical to SEQ ID NO: 2055
  REGION 1..457: note = Delaware Bay aquatic sample metagenome

SEQ ID NO: 2462 - DNA, 322 bp, Ktedonobacter racemifer; identical to SEQ ID NO: 2060
  source 1..322: mol_type = other DNA

SEQ ID NO: 2463 - DNA, 249 bp, Ktedonobacter racemifer
  source 1..249: mol_type = genomic DNA
gtcaggaaccccatgcctaaaggcaggggcttgcgtaagtaagcctggacctgaccagtctcagccagagcagacttgatggatagaatcatcaaggctatcgggctacgttaggaacgaaataggtacgttggggtgctttgccgctacggtacagcattaaacatccctagagggttaaggacgtgtgttgtacgtaaaaccgtttgctaacattgacgaggcacacattaccctggaagacaggag

SEQ ID NO: 2464 - DNA, 289 bp, Ktedonobacter racemifer
  source 1..289: mol_type = other DNA
gtcaatgaccgccggtcggagaccggaggcttgggagagcctggctcttgcaagccgattgaccagaccaggttcttgagagagcgttgccgagcttctctgcgtcaccgctcccgctgagagaacgtcgatgcttccaagtgttcaagatcgtactggcgggtgctgccccagcctgccaccctacaacggcttctttaaaacaggtgatgaggtcagtcccagtgagaagccgaaagtaccgagaggcatcatggtcgaggggaagagaatactccgaaaggaagtt

SEQ ID NO: 2465 - DNA, 345 bp, Ktedonobacter racemifer
  source 1..345: mol_type = other DNA
gtgaactaccacagaaccacgtcttcagtgacttccgaagaagccactgaagacgtggttctgtagcttcttcgggagcctgagttcaccagactcgtttccagaaatgggaacggcgttcgattggtcatgacacctgcggttgacgcatcagaccgctgctctgtcgctgagagttaagtaggcttgaggtaagggctggtgctctcggcgtaaaaagcctcttgaacattgtcgagatgaagccggattctcctggtggtcactacctgaaggtggcacggcagccaggagatacgcaccacctgctggcaacagcagagcatttttccgaaaggaacattg

SEQ ID NO: 2466 - DNA, 332 bp, Ktedonobacter racemifer
  source 1..332: mol_type = other DNA
gtcagcgaccccaccggtaaaccggggggcttgtgggagactaccctgagtggtcttggctgcgagccccgatgctgaccagcccccggtgtgctcgcacaccggagccgttcagaaggagcgcgaaaaagcagaccctggagtggcttttccagctcccggctctttaattgctcagttaaacaggttgatggggtgtccaaagccagtgctgagcaaagatcgccgcttctgacacccgggcgaggaaaacattaccgttcgtgtgtgctggacaggaaggcgcacaccaacgcgatgcctcattacgaggcccccgcaaggggagaaca

SEQ ID NO: 2467 - DNA, 323 bp, Ktedonobacter racemifer
  source 1..323: mol_type = other DNA
gtgaactaccactgagctgaagacgcagcggcttcttcggaaatcgtcgggtctgcggtttgggagctttttaggaagctcaagttcaccagactcctcatcagaaatgatgagaccgtttgaaaggtcatgacacctgcggttgacgcatcagaccgctgctctgtcgcctgggtttaagtagggctgaggaaaggcccggtgatccaggtgcaaaaagccttttgaacactgtcgagatgaggtcggattccctgcatggtcacagtgcagggatacgcatcacccggcgcttgccggagtatttttccgaaaggaatcgt

SEQ ID NO: 2468 - DNA, 273 bp, Lactobacillus equi
  source 1..273: mol_type = other DNA
gtcaacagacccgttattaaaataacgggcttgcaatgtaaattgtaagcatggttgattagcctcagtattaagttactacgttaccactgaaattaggtactccgggatgccaccctagtctcggactctacgcttgcttattaaacagggctgaggtcaggcccagtgtaagtgagatttaaaaccagtggctaacattggcgaagggtacacacgcattgctcttcggggataatgcgacttataacccattaaagaaaggggtgggcc

SEQ ID NO: 2469 - DNA, 291 bp, Petrotoga olearia
  source 1..291: mol_type = other DNA
gtcaactacccccatctaaagatggtggcttgtaaaagtcatagttgattagcctcagccagggttgtaagaccatccggctacgttatatcggaatgggttatccttaagaggcgaaagcccgtttaacctaaataggcactctagggatgctccacaagttccagactctgcggtcagtgattaaacatctctgaggggtaggagaagtgttgctgacaacaaacccgatataacattggcgatgtggacttaccgctgtgaagcggatttatttccgaaaggagattt

SEQ ID NO: 2470 - DNA, 285 bp, Petrotoga olearia
  source 1..285: mol_type = other DNA
gtcaactaccctcgtctaaagacggagacaaaaagtctcggagttgaccagcctaagttccaagacagcctcacggcggataagagagacagccttacggcaaagttggagaactacgttattctggtcatgacaccttggaatgcccgagccagttccaagctctgtcgttcaacattaaacaggcatacggggttgaagtcagtgtgttgaatgtaaaaaagccagaataacattggcgaggctcacattaccctgatagggagaaaggaaggtaacttccgt

SEQ ID NO: 2471 - DNA, 262 bp, Petrotoga miotherma
  source 1..262: mol_type = other DNA
gtcaactaccccggtctaaagacgatggcttgtaaaagccaaggttgactagcatgagtctgaaaacagccttacggcaaagttgaaagactacgttattttagttatcacaccctcggatgatgccctagtccgttgctctgtgtaggctccgtaaacagtcctgtgaggtagggacagtcgacctaaggaagtcctggcattccaggcaagctaaaataacatttgcgaagggcaactactccgataaggaggaatactt

SEQ ID NO: 2472 - DNA, 294 bp, Agrilactobacillus composti
  source 1..294: mol_type = other DNA
gtcaaccgtgacccctcactaaagtaaggggcttgaagtgcctacttcaagtctggttgtctagacttagcgtcttttggacactacgttatcttggtgatcacacttggaaatgataccctagttcccagctctgtgcgggcgctgtaaacagtcctaaggtcaatgggaccgtcaacccgtgagaaagctgctgctcgtcagcagctaagccttgataacattgtcgaagggtaacctcacgaactcaagtctgatgaacttgacgccgtggtcaggtcattttacctgacg

SEQ ID NO: 2473 - DNA, 308 bp, Lactobacillus equicursoris
  source 1..308: mol_type = other DNA
gtcaatggtaaccccttactgaagtaaggggcttgaagcgcaagcttcaggcctcttatctttagcagggaagctggagaaattcggctttcattgtctagactaagctatccagtcggcttcggctgactgaatagagaaactacgttatccatgtcatcacacccaaggatgatgcccaagtccttggctctgtggcagctctgtaaacagtcatgaggttaacgtgacagtcaactgcgcccacaagcatggataacattgtcgatgggcaacaacgcaaatccaaattgggtctcctggtttgg

SEQ ID NO: 2474 - DNA, 300 bp, Caldicellulosiruptor bescii
  source 1..300: mol_type = other DNA
gtcaactacccccgcctgtagaggcggagacttgaagggcctcgtggttgaccagcctgagggactgacccgaaggacaagggaatgaagtccctacgttatccctgcctagggcactctggagtgcgtcccaagctccagaccctgccgtgcagacttaaacagtcctgtcggggtagggacagtggtctgcacacagcaaagtagggataacattggcgatggaagatgcaggtgtagtccaacctgcacgtcacccagcagaatcaaatcctgctggagaagggaggagaactccaa

SEQ ID NO: 2475 - DNA, 260 bp, Caldicellulosiruptor bescii
  source 1..260: mol_type = other DNA
gtcaactaccacccccctgaagaggcggtggcttgctggcaagggtggactgccggtgagtctgcctgctggcaggtagttgaacgtgggtgatgctgtagcagaacctgacgttccgggacgacactcccagttccgggagacagcggtgcaatcccgcagccttacacagggtgctacagcacgcctcagggagacctaccaccttccttttggaaggtgcccagatcatagggctcctgaacaaggagggaaagaat

SEQ ID NO: 2476 - DNA, 344 bp, Streptosporangium roseum
  source 1..344: mol_type = other DNA
gtcaacgaccacctcttgaaggagagggcttgaggtgccgcaccgcgcgctgacggccccgcgttgaccagcccaagtcgatcatcttgaaggaggtgcattcgattgactacgtttcacgtaggtcagcagacccaccagtccgtgcttcctcagcgggctgctctggaattcgcgtcagcagacacgcccgagggtgggcacgaaacgggacgcggacaccgcctcagcacggtaaccggtgtggaacatgggcgaggggagatcgcaccggatggcacccgtctgctgcgacgtcaccccgaagacacttcggtgtccgagggagcggaccgtgaggttca

SEQ ID NO: 2477 - DNA, 287 bp, Allochromatium vinosum
  source 1..287: mol_type = other DNA
gtcaactacccccgcctgaaggcgggggcttgtgaggcgactcacgagccgggttgaccagggacagcggtgaacatccgctgcgtttgcaacaggtcgttgagacccactccgggatgcttcctcagtcccggaccctggaaggtcggagtcatgcaggcgaaaggcaaagcgccgaaggttccgatcgccgccgcgaggcgggagccggttgcagacattcccgaggggagcgagccgcaaggctccgtcaccaggcccgtaagggcagacgtttggaacagacc

SEQ ID NO: 2478 - DNA, 246 bp, Anoxybacillus amylolyticus
  source 1..246: mol_type = other DNA
gtcaactacccaccacttaaagccttgggcttttgaagtgggggcttgtaaaaagccctagttgactatcccaagtctttcgaggactacgttggttgggtcatgacacctacgaatgctcctctagttcgtagccactgtcgttgatggttaaaagtcctgatgggtagggacggtgctgtcaacatcacaagcccttccaacatgggggaagaggaagaacactccgagaaaggaggtacacgc

SEQ ID NO: 2479 - DNA, 291 bp, Paraburkholderia hospita
  source 1..291: mol_type = other DNA
ggcaaccaccccgccctaaaaaagggcggagcttgaagcggtgaatcaagctcgggttgaccagaccgagcgccgcgaggcgctacgttgcgcagaagatagcagacccaccctgacgtgcttcctcagcgtcaggctctggaaggggcggttgcagacaagcgaccgggtaagcacgaaacggatcgtccccgtcagttctatcactgacacctgctgcgcaacatggtcgaggggagacttcccgcaaggggagcgtcaccaggcccgtaagggcaacgttttttaagg

SEQ ID NO: 2480 - DNA, 321 bp, Paraburkholderia hospita
  source 1..321: mol_type = other DNA
gtcaatcaccccggcctgataggccgaggcttgcggggaagcatcctgcaagtctgggattgaccagacccagcgctggacggcgctacgttgtgcagaagacagcagacccaccgccagatgcttcactcagtctggcgctctggaagtcgcagcagcagacaagccccgggtaggtacgaaacgggctgcgaccggtgaactcaccctcaccctctgctgcacaacatggtcgaggggagcggcgccgcaaggcgcccgtcaccaggcccgtaagggcaacgcgccggacgttttccggcggcataacaaggagcttgg

SEQ ID NO: 2481 - DNA, 261 bp, Methanobrevibacter millerae
  source 1..261: mol_type = other DNA
ttaaactaccacggcttatagaagccgtagatttctagaattttctgggaatctacaagtttaatagactcagaccattaaatcgtggtctacgttacccaagaatatcataggtaccgtggaatgtttaatcccagttccacgctctacggtaagtgattaaacaagttctgtgatggtaggaacagtgttgcttacaatctaaaaccttgggataactttgtcgagggataaaataactcaggaataggaggtaaacat

SEQ ID NO: 2482 - DNA, 257 bp, Eubacterium oxidoreducens
  source 1..257: mol_type = other DNA
gtcaactaccacgcacctaaaggtacgtggcttgtaaaagccacaagttgactagcctaagttctttgagaactacgttacccacaaatatatagttaccttggaatgtttagcctagttccaagctctaaggtatgtgattaaacaatcctgtgtggtagggatagtgttgcatacataaaactgtgggataacattggcgaaggctttctaaccactcttcggagtgggtaattaaattattgaaaggagcatag

SEQ ID NO: 2483 - DNA, 223 bp, Fervidobacterium changbaicum
  source 1..223: mol_type = other DNA
gtcaaccacccaccactgaagtggcgggcttggaaaaagccctggttgactaccctcagcctttcggctacgttaggctggtcacggcaccatggaatgctgctcaagttccatgccctgccgtctgccactaaacagtcctaatgggtagggacagtgtggcagacacgacaagccagcctaactttggggatgagcacctaactccgataggaggcttacc

SEQ ID NO: 2484 - DNA, 292 bp, Fervidobacterium changbaicum
  source 1..292: mol_type = other DNA
gtcaactacctccgactgaagtcgagggctagtaaaagccttagttgaccagcctgagcactggacccgaaggacaaggggacgaaggtgctacgttggtagtaggctcaagacccactccgggatgcttctccagtcccggaccctggaagtgctggttgcagacaacctttggggtgtgggcgaaacggaccagcacacgtgccggctaccaacattggcgaggagagtgctaaagtgagtccgctttagcacgtcacaaggcccgtaagggcattttcatggagtgaga

SEQ ID NO: 2485 - DNA, 292 bp, Allochromatium warmingii
  source 1..292: mol_type = other DNA
gtcaacgaacccccgccttatggcaggggcttgtgaggtgactcgcaagccacgttgaccagggaaagcggtaaccaacccgctccgtttacaataggtcgtcaagactcaccggcggatgcttcctcagtccgccgctctgaaaggtcaggattaggctggcgcaaggtaaaacgccgaaggttctgatcgccgctgcgaagcgggagccggttgtagacagtcccgaggggagcgaagcctttgggcttccgttactaggcccgtaagggcagatgtttgagtgtgaata

SEQ ID NO: 2486 - DNA, 241 bp, Caldicoprobacter faecalis
  source 1..241: mol_type = other DNA
gtcaactacccaccacttaaagaagcgggggcttgtaaagagccctggttgactagcctcagccaccagcaaaaagttgacggggctacgttagacaggtcatgacaccccggggtgctgctcaagctccgggctctgtcgtacaggtctaaacagtcctgaggggtagggacagtgacctgtgcatgacaagcctgtctaacattggcgatgagcacctaactccgcaaggaggcttacc

SEQ ID NO: 2487 - DNA, 240 bp, Halolactibacillus miurensis
  source 1..240: mol_type = other DNA
gtcaattacccaccacttaaacgctaacgcgttttgaagtggggcttgcaaaagctctaattgtctagcctaagtctttcgaggactacgttagaaaagtgaatacggctttgtatgattccctagtacattttgtcgttcaggcgctgtaacaactctgagaggtaggagtggtcaacctgttgcacgaagcttttctaacattggcgaagggaaactaaccctaaaaggagggcgaat

SEQ ID NO: 2488 - DNA, 263 bp, Alicyclobacillus macrosporangiidus
  source 1..263: mol_type = other DNA
gtcaaccaccccacggctaaagccggggacttacgatgagtaagcccggggttgaccagcccgcacgaaggcgacggccttcgcgcagccgttatcccggtcatggcaccctggggtgcgaggccagctccaggccctgccgtccggcattaaacaggcatacggggttgaagccagtgtgccggacatcacaagccgaggtaaccgggcgaggccaacgttacccccaatcggggagaagggcaggtaactgccatgaaaca

SEQ ID NO: 2489 - DNA, 344 bp, Desulfotomaculum thermosubterraneum
  source 1..344: mol_type = other DNA
gtcatagaccccacgcctaaaggcgggggcttggccggaggcaactcccgtcaggtctccactttgggtggaaagctgctctctggagcagcgctatgacccgcctcagtgtgggagcctgcggaccaggcggttgaaccacgctacgttaagggggccaacacaccctgggatgcttctccagtcccatgccctgtggtgcggcattaaacagcgagcgggggtgtcagcgagcagtgtgccgcacgcaaaaaacctccttaacattggccaggagagacgcccgggctggtccggcccgggcgcgtcacgagccccgtaaggggtctccgaaaggggaaggt

SEQ ID NO: 2490 - DNA, 233 bp, Fervidobacterium gondwanense
  source 1..233: mol_type = other DNA
gtcaacgccccaccactgaagtggcgggcttgaagccctcgttgactagcctcagccaaagccaataggcttcttggctacgttagatgggtcatgacaccatggaatgctgctcaagttccatgctctgtcgtctgtcattaaacagtcctgaggggtagggacagtgtggcagacatgacaagcccatctaacattggcgatgagctcctaactccgcaaggaggcttaca

SEQ ID NO: 2491 - DNA, 286 bp, Desulfobacterium vacuolatum
  source 1..286: mol_type = other DNA
gtcaacaacccctgagctaaagactcaggggcttgcaaggcaacttgtaagcccggttgattagcctaagccccagaaaacttggtggctacgttacattggaatatatagtcatcccaaggcactccacacgccgaaggctctgagatcagtgtttaaacatctctgagggtaggagaagtgatgctgatattgtaaacccgttgtaacattggcgaagtggatcactcacgtatgtgagggcaggacttgagagtctctgccaaattctaacacaaggatttaa

SEQ ID NO: 2492 - DNA, 258 bp, Desulfobacter hydrogenophilus
  source 1..258: mol_type = other DNA
gtcaactacccctcctgaatcagagattcagaaggggcttgtaaaagcccgagttgactagcctaagtcctcgttattggggactacgttcggcaggatgtagatacctttggatatattcgccagtccaaagcactatcgtggctctgtaaaagccctgtgaggtaggggcggtcaaccacattgcgaagcctgctgaacattggcgaggcgaatcttacccctcttcggagggtgtcgataaccgaaaggtttttt

SEQ ID NO: 2493 - DNA, 297 bp, Paraburkholderia nodosa
  source 1..297: mol_type = other DNA
gtcaactaccccaccctgaaaggtggagcttgaggcggtatatatcaagctcgggttgaccagaccgagcgccgcaaggcgctacgttgcgcagaagacagcagacccaccgccggatgcttcacccagtccggcgcactggaaggggcggttgcagacaagcgaccgggtaagcgcgaaacggatcgtccccgtcagctttttcgctggcacctgctgcgcaacatcgtcgaggggagacttcccgcaagggatgcgtcacaaggcccgtaagggcaacagttttacaggagcagc

SEQ ID NO: 2494 - DNA, 314 bp, unidentified
  source 1..314: mol_type = other DNA
gtcaaacaccccggcctgagggccggagcttgcgggatcactcgcgggctcgagtttgaccagaccaagcggtagccagtccgctacgttgtgcagaagtacaagacccaccgctggatgcttcctcagtccggcgctctggaagtcgcagcagcagacacgccccgggtaggcacgaaacgggctgcgacgaggcgtcaagccgaagctgctgcacaacatggtcgaggggagcggagccgcaaggttcccgtcacaaggcccgtaagggcaaccgcaccggacggattccgggagagtttcagaggggccgc

SEQ ID NO: 2495 - DNA, 223 bp, Exiguobacterium antarcticum
  source 1..223: mol_type = other DNA
gtcaattacctatcactaaagtgacgggcttatacagcttgaaattgactagtctaggttctcacgaactacgttggttgggtcatgacacctctcggtgcccgttctagccgtttgccctgtcgtctgtgattaaaagtcctgttaggtcggggcggtgttgcagatggaaaaagcctttccaacattgacgaagaacatctgactcttaaggaggaaaacg

SEQ ID NO: 2496 - DNA, 291 bp, Acidihalobacter prosperus
  source 1..291: mol_type = other DNA
gtcaaccacccctccctgaagggaggggcttgtagggagacctataagcccggggttgaccagggaaagcggtaatcagcccgctacgttggcgacaggtcagaagacccactccgagatgcttcctgagtctcggaccctggaaggaaccgttgcagacaaggcacgggtagccacgaaacggacggttcccgccggtcgatccggcaagccggttgccgacattcccgaagggagacgccccgaaaggggcgcgttacaaggcccgtaagggcgttttttggagaaaaa

SEQ ID NO: 2497 - DNA, 300 bp, Caldanaerobius polysaccharolyticus
  source 1..300: mol_type = other DNA
gtcatagaccccatggctaaagccaggggcttgtgagacaagcccctgcagctcagccagacctatgaccagcctgagtgctggagttcagccggaacgatgaaggcactacgttggaagggcgcacaccttaagatgcattcccagtcttctgccctgtggcacagcgttaaaagcgagcaggggtgcagcgagcggtgcgctgtgagctaaaccccttccaacattggcgagggaagactgcagatcggcaatctgcggcgtcaccagccccgtaaggggctccgaaaggagaggagg

SEQ ID NO: 2498 - DNA, 299 bp, Azohydromonas australica
  source 1..299: mol_type = other DNA
gtcaaccaccccgccatgaagggcgaggcttgaaagagcctggttgaccagaccgagaaaggagcttcacagcaccaatctacgttgcgcacaggacagcaaggccgacgttgaagtgcttctccagcttcaacctctcgaagccgcagcagcagacaaccccggggtagggacgaaacgggctgcggcgggtgccccgtacggggtgccacccggtgcgcaacacggtcgaggagagcgtggccgaaaaggccaccgtcactggagcccgtaagggcagtatttcaaggagccgccgc

SEQ ID NO: 2499 - DNA, 301 bp, Enterococcus cecorum
  source 1..301: mol_type = other DNA
gtaaactaccacatacccaaggatatgtggcttccattaaatagtttaccagactcagtatatagaaatatatactacgatagttaagtcatgacacctttggttgacgcaacagaccaatgctctgtcatatacgtttaagttaggttggagtaagcaaagccttgtgacgtatatctaaaaagcttaattatcattgtcgagttgaagacggaaaaaatcatatggtaatagtatgatttaagtacgcattacctgcttttaagcagcgtttttaaatatttttattttaaaggagtga

SEQ ID NO: 2500 - DNA, 321 bp, Bacillus humi
  source 1..321: mol_type = other DNA
gtgaactaccacgagcctaaaggcatcgtggcttctgaaaaagaagctacatggttttagcttcgtccctccaagggtgggttcaccagacttaggtaggagaaatcctagctacgatagattggtcatgacaccttcggttgacgcaccagaccgttgccctgtcgcttgcatttaagtagagatgaggaaagtctcggtgatgcaagtgcaaaaagcctgtttatctttgtcgaggtgaggacggattccttgtatggtaacagtacagggatacgcatgacctactttcgagtagagattttatctgaaaggatgtaa

SEQ ID NO: 2501 - DNA, 305 bp, Micromonospora viridifaciens
  source 1..305: mol_type = other DNA
gtcaacttctcggccctgacggatcgagcttgctcggctcgtcagggtggttgaccagcccgaggaacctctgaaagggaggtgactacgttgtacacaggtgtgaagacccactccggggtgcttcctcagccccggaccctggaatccgcgtcagcagacacggccccgagatgccacgaaacgggacacggacgccgcaaggcagccggtgtgcgacatgggcgaggggagaccggcgtgagccggcgtcacccggaacccgcttcggcgggaaccggagcgggccgtgaggcccacaccca

SEQ ID NO: 2502 - DNA, 301 bp, Micromonospora siamensis
  source 1..301: mol_type = other DNA
gtcagcttctcggacctgagggacgtgaacgttcggccctgagggtggttgaccagcccgagaacctctgaagggagggatctacgttgtacacaggtcagacgacccactccggggtgcttcctcagccccggaccctggaatccgcgtcagtagacacggcaccgagaagccacgaaacgggacgcggacgccacccggcagccggtgtacgacatgggcgaggggagaccggcggacgccggcgtcacccagaacctgcacccgcaggaactggagcgggccgtgaggcccacaccca

SEQ ID NO: 2503 - DNA, 240 bp, Clostridium magnum
  source 1..240: mol_type = other DNA
gtcaactaacccccacttgaagaagtggtagcttggagaagaaattctttgaagccctagttgactagcctaagtagcgaaaaaaatactacgttggattgcatgtagaaacccaagaatgatgctctagtttttggctctttcgtggctctgtaaaagttctgagggtaaggaacggtcaaccacattgcgaaggctttccaacattggcgaagggcaaataaatccgaaaggaggacg

SEQ ID NO: 2504 - DNA, 232 bp, Clostridium magnum
  source 1..232: mol_type = other DNA
gtcaactacccccctcttatagaagaggaggcttgtaggaataatcctacgaagtcttagttgtctagcctaagtgttcactcactacgttggattgcatgtagaaacccaaaaatgatacccaagtttttggctctttcgtggctctgtaaaagttctaagggcaaggaacagtcaaccacattgtgaaggctttccaacattggcgaagggtaaataactctgaaaggag

SEQ ID NO: 2505 - DNA, 324 bp, Macromonas bipunctata
  source 1..324: mol_type = other DNA
gtcaatcaccccgtcctaaaggacgaggcttgggcattaattgcttgaagcctgagattgatcagaccgagtagtcgaaaagctactacgttgccagtaagtacaagactcacctcggagtgcttcctcagctctgagctctgaaagtcgcagcagcagacaagcgtcgggtacgtacgaaccgggctgcgataggcactcaggtgccaagctggctgacaacatggtcgaggggagcgatgccgcaaggtatctgtcacaaggcccgtaagggcaaagctgtatccagccggtagctgtgctgttcacagtgtgtaggagatg

SEQ ID NO: 2506 - DNA, 305 bp, Macromonas bipunctata
  source 1..305: mol_type = other DNA
gtcaaccacccccagcctaaaggctgaggcttgtaaaagcaagcctggttgaccaggctcagtgccgtaaggcgctacgttgtgcgtaagaccaaagaccgacgtcggtatgcttccttagtaccgacttctcgaagatgccgtagcagacaaggtatgggtgctacgaaacggacggcatctggaaagcgtaagccttccacctggcgtacaacattgccgaagggagcgataccgtaaaaaagtatttgtaacaaggcccgtaagggctggcagctgggaagacagcatttttaggagtcgtc

SEQ ID NO: 2507 - DNA, 324 bp, Nonomuraea polychroma
  source 1..324: mol_type = other DNA
gtcactcgctccccggcctgtaggtcggggcctgtcccgctgaaccggggcggaccggagtgaccagatccagccaccatgcataaggaggtgaccttggtggctacgttggacacacgtcagcagatccacttcgccgtgcttcctcagcggcggactctggaatccgcgcctgcagacactcctggagcagggacgaaacggggcgcggaggccttcgggcagcggagtgtccgacatggtcgaggggagacccgccacgcctcacctgacgcggcgagcgtcacccccgcaaggggagaagccggtcgtgagaccgcaccc

SEQ ID NO: 2508 - DNA, 284 bp, unidentified
  source 1..284: mol_type = other DNA; note = Paracandidimonas soli
gtcaactaccccgccctgaaggacggggcttgtgaaagcaaaccaggttgaccagggaaagccgtaatcaaccggctccgtttgcaccaggtcgttaagccccaccaccgaatgcttcctcagttcggtgctctggaaggtcaggatcatgctggcgaaaggtaaagcgccgaaggttctgatcgccgcgtaacgcgggagccgggtgcagacattcccgaggggagacagggcgcaagccctgcgtcaccaggcccgtaagggcagataattaaggaggatcg

SEQ ID NO: 2509 - DNA, 344 bp, Actinomadura sp.
  source 1..344: mol_type = other DNA
gtcaaacgctccccggcctgaaggccggggcttgcctcgctagccgaggtaggccttgtttgaccagcccgagccagcacgcatgggaggtgaactagttggctacgttccgtgcaggtgagcggacccaccaggccgtgcttctccagcggcctgctctggaatccggttcagcagacatgcttgggggcaggcgcgaaacggggaccggacaccgcccttgcggggtggtacccggtgcggaacatgggcgaggagagcccgccgccgcctcacctggcggcggtggcgtcacccccgcgtccccttcgggggccggggagatgccgcgtgagcggcacgcg

SEQ ID NO: 2510 - DNA, 337 bp, Actinomadura sp.
  source 1..337: mol_type = other DNA
gtaacgagatcttcctttggacgaggaggctttcagttcgctgtgactgaggccgtcgttaccagcaccagccaacactcatagggaggtgaccttgttggctacgttccgcacaggtgagccgacccaccggcccgtgcttctccagcgggctgctctggaatcggggctcgcagacactccccggatcgggaacgaaacggggccccgccacccctcccggaagggcgggggcgccggtgcgggacatgtgcgaggagagaccactggtacctcacctggtgccagtggcgtcacccccaacccatcggttggggagcagcgccgtgaggcgcat

SEQ ID NO: 2511 - DNA, 393 bp, Branchiibius hedensis
  source 1..393: mol_type = other DNA
gtcgacgaccctgccctctctccgggctcgttgaccagaccaagacatcagtgatttggaggtgaccaagatgtctacgttgcacacgggtgcgcgaacccaccggcgggtgcttcctcagcctgccgctctggaatcggtgccagcagacaaccccggggtagggacgaaacggggcaccgacatcccgcgcacggcgcaagccgggcggcgggacaccggtgtgcaacatggtcgaggggagaccaccgggggcgcacctgtacccggcggcgtagcagcagtacccgcagggcgtaagcccagcagcaccaagcaacacagcgccacccagcagaaccgcaccacccgcatcaccagcagccccaagcagtctcggttcacggctgacaa

SEQ ID NO: 2512 - DNA, 282 bp, Pseudomonas rhodesiae
  source 1..282: mol_type = other DNA
gtcaactgcctcgtcctgaaaatcggggcttgtgaaaacaagctaggttgaccagggatagccgtaaccaaccggctacgtttgcaccaggtcgaaccgacccaccccggaatgcttcctcagttccgggcactggaaggtcgggaccatgctggcgaaaggtaaagcgccgaaggttccgaccgccgcgacagcgggagccgggtgcagacattcccgaggggagcgagccgcaaggctccgtcaccaggcccgtaagggcacagttcaaaggaggatcgc

SEQ ID NO: 2513 - DNA, 417 bp, Ruminococcus sp.
  source 1..417: mol_type = other DNA; strain = AM40-10AC
gtcaataacccgcgcccgaggtaaacctcggacggggcttgcaaaagaataaattgttttatttccacttttgtttagctccgttacagtttacggaaggtgttggccgaaaggccttattgattagccttagcagtactgctacgttaccgataaaataggcgccgtgggatactcctcaagtctcacgctctgcggtatgctgttaaacatctcttagggtaggagaagtgcagtatacgctaaactatcggataacattggcgatgaggacaaccgattctgactaggcgccggcttgccggagccgaaaggatagagaacctgtatggattattttcaagcatcttcggatgtttggaaatggttgatacagaaggcgtaagccaccccggcttgccgggaaaatacaacaca

SEQ ID NO: 2514 - DNA, 190 bp, Bacteroides dorei
  source 1..190: mol_type = other DNA
gttaaaggaatattaactacccactaggctaaagacctgtgggtgttgattagtctaagcactttgggtgctacgtttggagagaatatatagttaccaaggggtgtttgttcaagccccttgctctaaggttaaaacctctccataacattgacgatgagcatttaacggagaaatccgacttatagta

SEQ ID NO: 2515 - DNA, 271 bp, Eubacterium sp.
  source 1..271: mol_type = other DNA; strain = TM05-53
gtcaactacccaccaataaattggcaggcttgtaaaagcctaagttgactagcctaagtgctttgagcactacgttaagagagaatacatagttacccgtggatgtaacacctagtctacggctctaagggaacatattaaacagttctgtgaggtaggaacagtgtgtggtggacaatagtcctttatccattaaacctttcattaacattggcgaaggtgtcatttacagttcaatatgtactggcttatcgctctaaacatattaaaa

SEQ ID NO: 2516 - DNA, 252 bp, unidentified
  source 1..252: mol_type = other DNA
gttgaattacctgtatagcatataaatatgccattcgactaccctcggcgcaagctccattatcatcgaatgatatagacacctatgagtataagcaacaacatccaagctcgtagcgctgtgtctgcagattaaacagtgctggcaggaaggtacagtgtctgcagagaaaaccgatgaataatattggggatggatgacttactgacatattatgtcaggcttaccgcactgaggctgtgatcaaacaca

SEQ ID NO: 2517 - DNA, 282 bp, Pseudomonas aeruginosa
  source 1..282: mol_type = other DNA
gtcaactaccccggcctgaaggtcggagcttgtgaaagcaggctgggttgaccagggaaagcggtattaacccgctccgtttgcaccaggtcgaaccgacccaccccggaatgcttcctcagttccgggcactggaaggtcgggatcatgctggcgaaaggtaaaacgccgaagattccgaccgccgcgacagcgggagccgggtgcagacattcccgaggggagcgagccgcaaggctccgtcaccaggcccgtaagggcatagttcaaaggaggatcgcc

SEQ ID NO: 2518 - DNA, 306 bp, unidentified
  source 1..306: mol_type = other DNA
gtgaactaccacacaccataaaggtgtgtggcttctgttaaatggttcaccagactaagttgttagaaatagcaactacgatatttaggtcatgatacctttggttaacgcaacagaccattgctctatcgtacatatttaagttaggtcagagtaagaacagccttgtgatatgtatacaaaaagcctttatatcattgtcgagttgaggacgaaacaactatgtggtaatggcatagtgtagtacgcattaccattgcatatgtaatggagttgtgtgattaaattcacagaaaggagtgccgg

SEQ ID NO: 2519 - DNA, 295 bp, Ruminococcus sp.
  source 1..295: mol_type = other DNA; strain = OM05-10BH
gtgaactaccacagaccgtaaaggtctgtggcttctgttaaaaggttcaccagactcagggtttggaaacaagccctacgatattcaggtcacgacacctccggttgacgtaacagaccgttgctctgtcgtacccaggttaagttaggtcagagtaagcacagccttgtgatgggtatgcaaaaagcctggatatcattgtcgagttgaagtcggaaacggctgcatggtaacagtgcagcccagtacgcattacctgccatcaggcagagtatctataaggagggacttatct

SEQ ID NO: 2520 - DNA, 285 bp, Bacillus cereus
  source 1..285: mol_type = other DNA
gtcaactacccaccacttaaacgctagcgcgttttgaagtgggggcttgtaaaagttctggttgtctagccacggtcctttgtggactccgttcgtaggttgcatacccaagaatgattccctagttcttggctctatggtggctctgtaaaagttctggttgggaaggaacggtcaaccacaagtcttcttgcacaagaagttgccaacacctacaaacattggcgaagggaaacaaactcttaggagggacaaatcatgcgtgtatttgtcaagaatttaaga

SEQ ID NO: 2521 - DNA, 285 bp, Escherichia coli
  source 1..285: mol_type = other DNA
gtcaatcacccctccctgaagggagaggcttgtaaaagagcctgagattgaccagaccgagcgccgaaaggcactccgttgtgcagaagagcgcagacccaccctgaaatgcttcctcagtttcaggctctggaaataaccgtagcagacacacttcgggtgagtacgaaacggacggttatcggtcatgtgaatgaccacctgctgcacaacagggtcgaggggagcatggccgaaaggctatcgtcacaagacccgtaagggtatttatttaaagggcgttat

SEQ ID NO: 2522 - DNA, 328 bp, Ruminococcus sp.
  source 1..328: mol_type = other DNA; strain = AM42-10AC
gtcagcttctcggctatagaataaccgagcatacagaaatgtatggatcagttatctgtagcacctgaaagggcatgctgactagactaagcgcaacggaacttacagcttccatgctgtgaaggataccattagtgctacgtcccggatatcaatacccgacccggtggtacccaagccggcacagggttcaggcaacggatgtcttcccggagaagaagataccgacctggtgcaggaagtatccggaacattgtcgaagggtgaacactctcctgtgggagggcaggatttttgcgtacctgccataataacataaggagggacc

SEQ ID NO: 2523 - DNA, 246 bp, Ralstonia pickettii
  source 1..246: mol_type = other DNA
gtcaactaccccggcctgaaggccggagcttgaaatgcgactgacaagctcgggttgaccaggcaaagcggcaaccaacccgctacgttgcgaataggttcaggaccgacgttgggatccttccttagtcccaacctctcgaagccccggttgcagacaagcgacagggtaagcacgaaacggatcggggcagatcgccggttcgcaacattgccgaagggagacttcccgcaagggaggcgtaac

SEQ ID NO: 2524 - DNA, 402 bp, Klebsiella pneumoniae
  source 1..402: mol_type = other DNA
gtcagtaaccccgccctatcggacgaggcttgtaactgaaaactgcattatcgttttcctgaacaagtctgcgacttggattaactgaccagccttagtctgtgaaacgatgagttttacagactacgttaaaaaacagatgacaccataggatgcttctaacttgcagtaccgaaatatgcaaatatttcgtttttattctgcttctccagttctatgcaatgtcgtaatacattaaacatttctttggggtaaggaaaagtgtgtattacatggtagaaacgtaacgttaaaaacgttgcgtaaaaccgaaatgttttttaactttggcgaggagatcttactttatgaaaacaatatttttcataaaagataataaggtaacttatttttaataaaagg

SEQ ID NO: 2525 - DNA, 509 bp, Ruminococcus sp.
  source 1..509: mol_type = other DNA; strain = AM36-17
gtcaataacccgcgcccgaggtaaacctcggacggggcttgcaaaagaataagttttcttatttccacttttgtttagccccgttacagtttacggaaggctgttggctgtaaagccttattaatagcgccggggtcacccgtcgttaccacataaggcttacagccttattgattagccttggtagtaaagaagccggccaaaccaggtcaggtaaatctttaactgctacgttaccggtaaaataggcaccgtgggatgctcctcaagtctcacgctctgcggtatgctgttaaacatctcttagggtaggagaagtgcagtatacgctaaactatcggataacattggcgatgaggacaaccgattctgactaggcgccggcttgccggagccgaaaagatagagaacctgtatggactgcttttaaatatcttcggatgtttggaagcggttggtgcagaaggcgtaagtcatcccggcttgccgggaaaatataagaataaaag

SEQ ID NO: 2526 - DNA, 298 bp, Clostridioides difficile
  source 1..298: mol_type = other DNA
gtcaactgccattaccctaaagggtagtagcttgtaaaaagctagttgaatagcctaagtttacactacgttatgtaagaatatataggtactttaggatacttctctagtcctaaactctacggtatatcattaaacatcactgatggcaggtgaagtgtggtatatttaaaacctttcataacattggcgaagagagcttaccaccgtaaggtgaggttaaattatctgaaaggattatactatggtatatgtaattaattttgaaggaaaaccattaatgcctactactaatgca

SEQ ID NO: 2527 - DNA, 317 bp, Ruminococcus sp.
  source 1..317: mol_type = other DNA
aggactaattgttaagcggtttattttatagacaaaagtgtaaataagtggacaaatgtatgattacatttcttgttcacacttgcttagcaacaggtttcaagcctcagtgactgctgttatcgaaagatatgttgcagatacgaactgcgttagagaaaaggttaaagacacaccttcagatgtgctcgtcagtctgaagctctgcgagtgccaatcaagaaactatgctaatgtcctgcatagataacagagaaacacatatgccctctccgacattggcaagacgaaaattactccgaaaggaaggtatccag

SEQ ID NO: 2528 - DNA, 295 bp, Arcobacter butzleri
  source 1..295: mol_type = other DNA
gtcaacaacctcaccctaaaggatgaggcttggttgtccagctttagtaagcagtgatttttcgagcggtatccaatccgccaacttatgagtttttttactgtttaaactacgatatttaagttatcacaccttggagtgcttctccagctccaagctctgtgcaggctctgtaagttgggttaaagccctgtcaacctgatgtgttagtcgcactaaaaagcttttatatcattagcgaggagagagtcgaaagaccgttaccgcagaaatgcgagaaagagattaagttctc

SEQ ID NO: 2529 - DNA, 375 bp, unidentified
  source 1..375: mol_type = other DNA
gtaaatcaccccgccctgacggacagggctttcggaacctagttccagtggcccggcctttcaggtccgatttaccagacccagccatcagacaaggaggtgacaccagatggctacgaccgatacacgacagcagacccaccggcgagtgcttcctcagctcgctgctctggaatccgcatcagcagacaccgttggggtaacgacgaaacgggttgcggaggcttccgccacgggcaaccgtgacggggcaccgggtatcgatcatggtcgaggggagaccgcgcgtacgcgtcaccgctccgcgcggcgtcacgggggaacggcttcggctgaacctctcgtatccggtgggagtgatcccgccacacccac

SEQ ID NO: 2530 - DNA, 231 bp, Ruminococcus sp.
  source 1..231: mol_type = other DNA; strain = AM42-11
gttttgtaaccatgtaaattaagaggtatacaaaacctcaaagtatagttttatacctcttattttaaggcacttctatgaaatagactaagagaaatctacgttataaaaagataatatgttatggtgtcgctctagctgtaattatatcgtttgtacctaaacatacactgtgctgaacatgattggtgtaagtgatacaaacatgtaactttttataacattgtcgaa

SEQ ID NO: 2531 - DNA, 350 bp, unidentified
  source 1..350: mol_type = other DNA; note = Lachnospiraceae bacterium UBA2826
gtcaatgtcactaagttaaggctctgactaacagcttccacagtgttagctatccttaactcaaacattgacacgatttttttctttgaatcaaatatgagaatggaagctcatatttgtgcagaatgacgatactgcaaatgcacttgctgctcttgtacaggtggcaaccctgcttcagtttgcagtgatatttcgagtacacggtatcaggaattcggcaactctgcttccacagaaagtaccgcactggatacacagcaacgctgtccacgacagcgaattatctttttagtaaggtgcaacagttgttatgtatgtaagagtaatcgcaaaagacggcacaccgc

SEQ ID NO: 2532 - DNA, 311 bp, unidentified
  source 1..311: mol_type = other DNA; note = Human gut metagenome
gtcaactactcggctattgaatagccgagcatgaaatcgttgtgaaaacgcctgaaagggttttttacaatgattccatgtgacgttatttgataacgggtagctgagcagagacgcgacatatacatgtatctggatggtgtcttcgggcacctgaaagatgctggcacctgcaggtattcttccagcctgcagcaccgcagagtatatgccaagtctaggaaaacgataccaggacaatgcttagggttacaaccgatgcgaaagaaccgttttttcgtgggaaggtattgtccaactctgataaggag

SEQ ID NO: 2533 - DNA, 198 bp, unidentified
  source 1..198: mol_type = other DNA; note = Human gut metagenome
gggtattgaagaattttagtggaatgaccccattccactaagtttcttcaatatcacaggcggatgtacttttgtacatcaagatgacgagctgcacttgtacggttttcccagcctgcaaccatgcgaaggcgtcatctagccaagggaaacacaacctcctgcttcggcaggagagacttatcgtaaaggaggtgg

SEQ ID NO: 2534 - DNA, 199 bp, unidentified
  source 1..199: mol_type = other DNA; note = Human gut metagenome
gtcaattacacccacctaaagaggtgggtgcctgcaagcttgcttgcaggcaaaaaaggtaattgagcagagacatgatgcagcgctcactacggggtaatgccaagccccgtaccctggttacagctgcacctagtctatggcactcttacattcccttcttagggaatgaattatcttatttttaaggagaaccaaa

SEQ ID NO: 2535 - DNA, 242 bp, unidentified
  source 1..242: mol_type = other DNA; note = Human gut metagenome
gtcaactactcggtaattgaattaccgagcatgtagtgttcgtagttcatacgggtagttgagcagagacatgatagcttgcgttctcgttacgagatgacacttttggatactttctagtccaaaacactgcaaagcagctaccaaagtctaagaaaacagtagtattcggtatacacaggcttaccaccgatgcaggtacaccgttgtatctgcggtactgtataccacaaaagaaagga

SEQ ID NO: 2536 - DNA, 254 bp, unidentified
  source 1..254: mol_type = other DNA; note = human gut metagenome
gtcaataacccacgactaaagtcgcgggcttgctgatgcgagtcccactttaacctgggttattgagcagagacgtgatgcctgcgttctccctctgggggatggcacctgtaggtttttccagcctgcagccatgcagagcaggcaccaagtcttggaaaacagttataccgccatgcacaggcttactaccgatgcgggaagtaccgtatttctcgtgatactgcatgacacttaacgaaaggaggcatcgg

SEQ ID NO: 2537 - DNA, 227 bp, unidentified
  source 1..227: mol_type = other DNA; note = Human gut metagenome
ggtatttgcgaaaataggtggttgaccatctaaagttgcaaatatcacaggctgaaacatttgtaaatttatcctatttggatggataaatggatgcaccgtggaattttcccagttccatgcaatgcagagcaaatgttagttgtcagaaaactatctggcagaaaagccaagggaaacagttacctctccagcgatggagagagtcttacgaaaggagattacgg

SEQ ID NO: 2538 - DNA, 201 bp, unidentified
  source 1..201: mol_type = other DNA; note = Mouse gut metagenome
gtcatgaccccacggctaaaaccgggggcttgagggagtaaccaatctctccaggtctcccggtgccgcgagatcatgagcagaggcatgacacatccgcactttggggttttcccagcttcaaaccctgctgatagatgtgccaagcctagggaatctaacccaccttcgggtggagtatttattgacagaaaggagggc

SEQ ID NO: 2539 - DNA, 201 bp, unidentified
  source 1..201: mol_type = other DNA; note = Human gut metagenome
ggctatttaagatttgatgtgggaaacccacaaaaagtctaatagccacagccacagcgacgtatgtaagcccctcaggtagaggcgacggatgcacctgcgggttttcccagctcgcagcactgccaagcatacgccgaggtaagggagacattaccgcctcctctggaggtgagacactactacgaaaggagatgagcg

SEQ ID NO: 2540 - DNA, 206 bp, unidentified; identical to SEQ ID NO: 2064
  source 1..206: mol_type = other DNA; note = Metagenome

SEQ ID NO: 2541 - DNA, 344 bp, unidentified
  source 1..344: mol_type = other DNA; note = Erysipelotrichaceae bacterium SG0102
caatgtcattaagttaagggaaaactgatgatttcggtcgttaagctctcctaacttataaacattgacaggctttttttcttcacataattcagaatgcatggaataagtttgatgcatgtgaggataacatcaaaggaatcacccggcgcccctgcacaggtgccggctctgcgctacagccgatgatgatattgtcagtgcatgccaggagtgaaactctgcgttttccagacgcaaaacccagctcacgaaggcagtaacaggaaagctcctttctccggaaaagagtgagtactgcattatccttcctgcgggaaggaagaaagcgaggatatgttatt

SEQ ID NO: 2542 - DNA, 364 bp, unidentified
  source 1..364: mol_type = other DNA; note = Human gut metagenome
gtcaacaaccaacgcttaatctctgttaagatttgaagcgggagcttcaaaagcaacagccaaagcatcatcttggtaaggtcgtttttgaagctggttgattagcctaaggcataagagggtcacactcttatgaagaacctacgttacttatgaataatacaggcaccctgtgaatgcgtgtaacaagttccaggctctgcggtacgggtttaaacatcggcattccggtggtatcatgtgatgatttttataaattaccacgggaatgtccgcaaaagcgtaagcttttggcctgaggcaagggcaagtgatccgtatacgggctctctgagtcctaaaaccatttgtaacattggcgctg

SEQ ID NO: 2543 - DNA, 243 bp, unidentified
  source 1..243: mol_type = other DNA; note = Human gut metagenome
caatggcattaagttaaggatttcgggcgagcaaaaccgtccgagacacctgacttttgaaccattgacatgttatttttcttgtaccatttacaagataacattgtcaccgcacctatcggtcttgcacagctgatagttaaactgcttcaagtgacaatgatgtaacgggtgtaggtagaacttatcaggttctacagtaactcccaccgtgggagaattatttccagaaaggagattatt

SEQ ID NO: 2544 - DNA, 242 bp, unidentified
  source 1..242: mol_type = other DNA; note = Human gut metagenome
caatggcattaagttaagaaaaatggggctacttcggtagtccctgacctcaacttttgaaccattgacacgttttttatttcgtaacaattacgaaatgatactaacacccttcgcaccagttgctcttgcacaggtggctgctctgcatcaagtgttagtgacattacaagtgcaggtatatcttatcaggatatacagtaacgctcatcataagcgaattatctcagaaaggagattta

SEQ ID NO: 2545 - DNA, 289 bp, Ruminococcus sp.
  source 1..289: mol_type = other DNA; strain = OM08-7
gtcaagtaactcatgactaaagtcacgagcttgcgaaagcaggttctggttttagctgtagggttactgagcagggatacggtgacgtatgcgtgtatccaatggcatcttcggatgccggagggtgctggtaccggaggatatcatgcttttcagcaggattccagtcttccgttctacagagcatacgccaagtccaggaaaacaaacgtaagtgcagtgcctcaggcttaccaccggtgcaggaggaccgttcctcccgtgaaacagcactgctaaaggagttagt

SEQ ID NO: 2546 - DNA, 301 bp, Ruminococcus sp.
  source 1..301: mol_type = other DNA; strain = AM36-17
caatgtcattaagttaagggattttggcagcttcagctgtcaaagtcctttaatttaaaaaacattgacacgatttttttcaaagggatttcgtaacatttgttgcgaatgaaccgagaagatactaacaccccatgcaccaagcgctcttgtacaggtgcttgctctgcttcaagtgttagtgatatttcgagtacaagtacaacttattaggttatacagcgacatctcttcggagatgatttacaatctggtttccaccagagaaaggaactttatgaagcaaaagaaacaaaaagta

SEQ ID NO: 2547 - DNA, 299 bp, Lactobacillus salivarius
  source 1..299: mol_type = other DNA
atcaactacctcacgataaatcgtgaggtttggtaatagctatgctgttactaaacctggttgactagtctcagtacttcatgtactacgttattccagaataagttataggtacctgtaaatacttctctcgtttgcagcactacgcattaatattaaaccaagctaattggtaggcttcgtgtattaatgcttgttattaaacaagtaaacctggaaataactttgacaaagagaactcacaaagcgtgattctttccgctttgacttaccgtatactaaatatagaaaggaagtga

SEQ ID NO: 2548 - DNA, 311 bp, unidentified
  source 1..311: mol_type = other DNA; note = Human gut metagenome
gtcaacaacctcgcctaaaccgttccgccggttatagacgggacttgcggggaaattcgtaagtccggttgattagcctaagcccgttgcttctgcagcgggggaaactacgttgtgtaccaataatataggcaccttatccatactccacaagtggtaagctctgcggatgtttgttaaaaatctctgagggtagaagaagtgcgaacatcataccgaaaggtaaaacagtacaacaacattggcgatgtggaccacagggcgcaagccctgacttattgatttattatttgcgaaaggagtgccttgca

SEQ ID NO: 2549 - DNA, 340 bp, unidentified
  source 1..340: mol_type = other DNA
gtcaatgacccattttcaataacacaatgagcaagcgaagcggggagttttgctccccaaatccagagctcctttacattgacccggctcagggacttctaagttcctacgttagcagttaatattataggtaccccagaatgcttcaccagttcgagggctctacggtaagtggttaaacaagtggaaggggttaaactagtgctgcttacataaacaactgcataacattgccaaggtgacgtgattcatactaagctctaagctagcatgagtcacaccaccatgcaagtgtgtaaatgcttttcgctcacttgcatgagagtgattgaaggtaact

SEQ ID NO: 2550 - DNA, 365 bp, unidentified
  misc_feature 1..365: note = Delaware Bay aquatic sample metagenome
  source 1..365: mol_type = other DNA
gttgtagcctccactcattttcggggtgctgtcagggagtgcccgcgctaccctgcttggatgctgggctggaaggcaaaaggcgttcaaaaaaatgggcggtggttgacagttttccggaaatgagtgcggattttttccgcagctacaaccagactaagttctttgggaactacgttattgtcgtcatcatacccacgggtgcgtgccagcctgtggctctatggtcgtgcattaaacagggactttggagggtgcccagtgtgtacggcgtcaaaagcggcgataacattgtcgaggcatactttacgtgacggcaacgcttcttcggaagttgcgcccgatcgctagctttaaggctaatt

SEQ ID NO: 2551 - DNA, 20 bp, synthetic construct
  misc_feature 1..20: note = Synthetic
  source 1..20: mol_type = other DNA
cggttccgcaggacccaggg

SEQ ID NO: 2552 - DNA, 20 bp, synthetic construct
  misc_feature 1..20: note = Synthetic
  source 1..20: mol_type = other DNA
agtggtgcctggaaaataaa

SEQ ID NO: 2553 - DNA, 20 bp, synthetic construct
  misc_feature 1..20: note = Synthetic
  source 1..20: mol_type = other DNA
cccccttccctatgggaata

SEQ ID NO: 2554 - DNA, 20 bp, synthetic construct
  misc_feature 1..20: note = Synthetic
  source 1..20: mol_type = other DNA
accgggaagtgaatggacgt

SEQ ID NO: 2555 - DNA, 20 bp, synthetic construct
  misc_feature 1..20: note = Synthetic
  source 1..20: mol_type = other DNA
ctccaaggacaaatctttat

SEQ ID NO: 2556 - DNA, 20 bp, synthetic construct
  misc_feature 1..20: note = Synthetic
  source 1..20: mol_type = other DNA
ccaagcaagaagtgaagccc

SEQ ID NO: 2557 - DNA, 20 bp, synthetic construct
  misc_feature 1..20: note = Synthetic
  source 1..20: mol_type = other DNA
tcccaaagatgcccacctgc

SEQ ID NO: 2558 - DNA, 20 bp, synthetic construct
  misc_feature 1..20: note = Synthetic
  source 1..20: mol_type = other DNA
atcaaaaagagtgaacgaga

SEQ ID NO: 2559 - DNA, 20 bp, synthetic construct
  misc_feature 1..20: note = Synthetic
  source 1..20: mol_type = other DNA
tggtggtctggataaaagaa

SEQ ID NO: 2560 - DNA, 20 bp, synthetic construct
  misc_feature 1..20: note = Synthetic
  source 1..20: mol_type = other DNA
cgcagagagtcgccgtctcc

SEQ ID NO: 2561 - DNA, 20 bp, synthetic construct
  misc_feature 1..20: note = Synthetic
  source 1..20: mol_type = other DNA
tttaaagaaaaagcagcttt

SEQ ID NO: 2562 - DNA, 20 bp, synthetic construct
  misc_feature 1..20: note = Synthetic
  source 1..20: mol_type = other DNA
tctgtccctccctcagtagt

SEQ ID NO: 2563 - DNA, 20 bp, synthetic construct
  misc_feature 1..20: note = Synthetic
  source 1..20: mol_type = other DNA
cccccttccctatgggaata

SEQ ID NO: 2564 - DNA, 20 bp, synthetic construct
  misc_feature 1..20: note = Synthetic
  source 1..20: mol_type = other DNA
actacagtggtgcctggaaa

SEQ ID NO: 2565 - DNA, 20 bp, synthetic construct
  misc_feature 1..20: note = Synthetic
  source 1..20: mol_type = other DNA
atgcatataccagtttgtgg

SEQ ID NO: 2566 - DNA, 20 bp, synthetic construct
  misc_feature 1..20: note = Synthetic
  source 1..20: mol_type = other DNA
acgaatttctgcaaacagaa

SEQ ID NO: 2567 - DNA, 20 bp, synthetic construct
  misc_feature 1..20: note = Synthetic
  source 1..20: mol_type = other DNA
tttattttagctgaagggaa

SEQ ID NO: 2568 - DNA, 20 bp, synthetic construct
  misc_feature 1..20: note = Synthetic
  source 1..20: mol_type = other DNA
tttatttcccttcagctaaa

SEQ ID NO: 2569 - DNA, 20 bp, synthetic construct
  misc_feature 1..20: note = Synthetic
  source 1..20: mol_type = other DNA
gagagcaaaagatacatctc

SEQ ID NO: 2570 - DNA, 20 bp, synthetic construct
  misc_feature 1..20: note = Synthetic
  source 1..20: mol_type = other DNA
atttgtaccggtttttgtat

SEQ ID NO: 2571 - DNA, 20 bp, synthetic construct
  misc_feature 1..20: note = Synthetic
  source 1..20: mol_type = other DNA
tgtgcccattggtggtctgg

SEQ ID NO: 2572 - DNA, 20 bp, synthetic construct
  misc_feature 1..20: note = Synthetic
  source 1..20: mol_type = other DNA
tattcctgacactgccagga

SEQ ID NO: 2573 - DNA, 20 bp, synthetic construct
  misc_feature 1..20: note = Synthetic
  source 1..20: mol_type = other DNA
gggacagaaaacctagaaaa

SEQ ID NO: 2574 - DNA, 20 bp, synthetic construct
  misc_feature 1..20: note = Synthetic
  source 1..20: mol_type = other DNA
tttaagagcatcgaacaata

SEQ ID NO: 2575 - protein, 433 aa, Erysipelotrichaceae sp.
MLTYVLNKDGQPLMPTGRSGKMRRLLRDKKAKVIRRCPFTIQLLYEPETAVVQDITLGVDAGSKYIGLSATTEDRVLYESEVELRNDIVELISTRREARHARRNRKTRYRAPRFDNRTSSKKEDWLAPSIRQKIHSHLKVIADVHEILPVSKVIIEVASFDTQLLKAAEEGRPLPQGTDYQFGEQLGFYNTREYVLFRDNHTCQCCKGKSKDKVLNVHHIESKKVGGNAPNNLITLCETCHTGYHKGVVKFPSSIRRGMKFNDASFMGIMRWPVYSRLKEIYPSVELTYGYKTKNMRIENQLPKEHYIDARCISGNPKAKSDGIVYYQKKVRCHNRQIHKFKVNKDGLRKLNQAPYLVKGFRLWDKVLYNSEECFVQGRRSSGFFQLKKLDGTMISASASCKKLSLVETGKHFITERKRAIPPTVEECGFSCL

SEQ ID NO: 2576 - protein, 371 aa, unidentified
  VARIANT 2..35: note = X can be any naturally occurring amino acid
  VARIANT 334..367: note = X can be any naturally occurring amino acid
  source 1..371: note = metagenome
MXXXXXXXXXXXXXXXXXXXXXXXXXXXXXXXXXXTRRQYRRSRRNRKTRYRQARFNNRKKPDGWLPPSMQTRINHTFNWIDEFTSLLPNPRLIIEVGKFDVQKMQSPSIEGTEYQKGNTYGYYDVRYYVFARDNYTCQVCKGKNKILRTHHIIYKSEGGSDKANNLITVCTGCHTSENHKKGGIFYKWMLEGKKLPSYKETPFMNIIRKKIYKKYPDAQIVYGSYTTPRRKELGLEKTHYNDALAITGMEQVFTDEIGIFKIKQFRKKKRSLHEAIARKGRKEPNCIQIRNSKNTKYQDGFYLNDKVKVFGRTGFISGFTNGGGAYIKDILGXXXXXXXXXXXXXXXXXXXXXXXXXXXXXXXXXXVIVA

SEQ ID NO: 2577 - protein, 431 aa, Klebsiella sp.; identical to SEQ ID NO: 2435

SEQ ID NO: 2578 - protein, 402 aa, unidentified
  VARIANT 36..69: note = X can be any naturally occurring amino acid
  VARIANT 368..401: note = X can be any naturally occurring amino acid
  source 1..402: note = metagenome
LFHCSCQGSPVFYRNKKPIHTMYYCLSTSWGIGCNXXXXXXXXXXXXXXXXXXXXXXXXXXXXXXXXXXFTIQLLFECENETQDVTLGVDAGSRFVGLSATTSDKVLFEAEVELRNDITKLLADRRSLRNNRRSRKTRYREARFLNRKKPDGWLPPSIRSKINTHIKVVEKVHKILPISQVVVEVAQFDIQKIKNPEISGAEYQQGDQMGFWNAREYVLYRDGHKCQHCKGKSKDKILNVHHIESRKTGGDAPNNLITLCKTCHDDFHSGKIELKIKRGQSFRDASHMNIMRWFLWDKLKELYPNSKLTYGYITKNTRIKNGLEKSHRTDARCISGNSLAEPLDHWYFYKQVRCQNRQLHKVNPKRGXXXXXXXXXXXXXXXXXXXXXXXXXXXXXXXXXXS

SEQ ID NO: 2579 - protein, 380 aa, unidentified
  VARIANT 3..36: note = X can be any naturally occurring amino acid
  VARIANT 339..372: note = X can be any naturally occurring amino acid
  source 1..380: note = metagenome
LAXXXXXXXXXXXXXXXXXXXXXXXXXXXXXXXXXXASLNYLKGFDFMIYVISVDGKPLMPTSNAKARILLKQKKAKVKNLKPFTIQLTYKTETEYTQNITLGIDSGYNNVGFSALTDKKELLVGELKLLQGMKERLLEKARYRKIRRSRLRYRKARWNNRTKSKPKGWLAPSLQHKLNSHIKFIDSLYKLLPITKTIVEIANFDIQKMKDEAISGVEYQQGDMMGFWNLREYILHRDNHKCQNPNCKNKDKEQILEIHHIKYKHFGGSNRPSNLITLCNKCHTSPNHKKGKFLYDWCQEGRKVRGFKDATFMSMIRWYLVNKLKEKYSNVSFTYGYIXXXXXXXXXXXXXXXXXXXXXXXXXXXXXXXXXXVENYNSYY

SEQ ID NO: 2580 - protein, 560 aa, unidentified
  VARIANT 440..473: note = X can be any naturally occurring amino acid
  source 1..560: note = metagenome
MVFVLDKHKKPLMPCTEKRARLLLQRGRAVIHKMEPFTIRLRDRTLEKSNVQLLRLKLDPGSKTTGVAIIDESKPDCGRVIFLGEIRHKAGIKKSLDNRRAIRHSRRNRKTRYRKARFDNRKRPEGWLPPSLQARVDQTLNTVTKLRKFLPIAAISTEHVKFDTQFMQNAEISGIEYQQGELFGYEVREYLLEKWGRKCAYCGKTDVPLEIEHIIPKSRGGSNRVSNLTLSCKLCNQKKGTMTAAEFGFPEVQAQAEKPLRDAAMINATRWALFNKLKKIGLPVECGTGARTKKQRIEHGLPKTHYYDACCVGISTPKRLMIIPQYISVWTVIGRGTRRMCNTDKHGFPKGHRTAKKMYFGFQTGDIVKAAVPKGKYMGTWIGRVAVRASGYFDLKDGQGKRICQGVSYKHCRLIQRANGWQYEKYLRKEKSRIPPTAKXXXXXXXXXXXXXXXXXXXXXXXXXXXXXXXXXXLVNLGCATGHPSFVMSNSFSNQTLAQIDLWTKNYEIGVYRLPKHLDEEVARLHLEQLGVKLTKLTKEQADYIGVPREGPYKPEHYRY

SEQ ID NO: 2581 - protein, 462 aa, unidentified
  VARIANT 416..449: note = X can be any naturally occurring amino acid
  source 1..462: note = metagenome
MAAGDLRNVLASLKQGKAKVKYREPFTIKLTYETTTYTQPLTLGVDTGSQTFATAVTNGKGNILYTSEVVLREDKNHSIKKKMDQRRMYRRNRRNRKTRYRKARFNNRKNSKRKNRFSPTMTSKLHSHQKEIEFIKSILPIAKLILETGTFDPHLMKNPSLANPKVKPWGYQQGPNYGFENTKARVLVRDNHTCQICNKKPKNERLEVHHIVFRSQGGSDEENNLVTLCHSCHVELHKGLIHPNFEGSLKSALKYATQMNSIRIQLLKLYPDAIETFGYVTKANRLNLGLPKEHYVDAAVIATAGNQVNFACNLMIKRCIPKGDFQRTKGIRSEKIIPKGKIDGFKKYDKVRYFGNEYFVKGRMTTGYIQLMNIYGEKISFNHMPKGFKTPKTKNCQRIAARKTWITTIETLIKNXXXXXXXXXXXXXXXXXXXXXXXXXXXXXXXXXXLCLIWVHTKQVQT

SEQ ID NO: 2582 - protein, 349 aa, unidentified
  VARIANT 219..222: note = X can be any naturally occurring amino acid
  VARIANT 315..348: note = X can be any naturally occurring amino acid
  source 1..349: note = metagenome
MVFVLDTNRKPLSPCHEAVARKLLKQGKAAIFKRYPFTIILNKSVDNTDNKQEYRLKIDYGSKHTGLAILQNNNVIWLAQIDHRTDIKKKLDERRSYRRRRRNKNLRYRQPKFLNRRRKEGWISPSLESRINNIKTWVNRLQKLIPLTHISYENVKFDTQLMQNPEISGIEYQQGTLQGYEVREYLLEKFNRKCCYCGETNIPLETEHIIPKSRGGTNXXXXIDNLCLACHECNQKKGNMTAEEFGHPEVQRQVKETLKDTSVVNSTRWKVYDVLLRTGLPVECGTGALTKMNRVKLGLPKEHYLDACCVGQSTXXXXXXXXXXXXXXXXXXXXXXXXXXXXXXXXXXA

SEQ ID NO: 2583 - protein, 430 aa, unidentified
  source 1..430: note = human gut metagenome
LETRNKEIPKLMKKRKDSRRARRTNGRRCRRQRRAKANGTLSKKCVKQTTAQNGSVSKRAKKIGVIKRHLPGCEKEALCIGIKNKEAKFNNRTRPEGWLTPTANQLLQTHINLVKKIQKFLPISDVVLEVNKFAFMRLDNPNIQKWQYQQGPLYQKASLEEAVSEMQEHHCLFCKNTIDHYHHVVPQHKNGSNTIDNIVGLCTKHHDLVHKETAWQEKLAKKKTGLNKKYGALSVLNQIILALTKGLSFLFPKHFFVTTGKNTYDYRTAHSVSKDHWLDAYCIACSVLPNDVCDSSINSHVPYELKQFRRHDRRALHKENMSRVYTLNGKKVATNRHKAIEQTTDSLEEFRQRQPNDVYKLKVKEHHPEYRNPKRNFPGCVFLVGKRTHVMQGSSGSHNGKADGYYDTNGNSYSSGKCKFVAKNEGIVFA

SEQ ID NO: 2584 - protein, 470 aa, unidentified
  source 1..470: note = human gut metagenome
MSVFVVGLNGCRLMPVSERKARLLLKGGKASVYRKVPFTIKLNYKTGSTVQPGYLGIDTGSQHIGVSVVRQDGTVLHKEEIGLRDSMSKRKLLESRASLRRGRRYRKTRYRHPKWKPKTKRIYSEKADRKGRHWKKQKNMFTSKRQAGWLPPSLQSKTDHHIQWIRKLLHLLPEGYRLSIELGRFDPARMKDPGIHGELYQKGPQYDYENVRAYVLARDGYTCRVCKKKGGKLHVHHILYRSRGASDDPKYMAAVCSNCHTTENHLPGGILYQWMQEQKKFTRGLRDATFMNILKKRLRRAFPDAVFTYGNITKADREKLGLPKSHGNDATAIALVKTGVTSVRDEEPVIHIQQVRRKKRSLHEETPRKGRKEPNRTASRNDKNTRSVTVSKGSREKKVSMTACLFDRVELDGKKGWITGFTGTSCYVKDKEDNYICTSPKYKQVSISRLRILHHCGNWAIGAEKPLGKG

SEQ ID NO: 2585 - protein, 298 aa, unidentified
  VARIANT 242..275: note = X can be any naturally occurring amino acid
  source 1..298: note = metagenome
MLVYVLNRHGKPLMPCKPSKARKLLKQGKAKITQREPFTIQLIYGSSGYKQPITLGIDAGSKFIGVSATTETQELFSAEVELRNDIVQLLSERRQYRRSRRYRKTRYRKPRFLNRVRSKNKGWLAPSIENKIQTHLKIIEKVHKILPITKIIIEVASFDIQKIKNPNIEGVEYQQGEQLGFWNVREYVLWRDNHTCQICKGKSKDNRLNVHHIESRQTGGNAPNNLITLCETCHNKYHKGEXXXXXXXXXXXXXXXXXXXXXXXXXXXXXXXXXXLSTPNKADNFITSSARNVPCFNL

SEQ ID NO: 2586 - protein, 311 aa, unidentified
  source 1..311: note = metagenome
PSIQHKYDSHIRFINFLKKLLPITDVVIEVANFDTHKLKNPEVEGIGYQQGEQEGFYNLREYILYRDNYKCQLCGRENLPLEVHHIGFWKQDRTDRPSNLITLCIKCHTPKNHQENGKLWGLKPNLKPLREATFMSTVRWKLVNVLNCKYTYGYITKFKRIALGLEKTHYNDAFSIAGGTNQVRTKPIMFEQIRRNNRSLEKFYDAKYIDIRTGKVATGQELFCGRRTRNKNYNTENLRKYRGQKISKGQRRIRTQRYFYQPKDIVIYNGRKYVVKGVQNKGSYIKLEKLNKPVKVNLVKPYEFRKGFCVV

SEQ ID NO: 2587 - protein, 421 aa, unidentified
  source 1..421: note = fermentation metagenome
MKVYVISKHGKPLMPTTPARARKMLRDGKAKCIKREPFTIKLLFNTSSYTQPITLGVDTGSSHIGSAAVDDAGNVLYLSEVEIRNDIADKMKQRAKYRRNRRNRKTRYRQARWLNRKNSIKSDRFSSTMVSKINSHLKEITFVKSILPIAHVILETGTFDPHALKNPDVLKNKWSYQRGANYGFANTKAFVLDRDSHICQHCKGKSKDVKLEVHHIVFRSNGGSDEAENLITLCKTCHDKVHSGAIKLKGGKSKGQLKHATQMNSIRKQLSRLLLDAEETFGYITKEHRYLMSLPKEHYFDAVAIASMNNICNEGLISVNFQTCLLRKKCIAKGDYQQTKGIRSEQSIQTGKIMGFRKFDKVKYMGNEYFIKGRMSTGYAILMNITGNKAPLKPIPKFEKMERLNARKSWIIQQENIQNIA

SEQ ID NO: 2588 - protein, 414 aa, unidentified
  source 1..414: note = human gut metagenome
MPCSPAKARLLLKEKKAIVKRRTPFTIQLTIATGETKQPVGLGVDAGYKHVGLSASTDKAELYASQVELRQDITDLLSARRALRRARRNRKTRYRAPRFNNRIRTKRKGWLAPSVENRINAHLSRIEAVLRLLPVTKITVETASFDMLLLKNPDIAGKEYQEGEQLGFWNVREYVLFRDGHVCQHCYGRSKDPVLNVHHLESRRTGGDSPGNLITLCETCHEALHRGEIALKTKRGHSFRAEAFMGMMRWEVLNRLKASHSELEVNNTYGYRTKHARIVNGIDKSHCADAFCIAGNLGAERLCEFFFQKQTRRNNRQIHKLSILKGGIRKRNQAPFEIKGFRLFDKVACKGEESFIFGRRSSGYFDVRKLDGTRISAGISYKKLRLLEKRRTYLTEIRKEEALPPLPEGRGLRA

SEQ ID NO: 2589 - protein, 424 aa, Caldicoprobacter sp.
MVYVISKTGKPLMPTERYGKVRRLLKHRLAKVVKREPFTIQLLYDTTTYTQPVTVGLDIGSKIAGVSAVTEKKEIFSAEIELRDDIKGLLLERRQYRRMRRYRKVRYRKPRFLNRARDDGWLAPSLQWKVDAHIRIVEMLSMIMPIGKVVIEVAPFDTQKILNPGIEGEDYQNGVQKGFWDVREYCLWRSGYKSELSGKRGTLEVHHIVPRSEGGTDTPSNLIVLTAEEHKAVHEGRIKIPKSKIEKIKLLKDAAHVATIGWYIVNRLRERYSVEVTYGSITKAKRLGCGMTKSHRNDAFVISDGTLQERVKEWYLGKFLRRQNRSLHRANFIKGGVRPVNTIKEAYGFRRYDRVEYEGIIGIIAGLRSSGYFAVRNLSGEKIHDSAKHSRLRLVERAKTLMLERMEERIPLHLEEDGVSCVRL

SEQ ID NO: 2590 - protein, 414 aa, unidentified
  source 1..414: note = human gut metagenome
MIYVLNYDRQPLMPTDRCGRVRHLLKERKAKVVKCCPFTIQLLYQNTNYTQPISLGIDAGSKHIGMSATTETKEVYASEIELRNDIAKLLSDRRALRRGRRSRKTRYRKPRFQNRKRGEKWLVPSIQHKIQTHLDATEAVCKILPITKITVETASFDIQKIKDPEIKGTGYQQGDQLGFWNVREYVFFRDGHTCQCCKGRSKDKILNVHHIESRRTGGNAPNNLITLCETCHKGYHNGTVKLPKRIHRGMSFKDAAFMGIMRWAFYNELKTIYPDVHMTYGYITKNTRIKNGLPKEHYIDARCISGNPTAAPLGIVYYQKKVRRHNRQIHKLKILKGGIRKRNQADYLVKGFRLFDKVKYQKKEYFIFGRRSSGFFDIRTLDGAKINKGSLSYKKIQFLETPRGYLIEQRKEMA

SEQ ID NO: 2591 - protein, 409 aa, unidentified
  VARIANT 356..389: note = X can be any naturally occurring amino acid
  source 1..409: note = metagenome
VDGNNNVLYLSQIEVRNDITDKMKQRAKYRRNRRNRKTRYRKPRWLNRKNSIKKDRFSPTMISKINSHLKEIKFVKSILPITNIILETATFDPHALKNPAVLYNKWLYQKGINYGFANTKAYVLNRDNYICQYCKGKSKDSKLEVHHIIFRCYGGSDEPENLITLCKTCHDKLHAGKINLKRNGKVKGQLKHATQMNSIRQQLLRLLPEAVETFGFITKEHRQLMELPKEHYYDAVAIACLKNIKNTGLIDVNFKTNNILLKKCIADGDFQQTKGIRSEQRIITGKIRGFRKFDKVKYQGKEYFIKGRMSTGYTILMDIAGNKIDLKPIPKFDKMERIQARKSWIISQETIQNIYXXXXXXXXXXXXXXXXXXXXXXXXXXXXXXXXXXPLPLCGHGRWHRRHGFRPCP

SEQ ID NO: 2592 - protein, 231 aa, unidentified
CGVKDVPFQVEHIHPRAKGGSNSITNLTLSCEKCNTKKGTKDIKDFLKKDPSKLEKILKQAKRPLADAAAVNTTRLALLFVVKATGLPVETGSGGLTKFNRSQQNLEKTHWIDAACVGQSTPILNIKGVKPLLITANGHGTRQSCRTDKYGFPSRYVPRFKFVNGFQTGDIVKAVVTKGKKIGAYIGRVAVRTSGSFNISTTSGLIQGISYKYCKSIHKKDGYEYGKSKIC

SEQ ID NO: 2593 - protein, 451 aa, unidentified
  source 1..451: note = human gut metagenome
MSVAVISKTGIVLMPTSEYRARKLLDSGKAIIYGYRPFTIQLTERETGDVQPVELCVDTGYIHIGVSVKSEKHEYLGLQVDTLTDEKAKHDDRRMYRRQRRNRKRYRKSRFDNRKRKSGWLAPSLEHKKEINLQIITAICGVYPIADITLEMGNFDTQVLKAKEEGKQIPQGTDYQHGERYGIATLREAVFTRDGYKCQCCDRGIKDGAILHAHHIQYRSQGGTNRMSNLITVCEKCHTPANHKPGGKLYGWKPKIASFKDATYMTAVRWQLYRKVKEMFPGIHVKITYGAETKERRRILDIKKSHVNDAFVMGQFHPKHRSLPVLYKKKRRNNRCLEKFYDAKYIDSRNGKTRSGQELFNGRISRNHKKDSENLHRYRKKKVSRGKRNIRVQRYKIQPHDIVLFDGKKYETTGCHNKGTRAILLPEKKSKSVEKLTIYKYAGGYYPSKFA

SEQ ID NO: 2594 - protein, 313 aa, unidentified
  source 1..313: note = metagenome
LPPSIRARIDAHYNIVKKICNIMPIKEIVVEVGQFDVQAIINPDIQGEEYQNGELKGFDSVKEYVKIRDNFQCHYANLRPDIPCSGKLTVDHIIPRSRGGTDNPTNLVCCCEMHNMAKGNMSYKEFTGHEPPSIRDFRPTVFMNVLMEHLVPRLQELAPTKYTFGYVTRRRRKEWGLEKSHINDAIAIAGIKPRWQDNVWYCIRQVRKKKRSLHEEIPRKGRNKPNREAKRNNKNVKEIVTKSGKWCLWDKVKITTTGEIGFISGFTGKWVYVQDIDGNYLQLSDKYKQINPSELVLICRNNNYITQQFISTL

SEQ ID NO: 2595 - protein, 279 aa, unidentified
  source 1..279: note = human gut metagenome
VVVETAEFDLQLLKAIADGKPVPQGEDYQKGEMYGHYNVRQYVLWRDNYTCQCCGAHATKKKEVRLHVHHLESRKVGGDAPDNQVTLCESCHEKLHKGLIAEKDFKKRKRRSTWDATFMGIMRKTLMQRLCSELPIPVIETRGYITKATREKLLVLPKSHTNDALAIAQGKHGFNVGYLPGILQIDMIYTIRPVRHHNRQLHKAAILKGGIRKSNQAGKYVFGYRLFDKVQFNGQDCFIWGRRTTGIFTIKTINGKMIKDGISFKKLKPVEKSTSYLIA

SEQ ID NO: 2596 - protein, 386 aa, unidentified
  VARIANT 304..337: note = X can be any naturally occurring amino acid
  source 1..386: note = metagenome
MRGEPLMPCSPRKARILLKENKAKVVKREPFTIQLKYATGEVKQDINLGIDAGSKQIGVSATTEKEVLFEAEVELRNDIVELLATRRQYRRSRRNRKTRYRQARFNNRKKPKGWLAPSIQHKIEAHIKTVAMVHKILPITQTIIEVAQFDIQKIKNPNIEGKEYQEGDQLGFWNVREYVLWRDNHQCKGKTNCKNKILSVHHIESRKTGGNAPNNLITLCEKCHTDLHAGKLKLNLKRGTSYRDATFMGIMRWAVYNKLKELYPNISLTYGYITKNTRIKNNLEKSHIIDARCISKNPLATAQXXXXXXXXXXXXXXXXXXXXXXXXXXXXXXXXXXEKCHPKIKKDTDTRGLYRLYIGLVIQGILFYLYGIIFLINNNLMEDFVS

SEQ ID NO: 2597 - protein, 440 aa, unidentified
  source 1..440: note = human gut metagenome
MSTGLRAEQAEPAGIRKGETLKVFVLNMRGKPLMPCSPAKARHMLKAGKAVVARRTPFTIKLTIATGETKQDVTLGVDAGAKYVGISATTEKEEVFASEVELRQDITGLLADRLAFRRARRNRKTRYRESRFNNRVRSKNKGWLAPSVENRIQAHISRIEAVCRVLPITKIVIETASFDIQKIKNPEVEGTGYQQGDQLGFWNVREYVLFRDGHVCWHCRGRSKDLILNVHHLESRKTGGDAPNNLITLCETCHKAYHAGKIKLKARRGTSFRAEAFMGIMRWTLLDRVRRAHPELPVENTYGYLTKHTRIVLGLSKTHCADAFCIAGNLNALRRGDFLYQRQTRKHNRQIHKCSILKGGVRKLNQAPFLVKGFRLFDKVKCKGRIGIIFGRRSSGSFDVRTLDGARLSAGISSKKLMLLEKRTTFLTQLRKENGASSPS

SEQ ID NO: 2598 - protein, 462 aa, unidentified
  REGION 1..462: note = Ga0307928_10011429
MQKLETRNTYTPTDTSLVRSNCDSVIKHGQHSVQVLQSLKTFSNSSEENQHQHTDGHNVIVYVLNKNGKPLMPCKPAKARHLLEQNKAEVVSRKPFTIQLLWMCEHNTQPIKLGIDAGYKTVGVSAVSVKKELFSAGVTLRTDIPKKLQKKAMYRRNRRNKLWYRQPRFLNRSKPKGWLAPSIQHKLDSHLRIVEKIKKILPITKTIVEVAGFDIEKIKNPDIEGKEYQQGEQLGFWNIREYVLHRDNHTCQHCHGKKKDRILQVHHINGKSEGATDRPEELLAVCKTCHSKHHQGIDSIPKKKIKQFKLETFMTTVRWKIVNTLGCKHTYGYITKNNRIKQRLSKSHVNDAFIIAGGTTQSRCKSYITKQVRRNNRHLQISRKGFKPSIRRQHYSLQPMDIVKYNNMLYLVKGVHSKGERVVILGFVKNCSVIIKKVELLVYGKGIQFIYPLKQIDSSEVV

SEQ ID NO: 2599 - protein, 380 aa, unidentified
  source 1..380: note = metagenome
YGSSGYKQPINLGIDLGAKHIGVAITSKNNVLAKGEIELRDDVSSLLETRKVYRRSRRGRKTRYREPRFLNRTKSKKKGWLPPSIQNRIDNTFMWIDRFCNLLPNPNLIIEVGKFDVQKMINPDIGGVDYQKGQTYGYHDIRYFVFARDNYTCQVCKKKNKILQTHHIIYKSKGGSDRPSNLITVCTDCHTHKNHQKGQILHQWMTKKKKAPQYKEAPFMNTIRKKVFNRYPEAKIVYGTYTTPRRKELGLEKTHYNDALAISGIEERFRDDTGIFKIKQFRKKKRSLHEATPRKGRKEPNREAKRNKKNTKYQNGFYLNDKVRAFGKVGFISGFTNGGCYIKDIENSYITIPDKTYKQVSFKHLEFINHNNNWQFISRL

SEQ ID NO: 2600 - protein, 413 aa, unidentified
MPCHPARARALLRKGRAKVARRFPFTIQLKDRETGVCQPLELKLDPGSRTTGLALSLEGKRGRRIVFAANIAHRGLAIREALTTRRAIRRSRRNRHTRYRAPRFDNRRRPQGWLPPSLLSRVENVFNWAKKLQRFSPIRAIAIETVRFDTQKLVNPEVSGVEYQQGELLGYELREYLLEKWQRACAYCGKKDLPLEVEHIVPSSRGGSNRVSNLTLACRPCNQKKASRSVETFVKDKSKLTRILSFAKAPLKDAAAVNATRFAIAERLAKLALPLSLWSGGRTKHNRMRQDYAKDHWIDAACVGESGTKVYIPPKLKPLKVQATGRGSRQQCLMDRYGFPRTGPKAQKRVHGFQTGDIVHAVVNQGKKKGKYSGRLAVRSTGNFNIKTGTETIQGIRYKDCRILQRFDGYMYA

SEQ ID NO: 2601 - protein, 426 aa, unidentified
  source 1..426: note = human gut metagenome
VTTFVFVLDRKGRGLMPCHPARARELLKKGRARVHKVFPFTIRLTDRELENSSVQPMLIKIDPGSKETGIALVREEKNKEHHALYFINLQHRGQQIRNALYKRRCLRRSRRSRNLRYRSPRFLNRRRAEGWLAPSPQHRADSILSWVSRLRKITPVERISQELVKFDTQLTQNSKIEGIEYQQGELAGYELREYLLEKFGRKCIYCGADNVPLNIDHVIPKSKGGSNRVTNLVLACVQCNQKKGSRSIEEFLKDKPEVLRQIKNQLKQPLKDAASVNATRWKLFNKLKSTDFPFEVGSGALTKFNRKKFGIPKAHWLDALCVGNVPSVTNWRNLNVLNIKCCGRGAYQRTRTDKYGFPRGICMRQKKVYGFSTGDMVKAIIPKGKKKGVYVGKVAVRKTGSFNLQTSGQTIQGISYRYCRLITHSD

SEQ ID NO: 2602 - protein, 510 aa, Micromonospora sp.
VLPQPRTLESASADTAPRCHETGHGRRKAAGVRHGRGETGVSRRHPEPASAGTGAGREAHTHPVVFVVDRHHRPLQPCSPARARKLLASGRAVVHRHTPFVIRLKDRETADSQVDGVELGVDPGSKFTGIAVFRTDNDVRTGLFAIEVRHRGGRVRDKLAARSAFRRGRRSRNLRYRAPRFLNRRKPDGWLAPSLRHRVDNTMSWVQRLCRWAPVTGVHVERVAFDTQLMQNPNIGGVEYQHGTLHGYEVREYLLAKWGRKCAYCGVAGVPLNIDHIVARSRGGSDRVSNLTLACVPCNQAKDATPVDVFLADRPTVLARIRRQAKLPLRDAAAVSTTRRALWQALAATGLPVEVGTGGRTKWNRHQTGAPKTHTLDALHVGTITAVRSCPGHIMVATATGRGCYARTRCDRYGFPRLRMPRSKTVYGFQTGDLVRAVVPAGQNKGRHVGRVAVRTTGKFNIRTSHALVQGIHHRHFRLLQRADGWAYTREEERRFIPALNGQVSTPQRR

SEQ ID NO: 2603 - protein, 427 aa, Parasutterella sp.
LRVFVLNKRGKPLMPCSPAKARLLLKEKKAIVKRRTPFTIQLTIATGETKQPVSLGVDAGYKHVGLSASTEKAELYASEVELRQDITDLLSARRALRQSRRNCKTRYRAPRFDNRIRTKRKGWLAPSVENRINAHLSRIEAVLRLLPVTKITVETASFDMQLLKNPDISGKEYQEGEQLGFWNIREYVLCRDGHVCQHCYGRSKDPVLNVHHLESRRTGGDSPGNLVTLCETCHKALHRGEITLKAKRGQSFRAEAFMGIMRWEVQNRLKASHPELEVNNTYGYRTKHARIANDIAKSHCADAFCIAGNLGAERLGEFFFQKQTRRNNRQSHKLSILKGGIRKRNQAPFEVNGFRLFDKVACKGEEGFIFGRRSSGFFDVRKLDGTRISAGISYKKLHLLEKRRTYLTEIRKEEVLPPLPEGRGLRA

SEQ ID NO: 2604 - protein, 431 aa, unidentified
  source 1..431: note = human gut metagenome
MPDKVYVISRLGHPLMPCSPAKARHLLDDGKAKVVKRTPFTIKLLYGSTEYTQPVILGVDAGSKTIGLSASTTKEELFAAEVMPRNDVVENLSTRREFRRARRNRTTRYRKPRFNNRVHSKNNGWLAPSVEVKIQEHITSIKRVCAILPISKIVVETAEFDLQLLKAVQDGKPVPEGEDYQKGEMYGSYDVRQYVLWRDNYTCTCCGVKGTDKKSVKLHVHHFESRKHGGNAPDNYGTLCEDCHKKLHLGIITDISLKTRKRPSTRGAAFMGIMRKTLMQRLITGLSIPVAETKGYITKAAREEILKLPKTHTNDALAIAQGRHGFGIREQAYVKPTNRIYTVRPVRHHNRQLHKATMLKGGIRKLNQASKYIFGFRLYDKVLYQGGECFVWGRRRSGSFLLRTIDGTKVKDGVGYRNLTLLERSTNYLIA

SEQ ID NO: 2605 - protein, 413 aa, unidentified
  source 1..413: note = human gut metagenome
MTSYAFVLDANGKQLAPTKEQKAWFFIRKKRASLVSKYPIVIQLMKEIPEKEICQDEIRCGIDDGGLHVGIALVQKCKTKNKVVFKGTMEQRNDVKHLMEVRRGYRRYHRYHKRYRQARFDNRKSSKREGRIAPSILQKRQATIRVIHWLNKWINITNYWLEDVSVDIRALTDGYQSYRWQYQKSNRLDENIRKAAILRDGGKCMECGKSNCRLEVHHIKPKRRNGSNTLDNLITLCESCHQKTEGQEELYMDRYFSLLKSSDNKNLNYAQHVMIGKMWLRKQLSGLGVLYLTSGGDTANKRIDWNIEKSHANDAVCITDLRPDTCDVKEWTMKPMRRQSKAKTDHVLGIHHRDLVEYTFKNGETHRGYVTALYPEQKAINFQSPTKHCKKVNARKCKLLWKYSKIYWFENAS

SEQ ID NO: 2606 - protein, 411 aa, unidentified
  source 1..411: note = human gut metagenome
MENKIEYCFVIDKNNKPLAPTKVNKGWYLIRKGRAKLKSKYPMVIQLEKEVKSNEDDESHMVCGIDDGSTHVGLAIVQKCLTKNKVVFKGTIEQRQDVKRLMDVRRGYRRYHRCHKRYRQARFNNRSSSKRTCRLAPSIKQKKDAILRVLYQLNSWIDIQEYYLEDVCIDIRAMTDDYKPYRWQYQKSNRLDENLRKATILRDGCRCQECGKSNCILEVHHIRARRYGGADTIGNLITLCKKCHDKTESREKDFEEGYFNMIKSKPKRFDYAMHVMQGKTYLREKISELGILHLTNGGETANKRIEWNIVKSHSNDAICITDGIPDTCDIKEWIIKPMRRKSKAKTDNVLGIKHRDLVSYTYKSGETHTGYVTALYPEQLALNFQSKTKHCKKVNARKCRLLWKFNKIYWL

SEQ ID NO: 2607 - protein, 455 aa, unidentified
  source 1..455: note = human gut metagenome
VLQTTNPFQHWRRITTDRKVEQTEPVRYPSMENTLKVFVLNMRGQPLMPCSPPKARKLLRAGKAVPVRRTPFVIQLAVPTGEAKQPITLGVDAGYKHVGLSATTAKEELLASEVELRQDVTGLLSNRLALRRARRNRKTRYRAPRFDNRVRSKHKGWLAPSVENRIQAHISRIEAVCRVLPITKIVIETASFDIQKIKNPEVEGTDYQQGEQLGFWNVREYVLFRDGHVCQACKGRSKDLILNVHHIESRKTGGDAPGNLITLCEACHKAYHAGKLKQFSPRRGASFRAETFMGIMRWTVLNRLRERHPELPVTNTYGYLTKHKRIVAGLPKTHCADAFCIAGVLDAKRRGEYLFQKQTRRHNRQIHKLTILKGGVRKRHQAPYLVHGFRLFDKVLCKGEVGFIFGRRSSGAFDVRRLNGTKISAGISYKKLSLLEKRKMFLTELRKEGRDSSRV

SEQ ID NO: 2608 - protein, 426 aa, Geobacter sp.
MNGVLVVSNTRKPLMPTSQARARMLLTIGKAAVLRRFPFTIILKDRADGNVQPVRVKVDPGSRETGISLVNEANGVLIFAMVLVHRGRQVKSSLDSRRAIRRSRRNRNTRHRAPRFDNRARAKGWLPPSLQHRVETVSTWTKRFGRFAPIVSVSMELVRFDLQQMENPEICGVEYQQGTLAGYEVREYLLGKWDRRCSYCGAENVPLQVEHIVARTNGGTNRINNLCLACEPCNVRKGTQLIDVFLKKKPEVLAKVLALAKHPLMDAAAVNATRWALFTRLKDSGLPIEAGSGGKTKFNRSLQGYPKAHWIDAACVGQTGEAVILNPNLIPLVARATGHGCRQVTRTDRFGFPRQAAKAGGSAFGFRTGDMVRAVVPKGKHVGVHVGKVAIRATGSFDVLKKIGRAGGISYKHCQIIHRRDGYVYF

SEQ ID NO: 2609 - protein, 413 aa, unidentified; identical to SEQ ID NO: 2605
  source 1..413: note = human gut metagenome

SEQ ID NO: 2610 - protein, 421 aa, unidentified
  source 1..421: note = human gut metagenome
MVYVLNRIGQPLMPCKEAKARKLLKNHKARVDKREPFTIQLLFDCENRIQDITLGIDAGSKHLGLSATTEQKELYAADVELRSDIVELLSTRRQYRRTRRGRLRYRAPRFCNRVRSRNKGWLAPSVEQKIKTHLRVVNDVCRILPVSKIIVETAAFDVQKIENPDISGEGYQQGSQLDFWNVREYVLWRDNHECQCCHGKSMDKILNVHHIESRKTGGDSPKNLITLCKNCHDQYHMGKINPNLKCREPLRDAAFMGIMRWSFYNRLKNEYLNVSMTYGYITKNTRIQHDLPKEHYTDARCISGNPQAEPLGYYFCQKKVRCHNRQIHKANIQKGGIRKRNQAAYLVKGFRLFDKVRYDNQAGFVFGRRANGYFDLRKLNGEVIHRSASYKKLELLDTRKTLLTERRQAVPLKAKAMSIPA

SEQ ID NO: 2611 - protein, 306 aa, unidentified
  source 1..306: note = human gut metagenome
LAPSVEVKIQEHITSIKRVCRILPVSKVVIETAEFDLQLLKAIEEGKPVPQGEDYQQGEMYGHYNVRQYVLWRDGYTCQCCGAHATKKKEVRLHVHHLESRKVDGDAPDNQVTLCESCHEKLHKGLIAEKDFKKRKRKSTRDATFMGIMRKTLMQRLCSELPIPVIETRGYITKATREKLLVLPKSHTNDALAIAQGKQGFNVGYLPGIVQINKIYTIRPVRHHNRQLHKATILKGGIRKSNQTEKYVFGYCLFDKVQFNGQDCFIWGRRTTGIFTIKTINGKMIKDGISFKKLKLLEKSTSYLIA

SEQ ID NO: 2612 - protein, 325 aa, unidentified
  source 1..325: note = metagenome
RKTRYRAPRFDNRIRTKRKGWLAPSVENRINAHLSRIETVIRLLPVTKISVETTSFDMQLLKNSDIAGKEYQESEQLGFWNVREYVLFRDGHVCQHCHGRSKDPVLNVHHLESRRTGGDSPGNLITLCETCHKELHRGEITLKAKRGQSFRAETFMGIMRWEVLDRLKASHPKLEVQNTYGYRTKHARIVNGIAKSHCADAFCIAGNLGAERLGEFLFQKQTRRNNRQIHKLSILKGGIRKRNQVPFEVKGFRLFDKVACKGEEGFIFGRRSSGYFDVRKLDGTRISAGISYKKLRLLEKRQTYLTEIRKEEALPPLPEGRGLRA

SEQ ID NO: 2613 - protein, 408 aa, unidentified
  source 1..408: note = human metagenome
MVYVQDIDGKPMMPTTRHGKVRRLLKDSKAVVVNTCPFAIKLMYKTSDYKQEIVLGVDAGTKHVGLSATTKSKELYASEVILRSDVVELLSTRRELRRTRRNRLRYRKPRFDNRVKNKYHGWVAPSVRYRIDVHIRIIDSICSILPISRIIVEVAQFDTQKIKNPDIYGNEYQEGDQLGFWNVREYVLARDGHKCQHCKGKSKDPILNVHHIESRKTGGDSPSNLITLCETCHKEYHKGNIDLKVKRGKSLRDAAVMGIMKWKLYDELKSRCDNVSMTFGYITKYNRIKYGIEKSHISDAFVISKNFNALMLEYHYKVKLVRRHNRQIHKQKVLKGGVKKPNQSPFEVFGFRLFDRVMFEGNCYFIFGRRKSGSFNIRDIDGGNQRDVTYKKLKLLRCKRFMIQKETN

SEQ ID NO: 2614 - protein, 424 aa, Moorena sp.
MRVFVLDKNKKPLDPCQPARARILLKQGKARVLKRYPFTIIMPELEVKNCVTHEHQLKIDPGAKTTGLAIVQDNKVVWGAELTHRGFQIRDALISRRRLRRSRRNRKTRYRQPRFLNRKRSVGWLAPSLMSRVHNILTWTKKLSRLCPIVGISQELVRFDTQKMENPEISGVEYQQGTLYGYELREYLLEKWNRQCAYCGAANTPLEIEHIKPLARGGSNRVCNLAIACHKCNQTKGVQEIEQFLSGKPSVLKRVLAQAKKPLANAAAVNSTRWKLYNHLKSTGLPIETGSGGLTKYNRCRQNLPKTHWLDAANVGKVDNLYIESYQPLLITAKGHGTRQMCRTNKFGFPTRYVPRYKEVKGFQTGDIVKAIVTKGKKIGTYTGRVATRQTGSFNISTKPGLVQGISHKYCSVIHRKDGYYYSL

SEQ ID NO: 2615 - protein, 447 aa, Marinobacter sp.
MSVFVLDRRKQPLMPCSEKRSRLLLGRGRALVVRAYPFTIRLKDRTGGIVQPVRIKIDPGSKTTGIAVVRESGQKQHVLALMELAHRGRQISKSLEQRRAFRRRRRSQLRYRAPRFLNRTKPRGWLAPSLQHRVDTTKSLVNRLRSLVPVESISQELVRFDTQKMENPEVSGVEYQQGTLLGYEVREYLLEKWGRECAYCTGKDTPLQIEHIDPKANGGSNRISNLTLACRPCNQEKGRQPLADFFASSKRLKNHQARLDRILKQCKKPLRDASAVNSTRWALYQTLRKTDLKVEVGTGGRTKFNRRRLNIPKTHALDAACVGEVEIVEGWNVPTLEIKATGRGSYQRTRLTRYGFPRGYLIRQKKVQGFQTGDMVRAVVPTGTKAGTWLGRVAVRKTGSFNIQTSSGAIQGISHRHCVLTQRADGYGYHIQPNQPKEEGDREHESR

SEQ ID NO: 2616 - protein, 502 aa, unidentified
  source 1..502: note = human gut metagenome
MSIIYVQDRHGKPLAPTTRGGHVRRLLDSKQARVVCGNPFTIRLMYGVDPCTQGFILGIDPGRTNIGVTVAAADGTCVFSAKAETNNKDVPKRMKERKAHRQASRQGERKRRQRRARKNGTCFGERKRILPGCKEPITNHYITNTEARFMNRARTKGWLTPTANQLLQSTISLVRKVCKFLPVTDVVLELNEFAFMAMDDPGIQRWEYQKGPLYGYGSVEAAVYTQQDGHCIFCEQAIAHCHHVIPASKGGSDTLENRAGLCGGHHDLVHKEQSWTDKLAELKAGMNKRYAALSVVNQIIPRLADELGKMFPGHAFATNGWSTKQFRDAHGIPKDHNTDADCIACSILENPTIKLPEKVYELRKFRRHDRAQISRMEDRNYYLPGADPKTGKPKKVLAAKNRHKRTEQKTDSLEEFRAAHPNDVGRLMVARGGPKHKDPNRVLPGAIFQVETSSGNVEQLVLQGSHGRDKNGQPLYMEFVGQGNFRPNRCKYVARGRGWQFV

SEQ ID NO: 2617 - protein, 415 aa, Bacillus sp.; identical to SEQ ID NO: 2431

SEQ ID NO: 2618 - protein, 450 aa, Scytonema sp.
MSNYVFLIDQNKTPLNPVHPAQARKLLDSGKAAVFRRYPFTLILKRIIENPNVYPLTLKIDPGSKFTGIVLVTNQGNVIWGMELQHRGQQIKDALEHRRAVRRGRRNRNTRYRKARFLNRKLNHGWLAPSLRHRVLTTETWVKRLQKFAPIGSIVQELVKFDTQVIQNPEISGTEYQQGTLHGYECREYLLEKWNRQCAYCGVKDVPLEIEHIQPKSKGGSDRISNLCLACHKCNQRKGNKDIKDFLKGKPEVLNRILKQAKAPLKDAASVNSTRWVLFNILKSFGLPVRTGTGGQTKFNRIQFDLPKAHWIDAACVGQCSAVDGFPVAGNCRSRSVSEGLTRKGVVETIKLATTKILRVKATGFGGRQRCQTDKFGYPQKHRPLRPILGFCTGDIVRADVLKGKYAGTFTARVCPMSHGYGEFVIDKKRRSIKLDYLTPVHRKDGYDYA

SEQ ID NO: 2619 - protein, 453 aa, Halomonas sp.
MSVFVLDKQKHPLMPCSEKRARLMLERGRAVVHKRYPFTIRLRDRIGGETQRLALKLDPGSKATGVAVVRSSAEGQHVLSLFELLHRGFQIREALTQRRAFRRRRRNQLRYRAPRFNNRTRREGWLPPSLQHRVDTQLAWIHRLRLLGPITELAQELVRFDMQQMQNPEISGVEYQQGTLMGYEVREYLLEKWGRECAYCGTTDTPLETEHVVPRSRGGSHRVSNLAIACHDCNQAKGNDSLETFFSRDKGLKTRLKANKLSAETRYQRVIREQKRPLRDASAVNATRWALHGALANTGLPVEIASGSQTKFNRRQLGVPKTHALDAACVGQVNALHGWQVPTLSIKAMGRGSYQRTRLTKHGFPRGYLMREKRAKGFQTGDMVKAIVPTGKKAGTHVGRVAIRKSGSFNIQNEHGAVQGISHKYCSILQRGDGYRYHRKSSIHQQGEGKRAA

SEQ ID NO: 2620 - protein, 432 aa, Moorena sp.
MRVFVLDKNLKPLDPCRPARARLLLKQGRAKVYRKYPFTIIILDLEEENCVTHKHQLKIDPGAKTTGFAILSPQGTLREQNNVVIWGAELTHRGFKIRDALTSRRQLRRGRRNRKTRYRKSRFLNRSRPDGWLPPSLMHRVLTTITWVKKLIRLCPISGLSQELVRFDMQKIENPEIKGYEYQQGELQGYEVREYLLEKWGRKCGYCGASDTPLEVEHITPKSKGGSDRVSNLTIACHDCNQTKGNQEIEQFLSGKPEVLKRVLSQVKKPLADAAAVNSTRCSLYEELKLTELPVETGSGGLTKYNRCRFNLPKTHWLDAACVGVVDSLYVEVKKPLLIAAKGHGTRQSCRTNKYGFPTRHCSRTKIHKGFQTGDIVKAIVTKGKKIGTYVGRVATRKTGSFNISTVNGLIQGISHKYCSTVHRKDGYSYSF

SEQ ID NO: 2621 - protein, 368 aa, unidentified
MHVFVLDKDKIPLAPCHSAKARRLLKFRRASVFRRYPFTLILHEIEAKDCVVPETQLNASAPLASTSLSVESERSRGLKIDPGSKTTGLAILSENRVIWAAELAHRGQQIKNDLEKRRALRRSRRHRKTRYRKPRFLNRTRQKGWLAPNLLHRVETILTWVNRLRKLCHVAAISQELVRFDTQLLQNPEVQGVEYQQGELLGYEVREYLLQKWGHKCAYCGTENQPLEVEHIVPKSRGGSDRVSNLTLACHSCNQAKENRDIREFLSGKPSILNHILKQAKVPLKDAAAVNSTRWKLYQQLKETGLPVEVGTGGLTKFNRTRSGLPKTHWRIGGLCREIDSRSIRCRGRETFTRCSQRSRSSATMSFR

SEQ ID NO: 2622 - protein, 406 aa, Scytonema sp.
MVKPRYARKFPFTIILKESRPDVPVQPLRIKIDPGSKTTGIAVINDSTGEVVFTADLKHREFSVRVALTSRRQLRRSRRARKSRYRQPRFNNRKRPDGWLPPSLMSRVYNIQTWVRRLMRLAPITAISQELVKFDTQLMQNPALCGKEYQQGTLAGYETREYLLEKFGRKCVYCDKQDVPLQIEHIHPRAKGGTNRISNLTLSCEKCNIKKGTKDIKDFLKKDPEHLKKIEAQAKKPLADTAAVNSTRFKLLEVLKSTGLLVETGSGGLTKFNRTKLELPKTHYFDAACVGRSTPDKLIVKGVKPLIIKATGHGSRQMSVTDKFGFPKSHKTNTKFHFGFTTGDIVRANVPKGKNAGTYTGRVTTRKIGQFDINTGTKTLQIINHKYCTVLQRHDGYLYLLSSIVH

SEQ ID NO: 2623 - protein, 419 aa, Geobacillus sp.
LFVYIINKHGKPLMPCSPRKARLLLKQKKAKVVRRTPFTIQLLYGSSGYKQPVSLGVDMGTRHVGISATTKKDVLFEAEAQLRTDIVELLAIRRQFRRSRRNRKTRYREARFLNRRKPEGWLPPSIQHKINSHIKLIDLVHNILPVTSVTIEVAAFDTQKLKNLNIRGVEYQQGEQMGFWNVREYVLYRDNHTCQYCKGKKKDPVLQVHHIESRKTGGDSPDNLITLCKTCHHEIHEKGLEHIFQRKRPPMRDASQMTAMRWAMFSRIREKYSHANITYGYITKCIRIANGLSKSHMVDARCISGNPLAKPSGTVYLLKFVRKNNRQLHKATILKGGKRKSNKAPRFVKGFQLFDKVVYERKECFIFGRRSSGYFDLRLLDGTKVHASASWKKLKRVEHASTLLIERRKGDSSPTFALA

SEQ ID NO: 2624 - protein, 423 aa, Moorena sp.
MRVFVLNKNRQPLDPCKPARARILLSAGKAKVYRRYPFTIILTEEIKNPVTHEHQLKIDPGAKTTGLAIIQGQRVIWGAELTHRGFQIRDNLTSRRQLRRSRRSRKTRYRKPRFSNRTRPKGWLAPSLTSRVQNILTWVKKLIRFCPVTGISQELVRFDTQKLQNPEISGIEYQQGTLYGYELREYLLEKWNRKCAYCGATGTQLEIEHIKPKSRGGSNRVSNLTIACHSCNQAKSNQDIELFLSKKPSLLKRILRQAKRPLADAASVNITRWKLYYDLKSIGLPVEVGSGGLTKFNRCRQSLPKAHWLDAANVGKVETLIIEVTLPLLITAKGHGTRQLCRTNKYGFPIRHCSRIKFHKGFKTGDIVHAVVTKGKKVGTYVGRVATRKSGSFNISTKLGLVQGISHKYCQFIHRKDGYAYGI

SEQ ID NO: 2625 - protein, 477 aa, unidentified
MSNFVFVLDTNRQPLTPCHPARARELLAKGKAAVYRRYPFTIVLNRAVGDVPPESQLNASTPLASTSLASTSLSVESSTPLRLKIDPGSQTTGLAVVNGNQLVWGAELQHRGDRIQAKLETRRVCRRNRRNRQTRYRKPRFLNRTRPKGWLPPSLNASAPLSVESERSRGLNHRVKTTLTWVNRLRKLCPIASISQELVRFDTQKLQNPEISGAEYQQGELFGYEVREYLLEKWGRKCAYCSTENVPLEVEHIHPKSKGGNDRISNLTLACRPCNQSKGNRNVREFLSGKPSVLDCLLRQAKAPLKDAAAVNATRWKLYQRLKETGLPVEVGTGGQTKFNRTRLELPKAHWLDAACVGETPSLHLVTETPMAILSKGRPTRFRTLIDRYGFPRAVRKTKAQVNGLQAGDIVRATVPNGKYRGQWTGAIAGVREKRPPALRPFGGKQLDLTAQTQIHVIHKQDGYEYGINPCGHSSRR

SEQ ID NO: 2626 - protein, 427 aa, Scytonema sp.
MCKVFVLDTEKRPLNPVHPAQARQLLRNGKAAIFRNFPFTIILKEARLDAPIQSLRLKIDPGAKYTGMALVNDSTGEVVFAAELKHRGFAIRDALTSRRQLRRSRRNRKTRYRQPRFDNRKRPDGWLAPSLQSRVDNIKTWVKRLFKVAPIEAISQELVRFDMQLMRHPDIQGKEYQQGTLAGYETREFLLEKWNRQCAYCGIKDVPLQIEHIHPRAKGGTNSITNLTLSCEKCNKKKGTKDIKEFLKKDQSRLERILKQSKRPASDAAAVNTTRFALLDVLKTTGLPVETGSGGLTKFNRNQQGLPKTHWLDAVCVGSSTPILNIKCVKPLMITANGHGTRQMCGTDKFGFPSRHRTNKQIHFGFQTGDIIKAVVTSGKKVGEYVGRVLCRATGSFDIATKTGRISGISYKYCSATHKKDGYSYGF

SEQ ID NO: 2627 - protein, 414 aa, unidentified
  source 1..414: note = human gut metagenome
MVITLDKNKRPLGFMSERRCRILLEKKRAVLYRYFPTIVILKDVDARKLSGLSSYRIKIDPGAKYTGIAIVMDDTNEFMYAMQIEHRGEQIKKNLDTRRGARRNRRSRETGYRRPKWGNRCTAKEQRQSYDSRRDENWLPPSVKSTADNIISWIRRLCRWINITNCSIESVRFDTQLMENPEIEGVEYQQGTLYGYEVKEYLLEKYGHTCQYCGGKSNDPILEWEHMLPRSRGGSDRLKNAALACHNCNQDKGNHTLEEWQTILQDRIPKERGKQKELDQIRQKFVQQVMEGKTPVKGLRYAAWVNSSRRYSQRHLYLRFPELECSSGGRTKYNRNVLKYPKEHHNDALCVGKIPEDGFVDRTNGYYLYAKATGRGTRLRGQINQCGVIIRKWMDRSKTAFGFQTGDLVVADVP

SEQ ID NO: 2628 - protein, 418 aa, Moorena sp.
MPNYVFVIDTNKQPLNPISPKKARRLLDKGKAAVFRMYPFTIILKTAIPNPTISPCQIKIDPGSKTTGFALVQNDQVIWAMELEHKGSLIKKKLESRSAVRRGRRNRNTRYRKPRFLNRRRPEGWIAPSLEHRVLTTETWVKRLIKFCPVNEIGIERVKFDTQKMQNPEVNGVEYQQGDLAGYEVREYLLEKWGRECAYCSKQNTPLQIEHIHPKSKGGSDRVSNLCLACEKCNQKKGNKPIEEFLKKKPDLLRKILAIAKQPLTDAAAVNTTRNKIVKVLKAIKPVVTGTGAQTKYNRTRLGLPKQHWIDAACVGEIKDLVLKTSQPLLVTCKGQGGRQKAALNKYGYPMRHNPLRPIKGWSTGDIARHQKLGIGKVTPRSKGSFGFTPLGAKGYKSCKPQDIFAVHRKDGYIYSFC

SEQ ID NO: 2629 - protein, 542 aa, Streptomyces sp.
MTTFPAGEQTHQTVLPQQPALESVRADTPGSRDETAHGHPAIARGTGREHGRGETDVQGTKPRRRHVKNAATAAEAAENGSGDAPPHNPSYSGGVGASRVFVLSKDGKPLMPCHPARARELLSKERAVVARQAPFTIRLKDRTHAESEVDGVQLRIDPGSKGTGLALTDDKKELDGQGAVITIRRGLVSVELQHRGEQIRLCMRQRAGYRHRRRSANHRYRAPRPDNRPRPAGWLPPSLRHRVDTAYSLASRLCRYAPVTEIHVERVAFDVHSMSTGRPLAGVEYQQGTLAGIEARAYLHARWNGACAYCDATGVPLNVEHLRPRSRGGSNRIANLVLACVPCNKAKDNMPVEVFLADRPARLAKILRQARTPLNDATAMNATLWQLIKALGTLGRPVHPWSGARTKWNREAMGLDKTHTLDALCVGRLAHESGDAIVRLPERVLVVKATGRGSYARTTPDRFGFPRLRRARVKRHFGYATGDLVRAIVPAGKWAGTWTGRVSVRATGRHSLTTPKGRIDVFHQNLRLLQRGDGYGYAFRSE

SEQ ID NO: 2630 - protein, 472 aa, unidentified
MHVFVLDKDKNPLAPCHPAKARRLLKSGRASVFRRYPFTLILHEIEAKDCVVPETQLNASAPLASTSLSVESERSRGLKIDPGSKTTGLAVVNGNKLVWGAELQHRGDRIKAKLETRRVCRRNRRNRKTRYRKPRFLNRTRPKGWLPPSLNASAPLSVESERSRGLNHRVETTMTWVNRLRKLCPIVSISQELVRFDTQKLQNPEVSGIEYQQGELLGYEVREYLLEKWGRKCAYCSTENVPLEVEHIHPKSKGGSDRLSNLTLACRLCNRSKGNRDVREFLSDKPSVLNRILKQAKTPLKDAAAVNATRWKLCQQLKETGLPVEVGTGGLTKFNRTRLGLPKAHWLDAACVGETPSLHLATETPIAIASKGHSTRFRTLIDRYGFPRAVRKTKAQVNGLQAGDIVRAIVPNGKYRGQWTGAIAGVRKKRPPALRPFGKKQIDLTAKTQIQIVHKQDGYEYNINPCGHSSRR

SEQ ID NO: 2631 - protein, 425 aa, unidentified
  source 1..425: note = human gut metagenome
MENTLKVFVLNMRGQPLMPCSPPKARKLLRAGKAVPVRRTPFVIQLTVPTGETKQPITLGVDAGYKHVGLSATTAKEELLASEVELRQDVTGLLSNRLALRRARRNRKTRYRAPRFDNRVRSKHKGWLAPSVENRIQAHISRIEAVCRVLPITKIVIETASFDIQKIKNPEVEGTDYQQGEQLGFWNVREYVLFRDGHVCQACKGRSKDLILNVHHIESRKTGGDAPGNLITLCEACHKAYHAGKLKQFSPRRGASFRAETFMGIMRWTVLNRLRERHPELPVTNTYGYLTKHKRIVAGLPKTHCADAFCIAGVLDAKRRGEYLFQKQTRRHNRQIHKLTILKGGVRKRHQAPYLVHGFRLFDKVLCKGEVGFIFGRRSSGAFDVRRLDGTKISAGISYKKLSLLEKRKTFLTELRKEDRDSSRV

SEQ ID NO: 2632 - protein, 420 aa, Moorena sp.
MQNYVFVIDTNKQPLNPIPPKKARRLLDKGKAAVFRMYPFTIILKTAINNPVVTNCQLKIDPGSKVTGFALVQNNQVIWGMELEHRGGLIKKKLQSRSAVRRGRRNRHTRYRKPRFLNRKRPEGWLPPSLEHRILTIETWIKRLIKFCPVNEIWVERVKFDTQKMQVPEINGVEYQQGELAGYEVREYLLEKWGRECTYCGKQSVPLQIEHIHPKSKGGSDRVSNLCLACEKCNQRKGNKPIEEFLKKKPSLLQKIKTKAKQPLKDAAAVNATRNKLVKVLWNIKPLITATGAQTKYNRIKLGFPKEHWVDAACVGDIEILELRTNQPLLVTCKGQGGRQKAALNKYGYPIRHNPLKPIKGWCSGDIAKNILTGEFGRVNPRSKSNSFNYTVRGNKAISLHVKNLTRVHKKDGYTYGFCR

SEQ ID NO: 2633 - protein, 443 aa, unidentified
  source 1..443: note = human gut metagenome
LTKDENRPSGRTTGLRAEQAEPAGIRKGDTLKVFVLNMRSKPLMPCSPAKARHMLKAGKAFVVRRTPFTIKLTIATGETKQDVTLGVDAGARHVGISATTEKEEVFASEVALRQDITGLLADRLAFRRARRNRKTRYRAPRFNNRVRSKHKGWLAPSVENRIQAHMSRIEAVCRLLPVTKIVIETASFDIQKIRNPEVEGTGYQQGDQLGFWNVREYVLFRDGHVCQHCHGRSRDKILNVHHLESRKTGGDAPNNLITLCETCHKAYHAGKIKLKVKRGQSFRAEAFMGIMRWTLLDRVRKTHPKLPVENTYGYLTKHKRIALGLPKTHCADAFCIAGNLKALRRGDFLFQQQTRKHNRQIHKCSILKGGVRTLNQAPFLVKGFRLFDKVRIGGQIGFVFGRRVRGTFNIRRLDKTVIGTDINCKKLSLLETRKTFLTELRKE

SEQ ID NO: 2634 - protein, 424 aa, Moorena sp.
MRVFVLDQSKKPLDPCHPARARILLKQGRAKVLKRYPFTIIMQDLSESECVTHNYQIKIDPGAKTTGFAILQDHRVIWGAELTHRGCQIRESLTSRRQLRRSRRNRKTRYRKPRFLNRKRSDGWLAPSLMSRVHNILTWVKKLMRLCPLTGISQELVRFDTQKMENPETSGVEYQQGELYGYEVREYLLEKWSRKCAYCGTADTQLEIEHIKPKSKGGSDRVSNLAIACHHCNQAKGNQKIEQFLTGKPEVLKRVLSQAKKPLADAAAVNATRWRLYNELKFTGLPVKTGSGGLTKYNRCRQNLPKTHWLDAANVGQVDSLHIEDYQPLLIAAKGHGTRQICRTDKFGFPKRHCSRTKIHKGFQTGDIVKAIVTKGKKIGTYTGRVATRQTGSFNISTKPGLVQGISHKYCSIVHRKDGYYYSF

SEQ ID NO: 2635 - protein, 406 aa, unidentified
  source 1..406: note = human gut metagenome
MVYVQDIDGKPMMPTTRHGKVRRLLKDNKAVVVNTCPFTIKLTYKTSDYKQEIVLGVDAGIKHVGLSATTKSKELYSGEVILRNDVVELLSTRRESRRARRNRLRYRKPRFENRVKSKRLGWVAPSVRHKVDAHIRVIDNICSTLPISRIIVEIAQFDTQKIKNPDISGNEYQEGDQLGFWNVREYVLARDGHKCQHCKGKSKDPILNVHHIESRKTGGDSPSNLITLCETCHKEYHKGNIDLKVKRGKSLRDAAVMGIMKWKLYEELKSRYPNVSMTFGYITKYNRIKYGIEKSHTSDAFVISRNFNAKRIERQYLKRLIRRHNRQIHKMKILKGGKKKNNQAPFEVFGFRLFDKVLYNNEICFIYGRRKSGCFDIRDFDGKNSKNVTYKKLKLIRGKRYPIILK

SEQ ID NO: 2636 - protein, 413 aa, unidentified
  source 1..413: note = human gut metagenome
MTSYSFVLDANGKQLAPTKEPKAWFLIRKKRAALVSKYPMVIQLKKKIQENEICKDEIRCGIDDGGLHVGIALVQKCKSKNKVVFKGTIEQRNDVKHLMEVRRNYRRYHRYHKRYRQARFDNRKSSKRKGRIAPSILQKRQATIRVINRLNKWINITNYWLEDVSIDIRVLTDGYKSYSWQYQKSNRLDENIRKATILRDGGKCMECGKSNCRLEVHHIKPRRRNGSNTLDNLITLCESCHQKTEGQEELYMDRYFSLLKSSDNKNLNYAQHVMIGKMWLRKQLSGLGVLYLTSGGDTANKRIDWNIEKSHTNDAVCITDLQPDTCDIKEWAIKPMRRQSKAKTDHVLGIHHRDLVEYTFKNGETHRGYVTALYPDQKAINFQSQTKHCKKVNARKCKLLWNYSKIYWFENAS

SEQ ID NO: 2637 - protein, 442 aa, unidentified
MVTVQQSTHHLPFGRVFIRRNLFMVYVISQDGKPLMPCSDPIARLLLKQGKAKVKKRDPFTIKLTYETTNYTQGLTLGVDTGSGTIGTAVSKDNGDIVYMSEVVVRNDITDKMTQRAKYRRNRRNRKTRYRKARWLNRASSIKKDRFSPTMQSKLHSHVREIEYIQSILPITEMVFETGQFDMQLMKNPSLANPKVRPWGYQKGANYGFENTKAMVLNRDNYTCQCCKGKHKDSKLEVHHIVFRSQGGSDEESNLLTLCHTCHKDLHSGKINPKLSGKVKGNLKYATQMNSIRKQLFRFYPNAIETFGYVTKANRLHLGVDKEHYYDACTIATQGNAFNVKSNLYKKKCVSDGDFQKTKGIRSEEPIVTDKICGFRKFDKVRYFGNDYFIKGRMSTGYAILMDIDGNKIDFSTMPRGYKTPKLSNCKRITARSTVMTQVKVV

SEQ ID NO: 2638 - protein, 427 aa, Methanosarcina sp.
MLVFVINQHKKPLMPCKPSKARKLLQAGKAKVVRNTPFTIKLLFGSSGYTQPVIAGMDTGSKVVGCAAIANGKVLYQSEIYLRENVSKKMEQRKMYRRTRRGRKTRYRPARFANRGNSRREGRLAPSIKSKLEAHFREKMFVESLLPVTGWKVELASFDIHKITNPEVSGIGYQEGDLKGFYNVKAYVLDRDGYTCQHCRGKSKDSRLHCHHIVFRSQKGTDTPENLITLCETCHKALHNGEFKLSGNKSKTKHATEIGILKSQIRKSGWSFAETFGYETKYRREQVLKLLKTHYFDAVAICCRDDQNVEVEDSVLQKRNVSKGDYQQRTGKRSEKKIPTGKLFGLRKFDLVKTSKGIGFVKGKRSSGFFAISDLFGNKISDSVNVKKKCRRLSARSTTLVQMVQMTHSSPTCHFRQAGTVEEGVSC

SEQ ID NO: 2639 - protein, 417 aa, unidentified
  source 1..417: note = human gut metagenome
MPCSPAKARLLLKEKKAIVKRRTPFTIQLTIATGEAKQPVTLGVDSGYKHIGLSATTEKAELYASQVELRQDITDLLSARLALRRSRRSRKTRYRAPRFNNRVASKRKGWLAPSVENRIAAHMSRVEAVMRVLPVTAITVETAAFDTQLLKNPDIAGAAYQQGEQLGFWNVREYVLFRDGHVCQHCRGKSKDPILNVHHIESRRTGGDAPNNLITLCETCHKAFHRGEIELKVRRGKSFKAETFMGIMRWTLFERLKKAHPELRVRNTYGYLTKHKRISHGIAKSHCADAYCIADNLGAKRLSGYLFQKQTRKHNRQLHKLSILKGGLRKKNQAPYEVKGFRLFDKVICKGEEAFIFGRRTSGSFDVRRLDGTRISAGINYKKLRLLEPRTTYLTEFRKEAALPPLHKCRGFCAEFL

SEQ ID NO: 2640 - protein, 423 aa, Moorena sp.
MRVFVLNKNRQPLDPCKPARARILLSTGKAKVYRRYPFTIILTEEIKDPVTHEHQLKIDPGAKTSGLAIVQGTRLIWGAELTHRGFQIREALSSRRQLRRSRRNRKTRYRKPRFLNRTRPKGWLAPSLTSRVQNILTWVKKLIRFCPITGISQELVRFDTQKLQNPEISGIEYQQGTLYGYELREYLLEKWNRKCAYCGATGTQLEIEHIKPKSKGGSNRVSNLTIACHPCNQAKSNQDIELFLSKKPSILKRILSQSLRPLADAASVNSTRWKLYYELKSIGLPVEVGSGGLTKFNRCRQNLPKTHWLDAANVGKVETLIIEVTLPLAITAKGHGTRQLCRTNKYGFPIRHCSRIKFHKGFQTGDIVRAVVTKGKNIGTYVGRVATRKSGSFNISTKSGLVQGISHKYCRFIHRKDGYAYTN

SEQ ID NO: 2641 - protein, 447 aa, Marinobacter sp.
MSVFVLDRRKQPRMPCTEKRARLLLGRRRAVVVRAYPFTIRLKDRAGGITQPVRIKIDPGSKTSGIAVVRESGQKQHVLALMELAHRGRQISKSLEQRRAFRRRRRSQLRYRAPRFLNRTKPRGWLAPSLQHRVDTTKSLVNRLRSLVPVESISQELVRFDTQKMENPEVSGVEYQQGTLLGYEVREYLLEKWGRECAYCTGKDTPLQIEHIDPKANGGSNRISNLTLACRPCNQEKGRQPLADFFASSKRLKNHQARLDRILKQCKKPLRDASAVNSTRWALHQALKQTGLPVEVGTGGRTKFNRRRLNIPKTHALDAACVGEVEIVEGWDVPTLAIKATGRGSYKRTRLTKHGFPRGYLMRQKQVQGFQTGDMVRAIVPTGTKAGTWLGRVAVRKTGSFNIQTSGGAIQGVSYRHCTLTQRADGYGYHIQPNQRKEEGDRENESR

SEQ ID NO: 2642 - protein, 378 aa, Moorena sp.
MQNYVLVIDTNKRPLNPISPKKARRLLDKGKAAVFRMYPFTIILKTAIYNPVVLPCHIKIDPGSKTTGFALVQNNQVIWGMELEHRGELIKKKLEYRKAVRRGRRNRHTRYRKPRFLNRRRKDGWLPPSLEHRILTIHTWVKRLIKFCPVNEIWVERVKFDTQKMPNPEINGIQYQQGELAGYEVREYLLEKWGRECTYCGKQSIPLQIEHIHPKSKGGSNSAKPTLRERVSNLCLACEKCNQRKGNKSIEDFLKKKPNLLQKIKTKAKQPLPDAAAVNTTRNKLVKVLRSIKLVVTGTGAQTKYNRTKLGLPKQHWIDAACVGDIETLVLRTSQPLLVTCKGPGGRQKAALNKYGYPIRHNPLKPIKGACYWGHSQA

SEQ ID NO: 2643 - protein, 424 aa, Microcoleus sp.
MSNYVFVIDTDKNPCDPVHPAKARLLLNQNKAAVLRRYPFTIILKEAQNAKPTPLTVKIDPGSKTTGLAILRGEDVIWGAELSHRGQQIKASLDSRRAIRRGRRYRKTRYRPARFLNRKKPKGWLVPSLQHRVDTTLTWVNKLIRYSPIVGITQELVRFDLQKMKTPEISGVEYQQGELQGYEVREYLLEKWNRQCAYCGGRDIPLQVEHIQPKAKGGTNRISNLCLACEPCNIRKGTHDIRDFLSGQPDLLSRILKQAKSPLRDATAVNSTRWVLFNTLKGTGLPVVTGSGGQTKFNRTRLGLPKTHWLDAASVGKVDSLKLLTSKPLLISAKGHGTRQMCRTDKYGFPSRYVPRYKFVKGFQTGDIVKAIVTRGKKVGEYLGRVAVRSQGSFNITTNQGLIQGISHKYCKHIHKKDGYSYVA

SEQ ID NO: 2644 - protein, 493 aa, unidentified
  source 1..493: note = human gut metagenome
MAAVYVISASGKPLMPTTRCGHIRGLLNAGKARVVEREPFTIQLKYETPDVTQPLYLGIDPGRTNVGSAVVREDGECVFTAQLTTRNKDVPKLMKARKQFRMAHRRLKRRCKRQRRAKAAETLSQKGEFQRLLPGYEEPILCKGIRNKEARFNNRQRPAGWLTPTANHLLLTHLNMVKKLQKLLPITDVVLEVNRFAFMAMENPSIRRWQYQQGPLYGKGSVEDAVYAQQDGHCLFCGKPIAHYHHVVPQHKNGSETLENRVGLCNEHHDLVHKDRAWDAKMKETKAGLNKKYHALSVLNQIIPALTEQLTAMFPQHAFVTTGKDTADFREDYGIAKEHHLDAYCIACSVLAEPTKVAAPTGKPHRLMQFRRHDRQVCHKENIKRVYLSEGKAVATNRHKAIEQKDDSLEEFRKTHTQQEVSALTVKDHQPVYKDMRRFMPGGVFLFNGKVHTLQRSHGRYKGMPFYYIDTDGSKNHAKGCIFLQQNCGLRWV

SEQ ID NO: 2645 - protein, 442 aa, unidentified
  source 1..442: note = human gut metagenome
MVTVQQSTHHLPFGRVFIRRNLFMVYVISQDGKPLMPCSDPIARLLLKQGKAKVKKREPFTIKLTYETTNYTQGLTLGVDTGSGTIGTAVSKDNGDIVYMSEVVVRNDITDKMTQRAKYRRNRRNRKTRYRKARWLNRASSIKKDRFSPTMQSKLHSHVREIEYIQSILPVTEMVFETGQFDMQLMKNPSLANPKVRPWGYQKGANYGFENTKAMVLNRDNYTCQCCKGKHKDSKLEVHHIVFRSQGGSDEESNLLTLCHTCHKDLHSGKINPKLSGKVKGNLKYATQMNSIRKQLFRFYPNAIETFGYVTKVNRLHLGVAKEHYYDACTIATQGNAFNVKSNLYKKKCVSDGDFQKTKGIRSEQPIVTDKICGFRKFDKVRYFGNDYFIKGRMSTGYAILMDIDGNKIDFSTMPRGYKTPKLSNCKRITARSTVMTQVKVV

SEQ ID NO: 2646 - protein, 423 aa, Marinobacter sp.
MSVFVLDRRKQPLMPCSEKRSRLLLGRGRALVVRAYPFTIRLKDRTGGITQPVRIKIDPGSKTSGIAVVRESGQKQHVLVLMELAHRGRQISKSLEQRRAFRRRRRNQLRYRAPRFLNRLRSLVPVVSISQELVRFDTQKMENPEVSGVEYQQGTLLGYEVREYLLEKWGRECAYCTDKDTPLQIEHIDPKVNGGSSRISNLTLACRPCNQEKGRQPLADFFASSKRLKNHQARLDRILKQCKKPLRDASAVNSTRWALHQTLKQTGLPVEVGTGGRTKFNRRRLNIPKTHALDAACVGEVEIVEGWDVPTLAIKATGRGSYKRTRLTKHGFPRGYLMRQKQVQGFQTGDMVRAIVPTGTKAGTWLGRVAVRKTGSFNIQTSGGAIQGVSYRHCTLTQRADGYGYHIQPNQRKEEGDRENESR

SEQ ID NO: 2647 - protein, 420 aa, unidentified
MQNYVFIIDVNKQPLNPIRPKRARTLLMRGKAAVIRMYPFTLILKTVVENPVLRPVELKIDPDSKVTGLALVQDGEVVWGANLEHRGAEIKSDLESRSAVRKSRRNRKTRYRKARFLNRKRTQMWLPPSLMHRVLTIETWVKRLCRYVPVTGIVMELVRFDTQALQNPEITGQEYQQGKLFGYEVKEYLLAKWGRNCVYCGKQDVPLQVEHIHPKSNGGSDRISNLTITCVRCNQKKGSKSIEDFLKKKPDLLRQIKVVRLAPLKDAAAVNSTRWKLYQSLKKISGLNIATSTGGRTKYNRIKNGFDKDHWIDACCVCESGLGVILKTKQAMMIKSTGVGSGRQMTRTNKFGFPCAKPKQRYQHGWKTGDIARFIDGTTTGRIVVQSASRLEIRINKQRIGGQLNKFSKLHSMDGYNYAF

SEQ ID NO: 2648 - protein, 507 aa, unidentified; identical to SEQ ID NO: 2446
  source 1..507: note = human gut metagenome

SEQ ID NO: 2649 - protein, 459 aa, Calothrix sp.
MNFLLVQQDKTMKVLVINFHGQPLMPTSPRRARLLLESGKAKIVGRDPFTIQLIYGSSGYKQEVTLGIDAGYKHVGFSTITDSYELIGGELELLDGVSERITERSKYRRQRRSRLRHRAPRFDNRVRSSGWLAPSIQHKFDAHLKLVELIKSRLPVTKIIIETANFDIQKIKNPKIEGKQYQEGEQLGYYNLACYIRHRDGYKCQNPNCKGKSEILQIHHIGYWKTQPDRSDRPGNLITLCVHEVCPWQKCHTPANHEKGKFLFGWDNKVKSFKAETFMSTIYQKLLDILNAEQAYGYETKYNREKLELPKSHHNDAFVIAGGENQVRVKSLMVEQIRRNKRSIEQFYDAKYIDTRTGKKESGSTLSSGRRTKNKNLNGENLRVYHGQKISLGQRRIKKQRYPYNPNDYVKFENKKYRVIGMQNLGTGVKIANYPGVANKVVSISKVKPIKRRSGICEK

SEQ ID NO: 2650 - protein, 431 aa, unidentified
  source 1..431: note = human gut metagenome
MPNKVYVLDKHGRPLMPCSPAKARHLLDEGKAKIKKRTPFTIQLVYGSSGYTQEVILGVDAGSKTIGVSASTKKEELFAANVIPRNDVVDLLSTRRESRRARRNRKTRYRKPRFDNRVRSKHKGWLAPSVEVKIQEHITSIKRACRILPVSKVVVETAEFDLQLLKAIADGKPVPQGEDYQKGEMYGHYNVRQYVLWRDDYTCQCCGAHATKKKEVRLHVHHLESRKTGGDASGNLVTLCESCHEKLHKGLITEDDFKKRKRKSTRDATFMGIMRATLLQRLRSELPIPVVETRGYITKATREKLLVLPKSHTNDALAIAQGKHGFNVGYLPGIAQIDKIYTIRPVRHHNRQLHKATILKGGIRKSNQAEKYVFGYRLFDKVQFNGQDCFIWGRRTTGIFTIKTINGKMIKDGISFKKLKLVEKSTSYLIA

SEQ ID NO: 2651 - protein, 424 aa, Moorena sp.
MRVFVLDKNKKPLDPCQPARARILLKQGRAKVFRRYPFTIIMRDLEELECVTHNHQIKLDPGSQTTGLAIIQEKVVVWGAELTHRGLQIRDGLTSRRKLRRSRRNRKTRYRQPRFLNRKRPDGWLAPSLMSRVYNILTWVKKLTRFCPITGISQELVRFDTQKMENPEISGTEYQQGTLYGYEVREYLLSKWNRKCAYCGVTDTQLEVEHIKPKSKGGSDRVSNLAIACRKCNQIKGNQEIEQFLSGKPDVLKRILSQAKRPLVDGAAVNSTRWKLYNELKALGLPIETGSGGLTKYNRCRQNLPKTHWLDAANVGEVDTLYIESYQPLLISAKGHGTRQMCRTNKFGFPTRYVPRFKFVKGFQTGDIAKAVVTKGKKIGTYTGRIATRKTGSFNISTKHELVQGISHKYCSIVHRKDGYSYSF

SEQ ID NO: 2652 - protein, 447 aa, Marinobacter sp.
MSVFVLDRRKHPLMPCTERRARLLLDRGRAVVVRAYPFTIRLKSRVGGNTQPVRIKIDPGSKTTGIAVVRENGQKQHVLALMELAHRGRQISKSLEQRRAFRRRRRNQLRYRAPRFLNRTKPKGWLAPSLQHRVDTTKSLLNRLRSLVPVVSISQELVRFDTQRMTNPEISGVEYQQGTLLGYEIREYLLEKWGRECAYCTDKDTPLQIEHIDPKANGGSNRISNLTLACRPCNQEKDRQSLADFFASSKRLKNHQVRLDRILKQCKKPLRDASAVNSTRWALYQTLKQTGLSVEVGTGGRTKFNRCRLRMPKTHALDAACVGEVEIVEGWDVPTLAVKATGRGSYKRTRLTKHGFPRGYLMRQKQVKCFQTGDMVRAVVPTGTKAGTWLGRVAVRKTGSFNIQTNSGAIQGISHRHCVLTQRADGYGYHIQPNQRKEKGNRENESR

SEQ ID NO: 2653 - protein, 423 aa, Microcoleus sp.
MSNHVFVLDTNRKPLTPCKPGVARSLLNAGKASVFRRYPFTIILNKEVDANPEPLELKLDPGSNVTGIALKQGHRIIFAAELQHRGQQIKEALLSRRQLRRSRRNRKTRYRPARFLNRTRPEGWLAPSLQHRVDTLMTWVNRFRRLAPVGQITQELVRFDLQLMENPEISGVEYQQGALQGYEVREYLLEKWGRTCAYCGAKHVPLEVEHIQPRSKGGSDRVSNLTMACRSCNQAKGHGDIRDFLSGQPDVLSRLLGQAKSPLNDAAAVNSTRWALFKALKATGLPVTTGTGGQTKFNRLRLNLPKAHWLDAACVGPVESLEVLTSKPLLILAKGHGTRQMCGTNKYGFPTRHRSRRQIHKGFQTGDIVTATVTAGKKIGSYVGRVLCRASGSFDITTASRRVAGISHKYCKPIHRKDGYAYA

SEQ ID NO: 2654 - protein, 557 aa, unidentified
  source 1..557: note = human gut metagenome
MIYNLISIRERNFMKQKKQKVMVYILNKKGKPLMPTTRCGHVRKLLDSKKAVVVSSNPFTIRLKYDTPNGVQDVFAGIDSGRENIGSGASNEDGDCLYLGELKTSNKSIKMKMTERAGFRKERRSHDRQNKQRKARKDHTEIQNGNADICRTTISCKSVQISYPAAEKSVTHKIIRGKEGKFANRHRDEGWITPSARQLVQMHMNDLKSMCRILPISHVTLERVAFDFQKLENENIKAWEYGKGKLYGYDSPEEYIHDVQGGKCLICGKPHIDYLHHIIPRSKGGSNKVSNLAGLCYDCHYGPMGVHNCQDTQDRLPELKNEANKQYKVSLLNSVMPVLIEEMDKFCKANSIIFSICGGHDTAKVRDMYDLQKDHCIDGFAISLAGRNVKSVDVMPDRIHQKQRYKKKSKNIIQKRNCREYYDGKKLAAVNRHKGTDQKADSLEEYMKTYAETHTADECKKHFESLTVKPARRTYTFHKEGRICPFHIGDKVRYEKKNKIKGNTKVETFICEGIRFPKDENKAKVEHNKTKSKKMKFCRVLEPGCTPYTDYRKLVLI

SEQ ID NO: 2655 - protein, 466 aa, unidentified
MQRRVFVLSKNRKPLMPCSPARARQLLKERKASVYRQEPFTIILQKRTEGDLQKVQLKFDPGSKITGMALVVFFQKGTIVTWAAELEHRGEKIVDLLSKRRAIRRSRRNRKTRYRPPRFSNRTRKKEWIAPSLKSKVDNIFNWTKKLLTYTPIDNLCVETNRFDTQKLQNPEISGVMYQQGTLFGYEIREYLLYKWNHQCAYCDAENVALEIDHIHPRSKGGSNRVSNLTISCRKCNENKGNGDIHDFLSKDNKRLQKIVSYSKKTLRDAASINTTRYVIGNQLKKLGIDVEFASGGKTKANRRHNGFNKQHWIDAACAGKSGENVTISEDLIPLGIQSQGRGSRQMCRVDQFGFPRTTAKSQKRVKDFQTGDIIKAVVTKGKKKGVYVGRVAVRSNGYFNIKTNNSTIQGISYRYCHLIQQVDGYFYFQKGDARLKKPSCSCFAHSRPSGDSSPTYRSRGILATN

SEQ ID NO: 2656 - protein, 518 aa, unidentified
  source 1..518: note = human gut metagenome
MANLKLIDELLEKTEYIYVLGIDGKPQMPTNRKVRVRSLFKSGMAKIVDTVPFTMQLLYENKPVLQPITIAEDPGRTNIGAAVLTQLGDLVFSAVVETRNKSIKKLMSDRKAHRQASRHGERKARQRLAKKYKSMIKAGMIMRKLPQYAADKFVTCKVIKNTEARFCNRKRMPDWLTPTVNHLVQTHINLIKKVEKYLPITDVAIEVNRFAFMQMENPDASGVDFQNGPLKGFDDVKTAIREQQHGKCLMCKNDIEHFHHIIPRSKGGSNTIQNQVGLCKKCHAKVHTDAEFQAKLKDKKEGLIKKYGALSALNQAVPFICKELLKIYGAEHVHFCTGKDTSLIRSSLGYDKTKDNQMHEVDAYCICLAAIGADKTKRPDFNNVFKIKQFRRQDRSIINYQRERTYYLDCKKIATNRKPRFEQKGDALSDWYSEQVKLKGKKYADKLTGRITVKKSTRGYNSKDRVMPGTIFYYCGKRLVLSGQTTRGKYYKAYGDPKTNYPAAKCQIYKHNKGFVFI

SEQ ID NO: 2657 - protein, 442 aa, unidentified
  source 1..442: note = human gut metagenome
MSTSVFVLDKKHRPLMPCRPARARRLLRAGRARVVKRFPFVIRLVDRTVEQSEVQPVLIKLDPGSRETGAAVVRDDEKKRHHALAFFVIKHRGGAIRDALKARSAFRRRRRSQNFRCRSPRFLNRVKPKGWLPPSLRHRVETTLSFVRRMCRYLPVSGIAAELVKFDSQKLQTPEVSGIEYQQGTLFEYEVREYLLEKFGRKCVYCGAEGVPLNIDHVVPRAKGGSNRVSNLVLACVSCNQKKGARSLEDFLKGKPEVLARVRRELKTPLRDAAAVNATRWVLFNELKATGLPVETGSGALTKLNRHAFGVEKEHWLDALCVGRLNGVVTRKGLNVLEIRCMGRGSRQRTRLTKYGFPRGYLMRQKCVHGFATGDMVEANVPKGKKAGLWRGRVAVRVSGSFNIQTPKGVIQGVGWKHCRLISHNDGYGYAWLGHAPHSSPA

SEQ ID NO: 2658 - protein, 419 aa, Moorena sp.
MPKYVFVIDTNKQPLNPIPPKKARRLLDKGKAAVFRMYPFTIILKTAIDNPIVSPCKIKIDPGSQTTGFALVQNNQIIWGMELEHRGGLINKKLESRKAVRHRRRNRHTRYRKPRFFNRKRSEAWLPPSLEHRVSTIETWVKRLTKFCPVNEIWVERVKFDTQKMPNPEINGIQYQQGELAGYEVREYLLDKWGRECTYCGKQSVPLQIEHIHPKSFGGSNRVSNLCLACEKCNKRKGNKPIEEFLKKKPSLLQKIKTKAKQPLLDAAAVNATRNKLVKVLQNIKFVVTGTGAQTKYNRTRLGLPKEHWIDAACVGDIETLVLKTSQPLLVTCKGQGGRQKAALNKYGYPVRHNPLKPIKGWVTGDIAKHQRLGIGKVTPRSKGSFGFTPLGMKGYKSCNPQDISAIHRKDGYTYSFCK

SEQ ID NO: 2659 - protein, 442 aa, unidentified
  source 1..442: note = human gut metagenome
MSTSVFVLDKKHRPLMPCRPARARRLLRAGRARVVKRFPFVIRLVDRTVEQSEVQPVLIKLDPGSRETGAAVVRDDEKKRHHALAFFVIKHRGGAIRDALKARSAFRRRRRSQNLRCRSPRFLNRVKPKGWLPPSLRHRVETTLSFVRRMCRYLPVSGIAAELVKFDSQKLQTPEVSGIEYQQGTLFEYEVREYLLEKFGRKCVYCGAEGVPLNIDHVVPRAKGGSNRVSNLVLACMSCNQKKGARSLEDFLKGKPEVLARVRRELKTPLRDAAAVNATRWVLFNELKATGLPVETGSGALTKLNRHAFGVEKEHWLDALCVGRLNGAVTRKGLNVLEIRCMGRGSRQRTRLTKYGFPRGYLMRQKCVHGFATGDMVEANVPKGKKAGLWRGRVAVRVSGSFNIQTPKGVIQGVGWKHCRLISHNDGYGYAWLGHAPHSSPA

SEQ ID NO: 2660 - protein, 318 aa, Scytonema sp.
MVKPRYARKFPFTIILKESRPDVPVQPLRIKIDPGSKTTGIAVINDSTGEVVFTAELQHRGFAVRVALTSRRQLRRSRRGRKTRYRQPRFNNRKRPDGWLPPSLMSRVYNIQTWVRRLMRLAPITAISQELVKFDTQLIQNPEMSGKEYQQGTLAGYETREYLLEKFGRKCVYCDKQDVPLQIEHIHPRAKGGTNRISNLTLSCEKCNIKKGTKDIKDFLKKDPLHLKKIEAQAKKPLADTAAVNATRFKLLEVLKSTGLLVETGSGGLTKFNRTKLELPKTHYFDAACVGRSAPSGKSKVTHSKVKSKNPINKFRGL

SEQ ID NO: 2661 - protein, 497 aa, Streptomyces sp.
VLHQQLALELDPADTPRDRDETGAERREATGAEHVRGDTPAASPGSGGVTPNQPVGEEPRERHPFVFVLDKHGRPLQPCTPARARKLLKKGRAVVHRHTPFAIRLKDRTIAESEVDGVELGIDPGSKHTGIATFTAQAGERRGRYAVHLDHRGAVIRKKRGQRAAYRRRRRTSNLRYRAPRFNNRTRPDGWLAPSLQHRVTTTVSWVRRLARWAPVRAVHVERVAFDTHAISAGRPLEGAEYQHGTLHGTEIREYLLAKFGRACVYCGIAGVPLNIDHVHPRSRGGSDRISNLVIACIPCNESKSHRPVEEFVRDKSKLAKILAQAKAPLRDAAAVQSTRWALWRALDQMLPTHIASGGRTKWNRTRCGLPKSHTLDALNVGKLDTVTETANPILVAGCSGRGQHQRTSPDRHGFPRRTSPRIKTVHGYATGDLVTASVPKGKYTGTHAGRVMIRTTGRFDIRTPHGRAAGIQHTNIRLLQRGDGYTYTHQPEPTRA

SEQ ID NO: 2662 - protein, 522 aa, Nocardiopsis sp.
MATFRTGQKTHQAVLPQRPALESAPADTPRIRDETGSGHRSGNRSAVPGAEHVRGETGTAPPGGSGVTPEPCGAGEKGREAHTRESDPCVFVLDKHGTPLQPCHPARARKLLAKGRAVVHRHTPLVIRLKDRTIEDSEVDGVELGIDPGSKHTGIAVFTHQAGQRRGRYTIQLDHRGATIRRKLAQRSGYRRRRRTSNLRYRPPRFENRARPRGWLPPSLQHRVDTTTSWVDRLTGWAPVGAVHVERVAFDTHALSVDGPLEGVGYQQGTQHGYEVREYLLAKFGRACVYCGVMNTPLNIDHVRPRSRGGTDRVSNLVLACVPCNQAKADRPVEGFAPKAATRVLARAKAPLRDAAAVNATRWSLWCALDARLPTHVGSGGRTKWNRTRNQLPKSHTLDALCVGKLDTVTQTIRTILVAGCSGRGTYARTRPDKYGFPRLRLPRTKRFFGFATGDLVRAVVPKGKKAGTHTGRVAVRASGSFNITTAHGTVRDVNHKHVQLLQRADGYAYTTQKEDGASSPA

SEQ ID NO: 2663 - protein, 411 aa, unidentified
  source 1..411: note = human gut metagenome
MVYVQDIDGKPMMPTTRHGKVRRLLKDNKAVVVNTCPFTIKLTYKTSDYKQEIVLGVDSGTKHVGLSATTKSKELYASEVILRSDVVDLLSTRRGLRRTRRSRLRYRKQRFNNRVKSKKDGWIAPSVRHKIDSHIRIISFVYSILPVSKLIIEVAQFDTQKIKNPEISGKEYQEGEQLGFWNVREYVLARDGHKCQHCKGKSKDPILNIHHIESRKIGGDSPSNLITLCETCHKEFHKGNIKLKVSRGKSLRDAAVMGIMKWKLYEELKSKYDNVSMTFGYITKYNRINHGIEKSHVSDAFVISRNFNSCRLGYYYKRKLVRRHNRQIHKMKILKGGIRKRNQAPFKVFGFRLFDKVMFQGEEHFIYARRLSGQFNIRDINGENKKDVSCKKLKYVSHGLVSVKTNLFLSQ

SEQ ID NO: 2664 - protein, 438 aa, Nocardiopsis sp.
MATFRTGQKTHQAVLPQRPALESAPADTPRIRDETGRGHHTTDVVPGAEHVRGETGTASPGGSGVTPEPCGAGEKGREAHTRESDPCVFVLDKRGAPLQPCHPARARKLLAKGRAVVHRHTPFVIRLKDRTIEGSEVDGVELGIDPGSRHTGIAVFTHRGGERRGRYAIQLDHRGAAIRKKLAQRSGYRRRRRTSNLRYRPPRFGNRARPRGWLPPSLQHRVDTPVSWVDRLTGWAPVGAVHVERVAFDTHALSVDGPLEGVGYQQGTLHGYEVREYLLAKFGRACAYCGATNAPLNGRTKWNRTRNRLPKSHTLDALCVGKAEEVAQTVSTVLVAGCSGRGTYARTRPDKYGFPRLRLPRTKRFFGFATGDLVRAVVPKGKKAGIHTGRVAVRASGSFNITTAHGTVQGINRRHLRLLQRADGYAYTIREEKGVSRP

SEQ ID NO: 2665 - protein, 432 aa, Scytonema sp.
MEGLMSKVFVIDTEKRPLNPIHPAQARQLLRNKKAGVFRNFPFTIILKESLSDSSVSPLKLKLDPGAKTTGIALVNDITGEVVFAAELKHRGFVIRDALTSRRQLRRSRRNRKTRYRKPRFLNRTRPEGWLAPSLQSRIDNIKTWVKKLCRFAPIEAISQELVRFDMQLMRHPNIEGKEYQQGTLAGYETREFLLEKWNRQCAYCGAKDVPLQIEHIHPRARGGSNSITNLTLSCSKCNTKKGTKDIKDFLKKDPFRLEKILKQAKRPLADTAAVNTTRFALLDVLKATGLPVETGSGGLTKFNRSQQNLAKSHWIDAACVGKLTASLNIKGIKPLLITASGHGSRQSCRTDKYGFPSRYVPRFKFVNGFQTGDIVKAVVTNGKKIGEYVGRIAVRTTGSFNISTKNGLVQGISHKYCKGIHRKDGYSYGAN

SEQ ID NO: 2666 - protein, 475 aa, Streptomyces sp.
MPPSDSHLVSLVFPPEPVWVRAAREAVRTLLAAADRRDLADTALLLTSEAVTNSVNACLRSGCSTPVTLFAEWTAPHVLRVLVQDEAPGLPVPRAPASEDEHGRGLARIAAFTAQAGERRGRYSVQLDHRGAVIRKKLAQRAAYRRRRRTSNLRYRAPRFNNRTRPDGWLAPSPQHRVTTTVSWVTRLSRWAPVRAVHVERVAFDTHAISAGRPLAGAEYQHGTLHGTEAREYLLAKFGRACAYCGITEVPLNIDHVHPRSRGGSDRISNLVTACIPCNETKSNRSVQEFVRDKTKLAKILAQAKAPLRDAAAVQSTRWALWRALDQMLPTHIVSGGRTKWNRTRCGLPKSHTLDALDVGKLDTVTETITPILVAGCSGRGQHQRTSPDRHGFPRRTSPRVKAVHGYATGDLVTASVPKGKYTGTHTGRVMIRTTGRFDIRTAHGLAAGIRHTNIRLLQRGDGYTYTHQPEPTCT

SEQ ID NO: 2667 - protein, 232 aa, Nostoc sp.
MFIPKVDAPDVPFQIEHIFPKARGGSNSITNLTLSCEKCNIKKGVKDIKDFLKTDPSRLEKILKQAKRPLADAAAVNTTRFALLNVLKSTGLPVETGSGGLTKFNRSQQNIPKSHWADAAAVGKSTPELIVKGVKPLLIAANGHGSRQSCRTDKFGFPNRHVPRDKIHFGFQTGDIVRAVVTSGKKIGSYVGKVAIRSSGSFNISTKNGLVQGISHKFCLRIHAKDGYSYAY

SEQ ID NO: 2668 - protein, 412 aa, unidentified
MMCVVYVVNQNGHCLMPCKPSKARKLLRDGRARVKHRSPFTIQLLWDCEEHVQEVVVGIDKGSSITGFACVGNGEILLSGEIVHRKDVKEKMQTRRMHRRSRRNRCWYRPKRILNRASSRRSGRLPPSIKTNVEEVIRVVEHLPLPLAHIVIEDVQVDIARLNDPTLQASRYQDPTRLDENLRIACLMRDGYQCQSCHKRETRLEAHHLVFRQHGGKDTLSNLLTLCESCHHRVHEGKITLAVTGVSGHLDHIAQRSMQGKAHLYATLEQGISLTTLFGYQTAIWRKHLDLPKAHDVDALCIATYGTGEVIPWQQDRFYQVRFRPRRTRRHYHDLPRKGQGRVRYQVNSELEGFRKGDVVRVKGTFVKQINSIYSDGYLAFPRVKGEPSKARPKDCVLLERGTTMLWKRMAG

SEQ ID NO: 2669 - protein, 416 aa, unidentified
  source 1..416: note = human gut metagenome
MENTLKVFVLNMRGQPLMPCSPPKARKLLRAGKAVPVRRTPFVIQLTVPTGETKQPITLGVDAGYKHVGLSATTAKEELLASEVELRQDVTGLLSDRLALRRARRNRKTRYRAPRFDNRVRSKHKGWLAPSVENRIQAHISRIEAVCRVLPITKIVIETASFDIQKIKNPEVEGTDYQQGDQLGFWNVREYVLFRDGHVCQHCRGRSKDPILNVHHLESRKTGGDAPNNLITLCETCHKAYHAGKIKLKTRRGTSFRAEAFMGIMRRTLLDRVRKAHPELSVENTYGYLTKHKRIALGLPKTHCADAFCIAGNLNALRRGDFLYQRQTRKHNRQIHKCSILKGGVRKLHQAPFLVKGFCLFDKVKCTGRIGIIFGRRSTGSFDVRTLDGTRLSAGISSKKLTLLEKRTTFLTQLRK

SEQ ID NO: 2670 - protein, 427 aa, Nostoc sp.
MSKVFVLDTEKRPLDPIHPAQARQLLRNKKAAVFRRFPFTIILKESRADASVSDLRIKLDSGAKITGIALVNDSTGEVVFAAELKHRGFAIRDALISRRQLRRSRRNRKTRYRKPRFLNRTRPEGWLAPSLMSRVHNVETWVNRLRKFAPITAISTELVKFDMQLMRNPEIEGKEYQQGTLAGYETREFLLEKWNRQCAYCGIKNIPLQIEHIHPRSKGGSNSITNLTLSCEKCNVKKGTKDIKDFLKKDPTRLQKILAQAKKPLADAAAVNATRYKLLEVLKSTDLPVECGSGGLTKFNRTNQQLQKTHWLDAACVGQSTPILIIKGIKPLLITANGHGTRQMCRTDKFGFPNRYVPKLKFIKGFQTGDIVKAVVTNGKKIGEYIGRVAVRSTGSFNISAQRGLIQGINYKFCKSIHKKDGYSYSS

SEQ ID NO: 2671 - protein, 415 aa, Bacillus sp.
MRVFVKNLRGEPLMPCSNRKARLLLKQGKAKIIGYTPFTIQLQYATGETVQSVAIGVDSGSKYVGIAITTEDKVLAKGTIELRQDVKENLTLRATLRRSRRQRKTRYRKARFLNRKKREGWLPPSIQSRMHNQIHWIEIFRSLLPSPKVIVEVGKFDAQKLKNSDIQGKEYQQGDAFGFWNTRYYVFTRDHYTCQICKKKGGILHTHHIIERCSGGSDLADNLVTVHEECHQKFHQGTIKHIFKKPKQYKETAFMNILRLQIMNRLGCEITYGSYTTPKRKELRLSKTHYNDAIAITTPTKLQEYEQSGEFRIKQFRKKKRSLHESTARKGRKTKNTTAKRNNKNTPKVHGIYLGDKVKVFGQVGFVTGFTGKMMYVQDIDGHYLQNPSKSYKQVKISDIECIHHNNNWLFLQIS

SEQ ID NO: 2672 - protein, 424 aa, Moorena sp.
MRVFVLDKNKKPLDPCQPARARILLKQGRAKVFRRYPFTIIMRDLEELECVTHNHQIKLDPGSQTTGLAIIQEKVVVWGAELTHRGLQIRDGLTSRRKLRRSRRNRKTRYRQPRFLNRKRPDGWLAPSLMSRVYNILTWVKKLTRFCPITGISQELVRFDTQKMENPEISGTEYQQGTLYGYEVREYLLSKWNRKCAYCGVTDTQLELEHIKPKSKGGSDRVSNLAIACRKCNQIKGNQEIEQFLSGKPDVLKRILSQAKRPLVDAAAVNSTRWKLYNELKALGLPIETGSGGLTKYNRCRQNLPKTHWLDAANVGEVDTLYIESYQPLLISAKGHGTRQMCRTNKFGFPTRYVPRFKFVKGFQTGDIAKAVVTKGKKIGTYTGRIATRKTGSFNISTKHELVQGISHKYCSIVHRKDGYSYSF

SEQ ID NO: 2673 - protein, 418 aa, unidentified
  source 1..418: note = human metagenome
MFVYVISKDGQPLMPTNRFGKVRRLLKNKKAKVVSRCPFTIKLLYEPESLVVQKVVLGQDTGSKHVGTACVADDKVLYQSEVTLRDNIKKKMDNRRAFRKNRRRRKTRYRKPRFLNRANSTKKDRLPPSVRSKVQSHIDEIEFCKKILPISKIVLEVSQFDTHLMKNPSLIFEKIKHWGYQKGFNYEYSSRREAILHRDNYTCQCCGKKHVRLEVHHIVFRSLGGSDDEKNLITLCEKCHKAIHDGILILTKTPKKLNLKYATHMSIIRSQLLKIYPDAIETFGFVTKENRNNFDLQKDHFIDACVVASGGEKFKFNDIIYQKRRVAKGDYQLTKGVRGQQKIPVGKIQGFRKFDKVRYLKQEYFIKGRMSVGLSILMNIFNEKIDFSYLPRGWKIPKLSNLKRISARSSCLCISQRV

SEQ ID NO: 2674 - protein, 415 aa, unidentified
  source 1..415: note = human gut metagenome
MVYVVANDGQPLMPTERHGKVCRMLKSGMAKVVKKCPFTIQLQYESERNVQPVSLGVDAGSKHIGISATTKTKVLYESDVELRDDIVKLLATRRQLRRSRRSRKTRYRPVRFDNRKRKEGWLAPSIRQKIGSHLTVVANACKILPINQIIVETASFDIQKIKDPEIQGIEYQQGEQMDFWNIREYVLFRDGHICQCCKGRSKDKILNVHHIESRKTGGNAPNNLITLCETCHKGYHNGTVILPKNIKHGMQFKDAAFMGIMRWTFYNTLKEQYEPDIPVSMTYGYLTKNTRIEHGLPKEHYIDARCISGNPDAVSDGTYYYQKKVRCHNRQIHKQTILKGGIRKSNQAEYLVKGYRLFDKVRYQGREYFIFGRRKSGFFDIRTLSGEKVNKGSISVKKLTFADTRKNYLIERRTV

SEQ ID NO: 2675 - protein, 518 aa, Nonomuraea sp.
MHKEVTLVATLDTRQQIHFAVLPQRRTLESAPADTPGAGTKRGAEAFGQRSVRHGRGETRHASPDAASVTPARGEAGRETAPRVFALASDGTPLDPCHPARARRLLKAGRAVVARHTPFAIRLKDRSAEQSEIQGVEVSLDPGSRHTGMSLFRAHDGTRYGLFGIRLDHRGGKIRDKLAARTAYRRRRRTANLRYRAPRFANRTRPDGWLPPSLRHRVDTVISWVQRLRRLAPIRALHVETVRFDTHALPAGRPLEGTGYQHGTLHGYETREYLLTKWGRACAYCGTTGTPLNIDHIQPRSRGGSDRISNLTVACMPCNQAKNNMPVTDFLAGRPAVLARILAQAKAPLRDAAAVNTTRWALYTALTATGLPVRCGSGGRTKWNRHRTGAPKSHTLDALHVADLDRVASWPGRVLVIAATGRGSYCRTATDRFGFPRLRLPRTKQIFGYQTGDLVRAIIRKGKHPGSHTGRVVIRTSGSHTVQTASGPIKTSHKHLRLLQRANGYAYTTKKEEHRCAS

SEQ ID NO: 2676 - protein, 511 aa, Streptomyces sp.
LATFRVRQKTDRAVLPQQLALEFESADNPGSRDETGLEDHHRVVPGAGHVREETRTVSPGGAGVTLNCRVGEEGRESHPYVLVLDKHHHPLQPCTPARARKLLKKGRAVVHRHTPFVIRLTDRTIAESEVDGVEVGVDPGSKHTGLAVFTMQAAERRARFAVQLDHRGAIVRKKLGQRAAYRRRRRSKNLRYRAPRFLNRRRPDGWLAPSLRHRVDTTVSWIDRLSRWAPVRAVHVERVAFDTHALSAGRPLEGAEYQQGTLAGYEVREYLLAKWGRCCAYCGASGVPLNIDHIHPRSRGGSDRVSNLCLACVPCNRTKSNQPVEDFLAKKPKLLARIKAQAKSSLQDAAAVQSVRWVLWRALDARLPTHVASGGRTNVNRTRNHLPKSHTLDALNVGKLDVVTEVVSTVLVAGCAGRGTHCRTRTDNHGFPRLRMPRQKRHFGYQTGDLVRAVVPGGKYAGCYTGRVVVRSTGRHQIPTPAGPANTSYKNLTLLQRADGYAYTSRAEGRL

SEQ ID NO: 2677 - protein, 433 aa, Scytonema sp.
MSNFVFVIDTNKQPLDPIPPGQARRLLNQGKAAVYRRYPFTIIFKYAVDNPRRSEHQLKIDPGSKVTGLAIVQGDRVIWGAEIQHRGQQIKNDLEARKAVRRNRRNRQTRYRRPPIKNRGKRQRSARRLAPSLKSRVHNVMTWVNRIKRYVPITGISQELIRFDTQKLVNPEVMGIKYQQGELFGYEVREYLLEKWSRQCAYCGATNTRLEIDHLHPRSKGGSDKISNLVISCHDCNQSKSDRDIQEFLAQKPDTLNRVLAQVKQPLKDAAACNCSRWTLFNELQQTGLPVEVGTGGRTKYNRIRLGFDKQHWLDSACVGIVDQLILMTKQPLLIVAKGWGNRQMCITNKHGFPIRYRERQKTFFGFQTGDMVKAKLPKGKFAGTHVGRLTVRKSGVFEMITHIGKVSPVRHKYCQAMHRNDGYMYRFSTIVQ

SEQ ID NO: 2678 - protein, 378 aa, Scytonema sp.
VVDNPNPKPLTIKLDPGSKTTGIAILDQDKVVWAAELEHRGWQIKNALESRRSLRRSRRNRKTRYRQPRFNNRKRKEGWFAPSLMHRVLTIETWVKRLCLYSSITEIVMELVKFDTQKMQNSEISGVEYQQGELAGYEVREYLLEKWSRKCAYCDKEGVPLQVEHIHPRAKGGSNRVSNLTLSCERCNTKKGTKSIDEFLKRDGSRLEKIKRQAKQPLKDAAAVNATRWELFRTLKNILPTTTGTGGQTKYNRTRFELPKQHWIDAACVGDVETIQLLTQQPLRIKCTGWGTRQMCGTDRYGFPTRHRERSSVHFGFKTGDIVKAVVTTGKKVGEYVGRVLCRKTGSFDIATKSGRVAGISHKFCSLIHQKDGYSYAF

SEQ ID NO: 2679 - protein, 512 aa, Nonomuraea sp.
MTHQAVLPQRPALELGSADNPGIRDETGAEGRRKAAPGAGHVREETLSGSPAAGGVTLDRPVREKGRESHPYVFVLDKRGRPLQPCTSARARQLLKKGRAAVHRRTPFVIRLKDRTIDESEVDGVELGTDPGSRHTGVAVFTAKAGERRARYAIRLDHRGAQIRRKMGQRAAYRRGRRSRNLRYRKPRFANRTRPQGWLPPSLRHRVATTVSWIDRLCRWAPVRAVHLERVAFDTHALSAGRSLDGAEYQHGTLHGAEVREYLLAKWGRRCAYCGLSDVPLNLDHIHPRSLGGSDRVSNLTLACVPCNQAKGNQLVEDFLARKPKLLAAILAQAKVPLRDAAAVQSTRWALWQELDARLPTHVASGGRTKWNRTRNRLPKSHTLDALAVGKLDTVTETVSAVLVAGCAGRGTHTRTRTDRHGFPRLRLPRQKRFFGYATGDLVTALVPTGKKQGTYTGRVAVRASGYFNVTTAHGTVEDLNHRHVRLLQRGDGYAYTFRNESSRPEAVFSPA

SEQ ID NO: 2680 - protein, 447 aa, Scytonema sp.
VSRVIVPTLNIVEANFTRKEYAVMQNYVFVIDQNKQPLNPVSPARARELLTKQKAAVYRVYPFVIILKHVVDNPQSKPLTIKLDPGSRFTGIAILDQDKVVWAAELEHRGWQIKNALESRRSLRRSRRNRKTRYRQPRFNNRKRKEGWLAPSLMHRVLTIETWVKRLCLYSPITQIAMELIKFDTQKMQNPEIDGVEYQQGELAGYEVREYLLEKWGRKCAYCDHAGVPLQVEHIHPRAKGGSNRVSNLTLSCERCNTKKGTKSIGEFLKKNGSRLEKIQRQAKQPLKDAAAVNATRWELFRTLKNILPTTTGTGGQTKYNRTRLELPKQHWIDAACVGEVNNLNLLTQQPLKIKCTGWGTRQMCGTDKYGFPTRHRERKQIHFGFKTGDIAKAVVTFGKKVGTYIGRVLCRKTGSFDIATISGRVAGISHRFCISIHKKDGYSYGF

SEQ ID NO: 2681 - protein, 420 aa, unidentified
  source 1..420: note = human gut metagenome
MQYVYVLNKHGEPLMPCSPGKARLLLKQQKAHVVKRTPFTIKLLYGSTGYKQPITLGVDAGSKHVGLSASTEKRELYCEEFTPRNDVVELLSTRRQSRRSRRNRKTRYRAPRFNNRVHGKHKGWLAPSVEVKIQEHITVIKRICRILPVTLVRVETAEFDTQRLKAMLAGKPLPVGTDYQLGEMYDKYNVRQYVLKRDNYTCQCCGAHTTAKKAVKLRVHHLESRKVGGNAPSNLITLCTTCHNALHKGKVSLDGKERGKPLRDTAFMGIMRKTLMTQLREELPIPVQGTYGYITKMRREQNNIKKSHVNDARCISKHPLAEPCSVCYRTKAIRHHNRQTHKANFSKGGIRKRSQMPYVVEGYRLWDKVLYNGQECFVSGRRASGSFTLKKLDGTRVSKGVTFKKLQLLEPATNYLIERM

SEQ ID NO: 2682 - protein, 318 aa, Scytonema sp.
MVKPRYARKFPFTIILKESRPDVPVQPLRIKIDPGSKTTGIAVINDSTGEVVFTADLKHRGFSVRVALTSRRQLRRSRRARKSRYRQPRFNNRKRPDGWLPPSLMSRVYNIQTWVRRLMRLAPITAISQELVKFDTQLMQNPALCGKEYQQGTLAGYETREYLLEKFGRKCVYCDKQDVPLQIEHIHPRAKGGTNRISNLTLSCEKCNIKKGTKDIKDFLKKDPLHLKKIEAQAKKPLADTAAVNSTRFKLLEVLKSTGLLVETGSGGLTKFNRTKLELPKTHYFDAACVGRSAPSGKSKVTHSKVKSKNPINKFRGL

SEQ ID NO: 2683 - protein, 388 aa, Scytonema sp.
MPKVFLIDTDKKPLDPIHSAQARQLLRNGKAAIFRRFPFTLILKESRPDAPVQPLRLKIDPGAKTTGFALVNDATGEVVFAFSLQHRGFAIRDALTSRRQIRKSARARKTRDRAPRFNNRKRPSYWRTPSLQSRVENIKTWVKRLIKLAGIGAISQELVRFDMQLMLNPDIQGNEYQQGTLAGYETREYLLQKWDRTCVYCGAKDIPLQVEHIHPRAKGGSNRLSNLTLSCEKCNVKKGTKDVKDFLKKDPEKLKRILSQTKKPASDAAAVNTTRFALLECLKQFGLPVETASGGLTKFNRSSQLLDKQHWIDAACVGKSTPTLNIKGVKPLLIKAIGHGNRQMCITNKFGFPIKHRSNIKFHFGFRTGDMVRATLPTGKFAGTHVRG

SEQ ID NO: 2684 - protein, 419 aa, Moorena sp.; identical to SEQ ID NO: 2658

SEQ ID NO: 2685 - protein, 420 aa, unidentified
  source 1..420: note = human gut metagenome
MQYVYVLSKHGEPMMPCSPGKARLLLKQQKACVVRRTPFTIKLLYGSAGYKQPITLGVDAGSKHVGLSASTEKRELYREEFTPRNDVVELLSTRRQNRRSRRNRKTRYRAPRFDNRVHSKHKGWLAPSVEVKIQEHITIIKRICKILPISLVRVETAEFDTQRLKAMLAGKPLPVGTDYQLGEMYDEYNVRQYVLKRDNYTCQCCGAHTTAKKVVKLHVHHLESRKTGGNAPSNLVTLCTTCHKNLHKGRVTLDGKERGKPLRDAAFMGIMRKTLMARLKEELPIPVQGTYGYITKMRREQNDIKKSHTNDARCISKHPLAEPCSVCYRTKAIRHHNRQTHKANFSKKGIRKRSQMPYLVEGFRLWDKVLYKGQECFVSGRRSSGSFALKKLDGTSISKGVTFKKLRLLEPATNYLIERM

SEQ ID NO: 2686 - protein, 426 aa, Scytonema sp.
MSKSNFVFVLDADLNPLTPCSPGVARSLLKSGKASVYRRYPFTLILKKKVDTRPAPITIKLDPGSKTTGIALLQGSKVVFGAELTHRGQTIKASLESRRSLRRGRRNRHTRYRPARFLNRTRPTDWLAPSLQHRVETTMTWVNRFIRLAPVNSIVQELVRFDLQKMENPEISGIEYQQGELAGYEVREYLLNKWDRKCAYCAVENVPLQIEHIQPKAKGGSNRLSNLCLACEKCNLKKGTQDIEQFLAKKPDLLKKIKAQAKRPLKDAAAVNSTRWALYHRLKQTCLSISTGSGGLTKFNRTRLGLAKTHWLDAACVGEVEMLEVLTLKPLKITATGHGTRQMCRTDKFGFPNRYVPRNKFVKGFQTGDIVKAVVTSGKKIGTYVGRVAVRSTGSFNISTANGLIQGIGYKNCVSVHKKDGYNYGF

SEQ ID NO: 2687 - protein, 453 aa, Lactobacillus sp.
MMSEVQKVNYIYVVDSNGTPLMPTSRLGMVRRWLKTGQARWFGNSRKIIQFVRPVTTNTQELTLGVDAGFHLGLAVVGNQREYYASESLRKSEKDRITSRRELRRTRRNRLRHRQSRFDNRRRKDGWLAPSMQHRLDFTIKEIRCLYTFLPITKLVVEVTPFNNQKLVDSNIKPWEYTQGKMHGFKTIKDYLLTRDNYRDALDGKQYPASQLRVHHLVQRRDGGSNQPDNLVLLSDINHSQANHHNGSLAKLRENRQKELDYRGAYFMSILATRLSDYFARYTTTQGYLTANLRQKYQLEKSHLNDAFIIAGGTNTTLRTNNVYSRQKLRNNNRVLQKFYDAKYIDSRDGKQKTGKELSSGRTRRTRELNYANLRQFRQEKVKKGRVSIRRNHYQLRPHDVVLNTKTNKVETVTGVQNNGTVIKFQTGKTCSLKNVVSLYHVNGMLEKKIEDI

SEQ ID NO: 2688 - protein, 428 aa, Scytonema sp.
VSKVLVIDTSLRPLDPIHPAQARQLLRNGKAAIFRRFPFTLILKQARPETSVQPLRIKIDPGAKKTGIAIVNDITGIVVFAAELQHRGFAIRESLTSRRQLRRSRRNRKTRYRQPRFDNRKRSNGWLAPSLMSRIHNIETWVKKLIQLVPITAMSQELVRFDTQLMQNPDIQGKEYQQGTLAGYETREYLLEKFGRKCAYCDKQDLPLQIEHIAPRAKGGSNRISNLALSCEKCNLKKGTKDIKEFLKKDPVRLKKIEAQAKKPLADTAAVNAARFKLLEVLKSTGLPVETGSGGLTKFNRTRQNLEKTHWIDAAVVGKSTPEKLIISCVKPLSIQAVGHGSRQSCRTNKYGFPSRHVPREKIHFGFQTGDIVKAVVKTGKKVGTYVGKVAVRSSGSFNISTKNGLVQGISHKFCKRIHAKHGYSYAV

SEQ ID NO: 2689 - protein, 431 aa, unidentified
  source 1..431: note = human gut metagenome
LNRVFVLGKTGKALMPCHPARARQLLHSKKARVKRLYPFTIQLTQRSEGYIQPVELKFDPGSKQTGIGIVLHGKNRLSAIYAAVLTHRGNEIKSNLDSRRMIRRVRRNRKNRYRQARFLNRVRSKHKGWLAPSVQSRVDNIVEWSKRFMRLSPVGFITVESVKFDMQKMENAAVQGLEYQRGTLFDYEVKEYLLEKYNYSCVYCGAKNVPFEKEHVIPRSRGGSNRISNLVLSCRSCNEKKDNLPIEEFLKDNPALLKKIKAQLKSSLKDAAAVNITRKQIVKELSALNVPVLTGTGAETKYNRVSQGYPKEHYIDALCAGTTGAKLYIPCKLRPLLIKKERRNNRQMCLVDKYGFPRGKAKGSKVVKGFKTGDIVKAVVLKGKKKGTYKGKVAVRSSGSFNINVKQGRVEGIGWKNCVMLHRFDGYSYTY

SEQ ID NO: 2690 - protein, 432 aa, Scytonema sp.
MEGLMSKVFVIDTEKRPLNPIHPAQARQLLRNKKAGVFRNFPFTIILKESLSDSSVSPLKLKLDPGAKTTGIALVNDITGEVVFAAELKHRGFVIRDALTSRRQLRRSRRNRKTRYRKPRFLNRTRPEGWLAPSLQSRIDNIKTWVKKLCRFAPIEAISQELVRFDMQLMRHPNIEGKEYQQGTLAGYETREFLLEKWNRQCAYCGAKDVPLQIEHIHPRARGGSNSITNLTLSCSKCNTKKGTKDIKDFLKKDPSRLEKILKQAKRPLADTAAVNTTRFALLDVLKATGLPVETGSGGLTKFNRSQQNLAKSHWIDAACVGKLTASLNIKGIKPLLITASGHGSRQSCRTDKYGFPSRYVPRFKFVNGFQTGDIVKAVVTNGKKIGEYVGRIAVRTTGSFNISTKNGLVQGISHKYCKGIHRKDGYSYGAN

SEQ ID NO: 2691 - protein, 413 aa, unidentified; identical to SEQ ID NO: 2636
  source 1..413: note = human gut metagenome

SEQ ID NO: 2692 - protein, 257 aa, unidentified
  source 1..257: note = human gut metagenome
MEYGRVIDISRYKASIKQHGKEYQEGDQLEFWNTREYVLARDGHKCQYCKGKSKDSILNVHHIESRKTGGDSPSNLITLCETCHKEYHKGNIDLKIRRGKSLRDAAVMGIMKWRLYEELKSRYDRVFMTFGYITKHNRIKYGIEKSHTSDAFVISKNINAKRIERQYLKRLIRRHNRQIHKMKILKGGKKKNNQAPFEVFGFRLFDKVLYNNKIFFVYGRRKSGSFNIRDFNGENSKDVSRKKFKLIRGKRHPIILK

SEQ ID NO: 2693 - protein, 436 aa, unidentified
  source 1..436: note = human metagenome
MTKTLTKQTTQACVLDQNGKPLMPTKRLGKVYRLLKTKKAHIVSYEPFTIQLDYEPDTHVIQPMTLGVDSGAIHSGYSVANEHSEYYNSEVIARDNISYRISDRHMYRCNRRSRKTRYRKPRFNNRKNKKKGWLPPSLEQKVAVQLNEIDHLHQYFPIETIIVEVAEFDIQKIKNPDISGKDYQQGTLQGYNIRNYLLEKHGRKCFYCDKEVSTFEVEHMIPKAKGGSNRIDNLTLSCHSCNQKKGTLTAEEFIKQTLPVKKVTKKLKQLSKEKQLFKYMAHMNATRWTLYNAINDKYPNVKMTYGYITKYNRIQAGLPKAHHIDAKCITGYSQVPSFDTTVVKTKMRRHNRQLHRATFSKGHVRKAASLPTVMFGFRLYDIVMYNNHRYYIKSRRSTGSFTLVSVEGLKDTNRTYKKLTLLTHTNAYLTNHYVNV

SEQ ID NO: 2694 - protein, 421 aa, unidentified
  source 1..421: note = human gut metagenome
MLVYVLSKNGQPLMPTHRCGFVRRLLNSQKAKVVRRCPFTIQLQYDTDCKTQPVTLGIDAGSKHIGVSATTESKVLYEADIELRNDIVGLLATRRQMRRARRSRKTRYRKARFDNRKRNDKWLAPSIQHKVNCHLEAVRFVHKLLPISKIIVEVASFDIQKIKNPLITSTDYQNGELLDWKNVREYVLFRDSHICQCCKGKSKDPVLQVHHIESRKIGGNAPNNLITLCKTCHNGYHHGTVKLPAKIKRGMKFNDATFMGIMRWGFYNQLKSLYPDVSLTYGYITKDIRISNGLAKTHFIDARCISGNPLATSDNTVYFLKKRRRHNRQIHKFNILKGGRKKRNQAAYLVKGYRLFDKVNYNRKEYFIFGRRASGFFDIRTLSGEKVNKGSISCKKLKLLEASKGYLTERRNAFLSPLNSV

SEQ ID NO: 2695 - protein, 427 aa, Scytonema sp.; identical to SEQ ID NO: 2626

SEQ ID NO: 2696 - protein, 427 aa, Scytonema sp.
MSKVFVIDTDKRPLDPIHPAQARQLLRNKKASVLRRFPFTLILKESRPESPVLPLRLKLDPGAKITGIALVNDATGEVVFAAELKHRGFAIRDALTSRRQLRRSRRNRKTRYRQPRFLNRTRPQGWLAPSLQSRVDNIKTWVEKFVKTAPIKAISQELVRFNMQLMRNPDIQGEEYQQGTLCGYETREYLLEKWERQCAYCGVKDVPFQIEHIQARAKGGSNSITNLTLSCSKCNIKKGTKDIKDFLKKEPSRLENILKQAKRPLADAAAVNTTRFALLEVLKETELSVETGSGGLTKFNRSQQNLPKLHWLDAACVGKSTPTLNIKGIKPLLITANGHGTRQICGTDKFGFPKRHRTNKQIHYGFQTGDIVKAVVTSGKKIGEYVGRVFCRATGNFDIATKSGRVSGISYKYCSAIHKKDGYSYEY

SEQ ID NO: 2697 - protein, 431 aa, unidentified
  source 1..431: note = human gut metagenome
MNRVFVLSKTGKALMPCHPARARLLLHSKKAVVKRLYPFTIQLTQRSEGYIQPVELKFDPGSRQTGIGLVLHGKNRLSAIFGAVLTHRGQEIKGNLDSRRMIRRARRNRKTRYRQARFLNRVRSKHKGWLAPSVQSRVDNIVEWSKRFMRLSPVGFITVESVKFDMQKMENAAVEGLEYQRGTLFDYEVKEYLLEKYNYSCVYCGAKNVPFEKEHVIPRSRGGSNRISNLVLSCRSCNEKKDNLPIEEFLKDNPALLKKIKAQLKSSLKDAAAVNITRKQIVKELSNLNVPVLTGTGAETKYNRVSQKYPKEHYIDALCAGTTGAKVYISKKLKPLLIKKERRNNRQMCLVDKYGFPRGKAKGSKIVQGFKTGDIVKAVVLKGKKKGTYKGKVSVRSSGSFNINVKHGRVEGIGWKNCVMLHRFDGYSYTY

SEQ ID NO: 2698 - protein, 425 aa, unidentified
MENTLKVFVLNMRGQPLMPCSPPKARKLLRAGKAVPVRRTPFVIQLTVPTGETKQPITLGVDAGYKHVGLSATTAKEELLASEVELRQDVTGLLSDRLALRRARRNRKTRYRAPRFDNRVRSKHKGWLAPSVENRIQAHISRIEAVCRVLPITNIVIETASFDIQKIKNPEVEGTDYQQGEQLGFWNVREYVLFRDGHVCQACKGRSKDLILNVHHIESRKTGGDAPGNLITLCEACHKAYHAGKLKQFSPRRGASFRAETFMGIMRWTVLNRLRERHPELPVTNTYGYLTKHKRIVAGLPKTHCADAFCIAGVLDAKRRGEYLFQKQTRRHNRQIHKLTILKGGVRKRHQAPYLVHGFRLFDKVLCKGEVGFIFGRRSSGAFDVRRLNGTKISAGISYKKLSLLEKRKMFLTELRKEGRDSSRV

SEQ ID NO: 2699 - protein, 451 aa, unidentified; identical to SEQ ID NO: 2424
  source 1..451: note = human gut metagenome

SEQ ID NO: 2700 - protein, 515 aa, Actinoplanes sp.
MRQSTHSGVLPQRRTLESVSADKPTRAHETGHGHRDPVAVPGVRHGRGETTAPHAGQWRHPGGQPSGGRGRETPPTHHPVVLVLDKHGRPLQPCTPARARKLLAAGRAVVHRHTPFVIRLKDRTVQDSEIQGVEVGVDPGSKATGVAVFTTRAGARTGLLAIEIRHRGGQIRDKLTARAALRRGRRSRNLRYRAPRFNNRARPQGWLAPSLRHRVDTTMSWVDRLRRWTPVTQVHVETVAFDTQLLQNPTIQSTEYQAGELAGYEVREYLLEKWKRRCAYCNATGIPLNIDHIHPRARGGSDRIANLTLACVPCNQAKGSTPVDVFLTDRPAVLARILRQAKTPLRDAAAASSTRWALWRALTGTGLPVQVATGGRTKWNRHRTGAPKTHTLDALHTGALDTVVRWPNTTLVATSTGRGSYARTRSNRYGFPRLHLPRKKQVHGFATGDLVHAVVPTGVKRGTHTGRVAVRTTGKFNIRTTTRLVQGIHHRHIRLLQRADGWAYTRQPEGQPTHA

SEQ ID NO: 2701 - protein, 457 aa, Scytonema sp.
MITNSVFVESKNGKILKPTTPARARILQSVGKAKKLKLFPFTLILEKEVDEDVEPYLELRIDPGSKFTGISLVDLNKNEVIWAMELEHRGLAIKMEMIKRAGVRRSRRSRRLRYRQKRFDRKRPDGWLAPSLRHRLLTTETWIKRLLKLAPIKSIAIESVKFDLQKMETPDIEGIEYQQGTLWGYTLREALLEHWGRKCVYCGKTDVPLQIEHINARSKGGSDRFSNLTLSCEKCNQKKGNKSVEQFLKAQPEILKKIKSHQKKSLSDAAAVNSTRKAIFEMAHQFGLPVISGNGASTKMIRIKSGLPKAHWIDSACVGTSEIVKLCIYQPLRVTCKGHGTRQVQRMNAKGFPAIASIKKNPITGKKEVKLVAKNQKYTHATAGDYVICNLLKDRKHIKAGIYRARIKTPTQKGVEVLISDHRIAVDRHYIKLIHRSDGYEYSFTTIDQDLLRFSAI

SEQ ID NO: 2702 - protein, 443 aa, Anoxybacillus sp.
MVEENMTCFMQRKGENPMVFVLDTNKRPLAPCHEAVARKLLKQGKAAIYRRFPFTIILKKSVDESEIKATYRLKIDYGSRHTGLAILRGQEVVWLGQLDHRTDIKERIDKRRAFRRARRNRKTRYRKPRFLNRKRKEGWLPPSLESRMQNIKTWVERLRKICPIEHISYENAKFDTQLMRNPEINGVEYQQGTLQGYEVREYLLEKFGRKCCYCGKENVPLEVEHIIPKSRGGTDRIDNLCLACRDCNQRKGSQTAEEFGYPHIQEMVKKTLKDASVVNATRWKVYEVLKQSGCEVECGTGARTKMNRIRLGLPKIHYFDACCVGKSTPLQLHFKTKEVLFIKAKGRGSRSRTNLDRYGFPRGYLARQKYFFGFQTGDMVKANVPKGKYQGVWFGEVACRKTGSFDIKGKDGKRIAQGINYRYVQVIQRFDGYACGKGVAELA

SEQ ID NO: 2703 - protein, 406 aa, unidentified
  source 1..406: note = human gut metagenome
MVYVQDIYGRPLMPTTRHGKVRRLLKSKKATVVNLCPFTIRLLYDTTGYKQEITLGVDTGTKHVGLSATTKSKELYASEVILRSDVVDLLSTRRELRKIRRYRLRYRKPRFMNRIKSKKRGWIAPSIRQKIDSHIRIIGFVYSILPVSKLIIEVAQFDTQKIKNPEISGKEYQEGEQLGFWNVREYVLARDEHKCQHCKGKSKDPVLNVHHIESRKTGGDSPSNLITLCKTCHKEFHKGNIKLKVNRGESLRDAAVMSIMKWELYDELKSLYPNVKMTFGYITKYNRINHGIEKSHVSDAFVISRNFDSERLGYYYKRKLVRRHNRQIHKMKAPKGGNKRMNQSPFKVFGFRLFDKVMFQGKERFIYARRLRGIFNIRDINGENKKDISYKKLEYVSHGLISIVAG

SEQ ID NO: 2704 - protein, 418 aa, Moorena sp.
MQNYVFVIDANKQPLNPIHPRKARRLLDKGKAAVFRMYPFTIILKTAISNPTISPGQIKIDPGSKVTGFALVQNNQVIWGMELEHRGGFIKKKLESRKAVRRGRRNRHTRYRKPRFLNRKRSEGWLPPSLEHRVSTIETWVKRLTKFCPINEIWVERVKFDTQKMQKPEISGVEYQQGELAGYEVREYLLEKWRRECTYCGKQSVPLQIEHIQPKSLGGSNRVSNLCLACEKCNQRKGNKPIEEFLKNKPSLLQKIKTKAKQPLLDAAAVNTTRNKLVKVLQNILLVVTGTGAQTKYNRIKLGLPKQHWIDAACVGDIETLVLKTYQPLLVTCKGQGGRQKAALNKYGYPIRHNPLKPIKGWVTGDIAKHQKLGIGKVTPRSKGSFGFTPLGTKGYKSCKPQDISAIHRKDGYTYRFC

SEQ ID NO: 2705 - protein, 427 aa, unidentified
  source 1..427: note = human gut metagenome
MQYVYVLNKHGEPLMPCSPRKARLLLKQKKACVVKRTPFTIKLLYGSTGYKQPITLGVDAGSKHIGISATTEKHELYREEATPRNDVVDLLSARRAFRRSRRNRKTRYRAPRFNNRVHSKHKGWLAPSVEVKIREHITLIKRVCRILPITLIRVETAEFDTQRLKAMLESKPLPVGTDYQLGEMYDEYNVRQYVLKRDNYTCQCCGAHPTKTKAVKLHVHHIETRRTGGNAPNNLITLCTACHKALHAGKVTLDGKKRGKPLKDTAFMGIMRKTLLERLRKELKIPVQGTYGYITKYLREKHGIPKSHTNDARCISKNPLAIPCDTCYYAKAVRHHNRQLHKATILKGGIRKANQAPYIVKGYRLWDKVSYNGTECFITGRRTSGYFALKKLDGTVISNSISYKKLRLLEVATNYITEKEVKGQFLP

SEQ ID NO: 2706 - protein, 456 aa, unidentified
  source 1..456: note = human gut metagenome
MSTCVCVLSNSGERLMPTIRLGKVRRLLKDGKAKIVKHHPFTIQLLYDSKTNTQPIEICEDVGYNYIGISVKSESHEYVSAQYDTLQDEKACHDSCRKLRRTRRNRLRYRKPRFDNRKRGEGWLAPSLEHKKQLNIRLIERYVSVIPITHATVEVGSFDTMLLQAIQKGKSKPEGVDYQKGPRYNLATLREAVFYRDNYTCQVCGRKTADGAILHMHHMFYWKGRHGYQLDELVTACEKCHTPANHQKCGKLFGFGEDKEFANLSGAAFMNAVRWQIVDALHATYGKEFVTITYGAMTKEKRIILGIEKTHNNDAYAMGDYHPVHRCVFRHYQKRRRNNRVLEKFYDATYIDTRTGNKAKGKELFNGRISRNHKKNSEDLHKYRSKKVSKGRRSIRRQRYAIQPYDTVRLESKTYITSGCHNKGTRLLIPANGKSKSVAISKVQVVCHAGAWIQII

SEQ ID NO: 2707 - protein, 477 aa, Blautia sp.
MIIALDKYKRPLGFLTERRCRILMERKRAVLYRVFPTVVILMDVDARTIPDLPSFRIKIDPGSKYTGIAIIRNDTDEFVYAMQIEHRGDAVRAALNKRKNARRNRRSRETGYRRAKWGNRCLSEKDKRSYDSSREDGWLPPSIRSAADNVISWVRRLGRWINLTECSFEAVRFDTQLMEDPDIEGEEYQHGTLFGLEIKEYLMEKFGHTCQYCGGKSGDPVLEWEHMRPKSRGGSDRVKNALLSCSSCNKDKGNRTPEEWLEQIKARLPREKGKRKELDEERVKLIQKVIDGKPQGSALRYAAWVSSSRRYLEKALFGIFGDVECSSGGRTKYNRTELGYPKEHHYDALCVGTVPEKGYHDRTNGYYLYAKAAGRGTRLRGHLNKCGVIATKWTDRKKGFFGFQTGDIVVAEVPHKTPKPYKYEGRFVGRVMVRATGSFDIKTTDGKLVTVKEQYCRLLQANSGYHYTMKRAIPLGH

SEQ ID NO: 2708 - protein, 417 aa, unidentified
  source 1..417: note = gut metagenome
MPCSSAKARLLLKEKKAVVKRRTPFTIQLTIATGETKQSVTLGVDTGYKHVGLSASTEKAELFASEVELRQDITDLLSTRRALRRARRNHKTRYRAPRFDNRIRSKHRGWLAPSVKNRINAHLSRIDAVLRILPVTKIVVETASFDVQRIKNPDIEGEAYQQGEQLGFWNVREYVLWRDGHVCQHCHGKSKDPVLNVHHLESRRTGGNAPNNLVTLCKTCHQALHQGEIKLKAKRGASFKAQTFMGIMRWNVLNRLKAMHPEIEIRNTYGYLTKHSRISHGIAKSHCADAYCIAGHLKAKRLAGYYFQKQTRRHNRQIHKLTILKGGLRKRNQAAYEIKGFRLFDKVKVFGEEGFIFGRRASGYFDVRKLDGKRISAGISSKKLTLLEKRKTYLTEYRKEAALPPLNEFRGFRADVL

SEQ ID NO: 2709 - protein, 465 aa, unidentified
  source 1..465: note = human gut metagenome
MSTCVCVLGNNGERLMPTIRLGKVRHLLKDGKAKIVKHHPFTIQLLYDSETNVQPIEICEDVGYNYIGVSVKSESHEYVSAQYDTLQDEKEHHDDCRMHRRTRRNRLRYRKRRFDNRKRDKGWLAPSLGHKKQLNISLIEQYVSVIPITHATVEVGSFDTMLLQAIQKGEAKPEGVDYQKGPRYNLATLREAVFYRDDYTCQVCGRKITDGAILHMHHMFYWKGRHGNSLSELITVCEKCHTPANHQKGGKLYGFGEDIKFANLSGAAFMNTVRWQIVNVLYAAFGKPFVTFTYGAMTKEKRIALHLEKSHNNDAYAMGSFHPVNRCAFEHYEKVKRNNRILEKFYDSQYIDTRTGELTNGKSLFNGRISRSHKKDSENLHKYRGKRICKGHRALRRKKVALNPGDLVSLNGEILVVYGTHTKKNGSVNVEFKTPSRDGKKSASLKKLKIVKTSNLMHSAWTKVS

SEQ ID NO: 2710 - protein, 418 aa, unidentified
  source 1..418: note = human gut metagenome
MVYVLNKNNEPVMPCSERKARLLLKQGRAVIYRKDVFTIKLINGSYGYKQHITIGIDCGSKHIGISATTNKKELFSANAELRNDIVKLLSDRKSLRRNRRYRKTRYRKPRFDNRRIKEGWIAPSIRQKIDSHVRIVSLIHKLLPVKQVNVEVVAFDMQKIKNPDIKRSEYQMGEQLDSYNVREYVLFRDNHICQHCKGKSKDDVLQVHHIESRKTGGNAPNNLVTLCKTCHEKYHSGEITLNVNRGKSFRDASAMSTMRWFLYEELKSRFSNVNITYGYITKYKRIKLGLSKEHYNDAYCIAGNLNTSRLCNHHLIRFIPRHSRILHVQKFSKGGVRRSASAPYWLNGGKPSKHGIIFTRFDKVKFNSVVCFISGSSNGFASLRDINWNKVHGCKTTVTVNKLVLVSRRRGSMLFGEL

SEQ ID NO: 2711 - protein, 443 aa, Scytonema sp.
MSKVFVLDIYKRPLDPIHPAQARLLLRNKKAAVFKRFPFTIILKKLIVKFPEPLRIKFDPGAKTTGIAIVNDLTGEIVFAAELQHRGFAIRESLTSRRQLRRGRRARKTRYRKPRFVNRKGSDGWLAPSLMSRVENIETWFYKLRALAPIKFVSVELVRFDTQLMQNPEIQGKEYQQGTLAGYETREYLLEKFGRKCAYCDKQNVPLQIEHIHPRSKGGSNRISNLTLSCEKCNVKKGTTNIRDFLKKDPSKLEKILRESKKPLADTAAVNATRWKVYEIFKNSLLPVETGSGGLTKFNRSQQGLEKTHWIDAACVGKSTPEKLTVRLRSPLALSEAEGLIIQGVKPLLITANGHGNRQMCGTDKFGFPSRHRTKKQIHFGFQTGDIIKAVVTSGKKVGKYVGRVSCRATGSFDIATKAGRIAGISYKYCSAIHKKDGYSYGA

SEQ ID NO: 2712 - protein, 457 aa, unidentified
  source 1..457: note = human gut metagenome
MDAVAVISASGKPLMPTNPVRARKLIKKGKAVIYKYRPLFTIRLTERTDGDIQTIEYCCDTGYQHIGLSIKSRKHEYVNEQRDLLPNETERHNDSRKYRKARRRRKLRHRACRRDNRHDNQICKDGYAPSIRNKRDQHISLYRSYTEILPVERAVFEMGQFDTQVLKAIEKGEPLPQGKDYQHGERYGYATLREAVFARDDYTCICCGKNAFKDKRILCIHHLGFRIGDRTNRLANLATVCTKCHTPKNHQPKGKLYNLKPELKDFKGATFMTMVRWDMLDKLKAVSKDIRVDVTYGAATKEARRDLKIKKSHANDAYCMESFHPSHRTDLKRYEKCRRNNRVLSKFYDATYIDIRDGKKKKANALGCNRTKRRESRRSEKNERIYRGEKVSKGRIVLRTKRAVIRPGDIVYVGKKKYIVASSKNLGKQLKLADGSLLTTSKVTKIIHCGGWKTVTL

SEQ ID NO: 2713 - protein, 441 aa, Scytonema sp.
MKMQNYVFVIDAERKPLNPISPARARELLTKQKAVVIRRYPFTIMLKAKIETPTLKPLTLKLDPGSKVTGIAILEGERVIWAANLEHRGQQIKSDLTKRLSIRRTRRSRKTRYRQPRFSNRSRRQGWLAPSLLHRFLSIETWVKRLCKYSPITEIVMELVKFDTQKMQAETIEGVQYQQGTLWGYQVREYLLEKWGRCCAYCNSSGVPLQIDHIKPKSKGGSDRISNLTLACERCNLAKGNKPVEDFLKKDSARLRKIRSMALQPLKDAAAVNSTRWALYSTLKALLPIKSSSGAQTKYNRLRFGLVKEHWIDASCTGDLNHIIFSTQQPLLIKASGWGKREMVTKNKYGFPVLNKEGNQALKTRSPVQYGFRTGDIVRANVPKGKHQGVHLGRVSVRESGAFDVTTPLGKLQSIRHKHCQPIHRKDGYSYSFHPMSTIVQ

SEQ ID NO: 2714 - protein, 439 aa, Scytonema sp.
MSKVFVLDTEKRPLDPIHPAQARQLLRNGKAAVFRKFPFTLILKVTFKTENPVQPLRLKIDPGAKTTGLAIVNDATGEVVFAAELQHRGFQIRESLTSRRQLRRSRRNRKTRYRQPQKHEWFRKGKKKPVPKQRRTWLAPSLMSRVHNINTWVEKLRKLALISEISQELVKFDTQLMRNPEVCGQEYQQGTLAGYETREYLLEKWKRCCAYCGKKDVPLQIEHIHCRAKGGGNSITNLTLSCEKCNTKKGTKDIKDFLKKDPERLEEILAQAKRPLADTAAVNSTRFRLLEVLKATGNPVETGSGGLTKFNRTNQELEKTHWIDAACVGKSTPEKLTIKGVKPLLIKACGHGTRQSCRTNKYGFPIRHCERKKIHFGFQTGDIVKAIVTKGKKVGEYVGRIATRATGSFNISTKDSLVEGISYKYCTTIHKKDGYNYVH

SEQ ID NO: 2715 - protein, 426 aa, Scytonema sp.
MSKSNFVFVLDADLKPLTPCTPGVARSLLKSGKASVYRQYPFTITLKKKVDETPESVTIKLDPGSKTTGIALLQGSKVVFGAELTHRGQTIKASLESRRSLRRGRRSRHTRYRKARFLNRVRPTGWLAPSLQHRVETTMTWVNKFIRLAPVNSIVQELVKFDLQKMENPEISGIEYQQGELVGYEVREYLLNKWDRKCAYCAVENVPLQIEHIQPKAKGGSNRLSNLCLACEKCNLKKGTQDIEQFLVKKPDLLKKIKAQAKRPLKDAAAVNSTRWALKERLKETGLSVSTGSGGLTKFNRTRLGLAKTHWLDAACVGTVEMLEILTDRSLKITATGHGTRQMCRTDKFGFPCRYVPRNKFVKGFQTGDIVKAVVTSGKKIGTYVGRVTVRSTGSFNISTANGLIQGIGYKNCVSVHKKDGYNYGF

SEQ ID NO: 2716 - protein, 456 aa, unidentified
  source 1..456: note = human gut metagenome
MSTCVCVLSNSGERLMPTFRLGKVRRLLKDGKAKIVKHHPFTIQLLYDSKANTQPIEICEDVGYNYIGISVKSQSHEYVSAQYDTLQDEKACHDSCRKLRRTRRNRLRYRKPRFDNRKRGEGWLAPSLRHKKELNVNVVKMYCAVMPITHATIEVGSFDTMLVKAIQEGKAIPEGADYQKGPRYNLATLREAVFYRDNYVCKVCGRKATEGAILHVHHMFYWKGRHGNSLSELITVCEKCHTPANHQKGGKLFGFGEDKEFANLSGAAFMNAVRWQIVNALYATYGKEFVTITYGAMTKEKRIILGIEKTHNNDAYAMGDYHPAHRCVFRHYQKRRRNNRVLEKFYDATYIDARTGNKAKGKELFNGRINRNHKKDSENFHKYRSKKVSKGRRSIRRQRYAIQPYDTVRLEGKTYITSGCHNKGTRLLIPVNGKSKSVAISKVQVVCHAGAWIQII

SEQ ID NO: 2717 - protein, 428 aa, Scytonema sp.; identical to SEQ ID NO: 2688

SEQ ID NO: 2718 - protein, 536 aa, unidentified
  source 1..536: note = human gut metagenome
VLRPRYQYPTRWYPSREQGSGNGCLSGEENTDLEQEVSGTLSKGDHSHPGEQDFCVPAITIQGGPAMSVFVVGLNGCRLMPTSERKARLLLKHGKASVYRKVPFTIKLNYKTGSTTQSGYLGIDTGSQHIGVSVVREDGTVLHKEEIGLRDSMSKRKLMQSRASSRRGRRHRKTRYRHPKWRPKAKRVYCEIPDRKGRHWKKKEITFASKRAKGWLPPSLQSKTDHHIWWIKKLQDLLPEGYRLSIELGRFDPARLKDPEIHGELYQKGPQYDYENVRAYVLNRDRYTCQVCGKKGGKLHVHHILYRSHGATDDPQYMATVCSDCHNTENHQQGGILYQWMQKQKKFTRGLRDATFMNILRKRLIEAFPGATFTYGNITKADRERLRLPKSHGNDATAIAIVKTGIMTVKDKEPVIYIQQVRRKKRSLHEETPRKGRKEPNRKASRYDKNTKAVTVTKRKNKKKITITGCLFDRVELNGKKGWISGFTDKSCYVKDENDQYIRTSPKYKQVSLSKLKILHHCGNWAIGARQSLGKG

SEQ ID NO: 2719 - protein, 427 aa, unidentified
MSKVLVIDTNKRPLDPIHPAQARQLLRNDKAAIFYRFPFTLILKESRPEVSVQPLRFKIDPGAKTTGLALLNDKTGEVVWAAELQHRGFAIRESLISRRQLRRSRRNRKTRYRAPRFNNRTKPKGWLPPSLMSRVYNIETWVKRLCKLAPITGISQELVKFDTQLIQNPEISGKEYQQGTLAGYETREYLLDKWLRQCAYCKIKDVPLQIEHIHPRSLGGSNRISNLCLACEKCNLKKGNKPIELFLKNKPDLLKKILSEAKKPLADTTAVNATRFKLLEVLKATELPVETGSGGLTKFNRTQQGLDKTHWIDAACVGLSTLTLVVKYVKPLLLKATGHGTRQMCGTDKYGFSTRHRERKVLHFGFRTGDIVKAVVESGKKTGKYVGRVLCRKSGSFDISTKSGRVSGISYKCCTHIHKNDGYNYAF

SEQ ID NO: 2720 - protein, 432 aa, Ktedonobacter sp.; identical to SEQ ID NO: 2059

SEQ ID NO: 2721 - protein, 437 aa, Scytonema sp.
MNEANFTRKEYAAMQNYVFVIDQNKQPLNPVSPARARELLTKQKAAVYRLYPFVIILKHVVDNPQSKPLTIKLDPGSRFTGIAILDQDKVVWAAELEHRGWQIKNALESRRSLRRSRRNRKTRYRQPRFNNRKRKEGWLAPSLMHRVLTIETWVKRLCLYSPITQIAMELIKFDTQKMQNPEIDGVEYQQGELAGYEVREYLLEKWGRKCAYCDHAGVPLQVEHIHPRAKGGSNRVSNLTLSCERCNTKKGTKSIGEFLKKDGSRLEKIQCLAKQPLKDAAAVNATRWELFRTLKNILPTTTGTGGQTKYNRTRLELSKQHWIDAACVGEVNNLNLLTQQPLKIKCTGWGTRQMCGTDKYGFPTRHRERKQIHFGFKTGDIVKAVVTSGKKVGTYIGRVLCRKTGSFDIATISGRVAGISHRFCISIHKKDGYSYGF

SEQ ID NO: 2722 - protein, 462 aa, unidentified
  source 1..462: note = human gut metagenome
MSVLVIGRNGRALMPTNPRKARLLLKKKTASVVCRHPFTIQLLYKTGCATQEGCIGIDTGSQHIGVGITCGDRVILKEEHALRSSMEKRSLLATRAVMRRGRRYRKVRYRKPKWRHHTKRMYFEKANRRGQHWRKVKTTTQSPRLKGWLPPSLQSKCDHHFRIIDRYLKYLPDSITRNLVIEAGRFDMARMNDPTIHGEMYQRGPMYDAENLRAYIFARDNYQCACCKAKAGTTRKADGTTVKLVAHHILFRSRGATDNPKYIISVCDHCHTTKAHQPGGILYSWMENNKKVARGLRDATFMNILRKRLFARYPQSAFTYGNITAADRKKLRLPKSHANDAVAISLFGKEASTVKNICQTMHYKQIRKSKRSLHEAIPRKGRKNPNTKAVRNKKNTTQVNGFKLWDSVLANGKKLFICSFTGTSAYLIDKNGCYISQPGKTYKQWPLSKLKRLHPNGNWLMA

SEQ ID NO: 2723 - protein, 445 aa, Scytonema sp.
MSFAQRLPLGEANITCKKDAAMQNYVFVIDQNKQPLNPIPPARARELLTKQKAAVFRMYPFTLILKHVVDNLAPRPLVIKLDPGSRFTGIAVLDQDKVIWAAELEHRGWQIKDSLESRRSLRRSRRNRKTRYRQPRFDNRKRPQGWLPPSLMHRVLTVETWVKRLCLYSPIIQIAMELVKFDTHKMQNPEVDGVEYQQGELTGYEVREYLLQKWGRKCAYCDKENAPLQVEHIHPRSKGGSNRVSNLTLSCERCNAKKGVKLVDEFLKKDPVRLERIKRQAKQPLKDAAAVNATRWELFRTLKNILPTTTGTGGQTKFNRTRSCLEKQHWIDAACVGNIETIKLLTQQPLRIKCTGWGTRQMCGTDSYGFPTRHRERKQVHFGFKTGDIIKAVVLSGKKVGEYVGRVLCRKTGSFDIVTKAGRIAGISYRFCTPIQQKDGYSYGF

SEQ ID NO: 2724 - protein, 318 aa, Scytonema sp.
MVKPRYARKFPFTIILKESRPDVPVQPLRIKIDPGSKTTGIAVINDSTGEVVFTAELQHRGFAVRVALTSRRQLRRSRRGRKTRYRQPRFNNRKRPDGWLPPSLMSRVYNIQTWVRRLMRLAPITAISQELVKFDTQLMQNPALCGKEYQQGTLAGYETREYLLEKFGRKCVYCDKQDVPLQIEHIHPRAKGGTNRISNLTLSCEKCNIKKGAKDIKDFLKKHPLHLKKIEAQAKKPLADTAAVNATRFKLLEVLKSTGLLVETGSGGLTKFNRTKLELPKTHYFDAACVGRSAPSGKSKVTHSKVKSKNPINKFRGL

SEQ ID NO: 2725 - protein, 441 aa, Scytonema sp.
MSKVFVLNSEKKPLNPIHPAQARQLLKNGKAAVFRKFPFTIILKVTFKTEEEKPVQPLRLKIDPGAQTTGLALVNDTTGEVVFAAELQHRGFAIKKSLISRRQLRRGRRNRKTRYRQPPKHEWSRKGNKKPVPKQRRTWIAPSLMSRVHNINTWVERLKKLAPISDISQELVKFDTQLMRNPDIQGKEYQQGTLAGYETREYLLEKWNRQCAYCGKKDVPLQIEHIYCRAKGGSNSITNLALSCEKCNKKKGTKDIKDFLKKEPTKLKEILAQAKRPLADTAVVNSTRFKLLEVLKATNLPVETGSGGLTKFNRTNQELEKTHWIDAACVGKSTPEKLIIKGVKPLLITANGHGTRQMCGTDKHGFPIRHRSRKQIHFGFQTGDIVKAVVTKGKKVGEHIGRVLCRATGSFDITTDTGRVAGISHKYCKHIHKKDGYSYAF

SEQ ID NO: 2726 - protein, 480 aa, unidentified
  source 1..480: note = human gut metagenome
MKGENMVIALDRNKRPLGFMGERRCRILLERKRAVLYRYFPTIVILKDVDARKLSGLSSYRIKIDPGAKYTGIAIVRDDTNEFMYAMQIEHRGEQIKKNLDTRRNARGDRRSRETGYRRPKWGNQCTAKEQRQSYDSRRDENWLPPSVKSTADNIISWVRRLSRWINITNCSFESVRFDTQLMENPEIEGVEYQQGTLYGYEVKEYLLEKYGHTCQYCGGKSSDPILEWEHMIPRSRGGSDRLKNATLACHNCNQDKGNHTLEEWQTILQDRLPKERGKQKELDQMRQKYVQQVMEGKAPLKGLRYAAWVNSSRRYSQRHLYLRFPELECSSGGRTKYNRNALGYPKEHHYDALCVGKIPEDGFVDWTHGYYLYAKATGRGTRLRGQLNGCGVIISKWKNRSKTAFGFQTGDLVVANVPKDTKYKYKGRFVGRVMIRKSGSFDIRTLSGELVTVNAKFCRLLQNNSGYQMMIKRAIPLGD

SEQ ID NO: 2727 - protein, 379 aa, Arthrospira sp.
MPNYQNYVFVVDTLGQPLSPTHPARARKPLKQGLAAVFRTYPFTIILKKTVENPGNEPLRVKLDPGASVTGIALVSQKTGTVIWGAELAHRGDRIRAKLAARRLVRRHRRCRKTRYRQARFNNRKRPDGWLAPSLKHRVETTLTWVNRLISSCPITDISMELVRFDTQKLLNPEISGVEYQQGVLFGYELREYLLTKWQHQCAYCGAKNIPLEIEHIQPKSQGGSDRVSNLAIACHKCHQKKGSQSAREFLDTKPEILKLLLVQAKAPLKNAAAVNSTRWALFNGLKLTGLPIEIGTGGLTKYNRTVQGLPKTHWLDAACVGKSTPTRLKIKTHQPLLITCFGRGGRQKAAPNKRLPIRHNPLKPIKGWLTGDIAKHKT

SEQ ID NO: 2728 - protein, 457 aa, Scytonema sp.
MMTNSVFVLSKNGKILKPTTPVRARILQSQGRAKKQKLFPFTLILDKDVDENVEPYLELRIDPGSRFTGIALVDFQKNEVIWAMELEHRGLAIKMELIKRAGVRHSRRSRRLRYRQKRFDRQKPQGWLAPSLRHRLLTTTTWIKRLLKVAPIKSIAIESVKFDLQKLEKSDIEGVEYQQGTLWGYTLREALLEHWGRECAYCRKTDVPLQIEHIHCRSKGGSERFSNLTLSCEKCNQKKGNKPVEQFLKDRPEILKKIQAHQKKSLSHAAAVNSTRQAIFQMAHQFGLQVISGDGASTKMIRIQSQLPKAHYIDAACVGTDQIVKLRICQPLRVTCKGHGTRQVQRVNALGFPAIASIKKNSITGKKEVKLVAKNQKYTHATAGEYVICNFLKDRKHIQAGTYRARVKTPTPKGVEVLISGHRISLGQQYVKLIHRADGYEYSFTTIDSSLLRFNAI

SEQ ID NO: 2729 - protein, 426 aa, Scytonema sp.
MSKVFVINTNKRPLDPIHPAQARQLLKNGKAAIFRKFPFTIILKEARLESSVHPLRIKIDPGAKTTGIAVINDSTGEVVFAAELQHKGFAIRESLISRRQLRRGRRNRKTRYRQARFNNRKRPNGWLPPSLMSRVHNIETWVNKLIKLAPITAISQELVRFDTQLMQNPDIQGKEYQQGTLAGYETREYLLEKFARKCAYCDKQDIPLQVEHIYPRSKGGSNRISNLTLSCEKCNTKKGTKDIKEFLKKDPVRLKKIEAQAKKPLADTAAVNATRFKLLEVLKATQLPVETGSGGLTKFNRTQQNLEKTHWIDAACVGMSTPILNIKGIKPLFVQAVGHGSRQSCRTDKYGFPTRHVPRNKIHFGFQTGDIVKAIVKTGKKVGTYVGKVAIRSSGSFNISTKNGLVQGISYKYCKHIHKKDGYSYA

SEQ ID NO: 2730 - protein, 427 aa, Methanosarcina sp.
MLVFVINQNKKPLMPCKPSKARKLLQAGKAKVVQNTPFTIKLLFGSSGYTQPVIAGMDTGSKVVGCAAIANGKVLYQSEIYLRENVSKKMEQRKMYRRTRRGRKTRYRPARFDNRGNSRREGRLAPSIKSKLEAHFREKRFVESLLPVTGWKVELASFDIHKITNPEVSGVGYQEGDLKGFYNVKAYVLDRDGYTCQHCMGKSKDFRLHCHHIVFRSQKGSDAPENLITLCETCHKALHNGEFKLSGNKSKTKHATEIGILKSQIRKSGWSFAETFGYETKYRREQVLKLLKTHYFDAVAICCRDDQNVEVEDSVFLKRNVPAGDYQQRRGKRSEKKIPTGKLFGLRKFDLVKTENGIGFIRGKRSSGYFSISDIFGNKISDSVNVKKKCRRLSARSTTLVQMVQMTHSSPTCHFRQAGNVEEGVSC

SEQ ID NO: 2731 - protein, 349 aa, unidentified
  source 1..349: note = human gut metagenome
MPRNDVVENLSTRREFRRARRNRTTRYRKPRFNNRVHSKNNGWLAPSVEVKIQEHITSIKRVCAILPISKIVVETAEFDLQLLKAVQDGKPVPEGEDYQKGEMYGSYDVRQYVLWRDNYTCTCCGVKGTDKKPVKLHVHHFESRKHGGNAPDNYGTLCEDCHKKLHLGIITDISLKTRKRPSTRGAAFMGIMRKTLMQRLITGLSIPIAETKGYITKAAREEILKLPKTHTNDALAIAQGRHGFGIREQAYVKPTNRIYTVRPVRHHNRQLHKATMLKGGIRKLNQASKYIFGFRLYDKVLYQGGECFVWGRRRSGSFLLRTIDGTKVKDGVGYRNLTLLERSTNYLIA

SEQ ID NO: 2732 - protein, 333 aa, Methanosarcina sp.
MYRRTRRSRKTRYRPARFDNQGNSRREGRLTPSIKSKLESHFREKRFVEALLPVTKWKVELASFDIHKIKNPEVSGIGCQEGDLKGFYNVKAYVLHRDSYTCQHCKGKSKDSRLHCHHIVFRSNQGSDAPKNLITLCETCHKALHNGEFKLSGNKSKTKHATEIGIIKSLIKKSGWNFAETFGYETKFRREQVLGLEKTHYFDAVAICCGDDQKVEVEDSVFLKRNVPAGDYQQRRGKRSETKIPTGKLFGLRKFDLVKTDTGIGVVWGKRSYGYFLISDIFGNKISDSVNVKKKCRRLSARSTTLVQTIQLTHSSPTCHFRQAGTVEEGISC

SEQ ID NO: 2733 - protein, 292 aa, unidentified
  source 1..292: note = human gut metagenome
LSRIEAVLRLLPITKITVETASFDMQRLKNPDISGKEYQEGEQLGFWNVREYVLFRDGHVCRHCHGRSKDPVLNVHHLESRRTGSDSPDNLITLCETCHKALHRGEITLKAKRGQSFRAQAFMGIMRREVLNRLKASYPELKVHETYGYLTKHARIANGIVKSHGADAFCIAGNLGAERLGEFFFQKQTRRNNRQIHKLSILKGGIRKRNQAPFEAKGFRLFDKVACQGEEGFIFGRRSSGSFDVRKLDGTRISAGISCKKLRLLEKRRTYLTEIRKEEALPPLPEGRGLRA

SEQ ID NO: 2734 - protein, 423 aa, Nostoc sp.
MSNFVFVLDTDRRPLNLTHPGAARHLLNTGKAAVFRRYPFTIILKEACPDVPVQDLELKLDPGSKVTGIAIKQGNKVIFGAELQHRGQQIKNALLSRRQLRQSRRNRKTRYRQARFLNRTRPDGWLAPSLQHRVDTILTWVNRLRKLAPISSITQELVRFDPQLMQNPEISGVQYQQGEFQGYEVREYLLEKWNRRCAYCSIENVPFEIEHIQPKSRGGSDRVSNLTIACHACNQSKGNQEIRDFLFCKPDLLNRILKQAKSPLKDAAAVNSTRWALFHALKETGLLVTTGTGGQTKFNRTRLYLPKSHWLDAACVGQVESLEVLTSNPLLITAKGHGTRQMCGTDKFGFPNRHRTNQKSWFGFQTGDLVSAVVASGKFAGRWVGRISVRSRPSFKLASSKIFDVHPRYLQVIHRADGYSYTA

SEQ ID NO: 2735 - protein, 457 aa, Scytonema sp.
MITNSVFVESKNGKILKPTTPARARILQTQGKAKKLKLFPFTLVLDKEIDENVEPYLELRIDPGSRFSGVSLVDLIKNEVIWAMELEHRGLAIRMELIKRAGVRRSRRSRRLRYRQKRFDRKKPDGWLPPSLRHRLLTTETWIKRLLKVAPIKSIAIESVKFDLQKLETADIEGIEYQQGTLFGYTLREALLEHWGRECVYCGKTDVPLQIEHINARSKGGSDRFSNLTLSCDSCNQKKGNKPVEQFLQNKGETLKKIKSHQKKSLSDASAVNSTRKAIFEMTHKFELPVISGDGASTKMIRIKSGLPKAHWIDSACVGTDQIVKLRICQPLRVTCTGHGTRQVQRVNAKGFPAIARIKKNLVTGKKEVKLVSKNQKYTHATTGDYVIFNLLKDRKHIKAGIYRARVKTPTQKGVEVLISGHRIAVDRQYVKLIHQSDGYEYSFTTIDPDLLRFNAI

SEQ ID NO: 2736 - protein, 456 aa, unidentified
  source 1..456: note = marine metagenome
MAVFVLDKKKQPLMPCSEKRARLLLARGRAVVHKRYPFTIRLKNRVGGEAQPLRLGIDPGSKTTGLALMHEPDSQQRHVLCLFELIHRGFQIKKALQQRAAFRRRRRSANLRYRAPRFNNRIKPKGWLAPSLQHRVDTVMAWVNRLSKSAPITGISQELVRFDTQKLESPEISGVEYQQGTLLGYEVREYLLEKWGRECAYCGTADTPLEIEHVVPRSRGGSNRVSNLTLSCHPCNAEKDSQTLTDFFATNKGLKKRLKANGLSADAQLERVQRQLKQPMRDASAVNATRWALFSALKTTDLPVAVSSGGRTKYNRQRLNIPKTHALDAACVGAFGKLYDWTVPTLTIKAMGRGSYQRTRLTKHGFPRGFLMRQKQVHGFQTGDMVRAIVPTGKKAGTHTGRVAIRKTGSFNIQAEYGAVQGISHKYCTLIQRSDGYGYYVTLFSNLTGEAGRAVA

SEQ ID NO: 2737 - protein, 512 aa, unidentified
MSTVYVLNKDGKPLMPTTRGGHVRHLLKEQKARVVRTNPFTIQLLYETDNLVQPLYLGIDPGRTNIGVAVVKTDGTAVFTAHLETRNKEIPKLMQGRKKARRARRTNGRRCRRQRRAKANGTISKKCVKQATAQNGSVSKRANEIGVIKRHLPGCEKEVFCIGIKNKEAKFSNRTRPEGWLTPTANQLLQTHINLVKKIQKFLPISDVVLEINKFAFMRLDNPNVQKWQYQQGPLYQKASLEEAVSEMQEHHCLFCKNTIDHYHHVVPQHKNGSNTIGNIVGLCAKHHDLVHKDTSWQEKLAKKKTGLNKRYGALSVLNQIIPALTKELSSLFPKHFFATNGKSTYDYRAAHGVSKDHWLDAYCIAGSVLPNDACDNNINNRVPYELKQFRRHDRRALHKENMSRVYTLNGKKVATNRHKAVEQATDSLEEFCQNHPDDVCKLKVKEHHPEYRNPKRNFPGCVFLVGKHTHVMQGTSGSHNGKADGYYDTNGNSYSSGKCKFVVKNEGIVFT

SEQ ID NO: 2738 - protein, 421 aa, unidentified
  source 1..421: note = human gut metagenome
MVYVLDITGQPLMPTDRHGKVKHLLKDGKVKVVKRCPFTIQLLYTTTTYTQEITLGVDAGSKVIGLSASTPRRELYSSEVTLRNDIVKLLSLRREYRRSRRNRTTRYRAARFNNRVHSKNKGWLAPSIENKINTHIKVVADIHKILPISKIVVETASFDIQKIKNPNISGEEYQQGEQLDFWNVRQYVLFRDNYTCQCCKGKSKDNRLAVHHIESRQTGGNAPNNLITLCITCHKKYHKGKIKLPNTIKRDKIFKDAVFMGIMRWAFYERLKNIYPNIRMTYGYITKNTRIQHNLSKTHYTDALCISGNPLAKPLEVLYIQKAIRTRNRQIHKATISKGGIRKLNQAPKYVFGFQLYDKVLYKGKECFIFGRRSSGSFDIRTLDGTKISPGVSHKKLKLLEKRKTILTERVIKNQEGGKRG

SEQ ID NO: 2739 - protein, 433 aa, Scytonema sp.
MSKVFVIDTNKRPLDPIHPAQARQLLRNKKAAVFKRFPFTIILKESRPDSPVKALRIKIDPGSKGTGLALVNDITGVVVFAAELQHRGFAIRESLTSRRQVRRGRRARKTRYRQPRFNNRKRSDRWLAPSLMSRVYNIKTWVKRLMKLAPITAISQELVRFDTQLMQNPEISGKEYQQGTLAGYETREYLLEKFGRKCVYCDKQDLPLQIEHIHPRAKGGSNRISNLTLSCEKCNIKKGTKNIKDFLKKDPERLKKIEVQAKKALADVAAVNVTRFKLLETLKSTGLPVETGSGGLTKFNRTRLDLDKTHYFDAVCIGQSTPEKVIVKGLKPLIIKTCGHGNRQMCVTNKFGFPKSHKTNIKFHFGFRTGDIVKAVVPSGKNAGTHTGRVSTRKTGQFDISTGTKKLQIINHKYCKLLHKQDGYLYSLSTVVH

SEQ ID NO: 2740 - protein, 423 aa, Scytonema sp.
MSNYVFLIDQNKTPLNPVHPTQARKLLNSGKAAVFRRYPFTLILKRAIENPNVYPLTLKIDPGSKFTGIALVTNRGDVIWGMELQHRGQQIKDSLEHRRAVRRGRRNRNTRYREARFFNRKRPNGWLAPSLRHRVLTTETWVKRLQKFTPIDSIVQELVKFDTQAIQNPEISGTQYQQGTFHGYECREYLLEKWNRQCAYCPVKDVPLEIEHIQPKSKGGSDRISNLCLACHKCNQRKGNKNIKDFLKGKPDVLNRVLRQASSPLKDAASVNSTRWALFNAFKSFGLPIKTGTGGQTKFNRIRFGLPKAHWIDAACVGSFEIVKLITTKILRVKATGFGGRQRCQTDKFGYPQKHRPLRPILGFCTGDIVRASVPKGKYAGTFTARVCPMSHGYGEFVIDKKRRSIKLEYLTPVHRKDGYDYA

SEQ ID NO: 2741 - protein, 423 aa, unidentified
  source 1..423: note = human gut metagenome
VWNKRRKPLMPCSPAKARHLLKEKKAAVVRRTPFTIQLTIATGESKQPVTLGVDAGYKHVGLSASTEKAELYASEVELRQDVSDLLSARRALRQSRRNRKTRYRAPRFDNRIRTKRKSWLAPSVENRINAHLSRIEAVLRLLPVTKITVETASFDMQLLKNPDISGKEYQEGEQLGFWNVREYVLFRDGHVCQHCHGRSKDPVLNVHHLESRRTGGDSPGNLITLCETCHKALHRSEITLKTKRGQSFRAEAYMGLMRWEVLNRLKTSHPGLEVHNTYGYRTKYTRIVNGIDKSHCADAFCIAGNLGAERLGEFFFQKQTRRNNRQIHKLSILKGDIRKRNQAPFEVNGFRLFDKVACKGEEGFIFGRRSSGFFEVRKLDGTCISAGISYKKLHLLEKRRTYLTEIRKEEALPPLPEGSGLRA

SEQ ID NO: 2742 - protein, 427 aa, Methanosarcina sp.
MLVFVINQNKKPLMPCKPSKARKLLQAGKAKVVRNTPFTIKLLFGSSGYTQPVIAGMDTGSKVVGCAAIANGKVLYQSEIYLRENVSKKMEQRKMYRRTRRGRKTRYRPSRFANRGNSRREGRLAPSIRSKLEAHFREKRFVESLLPVTEWKVELASFDIHKITNPEVSGIGYQEGDLKGFYNVKAYVLDRDGYTCQHCRGKSKDSRLHCHHIVFRSQKGTDAPENVITLCETCHKALHNGEFKLSGNKSKTKHATEIGILKSQIRKSGWSFAETFGYETKYRREQVLKLLKTHYFDAVAICCRDDQNVEVEDSVLLKRNVSRGDYQQRTGKRSEKKIPTGKLFGLRKFDLVKTSKGIGFVKGKRSSGFFAISDLFGNKISDSVNVKKKCRRLSARSTTLVQMVQMTHSSPTCHFRQAGTVEEGVSC

SEQ ID NO: 2743 - protein, 428 aa, unidentified
  REGION 1..428: note = Ga0315294_10064267
MLNKEETLSALDKVLACNNPEVNLARKSEHSLLVFMLNKNRKPLMPCSFKKSKQLVREGKARVIKRFPFTIQMNYGCSGYKQKINLGIDTGYGTIGFSARTSKEELISGVLKLDGRTKERLDEKRMYRRVRRNKLWYREPRWLNRVKKENRLPPSIERKYQTHLSLIKRIKHLLPINRVVVEVAKFDLQKLENPEIRGKEYQQGDLYEYQNVRSYLLSREKGLCEYCKKDFKNSSSHIHHRKPKSKDGSNRLSNLMLLHKSCHNKIHKSTELLKKYKKESIKEYKQSTFMSIINKKFFNDIKDLEVTYGNITFVNRNKLKLEKTHYNDAFVISGGTNQVRTKPFEIIQKHRNNRVLQTNRKGFKPSIRKKRSIIQPLDLFWVDQVKYSCKTMFGYGRYIMYGDMKKKEYFNTKRIEKYFSNGSLVWSI

SEQ ID NO: 2744 - protein, 415 aa, unidentified
  source 1..415: note = human gut metagenome
MVYVLANDGQPLMPTERHGKVCRMLKSGIAKVVKKCPFTIQLQYESERNVQPVALGIDAGSKHVGVSATTKAKVLYESDVELRDDIVKLLATRRQLRRRRRSRKTRYRPARFDNRRRKEGWLAPSIRQKIESHLTVVANVCKILPVSQIIVETASFDIQKIKNPDIQGIEYQQGEQMDFWNIREYVLFRDGHTCQCCKGKSKDKVLNVHHIESRKTGGNAPNNLITLCETCHKGYHNGTVTLPKNIKRGMKFKDAAFMGIMRWTFYNTLKEQYEPDIPVHYTYGYITKNTRINHNLPKGHCIDARCISGNPDAVSDGTYYYQKKVRCHNRQIHKQTILKGGIRKSNQAEYLVRGFRLFDKVRYQGREYFIFGRRKSGFFDIRTLSGEKVNKGSINVKRLTFVDTRKNYLTERRTV

SEQ ID NO: 2745 - protein, 512 aa, unidentified
  source 1..512: note = human gut metagenome
MSTVYVLNKDGKPLMPTTRCGHVRRLLKEQKAQVVTSKPFTIQLLYETDDVVQPLYLGIDPGRTNIGVAVVKIDGTAVFTAHLETRNKEIPKLMQGRKKARRARRTNGRRCRRQRRAKANGTISKKCVKQTTAQNGSVSKRAKKIGVIKRHLPGCEKEVLCIGIKNKEAKFSNRTRPEGWLTPTANQLLQTHINLVKKIQKFLPISDVVLEINKFAFMRLDNPNVQKWQYQQGPLYQKASLEEAVSEMQEHHCLFCKNTIDHYHHVVPQHKNGSNTIGNIVGLCAKHHDLVHKDTSWQEKLAKKKTGLNKRYGALSVLNQIIPALTKELSSLFPKHFFATNGKSTYDYRAAHGVSKDHWLDAYCIAGSVLPNDACDNNINSHVPYELKQFRRHDRRALHKENMSRVYTLNGKSVATNRHKAIKQTTDSLEEFRQRQPNDVCKLKVKEHHPEYRNPKRSFPGCVFLVGKQTHVMQGTSGSHNGKADGYYDTNGNSYSSGKCKFVAKNEGIVFA

SEQ ID NO: 2746 - protein, 431 aa, unidentified
  source 1..431: note = human gut metagenome
MPDKVYVISRLGHPLMPCSPAKARHLLDDKKAKVVKRMPFTIRLLYGSTKYIQPIILGVDAGSKTIGLSASTAKEEVFAAEVMPRNDVVENLSTRREFHRARRNRTTRYRKPRSDNRVRSNHERWLAPSVKVKIQEHITSIKRVCTILPISKVVIETAEFDLQLLKAIQEGKPIPEGEDYQKGEMYGSYNVCQYVLWRDNYTCICCGVRGTPKNPVRLHVHHFESRKYGGNAPDNHGTLCDDCHKKFHLGIITDVKLKTRRRQSTRDAAFMGIMRKTLMWRLRTELFIPVAETKGYITKATREKLLVLPKSHTRDALAIAQGRHGFGIKEYAYVEPANHIYTVRPVRHHNRQLHKASILKGGIRKRNQASKYVFGFRLYDKVLYQGKACFVWGRRTRGTFLLRTIDGIKVKDGVSYRNLTLLERSSNYLIA

SEQ ID NO: 2747 - protein, 424 aa, Scytonema sp.
MQNYVFVIDKNKQPLNPIPPARARVLLTKGKAAVLRIYPFTLILKHVVDNSAPRPLVIKLDPGSRFTGIAILDQDKVIWAAELEHRGWQIKDSLESRRSLRCSRRNRKTRYRQPRFDNRKRPQGWLPPSLMHRVLTIETWVKRLCLYSPISQIAMELVKFDTQKMQNPEVDGVEYQQGELAGYEVREYLLEKWRRKCAYCDKEGVPLQIEHIHPRSKGGSNRVSNLTLSCERCNTKKGAKSIDEFLKKDPSRLEKIKRQVKQPLKDAAIVNATRLCVFRTLKSILLTTTGTGGQTKYNRTRLGLNKSHWIDAACVGDIETIQLLTQQPLRIKCTGWGTRQMCGTDRYGFATRHRERKQLHFGFKTGDIIKAVVTSGKKVGEYVGRVLCRKAGSFDITTSSGRVAGISYRFCIPIHKKDGYAYGF

SEQ ID NO: 2748 - protein, 470 aa, Sulfobacillus sp.
MAVLVLDKRKKPLMPCSEKRARLLLERGRARVHRMVPFTIRLVDRLQENSTLQPVRLKLDPGSKTTGMALVRETEMVDAETGEISRKAALLMLLELQHRGHAIRDALTQRRAFRRRRRGNLRYRPTRFDNRSKPEGWLAPSLQHRVDTTMAWVRRLLRWSPVTTLSQELVRFDTQALQNPEINGAEYLRGELFGYEVREYLLEKWGRKCAYCDAEHVPLTIDHIHPRSAGGSDRVSNLTLGCFPCNQRKSNRDVAEFLAHDPQRLARIGAQRKAPLKDAAAVNSTRWALWRQLVATGLDVEVGTGGRTKYNRHRLQVPKAHCLDAACVGHVDVLESWQQPVLAIKATGRGSYQRTRLNRYGFPRGYLTRSKSAFGFQTGDLVKAVVTKGKKVGTYMGRVAIRARGSFNIQGGNGLIQGIHHRFCALLQRADGYGYFWTKIALDKGEAGMGRSSTAALSLPGVNAGVSRAT

SEQ ID NO: 2749 - protein, 427 aa, Methanosarcina sp.
MLVFVINQNKKSLMPCKPSKARKLLQAGKAKVVRNTPFTIKLLFGSSGYTQPVIAGMDTGSKVVGCAAIANGKVLYQSEIYLRENVSKKMDQRKMYRRTRRGRKTRYRPARFDNRGNSRREGRLAPSIKSKLEAHFREKRFLESLLPVTGWKVELASFDIHKITNSEVSGVGYQEGDLKGFYNVKAYVLDRDDYTCQHCREKSKDSRLHCHHIVFRSNQGSDAPENLITLCETCHKALHNGEFKLSGSKSKTKHATEIGILKSQIRKSGWNFAETFGYETKFRREQVLGLEKTHYFDAVAICCRDDQKVEVEDSVFLKRNVPAGDYQQRRGKRSEKKMPTGKLFGLRKFDLVKTENGIGFIRGKRSSGYFSISDIFGNKISDSVNVKKKCRRLSARSTTLVQMVQMTHSSPTCHFRQAENGEEGVSC

SEQ ID NO: 2750 - protein, 296 aa, Scytonema sp.
MHCRIDNIKTWINRLRRFAPNEAISQELVRFDMQLMRNPDIQGKEYQQGTLTGYETREFLLEKWDRQCAYCGIKDVPLQIEHIHPRAQGGSNSITNLTLSCSKCNTKKGTKDIKEFLKKEPLRLERILKQAKRPLADAAAVNTTRFALLEVLKATGLPVETGSGGLTKFNRNQQNLEKTHWLDAACVGKSTPILNIEGVKPLLITANGHGTRQLCRTDKFGIPNRHCSRTKFHFGFQTGDIVKAVVTTGKKIGEYIGRIAVRSTGSFNISTSNGLIQGISYKYCKSIHKKDGYSYA

SEQ ID NO: 2751 - protein, 518 aa, unidentified
  source 1..518: note = human gut metagenome
MTPKKRKEASRMSEYIYVLGMDGDPQMPTKRKRHVEKLLQAGRARVFRQIPFTIQLTYENKPVLQPVTIAEDPGRSNIGMAVVSLSGELLSAAVVQTRNKEIVKLMEKRKQHRRASRNGERKARQRLAKKCHTMIKTGFLMRKLPMYGKDKRVRCNVIKNTEAKFCNRKREDGWLTPSAEHLVRTHINLIHKMQKFLPITDVAIEINRFAFLSLEDPSISGVDFQNGPLKGYDDLNVAIEDLQDGHCLMCNSPIEHRHHIVPRSMQGSNTIGNIAGLCCKCHERVHKDARFEDRLKKKKAGLNKRYAAVSVLNQAIPFICKRLEQEFGKEHVHYCSGRDTSMVRRSLGYHKTKEEQLHEVDAWCIAVLALQHVPEKAPEFDHVHEILQFRRQDRSRIKAQTSRAYYHEGKKIAKNRKKAEGQKDDSLQGWRKRQVERYGEEQTRKMISQLKVKKSIRRYNRLDRLMPGAVFYYQGVRYVMRGQHSNGQYLQAVGMRDKDFPAKKCKIVVHNQGLVFVS

SEQ ID NO: 2752 - protein, 406 aa, unidentified
  source 1..406: note = human gut metagenome
MVYVQDIDGKPMMPTTRHGKVRRLLKANKATVVNLCPFTIQLTYKSTDHKQPVTLGIDAGAKHIGFSATTEKEELFACETILRTDIVDLLSTRSQNRRTRRSRLRYRKPKFNNRVFSKKKGWVAPSVKQRIDSHLNEVNEIHKILPITKIVIEAAQFDTHKMKNPNISGIDYQNGEQLGFWNVREYVLFRDGHKCSYCKGKSKDLILNIHHIESRKTGGDSPSNLITLCETCHKEYHKGNIDLKVRRGKSLCGAAIMGIMKWRLYDELKSRYSNVSMTFGYITKYNRIKYGIEKSHTSDAFVISKNFNAKRIEYQYLKRLVRRHNRQIHKMKILKGGKKKNNQAPFEVFGFRLFDKVLYNNEINFIYGRRKSGNFNIRDFNGENPKDVSYKKLKLIRGKRHPIILK

SEQ ID NO: 2753 - protein, 526 aa, unidentified
  source 1..526: note = human gut metagenome
LLRQGRLIVKEVAYMSTVYVLNKDGKPLMPTTRCGHVRHLLKEQKARVVASKPFTIQLLYKTNDVVQPLYLGIDPGRTNIGVAVVKADGTAVFTAHLETRNKEIPKLMKKRKDSRRARRTNGRRCRRQRRAKANGTISKKCVKHDTAQNGSVSKRAKEIGVIKRHLPGCEKDILCIGIKNKEAKFSNRTRPEGWLTPTANQLLQTHINLVKKIRKFLPISDAVLEINKFAFMQLDNPNIQKWQYQQGPLYQKANLEEAVSEMQEHHCLFCKKPIAHYHHVVPQSENGSDTIGNIVGLCTKHHDLVHKDTAWQKKLAKKKTGLNKKYGALSVLNQIIPALTKELSSLFPKHFFATNGKSTYDYRSAHGVSKDHWLDAYCIACSVLPNDVCDSGINNRVPYELKQFRRHDRRALNNENMSRVYTLNDNVVATNRHKATKQTTDSLEEFRQNHPDDVCKLKVKEHHPTYKNMNRNYPGSVFLIGKQVHVMQGIAGSKDGEATTYKDTNANSIAAGKCKFVAKNSGILFV

SEQ ID NO: 2754 - protein, 431 aa, Calothrix sp.
MEGLMSKIFLLDTNKKPLNPIHPAQARQLLKNKKAAILKRFPFTLILKDASSHAEVQPLRIKIDPGAKTTGFVLVNDATGEVIFAAELQHRGFQIRDALTSRRQLRRGRRNRKTRYRAPRFNNRKRNEGWIPPSLQSRVENILTWVKRLQKLSLIDSISQELVKFDMQIMQNPDIQGKEYQQGTLAGYETREYLLEKWDRQCAYCGIKDVPLQVEHINPRSKGGSNSISNLTLSCEKCNLKKGTQDIKDFLKKDTKKLESILKQAKKPLESAAAVNTTRFTLLNALKATNLPVETGSGGLTKFNRIQQGLEKTHWIDAACVGLGTPILNIKGVKPLLIAAKGHGTRQMCRTDKHGFPTRYVPRIKFVHGFQTGDIVKAVVKTGKKVGVYIGRIATRYTGSFNISTKTGLVQGISYKHCKTVHKKDGYSYSK

SEQ ID NO: 2755 - protein, 426 aa, Moorena sp.
MQNYVFVIDTNKQPLNPIPPKKARRLLNKGKAAVFRMYPFTIILKTAIRQSRRCANNNPTISPSQIKIDPGSKVTGFALVQNNQVIWGMELEHRGGLIKKKLESRGAVRRGRRNRNTRYRKPRFLNRKRPEGWLPPSLEHRILTIQTWVKRLIKFCPVNEIWVERVKFDTQKMQNPEISGIQYQQGELAGYEVREYLLEKWGRECTYCGKQSVPLQIEHIHPRSLGGSDRVSNLCLACEKCNQRKGNKPIEDFLKKKPSLLQKIKSKAKQPLKDATAVNATRNKLVKVLQLIKVVVTGTGAQTKYNRTRLELPKQHWIDAACVGDIETLVLRTSQPLLVTCKGQGGRQKAALNKYGYPIRHNPLKPIKGWVTGDIAKHQKLGIGKVTPRSKGSFGFTPLGIKGYKSCKPQDISAVHRKDGYTYSFC

SEQ ID NO: 2756 - protein, 414 aa, unidentified
  source 1..414: note = human gut metagenome
MPCSPAKARLLLKEKKAIVVRRTPFTIQLTIATGESKQPVSLGVDAGYKHVGLSASTEKAELYASEVELRQDITDLLSARRALRQSRRNRKTRYRAPRFDNRIRTKRKGWLAPSVENRINAHLSRIEAVLRLLPITKITVETASFDMQRLKNPDISGKEYQEGEQLGFWNVREYVLFRDGHVCRHCHGRSKAPVLNVHHLESRRTGSDSPDNLITLCETCHKALHRGEITLKAKRGQSFRAQAFMGIMRREVLNRLKASYPELKVHETYGYLTKHARIANGSVKSHGADAFCIAGNLGAERLGEFFFQKQTRRNNRQIHKLSILKGGIRKRNQAPFEAKGFRLFDKVACQGEEGFIFGRRSSGSFDVRKLDGTRISAGISCKKLRLLEKRRTYLTEIRKEEALPPLPEGRGLRA

SEQ ID NO: 2757 - protein, 425 aa, unidentified
MENTLKVFVLNMRGQPLMPCSPPKARKLLRAGKAVPVRRTPFVIQLTVPTGETKQPITLGVDAGYKHVGLSATTAKEELLASEVELRQDVTGLLSNRLTLRRARRNRKTRCCAPRFDNRVRSKHKGWLAPSVENRIQAHISRIEAVCRVLPITKIVIETASFDIQKIKNPEVEGTDYQQGEQLGFWNVREYVLFRDGHVCQACKGRSKDLILNVHHIESRKTGGDAPGNLITLCEACHKAYHAGKLKQFSPRRGASFRAETFMGIMRWTVLNRLRERHPELPVTNTYGYLTKHKRIVEGLPKTHCAGGFCIAGVLDAKRRGEYLFQKQTRRHNRKIHKQTILKGGVRKRHQAPYLVHGFRLFDKVLCKGEGGFIFGRRSSGAFDVRYLDGTKISAGISYKKLSLLEKRKMFLTELRKEGRDSSRV

SEQ ID NO: 2758 - protein, 417 aa, unidentified
  source 1..417: note = human gut metagenome
MVYVINKQGQALMPTERFGKVRRLLKNSLAHVVCRIPFTIQLDYDTTDYTQPVSLGVDAGSKHIGISATTSDKELYAADVELRNDIVDKLSTRREQRRTRRSRLRYRKARFNNRVSSKRKGWLAPSVENKIQTHLTVVEKIHKFLPITNIVVETASFDIQKINNPSISGSEYQQGEQLDFFNVREYVLFRDNHTCQHCKGKSKDEVLNVHHIESRKTGGNSPKNLITLCETCHKAYHRGEFELNVKRGKSFRDAAFMGIMRWSFYDRLKNIYPDVSMTFGYITKNTRITNNLPKDHYVDARCISGNPVAKPLGYYFYQKKVRCQNRQIHKANFLKGGRKKLNQAPFLVKGFRLFDLVEYKKELYYIFGRRSNGSFDIRKLDGTKVNKGSINCKHLRLIDKRRSILTEKRTQGAYPCE

SEQ ID NO: 2759 - protein, 323 aa, Ktedonobacter sp.
MEQGSILYLSEVEVRNDIATTMKERATHRRDRRNRKTRYRPARWLHRRNSIKTGRFSPTMRSKIDAHLREIHFAHSLLPISSIVLETGTFDTHALKNPEVVRKKWLYQKGINYGFANTKAYVLTRDGYTCQHCQGKSKDQRLEVHHIIFRSQHGSDEESKLLTLCKTCHDALHAGTIPLKRTGKKKGDLLHATQMNSIRVQLLKLVEAEETWGFVTKEHRLLAGLPKEHCFDAAMIATRGNRPVFQIQTVFVKKCIPDGEYQQTKGKRSEQRIPTGKIQGCAQMRQSALSRSGILYQRAYVYWLCYFDDDRREKGRFETHSQV

SEQ ID NO: 2760 - protein, 468 aa, unidentified
LAVFVLDRSGKALMPCSEKRARLLLARGRARVHRLMPFAIRLVDRELRSSAAQPLRIKLDPGSETTGLALVRDIEQLDASTGEIRRGAVVLNLFELVHRGRQISEALTARRAMRRRRRGTLRYRAPRFLNRTRPAGWLAPSPQHRVDTTLAWVKRLQRWAPITAASTELVRFDMQALDNPEVTGVEYQQGILLGYELREYLLEKWMRMCCYCDVQNVPLNIEHLVPRARGGSNRVSNLVIACVPCNIRKAAQPLDVFVKDKARLARITAQARRPLKDASAVNATRWALVNALRATGLPVETASGGRTKYNRSQLGIPKTHALDAVCVGEVSAVLAWRKPTLQVKCTGRGSYQRTRQDRYGFPRGYLMRAKRVHGFGTGDHVQADVPSGRKAGTHRGRVAVRATGSFNIQTHGQVVQGVAHRYCRVLQRADGYGYSRMATEKGEAGAGAAAQPVPSLPGLKAEVSRAEG

SEQ ID NO: 2761 - protein, 434 aa, Moorena sp.
MQNYVFIIDQNQNPLNPVRPKRARQLLEQGKASVFRRYPFTLILKRAINQPNIHPLTIKIDPGSRYTGFALLDGSNVIWLGELEHRAQKIKSELDKRRAVRRSRRYRKTRYRKARFLNRKRPEGWLAPSLNHRVLTVETWLNRLIRFAPVKGIAIESVKFDMQKMVNPDISSEEYQQGTLHGYEVKEYLLEKWSRKCTYCGKKDIPLQIEHIKPKSRGGTNRISNLCLACQKCNHKKGNKPIEDYLKNQPSLLLKIKAQAQKPLKDAAAVNATRKAIVKMAQTLNCQGQPLCQIEVTTATGGQTKYHRCRLGLPKQHSIDAACVGDLEKLEFRTSQALLIKSTGQITKRMCRMNKFGFPCSQPRRRYNHDWKTGDIGKTVKNGITYVGKIVVQNQRRFEIRIGKQRIGNTFECLVRLHKQDGYQYSFSPNYSLL

SEQ ID NO: 2762 - protein, 419 aa, unidentified
  source 1..419: note = human gut metagenome
MVYVLDINGQPLMPTARHGKVRRLLNSHLAKVVKRCPFTIQLLYQSTKEIQPVSLGVDAGSKHIGLAATTEKKVVYQEELIPRNDVVKLLSARRTLRRTRRNRKTRYRKPRFNNRVRSKHKGWLAPSIEVKIQEHITAIKNVCKILPVSEIHVETAEFDLQRLKAMEEGKPLPVGTDYQLGEQYDFYNTRQYVLHRDGYTCQCCGTHDNNIKLHVHHIESRQTGGNAPNNLIVLCEHCHKALHEGKIELPENKKRGKSYRDAAFMGIMRSTLLERLKKEVNVPVMMTYGYITKYWREKVGLEKSHINDAICISKHPYAKPLDTYYLTKAVRHHNRQIYKANFSKGGIRKRNQAPYLVKGYRLFDKVLYQGKECFIFGRRISGGMDVRLLDGTHINAFVGYKKLKLLELRKAYLIERRTC

SEQ ID NO: 2763 - protein, 451 aa, Scytonema sp.
MSNYVFLIDQNKTPLNPVHPAQARKLLDSGKAAVFRRYPFTLILKRIIENPNVYPLTLKIDPGSKFTGIVLVTNQGNVIWGMELQHRGQQIKDALEHRRAVRRGRRNRNTRYRKARFLNRKLNHGRLNAPSLRHRVLTTETWVKRLQKFAPIGSIVQELVKFDTQVIQNPEISGTEYQQGTLHGYECREYLLEKWNRQCAYCGVKDVPLEIEHIQPKSKGGSDRISNLCLACHKCNQRKGNKDIKDFLKGKPEVLNRILKQAKAPLKDAASVNSTRWVLFNILKSFGLPVRTGTGGQTKFNRIQFDLPKAHWIDAACVGQCSAVDGKASAGNCRWRSLSGGDTRKGVVETIKLATTKILRVKATGFGGRQRCQTDKFGYPQKHRPLRPILGFCTGDIVRADVLKGKYAGTFTARVCPMSHGYGEFVIDKKRRSIKLDYLTPVHRKDGYDYA

SEQ ID NO: 2764 - protein, 415 aa, unidentified
  source 1..415: note = human gut metagenome
MIYVRSKEGKALMPSERGGRIGYLLRHGKAHVVSRVPFIVQLDYESTIYTQEVSLGIDAGSKHIGVSASSEKRELLAAQVELRSDVVNLLSTRRELRRTRRNRKTRYRKVRFDNRKKKDGWLAPSIEQKVESHLKVIRLVHKLLPITKTTIEVAQFDAQKIKNPDIKGEEYQQGEQMGFWNVREYVLARDGHKCIHCKGKSRDPILNVHHLESRKTGGNSPSNLVTLCETCHKAYHRGEFELKIKRGTTLRDAAVMNIMRWAVYEQAKEEFRNVHMTYGYVTKHTRIENGIAKTHAADAFCIAKNVHARRSKSFFMCRCVPRHTRALHVANPKKGGIRRGTIASHKIGKSRFQRFDMVRWKGKECFIFGSTHGRPILRDVEGKQIAGQPSVNIKTIKFLNRLRNNILVEERTSES

SEQ ID NO: 2765 - protein, 424 aa, Scytonema sp.
MQNYVFVIDQNKQPLNPISPARARELLTKQKAAVYRVYPFVIILKHAVDNPDPKPLTIKLDPGSKTTGIAILDQDKVIWVAELEHRGWQIKDALESRRSLRRSRRNRKTRYRQPRFNNRKRKEGWLAPSLMHRVLTIETWVKRLCRYAPITQISMELVNFDTQKMQNPDIDGIEYQQGTLWGYEVREYLLEKWGRKCAYCDKQGVPLQVEHIHPRAKRGSNRISNLTLSCERCNIKKGTKSIDEFLKKDGSRLEKIKRQAKQPLKDAAAVNATRWELFHTLKNILPTTTGTGGQTKYNRTRLELPKQHWIDAACVGDVETIQLLTQQPLRIKCTGWGTRQMCGTDRYGFPTRHRERKQVHFGFKTGDIVKAVVTTGKKVGEYLGRVLCRKTGSFDIATKSGRIAGISHRFCSPIHQKDGYSYAF

SEQ ID NO: 2766 - protein, 426 aa, Scytonema sp.
MSKSNFVFVLDADLKPLTPCTPGMARSLLKSGKASVYRRYPFTLILKKKVDTTPAPITIKLDPGSKTTGIALLQGSKVIFAAELTHRGQTIKASLESRRSLRRGRRTRHTRYRQARFLNRTRPKGWLAPSLQHRVETTMTWVKKFIRLTPLKSIIQELVRFDLQQLENPEISGVEYQQGELRGYEVREYLLNKWDRKCTYCGAENIPLQVEHIHPRAKGGSNRIYNLSLACEKCNLKKGTQDIEQFLAKKPDLLKKIKAQAKQPLKDAAAVNSTRWALFNRLKETGLSISTSSGGLTKFNRTRLGLAKTHWLDAACVGQVETLSILTEKPLLIKATGHGTRQMCRTDKFGFPSRYVPQNKFVHGFQTGDIVKAVVTTGKKIGTYVGRVAVRSTGSFNISTANGLIQGIGYKNCVSVHKKDGYNYGF

SEQ ID NO: 2767 - protein, 424 aa, Scytonema sp.
VLVIDSEKRQLNPIHPAQARQLLRNKKAAVYRRFPFTLILKESRSDSPVSPLRLKIEPGAKTTGLALVNDITGVVIFAAELKHRGFTIRDALTSRRQLRRSRRNRKTRYRKPRFLNRTRPQGWLAPSLQSRVDNIKIWVEKLRKFAPIEAISQELVRFDMQLMRNPDIQAKEYQQGTLAGYETREYLLEKWDRQCAYCGVKDVPLQIEHIHPRAKGGSNSITNLTLSCEKCNTKKGTKDIKEFLKKDPSRLEKIQSLAKRPLADAAAVNTTRFALLSVLKATGLPVETDSGGLTKFNRNQQNLKKSHWLDAACVGKSTPLLNIKGVKPLLITANGHGTRQSCRTDKFGFPNRHCSRTKFHFGFQTGDIVKAVVTSGKKVGEYVGRIATRATGSFNISTKNGLVQGISYKHCKHIHKKDGYSYAF

SEQ ID NO: 2768 - protein, 305 aa, unidentified
  source 1..305: note = human gut metagenome
MSTCVCVLSNSGERLMPTFRLGKVRRLLKDGKAKIVKHHPFTIQLLYDSKANTQPIEICEDVGYNYIGISVKSQSHEYASAQYDTLQDEKACHDSCRKLRRTRRNRLRYRKPRFDNRKRGEGWLAPSLRHKKELNVNVVKMYCAVMPITHATIEVGSFDTMLVKAIQEGKAIPEGADYQKGPRYNLATLREAVFYRDNYVCKVCGRKATEGAILHVHHMFYWKGRHGNSLSELITVCEKCHTSANHQKGGKLFGFGEDKEFANLSGAAFMNAVRWQIVNALYATYGKEFVTITYGAMTKEKRIIL

SEQ ID NO: 2769 - protein, 431 aa, unidentified
  source 1..431: note = human gut metagenome
MPNKVYVINKHGRPLMPCSPAKARHLLDDGKAKVKKRAPFTIQLVYGSSGYTQEVILGVDAGSKTIGMSASTTKEELLSAEVKPRNDVVDLLSTRREFRRARRNRKTRYRKPRFDNRVRSKHKGWLAPSVEVKIQEHITSIKRVCRILPVSKVVIETAEFDLQLLKAIEEGKPVPQGEDYQQGEMYGHYNVRQYVLWRDGYTCQCCGAHATKKKEVRLHVHHLESRKVDGDAPDNQVTLCESCHEKLHKGLIAEKDFKKRKRKSTRDATFMGIMRKTLMQRLCSELPIPVIETRGYITKATREKLLVLPKSHTNDALAIAQGKQGFNVGYLPGIVQINKIYTIRPVRHHNRQLHKATILKGGIRKSNQTEKYVFGYRLFDKVQFNGQDCFIWGRRTTGIFTIKTINGKMIKDGISFKKLKLVEKSTSYLIA

SEQ ID NO: 2770 - protein, 424 aa, Moorena sp.
MFVFVLNSSRKPLNPTHPARARKLLKTGKAAVFKRYPFTIILKEEVAEPNNQQLRIKIDPGAKTTGIAILRNESVLWGAELTHRGGQIRSALTSRRQLRRSRRNRKTRYRQPRFNNRCREEGWLPPSLISRVENILTWVKRLWRLSPIAHISTELVRFDTQLIQNPEISGIEYQQGTLAGYELREYMLEKWHRRCVYCGATDTKLEIEHIVAKSKGGSNRVSNLTLSCQKCNEKKGNKPIEQFLENNPLLLKSILSQAKISLADTAAVNATRWKLFNGLKELGIPVETGTGGRTKYNRCRQNLPKTHWLDAANVGHSTPDTLKILVSRPMRIKATGHGNRKMCGTNAFGFPIRHRSNTKKHFGFQTGDIVKAVVTKGKKVGSYIGRVLCRATGSFDITTATGRVAGISHKYCSFVHRSDGYSYQ

SEQ ID NO: 2771 - protein, 424 aa, Scytonema sp.; identical to SEQ ID NO: 2765

SEQ ID NO: 2772 - protein, 424 aa, Moorena sp.
MRVFVLDKNKKPLDPCQPARARILLKQGRAKVFRRYPFTIIMGDLEELECVTHNHQIKLDPGSQTTGLAIIQEKVVVWGAELTHRGLQIRDGLTSRRQLRRSRRNRKTRYRQPRFLNRKRPDGWLAPSLMSRVYNIITWVKKLTRFCPITGISQELVRFDTQKMENPEISGTEYQQGTLYGYEVREYLLSKWNRKCAYCGVTDTPLEVEHIKPKSKGGSDRVSNLAIACRKCNQTKGNQEIEQFLSGKPDVIKRILSQAKRPLVDGAAVNSTRWKLYNELKALGLPIETGSGGLTKYNRCRQNLPKTHWLDAANVGKVDTLYIEVYQPLLISAKGHGTRKMCRTNKFGFPTRYVPRWKFVKGFQTGDIAKAVVTKGKKVGTYTGRIATRKTGSFNISTKHGLVQGISHKYCSIVHRKDGYAYSF

SEQ ID NO: 2773 - protein, 456 aa, Idiomarina sp.
MAIFVLDKKKQPLMPCSEKRARLLLQRGRAVVHKRYPFTIRLKDRVGGSTQPLSLGIDPGSKTTGLALIREPDSQQRHVLCLFELIHRGYQIKKALQQRAAFRRRRRSANLRYRAPRFNNRTKPKGWLAPSLQHRVDTVTAWVNRLNRLAPVTAISQELVRFDTQKLDNPEINGVEYQQGTLLGYEVREYLLEKWGRECAYCGTADTPLEIEHVIPRSRGGSNRVSNLTLSCHPCNQSKDALSLVDFFATDKGLKKRLKANGHTANARLERVQRQLKQPLRDASAINATRWALFNALKATSLPVAVGTGGRTKYNRQRLGIPKTHALDAACVGAFDALHAWQVPTLTIKAMGRGSYQRTRLTKHGFPRGYLMRQKQVHGFQTGDMVRAMVPTGKKAGTHTGRVAVRKTGSFNIQTEQGAVQGISHKYCTLIQRGDGYGYHFTPFTHLTGGAGQAVA

SEQ ID NO: 2774 - protein, 400 aa, unidentified
  source 1..400: note = human gut metagenome
MPCSPAKARLLLKEKKAIVKRRTPFTIQLTIATGETKQPVGLGVDAGYKHVGLSASTDKAELYASQVELRQDITDLLSARRALRRARRNRKTRYRAPRFNNRIRTKRKGWLAPSVENRINAHLSRIEAVLRLLPVTKITVETASFDMLLLKNPDIAGKEYQEGEQLGFWNVREYVLFRDGHVCQHCYGRSKDPVLNVHHLESRRTGGDSPGNLITLCETCHEALHRGEIALKTKRGHSFRAEAFMGMMRWEVLNRLKASHSELEVNNTYGYRTKHARIVNGIDKSHCADAFCIAGNLGAERLCEFFFQKQTRRNNRQIHKLSILKGFRLFDKVACKGEESFIFGRRSSGYFDVRKLDGTRISAGISYKKLRLLEKRRTYLTEIRKEEALPPLPEGRGLRA

SEQ ID NO: 2775 - protein, 439 aa, Calothrix sp.
VTAEMQTNYVFLLNADKTFLNMVHPARARELQNKGKVSVFRVYPYVLILKNQVLNPLLHPCILKIDTGSKHTGFAIQSGDTILFRMELEHRGETIKSDLSKRAGFRNGRRSRNTRYRKARFDRKKPEGWLAPSIKHRLLTTETWIKRFMRYCPIETIEIEQVRFDTQKMLKPEIDGVEYQQGTLFGYEVREYLLEKWGRQCVYCGEDKIALEVEHIQPKSNGGTDRVSNLTLACHECNQQKGNQDIKDFLSGKPDLLKRILAEAKQPLKDAAAVNSTRFAIVKSAKKLCNSVKCWTGGRTKFNRCSQGLPKSHSIDAACVGESGEKIVIKTDQALIIKCKGHGNRQARRANAQGFPAVKNAKETYKHITAGDIVKVDIKKDRKNIKAGLYTARVKTPTKKGFEVLIDGFRVSVSTMKDVHFVHRNDGYGYEFQKTTICS

SEQ ID NO: 2776 - protein, 426 aa, unidentified
  source 1..426: note = bioreactor metagenome
MVFVLDANKKPLSPCHEAVARKLLKQGKATIFRRYPFTIILKKAVDDTDNKQEYRLKIDYGSKHTGLAILQNNNVIWLAQIDHRTDIKKKLDERRSYRRRRRNKNLRYRQPKFLNRRRKEGWIPPSLESRINNIKTWVKRLQKLVPLTHISYENVKFDTQLMRNPEISGIEYKQGTLQGYEVKEYLLEKYNRKCCYCGKENVPLEVEHIIPKSRGGTNRIDNLCLSCHECNQKKGNLTAEEFGYPEVQRQVKETLKDTSVVNSTRWKVYDVLLRTSLPVECVTGALTKMNRIKLGLPKEHYFDACCVGQSTPDKLYFKTKDVLYIKAKGRGSHCRTNLDKYGFPRGYLARQKYFFGFQTGDMVKAEIPKGKYKGIWYGEVACRKSGSFDIKDKEGQRVVQGVNHKYFSVVQRFDGYSYRKEVANLM

SEQ ID NO: 2777 - protein, 427 aa, Methanosarcina sp.
MLVFVINQNKKPLMPCKPSKARKLLQAGKAKVVQNTPFTIKLLFGSSGYTQPVIAGMDTGSKVVGCAAIANGKVLYQSEIYLRENVSKKMEQRKMYRRTRRGRKTRYRPARFDNRGNSRREGRLAPSIKSKLEAHFREKMFVESLLPVTGWKVELASFDIHKITNPEVSGIGYQEGDLKGFYNVKAYVLDRDGYTCQHCRGKSKDSRLHCHHIVFRSQKGSDAPENLITLCETCHKALHNGEFKLSGNKSKTKHATEIGILKSQIRKSGWSFAETFGYETKYRREQILKLIKTHYFDAVAICCRDDQKVEVEDSVFLKRNVSAGDYQQTKGKRSEKKIPTGKLFGLRKFDLVKTENGIGFIRGKRSSGYFSISDIFGNKISDSVNVKKKCRRLSARSTTLVQMVQMTHSSPTCHFRQAGNVEEGVSC

SEQ ID NO: 2778 - protein, 451 aa, unidentified
  source 1..451: note = human gut metagenome
LMPTIRLGKVRRLLKDGKAKIIKHHPFTIQLLYDSKANTQPIEICEDVGYNYIGISVKSQSHEYVSAQYDTLQDEKACHDSCRKLRRTRRNRLRYRKPRFDNRKRGEGWLAPSLEHKKQLNIRLIERYVSVIPITHATVEVGSFDTMLVKAIEEGKATPESADYQKGPRYNLATLREAVFYRDNYICKVCGRKATEGAILHMHHMFYWKGRHGNSLSELITVCEKCHTPANHQKSGKLYGFGENVKFADLSGAAFMNTVRWQIVNELYAAFGKDFVTVTYGAMTKEKRIALHLEKSHNNDAYAMGSFHPVNRCAFEHYEKVKRNNRILEKFYDSQYIDTRTGELTNGKSLFNGRISRSHKKDSENLHKYRGKRICKGHRALRRKKLALNPGDLVSLNEEILVVHGTHTKKNGSVNVEFKTPSRGGKKSASLKKLKIVKTSNLMHSAWTKVS

SEQ ID NO: 2779 - protein, 378 aa, Scytonema sp.
VVDNPNPKPLTIKLDPGSKTTGIAILDQDKVVWAAELEHRGWQIKNALESRRSLRRSRRNRKTRYRQPRFNNRKRKEGWFAPSLMHRVLTIEIWVKRLCLYSSITEIVMELVKFDTQKMQNSEISGVEYQQGELAGYEVREYLLEKWSRKCAYCDKEGVPLQVEHIHPRAKGGSNRVSNLTLSCERCNTKKGTKSIDEFLKRDGSRLEKIKRQAKQPLKDAAAVNATRWELFRTLKNILPTTTGTGGQTKYNRTRFELPKQHWIDAACVGDVETIQLLTQQPLRIKCTGWGTRQMCGTDRYGFPTRHRERSSVHFGFKTGDIVKAVVTTGKKVGEYVGRVLCRKTGSFDIATKSGRVAGISHKFCSLIHQKDGYSYAF

SEQ ID NO: 2780 - protein, 490 aa, unidentified
  source 1..490: note = human oral metagenome
MYVVYVLDRQGKPLMPTKRFGHVRRMLKTNKAKAISTKPFVIQLQYESTDFVQPLYGGTDPGRTNIGEAVLNNKGEVVYAAHVLTRNKEIPKLMADRAAHRKASCRGERLRRKRRAKANGTMTCFPEGRKLPGYKDGVLELKDIINTESRFNNRKRPAGWLTPTARQCIQTHLNMVQNICKILPVTNWTLEYNRFAFMQLEDGSVRGWDFQNGRLKGYASKEDYVYALQGGVCVCCGASIEHYHHIKPRHKGGSNTHENLVGLCSVCHAEIHIGKRNLDKIGKYKKYAGTSIVNIAIPFIWDGIVKMFGDKAHICEGQETAELRRANNIPKEHFADAVCIAGIGYGITPQYDDNQPFKLRQFRCHDRSRINAQVERTYLDGKTIVAKNRKPRFEQKGDALSDLQSKIAKEHGELAARRAVSKLVVKKSYRRYNVPERIKPSAVFMFNNKKYLLRGQLTNGMYYRAFGEGTKNFPSRNCEVVSSGCSLTYM

SEQ ID NO: 2781 - protein, 518 aa, Nonomuraea sp.; identical to SEQ ID NO: 2675

SEQ ID NO: 2782 - protein, 377 aa, unidentified
  source 1..377: note = human gut metagenome
MQYVYVLNKHGEPLMPCSPRKARLLLKQKKACVVKRTSFTIKLLYGSTGYKQPITLGVDAGSKHIGISATTEKHELYREEATPRNDVVDLLSARRAFRRSRRNRKTRYRAPRFNNRVHSKHKGWLAPSVEVKIQEHITVIKRICRILPVTLVRVETAEFDTQRLKAMLAGKPLPVGTDYQLGEMYDEYNVRQYVLKRDNYTCQCCGAHSTKTKDVKLHVHHIETRRTGGNAPNNLITLCTDCHKALHAGKVTLDGKKRGKPLKDAAFMGVMRKTLMERLHKKLKIPVQGTYGYITKYLREKNGIPKSHTNDARCISKNSLAIPCDTCYYTKAVRHHNRQLHKATILKGGIRKANQAPYIVKGFRLWDKVLYNGQECF

SEQ ID NO: 2783 - protein, 445 aa, unidentified
MPLMPCSEKRARLLLARGRARVHKVVPFVIRLTDRLTEDSEFQLLRLKLDPGSKTTGLALVLDKADTTVGVLNLFELVHRGRQISEALMQRRRFRHRRRGANLRYRAPRFYNRARQTGWLAPSLRHRVETTMSWVRRVLRWAAVSAISMELVRFDMQALQSQDIAGVEYQQGALFGYEVREYLLEKWGRRCAYCDAQDVPLQIEHVLAKARGGSNRVSNLTLGCGPCNLKKGGRDVRGFVKDKARLARILARAKTPLRDAAAVNATRWVLLNALRTTDLNVEIGSGGRTKWNRTRLGLPKTHALDAACVGTVHAIFGWQRPTLELKCSGRGSYQRTRLTAYGFPRGYLTRQKRIHGFQTGDRVRATVLTGKKAGTHVGRVAVRAKGNFNIQTPQGVVQGIAHRHCTMMQRADGYAYATVPLKRGKDQGPAQQQGAYRASCCPSPA

SEQ ID NO: 2784 - protein, 462 aa, unidentified
  REGION 1..462: note = Ga0315294_10076910
MQQLRGKFKNVPRSTTLAPCSTTSILNREKTPYPLIGARCIEEQRTRNDGEVNHQQHRAGQNLRVSGIVYVLNLRGQPLMPCRQQKSKKLLKEGKAKVIKRSPFTIQLLIPTGETKQEINLGIDTGFGNIGFSATTKKQELISGTLILDGKTKERLEEKLMYRRGRRNRHHWYREPRFDNRTRKDGWLPPSIERRYLTHLNLILKIHQILPITNIILEVAKFDIAKIENPEISGIGYQQGNLYDYQNMRSYLMSREHGKCQFCGNDFKGQSSHIHHIKPRSKGGNDRSNNLVLLHETCHKEIHDQHLEKKLKSNSKDYKHSTFMNIINKKFRQDIPELKITYGNITWVKRNNLNLEKNHINDAFVISNGTNQIRIKSVEIKQVHRNNRVLQLNRKGFKPSIKREKSKVNPGDLFWIGGKQYICKTMFNKGNYIRYGDVKMKEYFNFSKVTKIFKYGSFIWSI

SEQ ID NO: 2785 - protein, 423 aa, Arthrospira sp.
MSNHIFVLDTNRKPLTPCKPGVARSLLKAGKASVFRRYPFTIILNKEVDANPEPLELKLDPGSKVTGIALKQGNHIIFAAELQHRGQQIKEALLSRRQLRRSRRNRKTRYRPARFLNRTRSKGWLAPSWQHRVDTLMTWVQRFRRLAPVGRIAQELVRFDLQLMENPEISGVEYQQGALQGYEVREYLLEKWGRTCAYCGAQNVPLEVEHIQPRSKGGSDRVSNLTMACHSCNQAQGNGDIRDFLSGQPDVLSRLLRQAKSPLKDAAAFTSPRWALFKVLKAPGLPVTTGTGGQTKFNRLRLNLPKAHWLDAACVGPVESLEVLTSKPLLILAKGHGTRQMCGTNKYGFPNRHRSRRQIHKGFQTGDMVTATVTAGKKIGSYLGRVLCRASGSFDITTASVRVAGISHKYCQPIHRKDGYAYA

SEQ ID NO: 2786 - protein, 419 aa, Moorena sp.
MPNYVFVIDTNKQPLNPIPPKKARRLLDKGKAAVFRMYPFTIILKTAIDNPIVSPCQIKIDPGSKTTGFALVQNNQIIWGMELEHRGGLIKKKLESRKAVRHRRRNRHTRYRKPRFFNRKRSEGWLPPSLEHRVSTIETWVKRLTKFCPVNEIWVERVKFDTQKMQNPEMNGIQYQQGELAGYEVREYLLEKWGRECTYCGKQSVPLQIEHIHPKSFGGSNRVNNLCLACEKCNQRKGNKPIEEFLKKKPSLLQKIKTKAKQPLKDAAAVNATRNKLVKVLQNIKFVVTGTGAQTKYNRTRLGLPKEHWIDAACVGDIGTLVLKTSQPLLVTCKGQGGRQKAALNKYGYPVRHNPLKPIKGWVTGDIAKHQRLGIGKVTPRSKGSFGFTPLGMKGYKSCNPQDISAIHRKDGYTYSFCK

SEQ ID NO: 2787 - protein, 456 aa, unidentified
  source 1..456: note = marine metagenome
MQRVFVLGKNKERLSPCTPARARKLLSKNKAAVFRQFPFTIILKERETGNTQPLYFKIDQGSKTTGISLVSINKNSNKVIYACNLVHRGHAISESLTKRRAIRSSRRSRKTRYRKPKWTNTMSKKQFEHINKRPKGWLAPSIKSRLDNTVNLFNKLNKLTPITNVSIENVRFDMQKINNPTISEIGYQQGDLFGFEVKEYLLYQHKHTCAYCHGLSKDPILEIEHILCKSKGGTNRLSNLSLACRKCNQDKGSLLPEEWLQKLSKSKSALNKKRFTLFSKVLKGVKPSLKDAAAVNSIRNALVNSFNLPIELGSGGLTKYNRKQNNYPKEHWIDAACVGLSGEEIHIPTSLIPVEIKANGRGSRQMCRVDKNGFPRTSAKKASNKFNFKTGDIVIAKVKKGKKQGTYLGRVAVRESGYFNITKKSGVVQGISYQYCRLLHKNDGYSYSNLVNLITT

SEQ ID NO: 2788 - protein, 466 aa, unidentified
MQRRVFVLSKNRKPLMPCSPARARQLLKERKASVYRQEPFTIILQKRTEGDLQKVQLKFDPGSKITGMALVVFFQKGTIVTWAAELEHRGEKIVDLLSKRRAIRRSRRNRKTRYRPPRFCNRTRKKGWIAPSLKSKVDNIFNWTKKLLTYTPIDNLCVETNRFDTQKLQNPEISGVKYQQGTLFGYEIREYLLYKWNHQCAYCDAKNVALEIDHIHPRSKGGSNRVSNLTISCRKCNENKGNGDIHEFLSKDNKRLQKIVSYSKKTLRDAASINTTRYVIGNQLKKLGMDVEFASGGKTKANRRHNGFNKQHWIDAACAGESGENVTISQDLIPLGIQSQGRGSRQMCRVDQFGFPRTTAKSQKRAKDFQTGDIVKAVVTKGKKKGVYVGRVAVRSNGYFNIKTNNSTVQGISYRYCQLIQQVDGYFYFQKGDARLKKASCSCFAHSRPSGDSSPTYRSRGILATN

SEQ ID NO: 2789 - protein, 497 aa, Streptomyces sp.
VLHQQLALELDPADNPRDRDETGAERREATGVEHVRGEIPAASPGGGGVTPNQPVGEEPRERHPFVFVLDKHGQPLQPCTPASARKLLKKGRAVVHRHTPFVIRLKDRTIAESEVDGVELGIDPGSRHTGIAAFTARAGERRGRYAVQLDHRGAVIRKRMGQRAAYRRRRRTSHLRYRAPRFNNRARPDGWLAPSLRHRVATAVSWVTRLSRWAPVRAVHVERVAFDTHAISAGRPLEGAEYQHGTLHGTEIREYLLAKFGRACVYCNISGVPLNIDHVHPRSRGGSDRISNLVTACIPCNETKSNRPVEEFVRDKTKLAKMLSRAKAPLRDAAAVQSTRWALWRALDQMLPPHIASGGRTKWNRTRCGLPKSHTLDALNVGKLDTVTETVTPILVAGCSGRGQHQRTSPDRHGFPRRTSPRIKTVHGYATGDLVTASVPKGKYTGTHTGRVMIRTTGKFDIRTPHGRAAGIRHTNIRLLQRGDGYTYTHQPEQACA

SEQ ID NO: 2790 - protein, 396 aa, unidentified
MVYVLSKTGQPLMPTENHAKVRILLKQGKAKVVHRCPFTIQLLYSSTNYTQKVTLGVDSGSKHIGLSATTKDKVLFESDVELRNDIVDLLSTRRELRRSRRSRKLRHRKPRFDNRRRSDRWLAPSVKQKVDSHITMIAKMHKILPITNIIVEVASFDIQKIKNPTISGVDYQQGEQLGFWNVREYVLFRDGHTCQCCKGKSKDKILNVHHIESRKTGGNAPNNLITLCETCHTGYHKGTVKLPKTIHRGMSFKDATFMGIMRWALFGKLKTIYPDVKLTYGYITKNTRIKNSLPKDHYIDARCISGNPNAISNGDVYYYKKVRCHNRQIHKNTILKGGYRKRNQAAYEVKGFRLYDQVLWKGQKCFIFGRRATGRMDLRLLDGTHVNPVGFPAKYL

SEQ ID NO: 2791 - protein, 427 aa, Moorena sp.
MQNYVFVIDANKQPLNPIAPKKARRLLDKGKAAVFRMYPFTIILKTAIRQSRRCANEYPIVSPCQVKIDPGSKMTGFALVQNGQVIWGMELEHRGGLIKKKLESRRAVRRGRRNRNTRYRKPRFLNRRRPQGWLAPSLEHRIMTTQTWVKRLIKFCPVNEIWVERVKFDTQKMQNPEISGVEYQQGELAGYEVREYLLEKWGRECTYCGQQNTPLQIEHIHPRSKGGSNRVSNLCLACEKCNQRKGDKSIEDFLKKKQDLLKKIKSKAKQPLKDAAVVNATRNKLVKVLRTLKPVVTGTGAQTKYNRTKLRLPKQHWIDAACVGGIETLILKISQPLLVTCKGQGGRQKAALNKYGYPTRHNPLKPIKGWTTGDLAKHQKLGIGKVTPRSKGSFGFTPLGTKGYKSCKPQDISAIHRKDGYIYGFCR

SEQ ID NO: 2792 - protein, 512 aa, unidentified
  source 1..512: note = human gut metagenome
MPTVYVLNKDGKPLMPTTRCMHVRHLLKNGKARVVKSKPFTIQLLYETDDVVQPLYLGIDPGRTNIGVAVVKTDGAAVFTAHLETRNKEVPKLMKKRKESRCARRTNGRRCRRQRRAKTNGTISKKCVKQTTAQNGSVSKRAKEIGVIKRHLPGCEKDVLCIGIKNKEAKFTNRARPEGWLTPTANQLLQTHINLVKKIQKFLPISDVVLEVNKFAFMQLDNPNIQKWQYQQGPLYQKGSLENAVSEMQEHHCLFCEKPIEHYHHVVPKSENGSNTIANIVGLCTEHHNLVHKDATWQKKLAKEKVGLVKKYGALSVLNQIIPALTKEMNSLFPKHFFVTNGKSTYDYRTAHGVSKDHWLDAYCIACSVLPNDVCDSNINSHVPYELKQFRRHDRRVLHKANMSRVYTLNGKTVATNRHKAIKQTTDSLEEFRQSHPGDVCKLKVKEHHPAYRNLNRNYPGSVFLVDGQVHVMQGVSGSHNGKADGYYNTNGNAYPYYKCKFVVKNEGIVFA

SEQ ID NO: 2793 - protein, 516 aa, unidentified
  source 1..516: note = activated sludge metagenome
VLPQPQALESVPVDNPGVGTKRGTDTAVMVVAGVQHGRGETTREGGVTNHQRETAGGSGSRVVPATTQQRVFVLDRHGRPLQPCRPARARKLLRQGRARVHRMVPFVVRLIDREVETSVVDGVTVKVDPGSRTTGLAVVEQRDTLNPATGETTTVKGLWLGELVLRGLQIKRAMHSRAALRRGRRSRNLRYRQPRFNNRTRPEGWLPPSLQHRVDVTLSWVRRLSRWAPVIAVAYELVRFDTQAIENPDISGVEYQQGALAGWEVREYLYAKWGYRCAYCDAPGAGVQINIDHVVPRSRGGSSRVSNLVPACRPCNELKDTRLVEDFLAHDPARLARITAGLKRPLRDAAAVNTTRWVLWRQLTALGYQVTTGTGGQTRWNRYRHRIPKSHALDALCVGAVDAVASYTAVTNQIMATGRGSYARTRSNKYGFPRLRLTRTKRHYGFATGDLVRAVVPAGKNTGTHIGKIAVRASGSFNITTTTGVAQGIHHRHVTLIQRGDGYTYKTQPTPTKGMT

SEQ ID NO: 2794 - protein, 482 aa, unidentified
  source 1..482: note = human gut metagenome
KARVVRAKPFTIQLLYETDDAVQLLYLGIDPGRTNIGVAVVKANGTAVFTAHLESRNKEILKLMQDRKKARRARRTNGRRHRRQRRAKANGTISKKCVKQDTAQSKNPSKRAKDIGVIKRHLPGCEKEVLCIGIKNKEAKFSNRVRPEGWLTPTANQLLQTHINLVKKIQKFLPISDVVLEINKFAFMRLDNPNVQKWQYQQGPLYQKVSLEEAVSEMQEHHCLFCKKPIAHYHHVVPQSENGSDTIGNIVGLCTKHHDLVHKDTAWQKKLAKKKTGLNKKYGALSVLNQIIPALTKELSFLFPKHFFATNGKSTYDYRAAHGVGKDHWLDAYCIAGSVLPNDVCDNNINNHVPYKLKQFRRHDRRALHKENMSRVYTLNGKAVATNRHKAIKQTTDSLEEFRQSHPGDVCKLKVKEHHPAYRNLNRNHPGSVFFVGEQAHVMQSIVASKDGKATRYKDTNVNKIAAGQCRFVAKNEGIVFT

SEQ ID NO: 2795 - protein, 428 aa, Calothrix sp.
LSKVFVLDTKKRPLDPIHSAQARQLLRNKKAAIFRRFPFTIILKESSVVDAPVSNIRIKLDPGAKITGISLVNDSTGEVIFAAELKHRGFTIRDALNSRRQLRRGRRNRKTRYRKPRFLNRTRPDGWLSPSLMSRIHNVETWVNRLRKLAPIAAISTELVKFDMQLMHNPEIEGKEYQQGTLAGYETREYLLEKWNRQCVYCGVKNVPLQVEHIHPRSKGGSNSITNLTLSCEKCNIKKATKDIKEFLKKDSAKLQKILAQAKKPLANAAAVNATRYKLLEVLKSTSLPVECGSGGLTKFNRTSQQLTKTHWIDAACVGKSTPTLNIKGIKPLLITSNGHGTRQLCRTDKFGFPNRYVPRFKFVNGFQTGDIVKAIVTNGKKIGEYIGRVAVRSTGSFNISAKQGLIQGINHKYCSTIHRKDGYSYGF

SEQ ID NO: 2796 - protein, 442 aa, Lactobacillus sp.
VVTEVVQNRIFVLNQDGQALMPCRPSKCRHLLHCNRAIIVSHTPFTIQLKYQSGSCLQDVSIGVDSGQRHIGLAVTSNEKVLWQGEVTLRQNVKSLLDTRHMYRHTRRQRHTRYRMVRFSNRKPRDIRLGVWLPPSVRQKCEHNIQWINRVRNVLPQADISIEVAKFDVQKLKDPTIHGIGYQQGDAFGYENVKQYVLERDEHTCQLCKRKIDTETKKTLKLHIHHIVYRSKGGTNAATNLLTVCTKCHTDRNHRAGGPLYALFEQKKTIPPLKNATFMNMLRNRLLTAFPEAHFTYGYITTVQRKKLGLAKAHYRDAVAISGIQQIIEEPKSVVMFDQFRTKKRSLHEATARRGRKQKNVTQKRVKKNTKKVKGWCLNDYVRISDGRCGFITGFSGLWMAHIRDRQGGLVKKLVSLTKLAFLHHTGTWRCTTLPTDVYDMQ

SEQ ID NO: 2797 - protein, 426 aa, unidentified
  source 1..426: note = human gut metagenome
MVYVQNRLGQPLMPTKDHRKVRLLLDSGAAVVVKRTPFTIRLTTKAKSYVQPIILGVDAGSKTIGLSASTETEELFAAEVTPRNDVVDNLSTRREFRRSRRNRKTRYREPRFNNRVRSKHKGWLAPSVEVKIQEHITAVKRVCALLPVGKIVVETAEFDLQLLKAVEAGLPVPRGEDYQKGEMLGHYNIRQYVLWRDGYTCRCCGTHGKGVKFHVHHLESRKTGGNAPDNLVTLCDGCHKKFHKGIITPDILKKRKCRSTRDAAFMGIMRKTLMERLRAELAIQVVETKGYITKYTRVELLKLDKTHTNDALAIAQGRRGFGVEELTTIPQSDYIYRIRPVRHHNRQLHKATILPGGIRKSNQAPRYVRGFRLFDKVSYLGEDCFIWGRRSSGSFLLKLLDGTKVKDGVGYKRISLLERSASYLIS

SEQ ID NO: 2798 - protein, 453 aa, unidentified
  source 1..453: note = human gut metagenome
MSVAVVSKTGMLLMPTSEYRARKLLKSKKAIIHGYHPFTIQLTERETGYIQPVELCMDTGYIHIGTSVKSEKHEYLGEQIDTLTDERQKHDACRMYRRQRRNRKRYRQPRFNNRERDDGWIAPSLEHKKTIHIQAISRICKVMPVTDITLEMGNFDTQVLKAREEGKPLPQGLDYQHGERYSVTTLREAVFLRDGYTCQCCGRTIKDGAILHAHHVIYRSQGGTNRISNLITVCDKCHTPANHKPGGKLYGWKPKVASFKGATYMTTIRWKLYNEIKALFPDIDIHITYGAETKERRRAFDITKSHVNDAFVMGQFHPKHRSKPVCYKKKRRNNRCLEKFYDAKYIDSRNGKTRTGQELFNGRISRNHKKDSENLHQYRQQKISTGKRTIRKQHYAIQPHDIVIFNGEKFETSGCHNNGTRVILLPQKKSVAIKKLNIYRYAGGYFKSAFNQK

SEQ ID NO: 2799 - protein, 427 aa, Nostoc sp.
MSKVFVLDTEKRPLDPIHSAQARQLLRNKKAAVFRRFPFTIILKESRADASVSDLRIKLDPGAKITGIALVNDSTGEVVFAADLKHRGFAIRDALISRRQLRRTRRNRKTRYRKPRFLNRTRSEGWLAPSLMSRVHNVETWVNRLRKFAPITAISTELVKFDMQLMRNPEIEGKEYQQGTLAGYETREFLLEKWNRQCAYCGIKDIPLQIEHIHSRSKGGSNSITNLTLSCEKCNVKKGTKDIKDFLKKDPTRLQKILAQAKKPLADAAAVNATRYKLLEVLKSTDLPVECGSGGLTKFNRTNQQLQKTHWLDAACVGQSTPILIIKGIKPLLITANGHGTRQMCRTDKFGFPNRYVPKLKFIKGFQTGDIVKAVVTNGKKIGEYIGRVAVRSTGSFNISAQRGLIQGINYKFCKSIHKKDGYSYSS

SEQ ID NO: 2800 - protein, 443 aa, Anoxybacillus sp.
MVEENMTCFMQRKGENPMVFVLDTNKRPLAPCHEAVARKLLKQGKAAIYKRYPFTIILKEIVDNFRPKTPYRLKIDYGSKHTGLAIVRGQEVVWLGQLDHRTDIKERLDKRRAFRRARRKRKTRYRKPRFLNRRRKDGWLPPSLESRVQNIQTWVERLRKICPIEHISYENAKFDTQLMRNPEINGVEYQQGTLQGYEVREYLLEKFGRKCCYCGKEGVPLEIEHIIPKSRGGTDRVDNLCLACHDCNQRKGSKTAEEFGYPHIQEMVKKTLKDASVVNATRWKVYEVLKQSGCEVECGTGARTKMNRIRLGLPKIHYFDACCVGESTPLQLHFKTKEALFIKAKGRGSRSRTNLDKYGFPRGFLARQKYFFCFQTGDIVKANVPKGKYQGVWFGEVACRKNGSFDMKDKDGKRIAQGISYKYFNIIQRFDGYTYRREGMNIA

SEQ ID NO: 2801 - protein, 516 aa, Nocardiopsis sp.
VTRLATFRAGQKTHQAVLPQQPALESESADTPRIGHETGPGPRPTAEPGADHVRGETTRISPDAGGVTPNSVGEKPRERHPSVFVLDKDHTPLQPCHPARARKLLAKDRAVVARHTPFTIRIKDRSVQASEVDGVQVGIDPGSRHTGIAVFTAQGGERRGRYSIQLDHRGAQIRKKLGQRSAYRRRRRSANLRHRAPRFSNRTRPRGWLAPSLEHRVQTTTAWVARIARWAPVTAVHVERVVFDTHVLSARTPLEGVEYQQGTLAGYEVREYLLAEFDRACVYCAATDTPLNIDHVHPRARGGSDRVSNLVLACMPCNRAKSDRPVEEFITDTRTLARILARAKASLRDAAAVQSTRWALWRALDERLPTRVASGGRTKWNRTRNHLPKSHTLDALAVGKADTLTRTVSRVRVAGCAGRGSYARTRTDKHGFARLRLPRTKGFFGFSTGDLVRAVVPKGKKAGTRTGRVAVRASGSFNITTSQGTVQGINRKYVRLLQRADGYGYAWKGEGVSSRP

SEQ ID NO: 2802 - protein, 509 aa, Streptomyces sp.
VLPQRAALEFESADTPRIGDETGLEHRTRAVTDVEHVRGETADASPGIDGVTPNREVGEKAREGHPAVFVLDKHGHPLQPTTPARARKLLHQGRAVMARHTPFAIRLKDRTVSESQVDGVELGIDPGSKHTGIAVFTVKDGERRGLYAVELTHRGSAIRHKLTARSAYRRRRRTGNLRYRAPRFSNRTRSKGWLAPSLRHRVDTTMSWATRLARSAPIRTVHVERVAFDTHAMSHGGPLEGTEYQHGTLHGTLHGTEAREYLLAKWERACAYCGITGVLLNIDHIHPRSRGGSDRISNLCTACIPCNQKKSNQQVEEFLKGSPRKLARILTQAKASLRDAAAVNATRWALWRALDSGFPTVHTASGGRTKWNRQRTGLPKTHTLDALCVGHLDTVTRTPARILTVTATGRGTYTRTRTRTDRYGFPRQRLPRQKTFFGHQTGDFARAVVLKGKKAGTHIGRVAVRATGSFDIKTTQGLVQGIGHKHFRLLQRADGYAYTTRPEGPTGTT

SEQ ID NO: 2803 - protein, 431 aa, Calothrix sp.; identical to SEQ ID NO: 2754

SEQ ID NO: 2804 - protein, 427 aa, Methanosarcina sp.
MLVFVINQNKKPLMPCKPSKARKLLQAGKAKVIRNTPFTIKLLFGSSGYTQPVIAGMDTGSKVVGCAAIANGKVLYQSEIYLRENVSKKMEQRKMYRRTRRGRKTRYRPSRFANRGNSTKEGRLAPSIRSKLEAHFREKRLVESLLPVTGWKVELASFDIHKITNPEVSGIGYQEGDLKGFYNVKAYVLDRDGYTCQHCRGKSKDSRLHCHHIVFRSQKGTDAPENLITLCETCHKALHNGEFKLSGNKSKTKHATEIGILKSQIRKSGWSFAETFGYETKYRREQVLKLLKTHYFDAVAICCRDDQNVEVEDSVLLKRNVSKGDYQQRTGKRSEKKIPTGKLFGLRKFDLVKTSKGIGFVKGKRSSGFFAISDLFGNKISDSVNVKKKCRRLSARSTTLVQMVQMTHSSPTCHFRQAGTVEEGVSC

SEQ ID NO: 2805 - protein, 431 aa, unidentified
  source 1..431: note = human gut metagenome
MPNKVYVINKHGRPLMPCSPAKARHLLDAGKAKVKKRTPFTIQLVYGSSGYTQEVILGVDAGSKTIGMSASTTKEELLSAEVKPRNDVVDLLSTRREFRRARRNRKIRYRKPRFDNRVRSKHKGWLAPSVEVKIQEHITSIKRVCRILPVSKVVIETAEFDLQLLKAIADGKPVPQGEDYQKGEMYGHYNVRQYVLWRDDYTCQCCGAHATKKKEVRLHVHHLESRKVGGDAPDNQVTLCESCHEKLHKGLIAEKDFKKRKRRSTRDATFMGIMRKTLMQRLCSELPIPVVKTRGYITKATREKLLVLPKSHTNDALAIAQGKRGFNVGYLPEIAQIDKIYTIRPVRHHNRQLHKAAILKGGIRKSNQAGKYVFGYRLFDKVQFNGQDCFIWGRRTTGIFTIKTINGKMIKDGISFKKLKLVEKSTSYLIA

SEQ ID NO: 2806 - protein, 456 aa, unidentified
  source 1..456: note = human gut metagenome
MAYTYVLDMNKNPLMPCHNGGFIRTLLKEKKAKVVRNKPFTVQLLFEVRNKYKQDMTLGIDAGYKHIGFSVSISKSEVFSAELEQECGMVERNKERRMYRRQRRSRLRYRKPRFNNRIASKQKGWIAPSLKRKKNTHLRFIMMLKSIMPITKITVEIGLFDPALMKAIAEGRTLEREDYQHGEAEGFENMKSYIRYRDGYTCQNPDCKCHKMSVSDREKLRLAVHHIGYYRNDRSNRPGNLITLCELSHTPENHQPGHLLYGWKPKIKSLKETAFMNIIRKEIVDTLKVIYPTTEIRYTYGYRTNMTRNEWHIEKSHHDDAFCIAGNYSKNRCNTLYFHQKRRNNRSLEIFYDAKYIDGRDRKRKSGKELFYGRTTRNKNYAGENLHKYRIKKISKGKRSIRRQHYFYQPKDIILFEGIKHVIKGSHCNGSRLILDTGKSVSVKKVRIHKFSGGIY

SEQ ID NO: 2807 - protein, 442 aa, unidentified
  source 1..442: note = human gut metagenome
MVTVQQSTHHLPFGRVFIRRNLFMVYVISQDSKPLMPCSNPIARLLLKQGKAKVKRREPFTIKLIYETTDYTQDLTLGVDTGSGTIGAAVSKDNGDIVYMSEVVVRNDITDKMTQRAKYRRNRRNRKTRYRKARWLNRSNSIKKDRFSPTMQSKLHSHVKEIEYIQSILPITEMVFETGQFDMHLMKDPSLANPKVRPWGYQKGTNYGFENTKAMVLNRDNYTCQCCKGKHKDSKLEVHHIVFRSQGGSDEESNLITLCHTCHKDLHSGKINLKLSGKVKGNLKYATQMNSIRKQLFRLYPNAIETFGYVTKANRLHLGVDKEHYYDACTIATQGNTFNVKSNLYKKKCVSDGDFQKTKGICSEQPIVTDKICGFRKFDKVRYFGKDYFIKGRMSTGYAILMDIDGNKIDFSTMPRGYKTPKLSNCKRITARSTVMTQVKVV

SEQ ID NO: 2808 - protein, 473 aa, Actinoplanes sp.
VGGDTRTSHPVVFVLDRSGRPLQPTHPARARELLRKGRAVVHRHTPFVIRLKDRTATDSTIDGVEVGIDPGSCKTGIAVFTTTPGSEQGPGASDREATEAETVTQSTRADTEGPARRGMFAVEIMHRGGVIRDRLAARAGYRRRRRSKNLRYRKPRFDNRTRPAGWLGPSLQHRVDGTMSMIGRLRRWAPITAVHVERVAFDAHLLQNPDVSGIGYQHGTLHGYETREYLLGKWRHRCAYCSASGVPLNIDHIHPRSRGGSDRISNLTLACIACNQIKGNQPIEVFLAERPKVLATVLADAKRPLHNAAAVSTTRWALWRALTGTGLPVHVGSGGRTKWNRHRTAAPKSHTIDALHVGRLGTVTGWPHRILAAAATGRGAYSRTRTDRYGFPRLRLPRTKHVHGYATGDLVRAVVSTGLKRGTHLGRVAVRTTGSFNIRTRYGLVQGIHHRHCRLLQRGDGWAYTTLLETSCV

SEQ ID NO: 2809 - protein, 466 aa, unidentified
  source 1..466: note = human gut metagenome
MSTCACVLSKNGERLMPTIRLGKVRHLLKDGKAKIIKHHPFTIQLLYDSKTDTQPIEICEDVGYNYIGISMKSESHEYVSVQYDTLQDEKDCHDSCRKMRRIRRNRLRYRKPRFDNRKRNKDWLAPSLEHKKELNVNVIKMYCEVVPITHVTVEVGSFDTMLVKAIQEGKAIPEGADYQKGPRYNLATLREAVFYRDNYTCKVCGRKAKNDSAILHVHHMFYWKGRHGNSLNELLTVCEKCHTPANHQKGSKLYGFGENIKFANLSGAAFMNTVRWQIVNELYATFGKLFVTFTYGAMTKEKRIALHLEKCHNNDAYAMGNFHPVDRCAFEHYKKVKRNNRILEKFHDSQYIDIRTGKVANGRSLFNGRINRSHKKDSENLHKYRGKRTRKGYRALRRKKVALNPGDLVSLNGEILVVHSTHAGKNGYVGVEFKTPSKSGKKSASLKKLKIVKTSNSMHSAWTKVS

SEQ ID NO: 2810 - protein, 427 aa, Moorena sp.
MQNYVFVIDTNKQPLNPISPKKARRLLDKEKAAVFRMYPFTIILKTAISAPTISPCQIKIDPGSKTTGFALVQNAQVIWAMELEHRGSLIKKKLKSRSAVRRGRRNRNTRYRKPRFLNHRRYEGWIAPSLEHRVKTTETWVKRLIKFCPVDEIWIERVKFDTQKMQNPEVSGVEYQQGDLAGYEVREYLQEIWGRECAYCGKQNTPLQIEHIHPKSKGGSDRVSNLCLACEKCNQKKGNKPIEEFLTKKPDLLRKILARAKQPLTDAAAMNTTRNKILKALKAIKPVATGTGAQTKYNRTRLRLPKQHWIDAACVGNIKTLILRTSQPLLVTCKGHGGRQKAALNKYGYPIRHNPLRPIKGWITGDIAKHQKLGIGKVTPRSRGSFGFTPLGEKGYKSCKPQDISAVHRKDGYTYRFCENLPGFAWK

SEQ ID NO: 2811 - protein, 434 aa, unidentified
  source 1..434: note = human gut metagenome
SALMVYVLDINGQPLMPTARHGKVRRLLNSHLAKVVKRCPFTIQLLCQSTKEIQPVPLGVDAGSKHIGLAATTDQKVVYQEELIPRNDVVKLLSARRTLRRSRRNRKTRYRKVRFNNRVHSKHKGWLAPSVEVKIQEHITVIKNVCKILPISEIHVETAEFDLQRLKAMEEGKPLPVGTDYQLGEQYDFYNTRQYVLHRDGYTCQCCGTRDKDVKLHVHHIESRQTGGNAPNNLITLCEHCHSALHEGKLKLPKGKKRGKSYRDTAFMGIMRKTLLERLRKEIDIPVTETYGYITKYWREKVGLEKGHINDAVCISKHPYAEPLDIYYLTKAVRHHNRQIHKTKFSKGGIRKRNQAPYLVKGFRLFDKVLYQNREYFIFGRRATGYFDIRTLDGTKVNKGSISYKKLRIQDTANAYLKEVKAIPHMNKFTCVLA

SEQ ID NO: 2812 - protein, 420 aa, unidentified
  source 1..420: note = human gut metagenome
MQYVYVLNKHGEPLMPCSPGKARILLKQQKACVVKRTPFTIKLLYGSAGYKQPITLGVDAGSKHVGLSASTEKRELYSEEFTPRNDVVELLSTRRQNRRSRRNRKTRYRAPRFNNRIHSKHKGWLAPSVEVKIQEHITVIKRICRILPITLVRVETAEFDTQRLKAMLSGKPLPVGTDYQLGEMYDEYNARQYVLRRDNYTCQRCGAHTTKKKTVKLHVHHLESRKTGGNAPSNLITLCVDCHKAFHAGKVKLDGKKRGKSLKDAAFMGAMRNTLLTRLRNELNIPVQNTYGYITKLLREQNDIKKSHVNDARCISKHPLAEPCSVCYRTKAIRHHNRQTHKANFSKKGIRKRSQMPYLVEGFRLWDKVLYKGQECFVSGRRSSGSFALKKLDGTSISKGVTFKKLRLLEPATNYLIERM

SEQ ID NO: 2813 - protein, 511 aa, unidentified
  source 1..511: note = human gut metagenome
MHTGLQQCEGVTMRYVYVLDMDGKPLMPTCRFGKVRRMLRSGQAKAVDTLPFTIQLTYKPKTRILQPVTIGQDPGRTNIGMAAVRSDGTELYRARIETRNKEIVSLMNERRSFRQASRRGERLARKRLAKRLHTTAKHLNGRILPGCKEPLAVKDIINTESRFNNRLRPEGWLTPTATQLLRTHLEAIRKLSGILPVTEVVLEVNRFAFLQLDNPEMRKKDIDFCHGPLYGTGGVKAAVSLQQDGYCLLCRKQDIGHYHHIVPRSRRGSNTIQNIAGLCPKCHELVHKDADAAQKLATIKTGLTKKYGGTSVLNQIIPFLTRELAALYPRHTHVTNGWNTREFREKHGLGKDHDIDAYCIAASILEDMQPVMQTETYKIKQFRRHDRALINHQTERTYRYDGKIIAKNRKKRMDQKTDSLEDWFTDMAKQHGHATASRMLSRVTLQKSTRYYNAKCRIMPGAIFIYRKKRFVMTGQLTGGAYYRAYGQGMKNFPAKAVQVIRENAGLVYVA

SEQ ID NO: 2814 - protein, 459 aa, Calothrix sp.; identical to SEQ ID NO: 2649

SEQ ID NO: 2815 - protein, 413 aa, unidentified
  source 1..413: note = human gut metagenome
MTNYVFVLDANGKHLSPTKEQKAWFFIRKKRATLVSKYPMVIQLNKEIPDDKICKDEIRCGIDDGGLHTGIALVQKCQTKNKVLFKGVIEQRNDVKHLMDVRRGYRRYHRYHKRYRPARFNNRSSSKKEGKIAPSILQKRQATIRAVAQLNKWINITDYWLEDVAIDIRALTDGFKPYKWQYQKSNRLDENIRKAVILRDGCQCVECGRTNCKLEVHHIKPRRSNGSNALSNLITLCERCHQNTEGREELFMDKYFALLNSSDNKYLNYAQHVMIGKKWLREQLSSLGILHLTNGGDTANKRIDWNIEKFHSNDAICITNLQPDTCDVKEWTIKPMRRQSKAKADNVLGIKHRDLVEYTFKSGETHRGYVTALYPKQNAINFQSPTKHCKKVSAKKCRLLWKFNKIYWLDDVS

SEQ ID NO: 2816 - protein, 418 aa, unidentified
  source 1..418: note = human gut metagenome
MVYVIGKEGQALMPTERFGKVRRLLKNGLAHVVCRIPFTIQLDYETTYFVQPISLGVDAGSKHIGISATTSEKELYAADVELRNDIVEKLSTRREQRRTRRNRLRYRKVRFNNRVSSKRKGWLAPSVENKIQTHLTVVEKIHKFLPITNIVVETASFNIQKIKNPSMSSEEYQKGEQLGFWNVREYVLFRDNHTCQHCKGKSKDHILNVHHIESRKIGGNSPSNLITLCESCHKAYHNGKIDIKVKRGASFRDAAFMGITRWTTYERLKNIYPNVNMTFGYITKNNRITNGLPKDHYVDARCISGNSKAKPLGYYFYQKKVRCQNRQIHKVNFLKGGRKKLNQAPFLVKGYRLFDLVEYQNDLYYIFGRRDSGFFDIRKLDGTKVNKGSISCKYIRLVDIRRSVLTERRKSCSIPPTN

SEQ ID NO: 2817 - protein, 438 aa, Methanosarcina sp.
MIFVLNKNKQPLSPCHSAVARKLLKTGKAVIHKKYPFTIRLKELKNSENKAEFRLKIDYGSRHTGLAILNGSKVIGLAQIHHKTSIKSNMDSRRAMRRTRRNRTTRYRKPRFNNRKRKEGWLPPSLQSRVDNIQNWVNRLQKLCPLTQISYENVKFDTQLMQNPEISGIEYQQGELQGYEVREYLLEKWNRKCAYCGAENVPLEIEHIIPKARHGMSRVSNLTLACRTCNEAKGTKTAEEFGYPDIQKQARIPLRDATLVTATRWKVYNVLSKTALNIECGTGARTKMNRIRLNLQKDHHLDAVCVGASTPNKIIFKTNSVLHIKAKGRGSHCRTNLDKYGFPRGYLSRQKSFFGFQTGDIVKAVVPKGKYKGIHFGAVACRKTGYFDIKNKEGVRIGQGINHKYCNILSRADGYEYATEHLEVDGIPPTTKVIGILP

SEQ ID NO: 2818 - protein, 436 aa, unidentified
  source 1..436: note = human oral metagenome
MTKTFTTQTTQACVLNQHGKPLMPTTRLGKVYRLLKAKKAHIVSYEPFTIQLDYEPDTHVIQPMTLGVDSGAIHSGYSLANEHREYYSAEVIARNDISNRLSERHMYRQNRRSRKTRHRKPRFNNRKNKKKGWLPPSLEQKVAVQVNEIEHLHRYFPIETIIVETAEFDIQKIKNPDISGIEYQQGTLQGYNIRNYLLEKHGRKCFYCGKTVSGFEVEHMFPKSKGGSNRIDNLTLSCHDCNETKGTLTAEEFIRQTLSAKKAASKLKQLPNEKRLFEYMAYMNATRWTLYNAIKEKYPNVKMTYGYVTKYNRIQAGLPKAHHIDAKCITGFTTVPSIDQTVVKAKMRRHNRQLHRATFSKGHVRKVASLPTVTFGFQLYDLVLFDNHRYYIKGRRSSGSFDLVSVEGLKNEERTYKKLTLLAHTNAYLTNHYVNA

SEQ ID NO: 2819 - protein, 438 aa, Methanosarcina sp.
MIFVLNKNKQPLSPCHSAVARKLLKTGKAVIHKKYPFTIRLKELKNSENKAEFRLKIDYGSRHTGLAILNGSKVIGLAQIHHKTSIKSNMDSRRAMRRTRRNRTTRYRKPRFNNRKRKEGWLPPSLQSRVDNIQNWVAKLQKLCPLTHISYENAKFDTQLMQNPEISGVEYQQGELQGYEVREYLLEKWNRKCAYCGAENVPLEIEHIIPRARKGTDRVSNLTLACRTCNEAKGTMTAEEFGYPEIQKQARIPLRDATLVTATRWKVYNTLTEKGLEVECGTGARTKMNRIRLNLPKYHHFDAICVGASTPDKITFKTNHVLHIKAKGRGSHCRTNLDKYGFPRGYLSRQKSFFGFQTGDIVKAVVPKGKYKGILFGAVACRKTGYFDIKNKEGVRIGQGINHKYCNILSRADGYEYATENLEVDGIPPTTEVIGILP

SEQ ID NO: 2820 - protein, 447 aa, unidentified
  source 1..447: note = human gut metagenome
VPAYRIKHITKKEAPYMVYVLDIDGQPLMPTSRHRKVRKLLNSHLAKVVKRCPFTIQLLYQSTKETQPVSLGVDAGSRHIGLAATTEQKVVYQEELVPRNDVVKLLSARRALRSSRRSRKTRYRKPRFNNRVHSKHKGWLAPSVEVKIQEHITAIKRICQILPISDIHVETAEFDLQRLKAMEEGRPLPVGTDYQLGEQYDFYNTRQYVLHRDEYTCQCCGTHDNNVKLHVHHIESRQTGGDAPNNLITLCEHCHKLLHAGKTILPKGKKRGKSYRDATFMGIMRKTLLERLKKEIDVPVEGTYGYITKYWRERAGLEKSHINDAICISKHPYARPLETYYLTKAVRHRNRQIHKTKFSKGGIRKRNQAPYLVKGFRLFDKVLYQGESYFIFGRRITGYFDIRTLDGTKVNKGSTSYKKLRIQDTAEAYLTEVRAIPHMNEFTCVLA

SEQ ID NO: 2821 - protein, 515 aa, Actinoplanes sp.
MRQSTHSGVLPQRRTLESVSADKPTRAHETGHGHRDTVAVPGVQHGRGETTAPIPGQWRHPNGQPSGDRGRKTPPTHHPVVLVLDKHARPLQPCTPARARKLLTAGRAVVHRHTPFVIRLKDRTAQESEILGVEVGVDPGSKATGVAVFTTRAGARTGLLCIEVRHRGGLIRDKLTARAARRRGRRSRNLRHRQPRFSNRARPKGWLAPSLRHRVETTMSWVERLRRWAPITRLHVERVAFDTQLLQNPAIAGVQYQAGELAGYEVREYLLEKWKRRCAYCGATGIPLNIDHIRPKARGGSDRMVNLTLACVPCNQAKGSTLVEVFLTGRPVVLARILRQAKTPLRDAAAASSTRWALWRALTCTGLPVQVATGGRTKWNRHRTGAPKTHTLDALHVGALDAVTRWPNTTLVATSTGRGSYARTRSNRYGFPRLHLPRTKQVHGFATGDLVHAVVPTGAKRGTHTGRVAVRTTGSFNIRTTTGLIQGIHHRHIRLLQRADGWAYTRQPEGPSTHA

SEQ ID NO: 2822 - protein, 489 aa, Calothrix sp.
VTKTLNIVEANFTPKERRNCQKNKMLTNHVFVLNADKSFLNMVHPARARKLLTQEKAAVFRTYPFVIILKKQVFNPTAKEYFLKIDPGSKWTGFAIQCGSDIVFRMELLHRGMQIRSDLLTRAGFRRGRRSRNLRHRKKRFNKRKPNGWLAPSLMHRVFTVETWIKRFCKFCPIVVIEIEQVKFDMQKLANPEISGIEYQQGELMGYEIREYLLEKWGRECVYCGVKDVQLEIEHIAPKSKGGSDKVSNLTLACNDCNQRKGNMDISDFLDDRQKLEQILSQAKSPLTDAAAVNSTRFAISNMADKYNNIKNWTGGRTKMNRVKQSLEKGHSIDAACVGESGSNIKILTQQPLKVISKGHGNRQSRKTNDKGFPALITETCQKTLKKIVKRNPDETVKTIAPKKEYSHIHTGDIVRFKLDKPCMTKGNKKKGIEKKVKVPCGSYTARVKTPTPKGFEVLINKERVSVPTMNGVSFAYRADGYDYKFAHS

SEQ ID NO: 2823 - protein, 462 aa, unidentified
  source 1..462: note = human gut metagenome
MSVLVIGRNGRALMPTNPRKARLLLKKKTASVVCRHPFTIQLLYKTGCATQEGCIGIDTGSQHIGVGITCGDRVILKDEHALRSSMEKRSLLATRTVMRRGRRYRKVRYRKPKWRHHTKRMYFEKANRRGQHWRKVKTTTQSPRLKGWLPPSLQSKCDHHFRIIDRYLKYLPDPITRNLVIEAGRFDMARMNDPTIHGEMYQRGPMYDAENLRAYIFARDNYQCACCKAKAGTTRKADGTTVKLVAHHILFRSRGATDNPKYIISVCDHCHTTKAHQPGGILYSWMENNKKVARGLRDATFMNILRKRLFARYPQAAFTYGNITAADRKQLRLPKSHANDAVAISLFGKEASTVKNICQTMHYKQIRKSKRSLHEAIPRKGRKNPNTKAVRNKKNTTQANGFKLWDSVLADGKKLFICSFTGTSAYLIDKNGCYISQPGKTYKQWPLSKLKRLHPNGNWLMA

SEQ ID NO: 2824 - protein, 464 aa, Ktedonobacter sp.
LLDVPPDNLIEATITRAIGGSERSKHMSHVFVIDANKQPLNPVHPARARVLLSQGKAAVLKRFPFTIILNVAIDAPVVEELRIKIDPGSKTTGIALVNDQSGEVVFAAELHHRGAKIKEALDDRRAVRHSRRRRHTRYRKARWQNRRRREGWLPPSLTSRISNVLTWVKRLRNLCPITAMSMELVKFDMQAMENPDIQGWEYQQGTLAGYELREYLLEKWNRMCAYCGKGNVPLQVEHIVPRANKGTHRVSNLTLACEKCNQAKGTQDIKDFLKKKPAMLKHILAQAKAPLNDAAAVNATRWELFRGLQALGLPIECGSGGLTKYNRTTRELPKTHWIDAACVGQSTPEYLNTTGISSLLITATGYGKRQLCGVDKHGFPQRHRQRKKVHHGYQMGDLVRAVVPEGFAAAGRHVGRVLARATGSFDLRTARGRIEGVPVRYCRPLHRNDGYSYHSTRGGNSSPL

SEQ ID NO: 2825 - protein, 470 aa, unidentified
  source 1..470: note = human gut metagenome
MSVFVVGLNGCRLMPTSERKARLLLKQGKAFVEQKVPFTIRLNYKTGSTTQLGYLGIDTGSQHIGVSVVREDGTVLHKEEIGLRDSMSKRKLLEAKASLRRGRRYRKTRYRHPKWRPKTKRVYCEVPDRKGRHWQKKKITFTSKRPKGWLPPSLQSKTDHHIRWIKKLQDLLPEGYRLSIELGRFDPARMKNPEIHGDLYQKGPQYDYENVRAYVLDRDRYTCQICKKKGGKLHVHHILYRSHGATDDPQYMVTVCSDCHSAQNHLPGGILYQWMQEQKRFSRGLRDATFMNILRKRLIRAFPEAVFTYGNVTKVDREKLKLPKSHGNDATAIALVKTGITAVKDKESVICIQQVRRKKRSLHEETPRKGRKEPNRTAARNNKNTKAVTVTKRQNKKKVSMTGCLFDRVELNGKKGWISGFTGKSCYVKDADDQYLSTSPKYKQVSLSKLRILHHCGNWIIGAKKTLGKG

SEQ ID NO: 2826 - protein, 425 aa, unidentified
MSNFVLVLDTNKKPLTPIHPGDARFLLNQQKAAVFRRFPFTIILKEPKSDVPTQPIELKIDPGSKTTGFALVQNNKVIWGMELQHRGLAIKESLETRKGVRRGRRSRHTRYRQARFLNRTKPQGWLAPSLSHRVLTINTWVKRLCNFAPITDIVQELARFDLQQLENPEISGFEYQQGELQGYEVREYLLNKWNRKCAYCTAENVPLQVEHIKPKAKGGTNRISNLCLACEKCNIKKGTQDIEKFLGKKPELLKQILSQAKRTLKDASAVNSTRWALFNKLKETGLPITTGSGGLTKFNRTRLGLPKTHWIDAACVGKVETLKILTTKILTVKSTGHGCRRFCRINKFGFPCTEPKKIFTHVSTGDFVKATLHKDRKNITSGRYVSRVKTPTKNGCEIVINGFRVEFSTMKDITKVHCSDGYSYV

SEQ ID NO: 2827 - protein, 419 aa, unidentified
  source 1..419: note = human gut metagenome
MYVYVINKHGEPLMPCSSRKARTLLNNKKACVVKRTPFTIKLLYGSAGYKQPITLGVDAGSRHVGLSASTETHEFYREEFTPRNDVVDLLSTRREFRHARRNRKTRYRAPRFNNRVHSKHKGWLAPSVEVKIQEHITAVKHVCKIMPISLVRVETAEFDTQRLKAMLEGKPLPVGTDYQLGEMYDEYNVRQYVLKRDNYTCQCCGAHATKTKQVKLHVHHLESRKVGENAPNNLITLCPTCHKAIHEGKKTLGNKKRGRQFRDAAFMGIMRKTLLARLRKELSVPVQQTYGYITKMLREKNNLLKSHMNDALCIAKHPEAAPCENCYRSKAVRHHNRQIHKATILKGGIRKNNQAPYIVKGFRLWDKVRYNGQECFISGRRVTGYFALKRLDGTFATNSASYKKLRLLETAKNYLRERI

SEQ ID NO: 2828 - protein, 419 aa, Moorena sp.
MQNYVFVIDVNKQPLNPIHPKKARRLLEKGKAAVFRMYPFTIILKTAIANPVISPCQIKIDPGSKTTGFALVRDGQVIWGMELEHRGGLIKKKLESRRAVRRGRRNRNTRYRKPRFLNRKRPQGWLPPSLEHRILTTETWVKRLIKFCPVCEIWIERVKFDTQKMLNPEISGVEYQQGELAGYEVREYLLEKWGRECTYCGRQNVPLQIEHIHPRSKGGSNRVSNLCLACEKCNQRKGNKPIEEFLKKKPSLLQKIKTKAKQPLLDAAAVNATRNKLVKVLKDTKVVVTGTGAQTKYNRTWLGLPKQHWIDAACVGNIENLDLKTLQPLFVTCKGQGGRQKAALNKYGYPIRHNPLKPVKGWMTGDIARHQKLGIGKVTPRSKGSFGFNPLGMKGYKSCKPQDISAIHRKDGYIYGFCK

SEQ ID NO: 2829 - protein, 439 aa, Calothrix sp.; identical to SEQ ID NO: 2775

SEQ ID NO: 2830 - protein, 430 aa, unidentified
  source 1..430: note = human gut metagenome
MPKVYVLNRHGRPLMPCTPAKARHLLDAGKAKVRHRTPFTIQLLYGSTGYTQEVILGVDAGSKTIGLSAATETEELFSAEVKPRNDVVELMSARRQFRRARRNRTTRYRKPRFDNRVRSKHKGWLAPSVEVKIQEHITAIRRACAILPVSKVVVETAEFDLQLLKAVAEGKPVPQGEDYQKGEMYGHYNVRQYVLWRDSYTCCICGVHGSVRKGVPLHVHHLESRRVGGDAPDNLVTLCTACHDKLHKGIIMAADIKKRKRRSTRDATFMGIMRMTLLRRLREQLPVPVVETRGYITKATRENLLVLPKSHTNDALAIAHGPQGFRAEYLPNIRQADRLYTIRPVRHHNRQLHKATILKGGVRKANQAEKYICGFRLYDKVLYNGIECFVWGRRTSGSFLLRQLNGEKVKDSVSYKHLKLLERSQSYLVA

SEQ ID NO: 2831 - protein, 431 aa, Moorena sp.
MRVFVLDKDFKPLDPCRPARARLLLKQGRAKVFRRYPFTIILKDLEVGNCTTHNHQLKIDPGAKTTGLAILQDNTVIWGAEIMHRGFKIRDALTSRRQLRRSRRNRKTRYRKPRFLNRKRPLEWLAPSLMSRVHNILTWVKKLIRFCPMTGISQELVRFDTQKMENPEISGTEYQQGTLYGYEIREYLLEKWNRKCAYCGATDTRLEVEHIKPRSNGGSDRVSNLAIACHDCNQAKGNQDIKQFLSRKPDVLKRVLSQSKRSLADTAAVNSTRWKLYKELKSTGLPVETGSGGQTKYNRRRFNLVKTHWLDAACVGKVEAIYVENCQFLLIMAKGHGTRQICRTDKFGFPKRYCSRTKIHKGFQTGDIVKAIVTKGKKIGTYVGRVATRKTGSFNISTANGLIQGISYKYCTPIHKKDGYSYQINTLSSLS

SEQ ID NO: 2832 - protein, 424 aa, Moorena sp.
MCNYVFVLDASHKPLNPCRPVTARKLLTAGKAAVYRRYPFTIILKKQVEAEPKPMSLKIDPGSKITGLAIVYGNQVVWSAEIEHRGSKIKSALDSRRASRSRRNRKCRYRKPRFNNRKRPEGWLAPSLQHRVATTMTWVLKLMKLTPIGGISQELVRFDTQKLQNPEISGIEYQQGELMGYEVREYLYQKWGRQCVYCGANSVKLEVEHIVPKSKGGTNRVNNLTLACHGCNQAKGNLDARDFLSGKPDVLKQILGRAKQPLLDAAAVNSTRWQLYQSLKETGLSVAVGTGGRTQYNRIKLGLPKGHWVDAACVGEVATLKIVTRQPLLIKAMGHGCRQVIQMDKYGFPRKGYKPKHPVKGWKTGDIVNVVAGKNAGLKGVRIKSVRAKGNFDLIGPFNGASKQILSADTQLHSMCPSPRWVFL

SEQ ID NO: 2833 - protein, 497 aa, Methanosarcina sp.
MIFVLNKNKQPLSPCHSAVARKLLRTGKAVIHKKYPFTIRLKELKSSENKAEYRLKIDYGSRHTGLAILNGSKVIGLAQIHHKTSIKSNMDSRRAMRKTRRNRTTRYRKPRFNNRKRKERWLPPSLQSRVDNIQNWVNRLQKLCPLTHISYENVKFDTQLMQNPEISGIEYQQGELQGYEVREYLLEKWNRKCAYCGAENVPLEIEHIIPKARHGTSRVSNLTLACRTCNEAKGTKTAEEFGYPDIQKQARIPLKDATIVTATRWKIYNVLSKTSLNIECGTGARTKMNRIRLNLPKDHHLDAVCIGVSTPENVVFKTNQVLHIKAKGRGSHCRTNLDKCGFPRGYLSRQKSFFGFQTGDIVKAVVPKGKYKGIHFGAVACRKTGYFDIKNKEGIRIVQGINHKYCNILSRVDGYEYATEHLEVDGIPPTTKQAVRQLPRIIRVSCLSIYTNNFILVVGIVDLWFSSNLQKMKSGLYPQTFEILFLQIISVIWLRLL

SEQ ID NO: 2834 - protein, 442 aa, unidentified
  source 1..442: note = human gut metagenome
MSTTVFVLDKKHRPLMPCRPARARRLLRAGRARVVKRFPFVIRLVDRTVEQSEVQPALIKLDPGSRETGAAVVRDDGKKRHHALAFFVIEHRGGAIRDALKARSAFRRRRRSQNLRCRSPRFLNRVKPKGWLPPSLRHRVETTLSFVRRMCRYLPVSGIATELVKFDSQKLQNPEVSGVEYQQGTLFEYEVREYLLEKFGRKCVYCGAEGVPLNIDHVVPRAKGGSNRVSNLVLACMSCNQKKGARSLEDFLKGKPKVLARVRRELKTPLRDAAAVNATRWVLFNELKATGLPVETGSGALTKLNRHAFGVEKEHWLDALCVGRLNGVVTRKGLNVLEIRCMGRGSRQRTRLTKYGFPRGYLMRQKCVHGFATGDMVEANVPKGKKAGLWRGRVAVRVSGSFNIQTPKGVIQGVGWKHCRLISHNDGYGYAWLGHAPHSSPA

SEQ ID NO: 2835 - protein, 431 aa, unidentified
  source 1..431: note = human gut metagenome
MPNKVYVINKHGRPLMPCSPAKARHLLDEGKAKIKKRTPFTIQLVYGSSGYTQEVILGVDAGSKTIGLSASAETEELLSAEVKPRNDVVDLQSTRREFRRARRNRKTRYRKPRFDNRVRSKHKGWLAPSVEVKIQEHITSIKMVCRILPVSKVVIETAEFDLQLLKAIADGKPVPQGEDYQKGEMYGHYNVRQYVLWRDDYTCQCCGAHATKKKEVRLHVHHLESRKVGGDAPDNQVTLCESCHEKLHKGLITEGDFKKRKRRSTRDATFMGIMRKTLMQRLCSELPIPVVKTRDYITKATREKLLVLPKSHTNDALAIAQGKQGFNVGYLPGILQIDKIYTIRPVRHHNRQLHKAAILKGGIRKSNQAGKYVFGYRLFDKVQFNGQDCFVWRRRTTGIFTIKTINGKMIKDGISFKKLKLVEKSTGYLIA

SEQ ID NO: 2836 - protein, 442 aa, Moorena sp.
MRVFVLDKNLKPLDPCRPARARLLLKQGRAKVFRRYPFTIILPDLEVENCTTHNHQLKIDPGAKTTGVSYLQGNTVIWGAEITHRGFQIRDALTSRRQLRSFRRNRKTRYRKARFLNRKRSERWLAPSLMSRVHNILTWVKKLVRFCPMTGISQELVRFDTQKMENPDISGTEYQQGTLYGYEIREYLLEKWNRKCAYCGTTNVQLEIEHIKPKSLGGSDRVSNLAIACRDCNQAKGNQEIKQFLSGKPDILKRILSQAKRLAVGHATRTLADAAAVNSTRWKLYNELKLTGLPVKTGSGGQTKYNRRRFSLPKTHWLDAACVGDVQSIFVEDYQILSIVAKGHGTRQICRTDKFGFPKRYCSRTKIHKGFQTGDIVKAVVTKGKKIGTYVGRVATRKTGSFNILTTNGLIQGISHKYCIPIHKKDGYAYQINTLSSLSSHR

SEQ ID NO: 2837 - protein, 424 aa, Moorena sp.; identical to SEQ ID NO: 2614

SEQ ID NO: 2838 - protein, 427 aa, Methanosarcina sp.
MLVFVINQNKKPLMPCKSSKARKLLQAGKAKVVRNTPFTIKLLFGSSGYTQPVIAGMDTGSKVVGCAAIANGKVLYQSEIYLRENVSKKMEQRKMYRRNRRGRKTRYRPARFDNRGNSRREGRLAPSIKSKLESHFREKRFVESLLPVTRWKVELASFDIHKITNPEVSGIGYQEGDLKGFYNVKAYVLDRDGYTCQHCRGKSKDSRLHCHHIVFRSQKGTDAPENLITLCETCHKALHNGEFKLSGKKSKTKHATEIGILKSQIRKSGWSFAETFGYETKYRREQILKLIKTHYFDAVAICCRDDQKVEVEDSVLLKRNVSKGDYQQRTGKRSEKKIPTGKLFGLRKFDLVKTSKGIGFVKGKRSSGFFAISDLFGNKISDSVNVKKKCRRLSARSTTLVQMVQMTHSSPTCHFRQAGTVEEGVSC

SEQ ID NO: 2839 - protein, 419 aa, Geobacillus sp.
LFVYIINKHGKPLMPCSPRKARLLLKQKKAKVVRRTPFTIQLLYGSSGYKQPVSLGVDMGTRHVGISATTKKDVLFEAEAQLRTDIVELLAIRRQFRRSRRNRKTRYREARFLNRRKPEGWLPPSIQHKINSHIKLIDLVYNILPVTSVTIEVAAFDTQKLKNLNIRGVEYQQGEQMGFWNVREYVLYRDNHTCQYCKGKKKDPVLQVHHIESRKTGGDSPDNLITLCKTCHHEIHEKGLEHIFQRKRPPMRDASQMTAMRWAMFSRIREKYSHANITYGYITKCIRIANGLSKSHMVDARCISGNPLAKPSGTVYLLKFVRKNNRQLHKATILKGGKRKSNKAPRFVKGFQLFDKVVYERKECFIFGRRSSGYFDLRLLDGTKVHASASWKKLKRVEHASTLLIERRKGDSSPTFALA

SEQ ID NO: 2840 - protein, 423 aa, Moorena sp.
MRVFVLNKNRQPLDPCKPARARILLSTGKAKVYRRYPFTIILTEEIEEPITHTHQLKIDPGAKTSGLAIVQNSRVVWGGELNHRGFQIRDALTSRRQLRRARRNRKTRYRKPRFLNRPWSEGWLAPSLMSRVYNILTWVKKLTRLCPITGISQELVRFDTQKLQNPEISGIEYQQGTLYGYELREYLLEKWNRKCAYCGTTDTQLEIEHIKPKSKGGSDRISNLAIACHSCNQAKSNQEVEHFLSGKPDVLRRVKAQAKRPLADAAAVNATRWKLYHELKSIGLPVEVGSGGLTKFNRCRQNLPKTHWLDAANVGKIETLVIEVTHPLIITAKGHGTRQLCRTNKYGFPIRYCSRTKVHKGFQTGDIVRAVVTKGKKIGTYVGRVATRKSGSFNISTKSGLVQGISHKYCQFIHRKDGYAYTI

SEQ ID NO: 2841 - protein, 507 aa, unidentified
  source 1..507: note = human gut metagenome
MSEYIYVLGVDGDPQMPTKRKRHVEKLLQTGRARVFRQVPFTIQLTYENKPVLQPITIAEDPGRSNIGMAVVSLSGELLSAAVVQTRNKEIVKLMEKRKQHRRASRNGERRARQRLAKKCHTMIKAGSLMRKLPMYGKDKRVQCNVIRNTEARFCNRKREDGWLTPSAEHLVRTHINLIHKMQKFLPITDVAIEINRFAFLSLEDPSISGVDFQNGPLKGYDDLNAAVEDLQDGHCLMCNRPIEHRHHIVPRSMQGSNTIGNIAGLCCKCHERVHKDSAFEDSLKKKKAGLNKRYAAVSALNQAIPFICKRLEQEFGKEHVHYCSGRDTSIVRRSLGYHKTKEEQLHEVDAWCIAVLSLQHVPEKAPEFDHVHEILQFRKQDRSIIDAQTSRRYYHEGKKVAKNRKKAEGQKDDSLQEWREQQVERYGEEQTRKMISQLEIKKSSRRYNRLDRLMPGAVFYYQGVRYVMRGQHCEGTYLQAVGIGSKDFPAKKCKIVAHNEGLVFVS

SEQ ID NO: 2842 - protein, 462 aa, unidentified
MSAFVLDRNGRPLMPCSEKRARHLLARGRARVHRVMPFVIRLVDRMADSCALQPLRIKLDPGSKVTGVALVREADSGIAVINLFELIHRGRQISEALTARRGLRRRRRGANLRYRAPRFLNREKPEGWLPPALQHRVDTTMAWVQRIRRWVPITALSSELVRFDLQQLENPEISGLEYQQGTLAGYEVREYLLEKWKRTCIYCDAKDRPLQIEHLTARARQGSNRVGNLGLACGDCNQDKGALDVRAYVKDSKRLARILATASHPLRDAAAVNTTRWALTDTLRATGLPLEVASGGRTKFSRITHDLPKTHALDAVCVGRVDAINDWKRPSLSIKASGRGSYQRTRLTRHGFPRGYLMRQKQVQGFQTGDHVRADVPNGKKAGMHVGRVAVRATGYFNIQTASTVVQGINHRHCRLIQRGDGYAYSLQSTDSYRQGDAGVWRAAHAALSLPGLNPEVSRAFG

SEQ ID NO: 2843 - protein, 423 aa, Moorena sp.
MRVFVLNKNRQPLDPCRPARARILLSTSKAKVYRRYPFTIILTEEIKEPITHGSQIKIDPGAKTSGLAIVQGNRVVWGAELTHRGFQIRDALTSRRQLRRSRRNRKTRYRKPRFLNRTRSKGWLAPSLMSRVKNILTWVEKLTRVCPVTGISQELVRFDTQKLQNPEISGIEYQQGTLYGYELREYLLQKWNRKCAYCGATGTQLEIEHIKPKSKGGSDRVSNLAIACHPCNQAKSNQDIEIFLSLKPSVLKRVLSQARRPLADAASVNTTRWRLYHDLKSTGIPVEVGSGGLTKFNRCRQNLPKTHWLDAANVGKVETLIIEVTHPLLITAKGHGTRQLCRTNKYGFPVRHCSRTKIHKGFQTGDIVRAVVTKGKKIGTYVGRVATRKSGSFNISTKSGLVQGISHKYCQLIHRKDGYAYTN

SEQ ID NO: 2844 - protein, 416 aa, unidentified
  source 1..416: note = human gut metagenome
MVYVLDKNGQPLMPTDRHRKVRLMLQSGQAKVIKRCPFTIQLNYDSGHQTQEISLGIDAGSKHIGVSATTKIKVLYEVDVELRNDIVDLLSSRRELRRGRRNRKTRYRQAKFNNRRLGNGWLPPSIRQKIGTHLTVVENICKILPISRIMVETASFDIQKIKNPDIQGAEYQQGDQLGFWNVREYVLFRDGHTCQCCKGKSKDKILNVHHIGSRKTGGNAPNNLITLCETCHTGYHKGTVQLPKAIKRGIRFKDAAFMGIMRWVFYEALKQQYEPVGTPVHNTYGYITKHTRIAYDLPKEHYVDARCISGNPEASSNGEYYYQKKVRCHNRQIHKLTVLKGGIRKQNQATYLVKGYRLFDKVSYQGKGYFVFGRRQSGFFDIRTLSGEKVNKGSLSCKKLKFIATRTYYLTERRAV

SEQ ID NO: 2845 - protein, 423 aa, Moorena sp.
MRVFVLNKNLQPLDPCKPARARILLSTGKAKVYRRYPFTIVLREEIKEPITHEHQLKIDPGAKTSGLAIVHGERVIWGAELTHRGFQIRDALNFRRQLRSSRRNRKTRYRKPRFLNRTRPEGWLPPSLMSRVQNILTWVKKLTRLCPVAGISQELVRFDTQKLQNPEISGIEYQQGTLYGYELREYLLEKWNRKCAYCGATGIQLEIEHIKPLSKGGSDRASNLTIACHPCNQAKSNQDIELFLSLKPSILKRILSQAKRPLVDAASVNSTRWKLYHELKSIGLPVEVGSGGLTKFNRCRQNLPKTHWLDAANVGKVETLIVEVTHPLIITAKGHGTRQLCRTNKYGFPIRHCSRIKFHKGFQTGDIVRAVVTKGKKVGTYVGRVATRKSGSFNISTKLGLVQGISHKYCQFIHRKDGYAYTN

SEQ ID NO: 2846 - protein, 421 aa, unidentified
  source 1..421: note = human gut metagenome
MIYVRSKDGKALMPSERGGRIGYLLRHGKAHVVSRVPFVVQLDYESTIYTQEVSLGIDAGSKHIGVSASSEKKELLTAQVELRSDVVNLLSTRKELRRTRRNRKTRYRKVRFDNRKKKDGWLAPSVEQKVESHLKVIRLVRKLLPITKTTIEVAPFDAQKIKNPDIKGDEYQQGEQMGFWNVREYVLARDGHKCVHCKGKSRDPILNVHHLESRKTGGNSPSNLVTLCETCHKAYHRGEFDLKIKRGTTLRDAAVMNIMRWSVYERAKAEFGNVYLTYGYITKHTRIENDIEKTHAADAFCIAKNVHARRSRTFFMCRCVPRHTRALHVANPKKGGIRRSCIASHKIGKSRFQRFDMVWWKGKECFIFGSTHGRPILRDVEGKQIAGQPSVNIKTIKFLKRLRNNILVEERTSESWIENES

SEQ ID NO: 2847 - protein, 421 aa, Moorena sp.
MQNRVFVIDVNKQPLNPIHPGRARKLLKQGKAAVFRTYPFTIILKKTVRDPVNEPHRIKLDPGAKVTGMALVNQRTDAVVWAAELTHRGDMIRQKLADRRRVRRNRRHRKTRYRPARFDHRKRPDGWLAPSLQHRVETTMTWVERLGKCCSITDLSMEFVRFDTQKLQNPEISGVQYQQGVLFGYELREYLLTKWRHECAYCGAQKVPLEIEHIHPKSKGGSDRVSNLAIACHQCNQKKGNKPVEQFLKKKPEVLKRLLAQANAPLKDAAAVNSTRWALFNRLQETGLAIEIGTGGLTKYNRTLQGLPKTHWLDAACVGKSTPMLNIATSQPLLITCTGRGGRQKAAINKYGYPIRHNPLKPIKGWQTGDIAKHRVHGIGRITPRSRGSFVLSKPDKTKKSVKPIDLKPVFRRDGYSYKWA

SEQ ID NO: 2848 - protein, 408 aa, unidentified
  source 1..408: note = human gut metagenome
MVYVQDIDGSPLMPTTRHGKVRRLLKSKKATVVNLCPFTIRLLYDTTGYKQEITLGVDAGTKHVGLSATTKSKELYASEVILRSDVVDLLSTRRELRRARRYRLRYRKPRFNNRVKYKKDKWIAPSIRQKIDSHIRIIGFVYSILPVSKLIIEVAQFDTQKIKNPEISGKEYQEGEQLGFWNIREYILARDGHKCQYCKGKSKDPILNIHHIESRKTGGDSPSNLITLCETCHKEFHKGNIKLKVSRGKSLRDAAVMGIMKWKLYEELRSRYDNVSMTFGYITKYNRIKYGIEKSHISDAFVISKNFNALMLEYHYKVRLIRRHNRQIHKQKVLKGGVKKPNQSSFEVFGFRLFDRVMFEGNYYFIFGRRKSGSFNIRDIDGGNQRDITYKKLKLLRCKRFMIQKETN

SEQ ID NO: 2849 - protein, 450 aa, unidentified
  source 1..450: note = human gut metagenome
MKVQSNIEQQLNSNDSRKKMVYVLSNKNVPLMPCTCVIARILLRDKKAKALKTTPFTIKLLNETTEYIQKLTLAVDTGTGGVGYSVINNKNEVLYMSEVEARNDISDKMDRRRKYRRSRRTRKIRYRKCRFQNRTNSKRKDRFSPTMQSKLRSHVKEIEFIKKIMPIPAMTFEVGNFDPHLMKNPALASAKVRPWGYQKGPNYGFENTKAMVLTRDEYTCQLCKGKHKDSKLEVHHIIYRRNGGSDEADNLVTLCHTCHTKLHADDSGKLDKKLLKLQPGKAKGNLKYATQMNSIRIQLMKLYPETNVTYGYITKANRLALGVEKEHHLDACVIASQGNSFTIKCSLLKKKCVAKGDFQKTKGVRSEQPITTGKIQGLRKYDKVEYFGKEYFIKGRMSSGYAILMDIEGKKIDFSYMPKGFKTPKLTNLKRVGARNSWMVIEETVMQSLR

SEQ ID NO: 2850 - protein, 414 aa, Parasutterella sp.
MPCSPAKARLLLKEKKAIVKRRTPFTIQLTIATGETKQPGSLGVDTGYEHVGLSASTEKAELYASEVELRQDITDLLSARRALRQSRRNRKTRYRAPRFNNRLCTKRKGWLAPSVENRINAHLSRIKAVLRLLPVTKITVETASFDLQLLKNPDISGKEYQEGEQLGFWNIREYVLCRDGHVCQHCYGRSKDPVLNVHHLKSRRMGGDSPGNLITLCETCHKALHRGEITLKAKRGQSFRAEAFMGIMRWEVHNRLRALHPGIEVSNTYGYRTKHARIANGIAKSHCADAFCIAGNLGAERLCEFFFQKQTRRNNRQIHKLSILKGGIRKRNQAPFEVKGFRLFDKVACQGEEGFIFGRRSSGFFDVRKLDGTRISAGISCKKLHLLEKRRTYLTEIRKEEALPPLPEGRGLRA

SEQ ID NO: 2851 - protein, 424 aa, Moorena sp.
MRVFVLDKNKKSLDPCKPARAIILLKEGRAKVFRRYPFTIIMRDLEELECVTHNHQIKLDPGSQTTGLAIVQEKVVVWGAELTHRGLQIRDALTSRRQLRRSRRNRKTRYRQPRFLNRKRPDCWLAPSLMSRVYNIITWVKKLTRFCPITGISQELVRFDTQKMENPEISGTEYQQGTLYGYEVREYLLSKWNRKCAYCGVTDTPLEVEHIKPKSKGGSDRVSNLAIACRKCNQTKGNQEIEQFLSGKPDVIKRILSQAKRPLVDAAAVNSTRWKLYNELKALGLPIETGSGGLTKYNRCRQNLPKTHWLDAANVGKVDTLYIEVDQPLLISAKGHGTRQMCRTNKFGFPTRYVPRLKFVKGFQTGDIAKAVVTKGKKVGTYTGRIATRKTGSFNISTKHGLVQGISHQYCSIVHRKDGYAYSF

SEQ ID NO: 2852 - protein, 457 aa, unidentified
  REGION 1..457: note = Ga0315284_10157738
MSKKTLQVKLKNTLRDAPLVPDSVRPTLNKEETPSAQDKVRTCNNPEVDLLQHAGGQASRVPDDMRVFVLNMRKEPLMMTSSRKARLLLKRGEAVVVRRSPFTIQLKYASGERKQEISCGVDSGYSHIGFSCVTERQELVRGEVAVDNFTVKHLIEKSMYRKNRRNKLRYREPRYLNRKRSDGWLPPSVERRYQTHIHLITLLKKLLPISDIIVETASFDIQKLNNPEITSEGYQQGSLYKSNVRAFILAREKNTCQLCKEGYSKTDHWHKHHIIPRSQGGTDKPDNIALLHEKCHDKLHAKGLYKQLEKNKQYKEPTFMNIVKGKFKEDLNCKTVFGYETFVKRNELQLKKSHSNDAFVIAGGSTQNRCFEYMVKQKRRNNRSLQLNRKGSKPSIRRQRHKLQPYDLIRIGNNKIYEVKATHCRGTRVQIKNRKDTAIKNISWFFNSKSLIFKIFK

SEQ ID NO: 2853 - protein, 489 aa, Calothrix sp.; identical to SEQ ID NO: 2822

SEQ ID NO: 2854 - protein, 470 aa, unidentified; identical to SEQ ID NO: 2825
  source 1..470: note = human gut metagenome

SEQ ID NO: 2855 - protein, 397 aa, unidentified
  source 1..397: note = human gut metagenome
IVKRRTPFTIQLTIATGETKQPGSLGVDAGYKHVGLSASTEKAELYASEVELRQDITDLLSARRALRQSRRNRKTRYRAPRFNNRLCTKRKGWLAPSVENRINAHLSRIEAVLRLLPVTKITVETASFDLQLLKNPDISGKEYQEGEQLGFWNIREYVLCRDGHVCQHCYGRSKDPVLNVHHLESRRTGGDSPGNLITLCETCHKALHRGEITLKAKRGQSFRAEAFVGIMRWEVHNRLRALHPGIEVSNTYGYRTKHARIANGIAKSHCADAFCIAGNLGAERLCEFFFQKQTRRNNRQIHKLSILKGGIRKRNQAPFEVKGFRLFDKVACQGEEGFIFGRRSSGFFDVRKLDGTRISAGISCKKLHLLEKRRTYLTEIRKEEALPPLPEGRGLRA

SEQ ID NO: 2856 - protein, 414 aa, unidentified
  source 1..414: note = human gut metagenome
MVYVINKQGQALMPTERFGKVRRLLKNSLAHVVCRIPFTIQLDYDTTDYTQPVSLGVDAGSKHIGISATTSEKEMYAADVELRNDIVDKLSTRREQRRTRRSRLRYRKARFNNRVSSKRKGWLAPSVENKIQTHLTVVEKIHKFLPITNIVVETASFDIQKINNPSISGSEYQQGEQLDFFNVREYVLFRDNHTCQHCKGKSKDKVLNVHHIESRKTGGDSPNNLITLCETCHKAYHRGEFKLNVKRGKSFRDAVFMGIMRWSFYDMLKNIYPNVSMTFGYITKNTRITNNLPKDHYVDARCISGNPVAKPLGYYFYQKKVRCQNRQIHKANFLKGGRKKLNQAPFLVKGFRLFDLVEYQKDLYYIFGRRDSGFFDIRKLDGTKVNKGSINCKYLRLVDKRKSILIEKRMQVNL

SEQ ID NO: 2857 - protein, 423 aa, Arthrospira sp.
MSNHIFVLDTNRKPLTPCKPGVARSLLKAGKASVFRRYPFTIILNKEVDANPEPLELKLDPGSKVTGIALKQGNHIIFAAELQHRGQQIKEALLSRRQLRRSRRNRKTRYRPARFLNRTRPEGWLAPSWQHRVDTLMTWVHRFRRLAPVGRITQELVRFDLQLMENPEISGVEYQQGELQGYEVREYLLEKWGRTCAYCGAQNVPLEVEHIQPRSKGGSDRVSNLTMACHSCNQAKGNGDIRDFLSSQPDVLSRLLRQVKSPLKDAAAVNSTRWALFNALKATGLPVTTGTGGQTKFNRLRLNLPKAHWLDTACVGPVESLEVLTSKPLLILAKGHGTRQMCGTNKYGFPNRHRSRRQIHKGFQTGDMVTALVTAGKKIGSYLGRVLCRASGSFDITTASVRVAGISHKYCQPIHRKDGYAYA

SEQ ID NO: 2858 - protein, 413 aa, unidentified
  source 1..413: note = human gut metagenome
MTNYAFVLDADGKQLAPTKEQKAWFLIRKKRAILVSKYPMVIQLKKEIPDKEICKNEIRCGIDDGGLHIGVALVQKCQIRNKVIFKGVIEQRNDVKHLMDVRRGYRRYHRYHKRYRPARFNNRKSSKREGRIAPSILQKRQATIRIINQLNKWINITNYWLEDVAIDIRALTDGYKPYRWQYQKSNRLDENIRKAVILRDGCKCMECGKSNCRLEVHHIKPRRLKGSSTLDNLITLCTKCHQKTEGVEELYMDRYFALLNSSDNKSLNYAQHVMIGKKWLREQLSNLGILYLTNGGDTANKRIDWDIAKSHSNDAICITDLRPDTCEIKELTIKPMRRQSKAKTDNVLGIKHRDLVEYTFRNGETHRGYVTALYPEQNALNFQSPTKHCKKVNASKCRLLWKYSKIYWLDNVS

SEQ ID NO: 2859 - protein, 469 aa, Desulfobacter sp.; identical to SEQ ID NO: 2403

SEQ ID NO: 2860 - protein, 461 aa, unidentified
MSKVFVIDSEKRPLNPIHSAQARQLLRNKKAAVFKRFPFTIILSNLPQKNEAGFNKDNSLGQSDKPETSPPHFSRSGSVKESQSSPVQPLRLKLDPGAKVTGIALVNDTTGEVVFAAELKHRGFAIRDALISRRQLRRSRRNRKTRYRKPRFLNRTRPKGWLAPCLKSRVDHIKTWIERLRKLAPIQAISQELVRFDMQLMRNPEIQGKEYQQGTLAGYETREYLLEKWGRQCAYCGVKDVPLQIEHIHPRAKGGSNSITNLTLSCEKCNTKKGTKEIKEFLKKDPTKLHKILAQALIPLADAAAVNTTRYALLNTLKETGLPVETGSGGLTKFNRSQQNLPKNHWLDAACVGKSTPILKVKGIKLLLITANGHGTRQMAGTDKFGFPIRHRSNKQIHYGFSTGDIVKAVVTNGKKVGEYLGRVLCRATGSFDIATKIGRIAGISYKYCSPIHKKDGYSYS

SEQ ID NO: 2861 - protein, 419 aa, Moorena sp.
MQNYVFVIDTNKQPLNPIPPKKARRLLDKGKAAVFRMYPFTIILKTAVDNPRVSPCQIKIDPGSKTTGFALVQNNQVIWGMELEHRGGFIKKKLESRKAVRRGRRNRHTRYRKPRFLNRKRLEGWLPPSLEHRVSTIETWVKRLTKFCPINEIWVERVKFDTQKMQKPEISGVEYQQGELAGYEVREYLLEKWGRECTYCGKQSVPLQIEHIQPKSFGGSNRVSNLCLACEKCNQRKGNKPIEEFLKNKPSLLQKIKTKTKQPLLDAAAVNTTRNKLVKVLQNILLVVTGTGAQTKYNRIKLGLPKQHWIDAACVGDIETLVLKTSQPLLVTCKGQGGRQKAALNKYGYPIRHNPLKPIKGWVTGDIAKHQKLGIGKVTPRSKGSFGFTPLGMKGYKSCKPQDISAIHRKDGYTYGFCQ

SEQ ID NO: 2862 - protein, 424 aa, unidentified
  source 1..424: note = human gut metagenome
MVYVLSKEGTPLMPTNRHGRVRHLLDAGEAKAVKRCPFTIQLLYQSTTYTQEITLGVDAGSKTIGLSASTEKKELYASETRLRMDITDLLSVRRQFRRTRRNRKTRYRKARFNNRVHAKHKGWLAPGIEAKIGTHFRAVRDVCRILPVTEIIVETASFNLQKIKALEKGEPVPEGTDYQKGDQLGFWNVREYVLWRDGYKCRCCNGKSKDQVLNVHHIESRKTGGDTPNNLATLCGYCHKQYHKGTILLPKSVRRGNSFRDAAFMGIMRRTFYNRLKEQYPRVAMTYGYITKNTRIRNSLPKTHYADARCIAGHPQAEPLEVYYFQKKVRCHNRQIHKSNILKGGKKKRNQAEYLVKGYRLYDRVRYQNREYYVFGRRASGFFDIRTLGGNKGNKGSVSCKKLRFLEPRKTMLIERRMQEREAV

SEQ ID NO: 2863 - protein, 424 aa, Moorena sp.; identical to SEQ ID NO: 2832

SEQ ID NO: 2864 - protein, 427 aa, Methanosarcina sp.
MLVFVINQNKKPLMPCKPSKARKLLQAGKAKVVRNTPFTIKLLFGSSGYTQPVIAGMDTGSKVVGCAAIANGKVLYQSEIYLRENVSKKMDQRKMYRRTRRGRKTRYRPARFDNRGNSRKEGRLAPSIRSKLESHFREKRFVESLLPVTGWKVELASFDIHKITNPEVSGVGYQEGNLKGFYNVKAYVLDRDGYTCQHCMGKSKDFRLHCHHIVFRSQKGSDAPENLITLCETCHKALHNGEFKLSGNKSKTKHATEIGILKSQIRKSGWSFAETFGYETKYRREQVLKLLKTHYFDAVAICCRDDQNVEVEDSVFLKRNVSKRDHQQRRGKRSEKKIPTGKLFGLRKFDLVKTENGIGFIRGKRSSGYFSISDIFGNKISDSVNVKKKCRRLSARSTTLVQMVQMTHSSPTCHFRQAGNVEEGVSC

SEQ ID NO: 2865 - protein, 423 aa, Moorena sp.
MRVFVLNKNREPLDPCKPARARILLTAGKALVYRRYPFTIILTEEIEEPITHTHQLKIDPVAKTSGLAIVQNNRVVWGCELTHRGFQIRDALTSRRQLRRARRNRKTRYRKPRFLNRSRPEGWLAPSLMSRVQNILTWVKKLTRLCPVTGISQELVRFDTQKLQNPEISGIEYQQGTLYGYELREYLLEKWHRKCAYCGATGTQLEIEHIKPKSKGGSDRVSNLAIACHPCNRAKSNQDIELFLSGKPNILKRILARAKSPLADAASVNTTRWRLYHELKSIGLPVEVGSGGLTKFNRCRQSLPKTHWLDAANVGKVETLIVEVTHPLIITAKGHGTRQLCRTNKFGFPVRHCSRTKIHKGFQTGDIVRAVVTKGKKIGTYVGRVATRKSGSFNISTKSGLVQGISHKYCQFIHRKDGYAYTN

SEQ ID NO: 2866 - protein, 406 aa, unidentified
  source 1..406: note = human gut metagenome
MVYVQDIDGKPMMPTTRHGKVRRLLKDNKAVVVNTCPFTIKLTYKTSDYKQEIVLGVDAGTKHVGLSATTKSKELYSGEVILRNDVVELLSTRRESRRARRNRLRYRKPRFENRVKSKRLGWVAPSVRHRIDAHIRVIDNVCSILSISRIIIEVAQFDTQKINNPNISGNEYQKGDQLGFWNVREYVLARDGHKCQHCKGKSKDHILNVHHIESRKTGGDSPSNLITLCETCHKEYHKGNIDLKVKRGKSLRDAAVMGIMKWKLYDELKSKYDNVSMTFGYITKYNRIKYGIEKSHTSDAFVISRNFNAKRIERQYLKRLIRRHNRQIHKMKILKGGKKKNNQAPFEVFGFRLFDKVLYNNEICFIYGRRKSGCFDIRDFDGKNSKNVTYKKLKLIRGKRYPIILK

SEQ ID NO: 2867 - protein, 411 aa, unidentified
  source 1..411: note = human gut metagenome
VSEMTNYAFVLDANNKQLTPTKEQKAWFLIRKKRATLVSKYPMVIQLKKKIPDKEICKDEVRCGIDDGGLHVGVALVQKCQTRNKVVFKGVIEQRNDVKHLIDVRCGYRRYHRYHKRYRSARFNNRNSSKREERIAPSILQKRQATIRVINQLNKWINITNYWLEDVAIDIRALTDGYKPYRWQYQKSNRLDENIRKAVILRDGCKCMECGKSNCRLEVHHIKPRRLKGSSTLDKLITLCTKCHQKTESVEELYMDRYFALLNSSDNKNLNYAQHVMIGKKWLREQLSNLGMLYLTNGGDTANKRIDWDIAKSHSNDAICITDLRPDTCEIKEWAIKPMRRQSKAKTDNVLGIKHRDLVEYTFRNGETHRGYVTALYPEQNAINFQSPTKHCKKVNAKNVKYFGNILKFTG

SEQ ID NO: 2868 - protein, 431 aa, unidentified
  source 1..431: note = human gut metagenome
MPNKVYVINKHGRPLMPCSPAKARHLLDAGKAKVKKRTPFTIQLVYGSSGYTQEVILGVDAGSKTIGVSALTKKEELFAANVIPRNDVVDLLSTRREFRRARRNRKIRYRKPRFDNRVRSKHKGWLAPSVEVKIQEHITTIRRVYGILPVSKVVVETAEFDLQLLKAIADGKPVPQGEDYQKGEMYGHYNVRQYVLWRDGYTCQCCGAHATKKKEVRLHVHHLESRKVGGDAPDNQVTLCESCHEKLHKGLIAEKDFKKRKRRSTRDATFMGIMRKTLMQRLYSELPIPVIETRGYITKATREKLLVLPKSHTNDALAIAQGKRGFNVGYLPEIAQIDKIYTIRPVRHHNRQLHKAAILKGGIRKSNQAGKYVFGYRLFDKVQFNGQDCFIWGRRTTGIFTIKTINGKMIKDGISFKKLKLVEKSTSYLIA

SEQ ID NO: 2869 - protein, 420 aa, Moorena sp.
MQNYVFVVDTNKQPLNPVTPKKARRLLDKGKAAVFRMYPFTIILKTSVLNPTISPCQIKIDPGSKVTGFALVQNNQVIWGMELEHRGGLIKKKLESRRAVRHRRRNRHTRYRKPRFLNRKRSEGWLPPSLEHRILTIETWVKRLIKFCPVNEIWVERVKFDTQKMQNPEINGVEYQQGELAGYEVREYLLEKWGRECTYCGKQSVPLQIEHIHPKSKGGSERVSNLCLACEKCNQRKGNKPIEEFLKQKPSLLQKIKSKAKQPLRDAAAVNATRNKLVKVLQNIKPIITGTGAQTKYNRTKLGFPKEHWIDAACVGDIETLILRTSQPLLVTCKGQGGRQKAALNKYGYPIRHNPLKPIKGWCSGDIAKNIMTGEFGRVNPRSKSNSFNYTVPGKKAISLHVKNLIRVHKKDGYIYGFCS

SEQ ID NO: 2870 - protein, 552 aa, Streptomyces sp.
MTTFPAGEQTHQAVLPQQPALESVGADTPGSRDETAHGHPATAWGTGREHGRGETDGRGTRPRRRHAKGATTVANAAENGSGDAPTHNPSYKGGVGASRVFVLSKDGQPLMPCHPARARELLGKGRAVVARQVPFTIRLKDRTRAESAVEGLQLRIDPGSKGTGLVLTDEKKEIDEHGTTVTVRRGLISIELQHRGEQIRSSMRKRAGYRHRRRSANCRYRAPRSDNRTRPAGWLPPSLRHRVDSTFSLAKRLGRFAPVTEIYVERVSFDTHSMSAGRPLKGAEYKQGTLAGTDARVYLRAMWNNACAYCDATGVPLNIEHLRPRSRGGSNRITNLVLACTPCNEAKGSKPVEVFLAQRPDRLARILQQIETPLHDAAAMNATRWQLTEALATLGLPVHTSTGMCTKDNRCAMGLAKTHTLDALSVGHLDHEAGDAIVRYPGQVLVAKATGRGSYARTTTDRYGFPRLRRARTKQHFGYFTGDLVRASVPTGKWAGTWIGRISVRARGQHSLTTPMGRVNVSHWNLELLQRGDGYGYSILRESAPPTSRKNG

SEQ ID NO: 2871 - protein, 371 aa, unidentified
VADITSLSNIEDEHLTGIIPELSSKDDKPLMPTKRHGKVRRLLKQGFAKVVRREPFTIQLLYDTTTYTQPITVGVDIGSKVIGVSAITDKQELFSAEVELRQDIKKLLLERREYRRNRRYRQPRFLNRKRRNNWLSPSVQWKVDAHNRLVNLITKILPIAKVEIAPFDIHKIVNPDVEGSQYQEGPQKGFFDVREYCLWRAEYKSELSGKKGILEVHHIIPRSQGGTDNPSSLIVLTSEEHETIHKGELEIPKSKLKKIKILKDATHVSTIGWYIVNRLKGHYCVEVTYGSITKVRRIELGIEKTHRNDAFVIAGGSKDVNRTTEWYFGKYFRRQNRSLHKANPIKGGIRPLNTIKEVKGFRRFDRVRYNN

SEQ ID NO: 2872 - protein, 346 aa, Arthrospira sp.
MPNYQNYVFVVDTLGQPLSPTHPARARKLLKKGLAAVFRTYPFTIILKKTVENPGNEPSRIKLDPGASVTGIALVNQSRDTVIWAAELTHRGDRIRAKLTARRVVRRHRRCRKTRYRQARFNNRKRQEGWLAPSLKHRVETTLTWVNRLISSRPITDISMELVRFDTQKLPNPEISGVEYQQGVLFGYELREYLLTKWQHQCAYCGGQNIPLEIEHIQPKSQGGFDRVSNLGIACHKCNQKKGSQPVEQFLLPKPEILKRCSVQAQAPLKNAAAVNSTRWALFNRLKPTGLPIEIGTGGLTKYNRTVQGLPKTHWLDAADCVGKSTHPPVDNQNSPAITNYLFWAR

SEQ ID NO: 2873 - protein, 454 aa, unidentified
  source 1..454: note = human gut metagenome
MSTCVCVLGSDGERLMPTFRLGKVRRLLKDGKAKIIKHHPFTIQLLYDSKTNTQPIEICEDVGYNYIGISVKSESHEYVSAQYDTLQDEKACHDSCRKLRRTRRNRLRYRKPRFDNRKRGEGWLAPSLRHKKELNVNVVKMYCAVMPITHATVEVGSFDTMLVKAIQEGKAIPEGADYQKGPRYNLATLREAVFYRDNYTCQVCGRKIADGAILHMHHMFYWKGRHGNSLDELLTVCEKCHTPANHQKSGKLYGFGEDVKFSNLSGAAFMNTVRWQIVNELYAAFGKPFVTITYGAMTKEKRIALHLEKSHNNDAYAMGEFHPNCRCAFEHYEKVRRNNRILERFYDSRYIDIRTGEIATGKELFNGRINRNHKKDSENLHKYRGKRTYAGHRALLRKKVNLNPGDLVSLNGEVLIVYGTHTDKKGAVNVEFKTPAKNGRKSASLKKLKIVKAT

SEQ ID NO: 2874 - protein, 406 aa, unidentified
  source 1..406: note = human gut metagenome
MVYVQDIDGRPLMPTTRHGKVRRLLKSKKATVVNLCPFTIRLLYDTTGYKQEITLGVDTGTKHVGLSATTKSKELYASEVILRSDVVDLLSTRRELRKIRRYRLRYRKPRFMNRIKSKKRGWIAPSIRQKIDSHIRIIGFVYSILPVSKLIIEVAQFDTQKIKNPEISGKEYQEGEQLGFWNVREYVLARDEHKCQHCKGKSKDPVLNVHHIESRKTGGDSPSNLITLCKTCHKEFHKGNIKLKVNRGESLRDAAVMSIMKWELYDELKSLYPNVKMTFGYITKYNRINHGIEKSHVSDAFVISRNFDSERLGYYYKRKLVRRHNRQIHKMKAPKGGNKRMNQSPFKVFGFRLFDKVMFQGKERFIYARRLRGIFNIRDINGENKKDISYKKLEYVSHGLISIVAG

SEQ ID NO: 2875 - protein, 438 aa, Methanosarcina sp.
MIFVLNKNKQPLSPWHSAVARKLLKTGKAVIHKKYPFTIRLKELKISENKAEFRLKIDYGSRHTGLAILNGSKVIGLAQIHHKTSIKSNMDSRRAMRRTRRNRTTRYRKPRFNNRKRKEGWLPPSLQSRVDNIQNWVNRLQKLCPLTHISYENAKFDTQLMQNPEISGIEYQQGELQGYEVREYLLEKWNRKCAYCGAENVPLEIEHIIPKARHGTSRVSNLTLACRTCNEAKGTKTAEEFGYPDIQKQARIPLRDATLVTATRWKVYNVLEKTGLEVECGTGARTKMNIIRLNLPKDHHFDAICVGVSTPENVVFKTNQVLHIKAKGRGSHCRTNLDKYGFPRGYLSRQKSFFGFQTGDIVKAVVPKGKYKGIHFGAVACRKTGYFDIKNKEGIRIVQGINHKYCNILSRADGYEYTTEHLEVDGIPPTTEVIGILP

SEQ ID NO: 2876 - protein, 512 aa, unidentified
  source 1..512: note = human gut metagenome
MSTVYVLNKDGKPLMPTTRGGHVRHLLKEQKARVVRAKPFTIQLLYETNDVVQPLYLGIDPGRTNIGVAVVKANGTAVFTAHLETRNKEIPKLMQDRKKARRARRTNGRRCRRQRRAKANGTISKKCVKQDTAQSKNPSKRAKEIGVIKRCLPGHKKDLLCIGIKNKEAKYTNRARPEGWLTPTANQLLQTHINLVKKIQKFLPISDVVLEVNKFAFMRLDNPDIQKWQYQQGPLYQKGSLENAVSEMQEHHCLFCDKPIDHYHHVVPQSENGSNTIANIVGLCSEHHNLVHKDAAWQKKLAEEKVGLNKKYGALSVLNQIIPALTNKLSVLFPKHFFVTTGKSTHDYRESHSVSKDHWLDAYCIACSVLPSNVCDSNINNHVPYELKQFRRHDRRALHKENMSRVYTLNGKAVATNRHKAIKQTTDSLEEFRQSHPGDVCKLKVKEHHPAYRNLNRNHPGSVFFVGEQAHVMQSIVASKDGKATRYKDTNVNKIAAGQCRFVAKNEGIVFT

SEQ ID NO: 2877 - protein, 520 aa, Streptosporangium sp.
VLPQRAALEFASADTPEGGHETGRGHRLSTVTGVEHGRGEIAPDGTRLLRRHPEDTSVSEGADREVHPAVFVLDTHGHPLDPCHPARARRLLAAGRAVVVRHTPFVIRLKDRTVAGSTMQGVELGIDPGSKHTGIAAFSERGGSRIGLYALQLDHRGGQIRDKLASRAALRRGRRSRNLRYRAPRFNNRTRPQGWIAPSLRHRVDGTVSWVSRLSRWAPVTAVHVERVAFDTHLLSAGRPLEGVEYRYGTLHGYEVREYLLAKWGRACAYCGASGVPLNLDHIHPRSRGGSNRISNLCVACVGCNQAKNATPIEEFLTDRPVVLVKILQQSKAPLRDAAAVNATRWALWRALTATGLPVATASGGRTKWNRSRTGAAKSHTLDALHVGALDHVTGWPSMVLVIAATGRGTYARTRADRYGFPRLALPRTKQHHGFQTGDLVRAVVPTGKKAGVHTGRVAVRSTGNFNIRTRHGSVRGISHRHVRLLQRADGYGYTTHPEARNRAAFPPPPEGGGIHAGGN

SEQ ID NO: 2878 - protein, 414 aa, unidentified
  source 1..414: note = human gut metagenome
MPCSPAKARLLLKEKKAIVKRRTPFTIQLTIATGETKQPVSLGVDAGYKHVGLSASTEKAELYASEVELRQDITDLLSARRALRQSRRNRKTRYRAPRFDNRIRTKRKGWLAPSVENRINAHLSRIETVIRLLPVTKISVETTSFDMQLLKNSDIAGKEYQEGEQLGFWNVREYVLFRDGHVCQHCHGRSKDPVLNVHHLESRRTGGDSPGNLITLCETCHKALHRSEITLKTKRGQSFRAEAYMGLMRWEVLNRLKTSHPGLEVHNTYGYRTKYTRIVNGIDKSHCADAFCIAGNLGAERLGEFFFQKQTRRNNRQIHKLSILKGGIRKRNQAPFEVKGFRLFDKVACQGEEGFIFGRRSSGFFDVRKLDGTRISAGISYKKLHLLEKRQTYLIEIRKEEAFPPLPEGRGLRA

SEQ ID NO: 2879 - protein, 264 aa, Methanosarcina sp.
MIFVLNKNKQPLSPCHSAVARKLLKTGKAVIHKKYPFTIRLKELKYSENKAEFRLKIDYGSRHTGLAILNGSKVIGLAQIHHKTSIKNNMDSRRAMRRTRRNRTTRYRKPRFNNRKRKEGWLPPSLQSRVDHIQNWVNRLQKLCPLTQISYENTKFDTQLMQNPEISGIEYQQGELQGYEVREYLLEKWGRKCAYCGAENVPLEIEHIIPKARHGTSRVSNLTLACRTCNEAKGTKTAEEFGYPEIQKQARIPLKDAIIVTATR

SEQ ID NO: 2880 - protein, 441 aa, unidentified
  source 1..441: note = human gut metagenome
ERLMPTSEYRARKLLKSGKAIKYSYHPFTIQLTERKTGNIQPIELCMDTGYIHIGISVKSEKHEYLTEQIDTLTDERSRHNARRMYRSQRRNRKRYRQPRFNNRKKDKGWIAPSLEHKKNIHVQAISRINNVMPLTDITIEMGNFDTQVLKAKEEGRPLPQGVDYQHGERYSIATLREAVFARDGYKCQCCGRTIKDGAILHVHHIKYRSQGGTNSISNLATVCDKCHTPKNHKPGGKLYGWKPKLPSFKGATFMTTIRWQLYNEAKALFPDIDIHITYGAATKERRRELNIDKSHINDAFVMGQFHPRHRIKAVLYKKKRRNNRCLEKFYDAKYIDSRDGKKRSGQELFNGRINRNHKKDSENLHQYRLQKVTAGKRTVRKQHYSVQPHDIIIYESRKRETTGCHCNGARVMLLPDKKSVSIKKIKIYRYAGGYFKSTFN

SEQ ID NO: 2881 - protein, 456 aa, Halomonas sp.
MAVFVLDQQKQPLMPCSEKRARLLLARGRAVVHKRYPFTLRLKDRIGGDTQPLRLGIDPGSKTTGLSLMRESDGEQRHVLCLFELTHRGYQIKKALQQRAAFRRRRRSANLRYRAPRFNNRTKPKGWLAPSLQHRVDTTMAWVQRLGKLAPITALDQELVHFDTQKLENPEISGIEYQQGTLLGYEIREYLLEKWGRECAYCGDTETPLEIEHVVPHSRGGSNRISNLTLSCHPCNQEKDSQALTRFFATSNGLKRRLKANGHTADARLDRVQRQLKQPLRDASAVNATRWALFNALKATNLPVSVASSGRTKYNRQRLGIPKTHALDAACIGAFGTLNDWQVPTLTIKAMGRGSYQRTRLTKHGFPRGYLMRQKQLKGFQTGDMVKAIVTTGKRAGTHTGRVAVRKTGSFNIQTENGAVQGISYKYCTVIQRGDGYAYHLLSSINHKGGAEQAVA

SEQ ID NO: 2882 - protein, 419 aa, unidentified
  source 1..419: note = human gut metagenome
MVYVISQDGKPLMPCSDPIARLLLKQGKAKVKKREPFTIKLTYETTNYTQGLTLGVDTGSGTIGTAVSKDNGDIVYMSEVVVRNDITDKMTQRAKYRRNRRNRKTRYRKARWLNRASSIKKDRFSPTMQSKLHSHVREIEYIQSILPVTEMVFETGQFDMQLMKNPSLANPKVRPWGYQKGANYGFENTKAMVLNRDNYTCQCCKGKHKDSKLEVHHIVFRSQGGSDEESNLLTLCHTCHKDLHSGKINPKLSGKVKGNLKYATQMNSIRKQLFRFYPNAIETFGYVTKANRLHLGVDKEHYYDACTIATQGNAFNVKSNLYKKKCVSDGDFQKTKGIRSEQPIVTDKICGFRKFDKVRYFGNDYFIKGRMSTGYAILMDIEGNKIDFSTMPRGYKTPKLSNCKRITARSTVMTQVKVV

SEQ ID NO: 2883 - protein, 470 aa, unidentified
  source 1..470: note = human gut metagenome
MSVFVVGLNGCRLMPVSERKARLLLKGGKASVYRKVPFTIKLNYKTGSTVQPGYLGIDTGSQHIGVSVVRKDGTVLHKEEIGLRDSMSKRKLLESRASSRRGRRYRKTRYRHPKWKPKTKRIYNEKADRKGRHWKKQKNTFTSKRQAGWLPPSLQSKTDHHIQWIRKLLDLLPEGYRLSIELGRFDPARMKDPEIHGELYQKGPQYDYENVRAYVLARDGYTCRVCKKKGGKLHVHHILYRSRGASDNPKYMAAVCSKCHTTENHLPGGILYQWMQDQKKFTRGLRDATFMNILKKRLRKAFPDAVFTYGNITKADREKLELPKSHGNDATAIALVKTEVKSVKDEEPVIHIQQVRRKKRSLHEETPRKGRKEPNRTASRSDKNTKSVTVTKGSGEKKASMTACLFDRVELDGKKGWITGFTGTSCYVKDKEDNYICTSSKYKQVSISRLRILHHCGNWAIGAEKPLGKG

SEQ ID NO: 2884 - protein, 424 aa, Moorena sp.
MRVFVLDKNLKTLDPCRPARARLLLKQGRAKVFRRYPFTIILSDLEVENCTTHNHQLKIDPGAKTTGLAIRQNNTVIWGAEITHRGFQIRDALTSRRQLRRSRRNRKTRYRKPRFLNRKRPERWLAPSLMSRVHNIMTWVKKLIRFCPIAGISQELVRFDTQKTENPEISGTEYQQGTLYGYEIREYLLEKWNRKCAYCGTTDTKLEIEHIKPKSLGGSDRVSNLAIACHDCNQAKGNQEIKQFLSGKPDVLRRILSQAKRPLADAAAVNATRWKLYKELKSTGNPLETGSGGRTKYNRCRFNLPKTHWLDAACVGNVQSIYVENYQPLLIEAKGHGTRQICRTDKFGFPKRYCSRTKIHKGFQTGDIVKAVVTKGKKIGTYVGRVATRKTGSFNISTANGLIQGISHKYCQPIHKKDGYAYTI

SEQ ID NO: 2885 - protein, 454 aa, unidentified
  source 1..454: note = human gut metagenome
VSYTARYVPAYRIKHITKKEAPYMVYVLDIDGQPLMPTSRHRKVRKLLNSHLAKVVKRCPFTIQLLYQSTKETQPVSLGVDAGSRHIGLAATTEQKVVYQEELVPRNDVVKLLSARRALRSSRRSRKARYRKPRFNNRVHSKHKGWLAPSVEVKIQEHITAIKRICQILPISDIHVETAEFDLQRLKAMEEGRPLPIGTDYQLGEQYDFYNTRQYVLHRDEYTCQCCGTHDNNVKLHVHHIESRQTGGDAPNNLITLCEHCHKLLHAGKTILPKGKKRGKSYRDATFMGIMRKTLLERLKKEIDVPVEGTYGYITKYWRERAGLEKSHINDAICISKHPYARPLETYYLTKAVRHHNRQIHKTKFSKGGIRKRNQAPYLVKGFRLFDKVLYQGESYFIFGRRITGYFDIRTLDGTKVNKGSTSYKKLRIQDTAEAYLTEVRAIPHMNEFTCVLA

SEQ ID NO: 2886 - protein, 414 aa, unidentified
MPCSPAKARLLLKEKKAIVKRRTPFTIQLTIATGESKQPVSLGVDAGYKHVGLSASTEKAELYESEVELRQDVSDLLSARRALRQSRRSRNTRYRAPRFDNRIRTKRKGWLAPTVENRINVHLSRIETVLRLLPVTKITVETASFDTQLLKNPDIAGKEYQEGEQLGFWNVREYVLFRDGHVCQHCHGRSKDPVLNVHHLESRRTGGDSPGNLITLCETCHKALHRGEIKLKAKRGRSFRAETFMGIMRWGVLNRLKASHPKLEVHNTYGYRTKHARIANGIAKSHCADAFCIAGNFGAKRLGEFFFQKQTRRNNRQIHKLSILKGGIRKRNQAPFEVKGFRLFDKVACQGEEGFIFGRRSTGYFDVRKLDGTCISAGISYKKLHLLEKRRTYLTEIRKEEALPPPPEGRGLRA

SEQ ID NO: 2887 - protein, 423 aa, Moorena sp.
MRVFVLNKKGQPLDPCKPARARILLSTGKAKVYRRYPFTIILTEEIKEPVTHEHQLKIDPGAKTSGLAIVQGQRVIWGAELTHRGFKIREALTSRRQLRSSRRNRKTRYRKPRFLNRTRPKGWLAPSLMSRVKNILTWVKKLIRLCPVIGISQELVRFDTQKLQNPEISGVEYQQGTLYGYELREYLLEKWNRKCAYCGTTGTQLEIEHIKPKSKGGSDRVSNLAIACHPCNQAKSSQDIELFLSKKPSILKRILNQAKRPLADAASVNVTRWKLYHNLKSTGLPVEVSSGGLTKFNRCRQNLPKTHWLDAANVGKVETLIVEVTHPLLIAAKGHGTRQLCRTNKYGFPIRHCSRTKIHRGFQTGDIVRAVVTKGKKVGTYVGRVATRKSGYFNISTKSGLVQGISHKYCKFIHRKDGYAYTN

SEQ ID NO: 2888 - protein, 424 aa, Moorena sp.
MFVFVLNSSRKPLNPTHPARARKLLKTGKAAVFKRYPFTIILKEEVAEPNNQQLRIKIDPGSKTTGIAILRNESVLWGAELTHRGGQIRSALTSRRQLRHSRRNRKTRYRQPRFNNRCRQEGWLPPSLISRVENILTWVKRLLQLSPIAHISTELVRFDTQLIQNPEISGIEYQQGTLAGYELREYMLEKWHRRCVYCGATDTKLEIEHIVAKSKGGSNRVSNLTLSCRKCNQKKGNKPIEQFLENNPLLLKSILSQSKRSLADTAAVNATRWKLFNGLKELGIPVETGTGGRTKYNRCRQNLPKTHWLDAANVGHSTPDTLKILVSRPMKIKATGHGNRQMCGTNAFGFPIRHRSNTKKHFGFQTGDIVKAVVTKGKKVGSYIGRVLCRATGSFDITTATGRVAGISHKYCSFVHRSDGYSYQ

SEQ ID NO: 2889 - protein, 458 aa, unidentified
MSTCVCVLSNSGERLMPTIRLGKVRRLLKDGKAKIIKHHPFTIQLLYDSKANTQPIEICEDVGYNYIGISVKSQSHEYVSAQYDTLQDEKACHDSCRKLRRTRRNRLRYRKPRFDNRKRSEGWLAPSLEHKKQLNIRLIERYVSVIPITHATVEVGSFDTMLVKAIEEGKATPESADYQKGPRYNLATLREAVFYRDNYICKVCGRKATEGAILHMHHMFYWKGRHGNSLSELITVCEKCHTPANHQKSGKLYGFGENVKFADLSGAAFMNTVRWQIVNELYAAFGKPFVTITYGAMTKEKRIALQLEKSHNNDAYAMGEFHPSCRCKFRHYQKRRRNNRVLEKFYDATYIDTRTGNKAKGKELFNGRISRNHKKDSENLHKYRAHKITKGRRSIRSKHYDIQSGDTVLYAGRKCITTGCFNKGKWLRIPVGSTAKSVAISKVKLINHVGAWKKGSSI

SEQ ID NO: 2890 - protein, 346 aa, unidentified; identical to SEQ ID NO: 2872

SEQ ID NO: 2891 - protein, 434 aa, unidentified
MGFLTTWARRKILPKGKVAEMPKIKKYAFVLDAKRKQLDPTIEQNAWRLVRQYKARLVSKFPMIIQLNKVMDNPNNDEIRCGIDDGANHVGMALVQKCQTRNKVLFKGTIEQRKDVKHLLTVRRGYRRYHRYHKQYRPARFLNRASSRRSGRLMPSIIQRKQAILRVIDRLRQWVRIDGYWLEDVKIDIRALTDGYKPYRWQYQKSNRLDNNLRLAAIHRDGCKCVECGKTKTRFEVHHITPRKTGGADTISNLITLCPKCHAKTFGRESQFADRYYALIGSTGHVEGLDGAQRVMQGKHWFREQLQQRGSLVLTTGGNTANKREDWDIAKTHSNDAVCITDLKPENIDIEEWTIKPMRRQNKAGVDEVCGFHHRDYVTYTYRNGETHTGYVTAMYPDKNQLNFQSPTKHCKRVNALKARLLWRYDKIYWFKCA

SEQ ID NO: 2892 - protein, 442 aa, unidentified
MSTTVFVLDKKKRPLMPCRPARARRLLRAGRARVAKLYPFTIRLVDRMCEESAVQSVLVKIDPGSKETGIAVVREDEKKHHHALAFFDVVHRGAAIRDAMAARSALRRRRRSANLRYRAPRFNNRRRREGWLPPSLQHRVDSTLSWVARLRRLAPVSGLAVEVVKFDAQKLQNPEISGTEYQQGTLFSYDVREYLLEKFGRKCVYCGAQNVPLNIDHVVPRAAGGSDRVSNLVLACISCNQKKGAQTVASFLKGRPDVLARVNRQLKTPLRDAAAVNATRWALYRALQNSGLPVETGTGALTKFNRHVFGVTKEHWLDALCVGRVNGVHIPKSLFVLQVRCTGRGSRQRTRLTKYGFPRGCLMRHKRVHGFATGDMVEADVPSGKKAGFWRGRVAVRASGSFNIQTPEGVVQGVSWKYCRLISHNDGYGYAWLRPAPHSSPA

SEQ ID NO: 2893 - protein, 434 aa, unidentified
MGFLTTWARRKILPKGKVAEMPKIKKYAFVLDAKRKQLDPTIEQNAWRLVRQYKARLVSKFPMIIQLNKVMDNPNNDEIRCGIDDGANHVGMALVQKCQTRNKVLFKGTIEQRKDVKHLLTVRRGYRRYHRYHKQYRPARFLNRASSRRSGRLMPSIIQRKQAILRVIDRLRQWVRIDGYWLEDVKIDIRALTDGYKPYRWQYQKSNRLDNNLRLAAIHRDGCKCVECGKTKTRFEVHHITPRKTGGADTISNLITLCPKCHAKTFGRESQFADRYYALIGSTGHVEGLDDAQRVMQGKHWFREQLQQRGSLVLTTGGNTANKREDWDIAKTHSNDAVCITDLKPENIDIEEWTIKPMRRQNKAGVDEVCGFHHRDYVTYTYRNGETHTGYVTAMYPDKNQLNFQSPTKHCKRVNALKARLLWRYDKIYWFKCA

SEQ ID NO: 2894 - protein, 423 aa, unidentified
MSNHIFVLDTNRKPLTPCKPGVARSLLKAGKASVFRRYPFTIILNKEVDANPEPLELKLDPGSKVTGIALKQGNHIIFAAELQHRGQQIKEALLSRRQLRRSRRNRKTRYRPARFLNRTRPEGWLAPSWQHRVDTLMTWVHRFRRLAPVGRITQELVRFDLQLMENPEISGVEYQQGELQGYEVREYLLEKWGRTCAYCGAQNVPLEVEQIQPRSKGGSDRVSNLTMACHSCNQAKGNGDIRDFLSSQPDVLSRLLRQVKSPLKDAAAVNSTRWALFNALKATGLPVTTGTGGQTKFNRLRLNLPKAHWLDTACVGPVESLEVLTSKPLLILAKGHGTRQMCGTNKYGFPNRHRSRRQIHKGFQTGDMVTALVTAGKKIGSYLGRVLCRASGSFDITTASVRVAGISHKYCQPIHRKDGYAYA

SEQ ID NO: 2895 - protein, 423 aa, Moorena sp.
MRVFVLNKNRQPLDPCKPARARILLSTGKALVYRRYPFTIILTEEIKDPVTHEHQLKIDPGAKTSGLAIVQGTRLIWGAELTHRGFQIREALSSRRQLRRSRRNRKTRYRKPRFLNRTRPKGWLAPSLTSRVQNILTWVKKLIRFCPITGISQELVRFDTQKLQNPEISGIEYQQGTLYGYELREYLLEKWNRKCAYCGATGTQLEIEHIKPKSKGGSNRVSNLTIACHPCNQAKSNQDIELFLSKKPSILKRILSQSLRPLADAASVNSTRWKLYYELKSIGLPVEVGSGGLTKFNRCRQNLPKTHWLDAANVGKVETLIIEVTLPLAITAKGHGTRQLCRTNKYGFPIRHCSRIKFHKGFQTGDIVRAVVTKGKKIGTYVGRVATRKSGSFNISTKSGLVQGISHKYCRFIHRKDGYAYTN

SEQ ID NO: 2896 - protein, 515 aa, unidentified
VTDVSTVYVLNKDGKPLMPTTRCGHVRYLLKEKKARVVKTKPFTIQLLYETNDVVQPLYLGIDPGRTNIGVAVVKADGTAVFTAHLETRNKEIPKLMKKRKDSRRARRTNGRRCRRQRRAKANGTISKKCVKQATAQNGSASKRAKKIGVIKRHLPGCEKEVLCIGIKNKEAKFNNRTRPAGWLTPTANQLLQTHINLIKKIQKLLPISDVVLEINKFAFMQLDNPNIQKWQYQQGPLYQKANLEEAVSEMQEHHCLFCKKKIDHYHHVVPQHKNGSNTIDNIVGLCTKHHDLVHKDTAWHEKLTKKKTGLNKKYGALSVLNQIIPALTKELSSIFPKHFFVTTGKSTYDYRAAHGVSKDHWLDAYCIACSVLPNDVCDSSINNRVPYELKQFRRHDRRALHKENMSRVYTLNGKKVATNRHKATEQTADSLEEFRQNHPDDVCKLKVKEHHSEYRNPKRNFPGCVFLVGKRTHVMQGTSGSHNGKADGYYDTNGNSYSSGKCKFVAKNEGIIFA

SEQ ID NO: 2897 - protein, 517 aa, Actinoplanes sp.
LHTRQSTHSGVLPQRRTLESVSADKPTRAHETGHGYRDPVAVPGVRHGRGETTAPIPGQWRHPDGQPSGDRGRKAPPTHHPVVFVLDKHGRPLQPCTPARARKLLTAGRAVVHRHTPFVVRLKDRTVQDSEIQGVEVGVDPGSKATGVAAFTTQTGARTGLLAIEVRHRGGQIRDKLTARAALRRGRRSRNLRYRAPRFRNRARPKGWLAPSLQHRVDTTMSWIERLRRWAPVIQLHVERVAFDTQLLQNPTIQGAEYQAGELAGYEVREYLLEKWKRRCAYCGASGVPLNIDHIHPKARGGSDRIANLTLACVPCNQAKGSTPVEVFLTGRPVVLARILRQVKTPLRDAAAASSTRWALWRALTGTGLQVAVATGGRTKWNRARTGAPKTHTLDALHVGVLDTVTRWPGTTLVATSTGRGSYARTRSDRYGFPRLRLPRIKQVWGFATGDLVHAVVPSGVKRGTHTGRVAVRSTGSFNIRTKTGLVQGIHHRHIRLLQRADGWAYTHQPEGQPTDA

SEQ ID NO: 2898 - protein, 489 aa, unidentified
MTMVYVQNKDGKPLMPTTRYCYVRLLLKEKKARVVSRTPFTIRLNYDTPDVTQDLILGVDPGRTNIGVAVVKEDGQCVFSAHLETRNKDVPLLMKKRAAFRRNHRTLDRRRKRQRRAKAAGTTIAEGSVERLLPGYEKPIVCNHIRNKEARFNNRSRPAGWLTPTANHLLQTHINLIAKVAKFLPITKVVIELNRFAFMAMDNPNIRRWEYQQGPLYGLGSVEDAVYAQQDGHCLFCEKPIDHYHHVVPRHKGGSETLANRCGLCARHHDLVHTDKSWAEKLVTRKGGMNKKYHALSVLNQIIPHLIEHLGSETPYEAYATDGKSTKGFRIAKNVPKEHYTDAYCIACSILDTNIEVSAPTSPFELKQFRRHDRQACIRQMVDRKYLLDGKVVATNRHKAIEQKSDSLQEFREAYGSAAVSQLTVKPHPPQYKDMTRIMPGAVMDFNGTIGVMQSSIVGRFYKSTKGYKAAPRRCVLLAQNAGMVFLPA

SEQ ID NO: 2899 - protein, 438 aa, Methanosarcina sp.
MIFVLNKNKQPLSPCHSAVARKLLKTGKAVIHKKYPFTLRLNELKNSENKAEFRLKIDYGSRHTGLAILNGSKVIGLAQIHHKTSIKSNMDSRRAMRRTRRNRTTRYRKPRFNNRKRKEGWLPPSLQSRVDNIQNWVAKLQKLCPLTHISYENTKFDTQLMQNPEISGVEYQQGELQGYEVREYLLEKWGRKCAYCGAENVPLEIEHIIPRARKGTDRVSNLTLACRTCNEAKGTMTAEEFGYPEIQKQARIPLRDATLVTATRWKVYNTLTEKGLEVECGTGARTKMNRIRLNLPKDHHFDAICVGASTPNKIIFKTNSVLHIKAKGRGSHCRTNLDKYGFPRGYLTRRKSFFGFQTGDIVKAVVPKGKYKGIHFGAVACRKTGYFDVKNKEGIRIVQGINHKYCNILSRADGYEYATEHLEVDGIPPTTEVIGILP

SEQ ID NO: 2900 - protein, 423 aa, Arthrospira sp.
MSNHIFVLDTNRKPLTPCKPGVARSLLKAGKASVFRRYPFTIILNKEVDANPEPLELKLDPGSKVTGIALKQGNHIIFAAELQHRGQQIKEALLSRRQLRRSRRNRKTRYRPARFLNRTRPEGWLAPSWQHRVDTLMTWVHRFRRLAPVGRITQELVRFDLQLMENPEISGVEYQQGELQGYEVREYLLEKWGRTCAYCGAQNVPLEVEQIQPRSKGGSDRVSNLTMACHSCNQAKGNGDIRDFLSSQPDVLSRLLRQVKSPLKDAAAVNSTRWALFNALKATGLPVTTGTGGQTKFNRLRLNLPKAHWLDTACVGPVESLEVLTSKPLLILAKGHGTRQMCGTNKYGFPNRHRSRRQIHKGFQTGDMVTVLVTAGKKIGSYLGRVLCRASGSFDITTASVRVAGISHKYCQPIHRKDGYAYA

SEQ ID NO: 2901 - protein, 427 aa, Methanosarcina sp.
MLVFVINQNKKPLMPCKPSKARKLLQAGKAKVVRNTPFTIKLLFGSSGYTQPVIAGMDTGSKVVGCAAIANEKVLYQSEIYLRENVSKKMDQRKMYRRTRRGRKTRYRPVRFDNRGNSTKGGRLAPSIRSKLEAHFREKMFVESLLPVTGWKVELASFDIHKITNPEVSGVGYQEGNLKGFYNVKAYVLDRDGYTCQHCMGKSKDSRLHCHHIVFRSNHGSDAPVNLITLCETCHKALHNGEFKLSGKKSKTKHATEIGILKSQIRKSGWSFAETFGYETKYRREQILKLIKTHYFDAVAICCRDDQNVEVEDSVFLKRNVPAGDYQQRRGKRSEKKIPTGKLFGLRKFDLVKTEKGIGFIRGKRSSGYFSISDIFGNKISDSVNVKKKCRRLSARSTTLVQMVQMTHSSPTCHFRQAGNVKEGVSC

SEQ ID NO: 2902 - protein, 421 aa, unidentified
MRGQPLMPCSPAKARHLLKAGKAVVRRRTPFTIQLRIATGETKQSVTLGVDAGAKHVGLSATMEKEEVFASEVELRQDITGLLAARLSLRRERRHRKTRYRAPRFLNRVRSKHKGWLAPSVENRIQAHMSRIDAVCKLLPVTKIVIETASFDIQKIRNPTVEGTDYQQGDLLGFWNVREYVLFRDGHVCQHCHGHSRDKILNVHHLESRQTGGDAPNNLITLCETCHKAYHAGKIKLKVKRAQSFRAEAFMGIMRWTLLDRVRKAHPGLPVENTYGYLTKNTRITLGLPKTHCVDAYCIAGNLKVVRRGVYLYQRQVRKHNRQIHKCTVLSKTLKDGTKIGYRKLNQTPHLVKNFRLFDKVRCLGQTGFIFGRRSSGYFDVRRLDGVKLSSGISYRKLTLLEKRSTYLTELRNEDGASSPV

SEQ ID NO: 2903 - protein, 442 aa, unidentified
MVTVQQSTHHLPFGRVFIRRNLFMVYVISQDGKPLMPCSDPIARLLLKQGKAKVKKREPFTIKLTYETTNHTQGLTLGVDTGSGTIGTAVSKDNGDIVYMSEVVVRNDITDKMTQRAKYRRNRRNRKTRYRKARWLNRASSIKKDRFSPTMQSKLHSHVREIEYIQSILPVTEMVFETGQFDMQLMKNPSLANPKVRPWGYQKGANYGFENTKAMVLNRDNYTCQCCKGKHKDSKLEVHHIVFRSQGGSDEESNLLTLCHTCHKDLHSGKINPKLSGKVKGNLKYATQMNSIRKQLFRFYPNAIETFGYVTKANRLHLGVDKEHYYDACTIATQGNAFNVKSNLYKKKCVSDGDFQKTKGIRSEQPIVTDKICGFRKFDKVRYFGNDYFIKGRMSTGYAILMDIDGNKIDFSTMPRGYKTPKLSNCKRITARSTVMTQVKVV

SEQ ID NO: 2904 - protein, 429 aa, Tolypothrix sp.
MSKVFLIDVNKRPLNPIHSAQARQLLRNGKAAVFRRFPFTIILKVTFKTDVEIEPLRLKIDPGAVISGIALVNDSTGEVVFAAEIKHRGFAIRDSLISRRQLRRSRRNRKTRYRQPRFNNRIRPKGWLAPSLQSRVDNIKTWVERLRKVAPIEAISQELVRFDMQLIRNPDIEGKEYQQGTLFGYETREYLLEKWNRQCAYCGVKDVPFQIEHIHCRAKGGSNSITNLTLSCEKCNKKKGTKDIRDFLKKDSARLEKILKQAKQPLTDAAAVNSTRFALLKTLQSTGLPVETGSGGLTKFNRTQQGLEKTHYFDAACVGQSTPEKLIVKGVKPLLITANGHGTRQMCRTDKFGFPNRHCSRTKFHFGFQTGDIVKAVVLSGKKVGEYVGRIATRSTGSFNISTKNGLVQGISHTYCQQIHKKDGYSYAF

SEQ ID NO: 2905 - protein, 498 aa, unidentified
MPTTRGGHVRYLLKEKKARVVTSKPFTIQLLYETDDVVQPLYLGIDPGRTNIGVAVVKTDGTAVFTAHLETRNKEIPKLMQGRKKARRARRTNGRRCRRQRRAKANGTISKKCVKQTTAQNGSVSKRAKKIGVIKRHLPGCEKKVLCIGIKNKEAKFSNRTRPEGWLTPTANQLLQTHINLIKKIRKFLPVNDVVLEINKFAFMQLDNPNIQKWQYQQGPLYQKASLEEAASEMQEHHCLFCKKSIAHYHHVVPQSENGSNTIGNIVGLCTKHHDLVHKDTAWQKKLAKKKTGLNKKYGALSILNQIIPALTKELSSLFPKHFFATNGKSTHDYRAAHDVSKDHWLDAYCIACSILPNDTCDKNINGRVPYKLKQFRRHDRRALHKENMSRVYTLDGKKVATNRHKAIKQTTDSLEEFRQRQPNDVCKLKVKEHHPEYRNPERNFPGCVFLVGKHTHVMQRTSGTHNGKADGYYDTNGNSYPSGKCKFVAKNKGIVFA

SEQ ID NO: 2906 - protein, 512 aa, unidentified
MSTVYVLNKDGKPLMPTTRGGHVRHLLKEQKARVVRTKPFTIQLLYETDDVVQHLYLGIDPGRTNIGVAVVKTDGTAVFTAHLETRNKEIPKLMKKRKDSRRARRTNGRRCRRQRRAKANGTISKKCVKQTTAQNGSVSKRAKEIGVIKRHLPGCEKEVLCIGIKNKEAKFSNRVKPEGWLTPTANQLLQTHINLVKKIQKFLPISDVVLEINKFAFMQLDNPNIQKWQYQQGPLYQKASLKEAVSEMQEHHCLFCKKPIAHYHHVVPQSENGSDTIGNIVGLCAKHHDLVHKDTTWQKKLAKKKTGLNKKYGALSVLNQIIPTLTKELSSLFLKHFFVTNGKSTYDYRAAHGVSKDHWLDAYCIACSVLPNDTCDKTINSRVPYEFKQFRRHDRRALNNENMSRVYTFNGKMVATNRHKATEQTTDSLEEFRQRQPNDVCNLKVKEHHPTYRNMNRNYPGSVFLIGKQVHVMQGIAGSKNGEATTYKDTNANSIAAGKCKFVAKNSGILFV

SEQ ID NO: 2907 - protein, 545 aa, Actinoplanes sp.
VTSPSKPFERGETTLNIGAQTYGRVLPQPGPLESRSVDNPSGRDETGPRHHSHPGWQAGVQHGRGETPTVVVPRQGRHPGAAAAEPGAGGNAHQQQVTEPRVFVLDRNGLPLQPCTPARARQLLRTGRAVVHRRTPFVIRLRDRNRQESVVQGVQIGVDPGSRYTGISLFTGSDAVSPKPVAEPAVVRAGVFSIEVQHRGNQIREKLTARAALRRGRRSRNLRYRQPRFDNRTRSVGWLAPSLRHRVETTMSWISRLQRWAPVAALHVERVAFDTQLLQDPEIAGRGYQQGTLHGYELREYLLEKWQRKCAYCGVSGVPLNLDHIRPRSRGGSDRASNLTLACISCNQTKGNQPVEVFLAGRPEMLARILAQVRKPLRDAAAVSSTRWALWKSLTVTGLPVHVASGGRTKYNRHRTNTPKSHTLDALHVGVVDEVTGWPVRVLVATATGRGTYTRTRTDRYGFPRLRLPRTKLHHGFQTGDLVRAVVRTGANQGTHVGRVAVRSTGRFNIRTATGLVQGIGHRYVRLLQRGDGWTYSRQPEQQPA

SEQ ID NO: 2908 - protein, 427 aa, Methanosarcina sp.
MLVFVINQNKKPLMPCKPSKARKLLQAGKAKVVRNTPFTIKLLFGSSGYTQPVTAGMDTGSKVVGCAAIANGKVLYQSEIYLRENVFKKMEQRKMYRRTRRGRKTRYRPARFDNRGNSTKGGRLAPSIRSKLEAHFREKMFVESLLPVTGWKVELASFDIHKITNPEVSGVGYQEGNLKGFYNVKAYVLNRDGYTCQHCRGKSKDSRLHCHHIVFRSQKGSDAPKNLITLCETYHKALHNGEFKLSGKKSKTKHATEIGILKSQIRKSGWNFAETFGYETKYRREQVLKLLKTHYFDAVAICCRDDQKVEVEDSVLVKRNVPAGDYQQRRGKRSEKKIPTGKLFGLRKFDLVKTEKGIGFIRGKRSSGYFSISDIFGNKISDSVNVKKKCRRLSARSTTLIQMVQMTHSSPTCHFRQAGNVEEGVSC

SEQ ID NO: 2909 - protein, 433 aa, Calothrix sp.
MEGLMSKVFVLDAENRLLNPIHSAQARQLLRNKKAAIYRRFPFTIILKESHLSPVQPLRLKLDPGAKATGIALVNDATGEVVFAAELKHRGFTIRDALTSRRQLRRGRRTRKTRYRKPRFLNRTRLEGWLAPSLQSRVDNIKTWINRLSKLALIGAISQELVRFDMQLMRNPEIEGKEYQQGTLAGYETREYLLEKWNRQCTYCGVKDVPLQIEHIHPKAKGGSNSITNLTLSCEKCNLKKGTNDIRDFLKKDPNKLQKILLQAKKPLADAAAVNTTRYALLEVLKATGLTVECGSGGLTKFNRNNQNLPKNHWLDAACVGKSTPFLVIKGVKPLLITANGHGTRQSCRTDKYGFPNRHCSRTKFHFGFQTGDIVKAVVKTGKTVGEYIGRIATRATGSFNISTRNGLVQGISHKYCSAIHKKDGYSYALGKI

SEQ ID NO: 2910 - protein, 451 aa, unidentified
MSVAVISKTGERLMPTSEYRARKLLKSGKAIKYSYHPFTIQLTERKTGNIQPIELCMDTGYIHIGISVKSEKHEYLTEQIDTLTDERSRHNARRMYRSQRRNRKRYRQPRFNNRKKDKGWITPSLEHKKNIHVQTISRINNVMPLTDITMEMGNFDTQVLKAKEEGRPLPQGVDYQHGERYSIATLREAVFARDGYKCQCCGRTIKDGAILHVHHIKYRSQGGTNSISNLATVCDKCHTPKNHKPGGKLYGWKPKLPSFKGATFMTTIRWQLYNEAKALFPDIDIHITYGAATKERRRELNIDKSHINDAFVMGQFHPRHRIKAVLYKKKRRNNRCLEKFYDAKYIDSRDGKKRSGQELFNGRINRNHKKDSENLHQYRLQKVTAVKRTVRKQHYSVQPHDIIIYESRKRETTGCHCNGARVMLLPDKKSVSIKKIKIYRYAGGYFKSTFN

SEQ ID NO: 2911 - protein, 425 aa, Nodularia sp.
MSNFVLVLDTNKKPLTPIHPGDARFLLNQQKAAVFRRFPFTIILKEPKSEVPTQPIELKIDPGSKTTGFALVQNNKVIWGMELQHRGLAIKESLETRKGVRRGRRSRHTRYRQARFLNRTKPQGWLAPSLSHRVLTINTWVKRLCNFAPITDIVQELARFDLQQLENPEISGFEYQQGELQGYEVREYLLNKWNRKCAYCTAENVPLQVEHIKPKAKGGTNRISNLCLACEKCNIKKGTQDIEKFLAKKPELLKQILSQAKRPLKDASAVNSTRWALFNKLKETGLPITTGSGGLTKFNRTRLGLPKTHWIDAACVGKVETLKILTTKILTVKSTGHSCRRFCRINKFGFPCTEPKKIFTHVSTGDFVKATLHKDRKNITSGKYVSRVKTPTKNGCEIVINGFRVEFSTMKDITKVHCSDGYSYG

SEQ ID NO: 2912 - protein, 413 aa, unidentified; identical to SEQ ID NO: 2636

SEQ ID NO: 2913 - protein, 443 aa, Caldicellulosiruptor sp.; identical to SEQ ID NO: 2385

SEQ ID NO: 2914 - protein, 470 aa, Anaerostipes sp.; identical to SEQ ID NO: 2825

SEQ ID NO: 2915 - protein, 431 aa, unidentified
MLVYVLDKNGQPLMPTHNGAKVRVLLNQKRAKVVSKCPFTIKLLYESTTFTQPLTLGVDTGSKYVGSAVINDITSEIVYESQTELRDDIKSKMDRRRQFRRTRRNKLRYRPMRFNNRNASKRKERYSPTLISKFQGHKREIEFIKSILPISDVILEVGEFDPQLLQDPTLAYHKWDYAKGELYQQENFKQATKARDGYQCQCCGKKNCRLEVHHLLPRSRGGSDKLANLITLCTDCHHLAHSSEEQLLAFQKKFGKKARCTLRYTTQMNILRNMLQKEYPDAELTYGFITKEMRRVFGLEKSHTIDACCIASRGSEFYNENSNKYKKKCVPKGSYPRTGVKGGKFVVLPKGKISGLKRYDKVLYNGKEYFVVGRRTTGYIYLIDVDNNRVQTERTKRTTGEKYMSKAIIKVALVRKVASAKSCVCVRECED

SEQ ID NO: 2916 - protein, 310 aa, Moorena sp.
MQNYVFVIDTKNQPLNPISPKKARRLLDKGKAAVFRMYPFTIILKTAIDNPTISPCQIKIDPGSKVTGFALVQNNQVIWGMELEHRGGLIKKKLESRKAVRHRRRNRNTRYRKPRFLNRRRKEGWLAPSLEHRVLTIETWVKRLIKFCPINQVWVERVKFDTQKMQNPEINGVEYQQGELAGYEVKEYLLEKWGRECTYCGKQSVPLQIEHIHPKSLGGSNRVSNLCLACEKCNQRKGNKPIEEFLKKKPNLLQKIKTKTKQPLPDAAAVNTTRNKLVKVLRSIKFVVTGTGAQTKYNRTRLGLPKQHAY

SEQ ID NO: 2917 - protein, 427 aa, Methanosarcina sp.
MLVFVINQNKKPLMPCKPSKARKLLQSGKAKVVRNTPFTIKLLFGSSGYTQPVIAGMDTGSKVVGCAAIANGKVLYQSEIYLRENVSKKMEQRKMYRRTRRGRKTRYRPARFDNRGNSRREGRLAPSIKSKLEAHFREKRFVESLLPVTGWKVELASFDIHKITNPEVSGVGYQEGDLKGFYNVKAYVLDRDGYTCQHCRGKSKDSRLHCHHIVFRSQKGTDAPENLITLCETCHKALHNGEFKLSGKKSKTKHATEIGILKSQIRKSGWSFAETFGYETKYRREQVLKVLKTHYFDAVAICCRDDQKVEVEDSVFLKRNVSAGDYQQTKGKRSEKKIPTGKLFGLRKFDLVKTEHGIGVVWGKRSSGYFSISDIFGNKISDSVNVKKKCRRLSARSTTLVQMVQMTHSSPTCHFRQAGNVEEGVSC

SEQ ID NO: 2918 - protein, 515 aa, unidentified
MTALEERLSKTEYIYVLGFDGKPQMPTRRKRHVLKLLKTGRARIAEDIPFTIRLTYRNVPVLQPVTLAEDPGRTNIGAAVLSPLGDLLFASVIETRNKEIKKLMADRKKSRQASRRGERKARQRLAKRYGSMVKSGMVIRKLPMYAADKFVTCKFIRNTQARFCNRKRCPDWITPTVQHLVQTHLNIIRKISRYLPVTDIAFEVSRFAFMHMENPEAMGVDFQNGPLKGYDDVKEAIRTQQHGKCLMCKKPIAHFHHIVPRSRGGSDTIQNLAGLCPECHTKVHTDTAFRKDFDEKKSGQLKKYGALSALNQAVPFICKKLLEEYGEEHIHFCRGLDTSLIRTALGFEKTKKNQMHEVDAYCIGLAALEVNEVETPAFDHTFQIRQFRRQDRSIIHHQTGRSYYQGKEKVAQNRKPGFEQKTTALSQWYEEQVRIHGEKESEKLRSQLRVEKSCRHYNDMDRFLPGAVFLYEGKRYVLSGRITNGKYLRACGQGMKNFPAAECTFIRHNAGLVFI

SEQ ID NO: 2919 - protein, 461 aa, unidentified
MPNPIQVCVLDKQKKPLMPCHPARARELLREGRAVVHRRVPFTIRLKDRVGGDVQPVRLCEDPGSKKTGIAVVRETPAAETSLDANGDDVSGPTRTVLFKIELEHRGAAIHKAMESRKSLRHGRRSRKTRYREQRYNNRASSRRSGRLPPSLKHRVETTMTWTRRLSRLVPVTAISVERVRFDTQLMENPEISGVQYQQGTLRGYETREYVLEKWGRSCAYCDAENVPLQLDHVRPKSRGGPSRPTDFVPACGPCNQRKGAQPVETFLKRDPKRLAKIMAGLKAPMRDAAAVNATRWALDAELRTIGVPVEAASGGRTKWNRHRFDVPKTHANDAVCVGRVGGVAMLDRPTLYVRCTGRGSYCRTRVTASGFPRGYLMRSKSSHGFRTGDIVRAVVPSGKKRGTHTGRVAVRATGNFAVFTSGGRVDGISHRHCRVVQRADGYDYAWTEKKRAEKSEAATL

SEQ ID NO: 2920 - protein, 437 aa, Ktedonobacter sp.
MSYVFVVDTDLHPLNPVHPGRARILLSSGKAAVLKRSPFTIVLKTSVEQPTLAPLRLKLDPGSNTTGVALVSDQSGQVVFAADLSHRGHAIKDALQSRRGVRRSRRNRQTRYRKPRFRNRRRPKGWLPPSLQSRISNITSLVHRLQKLCPVSSISMELVKFDLQQMENPEMCGAEYQQGTLAGYELREYLLDKWHRTCAYCGRSNVPLQIEHMQPKAKGGTERASNLTLSCGPCNQKKGTQDIAVFLKKKPELLARLVAQAKAPLKDATAVNATRWALFERLKPFGLPIECGSGGLTKFNRTKRGLAKTHWLDAACVGRSTPESIHAEGIVPLCIKASGHGNRQMCGTDKHGFPIRHRQRQKMHHGYQTGDLVRAVVPEPLKTAGTHVGRVQARATGSFDITTKPGTRVAGVGYQYCRPIQRCDGYSYTKGVPYAGA

SEQ ID NO: 2921 - protein, 378 aa, Moorena sp.; identical to SEQ ID NO: 2642

SEQ ID NO: 2922 - protein, 427 aa, Methanosarcina sp.
MLVFVINQNKKPLMPCKPSKARKLLQAGKAKVVRNTPFTIKLLFGSSGYTQPVIAGMDTGSKVVGCAAIANGKVLYQFEIYLRENVSKKMEQRKMYRRTRRGRKTRYRPARFDNRGNSRREGRLAPSIKSKLESHFREKRFVESLLPVTGWKVELASFDIHKITNPEVSGVGYQEGNLKGFYNVKAYVLDRDGYTCQHCMGKSKDFRLHCHHIVFRSQKGTDTPENLITLCETCHKALHNGEFKLSGKKSKTKHATEIGILKSQIRKSGWNFAETFGYETKYRREQVLKLLKTHYFDAVAICCRDDQKVEVEDSVLVKRNVPAGDYQQRRGKRSEKKIPTGKLFGLRKFDLVKTEKGIGFIRGKRSSGYFSISDIFGNKISDSVNVKKKCRRLSARSTTLVQMVQMTHSSPTCHFRQAGNVEEGVSC

SEQ ID NO: 2923 - protein, 416 aa, Moorena sp.
MQNYVFVIDANKQPLNPIAPKKARRLLDKGKAAVFRMYPFTIILKTAIEYPIVSPCQVKIDPGSQMTGFALVQNGHVIWGMELEHRGGLIKKKLESRRAVRRGRRNRNTRYRKPRFLNRRRPQGWLPPSLEHRILTTQTWVKRLIKFCPINEIWVERVKFDTQKMQNPEISGVEYQQGELAGYEVREYLLEKWGRECTYCGKQNTPLQIEHIHPSSKGGTNRVSNLCLACEKCNIRKGDKSIEDFLKKKPDLLKKIKSLAKQPLKDAAVVNATCNKLVKVLRTLKPVVTGTGAQTKYNRTKLRLPKQHWIDAACVGGIETLILKISQPLLVTCKGQGGRQKAALNKYGYPTRHNPLKPIKGWTTGDLAKHQKLGIGKVTPRSKGSFGFTPLGTKGYKSCKPQDISAIHRKDGYIYG

SEQ ID NO: 2924 - protein, 432 aa, Methanosarcina sp.
MIFVLNKNKQPLSPCHSAVARKLLKSGKAVIHKKYPFTIRLKELKTSENKAEYRLKIDYGSRHTGLAILNGSKVIGLAQIHHKTSIKSNMDSRRAMRRTRRNRTTRYRKPRFNNRKRKEGWLSPSLQSRVDNIQNWVDKLQKLCPLTQISYENVKFDTQLLQNPEVSGVEYQQGELQGYEVREYLLEKWNRKCAYCGAENVPLEIEHIIPRARKGTDRVSNLTLACRTCNEAKGTNTAEEFGYPEIQKQATKTLKDAALVTATRWKVYSVLVETGLEVECGTGARTKMNRIRLNLPKDHHFDAICVGASTPNEITFKTNQVLHIKAKGRGSHCRTNLDKYGFPRGYMARQKSFFGFQTGDIVKAIIPKGKYKGTHFGAVACRKKGSFVIKNKHGKLIAETTYKNCKMLSKADGYEYTIEPMEVDGIPLTLKL

SEQ ID NO: 2925 - protein, 470 aa, unidentified
MSVFVVGLNGCRLMPVSERKARLLLKGGKASVYRKVPFTIKLNYKTGSTVQPGYLGIDTGSQHIGVSVVQKDGTVLHKEEIGLRDSMSKRKLLESRASSRRGRRYRKTRYRHPKWKPKTKRIYNEKADRKGRHWKKQKNTFTSKRQAGWLPPSLQSKTDHHIQWIRKLLDLLPEGYRLSIELGRFDPARMKDPEIHGELYQKGPQYDYENVRAYVLARDGYTCRVCKKKGGKLHVHHILYRSRGASDNPKYMAAVCSKCHTTENHLPGGILYQWMQDQKKFTRGLRDATFMNILKKRLRKAFPDAVFTYGNITKADREKLELPKSHGNDATAIALVKTEVKSVKDEEPVIHIQQVRRKKRSLHEETPRKGRKEPNRTASRSDKNTKSVTVTKGSGEKKASMTACLFDRVELDGKKGWITGFTGTSCYVKDKEDNYICTSPKYKQVSISRLRILHHCGNWAIGAEKPLGKG

SEQ ID NO: 2926 - protein, 438 aa, Methanosarcina sp.
MIFVLNKNKQPLSPCHSAVARKLLKTGKAVIHKKYPFTIRLKDLKYSENKAEFRLKIDYGSRHTGLAILNGSKVIGLAQIHHKTSIKSNMDSRRAMRRTRRNRTNRYRKPRFNNRKRKEGWLPPSLQSRVDNIQYWVNRLQKLCPLTHISYENAKFDTQLMQNPEVSGVEYQQGELQGYEVREYLLEKWNRKCAYCGAENVPLEIEHIIPKARHGTSRVSNLTLACRTCNEAKGTKTAEEFGYPDIQKQARIPLRDATLVTATRWKVYSVLVETGLEIECGTGARTKMNRIRLNLPKDHHFDAICVGASTPDKIIFKTNSVLHIKAKGRGSHCRTNLDKYGFPRGYLSRQKSFFGFQTGDIVKAVVPKGKYKGIFFGAVACRKTGYFDIKNKEGVRIGQGINHKDCNILSRADGYEYATEHLEVDGIPPTTEVIGILP

SEQ ID NO: 2927 - protein, 438 aa, Methanosarcina sp.
MIFVLNKNKQPLSPCHSAVARKLLKTGKAVIHKKYPFTIRLKELKYSENKAEFRLKIDYGSRHTGLAILNGSKVIGLAQIHHKTSIKSNMDSRRAMRRTRRNRKTRYRKPRFNNRKRKEDWLPPSLQSRVDNIQNWVAKLQQLCPLTHISYENAKFDTQLMQNPELSGIEYQQGELQGYEVREYLLEKWGRKCAYCGAENVPLEIEHIIPRARHGTSRVSNLTLACRTCNEAKGTRTAEEFGYPDIQKQARIPLRDAALVTATRWKVYNTLTEKGLEVECGTGARMKMNRIRLNLPKDHHFDAICVGASTPDKIIFKTNQVLYIKAKGRGSHCRTNLDKYGFPRGYLSRKKSFFGFQTGDIVKAVVPKGKYKGIHFGAVACRKTGYFDIKNKEGVRIGQGINHKYCNILSRADGYEYATEHLEVDGIPPTTEVIGILP

SEQ ID NO: 2928 - protein, 278 aa, unidentified
MVYVLANDGQPLMPTERHGKVCRMLKSGIAKVVKKCPFTIQLQYESERNVQPVALGIDAGSKHVGVSATTKAKVLYESDVELRDDIVKLLATRRQLRRRRRSRKTRYRPARFDNRRRKEGWLAPSIRQKIESHLTVVANVCKILPVSQIIVETASFDIQKIKNPDIQGIEYQQGEQMDFWNIREYVLFRDGHTCQCCKGKSKDKVLNVHHIESRKTGGNAPNNLITLCETCHKGYHNGTVTLPKNIKRGMKFKDAAFMGIMRWTFYNTLKEQYEPDIP

SEQ ID NO: 2929 - protein, 466 aa, unidentified
MQRRVFVLSKNRKPLMPCSPARARQLLKERKASVYRQEPFTIILQKRTEGDLQKVQLKFDPGSKITGIALVVFFQKGTVVTWAAELEHRGEKIVDLLSKRRAIRRSRRNRKTRYRPPRFCNRTRKKGWIAPSLKSKVDNIFNWTKKLLAYTPIDNLCVETNRFDTQKLQNPEISGVEYQQGTLFGYEIREYLLYKWNHQCVYCDAKNVALEIDHIHPRSKGGSNRVSNLTISCRKCNENKGNSDIHDFLNKDNKRLQKIVSYSKKTLRDAASINTTRYVIGNQLKKLGIDVGFASGGKTKANRRHNGFNKQHWIDAACAGESGENVTISQDLIPLGIRSQGRGSRQMCRVDQFGFPRTTAKSQKRAKGFQTGDIVKAVVTKGKKKGVYVGRVAVRSNGYFNIKTNNSTVQGISYRYCHLIQQVDGYFYFQKGDARLKKPSCSCFAHSRPSGDSSPTYRSRGILATN

SEQ ID NO: 2930 - protein, 457 aa, Tolypothrix sp.
MITNSVFVLSKNGLILKPTTPARARILQAQGKTKKMKLFPFTLILEKEVNENVEPYLELRCDPGSKFTGISLVDLNKNEVIWAMELEHRGLAIKMELIKRAGVRRSRRTRRLRYRQKRFDRKKPDGWLAPSLRHRLLSTQTWIKRLLKIAPIKSIAIESVKFDLQKLETPDIEGLEYQQGTLWGYTLREALLEHWDRECVYCGKTDVPLQIEHINARSKGGSERFSNLTLSCEKCNQKKGNKPVEQFLKDQPEILKKIKSHQKKSLSDAAAVNSTRKAIFEMAHKFGLRVISGDGASTKMIRIQSGLPKLHWIDSACVGTSEIVKLRICQPLRVTCKGHGTKQVQRMNAKGFPAIASIKKNPITGKKEVKLVSTNQKYTHATASDYVICNLLKERKHIKAGIYRARVKTPTPKGVEVLISGHRIAIDQQYAKLIHRSDGYEYSFATIDQDLLRFRAI

SEQ ID NO: 2931 - protein, 461 aa, unidentified
MVKSSERQERCCRLETPSNIGEGSQPVERPRRQNLRVFVLNKRGKPLMPCSPAKARLLLKEKKAIVKRRTPFTIQLTIATGETKQPVGLGVDAGYKHVGLSASTDKAELYASQVELRQDITDLLSARRALRRARRNRKTRYRAPRFNNRIRTKRKGWLAPSVENRINAHLSRIEAVLRLLPVTKITVETASFDMLLLKNPDIAGKEYQEGEQLGFWNVREYVLFRDGHVCQHCYGRSKDPVLNVHHLESRRTGGDSPGNLITLCETCHEALHRGEIALKTKRGHSFRAEAFMGMMRWEVLNRLKASHSELEVNNTYGYRTKHARIVNGIDKSHCADAFCIAGNLGAERLCEFFFQKQTRRNNRQIHKLSILKGGIRKRNQAPFEIKGFRLFDKVACKGEESFIFGRRSSGYFDVRKLDGTRISAGISYKKLRLLEKRRTYLTEIRKEEALPPLPEGRGLRA

SEQ ID NO: 2932 - protein, 424 aa, Moorena sp.; identical to SEQ ID NO: 2651

SEQ ID NO: 2933 - protein, 431 aa, unidentified
MEGLMSKTLVLDTNKRPLDPIHPAQARQLLRNKKAAVFRQFPFTIILKESRPDSPVSPLRLKIDPGAKFTGMALVNDSTGEVVFAAELKHRGFVIRDALTSRRQLRRSRRARKTRYRQPRFLNRTRPNGWLAPSLQSRVENIKTWVKKLRKFAPIEAISQELVRFDMQLMANPDIQGKEYQQGTLAGYETKEYLLEKWNRQCAYCGVKDVPFQVEHIHPRAKGGSNSITNLTLSCEKCNTKKGTKDIKDFLKKDPTRLQKILKQAKRPLADAAAVNATRWALFRVLKDTGLPVETGSGGLTKFNRSQQNLAKTHWIDAACVGQSTPILTIKGIKPLLIAANGHGSRQSCRTDKFGFPSRYVPRFKFVKGFQTGDIVKAVVTAGKKVGEYFGRVAIRTSGTFNISTNSGLVQGISHKYCLATHKKDGYSYAN

SEQ ID NO: 2934 - protein, 414 aa, unidentified
MPCSPAKARLLLKEKKAIVKRRTPFTIQLTIATGESKQPVTLGVDAGYKHVGLSASTEKAELYASEVELRQDITDLLSARLALRRSRRNRKTRYRAPRFDNRIRTKRKGWLAPSVENRINAHLSRIEAVLRLLPVTKISVETASFDMQLLKNPDIAGKEYQEGEQLGFWNVREYVLFRDGHVCQHCYGRSKDPVLNVHHLESRRTGGDSPGNLITLCETCHKALHRGDITLKAKRGKSFRAEAFMGIMRWEVHNRLRALHPGIEVSNTYGYRTKHARIANGIAKSHCADAFCIAGNLGAERLCEFFFQKQTRRNNRQIHKLSILKGGIRKRNQAPFKVKGFRLFDKVACQGEEGFIFGRRSSGFFDVRKLDGTRISAGISCKKLHLLEKRRTYLTEIRKEEALPPLPEGRGLRA

SEQ ID NO: 2935 - protein, 450 aa, unidentified
MVYVINFEGKPLMPTTNAKARKLLKQKKATVKRVNPFIIQLLYKTDTEYIQTITLGIDSGYLNIGFSAITDSKELIVGEVKLLQGMKDRLLEKSQYRRIRRQRLRYRKPRWNNRKIRQGWLAPSLQHKLDTHVKFIDYLNTILPIRNIVLEVANFDIQKIKNPDISGVEYQQGEQMGFWNVREYVLHRDGHKCQNPNCKNKSKEQILEIHHIKYKSEGGSDAPSNLITLCNKCHTSPNHKKGKFLYDWCENGKKVRGFRDATFMSMIRWYLLEQLKEKYTNIKATYGYLTKNHRIEHGIEKSHFNDAFAIAKGVNQVRNLEIFKVEQSRLNNRSLEKFYDAKYIDNRTGEKVSASELNCGRRTRNKNLNSENLRVFRGQKISKGQRRIRKQKSLYQPNDLIKYNGNVYTVKGSQNEGKYIALKEIKKVPSVKLIKPYIFKKGLNWSHGLC

SEQ ID NO: 2936 - protein, 423 aa, Arthrospira sp.
MSNHIFVLDTNRKPLTPCKPGVARSLLKAGKASVFRRYPFTIILNKEVDANPEPLELKLDPGSKVTGIALKQGNHIIFAAELQHRGQQIKEALLSRRQLRRSRRNRKTRYRPARFLNRTRPEGWLAPSWQHRVDTLMTWVHRFRRLAPVGRITQDLVRFDLQLMENPEISGVEYQQGELQGYEVREYLLEKWGRTCAYCGAQNVPLEVEQIQPRSKGGSDRVSNLTMACHSCNQAKGNGDIRDFLSSQPDVLSRLLRQVKSPLKDAAAVNSTRWALFNALKATGLPVTTGTGGQTKFNRLRLNLPKAHWLDTACVGPVESLEVLTSKPLLILAKGHGTRQMCGTNKYGFPNRHRSRRQIHKGFQTGDMVTVLVTAGKKIGSYLGRVLCRASGSFDITTASVRVAGISHKYCQPIHSTDGYAYA

SEQ ID NO: 2937 - protein, 458 aa, Tolypothrix sp.
MMITNSVFVLNKNGLILKPTTPARARILQSVGKAKKLKLFPFTLILDKDVDENIEPYLEMRIDPGSRYTGICLVDLNKNEAVWAMELEHRGLAIKMEMITRASVRRARRSRRLRYRKKRFDRKKPDGWLAPSLRHRLLTTESWIKRLLKIAPIKSIAIESVKFDLQKMETPDIEGIEYQQGTLFGYTLREALLEHWGRECVYCGQTDVPLQIEHINARSKGGSDRFSNLTLSCEKCNQKKGNKPVEQFLKNKGEILQKIKAHQKESLSDAAAVNSTRKAIFQMAQHFGLRVISGNGASTKMIRIQSGLPKAHWIDSACVGTDQIVKLRICQPLRVTCKGHGTRQVQRVNASGFPAIASIKKNPVTGKKEVKLVAKNQKYTHLRAGDYVICNLLKDRKHTLAGIYRARVKTPTNRGVEVLISGHRIAIDQQHIKLIHRSDGYEYSFTTIDQDLLRLKPI

SEQ ID NO: 2938 - protein, 438 aa, Methanosarcina sp.
MIFVLNKNKQPLSPCHSAVARKLLKTGKAIIHKNYPFTIRLKELKYSENKAEFRLKIDYGSRHTGLAILNGSKVIGLAQIHHKTSIKSNMDSRRAMRRTRRNRTTRYRKPRFNNRKRKERWLPPSLQSRVDNIQNWINRLQKLCPLTHISYENVKFDTQLMQNPEMSGIEYQQGELQGYEIREYLLEKWGRKCAYCGAENVPLEIEHIIPKARHGTSRVSNLTLACRTCNEAKGTNTAEEFGYPDIQKQARIPLRDATLVTATRWKVYNVLEKTGLEIECGTGARTKMNRIRLNLPKDHHFDAICVGASTPDKIIFKTNSVLHIKAKGRGSHCRTNLDKCGFPRGYLARQKSFFGFQTGDIVKAVVPKGKYKGILFGAVACRKTGYFDIKNKEGVRIGQGINHKYCNILSKADGYEYATEHLEVDGIPPTTKVIGILP

SEQ ID NO: 2939 - protein, 442 aa, unidentified
MVTVQQSTHHLPFGRVFIRRNLFMVYVISQDGKPLMPCSDPIARLLLKQGKAKVKKREPFTIKLTYETTNYTQGLTLGVDTGSGTIGTAVSKDNGDIVYMSEVVVRNDITDKMTQRAKYRRNRRNRKTRYRKARWLNRASSIKKDRFSPTMQSKLHSHVREIEYIQSILPVTEMVFETGQFDMHLMKNPSLANPKVRPWGYQKGANYGFENTKAMVLNRDNYTCQCCKGKHKDSKLEVHHIVFRSQGGSDEESNLLTLCHTCHKDLHSGKINPKLSGKVKGNLKYATQMNSIRKQLFRFYPNAIETFGYVTKVNRLHLGVAKEHYYDACTIATQGNAFNVKSNLYKKKCVSDGDFQKTKGIHSEQPIVTDKICGFRKFDKVRYFGNDYFIKGRMSTGYAILMDIDGNKIDFSTMPRGYKTPKLSNCKRITARSTVMTQVKVV

SEQ ID NO: 2940 - protein, 456 aa, unidentified
MAIFVLDKKKQPLMPCSEKRARLLLQRGRAVVHKRYPFTIRLKDRVGGSTQPLSLGIDPGSKTTGLALIREPDSQQRHVLCLFELIHRGYQIKKALQQRAAFRRRRRSANLRYRAPRFNNRTKPKGWLAPSLQHRVDTVMAWVNRLSRLAPVTAISQELVRFDTQKLDNPEISGVEYQQGTLLGYEVREYLLEKWERECAYCGTADTPLEIEHVVPRSRGGSNRVSNLTLSCHPCNAEKDSQTLTDFFATNKGLKKRLKANGLSADAQLERVQRQLKQPMRDASAVNATRWALFSALKTTDLPVAVSSGGHTKYNRQRLNIPKTHALDAACVGAFEKLHDWTVPTLTIKAMGRGSYQRTRLTKHGFPRGYLMRQKQVHGFQTGDMVRAIVPTGKKAGTHTGRVAIRKTGSFNIQAEYGAVQGISHKYCTLIQRSDGYGYYVTLFSNLTGEAGRAVA

SEQ ID NO: 2941 - protein, 281 aa, unidentified
MSNFVFVLDTTKKPLNPVDPAQARRLLKQGKAAVFRRYPFTIILFEEITETPKNITLKLDPGSKTTGIALVQNNQVIWGAELQHHGQQIQDALTSRRQLRRGRRGRKTRYRQPRFLNRKRSEGWLPPSLQHRVDTTVTWVKRLIRYCPINSLAMELVKFDLQKQENPEISGVEYQQGTLYGGEVREYLLAKFNRSCQYCGATDRPFEVDHIHPRSKGGSDRVSNLTLACHNCNQSKGNQDIKDFLKEKPSLVNHILIQAKTPLKDAAAVNSTRLKLLNSLR

SEQ ID NO: 2942 - protein, 477 aa, Blautia sp.; identical to SEQ ID NO: 2707

SEQ ID NO: 2943 - protein, 517 aa, Streptosporangium sp.
MATLNTRQQTHRQVLPQSAALESVGADTPQGRDETAHGHRHTAVPGVQHGRGETERIGTRSARRHPDLASAGEGAGSSAHPVVFVLDKHGQPLQPTSPAYARKLLRSGRAVVHRHTPFVIRLKDRTAADSTVEGMHVGIDPGSKHTGIAVFTEHGGSRTGRYALQLDHRGAAIRDKLASRAALRRGRRSRNLRYRAPRFNNRTKPKGWLAPSLKHRMDTTMSWADRLRRWAPVSAVHVERVAFDTHALSAGRPLEGAAYQQGTLVGYEVREYLLAKWGRACAYCGISRTPLNIDHIHPRSRGGCDRISNLTVACIPCNQTKNATPVEEFLKAKPTLLAKILKQAKAPLRDAAAVNATRWALWRALEATGLPVATASGARTKWNRSRTGAAKSHALDALHVGHLETVAGWPSTVLVVTATGRGSYARTTPDRYGFPRLVRPRIKLHHGFQTGGLVRANVPAGKKAGVHLGRVLVRSSGSFDITTRHGRVAGISHRHVRHLQRADGYGYTTRKEADRND

SEQ ID NO: 2944 - protein, 413 aa, unidentified; identical to SEQ ID NO: 2636

SEQ ID NO: 2945 - protein, 431 aa, Moorena sp.
MRVFVLNKNRQPLDPCRPARARILLSTGKAKVYRRYPFTIILTEEIKEPITHGSQIKIDPGAKTSGLAIVQGNRVVWGAELTHRGFQIRDALTSRRQLRRARRNRKTRYRKPRFLNRTRSKGWLAPSLMSRVKNILTWVEKLTRVCPVTGISQELVRFDTQKLQNPEISGIEYQQGTLYGYELREYLLEKWNRKCAYCGATGTQLEIEHIKPKSKGGSDWPLATLRDRVSNLAIACHPCNQAKSNQDIELFLSNKPSVLKRVLSQARRPLADAASVNTTRWKLYHDLKSTGIPVEVGSGGLTKFNRCRQNLPKTHWLDAANVGKVETLIIEVTHPLLITAKGHGTRQLCRTNKYGFPVRHCSRTKIHKGFQTGDIVRAVVTKGKKIGTYVGRVATRKSGYFNISTKSGLVQGISHKYCQFIHRKDGYAYTN

SEQ ID NO: 2946 - protein, 423 aa, Moorena sp.
MRVFVLDKNRKPLDPCKPARARIMLGQGRAKVLKRYPFTIIMQDLEESECVTHNHQLKIDPGSKTTGLAIVQDNVVVWGSELTHRGFQIRESLTSRRQLRRSRRNRKTRYRSPRFLNRKRSEGWLAPSLMSRVHNILTWVKKLIRICPISGISQELVKFDTQKMQNPEVSGVEYQQGELYGYEVREYLLEKWNRKCAYCGKTDTKLEVEHIKPKSKGGSNRVSNLTIACRKCNEAKGNREIEQFLSRKPDLLNFVLSQAKKPLADAAALNSTRWRLFHELQSTGLSVETGSGGLTKYNRCRQNLPKTHWLDAVNVGQVDNLHVESYQPLLISAKGHGTRQMCRTDKFGFPTRYVPRFKFVKGFQTGDIVKAIVTKGNKIGTYTGRIATRTTGSFNITTKKGLVQGISHKYCSIVHRKDGYYYS

SEQ ID NO: 2947 - protein, 464 aa, unidentified
MQRRVFVLSKNRKPLMPCSPARARQLLKERKASVYRQEPFTIILQKRTDGDLQKVQLKFDPGSKITGMALVVFFQKGTIVTWAAELEHRGEKIVDLLSKRHAIRRSRRNRKTRYRPPRFCNRTRKKGAPSLKSKVDNIFHWTKKLLVYTPIDNLCVETNRFDTQKLQNPEISGVMYQQGTLFGYEIREYLLYKWNHQCAYCDAKNLALEIDHIHPRSKGGSNRVSNLTISCRKCNENKGNGDIHNFLSKDNKRLQKIVSYSKKTLRDAASINTTRYVIGNQLKKLGIDVEFASGGKTKANRRHNGFSKQHWIDAACAGESGENVTISEDLIPLGIQSQGRGSRQMCRVDQFGFPRTTAKSQKRVKDFQTGDIVKAVVTKGEKKGVYIGRVAVRSNGYFNIKTNNSTVQGISYRYCHLIQQVDGYFYFQKGDARLKKASCSCFAHSRPSGDSSPTYRSRGILATN

SEQ ID NO: 2948 - protein, 414 aa, Methanosarcina sp.
MPCKPSKARKLLQAGKAKVVRNTPFTIKLLFGSSGYTQPVTAGMDTGSKVVGCAAIANGTVLYQSEIYLRENVSKKMEQRKMYRRTRRGRKTRYRPARFDNRGNSTKGGRLAPSIKSKLEAHFREKMFVESLLPVTEWKVELASFDIHKITNPEVSGIGYQEGDLKGFYNVKAYVLDRDGYTCQHCRGKSKDSRLHCHHIVFRSQKGTDAPENLITLCETCHKALHNGEFKLSGNKSKTKHATEIGILKSQIRKSGWSFAETFGYETKYRREQVLKLIKTHYFDAVAICCRDDQNVEVEDSVLLKRNVSKGDYQQRTGKRSEKKIPTGKLFGLRKFDLVKTSKGIGFVKGKRSSGFFAISDLFGNKISDSVNVKKKCRRLSARSTTLVQMVQMTHSSPTCHFRQAGTVEEGVSC

SEQ ID NO: 2949 - protein, 470 aa, unidentified
MSVFVVGLNGCRLMPTSEREARLLLKHGKASVYRKVPFTIKLNYKTGSTTQPGYLGIDTGSQHIGVSVVREDGTVLHKEEIGLRDSMSKRKLMESRSSLRRGRRHRKTRYRHPKWRLKAKRVYYETPDRKGRHWKKQKITFASKRPQGWLPPSLQSKTDHHIQWIKKLQDLLPDGYRLSIELGRFDPARMKDTEIHGDLYQKGPQYDYENVRAYVLDRDRYTCQVCGKKGGKLHIHHILYRSHGATDNPQYMATICSDCHSTENHQPGGILYQWMQEQKKFTRGLRDATFMNILRKRLMKAFPKATFTYGNITKADREKLKIPKSHGNDATAIAIVKTGIMTVKDNEPVIYIQQVRRKKRSLHEETPRKGRKEPNRKASRYNKNTKAVTVTKRKNKKRISITGCLFDRVELNGKKGWISGFTDKSCYIKDENDQYIRISPKYKQVSLSKLKILHHCGNWVIGARRSLGKG

SEQ ID NO: 2950 - protein, 408 aa, unidentified
MVYVQDIDGKPMMPTTRHGKVRQLLKDKKAVVINTCPFTIKLMYKTSDYKQEIVLGVDAGTKHVGLSATTKSKELYSSEVILRSDIVDLLSTRRELRRTRRNRLRYRKPRFDNRIKSKRTGWVAPSVRHRIDAHIRVIDNVCSILPISRIIVEVAQFDTQKIKNPNISGNEYQEGNQLGFWNVREYVLTRDGHKCQHCKGKSKDPILNVHHIESRKTGGDSPSNLITLCETCHKEYHKGKIDLRVKRGKSLCDAAVMGIMKWKLYEELRSRYDNVSMTFGYITKYNRIKYGIEKSHISDAFVISKNFNALMLEYHYKVRLIRRHNRQIHKQKVLKGGVKKPNQSSFEVFGFRLFDRVMFEGNCYFIFGRRKSGSFNIRDIDGGNQRDITYKKLKLLRCKRFMIQKETN

SEQ ID NO: 2951 - protein, 420 aa, unidentified
MQYVYVLNKHGEPLMPCSPGKARLLLKRQKACVVKRTPFTIKLLHESAGYKQPITLGVDAGSKHVGLSASTEKRELYSEEFTPRNDVVELLSTRRQNRCSRRNRKTRYRTPRFNNRVHSKHKGWLAPSVEVKIQEHITVIKRICRILPITLVRVETAEFDTQRLKAMLAGKPLPVGTDYQLGEMYDEYNVRQYVLKRDNYTCQYCGAHTTAKKAVKLHVHHLESRKVGGNAPSNLITLCVTCHNNLHKGKITLDGKKRGKTLRDAAFMGIMRNTLLTRLRNELNIPVQNTYGYITKLLREQNDIKKSHVNDARCISKHPLAEPCSVCYRTKAIRHHNRQIHKAKILKGGIRKANQAPYIVKGFRLWDKVLYDGQECFISGHRSSGYFALRKLDGTAITNSISFKKLWLLEPATNYLIERM

SEQ ID NO: 2952 - protein, 431 aa, unidentified
MPDKVYVISRLGHPLMPCSPAKARHLLDDGKAKVVKRTPFTIKLLYGSTEYTQPVILGVDAGSKTIGLSASTTKEELFAAEVMPRNDVVENLSTRREFRRARRNRTTRYRKPRFNNRVHSKNNGWLAPSVEVKIQEHITSIKRVCAILPISKIVVETAEFDLQLLKAVQDGKPVPEGEDYQKGEMYGSYDVRQYVLWRDNYTCTCCGVKGTDKKPVKLHVHHFESRKHGGNAPDNYGTLCEDCHKKLHLGIITDISLKTRKRPSTRGAAFMGIMRKTLMQRLITGLSIPVAETKGYITKAAREEILKLPKTHTNDALAIAQGRHGFGIREQAYVKPTNRIYTVRPVRHHNRQLHKATMLKGGIRKLNQASKYIFGFRLYDKVLYQGGECFVWGRRRSGSFLLRTIDGTKVKDGVGYRNLTLLERSTNYLIA

SEQ ID NO: 2953 - protein, 568 aa, Streptomyces sp.
MPSAKLSTTDEGPEVIHSRPDGRSVLLSREMHSCLTSPSHHHEEVPLMTTFSSREKTHRAVLPQRRALESAGADTPGSRDETACGLPATMSGTASEHGRGETLPEGTPPAGRHPNPASAGKGEAREGHPSVFVLDKHHQPLMPCTPARARKLLKQGRAVVHRHTPFVIRLKERTISSSEVTGVELGIDPGSRFTGIALFRTHGKPMETVRHGLFAIELAHRGGAISNRLTARATLRRARRQRNLRYRAPCSSNRARPEGWLAPSLRHRVDTTSAWVDRIARWAPVRTVHVEQVAFDTQAMSADRFASDAEYVHGTLQGMEVREYLLAKWNRTCTYCGATGVPLNIDHIHPRSRGGSDRISNLTLACIPCNEQKGNKPVEEFLKKKPALLSKVLQQAKAPLRDPAAVNATRCALIQTLKASHQDVRPSSGGRTKWNRERTATPKTHTLDALCVGALESVARHPGTVLVVTATGRGTYRRTTPDRYGFPRLNLPRAKQQFGFATGDLVRANVPTGKKQGRHTGRVAVRATGNFNIKTDHGLVQGIHHRHIRLLQRADGYGYTTRAEADHD

SEQ ID NO: 2954 - protein, 429 aa, Methanosarcina sp.
MLVFIINQTKKPLMPCKPSKARKLLQAGKAKVVRNTPFTIKLLFGSSGYTQPVIAGMDTGSKVVGCAAIANGKVLYQSEIYLRENVLKKMEQRKMYRRTRRGRKTRYRPARFDNRGNSTKGGRLAPSIRSKLEAHFREKRFVESLLPVTGWKVELASFDIHKITNPEVSGVGYQEGNLKGFYNVKAYVLDRDGYTCQHCMGKSKDFRLHCHHIVFRSQKGTDTPENLITLCETCHKALHNGEFQLSGNKSKTKHATEIGILKSQIRKSGWNFAETLGYETKYRREQVLKLLKTHYFDAVAICCRDDQKVEVEDSVFLKRNVPAGDYQQRRGKRSEKKMPTGKLFGLRKFDQVKTEKGIGFIRGKRSSGYFSISDIFGNKISDSVNVKKKCRRLSARSTTLVQMVQMTHSSPTCHFRQAGNVEEGGLLLR

SEQ ID NO: 2955 - protein, 428 aa, unidentified
LKVFVLNMRGQPLMPCSPAKARHLLKAGKAVVKRRTPFTIQLRIATGETKQNVTLGVDAGAKHVGLSATTEKEEVFASEVELRQDITELLSARRAFRRARRHRKTRYRAPRFSNRVHSKHTGWLAPSVENRIQAHMSRIDAVCGLLPVTKFVIETASFDIQKIKNPDIEGTDYQQGDQLGFWNVREYVLFRDGHVCQHCRGRSKDKILNVHHIESRQTGGDAPNNLITLCETCHKAYHAGKIKLKVKRGQSFKAETFMGIMRWTLLDRVRKAHPDLPVENTYGYLTKNTRITLGLRKTDCIDAYCIAGNLNARRRGVFLYQRQVRKHNRQIHRCTVLSKTLKDGTKVGYRKLNQTPYLVKNFRLFDKVRCLGQTGFIFGRRSSGSFDVRRLDRVKLSSNISYKKLTLLEKRRTFLTELRKEDGASSPV

SEQ ID NO: 2956 - protein, 462 aa, Streptomyces sp.
VFVLDRKGRPLMPCHPARARELLRKGRAVVARHTPFAIRIKDRLLEDSEVGGVAVRIDPGSKATGIALTDDITRMPDSSGEVMVLRRGLYAMELVHRGAAIRKGMERRAGYRRRRRVANTRYRAPRFDNRRSTEGWLPPSLQHRVDTTWSQVQRLSQLAPLTEVHVERVAFDTHAMAAGRELKGVEYQQGTLAGYELRHYLLEKWGRSCAYCGQSDVPLQVEHVQPRARGGSDRVSNLTLSCAPCNQAKASRPIEDFLKDRPEVVAKLKREVKLPLRDAAAMNATRDRLSERLRALGHPVSCWSGGRTKYNRDLFRLAKSHTFDALAVGEVGSRCRVVRYASSTLIAVATGRGDYARTRTDKHGFPRLALPRTKTHFGFRTGDLVRAVVPVGKKAGTYTGRVAVRSSGRFNIRTSHGIVQGIGHQHVSLLQRADGYSYAVRAEEQNTQAPVASAGGQVGDVR

SEQ ID NO: 2957 - protein, 427 aa, Methanosarcina sp.
MFVFVLSKDGNPLMPTKPAKARILLKTGKAKVVRTTPFTIKLLFESSGYTQPVTAGIDTGSKAVGCAAIASGKVLYQSEISLRENVSKKMQQRQMYRRSRRSRKTRYRPARFDNRGNSKKEGRLAPSIRSKLEAHFREKRFVESLLPVTGWKVELASFDIHKITNPEVSGIGYQEGNLKGFYNVKAYVLDRDGYTCQHCRGKSKDSRLHCHHIVFRSNQGTDAPENLITLCETCHKALHKGEFELSERRSNTKHATEVGIVKSLIKKSGWSFEEVFGYETKFWREQVLGLEKTHYFDAVAICCGDKQTVEPDDTVYFKKHVPAGDYQQTKGKRSEKNIPTGKLFGLRKFDLVKTEKGIGIVWGKRSSGYFSISDIFGNKISDSVNVKKKCRRLSARSTTLVQTIQLTHSSPTCHFRQAGTVEEGVSC

SEQ ID NO: 2958 - protein, 487 aa, Erysipelotrichaceae sp.
VDHPAIAGEPETDNLFAPKSVRTWAYARRKEVSVVRDVFVIACDGTRLMPTSRYRARKMLNAGKAVIHKHQPFTIRLNHASEKNTQPIELCMDTGSEHIGVSVKSEKHEYVHAQYDNLPDEKERYASQKIYRRTRRNRLRYRKARFDNRRKPEGWTAPSIRNKKENHVRLTAMYAEVCPITSVVLEVGQFDPAALQAMEETGEVLQGTDYQRGKRYDLANLREAVFTRDRYTCQVCGKSVKDGVILHAHHIIYRSDGGTDRLNNLLTVCDRCHTPKNHKPGGKLYGLKPVTGTFKDATFMNIVRWHIVDEIKALYPDIEVRHTYGSYTKASRRELGQLAKTHANDAYAMGEFHPKHRHREEHWKKKRRNNRCLAKFYDAKYIDVRNGSKKSGQQLSCNRTKRNIPRNNPQNERVFRGQAVSKGRISIRRKRYDLQPGDIAIWNRKPYSVAGIQNRGAYVKLSNKKVISIKNVHTKYHCHGWRFISDL

SEQ ID NO: 2959 - protein, 420 aa, unidentified
MQNYVFIIDVNKQPLNPIRPKRARTLLMRGKAAVIRMYPFTLILKTVVENPVLRPVELKIDPGSKVTGLALVQDGEVVWGANLEHRGAEIKSDLESRSAVRKSRRNRKTRYRKARFLNRKRTQMWLPPSLMHRVLTIETWVKRLCRYVPVTGIVMELVRFDTQALQNPEITGQEYQQGKLFGYEVKEYLLAKWGRNCVYCGKQDVPLQVEHIHPKSNGGSDRISNLTITCVRCNQKKGSKSIEDFLKKKPDLLRQIKVVRLAPLKDAAAVNSTRWKLYQSLKKISGLNIATSTGGRTKYNRIKNGFDKDHWIDACCVGESGLGVILKTKQAMMIKSTGVGSGRQMTRTNKFGFPCAKPKQRYQHGWKTGDIARFIDGTTTGRIVVQSASRLEIRINKQRIGGQLNKFSKLHSMDGYNYAF

SEQ ID NO: 2960 - protein, 448 aa, unidentified
MSTDLRAEQAEPAGIRKGDTLKVFVLNMRGKPLMPCSPAKARHMLKAGKAFVVRRTPFTIKLTIATGETKQDVTLGVDAGARHVGISATTEKEEVFASEVALRQDITGLLADRLAFRRARRNRKTRYRAPRFNNRVRSKHKGWLAPSVENRIQAHMSRIDAVCRLLPVTKIVIETASFDIQKIKDPSVEGTDYQQGDQLGFWNVREYVLFRDGHVCQHCHGRSKDKILNVHHLESRQTGGDAPNNLITLCETCHKAYHAGKIKLKVKRGQSFRAEAFMGIMRWTLLDRVRKAHPGLPVENTYGYLTKHTRITHGLPKTHCVDAYCIAGNLKAVRRGVYLHQRQMRKHNRQIHKFTVLSKRLEDGTKIGYRKLNQSPYLVHGFRLFDKVRCLGQIGFIFGRRSSGYFDVRRLDGVKLSPSISWRKLTLLEKRSTYLTELRKQDGASSPV

SEQ ID NO: 2961 - protein, 531 aa, unidentified
MDAPADFSSLRHCIADAKPGETFTPPETAGVLQKEVRTMAVVYVISASGKPLMPTTRCGHVRGLLNEGKARVVEREPFTIQLKYETPDVTQPLYLGIDPGRTNVGAAVVCEDGECVFTAQLTTRNKDVPKLMKARKQFRMAHRRLKRRCKRQRRAKAAETLSQKGEFQRLLPGYEEPILCKGIRNKEARFNNRQRPAGWLTPTANHLLLTHLNMVKKLQKLLPITDVVLEVNRFAFMAMENPSIRRWQYQQGPLYGKGSVEDAVYAQQDGHCLFCGKPIAHYHHVVPQHKNGSETLENRVGLCNEHHDLVHKDRAWDAKMKETKAGLNKKYHALSVLNQIIPALTEQLTAMFPQHAFVTTGKDTADFREDYGIAKEHHLDAYCIACSVLAEPTKVAAPTGKPHRLMQFRRHDRQVCHKENIKRVYLSEGKAVATNRHKAIEQKDDSLEEFRKTHTQQEVSALTVKDHQPVYKDMRRFMPGGVFLFNGKVHTLQRSHGRYKGMPFYYIDTDGSKNHAKGCIFLQQNCGLRWV

SEQ ID NO: 2962 - protein, 255 aa, Methanosarcina sp.
MLVFVINQNKKPLMPCKPSKARKLLQAGKAKVVRNTPFTIKLLFGSSGYTQPVIAGMDTGSKVVGCAAIANGKVLYQSEIYLRENVSKKMEQRKMYRRTRRGRNTRYRPARFDNRGNSRREGRLAPSIRSKLEAHFREKMFVESLLPVTGWKVELASFDIHKITNSEVSGVGYQEGDLKGFYNVKAYVLDRDGYTCQHCRGKSKDSRLHCHHIVFRSNHGSDAPENLITLCETCHKALHNGEFKLSGSKSKQTCN

SEQ ID NO: 2963 - protein, 513 aa, unidentified
LKKEAAGHQQGKDCRPVRYGPPYRAGMPDGRRKPERKHMVAVVTSTGKPLMPTSAYRARKLLKKGRAVIFKYRPYFTIQLVDRADGEVQEVEYKSDTGSVHVGISVCTEKKELLSEQRDLLENEPEHHNDRKKNRRTRRNRKRYRKPRFDNRKKKPQVGHEKWLPPTLLHKMEVQVRLYREFCRVVPVTSACFEMGKFDTQALKAVLKGDPVPEGEGYQKGERYGTDTLRAAVFLRDGHTCRFCGRSVKDGAVLHVHHVGYWKGDRTNRPANLASACEQCHTPANHGKNGLLYGKEPEFKTLKDASYMTSVRWIMLDEIKKAAPGVRVSVTYGVTTKKKRQELRLPKSHVNDAFSMASFHPKKRADTEYWKKIPRHDRVLQKFYDAVYLDTRDGSKKKGSEMSNGRISRNHKKDNENLHQYRGHKVLKGHDSIRRGASSLKPGSIVMYKGEKMTVHGTHTRYVTDKEGKTVKKVNVQFTCPASDGRKSASMNKCTPVSRVYNTGWKRYWPDKK

SEQ ID NO: 2964 - protein, 457 aa, unidentified
MVITLDKHKKPLGFTTEKRARKLMEAKRAVIYRYFPTVIILMDTDVRNIINLPTYRIKIDPGSVYTGIAIICNETNKVMFSIQIEHRAKAITELLQTRKASRRNRRNRETHYRHSKWGNGNGNDRPSKEGNLPPSIKSIRDNIINTVKKLRRFINITECSFEAVRFDSQLMDDPDISGREYQQGKGTLFGYELREYLLEHFRHTCQYCGGASGDSVLEWEHKIPKSRGGTDSIKNATLSCFTCNRDKGSMTPGEWLEYLKSEESGRLAEIRIRHLENMDTVYGSNRYSAWTNTLRKKTEKELFDIFGEVECSSGGKTKYNREKILKLPKDHHIDALAVGSVPPDGYIDCTNGYILHIKAMGRGTRLRGLINECGIINVKWTDRRKRFNGLQTGDIVRVYIPNGKYSGTYTGRVMIRKSGSHDIRTLDGKLVTGTKLSVYRVLQHADGYSYKQERIIV

SEQ ID NO: 2965 - protein, 472 aa, unidentified
MNTCVCVLSNNGERLMPTFRLGKVRRLLKDGKAKIVKHHPFTIQLLYDSKTNKQPIEICEDVGYNYIGISVKSESHEYVSAQYDTLQDEKEHHDDCRKMRRARRNRLRYRKPRFDNRKRSEGWLAPSLKHKKELNVNVVKMYCAVMPITHATVEVGSFDTMLVKAIQEGKAIPEGADYQKGPRYNLATLREAVFYRDNYVCKVCGRKATEGAILHMHHMFYWKGRHGNSLNELLTVCEKCHTPANHQKSGKLYGFGEDVKFADLSGAAFMNTVRWQIVNELYAAFGKPFVTITYGAMTKEKRIALQLEKSHNNDAYAMGEFHPNHRCAFEHYEKVRRNNRILEKFYDSQYIDIRTGEIATGKELFNGRINRNHKKDSENLHKYRGKRTYAGHRALLRKKVNLNPGDLVSLNGEPLVVLGTHTRKNGAVNVEFETPSKSGRKSASLKKLKIVKAADSIHPAWEKVSQIIQRKE

SEQ ID NO: 2966 - protein, 462 aa, unidentified
MSVLVIGRNGRALMPTNPRKARLLLKKKTASVVCRHPFTIQLLYKTGCATQEGSIGIDTGSQHIGVGITCGDKVILKDEHALRSSMEKRSLLATRAVMRRGRRYRKVRYRKPKWRHHTKRMYFEKANRRGQHWRKVKTTTQSPRPKGWLPPSLQSKCDHHFRIIDRYLKYLPDPITRNLVIETGRFDMARMNDPTIHGEMYQRGPMYDAENLRAYIFARDNYQCACCKAKAGTTRKADGTTVKLVAHHILFRSRGATDNPKYIISVCDHCHTTKAHQPGGILYSWMENNKKVARGLRDATFMNILRKRLFARYPQAAFTYGNITAADRKQLRLPKSHANDAVAISLFGKEASTVKNICQTMHYKQIRKSKRSLHEAIPRKGRKNPNTKAVRNKKNTTQVNGFKLWDSVLANGKKLFICSFTGTSAYLIDKNGCYISQPGKTYKQWPLSKLKRLHPNGNWLMA

SEQ ID NO: 2967 - protein, 406 aa, unidentified
MVYVQDIDGSPLMPTTRHGKVRRLLKSKKATVVNLCPFTIRLLYDTTGYKQEITLGVDAGTKHVGLSATTKSKELYASEIILRSDIVELLSSRRESRRRRRNRLRYRKPRFMNRIKTKKEEWVAPSVRQKIDSHLKIIGFVYSILPISKLIIEVAQFDIQKIKNPEISGKEYQEGDQLGFWNVREYVLARDGHKCQHCRGKSKDSILNIHHIESRKTGGNSPSNLITLCETCHKEFHKGKIKLKVKRSASLRDAAVMGIMKWILYDKLKSLYPNVKMTFGYITKHDRINHGIEKSHVSDAFVILRNFNSCRLGYYYKRKLVRRHNRKIHKMKILKGGIRKRNQAPFKVFEFRLFDKVMFQGEEYFIYARRLSGQFNIRDINGENKKDVSCKKLRYIIHGLISIETG

SEQ ID NO: 2968 - protein, 466 aa, Tolypothrix sp.
VSKVFVIDSEKRPLNPIHPAQARQLLRNGKAGVFKHFPFTIILKEAKPNQQIQVLRLKIDPGASVTGIALVNDSTGEVVFAAEIKHRGFAIRESLTSRRQLRRSRRNRKTRYRQPRFNNRAKTKGWLPPSLQSRIANIKTWVERWRKVSPIEAISQELVRFDMQLIRNPDIQGKEYQQGTLQGYETRQYLLEKWGRSCAYCGIKDVPLQIEHILCRAKGGSNSITNLALSCEKCNLKKGTKDIREFLKKDPARLEKILKQSKQPLRVRPSGSPVAYGGKPACSAGLTSSQGAGNPPSGLDSPLADAAAVNSTRFALLSVLKETGLPVETGSGGLTKFNRTQRELPKTHYFDAACVGKSTPEKLIVKGVKPLLITANGHGTRQMCGTNKHGFPIRHRTRKQIHFGFQTGDIVKAVVTSGKKVGHYVGRVLCRASGSFDIATKTGRVAGISYKYCKSIHKKDGYNYAF

SEQ ID NO: 2969 - protein, 424 aa, Moorena sp.
ITRVFVLNKNRQPLDPCKPARARILLSVGKAKVYRRYPFTIILTEEVKQPITHDQQLKIDPGAKISGLAIVQGKRVIWGSELTHRGFQIQEALTSRRQLRRSRRNRKTRYRKPRFLNRTRPKGWLAPSLTSRVQNILTWVKKLIRFCPITGISQELVRFDTQKLQNPEISGIEYQQGTLYGYELREYLLEKWNRKCAYCGATGTQLEIEHIKPKSKGGSNRVSNLTIACHPCNQAKSNQDIELFLSKKPSILKRILSQSLRPLADAASVNSTRWKLYYELKSIGLPVEVGSGGLTKFNRCRQNLPKTHWLDAANVGKVETLIIEVTLPLAITAKGHGTRQLCRTNKYGFPIRHCSRIKFHKGFQTGDIVRAVVTKGKNIGTYVGRVATRKSGSFNISTKSGLVQGISHKYCRFIHRKDGYAYTN

SEQ ID NO: 2970 - protein, 432 aa, unidentified
MQPAKQQNWVFQINGDKQPLDMINPGRCRELQNRGKLASFRRFPYVVIQQQTIENPQTKEYILKIDPGSQWTGFAIQCGNDILFRAELNHRGEAIKFDLVKRAWFRRGRRSRNLRYRKKRLNRAKPEGWLAPSIRHRVLTVETWIKRFMRYCPIAWIEIEQVRFDTQKLANPEIDGVEYQQGELQGYEVREYLLQKWGRKCDYCGTENVPLEVEHIQSKSKGGSSRIGNLTLACHVCNVKKGNLDVRDFLAKSPDILNQVLENSTKPLKDAAAVNSTRYAIVKMAKSICENVKCSSGARTKMNRVRQGLEKTHSLDAACVGESGASIRVLTDRPLLITCKGHGSRQSIRVNASGFPAVKNAKTVFTHIAAGDVVRFTIGKDRKKAQAGTYTARVKTPTPKGFEVLIDGARISLSTMSNVVFVHRSDGYGYEL

SEQ ID NO: 2971 - protein, 317 aa, unidentified
MSTTVFVLDKKHRPLMPCRPARARRLLRAGRARVVKRFPFVIRLVDRTVEQSEVQPVLIKLDPGSRETGAAVVRDDGKKRHHALAFFVIEHRGGAIRDALKARSAFRRRRRSQNLRCRSPRFLNRVKPKGWLPPSLRHRVETTLSFVRRMCRYLPVSGIATELVKFDSQKLQNPEVSGVEYQQGTLFEYEVREYLLEKFGRKCVYCGAEGVPLNIDHMVPRAKGGSNRVSNLVLACMSCNQKKGARSLEDFLKGKPKVLARVRRELKTPLRDAAAVNATRWVLFNELKATGLPVETGSGALTKLNRHAFGVEKEHWL

SEQ ID NO: 2972 - protein, 379 aa, Arthrospira sp.
MPNYQNYVFVVDTLGQPLSPTHPARARKPLKQGLAAVFRTYPFTIILKKTVENPGNEPLRVKLDPGASVTGIALVSQKTGAVIWGAELAHRGDRIRAKLAARRLVRRHRRCRKTRYRQARFNNRKRPDGWLAPSLKHRVETTLTWVNRLISSCPITDISMELVRFDTQKLLNPEISGVEYQQGVLFGYELREYLLTKWQHQCAYCGAKNIPLEIEHIQPKSKGGSDRVSNLAIACHKCHQKKGSQSAREFLDTKPEILKLLLVQAKAPLKNAAAVNSTRWALFNGLKLTGLPIEIGTGGLTKYNRTVQGLPKTHWLDAACVGKSTPTRLKIKTHQPLLITCFGRGGRQKAAPNKRLPIRHNPLKPIKGWLTGDIAKHKT

SEQ ID NO: 2973 - protein, 406 aa, unidentified
MVYVQDIDGRPLMPTTRHGKVRRLLKSKKATVVNLCPFTIRLLYDTTGYKQEITLGVDTGTKHVGLSATTKSKELYASEVILRSDVVDLLSTRRELRKIRRYRLRYRKPRFMNRIKSKKRGWIAPSIRQKIDSHIRIIGFVYSILPVSKLIIEVAQFDTQKIKNPEISGKEYQEGEQLGFWNVREYVLARDEHKCQHCEGKSKDPVLNVHHIESRKTGGDSPSNLITLCKTCHKEFHKGNIKLKVNRGESLRDAAVMGIMKWELYDELKSLYPNVKMTFGYITKYNRINHGIEKSHVSDAFVISRNFNSCRLGYYYKRKLVRRHNRQIHKMKISKGGIRKMNQAPFKVFGFRLFDKVMFQGKERFIYARRLRGIFNIRDINGENKKDISYKKLEYVSHGLISIVAG

SEQ ID NO: 2974 - protein, 311 aa, unidentified
MPKVYVLNRHGRPLMPCTPAKARHLLDAGKAKVRHRTPFTIQLLYGSTGYTQEVILGVDAGSKTIGLSAATETEELFSAEVKPRNDVVELMSARRQFRRARRNRTTRYRKPRFDNRVRSKHKGWLAPSVEVKIQEHMTAIRRACAILPVSKVVVETAEFDLQLLKAVAEGKPVPQGEDYQKGEMYGHYNVRQYVLWRDSYTCRICGMHGSVRKGVPLHVHHLESRRVGGDAPDNLVTLCTACHDKLHKGIIMAADIKKRKRRSTRDATFMGIMRMTLLRRLREQLPVPVVETRGYITKATRENLLVLPKSH

SEQ ID NO: 2975 - protein, 474 aa, Thermincola sp.
MVFVLDKHKKPLMLCTEKRARLLLKRGRAVVHRMAPFTIRLKDRVVEESELQPLRLKLKPGAKASGIAVLREVDSRKSEAVFLCEIHHKPGIKQSLDNRRNLRRSRRNRRTRYRKPRFDNRRRPEGWLPPSLQARVELTANAVNKLLKLAPITAISVALFKFDTQKLQDPEISGVEYQQGELFGYEVKEYLLEKWGRRCAYCGKEGVPLEVDHVVPRNPKYGPKGTDRVSNLTLACEACNKAKGNLQPGDWLEELKQSKRQIDAVRAANLEKVLTQLKEPLRDAALMNATRWALYDRLKGTGLPVECGTGARTKYNRLRTGLPRTHCFDACCVGGSTPDEIIIGQEYAQVWSAKGRGTRKMCNTDRYGFPVGHRSRGKFHFGFQTGDLVVAEIPKGKYTGRWTGRVAVRSSGYFDIKDGSGRRICQGVSWKYMRIVQRNDGWQYEKQKIAQRGGKQKGRIPPTAEARGLPAAFL

SEQ ID NO: 2976 - protein, 412 aa, Methanosarcina sp.
MLVFIINQNKKPLMPCKPSKARKLLQAGKAKVVRNTPFTIKLLFGSSGYTQPVIAGMDTGSKVVGCAAIANGKVLYQSEIYLRENVSKKMQQRKMYRRTRRGRKTRYRPARFDNRGNSTKGGRLAPSIRSKLEAHFREKRFVESLLPVTGWKVELASFDIHKITNPEVYGVGYQEGDLKGFYNVKAYVLDRDGYTCQHCMGKSKDFRLHCHHIVFRSQKGTDTPENLITLCETCHKALHKGEFKLSGSRSKTKHATEIGILKSQIRKSGWSFAETFGYETKYRREQVLKLLKTHYFDAVAICCRDDQKVEVEDSVFLKRNVPAGDYQQRRGKRSEKKIPTGKLFGLRKFDLVKTENGIGFIRGKRSSGFFTLCDVFGNMITTSVNIKRNCRRLRAASTTLVQMVQMTHSSPH

SEQ ID NO: 2977 - protein, 431 aa, unidentified
MVYVLDINGQPLMPTTRHGKVRRLLNSHLAKVVKRCSFTIQLLYQSTKETQPVSLGVDAGSKHIGLAATTDKKVVYQEELVSHNDVVKLISARRILRRSRRNRKTRYRKARFNNRVHSKHKGWLAPSVEVKIQEHITTIKRICQILPISEIQVETAEFDLQRLKAMKEGKPLPVGTDYQLGEQYDFYNTRQYVLHRDGYTCQCCGTHDNNIKLHVHHIESRQTGGDAPNNLIILCEHCHKALHEGKLELPKGKKRGKSYRDATFMGVMRKTLLERLKKEIDVPVEGTYGYITKCWREKTGLEKSHINDAICISKHPYAKPLDTYYLTKAVRHHNRQIHKSNFSKGGIRKRNQAPYLVKGFRLFDKVLYQGKEYFIFGRRATGYFDIRTLDGTKVNKGSIKYKKLRIQDTAKAYLKEARAIPHVNKFTCVLA

SEQ ID NO: 2978 - protein, 427 aa, Methanosarcina sp.
MLVFVINQNKKPLMPCKPSKARKLLQAGKAKVVRNTPFTIKLLFGSSGYTQPVIAGMDTGSKVVGCAAIANGKVLYQSEIYLRENVSKKMEQRKMYRRTRRGRKTRYRPARFDNRGNSRREGRLAPSIRSKLEAHFREKMFVESLLPVTEWKVELASFDIHKITNPEVSGIGYQERDLKGFYNVKAYVLDRDGYTCQHCRGKSKDSRLHCHHIVFRSQKGTDAPENLITLCETCHKALHNGEFKLSGNKSKTKHATEIGILKSQIRKSGWSFAETFGYETKYRREQVLKLLKTHYFDAVAICCRDDQNVEVEDSVLLKRNVSKGDYQQRTGKRSEKKIPTGKLFGLRKFDLVKTSKGIGFVKGKRSSGFFAISDLFGNKISDSVNVKKKCRRLSARSTTLVQMVQMTHSSPTCHFRQAGTVEEGVSC

SEQ ID NO: 2979 - protein, 442 aa, unidentified; identical to SEQ ID NO: 2834

SEQ ID NO: 2980 - protein, 427 aa, unidentified
  source 1..427: note = Cyanobacteria bacterium UBA9226
MSKQPNYAFVLDTNRKPLTPCKPSIARKLINAGKAKVFRLYPFTIILNKEVVDTPEPLTLKIDPGSKITGLAILSGSSLLWVAELTHRGQTIKAALESRRSIRRNRRNRHTRYRQARFLNRTRSSSWLAPSLQHRVETILTWIKKLTRYAPINAVDQELVRFDLQQLENPEISGIEYQQDELAGYEVREYLLNKWERKCAYCGIENIPLQIEHIHPKAKGGTNRISNLCLACEPCNIKKGTKNIEEFLQKKPEILKKVLAQAKRPLKDTAAVNSTRWALFNRLKKTGLEVATGSGGLTKFNRTHLQLPKTHFFDAACVGDTPELLVLANQPLLIKATGHGSRQMCRTDKFGFPSRYVPQFKFVKGFQTGDIVKAIVTSGKKIGAYTGRIALRSTGSFNISTTSGLIQGISYKYCQQIHQKDGYGYGF

SEQ ID NO: 2981 - protein, 226 aa, Methanosarcina sp.
MLVFVINQNKKPLMPCKPSKARKLLQAGKAKVVRNTPFTIKLLFGSSGYTQPVIAGMDTGSKVVGCAAIANGKVLYQSEIYLRENVSKKMEQRKMYRRTRRGRKTRYRPSRFANRGNSRREGRLAPSIKSKLEAHFREKMFVESLLPVTEWKVELASFDIHKITNPGGFRDRISGRDLKGFYNVKAYVLARDGYTCQHCRGKSKDFRLHCHHIVFRSQKGTDAPEN

SEQ ID NO: 2982 - protein, 295 aa, Methanosarcina sp.
MYRRTRRGRKTRYRPARFDNRGNSRREGRLAPSIKSKLESHFREKRFVESLLPVTEWKVELASFDIHKITNPEVSGIGYQEGDLKGFYNIKAYVLDRDRYTCQHCRGKSKDSRLHCHHIVFRSNQGSDAPKNLITLCETCHKALHKGEFKLSGKKSKTKHATEIGILKSQIRKSGWSFAETFGYETKYRREQVLKLLKTHYFDAVAICCRDDQNVEVEDSVFLKRNVPAGDYQQRRGKRSEKKIPTGKLFGLRKFDLVKTENGIGFIRGKRSSGYFSISDIFGNKISDSVNVKKK

SEQ ID NO: 2983 - protein, 437 aa, unidentified
MPCSEKRARLLLARGRACVHRLVPFVIRLTDRQLDTCTLQPLRIKLDPGSKTTGLALVRDTEHLNTDTGEIQRGVAVLSLIELVHRGRQISEALTARRQMRRRRRGCLRYRAPRFLNRGNKARGWLAPSLQHRINTTMAWVARIRRWSPVTALSAELVRFDMQRLQNPEISGVEYQQGTLAGYEVREYLLAKWSRKCAYCGVENVPLQIDHVHPKAKGGTNRVSNLTLACGPCNARKSAQSVDAFLAKDPKRLTALLAQAKRPLKDAAAVNATRWALVGALKATGLPVETASGGCTKFNRSRLAIPKTHALDAVCVGAVSVVTNWQKPSLTIKCTGRGSYQRTRLDKYGFPRGYLMREKSVKGFKTGDLVRAIVPTGKKAGRHTGRVAIRKSGSFNIQTLAGVVQGIGYRHCRLLQRADGYGYFFNKAACDTAQKRE

SEQ ID NO: 2984 - protein, 427 aa, Methanosarcina sp.
MLVFVINQNKKPLMPCKPSKARKLLQAGKAKVVRNTPFTIKLLFGSSGYTQPVIAGMDTGSKVVGCAAIANGKVLYQSEIYLRENVSKKMEQRKMYRRTRRGRKTRYRPSRFANRGNSRREGRLAPSIRSKLEAHFREKRFVESLLPVTEWKVELASFDIHKITNPEVSGIGYQEGDLKGFYNVKAYVLDRDGYTCQHCRGKSKDSRLHCHHIVFRSQKGTDAPENLITLCETCHKALHNGEFKLSGNKSKTKHATEIGILKSQIRKSGWSFAETFGYETKYRREQVLKLLKTHYFDAVAICCRDDQNVEVEDSVLLKRNVSRGDYQQRTGKRSEKKIPTGKLFGLRKFDLVKTSKGIGFVKGKRSSGFFAISDLFGNKISDSVNVKKKCRRLSARSTTLVQMVQMTHSSPTCHFRQAGTVEEGVSC

SEQ ID NO: 2985 - protein, 448 aa, Methanosarcina sp.
MLVFVINQNKKPLMPCKPSKARKLLQAGKAKVVRNTPFTIKLLFGSSGYTQPVIAGMDTGSKVMGCAAIANGKVLYQSEIYLRENVSKKMEQRKMYRRTRRGRKTRYRPARFDNRGNSRREGRLAPSYRPARFDNRGNSRREGRLAPSIKSKLEAHFREKMFVESLLPVTGWKVELASFDIHKITNPEVSGVGYQEGDLKGFYNVKAYVLDRDGYTCQHCRGKSKDFRLHCHHIVFRSQKGTDTPENLITLCETCHKALHNGEFKLSGKKSKTKHATEIGIIKSQIRKSGWNFAETFGYETKYRREQVLKLLKTHYFDAVAICCRDDQKVKVEDSVFLKRNVPAGDYQQRRGKRSEMKIPTGKLFGLRKFDLVKTSKGIGFVKGKRSSGFFAISDLFGNKISDSVNVKKKCRRLSARSTTLVQMVQMTHSSPTCHFRQAGNVEGEVSC

SEQ ID NO: 2986 - protein, 316 aa, Methanosarcina sp.
MLVFVINQNKKPLMPCKPSKARKLLQAGKAKVVRNTPFTIKLLFGSSGYTQPVIAGMDTGSKVMGCAAIANGKVLYQSEIYLRENVSKKMEQRKMYRRTRRGRKTRYRPARFDNRGNSRREGRLAPSIKSKLEAHFRENMFVESLLPVTGWKVELASFDIHKITNPEVSGVGYQEGDLKGFYNVKAYVLDRDGYTCQHCRGKSKDSRLHCHHIVFRSNHGSDAPENLITLCETCHKALHNGEFKLSGSKSKTKHATEIGIIKSQIQKSGWNFAETFGYETKYRREQVLKLIKTHYFDAVAICCRDDQNVEVEDRFF

SEQ ID NO: 2987 - protein, 343 aa, unidentified
DITDLLSARRALRQSRRNRKTRYRAPRFDNRIRTKRKGWLAPSVENRINAHLSRIEAVLRLLPITKITVETASFDMQRLKNPDISGKEYQEGEQLGFWNVREYVLFRDGHVCRHCHGRSKDPVLNVHHLESRRTGSDSPDNLITLCETCHKALHRGEITLKAKRGQSFRAQAFMGIMRREVLNRLKASYPELKVHETYGYLTKHARIANGIVKSHGADAFCIAGNLGAERLGEFFFQKQTRRNNRQIHKLSILKGGIRKRNQAPFEAKGFRLFDKVACQGEEGFIFGRRSSGSFDVRKLDGTRISAGISCKKLRLLEKRRTYLTEIRKEEALPPLPEGRGLRA

SEQ ID NO: 2988 - protein, 466 aa, unidentified
MQRRVFVLSKNRKPLMPCSAARARQLLKERKASVYRQEPFTIILQKRTEGDLQKVQLKFDPGSKITGMALVVFFQKGTVVTWAAELEHRGEKIVDLLSKRRAIRRSRRNRKTRYRPPRFCNRTRKKGWIAPSLKSKVDNIFNWTKKLLTYAPIDNLCVETNRFDTQKLQNPEISGVMYQQGTLFGYEIREYLLYKWNHQCAYCDAKNVALEIDHIHPRSKGGSNRVSNLTISCRKCNENKGNGDIHNFLSKDNKRLQKIVSYSKKTLRDAASINTTRYVIGNQLKKLGIDVEFASGGKTKANRRHNGFSKQHWIDAACAGESGENVTISQDLIPLGIQSQGRGSRQMCRVDQFGFPRTTAKSQKRVKGFQTGDIVKAVVTKGKKKGVYVGRVAVRSNGYFNIKTNNSTVQGISYRYCHLIQQVDGYFYFQKGDARLKKASCSCFAHSCPSGDSSPTYRSRGILAIN

SEQ ID NO: 2989 - protein, 428 aa, Desulfonema sp.
LKVFVLDTEKRISAPVHSAEARLLLSQQKAAVFRRFPFTIILKESAKEEPEPLRLKTDPGSRTTGMAIVNDTTGEIIFVAELSHRGQRIKSLLENRRAIRRSRRNRKTRYRKPRFLNRTRTENWLPPSLKSRVHNIETWVHRFRRFCNIRAISTELVRFDMQLMENPGISGAEYQQGELAGYEVREYLLEKWERKCAYCGKRNIPLEIEHIVPKSGGGSDRVSNLTLACNSCNVRKGNRPVREFLKRKPEVLKKILAQAKAPLKDAAAVNATRWDLYHILKKTGLPVETGSGGLTKFNRVRRGMEKTHWADAACVGKSTPAGLFQMHKGVLGITATGHGSRQMCRVDRYGFPRTGAKPRQKDVRGFQTGDMVRAVVPTGKKAGVYEGRVAVRTSGSFNIKTDTGTVQGIGWKRCRILHHSDGYSYTHI

SEQ ID NO: 2990 - protein, 512 aa, unidentified
MSTIYVLNKDGKPLMPTTRGGHVRHLLKEQKARVVRAKPFTIQLLYETNDVVQPLYLGIDPGRTNIGVAVVKANGTAVFTAHLETRNKEVPKLMQDRKKARRARRTNGRRCRRQRRAKANGTISKKCVKQDTAQSKNPSKRAKEIGIIKRRLPGYKKDVLCIGIKNKEAKYTNRTRPEGWLTPTANQLLQTHINLVRKIQKFLPISDVVLEVNKFAFMRLDNPDIQKWQYQQGPLYQKGSLENAVSEMQEHHCLFCDKPIDHYHHVVPQSENGSNTIANIVGLCAEHHNLVHKDAAWQKKLAEEKVGLNKKYGALSVLNQIIPALTNKLSVLFPKHFFVTAGKSTHDYRATHGVSKDHWLDAYCIACSVLPSDVCDSNINNHMPYELKQFRRHARRALNNENMNRVYTLNDKAVAINRHKATEQEAASLEEFRKEHPNDVCKLKVKEHHPTYRNMNRNYPGSIFLVGKHVHIMQGIAGSKDGKATTYKDSNANSITASKCKFVAKNSGILFV

SEQ ID NO: 2991 - protein, 572 aa, Nocardiopsis sp.
VRAPADAHTAVSQSKARCKGIPALRGRAFSPVVESRLYQTEPTPLKEVTELATFRAGRKTHQAVLPQRPALESASADTLRIKDETGRGHHTRVVPGAEHGRGEIGAASPGGSGVTPEPCGAGESGREAHTNRTVHPAVFVLDRHGTPLQPCPPARARQLLAKGRAVVHRHTPFVIRLKDRTAADSEVDGVEVGIDPGSKHTGITVFTEQVGRRRSRYAIQLDHRGTRIRKNMGQRSGYRRRRRTANLRHRPPRFDNRTRPQGWLPPSLRHRVDTTVSWVDRLTRLAPVRAVHVERAAFDTHALSAGRSLEGLEYQQGALCGFEVREYLLAKFDRTCAYCGATNTPLNIDHVHPRSWGGSDRVSNLVLSCVPCNQGKDDQPVEEFVTNTRTLARIKAQTKTPLKDAAAVQSTRWALWRALDARLPSHVGSGGRTKWNRTRNHLPKSHTLDALCVGKAETVTEVVHTVLVVGCAGRGSYARTRPDRYGFPRLRLSRTKGFFGFATGDLVRAVVPVGKKAGTHTGRVAVRASGSFNITTGHGTVQGIGHRYLRLLQRADGYAYTTRKERGVSSRS

SEQ ID NO: 2992 - protein, 346 aa, unidentified; identical to SEQ ID NO: 2872

SEQ ID NO: 2993 - protein, 409 aa, Desulfosporosinus sp.
  source 1..409: note = isolate UBA4745
MDLMAYVVNKDGSPLMPCTSVIARLLLKQGKAKCIRKVPFTIKLSYQTTNYAQDITLGVDTGSGTIGSSVIKDNGDVIYMSQIEIRNDISDKLKQRSKYRRNRRNRKTRYRKVRGLNRKKSIKKDRFSPTMTSKIKSHVKEIKFVKTILPISKVILETATFDPHALKNPAVLNNKWLYQKGINYGFANTKAYVLDRDNHTCQHCKGKSKDSKLEVHHIVFRRNGGSDESSNLITLCKTHHDHLHSGNITLKGGKTKGHLKHATQMNSIRVQLLSLLPSAEETFGFVTKEHRQLLNLPKEHHMDAVVIASQGNAVNFKTNVILFKRCICDGDYQQSKGVRSEQRIPTGKIQGFRKFDKVKYLGSEYFIKGRMSTGYAILMDSKGIKVTLKPIPKFSKMERIQARKSWIIS

SEQ ID NO: 2994 - protein, 424 aa, Moorena sp.; identical to SEQ ID NO: 2614

SEQ ID NO: 2995 - protein, 415 aa, unidentified
MVYVLANDGQPLMPTERHGKVCRMLKSGIAKVVKKCPFTIQLQYESERNVQPVALGIDAGSKHVGVSATTKAKVLYESDVELRDDIVKLLATRRQLRRRRRSRKTRYRPARFDNRRRKEGWLAPSIRQKIGSHLTVVANVCKILPVSQIIVETASFDIQKIKNPDIQGIEYQQGEQMDFWNIREYVLFRDGHTCQCCKGKSKDKVLNVHHIESRKTGGNAPNNLITLCETCHKGYHNGTVTLPKNIKRGMKFKDAAFMGIMRWTFYNTLKEQYEPDIPVHYTYGYITKNTRINHNLPKGHCIDARCISGNPDAVSDGTYYYQKKVRCHNRQIHKQTILKGGIRKSNQAEYLVRGFRLFDKVRYQGREYFIFGRRKSGFFDIRTLSGEKVNKGSINVKRLTFVDTRKNYLTERRTV

SEQ ID NO: 2996 - protein, 287 aa, Methanosarcina sp.
MIFVLNKNKQPLSPCHSAVARKLLKTGKAVIHKKYPFTIRLKELKNSENKAEFRLKIDYGSRHTGLAILNGSKVIGLAQIHHKTSIKSNMDSRRAMRRTRRNRTTRYRKPRFNNRKRKEGWLPPSLQSRVDNIQNWVNRLQKLCPLTHISYENAKFDTQLMQNPEISGIEYQQGELQGYEVREYLLEKWNRKCAYCGAENVPLEIEHIIPKARHGTSRVSNLTLACRTCNEAKGTKTAEEFGYPDIQKQARIPLRDATIVTATRWKYIMFFPKLRSISSVAQVQGRR

SEQ ID NO: 2997 - protein, 310 aa, Moorena sp.; identical to SEQ ID NO: 2916

SEQ ID NO: 2998 - protein, 423 aa, unidentified
MRVFVLNKNRQPLDPCKPARARILLSTGKAKVYRRYPFTIVLTEEIKEPITHEHQLKIDPGAKTSGLAIVQVKRIIWGAELTHRGFQIREALTSRRQLRCSRRNRKTRYRKPRFLNRTRPKGWLAPSLMSRVQNILTWVKKLTRLCPVTGISQELIRFDTQKLQNPEISGIEYQQGTLDGYELREYLLEKWDRKCAYCGATGTRLEIEHIKPRSKGGSDRVSNLAIACRPCNQAKSNQDIELFLSKKPSILKRILNQAKRPLADAASVNTTRWKLYHELKSIGLPIEVGSGGLTKFNRCRQSLPKTHWLDAANVGKVETLIIEVTHPLIMTAKGHGTRQLCRTNKYGFPIRHCSRIKFHKGFQTGDIVRAVVTKGKKIGTYVGRVATRKSGSFNISTKSGLVQGISHKYCQFIHRKDGYAYTN

SEQ ID NO: 2999 - protein, 419 aa, Moorena sp.
MQNYVFVIDTNKRPLNPISPKKARRLLDKGKAAVFRMYPFTIILKTAIPNPTISPSQIKIDPGSKTTGFAIVQNDQVIWAMELEHRGALIKKKLESRSAVRRGRRNRNTRYRKPRFLNRRRPEGWIAPSLEHRVLTTETWVKRLIKFCPVNQIWIERVKFDTQKMQNPEVNGTEYQQGELAGYEVREYLLEKWGRECAYCGKQNVPLQIEHIHPKSCGGSDRVSNLCLACEKCNRRKGNKPIEEFLKKKPSLLQKIKTKAKQPLMDAAAVNTTRNKIVKVLKEIKPVVTGTGAQTKYNRTRLGLPKQHWIDAACVGDIKTLVLKTSQPLLVTCKGQGGRQKAALNKYGYPIRYNPLKPIKGWSSGDIAKNLLTGEFGRVNPRSKSNSFNYTVPGKKAISLHLKNLLRVHLKDGYTYGFC

SEQ ID NO: 3000 - protein, 423 aa, unidentified
MSNFVFVLDTEKRPLNPVQPGQARRLLKTEKAAVFRKYPFTIILKVAVTTTPESITLKIDPGSKTTGIALVQGGKVIFGAELTHRGQSIAASLDSRRSLRRSRRNRHTRYRQARFLNRTRKEGWLAPSLQHRVETTLTWVIKFIKLAPIDSIVQELVRFDLQQLDNPEISGVEYQQGELQGYEVREYLLNKWNRKCAYCSIGNVHLQVEHIHPKAKGGTNRISNLCLACEKCNQKKGTQDVKQFLVKKPDILKHIFAQAKRPLKDAAAVNSTRWALFSRLKETLLPVLTGSGGLTKFNRTRLQLPKTHWLDAACVGQIESLFVLTSKPLLIKATGHGTRQMCRTDKFGFPSRYVPRNKFVRGFQTGDIAKAVVTSGKKIGEYVGRVAVRTTGSFNISASELVQGISYKYCKIVHKKDGYSYAF

SEQ ID NO: 3001 - protein, 466 aa, unidentified
MQRRVFVLSKNRKPLMPCSPARARQLLKERKASVYRQEPFTIILQKRTQGDLQKVQLKFDPGSKITGMALVVFFQKGTIVTWAAELEHRGEKIVDLLSKRRAIRRSRRNRKTRYRPPRFSNRTRKKEWIAPSLKSKVDNIFNWTKKLLTYTPIDNLCVETNRFDTQKLQNPEISGVEYQQGTLFGYEIREYLLYKWNHQCVYCDAENVALEIDHIHPRSKGGSNRVSNLTISCRKCNENKGNGDIHNFLSKDNKRLQKIVSYSKKTLRDAASINTTRYVIGNQLKKLGIDVEFASGGKTKANRRHNGFNKQHWIDAACAGESGENVTISQDLIPLGIQSQGRGSRQMCRMDQFGFPRTTAKSQKRVKDFQTGDIVKAIVTKGKKKGVYVGRVAVRSNGYFNIKTNNSTVQGISYRYCQLIQQVDGYFYFQKGDARLKKASCSCFAHSRQSGDSSPTYRSRGILAIN

SEQ ID NO: 3002 - protein, 477 aa, Blautia sp.; identical to SEQ ID NO: 2707

SEQ ID NO: 3003 - protein, 466 aa, unidentified
MQRRVFVLSKNRKPLMPCSPARARQLLKERKASVYRQEPFTIILKKRTQGDLQKVQLKFDPGSKITGMALVVFFQKGTVVTWAAELEHRGEKIVDLLSKRRAIRRSRRNRKTRYRPPRFCNRTRKKEWIAPSLKSKVDNIFNWTKKLLTYTPIDNLCVETNRFDTQKLQNPEISGVMYQQGTLFGYEIREYLLYKWNHQCAYCDAKNVALEIDHIHPRSKGGSNRVSNLTISCRKCNENKGNDDIHDFLSKDNKRLQKIVSYSKKTLRDAASINTTRYVIGNQLKKLGMDVEFASGGKTKANRRHNGFNKQHWIDAACAGESGENVTISQDLVPLGIQSLGRGSRQMCRVDQFGFPRTTAKSQKRVKDFQTGDIVKAVVTKGKKKGVYIGRVAVRSNGYFNIKTNNSTVQGISYRYCQLIQQVDGYFYFQKGDARLKKPSCSCFAHSRPSGEDTPTYRSRGILAIN

SEQ ID NO: 3004 - protein, 420 aa, unidentified
MVYVLNIQGNPLMPCTEAKARKLLKNDLAIIIKREPFTIQLVFECENQIQEITLGVDAGSKIIGLSATTNKKELYSAEVLLRNDIVNLLSTRRQNRRTRRNRLRYRKPRFLNRVSNKKKGWLAPSIENKIQTHFSIISKIHKLLPITKIIVEVASFDIQKIKNPNIQGKEYQQGEQLDFWNVREYVLFRDGHKCHGKKGCTNNILNVHHIESRKTGGDSPSNLITLCEKCHNNYHNGKLKLNLKRSQSFRDATFMGIMRWSFYNKLKELYPAVSLTYGYITKNTRITNNLPKEHRIDALCITGNPTISRLDNWYYIKQVRKHNRQIHKANILKGGRKKLNQAPYLVKGFRLFDKVRYNGIECFIYGRRSSGYFDIRTLDGVRINASVSYKKLKLLETSQSLIIERRKTGLETHSSTSLKA

SEQ ID NO: 3005 - protein, 424 aa, Moorena sp.; identical to SEQ ID NO: 2772

SEQ ID NO: 3006 - protein, 373 aa, Moorena sp.
MQNYVLVIDTDKQPLNPISPKKARRLLDKGKAAVFRMYPFTIILKAAIANPTISPCQIKIDPGSKVTGFALVQDDQVIWGMELEHRGGLIKKKLESRSAVRGGRRNRNTRYRKPRFLNRKRPEGWIAPSLEHRVLTIETWVRRLTKFCPVNEIWIEIVKFDTQKMQDPEINGVEYQQGELAGYEVREYLLEKWGRECAYCGKPNIPLQIEHIHPKSKGGSDSAKPTLRERVSNLCLACEKCNQRKGNRPIEEFLKKKPGLLQKIKNKALSPLRDAAAVNTTRNKVVKVLKEIKPVVTGTGAQTKYNRTKLGLPKQHWIDAACVGDVEALVLRTSQPLLVTCKGQGGRQKAALNKYGYPIRHNPLKPIKGWKAW

SEQ ID NO: 3007 - protein, 416 aa, unidentified
MVYVLSQHGQPLMPTENHAKVRALLKHGKAKVIQGCPFTIQLLYESTTHTQKINLGIDAGSKTIGVSATTDSKVLYESEVVLRNDIVELLSGRRALRNSRRSRKTRYRKPRFDNRKKPDGWLAPSIRQKIETHVTVVGNVMKILPVTKIIVETASFDIQKIKNPEIEGVGYQHGEQLDFWNVREYVLFRDGHTCQCCKGKSKDNILNVHHIESRKTGGNAPNNLITLCETCHKAYHKGIITLPKEIHRGMRFRDAAFMGIMRWAFYDRLKELYNPLGAEVINTYGYITKNTRIEHGLPKEHYVDARCISDNPAAKPLDHYYFQKKVRCHNRQIHKNTILKGGIRKRNQASYEVKGFRLYDQVLWKGQKCFIFGRRSTGRMDLRLLDGTHINASVGHKNLKLLSMRKNYLIEQRKAG

SEQ ID NO: 3008 - protein, 425 aa, Moorena sp.
MSTNYVLVLDTNRKPLNPCKPGMARSLLKAGKAAVFKQYPFTIILNKAVDDAPKPVQLKIDPGSKVTGLALVQDDKVLWGAELYHRGQQIKADLEDRRKLRRGRRNRKTRYRQPRFLNRTRPEGWLAPSMLHRVLTTMTWVRRLTKFVPVTGISLERVRFDMQKMINPEVSGVDYQQGELQGYEVREYLLEKWNRQCAYCQATDTRLEVDHIHPKSKGGSDRVSNLTVACHDCNQAKGNRNITDFLSGKSDLLNRILSQVKQPLLDAAAVNSTRNKIAEELIARGLPIEFGTGGQTKYNRCRLDLPKTHWLDAACVGVVVHLTLETKQCLTITASGHGNRQMAGVDKYGFPYRHRTRQQVHFGFRSGDIVRAVVPKGKKAGTHLGRVLCRKSGSFDIQTKSGRVTGINHKYCSTIHGRDGYAYVF

SEQ ID NO: 3009 - protein, 259 aa, unidentified
PVPQGEDYQKGEMYGHYNVRQYVLWRDDYTCQCCGAHATKKKEVRLHVHHLESRKVGGDAPDNQVTLCESCHEKLHKGLITEGDFKKRKRRSTRDATFMGIMRKTLMQRLCSELPIPVVETRGYITKATREKLLVLPKSHTNDALAIAQGKQGFNVGYLPEILQIDKIYTIRPVRHHNRQLHKAAILKGGIRKSNQAGKYVFGYRLFDKVQFNGQDCFVWRRRTTGIFTIKTINGKMIKDGISFKKLKLAEKSTSYLIA

SEQ ID NO: 3010 - protein, 459 aa, Tolypothrix sp.
MMMTNSVFVLSKNGLILKPTTPARARILQSIGKGKKLKLFPFTLILDKDVDENIEPYLELRIDPGSKFTGISLVDLNKNEVIWAMELEHRGARIKMELIKRAATRRSRRSRRLRYRQKRFDRKKPDGWLAPSLRHRLLTTQTWIKRLLRLAPIKSIAIESVKFDFQKMETPDIEGIEYQQGTLFGYTLREALLEHWGRECVYCGKTDVPLQIEHIHARTKGGSDRFSNLTLSCEKCNQKKGNKPVEQFLKGKPEILQKIKAHQKKSLSDASAVNSTRKAIFEMAQQFGLRVISGDGASTKMIRIKSELPKQHWIDSACVGTDQIVKLRIYQSLRVTCTGHGTRQVQRVNASGFPAIASIKKNPITGKKEVNLVSKNEKYTHARAGDYVICNLLKDRKHIKAGIYRARVKTPTPKGVEVLINGYRIAIDRQYVQLIHCADGYECSFATIDQNLLRFSAIR

SEQ ID NO: 3011 - protein, 423 aa, Moorena sp.
MRVFVLNKNRQPLDPCKPARARILLSTGKAKVYRRYPFTIFLTEEIKEPITHEHQLKIDPGAKTSGLAIVQGKRVIWGAELTHRGFQIREALTSRRQLRCSRRNRKTRYRKPRFLNRTRPKGWLAPSLMSRVQNILTWVKKLTRLCPVTGISQELVRFDTQKLQNPEISGIEYQQGTLYGYELREYLLEKWNRKCAYCGATGTQLEIEHIKPKSKGGSDRVSNLAIACRPCNQAKSNQDIELFLSKKPSILKRILNQAKRPLADAASVNTTRWKLYHELKSIGLPIEVGSGGLTKFNRCRQSLPKTHWLDAANVGKVETLIIEVTHPLIMTAKGHGTRQLCRTNKYGFPIRHCSRIKFHKGFQTGDIVRAVVTKGKKIGTYVGRVATRKSGSFNISTKSGLVQGISHKYCQFIHRKDGYAYTN

SEQ ID NO: 3012 - protein, 427 aa, Methanosarcina sp.
MLVFIINQNKKPLMPCKPSKARKLLQAGKAKVVRNTPFTIKLLFGSSGYTQPVIAGMDTGSKVVGCAAIANGKVLYQSEIYLRENVSKKMEQRKMYRRTRRGRKTRYRPARFDNRGNSRREGRLAPSIKSKLEAHFREKMFVESLLPVTGWKVELASFDIHKITNPEVSGIGYQEGDLKGFYNVKAYVLDRDGYTCQHCRGKSKDSRLHCHHIVFRSQKGSDAPENLITLCETCHKALHNGEFKLSGNKSKTKHATEIGILKSQIRKSGWSFAETFGYETKYRREQILKLIKTHYFDAVAICCRDDQKVEVEDSVFLKRNVSKGDYQQRTGKRSEKKIPTGKLFGLRKFDLVKTSKGIGFVKGKRSSGFFAISDLFGNKISDSVNMKKKCRRLSARSTTLVQMVQMTHSSPTCHFRQAGTVEEGVSC

SEQ ID NO: 3013 - protein, 427 aa, Methanosarcina sp.
MFVFVLSKGGNPLMPTKPAKARILLKTGKAKVVRTTPFTIKLLFGSSSYTQPVTAGIDSGSKAVGCAAIASGKVLYQSEVSMRENVSKKMQQRQMYRRSRRSRKTRYRPARFDNRGNLRREGRLAPSIKSKLESHFREKRFVEALLLVTKWKVELASFDIHKIKNPEVSGIGSQEGDLKGFYNVKAYVLHRDGYTCHHCKGKSKDSRLHCHHIVFRSNQGSDAPENLITLCETCHKALHKGEFKLSERRSNTKHATEVGIVKSLIKKSDWSFEEVFGYETKFRREQVLGLEKTHYFDAVAICCGNKQTVEPDDTVYFKKHVPAGDYQQTKGKRSEKNIPTGKLFGLRKFDLVKTEKGIGVVWGKRSSGYFSISDIFGNKISDSANVKKKCRRLSARSTTLVQTIQLTHSSPTFHFRQAGTVEEGISC

SEQ ID NO: 3014 - protein, 413 aa, unidentified
MTDYAFVLDANGKQLAPTKEQKAWFLIRRKRATLVSKYPLVIQLKKKIPDNEICKDEVRCGIDDGGLHVGVALVQKCQTRNKVVFKGTIEQRNDVKHLMDVRRGYRRYHRYHKRYRPARFNNRDSSKREGRIAPSILQKRQATIRVINQLNRWINITNYWLEDVAIDIRALTDGYKPYRWQYQKSNRLDENIRKAVILRDGCRCMECGKSNCRLEVHHIKPRRLKGSSTLGNLITLCTKCHQKTEGIEELYMDRYFALLNSSDNRNLDYAQHVMIGKKWLREQLSNLGMLYLTNGGDTANKRIDWDITKSHSNDAICITDLRPDTCEIKEWVIKPMRRQSKAKTDNVLGIKHRDLVEYTFRNGETHRGYVTALYPEQNAINFQSPAKHCKKVNAGKCKVLWKYSKIYWLDNVS

SEQ ID NO: 3015 - protein, 427 aa, Methanosarcina sp.
MLVFVINQNKKPLMPCKPSQARKLLQAGKAKVIRNTPFTIKLLFGSSGYTQPVIAGMDTGSKVVGCAAIANGKVLYQSEIYLRENVSKKMEQRKMYRRNRRGKKTRYRPARFDNRGNSRKEGRLAPSIRSKLEAHFREKRFVESLLPVTGWKVELASFDIHKITNPKVYGIGYQEGDLKGFYNIKAYVLDRDGYTCQHCRGKSKDSRLHCHHIVFRSQKGTDAPENLITLCETCHKALHNGEFKLSGKKSKTKHATEIGILKSQIRKSGWSFAETFGYETKYRREQVLKLLKTHYFDAVAICCRDDQKVEVEDSVFLKRNVSAGDYQQRRGKRSEKKMPTGKLFGLRKFDLVKTENGIGFIRGKRSSGYFSISDIFGNKISDSVNVKKKCRRLSARSTTLVQMVQMTHSSPTCHFRQAGTVEEGVSC

SEQ ID NO: 3016 - protein, 442 aa, Tolypothrix sp.
MSNYVFLIDKNKTPLNPVHPAQARKLLDSGKAAVFRRYPFTLILKRVIENPNVYPLILKIDPGSKFTGIALVTNQGNVIWGMELQHRGQQIKDALEHRRAVRRGRRSRNTRYRQARFLNRKRPDGWLAPSLRHRVITSETWVKRLQKFAPIGSIVQELVKFDTQAIQNPEISGAEYQQGTLHGYECREYLLEKWNRQCAYCGIKDVPLEIEHIQPKSACGSDRISNLCLACHKCNQRKGSKDIQEFLKGKPDVLNRVLRQAKTPLKDAACVNSTRWSLLNTLKQTGLPVKTGTGGQTKFNRIRFDLPKAHWIDAACVGECSAVDGFPVAGNCRTRKGIVETIKLVTTKILKVRATGFGGRQRCQTDQFGYPQKHRPLRPILGFSTGDIVRASVPKGKYAGTFTARVCPMSHGYGEFVIDKKRRSIKLNYLTPVHRRDGYDYA

SEQ ID NO: 3017 - protein, 506 aa, unidentified
MTMVYVQNKDGKPLMPTTRYCYVRLLLKEKKARVVCTTPFTIQLNYDTPDITQDLILGIDPGRTNIGVAVVKEDGSCVFSAHLETRNKEVPLLMKKRAAFRRQHRTQDRRRKRQRRAIAAGATVESNTIERLLPGYSTPIVCHHIRNKEARFNNRSRPAGWLTPTANHLLQTHINLIAKIAKFLPITKVVVELNRFAFMAMDNPNIHRWEYQQGPLYGLGSVEDAVYAQQDGHCLFCKKPIDHYHHVVPRHKSGSETLANRCGLCEKHHALVHKDKAWAEKLVTRKGGMNKKYHALSVLNQIIPHLMEYLGRETPYDVYATNGRSTKGFRIAKNVPKEHYTDAYCIACSILNTDIKVSAPVEPFELKQFRRHDRQACIRQMVDRKYLLDGKVVAANRHKAIEQKSDSLEEFREAYGDAAVSQLTVRPHSPQYKDMARIMPGAVMDFDGIVGVFKGSSGRNNGTPNYYNSTKGARVLTKRCALLAKNVGMVFIPAGKLSFVGKHIKS

SEQ ID NO: 3018 - protein, 415 aa, unidentified
MVYVVANDGQPLMPTERHGKVCRMLKSGMAKVVKKCPFTIQLQYESERNVQPVALGIDAGSKHVGVSATTKAKVLYESDVELRDDIVKLLATRRQLRRRRRSRKTRYRPARFDNRRRKEGWLAPSIRQKIESHLTVVANVCKILPVSQIIVETASFDIQKIKNPDIQGIEYQQGEQMDFWNIREYVLFRDGHTCQCCKGKSKDKVLNVHHIESRKTGGNAPNNLITLCETCHKGYHNGTVTLPKNIKRGMKFKDAAFMGIMRWTFYNTLKEQYEPDIPVHYTYGYITKNTRINHNLLKGHCIDARCISGNPDAVSDGTYYYQKKVRCHNRQIHKQTILKGGIRKSNQAEYLVRGFRLFDKVRYQGREYFIFGRRKSGFFDIRTLSGEKVNKGSINVKRLTFVDTRKNYLTERRTV

SEQ ID NO: 3019 - protein, 231 aa, Methanosarcina sp.
MLVFVINQNKKPLMPCKPSKARKLLQAGKAKVVRNTPFTIKLLFGSSGYTQPVIAGMDTGSKVVGCAAIANGKVLYQSEIYLRENVSKKMEQRKMYRRTRRGRKTRYRPSRFANRGNSRREGRLAPSIKSKLEAHFREKRFVESLLPVTEWKVELASFDIHKITNPEVSGIGYQEGDLKGFYNVKAYVLDRDGYTCQHCRGKSKDFPAALPSYRFQVTEGNRCTRKPDNAL

SEQ ID NO: 3020 - protein, 457 aa, Tolypothrix sp.
MITNSVFVLSKNGKILKPTTPARARILQAQGQAKKLKLFPFTLILDKEVDENVEPLLELRIDPGSKYSGFSLVDLNKNEVVWAMELEHRGLAIKMDLIKRASVRRSRRSRRLRYRQKRFDRKKPYGWLPPSLKHRLLTTQTWIKRLLKVAPIKSIAIESVKFDLQKIEAPNIEGIEYQQGTLFGYTLREALLEHWGRECVYCGLTDVPLQIEHINPRSKGGSERFSNFTLSCEKCNQKKGSKPVEQFLKNQPEILKKIKAHQKKSLSDAAAVNSTRKAIFEMAHQFELPVISGDGASTKMIRIQSQLPKAHWLDSACVGTDQIVKLRVCQPLLVTCTGHGTRQVQRVNAKGFPAIASIKKNPMTGKKEVKLVSKNQKYTHATAGDYVICTLSENRKHIKAGIYRARVKTPTPKGVEVLINGHRIGVNQKYFKLIHRSDGYEYSFTTIDPDLLRLKPI

SEQ ID NO: 3021 - protein, 427 aa, Eubacterium sp.
MLVYVLNKNEKPLMPCNPTKARKLLKQNKAKVLRIEPFTIQLLYGSSGYKQNITLGVDAGSKHIGLSASTPIKELYAADVELRNDIVDLLSTRRQNRRTRRNRKTRYRKCKFLNRVKSKNKGWLAPSIENKIDAHFKSIAQVNKILPITNIVVETASFDIQKIKNPEISSKQYQEGDQLGFWNVREFVLWRDNHTCQCCKGKSKDKILNVHHIESRKTGGDAPNNLITLCETCHTGYHKGTLKLPSSIKRGASFKDATFMGVMRWSFYNRLKKLYSNISMTYGYITKNTRIENGLPKEHYIDALCISGHPKAKQLDYYYYQKQVRRNNRQIYKANILKGGKKKLNQAPRYVKGFQLFDKVKYDGDSYYIFGRRSNGYFDIRKLDGTKVNNGSINYKYLKRLESRRNMLTERRSRSPLMTEVTSLRTV

SEQ ID NO: 3022 - protein, 372 aa, unidentified
MMGNYHVRICRRVGAGDSPLDSIGIALVNNRDEVIWGMELHHRGQQIKDSLETRKAVRRGRRARHTRYRQTRFLNRTRPEGWLNAPSLRHRVLTIETWVKRLMKFAPIVTLTQELVKFDLQAMQNPEISGTEYQQGTLHGYECREYLLEKWNRQCAYCGIKDVPLEVEHIQPKSKGGSDRISNLCLACHKCNQNKGNKDVKEFLKGKPEVLSRILKQAKSPLKDAAAVNSTRWALLKVLGRFGLKVYANSGARTKFNRIKLGLPKAHWIDAACVDFVEKLIILTTKILTVKSTGKGTRRLCRINKFGFPCSNPRTSYEHGWNTGDVATGKGVTGRVVVQSKTRLEIRIDGKRIGAQLSDFKKLHCKDGYSYA

SEQ ID NO: 3023 - protein, 413 aa, unidentified
MTSYSFVLDVNGKPLAPTKEQKAWFLIRKKRAALVSKYPMVIQLMKEIPENEICQDEIRCGIDDGGLHVGIALVQKCKTKNKVVFKGTMEQRNDVKHLMEVRRGYRRYHRYHKRYRQARFDNRKSSKREGRIAPSILQKRQATIRVIHWLNKWINITNYWLEDVSVDIRALTDGYQSYRWQYQRSNRLDENIRKAAILRDGGKCMECGKSNCRLEVHHIKPRRRNGSNTLDNLITLCESCHQKTEGQEELYMDRYFSLLKSSNNKNLNYAQHVMIGKRWLRKQLSGLGVLYLTSGGDTANKRIDWNIEKSHANDAVCITDLQPDTCDMKEWTMKPMRRQSKAKTDHVLGIHHRDLVEYTFKNGETHRGYVTALYPEQKAINFQSPTKHCKKVNARKCKLLWNYSKIYWFENAS

SEQ ID NO: 3024 - protein, 465 aa, Calothrix sp.
MSLLTNHVFVLNKDKSFLSMVHPARARKLLTQNKAAVFRTYPFVIILLQQIMNPSLKQYFLKIDPGSQWTGFAIQCGEEIVFRMELKHRGDVIKSDLQKRSGFRRGRRSRNLRYRQERFNKKKKSGWLPPSLMHRVFTVETWIKRFCKFCPIILIEIEQVRFDMQKIANPEISGIEYQQGTLFGYEVREYLLEKWDRECAYCGAKNIQLEVEHIKAKSNGGSDRVSNLTLACHDCNQKKGNMNVDDFLSDKHKLAHILANAQTPLKDAAVVNSTRIHIVDVAKKYNPVNTWTGGRTKMNRVNQNLEKGHSIDAACVGESGSKVIFLTEQPLLVIAFGHGSRQSRRTNDKGFPALVTKKCKNTGRDIVQKDEFGNVKIISPKNEYTHITAGDIVRFEIKKVRSVKSNHIQAVDGKVVVEPKWYTCRVKTPTPQGFEVLIKGGRVGISSMKGAKFAYRADGYEYKFR

SEQ ID NO: 3025 - protein, 589 aa, Streptomyces sp.
VTRVHREREGRSLAPPAPGRSSDQPKSSRSKDQGGVPMTTLPAGEQTHQAVLPQQPALESVGADTPGSRDETAHGHLVAVRGAVGKHGRGETDGLGTCTRRRHVENAATAAEEAETGSGDAPAHEHVYTGGVGAGRVFVLSKEGDPLMPCHPARARELLGKGRAVVARYVPFTIRLKDRTLADSEVDGVQLRIDPGSKGTGLHLTDEKKGINEQGVTGTVRRGLISFELQHRGDQIRGRMQQRAGYRRRRRSANCRYRAPRSDNRTRPGSWLPPSLRHRVDTVFSQAARLCRYAPVAEIHVESGGFDTHSMSTGRPLRGAGYTQGALAGTDARAYLHARWNSSCSYCGITGVPLNIEHVRPRSRGGSSRISNLVLACVPCNMRKGTLPVEVFLAASPDRLAKILQQGETPLHDAAAMNATRWPLREALSSLGRPVFGWPGGLTKRNRAAMGLDKSHTLDALSVGHLAHESGDAIVRFPSQVLVLKATGRGSYARTTPDRFGFPRLRRARTKQHFGYVTGDLVRTTVPTGKWAGTWTGRICVRARGQHSLSTSKGRINVSHRHLRLLQRGDGYDYSTRPEPPPSISRKTG

SEQ ID NO: 3026 - protein, 427 aa, Methanosarcina sp.
MLVFVINQNKKPLMPCKPSKARKLLQAGKAKVVRNTPFKIKLLFGSSGYTQPVIAGMDTGSKVMGCAAIANGKVLYQSEIYLRENVSKKMEQRKMYRRTRRGRKTRYRPARFDNRGNSRREGRLAPSIKSKLEAHFREKMFVESLLPVTGWKVELASFDIHKITNPEVSGVGYQEGDLKGFYNVKAYVLDRDGYTCQHCRGKSKDSRLHCHHIVFRSNHGSDAPENLITLCETCHKALHNGEFKLSGSKSKTKHATEIGIIKSQIRKSGWSFAETFGYETKYRREQVLKLIKTHYFDAVAICCRDDQNVEVEDSVFLKRNVSKGDYQQRTGKRSEKKIPTGKLFGLRKFDLVKTSKGIGFVKGKRSSGFFAISDLFGNKISDSVNVKKKCRRLSARSTTLVQMVQMTHSSPTCHFRQAGNVEEGVSC

SEQ ID NO: 3027 - protein, 517 aa, Leptospirillum sp.
MLPQSRALEAADADNREGQDETVGGKGAIPKPVANIPEGRRFERSALRPQGQCNVRFDGGFVQVFVLDKKKKPLMPCHPARARELLREGRAVVHRIAPFTIRLKDRIGGETQPIRVKLDPGSKTTGLAVVREEETDGEKTAHVLFQAEIHHRGSAIKKKLDQRRAFRRRRRSQLRYRTPRFDNRTRPDGWLPPSLRHRVDTTLAWVERLRRLVPVSELSQELVRFDMQKIENPEISGVEYQQGTLAGYEVREYLLEKWGRTCAYCGSENVPLEIDHIHPRSLGGSDRVSNLTLACRSCNLKKGNRPVGEFLSKTPERLSTILARAKAPLKDAAAVNTTRWALFQALKATGLPVETASGGRTKWNRTRLVLPKTHALDAACVGKVDRIEGWNRPCLSIKSTGRGSYRRTRLDAFGFPRGSLTRTKAHFGFQTGDRVRAIVTKGKKTGTYAGRVAVRSSGSFNIQTGSGVVQGISCKDCRLLQRADGYGYSIHPITEKGGAGEAISLPGMNAGVSRARG

SEQ ID NO: 3028 - protein, 438 aa, Methanosarcina sp.
MIFVLNKNKQPLSPCHSAVARKLLKTGKAVIHKKYPFTIRLKELKYSENKAEFRLKIDYGSRHTGLAILNGSKVIGLAQIHHKTSIKSNMDSRRAMRRTRRNRTTRYRKPRFNNRKRKEGWLPPSLQSRVDNIQNWVAKLQKLCPLTHISYENAKFDTQLMQNPEVSGVEYQQGELQGYEVREYLLEKWGRKCAYCGAENVPLEIEHIIPRARKGTDRVSNLTLACRTCNEAKGTMTAEKFGYPEIQKQARIPLRDATLVTATRWKVYNTLTEKGLEVECGTGARTKMNRIKLNLPKDHHFDAICVGASTPNKIIFKTNSVLHIKAKGRGSHCRTNLDKYGFPRGYLTRQKSFFGFQTGDIVKAIIPKGKYKGIFFGAVACRKTGYFDIKNKEGVRIGQGINHKYCNILSRADGYEYATEHLEVDGIPPTTEVIGILP

SEQ ID NO: 3029 - protein, 449 aa, Methanosarcina sp.
MKVFVKNQYNKPLMPTTPRKARILLKSGKAEVVQRLPFTIKLLYPTGNATQDITLGIDTGFLNIGFSAVSDKEELISGEVKLLGGMPGRNEERAMYRRNRRGRLWHRKPGFDVNTNREGWLAPSIKHKLDSHIRFINKITDILPITKIVIEVANFDIQKIKNPDIKGRQYQEGEQKGYENLRAYILHRDNYRCQNPDCKNKQAQPELHVHHIQYRINGGPDRPDNLITLCSKCHTPKNHKGFLLTWKQKVRGFKDATFMNTVKWKLVEILKENHAVDVTYGYLTKEKRQAMELEKTHANDAFCIANGMNQVRHNPYEIRQIRRNNRSLSTFHDAKYIDSRDKSLKTGTELYSGRTTRNKQLNTENLRKYRQQRITKGKLVIRKNHYPVQPMDLVNYNGNLYYVMGTHSYGKRVILKDQIKKSGISVNSLKVEIIKHGKGFCWVDTSIPC

SEQ ID NO: 3030 - protein, 430 aa, Methanosarcina sp.
MLVFVINQNKKPLMPCKPSKARKLLQAGKAKVVRNTPFTIKLLFGSSGYTQPVIAGMDTGSKVVGCAAIANEKVLYQSEIYLRENVSKKMDQRKMYRRTRRGRKTRYRPVRFDNRGNSRREGRLAPSIKSKLDSHFREKRFVDSLLPVTGWKVELASFDIHKITNPEVSGVGYQEGDLKGFYNVKAYVLDRDGYTCQHCKGKSKDSRLHCHHIVFRSNHGSDAPVNLITLCETCHKALHNGEFKLSGNKSKTKHATEIGILKSQIRKSGWSFAETFGYETKYRREQVLKLLKTHYFDAVAICCRDKQTVEPDDTVYFKKHVPAGDYQQTKGKRSEKNIPTGKLFGLRKFDLVITENGIGFIRGKRSSGYFSISDIFGNKISDSVNVKKKCRRLNARSTTLVQMVQMTHSSPPAISGKPEMSRKGSPAEVR

SEQ ID NO: 3031 - protein, 427 aa, Nostoc sp.
MSKVLVIDQRKRPLDPVHPAQARQLLRSKKAAIYRQFPFTLILKESRTGTPVLPLRLKIDPGAKVTGIALVNDSSALVVFVAELKHRGFAIRDALTSRRQLRRGRRARKTRYRQPRFLNRTRPEGWLAPSLQSRVDNIETWVKKLRQFAPIEAISQELVRFDMQLMRNPDIQGNEYMQGTLQGFETREFLLEKWNRQCAYCDVKDVPFQIEHIFPKARGGSNSITNLTLSCEKCNIKKGVKDIKGFLKKDPSRLEKSLKQAKRPLADAAAVNTTRFALLNVLKSTGLPVETGSGGLTKFNRSQQNIPKSHWADAAAVGKSTPELIVKGVKPLLIAANGHGSRQSCRTDKFGFPNRHVPRDKIHFGFQTGDIVRAVVTSGKKIGSYVGKVAIRSSGSFNISTKNGLVQGISHKFCLRIHAKDGYSYAY

SEQ ID NO: 3032 - protein, 552 aa, Streptomyces sp.
MTTFPAGEQTHQAVLPQQPALESVGADTPGSRDETAHGLPAIARGTVGGHGRGETGGRGTSARRRHAKSAATAAQAAENRSGDAPAHHPSYTGGVGASRVFVLAKDGRPLMPCHPARARELLGKGRAVVARQVPFTIRLRDRTLADSVVDGVQLRIDPGSKGTGLALTDEKQEADEQGTHVTVRRGLISIELQHRGDQIRMCMRRRAGYRRRRRSANCRYRAPRSNNRPRPAGWLPPSLRHRVDTTLSLATRLCRYAPVTEVHVERVAFDTHSMSSGRRLSGTEHGQGALAGTTVRAYLHTKWNSACAYCDATGVPLNIEHLSPRSRGGSDRVSNLVLACVPCNEAKGSTPVDTFLADRPDRLAKILEQARAPLRDAAAMNATRWRLTEALGTLGRPVHAWSGGLTKGNREAMGLAKTHTLDALSVGRLRHERGDAIVRHPGQVLVAKAAGRGSYARTTPDRFGFPRLHRARAKQHFGYVTGDLVRATVPSGKWAGTWTGRIAVRARGQHSLTTSGGRINVSHRNLRLLQRGDGYGYGSRPEPSRSTAGKSG

SEQ ID NO: 3033 - protein, 423 aa, Moorena sp.; identical to SEQ ID NO: 2845

SEQ ID NO: 3034 - protein, 419 aa, Lachnospira sp.
MVYVISQNGKPLMPCSNTIARLLLKQGKAKVKRREPFTIKLTYETTSYTQNLTLGVDTGSGTIGTAVSKNNGDIIYMSEVVVRNDIADKMKQRAKYRRNRRNRKTRYRKARWLNRANSIKNDRFSPTMQSKLHSHVKEIEYIKSILPITELVFETGQFDTHLMKNPSLASPKVKHWGYQKGANYGFENTKAMVLNRDSYTCQYCKGKHKDSRLEVHHIIYRSQGGSDEADNLITLCHTCHKALHNGKINPKLSGKTKGNLKYATQMNSIRKQLFKLYPGAIETFGYITKANRLRLGINKEHYYDACTIAAQGNSFTLKSNLYKKKCIPDGDFQKTKGIRSEQPIETKKICGFRKFDKVCYLGKEYFIKGRMSTGYAILMDIEGKKIDFSSMPKGYKTPKLNKCMRIAARTSQIIQTMAI

SEQ ID NO: 3035 - protein, 427 aa, Methanosarcina sp.
MLVFVINQNKKPLMPCKPSKARKLLQAGKAKVVRNTPFTIKLLFGSSGYTQPVIAGMDTGSKVVGCAAIANGKVLYQSEIYLRENVSKKMEQRKMYRRTRRGRKTRYRPARFDNRGNSRREGRLAPSIKSKLEAHFREKMFVESLLPVTEWKVELASFDIHKITNPEVSGIGYQEGDLKGFYNVKAYVLDRDGYTCQHCRGKSKDSRLHCHHIVFRSQKGTDAPENLITLCETCHKALHNGEFKLSGKKSKTKHATEIGILKSQIRKSGWSFAETFGYETKYRREQVLKLLKTHYFDAVAICCRDDQKVEVEDSVFLKRNVPAGDYQQRRGKRSEKKIPTGKLFGLRKFDLVKTSKGIGFVKGKRSSGFFAISDLFGNKISDSVNVKKKCRRLSARSTTLVQMVQMTHSSPTCHFRQAGTVEEGVSC

SEQ ID NO: 3036 - protein, 442 aa, unidentified
MSTSVFVLDKKHRPLMPCRPARARRLLRAGRARVVKRFPFVIRLVDRTVEQSEVQPVLIKLDPGSRETGAAVVRDDEKKRHHALAFFVIKHRGGAIRDALKARSAFRRRRRSQNFRCRSPRFLNRVKPKGWLPPSLRHRVETTLSFVRRMCRYLPVSGIAAELVKFDSQKLQTPEVSGIEYQQGTLFEYEVREYLLEKFGRKCVYCGAEGVPLNIDHVVPRAKGGSNRVSNLVLACVSCNQKKGARSLEDFLKGKPEVLARVRRELKTPLRDAAAVNATRWVLFNELKATGLPVETGSGALTKLNRHAFGVEKEHWLDALCVGRLNGAVTRKGLNVLEIRCMGRGSRQRTRLTKYGFPRGYLMRQKCVHGFATGDMVEANVPKGKKAGLWRGRVAVRVSGSFNIQTPKGVIQGVGWKHCRLISHNDGYGYAWLGHAPHSSPA

SEQ ID NO: 3037 - protein, 442 aa, unidentified
MSTTVFVLDKKHRPLMPCRPARARRLLRAGRARVVKRFPFVIRLVDRTVEQSEVQPVLIKLDPGSRETGAAVVRDDGKKRHHALAFFVIEHRGGAIRDALKARSAFRRRRRSQNLRCRSPRFLNRVKPKGWLPPSLRHRVETTLSFVRRMCRYLPVSGIATELVKFDSQKLQNPEVSGVEYQQGTLFEYEVREYLLEKFGRKCVYCGAEGVPLNIDHVVPRAKGGSNRVSNLVLACMSCNQKKGARSLEDFLKGKPKVLARVRRELKTPLRDAAAVNATRWVLFNELKATGLPVETGSGALTKLNRHAFGVEKEHWLDALCVGRLNGVVTRKGLNVLEIRCMGRGSRQRTRLTKYGFPRGYLMRQKCVHGFATGDMVEANVPKGKKAGLWRGRVAVRVSGSFNIQTPKGVIQGVGWKHCRLISHNDGYGYAWLGHAPHSSPA

SEQ ID NO: 3038 - protein, 480 aa, unidentified
LYTKPLDNIGEGSLPPSGEINLKGMTFMVYVKSIDGKALMPTSNAKARKLLKQKKAKVVSLRPFVVKLTYKTKTEYTQKLNLGVDSGYSNIGFSVIDAKQEYIAGEVKLLEGMKKRLLEKASYRRIRRSRLRYRKARWNNRVKSKKKGWLAPSLKHKLDTHIKFIDYLKNILPIEKITIEVANFDIQKMKDDLISGIDYQNGDMFGFWNVREFVLHRDGHKCQNRNCKHKDKKEQILKVHHIRYRSEGGSDRPENLITLCSKCHTPANHKKGKFLYDWCVNGKKVRGFKDATFMSMIRWYLVNELKSKHNNVSITYGYITKNHRIQNGIEKSHLNDAFAIAKGTNHARTKDRFLVIQDRLKNRSLEKFYDSKIIDIRTEKKVSGGDLNCGRSTRNKKLNTENLRKYRGVKISKGQRRIRKQKYFYQPNDLVKYDGKVYTVKGTQNEGKYIDLKEIKKVPKVELLIPYVFKKGLNWSYGLC

SEQ ID NO: 3039 - protein, 494 aa, unidentified
MTMVYVQNKDGKPLMPTTRYCYVRLLLKEKKARVVCTTPFTIQLNYDTPDITQDLILGIDPGRTNIGVAVVKEDGQCVFSAHLETRNKDIPLLMKKRAGFRRQHRTLDRRRKRQRRAKAAGTTVAEGSVERLLPGYEKPVVCHHIRNKEARFNNRCRPAGWLTPTANHLLQAHINLIAKAAKFLPITKVVVELNRFAFMAMDNPNIRRWEYQQGPLYGLGSVKDAVYAQQDGHCLFCKKPIDHYHHVVPRHKGGSETLANRCGLCEKHHALVHKDKAWAEKLVTRKGGMNKKYHALSVLNQIIPHLMEYLGSETPYDVYATDGKSTKGFRVAKNVPKEHYTDAYCIACSILDADTKVSAPAEPFKLKQFRRHDRQSCIRQMVDRKYLLDGKVVATNRHKSIEQKSDSLEEFREAYGDAAVSQLTVRPHSPQYKDMARIMPGAVMDFDGIVGVFKGSSGRNNGTPNYYNSTKGARVLTKRCALLAKNAGMVFIPA

SEQ ID NO: 3040 - protein, 448 aa, unidentified
MSNVFVVDTYQRPLNPVHPGRARILLSEGKAAVFKRYPFTIILKIEVQEPAVQPLRIKLDPGSKTTGLAIVNDATGEVVFAAELSHRGQKIKAALDDRRTVRRSRRQRKTRYRKPRFNNRKNKKKGWLPPSLESRIANVLTWVNRMSRSCRITAISMELVRFDMQLMQNAEVSGVEYQQGTLAGYEIRHYLLEKWDRTCSYCGSKDMPLQIEHIQPRANGGTNRISNLCLACEACNTAKGTLDIAVFLKKKPEVLKRIQSQAKKPLKDAAAVNATRWALFERLKATGLPIECGSGGLTTFNRTTRAFQKTHWLDAANVGKSTPDVLIVKDIVPVLITATGHGSRQMCRPDRYGFPRTSAKGNKKVKGFQTGDIIKAIVTTGIKKGTYIGRVAVRSSGSFTIVTSTQTIQGISYRFCRMVHHSDGYSYTKGSALLPMHECRGIRAIEKR

SEQ ID NO: 3041 - protein, 555 aa, Streptomyces sp.
MTTFPVGEQTHQAVLPQQPALESVGADTPGSRDETAHGHPATGRDTGREHGRGETGGPGIPARRRHAKSAVPTAQAAETGSGDAPALDQSCRSYAGGTGACRVFVLSRDGQPLMPCHPARARELLSKARAVVVRQVPFVIRLKDRTLGESEVDGVQLRIDPGSKGTGVVLTDEKKEPHDRNPVVTVRRGLLSVELQHRGDQIRAGMRQRAGYRRRRRKANLRYRAPRSDNRARRSGWLPPSLRHRVDTTFSLADRLCHWAPVTEIHVESVAFDTHSQSVGRPLHGTEHQRGPLAGTTVREHLRATWNAACAYCGVSGVPLNVDHLRPRSRGGSHRISNLVLACVPCNKAKGSKPVETFLAHRPSRLAAVLSQVRAPLDDAAAMNATRWQLTAVLAALGRPVHAWSGRLTKANRLAMGLDKTHTLDALCIGPLDHAAGDHIVRFPHHALTAKATGRGSYARTTPNRYGFPRLLRPRAKQHHGYVTGDLVRAVVTAGKWAGTWTGRVSIRSSGQHSLATASGRFNCSHRNLRLLQRGDGYAYSSRRESAASVSQKNS

SEQ ID NO: 3042 - protein, 452 aa, unidentified
  source 1..452: note = uncultured beta proteobacterium
MPCSEKRARKLLESRRARVHKLFPFCIRLVDRLVADCVFQPLRLSLDPGSKTTGVAVCRVAKTVDVTTGEIQPTMHIQFLMELVHRGATIKKSLGARSAMRRRRRSANLRYRAPRFSNRPKPKGWLAPSLNHRVETTMTQVKRLCRLAPITHLAQELVRFDMQKMQNPEISGAEYQQGTLAGYEVREYLLEKFNRTCAYCDATEVPLQMEHIHPKAAGGTNRISNLTLACQACNQKKSAQDVKDFLAKDPKRLAKILKQAKAPLHDAAAVNTTRWTLFNALKQTNLPVKTGTGGQTKYNRSRLNIPKTHALDAACVGQVQAVQKTNAPTLRVTCSGRGSRCKTRLDKYGFPRTYLTNQKTAFGFKTGDMVIATVPKGVKKGTHKGRVAIRLSGRFNIQTGVAGAATVQGISHKHCRITQRADGYGYSHVAQTQKECGNKGCAVRTPRYPFPA

SEQ ID NO: 3043 - protein, 427 aa, Methanosarcina sp.
MLVFVINQNKKPLMPCKPSKARKLLQSGKAKVVRNTPFTIKLLFGSSGYTQPVIAGMDTGSKVVGCAAIANGKVLYQSEIYLRENVSKKMQQRKMYRRTRRGRKTRYRPARFDNRGNSTKGGRLAPSIRSKLESHFREKRFVESLLPVTEWKVELASFDIHKITNPEVSGIGYQEGDLKGFYNVKAYVLDRDGYTCQHCRGKSKDSRLHCHHIVFRSQKGTDAPENLITLCETCHKALHNGEFKLSGNKSKTKHATEIGILKSQIRKSGWSFAETFGYETKYRREQVLKLLKTHYFDAVAICCRDDQNVEVEDSVFLKRNVPAGDYQQRRGKRSEKKIPTGKLFGLRKFDLVKTENGIGFIRGKRSSGYFSISDIFGNKISDSVNVKKKCRRLSARSTTLVQMVQMTHSSPTCHFRQAGNVEEGVSC

SEQ ID NO: 3044 - protein, 551 aa, Streptomyces sp.
MTTFPAGEQTRRAVLPQQPALESVRADTLRSKDETAHGLPATARGTGGEHGRGETDGHRVRPRRRHAESAAMAAEEAENGSGDASTPPGYTGGVGASRVFVLAKDRRPLMPCHPARARELLNSGRAVVHRHAPFTIRLKDRTRAESEIDGVRLRIDPGSQGTGFALTDEKTETGKRGDAVLVRRGLMAAELRHRGEQIRHCMGQRAGYRRRRRSANLRHRAPRSDNRTRPEGWLAPSLRHRVDTTISLAHRFCRYAPVTEIHVESVAFDTHSMSAGKQLKWAEYRNGTLAGTDARAFLLAIRGRVCAYCGVTGVPLNIDHIHPSSRGGSSKISNLVLACVPCNQAKGSKPIDVFLADRPERLAEIRAQNRPPLRDAAVMNSTRRQLIEGLGALGPPVHAWQGLRTQRNRTAMGLDKTHTTDALAVGELDRENGGQIVRVPARVLVVKATGRGSYARTTPDRFGFPRLQRARTKEHFGYVTGDLVRATLPTGKWAGTWNGRISVRARGQHSLATPTGRINVSYRNLRLLQRGDGYAYGTRQEPVSSPSRKTG

SEQ ID NO: 3045 - protein, 426 aa, Parasutterella sp.
LRVFILNKRGKPLMPCSPAKARLLLKEKKAIVARRTPFTIQLTIATGEAKQPVSLGVDAGYKHVGLSASTEKAELYASEVELRQDVSDLLSARRALRQSRRSRNTRYRAPRFDNRIRTKRKGWLAPTVENRINVHLSRIETVLRLLPVTKITVETASFDTQLLKNPDIAGKEYQEGEQLGFWNVREYVLFRDGHVCQHCHGRSKDPVLNVHHLESRRTGGDSPGNLITLCETCHKALHRGEIKLKAKRGRSFRAETFMGIMRWGVLNRLKASHPKLEVHNTYGYRTKHARIANGIAKSHCADAFCIAGNFGAKRLGEFFQKQTRRNNRQIHKLSILKGGIRKRNQAPFEVKGFRLFDKVACQGEEGFIFGRRSTGYFDVRKLDGTCISAGISYKKLHLLEKRRTYLTEIRKEEALPPPPEGRGLRA

SEQ ID NO: 3046 - protein, 427 aa, Methanosarcina sp.
MLVFVINQNKNPLMPCKPSKARKLLQAGKAKVVRNTPFTIKLLFGSSGYTQPVIAGMDTGSKVVGCAAIANGKVLYQSEIYLRENVSKKMEQRKMYRRTRRGRKTRYRPSRFANRGNSRREGRLAPSIKSKLEAHFREKRFVESLLPVTEWKVELASFDIHKITNPEVSGIGYQEGDLKGFYNVKAYVLDRDGYTCQHCRGKSKDSRLHCHHIVFRSQKGTDAPENLITLCETCHKALHNGEFKLSGNKSKTKHATEIGILKSQIRKSGWSFAETFGYETKYRREQVLKLLKTHYFDAVAICCRDDQNVEVEDSIFLKRNVSKGDYQQRTGKRSEKKIPTGKLFGLRKFDLVKTSKGIGFVKGKRSSGFFAISDLFGNKISDSVNVKKKCRRLSARSTTLVQMVQMTHSSPTCHFRQAGTVEEGVSC

SEQ ID NO: 3047 - protein, 432 aa, Methanosarcina sp.
MIFVLNKNKQPLSLCHSAVARKLLKSGKAVIHKKYPFTIRLKELKTSENKAEFRLKIDYGSRHTGLAILNGSKVIGLAQIHHKTSIKSNMDSRRAMRRTRRNRTTRYRKPRFNNRKRKERWLSPSLQSRVDNIQNWVNRLQKLCPLTHISYENVKFDTQLMQNPEVSGVEYQQGELQGYEVREYLLEKWNRKCAYCGAENVPLEIEHIIPKARHGTSRVSNLTLACRTCNEAKGTMTAEEFGYSDIQKQARIPLKDAALVTATRWKVYNVLEKTGLEVECGTGARTKMNRIRLNLPKDHHFDAICIGASTPNEITFKTNQVLHIKAKGRGSHCRTNLDKYGFPRGYLARQKSFFGFQTGDIVKAIIPKGKYKGTHFGAVACRKKGSFVIKNKHGKLIAETSYKNCKMLSKADGYEYTIEPMEVDGIPLTLKL

SEQ ID NO: 3048 - protein, 499 aa, unidentified
MRYVYVLDQEGRPLMPTSRFRKVRRMLKAGQARAVSTLPFTIQLTYRPKTQERQAVVAGIDPGRTNIGLAAVREDGICLYQAHGTTRNKEIVNLMSDRLASRRASRRGERLARKRQAKRLHTTAKKLLDRILPGCREPLAVKDIINTEARFNNRLRPQGWLTPSATQLLRTHVNLLKKMQEILPVSDVVVELNRFAFLQLDQPGVRKKDIDFAHGALYGTGGLHAAVRELQQDRCLLCREGEIEHFHHIIPRSRRGSDTLANLAGLCERCHELVHKHAEAADRLQERKNGLEKRYGGTSVLNQIIPTLMQNLGECFPGHAFATTGWKTKEFREAHELEKDHAVDAYSIAGSILQPSVLDLAVEGYEILQFRRHSRANINHQTERTYLLDNKTVAKNRRKRMDQKTDSLQEWYEDAAARYGEKQADRLRSRLTVKKSTRYYNSKDRLLPGTIFSYEGKRYVLTGQLTGGAYYRAYGQGKKNFPAKKVRILCQNEGLVYAS

SEQ ID NO: 3049 - protein, 427 aa, Methanosarcina sp.
MLVFVINQNKKPLMPCKPSKARKLLQAGKAKVVRNTPFTIKLLFGSSGYTQPVIAGMDTGSKVVDCAAIANGKVLYQSEIYLRENVSKKMQQRKMYRRTRRDRKTRYRPARFDNRGNSRRDGRLAPSIKSKLESHFREKRFVESLLPVTGWKVELASFDIHKITNPEVSGVGYQEGDLKGFYNVKAYVLDRDSYTCQHCMGKSKDSRLHCHHIVFRSQKGSDAPENLITLCETCHKALHNGEFKLSGKKSKTKHATEIGILKSQIRKSGWSFAETFGYETKYRREQVLKLLKTHYFDAVAICCRDDQNVEIEDSVFLKRNVSKGDHQQRRGKRSEKKIPTGKLFGLRKFDQVKTENGIGFIRGKRSSGYFSISDIFGNKISDSVNVKKKCRRLNARSTTLVQMVQMTHSSPTCHFRQAGNVEEGVSC

SEQ ID NO: 3050 - protein, 346 aa, Arthrospira sp.; identical to SEQ ID NO: 2872

SEQ ID NO: 3051 - protein, 408 aa, unidentified
MVYVQDINGKPMMPTTRHGKVRRLLKSNKAVVVNLCPFTIKLMYVTSDYKQEIVLGVDAGTKHVGLSATTKSKELYSSEVILRNDIVDLLSTRRELRRSRRNRLRYRKPRFDNRIKSKRPGWVAPSVRYKIDAHIRVIDNVCSILPISRIVIEVAQFDTQKINNPNISGKEYQEGDQLGFWNVREYVLARDGHKCQHCKGKSKDPVLNVHHIESRKTGGDSPSNLITLCETCHKEYHKGNIDLKIKRGSSLRDAAVMGIMKWRLYEELRSKYNRVSMTFGYVTKYNRIKHGIEKSHVFDAFVISKNFDAIRLGYYYKVRLVRRHNRQIHKQKIPKGGIKRPNQSPFEVFGFRLFDRVMFENSYYFIFARRKTGSFNIRDIDGKNQRDITYKKLKLSRCKRFMVQKEMD

SEQ ID NO: 3052 - protein, 318 aa, unidentified
LVKKIQKFLPISDVVLEVNKFAFMRLDNPDIQKWQYQQGPLYQKGSLENAVSEMQEHHCLFCDKPIDHYHHVVLQSENGSNTIANIVGLCSEHHNLVHKDAAWQKKLAEEKVGLNKKYGALSVLNQIIPALTNKLSVLFPKHFFVTTGKSTHDYRESHSVSKDHWLDAYCIACSVLPSNVCDSNINNHVPYELKQFRRHDRRALHKENMSRVYTLNGKAVATNRHKAIKQTTDSLEEFRQSHPGDVCKLKVKEHHPAYRNLNRNHPGSVFFVGEQAHVMQSIVASKDGKATRYKDTNVNKIAAGQCRFVAKNEGIVFT

SEQ ID NO: 3053 - protein, 431 aa, unidentified
MPNKVYVINKHGRPLMPCSPAKARHLLDEGKAKIKKRTPFTIQLVYGSSGYTQEVILGVDAGSKTIGMSTSTKKEEVFAADVTPRNDVVDLMSTRREFRRARRNRKIRYRKPRFDNRVRSKHKGWLAPSEEVKIQEHITSIKRVCRILPVSKVVIETAEFDLQLLKAIEEGKPVPQGEDYQQGEMYGHYNVRQYVLWRDDYTCQCCGAHTTKKKEVRLHVHHLESRKVGGDAPDNQVTLCESCHEKLHKGLIAEKDFKKRKRRSTRDATFMGIMRKTLIQRLRAELTIPVAETRGYITKATREKLLVLPKSHTNDALAIAQGKRGFNVGYPPEIAQIDKIYTIRPVRHHNRQLHKATILKGGIRKSNQTEKYVFGYRLFDKVQFNGQDCFIWGRRTTGIFTIKTINGKMIKDGISFKKLKLVEKSTSYLIA

SEQ ID NO: 3054 - protein, 423 aa, Arthrospira sp.
MSNHIFVLDTNRKPLIPCKPGVARSLLKAGKASVFRRYPFTIILNKEVDANPEPLELKLDPGSKVTGIALKQGNHIIFAAELQHRGQQIKEALLSRRQLRRSRRNRKTRYRPARFLNRTRPEGWLAPSWQHRVDTLMTWVHRFRRLAPVGRITQELVRFDLQLMENPEISGVEYQQGELQGYEIREYLLFKWGRTCAYCGAQNVPLEVEQIQPRSKGGSDRVSNLTMACHSCNQAKGNGDIRDFLSGQPDVLSRLLRQAKSPLKDAAAVNSTRWALFKALKATGLPVTTGTGGQTKFNRLRLNLPKAHWLDAACVGPVESLEVLTSKPLLILAKGHGTRQMCGTNKYGFPNRHRSRRQIHKGFQTGDMVTATVTAGKKIGSYLGRVLCRASGSFDITTASVRVAGISHKYCQPIHRKDGYAYA

SEQ ID NO: 3055 - protein, 438 aa, Methanosarcina sp.
MIFVLNKNKQPLSPCHSAVARKLLKTGKAVIHKKYPFTIRLKELKTSINKAEFRLKIDYGSRHTGLAILNGSKVIGLAQIHHKTSIKSNMDSRRAMRRTRRNRTTRYRKPRFNNRKRKERWLPPSLQSRVDNIQNWINRLQKLCPLTHISYENAKFDTQLMQNPEVSGVEYQQGELQGYEVREYLLEKWNRKCAYCGAENVPLEIEHIIPKARHGTSRVSNLTLACRTCNEAKGTKTAEEFGYPDIQKQARIPLRDATLVTATRWKVYSVLVETGLEVECGTGARTKMNRIRLNLPKDHHFDAICVGASTPDKIIFKTNQVLHIKAKGRGSHCRTNLDKYGFPRGYLSRQKSFFGFQTGDIVKAVVPKGKYKGILFGAVACRKTGYFDIKNKEGVRIGQGINHKYCNILSRADGYEYATEHLEVDGIPLTTEVIGILP

SEQ ID NO: 3056 - protein, 359 aa, Methanosarcina sp.
LLTEKCCISPKSTLEKTFQKRWNNGRCTGEPEEVEKQGIDLQDLLTGEIQGEKGRLAPSIKSKLEAHFREKMFVESLLPVTEWKVELASFDIHKITNPEVSGIGYQEGDLKGFYNVKAYVLDRDGYTCQHCRGKSKDSRLHCHHIVFRSQKGTDAPENLITLCETCHKALHNGEFKLSGNKSKTKHATEIGILKSQIRKSGWSFAETFGYETKYRREQVLKLLKTHYFDAVAICCRDDQNVEVEDSVLLKRNVSRGDYQQRTGKRSEKKIPTGKLFGLRKFDLVKTSKGIGFVKGKRSSGFFAISDLFGNKISDSVNVKKKCRRLSARSTTLVQMVQMTHSSPTCHFRQAGTVEEGVSC

SEQ ID NO: 3057 - protein, 512 aa, unidentified
MSTVYVLNKDGKPLMPTTRCGHVRHLLKEQKARVVASKPFTIQLLYKTNDVVQPLYLGIDPGRTNIGVAVVKADGTAVFTAHLETRNKEIPKLMKKRKDSRRARRTNGRRCRRQRRAKANGTISKKCVKHDTAQNGSVSKRAKEIGVIKRHLPGCEKDVLCIGIKNKEAKFSNRTRPEGWLTPTANQLLQTHINLVKKIRKFLPISDAVLEINKFAFMQLDNPNIQKWQYQQGPLYQKANLEEAVSEMQEHHCLFCKKPIAHYHHVVPQSENGSDTIGNIVGLCTKHHDLVHKDTAWQKKLAKKKTGLNKKYGALSVLNQIIPALTKELSSLFPKHFFATNGKSTYDYRSAHGVSKDHWLDAYCIACSVLPNDVCDSGINNRVPYELKQFRRHDRRALNNENMSRVYTLNDNVVATNRHKATKQTTDSLEEFRQNHPDDVCKLKVKEHHPTYRNMNRNYPGSVFLIGKQVHVMQGIAGSKDGEATTYKDTNANSIAAGKCKFVAKNSGILFV

SEQ ID NO: 3058 - protein, 418 aa, Moorena sp.; identical to SEQ ID NO: 2704

SEQ ID NO: 3059 - protein, 310 aa, Moorena sp.; identical to SEQ ID NO: 2916

SEQ ID NO: 3060 - protein, 427 aa, Methanosarcina sp.
MFVFVLSKDGNPLMPTKPAKARILLKTGKAKVVRTTPFTIKLLFESSGYTQPVTAGIDTGSKAVGCAAIASGKVLYQSEISLRENVSKKMQQRQMYRRSRRSRKTRYRPARFDNRGNSKKEGRLDPSIRSKLEAHFREKRFVESLLPVTEWKVELASFDIHKITNPEVSGKGYQEGDLKGFYNVKAYVLDRDGYTCQHCRGKSKDSRLHCHHIVFRSNQGTDAPENLITLCETCHKALHKGEFELSERRSNTKHATEVGIVKSLIKKSGWSFEEVFGYETKFWREQVLGLEKTHYFDAVAICCGDKQTVEPDDTVYFKKHVPAGDYQQTKGKRSEKNIPTGKLFGLRKFDLVKTEKGIGIVWGKRSSGYFSISDIFGNKISDSVNVKKKCRRLSARSTTLVQTIQLTHSSPTCHFRQAGTVEEGVSC

SEQ ID NO: 3061 - protein, 451 aa, unidentified
VLHARNLSITLAKVSYGLYDAGLPQKIIQKERSTYMVYVLSQNGQPLMPTIRHGKVRRLLKEGKANVVKKCPFTIRLTYPSGDQTQEISLGIDSGSKYIGISATTQKKVLYEAEVELRNDISKLLAARRQNRRSRRSRKTRYRKPRFDNRKRKEGWLAPSVQQKVDCHLKVVEDVCKLLPVTRIIAEVASFDIQKIKDPKIHGTDYQQGDQLGFWNVREYVLFRDGHTCQCCKGKSKDKILNVHHIESRQTGGNAPNNLITLCETCHKGYHKGQVKLPKKIKRGMTFKDAAFMGIMRWAFYDRLKEIYLPLGIDVSLTYGYLTKNTRIAHQLPKTHYLDARCISGHPDAISDGIYYHQKKIRCHNRQLHKANTLKGGIRKRNQAEYLVHGFRLFDKVRYQGKDYFIFGRRKSGYFDIRDLNGEKVNKGSISYKKLRLVETRRSYLTERRLA

SEQ ID NO: 3062 - protein, 431 aa, unidentified
MDAWDIIVILNKRGKPLMPCSPAKARLLLKEKKAIVKRRTPFTIQLTIATGETNQPVSLGVDAGYKHVGLSASTEKAELYASEVELRQDVSDLLSARRALRQSRRNRKTRYRAPRFNNRLRTKRKGWLAPSVENRINAHLSRIEAVLRLLPVTKITVETASFDLQLLKNPDISGKEYQEGEQLGFWNVREYVLFRDGHVCQHCHGRSKDPVLNVHHLESRRTGGDSPGNLITLCETCHKALHRGEITLKTKRGQSFRAEAFMGIMRWEVLNRLKASHPELEVNNTYGYRTKHARIANGIAKSHCADAFCIAGNLGAERLGEFFFQKQTRRNNRQIHKLSILKGGIRKRNQAPFEVKGFRLFDKVSCKGEEGFIFGRRSSGFFDVRKLDGTCISAGISYKKLHLLEKRRTYLTEIRKEEALPPLPEGRGLRA

SEQ ID NO: 3063 - protein, 423 aa, Moorena sp.
MRVFVLNSNRQPLDPCKPARARILLSTGKAKVYRRYPFTIILTEEIQEPITHGSQFKIDPGAKTSGLAIVQGNRIVWGGELTHRGFQIRDALTSRRQLRCARRNRKTRYRKPRFLNRSRPEGWLAPSLMSRVHNILTWVKKLTRLCPIAGISQELVRFDTQKLQNPEISGIEYQQGTLYDSIFREYLLEKWNRKCAYCGTTGTQLEIEHIKPLSKGGSNRVSNLAIACHSCNQSKSAQEIEQFLSGKPDVLKRVLSQAKRPLTDAAAVNTTRWKLYHELKSIGLPVEVGSGGLTKFNRCRQNLPKTHWLDAANVGKVDTLIIEGYQPLLIAAKGHGTRKICRTNKYGFPIRYCSRTKIHKGFQTGDIVRAVVTKGKKIGTYVGRVATRKSGSFNISTKSGLVQGISHKYCQFIHRKDGYAYRH

SEQ ID NO: 3064 - protein, 408 aa, unidentified
MVYVQDINGKPLMSTTRHGKVRRLLKDKKAVVVNLCPFTIRLTYISDSYKQEIVLGVDAGTKHVGLSATTKSKELYSSEVILRNDIVDLLSTRRELRRTRRNRLRYRKPRFNNRVKNKRPGWIAPSVRYKVDAHIRVIDNVCSILPISRIVVEVAQFDTQKTNNPEISGKEYQEGDQLGFWNVREYVLARDGHKCQYCKGKSKDAILNVHHIESRKTGGDSPSNLITLCETCHKEYHKGNIDLKIRRGKSLRDAAVMGIMKWRLYEELKSKYDRVSMTFGYVTKYNRINHDIEKSHVSDAFVISKNFNAIRLGYYYKVRLVRRHNRQIHKQKIPKGGIKRLNQSPFEVFGFRLFDRVMFENSYYFIFGRRKTGSFNIRDIDGKNQKNVTYKKLKLSRCKRFMIQKEMN

SEQ ID NO: 3065 - protein, 449 aa, unidentified
  REGION 1..449: note = Ga0307928_10039402
METEMQQLGKRNTYTPLGASQAHRSVTMSLNREETLSEHGSKTFSNNLDVNQQSSKTERNLRVFVINLRQQSLMPCSSSRARILLKQKKAKVVSSQPFTIQLMSPTGETKQDLTLGIDAGSKYIGFSVVDNNKELLSGEFELRQDVSKKISDRAMYRRNKRNKLWHRKPRFMNRSKPKGWLAPSIQHKVDTHIRLVEEIKSLLPIHKTIIEVAKFDTQKLQDVDIEGAEYQQGKMEGWDNLRAFILCRDNYTCQICKKQKGIFDIHHIIQRKDNGSNRPDNLVCVHTDCHKKFHAGKIKHTFKKPKQFKETVIMNNIKKYVVDKLDCAYTYGYITKRHRLNLELEKTHYNDAFVIAGAVNQERTSILKSKQIRRNNRCLQLNRNGFKPSIRKQRYPIQPKSIVKWNNKNYVVNGTHNKGKSVVLYVGDKKKSVSVNHLEMVNYSRGILC

SEQ ID NO: 3066 - protein, 433 aa, Methanosarcina sp.
MLVFVINQNKKPLMPCKPSKARKLLQAGKAKVVRNTPFTIKLLFGSSGYTQPVIAGMDTGSKVVSCAAIANGKVLYQSEIYLRENVSKKMEQRKMYRRNRRGRKTRYRPARFDNRGNSTKGGRLAPSIRSKLEANFQEKRFVESLLPVTGWKVELASFDIHKITNPEVSGVGYQEGNLKGFYNVKAYVLDRDGYTCQHCMGKSKDSRLHCHHIVFRSQKGSDAPENLITLCETCHKALHNGEFKLSGKKSKTKHATEIGILKSQIRKSGWNFAETFGYETKYRREQVLKLLKTHYFDAVAICCRDDQKVEVEDSVFLKRNVPAGDYQQRRGKRSEKKMPTGKLFGLRKFDQVKTEKGIGFIRGKRSSGFFTLCDVFGNMITTSVNIKRNCRRLRAASTTLVQMVQMTHSSPPLKVRGILLSCPETENYKMQEI

SEQ ID NO: 3067 - protein, 456 aa, unidentified
MAVFVLNKHRQPLMPCSEKRARLLLERGRAVVHKRYPFTLRLKDRVGGDTQALRLGIDPGSKTTGLALMRDTADGQRHVLCLFDLNHRGFQIKKALAQRAAFRRRRRSANLRYRAPRFNNRTRPQGWLAPSLQHRVDTVMAWVRRLSTLAPITALSQELVCFDTQKLKNPELSSVEYQQGALLGYEVREYLLEKWGRECAYCGTGDTPLEVEHVVPRSRGGSNRVSNLVIACHDCNSAKSSQPLTDFFATDKGLRKRLKVNGHTADTRLDRVQRQLKQPLRDASAVNVTRWVLFNALKATGLPVSVSSGGRTKYNRLRLGIPKTHALDAACVGAFDTLHDWQVTTLTIKAMGRGSYQRTRLTKHGFPRGYLMRQKQVHGFQTGDMVKAIVPTGKTVGSYTGRVAVRKTGRFNIQTEQGAVQGISHKYCTVIQRGDGYGYHLTPSINLTGGAGQAVA

SEQ ID NO: 3068 - protein, 429 aa, Moorena sp.
MCNYVFVLDASHKPLNPCRPVTARKLLTAGKAAVYRRYPFTIILKKQVDGVAKPMSLKIDPGSKITGLAIVYGNQVVWSAEIEHRGSKIKSALDSRRAVRRSRRNRKCRYRKPRFNNRKRPEGWLAPSLQHRVATTMTWVLKLMKLTPIGGISQELVRFDTQKLQNPEISGIEYQQGELMGYEVREYLYQKWGRQCVYCGANSVKLEVEHIVPKSKGGTNRVNNLTLACHGCNQAKGNLDARDFLSGKPDVLKRILGKAKQPLLDAAAVNSTRWQLYQSLKETGLSVAVGTGGRTKYNRIKLGLPKGHWVDAACVGEVATLKIVTRQPLLIKAMGHGCRQVIQMDKYGFPRKGYKPKHPVKGWKTGDIVNVVAGKNAGLKGVRIKSVRAKGNFDLIGSFNGASNKVLSASQNYIQCVHRHDGYSYSFAE

SEQ ID NO: 3069 - protein, 416 aa, unidentified
MVYVLDKNGQPLMPTDRHRKVRLMLQSGQAKVIKRCPFTIQLNYDSGHQTQEISLGIDAGSKHIGVSTTTKIKVLYEVDVELRNDIVDLLSSRRELRRGRRNRKTRYRQAKFNNRRRGNGWLAPSIRQKIGTHLTVVENICKMLPISRIMVETASFDIQKIKNPDIQGAEYQQGDQLEFWNVREYVLFRDGHTCQCCKGKSKDKILNVHHIESRKTGGNAPNNLITLCETCHTGYHKGTVQLPKAIKRGMRFKDAAFMGIMRWAFYEALKQQYEPVGTPVHNTYGYITKHTRIEHNLPKEHYIDARCISGNPDAFPSGEYYYQKKVRCHNRQIHKLTILKGGIRKQNQVTYLVKGYRLFDKVSYQGKGYFVFGRRQSGFFDIRTLSGEKVNKGSLSCKKLKFIATRTYYLTERRAV

SEQ ID NO: 3070 - protein, 465 aa, unidentified
MSTCVCVLSNNGERLMPTIRLGKVRHLLKDGKAKIIKHHPFTIQLLYDSETNIQPIEICEDVGYNYIGISVKSQSHEYVSAQYDTLQDEKSCHDACRRMRRTRRNRLRYRQKRFDNRKRDKGWLAPSLKHKKELNVNVIKMYCEVVPITHATVEVGSFDTMLVKAIEEGKATPEGADYQKGPRYNLATLREAVFYRDNYTCQVCGREASEGAILHVHHMFYWKGRHDNSLSELITVCEKCHTPANHQKGGKLYGFGEDIKFANLSGAAFMNTVRWQIVNELYAAFGKPFVTFTYGAMTKEKRIALHLEKSHNNDAYAMGEFHPNCRCTFEHYEKVRRNNRILEKFYDSRYIDIRTGEIATGKELFNGRINRSHKKDSENLHKYRGKRIRKGYRALRRKKVALNPGDLVSLNGEILTVHGTHTKKNGSVNVEFKTPSKSGKKSTSLKKLKIIKTISPMRSAWDKVS

SEQ ID NO: 3071 - protein, 425 aa, Calothrix sp.
MQQNYVFVVDTNKQKLNPVTPKQARRLLEKGKAAIYRMYPFTLILKTAIDSPTIKTLTLKLDPGSKFTGIALLEGENVIWCAELEHRGYQIKDALLSRRQLRSNRRSRKTRYRKPRFDNRKCEENWLPPSLEHRILTTETWVKRLMRYASITELWIEKVKFDMQQMQDPEISGVEYQQGELQGYQVREYLLETWGRECTYCGKKDVPLQIEHIYPKSKGGSNRVSNLCLACEKCNQKKSNKPVEEFLKRKPDLLKKIQSKAKKPLLDAAAVNATRNKLVKVLSNLLPTKTATGAQTKFNRTRLNLDKQHWIDAACVGDVQNLKLLTKQPLKIKCNGHETRQICRTDKYGFPARYVPRFKFVKSFQTGDIVKAIVTSGKKIGEYIGRIATRSTGSFNISTRKKLVQGISYKYCKTIHKKDGYSYAF

SEQ ID NO: 3072 - protein, 415 aa, unidentified
MENKIEYCFVIDKNNKPLTPTKVNKGWYLIRKGRAKLKSKYPMVIQLEKEVKSDEDDESHIVCGIDDGSAHVGLAIVQKCPTKNKVVFKGTIEQRQDVKRLMDVRRGYRRYHRYHKRYRQARFNNRSSSKRTCRLAPSIKQKKDAILRVLYQLNKWVNIQEYYLEDVCIDIRAMTDDYKPYRWQYQKSNRLDENLRKATILRDGCRCQECGKSNCILEVHHIRARRYGGANTIGNLITLCKKCHDKTESREKDFEERYFNMIKSKPKRFDYAMHVMQGKTYLREKISELGILHLTNGGETANKRIEWDIVKSHSNDAICIADGIPDTCDIKEWIIKPMRRKSKAKTDNVLGIKHRDLVSYTYKSGETHTGYVTALYPEQLALNFQSKTKHCKKVNARKCRLLWKFNKIYWLEQCV

SEQ ID NO: 3073 - protein, 424 aa, Moorena sp.; identical to SEQ ID NO: 2969

SEQ ID NO: 3074 - protein, 423 aa, unidentified
MSNHIFVLDTNRKPLTPCKPGMARSLLKAGKASVFRRYPFTIILNKEVDANPEPLELKLDPGSKVTGIALKQGNHIIFAAELQHRGQQIKEALLSRRQLRRSRRNRKTRYRPARFLNRTRPEGWLAPSLQHRVDTLMTWVHRFRRLAPVGRITQELVRFDLQLMENPEISGVEYQQGELQGYEIREYLLEKWGRTCAYCGAQNVLLEVEHIQPRSKGGSDRVSNLTMACHSCNQAKGNGDIRDFLSGQPDVLSRLLRQAKSPLKDAAAVNSTRWALFKALKATGLPVTTGTGGQTKFNRLRLNLPKAHWLDAACVGPVESLEVLTSKPLLILAKGHGTRQMCGTNKYGFPNRHRSRRQIHKGFQTGDMVTVLVTAGKKIGSYLGRVLCRASGSFDITTASVRVAGISHKYCQPIHSTDGYAYA

SEQ ID NO: 3075 - protein, 293 aa, unidentified
SVEVKIQEHITVIKRICRILPITLVRVETAEFDTQRLKAMLAGKPLPVGTDYQLGEMYDEYNARQYVLKRDHYTCQCCGAHTTTMKSVKLHVHHLESRKVGGNAPSNLITLCTTCHDNLHKRKVTLDGKKRGKTLRDAAFMGIMRKALMARLKEELSIPVQETYGYITKMRREQNDIKKSHVNDARCISKHPLAEPCSVCYRTKAIRHHNRQIHKANFSKGGYRKRSQMSYIVEGYRLWDKVLYKGQECFISGRRASGRFALKKLDGTSISKSVTFKKLRLLEPATNYLIERM

SEQ ID NO: 3076 - protein, 438 aa, Methanosarcina sp.
MIFVLNKNKQPLSPCHSAVARKLLKTGKAVIHKKYPFTIRLKELKNSENKAEFRLKIDYGSRHTGLAILNGSKVIGLAQIHHKTSIKSNMDSRRAMRRTRRNRTTRYRKPRFNNRKRKEGWLPPSLQSRVDNIQNWVAKLQKLCPLTHISYENTKFDTQLMQNPEISGVEYQQGELQGYEVREYLLEKWGRKCAYCGAENVPLEIEHIIPRARKGTDRVSNLTLACRTCNEAKGTMTAEEFGYPEIQKQARIPLRDATLVTATRWKVYNTLTEKGLEVECGTGARTKMNRIRLNLPKDHHFDAICVGASTPNKIIFKTNSVLHIKAKGRGSHCRTNLDKYGFPRGYLTRRKSFFGFQTGDIVKAVVPKGKYKGIHFGAVACRKTGYFDVKNKEGIRIVQGINHKYCNILSRADGYEYATEHLEVDGIPPTTEVIGILP

SEQ ID NO: 3077 - protein, 472 aa, unidentified
VVGNRLLSIKPLINIGEGVIYSSICTGLSLQTYQKRKEVPCMVYVLDINGQPLMPTTRHGKVRRLLNSHLAKVVKRCPFTIQLLYQSTKEIQPVSLGVDAGSKHIGMAATTEKKVVYQEELSARNDVVKLLSARRTLRRTRRNRKTRYRKPRFNNRVHSKHKGWLAPSVEVKIQEHITTIKRICQILPISEIQVETAEFDLQRLKAMEEGRTPPVGTDYQLGEQYDFYNTRQYVLHRDGYTCQCCGTHDNNIKLHVHHIESRQTGGDAPNNLIILCEHCHKALHEGKLELPKGKKRGESYRDATFMGVMRKTLLERLKKEIDVPVEGTYGYITKYWRERAGLEKSHIHDAVCISQYPYAKPLDIYYLTKTVRHHNRQIHKSNFSKGGIRKRNQAPYLVKGFRLFDKVLYQGKEYFIFGRRATGYFDIRTLDGTKVNKGSVSYKKLRIQDTAKAYLKEARAIPHMNKFTCILA

SEQ ID NO: 3078 - protein, 517 aa, Streptosporangium sp.
MATLNTRQQTHRRVLPQPAALESVGADTPQGRDETAHGHRHTAVPGVRHGRGETAADGTRPPRRHPGPASAGKGAGSQAHPAVFVLDRHGRPLQPTSPACARKLLRSGRAVVHRHTPFVIRLKDRAAADSTVQGVAVGIDPGSKHTGIAVFTEHDESRTGVYALQLDHRGGRIRDRLTARAARRRGRRSRNLRYRAPRFRNRTRPEGWLAPSLQHRVDTTMSWVGRLRRWAPVTAVHMERAAFDTHALSADRALEGVEYQRGTLAGYEVREYLLTTWGRRCAYCGATGVPLNIDHIHPRSRGGSGRIANLTLACVPCNQAKNATPIEEFLKTKPALLARILARAKAPLRDAAALNATRWALWRALEATGPPVATASGGRTKWNRSRTGAPKSHTLDALHVGWLETVTGWPSALLVVTATGRGAYARTTPDRYGFPRLTRPRSKRHHGFQTGDLVRANVPTGRKAGVHLGRVLVRSSGFFDITTRHGRVAGINHKHVRHLQRADGYGYTTQKEADRND

SEQ ID NO: 3079 - protein, 423 aa, Arthrospira sp.
MSNHIFVLDTNRKPLTPCKPGVARSLLKAGKASVFRRYPFTIILNKEVDANPEPLELKLDPGSKVTGIALKQGNHIIFAAELQHRGQQIKEALLSRRQLRRSRRNRKTRYRPARFLNRTRSKGWLAPSLQHRVDTLMTWVHRFRRLAPVGRITQELVRFDLQLMENPEISGVEYQQGELQGYEVREYLLEKWGRTCAYCGAQNVPLEVEHIQPRSKGGSDRVSNLTMACHSCNQAKGNGDIRDFLSGQPDVLSRLLRQAKSPLKDAAAVNSTRWALFKALKATGLPVTTGTGGQTKFNRLRLNLPKAHWLDAACVGPVESLEVLTSKPLLILAKGHGTRQMCGTNKYGFPNRHRSRRQIHKGFQTGDMVTATVTAGKKIGSYLGRVLCRASGSFDITTASVRVAGISHKYCQPIHRKDGYAYA

SEQ ID NO: 3080 - protein, 373 aa, Moorena sp.; identical to SEQ ID NO: 3006

SEQ ID NO: 3081 - protein, 423 aa, Moorena sp.; identical to SEQ ID NO: 3011

SEQ ID NO: 3082 - protein, 421 aa, unidentified
MQYVYVLNMHGEPLMPCSPRKARLLLKEGKARVVKRTPFAIKLLYGSAGYKQPVTLGVDAGSKHVGLSACTESRELYKEELTPRNDVVELLSARRQYRRSRRNRKTRYRASRFDNRVHSKHKGWLAPSVEVKIQEHITAIKRVCKILPVTLIRVETAEFDTQRLKAMLEGKPLPVGKDYQLGEMYDEYNVRQYVLKRDNYTCQCCDAHPTIKKPIRLHVHHLESRQTSGNAPNNLIVLCEHCHKALHEGKIKLKNGKKRGKPLRDAAFMGIMRNTLLARLRKELPIPVEQTYGYITKLLREKNKISKSHVNDARCIAGFPNAESCDTMFRTRALRHHNRQIHKAKTLKGGIRKKNQAPYLVKGFRLWDKVRYNGEECFISGRRSSGYFALKKYNGAVVSSGVSYKRLTLLEAATNYITERS

SEQ ID NO: 3083 - protein, 420 aa, unidentified; identical to SEQ ID NO: 2959

SEQ ID NO: 3084 - protein, 413 aa, unidentified; identical to SEQ ID NO: 2636

SEQ ID NO: 3085 - protein, 509 aa, Streptomyces sp.
LATFRVGEKTDQAVLPQQLALELDPADNPGIRDETGAERRKAPGAEPGREETATASPGGSGVTPNPTVGEKPRERHPFVFVLDKHGHPLQPCTPARARKLLKKGRAVVHRHTPFVIRLKDRTVAESEVDGVELGIDPGSKHTGIAVFSAQAGQRRGRYALQLDHRGAAIRRKLEQRSAYRRGRRTRNLRYRAPRFLNRRRPDGWLAPSLQHRVVTTMSWVKRISRWAPARAVHVERIAFDTHAISAGNALEGAEYQQGTLHGYEAREYLLAKWGRSCAYCGAQNTPLNIDHIHPRSRGGTDRLSNLCVACIPCNQTKSNRPVEEFVKNKTKLAKLLAQAKAPLRDAAAVQSTRWALWRALDALLPTHTASGGRTKWNRTRCRLPKTHTLDALAVGKLESVTETVITVLAAGCTGRGTHTRTRADKHGFPRLHMPRQKTFYGFQTGDLVRAVVPTGKHAGTHTGRVAVRATGSFNITTRYGTAQGIRHKHLRLLQRADGYAYTTRPEQTD

SEQ ID NO: 3086 - protein, 427 aa, Methanosarcina sp.
MLVFVINQNKKPLMPCKPSKARKLLQVGKAKVVRNTPFTIKLLFGSSGYTQPVIAGMDTGSKVVGCAAIANGKVLYQSEIYLRENVSKKMEQRKMYRRTRRGRKTRYRPSRFDNRGNSRREGRLAPSIRSKLESHFREKRFVESLLPVTGWKVELASFDIHKITNPEVSGVGYQEGNLKGFYNVKAYVLDRDGYTCQHCMGKSKDSRLHCHHIVFRSQKGTDTPENLITLCETCHKALHNGEFKLSGKKSKTKHATEIGILKSQIRKSGWSFAETFGYETKYRREQVLKLLKTHYFDAVAICCRDDQKVEVEDSVFLKRNVSAGDYQQRRGKRSEKKIPTGKLFGLRKFDFVKTENGIGFIRGKRSSGYFSISDIFGNKISDSVNVKKKCRRLSARSTTLVQMVQMTHSSPTCHFRQAGNVEEGVSC

SEQ ID NO: 3087 - protein, 416 aa, unidentified
VSEITSYAFVLDVNGKPLAPTKEQKAWFLIRKKRAALVSKYPMVIQLKKEIPENKICKDEIRCGIDDGGLHVGIALVQKCKTKNKVVFKGTIEQRNDVKHLMEVRRGYRRYHRYYKRYRQARFDNRKSSKRKERIAPSILQKRQATMRVIHRLNKWINITNYWLEDVSVDIRALTDGYKPYRWQYQKSNRLDENIRKAAILRDGSKCMECGRANCRLEVHHIKPRRRNGSNTLDNLITLCESCHQKTEGQEELYMDRYFSLLKSSDHKNLNYAQHVMIGKKWLRKQLSNLGVLYLTNGGDTANKRIDWNVEKSHANDAVCITDLQPDTYDMKEWAIKPMRRKSKAKTDHVLGIRHRDLVEYTFKNGETHRGYVTALYPEQKAINFQSPTKHCKKVNARKCKLLWKYSKIYWFENAS

SEQ ID NO: 3088 - protein, 551 aa, Streptomyces sp.; identical to SEQ ID NO: 3044

SEQ ID NO: 3089 - protein, 420 aa, unidentified
MQYVYVLNKHGEPLMPCSPRKARLLLKQKKACVIKRTPFTVKLLHGSAGYKQPVTLGVDAGSKHIGISATTEKHELYREEATPRNDVVDLLSARRAFRRSRRNRKTRYRAPRFNNRVHSKHKGWLAPSVEVKIQEHITLIKHVFRILPVTLVRVETAEFDTQRLKAMLEGKPLPVGTDYQLGEMYDEYNVRQYVLKRDNYTCQCCGAHSTKTKGVKLHVHHIETRRTGGNAPNNLITLCKACHKALHAEKVTLDGKKRGKPLKDAAFMGIMRKTLMERLRKELKIPVQGTYGYITKYLREKNGIPKSHTNDARCISKNPLAIPCDTCYYTKAVRHHNRQLHKATILKGGIRKANQAPYIVKGYRLWDKVAYNGTECFITGRRTSGYFALKELDGTVVSNSISYKKLRLLEAATNYIIERK

SEQ ID NO: 3090 - protein, 523 aa, Ammonifex sp.
LNAGVPFAEPDVPGRHSQSRETPVQSRGLTRGATVCLRETHRRLVPGSQGSSQGEVSEMVFTVDKNGRPGHPTRRYDMIRKLRKRGKARIVGGGASGKPPVVIFLDREFDYSRTVGRKLVVALDPGYRYIGFAVCEPRGRELIVYCRGVLHTRIPEIKGLMGERRAHRRFRRYIARYKKRRLSARKGRVLTKYKVPRDVRSRDRSNATLRHGVETHLNLYRKLLRFFPFPAHQVQFVMEDNVFDVRAMTWGKVYGADYQKSPRVPESERKCVLCGSREGLHRHHLVPRKRGGTEVRENKVCLCKGCHEDVHAGRVYLPVGGVKQWRELGTMNAVVGVLREVPWINFVPAPDAVLKRRELGLEKGHAEDALAAAAAFCGSAELRTSWERCFTLVKFRRHSRARVHAQRDRLYKINGVIVARNRRKKTDQKEASFADISPLPREWQRNLKVYPGTKVLNPFRRDTPSVGGDVWVHVPTGKRFVVTSVTSKEYLYSPQLKEIVGKPYVRPDLCRRVIRNEGIVVWE

SEQ ID NO: 3091 - protein, 423 aa, Arthrospira sp.
MSNHIFVLDTNRKPLTPCKPGVARSLLKAGKASVFRRYPFTIILNKEVDANPEPLELKLDPGSKVTGIALKQGNHIIFAAELQHRGQQIKEALLSRRQLRRSRRNRKTRYRPARFLNRTRSKGWLAPSWQHRVDTLMTWVHRFRRLAPVGCIAQELVRFDLQLMENPEISGVEYQQGELQGYEVREYLLFKWDRTCAYCGAQNVPLEVEHIHPRSKGGSDRVSNLTMACHSCNQAKGNGDIRDFLSGQPDVLSRLLRQAKSPLKDAAAVNSTRWALFKALKATGLPVTTGTGGQTKFNRLRLNLPKAHWLDAACVGPVESLEVLTSKPLLILAKGHGTRQMCGTNKYGFPNRHRSRRQIHKGFQTGDMVTVLVTAGKKIGSYLGRVLCRASGSFDITTASVRVAGISHKYCQPIHRKDGYAYA

SEQ ID NO: 3092 - protein, 534 aa, Micromonospora sp.
VVDQPQKLLREGSTLYTGVKTHSGVLPQPRTMESASADTAPRSHETGCGRRKAAGVRHGRGETGVSRRHPELASAGTGAGREAHIHPVVFVVDRRHRPLQPCSPARARKLLAAGRAVVHRHTPFVIRLRDRDVECSQVAGVELGIDPGSKFSGFAVFRADDAVRTGLFALEVRHRGGQIRDKLTARAAFRRGRRSRNLRYRAPRFDNRTRPDGWLAPSLRHRVEGIMSWVGRLCRWAPVRQVHVERVAFDTQLMQDPDIAGVEYQHGTLHGYEVREYLLATWGRACAYCGAAGVPLNIDHIVPRSRGGSDRVSNLTLACVGCNQAKGATSIEIFLVDRPAVLARIRSLQKLPLPDAAAVSATRARLWHELHGTGLPVAVATGGRTKWNRHRTGAPKTHTLDALHVGRLTAVKVYPGWVLVAAASGRGSYARTRCDRYGFPRLRLPRSKSVRGFQTGDLVHAVVPSGKNRGRHTGRVAVRNTGSFNIRTRHALVQGVHHRHIRRLQRADGWAYTREEERRFLQALNGQVSTPRMS

SEQ ID NO: 3093 - protein, 378 aa, Moorena sp.; identical to SEQ ID NO: 2642

SEQ ID NO: 3094 - protein, 420 aa, Moorena sp.
MQNYVFVIDANFQPLNPIIPKKARRLLDKGKAAVFRMYPFTIILKTSINNPTISPCKIKIDPGSKVTGFALVQDGQVIWAMELEHRGGLIKKKLSSRSAVRRGRRNRNTRYRKPRFLNRKRPEGWLPPSLEHRILTTQTWVKRLIKFCPVNEIWVERVKFDAQKMQNPEISGIQYQQGELAGYEVREYLLEKWGRECTYCGKKSVPLQIEHIYPKSKGGSERVSNLCLACEKCNQRKGNKPIEDFLKKKPSLLQKIKTKALSPLKDAAAVNTTRNKLVKVLQKTKPVVTGTGAQTKYNRTKLGFPKEHWIDAACVGNIEALTLKTFQPLLVTCKGQGGRQKAALNKYGYPIRHNPLKPIKGWCSGDIAKNLLTGEFGRVNPRSKSNSFNYTVSGKKAISLHVKNLCRVHRKDGYTYGFCQ

SEQ ID NO: 3095 - protein, 493 aa, Streptosporangium sp.
MPGTGMEHGRGEIGSGGTRLHRRHPEGASVSEGANREVHPVVFVLDKHDQPLDPCHPARARRLLAAGRAVVARHTPFVIRLKDRTAADSTIQGVQVSIDPGSKHTGIAVFTEHGGDRSGGYALQLDHRGGQIRDKLTARSQYRRRRRSKNLRYRAPRFKNRTKPKGWLAPSLQHRVDTTMSWVGRLRSWAPVTAMHVEKVAFDTHALSAGKPLEGVDYQQGTLAGYEVREYLLEKWGRACAYCGAQNVPLNLDHLHARSRGGSDRISNLALACIPCNQTKNATPIQEFLTTRPALLTKILKQAKAPLGDAAAVNATRWALWRALEATGLAVATASGGRTKWNRSRTGAPKSHTLDALHVGDLETVTAWPSIVLVVKATGRGTYCRTRTDAYGFPRLRLPRIKQVKGFTTGDLVGANVPTGKKAGVHTGRVAVRSTGRFNITTRHGTVQGIHHRHVRLLQRADGYGYTTHPEARDRSVFSPGPEGSGFHAGGNR

SEQ ID NO: 3096 - protein, 423 aa, Moorena sp.; identical to SEQ ID NO: 2640

SEQ ID NO: 3097 - protein, 446 aa, Methanosarcina sp.
MVFVLNKNKQPLSPCHSAVARKLLKTGKVVIHKKYPFTIRLKELKESERKLKDSESKAEFRLKIDYGSRYTGLAILNGPTVVWLAQIHHKTNIKSNIDSRRAMRRTRRNRNTRYRKPKFNNRGRKEGWLPPSLQSRVDNIKNWVIKLQRLCSLTHISYENVKFDTQLMQNPEISGIEYQQGELQGYEIREYLLEKWDRKCAYCGAENISLEIEHIIPKSRGGTSRISNLTLACHACNQVKGDMTAEEFGYPDIQKQAKKPLKDAALVTATRWKVYNVLSETGLNIECGTGARTKMNRILLNLPKNHHFDAVCVGTSTPNDIIFRTNSVLHIKAKGRGSHCRTNLNKYGFPRGYLARQKSFFGFQTGDIVKAIVPKGKHQGTWIGAVACRKTGYFDIKNKEGVKAAQGINHKYCKMLSRVDGYEYASEHVGVDGIPLMTEVTSILPY

SEQ ID NO: 3098 - protein, 429 aa, Ktedonobacter sp.
MVFVLDRHKKPLMPCTPRRARLLLARKRAVVHRLSPFTIRLKDRSIQQSTLQAVVLKIDPGSKTTGLALARVEETGEGEVHHALHLAELSHRGEEICDRLRKRAGYRRRRRSTNLRYRPARFLNRRRAPGWLPPSLHSRIDNVLSWGRRYQRWVPLVRIAIERVKFDTQLLQHPEISGVEYQRGELAGWEVRAYLLEKFEHRCAYCGCGEVAFEVDHIQPRSRGGSNRVSNLALSCHACNAAKGERTAAEFGHREVAAQAKQPLRDAAAVNATRYALWDELRALGLPLTSWSGGRTRWNRARFSIPKTHALDALCVGELAGVAVGGQSTLAITATGRGRYSRTNVDEHGFPVGYLMRRKQVLDIKTGDRVRAVVPEGFAAQGTHTGRIAVRANKQFRMGKVQGIPARFCRVLQLADGYDYAVVATTLQG

SEQ ID NO: 3099 - protein, 442 aa, Anaerostipes sp.; identical to SEQ ID NO: 2903

SEQ ID NO: 3100 - protein, 451 aa, unidentified
VTTILKTCFAAFNLAKVVVLMDAWDIIVILNKRGKPLMPCSPAKARLLLKEKKAVVVRRTPFTIQLTIATGETKQPVSLGVDAGYEHVGLSASTEKAELYASEVELRQDVSDLLSARRALRQSRRNRKTRYRAPRFDNRIRTKRKGWLAPSVENRINAHLSRIETVLRLLPVTKITVETASFDMQLLKNPDIAEKEYQEGEQLGFWNVREYVLFRDGHVCQYCHGRSKDPVLNVHHLESRRTGGDSPGNLITLCETCHKALHRGEIKLRAKRGQSFRAETFMGIMRWEVLNRLKASHSKLEVNNTYGYLTKHARIKSGITKSHCSDAFCIAGNLGAKRLGEFLFQKQTRRNNRQIHKLSILKGGIRKRNQAPFEIKGFRLFDKVACKGEEGFIFGRRSSGSFDVRRLDGTRISAGISYKKLRLLQKRQTYLTEIRKEEALPPLPEGRDLRA

SEQ ID NO: 3101 - protein, 427 aa, Anabaena sp.; identical to SEQ ID NO: 2799

SEQ ID NO: 3102 - protein, 423 aa, Moorena sp.; identical to SEQ ID NO: 3063

SEQ ID NO: 3103 - protein, 554 aa, Streptomyces sp.
MTTFPVGEQTHLAVLPQQPALESVGADTPGSRDETAHGHPAAVRGTGREHERGETGGLGTGVRRRHAETVAPAAEAAENGSGDAPAHDQSHAGGVGAGRVFVLSKDGRPLMPCHPARARELLGKGRALIARQAPFAIRLKDRTLAESEVDGLCLRIDPGSRGTGLALTDEKSQIDARGQSFTVRRGLVSVELRHRGEQIRLCMRQRAGYRRRRRSANHRYRAPRQDNRSRPAGWLPPSLRHRVDTTCALASRLCRYAPVTEVHVESAAFDVHAMSAGRPLSDVEYQRGTLAGIEARSYLRSRWENACAYCDATGVPLNIEHLTPRSRGGSNRITNLVLACVPCNRAKGSMPVEGFLADRPDRLAKILRQARAPLGDAAAMNATRRQLLESLGILGRPLNAWSGAQTQWNRHATGLGKTHTVDALCVGGMDHERGDAIVRIPARVLVVSATGRGSYARTTPDRFGFPRLRRARVKRHFGFASGDLVRAVVPAGKWAGVWTGRVSVRATGRHSLTVREGRIDVSHRNLRLLQRADGYGYAFRSEGAREHLGKPVEP

SEQ ID NO: 3104 - protein, 406 aa, unidentified
MVYVQDINGKPMMPTTRHGKVRRLLKDKKAVVVNLCPFTIKLIYVTSDYKQEIVLGVDAGTKHVGLSATTKSKELYASEVTLRNDIVDLLSTRRELRKTRRNRLRHRKPRFNNRIKSKRPGWIAPSVQHKVDAHIRVIDNVFSILPVSRIVIEVAQFDTQKIKNPEIFGKEYQEGDQLGFWNIREYVLTRDGHKCQHCKGKSKDPVLNVHHLESRKTGGDSPSNLITLCETCHKEYHKGNIDLKIRRGKSLRDAAVMGIMKWRLYEELKSRYDRVFMTFGYITKHNRIKYGIEKSHTSDAFVISMNINAKRIERQYLKRLIRRHNRQIHKMKILKGGKKKNNQAPFEVFGFRLFDKVLYNNKIFFVYGRRKSGNFNIRDFNGENPKDVSHKKFKLIRGKRHPIILK

SEQ ID NO: 3105 - protein, 429 aa, Arthrospira sp.
MPNYQNYVFVVDTLGQPLSPTHRARARKLLKQGLAAVFRTYPFTIILKKTVENPVNEPLRLKLDPGASVTGIALVNQSRDTVIWGAELTHTGDRIRAKLTAHRVVRRHRRCRKTRYRQARFNNRKRADGWLAPSLKHRVETTLTWVNRLISSCPITDISMELVRFDTQKLQNPEISGVEYQQGVLLGYELREYLLTKWQHQCAYCGGQNIPLEIEHIQPKSQGGSDRVSNLAIACHKCHQKKGSQALEQFLEKKPEILKRLLVQAKAPLKNAAAVNSTRWALFNSLKLTGLPIEIGTGGLTKYNRTVQGLPKTHWLDDADCVGKSTPTRLKIKTHQPLLITCFGRGGRQKAAPNKRLPIRHNPLKPIKGWLTGDIAKHKTHGIGRITLRSRGSFVLTKPDKTQFSVKPIDLKPVFRRDGYLYKFSRVFR

SEQ ID NO: 3106 - protein, 437 aa, Calothrix sp.
MSKLTLPIEALTMQQNYAFLIDTNKQQLNPVTPKQARRLLEKGKAAVYRMYPFTLILKTAIDTPNIKPLTLKLDPGSKFTGIALLDGENVVWGAELEHRGYQIKDALLSRRQLRSSRRSRKARYREPRFDNRKRKENWLPPSLEHRILTTETWVKRLMRYAPITELWIEKVKFDMALMQNPDRRGVEYQQGELKGYQVREYLLEKWGRECTYCGKKDTPLQIEHIHPKSKGGSNRVSNLCLACEKCNQKKGNKLVEDFLKKKPDLLKKIKFQAKKPLKDAAAVNATRNKLAQVLSNLLPTKTATGAQTKYNRTRLNLPKQHWIDAACVGDVSNIKLFTNQPLKIKCSGHGTRQMCRTDKYGFPARYVPRFKFVKGFQTGDIVKAVVTTGKKVGEYIGRIATRSTGSFNISTRKKLVQGISYKYCKTIHKKDGYSYVF

SEQ ID NO: 3107 - protein, 554 aa, Streptomyces sp.
MATFPVGEQTHQAVLPQQPALESARADTPGSRDETARGHSATARGAGREHGRGETDGRDTPARRRHAERAVTAAPTAETGSGDAPPHEPEPSYAGGVGTSRVLVLSRDGHPLMPCHPARARELLGRGRAVVARQVPFVIRLKDRTRAESEVDGVQLRIDPGSKGTGLVLTDEKKETDGRGAVVTVRRGLFSVELWHRGEQIRGYVRQRAAYRRRRRSANLRYRAPRSRNRTRPPGWLPPSLRHRVDTTFSLAGRLCRYAPVTDLHLERVAFDTHSMTAGTLLRTAERQQGALAGTSTRAQLRGRWNSSCAYCGASNVPLNIEHLRPRSRGGSDRISNLVLACAPCNRAKASKPVDVFLTDRPELLARILQQARAPLSDAAAMNATCWELTDRLAALGRPLHAWSGALTRRNRHAMGLHKTHTLDALSVGRLDHESGDRIVRFTGRALIAKSTGRGSYARTTPDRYGFPRLLRPRRKQHFGYVTGDLVRAVVPSGKWAGTWTGRVSVRARGQHSLTTPEGRISVSFRNLRLLQRGDGYAYSSRSEPGRSSSRKKG

SEQ ID NO: 3108 - protein, 557 aa, unidentified
MIYNLGSTRERGFMKQKKQKVMVYILNKKGKPLMPTTRCGHVRKLLDSKKAVVVNSNPFTIRLKYDTPNGVQDVFAGIDSGRENIGSGVSNEDGDCLYLGELRTSNKSIKMKMTERVGFRRERRKHDRQNKQRKARKDHTEIQNGKDDICRATISCKSVQISYPTAEESVTHKIIRGKEGKFANRHRDGDWITPSARQLVQMHMNDLKSICKILPISHVTLERVAFDFQKLENENIKAWEYGKGKLYGYDSPEEYIHDVQDGKCLVCGKPHIDYLHHIIPRSKGGSDKVSNIAGLCYDCHYGPIGVHNCQDTQDRLPELKNEVNKQYKVSLLNSVMPVLIEEIDKFCKANSIMFSICEGHDTAKVRDMYDLQKDHCLDGFAISLVGRNVKSVDVMPDRIHQKQRYKKKSKNIIQKRNYREYYDDKKLVAINRHKGTDQKADSLEEYMNTYAETHTADECKMHFESLTVKPARRTYTFHKEGRICPLHIGDKVRYEKKNKIKGNTKVDTFICEGIYFSKDENKAKVEHNKTKSKKMKFCRAIESGCIPYIDYIKLALI

SEQ ID NO: 3109 - protein, 420 aa, Moorena sp.; identical to SEQ ID NO: 3094

SEQ ID NO: 3110 - protein, 589 aa, Streptomyces sp.; identical to SEQ ID NO: 3025

SEQ ID NO: 3111 - protein, 443 aa, Nocardiopsis sp.
VHTVHPSVFVLDKHHVPLQPCTSARARKLLAKGRAVVHRLTPFTIRLKDRTVTESEVDGVEVGIDPGSKHTGIAMFTTRAGERRGRFSLQLDHRGAQIKKKMGQRASYRRRRRSTNLRYRAPQFLNRTRPQGWLPPSLQHRVDTTVAWVDRLALWAPVRAVHVERVAFDTHTLSAGKLLEGAEYQHGTLHGFEVREYLLAKFGRTCVYCGATDTPLNIDHVRPRSRGGSDRVSNLVLACIPCNQAKDNQPVEEFLAGKPKILASVLAQVKAPLGDAAAVNSTRWALWRALDQRLPTHVGSGGRTKWNRSRSQLPKSHTLDALAVGKVDTITHTVDTILVAACAGHGSYARTRPDKYGFARLRLPRTKRFFSFATGDLARAVVSQGKKKGTHTGRVAVRATGKFNITTAQGTVQGINHRHVRLLQRADGYAYTIRKEQGVSSRP

SEQ ID NO: 3112 - protein, 452 aa, unidentified; identical to SEQ ID NO: 3042
  source 1..452: note = uncultured beta proteobacterium

SEQ ID NO: 3113 - protein, 425 aa, Nodularia sp.
MSNFVLVLDTNKKPLTPIHPGDARFLLNQQKAAVFRRFPFTIILKEPKSEVPTQPIELKIDPGSKTTGFALVQNNKVIWGMELQHRGLAIKESLETRKGVRRGRRSRHTRYRQARFLNRTKPQGWLAPSLSHRVLTINTWVKRLCNFAPITDIVEELARFDLQQLENPEISGFEYQQGELQGYEVREYLLNKWNRKCAYCTAENVPLQVEHIKPKAKGGTNRISNLCLACEKCNIKKGTQDIEKFLAKKPELLKQILSQAKRPLKDASAVNSTRWALFNKLKETGLPITTGSGGLTKFNRTRLGLPKTHWIDAACVGKVETLKILTTKILTVKSTGHSCRRFCRINKFGFPCTEPKKIFTHVSTGDFVKATLHKDRKNITSGKYVSRVKTPTKNGCEIVINGFRVEFSTMKDITKVHCSDGYSYV

SEQ ID NO: 3114 - protein, 519 aa, Nocardiopsis sp.
MATFHAGEKTHQAVLPQRPALESVSADTRRISDETGRGHRTTGAVPGVEHVRGETTTASPGEGGVTPEPARAGERGREVHIRANDPYVFVLDKKHRPLQPCPPARARKLLAKGRAVVHRYTPFTIRLKDRLLEESEVDGVEVGIDPGSKYTGIAVFTARAGERRGRHAIQLDHRGAAVKKKLQQRSAYRRGRRSRNLRYRAPRFDNRARSKGWLAPSLQHRVDTTVSWTDRLCRWAPVTAVHVELVAFDTHALSAGRPLEGAEYHKGTLHGYEVREYVLAKFGRACAYCGITSVPLNIDHVHPRSRGGSDRVSNLALACVPCNQAKADRPVEDFAPQAAARVLGQAKAPLRDAAAVQSTRWALWRALDTRLPTHVGTGGRTKWNRTRNDIPKSHTLDALCVGKLEAITQTVSTVLVAACSGRGSYARTRTDRYGFPRLLLPRVKGFFGFTTGDLVRAVVPKGKRAGTHTGRVAVRASGNFNITTAHGTVQGIGHRHVRLLQRADGYAYTLRKAEGVPPG

SEQ ID NO: 3115 - protein, 417 aa, unidentified
MPCSPAKARLLLKERKAIVKRRTPFTIQLTIATGEAKQPVTLGVDSGYKHIGLSATTEKVELYASEVELRQDITDLLSARLALRRSRRSRKTRYRVPRFDNRVASKRKGWLAPSVENRITAHMSRVEAVMRVLPVTAITVETAAFDTQLLKNPDITGAAYQQGEQLRFWNVREYVLFRDGHVCQHCRGKSKDPILNVHHIESRRTGGDAPNNLITLCETCHKAFHRGEIKLKVRRGKSFKAETFMGIMRRTLFERLKKAHPELNVRNTYGYLTKHKRISYGIAKSHCADAYCIADNLGAKRLEGFFFQKQTRKHNQQIHKLLILKGGLKKKNQAPYEVKGFRLFDKVICKGEEAFIFGRRTSGSFDVRRLDGTRISAGINYKKLRLLEPRTTYLTEFRKEAALPPLHKCRGVCAEFL

SEQ ID NO: 3116 - protein, 466 aa, unidentified; identical to SEQ ID NO: 2809

SEQ ID NO: 3117 - protein, 284 aa, unidentified
LGASAVALIEVISQELVRFDMQLMRNPDIQGKEYQQGTLAGYETREYLLEKWNRQCAYCGTKDVKLQIEHIHPRSKGGSNSITNLTLSCEKCNTKKGTKDIREFLKKDPSKLENILKQAKKPLVGAAAVNTTRFALLEVLKATGLSVETGSGGLTKFNRTQQGLDKTHWLDAACVGKSTPILNVKNVKPLLITANGHGTRQLCRTDKYGFPSRHCSRAKFHFGFQTGYVVKATVTSGKKVGQYVGRIATRATGSFNVATKTELIQGVNHTYCKHIHKKDGYSYA

SEQ ID NO: 3118 - protein, 423 aa, unidentified
VLNKRGKPLMPCSPAKARLLLKEKKAVVVRRTPFTLQLTIATGEAKQAVSLGVDAGYKHVGLSASTKKAELYASEVELRQDITDLLSARRALRRARRNRKTRYRAPRFDNRIRTKRKSWLAPSVENRINAHLSRIEAVLRLLPVTKITVETASFDTQLLKNPDIAGKEYQEGEQLGFWNVREYVLFRDGHVCQHCHGRSKDPVLNVHHLESRRTGGDSPGNLITLCETCHKALHRSEITLKAKRGQSFRAESFMGIMRWEVLNRLKTSHSELEVHNTYGYRTKHARIANGIDKSHCADAFCIAGNLGAQRLGEFFFQKQTRRNNRQIHKLSILKHGLRKRNQAPFEIKGFRLFDKVACKGEEGFIFGRRSSGFFDVRKLDGTRISAGISYKKLHLLEKRRTYLTEIRKEEALPPLPEGRGLRA

SEQ ID NO: 3119 - protein, 413 aa, unidentified
MTSYAFVLDANGKQLAPAKEQKAWFLIRKKRAALVSKYPMVIQLKKEIPENEICKDEIRCGIDDGGLHVGIALVQKCKTKNKVVFKGTIEQRNDVKHLMEVRRSYRHYHRYHKRYRPARFDNRKSSKRKKRIAPSILQKRQAIIRVIHWLNKWINITNYWLEDVSIDIRALTDGYKPYRWQYQKSNRLDENIRKAAILRDGGKCMECGKLNCRLEVHHIKPRRRNGSDTLDNLITLCKSCHQKTEGQEELYMDRYFSLLKSSDHKNLNYAQHVMIGKEWLRKQLSSLGVLYLTNGGDTANKRIDWNIEKSHANDAVCITNLQPDTYDMKEWTVKPMRRQSKAKTDNVLGIKHRDLVEYTLKNGETHRGYVTALYPEQKAINFQSPTKHCKKVNARKCKLRWKYSKIYWFENAS

SEQ ID NO: 3120 - protein, 431 aa, Calothrix sp.
MEGLMSKVFLIDTNKKPLNPIHPAQARQLLKNKKAAIFRRFPFTIILKQAKSDIEIQPLRIKIDPGAKNTGFALVNDATGEVIFAAELQHRGFQIRDALTSRRQLRRGRRNRKTRYRAPRFNNRKRNEGWIPPSLQSRVDNILTWVKRLQKLALIDSISQELVKFDMQIMQNPHIQGKEYQQGTLAGYETREYLLEKWDRQCAYCGIKDVPLQVEHINPRSKGGSNSILNLTLSCKKCNLKKGTQDIKDFLKKEPKKLESILKQAKKPLESAAAVNTTRFTLLNALKATNLPVETGSGGLTKFNRSQQGLDKTHWIDAACVGKSTPILNIKGIKPLLIAAKGHGTRQMCRTDKYGFPTRYVPRIKFVHGFQTGDIVKAVVKTGKKVGIYIGRIATRSTGSFNISTKTGLVQGISHKYCKTVHKKDAYSYSN

SEQ ID NO: 3121 - protein, 425 aa, Calothrix sp.
MQQNYVFLIDTNKQPLNLVTPKQARRLLEKGKAAVFRQYPFILILKTAIDNPTIRPLTLKLDPGSKVTGIVILSGENVIWCAELEHRGYQIKDALFSRRQLRSSRRNRKNWYRKPRFNNRTRSEDWLPPSLEHRILTTQTWVKRLMRYAPITELCIEKVKFDMQQMENPEVSAIEYQQGELQGYQVREYLLEKWSRECTYCGKKDVPLQIEHIYPKSKGGSNRVSNLCLACEKCNKKKGNKLVEEFLKKKPDLLKKIKSKAKKPLLDAAAVNATRNKLVKVLYNLLPTKTATGAQTKFNRTRLNLDKQHWIDAACVGDVDNLKLLTNQPLKIKCNGHGTRQMCRTDKYGFPTRYVPKIKFVKGFQTGDIVKAVIKTGKKVGEYVGRIATRSTGSFNISTREKLVQGISYKYCKTIHKKDGYSYAF

SEQ ID NO: 3122 - protein, 378 aa, Moorena sp.; identical to SEQ ID NO: 2642

SEQ ID NO: 3123 - protein, 412 aa, unidentified
VTTILKTCFAASNLAKIVVLMDAWDIIVILNKRGKPLMPCSPAKARLLLKEKKAIVVRRTPFTIQLTIATGESKQPVTLGVDAGYKHVGLSASTEKAELYASEVELRQDVSDLLSARRALRQSRRNRKTRYRAPRFDNRIRTKRKGWLAPSVENRINAHLSRIEAVLRLLPVTKITVETASFDMQLLKNPDIAGKEYQEGEQLGFWNVREYVLFRDGHVCQHCHGRSKDPVLNVHHLESRRTGGDSPGNLITLCETCHKALHRGEITLKAKRGQSFRAEAFMGIMRWEVHNRLRALHPGIEVSNTYGYRTKHARIANGIAKSHCADAFCIAGNLGAERLCEFFFQKQTRRNNRQIHKLSILKGGIRKRNQAPFEVKGFRLFDKVACQGEEGFIFGRRSSGFFDVRKLDGTRI

SEQ ID NO: 3124 - protein, 427 aa, Nostoc sp.
MSKVLVIDQRKRPLDPVHPAQARQLLRSKKAAIYRQFPFTLILKESRTGTPVLPLRLKIDPGAKVTGIGLVNDSSALVVFVAELKHRGFAIRDALTSRRQLRRGRRARKTRYRQPRFLNRTRPEGWLAPSLQSRVDNIETWVKKLRQFAPIEAISQELVRFDMQLMRNPDIQGNEYMQGTLQGFETREFLLEKWNRQCAYCDVKDVPFQIEHIFPKARGGSNSITNLTLSCEKCNIKKGVKDIKDFLKKDPSRLEKILKQAKRPLADAAAVNTTRFALLNVLKSTGLPVETGSGGLTKFNRSQQNIPKSHWADAAAVGKSTPELIVKGVKPLLIAANGHGSRQSCRTDKFGFPNRHVPRDKIHFGFQTGDIVRAVVTSGKKIGSYVGKVAIRSSGSFNISTKNGLVQGISHKFCLRIHAKDGYSYAY

SEQ ID NO: 3125 - protein, 413 aa, unidentified; identical to SEQ ID NO: 2636

SEQ ID NO: 3126 - protein, 310 aa, Moorena sp.; identical to SEQ ID NO: 2916

SEQ ID NO: 3127 - protein, 367 aa, unidentified
YKHVGLSASTEKAELYASEVELRQDITDLLSARRALRQSRRNRKTRYRAPRFDNRIRTKRKGWLAPSVENRINAHLSRIEAVLRLLPITKITVETASFDMQRLKNPDISGKEYQEGEQLGFWNVREYVLFRDGHVCRHCHGRSKDPVLNVHHLESRRTGSDSPDNLITLCETCHKALHRGEITLKAKRGQSFRAQAFMGIMRREVLNRLKASYPELKVHETYGYLTKHARIANGIVKSHGADAFCIAGNLGAERLGEFFFQKQTRRNNRQIHKLSILKGGIRKRNQAPFEAKGFRLFDKVACQGEEGFIFGRRSSGSFDVRKLDGTRISAGISCKKLRLLEKRRTYLTEIRKEEALPPLPEGRGLRA

SEQ ID NO: 3128 - protein, 423 aa, Arthrospira sp.
MSNHVFVLDTNRKPLRPCKPGVARSLLKAGKASVFRRYPFTIILNKEVDANPEPLELKLDPGSKVTGIALKQGNHIIFAAELQHRGQQIKEALLSRRQLRRSRRNRKTRYRPARFLNRTRSKGWLAPSLQHRVDTLMTWVHRFRRLAPVGRIAQELVRFDLQLMENPEISGVEYQQGELQGYEVREYLLFKWDRTCAYCGAQNVPLEVEQIQPRSKGGSDRVSNLTMACHSCNQAKGNGDIRDFLSGQPDVLSRLLRQAKSPLKDAAAVNSTRWALFKALKATGLPVTTGTGGQTKFNRLRLNLPKAHWLDAACVGPVESLEVLTSKPLLILAKGHGTRQMCGTNKYGFPNRHRSRRQIHKGFQTGDMVTALVTAGKKIGSYLGRVLCRASGSFDITTASVRVAGISHKYCQPIHSTDGYAYA

SEQ ID NO: 3129 - protein, 589 aa, Streptomyces sp.; identical to SEQ ID NO: 3025

SEQ ID NO: 3130 - protein, 509 aa, Streptomyces sp.; identical to SEQ ID NO: 2802

SEQ ID NO: 3131 - protein, 425 aa, Moorena sp.; identical to SEQ ID NO: 3008

SEQ ID NO: 3132 - protein, 547 aa, Streptomyces sp.
MTTFFTGEQTHQAVLPQQPALEFVGADTPGGRDETAHGPPGKVRDAGREHGRGETGERSTVTRQRHAKSAATAAKAAENGSGDAPTPDRDYAAGAGAARVFVLSSDGKPLMPCHPARARELLARGRAVVARRVPFVIRMKDRTRAESGVHGLQLRIDPGSEGTGLVLTDEKTEVGERGAVVTVRRGLFATELRHRGDQIRACMQQRAGYRRRRRSANNRYRAPRSRNRTHPAGWLSPSVRHRVDTTFSLAARLSRYAPVTEIHVERVAFSMRQEEHQARGTVRTRLQAKWNSTCAYCGATGVRLNVEHVRPRSRGGSSRISNLVLACVPCNRAKGSESVEDFLAHRPEQLATVLGQIESPLDDAAAMNALSPRLSEALNALGKPVHCWSGRLTKTNRDFCGMRKTHTLDALSVGRLDRESGDRIVRFSGRVLVAKATGRGSYARTTPDRYGFPRLRRSRTKQHFGFVTGDLVRATLPTGTWAGTWTGRVSVRARGQHSVTVPVGRINVSHKHLSLLQRGDGYQYSACAESGALPLSKKEVDRSPVRS

SEQ ID NO: 3133 - protein, 431 aa, Moorena sp.; identical to SEQ ID NO: 2945

SEQ ID NO: 3134 - protein, 386 aa, unidentified
LTIATGESKQPVSLGVDAGYKHVGLSASTEKAELYASEVELRQDITDLLSARRALRQSRRNRKTRYRAPRFDNRIRTKRKGWLAPSVENRINAHLSRIETVIRLLPVTKITVETTSFDMQLLKNSDIAGKKYQEGEQLGFWNVREYVLFRDGHVCQHCHGRSKDPVLNVHHLESRRTGGDSPGNLITLCETCHKALHRGEITLKAKRGQSFRAETFMGIMRWEVLDRLKASHSKLEVQNTYGYRTKHARISNGIAKSHCADAFCIAGNLGAERLGEFFFQKQTRRNNRQIHKLSILKGGIRKRNQAPYEIKGFRLFDKVACQGEEGFIFGRRSSGYFDVRKLNGTHISAGISCKKLRLLEKRQTYLTEIRKEKALPPLPEGRGLRA

SEQ ID NO: 3135 - protein, 373 aa, Moorena sp.; identical to SEQ ID NO: 3006

SEQ ID NO: 3136 - protein, 329 aa, unidentified
SRRNRKTRYRAPRFDNRIRTKRKGWLAPSVENRINAHLSRIEAVLRLLPITKITVETASFDMQRLKNPDISGKEYQEGEQLGFWNVREYVLFRDGHVCRHCHGRSKDPVLNVHHLESRRTGSDSPDNLITLCETCHKALHRGEITLKAKRGQSFRAQAFMGIMRREVLNRLKASYPELKVHETYGYLTKHARIANGIVKSHGADAFCIAGNLGAERLGEFFFQKQTRRNNRQIRKLSILKGGIRKRNQAPFEAKGFRLFDKVACQGEEGFIFGRRSSGSFDVRKLDGTRISAGISCKKLRLLEKRRTYLTEIRKEEALPPLPEGRGLRA

SEQ ID NO: 3137 - protein, 427 aa, unidentified; identical to SEQ ID NO: 2719

SEQ ID NO: 3138 - protein, 447 aa, unidentified
  source 1..447: note = uncultured beta proteobacterium
MPCTERRARILLERGRARVHRLYPMVIRLVDRFAEDSEFQELNLKLDPGSKTSGVALNRVDGSTEAVLNLFELIHRGAFISKKLEQRRALRRNRRNRHTRYREERFLNRGNKQRGWLAPSLMHRVNTTTAWVDRIMRWSPVPLITQELVRFDTQKLENPEISGVEYQQGTLLGYEVREYLLNKWHRACAYCDAQNVPFEVEHIHPKSKGGSNRISNLTLACRPCNEKKDNRDIREFLASDPTRLAKILAQAKAPLKDAAAVNSTRWRLFNELKTMGIVVKTGTGGQTKFNRLQNKIPKTHALDAACAGHVEFVSDWQKPTLSIKSSGRGTYVRTKLDSYGFPRGYCLRQKQVHGFATGDIVRAEVTKGKKIGSYFGKVAIRESGSFNISTNAGVIQGVSHKYCKVVQRADGYGYLFNQDSKQSRVKRIALQSALSLPGMNAEVSRAL

SEQ ID NO: 3139 - protein, 428 aa, unidentified
MSNQNYVFVLDTNGKPLNPCRPITARKLLNANKAAVFRRYPFTIILKKEVVDTPEPITLKLDPGSKATGIALLQREKVVFGASLAHRGQAIKASLDSRRAIRRSRRARHTRYRQPRFLNRTRAKGWLAPSLQHRVETTLTWIDRFIRFAPIGSIVQELVRFDLQRLENPEISGIEYQQGELQGYEVREYLLNKWDRKCAYCGAENVPLQVEHIHPKAKGGSNRISNLCLACDKCNAKKGTQDIKQFLAKKPEVLKRVLAQAKRPLKDAAAVNSTRWALFNRLKAIGLPVSRASGGLTKFNRTRLQLPKAHWLDAACVGKVESLLLLTQQPLLIKALGWGCRQMVQTDKYGFPRKGYRAKQKVKNWNTGDIVSVVAGKFAGITGKRLKTVRFKGNFDIRLSKELVISVSRNDIKAVHRKDGYDYKFAQV

SEQ ID NO: 3140 - protein, 604 aa, Nocardiopsis sp.
MGDSCSACRNPMRFRGGSATVSPLGDAPDTSYEQSDRRRGENPRGRIPAVTGSPAGRRGLSTRGVERRRYQTQPSPRSEVTLMATFRTGLKTHQAVLPQRPALESAPADTPRVGNETGRGDHTGGVVPGPGHGRGETGTASPGGSGVTPEPFGAGEQGREAHTVEQVHPFVFVLDRHGTPLQSCPPARARQLLARGRAVVHRRTPFVIRLKDRTAADSEVDGVEVGIDPGSKHTGIVVFTQQAGERRGRYAVQLDHRGSQIRKKLAQRSGYRRRRRSANLRYRPPRFDNRTRPTGWPAPSLRHRVETPVSWVDRLCRWAPVRAVHVERVAFDTHALSAGRPLEGAEYQQGTLRGYEVREYLLAKFDRTCAYCGTTGVPLNIDHVRPRSRGGSDRVSNLVPACIGCNQTKGNRPMEEFVTNPKTLAQIRARTKAPMRNAAAANATRWALWRALDARIPTHVGSGGRTKWNRIRNRLPKSHTLDAVAVGKVDTITETVGMILAVGCSGRGSYARTRPDRNGFPRLGLPRTKHFFGFATGDLVRAVVPKGKWVGTHTGRVAVRSTGRHTVTTVCGPVSTSYKNLRLLQRADGYAYTMKKEAGAPSPA

SEQ ID NO: 3141 - protein, 419 aa, Moorena sp.; identical to SEQ ID NO: 2658

SEQ ID NO: 3142 - protein, 373 aa, Moorena sp.; identical to SEQ ID NO: 3006

SEQ ID NO: 3143 - protein, 423 aa, Arthrospira sp.
MSNHIFVLDTNRKPLTPCKPGVARSLLKAGKASVFRRYPFTIILNKEVDANPEPLELKLDPGSKVTGIALKQGNHIIFAAELQHRGQQIKEALLSRRQLRRSRRNRKTRYRPARFLNRTRSKGWLAPSLQHRVDTLMTWVHRFRRLAPVGRITQELVRFDLQLMENPEISGVEYQQGELQGYEVREYLLEKWGRTCAYCGAQNVPLEVEHIQPRSKGGSDRVSNLTMACHSCNQAKGNGDIRDFLSGQPDVLSRLLRQAKSPLKDAAAVNSTRWALFKALKATGLPVTTGTGGQTKFNRLRLNLPKAHWLDAACVGPVESLEVLTSKPLLILAKGHGTRQMCGTNKYGFPNRHRSRRQIHKGFQTGDMVTALVTAGKKIGSYLGRVLCRASGSFDITTASVRVAGISHKYCQPIHRKDGYAYA

SEQ ID NO: 3144 - protein, 423 aa, Symploca sp.
MFVLTVDKNRNPLNPTHPARARRFLKEGRAVVLRRYPFTIMLLEVEGSNVVEYRLKLDPGSKTTGIAIVTDDRVIWGAELHHRGYTIKKSLESRRALRRGRRNRHTRYRQPRFDNRTRADGWLAPSLQHRVLTIKTWVERLRRFCPISAISMELVRFDTQLMQNPEVSGVLYQQGELAGYEVREYLLEKWGRKCAYCHKEGVPLEVEHIQPRSKGGSHRVSNLTLACTKCNQKKGNKPVEQFLSRKPELLKRILAAAKRPLKDAAAVNSTRWALYRVLKQTGLAVETGTGGRTKFNRTSQELPKTHWLDAACVGSSTSKRLKVLVAKPLAITATGHGTRQMCRTDKYGFPSRYVPRYKLVKGFRTGDIVKAIVTAGKKIGTYVGRVAVRSTGSFDISTANGLIQGISHKYCKHIHNKDGYSYA

SEQ ID NO: 3145 - protein, 428 aa, unidentified
LKVFVLNMRGQPLMPCSPAKARHLLKAGKAVVRRRTPFTIKLTIATGETKQDVTLGVDAGARHVGISATTEKEEVFASEVALRQDITGLLADRLAFRRARRNRKTRYRAPRFNNRVRSKHKGWLAPSVENRIQAHMSRIDAVCRLLPVTKIVIETASFDIQKIRNPEVEGTGYQQGDQLGFWNVREYVLFRDGHVCQHCHGRSRDKILNVHHLESRQTGGDAPNNLITLCETCHKACHAGKIKLKVKRGQSFRAEAFMGIMRWTLLDRVRKAHPGLPVENTYGYLTKNTRITLGLPKAHCVDAYCIAGNLKAVRRGVYLHQRQVRKHNRQIHKCTVLSKTLKDGTKIGYRKLNQTPHLVKNFRLFDKVRCLGQTGFIFGRRSSGYFDVRRLDGVKLSSGISYRKLTLLEKRSTYLTELRKEDGASSPV

SEQ ID NO: 3146 - protein, 423 aa, Arthrospira sp.
MSNHIFVLDTNRKPLTPCKPGMARSLLKAGKASVFRRYPFTIILNKEVDANPEPLELKLDPGSKVTGIALKQGNHIIFAAELQHRGQQIKEALLSRRQLRRSRRNRKTRYRPARFLNRTRPEGWLAPSWQHRVDTLMTWVHRFRRLAPVGRIAQELVRFDLQLMENPEISGVEYQQGELQGYEVREYLLEKWDRTCAYCGAQNVPLEVEQIQPRSKGGSDRVSNLTMACHSCNQAKGNGDIRDFLSGQPDVLSRLLRQAKSPLKDAAAVNSTRWALFKALKATGLPVTTGTGGQTKFNRLRLNLPKAHWLDAACVGPVESLEVLTSKPLLILAKGHGTRQMCGTNKYGFPNRHRSRRQIHKGFQTGDMVTATVTAGKKIGSYLGRVLCRASGSFDITTASVRVAGISHKYCQPIHRKDGYAYA

SEQ ID NO: 3147 - protein, 442 aa, Lactobacillus sp.
MKHENANRVFLLNRDGKPLMPCRPRKARLLLKSGKAFVVKKYPFTIQLKYGSYGYKQKVSLGVDTGQRHIGFAVVSQEKVLCQSEVELRQDVHKNLYTRKIYRGGRRNRKTRYRQSRFLNRVHGKRDGLWLPPSVKGKVNHNIAWIKRYLAVLPNPDLHVEVGKFDMAKMLNPQISGKQYQEGSLKGWKNYEYYVLARDKYTCQLCRKHGKGVKLAVHHIIYRSQGGTDRVSNLITLCTDCHTTKNHQPGGKLYKWMKAKKKVTKYLKGATFMNILRKRIMTAFPEASFQYGSQTYVDRKNLNLPKGHFMDAIAISGIKSVGQMPETVTMISQFRKKKRSLHEATARKGRKQPNKAAKRNAKNTKYARGIWLNDYVRIIENNAKGYVQGFKSNGYAVYLTDGLGNYVLNNGKKNINRKQCRLIMHNGNWQKAEQKLSLYEFK

SEQ ID NO: 3148 - protein, 425 aa, unidentified
MLVYVVTKDKQPLMPCTPVIARLLLKQEKAKVKRRDPFTIQLLYETTEYRQDLELGVDTGSGKFATAVRTEQNEIVYLSEVAVRNDITSKMTERRTKRRSRRHRKTRYRKPRFDNRRNSKRKDRFSPTMQSKIHSHVKEIEYIQSILPITRIILETGQFDPHRMKNPALADPNVRHWGYQKGPNYGYENTRAMVLDRDNHQCQCCHGKRKDRHLEVHHIVFRSQGGSDDAKNLITLCHTCHQALHKGKIHLDLEGMGKGTLKYATQMNSIRKQLLRRYSEAVETYGYITKANRLAMDLPKEHYIDACVIATEGRPFTINSLLYRKKCVSAGDFQQYHGERSEIRQTTGKIMGFRKYDKVRYFGKYYFIKGRMSTGYAVLMDVNGDTVKFSDMPWGFKTPKLERMERIQARSTWMVMGEKVTLNIV

SEQ ID NO: 3149 - protein, 469 aa, Desulfonema sp.
MKVYVKSETGKWLMPTNPANARILLKKGKAKVIGRTPFVIRLLYETGEYVQPVTVGIDDGGINIGIAAVSNGSVLFQQELVLRSDIKSKLDTRRQYRRSRRNRKTRYRKARFLNRKQSLPVCKICGGNAPASKIICRKCLNAAGGVHQKYAGIQKTHFRLPPSVRAKKNAVIRTVRQIPLPISAIRLEDAYFDFQAMENPDISGDRYQHGELFYHKNFKQAGLVRDKFRCRVCGSESSLQCHHIRSKAEGGTDKLSNLMTLCKDCHGRHHKKGLKLPKQKSSFYISAAHVQQGKHYLQAELSETAFLTRTFGYITSHYRNRAGIEKSHVNDAVIIADKKAVPVTHYIKSKHIQTRKRSLHEATARKGRKIPNRTQKRNCKNVSALKGFRRWDTVRYKGQTGFISGFTGTSSCYIVNVEGDYIRNPGKKYKQVSLGKVVRLHNNKSVISQRADSSPTFAIAQEGDFSAES

SEQ ID NO: 3150 - protein, 429 aa, Moorena sp.; identical to SEQ ID NO: 3068

SEQ ID NO: 3151 - protein, 425 aa, unidentified
MENTLKVFVLNMRGQPLMPCSPPKARKLLRAGKAVPVRRTPFVIQLTVPTGETKQPITLGVDAGYKHVGLSATTAKEELLASEVELRQDVTGLLSDRLALRRARRNRKTRYRAPRFDNRVRSKHKGWLAPSVENRIQAHISRIEAVCRVLPITKIVIETASFDIQKIKNPEVEGTDYQQGEQLGFWNVREYVLFRDGHVCQACKGRSKDLILNVHHIESRKTGGDAPGNLITLCEACHKAYHAGKLKQFSPRRGASFRAETFMGIMRWTVLNRLRERHPELPVTNTYGYLTKHKRIVAGLPKTHCADAFCIAGVLDAKRRGEYLFQKQTRRHNRQIHKLTILKGGVRKRHQAPYLVHGFRLFDKVLCKGEVGFIFGRRSSGAFDVRRLNGTKISAGISYKKLSLLEKRKMFLTELRKEGRDSSRV

SEQ ID NO: 3152 - protein, 419 aa, Moorena sp.; identical to SEQ ID NO: 2999

SEQ ID NO: 3153 - protein, 420 aa, unidentified
MQYVYVLSKHGEPMMPCSPGKARLLLKQQKACVVRRTPFTIKLLYGSAGYKQPITLGVDAGSKHVGLSASTEKRELYREEFTPRNDVVELLSTRRQNRRSRRNRKTRYRAPRFDNRVHSKHKGWLAPSVEVKIQEHITIIKRICKILPISLVRVETAEFDTQRLKAMLAGKPLPVGTDYQLGEMYDEYNVRQYVLKRDNYTCQCCGAHTTAKKLVKLHVHHLESRKTGGNAPSNLVTLCTTCHKNLHKGKVTLDGKERGKPLRDAAFMGIMRKTLMARLKKELPIPVQGTYGYITKMRREQNDIKKSHTNDARCISKHPLAEPCSVCYRTKAIRHHNRQTHKANFSKKGIRKRSQMPYLVEGYRLWDKVLYKEQECFVSGRRSSGSFTLKKLDGTSVSKGVTFKKLRLLEPATNYLIERM

SEQ ID NO: 3154 - protein, 493 aa, unidentified
MAAVYVISASGKPLMPTTRCGHIRGLLNAGKARVVEREPFTIQLKYETPDVTQPLYLGIDPGRTNVGSAVVREDGECVFTAQLTTRNKDVPKLMKARKQFRMAHRRLKRRCKRQRRAKAAETLSQKGEFQRLLPGYEESILCKGIRNKEARFNNRQRPAGWLTPTANHLLLTHLNMVKKLQKLLPITDVVLEVNRFAFMAMENPSIRRWQYQQGPLYGKGSVEDAVYAQQDGHCLFCGKPIAHYHHVVPQHKNGSETLENRVGLCNEHHDLVHKDRAWDAKMKETKAGLNKKYHALSVLNQIIPALTEQLTAMFPQHAFVTTGKDTADFREDYGIAKEHHLDAYCIACSVLAEPTKVAAPTGKPHRLMQFRRHDRQVCHKENIKRVYLSEGKAVATNRHKAIEQKDDSLEEFRKTHTQQEVSALTVKDHQPVYKDMRRFMPGGVFLFNGKVHTLQRSHGRYKGMPFYYIDTDGSKNHAKGCIFLQQNCGLRWV

SEQ ID NO: 3155 - protein, 412 aa, unidentified
MTNYAFVLDANGKQLAPTKEQKAWFLIRKKRATLVSKYPMVIQLKKEIPDEQIYKDEICCGIDDGGLHVGISLVQKCKTKNKVVFKGTMEQRKDVKHLMEVRKGYRRYHRFYKRYRQARFNNRKSSKRKERIAPSILQKRQATIRVINQLNKWINITNYWLEDVAIDIRALTDGYKAYRWQYQQSNRLDENIRKAVILRDGCKCMECGKSNCKLEVHHIKPRRLNGSNTLGNLISLCKKCHQKTEEQEEVYMNRYFSMLNSSDNKNLNYAQHVMIGKKWLREQLSKLGTLTLATGGDTANKRIDWNIEKSHSNDAICIAGLQPDTCNVKEWTIKPMRRQSKAKTDNVLGINHRDLVEYTFRNGETHRGYVTALYPGQNAINFQSSTKHCKKVNAKKCKLIWKYSKIYWLANV

SEQ ID NO: 3156 - protein, 380 aa, Arthrospira sp.
MPNYQNYVFVVDTLGQPLSPTHPARARKLLKQGLAAVFRTYPFTIILKKTVENPVNEPSRIKLDPGASVTGIALVNQSRDTVIWGAELAHRGDRIRAKLTARRVVRRHRRYRKTRYRQARFNNRKRAYGWLAPSLKHRVETTLTSVNRLISSCPITDISMELVRFDTQKLLNPEISGVEYQQGVLFGYELREYLLTKWQHQCAYCGGQNIPLEIEHIQPKSQGGSDRVSNLAIACHKCHQKKGSQAVEQFLEKKPEILKRLLVQAKAPLKNAAAVNSTRWALFNSLKLTGLPIEIGTGGLTKYNRTVQGLPKTHWLDDADCVGKSTPTRLKIKTHQPLLMTCFGRGGRQKAAPNKRLPIRHNPLKPIKGWLTGDIAKHKT

SEQ ID NO: 3157 - protein, 406 aa, unidentified
MVYVQDINGKPMMPTTRYGKVRRLLKDKKAVVVNLCPFTIKLMYVTSDYKQEIVLGVDAGTKHVGLSATTKSKELYSSEVILRNDIVDLLSTRRELRKARRNRLRYRKPRFDNRVKSKRPGWIAPSVKYKVDAHICVINNVCSILPISRIVIEVAQFDTQKIKNPEISGKEYQEGDQLEFWNTREYVLARDGHKCQYCKGKSKDSILNVHHIESRKTGGDSPSNLITLCETCHKEYHKGNIDLKIRRGKSLRDAAVMGIMKWRLYEELKSRYDRVFMTFGYITKHNRIKYGIEKSHTSDAFVISKNINAKRIERQYLKRLIRRHNRQIHKMKILKGGKKKNNQAPFEVFGFRLFDKVLYNNKIFFVYGRRKSGSFNIRDFNGENSKDVSRKKFKLIRGKRHPIILK

SEQ ID NO: 3158 - protein, 346 aa, Arthrospira sp.; identical to SEQ ID NO: 2872

SEQ ID NO: 3159 - protein, 442 aa, Streptomyces sp.
MPCHPARARALLRKGRAVVVRQAPFVIRLKDRTRAASEVKGMQLRIDPGSKGTGLVLTDEKEEYDDHGAMVTVRRGLISVELQHRGDQIRAGMRQRAGYRRRRRKANLRHRSRRSGNRARRAGWLPPSVQHRVDTTFSLADRLCRHAPVAEIHMERVAFDTHSLSVGRRLKGTEHQRGPLTGTTIRGHLRVTWKGACAYCGVTGVPLNVEHLRPRSRGGSHRVANLVLACVPCNRAKGSNPVRIFLADRAERLAAILPQLSAPLDDAATMNATRRQLSDVLSTLGKPLHAWVGELTKANRLATRLDKTHTLDALCVGPLDHAAGDRIVRFPSHVLTAKATGRGSYARTTPDRYGFPRLLRTRAKQHFGYVTGDLVRAVVPRGKWAGTWTGRVSVRTRGQHSLATALGRINVSHRTLRLLQRGDGYGWGIRQESTASTSRKMG

SEQ ID NO: 3160 - protein, 423 aa, Arthrospira sp.
MSNHIFVLDTNRKPLTPCKPGMARSLLKAGKASVFRRYPFTIILNKEVDANPEPLELKLDPGSKVTGIALKQGNHIIFAAELQHRGQQIKEALLSRRQLRRSRRNRKTRYRPARFLNRTRPEGWLAPSLQHRVDTLMTWVHRFRRLAPVGRITQELVRFDLQLMENPEISGVEYQQGELQGYEIREYLLEKWGRTCAYCGAQNVLLEVEHIQPRSKGGSDRVSNLTLACHSCNQAKGNGDIRDFLSGQPDVLSRLLRQAKSPLKDAAAVNSTRWALFKALKATGLPVTTGTGGQTKFNRLRLNLPKAHWLDAACVGPVESLEVLTSKPLLILAKGHGTRQMCGTNKYGFPNRHRSRRQIHKGFQTGDMVTALVTAGKKIGSYLGRVLCRASGSFDITTASVRVAGISHKYCQPIHRKDGYAYA

SEQ ID NO: 3161 - protein, 442 aa, unidentified
MVTVQQSTHHLPFGRVFIRRNLFMVYVISQDGKPLMPCSDPIARLLLKQGKAKVKKREPFTIKLTYETTNYTQGLTLGVDTGSGTIGTAVSKDNGDIVYMSEVVVRNDITDKMTQRAKYRRNRRNRKTRYRKARWLNRASSIKKDRFSPTMQSKLHSHVREIEYIQSILPVTEMVFETGQFDMHLMKNPSLANPKVRPWGYQKGANYGFENTKAMVLNRDNYTCQCCKGKHKDSKLEVHHIVFRSQGGSDEESNLLTLCHTCHKDLHSGKINPKLSGKVKGNLKYATQMNSIRKQLFRCYPNAIETFGYVTKVNRLHLGVAKEHYYDACTIATQGNAFNVKSNLYKKKCVSDGDFQKTKGIHSEQPIVTDKICGFRKFDKVRYFGNDYFIKGRMSTGYAILMDIDGNKIDFSTMPRGYKTPKLSNCKRITARSTVMTQVKVV

SEQ ID NO: 3162 - protein, 323 aa, unidentified
RRSRRNRKTRYRAPRFDNRVHSKHKGWLAPSVEVKIQEHITVIKHICKILPISLVRVETAEFDTQRLKAMLAGKPLPVGTDYQLGEMYDEYNVRQYVLKRDHYTCQCCGAHNTAEKVVKLHVHHLESRKTGGNAPSNLVTLCTTCHKNLHKGRVTLDGKERGKPLRDAAFMGIMRKTLMTRLKEELPIPVQRTYGYITKMRREQNDIKKSHTNDARCISKHPLAEPCSVCYRTKAIRHHNRQTHKANFSKGGYRKRSQTPYIVEGYRLWDKVLYKGQECFVSGRRSSGSFALKKLDGTSISKGVTFKKLRLLEPAANYLIERM

SEQ ID NO: 3163 - protein, 410 aa, Bacillus sp.
MTYCFVLDAQGNKLSPTRENRAWYLIRKKKATLQNKFPMVIQLKREIPLEEIDTTPVKLGIDDGSKQVGIALVQECKTISKPVFKGTIELRTDVKEKMSVRRGYRRYRRQHKRYRPVRFNNRSSSKKEGRIAPSIKQKKDSILRVVNQLHKWIRIDHSFLEDVLIDIRALEKGYKPYNWEYQRSNRLDENIRKAVVLRDHNTCQECGVTNTRMEVHHIIPRRFNGGDSIHNLITLCSSCHEKVTGDEIAHTKRFHKKLKGRNIHFGDAMHVMLGKTFLQNKLREIAPLTLTTGGDTANKRIDWGIEKTHANDAIVVCGSEVNSQQCEIKNWSIKPLKKRSKKKIESINGFHHRDFVQYTKRNGKAYFAYITSFYPLKNQCNMTTIDGKVLKRYGVNRLKLICRSNKIFWY

SEQ ID NO: 3164 - protein, 476 aa, unidentified
LAASGTEGVSHPGLPGKYKHKGGQLMSVAVISKTGERLMPTSEYRARKLLKSGKAIKHSYHPFTIQLTERETGDIQPIELCMDTGYIHIGISVKSEKHEYLAEQIDTLTDERGRHDACRMYRRQRRSRKRYRQARFNNRKRDQGWIAPSLEHKKKIHIQAISRINNVMPITDITLEMGNFDTQVLKAKEEGKPLPHGADYQHGGRYGIATLREAVFSRDGYKCQCCGRTIKDGVILHIHHIKYRSQGGTNSMSNLATVCDKCHTPKNHKPGGKLYNWKPKLSSFKGATFMTAIRWQLYNEVKALFPDIDIHITYGAATKERRRKLDIDKSHVNDAFVMGQFHPKHRIKAILCKKKRRNNRCLEKFYDAKYIDSRDGKKRSGQELFNGRINRNHKKNSENLHQYRLQKVTAGKRTVRKQHYKIQPHDIVIYENRKRETAGCHCNGTRMMLLPDKKSASIKKVKIYKYAGGYFKSAFN

SEQ ID NO: 3165 - protein, 425 aa, Nodularia sp.
MSNFVLVLDTNKKPLTPIHPGDARFLLNQQKAAVFRRFPFTIILKEPKSEVPTQPIELKIDPGSKTTGFALVQNNKVIWGMELQHRGLAIKESLETRKGVRRGRRSRHTRYRQARFLNRTKPQGWLAPSLSHRVLTINTWVKRLCNFAPITDIVQELARFDLQQLENPEISGFEYQQGELQGYEVREYLLNKWNRKCAYCTAENVPLQVEHIKPKAKGGTNRISNLCLACEKCNIKKGTQDIEKFLAKKPELLKQILSQAKRPLKDASAVNSTRWALFNKLKETGLPITTGSGGLTKFNRTRLGLPKTHWIDAACVGKVETLKILTTKILTVKSTGHSCRRFCRINKFGFPCTEPKKIFTHVSTGDFVKATLHKDRKNITSGKYVSRVKTPTKNGCEIVINGFRVEFSTMKDITKVHCSDGYSYV

SEQ ID NO: 3166 - protein, 420 aa, unidentified
MEYVYVLDKNGSPLVPTSRCGKVRRLLNRGEARVIQREPFTIKLLKETTNNTQPINLGVDTGAVYVGVSAIGNSKAYYKAEVMLRADIKKKMNNRRQSRKFRRNRKTRYRKPRFLNRGNSIKKDRYPPTLISTFNAHIREIEFVKSILPITQLVLELGQFDPHALKDPLIRNQKWKYQKDVNYGFQNTRHAVLARDKYKCQCCGKKNCRLEVHHIKFRSDNGSDDLENLITLCEDCHKAVHAGKIEIKKQGRKKNIGLAAATQMNVLRCMLQRKYQEAEIVYGYQTKVTRELMHLPKSHINDAIAIASMGELDINIQGQEYKKRVVPVGDRILAQGVRDEKAIPKGKIAGFHRYDKVEYLGEEYFIKGRSKTSPFRLMDIYGNLCTFENKSPYKYAPTKKLKRVLARNSVLCIRDVAHVV

SEQ ID NO: 3167 - protein, 423 aa, Arthrospira sp.
MSNHIFVLDTNRKPLTPCKPGVARSLLKAGKASVFRRYPFTIILNKEVDANPEPLELKLDPGSKVTGIALKQGNHIIFAAELQHRGQQIKEALLSRRQLRRSRRNRKTRYRPARFLNRTRSKGWLAPSWQHRVDTLMTWVQRFRRLAPVGRITQELVRFDLQLMENPEISGVEYQQGELQGYEVREYLLFKWGRTCAYCGAQNVPLEVEQIQPRSKGGSDRVSNLTMACHSCNQAQGNGDIRDFLSGQPDVLSRLLRQVKSPLKDAAAVNSTRWALFNALKATGLPVTTGTGGQTKFNRLRLNLPKAHWLDAACVGPVESLEVLTSKPLLILAKGHGTRQMCGTNKYGFPNRHRSRRQIHKGFQTGDMVTATVTAGKKIGSYLGRVLCRASGSFDITTASVRVAGISHKYCQPIHSTDGYAYA

SEQ ID NO: 3168 - protein, 470 aa, Rhodanobacter sp.
MAVFVLDTHKEPLMPCSEKRARLLLGRGRARVHRLRPFAIRLVDRRKEDSVLQPLRVGIDPGSKVTGLALCRESEAVDRITGEVATTRHTLFLAELQHRGQAIRDALTQRAGYRRRRRNSHLRHRAARFDNRTRPPGWLAPSLQHRVDTTVAWVSTLSRLAPISAIDQELVRFDMQSIQNPDISGVEYQQGTLAGYEVREYLLEKWHRQCAYCGAQNVPLQIEHVQPRSVGGSDRVSNLTLACGACNAAKGARDVRVFLAHKPAVLKRIPVQATAPLKDAAAVNATRWALFNALKGLGLPVEAASGGRTKWNRTRLGVPKAHALDALCVGRMDAVAHWQVPTLAIKATGRGSYQRTRVDRFGFARGFLMRTKSVRGFQTGDHVSARVPDGKKVGLHIGRVAVRASGTFNIQTPHGIVQGISHRHCRMLQRADGYGYQYVAPHHKESENGGHAARAALSLPGQNAGVSRAK

SEQ ID NO: 3169 - protein, 532 aa, unidentified
MSTVYVLNKDGKPLMPTTRGGHVRHLLKEQKARVVQSNPFTIQLLYKTNDAVQPLYLGIDPGRTNIGVAVVKADGTAVFTAHLKSRNKEIPKLMQDRKRARRARRTNGRRHRRQRRAKANGTISKKCVKQTTTQNGSVSKRAKEIGIIKRHLPGCEKDVLCIGIKNKEAKYTNRERPEGWLTPTANQLLQTHVNLVKKVQKLLPISDVVLEVNKFAFMRLDNPDIQKWQYQQGPLYKKESLESAVSEMQEHHCLFCKKPIDHYHHVVPKSENGSNTIANIVGLCAEHHNLVHKDVAWQEKLAEEKTGLNKKYGALSVLNQIIPALTNKLSVLFPKHFFVTAGKSTHDYRAAHGVSKDHWLDAYCIACSVLPSNVCDSNINNHVPYELKQFRRHDRRVLHKANMSRVYTLNGKAVATNRHKAIKQTTDSLEEFRQNYPDDVYKLKVKEHHPAYRNLNRNYPGSVFLVGKQAHVMQGIASSKDGKTTKYNDTNATTITAGKCKFVAKNSGILFVQCKFRKALSDGTTKKLQYPV

SEQ ID NO: 3170 - protein, 269 aa, Aphanothece sp.
LVRFDLQQLENPEISGVEYQQGELVGYEVREYLLNKWDRKCSYCSIENVPLQVEHIHPKAKGGTNRISNLCLACESCNLKKGTKDINVFLAKKPDVLKRILSQAKRPLKDAVAVNSTRWTLFNALKNTGLPITTGSGGKTKFNRTRLNLPKQHWIDAACVGIVDTLKVLTNKPLLIKATGHGTRQSCRTDKYGFPSRYVPRFKFIKGFQTGDIVKAVVTKGKKIGTYVGRVAVRSIGSFNISSPNGLIQGISYKNCTHIHKKDGYSYAT

SEQ ID NO: 3171 - protein, 379 aa, unidentified; identical to SEQ ID NO: 2727

SEQ ID NO: 3172 - protein, 420 aa, unidentified
MQYVYVLNKHGEPLMPCSPRKARLLLKQKKACVVKRTPFTIKLLYGSTGYKQPITLGVDAGSKHIGISATTEKCELYREEATPRNDVVDLLSARRAFRRNRRNRKTRYRAPRFNNRVHSKHKGWLAPSVEVKIQEHITLIKRVCRILPVTLVRVETAEFDTQRLKAMLEGKPLPVGTDYQLGEMYDEYNVRQYVLKRDKYTCQCCGAHPTKTKAVKLHVHHIETRRTGGNAPNNLITLCTACHKALHAGKVTLNGKKRGKPLKDAAFMGIMRKTLMERLLKELKIPVQGTYGYITKYLREKNGIPKSHTNDARCISKNPLAIPCDTCYYTKAVRHHNRQLHKATILKGGIRKANQAPYIVKGYRLWDKVSCNGTECFITGRRTSGYFALKKLDGTVISNSISYKKLRLLEVATNYITERK

SEQ ID NO: 3173 - protein, 423 aa, unidentified
MSNHVFVLDTNRKPLTPCKPGVARSLLKAGKASVFRRYPFTIILNKEVDANPEPLELKLDPGSKVTGIALKQGNHIIFAAELQHRGQQIKEALLSRRQLRRSRRNRKTRYRPARFLNRTRSKGWLAPSLQHRVDTLMTWVHRFRRLAPVGCIAQELVRFDLQLMENPEISGVEYQQGELQGYEVREYLLFKWDRTCAYCGAQNVPLEVEHIHPRSKGGSDRVSNLTMACHSCNQAKGNGDIRDFLSGQPDVLSRLLRQAKSPLKDAAAVNSTRWALFKALKATGLPVTTGTGGQTKFNRLRLNLPKAHWLDAACVGPVESLEVLTSKPLLILAKGHGTRQMCGTNKYGFPTRHRSRRQIHKGFETGDMVTATVTAGKKIGSYLGRVLCRASGSFDITTASVRVAGISHKYCQPIHRKDGYAYA

SEQ ID NO: 3174 - protein, 427 aa, Nitrosococcus sp.
MNSVFVLDTDKTPLMPCRPSRARRLLRDGRAAVFRMQPFTVILKYRVVPTPQPVEFKVDPGSKTTGMALVGHFSVQGRVVLWAANLMHRGQSVRDRLERRRLLRRGRRGRKTRYRAPRFLNRTRPQGWLAPSLRSRVENVSTWFNRLLDRAPISACHIETVRFDLQKIQNPEISGVEYQQGELQGYEVREYVLEKWGRKCAYCHKTNIPLEIEHLVPRSRGGSHRVSNLTLACTPCNQKKNSKTAAEFGYPHLQTKANQPLKDAAAVNATRYAIGRAIQSIGLPTSFWSGGRTKKNRLSQGYAKDHWIDAACVGESGEQVTLAEGDRPLQIKATGRGTRQVVRTDKYGFPRGKAGRCKRVKGFQTGDRVRLIQPKGKYEGAHTGILAGIRANGVFDIKAKAGKISANWKNFKLIQRGEGYDYGLSAV

SEQ ID NO: 3175 - protein, 428 aa, unidentified
LKVFVLNMRGQPLMPCSPAKARHLLKAGKAVVKRRTPFTIQLRIATGETKQNVTLGVDAGAKHVGLSATTEKEEVFASEVELRQDITGLLAARLSLRRDRRHRKTRYRAPRFLNRVRSKHKGWLAPSVENRIQAHMSRIEAVCRLLPVTKIVIETASFDIQKIKDPSVEGTDYQQGDQLGFWNVREYVLFRDGHVCQHCHGRSKDKILNVHHLESRQTGGDAPNNLITLCETCHKAYHAGKIKLKVKRGQSFRAEAFMGIMRWTLLDRVRKAHPGLPVENTYGYLTKHTRITHGLPKTHCVDAYCIAGNLKAVRRGVYLHQRQMRKHNRQIHKFTVLSKRLEDGTKIGYRKLNQSPYLVHDFRLFDKVRCLGQIGFIFGRRSSGYFDVRRLDGVKLSPSISWRKLTLLEKRSTYLTELRKQDGASSPV

SEQ ID NO: 3176 - protein, 515 aa, unidentified
MTALEERLSKTEYIYVLGFDGKPQMPTRRKRHVLKLLKTGRARIAEDIPFTIRLTYRNAPVLQPVTLAEDPGRTNIGAAVLSPLGDLLFAAVIETRNKEIKKLMTDRQKSRQASRRGERKARQRLAKRYGSMVKSGMVMRKLPMYAADRFVTCKFIRNTQARFCNRKRCPDWITPTVQHLVQTHLNIIRKISRYLPVTDIAFEVNRFAFMHMENPEAIGVDFQNGPLKGYGDVKEAIRTQQHGKCLMCKKPIAHFHHIVPRSRGGSDTIQNLAGLCPECHTKVHKDTAFRKDFDEKKSGQLKKYGALSALNQAVPFICKKLLEEYGEEHVHFCRGLDTSLIRTALGFEKTKKDQMHEVDAYCVGLAALEVNEVETPAFDHTFQIRQFRRQDRSIIHHQTGRSYYQGKEKVAQNRKPGFEQKTTALSQWYEEQVRIHGEKEAEKLRSQLRVEKSCRHYNDMDRFLPGAVFLYEGKRYVLSGRITNGKYLRACGQGMKNFPAAEGTFIRHNAGLVFI

SEQ ID NO: 3177 - protein, 426 aa, unidentified
MSNYVFLIDANKTPMNPIHPSHAKKLLETNKAAIFRRYPFTLIMKRVVENIVAYPLTLKLDPGSKLTGFALVNNRDEVIWGMELQHRGLAISDGLQTRSAVRRGRRSRHTRYRQPRFVNRTREKGWLAPSLRHRVLTTETWVKRLCKFAPISAIVQELVRFDLQQMENPEISGMEYQQGALQGYEIKEYLLNKWDRKCTYCGAENIPLQVEHICPKANGGTNRISNLCLACQKCNQNKGTQDIETFLAQKPDLLKKILSEAKRPLKDAAAVNSTRWSLFNVWKSLGLPVKTGSGGLTKFNRTRLLLPKAHWIDAACVGITGTLKILITKIFTAKSTGHGIRRMCRINKYGFPCTAPKQTFTHVSTGDFVRVQIVKERKNLQSGTYTGRVKTPTNKGCEVVINGFRVGFSTMKGVSRIHCSDGYNYA

SEQ ID NO: 3178 - protein, 423 aa, Arthrospira sp.
MSNHIFVLDTNRKPLTPCKPGVARSLLKAGKASVFRRYPFTIILNKEVDANPEPLELKLDPGSKVTGIALKQGNHIIFAAELQHRGQQIKEALLSRRQLRRSRRNRKTRYRPARFLNRTRPEGWLAPSWQHRVDTLMTWVHRFRRLAPVGRITQDLVRFDLQLMENPEISGVEYQQGELQGYEVREYLLEKWGRTCAYCGAQNVPLEVEQIQPRSKGGSDRVSNLTMACHSCNQAKGNGDIRDFLSGQPDVLSRLLRQAKSPLKDAAAVNSTRWALFKALKATGLPVTTGTGGQTKFNRLRLNLPKAHWLDAACVGPVESLEVLTSKPLLILAKGHGTRQMCGTNKYGFPNRHRSRRQIHKGFQTGDMVTALVTAGKKIGSYLGRVLCRASGSFDITTASVRVAGISHKYCQPIHSTDGYAYA

SEQ ID NO: 3179 - protein, 513 aa, unidentified
LKKEAAGHRQGKDCRPVRYGPPYRAGMPDGRRKPERKHMVAVVTSTGKPLMPTSAYRARKLLKKRRAVIFKYRPYFTIQLVDRADGEVQEVEYKSDTGSVHVGISVCTEKKELLSEQRDLLENEPEHHNDRKKNRRTRRNRKRYRKPRFDNRKKKPQESHEKWLPPTLLHKMEVQVRLFREFCRVVPVTSACFEMGKFDTQALKAVSKGEPVPEGEGYQKGERYGTDTLRAAVFLRDGHTCRFCGRSVKDGAILHVHHVGYWKGDRTDRLANLASACEQCHTPANHGKNGILYGKEPEFKTLKDASYMTSVRWIMLDEIKKVAPGVQVSVTYGVTTKRKRQELHLPKSHVNDAFSMASFHPKKRSDTEYWKKIPRHDRVLQRFYDAVYLDTRDGSEKKGSELSNGRISRNHKKDSENLHRYRGYKVSKGHNSIRRGASSLKPGSIVMYKGEKMTVHGTHTRYVTDKDGKTVKKVNVQFTRPASDGKKSASLKKCTPVSRVYNTGWKRYWPDKK

SEQ ID NO: 3180 - protein, 319 aa, unidentified
APRFDNRIRTKRKGWLAPSVENRINAHLSRIGAILRLLPVTKITVETASFDTQLLKNPDISGKEYQEGEQLGFWNVREYVLFRDGHACQHCHGRSKDPVLNVHHLESRRTGGDSPGNLLTLCETCHKALHRREIKLKTKRGQSFRAEAFMGIMRWEVLNRLKASHPELEVHNTYGYRTKHTRIVNGIDKSHCADAFCIAGNLGAKRLGEFFFQKQTRRNNRQIHKLSILKHGLRKRNQAPFEVKGFRLFDKVVCQGEEGFIFGRRSSGSFDVRKLDGTRISAGISYKKLRLLEKRRTYLKEIRKEEALPPLPEGRSLRA

SEQ ID NO: 3181 - protein, 442 aa, unidentified
MSTTVFVLDKKHRPLMPCRPARARRLLRAGRARVVKRFPFVIRLVDRTVEQSEVQPVLIKLDPGSRETGAAVVRDDGKKRHHALAFFVIEHRGGAIRDALKARSAFRRRRRSQNLRCRSPRFLNRVKPKGWLPPSLRHRVETTLSFVRRMCRYLPVSGIAAELVKFDSQKLQTPEVSGIEYQQGTLFEYEVREYLLEKFGRKCVYCGAEGVPLNIDHVVPRAKGGSNRVSNLVLACMSCNQKKGARSLEDFLKGKPEVLARVRRELKTPLRDAAAVNATRWVLFNELKATGLPVETGSGALTKLNRHAFGVEKEHWLDALCVGRLNGAVTRKGLNVLEIRCMGRGSRQRTRLTKYGFPRGYLMRQKCVHGFATGDMVEANVPKGKKAGLWRGHVAVRVSGSFNIQTPKGVIQGVGWKHCRLISHNDGYGYAWLGHAPHSSPA

SEQ ID NO: 3182 - protein, 426 aa, unidentified
MSKVFVVDLEKRPLNPVHPAQARQLLRNKKAAIFKRFPFTLILKESRPDAPIQPLRLKIDPGAKHTGIALVNDSTGEVVFAAELKHRGFAISFALTSRRQLRRGRRNRQTRYRKPRFLNRTRPDGWLAPSLQSRVENIKTWVNRLRKLTSINAISQELVRFDMQLMRNPDIQGKEYQQGTLAGYETREFLLEKWNRQCAYCGVKDVPLQIEHIYPRAKGGTNSITNLTLSCEKCNTKKGTKDIKDFFKKNSARLEKILKQAKRPLADAAAVNTTRFTLLEVLKATGFPVETGSGGLTKFNRNQQNLVKLHWLDAACVGKSTPILNIKGVKPLLITANGHGTRQSCRTDKFGFPNRHCSRTKFHFGFQTGDIVKAVVTSGKKVGGYVGRIATRATGSFNISTKNGLLQGINHKYCKHIHKKDGYSYA

SEQ ID NO: 3183 - protein, 432 aa, unidentified
LSKVKTMRVFVFNMRGRPLMPCSQRKARLLLRENKAKIYKYHPFTIQLTYTTGETKQDCHIGIDTGSKYIGAAVRSEDKVFWKGEIELRQDIRSNLDTKRIYRRSRRNRKTRYRKPRFLNRKRRDEWLPPSLQSRINHTFHWIDTLSSLVPNPILHIEVGKFDVAKMINPEIHGVDYQHGQTYGFFDERYFVFARDNYTCQCCGKSKNKILNTHHIIYRSNGGTNRVDNLITVCTDCHTSQNHRKGGIFYQWQEQHKKVKQYKEPPFMNTLRKRIFVAYPDAEITYGSETTPKRKAMKLDKTHYNDAIVISGINEIKENPEEWLLIKQFRKKKRSLHEATARKGRKKPNRNQTRNSKNTPYYKGFYLNDKVSVFGRPMIEYYRSGTGSGGAVNVEYTTNILDGFENSNLNFNKTIVEDYKEWLKDHPFDNGG

SEQ ID NO: 3184 - protein, 447 aa, unidentified
VPAYRIKHITKKEAPYMVYVLDIDGQPLMPTSRHRKVRKLLNSHLAKVVKRCPFTIQLLYQSTKEIQPVSLGVDAGSRHIGLAATTEQKIVYQEELVPRNDVVKLLSARRALRSSRRSRKTRYRKPRFNNRAHSKHKGWLAPSVEVKIQEHITAIKRICQILPISDIHVETAEFDLQRLKAMEEGRLLPAGTDYQLGEQYDFYNTRQYVLHRDEYTCQCCGTHDNNVKLHVHHIESRQTGGDAPNNLITLCEHCHKLLHAGKTILPKGKKRGKSYRDATFMGIMRKTLLERLKKEIDVPVEGTYGYITKYWRERAGLEKSHINDAICISRHPYARPLETYYLTKAVRHHNRQIHKTKLSKGGIRKRNQAPYLVKGFRLFDKVLYQGESYFIFGRRITGYFDIRTLDGTKVNKGSTSYKKLRIQDTAEAYLTEVRAIPHMNEFTCVLA

SEQ ID NO: 3185 - protein, 634 aa, Nocardiopsis sp.
MTRAPSRARSSLGGASSTFPMGTPASVRVPVPPLVPAPPSTTVIPVLSRYGWLVTPSETWFRGPSAKDNHLRPQPTSRGNAFPARRRGFRPPGRGPGVTSTSQHQGGDQLATFHTGEKTHQAVLPQRPALESASADIPRNGNETGRGSHVRVAPGVEHVRGETTGGSPTAGGVTPVPSGAGEQAREGRPPKTTPRKGHPYVFVLDRHGTPLQPTRPARARRLLAKGRAIVARHTPFVIRLKDRTTAESEVDGVETGIDPGSKRTGIAVFTDRHGERRGRYAIRLDHRGGQIAKRMRQRAAYRKGRRSRNLRYRTARFDNRTRPRGWLPPSLRHRVDTTLAWAGRLARWAPVRAVHVERVAFDVHALSAGRPVEGVEYQHGTLHGYEVREYLLAKWGRACAYCGATGAPLNIDHVRPRSRGGSDRVANLALACVPCNRAKADQPVEEFVTNPRALAGISAQTKAPLRDAAAVNATRWALWRSLDGCLPTRVGSGGRTKWNRTRNHLPKSHTLDALAVGRVEAITTAVSTVLVVGAAGRGSYARTRADRHGFPRLRLPRRKRFFGFQTGDLARAAVPSGMNAGTHTGRVAVRSGGSHTLQTSYGPIKTSWKNLCLLQRADGYGYTTQKEAGAPSTA

SEQ ID NO: 3186 - protein, 423 aa, Arthrospira sp.
MSNHVFVLDTNRKPLTPCKPGVARSLLKAGKASVFRRYPFTIILNKEVDANPEPLELKLDPGSKVTGIALKQGNHIIFAAELQHRGQQIKEALLSRRQLRRSRRNRKTRYRPARFLNRTRSKGWLAPSLQHRVDTLMTWVHRFRRLAPVGRITQELVRFDLQLMENPEISGVEYQQGELQGYEVREYLLEKWGRTCAYCGAQNVPLEVEHIQPRSKGGSDRVSNLTMACHSCNQAKGNGDIRDFLSGQPDVLSRLLRQAKSPLKDAAAVNSTRWALFKALKATGLPVTTGTGGQTKFNRLRLNLPKAHWLDAACVGPVESLEVLTSKPLLILAKGHGTRQMCGTNKYGFPNRHRSRRQIHKGFQTGDMVTALVTAGKKIGSYLGRVLCRASGSFDITTASVRVAGISHKYCQPIHSTDGYAYA

SEQ ID NO: 3187 - protein, 440 aa, unidentified
MVVFVLDKRKKALMPCSEKRAWMLLERGGACFDRMVPFTIPPVDRRVEDSALQPLRLKLDPGSKATGMVWVRGKETVDASTSEIVRAIPVHMLLEWQHRGEAIWDALARRRAFRRRRRGNLRYRPSRFDNRSKPKGWLAPSLRHRVDTVLGWVTRIGRLRPITALSQELVRFDTLALKHPEISRTEYQQGSLFGYEVREYMLEKWGRKCAYCDATGLPLEIDHIHPCSKGGSDRLSNLTLTSHPCNQRKGNQPLEQFLVKAPEPAQKIMAKAKSPLRDDAAVNSSGWALFQRLKARGLEVEVASGGRTKWNRYRLSIPKTHCLDAACVGHVDAVECWKQPVLQVQAMERGRYQRTRLTKYGFPHVYLTRSKSSFGFQTGELIGAVGRTGKKVGIYLGRVAIRASGSFEVQTGNGLVQGKASTDSLPWSGVQMDMGIRGPR

SEQ ID NO: 3188 - protein, 423 aa, unidentified
MSNHIFVLDTNRKPLTPCKPGVARSLLKAGKASVFRRYPFTIILNKEVDANPEPLELKLDPGSKVTGIALKQGNHIIFAAELQHRGQQIKEALLSRRQLRRSRRNRKTRYRPARFLNRTRPEGWLAPSLQHRVDTLMTWVHRFRRLAPVGRIAQELVRFDLQLMENPEISGVEYQQGELQGYEVREYLLFKWDRTCAYCGAQNVPLEVEQIQPRSKGGSDRVSNLTMACHSCNQAKGNGDIRDFLSGQPDVLSRLLRQAKSPLKDAAAVNSTRWALFKALKATGLPVTTGTGGQTKFNRLRLNLPKAHWLDAACVGPVESLEVLTSKPLLILAKGHGTRQMCGTNKYGFPNRHRSRRQIHKGFQTGDMVTALVTAGKKIGSYLGRVLCRASGSFDITTASVRVAGISHKYCQPIHRKDGYAYA

SEQ ID NO: 3189 - protein, 413 aa, unidentified; identical to SEQ ID NO: 2636

SEQ ID NO: 3190 - protein, 533 aa, Actinomadura sp.
VLPQQSALEFGSADIPRIGDETGLEGRQAPGAVHVRGETLGASPGVERVTPNLAVGEKVREGHPAVFVLDKHGAPLQPTTPARARKLLKQGRAVVARHTPFVIRVKDRTIAESQVDGVELGVDPGSRHTGIAVFTDKEGNRRGLYGIDLAHRGGSIRDKLSQRAAYRRGRRSRNLRYRAPRYSNRTKPRGWLAPSLRHRVETTMAWTARLARWAPVQTVHLERVAFDTHAMSAGRPLEGAEYQHGTLHGTEVREYLLAKWGHACAYCGITAVPLNIDHIHPRSEGGSDQVGNLCTACIPCNQAKNNRSVEDFLSTSPKQLARILAHAKPSLRDAAAVNTTRWVLWRALGAAFPTVRTASGGRTKWNRTRTGLPKTHTLDALCVGHLDTIDRIPRTVLTAAATGRGTYTRTRTDRYGFPRLRLPRVKTFFGYQTGDLARAVVPAGKNAGTHTGRIAVRASGSFNIRTRHGLLQGVRHKHLHLLQRADGYGYTTKPEGVISMRPDRPERRLGPSCPPALSFPPPARAGESTKGTR

SEQ ID NO: 3191 - protein, 570 aa, Streptomyces sp.
MRHVRSLNSNVTHTTPLSPKSLRAPASGATCPRRPHVRVISPDPCSLGNPRCVASGTSREGRSLAPSYRVTSPGHHDLRISRGASMTTFFTGEQTHQAVLPQQPALESAGAYTPGSRDETAHGLPDPKPGTGVGHGRGETGAVRTRTRRRHARRLDPGSKATGIAVTDERDEVGAKGRTALVRRGLVSIELRHRGRQIHSGMVRRAGHRRRRRSANLRYRAPRRDNRTRPDGWLPPSLRHRIDSTMSLVARLCRYAPVLEIHVEQVAFDTALIAAAVSSREQDFSERTHAGSEIRESLLAKWERSCAYCGATGVLLNIEHVRPRSRGGSDRVANLVIACVPCNQAKGTARIDEFLADRPARLERVIAQLRRPLHDVAAMNTTRLLLVKTLATHGVAVHTWSGGRTSWNRLAMGLPKSHTLDALATGVIDLERGDAVVRIPAQILVVRSTGRGSYARTTPDRYGFPRLQRPRRKIHHGFSTGDLAAAVVPKGKWAGRWVGRVSVRAGGQHRITTLTSRFDVSHRNLRLLQRADGYTYGFADEIRLSEEHGPAYSGRTLKGGDPGNVRTPDA

SEQ ID NO: 3192 - protein, 408 aa, unidentified
MVYVQDINGKPLMPTTRYGKVRRLLKANKAVVVNICPFTIKLTYVTSDYKQEIVLGVDAGTKHVGLSATTKSKELYASEVILRNDIVDLLSTRRELRRTRRNRLRYRKPRFNNRIKSKKQEWIAPSVKYKIDAHIRVVEKVYSVLPVSKLIIEVAQFDTQKIKNPDISGKEYQEGDQLGFWNVREYVLARDGHKCQYCKGKSKDAILNVHHIESRKTGGNSPSNLITLCETCHKEYHKGNIDLKIKRGKSLRDAAIMGIMKWRLYETLKSKFSNISMTFGYITKYNRIRNNIEKSHISDAFVITNNFNAKRLGFLYKIKLVRRHNRQIHKMKIQKGGVKRLNQSPFEVFGFRLFDRVKIDNKFYFIYGRRRTGRFNIRDINGENSKDVMYKKLNLSRCKRFMVKIEMN

SEQ ID NO: 3193 - protein, 423 aa, Arthrospira sp.
MSNHVFVLDTNRKPLTPCKPGVARSLLKAGKASVFRRYPFTIILNKEVDANPEPLELKLDPGSKVTGIALKQGNHIIFAAELQHRGQQIKEALLSRRQLRRSRRNRKTRYRPARFLNRTRSKGWLAPSLQHRVDTLMTWVHRFRRLAPVGCIAQELVRFDLQLMENPEISGVEYQQGELQGYEVREYLLFKWDRTCAYCGAQNVPLEVEQIQPRSKGGSDRVSNLTMACHSCNQAKGNGDIRDFLSGQPDVLSRLLRQAKSPLKDAAAVNSTRWALFKALKATGLPVTTGTGGQTKFNRLRLNLPKAHWLDAACVGPVESLEVLTSKPLLILAKGHGTRQMCGTNKYGFPNRHRSRRQIHKGFETGDMVTATVTAGKKIGSYLGRVLCRASGSFDITTASVRVAGISHKYCQPIHSTDGYAYA

SEQ ID NO: 3194 - protein, 417 aa, unidentified
MPCSPAKARLLLKEKKAIVKRRTPFTIQLTIATGEARQPVTLGVDSGYKHIGLSATTEKAELYASEVELRQDITDLLSARLALRRSRRSRKTRYRAPRFDNRVASKRKGWLAPSVENRIAAHMSRVEAVMRVLPVTAITVETAAFDTQLLKNPDIAGEAYQQGEQLGFWNVREYVLFRDGHVCQHCRGKYKDPILNVHHIESRRTGGDAPNNLITLCETCHKAFHRGEIKLKVKRGKSFKAETFMGIMRWTLFERLKKAHPELRVRNTYGYLTKHKRISHGIAKSHCADAYCIADNLGAKRLEGFFFQKQTRKHNRQIHKLSILKGGLRKKNQAPYEVKGFRLFDKVICKGEEAFIFGRRTSGSFDVRRLDGTRISAGINYKKLRLLEPRTTYLTEFRKEAALPPLHKCRGFRAEFL

SEQ ID NO: 3195 - protein, 420 aa, unidentified
MQYVYVLNKHGEPLMPCSPRKARLLLKQKKACVIKRTPFTVKLLHGSAGYKQPVTLGVDAGSKHIGISATTEKHELYREEATPRNDVVDLLSARRAFRRSRRNRKTRYRAPRFNNRVHSKHKGWLAPSVEVKMQEHITLIKHVFRILPVTLVRVETAEFDTQRLKAMLEGKPLPVGTDYQLGEMYDEYNVRQYVLKRDNYTCQCCGAHSTKTKGVKLHVHHIETRRTGGNAPNNLITLCKACHKALHAEKVTLDGKKRGKPLKDAAFMGIMRKTLMERLRKELKIPVQGTYGYITKYLREKNGIPKSHTNDARCISKNPLAIPCDTCYYTKAVRHHNRQLHKATILKGGIRKANQAPYIVKGYRLWDKVAYNGTECFITGRRTSGYFALKELDGTVVSNSISYKKMRLLEAATNYITERK

SEQ ID NO: 3196 - protein, 380 aa, Arthrospira sp.
MPNYQNYVFVVDTLGQPLSPTHPARARKLLKQGLAAVFRTYPFTIILKKTVENPVNEPSRIKLDPGASVTGIALVNQSRDTVIWGAELAHRGDRIRAKLTARRVVRRHRRYRKTRYRQARFNNRKRADGWLAPSLKHRVETTLTSVNRLISSCPITDISMELVRFDTQKLLNPEISGVEYQQGVLFGYELREYLLTKWQHQCAYCGGQNIPLEIEHIQPKSQGGSDRVSNLAIACHKCHQKKGSQAVEQFLEKKPEILKRLLVQAKAPLKNAAAVNSTRWALFNSLKLTGLPIEIGTGGLTKYNRTVQGLPKTHWLDDADCVGKSTPTRLKIKTHQPLLMTCFGRGGRQKAAPNKRLPIRHNPLKPIKGWLTGDIAKHKT

SEQ ID NO: 3197 - protein, 379 aa, Arthrospira sp.; identical to SEQ ID NO: 2727

SEQ ID NO: 3198 - protein, 420 aa, unidentified; identical to SEQ ID NO: 3153

SEQ ID NO: 3199 - protein, 451 aa, unidentified
MVYVINFEGKPLMPTTNAKARKLLNQKKATVKKVNPFIIQLLYKTDTEYIQTITLGIDSGYLNIGFSAITDSKELIVGEVKLLQGMKDRLLEKSQYRRIRRQRLRYRKPRWNNRKIRQGWLAPSLQHKLDTHVKFIDYLNTILPIRNIVLEVANFDIQKIKNPDISGVEYQQGEQMDFWNVREYVLHRDGHKCQNPNCKNKSKEQILEIHHIKYKSEGGSDAPSNLITLCNKCHTSPNHKKGKFLYDWCEKGKKVRGFRDATFMSMIRWYLLEQLKEKYTNIKATYGYLTKNHRIEHGIEKSHFNDAFAIAKGVNQVRNLEIFKVEQSRLNNRSLEKFYDAKYIDNRTGEKVSASELNCGRRTRNKNLNSENLRMFRGQKISKGQRRIRKQKSLYQPNDLIKYNGNVYTVKGSQNEGKYIALKEIKKVPNVKLIKPYIFKKGLNWSHGLSW

SEQ ID NO: 3200 - protein, 429 aa, Ktedonobacter sp.
MVFVLDRYKKPLMPCTPRRARLLLARKRAVVHRLSPFTIRLKDRSVQQSTLQPVALKIDPGAKTTGLALARVEETSEGEVHHALHLAELSHRGEEVRDRLRKRAGYRRRRRSTNLRYRPARFLNRRRAPGWLPPSLRSRIDNVLSWGRRYQRWVPLVRIAVERVKFDTQLLQQPEISGVEYQRGELAGWEVRAYLLEKFGRRCVYCGRTDTPFELDHIQPRSRGGSNRVSNLALSCHTCNAAKGERTAAEFGHPEVAAQAKQPLRDTAAVNATRYALCDELRTLDLPLTTWSGGRTRWNRARFSIPKTHALDALCVGEVAGVKVGAHQALAITATGRGRYSRTNVDESGFPVGSLMRRKQVLGIKTGDRVRAMVPEGFAAQGTHTGRIAVRANKHFRMGKVQGIPARFCRVLQLADGYDYAVVATTLQG

SEQ ID NO: 3201 - protein, 426 aa, unidentified
MSKVFLIDTNYKPLNPIHPAQARQFLRNGKAAIHKQFPFTLILKESCLEVDVKPLRLKIDPGAKFTGIALVNDKSGEVVFAAELQHRGFAIRDSLTSRRQLRRSRRNRKTRYRKPRFLNRTRPKGWLPPSLQSRVENIKAWVKRLQKVANITAISFELVRFDMQLMRNPEIQGKEYQQGALAGYETREYLLEKWGRECAYCGAKDVPLEIEHIHPKSKGGSNSITNLTLSCHKCNTKKGTQDIKDFLKGSSRLEKILKQAKKPLADAAAVNMTRNALFATLKETGLPIETGSGGLTKFNRCQQNLPKTHWLDACCVGKSTPILKVKGIKPLSIIANGHGTRQSCRTDKYGFPSRYVPRFKFVQGFQTGDIVKAVVTKGKKIGTYTGRVAVRSSGSFNISTKNGLVQGISHKYCKHIHRKDGYNYAT

SEQ ID NO: 3202 - protein, 423 aa, Arthrospira sp.
MSNHIFVLDTNRKPLTPCKPGMARSLLKAGKASVFRRYPFTIILNKEVDANPEPLELKLDPGSKVTGIALKQGNHIIFAAELQHRGQQIKEALLSRRQLRRSRRNRKTRYRPARFLNRTRPEGWLAPSWQHRVDTLMTWVHRFRRLAPVGRIAQELVRFDLQLMENPEISGVEYQQGELQGYEVREYLLFKWDRTCAYCGAQNVPLEVEHIQPRSKGGSDRVSNLTMACHSCNQAKGNGDIRDFLSGQPDVLSRLLRQAKSPLKDAAAVNSTRWALFKALKATGLPVTTGTGGQTKFNRLRLNLPKAHWLDAACVGPVESLEVLTSKPLLILAKGHGTRQMCGTNKYGFPNRHRSRRQIHKGFQTGDMVTALVTAGKKIGSYLGRVLCRASGSFDITTASVRVAGISHKYCQPIHRKDGYAYA

SEQ ID NO: 3203 - protein, 453 aa, unidentified
MPVAVVSKTGERLMPTSEHRARKLLKSGKAIKYSYHPFTIQLTERESGDVQPIELCMDTGYIHIGISVKSEKHEYLAEQIDTLTDEKTRHDACRMYRRQRRSRKRYRQPRFNNRKRNDRWIAPSLEHKKSIHIQAILRICKVMPVTDITLEMGNFDTQVLKAREEGKPLPQGVDYQHGERYGITTLREAVFARDGYTCQCCGRAIKDGAILHVHHIVYRSQGGTNRMSNLITVCDKCHTPANHKQGGKLYNWKPKIASFKSATYMTTIRWKLYNEVKALFPDIDIDIHITYGAETKERRRALDIDKSHVNDAFVMGQFHPKHRSKPICYKKKRRNNRCLEKFYDAKYIDSRDGKKRSGQELFNGRISRNHKKDSENLHQYRLQKVTPGRRAIRRQHYPIQPHDIIVYNGNKIEVSGCQHKGTRVVFSKTKKSVQISKIKLFKYAGGYSKSVFN

SEQ ID NO: 3204 - protein, 423 aa, unidentified
MSNHIFVLDTNRKPLTPCKPGVARSLLKAGKASVFRRYPFTIILNKEVDANPEPLELKLDPGSKVTGIALKQGNHIIFAAELQHRGQQIKEALLSRRQLRRSRRNRKTRYRPARFLNRTRSKGWLAPSWQHRVDTLMTWVHRFRRLAPVGRIAQELVRFDLQLMENPEISGVEYQQGELQGYEVREYLLFKWDRTCAYCGAQNVPLEVEHIHPRSKGGSDRVSNLTMACHSCNQAKGNGDIRDFLSGQPDVLSRLLRQAKSPLKDAAAVNSTRWALFKALKATGLPVTTGTGGQTKFNRLRLNLPKAHWLDAACVGPVESLEVLTSKPLLILAKGHGTRQMCGTNKYGFPNRHRSRRQIHKGFQTGDMVTVLVTAGKKIGSYLGRVLCRASGSFDITTASVRVAGISHKYCQPIHSTDGYAYA

SEQ ID NO: 3205 - protein, 424 aa, unidentified
MSNHVFVLDTNHKQLTPCKPGVARSLLNTGKAAVFRRYPFTIILKKEVNAHPEPIELKLDPGSRVTGIALKQGNQIIFGAELQHRGQQIKDALLSRRQLRRGRRNRKTRYRQARFLNRTRQSGWLAPSLQHRVATVLTWGNRFRKIAPIASIAQELVRFDLQLMQNPEMSGVEYQQGELQGYEVREYLLEKWNRKCAYCGAENVPLEVEHIQPRSKGGSDRVSNLALACNPCNQSKGSQDIRDFLSGKPDLLNRILKQSKSPLRDAAAVNSTRWALNNALKATGLPVTTGTGGQTKFNRTRLNLPKAHWLDAACVGQVETLKILTSKPLLIAAKGHGTRQMCGTDKFGFPNRHRSRVQVHKGFQTGDIVIATVTAGKKIGSYVGRVLCRASGSFDIATKTGRVAGISHKYCKPIHKKDGYAYTF

SEQ ID NO: 3206 - protein, 460 aa, unidentified
MVLVIDRCKRPRNAISEAYARILLYSKQAVIHKRFPFTIRLKNDNAVFNDKTYTVKLDPGANTTGVAVVSNNEVVMLAEIEHRGKVVKSSLDSRRAIRRSRRNRKTRYRESRFLNRTRPDGWLAPSVKSRADNVINFIRKYKKLLNVVKVDIERVSFDTAQMSSEAELCGIDYQQGALYRTKLRNFIFSRSNGKCSYCGEKAVEIDHIVPRSKGGTDSVNNLTASCRACNEKKSNLSLKEFGKLVGKDFSKLMPKTLPKQASIVQSAREYTIKEITKLVADTKSYDSWLTKYNRDELGLPKRHYYDALSVGNVQDYKFLTDKVLTISAKGRGSRQMCRMDRFGFPRTSPKGSKSVKGFRTGDIVKAIVPSGLKRGEYFGRVAVRSSGSFDIEMKGKVVQGIGHKYCRIIQRNDGYSYDYRERDFLSAMDNRVSVAGFNEKCGIIISSYPHFRTLKYQKGA

SEQ ID NO: 3207 - protein, 540 aa, Streptomyces sp.
MTTLPVGEQTHQAVLPQQPALESVGADTPGSRDETAHGLPVAERGTGRKHGRGETAGGSTGSRRRHADQAEIGSGDAPMESSGYSGGAGSGRVFVLARDGVPLMPCHPARARELLRRSRAVVVRLAPFTIRLKDRGRGESEVAGVQLRIDPGSKATGIAVTDTKAERLVGGSTATVRRGLVSVELLHRGEQIRRAMAQRAGYRRRRRSANCRYRAPRNRNRARSAGWLAPSLRHRVESVASVTDRLRRLAPVTEIHVEHAAFDTHAMSEGRGLEAIEYRRGALAGTEIRELLLVRWQRSCAYCGASGVPLNAEHIRPRSRGGSSRLSNLTLACVPCNKAKGATPVEEFLAGSPERLERILRDVGVPLHDAAAMNATRGRLISALEHLGPPVHTWTGARTKWNREAMGLGKTHTLDALSVGGLDHENGDAIVRVCARILVVKAAGRGVYARTTPDRFGFPRLRRPRRKRHYGFVTGDLVRATVPKGRWKGTWSGRLAARSTGRHSLTTAQGRFNVSYRNVQLLQRADGYAYSLGQELRKKG

SEQ ID NO: 3208 - protein, 368 aa, Nodularia sp.
MSNFVLVLDTNKKPLTPIHPGDARFLLNQQKAAVFRRFPFTIILKEPKSEVPTQPIELKIDPGSKTTGFALVQNNKVIWGMELQHRGLAIKESLETRKGVRRGRRSRHTRYRQARFLNRTKPQGWLAPSLSHRVLTINTWVKRLCNFAPITDIVQELARFDLQQLENPEISGFEYQQGELQGYEVREYLLNKWNRKCAYCTAENVPLQVEHIKPKAKGGTNRISNLCLACEKCNIKKGTQDIEKFLAKKPELLKQILSQAKRPLKDASAVNSTRWALFNKLKETGLPITTGSGGLTKFNRTRLGLPKTHWIDAACVGKVETLKILTTKILTVKSTGHSCRRFCRINKFGFPCTEPKKNIHSCFYRRFC

SEQ ID NO: 3209 - protein, 476 aa, unidentified; identical to SEQ ID NO: 3164

SEQ ID NO: 3210 - protein, 395 aa, unidentified
MDTGYIHIGISAKSEKHEYLAEQIDTLTDERGRHDACRMYRRQRRSKKRYRQARFNNRKRDQGWIAPSLEHKKKIHIQAISRINNVMPLTDIALEMGNFDTQVLKAKEEGKPLPQGADYQHGERYGIATLREAVFSRDGYKCQCCGRTIKDGAILHIHHIKYRSQGGTNSMSNLSTVCDKCHTPKNHKPGGKLYSWKPKLPSFKGATFMTTIRWQLYNEVKTLFPDYRYSYYIRSSNKRTARELDIDKSHANDAFVMGQFHPRHRIKAVFYKKKRRNNRCLEIFYDAKYIDSRDGKKRNGQELFNGRISRNHKKDSENLHQYRLQKVTAGKRTVRKQHYSIQPHDIIVYESRKRETTGCHCNGARVILLPDKKSISIKKVKIYKYAGGYFKSAFN

SEQ ID NO: 3211 - protein, 543 aa, Streptomyces sp.
MTTFPAGEQTHRAVLPQQLALESVRADTPGSRDETAHGHPATERGTGREHGRGETDGHGTRTRRRHANNAGQPAKAAENGSGDAPTGACRVFVLSKDGHPLMPCHPARARELLRKGRAAVARQMPFTIRLKDRTVVDSEVDGVQLRIDPGSKGTGLALTDEKKETTKDGATVTVRRGLVSLELHHRGAQIQNSMQQRAGYRHRRRSANCRYRTPRSRNRVRPEGWLPPSLRHRVDTTFSIVSRLCRYAPVTEIHLERTAFDTHSLSAGKPLNGAEYAQGPLAGTTARSYLHARWNSACAYCGATGVPLNIEHVRPRNRRGSSRISNLVLSCIPCNKAKGSRSIESFLAHQPDLLARILAQTKAPLRDAAAMNAVQWQLTEALERLGKPVHAWPGHLTKTNRDAMGLDKTHTLDALSVGHLDHESGDAIARFPDRVLVLKATGRGSYARTTPDRYGFPRLRRTRTKQHFGYVSGDLVRATMPTGRWEGTWTGRIAVRANGQHSLATPVGRFNVRHRNLRLLQRGDGYGYTTQLEATSSISQKNS

SEQ ID NO: 3212 - protein, 396 aa, Massilia sp.
MTVLVLDKKKRPLMPCTPKRARKLLASGRARIHRLFPFCIRLVDRCLERSAVQPLRLSIDPGSKFTGMAISRIEIIDAERDLEPVMHIAFLLELTHRGQVIRDALHARSAMRRRRRGNLRYRAPRFFNRTKPKGWLPPSLQHRIDTTTAWIARLRRLAPITHLAQELVRFDTHLMQNPEISGVAYQQGTLAGYEVREYLLEKFHRICAYCDAKDVPLQMDHIQSRARGGSDRISNLTLACVVCNGRKAAQDIQEFLANDPARLTRILKQAKVPLHDAAAVNATRWALLKTLKKTGLPVETGTGGRTKWNRTRFGIVKTHALDAACVGIVGTCKVRTCQRCMSSARAGALAARRDWINMVSRVLTSHARKRPSAFALATWWRPQSRPVSTWANTKAA

SEQ ID NO: 3213 - protein, 298 aa, unidentified
LNKRGKPLMPCSPAKARLLLKEKKAIVVRRTPFTIQLTIATGESKQPVSLGVDAGYKHVGLSASTEKAELYASEVELRKDITDLLSARRALRQSRRNRKTRYRAPRFDNRIRTKRKGWLAPSVENRINAHLSRIEAVLRLLPITKITVETASFDMQRLKNPDISGKEYQEGEQLGFWNVREYVLFRDGHVCRHCHGRSKDPVPNVHHLESRRTGSDSPDNLITLCETCHKALHRGEITLKAKRGQSFRAQAFMGIMRREVLDRLKASHPKLEVQNTYGYWTKHARMLSASPAILAPKG

SEQ ID NO: 3214 - protein, 379 aa, unidentified; identical to SEQ ID NO: 2727

SEQ ID NO: 3215 - protein, 514 aa, Nocardiopsis sp.
VLPQRPALESTSADHPGNRDETGRGGRARVAPGVEHVRGEMPDAPPGVEHVTPVPARDGERAREGHPPRKGTSPRQGHRCVFVLDAHGTPLQPTHPARARKLLAKDRAVVARHTPFVIRLKDRTTAGSEIDGIEVGVDPGSKHTGLAVFTAQAGQRRSRYALQLDHRGDQITRRMRQRAAYRKGRRSRNLRYRSPRFDNRTRPDGWLPPSLRHRVDTTLAWVDRLARWAPVRAVHAERVAFDTHALSAGRSLEGVEYQHGTLHGYEVREYLLAKWGRSCAYCGAAGTPLNIDHIHPRSKGGSNRVANLAPACIPCNQAKDNRPVEEFVTSPRTLARVRSQAKAPLRDAAAVNATRWALWRALDERLPTHAASGGRTKWNRTRNRLPKSHTLDALAVGKVDAITTTVSTILVVGCSGRGSYARTRTDRYGFPRLRLPRRKAFFGFQTGDLARAVVPSGKHAGTHAGRVAVRSSGGHTLQTPHGPIKTSWKNLRLLQRADGYGYSTQKEAGAFSPA

SEQ ID NO: 3216 - protein, 427 aa, Anabaena sp.
MCKVFVINKEKRPLNPIHPAQARQLLRSGKAAVFKRFPFTIIVKESNVNTNVSPLRLKLDPGAKTTGIAIINDANDEVVFAAELKHRGFAIRDAITSRRQLRRSRRNRKTRYRQPRFLNRTKPEGWLAPSLQSRVENIKTWVSKLRKVAPITAISQELVKFDMQLIRRPDIQGKEYQQGTLAGFETRQYLLEKWNRECAYCGIKDVPLQIEHIHPKSKGGSNSITNLTLSCEKCNLRKGNQDIRDYLEKDKPRLEKILALTKKPLADAAAVNATRFALLYALKSTGLPIETGSGGLTKFNRTQQALNKSHWLDACCVGASTPILKIKGIKPLLITANGHGTRQSCRTDKYGLPVRHCSRTKFHFGFQTGDIVKAVVTKGKKVGTYVGRIATRATGSFNISTAKGLIQGISHKYCKTIHKKDGYAYGI

SEQ ID NO: 3217 - protein, 423 aa, unidentified
MSNHIFVLDTNRKPLTPCKPGVARSLLKAGKASVFRRYPFTIILNKEVDANPEPLELKLDPGSKVTGIALKQGNHIIFAAELQHRGQQIKEALLSRRQLRRSRRNRKTRYRPARFLNRTRSKGWLAPSWQHRVDTLMTWVHRFRRLAPVGRIAQELVRFDLQLMENPEISGVEYQQGELQGYEVREYLLFKWDRTCAYCGAQNVPLEVEHIHPRSKGGSDRVSNLTMACHSCNQAKGNGDIRDFLSSQPDVLSRLLRQVKSPLKDAAAVNSTRWALFNALKATGLPVTTGTGGQTKFNRLRLNLPKAHWLDTACVGPVESLEVLTSKPLLILAKGHGTRQMCGTNKYGFPNRHRSRRQIHKGFQTGDMVTALVTAGKKIGSYLGRVLCRASGSFDITTASVRVAGISHKYCQPIHRKDGYAYA

SEQ ID NO: 3218 - protein, 442 aa, unidentified
MVTVQQSTHHLPFGRVFIRRNLFMVYVISQDGKPLMPCSDPIARLLLKQGKAKVKKREPFTIKLTYETTNYTQGLTLGVDTGSGTIGTAVSKDNGDIVYMSEVVVRNDITDKMTQRAKYRRNRRNRKTRYRKARWLNRASSIKKDRFSPTMQSKLHSHVREIEYIQSILPVTEMVFETGQFDMQLMKNPSLANPKVRPWGYQKGANYGFENTKAMVLNRDNYTCQCCKGKHKDSKLEVHHIVFRSQGGSDEESNLLTLCHTCHKDLHSGKINPKLSGKLKGNLKYATQMNSIRKQLFRFYPNAIETFGYVTKANRLHLGVDKEHYYDACTIATQGNAFNVKSNLYKKKCVSDGDFQKTKGIRSEQPIVTDKICGFRKFDKVRYFGNDYFIKGRMSTGYAILMDIDGNKIDFSTMPRGYKTPKLSNCKRITARSTVMTQVKVV

SEQ ID NO: 3219 - protein, 284 aa, unidentified; identical to SEQ ID NO: 3117

SEQ ID NO: 3220 - protein, 413 aa, unidentified
MTSYVFVLDANGKKLAPTKKQKAWFLIRKKRATLVSKYPMVIQLKKKIPDKEICKDEIRCGIDDGSLHVGIALVQKCQTRNKVVFKGIIEQRNDVKHLMDVRRGYRRYHRYHKRYRPARFNNRFSSKREGRIAPSILQKRQAIIRVINRLNKWINITNYWLEDVAIDIRALTDGYKSYSWQYQRSNRLDENIRKAVILRDNCRCKECGKSNCRLEVHHIKPRRLNGPNTLDNLITLCENCHQKTEGKEELYMSRYFGLLKSSDSKRLNYAQHAMIGKKWLREELSNLGMLYLTNGGNTANKRIDWSIEKSHSNDAICITDLQPDTCNIKEWTIKPMRRQSKAKTDNVLGIKHRDLVEYTFRNGETYKGYVTALYPEQKAINFQSSTKHCKKVNARKCKLLWKYSKIYWLENAG

SEQ ID NO: 3221 - protein, 423 aa, Arthrospira sp.
MSNHIFVLDTNRKPLTPCKPGVARSLLKAGKASVFRRYPFTIILNKEVDANPEPLELKLDPGSKVTGIALKQGNHIIFAAELQHRGQQIKEALLSRRQLRRSRRNRKTRYRPARFLNRTRSKGWLAPSWQHRVDTLMTWVQRFRRLAPVGRIAQELVRFDLQLMENPEISGVEYQQGALQGYEVREYLLEKWDRTCAYCGAQNVPLEVEHIHPRSKGGSDRVSNLTMACHSCNQAKGNGDIRDFLSSQPDVLSRLLRQVKSPLKDAAAVNSTRWALFNALKATGLPVTTGTGGQTKFNRLRLNLPKAHWLDTACVGPVESLEVLTSKPLLILAKGHGTRQMCGTNKYGFPNRHRSRRQIHKGFQTGDMVTALVTAGKKIGSYLGRVLCRASGSFDITTASVRVAGISHKYCQPIHRKDGYAYA

SEQ ID NO: 3222 - protein, 406 aa, unidentified
MVYIQDIDGKPMMPTTRHGKVRRLLKDSKAVVVNTCPFTIKLMYKTSGYKQEIVLGVDAGTKHVGLSATTKSKELYSSEVILRSDIVELLSTRRESRRTRRNRLRYRKPRFNNRIKSKRTGWVAPSVRHRIDAHIRVIDNICSILPVSRVIVEVAQFDTQKIKNPDISGDEYQEGDQLGFWNVREYILARDGHKCQHCKGKSKDPILNIHHIESRKTGGDSPSNLITLCETCHKEYHKGNIDLKVKRGKSLRDAAVMGIMKWKLYDELKSRCDNVSMTFGYITKYNRIKYGIEKSHTSDAFVISRNFNAKRIERQYLKRLIRRHNRQIHKMKILKGGKKKNNQAPFEIFRFRLFDKVLYNNEILFVYGRRKSGNFNIRDFNGENPKDVSHKKLKLIRGKRHLIILK

SEQ ID NO: 3223 - protein, 379 aa, Arthrospira sp.
MPNYQNYVFVVDTLGQPLSPTHPARARKPLKQGLAAVFRTYPFTIILKKTVENPGNEPLRVKLDPGASVTGIALVSQKTGTVIWGAELAHRGDRIRAKLAARRLVRRHRRCRKTRYRQARFNNRKRPDGWLAPSLKHRVETTLTWVNRLISSCPITDISMELVRFDTQKLLNPEISGVEYQQGVLFGYELREYLLTKWQHQCAYCGAKNIPLEIEHIQPKSQGGSDRVSNLAIACHKCHQKKGSQSAREFLDTKPEILKLLLVQAKAPLKNAAAVNSTRWALLNGLKLTGLPIEIGTGGLTKYNRTVQGLPKTHWLDAACVGKSTPTRLKIKTHQPLLITCFGRGGRQKAAPNKRLPIRHNPLKPIKGWLTGDIAKHKT

SEQ ID NO: 3224 - protein, 451 aa, unidentified
MTTFVFVLDRKGRSLMPCHPARARKLLKKGRARVHKVFPFTIRLTDRELENSSVQPMLIKIDPGSKETGIALLREEKNKGHHALYFINLQHRGQQIRNALHKRLCLRRSRRSRNLRYRSPRFLNRRRAEGWLAPSLQHRADSILSWVSRLRKITPVERISQELVKFDTQLIQNSKIEGIEYQQGELAGYELREYLLEKFGRKCIYCGADNVPLNIDHVIPKSKGGSNRVTNLVLACVQCNQKKGSRSIEEFLKDKPEVLRQIKNQLKQPLKDAASVNATRWKLFNKLKSTDFPFEVGSGALTKFNRKKFGIPKAHWLDALCVGNVPSVTNWRNLNVLNIKCCGRGAYQRTRTDKYGFPRGICMRQKKVYGFSTGDMVKAIIPKGKKKGVYVGKVAVRKTGSFNLQTSGQTIQGISYRYCRLITHSDGYSYSWKSGPLPPRVETRGILGEVR

SEQ ID NO: 3225 - protein, 480 aa, unidentified; identical to SEQ ID NO: 2726

SEQ ID NO: 3226 - protein, 442 aa, Lactobacillus sp.
MKHENANRVFLLNKDGKPLMPCCPRKARLLLKSGKAFVVKKYPFTIQLKYGSYGYKQKVSLGVDTGQRHIGFAIVSQNKVLHQSEVELRQDVHKNLYTRKIYRRSKRNRKTRYRQARFLNRVHGKRDGLWLPPSIKGKVSHNIAWIKRYLAVLPNPDLHIEVGKFDMAKMVNPEISGKQYQEGSLKDWKNYEYYVLARDEYTCQLCHKHGEGVKLVVHHIVYRSHGGTDRISNLITLCTDCHTTKNHQPGGKLYKWMKAKKKVTKQLKGATFMNILRKRIMTAFPEASFQYGSQTYVDRKNLLLPKGHFMDAIAISGIKSVGQLSDTVTLISQFRKKKRSLHEATARKGRKQPNTSSKRNEKNMNYARGLWLNDYVRVIGNHAKGYVKGFKSKGYYVYLTDGLGNYVLSNGKNYINRKQCRLIMHNGNWQKAEQKLSLYEFK

SEQ ID NO: 3227 - protein, 455 aa, Erysipelotrichaceae sp.
MSVAVIRKTGIRLMPTNEYRARHLLKAGKAVIEQYRPIFTIRLTEREDGDTQPIEYASDTGYQHVGVSIKSEKHEFVHAQYDMLSNEKERHDKCRKYRRERRNRLRYRKARFRNRKPKMTKGEVSAPSLQHRADNQTRLFDSFCKVMPITSAAFEMGKFDTQLLQAIADGSPLPKGKDYQHGSKYLYQTKRAAVFGRDNYTCQICGRSIKDGAILHTHHIGFWMPYRSNRIGNLLTVCEKCHTAKNHKSGGKLWGLEPKVSNLAGATFMTTVRWRMYYALVLAHPEVDIHIQYGAKTAVVRKARNIAKTHANDAYCIGQLHPLHHCKEVLFVKKRRNSRILAKFYDAKYIDIRDGKKKSGAQLSCGRTNRGESRHTEKNERIYRGQKCSGGRASVRKCHYLFQPGDTVCWKSASYIVKGTHCNGTRVLLETGKSVKLTDLEIIKKQGGYAAPPTA

SEQ ID NO: 3228 - protein, 409 aa, unidentified
MPTERFGKVRRLLKEGKAKVVCREPFTIRLLYEPETDVVQECYCGVDTGSRHVGVAVVGNDKVLYQSQIELRNDIKKKMDRRRAFRQNRRFRKTRYRKQRFLNRRNSIKKDRLPPSVKHKVQAHIDEIEFCKKILPVSDLILEVSQFDTALMKSPNLMNEKVRHWGYQKGFNYGYSSRREAVLHRDNYTCQCCGKKNCRLEVHHIKFKSNGGTDDEENLITLCKECHEGIHNGTITLNKKPKKDKGLKHATHMSIIRSWLLKKYPDAIETFGFVTAENRNHLKLKKDHYIDACVIASGGLEFKELNVIYKKRRVSIQDRVLTDGIRDEKKLPTGKVHGFKRYDKVKYLGEICFVKGRRTSGGFVLMDIDNNSIDFRNKGGNLNPHYKFIKRTNARKSILCILQRIEREE

SEQ ID NO: 3229 - protein, 551 aa, unidentified
LTGLSCELYRSYVVRKLKTHPGMLPQFQALKPAAADKLWVGAKRAARMGCRIPKGTRSRRLRATLARGAQPQGCRYKARKGRKGIITMTVFVIDRQGRPLMPCTEKRARLLLARARARVHRVVPFVIRLTDRRAQDSSFQSLRLKLDPGSQTTGIALVQEKADGIAVLNLMELVHRGRQISQALRQRRAFRRRRRGANLRYRAPRFNNRTRAAGWLAPSLQHRVDSTMSWVWRVMRWAPVSALSMELVRFDMQAMQNPDISGVGYQQGELFGYEVREYLLEKWGRKCAYCDAAGVPLQIEHILARARGGSNRVSNLTLGCAPCNIGKGRRDVREFVKDEARLARILSKAKAPLRDAAAVNSTRWALLNALKGTELALETGSGGRTKWNRARLEIPKTHALDAVCVGEVEAVCGWPRPTLELRCTGRGSYQRTRLTAQGFARGYLTRKKRAHGFQTGDRVRAIVPKGKKAGVHVGRVAVRASGSFNIQAPTGVVQGIAHRHCTMVLRADGYGYSTVPLTMEGNSGNGTKAWLAAQVMLSHPGMNAEASRANG

SEQ ID NO: 3230 - protein, 490 aa, unidentified
VRHLLKEQKARVVQSNPFTIQLLYETNDVVQPLYLGIDPGRTNIGVAVVKADGTAVFAAHLETRNKKIPKLMQDRKKARRARRTNGRRCRRQRRAKANGTISKKCVKQDTAQSKNPSKRAKEIGVIKRHLPGCKKDVLCVGIKNKEAKYTNRARLEGWLTPTANQLLQTHINLVKKIQKFLPISDVVLEVNKFAFMRLDNPNIQKWQYQRGPLYQKGSLENAVSEMQEHHCLFCEKPIEHYHHVVPKSENGSNTIANIVGLCAEHHNLVHKDVAWQEKLVEEKTGLNKKYGALSVLNQIIPALTKELSFLFPKHSFMTNGKSTHDYRAAHGISKDHWLDAYCIACSVLPIDVCDSTINNCVPYELKQFRRHDRRALNNENMNRVYTLNDKVVATNRHKATEQEAASLEEFRKEHPNDVCKLKVKEHHPTYRNMNRNYPGSVFLVGKQIHVMQGIASSKDGKATKYNDTRATTIAAGKCKFVAKNSGILFV

SEQ ID NO: 3231 - protein, 425 aa, Arthrospira sp.
MPNYQNYVFVVDTLGQPLSPTHRARARKLLKQGLAAVFRTYPFTIILKKTVENPVNEPLRLKLDPGASVTGIALVNQSRDTVIWGAELTHTGDRIRAKLTAHRVVRRHRRCRKTRYRQARFNNRKRADGWLAPSLKHRVETTLTWVNRLISSCPITDISMKLVRFDTQKLQNPEISGVEYQQGVLLGYELREYLLTKWQHQCAYCGGQNIPLEIEHIQPKSQGGSDRVSNLAIACHKCHQKKGSQALEQFLEKKPEILKRLLVQAKAPLKNAAAVNSTRWALFNSLKLTGLPIEIGTGGLTKYNRTVQGLPKTHWLDDADCVGKSTPTRLKIKTHQPLLITCFGRGGRQKAAPNKRLPICHNPLKPIKGWLTGDIAKHKTHGIGRITLRSRGSFVLTKPDKTQFSVKPIDLKPVFRRDGYLYKFS

SEQ ID NO: 3232 - protein, 424 aa, unidentified
MRVFVFNMRGRPLMPCSQRKARLLLRENKAMIYKYHPFTIQLTYTTGETKQDCHIGIDTGSKYIGAAVRSEDKVFWKGEIELRQDIRSNLDTKRIYRRSRRNRKTRYRKPKFLNRKRRDEWLPPSLQSRINHTFHWIDTLSSLVPNPILHIEVGKFDVAKMINPEIHGVDYQHGQTYGFFDERYFVFARDNYTCQCCGKSKNKILNTHHIIYRSNGGTNRVDNLITVCTDCHTSQNHRKGGIFYQWQEQHKKVKQYKEPPFMNTLRKRIFVAYPDAEITYGSETTPKRKAMKLDKTHYNDAIVISGINEIKENPEEWLLIKQFRKKKRSLHEATARKGRKKPNRNQTRNSKNTPYYKGFYLNDKVSVFGKSGYITGFTSNAAYIKDENNDYITLPNKTYKQVSINKMKLECHNNNWQYIIKNAV

SEQ ID NO: 3233 - protein, 570 aa, Streptomyces sp.
MRHVRSLNSNVTHTTPLSPKSLRAPASGATCPRRPHVRVISPDPCSLGNPRCVASGTSREGRSLAPSYRVTSPGHHDLRISRGASMTTFFTGEQTHQAVLPQQPALESAGADTPGSRDETAHGLPDPKPGTGVGHGRGETGAVRTRTRRRHARRLDPGSKATGIAVTDERDEVGAKGRTALVRRGLVSIELRHRGRQIHSGMVRRAGHRRRRRSANLRYRAPRRDNRTRPDGWLPPSLRHRIDSTMSLVARLCRYAPVLEIHVEQVAFDTALIAAAVSSREQDFSERTHAGSEIREFLLAKWERSCAYCGATGVLLNIEHVRPRSRGGSDRVANLVIACVPCNQAKGAARIDEFLADRPARLERVIAQLRRPLHDVAAMNTTRLLLVKTLATHGVAVHTWSGGRTSWNRLAMGLPKSHTLDALATGVIDLERGDAVVRIPAQILVVRSTGRGSYARTTPDRYGFPRLQRQRRKIHHGFSTGDLAAAVVPKGKWAGRWVGRVSVRAGGQHRITTLTSRFDVSHRNLRLLQRADGYTYGFADEIRLSEEHGPAYSGRTLKGGDPGNVRTPDA

SEQ ID NO: 3234 - protein, 442 aa, unidentified
MSTSVFVLDKKHRPLMPCRPARARRLLRAGRARVVKRFPFVIRLVDRTVEQSEVQPVLIKLDPGSRETGAAVVRDDEKKRHHALAFFVIKHRGGAIRDALKARSAFRRRRRSQNFRCRSPRFLNRVKPKGWLPPSLRHRVETTLSFVRRMCRYLPVSGIATELVKFDSQKLQNPEVSGVKYQQGTLFEYEVREYLLEKFGRKCVYCGAEGVPLNIDHVVPRAKGGSNRVSNLVLACVSCNQKKGARSLEDFLKGKPEVLARVRRELKTPLRDAAAVNATRWVLFNELKATGLPVETGSGALTKLNRHAFGVEKEHWLDALCVGRLNGVVTRKGLNVLEIRCMGRGSRQRTRLTKYGFPRGYLMRQKCVHGFATGDMVEANVPKGKKAGLWRGRVAVRVSGSFNIQTPKGVIQGVGWKHCRLISHNDGYGYAWLGHAPHSSPA

SEQ ID NO: 3235 - protein, 431 aa, unidentified
MPGKVYVISRLGHPLMPCSPAKARHLLDDGKAKVVKRTPFTIKLLYGSTEYTQPVILGVDAGSKTIGLSASTTKEELFAAEVMPRNDVVENLSTRREFRRARRNRTTRYRKSRFNNRVHSKNNGWLAPSVEVKIQEHITSIKRVCAILPISKIVVETAEFDLQLLKAVQDGKPVPEGEDYQKGEMYGSYDVRQYVLWRDNYTCTCCGVKGTDKKPVKLHVHHFESRKHGGNAPDNYGTLCEDCHKKLHLGIITDISLKTRKRPSTRDAAFMGIMRKTLMQRLITGLSIPVAETKGYITKAAREEILKLPKTHTNDALAIAQGRHGFGIREQAYVKPTNRIYTVRPVRHHNRQLHKATILKGGIRKLNQASKYIFGFRLYDKVLYQGGECFVWGRRTSGSFLLRTIDGTKVKDGVGYRNLTLLERSTNYLIA

SEQ ID NO: 3236 - protein, 457 aa, unidentified
VWLYQAVYNLGEGFLPSSEERTAFYWLLIYRKEHGIMQYVYVLNKHGEPLMPCSPGKARLLLKQQKACVVKRTPFTIKLLYGSAGYKQPITLGVDAGSKHVGLSASTEKRELYREEFTPRNDVVDLLSTRRQNRRSRRNRKTRYRAPRFDNRVHSKHKGWLAPSVEVKIQEHITVIKRICRILPITLVRVETAEFDTQRLKAMLKGKPLPVGTDYQLGEMYDEYNVRQYVLKRDNYTCQCCGAHPTEKKPVRLHVHHLESRHVGGNAPNNLITLCVACHKALHEGKITLDKGKKRGKPLRDAAFMGIMRNTLLARLKDELNIPVKQTYGYITKLLREKNKIPKSHVNDARCIAKAPNAKPCDTMLYTRALRHHNRQIHKAKILNGGIRKKNQAPYLVKGFRLWDKVRYNGEECFITGRRSSGYFALKKYDGTVISNSASYKKLMLLEAATNYITERS

SEQ ID NO: 3237 - protein, 427 aa, Nostoc sp.
MSKIFVIDSEKRPLNPIHPAQARQLLTSKKAAIYRKFPFTLILAESLPEVPVSPLRLKVDPGAKVTGIALVSDSTGEVVFASELNHRGFAIRDALTSRRQLRRGRRARKTRYRKPRFLNRTRPEGWLAPSLQSRVDNIKTLVEKLRRFAPITAISQELVRFDMQLMRNPDIEGKEYQQGTLAGYETREYLLEKWGRQCAYCGVKDAPLQIEHIHPRAKGGSNSITNLALSCEKCNTKKGTKDIKDFLKLDPSKLTKILAQAKKTLADAAAVNTTRFALLNVLKSTGLPVETGSGGLTKFNRSQQMLGKTHWLDAACVGKSTPVLIIKGIEPLLIQAFGHGSRQSCRTDKFGFPNRHVPREKIHFGFQTGDIVKAVVTTGKKIGTYVGKVAIRSSGSFNISTKNGLIQGISHKFCKRIHAKDGYSYAT

SEQ ID NO: 3238 - protein, 426 aa, unidentified; identical to SEQ ID NO: 3177

SEQ ID NO: 3239 - protein, 458 aa, Ktedonobacter sp.
VSKVFVLDTQKQPLNPVHPGRARMLLSSGKAAVFKRYPFTLILKGRGEQPQVAPLRIKIDPGSKTTGIAIVNDTSGEVVFAAELSHRGQEIKKRLERRRGVRRSRRQRHTRYRKPRFENRHNKQRGWIAPSLESRVCNVVTWVQRLMRVCPIVAMSQELVKFDMQAMEQAEIKGIEYQQGTLQGYETREYLLEKWNRMCAYCSAKDIPLQIEHIHPRAKGGSDRLSNVTLACEACNSKKGTQDVRAFLATKPDVLRRILAQAQAPLKDAAAVNTTRWALYERLKALGIPLECGTGGRTKYNRVTRGIEKAHWCDAACVGASTPEHLHLSGVVPLLITADGHGSRQMCLMDKHGFPRTGPKQAKHVQGFQTGDMVCAIVTRGTKIGTYVGRVAVRATGSFNITTKQGTIQGISHRYCTALHTCDGYSYGQGEPLHPSPEKECLFPPPVLPDRGRKEAEV

SEQ ID NO: 3240 - protein, 423 aa, unidentified
MSNHIFVLDTNRKPLTPCKPGMARSLLKAGKASVFRRYPFTIILNKEVDANPEPLELKLDPGSKVTGIALKQGNHIIFAAELQHRGQQIKEALLSRRQLRRSRRNRKTRYRPARFLNRTRPEGWLAPSWQHRVDTLMTWVHRFRRLAPVGRITQELVRFDLQLMENPEISGVEYQQGELQGYEIREYLLFKWGRTCAYCGAQNVPLEVEQIQPRSKGGSDRVSNLTMACHSCNQAKGNGDIRDFLSGQPDVLSRLLRQAKSPLKDAAAVNSTRWALFKALKATGLPVTTGTGGQTKFNRLRLNLPKAHWLDAACVGPVESLEVLTSKPLLILAKGHGTRQMCGTNKYGFPTRHRSRRQIHKGFQTGDMVTVLVTAGKKIGSYLGRVLCRASGSFDITTASVRVAGISHKYCQPIHRKDGYAYA

SEQ ID NO: 3241 - protein, 477 aa, Clostridium sp.
LYTKPSDNIGEGSLPPSGEINLKGMTFMVYVKSIDGKALMPTSNAKARKLLKQKKAKVVSLRPFVVKLTYKTKTEYTQKLNLGVDSGYSNIGFSVIDAKQEYIAGEVKLLEGMKKRLLEKASYRRIRRSRLRYRKARWNNRVKSKKKGWLAPSLKHKLDTHIKFIDYLKNILPIGKITIEVANFDIQKMKDDLISGIDYQNGDMFGFWNVREFVLHRDGHKCQNPNCKHKDKKEQILKVHHIRYRSEGGSDRPENLITLCSKCHTPANHKKGKFLYDWCVNGKKVRGFKDATFMNMIRWYLVNELKSKHNNVSITYGYITKNHRIQNGIEKSHLNDAFAIAKGTNQARTKARFLVIQDRLKNRSLEKFYDSKIIDIRTGKKVSGGDLSCGRSTRNKNLNTENLRKYRGAKISKGQRRIRKQKYFYQPNDLVKYDGKVYTVKGTQNEGKYIALKEIKKVPKVELLIPYVFKKGLNWSY

SEQ ID NO: 3242 - protein, 423 aa, Arthrospira sp.; identical to SEQ ID NO: 2894

SEQ ID NO: 3243 - protein, 426 aa, unidentified
MVYVLNKQGKPIMPCKEAKARKLLKQNKAKIAKHEPFTIQLLFDCENQTQEINLGVDAGSKHIGVSATTEKQVLYEADVELRNDIVDKLSSRREARKTRRNRLRYRPARFNNRVKSKHKGWLAPSIEQKINTHIQVIKHLYDVLPITKLIVETAQFDIQKINNPEISGEGYQQGEQLGFWNVREYVLYRDNHECQCCHGKSKDVVLNVHHIESRKTGSNASNNLITLCETCHKAYHKSEIKLNLKRGKSCRDAAFMGIMRKTLLNRLRELYPNIYETYGYITKNVRIENDLPKEHYMDARCISGNPKANPLGYYIYQKCVRRQNRQIHKNNFLKGGHKKNNQLIGDVFGFKLFDTVKYQNKQYFVFGKRKSGFLDIRNLNGENVNNGSISYKKLKRIKHNSIKLVERRRQFLRTPKGDVVSLPNIS

SEQ ID NO: 3244 - protein, 423 aa, unidentified
MSNHIFVLDTNRKPLTPCKPGVARSLLKAGKASVFRRYPFTIILNKEVDANPEPLELKLDPGSKVTGIALKQGNHIIFAAELQHRGQQIKEALLSRRQLRRSRRNRKTRYRPARFLNRTRSKGWLAPSLQHRVDTLMTWVHRFRRLAPVGRITQELVRFDLQLMENPEISGVEYQQGELQGYEIREYLLEKWGRTCAYCGAQNVPLEVEQIQPRSKGGSDRVSNLTMACHSCNQAKGNGDIRDFLSGQPDVLSRLLRQAKSPLKDAAAVNSTRWALFKALKATGLPVTTGTGGQTKFNRLRLNLPKAHWLDAACVGPVESLEVLTSKPLLILAKGHGTRQMCGTNKYGFPNRHRSRRQIHKGFQTGDMVTALVTAGKKIGSYLGRVLCRASGSFDITTASVRVAGISHKYCQPIHRKDGYAYA

SEQ ID NO: 3245 - protein, 437 aa, unidentified
VSNVFIVDHSGKPRDPVHPGYARFLLKQGKASVYRRYPFTIILNKAIEQPQVQPLRIKLDPGSKTTGIAIVNDVSGEIVFAAELFHRGHAIKGALDARRAVRRSRRQRKTRYRKARWQNRKRKQGWLPPSLESRIANVLTWVRRLSRSAPIEAISQELVRFDMQLMENPEVKGVEYQQGTLAGYEVRQYLLNKWNHQCAYCGARDIPLQIEHIHPRAHGGTHRISNLTLACDTCNKAKGTKDIQDFLKKKPEVLKRIEAQAKKPLKDAAAVNASRWALFERLKATGLPVEVGSGGLTKCNRTRRGLPKTHWLDAANVGTSTPDHLITIGVVPLLITATGRGNRHMCLPDKHGFPRTSAKGAKRVKGFQTGDIVKAIITKGKKRGTYVGRVAVRSSGYFNIVTTRGTIQGISYHYCHMIHRSDGYSYTKGGAAFPPVA

SEQ ID NO: 3246 - protein, 346 aa, unidentified; identical to SEQ ID NO: 2872

SEQ ID NO: 3247 - protein, 420 aa, unidentified
MQYVYVLNKHGEPLMPCSPGKARLLLKQQKACVVRRTPFTIKLLYGSAGYKQPITLGVDAGSKHVGLSASTEKRELYSEEFTPRSDVVKLLSTRKQNRRSRRYRKTRYRAPRFDNRVHSKHKGWLAPSVEVKIQEHITVIKRICKILPISLVRVETAEFDTQRLKAMLAGKPLPVGTDYQLGEMYDEYNVRQYVLKRDHYTCQCCGAHNTAEKVVKLHVHHLESRKTGGNAPSNLVTLCTTCHKNLHKGKVTLDGKERGKPLRDAAFMGIMRKTLMARLKEELPIPVEGTYGYITKMRREQNDIKKSHTNDARCISKHPLAEPCSVCYRTKAIRHHNRQTHKANFSKKGIRKRSQMPYLVEGYRLWDKVLYKEQECFVSGRRSSGSFTLKKLDGTSVSKGVTFKKLRLLEPATNYLIERM

SEQ ID NO: 3248 - protein, 442 aa, Nocardiopsis sp.
VRTTHPSVFVLDKHGLPLQPCPSARARKLLTKGRAVVARHTPFTIRVKDRTVAESEVDGVEVGIDPGSKHTGIAVFTTQAGERRSRFSLQLDHRGARIKKKLDQRANYRRRRRSTNLRYRAPRFDNRARPQGWFPPSLKHRVDTTIAWVDRLSRWAPVRAVHVERVAFDTHALSVGRPLEGLEYQHGTLHGFEVREYLLAKFDRTCVYCGATNTPLNLDHVHPRSRGGSDRVANLVLACIPCNQAKDNKPVEEFVTNTRTLNRILAQAKAPLRDAAAVNTTRRALWRALDARLPTRVSSGGRTKWNRTRNQLPKSHTLDALAVGKLDTITQTVKTILVAGCTGRGSYSRTRTDKHGFPRLRLPRTKHFFSFATGDLVRAVVPRGKKAGTYIGRVAVRATGSFNIATNQSSVQGISHRHVRLLQRADGYAYTTRKEQSVFSRL

SEQ ID NO: 3249 - protein, 413 aa, unidentified; identical to SEQ ID NO: 2636

SEQ ID NO: 3250 - protein, 437 aa, Streptomyces sp.
MPCHPARARELLARGRAVVARRVPFVIRMKDRTRAESGVHGLQLRIDPGSEGTGLVLTDEKTEVGERGAVVTVRRGLFAIELRHRGDQIRTCMQQRAGYRRRRRSANNRYRAPRSRNRTHPAGWLSPSVRHRVDTTFSLAARLSRYAPVTEIHVERVAFSMRQEEHQARGTVRTRLRAKWNSTCAYCGATGVRLNVEHVRPLSRGGSSRISNLVLACVPCNRAKGSESVEDFLAHRPEQLATVLGQIESPLDDAAAMNALSPRLSEALNALGKPVHCWSGRLTKTNRDFCGMRKTHTLDALSVGRLDRESGDRIVRFTGRVLVAKATGRGSYARTTPDRYGFPRLRRSRTKQHFGFVTGDLVRATLPTGTWAGTWTGRVSVRARGQHSVTVPVGRINVSHKHLSLLQRGDGYQYSACAESGALPLSKKEVDRSPVRS

SEQ ID NO: 3251 - protein, 423 aa, Arthrospira sp.
MSNHVFVLDTNRKPLRPCKPGVARSLLKAGKASVFRRYPFTIILNKEVDANPEPLELKLDPGSKVTGIALKQGNHIIFAAELQHRGQQIKEALLSRRQLRRSRRNRKTRYRPARFLNRTRSKGWLAPSLQHRVDTLMTWVHRFRRLAPVGRITQELVRFDLQLMENPEISGVEYQQGELQGYEVREYLLEKWGRTCAYCGAQNVPLEVEQIQPRSKGGSDRVSNLTMACHSCNQAKGNGDIRDFLSGQPDVLSRLLRQAKSPLKDAAAVNSTRWALFKALKATGLPVTTGTGGQTKFNRLRLNLPKAHWLDAACVGPVESLEVLTSKPLLILAKGHGTRQMCGTNKYGFPNRHRSRRQIHKGFQTGDMVTALVTAGKKIGSYLGRVLCRASGSFDITTASVRVAGISHKYCQPIHRKDGYAYA

SEQ ID NO: 3252 - protein, 430 aa, unidentified
MPKVYVLNRHGRPLMPCTPAKARHLLDAGKAKVRHRTPFTIQLLYGSTGYTQEVILGVDAGSKTIGLSAATETEELFSAEVKPRNDVVELMSARRQFRRARRNRTTRYRKPRFDNRVRSKHKGWLAPSVEVKIQEHMTAIRRACAILPVSKVVVETAEFDLQLLKAVAEGKPVPQGEDYQKGEMYGHYNVRQYVLWRDSYTCRICGAHGSVRKGVPLHVHHLESRRVGGDAPDNLVTLCTACHDKLHKGIIMVADIKKRKRRSTRDTTFMGIMRMTLLRRLWEQLPVPVVETRGYITKATREKLLVLPKSHTNDALAIAHGPQGFRAEYLPNIRQADRLYTIRPVRHHNRQLHKATILKGGVRKANQAEKYICGFRLYDKVLYNGIECFVWGRRTSGSFLLRQLNGEKVKDGVSYKHLKLLERSQSYLVA

SEQ ID NO: 3253 - protein, 423 aa, unidentified
MSNHIFVLDTNRKPLTPCKPGVARSLLKAGKASVFRRYPFTIILNKEVDANPEPLELKLDPGSKVTGIALKQGNHIIFAAELQHRGQQIKEALLSRRQLRRSRRNRKTRYRPARFLNRTRSKGWLAPSWQHRVDTLMTWVQRFRRLAPVGRIAQELVRFDLQLMENPEISGVEYQQGALQGYEVREYLLEKWGRTCAYCGAQNVPLEVEHIQPRSKGGSDRVSNLTMACHSCNQAKGNGDIRDFLSGQPDVLSRLLRQVKSPLKDAAAVNSTRWALFNALKATGLPVTTGTGGQTKFNRLRLNLPKAHWLDAACVGPVESLEVLTSKPLLILAKGHGTRQMCGTNKYGFPNRHRSRRQIHKGFQTGDMVTALVTAGKKIGSYLGRVLCRASGSFDITTASVRVAGISHKYCQPIHSTDGYAYA

SEQ ID NO: 3254 - protein, 346 aa, unidentified; identical to SEQ ID NO: 2872

SEQ ID NO: 3255 - protein, 428 aa, unidentified
  REGION 1..428: note = Ga0315279_10055842
MLEQERAIVLNGDGQPLGTTKSGRAGYLIRKGKARFVQPMPFTIQLTYTVPNPVMQKHTLGIDDGAKTAGIVVIAHNQTGDAVVLKTEVALRSDVTYLMGFRRSRRQGRRSHLRHRQPRSRRGNKKGQMPPSIQVRKDNVLRVARDQARLLPITRIVYEEGQFDTRAVWNPGVKNYQEGPNSGFENRKKAVLWRDKYTCRYCGVNCVEAGVVAEVDHVLPRSRGGTDAWRNLVCACRDCNQKKDNRTAAEFGHPEVKGTQFKYPAHLQVGKTYIKEELAKLAPVEVVYGWQTSARRKRLGLDKSHVNDAIGMAAVSPSVKDDATEYRVVARRRRRSMQNLRHEDGYAGFRHWDVVRWERRDGQRPIGTVRSFVPGRNTVKCRFDFDDNVGVSAGRLRLVYRPRRLVYVPQSNRKEPVPQSARRQGNTV

SEQ ID NO: 3256 - protein, 406 aa, unidentified
MVYVQDIDGSPLMPTTRYGKVRRLLKANKATVISLCPFTIKLLYKTSDYKQEIVLGVDAGTKHVGLSATTKSKELYASEVILRSDVVDLLSTRRELRRTRRSRLRYRKPRFMNRIKSKKRGWIAPSVRHKIDSHIRIISFVYSILPVSKLIVEVAQFDTQKIKNPDISGDEYQEGDQLGFWNVREYILARDGHKCQHCKGKSKDPILNIHHIESRKTGGDSPSNLITLCETCHKEYHKGNIDLKVKRGKSLRDAAVMGIMKWKLYEELKSRYDNVSMTFGYITKYNRINHGIEKSHVSDAFVISGNFDSYRLGYYYKRKLVRRHNRQIHKMKILKGGIKKPNQAPFKVFGFRLFDKVRYQDNVYFVYGRRTSGCFNIRDIDGDNNKNPTFKKLTYISHGLISVETG

SEQ ID NO: 3257 - protein, 408 aa, unidentified
MVYVQDINGKPMMPTTRHGKVRRLLKDKKAVVVNLCPFTIRLTYVTSDYKQEIVLGVDAGTKHVGLSATTKSKELYSSEVILRSDIVDLLSTRRELRKTRRNRLRYRKLRFDNRVKSKRSGWIAPSVKYKIDAHIRIVDNVCSILPISRIVIEVAQFDTQKIKNPNISGKEYQEGDQLGFWNVREYVLARDGHKCQYCKGKSKDKILNVHHIESRKTGGDSPSNLITLCETCHKEYHKGNIDLKIRRGKSLRDAAVMGIMKWRLYEELKSKYDNISMTFGYVTKYNRIKHGIEKSHVSDAFVISKNFNAIRLGYYYKVRLVRRHNRQIHKQKIPKGGVKRLNQSPFEVFGFRLFDRVMFENSYYFIFGRRKTGRFNIRDIDGKNQRDITYKKLKLSRCKCFMVQNEMN

SEQ ID NO: 3258 - protein, 423 aa, unidentified
MSNHIFVLDTNRKPLTPCKPGVARSLLKAGKASVFRRYPFTIILNKEVDANPEPLELKLDPGSKVTGIALKQGNHIIFAAELQHRGQQIKEALLSRRQLRRSRRNRKTRYRPARFLNRTRSKGWLAPSLQHRVDTLMTWVHRFRRLAPVGRITQELVRFDLQLMENPEISGVEYQQGELQGYEVREYLLEKWGRTCAYCGAQNVPLEVEHIQPRSKGGSDRVSNLTMACHSCNQAKGNGDIRDFLSGQPDVLSRLLRQAKSPLKDAAAVNSTRWALFKALKATGLPVTTGTGGQTKFNRLRLNLPKAHWLDAACVGPVESLEVLTSKPLLILAKGHGTRQMCGTNKYGFPNRHRSRRQIHKGFQTGDMVTATVTAGKKIGSYLGRVLCRASGSFDITTASVRVAGISHKYCQPIHSTDGYAYA

SEQ ID NO: 3259 - protein, 423 aa, unidentified; identical to SEQ ID NO: 2900

SEQ ID NO: 3260 - protein, 423 aa, unidentified
MSNHIFVLDTNRKPLTPCKPGMARSLLKAGKASVFRRYPFTIILNKEVDANPEPLELKLDPGSKVTGIALKQGNHIIFAAELQHRGQQIKEALLSRRQLRRSRRNRKTRYRPARFLNRTRPEGWLAPSWQHRVDTLMTWVHRFRRLAPVGRIAQELVRFDLQLMENPEISGVEYQQGELQGYEVREYLLFKWDRTCAYCGAQNVPLEVEHIQPRSKGGSDRVSNLTMACHSCNQAKGNGDIRDFLSGQPDVLSRLLRQAKSPLKDAAAVNSTRWALFKALKATGLPVTTGTGGQTKFNRLRLNLPKAHWLDAACVGPVESLEVLTSKPLLILAKGHGTRQMCGTNKYGFPNRHRSRRQIHKGFQTGDMVTALVTAGKKIGSYLGRVLCRASGSFDITTASVRVAGISHKYCQPIHSTDGYAYA

SEQ ID NO: 3261 - protein, 604 aa, Nocardiopsis sp.; identical to SEQ ID NO: 3140

SEQ ID NO: 3262 - protein, 551 aa, unidentified
LTGLSCELYRSYVVRKLKTHPGMLPQFQALKPAAADKLWVGAKRAARMGCRIPKGTRSRRLRATLARGAQPQGCRYKARKGRKGIITMAVFVIDRQGRPLMPCTEKRARLLLARARARVHRVVPFVIRLTDRRAQDSSFQSLRLKLDPGSQTTGIALVQEKADGIAVLNLMELVHRGRQISQALRQRRAFRRRRRGANLRYRAPRFDNRTRAAGWLAPSLQHRVDSTMSWVWRVMRWAPVSALSMELVRFDMQAMQNPDISGVGYQQGELFGYEVREYLLEKWGRKCAYCDAAGVPVQIEHILARARGGSNRVSNLTLGCAPCNIGKGARDVREFVKDEARLRRILSKAKAPLRDAAAVNSTRWALLNALKETELALETGSGGRTKWNRARLEIAKAHALDAVCVGEVKAVCGWPRPTLEVRCTGRGSYQRTRLTAQGFARGYLTRKKRVHGFQTGDRVRAMVPKGKKAGVHVGRVAVRASGSFNIQTPTGVVQGIAHRHCTMVQRADGYGYSTVPLTKEGNSGNGTKAWLAAQAALSHPGMNAEVSRANG

SEQ ID NO: 3263 - protein, 414 aa, unidentified
MPCSPAKARLLLKEKKAIVVRRTPFTIQLTIATGEAKQPVSLGVDAGYKHVGLSASTEKAELYASEVELRQDVSDLLSARRALRQSRRSRNTRYRAPRFDNRIRTKRKGWLAPTVENRINVHLSRIETVLRLLPVTKITVETASFDTQLLKNPDIAGKEYQEGEQLGFWNVREYVLFRDGHVCQHCHGRSKDPVLNVHHLESRRTGGDSPGNLITLCETCHKALHRGEIKLKAKRGRSFRAETFMGIMRWGVLNRLKASHPKLEVHNTYGYRTKHARIANGIAKSHCADAFCIAGNFGAKRLGEFFFQKQTRRNNRQIHKLSILKGGIRKRNQAPFEVNGFRLFDKVACKGEEGFIFGRRSSGFFDVRKLDGTCISAGISYKKLHLLEKRRTYLTEIRKEEALPPPPEGRGLRA

SEQ ID NO: 3264 - protein, 420 aa, unidentified
MVYVLNINGQPLMPTNRHGKVKCLLKQGKAKVIRRCPFTIKLLYQSTAYTQNLTLGVDTGSGIIGTAVSKDNGNIVYMSETIVRNDITDKMTQRAKYRRNRRNRKTRYRKTRWLNRKNSIKTDRFSPTMQSKLHSHVKEIEYIKSILPVTTMVLETGQFDTHLMKNPSLANPNVKHWGYQKGANYGFENTKAMVLNRDNYTCQCCKGKHKDSKLEVHHIVFRSQGGSDEESNLITLCHTCHKDLHSGKINPKLKGKVKGTLKYATQMNSIRKQLFRVYPDAIETFGYVTKANRLALGIDKKHYYDACTIATQGNIFIVKSNLYKKKCVSDGDFQKTKGIRSEQSIVTDKICGFRKFDKVKYFGKEYFIKGRMSTGYAILMDIDGHKINFSTMPKGYKIPKLSNCKRVTARTSQMLQAVVI

SEQ ID NO: 3265 - protein, 389 aa, unidentified
MCAICLKSKKRESYKVIRLPSKNKEAKYTNRERPEGWLTPTANQLLQTHVNLVKKVQKLLPISDVVLEVNKFAFMRLDNPDIQKWQYQQGPLYKKESLESAVSEMQEHHCLFCKKPIDHYHHVVPKSENGSNTIANIVGLCAEHHNLVHKDVAWQEKLAEEKTGLNKKYGALSVLNQIIPALTNKLSVLFPKHFFVTAGKSTHDYRAAHGVSKDHWLDAYCIACSVLPSNVCDSNINNHVPYELKQFRRHDRRVLHKANMSRVYTLNGKAVATNRHKAIKQTTDSLEEFRQNYPDDVYKLKVKEHHPAYRNLNRNYPGSVFLVGKQAHVMQGIASSKDGKTTKYNDTNATTITAGKCKFVAKNSGILFVQCKFRKALSDGTTKKLQYPV

SEQ ID NO: 3266 - protein, 229 aa, Anabaena sp.
VKDVPFQVEHIHPRAKGGSNSITNLTLSCEKCNTKKGTKDIKDFLKKDPSKLEKILKQAKRPLADAAAVNTTRLALLFVVKATGLPVETGSGGLTKFNRSQQNLEKTHWIDAACVGQSTPILNIKGVKPLLITANGHGTRQSCRTDKYGFPSRYVPRFKFVNGFQTGDIVKAVVTKGKKIGAYIGRVAVRTSGSFNISTVPGLIQGISYKYCKSIHKKDGYEYGKSKIC

SEQ ID NO: 3267 - protein, 400 aa, unidentified
MRVFVLNMRGEPLMPCSQRKARLLLKSNKAVIYKYNPFTIQLTYATGEARQDCHIGIDTGAKHIGAAVTSKDKVLWKCEIELRQDVKSNIDAKRIYRRSRRNRKTRHRKPRFLNRKRNDDWLPPSLQNRINHTFHWIDALSSLVPKPILHIEVGKFDTAKMINPEIHGVDYQHGRTYGFFDERYYVFARDNYTCQCCGKSKGKILQTHHIIYRSNGGTDRVDNLITVCTDCHTSQNHKKGGIFYKWQEQHKKVKQYKEPPFMNTLRKRIFAAYPSAEITYGAETTPKRKAMKLDKTHYNDAIVISGINKINENPEEWLLIKQFRKKKRSLHEATARKGRRMPNRNQVRNCKNMPYYKGFYLNDKVSIFGKSGHVTGFTTNGAYVKDDNGNYITLPNKSYI

SEQ ID NO: 3268 - protein, 471 aa, Caldicellulosiruptor sp.
LVIFTVDKHGRPGHPTRRFDMVRKLVKQGRAKIIGGGASGKPPVVMFLDREFDYSKTIERRLFVVLDPGYHHIGFAVCELRWGVLIVYCIGVLETRIPEIKDLMTKRRGYRRNRRYHSRCRKKRMSKRHSRVLTKFKAPRNVRTKDRTNATLRHGIETHLNLYKKLLKFFPFPAEQVVFVMEDNIFDVRTMTWGKTYGTGYQKSPRVPAEKKCIICGTEDNLQKHHLIQRKCGGTDVQENLVYLCRDCHEDVHAGRVYIPVEGVRQWRALGTMNAIIGQLREIPWLKFVPASDAAQMRKKLGLKKGHANDALATAAVFCSCTEADRTHMIELTLVKFRRHNRARIHAVRDRLYKVDGKIVAKNRRKRTDQKEPSFADISPLPPEIQRKLKVYPGTKILNPLRKETPTIAGDVWIHEPTGKRFVTTGVVSQKYLYSPQLKKIVGKMYVQPEECRQVLHNEGMVVMYNSLYHS

SEQ ID NO: 3269 - protein, 351 aa, unidentified
NRKRCPDWITPTVQHLVQTHLNIIRKISRYLPVTDIAFEVNRFAFMHMENPEAMGVDFQNGPLKGYGDVKEAIRTQQHGKCLMCKKPIAHFHHIVPRSRGGSDTIQNLAGLCPECHTKVHTDTTFRKDFDRKKSGQLKKYGALSALNQAVPFICKKLLEEYGEEHVHFCGGLDTSLIRTALGFEKTKKNQMHEVDAYCIGLAALEVNEVETPAFDHTFQIRQFRRQDRSIIHHQTGRSYYQGKEKVAQNRKPGFEQKTTALSQWYKEQVRIHGEKEAEKLRSQLRVEKSCRHYNDMDRFLPGAVFLYEGKRYVLSGRITNGKYLRACGQGMKNFPAAECTFIRHNAGLVFI

SEQ ID NO: 3270 - protein, 425 aa, unidentified
MVYVISQDGQPLMPTDRHGKIRRLLKSDKAKVVKHCPFTIQLLYGSTDYTQEISLGIDAGSKYIGISATTQNRVLYESDVELRNDIVSLLSARRQNRRTRRNRKTRYRKPRFNNRISCKKKGWLAPSVRQRVNTHLTVVAKGHQILPVTRIIVETASFDIQKIKNPTISGTDYQQGDQLGFWNVREYVLFRDGHVCQCCKGKSKDKILNVHHIESRKTGGDSPDNLITLCKTCHTGYHRGTIKLPKTIHRGMFFRDASFMGIMRWSFYDELKTLYPDVNLTFGYITKNTRIKNNLPKEHYIDARCISGHPLAVSDETYYYQKKVRCHNRQIHKNTILKGGVRKRNQAPYFVKGFRLFDKVMYQGQECFIFGRRSTGRMDLRLLDRTHINASVSYKKLKLIESRKNYITERRTAVPPTGKSVDFPA

SEQ ID NO: 3271 - protein, 423 aa, Arthrospira sp.
MSNHIFVLDTNRKPLTPCKPGMARSLLKAGKASVFRRYPFTIILNKEVDANPEPLELKLDPGSKVTGIALKQGNHIIFAAELQHRGQQIKEALLSRRQLRRSRRNRKTRYRPARFLNRTRPEGWLAPSLQHRVDTLMTWVHRFRRLAPVGRITQELVRFDLQLMENPEISGVEYQQGELQGYEVREYLLFKWGRTCAYCGAQNVPLEVEHIQPRSKGGSDRVSNLTMACHSCNQAKGNGDIRDFLSGQPDVLSRLLRLAKSPLKDAAAVNSTRWALFKALKATGLPVTTGTGGQTKFNRLRLNLPKAHWLDAACVGPVESLEVLTSKPLLILAKGHGTRQMCGTNKYGFPNRHRSRRQIHKGFQTGDMVTALVTAGKKIGSYLGRVLCRASGSFDITTASVRVAGISHKYCQPIHSTDGYAYA

SEQ ID NO: 3272 - protein, 401 aa, Ferroplasma sp.
LIPCKPAKARHLLSDRKARVISSNPFTIQLLWHCEENVETITLGIDSGYKHIGFSAVTDNKELISGEVVIRTDIPKLNEEKAMYRRKKRNKLWYRKPRFMNRGNNKEGWFAPSIEHKLETHIRLIEKLKRILPVSNTVIEVASFDTQKMKNPEISGIEYQQGELQGYEIREYLLEKFHHICVYCSKTGVPLEIEHLTPRSRDGPDTVNNLAISCHECNQKKNNLTAEEFGYPEVRKRALITMRDAAFMNTVRWKLTQLAGSEHTLGFITKKNRISLSLDKTHVNDAFVIAGGTVQIRTSPFTITQRRRNNRSIQTNRKGFRPSIIRKRYAFQPGDMVLHDHERFSVVGMHNYGKSIVIKGGEKKMDINTKKVKLVKYGKGLQFAPQFLPTLSDGVSLGEVR

SEQ ID NO: 3273 - protein, 372 aa, unidentified; identical to SEQ ID NO: 3022

SEQ ID NO: 3274 - protein, 337 aa, Oscillatoria sp.
LSKVFVLDTKSQPLNPIHPGRARMLLSQRKAAVFRSFPFTLILKEEVSSPDIEPLRIKIDPGAKTTGLALVNDKTGEVVWVAELQHRGFQIRDALTSRRQLRRSRRSRKTRYRKPRGLNRTHPKGWLPPSLNSRVANILTWVKRLSLLCQINAISQELVRFDTQKMENPEISGIAYQQGTLAGYEVREFLLSKWNRTCAYCGAKDVPLEIEHIQPRSKGGSNRVSNLCLACVPCNQEKGNQDIKDFLKGKPDLMKRILAQAKRPLADAAAVNTTRWNLYENLKKLGLPVEVGTGGRTKYNRTIRGLEKTHYIGRGLRWRIHSRAANNYWNKTLTDCC

SEQ ID NO: 3275 - protein, 450 aa, Clostridium sp.; identical to SEQ ID NO: 2935

SEQ ID NO: 3276 - protein, 509 aa, Streptomyces sp.; identical to SEQ ID NO: 3085

SEQ ID NO: 3277 - protein, 411 aa, unidentified
MVYVQDIDGKPMMPTTRHGKVRRLLKDNKAVVVNTCPFTIKLTYKTSDYKQEIVLGVDAGTKHVGLSATTKSKELYSGEVILRNDIVELLSTRRESRRTRRNRLRYRKPRFENRVKSKRLGWVAPSVRHRIDAHIRIINNVCSILPVSRVIVEVAQFDTQKIKNPEISGKEYQEGDQLGFWNVREYVLARDGHKCQHCKGKSKDPILNIHHIESRKTGGDSPSNLITLCETCHKEFHKGNIKLKVKRGKSLRDAAVMGIMKWRLYDKLKSLYPNVRMTFGYITKHDRINHGIEKSHVSDAFVISRNFDSERLGYYYKLKLVRRHNRQIHKMKIPKGGKKRMNQSPFKVFGFKLFDKVMFQGEERFIYARRLSGQFKIKDIDGNNERNISYKKLRYVSHGLISIKTNLFLSQ

SEQ ID NO: 3278 - protein, 423 aa, Arthrospira sp.
MSNHVFVLDTNRKPLRPCKPGVARSLLKAGKASVFRRYPFTIILNKEVDANPEPLELKLDPGSKVTGIALKQGNHIIFAAELQHRGQQIKEALLSRRQLRRSRRTPKTRYRPARFLNRTRSKGWLAPSLQHRVDTLMTWVHRFRRLAPVGRIAQELVRFDLQLMENPEISGVEYQQGELQGYEIREYLLFKWGRTCAYCGAQNVPLEVEQIQPRSKGGSDRVSNLTMACHSCNQAKGNGDIRDFLSGQPDVLSRLLRQAKSPLKDAAAVNSTRWALFKALKATGLPVTTGTGGQTKFNRLRLNLPKAHWLDAACVGPVESLEVLTSKPLLILAKGHGTRQMCGTNKYGFPNRHRSRRQIHKGFQTGDMVTALVTAGKKIGSYLGRVLCRASGSFDITTASVRVAGISHKYCQPIHRKDGYAYA

SEQ ID NO: 3279 - protein, 380 aa, unidentified; identical to SEQ ID NO: 3156

SEQ ID NO: 3280 - protein, 439 aa, unidentified
LVFVIDKQKNQLLPTTNAKARILLNANKAVIHKIYPFVIRLKTSKTINANNKCAIKLDPGANTTGVAIVDKEKCLFLMEIIHRGKEIRKALFQRKVVRRNRRQRNTRYRQARFQNRIKRNGWLAPSVKSRADNIINIVNKLSKYIPLTNVAIENVSFNTTDMTEGIKLYGKEYQNGNLKDTKLRKFLMEKYNNRCNYCGSIEKLEVEHILSKSKGGTDSIKNLTLSCRKCNELKNNLSLKQFGKLINRDLSHLEPLQTPKSAAIIQSARNYTIAQLAKSFEIETGEGWETSFNRKEVNLPKEHYYDALCVGKDYDYRIVANTVLVIKARGRGSRQMCLMDKYGFPRTSPKSSKSVKGFQTGDIIKAKVPDGKKQGKYFGKVAVRTNGYFNITTDTQTIQGIGHKHCKVIQRGDGYAYFMKGASGFLSGLEDRVSTAILR

SEQ ID NO: 3281 - protein, 426 aa, unidentified; identical to SEQ ID NO: 3182

SEQ ID NO: 3282 - protein, 423 aa, unidentified
MSNHVFVLDTNRKPLRPCKPGVARSLLKAGKASVFRRYPFTIILNKEVDANPEPLELKLDPGSKVTGIALKQGNHIIFAAELQHRGQQIKEALLSRRQLRRSRRNRKTRYRPARFLNRTRSKGWLAPSLQHRVDTLMTWVHRFRRLAPVGRIAQELVRFDLQLMENPEISGVEYQQGELQGYEVREYLLEKWGRTCAYCGAQNVPLEVEQIQPRSKGGSDRVSNLTMACHSCNQAKGNGDIRDFLSGQPDVLSRLLRQAKSPLKDAAAVNSTRWALFKALKATGLPVTTGTGGQTKFNRLRLNLPKAHWLDAACVGPVESLEVLTSKPLLILAKGHGTRQMCGTNKYGFPNRHRSRRQIHKGFQTGDMVTALVTAGKKIGSYLGRVLCRASGSFDITTASVRVAGISHKYCQPIHRKDGYAYA

SEQ ID NO: 3283 - protein, 427 aa, unidentified
MSKVFVLAPNKKPLNPVHSGQARRLLNQGKAAIFRRIPFSIILKKEVNNSANPLRVKIDPGAKTTGLSLVNDQTGEVIWAGELTHRGFAIRESLTSRRQLRRSRRGRKTRYRQPRFNNRKRVDKSLPPSLMSRVHNILTWVRKLTRLAIITAISSELVRFDTQALENPEIRGTEYQQGELAGYEVREYLLEKFNRKCIYCSQTDTRLEIEHLTPRSKGGSNRVSNLGIACQPCNQKKGNRDVLSFLKGKQDLAKKILDQAKKPLADTAAVNATRWELFNQLKQFNLPVEVGTGGLTKFNRCRQNLDKTHWLDAACVGQSTPEQLIIKGVRPLLIKANGHGTRQMCGTNKYGFPIRHRSRIKIHKGFQTGDIVKAIVTSGKKIGIHAGRVLCRASGSFDIASKSGRVTGISHKNCRVVHKNDGYAYEF

SEQ ID NO: 3284 - protein, 409 aa, unidentified
MENTLKVFVLNMRGQPLMPCSPPKARKLLRAGKAVPVRRTPFVIQLTVPTGETKQPITLGVDAGYKHVGLSATTAKEELLASEVELRQDVTGLLSNRLALRRARRNRKTRYRAPRFDNRIRSKHKGWLAPSVENRIQAHISRIEAVCRVLPITKIVIETASFDIQKIKNPEVEGTDYQQGEQLGFWNVREYVLFRDGHVCQACKGRSKDLILNVHHIESRKTGGDAPGNLITLCEACHKAYHAGKLKQFSPRRGASFRAETFMGIMRWTVLNRLRERHPELPVTNTYGYLTKHKRIVAGLPKTHCADAFCIAGVLDAKRRGEYLFQKQTRRHNRQIHKLTILKGGVRKRHQAPYLVHGFRLFDKVLCKGEVGFIFGRRSSGAFDVRRLDGTKISAGISYKKWLFVHSCG

SEQ ID NO: 3285 - protein, 398 aa, unidentified
MQYVYVLNKHGEPLMPCSQRKARLLLKQKKACVIKRTPFTVKLLHGSAGYKQPVTLGVDAGSKHIGISATTEKHELYREEATPRNDVVDLLSARRAFRRSRRNRKTRYRAPRFNNRVHSKHKGWLAPSVEVKIQEHITLIKHVFRILPVTLVRVETAEFDTQRLKAMLEGKPLPVGTDYQLGEMYDEYNVRQYVLKRDNYTCQCCGAHSTKTKGVKLHVHHIETRRTGGNAPNNLITLCKACHKALHAEKVTLDGKKRGKPLKDAAFMGIMRKTLMERLRKELKIPVQGTYGYITKYLREKNGIPKSHTNDARCISKNPLAIPCDTCYYTKAVRHHNRQLHKATILKGGIRKANQAPYIVKGYRLWDKVAYNGTECFITGRRTSGYFALKELDDTVVS

SEQ ID NO: 3286 - protein, 553 aa, Nocardiopsis sp.
MDVPDYVRSEITSCDRPPLPAPAITLGEVTSMATFRAGQKTHQAVLPQRPALESAPADTRRISDETGRGHRSRNSSAVPGAEHVRGETGTASPGGSGVTPEPFGAGEKGREAHTRQSDPYVFVLDRSGTPSQPCHPTRARKLLATGRAVVHRHTPFVIRLRDRTIEDSEVDGVELGIDPGSKHTGIAVFTHQGGERRGRYAIQLDHRGSRIRKKLAQRANYRRRRRTSDLRYRPPRFDNRTRPRGWLPPSLQHRVDTTTSWVDRHTRWAPVEAVHVERVAFDTHVLSVAEPLEGAEYQQGTLHGYEVRDYLLSKCGRACLYCGATNVPLNIDHVHPRSRGGTDRVSNLVLACVPCNQAKNDRPVEEFAPGAATRVHQRAKAPLADAAAVNATRWALWLALDARLPTRVGTGGRTKWNRTLNQLPKSHTLDALCVGKVEKVTQTVRTVLVAGCAGRGTYARTRPDKHGFPRLRLPRTKGFFEFATGDLVRAVVPKGKKAGAHTGRVAVRASGSFSITTAHGIVQGINHRHLRLLQRADGYAYTIREEEGVSSRP

SEQ ID NO: 3287 - protein, 465 aa, unidentified
MSTCVCVLSNSGERLMPTFRLGKVRRLLKDGKAKIVKHHPFTIQLLYDSKTNTQPIEICEDVGYNYIGISVKSQSHEYVSAQYDTLQDEKACHDSCRKLRRSRRNRLRYRQKRFNNRKHDKGWLAPSLRHKKELNVNVVKMYCAVMPITHATIEVGSFDTMLVKAIQEGKAIPEGADYQKGPRYNLATLREAVFYRDNYVCKVCGRKATEGAILHMHHMFYWKGRHGNSLSELITVCEKCHTPANHQKGGKLYGFGENVKFADLSGAAFMNTVRWQIVNELYAAFGKDFVTITYGAMTKEKRIALRLEKSHNNDAYAMGEFHPNHRCTFEHYEKVRRNNRTLEKFYDSRYIDIRTGEIATGKELFNGRINRNHKKDSENLHRYRGKRTYAGHRALLRKKVNLNPGDLVSLNGEVLIVHGTHTNKKGAVNVEFKVPAKNGQKSASLKKLKIVKTTDSMHSAWKKIS

SEQ ID NO: 3288 - protein, 420 aa, unidentified
MQYVYVLNKHGEPLMPCSPRKARLLLKQKKACVIKRTPFTVKLLYGSTGYKQPVTLGVDAGSKHIGISATTEKHELYREEATPRNDVVDLLSARRAFRRSRRNRKTRYRAPRFDNRVHSKHKGWLAPSVEVKIQEHITLVEHVCRILPVTLVRVETAEFDTQRLKAMLEGKPLPVGTDYQLGEMYDEYNVRQYVLKRDNYTCQCCGAHSTKTKGVKLHVHHIETRRTGGNAPNNLITLCTACHKALHAGKVTLDGKKRGKPLKDAAFMGIMRKTLMERLRKELKIPVQGTYGYITKCLREKNGIPKSHTNDARCISKNPLAIPCDTCYYTKAVRHHNRQLHKATILKGGIRKANQAPYIVKGYRLWDKVSCNGTECFITGRRTSGYFALKKLDGTVVSNSISYKKLRLLEAATNYITERK

SEQ ID NO: 3289 - protein, 380 aa, unidentified; identical to SEQ ID NO: 3156

SEQ ID NO: 3290 - protein, 413 aa, unidentified
MTSYAFVLDANGKQLAPTKEQKAWFLIRKKRAALVSKYPMVIQLKKEIQENEICKDEIRCGIDDGGLHVGIALVQKCKTKNKVVFKGTIEQRNDVKHLMEVRRGYRRYHRYHKRYRQARFNNRKSSKREGRIAPSILQKRQATIRVINQLNKWINITNYWLEDVSIDIRVLTDGYKSYRWQYQKSNRLDENIRKATILRDGGKCMECGKSNCRLEVHHIKPKRRNGSNTLDNLITLCESCHQKTEGQEELYMDRYFSLLKSSDNKNLNYAQHVMIGKMWLRKQLSGLGVLYLTSGGDTANKRIDWNIEKSHANDAVCITDLQPDTYDMKEWTMKPMRRQSKAKTDHVLGIKHRDLVEYTFKNGETHRGYVTALYPEQKAINFQSPTKHCKKVNARKCKLLWKYSKIYWFENAS

SEQ ID NO: 3291 - protein, 396 aa, unidentified
VVRRTPFTIQLTIATGESKQPVSLGVDAGYKHVGLSASTEKAELYASEVELRKDITDLLSARRALRQSRRNRKTRYRAPRFDNRIRTKRKGWLAPSVENRINAHLSRIEAVLRLLPITKITVETASFDMQRLKNPDISGKEYQEGEQLGFWNVREYVLFRDGHVCRHCHGRSKDPVLNVHHLESRRTGSDSPDNLITLCVTCHKALHRGEITLKAKRGQSFRAQAFMGIMRREVLNRLKASYPELKVHETYGYLTKHARIANGIVKSHGADAFCIAGNLGAERLGEFFFQKQTRRNNRQIHKLSILKGGIRKRNQAPFEAKGFRLFDKVACQGEEGFIFGRRSSGSFDVRKLDGTRISAGISCKKLRLLEKRRTYLTEIRKEEALPPLPEGRGLRA

SEQ ID NO: 3292 - protein, 522 aa, Nocardiopsis sp.
LATFRAGQQTHQAVLPQRPALESAPADTPWIWNETGRGHRREAVPGAEHGRGETGAASPGGTGVTPEPSRAGEQGREAHTIEQVHPAVFVLDKRGTPLQPCHPARARNLLRKERAVVARHTPYTIRLKDRTVADSQVEGVEVGIDPGSKHTGITVFTEQAGQRRGRYAIQLDHRGARIRKKMGQRSGYRRRRRSTNLRHRPPRFDNRIRPRGWLPPSLRHRVDTTVSWADQLTRLAPVRAVHVERAAFDTHALSAGRSLEESEYQQGTLCGFEVREYLLAKFDRSCVYCGATNTPLNIDHVHPRSRGGSDRISNLVLACVPCNQDKDDQPVEEFVKNARTLARVKAQAKSPLKDAAAVQSTRWALWRALDIRLPAHVGSGGRTKWNRTRNHLPKSHTLDALCVGKAETVTEVVHTVLVVGCAGRGSYARTRPDRHGFPRLRLPRTKGFFGFATGDLVRAVVPKGKKAGTHTGRVAVRASGSFNITTGHGTVQGIGHRYLRLLQRADGYAYTTRKESGVSSRS

SEQ ID NO: 3293 - protein, 456 aa, unidentified
MSTCVCVLSNSGKRLMPTFRLGKVRHLLKDGKAKIVKHHPFTIQLLYDGKTNTQPIEICEDVGYNYIGISVKSQSHEYVSAQYDTLQDEKACHDSCRKLRRSRRNRLRYRKPRFDNRKRGEGWLAPSLKHKKELNVNVVKMYCAVMPITHATVEVGSFDTMLVKAIQEGKAIPEGADYQKGPRYNLATLREAVFYRDNYVCKVCGRKATEGAILHVHHMFYWKGRHGNSLSELITVCEKCHTPANHQKGGKLYGFGENVKFADLSGAAFMNTVRWQIVNELYAAFGKDFVTVTYGAMTKEKRIALHLEKSHNNDAYAMGNCHPAHRCEFGHYQKRCRNNRVLEKFYDATYIDTRTGDKAKGKELFNGRISRNHKKDSEDLHKYRSKKVSKGRRSIRRQRYAIQPYDTVRLESKSYITSGCHNKGTRLLIPANGKSKSVAISKVQVVCHAGAWIQII

SEQ ID NO: 3294 - protein, 426 aa, unidentified
LKGVGMMSEIKKVDYIYVVDSNGTPLMPTSRLGMVRRWLKTGQAKWFGNSRNTIQFVRPVTTNTQELTLGVDAGFHLGLSVVGNNREYYVSESLRKSEKDRITSRRELRRTRRNRLRYRKARFNNRRRKDGWLAPSIQHRLDFTIKEIKRLYKFLPITNLVVEVTPFDNQKLLNPDIQGWQYQKGKMYGFKTIKDYLLARDNYRDALDGKQYPASQLRVHHLVQRKDGGSNQPDNLVLLSDINHNQANHNNGILAKLRENRQKTLDYRGAYFMSILATRLSNYFEHYTTTQGYLTANLRQKLRNNNRVLQKFYDAKYIDSRDGKQKAGKELSSGRTRRSQELNYDNLRQLRKEKVKKGRVSIRRGHYQLRPHDVVLNTRTNRIETVKGVQNSGTVIKFQTGKTCSIKSVVSLYHVNGILEKKMKNI

SEQ ID NO: 3295 - protein, 413 aa, unidentified
MTNYAFVLDANNKQLAPTKEQKAWFLIRKKRATLVSKYPMIIQLKKKIPDKKICKDEVRCGIDDGGLHVGIALIQKCQTRNKVVFKGVIEQRNDVKHLMDVRRGYRHYHRYHKRYRPARFNNRKSSKREGRIAPSILQKRQATIRIINQLNKWINITNYWLEDVAIDIRALTDGYKPYRWQYQKSNRLDENIRKAVILRDGCKCMECGKSNCRLEVHHIKPRRLKGSSTLDNLITLCTKCHQKTEGVEELYMDRYFALLNSSDNKSLNYAQHVMIGKKWLREQLSNLGILYLTNGGDTANKRIDWDIAKSHSNDAICITDLRPDTCEIKELTIKPMRRQSKVKTDNVLGIKHRDLVEYTFRNGETHRGYVTALYPEQNALNFQSPTKHCKKVNASKCRLLWKYSKIYWLDNVS

SEQ ID NO: 3296 - protein, 429 aa, Ktedonobacter sp.
VSNVFVIDSDYKPLNPVHPGHARRLLRQGKAAVFRRYPFTIVLKRVVEQPEVQPLRLKLDPGSKTTGIALVNDTNGHIVFAAELSHRGHAIKDSLDSRRASRQGRRQRKTRYRKPRFDNRRRKKGWLPPSLESRLANILTWVARLCRYAPIAALSQELVKFDMQLMENPDIAGVQYQQGTLQGYEVREYLLEKWERTCAYCGKQDVPLQVEHIHPRARSGTNRISNLTLACQACNTAKGTQEIEVFLQKKPDVLKRLLAQVKKPLKDASTVNSTRCALLERLKALGLPVECGSGGLTKWNRTTRGLPKTHWLDAACVGKSTPDVLVQKGVIPLRIKATGHGRRQMCVPDKYGFPKQHKERKKKFLGYQTGDMVKAITPKGPFEGRIAIRHRPSFRLEKVDIHPKYMRCVQRSDGYEYTQKGVRHAPPHG

SEQ ID NO: 3297 - protein, 414 aa, unidentified
LKGLSRTCGSLRFKEKTLKVFVINKRGKPLMPCKPAKARHLLRDGKARVVRRTPFTIQLTIATGENVQPIHLGVDAGSKHIGLSATTEKEELFSSEVELRKDITDLLSSRREMRRARRNRKTRYRAPRFDNRVHAKNKGWLAPTLENKISAHLSRIKAIRAILPVSRITIEVASFDIQKIKNPEIEGEQYQQGEQLGFWNVREYVLFRDGRKCCHCHGKSKDPILNVHHIESRKTGGDAPNNLITLCETCHKAYHAGKIQLTAKRGEKFTDATHMGIMRWELFKRAKEANLGIPVKTTFGYITKVRRIQFGIAKTHCADAFCIAGNLNAKRLGEYGEFQKFEKRGVGRHDHSPLSLMSEWRIIVVLKIQNPTFRHGDILPQIQRPAVSFLQSAYGWFFAPSPEQKRSRGIPWYR

SEQ ID NO: 3298 - protein, 463 aa, unidentified
CRENIRIKGGQLMSVAVISKTGERLMPTSEYRARKLLKSGKAIKYSYHPFTIQLTERKTGNIQPIELCMDTGYIHIGISVKSEKHEYLTEQIDTLTDERSRHNARRMYRSQRRNRKRYRQPRFNNRKKDKGWIAPSLEHKKNIHVQAISRINNVMPLTDITMEMGNFDTQVLKAKEEGRPLPQGVDYQHGERYSIATLREAVFARDGYKCQCCGRTIKDGAILHVHHIKYRSQGGTNSISNLATVCDKCHTPKNHKPGGKLYGWKPKLPSFKGATFMTTIRWQLYNEAKALFPDIDIHITYGAATKERRRELNIDKSHINDAFVMGQFHPRHRIKAVLYKKKRRNNRCLEKFYDAKYIDSRDGKKRSGQELFNGRINRNHKKDSENLHQYRLQKVTAGKRTVRKQHYSVQPHDIIIYESRKRETTGCHCNGARVMLLPDKKSVSIKKIKIYRYASGYFKSTFN

SEQ ID NO: 3299 - protein, 423 aa, unidentified
MSNHVFVLDTNRKPLTPCKPGMARSLLKAGKASVFRRYPFTIILNKEVDANPEPLELKLDPGSKVTGIALKQGNHIIFAAELQHRGQQIKEALLSRRQLRRSRRNRKTRYRPARFLNRTRPEGWLAPSWQHRVDTLMTWVHRFRRLAPVGRITQELVRFDLQLMENPEISGVEYQQGELQGYEIREYLLEKWGRTCAYCGAQNVLLEVEHIQPRSKGGSDRVSNLTMACHSCNQAKGNGDIRDFLSGQPDVLSRLLRQAKSPLKDAAAVNSTRWALFKALKATGLPVTTGTGGQTKFNRLRLNLPKAHWLDAACVGPVESLEVLTSKPLLILAKGHGTRQMCGTNKYGFPNRHRSRRQIHKGFQTGDMVTALVTAGKKIGSYLGRVLCRASGSFDITTASVRVAGISHKYCQPIHRKDGYAYA

SEQ ID NO: 3300 - protein, 426 aa, Parasutterella sp.; identical to SEQ ID NO: 3045

SEQ ID NO: 3301 - protein, 423 aa, Arthrospira sp.
MSNHIFVLDTNRKPLTPCKPGVARSLLKAGKASVFRRYPFTIILNKEVDANPEPLELKLDPGSKVTGIALKQGNHIIFAAELQHRGQQIKEALLSRRQLRRSRRNRKTRYRPARFLNRTRSKGWLAPSLQHRVDTLMTWVHRFCRLAPVGRIAQELVRFDLQLMENPEISGVEYQQGELQGYEVREYLLFKWDRTCAYCGAQNVPLEVEHIQPRSKGGSDRVSNLTMACHSCNQAKGNGDIRDFLSGQPDVLSRLLRQAKSPLKDAAAVNSTRWPLFKALKATGLPVTTGTGGQTKFNRLRLNLPKAHWLDAACVGPVESLEVLTSKPLLILAKGHGTRQMCGTNKYGFPNRHRSRRQIHKGFQTGDMVTALVTAGKKIGSYLGRVLCRASGSFDITTASVRVAGISHKYCQPIHRKDGYAYA

SEQ ID NO: 3302 - protein, 406 aa, unidentified; identical to SEQ ID NO: 2752

SEQ ID NO: 3303 - protein, 428 aa, unidentified; identical to SEQ ID NO: 3139

SEQ ID NO: 3304 - protein, 432 aa, unidentified
MQTNYVFLLNADKTPLDLIHPARARELQSKGKARVFRHYPYVLILQHQIINPFTKSYSIKIDPGSVWTGFVLQCGDEILFRMELKHRSLNIKSDLEQRAGFRRGRRSRNLRYRQKRFNRKRPQGWLAPSLMHRVLTVETWIKRFIRYCPVNCIEIEQVHFDMQKIMNPEISGTGYQQGTLMGYEVRQYLLEKWGRECAYCGAKNVPLEIEHVYPKSKGGSDRVSNLTLACHQCNQAKGNQDIQDFLSGKPDLLKQILGQMKRPLNHAAAVNSTRFAIVAMAKKLCGAVKCWTGGRTKFNRTQQGLGKSHSIDAACVGESGASIKLQTHQPLMVFCKGHGNRQARRVNASGFPAVEKAKDIFHHVTAGDIVKVQITKDRKKVKAGIYTTRVKTPTCKGCEVLIDGSRVTLSTMKDIVFVHRSDGYSYGLLKNS

SEQ ID NO: 3305 - protein, 634 aa, Nocardiopsis sp.
MTRAPSSARSSLGGASSTFPMGTPASVRVPVPPLVPAPPSTTVIPVLSRYGWLVTPSETWFRGPSAKDNHLRPQPTSRGNAFPARRRGFRPPGRGPGVTSTSQHQGGDQLATFHTGEKTHQAVLPQRPALESASADIPRNGNETGRGSHVRGAPGVEHVRGETTGGSPTAGGVAPVPPGAGEQAREDRPPKTTPREGHPYVFVPDRHGTPLQPTHPARARRLLARGRAIAARHTPFVIRLKDRTTAESGVDGVETGIDPGSKRAGTAVFTDRRGERRGRCAIRPDHRGGQIAKRMRQRAAYRKGRRSRNLRYRTARFDNRTRPRGWPPPSLRHRVDTTLAWVGRPARWAPVRAVRVERVAFDVHALGAGRPAEGVEYRHGTLHGYEVREYLLAKWGRACAYCGATGTPLNIDHVRPRSRGGTDRVADLALACVPCNRAKADQPVEEFVTNPRALAGISAQTKAPLRDAAAVDATRWALWRSLDECPPTRVGSGGRTKWNRTRDHLPESHTLDALAVGRVEAVTTAVSTVLVVGAAGRGPYARTRADRHGFPRLRLPRRKRFFGFQTGDLARAAVPSDMNAGTHTGRVAVRSSGSHTLQTSYGPIKTSWKNLCLLQRADGYGYTTQKEAGAPSTA

SEQ ID NO: 3306 - protein, 465 aa, unidentified
MSTCVCVLSNSGERLMPTFRLGKVRHLLKDGKAKIVKHHPFTIQLLYDSKTNTQPIEICEDVGYNYIGISVKSQSHEYVSAQYDTLQDEKACHDSCRKLRRTRRNRLRYRKPRFDNRKRGEGWLAPSLRHKKELNVNVVKMYCAVMPITHATVEVGSFDTMLVKAIQEGKAIPEGADYQKGPRYNLATLREAVFYRDNYTCQVCGRKVADGAILHMHHMFYWKGRHGDSLNELLTVCEKCHTPANHQKGGKLYGFGENVKFADLSGAAFMNTVRWQIVNELYAAFGKDFVTVTYGAMTKEKRIALRLEKSHNNDAYAMGEFHPNCRCTFEHYEKVRRNNRILEKFYDSRYIDIRTGEIATGKELFNGRINRNHKKDSENLHRYRGKRTYAGHRALLRKKVNLNPGDLVSLNGEVLVVHSTHTNKKGAVNVEFKTPGKSGQKSASLKKLKIVKAADSMHSAWEKIS

SEQ ID NO: 3307 - protein, 535 aa, Nocardiopsis sp.
VLPQQHALEFESADTPRIGDETGLEHRTTVPGAGHGRGETPGSSPGSRGVTPEPSRDGEQGREAYTLDPFVFVLDRYGTPLQPCSPARARKLLTKGRAVVARHTPFTIRLKDRTAGDSEVDGVEIGIDPGSKHTGIAVFTTEAGERRGRYSLQVDHRGSSVRKRLRQRSAYRRRRRSANLRYRSPRFKNRTRPRGWLAPSLRHRVDTTMGWVHRLARWAPVRAVHVERVAFDTHALSAGKPLENAEYQFGTLHGYEVREYLLAKWDRTCCYCGATGVPLNIDHIYPRSRGGFDRVSNLTLACMPCNQAKGDRLIGESASSPKTLARITAQAKAPLLDAAAVSSTRWALWRALDARLPTHTASGGRTKWNRFRTGLSKSHSFDALAVGKLDSITEVVGRVLHVACTGRGRYARTTSDKHGFPRLRLSRRKQFYDFGTGDLVRAVVPSGKRQGTHTGRVLVRAKGSFDITTATGRQAGINHRHVRLLQRADGYGYALREESPVHNPSLTADQPVLADLSRSEFLPAVNNGASFKGAQ

SEQ ID NO: 3308 - protein, 532 aa, unidentified; identical to SEQ ID NO: 3169

SEQ ID NO: 3309 - protein, 470 aa, unidentified; identical to SEQ ID NO: 2825

SEQ ID NO: 3310 - protein, 425 aa, Aphanothece sp.
MSNYVLVIDSNKQPLNPCHPSVARKLLKSKNAAIFRQYPFTIVLKKEILDVVIEPIEIKIDPGSQTTGIALVQGDKVIFGAELSHRGSTIKDSLESRRSLRRGRRSRKTRYRQARFLNRKKPSCWLAPSLQHRVDTTLTWIKKLIKFAPIVGISQELVRFDLQQLENPEISGVEYQQGELVGYEVREYLLNKWDRKCSYCSIENVPLQVEHIHPKAKGGTNRISNLCLACESCNLKKGTKDINVFLAKKPDVLKRILSQAKRPLKDAVAVNSTRWTLFNALKNTGLPITTGSGGKTKFNRTRLNLPKQHWIDAACVGIVDTLKVLTNKPLLIKATGHGTRQSCRTDKYGFPSRYVPRFKFIKGFQTGDIVKAVVTKGKKIGTYVGRVAVRSIGSFNISSPNGLIQGISYKNCTHIHKKDGYSYAT

SEQ ID NO: 3311 - protein, 437 aa, unidentified; identical to SEQ ID NO: 3245

SEQ ID NO: 3312 - protein, 540 aa, Streptomyces sp.; identical to SEQ ID NO: 3207

SEQ ID NO: 3313 - protein, 544 aa, unidentified
MKQKKQKVMVYILNKKGKPLMPTTRCGHVRKLLDSKKAVVVNSNPFTIRLKYDTPNGVQDVFAGIDSGRENIGSGVSNEDGDCLYLGELRTSNKSIKMKMTERVGFRRERRKHDRQNKQRKARKDHTEIQNGKDDICRATISCKSVQISYPTAEESVTHKIIRGKEGKFANRHRDEGWITPSARQLVQMHMNDLKSMCKILPISHVTLERVAFDFQKLENENIKVWEYGKGKLYGYDSPEEYIHDVQNGKCLVCGKPHIDYLHHIIPRSKGGSDKVSNIAGLCYDCHYGPMGVHNCQNTQDRLPELKSEANKQYKVSLLNSVMPVLIEEMDKFCKANSIMFSICEGHDTAKVRDMYDLQKDHCIDGFAISLVDRNVKSVDVMPDRIYQKQRYKKKSKNIIQKRNCREYYDDKKLVAVNRHKGTDQKADSLEEYMNTYAETHTADECKMHFESLTVKPARRTYTFHKEGRICPLHIGDKVRYEKKNKIKGNTKVDTFICEGIYFSKDENKAKVEHNKTKSKKMKFCRAIESGCIPYIDYIKLALI

SEQ ID NO: 3314 - protein, 418 aa, unidentified
PLMPCSPAKARHLLDDGKAKVVKRTPFTIKLLYGSTEYTQPVILGVDAGSKTIGLSASTTKEELFAAEVMPRNDVVENLSTRREFRRARRNRTTRYRKPRFNNRVHSKNNGWLAPSVEVKIQEHITSIKRVCAILPISKIVVETAEFDLQLLKAVQDGKPVPEGEDYQKGEMYGSYDVRQYVLWRDNYTCTCCGVKGTDKKPVKLHVHHFESRKHGGNAPDNYGTLCEDCHKKLHLGIITDISRKTRKRPSTRDAAFMGIMRKTLMQRLITGLSIPVAETKGYITKAAREEILKLPKTHTNDALAIAQGRHGFGIREQAYVKPTNRIYTVRPVRHHNRQLHKATMLKGGIRKLNQASKYIFGFRLYDKVLYQGGECFVWGRRRSASFLLRTIDGTKVKDGVGYRNLTLLERSTNYLIA

SEQ ID NO: 3315 - protein, 380 aa, Arthrospira sp.; identical to SEQ ID NO: 3196

SEQ ID NO: 3316 - protein, 572 aa, Nocardiopsis sp.; identical to SEQ ID NO: 2991

SEQ ID NO: 3317 - protein, 423 aa, unidentified
MSNHVFVLDTNRKPLTPCKPGMARSLLKAGKASVFRRYPFTIILNKEVDANPEPLELKLDPGSKVTGIALKQGNHIIFAAELQHRGQQIKEALLSRRQLRRSRRNRKTRYRPARFLNRTRPEGWLAPSWQHRVDTLMTWVHRFRRLAPVGRITQELVRFDLQLMENPEISGVEYQQGELQGYEIREYLLFKWDRTCAYCGAQNVPLEVEQIQPRSKGGSDRVSNLTMACHSCNQAKGNGDIRDFLSGQPDVLSRLLRQAKSPLKDAAAVNSTRWALFKALKATGLPVTTGTGGQTKFNRLRLNLPKAHWLDAACVGPVESLEVLTSKPLLILAKGHGTRQMCGTNKYGFPNRHRSRRQIHKGFQTGDMVTALVTAGKKIGSYLGRVLCRASGSFDITTASVRVAGISHKYCQPIHRKDGYAYA

SEQ ID NO: 3318 - protein, 456 aa, unidentified
WLYQAVYNLGEGFLPSSEERTAFYWLLIYRKEHGIMQYVYVLNKHGEPLMPCSPGKARLLLKQQKACVVKRTPFTIKLLYGSAGYKQPITLGVDAGSKHVGLSASTEKRELYREEFTPRNDVVDLLSTRRQNRRSRRNRKTRYRAPRFDNRVHSKHKGWLAPSVEVKIQEHITVIKRICRILPITLVRVETAEFDTQRLKAMLKGKPLPVGTDYQLGEMYDEYNVRQYVLKRDNYTCQCCGAHPTEKKPVRLHVHHLESRHVGGNAPNNLITLCVACHKALHEGKITLDKGKKRGKPLRDAAFMGIMRNTLLARLKDELNIPVKQTYGYITKLLREKNKIPKSHVNDARCIAKAPNAKPCDTMLYTRALRHHNRQIHKAKILNGGIRKKNQAPYLVKGFRLWDKVRYNGEECFITGRRSSGYFALKKYDGTVISNSASYKKLMLLEAATNYITERS

SEQ ID NO: 3319 - protein, 416 aa, unidentified; identical to SEQ ID NO: 3007

SEQ ID NO: 3320 - protein, 540 aa, Streptomyces sp.; identical to SEQ ID NO: 3207

SEQ ID NO: 3321 - protein, 431 aa, unidentified
MPDKVYVISRLGHPLMPCSPAKARHLLDDKKAKVVKRMPFTIRLLYGSTKYIQPIILGVDAGSKTIGLSASTAKEEVFAAEVMPRNDVVENLSTRREFRRARRNRTTRYRKPRSDNRVRSNHERWLAPSVKVKIQEHITSIKRVCTILPISKVVIETAEFDLQLLKAIQEGKPIPEGEDYQKGEMYGSYNVCQYVLWRDNYTCICCGVRGTPKNPVRLHVHHFESRKYGGNAPDNHGTLCDDCHKKFHLGIITDVKLKTRRRQSTRDAAFMGIMRKTLMWRLRTELFIPVAETMGYITKATREKLLVLPKSHTRDALAIAQGRHGFGIKEYAYVEPANHIYTVRPVRHHNRQLHKASILKGGIRKRNQASKYVFGFRLYDKVLYQGKACFVWGRRTSGTFLLRTIDGIKVKDGVSYRNLTLLERSSNYLIA

SEQ ID NO: 3322 - protein, 452 aa, Lactobacillus sp.
MSEVQKVNYIYVVDSNGTPLMPTSRLGMVRRWLKTGQARWFGNSRKIIQFVRPVTTNTQELTLGVDAGFHLGLAVIGNKREYYASESLRQSEKDRITSRRELRRTRRNRLRHRQARFDNRRRKESWLAPSVQHRLDFTIREIKRLYTFLPIAKLVVEVTPFDNQKLLNPNIKPWEYTQGKLHGFKTIKAYLLARDNYRDVLDGKQYPASQLRVHHLVPRKDGGTNQPDNLVLLSDINHSQANHNNGILAKLRENRQKALDYRGAYYMSILATRLSDYFDNYTTTQGYLTANLRQKYGIEKSHLNDAFIIAGGTDTTLRTNNVYSRQKLRNNNRILQKFYDAKYIDSRDGKKKPGKELSSGRTRRSRELNYTKLRQFRKTKIKKGWVSIRKNHYQLRPHDVVLNTKTNKIETVTGVQNSGTVIKFQTGKTGSIKNVVSLYHVNGMLEKKIKDI

SEQ ID NO: 3323 - protein, 543 aa, Streptomyces sp.; identical to SEQ ID NO: 3211

SEQ ID NO: 3324 - protein, 470 aa, unidentified; identical to SEQ ID NO: 2825

SEQ ID NO: 3325 - protein, 452 aa, unidentified
  REGION 1..452: note = Ga0315295_10005350
MSKQTLQREFQNVPTGAPLACSSTTLPLNRDERTSVVGIVLSCNNPEVGQRKQVSGLKVTVPVLSITGSPLMPCSLTKARHLLERRRAKIVSLNPFAIKLTFECENKTQEVSLGVDTGYKHIGFSAITKTKELVSGEIVLDDKTSKRLTERKMYRSNRRSRLRYRKPRFNNRKTPKGWLPPSVQRRLDTHINIINRLKELTPVKKMTVEIGAFDIQKLMDPEISGKEYQQGNLYGYNNLKAFLFSREHGKCQLCGKEIVKGEKAHLHHIKPRSETGTDRPSNIALLHEDCHDKLHKKGLYKKLKAPKQYKSETFMSIVADRLKKVLDCDVTYGYETAIKRNVLGIEKSHVNDALVIAGGTNQDRCLPYSVEQKRINNRVLQTNRKGFAPSIRKQRHKIQNRDFVWIGGRRCVCGGVACKGAMIYYFYGTEKKTIYYKKVSRFFSTGSLVWMN

SEQ ID NO: 3326 - protein, 469 aa, Desulfonema sp.; identical to SEQ ID NO: 3149

SEQ ID NO: 3327 - protein, 522 aa, Nocardiopsis sp.; identical to SEQ ID NO: 2662

SEQ ID NO: 3328 - protein, 430 aa, unidentified
MQIQANYVFLLNHDRTFLNMVHPARARELLTKQKAAVYRSYPFAIVLKQQILNPTLKPYRLKIDPGSKWTGFAIQCGEDIVFGMELKHRGLQISADLKQRASVRGSRRSRNLRYRAKRFNRKQPTGWLAPSLRHRVQTVETWIKRFMRYSPITEIEIEQVRFDTQLMQNPEISGVQYQAGELAGYEVKQYLLEKWEQKCSYCGATDTPLEVEHIQAKSKGGSNRVSNLALSCVPCNQKKGNRDIQDFLSGKPDLLQRILAQAKQPLKDAAAVNSTRFAIVRMAKELCDTVKCWTGGRTKFNRTQQGLEKSHSIDAACVGKSGRSIQLRTTQPLIVTCFGHGTRQEIRVNKHGFPAVKNTRVRYKHVKTGDTVKFTLDTDRKNSRAGTYTARVKKPTAKGFEVLINQFRIGVSTIKNVKFIHRQDGYSYRF

SEQ ID NO: 3329 - protein, 534 aa, Micromonospora sp.; identical to SEQ ID NO: 3092

SEQ ID NO: 3330 - protein, 470 aa, Blautia sp.; identical to SEQ ID NO: 2925

SEQ ID NO: 3331 - protein, 423 aa, Arthrospira sp.; identical to SEQ ID NO: 2900

SEQ ID NO: 3332 - protein, 396 aa, Massilia sp.; identical to SEQ ID NO: 3212

SEQ ID NO: 3333 - protein, 442 aa, Anaerostipes sp.
MVTVQQSTHHLPFGRVFIRRNLFMVYVISQDGKPLMPCSDPIARLLLKQGKAKVKKRDPFTIKLTYETTNYTQGLTLGVDTGSGTIGTAVSKDNGDIVYMSEVVVRNDITDKMTQRAKYRRNRRNRKTRYRKARWLNRASSIKKDRFSPTMQSKLHSHVREIEYIQSILPITEMVFETGQFDMQLMKNPSLANPKVRPWGYQKGANYGFENTKAMVLNRDNYTCQCCKGKHKDSKLEVHHIVFRSQGGSDEESNLLTLCHTCHKDLHSGKINPKLSGKVKGNLKYATQMNSIRKQLFRFYPNAIETFGYVTKANRLHLGVDKEHYYDACTIATQGNAFNVKSNLYKKKCVSDGDFQKTKGIRSEQPIVTDKICGFRKFDKVRYFGNDYFIKGRMSTGYAILMDIDGNKIDFSTMPRGYKTPKLSNCKRITARSTVMTQVKVV

SEQ ID NO: 3334 - protein, 443 aa, Caldicellulosiruptor sp.; identical to SEQ ID NO: 2385

SEQ ID NO: 3335 - protein, 420 aa, unidentified
MQYAYVLNKRGEPLMPCSPGEARLLLKQQKACVVKRTPFTIKLLFGSAGYKQPITLGVDADSKHVGLSASTEKRELYSEEFTPRSDVVELLSTRRQNRRSRRNRKTRYRAPRFNNRVHSKHKGWLAPSVEVKIQEHITVIKRICRILPVTLVRVETAEFDTQRLKAMLAGKPLPVGTDYQLGEMYDEYNVRQYVLKRDNYTCQCCGAHTTAKKTVKLHVHHLESRKVGGNAPSNLITLCTTCHNNLHKGKITLDGKKRGKTLRDAAFMGIMRNTLLTRLRNELNIPVQNTYGYITKLLREQNDIKKSHVNDARCISKHPLAKPCSVCYRTKAIRHHNRQIHKAKILKGGIRKANQAPYIVKGFRLWDKVLYNEQECFISGRRSSGYFALRKFDGTTITNSISFKKLRLLEPATNYLIERK

SEQ ID NO: 3336 - protein, 410 aa, Singulisphaera sp.
MLAFVLNHKGEPLMPCSPAKARHLLKQGKAKVIRRDPFTIKLLFGASGYRQEVVAGMDAGSKSIGAAAVANGKVVYQAEVQIRDDVSGKMKQRVMYRRNRRSRKTRYRPARWNNRAAMRADGRLAPSIRSKIESHLRERNFIASILPVTRWKVELASFDTHKITNLAVDGAGYQDGAQKGYYNIKAYVLHRDDYACQSGRKVKHSQKLNVHHVTFRSNGGTDTPSNLLTLCESCHDDLHAGKFVILAKKSKTKHATEIGIVKASLKKSGWSFEEMFGYETKYKREQCLGWPKSHAADAVAICCGDGEVVEPRPVTYRKRHVSKGDYQQTSGKRGEKRTPTGKLFGLRKFDLVESPKGVGFVKGKRSSGYFAIATLDGIAIHNSAKATACKRIAARSTTLTTRIHAAPSHA

SEQ ID NO: 3337 - protein, 519 aa, Nocardiopsis sp.; identical to SEQ ID NO: 3114

SEQ ID NO: 3338 - protein, 438 aa, Oscillatoria sp.
MSNFVFVLDTNKQPLEPVAPGQARRLLKLTQAAVYLRYPFTIILKYAVDHPKTQPAQLKIDPGSKTTGLAIVQGNQVIWGAELTHRGQQIKNDLESRRAIRRNRRNRKTRYRKPRFLNRTRAPGWLPPSLESRVKNIVTWVNRIRRYVPVTGISQELVLFDLLAMQNPEISGKEYQQGELAGYEVREYLLAKWGRKCAYCGVENVPFEVEHIHPKSKGGSDRVSNLTLACRGCNQAKGNQDIRDFLSKKPDILSRILKQASQPLKDANAVNSTRWALFQQLKQTGLAIEVSTGGKTKYNRSRLGLPKTHWLDAACVGNVEVLQVFTKQPLLIAAKGWGSRQMCTTNKYGFPVKHRTRCKTFFGFGTGDMVSAILLFGKFAGTHIGRLTVRESGVFEMRTPLGKVSPVRHKYCKSIHRNDGYMYAFSTNVRPMNQRLEA

SEQ ID NO: 3339 - protein, 515 aa, unidentified
MTALEEKLSKTEYIYVLGFDGKPQMPTRRKRHVLKLLKTGRARIAEDIPFTIRLTYRNAPVLQPVTLAEDPGRTNIGAAVLSPLGDLLFAAVIETRNKEIKKLMADRQKSRQASRRGERKARQRLAKRYGSMVKSGMVMRKLPMYAADKFVICKFIRNTQARFCNRKRCPDWITPTVQHLVQTHLNIIRKISRYLPVTDIAFEVNRFAFMHMENPEAMGVDFQNGPLKGYGDVKEAIRTQQHGKCLMCKKPITHFHHIVPRSRGGSDTIQNLAGLCTECHTKVHTDTAFRKDFDEKKSGQLKKYGALSALNQAVPFICKKLLEEYGEEHVHFCRGLDTSLIRTAFGFEKTKKNQMHEVDAYCIGLAALEVNEVETPAFDHTFQIRQFRRQDRSIIHHQTGRSYYQGKEKVAQNRKPGFEQKTTALSQWYKEQIRIHGEKEAEKLRSQLRVEKSCRHYNDMDRFLPGAVFLYEGKRYVLSGRITNGKYLRACGQGMKNFPAAECTFIRHNAGLVFI

SEQ ID NO: 3340 - protein, 431 aa, unidentified
MVYVLNKNGQPLMPTNRHGKVRRLLKINKAKVIKRCPFTIQLLYNTTNCIQNITLGVDAGSKHIGLSATTKDKVLFEADVELRNDITKLLEARRKFRHSRRNRKTRYRKRRFNNRVSSKHKGWLAPSIEHKIQTHFAMVEKVHKMLPITKIVVETASFDMKLLKAQLEGEPIPKGTDYQKGELTGWNIREYIFHRDNYTCQWCKGKSKDLILVTHHHAYWKGDHTNKPSSLITLCNTCNDSKYHKKEANRLWGWEPKITNSYKHAAFMNVMRWVFYNRLKEIYANVSMTYGYITKNTRIKNNLPKTHYLDARCISGNPKAKSSGEYFYYKKVRCHNRQLYKANTLKGGIRKRNQAEYTVKGFKLFDRVEYQNHEYFIFGRRASGFFDIRNLNGQKVNKGSVSFKKLKLKETNKTYLIERCTVDTRDDLAPL

SEQ ID NO: 3341 - protein, 425 aa, Nodularia sp.; identical to SEQ ID NO: 3165

SEQ ID NO: 3342 - protein, 456 aa, unidentified
  REGION 1..456: note = Ga0315294_10013537
MSKQTLQREFKNVPTGAPLTCNSTSTPLNRDERTSVASGILSCNNPEVGLRKRVSGRKVIVPVLSITGSPLMPCTPAKARHLLERRKAKVVSLNPFAIKLTFECENKTQEVSLGIDSGYKYIGFSAVTKTKELVSGEVELDDKTSKRLTERKMYRGHRRNRLRYRKPRFNNRKTPEEWLPPSVQRRFDTHVNMIAKLKELTPVKKVTVEIGAFDIQKLMDSEISGKGYQQGDLYGYNNLKAFLFYREQGKCQFCGKKIDKGEKAHLHHIKLRSETGTDRPSNMALLHEDCHDKLHKKGLYKKLKAPKEYKAETFMSIMAARLKKALNCDVTYGYETAIKRNLLGIEKSHVNDAFVIAGGTNQERCLPCRVEQKRINNRTLQTNRKGFAPSIRKQRHKIQNRDFIWIGDKKYLCGGIASKGAMIYYFDGIEKKTIYYKEVNKFYSTGSLAWINYVSL

SEQ ID NO: 3343 - protein, 413 aa, unidentified; identical to SEQ ID NO: 2600

SEQ ID NO: 3344 - protein, 512 aa, unidentified
MSTVYVLNKDGKPLMPTTRGGHVRYLLKEKKARVVTSKPFTIQLLYETDDVVQPLYLGIDPGRTNIGVAVVKADSTAVFTAHLETRNEEIPKLMQGRKKARRARRTNGRRCRRQRRAKANGTISKKCVKQTTAQNGSASKRAKEIGVIKRHLPGCEKDVLCIGIKNKEAKFSNRTRPEGWLTPTANQLLQTHINLIKKIRKFLPVNDVVLEINKFAFMQLDNPNIQKWQYQQGPLYQKASLEEAASEMQEHHCLFCKKSIAHYHHVVPQSENGSNTIGNIVGLCTKHHDFVHKDTAWQKKLAKKKTGLNKKYGALSVLNQIIPALTKELSSLFPKHFFATNGKSTHDYRIAHGVSKDHWLDAYCIACSVLPNDTCDRTINSRVPYELKQFRRHDRRALHKENMSRVYTLNGKSVATNRHKAAEQTTDSLEKFRQRQPNDVCKLKVKEHHPTYRNMNRNYPGSIFLIGKQVHVMQGIAGSKDGEATTYKDTNANSIAAGKCKFVAKNSGILFV

SEQ ID NO: 3345 - protein, 325 aa, unidentified
RKTRYRAPRFDNRIRTKRKGWLAPSVENRINAHLSRIEAVLRLLPVTKITVETASFDLQLLKNPDISGKEYQEGEQLGFWNIREYVLCRDGHVCQHCYGRSKDPVLNVHHLESRRTGGDSPGNLITLCEMCHKALHRGEITLKAKRGQSFRAEAFMGIMRWEVQNRLKASHPELEVNNTYGYRTKHARIANDIAKSHCADAFCIAGNLGAERLGEFFFQKQTRRNNRQIHKLSILKGGIRKRNQAPFEVNGFRLFDKVACKGEEGFIFGRRSSGFFDVRKLDGTRISAGISYKKLHLLEKRQTYLMEIRKEEAFPPLPEGRGLRA

SEQ ID NO: 3346 - protein, 432 aa, unidentified
MSCVFVVDANRTPLDPVHPGRARWLLKQKKAAILRRYPFTILLKTEHTDEPGQLLRLKIDPGSKTTGIAVVNDTTGQVVFAAEVHHRGQVIKKRLDDRRGVRRSRRQRKTRYRPARWANRRKKEGWLAPSIESRIHNVITWVNRIRRWCPIGAISQELVKFDLQKMEHPEITGREYQQGTLYGYELREYLLQKWQRRCSYCQQENVPLQVEHIVPRAKGGTNRASNVCLACDACNKAKGTQDLAVFLAKKPDLLKKIQAQAKAPLKDAAAVNATRWHLYQRLKATGLPIECGSGGLTKYNRTQRGLEKTHWLDSCCVGMSTPKLLGTTHVRPLFIQAMGHGSRQMCVTDATGFPKQHKARCKHSFGYQTGDIVKAIIPKGKYRGTYEGRIIIRHRPSFRLGTFDVHPQYLRCIHRADGFRYAQKGDGNSSHP

SEQ ID NO: 3347 - protein, 417 aa, unidentified
MPCSPAKARLLLKEKKAIVKRRTPFTIQLTIATGEAKQPITLGVDSGYKHIGLSATTEKAELYASEVELRQDITDLLSARLALRRSRRSRKTRYRAPRFNNRVASKRKGWLAPSVENRITAHMSRVEAVMRVLPVTAITVETAAFDTQLLKNPDIAGEAYQQGEQLGFWNVREYVLFRDGHVCQHCRGKSKDPILNVHHIESRRTGGDAPNNLITLCETCHKAFHRGEIELKVRRGKSFKAATFMGIMRWTLFERLKKAHPELSVRNTYGYLTKHKRISHGIAKSHCADAYCIADNLGAKRLEGFFFQKQTRKHNRQIHKLSILKGGLRKKNQAPYEVKGFRLFDKVICKGEEAFIFGRRTSGSFDVRRLDGTRISAGISYKKLRLLEPRTTYLTEFRKEAALPPLHKCRGFRAEFL

SEQ ID NO: 3348 - protein, 453 aa, Nostoc sp.
MSKVFVIDSEKAPLNPIHPAQARQLLRNKKAAIYRQFPFTLILVESFPDSPIGFSSFDSTGTAFAERLAEKTRTASPISPLRLKIDPGAKVTGIALVNDSTGEVVFAAELKHRGFTIRDALASRRQLRRSRRARKTRYRKPRFLNRTRPPGWLAPSLQSRVKNIKTWIEKLRRFAPITAISQELVRFDMQLMRNPDIQGSLYQQGTLAGYETREYLLEKWGRQCAYCGVKDVPLQIEHIYPRAKGGSNSITNLSLSCEKCNTKKGTKDIKEFLKTDPSRLEKILKQAKRPLADAAAVNTTRFALLNTLKTTGLPVETGSGGLTKFNRSQQNLEKSHWLDAAAVGVSTPILNIRGVKPLLITANGHGSRQSCRTDKHGFPSRYVPRFKFVKGFQTGDIVKAVVTTGKKVGQYVGRVAVRSSGSFNLSTKQGLVQGISYKYCKTVHKKDGYSYAS

SEQ ID NO: 3349 - protein, 441 aa, unidentified
MSVFVLNQRSQPLMPTSSRKARTLLKEKKAKVVTVKPFTIQLLTATGETKQDVTLGIDSGYLNIGFSAVIEKKELISGEVKLLQKMKERIAEKVQYRRIRRQRLRYRKARWNNRTKSKSEGWLAPSIQHKLNSHIRFIDKLKSILPITKTIIEVANFDIQAIKNPEISGVEYQQGEQVGFWNLREYILHRDNHKCKNPNCKNSDKEAILQLHHIIFQENGGADTANNLITLCTKCHTSPNHKIGKFLYDWQSKKPKIRGFKDATFMSIVRWRLVNQIDCKHTYGYITKNTRIKLKLEKTHYNDAFCISGGNTQQRAEPIIFTQTRRNNRSLEKFYDSKYIDIRTGEKVSGGELNCGRRTRNKNENSENLHQFRGEKISKGQRRIRKQRYFYQPNDLVKYDGQIYTVKGTQSKGASVVLKEIKKVHRVGLLSPYKFRKGIAC

SEQ ID NO: 3350 - protein, 423 aa, Arthrospira sp.
MSNHVFVLDTNRKPLTPCKPGVARSLLKAGKASVFRRYPFTIILNKEVDANPEPLELKLDPGSKVTGIALKQGNHIIFAAELQHRGQQIKEALLSRRQLRRSRRNRKTRYRPARFLNRTRSKGWLAPSLQHRVDTLMTWVHRFRRLAPVGCIAQELVRFDLQLMENPEISGVEYQQGELQGYEVREYLLFKWDRTCAYCGAQNVPLEVEQIQPRSKGGSDRVSNLTMACHSCNQAKGNGDIRDFLSGQPDVLSRLLRQAKSPLKDAAAVNSTRWALFKALKATGLPVTTGTGGQTKFNRLRLNLPKAHWLDAACVGPVESLEVLTSKPLLILAKGHGTRQMCGTNKYGFPNRHRSRRQIHKGFQTGDMVTATVTAGKKIGSYLGRVLCRASGSFDITTASVRVAGISHKYCQPIHRKDGYAYA

SEQ ID NO: 3351 - protein, 424 aa, unidentified
MRVFVFNMRGRPLMPCSQRKARLLLRENKAKIYKYHPFTIQLTYTTGETKQDCHIGIDTGSKYIGAAVRSEDKVFWKGEIELRQDIRSNLDTKRIYRRSRRNRKTRYRKPRFLNRKRRDEWLPPSLQSRINHTFHWIDTLSSLVPNPILHIEVGKFDVAKMINPEIHGVDYQHGQTYGFFDERYFVFARDNYTCQCCGKSKNKILNTHHIIYRSNGGTNRVDNLITVCTDCHTSQNHRKGGIFYQWQEQHKKVKQYKEPPFMNTLRKRIFVAYPDAEITYGSETTPKRKAMKLDKTHYNDAIVISGINEIKENPEEWLLIKQFRKKKRSLHEATARKGRKKPNRNQTRNSKNTPYYKGFYLNDKVSVFGKSGYITGFTSNAAYIKDENNDYITLPNKTYKQVSINKMKLECHNNNWQYIIKNAV

SEQ ID NO: 3352 - protein, 438 aa, Nocardiopsis sp.; identical to SEQ ID NO: 2664

SEQ ID NO: 3353 - protein, 421 aa, Ktedonobacter sp.; identical to SEQ ID NO: 2376

SEQ ID NO: 3354 - protein, 403 aa, unidentified
  VARIANT 17: note = X can be any naturally occurring amino acid
MLLSMFCSWRRILAAKXTPFVIQLTVPTGETKQPITLGVDAGYKHVGLSATTAKEELLASEVELRQDVTGLLSDRLALRRARRNRKTRYRAPCFDNRVRSKHKGWLAPSVENRIRIHLSRIEAVLRLLPVTSVTVETAAFDMQKIKNPEIEGEGYQQGEQLGFWNVREYVLFRDGHVCQACKGRSKDLILNVHHIESRKTGGDAPGNLITLCEACHKAYHAGKLKQFSPRRGASFRAETFMGIMRWTVLNRLRERHPELPVTNTYGYLTKHKRIVAGLPKTHCADAFCIAGVLDAKRRGEYLFQKQTRRHNRQIHKLTILKGGVRKRHQAPYLVHGFRLFDKVLCKEEVGFIFGRRSSGAFDVRRLDGTKISAGISYKKLSLLEKRKMFLTELRKEGRDSSRV

SEQ ID NO: 3355 - protein, 590 aa, Streptomyces sp.
VTSPSHRRRGGDLDGYVPCRCADPPVRASSAGCSGTYTCRHLREQRRNGVRGPACVRQGNRYGTWARGYPHAITFASGSHSALTSLGARAHAVGDDSITSKDHLMHDDEALDIPGLRERPPKPGPGAPRVLVLDRKGRPLMPCHPARARELFRKGRAVVARHTPFTIRIKDRVLEDSEVGGVAVRIDPGSKVTGIAVTDDIARTSANGEAAVLRRGLYAVELVHRGAAIKAGMEQRASHRRRRRVANTRYRAPRFDNRRRRRGWLPPSLQHRVDTTWAQVERLSRLAPLTTVHIERVAFDTHVMSAGRELTGVEYQQGALATYELRNYLLEKWGRRCAYCGKSGVPLQVEHIQPKSSGGTSRISNLTLSCAPCNQAKASRPVEDFLKGRPQLVAQLKKLAQAPLRDAAVMNATRWQLAERLEDLGHPVSCWSGGRTKYNRALFGLVKSHTLDALAVGEIGPGCRIVRYPSHVLVAAATGRGGYARTRTDRYGFPRLALPRTKNHHGFQTGDLVRAVVPNGKKTGVHQGRVAVRASGRFNIRTRRGLVQGIGHQRVRLLQRADGYGYSVRIEEQSRQSPAGAAGVHTGGVR

SEQ ID NO: 3356 - protein, 419 aa, Geobacillus sp.; identical to SEQ ID NO: 2623

SEQ ID NO: 3357 - protein, 397 aa, unidentified
MPCSAAKARILLKEKKAVVNRRTPFTIQLTIATGETKQPVSLGVDAGYKHIGLSASTEKAELYASEIELRQDVSELLAGRRALRHARRSRKTRYRAPRFDNRKREKGWLAPSVENRIGAHVSRVEAVLRILPVTKIIVETASFDVQRLKNPDIQGVEYQQGEQLGFWNVREYVLFRDGHECQHCHGKSKDKVLNVHHIESRRTGGDAPNNLITLCETCHKAFHRGEIELRVKRGRSFQAETFMGVMRWTFFERLRARHSEIEVRNTFGYLTKNTRITHGIEKTHCADAFCIAGNLKAKRLGYYFFQKQTRRHNRQIHKLTIKGGVRKRHQTPYEIKGFRLYDKVLYRGKVAFIFGRRSSGYFDIRTLDGERISASVSYKKLRLLEKRRTYLIELRRN

SEQ ID NO: 3358 - protein, 574 aa, Nocardiopsis sp.
VVRPQRTAISDPNLRAEVTGSPPEGGAFSPRGWRPAVTSTSQHQGGDSLATFHTGEKTHQAVLPQRPALESTSADHPGNRDETGRGGRARVAPGVEHVRGETTDGSPAAGGVTPGHPVREQAREGHPPREGTSPRQGHRCVFVLDAHGTPLQPTHPARARKLLAKGRAVVARHTPFVIRIKDRTTAESEVGGVEVGVDPGSRHTGLAVFTAQAGQRRGRYALRLHHRGDQITRRMRQRAAYRKGRRSRNLRYRSPRFDNRTRPDGWLPPSLRHRVDTTLAWVDRLARWAPVRAVHAERVAFDTHALSAGRSLEGVEYQHGTLHGYEVREYLLTKWGRSCAYCGAIDTPLNIDHIHPRSQGGSDRISNLVPACVPCNRAKGDQPVEEFVTTPRILAGIKGQAKIPLRDTAAVNATRWALWHALNKRLRAHAASGGRTKWNRTRNKLPKSHTLDALAVGKVDAITAAVSTVLVIGCSGRGTYTRTRTDRYGFPRSYLPRRKAFFGFRTGDLAQASIPSGKHAGSHTGRVAVRSSGSHTLQTPHGPVKTSWKNLRLLQRADGYGYTTQKEARVSSPV

SEQ ID NO: 3359 - protein, 512 aa, unidentified
MSAVYVLNKDGKPLMPTTRCGHVRHLLKEQKARVVASKPFTIQLLYKTNDVVQPLYLGIDPGRTNIGVAVVKADGTAVFTAHLETRNKEIPKLMKKRKDSRRARRTNGRRCRRQRRAKANGTISKKCVKHDTAQNGSVSKRAKEIGVIKRHLPGCEKDVLCIGIKNKEAKFSNRTRPEGWLTPTANQLLQTHINLVKKIRKFLPISDAVLEINKFAFMQLDNPNIQKWQYQQGPLYQKANLEEAVSEMQEHHCLFCKKPIAHYHHVVPQSENGSDTIGNIVGLCTKHHDLVHKDTAWQKKLAKKKTGLNKKYGALSVLNQIIPALTKELSSLFPKHFFATNGKSTYDYRSAHGVSKDHWLDAYCIACSVLPNDVCDSGINNRVPYELKQFRRHDRRALNNENMSRVYTLNDNVVATNRHKATKQTTDSLEEFRKNHPDDVCKLKVKEHHPTYRNMNRNYPGSVFLIGKQVHVMQGIAGSKDGEATTYKDTNTNSIAAGKCKFVAKNSGILFV

SEQ ID NO: 3360 - protein, 364 aa, Nocardiopsis sp.
LAGERRGRYATQLDHRGQTIRKKLAQRANYGRRRRSANLRYRPPRFDNRSRPRGWLAPSLRHRVETTASWAGRLARLAPVRVAHVERAAFDTHALSAGRPLEGAAYQQGTLRGFEVREYLLAKFGRTCVYCGATDTPLNIDHVHPRSRGGSDRVANLVLACIPCNQAKADRPVEEFVTDPKTLAMIRAQAKAPLRDAAAVNATRWALWRSLDERLPTRVGSGGRTKWNRTRNRLPKSHTLDALAVGKLDTITEAARTVLSVACTGRGSYARTTPDKHGFPRLRRSRSKQYFGFATGDLVRALVPVGKRKGSHSGRVLVRARGNFDITTAHGRQAGINHRYVRLLQRVDGYAYTLRKEMGVSSPA

SEQ ID NO: 3361 - protein, 442 aa, unidentified
MSTSVFVLDKKHRPLMPCRPARARRLLRAGRARVVKRFPFVIRLVDRTVEQSEVQPVLIKLDPGSRETGAAVVRDDGKKRHHALAFFVIEHRGGAIRDALKARSAFRRRRRSQNLRCRSPRFLNRVKPKGWLPPSLRHRVETTLSFVRRMCRYLPVSGIAAELVKFDSQKLQNPEVSGVKYQQGTLFEYEVREYLLEKFGRKCVYCGAEGVPLNIDHVVPRAKGGSNRVSNLVLACVSCNQKKGARSLEDFLKGKPEVLARVRRELKTPLRDAAAVNATRWVLFNELKATGLPVETGSGALTKFNRHAFGVEKEHWLDALCVGRLNGAVTRKGLNVLEIRCMGRGSRQRTRLTKYGFPRGYLMRQKCVHGFATGDMVEANVPKGKKAGLWRGRVAVRVSGSFNIQTPKGVIQGVGWKHCRLISHNDGYGYAWLGHAPHSSPA

SEQ ID NO: 3362 - protein, 477 aa, unidentified
VVDEKPSVNIDEENITWETRGPMRARRLLLSNVFVVDTNKKPLDPVHPGEARRLLSQGKAAVWRRFPFTIILKSEGRTSTIQPLRIKLDPGSKTTGIAIVNDASGEVVFAAELSHRGQAIKASLDDRRAVRRSRRQRKTRYRKARWANRKRKPGWMPPSLESRIANIVTWVSRFSRYAPIQAISQELVKFDMQLMENAEISGVHYQQGTLQGYEIREYLLEKWNRTCSYCGKKDIPLQIEHIHPRANGGTNRISNLCLACEKCNSAKDTRDIKDFLKKKPEVLKKILAQAKSPLKDAAVVNVTRWALHEHVKATGLPVECGSGGLTKFNRTTRTLPKTHWIDAANVGRSTPADLIIKGVKPLVIKATGNGRRKMCVTDAYGFPKQHKERKGFSMGYRTGDVVRAITPKGTYQGRIAIRHRPSFRLGKIDVHPKYMRRLHRVDGYEYVHERSASCSSPWVNRGVPASRDFKDGSQHGM

SEQ ID NO: 3363 - protein, 418 aa, Oscillatoria sp.
MVLNNLGVQECQSRMMRKCHVRFVGERDTATYALLPDLKVEVTAPQKPITLKLDPGSTTTGIALVQGEEVIFGAQLAHRGQSIKASLESRRSLRRGRRNRHTRYRKARFLNRTRSQGWLAPSLQHRVETILTWVTRLMKVAPISSIAQELVRFDLQQLENPEISGLEYQQGVLCGYEVREYLLNKWERKCAYCGVTDTPLQVEHIHPKAKGGSNRISNLCLACEKCNVKKGTQDIEQFLSKKPDVLKKILSQAKRPLKDAAVVNSTRWALFNRLGMTGLPVSTGSGGLTKFNRTRLQLPKSHWLDAACVGRVEELKVLTSQPLLIKAAGHGTRQMCGTDRFGFPIRHRSKKQIHLGFQTGDIVGATVTAGKKVGSYVGRILCRASGSFDIATMKGRVAGISHKYCKPIHKKDGYSYGF

SEQ ID NO: 3364 - protein, 431 aa, unidentified
MDAWDIIVVLNKRGKPLMPCSPAKARLLLKEKKAIVKRRTPFTIQLTIATGETKQPVSLGVDAGYKHVGLSASTEKAELYASEVELRQDITDLLSARRALRQSRRNRKTRYRAPRFDNRIRTKRKGWLAPSVENRINAHLSRIEAVLRLLPVTKITVETASFDTQLLKNPDIAGKEYQEGEQLGFWNVREYVLFRDGHVCQHCHGRSKDPVLNVHHLESRRTGGDSPGNLITLCETCHKALHRGDITLKAKRGKSFRAEAFMGIMRWEVHNRLRALHPGIEVSNTYGYRTKHARIANGIAKSHCADAFCIAGNLGAERLCEFFFQKQTRRNHRQIHKLSILKGGIRKRNQAPFEVKGFRLFDKVACQGEEGFIFGRRSSGFFDVRKLDGTRISAGISCKKLHLLEKRRTYLTEIRKEEALPPLPEGRGLRA

SEQ ID NO: 3365 - protein, 472 aa, Massilia sp.
MTVLVLDKKKRPLMPCTPKRARKLLAAGRARIHRLFPFCIRLVDRCLEQSTVQPLRLSIDPGSKATGMAIARIEAANAYGVVEPVIHILFLLELAHRGQAIRDSLHARSAMRHRRRSNLRYRAPRFSNRTRPRGWLPPSLRHRLDTTVSWVTRLRRLAPVTHLAQELVYFDTQLMQDPEISGVAYQQGTLAGSEVREYLLEKFHRTCTYCDATDVPLQVEHIHAKARGGSDRVSNLTLACIPCNRKKSAQDIRVFLGKDPVRLARILKQAKAPLHDAAAVNATRWVLFCALKKAGLPVETGTGGQTKWNRSRHGVIKTHALDAACVGVVGEVQGTKVPTLHVKCTGRGSRCKTRLDKYGFPRAYLTRKKTAFGFRTGDMVMATVLTGKHKGQYRGRVAVRMTGNFNIQLGIAGIPTVQGVAHRYCRVLQRADGYGYVWQPTNIFQIKAKATAASRSAPFLTALNGGVFRSTS

SEQ ID NO: 3366 - protein, 424 aa, unidentified
MVYVLSKEGTPLMPTNRHGRVRHLLDAGEAKAVKRCPFTIQLLYQSTTYTQEITLGVDAGSKTIGLSASTEKKELYASETRLRMDITDLLSVRRQFRRTRRNRKTRYRKARFNNRVHAKHKGWLAPGIEAKIGTHFRAVRDVCRILPVTEIIVETASFNLQKIKALEKGEPVPEGTDYQKGDQLGFWNVREYVLWRDGYKCRCCNGKSKDQVLNVHHIESRKTGGDAPNNLATLCGYCHKQYHKGTILLPKSVRRGNSFRDAAFMGIMRRTFYNRLKEQYPRVAMTYGYITKNTRIRNSLPKTHYADARCIAGHPQAAPLEVYYFQKKVRCHNRQIHKSNILKGGKKKRNQAEYLVKGYRLYDRVRYQNREYYVFGRRASGFFDIRTLGGNKGNKGSVSCKKLRFLEPRKTMLIERRMQEREAV

SEQ ID NO: 3367 - protein, 418 aa, unidentified
MSDVFVYVVNQNGKPLMPCTPAKARKLLRDQRATVLKRTPFTIKLLWDCEEHVQDITVGIDKGSHVTGFSCVGNGQVLLSGEIHHRLDVKEKMDGRRLHRRSRRNRLWYRPARFSNRGASKRSGRLPPSIKTNVEEIIRVIRRLPLPISDIVIEDVQVDIARINDPTLAGSRYQDPTRLDENVRMACLMRDGYQCQHCKKKQVRLEAHHIQFREHGGKDTLANVLTLCDDCHHQVHQGKIQIHVIGVGGHLDQIAQRTMQGKNHLYATLGARTPLSMLYGYQTATWRKAQDLPKEHDVDALCLATYATGELVPYQRERFFSIRFRPRQTRRQYLDVPQKGKGRVKYQVNEQLGGFHKGDIVRVKGRFVKQINSIYANGYLAFPRVKGEPATARPKDCCLLERGRTIIWERNPRQDRQT

SEQ ID NO: 3368 - protein, 431 aa, unidentified; identical to SEQ ID NO: 2952

SEQ ID NO: 3369 - protein, 414 aa, unidentified
MPCSPAKARLLLKEKKAIVKRRTPFTIQLTIATGETKQPVGLGVDAGYKHVGLSASTDKAELYASQVELRQDITDLLSARRALRRARRNRKTRYRAPRFNNRIRTKRKGWLAPSVENRINAHLSRIEAVLRLLPVTKITVETASFDMLLLKNPDIAGKEYQEGEQLGFWNVREYVLFRDGHVCQHCYGRSKDPVLNVHHLESRRTGGDSPGNLITLCETCHEALHRGEIALKTKRGHSFRAEAFMGMMRWEVLNRLKASHSELEVNNTYGYRTKHARIVNGIDKSHCADAFCIAGNLGAERLCEFFFQKQTRRNNRQIHKLSILKGGIRKRNQAPFEIKGFRLFDKVACKGEESFIFGRRSSGYFDVRKLDGTRISASISYKKLRLLEKRRTYLTEIRKEEALPPLPEGRGLRA

SEQ ID NO: 3370 - protein, 415 aa, unidentified
MSNFVFLIDANKTPLNPIHPSHASKLLDSGKAAVFRRYPFVLIMNRVVENIVTYPINLKIDPGSKFTGISLVNNKEEVIWGMELQHRGAVIKSELETRSWVRRSRRNRHTRYRKPRFLNRKRTINWLAPSLKHRVLTTNTWVKRLIKYAPITAITQELVRFDLQQLENPEISGIEYQQGELQGYEVREYLLEKWERKCSYCDAKDIPLQVEHIQPKAKGGSNRISNLCLSCEKCNQKKGTQDIEKFLAKKPELLKRIKSQSKRPLKDAVAVNSTRWDLFQTLKETGLPITTASGGRTKFNRRKLNLPKEHWIDAACVGVVKNLNILTTNIFKVKSTGLGTRRLCRINKFGFPCSQPRQKYEHKWNTGDIAYCKGVSGRVVVQSATRLEIRVDGKRIGGKLTDFKKLHSKDAYSYF

SEQ ID NO: 3371 - protein, 523 aa, Micromonospora sp.
LYTGQTTHSGVLPQPRTLESASVDTAPRSHETGRGRHPAAGVRHGRGETGGRRRHPEPAPAGTGAGREAHTHPVVFVLDRHHRPLQPTTPARARKLLTSGRAVVHRHTPFVIRLKDREVASSEVDGVEVGIDPGSRFTGIAVFLAETAGDNLVRTGLFGIEVRHRGNQIRDRLFARAALRRARRSRKLRYRAPRYANRRRPHGWLAPSLRHRVDNTMSWIERLRRWTPVKLLHVERVAFDTQLMQEPDISGVEYQHGTLHGYEVREYLLARRGRKCVYCGAVGVPLNIDHVVPRSRGGSDRVSNLTLACVPCNQAKGATPIDTFLADQPAVLARIRRQQKLPLRDTAAVSATRWALWRALVATGLSVQVATGGRTKWNRHRTDVPKSHTLDALHVGVLTTVRSYPGQVLVATATGRGRYARTRADRYGFPRLRLPRIKTVCGFQTGDLVRAVVPTGKNIGKREGRVAVRTSGRFAIRTGQTLIQSVHHRYVHLLQRADGWAYTREEERRFDPVVTDRVPTPHT

SEQ ID NO: 3372 - protein, 430 aa, Cylindrospermum sp.
MSKIFVIDTDRQPLNPIHPAQARQLLRNKKAAIFRRFPFTLILKESRTNSPSSPLRLKIDPGAKHTGIALVNDSTGEVVFAADLEHRGFAIRDSLTTRRQLRRSRRNRKTRYRQPRFMNRNRPQGWLAPSLQSRVENIKTWVNKLVKFAPIEAISQELVRFDMQLISNPDIQGKEYQQGTLAGYETREFLLEKWNRQCAYCGVKDVPLQIEHIHPRARGGSNSITNLTLSCEKCNRKKGTKDIKEFLQKDPSRLEKPIKQVKRPLSDAAAVNTTRLALLFVLKSTGLPVEIGSGGLTKFNRSQLKLEKSHWLDAACVGKSTPVLKVKGIKDLLIKANGHGTRQSCRTDKFGFPSRYVPRFKYVLGFQTGDIVKAIVTRGKKIGEYIGRIAVRTSGSFNISTQSCLVQGISYKACKHIHKKDGYEYGKSRI

SEQ ID NO: 3373 - protein, 412 aa, unidentified
MTQLVYVINQNGHPLMPCKPSKARKLLRDGRAKVKHRAPFTIQLRWDCEEQVQDVVVGIDKGSSTTGFACVGRGEILLSGEILHRKDVKEKLDARRAHRRSRRNRRWYRPCRILNRASSKRSGRLPPSIKTNVEEVIRVVRRLPLPITRIVIEDVQVDIARLNDPTVQGSRYQDPKRLDENLRIACLLRDCYQCQHCGKREVRLEAHHVQYRQHGGKDTLSNLLTLCESCHHGVHAGKITLEVSGVSGHLDHIAQRSMQGKTYLYTTLGSALPLSTLFGYQTATWRKQQELPKEHDSDALCIATYDTGELVPWQRERFYRIGFRPRQTRRQYHDLPRKGQGRVRYQLNTELEGFRKGDVVRVKGTWIKQINSIYSTGYLAFSRKKGEPANARPKDCVLLERGTTILWQRPQR

SEQ ID NO: 3374 - protein, 425 aa, unidentified; identical to SEQ ID NO: 2826

SEQ ID NO: 3375 - protein, 471 aa, Caldicellulosiruptor sp.
LVIFTVDKHGRPGHPTRRFDMVRKLVKQGRAKIIGGGASGKPPVVMFLDREFDYSKTIERRLFVVLDPGYHHIGFAVCELRWGVLIVYCIGVLETRIPEIKDLMTKRRGYRRNRRYHSRCRKKRMSKRHSRVLTKFKAPRNVRTKDRTNATLRHGIETHLNLYKKLLKFFPFPAEQVVFVMEDNIFDVRTMTWGKTYGTGYQKSPRVPAEKKCIICGTEDNLQKHHLIQRKCGGTDVQENLVYLCRDCHEDVHAGRVYIPVEGVRQWRALGTMNAIIGQLREIPWLKFVPASDAAQMRKKLGLKKGHANDALATAAVFCSCTEADRTHMIELILVKFRRHNRARIHAVRDRLYKVDGKIVAKNRRKRTDQKEPSFADISPLPPEIQRKLKVYPGTKILNPLRKEMPTIAGDVWIHEPTGKRFVTTGVVSQKYLYSPQLKKIVGKMYVQPEECRQVLHNEGMVVMYNSLYHS

SEQ ID NO: 3376 - protein, 292 aa, unidentified
LSRIEAVLRLLPVTKITVETASFDMQLLKNPDISGKEYQEGEQLGFWNVREYVLFRDGHVCQHCHGGSKDPVLNVHHLESRRTGGDSPGNLITLCETCHKALHRGEITLKAKRGQSFRAEAFMGIMRWEVLNRLKASHPELEVNNTYGYRTKHARISNGIAKSHCADAFCIAGNLGAKRLGEFFFQKQTRRNNRQIHKLSILKGGIRKRNQVPFEVNGFRLFDKVACKGEEGFIFGRRSSGFFDVRKLDGTRISAGISCKKLHLLEKRRTYLTEIRKEEALPALPEGRGLRA

SEQ ID NO: 3377 - protein, 425 aa, Nodularia sp.; identical to SEQ ID NO: 3165

SEQ ID NO: 3378 - protein, 396 aa, unidentified
VVRRTPFTIQLTIATGESKQPVSLGVDAGYKHVGLSASTDKAELYASQVELRQDITDLLSARRALRQSRRNRKTRYRAPRFDNRIRTKRKGWLAPSVENRINAHLSRIEAVLRLLPVTKITVETASFDMQRLKNPDISGKEYQEGEQLGFWNVREYVLFRDGHVCRHCHGRSKDPVLNVHHLESRRTGSDSPDNLITLCETCHKALHRGEITLKAKRGQSFRAQAFMGIMRREVLNRLKASYPELKVHETYGYLTKHARIANGIVKSHGADAFCIAGNLGAERLGEFFFQKQTRRNNRQIHKLSILKGGIRKRNQAPFEAKGFRLFDKVACQGEEGFIFGRRSSGSFDVRKLDGTRISAGISYKKLRLLEKRRTYLTEIRKEEALPPLPEGRGLRA

SEQ ID NO: 3379 - protein, 443 aa, Anoxybacillus sp.
MVEENMTCFMQRKGENPMVFVLDTNKRPLAPCHEAVARKLLKQGKAAIYRRFPFTIILKKSVDESEIKATYRLKIDYGSRHTGLAILRGQEVVWLGQLDHRTDIKERIDKRRAFRRVRRNRKTRYRKPRFLNRKRKEGWLPSSLESRVQNIQTWVNRLKKLCPIGYISYENAKFDTQLMRNPEINGVEYQQGTLQGYEVREYLLEKFGRKCCYCGKENVPLEVEHIIPKSRGGTDRVDNLCLACHDCNQRKGSKTAEEFGYPHIQKQVKESLKDASAINSTRWKAYEVLKQTGLDVECGTGARTKMNRIRLDLPKTHYFDACCVGESTTNHLYFKTKEVLFIKAKGRGSRSRTNLDRYGFPRGYLARQKFFFGFQTGDMVKAVVPRGKYQGVWFGEVACRKNGSFDMKDKDGKRIAQGISYKYFNIIQRFDGYTYRREGMNIA

SEQ ID NO: 3380 - protein, 451 aa, Burkholderia sp.
MSAFVLDRNGRPLMPCSEKRARHLLARGRARVHRVMPFVIRLVDRMADSCALQPLRIKLDPGSKVTGVALVREADSGIAVINLFELIHRGRQISEALTARRGFRRRRRGANLRYRAPRFLNREKPEGWLPPSLQHRVDTTMAWVQRIRRWAPVTALSSELVRFDLQQLENPEISGLEYQQGTLAGYEVREYLLEKWKRTCIYCDAKDRPLQIEHLTARARQGSNRVGNLGLACGDCNQDKGALDVRAYVKDSKRLARILATASRPLRDAAAVNTTRWALTDTLRATGLPLELASGGRTKFNRITHDLPKTHALDAVCVGRVDAINDWKRPSLSIKATGRGSYQRTRLTRRGFPRGYLMRQKQVQGFRTGDHVRADVPTGKRAGIHVGRVAVRATGSFNIQTASTVVQGINHRHCKLVQRGDGYAYSLQSTDSYQGDAGICGAAHAALSLPG

SEQ ID NO: 3381 - protein, 424 aa, Microcoleus sp.
MSNQIFVLDINRRPLTPCTPGIARSLLKAGKAAVFRQYPFTIILKKEVNATPEAITLKLDPGSKTTGIALVQGTVVLFGAELTHRGQTIKASLESRRVLRRGRRSRHTRYRQARFLNRTRPKGWLAPSLQHRVKTTLTWVNKLIKLAPINSIAQELVRFDLKQLENPEISGIEYQQGTLLGYEVREYLLEVWERKCAYCSIENVPLQIEHIHSKAKGGSNRISNLCLACDTCNKKKGTQDIKQFLAKKPDILKRIQAQRKRPLKDATAVNSTRWALLNRLKETGLPVTTGSGGQTKFNRTRLQLLKSHWLDAACVGKVEELKVLTAQPLLIKTAGHGTRQICGTNKFGFPIRHKSRKQIHFCFQTGDIVSATVTAGKKIGSYTGRVLCRASGSFDIVTTTGRVAGISHKYCRPIHKKDGYSYGF

SEQ ID NO: 3382 - protein, 545 aa, Actinoplanes sp.; identical to SEQ ID NO: 2907

SEQ ID NO: 3383 - protein, 420 aa, unidentified
MQYVYVLNKHGEPLMPCSPRKARLLLKQKKACVVKRTPFTIKLLYGSTGYKQPITLGVDAGSKHIGISAATEKYELYCEEATPRNDVVDLLSARRAFRRSRRNRKTRYRAPRFNNRVHSKHKGWLAPSVEVKIQEHITLIKRVCRILPVTFVRVETAEFDTQRLKAMLEGKPLPVGTDYQLGEMYDEYNVRQYVLKRDNYTCQCCGAHPAKIKAVKLHVHHIETRRTGGNAPNNLITLCTACHKALHAGKVTLDGKKRGRSLKDAAFMGVMRKTLMERLLKELKIPVQGTYGYITKYLREKHSIPKSHTNDARCISKNPLAIPCDTCYYTKAIRHHNRQLHKATILKGGIRKANQAPYTVKGYRLWDKVSYNGSECFITGRRTSGYFALKKLDGTVVSNSASYKKMRLLEVATNYITERR

SEQ ID NO: 3384 - protein, 406 aa, unidentified; identical to SEQ ID NO: 2752

SEQ ID NO: 3385 - protein, 456 aa, unidentified
MSTCVCVLSNSGERLMPTFRLGKVRRLLKDGKAKIVKHHPFTIQLLYDSKTNTQPIEICEDVGYNYIGISVKSKSHEYVSAQYDTLQDEKEHHDDCRKYRRTRRNRLRYRKPRFDNRKRSEGWLAPSLEHKKQLNIRLIERYVSVIPITRATVEVGSFDTMLLQAIQKGESKPEGVDYQKGPRYNLATLREAVFYRDNYTCQVCGRKIADGAILHMHHMFYWKGRHGYQLDELVTACEKCHTPANHQKGGKLFGFGEDKEFANLSGAAFMNAVRWQIVNALYATYGKEFVTITYGAMTKEKRIALQLEKTHSNDAYAMGNCHPAHRCVFRHYQKRRRNNRVLEKFYDATYIDARTGNKAKGKELFNGRINRNHKKDSENFHKYRSKKVSKGRRSIRRQRYAIQPYDTVRLEGKTYITSGCHNKGTRLLIPANGKNKSVAISKVQVVCHAGAWIQII

SEQ ID NO: 3386 - protein, 421 aa, unidentified
MNVVYVLSPDREPLMPCSCAIARLLLKDGKAKVVRRTPFTIKLYAQPEDAHMQPLTLGVDTGSATIGSAVSDECGNVLYLSEVEIRNDIAKTMKERATSRRNRRNRKTRYRLARWLNRKNSIKTGRFSPTMRSKIEAHLREIRFVKSLLPITSVVVETGTFDPHALKNPDVLQNKKLYQKGINYGYANTKAYVLTRDGYACQHCQGKSKDNRLEVHHIIFRREQGSDEETNLLTLCKTCHDGLHAGTITLRRTGKRKGNLLHATQMNSIRVQLFKCIEAEETFGFVTKEHRLLAGLPKEHVFDATMIATRGITPIFRTSMVLSKRCVADGDYQQTKGVRSEQRINTGKIRGFRKFDKVHYEGQDYFIKGRMSTGYAILMDVSGNKVDLKPIPKFDKMKRVSARSSWIMTHKTMASFSSSTT

SEQ ID NO: 3387 - protein, 334 aa, Desulfonema sp.
MPKMPECGWRCASEIRRDSEDTLSTSAVSQGKKNAVIRTVRQIPLPISAIRLEDAYFDFQAMENPDISGDRYQHGELFYHKNFKQAGLVRDKFRCRVCGSESSLQCHHIRSKAEGGTDKLSNLMTLCKDCHGRHHKKGLRLPKQKSSFYISAAHVQQGKHYLQAELSETAFLTRTFGYITSHYRNRAGIEKSHVNDAVIIADKKAVPVTHYIKSKHIQTRKRSLHEATARKGRKIPNRTQKRNCKNVSALKGFRRWDTVRYKGQTGFISGFTGTSSCYIVNVEGDYIRNPGKKYKQVSLGKVVRLHNNKSVVSQRADSSPTFAIAQEGDFSAES

SEQ ID NO: 3388 - protein, 463 aa, unidentified
LSRRDSSNILRHRRRARFFKKGYNMVFVLDKSKKPLDMISNAKARTLLKNKLAVVAKIYPFTIRLRDNSCVSKNRAYTVKLDPGSKTTGIAITDDKNSVVMLAELEHRGHVIKKKLDSRRAVRRSRRQRNTRYREARFLNRTKPEGWLAPSVRSRADNVINFIKKYKKFLNIDKVMIEQVSFDTAQMSSDSYLTGADYQQGNLYDKTLRDFIFSKTNGRCAYCGAKAEEIDHVVARSNGGTNSTYNLVASCRACNERKSNLTLKAFGKLMNKDYSHLEPKKLPKDAAIVQSARNYMKKEISKLVADTSTHDAWLTKYNRDELGLPKQHYYDALSVGNTQDYKFLTDKVLQISAQGRGSRQMCRMDKFGFPRTSPKGSKSVKGFQTGDIVKAVVPSGLKRGEYFGRVAVRSNGYFDIKTNKETAQGIGYKYCHIIQRCDGYSYNYKERDFLSAMNDRVSIAKTK

SEQ ID NO: 3389 - protein, 428 aa, unidentified
LKVFVLNMRGQPLMPCSPAKARHLLKAGKAVVRRRTPFTIQLRIATGETKQSVTLGVDAGAKHVGLSAATEKEEVFASEVELRQDITGLLAARLSLRRDRRHRKTRYRAPRFLNRVRSKHKGWLAPSVENRIQAHMSRIDAICGLLPVTKIVIETASFDIQKIKHPNVEGTDYQQGDQLGFWNVREYVLFRDGHVCQHCHGHSKDKILNVHHLESRQTGGDAPNNLITLCETCHKAYHAGKIKLKVKRGQSFRAEAFMGIMRWTLLDRVRKAHPGLPVENTYGYLTKNTRIAMGLPKAHCVDAYCIAGNLKAVRRGVHLYQRQVRKHNRQIHKCTVLSKTLKDGTKIGYRKLNQTPHLVKNFRLFDKVRCLGQTGFIFGRRSSGYFDVRRLDGVKLSSGISYRKLTLLEKRSTYLTELRKEDGASSPV

SEQ ID NO: 3390 - protein, 470 aa, unidentified
MSVFVVGLNGCRLMPVSERKARLLLKGGKASVYRKVPFTIKLNYKTGSTVQPGYLGIDTGSQHIGVSVVQKDGTVLHKEEIGLRDSMSKRKLLESRASSRRGRRYRKTRYRHPKWKPKTKRIYNEKADRKGRHWKKQKNTFTSKRQAGWLPPSLQSKTDHHIQWIRKLLHLLPEGYRLSIELGRFDPARMKDPGIHGELYQKGPQYDYENVRAYVLARDGYTCRVCKKKGGKLHVHHILYRSRGASDNPKYMAAVCSKCHTTENHLPGGILYQWMQDQKKFTRCLRDATFMNILKKRLRKAFPDAVFTYGNITKADREKLELPKSHGNDATAIALVKTEVKSVKDEEPVIHIQQVRRKKRSLHEETPRKGRKGPNRTASRSDKNTKSVTVTKGSGEKKASMTACLFDRVELDGKKGWITGFTGTSCYVKDKEDNYICTSPKYKQVSISRLRILHHCGNWAIGAEKPLGKG

SEQ ID NO: 3391 - protein, 451 aa, Burkholderia sp.; identical to SEQ ID NO: 3380

SEQ ID NO: 3392 - protein, 431 aa, Klebsiella sp.; identical to SEQ ID NO: 2435

SEQ ID NO: 3393 - protein, 423 aa, unidentified
MSNHVFVLDANRKPLTPCKPGVARSLLKAGKASVFRRYPFTLILKKEVDANPEPIEIKLDPGSQVTGIALKQGDRIIFGAELQHRSQQIKDALLSRRQLRRSRRNRKTRYRQARFLNRTRPNGWLAPSLQHRIDTTMTWVNRFRRLAPIAHISQELVRFDLQLMQNPEISGIEYQQGELPGYEVREYLLEKWNQKCAYCGAKNVALEVEHIHPKSKGGTDRVSNLTLACHSCNQSKGNQDIRDFLSGKPDLLSRILRQAKSPLKDAAAVNSTRWALLTALKQTGLPVATGTGGQTKFNRTRWELPKAHWLDAACVGKIESLEILTSKPLLIAAKGHGTRQMCGTDKYGFPTRHRSRVQIHKGFQTGDIVTATVMTGKKIGSYVGRVLCRASGSFDITTASGRVAGISHKYCKPIHRKDGYAYA

SEQ ID NO: 3394 - protein, 556 aa, Streptomyces sp.
MTTFPVGEQTHQAVLPQQPALESVGADNVGSSDETAHGHPAAKRDTGRGHGRGETDGPGATARRRHATSAVPAAQEAATGNGDVPTLDRDDRSYTGGIGAGRVFVLSREGHPLMPCHPARARELLHKGRARVVRQVPFVIRLKDRTRDESEVQGVQLRIDPGSKGTGLVLTDEKKESHDQGGAVITVRRGLVAIELQHRGDQIRAGLRQRAGYRRRRRRANLRYRSSRSANRARRAGWLPPSLRHRVETTFSLADRLCRWAPVTEIHVERAAFDTHSLSAGRFLHGTEYQHGPLTGTTVRAHLRARWNAGCAYCGMSGVPLNVEHLRPRSRGGSNRISNLVVACVPCNKAKGNMPVETFLALRPDRLATILSQAKVPLDDAAAMNATSQQLTHALAGLGRPVDGWNSRLTKTNRLATGLDKTHTLDALCVGPLDRAAGDRIVSFSRQVLTAKANGRGSYARTTPDKHGFPRLLRTRAKQHYGYVTGDLVRAVIPTGKWAGTWTGRVSVRARGQHSLTTPTGRINVSHRNLRLLQRGDGYGWGVRPEPSRSTSRKMG

SEQ ID NO: 3395 - protein, 413 aa, unidentified; identical to SEQ ID NO: 2636

SEQ ID NO: 3396 - protein, 421 aa, unidentified
MRGQPLMPCSPAKARHLLKAGKAVVKRRTPFTIQLRIATGETKQNVTLGVDAGAKHVGLSATTEKEEVFASEVELRQDITGLLAARLSLRRDRRHRKTRYRAPRFLNRVRSKHKGWLAPSVENRIQAHMSRIDAVCRLLPVTKIVIETASFDIQKIKDPSVEGTDYQQGDQLGFWNVREYVLFRDGHVCQHCHGRSKDKILNVHHLESRQTGGDAPNNLITLCETCHKAYHAGKIKLKVKRGQSFRAEAFMGIMRWTLLDRVRKAHPGLPVENTYGYLTKHTRITHGLPKTHCVDAYCIAGNLKAVRRGVYLHQRQMRKHNRQIHKFTVLSKRLEDGTKIGYRKLNQSPYLVHGFRLFDKVRCLGQIGFIFGRRSSGYFDVRRLDGVKLSPSISWRKLTLLEKRSTYLTELRKQDGASSPV

SEQ ID NO: 3397 - protein, 420 aa, unidentified; identical to SEQ ID NO: 3089

SEQ ID NO: 3398 - protein, 427 aa, Nostoc sp.
MSKVFVIDTEKRPLDPIHSAQARQLLRNGKAAVYRRFPFTIILKKSHSDLSVTPLRLKLDPGAKTTGIILVNDTTGEVIFAAELKHRGFAIRDALTYRRQLRSSRRSRKTRYRKPRFLNRIRPKGWLAPSLQSRVENIKTWVNKLRKIAQIEAISQELVRFDMQLMRNPDIQGKEYQQGTLTGYEIREYLLEKWSRQCAYCDAKDVPLQIEHIHPRAKGGSNSITNLTLSCEKCNTKKEIKDIKEFLKKDKTRLAKILAQTKKTLTDAAAVNTTRFALLEALKATGLTIETGSGGLTKFNRSQQNLEKTHWLDAACVGKSTPKLIIKGVKPLLIIANGHGTRQLCRTDKYGFPNRHCSRAKFHFGFQTGDIVKAVVKTGKKVGEYIGRIATRATGSFNISTKNGLVQGISHKYCSVIHKKDGYSYTQ

SEQ ID NO: 3399 - protein, 444 aa, unidentified
  source 1..444: note = uncultured cyanobacterium
MKVLVINKHGRPLMPTTPRKARIFLRSGRAKIVGRDPFTIQLLCGTSGYTQPITLGIDAGYAHIGYSAITEKEELIGGELELLPEISKRITDRKKYRQTRRNRLRHRIKRFDNRKHPDDWLAPSIQHKLDSHIKLVERLKARMPITKVIIETAKFDGQKLVKPDIKGKEYQQGEQLGYKNLTNYIRHRDGYQCQNPECKNKNPDRVLQVHHLGYWKNPPDRSNRPGNLITLCDKCHTSPNHNKGKLLHGWEPKVKPLKASTFMSTIYRRVRRDLGAEQAFGYVTDFTRHELGLEKSHHNDAFVIAGGTTQKRAEPLMLEQIRRHKRSMEQFYDAKYIDLRTGEKVSGSTLNSGRRTRNKNLNGENLRVYRGQKVSKGQRRIKKQRYPYNPNDYVMFEKKVYCVIGMQNLGTGVKIANYPGVANKVVNVNKVQPIKRRSGLCART

SEQ ID NO: 3400 - protein, 437 aa, Bacillus sp.
MFVYVINKHGEPLMPCSPRRARILLKQQKAKVVKLTPFTIQLLYGSSGYKQPISLGVDAGTKHVGLSATTEKQVLLEGEVQLRTDIQGLLATRSQFRRTRRSRITRYRQPRFLNRTRKVGWLAPSVQNKVDAHIKLVSLIQRILPVTNLTVEVAQFDTQLLKNPTIQGEEYQQGDQMGFWNTREYIFYRDGHTCQWCKGKKKDKILNVHHIESRKTGGDSPDNLLTLCESCHTELHQKGLEHLFQRKSKPLRDASQMTVMRWFIYNGLKNGYPDAQLTYGYMTKHTRISHGLAKEHCIDARCISGHPLAVPTDTTYLWKFVRKNNRQLHKANTLKGGKRKSNKAERFVKGFQLFDKVRYEGQSCFIFGRRSSGYFNLRLLDGTKIHASASYKKLKKMEYATTLLSEREVGQAIPLRLTSLKSGYPRPNIYEYSFNRT

SEQ ID NO: 3401 - protein, 431 aa, unidentified
MRVFVLDKNFKALDPCRPARARLLLKQGRAKVLRRYPFTIILSDLEVENCTTHDYHLKIDPGSKTTGVSYRQDNTVIWGAEITHRGFQIRDALTSRRQLRRSRRSRKTRYRKPRFLNRKRPSGWLAPSLMSRVHNILTWVKKLIRFCPIAGISQELVRFDTQKMENPEISGTEYQQGTLCGYEIREYLLEKWNRKCAYCGARDARLEVEHIKPKSNGGSDRVSNLAIACHYCNQAKGSQEIEQFLSGKPDVLKQVLSQAKRSLTDAAAVNATRWKLYNELKFTGLPVETGSGGQTKYNRRRFNLVKTHWIDAACVGNVQNIYVEDYQFLSIMAKGHGTRQICRTDKFGFPKRYCSRTKIHKGFQTGDIVKAIVTKGKKIGTYVGRVTTRKTGSFNILTSSGLIQGISYKYCTPIHKKDGYAYQINTLSSFS

SEQ ID NO: 3402 - protein, 464 aa, Ktedonobacter sp.; identical to SEQ ID NO: 2824

SEQ ID NO: 3403 - protein, 231 aa, unidentified
MPNKVYVINKHGRPLMPCSPAKARHLLDAGKAKVKKRTPFTIQLVYGSSGYTQEVILGVDAGSKTIGVSALTKKEELFAANVIPRNDVVDLLSTRREFRRARRNRKTRYRKPRFDNRVRSKHKGWLAPSVEVKIQEHITTIRRVYGILPVSKVVVETAEFDLQLLKAIADGKPVPQGEDYQKGEMYGHYNVRQYVLWRDNYTCQCCGAHATKKKEVRLHVHHLESRKVGGD

SEQ ID NO: 3404 - protein, 337 aa, Nodularia sp.
MSNFVLVLDTNKKPLTPIHPGDARFLLNQQKAAVFRRFPFTIILKEPKSEVPTQPIELKIDPGSKTTGFALVQNNKVIWGMELQHRGLAIKESLETRKGVRRGRRSRHTRYRQARFLNRTKPQGWLAPSLSHRVLTINTWVKRLCNFAPITDIVQELARFDLQQLENPEISGFEYQQGELQGYEVREYLLNKWNRKCAYCTAENVPLQVEHIKPKAKGGTNRISNLCLACEKCNIKKGTQDIEKFLAKKPELLKQILSQAKRPLKDASAVNSTRWALFNKLKETGLPITTGSGGLTKFNRTRLGLPKTHWIDAACVGKVETLKILTTKILTVKRHGA

SEQ ID NO: 3405 - protein, 448 aa, unidentified
MSTGLRAVQAEPAGIRKGDALKVFVLNMRGRPLMPCSPARARHLLKAGKAVVRRRTPFTIQLRIATGETKQSVTLGVDAGAKHVGLSAATEKEEVFASEVELRQDITGLLAARLLLRRERRQRKTRYRAPRFLNRVRSKHKGWLAPSVENRIQAHMSRIDAICGLLPVTKIVIETASFDIQKIKHPDVEGTDYQQGDQLGFWNVREYVLFRDGHVCQHCHGHAKDKILNVHHLESRQTGGDAPNNLITLCETCHKACHAGKIKLKVKRAQSFRAEAFMGIMRWTLLDRMRKAHSGLPVENTYGYLTKNTRITLGLPKTHCVDAYCIAGNLKAVRRGVYLHQRQVRKHNRQIHKCTVLSKTLKDGTKIGYRKLNQTPHLVKNFRLFDKVRCLGQTGFIFGRRSSGYFDVRRLDGVKLSSGISYRKLTLLEKRSTYLTELRKEDGASSPV

SEQ ID NO: 3406 - protein, 431 aa, Anabaena sp.; identical to SEQ ID NO: 2933

SEQ ID NO: 3407 - protein, 438 aa, Ktedonobacter sp.
MSRVLIVDAERKPLMPCTPARARLLLKAGKAAILRRFPFVLMLREARPEAVVEPLRVKLDPGAKTSGIAVLHEQSGEVMWAAELTHRSPQIREALAKRRAVRRSRRSRHTRYRAARFANRRRPKGWLAPSLESRVLHLLTWVKRLSRWCPVGALSLELVRFDLALLQNPSIEGIEYQRGTLWGTEVRQYLLTKWQHRCTYCQASEVPLEIDHVSPRSKDGSDRIANLVIACRPCNQAKGDHPLESFLANRPDVLTRVQAQRRAPLHDAAAVNSTRWQLYERLKALDLPVETGSGGLTKWNRQSRNLPKTHWIDAACTGRSTPERLQIRHVRPWLIQAQGRQARRMVNVDKRGFPRGKAKGPSCICGLRTGDLVRAVVTKGKKIGTYVGRVAIKSDGYLKLRGRPFGMVEGIHARYCRPVHRNDGYAYAQGEAALPPQA

SEQ ID NO: 3408 - protein, 477 aa, Desulfobacter sp.
MQQSRGESSANAKTEPSPASAENGVSRVFVLDKRGKPLMPCHPARARKLLAKDRARVHQQFPFTIRLIDRIREESDVQAVHVKIDPGANTTGMAVVRVEQNVKANHILHLSELTHRGYAVRKKMGQRANYRRRRRSNNLWYRKPRFDNRTRPKGWLPPSLRSRVDNVTSWVKKYQKICPVSGIVLERVRFDIQKLQNPEISGVEYQQGTLFGYEVREYLLERYGRKCVYCDGLSKDPVLEIEHFVPKNPAKGPNGTDRIKNLVIGCRTCNQAKNNYQPEQWAQVLGKSRKKIDKTRLCNVNRLFEGKRPSLAATAAVNATRNAIFFELRQLASVECSTGGRTKYNRCRFNIPKTHCLDAACTGKTNAISGWKQSVLLIKAMGRGSYQRTRVNAAGFPRGYLMRKKAVHGFVTGDIVKAEVSKGKKQGTYIGRVAVRKTGSFNIQTKIETVQGISWRYCQIISRQNGYNLAIQNSSPT

SEQ ID NO: 3409 - protein, 425 aa, Nodularia sp.
MSNFVLVLDTNKKPLTPIHPGDARFLLNQQKAAVFRRFPFTIILKEPKSEVPTQPIELKIDPGSKTTGFALVQNNKVIWGMELQHRGLAIKESLETRKGVRRGRRSRHTRYRQARFLNRTKPQGWLAPSLSHRVLTINTWVKRLCNFAPITDIVEELARFDLQQLENPEISGFEYQQGELQGYEVREYLLNKWNRKCAYCTAENVPLQVEHIKPKAKGGTNRISNLCLACEKCNIKKGTQDIEKFLAKKPELLKQILSQAKRPLKDASAVNSTRWALFNKLKETGLPITTGSGGLTKFNRTRLGLPKTHWIDAACVGKVETLKILTTKILTVKSTGHSCRRFCRINKFGFPCTEPKKIFTHVSTGDFVKATLHKDRKNITSGKYVSRVKTPTKNGCEIVINGFRVEFSTMKNITKVHCSDGYSYV

SEQ ID NO: 3410 - protein, 443 aa, Bacillus sp.
MVEENMTCFMQRKGENPMVFVLDTNKCPLAPCHEAVARKLLKQGKAAIYRRFPFTIILKKSVDESEIKATYRLKIDYGSRHTGLAILRGQEVVWLGQLDHRTDIKERIDKRRAFRRARRNRKTRYRKPRFLNRKRKEGWLPSSLESRVQNIQTWVNRLKKLCPIGYISYENAKFDTQLMRNPEINGVEYQQGTLQGYEVREYLLEKFGRKCCYCGKENVPLEVEHIIPKSRGGTDRVDNLCLACHDCNQRKGSKTAEEFGYPHIQKQVKESLKDASAINSTRWKAYEVLKQTGLDVECGTGARTKMNRIRLDLPKTHYFDACCVGESTTNHLYFKTKEVLFIKAKGRGSRSRTNLDRYGFPRGYLARQKFFFGFQTGDMVKAVVPRGKYQGVWFGEVACRKTGSFDIKGKDGKRIAQGINYRYVQVIQRFDGYAYGKGVAELA

SEQ ID NO: 3411 - protein, 427 aa, Tolypothrix sp.
VSKIFVVDQSKRPLDPVHPAQARQLLRNKKAAVYRGFPFTIIFKESYPDSAVTPLRLKLDPGAKTTGIALVNDTTGGVVFAAELKHRGFAIREALTSRRQLRRNRRARKSRYRQPRFLNRTRLKGLLAPSLQSRVENIKTWVGKLCKLAPIRAISQELVRFDMQLMRNPDIQGKEYQQGTLVGYETREFLLEKWDRQCAYCGVKDVPLQIEHIHPRAKGGSNSINNLALSCEKCNTKKGTKDIKDFLKKDPSKLEKILKQVKRPLSDAAAVNTTRFALLKVLKTTGLPVETGSGGLTKFNRSQQQLEKTHWIDAACVGKSTPSLNIKGIKPLLIAANGHGSRQSCRTDKFGFPNRHVPRKKIHFGFQTGDIVRAIVTTGKKIGNYVGKVAIRSSGSFNISAKTGLVQGISHKFCKRIHAKDGYSYGQ

SEQ ID NO: 3412 - protein, 428 aa, Desulfonema sp.; identical to SEQ ID NO: 2989

SEQ ID NO: 3413 - protein, 274 aa, Moorena sp.
MYPFTIILKTAVNNPTISPCQIKIDPGSKVTGFALVQNNQVIWGMELEHRGGLIKKKLESRRAVRRGRRNRNTRYRKPRFLNRRRPEGWLAPSLEHRVLTIETWVKRLIKFCPVDEIWIERVKFDTQKIQNPEINGVEYQQGELAGYEVREYLLEKWGRECTYCGKQNAPLQIEHIHPKSKGGSNRVSNLCLACEKCNQRKGDKPVEDFLKKKPNLLQKIKTKAKQPLKDAAAVNATRNKLVKVLRSVKPVVTGTGAQTKYNRTKLGLPKQHAY

SEQ ID NO: 3414 - protein, 417 aa, unidentified
MYVYVINKNGNPLMPCTPAKAKHLLKAGKAKVIKRIPFTIKLLWDCEENTQEVIAGMDTGSKTIGCACVSNGKVIYKSEIQVRQDVSKKMEQRRMYRRNRRGRKTRYRKVRWQNRASSRKEGRLAPSIKSKVDSHLREKRFVESILPISKWKIETASFDIHKISNPDVKRWDYQKGQQKGFYNVKAYVLHRDGFQCQKCKTKKGKLHVHHIVFRSKGGPDSPDNLIVFCSICHEKLHNGEFIIKGIKSKTKHATEIGIVKSQLKKRFGEFKECFGYETKFKREQILQLPKTHYNDAVAICCEEGEIVEPYNYVLYQKCVAKGDYQQYKGSRSEKKIPTGKLFGIKKFDYIQTNKGIGFVKGKRSSGYFSIMDIFGNVIHNSVNVKKDVERLQSRKSIIKEVVAIPPVPEGTGFLATT

SEQ ID NO: 3415 - protein, 406 aa, unidentified
MVYVQDIDGKPMMPTTRHGKVRRLLKANKATVVNLCPFTIQLTYKSTDHKQPVTLGIDAGAKHIGFSATTEKEELFACETTLRTDIVDLLSMRLQNRRTRRSRLRYRKSRFNNRGSSKKKGWVAPSVKQRIDSHLNEVNEIHKILPITKIVIEVAQFDTQKMKNHDISGADYQNGEQLGFWNVREYVLFRDGHKCSHCKGKSKDPVLNVHHLESRKTGGDSPSNLITLCESCHKAFHKGEIELKKKRGKSLRDAAVMGIMKWKLYEELKSRYDNVSMTFGYITKHNRIKYGIEKNHTSDAFVISRNFNAKRIEYQYLKRLVRRHNRQIHKMKILKGGKKKNNQAPFEVFGFRLFDKVLYNNEIFFVYGRRKSGNFNIRDFNGENPKDVSHKKFKLIRGKRHPIILK

SEQ ID NO: 3416 - protein, 280 aa, unidentified
LVKFDSQKLQNPEVSGVEYQQGTLFEYEVREYLLEKFGRKCVYCGAEGVPLNIDHVVPRAKGGSNRVSNLVLACMSCKQEKGARSLEDFLKGKPKVLARVRRELKTPLRDAAAVNATRWVLFNELKATGLPVETGSGALTKLNRHAFGVEKEHWLDALCVGRLNGVVTRKGLNVLEIRCMGRGSRQRTRLTKYGFPRGYLMRQKCVHGFATGDMVEANVPKGKKAGLWRGRVAVRVSGSFNIQTPKGVIQGVGWKHCRLISHNDGYGYAWLGHAPHSSPA

SEQ ID NO: 3417 - protein, 407 aa, unidentified
MVYVQDINGNPLMPTTRHGKVRRLLKNNKAVVVNLCPFTIRLTYETTNYKQEITLGVDTGTKHVGLSATTKSKELYSSEVILRSDIVDLLSTRREQRRTRRNRLRYRKPRFYNRVGANKSNWIAPSIQQRIDSHIKIVSDVYKILPVSKLIIEVAQFDTQKIKNPDITNIEYQQGDQLGFWNVREYVLTRDNHKCQHCKGKSKDKILNVHHIESRKTGGDSPSNLITLCETCHNEFHKGNIDLKVKREKSLRDAAVMGIMKWRLYEILKSTLPNVSMTFGYITKYNRIHNDIEKSHVSDAFVISKNFNAKRLNFSYKIKLVRRHNRQIHKMKIPKGGTKRPNQSPFEIFGFRLFDRVRFDSKFYFIYGRRKTGSFNIRDINGENKKDVIYKKLKLSRCKRFMIQIEM

SEQ ID NO: 3418 - protein, 426 aa, Ktedonobacter sp.
VFVIDSDYKPLNPVHPARARLLLTQGKAAVFRRYPFTIVLKRVVEQPEVQPLRLKLDPGSKTTGIALVNEGNGKIVFAAELEHRGHKIKGSLDDRRAVRRNRRNRKTRYRKPRYLNRRRKKGWLPPSLESRLANIQTWVARLCRYAPIAAISQELVKFDLQLIENPDITGIEYQQGTLQGYEIREFLLEKWERRCAYCGKQNVPLQVEHIHPRAHGGTNRISNLTLACEPCNTAKGTQDIAVFLTKKPDVLTRILAHVKKPLKDAAAVNATRFALFERLKAVGLPVECGSGGLTKYNRTMRGLPKNHWLDASCVGMNTPVTLSHKGIVPLRIAATGHGRRRMCVPDEFGFPKQHKARKKTFLGYQTGDMVKAITPKGTFEGRIAIRHRPSFRLGKVDIHPKYLRCVHRSDGYEYIQKGVRHAPPHV

SEQ ID NO: 3419 - protein, 433 aa, Geoalkalibacter sp.
VNRIFVLDNQKQPLSPCLPARARMLLREGKAAVYRRFPFTIILKNRTGGETQPVELKLDPGSKTTGIALIAEVKTGKVAVFAAELNHRGAAIKKVLLDRRMFRRNRRARKTRYRAPRFDNRTRRNGWLPPSIQSRVDNSLTWAKRLRRLCPITTVAVETARFDMQQMENPDISGVEYQQGTLAGYELREYLLEKWGRRCAYCGAENVPLEIEHVVPRSKGGSNRESNLTLACRDCNEKKGNGPIREFLATKPELLKKILAGLKRPLHDAAVVNAARYALGGALKSLGLPVSFWSGGRTKFNRTGQHYPKAHWIDAACVGETGAAVKLDPKLQPFSVVASGRGSRQMCRMDKYGFPRTGPKGARFVKGFRTGDLVKAVVPAGKKTGTHLGRVAVRSTGSFNVTTAAGTIQGISHKYCRRLHRADGYGYTNKPSA

SEQ ID NO: 3420 - protein, 443 aa, Caldicellulosiruptor sp.; identical to SEQ ID NO: 2385

SEQ ID NO: 3421 - protein, 434 aa, Anoxybacillus sp.
MVFVLDTNKCPLAPCHEAVARKLLKQGKAAIYKRFPFTIILKKSVDESENETTYRLKIDYGSRHTGLAILRGQEVVWLGQLDHRTDIKERIDKRRAFRRARRNRKTRYRKPRFLNRKRKEGWLPPSLESRVQNIQTWVSRLKKLCPIGHISYENAKFDTQLMRNPEISGIEYQQGTLQGYEVREYLLEKFGRKCCYCGKENVPLEVEHIIPKSRGGTDRIDNLCLACRDCNQRKGNQTAEEFGCPHIQKQVKESLKDTSIINATRWKVYEVLKQARLDVECGTGARTKMNRIRLGLPKTHYFDACCVGESTPNHLYFKTKEVLFINAKGRGSRSRTNLDRYGFPRGYLARQKFFFGFQTGDMVKAIVPRGKYKGVWFGEVACRKTGNFDIKGKDGKRIAQGISYKYIQVIQRFDGYTYRKEEAELAQGAIPPRA

SEQ ID NO: 3422 - protein, 515 aa, unidentified
MIPNERRHLMPYIYVIGMDGKPQMPTKRRRHVQKLLDTGKARITERVPFTIQLLYDNDPVLQPVILAEDPGRTNIGLAALDLKGNLLLSAAVETRNKEIAKLMEKRRQCRRASRNGERKARQRLAKKYGTMIRGGMRMRKLPQYAADAFITCKVIRNTQARFCNRRRPDGWLTPSARHLVQTHINLVHKVQKYLPVTDVVIEVNRFAFMQLEDPAICGVDFQTGPLKGYDDRDAAVYDLQDGKCLMCKHEITQYHHIVPRSRNGSNTIGNIAGLCDQCHDRVHKDADFAEQMKEKKEGMDKKYGALSVLNQAIPFICKQLETEFGRGHVHYCTGRETSLVRRSTGYQKTKKNQLHEVDAWCIGALALAEIPENVPDFKEVHLIQQFRRQNRSLVNAQTERVYKLGGKMVAKNRKKRTGQEIYALEDWYNRQVETYGKQEADCMRSRLKVTKSERRYNNPGRMMPGAVFLYEGVRYVMRGQHCNGAYLQAVGMGNRDFPARKCKILTRNTGLVFVS

SEQ ID NO: 3423 - protein, 371 aa, unidentified
MHVFVLDKDKNPLAPCHPAKARRLLKSGRASVFRRYPFTLILHEIEAKDCVVPETQLKASAPLASTSLSDESERSGGLKIDPGSQTTGLAILSENRIIWASELSYRGQQIKNDLEKRRKARRSRRHRKTRYRKPRCLNRTRPKGWLPPSLNASAPLASTSLASTSLASTSLASTSLASTSLASTSLASTSLASTSLSVESERSRGLNHRVETTMTWVNRLRKLLKETGLPVEVGTGGQTKFNRTRLGLPKTHGFDAACVGKSTPDRLDVAIEKPLLVAAKGHGVRQRCRPDKYGFPRTHAPKAKSFQGFQTGDIVKATIPQGKFAGNYTGRIAIRFRPSFRLNAGVKPFDVHPKYLTTVHQSDGYEYRFSK

SEQ ID NO: 3424 - protein, 442 aa, unidentified
MGEGLQPTERSRRQNLRVFVLNKRGQPLMPCSPAKARLLLKEKKAVVRHRTPFTIQLTQATGETVQPVTLGVDAGSKFIGLSASTEKAEHYASEAELRTEVVDLLSSRREMRRARRNRKTRYRAPRFDNRIHSKNKGWLAPSVENKINTHLSCVDNVRKCLPVTKIVVETAAFDIQKIKNPDIEGTDYQQGDQLGFWNVREYVLCRDGHQCCHCHGKSKDPILNVHHLESRKTGGNAPNNLITLCETCHKAYHDGKITLKQKRGQVFRDAAFMGIMRWTFFNRLKAQCPEIEVRNTYGYLTKNTRIRHGLEKSHHTDAFCIAGNLEAKRLGVYFFQKQTRKHNRQIHKMSILKGGVRKLQQAPYEVKGFRLFDKVRYDGREAFIFGRRSSGYFDIRLLTGEKVSAGVSYKKLVLLEKRKTFLTQLIKENAIPPATEVAGFLA

SEQ ID NO: 3425 - protein, 425 aa, Nodularia sp.; identical to SEQ ID NO: 3165

SEQ ID NO: 3426 - protein, 443 aa, Bacillus sp.
MVEENMTCFMQRKGEYPMVFVLDTNKCPLAPCHEAVARKLLKQGKAAIYKRYPFTIILKEIVDNFRPKTPYRLKIDHGSKHTGLAILRGQEVVWLGQLDHRTDIKERMDKRRAFRRARRNRKTRYRKPRFLNRRRKDGWLPPSLESRVQNIQTWVNRLKKLCPIGYISYENTKFDTQLMRNPEISGIEYQQGTLQGYEVREYLLEKFGRKCCYCGKENVPLEVEHIIPKSRGGTDRVDNLCLACHDCNQRKGSKTAEEFGYPHIQKQVKESLKDASAVNSTRWKVYEVLKQSGCEVECGTGARTKMNRIRLDLPKTHYFDACCVGESTPNHLYFKTKEVLFIRAKGRGSRSRTNLDRYGFPRGYLARQKFFFGFQTGDMVKAVIPRGKYQGVWFGEVSCRKTGSFDIKGKDGKRIAQGINYRYVQVIQRFDGYAYRKEEAELA

SEQ ID NO: 3427 - protein, 426 aa, unidentified
MVYVQDINGKPMMPTTRHGKVRRLLKDKKAVVVNLCPFTIKLTYVTSDYKQEIVLGVDAGTRHVGLSATTKSKELYSSEVILRNDIVDLLSTRRESRRTRRNRLRYRKPRFDNRVKNKRQGWVAPSVRHRIDAHIRVIDNVCSILPISRIVIEVAQFDTQKINNPEISGKEYQEGNKLGFWNVREYVLCRDGHKCQYCKGKSKDSILNVHHIESRKTGGNSPSNLITLCETCHKEYHKGNIDLKIKRGKSLRDAAVMGIMKWRLYEELKSKYDRVSMTFGYVTKYNRINHDIEKSHVSDAFVISKNFNAIRLGYYYKVKLVRRHNRQIHKQKIQKGGIKRLNQSPFEVFGFRLFDRVMFENSYYFIFGRRKTGSFDIRDIDGKRQKNITYKKLKLSRCKRFMIQMELNKKTRTCFENERNSDRDAA

SEQ ID NO: 3428 - protein, 425 aa, Nodularia sp.; identical to SEQ ID NO: 3113

SEQ ID NO: 3429 - protein, 428 aa, unidentified
MPCTPKRARLFLERKKAAVFRCYPFTIILKDREDGETQPLELKVDPGSKTTGIALVVHGKNKRKVVVGINLQHRGQSIKNRLLQRRGVRRSRRNRHTRHRESRFLNRHRRDGWLPPSLMSRVHNIETWAKRIQRLSPLSFCAVETVRFDMQKMQDPEMSGVEYQQGELLGYEVREYLLEKWGRKCAYCGKENVPIEVEHIQPKSKGGTNRISNLTLACRECNEKKRDQNVREFLKRKPGALERILRDAKAPLKDAAAVNATRLVCGNAVQSIGLPSTFWSGGRTKKNRISQGYPKDHWIDAACVGETGEKIHLTSLRAKSVKATGHGDRQLCLVDKHGFQRSKAMPIRVVNGFKTGDIVVAHVTTGKKIGIYRGKVAVRTSGFFNVSTENGVVQGISHRFCRKQHNADGYSYLCCRDGAGSGQLGVGM

SEQ ID NO: 3430 - protein, 198 aa, unidentified
DNHGTLCDDCHKKFHLGIIADVKLKTRRRQSTRDAAFMGIMRKTLMWRLRTELFIPVAETKGYITKATREKLLVLPKSHTRDALAIAQGRHGFSIKEYAYVEPANHIYTVRPVRHHNRQLHKASILKGGIRKRNQASKYVFGFRLYDKVLYQGKACFVWGRRTSGTFLLRTIDGIKVKDGVSYRNLTLLERSSNYLIA

SEQ ID NO: 3431 - protein, 443 aa, Actinomadura sp.
MGREVRIRQPAVFVLDKNGRPLQPTTPPRARKLLSSGRAVVARHTPFVIRLRDRTVRESRVDGVEIGIDPGSRHTGMAVFTSRRGERRARFGVRLDHRGSAIGKKLRQRAAYRRRRRTANLRHRAPRFDNRVRTDGWIAPSVRHRLETTVSWVDRLSRWAPVTAAHLERTAFDTHAMAAGRPLEGAEYQHGTLHGYEVREYLLAKFGRTCVYCDATGVPLNIDHVVPRSRAGSDRVSNLVPACIPCNRAKGDLPVEHFAPAKAASIKVRALAPLRDAAALNTARRALWKALDARMPVRASSGGRTKWNRTRHHLPKSHTLDALAVGELDSITEILTVFLAVGCTGRGTYARTRPDRHGFPRLRLPRRKDVFGFRTGDLARAVVPSGKNAGTHTGRIAVRSSGTFTVRSRGGLFTARHIRFRLLQRADGYAYTTGKEAGTAARP

SEQ ID NO: 3432 - protein, 337 aa, unidentified
  source 1..337: note = uncultured Candidatus Competibacteraceae bacterium
MNKVFVLSSTKEPIMPTRPARARQLLTRGRAAVYRMQPFTIILKDRETGDTQPVEVKVDPGSKATGIALVGHFEQQGAVVLWGANVNHRGQTMKNNLESRASLRRGRRGRKTRYRQARFLNRTRNAGWLPPSVESRVGNTESVINRLATRCPITEVSIEIVKFDMQAMVNPEISGTEYQQGTLAGYELREYLLEKWHRTCAYCGAKDVPLQIEHIQPKALGGSNRVSNLTLACKPCNQKKGSQPITVFLKTKPELIKKIQAQAKAPLKDAAAVNASRWALKNRLEKRWPVSCGTGGRTKFNRTKQGYEKDHWRDAACVGESGERVLIREGMKPLIIT

SEQ ID NO: 3433 - protein, 429 aa, Ktedonobacter sp.
LSNAFVIDSDYKPLNPVHPAQARRLLTQGKAAVYRRYPFTIVLKRVVEQPEVQPLRLKLDPGSKTTGIALVNDANGKVIFAAELEHRGHAVKDSLERRRTVRRSRRNRNTRYRKPRFQNRRRKKGWLPPSLESRLANILTWVARLCRYAPIAALSQELVKFDMQLIENPNIAGVEYQQGTLQGYEIREYLLEKWGRACAYCGAQNVPLQIEHIHPRANGGTKRISNLTLACEPCNTAKGTQDIRVFLAKKPEVLKRILAQVKKPLRDASAVNTTRLALLERLKRFGLTVECGSGGLTKYNRTTRRLAKTHWLDAACVGKSTPAGLSQKGIVPLHILATGQGKRQMCTTDKYGFPKQHKERKKKFLGYQTGDLIKAISPKGRFEGRIAIRHRPSFRLGNVDIHPKYIRCVQRADGYEYKQKGVRHAPPHV

SEQ ID NO: 3434 - protein, 424 aa, unidentified
MRVFVFNMRGRPLMPCSQRKARLLLRENKAMIYKYHPFTIQLTYTTGETKQDCHIGIDTGSKYIGAAVRSEDKVFWKGEIELRQDIRSNLDTKRIYRRSRRNRKTRYRKPRFLNRKRRDEWLPPSLQSRINHTFHWIDTLSSLVPNPILHIEVGKFDVAKMINPEIHGVDYQHGQTYGFFDERYFVFARDNYTCQCCGKSKNKILNTHHIIYRSNGGTNRVDNLITVCTDCHTSQNHRKGGIFYQWQEQHKKVKQYKEPPFMNTLRKRIFVAYPDAEITYGSETTPKRKAMKLDKTHYNDAIVISGINEIKENPEEWLLIKQFRKKKRSLHEATARKGRKKPNRNQTRNSKNTPYYKGFYLNDKVSVFGKSGYITGFTSNAAYIKDENNDYITLPNKTYKQVSINKMKLECHNNNWQYIIKNAV

SEQ ID NO: 3435 - protein, 537 aa, unidentified
MQYVYVVDKHGKALMPTTRYRHVHKLLKSGKAVAICNKPFTIRLKYESSTYTQDLWEGIDTGRQNIGDAVSNEKGKNVYLADVRTNNKSIKSNMQDRAGFRRERRRHDRQSKQRKAKHDGTEIQNGDDDTVRTKHSCKSIKISYPTADKPVIHKIIRGKEGKFANRKRPEGWITPSARQVIQITMNEIRQTARILPVNHINLERVSFDFQKLENQDIRRWEYGKGALYGYKTYKDYIWDEQHGKCACCGKPITQYHHIIHRAEGGIDSVKNIIGLCNGCHNKIHASKDAENKLKGLKEGVRQRYYVGLLNSVIPALIEEVSAYCDEHGIEFTVTDGKTTAEIREKYGLSKDHCTDAYAISLANRDVKSVSISDRIYEKRRFKKKSGNIIAKHNQRVYKFDGKIIAYNRHKATNQKDDSFEEYMTKYAETHTDKECRQHVAQIEIIPAKRTYTYHKQGLVAPCHAGDIVRYEKHNKIKGNTKKDTFVATSVEMNGEGHIKYGDACGSRKIKFCRPIDSGCLQAVHNYQADEYLRKIAE

SEQ ID NO: 3436 - protein, 394 aa, Arthrospira sp.
MSNHIFVLDTNRKPLTPCQPGVARFLLKAGKASVFRRYPFTIILNKEVDANPEPLELKLDPGSKVTGIALKQGNRIIFAAELQHRGQQIVEALRSRRQLRRSRRNRKTQYRPARFLNRTRPQGWLAPSLQHRVDTLMTWVNRFRRLAPVGRIVQELVRFDLQLMENPEISGVEYQQGALQGYEVREYLLEKWGRTCAYCGAKHVPLEVEHIQPRSKGGSDRVSNLTIACHSCNQAKGNGDIRDFLSGQPDVLSRLLRQAKSPLNDAAAVNSTRWALFKALKATGLRVTTGTAGQTKFNRLRLNLPKAHWLDAACVGDVESLDIVTSKPLLILAKGHGTRRMCGTNKYGFPTRHRSRKQIHKGFQTGDIVTATVTAGQENWLLCRTGSLPCLWQF

SEQ ID NO: 3437 - protein, 438 aa, unidentified
LAKVVVLMDAWDIIVVLNKRGKPLMPCSPAKARLLLKEKKAIVKRRTPFTIQLTIATGESKQPVTLGVDAGYKHVGLSASTEKAELYASEVELRQDITDQLSARLALRRSRRNRKTRYLAPRFDNRIRTKRKGWLAPSVENRINAHLSRIEAVLRLLPVTKITVETASFDMQLLKNPDIAGKEYQEGEQLGFWNVREYVLFRDGHVCHHCYGRSKDPVLNVHHLESRRTGGDSPGNLITLCETCHKALHRGEIKLKAKRGRSFRAETFMGIMRWGVLNRLKASHPKLEVHNTYGYRTKHARIANGIAKSHCADAFCIAGNFGAKRLGEFFFQKQTRRNNRQIHKLSILKGGIRKRNQAPFEVKGFRLFDKVACHGEEGFIFGRRSTGYFDVRKLDGTCISAGISYKKLHLLEKRRTYLTEIRKEEALPPLPEGRGLRA

SEQ ID NO: 3438 - protein, 483 aa, Streptomyces sp.
VRGETLSGALTTGRVTPDRPVREAGRKAQPAVFVLDKHGAPLQPTTPARARKLLKQGRAAVHRHTPFVIRMKDRTVTQSSVHGVELGIDPGSQYTGFAVFATTRTEAGATRRGLYAIELAHRGNQIRDKLARRAAYRRGRRTRNLRYRTPRFLNRRRPKGWLAPSLKHRLDTVLSWANRLARWAPISKVHIENTSFDTHALSVGRPLESTDYQKGSLYYCEAREYLSVKWGRACAYCGVRAVRLNIDHIHPRSRGGADRVSNLVLCCVPCNQAKSNRPVEEFLAHNPPALRRVLSQVKAPLRDAAAVNATRWAIQQTLATAFPVVCSASGGRTKWNRQRLGLPKTHTLDALCVGSLDELSQYPAVFLSVTATGRGTYARTSADKYGFPRLYRPRTKLVHGYATGDLAQAVVPSGKKAGTHVGRISVRTRGNFNIRTSQGLLQGIRHTYFHLLQRADGYGYTARPEGAPSSPPEAARTDQRRLR

SEQ ID NO: 3439 - protein, 431 aa, unidentified
MPNKVYVINKHGRPLMPCSPAKARHLLDAGKAKVKKRTPFTIQLVYGSSGYTQEVILGVDAGSKTIGMSVSTTKEELLSAEVKPRNDVVDLLSTRREFRRARRNRKTRYRKPRFDNRVRSKHRGWLAPSVEVKIQEHITSIKRVCRILPVSKVVVETAEFDLQLLKAIADGKPVPQGEDYQQGEMYGHYNVRQYVLWRDGYTCKCCGTHPSKKKEVRLHVHHLESRKVGGDAPDNQVTLCESCHEKLHKGLIAEKDFKKRKRKSTRDATFMGIMRKTLMQRLCSELPIPVIETRGYITKATREKLLVLPKSHTNDALAIAQGKQGFNVGYLPGIVQIDKICTIRPVRHHNRQLHKATILKGGIRKSNQTEKYVFGYRLFDKVQFNGQDCFIWGRRTTGIFTIKTINGKMIKDGISFKKLKLLEKSTSYLIA

SEQ ID NO: 3440 - protein, 529 aa, Burkholderia sp.
LEVAAADKPRVGTKRAATGELTLTLCCTTWSRGAAPQGARHQARKGNAPDVFRRHNKELGLAVCVLDRSGKALMPCSEKRARLLLARGRARVHRVVPFIIRLVDRRAHASRFQPLRIKVDPGSRTTGLALVRDTQLVDATSGEIQRGAAVLNLFELVHRGRQISEALSARRAMRRRRRGNLRYRAPRFLNRTRPAGWLAPSLEHRVATTMAWVNRLMDWTPVAALSSELVRFDMQALENPEIASVEYQQGTLAGYEVREYLLAKWGRRCAYCDQEHVPLQIEHILARASGGTNRISNLTLACACCNAKKAARPIEAFLARDPKRLAVILAQAKRPLKDAAAVNATRWALANALRATGLPVELASGGCTQFNRKQLGLPKTHALDAVCVGKVASVSVWYKPTLAVKCTGRGSYQRTRLDRYGFPRGYLTRSRRVHGFQTGDLVRAEVPTGKKAGRHTGRVAVRATGSFNIQVAGNVVQGIAHRHCRLIQRSDGYGYSRIALLKGDASDGTASLSALSLPAVNDGVSRAAG

SEQ ID NO: 3441 - protein, 414 aa, unidentified
MPCSPAKARLLLKEKKAIVVRRTPFTIQLTIATGESKQPVSLGVDAGYKHVGLSASTEKAELYASEVELRQDITDLLSARRALRQSRRNRKTRYRAPRFDNRIRTKRKGWLAPSVENRINAHLSRIETVIRLLPVTKISVETTSFDMQLLKNSDIAGKEYQESEQLGFWNVREYVLFRDGHVCQHCHGRSKDPVLNVHHLESRRTGGDSPGNLITLCETCHKELHRGEITLKAKRGQSFRAETFMGIMRWEVLDRLKASHPKLEVQNTYGYRTKHARIVNGIAKSHCADAFCIAGNLGAERLGEFLFQKQTRRNNRQIHKLSILKGGIRKRNQVPFEVKGFRLFDKVACKGEEGFIFGRRSSGYFDVRKLDGTRISAGISYKKLRLLEKRQTYLTEIRKEEALPPLPEGRGLRA

SEQ ID NO: 3442 - protein, 385 aa, unidentified
TIRLLYDSTHYTQDIVLGVDAGSKHIGLSATTETKELYASDVELRNDIVDLISTRRQNRRSRRNRKIRYRKARFQNRVSGKKNWLAPSIRQKVDTHMTVVSRVCMILPVTKIIVETASFDIQKIKDPDISGTGYQQGEQLDFWNVREYVLSRDGHTCQCCKGKSKDPVLNVHHIESRKTGGDAPNNLITLCETCHKSYHSGAVQLPKAIHRGMRFKDAAFMGIMRWAFYNKLKEVYEPQDIEIRMTFGYLTKNTRIRHHLPKEHYIDARCISGHPEAIPSNEVFYQKKVRCHNRQIHKNTILKGGIRKRNQTGYLVKGFRLFDKVAYKGREYFIFGRRQSGFFDLRNLSGCKVNKGSLSYRKIGFLEPRQYYLCERRVMDTQGCA

SEQ ID NO: 3443 - protein, 412 aa, unidentified
MTQLVYVINQNGHPLMPCKPSKARKLLRDGRANVKHRAPFTIQLRWDCEEQVQDVVVGIDKGSSTTGFACVGRGEILLSGEILHRKDVKEKLDARRAHRRSRRNRRWYRPCRILNRASSKRSGRLPPSIKTNVEEVIRVVRRLPLPITRIVIEDVQVDIARLNDPTVQGSRYQDSKRLDENLRIACLLRDRYQCQHCGKREVRLEAHHVQYRQHGGKDTLSNLLTLCESCHHGVHAGKITLEVSGVSGHLDHIAQRSMQGKTYLYTTLGSALPLSTLFGYQTATWRKQQELPKEHDSDALCIATYDTGELVPWQRERFYRIGFRPRQTRRQYHDLPRKGQGRVRYQLNTELEGFRKGDVVRVKGTWIKQINSIYSTGYLAFSRKKGEPANARPKDCVLLERGTTILWQRPQR

SEQ ID NO: 3444 - protein, 347 aa, Lactobacillus sp.
VKKLLDTRRSYRRGRRNRNTRYRSPCFLNRTKPSGWLPPSIASKIHHNINWIQRIQAVMPKAELHIEVGKFDMAKMKQPDITGLGYQQGDKYGYETTKQYVLDRDNYTCQICHGKTKDPELKIHHIIYRSNGGTNQVSNLLTVCATCHTQANHQPGGKLYALLAKKFQSYRSLKGATFMNILRRRLFKAFPEAKFQYGAQTTLDRAKLDLPKAHYNDAVTISGIQKIAQRPTAVVMFHQFRKKKCSLHEATARKGRKIPNIMSKRNAKNKKFSKGFYLNDYVQLPDGQKGNVSGFSGKIKCFVKAGDGYYLAISSKYKHINLSILKVIRHQNNWNVTEIEVKTHQMA

SEQ ID NO: 3445 - protein, 420 aa, unidentified
MQYVYVLNKHGEPLMPCSPGKARLLLKQQKACVVKRTPFTIKLLFGSAGYKQPITLGVDAGSKHVGLSASTEKRELYSEEFTPRNDVVELLSTRRQNRRSRRNRKTRYRAPRFNNRVHSKHKGWLAPSVEVKIQEHITVIKHICRILPTTLVRVETAEFDTQRLKAMLAGKPLPVGTDYQLGEMYDEYNVRQYVLKRDNYTCQCCGAHTTAKKTVKLHVHHLESRKVGGNAPSNLITLCTTCHNNLHKGKITLDGKKRGKTLRDAAFMGIMRNTLLTRLRNELNIPVQNTYGYITKLLREQNDIKKSHVNDARCISKHPLAKPCSVCYRTKAIRHHNRQIHKAKILKGGIRKANQAPYIVKGFRLWDKVLYNEQECFISGRRSSGYFALRKFDGTTITNSISFKKLRLLEPATNYLIERK

SEQ ID NO: 3446 - protein, 404 aa, Nodularia sp.
MHVFLLNQQKAAVFRRFPFTIILKEPKSEVPTQPIELKIDPGSKTTGFALVQNNKVIWGMELQHRGLAIKESLETRKGVRRGRRSRHTRYRQARFLNRTKPQGWLAPSLSHRVLTINTWVKRLCNFAPITDIVQELARFDLQQLENPEISGFEYQQGELQGYEVREYLLNKWNRKCAYCTAENVPLQVEHIKPKAKGGTNRISNLCLACEKCNIKKGTQDIEKFLAKKPELLKQILSQAKRPLKDASAVNSTRWALFNKLKETGLPITTGSGGLTKFNRTRLGLPKTHWIDAACVGKVETLKILTTKILTVKSTGHSCRRFCRINKFGFPCTEPKKIFTHVSTGDFVKATLHKDRKNITSGKYVSRVKTPTKNGCEIVINGFRVEFSTMKDITKVHCSDGYSYV

SEQ ID NO: 3447 - protein, 416 aa, unidentified
MTNCENYAFVLDAEGKQLSPTKEKKAWYLIRKKRAILVSKYPMVIQLNKIVSNDNICKDEIRCGIDDGGLHVGIALVQKCQTKNKTLFKGTIEQRNDVKHLMKVRWDYRRCRRYHKRYRPKRINNRSSSKRTDRIAPSILQKRQATLRVITQLNKWINITSYWLEDVAIDVRVLTDGFSSYGWQYQKSNRLDENIRKAVILRDGCRCMECGQSNCRLEVHHIKPRRLNGSNTLGNLITLCESCHQKTEGKEEQYMQHYFNILESSDNKNLNYASYVMIGKTWLRKQLSQLGVLNLTTGGNTANKRIDWNIEKSHSNDAVCIIDLQPDSCNVKDWIIKPMRRQSKAKTDNVLGIKHRDLVSYVYKNGELHTGYVTALYPELNALNFQSPTKHCKKVNVRKCRVLWKYNKIYWLDSVS

SEQ ID NO: 3448 - protein, 431 aa, unidentified
MPNKVYVINKHGRPLMPCSPAKARHLLDAGKAKVKKRTPFTIQLVYGSSGYPQEVILGVDAGSKTIGMSASTTKEELLSAEVKPRNDVVDLLSTRREFRRARRNRKTRYRKPRFDNRVRSKHKGWLAPSVEVKIQEHITAIRRVCGILPVSKVVVETAEFDLHLLKAIADGKPVPQGEDYQKGEMYGHYNVRQYVLWRDDYTCQCCGAHATKKKEVRLHVHHLESRKVGGDAPDNQVTLCESCHEKLHKGLIAEKDFKKRKRRSTRDATFMGIMRKTLMQRLCSELPIPVVKTRGYITKATREKLLVLPKSHTNDALAIAQGKRGFNVGYLPEIAQIDKIYTIRPVRHHNRQLHKATILKGGIRKSNQTGKYVFGYRLFDKVQFNGQDCFIWGRRTTGIFTIKTINGKMIKDGISFKKLKLVEKSTSYLIA

SEQ ID NO: 3449 - protein, 442 aa, unidentified; identical to SEQ ID NO: 3161

SEQ ID NO: 3450 - protein, 634 aa, Nocardiopsis sp.
MTRAPSRARSSLGGASSTFPMGTPASVRVPVPPLVPAPPSTTVIPVLSRYGWLVTPSETWFRGPSAKDNHLRPQPTSRGNAFPARRRGFRPPGRGPGVTSTSQHQGGDQLATFHTGEKTHQAVLPQRPALESASADIPRNGNETGRGSHVRVAPGVEHVRGETTGGSPTAGGVTPVPSGAGEQAREGRPPKTTPRKGHPYVFVLDRHGTPLQPTHPARARRLLAKGRAIVARHTPFVIRLKDRTTAESEVDGVETGIDPGSKRTGIAVFTDRHGERRGRYAIRLDHRGGQIAKRMRQRAAYRKGRRSRNLRYRTARFDNRTRPRGWLPPSLRHRVDTTLAWAGRLARWAPVRAVHVERVAFDVHALSAGRPVEGVEYQHGTLHGYEVREYLLAKWGRACAYCGATGAPLNIDHVRPRSRGGSDRVANLALACVPCNRAKADQPVEEFVTNPRALAGISAQTKAPLRDATAVNATRWALWRSLDGCLPTRVGSGGRTKWNRTRNHLPKSHTLDALAVGRVEAITTAVSTVLVVGAAGRGSYARTRADRHGFPRLRLPRRKRFFGFQTGDLARAAVPSGMNAGTHTGRVAVRSGGSHTLQTSYGPIKTSWKNLCLLQRADGYGYTTQKEAGAPSTA

SEQ ID NO: 3451 - protein, 353 aa, Arthrospira sp.
MPNYQNYVFVVDTLGQPLSPTHPAIARKLLKQGLAAVFRTYPFTIILKKTVENPGNEALRLKLDPGASVTGIALVNQSRDTVIWAAELTHRGDRIRAKLTARRVVRRHRRCRKTRYRQARFNNRKRQEGWLAPSLKHRVETTLTWVNRLISSRPITDISMELVRFDTQKLPNPEISGVEYQQGVLFGYELREYLLTKWQHQCAYCGGQNIPLEIEHIQPKSQGGFDRVSNLGIACHKCNQKKGSQPVEQFLLPKPEILKRCSVQAQAPLKNAAAVNSTRWALFNRLKPTGLPIEIGTGGLTKYNRTVQGLPKTHWLDAADCVGKSTHPPVENQNSPAITNYLFWARWPSKSGS

SEQ ID NO: 3452 - protein, 451 aa, unidentified; identical to SEQ ID NO: 3061

SEQ ID NO: 3453 - protein, 431 aa, unidentified
MEGLMSKTLVLDTNKRPLDPIHPAQARQLLRNKKAAVFRQFPFTIILKESRPDSPVSPLRLKIDPGAKFTGMALVNDSTGEVVFAAELKHRGFVIRDALTSRRQLRRSRRARKTRYRQPRFLNRTRPNGWLAPSLQSRVENIKTWVKKLRKFAPIEAISQELVRFDMQLMANPDIQGKEYQQGTLAGYETKEYLLEKWNRQCAYCGVKDVPFQVEHIHPRAKGGSNSITNLTLSCEKCNTKKGTKDIKDFLKKDPTRLQKILKQAKRPLADAAAVNATRWALFRVLKDTGLPVETGSGGLTKFNRSQQNLAKTHWINAACVGQSTPILTIKGIKPLLIAANGHGSRQSCRTDKFGFPSRYVPRFKFVKGFQTGDIVKAVVTAGKKVGEYFGRVAIRTSGTFNISTNSGLVQGISHKYCLATHKKDGYSYAN

SEQ ID NO: 3454 - protein, 451 aa, unidentified; identical to SEQ ID NO: 2390

SEQ ID NO: 3455 - protein, 464 aa, unidentified
MYVFVIGLDGTRLMPCKPRKARKLIEAHKAEIYKKQPFTIRLLYKTGCASQPITLGIDTGSQHIGIAVTSENKVLYQAEIELRSTMDKRSLMETRYSYRRSRRYRKTRYRSPKFRFHTKRTYSETLVKRKTTGIMTHWVKHTNSMSTNRPDGWLAPSMQSKVDHHIRWINRFLDVLPPDTKLRLEIARFDMARMKNPEVHNELYQHGPQYDYENLKAYVFNRDHYKCVVCKRKLGSKQPDGHSLKGMMHHITFRSKGATDNPDQLVTVCEYCHTPQAHKEGGVLWDLKEKHKSVQRGLRDATQMNIIRTRLVKAFPDAELTYGNITAADRKKMHLPKSHAGDAVAIAMKGEDVNICEPTVYIKQIRKKKRSLHEATPRKGRKRPNTQAVRNPKNTKSIGIYHIYDTVRFQNETGFISGFTGKSAYVQDFDGNYITMPGKSYKQINLSSLELVKHNNNWIQKTRN

SEQ ID NO: 3456 - protein, 448 aa, unidentified; identical to SEQ ID NO: 3040

SEQ ID NO: 3457 - protein, 419 aa, Ktedonobacter sp.
MESSIIYVLSISGQPLMPTTRHNKVWYWLRRGLARVVRREPFTIQLCFETSIHTQPVSVGVDTGSKTVGVAATTNGEVVYQAEVHLRTDISEKMTQRRIYRRNRRARKTRYRAARFANRRRQAGWLAPSLRSKAEATVKAVRLVASLLPVGKVNVEVGSFDTQKLQNPEITNLQYQQGELQGYLLREYVLEKWQRTCAYCGVRGVPLELEHIVPKSRWGSNRVSNLTLACRPCNERKGQKTAAEFGFPQIQAQARVPLKDAAHVSAIKTSVLQQLRSFFGATQVSVTYGYETKYKRIQVLGLPKSHTNDAVAIACEIGERVTPREEVYQIRCLPRGQYQRFNGHHSEHKCWAPRKVRGFKLSEVVKAKGMVGYIRGRREKGAFLIKEVSSGKKLIQVVPSKLERVARPTQGWMIMRKPT

SEQ ID NO: 3458 - protein, 451 aa, unidentified; identical to SEQ ID NO: 2424

SEQ ID NO: 3459 - protein, 420 aa, unidentified
MQYVYVLNKHGEPLMPCSPGKARILLKQQKACVVKRTPFTIKLLYGSAGYKQPITLGVDAGSKHVGLSASTEKRELYSEEFTPRNDVVELLSTRRQNRRSRRNRKTRYRAPRFNNRIHSKHKGWLAPSVEVKIQEHITVIKRICRILPITLVRVETAEFDTQRLKAMLSGKPLPVGTDYQLGEMYDEYNARQYVLRRDNYTCQRCGAHTTKKKTVKLHVHHLESRKTGGNAPSNLITLCVDCHKAFHAGKVKLDGKKRGKSLKDAAFMGAMRNTLLTRLRNELNIPVQNTYGYITKLLREQNDIKKSHINDARCISKHPLAEPCSVCYRTKAIRHHNRQTHKANFSKGGIRKRSQMPYVVEGYRLWDKVLYKGQECFVSGRRASGSFTLKKLDGTRISKGVTFKKLRLLEPATNYLIERM

SEQ ID NO: 3460 - protein, 444 aa, unidentified
MHIFVLDKDKKPLAPCHPAKARRLLKSGRASVFRPYPFTLILHEIEAKDCVVPETQLKIDPGSQTTGLAILSENRVIWASELSHRGQQIKNDLEKRRALRRSRRHRKTRYRKPRFLNRTRPKGWLPPSLNHRVETTMTWVNRLRKLCPIVSIAQELVRFDTQKLQNPEVSGIEYQQGELLGYEVREFLLEKWDRKCASLGARSLAPCDGAGSHRYCGAENLPLEVEHIHPKSQGGSDRVSNLTLACHTCNQAKGNRDIREFLSGKPTVLNRILKQAKAPLKDAAAVNATRWKLYQQLKETGLPVEVGTGGQTKFNRTRLGWPKTHWLDAACVGKSTPDRLDVAIEKPLLVAAKGHGVRQRCRSDKYGFPRTHAPKAKSFQGFQTGDIVKATIPQGKFAGNYTGRIAIRFRPSFRLNAGVKPFDVHPKYLTTVQKSDGYEYRFSK

SEQ ID NO: 3461 - protein, 529 aa, Burkholderia sp.; identical to SEQ ID NO: 3440

SEQ ID NO: 3462 - protein, 508 aa, unidentified
MQTKGKGSKVLVATRKSRSRLLTFPRGDWSQGQRNKSRKGERFEMAVFVLDRSGRPLMPCTEKRARLLLERGRACVHLVMPFTIRIVDLKAENCAFQALRVKLDPGSKATGIALVRETEGKGVAVVNLFELVHRGRQISEALTARRGHRRLRRSKLRYRPPRFDNRGNKQRGWLAPSLQHRVDTSMAWVSRIQRLAPVSAISTELVRFDMQAMENPEIEGAQYQQGTLAGYEVREYLLEKWDRTCAYCGAKDVPLQVEHIQPKAKGGSNRISNLALACQCCNQKKAALPVEMFLAKKPELLKRILAQAKRPLKDAAAVNSTRWALVNALKATGLPVETASGGQTKFNRNQLGIPKTHALDAVCVGNINTVTDWQKPTLSIKAMGRGSYQRTRLDKFGCVRGYMTRSKSIHGFQTGDMVKAIVLKGKKIGTYMGRVAVRASGSFNIQTGNGLVQGVSYRCCTVVQRGDGYGYSQVAKMDVTGTPPQHRDASHPALYLPGLKAGVSRANS

SEQ ID NO: 3463 - protein, 334 aa, Desulfonema sp.; identical to SEQ ID NO: 3387

SEQ ID NO: 3464 - protein, 233 aa, unidentified
VWLYQAVYNLGEGFLPSSEERTAFYWLLIYRKEHGIMQYVYVLNKHGEPLMPCSPGKARLLLKQQKACVVKRTPFTIKLLYGSAGYKQPITLGVDAGSKHVGLSASTEKRELYREEFTPRNDVADLLSTRRQNRRSRRNRKTRYRAPRFDNRVHSKHKGWLAPSVEVKIQEHITVIKRICRILPITLVRVETAEFDTQRLKAMLKEKPLPVGTDYQLGEMYDEYNVRQYVLKT

SEQ ID NO: 3465 - protein, 422 aa, unidentified
LNKRGKPLMPCSPAKARLLLKEKKAIVKRRTPFTIQLTIATGETKQPVSLGVDAGYKHVGLSASTEKAELYASEVELRQDITDLLSARRALRQSRRNRKTRYRAPRFDNRIRTKRKGWLAPSVENRINAHLSRIEAVLRLLPVTKITVETASFDLQLLKNPDISGKEYQEGEQLGFWNIREYVLCRDGHVCQHCYGRSKDPVLNVHHLESRRTGGDSPGNLITLCETCHKALHRGEITLKAKRGQSFRAEAFMGIMRWEVHNRLRALHPGIEVSNTYGYRTKHARIANGIAKSHCADAFCIAGNLGAERLCEFFFQKQTRRNNRQIHKLSILKGGIRKRNQAPFEVKGFRLFDKVACQGEEGFIFGRRSSGFFDVRKLDGTRISAGISCKKLHLLEKRRTYLTEIRKEEALPPLPEGRGLRA

SEQ ID NO: 3466 - protein, 429 aa, unidentified
LKDGKAKIVKHHPFTIQLLYDSKTNTQPIEICEDVGYNYIGISVKSKSHEYVSAQYDTLQDEKEHHDDCRKYRRTRRNRLRYRKPRFDNRKRSEGWLAPSLEHKKQLNIRLIERYVSVIPITHATVEVGSFDTMLLQAIQKGESKPEGVDYQKGPRYNLATLREAVFYRDNYTCQVCGRKIADGAILHMHHMFYWKGRHGYQLDELVTACEKCHTPANHQKGGKLFGFGEDKEFANLSGAAFMNAVRWQIVNALYATYGKEFVTITYGAMTKEKRIILGIEKTHSNDAYAMGDYHPAHRCVFRHYQKRRRNNRVLEKFYDATYIDARTGNKAKGKELFNGRINRNHKKDSENFHKYRSKKVSKGRRSIRRQRYAIQPYDTVRLEGKTYITSGCHNKGTRLLIPANGKSKSVAISKVQVVCHAGAWIQII

SEQ ID NO: 3467 - protein, 425 aa, Nodularia sp.; identical to SEQ ID NO: 3165

SEQ ID NO: 3468 - protein, 431 aa, unidentified
MPNKVYVINKHGRPLMPCSPAKARHLLDAGKAKVKKRTPFTIQLVYGSSGYTQEVILGVDAGSKTIGVSALTKKEELFAANVIPRNDVVDLLSTRREFRRARRNCKTRYRKPRFDNRVRSKHKGWLAPSVEVKIQEHITAIRRVCGILPVSKVVVETAEFDLQLLKAIADGKPVPQGEDYQKGEMYGHYNVRQYVLWRDDYTCQCCGAHATKKKEVRLHVHHLESRKVGGDAPDNQVTLCESCHEKLHKGLIAEKDFKKRKRRSTRDATFMGIMRKTLMQRLYSELPIPVIETRGYITKATREKLLVLPKSHTNDALAIAQGKRGFNVGYLPEIAQIDKIYTIRPVRHHNRQLHKAAILKGGIRKSNQAGKYVFGYRLFDKVQFNGQDCFIWGRRTTGIFTIKTINGKMIKDGISFKKLKPVEKSTSYLIA

SEQ ID NO: 3469 - protein, 423 aa, Arthrospira sp.
MSNHVFVLDTNRRPLTPCQPGVARSLLKAGKASVFRRYPFTIILNKEVHGNPEPIELKLDPGSKVTGIALKQGNRIIFAAELQHRGQQIVEALRSRRQLRRSRRNRKTQYRPARFLNRTRPQGWLAPSLQHRVDTLMTWVNRFRRLAPVGRIVQELVRFDLQLMENPEISGVEYQQGALQGYEVREYLLEKWGRTCAYCGAKHVPLEVEHIQPRSKGGSDRVSNLTIACHSCNQAKGNGDIRDFLSGQPDVLSRLLRQAKSPLNDAAAVNSTRWALFNALKATGVPVTTGTGGQTKFNRLRLNLPKAHWLDAACVGDVESLDIVTSKPLLILAKGHGTRRMCGTNKYGFPTRHRSRKQIHNGFQTGDIVTATVTAGKKIGSYVGRVLCRASGSFDMTTASGRVTGINHKYCQPIHRKDGYAYA

SEQ ID NO: 3470 - protein, 477 aa, unidentified
MIIALDKYKRPLGFLTERRCRILMERKRAVLYRVFPTVVILMDVDARTIPDLPSFRIKIDPGSKYTGIAIIRNDTDEFVYAMQIEHRGDAVRAALNKRKNARRNRRSRETGYRRAKWGNRCLSEKDKRSYDSSREDGWLPPSIRSAADNVISWVRRLGRWINLTECSFEAVRFDTQLMEDPDIEGEEYQHGTLFGLEIKEYLMEKFGHTCQYCGGKSGDPVLEWEHMRPKSRGGSDRVKNALLSCSSCNKDKGNRTPEEWLELIKARLPREKGKRKELDEERVELIQKVIDGKPQGSALRYAAWVSSSRRYLEKALFGIFGDVECSSGGRTKYNRTELGYPKEHHYDALCVGTVPEKGYHDRTNGYYLYAKAAGRGTRLRGHLNKCGVIATKWTDRKKGFFGFQTGDIVVAEVPHKTPKPYKYEGRFVGRVMVRATGSFDIKTTDGKLVTVKEQYCRLLQANSGYHYTMKRAIPLGH

SEQ ID NO: 3471 - protein, 442 aa, unidentified
MSTTVFVLDKKHRPLMPCRPARARRLLRAGRARVVKRFPFVIRLVDRTVEQSEVQPVLIKLDPGSRETGAAVVRDDEKKRHHALAFFVIKHRGGAIRDALKARSAFRRRRRSQNFRCRSPRFLNRVKPKGWLPPSLRHRVETTLSFVRRMCRYLPVSGIATELVKFDSQKLQNPEVSGVEYQQGTLFEYEVREYLLEKFGRKCVYCGAEGVPLNIDHVVPRAKGGSNRVSNLVLACVSCNQKKGARSLEDFLKGKPKVLARVRRELKTPLRDAAAVNATRWVLFNELKATGLPVETGSGALTKLNRHAFGVEKEHWLDALCVGRLNGVVTRKGLNVLEIRCMGRGSRQRTRLTKYGFPRGYLMRQKCVHGFATGDMVETNVPKGKKAGLWRGRVAVRVSGSFNIQTPKGVIQGVGWKHCRLISHNDGYGYAWLGHAPHSSPA

SEQ ID NO: 3472 - protein, 421 aa, unidentified
MRGQPLMPCSPAKARHLLKAGKAVVRRRTPFTIQLRIATGETKQSVTLGVDAGAKHVGLSATMEKEEVFASEVELRQDITGLLAARLSLRRERRHRKTRYRAPRFLNRVRSKHKGWLAPSVENRIQAHMSRIDAVCKLLPVTKIVIETASFDIQKIRNPTVEGTDYQQGDLLGFWNVREYVLFRDGHVCQHCHGHSRDKILNVHHLESRQTGGDAPNNLITLCETCHKAYHAGKIKLKVKRAQSFRAEAFMGIMRWTLLDRVRKAHPGLPVENTYGYLTKNTRITLGLPKTHCVDAYCIAGNLKAVRRGVYLYQRQVRKHNRQIHKCTVLSKTLKDGTKIGYRKLNQTPHLVKNFRLFDKVRCLGQTGFIFGRRSSGCFDVRRLDGVKLSSGISYRKLTLLEKRSTYLTELRNEDGASFPV

SEQ ID NO: 3473 - protein, 401 aa, Nodularia sp.
FLLNQQKAAVFRRFPFTIILKEPKSEVPTQPIELKIDPGSKTTGFALVQNNKVIWGMELQHRGLAIKESLETRKGVRRGRRSRHTRYRQARFLNRTKPQGWLAPSLSHRVLTINTWVKRLCNFAPITDIVEELARFDLQQLENPEISGFEYQQGELQGYEVREYLLNKWNRKCAYCTAENVPLQVEHIKPKAKGGTNRISNLCLACEKCNIKKGTQDIEKFLAKKPELLKQILSQAKRPLKDASAVNSTRWALFNKLKETGLPITTGSGGLTKFNRTRLGLPKTHWIDAACVGKVETLKILTTKILTVKSTGHSCRRFCRINKFGFPCTEPKKIFTHVSTGDFVKATLHKDRKNITSGKYVSRVKTPTKNGCEIVINGFRVEFSTMKDITKVHCSDGYSYV

SEQ ID NO: 3474 - protein, 334 aa, Anabaena sp.
MEGLMSKTLVLDTNKRPLDPIHPAQARQLLRNKKAAVFRQFPFTIILKESRPDSPVSPLRLKIDPGAKFTGMALVNDSTGEVVFAAELKHRGFVIRDALTSRRQLRRSRRARKTRYRQPRFLNRTRPNGWLAPSLQSRVENIKTWVKKLRKFAPIEAISQELVRFDMQLMANPDIQGKEYQQVTLAGYETKEYLLEKWNRQCAYCGVKDVPFQVEHIHPRAKGGSNSITNLTLSCEKCNTKKGTKDIKDFLKKDPTRLQKILKQAKRPLADAAAVNATRWALFRVLKDTGLPVETGSGGLTKFNRSQQNLAKTHWIDVKGTFLLGANHHPMTPN

SEQ ID NO: 3475 - protein, 406 aa, unidentified
MVYVQDINGKPMMPTTRHGKVRRLLKDKKAVVVNLCPFTIKLMYVTSDYKQEIVLGVDAGTKHVGLSATTKSKELYSSEVILRNDIVDLLSTRRELRRTRRNRLRYRKPRFDNRIKSRRPGWVAPSVKYKVDAHIRVVENVCSILPISRIVIEVAQFDTQKIKNPNISGKEYQEGDQLGFWNVREYVLARDGHKCQYCKGKSKDHVLNVHHIESRKTGGNSPSNLITLCETCHKEYHKGNIDLKIKRGSSLRDAAVMGIMKWRLYEELRSKYDRVSMTFGYVTKYNRINHDIEKSHVSDAFVISKNFNAIRLGYYYKVRLVRRHNRQIHKQKIPKGGIKRLNQSPFEVFGFRLFDRVMFENNCYFIFARRKTGSFNIRDINGKNKRDITYKKLKLSRCKRFMIEKS

SEQ ID NO: 3476 - protein, 413 aa, unidentified
MTSYAFVLDANGKQLAPAKEQKAWFLIRKKRAALVSKYPMVIQLKKEIPENEICKDEIRCGIDDGGLHVGIALVQKCKTKNKVVFKGTIEQRNDVKHLMEVRRSYRHYHRYHKRYRPARFDNRKSSKRKKRIAPSILQKRQAIIRVIHWLNKWINITNYWLEDVSIDIRALTDGYKPYRWQYQKSNRLDENIRKAAILRDGGKCMECGKLNCRLEVHHIKPRRRNGSDTLDNLITLCKSCHQKTEGQEELYMDRYFSLLKSSDHKNLNYAQHVMIGKEWLRKQLSSLGVLYLTNGGDTANKRIDWNIEKSHANDAVCITNLQPDTYDMKEWTVKPMRRQSKAKTDNVLGIKHRDLVEYTLKNGETHRGYVTALYPEQKAINFQSPTKHCKKVNARKCKLLWKYSKIYWFENAS

SEQ ID NO: 3477 - protein, 427 aa, Fischerella sp.
MSKVFVIDSEKRPLDPVHPAQARQLLRNKKAAVYRQFPFTLILKESWSEAPVQALRLKIDPGAKHTGIALVNDLTGEVVFAAELKHRGFAIRDSLTSRRQLRRSRRNRKTRYRQPRFLNRTRPNGWLAPSLQSRVENIKTWVEKLRRFAPIKAISQELVRFDMQLMRNPDIQGKEYQQGTLAGYETREFLLEKWNRQCAYCGIKDIPLQIEHIHPRAKGGSNSITNLTLSCDKCNTKKGTKDIKDFLKKDQSRLEKILKQAKRPLADAAAVNTTRFALLEVLKATGLPVETGSGGLTKFNRNQQKLTKTHWLDAACVGKSTPILNIKVIRPLLIAANGHGSRQSCRTDKLGFPNRHIPREKIHFNFQTGDIVKAIVTTGKKVGNYVGRVAIRSTGSFNISTKNGLVQGVSHKFCKRIHSKDGYSYAQ

SEQ ID NO: 3478 - protein, 443 aa, unidentified
LTKDENRPSGRTTGLRAEQAEPAGIRKGDTLKVFVLNMRGKPLMPCSPAKARHMLKAGKAVVVRRTPFTIKLTIATGETKQDVTLGVDAGARHVGISATTEKEEVFASEVALRQDITGLLADRLAFRRARRNRKTRYRAPRFNNRVRSKHKGWLAPSVENRIQAHISRIEAVCRLLPVTKIVIETASFDIQKIRNPEVEGTGYQQGDQLGFWNVREYVLFRDGHICQHCRGRSKDPILNVHHLESRKTGGDAPNNLITLCETCHKAYHAGKIKLKVKRGQSFRAEAFMGIMRWTLLDRVRKTHPELPVENTYGYLTKHKRIALGLPKTHCADAFCIAGNLKALRRGDFLFQQQTRKHNRQIHKCSILKGGVRKLNQAPFLVKGFRLFDKVRIGGQIGFVFGRRVRGTFNIRRLDKTVIGTDINCKKLSLLETRKTFLTELRKE

SEQ ID NO: 3479 - protein, 442 aa, Lactobacillus sp.
MKHENANRVFLLNRDGKPLMPCRPRKARLLLKSGKAFVVKKYPFTIQLKYGSYGYKQKVSLGVDTGQRHIGFAVVSQEKVLCQSEVELRQDVHKNLYTRKIYRGGRRNRKTRYRQSRFLNRVHGKRDGLWLPPSVKGKVNHNIAWIKRYLAVLPNPDLHVEVGKFDMAKMLNPQISGKQYQEGSLKDWKNYEYYVLARDEYTCQLCHKHGEGVKLVVHHIVYRSQGGTNRVDNLITLCTDCHTTKNHQPGGKLYKWMKVKKKVTKQLKGATFMNILRKRIMTAFPEASFQYGSQTYVDRKNLLLPKGHFMDAIAISGIKSVGQMPDTVTLISQFRKKKRSLHEATARKGRKQPNTSSKRNEKNTNHARGLWLNDYVRVIGNHAKGYVKGFKSNGYYVYLTNGLGNYVLNNGKNYINGQQCRLIMHNGNWQKAEQKLSLNEFK

SEQ ID NO: 3480 - protein, 452 aa, unidentified
MVFVLSSTNKKLMPTNEYRARKLLKSGKAAVYKHRPFTIILTKRKDGYTQPIEYCCDTGYQHIGISIKSQKHEYVNEERILLKDETERHNDCRKYRRTRRNKLRYRKARWSNRHNNLICKDGFAPSIRNKRDVHINLFKMYHEVCPITSATFEMGQFDTQLLKTVENGDNVPQGTDYQHGERYGYSTLREAVFARDNYKCVCCKKSTIKSGLILKMHHLGYRIGDRSNRMSNLATVCSNCHTSKNHQKGGKLYDLKPKLKTFKGATFMTMVRYDMFSKLKESAPDIKFNMTYGALTKLKRKDYSIKKSHSNDAYCMGVFHPKHRTDFKCYQKLRRNNRILSKFYDAKYIDLRDGTVKSGKQLSCNRTNRRELRNSNKNERIYRGPKISKGKTVVRKQHYQYRPYDFVWYKNVKYAVKGVQDKGKRIALQNHLPVSISKIKRSVHVNGWKLVI

SEQ ID NO: 3481 - protein, 425 aa, Nodularia sp.; identical to SEQ ID NO: 3165

SEQ ID NO: 3482 - protein, 419 aa, unidentified
MLVYVINRHGKPLMPCKPQKARKLLKEQKAKVVKRTPFTIQLLYGSSGYKQDVILGVDAGSKTIGLSATTENREVFSAEVELRTDIVDLLSTRRMLRRSRRNRKTRYRQSRFLNRKKPEGWVAPSVQNKIDTHIKVVKMVHDILSITKVIVEVAQFDIQKIKNPDILGEDYQQGEQLGFYNVREYVLFRDKHTCQYCNGKSKDPVLNVHHIESRKSGGNSPDNLITLCETCHRKYHKGEIELKVKRNSSFRDAASMNIMRWAFYNKLKELYSNVSLTFGYITKNVRIKHNLEKSHRIDARCISGNASTKESDCWYFFKQVRKQNRQLHKTNPKKGIRRENKAPGYVHGYQLFDKVEYLGRECFVFGRRSSGYFDLRTLDGEVVSRSASVGKLKLVERASSLLCERREASFLTALKHGVS

SEQ ID NO: 3483 - protein, 509 aa, unidentified
MPDTDYIYVLGVDGKPQMPTKRKRHVKRLLDTGKARIACHVPYTIQLLYENTSVLQPIMLAEDPGRTNIGMAVLSVKGELLMSAVVETRNREIVRLMNHRRGYRRASRNGERKARQRLAKRFSTMLKAGMLMRKLPKFAADKFITCHCIKNTESRFCNRKRPDGWLTPTSRQLVETHINLIHKIQKYLPVTDIAMEVNRFAFLSLENPSVSGADFQNGPLKGFDSLHDAVNELQHGKCLLCNKKIEHYHHIVPRSMNGSNTIGNIAGLCMECHDKVHKYASHQKKLNDVKKGLDKKYGALSALNQAVPFICKRLEAEFGKEHVSYCTGRDTAKMRNSFGFQKTKDNQMHETDAWCIGILALNRISDGVPDFGQTYCIRQFRRQDRSFIYAQTERVYKLDGVIVAKNRKKRTEQKTDSLEDWYNRQVVLYGKKEADFMRSRLTVIKSKRRYNDLTRVMPGAVFMYNGVCHVLSGRLTEGQYFRAVGDAKTNYPASKCKIIRHNEGLVFVC

SEQ ID NO: 3484 - protein, 428 aa, unidentified
LKVFVLNMRGQPLMPCSPAKARHLLKAGKAVVKRRTPFTIQLRIATGETKQNVTLGVDAGAKHVGLSAATEKEEVFASEVELRQDITGLLAARLSLRRDRRHRKTRYRAPRFLNRVRSKHKGWLAPSVENRIQAHMSRIDAVCRLLPVTKIVIETASFDIQKIKDPSVEGTDYQQGDQLGFWNVREYVLFRDGHVCQHCHGRSKDKILNVHHLESRQTGGDAPNNLITLCETCHKAYHAGKIKLKVKRGQSFRAEAFMGIMRWTLLDRVRKAHPGLPVENTYGYLTKHTRITHGLPKTHCVDAYCIAGNLKAVRRGVYLHQRQMRKHNRQIHKFTVLSKRLEDGTKIGYRKLNQSPYLVHGFRLFDKVRCLGQIGFIFGRRSSGYFDVRRLDGVKLSPSISWRKLTLLEKRSTYLTELRKQDGASSPV

SEQ ID NO: 3485 - protein, 443 aa, Caldicellulosiruptor bescii; identical to SEQ ID NO: 2385

SEQ ID NO: 3486 - protein, 428 aa, Sutterella sp.
LKVFVLNMRGRPLMPCSPAKARHLLKAGKAVVRRRTPFTIQLRIATGETKQSVILGVDAGAKHVGLSAATEKEEVFASEVELRQDITGLLAARFSLRRERRQRKTRYRAPRFLNRVRSKHNGWLPPSVENRIQAHLSRIDAICGLLPVTKIVIETASFDIQKIKHPDVEGTDYQQGDQLGFWNVREYVLFRDGHVCQHCHGHAKDKILNVHHLESRQTGGDAPNNLITLCETCHKACHAGKIKLKVKRGQSFREEAFMGIMRWTLLDRVRKAHPGLPVENTYGYLTKNTRITLGLPKAHCVDAYCIAGNLKAVRRGVYLHQRQVRKHNRQIHKCTVLSKTLKDGTKIGYRKLNQTPHLVKNFRLFDKVRCLGQTGFIFGRRSSGYFDVRRLDGVKISSCINYRKLTLLEKRSTCLTELRKEDGASSPV

SEQ ID NO: 3487 - protein, 782 aa, Streptomyces sp.
LFPQDCRINAGRLPERAAGPPTRPAPRPVHSVRSPRTRAAPRTAARPRSPPAHTSRSPRHPAHAHAPARSRTAPYRTPAPGAPAAHVRSRWPPPPPAAARWSTRRARPPRRRSPAGTAPPAPGRPPPTWRRPAPRRCARAATVRASRHPRRPLSEDHSCEQLYQPRRPPVRKSREIRNSGRLARDRRPSPIALSLASPAYTRREVIRSPVHGPSGDQPQSSGSEDQGGAPMTTFPAGEQTHQAVLPQQPALESVRADTPGSRDETAHGHPAAARGTGGEHGRGETDGHGTANRRRHAKSAARPAQAAANGSGDAPPDNRPYSGGTGNPRVLVLAADARPLMPCHPARARELLRKGRAVVARQVPFAIRLKDRTSAGSEVDGVQLRIDPGSHGTGLALTDEKKEISENGTATTVRRGLLSVELRHRGAQIQTCMRQRAGYRHRRRSANCRYRAPRAKNRARPDEWLPPSLRHRVDTVSSVATRLCRYAPVTEIHLEHTAFDTHALSAGGPLHGPEYAQGTLAGTTARAHLRARWGDACAYCGATGVPLNIEHVRPRSRLGSSRIANLVIACAPCNKAKGSRSVESFLADRPGLLARILGQTKASLRDAAAMNVIPCRLGTALEALGKPVHAWSGHLTKANRDAMGLPKTHTVDALSVGLLDHQGGDLIARVPDRVLIARATGRGSYARTTPDRHGFPRLRRSRTRQHFGYATGDLVAAVVPTGKWAGRWVGRISVRARGQHSLSTRNGRLDVSHLHLRLLQRGDGYGYGVRREGVASMPAKNS

SEQ ID NO: 3488 - protein, 469 aa, unidentified
MNVFVVGLNGCRLMPVSERKARLLLDDGKASVYRKVPFTIKLNYKTGSTTQPGYLGIDTGSQHIGVSVVRKDGTVLHKEEISLRDSMTKRKLLEAKASLRRGRRYRKTRYRHPKWRPKTKRVYCEVPDKKGRHWQKQKNTFTSKRPEGWLPPSLQSKTDHHIQWIKKLQNFLPEGYRLSIELGRFDPARMKDPEIHGELYQKGPQYDYENVRAYVLDRDRYTCQVCKKKGGKLHVHHILYRSQGASDNPQYMVTVCSDCHTTENHLPGGILYQWMQEQKKFTRGLRDATFMNLLRKRLMKTFTDAVFTYGNITKVDREKLKLSKNRGNDATAIALVRTGVTSVKDEEPVLYIQQVRRKRSLHEETPRKGRKEPNRTAARNSKNTKAVTVTKRRGGKKVSVTACLFDRVELNGKKGWITGFTGKACRIVDTEGNYVAATDKYTQVNISSIRILHHTGNWVTGLKRNVGKR

SEQ ID NO: 3489 - protein, 442 aa, Lactobacillus sp.
MKHENANRVFLLNKDGKPLMPCRPRKARLLLKSGKAFVVKKYPFTIQLKYGSYGYKQKVSLGVDTGQRHIGFAIVSQNKVLHQSEVELRQDVHKNLYTRKIYRRSKRNRKTRYRQARFLNRVHGKRDGLWLPPSIKGKVSHNIAWIKRYLAVLPNPDLHIEVGKFDMAKMVNPEISGKQYQEGSLKDWKNYEYYVLARDEYTCQLCHKHGEGVKLVVHHIVYRSQGGTDRVDNLITLCTNCHTTKNHQPGGKLYKWMKAKKKVTKQLKGATFMNILRKRIMTAFPEASFQYGSQTYVDRKNLLLPKGHFMDAIAISGIKSVGQLSDTVTMISQFRKKKRSLHEATARKGRKQPNTSSKRNEKNTKHARGLWLNDYVRVIGNHAKGYVKGFKSNGYYVYLTDGLGNYVLNNGKNYINGQQCRLIMHNGNWQKAEQKLSLYKFK

SEQ ID NO: 3490 - protein, 432 aa, unidentified; identical to SEQ ID NO: 3346

SEQ ID NO: 3491 - protein, 414 aa, Sutterella sp.
MPCSPAKARLLLKEKKAIVKRRTPFTIQLTIATGESKQPVTLGVDAGYKHVGLSASTEKAELYASEVELRQDVSDLLSARRALRQSRCNRKTRYRAPRFNNRLRTKRKGWLAPSVENRINAHLSRIEAVLRLLPVTKITVETASFDMQLLKNPDIAGKEYQEGEQLGFWNVREYVLFRDGHVCQHCYGRSKDPVLNVHHLESRRTGGDSPGNLITLCETCHKALHRGDITLKAKRGKSFRAEAFMGIMRWEVLNRLKVSHPELEVNNTYGYRTKHVRIANGIAKSHCADAFCIAGNLGAKRLGEFFFQKQTRRNNRQIHKLSILKHGLRKRNQAPFEIKGFRLFDKVVCKGEEGFIFGRRSSGYFDVRKLDGTRISAGISYKTLHLLEKRQTYLTEIRKEEALPPLPEGRDLRA

SEQ ID NO: 3492 - protein, 431 aa, Anabaena sp.
MSKVFVLDTKKRPLDPINPAQARQLLRNKKAAIFRQFPFTIILKKSCPDSPVSSLRLKIDPGAKFTGMALINDSTGEVVFAAELKHRGFAIRDALTSRSQLRRSRRARKTRYRQPRFLNRTRPERWLAPSLQSRVENIKTWVERLRKLAPIEDISQELVRFDMQLMANPDIQGKEYQQGTLAGYESREYLLEKWGRQCAYCGVKDVPFQVEHIHPRAKGGSNSITNLTLSCEKCNTKKGTKDIKDFLKKDPLKLEKILKQAKRPLADAAAVNTTRLALLFVVKATGLPVETGSGGLTKFNRSQQNLEKMHWIDAACVGQSTPILNIKGVKPLLITANGHGTRQSCRTDKYGFPSRYVPRFKFVNGFQTGDIVKAVVTKGKKIGAYIGRVAVRTSGSFNISTISGLIQGISYKCCKSIHKKDGYEYGKSKIC

SEQ ID NO: 3493 - protein, 512 aa, unidentified
MSTVYVLHKDGKPLMPTTRGGHVRHLLKEQKARVVKTKPFTIQLLYETDNVVQPLYLGIDPGRTNIGVAVVKANGTAVFTAHLETRNKEIPKLMKKRKDSRRARRTNGRRSRRQRRAKANGTISKKCVKQTTAQNGSVSKRAKEIGVIKRHLPGCEKDVLCIGIKNKEAKFNNRTRPEGWLTPTANQLLQTHVNLVKKIQKFLPISDVVLEVNKFAFMQLDNPNIQKWQYQQGPLYQKANLEEAVSEMQEHHCLFCKKKIDHYHHVVPQHKNGSNTIDNIVGLCTKHHDLVHKETAWQEKLAKKKTGLNKKYGALSVLNQIIPALTKGLNSLFPKHFFVTTGKSTYDYRAAHDVCKDHWLDAYCIACSVLPNDVCDSNINSHVPYELKQFRRHDRRALHKENMNRVYTLNGKKVATNRHKAIEQTTDSLEEFRQRQPNDVCKLKVKEHHPEYRNPKRSFPGCVFLVGKQTHVMQGTSGSHNGKADGYYNTNGNSYSSGKCKFVAKNEGIVFA

SEQ ID NO: 3494 - protein, 425 aa, Nodularia sp.; identical to SEQ ID NO: 3165

SEQ ID NO: 3495 - protein, 456 aa, unidentified
MSTCVCVLNNSGERLMPTIRLGKVRHLLKDGKAKIVKHHPFTIQLLYDSKTNTQPIEICEDVGYNYIGISVKSESHEYVSAQYDTLQDEKEHHDDCRKMRRARRNRLRYRKPRFDNRKRSEGWLAPSLEHKKQLNISLIERYVSVTPITRATVEVGSFDTILLQAIQKGKSKPEGVDYQKGARYNLATLREAVFYRDNYTCQVCGRKIADGAILHMHHMFYWKGRHGYQLDELVTACEKCHTPANHQKGGKLFGFGEDKEFANLSGAAFMNAVRWQIVDALHATYGKEFVTITYGAMTKEKRIILGIEKTHNNDAYAMGDYHPVHRCVFRHYQKRRRNNRVLEKFYDATYIDARTGNKAKGKELFNGRINRNHKKDSENFHKYRSKKVSKGRRSIRRQRYAIQPYDTVRLEGKTYITSGCHNKGTRLLIPANGKSKSVAISKVQVVCHAGAWIQII

SEQ ID NO: 3496 - protein, 412 aa, unidentified; identical to SEQ ID NO: 3373

SEQ ID NO: 3497 - protein, 515 aa, unidentified
MIPNERRHLMPYIYVIGMDGKPQMPTKRRRHVQKLLDTGKARITERVPFTIQLLYDNDPVLQPVILAEDPGRTNIGVATLDLKGNLLLSAAVETRNKEIAKLMEKRRQCRRASRNGERKARQRLAKKYGTMIRGGMRMRKLPQYAADAFITCKVIRNTQARFCNRRRLDGWLTPSARHLVQTHINLVHKVQKYLPVTDVAIEVNRFAFMQLEDPAICGVDFQTGPLKGYDDRDAAVYDLQDGKCLMCKHEITQYHHIVPRSRNGSNTIGNIAGLCDQCHDRVHKDADFAEQMKEKKEGMDKKYGALSVLNQAIPFICKQLETEFGRGHVHYCTGRETSLVRQSTGYQKTRKNQLHEVDAWCIGALALAELPENVPDFKEIHLIRQFRRQDRSLVNAQTERVYKLGGKMVAKNRKKRTGQEIYALEDWYNRQVETYGKQEADCMRSRLKVTKSRRRYNNPNRMMPGAVFLYEGVRYVMRGQHSKGAYLQAVGMENRDFPVRKCKILTRNTGLVFVS

SEQ ID NO: 3498 - protein, 406 aa, unidentified
MVYVQGIDGSPLMPTTRHGKVRRLLKSKKAAVVNLCPFTIRLLYDTTSYNQEIVLGVDAGTKHVGLSATTKSKELYASEVILRSDVVDLLSTRRELRRIRRNRLRYRKPRFMNRIKSKKRGWVAPSVRQKIDSHIRIIGFVYSILPVSKLIIEVAQFDTQKIKNPEISGKEYQKGEQLGFWNVREYVLARDNHKCQHCKGKSKDPILNVHHIESRKTGGNSPSNLITLCETCHKEFHKGNIKLKVKRSDSLRDAAVMGIMKWKLYDKLKSLYPNVKMTFGYITKYNRINHGIEKSHVSDAFVISRNFDSERLGYYYKRKLVRRHNRQIHKMKIMKGGIRKMNQAPFKVFGFRLFDKVIFQNKVYFIYARRVRGVFDIRDINKENKKDIYYKKLRYISHGLISVEID

SEQ ID NO: 3499 - protein, 427 aa, Nostoc sp.; identical to SEQ ID NO: 3237

SEQ ID NO: 3500 - protein, 415 aa, unidentified
MENRIEYCFVVDKNNRPLTPTKVNKGWYLVRKSRAKLKSKYPMVIQLEKEVKSDEDDESHIVCGIDDGSAHVGLAIVQKCPTKNKVVFKGTIEQRQDVKHLMDVRRGHRRYHRYHKRYRQARFNNRSSSKRTCRLAPSIKQKKDAILRVLYQLNKWVNIQEYHLEDVCIDIRTLTDDYKPYRWQYQKSNRLDENLRKATILRDECRCQECGKSNCVLEVHHIRARKYGGADTIGNLITLCSGCHQKTEGRERDFEDRYFNMIKSKPKRFDYAMHVMQGKTYLREKISELGSLHLTNGGETANKRIEWNMEKSHGNDAICVTDCIPDNCDVKEWIIKPMRRKSKAKTNNLLGIRHRDLVSYTYKNGETHTGYVTALYPEQLVLNFQSKTKHCKKVNARKCRLLWKFNKIYWLEQCV

SEQ ID NO: 3501 - protein, 429 aa, unidentified
MAVFVIDRQGRPLMPCTEKRARLLLARARARVHRVVPFVIRLTDRRAQDSSFQSLRLKLDPGSQTTGIALVQEKADGIAVLNLMELVHRGRQISQALRQRRAFRRRRRGANLRYRAPRFNNRTRAAGWLAPSLQHRVDSTMSWVWRVMRWAPVSALSMELVRFDMQAMQNPDISGVGYQQGELFGYEVREYLLEKWGRKCAYCDAAGVPLQIEHILARARGGSNRVSNLTLGCAPCNIGKGARDVREFVKDEARLRRILSKAKAPLRDAAAVNSTRWALLNALKETELALETASGGRTKWNRARLEIAKAHALDAVCVGEVKAVCGWPRPTLELRCTGRDSYQRTRLTAQGFARGYLTRKKRAHGFQTGDRVRAIVPKGKKAGVHVGRVAVRASGSFNIQAPTGVVQGIAHRHCTMVLRADGLDIQLCL

(The sequence listing continues in the following parts.)

1. An engineered chimeric IscB composition comprising:
a) an IscB polypeptide comprising one or more insertions of a heterologous polypeptide, and optionally one or more modified amino acids, that increases specificity or activity of the chimeric IscB polypeptide relative to a wild-type; and
b) an ωRNA molecule comprising a scaffold and a reprogrammable spacer sequence, the ωRNA molecule capable of forming a complex with the IscB polypeptide and directing sequence-specific binding of the IscB polypeptide to a target polynucleotide.

2. The IscB composition of claim 1, wherein the insertion is a Rec domain, or functional fragment thereof,
optionally wherein the Rec domain is from a Type II Cas polypeptide, Type II-D Cas, or Cas9;
optionally wherein the Cas9 is derived from Francisella novicida (FnoCas9), Neisseria meningitidis (NmeCas91, Staphylococcus aureus (SaCas91, Streptococcus pyogenes (SpCas9), Streptococcus thermophilus (StCas91, Acidothermus cellulolyticus (AceCas9), Campylobacter jejuni (CjeCas9) or a combination thereof;
optionally wherein the Rec domain is inserted between amino acids 153-160 of RD8 117 IscB polypeptide of Table 1, or an analogous position of another IscB polypeptide;
optionally wherein the ωRNA comprises a deletion that reduces steric interference with the inserted Rec domain,
optionally wherein the deletion is in the PK-loop of the ωRNA and,
optionally wherein the deletion comprises 1 to 25 or 1 to 21 nucleotides of Rd8 117 reference ωRNA or Table 1 or an analogous position in another ωRNA.

3.-10. (canceled)

11. The IscB composition of claim 1, wherein the insertion is a protein capable of binding to RNA, DNA, or both:
optionally wherein the insertion is a nuclease, or a functional fragment thereof;
optionally wherein the insertion is an endonuclease, exonuclease, or functional fragment thereof;
optionally wherein the insertion is an endonuclease, exonuclease, or functional fragment thereof,
optionally wherein the endonuclease is a Ribonuclease (RNase), deoxyribonuclease (DNase), or fragment thereof;
optionally wherein the insertion is hybrid binding domain (HBD);
optionally wherein the insertion is a RuvC domain or portion thereof,
optionally, wherein the RuvC domain comprises a Cas9 RuvC domain/region, subdomain/subregion, or portion thereof; and
optionally wherein the insertion is a nucleotide deaminase.

12.-17. (canceled)

18. The IscB composition of claim 1, wherein the insertion is a TAM interacting (TI) or PAM interacting (PI) domain, or functional fragment thereof;
optionally wherein the domain is an NGG PI or TI domain, or functional fragment thereof; and
optionally wherein TAM determining region comprises one or more amino acid substitutions,
optionally wherein the one or more substitutions is an insertion in a WED/adaptor stabilizer region, Tudor domain, Tudor Lance domain, or a combination thereof,
optionally wherein the insertion preserves RNA interaction with the TAM determining region,
optionally wherein the TI domain, PI domain, or functional fragment thereof is inserted between amino acids 365-499 of Rd8_117 polypeptide of Table 1, or an analogous position of another IscB polypeptide, and
optionally wherein the insertion comprises one or more amino acid positions from 380-735 from SEQ ID NO: 2365 one or more amino acid positions 556-609 from cA2 ProCas9-2, one or more amino acid positions 356-420 from IscB_Rd8_149, one or more amino acid positions 386-464 from IscB_Rd4_7, one or more amino acid positions 856-924 from Cas9_971, one or more amino acid positions 569-751 from Cas9_1079_3, one or more amino acid positions from ChlorIscB, one or more amino acid positions 488-512 from SEQ ID NO: 2367, one or more amino acid positions 739-765 from SEQ ID NO: 2365, one or more amino acid positions 407-431 from IscB_Rd8_127, one or more amino acid positions 404-430 from CRISPR IscB 00644, one or more amino acid positions 376-482 from IscB_large 28, one or more amino acid positions 356-488 from IscB_Rd8_149, one or more amino acid positions 376_482 from IscB_Rd8_75, one or more amino acid positions 374-495 from IscB_Rd8_151, one or more amino acid positions 376-477 from IscB_Rd8_23, one or more amino acid positions 376-477 from IscB_Rd8_24, one or more amino acid positions 376-486 from IscB_Rd8_118, one or more amino acid positions 374-495 from IscB_Rd8_151, and/or one or more amino acid positions 376-486 amino acids from IscB_Rd8_118, and
optionally wherein the TI domain, PI domain, or functional fragment thereof is from a Type II Cas polypeptide or wherein the TI domain or functional fragment thereof is from an IscB polypeptide,
optionally wherein the insertion replaces amino acids 365-499, 369-499, 462-486 (Lance), 450-486 (Tudor), or 376-383, 436-448, and 462-486 (Lance_TIL) of the TI domain of Rd8_117 polypeptide of Table 1, or an analogous position of another IscB polypeptide, and
optionally wherein the TAM of the wild-type IscB polypeptide is retained or wherein the TAM is modified.

19.-28. (canceled)

29. The engineered IscB composition of claim 1, wherein one or more nucleotides in a pseudoknot nexus of the ωRNA is modified and/or inserted or wherein one or more nucleotides in a pseudoknot region of the ωRNA are modified and/or inserted and wherein the nexus stem retains base pairing:
optionally wherein one or more nucleotides in a pseudoknot region of the ωRNA are modified and/or inserted and wherein the pseudoknot retains its structure relative to a wild-type IscB; and
optionally wherein the pseudoknot comprises a peptide nucleic acid (PNA),
optionally wherein the pseudoknot region of the ωRNA retains its structure by no less than 50%, no less than 55%, no less than 60%, no less than 65%, no less than 70%, no less than 75%, no less than 80%, no less than 85%, no less than 90%, no less than 95% relative to a wild-type IscB,
optionally wherein one or more nucleotides in a nexus stem of the ωRNA that base pair to the one or more nucleotides in the pseudoknot nexus is modified and/or inserted, and
optionally wherein a base pair comprising a nucleotide in the pseudoknot nexus and a nucleotide in the nexus stem is substituted with a complementary base pair.

30.-35. (canceled)

36. The engineered IscB of claim 1, wherein the 3′-end of the ωRNA is truncated, optionally wherein the 3′-end of the ωRNA is truncated by 1, 2, 3, 4, 5, 6, 7, 8, 9, 10, 11, 12, 13, 14, 15, 16, 17, 18, 19, 20, 21, 22, 23, 24, or 25 nucleotides.

37. (canceled)

38. The engineered IscB of claim 1, wherein a RNA supplied in trans is bound to a 3′-end of the ωRNA.

39. The engineered IscB of claim 1, wherein one or more amino acids in contact with a nucleotide are substituted or removed, optionally wherein one or more amino acids in contact with the ωRNA are substituted or removed.

40. (canceled)

41. The engineered IscB of claim 1, wherein one or more amino acids on the surface of the engineered IscB are substituted or removed,
optionally wherein the one or more amino acids on the surface of the engineered IscB are substituted to have a different charge; and
optionally wherein the one or more amino acids on the surface of the engineered IscB are removed or substituted to increase or decrease the overall charge of the protein surface.

42.-43. (canceled)

44. The engineered IscB of claim 1, wherein the surface charge of the engineered IscB is more neutral relative to the wildtype.

45. The engineered IscB composition of claim 1, further comprising a nucleotide deaminase;
optionally wherein the nucleotide deaminase is an adenosine deaminase or cytidine deaminase,
optionally wherein the cytidine deaminase is apolipoprotein B mRNA-editing enzyme, catalytic polypeptide (APOBEC), an activation-induced deaminase (AID), a cytidine deaminase 1 (CDA1), or cytosine deaminase acting on RNA (CDAR);
optionally wherein the adenosine deaminase is ADAR or TadA,
optionally wherein the adenosine deaminase is an ADAR and the reprogrammable spacer sequence of the ωRNA molecule comprises one or more mismatches to the target polynucleotide;
optionally wherein the nucleotide deaminase is inserted in the middle of the IscB or fused at the N terminus or C-terminus of the IscB polypeptide.

46.-51. (canceled)

52. The IscB composition of claim 1, wherein the C-terminus is engineered for base-editing, optionally wherein the insertion is a transposase, and optionally wherein the transposase is a TnpA.

53.-54. (canceled)

55. The engineered IscB of claim 1, further comprising a functional domain,
optionally wherein the functional domain comprises a base editing system or fragment thereof;
optionally wherein the functional domain comprises a prime editing system or fragment thereof;
optionally wherein the functional domain comprises an epigenetic editing system or fragment thereof; and
optionally wherein the functional domain is inserted at a junction.

56.-59. (canceled)

60. The engineered IscB of claim 1, further comprising one or more mutations of Table 3 or Table 4.

61. A method of modifying a target nucleotide, optionally within a cell, comprising contacting the target nucleotide or the cell with the composition of claim 1.

62. A vector system comprising one or more vectors encoding the IscB polypeptide and the ωRNA molecule of claim 1.

63. One or more polynucleotides encoding one or more components of the composition of claim 1.

64. One or more vectors encoding the one or more polynucleotides of claim 63.

65. An engineered cell comprising the composition of claim 1.
